United States Patent Application Publication US 2013/0332133 A1 - sequence listing, part 2

SEQ ID NO: 30867 - protein, 8 aa, Artificial sequence
  Protein classification predicting sequence
QGLLDMLT

SEQ ID NO: 30868 - protein, 7 aa, Artificial sequence
  Protein classification predicting sequence
VAIVGDI

SEQ ID NO: 30869 - protein, 6 aa, Artificial sequence
  Protein classification predicting sequence
VMHPGP

SEQ ID NO: 30870 - protein, 15 aa, Artificial sequence
  Protein classification predicting sequence
HEHPTQALLDALTIR

SEQ ID NO: 30871 - protein, 9 aa, Artificial sequence
  Protein classification predicting sequence
DVLYVTRIQ

SEQ ID NO: 30872 - protein, 9 aa, Artificial sequence
  Protein classification predicting sequence
HPTQTLLDL

SEQ ID NO: 30873 - protein, 7 aa, Artificial sequence
  Protein classification predicting sequence
PELDILY

SEQ ID NO: 30874 - protein, 10 aa, Artificial sequence
  Protein classification predicting sequence
MSLRTQTERH

SEQ ID NO: 30875 - protein, 7 aa, Artificial sequence
  Protein classification predicting sequence
RTHTSFE

SEQ ID NO: 30876 - protein, 10 aa, Artificial sequence
  Protein classification predicting sequence
GDGSGQHPSQ

SEQ ID NO: 30877 - protein, 6 aa, Artificial sequence
  Protein classification predicting sequence
HPGPIN

SEQ ID NO: 30878 - protein, 8 aa, Artificial sequence
  Protein classification predicting sequence
ALGVDICV

SEQ ID NO: 30879 - protein, 9 aa, Artificial sequence
  Protein classification predicting sequence
VEIADSLVE

SEQ ID NO: 30880 - protein, 10 aa, Artificial sequence
  Protein classification predicting sequence
MLLRVQHERH

SEQ ID NO: 30881 - protein, 9 aa, Artificial sequence
  Protein classification predicting sequence
MLLRVQHER

SEQ ID NO: 30882 - protein, 7 aa, Artificial sequence
  Protein classification predicting sequence
PVNRGVE

SEQ ID NO: 30883 - protein, 6 aa, Artificial sequence
  Protein classification predicting sequence
RVQKER

SEQ ID NO: 30884 - protein, 7 aa, Artificial sequence
  Protein classification predicting sequence
DVVMMLR

SEQ ID NO: 30885 - protein, 8 aa, Artificial sequence
  Protein classification predicting sequence
GDLKYGRT

SEQ ID NO: 30886 - protein, 8 aa, Artificial sequence
  Protein classification predicting sequence
FFEPSTRT

SEQ ID NO: 30887 - protein, 7 aa, Artificial sequence
  Protein classification predicting sequence
VDATPHA

SEQ ID NO: 30888 - protein, 13 aa, Artificial sequence
  Protein classification predicting sequence
FFENSTRTRTTFE

SEQ ID NO: 30889 - protein, 11 aa, Artificial sequence
  Protein classification predicting sequence
TSKGESLLDTI

SEQ ID NO: 30890 - protein, 7 aa, Artificial sequence
  Protein classification predicting sequence
DMFVVRH

SEQ ID NO: 30891 - protein, 7 aa, Artificial sequence
  Protein classification predicting sequence
TIRRAKG

SEQ ID NO: 30892 - protein, 7 aa, Artificial sequence
  Protein classification predicting sequence
IVMHPGP

SEQ ID NO: 30893 - protein, 13 aa, Artificial sequence
  Protein classification predicting sequence
PSTRTRLSFESAM

SEQ ID NO: 30894 - protein, 7 aa, Artificial sequence
  Protein classification predicting sequence
NQHPTQT

SEQ ID NO: 30895 - protein, 13 aa, Artificial sequence
  Protein classification predicting sequence
GDLKYGRTVHSLA

SEQ ID NO: 30896 - protein, 40 aa, Artificial sequence
  Protein classification predicting sequence
AGSSVGKGESLRDTALTLRAAGADALIIRHPASGAAHLLA

SEQ ID NO: 30897 - protein, 8 aa, Artificial sequence
  Protein classification predicting sequence
KGETLYDT

SEQ ID NO: 30898 - protein, 7 aa, Artificial sequence
  Protein classification predicting sequence
LAMPDYI

SEQ ID NO: 30899 - protein, 11 aa, Artificial sequence
  Protein classification predicting sequence
TNGVYARMAIL

SEQ ID NO: 30900 - protein, 23 aa, Artificial sequence
  Protein classification predicting sequence
STRTRTTFEIAAKRLSADVINLN

SEQ ID NO: 30901 - protein, 15 aa, Artificial sequence
  Protein classification predicting sequence
VMHPGPMNRGVEIDS

SEQ ID NO: 30902 - protein, 9 aa, Artificial sequence
  Protein classification predicting sequence
FYENSTRTR

SEQ ID NO: 30903 - protein, 28 aa, Artificial sequence
  Protein classification predicting sequence
FYENSTRTRVSFEVAGKWMSADVINVSA

SEQ ID NO: 30904 - protein, 8 aa, Artificial sequence
  Protein classification predicting sequence
KGESLRDT

SEQ ID NO: 30905 - protein, 21 aa, Artificial sequence
  Protein classification predicting sequence
ADAVLMLRVQAERMNGGFFPS

SEQ ID NO: 30906 - protein, 10 aa, Artificial sequence
  Protein classification predicting sequence
MLLRIQHERH

SEQ ID NO: 30907 - protein, 7 aa, Artificial sequence
  Protein classification predicting sequence
PQPELLK

SEQ ID NO: 30908 - protein, 7 aa, Artificial sequence
  Protein classification predicting sequence
RLASEFS

SEQ ID NO: 30909 - protein, 6 aa, Artificial sequence
  Protein classification predicting sequence
FYFIAP

SEQ ID NO: 30910 - protein, 12 aa, Artificial sequence
  Protein classification predicting sequence
DILYMTRVQKER

SEQ ID NO: 30911 - protein, 32 aa, Artificial sequence
  Protein classification predicting sequence
DILYMTRVQKERLDPSEYANVKAQFVLRASDL

SEQ ID NO: 30912 - protein, 6 aa, Artificial sequence
  Protein classification predicting sequence
DVDKTP

SEQ ID NO: 30913 - protein, 17 aa, Artificial sequence
  Protein classification predicting sequence
VGDLKYGRTVHSLTQAL

SEQ ID NO: 30914 - protein, 10 aa, Artificial sequence
  Protein classification predicting sequence
LYMTRVQKER

SEQ ID NO: 30915 - protein, 18 aa, Artificial sequence
  Protein classification predicting sequence
LYMTRVQKERFDESEYAH

SEQ ID NO: 30916 - protein, 7 aa, Artificial sequence
  Protein classification predicting sequence
VDKTKHA

SEQ ID NO: 30917 - protein, 7 aa, Artificial sequence
  Protein classification predicting sequence
ISINDLS

SEQ ID NO: 30918 - protein, 8 aa, Artificial sequence
  Protein classification predicting sequence
KGETLADT

SEQ ID NO: 30919 - protein, 7 aa, Artificial sequence
  Protein classification predicting sequence
LRVQHER

SEQ ID NO: 30920 - protein, 6 aa, Artificial sequence
  Protein classification predicting sequence
SFELAA

SEQ ID NO: 30921 - protein, 8 aa, Artificial sequence
  Protein classification predicting sequence
LRLQKERM

SEQ ID NO: 30922 - protein, 9 aa, Artificial sequence
  Protein classification predicting sequence
LGCPDIRVI

SEQ ID NO: 30923 - protein, 10 aa, Artificial sequence
  Protein classification predicting sequence
GGLLPSEGEF

SEQ ID NO: 30924 - protein, 12 aa, Artificial sequence
  Protein classification predicting sequence
AKPDAIVMHPGP

SEQ ID NO: 30925 - protein, 8 aa, Artificial sequence
  Protein classification predicting sequence
SVILNQVT

SEQ ID NO: 30926 - protein, 12 aa, Artificial sequence
  Protein classification predicting sequence
KRPLQLNDQGQL

SEQ ID NO: 30927 - protein, 60 aa, Artificial sequence
  Protein classification predicting sequence
RELLTEILDTADSFLEVGARAVKKVPLLRGKTVCNVFFENSTRTRTTFELAAQRLSADVI

SEQ ID NO: 30928 - protein, 18 aa, Artificial sequence
  Protein classification predicting sequence
DTLRNLEAMAADMFVVRH

SEQ ID NO: 30929 - protein, 26 aa, Artificial sequence
  Protein classification predicting sequence
AKPDAIVMHPGPINRGVEIESAVADG

SEQ ID NO: 30930 - protein, 7 aa, Artificial sequence
  Protein classification predicting sequence
RLSADVI

SEQ ID NO: 30931 - protein, 26 aa, Artificial sequence
  Protein classification predicting sequence
INGGDGRHAHPTQGMLDMLTIRRHKG

SEQ ID NO: 30932 - protein, 9 aa, Artificial sequence
  Protein classification predicting sequence
STRTRTTFE

SEQ ID NO: 30933 - protein, 14 aa, Artificial sequence
  Protein classification predicting sequence
HAHPTQGMLDMLTI

SEQ ID NO: 30934 - protein, 8 aa, Artificial sequence
  Protein classification predicting sequence
HSRVARSD

SEQ ID NO: 30935 - protein, 7 aa, Artificial sequence
  Protein classification predicting sequence
RIQKERF

SEQ ID NO: 30936 - protein, 7 aa, Artificial sequence
  Protein classification predicting sequence
GSYQVNL

SEQ ID NO: 30937 - protein, 18 aa, Artificial sequence
  Protein classification predicting sequence
WKGRDVISIRDFSKEDIE

SEQ ID NO: 30938 - protein, 7 aa, Artificial sequence
  Protein classification predicting sequence
EGAARLA

SEQ ID NO: 30939 - protein, 15 aa, Artificial sequence
  Protein classification predicting sequence
VAIVGDILHSRVARS

SEQ ID NO: 30940 - protein, 7 aa, Artificial sequence
  Protein classification predicting sequence
VIMLRLQ

SEQ ID NO: 30941 - protein, 6 aa, Artificial sequence
  Protein classification predicting sequence
EASTRT

SEQ ID NO: 30942 - protein, 10 aa, Artificial sequence
  Protein classification predicting sequence
MMLRLQRERM

SEQ ID NO: 30943 - protein, 9 aa, Artificial sequence
  Protein classification predicting sequence
FVPSVREYF

SEQ ID NO: 30944 - protein, 8 aa, Artificial sequence
  Protein classification predicting sequence
LSYAKPDA

SEQ ID NO: 30945 - protein, 7 aa, Artificial sequence
  Protein classification predicting sequence
SIEEVMA

SEQ ID NO: 30946 - protein, 35 aa, Artificial sequence
  Protein classification predicting sequence
VPVLNAGDGSNQHPTQTLLDLFTIQETQGRLDNLH

SEQ ID NO: 30947 - protein, 26 aa, Artificial sequence
  Protein classification predicting sequence
GNRFYFIAPDALAMPQYILDMLDEKG

SEQ ID NO: 30948 - protein, 44 aa, Artificial sequence
  Protein classification predicting sequence
LKANPQPELLKHKVIASCFFEASTRTRLSFETSMHRLGASVVGF

SEQ ID NO: 30949 - protein, 14 aa, Artificial sequence
  Protein classification predicting sequence
EFSGNVPVLNAGDG

SEQ ID NO: 30950 - protein, 13 aa, Artificial sequence
  Protein classification predicting sequence
DEIATDVDKTPHA

SEQ ID NO: 30951 - protein, 12 aa, Artificial sequence
  Protein classification predicting sequence
YFQQAGNGIFAR

SEQ ID NO: 30952 - protein, 9 aa, Artificial sequence
  Protein classification predicting sequence
HLLSMEHLS

SEQ ID NO: 30953 - protein, 7 aa, Artificial sequence
  Protein classification predicting sequence
QFKSGER

SEQ ID NO: 30954 - protein, 8 aa, Artificial sequence
  Protein classification predicting sequence
FETSTSSV

SEQ ID NO: 30955 - protein, 16 aa, Artificial sequence
  Protein classification predicting sequence
KGESLYDTCKTLESIG

SEQ ID NO: 30956 - protein, 7 aa, Artificial sequence
  Protein classification predicting sequence
DLLVIRH

SEQ ID NO: 30957 - protein, 21 aa, Artificial sequence
  Protein classification predicting sequence
NIPIANAGDGSGQHPTQSLLD

SEQ ID NO: 30958 - protein, 19 aa, Artificial sequence
  Protein classification predicting sequence
LICGDIKNSRVARSNYHSL

SEQ ID NO: 30959 - protein, 14 aa, Artificial sequence
  Protein classification predicting sequence
SFEMAELKLGLKTI

SEQ ID NO: 30960 - protein, 7 aa, Artificial sequence
  Protein classification predicting sequence
TIYEEFG

SEQ ID NO: 30961 - protein, 9 aa, Artificial sequence
  Protein classification predicting sequence
RHGASGAPY

SEQ ID NO: 30962 - protein, 17 aa, Artificial sequence
  Protein classification predicting sequence
STRTHKSFEVAEKKLGL

SEQ ID NO: 30963 - protein, 8 aa, Artificial sequence
  Protein classification predicting sequence
LKIAIAGD

SEQ ID NO: 30964 - protein, 6 aa, Artificial sequence
  Protein classification predicting sequence
LVEAPK

SEQ ID NO: 30965 - protein, 7 aa, Artificial sequence
  Protein classification predicting sequence
LTMSALG

SEQ ID NO: 30966 - protein, 7 aa, Artificial sequence
  Protein classification predicting sequence
NRDVEIA

SEQ ID NO: 30967 - protein, 28 aa, Artificial sequence
  Protein classification predicting sequence
AIIMHPAPVNRDVEIADSLVEAPKARIV

SEQ ID NO: 30968 - protein, 16 aa, Artificial sequence
  Protein classification predicting sequence
NGVFVRMAIIEAILNG

SEQ ID NO: 30969 - protein, 13 aa, Artificial sequence
  Protein classification predicting sequence
DVLYVTRIQKERF

SEQ ID NO: 30970 - protein, 6 aa, Artificial sequence
  Protein classification predicting sequence
HEHPTQ

SEQ ID NO: 30971 - protein, 6 aa, Artificial sequence
  Protein classification predicting sequence
EPSTRT

SEQ ID NO: 30972 - protein, 8 aa, Artificial sequence
  Protein classification predicting sequence
AAKRLSAD

SEQ ID NO: 30973 - protein, 8 aa, Artificial sequence
  Protein classification predicting sequence
LRLQRERM

SEQ ID NO: 30974 - protein, 6 aa, Artificial sequence
  Protein classification predicting sequence
VLHPGP

SEQ ID NO: 30975 - protein, 9 aa, Artificial sequence
  Protein classification predicting sequence
KGETILDTA

SEQ ID NO: 30976 - protein, 7 aa, Artificial sequence
  Protein classification predicting sequence
GVAIRMA

SEQ ID NO: 30977 - protein, 6 aa, Artificial sequence
  Protein classification predicting sequence
GRTVHS

SEQ ID NO: 30978 - protein, 7 aa, Artificial sequence
  Protein classification predicting sequence
DTIRTVE

SEQ ID NO: 30979 - protein, 7 aa, Artificial sequence
  Protein classification predicting sequence
AAYFRQA

SEQ ID NO: 30980 - protein, 27 aa, Artificial sequence
  Protein classification predicting sequence
KVVASCFFEPSTRTRLSFETAIQRIGG

SEQ ID NO: 30981 - protein, 11 aa, Artificial sequence
  Protein classification predicting sequence
STRTRLSFETA

SEQ ID NO: 30982 - protein, 6 aa, Artificial sequence
  Protein classification predicting sequence
ASCFFE

SEQ ID NO: 30983 - protein, 13 aa, Artificial sequence
  Protein classification predicting sequence
VMRHPQEGAARLA

SEQ ID NO: 30984 - protein, 20 aa, Artificial sequence
  Protein classification predicting sequence
VGDLKYGRTVHSLTQALAKF

SEQ ID NO: 30985 - protein, 31 aa, Artificial sequence
  Protein classification predicting sequence
IPELDILYMTRVQKERFDESEYAHIKSAYIL

SEQ ID NO: 30986 - protein, 6 aa, Artificial sequence
  Protein classification predicting sequence
NGVYAR

SEQ ID NO: 30987 - protein, 8 aa, Artificial sequence
  Protein classification predicting sequence
APDALAMP

SEQ ID NO: 30988 - protein, 9 aa, Artificial sequence
  Protein classification predicting sequence
ELELIVKTA

SEQ ID NO: 30989 - protein, 8 aa, Artificial sequence
  Protein classification predicting sequence
ALLALVLN

SEQ ID NO: 30990 - protein, 10 aa, Artificial sequence
  Protein classification predicting sequence
GFSDSSNTSL

SEQ ID NO: 30991 - protein, 8 aa, Artificial sequence
  Protein classification predicting sequence
PVINAGDG

SEQ ID NO: 30992 - protein, 7 aa, Artificial sequence
  Protein classification predicting sequence
TRIQKER

SEQ ID NO: 30993 - protein, 7 aa, Artificial sequence
  Protein classification predicting sequence
LVAPPTL

SEQ ID NO: 30994 - protein, 19 aa, Artificial sequence
  Protein classification predicting sequence
SFHLAAQRLGADVLNFDAS

SEQ ID NO: 30995 - protein, 7 aa, Artificial sequence
  Protein classification predicting sequence
SSTSKGE

SEQ ID NO: 30996 - protein, 14 aa, Artificial sequence
  Protein classification predicting sequence
DTLKNLEAMGVRGF

SEQ ID NO: 30997 - protein, 10 aa, Artificial sequence
  Protein classification predicting sequence
LHALRTLGAG

SEQ ID NO: 30998 - protein, 20 aa, Artificial sequence
  Protein classification predicting sequence
LMMLRLQRERMEEGLVPSLE

SEQ ID NO: 30999 - protein, 20 aa, Artificial sequence
  Protein classification predicting sequence
VLHPGPINRGVEITDEVADG

SEQ ID NO: 31000 - protein, 14 aa, Artificial sequence
  Protein classification predicting sequence
NTSLGKKGETLADT

SEQ ID NO: 31001 - protein, 19 aa, Artificial sequence
  Protein classification predicting sequence
SVISTYVDAIVMRHPQEGA

SEQ ID NO: 31002 - protein, 25 aa, Artificial sequence
  Protein classification predicting sequence
DILYMTRVQKERLDPSEYANVKAQF

SEQ ID NO: 31003 - protein, 11 aa, Artificial sequence
  Protein classification predicting sequence
DEITTDVDKTP

SEQ ID NO: 31004 - protein, 7 aa, Artificial sequence
  Protein classification predicting sequence
PSLREYH

SEQ ID NO: 31005 - protein, 8 aa, Artificial sequence
  Protein classification predicting sequence
VDDVATTG

SEQ ID NO: 31006 - protein, 8 aa, Artificial sequence
  Protein classification predicting sequence
GLTLGADP

SEQ ID NO: 31007 - protein, 7 aa, Artificial sequence
  Protein classification predicting sequence
VVDREEG

SEQ ID NO: 31008 - protein, 12 aa, Artificial sequence
  Protein classification predicting sequence
VEVIAGTATAGI

SEQ ID NO: 31009 - protein, 6 aa, Artificial sequence
  Protein classification predicting sequence
IFTYEL

SEQ ID NO: 31010 - protein, 7 aa, Artificial sequence
  Protein classification predicting sequence
PNEPFTW

SEQ ID NO: 31011 - protein, 7 aa, Artificial sequence
  Protein classification predicting sequence
AGIPHAA

SEQ ID NO: 31012 - protein, 8 aa, Artificial sequence
  Protein classification predicting sequence
LPMCYVRS

SEQ ID NO: 31013 - protein, 7 aa, Artificial sequence
  Protein classification predicting sequence
AIFTYGL

SEQ ID NO: 31014 - protein, 9 aa, Artificial sequence
  Protein classification predicting sequence
IAGTATAGI

SEQ ID NO: 31015 - protein, 5 aa, Artificial sequence
  Protein classification predicting sequence
YCDNR

SEQ ID NO: 31016 - protein, 9 aa, Artificial sequence
  Protein classification predicting sequence
EDLISTGGS

SEQ ID NO: 31017 - protein, 12 aa, Artificial sequence
  Protein classification predicting sequence
SGIKSPIYCDNR

SEQ ID NO: 31018 - protein, 7 aa, Artificial sequence
  Protein classification predicting sequence
HAAWVSD

SEQ ID NO: 31019 - protein, 7 aa, Artificial sequence
  Protein classification predicting sequence
FTLKSGR

SEQ ID NO: 31020 - protein, 8 aa, Artificial sequence
  Protein classification predicting sequence
SPYFFNAG

SEQ ID NO: 31021 - protein, 8 aa, Artificial sequence
  Protein classification predicting sequence
FGPAYKGI

SEQ ID NO: 31022 - protein, 8 aa, Artificial sequence
  Protein classification predicting sequence
DDVITAGT

SEQ ID NO: 31023 - protein, 6 aa, Artificial sequence
  Protein classification predicting sequence
GLFNTG

SEQ ID NO: 31024 - protein, 8 aa, Artificial sequence
  Protein classification predicting sequence
PYCFNRKE

SEQ ID NO: 31025 - protein, 8 aa, Artificial sequence
  Protein classification predicting sequence
RFIFTERV

SEQ ID NO: 31026 - protein, 10 aa, Artificial sequence
  Protein classification predicting sequence
VEDIVTTGLS

SEQ ID NO: 31027 - protein, 9 aa, Artificial sequence
  Protein classification predicting sequence
LPPELAAIP

SEQ ID NO: 31028 - protein, 7 aa, Artificial sequence
  Protein classification predicting sequence
VLKFGEF

SEQ ID NO: 31029 - protein, 11 aa, Artificial sequence
  Protein classification predicting sequence
SPYFFNAGLFN

SEQ ID NO: 31030 - protein, 12 aa, Artificial sequence
  Protein classification predicting sequence
NRKEAKDHGEGG

SEQ ID NO: 31031 - protein, 7 aa, Artificial sequence
  Protein classification predicting sequence
MTLRRGF

SEQ ID NO: 31032 - protein, 7 aa, Artificial sequence
  Protein classification predicting sequence
FNRKEAK

SEQ ID NO: 31033 - protein, 10 aa, Artificial sequence
  Protein classification predicting sequence
HGEGGNIVGA

SEQ ID NO: 31034 - protein, 11 aa, Artificial sequence
  Protein classification predicting sequence
RKEAKDHGEGG

SEQ ID NO: 31035 - protein, 7 aa, Artificial sequence
  Protein classification predicting sequence
VGAPLKG

SEQ ID NO: 31036 - protein, 7 aa, Artificial sequence
  Protein classification predicting sequence
LPMIYVR

SEQ ID NO: 31037 - protein, 7 aa, Artificial sequence
  Protein classification predicting sequence
KDHGEGG

SEQ ID NO: 31038 - protein, 8 aa, Artificial sequence
  Protein classification predicting sequence
SGRQSPYF

SEQ ID NO: 31039 - protein, 6 aa, Artificial sequence
  Protein classification predicting sequence
FIEFAL

SEQ ID NO: 31040 - protein, 47 aa, Artificial sequence
  Protein classification predicting sequence
KQVLKFGEFTLKSGRKSPYFFNAGLFNTGRDLALLGRFYAEALVDSG

SEQ ID NO: 31041 - protein, 10 aa, Artificial sequence
  Protein classification predicting sequence
AGTATAGIPH

SEQ ID NO: 31042 - protein, 9 aa, Artificial sequence
  Protein classification predicting sequence
GTATAGIPH

SEQ ID NO: 31043 - protein, 7 aa, Artificial sequence
  Protein classification predicting sequence
EDLISTG

SEQ ID NO: 31044 - protein, 14 aa, Artificial sequence
  Protein classification predicting sequence
LFGPAYKGIPIATT

SEQ ID NO: 31045 - protein, 16 aa, Artificial sequence
  Protein classification predicting sequence
LVDDVITAGTAIRESM

SEQ ID NO: 31046 - protein, 9 aa, Artificial sequence
  Protein classification predicting sequence
SAIQEVERD

SEQ ID NO: 31047 - protein, 13 aa, Artificial sequence
  Protein classification predicting sequence
SPYFFNAGLFNTG

SEQ ID NO: 31048 - protein, 6 aa, Artificial sequence
  Protein classification predicting sequence
CFNRKE

SEQ ID NO: 31049 - protein, 10 aa, Artificial sequence
  Protein classification predicting sequence
FGEFTLKSGR

SEQ ID NO: 31050 - protein, 6 aa, Artificial sequence
  Protein classification predicting sequence
TAGTAI

SEQ ID NO: 31051 - protein, 6 aa, Artificial sequence
  Protein classification predicting sequence
KPKDHG

SEQ ID NO: 31052 - protein, 18 aa, Artificial sequence
  Protein classification predicting sequence
LPFAYIRSKPKDHGAGNQ

SEQ ID NO: 31053 - protein, 7 aa, Artificial sequence
  Protein classification predicting sequence
PNDPFTW

SEQ ID NO: 31054 - protein, 17 aa, Artificial sequence
  Protein classification predicting sequence
PFTWASGIKSPIYTDNR

SEQ ID NO: 31055 - protein, 8 aa, Artificial sequence
  Protein classification predicting sequence
DLISTGGS

SEQ ID NO: 31056 - protein, 7 aa, Artificial sequence
  Protein classification predicting sequence
YVRSKAK

SEQ ID NO: 31057 - protein, 8 aa, Artificial sequence
  Protein classification predicting sequence
AGTSVRES

SEQ ID NO: 31058 - protein, 10 aa, Artificial sequence
  Protein classification predicting sequence
VVGVATVVDR

SEQ ID NO: 31059 - protein, 6 aa, Artificial sequence
  Protein classification predicting sequence
ALDRME

SEQ ID NO: 31060 - protein, 9 aa, Artificial sequence
  Protein classification predicting sequence
HGKGNQIEG

SEQ ID NO: 31061 - protein, 17 aa, Artificial sequence
  Protein classification predicting sequence
SPYFFNAGLFNTGRDLA

SEQ ID NO: 31062 - protein, 6 aa, Artificial sequence
  Protein classification predicting sequence
LGRFYA

SEQ ID NO: 31063 - protein, 11 aa, Artificial sequence
  Protein classification predicting sequence
DGDDSKPGPSA

SEQ ID NO: 31064 - protein, 7 aa, Artificial sequence
  Protein classification predicting sequence
PIYCDNR

SEQ ID NO: 31065 - protein, 8 aa, Artificial sequence
  Protein classification predicting sequence
SPIYCDNR

SEQ ID NO: 31066 - protein, 6 aa, Artificial sequence
  Protein classification predicting sequence
DNRVTL

SEQ ID NO: 31067 - protein, 8 aa, Artificial sequence
  Protein classification predicting sequence
AGTATAGI

SEQ ID NO: 31068 - protein, 20 aa, Artificial sequence
  Protein classification predicting sequence
CKVISIITLKDLIAYLEEKP

SEQ ID NO: 31069 - protein, 32 aa, Artificial sequence
  Protein classification predicting sequence
LVGSALQGRVMLVDDVITAGTAIRESMEIIQA

SEQ ID NO: 31070 - protein, 6 aa, Artificial sequence
  Protein classification predicting sequence
NRKEAK

SEQ ID NO: 31071 - protein, 19 aa, Artificial sequence
  Protein classification predicting sequence
LFGPAYKGIPIATTTAVAL

SEQ ID NO: 31072 - protein, 36 aa, Artificial sequence
  Protein classification predicting sequence
AGAEVLGVVAIFTYGLKKADDTFSNIQLPFYTLSDY

SEQ ID NO: 31073 - protein, 8 aa, Artificial sequence
  Protein classification predicting sequence
LPMNYVRS

SEQ ID NO: 31074 - protein, 15 aa, Artificial sequence
  Protein classification predicting sequence
KSHGKQNQIEGAKSE

SEQ ID NO: 31075 - protein, 7 aa, Artificial sequence
  Protein classification predicting sequence
LIENGFV

SEQ ID NO: 31076 - protein, 19 aa, Artificial sequence
  Protein classification predicting sequence
IAGTATAGIPHGAIIADKM

SEQ ID NO: 31077 - protein, 9 aa, Artificial sequence
  Protein classification predicting sequence
LPFAYIRSK

SEQ ID NO: 31078 - protein, 18 aa, Artificial sequence
  Protein classification predicting sequence
GQKMVIIEDLISTGGSVL

SEQ ID NO: 31079 - protein, 11 aa, Artificial sequence
  Protein classification predicting sequence
EDLISTGGSVL

SEQ ID NO: 31080 - protein, 10 aa, Artificial sequence
  Protein classification predicting sequence
VLGVVAIFTY

SEQ ID NO: 31081 - protein, 12 aa, Artificial sequence
  Protein classification predicting sequence
LLDIKAVYLKPE

SEQ ID NO: 31082 - protein, 13 aa, Artificial sequence
  Protein classification predicting sequence
PFTWASGIKSPIY

SEQ ID NO: 31083 - protein, 21 aa, Artificial sequence
  Protein classification predicting sequence
KGQKMVIIEDLISTGGSVLDA

SEQ ID NO: 31084 - protein, 7 aa, Artificial sequence
  Protein classification predicting sequence
FPEVEVI

SEQ ID NO: 31085 - protein, 8 aa, Artificial sequence
  Protein classification predicting sequence
VLGVVAIF

SEQ ID NO: 31086 - protein, 7 aa, Artificial sequence
  Protein classification predicting sequence
EDVVTTG

SEQ ID NO: 31087 - protein, 8 aa, Artificial sequence
  Protein classification predicting sequence
GHFLLSSG

SEQ ID NO: 31088 - protein, 7 aa, Artificial sequence
  Protein classification predicting sequence
DSGIEFD

SEQ ID NO: 31089 - protein, 9 aa, Artificial sequence
  Protein classification predicting sequence
CAVISIVSL

SEQ ID NO: 31090 - protein, 9 aa, Artificial sequence
  Protein classification predicting sequence
FGPAYKGIP

SEQ ID NO: 31091 - protein, 8 aa, Artificial sequence
  Protein classification predicting sequence
GIVVALDR

SEQ ID NO: 31092 - protein, 10 aa, Artificial sequence
  Protein classification predicting sequence
DDVITAGTAI

SEQ ID NO: 31093 - protein, 23 aa, Artificial sequence
  Protein classification predicting sequence
ISLDRQERGRGEISAIQEVERDY

SEQ ID NO: 31094 - protein, 5 aa, Artificial sequence
  Protein classification predicting sequence
TFCGT

SEQ ID NO: 31095 - protein, 21 aa, Artificial sequence
  Protein classification predicting sequence
CISPTIVQQFGYQRRASDDGK

SEQ ID NO: 31096 - protein, 25 aa, Artificial sequence
  Protein classification predicting sequence
SKTSNTIRVFLPNKQRTVVNVRNGM

SEQ ID NO: 31097 - protein, 19 aa, Artificial sequence
  Protein classification predicting sequence
LSQRQRSTSTPNVHMVSTT

SEQ ID NO: 31098 - protein, 10 aa, Artificial sequence
  Protein classification predicting sequence
EERPLFPQIL

SEQ ID NO: 31099 - protein, 20 aa, Artificial sequence
  Protein classification predicting sequence
NPFSFQSDVYSYGIVLYELM

SEQ ID NO: 31100 - protein, 16 aa, Artificial sequence
  Protein classification predicting sequence
LKVRGLQPECCAVFRL

SEQ ID NO: 31101 - protein, 8 aa, Artificial sequence
  Protein classification predicting sequence
RLDWNTDA

SEQ ID NO: 31102 - protein, 17 aa, Artificial sequence
  Protein classification predicting sequence
ELQVDFLDHVPLTTHNF

SEQ ID NO: 31103 - protein, 8 aa, Artificial sequence
  Protein classification predicting sequence
VPLTTHNF

SEQ ID NO: 31104 - protein, 8 aa, Artificial sequence
  Protein classification predicting sequence
HNFVRKTF

SEQ ID NO: 31105 - protein, 19 aa, Artificial sequence
  Protein classification predicting sequence
RKTFLKLAFCDICQKFLLN

SEQ ID NO: 31106 - protein, 11 aa, Artificial sequence
  Protein classification predicting sequence
FRCQTCGYKFH

SEQ ID NO: 31107 - protein, 36 aa, Artificial sequence
  Protein classification predicting sequence
FRCQTCGYKFHEHCSTKVPTMCVDWSNIRQLLLFPN

SEQ ID NO: 31108 - protein, 24 aa, Artificial sequence
  Protein classification predicting sequence
KSNNIFLHEGLTVKIGDFGLATVK

SEQ ID NO: 31109 - protein, 10 aa, Artificial sequence
  Protein classification predicting sequence
RWSGSQQVEQ

SEQ ID NO: 31110 - protein, 6 aa, Artificial sequence
  Protein classification predicting sequence
LPYSHI

SEQ ID NO: 31111 - protein, 11 aa, Artificial sequence
  Protein classification predicting sequence
RDERPLFPQIL

SEQ ID NO: 31112 - protein, 13 aa, Artificial sequence
  Protein classification predicting sequence
EPSLHRAAHTEDI

SEQ ID NO: 31113 - protein, 8 aa, Artificial sequence
  Protein classification predicting sequence
LYKNCPKA

SEQ ID NO: 31114 - protein, 39 aa, Artificial sequence
  Protein classification predicting sequence
KRLVADCVKKVKEERPLFPQILSSIELLQHSLPKINRSA

SEQ ID NO: 31115 - protein, 11 aa, Artificial sequence
  Protein classification predicting sequence
NKLVDGCYSFW

SEQ ID NO: 31116 - protein, 9 aa, Artificial sequence
  Protein classification predicting sequence
HPIQVAGIL

SEQ ID NO: 31117 - protein, 7 aa, Artificial sequence
  Protein classification predicting sequence
VDGVTKL

SEQ ID NO: 31118 - protein, 10 aa, Artificial sequence
  Protein classification predicting sequence
EEQQAENHRK

SEQ ID NO: 31119 - protein, 10 aa, Artificial sequence
  Protein classification predicting sequence
RIVNLMKKKR

SEQ ID NO: 31120 - protein, 13 aa, Artificial sequence
  Protein classification predicting sequence
GRPKHIYSIYRKM

SEQ ID NO: 31121 - protein, 16 aa, Artificial sequence
  Protein classification predicting sequence
WKPMPGRFKDYIAMPK

SEQ ID NO: 31122 - protein, 12 aa, Artificial sequence
  Protein classification predicting sequence
GVAAHWAYKEGK

SEQ ID NO: 31123 - protein, 9 aa, Artificial sequence
  Protein classification predicting sequence
TSKHSYGPS

SEQ ID NO: 31124 - protein, 7 aa, Artificial sequence
  Protein classification predicting sequence
LSKCCNP

SEQ ID NO: 31125 - protein, 10 aa, Artificial sequence
  Protein classification predicting sequence
GLLNEVLQAV

SEQ ID NO: 31126 - protein, 9 aa, Artificial sequence
  Protein classification predicting sequence
ADRLHNMRT

SEQ ID NO: 31127 - protein, 6 aa, Artificial sequence
  Protein classification predicting sequence
KWELED

SEQ ID NO: 31128 - protein, 9 aa, Artificial sequence
  Protein classification predicting sequence
GRPKHIYSI

SEQ ID NO: 31129 - protein, 6 aa, Artificial sequence
  Protein classification predicting sequence
PSRDWL

SEQ ID NO: 31130 - protein, 8 aa, Artificial sequence
  Protein classification predicting sequence
DFAYAIHS

SEQ ID NO: 31131 - protein, 7 aa, Artificial sequence
  Protein classification predicting sequence
KAKSYLS

SEQ ID NO: 31132 - protein, 60 aa, Artificial sequence
  Protein classification predicting sequence
EYEYVLKSYHIAYEAHKGQFRKNGLPYIMHPIQVAGILTEMRLDGPTIVAGFLHDVIEDT

SEQ ID NO: 31133 - protein, 62 aa, Artificial sequence
  Protein classification predicting sequence
ARIVDGVTKLKKVKYRSKEEQQAENHRKLFIAIAKDVRVILVKLADRLHNMRTLKAMPREKQ

SEQ ID NO: 31134 - protein, 21 aa, Artificial sequence
  Protein classification predicting sequence
VQYFRIVNLMKKKRSEREAYI

SEQ ID NO: 31135 - protein, 16 aa, Artificial sequence
  Protein classification predicting sequence
KQKKQFDQIFDLLAIR

SEQ ID NO: 31136 - protein, 10 aa, Artificial sequence
  Protein classification predicting sequence
IVNSINDCYA

SEQ ID NO: 31137 - protein, 25 aa, Artificial sequence
  Protein classification predicting sequence
LGLVHTLWKPMPGRFKDYIAMPKQN

SEQ ID NO: 31138 - protein, 22 aa, Artificial sequence
  Protein classification predicting sequence
YQSLHTTVVGPNGDPLEIQIRT

SEQ ID NO: 31139 - protein, 12 aa, Artificial sequence
  Protein classification predicting sequence
QNKLNWLKELAE

SEQ ID NO: 31140 - protein, 57 aa, Artificial sequence
  Protein classification predicting sequence
LKYDLQSDKVYAFTPASDVIELPYGAVPIDFAYAIHSEVGNKMIGAKVNGKIVPIDY

SEQ ID NO: 31141 - protein, 25 aa, Artificial sequence
  Protein classification predicting sequence
EIRTSKHSYGPSRDWLKIVKSSSAK

SEQ ID NO: 31142 - protein, 18 aa, Artificial sequence
  Protein classification predicting sequence
KIKSFFKKQDRSSNIEKG

SEQ ID NO: 31143 - protein, 17 aa, Artificial sequence
  Protein classification predicting sequence
EIKEQGFRVEDILTEKN

SEQ ID NO: 31144 - protein, 10 aa, Artificial sequence
  Protein classification predicting sequence
AAVGFGGVTS

SEQ ID NO: 31145 - protein, 16 aa, Artificial sequence
  Protein classification predicting sequence
QIVNKLTERQRILDKQ

SEQ ID NO: 31146 - protein, 11 aa, Artificial sequence
  Protein classification predicting sequence
ALNEAQEVTKS

SEQ ID NO: 31147 - protein, 53 aa, Artificial sequence
  Protein classification predicting sequence
TDSGVYVEGLENVLIKLSKCCNPIPGDDIVGYITKGHGIKVHRTDCPNIKNET

SEQ ID NO: 31148 - protein, 8 aa, Artificial sequence
  Protein classification predicting sequence
VEWVKSKD

SEQ ID NO: 31149 - protein, 23 aa, Artificial sequence
  Protein classification predicting sequence
YQVDLEVTAYDRNGLLNEVLQAV

SEQ ID NO: 31150 - protein, 14 aa, Artificial sequence
  Protein classification predicting sequence
LIKVSGRSDIDKNA

SEQ ID NO: 31151 - protein, 29 aa, Artificial sequence
  Protein classification predicting sequence
INISVMVKNVNDVYRVVEKIKQLGDVYTV

SEQ ID NO: 31152 - protein, 12 aa, Artificial sequence
  Protein classification predicting sequence
PGRFKDYIAMPK

SEQ ID NO: 31153 - protein, 8 aa, Artificial sequence
  Protein classification predicting sequence
QIRTFDMH

SEQ ID NO: 31154 - protein, 7 aa, Artificial sequence
  Protein classification predicting sequence
PIPGDDI

SEQ ID NO: 31155 - protein, 10 aa, Artificial sequence
  Protein classification predicting sequence
HRFLVAEQLR

SEQ ID NO: 31156 - protein, 13 aa, Artificial sequence
  Protein classification predicting sequence
AGWSDVGSWSSLW

SEQ ID NO: 31157 - protein, 7 aa, Artificial sequence
  Protein classification predicting sequence
ETGYGYI

SEQ ID NO: 31158 - protein, 10 aa, Artificial sequence
  Protein classification predicting sequence
QMHHHRAEHW

SEQ ID NO: 31159 - protein, 7 aa, Artificial sequence
  Protein classification predicting sequence
QVTLSYG

SEQ ID NO: 31160 - protein, 13 aa, Artificial sequence
  Protein classification predicting sequence
SRGLALKMSPWAS

SEQ ID NO: 31161 - protein, 7 aa, Artificial sequence
  Protein classification predicting sequence
RLPDDCT

SEQ ID NO: 31162 - protein, 7 aa, Artificial sequence
  Protein classification predicting sequence
LQQVTLS

SEQ ID NO: 31163 - protein, 8 aa, Artificial sequence
  Protein classification predicting sequence
HCLLYPDT

SEQ ID NO: 31164 - protein, 10 aa, Artificial sequence
  Protein classification predicting sequence
LFHSHLENLQ

SEQ ID NO: 31165 - protein, 7 aa, Artificial sequence
  Protein classification predicting sequence
FNTIYQL

SEQ ID NO: 31166 - protein, 7 aa, Artificial sequence
  Protein classification predicting sequence
HDTASAV

SEQ ID NO: 31167 - protein, 7 aa, Artificial sequence
  Protein classification predicting sequence
SSGTWSL

SEQ ID NO: 31168 - protein, 10 aa, Artificial sequence
  Protein classification predicting sequence
SIGIDTWGVD

SEQ ID NO: 31169 - protein, 18 aa, Artificial sequence
  Protein classification predicting sequence
CVAVDLGASSGRVMLARY

SEQ ID NO: 31170 - protein, 9 aa, Artificial sequence
  Protein classification predicting sequence
QGQRVGLPV

SEQ ID NO: 31171 - protein, 16 aa, Artificial sequence
  Protein classification predicting sequence
AHALLMPDYFSYRLTG

SEQ ID NO: 31172 - protein, 17 aa, Artificial sequence
  Protein classification predicting sequence
MNWEYTNATTTQLVNIN

SEQ ID NO: 31173 - protein, 7 aa, Artificial sequence
  Protein classification predicting sequence
WICPQGN

SEQ ID NO: 31174 - protein, 20 aa, Artificial sequence
  Protein classification predicting sequence
IPVVAVASHDTASAVIASPL

SEQ ID NO: 31175 - protein, 11 aa, Artificial sequence
  Protein classification predicting sequence
INPNDDRFINP

SEQ ID NO: 31176 - protein, 8 aa, Artificial sequence
  Protein classification predicting sequence
PNPDSEIA

SEQ ID NO: 31177 - protein, 11 aa, Artificial sequence
  Protein classification predicting sequence
RSGIQFLPFNT

SEQ ID NO: 31178 - protein, 7 aa, Artificial sequence
  Protein classification predicting sequence
YQLRALT

SEQ ID NO: 31179 - protein, 22 aa, Artificial sequence
  Protein classification predicting sequence
YQLRALTEQQPELIPHIAHALL

SEQ ID NO: 31180 - protein, 10 aa, Artificial sequence
  Protein classification predicting sequence
PDYFSYRLTG

SEQ ID NO: 31181 - protein, 10 aa, Artificial sequence
  Protein classification predicting sequence
AVDIGASSGR

SEQ ID NO: 31182 - protein, 9 aa, Artificial sequence
  Protein classification predicting sequence
ENYTNEWGA

SEQ ID NO: 31183 - protein, 9 aa, Artificial sequence
  Protein classification predicting sequence
GIQFLPFNT

SEQ ID NO: 31184 - protein, 12 aa, Artificial sequence
  Protein classification predicting sequence
AYLSSGTWSLMG

SEQ ID NO: 31185 - protein, 17 aa, Artificial sequence
  Protein classification predicting sequence
SDAELARCIFDSLALLY

SEQ ID NO: 31186 - protein, 7 aa, Artificial sequence
  Protein classification predicting sequence
LNQLCAD

SEQ ID NO: 31187 - protein, 10 aa, Artificial sequence
  Protein classification predicting sequence
DPISYRDKRT

SEQ ID NO: 31188 - protein, 6 aa, Artificial sequence
  Protein classification predicting sequence
NTLYQL

SEQ ID NO: 31189 - protein, 7 aa, Artificial sequence
  Protein classification predicting sequence
TNASTTQ

SEQ ID NO: 31190 - protein, 9 aa, Artificial sequence
  Protein classification predicting sequence
STTQMLNLR

SEQ ID NO: 31191 - protein, 17 aa, Artificial sequence
  Protein classification predicting sequence
VVTVATHDTASAVVGTP

SEQ ID NO: 31192 - protein, 23 aa, Artificial sequence
  Protein classification predicting sequence
ENYTNEWGAYGTYRFLKNIMGLW

SEQ ID NO: 31193 - protein, 8 aa, Artificial sequence
  Protein classification predicting sequence
LKNIMGLW

SEQ ID NO: 31194 - protein, 9 aa, Artificial sequence
  Protein classification predicting sequence
IVGGGSNVA

SEQ ID NO: 31195 - protein, 8 aa, Artificial sequence
  Protein classification predicting sequence
GIDTWGVD

SEQ ID NO: 31196 - protein, 12 aa, Artificial sequence
  Protein classification predicting sequence
EYTNATTTQLVN

SEQ ID NO: 31197 - protein, 12 aa, Artificial sequence
  Protein classification predicting sequence
YRVLKNIMGLWL

SEQ ID NO: 31198 - protein, 10 aa, Artificial sequence
  Protein classification predicting sequence
LARCIFDSLA

SEQ ID NO: 31199 - protein, 7 aa, Artificial sequence
  Protein classification predicting sequence
AGPVEAS

SEQ ID NO: 31200 - protein, 6 aa, Artificial sequence
  Protein classification predicting sequence
GASSGR

SEQ ID NO: 31201 - protein, 9 aa, Artificial sequence
  Protein classification predicting sequence
EIQAACRET

SEQ ID NO: 31202 - protein, 8 aa, Artificial sequence
  Protein classification predicting sequence
DDFRQVVS

SEQ ID NO: 31203 - protein, 19 aa, Artificial sequence
  Protein classification predicting sequence
SDAELARCIFDSLALLYAD

SEQ ID NO: 31204 - protein, 74 aa, Artificial sequence
  Protein classification predicting sequence
SDAELARCIFDSLALLYADVLHELAQLRGEDFSQLHIVGGGCQNTLLNQLCADACGIRVIAGPVEASTLGNIGI

SEQ ID NO: 31205 - protein, 12 aa, Artificial sequence
  Protein classification predicting sequence
DLGASSGRVMLA

SEQ ID NO: 31206 - protein, 7 aa, Artificial sequence
  Protein classification predicting sequence
NWEYTNA

SEQ ID NO: 31207 - protein, 26 aa, Artificial sequence
  Protein classification predicting sequence
NITNEGGAEGRYRVLKNIMGLWLLQR

SEQ ID NO: 31208 - protein, 12 aa, Artificial sequence
  Protein classification predicting sequence
GPVEASTLGNIG

SEQ ID NO: 31209 - protein, 7 aa, Artificial sequence
  Protein classification predicting sequence
FINDSLL

SEQ ID NO: 31210 - protein, 10 aa, Artificial sequence
  Protein classification predicting sequence
NITVVRCPGA

SEQ ID NO: 31211 - protein, 9 aa, Artificial sequence
  Protein classification predicting sequence
VIRGGTPHF

SEQ ID NO: 31212 - protein, 8 aa, Artificial sequence
  Protein classification predicting sequence
ECNKGLAQ

SEQ ID NO: 31213 - protein, 8 aa, Artificial sequence
  Protein classification predicting sequence
GNKGAEAA

SEQ ID NO: 31214 - protein, 8 aa, Artificial sequence
  Protein classification predicting sequence
ALEMINVL

SEQ ID NO: 31215 - protein, 8 aa, Artificial sequence
  Protein classification predicting sequence
PVIFGVLT

SEQ ID NO: 31216 - protein, 8 aa, Artificial sequence
  Protein classification predicting sequence
NQGERYLN

SEQ ID NO: 31217 - protein, 11 aa, Artificial sequence
  Protein classification predicting sequence
VLDEATLFNIA

SEQ ID NO: 31218 - protein, 8 aa, Artificial sequence
  Protein classification predicting sequence
IDVSQSVE

SEQ ID NO: 31219 - protein, 7 aa, Artificial sequence
  Protein classification predicting sequence
NLMLDKD

SEQ ID NO: 31220 - protein, 10 aa, Artificial sequence
  Protein classification predicting sequence
DLKTQNILLD

SEQ ID NO: 31221 - protein, 8 aa, Artificial sequence
  Protein classification predicting sequence
HRDLKPSN

SEQ ID NO: 31222 - protein, 7 aa, Artificial sequence
  Protein classification predicting sequence
NGCCLTV

SEQ ID NO: 31223 - protein, 9 aa, Artificial sequence
  Protein classification predicting sequence
VIRGETYHF

SEQ ID NO: 31224 - protein, 8 aa, Artificial sequence
  Protein classification predicting sequence
PVAFGVLT

SEQ ID NO: 31225 - protein, 8 aa, Artificial sequence
  Protein classification predicting sequence
GTKAGNKG

SEQ ID NO: 31226 - protein, 9 aa, Artificial sequence
  Protein classification predicting sequence
ARWHADIVD

SEQ ID NO: 31227 - protein, 13 aa, Artificial sequence
  Protein classification predicting sequence
FDVPGAYEIPLHA

SEQ ID NO: 31228 - protein, 6 aa, Artificial sequence
  Protein classification predicting sequence
EIPLHA

SEQ ID NO: 31229 - protein, 14 aa, Artificial sequence
  Protein classification predicting sequence
DKGGFAARAALTMI

SEQ ID NO: 31230 - protein, 11 aa, Artificial sequence
  Protein classification predicting sequence
MQVQLETEVPV

SEQ ID NO: 31231 - protein, 10 aa, Artificial sequence
  Protein classification predicting sequence
SVVLTPHHFH

SEQ ID NO: 31232 - protein, 7 aa, Artificial sequence
  Protein classification predicting sequence
LIVEARF

SEQ ID NO: 31233 - protein, 13 aa, Artificial sequence
  Protein classification predicting sequence
EAGATYDVVTVPG

SEQ ID NO: 31234 - protein, 7 aa, Artificial sequence
  Protein classification predicting sequence
TYHFDIV

SEQ ID NO: 31235 - protein, 7 aa, Artificial sequence
  Protein classification predicting sequence
LGTVIRG

SEQ ID NO: 31236 - protein, 8 aa, Artificial sequence
  Protein classification predicting sequence
HYDYVCNE

SEQ ID NO: 31237 - protein, 13 aa, Artificial sequence
  Protein classification predicting sequence
PHLLIVEARFYDD

SEQ ID NO: 31238 - protein, 8 aa, Artificial sequence
  Protein classification predicting sequence
EAGATYDV

SEQ ID NO: 31239 - protein, 16 aa, Artificial sequence
  Protein classification predicting sequence
VIRGETYHFDIVSNES

SEQ ID NO: 31240 - protein, 6 aa, Artificial sequence
  Protein classification predicting sequence
VPGSFE

SEQ ID NO: 31241 - protein, 6 aa, Artificial sequence
  Protein classification predicting sequence
TPHFDY

SEQ ID NO: 31242 - protein, 7 aa, Artificial sequence
  Protein classification predicting sequence
ALTALEM

SEQ ID NO: 31243 - protein, 7 aa, Artificial sequence
  Protein classification predicting sequence
KPVTLGI

SEQ ID NO: 31244 - protein, 11 aa, Artificial sequence
  Protein classification predicting sequence
RFNEFITSKLL

SEQ ID NO: 31245 - protein, 6 aa, Artificial sequence
  Protein classification predicting sequence
DTLIRH

SEQ ID NO: 31246 - protein, 20 aa, Artificial sequence
  Protein classification predicting sequence
TTETIEQAIERAGTKAGNKG

SEQ ID NO: 31247 - protein, 12 aa, Artificial sequence
  Protein classification predicting sequence
FGVLTTDTIEQA

SEQ ID NO: 31248 - protein, 11 aa, Artificial sequence
  Protein classification predicting sequence
ERAGTKAGNKG

SEQ ID NO: 31249 - protein, 20 aa, Artificial sequence
  Protein classification predicting sequence
TTENIEQAIERAGTKAGNKG

SEQ ID NO: 31250 - protein, 12 aa, Artificial sequence
  Protein classification predicting sequence
AIGNGILTVENE

SEQ ID NO: 31251 - protein, 7 aa, Artificial sequence
  Protein classification predicting sequence
HYDYVCN

SEQ ID NO: 31252 - protein, 6 aa, Artificial sequence
  Protein classification predicting sequence
RFNEFI

SEQ ID NO: 31253 - protein, 7 aa, Artificial sequence
  Protein classification predicting sequence
LKRIGQV

SEQ ID NO: 31254 - protein, 6 aa, Artificial sequence
  Protein classification predicting sequence
VPGAYE

SEQ ID NO: 31255 - protein, 6 aa, Artificial sequence
  Protein classification predicting sequence
VPGAFE

SEQ ID NO: 31256 - protein, 9 aa, Artificial sequence
  Protein classification predicting sequence
IEQAIERAG

SEQ ID NO: 31257 - protein, 8 aa, Artificial sequence
  Protein classification predicting sequence
AEATKGIA

SEQ ID NO: 31258 - protein, 7 aa, Artificial sequence
  Protein classification predicting sequence
TVPGALE

SEQ ID NO: 31259 - protein, 10 aa, Artificial sequence
  Protein classification predicting sequence
VIRGETYHFE

SEQ ID NO: 31260 - protein, 7 aa, Artificial sequence
  Protein classification predicting sequence
PGAFEIP

SEQ ID NO: 31261 - protein, 8 aa, Artificial sequence
  Protein classification predicting sequence
PGAFEIPL

SEQ ID NO: 31262 - protein, 6 aa, Artificial sequence
  Protein classification predicting sequence
HYDYVC

SEQ ID NO: 31263 - protein, 7 aa, Artificial sequence
  Protein classification predicting sequence
EVSKGIA

SEQ ID NO: 31264 - protein, 7 aa, Artificial sequence
  Protein classification predicting sequence
AIEMANL

SEQ ID NO: 31265 - protein, 6 aa, Artificial sequence
  Protein classification predicting sequence
NKGAEA

SEQ ID NO: 31266 - protein, 6 aa, Artificial sequence
  Protein classification predicting sequence
EQAIER

SEQ ID NO: 31267 - protein, 10 aa, Artificial sequence
  Protein classification predicting sequence
PVAFGVLTVD

SEQ ID NO: 31268 - protein, 8 aa, Artificial sequence
  Protein classification predicting sequence
PLVAKKLA

SEQ ID NO: 31269 - protein, 14 aa, Artificial sequence
  Protein classification predicting sequence
LTTDNIEQAIERAG

SEQ ID NO: 31270 - protein, 10 aa, Artificial sequence
  Protein classification predicting sequence
RFNEFITSKL

SEQ ID NO: 31271 - protein, 9 aa, Artificial sequence
  Protein classification predicting sequence
WVPGAFEIP

SEQ ID NO: 31272 - protein, 7 aa, Artificial sequence
  Protein classification predicting sequence
DALVRHG

SEQ ID NO: 31273 - protein, 8 aa, Artificial sequence
  Protein classification predicting sequence
CLGAVIRG

SEQ ID NO: 31274 - protein, 7 aa, Artificial sequence
  Protein classification predicting sequence
QAIERAG

SEQ ID NO: 31275 - protein, 13 aa, Artificial sequence
  Protein classification predicting sequence
ERAGTKAGNKGAE

SEQ ID NO: 31276 - protein, 22 aa, Artificial sequence
  Protein classification predicting sequence
SLLEGAIDALKRIGQVKDENIT

SEQ ID NO: 31277 - protein, 18 aa, Artificial sequence
  Protein classification predicting sequence
ALGTVIRGGTAHFEYVAG

SEQ ID NO: 31278 - protein, 7 aa, Artificial sequence
  Protein classification predicting sequence
FGVLTTE

SEQ ID NO: 31279 - protein, 16 aa, Artificial sequence
  Protein classification predicting sequence
IEQAIERAGTKAGNKG

SEQ ID NO: 31280 - protein, 8 aa, Artificial sequence
  Protein classification predicting sequence
IRGGTPHF

SEQ ID NO: 31281 - protein, 7 aa, Artificial sequence
  Protein classification predicting sequence
DAVITLG

SEQ ID NO: 31282 - protein, 15 aa, Artificial sequence
  Protein classification predicting sequence
PTVVRVLGAIEIPVV

SEQ ID NO: 31283 - protein, 7 aa, Artificial sequence
  Protein classification predicting sequence
TPHFEYV

SEQ ID NO: 31284 - protein, 9 aa, Artificial sequence
  Protein classification predicting sequence
LTTESIEQA

SEQ ID NO: 31285 - protein, 7 aa, Artificial sequence
  Protein classification predicting sequence
LGAVIRG

SEQ ID NO: 31286 - protein, 7 aa, Artificial sequence
  Protein classification predicting sequence
NEVAKGV

SEQ ID NO: 31287 - protein, 19 aa, Artificial sequence
  Protein classification predicting sequence
FDALIALGAVIRGETYHFE

SEQ ID NO: 31288 - protein, 7 aa, Artificial sequence
  Protein classification predicting sequence
RVPGAWE

SEQ ID NO: 31289 - protein, 7 aa, Artificial sequence
  Protein classification predicting sequence
ITLGCVI

SEQ ID NO: 31290 - protein, 15 aa, Artificial sequence
  Protein classification predicting sequence
DGGIYRHDFVATAVI

SEQ ID NO: 31291 - protein, 13 aa, Artificial sequence
  Protein classification predicting sequence
PDARVAITIARFN

SEQ ID NO: 31292 - protein, 25 aa, Artificial sequence
  Protein classification predicting sequence
ALGTVIRGGTAHFEYVAGGASNGLA

SEQ ID NO: 31293 - protein, 10 aa, Artificial sequence
  Protein classification predicting sequence
AIVISRFNSF

SEQ ID NO: 31294 - protein, 7 aa, Artificial sequence
  Protein classification predicting sequence
IEQAIER

SEQ ID NO: 31295 - protein, 58 aa, Artificial sequence
  Protein classification predicting sequence
IVVSRFNDFITGRLLEGAKDTLIRHDVNEDNIDVAFVPGAFEIPLVAKKLASSGNYDA

SEQ ID NO: 31296 - protein, 13 aa, Artificial sequence
  Protein classification predicting sequence
RLLEGAKDTLIRH

SEQ ID NO: 31297 - protein, 7 aa, Artificial sequence
  Protein classification predicting sequence
IVVSRFN

SEQ ID NO: 31298 - protein, 7 aa, Artificial sequence
  Protein classification predicting sequence
IVISRFN

SEQ ID NO: 31299 - protein, 7 aa, Artificial sequence
  Protein classification predicting sequence
FEIPLVA

SEQ ID NO: 31300 - protein, 7 aa, Artificial sequence
  Protein classification predicting sequence
TPHFDYV

SEQ ID NO: 31301 - protein, 11 aa, Artificial sequence
  Protein classification predicting sequence
GALDGLKRHGV

SEQ ID NO: 31302 - protein, 6 aa, Artificial sequence
  Protein classification predicting sequence
FGVLTT

SEQ ID NO: 31303 - protein, 31 aa, Artificial sequence
  Protein classification predicting sequence
APNAKIAIVISRFNSFINESLLSGAIDTLKR

SEQ ID NO: 31304 - protein, 23 aa, Artificial sequence
  Protein classification predicting sequence
NITVVRCPGAVELPLVAQRVAKT

SEQ ID NO: 31305 - protein, 10 aa, Artificial sequence
  Protein classification predicting sequence
NKGLAQVSLE

SEQ ID NO: 31306 - protein, 8 aa, Artificial sequence
  Protein classification predicting sequence
AKTGKYDA

SEQ ID NO: 31307 - protein, 6 aa, Artificial sequence
  Protein classification predicting sequence
VIRGGT

SEQ ID NO: 31308 - protein, 7 aa, Artificial sequence
  Protein classification predicting sequence
ITLGTVI

SEQ ID NO: 31309 - protein, 6 aa, Artificial sequence
  Protein classification predicting sequence
GNKGAE

SEQ ID NO: 31310 - protein, 15 aa, Artificial sequence
  Protein classification predicting sequence
NITVVWVPGAYELPL

SEQ ID NO: 31311 - protein, 9 aa, Artificial sequence
  Protein classification predicting sequence
TVPGIKDLP

SEQ ID NO: 31312 - protein, 17 aa, Artificial sequence
  Protein classification predicting sequence
KTKGYAGTPGFMAPELL

SEQ ID NO: 31313 - protein, 17 aa, Artificial sequence
  Protein classification predicting sequence
KVHSRFIVSLAYAFETK

SEQ ID NO: 31314 - protein, 40 aa, Artificial sequence
  Protein classification predicting sequence
GEEYDFSVDYFALGVTLYEMIAARGPFRARGEKVENKELK

SEQ ID NO: 31315 - protein, 9 aa, Artificial sequence
  Protein classification predicting sequence
DTEFFQEFA

SEQ ID NO: 31316 - protein, 22 aa, Artificial sequence
  Protein classification predicting sequence
RIGSGSFGTVYKGKWHGDVAVK

SEQ ID NO: 31317 - protein, 23 aa, Artificial sequence
  Protein classification predicting sequence
ESGATVFAYHVNDPERYGVVEFD

SEQ ID NO: 31318 - protein, 49 aa, Artificial sequence
  Protein classification predicting sequence
QGRLSVAMMGRGYAWLDTGTHQSLIEASNFIATIEERQGLKVSCPEEIA

SEQ ID NO: 31319 - protein, 13 aa, Artificial sequence
  Protein classification predicting sequence
KGIILAGGSGTRL

SEQ ID NO: 31320 - protein, 7 aa, Artificial sequence
  Protein classification predicting sequence
VSKQLLP

SEQ ID NO: 31321 - protein, 11 aa, Artificial sequence
  Protein classification predicting sequence
YDKPMIYYPLS

SEQ ID NO: 31322 - protein, 7 aa, Artificial sequence
  Protein classification predicting sequence
LMLAGIR

SEQ ID NO: 31323 - protein, 15 aa, Artificial sequence
  Protein classification predicting sequence
QPSPDGLAQAFIIGE

SEQ ID NO: 31324 - protein, 8 aa, Artificial sequence
  Protein classification predicting sequence
AISLEEKP

SEQ ID NO: 31325 - protein, 14 aa, Artificial sequence
  Protein classification predicting sequence
IACLEEIAWRNGWL

SEQ ID NO: 31326 - protein, 12 aa, Artificial sequence
  Protein classification predicting sequence
PKSDWAVTGLYF

SEQ ID NO: 31327 - protein, 9 aa, Artificial sequence
  Protein classification predicting sequence
PERFGVVEF

SEQ ID NO: 31328 - protein, 20 aa, Artificial sequence
  Protein classification predicting sequence
VQPSPDGLAQAFIIGEEFIG

SEQ ID NO: 31329 - protein, 15 aa, Artificial sequence
  Protein classification predicting sequence
PKSNYAVTGLYFYDN

SEQ ID NO: 31330 - protein, 15 aa, Artificial sequence
  Protein classification predicting sequence
KGIILAGGSGTRLYP

SEQ ID NO: 31331 - protein, 31 aa, Artificial sequence
  Protein classification predicting sequence
GVSKQLLPVYDKPMIYYPLSVLMLAGIRDIL

SEQ ID NO: 31332 - protein, 10 aa, Artificial sequence
  Protein classification predicting sequence
LMLAGIRDIL

SEQ ID NO: 31333 - protein, 9 aa, Artificial sequence
  Protein classification predicting sequence
VNDPERYGV

SEQ ID NO: 31334 - protein, 9 aa, Artificial sequence
  Protein classification predicting sequence
AVTGLYFYD

SEQ ID NO: 31335 - protein, 15 aa, Artificial sequence
  Protein classification predicting sequence
GRGYAWLDTGTHQSL

SEQ ID NO: 31336 - protein, 9 aa, Artificial sequence
  Protein classification predicting sequence
YDKPMIYYP

SEQ ID NO: 31337 - protein, 8 aa, Artificial sequence
  Protein classification predicting sequence
DILIISTP

SEQ ID NO: 31338 - protein, 9 aa, Artificial sequence
  Protein classification predicting sequence
CALVLGDNI

SEQ ID NO: 31339 - protein, 7 aa, Artificial sequence
  Protein classification predicting sequence
LVLGDNI

SEQ ID NO: 31340 - protein, 6 aa, Artificial sequence
  Protein classification predicting sequence
KHAEGS

SEQ ID NO: 31341 - protein, 7 aa, Artificial sequence
  Protein classification predicting sequence
GKQGGRT

SEQ ID NO: 31342 - protein, 7 aa, Artificial sequence
  Protein classification predicting sequence
LRAVVDL

SEQ ID NO: 31343 - protein, 8 aa, Artificial sequence
  Protein classification predicting sequence
DLDYLEDS

SEQ ID NO: 31344 - protein, 6 aa, Artificial sequence
  Protein classification predicting sequence
TKVLCT

SEQ ID NO: 31345 - protein, 7 aa, Artificial sequence
  Protein classification predicting sequence
GWLTAEY

SEQ ID NO: 31346 - protein, 7 aa, Artificial sequence
  Protein classification predicting sequence
QRTIRES

SEQ ID NO: 31347 - protein, 14 aa, Artificial sequence
  Protein classification predicting sequence
DCDVIQADGGTRTA

SEQ ID NO: 31348 - protein, 7 aa, Artificial sequence
  Protein classification predicting sequence
VAAVSVG

SEQ ID NO: 31349 - protein, 7 aa, Artificial sequence
  Protein classification predicting sequence
GWVTAEY

SEQ ID NO: 31350 - protein, 7 aa, Artificial sequence
  Protein classification predicting sequence
GWITAEY

SEQ ID NO: 31351 - protein, 20 aa, Artificial sequence
  Protein classification predicting sequence
GERTVWIDCDVIQADGGTRT

SEQ ID NO: 31352 - protein, 8 aa, Artificial sequence
  Protein classification predicting sequence
TKVICTAS

SEQ ID NO: 31353 - protein, 7 aa, Artificial sequence
  Protein classification predicting sequence
REAAKGK

SEQ ID NO: 31354 - protein, 6 aa, Artificial sequence
  Protein classification predicting sequence
FVEVQG

SEQ ID NO: 31355 - protein, 7 aa, Artificial sequence
  Protein classification predicting sequence
AEVDMNV

SEQ ID NO: 31356 - protein, 10 aa, Artificial sequence
  Protein classification predicting sequence
QGTGEEATFS

SEQ ID NO: 31357 - protein, 7 aa, Artificial sequence
  Protein classification predicting sequence
TKVLCTA

SEQ ID NO: 31358 - protein, 9 aa, Artificial sequence
  Protein classification predicting sequence
RLIGRSLRA

SEQ ID NO: 31359 - protein, 7 aa, Artificial sequence
  Protein classification predicting sequence
LRAAVDL

SEQ ID NO: 31360 - protein, 7 aa, Artificial sequence
  Protein classification predicting sequence
EVQGTAE

SEQ ID NO: 31361 - protein, 7 aa, Artificial sequence
  Protein classification predicting sequence
GVPRWRK

SEQ ID NO: 31362 - protein, 9 aa, Artificial sequence
  Protein classification predicting sequence
QGTGEGATF

SEQ ID NO: 31363 - protein, 10 aa, Artificial sequence
  Protein classification predicting sequence
PVLDLDYAED

SEQ ID NO: 31364 - protein, 8 aa, Artificial sequence
  Protein classification predicting sequence
GRTQEIQR

SEQ ID NO: 31365 - protein, 7 aa, Artificial sequence
  Protein classification predicting sequence
IGRSLRA

SEQ ID NO: 31366 - protein, 7 aa, Artificial sequence
  Protein classification predicting sequence
YTKHAEG

SEQ ID NO: 31367 - protein, 6 aa, Artificial sequence
  Protein classification predicting sequence
AEGSCL

SEQ ID NO: 31368 - protein, 7 aa, Artificial sequence
  Protein classification predicting sequence
VPGWMRN

SEQ ID NO: 31369 - protein, 7 aa, Artificial sequence
  Protein classification predicting sequence
ITLDCDV

SEQ ID NO: 31370 - protein, 9 aa, Artificial sequence
  Protein classification predicting sequence
QADGGTRTA

SEQ ID NO: 31371 - protein, 7 aa, Artificial sequence
  Protein classification predicting sequence
EGSVLIE

SEQ ID NO: 31372 - protein, 7 aa, Artificial sequence
  Protein classification predicting sequence
KGSGEGW

SEQ ID NO: 31373 - protein, 6 aa, Artificial sequence
  Protein classification predicting sequence
MLPRST

SEQ ID NO: 31374 - protein, 8 aa, Artificial sequence
  Protein classification predicting sequence
TIWIDCDV

SEQ ID NO: 31375 - protein, 8 aa, Artificial sequence
  Protein classification predicting sequence
GSVLVEFG

SEQ ID NO: 31376 - protein, 8 aa, Artificial sequence
  Protein classification predicting sequence
TAEYAMLP

SEQ ID NO: 31377 - protein, 8 aa, Artificial sequence
  Protein classification predicting sequence
EDSRADVD

SEQ ID NO: 31378 - protein, 8 aa, Artificial sequence
  Protein classification predicting sequence
GSVLIEFG

SEQ ID NO: 31379 - protein, 14 aa, Artificial sequence
  Protein classification predicting sequence
DCDVLQADGGTRTA

SEQ ID NO: 31380 - protein, 11 aa, Artificial sequence
  Protein classification predicting sequence
ITGAYVALADA

SEQ ID NO: 31381 - protein, 7 aa, Artificial sequence
  Protein classification predicting sequence
ADVDMNV

SEQ ID NO: 31382 - protein, 7 aa, Artificial sequence
  Protein classification predicting sequence
AEGSVLV

SEQ ID NO: 31383 - protein, 8 aa, Artificial sequence
  Protein classification predicting sequence
EGVPRFLK

SEQ ID NO: 31384 - protein, 11 aa, Artificial sequence
  Protein classification predicting sequence
TAEYGMLPRST

SEQ ID NO: 31385 - protein, 12 aa, Artificial sequence
  Protein classification predicting sequence
REASRGKQGGRT

SEQ ID NO: 31386 - protein, 18 aa, Artificial sequence
  Protein classification predicting sequence
QADGGTRTASITGACVAL

SEQ ID NO: 31387 - protein, 22 aa, Artificial sequence
  Protein classification predicting sequence
QADGGTRTASITGACVALVDAL

SEQ ID NO: 31388 - protein, 7 aa, Artificial sequence
  Protein classification predicting sequence
TKVLCNA

SEQ ID NO: 31389 - protein, 11 aa, Artificial sequence
  Protein classification predicting sequence
TKVLCNATVEE

SEQ ID NO: 31390 - protein, 8 aa, Artificial sequence
  Protein classification predicting sequence
IDLKVLGE

SEQ ID NO: 31391 - protein, 8 aa, Artificial sequence
  Protein classification predicting sequence
TITLDCDV

SEQ ID NO: 31392 - protein, 9 aa, Artificial sequence
  Protein classification predicting sequence
VAAVSVGIV

SEQ ID NO: 31393 - protein, 11 aa, Artificial sequence
  Protein classification predicting sequence
CDLEYVEDSAA

SEQ ID NO: 31394 - protein, 24 aa, Artificial sequence
  Protein classification predicting sequence
CDLEYVEDSAAETDMNVVMTEDGR

SEQ ID NO: 31395 - protein, 12 aa, Artificial sequence
  Protein classification predicting sequence
GRTQEIQRLIGR

SEQ ID NO: 31396 - protein, 7 aa, Artificial sequence
  Protein classification predicting sequence
TKVICTA

SEQ ID NO: 31397 - protein, 7 aa, Artificial sequence
  Protein classification predicting sequence
QGTGEEA

SEQ ID NO: 31398 - protein, 7 aa, Artificial sequence
  Protein classification predicting sequence
VPPFLRG

SEQ ID NO: 31399 - protein, 8 aa, Artificial sequence
  Protein classification predicting sequence
REAAKGKQ

SEQ ID NO: 31400 - protein, 7 aa, Artificial sequence
  Protein classification predicting sequence
GKQSGRT

SEQ ID NO: 31401 - protein, 12 aa, Artificial sequence
  Protein classification predicting sequence
GRTMEIQRLIAR

SEQ ID NO: 31402 - protein, 6 aa, Artificial sequence
  Protein classification predicting sequence
ALGERT

SEQ ID NO: 31403 - protein, 12 aa, Artificial sequence
  Protein classification predicting sequence
VPRFLKGQGQGW

SEQ ID NO: 31404 - protein, 9 aa, Artificial sequence
  Protein classification predicting sequence
AETDMNVVM

SEQ ID NO: 31405 - protein, 7 aa, Artificial sequence
  Protein classification predicting sequence
YVEDSAA

SEQ ID NO: 31406 - protein, 7 aa, Artificial sequence
  Protein classification predicting sequence
RPIKITR

SEQ ID NO: 31407 - protein, 16 aa, Artificial sequence
  Protein classification predicting sequence
YTKHAEGSVLVEFGDT

SEQ ID NO: 31408 - protein, 7 aa, Artificial sequence
  Protein classification predicting sequence
EERVPPF

SEQ ID NO: 31409 - protein, 7 aa, Artificial sequence
  Protein classification predicting sequence
VPPFLKG

SEQ ID NO: 31410 - protein, 10 aa, Artificial sequence
  Protein classification predicting sequence
GRTMEIQRLI

SEQ ID NO: 31411 - protein, 9 aa, Artificial sequence
  Protein classification predicting sequence
RSLRACIDL

SEQ ID NO: 31412 - protein, 10 aa, Artificial sequence
  Protein classification predicting sequence
TGAYVALADA

SEQ ID NO: 31413 - protein, 25 aa, Artificial sequence
  Protein classification predicting sequence
DPRPLSCAIAAVSVGVVDGRIRVDL

SEQ ID NO: 31414 - protein, 8 aa, Artificial sequence
  Protein classification predicting sequence
THTRSDRE

SEQ ID NO: 31415 - protein, 8 aa, Artificial sequence
  Protein classification predicting sequence
TAEYGMLP

SEQ ID NO: 31416 - protein, 11 aa, Artificial sequence
  Protein classification predicting sequence
GWLTAEYAMLP

SEQ ID NO: 31417 - protein, 9 aa, Artificial sequence
  Protein classification predicting sequence
GRTQEISRL

SEQ ID NO: 31418 - protein, 15 aa, Artificial sequence
  Protein classification predicting sequence
SCAIAAVSVGVVDGR

SEQ ID NO: 31419 - protein, 7 aa, Artificial sequence
  Protein classification predicting sequence
EDRVPPF

SEQ ID NO: 31420 - protein, 9 aa, Artificial sequence
  Protein classification predicting sequence
IRESSKGKV

SEQ ID NO: 31421 - protein, 9 aa, Artificial sequence
  Protein classification predicting sequence
QGTGEEATF

SEQ ID NO: 31422 - protein, 16 aa, Artificial sequence
  Protein classification predicting sequence
GKQGGRTMEIQRLIAR

SEQ ID NO: 31423 - protein, 8 aa, Artificial sequence
  Protein classification predicting sequence
LKTNPMKG

SEQ ID NO: 31424 - protein, 22 aa, Artificial sequence
  Protein classification predicting sequence
YTKHAEGSVLVEFGDTKVLCTA

SEQ ID NO: 31425 - protein, 8 aa, Artificial sequence
  Protein classification predicting sequence
VPRFLKGQ

SEQ ID NO: 31426 - protein, 12 aa, Artificial sequence
  Protein classification predicting sequence
REAAKGKQGGRT

SEQ ID NO: 31427 - protein, 12 aa, Artificial sequence
  Protein classification predicting sequence
EIQRLIARSLRA

SEQ ID NO: 31428 - protein, 39 aa, Artificial sequence
  Protein classification predicting sequence
CDLEYVEDSAAETDMNVVMMEDGRMIEVQGTAEGEPFSH

SEQ ID NO: 31429 - protein, 16 aa, Artificial sequence
  Protein classification predicting sequence
DCDVIQADGGTRTASI

SEQ ID NO: 31430 - protein, 8 aa, Artificial sequence
  Protein classification predicting sequence
VAAVSVGI

SEQ ID NO: 31431 - protein, 7 aa, Artificial sequence
  Protein classification predicting sequence
TDMNVVM

SEQ ID NO: 31432 - protein, 9 aa, Artificial sequence
  Protein classification predicting sequence
TDMNVVMTE

SEQ ID NO: 31433 - protein, 23 aa, Artificial sequence
  Protein classification predicting sequence
TDMNVVMTEEGKMIEIQGTAEGE

SEQ ID NO: 31434 - protein, 7 aa, Artificial sequence
  Protein classification predicting sequence
QGTAEGE

SEQ ID NO: 31435 - protein, 7 aa, Artificial sequence
  Protein classification predicting sequence
SVGVVDG

SEQ ID NO: 31436 - protein, 8 aa, Artificial sequence
  Protein classification predicting sequence
DCDVIQAD

SEQ ID NO: 31437 - protein, 6 aa, Artificial sequence
  Protein classification predicting sequence
QGTAEG

SEQ ID NO: 31438 - protein, 8 aa, Artificial sequence
  Protein classification predicting sequence
EDSAAETD

SEQ ID NO: 31439 - protein, 18 aa, Artificial sequence
  Protein classification predicting sequence
YTKHAEGSVLVEFGDTKV

SEQ ID NO: 31440 - protein, 8 aa, Artificial sequence
  Protein classification predicting sequence
THVLCTAS

SEQ ID NO: 31441 - protein, 6 aa, Artificial sequence
  Protein classification predicting sequence
VLCTAS

SEQ ID NO: 31442 - protein, 7 aa, Artificial sequence
  Protein classification predicting sequence
QADGGTR

SEQ ID NO: 31443 - protein, 14 aa, Artificial sequence
  Protein classification predicting sequence
KVLKDHVAAISCGI

SEQ ID NO: 31444 - protein, 9 aa, Artificial sequence
  Protein classification predicting sequence
TDANFVMTG

SEQ ID NO: 31445 - protein, 17 aa, Artificial sequence
  Protein classification predicting sequence
FGDTHVLCTASLEEKVP

SEQ ID NO: 31446 - protein, 8 aa, Artificial sequence
  Protein classification predicting sequence
ADGGTRTA

SEQ ID NO: 31447 - protein, 9 aa, Artificial sequence
  Protein classification predicting sequence
GWITAEYGM

SEQ ID NO: 31448 - protein, 12 aa, Artificial sequence
  Protein classification predicting sequence
GWITAEYGMLPR

SEQ ID NO: 31449 - protein, 9 aa, Artificial sequence
  Protein classification predicting sequence
TAEYGMLPR

SEQ ID NO: 31450 - protein, 60 aa, Artificial sequence
  Protein classification predicting sequence
NQVRPVTLTRNYTKHAEGSVLVEFGDTKVLCTASIEEGVPRFLKGQGQGWITAEYGMLPR

SEQ ID NO: 31451 - protein, 36 aa, Artificial sequence
  Protein classification predicting sequence
THTRNAREAAKGKQGGRTMEIQRLIARALRAAVDLK

SEQ ID NO: 31452 - protein, 9 aa, Artificial sequence
  Protein classification predicting sequence
QGTAEGEPF

SEQ ID NO: 31453 - protein, 14 aa, Artificial sequence
  Protein classification predicting sequence
QGTAEGEPFTHEEL

SEQ ID NO: 31454 - protein, 6 aa, Artificial sequence
  Protein classification predicting sequence
FGDTKV

SEQ ID NO: 31455 - protein, 6 aa, Artificial sequence
  Protein classification predicting sequence
TDMNVV

SEQ ID NO: 31456 - protein, 7 aa, Artificial sequence
  Protein classification predicting sequence
HAEGSVL

SEQ ID NO: 31457 - protein, 8 aa, Artificial sequence
  Protein classification predicting sequence
IDLAALGE

SEQ ID NO: 31458 - protein, 12 aa, Artificial sequence
  Protein classification predicting sequence
PVKDYLAATSVG

SEQ ID NO: 31459 - protein, 7 aa, Artificial sequence
  Protein classification predicting sequence
LAATSVG

SEQ ID NO: 31460 - protein, 11 aa, Artificial sequence
  Protein classification predicting sequence
EIQRLIGRSLR

SEQ ID NO: 31461 - protein, 7 aa, Artificial sequence
  Protein classification predicting sequence
EYGMLPR

SEQ ID NO: 31462 - protein, 7 aa, Artificial sequence
  Protein classification predicting sequence
DMNVVMT

SEQ ID NO: 31463 - protein, 22 aa, Artificial sequence
  Protein classification predicting sequence
YTAYAEGSVLVEFGNTKVLCNA

SEQ ID NO: 31464 - protein, 8 aa, Artificial sequence
  Protein classification predicting sequence
EIQRLIGR

SEQ ID NO: 31465 - protein, 8 aa, Artificial sequence
  Protein classification predicting sequence
REAARGKQ

SEQ ID NO: 31466 - protein, 12 aa, Artificial sequence
  Protein classification predicting sequence
TAEYGMLPRSTH

SEQ ID NO: 31467 - protein, 11 aa, Artificial sequence
  Protein classification predicting sequence
SGKLKANPMKG

SEQ ID NO: 31468 - protein, 14 aa, Artificial sequence
  Protein classification predicting sequence
GAFGRVFQARAPGL

SEQ ID NO: 31469 - protein, 10 aa, Artificial sequence
  Protein classification predicting sequence
PMCLLFEYMA

SEQ ID NO: 31470 - protein, 18 aa, Artificial sequence
  Protein classification predicting sequence
YLSERKFVHRDLATRNCL

SEQ ID NO: 31471 - protein, 6 aa, Artificial sequence
  Protein classification predicting sequence
PIRWMP

SEQ ID NO: 31472 - protein, 8 aa, Artificial sequence
  Protein classification predicting sequence
FSYGLQPY

SEQ ID NO: 31473 - protein, 7 aa, Artificial sequence
  Protein classification predicting sequence
VAVKTLK

SEQ ID NO: 31474 - protein, 9 aa, Artificial sequence
  Protein classification predicting sequence
RCGHEGMAY

SEQ ID NO: 31475 - protein, 8 aa, Artificial sequence
  Protein classification predicting sequence
AHRLGLIP

SEQ ID NO: 31476 - protein, 12 aa, Artificial sequence
  Protein classification predicting sequence
VLFAGYKVPHPL

SEQ ID NO: 31477 - protein, 9 aa, Artificial sequence
  Protein classification predicting sequence
AHRLGLIPL

SEQ ID NO: 31478 - protein, 7 aa, Artificial sequence
  Protein classification predicting sequence
HDRGYLV

SEQ ID NO: 31479 - protein, 8 aa, Artificial sequence
  Protein classification predicting sequence
LVAHNDDP

SEQ ID NO: 31480 - protein, 9 aa, Artificial sequence
  Protein classification predicting sequence
DQMFVFFPE

SEQ ID NO: 31481 - protein, 9 aa, Artificial sequence
  Protein classification predicting sequence
GMTPSAKQS

SEQ ID NO: 31482 - protein, 15 aa, Artificial sequence
  Protein classification predicting sequence
NITEHELVPEHVVMT

SEQ ID NO: 31483 - protein, 8 aa, Artificial sequence
  Protein classification predicting sequence
DPVARYFG

SEQ ID NO: 31484 - protein, 23 aa, Artificial sequence
  Protein classification predicting sequence
RGQVVKIIRPSETAGRYITYRLV

SEQ ID NO: 31485 - protein, 8 aa, Artificial sequence
  Protein classification predicting sequence
QRKMMSFQ

SEQ ID NO: 31486 - protein, 8 aa, Artificial sequence
  Protein classification predicting sequence
LVPKHIRL

SEQ ID NO: 31487 - protein, 9 aa, Artificial sequence
  Protein classification predicting sequence
GRYASYRIC

SEQ ID NO: 31488 - protein, 8 aa, Artificial sequence
  Protein classification predicting sequence
LVVNITHH

SEQ ID NO: 31489 - protein, 14 aa, Artificial sequence
  Protein classification predicting sequence
RYRLKESQLPRIQR

SEQ ID NO: 31490 - protein, 14 aa, Artificial sequence
  Protein classification predicting sequence
YLGLKRGEVVKIIR

SEQ ID NO: 31491 - protein, 7 aa, Artificial sequence
  Protein classification predicting sequence
KYCDSMG

SEQ ID NO: 31492 - protein, 13 aa, Artificial sequence
  Protein classification predicting sequence
VNITHHELVPKHI

SEQ ID NO: 31493 - protein, 7 aa, Artificial sequence
  Protein classification predicting sequence
SETSGRY

SEQ ID NO: 31494 - protein, 23 aa, Artificial sequence
  Protein classification predicting sequence
YMTKYERARVLGTRALQIAMCAP

SEQ ID NO: 31495 - protein, 12 aa, Artificial sequence
  Protein classification predicting sequence
KIPIIIRRYLPD

SEQ ID NO: 31496 - protein, 8 aa, Artificial sequence
  Protein classification predicting sequence
LGTRALQI

SEQ ID NO: 31497 - protein, 8 aa, Artificial sequence
  Protein classification predicting sequence
LEGETDPL

SEQ ID NO: 31498 - protein, 12 aa, Artificial sequence
  Protein classification predicting sequence
RRYLPDGSYEDW

SEQ ID NO: 31499 - protein, 8 aa, Artificial sequence
  Protein classification predicting sequence
VFRPFKGE

SEQ ID NO: 31500 - protein, 8 aa, Artificial sequence
  Protein classification predicting sequence
RLKIVGTR

SEQ ID NO: 31501 - protein, 7 aa, Artificial sequence
  Protein classification predicting sequence
LHPRYFG

SEQ ID NO: 31502 - protein, 8 aa, Artificial sequence
  Protein classification predicting sequence
PFKGEVVD

SEQ ID NO: 31503 - protein, 24 aa, Artificial sequence
  Protein classification predicting sequence
PGFVGIRFCQECNNMLYPKEDKEN

SEQ ID NO: 31504 - protein, 7 aa, Artificial sequence
  Protein classification predicting sequence
CIYVNKI

SEQ ID NO: 31505 - protein, 6 aa, Artificial sequence
  Protein classification predicting sequence
DPTLPR

SEQ ID NO: 31506 - protein, 8 aa, Artificial sequence
  Protein classification predicting sequence
MRLYYVCT

SEQ ID NO: 31507 - protein, 7 aa, Artificial sequence
  Protein classification predicting sequence
CNNMLYP

SEQ ID NO: 31508 - protein, 7 aa, Artificial sequence
  Protein classification predicting sequence
ACRNCDY

SEQ ID NO: 31509 - protein, 9 aa, Artificial sequence
  Protein classification predicting sequence
KEVDDVLGG

SEQ ID NO: 31510 - protein, 7 aa, Artificial sequence
  Protein classification predicting sequence
TLGNALR

SEQ ID NO: 31511 - protein, 7 aa, Artificial sequence
  Protein classification predicting sequence
LKSLSDI

SEQ ID NO: 31512 - protein, 8 aa, Artificial sequence
  Protein classification predicting sequence
GKQGRFRQ

SEQ ID NO: 31513 - protein, 7 aa, Artificial sequence
  Protein classification predicting sequence
KLADLGL

SEQ ID NO: 31514 - protein, 23 aa, Artificial sequence
  Protein classification predicting sequence
KDIIDFLEGALIANIHNHMIKVG

SEQ ID NO: 31515 - protein, 45 aa, Artificial sequence
  Protein classification predicting sequence
HPREENSIVVELEPSLATFIKQGFNNLVKWPLLNIGIVLSNTSTA

SEQ ID NO: 31516 - protein, 121 aa, Artificial sequence
  Protein classification predicting sequence
VEHIPTMKIFYKHIHKILTREMGFLVYLKRSQSERDNYITLYDFDYYIIDKDTNSVTMVDKPTELKETLLHVFQEYRLKSSQTIELIAFSSGTVINEDIVSKLTFLDVEVFNREYNNVKTI

SEQ ID NO: 31517 - protein, 28 aa, Artificial sequence
  Protein classification predicting sequence
LFVNDLMTMNIVNFFGCNSRLESYHRFD

SEQ ID NO: 31518 - protein, 20 aa, Artificial sequence
  Protein classification predicting sequence
TKVDVELFIKALSDACKKIL

SEQ ID NO: 31519 - protein, 9 aa, Artificial sequence
  Protein classification predicting sequence
NIGIEYSKD

SEQ ID NO: 31520 - protein, 13 aa, Artificial sequence
  Protein classification predicting sequence
KLSYRNKPSIATN

SEQ ID NO: 31521 - protein, 10 aa, Artificial sequence
  Protein classification predicting sequence
LRYLLFGIKC

SEQ ID NO: 31522 - protein, 69 aa, Artificial sequence
  Protein classification predicting sequence
IRELLSQYVDDANLEDLIEWAMEKSSKYYIKNIGNTKSNIEETKFESKNNIGIEYSKDSRNKLSYRNKP

SEQ ID NO: 31523 - protein, 58 aa, Artificial sequence
  Protein classification predicting sequence
IATNLEYKTLCDMIKGTSGTEKEFLRYLLFGIKCIKKGVEYNIDKIKDVSYNDYFNVL

SEQ ID NO: 31524 - protein, 61 aa, Artificial sequence
  Protein classification predicting sequence
EKYNTPCPNCKSRNTTPMMIQTRAADEPPLVRHACRDCKQHFKPPKFRAFRNLNVTTQSIH

SEQ ID NO: 31525 - protein, 31 aa, Artificial sequence
  Protein classification predicting sequence
NKEITEILPDNNPSPPESPEPASPIDDGLIR

SEQ ID NO: 31526 - protein, 6 aa, Artificial sequence
  Protein classification predicting sequence
LYIDVV

SEQ ID NO: 31527 - protein, 10 aa, Artificial sequence
  Protein classification predicting sequence
TVFQVFNESS

SEQ ID NO: 31528 - protein, 6 aa, Artificial sequence
  Protein classification predicting sequence
GHNKFP

SEQ ID NO: 31529 - protein, 8 aa, Artificial sequence
  Protein classification predicting sequence
PLKIVRFF

SEQ ID NO: 31530 - protein, 11 aa, Artificial sequence
  Protein classification predicting sequence
RYTRRISLFEI

SEQ ID NO: 31531 - protein, 10 aa, Artificial sequence
  Protein classification predicting sequence
ESYNLLQRGR

SEQ ID NO: 31532 - protein, 83 aa, Artificial sequence
  Protein classification predicting sequence
EEEEDGESLETSDIDPKSSYKIVESASTHIEDAHSNLKHIGNHISALKRRYTRRISLFEIAGIIAESYNLLQRGRLPLVSEFS

SEQ ID NO: 31533 - protein, 7 aa, Artificial sequence
  Protein classification predicting sequence
ESSFVFL

SEQ ID NO: 31534 - protein, 12 aa, Artificial sequence
  Protein classification predicting sequence
EISGKMAKKIEI

SEQ ID NO: 31535 - protein, 85 aa, Artificial sequence
  Protein classification predicting sequence
DVELPLGEIVNNSVVINVPCVITYAYYHVGDIVRGTLNIEDESNVTIQCGDLICKLSRDSGTVSFSDSKYCFFRNGNAYDNGSEV

SEQ ID NO: 31536 - protein, 9 aa, Artificial sequence
  Protein classification predicting sequence
AVLMEAQQG

SEQ ID NO: 31537 - protein, 7 aa, Artificial sequence
  Protein classification predicting sequence
GKEGRFR

SEQ ID NO: 31538 - protein, 6 aa, Artificial sequence
  Protein classification predicting sequence
PEWMVL

SEQ ID NO: 31539 - protein, 8 aa, Artificial sequence
  Protein classification predicting sequence
LTVLPVPP

SEQ ID NO: 31540 - protein, 14 aa, Artificial sequence
  Protein classification predicting sequence
CPPYNADFDGDEMN

SEQ ID NO: 31541 - protein, 7 aa, Artificial sequence
  Protein classification predicting sequence
GQQSVRG

SEQ ID NO: 31542 - protein, 8 aa, Artificial sequence
  Protein classification predicting sequence
MDPRLGVI

SEQ ID NO: 31543 - protein, 7 aa, Artificial sequence
  Protein classification predicting sequence
DSDVEIL

SEQ ID NO: 31544 - protein, 11 aa, Artificial sequence
  Protein classification predicting sequence
EDDLTHKLVDI

SEQ ID NO: 31545 - protein, 9 aa, Artificial sequence
  Protein classification predicting sequence
PPARHRSGR

SEQ ID NO: 31546 - protein, 6 aa, Artificial sequence
  Protein classification predicting sequence
RTVISP

SEQ ID NO: 31547 - protein, 12 aa, Artificial sequence
  Protein classification predicting sequence
PYNADFDGDEMN

SEQ ID NO: 31548 - protein, 16 aa, Artificial sequence
  Protein classification predicting sequence
PGEAVGTVAAQSIGEP

SEQ ID NO: 31549 - protein, 6 aa, Artificial sequence
  Protein classification predicting sequence
TFHYAG

SEQ ID NO: 31550 - protein, 7 aa, Artificial sequence
  Protein classification predicting sequence
PSTPMMT

SEQ ID NO: 31551 - protein, 7 aa, Artificial sequence
  Protein classification predicting sequence
LARAAFE

SEQ ID NO: 31552 - protein, 9 aa, Artificial sequence
  Protein classification predicting sequence
TFHYAGVAE

SEQ ID NO: 31553 - protein, 8 aa, Artificial sequence
  Protein classification predicting sequence
NVTLGLPR

SEQ ID NO: 31554 - protein, 9 aa, Artificial sequence
  Protein classification predicting sequence
QGLEVDIRH

SEQ ID NO: 31555 - protein, 11 aa, Artificial sequence
  Protein classification predicting sequence
GEAVGTVAAQS

SEQ ID NO: 31556 - protein, 10 aa, Artificial sequence
  Protein classification predicting sequence
GEKASVLARA

SEQ ID NO: 31557 - protein, 7 aa, Artificial sequence
  Protein classification predicting sequence
GLPRLIE

SEQ ID NO: 31558 - protein, 9 aa, Artificial sequence
  Protein classification predicting sequence
SVLARAAFE

SEQ ID NO: 31559 - protein, 13 aa, Artificial sequence
  Protein classification predicting sequence
MTVYLDEEHRYDR

SEQ ID NO: 31560 - protein, 16 aa, Artificial sequence
  Protein classification predicting sequence
EVARRIEGTTLENLAR

SEQ ID NO: 31561 - protein, 8 aa, Artificial sequence
  Protein classification predicting sequence
SFKSAEFE

SEQ ID NO: 31562 - protein, 14 aa, Artificial sequence
  Protein classification predicting sequence
ENVLIGQPVPVGTG

SEQ ID NO: 31563 - protein, 18 aa, Artificial sequence
  Protein classification predicting sequence
DGVLHEFTTVPGVKEDVT

SEQ ID NO: 31564 - protein, 13 aa, Artificial sequence
  Protein classification predicting sequence
LTVRSYNCLKREG

SEQ ID NO: 31565 - protein, 15 aa, Artificial sequence
  Protein classification predicting sequence
LTVRSYNCLKREGVH

SEQ ID NO: 31566 - protein, 37 aa, Artificial sequence
  Protein classification predicting sequence
HSVGELVARSEADLLDIRNFGAKSIDEVKAKLAGMGL

SEQ ID NO: 31567 - protein, 14 aa, Artificial sequence
  Protein classification predicting sequence
LKDSPPGFDPTAAA

SEQ ID NO: 31568 - protein, 10 aa, Artificial sequence
  Protein classification predicting sequence
GADDDADAGF

SEQ ID NO: 31569 - protein, 7 aa, Artificial sequence
  Protein classification predicting sequence
RTFHFAG

SEQ ID NO: 31570 - protein, 8 aa, Artificial sequence
  Protein classification predicting sequence
MLVADMMT

SEQ ID NO: 31571 - protein, 50 aa, Artificial sequence
  Protein classification predicting sequence
GTVAAQSIGEPSTQMTLNTFHYAGVAEINVTLGLPRIIEIVDARKNPSTP

SEQ ID NO: 31572 - protein, 9 aa, Artificial sequence
  Protein classification predicting sequence
EVARRIEGT

SEQ ID NO: 31573 - protein, 23 aa, Artificial sequence
  Protein classification predicting sequence
LEPLERGFGHTLGNALRRILLSS

SEQ ID NO: 31574 - protein, 6 aa, Artificial sequence
  Protein classification predicting sequence
EPLERG

SEQ ID NO: 31575 - protein, 13 aa, Artificial sequence
  Protein classification predicting sequence
TLGNALRRILLSS

SEQ ID NO: 31576 - protein, 8 aa, Artificial sequence
  Protein classification predicting sequence
LRRILLSS

SEQ ID NO: 31577 - protein, 7 aa, Artificial sequence
  Protein classification predicting sequence
ARVEQRT

SEQ ID NO: 31578 - protein, 6 aa, Artificial sequence
  Protein classification predicting sequence
RVEQRT

SEQ ID NO: 31579 - protein, 7 aa, Artificial sequence
  Protein classification predicting sequence
DPEEAIR

SEQ ID NO: 31580 - protein, 6 aa, Artificial sequence
  Protein classification predicting sequence
KGQADT

SEQ ID NO: 31581 - protein, 6 aa, Artificial sequence
  Protein classification predicting sequence
HEYSTI

SEQ ID NO: 31582 - protein, 6 aa, Artificial sequence
  Protein classification predicting sequence
GIEESV

SEQ ID NO: 31583 - protein, 10 aa, Artificial sequence
  Protein classification predicting sequence
QDGSYPIDAV

SEQ ID NO: 31584 - protein, 5 aa, Artificial sequence
  Protein classification predicting sequence
MPVRN

SEQ ID NO: 31585 - protein, 21 aa, Artificial sequence
  Protein classification predicting sequence
KQEILFLEIWTNGSLTPKEAL

SEQ ID NO: 31586 - protein, 7 aa, Artificial sequence
  Protein classification predicting sequence
NLKKNKK

SEQ ID NO: 31587 - protein, 9 aa, Artificial sequence
  Protein classification predicting sequence
IFIDQSELP

SEQ ID NO: 31588 - protein, 6 aa, Artificial sequence
  Protein classification predicting sequence
YNCLKR

SEQ ID NO: 31589 - protein, 10 aa, Artificial sequence
  Protein classification predicting sequence
MPVRNVNYSI

SEQ ID NO: 31590 - protein, 7 aa, Artificial sequence
  Protein classification predicting sequence
FIDQLEL

SEQ ID NO: 31591 - protein, 6 aa, Artificial sequence
  Protein classification predicting sequence
NCLKRA

SEQ ID NO: 31592 - protein, 8 aa, Artificial sequence
  Protein classification predicting sequence
VRSANCLK

SEQ ID NO: 31593 - protein, 7 aa, Artificial sequence
  Protein classification predicting sequence
YIGDLIQ

SEQ ID NO: 31594 - protein, 19 aa, Artificial sequence
  Protein classification predicting sequence
EILFLEIWTNGSLTPKEAL

SEQ ID NO: 31595 - protein, 7 aa, Artificial sequence
  Protein classification predicting sequence
PFLHAEE

SEQ ID NO: 31596 - protein, 5 aa, Artificial sequence
  Protein classification predicting sequence
WTNGS

SEQ ID NO: 31597 - protein, 13 aa, Artificial sequence
  Protein classification predicting sequence
LSVRAYNCLKRAQ

SEQ ID NO: 31598 - protein, 7 aa, Artificial sequence
  Protein classification predicting sequence
GIQESVH

SEQ ID NO: 31599 - protein, 7 aa, Artificial sequence
  Protein classification predicting sequence
EKQEILF

SEQ ID NO: 31600 - protein, 8 aa, Artificial sequence
  Protein classification predicting sequence
SQEDLMKI

SEQ ID NO: 31601 - protein, 6 aa, Artificial sequence
  Protein classification predicting sequence
NFGKKS

SEQ ID NO: 31602 - protein, 6 aa, Artificial sequence
  Protein classification predicting sequence
GNSLRR

SEQ ID NO: 31603 - protein, 10 aa, Artificial sequence
  Protein classification predicting sequence
EIVLRSNLYG

SEQ ID NO: 31604 - protein, 6 aa, Artificial sequence
  Protein classification predicting sequence
DIILPP

SEQ ID NO: 31605 - protein, 7 aa, Artificial sequence
  Protein classification predicting sequence
DNTQHIA

SEQ ID NO: 31606 - protein, 7 aa, Artificial sequence
  Protein classification predicting sequence
SYPIDAV

SEQ ID NO: 31607 - protein, 9 aa, Artificial sequence
  Protein classification predicting sequence
NIHTLLDLL

SEQ ID NO: 31608 - protein, 6 aa, Artificial sequence
  Protein classification predicting sequence
DSIYTP

SEQ ID NO: 31609 - protein, 10 aa, Artificial sequence
  Protein classification predicting sequence
QIDGVLHEFS

SEQ ID NO: 31610 - protein, 7 aa, Artificial sequence
  Protein classification predicting sequence
LALKIYS

SEQ ID NO: 31611 - protein, 6 aa, Artificial sequence
  Protein classification predicting sequence
THDSDV

SEQ ID NO: 31612 - protein, 6 aa, Artificial sequence
  Protein classification predicting sequence
RGYVPA

SEQ ID NO: 31613 - protein, 10 aa, Artificial sequence
  Protein classification predicting sequence
RGYVPAEGNK

SEQ ID NO: 31614 - protein, 6 aa, Artificial sequence
  Protein classification predicting sequence
VNYQVE

SEQ ID NO: 31615 - protein, 12 aa, Artificial sequence
  Protein classification predicting sequence
TEHLNIFVGLTD

SEQ ID NO: 31616 - protein, 7 aa, Artificial sequence
  Protein classification predicting sequence
AQNAEIM

SEQ ID NO: 31617 - protein, 15 aa, Artificial sequence
  Protein classification predicting sequence
MMKVRNLGRKSLEEV

SEQ ID NO: 31618 - protein, 9 aa, Artificial sequence
  Protein classification predicting sequence
KKLALKIYS

SEQ ID NO: 31619 - protein, 7 aa, Artificial sequence
  Protein classification predicting sequence
THDSDVE

SEQ ID NO: 31620 - protein, 14 aa, Artificial sequence
  Protein classification predicting sequence
NYDKLTLDVWTDGS

SEQ ID NO: 31621 - protein, 7 aa, Artificial sequence
  Protein classification predicting sequence
EISDDAK

SEQ ID NO: 31622 - protein, 33 aa, Artificial sequence
  Protein classification predicting sequence
GKFVVEPLERGYGTTLGNSLRRILLSSLPGAAV

SEQ ID NO: 31623 - protein, 28 aa, Artificial sequence
  Protein classification predicting sequence
EPLERGYGTTLGNSLRRILLSSLPGAAV

SEQ ID NO: 31624 - protein, 10 aa, Artificial sequence
  Protein classification predicting sequence
LLSSLPGAAV

SEQ ID NO: 31625 - protein, 9 aa, Artificial sequence
  Protein classification predicting sequence
VTAADITHD

SEQ ID NO: 31626 - protein, 8 aa, Artificial sequence
  Protein classification predicting sequence
EPLERGFG

SEQ ID NO: 31627 - protein, 14 aa, Artificial sequence
  Protein classification predicting sequence
EPLERGFGLTLGNA

SEQ ID NO: 31628 - protein, 27 aa, Artificial sequence
  Protein classification predicting sequence
EPLERGFGLTLGNALRRVLLSSLRGAA

SEQ ID NO: 31629 - protein, 9 aa, Artificial sequence
  Protein classification predicting sequence
GVREDVTDI

SEQ ID NO: 31630 - protein, 8 aa, Artificial sequence
  Protein classification predicting sequence
HVICTLDE

SEQ ID NO: 31631 - protein, 7 aa, Artificial sequence
  Protein classification predicting sequence
AEIRMEF

SEQ ID NO: 31632 - protein, 6 aa, Artificial sequence
  Protein classification predicting sequence
WPPENI

SEQ ID NO: 31633 - protein, 7 aa, Artificial sequence
  Protein classification predicting sequence
PLERGFG

SEQ ID NO: 31634 - protein, 31 aa, Artificial sequence
  Protein classification predicting sequence
IEPLEPGFGYTLGNSLRRTLLSSIPGAAVTS

SEQ ID NO: 31635 - protein, 10 aa, Artificial sequence
  Protein classification predicting sequence
DEPVVMYLRK

SEQ ID NO: 31636 - protein, 8 aa, Artificial sequence
  Protein classification predicting sequence
TLVELFGL

SEQ ID NO: 31637 - protein, 10 aa, Artificial sequence
  Protein classification predicting sequence
RSYNCLKREG

SEQ ID NO: 31638 - protein, 6 aa, Artificial sequence
  Protein classification predicting sequence
EFLKPR

SEQ ID NO: 31639 - protein, 6 aa, Artificial sequence
  Protein classification predicting sequence
GVLHEY

SEQ ID NO: 31640 - protein, 6 aa, Artificial sequence
  Protein classification predicting sequence
PIGRLL

SEQ ID NO: 31641 - protein, 7 aa, Artificial sequence
  Protein classification predicting sequence
VEAARVE

SEQ ID NO: 31642 - protein, 7 aa, Artificial sequence
  Protein classification predicting sequence
RTDLDKL

SEQ ID NO: 31643 - protein, 6 aa, Artificial sequence
  Protein classification predicting sequence
METNGT

SEQ ID NO: 31644 - protein, 9 aa, Artificial sequence
  Protein classification predicting sequence
KEEKPEFDP

SEQ ID NO: 31645 - protein, 34 aa, Artificial sequence
  Protein classification predicting sequence
TEVELLKTPNLGKKSLTEIKDVLASRGLSLGMRL

SEQ ID NO: 31646 - protein, 7 aa, Artificial sequence
  Protein classification predicting sequence
GYAPTEV

SEQ ID NO: 31647 - protein, 21 aa, Artificial sequence
  Protein classification predicting sequence
LLRPVDDLELTVRSANCLKAE

SEQ ID NO: 31648 - protein, 13 aa, Artificial sequence
  Protein classification predicting sequence
GRKSLNEIKEVLA

SEQ ID NO: 31649 - protein, 10 aa, Artificial sequence
  Protein classification predicting sequence
LGMKLENWPP

SEQ ID NO: 31650 - protein, 9 aa, Artificial sequence
  Protein classification predicting sequence
IQKNWQELI

SEQ ID NO: 31651 - protein, 7 aa, Artificial sequence
  Protein classification predicting sequence
FVNFEEP

SEQ ID NO: 31652 - protein, 16 aa, Artificial sequence
  Protein classification predicting sequence
SFEENKNRFTPPLFTF

SEQ ID NO: 31653 - protein, 9 aa, Artificial sequence
  Protein classification predicting sequence
AARILQDQL

SEQ ID NO: 31654 - protein, 8 aa, Artificial sequence
  Protein classification predicting sequence
MGLHLGME

SEQ ID NO: 31655 - protein, 11 aa, Artificial sequence
  Protein classification predicting sequence
GKGYVPADRNR

SEQ ID NO: 31656 - protein, 8 aa, Artificial sequence
  Protein classification predicting sequence
PRLVDIEQ

SEQ ID NO: 31657 - protein, 7 aa, Artificial sequence
  Protein classification predicting sequence
IDGVLHE

SEQ ID NO: 31658 - protein, 7 aa, Artificial sequence
  Protein classification predicting sequence
HDGDVEI

SEQ ID NO: 31659 - protein, 11 aa, Artificial sequence
  Protein classification predicting sequence
MRIKVQRGRGY

SEQ ID NO: 31660 - protein, 52 aa, Artificial sequence
  Protein classification predicting sequence
YNVEAARVEQRTDLDKLVIEMETNGTIDPEEAIRRAATILAEQLEAFVDLRD

SEQ ID NO: 31661 - protein, 23 aa, Artificial sequence
  Protein classification predicting sequence
ELLKTPNLGKKSLTEIKDVLASR

SEQ ID NO: 31662 - protein, 7 aa, Artificial sequence
  Protein classification predicting sequence
FLKPRLV

SEQ ID NO: 31663 - protein, 7 aa, Artificial sequence
  Protein classification predicting sequence
EILLNLK

SEQ ID NO: 31664 - protein, 11 aa, Artificial sequence
  Protein classification predicting sequence
ICHLTDENASI

SEQ ID NO: 31665 - protein, 17 aa, Artificial sequence
  Protein classification predicting sequence
YNVEAARVEQRTDLDKL

SEQ ID NO: 31666 - protein, 15 aa, Artificial sequence
  Protein classification predicting sequence
VEAARVEQRTDLDKL

SEQ ID NO: 31667 - protein, 7 aa, Artificial sequence
  Protein classification predicting sequence
KEEKPEF

SEQ ID NO: 31668 - protein, 6 aa, Artificial sequence
  Protein classification predicting sequence
SVTEFL

SEQ ID NO: 31669 - protein, 8 aa, Artificial sequence
  Protein classification predicting sequence
TLGNALRR

SEQ ID NO: 31670 - protein, 5 aa, Artificial sequence
  Protein classification predicting sequence
HEYST

SEQ ID NO: 31671 - protein, 7 aa, Artificial sequence
  Protein classification predicting sequence
RLYYGRF

SEQ ID NO: 31672 - protein, 8 aa, Artificial sequence
  Protein classification predicting sequence
VPHEYSTI

SEQ ID NO: 31673 - protein, 11 aa, Artificial sequence
  Protein classification predicting sequence
PPSVEIVDTTQ

SEQ ID NO: 31674 - protein, 15 aa, Artificial sequence
  Protein classification predicting sequence
EASRNLIDLFIPFLH

SEQ ID NO: 31675 - protein, 8 aa, Artificial sequence
  Protein classification predicting sequence
RTYNCLKR

SEQ ID NO: 31676 - protein, 10 aa, Artificial sequence
  Protein classification predicting sequence
SNIHTLLDLL

SEQ ID NO: 31677 - protein, 13 aa, Artificial sequence
  Protein classification predicting sequence
TLLDLLNNSQEDL

SEQ ID NO: 31678 - protein, 6 aa, Artificial sequence
  Protein classification predicting sequence
RSYNCL

SEQ ID NO: 31679 - protein, 12 aa, Artificial sequence
  Protein classification predicting sequence
GAAVTAIQIDGV

SEQ ID NO: 31680 - protein, 7 aa, Artificial sequence
  Protein classification predicting sequence
DIVLNIK

SEQ ID NO: 31681 - protein, 6 aa, Artificial sequence
  Protein classification predicting sequence
EGTCIT

SEQ ID NO: 31682 - protein, 64 aa, Artificial sequence
  Protein classification predicting sequence
LGINEIELSVRSTNCLSNANIETIGELVIMPEPRLLQFRNFGKKSLCEIKNKLKEMKLELGMDL

SEQ ID NO: 31683 - protein, 7 aa, Artificial sequence
  Protein classification predicting sequence
DAVFMPV

SEQ ID NO: 31684 - protein, 7 aa, Artificial sequence
  Protein classification predicting sequence
EFLKPRL

SEQ ID NO: 31685 - protein, 8 aa, Artificial sequence
  Protein classification predicting sequence
MEPFERGY

SEQ ID NO: 31686 - protein, 12 aa, Artificial sequence
  Protein classification predicting sequence
GYAPTEVTIAGV

SEQ ID NO: 31687 - protein, 10 aa, Artificial sequence
  Protein classification predicting sequence
ARVEQRTDLD

SEQ ID NO: 31688 - protein, 7 aa, Artificial sequence
  Protein classification predicting sequence
DLHIATL

SEQ ID NO: 31689 - protein, 6 aa, Artificial sequence
  Protein classification predicting sequence
RGRGYV

SEQ ID NO: 31690 - protein, 8 aa, Artificial sequence
  Protein classification predicting sequence
EPLERGYG

SEQ ID NO: 31691 - protein, 7 aa, Artificial sequence
  Protein classification predicting sequence
LEIWTNG

SEQ ID NO: 31692 - protein, 7 aa, Artificial sequence
  Protein classification predicting sequence
GPGVVTA

SEQ ID NO: 31693 - protein, 8 aa, Artificial sequence
  Protein classification predicting sequence
IYSPVLKV

SEQ ID NO: 31694 - protein, 9 aa, Artificial sequence
  Protein classification predicting sequence
NPDLHIATL

SEQ ID NO: 31695 - protein, 7 aa, Artificial sequence
  Protein classification predicting sequence
IGRIPVD

SEQ ID NO: 31696 - protein, 15 aa, Artificial sequence
  Protein classification predicting sequence
ESDLLDIRNFGQKSI

SEQ ID NO: 31697 - protein, 17 aa, Artificial sequence
  Protein classification predicting sequence
YKVEATRVEQRTDFDKL

SEQ ID NO: 31698 - protein, 18 aa, Artificial sequence
  Protein classification predicting sequence
ASAGKTLVELFGLARELN

SEQ ID NO: 31699 - protein, 10 aa, Artificial sequence
  Protein classification predicting sequence
EIDGVLHEYS

SEQ ID NO: 31700 - protein, 9 aa, Artificial sequence
  Protein classification predicting sequence
QLAAFVDLK

SEQ ID NO: 31701 - protein, 7 aa, Artificial sequence
  Protein classification predicting sequence
DLELTVR

SEQ ID NO: 31702 - protein, 7 aa, Artificial sequence
  Protein classification predicting sequence
ANCLKAE

SEQ ID NO: 31703 - protein, 49 aa, Artificial sequence
  Protein classification predicting sequence
SFEENKNRFTPPLFTFQKRLTNLKKNKKGIPLNCIFIDQLELTSRTYNC

SEQ ID NO: 31704 - protein, 13 aa, Artificial sequence
  Protein classification predicting sequence
TLLDLLSKTEEDL

SEQ ID NO: 31705 - protein, 7 aa, Artificial sequence
  Protein classification predicting sequence
IFIDQLE

SEQ ID NO: 31706 - protein, 11 aa, Artificial sequence
  Protein classification predicting sequence
LSVRAYNCLKR

SEQ ID NO: 31707 - protein, 6 aa, Artificial sequence
  Protein classification predicting sequence
NFGQKS

SEQ ID NO: 31708 - protein, 9 aa, Artificial sequence
  Protein classification predicting sequence
YGEFVLEPL

SEQ ID NO: 31709 - protein, 26 aa, Artificial sequence
  Protein classification predicting sequence
SSIPGTAVTSVYIEDVLHEFSTIPGV

SEQ ID NO: 31710 - protein, 6 aa, Artificial sequence
  Protein classification predicting sequence
VWTDGS

SEQ ID NO: 31711 - protein, 12 aa, Artificial sequence
  Protein classification predicting sequence
TRVLHSLKEEGI

SEQ ID NO: 31712 - protein, 8 aa, Artificial sequence
  Protein classification predicting sequence
PGIGERSL

SEQ ID NO: 31713 - protein, 8 aa, Artificial sequence
  Protein classification predicting sequence
IGDLVQRT

SEQ ID NO: 31714 - protein, 9 aa, Artificial sequence
  Protein classification predicting sequence
GRKSLNEIK

SEQ ID NO: 31715 - protein, 7 aa, Artificial sequence
  Protein classification predicting sequence
VLHEFST

SEQ ID NO: 31716 - protein, 11 aa, Artificial sequence
  Protein classification predicting sequence
MPIGVLPVDSI

SEQ ID NO: 31717 - protein, 7 aa, Artificial sequence
  Protein classification predicting sequence
VENTRVG

SEQ ID NO: 31718 - protein, 11 aa, Artificial sequence
  Protein classification predicting sequence
SLAAKIMTEHL

SEQ ID NO: 31719 - protein, 12 aa, Artificial sequence
  Protein classification predicting sequence
HDGDVEIVKPQH

SEQ ID NO: 31720 - protein, 8 aa, Artificial sequence
  Protein classification predicting sequence
RGRGYVPA

SEQ ID NO: 31721 - protein, 9 aa, Artificial sequence
  Protein classification predicting sequence
RGRGYVPAS

SEQ ID NO: 31722 - protein, 11 aa, Artificial sequence
  Protein classification predicting sequence
RGRGYVPASAR

SEQ ID NO: 31723 - protein, 14 aa, Artificial sequence
  Protein classification predicting sequence
EEDERPIGRLLVDA

SEQ ID NO: 31724 - protein, 54 aa, Artificial sequence
  Protein classification predicting sequence
NYSIFSCGNGNEKHEILFLEIWTNGSLTPKEALYEASRNLIDLFLPFLHAEEEG

SEQ ID NO: 31725 - protein, 8 aa, Artificial sequence
  Protein classification predicting sequence
EEKTLEID

SEQ ID NO: 31726 - protein, 6 aa, Artificial sequence
  Protein classification predicting sequence
KTLEID

SEQ ID NO: 31727 - protein, 15 aa, Artificial sequence
  Protein classification predicting sequence
VENTRVGQVTDYDKL

SEQ ID NO: 31728 - protein, 45 aa, Artificial sequence
  Protein classification predicting sequence
DVWTDGSIGPKEAISLGAKILTEHLNIFVGLTDEAQNAEIMVEKE

SEQ ID NO: 31729 - protein, 10 aa, Artificial sequence
  Protein classification predicting sequence
GTTLGNSLRR

SEQ ID NO: 31730 - protein, 8 aa, Artificial sequence
  Protein classification predicting sequence
TLGNSLRR

SEQ ID NO: 31731 - protein, 6 aa, Artificial sequence
  Protein classification predicting sequence
LGMKLE

SEQ ID NO: 31732 - protein, 10 aa, Artificial sequence
  Protein classification predicting sequence
GNALRRVLLS

SEQ ID NO: 31733 - protein, 10 aa, Artificial sequence
  Protein classification predicting sequence
REDVLDILLN

SEQ ID NO: 31734 - protein, 6 aa, Artificial sequence
  Protein classification predicting sequence
YGRFIL

SEQ ID NO: 31735 - protein, 8 aa, Artificial sequence
  Protein classification predicting sequence
LLEIKNFG

SEQ ID NO: 31736 - protein, 6 aa, Artificial sequence
  Protein classification predicting sequence
HEFSTI

SEQ ID NO: 31737 - protein, 16 aa, Artificial sequence
  Protein classification predicting sequence
IEELQLSVRAYNCLKR

SEQ ID NO: 31738 - protein, 35 aa, Artificial sequence
  Protein classification predicting sequence
EVEIDGVLHEYSSKEGVQEDILEVLLNLKGLAVKV

SEQ ID NO: 31739 - protein, 10 aa, Artificial sequence
  Protein classification predicting sequence
RPIGRLLVDA

SEQ ID NO: 31740 - protein, 7 aa, Artificial sequence
  Protein classification predicting sequence
SSTHAKV

SEQ ID NO: 31741 - protein, 6 aa, Artificial sequence
  Protein classification predicting sequence
NPDHVI

SEQ ID NO: 31742 - protein, 11 aa, Artificial sequence
  Protein classification predicting sequence
ERPIGRLLVDA

SEQ ID NO: 31743 - protein, 26 aa, Artificial sequence
  Protein classification predicting sequence
PEEAIRRAATILAEQLDAFVDLRDVR

SEQ ID NO: 31744 - protein, 7 aa, Artificial sequence
  Protein classification predicting sequence
RFILSPL

SEQ ID NO: 31745 - protein, 6 aa, Artificial sequence
  Protein classification predicting sequence
EGVQED

SEQ ID NO: 31746 - protein, 9 aa, Artificial sequence
  Protein classification predicting sequence
LLNLKGLAV

SEQ ID NO: 31747 - protein, 8 aa, Artificial sequence
  Protein classification predicting sequence
THDGDVEI

SEQ ID NO: 31748 - protein, 10 aa, Artificial sequence
  Protein classification predicting sequence
NPEHVICHLT

SEQ ID NO: 31749 - protein, 7 aa, Artificial sequence
  Protein classification predicting sequence
HVICHLT

SEQ ID NO: 31750 - protein, 7 aa, Artificial sequence
  Protein classification predicting sequence
DASFSPV

SEQ ID NO: 31751 - protein, 8 aa, Artificial sequence
  Protein classification predicting sequence
SPVERIAY

SEQ ID NO: 31752 - protein, 49 aa, Artificial sequence
  Protein classification predicting sequence
YIGDLVQRTEVELLKTPNLGKKSLTEIKDVLASRGLSLGMRLENWPPAS

SEQ ID NO: 31753 - protein, 11 aa, Artificial sequence
  Protein classification predicting sequence
GKFVVEPLERG

SEQ ID NO: 31754 - protein, 7 aa, Artificial sequence
  Protein classification predicting sequence
GRGYVPA

SEQ ID NO: 31755 - protein, 8 aa, Artificial sequence
  Protein classification predicting sequence
DKSEADMM

SEQ ID NO: 31756 - protein, 17 aa, Artificial sequence
  Protein classification predicting sequence
EPLERGYGTTLGNSLRR

SEQ ID NO: 31757 - protein, 13 aa, Artificial sequence
  Protein classification predicting sequence
LLSSLPGAAVTSI

SEQ ID NO: 31758 - protein, 7 aa, Artificial sequence
  Protein classification predicting sequence
DSIYTPV

SEQ ID NO: 31759 - protein, 6 aa, Artificial sequence
  Protein classification predicting sequence
SVRAYN

SEQ ID NO: 31760 - protein, 7 aa, Artificial sequence
  Protein classification predicting sequence
EEVKVKL

SEQ ID NO: 31761 - protein, 6 aa, Artificial sequence
  Protein classification predicting sequence
VTAGDI

SEQ ID NO: 31762 - protein, 17 aa, Artificial sequence
  Protein classification predicting sequence
DFDKLTLDVWTNGSITP

SEQ ID NO: 31763 - protein, 9 aa, Artificial sequence
  Protein classification predicting sequence
LEPLERGFG

SEQ ID NO: 31764 - protein, 7 aa, Artificial sequence
  Protein classification predicting sequence
ETNGTID

SEQ ID NO: 31765 - protein, 10 aa, Artificial sequence
  Protein classification predicting sequence
LVVSSEHDEP

SEQ ID NO: 31766 - protein, 7 aa, Artificial sequence
  Protein classification predicting sequence
IPIDSIY

SEQ ID NO: 31767 - protein, 8 aa, Artificial sequence
  Protein classification predicting sequence
AEGIEIGP

SEQ ID NO: 31768 - protein, 7 aa, Artificial sequence
  Protein classification predicting sequence
IETIEIS

SEQ ID NO: 31769 - protein, 8 aa, Artificial sequence
  Protein classification predicting sequence
DAKYGKFV

SEQ ID NO: 31770 - protein, 9 aa, Artificial sequence
  Protein classification predicting sequence
RGRGYTPAD

SEQ ID NO: 31771 - protein, 9 aa, Artificial sequence
  Protein classification predicting sequence
VQELADKSE

SEQ ID NO: 31772 - protein, 24 aa, Artificial sequence
  Protein classification predicting sequence
MMKVRNLGRKSLEEVKVKLADLGL

SEQ ID NO: 31773 - protein, 12 aa, Artificial sequence
  Protein classification predicting sequence
SFEENKNRFTPP

SEQ ID NO: 31774 - protein, 9 aa, Artificial sequence
  Protein classification predicting sequence
EGTCITRAK

SEQ ID NO: 31775 - protein, 6 aa, Artificial sequence
  Protein classification predicting sequence
RDASIC

SEQ ID NO: 31776 - protein, 7 aa, Artificial sequence
  Protein classification predicting sequence
IILPPSV

SEQ ID NO: 31777 - protein, 10 aa, Artificial sequence
  Protein classification predicting sequence
IFIDQLELPP

SEQ ID NO: 31778 - protein, 6 aa, Artificial sequence
  Protein classification predicting sequence
GSTQTL

SEQ ID NO: 31779 - protein, 6 aa, Artificial sequence
  Protein classification predicting sequence
QPIANL

SEQ ID NO: 31780 - protein, 7 aa, Artificial sequence
  Protein classification predicting sequence
LQIKRDR

SEQ ID NO: 31781 - protein, 13 aa, Artificial sequence
  Protein classification predicting sequence
EEEGTSFEENKNR

SEQ ID NO: 31782 - protein, 26 aa, Artificial sequence
  Protein classification predicting sequence
SRTYNCLKRANIHTLLDLLSKTEEDL

SEQ ID NO: 31783 - protein, 6 aa, Artificial sequence
  Protein classification predicting sequence
DAVFMP

SEQ ID NO: 31784 - protein, 5 aa, Artificial sequence
  Protein classification predicting sequence
YNCLK

SEQ ID NO: 31785 - protein, 6 aa, Artificial sequence
  Protein classification predicting sequence
QWKCVE

SEQ ID NO: 31786 - protein, 9 aa, Artificial sequence
  Protein classification predicting sequence
MPVRNVNYS

SEQ ID NO: 31787 - protein, 9 aa, Artificial sequence
  Protein classification predicting sequence
SAEEVIEAL

SEQ ID NO: 31788 - protein, 9 aa, Artificial sequence
  Protein classification predicting sequence
IDGVLHEYS

SEQ ID NO: 31789 - protein, 7 aa, Artificial sequence
  Protein classification predicting sequence
LDASFSP

SEQ ID NO: 31790 - protein, 7 aa, Artificial sequence
  Protein classification predicting sequence
KSIDEVK

SEQ ID NO: 31791 - protein, 6 aa, Artificial sequence
  Protein classification predicting sequence
NLGKKS

SEQ ID NO: 31792 - protein, 6 aa, Artificial sequence
  Protein classification predicting sequence
RRVLLS

SEQ ID NO: 31793 - protein, 35 aa, Artificial sequence
  Protein classification predicting sequence
LVVSSEEDEPVTMYLRKQGPGEVTAGDIVPPAGVT

SEQ ID NO: 31794 - protein, 9 aa, Artificial sequence
  Protein classification predicting sequence
IATLNDKGK

SEQ ID NO: 31795 - protein, 7 aa, Artificial sequence
  Protein classification predicting sequence
RRVLLSS

SEQ ID NO: 31796 - protein, 6 aa, Artificial sequence
  Protein classification predicting sequence
LHIATL

SEQ ID NO: 31797 - protein, 6 aa, Artificial sequence
  Protein classification predicting sequence
IILNLK

SEQ ID NO: 31798 - protein, 7 aa, Artificial sequence
  Protein classification predicting sequence
TEFLKPR

SEQ ID NO: 31799 - protein, 9 aa, Artificial sequence
  Protein classification predicting sequence
EDVVDILLN

SEQ ID NO: 31800 - protein, 7 aa, Artificial sequence
  Protein classification predicting sequence
DVEILNP

SEQ ID NO: 31801 - protein, 6 aa, Artificial sequence
  Protein classification predicting sequence
IWTNGS

SEQ ID NO: 31802 - protein, 7 aa, Artificial sequence
  Protein classification predicting sequence
LLSSIPG

SEQ ID NO: 31803 - protein, 12 aa, Artificial sequence
  Protein classification predicting sequence
ARVEQRTDLDKL

SEQ ID NO: 31804 - protein, 10 aa, Artificial sequence
  Protein classification predicting sequence
YIGDLIQRTE

SEQ ID NO: 31805 - protein, 7 aa, Artificial sequence
  Protein classification predicting sequence
LENWPPA

SEQ ID NO: 31806 - protein, 14 aa, Artificial sequence
  Protein classification predicting sequence
LVVSSEEDEPVTMY

SEQ ID NO: 31807 - protein, 12 aa, Artificial sequence
  Protein classification predicting sequence
VTAGDIVPPAGV

SEQ ID NO: 31808 - protein, 16 aa, Artificial sequence
  Protein classification predicting sequence
ELVVERGRGYVPAVQN

SEQ ID NO: 31809 - protein, 21 aa, Artificial sequence
  Protein classification predicting sequence
EIGRIPVDSIYSPVLKVTYKV

SEQ ID NO: 31810 - protein, 43 aa, Artificial sequence
  Protein classification predicting sequence
RDALASAGKTLVELFGLARELNVEAEGIEIGPSPAEADHIASF

SEQ ID NO: 31811 - protein, 9 aa, Artificial sequence
  Protein classification predicting sequence
LGLSLKDSP

SEQ ID NO: 31812 - protein, 6 aa, Artificial sequence
  Protein classification predicting sequence
DASICV

SEQ ID NO: 31813 - protein, 10 aa, Artificial sequence
  Protein classification predicting sequence
QIDGALHEFS

SEQ ID NO: 31814 - protein, 6 aa, Artificial sequence
  Protein classification predicting sequence
ERGRGY

SEQ ID NO: 31815 - protein, 11 aa, Artificial sequence
  Protein classification predicting sequence
TPVSRVTYQVE

SEQ ID NO: 31816 - protein, 13 aa, Artificial sequence
  Protein classification predicting sequence
TRVGQVANYDKLT

SEQ ID NO: 31817 - protein, 10 aa, Artificial sequence
  Protein classification predicting sequence
EKEEDQKEKV

SEQ ID NO: 31818 - protein, 19 aa, Artificial sequence
  Protein classification predicting sequence
MMKVRNLGRKSLEEVKVKL

SEQ ID NO: 31819 - protein, 10 aa, Artificial sequence
  Protein classification predicting sequence
KLEDLGLGLR

SEQ ID NO: 31820 - protein, 7 aa, Artificial sequence
  Protein classification predicting sequence
EFSTIPG

SEQ ID NO: 31821 - protein, 8 aa, Artificial sequence
  Protein classification predicting sequence
ASICVKGP

SEQ ID NO: 31822 - protein, 7 aa, Artificial sequence
  Protein classification predicting sequence
LPPSVEI

SEQ ID NO: 31823 - protein, 10 aa, Artificial sequence
  Protein classification predicting sequence
EASRNLIDLF

SEQ ID NO: 31824 - protein, 7 aa, Artificial sequence
  Protein classification predicting sequence
SQEDLMK

SEQ ID NO: 31825 - protein, 40 aa, Artificial sequence
  Protein classification predicting sequence
AKFGSVPHEYSTIAGIEESVQEILLNLKEIVLRSNLYGVR

SEQ ID NO: 31826 - protein, 7 aa, Artificial sequence
  Protein classification predicting sequence
IKRDRGY

SEQ ID NO: 31827 - protein, 7 aa, Artificial sequence
  Protein classification predicting sequence
ENKNRFT

SEQ ID NO: 31828 - protein, 13 aa, Artificial sequence
  Protein classification predicting sequence
IPLNCIFIDQLEL

SEQ ID NO: 31829 - protein, 7 aa, Artificial sequence
  Protein classification predicting sequence
RIDSFRM

SEQ ID NO: 31830 - protein, 10 aa, Artificial sequence
  Protein classification predicting sequence
IWDTLEKHLP

SEQ ID NO: 31831 - protein, 5 aa, Artificial sequence
  Protein classification predicting sequence
DASIC

SEQ ID NO: 31832 - protein, 16 aa, Artificial sequence
  Protein classification predicting sequence
PPYVEIVDNTQHIASL

SEQ ID NO: 31833 - protein, 8 aa, Artificial sequence
  Protein classification predicting sequence
TAQDIILP

SEQ ID NO: 31834 - protein, 6 aa, Artificial sequence
  Protein classification predicting sequence
NLIDLF

SEQ ID NO: 31835 - protein, 13 aa, Artificial sequence
  Protein classification predicting sequence
RGRGYVPASARIH

SEQ ID NO: 31836 - protein, 29 aa, Artificial sequence
  Protein classification predicting sequence
GPVVAGDITHDGDVEIANPEHVICHLTDD

SEQ ID NO: 31837 - protein, 7 aa, Artificial sequence
  Protein classification predicting sequence
ISMRIKV

SEQ ID NO: 31838 - protein, 12 aa, Artificial sequence
  Protein classification predicting sequence
PEEAIRRAATIL

SEQ ID NO: 31839 - protein, 16 aa, Artificial sequence
  Protein classification predicting sequence
PEEAIRRAATILAEQL

SEQ ID NO: 31840 - protein, 7 aa, Artificial sequence
  Protein classification predicting sequence
LQWKCVE

SEQ ID NO: 31841 - protein, 7 aa, Artificial sequence
  Protein classification predicting sequence
LSPLRKG

SEQ ID NO: 31842 - protein, 7 aa, Artificial sequence
  Protein classification predicting sequence
DTTQHIA

SEQ ID NO: 31843 - protein, 9 aa, Artificial sequence
  Protein classification predicting sequence
IFIDQLELP

SEQ ID NO: 31844 - protein, 5 aa, Artificial sequence
  Protein classification predicting sequence
CVESR

SEQ ID NO: 31845 - protein, 7 aa, Artificial sequence
  Protein classification predicting sequence
FVIEPLE

SEQ ID NO: 31846 - protein, 13 aa, Artificial sequence
  Protein classification predicting sequence
RELNVEAEGIEIG

SEQ ID NO: 31847 - protein, 10 aa, Artificial sequence
  Protein classification predicting sequence
VNFTIDETAV

SEQ ID NO: 31848 - protein, 62 aa, Artificial sequence
  Protein classification predicting sequence
VSMPVRNVNYSIFSCGNGNEKHEILFLEIWTNGSLTPKEALYEASRNLIDLFLPFLHAEEEG

SEQ ID NO: 31849 - protein, 81 aa, Artificial sequence
  Protein classification predicting sequence
TRAKITLEPLERGFGHTLGNALRRILLSSMPGCAVVEAEIDGVLHEYSAIEGVQEDVIEILLNLKGLAIKLHGRDEVTLTL

SEQ ID NO: 31850 - protein, 20 aa, Artificial sequence
  Protein classification predicting sequence
KKGSGVVTAADIQLDHDVEI

SEQ ID NO: 31851 - protein, 8 aa, Artificial sequence
  Protein classification predicting sequence
DHVIANLA

SEQ ID NO: 31852 - protein, 11 aa, Artificial sequence
  Protein classification predicting sequence
VARGRGYEPAD

SEQ ID NO: 31853 - protein, 18 aa, Artificial sequence
  Protein classification predicting sequence
YVVENARVEQRTNLDKLV

SEQ ID NO: 31854 - protein, 39 aa, Artificial sequence
  Protein classification predicting sequence
DLETNGTLDPEEAIRRAATILQQQLAAFVDLKGDSEPVV

SEQ ID NO: 31855 - protein, 6 aa, Artificial sequence
  Protein classification predicting sequence
NWPPAS

SEQ ID NO: 31856 - protein, 10 aa, Artificial sequence
  Protein classification predicting sequence
GRGYVPGNVR

SEQ ID NO: 31857 - protein, 10 aa, Artificial sequence
  Protein classification predicting sequence
IGRIVLDASF

SEQ ID NO: 31858 - protein, 13 aa, Artificial sequence
  Protein classification predicting sequence
ARVEQRTDLDKLV

SEQ ID NO: 31859 - protein, 12 aa, Artificial sequence
  Protein classification predicting sequence
IETNGVISPEEA

SEQ ID NO: 31860 - protein, 6 aa, Artificial sequence
  Protein classification predicting sequence
PEEAIR

SEQ ID NO: 31861 - protein, 7 aa, Artificial sequence
  Protein classification predicting sequence
GPKRMVV

SEQ ID NO: 31862 - protein, 9 aa, Artificial sequence
  Protein classification predicting sequence
AGDIQTVGD

SEQ ID NO: 31863 - protein, 11 aa, Artificial sequence
  Protein classification predicting sequence
VTAGDIQTVGD

SEQ ID NO: 31864 - protein, 17 aa, Artificial sequence
  Protein classification predicting sequence
EDAPIGLIPVDSLYSPV

SEQ ID NO: 31865 - protein, 9 aa, Artificial sequence
  Protein classification predicting sequence
EDVTDIVLN

SEQ ID NO: 31866 - protein, 7 aa, Artificial sequence
  Protein classification predicting sequence
DLVQRTE

SEQ ID NO: 31867 - protein, 7 aa, Artificial sequence
  Protein classification predicting sequence
LIKPNKV

SEQ ID NO: 31868 - protein, 9 aa, Artificial sequence
  Protein classification predicting sequence
HEFSSIPGV

SEQ ID NO: 31869 - protein, 7 aa, Artificial sequence
  Protein classification predicting sequence
YKVENTR

SEQ ID NO: 31870 - protein, 17 aa, Artificial sequence
  Protein classification predicting sequence
MLRTPNFGRKSLNEIKE

SEQ ID NO: 31871 - protein, 10 aa, Artificial sequence
  Protein classification predicting sequence
GRKSLNEIKE

SEQ ID NO: 31872 - protein, 53 aa, Artificial sequence
  Protein classification predicting sequence
WKCVESRVDSKRLYYGRFILSPLRKGQADTVGIALRRALLGEIEGTCITRAKF

SEQ ID NO: 31873 - protein, 96 aa, Artificial sequence
  Protein classification predicting sequence
EPIDFCIDLQIKRDRGYQTELRKNYQDGSYPIDAVSMPVRNVNYSIFSCGNGNEKHEILFLEIWTNGSLTPKEALYEASRNLIDLFLPFLHAEEEG

SEQ ID NO: 31874 - protein, 10 aa, Artificial sequence
  Protein classification predicting sequence
KEGVQEDILE

SEQ ID NO: 31875 - protein, 12 aa, Artificial sequence
  Protein classification predicting sequence
ATILAEQLDAFV

SEQ ID NO: 31876 - protein, 10 aa, Artificial sequence
  Protein classification predicting sequence
EILLNLKGLA

SEQ ID NO: 31877 - protein, 7 aa, Artificial sequence
  Protein classification predicting sequence
RIAYNVE

SEQ ID NO: 31878 - protein, 14 aa, Artificial sequence
  Protein classification predicting sequence
LDKLVIDMETNGTL

SEQ ID NO: 31879 - protein, 8 aa, Artificial sequence
  Protein classification predicting sequence
AFVDLRDV

SEQ ID NO: 31880 - protein, 6 aa, Artificial sequence
  Protein classification predicting sequence
VLHEFS

SEQ ID NO: 31881 - protein, 7 aa, Artificial sequence
  Protein classification predicting sequence
DALFNPV

SEQ ID NO: 31882 - protein, 6 aa, Artificial sequence
  Protein classification predicting sequence
PVRNVN

SEQ ID NO: 31883 - protein, 10 aa, Artificial sequence
  Protein classification predicting sequence
TLQWKCVESR

SEQ ID NO: 31884 - protein, 9 aa, Artificial sequence
  Protein classification predicting sequence
YGRFILSPL

SEQ ID NO: 31885 - protein, 20 aa, Artificial sequence
  Protein classification predicting sequence
IEELDLSVRSYNCLKRAGIN

SEQ ID NO: 31886 - protein, 9 aa, Artificial sequence
  Protein classification predicting sequence
LALKIYSEE

SEQ ID NO: 31887 - protein, 7 aa, Artificial sequence
  Protein classification predicting sequence
KTLEIDV

SEQ ID NO: 31888 - protein, 11 aa, Artificial sequence
  Protein classification predicting sequence
LTDEAQNAEIM

SEQ ID NO: 31889 - protein, 35 aa, Artificial sequence
  Protein classification predicting sequence
DEGEVTASDITHDSDVEILNPELKIATVSKGGHLK

SEQ ID NO: 31890 - protein, 87 aa, Artificial sequence
  Protein classification predicting sequence
RLVANKGRGYALAEQNNTSDLPIGVIPVDSLYSPVERVNYTVENTRVGQSSDFDKLTLDVWTNGSITPQESVSLAAKIMTEHLNIFV

SEQ ID NO: 31891 - protein, 16 aa, Artificial sequence
  Protein classification predicting sequence
MMKVRNLGRKSLEEVK

SEQ ID NO: 31892 - protein, 6 aa, Artificial sequence
  Protein classification predicting sequence
VMKETE

SEQ ID NO: 31893 - protein, 23 aa, Artificial sequence
  Protein classification predicting sequence
TIEELDLSVRSYNCLKRAGINTV

SEQ ID NO: 31894 - protein, 7 aa, Artificial sequence
  Protein classification predicting sequence
DLTEKSE

SEQ ID NO: 31895 - protein, 17 aa, Artificial sequence
  Protein classification predicting sequence
EMMKVRNLGRKSLEEVK

SEQ ID NO: 31896 - protein, 11 aa, Artificial sequence
  Protein classification predicting sequence
ITKIDENKDYG

SEQ ID NO: 31897 - protein, 20 aa, Artificial sequence
  Protein classification predicting sequence
FVIEPLERGYGTTLGNSLRR

SEQ ID NO: 31898 - protein, 7 aa, Artificial sequence
  Protein classification predicting sequence
PGVREDV

SEQ ID NO: 31899 - protein, 13 aa, Artificial sequence
  Protein classification predicting sequence
PGVREDVMQIILN

SEQ ID NO: 31900 - protein, 12 aa, Artificial sequence
  Protein classification predicting sequence
TAGDILTDSDIE

SEQ ID NO: 31901 - protein, 10 aa, Artificial sequence
  Protein classification predicting sequence
VNPDHYLFTI

SEQ ID NO: 31902 - protein, 21 aa, Artificial sequence
  Protein classification predicting sequence
KVNYQVEPARVGSNDGFDKLT

SEQ ID NO: 31903 - protein, 16 aa, Artificial sequence
  Protein classification predicting sequence
TNGTIIPEDALGLSAR

SEQ ID NO: 31904 - protein, 8 aa, Artificial sequence
  Protein classification predicting sequence
IDGVLHEF

SEQ ID NO: 31905 - protein, 22 aa, Artificial sequence
  Protein classification predicting sequence
TIEELDLSVRSYNCLKRAGINT

SEQ ID NO: 31906 - protein, 8 aa, Artificial sequence
  Protein classification predicting sequence
MMKVRNLG

SEQ ID NO: 31907 - protein, 6 aa, Artificial sequence
  Protein classification predicting sequence
RVNYTV

SEQ ID NO: 31908 - protein, 8 aa, Artificial sequence
  Protein classification predicting sequence
RIAGVNHE

SEQ ID NO: 31909 - protein, 12 aa, Artificial sequence
  Protein classification predicting sequence
LIELFQPLATVT

SEQ ID NO: 31910 - protein, 6 aa, Artificial sequence
  Protein classification predicting sequence
VNYTVE

SEQ ID NO: 31911 - protein, 8 aa, Artificial sequence
  Protein classification predicting sequence
CVESRVDS

SEQ ID NO: 31912 - protein, 6 aa, Artificial sequence
  Protein classification predicting sequence
EIVLRS

SEQ ID NO: 31913 - protein, 5 aa, Artificial sequence
  Protein classification predicting sequence
RAYNC

SEQ ID NO: 31914 - protein, 9 aa, Artificial sequence
  Protein classification predicting sequence
SKLKAPVFT

SEQ ID NO: 31915 - protein, 19 aa, Artificial sequence
  Protein classification predicting sequence
ADVEIMNPDLHIATLEEGG

SEQ ID NO: 31916 - protein, 15 aa, Artificial sequence
  Protein classification predicting sequence
MEVRVDRGVGYVPAE

SEQ ID NO: 31917 - protein, 6 aa, Artificial sequence
  Protein classification predicting sequence
GYVPAE

SEQ ID NO: 31918 - protein, 14 aa, Artificial sequence
  Protein classification predicting sequence
HGIKDRINAIPVDA

SEQ ID NO: 31919 - protein, 45 aa, Artificial sequence
  Protein classification predicting sequence
FSPVRRVAFQVEDTRLGQRTDLDKLTLRIWTDGSVTPLEALNQAV

SEQ ID NO: 31920 - protein, 37 aa, Artificial sequence
  Protein classification predicting sequence
LDLPLEELGLSTRVLHSLKEEGIESVRALLALNLKDL

SEQ ID NO: 31921 - protein, 13 aa, Artificial sequence
  Protein classification predicting sequence
NIPGIGERSLEEI

SEQ ID NO: 31922 - protein, 8 aa, Artificial sequence
  Protein classification predicting sequence
DLLSKTEE

SEQ ID NO: 31923 - protein, 7 aa, Artificial sequence
  Protein classification predicting sequence
PGVKEDV

SEQ ID NO: 31924 - protein, 16 aa, Artificial sequence
  Protein classification predicting sequence
PGVKEDVVEIILNLKE

SEQ ID NO: 31925 - protein, 6 aa, Artificial sequence
  Protein classification predicting sequence
PIGVIP

SEQ ID NO: 31926 - protein, 7 aa, Artificial sequence
  Protein classification predicting sequence
LRSNLYG

SEQ ID NO: 31927 - protein, 8 aa, Artificial sequence
  Protein classification predicting sequence
PGAAVTSI

SEQ ID NO: 31928 - protein, 10 aa, Artificial sequence
  Protein classification predicting sequence
ELFGLARELN

SEQ ID NO: 31929 - protein, 9 aa, Artificial sequence
  Protein classification predicting sequence
VRSYNCLKR

SEQ ID NO: 31930 - protein, 6 aa, Artificial sequence
  Protein classification predicting sequence
NLGRKS

SEQ ID NO: 31931 - protein, 40 aa, Artificial sequence
  Protein classification predicting sequence
THAKVTLEPLERGFGHTLGNALRRILLSSMPGCAVTEVEI

SEQ ID NO: 31932 - protein, 30 aa, Artificial sequence
  Protein classification predicting sequence
GVLHEYSTKEGVQEDILEILLNLKGLAVRV

SEQ ID NO: 31933 - protein, 10 aa, Artificial sequence
  Protein classification predicting sequence
DITHDGDVEI

SEQ ID NO: 31934 - protein, 6 aa, Artificial sequence
  Protein classification predicting sequence
MRIKVQ

SEQ ID NO: 31935 - protein, 7 aa, Artificial sequence
  Protein classification predicting sequence
RPIGRLL

SEQ ID NO: 31936 - protein, 6 aa, Artificial sequence
  Protein classification predicting sequence
DACYSP

SEQ ID NO: 31937 - protein, 9 aa, Artificial sequence
  Protein classification predicting sequence
AIRRAATIL

SEQ ID NO: 31938 - protein, 16 aa, Artificial sequence
  Protein classification predicting sequence
DDLELTVRSANCLKAE

SEQ ID NO: 31939 - protein, 6 aa, Artificial sequence
  Protein classification predicting sequence
GVREDV

SEQ ID NO: 31940 - protein, 7 aa, Artificial sequence
  Protein classification predicting sequence
YIGDLVQ

SEQ ID NO: 31941 - protein, 8 aa, Artificial sequence
  Protein classification predicting sequence
LATINEDA

SEQ ID NO: 31942 - protein, 18 aa, Artificial sequence
  Protein classification predicting sequence
VEAARVEQRTDLDKLVID

SEQ ID NO: 31943 - protein, 20 aa, Artificial sequence
  Protein classification predicting sequence
TEVELLKTPNLGKKSLTEIK

SEQ ID NO: 31944 - protein, 6 aa, Artificial sequence
  Protein classification predicting sequence
LENWPP

SEQ ID NO: 31945 - protein, 8 aa, Artificial sequence
  Protein classification predicting sequence
RRVLLSSL

SEQ ID NO: 31946 - protein, 14 aa, Artificial sequence
  Protein classification predicting sequence
RRVLLSSLQGAAIT

SEQ ID NO: 31947 - protein, 19 aa, Artificial sequence
  Protein classification predicting sequence
VDELELSVRSANCLKNDNI

SEQ ID NO: 31948 - protein, 6 aa, Artificial sequence
  Protein classification predicting sequence
SYEGYN

SEQ ID NO: 31949 - protein, 9 aa, Artificial sequence
  Protein classification predicting sequence
TSPPRFLEE

SEQ ID NO: 31950 - protein, 11 aa, Artificial sequence
  Protein classification predicting sequence
MSYEGYNMEDA

SEQ ID NO: 31951 - protein, 9 aa, Artificial sequence
  Protein classification predicting sequence
NPHAIPSRM

SEQ ID NO: 31952 - protein, 6 aa, Artificial sequence
  Protein classification predicting sequence
RYPGGQ

SEQ ID NO: 31953 - protein, 13 aa, Artificial sequence
  Protein classification predicting sequence
GDKFASRHGQKGV

SEQ ID NO: 31954 - protein, 9 aa, Artificial sequence
  Protein classification predicting sequence
ATGNWVGGR

SEQ ID NO: 31955 - protein, 6 aa, Artificial sequence
  Protein classification predicting sequence
YKHQQL

SEQ ID NO: 31956 - protein, 16 aa, Artificial sequence
  Protein classification predicting sequence
MVLCLLPVLPPELRPI

SEQ ID NO: 31957 - protein, 14 aa, Artificial sequence
  Protein classification predicting sequence
VNRYNPCNRRNYQN

SEQ ID NO: 31958 - protein, 9 aa, Artificial sequence
  Protein classification predicting sequence
SSYDALGAY

SEQ ID NO: 31959 - protein, 6 aa, Artificial sequence
  Protein classification predicting sequence
PLWLRW

SEQ ID NO: 31960 - protein, 11 aa, Artificial sequence
  Protein classification predicting sequence
REVPIEVQYES

SEQ ID NO: 31961 - protein, 11 aa, Artificial sequence
  Protein classification predicting sequence
GHISFYREIEE

SEQ ID NO: 31962 - protein, 12 aa, Artificial sequence
  Protein classification predicting sequence
PYTLHYKTHKPE

SEQ ID NO: 31963 - protein, 8 aa, Artificial sequence
  Protein classification predicting sequence
PSYIANLL

SEQ ID NO: 31964 - protein, 28 aa, Artificial sequence
  Protein classification predicting sequence
PSYIANLLAKPLKELESLVYCDLFLARP

SEQ ID NO: 31965 - protein, 7 aa, Artificial sequence
  Protein classification predicting sequence
KPLKELE

SEQ ID NO: 31966 - protein, 7 aa, Artificial sequence
  Protein classification predicting sequence
IYRNNTL

SEQ ID NO: 31967 - protein, 7 aa, Artificial sequence
  Protein classification predicting sequence
LVQEAVD

SEQ ID NO: 31968 - protein, 8 aa, Artificial sequence
  Protein classification predicting sequence
QEAVDALI

SEQ ID NO: 31969 - protein, 22 aa, Artificial sequence
  Protein classification predicting sequence
GHPVLLNRAPTLHRLGIQAFQP

SEQ ID NO: 31970 - protein, 7 aa, Artificial sequence
  Protein classification predicting sequence
FEYEIQS

SEQ ID NO: 31971 - protein, 11 aa, Artificial sequence
  Protein classification predicting sequence
KYSIPLFFTTQ

SEQ ID NO: 31972 - protein, 17 aa, Artificial sequence
  Protein classification predicting sequence
VMCQEKLVQEAVDTLLD

SEQ ID NO: 31973 - protein, 17 aa, Artificial sequence
  Protein classification predicting sequence
AKSKIREKEPIVWEILQ

SEQ ID NO: 31974 - protein, 11 aa, Artificial sequence
  Protein classification predicting sequence
EKEPIVWEILQ

SEQ ID NO: 31975 - protein, 7 aa, Artificial sequence
  Protein classification predicting sequence
LVEGRAI

SEQ ID NO: 31976 - protein, 14 aa, Artificial sequence
  Protein classification predicting sequence
VPTQDMLIGLYVLT

SEQ ID NO: 31977 - protein, 7 aa, Artificial sequence
  Protein classification predicting sequence
GNRRGIC

SEQ ID NO: 31978 - protein, 7 aa, Artificial sequence
  Protein classification predicting sequence
NRYNPCN

SEQ ID NO: 31979 - protein, 8 aa, Artificial sequence
  Protein classification predicting sequence
DNNYKYTK

SEQ ID NO: 31980 - protein, 7 aa, Artificial sequence
  Protein classification predicting sequence
MGYIKLA

SEQ ID NO: 31981 - protein, 6 aa, Artificial sequence
  Protein classification predicting sequence
HVWYLK

SEQ ID NO: 31982 - protein, 17 aa, Artificial sequence
  Protein classification predicting sequence
ILLDMPLRDVEQIVYFN

SEQ ID NO: 31983 - protein, 7 aa, Artificial sequence
  Protein classification predicting sequence
VGIGAEA

SEQ ID NO: 31984 - protein, 8 aa, Artificial sequence
  Protein classification predicting sequence
EMAIELFQ

SEQ ID NO: 31985 - protein, 8 aa, Artificial sequence
  Protein classification predicting sequence
QAEARLLM

SEQ ID NO: 31986 - protein, 8 aa, Artificial sequence
  Protein classification predicting sequence
YYLTAENP

SEQ ID NO: 31987 - protein, 7 aa, Artificial sequence
  Protein classification predicting sequence
TESRVRR

SEQ ID NO: 31988 - protein, 9 aa, Artificial sequence
  Protein classification predicting sequence
ARPIAKKPT

SEQ ID NO: 31989 - protein, 6 aa, Artificial sequence
  Protein classification predicting sequence
YKSFSD

SEQ ID NO: 31990 - protein, 15 aa, Artificial sequence
  Protein classification predicting sequence
LLGKRVDYSGRSVIV

SEQ ID NO: 31991 - protein, 9 aa, Artificial sequence
  Protein classification predicting sequence
PILVEGRAI

SEQ ID NO: 31992 - protein, 6 aa, Artificial sequence
  Protein classification predicting sequence
LHPLVC

SEQ ID NO: 31993 - protein, 7 aa, Artificial sequence
  Protein classification predicting sequence
PLSLEAQ

SEQ ID NO: 31994 - protein, 7 aa, Artificial sequence
  Protein classification predicting sequence
SPLWLRW

SEQ ID NO: 31995 - protein, 6 aa, Artificial sequence
  Protein classification predicting sequence
VSPQQI

SEQ ID NO: 31996 - protein, 20 aa, Artificial sequence
  Protein classification predicting sequence
CGVEFVDSRIRRYQMGYIKL

SEQ ID NO: 31997 - protein, 10 aa, Artificial sequence
  Protein classification predicting sequence
KKPTFLRLRG

SEQ ID NO: 31998 - protein, 6 aa, Artificial sequence
  Protein classification predicting sequence
GAYRQK

SEQ ID NO: 31999 - protein, 8 aa, Artificial sequence
  Protein classification predicting sequence
PIEVHYES

SEQ ID NO: 32000 - protein, 5 aa, Artificial sequence
  Protein classification predicting sequence
GLFCE

SEQ ID NO: 32001 - protein, 6 aa, Artificial sequence
  Protein classification predicting sequence
IQAFQP

SEQ ID NO: 32002 - protein, 10 aa, Artificial sequence
  Protein classification predicting sequence
FNADFDGDQM

SEQ ID NO: 32003 - protein, 13 aa, Artificial sequence
  Protein classification predicting sequence
KKPTFLRLRGLFE

SEQ ID NO: 32004 - protein, 26 aa, Artificial sequence
  Protein classification predicting sequence
TGAGAIREQLADLDLRIIIENSLVEW

SEQ ID NO: 32005 - protein, 21 aa, Artificial sequence
  Protein classification predicting sequence
EARLLMFSHMNLLSPAIGDPI

SEQ ID NO: 32006 - protein, 8 aa, Artificial sequence
  Protein classification predicting sequence
GAYRQKRI

SEQ ID NO: 32007 - protein, 6 aa, Artificial sequence
  Protein classification predicting sequence
VTKPYT

SEQ ID NO: 32008 - protein, 6 aa, Artificial sequence
  Protein classification predicting sequence
QCGVEF

SEQ ID NO: 32009 - protein, 8 aa, Artificial sequence
  Protein classification predicting sequence
WYLKRLPS

SEQ ID NO: 32010 - protein, 10 aa, Artificial sequence
  Protein classification predicting sequence
LPVLPPELRP

SEQ ID NO: 32011 - protein, 6 aa, Artificial sequence
  Protein classification predicting sequence
VQEAVD

SEQ ID NO: 32012 - protein, 7 aa, Artificial sequence
  Protein classification predicting sequence
VGEVTKP

SEQ ID NO: 32013 - protein, 11 aa, Artificial sequence
  Protein classification predicting sequence
KYKQLLTEDEW

SEQ ID NO: 32014 - protein, 13 aa, Artificial sequence
  Protein classification predicting sequence
VVGANNRALKSLS

SEQ ID NO: 32015 - protein, 21 aa, Artificial sequence
  Protein classification predicting sequence
LHPLVCPAFNADFDGDQMAVH

SEQ ID NO: 32016 - protein, 13 aa, Artificial sequence
  Protein classification predicting sequence
FNADFDGDQMAVH

SEQ ID NO: 32017 - protein, 6 aa, Artificial sequence
  Protein classification predicting sequence
EARLLM

SEQ ID NO: 32018 - protein, 21 aa, Artificial sequence
  Protein classification predicting sequence
TKPETINYRTLKPEMDGLFCE

SEQ ID NO: 32019 - protein, 6 aa, Artificial sequence
  Protein classification predicting sequence
DGLFCE

SEQ ID NO: 32020 - protein, 9 aa, Artificial sequence
  Protein classification predicting sequence
WYLKGIPSY

SEQ ID NO: 32021 - protein, 8 aa, Artificial sequence
  Protein classification predicting sequence
QKRAKLIK

SEQ ID NO: 32022 - protein, 17 aa, Artificial sequence
  Protein classification predicting sequence
LLGKRVDYSGRSVIVVG

SEQ ID NO: 32023 - protein, 7 aa, Artificial sequence
  Protein classification predicting sequence
LMLASNN

SEQ ID NO: 32024 - protein, 6 aa, Artificial sequence
  Protein classification predicting sequence
CERIFG

SEQ ID NO: 32025 - protein, 5 aa, Artificial sequence
  Protein classification predicting sequence
KDWEC

SEQ ID NO: 32026 - protein, 24 aa, Artificial sequence
  Protein classification predicting sequence
CGKYKRVRHRGIVCERCGVEVTES

SEQ ID NO: 32027 - protein, 11 aa, Artificial sequence
  Protein classification predicting sequence
LLDMPLRDVEQ

SEQ ID NO: 32028 - protein, 8 aa, Artificial sequence
  Protein classification predicting sequence
YKQLLTED

SEQ ID NO: 32029 - protein, 8 aa, Artificial sequence
  Protein classification predicting sequence
KLIKRLRV

SEQ ID NO: 32030 - protein, 6 aa, Artificial sequence
  Protein classification predicting sequence
QDMVLG

SEQ ID NO: 32031 - protein, 6 aa, Artificial sequence
  Protein classification predicting sequence
VRRHRM

SEQ ID NO: 32032 - protein, 7 aa, Artificial sequence
  Protein classification predicting sequence
ILAPEII

SEQ ID NO: 32033 - protein, 42 aa, Artificial sequence
  Protein classification predicting sequence
GANNRPLKSLSDIIEGKQGRFRQNLLGKRVDYSGRSVIVVGP

SEQ ID NO: 32034 - protein, 8 aa, Artificial sequence
  Protein classification predicting sequence
VYFNSYVV

SEQ ID NO: 32035 - protein, 9 aa, Artificial sequence
  Protein classification predicting sequence
WMILTVLPV

SEQ ID NO: 32036 - protein, 11 aa, Artificial sequence
  Protein classification predicting sequence
RLQEILAPEII

SEQ ID NO: 32037 - protein, 9 aa, Artificial sequence
  Protein classification predicting sequence
RNEKRMLQE

SEQ ID NO: 32038 - protein, 8 aa, Artificial sequence
  Protein classification predicting sequence
VNNIKAAK

SEQ ID NO: 32039 - protein, 7 aa, Artificial sequence
  Protein classification predicting sequence
VWVRFNG

SEQ ID NO: 32040 - protein, 8 aa, Artificial sequence
  Protein classification predicting sequence
GEIVGEVT

SEQ ID NO: 32041 - protein, 9 aa, Artificial sequence
  Protein classification predicting sequence
RRKDFLVRR

SEQ ID NO: 32042 - protein, 10 aa, Artificial sequence
  Protein classification predicting sequence
SSDINELYRR

SEQ ID NO: 32043 - protein, 9 aa, Artificial sequence
  Protein classification predicting sequence
LLGKRVDYS

SEQ ID NO: 32044 - protein, 8 aa, Artificial sequence
  Protein classification predicting sequence
RSVIVVGP

SEQ ID NO: 32045 - protein, 14 aa, Artificial sequence
  Protein classification predicting sequence
GFNADFDGDQMAVH

SEQ ID NO: 32046 - protein, 10 aa, Artificial sequence
  Protein classification predicting sequence
PLSLEAQAEA

SEQ ID NO: 32047 - protein, 7 aa, Artificial sequence
  Protein classification predicting sequence
GDPICVP

SEQ ID NO: 32048 - protein, 7 aa, Artificial sequence
  Protein classification predicting sequence
HQQLRIG

SEQ ID NO: 32049 - protein, 12 aa, Artificial sequence
  Protein classification predicting sequence
HVWYLKRLPSYI

SEQ ID NO: 32050 - protein, 8 aa, Artificial sequence
  Protein classification predicting sequence
FDTFRNRE

SEQ ID NO: 32051 - protein, 14 aa, Artificial sequence
  Protein classification predicting sequence
IYRNNTLTDLLTTS

SEQ ID NO: 32052 - protein, 15 aa, Artificial sequence
  Protein classification predicting sequence
VYKSLSDVIEGKEGR

SEQ ID NO: 32053 - protein, 10 aa, Artificial sequence
  Protein classification predicting sequence
SDVIEGKEGR

SEQ ID NO: 32054 - protein, 26 aa, Artificial sequence
  Protein classification predicting sequence
RETLLGKRVDYSGRSVIVVGPSLSLH

SEQ ID NO: 32055 - protein, 6 aa, Artificial sequence
  Protein classification predicting sequence
PTQDML

SEQ ID NO: 32056 - protein, 6 aa, Artificial sequence
  Protein classification predicting sequence
IYIRTT

SEQ ID NO: 32057 - protein, 16 aa, Artificial sequence
  Protein classification predicting sequence
GHISLYREIEEAIQGF

SEQ ID NO: 32058 - protein, 9 aa, Artificial sequence
  Protein classification predicting sequence
YKHQQLRIG

SEQ ID NO: 32059 - protein, 11 aa, Artificial sequence
  Protein classification predicting sequence
GFDTFRNREIS

SEQ ID NO: 32060 - protein, 9 aa, Artificial sequence
  Protein classification predicting sequence
GAGAIREQL

SEQ ID NO: 32061 - protein, 12 aa, Artificial sequence
  Protein classification predicting sequence
NEWEDRKVGRRK

SEQ ID NO: 32062 - protein, 34 aa, Artificial sequence
  Protein classification predicting sequence
IEGKEGRFRETLLGKRVDYSGRSVIVVGPSLSLH

SEQ ID NO: 32063 - protein, 14 aa, Artificial sequence
  Protein classification predicting sequence
EKEPIVWEILQEVM

SEQ ID NO: 32064 - protein, 16 aa, Artificial sequence
  Protein classification predicting sequence
LLNRAPTLHRLGIQAF

SEQ ID NO: 32065 - protein, 18 aa, Artificial sequence
  Protein classification predicting sequence
LLNRAPTLHRLGIQAFQP

SEQ ID NO: 32066 - protein, 11 aa, Artificial sequence
  Protein classification predicting sequence
FNADFDGDQMA

SEQ ID NO: 32067 - protein, 11 aa, Artificial sequence
  Protein classification predicting sequence
NLLSPAIGDPI

SEQ ID NO: 32068 - protein, 11 aa, Artificial sequence
  Protein classification predicting sequence
VPTQDMLIGLY

SEQ ID NO: 32069 - protein, 6 aa, Artificial sequence
  Protein classification predicting sequence
TFHYKT

SEQ ID NO: 32070 - protein, 6 aa, Artificial sequence
  Protein classification predicting sequence
EWEDRK

SEQ ID NO: 32071 - protein, 7 aa, Artificial sequence
  Protein classification predicting sequence
SDINELY

SEQ ID NO: 32072 - protein, 8 aa, Artificial sequence
  Protein classification predicting sequence
GICANRYN

SEQ ID NO: 32073 - protein, 12 aa, Artificial sequence
  Protein classification predicting sequence
YREIEEAIQGFS

SEQ ID NO: 32074 - protein, 13 aa, Artificial sequence
  Protein classification predicting sequence
IFGPIKSGICACG

SEQ ID NO: 32075 - protein, 9 aa, Artificial sequence
  Protein classification predicting sequence
LQEVMQGHP

SEQ ID NO: 32076 - protein, 7 aa, Artificial sequence
  Protein classification predicting sequence
IEEAIQG

SEQ ID NO: 32077 - protein, 8 aa, Artificial sequence
  Protein classification predicting sequence
KDWECHCG

SEQ ID NO: 32078 - protein, 7 aa, Artificial sequence
  Protein classification predicting sequence
KLIKRLR

SEQ ID NO: 32079 - protein, 7 aa, Artificial sequence
  Protein classification predicting sequence
ETINYRT

SEQ ID NO: 32080 - protein, 9 aa, Artificial sequence
  Protein classification predicting sequence
DLNDLYRRV

SEQ ID NO: 32081 - protein, 8 aa, Artificial sequence
  Protein classification predicting sequence
PSQDMVLG

SEQ ID NO: 32082 - protein, 13 aa, Artificial sequence
  Protein classification predicting sequence
LNRAPTLHRLGIQ

SEQ ID NO: 32083 - protein, 11 aa, Artificial sequence
  Protein classification predicting sequence
LLPVLPPELRP

SEQ ID NO: 32084 - protein, 37 aa, Artificial sequence
  Protein classification predicting sequence
SDVIEGKEGRFRETLLGKRVDYSGRSVIVVGPSLSLH

SEQ ID NO: 32085 - protein, 6 aa, Artificial sequence
  Protein classification predicting sequence
CGLPRE

SEQ ID NO: 32086 - protein, 10 aa, Artificial sequence
  Protein classification predicting sequence
GGRFATSDLN

SEQ ID NO: 32087 - protein, 11 aa, Artificial sequence
  Protein classification predicting sequence
TGAGAIREQLA

SEQ ID NO: 32088 - protein, 18 aa, Artificial sequence
  Protein classification predicting sequence
LLGKRVDYSGRSVIVVGP

SEQ ID NO: 32089 - protein, 8 aa, Artificial sequence
  Protein classification predicting sequence
IRGLIRQH

SEQ ID NO: 32090 - protein, 9 aa, Artificial sequence
  Protein classification predicting sequence
LDSPLWLRW

SEQ ID NO: 32091 - protein, 6 aa, Artificial sequence
  Protein classification predicting sequence
EIYGHY

SEQ ID NO: 32092 - protein, 39 aa, Artificial sequence
  Protein classification predicting sequence
LPNGEVVGEVTRPSTFHYKTDKPEKDGLFCERIFGPIKS

SEQ ID NO: 32093 - protein, 18 aa, Artificial sequence
  Protein classification predicting sequence
KPEKDGLFCERIFGPIKS

SEQ ID NO: 32094 - protein, 7 aa, Artificial sequence
  Protein classification predicting sequence
TFRNREI

SEQ ID NO: 32095 - protein, 18 aa, Artificial sequence
  Protein classification predicting sequence
TGAGAIREQLADLDLRII

SEQ ID NO: 32096 - protein, 6 aa, Artificial sequence
  Protein classification predicting sequence
VEWKEL

SEQ ID NO: 32097 - protein, 12 aa, Artificial sequence
  Protein classification predicting sequence
SPLWLRWKLDQR

SEQ ID NO: 32098 - protein, 7 aa, Artificial sequence
  Protein classification predicting sequence
EIYAHYL

SEQ ID NO: 32099 - protein, 13 aa, Artificial sequence
  Protein classification predicting sequence
LVEGRAICLHPLV

SEQ ID NO: 32100 - protein, 6 aa, Artificial sequence
  Protein classification predicting sequence
PIEVQY

SEQ ID NO: 32101 - protein, 8 aa, Artificial sequence
  Protein classification predicting sequence
FCERIFGP

SEQ ID NO: 32102 - protein, 7 aa, Artificial sequence
  Protein classification predicting sequence
YEIQSWK

SEQ ID NO: 32103 - protein, 7 aa, Artificial sequence
  Protein classification predicting sequence
RRKDFLV

SEQ ID NO: 32104 - protein, 6 aa, Artificial sequence
  Protein classification predicting sequence
LYRRVI

SEQ ID NO: 32105 - protein, 6 aa, Artificial sequence
  Protein classification predicting sequence
RNNTLT

SEQ ID NO: 32106 - protein, 6 aa, Artificial sequence
  Protein classification predicting sequence
LGIQAF

SEQ ID NO: 32107 - protein, 7 aa, Artificial sequence
  Protein classification predicting sequence
EEAIQGF

SEQ ID NO: 32108 - protein, 7 aa, Artificial sequence
  Protein classification predicting sequence
INRNNRL

SEQ ID NO: 32109 - protein, 65 aa, Artificial sequence
  Protein classification predicting sequence
IPVIPPDLRPMVQLDGGRFATSDLNDLYRRVINRNNRLARLQEILAPEIIVRNEKRMLQEAVDAL

SEQ ID NO: 32110 - protein, 7 aa, Artificial sequence
  Protein classification predicting sequence
IKLAAPV

SEQ ID NO: 32111 - protein, 20 aa, Artificial sequence
  Protein classification predicting sequence
QTEARMLMLASNNILSPATG

SEQ ID NO: 32112 - protein, 12 aa, Artificial sequence
  Protein classification predicting sequence
PIITPSQDMVLG

SEQ ID NO: 32113 - protein, 9 aa, Artificial sequence
  Protein classification predicting sequence
TPSQDMVLG

SEQ ID NO: 32114 - protein, 16 aa, Artificial sequence
  Protein classification predicting sequence
TPSQDMVLGSYYLTAL

SEQ ID NO: 32115 - protein, 18 aa, Artificial sequence
  Protein classification predicting sequence
PLRDVEQIVYFNCYVVLD

SEQ ID NO: 32116 - protein, 6 aa, Artificial sequence
  Protein classification predicting sequence
RVIDNF

SEQ ID NO: 32117 - protein, 10 aa, Artificial sequence
  Protein classification predicting sequence
WVWVRFNGEV

SEQ ID NO: 32118 - protein, 8 aa, Artificial sequence
  Protein classification predicting sequence
RRYQMGYI

SEQ ID NO: 32119 - protein, 8 aa, Artificial sequence
  Protein classification predicting sequence
TGNEWEDR

SEQ ID NO: 32120 - protein, 22 aa, Artificial sequence
  Protein classification predicting sequence
KPEWMVLSLLPVLPPELRPMIE

SEQ ID NO: 32121 - protein, 8 aa, Artificial sequence
  Protein classification predicting sequence
VIYRNNTL

SEQ ID NO: 32122 - protein, 8 aa, Artificial sequence
  Protein classification predicting sequence
DNGIRGQP

SEQ ID NO: 32123 - protein, 11 aa, Artificial sequence
  Protein classification predicting sequence
PLSLEAQAEAR

SEQ ID NO: 32124 - protein, 10 aa, Artificial sequence
  Protein classification predicting sequence
RDGHNKVYKS

SEQ ID NO: 32125 - protein, 12 aa, Artificial sequence
  Protein classification predicting sequence
GHISFYREIEEA

SEQ ID NO: 32126 - protein, 18 aa, Artificial sequence
  Protein classification predicting sequence
FSFARPIAKKPTFLRLRG

SEQ ID NO: 32127 - protein, 11 aa, Artificial sequence
  Protein classification predicting sequence
AKSKIREKEPI

SEQ ID NO: 32128 - protein, 11 aa, Artificial sequence
  Protein classification predicting sequence
KKEIRSIYIRT

SEQ ID NO: 32129 - protein, 9 aa, Artificial sequence
  Protein classification predicting sequence
TGNEWEDRK

SEQ ID NO: 32130 - protein, 7 aa, Artificial sequence
  Protein classification predicting sequence
EKEPIVW

SEQ ID NO: 32131 - protein, 6 aa, Artificial sequence
  Protein classification predicting sequence
HQCGLP

SEQ ID NO: 32132 - protein, 17 aa, Artificial sequence
  Protein classification predicting sequence
FNADFDGDQMAVHVPLS

SEQ ID NO: 32133 - protein, 7 aa, Artificial sequence
  Protein classification predicting sequence
EAQAEAR

SEQ ID NO: 32134 - protein, 17 aa, Artificial sequence
  Protein classification predicting sequence
LNRAPTLHRLGIQAFEP

SEQ ID NO: 32135 - protein, 11 aa, Artificial sequence
  Protein classification predicting sequence
LRDVEQIVYFN

SEQ ID NO: 32136 - protein, 27 aa, Artificial sequence
  Protein classification predicting sequence
KILPNGEIVGEVTKPYTFHYKTNKPEK

SEQ ID NO: 32137 - protein, 21 aa, Artificial sequence
  Protein classification predicting sequence
LHPLVCKGFNADFDGDQMAVH

SEQ ID NO: 32138 - protein, 68 aa, Artificial sequence
  Protein classification predicting sequence
LHPLVCKGFNADFDGDQMAVHLPLSLEAQAEARLLMFSHMNLLSPAIGDPICVPTQDMLIGLYVLTIG

SEQ ID NO: 32139 - protein, 10 aa, Artificial sequence
  Protein classification predicting sequence
RRGICANRYN

SEQ ID NO: 32140 - protein, 20 aa, Artificial sequence
  Protein classification predicting sequence
KDKEPHFSSSYDALGAYRQK

SEQ ID NO: 32141 - protein, 6 aa, Artificial sequence
  Protein classification predicting sequence
TMRTFH

SEQ ID NO: 32142 - protein, 7 aa, Artificial sequence
  Protein classification predicting sequence
LLGKRVD

SEQ ID NO: 32143 - protein, 10 aa, Artificial sequence
  Protein classification predicting sequence
FANALRRTIL

SEQ ID NO: 32144 - protein, 12 aa, Artificial sequence
  Protein classification predicting sequence
EVPTFAVDEVEF

SEQ ID NO: 32145 - protein, 21 aa, Artificial sequence
  Protein classification predicting sequence
LDALELDDYTVTLSLEAEGPG

SEQ ID NO: 32146 - protein, 8 aa, Artificial sequence
  Protein classification predicting sequence
AHRLAMIP

SEQ ID NO: 32147 - protein, 9 aa, Artificial sequence
  Protein classification predicting sequence
DGSCSGIQH

SEQ ID NO: 32148 - protein, 9 aa, Artificial sequence
  Protein classification predicting sequence
LPADKMAVI

SEQ ID NO: 32149 - protein, 20 aa, Artificial sequence
  Protein classification predicting sequence
PIHQDGSCNGLQHYAALGRD

SEQ ID NO: 32150 - protein, 10 aa, Artificial sequence
  Protein classification predicting sequence
ILREKFVELY

SEQ ID NO: 32151 - protein, 11 aa, Artificial sequence
  Protein classification predicting sequence
AEDPFQCLAAC

SEQ ID NO: 32152 - protein, 11 aa, Artificial sequence
  Protein classification predicting sequence
TPLGLPVVQPY

SEQ ID NO: 32153 - protein, 8 aa, Artificial sequence
  Protein classification predicting sequence
WTHACDVD

SEQ ID NO: 32154 - protein, 9 aa, Artificial sequence
  Protein classification predicting sequence
NRFELVLLA

SEQ ID NO: 32155 - protein, 9 aa, Artificial sequence
  Protein classification predicting sequence
HRARQISQG

SEQ ID NO: 32156 - protein, 18 aa, Artificial sequence
  Protein classification predicting sequence
VDRDNDKNPVVALREIAD

SEQ ID NO: 32157 - protein, 8 aa, Artificial sequence
  Protein classification predicting sequence
RDNDKNPV

SEQ ID NO: 32158 - protein, 20 aa, Artificial sequence
  Protein classification predicting sequence
DLKEDLIHSLQKHVEVDEPE

SEQ ID NO: 32159 - protein, 8 aa, Artificial sequence
  Protein classification predicting sequence
FKSVKSTL

SEQ ID NO: 32160 - protein, 20 aa, Artificial sequence
  Protein classification predicting sequence
ALEEIESGNVVIHPDPSAKR

SEQ ID NO: 32161 - protein, 9 aa, Artificial sequence
  Protein classification predicting sequence
TLQALEEIE

SEQ ID NO: 32162 - protein, 9 aa, Artificial sequence
  Protein classification predicting sequence
GNVVIHPDP

SEQ ID NO: 32163 - protein, 10 aa, Artificial sequence
  Protein classification predicting sequence
ALEEIESGNV

SEQ ID NO: 32164 - protein, 11 aa, Artificial sequence
  Protein classification predicting sequence
KIKEQIAKEKE

SEQ ID NO: 32165 - protein, 6 aa, Artificial sequence
  Protein classification predicting sequence
NRNQPA

SEQ ID NO: 32166 - protein, 49 aa, Artificial sequence
  Protein classification predicting sequence
QLNPIDGPLPEDNEPSGYAQTDCVLEAMAFLEESHPGIFENSCLETMEV

SEQ ID NO: 32167 - protein, 15 aa, Artificial sequence
  Protein classification predicting sequence
SKSMKLRTQIPAEML

SEQ ID NO: 32168 - protein, 12 aa, Artificial sequence
  Protein classification predicting sequence
MKLRTQIPAEML

SEQ ID NO: 32169 - protein, 29 aa, Artificial sequence
  Protein classification predicting sequence
ALQLFIKDYRYTYRCHRGDTQIQTRRSFE

SEQ ID NO: 32170 - protein, 14 aa, Artificial sequence
  Protein classification predicting sequence
ITYITRNQPEWFRN

SEQ ID NO: 32171 - protein, 24 aa, Artificial sequence
  Protein classification predicting sequence
LSIAPIMFSNKMARLGKGYMFESK

SEQ ID NO: 32172 - protein, 7 aa, Artificial sequence
  Protein classification predicting sequence
MKLRTQI

SEQ ID NO: 32173 - protein, 13 aa, Artificial sequence
  Protein classification predicting sequence
AEMLANIDLKYFN

SEQ ID NO: 32174 - protein, 7 aa, Artificial sequence
  Protein classification predicting sequence
IDLKYFN

SEQ ID NO: 32175 - protein, 15 aa, Artificial sequence
  Protein classification predicting sequence
GIQAGVDRFYRTCKL

SEQ ID NO: 32176 - protein, 12 aa, Artificial sequence
  Protein classification predicting sequence
MEYDAVATTHSW

SEQ ID NO: 32177 - protein, 23 aa, Artificial sequence
  Protein classification predicting sequence
PKRNRSILNTSQRGILEDEQMYQ

SEQ ID NO: 32178 - protein, 6 aa, Artificial sequence
  Protein classification predicting sequence
CCNLFE

SEQ ID NO: 32179 - protein, 40 aa, Artificial sequence
  Protein classification predicting sequence
FFPSSSYRRPVGISSMVEAMVSRARIDARIDFESGRIKKE

SEQ ID NO: 32180 - protein, 11 aa, Artificial sequence
  Protein classification predicting sequence
FENSCLETMEV

SEQ ID NO: 32181 - protein, 8 aa, Artificial sequence
  Protein classification predicting sequence
NPRIFLAM

SEQ ID NO: 32182 - protein, 23 aa, Artificial sequence
  Protein classification predicting sequence
GTASLSPGMMMGMFNMLSTVLGV

SEQ ID NO: 32183 - protein, 20 aa, Artificial sequence
  Protein classification predicting sequence
LFEKFFPSSSYRRPVGISSM

SEQ ID NO: 32184 - protein, 25 aa, Artificial sequence
  Protein classification predicting sequence
EAMVSRARIDARIDFESGRIKKEEF

SEQ ID NO: 32185 - protein, 28 aa, Artificial sequence
  Protein classification predicting sequence
DCVLEAMAFLEESHPGIFENSCLETMEV

SEQ ID NO: 32186 - protein, 35 aa, Artificial sequence
  Protein classification predicting sequence
DCVLEAMAFLEESHPGIFENSCLETMEVVQQTRVD

SEQ ID NO: 32187 - protein, 109 aa, Artificial sequence
  Protein classification predicting sequence
NKRSYLIRALTLNTMTKDAERGKLKRRAIATPGMQIRGFVYFVETLARSICEKLEQSGLPVGGNEKKAKLANVVRKMMTNSQDTELSFTITGDNTKWNENQNPRMFLAM

SEQ ID NO: 32188 - protein, 8 aa, Artificial sequence
  Protein classification predicting sequence
NQPEWFRN

SEQ ID NO: 32189 - protein, 35 aa, Artificial sequence
  Protein classification predicting sequence
MKLRTQIPAEMLASIDLKYFNESTRKKIEKIRPLL

SEQ ID NO: 32190 - protein, 8 aa, Artificial sequence
  Protein classification predicting sequence
GRIKKEEF

SEQ ID NO: 32191 - protein, 12 aa, Artificial sequence
  Protein classification predicting sequence
TKKMVTQRTIGK

SEQ ID NO: 32192 - protein, 28 aa, Artificial sequence
  Protein classification predicting sequence
GINMSKKKSYINRTGTFEFTSFFYRYGF

SEQ ID NO: 32193 - protein, 73 aa, Artificial sequence
  Protein classification predicting sequence
ANFSMELPSFGVSGINESADMSIGVTVIKNNMINNDLGPATAQMALQLFIKDYRYTYRCHRGDTQIQTRRSFE

SEQ ID NO: 32194 - protein, 18 aa, Artificial sequence
  Protein classification predicting sequence
MEYDAVATTHSWIPKRNR

SEQ ID NO: 32195 - protein, 6 aa, Artificial sequence
  Protein classification predicting sequence
NESGRL

SEQ ID NO: 32196 - protein, 21 aa, Artificial sequence
  Protein classification predicting sequence
APIMFSNKMARLGKGYMFESK

SEQ ID NO: 32197 - protein, 6 aa, Artificial sequence
  Protein classification predicting sequence
LMDEDY

SEQ ID NO: 32198 - protein, 9 aa, Artificial sequence
  Protein classification predicting sequence
MKLRTQIPA

SEQ ID NO: 32199 - protein, 28 aa, Artificial sequence
  Protein classification predicting sequence
SLSPGMMMGMFNMLSTVLGVSILNLGQK

SEQ ID NO: 32200 - protein, 55 aa, Artificial sequence
  Protein classification predicting sequence
YTKTTYWWDGLQSSDDFALIVNAPNHEGIQAGVDRFYRTCKLVGINMSKKKSYIN

SEQ ID NO: 32201 - protein, 40 aa, Artificial sequence
  Protein classification predicting sequence
NKRSYLIRALTLNTMTKDAERGKLKRRAIATPGMQIRGFV

SEQ ID NO: 32202 - protein, 17 aa, Artificial sequence
  Protein classification predicting sequence
LEQSGLPVGGNEKKAKL

SEQ ID NO: 32203 - protein, 40 aa, Artificial sequence
  Protein classification predicting sequence
FLAMITYITRNQPEWFRNVLSIAPIMFSNKMARLGKGYMF

SEQ ID NO: 32204 - protein, 13 aa, Artificial sequence
  Protein classification predicting sequence
MKLRTQIPAEMLA

SEQ ID NO: 32205 - protein, 25 aa, Artificial sequence
  Protein classification predicting sequence
IDLKYFNESTRKKIEKIRPLLIDGT

SEQ ID NO: 32206 - protein, 7 aa, Artificial sequence
  Protein classification predicting sequence
TQRTIGK

SEQ ID NO: 32207 - protein, 14 aa, Artificial sequence
  Protein classification predicting sequence
STRKKIEKIRPLLI

SEQ ID NO: 32208 - protein, 8 aa, Artificial sequence
  Protein classification predicting sequence
LEDEQMYQ

SEQ ID NO: 32209 - protein, 15 aa, Artificial sequence
  Protein classification predicting sequence
TANESGRLIDFLKDV

SEQ ID NO: 32210 - protein, 8 aa, Artificial sequence
  Protein classification predicting sequence
MPAHGPAK

SEQ ID NO: 32211 - protein, 14 aa, Artificial sequence
  Protein classification predicting sequence
ANESGRLIDFLKDV

SEQ ID NO: 32212 - protein, 40 aa, Artificial sequence
  Protein classification predicting sequence
ESMDKEEMEITTHFQRKRRVRDNMTKKMVTQRTIGKKKQR

SEQ ID NO: 32213 - protein, 32 aa, Artificial sequence
  Protein classification predicting sequence
EITTHFQRKRRVRDNMTKKMVTQRTIGKKKQR

SEQ ID NO: 32214 - protein, 8 aa, Artificial sequence
  Protein classification predicting sequence
SCLETMEV

SEQ ID NO: 32215 - protein, 8 aa, Artificial sequence
  Protein classification predicting sequence
RFYRTCKL

SEQ ID NO: 32216 - protein, 22 aa, Artificial sequence
  Protein classification predicting sequence
NTETGAPQLNPIDGPLPEDNEP

SEQ ID NO: 32217 - protein, 22 aa, Artificial sequence
  Protein classification predicting sequence
DWTLNRNQPAATALANTIEVFR

SEQ ID NO: 32218 - protein, 12 aa, Artificial sequence
  Protein classification predicting sequence
ESGRLIDFLKDV

SEQ ID NO: 32219 - protein, 10 aa, Artificial sequence
  Protein classification predicting sequence
EIMKICSTIE

SEQ ID NO: 32220 - protein, 12 aa, Artificial sequence
  Protein classification predicting sequence
IDLKYFNESTRK

SEQ ID NO: 32221 - protein, 11 aa, Artificial sequence
  Protein classification predicting sequence
EIMKICSTIEE

SEQ ID NO: 32222 - protein, 16 aa, Artificial sequence
  Protein classification predicting sequence
SHPGIFENSCLETMEV

SEQ ID NO: 32223 - protein, 14 aa, Artificial sequence
  Protein classification predicting sequence
QQTRVDKLTQGRQT

SEQ ID NO: 32224 - protein, 18 aa, Artificial sequence
  Protein classification predicting sequence
YWWDGLQSSDDFALIVNA

SEQ ID NO: 32225 - protein, 10 aa, Artificial sequence
  Protein classification predicting sequence
AISTTFPYTG

SEQ ID NO: 32226 - protein, 20 aa, Artificial sequence
  Protein classification predicting sequence
LNTMTKDAERGKLKRRAIAT

SEQ ID NO: 32227 - protein, 9 aa, Artificial sequence
  Protein classification predicting sequence
TGDNTKWNE

SEQ ID NO: 32228 - protein, 7 aa, Artificial sequence
  Protein classification predicting sequence
FYRTCKL

SEQ ID NO: 32229 - protein, 10 aa, Artificial sequence
  Protein classification predicting sequence
GINMSKKKSY

SEQ ID NO: 32230 - protein, 8 aa, Artificial sequence
  Protein classification predicting sequence
MELPSFGV

SEQ ID NO: 32231 - protein, 6 aa, Artificial sequence
  Protein classification predicting sequence
GPATAQ

SEQ ID NO: 32232 - protein, 6 aa, Artificial sequence
  Protein classification predicting sequence
DYRYTY

SEQ ID NO: 32233 - protein, 5 aa, Artificial sequence
  Protein classification predicting sequence
CHRGD

SEQ ID NO: 32234 - protein, 5 aa, Artificial sequence
  Protein classification predicting sequence
DGGPN

SEQ ID NO: 32235 - protein, 9 aa, Artificial sequence
  Protein classification predicting sequence
KRNRSILNT

SEQ ID NO: 32236 - protein, 41 aa, Artificial sequence
  Protein classification predicting sequence
MVDPTNGPLPEDNEPSAYAQLDCVLEALDRMDEEHPGLFQA

SEQ ID NO: 32237 - protein, 73 aa, Artificial sequence
  Protein classification predicting sequence
SQNAMEALMVTTVDKLTQGRQTFDWTVCRNQPAATALNTTITSFRLNDLNGADKGGLVPFCQDIIDSLDKPEM

SEQ ID NO: 32238 - protein, 8 aa, Artificial sequence
  Protein classification predicting sequence
DGGPNLYN

SEQ ID NO: 32239 - protein, 11 aa, Artificial sequence
  Protein classification predicting sequence
YNLRNLHIPEI

SEQ ID NO: 32240 - protein, 10 aa, Artificial sequence
  Protein classification predicting sequence
PPYSHGTGTG

SEQ ID NO: 32241 - protein, 18 aa, Artificial sequence
  Protein classification predicting sequence
TIDTVIRTHEYSNKGKQY

SEQ ID NO: 32242 - protein, 8 aa, Artificial sequence
  Protein classification predicting sequence
GRQTYDWT

SEQ ID NO: 32243 - protein, 6 aa, Artificial sequence
  Protein classification predicting sequence
LIRALT

SEQ ID NO: 32244 - protein, 14 aa, Artificial sequence
  Protein classification predicting sequence
SGLPVGGNEKKAKL

SEQ ID NO: 32245 - protein, 8 aa, Artificial sequence
  Protein classification predicting sequence
GLQSSDDF

SEQ ID NO: 32246 - protein, 7 aa, Artificial sequence
  Protein classification predicting sequence
GESIIVE

SEQ ID NO: 32247 - protein, 32 aa, Artificial sequence
  Protein classification predicting sequence
QSERGEETIEERFEITGTMRRLADQSLPPNFS

SEQ ID NO: 32248 - protein, 14 aa, Artificial sequence
  Protein classification predicting sequence
IEGKLSQMSKEVNA

SEQ ID NO: 32249 - protein, 11 aa, Artificial sequence
  Protein classification predicting sequence
IEPFLKTTPRP

SEQ ID NO: 32250 - protein, 8 aa, Artificial sequence
  Protein classification predicting sequence
APIEHIAS

SEQ ID NO: 32251 - protein, 8 aa, Artificial sequence
  Protein classification predicting sequence
FEITGTMR

SEQ ID NO: 32252 - protein, 10 aa, Artificial sequence
  Protein classification predicting sequence
ADQSLPPNFS

SEQ ID NO: 32253 - protein, 6 aa, Artificial sequence
  Protein classification predicting sequence
KTTPRP

SEQ ID NO: 32254 - protein, 18 aa, Artificial sequence
  Protein classification predicting sequence
WKQVLAELQDIENEEKIP

SEQ ID NO: 32255 - protein, 16 aa, Artificial sequence
  Protein classification predicting sequence
FVRQCFNPMIVELAEK

SEQ ID NO: 32256 - protein, 27 aa, Artificial sequence
  Protein classification predicting sequence
QRSKFLLMDALKLSIEDPSHEGEGIPL

SEQ ID NO: 32257 - protein, 17 aa, Artificial sequence
  Protein classification predicting sequence
DAIKCMKTFFGWKEPNI

SEQ ID NO: 32258 - protein, 14 aa, Artificial sequence
  Protein classification predicting sequence
DISDLKQYDSDEPE

SEQ ID NO: 32259 - protein, 20 aa, Artificial sequence
  Protein classification predicting sequence
EAESSVKEKDMTKEFFENKS

SEQ ID NO: 32260 - protein, 19 aa, Artificial sequence
  Protein classification predicting sequence
VQALRDNLEPGTFDLGGLY

SEQ ID NO: 32261 - protein, 6 aa, Artificial sequence
  Protein classification predicting sequence
RSLASW

SEQ ID NO: 32262 - protein, 7 aa, Artificial sequence
  Protein classification predicting sequence
SLPPNFS

SEQ ID NO: 32263 - protein, 10 aa, Artificial sequence
  Protein classification predicting sequence
KLSQMSKEVN

SEQ ID NO: 32264 - protein, 12 aa, Artificial sequence
  Protein classification predicting sequence
QRSKFLLMDALK

SEQ ID NO: 32265 - protein, 7 aa, Artificial sequence
  Protein classification predicting sequence
ENEEKIP

SEQ ID NO: 32266 - protein, 13 aa, Artificial sequence
  Protein classification predicting sequence
SLPPNFSSLENFR

SEQ ID NO: 32267 - protein, 41 aa, Artificial sequence
  Protein classification predicting sequence
IASMRRNYFTAEVSHCRATEYIMKGVYINTALLNASCAAMD

SEQ ID NO: 32268 - protein, 8 aa, Artificial sequence
  Protein classification predicting sequence
EIGDMLLR

SEQ ID NO: 32269 - protein, 14 aa, Artificial sequence
  Protein classification predicting sequence
VQALRDNLEPGTFD

SEQ ID NO: 32270 - protein, 19 aa, Artificial sequence
  Protein classification predicting sequence
RGLWDSFRQSERGEETIEE

SEQ ID NO: 32271 - protein, 16 aa, Artificial sequence
  Protein classification predicting sequence
GTMRRLADQSLPPNFS

SEQ ID NO: 32272 - protein, 12 aa, Artificial sequence
  Protein classification predicting sequence
WKQVLAELQDIE

SEQ ID NO: 32273 - protein, 47 aa, Artificial sequence
  Protein classification predicting sequence
VQALRDNLEPGTFDLGGLYEAIEECLINDPWVLLNASWFNSFLTHAL

SEQ ID NO: 32274 - protein, 14 aa, Artificial sequence
  Protein classification predicting sequence
IASMRRNYFTAEVS

SEQ ID NO: 32275 - protein, 14 aa, Artificial sequence
  Protein classification predicting sequence
LAELQDIENEEKIP

SEQ ID NO: 32276 - protein, 10 aa, Artificial sequence
  Protein classification predicting sequence
WKQVLAELQD

SEQ ID NO: 32277 - protein, 11 aa, Artificial sequence
  Protein classification predicting sequence
CVLEIGDMLLR

SEQ ID NO: 32278 - protein, 19 aa, Artificial sequence
  Protein classification predicting sequence
FLYVRTNGTSKIKMKWGME

SEQ ID NO: 32279 - protein, 13 aa, Artificial sequence
  Protein classification predicting sequence
VQALRDNLEPGTF

SEQ ID NO: 32280 - protein, 15 aa, Artificial sequence
  Protein classification predicting sequence
WIELDEIGEDVAPIE

SEQ ID NO: 32281 - protein, 37 aa, Artificial sequence
  Protein classification predicting sequence
GSIGKVCRTLLAKSVFNSLYASPQLEGFSAESRKLLL

SEQ ID NO: 32282 - protein, 15 aa, Artificial sequence
  Protein classification predicting sequence
VQALRDNLEPGTFDL

SEQ ID NO: 32283 - protein, 12 aa, Artificial sequence
  Protein classification predicting sequence
DPNALLKHRFEI

SEQ ID NO: 32284 - protein, 14 aa, Artificial sequence
  Protein classification predicting sequence
ENFRAYVDGFEPNG

SEQ ID NO: 32285 - protein, 69 aa, Artificial sequence
  Protein classification predicting sequence
IPMISKCRTKEGRRKTNLYGFIIKGRSHLRNDTDVVNFVSMEFSLTDPRLEPHKWEKYCVLEIGDMLLR

SEQ ID NO: 32286 - protein, 8 aa, Artificial sequence
  Protein classification predicting sequence
TFFGWKEP

SEQ ID NO: 32287 - protein, 8 aa, Artificial sequence
  Protein classification predicting sequence
RSLASWIQ

SEQ ID NO: 32288 - protein, 11 aa, Artificial sequence
  Protein classification predicting sequence
EFNKACELTDS

SEQ ID NO: 32289 - protein, 36 aa, Artificial sequence
  Protein classification predicting sequence
SIGKVCRTLLAKSVFNSLYASPQLEGFSAESRKLLL

SEQ ID NO: 32290 - protein, 13 aa, Artificial sequence
  Protein classification predicting sequence
CMKTFFGWKEPNI

SEQ ID NO: 32291 - protein, 17 aa, Artificial sequence
  Protein classification predicting sequence
CMKTFFGWKEPNIIKPH

SEQ ID NO: 32292 - protein, 9 aa, Artificial sequence
  Protein classification predicting sequence
EFNKACELT

SEQ ID NO: 32293 - protein, 31 aa, Artificial sequence
  Protein classification predicting sequence
RSLASWIQSEFNKACELTDSSWIELDEIGED

SEQ ID NO: 32294 - protein, 11 aa, Artificial sequence
  Protein classification predicting sequence
THIHIFSFTGE

SEQ ID NO: 32295 - protein, 29 aa, Artificial sequence
  Protein classification predicting sequence
MATKADYTLDEESRARIKTRLFTIRQEMA

SEQ ID NO: 32296 - protein, 7 aa, Artificial sequence
  Protein classification predicting sequence
LPDGPPC

SEQ ID NO: 32297 - protein, 26 aa, Artificial sequence
  Protein classification predicting sequence
KIETNKFAAICTHLEVCFMYSDFHFI

SEQ ID NO: 32298 - protein, 15 aa, Artificial sequence
  Protein classification predicting sequence
KIETNKFAAICTHLE

SEQ ID NO: 32299 - protein, 10 aa, Artificial sequence
  Protein classification predicting sequence
CFMYSDFHFI

SEQ ID NO: 32300 - protein, 6 aa, Artificial sequence
  Protein classification predicting sequence
CSQRSK

SEQ ID NO: 32301 - protein, 25 aa, Artificial sequence
  Protein classification predicting sequence
TKNMKKTSQLKWALGENMAPEKVDF

SEQ ID NO: 32302 - protein, 23 aa, Artificial sequence
  Protein classification predicting sequence
EERFEITGTMRRLADQSLPPNFS

SEQ ID NO: 32303 - protein, 12 aa, Artificial sequence
  Protein classification predicting sequence
IETNKFAAICTH

SEQ ID NO: 32304 - protein, 9 aa, Artificial sequence
  Protein classification predicting sequence
FMYSDFHFI

SEQ ID NO: 32305 - protein, 7 aa, Artificial sequence
  Protein classification predicting sequence
WKQVLAE

SEQ ID NO: 32306 - protein, 21 aa, Artificial sequence
  Protein classification predicting sequence
KKTSQLKWALGENMAPEKVDF

SEQ ID NO: 32307 - protein, 20 aa, Artificial sequence
  Protein classification predicting sequence
VQALRDNLEPGTFDLGGLYE

SEQ ID NO: 32308 - protein, 16 aa, Artificial sequence
  Protein classification predicting sequence
NALLKHRFEIIEGRDR

SEQ ID NO: 32309 - protein, 22 aa, Artificial sequence
  Protein classification predicting sequence
IGVTRREVHIYYLEKANKIKSE

SEQ ID NO: 32310 - protein, 13 aa, Artificial sequence
  Protein classification predicting sequence
NFRAYVDGFEPNG

SEQ ID NO: 32311 - protein, 9 aa, Artificial sequence
  Protein classification predicting sequence
IEGKLSQMS

SEQ ID NO: 32312 - protein, 30 aa, Artificial sequence
  Protein classification predicting sequence
QRSKFLLMDALKLSIEDPSHEGEGIPLYDA

SEQ ID NO: 32313 - protein, 11 aa, Artificial sequence
  Protein classification predicting sequence
CMKTFFGWKEP

SEQ ID NO: 32314 - protein, 7 aa, Artificial sequence
  Protein classification predicting sequence
KNMKKTS

SEQ ID NO: 32315 - protein, 21 aa, Artificial sequence
  Protein classification predicting sequence
LKWALGENMAPEKVDFEDCKD

SEQ ID NO: 32316 - protein, 7 aa, Artificial sequence
  Protein classification predicting sequence
SDLKQYD

SEQ ID NO: 32317 - protein, 13 aa, Artificial sequence
  Protein classification predicting sequence
EFNKACELTDSSW

SEQ ID NO: 32318 - protein, 6 aa, Artificial sequence
  Protein classification predicting sequence
DEIGED

SEQ ID NO: 32319 - protein, 6 aa, Artificial sequence
  Protein classification predicting sequence
LEIGDM

SEQ ID NO: 32320 - protein, 19 aa, Artificial sequence
  Protein classification predicting sequence
LYASPQLEGFSAESRKLLL

SEQ ID NO: 32321 - protein, 6 aa, Artificial sequence
  Protein classification predicting sequence
MKWGME

SEQ ID NO: 32322 - protein, 10 aa, Artificial sequence
  Protein classification predicting sequence
QLEGFSAESR

SEQ ID NO: 32323 - protein, 25 aa, Artificial sequence
  Protein classification predicting sequence
YTALEGQGKEQNLRPQYEVIEGMPR

SEQ ID NO: 32324 - protein, 34 aa, Artificial sequence
  Protein classification predicting sequence
EDPELQPAMLFNICVHLEVCYVISDMNFLDEEGK

SEQ ID NO: 32325 - protein, 13 aa, Artificial sequence
  Protein classification predicting sequence
PERNEQGQTLWSK

SEQ ID NO: 32326 - protein, 14 aa, Artificial sequence
  Protein classification predicting sequence
PERNEQGQTLWSKM

SEQ ID NO: 32327 - protein, 28 aa, Artificial sequence
  Protein classification predicting sequence
ICKAAMGLRISSSFSFGGFTFKRTSGSS

SEQ ID NO: 32328 - protein, 27 aa, Artificial sequence
  Protein classification predicting sequence
QSRMQFSSLTVNVRGSGMRILVRGNSP

SEQ ID NO: 32329 - protein, 20 aa, Artificial sequence
  Protein classification predicting sequence
FNYNKTTKRLTILGKDAGTL

SEQ ID NO: 32330 - protein, 24 aa, Artificial sequence
  Protein classification predicting sequence
ESVLVNTYQWIIRNWETVKIQWSQ

SEQ ID NO: 32331 - protein, 21 aa, Artificial sequence
  Protein classification predicting sequence
YSGFVRTLFQQMRDVLGTFDT

SEQ ID NO: 32332 - protein, 13 aa, Artificial sequence
  Protein classification predicting sequence
QIIKLLPFAAAPP

SEQ ID NO: 32333 - protein, 8 aa, Artificial sequence
  Protein classification predicting sequence
DAGSDRVM

SEQ ID NO: 32334 - protein, 7 aa, Artificial sequence
  Protein classification predicting sequence
STVHYPK

SEQ ID NO: 32335 - protein, 15 aa, Artificial sequence
  Protein classification predicting sequence
KREEEVLTGNLQTLK

SEQ ID NO: 32336 - protein, 7 aa, Artificial sequence
  Protein classification predicting sequence
EEFTMVG

SEQ ID NO: 32337 - protein, 12 aa, Artificial sequence
  Protein classification predicting sequence
QLIVSGRDEQSI

SEQ ID NO: 32338 - protein, 11 aa, Artificial sequence
  Protein classification predicting sequence
RVSKMGVDEYS

SEQ ID NO: 32339 - protein, 12 aa, Artificial sequence
  Protein classification predicting sequence
TKRLTVLGKDAG

SEQ ID NO: 32340 - protein, 9 aa, Artificial sequence
  Protein classification predicting sequence
LTEDPDEGT

SEQ ID NO: 32341 - protein, 16 aa, Artificial sequence
  Protein classification predicting sequence
LRMKWMMAMKYPITAD

SEQ ID NO: 32342 - protein, 20 aa, Artificial sequence
  Protein classification predicting sequence
RITEMIPERNEQGQTLWSKM

SEQ ID NO: 32343 - protein, 11 aa, Artificial sequence
  Protein classification predicting sequence
GFTFKRTSGSS

SEQ ID NO: 32344 - protein, 9 aa, Artificial sequence
  Protein classification predicting sequence
IDNVMGMIG

SEQ ID NO: 32345 - protein, 11 aa, Artificial sequence
  Protein classification predicting sequence
LPDMTPSTEMS

SEQ ID NO: 32346 - protein, 14 aa, Artificial sequence
  Protein classification predicting sequence
LPDMTPSTEMSMRG

SEQ ID NO: 32347 - protein, 12 aa, Artificial sequence
  Protein classification predicting sequence
EFEPFQSLVPKA

SEQ ID NO: 32348 - protein, 11 aa, Artificial sequence
  Protein classification predicting sequence
EKKEELQDCKI

SEQ ID NO: 32349 - protein, 15 aa, Artificial sequence
  Protein classification predicting sequence
EKKEELQDCKIAPLM

SEQ ID NO: 32350 - protein, 15 aa, Artificial sequence
  Protein classification predicting sequence
QLIVSGRDEQSIAEA

SEQ ID NO: 32351 - protein, 8 aa, Artificial sequence
  Protein classification predicting sequence
LFQNWGIE

SEQ ID NO: 32352 - protein, 7 aa, Artificial sequence
  Protein classification predicting sequence
PLMVAYM

SEQ ID NO: 32353 - protein, 6 aa, Artificial sequence
  Protein classification predicting sequence
LPDMTP

SEQ ID NO: 32354 - protein, 18 aa, Artificial sequence
  Protein classification predicting sequence
SQLTITKEKKEELQDCKI

SEQ ID NO: 32355 - protein, 45 aa, Artificial sequence
  Protein classification predicting sequence
RMVDILRQNPTEEQAVDICKAAMGLRISSSFSFGGFTFKRTSGSS

SEQ ID NO: 32356 - protein, 8 aa, Artificial sequence
  Protein classification predicting sequence
LMSQSRTR

SEQ ID NO: 32357 - protein, 6 aa, Artificial sequence
  Protein classification predicting sequence
KIQWSQ

SEQ ID NO: 32358 - protein, 19 aa, Artificial sequence
  Protein classification predicting sequence
QSRMQFSSLTVNVRGSGMR

SEQ ID NO: 32359 - protein, 7 aa, Artificial sequence
  Protein classification predicting sequence
PTMLYNK

SEQ ID NO: 32360 - protein, 16 aa, Artificial sequence
  Protein classification predicting sequence
GVESAVLRGFLILGKE

SEQ ID NO: 32361 - protein, 20 aa, Artificial sequence
  Protein classification predicting sequence
VSADPLASLLEMCHSTQIGG

SEQ ID NO: 32362 - protein, 6 aa, Artificial sequence
  Protein classification predicting sequence
RMVDIL

SEQ ID NO: 32363 - protein, 29 aa, Artificial sequence
  Protein classification predicting sequence
RVSKMGVDEYSSTERVVVSIDRFLRVRDQ

SEQ ID NO: 32364 - protein, 14 aa, Artificial sequence
  Protein classification predicting sequence
RYGPALSINELSNL

SEQ ID NO: 32365 - protein, 9 aa, Artificial sequence
  Protein classification predicting sequence
KGEKANVLI

SEQ ID NO: 32366 - protein, 10 aa, Artificial sequence
  Protein classification predicting sequence
TTVDHMAIIK

SEQ ID NO: 32367 - protein, 10 aa, Artificial sequence
  Protein classification predicting sequence
YTSGRQEKNP

SEQ ID NO: 32368 - protein, 6 aa, Artificial sequence
  Protein classification predicting sequence
DAGSDR

SEQ ID NO: 32369 - protein, 11 aa, Artificial sequence
  Protein classification predicting sequence
GTFGPVHFRNQ

SEQ ID NO: 32370 - protein, 7 aa, Artificial sequence
  Protein classification predicting sequence
KIRRRVD

SEQ ID NO: 32371 - protein, 7 aa, Artificial sequence
  Protein classification predicting sequence
LTSESQL

SEQ ID NO: 32372 - protein, 17 aa, Artificial sequence
  Protein classification predicting sequence
DPLASLLEMCHSTQIGG

SEQ ID NO: 32373 - protein, 11 aa, Artificial sequence
  Protein classification predicting sequence
NWETVKIQWSQ

SEQ ID NO: 32374 - protein, 8 aa, Artificial sequence
  Protein classification predicting sequence
EFEPFQSL

SEQ ID NO: 32375 - protein, 6 aa, Artificial sequence
  Protein classification predicting sequence
DPDEGT

SEQ ID NO: 32376 - protein, 8 aa, Artificial sequence
  Protein classification predicting sequence
RYGPALSI

SEQ ID NO: 32377 - protein, 27 aa, Artificial sequence
  Protein classification predicting sequence
PLMVAYMLERELVRKTRFLPVAGGTSS

SEQ ID NO: 32378 - protein, 43 aa, Artificial sequence
  Protein classification predicting sequence
YIEVLHLTQGTCWEQMYTPGGEVRNDDVDQSLIIAARNIVRRA

SEQ ID NO: 32379 - protein, 7 aa, Artificial sequence
  Protein classification predicting sequence
RKATRRL

SEQ ID NO: 32380 - protein, 13 aa, Artificial sequence
  Protein classification predicting sequence
KDAKVLFQNWGIE

SEQ ID NO: 32381 - protein, 14 aa, Artificial sequence
  Protein classification predicting sequence
RVSKMGVDEYSSTE

SEQ ID NO: 32382 - protein, 17 aa, Artificial sequence
  Protein classification predicting sequence
TSGVESAVLRGFLILGK

SEQ ID NO: 32383 - protein, 12 aa, Artificial sequence
  Protein classification predicting sequence
TVHYPKVYKTYF

SEQ ID NO: 32384 - protein, 26 aa, Artificial sequence
  Protein classification predicting sequence
LTITYSSSMMWEINGPESVLVNTYQW

SEQ ID NO: 32385 - protein, 13 aa, Artificial sequence
  Protein classification predicting sequence
IRNWETVKIQWSQ

SEQ ID NO: 32386 - protein, 17 aa, Artificial sequence
  Protein classification predicting sequence
LYNKMEFEPFQSLVPKA

SEQ ID NO: 32387 - protein, 16 aa, Artificial sequence
  Protein classification predicting sequence
GVLPDMTPSTEMSMRG

SEQ ID NO: 32388 - protein, 75 aa, Artificial sequence
  Protein classification predicting sequence
ERVVVSIDRFLRVRDQRGNVLLSPEEVSETQGTEKLTITYSSSMMWEINGPESVLVNTYQWIIRNWETVKIQWSQ

SEQ ID NO: 32389 - protein, 12 aa, Artificial sequence
  Protein classification predicting sequence
RYGPALSINELS

SEQ ID NO: 32390 - protein, 6 aa, Artificial sequence
  Protein classification predicting sequence
ILRQNP

SEQ ID NO: 32391 - protein, 27 aa, Artificial sequence
  Protein classification predicting sequence
EEEVLTGNLQTLKIRVHEGYEEFTMVG

SEQ ID NO: 32392 - protein, 9 aa, Artificial sequence
  Protein classification predicting sequence
LLPFAAAPP

SEQ ID NO: 32393 - protein, 9 aa, Artificial sequence
  Protein classification predicting sequence
GVESAVLRG

SEQ ID NO: 32394 - protein, 25 aa, Artificial sequence
  Protein classification predicting sequence
ILTKTTVDHMAIIKKYTSGRQEKNP

SEQ ID NO: 32395 - protein, 21 aa, Artificial sequence
  Protein classification predicting sequence
DAGSDRVMVSPLAVTWWNRNG

SEQ ID NO: 32396 - protein, 15 aa, Artificial sequence
  Protein classification predicting sequence
VSADPLASLLEMCHS

SEQ ID NO: 32397 - protein, 8 aa, Artificial sequence
  Protein classification predicting sequence
TSTVHYPK

SEQ ID NO: 32398 - protein, 84 aa, Artificial sequence
  Protein classification predicting sequence
YKTYFEKVERLKHGTFGPVHFRNQVKIRRRVDINPGHADLSAKEAQDVIMEVVFPNEVGARILTSESQLTITKEKKEELQDCKI

SEQ ID NO: 32399 - protein, 9 aa, Artificial sequence
  Protein classification predicting sequence
GYEEFTMVG

SEQ ID NO: 32400 - protein, 11 aa, Artificial sequence
  Protein classification predicting sequence
QLIVSGRDEQS

SEQ ID NO: 32401 - protein, 58 aa, Artificial sequence
  Protein classification predicting sequence
AEAIIVAMVFSQEDCMIKAVRGDLNFVNRANQRLNPMHQLLRHFQKDAKVLFQNWGIE

SEQ ID NO: 32402 - protein, 7 aa, Artificial sequence
  Protein classification predicting sequence
EDPDEGT

SEQ ID NO: 32403 - protein, 19 aa, Artificial sequence
  Protein classification predicting sequence
LRMKWMMAMKYPITADKRI

SEQ ID NO: 32404 - protein, 6 aa, Artificial sequence
  Protein classification predicting sequence
TVHYPK

SEQ ID NO: 32405 - protein, 6 aa, Artificial sequence
  Protein classification predicting sequence
YKTYFE

SEQ ID NO: 32406 - protein, 19 aa, Artificial sequence
  Protein classification predicting sequence
NDDVDQSLIIAARNIVRRA

SEQ ID NO: 32407 - protein, 9 aa, Artificial sequence
  Protein classification predicting sequence
QNPTEEQAV

SEQ ID NO: 32408 - protein, 8 aa, Artificial sequence
  Protein classification predicting sequence
EMSMRGVR

SEQ ID NO: 32409 - protein, 8 aa, Artificial sequence
  Protein classification predicting sequence
QSRMQFSS

SEQ ID NO: 32410 - protein, 51 aa, Artificial sequence
  Protein classification predicting sequence
PLMVAYMLERELVRKTRFLPVAGGTSSVYIEVLHLTQGTCWEQMYTPGGEV

SEQ ID NO: 32411 - protein, 10 aa, Artificial sequence
  Protein classification predicting sequence
EGYEEFTMVG

SEQ ID NO: 32412 - protein, 10 aa, Artificial sequence
  Protein classification predicting sequence
PDMTPSTEMS

SEQ ID NO: 32413 - protein, 16 aa, Artificial sequence
  Protein classification predicting sequence
VSADPLASLLEMCHST

SEQ ID NO: 32414 - protein, 7 aa, Artificial sequence
  Protein classification predicting sequence
IDNVMGM

SEQ ID NO: 32415 - protein, 15 aa, Artificial sequence
  Protein classification predicting sequence
DQSLIIAARNIVRRA

SEQ ID NO: 32416 - protein, 10 aa, Artificial sequence
  Protein classification predicting sequence
SKMGVDEYSS

SEQ ID NO: 32417 - protein, 7 aa, Artificial sequence
  Protein classification predicting sequence
MQFSSLT

SEQ ID NO: 32418 - protein, 11 aa, Artificial sequence
  Protein classification predicting sequence
FNYNKTTKRLT

SEQ ID NO: 32419 - protein, 37 aa, Artificial sequence
  Protein classification predicting sequence
RYGPALSINELSNLAKGEKANVLIGQGDVVLVMKRKR

SEQ ID NO: 32420 - protein, 7 aa, Artificial sequence
  Protein classification predicting sequence
YKTYFEK

SEQ ID NO: 32421 - protein, 14 aa, Artificial sequence
  Protein classification predicting sequence
ITKEKKEELQDCKI

SEQ ID NO: 32422 - protein, 13 aa, Artificial sequence
  Protein classification predicting sequence
RATAILRKATRRL

SEQ ID NO: 32423 - protein, 6 aa, Artificial sequence
  Protein classification predicting sequence
HYPKVY

SEQ ID NO: 32424 - protein, 9 aa, Artificial sequence
  Protein classification predicting sequence
RYGPALSIN

SEQ ID NO: 32425 - protein, 5 aa, Artificial sequence
  Protein classification predicting sequence
LRMKW

SEQ ID NO: 32426 - protein, 6 aa, Artificial sequence
  Protein classification predicting sequence
AVTWWN

SEQ ID NO: 32427 - protein, 9 aa, Artificial sequence
  Protein classification predicting sequence
AYMLERELV

SEQ ID NO: 32428 - protein, 7 aa, Artificial sequence
  Protein classification predicting sequence
RFLPVAG

SEQ ID NO: 32429 - protein, 5 aa, Artificial sequence
  Protein classification predicting sequence
NTYQW

SEQ ID NO: 32430 - protein, 6 aa, Artificial sequence
  Protein classification predicting sequence
GQYSGF

SEQ ID NO: 32431 - protein, 6 aa, Artificial sequence
  Protein classification predicting sequence
IKLLPF

SEQ ID NO: 32432 - protein, 18 aa, Artificial sequence
  Protein classification predicting sequence
RLEIMVADNGVSFDFNNL

SEQ ID NO: 32433 - protein, 54 aa, Artificial sequence
  Protein classification predicting sequence
KPVEHLPENGLGLYLINTLMDDIQIMHDEGMTVLMTKYIQREQVENDGNPISTY

SEQ ID NO: 32434 - protein, 7 aa, Artificial sequence
  Protein classification predicting sequence
IRLTLSG

SEQ ID NO: 32435 - protein, 7 aa, Artificial sequence
  Protein classification predicting sequence
KIAVSEA

SEQ ID NO: 32436 - protein, 8 aa, Artificial sequence
  Protein classification predicting sequence
VQHAYKED

SEQ ID NO: 32437 - protein, 7 aa, Artificial sequence
  Protein classification predicting sequence
RLTLSGV

SEQ ID NO: 32438 - protein, 8 aa, Artificial sequence
  Protein classification predicting sequence
GVANRMGF

SEQ ID NO: 32439 - protein, 23 aa, Artificial sequence
  Protein classification predicting sequence
PASAEYVSLIRLTLSGVFSRAGA

SEQ ID NO: 32440 - protein, 17 aa, Artificial sequence
  Protein classification predicting sequence
KIAVSEAVTNAVKHAYK

SEQ ID NO: 32441 - protein, 7 aa, Artificial sequence
  Protein classification predicting sequence
IKIVISD

SEQ ID NO: 32442 - protein, 35 aa, Artificial sequence
  Protein classification predicting sequence
ENIDFLREGGLGLFLIESLMDEVTVYKESGVTISM

SEQ ID NO: 32443 - protein, 11 aa, Artificial sequence
  Protein classification predicting sequence
YMENGDLNQFL

SEQ ID NO: 32444 - protein, 6 aa, Artificial sequence
  Protein classification predicting sequence
QIASGM

SEQ ID NO: 32445 - protein, 5 aa, Artificial sequence
  Protein classification predicting sequence
PVKWM

SEQ ID NO: 32446 - protein, 10 aa, Artificial sequence
  Protein classification predicting sequence
LPFMKYGDLH

SEQ ID NO: 32447 - protein, 11 aa, Artificial sequence
  Protein classification predicting sequence
FLHRDLAARNC

SEQ ID NO: 32448 - protein, 60 aa, Artificial sequence
  Protein classification predicting sequence
FLHRDLAARNCMLRDDMTVCVADFGLSKKIYSGDYYRQGRIAKMPVKWIAIESLADRVYT

SEQ ID NO: 32449 - protein, 5 aa, Artificial sequence
  Protein classification predicting sequence
ASDVW

SEQ ID NO: 32450 - protein, 13 aa, Artificial sequence
  Protein classification predicting sequence
ASDVWAFGVTLWE

SEQ ID NO: 32451 - protein, 8 aa, Artificial sequence
  Protein classification predicting sequence
EFIYGEWL

SEQ ID NO: 32452 - protein, 8 aa, Artificial sequence
  Protein classification predicting sequence
VNDQTERP

SEQ ID NO: 32453 - protein, 7 aa, Artificial sequence
  Protein classification predicting sequence
DPTTTQP

SEQ ID NO: 32454 - protein, 11 aa, Artificial sequence
  Protein classification predicting sequence
WNFRDPSPFID

SEQ ID NO: 32455 - protein, 8 aa, Artificial sequence
  Protein classification predicting sequence
SGLVLGNP

SEQ ID NO: 32456 - protein, 9 aa, Artificial sequence
  Protein classification predicting sequence
TQEWSGSAT

SEQ ID NO: 32457 - protein, 8 aa, Artificial sequence
  Protein classification predicting sequence
TSYMTNRG

SEQ ID NO: 32458 - protein, 10 aa, Artificial sequence
  Protein classification predicting sequence
GVNDQTERPH

SEQ ID NO: 32459 - protein, 9 aa, Artificial sequence
  Protein classification predicting sequence
NGLVTSFID

SEQ ID NO: 32460 - protein, 15 aa, Artificial sequence
  Protein classification predicting sequence
CHRDLKLENTLLDGS

SEQ ID NO: 32461 - protein, 14 aa, Artificial sequence
  Protein classification predicting sequence
PRLKICDFGYSKSS

SEQ ID NO: 32462 - protein, 16 aa, Artificial sequence
  Protein classification predicting sequence
PKSTVGTPAYIAPEVL

SEQ ID NO: 32463 - protein, 6 aa, Artificial sequence
  Protein classification predicting sequence
NFRKTI

SEQ ID NO: 32464 - protein, 10 aa, Artificial sequence
  Protein classification predicting sequence
KIDENVQREI

SEQ ID NO: 32465 - protein, 10 aa, Artificial sequence
  Protein classification predicting sequence
NHRSLRHPNI

SEQ ID NO: 32466 - protein, 6 aa, Artificial sequence
  Protein classification predicting sequence
LRHPNI

SEQ ID NO: 32467 - protein, 15 aa, Artificial sequence
  Protein classification predicting sequence
APRLKICDFGYSKSS

SEQ ID NO: 32468 - protein, 7 aa, Artificial sequence
  Protein classification predicting sequence
YIAPEVL

SEQ ID NO: 32469 - protein, 7 aa, Artificial sequence
  Protein classification predicting sequence
WFLKNLP

SEQ ID NO: 32470 - protein, 7 aa, Artificial sequence
  Protein classification predicting sequence
ETRELVA

SEQ ID NO: 32471 - protein, 6 aa, Artificial sequence
  Protein classification predicting sequence
GVSYCH

SEQ ID NO: 32472 - protein, 20 aa, Artificial sequence
  Protein classification predicting sequence
VGTPAYIAPEVLSRREYDGK

SEQ ID NO: 32473 - protein, 12 aa, Artificial sequence
  Protein classification predicting sequence
RICSAGRFSEDE

SEQ ID NO: 32474 - protein, 8 aa, Artificial sequence
  Protein classification predicting sequence
RFSEDEAR

SEQ ID NO: 32475 - protein, 13 aa, Artificial sequence
  Protein classification predicting sequence
ADVWSCGVTLYVM

SEQ ID NO: 32476 - protein, 8 aa, Artificial sequence
  Protein classification predicting sequence
IPDYVHIS

SEQ ID NO: 32477 - protein, 7 aa, Artificial sequence
  Protein classification predicting sequence
LLIEFSY

SEQ ID NO: 32478 - protein, 28 aa, Artificial sequence
  Protein classification predicting sequence
EGHSIVGFAMYYFTYDPWIGKLLYLEDF

SEQ ID NO: 32479 - protein, 14 aa, Artificial sequence
  Protein classification predicting sequence
GIGSEILKNLSQVA

SEQ ID NO: 32480 - protein, 11 aa, Artificial sequence
  Protein classification predicting sequence
FYKRRGASDLS

SEQ ID NO: 32481 - protein, 18 aa, Artificial sequence
  Protein classification predicting sequence
EEGWRLFKIDKEYLLKMA

SEQ ID NO: 32482 - protein, 20 aa, Artificial sequence
  Protein classification predicting sequence
LTEKDLLEDGFGEHPFYHCL

SEQ ID NO: 32483 - protein, 19 aa, Artificial sequence
  Protein classification predicting sequence
DCSDILRLIKELAKYEYME

SEQ ID NO: 32484 - protein, 11 aa, Artificial sequence
  Protein classification predicting sequence
KIIKKVAEVAL

SEQ ID NO: 32485 - protein, 6 aa, Artificial sequence
  Protein classification predicting sequence
AFQTRN

SEQ ID NO: 32486 - protein, 6 aa, Artificial sequence
  Protein classification predicting sequence
RNPMHR

SEQ ID NO: 32487 - protein, 10 aa, Artificial sequence
  Protein classification predicting sequence
MRYAGPREAI

SEQ ID NO: 32488 - protein, 7 aa, Artificial sequence
  Protein classification predicting sequence
FSRPEVA

SEQ ID NO: 32489 - protein, 6 aa, Artificial sequence
  Protein classification predicting sequence
FQTRNP

SEQ ID NO: 32490 - protein, 12 aa, Artificial sequence
  Protein classification predicting sequence
TKSDDIPADVRM

SEQ ID NO: 32491 - protein, 25 aa, Artificial sequence
  Protein classification predicting sequence
RKNYGCTHFIVGRDHAGVGDYYGTY

SEQ ID NO: 32492 - protein, 8 aa, Artificial sequence
  Protein classification predicting sequence
VLALEHLH

SEQ ID NO: 32493 - protein, 6 aa, Artificial sequence
  Protein classification predicting sequence
EYLAPE

SEQ ID NO: 32494 - protein, 6 aa, Artificial sequence
  Protein classification predicting sequence
FDPEFT

SEQ ID NO: 32495 - protein, 6 aa, Artificial sequence
  Protein classification predicting sequence
GKVRFP

SEQ ID NO: 32496 - protein, 8 aa, Artificial sequence
  Protein classification predicting sequence
TTRTFCGT

SEQ ID NO: 32497 - protein, 7 aa, Artificial sequence
  Protein classification predicting sequence
SNNAGVD

SEQ ID NO: 32498 - protein, 9 aa, Artificial sequence
  Protein classification predicting sequence
GDLANWMIP

SEQ ID NO: 32499 - protein, 9 aa, Artificial sequence
  Protein classification predicting sequence
PREVREFNG

SEQ ID NO: 32500 - protein, 28 aa, Artificial sequence
  Protein classification predicting sequence
RAALEFEDGMYANLGIGIPLLASNFISP

SEQ ID NO: 32501 - protein, 11 aa, Artificial sequence
  Protein classification predicting sequence
DSFAMIRGGHI

SEQ ID NO: 32502 - protein, 23 aa, Artificial sequence
  Protein classification predicting sequence
LTMLGAMQVSKYGDLANWMIPGK

SEQ ID NO: 32503 - protein, 7 aa, Artificial sequence
  Protein classification predicting sequence
KIMEKCT

SEQ ID NO: 32504 - protein, 9 aa, Artificial sequence
  Protein classification predicting sequence
SFAMIRGGH

SEQ ID NO: 32505 - protein, 11 aa, Artificial sequence
  Protein classification predicting sequence
CPGGAPANVAV

SEQ ID NO: 32506 - protein, 13 aa, Artificial sequence
  Protein classification predicting sequence
GRLGNQMGEYATL

SEQ ID NO: 32507 - protein, 11 aa, Artificial sequence
  Protein classification predicting sequence
MHSTLAPIFRI

SEQ ID NO: 32508 - protein, 13 aa, Artificial sequence
  Protein classification predicting sequence
VMPKVWKGVVADR

SEQ ID NO: 32509 - protein, 7 aa, Artificial sequence
  Protein classification predicting sequence
PVFVVTS

SEQ ID NO: 32510 - protein, 5 aa, Artificial sequence
  Protein classification predicting sequence
QCNHT

SEQ ID NO: 32511 - protein, 10 aa, Artificial sequence
  Protein classification predicting sequence
GTFGIWAAYL

SEQ ID NO: 32512 - protein, 10 aa, Artificial sequence
  Protein classification predicting sequence
SRGELVEIGG

SEQ ID NO: 32513 - protein, 7 aa, Artificial sequence
  Protein classification predicting sequence
FRIPDIM

SEQ ID NO: 32514 - protein, 6 aa, Artificial sequence
  Protein classification predicting sequence
EVGTTN

SEQ ID NO: 32515 - protein, 7 aa, Artificial sequence
  Protein classification predicting sequence
VNNNAAA

SEQ ID NO: 32516 - protein, 7 aa, Artificial sequence
  Protein classification predicting sequence
VTFSGDK

SEQ ID NO: 32517 - protein, 7 aa, Artificial sequence
  Protein classification predicting sequence
FRIPDVM

SEQ ID NO: 32518 - protein, 6 aa, Artificial sequence
  Protein classification predicting sequence
VHTSNY

SEQ ID NO: 32519 - protein, 7 aa, Artificial sequence
  Protein classification predicting sequence
LGGPQAG

SEQ ID NO: 32520 - protein, 8 aa, Artificial sequence
  Protein classification predicting sequence
LHTNLGRA

SEQ ID NO: 32521 - protein, 10 aa, Artificial sequence
  Protein classification predicting sequence
VNNNAAAVLL

SEQ ID NO: 32522 - protein, 10 aa, Artificial sequence
  Protein classification predicting sequence
EIGGAFRIPD

SEQ ID NO: 32523 - protein, 16 aa, Artificial sequence
  Protein classification predicting sequence
LVEVGTTNRTHLKDYR

SEQ ID NO: 32524 - protein, 7 aa, Artificial sequence
  Protein classification predicting sequence
DLGSGSL

SEQ ID NO: 32525 - protein, 10 aa, Artificial sequence
  Protein classification predicting sequence
VPVVTDLGSG

SEQ ID NO: 32526 - protein, 8 aa, Artificial sequence
  Protein classification predicting sequence
QYGLPKEP

SEQ ID NO: 32527 - protein, 6 aa, Artificial sequence
  Protein classification predicting sequence
HTNLGR

SEQ ID NO: 32528 - protein, 9 aa, Artificial sequence
  Protein classification predicting sequence
MRSPVTLEY

SEQ ID NO: 32529 - protein, 21 aa, Artificial sequence
  Protein classification predicting sequence
VVVSRGELVEIGGAFRIPDVM

SEQ ID NO: 32530 - protein, 15 aa, Artificial sequence
  Protein classification predicting sequence
SQIGSGSLPVDRLPS

SEQ ID NO: 32531 - protein, 7 aa, Artificial sequence
  Protein classification predicting sequence
PLKRALR

SEQ ID NO: 32532 - protein, 9 aa, Artificial sequence
  Protein classification predicting sequence
SNYSIQGFT

SEQ ID NO: 32533 - protein, 7 aa, Artificial sequence
  Protein classification predicting sequence
LRLLTRS

SEQ ID NO: 32534 - protein, 7 aa, Artificial sequence
  Protein classification predicting sequence
EIGGAFR

SEQ ID NO: 32535 - protein, 9 aa, Artificial sequence
  Protein classification predicting sequence
EVGTTNRTH

SEQ ID NO: 32536 - protein, 9 aa, Artificial sequence
  Protein classification predicting sequence
PVTLEYDLD

SEQ ID NO: 32537 - protein, 10 aa, Artificial sequence
  Protein classification predicting sequence
DYRQAVNENT

SEQ ID NO: 32538 - protein, 20 aa, Artificial sequence
  Protein classification predicting sequence
PCLSQIGSGSLPVDRLPSAA

SEQ ID NO: 32539 - protein, 10 aa, Artificial sequence
  Protein classification predicting sequence
TFTPHDGRGS

SEQ ID NO: 32540 - protein, 17 aa, Artificial sequence
  Protein classification predicting sequence
LPVPVIGRIYDGRLWLD

SEQ ID NO: 32541 - protein, 26 aa, Artificial sequence
  Protein classification predicting sequence
AQSALRPVINLTGTVLHTNLGRALQA

SEQ ID NO: 32542 - protein, 22 aa, Artificial sequence
  Protein classification predicting sequence
DLGSGSLVDLSQYGLPKEPMPQ

SEQ ID NO: 32543 - protein, 29 aa, Artificial sequence
  Protein classification predicting sequence
LIAAGVSLVSFSGDKLLGGPQAGIIVGKK

SEQ ID NO: 32544 - protein, 33 aa, Artificial sequence
  Protein classification predicting sequence
LQSHPLKRALRADKMTLAALEATLRLYLHPEAL

SEQ ID NO: 32545 - protein, 9 aa, Artificial sequence
  Protein classification predicting sequence
TNRTHLKDY

SEQ ID NO: 32546 - protein, 9 aa, Artificial sequence
  Protein classification predicting sequence
EIGGSFRIP

SEQ ID NO: 32547 - protein, 7 aa, Artificial sequence
  Protein classification predicting sequence
ALLMKVH

SEQ ID NO: 32548 - protein, 9 aa, Artificial sequence
  Protein classification predicting sequence
QLPAIDRLL

SEQ ID NO: 32549 - protein, 14 aa, Artificial sequence
  Protein classification predicting sequence
NLTGTVLHTNLGRA

SEQ ID NO: 32550 - protein, 9 aa, Artificial sequence
  Protein classification predicting sequence
AGRGHRDRA

SEQ ID NO: 32551 - protein, 16 aa, Artificial sequence
  Protein classification predicting sequence
TGAEDACIVNNNAAAV

SEQ ID NO: 32552 - protein, 8 aa, Artificial sequence
  Protein classification predicting sequence
VNNNAAAV

SEQ ID NO: 32553 - protein, 7 aa, Artificial sequence
  Protein classification predicting sequence
TDITGFG

SEQ ID NO: 32554 - protein, 6 aa, Artificial sequence
  Protein classification predicting sequence
AMGGKP

SEQ ID NO: 32555 - protein, 6 aa, Artificial sequence
  Protein classification predicting sequence
TSGGLL

SEQ ID NO: 32556 - protein, 9 aa, Artificial sequence
  Protein classification predicting sequence
DPQTSGGLL

SEQ ID NO: 32557 - protein, 11 aa, Artificial sequence
  Protein classification predicting sequence
STTDFFMPIVD

SEQ ID NO: 32558 - protein, 8 aa, Artificial sequence
  Protein classification predicting sequence
AIAILGWP

SEQ ID NO: 32559 - protein, 12 aa, Artificial sequence
  Protein classification predicting sequence
PFDFGRIAATNA

SEQ ID NO: 32560 - protein, 7 aa, Artificial sequence
  Protein classification predicting sequence
AMGGKPI

SEQ ID NO: 32561 - protein, 6 aa, Artificial sequence
  Protein classification predicting sequence
PIVDDP

SEQ ID NO: 32562 - protein, 12 aa, Artificial sequence
  Protein classification predicting sequence
LLCDPQTSGGLL

SEQ ID NO: 32563 - protein, 7 aa, Artificial sequence
  Protein classification predicting sequence
DPNLLVG

SEQ ID NO: 32564 - protein, 10 aa, Artificial sequence
  Protein classification predicting sequence
EPIFGLAVTG

SEQ ID NO: 32565 - protein, 7 aa, Artificial sequence
  Protein classification predicting sequence
QKAILCD

SEQ ID NO: 32566 - protein, 12 aa, Artificial sequence
  Protein classification predicting sequence
DDAAVYDLGNGT

SEQ ID NO: 32567 - protein, 11 aa, Artificial sequence
  Protein classification predicting sequence
PEPIFGLAVTG

SEQ ID NO: 32568 - protein, 7 aa, Artificial sequence
  Protein classification predicting sequence
LTTAEKK

SEQ ID NO: 32569 - protein, 14 aa, Artificial sequence
  Protein classification predicting sequence
AMTDVTGFGLLGHL

SEQ ID NO: 32570 - protein, 7 aa, Artificial sequence
  Protein classification predicting sequence
GCVPGGT

SEQ ID NO: 32571 - protein, 11 aa, Artificial sequence
  Protein classification predicting sequence
LCDPQTSGGLL

SEQ ID NO: 32572 - protein, 22 aa, Artificial sequence
  Protein classification predicting sequence
AGCKLFLTKPLGIGVLTTAEKK

SEQ ID NO: 32573 - protein, 11 aa, Artificial sequence
  Protein classification predicting sequence
EHQGLATEVMC

SEQ ID NO: 32574 - protein, 8 aa, Artificial sequence
  Protein classification predicting sequence
PGGTERNF

SEQ ID NO: 32575 - protein, 28 aa, Artificial sequence
  Protein classification predicting sequence
RLTQYSHGAGCGCKISPKVLETILHSEQ

SEQ ID NO: 32576 - protein, 8 aa, Artificial sequence
  Protein classification predicting sequence
LTKPLGIG

SEQ ID NO: 32577 - protein, 10 aa, Artificial sequence
  Protein classification predicting sequence
AMTDVTGFGL

SEQ ID NO: 32578 - protein, 7 aa, Artificial sequence
  Protein classification predicting sequence
GHLSEIC

SEQ ID NO: 32579 - protein, 7 aa, Artificial sequence
  Protein classification predicting sequence
RNFDSYG

SEQ ID NO: 32580 - protein, 8 aa, Artificial sequence
  Protein classification predicting sequence
TGFGLLGH

SEQ ID NO: 32581 - protein, 7 aa, Artificial sequence
  Protein classification predicting sequence
TDVTGFG

SEQ ID NO: 32582 - protein, 21 aa, Artificial sequence
  Protein classification predicting sequence
IRLTQYSHGAGCGCKISPKVL

SEQ ID NO: 32583 - protein, 12 aa, Artificial sequence
  Protein classification predicting sequence
ISTTDFFMPIVD

SEQ ID NO: 32584 - protein, 10 aa, Artificial sequence
  Protein classification predicting sequence
IAREVTEGGR

SEQ ID NO: 32585 - protein, 20 aa, Artificial sequence
  Protein classification predicting sequence
LAGGHSIDAPEPIFGLAVTG

SEQ ID NO: 32586 - protein, 11 aa, Artificial sequence
  Protein classification predicting sequence
IPKLPGVEEYI

SEQ ID NO: 32587 - protein, 20 aa, Artificial sequence
  Protein classification predicting sequence
LGAVPGGTERNFASYGHLMG

SEQ ID NO: 32588 - protein, 48 aa, Artificial sequence
  Protein classification predicting sequence
ISTTDFFMPIVDNPFDFGRIAATNAISDIFAMGGKPIMAIAILGWPIN

SEQ ID NO: 32589 - protein, 28 aa, Artificial sequence
  Protein classification predicting sequence
GVKAMTDVTGFGLLGHLSEMCQGAGVQA

SEQ ID NO: 32590 - protein, 8 aa, Artificial sequence
  Protein classification predicting sequence
GIGILTTA

SEQ ID NO: 32591 - protein, 9 aa, Artificial sequence
  Protein classification predicting sequence
GDVLILTKP

SEQ ID NO: 32592 - protein, 13 aa, Artificial sequence
  Protein classification predicting sequence
LAGGHSIDAPEPI

SEQ ID NO: 32593 - protein, 13 aa, Artificial sequence
  Protein classification predicting sequence
GCKLFLTKPLGIG

SEQ ID NO: 32594 - protein, 7 aa, Artificial sequence
  Protein classification predicting sequence
AGPAALP

SEQ ID NO: 32595 - protein, 9 aa, Artificial sequence
  Protein classification predicting sequence
ILSAPLDVS

SEQ ID NO: 32596 - protein, 7 aa, Artificial sequence
  Protein classification predicting sequence
RASIYNA

SEQ ID NO: 32597 - protein, 8 aa, Artificial sequence
  Protein classification predicting sequence
GSGMSVME

SEQ ID NO: 32598 - protein, 7 aa, Artificial sequence
  Protein classification predicting sequence
SHRGKEF

SEQ ID NO: 32599 - protein, 11 aa, Artificial sequence
  Protein classification predicting sequence
LFLQGGATTQF

SEQ ID NO: 32600 - protein, 10 aa, Artificial sequence
  Protein classification predicting sequence
ANETIHGVEF

SEQ ID NO: 32601 - protein, 8 aa, Artificial sequence
  Protein classification predicting sequence
SVGGMRAS

SEQ ID NO: 32602 - protein, 8 aa, Artificial sequence
  Protein classification predicting sequence
TGSWSKKA

SEQ ID NO: 32603 - protein, 10 aa, Artificial sequence
  Protein classification predicting sequence
GLIYAGAQKN

SEQ ID NO: 32604 - protein, 13 aa, Artificial sequence
  Protein classification predicting sequence
GLIYAGAQKNIGP

SEQ ID NO: 32605 - protein, 7 aa, Artificial sequence
  Protein classification predicting sequence
WLKAQGG

SEQ ID NO: 32606 - protein, 8 aa, Artificial sequence
  Protein classification predicting sequence
RSRMNIPF

SEQ ID NO: 32607 - protein, 9 aa, Artificial sequence
  Protein classification predicting sequence
MNTYKKAGY

SEQ ID NO: 32608 - protein, 6 aa, Artificial sequence
  Protein classification predicting sequence
MEMSHR

SEQ ID NO: 32609 - protein, 12 aa, Artificial sequence
  Protein classification predicting sequence
KNNSLYNTPPSF

SEQ ID NO: 32610 - protein, 23 aa, Artificial sequence
  Protein classification predicting sequence
NYNGTGMSIMEMSHRSSYFQSII

SEQ ID NO: 32611 - protein, 49 aa, Artificial sequence
  Protein classification predicting sequence
KVPLVADMSSNILSERYDVSKFGLIYAGAQKNLGPAGLTIAIIKRDLIG

SEQ ID NO: 32612 - protein, 6 aa, Artificial sequence
  Protein classification predicting sequence
NFSAGP

SEQ ID NO: 32613 - protein, 7 aa, Artificial sequence
  Protein classification predicting sequence
NNTIYGT

SEQ ID NO: 32614 - protein, 12 aa, Artificial sequence
  Protein classification predicting sequence
VLFLQGGASLQF

SEQ ID NO: 32615 - protein, 6 aa, Artificial sequence
  Protein classification predicting sequence
NTPPTF

SEQ ID NO: 32616 - protein, 7 aa, Artificial sequence
  Protein classification predicting sequence
GHRSVGG

SEQ ID NO: 32617 - protein, 6 aa, Artificial sequence
  Protein classification predicting sequence
RASIYN

SEQ ID NO: 32618 - protein, 10 aa, Artificial sequence
  Protein classification predicting sequence
GMSVMELSHR

SEQ ID NO: 32619 - protein, 7 aa, Artificial sequence
  Protein classification predicting sequence
SLYNTPP

SEQ ID NO: 32620 - protein, 8 aa, Artificial sequence
  Protein classification predicting sequence
GAQKNLGP

SEQ ID NO: 32621 - protein, 6 aa, Artificial sequence
  Protein classification predicting sequence
MEISHR

SEQ ID NO: 32622 - protein, 7 aa, Artificial sequence
  Protein classification predicting sequence
SRPIDVS

SEQ ID NO: 32623 - protein, 7 aa, Artificial sequence
  Protein classification predicting sequence
GGARAQF

SEQ ID NO: 32624 - protein, 7 aa, Artificial sequence
  Protein classification predicting sequence
HYCPNET

SEQ ID NO: 32625 - protein, 6 aa, Artificial sequence
  Protein classification predicting sequence
SMFNTP

SEQ ID NO: 32626 - protein, 6 aa, Artificial sequence
  Protein classification predicting sequence
LVFKWL

SEQ ID NO: 32627 - protein, 7 aa, Artificial sequence
  Protein classification predicting sequence
KAELLYG

SEQ ID NO: 32628 - protein, 7 aa, Artificial sequence
  Protein classification predicting sequence
GGARGQF

SEQ ID NO: 32629 - protein, 7 aa, Artificial sequence
  Protein classification predicting sequence
IDNSDFY

SEQ ID NO: 32630 - protein, 10 aa, Artificial sequence
  Protein classification predicting sequence
MEISHRSKEF

SEQ ID NO: 32631 - protein, 8 aa, Artificial sequence
  Protein classification predicting sequence
LFCQGGAR

SEQ ID NO: 32632 - protein, 6 aa, Artificial sequence
  Protein classification predicting sequence
QFAAVP

SEQ ID NO: 32633 - protein, 6 aa, Artificial sequence
  Protein classification predicting sequence
EAKKYC

SEQ ID NO: 32634 - protein, 13 aa, Artificial sequence
  Protein classification predicting sequence
HYCPNETIDGIAI

SEQ ID NO: 32635 - protein, 6 aa, Artificial sequence
  Protein classification predicting sequence
QKNIGP

SEQ ID NO: 32636 - protein, 6 aa, Artificial sequence
  Protein classification predicting sequence
GGIRAS

SEQ ID NO: 32637 - protein, 18 aa, Artificial sequence
  Protein classification predicting sequence
LDWHGSGMSVMEMSHRGK

SEQ ID NO: 32638 - protein, 7 aa, Artificial sequence
  Protein classification predicting sequence
PLNLLGD

SEQ ID NO: 32639 - protein, 8 aa, Artificial sequence
  Protein classification predicting sequence
ASSEDRNF

SEQ ID NO: 32640 - protein, 8 aa, Artificial sequence
  Protein classification predicting sequence
REDLLGKA

SEQ ID NO: 32641 - protein, 6 aa, Artificial sequence
  Protein classification predicting sequence
SMYNTP

SEQ ID NO: 32642 - protein, 10 aa, Artificial sequence
  Protein classification predicting sequence
LQFDMVPMNL

SEQ ID NO: 32643 - protein, 7 aa, Artificial sequence
  Protein classification predicting sequence
LVCDMSS

SEQ ID NO: 32644 - protein, 6 aa, Artificial sequence
  Protein classification predicting sequence
DVSRYG

SEQ ID NO: 32645 - protein, 10 aa, Artificial sequence
  Protein classification predicting sequence
NTPPTFAWYL

SEQ ID NO: 32646 - protein, 9 aa, Artificial sequence
  Protein classification predicting sequence
SNNTIYGTQ

SEQ ID NO: 32647 - protein, 8 aa, Artificial sequence
  Protein classification predicting sequence
DVSKFGLI

SEQ ID NO: 32648 - protein, 6 aa, Artificial sequence
  Protein classification predicting sequence
AGAQKN

SEQ ID NO: 32649 - protein, 7 aa, Artificial sequence
  Protein classification predicting sequence
SMFNTPP

SEQ ID NO: 32650 - protein, 7 aa, Artificial sequence
  Protein classification predicting sequence
FAIYVMG

SEQ ID NO: 32651 - protein, 6 aa, Artificial sequence
  Protein classification predicting sequence
GPAMLP

SEQ ID NO: 32652 - protein, 15 aa, Artificial sequence
  Protein classification predicting sequence
SHRGKEFIQVAEEAE

SEQ ID NO: 32653 - protein, 18 aa, Artificial sequence
  Protein classification predicting sequence
PSNYKVLFCHGGGRGQFA

SEQ ID NO: 32654 - protein, 8 aa, Artificial sequence
  Protein classification predicting sequence
QFAAVPLN

SEQ ID NO: 32655 - protein, 17 aa, Artificial sequence
  Protein classification predicting sequence
RAVKPMREWQLSDNAAY

SEQ ID NO: 32656 - protein, 20 aa, Artificial sequence
  Protein classification predicting sequence
HYCPNETIDGIAIDETPDFG

SEQ ID NO: 32657 - protein, 10 aa, Artificial sequence
  Protein classification predicting sequence
EWQLSDNAAY

SEQ ID NO: 32658 - protein, 22 aa, Artificial sequence
  Protein classification predicting sequence
SMFNTPPTFAWYLSGLVFKWLK

SEQ ID NO: 32659 - protein, 23 aa, Artificial sequence
  Protein classification predicting sequence
SMFNTPPTFAWYLSGLVFKWLKA

SEQ ID NO: 32660 - protein, 8 aa, Artificial sequence
  Protein classification predicting sequence
GLGTSVME

SEQ ID NO: 32661 - protein, 16 aa, Artificial sequence
  Protein classification predicting sequence
GLGTSVMEISHRSKEF

SEQ ID NO: 32662 - protein, 6 aa, Artificial sequence
  Protein classification predicting sequence
KPMREW

SEQ ID NO: 32663 - protein, 11 aa, Artificial sequence
  Protein classification predicting sequence
VIVREDLLGKA

SEQ ID NO: 32664 - protein, 15 aa, Artificial sequence
  Protein classification predicting sequence
SMFNTPPTFAWYLSG

SEQ ID NO: 32665 - protein, 8 aa, Artificial sequence
  Protein classification predicting sequence
LADSALDK

SEQ ID NO: 32666 - protein, 25 aa, Artificial sequence
  Protein classification predicting sequence
AAGLHALKGHRVVGGMRASIYNAMP

SEQ ID NO: 32667 - protein, 7 aa, Artificial sequence
  Protein classification predicting sequence
EGVKALT

SEQ ID NO: 32668 - protein, 6 aa, Artificial sequence
  Protein classification predicting sequence
GTSVME

SEQ ID NO: 32669 - protein, 7 aa, Artificial sequence
  Protein classification predicting sequence
EQDLRQL

SEQ ID NO: 32670 - protein, 10 aa, Artificial sequence
  Protein classification predicting sequence
GQFAAIPMNL

SEQ ID NO: 32671 - protein, 6 aa, Artificial sequence
  Protein classification predicting sequence
RSLMNV

SEQ ID NO: 32672 - protein, 8 aa, Artificial sequence
  Protein classification predicting sequence
IYAGAQKN

SEQ ID NO: 32673 - protein, 7 aa, Artificial sequence
  Protein classification predicting sequence
RASLYNA

SEQ ID NO: 32674 - protein, 6 aa, Artificial sequence
  Protein classification predicting sequence
VADMSS

SEQ ID NO: 32675 - protein, 8 aa, Artificial sequence
  Protein classification predicting sequence
SVMEISHR

SEQ ID NO: 32676 - protein, 11 aa, Artificial sequence
  Protein classification predicting sequence
NYKILFLQGGA

SEQ ID NO: 32677 - protein, 11 aa, Artificial sequence
  Protein classification predicting sequence
GPAGLTIVIVR

SEQ ID NO: 32678 - protein, 6 aa, Artificial sequence
  Protein classification predicting sequence
ARAQFA

SEQ ID NO: 32679 - protein, 6 aa, Artificial sequence
  Protein classification predicting sequence
PLVADM

SEQ ID NO: 32680 - protein, 8 aa, Artificial sequence
  Protein classification predicting sequence
IFAGAQKN

SEQ ID NO: 32681 - protein, 9 aa, Artificial sequence
  Protein classification predicting sequence
AGAQKNIGP

SEQ ID NO: 32682 - protein, 6 aa, Artificial sequence
  Protein classification predicting sequence
SLYNTP

SEQ ID NO: 32683 - protein, 7 aa, Artificial sequence
  Protein classification predicting sequence
YNFSAGP

SEQ ID NO: 32684 - protein, 6 aa, Artificial sequence
  Protein classification predicting sequence
NYKVLF

SEQ ID NO: 32685 - protein, 15 aa, Artificial sequence
  Protein classification predicting sequence
IYAGAQKNIGPAGLT

SEQ ID NO: 32686 - protein, 7 aa, Artificial sequence
  Protein classification predicting sequence
NTPPTFA

SEQ ID NO: 32687 - protein, 7 aa, Artificial sequence
  Protein classification predicting sequence
VIVREDL

SEQ ID NO: 32688 - protein, 10 aa, Artificial sequence
  Protein classification predicting sequence
EGVEALIAFM

SEQ ID NO: 32689 - protein, 6 aa, Artificial sequence
  Protein classification predicting sequence
NYKVIF

SEQ ID NO: 32690 - protein, 7 aa, Artificial sequence
  Protein classification predicting sequence
SNETIGG

SEQ ID NO: 32691 - protein, 8 aa, Artificial sequence
  Protein classification predicting sequence
VIVREDLL

SEQ ID NO: 32692 - protein, 16 aa, Artificial sequence
  Protein classification predicting sequence
ADSMINTPPTFAWYLC

SEQ ID NO: 32693 - protein, 8 aa, Artificial sequence
  Protein classification predicting sequence
SHRGKEFI

SEQ ID NO: 32694 - protein, 7 aa, Artificial sequence
  Protein classification predicting sequence
KYCTPNV

SEQ ID NO: 32695 - protein, 10 aa, Artificial sequence
  Protein classification predicting sequence
HYCPNETIDG

SEQ ID NO: 32696 - protein, 9 aa, Artificial sequence
  Protein classification predicting sequence
ADYSSSILS

SEQ ID NO: 32697 - protein, 7 aa, Artificial sequence
  Protein classification predicting sequence
NFCAGPA

SEQ ID NO: 32698 - protein, 14 aa, Artificial sequence
  Protein classification predicting sequence
VHFCPNETIDGIEI

SEQ ID NO: 32699 - protein, 8 aa, Artificial sequence
  Protein classification predicting sequence
TDKPIVAD

SEQ ID NO: 32700 - protein, 6 aa, Artificial sequence
  Protein classification predicting sequence
ALVDFM

SEQ ID NO: 32701 - protein, 9 aa, Artificial sequence
  Protein classification predicting sequence
VLFLGGGAS

SEQ ID NO: 32702 - protein, 8 aa, Artificial sequence
  Protein classification predicting sequence
VADMSSDI

SEQ ID NO: 32703 - protein, 8 aa, Artificial sequence
  Protein classification predicting sequence
GAQKNIGP

SEQ ID NO: 32704 - protein, 8 aa, Artificial sequence
  Protein classification predicting sequence
WYLSGLVF

SEQ ID NO: 32705 - protein, 8 aa, Artificial sequence
  Protein classification predicting sequence
NGSMYNTP

SEQ ID NO: 32706 - protein, 12 aa, Artificial sequence
  Protein classification predicting sequence
GLSVMEMSHRSD

SEQ ID NO: 32707 - protein, 9 aa, Artificial sequence
  Protein classification predicting sequence
WQLSDNAAY

SEQ ID NO: 32708 - protein, 8 aa, Artificial sequence
  Protein classification predicting sequence
RSRMNVPF

SEQ ID NO: 32709 - protein, 21 aa, Artificial sequence
  Protein classification predicting sequence
QLKGHKSVGGMRASIYNAMPL

SEQ ID NO: 32710 - protein, 7 aa, Artificial sequence
  Protein classification predicting sequence
NFSAGPA

SEQ ID NO: 32711 - protein, 7 aa, Artificial sequence
  Protein classification predicting sequence
VMFMQGG

SEQ ID NO: 32712 - protein, 7 aa, Artificial sequence
  Protein classification predicting sequence
SREIDVS

SEQ ID NO: 32713 - protein, 7 aa, Artificial sequence
  Protein classification predicting sequence
KINQQKA

SEQ ID NO: 32714 - protein, 9 aa, Artificial sequence
  Protein classification predicting sequence
YNAMPLEGV

SEQ ID NO: 32715 - protein, 27 aa, Artificial sequence
  Protein classification predicting sequence
LGDKTTADYVDAGYWAASAIKEAKKYC

SEQ ID NO: 32716 - protein, 25 aa, Artificial sequence
  Protein classification predicting sequence
KINQQKAELLYGVIDNSDFYRNDVA

SEQ ID NO: 32717 - protein, 7 aa, Artificial sequence
  Protein classification predicting sequence
AGPAVLP

SEQ ID NO: 32718 - protein, 7 aa, Artificial sequence
  Protein classification predicting sequence
SHRSKEF

SEQ ID NO: 32719 - protein, 10 aa, Artificial sequence
  Protein classification predicting sequence
FLQGGASLQF

SEQ ID NO: 32720 - protein, 8 aa, Artificial sequence
  Protein classification predicting sequence
ADMSSNIL

SEQ ID NO: 32721 - protein, 12 aa, Artificial sequence
  Protein classification predicting sequence
KGHRSVGGMRAS

SEQ ID NO: 32722 - protein, 18 aa, Artificial sequence
  Protein classification predicting sequence
KGHRSVGGMRASLYNAFP

SEQ ID NO: 32723 - protein, 13 aa, Artificial sequence
  Protein classification predicting sequence
YVHITTNNTIEGT

SEQ ID NO: 32724 - protein, 9 aa, Artificial sequence
  Protein classification predicting sequence
TTNNTIEGT

SEQ ID NO: 32725 - protein, 9 aa, Artificial sequence
  Protein classification predicting sequence
LIYAGAQKN

SEQ ID NO: 32726 - protein, 6 aa, Artificial sequence
  Protein classification predicting sequence
DAGYWA

SEQ ID NO: 32727 - protein, 8 aa, Artificial sequence
  Protein classification predicting sequence
AVLPASEW

SEQ ID NO: 32728 - protein, 14 aa, Artificial sequence
  Protein classification predicting sequence
YGVIYAGAQKNIGP

SEQ ID NO: 32729 - protein, 7 aa, Artificial sequence
  Protein classification predicting sequence
IVRDDLL

SEQ ID NO: 32730 - protein, 27 aa, Artificial sequence
  Protein classification predicting sequence
IPDNYKVLFCQGGARAQFAAVPLNLLG

SEQ ID NO: 32731 - protein, 10 aa, Artificial sequence
  Protein classification predicting sequence
ADYVDAGYWA

SEQ ID NO: 32732 - protein, 7 aa, Artificial sequence
  Protein classification predicting sequence
SSTILSR

SEQ ID NO: 32733 - protein, 8 aa, Artificial sequence
  Protein classification predicting sequence
GLVFKWLK

SEQ ID NO: 32734 - protein, 11 aa, Artificial sequence
  Protein classification predicting sequence
IYAGAQKNIGP

SEQ ID NO: 32735 - protein, 19 aa, Artificial sequence
  Protein classification predicting sequence
LKGHRVVGGMRASIYNAMP

SEQ ID NO: 32736 - protein, 19 aa, Artificial sequence
  Protein classification predicting sequence
NWHGLGTSVMEISHRSKEF

SEQ ID NO: 32737 - protein, 8 aa, Artificial sequence
  Protein classification predicting sequence
HYCPNETI

SEQ ID NO: 32738 - protein, 13 aa, Artificial sequence
  Protein classification predicting sequence
IYAGAQKNIGPAG

SEQ ID NO: 32739 - protein, 6 aa, Artificial sequence
  Protein classification predicting sequence
VFKWLK

SEQ ID NO: 32740 - protein, 7 aa, Artificial sequence
  Protein classification predicting sequence
WLKEQGG

SEQ ID NO: 32741 - protein, 13 aa, Artificial sequence
  Protein classification predicting sequence
QALLPLNFAAPGQ

SEQ ID NO: 32742 - protein, 12 aa, Artificial sequence
  Protein classification predicting sequence
TANETIHGVEFR

SEQ ID NO: 32743 - protein, 11 aa, Artificial sequence
  Protein classification predicting sequence
PLFADFSSSIA

SEQ ID NO: 32744 - protein, 13 aa, Artificial sequence
  Protein classification predicting sequence
NWYLLGLTVKWML

SEQ ID NO: 32745 - protein, 8 aa, Artificial sequence
  Protein classification predicting sequence
NETVHGVE

SEQ ID NO: 32746 - protein, 7 aa, Artificial sequence
  Protein classification predicting sequence
SSDILSR

SEQ ID NO: 32747 - protein, 8 aa, Artificial sequence
  Protein classification predicting sequence
RSKMNVVF

SEQ ID NO: 32748 - protein, 8 aa, Artificial sequence
  Protein classification predicting sequence
KGHRSVGG

SEQ ID NO: 32749 - protein, 12 aa, Artificial sequence
  Protein classification predicting sequence
GGMRASIYNAMP

SEQ ID NO: 32750 - protein, 7 aa, Artificial sequence
  Protein classification predicting sequence
ILSRPID

SEQ ID NO: 32751 - protein, 20 aa, Artificial sequence
  Protein classification predicting sequence
SRYGVIYAGAQKNIGPAGLT

SEQ ID NO: 32752 - protein, 7 aa, Artificial sequence
  Protein classification predicting sequence
ELTYDYG

SEQ ID NO: 32753 - protein, 14 aa, Artificial sequence
  Protein classification predicting sequence
LRHFDPEFTEEPVP

SEQ ID NO: 32754 - protein, 9 aa, Artificial sequence
  Protein classification predicting sequence
NGGELFFHL

SEQ ID NO: 32755 - protein, 14 aa, Artificial sequence
  Protein classification predicting sequence
TFCGTPEYLAPEVL

SEQ ID NO: 32756 - protein, 14 aa, Artificial sequence
  Protein classification predicting sequence
VDWWCLGAVLYEML

SEQ ID NO: 32757 - protein, 9 aa, Artificial sequence
  Protein classification predicting sequence
ERNVLLKNV

SEQ ID NO: 32758 - protein, 8 aa, Artificial sequence
  Protein classification predicting sequence
AFLGFSYA

SEQ ID NO: 32759 - protein, 10 aa, Artificial sequence
  Protein classification predicting sequence
FYAVKVLQKK

SEQ ID NO: 32760 - protein, 7 aa, Artificial sequence
  Protein classification predicting sequence
KLYFVLD

SEQ ID NO: 32761 - protein, 18 aa, Artificial sequence
  Protein classification predicting sequence
RARFYAAEIASALGYLHS

SEQ ID NO: 32762 - protein, 22 aa, Artificial sequence
  Protein classification predicting sequence
TVDWWCLGAVLYEMLYGLPPFY

SEQ ID NO: 32763 - protein, 7 aa, Artificial sequence
  Protein classification predicting sequence
PPFNPNV

SEQ ID NO: 32764 - protein, 6 aa, Artificial sequence
  Protein classification predicting sequence
NHKNII

SEQ ID NO: 32765 - protein, 7 aa, Artificial sequence
  Protein classification predicting sequence
GERLPQP

SEQ ID NO: 32766 - protein, 6 aa, Artificial sequence
  Protein classification predicting sequence
CWKERP

SEQ ID NO: 32767 - protein, 8 aa, Artificial sequence
  Protein classification predicting sequence
TGEFTGMP

SEQ ID NO: 32768 - protein, 7 aa, Artificial sequence
  Protein classification predicting sequence
IIHRDIK

SEQ ID NO: 32769 - protein, 11 aa, Artificial sequence
  Protein classification predicting sequence
IDSHDFVLRMN

SEQ ID NO: 32770 - protein, 8 aa, Artificial sequence
  Protein classification predicting sequence
HGRYPSTG

SEQ ID NO: 32771 - protein, 9 aa, Artificial sequence
  Protein classification predicting sequence
YGFGADSKG

SEQ ID NO: 32772 - protein, 8 aa, Artificial sequence
  Protein classification predicting sequence
WHHYWENN

SEQ ID NO: 32773 - protein, 13 aa, Artificial sequence
  Protein classification predicting sequence
CRRCAVVGNSGNL

SEQ ID NO: 32774 - protein, 9 aa, Artificial sequence
  Protein classification predicting sequence
VYPESFREL

SEQ ID NO: 32775 - protein, 11 aa, Artificial sequence
  Protein classification predicting sequence
HDAVLRFNGAP

SEQ ID NO: 32776 - protein, 13 aa, Artificial sequence
  Protein classification predicting sequence
IQPNPPSSGMLGI

SEQ ID NO: 32777 - protein, 7 aa, Artificial sequence
  Protein classification predicting sequence
IMMTLCD

SEQ ID NO: 32778 - protein, 8 aa, Artificial sequence
  Protein classification predicting sequence
YEFLPSKR

SEQ ID NO: 32779 - protein, 6 aa, Artificial sequence
  Protein classification predicting sequence
IMYECL

SEQ ID NO: 32780 - protein, 12 aa, Artificial sequence
  Protein classification predicting sequence
TMVGTPYWMAPE

SEQ ID NO: 32781 - protein, 9 aa, Artificial sequence
  Protein classification predicting sequence
GTPYWMAPE

SEQ ID NO: 32782 - protein, 6 aa, Artificial sequence
  Protein classification predicting sequence
FEFLSM

SEQ ID NO: 32783 - protein, 13 aa, Artificial sequence
  Protein classification predicting sequence
RKLGWGHFSTVWL

SEQ ID NO: 32784 - protein, 10 aa, Artificial sequence
  Protein classification predicting sequence
IIHTDIKPEN

SEQ ID NO: 32785 - protein, 10 aa, Artificial sequence
  Protein classification predicting sequence
KIADLGNACW

SEQ ID NO: 32786 - protein, 9 aa, Artificial sequence
  Protein classification predicting sequence
LRELKLLRH

SEQ ID NO: 32787 - protein, 16 aa, Artificial sequence
  Protein classification predicting sequence
TEYVATRWYRAPEIML

SEQ ID NO: 32788 - protein, 7 aa, Artificial sequence
  Protein classification predicting sequence
IHQLGFI

SEQ ID NO: 32789 - protein, 7 aa, Artificial sequence
  Protein classification predicting sequence
HENILQF

SEQ ID NO: 32790 - protein, 7 aa, Artificial sequence
  Protein classification predicting sequence
LITDYHE

SEQ ID NO: 32791 - protein, 9 aa, Artificial sequence
  Protein classification predicting sequence
CCIADLGLA

SEQ ID NO: 32792 - protein, 7 aa, Artificial sequence
  Protein classification predicting sequence
YFLYQIL

SEQ ID NO: 32793 - protein, 9 aa, Artificial sequence
  Protein classification predicting sequence
EIIKVLGTP

SEQ ID NO: 32794 - protein, 10 aa, Artificial sequence
  Protein classification predicting sequence
NLEKIYREVQ

SEQ ID NO: 32795 - protein, 13 aa, Artificial sequence
  Protein classification predicting sequence
NLEKIYREVQIMK

SEQ ID NO: 32796 - protein, 16 aa, Artificial sequence
  Protein classification predicting sequence
HHIVHRDLKTENLLLD

SEQ ID NO: 32797 - protein, 13 aa, Artificial sequence
  Protein classification predicting sequence
LRQRVLEGRFRIP

SEQ ID NO: 32798 - protein, 21 aa, Artificial sequence
  Protein classification predicting sequence
LRQRVLEGRFRIPYFMSEDCE

SEQ ID NO: 32799 - protein, 11 aa, Artificial sequence
  Protein classification predicting sequence
KGFLGLNKIKG

SEQ ID NO: 32800 - protein, 12 aa, Artificial sequence
  Protein classification predicting sequence
TLGKGNFAVVKL

SEQ ID NO: 32801 - protein, 9 aa, Artificial sequence
  Protein classification predicting sequence
KFWQILSAV

SEQ ID NO: 32802 - protein, 10 aa, Artificial sequence
  Protein classification predicting sequence
GVVLYVLVCG

SEQ ID NO: 32803 - protein, 9 aa, Artificial sequence
  Protein classification predicting sequence
SYNHFAAIY

SEQ ID NO: 32804 - protein, 13 aa, Artificial sequence
  Protein classification predicting sequence
EGRRASDTSLTQG

SEQ ID NO: 32805 - protein, 11 aa, Artificial sequence
  Protein classification predicting sequence
LVAFIIGSLWD

SEQ ID NO: 32806 - protein, 21 aa, Artificial sequence
  Protein classification predicting sequence
ERLTQESLTLHRPGGRTAHLH

SEQ ID NO: 32807 - protein, 14 aa, Artificial sequence
  Protein classification predicting sequence
QRRHTLPASEFRCL

SEQ ID NO: 32808 - protein, 22 aa, Artificial sequence
  Protein classification predicting sequence
LDEIRHFLTLCPELSLGWFEEG

SEQ ID NO: 32809 - protein, 11 aa, Artificial sequence
  Protein classification predicting sequence
FEIEREAFISV

SEQ ID NO: 32810 - protein, 8 aa, Artificial sequence
  Protein classification predicting sequence
QESLTLHR

SEQ ID NO: 32811 - protein, 18 aa, Artificial sequence
  Protein classification predicting sequence
LLWRYLHHLGSQPAVRRA

SEQ ID NO: 32812 - protein, 10 aa, Artificial sequence
  Protein classification predicting sequence
GPCAITVGSL

SEQ ID NO: 32813 - protein, 14 aa, Artificial sequence
  Protein classification predicting sequence
HFLTLCPELSLGWF

SEQ ID NO: 32814 - protein, 8 aa, Artificial sequence
  Protein classification predicting sequence
ERLTQESL

SEQ ID NO: 32815 - protein, 17 aa, Artificial sequence
  Protein classification predicting sequence
PTYVVLAYTLPPASRFI

SEQ ID NO: 32816 - protein, 17 aa, Artificial sequence
  Protein classification predicting sequence
VMKAHSFVRENVPRVLN

SEQ ID NO: 32817 - protein, 14 aa, Artificial sequence
  Protein classification predicting sequence
SAVVHEYALAVCLS

SEQ ID NO: 32818 - protein, 32 aa, Artificial sequence
  Protein classification predicting sequence
LCFYSQEWYARQHCPLKNPTFLDYVRPRSWTC

SEQ ID NO: 32819 - protein, 18 aa, Artificial sequence
  Protein classification predicting sequence
NHRAKDLRAPPEQGKIFI

SEQ ID NO: 32820 - protein, 14 aa, Artificial sequence
  Protein classification predicting sequence
VVDYIDEGRLVLEF

SEQ ID NO: 32821 - protein, 9 aa, Artificial sequence
  Protein classification predicting sequence
YAFGKFPTV

SEQ ID NO: 32822 - protein, 10 aa, Artificial sequence
  Protein classification predicting sequence
GYSKSSHPLI

SEQ ID NO: 32823 - protein, 10 aa, Artificial sequence
  Protein classification predicting sequence
MKAHSFVREN

SEQ ID NO: 32824 - protein, 19 aa, Artificial sequence
  Protein classification predicting sequence
PTVNQYLYFLFAPTLIYRD

SEQ ID NO: 32825 - protein, 9 aa, Artificial sequence
  Protein classification predicting sequence
VRENVPRVL

SEQ ID NO: 32826 - protein, 15 aa, Artificial sequence
  Protein classification predicting sequence
CPLKNPTFLDYVRPR

SEQ ID NO: 32827 - protein, 6 aa, Artificial sequence
  Protein classification predicting sequence
YLYFLF

SEQ ID NO: 32828 - protein, 24 aa, Artificial sequence
  Protein classification predicting sequence
FFAFLHCWLNAFAEMLRFGDRMFY

SEQ ID NO: 32829 - protein, 7 aa, Artificial sequence
  Protein classification predicting sequence
DWWNSTS

SEQ ID NO: 32830 - protein, 16 aa, Artificial sequence
  Protein classification predicting sequence
SNYYRTWNVVVHDWLY

SEQ ID NO: 32831 - protein, 39 aa, Artificial sequence
  Protein classification predicting sequence
AAFIAQLDPTMEELTEIKTVVSEAVTNAIIHGYEGNAEG

SEQ ID NO: 32832 - protein, 8 aa, Artificial sequence
  Protein classification predicting sequence
GTTIHLTK

SEQ ID NO: 32833 - protein, 8 aa, Artificial sequence
  Protein classification predicting sequence
IRDEGIGI

SEQ ID NO: 32834 - protein, 6 aa, Artificial sequence
  Protein classification predicting sequence
AQLDPT

SEQ ID NO: 32835 - protein, 12 aa, Artificial sequence
  Protein classification predicting sequence
KPELERSGMGFT

SEQ ID NO: 32836 - protein, 6 aa, Artificial sequence
  Protein classification predicting sequence
NESFAR

SEQ ID NO: 32837 - protein, 7 aa, Artificial sequence
  Protein classification predicting sequence
VSEAVTN

SEQ ID NO: 32838 - protein, 15 aa, Artificial sequence
  Protein classification predicting sequence
ELTEIKTVVSEAVTN

SEQ ID NO: 32839 - protein, 15 aa, Artificial sequence
  Protein classification predicting sequence
YDAVIVDSSDPIGPA

SEQ ID NO: 32840 - protein, 8 aa, Artificial sequence
  Protein classification predicting sequence
ELFEKPFF

SEQ ID NO: 32841 - protein, 7 aa, Artificial sequence
  Protein classification predicting sequence
VPTYPSG

SEQ ID NO: 32842 - protein, 8 aa, Artificial sequence
  Protein classification predicting sequence
FCLPSFAK

SEQ ID NO: 32843 - protein, 7 aa, Artificial sequence
  Protein classification predicting sequence
GYEDPRV

SEQ ID NO: 32844 - protein, 11 aa, Artificial sequence
  Protein classification predicting sequence
IGFMLCSTEGP

SEQ ID NO: 32845 - protein, 18 aa, Artificial sequence
  Protein classification predicting sequence
PKKVLVIGGGDGGVLREV

SEQ ID NO: 32846 - protein, 13 aa, Artificial sequence
  Protein classification predicting sequence
ASFCLPSFAKRVI

SEQ ID NO: 32847 - protein, 6 aa, Artificial sequence
  Protein classification predicting sequence
VMVFQS

SEQ ID NO: 32848 - protein, 6 aa, Artificial sequence
  Protein classification predicting sequence
RHSSVE

SEQ ID NO: 32849 - protein, 14 aa, Artificial sequence
  Protein classification predicting sequence
EIHSAAFCLPSFAK

SEQ ID NO: 32850 - protein, 10 aa, Artificial sequence
  Protein classification predicting sequence
IIEDIVSNCR

SEQ ID NO: 32851 - protein, 9 aa, Artificial sequence
  Protein classification predicting sequence
WPGEAHSLK

SEQ ID NO: 32852 - protein, 7 aa, Artificial sequence
  Protein classification predicting sequence
VSKQFFP

SEQ ID NO: 32853 - protein, 6 aa, Artificial sequence
  Protein classification predicting sequence
KFYNSE

SEQ ID NO: 32854 - protein, 7 aa, Artificial sequence
  Protein classification predicting sequence
VGGGDGG

SEQ ID NO: 32855 - protein, 9 aa, Artificial sequence
  Protein classification predicting sequence
GRVMALDGV

SEQ ID NO: 32856 - protein, 8 aa, Artificial sequence
  Protein classification predicting sequence
TDPIGPGE

SEQ ID NO: 32857 - protein, 7 aa, Artificial sequence
  Protein classification predicting sequence
AFALPQY

SEQ ID NO: 32858 - protein, 7 aa, Artificial sequence
  Protein classification predicting sequence
DEFIYHE

SEQ ID NO: 32859 - protein, 9 aa, Artificial sequence
  Protein classification predicting sequence
ETEEFGNML

SEQ ID NO: 32860 - protein, 16 aa, Artificial sequence
  Protein classification predicting sequence
YDVIMVDSTEPVGPAV

SEQ ID NO: 32861 - protein, 14 aa, Artificial sequence
  Protein classification predicting sequence
VQTTERDEFIYHEM

SEQ ID NO: 32862 - protein, 8 aa, Artificial sequence
  Protein classification predicting sequence
DEFIYHEM

SEQ ID NO: 32863 - protein, 14 aa, Artificial sequence
  Protein classification predicting sequence
DEFIYHEMLTHVPI

SEQ ID NO: 32864 - protein, 8 aa, Artificial sequence
  Protein classification predicting sequence
DGVVQTTE

SEQ ID NO: 32865 - protein, 6 aa, Artificial sequence
  Protein classification predicting sequence
DEFIYH

SEQ ID NO: 32866 - protein, 6 aa, Artificial sequence
  Protein classification predicting sequence
PTYPSG

SEQ ID NO: 32867 - protein, 9 aa, Artificial sequence
  Protein classification predicting sequence
EDGIFVAQT

SEQ ID NO: 32868 - protein, 7 aa, Artificial sequence
  Protein classification predicting sequence
IGFMLCS

SEQ ID NO: 32869 - protein, 10 aa, Artificial sequence
  Protein classification predicting sequence
HQDLIIFENA

SEQ ID NO: 32870 - protein, 9 aa, Artificial sequence
  Protein classification predicting sequence
IDDGVNFVN

SEQ ID NO: 32871 - protein, 15 aa, Artificial sequence
  Protein classification predicting sequence
GGIFVAQNGVCFLQQ

SEQ ID NO: 32872 - protein, 7 aa, Artificial sequence
  Protein classification predicting sequence
CRYYNPA

SEQ ID NO: 32873 - protein, 9 aa, Artificial sequence
  Protein classification predicting sequence
FYQAAIPTY

SEQ ID NO: 32874 - protein, 13 aa, Artificial sequence
  Protein classification predicting sequence
LVIDDGVNFVNQT

SEQ ID NO: 32875 - protein, 8 aa, Artificial sequence
  Protein classification predicting sequence
GLKCRYYN

SEQ ID NO: 32876 - protein, 31 aa, Artificial sequence
  Protein classification predicting sequence
ITMVEIDAGVVSFCRQYLPNHNAGSYDDPRF

SEQ ID NO: 32877 - protein, 50 aa, Artificial sequence
  Protein classification predicting sequence
QTFDVIISDCTDPIGPGESLFTSAFYEGCKRCLNPGGIFVAQNGVCFLQQ

SEQ ID NO: 32878 - protein, 43 aa, Artificial sequence
  Protein classification predicting sequence
DSHRKLSHYFSDVGFYQAAIPTYYGGIMTFAWATDNDALRHLS

SEQ ID NO: 32879 - protein, 33 aa, Artificial sequence
  Protein classification predicting sequence
GRVMALDGVVQTTERDEFIYHEMMTHVPLLAHG

SEQ ID NO: 32880 - protein, 15 aa, Artificial sequence
  Protein classification predicting sequence
VLIIGGGDGAMLREV

SEQ ID NO: 32881 - protein, 9 aa, Artificial sequence
  Protein classification predicting sequence
FCRQYLPNH

SEQ ID NO: 32882 - protein, 9 aa, Artificial sequence
  Protein classification predicting sequence
KLSHYFSDV

SEQ ID NO: 32883 - protein, 11 aa, Artificial sequence
  Protein classification predicting sequence
LGSDDEEQEDP

SEQ ID NO: 32884 - protein, 18 aa, Artificial sequence
  Protein classification predicting sequence
RYHVIRKLGWGHFSTVWL

SEQ ID NO: 32885 - protein, 9 aa, Artificial sequence
  Protein classification predicting sequence
VKSAEHYTE

SEQ ID NO: 32886 - protein, 9 aa, Artificial sequence
  Protein classification predicting sequence
SGSAVSTAP

SEQ ID NO: 32887 - protein, 8 aa, Artificial sequence
  Protein classification predicting sequence
DIQTRQYR

SEQ ID NO: 32888 - protein, 24 aa, Artificial sequence
  Protein classification predicting sequence
PADIWSTACMAFELATGDYLFEPH

SEQ ID NO: 32889 - protein, 7 aa, Artificial sequence
  Protein classification predicting sequence
YSRDEDH

SEQ ID NO: 32890 - protein, 7 aa, Artificial sequence
  Protein classification predicting sequence
LSVRDFD

SEQ ID NO: 32891 - protein, 6 aa, Artificial sequence
  Protein classification predicting sequence
LKYIHS

SEQ ID NO: 32892 - protein, 9 aa, Artificial sequence
  Protein classification predicting sequence
VIPLRHGGL

SEQ ID NO: 32893 - protein, 8 aa, Artificial sequence
  Protein classification predicting sequence
CDNMLMLL

SEQ ID NO: 32894 - protein, 11 aa, Artificial sequence
  Protein classification predicting sequence
GDVLVLTKPLG

SEQ ID NO: 32895 - protein, 11 aa, Artificial sequence
  Protein classification predicting sequence
ETSGGLLICLP

SEQ ID NO: 32896 - protein, 7 aa, Artificial sequence
  Protein classification predicting sequence
ASQTPNK

SEQ ID NO: 32897 - protein, 9 aa, Artificial sequence
  Protein classification predicting sequence
DSIQAEEWY

SEQ ID NO: 32898 - protein, 7 aa, Artificial sequence
  Protein classification predicting sequence
GKITRRE

SEQ ID NO: 32899 - protein, 25 aa, Artificial sequence
  Protein classification predicting sequence
ENPRGTFLVRESETTKGAYCLSVSD

SEQ ID NO: 32900 - protein, 25 aa, Artificial sequence
  Protein classification predicting sequence
GLNVKHYKIRKLDSGGFYITSRTQF

SEQ ID NO: 32901 - protein, 7 aa, Artificial sequence
  Protein classification predicting sequence
LTTVCPT

SEQ ID NO: 32902 - protein, 7 aa, Artificial sequence
  Protein classification predicting sequence
DAWEIPR

SEQ ID NO: 32903 - protein, 24 aa, Artificial sequence
  Protein classification predicting sequence
LAGGVTTFVALYDYESRTETDLSF

SEQ ID NO: 32904 - protein, 21 aa, Artificial sequence
  Protein classification predicting sequence
SLQQLVAYYSKHADGLCHRLT

SEQ ID NO: 32905 - protein, 10 aa, Artificial sequence
  Protein classification predicting sequence
KLIQLYAVCT

SEQ ID NO: 32906 - protein, 7 aa, Artificial sequence
  Protein classification predicting sequence
DMAAQIA

SEQ ID NO: 32907 - protein, 9 aa, Artificial sequence
  Protein classification predicting sequence
GRGNFGEVF

SEQ ID NO: 32908 - protein, 7 aa, Artificial sequence
  Protein classification predicting sequence
FLEDYFT

SEQ ID NO: 32909 - protein, 7 aa, Artificial sequence
  Protein classification predicting sequence
FPASQTP

SEQ ID NO: 32910 - protein, 9 aa, Artificial sequence
  Protein classification predicting sequence
EPKLFGGFN

SEQ ID NO: 32911 - protein, 11 aa, Artificial sequence
  Protein classification predicting sequence
SDTVTSPQRAG

SEQ ID NO: 32912 - protein, 7 aa, Artificial sequence
  Protein classification predicting sequence
LPQLVDM

SEQ ID NO: 32913 - protein, 10 aa, Artificial sequence
  Protein classification predicting sequence
ENPRGTFLVR

SEQ ID NO: 32914 - protein, 6 aa, Artificial sequence
  Protein classification predicting sequence
VKHYKI

SEQ ID NO: 32915 - protein, 12 aa, Artificial sequence
  Protein classification predicting sequence
SGGFYITSRTQF

SEQ ID NO: 32916 - protein, 19 aa, Artificial sequence
  Protein classification predicting sequence
SLEPPDSTHHGGFPASQTP

SEQ ID NO: 32917 - protein, 20 aa, Artificial sequence
  Protein classification predicting sequence
SLQQLVAYYSKHADGLCHRL

SEQ ID NO: 32918 - protein, 18 aa, Artificial sequence
  Protein classification predicting sequence
FNTSDTVTSPQRAGALAG

SEQ ID NO: 32919 - protein, 13 aa, Artificial sequence
  Protein classification predicting sequence
FGEVWMGTWNGTT

SEQ ID NO: 32920 - protein, 9 aa, Artificial sequence
  Protein classification predicting sequence
VSEEPIYIV

SEQ ID NO: 32921 - protein, 26 aa, Artificial sequence
  Protein classification predicting sequence
EYMSKGSLLDFLKGEMGKYLRLPQLV

SEQ ID NO: 32922 - protein, 17 aa, Artificial sequence
  Protein classification predicting sequence
ADFGLARLIEDNEYTAR

SEQ ID NO: 32923 - protein, 7 aa, Artificial sequence
  Protein classification predicting sequence
KWTAPEA

SEQ ID NO: 32924 - protein, 10 aa, Artificial sequence
  Protein classification predicting sequence
VERGYRMPCP

SEQ ID NO: 32925 - protein, 12 aa, Artificial sequence
  Protein classification predicting sequence
DPEERPTFEYLQ

SEQ ID NO: 32926 - protein, 13 aa, Artificial sequence
  Protein classification predicting sequence
DPEERPTFEYLQA

SEQ ID NO: 32927 - protein, 6 aa, Artificial sequence
  Protein classification predicting sequence
WWLAHS

SEQ ID NO: 32928 - protein, 21 aa, Artificial sequence
  Protein classification predicting sequence
VERGYRMPCPPECPESLHDLM

SEQ ID NO: 32929 - protein, 7 aa, Artificial sequence
  Protein classification predicting sequence
FPATDAP

SEQ ID NO: 32930 - protein, 7 aa, Artificial sequence
  Protein classification predicting sequence
DLSFKKG

SEQ ID NO: 32931 - protein, 7 aa, Artificial sequence
  Protein classification predicting sequence
IRDSETT

SEQ ID NO: 32932 - protein, 7 aa, Artificial sequence
  Protein classification predicting sequence
PYPGMTN

SEQ ID NO: 32933 - protein, 6 aa, Artificial sequence
  Protein classification predicting sequence
YRMPCP

SEQ ID NO: 32934 - protein, 5 aa, Artificial sequence
  Protein classification predicting sequence
MLDCW

SEQ ID NO: 32935 - protein, 7 aa, Artificial sequence
  Protein classification predicting sequence
PEERPTF

SEQ ID NO: 32936 - protein, 8 aa, Artificial sequence
  Protein classification predicting sequence
SVKCRIGA

SEQ ID NO: 32937 - protein, 7 aa, Artificial sequence
  Protein classification predicting sequence
EPEASPV

SEQ ID NO: 32938 - protein, 6 aa, Artificial sequence
  Protein classification predicting sequence
AMKVVK

SEQ ID NO: 32939 - protein, 7 aa, Artificial sequence
  Protein classification predicting sequence
RDEDHIA

SEQ ID NO: 32940 - protein, 9 aa, Artificial sequence
  Protein classification predicting sequence
EEEILGSDD

SEQ ID NO: 32941 - protein, 8 aa, Artificial sequence
  Protein classification predicting sequence
AAEATEWQ

SEQ ID NO: 32942 - protein, 15 aa, Artificial sequence
  Protein classification predicting sequence
GAPPPSGSAVSTAPQ

SEQ ID NO: 32943 - protein, 8 aa, Artificial sequence
  Protein classification predicting sequence
HITKLKPW

SEQ ID NO: 32944 - protein, 24 aa, Artificial sequence
  Protein classification predicting sequence
CMVFEVLGHHLLKWIIKSNYQGLP

SEQ ID NO: 32945 - protein, 22 aa, Artificial sequence
  Protein classification predicting sequence
SKNKKKKLKKKQKRQAELLEKR

SEQ ID NO: 32946 - protein, 15 aa, Artificial sequence
  Protein classification predicting sequence
VLTVSPYYAEELISG

SEQ ID NO: 32947 - protein, 14 aa, Artificial sequence
  Protein classification predicting sequence
KEALQAEVGLPVDR

SEQ ID NO: 32948 - protein, 8 aa, Artificial sequence
  Protein classification predicting sequence
SFDFIDGY

SEQ ID NO: 32949 - protein, 19 aa, Artificial sequence
  Protein classification predicting sequence
VRFFHCYKRGVDRVFIDHP

SEQ ID NO: 32950 - protein, 24 aa, Artificial sequence
  Protein classification predicting sequence
VFVGAEMAPWSKTGGLGDVLGGLP

SEQ ID NO: 32951 - protein, 14 aa, Artificial sequence
  Protein classification predicting sequence
GEDVVFVCNDWHTG

SEQ ID NO: 32952 - protein, 29 aa, Artificial sequence
  Protein classification predicting sequence
ARGCELDNIMRLTGITGIVNGMDVSEWDP

SEQ ID NO: 32953 - protein, 6 aa, Artificial sequence
  Protein classification predicting sequence
DWHAGL

SEQ ID NO: 32954 - protein, 8 aa, Artificial sequence
  Protein classification predicting sequence
RSVLVIHN

SEQ ID NO: 32955 - protein, 8 aa, Artificial sequence
  Protein classification predicting sequence
AHQGVEPA

SEQ ID NO: 32956 - protein, 7 aa, Artificial sequence
  Protein classification predicting sequence
YGTIPIV

SEQ ID NO: 32957 - protein, 8 aa, Artificial sequence
  Protein classification predicting sequence
LQKELGLP

SEQ ID NO: 32958 - protein, 17 aa, Artificial sequence
  Protein classification predicting sequence
ANDWHTALLPVYLKAYY

SEQ ID NO: 32959 - protein, 16 aa, Artificial sequence
  Protein classification predicting sequence
MPSRFEPCGLNQLYAM

SEQ ID NO: 32960 - protein, 11 aa, Artificial sequence
  Protein classification predicting sequence
ELGRGKFAVVR

SEQ ID NO: 32961 - protein, 9 aa, Artificial sequence
  Protein classification predicting sequence
HEIAVLELA

SEQ ID NO: 32962 - protein, 7 aa, Artificial sequence
  Protein classification predicting sequence
VHLDLKP

SEQ ID NO: 32963 - protein, 11 aa, Artificial sequence
  Protein classification predicting sequence
ELREIMGTPEY

SEQ ID NO: 32964 - protein, 9 aa, Artificial sequence
  Protein classification predicting sequence
VINLHEVYE

SEQ ID NO: 32965 - protein, 7 aa, Artificial sequence
  Protein classification predicting sequence
IPEDGSL

SEQ ID NO: 32966 - protein, 15 aa, Artificial sequence
  Protein classification predicting sequence
ARNAKDVAVSYYHFY

SEQ ID NO: 32967 - protein, 11 aa, Artificial sequence
  Protein classification predicting sequence
THPVLYLFYED

SEQ ID NO: 32968 - protein, 8 aa, Artificial sequence
  Protein classification predicting sequence
TFTVAQNE

SEQ ID NO: 32969 - protein, 9 aa, Artificial sequence
  Protein classification predicting sequence
LKDTPAPRL

SEQ ID NO: 32970 - protein, 20 aa, Artificial sequence
  Protein classification predicting sequence
GDWKTTFTVAQNERFDADYA

SEQ ID NO: 32971 - protein, 13 aa, Artificial sequence
  Protein classification predicting sequence
GDWKTTFTVAQNE

SEQ ID NO: 32972 - protein, 8 aa, Artificial sequence
  Protein classification predicting sequence
PLIKYFAE

SEQ ID NO: 32973 - protein, 10 aa, Artificial sequence
  Protein classification predicting sequence
LISTYPKSGT

SEQ ID NO: 32974 - protein, 7 aa, Artificial sequence
  Protein classification predicting sequence
DMIYQGG

SEQ ID NO: 32975 - protein, 5 aa, Artificial sequence
  Protein classification predicting sequence
EWWEL

SEQ ID NO: 32976 - protein, 16 aa, Artificial sequence
  Protein classification predicting sequence
PDDLLISTYPKSGTTW

SEQ ID NO: 32977 - protein, 13 aa, Artificial sequence
  Protein classification predicting sequence
TPAPRLLKTHLPL

SEQ ID NO: 32978 - protein, 12 aa, Artificial sequence
  Protein classification predicting sequence
TFTVAQNERFDA

SEQ ID NO: 32979 - protein, 26 aa, Artificial sequence
  Protein classification predicting sequence
TYPKSGTTWVSQILDMIYQGGDLEKC

SEQ ID NO: 32980 - protein, 24 aa, Artificial sequence
  Protein classification predicting sequence
HLPLALLPQTLLDQKVKVVYVARN

SEQ ID NO: 32981 - protein, 6 aa, Artificial sequence
  Protein classification predicting sequence
FVEKFM

SEQ ID NO: 32982 - protein, 9 aa, Artificial sequence
  Protein classification predicting sequence
LLPASFWEK

SEQ ID NO: 32983 - protein, 14 aa, Artificial sequence
  Protein classification predicting sequence
MIYKEGDVEKCKED

SEQ ID NO: 32984 - protein, 10 aa, Artificial sequence
  Protein classification predicting sequence
SPRIVKTHLP

SEQ ID NO: 32985 - protein, 13 aa, Artificial sequence
  Protein classification predicting sequence
KLLPASFWEKNCK

SEQ ID NO: 32986 - protein, 16 aa, Artificial sequence
  Protein classification predicting sequence
SYPNPKSFSEFVEKFM

SEQ ID NO: 32987 - protein, 35 aa, Artificial sequence
  Protein classification predicting sequence
WWEKSKNSRVLFMFYEDMKEDIRREVVKLIEFLER

SEQ ID NO: 32988 - protein, 22 aa, Artificial sequence
  Protein classification predicting sequence
PSAELVDRIIQHTSFQEMKNNP

SEQ ID NO: 32989 - protein, 11 aa, Artificial sequence
  Protein classification predicting sequence
HTSFQEMKNNP

SEQ ID NO: 32990 - protein, 11 aa, Artificial sequence
  Protein classification predicting sequence
WLSMREWDNFL

SEQ ID NO: 32991 - protein, 6 aa, Artificial sequence
  Protein classification predicting sequence
YAMKIL

SEQ ID NO: 32992 - protein, 12 aa, Artificial sequence
  Protein classification predicting sequence
LYLIMEFLPGGD

SEQ ID NO: 32993 - protein, 9 aa, Artificial sequence
  Protein classification predicting sequence
GTPDYIAPE

SEQ ID NO: 32994 - protein, 8 aa, Artificial sequence
  Protein classification predicting sequence
VAIKQMNL

SEQ ID NO: 32995 - protein, 16 aa, Artificial sequence
  Protein classification predicting sequence
KQPKKELIINEILVMK

SEQ ID NO: 32996 - protein, 11 aa, Artificial sequence
  Protein classification predicting sequence
ALYLIATNGTP

SEQ ID NO: 32997 - protein, 7 aa, Artificial sequence
  Protein classification predicting sequence
DSKETVN

SEQ ID NO: 32998 - protein, 16 aa, Artificial sequence
  Protein classification predicting sequence
EIVCLIQTKGDPKWIQ

SEQ ID NO: 32999 - protein, 7 aa, Artificial sequence
  Protein classification predicting sequence
FNGRYHV

SEQ ID NO: 33000 - protein, 6 aa, Artificial sequence
  Protein classification predicting sequence
HYTETA

SEQ ID NO: 33001 - protein, 13 aa, Artificial sequence
  Protein classification predicting sequence
YIRRLAAEATEWQ

SEQ ID NO: 33002 - protein, 25 aa, Artificial sequence
  Protein classification predicting sequence
KIADLGNACWVHKHFTEDIQTRQYR

SEQ ID NO: 33003 - protein, 7 aa, Artificial sequence
  Protein classification predicting sequence
DYCKGGY

SEQ ID NO: 33004 - protein, 7 aa, Artificial sequence
  Protein classification predicting sequence
IATILRE

SEQ ID NO: 33005 - protein, 8 aa, Artificial sequence
  Protein classification predicting sequence
GITAIELA

SEQ ID NO: 33006 - protein, 6 aa, Artificial sequence
  Protein classification predicting sequence
KADIWS

SEQ ID NO: 33007 - protein, 14 aa, Artificial sequence
  Protein classification predicting sequence
FRPTAKELLKHKFI

SEQ ID NO: 33008 - protein, 18 aa, Artificial sequence
  Protein classification predicting sequence
YELQEVIGSGATAVVQAA

SEQ ID NO: 33009 - protein, 9 aa, Artificial sequence
  Protein classification predicting sequence
KKYGKSFRK

SEQ ID NO: 33010 - protein, 8 aa, Artificial sequence
  Protein classification predicting sequence
SLCLQKDP

SEQ ID NO: 33011 - protein, 8 aa, Artificial sequence
  Protein classification predicting sequence
KFFQKAKN

SEQ ID NO: 33012 - protein, 8 aa, Artificial sequence
  Protein classification predicting sequence
LVLRLRNS

SEQ ID NO: 33013 - protein, 17 aa, Artificial sequence
  Protein classification predicting sequence
KELNDIRFEFTPGRDTA

SEQ ID NO: 33014 - protein, 11 aa, Artificial sequence
  Protein classification predicting sequence
VIVAANLQKIV

SEQ ID NO: 33015 - protein, 9 aa, Artificial sequence
  Protein classification predicting sequence
KLIGFAQLS

SEQ ID NO: 33016 - protein, 22 aa, Artificial sequence
  Protein classification predicting sequence
YYTSFVVKDELWLVMKLLSGGS

SEQ ID NO: 33017 - protein, 29 aa, Artificial sequence
  Protein classification predicting sequence
KAGNILLGEDGSVQIADFGVSAFLATGGD

SEQ ID NO: 33018 - protein, 32 aa, Artificial sequence
  Protein classification predicting sequence
TRNKVRKTFVGTPCWMAPEVMEQVRGYDFKAD

SEQ ID NO: 33019 - protein, 35 aa, Artificial sequence
  Protein classification predicting sequence
WSFGITAIELATGAAPYHKYPPMKVLMLTLQNDPP

SEQ ID NO: 33020 - protein, 12 aa, Artificial sequence
  Protein classification predicting sequence
SKFILALKVLFK

SEQ ID NO: 33021 - protein, 7 aa, Artificial sequence
  Protein classification predicting sequence
ALKVLFK

SEQ ID NO: 33022 - protein, 7 aa, Artificial sequence
  Protein classification predicting sequence
HSKKVIH

SEQ ID NO: 33023 - protein, 14 aa, Artificial sequence
  Protein classification predicting sequence
VIHRDIKPENLLLG

SEQ ID NO: 33024 - protein, 6 aa, Artificial sequence
  Protein classification predicting sequence
CGTLDY

SEQ ID NO: 33025 - protein, 10 aa, Artificial sequence
  Protein classification predicting sequence
FVALYDYEAR

SEQ ID NO: 33026 - protein, 14 aa, Artificial sequence
  Protein classification predicting sequence
AKDAWEIPRESLRL

SEQ ID NO: 33027 - protein, 10 aa, Artificial sequence
  Protein classification predicting sequence
LGAGQFGEVW

SEQ ID NO: 33028 - protein, 7 aa, Artificial sequence
  Protein classification predicting sequence
GQFGEVW

SEQ ID NO: 33029 - protein, 10 aa, Artificial sequence
  Protein classification predicting sequence
YIHRDLAARN

SEQ ID NO: 33030 - protein, 11 aa, Artificial sequence
  Protein classification predicting sequence
ADFGLARLIED

SEQ ID NO: 33031 - protein, 13 aa, Artificial sequence
  Protein classification predicting sequence
GAKFPIKWTAPEA

SEQ ID NO: 33032 - protein, 6 aa, Artificial sequence
  Protein classification predicting sequence
IFLQMA

SEQ ID NO: 33033 - protein, 11 aa, Artificial sequence
  Protein classification predicting sequence
GMGAFGLVCSA

SEQ ID NO: 33034 - protein, 8 aa, Artificial sequence
  Protein classification predicting sequence
GTDLHRLL

SEQ ID NO: 33035 - protein, 8 aa, Artificial sequence
  Protein classification predicting sequence
YQILRGLK

SEQ ID NO: 33036 - protein, 6 aa, Artificial sequence
  Protein classification predicting sequence
AARNIL

SEQ ID NO: 33037 - protein, 7 aa, Artificial sequence
  Protein classification predicting sequence
WSFGILL

SEQ ID NO: 33038 - protein, 8 aa, Artificial sequence
  Protein classification predicting sequence
HFTVAQAE

SEQ ID NO: 33039 - protein, 13 aa, Artificial sequence
  Protein classification predicting sequence
EIGHGSFGAVYFA

SEQ ID NO: 33040 - protein, 7 aa, Artificial sequence
  Protein classification predicting sequence
EVEIAAI

SEQ ID NO: 33041 - protein, 12 aa, Artificial sequence
  Protein classification predicting sequence
MAPEVILAMDEG

SEQ ID NO: 33042 - protein, 7 aa, Artificial sequence
  Protein classification predicting sequence
QNDPPTL

SEQ ID NO: 33043 - protein, 8 aa, Artificial sequence
  Protein classification predicting sequence
AGIPVTHR

SEQ ID NO: 33044 - protein, 8 aa, Artificial sequence
  Protein classification predicting sequence
GDPFVFGR

SEQ ID NO: 33045 - protein, 14 aa, Artificial sequence
  Protein classification predicting sequence
RVAIKKISPFEHQT

SEQ ID NO: 33046 - protein, 47 aa, Artificial sequence
  Protein classification predicting sequence
CYFLYQILRGLKYIHSANVLHRDLKPSNLLLNTTCDLKICDFGLARV

SEQ ID NO: 33047 - protein, 13 aa, Artificial sequence
  Protein classification predicting sequence
CDLKICDFGLARV

SEQ ID NO: 33048 - protein, 32 aa, Artificial sequence
  Protein classification predicting sequence
DHTGFLTEYVATRWYRAPEIMLNSKGYTKSID

SEQ ID NO: 33049 - protein, 11 aa, Artificial sequence
  Protein classification predicting sequence
FPGKHYLDQLN

SEQ ID NO: 33050 - protein, 14 aa, Artificial sequence
  Protein classification predicting sequence
ALDLLDKMLTFNPH

SEQ ID NO: 33051 - protein, 9 aa, Artificial sequence
  Protein classification predicting sequence
EAKGKGILQ

SEQ ID NO: 33052 - protein, 15 aa, Artificial sequence
  Protein classification predicting sequence
STQEAIVLPPWVALA

SEQ ID NO: 33053 - protein, 8 aa, Artificial sequence
  Protein classification predicting sequence
LRKAEEYL

SEQ ID NO: 33054 - protein, 7 aa, Artificial sequence
  Protein classification predicting sequence
RIKQQGL

SEQ ID NO: 33055 - protein, 7 aa, Artificial sequence
  Protein classification predicting sequence
SDIYWKK

SEQ ID NO: 33056 - protein, 10 aa, Artificial sequence
  Protein classification predicting sequence
YHFSCQFTAD

SEQ ID NO: 33057 - protein, 20 aa, Artificial sequence
  Protein classification predicting sequence
AMNHTDFIITSTFQEIAGSK

SEQ ID NO: 33058 - protein, 8 aa, Artificial sequence
  Protein classification predicting sequence
EIEELLYS

SEQ ID NO: 33059 - protein, 8 aa, Artificial sequence
  Protein classification predicting sequence
EHLCVLKD

SEQ ID NO: 33060 - protein, 9 aa, Artificial sequence
  Protein classification predicting sequence
VLKDKKKPI

SEQ ID NO: 33061 - protein, 15 aa, Artificial sequence
  Protein classification predicting sequence
NLVVVGGDRRKESKD

SEQ ID NO: 33062 - protein, 11 aa, Artificial sequence
  Protein classification predicting sequence
RVRNGELYRYI

SEQ ID NO: 33063 - protein, 10 aa, Artificial sequence
  Protein classification predicting sequence
DTKGAFVQPA

SEQ ID NO: 33064 - protein, 7 aa, Artificial sequence
  Protein classification predicting sequence
STQEAIV

SEQ ID NO: 33065 - protein, 7 aa, Artificial sequence
  Protein classification predicting sequence
PPWVALA

SEQ ID NO: 33066 - protein, 6 aa, Artificial sequence
  Protein classification predicting sequence
TPYSEF

SEQ ID NO: 33067 - protein, 9 aa, Artificial sequence
  Protein classification predicting sequence
LLDLLEAPD

SEQ ID NO: 33068 - protein, 18 aa, Artificial sequence
  Protein classification predicting sequence
IPMVFNVVILSPHGYFAQ

SEQ ID NO: 33069 - protein, 10 aa, Artificial sequence
  Protein classification predicting sequence
KRIKEQGLDI

SEQ ID NO: 33070 - protein, 11 aa, Artificial sequence
  Protein classification predicting sequence
KPILFTMARLD

SEQ ID NO: 33071 - protein, 8 aa, Artificial sequence
  Protein classification predicting sequence
MKKMYELI

SEQ ID NO: 33072 - protein, 9 aa, Artificial sequence
  Protein classification predicting sequence
EKYTWQIYS

SEQ ID NO: 33073 - protein, 9 aa, Artificial sequence
  Protein classification predicting sequence
VYGFWKHVS

SEQ ID NO: 33074 - protein, 14 aa, Artificial sequence
  Protein classification predicting sequence
GVQFLNRHLSSKLF

SEQ ID NO: 33075 - protein, 9 aa, Artificial sequence
  Protein classification predicting sequence
ILRVPFRTE

SEQ ID NO: 33076 - protein, 7 aa, Artificial sequence
  Protein classification predicting sequence
RKWISRF

SEQ ID NO: 33077 - protein, 23 aa, Artificial sequence
  Protein classification predicting sequence
LYRVVHGIDVFDPKFNIVSPGAD

SEQ ID NO: 33078 - protein, 9 aa, Artificial sequence
  Protein classification predicting sequence
EAMTCGLPT

SEQ ID NO: 33079 - protein, 6 aa, Artificial sequence
  Protein classification predicting sequence
RRYLEM

SEQ ID NO: 33080 - protein, 9 aa, Artificial sequence
  Protein classification predicting sequence
PDLIIGNYS

SEQ ID NO: 33081 - protein, 7 aa, Artificial sequence
  Protein classification predicting sequence
MTCGLPT

SEQ ID NO: 33082 - protein, 14 aa, Artificial sequence
  Protein classification predicting sequence
FVQPAFYEAFGLTV

SEQ ID NO: 33083 - protein, 7 aa, Artificial sequence
  Protein classification predicting sequence
RPGVWEY

SEQ ID NO: 33084 - protein, 6 aa, Artificial sequence
  Protein classification predicting sequence
FHDKES

SEQ ID NO: 33085 - protein, 8 aa, Artificial sequence
  Protein classification predicting sequence
GLEKGWGD

SEQ ID NO: 33086 - protein, 10 aa, Artificial sequence
  Protein classification predicting sequence
PGLYRVVHGI

SEQ ID NO: 33087 - protein, 7 aa, Artificial sequence
  Protein classification predicting sequence
DFEPFNA

SEQ ID NO: 33088 - protein, 30 aa, Artificial sequence
  Protein classification predicting sequence
PRPSLSKSIGNGVQFLNRHLSSKLFHDKES

SEQ ID NO: 33089 - protein, 7 aa, Artificial sequence
  Protein classification predicting sequence
YPLLNFL

SEQ ID NO: 33090 - protein, 6 aa, Artificial sequence
  Protein classification predicting sequence
LEKFLG

SEQ ID NO: 33091 - protein, 21 aa, Artificial sequence
  Protein classification predicting sequence
TQCTIAHALEKTKYPNSDIYL

SEQ ID NO: 33092 - protein, 8 aa, Artificial sequence
  Protein classification predicting sequence
ELVNLVVV

SEQ ID NO: 33093 - protein, 22 aa, Artificial sequence
  Protein classification predicting sequence
GHIRWISAQMNRVRNGELYRYI

SEQ ID NO: 33094 - protein, 15 aa, Artificial sequence
  Protein classification predicting sequence
EKYTWKLYSERLMTL

SEQ ID NO: 33095 - protein, 7 aa, Artificial sequence
  Protein classification predicting sequence
GVYGFWK

SEQ ID NO: 33096 - protein, 12 aa, Artificial sequence
  Protein classification predicting sequence
GVYGFWKYVSNL

SEQ ID NO: 33097 - protein, 8 aa, Artificial sequence
  Protein classification predicting sequence
QEAIVLPP

SEQ ID NO: 33098 - protein, 18 aa, Artificial sequence
  Protein classification predicting sequence
PDTGGQVVYILDQVRALE

SEQ ID NO: 33099 - protein, 8 aa, Artificial sequence
  Protein classification predicting sequence
ENEMLLRI

SEQ ID NO: 33100 - protein, 9 aa, Artificial sequence
  Protein classification predicting sequence
ILIVTRLLP

SEQ ID NO: 33101 - protein, 10 aa, Artificial sequence
  Protein classification predicting sequence
QFTADLIAMN

SEQ ID NO: 33102 - protein, 7 aa, Artificial sequence
  Protein classification predicting sequence
DFIITST

SEQ ID NO: 33103 - protein, 7 aa, Artificial sequence
  Protein classification predicting sequence
QEIAGSK

SEQ ID NO: 33104 - protein, 9 aa, Artificial sequence
  Protein classification predicting sequence
RNGELYRYI

SEQ ID NO: 33105 - protein, 7 aa, Artificial sequence
  Protein classification predicting sequence
GGPAEII

SEQ ID NO: 33106 - protein, 6 aa, Artificial sequence
  Protein classification predicting sequence
FWKHVS

SEQ ID NO: 33107 - protein, 23 aa, Artificial sequence
  Protein classification predicting sequence
PTLTKSIGNGVEFLNRHLSAKMF

SEQ ID NO: 33108 - protein, 9 aa, Artificial sequence
  Protein classification predicting sequence
FEHKFQEIG

SEQ ID NO: 33109 - protein, 14 aa, Artificial sequence
  Protein classification predicting sequence
FNVVILSPHGYFAQ

SEQ ID NO: 33110 - protein, 36 aa, Artificial sequence
  Protein classification predicting sequence
FNVVILSPHGYFAQENVLGYPDTGGQVVYILDQVPA

SEQ ID NO: 33111 - protein, 12 aa, Artificial sequence
  Protein classification predicting sequence
RKWISRFEVWPY

SEQ ID NO: 33112 - protein, 15 aa, Artificial sequence
  Protein classification predicting sequence
AKPDLIIGNYSEGNL

SEQ ID NO: 33113 - protein, 8 aa, Artificial sequence
  Protein classification predicting sequence
VEWYAKNP

SEQ ID NO: 33114 - protein, 6 aa, Artificial sequence
  Protein classification predicting sequence
RWISAQ

SEQ ID NO: 33115 - protein, 7 aa, Artificial sequence
  Protein classification predicting sequence
HILRVPF

SEQ ID NO: 33116 - protein, 13 aa, Artificial sequence
  Protein classification predicting sequence
DFIITSTFQEIAG

SEQ ID NO: 33117 - protein, 16 aa, Artificial sequence
  Protein classification predicting sequence
GTTCGQRLEKVLGTEH

SEQ ID NO: 33118 - protein, 8 aa, Artificial sequence
  Protein classification predicting sequence
YHFSCQFT

SEQ ID NO: 33119 - protein, 6 aa, Artificial sequence
  Protein classification predicting sequence
YALKYR

SEQ ID NO: 33120 - protein, 8 aa, Artificial sequence
  Protein classification predicting sequence
SPHGYFAQ

SEQ ID NO: 33121 - protein, 10 aa, Artificial sequence
  Protein classification predicting sequence
MTCGLPTFAT

SEQ ID NO: 33122 - protein, 8 aa, Artificial sequence
  Protein classification predicting sequence
SGFHIDPY

SEQ ID NO: 33123 - protein, 9 aa, Artificial sequence
  Protein classification predicting sequence
PRILIVTRL

SEQ ID NO: 33124 - protein, 17 aa, Artificial sequence
  Protein classification predicting sequence
GVTQCTIAHALEKTKYP

SEQ ID NO: 33125 - protein, 6 aa, Artificial sequence
  Protein classification predicting sequence
GQYESH

SEQ ID NO: 33126 - protein, 15 aa, Artificial sequence
  Protein classification predicting sequence
MARLDRVKNITGLVE

SEQ ID NO: 33127 - protein, 8 aa, Artificial sequence
  Protein classification predicting sequence
YSERLMTL

SEQ ID NO: 33128 - protein, 11 aa, Artificial sequence
  Protein classification predicting sequence
NFVLELDFEPF

SEQ ID NO: 33129 - protein, 10 aa, Artificial sequence
  Protein classification predicting sequence
KDTVGQYESH

SEQ ID NO: 33130 - protein, 11 aa, Artificial sequence
  Protein classification predicting sequence
FTMARLDRVKN

SEQ ID NO: 33131 - protein, 8 aa, Artificial sequence
  Protein classification predicting sequence
CGLPTFAT

SEQ ID NO: 33132 - protein, 14 aa, Artificial sequence
  Protein classification predicting sequence
GGPAEIIVHGKSGF

SEQ ID NO: 33133 - protein, 16 aa, Artificial sequence
  Protein classification predicting sequence
GGLKRIQEKYTWQIYS

SEQ ID NO: 33134 - protein, 14 aa, Artificial sequence
  Protein classification predicting sequence
HRFQELGLEKGWGD

SEQ ID NO: 33135 - protein, 11 aa, Artificial sequence
  Protein classification predicting sequence
LLLDLLEAPDP

SEQ ID NO: 33136 - protein, 11 aa, Artificial sequence
  Protein classification predicting sequence
GTTCGQRLEKV

SEQ ID NO: 33137 - protein, 23 aa, Artificial sequence
  Protein classification predicting sequence
CTIAHALEKTKYPNSDLYWKKFE

SEQ ID NO: 33138 - protein, 21 aa, Artificial sequence
  Protein classification predicting sequence
KPIIFSMARLDRVKNMTGLVE

SEQ ID NO: 33139 - protein, 6 aa, Artificial sequence
  Protein classification predicting sequence
EKYTWK

SEQ ID NO: 33140 - protein, 8 aa, Artificial sequence
  Protein classification predicting sequence
TVGQYESH

SEQ ID NO: 33141 - protein, 11 aa, Artificial sequence
  Protein classification predicting sequence
KPIIFSMARLD

SEQ ID NO: 33142 - protein, 9 aa, Artificial sequence
  Protein classification predicting sequence
VKNLTGLVE

SEQ ID NO: 33143 - protein, 9 aa, Artificial sequence
  Protein classification predicting sequence
GDHGKESKD

SEQ ID NO: 33144 - protein, 7 aa, Artificial sequence
  Protein classification predicting sequence
GAFVQPA

SEQ ID NO: 33145 - protein, 8 aa, Artificial sequence
  Protein classification predicting sequence
YEAFGLTV

SEQ ID NO: 33146 - protein, 10 aa, Artificial sequence
  Protein classification predicting sequence
DGAFGEVLRS

SEQ ID NO: 33147 - protein, 13 aa, Artificial sequence
  Protein classification predicting sequence
QEAIVLPPWVALA

SEQ ID NO: 33148 - protein, 10 aa, Artificial sequence
  Protein classification predicting sequence
RVNVHALVVE

SEQ ID NO: 33149 - protein, 9 aa, Artificial sequence
  Protein classification predicting sequence
PFNASFPRP

SEQ ID NO: 33150 - protein, 6 aa, Artificial sequence
  Protein classification predicting sequence
ASFPRP

SEQ ID NO: 33151 - protein, 9 aa, Artificial sequence
  Protein classification predicting sequence
FLNRHLSAK

SEQ ID NO: 33152 - protein, 10 aa, Artificial sequence
  Protein classification predicting sequence
KELQGKPDLI

SEQ ID NO: 33153 - protein, 16 aa, Artificial sequence
  Protein classification predicting sequence
GNYSDGNIVASLLAHK

SEQ ID NO: 33154 - protein, 6 aa, Artificial sequence
  Protein classification predicting sequence
GVTQCT

SEQ ID NO: 33155 - protein, 10 aa, Artificial sequence
  Protein classification predicting sequence
AHALEKTKYP

SEQ ID NO: 33156 - protein, 8 aa, Artificial sequence
  Protein classification predicting sequence
PGLYRVVH

SEQ ID NO: 33157 - protein, 12 aa, Artificial sequence
  Protein classification predicting sequence
DPKFNIVSPGAD

SEQ ID NO: 33158 - protein, 26 aa, Artificial sequence
  Protein classification predicting sequence
KPIIFTMARLDRVKNITGLVEWYGKN

SEQ ID NO: 33159 - protein, 22 aa, Artificial sequence
  Protein classification predicting sequence
LNGQFRWISSQMNRVRNGELYR

SEQ ID NO: 33160 - protein, 10 aa, Artificial sequence
  Protein classification predicting sequence
YEAFGLTVVE

SEQ ID NO: 33161 - protein, 8 aa, Artificial sequence
  Protein classification predicting sequence
RLLTLTGV

SEQ ID NO: 33162 - protein, 9 aa, Artificial sequence
  Protein classification predicting sequence
EMFYALKYR

SEQ ID NO: 33163 - protein, 7 aa, Artificial sequence
  Protein classification predicting sequence
KSIGNGV

SEQ ID NO: 33164 - protein, 24 aa, Artificial sequence
  Protein classification predicting sequence
AERVLESIQLLLDLLEAPDPCTLE

SEQ ID NO: 33165 - protein, 11 aa, Artificial sequence
  Protein classification predicting sequence
QGLDIIPRILI

SEQ ID NO: 33166 - protein, 7 aa, Artificial sequence
  Protein classification predicting sequence
GNYSDGN

SEQ ID NO: 33167 - protein, 21 aa, Artificial sequence
  Protein classification predicting sequence
AMNHTDFIITSTFQEIAGSKD

SEQ ID NO: 33168 - protein, 7 aa, Artificial sequence
  Protein classification predicting sequence
VGQYESH

SEQ ID NO: 33169 - protein, 51 aa, Artificial sequence
  Protein classification predicting sequence
KPIIFTMARLDRVKNITGLVEWYGKNAKLRELVNLVVVAGDRRKESKDLEE

SEQ ID NO: 33170 - protein, 7 aa, Artificial sequence
  Protein classification predicting sequence
AEMKKMY

SEQ ID NO: 33171 - protein, 12 aa, Artificial sequence
  Protein classification predicting sequence
YEAFGLTVVEAM

SEQ ID NO: 33172 - protein, 7 aa, Artificial sequence
  Protein classification predicting sequence
FLNRHLS

SEQ ID NO: 33173 - protein, 7 aa, Artificial sequence
  Protein classification predicting sequence
QEKKRRK

SEQ ID NO: 33174 - protein, 7 aa, Artificial sequence
  Protein classification predicting sequence
VMGASFR

SEQ ID NO: 33175 - protein, 6 aa, Artificial sequence
  Protein classification predicting sequence
NEDAMA

SEQ ID NO: 33176 - protein, 8 aa, Artificial sequence
  Protein classification predicting sequence
EDPGVVSV

SEQ ID NO: 33177 - protein, 12 aa, Artificial sequence
  Protein classification predicting sequence
VVGVTTNPSIFQ

SEQ ID NO: 33178 - protein, 16 aa, Artificial sequence
  Protein classification predicting sequence
GISVNVTLIFSLERYR

SEQ ID NO: 33179 - protein, 7 aa, Artificial sequence
  Protein classification predicting sequence
VVADTGD

SEQ ID NO: 33180 - protein, 9 aa, Artificial sequence
  Protein classification predicting sequence
TIVMGASFR

SEQ ID NO: 33181 - protein, 14 aa, Artificial sequence
  Protein classification predicting sequence
DGRVSIEVDPRLAH

SEQ ID NO: 33182 - protein, 10 aa, Artificial sequence
  Protein classification predicting sequence
DATTNPSLIL

SEQ ID NO: 33183 - protein, 9 aa, Artificial sequence
  Protein classification predicting sequence
YAPAEDPGV

SEQ ID NO: 33184 - protein, 12 aa, Artificial sequence
  Protein classification predicting sequence
ERKLSYTGEVKA

SEQ ID NO: 33185 - protein, 7 aa, Artificial sequence
  Protein classification predicting sequence
DGIRKFA

SEQ ID NO: 33186 - protein, 7 aa, Artificial sequence
  Protein classification predicting sequence
RILIKLA

SEQ ID NO: 33187 - protein, 19 aa, Artificial sequence
  Protein classification predicting sequence
PYVVEEDPGVKSVRNIYDY

SEQ ID NO: 33188 - protein, 27 aa, Artificial sequence
  Protein classification predicting sequence
YETIVMGASFRRTEQILALTGCDRLTI

SEQ ID NO: 33189 - protein, 7 aa, Artificial sequence
  Protein classification predicting sequence
GCDRLTI

SEQ ID NO: 33190 - protein, 57 aa, Artificial sequence
  Protein classification predicting sequence
NPSLLLKAAGLSQYEHLIDDAIAWGKKNGKTQEQQVVAACDKLAVNFGAEILKIVPG

SEQ ID NO: 33191 - protein, 69 aa, Artificial sequence
  Protein classification predicting sequence
VSTEVDARLSFDKEKSIEKARHLVDLYQQQGVEKSRILIKLASTWEGIRAAEELEKEGINCNLTLLFSF

SEQ ID NO: 33192 - protein, 20 aa, Artificial sequence
  Protein classification predicting sequence
QARACAEAGVFLISPFVGRI

SEQ ID NO: 33193 - protein, 10 aa, Artificial sequence
  Protein classification predicting sequence
TVVMGASFRN

SEQ ID NO: 33194 - protein, 7 aa, Artificial sequence
  Protein classification predicting sequence
MGASFRN

SEQ ID NO: 33195 - protein, 8 aa, Artificial sequence
  Protein classification predicting sequence
QFTTVVAD

SEQ ID NO: 33196 - protein, 9 aa, Artificial sequence
  Protein classification predicting sequence
TTVVADTGD

SEQ ID NO: 33197 - protein, 27 aa, Artificial sequence
  Protein classification predicting sequence
LEKEGINCNLTLLFSFAQARACAEAGV

SEQ ID NO: 33198 - protein, 14 aa, Artificial sequence
  Protein classification predicting sequence
LISPFVGRILDWYK

SEQ ID NO: 33199 - protein, 14 aa, Artificial sequence
  Protein classification predicting sequence
HGYETVVMGASFRN

SEQ ID NO: 33200 - protein, 44 aa, Artificial sequence
  Protein classification predicting sequence
VDATDKLAVNIGLEILKLVPGRISTEVDARLSYDTEASIAKAKR

SEQ ID NO: 33201 - protein, 34 aa, Artificial sequence
  Protein classification predicting sequence
GEILELAGCDRLTIAPALLKELAESEGAIERKLS

SEQ ID NO: 33202 - protein, 12 aa, Artificial sequence
  Protein classification predicting sequence
LISPFVGRILDW

SEQ ID NO: 33203 - protein, 28 aa, Artificial sequence
  Protein classification predicting sequence
SPVKRQRMESALDQLKQFTTVVADTGDF

SEQ ID NO: 33204 - protein, 37 aa, Artificial sequence
  Protein classification predicting sequence
AIDEYKPQDATTNPSLILAAAQMPAYQELVEEAIAYG

SEQ ID NO: 33205 - protein, 36 aa, Artificial sequence
  Protein classification predicting sequence
YKTIVMGASFRNTGEIKALAGCDFLTISPKLLGELL

SEQ ID NO: 33206 - protein, 11 aa, Artificial sequence
  Protein classification predicting sequence
KLERMLTERMF

SEQ ID NO: 33207 - protein, 6 aa, Artificial sequence
  Protein classification predicting sequence
STEVDA

SEQ ID NO: 33208 - protein, 7 aa, Artificial sequence
  Protein classification predicting sequence
DPGVVSV

SEQ ID NO: 33209 - protein, 8 aa, Artificial sequence
  Protein classification predicting sequence
LDEKAFRW

SEQ ID NO: 33210 - protein, 9 aa, Artificial sequence
  Protein classification predicting sequence
EDPGVLSVT

SEQ ID NO: 33211 - protein, 7 aa, Artificial sequence
  Protein classification predicting sequence
RVLIKIA

SEQ ID NO: 33212 - protein, 6 aa, Artificial sequence
  Protein classification predicting sequence
FSFAQA

SEQ ID NO: 33213 - protein, 6 aa, Artificial sequence
  Protein classification predicting sequence
MGASFR

SEQ ID NO: 33214 - protein, 7 aa, Artificial sequence
  Protein classification predicting sequence
CNLTLLF

SEQ ID NO: 33215 - protein, 12 aa, Artificial sequence
  Protein classification predicting sequence
PQDATTNPSLIL

SEQ ID NO: 33216 - protein, 7 aa, Artificial sequence
  Protein classification predicting sequence
KLSEGIR

SEQ ID NO: 33217 - protein, 7 aa, Artificial sequence
  Protein classification predicting sequence
TSNPAIF

SEQ ID NO: 33218 - protein, 9 aa, Artificial sequence
  Protein classification predicting sequence
WGIRQNGDD

SEQ ID NO: 33219 - protein, 6 aa, Artificial sequence
  Protein classification predicting sequence
NVTLIF

SEQ ID NO: 33220 - protein, 7 aa, Artificial sequence
  Protein classification predicting sequence
SPFVGRI

SEQ ID NO: 33221 - protein, 6 aa, Artificial sequence
  Protein classification predicting sequence
YYKKFG

SEQ ID NO: 33222 - protein, 8 aa, Artificial sequence
  Protein classification predicting sequence
LTISPKLL

SEQ ID NO: 33223 - protein, 22 aa, Artificial sequence
  Protein classification predicting sequence
FRFLMNEDAMATEKLAEGIRIF

SEQ ID NO: 33224 - protein, 13 aa, Artificial sequence
  Protein classification predicting sequence
PGRVSTEVDARLS

SEQ ID NO: 33225 - protein, 11 aa, Artificial sequence
  Protein classification predicting sequence
PGRISTEVDAR

SEQ ID NO: 33226 - protein, 7 aa, Artificial sequence
  Protein classification predicting sequence
STEVDAR

SEQ ID NO: 33227 - protein, 9 aa, Artificial sequence
  Protein classification predicting sequence
TWQGIRAAE

SEQ ID NO: 33228 - protein, 11 aa, Artificial sequence
  Protein classification predicting sequence
AQARACAEAGV

SEQ ID NO: 33229 - protein, 13 aa, Artificial sequence
  Protein classification predicting sequence
DKKEYAPAEDPGV

SEQ ID NO: 33230 - protein, 8 aa, Artificial sequence
  Protein classification predicting sequence
VVGVTTNP

SEQ ID NO: 33231 - protein, 8 aa, Artificial sequence
  Protein classification predicting sequence
DGRVSIEV

SEQ ID NO: 33232 - protein, 7 aa, Artificial sequence
  Protein classification predicting sequence
TVNTMPE

SEQ ID NO: 33233 - protein, 8 aa, Artificial sequence
  Protein classification predicting sequence
LIKLASTW

SEQ ID NO: 33234 - protein, 7 aa, Artificial sequence
  Protein classification predicting sequence
YYKEHGY

SEQ ID NO: 33235 - protein, 8 aa, Artificial sequence
  Protein classification predicting sequence
VMGASFRN

SEQ ID NO: 33236 - protein, 11 aa, Artificial sequence
  Protein classification predicting sequence
GISVNVTLIFS

SEQ ID NO: 33237 - protein, 8 aa, Artificial sequence
  Protein classification predicting sequence
LWASTGVK

SEQ ID NO: 33238 - protein, 8 aa, Artificial sequence
  Protein classification predicting sequence
TDKLTSLR

SEQ ID NO: 33239 - protein, 11 aa, Artificial sequence
  Protein classification predicting sequence
AKAKRLIKLYN

SEQ ID NO: 33240 - protein, 6 aa, Artificial sequence
  Protein classification predicting sequence
GIRKFA

SEQ ID NO: 33241 - protein, 7 aa, Artificial sequence
  Protein classification predicting sequence
ASTWEGI

SEQ ID NO: 33242 - protein, 9 aa, Artificial sequence
  Protein classification predicting sequence
DATTNPSLI

SEQ ID NO: 33243 - protein, 6 aa, Artificial sequence
  Protein classification predicting sequence
DARLSF

SEQ ID NO: 33244 - protein, 10 aa, Artificial sequence
  Protein classification predicting sequence
YNDAGITNDR

SEQ ID NO: 33245 - protein, 8 aa, Artificial sequence
  Protein classification predicting sequence
LIKIASTW

SEQ ID NO: 33246 - protein, 9 aa, Artificial sequence
  Protein classification predicting sequence
EDPGVISVT

SEQ ID NO: 33247 - protein, 8 aa, Artificial sequence
  Protein classification predicting sequence
SVTKIYNY

SEQ ID NO: 33248 - protein, 13 aa, Artificial sequence
  Protein classification predicting sequence
PGRISTEVDARLS

SEQ ID NO: 33249 - protein, 7 aa, Artificial sequence
  Protein classification predicting sequence
DPGVQSV

SEQ ID NO: 33250 - protein, 15 aa, Artificial sequence
  Protein classification predicting sequence
DPGVQSVSRIYRYYK

SEQ ID NO: 33251 - protein, 7 aa, Artificial sequence
  Protein classification predicting sequence
RVLIKLA

SEQ ID NO: 33252 - protein, 8 aa, Artificial sequence
  Protein classification predicting sequence
DATTNPSL

SEQ ID NO: 33253 - protein, 9 aa, Artificial sequence
  Protein classification predicting sequence
TLLFSFAQA

SEQ ID NO: 33254 - protein, 7 aa, Artificial sequence
  Protein classification predicting sequence
ACAEAGV

SEQ ID NO: 33255 - protein, 17 aa, Artificial sequence
  Protein classification predicting sequence
LDQLKQFTTVVADTGDF

SEQ ID NO: 33256 - protein, 7 aa, Artificial sequence
  Protein classification predicting sequence
AEGIRCN

SEQ ID NO: 33257 - protein, 12 aa, Artificial sequence
  Protein classification predicting sequence
LISPFVGRIYDW

SEQ ID NO: 33258 - protein, 6 aa, Artificial sequence
  Protein classification predicting sequence
IYNYYK

SEQ ID NO: 33259 - protein, 11 aa, Artificial sequence
  Protein classification predicting sequence
LAGCDLLTISP

SEQ ID NO: 33260 - protein, 7 aa, Artificial sequence
  Protein classification predicting sequence
AAQIPEY

SEQ ID NO: 33261 - protein, 19 aa, Artificial sequence
  Protein classification predicting sequence
EILKLVPGRISTEVDARLS

SEQ ID NO: 33262 - protein, 11 aa, Artificial sequence
  Protein classification predicting sequence
STEVDARLSFD

SEQ ID NO: 33263 - protein, 16 aa, Artificial sequence
  Protein classification predicting sequence
STEVDARLSFDKEKSI

SEQ ID NO: 33264 - protein, 10 aa, Artificial sequence
  Protein classification predicting sequence
QARACAEAGV

SEQ ID NO: 33265 - protein, 7 aa, Artificial sequence
  Protein classification predicting sequence
NQDAMAV

SEQ ID NO: 33266 - protein, 7 aa, Artificial sequence
  Protein classification predicting sequence
KLAEGIR

SEQ ID NO: 33267 - protein, 12 aa, Artificial sequence
  Protein classification predicting sequence
STEVDARLSYDT

SEQ ID NO: 33268 - protein, 7 aa, Artificial sequence
  Protein classification predicting sequence
EKLAEGI

SEQ ID NO: 33269 - protein, 6 aa, Artificial sequence
  Protein classification predicting sequence
GVTTNP

SEQ ID NO: 33270 - protein, 6 aa, Artificial sequence
  Protein classification predicting sequence
SPFVGR

SEQ ID NO: 33271 - protein, 47 aa, Artificial sequence
  Protein classification predicting sequence
QLRKLTTVVADTGEIDAIKKYQPEDATTNPSLILKAAQIAEYAPLID

SEQ ID NO: 33272 - protein, 15 aa, Artificial sequence
  Protein classification predicting sequence
PGRISTEVDARLSYD

SEQ ID NO: 33273 - protein, 17 aa, Artificial sequence
  Protein classification predicting sequence
SVAKARQLVKMYNDAGI

SEQ ID NO: 33274 - protein, 12 aa, Artificial sequence
  Protein classification predicting sequence
NDRILIKLASTW

SEQ ID NO: 33275 - protein, 9 aa, Artificial sequence
  Protein classification predicting sequence
LISPFVGRI

SEQ ID NO: 33276 - protein, 11 aa, Artificial sequence
  Protein classification predicting sequence
LLAELEAAEGE

SEQ ID NO: 33277 - protein, 6 aa, Artificial sequence
  Protein classification predicting sequence
MAVEKL

SEQ ID NO: 33278 - protein, 6 aa, Artificial sequence
  Protein classification predicting sequence
YNDAGI

SEQ ID NO: 33279 - protein, 6 aa, Artificial sequence
  Protein classification predicting sequence
WEHNQD

SEQ ID NO: 33280 - protein, 8 aa, Artificial sequence
  Protein classification predicting sequence
HNQDPMAV

SEQ ID NO: 33281 - protein, 8 aa, Artificial sequence
  Protein classification predicting sequence
GINCNLTL

SEQ ID NO: 33282 - protein, 8 aa, Artificial sequence
  Protein classification predicting sequence
LISPFVGR

SEQ ID NO: 33283 - protein, 26 aa, Artificial sequence
  Protein classification predicting sequence
TTVVADTGDIAAMKLYQPQDATTNPS

SEQ ID NO: 33284 - protein, 11 aa, Artificial sequence
  Protein classification predicting sequence
YQPQDATTNPS

SEQ ID NO: 33285 - protein, 9 aa, Artificial sequence
  Protein classification predicting sequence
PQDATTNPS

SEQ ID NO: 33286 - protein, 15 aa, Artificial sequence
  Protein classification predicting sequence
ILNAAQIPEYRKLID

SEQ ID NO: 33287 - protein, 22 aa, Artificial sequence
  Protein classification predicting sequence
AQQIVDATDKLAVNIGLEILKL

SEQ ID NO: 33288 - protein, 16 aa, Artificial sequence
  Protein classification predicting sequence
LISPFVGRILDWYKAN

SEQ ID NO: 33289 - protein, 10 aa, Artificial sequence
  Protein classification predicting sequence
LLKELAESEG

SEQ ID NO: 33290 - protein, 14 aa, Artificial sequence
  Protein classification predicting sequence
WQHNQDPMAVDKLA

SEQ ID NO: 33291 - protein, 8 aa, Artificial sequence
  Protein classification predicting sequence
LAVQMPDN

SEQ ID NO: 33292 - protein, 8 aa, Artificial sequence
  Protein classification predicting sequence
GCGPGNST

SEQ ID NO: 33293 - protein, 8 aa, Artificial sequence
  Protein classification predicting sequence
FPRLFIVA

SEQ ID NO: 33294 - protein, 12 aa, Artificial sequence
  Protein classification predicting sequence
IHRDIKAGNILL

SEQ ID NO: 33295 - protein, 27 aa, Artificial sequence
  Protein classification predicting sequence
IHRDIKAGNILLTEPGQVKLADFGSAS

SEQ ID NO: 33296 - protein, 19 aa, Artificial sequence
  Protein classification predicting sequence
AAADEKKFQQQILAQQKKD

SEQ ID NO: 33297 - protein, 7 aa, Artificial sequence
  Protein classification predicting sequence
KIPQERP

SEQ ID NO: 33298 - protein, 8 aa, Artificial sequence
  Protein classification predicting sequence
LLERQERE

SEQ ID NO: 33299 - protein, 29 aa, Artificial sequence
  Protein classification predicting sequence
SPANSFVGTPYWMAPEVILAMDEGQYDGK

SEQ ID NO: 33300 - protein, 72 aa, Artificial sequence
  Protein classification predicting sequence
RERFATIKSASLVTRQIHEHEQENELREQMSGYKRMRRQHQKQLIALENKLKAEMDEHRLKLQKEVETHANN

SEQ ID NO: 33301 - protein, 31 aa, Artificial sequence
  Protein classification predicting sequence
NEDHSTPKKEKQERISKHKENLQHTQAEEEA

SEQ ID NO: 33302 - protein, 15 aa, Artificial sequence
  Protein classification predicting sequence
FKRKIMIKRHEVEQQ

SEQ ID NO: 33303 - protein, 21 aa, Artificial sequence
  Protein classification predicting sequence
IREELNKKRTQKEMEHAMLIR

SEQ ID NO: 33304 - protein, 12 aa, Artificial sequence
  Protein classification predicting sequence
DESTRELEYRQL

SEQ ID NO: 33305 - protein, 30 aa, Artificial sequence
  Protein classification predicting sequence
MEMQIKKQFQDTCKVQTKQYKALKNHQLEV

SEQ ID NO: 33306 - protein, 50 aa, Artificial sequence
  Protein classification predicting sequence
QLQQEMELLNAYQSKIKMQTEAQHERELQKLEQRVSLRRAHLEQKIEEEL

SEQ ID NO: 33307 - protein, 11 aa, Artificial sequence
  Protein classification predicting sequence
ALQKERSERIK

SEQ ID NO: 33308 - protein, 7 aa, Artificial sequence
  Protein classification predicting sequence
SQYACQR

SEQ ID NO: 33309 - protein, 9 aa, Artificial sequence
  Protein classification predicting sequence
WKAIRVDLV

SEQ ID NO: 33310 - protein, 15 aa, Artificial sequence
  Protein classification predicting sequence
ELSDSVTHIVAENNS

SEQ ID NO: 33311 - protein, 7 aa, Artificial sequence
  Protein classification predicting sequence
FTDAFEI

SEQ ID NO: 33312 - protein, 8 aa, Artificial sequence
  Protein classification predicting sequence
FTSVFGVG

SEQ ID NO: 33313 - protein, 13 aa, Artificial sequence
  Protein classification predicting sequence
AGFLYYEDLVSCV

SEQ ID NO: 33314 - protein, 7 aa, Artificial sequence
  Protein classification predicting sequence
DHFQKCF

SEQ ID NO: 33315 - protein, 11 aa, Artificial sequence
  Protein classification predicting sequence
SEEEIFAHLGL

SEQ ID NO: 33316 - protein, 6 aa, Artificial sequence
  Protein classification predicting sequence
MMLDNH

SEQ ID NO: 33317 - protein, 7 aa, Artificial sequence
  Protein classification predicting sequence
PIYIVTE

SEQ ID NO: 33318 - protein, 8 aa, Artificial sequence
  Protein classification predicting sequence
LDDQYTSS

SEQ ID NO: 33319 - protein, 14 aa, Artificial sequence
  Protein classification predicting sequence
RVGTKRYMAPEVLD

SEQ ID NO: 33320 - protein, 8 aa, Artificial sequence
  Protein classification predicting sequence
RPNIPNRW

SEQ ID NO: 33321 - protein, 6 aa, Artificial sequence
  Protein classification predicting sequence
RRGQPF

SEQ ID NO: 33322 - protein, 8 aa, Artificial sequence
  Protein classification predicting sequence
RDSAEDVA

SEQ ID NO: 33323 - protein, 11 aa, Artificial sequence
  Protein classification predicting sequence
MLLNVSGHVKE

SEQ ID NO: 33324 - protein, 20 aa, Artificial sequence
  Protein classification predicting sequence
SAEDVAMQVEAQDAVMGQDL

SEQ ID NO: 33325 - protein, 8 aa, Artificial sequence
  Protein classification predicting sequence
RVVSAMVN

SEQ ID NO: 33326 - protein, 17 aa, Artificial sequence
  Protein classification predicting sequence
SAMVNSLDDNGVLIGNW

SEQ ID NO: 33327 - protein, 49 aa, Artificial sequence
  Protein classification predicting sequence
GDYSRGTNPSAWVGSVEILLSYLRTGYSVPYGQCWVFAGVTTTVLRCLG

SEQ ID NO: 33328 - protein, 8 aa, Artificial sequence
  Protein classification predicting sequence
MPVAYKEY

SEQ ID NO: 33329 - protein, 50 aa, Artificial sequence
  Protein classification predicting sequence
DSVWNFHVWNDCWMKRPDLPSGFDGWQVVDATPQETSSGIFCCGPCSVES

SEQ ID NO: 33330 - protein, 51 aa, Artificial sequence
  Protein classification predicting sequence
KNGLVYMKYDTPFIFAEVNSDKVYWQRQDDGSFKIVYVEEKAIGTLIVTKA

SEQ ID NO: 33331 - protein, 25 aa, Artificial sequence
  Protein classification predicting sequence
RTPDLSLTLLGAAVVGQECEVQIVF

SEQ ID NO: 33332 - protein, 18 aa, Artificial sequence
  Protein classification predicting sequence
TLTNVVFRLEGSGLQRPK

SEQ ID NO: 33333 - protein, 7 aa, Artificial sequence
  Protein classification predicting sequence
GRWDNNY

SEQ ID NO: 33334 - protein, 18 aa, Artificial sequence
  Protein classification predicting sequence
NSAHDQNSNLLIEYFRNE

SEQ ID NO: 33335 - protein, 12 aa, Artificial sequence
  Protein classification predicting sequence
LEASTGYQGSSF

SEQ ID NO: 33336 - protein, 9 aa, Artificial sequence
  Protein classification predicting sequence
GVLLGRWDN

SEQ ID NO: 33337 - protein, 8 aa, Artificial sequence
  Protein classification predicting sequence
WIGSVDIL

SEQ ID NO: 33338 - protein, 10 aa, Artificial sequence
  Protein classification predicting sequence
VKYGQCWVFA

SEQ ID NO: 33339 - protein, 16 aa, Artificial sequence
  Protein classification predicting sequence
VKYGQCWVFAAVACTV

SEQ ID NO: 33340 - protein, 11 aa, Artificial sequence
  Protein classification predicting sequence
RVVTNYNSAHD

SEQ ID NO: 33341 - protein, 7 aa, Artificial sequence
  Protein classification predicting sequence
WMTRPDL

SEQ ID NO: 33342 - protein, 15 aa, Artificial sequence
  Protein classification predicting sequence
GWQALDPTPQEKSEG

SEQ ID NO: 33343 - protein, 9 aa, Artificial sequence
  Protein classification predicting sequence
ISTKSVGRD

SEQ ID NO: 33344 - protein, 14 aa, Artificial sequence
  Protein classification predicting sequence
EYVLTQQGFIYQGS

SEQ ID NO: 33345 - protein, 12 aa, Artificial sequence
  Protein classification predicting sequence
WIGSVDILRRWK

SEQ ID NO: 33346 - protein, 6 aa, Artificial sequence
  Protein classification predicting sequence
LFNPWC

SEQ ID NO: 33347 - protein, 11 aa, Artificial sequence
  Protein classification predicting sequence
WNFHCWVESWM

SEQ ID NO: 33348 - protein, 7 aa, Artificial sequence
  Protein classification predicting sequence
YKYPEGS

SEQ ID NO: 33349 - protein, 7 aa, Artificial sequence
  Protein classification predicting sequence
LVVRRGQ

SEQ ID NO: 33350 - protein, 9 aa, Artificial sequence
  Protein classification predicting sequence
RVISAMVNS

SEQ ID NO: 33351 - protein, 9 aa, Artificial sequence
  Protein classification predicting sequence
CTVLRCLGI

SEQ ID NO: 33352 - protein, 7 aa, Artificial sequence
  Protein classification predicting sequence
WNFGQFE

SEQ ID NO: 33353 - protein, 8 aa, Artificial sequence
  Protein classification predicting sequence
WMKRPDLP

SEQ ID NO: 33354 - protein, 7 aa, Artificial sequence
  Protein classification predicting sequence
DSVWNFH

SEQ ID NO: 33355 - protein, 6 aa, Artificial sequence
  Protein classification predicting sequence
GWQVLD

SEQ ID NO: 33356 - protein, 8 aa, Artificial sequence
  Protein classification predicting sequence
PEGSPEER

SEQ ID NO: 33357 - protein, 7 aa, Artificial sequence
  Protein classification predicting sequence
GFIYQGS

SEQ ID NO: 33358 - protein, 6 aa, Artificial sequence
  Protein classification predicting sequence
DATPQE

SEQ ID NO: 33359 - protein, 11 aa, Artificial sequence
  Protein classification predicting sequence
WNFHVWNDCWM

SEQ ID NO: 33360 - protein, 6 aa, Artificial sequence
  Protein classification predicting sequence
FMPVGT

SEQ ID NO: 33361 - protein, 8 aa, Artificial sequence
  Protein classification predicting sequence
FMPVGTYG

SEQ ID NO: 33362 - protein, 19 aa, Artificial sequence
  Protein classification predicting sequence
FMPVGTYGTVKGMLPRDIE

SEQ ID NO: 33363 - protein, 9 aa, Artificial sequence
  Protein classification predicting sequence
RGVDMFDCV

SEQ ID NO: 33364 - protein, 19 aa, Artificial sequence
  Protein classification predicting sequence
RGVDMFDCVMPTRNARNGH

SEQ ID NO: 33365 - protein, 6 aa, Artificial sequence
  Protein classification predicting sequence
DMFDCV

SEQ ID NO: 33366 - protein, 6 aa, Artificial sequence
  Protein classification predicting sequence
CDCYTC

SEQ ID NO: 33367 - protein, 8 aa, Artificial sequence
  Protein classification predicting sequence
PERSIEIQ

SEQ ID NO: 33368 - protein, 14 aa, Artificial sequence
  Protein classification predicting sequence
QPGKAMFGIVQGGD

SEQ ID NO: 33369 - protein, 10 aa, Artificial sequence
  Protein classification predicting sequence
DMFDCVMPTR

SEQ ID NO: 33370 - protein, 8 aa, Artificial sequence
  Protein classification predicting sequence
FMPVGTLA

SEQ ID NO: 33371 - protein, 8 aa, Artificial sequence
  Protein classification predicting sequence
FDCVIPTR

SEQ ID NO: 33372 - protein, 8 aa, Artificial sequence
  Protein classification predicting sequence
PILTDSGG

SEQ ID NO: 33373 - protein, 6 aa, Artificial sequence
  Protein classification predicting sequence
GSDIMM

SEQ ID NO: 33374 - protein, 7 aa, Artificial sequence
  Protein classification predicting sequence
LFGIVQG

SEQ ID NO: 33375 - protein, 7 aa, Artificial sequence
  Protein classification predicting sequence
GYSIGGL

SEQ ID NO: 33376 - protein, 9 aa, Artificial sequence
  Protein classification predicting sequence
KPRYLMGVG

SEQ ID NO: 33377 - protein, 13 aa, Artificial sequence
  Protein classification predicting sequence
KPRYLMGVGKPED

SEQ ID NO: 33378 - protein, 6 aa, Artificial sequence
  Protein classification predicting sequence
PTRNAR

SEQ ID NO: 33379 - protein, 11 aa, Artificial sequence
  Protein classification predicting sequence
PLDPECDCYTC

SEQ ID NO: 33380 - protein, 11 aa, Artificial sequence
  Protein classification predicting sequence
IQTVLNSDIAM

SEQ ID NO: 33381 - protein, 6 aa, Artificial sequence
  Protein classification predicting sequence
CYTCRN

SEQ ID NO: 33382 - protein, 8 aa, Artificial sequence
  Protein classification predicting sequence
LNTIHNLR

SEQ ID NO: 33383 - protein, 7 aa, Artificial sequence
  Protein classification predicting sequence
GYAVGGL

SEQ ID NO: 33384 - protein, 11 aa, Artificial sequence
  Protein classification predicting sequence
QGLFGIVQGGE

SEQ ID NO: 33385 - protein, 12 aa, Artificial sequence
  Protein classification predicting sequence
IKTCKQSGARLG

SEQ ID NO: 33386 - protein, 10 aa, Artificial sequence
  Protein classification predicting sequence
EEGVHFRNHL

SEQ ID NO: 33387 - protein, 7 aa, Artificial sequence
  Protein classification predicting sequence
KLFLSPE

SEQ ID NO: 33388 - protein, 8 aa, Artificial sequence
  Protein classification predicting sequence
MAFDECPP

SEQ ID NO: 33389 - protein, 20 aa, Artificial sequence
  Protein classification predicting sequence
RPEDQALFGIIQGGEYEDLR

SEQ ID NO: 33390 - protein, 7 aa, Artificial sequence
  Protein classification predicting sequence
PGYAIGG

SEQ ID NO: 33391 - protein, 6 aa, Artificial sequence
  Protein classification predicting sequence
SVGEPK

SEQ ID NO: 33392 - protein, 13 aa, Artificial sequence
  Protein classification predicting sequence
MNRVLEFTTPLLP

SEQ ID NO: 33393 - protein, 6 aa, Artificial sequence
  Protein classification predicting sequence
TTPLLP

SEQ ID NO: 33394 - protein, 9 aa, Artificial sequence
  Protein classification predicting sequence
YTRAYIRHL

SEQ ID NO: 33395 - protein, 7 aa, Artificial sequence
  Protein classification predicting sequence
RAYIRHL

SEQ ID NO: 33396 - protein, 7 aa, Artificial sequence
  Protein classification predicting sequence
KCDETFG

SEQ ID NO: 33397 - protein, 8 aa, Artificial sequence
  Protein classification predicting sequence
RLTTYHNL

SEQ ID NO: 33398 - protein, 13 aa, Artificial sequence
  Protein classification predicting sequence
DFREEFFEQYGFN

SEQ ID NO: 33399 - protein, 44 aa, Artificial sequence
  Protein classification predicting sequence
IEEEGVHFRNHLNGDKLFLSPEKAMEIQNALGSDIMMAFDECPP

SEQ ID NO: 33400 - protein, 14 aa, Artificial sequence
  Protein classification predicting sequence
LGSDIMMAFDECPP

SEQ ID NO: 33401 - protein, 20 aa, Artificial sequence
  Protein classification predicting sequence
IRGVDMFDCVLPTRIARNGT

SEQ ID NO: 33402 - protein, 7 aa, Artificial sequence
  Protein classification predicting sequence
DFRPIDE

SEQ ID NO: 33403 - protein, 6 aa, Artificial sequence
  Protein classification predicting sequence
NYSRAY

SEQ ID NO: 33404 - protein, 7 aa, Artificial sequence
  Protein classification predicting sequence
AIREDRL

SEQ ID NO: 33405 - protein, 9 aa, Artificial sequence
  Protein classification predicting sequence
YGFNKPNAK

SEQ ID NO: 33406 - protein, 12 aa, Artificial sequence
  Protein classification predicting sequence
GARLGRVHTPHG

SEQ ID NO: 33407 - protein, 9 aa, Artificial sequence
  Protein classification predicting sequence
ATVKTMSPE

SEQ ID NO: 33408 - protein, 14 aa, Artificial sequence
  Protein classification predicting sequence
IILSNTYHLWLRPG

SEQ ID NO: 33409 - protein, 5 aa, Artificial sequence
  Protein classification predicting sequence
FMNWD

SEQ ID NO: 33410 - protein, 8 aa, Artificial sequence
  Protein classification predicting sequence
RKITEEGV

SEQ ID NO: 33411 - protein, 8 aa, Artificial sequence
  Protein classification predicting sequence
KQTGARLG

SEQ ID NO: 33412 - protein, 7 aa, Artificial sequence
  Protein classification predicting sequence
HLWLRPG

SEQ ID NO: 33413 - protein, 14 aa, Artificial sequence
  Protein classification predicting sequence
ILTDSGGFQVFSLS

SEQ ID NO: 33414 - protein, 8 aa, Artificial sequence
  Protein classification predicting sequence
LIDGAIRG

SEQ ID NO: 33415 - protein, 10 aa, Artificial sequence
  Protein classification predicting sequence
PIITDSGGFQ

SEQ ID NO: 33416 - protein, 7 aa, Artificial sequence
  Protein classification predicting sequence
CDCYTCQ

SEQ ID NO: 33417 - protein, 7 aa, Artificial sequence
  Protein classification predicting sequence
LTDSGGF

SEQ ID NO: 33418 - protein, 14 aa, Artificial sequence
  Protein classification predicting sequence
WKGPILTDSGGFQV

SEQ ID NO: 33419 - protein, 11 aa, Artificial sequence
  Protein classification predicting sequence
PILTDSGGFQV

SEQ ID NO: 33420 - protein, 11 aa, Artificial sequence
  Protein classification predicting sequence
KPRYLMGVGKP

SEQ ID NO: 33421 - protein, 6 aa, Artificial sequence
  Protein classification predicting sequence
YLHHLD

SEQ ID NO: 33422 - protein, 11 aa, Artificial sequence
  Protein classification predicting sequence
TDSGGFQIFSL

SEQ ID NO: 33423 - protein, 8 aa, Artificial sequence
  Protein classification predicting sequence
PTRNARNG

SEQ ID NO: 33424 - protein, 6 aa, Artificial sequence
  Protein classification predicting sequence
SHIDGS

SEQ ID NO: 33425 - protein, 9 aa, Artificial sequence
  Protein classification predicting sequence
AIGGLSVGE

SEQ ID NO: 33426 - protein, 16 aa, Artificial sequence
  Protein classification predicting sequence
GADIILGNTYHLMLRP

SEQ ID NO: 33427 - protein, 7 aa, Artificial sequence
  Protein classification predicting sequence
LGSDIVM

SEQ ID NO: 33428 - protein, 11 aa, Artificial sequence
  Protein classification predicting sequence
IDTPAFVPVAT

SEQ ID NO: 33429 - protein, 9 aa, Artificial sequence
  Protein classification predicting sequence
PLDELLPFH

SEQ ID NO: 33430 - protein, 7 aa, Artificial sequence
  Protein classification predicting sequence
RAYLRHL

SEQ ID NO: 33431 - protein, 6 aa, Artificial sequence
  Protein classification predicting sequence
GPEESM

SEQ ID NO: 33432 - protein, 8 aa, Artificial sequence
  Protein classification predicting sequence
IGGLAVGE

SEQ ID NO: 33433 - protein, 7 aa, Artificial sequence
  Protein classification predicting sequence
QGGVYED

SEQ ID NO: 33434 - protein, 7 aa, Artificial sequence
  Protein classification predicting sequence
KLMEDIR

SEQ ID NO: 33435 - protein, 7 aa, Artificial sequence
  Protein classification predicting sequence
GGLAVGE

SEQ ID NO: 33436 - protein, 17 aa, Artificial sequence
  Protein classification predicting sequence
ITPHGTFPTPMFMPVGT

SEQ ID NO: 33437 - protein, 12 aa, Artificial sequence
  Protein classification predicting sequence
EAGGLHKFMNWD

SEQ ID NO: 33438 - protein, 15 aa, Artificial sequence
  Protein classification predicting sequence
PILTDSGGFQVFSLS

SEQ ID NO: 33439 - protein, 19 aa, Artificial sequence
  Protein classification predicting sequence
PILTDSGGFQVFSLSDMRK

SEQ ID NO: 33440 - protein, 9 aa, Artificial sequence
  Protein classification predicting sequence
QGLFGIVQG

SEQ ID NO: 33441 - protein, 10 aa, Artificial sequence
  Protein classification predicting sequence
DLVSMDFPGY

SEQ ID NO: 33442 - protein, 8 aa, Artificial sequence
  Protein classification predicting sequence
VLDFTTPL

SEQ ID NO: 33443 - protein, 20 aa, Artificial sequence
  Protein classification predicting sequence
DMFDCVLPTRIARNGTCMTS

SEQ ID NO: 33444 - protein, 25 aa, Artificial sequence
  Protein classification predicting sequence
DMFDCVLPTRIARNGTCMTSQGRLV

SEQ ID NO: 33445 - protein, 15 aa, Artificial sequence
  Protein classification predicting sequence
GPILTDSGGFQVFSL

SEQ ID NO: 33446 - protein, 16 aa, Artificial sequence
  Protein classification predicting sequence
GPILTDSGGFQVFSLG

SEQ ID NO: 33447 - protein, 35 aa, Artificial sequence
  Protein classification predicting sequence
GPILTDSGGFQVFSLGDIRKITEQGVHFRNPINGD

SEQ ID NO: 33448 - protein, 8 aa, Artificial sequence
  Protein classification predicting sequence
FLSPEKSM

SEQ ID NO: 33449 - protein, 18 aa, Artificial sequence
  Protein classification predicting sequence
DLGSDIVMIFDECTPYPA

SEQ ID NO: 33450 - protein, 22 aa, Artificial sequence
  Protein classification predicting sequence
DKPRYLMGVGKPEDLVEGVRRG

SEQ ID NO: 33451 - protein, 7 aa, Artificial sequence
  Protein classification predicting sequence
CDCYTCR

SEQ ID NO: 33452 - protein, 8 aa, Artificial sequence
  Protein classification predicting sequence
AIEEGKLE

SEQ ID NO: 33453 - protein, 9 aa, Artificial sequence
  Protein classification predicting sequence
IILGNTFHL

SEQ ID NO: 33454 - protein, 7 aa, Artificial sequence
  Protein classification predicting sequence
LGNTFHL

SEQ ID NO: 33455 - protein, 7 aa, Artificial sequence
  Protein classification predicting sequence
TFKSPIN

SEQ ID NO: 33456 - protein, 7 aa, Artificial sequence
  Protein classification predicting sequence
ATVKTMS

SEQ ID NO: 33457 - protein, 8 aa, Artificial sequence
  Protein classification predicting sequence
SHIDGSKH

SEQ ID NO: 33458 - protein, 7 aa, Artificial sequence
  Protein classification predicting sequence
HTPHGSF

SEQ ID NO: 33459 - protein, 9 aa, Artificial sequence
  Protein classification predicting sequence
TPMFMPVGT

SEQ ID NO: 33460 - protein, 13 aa, Artificial sequence
  Protein classification predicting sequence
ILSNTYHLWLRPG

SEQ ID NO: 33461 - protein, 9 aa, Artificial sequence
  Protein classification predicting sequence
ERTSRWAER

SEQ ID NO: 33462 - protein, 11 aa, Artificial sequence
  Protein classification predicting sequence
DMFDCVLPTRI

SEQ ID NO: 33463 - protein, 6 aa, Artificial sequence
  Protein classification predicting sequence
MTSEGR

SEQ ID NO: 33464 - protein, 11 aa, Artificial sequence
  Protein classification predicting sequence
PLDPNCDCYTC

SEQ ID NO: 33465 - protein, 14 aa, Artificial sequence
  Protein classification predicting sequence
LMEQVRQAIREDRL

SEQ ID NO: 33466 - protein, 8 aa, Artificial sequence
  Protein classification predicting sequence
DFREEFFE

SEQ ID NO: 33467 - protein, 7 aa, Artificial sequence
  Protein classification predicting sequence
DQALFGI

SEQ ID NO: 33468 - protein, 19 aa, Artificial sequence
  Protein classification predicting sequence
DLGSDIVMIFDECTPYPAT

SEQ ID NO: 33469 - protein, 15 aa, Artificial sequence
  Protein classification predicting sequence
SDIVMIFDECTPYPA

SEQ ID NO: 33470 - protein, 16 aa, Artificial sequence
  Protein classification predicting sequence
SDIVMIFDECTPYPAT

SEQ ID NO: 33471 - protein, 18 aa, Artificial sequence
  Protein classification predicting sequence
IGFDGYAVGGLAVGEPKE

SEQ ID NO: 33472 - protein, 10 aa, Artificial sequence
  Protein classification predicting sequence
DKPRYLMGVG

SEQ ID NO: 33473 - protein, 10 aa, Artificial sequence
  Protein classification predicting sequence
DGVVKIRNAK

SEQ ID NO: 33474 - protein, 11 aa, Artificial sequence
  Protein classification predicting sequence
PLDAECDCYTC

SEQ ID NO: 33475 - protein, 10 aa, Artificial sequence
  Protein classification predicting sequence
DSGGFQAFSL

SEQ ID NO: 33476 - protein, 16 aa, Artificial sequence
  Protein classification predicting sequence
LNSDIMMVLDDLVGLP

SEQ ID NO: 33477 - protein, 6 aa, Artificial sequence
  Protein classification predicting sequence
GFDGYA

SEQ ID NO: 33478 - protein, 12 aa, Artificial sequence
  Protein classification predicting sequence
PKDKPRYLMGVG

SEQ ID NO: 33479 - protein, 6 aa, Artificial sequence
  Protein classification predicting sequence
AYLHHL

SEQ ID NO: 33480 - protein, 9 aa, Artificial sequence
  Protein classification predicting sequence
IQNALGSDI

SEQ ID NO: 33481 - protein, 7 aa, Artificial sequence
  Protein classification predicting sequence
GRARRGR

SEQ ID NO: 33482 - protein, 11 aa, Artificial sequence
  Protein classification predicting sequence
VETPAFMPVGT

SEQ ID NO: 33483 - protein, 9 aa, Artificial sequence
  Protein classification predicting sequence
TPAFMPVGT

SEQ ID NO: 33484 - protein, 11 aa, Artificial sequence
  Protein classification predicting sequence
GTVKGMTPEEV

SEQ ID NO: 33485 - protein, 8 aa, Artificial sequence
  Protein classification predicting sequence
HGDLHDFM

SEQ ID NO: 33486 - protein, 7 aa, Artificial sequence
  Protein classification predicting sequence
IGFDGYA

SEQ ID NO: 33487 - protein, 23 aa, Artificial sequence
  Protein classification predicting sequence
VRRGIDMFDCVMPTRNARNGHLF

SEQ ID NO: 33488 - protein, 8 aa, Artificial sequence
  Protein classification predicting sequence
GVVKIRNA

SEQ ID NO: 33489 - protein, 7 aa, Artificial sequence
  Protein classification predicting sequence
IKYRLIK

SEQ ID NO: 33490 - protein, 20 aa, Artificial sequence
  Protein classification predicting sequence
GSGIILSNTYHLWLRPGDEL

SEQ ID NO: 33491 - protein, 8 aa, Artificial sequence
  Protein classification predicting sequence
ITEEGVKF

SEQ ID NO: 33492 - protein, 23 aa, Artificial sequence
  Protein classification predicting sequence
PEKAISIQNNLGSDIMMSFDECP

SEQ ID NO: 33493 - protein, 13 aa, Artificial sequence
  Protein classification predicting sequence
LGSDIMMSFDECP

SEQ ID NO: 33494 - protein, 5 aa, Artificial sequence
  Protein classification predicting sequence
FDECP

SEQ ID NO: 33495 - protein, 9 aa, Artificial sequence
  Protein classification predicting sequence
FYQPYDYVK

SEQ ID NO: 33496 - protein, 11 aa, Artificial sequence
  Protein classification predicting sequence
GYSIGGLAVGE

SEQ ID NO: 33497 - protein, 6 aa, Artificial sequence
  Protein classification predicting sequence
NYTRAY

SEQ ID NO: 33498 - protein, 7 aa, Artificial sequence
  Protein classification predicting sequence
KADETFG

SEQ ID NO: 33499 - protein, 8 aa, Artificial sequence
  Protein classification predicting sequence
FLSPEKAI

SEQ ID NO: 33500 - protein, 8 aa, Artificial sequence
  Protein classification predicting sequence
RTSRWAER

SEQ ID NO: 33501 - protein, 12 aa, Artificial sequence
  Protein classification predicting sequence
QGLFGIVQGAGF

SEQ ID NO: 33502 - protein, 7 aa, Artificial sequence
  Protein classification predicting sequence
QSAKDLV

SEQ ID NO: 33503 - protein, 7 aa, Artificial sequence
  Protein classification predicting sequence
FTTPLLP

SEQ ID NO: 33504 - protein, 11 aa, Artificial sequence
  Protein classification predicting sequence
SVERTSRWAER

SEQ ID NO: 33505 - protein, 7 aa, Artificial sequence
  Protein classification predicting sequence
PDSLIDG

SEQ ID NO: 33506 - protein, 10 aa, Artificial sequence
  Protein classification predicting sequence
GRLVIKNAKF

SEQ ID NO: 33507 - protein, 7 aa, Artificial sequence
  Protein classification predicting sequence
NCDCYTC

SEQ ID NO: 33508 - protein, 10 aa, Artificial sequence
  Protein classification predicting sequence
EETFGIRLTT

SEQ ID NO: 33509 - protein, 8 aa, Artificial sequence
  Protein classification predicting sequence
ETFGIRLT

SEQ ID NO: 33510 - protein, 11 aa, Artificial sequence
  Protein classification predicting sequence
PLDPHCDCYTC

SEQ ID NO: 33511 - protein, 20 aa, Artificial sequence
  Protein classification predicting sequence
EILGARLNTIHNLRYYQRLM

SEQ ID NO: 33512 - protein, 9 aa, Artificial sequence
  Protein classification predicting sequence
GGLSVGEPK

SEQ ID NO: 33513 - protein, 37 aa, Artificial sequence
  Protein classification predicting sequence
KQTGARLGRVHTPHGSFDTPTFMPVGTLATVKTMSPE

SEQ ID NO: 33514 - protein, 16 aa, Artificial sequence
  Protein classification predicting sequence
FMPVGTLATVKTMSPE

SEQ ID NO: 33515 - protein, 11 aa, Artificial sequence
  Protein classification predicting sequence
AGGLHKFMNWD

SEQ ID NO: 33516 - protein, 13 aa, Artificial sequence
  Protein classification predicting sequence
ILTDSGGFQVFSL

SEQ ID NO: 33517 - protein, 12 aa, Artificial sequence
  Protein classification predicting sequence
KPRYLMGVGSPD

SEQ ID NO: 33518 - protein, 7 aa, Artificial sequence
  Protein classification predicting sequence
HNLHFLL

SEQ ID NO: 33519 - protein, 6 aa, Artificial sequence
  Protein classification predicting sequence
FFEQYG

SEQ ID NO: 33520 - protein, 11 aa, Artificial sequence
  Protein classification predicting sequence
HLLGIGDLPSI

SEQ ID NO: 33521 - protein, 7 aa, Artificial sequence
  Protein classification predicting sequence
FDSSYPT

SEQ ID NO: 33522 - protein, 6 aa, Artificial sequence
  Protein classification predicting sequence
ARRGRL

SEQ ID NO: 33523 - protein, 23 aa, Artificial sequence
  Protein classification predicting sequence
LGNTFHLWLRPGQEIMKLHGDLH

SEQ ID NO: 33524 - protein, 13 aa, Artificial sequence
  Protein classification predicting sequence
YEDLRDISVKGLV

SEQ ID NO: 33525 - protein, 8 aa, Artificial sequence
  Protein classification predicting sequence
KIRNAKHK

SEQ ID NO: 33526 - protein, 8 aa, Artificial sequence
  Protein classification predicting sequence
NPNALFGI

SEQ ID NO: 33527 - protein, 9 aa, Artificial sequence
  Protein classification predicting sequence
NALFGIIQG

SEQ ID NO: 33528 - protein, 6 aa, Artificial sequence
  Protein classification predicting sequence
CNEILG

SEQ ID NO: 33529 - protein, 6 aa, Artificial sequence
  Protein classification predicting sequence
PRYLMG

SEQ ID NO: 33530 - protein, 6 aa, Artificial sequence
  Protein classification predicting sequence
FDCVLP

SEQ ID NO: 33531 - protein, 8 aa, Artificial sequence
  Protein classification predicting sequence
FDCVLPTR

SEQ ID NO: 33532 - protein, 11 aa, Artificial sequence
  Protein classification predicting sequence
FMPVGTLATVK

SEQ ID NO: 33533 - protein, 11 aa, Artificial sequence
  Protein classification predicting sequence
WDKPILTDSGG

SEQ ID NO: 33534 - protein, 6 aa, Artificial sequence
  Protein classification predicting sequence
FLSPEK

SEQ ID NO: 33535 - protein, 7 aa, Artificial sequence
  Protein classification predicting sequence
GGVSVGE

SEQ ID NO: 33536 - protein, 15 aa, Artificial sequence
  Protein classification predicting sequence
FDCVLPTRLGRHGTA

SEQ ID NO: 33537 - protein, 11 aa, Artificial sequence
  Protein classification predicting sequence
ARRGRLTFPRG

SEQ ID NO: 33538 - protein, 15 aa, Artificial sequence
  Protein classification predicting sequence
PILTDSGGFQVFSLG

SEQ ID NO: 33539 - protein, 5 aa, Artificial sequence
  Protein classification predicting sequence
SLRWA

SEQ ID NO: 33540 - protein, 7 aa, Artificial sequence
  Protein classification predicting sequence
RSLDGLQ

SEQ ID NO: 33541 - protein, 19 aa, Artificial sequence
  Protein classification predicting sequence
TFPRGTVETPAFMPVGTYG

SEQ ID NO: 33542 - protein, 13 aa, Artificial sequence
  Protein classification predicting sequence
VETPAFMPVGTYG

SEQ ID NO: 33543 - protein, 7 aa, Artificial sequence
  Protein classification predicting sequence
LHDFMQW

SEQ ID NO: 33544 - protein, 12 aa, Artificial sequence
  Protein classification predicting sequence
VMIFDECTPYPA

SEQ ID NO: 33545 - protein, 9 aa, Artificial sequence
  Protein classification predicting sequence
ALFGIVQGG

SEQ ID NO: 33546 - protein, 18 aa, Artificial sequence
  Protein classification predicting sequence
DMFDCVMPTRNARNGHLF

SEQ ID NO: 33547 - protein, 11 aa, Artificial sequence
  Protein classification predicting sequence
LGNTFHLWLRP

SEQ ID NO: 33548 - protein, 6 aa, Artificial sequence
  Protein classification predicting sequence
LFLSPE

SEQ ID NO: 33549 - protein, 8 aa, Artificial sequence
  Protein classification predicting sequence
SRAYLHHL

SEQ ID NO: 33550 - protein, 13 aa, Artificial sequence
  Protein classification predicting sequence
EILGARLNTIHNL

SEQ ID NO: 33551 - protein, 8 aa, Artificial sequence
  Protein classification predicting sequence
TDGRARRG

SEQ ID NO: 33552 - protein, 11 aa, Artificial sequence
  Protein classification predicting sequence
KPRYLMGVGTP

SEQ ID NO: 33553 - protein, 6 aa, Artificial sequence
  Protein classification predicting sequence
GGLHKF

SEQ ID NO: 33554 - protein, 7 aa, Artificial sequence
  Protein classification predicting sequence
SLRWAER

SEQ ID NO: 33555 - protein, 19 aa, Artificial sequence
  Protein classification predicting sequence
KPRYLMGVGTPDDILKSVA

SEQ ID NO: 33556 - protein, 7 aa, Artificial sequence
  Protein classification predicting sequence
DECTPYP

SEQ ID NO: 33557 - protein, 9 aa, Artificial sequence
  Protein classification predicting sequence
FGIIQGSVY

SEQ ID NO: 33558 - protein, 18 aa, Artificial sequence
  Protein classification predicting sequence
FMPVGTYGTVKGMTPEEV

SEQ ID NO: 33559 - protein, 13 aa, Artificial sequence
  Protein classification predicting sequence
SMEMSLRWAKRSR

SEQ ID NO: 33560 - protein, 12 aa, Artificial sequence
  Protein classification predicting sequence
DMHRILEHVCPQ

SEQ ID NO: 33561 - protein, 7 aa, Artificial sequence
  Protein classification predicting sequence
ECDCYTC

SEQ ID NO: 33562 - protein, 7 aa, Artificial sequence
  Protein classification predicting sequence
FYQRQGR

SEQ ID NO: 33563 - protein, 59 aa, Artificial sequence
  Protein classification predicting sequence
ECDCYTCRNYSRAYLHHLDRCNEILGARLNTIHNLRYYQRLMAGLRKAIEEGKLESFVT

SEQ ID NO: 33564 - protein, 6 aa, Artificial sequence
  Protein classification predicting sequence
ILLGNT

SEQ ID NO: 33565 - protein, 14 aa, Artificial sequence
  Protein classification predicting sequence
PILTDSGGFQVFSL

SEQ ID NO: 33566 - protein, 22 aa, Artificial sequence
  Protein classification predicting sequence
PILTDSGGFQVFSLGDIRKITE

SEQ ID NO: 33567 - protein, 7 aa, Artificial sequence
  Protein classification predicting sequence
EEGVHFR

SEQ ID NO: 33568 - protein, 6 aa, Artificial sequence
  Protein classification predicting sequence
MSLRWA

SEQ ID NO: 33569 - protein, 7 aa, Artificial sequence
  Protein classification predicting sequence
LFGIIQG

SEQ ID NO: 33570 - protein, 22 aa, Artificial sequence
  Protein classification predicting sequence
KGLVEIGFDGYAVGGLAVGEPK

SEQ ID NO: 33571 - protein, 13 aa, Artificial sequence
  Protein classification predicting sequence
DMHRILEHVCPQI

SEQ ID NO: 33572 - protein, 11 aa, Artificial sequence
  Protein classification predicting sequence
YDYVKKSIERT

SEQ ID NO: 33573 - protein, 6 aa, Artificial sequence
  Protein classification predicting sequence
LDFPGY

SEQ ID NO: 33574 - protein, 17 aa, Artificial sequence
  Protein classification predicting sequence
LDFPGYAIGGLSVGEPK

SEQ ID NO: 33575 - protein, 9 aa, Artificial sequence
  Protein classification predicting sequence
ADDLRPLDE

SEQ ID NO: 33576 - protein, 7 aa, Artificial sequence
  Protein classification predicting sequence
EFFEQYG

SEQ ID NO: 33577 - protein, 56 aa, Artificial sequence
  Protein classification predicting sequence
IEAKIILGNTYHLWLQPGNDIIKHAGGLHKFMNWDGPILTDSGGFQVFSLSNLRKI

SEQ ID NO: 33578 - protein, 51 aa, Artificial sequence
  Protein classification predicting sequence
EEGVEFRHHTNGSKLFLSPEKSMQIQNDLGSDIMMAFDECPPMPAEYDYVK

SEQ ID NO: 33579 - protein, 21 aa, Artificial sequence
  Protein classification predicting sequence
LDFPGYAIGGLSVGEPKPVMY

SEQ ID NO: 33580 - protein, 54 aa, Artificial sequence
  Protein classification predicting sequence
MVEHTEQFMPKDKPRYLMGVGSPDALIECSIRGMDMFDCVLPTRIARNGTCMTS

SEQ ID NO: 33581 - protein, 39 aa, Artificial sequence
  Protein classification predicting sequence
KAEETFGIRLTTIHNLHFLLKLMEDIRQAIREDRLLDFK

SEQ ID NO: 33582 - protein, 10 aa, Artificial sequence
  Protein classification predicting sequence
ILTDSGGFQV

SEQ ID NO: 33583 - protein, 32 aa, Artificial sequence
  Protein classification predicting sequence
ILTDSGGFQVYSLADSRNITEEGVTFKNHLNG

SEQ ID NO: 33584 - protein, 9 aa, Artificial sequence
  Protein classification predicting sequence
EMNAVLDFT

SEQ ID NO: 33585 - protein, 6 aa, Artificial sequence
  Protein classification predicting sequence
KNAKFA

SEQ ID NO: 33586 - protein, 6 aa, Artificial sequence
  Protein classification predicting sequence
MDFPGY

SEQ ID NO: 33587 - protein, 19 aa, Artificial sequence
  Protein classification predicting sequence
AEDFTPLDHDCDCYTCQNY

SEQ ID NO: 33588 - protein, 9 aa, Artificial sequence
  Protein classification predicting sequence
CDCYTCQNY

SEQ ID NO: 33589 - protein, 41 aa, Artificial sequence
  Protein classification predicting sequence
EKHTGARLGEIITPHGTFPTPMFMPVGTQATVKTQSPEELK

SEQ ID NO: 33590 - protein, 10 aa, Artificial sequence
  Protein classification predicting sequence
GGLHKFMNWD

SEQ ID NO: 33591 - protein, 22 aa, Artificial sequence
  Protein classification predicting sequence
GGLHKFMNWDQPILTDSGGFQV

SEQ ID NO: 33592 - protein, 23 aa, Artificial sequence
  Protein classification predicting sequence
RHLLKADETFGIRLTSYHNLYFL

SEQ ID NO: 33593 - protein, 10 aa, Artificial sequence
  Protein classification predicting sequence
NTYHLWLRPG

SEQ ID NO: 33594 - protein, 17 aa, Artificial sequence
  Protein classification predicting sequence
DCVLPTRIARNGTCMTS

SEQ ID NO: 33595 - protein, 6 aa, Artificial sequence
  Protein classification predicting sequence
FDECPP

SEQ ID NO: 33596 - protein, 6 aa, Artificial sequence
  Protein classification predicting sequence
DLFDCV

SEQ ID NO: 33597 - protein, 7 aa, Artificial sequence
  Protein classification predicting sequence
RWNLKNA

SEQ ID NO: 33598 - protein, 6 aa, Artificial sequence
  Protein classification predicting sequence
IQNALG

SEQ ID NO: 33599 - protein, 8 aa, Artificial sequence
  Protein classification predicting sequence
AHERPQDQ

SEQ ID NO: 33600 - protein, 12 aa, Artificial sequence
  Protein classification predicting sequence
LTDSGGFQVFSL

SEQ ID NO: 33601 - protein, 6 aa, Artificial sequence
  Protein classification predicting sequence
CPPYPA

SEQ ID NO: 33602 - protein, 7 aa, Artificial sequence
  Protein classification predicting sequence
PEDKPRY

SEQ ID NO: 33603 - protein, 6 aa, Artificial sequence
  Protein classification predicting sequence
PTRIAR

SEQ ID NO: 33604 - protein, 9 aa, Artificial sequence
  Protein classification predicting sequence
CDCYTCKNY

SEQ ID NO: 33605 - protein, 7 aa, Artificial sequence
  Protein classification predicting sequence
YHNLYFL

SEQ ID NO: 33606 - protein, 9 aa, Artificial sequence
  Protein classification predicting sequence
LRKITEEGV

SEQ ID NO: 33607 - protein, 8 aa, Artificial sequence
  Protein classification predicting sequence
SDIQMQLD

SEQ ID NO: 33608 - protein, 6 aa, Artificial sequence
  Protein classification predicting sequence
RNARNG

SEQ ID NO: 33609 - protein, 9 aa, Artificial sequence
  Protein classification predicting sequence
YTRAYLRHL

SEQ ID NO: 33610 - protein, 13 aa, Artificial sequence
  Protein classification predicting sequence
LKKKNGNARRGQL

SEQ ID NO: 33611 - protein, 21 aa, Artificial sequence
  Protein classification predicting sequence
TPAFMPVGTYGTVKGMTPEEV

SEQ ID NO: 33612 - protein, 7 aa, Artificial sequence
  Protein classification predicting sequence
EKSMEIQ

SEQ ID NO: 33613 - protein, 9 aa, Artificial sequence
  Protein classification predicting sequence
SMEMSLRWA

SEQ ID NO: 33614 - protein, 22 aa, Artificial sequence
  Protein classification predicting sequence
IGFDGYAVGGLAVGEPKEDMHR

SEQ ID NO: 33615 - protein, 6 aa, Artificial sequence
  Protein classification predicting sequence
GRARRG

SEQ ID NO: 33616 - protein, 16 aa, Artificial sequence
  Protein classification predicting sequence
ILLGNTFHLWLRPGQE

SEQ ID NO: 33617 - protein, 7 aa, Artificial sequence
  Protein classification predicting sequence
EKSMQIQ

SEQ ID NO: 33618 - protein, 8 aa, Artificial sequence
  Protein classification predicting sequence
IQYDLGSD

SEQ ID NO: 33619 - protein, 10 aa, Artificial sequence
  Protein classification predicting sequence
HGDLHDFMNW

SEQ ID NO: 33620 - protein, 45 aa, Artificial sequence
  Protein classification predicting sequence
GVHFRNPVNGDKIFMDAEKSMEIQKDLGSDIVMIFDECTPYPATH

SEQ ID NO: 33621 - protein, 10 aa, Artificial sequence
  Protein classification predicting sequence
NYSKSYLHHL

SEQ ID NO: 33622 - protein, 23 aa, Artificial sequence
  Protein classification predicting sequence
RCNEILGARLNTIHNLRYYQRLM

SEQ ID NO: 33623 - protein, 26 aa, Artificial sequence
  Protein classification predicting sequence
TPAFMPVGTYGTVKGMTPEEVKETGA

SEQ ID NO: 33624 - protein, 9 aa, Artificial sequence
  Protein classification predicting sequence
SIERTTRWA

SEQ ID NO: 33625 - protein, 7 aa, Artificial sequence
  Protein classification predicting sequence
IHNLRYY

SEQ ID NO: 33626 - protein, 17 aa, Artificial sequence
  Protein classification predicting sequence
WDGPILTDSGGFQVFSL

SEQ ID NO: 33627 - protein, 8 aa, Artificial sequence
  Protein classification predicting sequence
PRYLMGVG

SEQ ID NO: 33628 - protein, 11 aa, Artificial sequence
  Protein classification predicting sequence
TPAFMPVGTYG

SEQ ID NO: 33629 - protein, 21 aa, Artificial sequence
  Protein classification predicting sequence
GPILTDSGGFQVFSLAHRRKI

SEQ ID NO: 33630 - protein, 9 aa, Artificial sequence
  Protein classification predicting sequence
QGGVHPDLR

SEQ ID NO: 33631 - protein, 6 aa, Artificial sequence
  Protein classification predicting sequence
VKIRNA

SEQ ID NO: 33632 - protein, 24 aa, Artificial sequence
  Protein classification predicting sequence
SVKGLVDIGFDGYAVGGLAVGEPK

SEQ ID NO: 33633 - protein, 7 aa, Artificial sequence
  Protein classification predicting sequence
EEGVTFK

SEQ ID NO: 33634 - protein, 12 aa, Artificial sequence
  Protein classification predicting sequence
PTRSGRNGQAFT

SEQ ID NO: 33635 - protein, 10 aa, Artificial sequence
  Protein classification predicting sequence
NKVCASGMKA

SEQ ID NO: 33636 - protein, 6 aa, Artificial sequence
  Protein classification predicting sequence
GCTFSA

SEQ ID NO: 33637 - protein, 8 aa, Artificial sequence
  Protein classification predicting sequence
VMLAKSGD

SEQ ID NO: 33638 - protein, 8 aa, Artificial sequence
  Protein classification predicting sequence
GGAGIQAD

SEQ ID NO: 33639 - protein, 9 aa, Artificial sequence
  Protein classification predicting sequence
DIAKDYLFT

SEQ ID NO: 33640 - protein, 6 aa, Artificial sequence
  Protein classification predicting sequence
HVGQDD

SEQ ID NO: 33641 - protein, 7 aa, Artificial sequence
  Protein classification predicting sequence
ADGVHLG

SEQ ID NO: 33642 - protein, 7 aa, Artificial sequence
  Protein classification predicting sequence
DYIGVGP

SEQ ID NO: 33643 - protein, 8 aa, Artificial sequence
  Protein classification predicting sequence
PIVGIGGI

SEQ ID NO: 33644 - protein, 8 aa, Artificial sequence
  Protein classification predicting sequence
ALAVDADG

SEQ ID NO: 33645 - protein, 6 aa, Artificial sequence
  Protein classification predicting sequence
GPIYPT

SEQ ID NO: 33646 - protein, 6 aa, Artificial sequence
  Protein classification predicting sequence
LQYRDK

SEQ ID NO: 33647 - protein, 52 aa, Artificial sequence
  Protein classification predicting sequence
RDEEVEADVVAAIALGRRYNARLFINDYWRLAIKHQAYGVHLGQEDLQATDL

SEQ ID NO: 33648 - protein, 10 aa, Artificial sequence
  Protein classification predicting sequence
DANLDRAREG

SEQ ID NO: 33649 - protein, 7 aa, Artificial sequence
  Protein classification predicting sequence
ADGIHVG

SEQ ID NO: 33650 - protein, 7 aa, Artificial sequence
  Protein classification predicting sequence
WLQYRNK

SEQ ID NO: 33651 - protein, 7 aa, Artificial sequence
  Protein classification predicting sequence
FQYREKG

SEQ ID NO: 33652 - protein, 8 aa, Artificial sequence
  Protein classification predicting sequence
YFIAGTQD

SEQ ID NO: 33653 - protein, 7 aa, Artificial sequence
  Protein classification predicting sequence
PIVAIGG

SEQ ID NO: 33654 - protein, 8 aa, Artificial sequence
  Protein classification predicting sequence
PWFAIGGI

SEQ ID NO: 33655 - protein, 9 aa, Artificial sequence
  Protein classification predicting sequence
INDYWRLAI

SEQ ID NO: 33656 - protein, 14 aa, Artificial sequence
  Protein classification predicting sequence
VPFRLGLYPVVDSV

SEQ ID NO: 33657 - protein, 9 aa, Artificial sequence
  Protein classification predicting sequence
RDEEVEADV

SEQ ID NO: 33658 - protein, 15 aa, Artificial sequence
  Protein classification predicting sequence
ARLFINDYWRLAIKH

SEQ ID NO: 33659 - protein, 17 aa, Artificial sequence
  Protein classification predicting sequence
AAGLRLGVSTHDDMEID

SEQ ID NO: 33660 - protein, 24 aa, Artificial sequence
  Protein classification predicting sequence
PSYIALGHVFPTQTKQMPSAPQGL

SEQ ID NO: 33661 - protein, 20 aa, Artificial sequence
  Protein classification predicting sequence
ATGVGSIAVVSAITQAADWR

SEQ ID NO: 33662 - protein, 34 aa, Artificial sequence
  Protein classification predicting sequence
SISDLDEYAKSDLTHVDYIGVGPIYPTPSKHDAH

SEQ ID NO: 33663 - protein, 27 aa, Artificial sequence
  Protein classification predicting sequence
PVGPEMIATFKEMNPQLPIVAIGGINT

SEQ ID NO: 33664 - protein, 10 aa, Artificial sequence
  Protein classification predicting sequence
ADGVSVISAI

SEQ ID NO: 33665 - protein, 7 aa, Artificial sequence
  Protein classification predicting sequence
VYFICGT

SEQ ID NO: 33666 - protein, 7 aa, Artificial sequence
  Protein classification predicting sequence
YQVPFII

SEQ ID NO: 33667 - protein, 7 aa, Artificial sequence
  Protein classification predicting sequence
ADGVHIG

SEQ ID NO: 33668 - protein, 8 aa, Artificial sequence
  Protein classification predicting sequence
GADYVAFG

SEQ ID NO: 33669 - protein, 7 aa, Artificial sequence
  Protein classification predicting sequence
TLQLRIK

SEQ ID NO: 33670 - protein, 9 aa, Artificial sequence
  Protein classification predicting sequence
ARLFINDYW

SEQ ID NO: 33671 - protein, 10 aa, Artificial sequence
  Protein classification predicting sequence
FPTQTKQMPS

SEQ ID NO: 33672 - protein, 11 aa, Artificial sequence
  Protein classification predicting sequence
DYPTVAIGGIS

SEQ ID NO: 33673 - protein, 10 aa, Artificial sequence
  Protein classification predicting sequence
PMGITSENVA

SEQ ID NO: 33674 - protein, 8 aa, Artificial sequence
  Protein classification predicting sequence
TTAGNSSQ

SEQ ID NO: 33675 - protein, 7 aa, Artificial sequence
  Protein classification predicting sequence
GLPILGV

SEQ ID NO: 33676 - protein, 8 aa, Artificial sequence
  Protein classification predicting sequence
GVVSMCIG

SEQ ID NO: 33677 - protein, 9 aa, Artificial sequence
  Protein classification predicting sequence
GMGAAAVFE

SEQ ID NO: 33678 - protein, 8 aa, Artificial sequence
  Protein classification predicting sequence
CLIPMGIT

SEQ ID NO: 33679 - protein, 18 aa, Artificial sequence
  Protein classification predicting sequence
TTPDELLSAVLTAVLQDV

SEQ ID NO: 33680 - protein, 13 aa, Artificial sequence
  Protein classification predicting sequence
VNRQCSSGLQAVA

SEQ ID NO: 33681 - protein, 8 aa, Artificial sequence
  Protein classification predicting sequence
NNPLTRDE

SEQ ID NO: 33682 - protein, 9 aa, Artificial sequence
  Protein classification predicting sequence
RLQVVLGHL

SEQ ID NO: 33683 - protein, 10 aa, Artificial sequence
  Protein classification predicting sequence
DVVVVHGRRT

SEQ ID NO: 33684 - protein, 9 aa, Artificial sequence
  Protein classification predicting sequence
MARIAQFLS

SEQ ID NO: 33685 - protein, 10 aa, Artificial sequence
  Protein classification predicting sequence
FALASQQKAA

SEQ ID NO: 33686 - protein, 10 aa, Artificial sequence
  Protein classification predicting sequence
AEIVPVTTTV

SEQ ID NO: 33687 - protein, 9 aa, Artificial sequence
  Protein classification predicting sequence
EKVNPLGGA

SEQ ID NO: 33688 - protein, 10 aa, Artificial sequence
  Protein classification predicting sequence
TLLNELKRRG

SEQ ID NO: 33689 - protein, 22 aa, Artificial sequence
  Protein classification predicting sequence
LIDWEYAGDGDIALELAAVWVE

SEQ ID NO: 33690 - protein, 8 aa, Artificial sequence
  Protein classification predicting sequence
QQFIRLAD

SEQ ID NO: 33691 - protein, 11 aa, Artificial sequence
  Protein classification predicting sequence
LHQQPRFGWRI

SEQ ID NO: 33692 - protein, 8 aa, Artificial sequence
  Protein classification predicting sequence
NRQCSSGL

SEQ ID NO: 33693 - protein, 11 aa, Artificial sequence
  Protein classification predicting sequence
SMCIGTGMGAA

SEQ ID NO: 33694 - protein, 7 aa, Artificial sequence
  Protein classification predicting sequence
GQNPARQ

SEQ ID NO: 33695 - protein, 8 aa, Artificial sequence
  Protein classification predicting sequence
GHPIGASG

SEQ ID NO: 33696 - protein, 10 aa, Artificial sequence
  Protein classification predicting sequence
NLSDLAAMGA

SEQ ID NO: 33697 - protein, 7 aa, Artificial sequence
  Protein classification predicting sequence
NEAFSVV

SEQ ID NO: 33698 - protein, 8 aa, Artificial sequence
  Protein classification predicting sequence
VIVSAART

SEQ ID NO: 33699 - protein, 8 aa, Artificial sequence
  Protein classification predicting sequence
RDAKKGLA

SEQ ID NO: 33700 - protein, 8 aa, Artificial sequence
  Protein classification predicting sequence
EVILGQVL

SEQ ID NO: 33701 - protein, 9 aa, Artificial sequence
  Protein classification predicting sequence
VAGGMESMS

SEQ ID NO: 33702 - protein, 6 aa, Artificial sequence
  Protein classification predicting sequence
NKVCAS

SEQ ID NO: 33703 - protein, 6 aa, Artificial sequence
  Protein classification predicting sequence
TINKVC

SEQ ID NO: 33704 - protein, 10 aa, Artificial sequence
  Protein classification predicting sequence
GHPIGASGAR

SEQ ID NO: 33705 - protein, 8 aa, Artificial sequence
  Protein classification predicting sequence
LINIGTLT

SEQ ID NO: 33706 - protein, 7 aa, Artificial sequence
  Protein classification predicting sequence
GNAGELA

SEQ ID NO: 33707 - protein, 7 aa, Artificial sequence
  Protein classification predicting sequence
GASPAMS

SEQ ID NO: 33708 - protein, 8 aa, Artificial sequence
  Protein classification predicting sequence
PLVHNITN

SEQ ID NO: 33709 - protein, 8 aa, Artificial sequence
  Protein classification predicting sequence
DPVGAGAT

SEQ ID NO: 33710 - protein, 6 aa, Artificial sequence
  Protein classification predicting sequence
INIGTL

SEQ ID NO: 33711 - protein, 8 aa, Artificial sequence
  Protein classification predicting sequence
LDPVGVGA

SEQ ID NO: 33712 - protein, 7 aa, Artificial sequence
  Protein classification predicting sequence
GASPVMA

SEQ ID NO: 33713 - protein, 6 aa, Artificial sequence
  Protein classification predicting sequence
GNASEI

SEQ ID NO: 33714 - protein, 32 aa, Artificial sequence
  Protein classification predicting sequence
GIHGGDPLMTKVVGTGCALSAVVAACCALPGD

SEQ ID NO: 33715 - protein, 35 aa, Artificial sequence
  Protein classification predicting sequence
ASACHWMKQAGERAVARSEGPGSFVPHFLDALWQL

SEQ ID NO: 33716 - protein, 14 aa, Artificial sequence
  Protein classification predicting sequence
IRGNAGELAAIAGE

SEQ ID NO: 33717 - protein, 8 aa, Artificial sequence
  Protein classification predicting sequence
GCDPSIMG

SEQ ID NO: 33718 - protein, 7 aa, Artificial sequence
  Protein classification predicting sequence
PVVLDPV

SEQ ID NO: 33719 - protein, 7 aa, Artificial sequence
  Protein classification predicting sequence
LLINIGT

SEQ ID NO: 33720 - protein, 8 aa, Artificial sequence
  Protein classification predicting sequence
LLALGASP

SEQ ID NO: 33721 - protein, 27 aa, Artificial sequence
  Protein classification predicting sequence
HCMTNDVVQTFTANTLLALGASPAMVI

SEQ ID NO: 33722 - protein, 10 aa, Artificial sequence
  Protein classification predicting sequence
ALLINVGTLT

SEQ ID NO: 33723 - protein, 8 aa, Artificial sequence
  Protein classification predicting sequence
GGRGVDTT

SEQ ID NO: 33724 - protein, 13 aa, Artificial sequence
  Protein classification predicting sequence
VGTGCALSAVVAA

SEQ ID NO: 33725 - protein, 24 aa, Artificial sequence
  Protein classification predicting sequence
KAIVLANGSPLLARVTGAGCLLGG

SEQ ID NO: 33726 - protein, 18 aa, Artificial sequence
  Protein classification predicting sequence
ICYTNDVVKNFTANGLLS

SEQ ID NO: 33727 - protein, 10 aa, Artificial sequence
  Protein classification predicting sequence
VFDPVAVGAS

SEQ ID NO: 33728 - protein, 24 aa, Artificial sequence
  Protein classification predicting sequence
VIKGNASEILALIDDTATMKGTDS

SEQ ID NO: 33729 - protein, 7 aa, Artificial sequence
  Protein classification predicting sequence
LIEAVSV

SEQ ID NO: 33730 - protein, 14 aa, Artificial sequence
  Protein classification predicting sequence
GASPAMSEAPEEAE

SEQ ID NO: 33731 - protein, 16 aa, Artificial sequence
  Protein classification predicting sequence
PIVFDPVAVGASTYRK

SEQ ID NO: 33732 - protein, 8 aa, Artificial sequence
  Protein classification predicting sequence
TAIVITGK

SEQ ID NO: 33733 - protein, 8 aa, Artificial sequence
  Protein classification predicting sequence
GASPAMSE

SEQ ID NO: 33734 - protein, 13 aa, Artificial sequence
  Protein classification predicting sequence
TNDVVKNFTANGL

SEQ ID NO: 33735 - protein, 7 aa, Artificial sequence
  Protein classification predicting sequence
VVTGEVD

SEQ ID NO: 33736 - protein, 7 aa, Artificial sequence
  Protein classification predicting sequence
VSVIKGN

SEQ ID NO: 33737 - protein, 12 aa, Artificial sequence
  Protein classification predicting sequence
SNDTHVVVYDGD

SEQ ID NO: 33738 - protein, 8 aa, Artificial sequence
  Protein classification predicting sequence
THVVVYDG

SEQ ID NO: 33739 - protein, 7 aa, Artificial sequence
  Protein classification predicting sequence
HQLVRHR

SEQ ID NO: 33740 - protein, 8 aa, Artificial sequence
  Protein classification predicting sequence
VLDKGFVR

SEQ ID NO: 33741 - protein, 8 aa, Artificial sequence
  Protein classification predicting sequence
PFEMCEIK

SEQ ID NO: 33742 - protein, 8 aa, Artificial sequence
  Protein classification predicting sequence
NEYSARYS

SEQ ID NO: 33743 - protein, 6 aa, Artificial sequence
  Protein classification predicting sequence
FVARQW

SEQ ID NO: 33744 - protein, 8 aa, Artificial sequence
  Protein classification predicting sequence
PIFVARQW

SEQ ID NO: 33745 - protein, 8 aa, Artificial sequence
  Protein classification predicting sequence
NARSLMNF

SEQ ID NO: 33746 - protein, 11 aa, Artificial sequence
  Protein classification predicting sequence
ALVEFAGRACY

SEQ ID NO: 33747 - protein, 7 aa, Artificial sequence
  Protein classification predicting sequence
RIVVTGN

SEQ ID NO: 33748 - protein, 7 aa, Artificial sequence
  Protein classification predicting sequence
RAWRHFI

SEQ ID NO: 33749 - protein, 8 aa, Artificial sequence
  Protein classification predicting sequence
EHADVEIR

SEQ ID NO: 33750 - protein, 16 aa, Artificial sequence
  Protein classification predicting sequence
KQARQAARAVLPNATE

SEQ ID NO: 33751 - protein, 8 aa, Artificial sequence
  Protein classification predicting sequence
SQQSQRYV

SEQ ID NO: 33752 - protein, 6 aa, Artificial sequence
  Protein classification predicting sequence
IVVTMN

SEQ ID NO: 33753 - protein, 10 aa, Artificial sequence
  Protein classification predicting sequence
IKFHIKLPIF

SEQ ID NO: 33754 - protein, 13 aa, Artificial sequence
  Protein classification predicting sequence
LTLNYYTEWYWKI

SEQ ID NO: 33755 - protein, 8 aa, Artificial sequence
  Protein classification predicting sequence
VTMNAREL

SEQ ID NO: 33756 - protein, 9 aa, Artificial sequence
  Protein classification predicting sequence
CERAQWEIR

SEQ ID NO: 33757 - protein, 7 aa, Artificial sequence
  Protein classification predicting sequence
RAQWEIR

SEQ ID NO: 33758 - protein, 7 aa, Artificial sequence
  Protein classification predicting sequence
AFEEYRL

SEQ ID NO: 33759 - protein, 6 aa, Artificial sequence
  Protein classification predicting sequence
RHRIAS

SEQ ID NO: 33760 - protein, 19 aa, Artificial sequence
  Protein classification predicting sequence
ALVEFAGRACYQSWSKPNP

SEQ ID NO: 33761 - protein, 11 aa, Artificial sequence
  Protein classification predicting sequence
VLEHASVSFYI

SEQ ID NO: 33762 - protein, 34 aa, Artificial sequence
  Protein classification predicting sequence
ETRIVVTGNYRAWRHFIAMRASEHADVEIRRLAI

SEQ ID NO: 33763 - protein, 8 aa, Artificial sequence
  Protein classification predicting sequence
IEGCSRVC

SEQ ID NO: 33764 - protein, 8 aa, Artificial sequence
  Protein classification predicting sequence
QAARVSYG

SEQ ID NO: 33765 - protein, 7 aa, Artificial sequence
  Protein classification predicting sequence
KGLINYL

SEQ ID NO: 33766 - protein, 9 aa, Artificial sequence
  Protein classification predicting sequence
RHRTASVNE

SEQ ID NO: 33767 - protein, 9 aa, Artificial sequence
  Protein classification predicting sequence
DLHNLFHFL

SEQ ID NO: 33768 - protein, 6 aa, Artificial sequence
  Protein classification predicting sequence
ARVSYG

SEQ ID NO: 33769 - protein, 7 aa, Artificial sequence
  Protein classification predicting sequence
CEFCLKY

SEQ ID NO: 33770 - protein, 10 aa, Artificial sequence
  Protein classification predicting sequence
FLDHKTLYYD

SEQ ID NO: 33771 - protein, 9 aa, Artificial sequence
  Protein classification predicting sequence
PFLFYVMTE

SEQ ID NO: 33772 - protein, 7 aa, Artificial sequence
  Protein classification predicting sequence
ANSGHPG

SEQ ID NO: 33773 - protein, 6 aa, Artificial sequence
  Protein classification predicting sequence
LKQFRQ

SEQ ID NO: 33774 - protein, 10 aa, Artificial sequence
  Protein classification predicting sequence
FVGDGCLMEG

SEQ ID NO: 33775 - protein, 8 aa, Artificial sequence
  Protein classification predicting sequence
GDGCLMEG

SEQ ID NO: 33776 - protein, 7 aa, Artificial sequence
  Protein classification predicting sequence
RYRAYGW

SEQ ID NO: 33777 - protein, 6 aa, Artificial sequence
  Protein classification predicting sequence
AIMNGI

SEQ ID NO: 33778 - protein, 7 aa, Artificial sequence
  Protein classification predicting sequence
RPADGNE

SEQ ID NO: 33779 - protein, 7 aa, Artificial sequence
  Protein classification predicting sequence
LTRQNLP

SEQ ID NO: 33780 - protein, 6 aa, Artificial sequence
  Protein classification predicting sequence
GHGSML

SEQ ID NO: 33781 - protein, 8 aa, Artificial sequence
  Protein classification predicting sequence
SKTPGHPE

SEQ ID NO: 33782 - protein, 7 aa, Artificial sequence
  Protein classification predicting sequence
ISIDGHV

SEQ ID NO: 33783 - protein, 8 aa, Artificial sequence
  Protein classification predicting sequence
IGFGSPNK

SEQ ID NO: 33784 - protein, 10 aa, Artificial sequence
  Protein classification predicting sequence
SNLTLWSGSK

SEQ ID NO: 33785 - protein, 7 aa, Artificial sequence
  Protein classification predicting sequence
ARGGYVL

SEQ ID NO: 33786 - protein, 14 aa, Artificial sequence
  Protein classification predicting sequence
FDKQDAAYRESVLP

SEQ ID NO: 33787 - protein, 7 aa, Artificial sequence
  Protein classification predicting sequence
LLYSLLH

SEQ ID NO: 33788 - protein, 10 aa, Artificial sequence
  Protein classification predicting sequence
TYVFLGDGCL

SEQ ID NO: 33789 - protein, 8 aa, Artificial sequence
  Protein classification predicting sequence
LIAFYDDN

SEQ ID NO: 33790 - protein, 7 aa, Artificial sequence
  Protein classification predicting sequence
TKRVAIE

SEQ ID NO: 33791 - protein, 14 aa, Artificial sequence
  Protein classification predicting sequence
MNGIALHGGFIPYG

SEQ ID NO: 33792 - protein, 11 aa, Artificial sequence
  Protein classification predicting sequence
GEDGPTHQPIE

SEQ ID NO: 33793 - protein, 7 aa, Artificial sequence
  Protein classification predicting sequence
SGHPGAP

SEQ ID NO: 33794 - protein, 20 aa, Artificial sequence
  Protein classification predicting sequence
TPGVETTTGPLGQGLANAVG

SEQ ID NO: 33795 - protein, 13 aa, Artificial sequence
  Protein classification predicting sequence
CSLAGTLGLGKLI

SEQ ID NO: 33796 - protein, 11 aa, Artificial sequence
  Protein classification predicting sequence
LPELLGGSADL

SEQ ID NO: 33797 - protein, 9 aa, Artificial sequence
  Protein classification predicting sequence
TWRPCDQVE

SEQ ID NO: 33798 - protein, 12 aa, Artificial sequence
  Protein classification predicting sequence
ACGMAYTGKYFD

SEQ ID NO: 33799 - protein, 7 aa, Artificial sequence
  Protein classification predicting sequence
RCEAFGW

SEQ ID NO: 33800 - protein, 8 aa, Artificial sequence
  Protein classification predicting sequence
AKTFKGRG

SEQ ID NO: 33801 - protein, 7 aa, Artificial sequence
  Protein classification predicting sequence
STFSEIF

SEQ ID NO: 33802 - protein, 7 aa, Artificial sequence
  Protein classification predicting sequence
AEQNMVS

SEQ ID NO: 33803 - protein, 7 aa, Artificial sequence
  Protein classification predicting sequence
GSHCGVS

SEQ ID NO: 33804 - protein, 6 aa, Artificial sequence
  Protein classification predicting sequence
EGISHE

SEQ ID NO: 33805 - protein, 15 aa, Artificial sequence
  Protein classification predicting sequence
KSVNTIRFLAIDAVE

SEQ ID NO: 33806 - protein, 8 aa, Artificial sequence
  Protein classification predicting sequence
RQWGSKTP

SEQ ID NO: 33807 - protein, 6 aa, Artificial sequence
  Protein classification predicting sequence
VDHYTY

SEQ ID NO: 33808 - protein, 9 aa, Artificial sequence
  Protein classification predicting sequence
MLQYALLHL

SEQ ID NO: 33809 - protein, 18 aa, Artificial sequence
  Protein classification predicting sequence
IVDHHTYVFLGDGCLMEG

SEQ ID NO: 33810 - protein, 11 aa, Artificial sequence
  Protein classification predicting sequence
SHEACSLAGTL

SEQ ID NO: 33811 - protein, 8 aa, Artificial sequence
  Protein classification predicting sequence
YGVREFGM

SEQ ID NO: 33812 - protein, 7 aa, Artificial sequence
  Protein classification predicting sequence
EVCSLAG

SEQ ID NO: 33813 - protein, 6 aa, Artificial sequence
  Protein classification predicting sequence
ATFFVF

SEQ ID NO: 33814 - protein, 9 aa, Artificial sequence
  Protein classification predicting sequence
MNGIALHGG

SEQ ID NO: 33815 - protein, 7 aa, Artificial sequence
  Protein classification predicting sequence
FGESAPA

SEQ ID NO: 33816 - protein, 9 aa, Artificial sequence
  Protein classification predicting sequence
VVRPADANE

SEQ ID NO: 33817 - protein, 6 aa, Artificial sequence
  Protein classification predicting sequence
WYKYVG

SEQ ID NO: 33818 - protein, 8 aa, Artificial sequence
  Protein classification predicting sequence
PMGAAPMA

SEQ ID NO: 33819 - protein, 11 aa, Artificial sequence
  Protein classification predicting sequence
LYDSNDISLDG

SEQ ID NO: 33820 - protein, 7 aa, Artificial sequence
  Protein classification predicting sequence
GGSADLA

SEQ ID NO: 33821 - protein, 17 aa, Artificial sequence
  Protein classification predicting sequence
FTHDSIAVGEDGPTHEP

SEQ ID NO: 33822 - protein, 13 aa, Artificial sequence
  Protein classification predicting sequence
PMGAAPMAYTLWT

SEQ ID NO: 33823 - protein, 8 aa, Artificial sequence
  Protein classification predicting sequence
DLSIEDLK

SEQ ID NO: 33824 - protein, 7 aa, Artificial sequence
  Protein classification predicting sequence
IGFGSPN

SEQ ID NO: 33825 - protein, 12 aa, Artificial sequence
  Protein classification predicting sequence
WFGVREFAMGAA

SEQ ID NO: 33826 - protein, 9 aa, Artificial sequence
  Protein classification predicting sequence
TFFVFSDYL

SEQ ID NO: 33827 - protein, 8 aa, Artificial sequence
  Protein classification predicting sequence
ELLNLRKI

SEQ ID NO: 33828 - protein, 16 aa, Artificial sequence
  Protein classification predicting sequence
IVDGHSVEELCKAFGQ

SEQ ID NO: 33829 - protein, 8 aa, Artificial sequence
  Protein classification predicting sequence
GQAKVVLK

SEQ ID NO: 33830 - protein, 21 aa, Artificial sequence
  Protein classification predicting sequence
KDDQVTVIGAGVTLHEALAAA

SEQ ID NO: 33831 - protein, 30 aa, Artificial sequence
  Protein classification predicting sequence
KLILDSARATKGRILTVEDHYYEGGIGEAV

SEQ ID NO: 33832 - protein, 9 aa, Artificial sequence
  Protein classification predicting sequence
IASRKASQN

SEQ ID NO: 33833 - protein, 13 aa, Artificial sequence
  Protein classification predicting sequence
FRQLHSKTPGHPE

SEQ ID NO: 33834 - protein, 6 aa, Artificial sequence
  Protein classification predicting sequence
WFTDDT

SEQ ID NO: 33835 - protein, 9 aa, Artificial sequence
  Protein classification predicting sequence
RKASQNAIE

SEQ ID NO: 33836 - protein, 6 aa, Artificial sequence
  Protein classification predicting sequence
DFWYKY

SEQ ID NO: 33837 - protein, 11 aa, Artificial sequence
  Protein classification predicting sequence
LPELIGGSADL

SEQ ID NO: 33838 - protein, 12 aa, Artificial sequence
  Protein classification predicting sequence
HYGVREFGMTAI

SEQ ID NO: 33839 - protein, 7 aa, Artificial sequence
  Protein classification predicting sequence
VRVVSMP

SEQ ID NO: 33840 - protein, 31 aa, Artificial sequence
  Protein classification predicting sequence
VQKAKSGHPGAPMGMADIAEVLWRDFLKHNP

SEQ ID NO: 33841 - protein, 7 aa, Artificial sequence
  Protein classification predicting sequence
RFEAYGW

SEQ ID NO: 33842 - protein, 12 aa, Artificial sequence
  Protein classification predicting sequence
SEGSVWEAMAFA

SEQ ID NO: 33843 - protein, 10 aa, Artificial sequence
  Protein classification predicting sequence
IYKLDNLVAI

SEQ ID NO: 33844 - protein, 16 aa, Artificial sequence
  Protein classification predicting sequence
DINRLGQSDPAPLQHQ

SEQ ID NO: 33845 - protein, 37 aa, Artificial sequence
  Protein classification predicting sequence
IIVDGHSVEELCKAFGQAKHQPTAIIAKTFKGRGITG

SEQ ID NO: 33846 - protein, 10 aa, Artificial sequence
  Protein classification predicting sequence
GGSADLAGSN

SEQ ID NO: 33847 - protein, 6 aa, Artificial sequence
  Protein classification predicting sequence
DHYTYV

SEQ ID NO: 33848 - protein, 8 aa, Artificial sequence
  Protein classification predicting sequence
KESWHGKP

SEQ ID NO: 33849 - protein, 26 aa, Artificial sequence
  Protein classification predicting sequence
QSKKKILATPPQEDAPSVDIANIRMP

SEQ ID NO: 33850 - protein, 14 aa, Artificial sequence
  Protein classification predicting sequence
YKVGDKIATRKAYG

SEQ ID NO: 33851 - protein, 12 aa, Artificial sequence
  Protein classification predicting sequence
RVLDPFTIKPLD

SEQ ID NO: 33852 - protein, 6 aa, Artificial sequence
  Protein classification predicting sequence
RVVSMP

SEQ ID NO: 33853 - protein, 7 aa, Artificial sequence
  Protein classification predicting sequence
ANAIRAL

SEQ ID NO: 33854 - protein, 7 aa, Artificial sequence
  Protein classification predicting sequence
HGAPLGE

SEQ ID NO: 33855 - protein, 80 aa, Artificial sequence
  Protein classification predicting sequence
ERKLTFENYGLDPEKRFNVSEEVYEIFQNTMLKRANEDESQWNSLLEKYAETYPELAEEFKLAISGKLPKNYKDELPRFE

SEQ ID NO: 33856 - protein, 35 aa, Artificial sequence
  Protein classification predicting sequence
IEKANSGHPGLPMGAAPMAYTLWTRHLNFNPQSKD

SEQ ID NO: 33857 - protein, 63 aa, Artificial sequence
  Protein classification predicting sequence
LSAGHGSALLYSLLHVSGSLELEELKQFRQWGSKTPGHPEYRHTDGVEVTTGPLGQGFAMSVG

SEQ ID NO: 33858 - protein, 8 aa, Artificial sequence
  Protein classification predicting sequence
HLAGKFNK

SEQ ID NO: 33859 - protein, 27 aa, Artificial sequence
  Protein classification predicting sequence
HYTYVLASDGDLMEGISHEAASFAGHN

SEQ ID NO: 33860 - protein, 11 aa, Artificial sequence
  Protein classification predicting sequence
YGLDPEKRFNV

SEQ ID NO: 33861 - protein, 8 aa, Artificial sequence
  Protein classification predicting sequence
TMLKRANE

SEQ ID NO: 33862 - protein, 11 aa, Artificial sequence
  Protein classification predicting sequence
YPELAEEFKLA

SEQ ID NO: 33863 - protein, 19 aa, Artificial sequence
  Protein classification predicting sequence
VPSFFGGSADLAGSNKSNV

SEQ ID NO: 33864 - protein, 19 aa, Artificial sequence
  Protein classification predicting sequence
TPEGKNVWFGVREFAMGAA

SEQ ID NO: 33865 - protein, 12 aa, Artificial sequence
  Protein classification predicting sequence
NGMAAHGGLHPY

SEQ ID NO: 33866 - protein, 23 aa, Artificial sequence
  Protein classification predicting sequence
ATFFVFSDYLKPALRLSSIMGLN

SEQ ID NO: 33867 - protein, 55 aa, Artificial sequence
  Protein classification predicting sequence
TFIFTHDSIAVGEDGPTHEPIEQLAGLRAIPNMNVIRPADGNETRVAWEVALESE

SEQ ID NO: 33868 - protein, 13 aa, Artificial sequence
  Protein classification predicting sequence
TPTSLVLTRQNLP

SEQ ID NO: 33869 - protein, 15 aa, Artificial sequence
  Protein classification predicting sequence
AIEMASPLGWHKYVG

SEQ ID NO: 33870 - protein, 22 aa, Artificial sequence
  Protein classification predicting sequence
FGASAPGDLVVEKYGFTKENIL

SEQ ID NO: 33871 - protein, 10 aa, Artificial sequence
  Protein classification predicting sequence
IRFLAIDAVE

SEQ ID NO: 33872 - protein, 12 aa, Artificial sequence
  Protein classification predicting sequence
GSEVSLAVEAAK

SEQ ID NO: 33873 - protein, 10 aa, Artificial sequence
  Protein classification predicting sequence
GNDLDFYLKQ

SEQ ID NO: 33874 - protein, 9 aa, Artificial sequence
  Protein classification predicting sequence
PIIHYDLKP

SEQ ID NO: 33875 - protein, 7 aa, Artificial sequence
  Protein classification predicting sequence
IKITDFG

SEQ ID NO: 33876 - protein, 12 aa, Artificial sequence
  Protein classification predicting sequence
IKITDFGLSKIM

SEQ ID NO: 33877 - protein, 10 aa, Artificial sequence
  Protein classification predicting sequence
AGTYWYLPPE

SEQ ID NO: 33878 - protein, 9 aa, Artificial sequence
  Protein classification predicting sequence
VHRDLATRN

SEQ ID NO: 33879 - protein, 7 aa, Artificial sequence
  Protein classification predicting sequence
PADRPSF

SEQ ID NO: 33880 - protein, 7 aa, Artificial sequence
  Protein classification predicting sequence
FHQEQGH

SEQ ID NO: 33881 - protein, 17 aa, Artificial sequence
  Protein classification predicting sequence
GIREFFAEQNLSYTEEP

SEQ ID NO: 33882 - protein, 9 aa, Artificial sequence
  Protein classification predicting sequence
GKSLDMVWL

SEQ ID NO: 33883 - protein, 8 aa, Artificial sequence
  Protein classification predicting sequence
YDRAALVA

SEQ ID NO: 33884 - protein, 10 aa, Artificial sequence
  Protein classification predicting sequence
EMKWFADRGH

SEQ ID NO: 33885 - protein, 8 aa, Artificial sequence
  Protein classification predicting sequence
VVGVEISE

SEQ ID NO: 33886 - protein, 10 aa, Artificial sequence
  Protein classification predicting sequence
IAVRSFFAEH

SEQ ID NO: 33887 - protein, 6 aa, Artificial sequence
  Protein classification predicting sequence
GPPFSV

SEQ ID NO: 33888 - protein, 6 aa, Artificial sequence
  Protein classification predicting sequence
VPLCGK

SEQ ID NO: 33889 - protein, 13 aa, Artificial sequence
  Protein classification predicting sequence
FHQEQGHQLLKKH

SEQ ID NO: 33890 - protein, 7 aa, Artificial sequence
  Protein classification predicting sequence
GPPFYVP

SEQ ID NO: 33891 - protein, 14 aa, Artificial sequence
  Protein classification predicting sequence
NQIGFHLEDVNPLL

SEQ ID NO: 33892 - protein, 8 aa, Artificial sequence
  Protein classification predicting sequence
VLVPLCGK

SEQ ID NO: 33893 - protein, 7 aa, Artificial sequence
  Protein classification predicting sequence
ANPPNYG

SEQ ID NO: 33894 - protein, 8 aa, Artificial sequence
  Protein classification predicting sequence
GAAQSLNG

SEQ ID NO: 33895 - protein, 8 aa, Artificial sequence
  Protein classification predicting sequence
GAFPIGID

SEQ ID NO: 33896 - protein, 18 aa, Artificial sequence
  Protein classification predicting sequence
FLHTPFPSSEIYRILPVR

SEQ ID NO: 33897 - protein, 7 aa, Artificial sequence
  Protein classification predicting sequence
QVAVPSR

SEQ ID NO: 33898 - protein, 6 aa, Artificial sequence
  Protein classification predicting sequence
FPIGID

SEQ ID NO: 33899 - protein, 39 aa, Artificial sequence
  Protein classification predicting sequence
PEWVGKVVLVQVAVPSRQDVEEYQNLRAVVNELVGRING

SEQ ID NO: 33900 - protein, 9 aa, Artificial sequence
  Protein classification predicting sequence
PIHFLHKSV

SEQ ID NO: 33901 - protein, 20 aa, Artificial sequence
  Protein classification predicting sequence
VEEYQNLRAVVNELVGRING

SEQ ID NO: 33902 - protein, 7 aa, Artificial sequence
  Protein classification predicting sequence
GKVVLVQ

SEQ ID NO: 33903 - protein, 13 aa, Artificial sequence
  Protein classification predicting sequence
RLDEAGVTDEVLD

SEQ ID NO: 33904 - protein, 12 aa, Artificial sequence
  Protein classification predicting sequence
ERSTDQVIKPVN

SEQ ID NO: 33905 - protein, 7 aa, Artificial sequence
  Protein classification predicting sequence
RDGMNLV

SEQ ID NO: 33906 - protein, 9 aa, Artificial sequence
  Protein classification predicting sequence
VSNRLPITI

SEQ ID NO: 33907 - protein, 13 aa, Artificial sequence
  Protein classification predicting sequence
HYNGFSNSILWPL

SEQ ID NO: 33908 - protein, 6 aa, Artificial sequence
  Protein classification predicting sequence
IGFFLH

SEQ ID NO: 33909 - protein, 9 aa, Artificial sequence
  Protein classification predicting sequence
VDRLDYIKG

SEQ ID NO: 33910 - protein, 6 aa, Artificial sequence
  Protein classification predicting sequence
PQKLHA

SEQ ID NO: 33911 - protein, 8 aa, Artificial sequence
  Protein classification predicting sequence
DANRLMAE

SEQ ID NO: 33912 - protein, 9 aa, Artificial sequence
  Protein classification predicting sequence
RYAAKYDLG

SEQ ID NO: 33913 - protein, 7 aa, Artificial sequence
  Protein classification predicting sequence
DHYFRAF

SEQ ID NO: 33914 - protein, 12 aa, Artificial sequence
  Protein classification predicting sequence
DALSATGIRGIR

SEQ ID NO: 33915 - protein, 10 aa, Artificial sequence
  Protein classification predicting sequence
RMRAEFRIWH

SEQ ID NO: 33916 - protein, 12 aa, Artificial sequence
  Protein classification predicting sequence
DLLELYCGNGNF

SEQ ID NO: 33917 - protein, 8 aa, Artificial sequence
  Protein classification predicting sequence
DLLELYCG

SEQ ID NO: 33918 - protein, 6 aa, Artificial sequence
  Protein classification predicting sequence
YISCNP

SEQ ID NO: 33919 - protein, 6 aa, Artificial sequence
  Protein classification predicting sequence
ALFDQF

SEQ ID NO: 33920 - protein, 14 aa, Artificial sequence
  Protein classification predicting sequence
LRHKLFQIDYLTTL

SEQ ID NO: 33921 - protein, 19 aa, Artificial sequence
  Protein classification predicting sequence
NQAVVSLLYHKKLDDEWRQ

SEQ ID NO: 33922 - protein, 22 aa, Artificial sequence
  Protein classification predicting sequence
VFRSPVSHYRMRAEFRIWHDGD

SEQ ID NO: 33923 - protein, 9 aa, Artificial sequence
  Protein classification predicting sequence
FPAASELIN

SEQ ID NO: 33924 - protein, 10 aa, Artificial sequence
  Protein classification predicting sequence
LIGRATKTKI

SEQ ID NO: 33925 - protein, 7 aa, Artificial sequence
  Protein classification predicting sequence
NVQIIRM

SEQ ID NO: 33926 - protein, 8 aa, Artificial sequence
  Protein classification predicting sequence
AEEFTQAM

SEQ ID NO: 33927 - protein, 10 aa, Artificial sequence
  Protein classification predicting sequence
RMRAEFRVWH

SEQ ID NO: 33928 - protein, 8 aa, Artificial sequence
  Protein classification predicting sequence
SLLYHKKL

SEQ ID NO: 33929 - protein, 10 aa, Artificial sequence
  Protein classification predicting sequence
NFRKVLATEI

SEQ ID NO: 33930 - protein, 11 aa, Artificial sequence
  Protein classification predicting sequence
YPRILYISCNP

SEQ ID NO: 33931 - protein, 11 aa, Artificial sequence
  Protein classification predicting sequence
ALFDQFPYTHH

SEQ ID NO: 33932 - protein, 7 aa, Artificial sequence
  Protein classification predicting sequence
YHIMFDQ

SEQ ID NO: 33933 - protein, 15 aa, Artificial sequence
  Protein classification predicting sequence
VLATEIAKPSVAAAQ

SEQ ID NO: 33934 - protein, 7 aa, Artificial sequence
  Protein classification predicting sequence
ALFDQFP

SEQ ID NO: 33935 - protein, 9 aa, Artificial sequence
  Protein classification predicting sequence
HYRMRAEFR

SEQ ID NO: 33936 - protein, 8 aa, Artificial sequence
  Protein classification predicting sequence
KLFQIDYL

SEQ ID NO: 33937 - protein, 6 aa, Artificial sequence
  Protein classification predicting sequence
KMLEWA

SEQ ID NO: 33938 - protein, 11 aa, Artificial sequence
  Protein classification predicting sequence
KMLEWAVDCTQ

SEQ ID NO: 33939 - protein, 7 aa, Artificial sequence
  Protein classification predicting sequence
PEVFRSP

SEQ ID NO: 33940 - protein, 6 aa, Artificial sequence
  Protein classification predicting sequence
VSLLYH

SEQ ID NO: 33941 - protein, 9 aa, Artificial sequence
  Protein classification predicting sequence
NFERVLATE

SEQ ID NO: 33942 - protein, 19 aa, Artificial sequence
  Protein classification predicting sequence
RVLATEIAKPSVAAAQYNI

SEQ ID NO: 33943 - protein, 19 aa, Artificial sequence
  Protein classification predicting sequence
LALFDQFPYTHHMECGVLL

SEQ ID NO: 33944 - protein, 29 aa, Artificial sequence
  Protein classification predicting sequence
MFNQETREKYRVDQFPAASRLINDLMPLL

SEQ ID NO: 33945 - protein, 7 aa, Artificial sequence
  Protein classification predicting sequence
LRHKLFQ

SEQ ID NO: 33946 - protein, 10 aa, Artificial sequence
  Protein classification predicting sequence
QVENSFTQPN

SEQ ID NO: 33947 - protein, 6 aa, Artificial sequence
  Protein classification predicting sequence
AQYNIA

SEQ ID NO: 33948 - protein, 9 aa, Artificial sequence
  Protein classification predicting sequence
GKREFRRLK

SEQ ID NO: 33949 - protein, 10 aa, Artificial sequence
  Protein classification predicting sequence
CNTIFVDPPR

SEQ ID NO: 33950 - protein, 8 aa, Artificial sequence
  Protein classification predicting sequence
TIFVDPPR

SEQ ID NO: 33951 - protein, 13 aa, Artificial sequence
  Protein classification predicting sequence
YRQPEGAFTQPNG

SEQ ID NO: 33952 - protein, 6 aa, Artificial sequence
  Protein classification predicting sequence
FVDPPR

SEQ ID NO: 33953 - protein, 11 aa, Artificial sequence
  Protein classification predicting sequence
RLRAEFRLWRE

SEQ ID NO: 33954 - protein, 10 aa, Artificial sequence
  Protein classification predicting sequence
THHMESGVLL

SEQ ID NO: 33955 - protein, 22 aa, Artificial sequence
  Protein classification predicting sequence
DDLLELYCGNGNFTLPLATRVR

SEQ ID NO: 33956 - protein, 10 aa, Artificial sequence
  Protein classification predicting sequence
RLQSMMAPFS

SEQ ID NO: 33957 - protein, 20 aa, Artificial sequence
  Protein classification predicting sequence
LVPEVFRSPVSHYRMRAEFR

SEQ ID NO: 33958 - protein, 12 aa, Artificial sequence
  Protein classification predicting sequence
FDQQTKSRIRVD

SEQ ID NO: 33959 - protein, 7 aa, Artificial sequence
  Protein classification predicting sequence
AMIAGVR

SEQ ID NO: 33960 - protein, 9 aa, Artificial sequence
  Protein classification predicting sequence
ALRDALRAQ

SEQ ID NO: 33961 - protein, 56 aa, Artificial sequence
  Protein classification predicting sequence
RVLATEIAKPSVAAAQYNIAANHIDNVQIIRMAAEEFTQAMNGVREFNRLQGIDLK

SEQ ID NO: 33962 - protein, 6 aa, Artificial sequence
  Protein classification predicting sequence
DDLYHI

SEQ ID NO: 33963 - protein, 10 aa, Artificial sequence
  Protein classification predicting sequence
QIIRMSAEEF

SEQ ID NO: 33964 - protein, 11 aa, Artificial sequence
  Protein classification predicting sequence
YRMRAEFRIWH

SEQ ID NO: 33965 - protein, 17 aa, Artificial sequence
  Protein classification predicting sequence
KVAEKMLEWAVDCTQES

SEQ ID NO: 33966 - protein, 8 aa, Artificial sequence
  Protein classification predicting sequence
AMEGKREF

SEQ ID NO: 33967 - protein, 18 aa, Artificial sequence
  Protein classification predicting sequence
GDLLELYCGNGNFSLALA

SEQ ID NO: 33968 - protein, 21 aa, Artificial sequence
  Protein classification predicting sequence
GDLLELYCGNGNFSLALARNF

SEQ ID NO: 33969 - protein, 5 aa, Artificial sequence
  Protein classification predicting sequence
FPDPW

SEQ ID NO: 33970 - protein, 7 aa, Artificial sequence
  Protein classification predicting sequence
TKFERRG

SEQ ID NO: 33971 - protein, 7 aa, Artificial sequence
  Protein classification predicting sequence
WPGTRYE

SEQ ID NO: 33972 - protein, 7 aa, Artificial sequence
  Protein classification predicting sequence
RQHVNPL

SEQ ID NO: 33973 - protein, 6 aa, Artificial sequence
  Protein classification predicting sequence
FFPDPW

SEQ ID NO: 33974 - protein, 10 aa, Artificial sequence
  Protein classification predicting sequence
NTADGYAPRP

SEQ ID NO: 33975 - protein, 7 aa, Artificial sequence
  Protein classification predicting sequence
RPLTKFE

SEQ ID NO: 33976 - protein, 7 aa, Artificial sequence
  Protein classification predicting sequence
NPHINYI

SEQ ID NO: 33977 - protein, 5 aa, Artificial sequence
  Protein classification predicting sequence
DPWPK

SEQ ID NO: 33978 - protein, 13 aa, Artificial sequence
  Protein classification predicting sequence
SLDLHNSDFEGNI

SEQ ID NO: 33979 - protein, 12 aa, Artificial sequence
  Protein classification predicting sequence
EGNIKTEYEEKF

SEQ ID NO: 33980 - protein, 7 aa, Artificial sequence
  Protein classification predicting sequence
TEYEEKF

SEQ ID NO: 33981 - protein, 8 aa, Artificial sequence
  Protein classification predicting sequence
TEYEEKFS

SEQ ID NO: 33982 - protein, 11 aa, Artificial sequence
  Protein classification predicting sequence
GKGQFISGMAK

SEQ ID NO: 33983 - protein, 9 aa, Artificial sequence
  Protein classification predicting sequence
NPDINYIGI

SEQ ID NO: 33984 - protein, 6 aa, Artificial sequence
  Protein classification predicting sequence
INYIGI

SEQ ID NO: 33985 - protein, 13 aa, Artificial sequence
  Protein classification predicting sequence
YLNFSDPWPKKRH

SEQ ID NO: 33986 - protein, 8 aa, Artificial sequence
  Protein classification predicting sequence
HEKRRLTY

SEQ ID NO: 33987 - protein, 13 aa, Artificial sequence
  Protein classification predicting sequence
EGNIMTEYEEKFS

SEQ ID NO: 33988 - protein, 6 aa, Artificial sequence
  Protein classification predicting sequence
HWKRRF

SEQ ID NO: 33989 - protein, 8 aa, Artificial sequence
  Protein classification predicting sequence
KKRHHKRR

SEQ ID NO: 33990 - protein, 7 aa, Artificial sequence
  Protein classification predicting sequence
NFLGIEV

SEQ ID NO: 33991 - protein, 7 aa, Artificial sequence
  Protein classification predicting sequence
FPDPWHK

SEQ ID NO: 33992 - protein, 9 aa, Artificial sequence
  Protein classification predicting sequence
ATDWADYAE

SEQ ID NO: 33993 - protein, 7 aa, Artificial sequence
  Protein classification predicting sequence
FGNNNPI

SEQ ID NO: 33994 - protein, 12 aa, Artificial sequence
  Protein classification predicting sequence
CELCSGNGDWVV

SEQ ID NO: 33995 - protein, 12 aa, Artificial sequence
  Protein classification predicting sequence
RFDRVRKIWSKM

SEQ ID NO: 33996 - protein, 7 aa, Artificial sequence
  Protein classification predicting sequence
RHRKHRL

SEQ ID NO: 33997 - protein, 7 aa, Artificial sequence
  Protein classification predicting sequence
LGHGVWD

SEQ ID NO: 33998 - protein, 8 aa, Artificial sequence
  Protein classification predicting sequence
GEIHFKTD

SEQ ID NO: 33999 - protein, 7 aa, Artificial sequence
  Protein classification predicting sequence
NIMTEYE

SEQ ID NO: 34000 - protein, 7 aa, Artificial sequence
  Protein classification predicting sequence
FPDPWPK

SEQ ID NO: 34001 - protein, 8 aa, Artificial sequence
  Protein classification predicting sequence
LEIGFGMG

SEQ ID NO: 34002 - protein, 15 aa, Artificial sequence
  Protein classification predicting sequence
FLGIEVHSPGVGACL

SEQ ID NO: 34003 - protein, 8 aa, Artificial sequence
  Protein classification predicting sequence
FHMATDWE

SEQ ID NO: 34004 - protein, 9 aa, Artificial sequence
  Protein classification predicting sequence
HEKRRLTYK

SEQ ID NO: 34005 - protein, 15 aa, Artificial sequence
  Protein classification predicting sequence
FEGNIMTEYEEKFSS

SEQ ID NO: 34006 - protein, 6 aa, Artificial sequence
  Protein classification predicting sequence
IYRVEA

SEQ ID NO: 34007 - protein, 12 aa, Artificial sequence
  Protein classification predicting sequence
LEIGFGMGASLV

SEQ ID NO: 34008 - protein, 15 aa, Artificial sequence
  Protein classification predicting sequence
SKLKVGGVFHMATDW

SEQ ID NO: 34009 - protein, 10 aa, Artificial sequence
  Protein classification predicting sequence
GGVFHMATDW

SEQ ID NO: 34010 - protein, 11 aa, Artificial sequence
  Protein classification predicting sequence
TFADQKRKTVE

SEQ ID NO: 34011 - protein, 14 aa, Artificial sequence
  Protein classification predicting sequence
RKVRSFVLRTGRLS

SEQ ID NO: 34012 - protein, 11 aa, Artificial sequence
  Protein classification predicting sequence
PVVLEIGFGMG

SEQ ID NO: 34013 - protein, 15 aa, Artificial sequence
  Protein classification predicting sequence
GNDNPVVLEIGFGMG

SEQ ID NO: 34014 - protein, 8 aa, Artificial sequence
  Protein classification predicting sequence
GQFITTLA

SEQ ID NO: 34015 - protein, 9 aa, Artificial sequence
  Protein classification predicting sequence
FKTDNRGLF

SEQ ID NO: 34016 - protein, 13 aa, Artificial sequence
  Protein classification predicting sequence
FKTDNRGLFEYSL

SEQ ID NO: 34017 - protein, 13 aa, Artificial sequence
  Protein classification predicting sequence
RHEKRRLTYKSFL

SEQ ID NO: 34018 - protein, 7 aa, Artificial sequence
  Protein classification predicting sequence
KGQVIYR

SEQ ID NO: 34019 - protein, 8 aa, Artificial sequence
  Protein classification predicting sequence
GSGKGQFI

SEQ ID NO: 34020 - protein, 8 aa, Artificial sequence
  Protein classification predicting sequence
TEYEQKFS

SEQ ID NO: 34021 - protein, 8 aa, Artificial sequence
  Protein classification predicting sequence
ATDWEPYA

SEQ ID NO: 34022 - protein, 7 aa, Artificial sequence
  Protein classification predicting sequence
TKFEQRG

SEQ ID NO: 34023 - protein, 7 aa, Artificial sequence
  Protein classification predicting sequence
PVVLEIG

SEQ ID NO: 34024 - protein, 9 aa, Artificial sequence
  Protein classification predicting sequence
RRLTYKTFL

SEQ ID NO: 34025 - protein, 7 aa, Artificial sequence
  Protein classification predicting sequence
YSLESMS

SEQ ID NO: 34026 - protein, 12 aa, Artificial sequence
  Protein classification predicting sequence
PGGVLHVATDHA

SEQ ID NO: 34027 - protein, 8 aa, Artificial sequence
  Protein classification predicting sequence
DPWPKKRH

SEQ ID NO: 34028 - protein, 7 aa, Artificial sequence
  Protein classification predicting sequence
RPVTKFE

SEQ ID NO: 34029 - protein, 8 aa, Artificial sequence
  Protein classification predicting sequence
KTDNRGLF

SEQ ID NO: 34030 - protein, 11 aa, Artificial sequence
  Protein classification predicting sequence
VISPEFDENGR

SEQ ID NO: 34031 - protein, 9 aa, Artificial sequence
  Protein classification predicting sequence
NLRVMCHDA

SEQ ID NO: 34032 - protein, 8 aa, Artificial sequence
  Protein classification predicting sequence
RLGHGVWD

SEQ ID NO: 34033 - protein, 7 aa, Artificial sequence
  Protein classification predicting sequence
IRSFVRR

SEQ ID NO: 34034 - protein, 8 aa, Artificial sequence
  Protein classification predicting sequence
GRLTKGQE

SEQ ID NO: 34035 - protein, 9 aa, Artificial sequence
  Protein classification predicting sequence
VLEIGFGMG

SEQ ID NO: 34036 - protein, 17 aa, Artificial sequence
  Protein classification predicting sequence
VLEIGFGMGASLVEMAK

SEQ ID NO: 34037 - protein, 13 aa, Artificial sequence
  Protein classification predicting sequence
GIEVHSPGVGACL

SEQ ID NO: 34038 - protein, 11 aa, Artificial sequence
  Protein classification predicting sequence
RGHRLGHGVWD

SEQ ID NO: 34039 - protein, 8 aa, Artificial sequence
  Protein classification predicting sequence
DFIGVEVH

SEQ ID NO: 34040 - protein, 9 aa, Artificial sequence
  Protein classification predicting sequence
LFFPDPWHK

SEQ ID NO: 34041 - protein, 19 aa, Artificial sequence
  Protein classification predicting sequence
LFFPDPWHKKRHHKRRIVQ

SEQ ID NO: 34042 - protein, 8 aa, Artificial sequence
  Protein classification predicting sequence
HHKRRIVQ

SEQ ID NO: 34043 - protein, 14 aa, Artificial sequence
  Protein classification predicting sequence
RHHKRRIVQLEFAE

SEQ ID NO: 34044 - protein, 6 aa, Artificial sequence
  Protein classification predicting sequence
MLEVMS

SEQ ID NO: 34045 - protein, 6 aa, Artificial sequence
  Protein classification predicting sequence
PDPWPK

SEQ ID NO: 34046 - protein, 7 aa, Artificial sequence
  Protein classification predicting sequence
FFGRRKG

SEQ ID NO: 34047 - protein, 19 aa, Artificial sequence
  Protein classification predicting sequence
VMCHDAVEVLHKMIPDNSL

SEQ ID NO: 34048 - protein, 25 aa, Artificial sequence
  Protein classification predicting sequence
LFGREAPVTLEIGFGMGASLVAMAK

SEQ ID NO: 34049 - protein, 29 aa, Artificial sequence
  Protein classification predicting sequence
MVQLFFPDPWHKARHNKRRIVQVPFAELV

SEQ ID NO: 34050 - protein, 28 aa, Artificial sequence
  Protein classification predicting sequence
YAEHMLEVMSSIDGYKNLSESNDYVPRP

SEQ ID NO: 34051 - protein, 7 aa, Artificial sequence
  Protein classification predicting sequence
EHMLEVM

SEQ ID NO: 34052 - protein, 10 aa, Artificial sequence
  Protein classification predicting sequence
RPLTKFEARG

SEQ ID NO: 34053 - protein, 17 aa, Artificial sequence
  Protein classification predicting sequence
IEIGSGMGQFITTLAAQ

SEQ ID NO: 34054 - protein, 10 aa, Artificial sequence
  Protein classification predicting sequence
YLNFSDPWPK

SEQ ID NO: 34055 - protein, 11 aa, Artificial sequence
  Protein classification predicting sequence
RHAKRRLTYHT

SEQ ID NO: 34056 - protein, 10 aa, Artificial sequence
  Protein classification predicting sequence
HFKTDNRGLF

SEQ ID NO: 34057 - protein, 12 aa, Artificial sequence
  Protein classification predicting sequence
ESMSQFGMYFTK

SEQ ID NO: 34058 - protein, 13 aa, Artificial sequence
  Protein classification predicting sequence
KGSRIYRMEAKFH

SEQ ID NO: 34059 - protein, 7 aa, Artificial sequence
  Protein classification predicting sequence
NNPHYVI

SEQ ID NO: 34060 - protein, 27 aa, Artificial sequence
  Protein classification predicting sequence
GEIHFKTDNRGLFEYSLASFSQYGMTL

SEQ ID NO: 34061 - protein, 7 aa, Artificial sequence
  Protein classification predicting sequence
RHHKRRL

SEQ ID NO: 34062 - protein, 9 aa, Artificial sequence
  Protein classification predicting sequence
INYIGIDIQ

SEQ ID NO: 34063 - protein, 6 aa, Artificial sequence
  Protein classification predicting sequence
LFEYSL

SEQ ID NO: 34064 - protein, 6 aa, Artificial sequence
  Protein classification predicting sequence
FGNDNP

SEQ ID NO: 34065 - protein, 7 aa, Artificial sequence
  Protein classification predicting sequence
SFSQYGM

SEQ ID NO: 34066 - protein, 9 aa, Artificial sequence
  Protein classification predicting sequence
VWLDLHASD

SEQ ID NO: 34067 - protein, 6 aa, Artificial sequence
  Protein classification predicting sequence
RHNKRR

SEQ ID NO: 34068 - protein, 7 aa, Artificial sequence
  Protein classification predicting sequence
PWPKKRH

SEQ ID NO: 34069 - protein, 7 aa, Artificial sequence
  Protein classification predicting sequence
GRMTEGQ

SEQ ID NO: 34070 - protein, 7 aa, Artificial sequence
  Protein classification predicting sequence
LAPGGYL

SEQ ID NO: 34071 - protein, 32 aa, Artificial sequence
  Protein classification predicting sequence
VFGNDNPVVLEIGFGMGASLVEMAKNAPEKNF

SEQ ID NO: 34072 - protein, 7 aa, Artificial sequence
  Protein classification predicting sequence
MIPDNSL

SEQ ID NO: 34073 - protein, 33 aa, Artificial sequence
  Protein classification predicting sequence
TLQLFFPDPWHKKRHHKRRIVQLEFAEMVRQKL

SEQ ID NO: 34074 - protein, 10 aa, Artificial sequence
  Protein classification predicting sequence
ECWPTMGIDY

SEQ ID NO: 34075 - protein, 7 aa, Artificial sequence
  Protein classification predicting sequence
WKEVFGN

SEQ ID NO: 34076 - protein, 6 aa, Artificial sequence
  Protein classification predicting sequence
RSFVLR

SEQ ID NO: 34077 - protein, 13 aa, Artificial sequence
  Protein classification predicting sequence
NDVISPEFDENGR

SEQ ID NO: 34078 - protein, 8 aa, Artificial sequence
  Protein classification predicting sequence
YWPVMGVE

SEQ ID NO: 34079 - protein, 7 aa, Artificial sequence
  Protein classification predicting sequence
NDYVPRP

SEQ ID NO: 34080 - protein, 7 aa, Artificial sequence
  Protein classification predicting sequence
TLFPEMF

SEQ ID NO: 34081 - protein, 8 aa, Artificial sequence
  Protein classification predicting sequence
GGGPGMVM

SEQ ID NO: 34082 - protein, 6 aa, Artificial sequence
  Protein classification predicting sequence
CGRYEG

SEQ ID NO: 34083 - protein, 7 aa, Artificial sequence
  Protein classification predicting sequence
SIGDYVL

SEQ ID NO: 34084 - protein, 11 aa, Artificial sequence
  Protein classification predicting sequence
DSFVDGLLDCP

SEQ ID NO: 34085 - protein, 8 aa, Artificial sequence
  Protein classification predicting sequence
GLDVPEVL

SEQ ID NO: 34086 - protein, 7 aa, Artificial sequence
  Protein classification predicting sequence
SGHHANI

SEQ ID NO: 34087 - protein, 6 aa, Artificial sequence
  Protein classification predicting sequence
PEMFPG

SEQ ID NO: 34088 - protein, 6 aa, Artificial sequence
  Protein classification predicting sequence
GMVLKP

SEQ ID NO: 34089 - protein, 6 aa, Artificial sequence
  Protein classification predicting sequence
PHYTRP

SEQ ID NO: 34090 - protein, 8 aa, Artificial sequence
  Protein classification predicting sequence
PYGGGPGM

SEQ ID NO: 34091 - protein, 6 aa, Artificial sequence
  Protein classification predicting sequence
EGIDER

SEQ ID NO: 34092 - protein, 6 aa, Artificial sequence
  Protein classification predicting sequence
SIGDYV

SEQ ID NO: 34093 - protein, 6 aa, Artificial sequence
  Protein classification predicting sequence
VPDVLL

SEQ ID NO: 34094 - protein, 9 aa, Artificial sequence
  Protein classification predicting sequence
GDFILTGGE

SEQ ID NO: 34095 - protein, 7 aa, Artificial sequence
  Protein classification predicting sequence
VVRLLPG

SEQ ID NO: 34096 - protein, 8 aa, Artificial sequence
  Protein classification predicting sequence
VPDVLLSG

SEQ ID NO: 34097 - protein, 7 aa, Artificial sequence
  Protein classification predicting sequence
EISLGDF

SEQ ID NO: 34098 - protein, 6 aa, Artificial sequence
  Protein classification predicting sequence
LLSGHH

SEQ ID NO: 34099 - protein, 14 aa, Artificial sequence
  Protein classification predicting sequence
RTVDDRPYGGGPGM

SEQ ID NO: 34100 - protein, 16 aa, Artificial sequence
  Protein classification predicting sequence
RTVDDRPYGGGPGMVM

SEQ ID NO: 34101 - protein, 8 aa, Artificial sequence
  Protein classification predicting sequence
VIYLSPQG

SEQ ID NO: 34102 - protein, 18 aa, Artificial sequence
  Protein classification predicting sequence
EDSFVDGLLDCPHYTRPE

SEQ ID NO: 34103 - protein, 12 aa, Artificial sequence
  Protein classification predicting sequence
GLLDCPHYTRPE

SEQ ID NO: 34104 - protein, 71 aa, Artificial sequence
  Protein classification predicting sequence
LRVVNFRDYTTSKHNSVDDYPYGGGAGMVLTPQPIFDAVEDLTKETERKPRVVLMCPQGERFTQKKAEELA

SEQ ID NO: 34105 - protein, 120 aa, Artificial sequence
  Protein classification predicting sequence
EEHLIFVCGHYEGYDERIREHLVTDEISIGDYVLTGGELASMVITDSVVRLLPGVLGNHASQVEDSFSTGLLEHPHYTRPADFRGMKVPDVLMSGNHKNIDEWRHKESLRRTYTRRPDLL

SEQ ID NO: 34106 - protein, 13 aa, Artificial sequence
  Protein classification predicting sequence
ERELSKQEKKWLE

SEQ ID NO: 34107 - protein, 7 aa, Artificial sequence
  Protein classification predicting sequence
SIMKRAQ

SEQ ID NO: 34108 - protein, 6 aa, Artificial sequence
  Protein classification predicting sequence
CGHYEG

SEQ ID NO: 34109 - protein, 9 aa, Artificial sequence
  Protein classification predicting sequence
DSFSTGLLE

SEQ ID NO: 34110 - protein, 9 aa, Artificial sequence
  Protein classification predicting sequence
YTRPADFRG

SEQ ID NO: 34111 - protein, 8 aa, Artificial sequence
  Protein classification predicting sequence
TDEISIGD

SEQ ID NO: 34112 - protein, 7 aa, Artificial sequence
  Protein classification predicting sequence
VLTGGEL

SEQ ID NO: 34113 - protein, 7 aa, Artificial sequence
  Protein classification predicting sequence
KESLRRT

SEQ ID NO: 34114 - protein, 18 aa, Artificial sequence
  Protein classification predicting sequence
LTLFPDMFTGVFGSSILK

SEQ ID NO: 34115 - protein, 7 aa, Artificial sequence
  Protein classification predicting sequence
YEGFDER

SEQ ID NO: 34116 - protein, 15 aa, Artificial sequence
  Protein classification predicting sequence
EQSLRRTLERRPDLL

SEQ ID NO: 34117 - protein, 8 aa, Artificial sequence
  Protein classification predicting sequence
FDAVEDLT

SEQ ID NO: 34118 - protein, 13 aa, Artificial sequence
  Protein classification predicting sequence
CPQGERFTQKKAE

SEQ ID NO: 34119 - protein, 6 aa, Artificial sequence
  Protein classification predicting sequence
EGVDER

SEQ ID NO: 34120 - protein, 7 aa, Artificial sequence
  Protein classification predicting sequence
VRLLPGV

SEQ ID NO: 34121 - protein, 6 aa, Artificial sequence
  Protein classification predicting sequence
PQYTRP

SEQ ID NO: 34122 - protein, 8 aa, Artificial sequence
  Protein classification predicting sequence
HRTVDDRP

SEQ ID NO: 34123 - protein, 7 aa, Artificial sequence
  Protein classification predicting sequence
GIDQRII

SEQ ID NO: 34124 - protein, 8 aa, Artificial sequence
  Protein classification predicting sequence
VPEVLLSG

SEQ ID NO: 34125 - protein, 7 aa, Artificial sequence
  Protein classification predicting sequence
TLFPDMF

SEQ ID NO: 34126 - protein, 7 aa, Artificial sequence
  Protein classification predicting sequence
VLSGGEL

SEQ ID NO: 34127 - protein, 6 aa, Artificial sequence
  Protein classification predicting sequence
VISLFP

SEQ ID NO: 34128 - protein, 7 aa, Artificial sequence
  Protein classification predicting sequence
SGHHENI

SEQ ID NO: 34129 - protein, 7 aa, Artificial sequence
  Protein classification predicting sequence
DEEWSIG

SEQ ID NO: 34130 - protein, 6 aa, Artificial sequence
  Protein classification predicting sequence
YLSPQG

SEQ ID NO: 34131 - protein, 8 aa, Artificial sequence
  Protein classification predicting sequence
FDVVTLFP

SEQ ID NO: 34132 - protein, 10 aa, Artificial sequence
  Protein classification predicting sequence
GITSRAVKQG

SEQ ID NO: 34133 - protein, 7 aa, Artificial sequence
  Protein classification predicting sequence
PEVLLSG

SEQ ID NO: 34134 - protein, 8 aa, Artificial sequence
  Protein classification predicting sequence
TRERRPDL

SEQ ID NO: 34135 - protein, 9 aa, Artificial sequence
  Protein classification predicting sequence
LSPQGKPLT

SEQ ID NO: 34136 - protein, 8 aa, Artificial sequence
  Protein classification predicting sequence
RFIPGVLG

SEQ ID NO: 34137 - protein, 7 aa, Artificial sequence
  Protein classification predicting sequence
GGGAGMV

SEQ ID NO: 34138 - protein, 11 aa, Artificial sequence
  Protein classification predicting sequence
WRLKQSLGRTW

SEQ ID NO: 34139 - protein, 7 aa, Artificial sequence
  Protein classification predicting sequence
WRRKQSL

SEQ ID NO: 34140 - protein, 11 aa, Artificial sequence
  Protein classification predicting sequence
SGHHENIRKWR

SEQ ID NO: 34141 - protein, 9 aa, Artificial sequence
  Protein classification predicting sequence
DSFSDGLLE

SEQ ID NO: 34142 - protein, 7 aa, Artificial sequence
  Protein classification predicting sequence
WRGLEVP

SEQ ID NO: 34143 - protein, 9 aa, Artificial sequence
  Protein classification predicting sequence
PAGKPFTQA

SEQ ID NO: 34144 - protein, 7 aa, Artificial sequence
  Protein classification predicting sequence
GRYEGID

SEQ ID NO: 34145 - protein, 7 aa, Artificial sequence
  Protein classification predicting sequence
GGELPAM

SEQ ID NO: 34146 - protein, 12 aa, Artificial sequence
  Protein classification predicting sequence
VDDYPYGGGAGM

SEQ ID NO: 34147 - protein, 15 aa, Artificial sequence
  Protein classification predicting sequence
VFICGHYEGYDERIR

SEQ ID NO: 34148 - protein, 8 aa, Artificial sequence
  Protein classification predicting sequence
GVTGRAVK

SEQ ID NO: 34149 - protein, 12 aa, Artificial sequence
  Protein classification predicting sequence
GVTGRAVKNGLL

SEQ ID NO: 34150 - protein, 25 aa, Artificial sequence
  Protein classification predicting sequence
DRHRTVDDRPYGGGPGMLMMVQPLR

SEQ ID NO: 34151 - protein, 13 aa, Artificial sequence
  Protein classification predicting sequence
VIYLSPQGRKLDQ

SEQ ID NO: 34152 - protein, 9 aa, Artificial sequence
  Protein classification predicting sequence
RFIPGVLGH

SEQ ID NO: 34153 - protein, 7 aa, Artificial sequence
  Protein classification predicting sequence
GLLDCPH

SEQ ID NO: 34154 - protein, 7 aa, Artificial sequence
  Protein classification predicting sequence
VLLSGNH

SEQ ID NO: 34155 - protein, 7 aa, Artificial sequence
  Protein classification predicting sequence
LRRPELL

SEQ ID NO: 34156 - protein, 8 aa, Artificial sequence
  Protein classification predicting sequence
LLAEFQRE

SEQ ID NO: 34157 - protein, 7 aa, Artificial sequence
  Protein classification predicting sequence
QKLIRTY

SEQ ID NO: 34158 - protein, 9 aa, Artificial sequence
  Protein classification predicting sequence
GDFVLTGGE

SEQ ID NO: 34159 - protein, 8 aa, Artificial sequence
  Protein classification predicting sequence
IDILTLFP

SEQ ID NO: 34160 - protein, 9 aa, Artificial sequence
  Protein classification predicting sequence
SILKKAQEK

SEQ ID NO: 34161 - protein, 7 aa, Artificial sequence
  Protein classification predicting sequence
KHKTVDD

SEQ ID NO: 34162 - protein, 9 aa, Artificial sequence
  Protein classification predicting sequence
TQKKAEELA

SEQ ID NO: 34163 - protein, 6 aa, Artificial sequence
  Protein classification predicting sequence
PGVLGN

SEQ ID NO: 34164 - protein, 14 aa, Artificial sequence
  Protein classification predicting sequence
YTRPADFRGMKVPD

SEQ ID NO: 34165 - protein, 8 aa, Artificial sequence
  Protein classification predicting sequence
YPLTDKQK

SEQ ID NO: 34166 - protein, 7 aa, Artificial sequence
  Protein classification predicting sequence
DILTLFP

SEQ ID NO: 34167 - protein, 9 aa, Artificial sequence
  Protein classification predicting sequence
VDDAPYGGG

SEQ ID NO: 34168 - protein, 7 aa, Artificial sequence
  Protein classification predicting sequence
SFADGLL

SEQ ID NO: 34169 - protein, 8 aa, Artificial sequence
  Protein classification predicting sequence
ISLFPEMF

SEQ ID NO: 34170 - protein, 13 aa, Artificial sequence
  Protein classification predicting sequence
IQSEVDEEWSIGD

SEQ ID NO: 34171 - protein, 8 aa, Artificial sequence
  Protein classification predicting sequence
DEEWSIGD

SEQ ID NO: 34172 - protein, 8 aa, Artificial sequence
  Protein classification predicting sequence
GGELPAMT

SEQ ID NO: 34173 - protein, 20 aa, Artificial sequence
  Protein classification predicting sequence
EDSFAEGLLDCPHYTRPEVL

SEQ ID NO: 34174 - protein, 7 aa, Artificial sequence
  Protein classification predicting sequence
WRLKQSL

SEQ ID NO: 34175 - protein, 7 aa, Artificial sequence
  Protein classification predicting sequence
PRDFTHD

SEQ ID NO: 34176 - protein, 9 aa, Artificial sequence
  Protein classification predicting sequence
GRYEGIDER

SEQ ID NO: 34177 - protein, 8 aa, Artificial sequence
  Protein classification predicting sequence
VPPVLLSG

SEQ ID NO: 34178 - protein, 7 aa, Artificial sequence
  Protein classification predicting sequence
YTRPADF

SEQ ID NO: 34179 - protein, 7 aa, Artificial sequence
  Protein classification predicting sequence
LVTDEIS

SEQ ID NO: 34180 - protein, 7 aa, Artificial sequence
  Protein classification predicting sequence
IYLSPQG

SEQ ID NO: 34181 - protein, 19 aa, Artificial sequence
  Protein classification predicting sequence
CGHYEGYDERIREHLVTDE

SEQ ID NO: 34182 - protein, 7 aa, Artificial sequence
  Protein classification predicting sequence
WNPRDFT

SEQ ID NO: 34183 - protein, 13 aa, Artificial sequence
  Protein classification predicting sequence
TVDDRPYGGGPGM

SEQ ID NO: 34184 - protein, 9 aa, Artificial sequence
  Protein classification predicting sequence
ASAEEDSFA

SEQ ID NO: 34185 - protein, 7 aa, Artificial sequence
  Protein classification predicting sequence
LALTDEQ

SEQ ID NO: 34186 - protein, 9 aa, Artificial sequence
  Protein classification predicting sequence
GRYEGVDER

SEQ ID NO: 34187 - protein, 6 aa, Artificial sequence
  Protein classification predicting sequence
RWRLKQ

SEQ ID NO: 34188 - protein, 6 aa, Artificial sequence
  Protein classification predicting sequence
SHQDDS

SEQ ID NO: 34189 - protein, 7 aa, Artificial sequence
  Protein classification predicting sequence
DATVRLI

SEQ ID NO: 34190 - protein, 7 aa, Artificial sequence
  Protein classification predicting sequence
ELSLGDF

SEQ ID NO: 34191 - protein, 10 aa, Artificial sequence
  Protein classification predicting sequence
PYGGGPGMVM

SEQ ID NO: 34192 - protein, 7 aa, Artificial sequence
  Protein classification predicting sequence
VLLSGDH

SEQ ID NO: 34193 - protein, 16 aa, Artificial sequence
  Protein classification predicting sequence
VLLSGDHARIAAWRRE

SEQ ID NO: 34194 - protein, 17 aa, Artificial sequence
  Protein classification predicting sequence
SIGDYVLTGGELASMVI

SEQ ID NO: 34195 - protein, 8 aa, Artificial sequence
  Protein classification predicting sequence
NRPDLIER

SEQ ID NO: 34196 - protein, 10 aa, Artificial sequence
  Protein classification predicting sequence
CGHYEGYDER

SEQ ID NO: 34197 - protein, 10 aa, Artificial sequence
  Protein classification predicting sequence
VHDLRRWTHD

SEQ ID NO: 34198 - protein, 9 aa, Artificial sequence
  Protein classification predicting sequence
PYGGGAGMV

SEQ ID NO: 34199 - protein, 7 aa, Artificial sequence
  Protein classification predicting sequence
SLGDFVL

SEQ ID NO: 34200 - protein, 7 aa, Artificial sequence
  Protein classification predicting sequence
YGGGQGM

SEQ ID NO: 34201 - protein, 6 aa, Artificial sequence
  Protein classification predicting sequence
DSFSSG

SEQ ID NO: 34202 - protein, 7 aa, Artificial sequence
  Protein classification predicting sequence
HQKAVEL

SEQ ID NO: 34203 - protein, 16 aa, Artificial sequence
  Protein classification predicting sequence
SVDDAPYGGGPGMVMK

SEQ ID NO: 34204 - protein, 11 aa, Artificial sequence
  Protein classification predicting sequence
PYGGGPGMVMK

SEQ ID NO: 34205 - protein, 9 aa, Artificial sequence
  Protein classification predicting sequence
EVSIGDYVL

SEQ ID NO: 34206 - protein, 8 aa, Artificial sequence
  Protein classification predicting sequence
GGEAAVLV

SEQ ID NO: 34207 - protein, 13 aa, Artificial sequence
  Protein classification predicting sequence
FICGHYEGYDERI

SEQ ID NO: 34208 - protein, 11 aa, Artificial sequence
  Protein classification predicting sequence
CGHYEGYDERI

SEQ ID NO: 34209 - protein, 14 aa, Artificial sequence
  Protein classification predicting sequence
GDYVLTGGELPAMT

SEQ ID NO: 34210 - protein, 10 aa, Artificial sequence
  Protein classification predicting sequence
PGVLGKQASA

SEQ ID NO: 34211 - protein, 6 aa, Artificial sequence
  Protein classification predicting sequence
AIHAAK

SEQ ID NO: 34212 - protein, 11 aa, Artificial sequence
  Protein classification predicting sequence
SIGDYVLSGGE

SEQ ID NO: 34213 - protein, 14 aa, Artificial sequence
  Protein classification predicting sequence
GLLDCPHYTRPEVL

SEQ ID NO: 34214 - protein, 16 aa, Artificial sequence
  Protein classification predicting sequence
GMEVPPVLLSGNHAEI

SEQ ID NO: 34215 - protein, 11 aa, Artificial sequence
  Protein classification predicting sequence
GLLDCPHYTRP

SEQ ID NO: 34216 - protein, 8 aa, Artificial sequence
  Protein classification predicting sequence
VPDILLSG

SEQ ID NO: 34217 - protein, 6 aa, Artificial sequence
  Protein classification predicting sequence
HQTVDD

SEQ ID NO: 34218 - protein, 6 aa, Artificial sequence
  Protein classification predicting sequence
TVDDRP

SEQ ID NO: 34219 - protein, 6 aa, Artificial sequence
  Protein classification predicting sequence
QSLGRT

SEQ ID NO: 34220 - protein, 7 aa, Artificial sequence
  Protein classification predicting sequence
VISLFPE

SEQ ID NO: 34221 - protein, 6 aa, Artificial sequence
  Protein classification predicting sequence
LSPQGR

SEQ ID NO: 34222 - protein, 6 aa, Artificial sequence
  Protein classification predicting sequence
HRTVDD

SEQ ID NO: 34223 - protein, 10 aa, Artificial sequence
  Protein classification predicting sequence
RGLEEVSIGD

SEQ ID NO: 34224 - protein, 11 aa, Artificial sequence
  Protein classification predicting sequence
GLLEHPHYTRP

SEQ ID NO: 34225 - protein, 7 aa, Artificial sequence
  Protein classification predicting sequence
SGNHKKI

SEQ ID NO: 34226 - protein, 9 aa, Artificial sequence
  Protein classification predicting sequence
GDYILSGGE

SEQ ID NO: 34227 - protein, 7 aa, Artificial sequence
  Protein classification predicting sequence
RLLPGVL

SEQ ID NO: 34228 - protein, 7 aa, Artificial sequence
  Protein classification predicting sequence
SLFPEMF

SEQ ID NO: 34229 - protein, 27 aa, Artificial sequence
  Protein classification predicting sequence
EIDEEWSIGDYVLSGGELPAMTLIDSV

SEQ ID NO: 34230 - protein, 21 aa, Artificial sequence
  Protein classification predicting sequence
SLFPEMFRAITDYGVTGRAVK

SEQ ID NO: 34231 - protein, 26 aa, Artificial sequence
  Protein classification predicting sequence
SLFPEMFRAITDYGVTGRAVKNGLLS

SEQ ID NO: 34232 - protein, 8 aa, Artificial sequence
  Protein classification predicting sequence
LTLFPEMF

SEQ ID NO: 34233 - protein, 7 aa, Artificial sequence
  Protein classification predicting sequence
GVLNHSI

SEQ ID NO: 34234 - protein, 11 aa, Artificial sequence
  Protein classification predicting sequence
INKHNQVDDYP

SEQ ID NO: 34235 - protein, 19 aa, Artificial sequence
  Protein classification predicting sequence
GGGQGMVLKPEPVFNAMED

SEQ ID NO: 34236 - protein, 38 aa, Artificial sequence
  Protein classification predicting sequence
HLVTDEISMGDYVLTGGELPAMTMTDAIVRLIPGVLGN

SEQ ID NO: 34237 - protein, 11 aa, Artificial sequence
  Protein classification predicting sequence
WRHEQKLIRTY

SEQ ID NO: 34238 - protein, 8 aa, Artificial sequence
  Protein classification predicting sequence
DATVRLIP

SEQ ID NO: 34239 - protein, 14 aa, Artificial sequence
  Protein classification predicting sequence
GMTVPDVLMSGHHE

SEQ ID NO: 34240 - protein, 6 aa, Artificial sequence
  Protein classification predicting sequence
RYEGID

SEQ ID NO: 34241 - protein, 7 aa, Artificial sequence
  Protein classification predicting sequence
PDVLLSG

SEQ ID NO: 34242 - protein, 9 aa, Artificial sequence
  Protein classification predicting sequence
RVILLDPAG

SEQ ID NO: 34243 - protein, 21 aa, Artificial sequence
  Protein classification predicting sequence
SHQDDSFSSGLLEYPQYTRPY

SEQ ID NO: 34244 - protein, 16 aa, Artificial sequence
  Protein classification predicting sequence
FSEEERKLLDKIKEAL

SEQ ID NO: 34245 - protein, 10 aa, Artificial sequence
  Protein classification predicting sequence
PLEHSIVGKA

SEQ ID NO: 34246 - protein, 21 aa, Artificial sequence
  Protein classification predicting sequence
AEKARHVDDEPYGGGQGMLLR

SEQ ID NO: 34247 - protein, 6 aa, Artificial sequence
  Protein classification predicting sequence
MFAPLE

SEQ ID NO: 34248 - protein, 12 aa, Artificial sequence
  Protein classification predicting sequence
FICGHYEGYDER

SEQ ID NO: 34249 - protein, 8 aa, Artificial sequence
  Protein classification predicting sequence
PRVILMDP

SEQ ID NO: 34250 - protein, 7 aa, Artificial sequence
  Protein classification predicting sequence
VLLSGHH

SEQ ID NO: 34251 - protein, 7 aa, Artificial sequence
  Protein classification predicting sequence
YGGGAGM

SEQ ID NO: 34252 - protein, 8 aa, Artificial sequence
  Protein classification predicting sequence
SLFPEMFR

SEQ ID NO: 34253 - protein, 26 aa, Artificial sequence
  Protein classification predicting sequence
HRTVDDRPYGGGPGMLMMVQPLRDAI

SEQ ID NO: 34254 - protein, 16 aa, Artificial sequence
  Protein classification predicting sequence
ASPGKTKVIYLSPQGR

SEQ ID NO: 34255 - protein, 11 aa, Artificial sequence
  Protein classification predicting sequence
GVEELATNENL

SEQ ID NO: 34256 - protein, 8 aa, Artificial sequence
  Protein classification predicting sequence
GKEVPEVL

SEQ ID NO: 34257 - protein, 12 aa, Artificial sequence
  Protein classification predicting sequence
RRPELLENLALT

SEQ ID NO: 34258 - protein, 6 aa, Artificial sequence
  Protein classification predicting sequence
EGIDQR

SEQ ID NO: 34259 - protein, 9 aa, Artificial sequence
  Protein classification predicting sequence
EGIDQRIID

SEQ ID NO: 34260 - protein, 7 aa, Artificial sequence
  Protein classification predicting sequence
YEGIDER

SEQ ID NO: 34261 - protein, 9 aa, Artificial sequence
  Protein classification predicting sequence
GDYILTGGE

SEQ ID NO: 34262 - protein, 7 aa, Artificial sequence
  Protein classification predicting sequence
RTWLRRP

SEQ ID NO: 34263 - protein, 6 aa, Artificial sequence
  Protein classification predicting sequence
CGRFEG

SEQ ID NO: 34264 - protein, 11 aa, Artificial sequence
  Protein classification predicting sequence
NKDQSYFLYTL

SEQ ID NO: 34265 - protein, 16 aa, Artificial sequence
  Protein classification predicting sequence
RCTVKTRYRQTDIPCT

SEQ ID NO: 34266 - protein, 16 aa, Artificial sequence
  Protein classification predicting sequence
GEVCLGGGIIEQRLPL

SEQ ID NO: 34267 - protein, 82 aa, Artificial sequence
  Protein classification predicting sequence
KKVIVGMSGGVDSSVSAWLLQQQGYQVEGLFMKNWEEDDGEEYCTAAADLADAQAVCDKLGIELHTVNFAAEYWDNVFELFL

SEQ ID NO: 34268 - protein, 48 aa, Artificial sequence
  Protein classification predicting sequence
HEQIAQSLFPVGELEKPQVRKIAEDLGLVTAKKKDSTGICFIGERKFR

SEQ ID NO: 34269 - protein, 44 aa, Artificial sequence
  Protein classification predicting sequence
FLGRYLPAQPGKIITVDGDEIGEHQGLMYHTLGQRKGLGIGGTK

SEQ ID NO: 34270 - protein, 31 aa, Artificial sequence
  Protein classification predicting sequence
VAQGHEHPRLMSVGLIAQQLHWVDREPFTGT

SEQ ID NO: 34271 - protein, 17 aa, Artificial sequence
  Protein classification predicting sequence
KKVIVGMSGGVDSSVSA

SEQ ID NO: 34272 - protein, 7 aa, Artificial sequence
  Protein classification predicting sequence
LLQQQGY

SEQ ID NO: 34273 - protein, 8 aa, Artificial sequence
  Protein classification predicting sequence
GKSRLLRG

SEQ ID NO: 34274 - protein, 24 aa, Artificial sequence
  Protein classification predicting sequence
HEQIAQSLFPVGELEKPQVRKIAE

SEQ ID NO: 34275 - protein, 18 aa, Artificial sequence
  Protein classification predicting sequence
TAKKKDSTGICFIGERKF

SEQ ID NO: 34276 - protein, 8 aa, Artificial sequence
  Protein classification predicting sequence
RYLPAQPG

SEQ ID NO: 34277 - protein, 19 aa, Artificial sequence
  Protein classification predicting sequence
HQGLMYHTLGQRKGLGIGG

SEQ ID NO: 34278 - protein, 12 aa, Artificial sequence
  Protein classification predicting sequence
VAQGHEHPRLMS

SEQ ID NO: 34279 - protein, 12 aa, Artificial sequence
  Protein classification predicting sequence
AAVTPGQSAVFY

SEQ ID NO: 34280 - protein, 8 aa, Artificial sequence
  Protein classification predicting sequence
GRTPNPDI

SEQ ID NO: 34281 - protein, 11 aa, Artificial sequence
  Protein classification predicting sequence
GLFMKNWEEDD

SEQ ID NO: 34282 - protein, 13 aa, Artificial sequence
  Protein classification predicting sequence
DLADAQAVCDKLG

SEQ ID NO: 34283 - protein, 20 aa, Artificial sequence
  Protein classification predicting sequence
ELHTVNFAAEYWDNVFELFL

SEQ ID NO: 34284 - protein, 44 aa, Artificial sequence
  Protein classification predicting sequence
EYKAGRTPNPDILCNKEIKFKAFLEFAAEDLGADYIATGHYVRR

SEQ ID NO: 34285 - protein, 17 aa, Artificial sequence
  Protein classification predicting sequence
HEQIAQSLFPVGELEKP

SEQ ID NO: 34286 - protein, 9 aa, Artificial sequence
  Protein classification predicting sequence
AQQLHWVDR

SEQ ID NO: 34287 - protein, 7 aa, Artificial sequence
  Protein classification predicting sequence
VKTRYRQ

SEQ ID NO: 34288 - protein, 14 aa, Artificial sequence
  Protein classification predicting sequence
PVAAVTPGQSAVFY

SEQ ID NO: 34289 - protein, 8 aa, Artificial sequence
  Protein classification predicting sequence
SSKTGSAD

SEQ ID NO: 34290 - protein, 15 aa, Artificial sequence
  Protein classification predicting sequence
FNILGPLTNPAGAPN

SEQ ID NO: 34291 - protein, 7 aa, Artificial sequence
  Protein classification predicting sequence
FNLLGPL

SEQ ID NO: 34292 - protein, 11 aa, Artificial sequence
  Protein classification predicting sequence
LMALRVRGETV

SEQ ID NO: 34293 - protein, 8 aa, Artificial sequence
  Protein classification predicting sequence
DIVGTGGD

SEQ ID NO: 34294 - protein, 7 aa, Artificial sequence
  Protein classification predicting sequence
DGMDELS

SEQ ID NO: 34295 - protein, 9 aa, Artificial sequence
  Protein classification predicting sequence
DIVGTGGDG

SEQ ID NO: 34296 - protein, 7 aa, Artificial sequence
  Protein classification predicting sequence
VSSKSGS

SEQ ID NO: 34297 - protein, 7 aa, Artificial sequence
  Protein classification predicting sequence
ALRVRGE

SEQ ID NO: 34298 - protein, 8 aa, Artificial sequence
  Protein classification predicting sequence
KVAKHGNR

SEQ ID NO: 34299 - protein, 6 aa, Artificial sequence
  Protein classification predicting sequence
FNILGP

SEQ ID NO: 34300 - protein, 7 aa, Artificial sequence
  Protein classification predicting sequence
GTYNIST

SEQ ID NO: 34301 - protein, 6 aa, Artificial sequence
  Protein classification predicting sequence
GPLTNP

SEQ ID NO: 34302 - protein, 10 aa, Artificial sequence
  Protein classification predicting sequence
VAKHGNRAVS

SEQ ID NO: 34303 - protein, 7 aa, Artificial sequence
  Protein classification predicting sequence
TFNISTA

SEQ ID NO: 34304 - protein, 7 aa, Artificial sequence
  Protein classification predicting sequence
STAAAIV

SEQ ID NO: 34305 - protein, 8 aa, Artificial sequence
  Protein classification predicting sequence
STASAIVA

SEQ ID NO: 34306 - protein, 6 aa, Artificial sequence
  Protein classification predicting sequence
SSKSGS

SEQ ID NO: 34307 - protein, 8 aa, Artificial sequence
  Protein classification predicting sequence
SSKSGSSD

SEQ ID NO: 34308 - protein, 6 aa, Artificial sequence
  Protein classification predicting sequence
FNLLGP

SEQ ID NO: 34309 - protein, 7 aa, Artificial sequence
  Protein classification predicting sequence
NISTTSA

SEQ ID NO: 34310 - protein, 6 aa, Artificial sequence
  Protein classification predicting sequence
TRTIFN

SEQ ID NO: 34311 - protein, 7 aa, Artificial sequence
  Protein classification predicting sequence
FNILGPL

SEQ ID NO: 34312 - protein, 6 aa, Artificial sequence
  Protein classification predicting sequence
TFNIST

SEQ ID NO: 34313 - protein, 8 aa, Artificial sequence
  Protein classification predicting sequence
VHGSGMDE

SEQ ID NO: 34314 - protein, 8 aa, Artificial sequence
  Protein classification predicting sequence
AAEAIDSG

SEQ ID NO: 34315 - protein, 7 aa, Artificial sequence
  Protein classification predicting sequence
GLDELTT

SEQ ID NO: 34316 - protein, 6 aa, Artificial sequence
  Protein classification predicting sequence
AKHGNR

SEQ ID NO: 34317 - protein, 7 aa, Artificial sequence
  Protein classification predicting sequence
DIVGTGG

SEQ ID NO: 34318 - protein, 8 aa, Artificial sequence
  Protein classification predicting sequence
ADVLEALG

SEQ ID NO: 34319 - protein, 7 aa, Artificial sequence
  Protein classification predicting sequence
LNAGAAL

SEQ ID NO: 34320 - protein, 6 aa, Artificial sequence
  Protein classification predicting sequence
GPLINP

SEQ ID NO: 34321 - protein, 7 aa, Artificial sequence
  Protein classification predicting sequence
NISTTAA

SEQ ID NO: 34322 - protein, 6 aa, Artificial sequence
  Protein classification predicting sequence
CGTGGD

SEQ ID NO: 34323 - protein, 6 aa, Artificial sequence
  Protein classification predicting sequence
VAKHGN

SEQ ID NO: 34324 - protein, 7 aa, Artificial sequence
  Protein classification predicting sequence
VAKHGNR

SEQ ID NO: 34325 - protein, 8 aa, Artificial sequence
  Protein classification predicting sequence
HHSAMRHV

SEQ ID NO: 34326 - protein, 9 aa, Artificial sequence
  Protein classification predicting sequence
LGSKHVLVV

SEQ ID NO: 34327 - protein, 6 aa, Artificial sequence
  Protein classification predicting sequence
GTGGDG

SEQ ID NO: 34328 - protein, 8 aa, Artificial sequence
  Protein classification predicting sequence
SNSFNIST

SEQ ID NO: 34329 - protein, 7 aa, Artificial sequence
  Protein classification predicting sequence
GSADVLE

SEQ ID NO: 34330 - protein, 9 aa, Artificial sequence
  Protein classification predicting sequence
VVHGSGLDE

SEQ ID NO: 34331 - protein, 6 aa, Artificial sequence
  Protein classification predicting sequence
KSGSAD

SEQ ID NO: 34332 - protein, 7 aa, Artificial sequence
  Protein classification predicting sequence
NVSTASA

SEQ ID NO: 34333 - protein, 15 aa, Artificial sequence
  Protein classification predicting sequence
SLELIRDALGRRKTE

SEQ ID NO: 34334 - protein, 6 aa, Artificial sequence
  Protein classification predicting sequence
SKSGSA

SEQ ID NO: 34335 - protein, 6 aa, Artificial sequence
  Protein classification predicting sequence
GPLANP

SEQ ID NO: 34336 - protein, 8 aa, Artificial sequence
  Protein classification predicting sequence
DTAGTGGD

SEQ ID NO: 34337 - protein, 16 aa, Artificial sequence
  Protein classification predicting sequence
RVELGTRTIFNLLGPL

SEQ ID NO: 34338 - protein, 15 aa, Artificial sequence
  Protein classification predicting sequence
NTINISTTAAFVAAA

SEQ ID NO: 34339 - protein, 10 aa, Artificial sequence
  Protein classification predicting sequence
AMCVCGTGGD

SEQ ID NO: 34340 - protein, 19 aa, Artificial sequence
  Protein classification predicting sequence
SNSFNISTTVAFVVASAGV

SEQ ID NO: 34341 - protein, 11 aa, Artificial sequence
  Protein classification predicting sequence
VIKHGNKSITS

SEQ ID NO: 34342 - protein, 13 aa, Artificial sequence
  Protein classification predicting sequence
HGANGMDEATLSG

SEQ ID NO: 34343 - protein, 7 aa, Artificial sequence
  Protein classification predicting sequence
GFARAMR

SEQ ID NO: 34344 - protein, 8 aa, Artificial sequence
  Protein classification predicting sequence
LGPLTNPA

SEQ ID NO: 34345 - protein, 10 aa, Artificial sequence
  Protein classification predicting sequence
SFGINLAMSA

SEQ ID NO: 34346 - protein, 18 aa, Artificial sequence
  Protein classification predicting sequence
KRAAVVHGSGLDEVAIHG

SEQ ID NO: 34347 - protein, 11 aa, Artificial sequence
  Protein classification predicting sequence
EDLKANTQQAI

SEQ ID NO: 34348 - protein, 8 aa, Artificial sequence
  Protein classification predicting sequence
GLRVKKET

SEQ ID NO: 34349 - protein, 7 aa, Artificial sequence
  Protein classification predicting sequence
TLVGELR

SEQ ID NO: 34350 - protein, 7 aa, Artificial sequence
  Protein classification predicting sequence
VAIKIID

SEQ ID NO: 34351 - protein, 15 aa, Artificial sequence
  Protein classification predicting sequence
NLLLDKDFNIKLSDF

SEQ ID NO: 34352 - protein, 5 aa, Artificial sequence
  Protein classification predicting sequence
TFCGS

SEQ ID NO: 34353 - protein, 10 aa, Artificial sequence
  Protein classification predicting sequence
CGSPAYAAPE

SEQ ID NO: 34354 - protein, 7 aa, Artificial sequence
  Protein classification predicting sequence
LSHSWLQ

SEQ ID NO: 34355 - protein, 7 aa, Artificial sequence
  Protein classification predicting sequence
DTKTGLR

SEQ ID NO: 34356 - protein, 6 aa, Artificial sequence
  Protein classification predicting sequence
GVVLYV

SEQ ID NO: 34357 - protein, 8 aa, Artificial sequence
  Protein classification predicting sequence
GVILYTLV

SEQ ID NO: 34358 - protein, 8 aa, Artificial sequence
  Protein classification predicting sequence
AYLHSKGI

SEQ ID NO: 34359 - protein, 6 aa, Artificial sequence
  Protein classification predicting sequence
IPSNYV

SEQ ID NO: 34360 - protein, 7 aa, Artificial sequence
  Protein classification predicting sequence
TEFMENG

SEQ ID NO: 34361 - protein, 8 aa, Artificial sequence
  Protein classification predicting sequence
RLYRPHLA

SEQ ID NO: 34362 - protein, 7 aa, Artificial sequence
  Protein classification predicting sequence
MYSCWHE

SEQ ID NO: 34363 - protein, 12 aa, Artificial sequence
  Protein classification predicting sequence
DMTVCVADFGLS

SEQ ID NO: 34364 - protein, 11 aa, Artificial sequence
  Protein classification predicting sequence
KIYSGDYYRQG

SEQ ID NO: 34365 - protein, 7 aa, Artificial sequence
  Protein classification predicting sequence
DRTGTGT

SEQ ID NO: 34366 - protein, 6 aa, Artificial sequence
  Protein classification predicting sequence
FPLLTT

SEQ ID NO: 34367 - protein, 10 aa, Artificial sequence
  Protein classification predicting sequence
YGFQWRHFGA

SEQ ID NO: 34368 - protein, 6 aa, Artificial sequence
  Protein classification predicting sequence
DGKLSC

SEQ ID NO: 34369 - protein, 6 aa, Artificial sequence
  Protein classification predicting sequence
YQRSGD

SEQ ID NO: 34370 - protein, 16 aa, Artificial sequence
  Protein classification predicting sequence
VRTKWDSDGTPAHTLS

SEQ ID NO: 34371 - protein, 9 aa, Artificial sequence
  Protein classification predicting sequence
MGVHIWDQW

SEQ ID NO: 34372 - protein, 13 aa, Artificial sequence
  Protein classification predicting sequence
KVDQVDYLLHQLK

SEQ ID NO: 34373 - protein, 15 aa, Artificial sequence
  Protein classification predicting sequence
GYELGEYIFNIGDCH

SEQ ID NO: 34374 - protein, 7 aa, Artificial sequence
  Protein classification predicting sequence
FGYQMRF

SEQ ID NO: 34375 - protein, 7 aa, Artificial sequence
  Protein classification predicting sequence
EWADENG

SEQ ID NO: 34376 - protein, 5 aa, Artificial sequence
  Protein classification predicting sequence
QWRSW

SEQ ID NO: 34377 - protein, 6 aa, Artificial sequence
  Protein classification predicting sequence
NHVEQV

SEQ ID NO: 34378 - protein, 7 aa, Artificial sequence
  Protein classification predicting sequence
FGHQMRF

SEQ ID NO: 34379 - protein, 11 aa, Artificial sequence
  Protein classification predicting sequence
ELLWFLKGDTN

SEQ ID NO: 34380 - protein, 6 aa, Artificial sequence
  Protein classification predicting sequence
IWDEWA

SEQ ID NO: 34381 - protein, 13 aa, Artificial sequence
  Protein classification predicting sequence
GKLSCQLYQRSAD

SEQ ID NO: 34382 - protein, 10 aa, Artificial sequence
  Protein classification predicting sequence
YQSHPAIKAP

SEQ ID NO: 34383 - protein, 7 aa, Artificial sequence
  Protein classification predicting sequence
MALPPCH

SEQ ID NO: 34384 - protein, 10 aa, Artificial sequence
  Protein classification predicting sequence
LGIPFNIASY

SEQ ID NO: 34385 - protein, 8 aa, Artificial sequence
  Protein classification predicting sequence
IEGYNPHP

SEQ ID NO: 34386 - protein, 6 aa, Artificial sequence
  Protein classification predicting sequence
ELLWFL

SEQ ID NO: 34387 - protein, 8 aa, Artificial sequence
  Protein classification predicting sequence
KTNPNSRR

SEQ ID NO: 34388 - protein, 6 aa, Artificial sequence
  Protein classification predicting sequence
FKFEDF

SEQ ID NO: 34389 - protein, 6 aa, Artificial sequence
  Protein classification predicting sequence
ELLWFI

SEQ ID NO: 34390 - protein, 8 aa, Artificial sequence
  Protein classification predicting sequence
IWDANGSR

SEQ ID NO: 34391 - protein, 12 aa, Artificial sequence
  Protein classification predicting sequence
YGFQWRHFGAEY

SEQ ID NO: 34392 - protein, 9 aa, Artificial sequence
  Protein classification predicting sequence
DMGLGVPFN

SEQ ID NO: 34393 - protein, 6 aa, Artificial sequence
  Protein classification predicting sequence
LGVPFN

SEQ ID NO: 34394 - protein, 9 aa, Artificial sequence
  Protein classification predicting sequence
DRTGTGTLS

SEQ ID NO: 34395 - protein, 6 aa, Artificial sequence
  Protein classification predicting sequence
QMRFNL

SEQ ID NO: 34396 - protein, 10 aa, Artificial sequence
  Protein classification predicting sequence
TTKKLHTRSI

SEQ ID NO: 34397 - protein, 6 aa, Artificial sequence
  Protein classification predicting sequence
FQFYVA

SEQ ID NO: 34398 - protein, 5 aa, Artificial sequence
  Protein classification predicting sequence
WTGGD

SEQ ID NO: 34399 - protein, 7 aa, Artificial sequence
  Protein classification predicting sequence
FPLLTTK

SEQ ID NO: 34400 - protein, 10 aa, Artificial sequence
  Protein classification predicting sequence
NNNIWNEWAF

SEQ ID NO: 34401 - protein, 13 aa, Artificial sequence
  Protein classification predicting sequence
QMELFKKNVLEDD

SEQ ID NO: 34402 - protein, 8 aa, Artificial sequence
  Protein classification predicting sequence
QLYQRSAD

SEQ ID NO: 34403 - protein, 6 aa, Artificial sequence
  Protein classification predicting sequence
LQEGFP

SEQ ID NO: 34404 - protein, 6 aa, Artificial sequence
  Protein classification predicting sequence
TNIAYL

SEQ ID NO: 34405 - protein, 10 aa, Artificial sequence
  Protein classification predicting sequence
SRRLIVSAWN

SEQ ID NO: 34406 - protein, 6 aa, Artificial sequence
  Protein classification predicting sequence
GDAHIY

SEQ ID NO: 34407 - protein, 9 aa, Artificial sequence
  Protein classification predicting sequence
GDAHIYLNH

SEQ ID NO: 34408 - protein, 36 aa, Artificial sequence
  Protein classification predicting sequence
MRFDNSEVPILTTKKVAWKTAIKELLWIWQLKSNDV

SEQ ID NO: 34409 - protein, 31 aa, Artificial sequence
  Protein classification predicting sequence
LEVRARSNDMALGNPFNVFQYNVLQRMIAQV

SEQ ID NO: 34410 - protein, 14 aa, Artificial sequence
  Protein classification predicting sequence
NGISDEEFDVRTKW

SEQ ID NO: 34411 - protein, 9 aa, Artificial sequence
  Protein classification predicting sequence
IGHAYGFQL

SEQ ID NO: 34412 - protein, 9 aa, Artificial sequence
  Protein classification predicting sequence
EAPKLWINP

SEQ ID NO: 34413 - protein, 13 aa, Artificial sequence
  Protein classification predicting sequence
LTPCVYETQWYVK

SEQ ID NO: 34414 - protein, 6 aa, Artificial sequence
  Protein classification predicting sequence
TTKKLH

SEQ ID NO: 34415 - protein, 11 aa, Artificial sequence
  Protein classification predicting sequence
RSIIHELLWFL

SEQ ID NO: 34416 - protein, 6 aa, Artificial sequence
  Protein classification predicting sequence
SYALLT

SEQ ID NO: 34417 - protein, 7 aa, Artificial sequence
  Protein classification predicting sequence
HTFGDAH

SEQ ID NO: 34418 - protein, 6 aa, Artificial sequence
  Protein classification predicting sequence
GDAHLY

SEQ ID NO: 34419 - protein, 6 aa, Artificial sequence
  Protein classification predicting sequence
QWRSWP

SEQ ID NO: 34420 - protein, 7 aa, Artificial sequence
  Protein classification predicting sequence
IVSAWNV

SEQ ID NO: 34421 - protein, 9 aa, Artificial sequence
  Protein classification predicting sequence
PDGRHIDQI

SEQ ID NO: 34422 - protein, 13 aa, Artificial sequence
  Protein classification predicting sequence
PDSRRLIVSAWNP

SEQ ID NO: 34423 - protein, 11 aa, Artificial sequence
  Protein classification predicting sequence
SRRLIVSAWNP

SEQ ID NO: 34424 - protein, 13 aa, Artificial sequence
  Protein classification predicting sequence
PFNIASYALLTMM

SEQ ID NO: 34425 - protein, 7 aa, Artificial sequence
  Protein classification predicting sequence
HTLGDAH

SEQ ID NO: 34426 - protein, 6 aa, Artificial sequence
  Protein classification predicting sequence
NHFEQA

SEQ ID NO: 34427 - protein, 6 aa, Artificial sequence
  Protein classification predicting sequence
FGYQMR

SEQ ID NO: 34428 - protein, 6 aa, Artificial sequence
  Protein classification predicting sequence
NPNSRR

SEQ ID NO: 34429 - protein, 11 aa, Artificial sequence
  Protein classification predicting sequence
GKLSCQLYQRS

SEQ ID NO: 34430 - protein, 6 aa, Artificial sequence
  Protein classification predicting sequence
NHLEQA

SEQ ID NO: 34431 - protein, 10 aa, Artificial sequence
  Protein classification predicting sequence
LGVPFNIASY

SEQ ID NO: 34432 - protein, 8 aa, Artificial sequence
  Protein classification predicting sequence
LLTMMMAQ

SEQ ID NO: 34433 - protein, 7 aa, Artificial sequence
  Protein classification predicting sequence
GLKPGEF

SEQ ID NO: 34434 - protein, 7 aa, Artificial sequence
  Protein classification predicting sequence
FVWTGGD

SEQ ID NO: 34435 - protein, 11 aa, Artificial sequence
  Protein classification predicting sequence
GFPAVTTKKLA

SEQ ID NO: 34436 - protein, 6 aa, Artificial sequence
  Protein classification predicting sequence
YGKQWR

SEQ ID NO: 34437 - protein, 7 aa, Artificial sequence
  Protein classification predicting sequence
IWDEWAD

SEQ ID NO: 34438 - protein, 9 aa, Artificial sequence
  Protein classification predicting sequence
VTIWDEWAD

SEQ ID NO: 34439 - protein, 7 aa, Artificial sequence
  Protein classification predicting sequence
PFNIASY

SEQ ID NO: 34440 - protein, 16 aa, Artificial sequence
  Protein classification predicting sequence
SIIHELLWFLRGETNI

SEQ ID NO: 34441 - protein, 10 aa, Artificial sequence
  Protein classification predicting sequence
KLSCQLYQRS

SEQ ID NO: 34442 - protein, 8 aa, Artificial sequence
  Protein classification predicting sequence
PFNIASYA

SEQ ID NO: 34443 - protein, 6 aa, Artificial sequence
  Protein classification predicting sequence
LGPIYG

SEQ ID NO: 34444 - protein, 7 aa, Artificial sequence
  Protein classification predicting sequence
CQLYQRS

SEQ ID NO: 34445 - protein, 7 aa, Artificial sequence
  Protein classification predicting sequence
LLTHMIA

SEQ ID NO: 34446 - protein, 7 aa, Artificial sequence
  Protein classification predicting sequence
FIWTGGD

SEQ ID NO: 34447 - protein, 5 aa, Artificial sequence
  Protein classification predicting sequence
ELLWF

SEQ ID NO: 34448 - protein, 7 aa, Artificial sequence
  Protein classification predicting sequence
FKFEDFE

SEQ ID NO: 34449 - protein, 11 aa, Artificial sequence
  Protein classification predicting sequence
TTKKLHLRSII

SEQ ID NO: 34450 - protein, 19 aa, Artificial sequence
  Protein classification predicting sequence
FLGVPFNIASYALLTLMVA

SEQ ID NO: 34451 - protein, 7 aa, Artificial sequence
  Protein classification predicting sequence
HLYLNHL

SEQ ID NO: 34452 - protein, 5 aa, Artificial sequence
  Protein classification predicting sequence
IWDEW

SEQ ID NO: 34453 - protein, 8 aa, Artificial sequence
  Protein classification predicting sequence
TPYEDLLR

SEQ ID NO: 34454 - protein, 6 aa, Artificial sequence
  Protein classification predicting sequence
QMRFDL

SEQ ID NO: 34455 - protein, 8 aa, Artificial sequence
  Protein classification predicting sequence
GELGPVYG

SEQ ID NO: 34456 - protein, 7 aa, Artificial sequence
  Protein classification predicting sequence
QLSREPR

SEQ ID NO: 34457 - protein, 7 aa, Artificial sequence
  Protein classification predicting sequence
LLTHLIA

SEQ ID NO: 34458 - protein, 7 aa, Artificial sequence
  Protein classification predicting sequence
GTLSVFG

SEQ ID NO: 34459 - protein, 7 aa, Artificial sequence
  Protein classification predicting sequence
PRPFPKL

SEQ ID NO: 34460 - protein, 9 aa, Artificial sequence
  Protein classification predicting sequence
FPLLTTKRV

SEQ ID NO: 34461 - protein, 7 aa, Artificial sequence
  Protein classification predicting sequence
EELLWFI

SEQ ID NO: 34462 - protein, 13 aa, Artificial sequence
  Protein classification predicting sequence
EELLWFIRGSTDS

SEQ ID NO: 34463 - protein, 8 aa, Artificial sequence
  Protein classification predicting sequence
GDLGPVYG

SEQ ID NO: 34464 - protein, 7 aa, Artificial sequence
  Protein classification predicting sequence
GQGVDQL

SEQ ID NO: 34465 - protein, 9 aa, Artificial sequence
  Protein classification predicting sequence
KGFPLLTTK

SEQ ID NO: 34466 - protein, 9 aa, Artificial sequence
  Protein classification predicting sequence
NHIWDEWAF

SEQ ID NO: 34467 - protein, 10 aa, Artificial sequence
  Protein classification predicting sequence
KYGELGNIYG

SEQ ID NO: 34468 - protein, 6 aa, Artificial sequence
  Protein classification predicting sequence
YGAQWR

SEQ ID NO: 34469 - protein, 12 aa, Artificial sequence
  Protein classification predicting sequence
PDSRRLIVSAWN

SEQ ID NO: 34470 - protein, 8 aa, Artificial sequence
  Protein classification predicting sequence
MALPPCHT

SEQ ID NO: 34471 - protein, 14 aa, Artificial sequence
  Protein classification predicting sequence
MALPPCHTMFQFYV

SEQ ID NO: 34472 - protein, 9 aa, Artificial sequence
  Protein classification predicting sequence
DRTGTGTRS

SEQ ID NO: 34473 - protein, 8 aa, Artificial sequence
  Protein classification predicting sequence
GFPLVTTK

SEQ ID NO: 34474 - protein, 17 aa, Artificial sequence
  Protein classification predicting sequence
FLGLPFNIASYALLVHM

SEQ ID NO: 34475 - protein, 6 aa, Artificial sequence
  Protein classification predicting sequence
AQQCDL

SEQ ID NO: 34476 - protein, 8 aa, Artificial sequence
  Protein classification predicting sequence
IEGYDPHP

SEQ ID NO: 34477 - protein, 6 aa, Artificial sequence
  Protein classification predicting sequence
IWNEWA

SEQ ID NO: 34478 - protein, 10 aa, Artificial sequence
  Protein classification predicting sequence
YGKQWRDFNG

SEQ ID NO: 34479 - protein, 12 aa, Artificial sequence
  Protein classification predicting sequence
FQFYVANNKLSC

SEQ ID NO: 34480 - protein, 6 aa, Artificial sequence
  Protein classification predicting sequence
QLSREP

SEQ ID NO: 34481 - protein, 7 aa, Artificial sequence
  Protein classification predicting sequence
MALTPCV

SEQ ID NO: 34482 - protein, 6 aa, Artificial sequence
  Protein classification predicting sequence
KEDRTG

SEQ ID NO: 34483 - protein, 14 aa, Artificial sequence
  Protein classification predicting sequence
RFNLQDGFPLVTTK

SEQ ID NO: 34484 - protein, 6 aa, Artificial sequence
  Protein classification predicting sequence
FPLITT

SEQ ID NO: 34485 - protein, 6 aa, Artificial sequence
  Protein classification predicting sequence
WDANAN

SEQ ID NO: 34486 - protein, 7 aa, Artificial sequence
  Protein classification predicting sequence
WLANPYR

SEQ ID NO: 34487 - protein, 6 aa, Artificial sequence
  Protein classification predicting sequence
GCLRPC

SEQ ID NO: 34488 - protein, 8 aa, Artificial sequence
  Protein classification predicting sequence
YSHHFSLL

SEQ ID NO: 34489 - protein, 10 aa, Artificial sequence
  Protein classification predicting sequence
TLYLNSTQRS

SEQ ID NO: 34490 - protein, 8 aa, Artificial sequence
  Protein classification predicting sequence
IKSLEDLE

SEQ ID NO: 34491 - protein, 13 aa, Artificial sequence
  Protein classification predicting sequence
QRSCDVPLGLNFN

SEQ ID NO: 34492 - protein, 7 aa, Artificial sequence
  Protein classification predicting sequence
QFYVADG

SEQ ID NO: 34493 - protein, 8 aa, Artificial sequence
  Protein classification predicting sequence
KTWDANAN

SEQ ID NO: 34494 - protein, 7 aa, Artificial sequence
  Protein classification predicting sequence
FYNPGEF

SEQ ID NO: 34495 - protein, 7 aa, Artificial sequence
  Protein classification predicting sequence
SELLWFL

SEQ ID NO: 34496 - protein, 14 aa, Artificial sequence
  Protein classification predicting sequence
YHGPDMTDFGHRSQ

SEQ ID NO: 34497 - protein, 5 aa, Artificial sequence
  Protein classification predicting sequence
QWRAW

SEQ ID NO: 34498 - protein, 13 aa, Artificial sequence
  Protein classification predicting sequence
PFGLIKSELLWFL

SEQ ID NO: 34499 - protein, 8 aa, Artificial sequence
  Protein classification predicting sequence
RSQQDPEF

SEQ ID NO: 34500 - protein, 6 aa, Artificial sequence
  Protein classification predicting sequence
WIYQDQ

SEQ ID NO: 34501 - protein, 7 aa, Artificial sequence
  Protein classification predicting sequence
NPWNRRN

SEQ ID NO: 34502 - protein, 13 aa, Artificial sequence
  Protein classification predicting sequence
SELLWFLHGDTNI

SEQ ID NO: 34503 - protein, 29 aa, Artificial sequence
  Protein classification predicting sequence
MALPPCHTLFQFYVADGKLSCQLYQRSGD

SEQ ID NO: 34504 - protein, 11 aa, Artificial sequence
  Protein classification predicting sequence
LSCQLYQRSGD

SEQ ID NO: 34505 - protein, 19 aa, Artificial sequence
  Protein classification predicting sequence
FLGVPFNIASYALLTHLIA

SEQ ID NO: 34506 - protein, 15 aa, Artificial sequence
  Protein classification predicting sequence
IVSAWNVGELDKMAL

SEQ ID NO: 34507 - protein, 11 aa, Artificial sequence
  Protein classification predicting sequence
PCHALFQFYVA

SEQ ID NO: 34508 - protein, 8 aa, Artificial sequence
  Protein classification predicting sequence
IWDEWADE

SEQ ID NO: 34509 - protein, 18 aa, Artificial sequence
  Protein classification predicting sequence
FQFYVADGKLSCQLYQRS

SEQ ID NO: 34510 - protein, 15 aa, Artificial sequence
  Protein classification predicting sequence
YVADGKLSCQLYQRS

SEQ ID NO: 34511 - protein, 7 aa, Artificial sequence
  Protein classification predicting sequence
TTKRVPF

SEQ ID NO: 34512 - protein, 21 aa, Artificial sequence
  Protein classification predicting sequence
GDTNIRYLLQHNNNIWNEWAF

SEQ ID NO: 34513 - protein, 6 aa, Artificial sequence
  Protein classification predicting sequence
DMTDFG

SEQ ID NO: 34514 - protein, 12 aa, Artificial sequence
  Protein classification predicting sequence
DGKLSCQLYQRS

SEQ ID NO: 34515 - protein, 14 aa, Artificial sequence
  Protein classification predicting sequence
DGKLSCQLYQRSAD

SEQ ID NO: 34516 - protein, 6 aa, Artificial sequence
  Protein classification predicting sequence
PAIKAP

SEQ ID NO: 34517 - protein, 7 aa, Artificial sequence
  Protein classification predicting sequence
GLEVGEF

SEQ ID NO: 34518 - protein, 7 aa, Artificial sequence
  Protein classification predicting sequence
GCLRPCM

SEQ ID NO: 34519 - protein, 5 aa, Artificial sequence
  Protein classification predicting sequence
IWNEW

SEQ ID NO: 34520 - protein, 7 aa, Artificial sequence
  Protein classification predicting sequence
YLNHLEQ

SEQ ID NO: 34521 - protein, 8 aa, Artificial sequence
  Protein classification predicting sequence
RSADVFLG

SEQ ID NO: 34522 - protein, 5 aa, Artificial sequence
  Protein classification predicting sequence
PFNIA

SEQ ID NO: 34523 - protein, 9 aa, Artificial sequence
  Protein classification predicting sequence
EQVKEQLSR

SEQ ID NO: 34524 - protein, 7 aa, Artificial sequence
  Protein classification predicting sequence
INPEVKD

SEQ ID NO: 34525 - protein, 6 aa, Artificial sequence
  Protein classification predicting sequence
HIYSNH

SEQ ID NO: 34526 - protein, 7 aa, Artificial sequence
  Protein classification predicting sequence
YEHHDPI

SEQ ID NO: 34527 - protein, 7 aa, Artificial sequence
  Protein classification predicting sequence
MALAPCH

SEQ ID NO: 34528 - protein, 8 aa, Artificial sequence
  Protein classification predicting sequence
QLYQRSGD

SEQ ID NO: 34529 - protein, 10 aa, Artificial sequence
  Protein classification predicting sequence
PCHAFFQFYV

SEQ ID NO: 34530 - protein, 6 aa, Artificial sequence
  Protein classification predicting sequence
SHPAIK

SEQ ID NO: 34531 - protein, 10 aa, Artificial sequence
  Protein classification predicting sequence
PFNIASYSLL

SEQ ID NO: 34532 - protein, 7 aa, Artificial sequence
  Protein classification predicting sequence
LEVGDFV

SEQ ID NO: 34533 - protein, 8 aa, Artificial sequence
  Protein classification predicting sequence
GFPLLTTK

SEQ ID NO: 34534 - protein, 15 aa, Artificial sequence
  Protein classification predicting sequence
DEWADENGDLGPVYG

SEQ ID NO: 34535 - protein, 6 aa, Artificial sequence
  Protein classification predicting sequence
IDQIAN

SEQ ID NO: 34536 - protein, 9 aa, Artificial sequence
  Protein classification predicting sequence
LSCQLYQRS

SEQ ID NO: 34537 - protein, 11 aa, Artificial sequence
  Protein classification predicting sequence
LSCQLYQRSAD

SEQ ID NO: 34538 - protein, 7 aa, Artificial sequence
  Protein classification predicting sequence
REPRALP

SEQ ID NO: 34539 - protein, 9 aa, Artificial sequence
  Protein classification predicting sequence
FGYQMRFDL

SEQ ID NO: 34540 - protein, 8 aa, Artificial sequence
  Protein classification predicting sequence
FQFYVADG

SEQ ID NO: 34541 - protein, 13 aa, Artificial sequence
  Protein classification predicting sequence
GRLSCQLYQRSAD

SEQ ID NO: 34542 - protein, 6 aa, Artificial sequence
  Protein classification predicting sequence
FGHQLR

SEQ ID NO: 34543 - protein, 7 aa, Artificial sequence
  Protein classification predicting sequence
FDYRFED

SEQ ID NO: 34544 - protein, 6 aa, Artificial sequence
  Protein classification predicting sequence
SIFGHQ

SEQ ID NO: 34545 - protein, 23 aa, Artificial sequence
  Protein classification predicting sequence
KGFPLLTTKRVPFRLVASELLWF

SEQ ID NO: 34546 - protein, 7 aa, Artificial sequence
  Protein classification predicting sequence
IVSAWNP

SEQ ID NO: 34547 - protein, 6 aa, Artificial sequence
  Protein classification predicting sequence
LFQFYV

SEQ ID NO: 34548 - protein, 7 aa, Artificial sequence
  Protein classification predicting sequence
ECGLEVG

SEQ ID NO: 34549 - protein, 10 aa, Artificial sequence
  Protein classification predicting sequence
RTGKRCLTVI

SEQ ID NO: 34550 - protein, 8 aa, Artificial sequence
  Protein classification predicting sequence
TTRKSFWK

SEQ ID NO: 34551 - protein, 8 aa, Artificial sequence
  Protein classification predicting sequence
FSLLGDTL

SEQ ID NO: 34552 - protein, 18 aa, Artificial sequence
  Protein classification predicting sequence
LTSYQRSCDVPLGLNFNQ

SEQ ID NO: 34553 - protein, 6 aa, Artificial sequence
  Protein classification predicting sequence
QLTRTP

SEQ ID NO: 34554 - protein, 9 aa, Artificial sequence
  Protein classification predicting sequence
YGYQWRSWP

SEQ ID NO: 34555 - protein, 7 aa, Artificial sequence
  Protein classification predicting sequence
YDPHPHI

SEQ ID NO: 34556 - protein, 8 aa, Artificial sequence
  Protein classification predicting sequence
EDRTGTGT

SEQ ID NO: 34557 - protein, 9 aa, Artificial sequence
  Protein classification predicting sequence
DEMALPPCH

SEQ ID NO: 34558 - protein, 10 aa, Artificial sequence
  Protein classification predicting sequence
EFIWTGGDCH

SEQ ID NO: 34559 - protein, 8 aa, Artificial sequence
  Protein classification predicting sequence
NPEVKDLF

SEQ ID NO: 34560 - protein, 13 aa, Artificial sequence
  Protein classification predicting sequence
LGCKVWDQNANEN

SEQ ID NO: 34561 - protein, 6 aa, Artificial sequence
  Protein classification predicting sequence
YGVQWR

SEQ ID NO: 34562 - protein, 8 aa, Artificial sequence
  Protein classification predicting sequence
EMALPPCH

SEQ ID NO: 34563 - protein, 7 aa, Artificial sequence
  Protein classification predicting sequence
LYIRSND

SEQ ID NO: 34564 - protein, 15 aa, Artificial sequence
  Protein classification predicting sequence
GLGTPFNLTEGAALL

SEQ ID NO: 34565 - protein, 13 aa, Artificial sequence
  Protein classification predicting sequence
YFIGDAHVYENHL

SEQ ID NO: 34566 - protein, 14 aa, Artificial sequence
  Protein classification predicting sequence
AFKSAIGEMVGFLR

SEQ ID NO: 34567 - protein, 9 aa, Artificial sequence
  Protein classification predicting sequence
RFDLQQGFP

SEQ ID NO: 34568 - protein, 12 aa, Artificial sequence
  Protein classification predicting sequence
ENGVTIWDEWAD

SEQ ID NO: 34569 - protein, 11 aa, Artificial sequence
  Protein classification predicting sequence
GDFVHTLGDAH

SEQ ID NO: 34570 - protein, 6 aa, Artificial sequence
  Protein classification predicting sequence
GEFVHT

SEQ ID NO: 34571 - protein, 6 aa, Artificial sequence
  Protein classification predicting sequence
HLYSNH

SEQ ID NO: 34572 - protein, 7 aa, Artificial sequence
  Protein classification predicting sequence
EQLSRTP

SEQ ID NO: 34573 - protein, 15 aa, Artificial sequence
  Protein classification predicting sequence
FLGVPFNIASYALLT

SEQ ID NO: 34574 - protein, 72 aa, Artificial sequence
  Protein classification predicting sequence
GFPLVTTKRCHLRSIIHELLWFLQGDTNIAYLHENNVTIWDEWADENGDLGPVYGKQWRAWPTPDGRHIDQI

SEQ ID NO: 34575 - protein, 30 aa, Artificial sequence
  Protein classification predicting sequence
QKVLDEGTQKNDRTGTGTLSIFGHQMRFNL

SEQ ID NO: 34576 - protein, 10 aa, Artificial sequence
  Protein classification predicting sequence
PFNIASYALL

SEQ ID NO: 34577 - protein, 12 aa, Artificial sequence
  Protein classification predicting sequence
DRTGTGTLSIFG

SEQ ID NO: 34578 - protein, 11 aa, Artificial sequence
  Protein classification predicting sequence
FPLLTTKRVFW

SEQ ID NO: 34579 - protein, 8 aa, Artificial sequence
  Protein classification predicting sequence
IDTIKTNP

SEQ ID NO: 34580 - protein, 10 aa, Artificial sequence
  Protein classification predicting sequence
GPDMTDFGHR

SEQ ID NO: 34581 - protein, 15 aa, Artificial sequence
  Protein classification predicting sequence
TGTISKFGHQLRFDL

SEQ ID NO: 34582 - protein, 49 aa, Artificial sequence
  Protein classification predicting sequence
KGFPLLTTKKVSFKLVATELLWFIKGDTNIQYLLKYNNNIWNEWAFENY

SEQ ID NO: 34583 - protein, 10 aa, Artificial sequence
  Protein classification predicting sequence
DPEFNEQYKE

SEQ ID NO: 34584 - protein, 12 aa, Artificial sequence
  Protein classification predicting sequence
LGNVYGKQWRDW

SEQ ID NO: 34585 - protein, 13 aa, Artificial sequence
  Protein classification predicting sequence
DKSIFDINYEDLE

SEQ ID NO: 34586 - protein, 13 aa, Artificial sequence
  Protein classification predicting sequence
SKYITGAFAEYDL

SEQ ID NO: 34587 - protein, 7 aa, Artificial sequence
  Protein classification predicting sequence
IKSAIKE

SEQ ID NO: 34588 - protein, 7 aa, Artificial sequence
  Protein classification predicting sequence
FWIYQDQ

SEQ ID NO: 34589 - protein, 12 aa, Artificial sequence
  Protein classification predicting sequence
KGEFPITTLRPI

SEQ ID NO: 34590 - protein, 7 aa, Artificial sequence
  Protein classification predicting sequence
YWNDWEV

SEQ ID NO: 34591 - protein, 18 aa, Artificial sequence
  Protein classification predicting sequence
NPWNRRNVISLWDYEAFE

SEQ ID NO: 34592 - protein, 8 aa, Artificial sequence
  Protein classification predicting sequence
GLLPCAFQ

SEQ ID NO: 34593 - protein, 7 aa, Artificial sequence
  Protein classification predicting sequence
MFDVRRV

SEQ ID NO: 34594 - protein, 8 aa, Artificial sequence
  Protein classification predicting sequence
KYNVHYWN

SEQ ID NO: 34595 - protein, 7 aa, Artificial sequence
  Protein classification predicting sequence
LTQRSND

SEQ ID NO: 34596 - protein, 10 aa, Artificial sequence
  Protein classification predicting sequence
NNLHIYDNQF

SEQ ID NO: 34597 - protein, 7 aa, Artificial sequence
  Protein classification predicting sequence
LVLNVPD

SEQ ID NO: 34598 - protein, 7 aa, Artificial sequence
  Protein classification predicting sequence
TNFFDIK

SEQ ID NO: 34599 - protein, 6 aa, Artificial sequence
  Protein classification predicting sequence
SKYITG

SEQ ID NO: 34600 - protein, 7 aa, Artificial sequence
  Protein classification predicting sequence
ELLKRQP

SEQ ID NO: 34601 - protein, 6 aa, Artificial sequence
  Protein classification predicting sequence
NNQFPL

SEQ ID NO: 34602 - protein, 31 aa, Artificial sequence
  Protein classification predicting sequence
NNQFPLVTTRKSFWKAAVAELLGYIRGYDNA

SEQ ID NO: 34603 - protein, 6 aa, Artificial sequence
  Protein classification predicting sequence
AWLNNP

SEQ ID NO: 34604 - protein, 9 aa, Artificial sequence
  Protein classification predicting sequence
HKIVNAHIY

SEQ ID NO: 34605 - protein, 7 aa, Artificial sequence
  Protein classification predicting sequence
DLETWVT

SEQ ID NO: 34606 - protein, 17 aa, Artificial sequence
  Protein classification predicting sequence
FPLVTTRKSFWKAAVAE

SEQ ID NO: 34607 - protein, 12 aa, Artificial sequence
  Protein classification predicting sequence
DDMGRVYGVQGR

SEQ ID NO: 34608 - protein, 7 aa, Artificial sequence
  Protein classification predicting sequence
VQLKREP

SEQ ID NO: 34609 - protein, 11 aa, Artificial sequence
  Protein classification predicting sequence
VQLKREPLQAP

SEQ ID NO: 34610 - protein, 9 aa, Artificial sequence
  Protein classification predicting sequence
LEDLETWVT

SEQ ID NO: 34611 - protein, 13 aa, Artificial sequence
  Protein classification predicting sequence
HKIVNAHIYEDQL

SEQ ID NO: 34612 - protein, 7 aa, Artificial sequence
  Protein classification predicting sequence
FGMQARY

SEQ ID NO: 34613 - protein, 8 aa, Artificial sequence
  Protein classification predicting sequence
GDLGPIYG

SEQ ID NO: 34614 - protein, 9 aa, Artificial sequence
  Protein classification predicting sequence
ELLWFLRGD

SEQ ID NO: 34615 - protein, 13 aa, Artificial sequence
  Protein classification predicting sequence
HLRSIIHELLWFL

SEQ ID NO: 34616 - protein, 23 aa, Artificial sequence
  Protein classification predicting sequence
GFPLVTTKRCHLRSIIHELLWFL

SEQ ID NO: 34617 - protein, 31 aa, Artificial sequence
  Protein classification predicting sequence
EQTHLQLSREPRALPKLVIKRKPDSLFDYRF

SEQ ID NO: 34618 - protein, 12 aa, Artificial sequence
  Protein classification predicting sequence
DRTGTGTRSVFG

SEQ ID NO: 34619 - protein, 18 aa, Artificial sequence
  Protein classification predicting sequence
EIKRNPDSRRLVISAWNV

SEQ ID NO: 34620 - protein, 6 aa, Artificial sequence
  Protein classification predicting sequence
YSNHID

SEQ ID NO: 34621 - protein, 16 aa, Artificial sequence
  Protein classification predicting sequence
LPKLVIKRKPDSLFDY

SEQ ID NO: 34622 - protein, 11 aa, Artificial sequence
  Protein classification predicting sequence
QTHLQLSREPR

SEQ ID NO: 34623 - protein, 7 aa, Artificial sequence
  Protein classification predicting sequence
RFDLSKG

SEQ ID NO: 34624 - protein, 6 aa, Artificial sequence
  Protein classification predicting sequence
LTTKKV

SEQ ID NO: 34625 - protein, 7 aa, Artificial sequence
  Protein classification predicting sequence
LYQRSAD

SEQ ID NO: 34626 - protein, 6 aa, Artificial sequence
  Protein classification predicting sequence
VWTGGD

SEQ ID NO: 34627 - protein, 7 aa, Artificial sequence
  Protein classification predicting sequence
QLAREPR

SEQ ID NO: 34628 - protein, 9 aa, Artificial sequence
  Protein classification predicting sequence
GIDMGEAPL

SEQ ID NO: 34629 - protein, 6 aa, Artificial sequence
  Protein classification predicting sequence
VTCMEM

SEQ ID NO: 34630 - protein, 6 aa, Artificial sequence
  Protein classification predicting sequence
EHVPDP

SEQ ID NO: 34631 - protein, 7 aa, Artificial sequence
  Protein classification predicting sequence
GAEYVLR

SEQ ID NO: 34632 - protein, 7 aa, Artificial sequence
  Protein classification predicting sequence
GVTYNPL

SEQ ID NO: 34633 - protein, 7 aa, Artificial sequence
  Protein classification predicting sequence
TNIEVAK

SEQ ID NO: 34634 - protein, 10 aa, Artificial sequence
  Protein classification predicting sequence
AIVGAEYVLR

SEQ ID NO: 34635 - protein, 19 aa, Artificial sequence
  Protein classification predicting sequence
LDIGCGGGLLCEPMARLGA

SEQ ID NO: 34636 - protein, 6 aa, Artificial sequence
  Protein classification predicting sequence
EFKPLH

SEQ ID NO: 34637 - protein, 7 aa, Artificial sequence
  Protein classification predicting sequence
SEFKPLH

SEQ ID NO: 34638 - protein, 6 aa, Artificial sequence
  Protein classification predicting sequence
INPLRL

SEQ ID NO: 34639 - protein, 10 aa, Artificial sequence
  Protein classification predicting sequence
GAQVTGIDLA

SEQ ID NO: 34640 - protein, 6 aa, Artificial sequence
  Protein classification predicting sequence
SVVRAC

SEQ ID NO: 34641 - protein, 9 aa, Artificial sequence
  Protein classification predicting sequence
VFFSTLNRN

SEQ ID NO: 34642 - protein, 7 aa, Artificial sequence
  Protein classification predicting sequence
AVVGAEY

SEQ ID NO: 34643 - protein, 6 aa, Artificial sequence
  Protein classification predicting sequence
LPRGTH

SEQ ID NO: 34644 - protein, 7 aa, Artificial sequence
  Protein classification predicting sequence
LEHVPDP

SEQ ID NO: 34645 - protein, 8 aa, Artificial sequence
  Protein classification predicting sequence
FFSTINRN

SEQ ID NO: 34646 - protein, 10 aa, Artificial sequence
  Protein classification predicting sequence
EIAKFEAVAS

SEQ ID NO: 34647 - protein, 8 aa, Artificial sequence
  Protein classification predicting sequence
QTSLKERH

SEQ ID NO: 34648 - protein, 7 aa, Artificial sequence
  Protein classification predicting sequence
EIAKFEA

SEQ ID NO: 34649 - protein, 7 aa, Artificial sequence
  Protein classification predicting sequence
VTGLDMG

SEQ ID NO: 34650 - protein, 8 aa, Artificial sequence
  Protein classification predicting sequence
VARLHALE

SEQ ID NO: 34651 - protein, 6 aa, Artificial sequence
  Protein classification predicting sequence
PKGTHD

SEQ ID NO: 34652 - protein, 8 aa, Artificial sequence
  Protein classification predicting sequence
TINRTLKA

SEQ ID NO: 34653 - protein, 7 aa, Artificial sequence
  Protein classification predicting sequence
YVQETVE

SEQ ID NO: 34654 - protein, 13 aa, Artificial sequence
  Protein classification predicting sequence
VTCMEMLEHVPDP

SEQ ID NO: 34655 - protein, 15 aa, Artificial sequence
  Protein classification predicting sequence
LDVGCGGGILAESMA

SEQ ID NO: 34656 - protein, 7 aa, Artificial sequence
  Protein classification predicting sequence
VNYIVHT

SEQ ID NO: 34657 - protein, 9 aa, Artificial sequence
  Protein classification predicting sequence
EMLEHVPDP

SEQ ID NO: 34658 - protein, 15 aa, Artificial sequence
  Protein classification predicting sequence
DVVTCMEMLEHVPDP

SEQ ID NO: 34659 - protein, 12 aa, Artificial sequence
  Protein classification predicting sequence
MFVATINRTLKA

SEQ ID NO: 34660 - protein, 9 aa, Artificial sequence
  Protein classification predicting sequence
KLVRPEELE

SEQ ID NO: 34661 - protein, 9 aa, Artificial sequence
  Protein classification predicting sequence
PLHRINPLR

SEQ ID NO: 34662 - protein, 6 aa, Artificial sequence
  Protein classification predicting sequence
LHRINP

SEQ ID NO: 34663 - protein, 7 aa, Artificial sequence
  Protein classification predicting sequence
ASRWWDL

SEQ ID NO: 34664 - protein, 7 aa, Artificial sequence
  Protein classification predicting sequence
GEFKPLH

SEQ ID NO: 34665 - protein, 14 aa, Artificial sequence
  Protein classification predicting sequence
YVQETVEEHAAKHA

SEQ ID NO: 34666 - protein, 51 aa, Artificial sequence
  Protein classification predicting sequence
GGLFGKKVLDVGCGGGILAESMAREGATVTGLDMGFEPLQVAKLHALESGI

SEQ ID NO: 34667 - protein, 44 aa, Artificial sequence
  Protein classification predicting sequence
VFFSTLNRNGKSWLMAVVGAEYILRMVPKGTHDVKKFIKPAELL

SEQ ID NO: 34668 - protein, 6 aa, Artificial sequence
  Protein classification predicting sequence
EIAKFE

SEQ ID NO: 34669 - protein, 10 aa, Artificial sequence
  Protein classification predicting sequence
VARLHALETG

SEQ ID NO: 34670 - protein, 7 aa, Artificial sequence
  Protein classification predicting sequence
FIKPSEL

SEQ ID NO: 34671 - protein, 31 aa, Artificial sequence
  Protein classification predicting sequence
VTGLDMGKEPLEVARLHALETGTKLTYIQST

SEQ ID NO: 34672 - protein, 24 aa, Artificial sequence
  Protein classification predicting sequence
KSYLFAIVGAEKLLKIVPEGTHDH

SEQ ID NO: 34673 - protein, 7 aa, Artificial sequence
  Protein classification predicting sequence
FIKPAEL

SEQ ID NO: 34674 - protein, 9 aa, Artificial sequence
  Protein classification predicting sequence
ARLHGLESG

SEQ ID NO: 34675 - protein, 9 aa, Artificial sequence
  Protein classification predicting sequence
LESGIQVDY

SEQ ID NO: 34676 - protein, 7 aa, Artificial sequence
  Protein classification predicting sequence
SVVRACA

SEQ ID NO: 34677 - protein, 12 aa, Artificial sequence
  Protein classification predicting sequence
KSWLMAVVGAEY

SEQ ID NO: 34678 - protein, 10 aa, Artificial sequence
  Protein classification predicting sequence
KLGRNVDVNY

SEQ ID NO: 34679 - protein, 7 aa, Artificial sequence
  Protein classification predicting sequence
KLFVDTD

SEQ ID NO: 34680 - protein, 15 aa, Artificial sequence
  Protein classification predicting sequence
LEEGAQCPAPLSYVP

SEQ ID NO: 34681 - protein, 26 aa, Artificial sequence
  Protein classification predicting sequence
NASGEHGIVVFSLGSMVSEIPEKKAM

SEQ ID NO: 34682 - protein, 7 aa, Artificial sequence
  Protein classification predicting sequence
DLENALK

SEQ ID NO: 34683 - protein, 12 aa, Artificial sequence
  Protein classification predicting sequence
DYPRPIMPNMVF

SEQ ID NO: 34684 - protein, 6 aa, Artificial sequence
  Protein classification predicting sequence
EATQCP

SEQ ID NO: 34685 - protein, 27 aa, Artificial sequence
  Protein classification predicting sequence
LWRYTGTRPSNLAKNTILVKWLPQNDL

SEQ ID NO: 34686 - protein, 13 aa, Artificial sequence
  Protein classification predicting sequence
NTILVKWLPQNDL

SEQ ID NO: 34687 - protein, 6 aa, Artificial sequence
  Protein classification predicting sequence
RAFITH

SEQ ID NO: 34688 - protein, 18 aa, Artificial sequence
  Protein classification predicting sequence
KSYKENIMRLSSLHKDRP

SEQ ID NO: 34689 - protein, 11 aa, Artificial sequence
  Protein classification predicting sequence
EPLDLAVFWVE

SEQ ID NO: 34690 - protein, 10 aa, Artificial sequence
  Protein classification predicting sequence
QCPAPLSYVP

SEQ ID NO: 34691 - protein, 12 aa, Artificial sequence
  Protein classification predicting sequence
VVPMDGSHWFTM

SEQ ID NO: 34692 - protein, 16 aa, Artificial sequence
  Protein classification predicting sequence
SVVEKLILRGHEVVVV

SEQ ID NO: 34693 - protein, 7 aa, Artificial sequence
  Protein classification predicting sequence
MTFKERV

SEQ ID NO: 34694 - protein, 7 aa, Artificial sequence
  Protein classification predicting sequence
GSHWLSM

SEQ ID NO: 34695 - protein, 6 aa, Artificial sequence
  Protein classification predicting sequence
HASVWL

SEQ ID NO: 34696 - protein, 15 aa, Artificial sequence
  Protein classification predicting sequence
PYASLASELFQREVS

SEQ ID NO: 34697 - protein, 18 aa, Artificial sequence
  Protein classification predicting sequence
IADALGKIPQTVLWRYTG

SEQ ID NO: 34698 - protein, 9 aa, Artificial sequence
  Protein classification predicting sequence
RPSNLAKNT

SEQ ID NO: 34699 - protein, 7 aa, Artificial sequence
  Protein classification predicting sequence
LLGHPKT

SEQ ID NO: 34700 - protein, 24 aa, Artificial sequence
  Protein classification predicting sequence
RAFITHSGSHGIYEGICNGVPMVM

SEQ ID NO: 34701 - protein, 12 aa, Artificial sequence
  Protein classification predicting sequence
PLFGDQMDNAKR

SEQ ID NO: 34702 - protein, 12 aa, Artificial sequence
  Protein classification predicting sequence
GAGVTLNVLEMT

SEQ ID NO: 34703 - protein, 42 aa, Artificial sequence
  Protein classification predicting sequence
VINDKSYKENIMRLSSLHKDRPVEPLDLAVFWVEFVMRHKGA

SEQ ID NO: 34704 - protein, 9 aa, Artificial sequence
  Protein classification predicting sequence
EFVMRHKGA

SEQ ID NO: 34705 - protein, 13 aa, Artificial sequence
  Protein classification predicting sequence
GKKGRVKKAHKSK

SEQ ID NO: 34706 - protein, 6 aa, Artificial sequence
  Protein classification predicting sequence
PVMPNM

SEQ ID NO: 34707 - protein, 6 aa, Artificial sequence
  Protein classification predicting sequence
SDHMTF

SEQ ID NO: 34708 - protein, 12 aa, Artificial sequence
  Protein classification predicting sequence
MPNMVFIGGINC

SEQ ID NO: 34709 - protein, 8 aa, Artificial sequence
  Protein classification predicting sequence
LSQEFEAY

SEQ ID NO: 34710 - protein, 23 aa, Artificial sequence
  Protein classification predicting sequence
RPAAHDLTWYQYHSLDVIGFLLA

SEQ ID NO: 34711 - protein, 12 aa, Artificial sequence
  Protein classification predicting sequence
YLFRGFPCSLEH

SEQ ID NO: 34712 - protein, 10 aa, Artificial sequence
  Protein classification predicting sequence
FDAVFLDPFD

SEQ ID NO: 34713 - protein, 19 aa, Artificial sequence
  Protein classification predicting sequence
CHYLEEGAQCPAPLSYVPR

SEQ ID NO: 34714 - protein, 11 aa, Artificial sequence
  Protein classification predicting sequence
AKYFSLPSVVF

SEQ ID NO: 34715 - protein, 6 aa, Artificial sequence
  Protein classification predicting sequence
EGAQCP

SEQ ID NO: 34716 - protein, 7 aa, Artificial sequence
  Protein classification predicting sequence
SYVPRIL

SEQ ID NO: 34717 - protein, 25 aa, Artificial sequence
  Protein classification predicting sequence
ICNGVPMVMMPLFGDQMDNAKRMET

SEQ ID NO: 34718 - protein, 33 aa, Artificial sequence
  Protein classification predicting sequence
VMRHKGAPHLRPAAHDLTWYQYHSLDVIGFLLA

SEQ ID NO: 34719 - protein, 8 aa, Artificial sequence
  Protein classification predicting sequence
PMEGSHWL

SEQ ID NO: 34720 - protein, 7 aa, Artificial sequence
  Protein classification predicting sequence
YSLRFSP

SEQ ID NO: 34721 - protein, 10 aa, Artificial sequence
  Protein classification predicting sequence
NGIYEAIYHG

SEQ ID NO: 34722 - protein, 15 aa, Artificial sequence
  Protein classification predicting sequence
NGIYEAIYHGVPMVG

SEQ ID NO: 34723 - protein, 7 aa, Artificial sequence
  Protein classification predicting sequence
AAHDLTW

SEQ ID NO: 34724 - protein, 7 aa, Artificial sequence
  Protein classification predicting sequence
AFITHGG

SEQ ID NO: 34725 - protein, 5 aa, Artificial sequence
  Protein classification predicting sequence
KCCLF

SEQ ID NO: 34726 - protein, 8 aa, Artificial sequence
  Protein classification predicting sequence
WMNMKTIL

SEQ ID NO: 34727 - protein, 11 aa, Artificial sequence
  Protein classification predicting sequence
FPPSYVPVVMS

SEQ ID NO: 34728 - protein, 8 aa, Artificial sequence
  Protein classification predicting sequence
PMVGIPLF

SEQ ID NO: 34729 - protein, 7 aa, Artificial sequence
  Protein classification predicting sequence
SYKENIM

SEQ ID NO: 34730 - protein, 13 aa, Artificial sequence
  Protein classification predicting sequence
YFSSGSCGKVLVW

SEQ ID NO: 34731 - protein, 10 aa, Artificial sequence
  Protein classification predicting sequence
MKKLQESRFD

SEQ ID NO: 34732 - protein, 10 aa, Artificial sequence
  Protein classification predicting sequence
VYSLRFTPGY

SEQ ID NO: 34733 - protein, 17 aa, Artificial sequence
  Protein classification predicting sequence
KKWDQFYSEVLGRPTTL

SEQ ID NO: 34734 - protein, 6 aa, Artificial sequence
  Protein classification predicting sequence
ETMGKA

SEQ ID NO: 34735 - protein, 6 aa, Artificial sequence
  Protein classification predicting sequence
FQFPHP

SEQ ID NO: 34736 - protein, 7 aa, Artificial sequence
  Protein classification predicting sequence
VVFSLGS

SEQ ID NO: 34737 - protein, 10 aa, Artificial sequence
  Protein classification predicting sequence
NALKTVINDP

SEQ ID NO: 34738 - protein, 6 aa, Artificial sequence
  Protein classification predicting sequence
YKENIM

SEQ ID NO: 34739 - protein, 8 aa, Artificial sequence
  Protein classification predicting sequence
HKGAKHLR

SEQ ID NO: 34740 - protein, 5 aa, Artificial sequence
  Protein classification predicting sequence
SHWMN

SEQ ID NO: 34741 - protein, 11 aa, Artificial sequence
  Protein classification predicting sequence
GVVVFSLGSMV

SEQ ID NO: 34742 - protein, 9 aa, Artificial sequence
  Protein classification predicting sequence
VVFSLGSMV

SEQ ID NO: 34743 - protein, 11 aa, Artificial sequence
  Protein classification predicting sequence
ALAQIPQKVLW

SEQ ID NO: 34744 - protein, 7 aa, Artificial sequence
  Protein classification predicting sequence
NTRLYKW

SEQ ID NO: 34745 - protein, 6 aa, Artificial sequence
  Protein classification predicting sequence
DNIAHM

SEQ ID NO: 34746 - protein, 14 aa, Artificial sequence
  Protein classification predicting sequence
WYQYHSLDVIGFLL

SEQ ID NO: 34747 - protein, 12 aa, Artificial sequence
  Protein classification predicting sequence
QYHSLDVIGFLL

SEQ ID NO: 34748 - protein, 12 aa, Artificial sequence
  Protein classification predicting sequence
FSSGSCGKVLVW

SEQ ID NO: 34749 - protein, 7 aa, Artificial sequence
  Protein classification predicting sequence
FVQSSGE

SEQ ID NO: 34750 - protein, 13 aa, Artificial sequence
  Protein classification predicting sequence
QYHSLDVIGFLLA

SEQ ID NO: 34751 - protein, 8 aa, Artificial sequence
  Protein classification predicting sequence
KLQESRFD

SEQ ID NO: 34752 - protein, 6 aa, Artificial sequence
  Protein classification predicting sequence
VYSLRF

SEQ ID NO: 34753 - protein, 7 aa, Artificial sequence
  Protein classification predicting sequence
MTFMERV

SEQ ID NO: 34754 - protein, 14 aa, Artificial sequence
  Protein classification predicting sequence
PQNDLLGHPKTKAF

SEQ ID NO: 34755 - protein, 7 aa, Artificial sequence
  Protein classification predicting sequence
HGIPMVG

SEQ ID NO: 34756 - protein, 7 aa, Artificial sequence
  Protein classification predicting sequence
QYHSLDV

SEQ ID NO: 34757 - protein, 7 aa, Artificial sequence
  Protein classification predicting sequence
KCCLFCF

SEQ ID NO: 34758 - protein, 11 aa, Artificial sequence
  Protein classification predicting sequence
IFPCSELLAEL

SEQ ID NO: 34759 - protein, 24 aa, Artificial sequence
  Protein classification predicting sequence
FEKHCGGFLFPPSYVPVVMSELSD

SEQ ID NO: 34760 - protein, 6 aa, Artificial sequence
  Protein classification predicting sequence
KPDTLG

SEQ ID NO: 34761 - protein, 10 aa, Artificial sequence
  Protein classification predicting sequence
DQPDNIAHMK

SEQ ID NO: 34762 - protein, 7 aa, Artificial sequence
  Protein classification predicting sequence
TMSSTDL

SEQ ID NO: 34763 - protein, 12 aa, Artificial sequence
  Protein classification predicting sequence
ELVQRGHEVTVL

SEQ ID NO: 34764 - protein, 12 aa, Artificial sequence
  Protein classification predicting sequence
GGFLFPPSYVPV

SEQ ID NO: 34765 - protein, 7 aa, Artificial sequence
  Protein classification predicting sequence
PPSYVPV

SEQ ID NO: 34766 - protein, 6 aa, Artificial sequence
  Protein classification predicting sequence
WDQFYS

SEQ ID NO: 34767 - protein, 8 aa, Artificial sequence
  Protein classification predicting sequence
VLGRPTTL

SEQ ID NO: 34768 - protein, 11 aa, Artificial sequence
  Protein classification predicting sequence
PQNDLLGHPKT

SEQ ID NO: 34769 - protein, 16 aa, Artificial sequence
  Protein classification predicting sequence
CGKVLVWPTEYSHWIN

SEQ ID NO: 34770 - protein, 8 aa, Artificial sequence
  Protein classification predicting sequence
NDPSYKEN

SEQ ID NO: 34771 - protein, 11 aa, Artificial sequence
  Protein classification predicting sequence
KPLDRAVFWIE

SEQ ID NO: 34772 - protein, 10 aa, Artificial sequence
  Protein classification predicting sequence
NMKTILEELV

SEQ ID NO: 34773 - protein, 16 aa, Artificial sequence
  Protein classification predicting sequence
ALAQIPQKVLWKFDGK

SEQ ID NO: 34774 - protein, 7 aa, Artificial sequence
  Protein classification predicting sequence
FLLACVA

SEQ ID NO: 34775 - protein, 26 aa, Artificial sequence
  Protein classification predicting sequence
LASSASILFDPNNSSALKIEVFPTSL

SEQ ID NO: 34776 - protein, 11 aa, Artificial sequence
  Protein classification predicting sequence
IPQKVLWRFDG

SEQ ID NO: 34777 - protein, 11 aa, Artificial sequence
  Protein classification predicting sequence
LDFDTMSSTDL

SEQ ID NO: 34778 - protein, 12 aa, Artificial sequence
  Protein classification predicting sequence
AAHDLTWFQYHS

SEQ ID NO: 34779 - protein, 9 aa, Artificial sequence
  Protein classification predicting sequence
YKENVMKLS

SEQ ID NO: 34780 - protein, 6 aa, Artificial sequence
  Protein classification predicting sequence
LGRPTT

SEQ ID NO: 34781 - protein, 9 aa, Artificial sequence
  Protein classification predicting sequence
WLIRSYWDL

SEQ ID NO: 34782 - protein, 7 aa, Artificial sequence
  Protein classification predicting sequence
THGGANG

SEQ ID NO: 34783 - protein, 6 aa, Artificial sequence
  Protein classification predicting sequence
PLFADQ

SEQ ID NO: 34784 - protein, 8 aa, Artificial sequence
  Protein classification predicting sequence
KLQESKFD

SEQ ID NO: 34785 - protein, 11 aa, Artificial sequence
  Protein classification predicting sequence
VYSLRFSPGYA

SEQ ID NO: 34786 - protein, 8 aa, Artificial sequence
  Protein classification predicting sequence
KADIWLIR

SEQ ID NO: 34787 - protein, 6 aa, Artificial sequence
  Protein classification predicting sequence
PHPLLP

SEQ ID NO: 34788 - protein, 50 aa, Artificial sequence
  Protein classification predicting sequence
NTRLYKWLPQNDLLGHPKTKAFITHGGTNGIYEAIYHGIPMVGIPLFADQ

SEQ ID NO: 34789 - protein, 11 aa, Artificial sequence
  Protein classification predicting sequence
PMVGIPLFADQ

SEQ ID NO: 34790 - protein, 6 aa, Artificial sequence
  Protein classification predicting sequence
YKENAM

SEQ ID NO: 34791 - protein, 6 aa, Artificial sequence
  Protein classification predicting sequence
IHHDQP

SEQ ID NO: 34792 - protein, 6 aa, Artificial sequence
  Protein classification predicting sequence
EYVMRH

SEQ ID NO: 34793 - protein, 20 aa, Artificial sequence
  Protein classification predicting sequence
QLSCYFSSGSCGKVLVWPTE

SEQ ID NO: 34794 - protein, 8 aa, Artificial sequence
  Protein classification predicting sequence
SLTKTEFE

SEQ ID NO: 34795 - protein, 8 aa, Artificial sequence
  Protein classification predicting sequence
ERVKNMIY

SEQ ID NO: 34796 - protein, 8 aa, Artificial sequence
  Protein classification predicting sequence
CKDVVSNK

SEQ ID NO: 34797 - protein, 7 aa, Artificial sequence
  Protein classification predicting sequence
ERIKNMI

SEQ ID NO: 34798 - protein, 7 aa, Artificial sequence
  Protein classification predicting sequence
CGKVLVW

SEQ ID NO: 34799 - protein, 9 aa, Artificial sequence
  Protein classification predicting sequence
QRGHEVTVL

SEQ ID NO: 34800 - protein, 10 aa, Artificial sequence
  Protein classification predicting sequence
FCKDVVSNKK

SEQ ID NO: 34801 - protein, 7 aa, Artificial sequence
  Protein classification predicting sequence
DLLNALK

SEQ ID NO: 34802 - protein, 7 aa, Artificial sequence
  Protein classification predicting sequence
FVGGLHC

SEQ ID NO: 34803 - protein, 10 aa, Artificial sequence
  Protein classification predicting sequence
PAKPLPKEME

SEQ ID NO: 34804 - protein, 8 aa, Artificial sequence
  Protein classification predicting sequence
NALKAVIN

SEQ ID NO: 34805 - protein, 22 aa, Artificial sequence
  Protein classification predicting sequence
RVEKIAALMDKPVKLASHREFT

SEQ ID NO: 34806 - protein, 8 aa, Artificial sequence
  Protein classification predicting sequence
EFPAVADF

SEQ ID NO: 34807 - protein, 6 aa, Artificial sequence
  Protein classification predicting sequence
REFTSW

SEQ ID NO: 34808 - protein, 13 aa, Artificial sequence
  Protein classification predicting sequence
VCSTGIGGPSTSI

SEQ ID NO: 34809 - protein, 22 aa, Artificial sequence
  Protein classification predicting sequence
RTFLRIGTTGAIQPHINVGDVL

SEQ ID NO: 34810 - protein, 8 aa, Artificial sequence
  Protein classification predicting sequence
VMNYEMES

SEQ ID NO: 34811 - protein, 21 aa, Artificial sequence
  Protein classification predicting sequence
GLRAGMVAGVIVNRTQQEIPN

SEQ ID NO: 34812 - protein, 7 aa, Artificial sequence
  Protein classification predicting sequence
KSIGATT

SEQ ID NO: 34813 - protein, 13 aa, Artificial sequence
  Protein classification predicting sequence
SDTFYPGQERYDT

SEQ ID NO: 34814 - protein, 9 aa, Artificial sequence
  Protein classification predicting sequence
STGIGGPST

SEQ ID NO: 34815 - protein, 8 aa, Artificial sequence
  Protein classification predicting sequence
WAPQVAVL

SEQ ID NO: 34816 - protein, 7 aa, Artificial sequence
  Protein classification predicting sequence
RPFFGDQ

SEQ ID NO: 34817 - protein, 14 aa, Artificial sequence
  Protein classification predicting sequence
AVVAFPFSSHAAVL

SEQ ID NO: 34818 - protein, 13 aa, Artificial sequence
  Protein classification predicting sequence
LPGNLRFVEVPDG

SEQ ID NO: 34819 - protein, 9 aa, Artificial sequence
  Protein classification predicting sequence
CVVGDAFVW

SEQ ID NO: 34820 - protein, 7 aa, Artificial sequence
  Protein classification predicting sequence
DVGDQAA

SEQ ID NO: 34821 - protein, 14 aa, Artificial sequence
  Protein classification predicting sequence
AVALNTFPGLDPPD

SEQ ID NO: 34822 - protein, 12 aa, Artificial sequence
  Protein classification predicting sequence
APADPHGCLAWL

SEQ ID NO: 34823 - protein, 10 aa, Artificial sequence
  Protein classification predicting sequence
GLVVPWAPQV

SEQ ID NO: 34824 - protein, 13 aa, Artificial sequence
  Protein classification predicting sequence
VGAFVTHAGWASV

SEQ ID NO: 34825 - protein, 8 aa, Artificial sequence
  Protein classification predicting sequence
KVAVKTMK

SEQ ID NO: 34826 - protein, 8 aa, Artificial sequence
  Protein classification predicting sequence
CMKEFDHP

SEQ ID NO: 34827 - protein, 13 aa, Artificial sequence
  Protein classification predicting sequence
VCVADFGLSKKIY

SEQ ID NO: 34828 - protein, 6 aa, Artificial sequence
  Protein classification predicting sequence
SKSDVW

SEQ ID NO: 34829 - protein, 8 aa, Artificial sequence
  Protein classification predicting sequence
FGVTMWEI

SEQ ID NO: 34830 - protein, 7 aa, Artificial sequence
  Protein classification predicting sequence
GNRLKQP

SEQ ID NO: 34831 - protein, 13 aa, Artificial sequence
  Protein classification predicting sequence
EHTKKDLDGFRKL

SEQ ID NO: 34832 - protein, 25 aa, Artificial sequence
  Protein classification predicting sequence
TEAWYPPGHGDIYASFYNSGLLDTF

SEQ ID NO: 34833 - protein, 11 aa, Artificial sequence
  Protein classification predicting sequence
KFKIFNTNNLW

SEQ ID NO: 34834 - protein, 8 aa, Artificial sequence
  Protein classification predicting sequence
KLNGGLGT

SEQ ID NO: 34835 - protein, 12 aa, Artificial sequence
  Protein classification predicting sequence
KLNGGLGTSMGC

SEQ ID NO: 34836 - protein, 9 aa, Artificial sequence
  Protein classification predicting sequence
GPKSVIEVR

SEQ ID NO: 34837 - protein, 7 aa, Artificial sequence
  Protein classification predicting sequence
LMNSFNT

SEQ ID NO: 34838 - protein, 8 aa, Artificial sequence
  Protein classification predicting sequence
WYPPGHGD

SEQ ID NO: 34839 - protein, 9 aa, Artificial sequence
  Protein classification predicting sequence
DNLGATVDL

SEQ ID NO: 34840 - protein, 8 aa, Artificial sequence
  Protein classification predicting sequence
ADVKGGTL

SEQ ID NO: 34841 - protein, 7 aa, Artificial sequence
  Protein classification predicting sequence
FNTNNLW

SEQ ID NO: 34842 - protein, 7 aa, Artificial sequence
  Protein classification predicting sequence
VLQLETA

SEQ ID NO: 34843 - protein, 10 aa, Artificial sequence
  Protein classification predicting sequence
VPRSRFLPVK

SEQ ID NO: 34844 - protein, 26 aa, Artificial sequence
  Protein classification predicting sequence
RADVKGGTLTQYEGKLRLVEIAQVPK

SEQ ID NO: 34845 - protein, 30 aa, Artificial sequence
  Protein classification predicting sequence
LLDKLVVLKLNGGLGTTMGCTGPKSVIEVR

SEQ ID NO: 34846 - protein, 18 aa, Artificial sequence
  Protein classification predicting sequence
LMNSFNTHDDTQKIVEKY

SEQ ID NO: 34847 - protein, 7 aa, Artificial sequence
  Protein classification predicting sequence
IHTFNQS

SEQ ID NO: 34848 - protein, 11 aa, Artificial sequence
  Protein classification predicting sequence
NVPRSRFLPVK

SEQ ID NO: 34849 - protein, 7 aa, Artificial sequence
  Protein classification predicting sequence
WYPPGHG

SEQ ID NO: 34850 - protein, 16 aa, Artificial sequence
  Protein classification predicting sequence
RFKSIPSIVELDSLKV

SEQ ID NO: 34851 - protein, 7 aa, Artificial sequence
  Protein classification predicting sequence
KLNGGLG

SEQ ID NO: 34852 - protein, 5 aa, Artificial sequence
  Protein classification predicting sequence
WYPPG

SEQ ID NO: 34853 - protein, 12 aa, Artificial sequence
  Protein classification predicting sequence
LELDHLTVSGDV

SEQ ID NO: 34854 - protein, 7 aa, Artificial sequence
  Protein classification predicting sequence
LKGTVII

SEQ ID NO: 34855 - protein, 11 aa, Artificial sequence
  Protein classification predicting sequence
TFLDLIVIQIE

SEQ ID NO: 34856 - protein, 7 aa, Artificial sequence
  Protein classification predicting sequence
GAVLENK

SEQ ID NO: 34857 - protein, 10 aa, Artificial sequence
  Protein classification predicting sequence
IELGPEFKKV

SEQ ID NO: 34858 - protein, 16 aa, Artificial sequence
  Protein classification predicting sequence
WSKIQTPTDEVVVPYD

SEQ ID NO: 34859 - protein, 8 aa, Artificial sequence
  Protein classification predicting sequence
RFKSIPSI

SEQ ID NO: 34860 - protein, 7 aa, Artificial sequence
  Protein classification predicting sequence
AKADLWS

SEQ ID NO: 34861 - protein, 7 aa, Artificial sequence
  Protein classification predicting sequence
SNFLLWQ

SEQ ID NO: 34862 - protein, 7 aa, Artificial sequence
  Protein classification predicting sequence
WPEFDAG

SEQ ID NO: 34863 - protein, 7 aa, Artificial sequence
  Protein classification predicting sequence
YGGRQEI

SEQ ID NO: 34864 - protein, 5 aa, Artificial sequence
  Protein classification predicting sequence
FMLWQ

SEQ ID NO: 34865 - protein, 8 aa, Artificial sequence
  Protein classification predicting sequence
RKVDFLRA

SEQ ID NO: 34866 - protein, 12 aa, Artificial sequence
  Protein classification predicting sequence
SLYAFSTENWKR

SEQ ID NO: 34867 - protein, 15 aa, Artificial sequence
  Protein classification predicting sequence
PDMPDVDLFLRPSGE

SEQ ID NO: 34868 - protein, 7 aa, Artificial sequence
  Protein classification predicting sequence
LLWQSAY

SEQ ID NO: 34869 - protein, 8 aa, Artificial sequence
  Protein classification predicting sequence
MDGNGRWA

SEQ ID NO: 34870 - protein, 6 aa, Artificial sequence
  Protein classification predicting sequence
FSTENW

SEQ ID NO: 34871 - protein, 8 aa, Artificial sequence
  Protein classification predicting sequence
PDVDLFLR

SEQ ID NO: 34872 - protein, 6 aa, Artificial sequence
  Protein classification predicting sequence
LWQSAY

SEQ ID NO: 34873 - protein, 13 aa, Artificial sequence
  Protein classification predicting sequence
HVAIIMDGNGRWA

SEQ ID NO: 34874 - protein, 6 aa, Artificial sequence
  Protein classification predicting sequence
FSSENW

SEQ ID NO: 34875 - protein, 7 aa, Artificial sequence
  Protein classification predicting sequence
AFNYGSR

SEQ ID NO: 34876 - protein, 7 aa, Artificial sequence
  Protein classification predicting sequence
AVGYGGR

SEQ ID NO: 34877 - protein, 8 aa, Artificial sequence
  Protein classification predicting sequence
IRTSGEQR

SEQ ID NO: 34878 - protein, 9 aa, Artificial sequence
  Protein classification predicting sequence
HVAIIMDGN

SEQ ID NO: 34879 - protein, 7 aa, Artificial sequence
  Protein classification predicting sequence
RFIGDRS

SEQ ID NO: 34880 - protein, 9 aa, Artificial sequence
  Protein classification predicting sequence
FTETLWPEF

SEQ ID NO: 34881 - protein, 7 aa, Artificial sequence
  Protein classification predicting sequence
DGNRRWA

SEQ ID NO: 34882 - protein, 6 aa, Artificial sequence
  Protein classification predicting sequence
YAELYF

SEQ ID NO: 34883 - protein, 8 aa, Artificial sequence
  Protein classification predicting sequence
NYGSRDEI

SEQ ID NO: 34884 - protein, 6 aa, Artificial sequence
  Protein classification predicting sequence
ENWNRP

SEQ ID NO: 34885 - protein, 16 aa, Artificial sequence
  Protein classification predicting sequence
DRLPTHTRRAMEKAME

SEQ ID NO: 34886 - protein, 31 aa, Artificial sequence
  Protein classification predicting sequence
TKENTGLILNFALNYGSRDEIVSAVQHMMKD

SEQ ID NO: 34887 - protein, 53 aa, Artificial sequence
  Protein classification predicting sequence
VSEEMLSSYLMTSSLPDPELLIRTSGELRISNFMLWQIAYSEFWFTDVYWPDF

SEQ ID NO: 34888 - protein, 7 aa, Artificial sequence
  Protein classification predicting sequence
EENVQVR

SEQ ID NO: 34889 - protein, 6 aa, Artificial sequence
  Protein classification predicting sequence
LWQLAY

SEQ ID NO: 34890 - protein, 10 aa, Artificial sequence
  Protein classification predicting sequence
AYSEFWFTDV

SEQ ID NO: 34891 - protein, 8 aa, Artificial sequence
  Protein classification predicting sequence
TDVLWPDF

SEQ ID NO: 34892 - protein, 11 aa, Artificial sequence
  Protein classification predicting sequence
DPDLLIRTSGE

SEQ ID NO: 34893 - protein, 7 aa, Artificial sequence
  Protein classification predicting sequence
LPRIAGH

SEQ ID NO: 34894 - protein, 7 aa, Artificial sequence
  Protein classification predicting sequence
LGVKVLT

SEQ ID NO: 34895 - protein, 9 aa, Artificial sequence
  Protein classification predicting sequence
LMKLPEEFL

SEQ ID NO: 34896 - protein, 11 aa, Artificial sequence
  Protein classification predicting sequence
DPELLIRTSGE

SEQ ID NO: 34897 - protein, 8 aa, Artificial sequence
  Protein classification predicting sequence
LLIRTSGE

SEQ ID NO: 34898 - protein, 6 aa, Artificial sequence
  Protein classification predicting sequence
TANNTG

SEQ ID NO: 34899 - protein, 6 aa, Artificial sequence
  Protein classification predicting sequence
IRTGGE

SEQ ID NO: 34900 - protein, 8 aa, Artificial sequence
  Protein classification predicting sequence
EVRFLMGF

SEQ ID NO: 34901 - protein, 7 aa, Artificial sequence
  Protein classification predicting sequence
LTLYAFS

SEQ ID NO: 34902 - protein, 11 aa, Artificial sequence
  Protein classification predicting sequence
LTLYAFSSENW

SEQ ID NO: 34903 - protein, 6 aa, Artificial sequence
  Protein classification predicting sequence
LRIIGD

SEQ ID NO: 34904 - protein, 6 aa, Artificial sequence
  Protein classification predicting sequence
IIMDGN

SEQ ID NO: 34905 - protein, 6 aa, Artificial sequence
  Protein classification predicting sequence
AINYGG

SEQ ID NO: 34906 - protein, 7 aa, Artificial sequence
  Protein classification predicting sequence
LNIAANY

SEQ ID NO: 34907 - protein, 8 aa, Artificial sequence
  Protein classification predicting sequence
LIFAINYG

SEQ ID NO: 34908 - protein, 7 aa, Artificial sequence
  Protein classification predicting sequence
ELVRAFK

SEQ ID NO: 34909 - protein, 28 aa, Artificial sequence
  Protein classification predicting sequence
DPDLLIRTGGEMRVSNFLLWQIAYTELY

SEQ ID NO: 34910 - protein, 6 aa, Artificial sequence
  Protein classification predicting sequence
AYTELY

SEQ ID NO: 34911 - protein, 14 aa, Artificial sequence
  Protein classification predicting sequence
HIGIIMDGNGRWAK

SEQ ID NO: 34912 - protein, 8 aa, Artificial sequence
  Protein classification predicting sequence
GKWDITQA

SEQ ID NO: 34913 - protein, 11 aa, Artificial sequence
  Protein classification predicting sequence
PRHIAIIMDGN

SEQ ID NO: 34914 - protein, 9 aa, Artificial sequence
  Protein classification predicting sequence
HIAIIMDGN

SEQ ID NO: 34915 - protein, 7 aa, Artificial sequence
  Protein classification predicting sequence
LPRVAGH

SEQ ID NO: 34916 - protein, 7 aa, Artificial sequence
  Protein classification predicting sequence
LTLFAFS

SEQ ID NO: 34917 - protein, 23 aa, Artificial sequence
  Protein classification predicting sequence
MAWAPEPDLFIRTGGEQRISNFL

SEQ ID NO: 34918 - protein, 7 aa, Artificial sequence
  Protein classification predicting sequence
AYSELYF

SEQ ID NO: 34919 - protein, 11 aa, Artificial sequence
  Protein classification predicting sequence
LTLYAFSTENW

SEQ ID NO: 34920 - protein, 6 aa, Artificial sequence
  Protein classification predicting sequence
EVNFLM

SEQ ID NO: 34921 - protein, 12 aa, Artificial sequence
  Protein classification predicting sequence
LPRIAGHKEGMD

SEQ ID NO: 34922 - protein, 15 aa, Artificial sequence
  Protein classification predicting sequence
VLTLYAFSTENWKRP

SEQ ID NO: 34923 - protein, 8 aa, Artificial sequence
  Protein classification predicting sequence
LNFALNYG

SEQ ID NO: 34924 - protein, 27 aa, Artificial sequence
  Protein classification predicting sequence
ALTLYAFSSENWNRPAQEVSALMELFV

SEQ ID NO: 34925 - protein, 10 aa, Artificial sequence
  Protein classification predicting sequence
ALDSEVKSLH

SEQ ID NO: 34926 - protein, 13 aa, Artificial sequence
  Protein classification predicting sequence
LNIAANYGGRWDI

SEQ ID NO: 34927 - protein, 9 aa, Artificial sequence
  Protein classification predicting sequence
FEGALNAFA

SEQ ID NO: 34928 - protein, 8 aa, Artificial sequence
  Protein classification predicting sequence
AYAEMYFT

SEQ ID NO: 34929 - protein, 10 aa, Artificial sequence
  Protein classification predicting sequence
LNFALNYGSR

SEQ ID NO: 34930 - protein, 9 aa, Artificial sequence
  Protein classification predicting sequence
RERRFGRTS

SEQ ID NO: 34931 - protein, 6 aa, Artificial sequence
  Protein classification predicting sequence
RQRRFG

SEQ ID NO: 34932 - protein, 9 aa, Artificial sequence
  Protein classification predicting sequence
PPVDLLIRT

SEQ ID NO: 34933 - protein, 9 aa, Artificial sequence
  Protein classification predicting sequence
EVKKLHKNN

SEQ ID NO: 34934 - protein, 9 aa, Artificial sequence
  Protein classification predicting sequence
HVAVIMDGN

SEQ ID NO: 34935 - protein, 7 aa, Artificial sequence
  Protein classification predicting sequence
AVIMDGN

SEQ ID NO: 34936 - protein, 9 aa, Artificial sequence
  Protein classification predicting sequence
IMDGNGRWA

SEQ ID NO: 34937 - protein, 7 aa, Artificial sequence
  Protein classification predicting sequence
DPDLLIR

SEQ ID NO: 34938 - protein, 7 aa, Artificial sequence
  Protein classification predicting sequence
AGHKEGM

SEQ ID NO: 34939 - protein, 8 aa, Artificial sequence
  Protein classification predicting sequence
NYGGKWDI

SEQ ID NO: 34940 - protein, 8 aa, Artificial sequence
  Protein classification predicting sequence
PELIEENV

SEQ ID NO: 34941 - protein, 6 aa, Artificial sequence
  Protein classification predicting sequence
YSELYF

SEQ ID NO: 34942 - protein, 6 aa, Artificial sequence
  Protein classification predicting sequence
SNFLLW

SEQ ID NO: 34943 - protein, 7 aa, Artificial sequence
  Protein classification predicting sequence
YAFSTEN

SEQ ID NO: 34944 - protein, 9 aa, Artificial sequence
  Protein classification predicting sequence
YQQRERRFG

SEQ ID NO: 34945 - protein, 14 aa, Artificial sequence
  Protein classification predicting sequence
KMPRIKGHYEGMQT

SEQ ID NO: 34946 - protein, 18 aa, Artificial sequence
  Protein classification predicting sequence
TFLPELIEKNVKVETIGF

SEQ ID NO: 34947 - protein, 7 aa, Artificial sequence
  Protein classification predicting sequence
SNFLIWQ

SEQ ID NO: 34948 - protein, 18 aa, Artificial sequence
  Protein classification predicting sequence
NDVITINYCVNYGGRTEI

SEQ ID NO: 34949 - protein, 8 aa, Artificial sequence
  Protein classification predicting sequence
RWVGSRPR

SEQ ID NO: 34950 - protein, 21 aa, Artificial sequence
  Protein classification predicting sequence
FQDKLWPDYDRRDLWAACEEY

SEQ ID NO: 34951 - protein, 6 aa, Artificial sequence
  Protein classification predicting sequence
LWQAAY

SEQ ID NO: 34952 - protein, 12 aa, Artificial sequence
  Protein classification predicting sequence
IMDGNGRWAKKR

SEQ ID NO: 34953 - protein, 7 aa, Artificial sequence
  Protein classification predicting sequence
YGGRWDI

SEQ ID NO: 34954 - protein, 7 aa, Artificial sequence
  Protein classification predicting sequence
TANNTGL

SEQ ID NO: 34955 - protein, 15 aa, Artificial sequence
  Protein classification predicting sequence
LNIAANYGGRWDIVQ

SEQ ID NO: 34956 - protein, 6 aa, Artificial sequence
  Protein classification predicting sequence
ENWRRP

SEQ ID NO: 34957 - protein, 11 aa, Artificial sequence
  Protein classification predicting sequence
ENWRRPEDEVS

SEQ ID NO: 34958 - protein, 9 aa, Artificial sequence
  Protein classification predicting sequence
RISNFMLWQ

SEQ ID NO: 34959 - protein, 7 aa, Artificial sequence
  Protein classification predicting sequence
SNFMLWQ

SEQ ID NO: 34960 - protein, 10 aa, Artificial sequence
  Protein classification predicting sequence
YGGRQEIIDA

SEQ ID NO: 34961 - protein, 7 aa, Artificial sequence
  Protein classification predicting sequence
RKIDFLR

SEQ ID NO: 34962 - protein, 13 aa, Artificial sequence
  Protein classification predicting sequence
HIAIIMDGNGRWA

SEQ ID NO: 34963 - protein, 7 aa, Artificial sequence
  Protein classification predicting sequence
RLPNHVA

SEQ ID NO: 34964 - protein, 9 aa, Artificial sequence
  Protein classification predicting sequence
GHRAGVEAL

SEQ ID NO: 34965 - protein, 8 aa, Artificial sequence
  Protein classification predicting sequence
YAFSTENW

SEQ ID NO: 34966 - protein, 9 aa, Artificial sequence
  Protein classification predicting sequence
EVSALMELF

SEQ ID NO: 34967 - protein, 7 aa, Artificial sequence
  Protein classification predicting sequence
RLRIIGD

SEQ ID NO: 34968 - protein, 10 aa, Artificial sequence
  Protein classification predicting sequence
AANYGGQWDI

SEQ ID NO: 34969 - protein, 9 aa, Artificial sequence
  Protein classification predicting sequence
RISNFLLWQ

SEQ ID NO: 34970 - protein, 7 aa, Artificial sequence
  Protein classification predicting sequence
AYAELYF

SEQ ID NO: 34971 - protein, 7 aa, Artificial sequence
  Protein classification predicting sequence
PEFRKID

SEQ ID NO: 34972 - protein, 7 aa, Artificial sequence
  Protein classification predicting sequence
RLSNFLL

SEQ ID NO: 34973 - protein, 9 aa, Artificial sequence
  Protein classification predicting sequence
FGSKKLEEI

SEQ ID NO: 34974 - protein, 10 aa, Artificial sequence
  Protein classification predicting sequence
LTVYAFSTEN

SEQ ID NO: 34975 - protein, 7 aa, Artificial sequence
  Protein classification predicting sequence
YGGRSEI

SEQ ID NO: 34976 - protein, 56 aa, Artificial sequence
  Protein classification predicting sequence
PNMPDPDIVIRTGGEVRISNFLLYQIAYSELFFVDVYFPEFRKIDFLRIIREFQKR

SEQ ID NO: 34977 - protein, 20 aa, Artificial sequence
  Protein classification predicting sequence
RGVRYLTLFAFSSENWRRPA

SEQ ID NO: 34978 - protein, 8 aa, Artificial sequence
  Protein classification predicting sequence
VVGDLSAF

SEQ ID NO: 34979 - protein, 15 aa, Artificial sequence
  Protein classification predicting sequence
GLLKLFIRRDLAELH

SEQ ID NO: 34980 - protein, 17 aa, Artificial sequence
  Protein classification predicting sequence
DTAGIPDPDLIIRTSGE

SEQ ID NO: 34981 - protein, 11 aa, Artificial sequence
  Protein classification predicting sequence
DPDLIIRTSGE

SEQ ID NO: 34982 - protein, 6 aa, Artificial sequence
  Protein classification predicting sequence
ENWKRP

SEQ ID NO: 34983 - protein, 7 aa, Artificial sequence
  Protein classification predicting sequence
SNYLLWQ

SEQ ID NO: 34984 - protein, 16 aa, Artificial sequence
  Protein classification predicting sequence
IKHLAIIMDGNARWAD

SEQ ID NO: 34985 - protein, 20 aa, Artificial sequence
  Protein classification predicting sequence
SSLQKQINNAIELTKNNNKI

SEQ ID NO: 34986 - protein, 22 aa, Artificial sequence
  Protein classification predicting sequence
GGVYRISNFLLWQAAYAELYFS

SEQ ID NO: 34987 - protein, 8 aa, Artificial sequence
  Protein classification predicting sequence
AYAELYFS

SEQ ID NO: 34988 - protein, 14 aa, Artificial sequence
  Protein classification predicting sequence
SSLQKQINNAIELT

SEQ ID NO: 34989 - protein, 19 aa, Artificial sequence
  Protein classification predicting sequence
SRFNSRLQERIRKSEALTA

SEQ ID NO: 34990 - protein, 16 aa, Artificial sequence
  Protein classification predicting sequence
AFANRERRFGGTEPGD

SEQ ID NO: 34991 - protein, 50 aa, Artificial sequence
  Protein classification predicting sequence
LPAHGCRHVAIIMDGNGRWAKKQGKIRAFGHKAGAKSVRRAVSFAANNGI

SEQ ID NO: 34992 - protein, 49 aa, Artificial sequence
  Protein classification predicting sequence
ALTLYAFSSENWNRPAQEVSALMELFVWALDSEVKSLHRHNVRLRIIGD

SEQ ID NO: 34993 - protein, 27 aa, Artificial sequence
  Protein classification predicting sequence
NTGLTLNIAANYGGRWDIVQGVRQLAE

SEQ ID NO: 34994 - protein, 11 aa, Artificial sequence
  Protein classification predicting sequence
AIIMDGNGRWA

SEQ ID NO: 34995 - protein, 7 aa, Artificial sequence
  Protein classification predicting sequence
NYGGRAE

SEQ ID NO: 34996 - protein, 8 aa, Artificial sequence
  Protein classification predicting sequence
SYSEFIFN

SEQ ID NO: 34997 - protein, 34 aa, Artificial sequence
  Protein classification predicting sequence
AIIMDGNGRWAKKRKMPRIKGHYEGMQTIKKITR

SEQ ID NO: 34998 - protein, 44 aa, Artificial sequence
  Protein classification predicting sequence
KYLTLYAFSTENWSRPESEVNYIMNLPVNFLKTFLPELIEKNVK

SEQ ID NO: 34999 - protein, 16 aa, Artificial sequence
  Protein classification predicting sequence
HIGIIMDGNGRWAKKR

SEQ ID NO: 35000 - protein, 21 aa, Artificial sequence
  Protein classification predicting sequence
HIGIIMDGNGRWAKKRLKPRV

SEQ ID NO: 35001 - protein, 11 aa, Artificial sequence
  Protein classification predicting sequence
YAFSTENWSRP

SEQ ID NO: 35002 - protein, 7 aa, Artificial sequence
  Protein classification predicting sequence
FFDKYVP

SEQ ID NO: 35003 - protein, 7 aa, Artificial sequence
  Protein classification predicting sequence
TKHNSGL

SEQ ID NO: 35004 - protein, 6 aa, Artificial sequence
  Protein classification predicting sequence
YGGRQE

SEQ ID NO: 35005 - protein, 7 aa, Artificial sequence
  Protein classification predicting sequence
NPGDITE

SEQ ID NO: 35006 - protein, 11 aa, Artificial sequence
  Protein classification predicting sequence
NNVKIQMIGET

SEQ ID NO: 35007 - protein, 13 aa, Artificial sequence
  Protein classification predicting sequence
NTGLILNFALNYG

SEQ ID NO: 35008 - protein, 19 aa, Artificial sequence
  Protein classification predicting sequence
NTGLILNFALNYGGRAEIT

SEQ ID NO: 35009 - protein, 10 aa, Artificial sequence
  Protein classification predicting sequence
GHKAGMDALQ

SEQ ID NO: 35010 - protein, 12 aa, Artificial sequence
  Protein classification predicting sequence
IRTSGELRISNF

SEQ ID NO: 35011 - protein, 6 aa, Artificial sequence
  Protein classification predicting sequence
PRIKGH

SEQ ID NO: 35012 - protein, 6 aa, Artificial sequence
  Protein classification predicting sequence
IAFNYG

SEQ ID NO: 35013 - protein, 9 aa, Artificial sequence
  Protein classification predicting sequence
RLSNFLLWQ

SEQ ID NO: 35014 - protein, 10 aa, Artificial sequence
  Protein classification predicting sequence
IIMDGNGRWA

SEQ ID NO: 35015 - protein, 6 aa, Artificial sequence
  Protein classification predicting sequence
VLWPDF

SEQ ID NO: 35016 - protein, 7 aa, Artificial sequence
  Protein classification predicting sequence
IPYITLY

SEQ ID NO: 35017 - protein, 10 aa, Artificial sequence
  Protein classification predicting sequence
YFTDILWPDF

SEQ ID NO: 35018 - protein, 10 aa, Artificial sequence
  Protein classification predicting sequence
TLFAFSSENW

SEQ ID NO: 35019 - protein, 13 aa, Artificial sequence
  Protein classification predicting sequence
TLFAFSSENWRRP

SEQ ID NO: 35020 - protein, 9 aa, Artificial sequence
  Protein classification predicting sequence
LTASNTGMV

SEQ ID NO: 35021 - protein, 8 aa, Artificial sequence
  Protein classification predicting sequence
PDVDLLIR

SEQ ID NO: 35022 - protein, 10 aa, Artificial sequence
  Protein classification predicting sequence
GHKAGVDAVR

SEQ ID NO: 35023 - protein, 10 aa, Artificial sequence
  Protein classification predicting sequence
LMELFITVLS

SEQ ID NO: 35024 - protein, 17 aa, Artificial sequence
  Protein classification predicting sequence
LNIAANYGGRWDIIQGV

SEQ ID NO: 35025 - protein, 12 aa, Artificial sequence
  Protein classification predicting sequence
RISNFLLWQIAY

SEQ ID NO: 35026 - protein, 10 aa, Artificial sequence
  Protein classification predicting sequence
RRGVQVRFIG

SEQ ID NO: 35027 - protein, 11 aa, Artificial sequence
  Protein classification predicting sequence
KSVRRAVSFAA

SEQ ID NO: 35028 - protein, 38 aa, Artificial sequence
  Protein classification predicting sequence
VDLVIRTGGEHRISNFLLWQIAYAELYFTDVLWPDFDE

SEQ ID NO: 35029 - protein, 7 aa, Artificial sequence
  Protein classification predicting sequence
AFSSENW

SEQ ID NO: 35030 - protein, 13 aa, Artificial sequence
  Protein classification predicting sequence
ISTKNFRELAQEV

SEQ ID NO: 35031 - protein, 7 aa, Artificial sequence
  Protein classification predicting sequence
VPILRAG

SEQ ID NO: 35032 - protein, 12 aa, Artificial sequence
  Protein classification predicting sequence
PGLGDAGDKIFG

SEQ ID NO: 35033 - protein, 6 aa, Artificial sequence
  Protein classification predicting sequence
AAPEGI

SEQ ID NO: 35034 - protein, 9 aa, Artificial sequence
  Protein classification predicting sequence
DPMLATGGS

SEQ ID NO: 35035 - protein, 9 aa, Artificial sequence
  Protein classification predicting sequence
KVIAGKKLG

SEQ ID NO: 35036 - protein, 6 aa, Artificial sequence
  Protein classification predicting sequence
PILRAG

SEQ ID NO: 35037 - protein, 9 aa, Artificial sequence
  Protein classification predicting sequence
PILRAGIGM

SEQ ID NO: 35038 - protein, 7 aa, Artificial sequence
  Protein classification predicting sequence
PAAKVGH

SEQ ID NO: 35039 - protein, 8 aa, Artificial sequence
  Protein classification predicting sequence
DVEERDFI

SEQ ID NO: 35040 - protein, 13 aa, Artificial sequence
  Protein classification predicting sequence
TGTKEFRELVDEV

SEQ ID NO: 35041 - protein, 8 aa, Artificial sequence
  Protein classification predicting sequence
IPAAKVGH

SEQ ID NO: 35042 - protein, 18 aa, Artificial sequence
  Protein classification predicting sequence
TLQPVEYYVKLPTDVEER

SEQ ID NO: 35043 - protein, 8 aa, Artificial sequence
  Protein classification predicting sequence
AALDEKLN

SEQ ID NO: 35044 - protein, 9 aa, Artificial sequence
  Protein classification predicting sequence
DHPLIQHKL

SEQ ID NO: 35045 - protein, 7 aa, Artificial sequence
  Protein classification predicting sequence
EYYVKLP

SEQ ID NO: 35046 - protein, 7 aa, Artificial sequence
  Protein classification predicting sequence
HPDVDIY

SEQ ID NO: 35047 - protein, 15 aa, Artificial sequence
  Protein classification predicting sequence
NTGTKDFRELVDEVA

SEQ ID NO: 35048 - protein, 9 aa, Artificial sequence
  Protein classification predicting sequence
FRELVDEVA

SEQ ID NO: 35049 - protein, 12 aa, Artificial sequence
  Protein classification predicting sequence
PILRAGLGMVDG

SEQ ID NO: 35050 - protein, 7 aa, Artificial sequence
  Protein classification predicting sequence
SLKKRGA

SEQ ID NO: 35051 - protein, 7 aa, Artificial sequence
  Protein classification predicting sequence
HKLGLMR

SEQ ID NO: 35052 - protein, 10 aa, Artificial sequence
  Protein classification predicting sequence
DISTKRFREL

SEQ ID NO: 35053 - protein, 18 aa, Artificial sequence
  Protein classification predicting sequence
TVVPILRAGLGMMDGVLE

SEQ ID NO: 35054 - protein, 8 aa, Artificial sequence
  Protein classification predicting sequence
DLLKKAGC

SEQ ID NO: 35055 - protein, 7 aa, Artificial sequence
  Protein classification predicting sequence
LVAAPEG

SEQ ID NO: 35056 - protein, 7 aa, Artificial sequence
  Protein classification predicting sequence
HPDVELY

SEQ ID NO: 35057 - protein, 8 aa, Artificial sequence
  Protein classification predicting sequence
STKSFREL

SEQ ID NO: 35058 - protein, 7 aa, Artificial sequence
  Protein classification predicting sequence
YEVTRDL

SEQ ID NO: 35059 - protein, 8 aa, Artificial sequence
  Protein classification predicting sequence
IETPLATM

SEQ ID NO: 35060 - protein, 8 aa, Artificial sequence
  Protein classification predicting sequence
LLCYEVTR

SEQ ID NO: 35061 - protein, 6 aa, Artificial sequence
  Protein classification predicting sequence
DPMLAT

SEQ ID NO: 35062 - protein, 6 aa, Artificial sequence
  Protein classification predicting sequence
PVEYLV

SEQ ID NO: 35063 - protein, 9 aa, Artificial sequence
  Protein classification predicting sequence
PGLGDAGDR

SEQ ID NO: 35064 - protein, 7 aa, Artificial sequence
  Protein classification predicting sequence
HPLIQHK

SEQ ID NO: 35065 - protein, 9 aa, Artificial sequence
  Protein classification predicting sequence
LRAGLGMVD

SEQ ID NO: 35066 - protein, 8 aa, Artificial sequence
  Protein classification predicting sequence
HPLVQHKL

SEQ ID NO: 35067 - protein, 13 aa, Artificial sequence
  Protein classification predicting sequence
GKKVTVVPILRAG

SEQ ID NO: 35068 - protein, 8 aa, Artificial sequence
  Protein classification predicting sequence
VAAPEGVK

SEQ ID NO: 35069 - protein, 7 aa, Artificial sequence
  Protein classification predicting sequence
LNEHGYI

SEQ ID NO: 35070 - protein, 14 aa, Artificial sequence
  Protein classification predicting sequence
PGLGDAGDKIFGTK

SEQ ID NO: 35071 - protein, 19 aa, Artificial sequence
  Protein classification predicting sequence
LAGKKVAIVPILRAGLGMV

SEQ ID NO: 35072 - protein, 7 aa, Artificial sequence
  Protein classification predicting sequence
TLKPVEY

SEQ ID NO: 35073 - protein, 7 aa, Artificial sequence
  Protein classification predicting sequence
IRDKNTG

SEQ ID NO: 35074 - protein, 7 aa, Artificial sequence
  Protein classification predicting sequence
KDFRELV

SEQ ID NO: 35075 - protein, 9 aa, Artificial sequence
  Protein classification predicting sequence
LIPAAKVGH

SEQ ID NO: 35076 - protein, 7 aa, Artificial sequence
  Protein classification predicting sequence
TLQPVEY

SEQ ID NO: 35077 - protein, 6 aa, Artificial sequence
  Protein classification predicting sequence
RAGLGM

SEQ ID NO: 35078 - protein, 10 aa, Artificial sequence
  Protein classification predicting sequence
VPILRAGLGM

SEQ ID NO: 35079 - protein, 7 aa, Artificial sequence
  Protein classification predicting sequence
PVEYYVK

SEQ ID NO: 35080 - protein, 8 aa, Artificial sequence
  Protein classification predicting sequence
DPMLATGG

SEQ ID NO: 35081 - protein, 7 aa, Artificial sequence
  Protein classification predicting sequence
NIDERMA

SEQ ID NO: 35082 - protein, 7 aa, Artificial sequence
  Protein classification predicting sequence
ATIDLLK

SEQ ID NO: 35083 - protein, 6 aa, Artificial sequence
  Protein classification predicting sequence
EIAMLM

SEQ ID NO: 35084 - protein, 7 aa, Artificial sequence
  Protein classification predicting sequence
EYFVKLP

SEQ ID NO: 35085 - protein, 7 aa, Artificial sequence
  Protein classification predicting sequence
VKLPEDI

SEQ ID NO: 35086 - protein, 6 aa, Artificial sequence
  Protein classification predicting sequence
TEKVTI

SEQ ID NO: 35087 - protein, 32 aa, Artificial sequence
  Protein classification predicting sequence
SIKVLVLVAAPEGIAALEKAHPDVELYTASID

SEQ ID NO: 35088 - protein, 6 aa, Artificial sequence
  Protein classification predicting sequence
SLLTYE

SEQ ID NO: 35089 - protein, 6 aa, Artificial sequence
  Protein classification predicting sequence
GMYRDE

SEQ ID NO: 35090 - protein, 11 aa, Artificial sequence
  Protein classification predicting sequence
TLVSAPEGIDA

SEQ ID NO: 35091 - protein, 7 aa, Artificial sequence
  Protein classification predicting sequence
HPLVRHK

SEQ ID NO: 35092 - protein, 10 aa, Artificial sequence
  Protein classification predicting sequence
EVGSLLTYEA

SEQ ID NO: 35093 - protein, 9 aa, Artificial sequence
  Protein classification predicting sequence
PSARISVVG

SEQ ID NO: 35094 - protein, 7 aa, Artificial sequence
  Protein classification predicting sequence
FRELATE

SEQ ID NO: 35095 - protein, 12 aa, Artificial sequence
  Protein classification predicting sequence
PSARISVVGIYR

SEQ ID NO: 35096 - protein, 13 aa, Artificial sequence
  Protein classification predicting sequence
HPLIQHKLSILRR

SEQ ID NO: 35097 - protein, 8 aa, Artificial sequence
  Protein classification predicting sequence
RDLPLEDV

SEQ ID NO: 35098 - protein, 26 aa, Artificial sequence
  Protein classification predicting sequence
RQIFLVDPMLATGGSAILAVDSLKKR

SEQ ID NO: 35099 - protein, 7 aa, Artificial sequence
  Protein classification predicting sequence
LQEAHPD

SEQ ID NO: 35100 - protein, 6 aa, Artificial sequence
  Protein classification predicting sequence
LMAYEV

SEQ ID NO: 35101 - protein, 10 aa, Artificial sequence
  Protein classification predicting sequence
PLKDIEIETP

SEQ ID NO: 35102 - protein, 11 aa, Artificial sequence
  Protein classification predicting sequence
PVEYFVKLPSD

SEQ ID NO: 35103 - protein, 6 aa, Artificial sequence
  Protein classification predicting sequence
KNTGTK

SEQ ID NO: 35104 - protein, 7 aa, Artificial sequence
  Protein classification predicting sequence
LNENGYI

SEQ ID NO: 35105 - protein, 7 aa, Artificial sequence
  Protein classification predicting sequence
MRKKETS

SEQ ID NO: 35106 - protein, 10 aa, Artificial sequence
  Protein classification predicting sequence
VPILRAGIGM

SEQ ID NO: 35107 - protein, 12 aa, Artificial sequence
  Protein classification predicting sequence
YIVPGLGDAGDR

SEQ ID NO: 35108 - protein, 7 aa, Artificial sequence
  Protein classification predicting sequence
DPMLATG

SEQ ID NO: 35109 - protein, 9 aa, Artificial sequence
  Protein classification predicting sequence
PILRAGLGM

SEQ ID NO: 35110 - protein, 8 aa, Artificial sequence
  Protein classification predicting sequence
GMYRNEET

SEQ ID NO: 35111 - protein, 8 aa, Artificial sequence
  Protein classification predicting sequence
IVPILRAG

SEQ ID NO: 35112 - protein, 11 aa, Artificial sequence
  Protein classification predicting sequence
IVPILRAGLGM

SEQ ID NO: 35113 - protein, 8 aa, Artificial sequence
  Protein classification predicting sequence
GHIGLYRD

SEQ ID NO: 35114 - protein, 13 aa, Artificial sequence
  Protein classification predicting sequence
AYIVPGLGDAGDR

SEQ ID NO: 35115 - protein, 7 aa, Artificial sequence
  Protein classification predicting sequence
VFDHPLI

SEQ ID NO: 35116 - protein, 8 aa, Artificial sequence
  Protein classification predicting sequence
EIETPITK

SEQ ID NO: 35117 - protein, 8 aa, Artificial sequence
  Protein classification predicting sequence
VDPMLATG

SEQ ID NO: 35118 - protein, 7 aa, Artificial sequence
  Protein classification predicting sequence
IYTAALD

SEQ ID NO: 35119 - protein, 13 aa, Artificial sequence
  Protein classification predicting sequence
PGLGDAGDKIFGT

SEQ ID NO: 35120 - protein, 11 aa, Artificial sequence
  Protein classification predicting sequence
YIIPGLGDAGD

SEQ ID NO: 35121 - protein, 7 aa, Artificial sequence
  Protein classification predicting sequence
DQIKGKK

SEQ ID NO: 35122 - protein, 9 aa, Artificial sequence
  Protein classification predicting sequence
SNIDERMAL

SEQ ID NO: 35123 - protein, 10 aa, Artificial sequence
  Protein classification predicting sequence
VDPMLATGGS

SEQ ID NO: 35124 - protein, 12 aa, Artificial sequence
  Protein classification predicting sequence
GYIVPGLGDAGD

SEQ ID NO: 35125 - protein, 7 aa, Artificial sequence
  Protein classification predicting sequence
VEVKHPL

SEQ ID NO: 35126 - protein, 10 aa, Artificial sequence
  Protein classification predicting sequence
VPSARISVVG

SEQ ID NO: 35127 - protein, 12 aa, Artificial sequence
  Protein classification predicting sequence
KVLVLVAAPEGI

SEQ ID NO: 35128 - protein, 11 aa, Artificial sequence
  Protein classification predicting sequence
YIVPGLGDAGD

SEQ ID NO: 35129 - protein, 12 aa, Artificial sequence
  Protein classification predicting sequence
EIRHPLIRHKLG

SEQ ID NO: 35130 - protein, 13 aa, Artificial sequence
  Protein classification predicting sequence
GKKITVVPILRAG

SEQ ID NO: 35131 - protein, 7 aa, Artificial sequence
  Protein classification predicting sequence
LLTYEAT

SEQ ID NO: 35132 - protein, 10 aa, Artificial sequence
  Protein classification predicting sequence
LEGKKLVFAS

SEQ ID NO: 35133 - protein, 7 aa, Artificial sequence
  Protein classification predicting sequence
TLEAVEY

SEQ ID NO: 35134 - protein, 7 aa, Artificial sequence
  Protein classification predicting sequence
LNEKGYI

SEQ ID NO: 35135 - protein, 63 aa, Artificial sequence
  Protein classification predicting sequence
DISTKRFRELASEVGSLLTYEATADLETEKVTIEGWNGPVEIDQIKGKKITVVPILRAGLGMM

SEQ ID NO: 35136 - protein, 13 aa, Artificial sequence
  Protein classification predicting sequence
TVVPILRAGLGMM

SEQ ID NO: 35137 - protein, 11 aa, Artificial sequence
  Protein classification predicting sequence
DISTKRFRELA

SEQ ID NO: 35138 - protein, 10 aa, Artificial sequence
  Protein classification predicting sequence
VTIEGWNGPV

SEQ ID NO: 35139 - protein, 30 aa, Artificial sequence
  Protein classification predicting sequence
TGTKEFRELVDEVGMLMAYEVTRDLELQDV

SEQ ID NO: 35140 - protein, 31 aa, Artificial sequence
  Protein classification predicting sequence
TPVTKMTAKRLAGKKLAIVPILRAGLGMTDG

SEQ ID NO: 35141 - protein, 21 aa, Artificial sequence
  Protein classification predicting sequence
LSLVPAARVGHIGLYRDPETL

SEQ ID NO: 35142 - protein, 7 aa, Artificial sequence
  Protein classification predicting sequence
AVEYFAK

SEQ ID NO: 35143 - protein, 21 aa, Artificial sequence
  Protein classification predicting sequence
ERQIIVVDPMLATGASAIEAI

SEQ ID NO: 35144 - protein, 16 aa, Artificial sequence
  Protein classification predicting sequence
IRFMCLIAAPEGVEKM

SEQ ID NO: 35145 - protein, 9 aa, Artificial sequence
  Protein classification predicting sequence
EAHPDVDIY

SEQ ID NO: 35146 - protein, 8 aa, Artificial sequence
  Protein classification predicting sequence
TKDFRELV

SEQ ID NO: 35147 - protein, 19 aa, Artificial sequence
  Protein classification predicting sequence
GKKLAIVPILRAGIGMVDG

SEQ ID NO: 35148 - protein, 16 aa, Artificial sequence
  Protein classification predicting sequence
LSLVPAAKVGHIGMYR

SEQ ID NO: 35149 - protein, 12 aa, Artificial sequence
  Protein classification predicting sequence
PVEYLVKLPEDI

SEQ ID NO: 35150 - protein, 30 aa, Artificial sequence
  Protein classification predicting sequence
PVEYLVKLPEDIDQRQIFVVDPMLATGGSA

SEQ ID NO: 35151 - protein, 10 aa, Artificial sequence
  Protein classification predicting sequence
DPMLATGGSA

SEQ ID NO: 35152 - protein, 9 aa, Artificial sequence
  Protein classification predicting sequence
AALDEKLNE

SEQ ID NO: 35153 - protein, 8 aa, Artificial sequence
  Protein classification predicting sequence
HPLIQHKL

SEQ ID NO: 35154 - protein, 7 aa, Artificial sequence
  Protein classification predicting sequence
FRELVDE

SEQ ID NO: 35155 - protein, 10 aa, Artificial sequence
  Protein classification predicting sequence
EIAMLMGYEV

SEQ ID NO: 35156 - protein, 6 aa, Artificial sequence
  Protein classification predicting sequence
RDLPLE

SEQ ID NO: 35157 - protein, 42 aa, Artificial sequence
  Protein classification predicting sequence
VDPMLATGGSAILAVDSLKKRGAANIKFVCLVAAPEGVKKLQ

SEQ ID NO: 35158 - protein, 7 aa, Artificial sequence
  Protein classification predicting sequence
KEFRELV

SEQ ID NO: 35159 - protein, 10 aa, Artificial sequence
  Protein classification predicting sequence
PILRAGLGMV

SEQ ID NO: 35160 - protein, 13 aa, Artificial sequence
  Protein classification predicting sequence
PGLGDAGDRLFGT

SEQ ID NO: 35161 - protein, 7 aa, Artificial sequence
  Protein classification predicting sequence
HKLTIMR

SEQ ID NO: 35162 - protein, 11 aa, Artificial sequence
  Protein classification predicting sequence
FRELLREITLL

SEQ ID NO: 35163 - protein, 7 aa, Artificial sequence
  Protein classification predicting sequence
YRDPETL

SEQ ID NO: 35164 - protein, 8 aa, Artificial sequence
  Protein classification predicting sequence
IYVAALDE

SEQ ID NO: 35165 - protein, 7 aa, Artificial sequence
  Protein classification predicting sequence
LNDHGYI

SEQ ID NO: 35166 - protein, 7 aa, Artificial sequence
  Protein classification predicting sequence
ARVGHIG

SEQ ID NO: 35167 - protein, 8 aa, Artificial sequence
  Protein classification predicting sequence
DHPLIQHK

SEQ ID NO: 35168 - protein, 7 aa, Artificial sequence
  Protein classification predicting sequence
GHIGLYR

SEQ ID NO: 35169 - protein, 14 aa, Artificial sequence
  Protein classification predicting sequence
ETEKVTIEGWNGPV

SEQ ID NO: 35170 - protein, 17 aa, Artificial sequence
  Protein classification predicting sequence
GCQSIKVLVLVAAPEGI

SEQ ID NO: 35171 - protein, 11 aa, Artificial sequence
  Protein classification predicting sequence
EVGSLLTYEAT

SEQ ID NO: 35172 - protein, 9 aa, Artificial sequence
  Protein classification predicting sequence
YRDEETLEP

SEQ ID NO: 35173 - protein, 7 aa, Artificial sequence
  Protein classification predicting sequence
HPLVQHK

SEQ ID NO: 35174 - protein, 6 aa, Artificial sequence
  Protein classification predicting sequence
KLPEDI

SEQ ID NO: 35175 - protein, 6 aa, Artificial sequence
  Protein classification predicting sequence
VPGLGD

SEQ ID NO: 35176 - protein, 20 aa, Artificial sequence
  Protein classification predicting sequence
DISTKRFRELASEVGSLLTY

SEQ ID NO: 35177 - protein, 15 aa, Artificial sequence
  Protein classification predicting sequence
GVLENVPSARISVVG

SEQ ID NO: 35178 - protein, 12 aa, Artificial sequence
  Protein classification predicting sequence
PVPYFQKLVSNI

SEQ ID NO: 35179 - protein, 23 aa, Artificial sequence
  Protein classification predicting sequence
KTGLPYIWHSKASNPFVNLKKEY

SEQ ID NO: 35180 - protein, 25 aa, Artificial sequence
  Protein classification predicting sequence
TPLLKDELDIVIPTIRNLDFLEMWR

SEQ ID NO: 35181 - protein, 23 aa, Artificial sequence
  Protein classification predicting sequence
TAVSHGLWLNIPDYDAPTQLVKP

SEQ ID NO: 35182 - protein, 11 aa, Artificial sequence
  Protein classification predicting sequence
LFPMCGMNLAF

SEQ ID NO: 35183 - protein, 6 aa, Artificial sequence
  Protein classification predicting sequence
YYKDQS

SEQ ID NO: 35184 - protein, 7 aa, Artificial sequence
  Protein classification predicting sequence
QFIEPTK

SEQ ID NO: 35185 - protein, 12 aa, Artificial sequence
  Protein classification predicting sequence
IGIAGGSGSGKT

SEQ ID NO: 35186 - protein, 8 aa, Artificial sequence
  Protein classification predicting sequence
GGSGSGKT

SEQ ID NO: 35187 - protein, 7 aa, Artificial sequence
  Protein classification predicting sequence
GHSILMI

SEQ ID NO: 35188 - protein, 8 aa, Artificial sequence
  Protein classification predicting sequence
VIILEGIL

SEQ ID NO: 35189 - protein, 8 aa, Artificial sequence
  Protein classification predicting sequence
EPTKRYAD

SEQ ID NO: 35190 - protein, 8 aa, Artificial sequence
  Protein classification predicting sequence
DIRFIRRL

SEQ ID NO: 35191 - protein, 6 aa, Artificial sequence
  Protein classification predicting sequence
FIEPTK

SEQ ID NO: 35192 - protein, 9 aa, Artificial sequence
  Protein classification predicting sequence
RVKTNYDHP

SEQ ID NO: 35193 - protein, 7 aa, Artificial sequence
  Protein classification predicting sequence
DVRIIRR

SEQ ID NO: 35194 - protein, 9 aa, Artificial sequence
  Protein classification predicting sequence
ERGRTMESV

SEQ ID NO: 35195 - protein, 7 aa, Artificial sequence
  Protein classification predicting sequence
VVKPMHN

SEQ ID NO: 35196 - protein, 15 aa, Artificial sequence
  Protein classification predicting sequence
EPTKKFADIIIPEGG

SEQ ID NO: 35197 - protein, 9 aa, Artificial sequence
  Protein classification predicting sequence
ADIIIPEGG

SEQ ID NO: 35198 - protein, 7 aa, Artificial sequence
  Protein classification predicting sequence
NKVAIDI

SEQ ID NO: 35199 - protein, 9 aa, Artificial sequence
  Protein classification predicting sequence
IVEGILVLE

SEQ ID NO: 35200 - protein, 7 aa, Artificial sequence
  Protein classification predicting sequence
QFIEPSK

SEQ ID NO: 35201 - protein, 9 aa, Artificial sequence
  Protein classification predicting sequence
RFIRRLLRD

SEQ ID NO: 35202 - protein, 9 aa, Artificial sequence
  Protein classification predicting sequence
ERGRSMDSV

SEQ ID NO: 35203 - protein, 8 aa, Artificial sequence
  Protein classification predicting sequence
GASASGKS

SEQ ID NO: 35204 - protein, 8 aa, Artificial sequence
  Protein classification predicting sequence
YYKDQSHL

SEQ ID NO: 35205 - protein, 10 aa, Artificial sequence
  Protein classification predicting sequence
PVYSYVEHTR

SEQ ID NO: 35206 - protein, 7 aa, Artificial sequence
  Protein classification predicting sequence
YADIVIP

SEQ ID NO: 35207 - protein, 8 aa, Artificial sequence
  Protein classification predicting sequence
ADIIIPEG

SEQ ID NO: 35208 - protein, 8 aa, Artificial sequence
  Protein classification predicting sequence
IIGVTGGS

SEQ ID NO: 35209 - protein, 11 aa, Artificial sequence
  Protein classification predicting sequence
NYDHPLAFDTD

SEQ ID NO: 35210 - protein, 8 aa, Artificial sequence
  Protein classification predicting sequence
VDIPIYDY

SEQ ID NO: 35211 - protein, 13 aa, Artificial sequence
  Protein classification predicting sequence
VNYDHPLAFDTDL

SEQ ID NO: 35212 - protein, 7 aa, Artificial sequence
  Protein classification predicting sequence
DVIIVEG

SEQ ID NO: 35213 - protein, 9 aa, Artificial sequence
  Protein classification predicting sequence
RLRDLMDIK

SEQ ID NO: 35214 - protein, 8 aa, Artificial sequence
  Protein classification predicting sequence
VKPMYHQF

SEQ ID NO: 35215 - protein, 12 aa, Artificial sequence
  Protein classification predicting sequence
DLMDIKVYVDTD

SEQ ID NO: 35216 - protein, 15 aa, Artificial sequence
  Protein classification predicting sequence
IAGASASGKSLIAST

SEQ ID NO: 35217 - protein, 7 aa, Artificial sequence
  Protein classification predicting sequence
KTNYDHP

SEQ ID NO: 35218 - protein, 8 aa, Artificial sequence
  Protein classification predicting sequence
ERGRSLES

SEQ ID NO: 35219 - protein, 11 aa, Artificial sequence
  Protein classification predicting sequence
HLQALKRGSAI

SEQ ID NO: 35220 - protein, 12 aa, Artificial sequence
  Protein classification predicting sequence
LPVYSYVEHTRM

SEQ ID NO: 35221 - protein, 21 aa, Artificial sequence
  Protein classification predicting sequence
VEPKKVIILEGILLLTDARLR

SEQ ID NO: 35222 - protein, 13 aa, Artificial sequence
  Protein classification predicting sequence
IAGASASGKSLIA

SEQ ID NO: 35223 - protein, 8 aa, Artificial sequence
  Protein classification predicting sequence
YSYTEHTR

SEQ ID NO: 35224 - protein, 18 aa, Artificial sequence
  Protein classification predicting sequence
MTPKKVIILEGILLLTDP

SEQ ID NO: 35225 - protein, 15 aa, Artificial sequence
  Protein classification predicting sequence
PKKVIILEGILLLTD

SEQ ID NO: 35226 - protein, 7 aa, Artificial sequence
  Protein classification predicting sequence
DTPLDIC

SEQ ID NO: 35227 - protein, 7 aa, Artificial sequence
  Protein classification predicting sequence
PTKKYAD

SEQ ID NO: 35228 - protein, 19 aa, Artificial sequence
  Protein classification predicting sequence
TTIIGIAGGSGSGKTTVTN

SEQ ID NO: 35229 - protein, 22 aa, Artificial sequence
  Protein classification predicting sequence
IMKNLEGHSVALLAQDYYYKDQ

SEQ ID NO: 35230 - protein, 13 aa, Artificial sequence
  Protein classification predicting sequence
YYKDQSHLTFEER

SEQ ID NO: 35231 - protein, 19 aa, Artificial sequence
  Protein classification predicting sequence
ERLETNYDHPFAFDNDLLI

SEQ ID NO: 35232 - protein, 15 aa, Artificial sequence
  Protein classification predicting sequence
PKDVIIVEGIFALEN

SEQ ID NO: 35233 - protein, 32 aa, Artificial sequence
  Protein classification predicting sequence
LRDMMDVKIYVDTDADLRILRRLTRDTKERGR

SEQ ID NO: 35234 - protein, 28 aa, Artificial sequence
  Protein classification predicting sequence
ADIIIPEGGSNKVAIDIMTTKIQSLVSK

SEQ ID NO: 35235 - protein, 10 aa, Artificial sequence
  Protein classification predicting sequence
GKTSVSRAIL

SEQ ID NO: 35236 - protein, 28 aa, Artificial sequence
  Protein classification predicting sequence
RLRDLMDIKLFVDTDDDIRIIRRIKRDM

SEQ ID NO: 35237 - protein, 7 aa, Artificial sequence
  Protein classification predicting sequence
YYKDQSH

SEQ ID NO: 35238 - protein, 6 aa, Artificial sequence
  Protein classification predicting sequence
TNYDHP

SEQ ID NO: 35239 - protein, 12 aa, Artificial sequence
  Protein classification predicting sequence
KELLAGRPVDIP

SEQ ID NO: 35240 - protein, 10 aa, Artificial sequence
  Protein classification predicting sequence
RIIRRIKRDM

SEQ ID NO: 35241 - protein, 14 aa, Artificial sequence
  Protein classification predicting sequence
KRYADIVIPEGVSN

SEQ ID NO: 35242 - protein, 5 aa, Artificial sequence
  Protein classification predicting sequence
EDCYY

SEQ ID NO: 35243 - protein, 49 aa, Artificial sequence
  Protein classification predicting sequence
TTTMTPKKVIILEGILLLTDPRLRDLMHATVFMDTPLDICLLRRVKRDV

SEQ ID NO: 35244 - protein, 14 aa, Artificial sequence
  Protein classification predicting sequence
ERGRTMESVLKQYQ

SEQ ID NO: 35245 - protein, 6 aa, Artificial sequence
  Protein classification predicting sequence
TVRPMF

SEQ ID NO: 35246 - protein, 43 aa, Artificial sequence
  Protein classification predicting sequence
TVRPMFMQFIEPSKQYADIIVPRGGKNRIAIDVLKAHIAKLLK

SEQ ID NO: 35247 - protein, 10 aa, Artificial sequence
  Protein classification predicting sequence
QYQKTVRPMF

SEQ ID NO: 35248 - protein, 33 aa, Artificial sequence
  Protein classification predicting sequence
HQCVIIGIAGASASGKSLIASTLYRELREQVGD

SEQ ID NO: 35249 - protein, 8 aa, Artificial sequence
  Protein classification predicting sequence
HIGVIPED

SEQ ID NO: 35250 - protein, 10 aa, Artificial sequence
  Protein classification predicting sequence
LLLEHLQALK

SEQ ID NO: 35251 - protein, 17 aa, Artificial sequence
  Protein classification predicting sequence
NFSIFVDTPLDICLMRR

SEQ ID NO: 35252 - protein, 6 aa, Artificial sequence
  Protein classification predicting sequence
DLWSLG

SEQ ID NO: 35253 - protein, 13 aa, Artificial sequence
  Protein classification predicting sequence
ITCKAFGLYKSIN

SEQ ID NO: 35254 - protein, 19 aa, Artificial sequence
  Protein classification predicting sequence
GIEILNTIQFMHEQGYSHG

SEQ ID NO: 35255 - protein, 10 aa, Artificial sequence
  Protein classification predicting sequence
IKASNIVLDQ

SEQ ID NO: 35256 - protein, 76 aa, Artificial sequence
  Protein classification predicting sequence
DKNKLYLVDYGLVSKFMSNGEHVPFIRNPNKMDNGTLEFTPIDSHKGYVVSRRGDLETLGYCMIRWLGGILPWTKI

SEQ ID NO: 35257 - protein, 19 aa, Artificial sequence
  Protein classification predicting sequence
ETKNCALVSATKQKYVNNT

SEQ ID NO: 35258 - protein, 6 aa, Artificial sequence
  Protein classification predicting sequence
DKRFYP

SEQ ID NO: 35259 - protein, 17 aa, Artificial sequence
  Protein classification predicting sequence
NDDFYHISTGGYGIVFK

SEQ ID NO: 35260 - protein, 6 aa, Artificial sequence
  Protein classification predicting sequence
YVVKFV

SEQ ID NO: 35261 - protein, 8 aa, Artificial sequence
  Protein classification predicting sequence
IKFVKLLS

SEQ ID NO: 35262 - protein, 9 aa, Artificial sequence
  Protein classification predicting sequence
SNINVINYF

SEQ ID NO: 35263 - protein, 10 aa, Artificial sequence
  Protein classification predicting sequence
LNDFDFSQVA

SEQ ID NO: 35264 - protein, 6 aa, Artificial sequence
  Protein classification predicting sequence
TYPEIE

SEQ ID NO: 35265 - protein, 14 aa, Artificial sequence
  Protein classification predicting sequence
RLKVSILHPISFLE

SEQ ID NO: 35266 - protein, 7 aa, Artificial sequence
  Protein classification predicting sequence
KLYSPME

SEQ ID NO: 35267 - protein, 90 aa, Artificial sequence
  Protein classification predicting sequence
WAMGLNYKLTFLHTLYKRVLHMLLLLIQTMDGQELSLRYSSKVFLKAFNERKDSIKFVKLLSHFYPAVINSNINVINYFNRMFHFFEHEK

SEQ ID NO: 35268 - protein, 15 aa, Artificial sequence
  Protein classification predicting sequence
TNYEYERGNIIIFPL

SEQ ID NO: 35269 - protein, 90 aa, Artificial sequence
  Protein classification predicting sequence
ETLLKIEENDYINSSFFQQKDKRFYPINDDFYHISTGGYGIVFKIDNYVVKFVFEATKLYSPMETTAEFTVPKFLYNNLKGDEKKLIVCA

SEQ ID NO: 35270 - protein, 128 aa, Artificial sequence
  Protein classification predicting sequence
MLLLLIQTMDGQELSLRYSSKVFLKAFNERKDSIKFVKLLSHFYPAVINSNINVINYFNRMFHFFEHEKRTNYEYERGNIIIFPLALYSADKVDTELAIKLGFKSLVQYIKFIFLQMALLYIKIYELP

SEQ ID NO: 35271 - protein, 9 aa, Artificial sequence
  Protein classification predicting sequence
GDRHLDNLL

SEQ ID NO: 35272 - protein, 12 aa, Artificial sequence
  Protein classification predicting sequence
LRKSSNLILNLF

SEQ ID NO: 35273 - protein, 8 aa, Artificial sequence
  Protein classification predicting sequence
SVSALFPQ

SEQ ID NO: 35274 - protein, 7 aa, Artificial sequence
  Protein classification predicting sequence
DPKPFPP

SEQ ID NO: 35275 - protein, 7 aa, Artificial sequence
  Protein classification predicting sequence
SRRGDLE

SEQ ID NO: 35276 - protein, 5 aa, Artificial sequence
  Protein classification predicting sequence
LGYCM

SEQ ID NO: 35277 - protein, 8 aa, Artificial sequence
  Protein classification predicting sequence
VNINPFTP

SEQ ID NO: 35278 - protein, 6 aa, Artificial sequence
  Protein classification predicting sequence
GEFGSV

SEQ ID NO: 35279 - protein, 16 aa, Artificial sequence
  Protein classification predicting sequence
GEFGSVFKCVKRLDGC

SEQ ID NO: 35280 - protein, 13 aa, Artificial sequence
  Protein classification predicting sequence
YAIKRSKKPLAGS

SEQ ID NO: 35281 - protein, 12 aa, Artificial sequence
  Protein classification predicting sequence
ALREVYAHAVLG

SEQ ID NO: 35282 - protein, 9 aa, Artificial sequence
  Protein classification predicting sequence
SAWAEDDHM

SEQ ID NO: 35283 - protein, 11 aa, Artificial sequence
  Protein classification predicting sequence
IQNEYCNGGSL

SEQ ID NO: 35284 - protein, 13 aa, Artificial sequence
  Protein classification predicting sequence
LVHMDIKPSNIFI

SEQ ID NO: 35285 - protein, 9 aa, Artificial sequence
  Protein classification predicting sequence
KIGDLGHVT

SEQ ID NO: 35286 - protein, 14 aa, Artificial sequence
  Protein classification predicting sequence
PQVEEGDSRFLANE

SEQ ID NO: 35287 - protein, 10 aa, Artificial sequence
  Protein classification predicting sequence
RLDGCIYAIK

SEQ ID NO: 35288 - protein, 8 aa, Artificial sequence
  Protein classification predicting sequence
FVTIFAKP

SEQ ID NO: 35289 - protein, 13 aa, Artificial sequence
  Protein classification predicting sequence
QWKGIIAVSRGGL

SEQ ID NO: 35290 - protein, 120 aa, Artificial sequence
  Protein classification predicting sequence
VTWDMLQIHARKLASRLMPSEQWKGIIAVSRGGLVPGALLARELGIRHVDTVCISSYDHDNQRELKVLKRAEGDGEGFIVIDDLVDTGGTAVAIREMYPKAHFVTIFAKPAGRPLVDDYV

SEQ ID NO: 35291 - protein, 8 aa, Artificial sequence
  Protein classification predicting sequence
GNSAGTVT

SEQ ID NO: 35292 - protein, 14 aa, Artificial sequence
  Protein classification predicting sequence
SLWNADDWATRGGL

SEQ ID NO: 35293 - protein, 8 aa, Artificial sequence
  Protein classification predicting sequence
LEGFTLPK

SEQ ID NO: 35294 - protein, 8 aa, Artificial sequence
  Protein classification predicting sequence
SGQMHGLV

SEQ ID NO: 35295 - protein, 8 aa, Artificial sequence
  Protein classification predicting sequence
TYCRHKLG

SEQ ID NO: 35296 - protein, 9 aa, Artificial sequence
  Protein classification predicting sequence
NVRVTPWRM

SEQ ID NO: 35297 - protein, 48 aa, Artificial sequence
  Protein classification predicting sequence
VGTDWDAKERLFRNFGGLLGPMDEPVGMQKWGKGPNVTVTVIWVDPVN

SEQ ID NO: 35298 - protein, 7 aa, Artificial sequence
  Protein classification predicting sequence
YMEQSFQ

SEQ ID NO: 35299 - protein, 9 aa, Artificial sequence
  Protein classification predicting sequence
APRRERRDL

SEQ ID NO: 35300 - protein, 14 aa, Artificial sequence
  Protein classification predicting sequence
PKCDISGKEAISAL

SEQ ID NO: 35301 - protein, 11 aa, Artificial sequence
  Protein classification predicting sequence
RAKSKHCRQEI

SEQ ID NO: 35302 - protein, 8 aa, Artificial sequence
  Protein classification predicting sequence
KNVQWDED

SEQ ID NO: 35303 - protein, 7 aa, Artificial sequence
  Protein classification predicting sequence
LVVHGRA

SEQ ID NO: 35304 - protein, 24 aa, Artificial sequence
  Protein classification predicting sequence
KAIYHKDHFYYIHVDKRSNYLHRQ

SEQ ID NO: 35305 - protein, 75 aa, Artificial sequence
  Protein classification predicting sequence
LSTYLQSMRDLLEMTDWPWDFFINLSAADYPIRTNDQLVAFLSRYRDMNFLKSHGRDNARFIRKQGLDRLFLECD

SEQ ID NO: 35306 - protein, 6 aa, Artificial sequence
  Protein classification predicting sequence
HMWRLG

SEQ ID NO: 35307 - protein, 95 aa, Artificial sequence
  Protein classification predicting sequence
FSTDDLVTKMKQFYSYTLLPAESFFHTVLENSPHCDTMVDNNLRITNWNRKLGCKCQYKHIVDWCGCSPNDFKPQDFHRFQQTARPTFFARKFEA

SEQ ID NO: 35308 - protein, 10 aa, Artificial sequence
  Protein classification predicting sequence
VNQEIIGQLD

SEQ ID NO: 35309 - protein, 12 aa, Artificial sequence
  Protein classification predicting sequence
PAGTPGLRSYWE

SEQ ID NO: 35310 - protein, 15 aa, Artificial sequence
  Protein classification predicting sequence
YFLADRFQGFLIKHH

SEQ ID NO: 35311 - protein, 14 aa, Artificial sequence
  Protein classification predicting sequence
TNLAVSKLETLETW

SEQ ID NO: 35312 - protein, 54 aa, Artificial sequence
  Protein classification predicting sequence
ATYDILIESTAEFTHYKPPLNLPLRPGVWTVKILHHWVPVAETKFLVAPLTFSN

SEQ ID NO: 35313 - protein, 16 aa, Artificial sequence
  Protein classification predicting sequence
PPPEAPGRQNLSGAAA

SEQ ID NO: 35314 - protein, 10 aa, Artificial sequence
  Protein classification predicting sequence
EALVGAAGFP

SEQ ID NO: 35315 - protein, 20 aa, Artificial sequence
  Protein classification predicting sequence
FTPKCEIVGKDALSALARAS

SEQ ID NO: 35316 - protein, 7 aa, Artificial sequence
  Protein classification predicting sequence
RSNYLHR

SEQ ID NO: 35317 - protein, 26 aa, Artificial sequence
  Protein classification predicting sequence
QYKHIVDWCGCSPNDFKPQDFLRLQQ

SEQ ID NO: 35318 - protein, 8 aa, Artificial sequence
  Protein classification predicting sequence
RLGLRRAE

SEQ ID NO: 35319 - protein, 17 aa, Artificial sequence
  Protein classification predicting sequence
TVVWIDPTYVVATSYDI

SEQ ID NO: 35320 - protein, 24 aa, Artificial sequence
  Protein classification predicting sequence
AGPPHNEYMEQSFQGLSGILNLPQ

SEQ ID NO: 35321 - protein, 8 aa, Artificial sequence
  Protein classification predicting sequence
SSFWSVAG

SEQ ID NO: 35322 - protein, 12 aa, Artificial sequence
  Protein classification predicting sequence
PVAKVVRAVTSR

SEQ ID NO: 35323 - protein, 30 aa, Artificial sequence
  Protein classification predicting sequence
GEKGRQRKPRPLDPGEGSKDTDSSAGRRGS

SEQ ID NO: 35324 - protein, 8 aa, Artificial sequence
  Protein classification predicting sequence
YIHVDKRS

SEQ ID NO: 35325 - protein, 9 aa, Artificial sequence
  Protein classification predicting sequence
TIWGGASLL

SEQ ID NO: 35326 - protein, 7 aa, Artificial sequence
  Protein classification predicting sequence
SMRDLLE

SEQ ID NO: 35327 - protein, 23 aa, Artificial sequence
  Protein classification predicting sequence
WDPKERLFRNFGGLLGPLDEPVA

SEQ ID NO: 35328 - protein, 16 aa, Artificial sequence
  Protein classification predicting sequence
HGDTGSVEGAPQPTDN

SEQ ID NO: 35329 - protein, 11 aa, Artificial sequence
  Protein classification predicting sequence
YIHVDKRSNYL

SEQ ID NO: 35330 - protein, 10 aa, Artificial sequence
  Protein classification predicting sequence
TPALKAYWEN

SEQ ID NO: 35331 - protein, 9 aa, Artificial sequence
  Protein classification predicting sequence
QPSAQGPAE

SEQ ID NO: 35332 - protein, 94 aa, Artificial sequence
  Protein classification predicting sequence
WDFFINLSATDYPTRTNEELVAFLSKNRDKNFLKSHGRDNSRFIKKQGLDRLFHECDSHMWRLGERQIPAGIVVDGGSDWFVLTRSFVEYVVYT

SEQ ID NO: 35333 - protein, 9 aa, Artificial sequence
  Protein classification predicting sequence
LTAYTAFAR

SEQ ID NO: 35334 - protein, 6 aa, Artificial sequence
  Protein classification predicting sequence
DGGSDW

SEQ ID NO: 35335 - protein, 10 aa, Artificial sequence
  Protein classification predicting sequence
PWRMATIWGG

SEQ ID NO: 35336 - protein, 9 aa, Artificial sequence
  Protein classification predicting sequence
WDFFINLSA

SEQ ID NO: 35337 - protein, 7 aa, Artificial sequence
  Protein classification predicting sequence
RVTNWNR

SEQ ID NO: 35338 - protein, 7 aa, Artificial sequence
  Protein classification predicting sequence
FFARKFE

SEQ ID NO: 35339 - protein, 9 aa, Artificial sequence
  Protein classification predicting sequence
WSSLSPDPK

SEQ ID NO: 35340 - protein, 8 aa, Artificial sequence
  Protein classification predicting sequence
GCKCQYKH

SEQ ID NO: 35341 - protein, 24 aa, Artificial sequence
  Protein classification predicting sequence
GERFQIINNTEGDWWEARSIATGK

SEQ ID NO: 35342 - protein, 7 aa, Artificial sequence
  Protein classification predicting sequence
ERLLLNP

SEQ ID NO: 35343 - protein, 9 aa, Artificial sequence
  Protein classification predicting sequence
PEAFLQEAQ

SEQ ID NO: 35344 - protein, 5 aa, Artificial sequence
  Protein classification predicting sequence
NLVCK

SEQ ID NO: 35345 - protein, 10 aa, Artificial sequence
  Protein classification predicting sequence
TKGRVPYPGM

SEQ ID NO: 35346 - protein, 16 aa, Artificial sequence
  Protein classification predicting sequence
TKGRVPYPGMVNREVL

SEQ ID NO: 35347 - protein, 8 aa, Artificial sequence
  Protein classification predicting sequence
FLEDYFTA

SEQ ID NO: 35348 - protein, 7 aa, Artificial sequence
  Protein classification predicting sequence
EPQYQPG

SEQ ID NO: 35349 - protein, 10 aa, Artificial sequence
  Protein classification predicting sequence
GYIPSNYVAP

SEQ ID NO: 35350 - protein, 22 aa, Artificial sequence
  Protein classification predicting sequence
VKHYKIRKLDNGGYYITTRAQF

SEQ ID NO: 35351 - protein, 8 aa, Artificial sequence
  Protein classification predicting sequence
KTLKPGTM

SEQ ID NO: 35352 - protein, 8 aa, Artificial sequence
  Protein classification predicting sequence
FVALYDYE

SEQ ID NO: 35353 - protein, 17 aa, Artificial sequence
  Protein classification predicting sequence
FVALYDYEARTTEDLSF

SEQ ID NO: 35354 - protein, 7 aa, Artificial sequence
  Protein classification predicting sequence
GTWNGTT

SEQ ID NO: 35355 - protein, 15 aa, Artificial sequence
  Protein classification predicting sequence
LYAVVSEEPIYIVTE

SEQ ID NO: 35356 - protein, 12 aa, Artificial sequence
  Protein classification predicting sequence
HRDLRAANILVG

SEQ ID NO: 35357 - protein, 15 aa, Artificial sequence
  Protein classification predicting sequence
KGRVPYPGMVNREVL

SEQ ID NO: 35358 - protein, 18 aa, Artificial sequence
  Protein classification predicting sequence
RFQIINNTEGDWWEARSI

SEQ ID NO: 35359 - protein, 9 aa, Artificial sequence
  Protein classification predicting sequence
KHYKIRKLD

SEQ ID NO: 35360 - protein, 6 aa, Artificial sequence
  Protein classification predicting sequence
KPQTQG

SEQ ID NO: 35361 - protein, 8 aa, Artificial sequence
  Protein classification predicting sequence
LPQLVDMA

SEQ ID NO: 35362 - protein, 11 aa, Artificial sequence
  Protein classification predicting sequence
HRDLRAANILV

SEQ ID NO: 35363 - protein, 8 aa, Artificial sequence
  Protein classification predicting sequence
NREVLEQV

SEQ ID NO: 35364 - protein, 17 aa, Artificial sequence
  Protein classification predicting sequence
RGYRMPCPQGCPESLHE

SEQ ID NO: 35365 - protein, 9 aa, Artificial sequence
  Protein classification predicting sequence
EGDWWEARS

SEQ ID NO: 35366 - protein, 12 aa, Artificial sequence
  Protein classification predicting sequence
DSIQAEEWYFGK

SEQ ID NO: 35367 - protein, 18 aa, Artificial sequence
  Protein classification predicting sequence
RESETTKGAYSLSIRDWD

SEQ ID NO: 35368 - protein, 17 aa, Artificial sequence
  Protein classification predicting sequence
LYAVVSEEPIYIVTEFM

SEQ ID NO: 35369 - protein, 12 aa, Artificial sequence
  Protein classification predicting sequence
LPQLVDMAAQIA

SEQ ID NO: 35370 - protein, 33 aa, Artificial sequence
  Protein classification predicting sequence
ADFGLARLIEDNEYTARQGAKFPIKWTAPEAAL

SEQ ID NO: 35371 - protein, 14 aa, Artificial sequence
  Protein classification predicting sequence
NREVLEQVERGYRM

SEQ ID NO: 35372 - protein, 11 aa, Artificial sequence
  Protein classification predicting sequence
PEERPTFEYLQ

SEQ ID NO: 35373 - protein, 9 aa, Artificial sequence
  Protein classification predicting sequence
ALEQAIISQ

SEQ ID NO: 35374 - protein, 10 aa, Artificial sequence
  Protein classification predicting sequence
EKLIATTAHE

SEQ ID NO: 35375 - protein, 9 aa, Artificial sequence
  Protein classification predicting sequence
QLDNPYIVR

SEQ ID NO: 35376 - protein, 14 aa, Artificial sequence
  Protein classification predicting sequence
HYAKISDFGLSKAL

SEQ ID NO: 35377 - protein, 9 aa, Artificial sequence
  Protein classification predicting sequence
KWYAPECIN

SEQ ID NO: 35378 - protein, 6 aa, Artificial sequence
  Protein classification predicting sequence
GVTMWE

SEQ ID NO: 35379 - protein, 7 aa, Artificial sequence
  Protein classification predicting sequence
SYGQKPY

SEQ ID NO: 35380 - protein, 6 aa, Artificial sequence
  Protein classification predicting sequence
CPPECP

SEQ ID NO: 35381 - protein, 8 aa, Artificial sequence
  Protein classification predicting sequence
MGMKYLEE

SEQ ID NO: 35382 - protein, 12 aa, Artificial sequence
  Protein classification predicting sequence
MWEAFSYGQKPY

SEQ ID NO: 35383 - protein, 7 aa, Artificial sequence
  Protein classification predicting sequence
FDLPHVI

SEQ ID NO: 35384 - protein, 6 aa, Artificial sequence
  Protein classification predicting sequence
GGKERT

SEQ ID NO: 35385 - protein, 7 aa, Artificial sequence
  Protein classification predicting sequence
GGKERTE

SEQ ID NO: 35386 - protein, 8 aa, Artificial sequence
  Protein classification predicting sequence
VDVGGGTG

SEQ ID NO: 35387 - protein, 6 aa, Artificial sequence
  Protein classification predicting sequence
VGGDMF

SEQ ID NO: 35388 - protein, 6 aa, Artificial sequence
  Protein classification predicting sequence
YGERVG

SEQ ID NO: 35389 - protein, 7 aa, Artificial sequence
  Protein classification predicting sequence
GDEVIIP

SEQ ID NO: 35390 - protein, 7 aa, Artificial sequence
  Protein classification predicting sequence
IAEDYNI

SEQ ID NO: 35391 - protein, 7 aa, Artificial sequence
  Protein classification predicting sequence
PSDRPSF

SEQ ID NO: 35392 - protein, 6 aa, Artificial sequence
  Protein classification predicting sequence
LGDGIF

SEQ ID NO: 35393 - protein, 14 aa, Artificial sequence
  Protein classification predicting sequence
QADYPDYYFKITKS

SEQ ID NO: 35394 - protein, 6 aa, Artificial sequence
  Protein classification predicting sequence
YPDYYF

SEQ ID NO: 35395 - protein, 7 aa, Artificial sequence
  Protein classification predicting sequence
KSMIRKR

SEQ ID NO: 35396 - protein, 8 aa, Artificial sequence
  Protein classification predicting sequence
ITHLIFCT

SEQ ID NO: 35397 - protein, 5 aa, Artificial sequence
  Protein classification predicting sequence
YQQGC

SEQ ID NO: 35398 - protein, 6 aa, Artificial sequence
  Protein classification predicting sequence
TFRGPS

SEQ ID NO: 35399 - protein, 6 aa, Artificial sequence
  Protein classification predicting sequence
HRDLKP

SEQ ID NO: 35400 - protein, 8 aa, Artificial sequence
  Protein classification predicting sequence
NSGSEANE

SEQ ID NO: 35401 - protein, 7 aa, Artificial sequence
  Protein classification predicting sequence
AGIAVVN

SEQ ID NO: 35402 - protein, 7 aa, Artificial sequence
  Protein classification predicting sequence
VFFTNSG

SEQ ID NO: 35403 - protein, 6 aa, Artificial sequence
  Protein classification predicting sequence
LYDRPG

SEQ ID NO: 35404 - protein, 6 aa, Artificial sequence
  Protein classification predicting sequence
CWDADP

SEQ ID NO: 35405 - protein, 6 aa, Artificial sequence
  Protein classification predicting sequence
PDVDIY

SEQ ID NO: 35406 - protein, 6 aa, Artificial sequence
  Protein classification predicting sequence
ATIDLL

SEQ ID NO: 35407 - protein, 6 aa, Artificial sequence
  Protein classification predicting sequence
EFTLKS

SEQ ID NO: 35408 - protein, 7 aa, Artificial sequence
  Protein classification predicting sequence
LRSRAKG

SEQ ID NO: 35409 - protein, 6 aa, Artificial sequence
  Protein classification predicting sequence
YMYLTE

SEQ ID NO: 35410 - protein, 7 aa, Artificial sequence
  Protein classification predicting sequence
WNIPVHK

SEQ ID NO: 35411 - protein, 6 aa, Artificial sequence
  Protein classification predicting sequence
IVIKIG

SEQ ID NO: 35412 - protein, 18 aa, Artificial sequence
  Protein classification predicting sequence
YMDMLSAYSAVNQGHRHP

SEQ ID NO: 35413 - protein, 6 aa, Artificial sequence
  Protein classification predicting sequence
EPIQGE

SEQ ID NO: 35414 - protein, 8 aa, Artificial sequence
  Protein classification predicting sequence
LFIADEIQ

SEQ ID NO: 35415 - protein, 11 aa, Artificial sequence
  Protein classification predicting sequence
HGSTFGGNPLA

SEQ ID NO: 35416 - protein, 8 aa, Artificial sequence
  Protein classification predicting sequence
RGRGLFIG

SEQ ID NO: 35417 - protein, 9 aa, Artificial sequence
  Protein classification predicting sequence
LILDEIQTG

SEQ ID NO: 35418 - protein, 7 aa, Artificial sequence
  Protein classification predicting sequence
GRTGKLF

SEQ ID NO: 35419 - protein, 7 aa, Artificial sequence
  Protein classification predicting sequence
LSAYSAV

SEQ ID NO: 35420 - protein, 6 aa, Artificial sequence
  Protein classification predicting sequence
QGHCHP

SEQ ID NO: 35421 - protein, 7 aa, Artificial sequence
  Protein classification predicting sequence
TLTSRAF

SEQ ID NO: 35422 - protein, 16 aa, Artificial sequence
  Protein classification predicting sequence
NFHGRTLGIVGFSTDP

SEQ ID NO: 35423 - protein, 7 aa, Artificial sequence
  Protein classification predicting sequence
GPFAPGF

SEQ ID NO: 35424 - protein, 7 aa, Artificial sequence
  Protein classification predicting sequence
VEPIQGE

SEQ ID NO: 35425 - protein, 6 aa, Artificial sequence
  Protein classification predicting sequence
GRTGKL

SEQ ID NO: 35426 - protein, 10 aa, Artificial sequence
  Protein classification predicting sequence
HEGIEADVTL

SEQ ID NO: 35427 - protein, 12 aa, Artificial sequence
  Protein classification predicting sequence
GGFYPVSAVLSN

SEQ ID NO: 35428 - protein, 21 aa, Artificial sequence
  Protein classification predicting sequence
PGQHGSTFGGNPLACAVARAA

SEQ ID NO: 35429 - protein, 12 aa, Artificial sequence
  Protein classification predicting sequence
VREVRGRGLMLA

SEQ ID NO: 35430 - protein, 8 aa, Artificial sequence
  Protein classification predicting sequence
EPIQGEGG

SEQ ID NO: 35431 - protein, 7 aa, Artificial sequence
  Protein classification predicting sequence
FHGRTMG

SEQ ID NO: 35432 - protein, 7 aa, Artificial sequence
  Protein classification predicting sequence
VGNYFKE

SEQ ID NO: 35433 - protein, 7 aa, Artificial sequence
  Protein classification predicting sequence
GRGLMLG

SEQ ID NO: 35434 - protein, 6 aa, Artificial sequence
  Protein classification predicting sequence
IVDEVQ

SEQ ID NO: 35435 - protein, 6 aa, Artificial sequence
  Protein classification predicting sequence
RLLPPL

SEQ ID NO: 35436 - protein, 8 aa, Artificial sequence
  Protein classification predicting sequence
QTGIGRTG

SEQ ID NO: 35437 - protein, 8 aa, Artificial sequence
  Protein classification predicting sequence
ETVQGEGG

SEQ ID NO: 35438 - protein, 7 aa, Artificial sequence
  Protein classification predicting sequence
FTPGSHG

SEQ ID NO: 35439 - protein, 6 aa, Artificial sequence
  Protein classification predicting sequence
QTGLGR

SEQ ID NO: 35440 - protein, 6 aa, Artificial sequence
  Protein classification predicting sequence
IQGEAG

SEQ ID NO: 35441 - protein, 10 aa, Artificial sequence
  Protein classification predicting sequence
HGSTYGGNPL

SEQ ID NO: 35442 - protein, 7 aa, Artificial sequence
  Protein classification predicting sequence
TYGGNPL

SEQ ID NO: 35443 - protein, 6 aa, Artificial sequence
  Protein classification predicting sequence
RGRGLM

SEQ ID NO: 35444 - protein, 6 aa, Artificial sequence
  Protein classification predicting sequence
HGSTFG

SEQ ID NO: 35445 - protein, 8 aa, Artificial sequence
  Protein classification predicting sequence
GRTGKLFA

SEQ ID NO: 35446 - protein, 8 aa, Artificial sequence
  Protein classification predicting sequence
QTGLGRTG

SEQ ID NO: 35447 - protein, 6 aa, Artificial sequence
  Protein classification predicting sequence
PLACAA

SEQ ID NO: 35448 - protein, 7 aa, Artificial sequence
  Protein classification predicting sequence
EVRGRGL

SEQ ID NO: 35449 - protein, 7 aa, Artificial sequence
  Protein classification predicting sequence
IRLAPPL

SEQ ID NO: 35450 - protein, 9 aa, Artificial sequence
  Protein classification predicting sequence
HGSTFGGNP

SEQ ID NO: 35451 - protein, 7 aa, Artificial sequence
  Protein classification predicting sequence
EGLRRLE

SEQ ID NO: 35452 - protein, 6 aa, Artificial sequence
  Protein classification predicting sequence
IQGEGG

SEQ ID NO: 35453 - protein, 6 aa, Artificial sequence
  Protein classification predicting sequence
TNAFHG

SEQ ID NO: 35454 - protein, 8 aa, Artificial sequence
  Protein classification predicting sequence
TYGGNPLA

SEQ ID NO: 35455 - protein, 6 aa, Artificial sequence
  Protein classification predicting sequence
DEVQTG

SEQ ID NO: 35456 - protein, 7 aa, Artificial sequence
  Protein classification predicting sequence
EAIKDQA

SEQ ID NO: 35457 - protein, 8 aa, Artificial sequence
  Protein classification predicting sequence
TFGGNPLA

SEQ ID NO: 35458 - protein, 8 aa, Artificial sequence
  Protein classification predicting sequence
HGSTFGGN

SEQ ID NO: 35459 - protein, 6 aa, Artificial sequence
  Protein classification predicting sequence
LKGAHI

SEQ ID NO: 35460 - protein, 6 aa, Artificial sequence
  Protein classification predicting sequence
ALGIEC

SEQ ID NO: 35461 - protein, 6 aa, Artificial sequence
  Protein classification predicting sequence
LNSMGA

SEQ ID NO: 35462 - protein, 6 aa, Artificial sequence
  Protein classification predicting sequence
AEGTTV

SEQ ID NO: 35463 - protein, 6 aa, Artificial sequence
  Protein classification predicting sequence
PIILVG

SEQ ID NO: 35464 - protein, 7 aa, Artificial sequence
  Protein classification predicting sequence
TKELVAM

SEQ ID NO: 35465 - protein, 7 aa, Artificial sequence
  Protein classification predicting sequence
LKIADFG

SEQ ID NO: 35466 - protein, 6 aa, Artificial sequence
  Protein classification predicting sequence
IGKGSF

SEQ ID NO: 35467 - protein, 6 aa, Artificial sequence
  Protein classification predicting sequence
DNPDMN

SEQ ID NO: 35468 - protein, 9 aa, Artificial sequence
  Protein classification predicting sequence
VNLGIGLPT

SEQ ID NO: 35469 - protein, 7 aa, Artificial sequence
  Protein classification predicting sequence
KCTLPLT

SEQ ID NO: 35470 - protein, 15 aa, Artificial sequence
  Protein classification predicting sequence
PQGTLAERIRAGGAG

SEQ ID NO: 35471 - protein, 7 aa, Artificial sequence
  Protein classification predicting sequence
LADFGLA

SEQ ID NO: 35472 - protein, 6 aa, Artificial sequence
  Protein classification predicting sequence
NILLDE

SEQ ID NO: 35473 - protein, 6 aa, Artificial sequence
  Protein classification predicting sequence
DKPLES

SEQ ID NO: 35474 - protein, 6 aa, Artificial sequence
  Protein classification predicting sequence
GYDNLV

SEQ ID NO: 35475 - protein, 10 aa, Artificial sequence
  Protein classification predicting sequence
WHDESHLNKY

SEQ ID NO: 35476 - protein, 6 aa, Artificial sequence
  Protein classification predicting sequence
GAEAVE

SEQ ID NO: 35477 - protein, 8 aa, Artificial sequence
  Protein classification predicting sequence
GRTGTLFA

SEQ ID NO: 35478 - protein, 7 aa, Artificial sequence
  Protein classification predicting sequence
GNPLACA

SEQ ID NO: 35479 - protein, 6 aa, Artificial sequence
  Protein classification predicting sequence
NPLACA

SEQ ID NO: 35480 - protein, 6 aa, Artificial sequence
  Protein classification predicting sequence
SNDYLG

SEQ ID NO: 35481 - protein, 15 aa, Artificial sequence
  Protein classification predicting sequence
NHASIIDGCRLSKAK

SEQ ID NO: 35482 - protein, 9 aa, Artificial sequence
  Protein classification predicting sequence
IDGCRLSKA

SEQ ID NO: 35483 - protein, 7 aa, Artificial sequence
  Protein classification predicting sequence
IGTLSKA

SEQ ID NO: 35484 - protein, 6 aa, Artificial sequence
  Protein classification predicting sequence
FSMDGD

SEQ ID NO: 35485 - protein, 7 aa, Artificial sequence
  Protein classification predicting sequence
AKKSWFG

SEQ ID NO: 35486 - protein, 7 aa, Artificial sequence
  Protein classification predicting sequence
LPKLPVP

SEQ ID NO: 35487 - protein, 7 aa, Artificial sequence
  Protein classification predicting sequence
DRHLLGL

SEQ ID NO: 35488 - protein, 8 aa, Artificial sequence
  Protein classification predicting sequence
LPVPPLQQ

SEQ ID NO: 35489 - protein, 8 aa, Artificial sequence
  Protein classification predicting sequence
ALQLAYYR

SEQ ID NO: 35490 - protein, 7 aa, Artificial sequence
  Protein classification predicting sequence
YDKSLQF

SEQ ID NO: 35491 - protein, 7 aa, Artificial sequence
  Protein classification predicting sequence
YGKTFIK

SEQ ID NO: 35492 - protein, 7 aa, Artificial sequence
  Protein classification predicting sequence
SPDAFIQ

SEQ ID NO: 35493 - protein, 6 aa, Artificial sequence
  Protein classification predicting sequence
WSFGIL

SEQ ID NO: 35494 - protein, 8 aa, Artificial sequence
  Protein classification predicting sequence
MAPEVVTR

SEQ ID NO: 35495 - protein, 6 aa, Artificial sequence
  Protein classification predicting sequence
RNIKQE

SEQ ID NO: 35496 - protein, 8 aa, Artificial sequence
  Protein classification predicting sequence
PAALPGLL

SEQ ID NO: 35497 - protein, 7 aa, Artificial sequence
  Protein classification predicting sequence
KLADFGL

SEQ ID NO: 35498 - protein, 6 aa, Artificial sequence
  Protein classification predicting sequence
LHDVYE

SEQ ID NO: 35499 - protein, 10 aa, Artificial sequence
  Protein classification predicting sequence
GVILYILLSG

SEQ ID NO: 35500 - protein, 7 aa, Artificial sequence
  Protein classification predicting sequence
NIVRLHD

SEQ ID NO: 35501 - protein, 6 aa, Artificial sequence
  Protein classification predicting sequence
RPTAAE

SEQ ID NO: 35502 - protein, 7 aa, Artificial sequence
  Protein classification predicting sequence
LKHSNIV

SEQ ID NO: 35503 - protein, 7 aa, Artificial sequence
  Protein classification predicting sequence
ADFGLAR

SEQ ID NO: 35504 - protein, 6 aa, Artificial sequence
  Protein classification predicting sequence
DVLMQD

SEQ ID NO: 35505 - protein, 6 aa, Artificial sequence
  Protein classification predicting sequence
SPTYKE

SEQ ID NO: 35506 - protein, 7 aa, Artificial sequence
  Protein classification predicting sequence
HPNIVKL

SEQ ID NO: 35507 - protein, 8 aa, Artificial sequence
  Protein classification predicting sequence
GVILYILL

SEQ ID NO: 35508 - protein, 8 aa, Artificial sequence
  Protein classification predicting sequence
HRDIKPEN

SEQ ID NO: 35509 - protein, 9 aa, Artificial sequence
  Protein classification predicting sequence
SDVWSFGVL

SEQ ID NO: 35510 - protein, 7 aa, Artificial sequence
  Protein classification predicting sequence
LSHQYYE

SEQ ID NO: 35511 - protein, 6 aa, Artificial sequence
  Protein classification predicting sequence
LDVGCG

SEQ ID NO: 35512 - protein, 8 aa, Artificial sequence
  Protein classification predicting sequence
PQNDLLGH

SEQ ID NO: 35513 - protein, 8 aa, Artificial sequence
  Protein classification predicting sequence
GGELFDRI

SEQ ID NO: 35514 - protein, 6 aa, Artificial sequence
  Protein classification predicting sequence
KLTDFG

SEQ ID NO: 35515 - protein, 6 aa, Artificial sequence
  Protein classification predicting sequence
GSSACS

SEQ ID NO: 35516 - protein, 6 aa, Artificial sequence
  Protein classification predicting sequence
IKIISK

SEQ ID NO: 35517 - protein, 7 aa, Artificial sequence
  Protein classification predicting sequence
WSLGVIL

SEQ ID NO: 35518 - protein, 7 aa, Artificial sequence
  Protein classification predicting sequence
GGELFDR

SEQ ID NO: 35519 - protein, 7 aa, Artificial sequence
  Protein classification predicting sequence
AIGTATP

SEQ ID NO: 35520 - protein, 8 aa, Artificial sequence
  Protein classification predicting sequence
TAVTFRGP

SEQ ID NO: 35521 - protein, 7 aa, Artificial sequence
  Protein classification predicting sequence
GISDWNS

SEQ ID NO: 35522 - protein, 12 aa, Artificial sequence
  Protein classification predicting sequence
WGVLFGFGPGLT

SEQ ID NO: 35523 - protein, 17 aa, Artificial sequence
  Protein classification predicting sequence
YGNMSSACVLFILDEMR

SEQ ID NO: 35524 - protein, 8 aa, Artificial sequence
  Protein classification predicting sequence
LAIGTATP

SEQ ID NO: 35525 - protein, 7 aa, Artificial sequence
  Protein classification predicting sequence
PKSKITH

SEQ ID NO: 35526 - protein, 9 aa, Artificial sequence
  Protein classification predicting sequence
QADYPDYYF

SEQ ID NO: 35527 - protein, 9 aa, Artificial sequence
  Protein classification predicting sequence
LGLRPSVKR

SEQ ID NO: 35528 - protein, 5 aa, Artificial sequence
  Protein classification predicting sequence
FWIAH

SEQ ID NO: 35529 - protein, 7 aa, Artificial sequence
  Protein classification predicting sequence
GGPAILD

SEQ ID NO: 35530 - protein, 10 aa, Artificial sequence
  Protein classification predicting sequence
DMPGADYQLT

SEQ ID NO: 35531 - protein, 6 aa, Artificial sequence
  Protein classification predicting sequence
VCSEIT

SEQ ID NO: 35532 - protein, 7 aa, Artificial sequence
  Protein classification predicting sequence
LVSAAQT

SEQ ID NO: 35533 - protein, 6 aa, Artificial sequence
  Protein classification predicting sequence
RPSVKR

SEQ ID NO: 35534 - protein, 7 aa, Artificial sequence
  Protein classification predicting sequence
EVPKLGK

SEQ ID NO: 35535 - protein, 10 aa, Artificial sequence
  Protein classification predicting sequence
ERPLFQLVSA

SEQ ID NO: 35536 - protein, 7 aa, Artificial sequence
  Protein classification predicting sequence
LTEEILK

SEQ ID NO: 35537 - protein, 6 aa, Artificial sequence
  Protein classification predicting sequence
YMAPSL

SEQ ID NO: 35538 - protein, 6 aa, Artificial sequence
  Protein classification predicting sequence
PLGISD

SEQ ID NO: 35539 - protein, 18 aa, Artificial sequence
  Protein classification predicting sequence
VLSEYGNMSSACVLFILD

SEQ ID NO: 35540 - protein, 13 aa, Artificial sequence
  Protein classification predicting sequence
FWIAHPGGPAILD

SEQ ID NO: 35541 - protein, 8 aa, Artificial sequence
  Protein classification predicting sequence
AKDLAENN

SEQ ID NO: 35542 - protein, 9 aa, Artificial sequence
  Protein classification predicting sequence
AQRAEGPAT

SEQ ID NO: 35543 - protein, 10 aa, Artificial sequence
  Protein classification predicting sequence
LKPEKMKATR

SEQ ID NO: 35544 - protein, 8 aa, Artificial sequence
  Protein classification predicting sequence
GLRPSVKR

SEQ ID NO: 35545 - protein, 8 aa, Artificial sequence
  Protein classification predicting sequence
TVLRLAKD

SEQ ID NO: 35546 - protein, 10 aa, Artificial sequence
  Protein classification predicting sequence
RLAKDLAENN

SEQ ID NO: 35547 - protein, 8 aa, Artificial sequence
  Protein classification predicting sequence
VGQALFGD

SEQ ID NO: 35548 - protein, 6 aa, Artificial sequence
  Protein classification predicting sequence
VGADPD

SEQ ID NO: 35549 - protein, 6 aa, Artificial sequence
  Protein classification predicting sequence
LKPEKM

SEQ ID NO: 35550 - protein, 9 aa, Artificial sequence
  Protein classification predicting sequence
ARVLVVCSE

SEQ ID NO: 35551 - protein, 6 aa, Artificial sequence
  Protein classification predicting sequence
AIKEWG

SEQ ID NO: 35552 - protein, 6 aa, Artificial sequence
  Protein classification predicting sequence
FCTTSG

SEQ ID NO: 35553 - protein, 10 aa, Artificial sequence
  Protein classification predicting sequence
WGQPKSKITH

SEQ ID NO: 35554 - protein, 8 aa, Artificial sequence
  Protein classification predicting sequence
VTFRGPSE

SEQ ID NO: 35555 - protein, 7 aa, Artificial sequence
  Protein classification predicting sequence
AIGTANP

SEQ ID NO: 35556 - protein, 10 aa, Artificial sequence
  Protein classification predicting sequence
PLFQLVSAAQ

SEQ ID NO: 35557 - protein, 8 aa, Artificial sequence
  Protein classification predicting sequence
AQRAEGPA

SEQ ID NO: 35558 - protein, 9 aa, Artificial sequence
  Protein classification predicting sequence
GLKTTGEGL

SEQ ID NO: 35559 - protein, 21 aa, Artificial sequence
  Protein classification predicting sequence
WGVLFGFGPGLTIETVVLHSV

SEQ ID NO: 35560 - protein, 8 aa, Artificial sequence
  Protein classification predicting sequence
ETVVLHSV

SEQ ID NO: 35561 - protein, 18 aa, Artificial sequence
  Protein classification predicting sequence
RKAQRAEGPATILAIGTA

SEQ ID NO: 35562 - protein, 11 aa, Artificial sequence
  Protein classification predicting sequence
GPATILAIGTA

SEQ ID NO: 35563 - protein, 7 aa, Artificial sequence
  Protein classification predicting sequence
RAEGPAT

SEQ ID NO: 35564 - protein, 7 aa, Artificial sequence
  Protein classification predicting sequence
EILKENP

SEQ ID NO: 35565 - protein, 9 aa, Artificial sequence
  Protein classification predicting sequence
TAVTFRGPS

SEQ ID NO: 35566 - protein, 6 aa, Artificial sequence
  Protein classification predicting sequence
GISDWN

SEQ ID NO: 35567 - protein, 7 aa, Artificial sequence
  Protein classification predicting sequence
FILDEMR

SEQ ID NO: 35568 - protein, 8 aa, Artificial sequence
  Protein classification predicting sequence
EEILKENP

SEQ ID NO: 35569 - protein, 9 aa, Artificial sequence
  Protein classification predicting sequence
ILDEMRKKS

SEQ ID NO: 35570 - protein, 7 aa, Artificial sequence
  Protein classification predicting sequence
TTGEGLE

SEQ ID NO: 35571 - protein, 17 aa, Artificial sequence
  Protein classification predicting sequence
GVLFGFGPGLTIETVVL

SEQ ID NO: 35572 - protein, 8 aa, Artificial sequence
  Protein classification predicting sequence
RVLVVCSE

SEQ ID NO: 35573 - protein, 8 aa, Artificial sequence
  Protein classification predicting sequence
LFGDGAAA

SEQ ID NO: 35574 - protein, 10 aa, Artificial sequence
  Protein classification predicting sequence
GARVLVVCSE

SEQ ID NO: 35575 - protein, 11 aa, Artificial sequence
  Protein classification predicting sequence
RKAQRAEGPAT

SEQ ID NO: 35576 - protein, 15 aa, Artificial sequence
  Protein classification predicting sequence
GGTVLRLAKDLAENN

SEQ ID NO: 35577 - protein, 6 aa, Artificial sequence
  Protein classification predicting sequence
RVLVVC

SEQ ID NO: 35578 - protein, 7 aa, Artificial sequence
  Protein classification predicting sequence
VLSEYGN

SEQ ID NO: 35579 - protein, 10 aa, Artificial sequence
  Protein classification predicting sequence
LTEEILKENP

SEQ ID NO: 35580 - protein, 9 aa, Artificial sequence
  Protein classification predicting sequence
PLGISDYNS

SEQ ID NO: 35581 - protein, 8 aa, Artificial sequence
  Protein classification predicting sequence
ITHLVFCT

SEQ ID NO: 35582 - protein, 7 aa, Artificial sequence
  Protein classification predicting sequence
KLLGLRP

SEQ ID NO: 35583 - protein, 6 aa, Artificial sequence
  Protein classification predicting sequence
HMTDLK

SEQ ID NO: 35584 - protein, 12 aa, Artificial sequence
  Protein classification predicting sequence
VVEVPKLGKEAA

SEQ ID NO: 35585 - protein, 14 aa, Artificial sequence
  Protein classification predicting sequence
AIKEWGQPKSKITH

SEQ ID NO: 35586 - protein, 6 aa, Artificial sequence
  Protein classification predicting sequence
VTFRGP

SEQ ID NO: 35587 - protein, 9 aa, Artificial sequence
  Protein classification predicting sequence
ITHLVFCTT

SEQ ID NO: 35588 - protein, 6 aa, Artificial sequence
  Protein classification predicting sequence
LDEMRK

SEQ ID NO: 35589 - protein, 6 aa, Artificial sequence
  Protein classification predicting sequence
TTGEGL

SEQ ID NO: 35590 - protein, 6 aa, Artificial sequence
  Protein classification predicting sequence
LVVCSE

SEQ ID NO: 35591 - protein, 6 aa, Artificial sequence
  Protein classification predicting sequence
ILDQVE

SEQ ID NO: 35592 - protein, 6 aa, Artificial sequence
  Protein classification predicting sequence
SEYGNM

SEQ ID NO: 35593 - protein, 6 aa, Artificial sequence
  Protein classification predicting sequence
SACVLF

SEQ ID NO: 35594 - protein, 9 aa, Artificial sequence
  Protein classification predicting sequence
FGPGLTIET

SEQ ID NO: 35595 - protein, 6 aa, Artificial sequence
  Protein classification predicting sequence
NCVDQS

SEQ ID NO: 35596 - protein, 13 aa, Artificial sequence
  Protein classification predicting sequence
WLRGRYMLVRYED

SEQ ID NO: 35597 - protein, 8 aa, Artificial sequence
  Protein classification predicting sequence
YMLVRYED

SEQ ID NO: 35598 - protein, 8 aa, Artificial sequence
  Protein classification predicting sequence
IQLVRDPR

SEQ ID NO: 35599 - protein, 9 aa, Artificial sequence
  Protein classification predicting sequence
PLGISDWNS

SEQ ID NO: 35600 - protein, 23 aa, Artificial sequence
  Protein classification predicting sequence
PLGISDWNSLFWIAHPGGPAILD

SEQ ID NO: 35601 - protein, 7 aa, Artificial sequence
  Protein classification predicting sequence
KLGKEAA

SEQ ID NO: 35602 - protein, 6 aa, Artificial sequence
  Protein classification predicting sequence
HMTELK

SEQ ID NO: 35603 - protein, 11 aa, Artificial sequence
  Protein classification predicting sequence
VVEVPKLGKEA

SEQ ID NO: 35604 - protein, 16 aa, Artificial sequence
  Protein classification predicting sequence
VLSEYGNMSSACVLFI

SEQ ID NO: 35605 - protein, 21 aa, Artificial sequence
  Protein classification predicting sequence
VLSEYGNMSSACVLFILDEMR

SEQ ID NO: 35606 - protein, 18 aa, Artificial sequence
  Protein classification predicting sequence
WGVLFGFGPGLTVETVVL

SEQ ID NO: 35607 - protein, 6 aa, Artificial sequence
  Protein classification predicting sequence
QRAEGP

SEQ ID NO: 35608 - protein, 12 aa, Artificial sequence
  Protein classification predicting sequence
VGQALFGDGAAA

SEQ ID NO: 35609 - protein, 7 aa, Artificial sequence
  Protein classification predicting sequence
GQPKSKI

SEQ ID NO: 35610 - protein, 11 aa, Artificial sequence
  Protein classification predicting sequence
ACVLFILDEMR

SEQ ID NO: 35611 - protein, 6 aa, Artificial sequence
  Protein classification predicting sequence
VDTDDD

SEQ ID NO: 35612 - protein, 6 aa, Artificial sequence
  Protein classification predicting sequence
YVAPEV

SEQ ID NO: 35613 - protein, 7 aa, Artificial sequence
  Protein classification predicting sequence
HGKTKNP

SEQ ID NO: 35614 - protein, 8 aa, Artificial sequence
  Protein classification predicting sequence
HLVGSALS

SEQ ID NO: 35615 - protein, 9 aa, Artificial sequence
  Protein classification predicting sequence
GPLHGGANE

SEQ ID NO: 35616 - protein, 7 aa, Artificial sequence
  Protein classification predicting sequence
LHGGANE

SEQ ID NO: 35617 - protein, 7 aa, Artificial sequence
  Protein classification predicting sequence
GPLHGGA

SEQ ID NO: 35618 - protein, 8 aa, Artificial sequence
  Protein classification predicting sequence
GFGHRVYK

SEQ ID NO: 35619 - protein, 12 aa, Artificial sequence
  Protein classification predicting sequence
LYAEHSFNASTF

SEQ ID NO: 35620 - protein, 7 aa, Artificial sequence
  Protein classification predicting sequence
IGALKGP

SEQ ID NO: 35621 - protein, 6 aa, Artificial sequence
  Protein classification predicting sequence
NEILVM

SEQ ID NO: 35622 - protein, 10 aa, Artificial sequence
  Protein classification predicting sequence
NSGNRWFDKT

SEQ ID NO: 35623 - protein, 8 aa, Artificial sequence
  Protein classification predicting sequence
IQLALQLA

SEQ ID NO: 35624 - protein, 6 aa, Artificial sequence
  Protein classification predicting sequence
RTFKDS

SEQ ID NO: 35625 - protein, 6 aa, Artificial sequence
  Protein classification predicting sequence
MMTNSQ

SEQ ID NO: 35626 - protein, 6 aa, Artificial sequence
  Protein classification predicting sequence
VTAEYG

SEQ ID NO: 35627 - protein, 7 aa, Artificial sequence
  Protein classification predicting sequence
ESERLLL

SEQ ID NO: 35628 - protein, 7 aa, Artificial sequence
  Protein classification predicting sequence
TMKKILE

SEQ ID NO: 35629 - protein, 7 aa, Artificial sequence
  Protein classification predicting sequence
HVIEDAP

SEQ ID NO: 35630 - protein, 10 aa, Artificial sequence
  Protein classification predicting sequence
ELDLLEIMAK

SEQ ID NO: 35631 - protein, 12 aa, Artificial sequence
  Protein classification predicting sequence
LASASVLPMVLK

SEQ ID NO: 35632 - protein, 9 aa, Artificial sequence
  Protein classification predicting sequence
DPRFNKVFN

SEQ ID NO: 35633 - protein, 7 aa, Artificial sequence
  Protein classification predicting sequence
KNEDGVS

SEQ ID NO: 35634 - protein, 6 aa, Artificial sequence
  Protein classification predicting sequence
LMESWY

SEQ ID NO: 35635 - protein, 9 aa, Artificial sequence
  Protein classification predicting sequence
LKNCYDALP

SEQ ID NO: 35636 - protein, 6 aa, Artificial sequence
  Protein classification predicting sequence
AMQLAS

SEQ ID NO: 35637 - protein, 6 aa, Artificial sequence
  Protein classification predicting sequence
LKDAVL

SEQ ID NO: 35638 - protein, 5 aa, Artificial sequence
  Protein classification predicting sequence
HDWSD

SEQ ID NO: 35639 - protein, 7 aa, Artificial sequence
  Protein classification predicting sequence
ELDLLEI

SEQ ID NO: 35640 - protein, 11 aa, Artificial sequence
  Protein classification predicting sequence
FMKWICHDWSD

SEQ ID NO: 35641 - protein, 6 aa, Artificial sequence
  Protein classification predicting sequence
LPTKNP

SEQ ID NO: 35642 - protein, 8 aa, Artificial sequence
  Protein classification predicting sequence
LMNQDKVL

SEQ ID NO: 35643 - protein, 7 aa, Artificial sequence
  Protein classification predicting sequence
CNAFNTY

SEQ ID NO: 35644 - protein, 8 aa, Artificial sequence
  Protein classification predicting sequence
AIELDLLE

SEQ ID NO: 35645 - protein, 7 aa, Artificial sequence
  Protein classification predicting sequence
NPEAPVM

SEQ ID NO: 35646 - protein, 13 aa, Artificial sequence
  Protein classification predicting sequence
LMNQDKVLMESWY

SEQ ID NO: 35647 - protein, 6 aa, Artificial sequence
  Protein classification predicting sequence
AFEYHG

SEQ ID NO: 35648 - protein, 7 aa, Artificial sequence
  Protein classification predicting sequence
RFNKVFN

SEQ ID NO: 35649 - protein, 13 aa, Artificial sequence
  Protein classification predicting sequence
SVPKGDAIFMKWI

SEQ ID NO: 35650 - protein, 6 aa, Artificial sequence
  Protein classification predicting sequence
NEDGVS

SEQ ID NO: 35651 - protein, 7 aa, Artificial sequence
  Protein classification predicting sequence
SLATKGV

SEQ ID NO: 35652 - protein, 6 aa, Artificial sequence
  Protein classification predicting sequence
GMSDHS

SEQ ID NO: 35653 - protein, 12 aa, Artificial sequence
  Protein classification predicting sequence
GDMFTSIPNADA

SEQ ID NO: 35654 - protein, 9 aa, Artificial sequence
  Protein classification predicting sequence
DIGCGGGLL

SEQ ID NO: 35655 - protein, 7 aa, Artificial sequence
  Protein classification predicting sequence
LAHKWWD

SEQ ID NO: 35656 - protein, 7 aa, Artificial sequence
  Protein classification predicting sequence
DVVTCME

SEQ ID NO: 35657 - protein, 5 aa, Artificial sequence
  Protein classification predicting sequence
VDVWS

SEQ ID NO: 35658 - protein, 9 aa, Artificial sequence
  Protein classification predicting sequence
KICDFGLAR

SEQ ID NO: 35659 - protein, 7 aa, Artificial sequence
  Protein classification predicting sequence
LSTSQVP

SEQ ID NO: 35660 - protein, 8 aa, Artificial sequence
  Protein classification predicting sequence
SLIHDDLP

SEQ ID NO: 35661 - protein, 7 aa, Artificial sequence
  Protein classification predicting sequence
ERIRAGG

SEQ ID NO: 35662 - protein, 6 aa, Artificial sequence
  Protein classification predicting sequence
ADFGLA

SEQ ID NO: 35663 - protein, 7 aa, Artificial sequence
  Protein classification predicting sequence
QSVIDNA

SEQ ID NO: 35664 - protein, 6 aa, Artificial sequence
  Protein classification predicting sequence
LRVAEK

SEQ ID NO: 35665 - protein, 6 aa, Artificial sequence
  Protein classification predicting sequence
RVAEKI

SEQ ID NO: 35666 - protein, 6 aa, Artificial sequence
  Protein classification predicting sequence
PDGRPG

SEQ ID NO: 35667 - protein, 7 aa, Artificial sequence
  Protein classification predicting sequence
GDYSGRY

SEQ ID NO: 35668 - protein, 6 aa, Artificial sequence
  Protein classification predicting sequence
THDSIG

SEQ ID NO: 35669 - protein, 7 aa, Artificial sequence
  Protein classification predicting sequence
LILDEVQ

SEQ ID NO: 35670 - protein, 7 aa, Artificial sequence
  Protein classification predicting sequence
PFAGRLR

SEQ ID NO: 35671 - protein, 14 aa, Artificial sequence
  Protein classification predicting sequence
ENGDLEVECTGEGA

SEQ ID NO: 35672 - protein, 14 aa, Artificial sequence
  Protein classification predicting sequence
VQVTRFTCGGFVVG

SEQ ID NO: 35673 - protein, 6 aa, Artificial sequence
  Protein classification predicting sequence
SLGCML

SEQ ID NO: 35674 - protein, 5 aa, Artificial sequence
  Protein classification predicting sequence
APYWD

SEQ ID NO: 35675 - protein, 6 aa, Artificial sequence
  Protein classification predicting sequence
INASQK

SEQ ID NO: 35676 - protein, 13 aa, Artificial sequence
  Protein classification predicting sequence
FERSVYSDRYIFA

SEQ ID NO: 35677 - protein, 5 aa, Artificial sequence
  Protein classification predicting sequence
YQDWH

SEQ ID NO: 35678 - protein, 11 aa, Artificial sequence
  Protein classification predicting sequence
CKIFLGFTSNL

SEQ ID NO: 35679 - protein, 6 aa, Artificial sequence
  Protein classification predicting sequence
MRNGAD

SEQ ID NO: 35680 - protein, 9 aa, Artificial sequence
  Protein classification predicting sequence
TDGSIGDML

SEQ ID NO: 35681 - protein, 13 aa, Artificial sequence
  Protein classification predicting sequence
GARPDEAVSWGKI

SEQ ID NO: 35682 - protein, 11 aa, Artificial sequence
  Protein classification predicting sequence
MIARLGKEINN

SEQ ID NO: 35683 - protein, 7 aa, Artificial sequence
  Protein classification predicting sequence
GARPDEA

SEQ ID NO: 35684 - protein, 7 aa, Artificial sequence
  Protein classification predicting sequence
RESVKCK

SEQ ID NO: 35685 - protein, 8 aa, Artificial sequence
  Protein classification predicting sequence
TSNLISSG

SEQ ID NO: 35686 - protein, 6 aa, Artificial sequence
  Protein classification predicting sequence
SYLYWA

SEQ ID NO: 35687 - protein, 6 aa, Artificial sequence
  Protein classification predicting sequence
NRIGNL

SEQ ID NO: 35688 - protein, 8 aa, Artificial sequence
  Protein classification predicting sequence
DEAVSWGK

SEQ ID NO: 35689 - protein, 7 aa, Artificial sequence
  Protein classification predicting sequence
QHRMVDV

SEQ ID NO: 35690 - protein, 7 aa, Artificial sequence
  Protein classification predicting sequence
RLGKEIN

SEQ ID NO: 35691 - protein, 11 aa, Artificial sequence
  Protein classification predicting sequence
CNANMMRNGAD

SEQ ID NO: 35692 - protein, 7 aa, Artificial sequence
  Protein classification predicting sequence
LVAETFA

SEQ ID NO: 35693 - protein, 17 aa, Artificial sequence
  Protein classification predicting sequence
IILGGGLPKHHICNANM

SEQ ID NO: 35694 - protein, 6 aa, Artificial sequence
  Protein classification predicting sequence
GGIEED

SEQ ID NO: 35695 - protein, 12 aa, Artificial sequence
  Protein classification predicting sequence
LRSKGLNRIGNL

SEQ ID NO: 35696 - protein, 15 aa, Artificial sequence
  Protein classification predicting sequence
VFKESESLEGTCAKI

SEQ ID NO: 35697 - protein, 7 aa, Artificial sequence
  Protein classification predicting sequence
QEYDGSD

SEQ ID NO: 35698 - protein, 6 aa, Artificial sequence
  Protein classification predicting sequence
HDAVRP

SEQ ID NO: 35699 - protein, 5 aa, Artificial sequence
  Protein classification predicting sequence
EIGDM

SEQ ID NO: 35700 - protein, 6 aa, Artificial sequence
  Protein classification predicting sequence
HDAARP

SEQ ID NO: 35701 - protein, 5 aa, Artificial sequence
  Protein classification predicting sequence
INDPW

SEQ ID NO: 35702 - protein, 7 aa, Artificial sequence
  Protein classification predicting sequence
EKIYGPD

SEQ ID NO: 35703 - protein, 7 aa, Artificial sequence
  Protein classification predicting sequence
TLFGRRR

SEQ ID NO: 35704 - protein, 6 aa, Artificial sequence
  Protein classification predicting sequence
IKNNMI

SEQ ID NO: 35705 - protein, 7 aa, Artificial sequence
  Protein classification predicting sequence
PGTPDDP

SEQ ID NO: 35706 - protein, 6 aa, Artificial sequence
  Protein classification predicting sequence
VHEILM

SEQ ID NO: 35707 - protein, 6 aa, Artificial sequence
  Protein classification predicting sequence
LIGRLL

SEQ ID NO: 35708 - protein, 5 aa, Artificial sequence
  Protein classification predicting sequence
IIRNW

SEQ ID NO: 35709 - protein, 6 aa, Artificial sequence
  Protein classification predicting sequence
EESVQE

SEQ ID NO: 35710 - protein, 6 aa, Artificial sequence
  Protein classification predicting sequence
AKGEKA

SEQ ID NO: 35711 - protein, 6 aa, Artificial sequence
  Protein classification predicting sequence
DGPTHQ

SEQ ID NO: 35712 - protein, 7 aa, Artificial sequence
  Protein classification predicting sequence
AEAGVTL

SEQ ID NO: 35713 - protein, 8 aa, Artificial sequence
  Protein classification predicting sequence
IKPLDRKL

SEQ ID NO: 35714 - protein, 5 aa, Artificial sequence
  Protein classification predicting sequence
DGPTH

SEQ ID NO: 35715 - protein, 7 aa, Artificial sequence
  Protein classification predicting sequence
KEHPDRF

SEQ ID NO: 35716 - protein, 5 aa, Artificial sequence
  Protein classification predicting sequence
FDLFH

SEQ ID NO: 35717 - protein, 8 aa, Artificial sequence
  Protein classification predicting sequence
EAALKLAR

SEQ ID NO: 35718 - protein, 8 aa, Artificial sequence
  Protein classification predicting sequence
QAGCGRTG

SEQ ID NO: 35719 - protein, 6 aa, Artificial sequence
  Protein classification predicting sequence
DIGNHF

SEQ ID NO: 35720 - protein, 6 aa, Artificial sequence
  Protein classification predicting sequence
NDTVGT

SEQ ID NO: 35721 - protein, 6 aa, Artificial sequence
  Protein classification predicting sequence
MENGSL

SEQ ID NO: 35722 - protein, 7 aa, Artificial sequence
  Protein classification predicting sequence
FGTVYKG

SEQ ID NO: 35723 - protein, 6 aa, Artificial sequence
  Protein classification predicting sequence
GSQYLL

SEQ ID NO: 35724 - protein, 8 aa, Artificial sequence
  Protein classification predicting sequence
GWGQSFHF

SEQ ID NO: 35725 - protein, 7 aa, Artificial sequence
  Protein classification predicting sequence
NPAKRIT

SEQ ID NO: 35726 - protein, 7 aa, Artificial sequence
  Protein classification predicting sequence
ISGGAGI

SEQ ID NO: 35727 - protein, 6 aa, Artificial sequence
  Protein classification predicting sequence
FIQYGI

SEQ ID NO: 35728 - protein, 8 aa, Artificial sequence
  Protein classification predicting sequence
LFGDGAGA

SEQ ID NO: 35729 - protein, 7 aa, Artificial sequence
  Protein classification predicting sequence
LFGDGAG

SEQ ID NO: 35730 - protein, 7 aa, Artificial sequence
  Protein classification predicting sequence
FGDGAGA

SEQ ID NO: 35731 - protein, 6 aa, Artificial sequence
  Protein classification predicting sequence
LVSAAQ

SEQ ID NO: 35732 - protein, 9 aa, Artificial sequence
  Protein classification predicting sequence
GGAIALGHP

SEQ ID NO: 35733 - protein, 7 aa, Artificial sequence
  Protein classification predicting sequence
NEAFAAQ

SEQ ID NO: 35734 - protein, 6 aa, Artificial sequence
  Protein classification predicting sequence
LRPAFD

SEQ ID NO: 35735 - protein, 7 aa, Artificial sequence
  Protein classification predicting sequence
DGAAAVI

SEQ ID NO: 35736 - protein, 7 aa, Artificial sequence
  Protein classification predicting sequence
ERKEMAL

SEQ ID NO: 35737 - protein, 7 aa, Artificial sequence
  Protein classification predicting sequence
HPNIVRL

SEQ ID NO: 35738 - protein, 5 aa, Artificial sequence
  Protein classification predicting sequence
GAPYW

SEQ ID NO: 35739 - protein, 9 aa, Artificial sequence
  Protein classification predicting sequence
KIADFGLAR

SEQ ID NO: 35740 - protein, 7 aa, Artificial sequence
  Protein classification predicting sequence
SDVWSFG

SEQ ID NO: 35741 - protein, 5 aa, Artificial sequence
  Protein classification predicting sequence
MRECW

SEQ ID NO: 35742 - protein, 6 aa, Artificial sequence
  Protein classification predicting sequence
SDVWSF

SEQ ID NO: 35743 - protein, 7 aa, Artificial sequence
  Protein classification predicting sequence
VITGKED

SEQ ID NO: 35744 - protein, 7 aa, Artificial sequence
  Protein classification predicting sequence
RAIEAGD

SEQ ID NO: 35745 - protein, 6 aa, Artificial sequence
  Protein classification predicting sequence
GTPEFA

SEQ ID NO: 35746 - protein, 6 aa, Artificial sequence
  Protein classification predicting sequence
NKNAIP

SEQ ID NO: 35747 - protein, 7 aa, Artificial sequence
  Protein classification predicting sequence
VVVLNNS

SEQ ID NO: 35748 - protein, 8 aa, Artificial sequence
  Protein classification predicting sequence
VEETFAEA

SEQ ID NO: 35749 - protein, 10 aa, Artificial sequence
  Protein classification predicting sequence
YKFYLAFENS

SEQ ID NO: 35750 - protein, 6 aa, Artificial sequence
  Protein classification predicting sequence
HYKEAL

SEQ ID NO: 35751 - protein, 5 aa, Artificial sequence
  Protein classification predicting sequence
WAAYL

SEQ ID NO: 35752 - protein, 6 aa, Artificial sequence
  Protein classification predicting sequence
PWSGQP

SEQ ID NO: 35753 - protein, 6 aa, Artificial sequence
  Protein classification predicting sequence
GVHVRR

SEQ ID NO: 35754 - protein, 6 aa, Artificial sequence
  Protein classification predicting sequence
IGEGTY

SEQ ID NO: 35755 - protein, 6 aa, Artificial sequence
  Protein classification predicting sequence
PSEGVM

SEQ ID NO: 35756 - protein, 6 aa, Artificial sequence
  Protein classification predicting sequence
LRAVSD

SEQ ID NO: 35757 - protein, 7 aa, Artificial sequence
  Protein classification predicting sequence
YPRINKE

SEQ ID NO: 35758 - protein, 5 aa, Artificial sequence
  Protein classification predicting sequence
SFHGR

SEQ ID NO: 35759 - protein, 6 aa, Artificial sequence
  Protein classification predicting sequence
NCTKIL

SEQ ID NO: 35760 - protein, 8 aa, Artificial sequence
  Protein classification predicting sequence
RAIYMPQN

SEQ ID NO: 35761 - protein, 6 aa, Artificial sequence
  Protein classification predicting sequence
SCFPNV

SEQ ID NO: 35762 - protein, 7 aa, Artificial sequence
  Protein classification predicting sequence
SVERLDY

SEQ ID NO: 35763 - protein, 6 aa, Artificial sequence
  Protein classification predicting sequence
VGRING

SEQ ID NO: 35764 - protein, 6 aa, Artificial sequence
  Protein classification predicting sequence
HTPFPS

SEQ ID NO: 35765 - protein, 9 aa, Artificial sequence
  Protein classification predicting sequence
PSRFEPCGL

SEQ ID NO: 35766 - protein, 6 aa, Artificial sequence
  Protein classification predicting sequence
FEPCGL

SEQ ID NO: 35767 - protein, 7 aa, Artificial sequence
  Protein classification predicting sequence
KTGGLGD

SEQ ID NO: 35768 - protein, 5 aa, Artificial sequence
  Protein classification predicting sequence
EPCGL

SEQ ID NO: 35769 - protein, 7 aa, Artificial sequence
  Protein classification predicting sequence
GGLVDTV

SEQ ID NO: 35770 - protein, 9 aa, Artificial sequence
  Protein classification predicting sequence
ALQAEVGLP

SEQ ID NO: 35771 - protein, 8 aa, Artificial sequence
  Protein classification predicting sequence
QIVLLGTG

SEQ ID NO: 35772 - protein, 8 aa, Artificial sequence
  Protein classification predicting sequence
KTGGLGDV

SEQ ID NO: 35773 - protein, 8 aa, Artificial sequence
  Protein classification predicting sequence
PSRFEPCG

SEQ ID NO: 35774 - protein, 7 aa, Artificial sequence
  Protein classification predicting sequence
LVVLLDV

SEQ ID NO: 35775 - protein, 5 aa, Artificial sequence
  Protein classification predicting sequence
DWHTG

SEQ ID NO: 35776 - protein, 5 aa, Artificial sequence
  Protein classification predicting sequence
QYESH

SEQ ID NO: 35777 - protein, 5 aa, Artificial sequence
  Protein classification predicting sequence
AVFWI

SEQ ID NO: 35778 - protein, 8 aa, Artificial sequence
  Protein classification predicting sequence
HDVAAPLS

SEQ ID NO: 35779 - protein, 5 aa, Artificial sequence
  Protein classification predicting sequence
PERNE

SEQ ID NO: 35780 - protein, 6 aa, Artificial sequence
  Protein classification predicting sequence
RLYPLT

SEQ ID NO: 35781 - protein, 6 aa, Artificial sequence
  Protein classification predicting sequence
FVEKPA

SEQ ID NO: 35782 - protein, 6 aa, Artificial sequence
  Protein classification predicting sequence
KEGVQE

SEQ ID NO: 35783 - protein, 6 aa, Artificial sequence
  Protein classification predicting sequence
INVPRS

SEQ ID NO: 35784 - protein, 6 aa, Artificial sequence
  Protein classification predicting sequence
AASPSK

SEQ ID NO: 35785 - protein, 6 aa, Artificial sequence
  Protein classification predicting sequence
GGQAGI

SEQ ID NO: 35786 - protein, 7 aa, Artificial sequence
  Protein classification predicting sequence
LEGRISG

SEQ ID NO: 35787 - protein, 7 aa, Artificial sequence
  Protein classification predicting sequence
PAIVAYT

SEQ ID NO: 35788 - protein, 7 aa, Artificial sequence
  Protein classification predicting sequence
RAAKTVN

SEQ ID NO: 35789 - protein, 6 aa, Artificial sequence
  Protein classification predicting sequence
DDFQLI

SEQ ID NO: 35790 - protein, 6 aa, Artificial sequence
  Protein classification predicting sequence
TPVSRV

SEQ ID NO: 35791 - protein, 6 aa, Artificial sequence
  Protein classification predicting sequence
FLTPAE

SEQ ID NO: 35792 - protein, 6 aa, Artificial sequence
  Protein classification predicting sequence
PGGLRD

SEQ ID NO: 35793 - protein, 6 aa, Artificial sequence
  Protein classification predicting sequence
PAIGDP

SEQ ID NO: 35794 - protein, 6 aa, Artificial sequence
  Protein classification predicting sequence
DLRLRP

SEQ ID NO: 35795 - protein, 7 aa, Artificial sequence
  Protein classification predicting sequence
SLIIAAR

SEQ ID NO: 35796 - protein, 7 aa, Artificial sequence
  Protein classification predicting sequence
KLVKDGY

SEQ ID NO: 35797 - protein, 6 aa, Artificial sequence
  Protein classification predicting sequence
YFSATK

SEQ ID NO: 35798 - protein, 6 aa, Artificial sequence
  Protein classification predicting sequence
FNIHDL

SEQ ID NO: 35799 - protein, 6 aa, Artificial sequence
  Protein classification predicting sequence
FGLTRG

SEQ ID NO: 35800 - protein, 7 aa, Artificial sequence
  Protein classification predicting sequence
EVGDIIG

SEQ ID NO: 35801 - protein, 7 aa, Artificial sequence
  Protein classification predicting sequence
TGAEAVE

SEQ ID NO: 35802 - protein, 6 aa, Artificial sequence
  Protein classification predicting sequence
LFLEAH

SEQ ID NO: 35803 - protein, 7 aa, Artificial sequence
  Protein classification predicting sequence
KPENLLL

SEQ ID NO: 35804 - protein, 6 aa, Artificial sequence
  Protein classification predicting sequence
WACGVI

SEQ ID NO: 35805 - protein, 5 aa, Artificial sequence
  Protein classification predicting sequence
VDCWS

SEQ ID NO: 35806 - protein, 5 aa, Artificial sequence
  Protein classification predicting sequence
NYYVY

SEQ ID NO: 35807 - protein, 6 aa, Artificial sequence
  Protein classification predicting sequence
NHASMI

SEQ ID NO: 35808 - protein, 8 aa, Artificial sequence
  Protein classification predicting sequence
FPTVPRGT

SEQ ID NO: 35809 - protein, 8 aa, Artificial sequence
  Protein classification predicting sequence
SDELNHAS

SEQ ID NO: 35810 - protein, 6 aa, Artificial sequence
  Protein classification predicting sequence
PDLIIR

SEQ ID NO: 35811 - protein, 7 aa, Artificial sequence
  Protein classification predicting sequence
LLMDALK

SEQ ID NO: 35812 - protein, 8 aa, Artificial sequence
  Protein classification predicting sequence
STLREGEQ

SEQ ID NO: 35813 - protein, 6 aa, Artificial sequence
  Protein classification predicting sequence
VPNDNY

SEQ ID NO: 35814 - protein, 6 aa, Artificial sequence
  Protein classification predicting sequence
IPVFCP

SEQ ID NO: 35815 - protein, 5 aa, Artificial sequence
  Protein classification predicting sequence
SWYQH

SEQ ID NO: 35816 - protein, 8 aa, Artificial sequence
  Protein classification predicting sequence
CLGKSKGR

SEQ ID NO: 35817 - protein, 7 aa, Artificial sequence
  Protein classification predicting sequence
GFTFSFP

SEQ ID NO: 35818 - protein, 5 aa, Artificial sequence
  Protein classification predicting sequence
WTKGF

SEQ ID NO: 35819 - protein, 6 aa, Artificial sequence
  Protein classification predicting sequence
LMSGSG

SEQ ID NO: 35820 - protein, 6 aa, Artificial sequence
  Protein classification predicting sequence
GMYLGE

SEQ ID NO: 35821 - protein, 7 aa, Artificial sequence
  Protein classification predicting sequence
HLSQHGV

SEQ ID NO: 35822 - protein, 6 aa, Artificial sequence
  Protein classification predicting sequence
DLGGTN

SEQ ID NO: 35823 - protein, 8 aa, Artificial sequence
  Protein classification predicting sequence
LGEILRRV

SEQ ID NO: 35824 - protein, 7 aa, Artificial sequence
  Protein classification predicting sequence
VNDTVGT

SEQ ID NO: 35825 - protein, 7 aa, Artificial sequence
  Protein classification predicting sequence
VAYVSFG

SEQ ID NO: 35826 - protein, 15 aa, Artificial sequence
  Protein classification predicting sequence
SDEEANLFAMQLASA

SEQ ID NO: 35827 - protein, 8 aa, Artificial sequence
  Protein classification predicting sequence
LKAAIELD

SEQ ID NO: 35828 - protein, 7 aa, Artificial sequence
  Protein classification predicting sequence
APVMLDR

SEQ ID NO: 35829 - protein, 11 aa, Artificial sequence
  Protein classification predicting sequence
GGIPFNKAYGM

SEQ ID NO: 35830 - protein, 8 aa, Artificial sequence
  Protein classification predicting sequence
VPKGDAIF

SEQ ID NO: 35831 - protein, 9 aa, Artificial sequence
  Protein classification predicting sequence
KWICHDWSD

SEQ ID NO: 35832 - protein, 8 aa, Artificial sequence
  Protein classification predicting sequence
VVAVVGDG

SEQ ID NO: 35833 - protein, 8 aa, Artificial sequence
  Protein classification predicting sequence
IKDGVIYT

SEQ ID NO: 35834 - protein, 6 aa, Artificial sequence
  Protein classification predicting sequence
DLPHVI

SEQ ID NO: 35835 - protein, 7 aa, Artificial sequence
  Protein classification predicting sequence
DAIFMKW

SEQ ID NO: 35836 - protein, 8 aa, Artificial sequence
  Protein classification predicting sequence
HDWSDEHC

SEQ ID NO: 35837 - protein, 12 aa, Artificial sequence
  Protein classification predicting sequence
LIDIGSGPTIYQ

SEQ ID NO: 35838 - protein, 7 aa, Artificial sequence
  Protein classification predicting sequence
NLNSPKQ

SEQ ID NO: 35839 - protein, 5 aa, Artificial sequence
  Protein classification predicting sequence
FQNWG

SEQ ID NO: 35840 - protein, 8 aa, Artificial sequence
  Protein classification predicting sequence
DLLLAETI

SEQ ID NO: 35841 - protein, 7 aa, Artificial sequence
  Protein classification predicting sequence
AVIPAAG

SEQ ID NO: 35842 - protein, 7 aa, Artificial sequence
  Protein classification predicting sequence
PIGSGLG

SEQ ID NO: 35843 - protein, 6 aa, Artificial sequence
  Protein classification predicting sequence
PIGSGL

SEQ ID NO: 35844 - protein, 7 aa, Artificial sequence
  Protein classification predicting sequence
TLNPSVD

SEQ ID NO: 35845 - protein, 7 aa, Artificial sequence
  Protein classification predicting sequence
GLNAVIR

SEQ ID NO: 35846 - protein, 6 aa, Artificial sequence
  Protein classification predicting sequence
RGGTIL

SEQ ID NO: 35847 - protein, 6 aa, Artificial sequence
  Protein classification predicting sequence
VEVMGR

SEQ ID NO: 35848 - protein, 8 aa, Artificial sequence
  Protein classification predicting sequence
LGHVQRGG

SEQ ID NO: 35849 - protein, 10 aa, Artificial sequence
  Protein classification predicting sequence
IGGEDTLGVA

SEQ ID NO: 35850 - protein, 7 aa, Artificial sequence
  Protein classification predicting sequence
PKTIDND

SEQ ID NO: 35851 - protein, 9 aa, Artificial sequence
  Protein classification predicting sequence
LGHVQRGGT

SEQ ID NO: 35852 - protein, 6 aa, Artificial sequence
  Protein classification predicting sequence
SRKGVN

SEQ ID NO: 35853 - protein, 10 aa, Artificial sequence
  Protein classification predicting sequence
DRLHTTAESH

SEQ ID NO: 35854 - protein, 6 aa, Artificial sequence
  Protein classification predicting sequence
QRGGTP

SEQ ID NO: 35855 - protein, 9 aa, Artificial sequence
  Protein classification predicting sequence
TVGIGDTIS

SEQ ID NO: 35856 - protein, 13 aa, Artificial sequence
  Protein classification predicting sequence
VEVMGRHAGWIAL

SEQ ID NO: 35857 - protein, 7 aa, Artificial sequence
  Protein classification predicting sequence
LGHTQRG

SEQ ID NO: 35858 - protein, 6 aa, Artificial sequence
  Protein classification predicting sequence
ANILVG

SEQ ID NO: 35859 - protein, 6 aa, Artificial sequence
  Protein classification predicting sequence
ECMIEL

SEQ ID NO: 35860 - protein, 6 aa, Artificial sequence
  Protein classification predicting sequence
MLINTI

SEQ ID NO: 35861 - protein, 6 aa, Artificial sequence
  Protein classification predicting sequence
LDGFPR

SEQ ID NO: 35862 - protein, 8 aa, Artificial sequence
  Protein classification predicting sequence
TGEPLIQR

SEQ ID NO: 35863 - protein, 7 aa, Artificial sequence
  Protein classification predicting sequence
PGSGKGT

SEQ ID NO: 35864 - protein, 6 aa, Artificial sequence
  Protein classification predicting sequence
DGFPRT

SEQ ID NO: 35865 - protein, 8 aa, Artificial sequence
  Protein classification predicting sequence
PGAGKGTQ

SEQ ID NO: 35866 - protein, 7 aa, Artificial sequence
  Protein classification predicting sequence
GAPGSGK

SEQ ID NO: 35867 - protein, 8 aa, Artificial sequence
  Protein classification predicting sequence
KYGYTHLS

SEQ ID NO: 35868 - protein, 13 aa, Artificial sequence
  Protein classification predicting sequence
LGGPGAGKGTQCA

SEQ ID NO: 35869 - protein, 7 aa, Artificial sequence
  Protein classification predicting sequence
PGAGKGT

SEQ ID NO: 35870 - protein, 7 aa, Artificial sequence
  Protein classification predicting sequence
DDKPETV

SEQ ID NO: 35871 - protein, 8 aa, Artificial sequence
  Protein classification predicting sequence
QREDDKPE

SEQ ID NO: 35872 - protein, 7 aa, Artificial sequence
  Protein classification predicting sequence
LLDGFPR

SEQ ID NO: 35873 - protein, 6 aa, Artificial sequence
  Protein classification predicting sequence
EGGELF

SEQ ID NO: 35874 - protein, 8 aa, Artificial sequence
  Protein classification predicting sequence
YRDLKPEN

SEQ ID NO: 35875 - protein, 9 aa, Artificial sequence
  Protein classification predicting sequence
RDLKPENLL

SEQ ID NO: 35876 - protein, 6 aa, Artificial sequence
  Protein classification predicting sequence
FYAAEI

SEQ ID NO: 35877 - protein, 6 aa, Artificial sequence
  Protein classification predicting sequence
WSFGVL

SEQ ID NO: 35878 - protein, 7 aa, Artificial sequence
  Protein classification predicting sequence
AGDEESY

SEQ ID NO: 35879 - protein, 10 aa, Artificial sequence
  Protein classification predicting sequence
HNNDKTFLVW

SEQ ID NO: 35880 - protein, 6 aa, Artificial sequence
  Protein classification predicting sequence
KTFLVW

SEQ ID NO: 35881 - protein, 7 aa, Artificial sequence
  Protein classification predicting sequence
NEEDHLR

SEQ ID NO: 35882 - protein, 7 aa, Artificial sequence
  Protein classification predicting sequence
CPTNLGT

SEQ ID NO: 35883 - protein, 7 aa, Artificial sequence
  Protein classification predicting sequence
FADLFDP

SEQ ID NO: 35884 - protein, 8 aa, Artificial sequence
  Protein classification predicting sequence
LIDDHFLF

SEQ ID NO: 35885 - protein, 7 aa, Artificial sequence
  Protein classification predicting sequence
ISMQKGG

SEQ ID NO: 35886 - protein, 6 aa, Artificial sequence
  Protein classification predicting sequence
LFDPII

SEQ ID NO: 35887 - protein, 9 aa, Artificial sequence
  Protein classification predicting sequence
NDNKTFLVW

SEQ ID NO: 35888 - protein, 7 aa, Artificial sequence
  Protein classification predicting sequence
CPSNLGT

SEQ ID NO: 35889 - protein, 10 aa, Artificial sequence
  Protein classification predicting sequence
HNDNKTFLVW

SEQ ID NO: 35890 - protein, 7 aa, Artificial sequence
  Protein classification predicting sequence
AGDEETY

SEQ ID NO: 35891 - protein, 8 aa, Artificial sequence
  Protein classification predicting sequence
SSRVRTGR

SEQ ID NO: 35892 - protein, 6 aa, Artificial sequence
  Protein classification predicting sequence
RGIWHN

SEQ ID NO: 35893 - protein, 8 aa, Artificial sequence
  Protein classification predicting sequence
GGNMKEVF

SEQ ID NO: 35894 - protein, 11 aa, Artificial sequence
  Protein classification predicting sequence
DRLGSSEVEQV

SEQ ID NO: 35895 - protein, 6 aa, Artificial sequence
  Protein classification predicting sequence
GKYYPL

SEQ ID NO: 35896 - protein, 9 aa, Artificial sequence
  Protein classification predicting sequence
TDGVFSMDG

SEQ ID NO: 35897 - protein, 7 aa, Artificial sequence
  Protein classification predicting sequence
CDLADKY

SEQ ID NO: 35898 - protein, 9 aa, Artificial sequence
  Protein classification predicting sequence
LNHASIIDG

SEQ ID NO: 35899 - protein, 6 aa, Artificial sequence
  Protein classification predicting sequence
GAFSEV

SEQ ID NO: 35900 - protein, 9 aa, Artificial sequence
  Protein classification predicting sequence
GIVHRDLKP

SEQ ID NO: 35901 - protein, 6 aa, Artificial sequence
  Protein classification predicting sequence
DFGLSK

SEQ ID NO: 35902 - protein, 6 aa, Artificial sequence
  Protein classification predicting sequence
WSIGVI

SEQ ID NO: 35903 - protein, 6 aa, Artificial sequence
  Protein classification predicting sequence
YILLCG

SEQ ID NO: 35904 - protein, 10 aa, Artificial sequence
  Protein classification predicting sequence
IVHRDLKPEN

SEQ ID NO: 35905 - protein, 7 aa, Artificial sequence
  Protein classification predicting sequence
EALKHPW

SEQ ID NO: 35906 - protein, 6 aa, Artificial sequence
  Protein classification predicting sequence
CGTPEY

SEQ ID NO: 35907 - protein, 8 aa, Artificial sequence
  Protein classification predicting sequence
FGKTLGAG

SEQ ID NO: 35908 - protein, 8 aa, Artificial sequence
  Protein classification predicting sequence
WSIGVITY

SEQ ID NO: 35909 - protein, 9 aa, Artificial sequence
  Protein classification predicting sequence
VHRDLKPEN

SEQ ID NO: 35910 - protein, 11 aa, Artificial sequence
  Protein classification predicting sequence
VHRDLKPENLL

SEQ ID NO: 35911 - protein, 12 aa, Artificial sequence
  Protein classification predicting sequence
FLVWVNEEDHLR

SEQ ID NO: 35912 - protein, 7 aa, Artificial sequence
  Protein classification predicting sequence
DISNLDR

SEQ ID NO: 35913 - protein, 7 aa, Artificial sequence
  Protein classification predicting sequence
DLDASKI

SEQ ID NO: 35914 - protein, 6 aa, Artificial sequence
  Protein classification predicting sequence
LFDPVI

SEQ ID NO: 35915 - protein, 5 aa, Artificial sequence
  Protein classification predicting sequence
NEEDH

SEQ ID NO: 35916 - protein, 6 aa, Artificial sequence
  Protein classification predicting sequence
ASGKGT

SEQ ID NO: 35917 - protein, 7 aa, Artificial sequence
  Protein classification predicting sequence
GPPGSGK

SEQ ID NO: 35918 - protein, 6 aa, Artificial sequence
  Protein classification predicting sequence
IKGFEA

SEQ ID NO: 35919 - protein, 5 aa, Artificial sequence
  Protein classification predicting sequence
QGDEP

SEQ ID NO: 35920 - protein, 7 aa, Artificial sequence
  Protein classification predicting sequence
SSAERVV

SEQ ID NO: 35921 - protein, 6 aa, Artificial sequence
  Protein classification predicting sequence
GAFGKV

SEQ ID NO: 35922 - protein, 8 aa, Artificial sequence
  Protein classification predicting sequence
PDLSKHNN

SEQ ID NO: 35923 - protein, 9 aa, Artificial sequence
  Protein classification predicting sequence
IQTGVDNPG

SEQ ID NO: 35924 - protein, 6 aa, Artificial sequence
  Protein classification predicting sequence
ARDWPD

SEQ ID NO: 35925 - protein, 7 aa, Artificial sequence
  Protein classification predicting sequence
NERLGYI

SEQ ID NO: 35926 - protein, 7 aa, Artificial sequence
  Protein classification predicting sequence
DNEETIK

SEQ ID NO: 35927 - protein, 7 aa, Artificial sequence
  Protein classification predicting sequence
SGTGKSS

SEQ ID NO: 35928 - protein, 6 aa, Artificial sequence
  Protein classification predicting sequence
ERNPLY

SEQ ID NO: 35929 - protein, 7 aa, Artificial sequence
  Protein classification predicting sequence
IIYSRIN

SEQ ID NO: 35930 - protein, 6 aa, Artificial sequence
  Protein classification predicting sequence
KTSVSR

SEQ ID NO: 35931 - protein, 6 aa, Artificial sequence
  Protein classification predicting sequence
LEDNYV

SEQ ID NO: 35932 - protein, 6 aa, Artificial sequence
  Protein classification predicting sequence
LRGGPN

SEQ ID NO: 35933 - protein, 6 aa, Artificial sequence
  Protein classification predicting sequence
TTKGAY

SEQ ID NO: 35934 - protein, 7 aa, Artificial sequence
  Protein classification predicting sequence
RVLSGPG

SEQ ID NO: 35935 - protein, 6 aa, Artificial sequence
  Protein classification predicting sequence
VPAFTG

SEQ ID NO: 35936 - protein, 9 aa, Artificial sequence
  Protein classification predicting sequence
LTGAGWGGC

SEQ ID NO: 35937 - protein, 6 aa, Artificial sequence
  Protein classification predicting sequence
ATISNN

SEQ ID NO: 35938 - protein, 8 aa, Artificial sequence
  Protein classification predicting sequence
VLELADAG

SEQ ID NO: 35939 - protein, 5 aa, Artificial sequence
  Protein classification predicting sequence
KHYKI

SEQ ID NO: 35940 - protein, 6 aa, Artificial sequence
  Protein classification predicting sequence
GCMFAG

SEQ ID NO: 35941 - protein, 8 aa, Artificial sequence
  Protein classification predicting sequence
SGFIDLGR

SEQ ID NO: 35942 - protein, 8 aa, Artificial sequence
  Protein classification predicting sequence
RAERREVE

SEQ ID NO: 35943 - protein, 6 aa, Artificial sequence
  Protein classification predicting sequence
WINEED

SEQ ID NO: 35944 - protein, 7 aa, Artificial sequence
  Protein classification predicting sequence
SGSRHGD

SEQ ID NO: 35945 - protein, 6 aa, Artificial sequence
  Protein classification predicting sequence
VRLVQK

SEQ ID NO: 35946 - protein, 8 aa, Artificial sequence
  Protein classification predicting sequence
HRDLKPEN

SEQ ID NO: 35947 - protein, 10 aa, Artificial sequence
  Protein classification predicting sequence
HRDLKPENLL

SEQ ID NO: 35948 - protein, 8 aa, Artificial sequence
  Protein classification predicting sequence
GVIAYILL

SEQ ID NO: 35949 - protein, 6 aa, Artificial sequence
  Protein classification predicting sequence
MTEKDA

SEQ ID NO: 35950 - protein, 7 aa, Artificial sequence
  Protein classification predicting sequence
AINKLRD

SEQ ID NO: 35951 - protein, 8 aa, Artificial sequence
  Protein classification predicting sequence
RPTAAELL

SEQ ID NO: 35952 - protein, 7 aa, Artificial sequence
  Protein classification predicting sequence
DPVAVGA

SEQ ID NO: 35953 - protein, 7 aa, Artificial sequence
  Protein classification predicting sequence
IIHRDLK

SEQ ID NO: 35954 - protein, 5 aa, Artificial sequence
  Protein classification predicting sequence
LQHPW

SEQ ID NO: 35955 - protein, 8 aa, Artificial sequence
  Protein classification predicting sequence
LRRKSRSK

SEQ ID NO: 35956 - protein, 7 aa, Artificial sequence
  Protein classification predicting sequence
TDFGLSK

SEQ ID NO: 35957 - protein, 10 aa, Artificial sequence
  Protein classification predicting sequence
HRDLKPENIL

SEQ ID NO: 35958 - protein, 11 aa, Artificial sequence
  Protein classification predicting sequence
HRDLKPENILL

SEQ ID NO: 35959 - protein, 15 aa, Artificial sequence
  Protein classification predicting sequence
HRDLKPENILLDDNM

SEQ ID NO: 35960 - protein, 6 aa, Artificial sequence
  Protein classification predicting sequence
SDELNH

SEQ ID NO: 35961 - protein, 6 aa, Artificial sequence
  Protein classification predicting sequence
HESGIH

SEQ ID NO: 35962 - protein, 7 aa, Artificial sequence
  Protein classification predicting sequence
GERAGNA

SEQ ID NO: 35963 - protein, 11 aa, Artificial sequence
  Protein classification predicting sequence
HESGIHAHGVL

SEQ ID NO: 35964 - protein, 6 aa, Artificial sequence
  Protein classification predicting sequence
NGLGER

SEQ ID NO: 35965 - protein, 7 aa, Artificial sequence
  Protein classification predicting sequence
GNAALEE

SEQ ID NO: 35966 - protein, 9 aa, Artificial sequence
  Protein classification predicting sequence
DTTLRDGEQ

SEQ ID NO: 35967 - protein, 8 aa, Artificial sequence
  Protein classification predicting sequence
RDGEQSPG

SEQ ID NO: 35968 - protein, 6 aa, Artificial sequence
  Protein classification predicting sequence
EEVVMA

SEQ ID NO: 35969 - protein, 11 aa, Artificial sequence
  Protein classification predicting sequence
GERAGNAALEE

SEQ ID NO: 35970 - protein, 8 aa, Artificial sequence
  Protein classification predicting sequence
KVSDFGLS

SEQ ID NO: 35971 - protein, 7 aa, Artificial sequence
  Protein classification predicting sequence
GRPIYHA

SEQ ID NO: 35972 - protein, 6 aa, Artificial sequence
  Protein classification predicting sequence
IHRDLK

SEQ ID NO: 35973 - protein, 7 aa, Artificial sequence
  Protein classification predicting sequence
VKISDFG

SEQ ID NO: 35974 - protein, 6 aa, Artificial sequence
  Protein classification predicting sequence
IFIAGS

SEQ ID NO: 35975 - protein, 6 aa, Artificial sequence
  Protein classification predicting sequence
DIWSLG

SEQ ID NO: 35976 - protein, 6 aa, Artificial sequence
  Protein classification predicting sequence
WSLGVI

SEQ ID NO: 35977 - protein, 7 aa, Artificial sequence
  Protein classification predicting sequence
IVHRDLK

SEQ ID NO: 35978 - protein, 8 aa, Artificial sequence
  Protein classification predicting sequence
WSLGVILY

SEQ ID NO: 35979 - protein, 6 aa, Artificial sequence
  Protein classification predicting sequence
VDTLLD

SEQ ID NO: 35980 - protein, 7 aa, Artificial sequence
  Protein classification predicting sequence
GYGKEVD

SEQ ID NO: 35981 - protein, 7 aa, Artificial sequence
  Protein classification predicting sequence
GTSKELS

SEQ ID NO: 35982 - protein, 5 aa, Artificial sequence
  Protein classification predicting sequence
LWHAL

SEQ ID NO: 35983 - protein, 6 aa, Artificial sequence
  Protein classification predicting sequence
AKRQMT

SEQ ID NO: 35984 - protein, 8 aa, Artificial sequence
  Protein classification predicting sequence
LATALALP

SEQ ID NO: 35985 - protein, 7 aa, Artificial sequence
  Protein classification predicting sequence
YVADGKL

SEQ ID NO: 35986 - protein, 6 aa, Artificial sequence
  Protein classification predicting sequence
QVESYL

SEQ ID NO: 35987 - protein, 7 aa, Artificial sequence
  Protein classification predicting sequence
DPLKRPT

SEQ ID NO: 35988 - protein, 5 aa, Artificial sequence
  Protein classification predicting sequence
VHWLD

SEQ ID NO: 35989 - protein, 6 aa, Artificial sequence
  Protein classification predicting sequence
QAQFTL

SEQ ID NO: 35990 - protein, 7 aa, Artificial sequence
  Protein classification predicting sequence
DFGLARI

SEQ ID NO: 35991 - protein, 6 aa, Artificial sequence
  Protein classification predicting sequence
GLKYIH

SEQ ID NO: 35992 - protein, 6 aa, Artificial sequence
  Protein classification predicting sequence
YIQSLP

SEQ ID NO: 35993 - protein, 8 aa, Artificial sequence
  Protein classification predicting sequence
IIHRDLKP

SEQ ID NO: 35994 - protein, 6 aa, Artificial sequence
  Protein classification predicting sequence
GVVLWE

SEQ ID NO: 35995 - protein, 7 aa, Artificial sequence
  Protein classification predicting sequence
RDSGFSS

SEQ ID NO: 35996 - protein, 6 aa, Artificial sequence
  Protein classification predicting sequence
GKGSFG

SEQ ID NO: 35997 - protein, 6 aa, Artificial sequence
  Protein classification predicting sequence
DLKPAN

SEQ ID NO: 35998 - protein, 6 aa, Artificial sequence
  Protein classification predicting sequence
DVLLSG

SEQ ID NO: 35999 - protein, 6 aa, Artificial sequence
  Protein classification predicting sequence
PLVTTK

SEQ ID NO: 36000 - protein, 6 aa, Artificial sequence
  Protein classification predicting sequence
FNIASY

SEQ ID NO: 36001 - protein, 6 aa, Artificial sequence
  Protein classification predicting sequence
LGRTWL

SEQ ID NO: 36002 - protein, 5 aa, Artificial sequence
  Protein classification predicting sequence
YPREP

SEQ ID NO: 36003 - protein, 7 aa, Artificial sequence
  Protein classification predicting sequence
ADGVSVI

SEQ ID NO: 36004 - protein, 7 aa, Artificial sequence
  Protein classification predicting sequence
QTGNYEL

SEQ ID NO: 36005 - protein, 6 aa, Artificial sequence
  Protein classification predicting sequence
YLSLEF

SEQ ID NO: 36006 - protein, 6 aa, Artificial sequence
  Protein classification predicting sequence
GEGAFG

SEQ ID NO: 36007 - protein, 6 aa, Artificial sequence
  Protein classification predicting sequence
LYLVME

SEQ ID NO: 36008 - protein, 6 aa, Artificial sequence
  Protein classification predicting sequence
WMAPEV

SEQ ID NO: 36009 - protein, 6 aa, Artificial sequence
  Protein classification predicting sequence
PTILPL

SEQ ID NO: 36010 - protein, 7 aa, Artificial sequence
  Protein classification predicting sequence
VQEHQIT

SEQ ID NO: 36011 - protein, 9 aa, Artificial sequence
  Protein classification predicting sequence
TVNGLGERA

SEQ ID NO: 36012 - protein, 6 aa, Artificial sequence
  Protein classification predicting sequence
FTHESG

SEQ ID NO: 36013 - protein, 8 aa, Artificial sequence
  Protein classification predicting sequence
EPGAFDWS

SEQ ID NO: 36014 - protein, 7 aa, Artificial sequence
  Protein classification predicting sequence
VKIGDFG

SEQ ID NO: 36015 - protein, 6 aa, Artificial sequence
  Protein classification predicting sequence
EYASKG

SEQ ID NO: 36016 - protein, 8 aa, Artificial sequence
  Protein classification predicting sequence
ENILLDDN

SEQ ID NO: 36017 - protein, 7 aa, Artificial sequence
  Protein classification predicting sequence
TGFGRTG

SEQ ID NO: 36018 - protein, 7 aa, Artificial sequence
  Protein classification predicting sequence
PLPIVIS

SEQ ID NO: 36019 - protein, 11 aa, Artificial sequence
  Protein classification predicting sequence
LSAYSAVNQGH

SEQ ID NO: 36020 - protein, 7 aa, Artificial sequence
  Protein classification predicting sequence
SRAFHSD

SEQ ID NO: 36021 - protein, 8 aa, Artificial sequence
  Protein classification predicting sequence
EPIQGEAG

SEQ ID NO: 36022 - protein, 13 aa, Artificial sequence
  Protein classification predicting sequence
EPIQGEAGINIPP

SEQ ID NO: 36023 - protein, 7 aa, Artificial sequence
  Protein classification predicting sequence
DEIQTGL

SEQ ID NO: 36024 - protein, 15 aa, Artificial sequence
  Protein classification predicting sequence
YILGKALGGGVFPIS

SEQ ID NO: 36025 - protein, 8 aa, Artificial sequence
  Protein classification predicting sequence
RRWAYDVK

SEQ ID NO: 36026 - protein, 12 aa, Artificial sequence
  Protein classification predicting sequence
KAARRWAYDVKG

SEQ ID NO: 36027 - protein, 11 aa, Artificial sequence
  Protein classification predicting sequence
LPMNTGAEAVE

SEQ ID NO: 36028 - protein, 6 aa, Artificial sequence
  Protein classification predicting sequence
ARPYCE

SEQ ID NO: 36029 - protein, 24 aa, Artificial sequence
  Protein classification predicting sequence
LKEEGLLCKETHDTVIRFAPPLII

SEQ ID NO: 36030 - protein, 7 aa, Artificial sequence
  Protein classification predicting sequence
YPVSAVL

SEQ ID NO: 36031 - protein, 8 aa, Artificial sequence
  Protein classification predicting sequence
YSAVNQGH

SEQ ID NO: 36032 - protein, 10 aa, Artificial sequence
  Protein classification predicting sequence
GKALGGGVFP

SEQ ID NO: 36033 - protein, 7 aa, Artificial sequence
  Protein classification predicting sequence
IRFAPPL

SEQ ID NO: 36034 - protein, 6 aa, Artificial sequence
  Protein classification predicting sequence
YGAHNY

SEQ ID NO: 36035 - protein, 8 aa, Artificial sequence
  Protein classification predicting sequence
LTLTSRAF

SEQ ID NO: 36036 - protein, 10 aa, Artificial sequence
  Protein classification predicting sequence
GGLYPVSAVL

SEQ ID NO: 36037 - protein, 11 aa, Artificial sequence
  Protein classification predicting sequence
AAIILEPIQGE

SEQ ID NO: 36038 - protein, 6 aa, Artificial sequence
  Protein classification predicting sequence
PTVRWG

SEQ ID NO: 36039 - protein, 7 aa, Artificial sequence
  Protein classification predicting sequence
DHRVVDG

SEQ ID NO: 36040 - protein, 7 aa, Artificial sequence
  Protein classification predicting sequence
VPVIRNV

SEQ ID NO: 36041 - protein, 6 aa, Artificial sequence
  Protein classification predicting sequence
LSYDHR

SEQ ID NO: 36042 - protein, 6 aa, Artificial sequence
  Protein classification predicting sequence
IINPPQ

SEQ ID NO: 36043 - protein, 7 aa, Artificial sequence
  Protein classification predicting sequence
SVAVATP

SEQ ID NO: 36044 - protein, 8 aa, Artificial sequence
  Protein classification predicting sequence
DHRVIDGA

SEQ ID NO: 36045 - protein, 6 aa, Artificial sequence
  Protein classification predicting sequence
GRFGNQ

SEQ ID NO: 36046 - protein, 9 aa, Artificial sequence
  Protein classification predicting sequence
LTKNEDGVS

SEQ ID NO: 36047 - protein, 13 aa, Artificial sequence
  Protein classification predicting sequence
LDGGIPFNKAYGM

SEQ ID NO: 36048 - protein, 15 aa, Artificial sequence
  Protein classification predicting sequence
FEYHGTDPRFNKVFN

SEQ ID NO: 36049 - protein, 9 aa, Artificial sequence
  Protein classification predicting sequence
ASVLPMVLK

SEQ ID NO: 36050 - protein, 9 aa, Artificial sequence
  Protein classification predicting sequence
KGGTRALLE

SEQ ID NO: 36051 - protein, 9 aa, Artificial sequence
  Protein classification predicting sequence
FYFNKTKGF

SEQ ID NO: 36052 - protein, 9 aa, Artificial sequence
  Protein classification predicting sequence
EKTPSYFVT

SEQ ID NO: 36053 - protein, 15 aa, Artificial sequence
  Protein classification predicting sequence
PVTRAISDYTQTLSK

SEQ ID NO: 36054 - protein, 7 aa, Artificial sequence
  Protein classification predicting sequence
PDIPTFE

SEQ ID NO: 36055 - protein, 9 aa, Artificial sequence
  Protein classification predicting sequence
TKGFPCLKK

SEQ ID NO: 36056 - protein, 7 aa, Artificial sequence
  Protein classification predicting sequence
LREFYRP

SEQ ID NO: 36057 - protein, 6 aa, Artificial sequence
  Protein classification predicting sequence
LMPRTL

SEQ ID NO: 36058 - protein, 8 aa, Artificial sequence
  Protein classification predicting sequence
RVHPDVRA

SEQ ID NO: 36059 - protein, 9 aa, Artificial sequence
  Protein classification predicting sequence
EPHFFDRNY

SEQ ID NO: 36060 - protein, 25 aa, Artificial sequence
  Protein classification predicting sequence
KLIVVVRNPVTRAISDYTQTLSKKP

SEQ ID NO: 36061 - protein, 9 aa, Artificial sequence
  Protein classification predicting sequence
VQDFLGLKR

SEQ ID NO: 36062 - protein, 15 aa, Artificial sequence
  Protein classification predicting sequence
PQALIVGVKKGGTRA

SEQ ID NO: 36063 - protein, 7 aa, Artificial sequence
  Protein classification predicting sequence
EPHFFDR

SEQ ID NO: 36064 - protein, 16 aa, Artificial sequence
  Protein classification predicting sequence
EKTPSYFVTQEAPRRI

SEQ ID NO: 36065 - protein, 8 aa, Artificial sequence
  Protein classification predicting sequence
DLMTIYEE

SEQ ID NO: 36066 - protein, 6 aa, Artificial sequence
  Protein classification predicting sequence
TRVSFE

SEQ ID NO: 36067 - protein, 9 aa, Artificial sequence
  Protein classification predicting sequence
STRTRVSFE

SEQ ID NO: 36068 - protein, 8 aa, Artificial sequence
  Protein classification predicting sequence
STRTRVSF

SEQ ID NO: 36069 - protein, 8 aa, Artificial sequence
  Protein classification predicting sequence
STRTRFSF

SEQ ID NO: 36070 - protein, 6 aa, Artificial sequence
  Protein classification predicting sequence
RTRTTF

SEQ ID NO: 36071 - protein, 7 aa, Artificial sequence
  Protein classification predicting sequence
DLMTIYE

SEQ ID NO: 36072 - protein, 7 aa, Artificial sequence
  Protein classification predicting sequence
RTRVSFE

SEQ ID NO: 36073 - protein, 6 aa, Artificial sequence
  Protein classification predicting sequence
RTRVSF

SEQ ID NO: 36074 - protein, 6 aa, Artificial sequence
  Protein classification predicting sequence
TFPGPQ

SEQ ID NO: 36075 - protein, 7 aa, Artificial sequence
  Protein classification predicting sequence
RKSARNF

SEQ ID NO: 36076 - protein, 8 aa, Artificial sequence
  Protein classification predicting sequence
KLADFGLA

SEQ ID NO: 36077 - protein, 8 aa, Artificial sequence
  Protein classification predicting sequence
LGDYFGIL

SEQ ID NO: 36078 - protein, 6 aa, Artificial sequence
  Protein classification predicting sequence
DDSFLA

SEQ ID NO: 36079 - protein, 7 aa, Artificial sequence
  Protein classification predicting sequence
LVVIGGD

SEQ ID NO: 36080 - protein, 6 aa, Artificial sequence
  Protein classification predicting sequence
EAIDRL

SEQ ID NO: 36081 - protein, 8 aa, Artificial sequence
  Protein classification predicting sequence
GGDCPGLN

SEQ ID NO: 36082 - protein, 7 aa, Artificial sequence
  Protein classification predicting sequence
GVPKTID

SEQ ID NO: 36083 - protein, 6 aa, Artificial sequence
  Protein classification predicting sequence
MGRNCG

SEQ ID NO: 36084 - protein, 10 aa, Artificial sequence
  Protein classification predicting sequence
QTPGGTGALR

SEQ ID NO: 36085 - protein, 7 aa, Artificial sequence
  Protein classification predicting sequence
SKNFGLY

SEQ ID NO: 36086 - protein, 6 aa, Artificial sequence
  Protein classification predicting sequence
AVKIID

SEQ ID NO: 36087 - protein, 7 aa, Artificial sequence
  Protein classification predicting sequence
WACGVIL

SEQ ID NO: 36088 - protein, 6 aa, Artificial sequence
  Protein classification predicting sequence
IPELMR

SEQ ID NO: 36089 - protein, 5 aa, Artificial sequence
  Protein classification predicting sequence
GQYES

SEQ ID NO: 36090 - protein, 6 aa, Artificial sequence
  Protein classification predicting sequence
VITYIL

SEQ ID NO: 36091 - protein, 7 aa, Artificial sequence
  Protein classification predicting sequence
RDLKPSN

SEQ ID NO: 36092 - protein, 7 aa, Artificial sequence
  Protein classification predicting sequence
LTYFEEP

SEQ ID NO: 36093 - protein, 6 aa, Artificial sequence
  Protein classification predicting sequence
ENYTTD

SEQ ID NO: 36094 - protein, 6 aa, Artificial sequence
  Protein classification predicting sequence
QLKPGG

SEQ ID NO: 36095 - protein, 6 aa, Artificial sequence
  Protein classification predicting sequence
VPPVLL

SEQ ID NO: 36096 - protein, 10 aa, Artificial sequence
  Protein classification predicting sequence
RDLKPENILL

SEQ ID NO: 36097 - protein, 6 aa, Artificial sequence
  Protein classification predicting sequence
HRDIKP

SEQ ID NO: 36098 - protein, 5 aa, Artificial sequence
  Protein classification predicting sequence
HLVFC

SEQ ID NO: 36099 - protein, 7 aa, Artificial sequence
  Protein classification predicting sequence
EPTRRPT

SEQ ID NO: 36100 - protein, 9 aa, Artificial sequence
  Protein classification predicting sequence
VKIGDFGLA

SEQ ID NO: 36101 - protein, 8 aa, Artificial sequence
  Protein classification predicting sequence
KIGDFGLA

SEQ ID NO: 36102 - protein, 6 aa, Artificial sequence
  Protein classification predicting sequence
NGEMNR

SEQ ID NO: 36103 - protein, 6 aa, Artificial sequence
  Protein classification predicting sequence
EDFFVM

SEQ ID NO: 36104 - protein, 6 aa, Artificial sequence
  Protein classification predicting sequence
TRVAIK

SEQ ID NO: 36105 - protein, 7 aa, Artificial sequence
  Protein classification predicting sequence
YQLLSAC

SEQ ID NO: 36106 - protein, 7 aa, Artificial sequence
  Protein classification predicting sequence
DIDGLYT

SEQ ID NO: 36107 - protein, 6 aa, Artificial sequence
  Protein classification predicting sequence
DIDGLY

SEQ ID NO: 36108 - protein, 6 aa, Artificial sequence
  Protein classification predicting sequence
LVLLSD

SEQ ID NO: 36109 - protein, 7 aa, Artificial sequence
  Protein classification predicting sequence
ADLLIIL

SEQ ID NO: 36110 - protein, 6 aa, Artificial sequence
  Protein classification predicting sequence
KFDKDA

SEQ ID NO: 36111 - protein, 7 aa, Artificial sequence
  Protein classification predicting sequence
KLILLTD

SEQ ID NO: 36112 - protein, 6 aa, Artificial sequence
  Protein classification predicting sequence
HGGANE

SEQ ID NO: 36113 - protein, 10 aa, Artificial sequence
  Protein classification predicting sequence
DHEGGNVSAH

SEQ ID NO: 36114 - protein, 8 aa, Artificial sequence
  Protein classification predicting sequence
FGVSRALG

SEQ ID NO: 36115 - protein, 13 aa, Artificial sequence
  Protein classification predicting sequence
YLGFFAGKRFVPI

SEQ ID NO: 36116 - protein, 7 aa, Artificial sequence
  Protein classification predicting sequence
LKTPGRE

SEQ ID NO: 36117 - protein, 7 aa, Artificial sequence
  Protein classification predicting sequence
VLPIAGI

SEQ ID NO: 36118 - protein, 5 aa, Artificial sequence
  Protein classification predicting sequence
VQFFD

SEQ ID NO: 36119 - protein, 7 aa, Artificial sequence
  Protein classification predicting sequence
ITALFIP

SEQ ID NO: 36120 - protein, 10 aa, Artificial sequence
  Protein classification predicting sequence
ITALFIPTGW

SEQ ID NO: 36121 - protein, 7 aa, Artificial sequence
  Protein classification predicting sequence
NPGPGLG

SEQ ID NO: 36122 - protein, 10 aa, Artificial sequence
  Protein classification predicting sequence
PNIGAFIAWG

SEQ ID NO: 36123 - protein, 8 aa, Artificial sequence
  Protein classification predicting sequence
CDAGMGSS

SEQ ID NO: 36124 - protein, 7 aa, Artificial sequence
  Protein classification predicting sequence
GPMITYL

SEQ ID NO: 36125 - protein, 8 aa, Artificial sequence
  Protein classification predicting sequence
HPSLLPKY

SEQ ID NO: 36126 - protein, 10 aa, Artificial sequence
  Protein classification predicting sequence
PSTRTRLSFE

SEQ ID NO: 36127 - protein, 8 aa, Artificial sequence
  Protein classification predicting sequence
ADGPQSVI

SEQ ID NO: 36128 - protein, 6 aa, Artificial sequence
  Protein classification predicting sequence
MTIYEE

SEQ ID NO: 36129 - protein, 6 aa, Artificial sequence
  Protein classification predicting sequence
DLMTIY

SEQ ID NO: 36130 - protein, 9 aa, Artificial sequence
  Protein classification predicting sequence
STRTRLSFE

SEQ ID NO: 36131 - protein, 7 aa, Artificial sequence
  Protein classification predicting sequence
AGAEVLG

SEQ ID NO: 36132 - protein, 5 aa, Artificial sequence
  Protein classification predicting sequence
CYSFW

SEQ ID NO: 36133 - protein, 6 aa, Artificial sequence
  Protein classification predicting sequence
LVTGGE

SEQ ID NO: 36134 - protein, 7 aa, Artificial sequence
  Protein classification predicting sequence
RAIAKLL

SEQ ID NO: 36135 - protein, 7 aa, Artificial sequence
  Protein classification predicting sequence
AGGIGSR

SEQ ID NO: 36136 - protein, 6 aa, Artificial sequence
  Protein classification predicting sequence
IVTEYM

SEQ ID NO: 36137 - protein, 7 aa, Artificial sequence
  Protein classification predicting sequence
ELMIHCW

SEQ ID NO: 36138 - protein, 8 aa, Artificial sequence
  Protein classification predicting sequence
DLKPANIL

SEQ ID NO: 36139 - protein, 6 aa, Artificial sequence
  Protein classification predicting sequence
IVAAGL

SEQ ID NO: 36140 - protein, 6 aa, Artificial sequence
  Protein classification predicting sequence
DYDAII

SEQ ID NO: 36141 - protein, 6 aa, Artificial sequence
  Protein classification predicting sequence
DLRPAG

SEQ ID NO: 36142 - protein, 7 aa, Artificial sequence
  Protein classification predicting sequence
APELLLG

SEQ ID NO: 36143 - protein, 8 aa, Artificial sequence
  Protein classification predicting sequence
LQKDPEKR

SEQ ID NO: 36144 - protein, 6 aa, Artificial sequence
  Protein classification predicting sequence
KDPEKR

SEQ ID NO: 36145 - protein, 7 aa, Artificial sequence
  Protein classification predicting sequence
PRALFYT

SEQ ID NO: 36146 - protein, 6 aa, Artificial sequence
  Protein classification predicting sequence
MAPELL

SEQ ID NO: 36147 - protein, 9 aa, Artificial sequence
  Protein classification predicting sequence
GQTQVLCTV

SEQ ID NO: 36148 - protein, 6 aa, Artificial sequence
  Protein classification predicting sequence
GAFGRV

SEQ ID NO: 36149 - protein, 6 aa, Artificial sequence
  Protein classification predicting sequence
KIGDFG

SEQ ID NO: 36150 - protein, 6 aa, Artificial sequence
  Protein classification predicting sequence
DPNALL

SEQ ID NO: 36151 - protein, 7 aa, Artificial sequence
  Protein classification predicting sequence
CKLLGIN

SEQ ID NO: 36152 - protein, 7 aa, Artificial sequence
  Protein classification predicting sequence
GLNLQYK

SEQ ID NO: 36153 - protein, 7 aa, Artificial sequence
  Protein classification predicting sequence
TDGSVEV

SEQ ID NO: 36154 - protein, 8 aa, Artificial sequence
  Protein classification predicting sequence
QVQVVDGD

SEQ ID NO: 36155 - protein, 5 aa, Artificial sequence
  Protein classification predicting sequence
INPGH

SEQ ID NO: 36156 - protein, 6 aa, Artificial sequence
  Protein classification predicting sequence
TAGVES

SEQ ID NO: 36157 - protein, 7 aa, Artificial sequence
  Protein classification predicting sequence
RRVSYAV

SEQ ID NO: 36158 - protein, 6 aa, Artificial sequence
  Protein classification predicting sequence
RILTSE

SEQ ID NO: 36159 - protein, 5 aa, Artificial sequence
  Protein classification predicting sequence
ERPTF

SEQ ID NO: 36160 - protein, 6 aa, Artificial sequence
  Protein classification predicting sequence
KICDFG

SEQ ID NO: 36161 - protein, 8 aa, Artificial sequence
  Protein classification predicting sequence
GGELFERI

SEQ ID NO: 36162 - protein, 7 aa, Artificial sequence
  Protein classification predicting sequence
GAGDAFV

SEQ ID NO: 36163 - protein, 5 aa, Artificial sequence
  Protein classification predicting sequence
SAIQW

SEQ ID NO: 36164 - protein, 10 aa, Artificial sequence
  Protein classification predicting sequence
LHENGIVHRD

SEQ ID NO: 36165 - protein, 5 aa, Artificial sequence
  Protein classification predicting sequence
EPPYL

SEQ ID NO: 36166 - protein, 8 aa, Artificial sequence
  Protein classification predicting sequence
IEATCHAP

SEQ ID NO: 36167 - protein, 6 aa, Artificial sequence
  Protein classification predicting sequence
RQQLRK

SEQ ID NO: 36168 - protein, 6 aa, Artificial sequence
  Protein classification predicting sequence
DVWSLG

SEQ ID NO: 36169 - protein, 7 aa, Artificial sequence
  Protein classification predicting sequence
WSLGVVL

SEQ ID NO: 36170 - protein, 6 aa, Artificial sequence
  Protein classification predicting sequence
VHRDLK

SEQ ID NO: 36171 - protein, 7 aa, Artificial sequence
  Protein classification predicting sequence
ITMVEID

SEQ ID NO: 36172 - protein, 11 aa, Artificial sequence
  Protein classification predicting sequence
GGGDGGVLREV

SEQ ID NO: 36173 - protein, 11 aa, Artificial sequence
  Protein classification predicting sequence
FDVIITDSSDP

SEQ ID NO: 36174 - protein, 6 aa, Artificial sequence
  Protein classification predicting sequence
GLFTKE

SEQ ID NO: 36175 - protein, 6 aa, Artificial sequence
  Protein classification predicting sequence
AYQEMI

SEQ ID NO: 36176 - protein, 9 aa, Artificial sequence
  Protein classification predicting sequence
VLIIGGGDG

SEQ ID NO: 36177 - protein, 7 aa, Artificial sequence
  Protein classification predicting sequence
GRGGFGE

SEQ ID NO: 36178 - protein, 7 aa, Artificial sequence
  Protein classification predicting sequence
IGGGDGG

SEQ ID NO: 36179 - protein, 12 aa, Artificial sequence
  Protein classification predicting sequence
IGGGDGGVLREV

SEQ ID NO: 36180 - protein, 11 aa, Artificial sequence
  Protein classification predicting sequence
PWSKTGGLGDV

SEQ ID NO: 36181 - protein, 9 aa, Artificial sequence
  Protein classification predicting sequence
FLEKVWGKT

SEQ ID NO: 36182 - protein, 10 aa, Artificial sequence
  Protein classification predicting sequence
AKVAFCIHNI

SEQ ID NO: 36183 - protein, 7 aa, Artificial sequence
  Protein classification predicting sequence
TVSPYYA

SEQ ID NO: 36184 - protein, 7 aa, Artificial sequence
  Protein classification predicting sequence
IGFIGRL

SEQ ID NO: 36185 - protein, 10 aa, Artificial sequence
  Protein classification predicting sequence
FIGRLEEQKG

SEQ ID NO: 36186 - protein, 9 aa, Artificial sequence
  Protein classification predicting sequence
LGTGKKKFE

SEQ ID NO: 36187 - protein, 6 aa, Artificial sequence
  Protein classification predicting sequence
TGFHMG

SEQ ID NO: 36188 - protein, 10 aa, Artificial sequence
  Protein classification predicting sequence
CASTGGLVDT

SEQ ID NO: 36189 - protein, 8 aa, Artificial sequence
  Protein classification predicting sequence
GEEIAPLA

SEQ ID NO: 36190 - protein, 12 aa, Artificial sequence
  Protein classification predicting sequence
PRYDQYKDAWDT

SEQ ID NO: 36191 - protein, 11 aa, Artificial sequence
  Protein classification predicting sequence
LSWKGPAKNWE

SEQ ID NO: 36192 - protein, 14 aa, Artificial sequence
  Protein classification predicting sequence
RFSLLCQAALEAPR

SEQ ID NO: 36193 - protein, 7 aa, Artificial sequence
  Protein classification predicting sequence
AFCIHNI

SEQ ID NO: 36194 - protein, 10 aa, Artificial sequence
  Protein classification predicting sequence
DNQLRFSLLC

SEQ ID NO: 36195 - protein, 7 aa, Artificial sequence
  Protein classification predicting sequence
FSGPYGE

SEQ ID NO: 36196 - protein, 10 aa, Artificial sequence
  Protein classification predicting sequence
EIAPLAKENV

SEQ ID NO: 36197 - protein, 6 aa, Artificial sequence
  Protein classification predicting sequence
AIPELM

SEQ ID NO: 36198 - protein, 11 aa, Artificial sequence
  Protein classification predicting sequence
SRFEPCGLIQL

SEQ ID NO: 36199 - protein, 10 aa, Artificial sequence
  Protein classification predicting sequence
YFSGPYGEDV

SEQ ID NO: 36200 - protein, 15 aa, Artificial sequence
  Protein classification predicting sequence
SPRYDQYKDAWDTSV

SEQ ID NO: 36201 - protein, 8 aa, Artificial sequence
  Protein classification predicting sequence
ANDWHTAL

SEQ ID NO: 36202 - protein, 15 aa, Artificial sequence
  Protein classification predicting sequence
VRFFHCYKRGVDRVF

SEQ ID NO: 36203 - protein, 6 aa, Artificial sequence
  Protein classification predicting sequence
GHRVMV

SEQ ID NO: 36204 - protein, 11 aa, Artificial sequence
  Protein classification predicting sequence
GHRVMVISPRY

SEQ ID NO: 36205 - protein, 6 aa, Artificial sequence
  Protein classification predicting sequence
VFVDHP

SEQ ID NO: 36206 - protein, 7 aa, Artificial sequence
  Protein classification predicting sequence
GHRVMVV

SEQ ID NO: 36207 - protein, 11 aa, Artificial sequence
  Protein classification predicting sequence
GHRVMVVSPRY

SEQ ID NO: 36208 - protein, 9 aa, Artificial sequence
  Protein classification predicting sequence
IHNIAYQGR

SEQ ID NO: 36209 - protein, 11 aa, Artificial sequence
  Protein classification predicting sequence
RNAKDVVVSYY

SEQ ID NO: 36210 - protein, 9 aa, Artificial sequence
  Protein classification predicting sequence
LFYEDMKEN

SEQ ID NO: 36211 - protein, 7 aa, Artificial sequence
  Protein classification predicting sequence
FYEDMKE

SEQ ID NO: 36212 - protein, 6 aa, Artificial sequence
  Protein classification predicting sequence
TYPKSG

SEQ ID NO: 36213 - protein, 6 aa, Artificial sequence
  Protein classification predicting sequence
YPKSGT

SEQ ID NO: 36214 - protein, 6 aa, Artificial sequence
  Protein classification predicting sequence
AMADTF

SEQ ID NO: 36215 - protein, 6 aa, Artificial sequence
  Protein classification predicting sequence
KRDSFI

SEQ ID NO: 36216 - protein, 8 aa, Artificial sequence
  Protein classification predicting sequence
NEWDPLEE

SEQ ID NO: 36217 - protein, 7 aa, Artificial sequence
  Protein classification predicting sequence
PGRPLAI

SEQ ID NO: 36218 - protein, 7 aa, Artificial sequence
  Protein classification predicting sequence
VKLADFG

SEQ ID NO: 36219 - protein, 6 aa, Artificial sequence
  Protein classification predicting sequence
FPRPTL

SEQ ID NO: 36220 - protein, 7 aa, Artificial sequence
  Protein classification predicting sequence
RTEGIST

SEQ ID NO: 36221 - protein, 7 aa, Artificial sequence
  Protein classification predicting sequence
TGGFRRG

SEQ ID NO: 36222 - protein, 6 aa, Artificial sequence
  Protein classification predicting sequence
ESRVDS

SEQ ID NO: 36223 - protein, 7 aa, Artificial sequence
  Protein classification predicting sequence
EDGESLE

SEQ ID NO: 36224 - protein, 7 aa, Artificial sequence
  Protein classification predicting sequence
GHDVDFL

SEQ ID NO: 36225 - protein, 8 aa, Artificial sequence
  Protein classification predicting sequence
DPEARLTA

SEQ ID NO: 36226 - protein, 9 aa, Artificial sequence
  Protein classification predicting sequence
GTVTAGNAS

SEQ ID NO: 36227 - protein, 7 aa, Artificial sequence
  Protein classification predicting sequence
EINEAFA

SEQ ID NO: 36228 - protein, 6 aa, Artificial sequence
  Protein classification predicting sequence
GMKIFQ

SEQ ID NO: 36229 - protein, 8 aa, Artificial sequence
  Protein classification predicting sequence
FEINEAFA

SEQ ID NO: 36230 - protein, 6 aa, Artificial sequence
  Protein classification predicting sequence
LRLIDW

SEQ ID NO: 36231 - protein, 10 aa, Artificial sequence
  Protein classification predicting sequence
GTVTAGNASG

SEQ ID NO: 36232 - protein, 6 aa, Artificial sequence
  Protein classification predicting sequence
IMGIGP

SEQ ID NO: 36233 - protein, 8 aa, Artificial sequence
  Protein classification predicting sequence
NEAFAAQA

SEQ ID NO: 36234 - protein, 9 aa, Artificial sequence
  Protein classification predicting sequence
TLLHEMKRR

SEQ ID NO: 36235 - protein, 7 aa, Artificial sequence
  Protein classification predicting sequence
VTAGNAS

SEQ ID NO: 36236 - protein, 6 aa, Artificial sequence
  Protein classification predicting sequence
PVGSGA

SEQ ID NO: 36237 - protein, 7 aa, Artificial sequence
  Protein classification predicting sequence
APSLDAR

SEQ ID NO: 36238 - protein, 7 aa, Artificial sequence
  Protein classification predicting sequence
FCTTSGV

SEQ ID NO: 36239 - protein, 7 aa, Artificial sequence
  Protein classification predicting sequence
VKRYMMY

SEQ ID NO: 36240 - protein, 7 aa, Artificial sequence
  Protein classification predicting sequence
DGAAAII

SEQ ID NO: 36241 - protein, 7 aa, Artificial sequence
  Protein classification predicting sequence
GSDPVPE

SEQ ID NO: 36242 - protein, 7 aa, Artificial sequence
  Protein classification predicting sequence
AILDQVE

SEQ ID NO: 36243 - protein, 6 aa, Artificial sequence
  Protein classification predicting sequence
MPGADY

SEQ ID NO: 36244 - protein, 7 aa, Artificial sequence
  Protein classification predicting sequence
AGGTVLR

SEQ ID NO: 36245 - protein, 8 aa, Artificial sequence
  Protein classification predicting sequence
FWIAHPGG

SEQ ID NO: 36246 - protein, 9 aa, Artificial sequence
  Protein classification predicting sequence
APRVWWMFR

SEQ ID NO: 36247 - protein, 7 aa, Artificial sequence
  Protein classification predicting sequence
LCGKPDV

SEQ ID NO: 36248 - protein, 9 aa, Artificial sequence
  Protein classification predicting sequence
WWMFRAFGH

SEQ ID NO: 36249 - protein, 6 aa, Artificial sequence
  Protein classification predicting sequence
GVTACH

SEQ ID NO: 36250 - protein, 7 aa, Artificial sequence
  Protein classification predicting sequence
QIGAPGA

SEQ ID NO: 36251 - protein, 7 aa, Artificial sequence
  Protein classification predicting sequence
RDRFVLS

SEQ ID NO: 36252 - protein, 9 aa, Artificial sequence
  Protein classification predicting sequence
GEDGPTHQP

SEQ ID NO: 36253 - protein, 7 aa, Artificial sequence
  Protein classification predicting sequence
SWSSVIS

SEQ ID NO: 36254 - protein, 8 aa, Artificial sequence
  Protein classification predicting sequence
TTGPLGQG

SEQ ID NO: 36255 - protein, 7 aa, Artificial sequence
  Protein classification predicting sequence
TGPLGQG

SEQ ID NO: 36256 - protein, 6 aa, Artificial sequence
  Protein classification predicting sequence
FNRDRF

SEQ ID NO: 36257 - protein, 7 aa, Artificial sequence
  Protein classification predicting sequence
GEDGPTH

SEQ ID NO: 36258 - protein, 6 aa, Artificial sequence
  Protein classification predicting sequence
GVLLYE

SEQ ID NO: 36259 - protein, 7 aa, Artificial sequence
  Protein classification predicting sequence
GRTGKWF

SEQ ID NO: 36260 - protein, 6 aa, Artificial sequence
  Protein classification predicting sequence
RLKQEY

SEQ ID NO: 36261 - protein, 7 aa, Artificial sequence
  Protein classification predicting sequence
GTLTENQ

SEQ ID NO: 36262 - protein, 7 aa, Artificial sequence
  Protein classification predicting sequence
EIGSGKG

SEQ ID NO: 36263 - protein, 6 aa, Artificial sequence
  Protein classification predicting sequence
LNFYNP

SEQ ID NO: 36264 - protein, 5 aa, Artificial sequence
  Protein classification predicting sequence
WNPRD

SEQ ID NO: 36265 - protein, 6 aa, Artificial sequence
  Protein classification predicting sequence
YIVMEL

SEQ ID NO: 36266 - protein, 7 aa, Artificial sequence
  Protein classification predicting sequence
CCHNPTG

SEQ ID NO: 36267 - protein, 7 aa, Artificial sequence
  Protein classification predicting sequence
LYGERVG

SEQ ID NO: 36268 - protein, 9 aa, Artificial sequence
  Protein classification predicting sequence
RLREEFGVY

SEQ ID NO: 36269 - protein, 6 aa, Artificial sequence
  Protein classification predicting sequence
DVLVHG

SEQ ID NO: 36270 - protein, 7 aa, Artificial sequence
  Protein classification predicting sequence
GCGGGIL

SEQ ID NO: 36271 - protein, 12 aa, Artificial sequence
  Protein classification predicting sequence
GCGGGILSESMA

SEQ ID NO: 36272 - protein, 6 aa, Artificial sequence
  Protein classification predicting sequence
LDIGCG

SEQ ID NO: 36273 - protein, 9 aa, Artificial sequence
  Protein classification predicting sequence
VLDVGCGGG

SEQ ID NO: 36274 - protein, 7 aa, Artificial sequence
  Protein classification predicting sequence
VLDVGCG

SEQ ID NO: 36275 - protein, 11 aa, Artificial sequence
  Protein classification predicting sequence
VLDVGCGGGIL

SEQ ID NO: 36276 - protein, 8 aa, Artificial sequence
  Protein classification predicting sequence
LDVGCGGG

SEQ ID NO: 36277 - protein, 9 aa, Artificial sequence
  Protein classification predicting sequence
GCGGGILSE

SEQ ID NO: 36278 - protein, 6 aa, Artificial sequence
  Protein classification predicting sequence
FLLVCV

SEQ ID NO: 36279 - protein, 9 aa, Artificial sequence
  Protein classification predicting sequence
LPQKVIWRF

SEQ ID NO: 36280 - protein, 7 aa, Artificial sequence
  Protein classification predicting sequence
PQNDLLG

SEQ ID NO: 36281 - protein, 7 aa, Artificial sequence
  Protein classification predicting sequence
GDQILNA

SEQ ID NO: 36282 - protein, 7 aa, Artificial sequence
  Protein classification predicting sequence
ADFGFAR

SEQ ID NO: 36283 - protein, 6 aa, Artificial sequence
  Protein classification predicting sequence
FGKVFL

SEQ ID NO: 36284 - protein, 8 aa, Artificial sequence
  Protein classification predicting sequence
EKFIEPTR

SEQ ID NO: 36285 - protein, 6 aa, Artificial sequence
  Protein classification predicting sequence
FVDTPL

SEQ ID NO: 36286 - protein, 7 aa, Artificial sequence
  Protein classification predicting sequence
ITQYLDA

SEQ ID NO: 36287 - protein, 6 aa, Artificial sequence
  Protein classification predicting sequence
KFQRMC

SEQ ID NO: 36288 - protein, 6 aa, Artificial sequence
  Protein classification predicting sequence
RMCEKS

SEQ ID NO: 36289 - protein, 11 aa, Artificial sequence
  Protein classification predicting sequence
KLLGLRPSVKR

SEQ ID NO: 36290 - protein, 6 aa, Artificial sequence
  Protein classification predicting sequence
GCYAGG

SEQ ID NO: 36291 - protein, 10 aa, Artificial sequence
  Protein classification predicting sequence
AENNKGARVL

SEQ ID NO: 36292 - protein, 7 aa, Artificial sequence
  Protein classification predicting sequence
GLTFHLL

SEQ ID NO: 36293 - protein, 8 aa, Artificial sequence
  Protein classification predicting sequence
YQQGCFAG

SEQ ID NO: 36294 - protein, 10 aa, Artificial sequence
  Protein classification predicting sequence
GFGPGLTVET

SEQ ID NO: 36295 - protein, 5 aa, Artificial sequence
  Protein classification predicting sequence
KPSNI

SEQ ID NO: 36296 - protein, 5 aa, Artificial sequence
  Protein classification predicting sequence
EQWWL

SEQ ID NO: 36297 - protein, 7 aa, Artificial sequence
  Protein classification predicting sequence
STGATLE

SEQ ID NO: 36298 - protein, 6 aa, Artificial sequence
  Protein classification predicting sequence
FREEFF

SEQ ID NO: 36299 - protein, 8 aa, Artificial sequence
  Protein classification predicting sequence
GKGSFGKV

SEQ ID NO: 36300 - protein, 8 aa, Artificial sequence
  Protein classification predicting sequence
WAPQLEIL

SEQ ID NO: 36301 - protein, 6 aa, Artificial sequence
  Protein classification predicting sequence
VGEPKE

SEQ ID NO: 36302 - protein, 6 aa, Artificial sequence
  Protein classification predicting sequence
VAVKML

SEQ ID NO: 36303 - protein, 6 aa, Artificial sequence
  Protein classification predicting sequence
EKNKIR

SEQ ID NO: 36304 - protein, 7 aa, Artificial sequence
  Protein classification predicting sequence
ADNTPVA

SEQ ID NO: 36305 - protein, 6 aa, Artificial sequence
  Protein classification predicting sequence
EHTIAV

SEQ ID NO: 36306 - protein, 6 aa, Artificial sequence
  Protein classification predicting sequence
FFQKYK

SEQ ID NO: 36307 - protein, 6 aa, Artificial sequence
  Protein classification predicting sequence
IRRRVD

SEQ ID NO: 36308 - protein, 5 aa, Artificial sequence
  Protein classification predicting sequence
YFNES

SEQ ID NO: 36309 - protein, 6 aa, Artificial sequence
  Protein classification predicting sequence
FDEEAN

SEQ ID NO: 36310 - protein, 6 aa, Artificial sequence
  Protein classification predicting sequence
KIQRDM

SEQ ID NO: 36311 - protein, 7 aa, Artificial sequence
  Protein classification predicting sequence
APSRPLS

SEQ ID NO: 36312 - protein, 6 aa, Artificial sequence
  Protein classification predicting sequence
EVRNDD

SEQ ID NO: 36313 - protein, 6 aa, Artificial sequence
  Protein classification predicting sequence
EFSLTD

SEQ ID NO: 36314 - protein, 7 aa, Artificial sequence
  Protein classification predicting sequence
VVSIDRF

SEQ ID NO: 36315 - protein, 6 aa, Artificial sequence
  Protein classification predicting sequence
FTAGER

SEQ ID NO: 36316 - protein, 7 aa, Artificial sequence
  Protein classification predicting sequence
ALTPPGM

SEQ ID NO: 36317 - protein, 6 aa, Artificial sequence
  Protein classification predicting sequence
RLTALR

SEQ ID NO: 36318 - protein, 6 aa, Artificial sequence
  Protein classification predicting sequence
KYSLKP

SEQ ID NO: 36319 - protein, 6 aa, Artificial sequence
  Protein classification predicting sequence
LDEAYL

SEQ ID NO: 36320 - protein, 7 aa, Artificial sequence
  Protein classification predicting sequence
GKIVIVA

SEQ ID NO: 36321 - protein, 6 aa, Artificial sequence
  Protein classification predicting sequence
NGELYR

SEQ ID NO: 36322 - protein, 6 aa, Artificial sequence
  Protein classification predicting sequence
DVVLGM

SEQ ID NO: 36323 - protein, 5 aa, Artificial sequence
  Protein classification predicting sequence
ANQRL

SEQ ID NO: 36324 - protein, 7 aa, Artificial sequence
  Protein classification predicting sequence
IVGIGID

SEQ ID NO: 36325 - protein, 6 aa, Artificial sequence
  Protein classification predicting sequence
ALIVNA

SEQ ID NO: 36326 - protein, 6 aa, Artificial sequence
  Protein classification predicting sequence
RRGICA

SEQ ID NO: 36327 - protein, 8 aa, Artificial sequence
  Protein classification predicting sequence
QILASIEL

SEQ ID NO: 36328 - protein, 8 aa, Artificial sequence
  Protein classification predicting sequence
EAERLAKE

SEQ ID NO: 36329 - protein, 7 aa, Artificial sequence
  Protein classification predicting sequence
DLFIIAT

SEQ ID NO: 36330 - protein, 7 aa, Artificial sequence
  Protein classification predicting sequence
SIVELDS

SEQ ID NO: 36331 - protein, 6 aa, Artificial sequence
  Protein classification predicting sequence
VGIQYL

SEQ ID NO: 36332 - protein, 7 aa, Artificial sequence
  Protein classification predicting sequence
QNLKELR

SEQ ID NO: 36333 - protein, 6 aa, Artificial sequence
  Protein classification predicting sequence
DGVLHE

SEQ ID NO: 36334 - protein, 7 aa, Artificial sequence
  Protein classification predicting sequence
EKANVLI

SEQ ID NO: 36335 - protein, 7 aa, Artificial sequence
  Protein classification predicting sequence
RKNYQDG

SEQ ID NO: 36336 - protein, 8 aa, Artificial sequence
  Protein classification predicting sequence
GEVLDRVE

SEQ ID NO: 36337 - protein, 5 aa, Artificial sequence
  Protein classification predicting sequence
HCVLV

SEQ ID NO: 36338 - protein, 7 aa, Artificial sequence
  Protein classification predicting sequence
TDQKTVE

SEQ ID NO: 36339 - protein, 7 aa, Artificial sequence
  Protein classification predicting sequence
KLVGGKL

SEQ ID NO: 36340 - protein, 7 aa, Artificial sequence
  Protein classification predicting sequence
GPPGAGK

SEQ ID NO: 36341 - protein, 7 aa, Artificial sequence
  Protein classification predicting sequence
WVFDLEG

SEQ ID NO: 36342 - protein, 6 aa, Artificial sequence
  Protein classification predicting sequence
STGGGA

SEQ ID NO: 36343 - protein, 6 aa, Artificial sequence
  Protein classification predicting sequence
TDLDKL

SEQ ID NO: 36344 - protein, 6 aa, Artificial sequence
  Protein classification predicting sequence
DVLASR

SEQ ID NO: 36345 - protein, 6 aa, Artificial sequence
  Protein classification predicting sequence
RFLPAT

SEQ ID NO: 36346 - protein, 6 aa, Artificial sequence
  Protein classification predicting sequence
LTPKEA

SEQ ID NO: 36347 - protein, 6 aa, Artificial sequence
  Protein classification predicting sequence
DLLSKT

SEQ ID NO: 36348 - protein, 5 aa, Artificial sequence
  Protein classification predicting sequence
HRIVH

SEQ ID NO: 36349 - protein, 7 aa, Artificial sequence
  Protein classification predicting sequence
ERVEDLF

SEQ ID NO: 36350 - protein, 6 aa, Artificial sequence
  Protein classification predicting sequence
VVVTFW

SEQ ID NO: 36351 - protein, 6 aa, Artificial sequence
  Protein classification predicting sequence
PQQNST

SEQ ID NO: 36352 - protein, 6 aa, Artificial sequence
  Protein classification predicting sequence
YSTAVD

SEQ ID NO: 36353 - protein, 6 aa, Artificial sequence
  Protein classification predicting sequence
ICTATD

SEQ ID NO: 36354 - protein, 6 aa, Artificial sequence
  Protein classification predicting sequence
KRKRDS

SEQ ID NO: 36355 - protein, 5 aa, Artificial sequence
  Protein classification predicting sequence
RNVNY

SEQ ID NO: 36356 - protein, 7 aa, Artificial sequence
  Protein classification predicting sequence
KQSLLRE

SEQ ID NO: 36357 - protein, 7 aa, Artificial sequence
  Protein classification predicting sequence
CSIVAAL

SEQ ID NO: 36358 - protein, 6 aa, Artificial sequence
  Protein classification predicting sequence
GKTLPG

SEQ ID NO: 36359 - protein, 6 aa, Artificial sequence
  Protein classification predicting sequence
VSMMVT

SEQ ID NO: 36360 - protein, 6 aa, Artificial sequence
  Protein classification predicting sequence
PLFQLV

SEQ ID NO: 36361 - protein, 7 aa, Artificial sequence
  Protein classification predicting sequence
AKDLLEK

SEQ ID NO: 36362 - protein, 6 aa, Artificial sequence
  Protein classification predicting sequence
GDMFRA

SEQ ID NO: 36363 - protein, 7 aa, Artificial sequence
  Protein classification predicting sequence
PKPGLVD

SEQ ID NO: 36364 - protein, 6 aa, Artificial sequence
  Protein classification predicting sequence
LNVSSD

SEQ ID NO: 36365 - protein, 6 aa, Artificial sequence
  Protein classification predicting sequence
VNRPNL

SEQ ID NO: 36366 - protein, 6 aa, Artificial sequence
  Protein classification predicting sequence
AVGKST

SEQ ID NO: 36367 - protein, 6 aa, Artificial sequence
  Protein classification predicting sequence
ENILPT

SEQ ID NO: 36368 - protein, 6 aa, Artificial sequence
  Protein classification predicting sequence
VELVRQ

SEQ ID NO: 36369 - protein, 6 aa, Artificial sequence
  Protein classification predicting sequence
ERAADI

SEQ ID NO: 36370 - protein, 6 aa, Artificial sequence
  Protein classification predicting sequence
GRPTEG

SEQ ID NO: 36371 - protein, 7 aa, Artificial sequence
  Protein classification predicting sequence
SGKSTVA

SEQ ID NO: 36372 - protein, 7 aa, Artificial sequence
  Protein classification predicting sequence
HPQVKED

SEQ ID NO: 36373 - protein, 6 aa, Artificial sequence
  Protein classification predicting sequence
ELVDFI

SEQ ID NO: 36374 - protein, 5 aa, Artificial sequence
  Protein classification predicting sequence
DITHD

SEQ ID NO: 36375 - protein, 7 aa, Artificial sequence
  Protein classification predicting sequence
ENILQQD

SEQ ID NO: 36376 - protein, 6 aa, Artificial sequence
  Protein classification predicting sequence
TPFPSS

SEQ ID NO: 36377 - protein, 7 aa, Artificial sequence
  Protein classification predicting sequence
LRKRGIE

SEQ ID NO: 36378 - protein, 6 aa, Artificial sequence
  Protein classification predicting sequence
TRARYL

SEQ ID NO: 36379 - protein, 6 aa, Artificial sequence
  Protein classification predicting sequence
LDGDNV

SEQ ID NO: 36380 - protein, 6 aa, Artificial sequence
  Protein classification predicting sequence
HCGWNS

SEQ ID NO: 36381 - protein, 5 aa, Artificial sequence
  Protein classification predicting sequence
HCVWC

SEQ ID NO: 36382 - protein, 6 aa, Artificial sequence
  Protein classification predicting sequence
IKDVLA

SEQ ID NO: 36383 - protein, 6 aa, Artificial sequence
  Protein classification predicting sequence
EDDPEA

SEQ ID NO: 36384 - protein, 6 aa, Artificial sequence
  Protein classification predicting sequence
LPDITS

SEQ ID NO: 36385 - protein, 6 aa, Artificial sequence
  Protein classification predicting sequence
IMLINT

SEQ ID NO: 36386 - protein, 7 aa, Artificial sequence
  Protein classification predicting sequence
KSKLLLQ

SEQ ID NO: 36387 - protein, 7 aa, Artificial sequence
  Protein classification predicting sequence
DQEIEKR

SEQ ID NO: 36388 - protein, 7 aa, Artificial sequence
  Protein classification predicting sequence
NIDIIYS

SEQ ID NO: 36389 - protein, 7 aa, Artificial sequence
  Protein classification predicting sequence
VAREIIN

SEQ ID NO: 36390 - protein, 5 aa, Artificial sequence
  Protein classification predicting sequence
QRETT

SEQ ID NO: 36391 - protein, 6 aa, Artificial sequence
  Protein classification predicting sequence
LTRQQV

SEQ ID NO: 36392 - protein, 8 aa, Artificial sequence
  Protein classification predicting sequence
GVVSVRFE

SEQ ID NO: 36393 - protein, 7 aa, Artificial sequence
  Protein classification predicting sequence
PKSLSRE

SEQ ID NO: 36394 - protein, 6 aa, Artificial sequence
  Protein classification predicting sequence
TVVLPD

SEQ ID NO: 36395 - protein, 6 aa, Artificial sequence
  Protein classification predicting sequence
NIRRIG

SEQ ID NO: 36396 - protein, 5 aa, Artificial sequence
  Protein classification predicting sequence
VKPHN

SEQ ID NO: 36397 - protein, 6 aa, Artificial sequence
  Protein classification predicting sequence
NIVRVV

SEQ ID NO: 36398 - protein, 8 aa, Artificial sequence
  Protein classification predicting sequence
GKNIKIIS

SEQ ID NO: 36399 - protein, 7 aa, Artificial sequence
  Protein classification predicting sequence
FEQILKA

SEQ ID NO: 36400 - protein, 6 aa, Artificial sequence
  Protein classification predicting sequence
KSEELI

SEQ ID NO: 36401 - protein, 6 aa, Artificial sequence
  Protein classification predicting sequence
TYSALN

SEQ ID NO: 36402 - protein, 6 aa, Artificial sequence
  Protein classification predicting sequence
LGRPTE

SEQ ID NO: 36403 - protein, 7 aa, Artificial sequence
  Protein classification predicting sequence
KTIEILK

SEQ ID NO: 36404 - protein, 8 aa, Artificial sequence
  Protein classification predicting sequence
ERELARRR

SEQ ID NO: 36405 - protein, 6 aa, Artificial sequence
  Protein classification predicting sequence
YNDGFV

SEQ ID NO: 36406 - protein, 7 aa, Artificial sequence
  Protein classification predicting sequence
VVVVVSA

SEQ ID NO: 36407 - protein, 6 aa, Artificial sequence
  Protein classification predicting sequence
GACVAL

SEQ ID NO: 36408 - protein, 6 aa, Artificial sequence
  Protein classification predicting sequence
LDKLIR

SEQ ID NO: 36409 - protein, 7 aa, Artificial sequence
  Protein classification predicting sequence
TDVACAK

SEQ ID NO: 36410 - protein, 6 aa, Artificial sequence
  Protein classification predicting sequence
PNIITL

SEQ ID NO: 36411 - protein, 6 aa, Artificial sequence
  Protein classification predicting sequence
GLGSSA

SEQ ID NO: 36412 - protein, 6 aa, Artificial sequence
  Protein classification predicting sequence
TSDIHL

SEQ ID NO: 36413 - protein, 6 aa, Artificial sequence
  Protein classification predicting sequence
DRGTAV

SEQ ID NO: 36414 - protein, 6 aa, Artificial sequence
  Protein classification predicting sequence
GDILHS

SEQ ID NO: 36415 - protein, 5 aa, Artificial sequence
  Protein classification predicting sequence
MHTIK

SEQ ID NO: 36416 - protein, 6 aa, Artificial sequence
  Protein classification predicting sequence
TLGNLF

SEQ ID NO: 36417 - protein, 7 aa, Artificial sequence
  Protein classification predicting sequence
ATVAAKY

SEQ ID NO: 36418 - protein, 5 aa, Artificial sequence
  Protein classification predicting sequence
GRTYH

SEQ ID NO: 36419 - protein, 5 aa, Artificial sequence
  Protein classification predicting sequence
DYYQE

SEQ ID NO: 36420 - protein, 6 aa, Artificial sequence
  Protein classification predicting sequence
DFLKKW

SEQ ID NO: 36421 - protein, 6 aa, Artificial sequence
  Protein classification predicting sequence
AKNIIH

SEQ ID NO: 36422 - protein, 7 aa, Artificial sequence
  Protein classification predicting sequence
EVPEEEL

SEQ ID NO: 36423 - protein, 6 aa, Artificial sequence
  Protein classification predicting sequence
YEHIKT

SEQ ID NO: 36424 - protein, 6 aa, Artificial sequence
  Protein classification predicting sequence
RISVVG

SEQ ID NO: 36425 - protein, 5 aa, Artificial sequence
  Protein classification predicting sequence
FNGWD

SEQ ID NO: 36426 - protein, 7 aa, Artificial sequence
  Protein classification predicting sequence
KRYLDQK

SEQ ID NO: 36427 - protein, 7 aa, Artificial sequence
  Protein classification predicting sequence
RTTSFAE

SEQ ID NO: 36428 - protein, 6 aa, Artificial sequence
  Protein classification predicting sequence
IFTGAR

SEQ ID NO: 36429 - protein, 6 aa, Artificial sequence
  Protein classification predicting sequence
PPGIPG

SEQ ID NO: 36430 - protein, 5 aa, Artificial sequence
  Protein classification predicting sequence
TQFNS

SEQ ID NO: 36431 - protein, 5 aa, Artificial sequence
  Protein classification predicting sequence
RMEDR

SEQ ID NO: 36432 - protein, 7 aa, Artificial sequence
  Protein classification predicting sequence
SGPVVAM

SEQ ID NO: 36433 - protein, 6 aa, Artificial sequence
  Protein classification predicting sequence
MGLDIG

SEQ ID NO: 36434 - protein, 7 aa, Artificial sequence
  Protein classification predicting sequence
ELQARFD

SEQ ID NO: 36435 - protein, 6 aa, Artificial sequence
  Protein classification predicting sequence
EFLSMD

SEQ ID NO: 36436 - protein, 7 aa, Artificial sequence
  Protein classification predicting sequence
SQYYTRF

SEQ ID NO: 36437 - protein, 7 aa, Artificial sequence
  Protein classification predicting sequence
SLAARFA

SEQ ID NO: 36438 - protein, 6 aa, Artificial sequence
  Protein classification predicting sequence
RWGGGY

SEQ ID NO: 36439 - protein, 6 aa, Artificial sequence
  Protein classification predicting sequence
GILASP

SEQ ID NO: 36440 - protein, 7 aa, Artificial sequence
  Protein classification predicting sequence
STPIDSS

SEQ ID NO: 36441 - protein, 6 aa, Artificial sequence
  Protein classification predicting sequence
TAFDRV

SEQ ID NO: 36442 - protein, 5 aa, Artificial sequence
  Protein classification predicting sequence
GRHCG

SEQ ID NO: 36443 - protein, 6 aa, Artificial sequence
  Protein classification predicting sequence
AFRASL

SEQ ID NO: 36444 - protein, 7 aa, Artificial sequence
  Protein classification predicting sequence
VNTLSAL

SEQ ID NO: 36445 - protein, 6 aa, Artificial sequence
  Protein classification predicting sequence
LRRIGR

SEQ ID NO: 36446 - protein, 7 aa, Artificial sequence
  Protein classification predicting sequence
FGLSRVL

SEQ ID NO: 36447 - protein, 7 aa, Artificial sequence
  Protein classification predicting sequence
VRARAVA

SEQ ID NO: 36448 - protein, 6 aa, Artificial sequence
  Protein classification predicting sequence
MNTGEK

SEQ ID NO: 36449 - protein, 6 aa, Artificial sequence
  Protein classification predicting sequence
GIAASD

SEQ ID NO: 36450 - protein, 6 aa, Artificial sequence
  Protein classification predicting sequence
IKAFQE

SEQ ID NO: 36451 - protein, 6 aa, Artificial sequence
  Protein classification predicting sequence
KLTQGR

SEQ ID NO: 36452 - protein, 6 aa, Artificial sequence
  Protein classification predicting sequence
QWLRDE

SEQ ID NO: 36453 - protein, 6 aa, Artificial sequence
  Protein classification predicting sequence
RATLES

SEQ ID NO: 36454 - protein, 7 aa, Artificial sequence
  Protein classification predicting sequence
QADAGTR

SEQ ID NO: 36455 - protein, 6 aa, Artificial sequence
  Protein classification predicting sequence
QKEFTQ

SEQ ID NO: 36456 - protein, 6 aa, Artificial sequence
  Protein classification predicting sequence
VINEND

SEQ ID NO: 36457 - protein, 6 aa, Artificial sequence
  Protein classification predicting sequence
ANYRLI

SEQ ID NO: 36458 - protein, 6 aa, Artificial sequence
  Protein classification predicting sequence
AYPRIL

SEQ ID NO: 36459 - protein, 6 aa, Artificial sequence
  Protein classification predicting sequence
HFGAEY

SEQ ID NO: 36460 - protein, 5 aa, Artificial sequence
  Protein classification predicting sequence
KWFNT

SEQ ID NO: 36461 - protein, 5 aa, Artificial sequence
  Protein classification predicting sequence
DKDNY

SEQ ID NO: 36462 - protein, 6 aa, Artificial sequence
  Protein classification predicting sequence
TNGTSK

SEQ ID NO: 36463 - protein, 6 aa, Artificial sequence
  Protein classification predicting sequence
RDAEYD

SEQ ID NO: 36464 - protein, 8 aa, Artificial sequence
  Protein classification predicting sequence
GVMTAQKY

SEQ ID NO: 36465 - protein, 7 aa, Artificial sequence
  Protein classification predicting sequence
TRLLPDA

SEQ ID NO: 36466 - protein, 7 aa, Artificial sequence
  Protein classification predicting sequence
KNNLLKI

SEQ ID NO: 36467 - protein, 6 aa, Artificial sequence
  Protein classification predicting sequence
LGGAKV

SEQ ID NO: 36468 - protein, 7 aa, Artificial sequence
  Protein classification predicting sequence
GSNLGDR

SEQ ID NO: 36469 - protein, 7 aa, Artificial sequence
  Protein classification predicting sequence
LSVDYPV

SEQ ID NO: 36470 - protein, 6 aa, Artificial sequence
  Protein classification predicting sequence
RTDFDK

SEQ ID NO: 36471 - protein, 6 aa, Artificial sequence
  Protein classification predicting sequence
NDTVAT

SEQ ID NO: 36472 - protein, 6 aa, Artificial sequence
  Protein classification predicting sequence
TFDTTQ

SEQ ID NO: 36473 - protein, 7 aa, Artificial sequence
  Protein classification predicting sequence
EIVALIN

SEQ ID NO: 36474 - protein, 7 aa, Artificial sequence
  Protein classification predicting sequence
AAQALKD

SEQ ID NO: 36475 - protein, 6 aa, Artificial sequence
  Protein classification predicting sequence
ILLENL

SEQ ID NO: 36476 - protein, 7 aa, Artificial sequence
  Protein classification predicting sequence
KKHHVLE

SEQ ID NO: 36477 - protein, 7 aa, Artificial sequence
  Protein classification predicting sequence
RMIDFAH

SEQ ID NO: 36478 - protein, 6 aa, Artificial sequence
  Protein classification predicting sequence
DMESSK

SEQ ID NO: 36479 - protein, 5 aa, Artificial sequence
  Protein classification predicting sequence
GHNKV

SEQ ID NO: 36480 - protein, 6 aa, Artificial sequence
  Protein classification predicting sequence
IQDDDV

SEQ ID NO: 36481 - protein, 6 aa, Artificial sequence
  Protein classification predicting sequence
RRNTYV

SEQ ID NO: 36482 - protein, 7 aa, Artificial sequence
  Protein classification predicting sequence
KTAEQVL

SEQ ID NO: 36483 - protein, 7 aa, Artificial sequence
  Protein classification predicting sequence
ILINDFE

SEQ ID NO: 36484 - protein, 7 aa, Artificial sequence
  Protein classification predicting sequence
ASGIPAG

SEQ ID NO: 36485 - protein, 5 aa, Artificial sequence
  Protein classification predicting sequence
SPLHH

SEQ ID NO: 36486 - protein, 6 aa, Artificial sequence
  Protein classification predicting sequence
TIEVFR

SEQ ID NO: 36487 - protein, 6 aa, Artificial sequence
  Protein classification predicting sequence
DITHDG

SEQ ID NO: 36488 - protein, 6 aa, Artificial sequence
  Protein classification predicting sequence
MIDALK

SEQ ID NO: 36489 - protein, 5 aa, Artificial sequence
  Protein classification predicting sequence
DWMTR

SEQ ID NO: 36490 - protein, 6 aa, Artificial sequence
  Protein classification predicting sequence
VFVVET

SEQ ID NO: 36491 - protein, 7 aa, Artificial sequence
  Protein classification predicting sequence
AVRAVVR

SEQ ID NO: 36492 - protein, 6 aa, Artificial sequence
  Protein classification predicting sequence
TNGSIT

SEQ ID NO: 36493 - protein, 6 aa, Artificial sequence
  Protein classification predicting sequence
AVFDTA

SEQ ID NO: 36494 - protein, 6 aa, Artificial sequence
  Protein classification predicting sequence
YNNDFV

SEQ ID NO: 36495 - protein, 7 aa, Artificial sequence
  Protein classification predicting sequence
HDDTQKI

SEQ ID NO: 36496 - protein, 7 aa, Artificial sequence
  Protein classification predicting sequence
LEEVAGK

SEQ ID NO: 36497 - protein, 6 aa, Artificial sequence
  Protein classification predicting sequence
VFVIET

SEQ ID NO: 36498 - protein, 6 aa, Artificial sequence
  Protein classification predicting sequence
REGEVD

SEQ ID NO: 36499 - protein, 7 aa, Artificial sequence
  Protein classification predicting sequence
KVVVIPT

SEQ ID NO: 36500 - protein, 6 aa, Artificial sequence
  Protein classification predicting sequence
RSVIVV

SEQ ID NO: 36501 - protein, 7 aa, Artificial sequence
  Protein classification predicting sequence
TVIEAID

SEQ ID NO: 36502 - protein, 7 aa, Artificial sequence
  Protein classification predicting sequence
TVIDAID

SEQ ID NO: 36503 - protein, 5 aa, Artificial sequence
  Protein classification predicting sequence
MGIYV

SEQ ID NO: 36504 - protein, 6 aa, Artificial sequence
  Protein classification predicting sequence
YYQEQG

SEQ ID NO: 36505 - protein, 8 aa, Artificial sequence
  Protein classification predicting sequence
MRKLDPDT

SEQ ID NO: 36506 - protein, 6 aa, Artificial sequence
  Protein classification predicting sequence
NEELVI

SEQ ID NO: 36507 - protein, 7 aa, Artificial sequence
  Protein classification predicting sequence
LIQRADD

SEQ ID NO: 36508 - protein, 6 aa, Artificial sequence
  Protein classification predicting sequence
KGELVP

SEQ ID NO: 36509 - protein, 5 aa, Artificial sequence
  Protein classification predicting sequence
YYQEQ

SEQ ID NO: 36510 - protein, 6 aa, Artificial sequence
  Protein classification predicting sequence
GDLIQR

SEQ ID NO: 36511 - protein, 6 aa, Artificial sequence
  Protein classification predicting sequence
TYHEIY

SEQ ID NO: 36512 - protein, 6 aa, Artificial sequence
  Protein classification predicting sequence
YSEKGK

SEQ ID NO: 36513 - protein, 7 aa, Artificial sequence
  Protein classification predicting sequence
SEELIRR

SEQ ID NO: 36514 - protein, 7 aa, Artificial sequence
  Protein classification predicting sequence
KVSGRSD

SEQ ID NO: 36515 - protein, 6 aa, Artificial sequence
  Protein classification predicting sequence
LVRRME

SEQ ID NO: 36516 - protein, 6 aa, Artificial sequence
  Protein classification predicting sequence
NDELGK

SEQ ID NO: 36517 - protein, 6 aa, Artificial sequence
  Protein classification predicting sequence
NEKRIL

SEQ ID NO: 36518 - protein, 6 aa, Artificial sequence
  Protein classification predicting sequence
PWFKDT

SEQ ID NO: 36519 - protein, 6 aa, Artificial sequence
  Protein classification predicting sequence
DLGFSE

SEQ ID NO: 36520 - protein, 6 aa, Artificial sequence
  Protein classification predicting sequence
RDVLGT

SEQ ID NO: 36521 - protein, 6 aa, Artificial sequence
  Protein classification predicting sequence
ISSSLV

SEQ ID NO: 36522 - protein, 6 aa, Artificial sequence
  Protein classification predicting sequence
HLGQHE

SEQ ID NO: 36523 - protein, 6 aa, Artificial sequence
  Protein classification predicting sequence
GTSVLT

SEQ ID NO: 36524 - protein, 6 aa, Artificial sequence
  Protein classification predicting sequence
IIEGRD

SEQ ID NO: 36525 - protein, 6 aa, Artificial sequence
  Protein classification predicting sequence
NAVLDG

SEQ ID NO: 36526 - protein, 6 aa, Artificial sequence
  Protein classification predicting sequence
GRDIGT

SEQ ID NO: 36527 - protein, 6 aa, Artificial sequence
  Protein classification predicting sequence
RYTQLQ

SEQ ID NO: 36528 - protein, 6 aa, Artificial sequence
  Protein classification predicting sequence
VRKFMV

SEQ ID NO: 36529 - protein, 6 aa, Artificial sequence
  Protein classification predicting sequence
QIIKLL

SEQ ID NO: 36530 - protein, 6 aa, Artificial sequence
  Protein classification predicting sequence
LDIRNF

SEQ ID NO: 36531 - protein, 7 aa, Artificial sequence
  Protein classification predicting sequence
GKSTVAK

SEQ ID NO: 36532 - protein, 7 aa, Artificial sequence
  Protein classification predicting sequence
SDAEDLE

SEQ ID NO: 36533 - protein, 6 aa, Artificial sequence
  Protein classification predicting sequence
TRTASI

SEQ ID NO: 36534 - protein, 6 aa, Artificial sequence
  Protein classification predicting sequence
RQNPTE

SEQ ID NO: 36535 - protein, 7 aa, Artificial sequence
  Protein classification predicting sequence
SMEELAR

SEQ ID NO: 36536 - protein, 7 aa, Artificial sequence
  Protein classification predicting sequence
AVVNDTV

SEQ ID NO: 36537 - protein, 7 aa, Artificial sequence
  Protein classification predicting sequence
HRIIGRG

SEQ ID NO: 36538 - protein, 6 aa, Artificial sequence
  Protein classification predicting sequence
RIIGRG

SEQ ID NO: 36539 - protein, 6 aa, Artificial sequence
  Protein classification predicting sequence
VVNDTV

SEQ ID NO: 36540 - protein, 7 aa, Artificial sequence
  Protein classification predicting sequence
MKELKAR

SEQ ID NO: 36541 - protein, 7 aa, Artificial sequence
  Protein classification predicting sequence
DHKFDYS

SEQ ID NO: 36542 - protein, 6 aa, Artificial sequence
  Protein classification predicting sequence
ENEEKI

SEQ ID NO: 36543 - protein, 7 aa, Artificial sequence
  Protein classification predicting sequence
PFTAGER

SEQ ID NO: 36544 - protein, 6 aa, Artificial sequence
  Protein classification predicting sequence
AILGGA

SEQ ID NO: 36545 - protein, 6 aa, Artificial sequence
  Protein classification predicting sequence
FLAKIA

SEQ ID NO: 36546 - protein, 7 aa, Artificial sequence
  Protein classification predicting sequence
GRITAVI

SEQ ID NO: 36547 - protein, 6 aa, Artificial sequence
  Protein classification predicting sequence
PPGTNL

SEQ ID NO: 36548 - protein, 6 aa, Artificial sequence
  Protein classification predicting sequence
DTRFQY

SEQ ID NO: 36549 - protein, 6 aa, Artificial sequence
  Protein classification predicting sequence
NLDFRG

SEQ ID NO: 36550 - protein, 6 aa, Artificial sequence
  Protein classification predicting sequence
LHNDSK

SEQ ID NO: 36551 - protein, 6 aa, Artificial sequence
  Protein classification predicting sequence
MVVEGE

SEQ ID NO: 36552 - protein, 8 aa, Artificial sequence
  Protein classification predicting sequence
IGLEAPAI

SEQ ID NO: 36553 - protein, 6 aa, Artificial sequence
  Protein classification predicting sequence
LTYKYL

SEQ ID NO: 36554 - protein, 6 aa, Artificial sequence
  Protein classification predicting sequence
KHFIRT

SEQ ID NO: 36555 - protein, 6 aa, Artificial sequence
  Protein classification predicting sequence
QHQHKS

SEQ ID NO: 36556 - protein, 6 aa, Artificial sequence
  Protein classification predicting sequence
PGAGKG

SEQ ID NO: 36557 - protein, 6 aa, Artificial sequence
  Protein classification predicting sequence
GGDIFI

SEQ ID NO: 36558 - protein, 6 aa, Artificial sequence
  Protein classification predicting sequence
TGNMNF

SEQ ID NO: 36559 - protein, 6 aa, Artificial sequence
  Protein classification predicting sequence
KPVSPL

SEQ ID NO: 36560 - protein, 6 aa, Artificial sequence
  Protein classification predicting sequence
VPIINE

SEQ ID NO: 36561 - protein, 6 aa, Artificial sequence
  Protein classification predicting sequence
IGDVKG

SEQ ID NO: 36562 - protein, 6 aa, Artificial sequence
  Protein classification predicting sequence
AGSDRV

SEQ ID NO: 36563 - protein, 7 aa, Artificial sequence
  Protein classification predicting sequence
IMLDAFK

SEQ ID NO: 36564 - protein, 7 aa, Artificial sequence
  Protein classification predicting sequence
PTEVQMT

SEQ ID NO: 36565 - protein, 7 aa, Artificial sequence
  Protein classification predicting sequence
GKEVILV

SEQ ID NO: 36566 - protein, 7 aa, Artificial sequence
  Protein classification predicting sequence
IQDPEVI

SEQ ID NO: 36567 - protein, 6 aa, Artificial sequence
  Protein classification predicting sequence
EQLIEA

SEQ ID NO: 36568 - protein, 6 aa, Artificial sequence
  Protein classification predicting sequence
PYDLKV

SEQ ID NO: 36569 - protein, 7 aa, Artificial sequence
  Protein classification predicting sequence
KCDILLL

SEQ ID NO: 36570 - protein, 5 aa, Artificial sequence
  Protein classification predicting sequence
MISKC

SEQ ID NO: 36571 - protein, 7 aa, Artificial sequence
  Protein classification predicting sequence
AVDRGND

SEQ ID NO: 36572 - protein, 6 aa, Artificial sequence
  Protein classification predicting sequence
GIFCYL

SEQ ID NO: 36573 - protein, 8 aa, Artificial sequence
  Protein classification predicting sequence
DPGSTPLA

SEQ ID NO: 36574 - protein, 6 aa, Artificial sequence
  Protein classification predicting sequence
GLLLDP

SEQ ID NO: 36575 - protein, 5 aa, Artificial sequence
  Protein classification predicting sequence
HNKVY

SEQ ID NO: 36576 - protein, 7 aa, Artificial sequence
  Protein classification predicting sequence
LKQNILP

SEQ ID NO: 36577 - protein, 6 aa, Artificial sequence
  Protein classification predicting sequence
YMYSTA

SEQ ID NO: 36578 - protein, 7 aa, Artificial sequence
  Protein classification predicting sequence
AKRISER

SEQ ID NO: 36579 - protein, 6 aa, Artificial sequence
  Protein classification predicting sequence
LPEARI

SEQ ID NO: 36580 - protein, 6 aa, Artificial sequence
  Protein classification predicting sequence
TQSQML

SEQ ID NO: 36581 - protein, 6 aa, Artificial sequence
  Protein classification predicting sequence
NAFSHE

SEQ ID NO: 36582 - protein, 7 aa, Artificial sequence
  Protein classification predicting sequence
IAVESAK

SEQ ID NO: 36583 - protein, 7 aa, Artificial sequence
  Protein classification predicting sequence
KKELNYF

SEQ ID NO: 36584 - protein, 6 aa, Artificial sequence
  Protein classification predicting sequence
TTIIQK

SEQ ID NO: 36585 - protein, 7 aa, Artificial sequence
  Protein classification predicting sequence
IALRRAL

SEQ ID NO: 36586 - protein, 6 aa, Artificial sequence
  Protein classification predicting sequence
VPPFMR

SEQ ID NO: 36587 - protein, 6 aa, Artificial sequence
  Protein classification predicting sequence
EEEGTS

SEQ ID NO: 36588 - protein, 5 aa, Artificial sequence
  Protein classification predicting sequence
WVAHP

SEQ ID NO: 36589 - protein, 6 aa, Artificial sequence
  Protein classification predicting sequence
WIAHPG

SEQ ID NO: 36590 - protein, 6 aa, Artificial sequence
  Protein classification predicting sequence
TTSGVD

SEQ ID NO: 36591 - protein, 7 aa, Artificial sequence
  Protein classification predicting sequence
GAGAGGT

SEQ ID NO: 36592 - protein, 5 aa, Artificial sequence
  Protein classification predicting sequence
VCSEI

SEQ ID NO: 36593 - protein, 6 aa, Artificial sequence
  Protein classification predicting sequence
LKDSAI

SEQ ID NO: 36594 - protein, 6 aa, Artificial sequence
  Protein classification predicting sequence
NVLLKN

SEQ ID NO: 36595 - protein, 5 aa, Artificial sequence
  Protein classification predicting sequence
GWYLS

SEQ ID NO: 36596 - protein, 6 aa, Artificial sequence
  Protein classification predicting sequence
IDLKYF

SEQ ID NO: 36597 - protein, 7 aa, Artificial sequence
  Protein classification predicting sequence
TKALLKD

SEQ ID NO: 36598 - protein, 6 aa, Artificial sequence
  Protein classification predicting sequence
EKDFTR

SEQ ID NO: 36599 - protein, 6 aa, Artificial sequence
  Protein classification predicting sequence
FDGDEM

SEQ ID NO: 36600 - protein, 6 aa, Artificial sequence
  Protein classification predicting sequence
DGPPCS

SEQ ID NO: 36601 - protein, 7 aa, Artificial sequence
  Protein classification predicting sequence
VRFAELK

SEQ ID NO: 36602 - protein, 6 aa, Artificial sequence
  Protein classification predicting sequence
KNKKGI

SEQ ID NO: 36603 - protein, 7 aa, Artificial sequence
  Protein classification predicting sequence
VFIIETM

SEQ ID NO: 36604 - protein, 6 aa, Artificial sequence
  Protein classification predicting sequence
TGKRVF

SEQ ID NO: 36605 - protein, 6 aa, Artificial sequence
  Protein classification predicting sequence
LGFADD

SEQ ID NO: 36606 - protein, 7 aa, Artificial sequence
  Protein classification predicting sequence
GPTIVAG

SEQ ID NO: 36607 - protein, 5 aa, Artificial sequence
  Protein classification predicting sequence
RVFRM

SEQ ID NO: 36608 - protein, 6 aa, Artificial sequence
  Protein classification predicting sequence
EDVKQH

SEQ ID NO: 36609 - protein, 6 aa, Artificial sequence
  Protein classification predicting sequence
PFFKDL

SEQ ID NO: 36610 - protein, 7 aa, Artificial sequence
  Protein classification predicting sequence
RLTGRRI

SEQ ID NO: 36611 - protein, 6 aa, Artificial sequence
  Protein classification predicting sequence
MGGVFV

SEQ ID NO: 36612 - protein, 5 aa, Artificial sequence
  Protein classification predicting sequence
FFPSS

SEQ ID NO: 36613 - protein, 7 aa, Artificial sequence
  Protein classification predicting sequence
RVEDLFI

SEQ ID NO: 36614 - protein, 6 aa, Artificial sequence
  Protein classification predicting sequence
HLSVKE

SEQ ID NO: 36615 - protein, 6 aa, Artificial sequence
  Protein classification predicting sequence
KNPSLR

SEQ ID NO: 36616 - protein, 6 aa, Artificial sequence
  Protein classification predicting sequence
HPNIVR

SEQ ID NO: 36617 - protein, 5 aa, Artificial sequence
  Protein classification predicting sequence
QRSKF

SEQ ID NO: 36618 - protein, 6 aa, Artificial sequence
  Protein classification predicting sequence
GWYLSQ

SEQ ID NO: 36619 - protein, 6 aa, Artificial sequence
  Protein classification predicting sequence
YAGVPV

SEQ ID NO: 36620 - protein, 6 aa, Artificial sequence
  Protein classification predicting sequence
AENRLH

SEQ ID NO: 36621 - protein, 6 aa, Artificial sequence
  Protein classification predicting sequence
QLYQRS

SEQ ID NO: 36622 - protein, 6 aa, Artificial sequence
  Protein classification predicting sequence
DTAKVL

SEQ ID NO: 36623 - protein, 6 aa, Artificial sequence
  Protein classification predicting sequence
LDSYLV

SEQ ID NO: 36624 - protein, 5 aa, Artificial sequence
  Protein classification predicting sequence
VIHRD

SEQ ID NO: 36625 - protein, 6 aa, Artificial sequence
  Protein classification predicting sequence
MLEERA

SEQ ID NO: 36626 - protein, 6 aa, Artificial sequence
  Protein classification predicting sequence
PAPDGR

SEQ ID NO: 36627 - protein, 6 aa, Artificial sequence
  Protein classification predicting sequence
LILICG

SEQ ID NO: 36628 - protein, 6 aa, Artificial sequence
  Protein classification predicting sequence
VFDEAE

SEQ ID NO: 36629 - protein, 6 aa, Artificial sequence
  Protein classification predicting sequence
NLHFIR

SEQ ID NO: 36630 - protein, 6 aa, Artificial sequence
  Protein classification predicting sequence
ARKYWL

SEQ ID NO: 36631 - protein, 6 aa, Artificial sequence
  Protein classification predicting sequence
EHCHIL

SEQ ID NO: 36632 - protein, 7 aa, Artificial sequence
  Protein classification predicting sequence
LALLVDG

SEQ ID NO: 36633 - protein, 6 aa, Artificial sequence
  Protein classification predicting sequence
LVIIGG

SEQ ID NO: 36634 - protein, 6 aa, Artificial sequence
  Protein classification predicting sequence
EDILEI

SEQ ID NO: 36635 - protein, 6 aa, Artificial sequence
  Protein classification predicting sequence
MNRAPE

SEQ ID NO: 36636 - protein, 6 aa, Artificial sequence
  Protein classification predicting sequence
LLGKRV

SEQ ID NO: 36637 - protein, 6 aa, Artificial sequence
  Protein classification predicting sequence
LADILK

SEQ ID NO: 36638 - protein, 8 aa, Artificial sequence
  Protein classification predicting sequence
GGGDTLAA

SEQ ID NO: 36639 - protein, 6 aa, Artificial sequence
  Protein classification predicting sequence
WNGPVG

SEQ ID NO: 36640 - protein, 6 aa, Artificial sequence
  Protein classification predicting sequence
GGGDTL

SEQ ID NO: 36641 - protein, 6 aa, Artificial sequence
  Protein classification predicting sequence
DKLDLA

SEQ ID NO: 36642 - protein, 6 aa, Artificial sequence
  Protein classification predicting sequence
LSKSYE

SEQ ID NO: 36643 - protein, 6 aa, Artificial sequence
  Protein classification predicting sequence
PAAAGK

SEQ ID NO: 36644 - protein, 8 aa, Artificial sequence
  Protein classification predicting sequence
KANKEDVE

SEQ ID NO: 36645 - protein, 6 aa, Artificial sequence
  Protein classification predicting sequence
IFTLGG

SEQ ID NO: 36646 - protein, 6 aa, Artificial sequence
  Protein classification predicting sequence
YIIEQG

SEQ ID NO: 36647 - protein, 7 aa, Artificial sequence
  Protein classification predicting sequence
SSPVRLA

SEQ ID NO: 36648 - protein, 7 aa, Artificial sequence
  Protein classification predicting sequence
IGDVKGK

SEQ ID NO: 36649 - protein, 7 aa, Artificial sequence
  Protein classification predicting sequence
ALTKNPK

SEQ ID NO: 36650 - protein, 6 aa, Artificial sequence
  Protein classification predicting sequence
NPNALF

SEQ ID NO: 36651 - protein, 6 aa, Artificial sequence
  Protein classification predicting sequence
SGIKRA

SEQ ID NO: 36652 - protein, 6 aa, Artificial sequence
  Protein classification predicting sequence
PGEFDP

SEQ ID NO: 36653 - protein, 5 aa, Artificial sequence
  Protein classification predicting sequence
NMTKK

SEQ ID NO: 36654 - protein, 5 aa, Artificial sequence
  Protein classification predicting sequence
VWSLG

SEQ ID NO: 36655 - protein, 6 aa, Artificial sequence
  Protein classification predicting sequence
GEYNEE

SEQ ID NO: 36656 - protein, 6 aa, Artificial sequence
  Protein classification predicting sequence
DSSLAY

SEQ ID NO: 36657 - protein, 7 aa, Artificial sequence
  Protein classification predicting sequence
ISVVGIY

SEQ ID NO: 36658 - protein, 7 aa, Artificial sequence
  Protein classification predicting sequence
KIRLDTE

SEQ ID NO: 36659 - protein, 6 aa, Artificial sequence
  Protein classification predicting sequence
GITALQ

SEQ ID NO: 36660 - protein, 5 aa, Artificial sequence
  Protein classification predicting sequence
RPLFP

SEQ ID NO: 36661 - protein, 7 aa, Artificial sequence
  Protein classification predicting sequence
FEESPSD

SEQ ID NO: 36662 - protein, 6 aa, Artificial sequence
  Protein classification predicting sequence
VFTGGI

SEQ ID NO: 36663 - protein, 6 aa, Artificial sequence
  Protein classification predicting sequence
IKKIGV

SEQ ID NO: 36664 - protein, 7 aa, Artificial sequence
  Protein classification predicting sequence
GTNDLTQ

SEQ ID NO: 36665 - protein, 6 aa, Artificial sequence
  Protein classification predicting sequence
ERVEDL

SEQ ID NO: 36666 - protein, 7 aa, Artificial sequence
  Protein classification predicting sequence
KSAVKIA

SEQ ID NO: 36667 - protein, 7 aa, Artificial sequence
  Protein classification predicting sequence
GAQGIGL

SEQ ID NO: 36668 - protein, 6 aa, Artificial sequence
  Protein classification predicting sequence
SSVKEK

SEQ ID NO: 36669 - protein, 6 aa, Artificial sequence
  Protein classification predicting sequence
IIGRYL

SEQ ID NO: 36670 - protein, 7 aa, Artificial sequence
  Protein classification predicting sequence
KEKVLEM

SEQ ID NO: 36671 - protein, 6 aa, Artificial sequence
  Protein classification predicting sequence
GLFTAD

SEQ ID NO: 36672 - protein, 5 aa, Artificial sequence
  Protein classification predicting sequence
NQNPR

SEQ ID NO: 36673 - protein, 6 aa, Artificial sequence
  Protein classification predicting sequence
AVRQYL

SEQ ID NO: 36674 - protein, 6 aa, Artificial sequence
  Protein classification predicting sequence
NGTPEL

SEQ ID NO: 36675 - protein, 8 aa, Artificial sequence
  Protein classification predicting sequence
ELVEFLVR

SEQ ID NO: 36676 - protein, 6 aa, Artificial sequence
  Protein classification predicting sequence
GGRTSH

SEQ ID NO: 36677 - protein, 6 aa, Artificial sequence
  Protein classification predicting sequence
LQDIEN

SEQ ID NO: 36678 - protein, 7 aa, Artificial sequence
  Protein classification predicting sequence
VEMEKKL

SEQ ID NO: 36679 - protein, 6 aa, Artificial sequence
  Protein classification predicting sequence
LVEGRA

SEQ ID NO: 36680 - protein, 7 aa, Artificial sequence
  Protein classification predicting sequence
FSIGSND

SEQ ID NO: 36681 - protein, 7 aa, Artificial sequence
  Protein classification predicting sequence
DLVVRAA

SEQ ID NO: 36682 - protein, 6 aa, Artificial sequence
  Protein classification predicting sequence
GDNDTL

SEQ ID NO: 36683 - protein, 6 aa, Artificial sequence
  Protein classification predicting sequence
LGTRFL

SEQ ID NO: 36684 - protein, 7 aa, Artificial sequence
  Protein classification predicting sequence
ESGAERI

SEQ ID NO: 36685 - protein, 7 aa, Artificial sequence
  Protein classification predicting sequence
IKKENIG

SEQ ID NO: 36686 - protein, 6 aa, Artificial sequence
  Protein classification predicting sequence
GTRFLP

SEQ ID NO: 36687 - protein, 7 aa, Artificial sequence
  Protein classification predicting sequence
KTVGQIT

SEQ ID NO: 36688 - protein, 8 aa, Artificial sequence
  Protein classification predicting sequence
NRKRYLNL

SEQ ID NO: 36689 - protein, 7 aa, Artificial sequence
  Protein classification predicting sequence
EEALKSG

SEQ ID NO: 36690 - protein, 6 aa, Artificial sequence
  Protein classification predicting sequence
KKNPQA

SEQ ID NO: 36691 - protein, 6 aa, Artificial sequence
  Protein classification predicting sequence
AKGKQG

SEQ ID NO: 36692 - protein, 8 aa, Artificial sequence
  Protein classification predicting sequence
LEDEKAKL

SEQ ID NO: 36693 - protein, 7 aa, Artificial sequence
  Protein classification predicting sequence
GAEGIGL

SEQ ID NO: 36694 - protein, 6 aa, Artificial sequence
  Protein classification predicting sequence
AEREQG

SEQ ID NO: 36695 - protein, 6 aa, Artificial sequence
  Protein classification predicting sequence
NPTEEQ

SEQ ID NO: 36696 - protein, 6 aa, Artificial sequence
  Protein classification predicting sequence
LLNDTD

SEQ ID NO: 36697 - protein, 6 aa, Artificial sequence
  Protein classification predicting sequence
GSGVQA

SEQ ID NO: 36698 - protein, 6 aa, Artificial sequence
  Protein classification predicting sequence
NVLLSP

SEQ ID NO: 36699 - protein, 6 aa, Artificial sequence
  Protein classification predicting sequence
LFIPFL

SEQ ID NO: 36700 - protein, 6 aa, Artificial sequence
  Protein classification predicting sequence
ASPGSI

SEQ ID NO: 36701 - protein, 7 aa, Artificial sequence
  Protein classification predicting sequence
IAFFLIG

SEQ ID NO: 36702 - protein, 7 aa, Artificial sequence
  Protein classification predicting sequence
NVLASGV

SEQ ID NO: 36703 - protein, 6 aa, Artificial sequence
  Protein classification predicting sequence
ESSVKE

SEQ ID NO: 36704 - protein, 6 aa, Artificial sequence
  Protein classification predicting sequence
LFLNNA

SEQ ID NO: 36705 - protein, 6 aa, Artificial sequence
  Protein classification predicting sequence
VMSKDK

SEQ ID NO: 36706 - protein, 6 aa, Artificial sequence
  Protein classification predicting sequence
LIGEAI

SEQ ID NO: 36707 - protein, 6 aa, Artificial sequence
  Protein classification predicting sequence
VIVTNT

SEQ ID NO: 36708 - protein, 7 aa, Artificial sequence
  Protein classification predicting sequence
GEVLLLE

SEQ ID NO: 36709 - protein, 7 aa, Artificial sequence
  Protein classification predicting sequence
DHVLDTA

SEQ ID NO: 36710 - protein, 7 aa, Artificial sequence
  Protein classification predicting sequence
EFGQFLE

SEQ ID NO: 36711 - protein, 5 aa, Artificial sequence
  Protein classification predicting sequence
AQVFM

SEQ ID NO: 36712 - protein, 6 aa, Artificial sequence
  Protein classification predicting sequence
NNSQED

SEQ ID NO: 36713 - protein, 6 aa, Artificial sequence
  Protein classification predicting sequence
SKKGVN

SEQ ID NO: 36714 - protein, 6 aa, Artificial sequence
  Protein classification predicting sequence
ILDKQK

SEQ ID NO: 36715 - protein, 6 aa, Artificial sequence
  Protein classification predicting sequence
WFSLGC

SEQ ID NO: 36716 - protein, 7 aa, Artificial sequence
  Protein classification predicting sequence
LGKVKEE

SEQ ID NO: 36717 - protein, 7 aa, Artificial sequence
  Protein classification predicting sequence
YLDAGDL

SEQ ID NO: 36718 - protein, 7 aa, Artificial sequence
  Protein classification predicting sequence
GIVLAGG

SEQ ID NO: 36719 - protein, 5 aa, Artificial sequence
  Protein classification predicting sequence
VDMNV

SEQ ID NO: 36720 - protein, 6 aa, Artificial sequence
  Protein classification predicting sequence
RADLNV

SEQ ID NO: 36721 - protein, 6 aa, Artificial sequence
  Protein classification predicting sequence
FVALYD

SEQ ID NO: 36722 - protein, 6 aa, Artificial sequence
  Protein classification predicting sequence
SKLGDV

SEQ ID NO: 36723 - protein, 6 aa, Artificial sequence
  Protein classification predicting sequence
QGTGEE

SEQ ID NO: 36724 - protein, 6 aa, Artificial sequence
  Protein classification predicting sequence
IALRRA

SEQ ID NO: 36725 - protein, 6 aa, Artificial sequence
  Protein classification predicting sequence
YYRKRG

SEQ ID NO: 36726 - protein, 8 aa, Artificial sequence
  Protein classification predicting sequence
LISELSLL

SEQ ID NO: 36727 - protein, 7 aa, Artificial sequence
  Protein classification predicting sequence
PEGKKFD

SEQ ID NO: 36728 - protein, 6 aa, Artificial sequence
  Protein classification predicting sequence
AMTDVT

SEQ ID NO: 36729 - protein, 6 aa, Artificial sequence
  Protein classification predicting sequence
EQDVDM

SEQ ID NO: 36730 - protein, 6 aa, Artificial sequence
  Protein classification predicting sequence
TVLGHV

SEQ ID NO: 36731 - protein, 8 aa, Artificial sequence
  Protein classification predicting sequence
EENDYINS

SEQ ID NO: 36732 - protein, 7 aa, Artificial sequence
  Protein classification predicting sequence
TYFDNEA

SEQ ID NO: 36733 - protein, 6 aa, Artificial sequence
  Protein classification predicting sequence
LPKGLN

SEQ ID NO: 36734 - protein, 8 aa, Artificial sequence
  Protein classification predicting sequence
ELIRRVRR

SEQ ID NO: 36735 - protein, 7 aa, Artificial sequence
  Protein classification predicting sequence
FSTVKGV

SEQ ID NO: 36736 - protein, 7 aa, Artificial sequence
  Protein classification predicting sequence
QPSSQIA

SEQ ID NO: 36737 - protein, 6 aa, Artificial sequence
  Protein classification predicting sequence
ISSEFE

SEQ ID NO: 36738 - protein, 5 aa, Artificial sequence
  Protein classification predicting sequence
ARNCL

SEQ ID NO: 36739 - protein, 7 aa, Artificial sequence
  Protein classification predicting sequence
SEGGSKL

SEQ ID NO: 36740 - protein, 7 aa, Artificial sequence
  Protein classification predicting sequence
KMSLKEV

SEQ ID NO: 36741 - protein, 7 aa, Artificial sequence
  Protein classification predicting sequence
KDRNNRP

SEQ ID NO: 36742 - protein, 6 aa, Artificial sequence
  Protein classification predicting sequence
IPVISP

SEQ ID NO: 36743 - protein, 5 aa, Artificial sequence
  Protein classification predicting sequence
YNTRR

SEQ ID NO: 36744 - protein, 6 aa, Artificial sequence
  Protein classification predicting sequence
ELFQPF

SEQ ID NO: 36745 - protein, 6 aa, Artificial sequence
  Protein classification predicting sequence
LAYFIA

SEQ ID NO: 36746 - protein, 5 aa, Artificial sequence
  Protein classification predicting sequence
AWCFE

SEQ ID NO: 36747 - protein, 7 aa, Artificial sequence
  Protein classification predicting sequence
RAGALAG

SEQ ID NO: 36748 - protein, 6 aa, Artificial sequence
  Protein classification predicting sequence
EHTEAE

SEQ ID NO: 36749 - protein, 6 aa, Artificial sequence
  Protein classification predicting sequence
VKLGQG

SEQ ID NO: 36750 - protein, 6 aa, Artificial sequence
  Protein classification predicting sequence
GCKISP

SEQ ID NO: 36751 - protein, 6 aa, Artificial sequence
  Protein classification predicting sequence
RVFRMA

SEQ ID NO: 36752 - protein, 6 aa, Artificial sequence
  Protein classification predicting sequence
PPVAVL

SEQ ID NO: 36753 - protein, 6 aa, Artificial sequence
  Protein classification predicting sequence
DFDGDQ

SEQ ID NO: 36754 - protein, 6 aa, Artificial sequence
  Protein classification predicting sequence
DEGTAG

SEQ ID NO: 36755 - protein, 6 aa, Artificial sequence
  Protein classification predicting sequence
DKAAIF

SEQ ID NO: 36756 - protein, 6 aa, Artificial sequence
  Protein classification predicting sequence
LILLSD

SEQ ID NO: 36757 - protein, 7 aa, Artificial sequence
  Protein classification predicting sequence
AKLGPAG

SEQ ID NO: 36758 - protein, 6 aa, Artificial sequence
  Protein classification predicting sequence
DIYAMG

SEQ ID NO: 36759 - protein, 7 aa, Artificial sequence
  Protein classification predicting sequence
REEEVLT

SEQ ID NO: 36760 - protein, 6 aa, Artificial sequence
  Protein classification predicting sequence
FQDIEI

SEQ ID NO: 36761 - protein, 6 aa, Artificial sequence
  Protein classification predicting sequence
IGGGMA

SEQ ID NO: 36762 - protein, 6 aa, Artificial sequence
  Protein classification predicting sequence
NLAKQQ

SEQ ID NO: 36763 - protein, 5 aa, Artificial sequence
  Protein classification predicting sequence
TLQWK

SEQ ID NO: 36764 - protein, 6 aa, Artificial sequence
  Protein classification predicting sequence
KRAKLI

SEQ ID NO: 36765 - protein, 6 aa, Artificial sequence
  Protein classification predicting sequence
AHIVEL

SEQ ID NO: 36766 - protein, 7 aa, Artificial sequence
  Protein classification predicting sequence
EQQKLVG

SEQ ID NO: 36767 - protein, 5 aa, Artificial sequence
  Protein classification predicting sequence
IKRDR

SEQ ID NO: 36768 - protein, 6 aa, Artificial sequence
  Protein classification predicting sequence
TKGFKA

SEQ ID NO: 36769 - protein, 6 aa, Artificial sequence
  Protein classification predicting sequence
KYNAKA

SEQ ID NO: 36770 - protein, 6 aa, Artificial sequence
  Protein classification predicting sequence
AIYHGI

SEQ ID NO: 36771 - protein, 6 aa, Artificial sequence
  Protein classification predicting sequence
HNIAYQ

SEQ ID NO: 36772 - protein, 6 aa, Artificial sequence
  Protein classification predicting sequence
FPGLAV

SEQ ID NO: 36773 - protein, 7 aa, Artificial sequence
  Protein classification predicting sequence
GGGDTLA

SEQ ID NO: 36774 - protein, 7 aa, Artificial sequence
  Protein classification predicting sequence
TLAAAIA

SEQ ID NO: 36775 - protein, 6 aa, Artificial sequence
  Protein classification predicting sequence
PRPLRL

SEQ ID NO: 36776 - protein, 7 aa, Artificial sequence
  Protein classification predicting sequence
RARIDAR

SEQ ID NO: 36777 - protein, 6 aa, Artificial sequence
  Protein classification predicting sequence
PGASFF

SEQ ID NO: 36778 - protein, 6 aa, Artificial sequence
  Protein classification predicting sequence
IFEHCL

SEQ ID NO: 36779 - protein, 8 aa, Artificial sequence
  Protein classification predicting sequence
VGKIPLDV

SEQ ID NO: 36780 - protein, 5 aa, Artificial sequence
  Protein classification predicting sequence
TPVFM

SEQ ID NO: 36781 - protein, 6 aa, Artificial sequence
  Protein classification predicting sequence
PAITTR

SEQ ID NO: 36782 - protein, 6 aa, Artificial sequence
  Protein classification predicting sequence
LVKPGG

SEQ ID NO: 36783 - protein, 6 aa, Artificial sequence
  Protein classification predicting sequence
TATSHE

SEQ ID NO: 36784 - protein, 5 aa, Artificial sequence
  Protein classification predicting sequence
NMKFM

SEQ ID NO: 36785 - protein, 6 aa, Artificial sequence
  Protein classification predicting sequence
RNLIDL

SEQ ID NO: 36786 - protein, 6 aa, Artificial sequence
  Protein classification predicting sequence
IGQYLA

SEQ ID NO: 36787 - protein, 7 aa, Artificial sequence
  Protein classification predicting sequence
AVSEGFL

SEQ ID NO: 36788 - protein, 6 aa, Artificial sequence
  Protein classification predicting sequence
ITRNQP

SEQ ID NO: 36789 - protein, 6 aa, Artificial sequence
  Protein classification predicting sequence
RHHKRR

SEQ ID NO: 36790 - protein, 6 aa, Artificial sequence
  Protein classification predicting sequence
YEKIVS

SEQ ID NO: 36791 - protein, 6 aa, Artificial sequence
  Protein classification predicting sequence
FLLDGF

SEQ ID NO: 36792 - protein, 6 aa, Artificial sequence
  Protein classification predicting sequence
LHTQVS

SEQ ID NO: 36793 - protein, 6 aa, Artificial sequence
  Protein classification predicting sequence
LFQVIL

SEQ ID NO: 36794 - protein, 7 aa, Artificial sequence
  Protein classification predicting sequence
VYVEGLE

SEQ ID NO: 36795 - protein, 6 aa, Artificial sequence
  Protein classification predicting sequence
FYLFPN

SEQ ID NO: 36796 - protein, 6 aa, Artificial sequence
  Protein classification predicting sequence
YHQSVI

SEQ ID NO: 36797 - protein, 6 aa, Artificial sequence
  Protein classification predicting sequence
EMMAGR

SEQ ID NO: 36798 - protein, 6 aa, Artificial sequence
  Protein classification predicting sequence
VESQLK

SEQ ID NO: 36799 - protein, 6 aa, Artificial sequence
  Protein classification predicting sequence
SAPSGA

SEQ ID NO: 36800 - protein, 7 aa, Artificial sequence
  Protein classification predicting sequence
VVKKRNL

SEQ ID NO: 36801 - protein, 6 aa, Artificial sequence
  Protein classification predicting sequence
KSVFNS

SEQ ID NO: 36802 - protein, 7 aa, Artificial sequence
  Protein classification predicting sequence
DKIFGTK

SEQ ID NO: 36803 - protein, 7 aa, Artificial sequence
  Protein classification predicting sequence
EDLVEGV

SEQ ID NO: 36804 - protein, 7 aa, Artificial sequence
  Protein classification predicting sequence
TNISSKE

SEQ ID NO: 36805 - protein, 5 aa, Artificial sequence
  Protein classification predicting sequence
LHYAF

SEQ ID NO: 36806 - protein, 6 aa, Artificial sequence
  Protein classification predicting sequence
GLITTL

SEQ ID NO: 36807 - protein, 7 aa, Artificial sequence
  Protein classification predicting sequence
ADPSAYG

SEQ ID NO: 36808 - protein, 6 aa, Artificial sequence
  Protein classification predicting sequence
SQILHK

SEQ ID NO: 36809 - protein, 8 aa, Artificial sequence
  Protein classification predicting sequence
AAKLLGKP

SEQ ID NO: 36810 - protein, 6 aa, Artificial sequence
  Protein classification predicting sequence
SSDLRD

SEQ ID NO: 36811 - protein, 6 aa, Artificial sequence
  Protein classification predicting sequence
VAVFDT

SEQ ID NO: 36812 - protein, 6 aa, Artificial sequence
  Protein classification predicting sequence
IGLKDS

SEQ ID NO: 36813 - protein, 7 aa, Artificial sequence
  Protein classification predicting sequence
DIQVKRI

SEQ ID NO: 36814 - protein, 6 aa, Artificial sequence
  Protein classification predicting sequence
HKDAIK

SEQ ID NO: 36815 - protein, 6 aa, Artificial sequence
  Protein classification predicting sequence
QMIEDG

SEQ ID NO: 36816 - protein, 6 aa, Artificial sequence
  Protein classification predicting sequence
RLGTPA

SEQ ID NO: 36817 - protein, 6 aa, Artificial sequence
  Protein classification predicting sequence
KDGVIT

SEQ ID NO: 36818 - protein, 7 aa, Artificial sequence
  Protein classification predicting sequence
RMRQRIA

SEQ ID NO: 36819 - protein, 6 aa, Artificial sequence
  Protein classification predicting sequence
RFDGKK

SEQ ID NO: 36820 - protein, 6 aa, Artificial sequence
  Protein classification predicting sequence
VCTDME

SEQ ID NO: 36821 - protein, 7 aa, Artificial sequence
  Protein classification predicting sequence
ELTSPVA

SEQ ID NO: 36822 - protein, 6 aa, Artificial sequence
  Protein classification predicting sequence
GQYFAV

SEQ ID NO: 36823 - protein, 7 aa, Artificial sequence
  Protein classification predicting sequence
EEAEDYL

SEQ ID NO: 36824 - protein, 8 aa, Artificial sequence
  Protein classification predicting sequence
KVIAARMQ

SEQ ID NO: 36825 - protein, 7 aa, Artificial sequence
  Protein classification predicting sequence
DDLLRYK

SEQ ID NO: 36826 - protein, 7 aa, Artificial sequence
  Protein classification predicting sequence
KEAAVKA

SEQ ID NO: 36827 - protein, 6 aa, Artificial sequence
  Protein classification predicting sequence
SFRNIG

SEQ ID NO: 36828 - protein, 5 aa, Artificial sequence
  Protein classification predicting sequence
TCQNY

SEQ ID NO: 36829 - protein, 7 aa, Artificial sequence
  Protein classification predicting sequence
QRFLNRV

SEQ ID NO: 36830 - protein, 7 aa, Artificial sequence
  Protein classification predicting sequence
RIEKILN

SEQ ID NO: 36831 - protein, 6 aa, Artificial sequence
  Protein classification predicting sequence
QFTLLN

SEQ ID NO: 36832 - protein, 6 aa, Artificial sequence
  Protein classification predicting sequence
GIDIIE

SEQ ID NO: 36833 - protein, 6 aa, Artificial sequence
  Protein classification predicting sequence
QNTLGV

SEQ ID NO: 36834 - protein, 6 aa, Artificial sequence
  Protein classification predicting sequence
GVVETP

SEQ ID NO: 36835 - protein, 6 aa, Artificial sequence
  Protein classification predicting sequence
SYFGCV

SEQ ID NO: 36836 - protein, 5 aa, Artificial sequence
  Protein classification predicting sequence
DLQQP

SEQ ID NO: 36837 - protein, 6 aa, Artificial sequence
  Protein classification predicting sequence
PRVIDF

SEQ ID NO: 36838 - protein, 7 aa, Artificial sequence
  Protein classification predicting sequence
VFSLGSM

SEQ ID NO: 36839 - protein, 6 aa, Artificial sequence
  Protein classification predicting sequence
RPRPGV

SEQ ID NO: 36840 - protein, 7 aa, Artificial sequence
  Protein classification predicting sequence
RVLKNTR

SEQ ID NO: 36841 - protein, 6 aa, Artificial sequence
  Protein classification predicting sequence
NLAYQG

SEQ ID NO: 36842 - protein, 6 aa, Artificial sequence
  Protein classification predicting sequence
ISYDEM

SEQ ID NO: 36843 - protein, 6 aa, Artificial sequence
  Protein classification predicting sequence
EMLELA

SEQ ID NO: 36844 - protein, 6 aa, Artificial sequence
  Protein classification predicting sequence
CEIYSD

SEQ ID NO: 36845 - protein, 7 aa, Artificial sequence
  Protein classification predicting sequence
AALDADV

SEQ ID NO: 36846 - protein, 6 aa, Artificial sequence
  Protein classification predicting sequence
PFGAAS

SEQ ID NO: 36847 - protein, 6 aa, Artificial sequence
  Protein classification predicting sequence
DFGLAR

SEQ ID NO: 36848 - protein, 6 aa, Artificial sequence
  Protein classification predicting sequence
GSLPFD

SEQ ID NO: 36849 - protein, 7 aa, Artificial sequence
  Protein classification predicting sequence
FLTDGAS

SEQ ID NO: 36850 - protein, 5 aa, Artificial sequence
  Protein classification predicting sequence
SWLIW

SEQ ID NO: 36851 - protein, 6 aa, Artificial sequence
  Protein classification predicting sequence
WHNLNY

SEQ ID NO: 36852 - protein, 8 aa, Artificial sequence
  Protein classification predicting sequence
ADLGISLH

SEQ ID NO: 36853 - protein, 6 aa, Artificial sequence
  Protein classification predicting sequence
FADYNL

SEQ ID NO: 36854 - protein, 7 aa, Artificial sequence
  Protein classification predicting sequence
YNEEKRL

SEQ ID NO: 36855 - protein, 6 aa, Artificial sequence
  Protein classification predicting sequence
SVEERA

SEQ ID NO: 36856 - protein, 6 aa, Artificial sequence
  Protein classification predicting sequence
PRFNKV

SEQ ID NO: 36857 - protein, 6 aa, Artificial sequence
  Protein classification predicting sequence
TVLGVS

SEQ ID NO: 36858 - protein, 6 aa, Artificial sequence
  Protein classification predicting sequence
AYSFYN

SEQ ID NO: 36859 - protein, 7 aa, Artificial sequence
  Protein classification predicting sequence
VVIVDDL

SEQ ID NO: 36860 - protein, 6 aa, Artificial sequence
  Protein classification predicting sequence
VYEGDQ

SEQ ID NO: 36861 - protein, 6 aa, Artificial sequence
  Protein classification predicting sequence
FRDISP

SEQ ID NO: 36862 - protein, 8 aa, Artificial sequence
  Protein classification predicting sequence
AVLEALRE

SEQ ID NO: 36863 - protein, 6 aa, Artificial sequence
  Protein classification predicting sequence
YEKEYG

SEQ ID NO: 36864 - protein, 5 aa, Artificial sequence
  Protein classification predicting sequence
HQDAI

SEQ ID NO: 36865 - protein, 6 aa, Artificial sequence
  Protein classification predicting sequence
SNEFFK

SEQ ID NO: 36866 - protein, 6 aa, Artificial sequence
  Protein classification predicting sequence
DEAENR

SEQ ID NO: 36867 - protein, 6 aa, Artificial sequence
  Protein classification predicting sequence
DSVRAL

SEQ ID NO: 36868 - protein, 5 aa, Artificial sequence
  Protein classification predicting sequence
YGCRK

SEQ ID NO: 36869 - protein, 6 aa, Artificial sequence
  Protein classification predicting sequence
DHEIVI

SEQ ID NO: 36870 - protein, 5 aa, Artificial sequence
  Protein classification predicting sequence
NVPFQ

SEQ ID NO: 36871 - protein, 6 aa, Artificial sequence
  Protein classification predicting sequence
EKTDKA

SEQ ID NO: 36872 - protein, 5 aa, Artificial sequence
  Protein classification predicting sequence
YNYQR

SEQ ID NO: 36873 - protein, 5 aa, Artificial sequence
  Protein classification predicting sequence
DYCHS

SEQ ID NO: 36874 - protein, 7 aa, Artificial sequence
  Protein classification predicting sequence
LMDLITP

SEQ ID NO: 36875 - protein, 6 aa, Artificial sequence
  Protein classification predicting sequence
LFVLTT

SEQ ID NO: 36876 - protein, 6 aa, Artificial sequence
  Protein classification predicting sequence
IPVIAP

SEQ ID NO: 36877 - protein, 6 aa, Artificial sequence
  Protein classification predicting sequence
GGMIPK

SEQ ID NO: 36878 - protein, 6 aa, Artificial sequence
  Protein classification predicting sequence
IYDRET

SEQ ID NO: 36879 - protein, 6 aa, Artificial sequence
  Protein classification predicting sequence
LEGEFK

SEQ ID NO: 36880 - protein, 6 aa, Artificial sequence
  Protein classification predicting sequence
KHGPLA

SEQ ID NO: 36881 - protein, 6 aa, Artificial sequence
  Protein classification predicting sequence
RPLVIV

SEQ ID NO: 36882 - protein, 6 aa, Artificial sequence
  Protein classification predicting sequence
GLRVTP

SEQ ID NO: 36883 - protein, 6 aa, Artificial sequence
  Protein classification predicting sequence
HSVLLE

SEQ ID NO: 36884 - protein, 7 aa, Artificial sequence
  Protein classification predicting sequence
QISAALD

SEQ ID NO: 36885 - protein, 7 aa, Artificial sequence
  Protein classification predicting sequence
LEPLLER

SEQ ID NO: 36886 - protein, 7 aa, Artificial sequence
  Protein classification predicting sequence
STLIHKL

SEQ ID NO: 36887 - protein, 6 aa, Artificial sequence
  Protein classification predicting sequence
GLRVTD

SEQ ID NO: 36888 - protein, 6 aa, Artificial sequence
  Protein classification predicting sequence
LPTVKK

SEQ ID NO: 36889 - protein, 6 aa, Artificial sequence
  Protein classification predicting sequence
HIITMD

SEQ ID NO: 36890 - protein, 6 aa, Artificial sequence
  Protein classification predicting sequence
QGVRQL

SEQ ID NO: 36891 - protein, 6 aa, Artificial sequence
  Protein classification predicting sequence
LIATNG

SEQ ID NO: 36892 - protein, 6 aa, Artificial sequence
  Protein classification predicting sequence
ANAVLD

SEQ ID NO: 36893 - protein, 6 aa, Artificial sequence
  Protein classification predicting sequence
VIRFAP

SEQ ID NO: 36894 - protein, 6 aa, Artificial sequence
  Protein classification predicting sequence
ISRVLY

SEQ ID NO: 36895 - protein, 7 aa, Artificial sequence
  Protein classification predicting sequence
TLAKGLG

SEQ ID NO: 36896 - protein, 6 aa, Artificial sequence
  Protein classification predicting sequence
GRGSRL

SEQ ID NO: 36897 - protein, 7 aa, Artificial sequence
  Protein classification predicting sequence
TYAAVNA

SEQ ID NO: 36898 - protein, 7 aa, Artificial sequence
  Protein classification predicting sequence
YVDGFEP

SEQ ID NO: 36899 - protein, 5 aa, Artificial sequence
  Protein classification predicting sequence
NTYGT

SEQ ID NO: 36900 - protein, 6 aa, Artificial sequence
  Protein classification predicting sequence
FTAGIG

SEQ ID NO: 36901 - protein, 7 aa, Artificial sequence
  Protein classification predicting sequence
GIAVNNV

SEQ ID NO: 36902 - protein, 7 aa, Artificial sequence
  Protein classification predicting sequence
PLIIKPS

SEQ ID NO: 36903 - protein, 7 aa, Artificial sequence
  Protein classification predicting sequence
GLIVLTA

SEQ ID NO: 36904 - protein, 6 aa, Artificial sequence
  Protein classification predicting sequence
GVTVIK

SEQ ID NO: 36905 - protein, 7 aa, Artificial sequence
  Protein classification predicting sequence
LMKKLQE

SEQ ID NO: 36906 - protein, 6 aa, Artificial sequence
  Protein classification predicting sequence
LFILDE

SEQ ID NO: 36907 - protein, 6 aa, Artificial sequence
  Protein classification predicting sequence
RFVPPL

SEQ ID NO: 36908 - protein, 7 aa, Artificial sequence
  Protein classification predicting sequence
GSSGVTP

SEQ ID NO: 36909 - protein, 6 aa, Artificial sequence
  Protein classification predicting sequence
VGPEAR

SEQ ID NO: 36910 - protein, 6 aa, Artificial sequence
  Protein classification predicting sequence
ALSKGR

SEQ ID NO: 36911 - protein, 6 aa, Artificial sequence
  Protein classification predicting sequence
LPGSKS

SEQ ID NO: 36912 - protein, 6 aa, Artificial sequence
  Protein classification predicting sequence
KSISNR

SEQ ID NO: 36913 - protein, 6 aa, Artificial sequence
  Protein classification predicting sequence
DSEYFA

SEQ ID NO: 36914 - protein, 6 aa, Artificial sequence
  Protein classification predicting sequence
TVIKDA

SEQ ID NO: 36915 - protein, 7 aa, Artificial sequence
  Protein classification predicting sequence
TGCRLVM

SEQ ID NO: 36916 - protein, 7 aa, Artificial sequence
  Protein classification predicting sequence
GDTTWEN

SEQ ID NO: 36917 - protein, 6 aa, Artificial sequence
  Protein classification predicting sequence
LSQDKR

SEQ ID NO: 36918 - protein, 7 aa, Artificial sequence
  Protein classification predicting sequence
TEIEIIG

SEQ ID NO: 36919 - protein, 6 aa, Artificial sequence
  Protein classification predicting sequence
VPGDVS

SEQ ID NO: 36920 - protein, 6 aa, Artificial sequence
  Protein classification predicting sequence
YLAEDR

SEQ ID NO: 36921 - protein, 7 aa, Artificial sequence
  Protein classification predicting sequence
DAPIRVR

SEQ ID NO: 36922 - protein, 6 aa, Artificial sequence
  Protein classification predicting sequence
LMQGLE

SEQ ID NO: 36923 - protein, 6 aa, Artificial sequence
  Protein classification predicting sequence
IFRLLG

SEQ ID NO: 36924 - protein, 7 aa, Artificial sequence
  Protein classification predicting sequence
ASLFSKE

SEQ ID NO: 36925 - protein, 6 aa, Artificial sequence
  Protein classification predicting sequence
GFKIVG

SEQ ID NO: 36926 - protein, 6 aa, Artificial sequence
  Protein classification predicting sequence
DYLIVN

SEQ ID NO: 36927 - protein, 8 aa, Artificial sequence
  Protein classification predicting sequence
AASVIPGS

SEQ ID NO: 36928 - protein, 6 aa, Artificial sequence
  Protein classification predicting sequence
ETLARS

SEQ ID NO: 36929 - protein, 6 aa, Artificial sequence
  Protein classification predicting sequence
VEILNP

SEQ ID NO: 36930 - protein, 6 aa, Artificial sequence
  Protein classification predicting sequence
CGLKTR

SEQ ID NO: 36931 - protein, 6 aa, Artificial sequence
  Protein classification predicting sequence
EILNPD

SEQ ID NO: 36932 - protein, 5 aa, Artificial sequence
  Protein classification predicting sequence
TDACI

SEQ ID NO: 36933 - protein, 7 aa, Artificial sequence
  Protein classification predicting sequence
SLAQELG

SEQ ID NO: 36934 - protein, 6 aa, Artificial sequence
  Protein classification predicting sequence
IYSTFL

SEQ ID NO: 36935 - protein, 5 aa, Artificial sequence
  Protein classification predicting sequence
QVDEP

SEQ ID NO: 36936 - protein, 6 aa, Artificial sequence
  Protein classification predicting sequence
QHHIRA

SEQ ID NO: 36937 - protein, 6 aa, Artificial sequence
  Protein classification predicting sequence
GDGSLT

SEQ ID NO: 36938 - protein, 7 aa, Artificial sequence
  Protein classification predicting sequence
LTSRTYN

SEQ ID NO: 36939 - protein, 6 aa, Artificial sequence
  Protein classification predicting sequence
AAPRDA

SEQ ID NO: 36940 - protein, 6 aa, Artificial sequence
  Protein classification predicting sequence
LDVCHS

SEQ ID NO: 36941 - protein, 7 aa, Artificial sequence
  Protein classification predicting sequence
ALREICL

SEQ ID NO: 36942 - protein, 5 aa, Artificial sequence
  Protein classification predicting sequence
RSSIH

SEQ ID NO: 36943 - protein, 6 aa, Artificial sequence
  Protein classification predicting sequence
GDTGLT

SEQ ID NO: 36944 - protein, 6 aa, Artificial sequence
  Protein classification predicting sequence
DELAHS

SEQ ID NO: 36945 - protein, 7 aa, Artificial sequence
  Protein classification predicting sequence
NTNNVAP

SEQ ID NO: 36946 - protein, 6 aa, Artificial sequence
  Protein classification predicting sequence
KSISHR

SEQ ID NO: 36947 - protein, 5 aa, Artificial sequence
  Protein classification predicting sequence
SKRPM

SEQ ID NO: 36948 - protein, 5 aa, Artificial sequence
  Protein classification predicting sequence
PHNDR

SEQ ID NO: 36949 - protein, 6 aa, Artificial sequence
  Protein classification predicting sequence
RSGDRP

SEQ ID NO: 36950 - protein, 6 aa, Artificial sequence
  Protein classification predicting sequence
KAPVAV

SEQ ID NO: 36951 - protein, 9 aa, Artificial sequence
  Protein classification predicting sequence
EVPDDLVRL

SEQ ID NO: 36952 - protein, 6 aa, Artificial sequence
  Protein classification predicting sequence
VELLKT

SEQ ID NO: 36953 - protein, 7 aa, Artificial sequence
  Protein classification predicting sequence
LDRSQLD

SEQ ID NO: 36954 - protein, 6 aa, Artificial sequence
  Protein classification predicting sequence
VFNFIE

SEQ ID NO: 36955 - protein, 7 aa, Artificial sequence
  Protein classification predicting sequence
IGPEGDL

SEQ ID NO: 36956 - protein, 6 aa, Artificial sequence
  Protein classification predicting sequence
LDDPEL

SEQ ID NO: 36957 - protein, 6 aa, Artificial sequence
  Protein classification predicting sequence
KPENLL

SEQ ID NO: 36958 - protein, 6 aa, Artificial sequence
  Protein classification predicting sequence
PWVALA

SEQ ID NO: 36959 - protein, 7 aa, Artificial sequence
  Protein classification predicting sequence
IIRRYLP

SEQ ID NO: 36960 - protein, 5 aa, Artificial sequence
  Protein classification predicting sequence
RMNYV

SEQ ID NO: 36961 - protein, 7 aa, Artificial sequence
  Protein classification predicting sequence
ALSRAKS

SEQ ID NO: 36962 - protein, 6 aa, Artificial sequence
  Protein classification predicting sequence
MYAMKC

SEQ ID NO: 36963 - protein, 6 aa, Artificial sequence
  Protein classification predicting sequence
FQPVSL

SEQ ID NO: 36964 - protein, 6 aa, Artificial sequence
  Protein classification predicting sequence
VCVVIF

SEQ ID NO: 36965 - protein, 7 aa, Artificial sequence
  Protein classification predicting sequence
LDEIGGI

SEQ ID NO: 36966 - protein, 5 aa, Artificial sequence
  Protein classification predicting sequence
MMMGM

SEQ ID NO: 36967 - protein, 6 aa, Artificial sequence
  Protein classification predicting sequence
EHLRMN

SEQ ID NO: 36968 - protein, 6 aa, Artificial sequence
  Protein classification predicting sequence
HPCYTV

SEQ ID NO: 36969 - protein, 6 aa, Artificial sequence
  Protein classification predicting sequence
YHNFKD

SEQ ID NO: 36970 - protein, 6 aa, Artificial sequence
  Protein classification predicting sequence
PVEIWE

SEQ ID NO: 36971 - protein, 6 aa, Artificial sequence
  Protein classification predicting sequence
LNTSQR

SEQ ID NO: 36972 - protein, 7 aa, Artificial sequence
  Protein classification predicting sequence
LVKIPGT

SEQ ID NO: 36973 - protein, 7 aa, Artificial sequence
  Protein classification predicting sequence
LKAAKKA

SEQ ID NO: 36974 - protein, 6 aa, Artificial sequence
  Protein classification predicting sequence
HEGIQA

SEQ ID NO: 36975 - protein, 6 aa, Artificial sequence
  Protein classification predicting sequence
HARTFI

SEQ ID NO: 36976 - protein, 5 aa, Artificial sequence
  Protein classification predicting sequence
RSQWL

SEQ ID NO: 36977 - protein, 6 aa, Artificial sequence
  Protein classification predicting sequence
QMALQL

SEQ ID NO: 36978 - protein, 6 aa, Artificial sequence
  Protein classification predicting sequence
VVTSNG

SEQ ID NO: 36979 - protein, 6 aa, Artificial sequence
  Protein classification predicting sequence
NIADYD

SEQ ID NO: 36980 - protein, 6 aa, Artificial sequence
  Protein classification predicting sequence
LGYIMS

SEQ ID NO: 36981 - protein, 5 aa, Artificial sequence
  Protein classification predicting sequence
NYHKR

SEQ ID NO: 36982 - protein, 5 aa, Artificial sequence
  Protein classification predicting sequence
LGYWD

SEQ ID NO: 36983 - protein, 7 aa, Artificial sequence
  Protein classification predicting sequence
QDIIKKV

SEQ ID NO: 36984 - protein, 6 aa, Artificial sequence
  Protein classification predicting sequence
QFTKID

SEQ ID NO: 36985 - protein, 6 aa, Artificial sequence
  Protein classification predicting sequence
MFNTPP

SEQ ID NO: 36986 - protein, 6 aa, Artificial sequence
  Protein classification predicting sequence
EIHEQP

SEQ ID NO: 36987 - protein, 5 aa, Artificial sequence
  Protein classification predicting sequence
PANCV

SEQ ID NO: 36988 - protein, 5 aa, Artificial sequence
  Protein classification predicting sequence
GYNMV

SEQ ID NO: 36989 - protein, 5 aa, Artificial sequence
  Protein classification predicting sequence
VHYVS

SEQ ID NO: 36990 - protein, 5 aa, Artificial sequence
  Protein classification predicting sequence
FLSMD

SEQ ID NO: 36991 - protein, 5 aa, Artificial sequence
  Protein classification predicting sequence
YRAPE

SEQ ID NO: 36992 - protein, 6 aa, Artificial sequence
  Protein classification predicting sequence
ILEGIL

SEQ ID NO: 36993 - protein, 6 aa, Artificial sequence
  Protein classification predicting sequence
MDLKKY

SEQ ID NO: 36994 - protein, 6 aa, Artificial sequence
  Protein classification predicting sequence
PQKRSS

SEQ ID NO: 36995 - protein, 7 aa, Artificial sequence
  Protein classification predicting sequence
FDTESEA

SEQ ID NO: 36996 - protein, 7 aa, Artificial sequence
  Protein classification predicting sequence
SVKEFEK

SEQ ID NO: 36997 - protein, 6 aa, Artificial sequence
  Protein classification predicting sequence
LQGLAF

SEQ ID NO: 36998 - protein, 7 aa, Artificial sequence
  Protein classification predicting sequence
NKLTGEV

SEQ ID NO: 36999 - protein, 5 aa, Artificial sequence
  Protein classification predicting sequence
YLHHL

SEQ ID NO: 37000 - protein, 6 aa, Artificial sequence
  Protein classification predicting sequence
FNEQYK

SEQ ID NO: 37001 - protein, 6 aa, Artificial sequence
  Protein classification predicting sequence
SIGKRP

SEQ ID NO: 37002 - protein, 6 aa, Artificial sequence
  Protein classification predicting sequence
LLLSYV

SEQ ID NO: 37003 - protein, 6 aa, Artificial sequence
  Protein classification predicting sequence
ESTFKR

SEQ ID NO: 37004 - protein, 7 aa, Artificial sequence
  Protein classification predicting sequence
GGFLMAL

SEQ ID NO: 37005 - protein, 5 aa, Artificial sequence
  Protein classification predicting sequence
LVMHD

SEQ ID NO: 37006 - protein, 8 aa, Artificial sequence
  Protein classification predicting sequence
TFKGIKLA

SEQ ID NO: 37007 - protein, 5 aa, Artificial sequence
  Protein classification predicting sequence
HNDNK

SEQ ID NO: 37008 - protein, 5 aa, Artificial sequence
  Protein classification predicting sequence
RHFMQ

SEQ ID NO: 37009 - protein, 8 aa, Artificial sequence
  Protein classification predicting sequence
YNLLPEKS

SEQ ID NO: 37010 - protein, 5 aa, Artificial sequence
  Protein classification predicting sequence
WSAGC

SEQ ID NO: 37011 - protein, 6 aa, Artificial sequence
  Protein classification predicting sequence
GPPGAG

SEQ ID NO: 37012 - protein, 6 aa, Artificial sequence
  Protein classification predicting sequence
DNERSY

SEQ ID NO: 37013 - protein, 7 aa, Artificial sequence
  Protein classification predicting sequence
LKISDFG

SEQ ID NO: 37014 - protein, 6 aa, Artificial sequence
  Protein classification predicting sequence
GVRRGI

SEQ ID NO: 37015 - protein, 5 aa, Artificial sequence
  Protein classification predicting sequence
CVLFI

SEQ ID NO: 37016 - protein, 6 aa, Artificial sequence
  Protein classification predicting sequence
SYLYQP

SEQ ID NO: 37017 - protein, 6 aa, Artificial sequence
  Protein classification predicting sequence
TGTFEF

SEQ ID NO: 37018 - protein, 6 aa, Artificial sequence
  Protein classification predicting sequence
IGVLTS

SEQ ID NO: 37019 - protein, 6 aa, Artificial sequence
  Protein classification predicting sequence
GVYQDG

SEQ ID NO: 37020 - protein, 7 aa, Artificial sequence
  Protein classification predicting sequence
TELKEKF

SEQ ID NO: 37021 - protein, 7 aa, Artificial sequence
  Protein classification predicting sequence
LGLRPSV

SEQ ID NO: 37022 - protein, 7 aa, Artificial sequence
  Protein classification predicting sequence
GRFGGNL

SEQ ID NO: 37023 - protein, 6 aa, Artificial sequence
  Protein classification predicting sequence
GLPASP

SEQ ID NO: 37024 - protein, 7 aa, Artificial sequence
  Protein classification predicting sequence
PEEKEEK

SEQ ID NO: 37025 - protein, 6 aa, Artificial sequence
  Protein classification predicting sequence
FRNELF

SEQ ID NO: 37026 - protein, 6 aa, Artificial sequence
  Protein classification predicting sequence
IVGSDP

SEQ ID NO: 37027 - protein, 6 aa, Artificial sequence
  Protein classification predicting sequence
IIGSDP

SEQ ID NO: 37028 - protein, 6 aa, Artificial sequence
  Protein classification predicting sequence
SKTEHK

SEQ ID NO: 37029 - protein, 7 aa, Artificial sequence
  Protein classification predicting sequence
EELGKLG

SEQ ID NO: 37030 - protein, 6 aa, Artificial sequence
  Protein classification predicting sequence
GRGKYS

SEQ ID NO: 37031 - protein, 6 aa, Artificial sequence
  Protein classification predicting sequence
TCDPTD

SEQ ID NO: 37032 - protein, 6 aa, Artificial sequence
  Protein classification predicting sequence
PGDKSI

SEQ ID NO: 37033 - protein, 7 aa, Artificial sequence
  Protein classification predicting sequence
FELAAKR

SEQ ID NO: 37034 - protein, 5 aa, Artificial sequence
  Protein classification predicting sequence
YPDYY

SEQ ID NO: 37035 - protein, 5 aa, Artificial sequence
  Protein classification predicting sequence
ERPLF

SEQ ID NO: 37036 - protein, 7 aa, Artificial sequence
  Protein classification predicting sequence
KEAASKA

SEQ ID NO: 37037 - protein, 5 aa, Artificial sequence
  Protein classification predicting sequence
YGNMS

SEQ ID NO: 37038 - protein, 6 aa, Artificial sequence
  Protein classification predicting sequence
TTRKPR

SEQ ID NO: 37039 - protein, 5 aa, Artificial sequence
  Protein classification predicting sequence
KRYMH

SEQ ID NO: 37040 - protein, 6 aa, Artificial sequence
  Protein classification predicting sequence
FDEEFT

SEQ ID NO: 37041 - protein, 6 aa, Artificial sequence
  Protein classification predicting sequence
MLPTFV

SEQ ID NO: 37042 - protein, 6 aa, Artificial sequence
  Protein classification predicting sequence
GPQLVV

SEQ ID NO: 37043 - protein, 7 aa, Artificial sequence
  Protein classification predicting sequence
LLTGEIP

SEQ ID NO: 37044 - protein, 7 aa, Artificial sequence
  Protein classification predicting sequence
VHLLLEG

SEQ ID NO: 37045 - protein, 6 aa, Artificial sequence
  Protein classification predicting sequence
NITNEG

SEQ ID NO: 37046 - protein, 6 aa, Artificial sequence
  Protein classification predicting sequence
ECQKVL

SEQ ID NO: 37047 - protein, 6 aa, Artificial sequence
  Protein classification predicting sequence
KDVLAS

SEQ ID NO: 37048 - protein, 6 aa, Artificial sequence
  Protein classification predicting sequence
LANQLG

SEQ ID NO: 37049 - protein, 6 aa, Artificial sequence
  Protein classification predicting sequence
VSQREF

SEQ ID NO: 37050 - protein, 6 aa, Artificial sequence
  Protein classification predicting sequence
AHITVN

SEQ ID NO: 37051 - protein, 6 aa, Artificial sequence
  Protein classification predicting sequence
AKVKDK

SEQ ID NO: 37052 - protein, 6 aa, Artificial sequence
  Protein classification predicting sequence
KLVSNI

SEQ ID NO: 37053 - protein, 6 aa, Artificial sequence
  Protein classification predicting sequence
PVLARA

SEQ ID NO: 37054 - protein, 6 aa, Artificial sequence
  Protein classification predicting sequence
NFLYML

SEQ ID NO: 37055 - protein, 7 aa, Artificial sequence
  Protein classification predicting sequence
ANEAALK

SEQ ID NO: 37056 - protein, 6 aa, Artificial sequence
  Protein classification predicting sequence
QMPTEE

SEQ ID NO: 37057 - protein, 5 aa, Artificial sequence
  Protein classification predicting sequence
MFNTP

SEQ ID NO: 37058 - protein, 6 aa, Artificial sequence
  Protein classification predicting sequence
PMSVLR

SEQ ID NO: 37059 - protein, 7 aa, Artificial sequence
  Protein classification predicting sequence
VLDTIYL

SEQ ID NO: 37060 - protein, 6 aa, Artificial sequence
  Protein classification predicting sequence
EKAISI

SEQ ID NO: 37061 - protein, 6 aa, Artificial sequence
  Protein classification predicting sequence
MALLYL

SEQ ID NO: 37062 - protein, 5 aa, Artificial sequence
  Protein classification predicting sequence
GSHQD

SEQ ID NO: 37063 - protein, 5 aa, Artificial sequence
  Protein classification predicting sequence
QQQLI

SEQ ID NO: 37064 - protein, 6 aa, Artificial sequence
  Protein classification predicting sequence
RDPQSF

SEQ ID NO: 37065 - protein, 7 aa, Artificial sequence
  Protein classification predicting sequence
ALLSRWP

SEQ ID NO: 37066 - protein, 6 aa, Artificial sequence
  Protein classification predicting sequence
IFVDAD

SEQ ID NO: 37067 - protein, 7 aa, Artificial sequence
  Protein classification predicting sequence
KLSKEEA

SEQ ID NO: 37068 - protein, 7 aa, Artificial sequence
  Protein classification predicting sequence
VEVVSFD

SEQ ID NO: 37069 - protein, 6 aa, Artificial sequence
  Protein classification predicting sequence
VPKHVE

SEQ ID NO: 37070 - protein, 7 aa, Artificial sequence
  Protein classification predicting sequence
AKGEIDR

SEQ ID NO: 37071 - protein, 6 aa, Artificial sequence
  Protein classification predicting sequence
IIRGLR

SEQ ID NO: 37072 - protein, 7 aa, Artificial sequence
  Protein classification predicting sequence
PEISTVF

SEQ ID NO: 37073 - protein, 5 aa, Artificial sequence
  Protein classification predicting sequence
GMFDV

SEQ ID NO: 37074 - protein, 6 aa, Artificial sequence
  Protein classification predicting sequence
SFLSSS

SEQ ID NO: 37075 - protein, 6 aa, Artificial sequence
  Protein classification predicting sequence
KQGIQV

SEQ ID NO: 37076 - protein, 6 aa, Artificial sequence
  Protein classification predicting sequence
ATSPYV

SEQ ID NO: 37077 - protein, 6 aa, Artificial sequence
  Protein classification predicting sequence
SGKSTV

SEQ ID NO: 37078 - protein, 6 aa, Artificial sequence
  Protein classification predicting sequence
KNIINL

SEQ ID NO: 37079 - protein, 6 aa, Artificial sequence
  Protein classification predicting sequence
AIDRAK

SEQ ID NO: 37080 - protein, 6 aa, Artificial sequence
  Protein classification predicting sequence
FIITST

SEQ ID NO: 37081 - protein, 5 aa, Artificial sequence
  Protein classification predicting sequence
GPPCS

SEQ ID NO: 37082 - protein, 6 aa, Artificial sequence
  Protein classification predicting sequence
WCLQVN

SEQ ID NO: 37083 - protein, 7 aa, Artificial sequence
  Protein classification predicting sequence
QRAALAA

SEQ ID NO: 37084 - protein, 8 aa, Artificial sequence
  Protein classification predicting sequence
AGERAVAR

SEQ ID NO: 37085 - protein, 7 aa, Artificial sequence
  Protein classification predicting sequence
EVVEGVI

SEQ ID NO: 37086 - protein, 6 aa, Artificial sequence
  Protein classification predicting sequence
TGSFGR

SEQ ID NO: 37087 - protein, 8 aa, Artificial sequence
  Protein classification predicting sequence
LTPVEGVE

SEQ ID NO: 37088 - protein, 6 aa, Artificial sequence
  Protein classification predicting sequence
GNTSSA

SEQ ID NO: 37089 - protein, 7 aa, Artificial sequence
  Protein classification predicting sequence
QLLAAVG

SEQ ID NO: 37090 - protein, 5 aa, Artificial sequence
  Protein classification predicting sequence
DWWLA

SEQ ID NO: 37091 - protein, 7 aa, Artificial sequence
  Protein classification predicting sequence
PVVRPRV

SEQ ID NO: 37092 - protein, 7 aa, Artificial sequence
  Protein classification predicting sequence
QVALQLA

SEQ ID NO: 37093 - protein, 5 aa, Artificial sequence
  Protein classification predicting sequence
LKNCY

SEQ ID NO: 37094 - protein, 7 aa, Artificial sequence
  Protein classification predicting sequence
LRLLASY

SEQ ID NO: 37095 - protein, 6 aa, Artificial sequence
  Protein classification predicting sequence
TGAVIN

SEQ ID NO: 37096 - protein, 5 aa, Artificial sequence
  Protein classification predicting sequence
FNKAC

SEQ ID NO: 37097 - protein, 7 aa, Artificial sequence
  Protein classification predicting sequence
RTLADGK

SEQ ID NO: 37098 - protein, 5 aa, Artificial sequence
  Protein classification predicting sequence
AFNTY

SEQ ID NO: 37099 - protein, 5 aa, Artificial sequence
  Protein classification predicting sequence
DIGCG

SEQ ID NO: 37100 - protein, 7 aa, Artificial sequence
  Protein classification predicting sequence
SADVLEA

SEQ ID NO: 37101 - protein, 6 aa, Artificial sequence
  Protein classification predicting sequence
PLLGMK

SEQ ID NO: 37102 - protein, 6 aa, Artificial sequence
  Protein classification predicting sequence
DSPFLK

SEQ ID NO: 37103 - protein, 6 aa, Artificial sequence
  Protein classification predicting sequence
SCPETD

SEQ ID NO: 37104 - protein, 6 aa, Artificial sequence
  Protein classification predicting sequence
QIPQSQ

SEQ ID NO: 37105 - protein, 8 aa, Artificial sequence
  Protein classification predicting sequence
FTVTPEGV

SEQ ID NO: 37106 - protein, 6 aa, Artificial sequence
  Protein classification predicting sequence
RQKFFS

SEQ ID NO: 37107 - protein, 5 aa, Artificial sequence
  Protein classification predicting sequence
YIRHL

SEQ ID NO: 37108 - protein, 6 aa, Artificial sequence
  Protein classification predicting sequence
FLSRQT

SEQ ID NO: 37109 - protein, 5 aa, Artificial sequence
  Protein classification predicting sequence
TDSHR

SEQ ID NO: 37110 - protein, 6 aa, Artificial sequence
  Protein classification predicting sequence
PDPKSE

SEQ ID NO: 37111 - protein, 7 aa, Artificial sequence
  Protein classification predicting sequence
VSDGFGV

SEQ ID NO: 37112 - protein, 5 aa, Artificial sequence
  Protein classification predicting sequence
FHLNP

SEQ ID NO: 37113 - protein, 6 aa, Artificial sequence
  Protein classification predicting sequence
FHLNPS

SEQ ID NO: 37114 - protein, 7 aa, Artificial sequence
  Protein classification predicting sequence
ALKAGIT

SEQ ID NO: 37115 - protein, 5 aa, Artificial sequence
  Protein classification predicting sequence
HYGEH

SEQ ID NO: 37116 - protein, 5 aa, Artificial sequence
  Protein classification predicting sequence
SDVWS

SEQ ID NO: 37117 - protein, 5 aa, Artificial sequence
  Protein classification predicting sequence
NDTHP

SEQ ID NO: 37118 - protein, 7 aa, Artificial sequence
  Protein classification predicting sequence
ACCEPGD

SEQ ID NO: 37119 - protein, 6 aa, Artificial sequence
  Protein classification predicting sequence
ENQHLV

SEQ ID NO: 37120 - protein, 5 aa, Artificial sequence
  Protein classification predicting sequence
ENQHL

SEQ ID NO: 37121 - protein, 5 aa, Artificial sequence
  Protein classification predicting sequence
VFGYQ

SEQ ID NO: 37122 - protein, 5 aa, Artificial sequence
  Protein classification predicting sequence
RYKFY

SEQ ID NO: 37123 - protein, 7 aa, Artificial sequence
  Protein classification predicting sequence
IDTSKGD

SEQ ID NO: 37124 - protein, 6 aa, Artificial sequence
  Protein classification predicting sequence
RISNFL

SEQ ID NO: 37125 - protein, 6 aa, Artificial sequence
  Protein classification predicting sequence
RFYFIA

SEQ ID NO: 37126 - protein, 6 aa, Artificial sequence
  Protein classification predicting sequence
QSIREE

SEQ ID NO: 37127 - protein, 6 aa, Artificial sequence
  Protein classification predicting sequence
GAGFIP

SEQ ID NO: 37128 - protein, 6 aa, Artificial sequence
  Protein classification predicting sequence
KKTPDS

SEQ ID NO: 37129 - protein, 6 aa, Artificial sequence
  Protein classification predicting sequence
QLDAFV

SEQ ID NO: 37130 - protein, 6 aa, Artificial sequence
  Protein classification predicting sequence
GVGTGG

SEQ ID NO: 37131 - protein, 6 aa, Artificial sequence
  Protein classification predicting sequence
DVGTLD

SEQ ID NO: 37132 - protein, 6 aa, Artificial sequence
  Protein classification predicting sequence
GNTPLV

SEQ ID NO: 37133 - protein, 6 aa, Artificial sequence
  Protein classification predicting sequence
ILTLFP

SEQ ID NO: 37134 - protein, 6 aa, Artificial sequence
  Protein classification predicting sequence
AQQQHK

SEQ ID NO: 37135 - protein, 7 aa, Artificial sequence
  Protein classification predicting sequence
LASRGLS

SEQ ID NO: 37136 - protein, 5 aa, Artificial sequence
  Protein classification predicting sequence
DVPPY

SEQ ID NO: 37137 - protein, 7 aa, Artificial sequence
  Protein classification predicting sequence
EYKINPV

SEQ ID NO: 37138 - protein, 7 aa, Artificial sequence
  Protein classification predicting sequence
LTSLLAQ

SEQ ID NO: 37139 - protein, 5 aa, Artificial sequence
  Protein classification predicting sequence
RLNPM

SEQ ID NO: 37140 - protein, 6 aa, Artificial sequence
  Protein classification predicting sequence
FENKSE

SEQ ID NO: 37141 - protein, 6 aa, Artificial sequence
  Protein classification predicting sequence
RVVPPA

SEQ ID NO: 37142 - protein, 6 aa, Artificial sequence
  Protein classification predicting sequence
SFRMED

SEQ ID NO: 37143 - protein, 5 aa, Artificial sequence
  Protein classification predicting sequence
TIDTW

SEQ ID NO: 37144 - protein, 6 aa, Artificial sequence
  Protein classification predicting sequence
HDAVEV

SEQ ID NO: 37145 - protein, 6 aa, Artificial sequence
  Protein classification predicting sequence
VGTRFH

SEQ ID NO: 37146 - protein, 6 aa, Artificial sequence
  Protein classification predicting sequence
AKKKDS

SEQ ID NO: 37147 - protein, 5 aa, Artificial sequence
  Protein classification predicting sequence
GMMFG

SEQ ID NO: 37148 - protein, 7 aa, Artificial sequence
  Protein classification predicting sequence
DYAAIAD

SEQ ID NO: 37149 - protein, 7 aa, Artificial sequence
  Protein classification predicting sequence
ARYIAKN

SEQ ID NO: 37150 - protein, 7 aa, Artificial sequence
  Protein classification predicting sequence
MATGAST

SEQ ID NO: 37151 - protein, 6 aa, Artificial sequence
  Protein classification predicting sequence
GDGRHA

SEQ ID NO: 37152 - protein, 8 aa, Artificial sequence
  Protein classification predicting sequence
YDSLDKAL

SEQ ID NO: 37153 - protein, 6 aa, Artificial sequence
  Protein classification predicting sequence
VFAEVN

SEQ ID NO: 37154 - protein, 7 aa, Artificial sequence
  Protein classification predicting sequence
CIAAGIA

SEQ ID NO: 37155 - protein, 7 aa, Artificial sequence
  Protein classification predicting sequence
PENILLD

SEQ ID NO: 37156 - protein, 7 aa, Artificial sequence
  Protein classification predicting sequence
QVRGYDF

SEQ ID NO: 37157 - protein, 6 aa, Artificial sequence
  Protein classification predicting sequence
DGSLGD

SEQ ID NO: 37158 - protein, 6 aa, Artificial sequence
  Protein classification predicting sequence
LGEIIT

SEQ ID NO: 37159 - protein, 6 aa, Artificial sequence
  Protein classification predicting sequence
KYPESD

SEQ ID NO: 37160 - protein, 7 aa, Artificial sequence
  Protein classification predicting sequence
KVQRSIS

SEQ ID NO: 37161 - protein, 6 aa, Artificial sequence
  Protein classification predicting sequence
HLPEAR

SEQ ID NO: 37162 - protein, 6 aa, Artificial sequence
  Protein classification predicting sequence
GPGDTS

SEQ ID NO: 37163 - protein, 8 aa, Artificial sequence
  Protein classification predicting sequence
PWSSPASV

SEQ ID NO: 37164 - protein, 6 aa, Artificial sequence
  Protein classification predicting sequence
DQEGMD

SEQ ID NO: 37165 - protein, 6 aa, Artificial sequence
  Protein classification predicting sequence
HHRVGE

SEQ ID NO: 37166 - protein, 6 aa, Artificial sequence
  Protein classification predicting sequence
LKDVPG

SEQ ID NO: 37167 - protein, 6 aa, Artificial sequence
  Protein classification predicting sequence
QTEFQK

SEQ ID NO: 37168 - protein, 6 aa, Artificial sequence
  Protein classification predicting sequence
KGGFVS

SEQ ID NO: 37169 - protein, 6 aa, Artificial sequence
  Protein classification predicting sequence
FDVRRV

SEQ ID NO: 37170 - protein, 7 aa, Artificial sequence
  Protein classification predicting sequence
PGEGLFT

SEQ ID NO: 37171 - protein, 6 aa, Artificial sequence
  Protein classification predicting sequence
PNARFV

SEQ ID NO: 37172 - protein, 6 aa, Artificial sequence
  Protein classification predicting sequence
TQSQQF

SEQ ID NO: 37173 - protein, 6 aa, Artificial sequence
  Protein classification predicting sequence
IVFPTV

SEQ ID NO: 37174 - protein, 6 aa, Artificial sequence
  Protein classification predicting sequence
PAVGED

SEQ ID NO: 37175 - protein, 6 aa, Artificial sequence
  Protein classification predicting sequence
SYPKVR

SEQ ID NO: 37176 - protein, 7 aa, Artificial sequence
  Protein classification predicting sequence
EMIEKLG

SEQ ID NO: 37177 - protein, 6 aa, Artificial sequence
  Protein classification predicting sequence
VSKNID

SEQ ID NO: 37178 - protein, 6 aa, Artificial sequence
  Protein classification predicting sequence
KANRSS

SEQ ID NO: 37179 - protein, 6 aa, Artificial sequence
  Protein classification predicting sequence
KAPIAI

SEQ ID NO: 37180 - protein, 6 aa, Artificial sequence
  Protein classification predicting sequence
LFQLVS

SEQ ID NO: 37181 - protein, 6 aa, Artificial sequence
  Protein classification predicting sequence
GESFNL

SEQ ID NO: 37182 - protein, 6 aa, Artificial sequence
  Protein classification predicting sequence
LMTGQL

SEQ ID NO: 37183 - protein, 6 aa, Artificial sequence
  Protein classification predicting sequence
IIDTYG

SEQ ID NO: 37184 - protein, 6 aa, Artificial sequence
  Protein classification predicting sequence
ENAIIY

SEQ ID NO: 37185 - protein, 7 aa, Artificial sequence
  Protein classification predicting sequence
INASNFY

SEQ ID NO: 37186 - protein, 5 aa, Artificial sequence
  Protein classification predicting sequence
YSFQT

SEQ ID NO: 37187 - protein, 6 aa, Artificial sequence
  Protein classification predicting sequence
DLENAL

SEQ ID NO: 37188 - protein, 7 aa, Artificial sequence
  Protein classification predicting sequence
ELYFSDV

SEQ ID NO: 37189 - protein, 6 aa, Artificial sequence
  Protein classification predicting sequence
EIIFTS

SEQ ID NO: 37190 - protein, 6 aa, Artificial sequence
  Protein classification predicting sequence
VTGEDL

SEQ ID NO: 37191 - protein, 6 aa, Artificial sequence
  Protein classification predicting sequence
LQPTND

SEQ ID NO: 37192 - protein, 5 aa, Artificial sequence
  Protein classification predicting sequence
WRGAA

SEQ ID NO: 37193 - protein, 6 aa, Artificial sequence
  Protein classification predicting sequence
LTEVRK

SEQ ID NO: 37194 - protein, 6 aa, Artificial sequence
  Protein classification predicting sequence
AVFPGL

SEQ ID NO: 37195 - protein, 8 aa, Artificial sequence
  Protein classification predicting sequence
TGEPAAAA

SEQ ID NO: 37196 - protein, 6 aa, Artificial sequence
  Protein classification predicting sequence
AIDKIR

SEQ ID NO: 37197 - protein, 6 aa, Artificial sequence
  Protein classification predicting sequence
NKFLAK

SEQ ID NO: 37198 - protein, 7 aa, Artificial sequence
  Protein classification predicting sequence
SFSGLEE

SEQ ID NO: 37199 - protein, 7 aa, Artificial sequence
  Protein classification predicting sequence
FNKLSAK

SEQ ID NO: 37200 - protein, 6 aa, Artificial sequence
  Protein classification predicting sequence
SESVSE

SEQ ID NO: 37201 - protein, 6 aa, Artificial sequence
  Protein classification predicting sequence
KFHGVG

SEQ ID NO: 37202 - protein, 5 aa, Artificial sequence
  Protein classification predicting sequence
VTIMQ

SEQ ID NO: 37203 - protein, 5 aa, Artificial sequence
  Protein classification predicting sequence
STFQE

SEQ ID NO: 37204 - protein, 6 aa, Artificial sequence
  Protein classification predicting sequence
PDFSAT

SEQ ID NO: 37205 - protein, 5 aa, Artificial sequence
  Protein classification predicting sequence
WQKFA

SEQ ID NO: 37206 - protein, 6 aa, Artificial sequence
  Protein classification predicting sequence
GPVSYL

SEQ ID NO: 37207 - protein, 6 aa, Artificial sequence
  Protein classification predicting sequence
IAGKKL

SEQ ID NO: 37208 - protein, 5 aa, Artificial sequence
  Protein classification predicting sequence
IVFHN

SEQ ID NO: 37209 - protein, 6 aa, Artificial sequence
  Protein classification predicting sequence
YDYSTA

SEQ ID NO: 37210 - protein, 6 aa, Artificial sequence
  Protein classification predicting sequence
DSLQYI

SEQ ID NO: 37211 - protein, 6 aa, Artificial sequence
  Protein classification predicting sequence
EGFYKR

SEQ ID NO: 37212 - protein, 6 aa, Artificial sequence
  Protein classification predicting sequence
TDVDKT

SEQ ID NO: 37213 - protein, 6 aa, Artificial sequence
  Protein classification predicting sequence
HKLGVT

SEQ ID NO: 37214 - protein, 7 aa, Artificial sequence
  Protein classification predicting sequence
LASGRTY

SEQ ID NO: 37215 - protein, 6 aa, Artificial sequence
  Protein classification predicting sequence
NAPSYT

SEQ ID NO: 37216 - protein, 5 aa, Artificial sequence
  Protein classification predicting sequence
YSDFH

SEQ ID NO: 37217 - protein, 6 aa, Artificial sequence
  Protein classification predicting sequence
DQFAKE

SEQ ID NO: 37218 - protein, 6 aa, Artificial sequence
  Protein classification predicting sequence
TMAGGL

SEQ ID NO: 37219 - protein, 6 aa, Artificial sequence
  Protein classification predicting sequence
RSVGGM

SEQ ID NO: 37220 - protein, 7 aa, Artificial sequence
  Protein classification predicting sequence
ELLDRIL

SEQ ID NO: 37221 - protein, 7 aa, Artificial sequence
  Protein classification predicting sequence
TGRGEKI

SEQ ID NO: 37222 - protein, 6 aa, Artificial sequence
  Protein classification predicting sequence
AGGAGS

SEQ ID NO: 37223 - protein, 6 aa, Artificial sequence
  Protein classification predicting sequence
IDLIFA

SEQ ID NO: 37224 - protein, 6 aa, Artificial sequence
  Protein classification predicting sequence
AEIDDR

SEQ ID NO: 37225 - protein, 6 aa, Artificial sequence
  Protein classification predicting sequence
IGLTSD

SEQ ID NO: 37226 - protein, 7 aa, Artificial sequence
  Protein classification predicting sequence
GDGSLTG

SEQ ID NO: 37227 - protein, 6 aa, Artificial sequence
  Protein classification predicting sequence
EALNNI

SEQ ID NO: 37228 - protein, 5 aa, Artificial sequence
  Protein classification predicting sequence
ESEYD

SEQ ID NO: 37229 - protein, 7 aa, Artificial sequence
  Protein classification predicting sequence
LGGRRED

SEQ ID NO: 37230 - protein, 6 aa, Artificial sequence
  Protein classification predicting sequence
GHASTS

SEQ ID NO: 37231 - protein, 6 aa, Artificial sequence
  Protein classification predicting sequence
IIGDGA

SEQ ID NO: 37232 - protein, 6 aa, Artificial sequence
  Protein classification predicting sequence
TRSKAG

SEQ ID NO: 37233 - protein, 6 aa, Artificial sequence
  Protein classification predicting sequence
PTEAYS

SEQ ID NO: 37234 - protein, 6 aa, Artificial sequence
  Protein classification predicting sequence
RINYPA

SEQ ID NO: 37235 - protein, 6 aa, Artificial sequence
  Protein classification predicting sequence
IKKEEF

SEQ ID NO: 37236 - protein, 6 aa, Artificial sequence
  Protein classification predicting sequence
TTGLVL

SEQ ID NO: 37237 - protein, 6 aa, Artificial sequence
  Protein classification predicting sequence
LGMAVA

SEQ ID NO: 37238 - protein, 7 aa, Artificial sequence
  Protein classification predicting sequence
VLCNLLA

SEQ ID NO: 37239 - protein, 6 aa, Artificial sequence
  Protein classification predicting sequence
ASEVGS

SEQ ID NO: 37240 - protein, 5 aa, Artificial sequence
  Protein classification predicting sequence
RMHTI

SEQ ID NO: 37241 - protein, 6 aa, Artificial sequence
  Protein classification predicting sequence
ESEYDT

SEQ ID NO: 37242 - protein, 5 aa, Artificial sequence
  Protein classification predicting sequence
GYEPA

SEQ ID NO: 37243 - protein, 6 aa, Artificial sequence
  Protein classification predicting sequence
GRYHNF

SEQ ID NO: 37244 - protein, 6 aa, Artificial sequence
  Protein classification predicting sequence
GMALEA

SEQ ID NO: 37245 - protein, 6 aa, Artificial sequence
  Protein classification predicting sequence
KARSRE

SEQ ID NO: 37246 - protein, 6 aa, Artificial sequence
  Protein classification predicting sequence
GKGYMF

SEQ ID NO: 37247 - protein, 6 aa, Artificial sequence
  Protein classification predicting sequence
IYPERF

SEQ ID NO: 37248 - protein, 8 aa, Artificial sequence
  Protein classification predicting sequence
GEELLRLA

SEQ ID NO: 37249 - protein, 6 aa, Artificial sequence
  Protein classification predicting sequence
RDQMPT

SEQ ID NO: 37250 - protein, 6 aa, Artificial sequence
  Protein classification predicting sequence
IMNLPV

SEQ ID NO: 37251 - protein, 7 aa, Artificial sequence
  Protein classification predicting sequence
GGAGSGV

SEQ ID NO: 37252 - protein, 6 aa, Artificial sequence
  Protein classification predicting sequence
AYIERM

SEQ ID NO: 37253 - protein, 7 aa, Artificial sequence
  Protein classification predicting sequence
AKGARLH

SEQ ID NO: 37254 - protein, 6 aa, Artificial sequence
  Protein classification predicting sequence
SDDTFE

SEQ ID NO: 37255 - protein, 6 aa, Artificial sequence
  Protein classification predicting sequence
TLEAYW

SEQ ID NO: 37256 - protein, 6 aa, Artificial sequence
  Protein classification predicting sequence
FPSLQG

SEQ ID NO: 37257 - protein, 6 aa, Artificial sequence
  Protein classification predicting sequence
FVNRAN

SEQ ID NO: 37258 - protein, 5 aa, Artificial sequence
  Protein classification predicting sequence
CHNDL

SEQ ID NO: 37259 - protein, 6 aa, Artificial sequence
  Protein classification predicting sequence
LRLAKD

SEQ ID NO: 37260 - protein, 7 aa, Artificial sequence
  Protein classification predicting sequence
QNGLKTT

SEQ ID NO: 37261 - protein, 6 aa, Artificial sequence
  Protein classification predicting sequence
WTMSNQ

SEQ ID NO: 37262 - protein, 6 aa, Artificial sequence
  Protein classification predicting sequence
GEAERN

SEQ ID NO: 37263 - protein, 6 aa, Artificial sequence
  Protein classification predicting sequence
QDVIKA

SEQ ID NO: 37264 - protein, 5 aa, Artificial sequence
  Protein classification predicting sequence
HIKLP

SEQ ID NO: 37265 - protein, 6 aa, Artificial sequence
  Protein classification predicting sequence
KVDTIA

SEQ ID NO: 37266 - protein, 6 aa, Artificial sequence
  Protein classification predicting sequence
LDCWVR

SEQ ID NO: 37267 - protein, 6 aa, Artificial sequence
  Protein classification predicting sequence
FAKEID

SEQ ID NO: 37268 - protein, 5 aa, Artificial sequence
  Protein classification predicting sequence
MEFEP

SEQ ID NO: 37269 - protein, 6 aa, Artificial sequence
  Protein classification predicting sequence
AKRDHL

SEQ ID NO: 37270 - protein, 5 aa, Artificial sequence
  Protein classification predicting sequence
ARHEH

SEQ ID NO: 37271 - protein, 6 aa, Artificial sequence
  Protein classification predicting sequence
GAYGMV

SEQ ID NO: 37272 - protein, 6 aa, Artificial sequence
  Protein classification predicting sequence
FTPVPR

SEQ ID NO: 37273 - protein, 6 aa, Artificial sequence
  Protein classification predicting sequence
YVLSGG

SEQ ID NO: 37274 - protein, 6 aa, Artificial sequence
  Protein classification predicting sequence
RQQAPL

SEQ ID NO: 37275 - protein, 6 aa, Artificial sequence
  Protein classification predicting sequence
LYSLPY

SEQ ID NO: 37276 - protein, 6 aa, Artificial sequence
  Protein classification predicting sequence
PDIGVP

SEQ ID NO: 37277 - protein, 7 aa, Artificial sequence
  Protein classification predicting sequence
PTISVLN

SEQ ID NO: 37278 - protein, 7 aa, Artificial sequence
  Protein classification predicting sequence
PLIVAAT

SEQ ID NO: 37279 - protein, 5 aa, Artificial sequence
  Protein classification predicting sequence
LSTQH

SEQ ID NO: 37280 - protein, 6 aa, Artificial sequence
  Protein classification predicting sequence
TEYMSK

SEQ ID NO: 37281 - protein, 7 aa, Artificial sequence
  Protein classification predicting sequence
GIQPVDI

SEQ ID NO: 37282 - protein, 7 aa, Artificial sequence
  Protein classification predicting sequence
AGFGYGL

SEQ ID NO: 37283 - protein, 6 aa, Artificial sequence
  Protein classification predicting sequence
TTADYV

SEQ ID NO: 37284 - protein, 6 aa, Artificial sequence
  Protein classification predicting sequence
RKKGKL

SEQ ID NO: 37285 - protein, 7 aa, Artificial sequence
  Protein classification predicting sequence
AYLTMRG

SEQ ID NO: 37286 - protein, 6 aa, Artificial sequence
  Protein classification predicting sequence
LDLLSK

SEQ ID NO: 37287 - protein, 7 aa, Artificial sequence
  Protein classification predicting sequence
IYGLASA

SEQ ID NO: 37288 - protein, 6 aa, Artificial sequence
  Protein classification predicting sequence
WQDRRT

SEQ ID NO: 37289 - protein, 7 aa, Artificial sequence
  Protein classification predicting sequence
QNPEKLS

SEQ ID NO: 37290 - protein, 6 aa, Artificial sequence
  Protein classification predicting sequence
ACKIAS

SEQ ID NO: 37291 - protein, 6 aa, Artificial sequence
  Protein classification predicting sequence
IDLFIP

SEQ ID NO: 37292 - protein, 6 aa, Artificial sequence
  Protein classification predicting sequence
LGTGSF

SEQ ID NO: 37293 - protein, 7 aa, Artificial sequence
  Protein classification predicting sequence
KRILQAV

SEQ ID NO: 37294 - protein, 6 aa, Artificial sequence
  Protein classification predicting sequence
RIAAAD

SEQ ID NO: 37295 - protein, 7 aa, Artificial sequence
  Protein classification predicting sequence
AILGVNV

SEQ ID NO: 37296 - protein, 5 aa, Artificial sequence
  Protein classification predicting sequence
HAFPS

SEQ ID NO: 37297 - protein, 6 aa, Artificial sequence
  Protein classification predicting sequence
IRAVVR

SEQ ID NO: 37298 - protein, 6 aa, Artificial sequence
  Protein classification predicting sequence
AAQIQG

SEQ ID NO: 37299 - protein, 8 aa, Artificial sequence
  Protein classification predicting sequence
GIKDAASF

SEQ ID NO: 37300 - protein, 7 aa, Artificial sequence
  Protein classification predicting sequence
RAVISRN

SEQ ID NO: 37301 - protein, 6 aa, Artificial sequence
  Protein classification predicting sequence
NERVLQ

SEQ ID NO: 37302 - protein, 6 aa, Artificial sequence
  Protein classification predicting sequence
GVVKIR

SEQ ID NO: 37303 - protein, 6 aa, Artificial sequence
  Protein classification predicting sequence
VMPKMD

SEQ ID NO: 37304 - protein, 7 aa, Artificial sequence
  Protein classification predicting sequence
RNVISNI

SEQ ID NO: 37305 - protein, 5 aa, Artificial sequence
  Protein classification predicting sequence
MRDCW

SEQ ID NO: 37306 - protein, 5 aa, Artificial sequence
  Protein classification predicting sequence
KCMKT

SEQ ID NO: 37307 - protein, 7 aa, Artificial sequence
  Protein classification predicting sequence
SDPNDPN

SEQ ID NO: 37308 - protein, 6 aa, Artificial sequence
  Protein classification predicting sequence
IHREMA

SEQ ID NO: 37309 - protein, 6 aa, Artificial sequence
  Protein classification predicting sequence
HPAPVN

SEQ ID NO: 37310 - protein, 6 aa, Artificial sequence
  Protein classification predicting sequence
NSSVFP

SEQ ID NO: 37311 - protein, 5 aa, Artificial sequence
  Protein classification predicting sequence
KCCAY

SEQ ID NO: 37312 - protein, 6 aa, Artificial sequence
  Protein classification predicting sequence
IGDVVN

SEQ ID NO: 37313 - protein, 6 aa, Artificial sequence
  Protein classification predicting sequence
RGAAPI

SEQ ID NO: 37314 - protein, 6 aa, Artificial sequence
  Protein classification predicting sequence
LQGAHI

SEQ ID NO: 37315 - protein, 6 aa, Artificial sequence
  Protein classification predicting sequence
LQQIES

SEQ ID NO: 37316 - protein, 6 aa, Artificial sequence
  Protein classification predicting sequence
AAPGTI

SEQ ID NO: 37317 - protein, 6 aa, Artificial sequence
  Protein classification predicting sequence
LQPAGK

SEQ ID NO: 37318 - protein, 6 aa, Artificial sequence
  Protein classification predicting sequence
ALVGDK

SEQ ID NO: 37319 - protein, 5 aa, Artificial sequence
  Protein classification predicting sequence
PVYQP

SEQ ID NO: 37320 - protein, 5 aa, Artificial sequence
  Protein classification predicting sequence
GTPQF

SEQ ID NO: 37321 - protein, 6 aa, Artificial sequence
  Protein classification predicting sequence
VGDKFG

SEQ ID NO: 37322 - protein, 6 aa, Artificial sequence
  Protein classification predicting sequence
VVVAYG

SEQ ID NO: 37323 - protein, 6 aa, Artificial sequence
  Protein classification predicting sequence
PECCAV

SEQ ID NO: 37324 - protein, 5 aa, Artificial sequence
  Protein classification predicting sequence
TIMQM

SEQ ID NO: 37325 - protein, 6 aa, Artificial sequence
  Protein classification predicting sequence
FEIPLV

SEQ ID NO: 37326 - protein, 6 aa, Artificial sequence
  Protein classification predicting sequence
KIDFAK

SEQ ID NO: 37327 - protein, 6 aa, Artificial sequence
  Protein classification predicting sequence
IDADII

SEQ ID NO: 37328 - protein, 6 aa, Artificial sequence
  Protein classification predicting sequence
TVINNK

SEQ ID NO: 37329 - protein, 6 aa, Artificial sequence
  Protein classification predicting sequence
GRSGKL

SEQ ID NO: 37330 - protein, 7 aa, Artificial sequence
  Protein classification predicting sequence
AEVVLCG

SEQ ID NO: 37331 - protein, 6 aa, Artificial sequence
  Protein classification predicting sequence
KRILQA

SEQ ID NO: 37332 - protein, 8 aa, Artificial sequence
  Protein classification predicting sequence
QRLEQAGV

SEQ ID NO: 37333 - protein, 7 aa, Artificial sequence
  Protein classification predicting sequence
SWWVLAS

SEQ ID NO: 37334 - protein, 6 aa, Artificial sequence
  Protein classification predicting sequence
DASSAS

SEQ ID NO: 37335 - protein, 6 aa, Artificial sequence
  Protein classification predicting sequence
DPNNSS

SEQ ID NO: 37336 - protein, 5 aa, Artificial sequence
  Protein classification predicting sequence
RQEEH

SEQ ID NO: 37337 - protein, 7 aa, Artificial sequence
  Protein classification predicting sequence
RNMTLGT

SEQ ID NO: 37338 - protein, 6 aa, Artificial sequence
  Protein classification predicting sequence
QSRHHL

SEQ ID NO: 37339 - protein, 6 aa, Artificial sequence
  Protein classification predicting sequence
YLSSGT

SEQ ID NO: 37340 - protein, 5 aa, Artificial sequence
  Protein classification predicting sequence
PAMHA

SEQ ID NO: 37341 - protein, 7 aa, Artificial sequence
  Protein classification predicting sequence
SEKELQA

SEQ ID NO: 37342 - protein, 6 aa, Artificial sequence
  Protein classification predicting sequence
DSIQAE

SEQ ID NO: 37343 - protein, 6 aa, Artificial sequence
  Protein classification predicting sequence
PTFFAR

SEQ ID NO: 37344 - protein, 6 aa, Artificial sequence
  Protein classification predicting sequence
GTSSLR

SEQ ID NO: 37345 - protein, 6 aa, Artificial sequence
  Protein classification predicting sequence
ALTIGT

SEQ ID NO: 37346 - protein, 7 aa, Artificial sequence
  Protein classification predicting sequence
RVLDFAA

SEQ ID NO: 37347 - protein, 6 aa, Artificial sequence
  Protein classification predicting sequence
GGHVFP

SEQ ID NO: 37348 - protein, 6 aa, Artificial sequence
  Protein classification predicting sequence
AVQQAV

SEQ ID NO: 37349 - protein, 6 aa, Artificial sequence
  Protein classification predicting sequence
IDRGYE

SEQ ID NO: 37350 - protein, 5 aa, Artificial sequence
  Protein classification predicting sequence
PGYHM

SEQ ID NO: 37351 - protein, 6 aa, Artificial sequence
  Protein classification predicting sequence
PVRGRC

SEQ ID NO: 37352 - protein, 6 aa, Artificial sequence
  Protein classification predicting sequence
VPPERA

SEQ ID NO: 37353 - protein, 6 aa, Artificial sequence
  Protein classification predicting sequence
MQQYQD

SEQ ID NO: 37354 - protein, 5 aa, Artificial sequence
  Protein classification predicting sequence
TYDPG

SEQ ID NO: 37355 - protein, 6 aa, Artificial sequence
  Protein classification predicting sequence
TYDPGF

SEQ ID NO: 37356 - protein, 6 aa, Artificial sequence
  Protein classification predicting sequence
SKEVNA

SEQ ID NO: 37357 - protein, 6 aa, Artificial sequence
  Protein classification predicting sequence
VVVSPD

SEQ ID NO: 37358 - protein, 6 aa, Artificial sequence
  Protein classification predicting sequence
STTSRL

SEQ ID NO: 37359 - protein, 7 aa, Artificial sequence
  Protein classification predicting sequence
LDRSIPD

SEQ ID NO: 37360 - protein, 5 aa, Artificial sequence
  Protein classification predicting sequence
NSIFW

SEQ ID NO: 37361 - protein, 6 aa, Artificial sequence
  Protein classification predicting sequence
ITPANV

SEQ ID NO: 37362 - protein, 7 aa, Artificial sequence
  Protein classification predicting sequence
DANETAY

SEQ ID NO: 37363 - protein, 6 aa, Artificial sequence
  Protein classification predicting sequence
DTGKMY

SEQ ID NO: 37364 - protein, 6 aa, Artificial sequence
  Protein classification predicting sequence
QDKKDK

SEQ ID NO: 37365 - protein, 6 aa, Artificial sequence
  Protein classification predicting sequence
RATSNV

SEQ ID NO: 37366 - protein, 6 aa, Artificial sequence
  Protein classification predicting sequence
QNGTSE

SEQ ID NO: 37367 - protein, 6 aa, Artificial sequence
  Protein classification predicting sequence
EQVRGY

SEQ ID NO: 37368 - protein, 5 aa, Artificial sequence
  Protein classification predicting sequence
IHHHF

SEQ ID NO: 37369 - protein, 6 aa, Artificial sequence
  Protein classification predicting sequence
YESHMA

SEQ ID NO: 37370 - protein, 6 aa, Artificial sequence
  Protein classification predicting sequence
NDVAKL

SEQ ID NO: 37371 - protein, 6 aa, Artificial sequence
  Protein classification predicting sequence
TMKPFI

SEQ ID NO: 37372 - protein, 7 aa, Artificial sequence
  Protein classification predicting sequence
RVVAGGE

SEQ ID NO: 37373 - protein, 6 aa, Artificial sequence
  Protein classification predicting sequence
IYAGAQ

SEQ ID NO: 37374 - protein, 6 aa, Artificial sequence
  Protein classification predicting sequence
TIAKQI

SEQ ID NO: 37375 - protein, 6 aa, Artificial sequence
  Protein classification predicting sequence
SETDTE

SEQ ID NO: 37376 - protein, 6 aa, Artificial sequence
  Protein classification predicting sequence
LVDGLQ

SEQ ID NO: 37377 - protein, 7 aa, Artificial sequence
  Protein classification predicting sequence
VADGKLS

SEQ ID NO: 37378 - protein, 7 aa, Artificial sequence
  Protein classification predicting sequence
EDADDDA

SEQ ID NO: 37379 - protein, 6 aa, Artificial sequence
  Protein classification predicting sequence
RLIVSA

SEQ ID NO: 37380 - protein, 6 aa, Artificial sequence
  Protein classification predicting sequence
ANGAAR

SEQ ID NO: 37381 - protein, 6 aa, Artificial sequence
  Protein classification predicting sequence
LHPDYI

SEQ ID NO: 37382 - protein, 6 aa, Artificial sequence
  Protein classification predicting sequence
KPTFLR

SEQ ID NO: 37383 - protein, 7 aa, Artificial sequence
  Protein classification predicting sequence
VALKEAM

SEQ ID NO: 37384 - protein, 7 aa, Artificial sequence
  Protein classification predicting sequence
ALAGTLR

SEQ ID NO: 37385 - protein, 5 aa, Artificial sequence
  Protein classification predicting sequence
LMPSY

SEQ ID NO: 37386 - protein, 7 aa, Artificial sequence
  Protein classification predicting sequence
EFFGEKL

SEQ ID NO: 37387 - protein, 6 aa, Artificial sequence
  Protein classification predicting sequence
QFNNSL

SEQ ID NO: 37388 - protein, 6 aa, Artificial sequence
  Protein classification predicting sequence
IYRNLY

SEQ ID NO: 37389 - protein, 5 aa, Artificial sequence
  Protein classification predicting sequence
WQDTR

SEQ ID NO: 37390 - protein, 6 aa, Artificial sequence
  Protein classification predicting sequence
WIKAYE

SEQ ID NO: 37391 - protein, 6 aa, Artificial sequence
  Protein classification predicting sequence
RALEVY

SEQ ID NO: 37392 - protein, 6 aa, Artificial sequence
  Protein classification predicting sequence
SELAPL

SEQ ID NO: 37393 - protein, 6 aa, Artificial sequence
  Protein classification predicting sequence
RNTAPA

SEQ ID NO: 37394 - protein, 6 aa, Artificial sequence
  Protein classification predicting sequence
RCGDLD

SEQ ID NO: 37395 - protein, 6 aa, Artificial sequence
  Protein classification predicting sequence
PYYDMV

SEQ ID NO: 37396 - protein, 6 aa, Artificial sequence
  Protein classification predicting sequence
AEGAPF

SEQ ID NO: 37397 - protein, 7 aa, Artificial sequence
  Protein classification predicting sequence
PIYILLS

SEQ ID NO: 37398 - protein, 5 aa, Artificial sequence
  Protein classification predicting sequence
YAYSE

SEQ ID NO: 37399 - protein, 6 aa, Artificial sequence
  Protein classification predicting sequence
KLLFMG

SEQ ID NO: 37400 - protein, 7 aa, Artificial sequence
  Protein classification predicting sequence
EKGFYTE

SEQ ID NO: 37401 - protein, 6 aa, Artificial sequence
  Protein classification predicting sequence
YSISMT

SEQ ID NO: 37402 - protein, 7 aa, Artificial sequence
  Protein classification predicting sequence
NVLLKSD

SEQ ID NO: 37403 - protein, 6 aa, Artificial sequence
  Protein classification predicting sequence
ARLDRV

SEQ ID NO: 37404 - protein, 7 aa, Artificial sequence
  Protein classification predicting sequence
SIVFDEA

SEQ ID NO: 37405 - protein, 5 aa, Artificial sequence
  Protein classification predicting sequence
GCFAG

SEQ ID NO: 37406 - protein, 6 aa, Artificial sequence
  Protein classification predicting sequence
DWPDAR

SEQ ID NO: 37407 - protein, 6 aa, Artificial sequence
  Protein classification predicting sequence
GGAFSG

SEQ ID NO: 37408 - protein, 7 aa, Artificial sequence
  Protein classification predicting sequence
GLPLERP

SEQ ID NO: 37409 - protein, 6 aa, Artificial sequence
  Protein classification predicting sequence
SDVGNA

SEQ ID NO: 37410 - protein, 7 aa, Artificial sequence
  Protein classification predicting sequence
IKTVVSE

SEQ ID NO: 37411 - protein, 6 aa, Artificial sequence
  Protein classification predicting sequence
YSYQMA

SEQ ID NO: 37412 - protein, 6 aa, Artificial sequence
  Protein classification predicting sequence
AKNSAV

SEQ ID NO: 37413 - protein, 5 aa, Artificial sequence
  Protein classification predicting sequence
QRDDD

SEQ ID NO: 37414 - protein, 5 aa, Artificial sequence
  Protein classification predicting sequence
HQANI

SEQ ID NO: 37415 - protein, 7 aa, Artificial sequence
  Protein classification predicting sequence
TIVIAEE

SEQ ID NO: 37416 - protein, 6 aa, Artificial sequence
  Protein classification predicting sequence
LSDFDL

SEQ ID NO: 37417 - protein, 6 aa, Artificial sequence
  Protein classification predicting sequence
IGVPEP

SEQ ID NO: 37418 - protein, 6 aa, Artificial sequence
  Protein classification predicting sequence
DDRDRN

SEQ ID NO: 37419 - protein, 6 aa, Artificial sequence
  Protein classification predicting sequence
RHGGGA

SEQ ID NO: 37420 - protein, 5 aa, Artificial sequence
  Protein classification predicting sequence
RTYQV

SEQ ID NO: 37421 - protein, 6 aa, Artificial sequence
  Protein classification predicting sequence
PHFVNG

SEQ ID NO: 37422 - protein, 6 aa, Artificial sequence
  Protein classification predicting sequence
FGLIYA

SEQ ID NO: 37423 - protein, 5 aa, Artificial sequence
  Protein classification predicting sequence
GDWWL

SEQ ID NO: 37424 - protein, 7 aa, Artificial sequence
  Protein classification predicting sequence
VTKTQVA

SEQ ID NO: 37425 - protein, 6 aa, Artificial sequence
  Protein classification predicting sequence
SENFIL

SEQ ID NO: 37426 - protein, 6 aa, Artificial sequence
  Protein classification predicting sequence
PGLEEG

SEQ ID NO: 37427 - protein, 7 aa, Artificial sequence
  Protein classification predicting sequence
AYVPEFN

SEQ ID NO: 37428 - protein, 6 aa, Artificial sequence
  Protein classification predicting sequence
FTVTEH

SEQ ID NO: 37429 - protein, 8 aa, Artificial sequence
  Protein classification predicting sequence
IVSLGSVI

SEQ ID NO: 37430 - protein, 6 aa, Artificial sequence
  Protein classification predicting sequence
LNTNEN

SEQ ID NO: 37431 - protein, 6 aa, Artificial sequence
  Protein classification predicting sequence
LNRHLS

SEQ ID NO: 37432 - protein, 6 aa, Artificial sequence
  Protein classification predicting sequence
PTKVDR

SEQ ID NO: 37433 - protein, 7 aa, Artificial sequence
  Protein classification predicting sequence
DVKEADR

SEQ ID NO: 37434 - protein, 6 aa, Artificial sequence
  Protein classification predicting sequence
NFEGNE

SEQ ID NO: 37435 - protein, 5 aa, Artificial sequence
  Protein classification predicting sequence
RMGGQ

SEQ ID NO: 37436 - protein, 6 aa, Artificial sequence
  Protein classification predicting sequence
YWIERF

SEQ ID NO: 37437 - protein, 7 aa, Artificial sequence
  Protein classification predicting sequence
LPAAIGA

SEQ ID NO: 37438 - protein, 6 aa, Artificial sequence
  Protein classification predicting sequence
YHTACV

SEQ ID NO: 37439 - protein, 6 aa, Artificial sequence
  Protein classification predicting sequence
QIAAVC

SEQ ID NO: 37440 - protein, 7 aa, Artificial sequence
  Protein classification predicting sequence
APILYII

SEQ ID NO: 37441 - protein, 6 aa, Artificial sequence
  Protein classification predicting sequence
ISAISK

SEQ ID NO: 37442 - protein, 6 aa, Artificial sequence
  Protein classification predicting sequence
ASDTDS

SEQ ID NO: 37443 - protein, 6 aa, Artificial sequence
  Protein classification predicting sequence
DEEGHI

SEQ ID NO: 37444 - protein, 6 aa, Artificial sequence
  Protein classification predicting sequence
SYAIGV

SEQ ID NO: 37445 - protein, 6 aa, Artificial sequence
  Protein classification predicting sequence
PILVEG

SEQ ID NO: 37446 - protein, 5 aa, Artificial sequence
  Protein classification predicting sequence
LYVFA

SEQ ID NO: 37447 - protein, 6 aa, Artificial sequence
  Protein classification predicting sequence
ISLLKE

SEQ ID NO: 37448 - protein, 6 aa, Artificial sequence
  Protein classification predicting sequence
GAYGTV

SEQ ID NO: 37449 - protein, 5 aa, Artificial sequence
  Protein classification predicting sequence
RYWFE

SEQ ID NO: 37450 - protein, 6 aa, Artificial sequence
  Protein classification predicting sequence
QPAATA

SEQ ID NO: 37451 - protein, 6 aa, Artificial sequence
  Protein classification predicting sequence
VDALRR

SEQ ID NO: 37452 - protein, 9 aa, Artificial sequence
  Protein classification predicting sequence
ESSLLSHLV

SEQ ID NO: 37453 - protein, 6 aa, Artificial sequence
  Protein classification predicting sequence
HLVPNI

SEQ ID NO: 37454 - protein, 6 aa, Artificial sequence
  Protein classification predicting sequence
NVNYSI

SEQ ID NO: 37455 - protein, 7 aa, Artificial sequence
  Protein classification predicting sequence
LGEILRR

SEQ ID NO: 37456 - protein, 7 aa, Artificial sequence
  Protein classification predicting sequence
GALTIGT

SEQ ID NO: 37457 - protein, 6 aa, Artificial sequence
  Protein classification predicting sequence
QIEGTI

SEQ ID NO: 37458 - protein, 6 aa, Artificial sequence
  Protein classification predicting sequence
AKVLGT

SEQ ID NO: 37459 - protein, 6 aa, Artificial sequence
  Protein classification predicting sequence
GDSVSG

SEQ ID NO: 37460 - protein, 7 aa, Artificial sequence
  Protein classification predicting sequence
VDKVVVV

SEQ ID NO: 37461 - protein, 7 aa, Artificial sequence
  Protein classification predicting sequence
NTNGSTI

SEQ ID NO: 37462 - protein, 7 aa, Artificial sequence
  Protein classification predicting sequence
VAQSIEA

SEQ ID NO: 37463 - protein, 8 aa, Artificial sequence
  Protein classification predicting sequence
GSTVAREA

SEQ ID NO: 37464 - protein, 7 aa, Artificial sequence
  Protein classification predicting sequence
SALVSGL

SEQ ID NO: 37465 - protein, 5 aa, Artificial sequence
  Protein classification predicting sequence
CGTSY

SEQ ID NO: 37466 - protein, 7 aa, Artificial sequence
  Protein classification predicting sequence
EAQSLLR

SEQ ID NO: 37467 - protein, 6 aa, Artificial sequence
  Protein classification predicting sequence
IHKDQP

SEQ ID NO: 37468 - protein, 6 aa, Artificial sequence
  Protein classification predicting sequence
LIRESE

SEQ ID NO: 37469 - protein, 6 aa, Artificial sequence
  Protein classification predicting sequence
LTALLM

SEQ ID NO: 37470 - protein, 7 aa, Artificial sequence
  Protein classification predicting sequence
LADAGDL

SEQ ID NO: 37471 - protein, 6 aa, Artificial sequence
  Protein classification predicting sequence
IRRVRR

SEQ ID NO: 37472 - protein, 5 aa, Artificial sequence
  Protein classification predicting sequence
AHLIH

SEQ ID NO: 37473 - protein, 6 aa, Artificial sequence
  Protein classification predicting sequence
KDVPGL

SEQ ID NO: 37474 - protein, 8 aa, Artificial sequence
  Protein classification predicting sequence
VDQILALA

SEQ ID NO: 37475 - protein, 6 aa, Artificial sequence
  Protein classification predicting sequence
LLSGNH

SEQ ID NO: 37476 - protein, 6 aa, Artificial sequence
  Protein classification predicting sequence
KKRHHK

SEQ ID NO: 37477 - protein, 6 aa, Artificial sequence
  Protein classification predicting sequence
SEITAV

SEQ ID NO: 37478 - protein, 5 aa, Artificial sequence
  Protein classification predicting sequence
FQARP

SEQ ID NO: 37479 - protein, 7 aa, Artificial sequence
  Protein classification predicting sequence
KQRLNDE

SEQ ID NO: 37480 - protein, 6 aa, Artificial sequence
  Protein classification predicting sequence
IIAKTF

SEQ ID NO: 37481 - protein, 6 aa, Artificial sequence
  Protein classification predicting sequence
ANTAWV

SEQ ID NO: 37482 - protein, 7 aa, Artificial sequence
  Protein classification predicting sequence
DELRQYL

SEQ ID NO: 37483 - protein, 5 aa, Artificial sequence
  Protein classification predicting sequence
LLDCP

SEQ ID NO: 37484 - protein, 6 aa, Artificial sequence
  Protein classification predicting sequence
AIILAA

SEQ ID NO: 37485 - protein, 5 aa, Artificial sequence
  Protein classification predicting sequence
ACQSY

SEQ ID NO: 37486 - protein, 5 aa, Artificial sequence
  Protein classification predicting sequence
GPRPI

SEQ ID NO: 37487 - protein, 7 aa, Artificial sequence
  Protein classification predicting sequence
YGFDAET

SEQ ID NO: 37488 - protein, 6 aa, Artificial sequence
  Protein classification predicting sequence
GFDAET

SEQ ID NO: 37489 - protein, 7 aa, Artificial sequence
  Protein classification predicting sequence
INAVVNM

SEQ ID NO: 37490 - protein, 6 aa, Artificial sequence
  Protein classification predicting sequence
LLQSLQ

SEQ ID NO: 37491 - protein, 8 aa, Artificial sequence
  Protein classification predicting sequence
ADGIVTAA

SEQ ID NO: 37492 - protein, 7 aa, Artificial sequence
  Protein classification predicting sequence
RVIQQLE

SEQ ID NO: 37493 - protein, 7 aa, Artificial sequence
  Protein classification predicting sequence
QAWQQVA

SEQ ID NO: 37494 - protein, 8 aa, Artificial sequence
  Protein classification predicting sequence
AGATTLAE

SEQ ID NO: 37495 - protein, 7 aa, Artificial sequence
  Protein classification predicting sequence
ITEALPV

SEQ ID NO: 37496 - protein, 7 aa, Artificial sequence
  Protein classification predicting sequence
QLMIEEN

SEQ ID NO: 37497 - protein, 6 aa, Artificial sequence
  Protein classification predicting sequence
FSEISP

SEQ ID NO: 37498 - protein, 5 aa, Artificial sequence
  Protein classification predicting sequence
GWVEH

SEQ ID NO: 37499 - protein, 6 aa, Artificial sequence
  Protein classification predicting sequence
ASIEHD

SEQ ID NO: 37500 - protein, 6 aa, Artificial sequence
  Protein classification predicting sequence
SNIEEV

SEQ ID NO: 37501 - protein, 7 aa, Artificial sequence
  Protein classification predicting sequence
IVLKNLR

SEQ ID NO: 37502 - protein, 6 aa, Artificial sequence
  Protein classification predicting sequence
TDELRT

SEQ ID NO: 37503 - protein, 6 aa, Artificial sequence
  Protein classification predicting sequence
ILQIPA

SEQ ID NO: 37504 - protein, 5 aa, Artificial sequence
  Protein classification predicting sequence
DLLGH

SEQ ID NO: 37505 - protein, 6 aa, Artificial sequence
  Protein classification predicting sequence
ANTYEK

SEQ ID NO: 37506 - protein, 6 aa, Artificial sequence
  Protein classification predicting sequence
SENYAS

SEQ ID NO: 37507 - protein, 6 aa, Artificial sequence
  Protein classification predicting sequence
GWVEHD

SEQ ID NO: 37508 - protein, 7 aa, Artificial sequence
  Protein classification predicting sequence
RKADIEA

SEQ ID NO: 37509 - protein, 6 aa, Artificial sequence
  Protein classification predicting sequence
RIFEPK

SEQ ID NO: 37510 - protein, 6 aa, Artificial sequence
  Protein classification predicting sequence
VDGGAA

SEQ ID NO: 37511 - protein, 7 aa, Artificial sequence
  Protein classification predicting sequence
HGTISLI

SEQ ID NO: 37512 - protein, 7 aa, Artificial sequence
  Protein classification predicting sequence
YTQQIIQ

SEQ ID NO: 37513 - protein, 6 aa, Artificial sequence
  Protein classification predicting sequence
VSYGVR

SEQ ID NO: 37514 - protein, 7 aa, Artificial sequence
  Protein classification predicting sequence
RAQVAEL

SEQ ID NO: 37515 - protein, 6 aa, Artificial sequence
  Protein classification predicting sequence
LAIDRA

SEQ ID NO: 37516 - protein, 6 aa, Artificial sequence
  Protein classification predicting sequence
KVLAIC

SEQ ID NO: 37517 - protein, 8 aa, Artificial sequence
  Protein classification predicting sequence
QVERLTKE

SEQ ID NO: 37518 - protein, 6 aa, Artificial sequence
  Protein classification predicting sequence
DLRPKG

SEQ ID NO: 37519 - protein, 7 aa, Artificial sequence
  Protein classification predicting sequence
HEEDRQE

SEQ ID NO: 37520 - protein, 6 aa, Artificial sequence
  Protein classification predicting sequence
SAIFPG

SEQ ID NO: 37521 - protein, 7 aa, Artificial sequence
  Protein classification predicting sequence
LAIERAK

SEQ ID NO: 37522 - protein, 6 aa, Artificial sequence
  Protein classification predicting sequence
VRIDTI

SEQ ID NO: 37523 - protein, 7 aa, Artificial sequence
  Protein classification predicting sequence
IDKIEQI

SEQ ID NO: 37524 - protein, 6 aa, Artificial sequence
  Protein classification predicting sequence
VLVDLR

SEQ ID NO: 37525 - protein, 6 aa, Artificial sequence
  Protein classification predicting sequence
LVDLRS

SEQ ID NO: 37526 - protein, 6 aa, Artificial sequence
  Protein classification predicting sequence
LNNVDD

SEQ ID NO: 37527 - protein, 6 aa, Artificial sequence
  Protein classification predicting sequence
QVRTNA

SEQ ID NO: 37528 - protein, 6 aa, Artificial sequence
  Protein classification predicting sequence
FEAFQS

SEQ ID NO: 37529 - protein, 6 aa, Artificial sequence
  Protein classification predicting sequence
GLILAK

SEQ ID NO: 37530 - protein, 5 aa, Artificial sequence
  Protein classification predicting sequence
HGGHL

SEQ ID NO: 37531 - protein, 6 aa, Artificial sequence
  Protein classification predicting sequence
RIIDFA

SEQ ID NO: 37532 - protein, 6 aa, Artificial sequence
  Protein classification predicting sequence
VNITTN

SEQ ID NO: 37533 - protein, 6 aa, Artificial sequence
  Protein classification predicting sequence
HPSPVP

SEQ ID NO: 37534 - protein, 6 aa, Artificial sequence
  Protein classification predicting sequence
AIATPG

SEQ ID NO: 37535 - protein, 6 aa, Artificial sequence
  Protein classification predicting sequence
EVGARI

SEQ ID NO: 37536 - protein, 6 aa, Artificial sequence
  Protein classification predicting sequence
AKFRQI

SEQ ID NO: 37537 - protein, 6 aa, Artificial sequence
  Protein classification predicting sequence
PGRRYY

SEQ ID NO: 37538 - protein, 5 aa, Artificial sequence
  Protein classification predicting sequence
TTHKT

SEQ ID NO: 37539 - protein, 7 aa, Artificial sequence
  Protein classification predicting sequence
IRKLDSG

SEQ ID NO: 37540 - protein, 5 aa, Artificial sequence
  Protein classification predicting sequence
DWHLL

SEQ ID NO: 37541 - protein, 8 aa, Artificial sequence
  Protein classification predicting sequence
DDFKAYSK

SEQ ID NO: 37542 - protein, 7 aa, Artificial sequence
  Protein classification predicting sequence
KALFGAE

SEQ ID NO: 37543 - protein, 6 aa, Artificial sequence
  Protein classification predicting sequence
DDFKAY

SEQ ID NO: 37544 - protein, 7 aa, Artificial sequence
  Protein classification predicting sequence
EFAKEID

SEQ ID NO: 37545 - protein, 8 aa, Artificial sequence
  Protein classification predicting sequence
IRAEVHEL

SEQ ID NO: 37546 - protein, 7 aa, Artificial sequence
  Protein classification predicting sequence
NDPELGK

SEQ ID NO: 37547 - protein, 6 aa, Artificial sequence
  Protein classification predicting sequence
LTGGTD

SEQ ID NO: 37548 - protein, 8 aa, Artificial sequence
  Protein classification predicting sequence
AAADPDVL

SEQ ID NO: 37549 - protein, 6 aa, Artificial sequence
  Protein classification predicting sequence
RYYGGN

SEQ ID NO: 37550 - protein, 6 aa, Artificial sequence
  Protein classification predicting sequence
WGVNVQ

SEQ ID NO: 37551 - protein, 6 aa, Artificial sequence
  Protein classification predicting sequence
VTSDAR

SEQ ID NO: 37552 - protein, 7 aa, Artificial sequence
  Protein classification predicting sequence
DTGVRAT

SEQ ID NO: 37553 - protein, 6 aa, Artificial sequence
  Protein classification predicting sequence
MGLDLP

SEQ ID NO: 37554 - protein, 6 aa, Artificial sequence
  Protein classification predicting sequence
AVALKQ

SEQ ID NO: 37555 - protein, 7 aa, Artificial sequence
  Protein classification predicting sequence
YGLDPEK

SEQ ID NO: 37556 - protein, 7 aa, Artificial sequence
  Protein classification predicting sequence
AYEILGV

SEQ ID NO: 37557 - protein, 7 aa, Artificial sequence
  Protein classification predicting sequence
RMRQLLE

SEQ ID NO: 37558 - protein, 5 aa, Artificial sequence
  Protein classification predicting sequence
FPVQY

SEQ ID NO: 37559 - protein, 6 aa, Artificial sequence
  Protein classification predicting sequence
GSVPHE

SEQ ID NO: 37560 - protein, 5 aa, Artificial sequence
  Protein classification predicting sequence
VAIFC

SEQ ID NO: 37561 - protein, 6 aa, Artificial sequence
  Protein classification predicting sequence
KVADKI

SEQ ID NO: 37562 - protein, 6 aa, Artificial sequence
  Protein classification predicting sequence
KVTDDH

SEQ ID NO: 37563 - protein, 6 aa, Artificial sequence
  Protein classification predicting sequence
AGVEFE

SEQ ID NO: 37564 - protein, 7 aa, Artificial sequence
  Protein classification predicting sequence
KAILEKS

SEQ ID NO: 37565 - protein, 6 aa, Artificial sequence
  Protein classification predicting sequence
IFFFRQ

SEQ ID NO: 37566 - protein, 6 aa, Artificial sequence
  Protein classification predicting sequence
LVGDSL

SEQ ID NO: 37567 - protein, 6 aa, Artificial sequence
  Protein classification predicting sequence
KDSKYL

SEQ ID NO: 37568 - protein, 7 aa, Artificial sequence
  Protein classification predicting sequence
ERIRADI

SEQ ID NO: 37569 - protein, 6 aa, Artificial sequence
  Protein classification predicting sequence
GKQPWF

SEQ ID NO: 37570 - protein, 6 aa, Artificial sequence
  Protein classification predicting sequence
RFEGLK

SEQ ID NO: 37571 - protein, 6 aa, Artificial sequence
  Protein classification predicting sequence
PGKKLL

SEQ ID NO: 37572 - protein, 7 aa, Artificial sequence
  Protein classification predicting sequence
GLRDLHT

SEQ ID NO: 37573 - protein, 6 aa, Artificial sequence
  Protein classification predicting sequence
KNGIPF

SEQ ID NO: 37574 - protein, 5 aa, Artificial sequence
  Protein classification predicting sequence
WYDHV

SEQ ID NO: 37575 - protein, 7 aa, Artificial sequence
  Protein classification predicting sequence
RAIQMVA

SEQ ID NO: 37576 - protein, 7 aa, Artificial sequence
  Protein classification predicting sequence
LINTMEG

SEQ ID NO: 37577 - protein, 7 aa, Artificial sequence
  Protein classification predicting sequence
KFEELFP

SEQ ID NO: 37578 - protein, 8 aa, Artificial sequence
  Protein classification predicting sequence
AFSGLFAP

SEQ ID NO: 37579 - protein, 6 aa, Artificial sequence
  Protein classification predicting sequence
DSSDPI

SEQ ID NO: 37580 - protein, 6 aa, Artificial sequence
  Protein classification predicting sequence
KADLWS

SEQ ID NO: 37581 - protein, 5 aa, Artificial sequence
  Protein classification predicting sequence
YGIYI

SEQ ID NO: 37582 - protein, 6 aa, Artificial sequence
  Protein classification predicting sequence
RNPVTR

SEQ ID NO: 37583 - protein, 8 aa, Artificial sequence
  Protein classification predicting sequence
YSFGVVLL

SEQ ID NO: 37584 - protein, 5 aa, Artificial sequence
  Protein classification predicting sequence
GMYRN

SEQ ID NO: 37585 - protein, 6 aa, Artificial sequence
  Protein classification predicting sequence
YPGIKV

SEQ ID NO: 37586 - protein, 6 aa, Artificial sequence
  Protein classification predicting sequence
AFPNLK

SEQ ID NO: 37587 - protein, 7 aa, Artificial sequence
  Protein classification predicting sequence
QRRRRPR

SEQ ID NO: 37588 - protein, 6 aa, Artificial sequence
  Protein classification predicting sequence
EDPNEA

SEQ ID NO: 37589 - protein, 7 aa, Artificial sequence
  Protein classification predicting sequence
TQKIVEK

SEQ ID NO: 37590 - protein, 7 aa, Artificial sequence
  Protein classification predicting sequence
TVNRNAV

SEQ ID NO: 37591 - protein, 8 aa, Artificial sequence
  Protein classification predicting sequence
MGGYVSGP

SEQ ID NO: 37592 - protein, 7 aa, Artificial sequence
  Protein classification predicting sequence
IEGTLGK

SEQ ID NO: 37593 - protein, 5 aa, Artificial sequence
  Protein classification predicting sequence
RHNDV

SEQ ID NO: 37594 - protein, 6 aa, Artificial sequence
  Protein classification predicting sequence
SVVRRC

SEQ ID NO: 37595 - protein, 6 aa, Artificial sequence
  Protein classification predicting sequence
SHIVPV

SEQ ID NO: 37596 - protein, 6 aa, Artificial sequence
  Protein classification predicting sequence
DFSIYV

SEQ ID NO: 37597 - protein, 6 aa, Artificial sequence
  Protein classification predicting sequence
YGGGAG

SEQ ID NO: 37598 - protein, 6 aa, Artificial sequence
  Protein classification predicting sequence
ADAVRQ

SEQ ID NO: 37599 - protein, 6 aa, Artificial sequence
  Protein classification predicting sequence
AHEWAG

SEQ ID NO: 37600 - protein, 6 aa, Artificial sequence
  Protein classification predicting sequence
GGKGLF

SEQ ID NO: 37601 - protein, 7 aa, Artificial sequence
  Protein classification predicting sequence
EHVRDAL

SEQ ID NO: 37602 - protein, 6 aa, Artificial sequence
  Protein classification predicting sequence
IATRKS

SEQ ID NO: 37603 - protein, 6 aa, Artificial sequence
  Protein classification predicting sequence
SLKDLP

SEQ ID NO: 37604 - protein, 6 aa, Artificial sequence
  Protein classification predicting sequence
RRAAQL

SEQ ID NO: 37605 - protein, 6 aa, Artificial sequence
  Protein classification predicting sequence
VGVFTQ

SEQ ID NO: 37606 - protein, 5 aa, Artificial sequence
  Protein classification predicting sequence
IRGNV

SEQ ID NO: 37607 - protein, 6 aa, Artificial sequence
  Protein classification predicting sequence
LRARRP

SEQ ID NO: 37608 - protein, 5 aa, Artificial sequence
  Protein classification predicting sequence
CGRYE

SEQ ID NO: 37609 - protein, 7 aa, Artificial sequence
  Protein classification predicting sequence
ILAAAGL

SEQ ID NO: 37610 - protein, 6 aa, Artificial sequence
  Protein classification predicting sequence
VHTLGD

SEQ ID NO: 37611 - protein, 6 aa, Artificial sequence
  Protein classification predicting sequence
IKELRN

SEQ ID NO: 37612 - protein, 7 aa, Artificial sequence
  Protein classification predicting sequence
LLAALNH

SEQ ID NO: 37613 - protein, 5 aa, Artificial sequence
  Protein classification predicting sequence
APLHH

SEQ ID NO: 37614 - protein, 6 aa, Artificial sequence
  Protein classification predicting sequence
AKAGPG

SEQ ID NO: 37615 - protein, 6 aa, Artificial sequence
  Protein classification predicting sequence
QFFPDI

SEQ ID NO: 37616 - protein, 6 aa, Artificial sequence
  Protein classification predicting sequence
GRIPVD

SEQ ID NO: 37617 - protein, 6 aa, Artificial sequence
  Protein classification predicting sequence
PGLTVE

SEQ ID NO: 37618 - protein, 7 aa, Artificial sequence
  Protein classification predicting sequence
GTRLGKL

SEQ ID NO: 37619 - protein, 7 aa, Artificial sequence
  Protein classification predicting sequence
LLDLLSK

SEQ ID NO: 37620 - protein, 6 aa, Artificial sequence
  Protein classification predicting sequence
VNRLDL

SEQ ID NO: 37621 - protein, 7 aa, Artificial sequence
  Protein classification predicting sequence
PAPAQGA

SEQ ID NO: 37622 - protein, 7 aa, Artificial sequence
  Protein classification predicting sequence
SLKLLQA

SEQ ID NO: 37623 - protein, 6 aa, Artificial sequence
  Protein classification predicting sequence
GLADAI

SEQ ID NO: 37624 - protein, 7 aa, Artificial sequence
  Protein classification predicting sequence
LLAAAGV

SEQ ID NO: 37625 - protein, 6 aa, Artificial sequence
  Protein classification predicting sequence
AVRQGA

SEQ ID NO: 37626 - protein, 6 aa, Artificial sequence
  Protein classification predicting sequence
DAGLTG

SEQ ID NO: 37627 - protein, 6 aa, Artificial sequence
  Protein classification predicting sequence
TGKDWI

SEQ ID NO: 37628 - protein, 7 aa, Artificial sequence
  Protein classification predicting sequence
TRPEDLA

SEQ ID NO: 37629 - protein, 6 aa, Artificial sequence
  Protein classification predicting sequence
GGTGLY

SEQ ID NO: 37630 - protein, 8 aa, Artificial sequence
  Protein classification predicting sequence
LIEKLLTR

SEQ ID NO: 37631 - protein, 5 aa, Artificial sequence
  Protein classification predicting sequence
GDGNN

SEQ ID NO: 37632 - protein, 7 aa, Artificial sequence
  Protein classification predicting sequence
RGSDVFI

SEQ ID NO: 37633 - protein, 6 aa, Artificial sequence
  Protein classification predicting sequence
FNQKGE

SEQ ID NO: 37634 - protein, 6 aa, Artificial sequence
  Protein classification predicting sequence
AKVVAN

SEQ ID NO: 37635 - protein, 6 aa, Artificial sequence
  Protein classification predicting sequence
AGISND

SEQ ID NO: 37636 - protein, 6 aa, Artificial sequence
  Protein classification predicting sequence
MDAFLR

SEQ ID NO: 37637 - protein, 6 aa, Artificial sequence
  Protein classification predicting sequence
AKVLGR

SEQ ID NO: 37638 - protein, 7 aa, Artificial sequence
  Protein classification predicting sequence
ATADFLL

SEQ ID NO: 37639 - protein, 7 aa, Artificial sequence
  Protein classification predicting sequence
RRKIIAT

SEQ ID NO: 37640 - protein, 6 aa, Artificial sequence
  Protein classification predicting sequence
YGAPQL

SEQ ID NO: 37641 - protein, 8 aa, Artificial sequence
  Protein classification predicting sequence
ARLEELGY

SEQ ID NO: 37642 - protein, 7 aa, Artificial sequence
  Protein classification predicting sequence
VEKLSVE

SEQ ID NO: 37643 - protein, 6 aa, Artificial sequence
  Protein classification predicting sequence
EIGYVH

SEQ ID NO: 37644 - protein, 6 aa, Artificial sequence
  Protein classification predicting sequence
TFFARK

SEQ ID NO: 37645 - protein, 6 aa, Artificial sequence
  Protein classification predicting sequence
KLIRTY

SEQ ID NO: 37646 - protein, 7 aa, Artificial sequence
  Protein classification predicting sequence
ELIQFIT

SEQ ID NO: 37647 - protein, 7 aa, Artificial sequence
  Protein classification predicting sequence
ALLEGLS

SEQ ID NO: 37648 - protein, 5 aa, Artificial sequence
  Protein classification predicting sequence
MTIGT

SEQ ID NO: 37649 - protein, 5 aa, Artificial sequence
  Protein classification predicting sequence
ILMCP

SEQ ID NO: 37650 - protein, 7 aa, Artificial sequence
  Protein classification predicting sequence
VINNPSY

SEQ ID NO: 37651 - protein, 6 aa, Artificial sequence
  Protein classification predicting sequence
FSIYGI

SEQ ID NO: 37652 - protein, 7 aa, Artificial sequence
  Protein classification predicting sequence
VTDLARA

SEQ ID NO: 37653 - protein, 8 aa, Artificial sequence
  Protein classification predicting sequence
GRPAVKLS

SEQ ID NO: 37654 - protein, 5 aa, Artificial sequence
  Protein classification predicting sequence
ANFTL

SEQ ID NO: 37655 - protein, 7 aa, Artificial sequence
  Protein classification predicting sequence
LVFDRGV

SEQ ID NO: 37656 - protein, 6 aa, Artificial sequence
  Protein classification predicting sequence
KFNNVE

SEQ ID NO: 37657 - protein, 5 aa, Artificial sequence
  Protein classification predicting sequence
SWDGR

SEQ ID NO: 37658 - protein, 6 aa, Artificial sequence
  Protein classification predicting sequence
SWLSFN

SEQ ID NO: 37659 - protein, 6 aa, Artificial sequence
  Protein classification predicting sequence
LPQNDL

SEQ ID NO: 37660 - protein, 7 aa, Artificial sequence
  Protein classification predicting sequence
AKLAKGI

SEQ ID NO: 37661 - protein, 6 aa, Artificial sequence
  Protein classification predicting sequence
PWLRPD

SEQ ID NO: 37662 - protein, 8 aa, Artificial sequence
  Protein classification predicting sequence
APVALGLG

SEQ ID NO: 37663 - protein, 6 aa, Artificial sequence
  Protein classification predicting sequence
DTFRSE

SEQ ID NO: 37664 - protein, 7 aa, Artificial sequence
  Protein classification predicting sequence
VDTTILG

SEQ ID NO: 37665 - protein, 7 aa, Artificial sequence
  Protein classification predicting sequence
VRSKYKL

SEQ ID NO: 37666 - protein, 7 aa, Artificial sequence
  Protein classification predicting sequence
SEDNITV

SEQ ID NO: 37667 - protein, 6 aa, Artificial sequence
  Protein classification predicting sequence
TLLDKP

SEQ ID NO: 37668 - protein, 6 aa, Artificial sequence
  Protein classification predicting sequence
DFVGFE

SEQ ID NO: 37669 - protein, 7 aa, Artificial sequence
  Protein classification predicting sequence
KKIAEDY

SEQ ID NO: 37670 - protein, 6 aa, Artificial sequence
  Protein classification predicting sequence
DQMISA

SEQ ID NO: 37671 - protein, 6 aa, Artificial sequence
  Protein classification predicting sequence
LDYDQS

SEQ ID NO: 37672 - protein, 5 aa, Artificial sequence
  Protein classification predicting sequence
LFFHL

SEQ ID NO: 37673 - protein, 7 aa, Artificial sequence
  Protein classification predicting sequence
DRRPGLF

SEQ ID NO: 37674 - protein, 7 aa, Artificial sequence
  Protein classification predicting sequence
SDSDIFT

SEQ ID NO: 37675 - protein, 5 aa, Artificial sequence
  Protein classification predicting sequence
PNKQR

SEQ ID NO: 37676 - protein, 6 aa, Artificial sequence
  Protein classification predicting sequence
RKIIVD

SEQ ID NO: 37677 - protein, 6 aa, Artificial sequence
  Protein classification predicting sequence
GGTNFR

SEQ ID NO: 37678 - protein, 6 aa, Artificial sequence
  Protein classification predicting sequence
LAIRQN

SEQ ID NO: 37679 - protein, 5 aa, Artificial sequence
  Protein classification predicting sequence
FIPHQ

SEQ ID NO: 37680 - protein, 5 aa, Artificial sequence
  Protein classification predicting sequence
GMHGT

SEQ ID NO: 37681 - protein, 5 aa, Artificial sequence
  Protein classification predicting sequence
THIHI

SEQ ID NO: 37682 - protein, 5 aa, Artificial sequence
  Protein classification predicting sequence
DVPKD

SEQ ID NO: 37683 - protein, 5 aa, Artificial sequence
  Protein classification predicting sequence
RHEQG

SEQ ID NO: 37684 - protein, 7 aa, Artificial sequence
  Protein classification predicting sequence
GISRSCT

SEQ ID NO: 37685 - protein, 7 aa, Artificial sequence
  Protein classification predicting sequence
IVTGIPG

SEQ ID NO: 37686 - protein, 6 aa, Artificial sequence
  Protein classification predicting sequence
FCPNAK

SEQ ID NO: 37687 - protein, 7 aa, Artificial sequence
  Protein classification predicting sequence
AAQFIKT

SEQ ID NO: 37688 - protein, 6 aa, Artificial sequence
  Protein classification predicting sequence
GMATAN

SEQ ID NO: 37689 - protein, 6 aa, Artificial sequence
  Protein classification predicting sequence
PLYDAI

SEQ ID NO: 37690 - protein, 6 aa, Artificial sequence
  Protein classification predicting sequence
VHVRRG

SEQ ID NO: 37691 - protein, 7 aa, Artificial sequence
  Protein classification predicting sequence
ASLLAHK

SEQ ID NO: 37692 - protein, 5 aa, Artificial sequence
  Protein classification predicting sequence
MGVFE

SEQ ID NO: 37693 - protein, 7 aa, Artificial sequence
  Protein classification predicting sequence
IVDITST

SEQ ID NO: 37694 - protein, 6 aa, Artificial sequence
  Protein classification predicting sequence
IQTVGD

SEQ ID NO: 37695 - protein, 6 aa, Artificial sequence
  Protein classification predicting sequence
LYYSFQ

SEQ ID NO: 37696 - protein, 5 aa, Artificial sequence
  Protein classification predicting sequence
AFWLA

SEQ ID NO: 37697 - protein, 5 aa, Artificial sequence
  Protein classification predicting sequence
HEQNA

SEQ ID NO: 37698 - protein, 6 aa, Artificial sequence
  Protein classification predicting sequence
SDLKQY

SEQ ID NO: 37699 - protein, 6 aa, Artificial sequence
  Protein classification predicting sequence
EKLRAT

SEQ ID NO: 37700 - protein, 5 aa, Artificial sequence
  Protein classification predicting sequence
KHHAL

SEQ ID NO: 37701 - protein, 5 aa, Artificial sequence
  Protein classification predicting sequence
YYVYQ

SEQ ID NO: 37702 - protein, 6 aa, Artificial sequence
  Protein classification predicting sequence
LQNERM

SEQ ID NO: 37703 - protein, 7 aa, Artificial sequence
  Protein classification predicting sequence
SLLSSEP

SEQ ID NO: 37704 - protein, 6 aa, Artificial sequence
  Protein classification predicting sequence
VEGESL

SEQ ID NO: 37705 - protein, 7 aa, Artificial sequence
  Protein classification predicting sequence
IAAVCRE

SEQ ID NO: 37706 - protein, 7 aa, Artificial sequence
  Protein classification predicting sequence
IAALDVI

SEQ ID NO: 37707 - protein, 7 aa, Artificial sequence
  Protein classification predicting sequence
DSAEIGK

SEQ ID NO: 37708 - protein, 7 aa, Artificial sequence
  Protein classification predicting sequence
SEFNEII

SEQ ID NO: 37709 - protein, 5 aa, Artificial sequence
  Protein classification predicting sequence
GSRMG

SEQ ID NO: 37710 - protein, 7 aa, Artificial sequence
  Protein classification predicting sequence
GLQALPS

SEQ ID NO: 37711 - protein, 6 aa, Artificial sequence
  Protein classification predicting sequence
KQYLDL

SEQ ID NO: 37712 - protein, 5 aa, Artificial sequence
  Protein classification predicting sequence
NHTIM

SEQ ID NO: 37713 - protein, 5 aa, Artificial sequence
  Protein classification predicting sequence
TPQMF

SEQ ID NO: 37714 - protein, 5 aa, Artificial sequence
  Protein classification predicting sequence
AFFIR

SEQ ID NO: 37715 - protein, 5 aa, Artificial sequence
  Protein classification predicting sequence
SRSDM

SEQ ID NO: 37716 - protein, 6 aa, Artificial sequence
  Protein classification predicting sequence
LTSRAF

SEQ ID NO: 37717 - protein, 6 aa, Artificial sequence
  Protein classification predicting sequence
ISIETS

SEQ ID NO: 37718 - protein, 6 aa, Artificial sequence
  Protein classification predicting sequence
GFVAKG

SEQ ID NO: 37719 - protein, 6 aa, Artificial sequence
  Protein classification predicting sequence
AGDILT

SEQ ID NO: 37720 - protein, 6 aa, Artificial sequence
  Protein classification predicting sequence
SDKHHA

SEQ ID NO: 37721 - protein, 7 aa, Artificial sequence
  Protein classification predicting sequence
GLTLGAD

SEQ ID NO: 37722 - protein, 7 aa, Artificial sequence
  Protein classification predicting sequence
DDPSLSL

SEQ ID NO: 37723 - protein, 6 aa, Artificial sequence
  Protein classification predicting sequence
GEPFSH

SEQ ID NO: 37724 - protein, 6 aa, Artificial sequence
  Protein classification predicting sequence
ETLAEY

SEQ ID NO: 37725 - protein, 8 aa, Artificial sequence
  Protein classification predicting sequence
TNISYLKE

SEQ ID NO: 37726 - protein, 7 aa, Artificial sequence
  Protein classification predicting sequence
AAVSKGQ

SEQ ID NO: 37727 - protein, 6 aa, Artificial sequence
  Protein classification predicting sequence
VNASGE

SEQ ID NO: 37728 - protein, 7 aa, Artificial sequence
  Protein classification predicting sequence
GFEKGLS

SEQ ID NO: 37729 - protein, 5 aa, Artificial sequence
  Protein classification predicting sequence
TVLGH

SEQ ID NO: 37730 - protein, 5 aa, Artificial sequence
  Protein classification predicting sequence
GGCEF

SEQ ID NO: 37731 - protein, 8 aa, Artificial sequence
  Protein classification predicting sequence
GVDAVRAV

SEQ ID NO: 37732 - protein, 6 aa, Artificial sequence
  Protein classification predicting sequence
AYYFQQ

SEQ ID NO: 37733 - protein, 6 aa, Artificial sequence
  Protein classification predicting sequence
VSLPNL

SEQ ID NO: 37734 - protein, 6 aa, Artificial sequence
  Protein classification predicting sequence
VRAVVR

SEQ ID NO: 37735 - protein, 7 aa, Artificial sequence
  Protein classification predicting sequence
NKLVDHD

SEQ ID NO: 37736 - protein, 6 aa, Artificial sequence
  Protein classification predicting sequence
VGINDN

SEQ ID NO: 37737 - protein, 7 aa, Artificial sequence
  Protein classification predicting sequence
EINQRFL

SEQ ID NO: 37738 - protein, 6 aa, Artificial sequence
  Protein classification predicting sequence
GCKVYF

SEQ ID NO: 37739 - protein, 6 aa, Artificial sequence
  Protein classification predicting sequence
YEEKFS

SEQ ID NO: 37740 - protein, 5 aa, Artificial sequence
  Protein classification predicting sequence
EVMGR

SEQ ID NO: 37741 - protein, 6 aa, Artificial sequence
  Protein classification predicting sequence
GIYDGY

SEQ ID NO: 37742 - protein, 6 aa, Artificial sequence
  Protein classification predicting sequence
LDGVIQ

SEQ ID NO: 37743 - protein, 7 aa, Artificial sequence
  Protein classification predicting sequence
RFGIDAL

SEQ ID NO: 37744 - protein, 6 aa, Artificial sequence
  Protein classification predicting sequence
RLTEHG

SEQ ID NO: 37745 - protein, 6 aa, Artificial sequence
  Protein classification predicting sequence
VEEDKL

SEQ ID NO: 37746 - protein, 7 aa, Artificial sequence
  Protein classification predicting sequence
GTILAAT

SEQ ID NO: 37747 - protein, 5 aa, Artificial sequence
  Protein classification predicting sequence
HKSLR

SEQ ID NO: 37748 - protein, 6 aa, Artificial sequence
  Protein classification predicting sequence
SEGAID

SEQ ID NO: 37749 - protein, 6 aa, Artificial sequence
  Protein classification predicting sequence
LSGNHA

SEQ ID NO: 37750 - protein, 6 aa, Artificial sequence
  Protein classification predicting sequence
GKGTQA

SEQ ID NO: 37751 - protein, 6 aa, Artificial sequence
  Protein classification predicting sequence
IIENHE

SEQ ID NO: 37752 - protein, 6 aa, Artificial sequence
  Protein classification predicting sequence
GGEGYL

SEQ ID NO: 37753 - protein, 6 aa, Artificial sequence
  Protein classification predicting sequence
AMLSFS

SEQ ID NO: 37754 - protein, 7 aa, Artificial sequence
  Protein classification predicting sequence
IDVPREK

SEQ ID NO: 37755 - protein, 5 aa, Artificial sequence
  Protein classification predicting sequence
GNTYH

SEQ ID NO: 37756 - protein, 6 aa, Artificial sequence
  Protein classification predicting sequence
EFDVAD

SEQ ID NO: 37757 - protein, 7 aa, Artificial sequence
  Protein classification predicting sequence
RLDGTQK

SEQ ID NO: 37758 - protein, 6 aa, Artificial sequence
  Protein classification predicting sequence
LDGYPR

SEQ ID NO: 37759 - protein, 6 aa, Artificial sequence
  Protein classification predicting sequence
DGEQTP

SEQ ID NO: 37760 - protein, 6 aa, Artificial sequence
  Protein classification predicting sequence
FHVSFN

SEQ ID NO: 37761 - protein, 6 aa, Artificial sequence
  Protein classification predicting sequence
QVFNQI

SEQ ID NO: 37762 - protein, 6 aa, Artificial sequence
  Protein classification predicting sequence
PFDAII

SEQ ID NO: 37763 - protein, 6 aa, Artificial sequence
  Protein classification predicting sequence
VDAGKY

SEQ ID NO: 37764 - protein, 7 aa, Artificial sequence
  Protein classification predicting sequence
RDVDIVV

SEQ ID NO: 37765 - protein, 6 aa, Artificial sequence
  Protein classification predicting sequence
TVRKRL

SEQ ID NO: 37766 - protein, 6 aa, Artificial sequence
  Protein classification predicting sequence
FVTFEE

SEQ ID NO: 37767 - protein, 7 aa, Artificial sequence
  Protein classification predicting sequence
EYLVNEK

SEQ ID NO: 37768 - protein, 7 aa, Artificial sequence
  Protein classification predicting sequence
LKNPEVK

SEQ ID NO: 37769 - protein, 7 aa, Artificial sequence
  Protein classification predicting sequence
YAKLAAS

SEQ ID NO: 37770 - protein, 6 aa, Artificial sequence
  Protein classification predicting sequence
LPFSHD

SEQ ID NO: 37771 - protein, 7 aa, Artificial sequence
  Protein classification predicting sequence
ERRAIEK

SEQ ID NO: 37772 - protein, 7 aa, Artificial sequence
  Protein classification predicting sequence
CIERCLE

SEQ ID NO: 37773 - protein, 7 aa, Artificial sequence
  Protein classification predicting sequence
IVELAEK

SEQ ID NO: 37774 - protein, 5 aa, Artificial sequence
  Protein classification predicting sequence
LNHAS

SEQ ID NO: 37775 - protein, 6 aa, Artificial sequence
  Protein classification predicting sequence
LHSLGI

SEQ ID NO: 37776 - protein, 6 aa, Artificial sequence
  Protein classification predicting sequence
GLSPFP

SEQ ID NO: 37777 - protein, 6 aa, Artificial sequence
  Protein classification predicting sequence
GMTAFE

SEQ ID NO: 37778 - protein, 6 aa, Artificial sequence
  Protein classification predicting sequence
KAMTEQ

SEQ ID NO: 37779 - protein, 5 aa, Artificial sequence
  Protein classification predicting sequence
VDTSM

SEQ ID NO: 37780 - protein, 7 aa, Artificial sequence
  Protein classification predicting sequence
NGDYDAI

SEQ ID NO: 37781 - protein, 7 aa, Artificial sequence
  Protein classification predicting sequence
GPTASGK

SEQ ID NO: 37782 - protein, 7 aa, Artificial sequence
  Protein classification predicting sequence
RSAEAGQ

SEQ ID NO: 37783 - protein, 6 aa, Artificial sequence
  Protein classification predicting sequence
VALIPA

SEQ ID NO: 37784 - protein, 6 aa, Artificial sequence
  Protein classification predicting sequence
LTSKFP

SEQ ID NO: 37785 - protein, 5 aa, Artificial sequence
  Protein classification predicting sequence
SHMTI

SEQ ID NO: 37786 - protein, 7 aa, Artificial sequence
  Protein classification predicting sequence
LGIDPTT

SEQ ID NO: 37787 - protein, 6 aa, Artificial sequence
  Protein classification predicting sequence
GEEVTD

SEQ ID NO: 37788 - protein, 5 aa, Artificial sequence
  Protein classification predicting sequence
FMETH

SEQ ID NO: 37789 - protein, 6 aa, Artificial sequence
  Protein classification predicting sequence
AGRSPF

SEQ ID NO: 37790 - protein, 6 aa, Artificial sequence
  Protein classification predicting sequence
LQCRDP

SEQ ID NO: 37791 - protein, 6 aa, Artificial sequence
  Protein classification predicting sequence
EAHPNP

SEQ ID NO: 37792 - protein, 6 aa, Artificial sequence
  Protein classification predicting sequence
QPAGKK

SEQ ID NO: 37793 - protein, 6 aa, Artificial sequence
  Protein classification predicting sequence
NVLVTE

SEQ ID NO: 37794 - protein, 6 aa, Artificial sequence
  Protein classification predicting sequence
KKGQFL

SEQ ID NO: 37795 - protein, 6 aa, Artificial sequence
  Protein classification predicting sequence
QREFIE

SEQ ID NO: 37796 - protein, 5 aa, Artificial sequence
  Protein classification predicting sequence
GIFME

SEQ ID NO: 37797 - protein, 6 aa, Artificial sequence
  Protein classification predicting sequence
IDTAGT

SEQ ID NO: 37798 - protein, 7 aa, Artificial sequence
  Protein classification predicting sequence
VCAVGKP

SEQ ID NO: 37799 - protein, 7 aa, Artificial sequence
  Protein classification predicting sequence
EPLVPPV

SEQ ID NO: 37800 - protein, 6 aa, Artificial sequence
  Protein classification predicting sequence
GLQRIE

SEQ ID NO: 37801 - protein, 6 aa, Artificial sequence
  Protein classification predicting sequence
EPPPEP

SEQ ID NO: 37802 - protein, 6 aa, Artificial sequence
  Protein classification predicting sequence
DTNIQY

SEQ ID NO: 37803 - protein, 7 aa, Artificial sequence
  Protein classification predicting sequence
EQVEKQL

SEQ ID NO: 37804 - protein, 7 aa, Artificial sequence
  Protein classification predicting sequence
GPTAVGK

SEQ ID NO: 37805 - protein, 6 aa, Artificial sequence
  Protein classification predicting sequence
GVDYFF

SEQ ID NO: 37806 - protein, 6 aa, Artificial sequence
  Protein classification predicting sequence
LTKDYQ

SEQ ID NO: 37807 - protein, 6 aa, Artificial sequence
  Protein classification predicting sequence
KDFNWI

SEQ ID NO: 37808 - protein, 7 aa, Artificial sequence
  Protein classification predicting sequence
TIFVDPP

SEQ ID NO: 37809 - protein, 6 aa, Artificial sequence
  Protein classification predicting sequence
FILPPS

SEQ ID NO: 37810 - protein, 6 aa, Artificial sequence
  Protein classification predicting sequence
FEALIK

SEQ ID NO: 37811 - protein, 5 aa, Artificial sequence
  Protein classification predicting sequence
KIQSR

SEQ ID NO: 37812 - protein, 5 aa, Artificial sequence
  Protein classification predicting sequence
RFKSA

SEQ ID NO: 37813 - protein, 6 aa, Artificial sequence
  Protein classification predicting sequence
VTDEVF

SEQ ID NO: 37814 - protein, 6 aa, Artificial sequence
  Protein classification predicting sequence
RPAAII

SEQ ID NO: 37815 - protein, 5 aa, Artificial sequence
  Protein classification predicting sequence
CFLDS

SEQ ID NO: 37816 - protein, 5 aa, Artificial sequence
  Protein classification predicting sequence
DRIYH

SEQ ID NO: 37817 - protein, 6 aa, Artificial sequence
  Protein classification predicting sequence
DSAGVA

SEQ ID NO: 37818 - protein, 6 aa, Artificial sequence
  Protein classification predicting sequence
VGGLAV

SEQ ID NO: 37819 - protein, 7 aa, Artificial sequence
  Protein classification predicting sequence
VEVEVEN

SEQ ID NO: 37820 - protein, 6 aa, Artificial sequence
  Protein classification predicting sequence
EPNGLL

SEQ ID NO: 37821 - protein, 5 aa, Artificial sequence
  Protein classification predicting sequence
VWDVG

SEQ ID NO: 37822 - protein, 6 aa, Artificial sequence
  Protein classification predicting sequence
PMKRVT

SEQ ID NO: 37823 - protein, 5 aa, Artificial sequence
  Protein classification predicting sequence
WFQAH

SEQ ID NO: 37824 - protein, 6 aa, Artificial sequence
  Protein classification predicting sequence
QNTMVN

SEQ ID NO: 37825 - protein, 6 aa, Artificial sequence
  Protein classification predicting sequence
VNSNYY

SEQ ID NO: 37826 - protein, 6 aa, Artificial sequence
  Protein classification predicting sequence
HPLLPN

SEQ ID NO: 37827 - protein, 7 aa, Artificial sequence
  Protein classification predicting sequence
LAKMNGR

SEQ ID NO: 37828 - protein, 6 aa, Artificial sequence
  Protein classification predicting sequence
DTEVIA

SEQ ID NO: 37829 - protein, 6 aa, Artificial sequence
  Protein classification predicting sequence
GRSRTG

SEQ ID NO: 37830 - protein, 6 aa, Artificial sequence
  Protein classification predicting sequence
NPSLIL

SEQ ID NO: 37831 - protein, 6 aa, Artificial sequence
  Protein classification predicting sequence
LPMHLF

SEQ ID NO: 37832 - protein, 6 aa, Artificial sequence
  Protein classification predicting sequence
CQALAD

SEQ ID NO: 37833 - protein, 5 aa, Artificial sequence
  Protein classification predicting sequence
YLLAW

SEQ ID NO: 37834 - protein, 7 aa, Artificial sequence
  Protein classification predicting sequence
FGTGKVS

SEQ ID NO: 37835 - protein, 6 aa, Artificial sequence
  Protein classification predicting sequence
ILKLIP

SEQ ID NO: 37836 - protein, 7 aa, Artificial sequence
  Protein classification predicting sequence
TEAVEAA

SEQ ID NO: 37837 - protein, 6 aa, Artificial sequence
  Protein classification predicting sequence
VVSHNG

SEQ ID NO: 37838 - protein, 5 aa, Artificial sequence
  Protein classification predicting sequence
PVNMS

SEQ ID NO: 37839 - protein, 8 aa, Artificial sequence
  Protein classification predicting sequence
GKPLPKNM

SEQ ID NO: 37840 - protein, 6 aa, Artificial sequence
  Protein classification predicting sequence
SYQVAK

SEQ ID NO: 37841 - protein, 6 aa, Artificial sequence
  Protein classification predicting sequence
NSVGSS

SEQ ID NO: 37842 - protein, 6 aa, Artificial sequence
  Protein classification predicting sequence
VPSVVS

SEQ ID NO: 37843 - protein, 5 aa, Artificial sequence
  Protein classification predicting sequence
TPAFM

SEQ ID NO: 37844 - protein, 6 aa, Artificial sequence
  Protein classification predicting sequence
YEYYEK

SEQ ID NO: 37845 - protein, 6 aa, Artificial sequence
  Protein classification predicting sequence
DINREN

SEQ ID NO: 37846 - protein, 7 aa, Artificial sequence
  Protein classification predicting sequence
RSVSSKS

SEQ ID NO: 37847 - protein, 6 aa, Artificial sequence
  Protein classification predicting sequence
LCVHKK

SEQ ID NO: 37848 - protein, 6 aa, Artificial sequence
  Protein classification predicting sequence
IGLFFL

SEQ ID NO: 37849 - protein, 6 aa, Artificial sequence
  Protein classification predicting sequence
RKKETS

SEQ ID NO: 37850 - protein, 5 aa, Artificial sequence
  Protein classification predicting sequence
MNFSH

SEQ ID NO: 37851 - protein, 7 aa, Artificial sequence
  Protein classification predicting sequence
TQLIPDD

SEQ ID NO: 37852 - protein, 7 aa, Artificial sequence
  Protein classification predicting sequence
ESTGEVQ

SEQ ID NO: 37853 - protein, 6 aa, Artificial sequence
  Protein classification predicting sequence
IDTIVV

SEQ ID NO: 37854 - protein, 6 aa, Artificial sequence
  Protein classification predicting sequence
KVSVGA

SEQ ID NO: 37855 - protein, 6 aa, Artificial sequence
  Protein classification predicting sequence
DVKGKR

SEQ ID NO: 37856 - protein, 6 aa, Artificial sequence
  Protein classification predicting sequence
VIVVAP

SEQ ID NO: 37857 - protein, 6 aa, Artificial sequence
  Protein classification predicting sequence
DGSVSS

SEQ ID NO: 37858 - protein, 6 aa, Artificial sequence
  Protein classification predicting sequence
FAYNRK

SEQ ID NO: 37859 - protein, 7 aa, Artificial sequence
  Protein classification predicting sequence
SSPAVIF

SEQ ID NO: 37860 - protein, 6 aa, Artificial sequence
  Protein classification predicting sequence
NLMELL

SEQ ID NO: 37861 - protein, 6 aa, Artificial sequence
  Protein classification predicting sequence
AKSVTV

SEQ ID NO: 37862 - protein, 7 aa, Artificial sequence
  Protein classification predicting sequence
VSEVSAA

SEQ ID NO: 37863 - protein, 6 aa, Artificial sequence
  Protein classification predicting sequence
PAPVNR

SEQ ID NO: 37864 - protein, 6 aa, Artificial sequence
  Protein classification predicting sequence
VDLGII

SEQ ID NO: 37865 - protein, 6 aa, Artificial sequence
  Protein classification predicting sequence
RLVIKN

SEQ ID NO: 37866 - protein, 7 aa, Artificial sequence
  Protein classification predicting sequence
IRAAEIL

SEQ ID NO: 37867 - protein, 6 aa, Artificial sequence
  Protein classification predicting sequence
NIIGEV

SEQ ID NO: 37868 - protein, 6 aa, Artificial sequence
  Protein classification predicting sequence
VMNIIG

SEQ ID NO: 37869 - protein, 5 aa, Artificial sequence
  Protein classification predicting sequence
SHMGE

SEQ ID NO: 37870 - protein, 6 aa, Artificial sequence
  Protein classification predicting sequence
AIKDMQ

SEQ ID NO: 37871 - protein, 6 aa, Artificial sequence
  Protein classification predicting sequence
VITAGT

SEQ ID NO: 37872 - protein, 8 aa, Artificial sequence
  Protein classification predicting sequence
DSMRKVLE

SEQ ID NO: 37873 - protein, 6 aa, Artificial sequence
  Protein classification predicting sequence
QEHMVE

SEQ ID NO: 37874 - protein, 7 aa, Artificial sequence
  Protein classification predicting sequence
QEGVDNI

SEQ ID NO: 37875 - protein, 6 aa, Artificial sequence
  Protein classification predicting sequence
TKAGNK

SEQ ID NO: 37876 - protein, 6 aa, Artificial sequence
  Protein classification predicting sequence
FEVAEK

SEQ ID NO: 37877 - protein, 5 aa, Artificial sequence
  Protein classification predicting sequence
FKCCA

SEQ ID NO: 37878 - protein, 6 aa, Artificial sequence
  Protein classification predicting sequence
NGGELF

SEQ ID NO: 37879 - protein, 6 aa, Artificial sequence
  Protein classification predicting sequence
VAVKTL

SEQ ID NO: 37880 - protein, 6 aa, Artificial sequence
  Protein classification predicting sequence
LTDFGL

SEQ ID NO: 37881 - protein, 6 aa, Artificial sequence
  Protein classification predicting sequence
GLNATF

SEQ ID NO: 37882 - protein, 5 aa, Artificial sequence
  Protein classification predicting sequence
TLFQF

SEQ ID NO: 37883 - protein, 6 aa, Artificial sequence
  Protein classification predicting sequence
LSGGEL

SEQ ID NO: 37884 - protein, 6 aa, Artificial sequence
  Protein classification predicting sequence
PDISDV

SEQ ID NO: 37885 - protein, 8 aa, Artificial sequence
  Protein classification predicting sequence
GSYALGLL

SEQ ID NO: 37886 - protein, 7 aa, Artificial sequence
  Protein classification predicting sequence
ERAGNAA

SEQ ID NO: 37887 - protein, 6 aa, Artificial sequence
  Protein classification predicting sequence
DRFVLS

SEQ ID NO: 37888 - protein, 6 aa, Artificial sequence
  Protein classification predicting sequence
VDATQS

SEQ ID NO: 37889 - protein, 6 aa, Artificial sequence
  Protein classification predicting sequence
EEIIKP

SEQ ID NO: 37890 - protein, 6 aa, Artificial sequence
  Protein classification predicting sequence
GKERFE

SEQ ID NO: 37891 - protein, 6 aa, Artificial sequence
  Protein classification predicting sequence
NFALNY

SEQ ID NO: 37892 - protein, 6 aa, Artificial sequence
  Protein classification predicting sequence
QLTREP

SEQ ID NO: 37893 - protein, 8 aa, Artificial sequence
  Protein classification predicting sequence
AGKVVISD

SEQ ID NO: 37894 - protein, 6 aa, Artificial sequence
  Protein classification predicting sequence
MFPSQG

SEQ ID NO: 37895 - protein, 5 aa, Artificial sequence
  Protein classification predicting sequence
NWNRP

SEQ ID NO: 37896 - protein, 6 aa, Artificial sequence
  Protein classification predicting sequence
RYKFYL

SEQ ID NO: 37897 - protein, 6 aa, Artificial sequence
  Protein classification predicting sequence
ADTIGI

SEQ ID NO: 37898 - protein, 7 aa, Artificial sequence
  Protein classification predicting sequence
IINSIGF

SEQ ID NO: 37899 - protein, 6 aa, Artificial sequence
  Protein classification predicting sequence
HKRRIV

SEQ ID NO: 37900 - protein, 6 aa, Artificial sequence
  Protein classification predicting sequence
EITTKA

SEQ ID NO: 37901 - protein, 6 aa, Artificial sequence
  Protein classification predicting sequence
LEEVVM

SEQ ID NO: 37902 - protein, 6 aa, Artificial sequence
  Protein classification predicting sequence
TNVKTW

SEQ ID NO: 37903 - protein, 5 aa, Artificial sequence
  Protein classification predicting sequence
RWCVE

SEQ ID NO: 37904 - protein, 7 aa, Artificial sequence
  Protein classification predicting sequence
GVNTNIV

SEQ ID NO: 37905 - protein, 7 aa, Artificial sequence
  Protein classification predicting sequence
LLCRITG

SEQ ID NO: 37906 - protein, 6 aa, Artificial sequence
  Protein classification predicting sequence
LADVYV

SEQ ID NO: 37907 - protein, 6 aa, Artificial sequence
  Protein classification predicting sequence
ANSITA

SEQ ID NO: 37908 - protein, 5 aa, Artificial sequence
  Protein classification predicting sequence
ELYCG

SEQ ID NO: 37909 - protein, 6 aa, Artificial sequence
  Protein classification predicting sequence
GATNLV

SEQ ID NO: 37910 - protein, 7 aa, Artificial sequence
  Protein classification predicting sequence
LDSEEAL

SEQ ID NO: 37911 - protein, 6 aa, Artificial sequence
  Protein classification predicting sequence
GFKEIE

SEQ ID NO: 37912 - protein, 6 aa, Artificial sequence
  Protein classification predicting sequence
LAIKGA

SEQ ID NO: 37913 - protein, 6 aa, Artificial sequence
  Protein classification predicting sequence
DTRQIY

SEQ ID NO: 37914 - protein, 6 aa, Artificial sequence
  Protein classification predicting sequence
VQVSCG

SEQ ID NO: 37915 - protein, 6 aa, Artificial sequence
  Protein classification predicting sequence
DIKNHK

SEQ ID NO: 37916 - protein, 6 aa, Artificial sequence
  Protein classification predicting sequence
IKHSRV

SEQ ID NO: 37917 - protein, 6 aa, Artificial sequence
  Protein classification predicting sequence
YATKYT

SEQ ID NO: 37918 - protein, 6 aa, Artificial sequence
  Protein classification predicting sequence
AVYHEQ

SEQ ID NO: 37919 - protein, 7 aa, Artificial sequence
  Protein classification predicting sequence
AGIRVPR

SEQ ID NO: 37920 - protein, 5 aa, Artificial sequence
  Protein classification predicting sequence
SVTEG

SEQ ID NO: 37921 - protein, 7 aa, Artificial sequence
  Protein classification predicting sequence
KFIESDK

SEQ ID NO: 37922 - protein, 7 aa, Artificial sequence
  Protein classification predicting sequence
LGAIEIP

SEQ ID NO: 37923 - protein, 6 aa, Artificial sequence
  Protein classification predicting sequence
FADYLQ

SEQ ID NO: 37924 - protein, 6 aa, Artificial sequence
  Protein classification predicting sequence
LWPEKF

SEQ ID NO: 37925 - protein, 6 aa, Artificial sequence
  Protein classification predicting sequence
DRERFL

SEQ ID NO: 37926 - protein, 5 aa, Artificial sequence
  Protein classification predicting sequence
VDWWA

SEQ ID NO: 37927 - protein, 6 aa, Artificial sequence
  Protein classification predicting sequence
AIVGDI

SEQ ID NO: 37928 - protein, 12 aa, Artificial sequence
  Protein classification predicting sequence
PGAKIGKNVVIE

SEQ ID NO: 37929 - protein, 7 aa, Artificial sequence
  Protein classification predicting sequence
PGAKIGK

SEQ ID NO: 37930 - protein, 6 aa, Artificial sequence
  Protein classification predicting sequence
PLAFDT

SEQ ID NO: 37931 - protein, 7 aa, Artificial sequence
  Protein classification predicting sequence
GPQVEIG

SEQ ID NO: 37932 - protein, 7 aa, Artificial sequence
  Protein classification predicting sequence
DLTKRFG

SEQ ID NO: 37933 - protein, 6 aa, Artificial sequence
  Protein classification predicting sequence
EPFLKT

SEQ ID NO: 37934 - protein, 7 aa, Artificial sequence
  Protein classification predicting sequence
YKISPLT

SEQ ID NO: 37935 - protein, 6 aa, Artificial sequence
  Protein classification predicting sequence
FVLPCA

SEQ ID NO: 37936 - protein, 6 aa, Artificial sequence
  Protein classification predicting sequence
GSQQVE

SEQ ID NO: 37937 - protein, 6 aa, Artificial sequence
  Protein classification predicting sequence
SQQVPG

SEQ ID NO: 37938 - protein, 7 aa, Artificial sequence
  Protein classification predicting sequence
FTYRVAK

SEQ ID NO: 37939 - protein, 6 aa, Artificial sequence
  Protein classification predicting sequence
HIVAPS

SEQ ID NO: 37940 - protein, 6 aa, Artificial sequence
  Protein classification predicting sequence
YKKTKK

SEQ ID NO: 37941 - protein, 7 aa, Artificial sequence
  Protein classification predicting sequence
FFSTLNR

SEQ ID NO: 37942 - protein, 6 aa, Artificial sequence
  Protein classification predicting sequence
LKTRGW

SEQ ID NO: 37943 - protein, 6 aa, Artificial sequence
  Protein classification predicting sequence
PVRVDT

SEQ ID NO: 37944 - protein, 6 aa, Artificial sequence
  Protein classification predicting sequence
HPDVEL

SEQ ID NO: 37945 - protein, 7 aa, Artificial sequence
  Protein classification predicting sequence
GGVPRSG

SEQ ID NO: 37946 - protein, 7 aa, Artificial sequence
  Protein classification predicting sequence
QPTALIN

SEQ ID NO: 37947 - protein, 8 aa, Artificial sequence
  Protein classification predicting sequence
PLTIALVA

SEQ ID NO: 37948 - protein, 7 aa, Artificial sequence
  Protein classification predicting sequence
LLTGEVP

SEQ ID NO: 37949 - protein, 7 aa, Artificial sequence
  Protein classification predicting sequence
DESETAV

SEQ ID NO: 37950 - protein, 7 aa, Artificial sequence
  Protein classification predicting sequence
PGGSVKD

SEQ ID NO: 37951 - protein, 6 aa, Artificial sequence
  Protein classification predicting sequence
LPDSDG

SEQ ID NO: 37952 - protein, 6 aa, Artificial sequence
  Protein classification predicting sequence
LQDMHE

SEQ ID NO: 37953 - protein, 5 aa, Artificial sequence
  Protein classification predicting sequence
YQKCC

SEQ ID NO: 37954 - protein, 7 aa, Artificial sequence
  Protein classification predicting sequence
EYLHSLD

SEQ ID NO: 37955 - protein, 7 aa, Artificial sequence
  Protein classification predicting sequence
ELGKQIP

SEQ ID NO: 37956 - protein, 6 aa, Artificial sequence
  Protein classification predicting sequence
DKDIAW

SEQ ID NO: 37957 - protein, 6 aa, Artificial sequence
  Protein classification predicting sequence
VCNEGI

SEQ ID NO: 37958 - protein, 7 aa, Artificial sequence
  Protein classification predicting sequence
VMAGGTG

SEQ ID NO: 37959 - protein, 6 aa, Artificial sequence
  Protein classification predicting sequence
GTAKVT

SEQ ID NO: 37960 - protein, 6 aa, Artificial sequence
  Protein classification predicting sequence
MQEAWK

SEQ ID NO: 37961 - protein, 6 aa, Artificial sequence
  Protein classification predicting sequence
DSLVGQ

SEQ ID NO: 37962 - protein, 5 aa, Artificial sequence
  Protein classification predicting sequence
RTIGK

SEQ ID NO: 37963 - protein, 6 aa, Artificial sequence
  Protein classification predicting sequence
LETSVY

SEQ ID NO: 37964 - protein, 6 aa, Artificial sequence
  Protein classification predicting sequence
VPPAVA

SEQ ID NO: 37965 - protein, 6 aa, Artificial sequence
  Protein classification predicting sequence
DLLIRT

SEQ ID NO: 37966 - protein, 6 aa, Artificial sequence
  Protein classification predicting sequence
FNDILG

SEQ ID NO: 37967 - protein, 7 aa, Artificial sequence
  Protein classification predicting sequence
ILTKDAL

SEQ ID NO: 37968 - protein, 5 aa, Artificial sequence
  Protein classification predicting sequence
CQLYQ

SEQ ID NO: 37969 - protein, 6 aa, Artificial sequence
  Protein classification predicting sequence
DQLIHD

SEQ ID NO: 37970 - protein, 6 aa, Artificial sequence
  Protein classification predicting sequence
KGYNKA

SEQ ID NO: 37971 - protein, 6 aa, Artificial sequence
  Protein classification predicting sequence
NSRTGS

SEQ ID NO: 37972 - protein, 5 aa, Artificial sequence
  Protein classification predicting sequence
DCEDS

SEQ ID NO: 37973 - protein, 7 aa, Artificial sequence
  Protein classification predicting sequence
AVQQGLA

SEQ ID NO: 37974 - protein, 6 aa, Artificial sequence
  Protein classification predicting sequence
EGSDFQ

SEQ ID NO: 37975 - protein, 6 aa, Artificial sequence
  Protein classification predicting sequence
MLEQKI

SEQ ID NO: 37976 - protein, 7 aa, Artificial sequence
  Protein classification predicting sequence
SSPTWEN

SEQ ID NO: 37977 - protein, 5 aa, Artificial sequence
  Protein classification predicting sequence
VFFCN

SEQ ID NO: 37978 - protein, 5 aa, Artificial sequence
  Protein classification predicting sequence
TSYHA

SEQ ID NO: 37979 - protein, 6 aa, Artificial sequence
  Protein classification predicting sequence
PEGERD

SEQ ID NO: 37980 - protein, 7 aa, Artificial sequence
  Protein classification predicting sequence
DVVEDIA

SEQ ID NO: 37981 - protein, 6 aa, Artificial sequence
  Protein classification predicting sequence
RTYQVC

SEQ ID NO: 37982 - protein, 6 aa, Artificial sequence
  Protein classification predicting sequence
AGIEES

SEQ ID NO: 37983 - protein, 5 aa, Artificial sequence
  Protein classification predicting sequence
GCQVP

SEQ ID NO: 37984 - protein, 6 aa, Artificial sequence
  Protein classification predicting sequence
SVERTS

SEQ ID NO: 37985 - protein, 6 aa, Artificial sequence
  Protein classification predicting sequence
REIADE

SEQ ID NO: 37986 - protein, 5 aa, Artificial sequence
  Protein classification predicting sequence
EPIQG

SEQ ID NO: 37987 - protein, 6 aa, Artificial sequence
  Protein classification predicting sequence
AKITTI

SEQ ID NO: 37988 - protein, 6 aa, Artificial sequence
  Protein classification predicting sequence
ISTKRF

SEQ ID NO: 37989 - protein, 6 aa, Artificial sequence
  Protein classification predicting sequence
GLIDYD

SEQ ID NO: 37990 - protein, 6 aa, Artificial sequence
  Protein classification predicting sequence
FFAPHS

SEQ ID NO: 37991 - protein, 6 aa, Artificial sequence
  Protein classification predicting sequence
STITMK

SEQ ID NO: 37992 - protein, 5 aa, Artificial sequence
  Protein classification predicting sequence
HYDYV

SEQ ID NO: 37993 - protein, 7 aa, Artificial sequence
  Protein classification predicting sequence
AKYSMED

SEQ ID NO: 37994 - protein, 8 aa, Artificial sequence
  Protein classification predicting sequence
VPNVKLLR

SEQ ID NO: 37995 - protein, 5 aa, Artificial sequence
  Protein classification predicting sequence
MPKKI

SEQ ID NO: 37996 - protein, 8 aa, Artificial sequence
  Protein classification predicting sequence
LLDDPRHR

SEQ ID NO: 37997 - protein, 7 aa, Artificial sequence
  Protein classification predicting sequence
KIGSALL

SEQ ID NO: 37998 - protein, 6 aa, Artificial sequence
  Protein classification predicting sequence
PLNIVI

SEQ ID NO: 37999 - protein, 6 aa, Artificial sequence
  Protein classification predicting sequence
PEVPYN

SEQ ID NO: 38000 - protein, 6 aa, Artificial sequence
  Protein classification predicting sequence
TRGFDE

SEQ ID NO: 38001 - protein, 6 aa, Artificial sequence
  Protein classification predicting sequence
ITERQI

SEQ ID NO: 38002 - protein, 5 aa, Artificial sequence
  Protein classification predicting sequence
EFLYM

SEQ ID NO: 38003 - protein, 7 aa, Artificial sequence
  Protein classification predicting sequence
DAGVPIK

SEQ ID NO: 38004 - protein, 5 aa, Artificial sequence
  Protein classification predicting sequence
YPNDN

SEQ ID NO: 38005 - protein, 6 aa, Artificial sequence
  Protein classification predicting sequence
KICHLA

SEQ ID NO: 38006 - protein, 6 aa, Artificial sequence
  Protein classification predicting sequence
GMFSFT

SEQ ID NO: 38007 - protein, 6 aa, Artificial sequence
  Protein classification predicting sequence
RPAPMT

SEQ ID NO: 38008 - protein, 5 aa, Artificial sequence
  Protein classification predicting sequence
LGYPR

SEQ ID NO: 38009 - protein, 7 aa, Artificial sequence
  Protein classification predicting sequence
VEQSLEV

SEQ ID NO: 38010 - protein, 6 aa, Artificial sequence
  Protein classification predicting sequence
LEAYWK

SEQ ID NO: 38011 - protein, 6 aa, Artificial sequence
  Protein classification predicting sequence
VPVAKH

SEQ ID NO: 38012 - protein, 7 aa, Artificial sequence
  Protein classification predicting sequence
LKHFAFA

SEQ ID NO: 38013 - protein, 6 aa, Artificial sequence
  Protein classification predicting sequence
TAGVGE

SEQ ID NO: 38014 - protein, 6 aa, Artificial sequence
  Protein classification predicting sequence
LGPPGA

SEQ ID NO: 38015 - protein, 6 aa, Artificial sequence
  Protein classification predicting sequence
YDHVLD

SEQ ID NO: 38016 - protein, 7 aa, Artificial sequence
  Protein classification predicting sequence
SAGLAVV

SEQ ID NO: 38017 - protein, 6 aa, Artificial sequence
  Protein classification predicting sequence
DFSFYD

SEQ ID NO: 38018 - protein, 6 aa, Artificial sequence
  Protein classification predicting sequence
DDIIDT

SEQ ID NO: 38019 - protein, 6 aa, Artificial sequence
  Protein classification predicting sequence
DIIDAI

SEQ ID NO: 38020 - protein, 7 aa, Artificial sequence
  Protein classification predicting sequence
EIIVNIQ

SEQ ID NO: 38021 - protein, 6 aa, Artificial sequence
  Protein classification predicting sequence
ALDGYF

SEQ ID NO: 38022 - protein, 5 aa, Artificial sequence
  Protein classification predicting sequence
RYQKT

SEQ ID NO: 38023 - protein, 6 aa, Artificial sequence
  Protein classification predicting sequence
RLPQLV

SEQ ID NO: 38024 - protein, 7 aa, Artificial sequence
  Protein classification predicting sequence
VGGEITT

SEQ ID NO: 38025 - protein, 6 aa, Artificial sequence
  Protein classification predicting sequence
ESVTEG

SEQ ID NO: 38026 - protein, 6 aa, Artificial sequence
  Protein classification predicting sequence
WAERCL

SEQ ID NO: 38027 - protein, 6 aa, Artificial sequence
  Protein classification predicting sequence
PLRPAE

SEQ ID NO: 38028 - protein, 6 aa, Artificial sequence
  Protein classification predicting sequence
KYGFDA

SEQ ID NO: 38029 - protein, 6 aa, Artificial sequence
  Protein classification predicting sequence
QSADIA

SEQ ID NO: 38030 - protein, 6 aa, Artificial sequence
  Protein classification predicting sequence
QSPDIA

SEQ ID NO: 38031 - protein, 6 aa, Artificial sequence
  Protein classification predicting sequence
IGYDNT

SEQ ID NO: 38032 - protein, 5 aa, Artificial sequence
  Protein classification predicting sequence
WLRPD

SEQ ID NO: 38033 - protein, 6 aa, Artificial sequence
  Protein classification predicting sequence
VQTIAR

SEQ ID NO: 38034 - protein, 6 aa, Artificial sequence
  Protein classification predicting sequence
LRPDAK

SEQ ID NO: 38035 - protein, 6 aa, Artificial sequence
  Protein classification predicting sequence
RYIAKN

SEQ ID NO: 38036 - protein, 6 aa, Artificial sequence
  Protein classification predicting sequence
DTVVIS

SEQ ID NO: 38037 - protein, 6 aa, Artificial sequence
  Protein classification predicting sequence
DKAEAL

SEQ ID NO: 38038 - protein, 6 aa, Artificial sequence
  Protein classification predicting sequence
TDVDLP

SEQ ID NO: 38039 - protein, 5 aa, Artificial sequence
  Protein classification predicting sequence
GGFTW

SEQ ID NO: 38040 - protein, 5 aa, Artificial sequence
  Protein classification predicting sequence
YGHFG

SEQ ID NO: 38041 - protein, 5 aa, Artificial sequence
  Protein classification predicting sequence
SQIGH

SEQ ID NO: 38042 - protein, 6 aa, Artificial sequence
  Protein classification predicting sequence
FVVGGP

SEQ ID NO: 38043 - protein, 6 aa, Artificial sequence
  Protein classification predicting sequence
KSGRLS

SEQ ID NO: 38044 - protein, 5 aa, Artificial sequence
  Protein classification predicting sequence
PWLRP

SEQ ID NO: 38045 - protein, 6 aa, Artificial sequence
  Protein classification predicting sequence
NGLITP

SEQ ID NO: 38046 - protein, 7 aa, Artificial sequence
  Protein classification predicting sequence
ADALAEA

SEQ ID NO: 38047 - protein, 6 aa, Artificial sequence
  Protein classification predicting sequence
VDIEQV

SEQ ID NO: 38048 - protein, 6 aa, Artificial sequence
  Protein classification predicting sequence
SDAILD

SEQ ID NO: 38049 - protein, 7 aa, Artificial sequence
  Protein classification predicting sequence
SDAILDA

SEQ ID NO: 38050 - protein, 6 aa, Artificial sequence
  Protein classification predicting sequence
VWRADL

SEQ ID NO: 38051 - protein, 6 aa, Artificial sequence
  Protein classification predicting sequence
YILLSG

SEQ ID NO: 38052 - protein, 6 aa, Artificial sequence
  Protein classification predicting sequence
VYINTA

SEQ ID NO: 38053 - protein, 7 aa, Artificial sequence
  Protein classification predicting sequence
ADFAESI

SEQ ID NO: 38054 - protein, 6 aa, Artificial sequence
  Protein classification predicting sequence
IKMLDL

SEQ ID NO: 38055 - protein, 6 aa, Artificial sequence
  Protein classification predicting sequence
FGRRMQ

SEQ ID NO: 38056 - protein, 6 aa, Artificial sequence
  Protein classification predicting sequence
VGPGKP

SEQ ID NO: 38057 - protein, 6 aa, Artificial sequence
  Protein classification predicting sequence
ENPLGP

SEQ ID NO: 38058 - protein, 6 aa, Artificial sequence
  Protein classification predicting sequence
DIRTEA

SEQ ID NO: 38059 - protein, 8 aa, Artificial sequence
  Protein classification predicting sequence
SVGIVEEQ

SEQ ID NO: 38060 - protein, 6 aa, Artificial sequence
  Protein classification predicting sequence
AVVGGS

SEQ ID NO: 38061 - protein, 7 aa, Artificial sequence
  Protein classification predicting sequence
FEPKIRS

SEQ ID NO: 38062 - protein, 6 aa, Artificial sequence
  Protein classification predicting sequence
FPLVTT

SEQ ID NO: 38063 - protein, 6 aa, Artificial sequence
  Protein classification predicting sequence
GLVSPQ

SEQ ID NO: 38064 - protein, 6 aa, Artificial sequence
  Protein classification predicting sequence
YMNRIS

SEQ ID NO: 38065 - protein, 6 aa, Artificial sequence
  Protein classification predicting sequence
PFSHEE

SEQ ID NO: 38066 - protein, 7 aa, Artificial sequence
  Protein classification predicting sequence
GRRVHLA

SEQ ID NO: 38067 - protein, 6 aa, Artificial sequence
  Protein classification predicting sequence
GRGGDH

SEQ ID NO: 38068 - protein, 7 aa, Artificial sequence
  Protein classification predicting sequence
MISINLD

SEQ ID NO: 38069 - protein, 6 aa, Artificial sequence
  Protein classification predicting sequence
EMYDYL

SEQ ID NO: 38070 - protein, 6 aa, Artificial sequence
  Protein classification predicting sequence
QQSQRY

SEQ ID NO: 38071 - protein, 7 aa, Artificial sequence
  Protein classification predicting sequence
GDNVLIA

SEQ ID NO: 38072 - protein, 6 aa, Artificial sequence
  Protein classification predicting sequence
VSILNL

SEQ ID NO: 38073 - protein, 6 aa, Artificial sequence
  Protein classification predicting sequence
ARIDAR

SEQ ID NO: 38074 - protein, 7 aa, Artificial sequence
  Protein classification predicting sequence
GAIDEVR

SEQ ID NO: 38075 - protein, 6 aa, Artificial sequence
  Protein classification predicting sequence
EIGVTR

SEQ ID NO: 38076 - protein, 7 aa, Artificial sequence
  Protein classification predicting sequence
LRQELPV

SEQ ID NO: 38077 - protein, 7 aa, Artificial sequence
  Protein classification predicting sequence
KLYQRED

SEQ ID NO: 38078 - protein, 6 aa, Artificial sequence
  Protein classification predicting sequence
DMPGAD

SEQ ID NO: 38079 - protein, 6 aa, Artificial sequence
  Protein classification predicting sequence
NAAVRA

SEQ ID NO: 38080 - protein, 7 aa, Artificial sequence
  Protein classification predicting sequence
GVCSTRQ

SEQ ID NO: 38081 - protein, 7 aa, Artificial sequence
  Protein classification predicting sequence
QPKVVFL

SEQ ID NO: 38082 - protein, 6 aa, Artificial sequence
  Protein classification predicting sequence
IGYKEL

SEQ ID NO: 38083 - protein, 7 aa, Artificial sequence
  Protein classification predicting sequence
ADDLENA

SEQ ID NO: 38084 - protein, 7 aa, Artificial sequence
  Protein classification predicting sequence
MVEAGLV

SEQ ID NO: 38085 - protein, 6 aa, Artificial sequence
  Protein classification predicting sequence
PSARIS

SEQ ID NO: 38086 - protein, 5 aa, Artificial sequence
  Protein classification predicting sequence
RPFQS

SEQ ID NO: 38087 - protein, 6 aa, Artificial sequence
  Protein classification predicting sequence
PVSETC

SEQ ID NO: 38088 - protein, 6 aa, Artificial sequence
  Protein classification predicting sequence
YGNMSS

SEQ ID NO: 38089 - protein, 6 aa, Artificial sequence
  Protein classification predicting sequence
HLDLKP

SEQ ID NO: 38090 - protein, 5 aa, Artificial sequence
  Protein classification predicting sequence
PAQQR

SEQ ID NO: 38091 - protein, 6 aa, Artificial sequence
  Protein classification predicting sequence
DTKNST

SEQ ID NO: 38092 - protein, 6 aa, Artificial sequence
  Protein classification predicting sequence
GDIRFA

SEQ ID NO: 38093 - protein, 5 aa, Artificial sequence
  Protein classification predicting sequence
FLFGP

SEQ ID NO: 38094 - protein, 7 aa, Artificial sequence
  Protein classification predicting sequence
LPLGKLS

SEQ ID NO: 38095 - protein, 5 aa, Artificial sequence
  Protein classification predicting sequence
GPKSH

SEQ ID NO: 38096 - protein, 7 aa, Artificial sequence
  Protein classification predicting sequence
TSIIIPF

SEQ ID NO: 38097 - protein, 5 aa, Artificial sequence
  Protein classification predicting sequence
SVLLW

SEQ ID NO: 38098 - protein, 6 aa, Artificial sequence
  Protein classification predicting sequence
FAAVPL

SEQ ID NO: 38099 - protein, 6 aa, Artificial sequence
  Protein classification predicting sequence
NGITPR

SEQ ID NO: 38100 - protein, 6 aa, Artificial sequence
  Protein classification predicting sequence
YLLKYN

SEQ ID NO: 38101 - protein, 6 aa, Artificial sequence
  Protein classification predicting sequence
FNVVSY

SEQ ID NO: 38102 - protein, 5 aa, Artificial sequence
  Protein classification predicting sequence
ITFWQ

SEQ ID NO: 38103 - protein, 6 aa, Artificial sequence
  Protein classification predicting sequence
SDVFHL

SEQ ID NO: 38104 - protein, 5 aa, Artificial sequence
  Protein classification predicting sequence
GHQAY

SEQ ID NO: 38105 - protein, 6 aa, Artificial sequence
  Protein classification predicting sequence
LTKTEF

SEQ ID NO: 38106 - protein, 6 aa, Artificial sequence
  Protein classification predicting sequence
ELLQPY

SEQ ID NO: 38107 - protein, 7 aa, Artificial sequence
  Protein classification predicting sequence
LVFIGAT

SEQ ID NO: 38108 - protein, 6 aa, Artificial sequence
  Protein classification predicting sequence
CVLFIL

SEQ ID NO: 38109 - protein, 6 aa, Artificial sequence
  Protein classification predicting sequence
MLGFGV

SEQ ID NO: 38110 - protein, 6 aa, Artificial sequence
  Protein classification predicting sequence
EIGFNV

SEQ ID NO: 38111 - protein, 5 aa, Artificial sequence
  Protein classification predicting sequence
GMDIG

SEQ ID NO: 38112 - protein, 6 aa, Artificial sequence
  Protein classification predicting sequence
SGSACT

SEQ ID NO: 38113 - protein, 6 aa, Artificial sequence
  Protein classification predicting sequence
KAVLDT

SEQ ID NO: 38114 - protein, 5 aa, Artificial sequence
  Protein classification predicting sequence
GGNMK

SEQ ID NO: 38115 - protein, 6 aa, Artificial sequence
  Protein classification predicting sequence
LHLGME

SEQ ID NO: 38116 - protein, 6 aa, Artificial sequence
  Protein classification predicting sequence
GYGVSY

SEQ ID NO: 38117 - protein, 6 aa, Artificial sequence
  Protein classification predicting sequence
YKIRKL

SEQ ID NO: 38118 - protein, 6 aa, Artificial sequence
  Protein classification predicting sequence
IMAESF

SEQ ID NO: 38119 - protein, 6 aa, Artificial sequence
  Protein classification predicting sequence
GTATAG

SEQ ID NO: 38120 - protein, 7 aa, Artificial sequence
  Protein classification predicting sequence
LQNIIET

SEQ ID NO: 38121 - protein, 7 aa, Artificial sequence
  Protein classification predicting sequence
AFFLATS

SEQ ID NO: 38122 - protein, 7 aa, Artificial sequence
  Protein classification predicting sequence
APKDALL

SEQ ID NO: 38123 - protein, 7 aa, Artificial sequence
  Protein classification predicting sequence
GQLLLLE

SEQ ID NO: 38124 - protein, 7 aa, Artificial sequence
  Protein classification predicting sequence
NSVVINV

SEQ ID NO: 38125 - protein, 6 aa, Artificial sequence
  Protein classification predicting sequence
KAVIND

SEQ ID NO: 38126 - protein, 6 aa, Artificial sequence
  Protein classification predicting sequence
SGGLGT

SEQ ID NO: 38127 - protein, 8 aa, Artificial sequence
  Protein classification predicting sequence
PYKPLNKT

SEQ ID NO: 38128 - protein, 6 aa, Artificial sequence
  Protein classification predicting sequence
KEKERP

SEQ ID NO: 38129 - protein, 6 aa, Artificial sequence
  Protein classification predicting sequence
PESYQF

SEQ ID NO: 38130 - protein, 6 aa, Artificial sequence
  Protein classification predicting sequence
RTGIKE

SEQ ID NO: 38131 - protein, 6 aa, Artificial sequence
  Protein classification predicting sequence
EHGYFE

SEQ ID NO: 38132 - protein, 6 aa, Artificial sequence
  Protein classification predicting sequence
DLIIGN

SEQ ID NO: 38133 - protein, 6 aa, Artificial sequence
  Protein classification predicting sequence
LLIMLS

SEQ ID NO: 38134 - protein, 6 aa, Artificial sequence
  Protein classification predicting sequence
GVLGAR

SEQ ID NO: 38135 - protein, 7 aa, Artificial sequence
  Protein classification predicting sequence
GIAGSVA

SEQ ID NO: 38136 - protein, 6 aa, Artificial sequence
  Protein classification predicting sequence
GITGGI

SEQ ID NO: 38137 - protein, 6 aa, Artificial sequence
  Protein classification predicting sequence
IMAIAI

SEQ ID NO: 38138 - protein, 6 aa, Artificial sequence
  Protein classification predicting sequence
PVAEHP

SEQ ID NO: 38139 - protein, 7 aa, Artificial sequence
  Protein classification predicting sequence
AADEAEL

SEQ ID NO: 38140 - protein, 5 aa, Artificial sequence
  Protein classification predicting sequence
FPNFR

SEQ ID NO: 38141 - protein, 7 aa, Artificial sequence
  Protein classification predicting sequence
LNQHGIR

SEQ ID NO: 38142 - protein, 7 aa, Artificial sequence
  Protein classification predicting sequence
DIPDHEI

SEQ ID NO: 38143 - protein, 7 aa, Artificial sequence
  Protein classification predicting sequence
RTFSIIK

SEQ ID NO: 38144 - protein, 5 aa, Artificial sequence
  Protein classification predicting sequence
VNRTH

SEQ ID NO: 38145 - protein, 6 aa, Artificial sequence
  Protein classification predicting sequence
EKTRVG

SEQ ID NO: 38146 - protein, 5 aa, Artificial sequence
  Protein classification predicting sequence
FLLWQ

SEQ ID NO: 38147 - protein, 6 aa, Artificial sequence
  Protein classification predicting sequence
TEIEII

SEQ ID NO: 38148 - protein, 6 aa, Artificial sequence
  Protein classification predicting sequence
HKTLRG

SEQ ID NO: 38149 - protein, 6 aa, Artificial sequence
  Protein classification predicting sequence
LNQMGA

SEQ ID NO: 38150 - protein, 5 aa, Artificial sequence
  Protein classification predicting sequence
LPGGC

SEQ ID NO: 38151 - protein, 5 aa, Artificial sequence
  Protein classification predicting sequence
PYPGF

SEQ ID NO: 38152 - protein, 6 aa, Artificial sequence
  Protein classification predicting sequence
KLRNLG

SEQ ID NO: 38153 - protein, 7 aa, Artificial sequence
  Protein classification predicting sequence
GLKKLGA

SEQ ID NO: 38154 - protein, 6 aa, Artificial sequence
  Protein classification predicting sequence
DVANFL

SEQ ID NO: 38155 - protein, 7 aa, Artificial sequence
  Protein classification predicting sequence
FNVLGPL

SEQ ID NO: 38156 - protein, 7 aa, Artificial sequence
  Protein classification predicting sequence
SFENNLL

SEQ ID NO: 38157 - protein, 6 aa, Artificial sequence
  Protein classification predicting sequence
EIVDTA

SEQ ID NO: 38158 - protein, 7 aa, Artificial sequence
  Protein classification predicting sequence
PKGLKGN

SEQ ID NO: 38159 - protein, 6 aa, Artificial sequence
  Protein classification predicting sequence
FNVLGP

SEQ ID NO: 38160 - protein, 6 aa, Artificial sequence
  Protein classification predicting sequence
VSVGAT

SEQ ID NO: 38161 - protein, 7 aa, Artificial sequence
  Protein classification predicting sequence
LRTAASL

SEQ ID NO: 38162 - protein, 5 aa, Artificial sequence
  Protein classification predicting sequence
DPRWV

SEQ ID NO: 38163 - protein, 7 aa, Artificial sequence
  Protein classification predicting sequence
AICFKEA

SEQ ID NO: 38164 - protein, 8 aa, Artificial sequence
  Protein classification predicting sequence
RLARRVLS

SEQ ID NO: 38165 - protein, 6 aa, Artificial sequence
  Protein classification predicting sequence
NLDEFF

SEQ ID NO: 38166 - protein, 6 aa, Artificial sequence
  Protein classification predicting sequence
PEASPV

SEQ ID NO: 38167 - protein, 5 aa, Artificial sequence
  Protein classification predicting sequence
LCHRL

SEQ ID NO: 38168 - protein, 6 aa, Artificial sequence
  Protein classification predicting sequence
ISSGKL

SEQ ID NO: 38169 - protein, 7 aa, Artificial sequence
  Protein classification predicting sequence
AGANSIF

SEQ ID NO: 38170 - protein, 5 aa, Artificial sequence
  Protein classification predicting sequence
GDPPY

SEQ ID NO: 38171 - protein, 5 aa, Artificial sequence
  Protein classification predicting sequence
GEPPY

SEQ ID NO: 38172 - protein, 7 aa, Artificial sequence
  Protein classification predicting sequence
LNLLRAF

SEQ ID NO: 38173 - protein, 6 aa, Artificial sequence
  Protein classification predicting sequence
LHTVNF

SEQ ID NO: 38174 - protein, 6 aa, Artificial sequence
  Protein classification predicting sequence
AGVESA

SEQ ID NO: 38175 - protein, 6 aa, Artificial sequence
  Protein classification predicting sequence
ARIEPF

SEQ ID NO: 38176 - protein, 6 aa, Artificial sequence
  Protein classification predicting sequence
SGAGPS

SEQ ID NO: 38177 - protein, 6 aa, Artificial sequence
  Protein classification predicting sequence
PTAATL

SEQ ID NO: 38178 - protein, 6 aa, Artificial sequence
  Protein classification predicting sequence
WFESLA

SEQ ID NO: 38179 - protein, 7 aa, Artificial sequence
  Protein classification predicting sequence
VIKKIAE

SEQ ID NO: 38180 - protein, 5 aa, Artificial sequence
  Protein classification predicting sequence
IYNYY

SEQ ID NO: 38181 - protein, 7 aa, Artificial sequence
  Protein classification predicting sequence
TIKGKQA

SEQ ID NO: 38182 - protein, 8 aa, Artificial sequence
  Protein classification predicting sequence
KLPVPSVP

SEQ ID NO: 38183 - protein, 5 aa, Artificial sequence
  Protein classification predicting sequence
VQQTR

SEQ ID NO: 38184 - protein, 6 aa, Artificial sequence
  Protein classification predicting sequence
IKPDAV

SEQ ID NO: 38185 - protein, 5 aa, Artificial sequence
  Protein classification predicting sequence
YKSCA

SEQ ID NO: 38186 - protein, 5 aa, Artificial sequence
  Protein classification predicting sequence
LVDFM

SEQ ID NO: 38187 - protein, 6 aa, Artificial sequence
  Protein classification predicting sequence
ENAARE

SEQ ID NO: 38188 - protein, 7 aa, Artificial sequence
  Protein classification predicting sequence
IEKEGFK

SEQ ID NO: 38189 - protein, 5 aa, Artificial sequence
  Protein classification predicting sequence
LFFEP

SEQ ID NO: 38190 - protein, 5 aa, Artificial sequence
  Protein classification predicting sequence
KMVHL

SEQ ID NO: 38191 - protein, 5 aa, Artificial sequence
  Protein classification predicting sequence
HKDRP

SEQ ID NO: 38192 - protein, 7 aa, Artificial sequence
  Protein classification predicting sequence
SQDSSPV

SEQ ID NO: 38193 - protein, 6 aa, Artificial sequence
  Protein classification predicting sequence
KENIMR

SEQ ID NO: 38194 - protein, 5 aa, Artificial sequence
  Protein classification predicting sequence
RKQWL

SEQ ID NO: 38195 - protein, 5 aa, Artificial sequence
  Protein classification predicting sequence
TILNW

SEQ ID NO: 38196 - protein, 7 aa, Artificial sequence
  Protein classification predicting sequence
QKEAENQ

SEQ ID NO: 38197 - protein, 7 aa, Artificial sequence
  Protein classification predicting sequence
GQLLPES

SEQ ID NO: 38198 - protein, 5 aa, Artificial sequence
  Protein classification predicting sequence
GSNQH

SEQ ID NO: 38199 - protein, 7 aa, Artificial sequence
  Protein classification predicting sequence
AGLPRPV

SEQ ID NO: 38200 - protein, 7 aa, Artificial sequence
  Protein classification predicting sequence
PGAVELP

SEQ ID NO: 38201 - protein, 6 aa, Artificial sequence
  Protein classification predicting sequence
DKASYR

SEQ ID NO: 38202 - protein, 6 aa, Artificial sequence
  Protein classification predicting sequence
VLEPMQ

SEQ ID NO: 38203 - protein, 7 aa, Artificial sequence
  Protein classification predicting sequence
CVGKALT

SEQ ID NO: 38204 - protein, 7 aa, Artificial sequence
  Protein classification predicting sequence
ACLEQDP

SEQ ID NO: 38205 - protein, 6 aa, Artificial sequence
  Protein classification predicting sequence
ALATQE

SEQ ID NO: 38206 - protein, 6 aa, Artificial sequence
  Protein classification predicting sequence
IPVDHL

SEQ ID NO: 38207 - protein, 6 aa, Artificial sequence
  Protein classification predicting sequence
AGTKAG

SEQ ID NO: 38208 - protein, 7 aa, Artificial sequence
  Protein classification predicting sequence
SPQKPIV

SEQ ID NO: 38209 - protein, 6 aa, Artificial sequence
  Protein classification predicting sequence
KPPAPP

SEQ ID NO: 38210 - protein, 6 aa, Artificial sequence
  Protein classification predicting sequence
GLRPME

SEQ ID NO: 38211 - protein, 6 aa, Artificial sequence
  Protein classification predicting sequence
AIALGH

SEQ ID NO: 38212 - protein, 6 aa, Artificial sequence
  Protein classification predicting sequence
RQSPLA

SEQ ID NO: 38213 - protein, 6 aa, Artificial sequence
  Protein classification predicting sequence
TLYHSF

SEQ ID NO: 38214 - protein, 6 aa, Artificial sequence
  Protein classification predicting sequence
VNVSFP

SEQ ID NO: 38215 - protein, 6 aa, Artificial sequence
  Protein classification predicting sequence
LTVFFA

SEQ ID NO: 38216 - protein, 5 aa, Artificial sequence
  Protein classification predicting sequence
HHDQP

SEQ ID NO: 38217 - protein, 6 aa, Artificial sequence
  Protein classification predicting sequence
DIRNFG

SEQ ID NO: 38218 - protein, 7 aa, Artificial sequence
  Protein classification predicting sequence
RESVEII

SEQ ID NO: 38219 - protein, 5 aa, Artificial sequence
  Protein classification predicting sequence
PNVCA

SEQ ID NO: 38220 - protein, 7 aa, Artificial sequence
  Protein classification predicting sequence
ATVSRFS

SEQ ID NO: 38221 - protein, 6 aa, Artificial sequence
  Protein classification predicting sequence
VVRKMM

SEQ ID NO: 38222 - protein, 6 aa, Artificial sequence
  Protein classification predicting sequence
NNVVNT

SEQ ID NO: 38223 - protein, 7 aa, Artificial sequence
  Protein classification predicting sequence
AKAVIDA

SEQ ID NO: 38224 - protein, 6 aa, Artificial sequence
  Protein classification predicting sequence
VTQPTS

SEQ ID NO: 38225 - protein, 7 aa, Artificial sequence
  Protein classification predicting sequence
VGEIEVS

SEQ ID NO: 38226 - protein, 6 aa, Artificial sequence
  Protein classification predicting sequence
VGKPED

SEQ ID NO: 38227 - protein, 5 aa, Artificial sequence
  Protein classification predicting sequence
YFVET

SEQ ID NO: 38228 - protein, 6 aa, Artificial sequence
  Protein classification predicting sequence
VPISGM

SEQ ID NO: 38229 - protein, 6 aa, Artificial sequence
  Protein classification predicting sequence
GSGPHG

SEQ ID NO: 38230 - protein, 7 aa, Artificial sequence
  Protein classification predicting sequence
KKFKEIA

SEQ ID NO: 38231 - protein, 6 aa, Artificial sequence
  Protein classification predicting sequence
LWDHRK

SEQ ID NO: 38232 - protein, 6 aa, Artificial sequence
  Protein classification predicting sequence
FDGDQM

SEQ ID NO: 38233 - protein, 5 aa, Artificial sequence
  Protein classification predicting sequence
WPPAS

SEQ ID NO: 38234 - protein, 6 aa, Artificial sequence
  Protein classification predicting sequence
HLREVG

SEQ ID NO: 38235 - protein, 6 aa, Artificial sequence
  Protein classification predicting sequence
AANGSN

SEQ ID NO: 38236 - protein, 6 aa, Artificial sequence
  Protein classification predicting sequence
GFGGGL

SEQ ID NO: 38237 - protein, 6 aa, Artificial sequence
  Protein classification predicting sequence
IKSPIY

SEQ ID NO: 38238 - protein, 5 aa, Artificial sequence
  Protein classification predicting sequence
SHPGI

SEQ ID NO: 38239 - protein, 6 aa, Artificial sequence
  Protein classification predicting sequence
KGQQYD

SEQ ID NO: 38240 - protein, 7 aa, Artificial sequence
  Protein classification predicting sequence
LYRDPDL

SEQ ID NO: 38241 - protein, 6 aa, Artificial sequence
  Protein classification predicting sequence
LIVVVR

SEQ ID NO: 38242 - protein, 8 aa, Artificial sequence
  Protein classification predicting sequence
EVVRRLRE

SEQ ID NO: 38243 - protein, 6 aa, Artificial sequence
  Protein classification predicting sequence
ASIPIL

SEQ ID NO: 38244 - protein, 7 aa, Artificial sequence
  Protein classification predicting sequence
LPEGAEI

SEQ ID NO: 38245 - protein, 5 aa, Artificial sequence
  Protein classification predicting sequence
ACVLF

SEQ ID NO: 38246 - protein, 5 aa, Artificial sequence
  Protein classification predicting sequence
HCLPA

SEQ ID NO: 38247 - protein, 5 aa, Artificial sequence
  Protein classification predicting sequence
EMEVT

SEQ ID NO: 38248 - protein, 6 aa, Artificial sequence
  Protein classification predicting sequence
YEKYGL

SEQ ID NO: 38249 - protein, 6 aa, Artificial sequence
  Protein classification predicting sequence
IKAVMV

SEQ ID NO: 38250 - protein, 6 aa, Artificial sequence
  Protein classification predicting sequence
IPVING

SEQ ID NO: 38251 - protein, 6 aa, Artificial sequence
  Protein classification predicting sequence
PYDLVK

SEQ ID NO: 38252 - protein, 6 aa, Artificial sequence
  Protein classification predicting sequence
RVLITD

SEQ ID NO: 38253 - protein, 6 aa, Artificial sequence
  Protein classification predicting sequence
IPKEML

SEQ ID NO: 38254 - protein, 7 aa, Artificial sequence
  Protein classification predicting sequence
LEDAKAR

SEQ ID NO: 38255 - protein, 6 aa, Artificial sequence
  Protein classification predicting sequence
KTIEIL

SEQ ID NO: 38256 - protein, 5 aa, Artificial sequence
  Protein classification predicting sequence
FRQSE

SEQ ID NO: 38257 - protein, 5 aa, Artificial sequence
  Protein classification predicting sequence
HDPME

SEQ ID NO: 38258 - protein, 5 aa, Artificial sequence
  Protein classification predicting sequence
IQYRG

SEQ ID NO: 38259 - protein, 6 aa, Artificial sequence
  Protein classification predicting sequence
INTALL

SEQ ID NO: 38260 - protein, 6 aa, Artificial sequence
  Protein classification predicting sequence
LNQIQL

SEQ ID NO: 38261 - protein, 7 aa, Artificial sequence
  Protein classification predicting sequence
GEHSVVY

SEQ ID NO: 38262 - protein, 7 aa, Artificial sequence
  Protein classification predicting sequence
YLSASDL

SEQ ID NO: 38263 - protein, 6 aa, Artificial sequence
  Protein classification predicting sequence
PNIVKL

SEQ ID NO: 38264 - protein, 6 aa, Artificial sequence
  Protein classification predicting sequence
RKGALR

SEQ ID NO: 38265 - protein, 5 aa, Artificial sequence
  Protein classification predicting sequence
FHPTQ

SEQ ID NO: 38266 - protein, 8 aa, Artificial sequence
  Protein classification predicting sequence
KKHRLKGL

SEQ ID NO: 38267 - protein, 5 aa, Artificial sequence
  Protein classification predicting sequence
SDKHH

SEQ ID NO: 38268 - protein, 6 aa, Artificial sequence
  Protein classification predicting sequence
LSRYVD

SEQ ID NO: 38269 - protein, 5 aa, Artificial sequence
  Protein classification predicting sequence
MIFEK

SEQ ID NO: 38270 - protein, 5 aa, Artificial sequence
  Protein classification predicting sequence
DLYHP

SEQ ID NO: 38271 - protein, 7 aa, Artificial sequence
  Protein classification predicting sequence
DTAAVAD

SEQ ID NO: 38272 - protein, 7 aa, Artificial sequence
  Protein classification predicting sequence
SRGELIE

SEQ ID NO: 38273 - protein, 6 aa, Artificial sequence
  Protein classification predicting sequence
IEKMME

SEQ ID NO: 38274 - protein, 6 aa, Artificial sequence
  Protein classification predicting sequence
YLSSAD

SEQ ID NO: 38275 - protein, 6 aa, Artificial sequence
  Protein classification predicting sequence
AGSKDT

SEQ ID NO: 38276 - protein, 5 aa, Artificial sequence
  Protein classification predicting sequence
FNTYP

SEQ ID NO: 38277 - protein, 6 aa, Artificial sequence
  Protein classification predicting sequence
THLDSL

SEQ ID NO: 38278 - protein, 6 aa, Artificial sequence
  Protein classification predicting sequence
DFLVRR

SEQ ID NO: 38279 - protein, 8 aa, Artificial sequence
  Protein classification predicting sequence
GVKRAMVV

SEQ ID NO: 38280 - protein, 6 aa, Artificial sequence
  Protein classification predicting sequence
IGIGAG

SEQ ID NO: 38281 - protein, 6 aa, Artificial sequence
  Protein classification predicting sequence
IRALTL

SEQ ID NO: 38282 - protein, 5 aa, Artificial sequence
  Protein classification predicting sequence
PVMGH

SEQ ID NO: 38283 - protein, 6 aa, Artificial sequence
  Protein classification predicting sequence
FDKIDP

SEQ ID NO: 38284 - protein, 8 aa, Artificial sequence
  Protein classification predicting sequence
LDIIKHIV

SEQ ID NO: 38285 - protein, 6 aa, Artificial sequence
  Protein classification predicting sequence
NDTLSA

SEQ ID NO: 38286 - protein, 6 aa, Artificial sequence
  Protein classification predicting sequence
KQYADI

SEQ ID NO: 38287 - protein, 6 aa, Artificial sequence
  Protein classification predicting sequence
LAYHTA

SEQ ID NO: 38288 - protein, 7 aa, Artificial sequence
  Protein classification predicting sequence
VSHSFLV

SEQ ID NO: 38289 - protein, 8 aa, Artificial sequence
  Protein classification predicting sequence
TAWDTAIA

SEQ ID NO: 38290 - protein, 6 aa, Artificial sequence
  Protein classification predicting sequence
SFSKNF

SEQ ID NO: 38291 - protein, 6 aa, Artificial sequence
  Protein classification predicting sequence
GQISYL

SEQ ID NO: 38292 - protein, 6 aa, Artificial sequence
  Protein classification predicting sequence
DQPQVP

SEQ ID NO: 38293 - protein, 6 aa, Artificial sequence
  Protein classification predicting sequence
YCEGND

SEQ ID NO: 38294 - protein, 7 aa, Artificial sequence
  Protein classification predicting sequence
KSSLLYN

SEQ ID NO: 38295 - protein, 6 aa, Artificial sequence
  Protein classification predicting sequence
QGVNNF

SEQ ID NO: 38296 - protein, 7 aa, Artificial sequence
  Protein classification predicting sequence
GDYGLAK

SEQ ID NO: 38297 - protein, 6 aa, Artificial sequence
  Protein classification predicting sequence
LVQSWY

SEQ ID NO: 38298 - protein, 6 aa, Artificial sequence
  Protein classification predicting sequence
LYHIMF

SEQ ID NO: 38299 - protein, 7 aa, Artificial sequence
  Protein classification predicting sequence
TFLAAQG

SEQ ID NO: 38300 - protein, 6 aa, Artificial sequence
  Protein classification predicting sequence
AFEAMN

SEQ ID NO: 38301 - protein, 7 aa, Artificial sequence
  Protein classification predicting sequence
DLLRRML

SEQ ID NO: 38302 - protein, 6 aa, Artificial sequence
  Protein classification predicting sequence
VERFMK

SEQ ID NO: 38303 - protein, 7 aa, Artificial sequence
  Protein classification predicting sequence
YGNDIDE

SEQ ID NO: 38304 - protein, 5 aa, Artificial sequence
  Protein classification predicting sequence
MKLRT

SEQ ID NO: 38305 - protein, 6 aa, Artificial sequence
  Protein classification predicting sequence
DDVLAT

SEQ ID NO: 38306 - protein, 6 aa, Artificial sequence
  Protein classification predicting sequence
GFDTAV

SEQ ID NO: 38307 - protein, 6 aa, Artificial sequence
  Protein classification predicting sequence
VEPNLE

SEQ ID NO: 38308 - protein, 6 aa, Artificial sequence
  Protein classification predicting sequence
YGGGPG

SEQ ID NO: 38309 - protein, 6 aa, Artificial sequence
  Protein classification predicting sequence
TYEGGL

SEQ ID NO: 38310 - protein, 7 aa, Artificial sequence
  Protein classification predicting sequence
GANSVVL

SEQ ID NO: 38311 - protein, 7 aa, Artificial sequence
  Protein classification predicting sequence
NVKIVLP

SEQ ID NO: 38312 - protein, 6 aa, Artificial sequence
  Protein classification predicting sequence
LMEKEL

SEQ ID NO: 38313 - protein, 6 aa, Artificial sequence
  Protein classification predicting sequence
NKNSIP

SEQ ID NO: 38314 - protein, 6 aa, Artificial sequence
  Protein classification predicting sequence
QSSTYG

SEQ ID NO: 38315 - protein, 5 aa, Artificial sequence
  Protein classification predicting sequence
GPATI

SEQ ID NO: 38316 - protein, 6 aa, Artificial sequence
  Protein classification predicting sequence
GYATDE

SEQ ID NO: 38317 - protein, 6 aa, Artificial sequence
  Protein classification predicting sequence
KIADQI

SEQ ID NO: 38318 - protein, 6 aa, Artificial sequence
  Protein classification predicting sequence
EHSIVG

SEQ ID NO: 38319 - protein, 6 aa, Artificial sequence
  Protein classification predicting sequence
GGAAIN

SEQ ID NO: 38320 - protein, 5 aa, Artificial sequence
  Protein classification predicting sequence
SHLGR

SEQ ID NO: 38321 - protein, 6 aa, Artificial sequence
  Protein classification predicting sequence
GWGTSG

SEQ ID NO: 38322 - protein, 6 aa, Artificial sequence
  Protein classification predicting sequence
GLDIGP

SEQ ID NO: 38323 - protein, 6 aa, Artificial sequence
  Protein classification predicting sequence
RPLVAI

SEQ ID NO: 38324 - protein, 6 aa, Artificial sequence
  Protein classification predicting sequence
DVGSKT

SEQ ID NO: 38325 - protein, 7 aa, Artificial sequence
  Protein classification predicting sequence
DYILTGG

SEQ ID NO: 38326 - protein, 6 aa, Artificial sequence
  Protein classification predicting sequence
GFVFAL

SEQ ID NO: 38327 - protein, 5 aa, Artificial sequence
  Protein classification predicting sequence
TNRID

SEQ ID NO: 38328 - protein, 6 aa, Artificial sequence
  Protein classification predicting sequence
VDVIEA

SEQ ID NO: 38329 - protein, 7 aa, Artificial sequence
  Protein classification predicting sequence
TAALAEI

SEQ ID NO: 38330 - protein, 6 aa, Artificial sequence
  Protein classification predicting sequence
AIDRAG

SEQ ID NO: 38331 - protein, 6 aa, Artificial sequence
  Protein classification predicting sequence
LLGKPV

SEQ ID NO: 38332 - protein, 6 aa, Artificial sequence
  Protein classification predicting sequence
RSKFLL

SEQ ID NO: 38333 - protein, 6 aa, Artificial sequence
  Protein classification predicting sequence
KAVLLS

SEQ ID NO: 38334 - protein, 5 aa, Artificial sequence
  Protein classification predicting sequence
GNKGA

SEQ ID NO: 38335 - protein, 6 aa, Artificial sequence
  Protein classification predicting sequence
GGNDHY

SEQ ID NO: 38336 - protein, 6 aa, Artificial sequence
  Protein classification predicting sequence
VSVNPQ

SEQ ID NO: 38337 - protein, 6 aa, Artificial sequence
  Protein classification predicting sequence
AYDQII

SEQ ID NO: 38338 - protein, 6 aa, Artificial sequence
  Protein classification predicting sequence
THPVLS

SEQ ID NO: 38339 - protein, 6 aa, Artificial sequence
  Protein classification predicting sequence
DFDTAL

SEQ ID NO: 38340 - protein, 7 aa, Artificial sequence
  Protein classification predicting sequence
TTLARSL

SEQ ID NO: 38341 - protein, 6 aa, Artificial sequence
  Protein classification predicting sequence
KSTTAR

SEQ ID NO: 38342 - protein, 6 aa, Artificial sequence
  Protein classification predicting sequence
VASKEP

SEQ ID NO: 38343 - protein, 7 aa, Artificial sequence
  Protein classification predicting sequence
DIKAGNI

SEQ ID NO: 38344 - protein, 7 aa, Artificial sequence
  Protein classification predicting sequence
DTIEDDM

SEQ ID NO: 38345 - protein, 6 aa, Artificial sequence
  Protein classification predicting sequence
SVLTNK

SEQ ID NO: 38346 - protein, 6 aa, Artificial sequence
  Protein classification predicting sequence
TGGTIE

SEQ ID NO: 38347 - protein, 6 aa, Artificial sequence
  Protein classification predicting sequence
LEIGFG

SEQ ID NO: 38348 - protein, 6 aa, Artificial sequence
  Protein classification predicting sequence
VLEAMA

SEQ ID NO: 38349 - protein, 6 aa, Artificial sequence
  Protein classification predicting sequence
VIASDA

SEQ ID NO: 38350 - protein, 7 aa, Artificial sequence
  Protein classification predicting sequence
EFIIKTV

SEQ ID NO: 38351 - protein, 6 aa, Artificial sequence
  Protein classification predicting sequence
RIERKG

SEQ ID NO: 38352 - protein, 6 aa, Artificial sequence
  Protein classification predicting sequence
DLKLEN

SEQ ID NO: 38353 - protein, 6 aa, Artificial sequence
  Protein classification predicting sequence
VPAGSV

SEQ ID NO: 38354 - protein, 6 aa, Artificial sequence
  Protein classification predicting sequence
TKIIGT

SEQ ID NO: 38355 - protein, 7 aa, Artificial sequence
  Protein classification predicting sequence
TNLGRAL

SEQ ID NO: 38356 - protein, 6 aa, Artificial sequence
  Protein classification predicting sequence
KSSFDK

SEQ ID NO: 38357 - protein, 6 aa, Artificial sequence
  Protein classification predicting sequence
EVIVQL

SEQ ID NO: 38358 - protein, 6 aa, Artificial sequence
  Protein classification predicting sequence
GVLEPL

SEQ ID NO: 38359 - protein, 5 aa, Artificial sequence
  Protein classification predicting sequence
LYSNH

SEQ ID NO: 38360 - protein, 6 aa, Artificial sequence
  Protein classification predicting sequence
DIARNQ

SEQ ID NO: 38361 - protein, 7 aa, Artificial sequence
  Protein classification predicting sequence
LPTSDPG

SEQ ID NO: 38362 - protein, 6 aa, Artificial sequence
  Protein classification predicting sequence
ESVGVH

SEQ ID NO: 38363 - protein, 6 aa, Artificial sequence
  Protein classification predicting sequence
EMLEHV

SEQ ID NO: 38364 - protein, 5 aa, Artificial sequence
  Protein classification predicting sequence
CNANM

SEQ ID NO: 38365 - protein, 7 aa, Artificial sequence
  Protein classification predicting sequence
GRLRRLL

SEQ ID NO: 38366 - protein, 6 aa, Artificial sequence
  Protein classification predicting sequence
YPGTFD

SEQ ID NO: 38367 - protein, 6 aa, Artificial sequence
  Protein classification predicting sequence
TQIQTR

SEQ ID NO: 38368 - protein, 7 aa, Artificial sequence
  Protein classification predicting sequence
RPAPITV

SEQ ID NO: 38369 - protein, 6 aa, Artificial sequence
  Protein classification predicting sequence
GTRSGD

SEQ ID NO: 38370 - protein, 7 aa, Artificial sequence
  Protein classification predicting sequence
DIGLEVG

SEQ ID NO: 38371 - protein, 6 aa, Artificial sequence
  Protein classification predicting sequence
YLGFFA

SEQ ID NO: 38372 - protein, 6 aa, Artificial sequence
  Protein classification predicting sequence
NQGLTS

SEQ ID NO: 38373 - protein, 11 aa, Artificial sequence
  Protein classification predicting sequence
FKGSVNYAWTT

SEQ ID NO: 38374 - protein, 8 aa, Artificial sequence
  Protein classification predicting sequence
MLCSTEGP

SEQ ID NO: 38375 - protein, 5 aa, Artificial sequence
  Protein classification predicting sequence
NAIVW

SEQ ID NO: 38376 - protein, 16 aa, Artificial sequence
  Protein classification predicting sequence
FKGSVNYAWTTVPTYP

SEQ ID NO: 38377 - protein, 7 aa, Artificial sequence
  Protein classification predicting sequence
IFLGPRG

SEQ ID NO: 38378 - protein, 6 aa, Artificial sequence
  Protein classification predicting sequence
DAFGTA

SEQ ID NO: 38379 - protein, 6 aa, Artificial sequence
  Protein classification predicting sequence
VCKVSD

SEQ ID NO: 38380 - protein, 5 aa, Artificial sequence
  Protein classification predicting sequence
EHYER

SEQ ID NO: 38381 - protein, 6 aa, Artificial sequence
  Protein classification predicting sequence
RRSFEL

SEQ ID NO: 38382 - protein, 7 aa, Artificial sequence
  Protein classification predicting sequence
RDGQFEL

SEQ ID NO: 38383 - protein, 7 aa, Artificial sequence
  Protein classification predicting sequence
LIKELAK

SEQ ID NO: 38384 - protein, 6 aa, Artificial sequence
  Protein classification predicting sequence
ATRRNL

SEQ ID NO: 38385 - protein, 6 aa, Artificial sequence
  Protein classification predicting sequence
GYGING

SEQ ID NO: 38386 - protein, 6 aa, Artificial sequence
  Protein classification predicting sequence
GIVVFS

SEQ ID NO: 38387 - protein, 6 aa, Artificial sequence
  Protein classification predicting sequence
SLTDKP

SEQ ID NO: 38388 - protein, 8 aa, Artificial sequence
  Protein classification predicting sequence
VVVRNPVT

SEQ ID NO: 38389 - protein, 6 aa, Artificial sequence
  Protein classification predicting sequence
LEHVIA

SEQ ID NO: 38390 - protein, 6 aa, Artificial sequence
  Protein classification predicting sequence
IVERTG

SEQ ID NO: 38391 - protein, 7 aa, Artificial sequence
  Protein classification predicting sequence
LDFTSKD

SEQ ID NO: 38392 - protein, 8 aa, Artificial sequence
  Protein classification predicting sequence
LAAIENGA

SEQ ID NO: 38393 - protein, 5 aa, Artificial sequence
  Protein classification predicting sequence
CVDQS

SEQ ID NO: 38394 - protein, 7 aa, Artificial sequence
  Protein classification predicting sequence
GEARSLE

SEQ ID NO: 38395 - protein, 6 aa, Artificial sequence
  Protein classification predicting sequence
HRDDLV

SEQ ID NO: 38396 - protein, 6 aa, Artificial sequence
  Protein classification predicting sequence
LDSGAI

SEQ ID NO: 38397 - protein, 7 aa, Artificial sequence
  Protein classification predicting sequence
KSDEAKQ

SEQ ID NO: 38398 - protein, 5 aa, Artificial sequence
  Protein classification predicting sequence
RNDMV

SEQ ID NO: 38399 - protein, 6 aa, Artificial sequence
  Protein classification predicting sequence
AVRIMG

SEQ ID NO: 38400 - protein, 7 aa, Artificial sequence
  Protein classification predicting sequence
VHRDDLV

SEQ ID NO: 38401 - protein, 7 aa, Artificial sequence
  Protein classification predicting sequence
RAGANMV

SEQ ID NO: 38402 - protein, 6 aa, Artificial sequence
  Protein classification predicting sequence
AGGTGG

SEQ ID NO: 38403 - protein, 7 aa, Artificial sequence
  Protein classification predicting sequence
VKLVQGS

SEQ ID NO: 38404 - protein, 6 aa, Artificial sequence
  Protein classification predicting sequence
TEEILK

SEQ ID NO: 38405 - protein, 6 aa, Artificial sequence
  Protein classification predicting sequence
PAGKIY

SEQ ID NO: 38406 - protein, 6 aa, Artificial sequence
  Protein classification predicting sequence
AILIDD

SEQ ID NO: 38407 - protein, 8 aa, Artificial sequence
  Protein classification predicting sequence
LEAALKAG

SEQ ID NO: 38408 - protein, 6 aa, Artificial sequence
  Protein classification predicting sequence
LIDADM

SEQ ID NO: 38409 - protein, 6 aa, Artificial sequence
  Protein classification predicting sequence
KAVIPA

SEQ ID NO: 38410 - protein, 6 aa, Artificial sequence
  Protein classification predicting sequence
DCQKEL

SEQ ID NO: 38411 - protein, 6 aa, Artificial sequence
  Protein classification predicting sequence
DDDNTY

SEQ ID NO: 38412 - protein, 5 aa, Artificial sequence
  Protein classification predicting sequence
NTYHL

SEQ ID NO: 38413 - protein, 6 aa, Artificial sequence
  Protein classification predicting sequence
CHIPFA

SEQ ID NO: 38414 - protein, 6 aa, Artificial sequence
  Protein classification predicting sequence
VQGPNA

SEQ ID NO: 38415 - protein, 7 aa, Artificial sequence
  Protein classification predicting sequence
GIAASSG

SEQ ID NO: 38416 - protein, 6 aa, Artificial sequence
  Protein classification predicting sequence
ADGIHV

SEQ ID NO: 38417 - protein, 6 aa, Artificial sequence
  Protein classification predicting sequence
VLIVED

SEQ ID NO: 38418 - protein, 6 aa, Artificial sequence
  Protein classification predicting sequence
LTPSDT

SEQ ID NO: 38419 - protein, 6 aa, Artificial sequence
  Protein classification predicting sequence
AIHSLK

SEQ ID NO: 38420 - protein, 7 aa, Artificial sequence
  Protein classification predicting sequence
KAVINDK

SEQ ID NO: 38421 - protein, 6 aa, Artificial sequence
  Protein classification predicting sequence
AHLLGV

SEQ ID NO: 38422 - protein, 6 aa, Artificial sequence
  Protein classification predicting sequence
IAHYEK

SEQ ID NO: 38423 - protein, 6 aa, Artificial sequence
  Protein classification predicting sequence
LSAIQE

SEQ ID NO: 38424 - protein, 7 aa, Artificial sequence
  Protein classification predicting sequence
HGVAIGE

SEQ ID NO: 38425 - protein, 6 aa, Artificial sequence
  Protein classification predicting sequence
NDILGR

SEQ ID NO: 38426 - protein, 6 aa, Artificial sequence
  Protein classification predicting sequence
IKSDNI

SEQ ID NO: 38427 - protein, 6 aa, Artificial sequence
  Protein classification predicting sequence
TQGLAK

SEQ ID NO: 38428 - protein, 6 aa, Artificial sequence
  Protein classification predicting sequence
FLAKAK

SEQ ID NO: 38429 - protein, 6 aa, Artificial sequence
  Protein classification predicting sequence
KMSDRG

SEQ ID NO: 38430 - protein, 6 aa, Artificial sequence
  Protein classification predicting sequence
VFDVEG

SEQ ID NO: 38431 - protein, 7 aa, Artificial sequence
  Protein classification predicting sequence
LGGIVAG

SEQ ID NO: 38432 - protein, 5 aa, Artificial sequence
  Protein classification predicting sequence
GIMIE

SEQ ID NO: 38433 - protein, 6 aa, Artificial sequence
  Protein classification predicting sequence
IFKAQA

SEQ ID NO: 38434 - protein, 7 aa, Artificial sequence
  Protein classification predicting sequence
FASKENA

SEQ ID NO: 38435 - protein, 6 aa, Artificial sequence
  Protein classification predicting sequence
LYAVVS

SEQ ID NO: 38436 - protein, 6 aa, Artificial sequence
  Protein classification predicting sequence
YGQDMD

SEQ ID NO: 38437 - protein, 7 aa, Artificial sequence
  Protein classification predicting sequence
GGTGATL

SEQ ID NO: 38438 - protein, 6 aa, Artificial sequence
  Protein classification predicting sequence
IITSGT

SEQ ID NO: 38439 - protein, 6 aa, Artificial sequence
  Protein classification predicting sequence
KNSFNS

SEQ ID NO: 38440 - protein, 6 aa, Artificial sequence
  Protein classification predicting sequence
KIASTW

SEQ ID NO: 38441 - protein, 6 aa, Artificial sequence
  Protein classification predicting sequence
FGGNPL

SEQ ID NO: 38442 - protein, 7 aa, Artificial sequence
  Protein classification predicting sequence
GIVVGIA

SEQ ID NO: 38443 - protein, 7 aa, Artificial sequence
  Protein classification predicting sequence
LLGKGIA

SEQ ID NO: 38444 - protein, 6 aa, Artificial sequence
  Protein classification predicting sequence
TRLRKL

SEQ ID NO: 38445 - protein, 6 aa, Artificial sequence
  Protein classification predicting sequence
FVVETL

SEQ ID NO: 38446 - protein, 6 aa, Artificial sequence
  Protein classification predicting sequence
EYLGAN

SEQ ID NO: 38447 - protein, 6 aa, Artificial sequence
  Protein classification predicting sequence
TRVEIG

SEQ ID NO: 38448 - protein, 7 aa, Artificial sequence
  Protein classification predicting sequence
FAHESGI

SEQ ID NO: 38449 - protein, 6 aa, Artificial sequence
  Protein classification predicting sequence
IEGLKR

SEQ ID NO: 38450 - protein, 6 aa, Artificial sequence
  Protein classification predicting sequence
DFVTTT

SEQ ID NO: 38451 - protein, 7 aa, Artificial sequence
  Protein classification predicting sequence
VSGLAGS

SEQ ID NO: 38452 - protein, 7 aa, Artificial sequence
  Protein classification predicting sequence
RRLGGEV

SEQ ID NO: 38453 - protein, 6 aa, Artificial sequence
  Protein classification predicting sequence
RRAATI

SEQ ID NO: 38454 - protein, 6 aa, Artificial sequence
  Protein classification predicting sequence
MLDMLT

SEQ ID NO: 38455 - protein, 6 aa, Artificial sequence
  Protein classification predicting sequence
MLLRIQ

SEQ ID NO: 38456 - protein, 7 aa, Artificial sequence
  Protein classification predicting sequence
SDVIEGK

SEQ ID NO: 38457 - protein, 6 aa, Artificial sequence
  Protein classification predicting sequence
LLEGKV

SEQ ID NO: 38458 - protein, 5 aa, Artificial sequence
  Protein classification predicting sequence
EWMEG

SEQ ID NO: 38459 - protein, 6 aa, Artificial sequence
  Protein classification predicting sequence
SFEVAE

SEQ ID NO: 38460 - protein, 6 aa, Artificial sequence
  Protein classification predicting sequence
YADIIV

SEQ ID NO: 38461 - protein, 6 aa, Artificial sequence
  Protein classification predicting sequence
PRTLLP

SEQ ID NO: 38462 - protein, 5 aa, Artificial sequence
  Protein classification predicting sequence
YSSSM

SEQ ID NO: 38463 - protein, 5 aa, Artificial sequence
  Protein classification predicting sequence
LHPGP

SEQ ID NO: 38464 - protein, 5 aa, Artificial sequence
  Protein classification predicting sequence
IIMHP

SEQ ID NO: 38465 - protein, 6 aa, Artificial sequence
  Protein classification predicting sequence
NKGESI

SEQ ID NO: 38466 - protein, 6 aa, Artificial sequence
  Protein classification predicting sequence
KENYHK

SEQ ID NO: 38467 - protein, 6 aa, Artificial sequence
  Protein classification predicting sequence
HIITSK

SEQ ID NO: 38468 - protein, 8 aa, Artificial sequence
  Protein classification predicting sequence
KDLKVAIV

SEQ ID NO: 38469 - protein, 6 aa, Artificial sequence
  Protein classification predicting sequence
NLTEPI

SEQ ID NO: 38470 - protein, 6 aa, Artificial sequence
  Protein classification predicting sequence
AADPDV

SEQ ID NO: 38471 - protein, 6 aa, Artificial sequence
  Protein classification predicting sequence
LRGKTV

SEQ ID NO: 38472 - protein, 6 aa, Artificial sequence
  Protein classification predicting sequence
LIEDNE

SEQ ID NO: 38473 - protein, 6 aa, Artificial sequence
  Protein classification predicting sequence
ADAVLM

SEQ ID NO: 38474 - protein, 6 aa, Artificial sequence
  Protein classification predicting sequence
EILDFH

SEQ ID NO: 38475 - protein, 6 aa, Artificial sequence
  Protein classification predicting sequence
GNLKNG

SEQ ID NO: 38476 - protein, 6 aa, Artificial sequence
  Protein classification predicting sequence
GSVISM

SEQ ID NO: 38477 - protein, 6 aa, Artificial sequence
  Protein classification predicting sequence
QTLLDL

SEQ ID NO: 38478 - protein, 6 aa, Artificial sequence
  Protein classification predicting sequence
VFLISP

SEQ ID NO: 38479 - protein, 7 aa, Artificial sequence
  Protein classification predicting sequence
LLSQNQG

SEQ ID NO: 38480 - protein, 6 aa, Artificial sequence
  Protein classification predicting sequence
QCLLDL

SEQ ID NO: 38481 - protein, 6 aa, Artificial sequence
  Protein classification predicting sequence
VYLISP

SEQ ID NO: 38482 - protein, 6 aa, Artificial sequence
  Protein classification predicting sequence
KEEKPE

SEQ ID NO: 38483 - protein, 6 aa, Artificial sequence
  Protein classification predicting sequence
AISPNT

SEQ ID NO: 38484 - protein, 6 aa, Artificial sequence
  Protein classification predicting sequence
DLLKNK

SEQ ID NO: 38485 - protein, 6 aa, Artificial sequence
  Protein classification predicting sequence
EHNVSY

SEQ ID NO: 38486 - protein, 6 aa, Artificial sequence
  Protein classification predicting sequence
HEILFL

SEQ ID NO: 38487 - protein, 6 aa, Artificial sequence
  Protein classification predicting sequence
IEGKLS

SEQ ID NO: 38488 - protein, 6 aa, Artificial sequence
  Protein classification predicting sequence
YYKEYG

SEQ ID NO: 38489 - protein, 6 aa, Artificial sequence
  Protein classification predicting sequence
LYPNVD

SEQ ID NO: 38490 - protein, 6 aa, Artificial sequence
  Protein classification predicting sequence
SPYFFN

SEQ ID NO: 38491 - protein, 6 aa, Artificial sequence
  Protein classification predicting sequence
LNENYV

SEQ ID NO: 38492 - protein, 7 aa, Artificial sequence
  Protein classification predicting sequence
AGPDRAE

SEQ ID NO: 38493 - protein, 7 aa, Artificial sequence
  Protein classification predicting sequence
AAAIVDS

SEQ ID NO: 38494 - protein, 7 aa, Artificial sequence
  Protein classification predicting sequence
ANLDDLL

SEQ ID NO: 38495 - protein, 6 aa, Artificial sequence
  Protein classification predicting sequence
GDFVLT

SEQ ID NO: 38496 - protein, 6 aa, Artificial sequence
  Protein classification predicting sequence
EDNVMK

SEQ ID NO: 38497 - protein, 6 aa, Artificial sequence
  Protein classification predicting sequence
SYYAAL

SEQ ID NO: 38498 - protein, 7 aa, Artificial sequence
  Protein classification predicting sequence
LNSSSLQ

SEQ ID NO: 38499 - protein, 5 aa, Artificial sequence
  Protein classification predicting sequence
MPTRN

SEQ ID NO: 38500 - protein, 7 aa, Artificial sequence
  Protein classification predicting sequence
ENAVLFE

SEQ ID NO: 38501 - protein, 6 aa, Artificial sequence
  Protein classification predicting sequence
SGAKNA

SEQ ID NO: 38502 - protein, 6 aa, Artificial sequence
  Protein classification predicting sequence
RRISNE

SEQ ID NO: 38503 - protein, 6 aa, Artificial sequence
  Protein classification predicting sequence
LGIVHT

SEQ ID NO: 38504 - protein, 6 aa, Artificial sequence
  Protein classification predicting sequence
AERGLK

SEQ ID NO: 38505 - protein, 6 aa, Artificial sequence
  Protein classification predicting sequence
QAKSNS

SEQ ID NO: 38506 - protein, 6 aa, Artificial sequence
  Protein classification predicting sequence
VIHNSM

SEQ ID NO: 38507 - protein, 6 aa, Artificial sequence
  Protein classification predicting sequence
IGVNNL

SEQ ID NO: 38508 - protein, 8 aa, Artificial sequence
  Protein classification predicting sequence
AIGIPVVA

SEQ ID NO: 38509 - protein, 6 aa, Artificial sequence
  Protein classification predicting sequence
ETTVTT

SEQ ID NO: 38510 - protein, 6 aa, Artificial sequence
  Protein classification predicting sequence
QHIQDI

SEQ ID NO: 38511 - protein, 7 aa, Artificial sequence
  Protein classification predicting sequence
SVLPMVL

SEQ ID NO: 38512 - protein, 6 aa, Artificial sequence
  Protein classification predicting sequence
YFDRDV

SEQ ID NO: 38513 - protein, 6 aa, Artificial sequence
  Protein classification predicting sequence
YLHSLD

SEQ ID NO: 38514 - protein, 6 aa, Artificial sequence
  Protein classification predicting sequence
ECDMIG

SEQ ID NO: 38515 - protein, 6 aa, Artificial sequence
  Protein classification predicting sequence
FTKNQF

SEQ ID NO: 38516 - protein, 6 aa, Artificial sequence
  Protein classification predicting sequence
DGISLT

SEQ ID NO: 38517 - protein, 7 aa, Artificial sequence
  Protein classification predicting sequence
RLDAQQK

SEQ ID NO: 38518 - protein, 6 aa, Artificial sequence
  Protein classification predicting sequence
GRIAAT

SEQ ID NO: 38519 - protein, 6 aa, Artificial sequence
  Protein classification predicting sequence
MEELAV

SEQ ID NO: 38520 - protein, 7 aa, Artificial sequence
  Protein classification predicting sequence
VRVLGAI

SEQ ID NO: 38521 - protein, 5 aa, Artificial sequence
  Protein classification predicting sequence
TTNTE

SEQ ID NO: 38522 - protein, 7 aa, Artificial sequence
  Protein classification predicting sequence
AKEAVES

SEQ ID NO: 38523 - protein, 6 aa, Artificial sequence
  Protein classification predicting sequence
VPVIFG

SEQ ID NO: 38524 - protein, 6 aa, Artificial sequence
  Protein classification predicting sequence
EMMNLY

SEQ ID NO: 38525 - protein, 6 aa, Artificial sequence
  Protein classification predicting sequence
GPTGSQ

SEQ ID NO: 38526 - protein, 6 aa, Artificial sequence
  Protein classification predicting sequence
TGKIPD

SEQ ID NO: 38527 - protein, 7 aa, Artificial sequence
  Protein classification predicting sequence
PRATEQR

SEQ ID NO: 38528 - protein, 9 aa, Artificial sequence
  Protein classification predicting sequence
LPRATEQRN

SEQ ID NO: 38529 - protein, 5 aa, Artificial sequence
  Protein classification predicting sequence
NWMKA

SEQ ID NO: 38530 - protein, 6 aa, Artificial sequence
  Protein classification predicting sequence
MTSSGR

SEQ ID NO: 38531 - protein, 6 aa, Artificial sequence
  Protein classification predicting sequence
GVVDGR

SEQ ID NO: 38532 - protein, 6 aa, Artificial sequence
  Protein classification predicting sequence
LCSVCV

SEQ ID NO: 38533 - protein, 6 aa, Artificial sequence
  Protein classification predicting sequence
GKFSSD

SEQ ID NO: 38534 - protein, 6 aa, Artificial sequence
  Protein classification predicting sequence
SADEGQ

SEQ ID NO: 38535 - protein, 5 aa, Artificial sequence
  Protein classification predicting sequence
DHMTF

SEQ ID NO: 38536 - protein, 6 aa, Artificial sequence
  Protein classification predicting sequence
LAVANS

SEQ ID NO: 38537 - protein, 7 aa, Artificial sequence
  Protein classification predicting sequence
LAVANSL

SEQ ID NO: 38538 - protein, 7 aa, Artificial sequence
  Protein classification predicting sequence
FVHTLGD

SEQ ID NO: 38539 - protein, 5 aa, Artificial sequence
  Protein classification predicting sequence
MCFMA

SEQ ID NO: 38540 - protein, 7 aa, Artificial sequence
  Protein classification predicting sequence
EFLRYLL

SEQ ID NO: 38541 - protein, 6 aa, Artificial sequence
  Protein classification predicting sequence
KYVRYY

SEQ ID NO: 38542 - protein, 5 aa, Artificial sequence
  Protein classification predicting sequence
TKNQF

SEQ ID NO: 38543 - protein, 6 aa, Artificial sequence
  Protein classification predicting sequence
IVSKNI

SEQ ID NO: 38544 - protein, 6 aa, Artificial sequence
  Protein classification predicting sequence
TDGVVK

SEQ ID NO: 38545 - protein, 6 aa, Artificial sequence
  Protein classification predicting sequence
NGVIEN

SEQ ID NO: 38546 - protein, 6 aa, Artificial sequence
  Protein classification predicting sequence
DGDDSK

SEQ ID NO: 38547 - protein, 6 aa, Artificial sequence
  Protein classification predicting sequence
GRGYEP

SEQ ID NO: 38548 - protein, 6 aa, Artificial sequence
  Protein classification predicting sequence
KFFAVL

SEQ ID NO: 38549 - protein, 7 aa, Artificial sequence
  Protein classification predicting sequence
VAHLEFF

SEQ ID NO: 38550 - protein, 7 aa, Artificial sequence
  Protein classification predicting sequence
VKTKRVN

SEQ ID NO: 38551 - protein, 6 aa, Artificial sequence
  Protein classification predicting sequence
NIHTLL

SEQ ID NO: 38552 - protein, 5 aa, Artificial sequence
  Protein classification predicting sequence
VFMPV

SEQ ID NO: 38553 - protein, 6 aa, Artificial sequence
  Protein classification predicting sequence
SPVKKV

SEQ ID NO: 38554 - protein, 6 aa, Artificial sequence
  Protein classification predicting sequence
LAKQHT

SEQ ID NO: 38555 - protein, 6 aa, Artificial sequence
  Protein classification predicting sequence
FEIPDK

SEQ ID NO: 38556 - protein, 5 aa, Artificial sequence
  Protein classification predicting sequence
QNTMV

SEQ ID NO: 38557 - protein, 6 aa, Artificial sequence
  Protein classification predicting sequence
MTSEDL

SEQ ID NO: 38558 - protein, 6 aa, Artificial sequence
  Protein classification predicting sequence
NVSFPG

SEQ ID NO: 38559 - protein, 6 aa, Artificial sequence
  Protein classification predicting sequence
IFDTTL

SEQ ID NO: 38560 - protein, 6 aa, Artificial sequence
  Protein classification predicting sequence
NRNNRL

SEQ ID NO: 38561 - protein, 6 aa, Artificial sequence
  Protein classification predicting sequence
GEDGPT

SEQ ID NO: 38562 - protein, 5 aa, Artificial sequence
  Protein classification predicting sequence
LVYCD

SEQ ID NO: 38563 - protein, 6 aa, Artificial sequence
  Protein classification predicting sequence
ESDFAF

SEQ ID NO: 38564 - protein, 7 aa, Artificial sequence
  Protein classification predicting sequence
ELKAKYP

SEQ ID NO: 38565 - protein, 6 aa, Artificial sequence
  Protein classification predicting sequence
GKIVGI

SEQ ID NO: 38566 - protein, 7 aa, Artificial sequence
  Protein classification predicting sequence
GPAKTME

SEQ ID NO: 38567 - protein, 6 aa, Artificial sequence
  Protein classification predicting sequence
ILGKED

SEQ ID NO: 38568 - protein, 8 aa, Artificial sequence
  Protein classification predicting sequence
YLDMIRSH

SEQ ID NO: 38569 - protein, 6 aa, Artificial sequence
  Protein classification predicting sequence
FQDPLR

SEQ ID NO: 38570 - protein, 6 aa, Artificial sequence
  Protein classification predicting sequence
NANHSI

SEQ ID NO: 38571 - protein, 6 aa, Artificial sequence
  Protein classification predicting sequence
DFGMSR

SEQ ID NO: 38572 - protein, 6 aa, Artificial sequence
  Protein classification predicting sequence
SGDEWE

SEQ ID NO: 38573 - protein, 6 aa, Artificial sequence
  Protein classification predicting sequence
HPNDPQ

SEQ ID NO: 38574 - protein, 6 aa, Artificial sequence
  Protein classification predicting sequence
PHVIED

SEQ ID NO: 38575 - protein, 6 aa, Artificial sequence
  Protein classification predicting sequence
GNPASR

SEQ ID NO: 38576 - protein, 7 aa, Artificial sequence
  Protein classification predicting sequence
ELGIRIL

SEQ ID NO: 38577 - protein, 7 aa, Artificial sequence
  Protein classification predicting sequence
KDEVIIK

SEQ ID NO: 38578 - protein, 6 aa, Artificial sequence
  Protein classification predicting sequence
VYDAAH

SEQ ID NO: 38579 - protein, 6 aa, Artificial sequence
  Protein classification predicting sequence
IRADFA

SEQ ID NO: 38580 - protein, 8 aa, Artificial sequence
  Protein classification predicting sequence
ALLKTGVK

SEQ ID NO: 38581 - protein, 6 aa, Artificial sequence
  Protein classification predicting sequence
VDVNYM

SEQ ID NO: 38582 - protein, 7 aa, Artificial sequence
  Protein classification predicting sequence
KLYGSIE

SEQ ID NO: 38583 - protein, 6 aa, Artificial sequence
  Protein classification predicting sequence
NVDFVG

SEQ ID NO: 38584 - protein, 6 aa, Artificial sequence
  Protein classification predicting sequence
ATLGNL

SEQ ID NO: 38585 - protein, 6 aa, Artificial sequence
  Protein classification predicting sequence
LLRIDS

SEQ ID NO: 38586 - protein, 8 aa, Artificial sequence
  Protein classification predicting sequence
PDELARRA

SEQ ID NO: 38587 - protein, 7 aa, Artificial sequence
  Protein classification predicting sequence
AINENTA

SEQ ID NO: 38588 - protein, 6 aa, Artificial sequence
  Protein classification predicting sequence
QPEKLS

SEQ ID NO: 38589 - protein, 6 aa, Artificial sequence
  Protein classification predicting sequence
FTAEVS

SEQ ID NO: 38590 - protein, 6 aa, Artificial sequence
  Protein classification predicting sequence
GLYRDP

SEQ ID NO: 38591 - protein, 7 aa, Artificial sequence
  Protein classification predicting sequence
PSIDTLL

SEQ ID NO: 38592 - protein, 7 aa, Artificial sequence
  Protein classification predicting sequence
RGATDIT

SEQ ID NO: 38593 - protein, 6 aa, Artificial sequence
  Protein classification predicting sequence
LPREVI

SEQ ID NO: 38594 - protein, 6 aa, Artificial sequence
  Protein classification predicting sequence
SLEFME

SEQ ID NO: 38595 - protein, 7 aa, Artificial sequence
  Protein classification predicting sequence
PVDTWRV

SEQ ID NO: 38596 - protein, 5 aa, Artificial sequence
  Protein classification predicting sequence
FIQVA

SEQ ID NO: 38597 - protein, 6 aa, Artificial sequence
  Protein classification predicting sequence
DVSKFG

SEQ ID NO: 38598 - protein, 7 aa, Artificial sequence
  Protein classification predicting sequence
GPSALPL

SEQ ID NO: 38599 - protein, 5 aa, Artificial sequence
  Protein classification predicting sequence
NYVAP

SEQ ID NO: 38600 - protein, 6 aa, Artificial sequence
  Protein classification predicting sequence
LYDYID

SEQ ID NO: 38601 - protein, 6 aa, Artificial sequence
  Protein classification predicting sequence
IINNTE

SEQ ID NO: 38602 - protein, 8 aa, Artificial sequence
  Protein classification predicting sequence
LLNEAESL

SEQ ID NO: 38603 - protein, 7 aa, Artificial sequence
  Protein classification predicting sequence
KQAYYLS

SEQ ID NO: 38604 - protein, 6 aa, Artificial sequence
  Protein classification predicting sequence
KDFREL

SEQ ID NO: 38605 - protein, 6 aa, Artificial sequence
  Protein classification predicting sequence
SGGFYI

SEQ ID NO: 38606 - protein, 6 aa, Artificial sequence
  Protein classification predicting sequence
DYKVAA

SEQ ID NO: 38607 - protein, 6 aa, Artificial sequence
  Protein classification predicting sequence
IVNNTE

SEQ ID NO: 38608 - protein, 6 aa, Artificial sequence
  Protein classification predicting sequence
EARKYG

SEQ ID NO: 38609 - protein, 5 aa, Artificial sequence
  Protein classification predicting sequence
YNAFP

SEQ ID NO: 38610 - protein, 6 aa, Artificial sequence
  Protein classification predicting sequence
FMADFE

SEQ ID NO: 38611 - protein, 6 aa, Artificial sequence
  Protein classification predicting sequence
GGRRAQ

SEQ ID NO: 38612 - protein, 6 aa, Artificial sequence
  Protein classification predicting sequence
IKGKQA

SEQ ID NO: 38613 - protein, 6 aa, Artificial sequence
  Protein classification predicting sequence
PRRRKP

SEQ ID NO: 38614 - protein, 6 aa, Artificial sequence
  Protein classification predicting sequence
MLMMVQ

SEQ ID NO: 38615 - protein, 6 aa, Artificial sequence
  Protein classification predicting sequence
INFTYV

SEQ ID NO: 38616 - protein, 7 aa, Artificial sequence
  Protein classification predicting sequence
LRLQRER

SEQ ID NO: 38617 - protein, 7 aa, Artificial sequence
  Protein classification predicting sequence
ITEKAVF

SEQ ID NO: 38618 - protein, 6 aa, Artificial sequence
  Protein classification predicting sequence
RWAKKR

SEQ ID NO: 38619 - protein, 6 aa, Artificial sequence
  Protein classification predicting sequence
EIVALK

SEQ ID NO: 38620 - protein, 6 aa, Artificial sequence
  Protein classification predicting sequence
ALYLIA

SEQ ID NO: 38621 - protein, 7 aa, Artificial sequence
  Protein classification predicting sequence
LGASSIL

SEQ ID NO: 38622 - protein, 6 aa, Artificial sequence
  Protein classification predicting sequence
GPGLEE

SEQ ID NO: 38623 - protein, 5 aa, Artificial sequence
  Protein classification predicting sequence
PMFLY

SEQ ID NO: 38624 - protein, 6 aa, Artificial sequence
  Protein classification predicting sequence
ASIDQG

SEQ ID NO: 38625 - protein, 6 aa, Artificial sequence
  Protein classification predicting sequence
GTTIRL

SEQ ID NO: 38626 - protein, 6 aa, Artificial sequence
  Protein classification predicting sequence
PGWFSE

SEQ ID NO: 38627 - protein, 6 aa, Artificial sequence
  Protein classification predicting sequence
TYGKVL

SEQ ID NO: 38628 - protein, 10 aa, Artificial sequence
  Protein classification predicting sequence
FKGSVNYAWT

SEQ ID NO: 38629 - protein, 13 aa, Artificial sequence
  Protein classification predicting sequence
TQAESIWLHMHII

SEQ ID NO: 38630 - protein, 7 aa, Artificial sequence
  Protein classification predicting sequence
PLKFYNS

SEQ ID NO: 38631 - protein, 9 aa, Artificial sequence
  Protein classification predicting sequence
LFQGKSDYQ

SEQ ID NO: 38632 - protein, 6 aa, Artificial sequence
  Protein classification predicting sequence
DPRVTL

SEQ ID NO: 38633 - protein, 6 aa, Artificial sequence
  Protein classification predicting sequence
PLKFYN

SEQ ID NO: 38634 - protein, 19 aa, Artificial sequence
  Protein classification predicting sequence
PGGVVCTQAESIWLHMHII

SEQ ID NO: 38635 - protein, 6 aa, Artificial sequence
  Protein classification predicting sequence
LFQGKS

SEQ ID NO: 38636 - protein, 11 aa, Artificial sequence
  Protein classification predicting sequence
IVDSSDPIGPA

SEQ ID NO: 38637 - protein, 6 aa, Artificial sequence
  Protein classification predicting sequence
PINPID

SEQ ID NO: 38638 - protein, 8 aa, Artificial sequence
  Protein classification predicting sequence
ALRPGGVV

SEQ ID NO: 38639 - protein, 7 aa, Artificial sequence
  Protein classification predicting sequence
KALKEDG

SEQ ID NO: 38640 - protein, 7 aa, Artificial sequence
  Protein classification predicting sequence
LYQGYGQ

SEQ ID NO: 38641 - protein, 6 aa, Artificial sequence
  Protein classification predicting sequence
TVPTYP

SEQ ID NO: 38642 - protein, 6 aa, Artificial sequence
  Protein classification predicting sequence
VDSSDP

SEQ ID NO: 38643 - protein, 7 aa, Artificial sequence
  Protein classification predicting sequence
GDGAITA

SEQ ID NO: 38644 - protein, 6 aa, Artificial sequence
  Protein classification predicting sequence
HQGAFD

SEQ ID NO: 38645 - protein, 6 aa, Artificial sequence
  Protein classification predicting sequence
VKHPLV

SEQ ID NO: 38646 - protein, 7 aa, Artificial sequence
  Protein classification predicting sequence
DGPAASG

SEQ ID NO: 38647 - protein, 5 aa, Artificial sequence
  Protein classification predicting sequence
QNPRM

SEQ ID NO: 38648 - protein, 7 aa, Artificial sequence
  Protein classification predicting sequence
VLTLYPE

SEQ ID NO: 38649 - protein, 7 aa, Artificial sequence
  Protein classification predicting sequence
PNPKKVL

SEQ ID NO: 38650 - protein, 6 aa, Artificial sequence
  Protein classification predicting sequence
IIGGGD

SEQ ID NO: 38651 - protein, 8 aa, Artificial sequence
  Protein classification predicting sequence
LTDGSLGD

SEQ ID NO: 38652 - protein, 6 aa, Artificial sequence
  Protein classification predicting sequence
PPEGYL

SEQ ID NO: 38653 - protein, 6 aa, Artificial sequence
  Protein classification predicting sequence
IPQKVL

SEQ ID NO: 38654 - protein, 6 aa, Artificial sequence
  Protein classification predicting sequence
IGGGDG

SEQ ID NO: 38655 - protein, 7 aa, Artificial sequence
  Protein classification predicting sequence
HETVHEN

SEQ ID NO: 38656 - protein, 6 aa, Artificial sequence
  Protein classification predicting sequence
SVLFPR

SEQ ID NO: 38657 - protein, 6 aa, Artificial sequence
  Protein classification predicting sequence
TAEVSH

SEQ ID NO: 38658 - protein, 6 aa, Artificial sequence
  Protein classification predicting sequence
FKSSFD

SEQ ID NO: 38659 - protein, 6 aa, Artificial sequence
  Protein classification predicting sequence
DYEDNQ

SEQ ID NO: 38660 - protein, 7 aa, Artificial sequence
  Protein classification predicting sequence
YKDNQLR

SEQ ID NO: 38661 - protein, 6 aa, Artificial sequence
  Protein classification predicting sequence
KIYGPK

SEQ ID NO: 38662 - protein, 5 aa, Artificial sequence
  Protein classification predicting sequence
VMNII

SEQ ID NO: 38663 - protein, 6 aa, Artificial sequence
  Protein classification predicting sequence
DSEIDQ

SEQ ID NO: 38664 - protein, 5 aa, Artificial sequence
  Protein classification predicting sequence
SFRME

SEQ ID NO: 38665 - protein, 6 aa, Artificial sequence
  Protein classification predicting sequence
AKVIYL

SEQ ID NO: 38666 - protein, 5 aa, Artificial sequence
  Protein classification predicting sequence
GIFPW

SEQ ID NO: 38667 - protein, 6 aa, Artificial sequence
  Protein classification predicting sequence
VRDDDI

SEQ ID NO: 38668 - protein, 7 aa, Artificial sequence
  Protein classification predicting sequence
PSPEPEP

SEQ ID NO: 38669 - protein, 6 aa, Artificial sequence
  Protein classification predicting sequence
NDLPFV

SEQ ID NO: 38670 - protein, 5 aa, Artificial sequence
  Protein classification predicting sequence
YMSPE

SEQ ID NO: 38671 - protein, 7 aa, Artificial sequence
  Protein classification predicting sequence
EKQVAEQ

SEQ ID NO: 38672 - protein, 6 aa, Artificial sequence
  Protein classification predicting sequence
QSAVGD

SEQ ID NO: 38673 - protein, 8 aa, Artificial sequence
  Protein classification predicting sequence
VEPRASAD

SEQ ID NO: 38674 - protein, 6 aa, Artificial sequence
  Protein classification predicting sequence
LYNEAG

SEQ ID NO: 38675 - protein, 6 aa, Artificial sequence
  Protein classification predicting sequence
RMSAEE

SEQ ID NO: 38676 - protein, 7 aa, Artificial sequence
  Protein classification predicting sequence
AMLEQKI

SEQ ID NO: 38677 - protein, 7 aa, Artificial sequence
  Protein classification predicting sequence
LVKELLQ

SEQ ID NO: 38678 - protein, 7 aa, Artificial sequence
  Protein classification predicting sequence
VDRVFVD

SEQ ID NO: 38679 - protein, 6 aa, Artificial sequence
  Protein classification predicting sequence
NGNFTL

SEQ ID NO: 38680 - protein, 6 aa, Artificial sequence
  Protein classification predicting sequence
EKRRLT

SEQ ID NO: 38681 - protein, 7 aa, Artificial sequence
  Protein classification predicting sequence
RNLAKSV

SEQ ID NO: 38682 - protein, 6 aa, Artificial sequence
  Protein classification predicting sequence
EIIVHG

SEQ ID NO: 38683 - protein, 7 aa, Artificial sequence
  Protein classification predicting sequence
AHTNELV

SEQ ID NO: 38684 - protein, 7 aa, Artificial sequence
  Protein classification predicting sequence
LERELVR

SEQ ID NO: 38685 - protein, 8 aa, Artificial sequence
  Protein classification predicting sequence
LLLQQFSN

SEQ ID NO: 38686 - protein, 6 aa, Artificial sequence
  Protein classification predicting sequence
CPAEAG

SEQ ID NO: 38687 - protein, 6 aa, Artificial sequence
  Protein classification predicting sequence
ILPDMT

SEQ ID NO: 38688 - protein, 6 aa, Artificial sequence
  Protein classification predicting sequence
MVEVHP

SEQ ID NO: 38689 - protein, 7 aa, Artificial sequence
  Protein classification predicting sequence
TKEEVEE

SEQ ID NO: 38690 - protein, 6 aa, Artificial sequence
  Protein classification predicting sequence
VMVSPL

SEQ ID NO: 38691 - protein, 6 aa, Artificial sequence
  Protein classification predicting sequence
GVKKGG

SEQ ID NO: 38692 - protein, 6 aa, Artificial sequence
  Protein classification predicting sequence
EILKIV

SEQ ID NO: 38693 - protein, 7 aa, Artificial sequence
  Protein classification predicting sequence
DKISYIS

SEQ ID NO: 38694 - protein, 7 aa, Artificial sequence
  Protein classification predicting sequence
FGAEILK

SEQ ID NO: 38695 - protein, 6 aa, Artificial sequence
  Protein classification predicting sequence
VDAEDK

SEQ ID NO: 38696 - protein, 6 aa, Artificial sequence
  Protein classification predicting sequence
PSAEYP

SEQ ID NO: 38697 - protein, 6 aa, Artificial sequence
  Protein classification predicting sequence
DLGIEI

SEQ ID NO: 38698 - protein, 7 aa, Artificial sequence
  Protein classification predicting sequence
GSEILKN

SEQ ID NO: 38699 - protein, 7 aa, Artificial sequence
  Protein classification predicting sequence
WYKSKSL

SEQ ID NO: 38700 - protein, 7 aa, Artificial sequence
  Protein classification predicting sequence
KSTGQEY

SEQ ID NO: 38701 - protein, 6 aa, Artificial sequence
  Protein classification predicting sequence
VEDIID

SEQ ID NO: 38702 - protein, 6 aa, Artificial sequence
  Protein classification predicting sequence
MAADRM

SEQ ID NO: 38703 - protein, 7 aa, Artificial sequence
  Protein classification predicting sequence
PDHPRLL

SEQ ID NO: 38704 - protein, 7 aa, Artificial sequence
  Protein classification predicting sequence
APGGTLA

SEQ ID NO: 38705 - protein, 5 aa, Artificial sequence
  Protein classification predicting sequence
WSLGI

SEQ ID NO: 38706 - protein, 6 aa, Artificial sequence
  Protein classification predicting sequence
IRPPTV

SEQ ID NO: 38707 - protein, 7 aa, Artificial sequence
  Protein classification predicting sequence
GGVGGDV

SEQ ID NO: 38708 - protein, 6 aa, Artificial sequence
  Protein classification predicting sequence
NFVSEA

SEQ ID NO: 38709 - protein, 7 aa, Artificial sequence
  Protein classification predicting sequence
KLSSTWE

SEQ ID NO: 38710 - protein, 7 aa, Artificial sequence
  Protein classification predicting sequence
ERRAVEK

SEQ ID NO: 38711 - protein, 6 aa, Artificial sequence
  Protein classification predicting sequence
LGDFVL

SEQ ID NO: 38712 - protein, 6 aa, Artificial sequence
  Protein classification predicting sequence
CQEKLV

SEQ ID NO: 38713 - protein, 6 aa, Artificial sequence
  Protein classification predicting sequence
VFPLSN

SEQ ID NO: 38714 - protein, 6 aa, Artificial sequence
  Protein classification predicting sequence
SRPFQS

SEQ ID NO: 38715 - protein, 8 aa, Artificial sequence
  Protein classification predicting sequence
DIEKIKIG

SEQ ID NO: 38716 - protein, 7 aa, Artificial sequence
  Protein classification predicting sequence
TVTPAQL

SEQ ID NO: 38717 - protein, 6 aa, Artificial sequence
  Protein classification predicting sequence
VVKNAK

SEQ ID NO: 38718 - protein, 7 aa, Artificial sequence
  Protein classification predicting sequence
DFAARHL

SEQ ID NO: 38719 - protein, 5 aa, Artificial sequence
  Protein classification predicting sequence
GCQFV

SEQ ID NO: 38720 - protein, 6 aa, Artificial sequence
  Protein classification predicting sequence
FRRIEE

SEQ ID NO: 38721 - protein, 5 aa, Artificial sequence
  Protein classification predicting sequence
MTYYR

SEQ ID NO: 38722 - protein, 7 aa, Artificial sequence
  Protein classification predicting sequence
MQIAESS

SEQ ID NO: 38723 - protein, 6 aa, Artificial sequence
  Protein classification predicting sequence
ADIIIP

SEQ ID NO: 38724 - protein, 6 aa, Artificial sequence
  Protein classification predicting sequence
IEAIGA

SEQ ID NO: 38725 - protein, 5 aa, Artificial sequence
  Protein classification predicting sequence
RGIDM

SEQ ID NO: 38726 - protein, 6 aa, Artificial sequence
  Protein classification predicting sequence
LRKITE

SEQ ID NO: 38727 - protein, 5 aa, Artificial sequence
  Protein classification predicting sequence
SHIDG

SEQ ID NO: 38728 - protein, 6 aa, Artificial sequence
  Protein classification predicting sequence
GTPDYI

SEQ ID NO: 38729 - protein, 7 aa, Artificial sequence
  Protein classification predicting sequence
LEAVKNG

SEQ ID NO: 38730 - protein, 6 aa, Artificial sequence
  Protein classification predicting sequence
GGLHGF

SEQ ID NO: 38731 - protein, 6 aa, Artificial sequence
  Protein classification predicting sequence
NVVAAG

SEQ ID NO: 38732 - protein, 7 aa, Artificial sequence
  Protein classification predicting sequence
GAGAAHS

SEQ ID NO: 38733 - protein, 6 aa, Artificial sequence
  Protein classification predicting sequence
ICGTSD

SEQ ID NO: 38734 - protein, 8 aa, Artificial sequence
  Protein classification predicting sequence
SGARILIT

SEQ ID NO: 38735 - protein, 5 aa, Artificial sequence
  Protein classification predicting sequence
CGSGL

SEQ ID NO: 38736 - protein, 7 aa, Artificial sequence
  Protein classification predicting sequence
KPYFLTD

SEQ ID NO: 38737 - protein, 6 aa, Artificial sequence
  Protein classification predicting sequence
DEQSPD

SEQ ID NO: 38738 - protein, 7 aa, Artificial sequence
  Protein classification predicting sequence
AKTGMLA

SEQ ID NO: 38739 - protein, 6 aa, Artificial sequence
  Protein classification predicting sequence
GLEKLE

SEQ ID NO: 38740 - protein, 7 aa, Artificial sequence
  Protein classification predicting sequence
REQGITI

SEQ ID NO: 38741 - protein, 6 aa, Artificial sequence
  Protein classification predicting sequence
ANVSQV

SEQ ID NO: 38742 - protein, 5 aa, Artificial sequence
  Protein classification predicting sequence
AHNPG

SEQ ID NO: 38743 - protein, 6 aa, Artificial sequence
  Protein classification predicting sequence
NLGVGA

SEQ ID NO: 38744 - protein, 6 aa, Artificial sequence
  Protein classification predicting sequence
TLREIK

SEQ ID NO: 38745 - protein, 6 aa, Artificial sequence
  Protein classification predicting sequence
ACRSGV

SEQ ID NO: 38746 - protein, 7 aa, Artificial sequence
  Protein classification predicting sequence
VTRRAKA

SEQ ID NO: 38747 - protein, 7 aa, Artificial sequence
  Protein classification predicting sequence
AAGLRLG

SEQ ID NO: 38748 - protein, 5 aa, Artificial sequence
  Protein classification predicting sequence
VYDIH

SEQ ID NO: 38749 - protein, 6 aa, Artificial sequence
  Protein classification predicting sequence
AYRAGF

SEQ ID NO: 38750 - protein, 6 aa, Artificial sequence
  Protein classification predicting sequence
IPAEKV

SEQ ID NO: 38751 - protein, 7 aa, Artificial sequence
  Protein classification predicting sequence
GLFEDEI

SEQ ID NO: 38752 - protein, 6 aa, Artificial sequence
  Protein classification predicting sequence
WTLAEP

SEQ ID NO: 38753 - protein, 6 aa, Artificial sequence
  Protein classification predicting sequence
ESIKNG

SEQ ID NO: 38754 - protein, 7 aa, Artificial sequence
  Protein classification predicting sequence
DTVVIST

SEQ ID NO: 38755 - protein, 6 aa, Artificial sequence
  Protein classification predicting sequence
TKVVGT

SEQ ID NO: 38756 - protein, 7 aa, Artificial sequence
  Protein classification predicting sequence
NGLLALG

SEQ ID NO: 38757 - protein, 6 aa, Artificial sequence
  Protein classification predicting sequence
AHQAKI

SEQ ID NO: 38758 - protein, 6 aa, Artificial sequence
  Protein classification predicting sequence
GSADVL

SEQ ID NO: 38759 - protein, 6 aa, Artificial sequence
  Protein classification predicting sequence
STSISA

SEQ ID NO: 38760 - protein, 6 aa, Artificial sequence
  Protein classification predicting sequence
VWNKKS

SEQ ID NO: 38761 - protein, 7 aa, Artificial sequence
  Protein classification predicting sequence
NPEAVVK

SEQ ID NO: 38762 - protein, 7 aa, Artificial sequence
  Protein classification predicting sequence
VGKEFLE

SEQ ID NO: 38763 - protein, 6 aa, Artificial sequence
  Protein classification predicting sequence
VVSGNF

SEQ ID NO: 38764 - protein, 6 aa, Artificial sequence
  Protein classification predicting sequence
RELIHF

SEQ ID NO: 38765 - protein, 6 aa, Artificial sequence
  Protein classification predicting sequence
IFRDAG

SEQ ID NO: 38766 - protein, 6 aa, Artificial sequence
  Protein classification predicting sequence
QAQQEL

SEQ ID NO: 38767 - protein, 6 aa, Artificial sequence
  Protein classification predicting sequence
EFISQR

SEQ ID NO: 38768 - protein, 6 aa, Artificial sequence
  Protein classification predicting sequence
DYYKKT

SEQ ID NO: 38769 - protein, 7 aa, Artificial sequence
  Protein classification predicting sequence
VSARFES

SEQ ID NO: 38770 - protein, 7 aa, Artificial sequence
  Protein classification predicting sequence
IGIDKFG

SEQ ID NO: 38771 - protein, 6 aa, Artificial sequence
  Protein classification predicting sequence
GAGVTL

SEQ ID NO: 38772 - protein, 6 aa, Artificial sequence
  Protein classification predicting sequence
KFQGYY

SEQ ID NO: 38773 - protein, 7 aa, Artificial sequence
  Protein classification predicting sequence
GFLAEAE

SEQ ID NO: 38774 - protein, 7 aa, Artificial sequence
  Protein classification predicting sequence
TGVEDKE

SEQ ID NO: 38775 - protein, 6 aa, Artificial sequence
  Protein classification predicting sequence
VRKGAY

SEQ ID NO: 38776 - protein, 6 aa, Artificial sequence
  Protein classification predicting sequence
VDHHTY

SEQ ID NO: 38777 - protein, 7 aa, Artificial sequence
  Protein classification predicting sequence
AIVGSNA

SEQ ID NO: 38778 - protein, 7 aa, Artificial sequence
  Protein classification predicting sequence
QKAIELF

SEQ ID NO: 38779 - protein, 5 aa, Artificial sequence
  Protein classification predicting sequence
CCNLF

SEQ ID NO: 38780 - protein, 6 aa, Artificial sequence
  Protein classification predicting sequence
DHDNQR

SEQ ID NO: 38781 - protein, 5 aa, Artificial sequence
  Protein classification predicting sequence
GYDPH

SEQ ID NO: 38782 - protein, 6 aa, Artificial sequence
  Protein classification predicting sequence
SRRLIV

SEQ ID NO: 38783 - protein, 6 aa, Artificial sequence
  Protein classification predicting sequence
AMLEQK

SEQ ID NO: 38784 - protein, 6 aa, Artificial sequence
  Protein classification predicting sequence
DEYQVA

SEQ ID NO: 38785 - protein, 6 aa, Artificial sequence
  Protein classification predicting sequence
QFAIAP

SEQ ID NO: 38786 - protein, 7 aa, Artificial sequence
  Protein classification predicting sequence
EFNRDLT

SEQ ID NO: 38787 - protein, 6 aa, Artificial sequence
  Protein classification predicting sequence
DNRLLF

SEQ ID NO: 38788 - protein, 7 aa, Artificial sequence
  Protein classification predicting sequence
LFASKDK

SEQ ID NO: 38789 - protein, 6 aa, Artificial sequence
  Protein classification predicting sequence
DDFYHI

SEQ ID NO: 38790 - protein, 6 aa, Artificial sequence
  Protein classification predicting sequence
SQFKVN

SEQ ID NO: 38791 - protein, 6 aa, Artificial sequence
  Protein classification predicting sequence
AEYGML

SEQ ID NO: 38792 - protein, 7 aa, Artificial sequence
  Protein classification predicting sequence
RVEAKYR

SEQ ID NO: 38793 - protein, 7 aa, Artificial sequence
  Protein classification predicting sequence
FLRTNIE

SEQ ID NO: 38794 - protein, 6 aa, Artificial sequence
  Protein classification predicting sequence
AFGLKN

SEQ ID NO: 38795 - protein, 6 aa, Artificial sequence
  Protein classification predicting sequence
LVIGAE

SEQ ID NO: 38796 - protein, 7 aa, Artificial sequence
  Protein classification predicting sequence
TLVVGGQ

SEQ ID NO: 38797 - protein, 6 aa, Artificial sequence
  Protein classification predicting sequence
LYPDTP

SEQ ID NO: 38798 - protein, 6 aa, Artificial sequence
  Protein classification predicting sequence
DDFALI

SEQ ID NO: 38799 - protein, 6 aa, Artificial sequence
  Protein classification predicting sequence
LFIGIE

SEQ ID NO: 38800 - protein, 5 aa, Artificial sequence
  Protein classification predicting sequence
KPRNL

SEQ ID NO: 38801 - protein, 5 aa, Artificial sequence
  Protein classification predicting sequence
HDLTW

SEQ ID NO: 38802 - protein, 5 aa, Artificial sequence
  Protein classification predicting sequence
HHKRR

SEQ ID NO: 38803 - protein, 6 aa, Artificial sequence
  Protein classification predicting sequence
LTDTPV

SEQ ID NO: 38804 - protein, 6 aa, Artificial sequence
  Protein classification predicting sequence
IEIGSG

SEQ ID NO: 38805 - protein, 6 aa, Artificial sequence
  Protein classification predicting sequence
NFVSME

SEQ ID NO: 38806 - protein, 6 aa, Artificial sequence
  Protein classification predicting sequence
APRPEH

SEQ ID NO: 38807 - protein, 6 aa, Artificial sequence
  Protein classification predicting sequence
RRPDLL

SEQ ID NO: 38808 - protein, 6 aa, Artificial sequence
  Protein classification predicting sequence
QWTISY

SEQ ID NO: 38809 - protein, 6 aa, Artificial sequence
  Protein classification predicting sequence
RQVFDL

SEQ ID NO: 38810 - protein, 6 aa, Artificial sequence
  Protein classification predicting sequence
DSFSDG

SEQ ID NO: 38811 - protein, 5 aa, Artificial sequence
  Protein classification predicting sequence
AIIMD

SEQ ID NO: 38812 - protein, 6 aa, Artificial sequence
  Protein classification predicting sequence
PAGKPF

SEQ ID NO: 38813 - protein, 7 aa, Artificial sequence
  Protein classification predicting sequence
QGVRQLA

SEQ ID NO: 38814 - protein, 5 aa, Artificial sequence
  Protein classification predicting sequence
GHYEG

SEQ ID NO: 38815 - protein, 6 aa, Artificial sequence
  Protein classification predicting sequence
VRLLPG

SEQ ID NO: 38816 - protein, 6 aa, Artificial sequence
  Protein classification predicting sequence
IFNQKI

SEQ ID NO: 38817 - protein, 6 aa, Artificial sequence
  Protein classification predicting sequence
LTLQPI

SEQ ID NO: 38818 - protein, 5 aa, Artificial sequence
  Protein classification predicting sequence
YFKGP

SEQ ID NO: 38819 - protein, 6 aa, Artificial sequence
  Protein classification predicting sequence
AVLTSG

SEQ ID NO: 38820 - protein, 5 aa, Artificial sequence
  Protein classification predicting sequence
VDDTP

SEQ ID NO: 38821 - protein, 5 aa, Artificial sequence
  Protein classification predicting sequence
VDDYP

SEQ ID NO: 38822 - protein, 7 aa, Artificial sequence
  Protein classification predicting sequence
RRPDLLE

SEQ ID NO: 38823 - protein, 6 aa, Artificial sequence
  Protein classification predicting sequence
IARWRR

SEQ ID NO: 38824 - protein, 6 aa, Artificial sequence
  Protein classification predicting sequence
NYDQLV

SEQ ID NO: 38825 - protein, 5 aa, Artificial sequence
  Protein classification predicting sequence
PWYVV

SEQ ID NO: 38826 - protein, 6 aa, Artificial sequence
  Protein classification predicting sequence
GYQVTG

SEQ ID NO: 38827 - protein, 7 aa, Artificial sequence
  Protein classification predicting sequence
GFLTDAE

SEQ ID NO: 38828 - protein, 6 aa, Artificial sequence
  Protein classification predicting sequence
SHLTYD

SEQ ID NO: 38829 - protein, 6 aa, Artificial sequence
  Protein classification predicting sequence
AIVGGS

SEQ ID NO: 38830 - protein, 6 aa, Artificial sequence
  Protein classification predicting sequence
ILAGDH

SEQ ID NO: 38831 - protein, 6 aa, Artificial sequence
  Protein classification predicting sequence
GLDEFS

SEQ ID NO: 38832 - protein, 7 aa, Artificial sequence
  Protein classification predicting sequence
SDLSSEE

SEQ ID NO: 38833 - protein, 6 aa, Artificial sequence
  Protein classification predicting sequence
CRSLET

SEQ ID NO: 38834 - protein, 6 aa, Artificial sequence
  Protein classification predicting sequence
LRRASA

SEQ ID NO: 38835 - protein, 6 aa, Artificial sequence
  Protein classification predicting sequence
SADVLE

SEQ ID NO: 38836 - protein, 5 aa, Artificial sequence
  Protein classification predicting sequence
HEGIQ

SEQ ID NO: 38837 - protein, 6 aa, Artificial sequence
  Protein classification predicting sequence
GMGLDE

SEQ ID NO: 38838 - protein, 7 aa, Artificial sequence
  Protein classification predicting sequence
LNLKGLA

SEQ ID NO: 38839 - protein, 5 aa, Artificial sequence
  Protein classification predicting sequence
RTVFN

SEQ ID NO: 38840 - protein, 5 aa, Artificial sequence
  Protein classification predicting sequence
APIHH

SEQ ID NO: 38841 - protein, 6 aa, Artificial sequence
  Protein classification predicting sequence
VVHGGG

SEQ ID NO: 38842 - protein, 6 aa, Artificial sequence
  Protein classification predicting sequence
AAGVEF

SEQ ID NO: 38843 - protein, 7 aa, Artificial sequence
  Protein classification predicting sequence
EQLVPAD

SEQ ID NO: 38844 - protein, 7 aa, Artificial sequence
  Protein classification predicting sequence
NILLETK

SEQ ID NO: 38845 - protein, 6 aa, Artificial sequence
  Protein classification predicting sequence
NVPFQL

SEQ ID NO: 38846 - protein, 6 aa, Artificial sequence
  Protein classification predicting sequence
WYVKEG

SEQ ID NO: 38847 - protein, 5 aa, Artificial sequence
  Protein classification predicting sequence
EWADE

SEQ ID NO: 38848 - protein, 6 aa, Artificial sequence
  Protein classification predicting sequence
DAQPHI

SEQ ID NO: 38849 - protein, 6 aa, Artificial sequence
  Protein classification predicting sequence
IKAPVA

SEQ ID NO: 38850 - protein, 5 aa, Artificial sequence
  Protein classification predicting sequence
LPPCH

SEQ ID NO: 38851 - protein, 7 aa, Artificial sequence
  Protein classification predicting sequence
AQQTELE

SEQ ID NO: 38852 - protein, 6 aa, Artificial sequence
  Protein classification predicting sequence
IYEDQL

SEQ ID NO: 38853 - protein, 6 aa, Artificial sequence
  Protein classification predicting sequence
DFALSN

SEQ ID NO: 38854 - protein, 6 aa, Artificial sequence
  Protein classification predicting sequence
LVVLND

SEQ ID NO: 38855 - protein, 6 aa, Artificial sequence
  Protein classification predicting sequence
PDRTNF

SEQ ID NO: 38856 - protein, 6 aa, Artificial sequence
  Protein classification predicting sequence
GKFFYF

SEQ ID NO: 38857 - protein, 6 aa, Artificial sequence
  Protein classification predicting sequence
RGYDSA

SEQ ID NO: 38858 - protein, 7 aa, Artificial sequence
  Protein classification predicting sequence
DLFVTTC

SEQ ID NO: 38859 - protein, 6 aa, Artificial sequence
  Protein classification predicting sequence
AEQQQL

SEQ ID NO: 38860 - protein, 6 aa, Artificial sequence
  Protein classification predicting sequence
FASFIR

SEQ ID NO: 38861 - protein, 7 aa, Artificial sequence
  Protein classification predicting sequence
GIPVTYV

SEQ ID NO: 38862 - protein, 5 aa, Artificial sequence
  Protein classification predicting sequence
PRGTH

SEQ ID NO: 38863 - protein, 6 aa, Artificial sequence
  Protein classification predicting sequence
LKSNVE

SEQ ID NO: 38864 - protein, 6 aa, Artificial sequence
  Protein classification predicting sequence
EMMKMI

SEQ ID NO: 38865 - protein, 6 aa, Artificial sequence
  Protein classification predicting sequence
SITPYE

SEQ ID NO: 38866 - protein, 6 aa, Artificial sequence
  Protein classification predicting sequence
YMKERA

SEQ ID NO: 38867 - protein, 6 aa, Artificial sequence
  Protein classification predicting sequence
PPSYVP

SEQ ID NO: 38868 - protein, 7 aa, Artificial sequence
  Protein classification predicting sequence
KGAAVKL

SEQ ID NO: 38869 - protein, 6 aa, Artificial sequence
  Protein classification predicting sequence
AKGAAV

SEQ ID NO: 38870 - protein, 6 aa, Artificial sequence
  Protein classification predicting sequence
DRTSTF

SEQ ID NO: 38871 - protein, 5 aa, Artificial sequence
  Protein classification predicting sequence
PTQML

SEQ ID NO: 38872 - protein, 6 aa, Artificial sequence
  Protein classification predicting sequence
GRMFDG

SEQ ID NO: 38873 - protein, 7 aa, Artificial sequence
  Protein classification predicting sequence
SKWRQAF

SEQ ID NO: 38874 - protein, 5 aa, Artificial sequence
  Protein classification predicting sequence
AYSEF

SEQ ID NO: 38875 - protein, 6 aa, Artificial sequence
  Protein classification predicting sequence
IPDFPK

SEQ ID NO: 38876 - protein, 6 aa, Artificial sequence
  Protein classification predicting sequence
SEELIR

SEQ ID NO: 38877 - protein, 8 aa, Artificial sequence
  Protein classification predicting sequence
LNILGDKT

SEQ ID NO: 38878 - protein, 5 aa, Artificial sequence
  Protein classification predicting sequence
DGNRR

SEQ ID NO: 38879 - protein, 6 aa, Artificial sequence
  Protein classification predicting sequence
PQIPAD

SEQ ID NO: 38880 - protein, 7 aa, Artificial sequence
  Protein classification predicting sequence
AAYAEYV

SEQ ID NO: 38881 - protein, 6 aa, Artificial sequence
  Protein classification predicting sequence
KIKVDN

SEQ ID NO: 38882 - protein, 9 aa, Artificial sequence
  Protein classification predicting sequence
VCAEAGVEV

SEQ ID NO: 38883 - protein, 7 aa, Artificial sequence
  Protein classification predicting sequence
QRSKIEL

SEQ ID NO: 38884 - protein, 5 aa, Artificial sequence
  Protein classification predicting sequence
EWCRE

SEQ ID NO: 38885 - protein, 6 aa, Artificial sequence
  Protein classification predicting sequence
IGDISR

SEQ ID NO: 38886 - protein, 6 aa, Artificial sequence
  Protein classification predicting sequence
YTAAID

SEQ ID NO: 38887 - protein, 6 aa, Artificial sequence
  Protein classification predicting sequence
YTASID

SEQ ID NO: 38888 - protein, 6 aa, Artificial sequence
  Protein classification predicting sequence
VAAPEG

SEQ ID NO: 38889 - protein, 6 aa, Artificial sequence
  Protein classification predicting sequence
HAIRLL

SEQ ID NO: 38890 - protein, 6 aa, Artificial sequence
  Protein classification predicting sequence
VAYYSK

SEQ ID NO: 38891 - protein, 6 aa, Artificial sequence
  Protein classification predicting sequence
MQDGIL

SEQ ID NO: 38892 - protein, 7 aa, Artificial sequence
  Protein classification predicting sequence
DKEIVIV

SEQ ID NO: 38893 - protein, 8 aa, Artificial sequence
  Protein classification predicting sequence
LRAGNGLL

SEQ ID NO: 38894 - protein, 6 aa, Artificial sequence
  Protein classification predicting sequence
APSDLA

SEQ ID NO: 38895 - protein, 5 aa, Artificial sequence
  Protein classification predicting sequence
WNGPV

SEQ ID NO: 38896 - protein, 6 aa, Artificial sequence
  Protein classification predicting sequence
YATRMP

SEQ ID NO: 38897 - protein, 7 aa, Artificial sequence
  Protein classification predicting sequence
IFTAALD

SEQ ID NO: 38898 - protein, 8 aa, Artificial sequence
  Protein classification predicting sequence
VYTAAIDD

SEQ ID NO: 38899 - protein, 7 aa, Artificial sequence
  Protein classification predicting sequence
ERVRQLA

SEQ ID NO: 38900 - protein, 6 aa, Artificial sequence
  Protein classification predicting sequence
SGVVDW

SEQ ID NO: 38901 - protein, 6 aa, Artificial sequence
  Protein classification predicting sequence
DTTILG

SEQ ID NO: 38902 - protein, 6 aa, Artificial sequence
  Protein classification predicting sequence
EAAINA

SEQ ID NO: 38903 - protein, 6 aa, Artificial sequence
  Protein classification predicting sequence
GRLLVD

SEQ ID NO: 38904 - protein, 5 aa, Artificial sequence
  Protein classification predicting sequence
HMADG

SEQ ID NO: 38905 - protein, 7 aa, Artificial sequence
  Protein classification predicting sequence
LDVARRD

SEQ ID NO: 38906 - protein, 7 aa, Artificial sequence
  Protein classification predicting sequence
EPRGQQP

SEQ ID NO: 38907 - protein, 6 aa, Artificial sequence
  Protein classification predicting sequence
EKFQTP

SEQ ID NO: 38908 - protein, 8 aa, Artificial sequence
  Protein classification predicting sequence
PTERVKKN

SEQ ID NO: 38909 - protein, 6 aa, Artificial sequence
  Protein classification predicting sequence
FFVDII

SEQ ID NO: 38910 - protein, 6 aa, Artificial sequence
  Protein classification predicting sequence
KQGLDR

SEQ ID NO: 38911 - protein, 5 aa, Artificial sequence
  Protein classification predicting sequence
DQPRN

SEQ ID NO: 38912 - protein, 7 aa, Artificial sequence
  Protein classification predicting sequence
RYPLTFG

SEQ ID NO: 38913 - protein, 11 aa, Artificial sequence
  Protein classification predicting sequence
AKREDCNSGLA

SEQ ID NO: 38914 - protein, 8 aa, Artificial sequence
  Protein classification predicting sequence
DTLVSIGG

SEQ ID NO: 38915 - protein, 7 aa, Artificial sequence
  Protein classification predicting sequence
GFDIGIR

SEQ ID NO: 38916 - protein, 9 aa, Artificial sequence
  Protein classification predicting sequence
VTGSTQAGM

SEQ ID NO: 38917 - protein, 10 aa, Artificial sequence
  Protein classification predicting sequence
TDPVYEGKSM

SEQ ID NO: 38918 - protein, 14 aa, Artificial sequence
  Protein classification predicting sequence
KVLYAHLGGAPALN

SEQ ID NO: 38919 - protein, 9 aa, Artificial sequence
  Protein classification predicting sequence
GGLGFVGFA

SEQ ID NO: 38920 - protein, 24 aa, Artificial sequence
  Protein classification predicting sequence
TKAQILRIARHTAELVELGREITE

SEQ ID NO: 38921 - protein, 25 aa, Artificial sequence
  Protein classification predicting sequence
LYAKREDCNSGLAFGGNKTRKLEYL

SEQ ID NO: 38922 - protein, 7 aa, Artificial sequence
  Protein classification predicting sequence
YDRVGNI

SEQ ID NO: 38923 - protein, 20 aa, Artificial sequence
  Protein classification predicting sequence
YDRVGNIEMSRIMGADVRLD

SEQ ID NO: 38924 - protein, 6 aa, Artificial sequence
  Protein classification predicting sequence
DASAKP

SEQ ID NO: 38925 - protein, 7 aa, Artificial sequence
  Protein classification predicting sequence
PEYGLPN

SEQ ID NO: 38926 - protein, 19 aa, Artificial sequence
  Protein classification predicting sequence
LEGVLTDPVYEGKSMHGMI

SEQ ID NO: 38927 - protein, 10 aa, Artificial sequence
  Protein classification predicting sequence
DAVYDRVGNI

SEQ ID NO: 38928 - protein, 7 aa, Artificial sequence
  Protein classification predicting sequence
GEFPEGS

SEQ ID NO: 38929 - protein, 13 aa, Artificial sequence
  Protein classification predicting sequence
VLYAHLGGVPALN

SEQ ID NO: 38930 - protein, 25 aa, Artificial sequence
  Protein classification predicting sequence
DTLVSIGGIQSNQTRQVAAVAAHLG

SEQ ID NO: 38931 - protein, 12 aa, Artificial sequence
  Protein classification predicting sequence
KCVLVQENWVNY

SEQ ID NO: 38932 - protein, 15 aa, Artificial sequence
  Protein classification predicting sequence
GGKPFPIPAGCSEHP

SEQ ID NO: 38933 - protein, 22 aa, Artificial sequence
  Protein classification predicting sequence
VVCSVTGSTQAGMVVGFAADGR

SEQ ID NO: 38934 - protein, 10 aa, Artificial sequence
  Protein classification predicting sequence
GGNKLRKLEY

SEQ ID NO: 38935 - protein, 7 aa, Artificial sequence
  Protein classification predicting sequence
LYAHLGG

SEQ ID NO: 38936 - protein, 7 aa, Artificial sequence
  Protein classification predicting sequence
DCNSGLA

SEQ ID NO: 38937 - protein, 22 aa, Artificial sequence
  Protein classification predicting sequence
LTFGPTPIQPLKRLSAHLGGKV

SEQ ID NO: 38938 - protein, 45 aa, Artificial sequence
  Protein classification predicting sequence
KCVLVQENWVNYSDAVYDRVGNIEMSRIMGADVRLDAAGFDIGIR

SEQ ID NO: 38939 - protein, 16 aa, Artificial sequence
  Protein classification predicting sequence
PEYGLPNEGTLEAIRL

SEQ ID NO: 38940 - protein, 6 aa, Artificial sequence
  Protein classification predicting sequence
QSNQTR

SEQ ID NO: 38941 - protein, 9 aa, Artificial sequence
  Protein classification predicting sequence
PIPAGCSEH

SEQ ID NO: 38942 - protein, 8 aa, Artificial sequence
  Protein classification predicting sequence
LDTRFAYP

SEQ ID NO: 38943 - protein, 8 aa, Artificial sequence
  Protein classification predicting sequence
DKLIAQKV

SEQ ID NO: 38944 - protein, 11 aa, Artificial sequence
  Protein classification predicting sequence
GGDGFQMIKDE

SEQ ID NO: 38945 - protein, 7 aa, Artificial sequence
  Protein classification predicting sequence
YISKMKV

SEQ ID NO: 38946 - protein, 9 aa, Artificial sequence
  Protein classification predicting sequence
VGYTSKETP

SEQ ID NO: 38947 - protein, 11 aa, Artificial sequence
  Protein classification predicting sequence
KIIALGHSGFE

SEQ ID NO: 38948 - protein, 8 aa, Artificial sequence
  Protein classification predicting sequence
GKYLGYLK

SEQ ID NO: 38949 - protein, 14 aa, Artificial sequence
  Protein classification predicting sequence
RECNMGNLICDAMI

SEQ ID NO: 38950 - protein, 7 aa, Artificial sequence
  Protein classification predicting sequence
HTASLFP

SEQ ID NO: 38951 - protein, 7 aa, Artificial sequence
  Protein classification predicting sequence
GCHSANI

SEQ ID NO: 38952 - protein, 6 aa, Artificial sequence
  Protein classification predicting sequence
DIHITP

SEQ ID NO: 38953 - protein, 6 aa, Artificial sequence
  Protein classification predicting sequence
QPRGFN

SEQ ID NO: 38954 - protein, 11 aa, Artificial sequence
  Protein classification predicting sequence
ASPESQQIHVW

SEQ ID NO: 38955 - protein, 8 aa, Artificial sequence
  Protein classification predicting sequence
VPGQVQPM

SEQ ID NO: 38956 - protein, 7 aa, Artificial sequence
  Protein classification predicting sequence
LYVGVRP

SEQ ID NO: 38957 - protein, 10 aa, Artificial sequence
  Protein classification predicting sequence
GRFLFSASYS

SEQ ID NO: 38958 - protein, 7 aa, Artificial sequence
  Protein classification predicting sequence
GAGPRHM

SEQ ID NO: 38959 - protein, 7 aa, Artificial sequence
  Protein classification predicting sequence
AYCVNEL

SEQ ID NO: 38960 - protein, 11 aa, Artificial sequence
  Protein classification predicting sequence
QPTETQPRGFN

SEQ ID NO: 38961 - protein, 9 aa, Artificial sequence
  Protein classification predicting sequence
VQPMVVSPD

SEQ ID NO: 38962 - protein, 13 aa, Artificial sequence
  Protein classification predicting sequence
ADIHITPDGRHLY

SEQ ID NO: 38963 - protein, 17 aa, Artificial sequence
  Protein classification predicting sequence
FVFVGSYNAGNVSVTRL

SEQ ID NO: 38964 - protein, 15 aa, Artificial sequence
  Protein classification predicting sequence
VDVVEGLDGCHSANI

SEQ ID NO: 38965 - protein, 13 aa, Artificial sequence
  Protein classification predicting sequence
PDNRTLWVPALKQ

SEQ ID NO: 38966 - protein, 9 aa, Artificial sequence
  Protein classification predicting sequence
SDDGHLVAQ

SEQ ID NO: 38967 - protein, 15 aa, Artificial sequence
  Protein classification predicting sequence
TVEGAGPRHMVFHPN

SEQ ID NO: 38968 - protein, 16 aa, Artificial sequence
  Protein classification predicting sequence
QYAYCVNELNSSVDVW

SEQ ID NO: 38969 - protein, 11 aa, Artificial sequence
  Protein classification predicting sequence
IECVQTLDMMP

SEQ ID NO: 38970 - protein, 42 aa, Artificial sequence
  Protein classification predicting sequence
FSDTRWAADIHITPDGRHLYACDRTASLITVFSVSEDGSVLS

SEQ ID NO: 38971 - protein, 7 aa, Artificial sequence
  Protein classification predicting sequence
EGFQPTE

SEQ ID NO: 38972 - protein, 18 aa, Artificial sequence
  Protein classification predicting sequence
EKGRYAVGQGPMWVVVNA

SEQ ID NO: 38973 - protein, 13 aa, Artificial sequence
  Protein classification predicting sequence
KYLIAAGQKSHHI

SEQ ID NO: 38974 - protein, 7 aa, Artificial sequence
  Protein classification predicting sequence
SQQIHVW

SEQ ID NO: 38975 - protein, 13 aa, Artificial sequence
  Protein classification predicting sequence
AYCVNELNSSVDV

SEQ ID NO: 38976 - protein, 11 aa, Artificial sequence
  Protein classification predicting sequence
TRWAADIHITP

SEQ ID NO: 38977 - protein, 12 aa, Artificial sequence
  Protein classification predicting sequence
WCLGNEMDGPWQ

SEQ ID NO: 38978 - protein, 16 aa, Artificial sequence
  Protein classification predicting sequence
ACLAQLVNVIAPIMTE

SEQ ID NO: 38979 - protein, 17 aa, Artificial sequence
  Protein classification predicting sequence
TEGATSQSYKQFIEALR

SEQ ID NO: 38980 - protein, 9 aa, Artificial sequence
  Protein classification predicting sequence
GYHNGNRII

SEQ ID NO: 38981 - protein, 87 aa, Artificial sequence
  Protein classification predicting sequence
YVMIYDCTSAVAEATYWEIWDNGTIINPKSALVLSAESSSMGGTLTVQTNEYLMRQGWRTGNNTSPFVTSISGYSDLCMQAQGSNVW

SEQ ID NO: 38982 - protein, 34 aa, Artificial sequence
  Protein classification predicting sequence
NKKEQQWALYTDGSIRSVQNTNNCLTSKDHKQGS

SEQ ID NO: 38983 - protein, 10 aa, Artificial sequence
  Protein classification predicting sequence
CSNGWASQRW

SEQ ID NO: 38984 - protein, 8 aa, Artificial sequence
  Protein classification predicting sequence
SYFLRDAP

SEQ ID NO: 38985 - protein, 7 aa, Artificial sequence
  Protein classification predicting sequence
LDVYDGR

SEQ ID NO: 38986 - protein, 7 aa, Artificial sequence
  Protein classification predicting sequence
YYYFTHR

SEQ ID NO: 38987 - protein, 6 aa, Artificial sequence
  Protein classification predicting sequence
LLGNMW

SEQ ID NO: 38988 - protein, 7 aa, Artificial sequence
  Protein classification predicting sequence
GGGFYSG

SEQ ID NO: 38989 - protein, 9 aa, Artificial sequence
  Protein classification predicting sequence
YRVGAFGFL

SEQ ID NO: 38990 - protein, 11 aa, Artificial sequence
  Protein classification predicting sequence
RPAQDLVDHEW

SEQ ID NO: 38991 - protein, 7 aa, Artificial sequence
  Protein classification predicting sequence
DEGSYFL

SEQ ID NO: 38992 - protein, 7 aa, Artificial sequence
  Protein classification predicting sequence
FVPVIDG

SEQ ID NO: 38993 - protein, 11 aa, Artificial sequence
  Protein classification predicting sequence
GVVKDEGSYFL

SEQ ID NO: 38994 - protein, 6 aa, Artificial sequence
  Protein classification predicting sequence
LQYTDW

SEQ ID NO: 38995 - protein, 12 aa, Artificial sequence
  Protein classification predicting sequence
WMGVPHGYEIEF

SEQ ID NO: 38996 - protein, 6 aa, Artificial sequence
  Protein classification predicting sequence
KQDRCS

SEQ ID NO: 38997 - protein, 7 aa, Artificial sequence
  Protein classification predicting sequence
PNGPWAT

SEQ ID NO: 38998 - protein, 14 aa, Artificial sequence
  Protein classification predicting sequence
LAAEAVVLHYTDWL

SEQ ID NO: 38999 - protein, 9 aa, Artificial sequence
  Protein classification predicting sequence
VGDHNVVCP

SEQ ID NO: 39000 - protein, 9 aa, Artificial sequence
  Protein classification predicting sequence
EFHRWSSYM

SEQ ID NO: 39001 - protein, 7 aa, Artificial sequence
  Protein classification predicting sequence
CYQYVDT

SEQ ID NO: 39002 - protein, 8 aa, Artificial sequence
  Protein classification predicting sequence
GEARRRAT

SEQ ID NO: 39003 - protein, 8 aa, Artificial sequence
  Protein classification predicting sequence
EWMGVIHG

SEQ ID NO: 39004 - protein, 23 aa, Artificial sequence
  Protein classification predicting sequence
FRFSFVPVVDGDFLSDTPEALIN

SEQ ID NO: 39005 - protein, 19 aa, Artificial sequence
  Protein classification predicting sequence
LQVLVGVVKDEGSYFLVYG

SEQ ID NO: 39006 - protein, 7 aa, Artificial sequence
  Protein classification predicting sequence
PQWPPYT

SEQ ID NO: 39007 - protein, 11 aa, Artificial sequence
  Protein classification predicting sequence
PLEVRRGLRAQ

SEQ ID NO: 39008 - protein, 41 aa, Artificial sequence
  Protein classification predicting sequence
VCYQYVDTLYPGFEGTEMWNPNRELSEDCLYLNVWTPYPRP

SEQ ID NO: 39009 - protein, 18 aa, Artificial sequence
  Protein classification predicting sequence
FRFSFVPVVDGDFLSDTP

SEQ ID NO: 39010 - protein, 49 aa, Artificial sequence
  Protein classification predicting sequence
CAFWNRFLPKLLSATDTLDEAERQWKAEFHRWSSYMVHWKNQFDHYSKQ

SEQ ID NO: 39011 - protein, 12 aa, Artificial sequence
  Protein classification predicting sequence
EAPGNVGLLDQR

SEQ ID NO: 39012 - protein, 6 aa, Artificial sequence
  Protein classification predicting sequence
ASVGMH

SEQ ID NO: 39013 - protein, 12 aa, Artificial sequence
  Protein classification predicting sequence
EATAIKEDGSIV

SEQ ID NO: 39014 - protein, 10 aa, Artificial sequence
  Protein classification predicting sequence
GPSVGGSPEF

SEQ ID NO: 39015 - protein, 8 aa, Artificial sequence
  Protein classification predicting sequence
RVRYAPYL

SEQ ID NO: 39016 - protein, 9 aa, Artificial sequence
  Protein classification predicting sequence
GWSGFTGVG

SEQ ID NO: 39017 - protein, 13 aa, Artificial sequence
  Protein classification predicting sequence
FNLFVGASAGPEE

SEQ ID NO: 39018 - protein, 9 aa, Artificial sequence
  Protein classification predicting sequence
EDGSIVPGP

SEQ ID NO: 39019 - protein, 8 aa, Artificial sequence
  Protein classification predicting sequence
PEIIRRLG

SEQ ID NO: 39020 - protein, 17 aa, Artificial sequence
  Protein classification predicting sequence
GSRMLNGLGGSADFLRN

SEQ ID NO: 39021 - protein, 6 aa, Artificial sequence
  Protein classification predicting sequence
CAHPDY

SEQ ID NO: 39022 - protein, 8 aa, Artificial sequence
  Protein classification predicting sequence
LFVGASAG

SEQ ID NO: 39023 - protein, 7 aa, Artificial sequence
  Protein classification predicting sequence
IRRLGVI

SEQ ID NO: 39024 - protein, 9 aa, Artificial sequence
  Protein classification predicting sequence
PSFEGLHDI

SEQ ID NO: 39025 - protein, 12 aa, Artificial sequence
  Protein classification predicting sequence
PLQSGIGNIANA

SEQ ID NO: 39026 - protein, 8 aa, Artificial sequence
  Protein classification predicting sequence
FFDKHLSM

SEQ ID NO: 39027 - protein, 12 aa, Artificial sequence
  Protein classification predicting sequence
VWTEVLQDSFLD

SEQ ID NO: 39028 - protein, 12 aa, Artificial sequence
  Protein classification predicting sequence
DFLRNAKLSIMH

SEQ ID NO: 39029 - protein, 12 aa, Artificial sequence
  Protein classification predicting sequence
FVFAEGIAYGPE

SEQ ID NO: 39030 - protein, 9 aa, Artificial sequence
  Protein classification predicting sequence
GPEGLVTGK

SEQ ID NO: 39031 - protein, 11 aa, Artificial sequence
  Protein classification predicting sequence
LALSDELIAEL

SEQ ID NO: 39032 - protein, 6 aa, Artificial sequence
  Protein classification predicting sequence
APMYNF

SEQ ID NO: 39033 - protein, 17 aa, Artificial sequence
  Protein classification predicting sequence
ARAGVTFRYTENGPEGL

SEQ ID NO: 39034 - protein, 7 aa, Artificial sequence
  Protein classification predicting sequence
EQWREKH

SEQ ID NO: 39035 - protein, 10 aa, Artificial sequence
  Protein classification predicting sequence
PVLDGELVGA

SEQ ID NO: 39036 - protein, 6 aa, Artificial sequence
  Protein classification predicting sequence
TFRYTE

SEQ ID NO: 39037 - protein, 10 aa, Artificial sequence
  Protein classification predicting sequence
FLGFIGITDV

SEQ ID NO: 39038 - protein, 8 aa, Artificial sequence
  Protein classification predicting sequence
DAKAAIDS

SEQ ID NO: 39039 - protein, 16 aa, Artificial sequence
  Protein classification predicting sequence
PIPVLDGELVGALRPS

SEQ ID NO: 39040 - protein, 14 aa, Artificial sequence
  Protein classification predicting sequence
DVIVIAAPMYNFNI

SEQ ID NO: 39041 - protein, 8 aa, Artificial sequence
  Protein classification predicting sequence
TQLKNYFD

SEQ ID NO: 39042 - protein, 11 aa, Artificial sequence
  Protein classification predicting sequence
ARAGVTFRYTE

SEQ ID NO: 39043 - protein, 9 aa, Artificial sequence
  Protein classification predicting sequence
GGKCELLSD

SEQ ID NO: 39044 - protein, 7 aa, Artificial sequence
  Protein classification predicting sequence
LKVGFLP

SEQ ID NO: 39045 - protein, 11 aa, Artificial sequence
  Protein classification predicting sequence
VALMGGSHGGF

SEQ ID NO: 39046 - protein, 12 aa, Artificial sequence
  Protein classification predicting sequence
SCHLIGQYPETY

SEQ ID NO: 39047 - protein, 51 aa, Artificial sequence
  Protein classification predicting sequence
EEKQFLEVWEKNRKLKSFNLSALEKHGPVYEDDCFGCLSWSHSETHLLYVA

SEQ ID NO: 39048 - protein, 12 aa, Artificial sequence
  Protein classification predicting sequence
KKPDQAIKGDQF

SEQ ID NO: 39049 - protein, 25 aa, Artificial sequence
  Protein classification predicting sequence
FSGIYCSLLPLGCWSADSQRVVFDS

SEQ ID NO: 39050 - protein, 13 aa, Artificial sequence
  Protein classification predicting sequence
QRSRQDLFAVDTQ

SEQ ID NO: 39051 - protein, 7 aa, Artificial sequence
  Protein classification predicting sequence
HALSEVE

SEQ ID NO: 39052 - protein, 16 aa, Artificial sequence
  Protein classification predicting sequence
GKIDTCQGDSGGPLMC

SEQ ID NO: 39053 - protein, 9 aa, Artificial sequence
  Protein classification predicting sequence
LMEARVDLI

SEQ ID NO: 39054 - protein, 11 aa, Artificial sequence
  Protein classification predicting sequence
LCNSTQWYNGR

SEQ ID NO: 39055 - protein, 16 aa, Artificial sequence
  Protein classification predicting sequence
GITSWGVGCARAKRPG

SEQ ID NO: 39056 - protein, 11 aa, Artificial sequence
  Protein classification predicting sequence
LQDQDWKPLHP

SEQ ID NO: 39057 - protein, 31 aa, Artificial sequence
  Protein classification predicting sequence
PLGGDCTVYPVFVNEAAYYEKKEAFAKTTKL

SEQ ID NO: 39058 - protein, 17 aa, Artificial sequence
  Protein classification predicting sequence
AIFGGTHGNELTGVFLV

SEQ ID NO: 39059 - protein, 11 aa, Artificial sequence
  Protein classification predicting sequence
VKPFITNPRAV

SEQ ID NO: 39060 - protein, 8 aa, Artificial sequence
  Protein classification predicting sequence
NEAAYYEK

SEQ ID NO: 39061 - protein, 11 aa, Artificial sequence
  Protein classification predicting sequence
GPQPQGVLRAD

SEQ ID NO: 39062 - protein, 8 aa, Artificial sequence
  Protein classification predicting sequence
SVDYEVFG

SEQ ID NO: 39063 - protein, 7 aa, Artificial sequence
  Protein classification predicting sequence
FGRVQGV

SEQ ID NO: 39064 - protein, 9 aa, Artificial sequence
  Protein classification predicting sequence
YDTSHIYTG

SEQ ID NO: 39065 - protein, 7 aa, Artificial sequence
  Protein classification predicting sequence
IQTDHLF

SEQ ID NO: 39066 - protein, 21 aa, Artificial sequence
  Protein classification predicting sequence
TREAVIAQISSHVKAIDTIYQ

SEQ ID NO: 39067 - protein, 19 aa, Artificial sequence
  Protein classification predicting sequence
TDFSGIRNISFMVKRIRIN

SEQ ID NO: 39068 - protein, 49 aa, Artificial sequence
  Protein classification predicting sequence
KLYSDGKKKSLNTGIITVQNYGSHVPPKVSHITFAHEVGHNFGSPHDSG

SEQ ID NO: 39069 - protein, 12 aa, Artificial sequence
  Protein classification predicting sequence
TSGDKLNNNKFS

SEQ ID NO: 39070 - protein, 13 aa, Artificial sequence
  Protein classification predicting sequence
CFVESGQPICGNG

SEQ ID NO: 39071 - protein, 16 aa, Artificial sequence
  Protein classification predicting sequence
LKPGKQCSPSQGPCCT

SEQ ID NO: 39072 - protein, 7 aa, Artificial sequence
  Protein classification predicting sequence
TCASTGS

SEQ ID NO: 39073 - protein, 11 aa, Artificial sequence
  Protein classification predicting sequence
TITLQPGSPCN

SEQ ID NO: 39074 - protein, 26 aa, Artificial sequence
  Protein classification predicting sequence
GYCDVFMRCRLVDADGPLARLKKAIF

SEQ ID NO: 39075 - protein, 7 aa, Artificial sequence
  Protein classification predicting sequence
YQMGHMR

SEQ ID NO: 39076 - protein, 13 aa, Artificial sequence
  Protein classification predicting sequence
KRIAYEFVEMKAK

SEQ ID NO: 39077 - protein, 12 aa, Artificial sequence
  Protein classification predicting sequence
KPKVELHVHLDG

SEQ ID NO: 39078 - protein, 11 aa, Artificial sequence
  Protein classification predicting sequence
RSILCCMRHQP

SEQ ID NO: 39079 - protein, 10 aa, Artificial sequence
  Protein classification predicting sequence
FLAKFDYYMP

SEQ ID NO: 39080 - protein, 9 aa, Artificial sequence
  Protein classification predicting sequence
DDPLIFKST

SEQ ID NO: 39081 - protein, 6 aa, Artificial sequence
  Protein classification predicting sequence
DTDYQM

SEQ ID NO: 39082 - protein, 10 aa, Artificial sequence
  Protein classification predicting sequence
LIGIMSRTFG

SEQ ID NO: 39083 - protein, 10 aa, Artificial sequence
  Protein classification predicting sequence
IGIESCLTSN

SEQ ID NO: 39084 - protein, 13 aa, Artificial sequence
  Protein classification predicting sequence
VLRTEQDFYDLTW

SEQ ID NO: 39085 - protein, 8 aa, Artificial sequence
  Protein classification predicting sequence
FFDPQTHT

SEQ ID NO: 39086 - protein, 10 aa, Artificial sequence
  Protein classification predicting sequence
GLILSFLRHL

SEQ ID NO: 39087 - protein, 8 aa, Artificial sequence
  Protein classification predicting sequence
RIDHGVRA

SEQ ID NO: 39088 - protein, 12 aa, Artificial sequence
  Protein classification predicting sequence
QIPLTVCPLSNT

SEQ ID NO: 39089 - protein, 7 aa, Artificial sequence
  Protein classification predicting sequence
LPKAELH

SEQ ID NO: 39090 - protein, 8 aa, Artificial sequence
  Protein classification predicting sequence
LTVCPLSN

SEQ ID NO: 39091 - protein, 6 aa, Artificial sequence
  Protein classification predicting sequence
EIRFAP

SEQ ID NO: 39092 - protein, 8 aa, Artificial sequence
  Protein classification predicting sequence
YIEIRFAP

SEQ ID NO: 39093 - protein, 6 aa, Artificial sequence
  Protein classification predicting sequence
ILCCMR

SEQ ID NO: 39094 - protein, 7 aa, Artificial sequence
  Protein classification predicting sequence
TLHAGEC

SEQ ID NO: 39095 - protein, 9 aa, Artificial sequence
  Protein classification predicting sequence
ARDAGWHIT

SEQ ID NO: 39096 - protein, 6 aa, Artificial sequence
  Protein classification predicting sequence
TIHAGE

SEQ ID NO: 39097 - protein, 12 aa, Artificial sequence
  Protein classification predicting sequence
ESIWQAIRELGA

SEQ ID NO: 39098 - protein, 8 aa, Artificial sequence
  Protein classification predicting sequence
ASINTDDP

SEQ ID NO: 39099 - protein, 8 aa, Artificial sequence
  Protein classification predicting sequence
AAPAAGLS

SEQ ID NO: 39100 - protein, 11 aa, Artificial sequence
  Protein classification predicting sequence
QIRQAQINGLE

SEQ ID NO: 39101 - protein, 7 aa, Artificial sequence
  Protein classification predicting sequence
VGLDSSE

SEQ ID NO: 39102 - protein, 8 aa, Artificial sequence
  Protein classification predicting sequence
EGSLEPEL

SEQ ID NO: 39103 - protein, 6 aa, Artificial sequence
  Protein classification predicting sequence
PKAELH

SEQ ID NO: 39104 - protein, 12 aa, Artificial sequence
  Protein classification predicting sequence
HIEGSLEPELMF

SEQ ID NO: 39105 - protein, 7 aa, Artificial sequence
  Protein classification predicting sequence
TEQDFYD

SEQ ID NO: 39106 - protein, 10 aa, Artificial sequence
  Protein classification predicting sequence
SDDPAYFGGY

SEQ ID NO: 39107 - protein, 16 aa, Artificial sequence
  Protein classification predicting sequence
TLPLTDIHRHLDGNIR

SEQ ID NO: 39108 - protein, 12 aa, Artificial sequence
  Protein classification predicting sequence
AGVVEAVIDGVR

SEQ ID NO: 39109 - protein, 14 aa, Artificial sequence
  Protein classification predicting sequence
LIGIMSRTFGEAAC

SEQ ID NO: 39110 - protein, 63 aa, Artificial sequence
  Protein classification predicting sequence
ITALDLAGDELGFPGSLFLSHFNRARDAGWHITVHAGEAAGPESIWQAIRELGAERIGHGVKA

SEQ ID NO: 39111 - protein, 10 aa, Artificial sequence
  Protein classification predicting sequence
EDRALMDFLA

SEQ ID NO: 39112 - protein, 17 aa, Artificial sequence
  Protein classification predicting sequence
IGIESCLTSNIQTSTVA

SEQ ID NO: 39113 - protein, 10 aa, Artificial sequence
  Protein classification predicting sequence
HPLKTFLEHG

SEQ ID NO: 39114 - protein, 10 aa, Artificial sequence
  Protein classification predicting sequence
VQGVDIIHEY

SEQ ID NO: 39115 - protein, 10 aa, Artificial sequence
  Protein classification predicting sequence
EKRALREKVA

SEQ ID NO: 39116 - protein, 7 aa, Artificial sequence
  Protein classification predicting sequence
HRHLDGN

SEQ ID NO: 39117 - protein, 10 aa, Artificial sequence
  Protein classification predicting sequence
GVVEAVIDGV

SEQ ID NO: 39118 - protein, 7 aa, Artificial sequence
  Protein classification predicting sequence
LIGIMSR

SEQ ID NO: 39119 - protein, 7 aa, Artificial sequence
  Protein classification predicting sequence
HAGEAAG

SEQ ID NO: 39120 - protein, 7 aa, Artificial sequence
  Protein classification predicting sequence
NTDDPGV

SEQ ID NO: 39121 - protein, 15 aa, Artificial sequence
  Protein classification predicting sequence
YVELRFSPGYMAMAH

SEQ ID NO: 39122 - protein, 8 aa, Artificial sequence
  Protein classification predicting sequence
LHCHLDGS

SEQ ID NO: 39123 - protein, 20 aa, Artificial sequence
  Protein classification predicting sequence
GVTTAICDPHEIANVLGAEG

SEQ ID NO: 39124 - protein, 15 aa, Artificial sequence
  Protein classification predicting sequence
MDIRVQLSSCVPATH

SEQ ID NO: 39125 - protein, 9 aa, Artificial sequence
  Protein classification predicting sequence
AAGIRTEHE

SEQ ID NO: 39126 - protein, 11 aa, Artificial sequence
  Protein classification predicting sequence
LVREGSVSKDL

SEQ ID NO: 39127 - protein, 9 aa, Artificial sequence
  Protein classification predicting sequence
ALMPIITER

SEQ ID NO: 39128 - protein, 14 aa, Artificial sequence
  Protein classification predicting sequence
LALCTDDRNPLDIA

SEQ ID NO: 39129 - protein, 12 aa, Artificial sequence
  Protein classification predicting sequence
GVEPLAIYRAAS

SEQ ID NO: 39130 - protein, 8 aa, Artificial sequence
  Protein classification predicting sequence
DRGLVAPG

SEQ ID NO: 39131 - protein, 13 aa, Artificial sequence
  Protein classification predicting sequence
KVAVIERHGKNGN

SEQ ID NO: 39132 - protein, 8 aa, Artificial sequence
  Protein classification predicting sequence
LPVAGLMS

SEQ ID NO: 39133 - protein, 7 aa, Artificial sequence
  Protein classification predicting sequence
LEEPFLQ

SEQ ID NO: 39134 - protein, 10 aa, Artificial sequence
  Protein classification predicting sequence
DPHEIANVLG

SEQ ID NO: 39135 - protein, 7 aa, Artificial sequence
  Protein classification predicting sequence
GIRTDHE

SEQ ID NO: 39136 - protein, 8 aa, Artificial sequence
  Protein classification predicting sequence
DRGLVDVD

SEQ ID NO: 39137 - protein, 6 aa, Artificial sequence
  Protein classification predicting sequence
HIESSM

SEQ ID NO: 39138 - protein, 9 aa, Artificial sequence
  Protein classification predicting sequence
PITAIQMAT

SEQ ID NO: 39139 - protein, 8 aa, Artificial sequence
  Protein classification predicting sequence
LNAYIAAG

SEQ ID NO: 39140 - protein, 18 aa, Artificial sequence
  Protein classification predicting sequence
GAIATTVAHDSHNIVAVG

SEQ ID NO: 39141 - protein, 10 aa, Artificial sequence
  Protein classification predicting sequence
DEPFIQMAFL

SEQ ID NO: 39142 - protein, 8 aa, Artificial sequence
  Protein classification predicting sequence
KVAVIERH

SEQ ID NO: 39143 - protein, 7 aa, Artificial sequence
  Protein classification predicting sequence
PHEIVNV

SEQ ID NO: 39144 - protein, 9 aa, Artificial sequence
  Protein classification predicting sequence
REGSAARNL

SEQ ID NO: 39145 - protein, 7 aa, Artificial sequence
  Protein classification predicting sequence
FGLRDRG

SEQ ID NO: 39146 - protein, 7 aa, Artificial sequence
  Protein classification predicting sequence
HDSHNIV

SEQ ID NO: 39147 - protein, 11 aa, Artificial sequence
  Protein classification predicting sequence
TLSFLTLPVIP

SEQ ID NO: 39148 - protein, 10 aa, Artificial sequence
  Protein classification predicting sequence
LPVIPALKLT

SEQ ID NO: 39149 - protein, 22 aa, Artificial sequence
  Protein classification predicting sequence
RQPVSASDFALQFTPGKRYRVI

SEQ ID NO: 39150 - protein, 6 aa, Artificial sequence
  Protein classification predicting sequence
VPGFID

SEQ ID NO: 39151 - protein, 8 aa, Artificial sequence
  Protein classification predicting sequence
EFDRCVLP

SEQ ID NO: 39152 - protein, 12 aa, Artificial sequence
  Protein classification predicting sequence
HPKVIGLAEFMN

SEQ ID NO: 39153 - protein, 7 aa, Artificial sequence
  Protein classification predicting sequence
CTDDRNP

SEQ ID NO: 39154 - protein, 7 aa, Artificial sequence
  Protein classification predicting sequence
MLPSSVP

SEQ ID NO: 39155 - protein, 7 aa, Artificial sequence
  Protein classification predicting sequence
GISTDHE

SEQ ID NO: 39156 - protein, 7 aa, Artificial sequence
  Protein classification predicting sequence
DPHEIAN

SEQ ID NO: 39157 - protein, 8 aa, Artificial sequence
  Protein classification predicting sequence
LPVIPELK

SEQ ID NO: 39158 - protein, 8 aa, Artificial sequence
  Protein classification predicting sequence
DAHVHVES

SEQ ID NO: 39159 - protein, 7 aa, Artificial sequence
  Protein classification predicting sequence
PGFIDAH

SEQ ID NO: 39160 - protein, 6 aa, Artificial sequence
  Protein classification predicting sequence
EMMNFP

SEQ ID NO: 39161 - protein, 7 aa, Artificial sequence
  Protein classification predicting sequence
GLAEVMD

SEQ ID NO: 39162 - protein, 12 aa, Artificial sequence
  Protein classification predicting sequence
GLAEVMDFPSVA

SEQ ID NO: 39163 - protein, 8 aa, Artificial sequence
  Protein classification predicting sequence
PFLTLSFL

SEQ ID NO: 39164 - protein, 6 aa, Artificial sequence
  Protein classification predicting sequence
MNFPGV

SEQ ID NO: 39165 - protein, 13 aa, Artificial sequence
  Protein classification predicting sequence
GQNALLDKLDAFR

SEQ ID NO: 39166 - protein, 8 aa, Artificial sequence
  Protein classification predicting sequence
DPHEIANV

SEQ ID NO: 39167 - protein, 6 aa, Artificial sequence
  Protein classification predicting sequence
PFGFSD

SEQ ID NO: 39168 - protein, 15 aa, Artificial sequence
  Protein classification predicting sequence
SAACGLFCCMFLHAF

SEQ ID NO: 39169 - protein, 8 aa, Artificial sequence
  Protein classification predicting sequence
PTLRRNQE

SEQ ID NO: 39170 - protein, 7 aa, Artificial sequence
  Protein classification predicting sequence
DKRFPGF

SEQ ID NO: 39171 - protein, 8 aa, Artificial sequence
  Protein classification predicting sequence
STQTVQGP

SEQ ID NO: 39172 - protein, 12 aa, Artificial sequence
  Protein classification predicting sequence
NPTMDLLTGVPN

SEQ ID NO: 39173 - protein, 7 aa, Artificial sequence
  Protein classification predicting sequence
MLQSPQV

SEQ ID NO: 39174 - protein, 19 aa, Artificial sequence
  Protein classification predicting sequence
SAACGLFCCMFLHAFVNWP

SEQ ID NO: 39175 - protein, 24 aa, Artificial sequence
  Protein classification predicting sequence
QGPNSAACGLFCCMFLHAFVNWPD

SEQ ID NO: 39176 - protein, 7 aa, Artificial sequence
  Protein classification predicting sequence
FLGTFDK

SEQ ID NO: 39177 - protein, 6 aa, Artificial sequence
  Protein classification predicting sequence
FPGFIS

SEQ ID NO: 39178 - protein, 6 aa, Artificial sequence
  Protein classification predicting sequence
ACGLFC

SEQ ID NO: 39179 - protein, 8 aa, Artificial sequence
  Protein classification predicting sequence
RETGGVHW

SEQ ID NO: 39180 - protein, 8 aa, Artificial sequence
  Protein classification predicting sequence
FDPFGFSD

SEQ ID NO: 39181 - protein, 7 aa, Artificial sequence
  Protein classification predicting sequence
QIYQFEY

SEQ ID NO: 39182 - protein, 8 aa, Artificial sequence
  Protein classification predicting sequence
CCMFLHAF

SEQ ID NO: 39183 - protein, 19 aa, Artificial sequence
  Protein classification predicting sequence
PFFLGTFDKRFPGFISSQR

SEQ ID NO: 39184 - protein, 15 aa, Artificial sequence
  Protein classification predicting sequence
VNTAGRETGGVHWLA

SEQ ID NO: 39185 - protein, 57 aa, Artificial sequence
  Protein classification predicting sequence
VNTAGRETGGVHWLAMAWNPRSKTFYMFDPFGFSDSKLKQVYSFEYEGLLRRSAIAS

SEQ ID NO: 39186 - protein, 16 aa, Artificial sequence
  Protein classification predicting sequence
HNPTMGPLKSVPNYKL

SEQ ID NO: 39187 - protein, 11 aa, Artificial sequence
  Protein classification predicting sequence
NQEKLYKFLEK

SEQ ID NO: 39188 - protein, 12 aa, Artificial sequence
  Protein classification predicting sequence
SAYFRAHAAAIK

SEQ ID NO: 39189 - protein, 6 aa, Artificial sequence
  Protein classification predicting sequence
PMDGNP

SEQ ID NO: 39190 - protein, 10 aa, Artificial sequence
  Protein classification predicting sequence
RETGGVHWLA

SEQ ID NO: 39191 - protein, 7 aa, Artificial sequence
  Protein classification predicting sequence
CAIVNTA

SEQ ID NO: 39192 - protein, 7 aa, Artificial sequence
  Protein classification predicting sequence
SAYFRAH

SEQ ID NO: 39193 - protein, 7 aa, Artificial sequence
  Protein classification predicting sequence
REQAYQW

SEQ ID NO: 39194 - protein, 9 aa, Artificial sequence
  Protein classification predicting sequence
VDYLKYDNC

SEQ ID NO: 39195 - protein, 12 aa, Artificial sequence
  Protein classification predicting sequence
AGPGGWNDPDML

SEQ ID NO: 39196 - protein, 6 aa, Artificial sequence
  Protein classification predicting sequence
TPQMGW

SEQ ID NO: 39197 - protein, 8 aa, Artificial sequence
  Protein classification predicting sequence
DVTNAYVV

SEQ ID NO: 39198 - protein, 10 aa, Artificial sequence
  Protein classification predicting sequence
TIRSNGKCLT

SEQ ID NO: 39199 - protein, 9 aa, Artificial sequence
  Protein classification predicting sequence
SDPSLKQII

SEQ ID NO: 39200 - protein, 9 aa, Artificial sequence
  Protein classification predicting sequence
IGFYKRYCD

SEQ ID NO: 39201 - protein, 7 aa, Artificial sequence
  Protein classification predicting sequence
AFPDFTN

SEQ ID NO: 39202 - protein, 7 aa, Artificial sequence
  Protein classification predicting sequence
WTDIDYM

SEQ ID NO: 39203 - protein, 7 aa, Artificial sequence
  Protein classification predicting sequence
TYKVIGG

SEQ ID NO: 39204 - protein, 6 aa, Artificial sequence
  Protein classification predicting sequence
GFHQCR

SEQ ID NO: 39205 - protein, 7 aa, Artificial sequence
  Protein classification predicting sequence
LPYFYTL

SEQ ID NO: 39206 - protein, 6 aa, Artificial sequence
  Protein classification predicting sequence
GAFYPF

SEQ ID NO: 39207 - protein, 13 aa, Artificial sequence
  Protein classification predicting sequence
LEGGSIHVDGEGT

SEQ ID NO: 39208 - protein, 12 aa, Artificial sequence
  Protein classification predicting sequence
DAPKVEQEAPAK

SEQ ID NO: 39209 - protein, 5 aa, Artificial sequence
  Protein classification predicting sequence
QWYMH

SEQ ID NO: 39210 - protein, 11 aa, Artificial sequence
  Protein classification predicting sequence
GGLPSQAFEYI

SEQ ID NO: 39211 - protein, 6 aa, Artificial sequence
  Protein classification predicting sequence
GKNMCG

SEQ ID NO: 39212 - protein, 8 aa, Artificial sequence
  Protein classification predicting sequence
GSQAFIPL

SEQ ID NO: 39213 - protein, 5 aa, Artificial sequence
  Protein classification predicting sequence
VWHHP

SEQ ID NO: 39214 - protein, 7 aa, Artificial sequence
  Protein classification predicting sequence
QGVNYHR

SEQ ID NO: 39215 - protein, 16 aa, Artificial sequence
  Protein classification predicting sequence
LEQDRTLISINRAQPA

SEQ ID NO: 39216 - protein, 13 aa, Artificial sequence
  Protein classification predicting sequence
HELERHPLGTQAF

SEQ ID NO: 39217 - protein, 8 aa, Artificial sequence
  Protein classification predicting sequence
VALGDDKP

SEQ ID NO: 39218 - protein, 18 aa, Artificial sequence
  Protein classification predicting sequence
QGVNYHRNVWHHPLFAWQ

SEQ ID NO: 39219 - protein, 14 aa, Artificial sequence
  Protein classification predicting sequence
DRGGSDNCDVESIP

SEQ ID NO: 39220 - protein, 16 aa, Artificial sequence
  Protein classification predicting sequence
FFHINNGLVERYHDLA

SEQ ID NO: 39221 - protein, 7 aa, Artificial sequence
  Protein classification predicting sequence
DGWETRR

SEQ ID NO: 39222 - protein, 9 aa, Artificial sequence
  Protein classification predicting sequence
AAPDIDHLN

SEQ ID NO: 39223 - protein, 7 aa, Artificial sequence
  Protein classification predicting sequence
LFQGFNW

SEQ ID NO: 39224 - protein, 11 aa, Artificial sequence
  Protein classification predicting sequence
QGYMPGRLYDL

SEQ ID NO: 39225 - protein, 10 aa, Artificial sequence
  Protein classification predicting sequence
GYAYILTHPG

SEQ ID NO: 39226 - protein, 7 aa, Artificial sequence
  Protein classification predicting sequence
SLIAAFH

SEQ ID NO: 39227 - protein, 7 aa, Artificial sequence
  Protein classification predicting sequence
RQELVNW

SEQ ID NO: 39228 - protein, 9 aa, Artificial sequence
  Protein classification predicting sequence
GKAPGMIGW

SEQ ID NO: 39229 - protein, 7 aa, Artificial sequence
  Protein classification predicting sequence
VINHRCA

SEQ ID NO: 39230 - protein, 7 aa, Artificial sequence
  Protein classification predicting sequence
FEGGTPD

SEQ ID NO: 39231 - protein, 10 aa, Artificial sequence
  Protein classification predicting sequence
MICSDDTQYS

SEQ ID NO: 39232 - protein, 7 aa, Artificial sequence
  Protein classification predicting sequence
FDFTTKG

SEQ ID NO: 39233 - protein, 20 aa, Artificial sequence
  Protein classification predicting sequence
WPFPSDKVMQGYAYILTHPG

SEQ ID NO: 39234 - protein, 7 aa, Artificial sequence
  Protein classification predicting sequence
PCIFYDH

SEQ ID NO: 39235 - protein, 9 aa, Artificial sequence
  Protein classification predicting sequence
FDWNLKQEI

SEQ ID NO: 39236 - protein, 12 aa, Artificial sequence
  Protein classification predicting sequence
QVLFQGFNWESW

SEQ ID NO: 39237 - protein, 19 aa, Artificial sequence
  Protein classification predicting sequence
PQGYMPGRLYDLDASKYGT

SEQ ID NO: 39238 - protein, 13 aa, Artificial sequence
  Protein classification predicting sequence
VCLALLAVANAQF

SEQ ID NO: 39239 - protein, 22 aa, Artificial sequence
  Protein classification predicting sequence
TNYASGRSGMVHLFEWKWDDIA

SEQ ID NO: 39240 - protein, 14 aa, Artificial sequence
  Protein classification predicting sequence
RPWWERYQPISYKL

SEQ ID NO: 39241 - protein, 6 aa, Artificial sequence
  Protein classification predicting sequence
MVRRCN

SEQ ID NO: 39242 - protein, 42 aa, Artificial sequence
  Protein classification predicting sequence
YLTNWGTAWGFAASDRSLVFVDNHDNQRGHGAGGADVLTYKV

SEQ ID NO: 39243 - protein, 6 aa, Artificial sequence
  Protein classification predicting sequence
KQYKMA

SEQ ID NO: 39244 - protein, 26 aa, Artificial sequence
  Protein classification predicting sequence
KQYKMASAFMLAHPFGTPRVMSSFSF

SEQ ID NO: 39245 - protein, 8 aa, Artificial sequence
  Protein classification predicting sequence
KDSRGIYC

SEQ ID NO: 39246 - protein, 10 aa, Artificial sequence
  Protein classification predicting sequence
NQKHLLRFIK

SEQ ID NO: 39247 - protein, 10 aa, Artificial sequence
  Protein classification predicting sequence
GFDSVDDESK

SEQ ID NO: 39248 - protein, 8 aa, Artificial sequence
  Protein classification predicting sequence
RPHCGEAG

SEQ ID NO: 39249 - protein, 11 aa, Artificial sequence
  Protein classification predicting sequence
QNPPYSYYLYY

SEQ ID NO: 39250 - protein, 9 aa, Artificial sequence
  Protein classification predicting sequence
IAMSPLSNN

SEQ ID NO: 39251 - protein, 8 aa, Artificial sequence
  Protein classification predicting sequence
PIEGWYPG

SEQ ID NO: 39252 - protein, 7 aa, Artificial sequence
  Protein classification predicting sequence
KAMAWAN

SEQ ID NO: 39253 - protein, 15 aa, Artificial sequence
  Protein classification predicting sequence
RPGDVLTTMSGQTVE

SEQ ID NO: 39254 - protein, 7 aa, Artificial sequence
  Protein classification predicting sequence
GATGRPV

SEQ ID NO: 39255 - protein, 12 aa, Artificial sequence
  Protein classification predicting sequence
PIVLVGKGLTFD

SEQ ID NO: 39256 - protein, 11 aa, Artificial sequence
  Protein classification predicting sequence
NVIGVLAGCEN

SEQ ID NO: 39257 - protein, 10 aa, Artificial sequence
  Protein classification predicting sequence
LTYVERFEPE

SEQ ID NO: 39258 - protein, 6 aa, Artificial sequence
  Protein classification predicting sequence
DMCGAA

SEQ ID NO: 39259 - protein, 11 aa, Artificial sequence
  Protein classification predicting sequence
DMCGAASVFGT

SEQ ID NO: 39260 - protein, 9 aa, Artificial sequence
  Protein classification predicting sequence
TTMSGQTVE

SEQ ID NO: 39261 - protein, 10 aa, Artificial sequence
  Protein classification predicting sequence
ITAGCFLSRF

SEQ ID NO: 39262 - protein, 9 aa, Artificial sequence
  Protein classification predicting sequence
GKPGQTLLL

SEQ ID NO: 39263 - protein, 9 aa, Artificial sequence
  Protein classification predicting sequence
VGQGSQNES

SEQ ID NO: 39264 - protein, 6 aa, Artificial sequence
  Protein classification predicting sequence
TMSGQT

SEQ ID NO: 39265 - protein, 13 aa, Artificial sequence
  Protein classification predicting sequence
AEQLDKISDGYIS

SEQ ID NO: 39266 - protein, 9 aa, Artificial sequence
  Protein classification predicting sequence
IQKTINTLN

SEQ ID NO: 39267 - protein, 18 aa, Artificial sequence
  Protein classification predicting sequence
TGSMEAVCFLTELHVKGR

SEQ ID NO: 39268 - protein, 9 aa, Artificial sequence
  Protein classification predicting sequence
YWKVRQAVE

SEQ ID NO: 39269 - protein, 10 aa, Artificial sequence
  Protein classification predicting sequence
VFNVPTRREL

SEQ ID NO: 39270 - protein, 8 aa, Artificial sequence
  Protein classification predicting sequence
AYLASQAR

SEQ ID NO: 39271 - protein, 9 aa, Artificial sequence
  Protein classification predicting sequence
MSVIEYKGN

SEQ ID NO: 39272 - protein, 35 aa, Artificial sequence
  Protein classification predicting sequence
LTTMSGQTVEVLNTDAEGRLVLCDVLTYVERFEPE

SEQ ID NO: 39273 - protein, 17 aa, Artificial sequence
  Protein classification predicting sequence
DVATLTGACVIALGHHI

SEQ ID NO: 39274 - protein, 9 aa, Artificial sequence
  Protein classification predicting sequence
NHNPLAHEL

SEQ ID NO: 39275 - protein, 8 aa, Artificial sequence
  Protein classification predicting sequence
DRAWRLPL

SEQ ID NO: 39276 - protein, 17 aa, Artificial sequence
  Protein classification predicting sequence
FADMANIGGRPGGAITA

SEQ ID NO: 39277 - protein, 8 aa, Artificial sequence
  Protein classification predicting sequence
ASWVHKTG

SEQ ID NO: 39278 - protein, 10 aa, Artificial sequence
  Protein classification predicting sequence
FELGSVSKTF

SEQ ID NO: 39279 - protein, 18 aa, Artificial sequence
  Protein classification predicting sequence
PYDLTVDSLDVHAGRQTF

SEQ ID NO: 39280 - protein, 6 aa, Artificial sequence
  Protein classification predicting sequence
RFDKFN

SEQ ID NO: 39281 - protein, 17 aa, Artificial sequence
  Protein classification predicting sequence
KYNPVGASELRDLYLKT

SEQ ID NO: 39282 - protein, 11 aa, Artificial sequence
  Protein classification predicting sequence
EPRLSIYGRSP

SEQ ID NO: 39283 - protein, 8 aa, Artificial sequence
  Protein classification predicting sequence
IQVPRIYD

SEQ ID NO: 39284 - protein, 9 aa, Artificial sequence
  Protein classification predicting sequence
FGKMLENIF

SEQ ID NO: 39285 - protein, 13 aa, Artificial sequence
  Protein classification predicting sequence
TGFDSVDDESKHS

SEQ ID NO: 39286 - protein, 11 aa, Artificial sequence
  Protein classification predicting sequence
YYMYANIMVLN

SEQ ID NO: 39287 - protein, 10 aa, Artificial sequence
  Protein classification predicting sequence
LKKSPVLQYL

SEQ ID NO: 39288 - protein, 20 aa, Artificial sequence
  Protein classification predicting sequence
LAQIPIAMSPLSNNSLFLEY

SEQ ID NO: 39289 - protein, 11 aa, Artificial sequence
  Protein classification predicting sequence
SLSTDDPMQFH

SEQ ID NO: 39290 - protein, 11 aa, Artificial sequence
  Protein classification predicting sequence
LMEEYAIAAQV

SEQ ID NO: 39291 - protein, 6 aa, Artificial sequence
  Protein classification predicting sequence
KLSTCD

SEQ ID NO: 39292 - protein, 7 aa, Artificial sequence
  Protein classification predicting sequence
PHRDFYN

SEQ ID NO: 39293 - protein, 12 aa, Artificial sequence
  Protein classification predicting sequence
CMNQKHLLRFIK

SEQ ID NO: 39294 - protein, 8 aa, Artificial sequence
  Protein classification predicting sequence
RLSIYGRS

SEQ ID NO: 39295 - protein, 12 aa, Artificial sequence
  Protein classification predicting sequence
PVLQYLYYLAQI

SEQ ID NO: 39296 - protein, 10 aa, Artificial sequence
  Protein classification predicting sequence
KEGPEGNDIR

SEQ ID NO: 39297 - protein, 14 aa, Artificial sequence
  Protein classification predicting sequence
EITSVFDGISYSKG

SEQ ID NO: 39298 - protein, 6 aa, Artificial sequence
  Protein classification predicting sequence
FQKGCQ

SEQ ID NO: 39299 - protein, 11 aa, Artificial sequence
  Protein classification predicting sequence
GWLNGSLVGFY

SEQ ID NO: 39300 - protein, 25 aa, Artificial sequence
  Protein classification predicting sequence
SIAATDHEPTDARKSFPCFDEPNKK

SEQ ID NO: 39301 - protein, 15 aa, Artificial sequence
  Protein classification predicting sequence
KSVPMSTYLVCFAVH

SEQ ID NO: 39302 - protein, 9 aa, Artificial sequence
  Protein classification predicting sequence
TAEYAANIT

SEQ ID NO: 39303 - protein, 17 aa, Artificial sequence
  Protein classification predicting sequence
FLKINPDHIGFYRVNYE

SEQ ID NO: 39304 - protein, 7 aa, Artificial sequence
  Protein classification predicting sequence
FTIEPMI

SEQ ID NO: 39305 - protein, 6 aa, Artificial sequence
  Protein classification predicting sequence
AQFEHT

SEQ ID NO: 39306 - protein, 7 aa, Artificial sequence
  Protein classification predicting sequence
NEVICHG

SEQ ID NO: 39307 - protein, 8 aa, Artificial sequence
  Protein classification predicting sequence
FTIEPMIN

SEQ ID NO: 39308 - protein, 15 aa, Artificial sequence
  Protein classification predicting sequence
GEAIQEVMESYEVEI

SEQ ID NO: 39309 - protein, 6 aa, Artificial sequence
  Protein classification predicting sequence
TYQVKP

SEQ ID NO: 39310 - protein, 13 aa, Artificial sequence
  Protein classification predicting sequence
GSYTAQFEHTILL

SEQ ID NO: 39311 - protein, 7 aa, Artificial sequence
  Protein classification predicting sequence
AIEPFAT

SEQ ID NO: 39312 - protein, 8 aa, Artificial sequence
  Protein classification predicting sequence
GMVLAIEP

SEQ ID NO: 39313 - protein, 7 aa, Artificial sequence
  Protein classification predicting sequence
FSVVREY

SEQ ID NO: 39314 - protein, 8 aa, Artificial sequence
  Protein classification predicting sequence
SACLGYHG

SEQ ID NO: 39315 - protein, 6 aa, Artificial sequence
  Protein classification predicting sequence
DTSKMF

SEQ ID NO: 39316 - protein, 9 aa, Artificial sequence
  Protein classification predicting sequence
SLSAQYEHT

SEQ ID NO: 39317 - protein, 9 aa, Artificial sequence
  Protein classification predicting sequence
DGWTVKTKD

SEQ ID NO: 39318 - protein, 10 aa, Artificial sequence
  Protein classification predicting sequence
PGMTFTIEPM

SEQ ID NO: 39319 - protein, 13 aa, Artificial sequence
  Protein classification predicting sequence
CISINEVVCHGIP

SEQ ID NO: 39320 - protein, 7 aa, Artificial sequence
  Protein classification predicting sequence
EPQVLHY

SEQ ID NO: 39321 - protein, 6 aa, Artificial sequence
  Protein classification predicting sequence
EHTVIV

SEQ ID NO: 39322 - protein, 9 aa, Artificial sequence
  Protein classification predicting sequence
IEKMRVAGR

SEQ ID NO: 39323 - protein, 7 aa, Artificial sequence
  Protein classification predicting sequence
VVCHGIP

SEQ ID NO: 39324 - protein, 5 aa, Artificial sequence
  Protein classification predicting sequence
CHGIP

SEQ ID NO: 39325 - protein, 7 aa, Artificial sequence
  Protein classification predicting sequence
ALSNMLP

SEQ ID NO: 39326 - protein, 13 aa, Artificial sequence
  Protein classification predicting sequence
MSTYLLAYIVSEF

SEQ ID NO: 39327 - protein, 21 aa, Artificial sequence
  Protein classification predicting sequence
ERVVTVIAHELAHQWFGNLVT

SEQ ID NO: 39328 - protein, 8 aa, Artificial sequence
  Protein classification predicting sequence
NTPAQISE

SEQ ID NO: 39329 - protein, 8 aa, Artificial sequence
  Protein classification predicting sequence
FLTEDLFK

SEQ ID NO: 39330 - protein, 9 aa, Artificial sequence
  Protein classification predicting sequence
LVNEADKLR

SEQ ID NO: 39331 - protein, 7 aa, Artificial sequence
  Protein classification predicting sequence
MSSYLLA

SEQ ID NO: 39332 - protein, 19 aa, Artificial sequence
  Protein classification predicting sequence
LPDFNAGAMENWGLVTYRE

SEQ ID NO: 39333 - protein, 10 aa, Artificial sequence
  Protein classification predicting sequence
YLKKQVTPLF

SEQ ID NO: 39334 - protein, 14 aa, Artificial sequence
  Protein classification predicting sequence
WILNRYLSYTLNPD

SEQ ID NO: 39335 - protein, 9 aa, Artificial sequence
  Protein classification predicting sequence
AIVYAKGSR

SEQ ID NO: 39336 - protein, 8 aa, Artificial sequence
  Protein classification predicting sequence
LRPYLTPN

SEQ ID NO: 39337 - protein, 8 aa, Artificial sequence
  Protein classification predicting sequence
IWARPSAI

SEQ ID NO: 39338 - protein, 6 aa, Artificial sequence
  Protein classification predicting sequence
ATTQMQ

SEQ ID NO: 39339 - protein, 17 aa, Artificial sequence
  Protein classification predicting sequence
DVYRVMAVDALASSHPL

SEQ ID NO: 39340 - protein, 13 aa, Artificial sequence
  Protein classification predicting sequence
LMFDRSEVYGPMK

SEQ ID NO: 39341 - protein, 12 aa, Artificial sequence
  Protein classification predicting sequence
LGILGILLGVAA

SEQ ID NO: 39342 - protein, 12 aa, Artificial sequence
  Protein classification predicting sequence
VIIIHSKKLNYT

SEQ ID NO: 39343 - protein, 13 aa, Artificial sequence
  Protein classification predicting sequence
IMDRWILQMGFPV

SEQ ID NO: 39344 - protein, 9 aa, Artificial sequence
  Protein classification predicting sequence
NNPIHPNLR

SEQ ID NO: 39345 - protein, 8 aa, Artificial sequence
  Protein classification predicting sequence
ELQQLEQF

SEQ ID NO: 39346 - protein, 16 aa, Artificial sequence
  Protein classification predicting sequence
WWNDLWLNEGFASYVE

SEQ ID NO: 39347 - protein, 8 aa, Artificial sequence
  Protein classification predicting sequence
FNAGAMEN

SEQ ID NO: 39348 - protein, 8 aa, Artificial sequence
  Protein classification predicting sequence
WFGDLVTM

SEQ ID NO: 39349 - protein, 9 aa, Artificial sequence
  Protein classification predicting sequence
WWNDLWLNE

SEQ ID NO: 39350 - protein, 6 aa, Artificial sequence
  Protein classification predicting sequence
GVQVSP

SEQ ID NO: 39351 - protein, 10 aa, Artificial sequence
  Protein classification predicting sequence
RPFIFQEVID

SEQ ID NO: 39352 - protein, 17 aa, Artificial sequence
  Protein classification predicting sequence
LVFVDNHDNQRGHGAGG

SEQ ID NO: 39353 - protein, 5 aa, Artificial sequence
  Protein classification predicting sequence
CEHRW

SEQ ID NO: 39354 - protein, 7 aa, Artificial sequence
  Protein classification predicting sequence
GFIVFNN

SEQ ID NO: 39355 - protein, 7 aa, Artificial sequence
  Protein classification predicting sequence
GSSVDYS

SEQ ID NO: 39356 - protein, 10 aa, Artificial sequence
  Protein classification predicting sequence
NYSIDGLRID

SEQ ID NO: 39357 - protein, 7 aa, Artificial sequence
  Protein classification predicting sequence
DGIPIIY

SEQ ID NO: 39358 - protein, 11 aa, Artificial sequence
  Protein classification predicting sequence
AGVQVSPVNEN

SEQ ID NO: 39359 - protein, 18 aa, Artificial sequence
  Protein classification predicting sequence
YVDVVFNHMAADGGTYGT

SEQ ID NO: 39360 - protein, 11 aa, Artificial sequence
  Protein classification predicting sequence
DTDQGPPTTDG

SEQ ID NO: 39361 - protein, 15 aa, Artificial sequence
  Protein classification predicting sequence
GFVAFNNDNYDLNSS

SEQ ID NO: 39362 - protein, 15 aa, Artificial sequence
  Protein classification predicting sequence
QTGLPAGTYCDVISG

SEQ ID NO: 39363 - protein, 12 aa, Artificial sequence
  Protein classification predicting sequence
LPAGTYCDVISG

SEQ ID NO: 39364 - protein, 9 aa, Artificial sequence
  Protein classification predicting sequence
GYMPGRLYD

SEQ ID NO: 39365 - protein, 8 aa, Artificial sequence
  Protein classification predicting sequence
ADIVINHR

SEQ ID NO: 39366 - protein, 7 aa, Artificial sequence
  Protein classification predicting sequence
GWWPAKA

SEQ ID NO: 39367 - protein, 8 aa, Artificial sequence
  Protein classification predicting sequence
RGMYLMVD

SEQ ID NO: 39368 - protein, 7 aa, Artificial sequence
  Protein classification predicting sequence
SSQDYFH

SEQ ID NO: 39369 - protein, 16 aa, Artificial sequence
  Protein classification predicting sequence
NYSIDGLRIDTVKHVQ

SEQ ID NO: 39370 - protein, 13 aa, Artificial sequence
  Protein classification predicting sequence
RLDWGPHMICRDD

SEQ ID NO: 39371 - protein, 6 aa, Artificial sequence
  Protein classification predicting sequence
WRLDFA

SEQ ID NO: 39372 - protein, 9 aa, Artificial sequence
  Protein classification predicting sequence
FDFTTKGIL

SEQ ID NO: 39373 - protein, 7 aa, Artificial sequence
  Protein classification predicting sequence
WRSQSIY

SEQ ID NO: 39374 - protein, 8 aa, Artificial sequence
  Protein classification predicting sequence
MGFTAIWI

SEQ ID NO: 39375 - protein, 7 aa, Artificial sequence
  Protein classification predicting sequence
GTADDLK

SEQ ID NO: 39376 - protein, 10 aa, Artificial sequence
  Protein classification predicting sequence
GDNTVSLPDL

SEQ ID NO: 39377 - protein, 22 aa, Artificial sequence
  Protein classification predicting sequence
NENAVKDSRPWWERYQPISYKL

SEQ ID NO: 39378 - protein, 23 aa, Artificial sequence
  Protein classification predicting sequence
HLIDLGVAGFRVDAAKHMWPADL

SEQ ID NO: 39379 - protein, 17 aa, Artificial sequence
  Protein classification predicting sequence
FNSDNSCSGGWVCEHRW

SEQ ID NO: 39380 - protein, 7 aa, Artificial sequence
  Protein classification predicting sequence
WVCEHRW

SEQ ID NO: 39381 - protein, 6 aa, Artificial sequence
  Protein classification predicting sequence
WPFPSD

SEQ ID NO: 39382 - protein, 13 aa, Artificial sequence
  Protein classification predicting sequence
VMQGYAYILTHPG

SEQ ID NO: 39383 - protein, 8 aa, Artificial sequence
  Protein classification predicting sequence
YCIFEGGT

SEQ ID NO: 39384 - protein, 11 aa, Artificial sequence
  Protein classification predicting sequence
YSNGRGHRDTG

SEQ ID NO: 39385 - protein, 11 aa, Artificial sequence
  Protein classification predicting sequence
PCIFYDHVFDW

SEQ ID NO: 39386 - protein, 7 aa, Artificial sequence
  Protein classification predicting sequence
THVWLPP

SEQ ID NO: 39387 - protein, 7 aa, Artificial sequence
  Protein classification predicting sequence
VHLFEWK

SEQ ID NO: 39388 - protein, 12 aa, Artificial sequence
  Protein classification predicting sequence
PKGFGGVQVSPP

SEQ ID NO: 39389 - protein, 7 aa, Artificial sequence
  Protein classification predicting sequence
YQPVSYK

SEQ ID NO: 39390 - protein, 8 aa, Artificial sequence
  Protein classification predicting sequence
FMLAWPYG

SEQ ID NO: 39391 - protein, 8 aa, Artificial sequence
  Protein classification predicting sequence
NQIAFSRG

SEQ ID NO: 39392 - protein, 11 aa, Artificial sequence
  Protein classification predicting sequence
QSIYFLLTDRF

SEQ ID NO: 39393 - protein, 8 aa, Artificial sequence
  Protein classification predicting sequence
STTATCNT

SEQ ID NO: 39394 - protein, 9 aa, Artificial sequence
  Protein classification predicting sequence
VSLPDLDTT

SEQ ID NO: 39395 - protein, 10 aa, Artificial sequence
  Protein classification predicting sequence
NREATWLSGY

SEQ ID NO: 39396 - protein, 6 aa, Artificial sequence
  Protein classification predicting sequence
TRSGNE

SEQ ID NO: 39397 - protein, 41 aa, Artificial sequence
  Protein classification predicting sequence
FNHMAADGGTYGTGGSTASPSSKSYPGVPYSSLDFNPTCAI

SEQ ID NO: 39398 - protein, 17 aa, Artificial sequence
  Protein classification predicting sequence
DTDQGPPTTDGHNIASP

SEQ ID NO: 39399 - protein, 12 aa, Artificial sequence
  Protein classification predicting sequence
IQNWWDNGSNQI

SEQ ID NO: 39400 - protein, 7 aa, Artificial sequence
  Protein classification predicting sequence
VGSDGRA

SEQ ID NO: 39401 - protein, 8 aa, Artificial sequence
  Protein classification predicting sequence
SGSKAYIV

SEQ ID NO: 39402 - protein, 20 aa, Artificial sequence
  Protein classification predicting sequence
EVIDMGGEAISKSEYTGLGA

SEQ ID NO: 39403 - protein, 8 aa, Artificial sequence
  Protein classification predicting sequence
LGAVTEFR

SEQ ID NO: 39404 - protein, 8 aa, Artificial sequence
  Protein classification predicting sequence
KGPKQYDW

SEQ ID NO: 39405 - protein, 15 aa, Artificial sequence
  Protein classification predicting sequence
QAIMSFHQCGGNVGD

SEQ ID NO: 39406 - protein, 11 aa, Artificial sequence
  Protein classification predicting sequence
DIEVGLGPAGE

SEQ ID NO: 39407 - protein, 7 aa, Artificial sequence
  Protein classification predicting sequence
RYPSYPQ

SEQ ID NO: 39408 - protein, 7 aa, Artificial sequence
  Protein classification predicting sequence
KVSGIHW

SEQ ID NO: 39409 - protein, 12 aa, Artificial sequence
  Protein classification predicting sequence
HAAELTAGYYNL

SEQ ID NO: 39410 - protein, 6 aa, Artificial sequence
  Protein classification predicting sequence
SFRENM

SEQ ID NO: 39411 - protein, 7 aa, Artificial sequence
  Protein classification predicting sequence
FPGIGEF

SEQ ID NO: 39412 - protein, 7 aa, Artificial sequence
  Protein classification predicting sequence
ILDEANK

SEQ ID NO: 39413 - protein, 6 aa, Artificial sequence
  Protein classification predicting sequence
IPIPQW

SEQ ID NO: 39414 - protein, 7 aa, Artificial sequence
  Protein classification predicting sequence
VAGENAL

SEQ ID NO: 39415 - protein, 9 aa, Artificial sequence
  Protein classification predicting sequence
HQCGGNVGD

SEQ ID NO: 39416 - protein, 10 aa, Artificial sequence
  Protein classification predicting sequence
DYMKSFRENM

SEQ ID NO: 39417 - protein, 8 aa, Artificial sequence
  Protein classification predicting sequence
RYDATAYN

SEQ ID NO: 39418 - protein, 7 aa, Artificial sequence
  Protein classification predicting sequence
LVQQVLS

SEQ ID NO: 39419 - protein, 9 aa, Artificial sequence
  Protein classification predicting sequence
EWELPDDAG

SEQ ID NO: 39420 - protein, 14 aa, Artificial sequence
  Protein classification predicting sequence
RYDATAYNQIILNA

SEQ ID NO: 39421 - protein, 7 aa, Artificial sequence
  Protein classification predicting sequence
CGGNVGD

SEQ ID NO: 39422 - protein, 13 aa, Artificial sequence
  Protein classification predicting sequence
NGTYLTEKGKFFL

SEQ ID NO: 39423 - protein, 7 aa, Artificial sequence
  Protein classification predicting sequence
SGIHWWY

SEQ ID NO: 39424 - protein, 5 aa, Artificial sequence
  Protein classification predicting sequence
KHMWP

SEQ ID NO: 39425 - protein, 6 aa, Artificial sequence
  Protein classification predicting sequence
DNGSNQ

SEQ ID NO: 39426 - protein, 6 aa, Artificial sequence
  Protein classification predicting sequence
GRYPED

SEQ ID NO: 39427 - protein, 8 aa, Artificial sequence
  Protein classification predicting sequence
KTLVDLFR

SEQ ID NO: 39428 - protein, 8 aa, Artificial sequence
  Protein classification predicting sequence
TGAWGRPQ

SEQ ID NO: 39429 - protein, 12 aa, Artificial sequence
  Protein classification predicting sequence
VRNDLSYVAQYW

SEQ ID NO: 39430 - protein, 9 aa, Artificial sequence
  Protein classification predicting sequence
LGSIHTFDP

SEQ ID NO: 39431 - protein, 7 aa, Artificial sequence
  Protein classification predicting sequence
DSFRSIY

SEQ ID NO: 39432 - protein, 17 aa, Artificial sequence
  Protein classification predicting sequence
TLAAAEQLYDALYQWDK

SEQ ID NO: 39433 - protein, 20 aa, Artificial sequence
  Protein classification predicting sequence
SARDLTWSYAALLTANNRRN

SEQ ID NO: 39434 - protein, 8 aa, Artificial sequence
  Protein classification predicting sequence
VGSISQLG

SEQ ID NO: 39435 - protein, 7 aa, Artificial sequence
  Protein classification predicting sequence
WESDPNR

SEQ ID NO: 39436 - protein, 62 aa, Artificial sequence
  Protein classification predicting sequence
VISKRATLDSWLSNEATVARTAILNNIGADGAWVSGADSGIVVASPSTDNPDYFYTWTRDSG

SEQ ID NO: 39437 - protein, 7 aa, Artificial sequence
  Protein classification predicting sequence
DLWEEVN

SEQ ID NO: 39438 - protein, 7 aa, Artificial sequence
  Protein classification predicting sequence
YYNGNPW

SEQ ID NO: 39439 - protein, 11 aa, Artificial sequence
  Protein classification predicting sequence
TLAAAEQLYDA

SEQ ID NO: 39440 - protein, 7 aa, Artificial sequence
  Protein classification predicting sequence
ARDLTWS

SEQ ID NO: 39441 - protein, 8 aa, Artificial sequence
  Protein classification predicting sequence
STGTNSAG

SEQ ID NO: 39442 - protein, 13 aa, Artificial sequence
  Protein classification predicting sequence
RPWWERYQPISYK

SEQ ID NO: 39443 - protein, 13 aa, Artificial sequence
  Protein classification predicting sequence
GLLDLALEKDYVR

SEQ ID NO: 39444 - protein, 9 aa, Artificial sequence
  Protein classification predicting sequence
SILTFWDAR

SEQ ID NO: 39445 - protein, 21 aa, Artificial sequence
  Protein classification predicting sequence
DGKAHFSISNSAEDPFIAIHA

SEQ ID NO: 39446 - protein, 7 aa, Artificial sequence
  Protein classification predicting sequence
GFCWAQY

SEQ ID NO: 39447 - protein, 9 aa, Artificial sequence
  Protein classification predicting sequence
RPWWERYQP

SEQ ID NO: 39448 - protein, 10 aa, Artificial sequence
  Protein classification predicting sequence
FRNVVDGQPF

SEQ ID NO: 39449 - protein, 9 aa, Artificial sequence
  Protein classification predicting sequence
GTYCDVISG

SEQ ID NO: 39450 - protein, 9 aa, Artificial sequence
  Protein classification predicting sequence
NWWDNGSNQ

SEQ ID NO: 39451 - protein, 23 aa, Artificial sequence
  Protein classification predicting sequence
RVTEFKYGAKLGTVIRKWNGEKM

SEQ ID NO: 39452 - protein, 9 aa, Artificial sequence
  Protein classification predicting sequence
AEDPFIAIH

SEQ ID NO: 39453 - protein, 8 aa, Artificial sequence
  Protein classification predicting sequence
EAEPSKKS

SEQ ID NO: 39454 - protein, 6 aa, Artificial sequence
  Protein classification predicting sequence
PGVPYS

SEQ ID NO: 39455 - protein, 16 aa, Artificial sequence
  Protein classification predicting sequence
SGQALTFVDNHDNQRD

SEQ ID NO: 39456 - protein, 13 aa, Artificial sequence
  Protein classification predicting sequence
QISFCRGNKGFLA

SEQ ID NO: 39457 - protein, 10 aa, Artificial sequence
  Protein classification predicting sequence
DFDGVLALHV

SEQ ID NO: 39458 - protein, 12 aa, Artificial sequence
  Protein classification predicting sequence
YCDVISGSLIDG

SEQ ID NO: 39459 - protein, 16 aa, Artificial sequence
  Protein classification predicting sequence
WWGNRNTIVHLFEWKW

SEQ ID NO: 39460 - protein, 7 aa, Artificial sequence
  Protein classification predicting sequence
DIAEECE

SEQ ID NO: 39461 - protein, 25 aa, Artificial sequence
  Protein classification predicting sequence
GRPWWERYQPISYKLTTRSGNEEEF

SEQ ID NO: 39462 - protein, 9 aa, Artificial sequence
  Protein classification predicting sequence
CEITDWNDR

SEQ ID NO: 39463 - protein, 9 aa, Artificial sequence
  Protein classification predicting sequence
CELVGLKDL

SEQ ID NO: 39464 - protein, 29 aa, Artificial sequence
  Protein classification predicting sequence
VRSKLIEFLDHLIELGVAGFRVDAAKHMA

SEQ ID NO: 39465 - protein, 6 aa, Artificial sequence
  Protein classification predicting sequence
LSNLNI

SEQ ID NO: 39466 - protein, 20 aa, Artificial sequence
  Protein classification predicting sequence
FIFQEVIDHGHETVSREEYN

SEQ ID NO: 39467 - protein, 6 aa, Artificial sequence
  Protein classification predicting sequence
IISPEF

SEQ ID NO: 39468 - protein, 9 aa, Artificial sequence
  Protein classification predicting sequence
WWDNGDNQI

SEQ ID NO: 39469 - protein, 10 aa, Artificial sequence
  Protein classification predicting sequence
FCRGNKGFLA

SEQ ID NO: 39470 - protein, 9 aa, Artificial sequence
  Protein classification predicting sequence
NNNLYDLSQ

SEQ ID NO: 39471 - protein, 6 aa, Artificial sequence
  Protein classification predicting sequence
CTGKSV

SEQ ID NO: 39472 - protein, 7 aa, Artificial sequence
  Protein classification predicting sequence
CEITDWN

SEQ ID NO: 39473 - protein, 7 aa, Artificial sequence
  Protein classification predicting sequence
VLNYKSP

SEQ ID NO: 39474 - protein, 9 aa, Artificial sequence
  Protein classification predicting sequence
YCDVISGSL

SEQ ID NO: 39475 - protein, 10 aa, Artificial sequence
  Protein classification predicting sequence
RVMSSFAFDD

SEQ ID NO: 39476 - protein, 10 aa, Artificial sequence
  Protein classification predicting sequence
DTPPPQDAQE

SEQ ID NO: 39477 - protein, 8 aa, Artificial sequence
  Protein classification predicting sequence
VGVRIYVD

SEQ ID NO: 39478 - protein, 11 aa, Artificial sequence
  Protein classification predicting sequence
LGAVTEFRFSE

SEQ ID NO: 39479 - protein, 15 aa, Artificial sequence
  Protein classification predicting sequence
HIGSDDFDGVLALHV

SEQ ID NO: 39480 - protein, 26 aa, Artificial sequence
  Protein classification predicting sequence
KFALALTLCLAGASLSLAQHNPQWWG

SEQ ID NO: 39481 - protein, 16 aa, Artificial sequence
  Protein classification predicting sequence
RNTIVHLFEWKWSDIA

SEQ ID NO: 39482 - protein, 21 aa, Artificial sequence
  Protein classification predicting sequence
RPFIFQEVIDHGHETVSRDEY

SEQ ID NO: 39483 - protein, 15 aa, Artificial sequence
  Protein classification predicting sequence
AFRGNNALKWLQSWG

SEQ ID NO: 39484 - protein, 10 aa, Artificial sequence
  Protein classification predicting sequence
GYGYIHIGSD

SEQ ID NO: 39485 - protein, 9 aa, Artificial sequence
  Protein classification predicting sequence
FDGVLALHV

SEQ ID NO: 39486 - protein, 26 aa, Artificial sequence
  Protein classification predicting sequence
AQHNPHWWGNRNTIVHLFEWKWSDIA

SEQ ID NO: 39487 - protein, 20 aa, Artificial sequence
  Protein classification predicting sequence
GRPWWERYQPISYKLTTRSG

SEQ ID NO: 39488 - protein, 10 aa, Artificial sequence
  Protein classification predicting sequence
DMVRRCNDVG

SEQ ID NO: 39489 - protein, 17 aa, Artificial sequence
  Protein classification predicting sequence
RIYVDVLLNHMSGDFDG

SEQ ID NO: 39490 - protein, 9 aa, Artificial sequence
  Protein classification predicting sequence
GTAGTEAEP

SEQ ID NO: 39491 - protein, 9 aa, Artificial sequence
  Protein classification predicting sequence
PSCEITDWN

SEQ ID NO: 39492 - protein, 7 aa, Artificial sequence
  Protein classification predicting sequence
LNTDHGF

SEQ ID NO: 39493 - protein, 8 aa, Artificial sequence
  Protein classification predicting sequence
AFRGNNAL

SEQ ID NO: 39494 - protein, 9 aa, Artificial sequence
  Protein classification predicting sequence
GAVLNYKSP

SEQ ID NO: 39495 - protein, 17 aa, Artificial sequence
  Protein classification predicting sequence
QISFCRGNKGFLAVNNN

SEQ ID NO: 39496 - protein, 25 aa, Artificial sequence
  Protein classification predicting sequence
YDLSQELNTCLPAGEYCDVISGSLI

SEQ ID NO: 39497 - protein, 9 aa, Artificial sequence
  Protein classification predicting sequence
MVRRCNDVG

SEQ ID NO: 39498 - protein, 13 aa, Artificial sequence
  Protein classification predicting sequence
AEPRKKSFPGVPY

SEQ ID NO: 39499 - protein, 9 aa, Artificial sequence
  Protein classification predicting sequence
KKSFPGVPY

SEQ ID NO: 39500 - protein, 23 aa, Artificial sequence
  Protein classification predicting sequence
CEITDWNDRFQVQQCELVGLKDL

SEQ ID NO: 39501 - protein, 6 aa, Artificial sequence
  Protein classification predicting sequence
HGFPHN

SEQ ID NO: 39502 - protein, 7 aa, Artificial sequence
  Protein classification predicting sequence
CEHRWRQ

SEQ ID NO: 39503 - protein, 6 aa, Artificial sequence
  Protein classification predicting sequence
WWDNGD

SEQ ID NO: 39504 - protein, 7 aa, Artificial sequence
  Protein classification predicting sequence
QISFCRG

SEQ ID NO: 39505 - protein, 30 aa, Artificial sequence
  Protein classification predicting sequence
QYKMATAFHLAYPYGISRVMSSFAFDDHDT

SEQ ID NO: 39506 - protein, 21 aa, Artificial sequence
  Protein classification predicting sequence
GWWDNGDNQISFCRGNKGFLA

SEQ ID NO: 39507 - protein, 20 aa, Artificial sequence
  Protein classification predicting sequence
GYGYIHIGSDDFDGVLALHV

SEQ ID NO: 39508 - protein, 11 aa, Artificial sequence
  Protein classification predicting sequence
CELVGLKDLNQ

SEQ ID NO: 39509 - protein, 16 aa, Artificial sequence
  Protein classification predicting sequence
AFRGNNALKWLQSWGT

SEQ ID NO: 39510 - protein, 6 aa, Artificial sequence
  Protein classification predicting sequence
TLCLAG

SEQ ID NO: 39511 - protein, 37 aa, Artificial sequence
  Protein classification predicting sequence
IISPEFDEDGACVNGWICEHRWRQIYAMVGFKNAVRD

SEQ ID NO: 39512 - protein, 12 aa, Artificial sequence
  Protein classification predicting sequence
KFALALTLCLAG

SEQ ID NO: 39513 - protein, 15 aa, Artificial sequence
  Protein classification predicting sequence
RPFIFQEVIDHGHET

SEQ ID NO: 39514 - protein, 21 aa, Artificial sequence
  Protein classification predicting sequence
AFRGNNALKWLQSWGTDWGFL

SEQ ID NO: 39515 - protein, 17 aa, Artificial sequence
  Protein classification predicting sequence
WGFLPSGQALTFVDNHD

SEQ ID NO: 39516 - protein, 10 aa, Artificial sequence
  Protein classification predicting sequence
QALTFVDNHD

SEQ ID NO: 39517 - protein, 7 aa, Artificial sequence
  Protein classification predicting sequence
CTGKSVT

SEQ ID NO: 39518 - protein, 7 aa, Artificial sequence
  Protein classification predicting sequence
DIAQECE

SEQ ID NO: 39519 - protein, 8 aa, Artificial sequence
  Protein classification predicting sequence
ECENFLGP

SEQ ID NO: 39520 - protein, 37 aa, Artificial sequence
  Protein classification predicting sequence
YKMATAFHLAYPYGISRVMSSFAFDDHDTPPPQDAQE

SEQ ID NO: 39521 - protein, 17 aa, Artificial sequence
  Protein classification predicting sequence
PRGFAGVQVSPVNENII

SEQ ID NO: 39522 - protein, 11 aa, Artificial sequence
  Protein classification predicting sequence
PRGFAGVQVSP

SEQ ID NO: 39523 - protein, 12 aa, Artificial sequence
  Protein classification predicting sequence
RIYVDVLLNHMS

SEQ ID NO: 39524 - protein, 9 aa, Artificial sequence
  Protein classification predicting sequence
QALTFVDNH

SEQ ID NO: 39525 - protein, 7 aa, Artificial sequence
  Protein classification predicting sequence
PPQDAQE

SEQ ID NO: 39526 - protein, 9 aa, Artificial sequence
  Protein classification predicting sequence
CEHRWRQIY

SEQ ID NO: 39527 - protein, 7 aa, Artificial sequence
  Protein classification predicting sequence
YCDVISG

SEQ ID NO: 39528 - protein, 6 aa, Artificial sequence
  Protein classification predicting sequence
LNTCLP

SEQ ID NO: 39529 - protein, 18 aa, Artificial sequence
  Protein classification predicting sequence
PRGFAGVQVSPVNENIIS

SEQ ID NO: 39530 - protein, 14 aa, Artificial sequence
  Protein classification predicting sequence
AQDFHPSCEITDWN

SEQ ID NO: 39531 - protein, 7 aa, Artificial sequence
  Protein classification predicting sequence
SLSNLNI

SEQ ID NO: 39532 - protein, 25 aa, Artificial sequence
  Protein classification predicting sequence
HGFPHNARPFIFQEVIDHGHETVSR

SEQ ID NO: 39533 - protein, 7 aa, Artificial sequence
  Protein classification predicting sequence
SGSLIDG

SEQ ID NO: 39534 - protein, 14 aa, Artificial sequence
  Protein classification predicting sequence
WWGNRNTIVHLFEW

SEQ ID NO: 39535 - protein, 6 aa, Artificial sequence
  Protein classification predicting sequence
DFHPSC

SEQ ID NO: 39536 - protein, 7 aa, Artificial sequence
  Protein classification predicting sequence
DWNDRFQ

SEQ ID NO: 39537 - protein, 12 aa, Artificial sequence
  Protein classification predicting sequence
RPFIFQEVIDHG

SEQ ID NO: 39538 - protein, 7 aa, Artificial sequence
  Protein classification predicting sequence
AFRGNNA

SEQ ID NO: 39539 - protein, 12 aa, Artificial sequence
  Protein classification predicting sequence
KWLQSWGTDWGF

SEQ ID NO: 39540 - protein, 11 aa, Artificial sequence
  Protein classification predicting sequence
TFVDNHDNQRD

SEQ ID NO: 39541 - protein, 7 aa, Artificial sequence
  Protein classification predicting sequence
NNNLYDL

SEQ ID NO: 39542 - protein, 10 aa, Artificial sequence
  Protein classification predicting sequence
VGTAGTEAEP

SEQ ID NO: 39543 - protein, 15 aa, Artificial sequence
  Protein classification predicting sequence
KSFPGVPYTAQDFHP

SEQ ID NO: 39544 - protein, 6 aa, Artificial sequence
  Protein classification predicting sequence
ECETFL

SEQ ID NO: 39545 - protein, 16 aa, Artificial sequence
  Protein classification predicting sequence
RIYVDVLLNHMSGDFD

SEQ ID NO: 39546 - protein, 14 aa, Artificial sequence
  Protein classification predicting sequence
LGAVTEFRFSEEIG

SEQ ID NO: 39547 - protein, 14 aa, Artificial sequence
  Protein classification predicting sequence
QALTFVDNHDNQRD

SEQ ID NO: 39548 - protein, 8 aa, Artificial sequence
  Protein classification predicting sequence
VHLFEWKW

SEQ ID NO: 39549 - protein, 29 aa, Artificial sequence
  Protein classification predicting sequence
RIYVDVLLNHMSGDFDGVAVGTAGTEAEP

SEQ ID NO: 39550 - protein, 9 aa, Artificial sequence
  Protein classification predicting sequence
FASMVKRCN

SEQ ID NO: 39551 - protein, 6 aa, Artificial sequence
  Protein classification predicting sequence
TCLPAG

SEQ ID NO: 39552 - protein, 7 aa, Artificial sequence
  Protein classification predicting sequence
DGVLAIH

SEQ ID NO: 39553 - protein, 24 aa, Artificial sequence
  Protein classification predicting sequence
IEFLDHLIELGVAGFRVDAAKHMA

SEQ ID NO: 39554 - protein, 11 aa, Artificial sequence
  Protein classification predicting sequence
HLFEWRWVDIA

SEQ ID NO: 39555 - protein, 8 aa, Artificial sequence
  Protein classification predicting sequence
ECERYLAP

SEQ ID NO: 39556 - protein, 9 aa, Artificial sequence
  Protein classification predicting sequence
GFAGVQVSP

SEQ ID NO: 39557 - protein, 9 aa, Artificial sequence
  Protein classification predicting sequence
RSGNEDEFR

SEQ ID NO: 39558 - protein, 7 aa, Artificial sequence
  Protein classification predicting sequence
DFNDGKC

SEQ ID NO: 39559 - protein, 8 aa, Artificial sequence
  Protein classification predicting sequence
LDKLHNLN

SEQ ID NO: 39560 - protein, 15 aa, Artificial sequence
  Protein classification predicting sequence
GEKMSYLKNWGEGWG

SEQ ID NO: 39561 - protein, 12 aa, Artificial sequence
  Protein classification predicting sequence
CEHRWRQIRNMV

SEQ ID NO: 39562 - protein, 5 aa, Artificial sequence
  Protein classification predicting sequence
NWWDN

SEQ ID NO: 39563 - protein, 8 aa, Artificial sequence
  Protein classification predicting sequence
IVFNNDDW

SEQ ID NO: 39564 - protein, 6 aa, Artificial sequence
  Protein classification predicting sequence
VHLFEW

SEQ ID NO: 39565 - protein, 8 aa, Artificial sequence
  Protein classification predicting sequence
VQVSPPNE

SEQ ID NO: 39566 - protein, 6 aa, Artificial sequence
  Protein classification predicting sequence
GSQWWT

SEQ ID NO: 39567 - protein, 6 aa, Artificial sequence
  Protein classification predicting sequence
YQPVSY

SEQ ID NO: 39568 - protein, 6 aa, Artificial sequence
  Protein classification predicting sequence
FQEVID

SEQ ID NO: 39569 - protein, 9 aa, Artificial sequence
  Protein classification predicting sequence
GEGWGFMPS

SEQ ID NO: 39570 - protein, 6 aa, Artificial sequence
  Protein classification predicting sequence
LAYPYG

SEQ ID NO: 39571 - protein, 8 aa, Artificial sequence
  Protein classification predicting sequence
DIAKECER

SEQ ID NO: 39572 - protein, 7 aa, Artificial sequence
  Protein classification predicting sequence
DNHDNQR

SEQ ID NO: 39573 - protein, 6 aa, Artificial sequence
  Protein classification predicting sequence
FMLAHP

SEQ ID NO: 39574 - protein, 11 aa, Artificial sequence
  Protein classification predicting sequence
FMLAHPYGFTR

SEQ ID NO: 39575 - protein, 6 aa, Artificial sequence
  Protein classification predicting sequence
TDQGPP

SEQ ID NO: 39576 - protein, 6 aa, Artificial sequence
  Protein classification predicting sequence
RGNKGF

SEQ ID NO: 39577 - protein, 8 aa, Artificial sequence
  Protein classification predicting sequence
AHFSISNS

SEQ ID NO: 39578 - protein, 5 aa, Artificial sequence
  Protein classification predicting sequence
LFEWK

SEQ ID NO: 39579 - protein, 7 aa, Artificial sequence
  Protein classification predicting sequence
VTVGSDG

SEQ ID NO: 39580 - protein, 9 aa, Artificial sequence
  Protein classification predicting sequence
LGPAGYGYV

SEQ ID NO: 39581 - protein, 20 aa, Artificial sequence
  Protein classification predicting sequence
QWWTSYQPVSYKIAGRLGDR

SEQ ID NO: 39582 - protein, 8 aa, Artificial sequence
  Protein classification predicting sequence
CHAAGVKV

SEQ ID NO: 39583 - protein, 7 aa, Artificial sequence
  Protein classification predicting sequence
FRNAVGS

SEQ ID NO: 39584 - protein, 9 aa, Artificial sequence
  Protein classification predicting sequence
LPAGTYCDV

SEQ ID NO: 39585 - protein, 8 aa, Artificial sequence
  Protein classification predicting sequence
RIDTVKHV

SEQ ID NO: 39586 - protein, 6 aa, Artificial sequence
  Protein classification predicting sequence
VQVSPP

SEQ ID NO: 39587 - protein, 10 aa, Artificial sequence
  Protein classification predicting sequence
TCHAAGVKVV

SEQ ID NO: 39588 - protein, 8 aa, Artificial sequence
  Protein classification predicting sequence
GSGTGTGG

SEQ ID NO: 39589 - protein, 6 aa, Artificial sequence
  Protein classification predicting sequence
MVAFRN

SEQ ID NO: 39590 - protein, 6 aa, Artificial sequence
  Protein classification predicting sequence
GFGGVQ

SEQ ID NO: 39591 - protein, 7 aa, Artificial sequence
  Protein classification predicting sequence
GVRIYVD

SEQ ID NO: 39592 - protein, 15 aa, Artificial sequence
  Protein classification predicting sequence
VRNCELVGLRDLNQG

SEQ ID NO: 39593 - protein, 9 aa, Artificial sequence
  Protein classification predicting sequence
QEVIDLGGE

SEQ ID NO: 39594 - protein, 10 aa, Artificial sequence
  Protein classification predicting sequence
IYVDAVINHM

SEQ ID NO: 39595 - protein, 9 aa, Artificial sequence
  Protein classification predicting sequence
CELVGLADL

SEQ ID NO: 39596 - protein, 6 aa, Artificial sequence
  Protein classification predicting sequence
IFQEVI

SEQ ID NO: 39597 - protein, 10 aa, Artificial sequence
  Protein classification predicting sequence
LQEGHQFLCS

SEQ ID NO: 39598 - protein, 15 aa, Artificial sequence
  Protein classification predicting sequence
KPKTVIYWLAEVKDY

SEQ ID NO: 39599 - protein, 6 aa, Artificial sequence
  Protein classification predicting sequence
TRMRFC

SEQ ID NO: 39600 - protein, 9 aa, Artificial sequence
  Protein classification predicting sequence
LRWEDKQYF

SEQ ID NO: 39601 - protein, 9 aa, Artificial sequence
  Protein classification predicting sequence
HAGISPQWD

SEQ ID NO: 39602 - protein, 5 aa, Artificial sequence
  Protein classification predicting sequence
GCCWG

SEQ ID NO: 39603 - protein, 6 aa, Artificial sequence
  Protein classification predicting sequence
LGNHDL

SEQ ID NO: 39604 - protein, 7 aa, Artificial sequence
  Protein classification predicting sequence
RGPKSLE

SEQ ID NO: 39605 - protein, 11 aa, Artificial sequence
  Protein classification predicting sequence
VLGNHDLHLLA

SEQ ID NO: 39606 - protein, 9 aa, Artificial sequence
  Protein classification predicting sequence
DVTVVFGHW

SEQ ID NO: 39607 - protein, 10 aa, Artificial sequence
  Protein classification predicting sequence
DTLWLTGDLV

SEQ ID NO: 39608 - protein, 7 aa, Artificial sequence
  Protein classification predicting sequence
FGHWAAL

SEQ ID NO: 39609 - protein, 8 aa, Artificial sequence
  Protein classification predicting sequence
GDLVARGP

SEQ ID NO: 39610 - protein, 15 aa, Artificial sequence
  Protein classification predicting sequence
KLVMAHAGITPQWDL

SEQ ID NO: 39611 - protein, 16 aa, Artificial sequence
  Protein classification predicting sequence
IAFGHWASLEGKGTPE

SEQ ID NO: 39612 - protein, 7 aa, Artificial sequence
  Protein classification predicting sequence
WLRKQPL

SEQ ID NO: 39613 - protein, 9 aa, Artificial sequence
  Protein classification predicting sequence
NAFTRMRFC

SEQ ID NO: 39614 - protein, 7 aa, Artificial sequence
  Protein classification predicting sequence
LDTGCVW

SEQ ID NO: 39615 - protein, 6 aa, Artificial sequence
  Protein classification predicting sequence
GDLQGC

SEQ ID NO: 39616 - protein, 6 aa, Artificial sequence
  Protein classification predicting sequence
IVFGHW

SEQ ID NO: 39617 - protein, 9 aa, Artificial sequence
  Protein classification predicting sequence
LGNHDLHLL

SEQ ID NO: 39618 - protein, 10 aa, Artificial sequence
  Protein classification predicting sequence
AGISRNKPKD

SEQ ID NO: 39619 - protein, 13 aa, Artificial sequence
  Protein classification predicting sequence
MYGDMPNNWSPEL

SEQ ID NO: 39620 - protein, 6 aa, Artificial sequence
  Protein classification predicting sequence
TRMRYC

SEQ ID NO: 39621 - protein, 9 aa, Artificial sequence
  Protein classification predicting sequence
CFPNGQLDM

SEQ ID NO: 39622 - protein, 9 aa, Artificial sequence
  Protein classification predicting sequence
APAPLKPWF

SEQ ID NO: 39623 - protein, 8 aa, Artificial sequence
  Protein classification predicting sequence
GDLVNRGP

SEQ ID NO: 39624 - protein, 7 aa, Artificial sequence
  Protein classification predicting sequence
VPWFDVP

SEQ ID NO: 39625 - protein, 8 aa, Artificial sequence
  Protein classification predicting sequence
VWGGKLTA

SEQ ID NO: 39626 - protein, 13 aa, Artificial sequence
  Protein classification predicting sequence
RLRFITNAFTRMR

SEQ ID NO: 39627 - protein, 7 aa, Artificial sequence
  Protein classification predicting sequence
NAFTRMR

SEQ ID NO: 39628 - protein, 15 aa, Artificial sequence
  Protein classification predicting sequence
APAPLKPWFAIPGPV

SEQ ID NO: 39629 - protein, 18 aa, Artificial sequence
  Protein classification predicting sequence
LTCLRWEDKQYFVQPSNR

SEQ ID NO: 39630 - protein, 27 aa, Artificial sequence
  Protein classification predicting sequence
DTLWLTGDLVARGPGSLDVLRYVKSLG

SEQ ID NO: 39631 - protein, 52 aa, Artificial sequence
  Protein classification predicting sequence
SVRLVLGNHDLHLLAVFAGISRNKPKDRLTPLLEAPDADELLNWLRRQPLLQ

SEQ ID NO: 39632 - protein, 57 aa, Artificial sequence
  Protein classification predicting sequence
DEEKKLVMAHAGITPQWDLQTAKECARDVEAVLSSDSYPFFLDAMYGDMPNNWSPEL

SEQ ID NO: 39633 - protein, 7 aa, Artificial sequence
  Protein classification predicting sequence
GDLVARG

SEQ ID NO: 39634 - protein, 7 aa, Artificial sequence
  Protein classification predicting sequence
NALTRMR

SEQ ID NO: 39635 - protein, 7 aa, Artificial sequence
  Protein classification predicting sequence
VLGNHDL

SEQ ID NO: 39636 - protein, 7 aa, Artificial sequence
  Protein classification predicting sequence
VMCHAGI

SEQ ID NO: 39637 - protein, 11 aa, Artificial sequence
  Protein classification predicting sequence
CHAGISPQWDL

SEQ ID NO: 39638 - protein, 6 aa, Artificial sequence
  Protein classification predicting sequence
RWEDKQ

SEQ ID NO: 39639 - protein, 17 aa, Artificial sequence
  Protein classification predicting sequence
AGDLVARGPKSLETLRF

SEQ ID NO: 39640 - protein, 7 aa, Artificial sequence
  Protein classification predicting sequence
LDTGCCW

SEQ ID NO: 39641 - protein, 8 aa, Artificial sequence
  Protein classification predicting sequence
GHWSTLGL

SEQ ID NO: 39642 - protein, 8 aa, Artificial sequence
  Protein classification predicting sequence
SLDVLRYV

SEQ ID NO: 39643 - protein, 11 aa, Artificial sequence
  Protein classification predicting sequence
VEAVLSSDSYP

SEQ ID NO: 39644 - protein, 32 aa, Artificial sequence
  Protein classification predicting sequence
RMENIRFCRQYLVFHDGDSVVFAGPAGNSVET

SEQ ID NO: 39645 - protein, 22 aa, Artificial sequence
  Protein classification predicting sequence
GELLSRESPSGTMKAVLRKAGG

SEQ ID NO: 39646 - protein, 69 aa, Artificial sequence
  Protein classification predicting sequence
QVPMVVMPHGGPHSSFVTAWMLFPAMLCKMGFAVLLVNYRGSTGFGQDSILSLPGNVGHQDVKDVQFAV

SEQ ID NO: 39647 - protein, 6 aa, Artificial sequence
  Protein classification predicting sequence
KTYNVD

SEQ ID NO: 39648 - protein, 7 aa, Artificial sequence
  Protein classification predicting sequence
GVVTTTR

SEQ ID NO: 39649 - protein, 19 aa, Artificial sequence
  Protein classification predicting sequence
PMAVGFDIDDTVLFSSPGF

SEQ ID NO: 39650 - protein, 7 aa, Artificial sequence
  Protein classification predicting sequence
FWEKMNN

SEQ ID NO: 39651 - protein, 6 aa, Artificial sequence
  Protein classification predicting sequence
TKTETV

SEQ ID NO: 39652 - protein, 9 aa, Artificial sequence
  Protein classification predicting sequence
MNPVIFAGD

SEQ ID NO: 39653 - protein, 8 aa, Artificial sequence
  Protein classification predicting sequence
LSGGNQQK

SEQ ID NO: 39654 - protein, 9 aa, Artificial sequence
  Protein classification predicting sequence
LLFDDVIWV

SEQ ID NO: 39655 - protein, 10 aa, Artificial sequence
  Protein classification predicting sequence
RAAMHLDTVF

SEQ ID NO: 39656 - protein, 7 aa, Artificial sequence
  Protein classification predicting sequence
MHLDTVF

SEQ ID NO: 39657 - protein, 6 aa, Artificial sequence
  Protein classification predicting sequence
VNSEIG

SEQ ID NO: 39658 - protein, 19 aa, Artificial sequence
  Protein classification predicting sequence
LKTVLLKRPGKELENLVPD

SEQ ID NO: 39659 - protein, 8 aa, Artificial sequence
  Protein classification predicting sequence
LRDEGIEV

SEQ ID NO: 39660 - protein, 10 aa, Artificial sequence
  Protein classification predicting sequence
ESKKTILGHE

SEQ ID NO: 39661 - protein, 9 aa, Artificial sequence
  Protein classification predicting sequence
THLVEYMDD

SEQ ID NO: 39662 - protein, 22 aa, Artificial sequence
  Protein classification predicting sequence
YPFYLDPMPNLYFTRDPQASIG

SEQ ID NO: 39663 - protein, 10 aa, Artificial sequence
  Protein classification predicting sequence
WRARRRESIF

SEQ ID NO: 39664 - protein, 6 aa, Artificial sequence
  Protein classification predicting sequence
MHLDTV

SEQ ID NO: 39665 - protein, 9 aa, Artificial sequence
  Protein classification predicting sequence
TMIDYDKFT

SEQ ID NO: 39666 - protein, 41 aa, Artificial sequence
  Protein classification predicting sequence
FIPTGNGDVIDGAREQWNDGSNTLCIRPGVVVTYDRNYVSN

SEQ ID NO: 39667 - protein, 15 aa, Artificial sequence
  Protein classification predicting sequence
GSELVRGRGGPRCMS

SEQ ID NO: 39668 - protein, 6 aa, Artificial sequence
  Protein classification predicting sequence
RDHFDF

SEQ ID NO: 39669 - protein, 15 aa, Artificial sequence
  Protein classification predicting sequence
YDRNTYTNTLLRKAG

SEQ ID NO: 39670 - protein, 21 aa, Artificial sequence
  Protein classification predicting sequence
YDRNTYTNTLLRKAGVEVITI

SEQ ID NO: 39671 - protein, 9 aa, Artificial sequence
  Protein classification predicting sequence
EHDHFAQVL

SEQ ID NO: 39672 - protein, 9 aa, Artificial sequence
  Protein classification predicting sequence
FIDDVLAES

SEQ ID NO: 39673 - protein, 7 aa, Artificial sequence
  Protein classification predicting sequence
KTILGHE

SEQ ID NO: 39674 - protein, 7 aa, Artificial sequence
  Protein classification predicting sequence
GVRKEEI

SEQ ID NO: 39675 - protein, 15 aa, Artificial sequence
  Protein classification predicting sequence
NRMFWRARRRESIFI

SEQ ID NO: 39676 - protein, 10 aa, Artificial sequence
  Protein classification predicting sequence
SERTSAQAIE

SEQ ID NO: 39677 - protein, 13 aa, Artificial sequence
  Protein classification predicting sequence
EGNMNIFIIEYDD

SEQ ID NO: 39678 - protein, 7 aa, Artificial sequence
  Protein classification predicting sequence
IPTGNGD

SEQ ID NO: 39679 - protein, 32 aa, Artificial sequence
  Protein classification predicting sequence
IDGAREQWNDGSNTLCIRPGVVVTYDRNYVSN

SEQ ID NO: 39680 - protein, 7 aa, Artificial sequence
  Protein classification predicting sequence
PIWLDRD

SEQ ID NO: 39681 - protein, 25 aa, Artificial sequence
  Protein classification predicting sequence
ELMEDHYPFYLDPMPNLYFTRDPAA

SEQ ID NO: 39682 - protein, 11 aa, Artificial sequence
  Protein classification predicting sequence
EPARRRESLFM

SEQ ID NO: 39683 - protein, 11 aa, Artificial sequence
  Protein classification predicting sequence
FNIEGGDELVL

SEQ ID NO: 39684 - protein, 8 aa, Artificial sequence
  Protein classification predicting sequence
EGGDELVL

SEQ ID NO: 39685 - protein, 8 aa, Artificial sequence
  Protein classification predicting sequence
FTIHPAIQ

SEQ ID NO: 39686 - protein, 29 aa, Artificial sequence
  Protein classification predicting sequence
IASAREQWNDGSNTLAIAPGVVVTYDRNY

SEQ ID NO: 39687 - protein, 11 aa, Artificial sequence
  Protein classification predicting sequence
PGVVVTYDRNY

SEQ ID NO: 39688 - protein, 6 aa, Artificial sequence
  Protein classification predicting sequence
LFDDIP

SEQ ID NO: 39689 - protein, 7 aa, Artificial sequence
  Protein classification predicting sequence
REQWNDG

SEQ ID NO: 39690 - protein, 11 aa, Artificial sequence
  Protein classification predicting sequence
RGRGGPRCMSM

SEQ ID NO: 39691 - protein, 13 aa, Artificial sequence
  Protein classification predicting sequence
YDRNTYTNTLLRK

SEQ ID NO: 39692 - protein, 7 aa, Artificial sequence
  Protein classification predicting sequence
GIEVITI

SEQ ID NO: 39693 - protein, 22 aa, Artificial sequence
  Protein classification predicting sequence
MHLDTVFSFCDRDLVTVFPEVV

SEQ ID NO: 39694 - protein, 7 aa, Artificial sequence
  Protein classification predicting sequence
GIEVIEV

SEQ ID NO: 39695 - protein, 8 aa, Artificial sequence
  Protein classification predicting sequence
YDRNTYTN

SEQ ID NO: 39696 - protein, 7 aa, Artificial sequence
  Protein classification predicting sequence
VLLHRPG

SEQ ID NO: 39697 - protein, 8 aa, Artificial sequence
  Protein classification predicting sequence
MHLDTVFT

SEQ ID NO: 39698 - protein, 9 aa, Artificial sequence
  Protein classification predicting sequence
RPGKELENL

SEQ ID NO: 39699 - protein, 6 aa, Artificial sequence
  Protein classification predicting sequence
EHDAFA

SEQ ID NO: 39700 - protein, 13 aa, Artificial sequence
  Protein classification predicting sequence
GISQRTDAASIEK

SEQ ID NO: 39701 - protein, 6 aa, Artificial sequence
  Protein classification predicting sequence
DYDKFT

SEQ ID NO: 39702 - protein, 6 aa, Artificial sequence
  Protein classification predicting sequence
RNTITN

SEQ ID NO: 39703 - protein, 7 aa, Artificial sequence
  Protein classification predicting sequence
PGVVVTY

SEQ ID NO: 39704 - protein, 14 aa, Artificial sequence
  Protein classification predicting sequence
SSELSRGRGGPRCM

SEQ ID NO: 39705 - protein, 7 aa, Artificial sequence
  Protein classification predicting sequence
SEIGKLK

SEQ ID NO: 39706 - protein, 6 aa, Artificial sequence
  Protein classification predicting sequence
YFTRDP

SEQ ID NO: 39707 - protein, 6 aa, Artificial sequence
  Protein classification predicting sequence
HPRFKD

SEQ ID NO: 39708 - protein, 7 aa, Artificial sequence
  Protein classification predicting sequence
VLAVEIP

SEQ ID NO: 39709 - protein, 8 aa, Artificial sequence
  Protein classification predicting sequence
ELGRGRGG

SEQ ID NO: 39710 - protein, 7 aa, Artificial sequence
  Protein classification predicting sequence
RCMSQPL

SEQ ID NO: 39711 - protein, 10 aa, Artificial sequence
  Protein classification predicting sequence
TVLLKRPGKE

SEQ ID NO: 39712 - protein, 10 aa, Artificial sequence
  Protein classification predicting sequence
MHLDTVFTMI

SEQ ID NO: 39713 - protein, 8 aa, Artificial sequence
  Protein classification predicting sequence
LIPCGGGD

SEQ ID NO: 39714 - protein, 6 aa, Artificial sequence
  Protein classification predicting sequence
GVSERT

SEQ ID NO: 39715 - protein, 8 aa, Artificial sequence
  Protein classification predicting sequence
NTLAIAPG

SEQ ID NO: 39716 - protein, 7 aa, Artificial sequence
  Protein classification predicting sequence
VSNDLLR

SEQ ID NO: 39717 - protein, 7 aa, Artificial sequence
  Protein classification predicting sequence
NIYILEK

SEQ ID NO: 39718 - protein, 8 aa, Artificial sequence
  Protein classification predicting sequence
IHVYSEIG

SEQ ID NO: 39719 - protein, 8 aa, Artificial sequence
  Protein classification predicting sequence
VGVSERTD

SEQ ID NO: 39720 - protein, 7 aa, Artificial sequence
  Protein classification predicting sequence
PGVVIGY

SEQ ID NO: 39721 - protein, 6 aa, Artificial sequence
  Protein classification predicting sequence
RCMSMP

SEQ ID NO: 39722 - protein, 9 aa, Artificial sequence
  Protein classification predicting sequence
DFVIEPLPN

SEQ ID NO: 39723 - protein, 13 aa, Artificial sequence
  Protein classification predicting sequence
PPLPNTQFTRDTT

SEQ ID NO: 39724 - protein, 7 aa, Artificial sequence
  Protein classification predicting sequence
RLTPSNC

SEQ ID NO: 39725 - protein, 6 aa, Artificial sequence
  Protein classification predicting sequence
DHFDFV

SEQ ID NO: 39726 - protein, 8 aa, Artificial sequence
  Protein classification predicting sequence
CWIYGGVT

SEQ ID NO: 39727 - protein, 9 aa, Artificial sequence
  Protein classification predicting sequence
EGGDVMPIG

SEQ ID NO: 39728 - protein, 25 aa, Artificial sequence
  Protein classification predicting sequence
HSAILKAEGNMNIFIIEYDDVNKDI

SEQ ID NO: 39729 - protein, 30 aa, Artificial sequence
  Protein classification predicting sequence
LKTVLLKRPGKELENLVPDYLDGLLFDDIP

SEQ ID NO: 39730 - protein, 22 aa, Artificial sequence
  Protein classification predicting sequence
TFKKVVAIEIPTSRTFMHLDTV

SEQ ID NO: 39731 - protein, 13 aa, Artificial sequence
  Protein classification predicting sequence
RGRATKKAIRELL

SEQ ID NO: 39732 - protein, 8 aa, Artificial sequence
  Protein classification predicting sequence
GGKVPMVY

SEQ ID NO: 39733 - protein, 7 aa, Artificial sequence
  Protein classification predicting sequence
EEKGDLA

SEQ ID NO: 39734 - protein, 11 aa, Artificial sequence
  Protein classification predicting sequence
REQWNDGSNTL

SEQ ID NO: 39735 - protein, 42 aa, Artificial sequence
  Protein classification predicting sequence
LHRPGKEIENLMPDYLERLLFDDIPFLEDAQKEHDAFAQALR

SEQ ID NO: 39736 - protein, 27 aa, Artificial sequence
  Protein classification predicting sequence
GVSLNHMFSETRNRETLYGKYIFTHHP

SEQ ID NO: 39737 - protein, 31 aa, Artificial sequence
  Protein classification predicting sequence
LIRCGGDNLVAAGREQWNDGSNTLTIAPGVV

SEQ ID NO: 39738 - protein, 22 aa, Artificial sequence
  Protein classification predicting sequence
VYNRNTITNAILESKGLKLIKI

SEQ ID NO: 39739 - protein, 7 aa, Artificial sequence
  Protein classification predicting sequence
GVHSEVG

SEQ ID NO: 39740 - protein, 15 aa, Artificial sequence
  Protein classification predicting sequence
PPLPNTLYTRDTTCW

SEQ ID NO: 39741 - protein, 6 aa, Artificial sequence
  Protein classification predicting sequence
GMSERT

SEQ ID NO: 39742 - protein, 15 aa, Artificial sequence
  Protein classification predicting sequence
ELGRGRGGGHCMTCP

SEQ ID NO: 39743 - protein, 6 aa, Artificial sequence
  Protein classification predicting sequence
EVLYLE

SEQ ID NO: 39744 - protein, 6 aa, Artificial sequence
  Protein classification predicting sequence
EKTMAG

SEQ ID NO: 39745 - protein, 22 aa, Artificial sequence
  Protein classification predicting sequence
YPFAIDPMPNLYFTRDPFATIG

SEQ ID NO: 39746 - protein, 7 aa, Artificial sequence
  Protein classification predicting sequence
VSLNHMF

SEQ ID NO: 39747 - protein, 13 aa, Artificial sequence
  Protein classification predicting sequence
TRNRETLYGKYIF

SEQ ID NO: 39748 - protein, 38 aa, Artificial sequence
  Protein classification predicting sequence
TRIEGGDELVLSKDVLAVGISQRTDAASIEKLLVNIFK

SEQ ID NO: 39749 - protein, 41 aa, Artificial sequence
  Protein classification predicting sequence
GFKKVLAFEFANNRKFMHLDTVFTMVDYDKFTIHPEIEGDL

SEQ ID NO: 39750 - protein, 6 aa, Artificial sequence
  Protein classification predicting sequence
VYSVTY

SEQ ID NO: 39751 - protein, 7 aa, Artificial sequence
  Protein classification predicting sequence
NLGVEKV

SEQ ID NO: 39752 - protein, 7 aa, Artificial sequence
  Protein classification predicting sequence
LLFDDIP

SEQ ID NO: 39753 - protein, 7 aa, Artificial sequence
  Protein classification predicting sequence
KDVLAIG

SEQ ID NO: 39754 - protein, 6 aa, Artificial sequence
  Protein classification predicting sequence
LTPSNC

SEQ ID NO: 39755 - protein, 6 aa, Artificial sequence
  Protein classification predicting sequence
AGEEHD

SEQ ID NO: 39756 - protein, 9 aa, Artificial sequence
  Protein classification predicting sequence
LRAIYRWHP

SEQ ID NO: 39757 - protein, 7 aa, Artificial sequence
  Protein classification predicting sequence
DMKGFFA

SEQ ID NO: 39758 - protein, 8 aa, Artificial sequence
  Protein classification predicting sequence
IIGEPTSL

SEQ ID NO: 39759 - protein, 7 aa, Artificial sequence
  Protein classification predicting sequence
IPYPTMN

SEQ ID NO: 39760 - protein, 9 aa, Artificial sequence
  Protein classification predicting sequence
VNYCTEAPF

SEQ ID NO: 39761 - protein, 8 aa, Artificial sequence
  Protein classification predicting sequence
NKFNMLAS

SEQ ID NO: 39762 - protein, 7 aa, Artificial sequence
  Protein classification predicting sequence
KLYGLGT

SEQ ID NO: 39763 - protein, 8 aa, Artificial sequence
  Protein classification predicting sequence
NYCTEAPF

SEQ ID NO: 39764 - protein, 64 aa, Artificial sequence
  Protein classification predicting sequence
GQGAGGLLLAGHTDTVPFDDGRWTRDPFTLTEHDGKLYGLGTADMKGFFAFILDALRDVDVTKL

SEQ ID NO: 39765 - protein, 9 aa, Artificial sequence
  Protein classification predicting sequence
ILATADEET

SEQ ID NO: 39766 - protein, 7 aa, Artificial sequence
  Protein classification predicting sequence
NAIEIMH

SEQ ID NO: 39767 - protein, 14 aa, Artificial sequence
  Protein classification predicting sequence
YGLGTADMKGFFAF

SEQ ID NO: 39768 - protein, 6 aa, Artificial sequence
  Protein classification predicting sequence
DEETTM

SEQ ID NO: 39769 - protein, 13 aa, Artificial sequence
  Protein classification predicting sequence
RPDCAIIGEPTSL

SEQ ID NO: 39770 - protein, 7 aa, Artificial sequence
  Protein classification predicting sequence
SGHSSDP

SEQ ID NO: 39771 - protein, 7 aa, Artificial sequence
  Protein classification predicting sequence
NAIELMH

SEQ ID NO: 39772 - protein, 10 aa, Artificial sequence
  Protein classification predicting sequence
NRICACCELH

SEQ ID NO: 39773 - protein, 7 aa, Artificial sequence
  Protein classification predicting sequence
PIPGYEC

SEQ ID NO: 39774 - protein, 7 aa, Artificial sequence
  Protein classification predicting sequence
VVEKLLG

SEQ ID NO: 39775 - protein, 7 aa, Artificial sequence
  Protein classification predicting sequence
QAHQPDE

SEQ ID NO: 39776 - protein, 7 aa, Artificial sequence
  Protein classification predicting sequence
DPFTLTE

SEQ ID NO: 39777 - protein, 22 aa, Artificial sequence
  Protein classification predicting sequence
LPPFIEIYRALIATPSISATEE

SEQ ID NO: 39778 - protein, 22 aa, Artificial sequence
  Protein classification predicting sequence
LNGLLNDALAPVSERWPGRLTV

SEQ ID NO: 39779 - protein, 19 aa, Artificial sequence
  Protein classification predicting sequence
TTALRPDCAIIGEPTSLQP

SEQ ID NO: 39780 - protein, 8 aa, Artificial sequence
  Protein classification predicting sequence
GGLLLAGH

SEQ ID NO: 39781 - protein, 6 aa, Artificial sequence
  Protein classification predicting sequence
DTVPFD

SEQ ID NO: 39782 - protein, 12 aa, Artificial sequence
  Protein classification predicting sequence
PTLNLGHIHGGD

SEQ ID NO: 39783 - protein, 14 aa, Artificial sequence
  Protein classification predicting sequence
QTVNYCTEAPFLQQ

SEQ ID NO: 39784 - protein, 7 aa, Artificial sequence
  Protein classification predicting sequence
WFKDLGF

SEQ ID NO: 39785 - protein, 14 aa, Artificial sequence
  Protein classification predicting sequence
GRWTRDPFTLTEHD

SEQ ID NO: 39786 - protein, 25 aa, Artificial sequence
  Protein classification predicting sequence
AIIGEPTSLQPVRAHKGHISNAIRI

SEQ ID NO: 39787 - protein, 16 aa, Artificial sequence
  Protein classification predicting sequence
GQSGHSSDPARGVNAI

SEQ ID NO: 39788 - protein, 6 aa, Artificial sequence
  Protein classification predicting sequence
RWPGRL

SEQ ID NO: 39789 - protein, 7 aa, Artificial sequence
  Protein classification predicting sequence
VIWVDAH

SEQ ID NO: 39790 - protein, 8 aa, Artificial sequence
  Protein classification predicting sequence
DINTPLTT

SEQ ID NO: 39791 - protein, 14 aa, Artificial sequence
  Protein classification predicting sequence
KTLGIKYFSMTEVD

SEQ ID NO: 39792 - protein, 7 aa, Artificial sequence
  Protein classification predicting sequence
PATGTPV

SEQ ID NO: 39793 - protein, 16 aa, Artificial sequence
  Protein classification predicting sequence
IIGAPFSKGQPRGGVE

SEQ ID NO: 39794 - protein, 7 aa, Artificial sequence
  Protein classification predicting sequence
GGLSYRE

SEQ ID NO: 39795 - protein, 16 aa, Artificial sequence
  Protein classification predicting sequence
GNLHGQPVSFLLKELK

SEQ ID NO: 39796 - protein, 13 aa, Artificial sequence
  Protein classification predicting sequence
EVDKLGIGKVMEE

SEQ ID NO: 39797 - protein, 21 aa, Artificial sequence
  Protein classification predicting sequence
YLLGRKKRPIHLSFDVDGLDP

SEQ ID NO: 39798 - protein, 9 aa, Artificial sequence
  Protein classification predicting sequence
IGAPFSKGQ

SEQ ID NO: 39799 - protein, 8 aa, Artificial sequence
  Protein classification predicting sequence
LDPSIAPA

SEQ ID NO: 39800 - protein, 11 aa, Artificial sequence
  Protein classification predicting sequence
CVTLGGDHSLA

SEQ ID NO: 39801 - protein, 7 aa, Artificial sequence
  Protein classification predicting sequence
GGDHSLA

SEQ ID NO: 39802 - protein, 8 aa, Artificial sequence
  Protein classification predicting sequence
LAVDVIAS

SEQ ID NO: 39803 - protein, 8 aa, Artificial sequence
  Protein classification predicting sequence
GGLTYREG

SEQ ID NO: 39804 - protein, 19 aa, Artificial sequence
  Protein classification predicting sequence
GGLTYREGVYITEEIHNTG

SEQ ID NO: 39805 - protein, 14 aa, Artificial sequence
  Protein classification predicting sequence
RPIHLSFDIDAFDP

SEQ ID NO: 39806 - protein, 11 aa, Artificial sequence
  Protein classification predicting sequence
QFVLWLDAHTD

SEQ ID NO: 39807 - protein, 6 aa, Artificial sequence
  Protein classification predicting sequence
SGNLHG

SEQ ID NO: 39808 - protein, 15 aa, Artificial sequence
  Protein classification predicting sequence
SGNLHGTPVAYYTGQ

SEQ ID NO: 39809 - protein, 12 aa, Artificial sequence
  Protein classification predicting sequence
LHVSLDVDFLDP

SEQ ID NO: 39810 - protein, 36 aa, Artificial sequence
  Protein classification predicting sequence
IAPAVGTTVPGGATFREAHLIMEMLHDSGLVTSLDL

SEQ ID NO: 39811 - protein, 13 aa, Artificial sequence
  Protein classification predicting sequence
ELNPFLDERGRTA

SEQ ID NO: 39812 - protein, 8 aa, Artificial sequence
  Protein classification predicting sequence
LGGDHSIA

SEQ ID NO: 39813 - protein, 11 aa, Artificial sequence
  Protein classification predicting sequence
LGVIWYDAHGD

SEQ ID NO: 39814 - protein, 14 aa, Artificial sequence
  Protein classification predicting sequence
NLGVIWYDAHGDLN

SEQ ID NO: 39815 - protein, 7 aa, Artificial sequence
  Protein classification predicting sequence
DAHGDLN

SEQ ID NO: 39816 - protein, 7 aa, Artificial sequence
  Protein classification predicting sequence
PIHLSFD

SEQ ID NO: 39817 - protein, 7 aa, Artificial sequence
  Protein classification predicting sequence
DLVEVNP

SEQ ID NO: 39818 - protein, 8 aa, Artificial sequence
  Protein classification predicting sequence
GAPFSKGQ

SEQ ID NO: 39819 - protein, 8 aa, Artificial sequence
  Protein classification predicting sequence
RGGVEEGP

SEQ ID NO: 39820 - protein, 8 aa, Artificial sequence
  Protein classification predicting sequence
RPIHLSFD

SEQ ID NO: 39821 - protein, 24 aa, Artificial sequence
  Protein classification predicting sequence
PSTFGQRKLGVDLGPTAIRYAGLI

SEQ ID NO: 39822 - protein, 9 aa, Artificial sequence
  Protein classification predicting sequence
RLKQLDLDV

SEQ ID NO: 39823 - protein, 7 aa, Artificial sequence
  Protein classification predicting sequence
DKGDIKV

SEQ ID NO: 39824 - protein, 11 aa, Artificial sequence
  Protein classification predicting sequence
GLRNYDEIIDV

SEQ ID NO: 39825 - protein, 27 aa, Artificial sequence
  Protein classification predicting sequence
QKLNKEVSASIENNRFPLVLGGDHSIA

SEQ ID NO: 39826 - protein, 142 aa, Artificial sequence
  Protein classification predicting sequence
GSVSAISKHYNNLGVIWYDAHGDLNIPEESPSGNIHGMPLRILTGEGPKELLELNSNVIKPENIVLIGMRDLDKGERQFIKDHNIKTFTMSDIDKLGIKEVIENTIEYLKSRNVDGVHLSLDVDALDPLETPGTGTRVLGGL

SEQ ID NO: 39827 - protein, 14 aa, Artificial sequence
  Protein classification predicting sequence
YRESHFALELLHQS

SEQ ID NO: 39828 - protein, 7 aa, Artificial sequence
  Protein classification predicting sequence
NNHTAEQ

SEQ ID NO: 39829 - protein, 11 aa, Artificial sequence
  Protein classification predicting sequence
LSALDLVEVNP

SEQ ID NO: 39830 - protein, 8 aa, Artificial sequence
  Protein classification predicting sequence
DTAPTGHT

SEQ ID NO: 39831 - protein, 11 aa, Artificial sequence
  Protein classification predicting sequence
IALHGGAGDIP

SEQ ID NO: 39832 - protein, 15 aa, Artificial sequence
  Protein classification predicting sequence
GDSQIGTVGCVAVDS

SEQ ID NO: 39833 - protein, 11 aa, Artificial sequence
  Protein classification predicting sequence
GNLASATSTGG

SEQ ID NO: 39834 - protein, 12 aa, Artificial sequence
  Protein classification predicting sequence
VNKMVGRIGDTP

SEQ ID NO: 39835 - protein, 8 aa, Artificial sequence
  Protein classification predicting sequence
IGAGTYAN

SEQ ID NO: 39836 - protein, 11 aa, Artificial sequence
  Protein classification predicting sequence
TVARDVAALME

SEQ ID NO: 39837 - protein, 11 aa, Artificial sequence
  Protein classification predicting sequence
EDGYSEIAIWP

SEQ ID NO: 39838 - protein, 8 aa, Artificial sequence
  Protein classification predicting sequence
SADGPMNL

SEQ ID NO: 39839 - protein, 13 aa, Artificial sequence
  Protein classification predicting sequence
GFVLRNAEQPDDK

SEQ ID NO: 39840 - protein, 10 aa, Artificial sequence
  Protein classification predicting sequence
AHDLNPQKAR

SEQ ID NO: 39841 - protein, 24 aa, Artificial sequence
  Protein classification predicting sequence
NVVILATGGTIAGAGASAANSATY

SEQ ID NO: 39842 - protein, 9 aa, Artificial sequence
  Protein classification predicting sequence
NELPAEEGK

SEQ ID NO: 39843 - protein, 8 aa, Artificial sequence
  Protein classification predicting sequence
LDYNEAKG

SEQ ID NO: 39844 - protein, 8 aa, Artificial sequence
  Protein classification predicting sequence
LVEKMNVF

SEQ ID NO: 39845 - protein, 7 aa, Artificial sequence
  Protein classification predicting sequence
CFARVEP

SEQ ID NO: 39846 - protein, 10 aa, Artificial sequence
  Protein classification predicting sequence
LKFVARNYLE

SEQ ID NO: 39847 - protein, 26 aa, Artificial sequence
  Protein classification predicting sequence
VPDPRAVNQDKKNMLFSGTNIAAGKA

SEQ ID NO: 39848 - protein, 8 aa, Artificial sequence
  Protein classification predicting sequence
TEIGKIRD

SEQ ID NO: 39849 - protein, 16 aa, Artificial sequence
  Protein classification predicting sequence
FTLEFSRDRKSMSVYC

SEQ ID NO: 39850 - protein, 15 aa, Artificial sequence
  Protein classification predicting sequence
KMFVKGAPEGVIDRC

SEQ ID NO: 39851 - protein, 12 aa, Artificial sequence
  Protein classification predicting sequence
YVRVGTTRVPLT

SEQ ID NO: 39852 - protein, 19 aa, Artificial sequence
  Protein classification predicting sequence
WGTGRDTLRCLALATRDTP

SEQ ID NO: 39853 - protein, 12 aa, Artificial sequence
  Protein classification predicting sequence
ASEMVLADDNFS

SEQ ID NO: 39854 - protein, 27 aa, Artificial sequence
  Protein classification predicting sequence
PMTMALSVLVTIEMCNALNSLSENQSL

SEQ ID NO: 39855 - protein, 7 aa, Artificial sequence
  Protein classification predicting sequence
LSMSLHF

SEQ ID NO: 39856 - protein, 15 aa, Artificial sequence
  Protein classification predicting sequence
EQFEDLLVRILLLAA

SEQ ID NO: 39857 - protein, 10 aa, Artificial sequence
  Protein classification predicting sequence
VGVWQERNAE

SEQ ID NO: 39858 - protein, 16 aa, Artificial sequence
  Protein classification predicting sequence
DQSILTGESVSVIKHT

SEQ ID NO: 39859 - protein, 16 aa, Artificial sequence
  Protein classification predicting sequence
RAVNQDKKNMLFSGTN

SEQ ID NO: 39860 - protein, 16 aa, Artificial sequence
  Protein classification predicting sequence
AGIRVIMITGDNKGTA

SEQ ID NO: 39861 - protein, 9 aa, Artificial sequence
  Protein classification predicting sequence
AICRRIGIF

SEQ ID NO: 39862 - protein, 34 aa, Artificial sequence
  Protein classification predicting sequence
PEALIPVQLLWVNLVTDGLPATALGFNPPDLDIM

SEQ ID NO: 39863 - protein, 22 aa, Artificial sequence
  Protein classification predicting sequence
TPLQQKLDEFGEQLSKVISLIC

SEQ ID NO: 39864 - protein, 13 aa, Artificial sequence
  Protein classification predicting sequence
SFVLAWFEEGEET

SEQ ID NO: 39865 - protein, 15 aa, Artificial sequence
  Protein classification predicting sequence
AIEALKEYEPEMGKV

SEQ ID NO: 39866 - protein, 6 aa, Artificial sequence
  Protein classification predicting sequence
KLDEFG

SEQ ID NO: 39867 - protein, 34 aa, Artificial sequence
  Protein classification predicting sequence
YYFKIAVALAVAAIPEGLPAVITTCLALGTRRMA

SEQ ID NO: 39868 - protein, 16 aa, Artificial sequence
  Protein classification predicting sequence
DGLVELATICALCNDS

SEQ ID NO: 39869 - protein, 10 aa, Artificial sequence
  Protein classification predicting sequence
ACNSVIKQLM

SEQ ID NO: 39870 - protein, 9 aa, Artificial sequence
  Protein classification predicting sequence
KMFVKGAPE

SEQ ID NO: 39871 - protein, 37 aa, Artificial sequence
  Protein classification predicting sequence
IVAAVEEGRAIYNNMKQFIRYLISSNVGEVVCIFLTA

SEQ ID NO: 39872 - protein, 10 aa, Artificial sequence
  Protein classification predicting sequence
LISGWLFFRY

SEQ ID NO: 39873 - protein, 18 aa, Artificial sequence
  Protein classification predicting sequence
TMALSVLVTIEMCNALNS

SEQ ID NO: 39874 - protein, 6 aa, Artificial sequence
  Protein classification predicting sequence
LHFLIL

SEQ ID NO: 39875 - protein, 9 aa, Artificial sequence
  Protein classification predicting sequence
VARFQKIPN

SEQ ID NO: 39876 - protein, 9 aa, Artificial sequence
  Protein classification predicting sequence
AEVTGVGYN

SEQ ID NO: 39877 - protein, 17 aa, Artificial sequence
  Protein classification predicting sequence
FGEVIVDGDVVHGFYNP

SEQ ID NO: 39878 - protein, 93 aa, Artificial sequence
  Protein classification predicting sequence
VSRIVEAGCVCNDAVIRNNTLMGKPTEGALIALAMKMGLDGLQQDYIRKAEYPFSSEQKWMAVKCVHRTQQDRPEICFMKGAYEQVIKYCTTY

SEQ ID NO: 39879 - protein, 12 aa, Artificial sequence
  Protein classification predicting sequence
PCSKVTAPQPAA

SEQ ID NO: 39880 - protein, 106 aa, Artificial sequence
  Protein classification predicting sequence
VVAMTGDGVNDAVALKAADIGVAMGQTGTDVCKEAADMILVDDDFQTIMSAIEEGKGIYNNIKNFVRFQLSTSIAALTLISLATLMNFPNPLNAMQILWINIIMDG

SEQ ID NO: 39881 - protein, 8 aa, Artificial sequence
  Protein classification predicting sequence
KTGVTGPY

SEQ ID NO: 39882 - protein, 8 aa, Artificial sequence
  Protein classification predicting sequence
LSKEIYVI

SEQ ID NO: 39883 - protein, 10 aa, Artificial sequence
  Protein classification predicting sequence
LGPGVLQATR

SEQ ID NO: 39884 - protein, 27 aa, Artificial sequence
  Protein classification predicting sequence
GLIPEEFFQFLYPKTGVTGPYVLGTGL

SEQ ID NO: 39885 - protein, 20 aa, Artificial sequence
  Protein classification predicting sequence
QQALVQKRHYLFDVQRNNIA

SEQ ID NO: 39886 - protein, 11 aa, Artificial sequence
  Protein classification predicting sequence
QQEKETIAKCI

SEQ ID NO: 39887 - protein, 13 aa, Artificial sequence
  Protein classification predicting sequence
PLQVARREFQTSV

SEQ ID NO: 39888 - protein, 6 aa, Artificial sequence
  Protein classification predicting sequence
REFQTS

SEQ ID NO: 39889 - protein, 22 aa, Artificial sequence
  Protein classification predicting sequence
LIRAGSRVAYRPISASVLSRPE

SEQ ID NO: 39890 - protein, 8 aa, Artificial sequence
  Protein classification predicting sequence
FVQEYRSE

SEQ ID NO: 39891 - protein, 9 aa, Artificial sequence
  Protein classification predicting sequence
GDRVPADLR

SEQ ID NO: 39892 - protein, 14 aa, Artificial sequence
  Protein classification predicting sequence
VSLAVAAIPEGLPI

SEQ ID NO: 39893 - protein, 8 aa, Artificial sequence
  Protein classification predicting sequence
LPSVETLG

SEQ ID NO: 39894 - protein, 13 aa, Artificial sequence
  Protein classification predicting sequence
NPLNAMQILWINI

SEQ ID NO: 39895 - protein, 12 aa, Artificial sequence
  Protein classification predicting sequence
FVQEYRSEKSLE

SEQ ID NO: 39896 - protein, 8 aa, Artificial sequence
  Protein classification predicting sequence
MQILWINI

SEQ ID NO: 39897 - protein, 12 aa, Artificial sequence
  Protein classification predicting sequence
RDTTMTFTCFVF

SEQ ID NO: 39898 - protein, 8 aa, Artificial sequence
  Protein classification predicting sequence
TKSVFEIG

SEQ ID NO: 39899 - protein, 8 aa, Artificial sequence
  Protein classification predicting sequence
AIEEGKGI

SEQ ID NO: 39900 - protein, 9 aa, Artificial sequence
  Protein classification predicting sequence
VLIIACPCA

SEQ ID NO: 39901 - protein, 9 aa, Artificial sequence
  Protein classification predicting sequence
AMSLSSVSV

SEQ ID NO: 39902 - protein, 6 aa, Artificial sequence
  Protein classification predicting sequence
NLFWAF

SEQ ID NO: 39903 - protein, 8 aa, Artificial sequence
  Protein classification predicting sequence
GMTCASCV

SEQ ID NO: 39904 - protein, 12 aa, Artificial sequence
  Protein classification predicting sequence
ATMDTLVALGTG

SEQ ID NO: 39905 - protein, 7 aa, Artificial sequence
  Protein classification predicting sequence
AMIIGLI

SEQ ID NO: 39906 - protein, 6 aa, Artificial sequence
  Protein classification predicting sequence
LDESML

SEQ ID NO: 39907 - protein, 8 aa, Artificial sequence
  Protein classification predicting sequence
MLTGEPIP

SEQ ID NO: 39908 - protein, 10 aa, Artificial sequence
  Protein classification predicting sequence
CPCALGLATP

SEQ ID NO: 39909 - protein, 7 aa, Artificial sequence
  Protein classification predicting sequence
GSDVAIE

SEQ ID NO: 39910 - protein, 10 aa, Artificial sequence
  Protein classification predicting sequence
ATLRNMKQNL

SEQ ID NO: 39911 - protein, 7 aa, Artificial sequence
  Protein classification predicting sequence
AAGVLYP

SEQ ID NO: 39912 - protein, 22 aa, Artificial sequence
  Protein classification predicting sequence
PVVAGAAMALSSITVVSNANRL

SEQ ID NO: 39913 - protein, 7 aa, Artificial sequence
  Protein classification predicting sequence
GLSCGHC

SEQ ID NO: 39914 - protein, 8 aa, Artificial sequence
  Protein classification predicting sequence
GMSCASCV

SEQ ID NO: 39915 - protein, 24 aa, Artificial sequence
  Protein classification predicting sequence
FPMEARHLYYEASAMIIGLINLGH

SEQ ID NO: 39916 - protein, 15 aa, Artificial sequence
  Protein classification predicting sequence
LRLTTGDRVPVDGEI

SEQ ID NO: 39917 - protein, 14 aa, Artificial sequence
  Protein classification predicting sequence
DEAMLTGEPIPQQK

SEQ ID NO: 39918 - protein, 7 aa, Artificial sequence
  Protein classification predicting sequence
IWYFFGP

SEQ ID NO: 39919 - protein, 42 aa, Artificial sequence
  Protein classification predicting sequence
ATTVLIIACPCALGLATPMSIISGVGRAAEFGVLVRDADALQ

SEQ ID NO: 39920 - protein, 12 aa, Artificial sequence
  Protein classification predicting sequence
FRTLRGLGVSGE

SEQ ID NO: 39921 - protein, 9 aa, Artificial sequence
  Protein classification predicting sequence
LVMLTGDNP

SEQ ID NO: 39922 - protein, 12 aa, Artificial sequence
  Protein classification predicting sequence
TANAIAKEAGID

SEQ ID NO: 39923 - protein, 24 aa, Artificial sequence
  Protein classification predicting sequence
GDGINDAPALAQADVGIAMGGGSD

SEQ ID NO: 39924 - protein, 14 aa, Artificial sequence
  Protein classification predicting sequence
AIETAAITLMRHSL

SEQ ID NO: 39925 - protein, 7 aa, Artificial sequence
  Protein classification predicting sequence
PFTGTLL

SEQ ID NO: 39926 - protein, 28 aa, Artificial sequence
  Protein classification predicting sequence
PVVAGAAMALSSITVVSNANRLLRFKPK

SEQ ID NO: 39927 - protein, 7 aa, Artificial sequence
  Protein classification predicting sequence
MPYNPQA

SEQ ID NO: 39928 - protein, 13 aa, Artificial sequence
  Protein classification predicting sequence
NTAVSFVTNTNWQ

SEQ ID NO: 39929 - protein, 6 aa, Artificial sequence
  Protein classification predicting sequence
SYLTQM

SEQ ID NO: 39930 - protein, 6 aa, Artificial sequence
  Protein classification predicting sequence
GPVASQ

SEQ ID NO: 39931 - protein, 13 aa, Artificial sequence
  Protein classification predicting sequence
TTAASCGAVNAMH

SEQ ID NO: 39932 - protein, 7 aa, Artificial sequence
  Protein classification predicting sequence
SFTALGG

SEQ ID NO: 39933 - protein, 7 aa, Artificial sequence
  Protein classification predicting sequence
MQLGEVI

SEQ ID NO: 39934 - protein, 8 aa, Artificial sequence
  Protein classification predicting sequence
GPLFVGLL

SEQ ID NO: 39935 - protein, 8 aa, Artificial sequence
  Protein classification predicting sequence
VGGLTFLP

SEQ ID NO: 39936 - protein, 6 aa, Artificial sequence
  Protein classification predicting sequence
LAFNTA

SEQ ID NO: 39937 - protein, 9 aa, Artificial sequence
  Protein classification predicting sequence
LGTNGGGFF

SEQ ID NO: 39938 - protein, 6 aa, Artificial sequence
  Protein classification predicting sequence
NMEGKE

SEQ ID NO: 39939 - protein, 16 aa, Artificial sequence
  Protein classification predicting sequence
IIAVFISGLMVGRTPE

SEQ ID NO: 39940 - protein, 9 aa, Artificial sequence
  Protein classification predicting sequence
GLMVGRTPE

SEQ ID NO: 39941 - protein, 6 aa, Artificial sequence
  Protein classification predicting sequence
NTPFYN

SEQ ID NO: 39942 - protein, 6 aa, Artificial sequence
  Protein classification predicting sequence
LALGPI

SEQ ID NO: 39943 - protein, 8 aa, Artificial sequence
  Protein classification predicting sequence
LGPIGEQL

SEQ ID NO: 39944 - protein, 8 aa, Artificial sequence
  Protein classification predicting sequence
FLMFTSAA

SEQ ID NO: 39945 - protein, 7 aa, Artificial sequence
  Protein classification predicting sequence
RGPVASF

SEQ ID NO: 39946 - protein, 6 aa, Artificial sequence
  Protein classification predicting sequence
NGGGFF

SEQ ID NO: 39947 - protein, 6 aa, Artificial sequence
  Protein classification predicting sequence
SFVTNT

SEQ ID NO: 39948 - protein, 8 aa, Artificial sequence
  Protein classification predicting sequence
EGKEVRFG

SEQ ID NO: 39949 - protein, 10 aa, Artificial sequence
  Protein classification predicting sequence
NGGGFFGANS

SEQ ID NO: 39950 - protein, 6 aa, Artificial sequence
  Protein classification predicting sequence
HPFENP

SEQ ID NO: 39951 - protein, 10 aa, Artificial sequence
  Protein classification predicting sequence
ANNGSGFEGL

SEQ ID NO: 39952 - protein, 12 aa, Artificial sequence
  Protein classification predicting sequence
FRLQGVLPLNPA

SEQ ID NO: 39953 - protein, 27 aa, Artificial sequence
  Protein classification predicting sequence
SGFHGLTQVVYEYTSSAANNGSGFEGL

SEQ ID NO: 39954 - protein, 25 aa, Artificial sequence
  Protein classification predicting sequence
ITMLLFILVAKPTGIYLEKAFQGSK

SEQ ID NO: 39955 - protein, 19 aa, Artificial sequence
  Protein classification predicting sequence
LDKVFGPFEKLIFKITGVK

SEQ ID NO: 39956 - protein, 7 aa, Artificial sequence
  Protein classification predicting sequence
NGGGFFG

SEQ ID NO: 39957 - protein, 73 aa, Artificial sequence
  Protein classification predicting sequence
MGIEHVQGSTEGKEVRFGTVFSSLYATVTTAAETGAVNTMHDTLTPIGGLVPLVNMMLNTVYGGVGAGFVNII

SEQ ID NO: 39958 - protein, 18 aa, Artificial sequence
  Protein classification predicting sequence
FWNITTGLVMFLGRYFSL

SEQ ID NO: 39959 - protein, 26 aa, Artificial sequence
  Protein classification predicting sequence
TMLAVAASLKEKTVVPETVGTFRTDN

SEQ ID NO: 39960 - protein, 6 aa, Artificial sequence
  Protein classification predicting sequence
LTVQNF

SEQ ID NO: 39961 - protein, 11 aa, Artificial sequence
  Protein classification predicting sequence
GRTPEYLGKKI

SEQ ID NO: 39962 - protein, 8 aa, Artificial sequence
  Protein classification predicting sequence
LALAGSLA

SEQ ID NO: 39963 - protein, 6 aa, Artificial sequence
  Protein classification predicting sequence
GNFWVD

SEQ ID NO: 39964 - protein, 7 aa, Artificial sequence
  Protein classification predicting sequence
TLYVLLP

SEQ ID NO: 39965 - protein, 9 aa, Artificial sequence
  Protein classification predicting sequence
GLYGMLLFV

SEQ ID NO: 39966 - protein, 6 aa, Artificial sequence
  Protein classification predicting sequence
GRTPEY

SEQ ID NO: 39967 - protein, 6 aa, Artificial sequence
  Protein classification predicting sequence
MFVGRF

SEQ ID NO: 39968 - protein, 6 aa, Artificial sequence
  Protein classification predicting sequence
WKQYAL

SEQ ID NO: 39969 - protein, 7 aa, Artificial sequence
  Protein classification predicting sequence
GLTVQNF

SEQ ID NO: 39970 - protein, 11 aa, Artificial sequence
  Protein classification predicting sequence
MGPVASQEAIK

SEQ ID NO: 39971 - protein, 10 aa, Artificial sequence
  Protein classification predicting sequence
LGTNGGGFFN

SEQ ID NO: 39972 - protein, 6 aa, Artificial sequence
  Protein classification predicting sequence
GDRRQG

SEQ ID NO: 39973 - protein, 9 aa, Artificial sequence
  Protein classification predicting sequence
TTAASCGAV

SEQ ID NO: 39974 - protein, 10 aa, Artificial sequence
  Protein classification predicting sequence
AVLADAGRAG

SEQ ID NO: 39975 - protein, 7 aa, Artificial sequence
  Protein classification predicting sequence
PALALGP

SEQ ID NO: 39976 - protein, 7 aa, Artificial sequence
  Protein classification predicting sequence
FIGLLIG

SEQ ID NO: 39977 - protein, 6 aa, Artificial sequence
  Protein classification predicting sequence
NTAISF

SEQ ID NO: 39978 - protein, 9 aa, Artificial sequence
  Protein classification predicting sequence
TMSYLTQML

SEQ ID NO: 39979 - protein, 13 aa, Artificial sequence
  Protein classification predicting sequence
LPMGPVASQEAIK

SEQ ID NO: 39980 - protein, 13 aa, Artificial sequence
  Protein classification predicting sequence
LGTNGGGFFNANS

SEQ ID NO: 39981 - protein, 9 aa, Artificial sequence
  Protein classification predicting sequence
LTPIGGLVP

SEQ ID NO: 39982 - protein, 9 aa, Artificial sequence
  Protein classification predicting sequence
ILVTPTLVL

SEQ ID NO: 39983 - protein, 16 aa, Artificial sequence
  Protein classification predicting sequence
SAANNNGSAFAGLSAN

SEQ ID NO: 39984 - protein, 8 aa, Artificial sequence
  Protein classification predicting sequence
PALALGPV

SEQ ID NO: 39985 - protein, 7 aa, Artificial sequence
  Protein classification predicting sequence
EMNWKQY

SEQ ID NO: 39986 - protein, 6 aa, Artificial sequence
  Protein classification predicting sequence
SCGAVN

SEQ ID NO: 39987 - protein, 14 aa, Artificial sequence
  Protein classification predicting sequence
TSSAANNGSGFEGL

SEQ ID NO: 39988 - protein, 7 aa, Artificial sequence
  Protein classification predicting sequence
VMFLGRY

SEQ ID NO: 39989 - protein, 6 aa, Artificial sequence
  Protein classification predicting sequence
MFTSAA

SEQ ID NO: 39990 - protein, 7 aa, Artificial sequence
  Protein classification predicting sequence
VFIAGLM

SEQ ID NO: 39991 - protein, 12 aa, Artificial sequence
  Protein classification predicting sequence
NNGSAFAGLSAN

SEQ ID NO: 39992 - protein, 6 aa, Artificial sequence
  Protein classification predicting sequence
NTAVSF

SEQ ID NO: 39993 - protein, 7 aa, Artificial sequence
  Protein classification predicting sequence
SFLTNTN

SEQ ID NO: 39994 - protein, 6 aa, Artificial sequence
  Protein classification predicting sequence
LYVLLP

SEQ ID NO: 39995 - protein, 7 aa, Artificial sequence
  Protein classification predicting sequence
ASQVAIK

SEQ ID NO: 39996 - protein, 24 aa, Artificial sequence
  Protein classification predicting sequence
ASQVAIKMLGTNGGGFFNANAAHP

SEQ ID NO: 39997 - protein, 6 aa, Artificial sequence
  Protein classification predicting sequence
QMLAIF

SEQ ID NO: 39998 - protein, 9 aa, Artificial sequence
  Protein classification predicting sequence
GAVNAMHDS

SEQ ID NO: 39999 - protein, 8 aa, Artificial sequence
  Protein classification predicting sequence
GLMVGRTP

SEQ ID NO: 40000 - protein, 8 aa, Artificial sequence
  Protein classification predicting sequence
IVIVGALT

SEQ ID NO: 40001 - protein, 7 aa, Artificial sequence
  Protein classification predicting sequence
PLGSGLA

SEQ ID NO: 40002 - protein, 12 aa, Artificial sequence
  Protein classification predicting sequence
AMHDSFTALGGM

SEQ ID NO: 40003 - protein, 26 aa, Artificial sequence
  Protein classification predicting sequence
GLLIGTVLLVGALTFIPALALGPVAE

SEQ ID NO: 40004 - protein, 20 aa, Artificial sequence
  Protein classification predicting sequence
GDRRQGRMLLWAMSVIFVIC

SEQ ID NO: 40005 - protein, 6 aa, Artificial sequence
  Protein classification predicting sequence
ASSGTL

SEQ ID NO: 40006 - protein, 11 aa, Artificial sequence
  Protein classification predicting sequence
GLTVQNFLSAA

SEQ ID NO: 40007 - protein, 7 aa, Artificial sequence
  Protein classification predicting sequence
FALIRAF

SEQ ID NO: 40008 - protein, 6 aa, Artificial sequence
  Protein classification predicting sequence
TLGNAW

SEQ ID NO: 40009 - protein, 7 aa, Artificial sequence
  Protein classification predicting sequence
DLLRITL

SEQ ID NO: 40010 - protein, 6 aa, Artificial sequence
  Protein classification predicting sequence
NLEGKE

SEQ ID NO: 40011 - protein, 10 aa, Artificial sequence
  Protein classification predicting sequence
VFIAGLMIGR

SEQ ID NO: 40012 - protein, 16 aa, Artificial sequence
  Protein classification predicting sequence
GILNPGAHGFSEVLYA

SEQ ID NO: 40013 - protein, 6 aa, Artificial sequence
  Protein classification predicting sequence
TNLQHY

SEQ ID NO: 40014 - protein, 7 aa, Artificial sequence
  Protein classification predicting sequence
IGNFYQD

SEQ ID NO: 40015 - protein, 7 aa, Artificial sequence
  Protein classification predicting sequence
LALGPVA

SEQ ID NO: 40016 - protein, 7 aa, Artificial sequence
  Protein classification predicting sequence
FWNISTG

SEQ ID NO: 40017 - protein, 6 aa, Artificial sequence
  Protein classification predicting sequence
GTFRTD

SEQ ID NO: 40018 - protein, 7 aa, Artificial sequence
  Protein classification predicting sequence
GALTFFP

SEQ ID NO: 40019 - protein, 8 aa, Artificial sequence
  Protein classification predicting sequence
GAVNTMHD

SEQ ID NO: 40020 - protein, 7 aa, Artificial sequence
  Protein classification predicting sequence
MHDSLTP

SEQ ID NO: 40021 - protein, 8 aa, Artificial sequence
  Protein classification predicting sequence
GGVGSGLY

SEQ ID NO: 40022 - protein, 6 aa, Artificial sequence
  Protein classification predicting sequence
NPGAHG

SEQ ID NO: 40023 - protein, 6 aa, Artificial sequence
  Protein classification predicting sequence
QHYSGE

SEQ ID NO: 40024 - protein, 5 aa, Artificial sequence
  Protein classification predicting sequence
NSAHP

SEQ ID NO: 40025 - protein, 8 aa, Artificial sequence
  Protein classification predicting sequence
IWGGQGTG

SEQ ID NO: 40026 - protein, 7 aa, Artificial sequence
  Protein classification predicting sequence
GFSEVLY

SEQ ID NO: 40027 - protein, 7 aa, Artificial sequence
  Protein classification predicting sequence
FVGLLIG

SEQ ID NO: 40028 - protein, 11 aa, Artificial sequence
  Protein classification predicting sequence
TNTNWQAYSGE

SEQ ID NO: 40029 - protein, 6 aa, Artificial sequence
  Protein classification predicting sequence
QNFLSA

SEQ ID NO: 40030 - protein, 11 aa, Artificial sequence
  Protein classification predicting sequence
TLYVLLPLSFI

SEQ ID NO: 40031 - protein, 6 aa, Artificial sequence
  Protein classification predicting sequence
SEILYA

SEQ ID NO: 40032 - protein, 6 aa, Artificial sequence
  Protein classification predicting sequence
TNTNWQ

SEQ ID NO: 40033 - protein, 7 aa, Artificial sequence
  Protein classification predicting sequence
VPMWLMQ

SEQ ID NO: 40034 - protein, 8 aa, Artificial sequence
  Protein classification predicting sequence
NNGSAFAG

SEQ ID NO: 40035 - protein, 7 aa, Artificial sequence
  Protein classification predicting sequence
LGLAMWF

SEQ ID NO: 40036 - protein, 8 aa, Artificial sequence
  Protein classification predicting sequence
NSAHPFEN

SEQ ID NO: 40037 - protein, 7 aa, Artificial sequence
  Protein classification predicting sequence
ALCFAFG

SEQ ID NO: 40038 - protein, 7 aa, Artificial sequence
  Protein classification predicting sequence
GPVASQE

SEQ ID NO: 40039 - protein, 6 aa, Artificial sequence
  Protein classification predicting sequence
TNGGGF

SEQ ID NO: 40040 - protein, 7 aa, Artificial sequence
  Protein classification predicting sequence
GPHGLSE

SEQ ID NO: 40041 - protein, 9 aa, Artificial sequence
  Protein classification predicting sequence
HGFSEVLYA

SEQ ID NO: 40042 - protein, 8 aa, Artificial sequence
  Protein classification predicting sequence
WDLALNTA

SEQ ID NO: 40043 - protein, 7 aa, Artificial sequence
  Protein classification predicting sequence
WQAYSGE

SEQ ID NO: 40044 - protein, 12 aa, Artificial sequence
  Protein classification predicting sequence
WQAYSGENTLSY

SEQ ID NO: 40045 - protein, 12 aa, Artificial sequence
  Protein classification predicting sequence
PMGPVASQEAIK

SEQ ID NO: 40046 - protein, 9 aa, Artificial sequence
  Protein classification predicting sequence
NNGSAFAGL

SEQ ID NO: 40047 - protein, 9 aa, Artificial sequence
  Protein classification predicting sequence
GALTFIPAL

SEQ ID NO: 40048 - protein, 8 aa, Artificial sequence
  Protein classification predicting sequence
TSTGAVDS

SEQ ID NO: 40049 - protein, 7 aa, Artificial sequence
  Protein classification predicting sequence
MHDSFTA

SEQ ID NO: 40050 - protein, 6 aa, Artificial sequence
  Protein classification predicting sequence
VFIAGL

SEQ ID NO: 40051 - protein, 8 aa, Artificial sequence
  Protein classification predicting sequence
TLYVLLPL

SEQ ID NO: 40052 - protein, 24 aa, Artificial sequence
  Protein classification predicting sequence
IPLGPAASQIAIKQLGTNGGGFFG

SEQ ID NO: 40053 - protein, 10 aa, Artificial sequence
  Protein classification predicting sequence
LGTNGGGFFG

SEQ ID NO: 40054 - protein, 7 aa, Artificial sequence
  Protein classification predicting sequence
VNAMHDS

SEQ ID NO: 40055 - protein, 8 aa, Artificial sequence
  Protein classification predicting sequence
EGKESRFG

SEQ ID NO: 40056 - protein, 8 aa, Artificial sequence
  Protein classification predicting sequence
LVWQGVPQ

SEQ ID NO: 40057 - protein, 7 aa, Artificial sequence
  Protein classification predicting sequence
GPAASQI

SEQ ID NO: 40058 - protein, 9 aa, Artificial sequence
  Protein classification predicting sequence
SFVTNTNWQ

SEQ ID NO: 40059 - protein, 8 aa, Artificial sequence
  Protein classification predicting sequence
VQNFLSAA

SEQ ID NO: 40060 - protein, 7 aa, Artificial sequence
  Protein classification predicting sequence
ASQEAIK

SEQ ID NO: 40061 - protein, 6 aa, Artificial sequence
  Protein classification predicting sequence
NFVQML

SEQ ID NO: 40062 - protein, 12 aa, Artificial sequence
  Protein classification predicting sequence
GRTPEYLGKKIE

SEQ ID NO: 40063 - protein, 8 aa, Artificial sequence
  Protein classification predicting sequence
GTAVAVLA

SEQ ID NO: 40064 - protein, 8 aa, Artificial sequence
  Protein classification predicting sequence
PLERGLYR

SEQ ID NO: 40065 - protein, 8 aa, Artificial sequence
  Protein classification predicting sequence
GESTMSYL

SEQ ID NO: 40066 - protein, 8 aa, Artificial sequence
  Protein classification predicting sequence
GGNMEGKE

SEQ ID NO: 40067 - protein, 13 aa, Artificial sequence
  Protein classification predicting sequence
GGNMEGKETRFGI

SEQ ID NO: 40068 - protein, 7 aa, Artificial sequence
  Protein classification predicting sequence
LYATVTT

SEQ ID NO: 40069 - protein, 7 aa, Artificial sequence
  Protein classification predicting sequence
GSGLYGM

SEQ ID NO: 40070 - protein, 12 aa, Artificial sequence
  Protein classification predicting sequence
AVVTTAASCGAV

SEQ ID NO: 40071 - protein, 23 aa, Artificial sequence
  Protein classification predicting sequence
LPGLSWDLALNTAVSFVTNTNWQ

SEQ ID NO: 40072 - protein, 9 aa, Artificial sequence
  Protein classification predicting sequence
IALFFIQQG

SEQ ID NO: 40073 - protein, 9 aa, Artificial sequence
  Protein classification predicting sequence
QMLAIFLIP

SEQ ID NO: 40074 - protein, 15 aa, Artificial sequence
  Protein classification predicting sequence
VVMWAEVQGNPHLLA

SEQ ID NO: 40075 - protein, 41 aa, Artificial sequence
  Protein classification predicting sequence
QLLPMGPVASQEAIKMLGTNGGGFFNANSSHPFENPTALTN

SEQ ID NO: 40076 - protein, 31 aa, Artificial sequence
  Protein classification predicting sequence
LFVLLAVFIAGLMIGRTPEYLGKKIDVREMK

SEQ ID NO: 40077 - protein, 11 aa, Artificial sequence
  Protein classification predicting sequence
KIEGKEMKLIA

SEQ ID NO: 40078 - protein, 8 aa, Artificial sequence
  Protein classification predicting sequence
VASQEAIK

SEQ ID NO: 40079 - protein, 6 aa, Artificial sequence
  Protein classification predicting sequence
GTNGGG

SEQ ID NO: 40080 - protein, 8 aa, Artificial sequence
  Protein classification predicting sequence
RFGVGGSS

SEQ ID NO: 40081 - protein, 7 aa, Artificial sequence
  Protein classification predicting sequence
GAHGFSE

SEQ ID NO: 40082 - protein, 5 aa, Artificial sequence
  Protein classification predicting sequence
NTNWQ

SEQ ID NO: 40083 - protein, 8 aa, Artificial sequence
  Protein classification predicting sequence
ILLIPVAL

SEQ ID NO: 40084 - protein, 7 aa, Artificial sequence
  Protein classification predicting sequence
SFVTNTN

SEQ ID NO: 40085 - protein, 6 aa, Artificial sequence
  Protein classification predicting sequence
LSYFSQ

SEQ ID NO: 40086 - protein, 5 aa, Artificial sequence
  Protein classification predicting sequence
PFENP

SEQ ID NO: 40087 - protein, 14 aa, Artificial sequence
  Protein classification predicting sequence
LESIKHLGTNGGGF

SEQ ID NO: 40088 - protein, 7 aa, Artificial sequence
  Protein classification predicting sequence
LMMLLPT

SEQ ID NO: 40089 - protein, 8 aa, Artificial sequence
  Protein classification predicting sequence
GRTPEYLG

SEQ ID NO: 40090 - protein, 6 aa, Artificial sequence
  Protein classification predicting sequence
HGLTQV

SEQ ID NO: 40091 - protein, 8 aa, Artificial sequence
  Protein classification predicting sequence
GFLLIASF

SEQ ID NO: 40092 - protein, 11 aa, Artificial sequence
  Protein classification predicting sequence
PALALGPVAEH

SEQ ID NO: 40093 - protein, 11 aa, Artificial sequence
  Protein classification predicting sequence
NVIATSGRAVE

SEQ ID NO: 40094 - protein, 8 aa, Artificial sequence
  Protein classification predicting sequence
ATSGRAVE

SEQ ID NO: 40095 - protein, 8 aa, Artificial sequence
  Protein classification predicting sequence
LDKTGTIT

SEQ ID NO: 40096 - protein, 12 aa, Artificial sequence
  Protein classification predicting sequence
LDKTGTITLGNR

SEQ ID NO: 40097 - protein, 7 aa, Artificial sequence
  Protein classification predicting sequence
EAGVDDF

SEQ ID NO: 40098 - protein, 6 aa, Artificial sequence
  Protein classification predicting sequence
AEATPE

SEQ ID NO: 40099 - protein, 6 aa, Artificial sequence
  Protein classification predicting sequence
IGKQLL

SEQ ID NO: 40100 - protein, 20 aa, Artificial sequence
  Protein classification predicting sequence
LVAMTGDGTNDAPALAQADV

SEQ ID NO: 40101 - protein, 25 aa, Artificial sequence
  Protein classification predicting sequence
LVAMTGDGTNDAPALAQADVAVAMN

SEQ ID NO: 40102 - protein, 9 aa, Artificial sequence
  Protein classification predicting sequence
TRGALTTFS

SEQ ID NO: 40103 - protein, 13 aa, Artificial sequence
  Protein classification predicting sequence
IKNPIMFVVEVGM

SEQ ID NO: 40104 - protein, 7 aa, Artificial sequence
  Protein classification predicting sequence
SFLDKMI

SEQ ID NO: 40105 - protein, 8 aa, Artificial sequence
  Protein classification predicting sequence
KTPNEIAL

SEQ ID NO: 40106 - protein, 5 aa, Artificial sequence
  Protein classification predicting sequence
TRMSG

SEQ ID NO: 40107 - protein, 7 aa, Artificial sequence
  Protein classification predicting sequence
KGAPNSM

SEQ ID NO: 40108 - protein, 8 aa, Artificial sequence
  Protein classification predicting sequence
LGVIYLKD

SEQ ID NO: 40109 - protein, 18 aa, Artificial sequence
  Protein classification predicting sequence
LGVIYLKDVIKDGLVERF

SEQ ID NO: 40110 - protein, 12 aa, Artificial sequence
  Protein classification predicting sequence
MGIETVMCTGDN

SEQ ID NO: 40111 - protein, 15 aa, Artificial sequence
  Protein classification predicting sequence
VAMTGDGTNDAPALA

SEQ ID NO: 40112 - protein, 18 aa, Artificial sequence
  Protein classification predicting sequence
SAKEAANLIDLDSNPTKL

SEQ ID NO: 40113 - protein, 9 aa, Artificial sequence
  Protein classification predicting sequence
LTTFSIAND

SEQ ID NO: 40114 - protein, 8 aa, Artificial sequence
  Protein classification predicting sequence
SAVLSALI

SEQ ID NO: 40115 - protein, 26 aa, Artificial sequence
  Protein classification predicting sequence
GLATVDESAITGESAPVIKESGGDFD

SEQ ID NO: 40116 - protein, 25 aa, Artificial sequence
  Protein classification predicting sequence
LTAATIAKEAGVDRFVAECKPEDKI

SEQ ID NO: 40117 - protein, 22 aa, Artificial sequence
  Protein classification predicting sequence
EQAKGHIVAMTGDGTNDAPALA

SEQ ID NO: 40118 - protein, 6 aa, Artificial sequence
  Protein classification predicting sequence
RNPVMF

SEQ ID NO: 40119 - protein, 6 aa, Artificial sequence
  Protein classification predicting sequence
AQADSL

SEQ ID NO: 40120 - protein, 14 aa, Artificial sequence
  Protein classification predicting sequence
SVDESAITGESAPV

SEQ ID NO: 40121 - protein, 7 aa, Artificial sequence
  Protein classification predicting sequence
LVEGAER

SEQ ID NO: 40122 - protein, 7 aa, Artificial sequence
  Protein classification predicting sequence
GVIYLKD

SEQ ID NO: 40123 - protein, 7 aa, Artificial sequence
  Protein classification predicting sequence
KGDIVLV

SEQ ID NO: 40124 - protein, 6 aa, Artificial sequence
  Protein classification predicting sequence
ESGGDF

SEQ ID NO: 40125 - protein, 15 aa, Artificial sequence
  Protein classification predicting sequence
VEGASRKKTPNEIAL

SEQ ID NO: 40126 - protein, 24 aa, Artificial sequence
  Protein classification predicting sequence
VCLIPTTIGGLLSAIGIAGMDRVT

SEQ ID NO: 40127 - protein, 8 aa, Artificial sequence
  Protein classification predicting sequence
TPEGKSIV

SEQ ID NO: 40128 - protein, 14 aa, Artificial sequence
  Protein classification predicting sequence
AECKPEDKIKVIKD

SEQ ID NO: 40129 - protein, 6 aa, Artificial sequence
  Protein classification predicting sequence
AMNSGT

SEQ ID NO: 40130 - protein, 13 aa, Artificial sequence
  Protein classification predicting sequence
TRGALTTFSIAND

SEQ ID NO: 40131 - protein, 7 aa, Artificial sequence
  Protein classification predicting sequence
LIPTTIG

SEQ ID NO: 40132 - protein, 14 aa, Artificial sequence
  Protein classification predicting sequence
LLLDKTGTITLGNR

SEQ ID NO: 40133 - protein, 10 aa, Artificial sequence
  Protein classification predicting sequence
EQELADAAQL

SEQ ID NO: 40134 - protein, 7 aa, Artificial sequence
  Protein classification predicting sequence
LADAAQL

SEQ ID NO: 40135 - protein, 13 aa, Artificial sequence
  Protein classification predicting sequence
SLADETPEGRSIV

SEQ ID NO: 40136 - protein, 16 aa, Artificial sequence
  Protein classification predicting sequence
TAAAIAAEAGVDDFLA

SEQ ID NO: 40137 - protein, 7 aa, Artificial sequence
  Protein classification predicting sequence
IFNALII

SEQ ID NO: 40138 - protein, 12 aa, Artificial sequence
  Protein classification predicting sequence
LIPLSLKGVKYR

SEQ ID NO: 40139 - protein, 7 aa, Artificial sequence
  Protein classification predicting sequence
AEGRGKA

SEQ ID NO: 40140 - protein, 16 aa, Artificial sequence
  Protein classification predicting sequence
AITGESAPVIRESGGD

SEQ ID NO: 40141 - protein, 24 aa, Artificial sequence
  Protein classification predicting sequence
AITGESAPVIRESGGDRSAVTGGT

SEQ ID NO: 40142 - protein, 7 aa, Artificial sequence
  Protein classification predicting sequence
GIAGMDR

SEQ ID NO: 40143 - protein, 12 aa, Artificial sequence
  Protein classification predicting sequence
SLADETPEGRSI

SEQ ID NO: 40144 - protein, 6 aa, Artificial sequence
  Protein classification predicting sequence
FTAQTR

SEQ ID NO: 40145 - protein, 11 aa, Artificial sequence
  Protein classification predicting sequence
NMVDLDSDPTK

SEQ ID NO: 40146 - protein, 12 aa, Artificial sequence
  Protein classification predicting sequence
SAILSAVIFNAL

SEQ ID NO: 40147 - protein, 8 aa, Artificial sequence
  Protein classification predicting sequence
AGKLLSRN

SEQ ID NO: 40148 - protein, 7 aa, Artificial sequence
  Protein classification predicting sequence
MFVVEVG

SEQ ID NO: 40149 - protein, 15 aa, Artificial sequence
  Protein classification predicting sequence
ALLVCLIPTTIGGLL

SEQ ID NO: 40150 - protein, 16 aa, Artificial sequence
  Protein classification predicting sequence
VCLIPTTIGGLLSAIG

SEQ ID NO: 40151 - protein, 10 aa, Artificial sequence
  Protein classification predicting sequence
LIPTTIGGLL

SEQ ID NO: 40152 - protein, 9 aa, Artificial sequence
  Protein classification predicting sequence
AECKPEDKI

SEQ ID NO: 40153 - protein, 16 aa, Artificial sequence
  Protein classification predicting sequence
AGDVDVLLLDKTGTIT

SEQ ID NO: 40154 - protein, 10 aa, Artificial sequence
  Protein classification predicting sequence
LLLDKTGTIT

SEQ ID NO: 40155 - protein, 7 aa, Artificial sequence
  Protein classification predicting sequence
RQGATPL

SEQ ID NO: 40156 - protein, 7 aa, Artificial sequence
  Protein classification predicting sequence
MIAMVEG

SEQ ID NO: 40157 - protein, 7 aa, Artificial sequence
  Protein classification predicting sequence
PTTIGAL

SEQ ID NO: 40158 - protein, 11 aa, Artificial sequence
  Protein classification predicting sequence
SSIGIAGMSRL

SEQ ID NO: 40159 - protein, 6 aa, Artificial sequence
  Protein classification predicting sequence
AMSGRA

SEQ ID NO: 40160 - protein, 22 aa, Artificial sequence
  Protein classification predicting sequence
EAAGDVDVLLLDKTGTITLGNR

SEQ ID NO: 40161 - protein, 11 aa, Artificial sequence
  Protein classification predicting sequence
ADETAEGRSIV

SEQ ID NO: 40162 - protein, 7 aa, Artificial sequence
  Protein classification predicting sequence
RKMGIKT

SEQ ID NO: 40163 - protein, 7 aa, Artificial sequence
  Protein classification predicting sequence
MITGDNP

SEQ ID NO: 40164 - protein, 21 aa, Artificial sequence
  Protein classification predicting sequence
LVAMTGDGTNDAPALAQADVA

SEQ ID NO: 40165 - protein, 9 aa, Artificial sequence
  Protein classification predicting sequence
DLDSSPTKL

SEQ ID NO: 40166 - protein, 6 aa, Artificial sequence
  Protein classification predicting sequence
EGRSIV

SEQ ID NO: 40167 - protein, 13 aa, Artificial sequence
  Protein classification predicting sequence
AAKEAGNMVDLDS

SEQ ID NO: 40168 - protein, 9 aa, Artificial sequence
  Protein classification predicting sequence
LTTFSVAND

SEQ ID NO: 40169 - protein, 8 aa, Artificial sequence
  Protein classification predicting sequence
ANDVAKYF

SEQ ID NO: 40170 - protein, 13 aa, Artificial sequence
  Protein classification predicting sequence
LWFTVLFANFAEA

SEQ ID NO: 40171 - protein, 8 aa, Artificial sequence
  Protein classification predicting sequence
MIALVEGA

SEQ ID NO: 40172 - protein, 11 aa, Artificial sequence
  Protein classification predicting sequence
LSAVIFNALVI

SEQ ID NO: 40173 - protein, 7 aa, Artificial sequence
  Protein classification predicting sequence
TPNEIAL

SEQ ID NO: 40174 - protein, 6 aa, Artificial sequence
  Protein classification predicting sequence
FVPFTA

SEQ ID NO: 40175 - protein, 15 aa, Artificial sequence
  Protein classification predicting sequence
GDGTNDAPALAQADV

SEQ ID NO: 40176 - protein, 8 aa, Artificial sequence
  Protein classification predicting sequence
PTKLIEVV

SEQ ID NO: 40177 - protein, 9 aa, Artificial sequence
  Protein classification predicting sequence
AEGRGKAQA

SEQ ID NO: 40178 - protein, 6 aa, Artificial sequence
  Protein classification predicting sequence
LLSAIG

SEQ ID NO: 40179 - protein, 10 aa, Artificial sequence
  Protein classification predicting sequence
HATFVPFTAQ

SEQ ID NO: 40180 - protein, 14 aa, Artificial sequence
  Protein classification predicting sequence
EAGVDDFLAEATPE

SEQ ID NO: 40181 - protein, 9 aa, Artificial sequence
  Protein classification predicting sequence
DLDSNPTKL

SEQ ID NO: 40182 - protein, 7 aa, Artificial sequence
  Protein classification predicting sequence
GKQLLMT

SEQ ID NO: 40183 - protein, 16 aa, Artificial sequence
  Protein classification predicting sequence
LTTFSIANDVAKYFAI

SEQ ID NO: 40184 - protein, 22 aa, Artificial sequence
  Protein classification predicting sequence
AITGESAPVIRESGGDRSAVTG

SEQ ID NO: 40185 - protein, 7 aa, Artificial sequence
  Protein classification predicting sequence
RQKTPNE

SEQ ID NO: 40186 - protein, 12 aa, Artificial sequence
  Protein classification predicting sequence
LLSAIGIAGMDR

SEQ ID NO: 40187 - protein, 7 aa, Artificial sequence
  Protein classification predicting sequence
RKGAVDA

SEQ ID NO: 40188 - protein, 6 aa, Artificial sequence
  Protein classification predicting sequence
GRLVAM

SEQ ID NO: 40189 - protein, 11 aa, Artificial sequence
  Protein classification predicting sequence
FNALIIVALIP

SEQ ID NO: 40190 - protein, 15 aa, Artificial sequence
  Protein classification predicting sequence
ASVDESAITGESAPV

SEQ ID NO: 40191 - protein, 30 aa, Artificial sequence
  Protein classification predicting sequence
TVLVALLVCLIPTTIGGLLSAIGVAGMSRM

SEQ ID NO: 40192 - protein, 29 aa, Artificial sequence
  Protein classification predicting sequence
ANVIATSGRAVEAAGDVDVLLLDKTGTIT

SEQ ID NO: 40193 - protein, 44 aa, Artificial sequence
  Protein classification predicting sequence
GRLVAMTGDGTNDAPALAQADVAVAMNSGTQAAKEAGNMVDLDS

SEQ ID NO: 40194 - protein, 16 aa, Artificial sequence
  Protein classification predicting sequence
GTQAAKEAGNMVDLDS

SEQ ID NO: 40195 - protein, 33 aa, Artificial sequence
  Protein classification predicting sequence
IGKQMLMTRGSLTTFSIANDVAKYFAIIPAAFA

SEQ ID NO: 40196 - protein, 10 aa, Artificial sequence
  Protein classification predicting sequence
SAVIFNALII

SEQ ID NO: 40197 - protein, 9 aa, Artificial sequence
  Protein classification predicting sequence
LIPLALKGV

SEQ ID NO: 40198 - protein, 8 aa, Artificial sequence
  Protein classification predicting sequence
SVTVLVAL

SEQ ID NO: 40199 - protein, 6 aa, Artificial sequence
  Protein classification predicting sequence
ATPEDK

SEQ ID NO: 40200 - protein, 6 aa, Artificial sequence
  Protein classification predicting sequence
LNIMHL

SEQ ID NO: 40201 - protein, 11 aa, Artificial sequence
  Protein classification predicting sequence
GGDRSAVTGGT

SEQ ID NO: 40202 - protein, 12 aa, Artificial sequence
  Protein classification predicting sequence
SGRAVEAAGDVD

SEQ ID NO: 40203 - protein, 7 aa, Artificial sequence
  Protein classification predicting sequence
MGIRTVM

SEQ ID NO: 40204 - protein, 10 aa, Artificial sequence
  Protein classification predicting sequence
TVLFANFAEA

SEQ ID NO: 40205 - protein, 44 aa, Artificial sequence
  Protein classification predicting sequence
AGDIIPCDGEVIEGGASVDESAITGESAPVIRESGGDFASVTGG

SEQ ID NO: 40206 - protein, 33 aa, Artificial sequence
  Protein classification predicting sequence
TVLFANFAEALAEGRSKAQANSLKGVKKTAFAR

SEQ ID NO: 40207 - protein, 54 aa, Artificial sequence
  Protein classification predicting sequence
AGDIIPCDGEVIEGGASVDESAITGESAPVIRESGGDFASVTGGTRILSDWLVI

SEQ ID NO: 40208 - protein, 6 aa, Artificial sequence
  Protein classification predicting sequence
PVMFVV

SEQ ID NO: 40209 - protein, 6 aa, Artificial sequence
  Protein classification predicting sequence
FIDRMI

SEQ ID NO: 40210 - protein, 7 aa, Artificial sequence
  Protein classification predicting sequence
HLKDVVK

SEQ ID NO: 40211 - protein, 6 aa, Artificial sequence
  Protein classification predicting sequence
EAGVDD

SEQ ID NO: 40212 - protein, 6 aa, Artificial sequence
  Protein classification predicting sequence
PTKLIE

SEQ ID NO: 40213 - protein, 8 aa, Artificial sequence
  Protein classification predicting sequence
VEIGKQLL

SEQ ID NO: 40214 - protein, 10 aa, Artificial sequence
  Protein classification predicting sequence
SPDSAILSAV

SEQ ID NO: 40215 - protein, 6 aa, Artificial sequence
  Protein classification predicting sequence
FNALII

SEQ ID NO: 40216 - protein, 7 aa, Artificial sequence
  Protein classification predicting sequence
PLALKGV

SEQ ID NO: 40217 - protein, 6 aa, Artificial sequence
  Protein classification predicting sequence
PFIGIK

SEQ ID NO: 40218 - protein, 17 aa, Artificial sequence
  Protein classification predicting sequence
EAGVDDFIAEATPEDKI

SEQ ID NO: 40219 - protein, 7 aa, Artificial sequence
  Protein classification predicting sequence
DGEVIEG

SEQ ID NO: 40220 - protein, 7 aa, Artificial sequence
  Protein classification predicting sequence
TVMCTGD

SEQ ID NO: 40221 - protein, 11 aa, Artificial sequence
  Protein classification predicting sequence
GDGTNDAPALA

SEQ ID NO: 40222 - protein, 8 aa, Artificial sequence
  Protein classification predicting sequence
GTQAAKEA

SEQ ID NO: 40223 - protein, 8 aa, Artificial sequence
  Protein classification predicting sequence
PFIAIKLI

SEQ ID NO: 40224 - protein, 12 aa, Artificial sequence
  Protein classification predicting sequence
DESAITGESAPV

SEQ ID NO: 40225 - protein, 7 aa, Artificial sequence
  Protein classification predicting sequence
AVEAAGD

SEQ ID NO: 40226 - protein, 6 aa, Artificial sequence
  Protein classification predicting sequence
KTPNEI

SEQ ID NO: 40227 - protein, 7 aa, Artificial sequence
  Protein classification predicting sequence
TGESAPV

SEQ ID NO: 40228 - protein, 7 aa, Artificial sequence
  Protein classification predicting sequence
AIGIAGM

SEQ ID NO: 40229 - protein, 12 aa, Artificial sequence
  Protein classification predicting sequence
MGIKTVMITGDN

SEQ ID NO: 40230 - protein, 8 aa, Artificial sequence
  Protein classification predicting sequence
TVMITGDN

SEQ ID NO: 40231 - protein, 7 aa, Artificial sequence
  Protein classification predicting sequence
ALIPLAL

SEQ ID NO: 40232 - protein, 18 aa, Artificial sequence
  Protein classification predicting sequence
VNPGETFLDRMIAMVEGA

SEQ ID NO: 40233 - protein, 13 aa, Artificial sequence
  Protein classification predicting sequence
ALTIVFLLATATL

SEQ ID NO: 40234 - protein, 12 aa, Artificial sequence
  Protein classification predicting sequence
LAKQRFNLRERD

SEQ ID NO: 40235 - protein, 15 aa, Artificial sequence
  Protein classification predicting sequence
ALKDIVKGGIKERFA

SEQ ID NO: 40236 - protein, 8 aa, Artificial sequence
  Protein classification predicting sequence
YFHGRPSA

SEQ ID NO: 40237 - protein, 7 aa, Artificial sequence
  Protein classification predicting sequence
SGGSNLA

SEQ ID NO: 40238 - protein, 7 aa, Artificial sequence
  Protein classification predicting sequence
GSALIGQ

SEQ ID NO: 40239 - protein, 7 aa, Artificial sequence
  Protein classification predicting sequence
SGSGLDP

SEQ ID NO: 40240 - protein, 6 aa, Artificial sequence
  Protein classification predicting sequence
LIGQNF

SEQ ID NO: 40241 - protein, 11 aa, Artificial sequence
  Protein classification predicting sequence
GYFHGRPSATA

SEQ ID NO: 40242 - protein, 11 aa, Artificial sequence
  Protein classification predicting sequence
ARVAALRAANP

SEQ ID NO: 40243 - protein, 15 aa, Artificial sequence
  Protein classification predicting sequence
GQPVVNIVELNLALD

SEQ ID NO: 40244 - protein, 8 aa, Artificial sequence
  Protein classification predicting sequence
GEPRVNVL

SEQ ID NO: 40245 - protein, 8 aa, Artificial sequence
  Protein classification predicting sequence
FEDPKFEV

SEQ ID NO: 40246 - protein, 14 aa, Artificial sequence
  Protein classification predicting sequence
AAVTYSKPRLATFW

SEQ ID NO: 40247 - protein, 9 aa, Artificial sequence
  Protein classification predicting sequence
GEIIGKRGI

SEQ ID NO: 40248 - protein, 8 aa, Artificial sequence
  Protein classification predicting sequence
YDFVLNLV

SEQ ID NO: 40249 - protein, 6 aa, Artificial sequence
  Protein classification predicting sequence
YVFTLL

SEQ ID NO: 40250 - protein, 20 aa, Artificial sequence
  Protein classification predicting sequence
ALGVRLTANLTAGHLLIQLI

SEQ ID NO: 40251 - protein, 17 aa, Artificial sequence
  Protein classification predicting sequence
NLLGLLPYTFTPTTQLS

SEQ ID NO: 40252 - protein, 8 aa, Artificial sequence
  Protein classification predicting sequence
GTPTPLIP

SEQ ID NO: 40253 - protein, 8 aa, Artificial sequence
  Protein classification predicting sequence
FISLFSLI

SEQ ID NO: 40254 - protein, 17 aa, Artificial sequence
  Protein classification predicting sequence
GLFPYIFTSTSHLTLTL

SEQ ID NO: 40255 - protein, 22 aa, Artificial sequence
  Protein classification predicting sequence
ILLTLHKEFKTLLGPSGHNGST

SEQ ID NO: 40256 - protein, 23 aa, Artificial sequence
  Protein classification predicting sequence
FMLYGWINHTQHMFAHLVPQGTP

SEQ ID NO: 40257 - protein, 6 aa, Artificial sequence
  Protein classification predicting sequence
RLFANM

SEQ ID NO: 40258 - protein, 7 aa, Artificial sequence
  Protein classification predicting sequence
LFSVFDP

SEQ ID NO: 40259 - protein, 8 aa, Artificial sequence
  Protein classification predicting sequence
GLFPYIFT

SEQ ID NO: 40260 - protein, 6 aa, Artificial sequence
  Protein classification predicting sequence
LMPFMV

SEQ ID NO: 40261 - protein, 14 aa, Artificial sequence
  Protein classification predicting sequence
ANMIAGHLLLTLLG

SEQ ID NO: 40262 - protein, 6 aa, Artificial sequence
  Protein classification predicting sequence
HGLKFF

SEQ ID NO: 40263 - protein, 6 aa, Artificial sequence
  Protein classification predicting sequence
LGLLPY

SEQ ID NO: 40264 - protein, 8 aa, Artificial sequence
  Protein classification predicting sequence
HLVPQGTP

SEQ ID NO: 40265 - protein, 8 aa, Artificial sequence
  Protein classification predicting sequence
LGLRLAAN

SEQ ID NO: 40266 - protein, 6 aa, Artificial sequence
  Protein classification predicting sequence
RLFGNI

SEQ ID NO: 40267 - protein, 7 aa, Artificial sequence
  Protein classification predicting sequence
EFLGLTF

SEQ ID NO: 40268 - protein, 12 aa, Artificial sequence
  Protein classification predicting sequence
TGGRFLTLGVTL

SEQ ID NO: 40269 - protein, 20 aa, Artificial sequence
  Protein classification predicting sequence
LFPLKIIEEFANTLTLGLRL

SEQ ID NO: 40270 - protein, 10 aa, Artificial sequence
  Protein classification predicting sequence
FVGAIQAFIF

SEQ ID NO: 40271 - protein, 6 aa, Artificial sequence
  Protein classification predicting sequence
IQAFIF

SEQ ID NO: 40272 - protein, 12 aa, Artificial sequence
  Protein classification predicting sequence
YVFVANMLGLPF

SEQ ID NO: 40273 - protein, 6 aa, Artificial sequence
  Protein classification predicting sequence
LTHYYG

SEQ ID NO: 40274 - protein, 13 aa, Artificial sequence
  Protein classification predicting sequence
KIIEEFANTLTLG

SEQ ID NO: 40275 - protein, 10 aa, Artificial sequence
  Protein classification predicting sequence
AGEILLGLLA

SEQ ID NO: 40276 - protein, 8 aa, Artificial sequence
  Protein classification predicting sequence
GAIQAFIF

SEQ ID NO: 40277 - protein, 14 aa, Artificial sequence
  Protein classification predicting sequence
LPHSFTPTTQLSMN

SEQ ID NO: 40278 - protein, 7 aa, Artificial sequence
  Protein classification predicting sequence
LPQGTPT

SEQ ID NO: 40279 - protein, 10 aa, Artificial sequence
  Protein classification predicting sequence
TAGHLLMHLI

SEQ ID NO: 40280 - protein, 6 aa, Artificial sequence
  Protein classification predicting sequence
AVALIQ

SEQ ID NO: 40281 - protein, 6 aa, Artificial sequence
  Protein classification predicting sequence
SFFDQF

SEQ ID NO: 40282 - protein, 9 aa, Artificial sequence
  Protein classification predicting sequence
VLFLLTLLE

SEQ ID NO: 40283 - protein, 13 aa, Artificial sequence
  Protein classification predicting sequence
LEVAVAMIQAYVF

SEQ ID NO: 40284 - protein, 10 aa, Artificial sequence
  Protein classification predicting sequence
AVAMIQAYVF

SEQ ID NO: 40285 - protein, 10 aa, Artificial sequence
  Protein classification predicting sequence
LLLSLYLQEN

SEQ ID NO: 40286 - protein, 15 aa, Artificial sequence
  Protein classification predicting sequence
FIFMVLTIVYLSMAS

SEQ ID NO: 40287 - protein, 14 aa, Artificial sequence
  Protein classification predicting sequence
RLINNRLISIQQWL

SEQ ID NO: 40288 - protein, 9 aa, Artificial sequence
  Protein classification predicting sequence
NLISMIPYS

SEQ ID NO: 40289 - protein, 6 aa, Artificial sequence
  Protein classification predicting sequence
IQAYVF

SEQ ID NO: 40290 - protein, 7 aa, Artificial sequence
  Protein classification predicting sequence
ANILSGH

SEQ ID NO: 40291 - protein, 9 aa, Artificial sequence
  Protein classification predicting sequence
KTKASLAHF

SEQ ID NO: 40292 - protein, 12 aa, Artificial sequence
  Protein classification predicting sequence
PQGTPTPLIPML

SEQ ID NO: 40293 - protein, 7 aa, Artificial sequence
  Protein classification predicting sequence
QLTSKQM

SEQ ID NO: 40294 - protein, 6 aa, Artificial sequence
  Protein classification predicting sequence
PLWLAT

SEQ ID NO: 40295 - protein, 8 aa, Artificial sequence
  Protein classification predicting sequence
HLLPEGTP

SEQ ID NO: 40296 - protein, 14 aa, Artificial sequence
  Protein classification predicting sequence
GLLPYTFTPTTQLS

SEQ ID NO: 40297 - protein, 16 aa, Artificial sequence
  Protein classification predicting sequence
FTPTTQLSMNLGMAIP

SEQ ID NO: 40298 - protein, 11 aa, Artificial sequence
  Protein classification predicting sequence
SLAHFLPQGTP

SEQ ID NO: 40299 - protein, 7 aa, Artificial sequence
  Protein classification predicting sequence
LLPEGTP

SEQ ID NO: 40300 - protein, 9 aa, Artificial sequence
  Protein classification predicting sequence
LIIIETISL

SEQ ID NO: 40301 - protein, 24 aa, Artificial sequence
  Protein classification predicting sequence
IRPLALGVRLTANLTAGHLLIQLI

SEQ ID NO: 40302 - protein, 9 aa, Artificial sequence
  Protein classification predicting sequence
TNLLGLLPH

SEQ ID NO: 40303 - protein, 6 aa, Artificial sequence
  Protein classification predicting sequence
PLIPML

SEQ ID NO: 40304 - protein, 8 aa, Artificial sequence
  Protein classification predicting sequence
TISLFIQP

SEQ ID NO: 40305 - protein, 21 aa, Artificial sequence
  Protein classification predicting sequence
ALAVRLTANITAGHLLIHLIG

SEQ ID NO: 40306 - protein, 8 aa, Artificial sequence
  Protein classification predicting sequence
LFLLTLLE

SEQ ID NO: 40307 - protein, 5 aa, Artificial sequence
  Protein classification predicting sequence
QLSMN

SEQ ID NO: 40308 - protein, 6 aa, Artificial sequence
  Protein classification predicting sequence
MAIPLW

SEQ ID NO: 40309 - protein, 6 aa, Artificial sequence
  Protein classification predicting sequence
PTPLIP

SEQ ID NO: 40310 - protein, 14 aa, Artificial sequence
  Protein classification predicting sequence
SLILFIGSTNLLGL

SEQ ID NO: 40311 - protein, 12 aa, Artificial sequence
  Protein classification predicting sequence
FTPTTQLSMNLG

SEQ ID NO: 40312 - protein, 6 aa, Artificial sequence
  Protein classification predicting sequence
LIPMLV

SEQ ID NO: 40313 - protein, 12 aa, Artificial sequence
  Protein classification predicting sequence
RLTANITAGHLL

SEQ ID NO: 40314 - protein, 17 aa, Artificial sequence
  Protein classification predicting sequence
RLTANITAGHLLMHLIG

SEQ ID NO: 40315 - protein, 8 aa, Artificial sequence
  Protein classification predicting sequence
GFRHKTKA

SEQ ID NO: 40316 - protein, 10 aa, Artificial sequence
  Protein classification predicting sequence
LAHFLPQGTP

SEQ ID NO: 40317 - protein, 17 aa, Artificial sequence
  Protein classification predicting sequence
LIPMLVIIETISLFIQP

SEQ ID NO: 40318 - protein, 10 aa, Artificial sequence
  Protein classification predicting sequence
IETISLFIQP

SEQ ID NO: 40319 - protein, 7 aa, Artificial sequence
  Protein classification predicting sequence
FDQFSSP

SEQ ID NO: 40320 - protein, 8 aa, Artificial sequence
  Protein classification predicting sequence
FTPTTQLS

SEQ ID NO: 40321 - protein, 8 aa, Artificial sequence
  Protein classification predicting sequence
IGMRNQPT

SEQ ID NO: 40322 - protein, 6 aa, Artificial sequence
  Protein classification predicting sequence
FRLFGN

SEQ ID NO: 40323 - protein, 7 aa, Artificial sequence
  Protein classification predicting sequence
WAIFHIL

SEQ ID NO: 40324 - protein, 6 aa, Artificial sequence
  Protein classification predicting sequence
SIQQWL

SEQ ID NO: 40325 - protein, 9 aa, Artificial sequence
  Protein classification predicting sequence
KGQTWALML

SEQ ID NO: 40326 - protein, 6 aa, Artificial sequence
  Protein classification predicting sequence
LEFAVA

SEQ ID NO: 40327 - protein, 13 aa, Artificial sequence
  Protein classification predicting sequence
LIPMLVIIETISL

SEQ ID NO: 40328 - protein, 9 aa, Artificial sequence
  Protein classification predicting sequence
IIETISLFI

SEQ ID NO: 40329 - protein, 11 aa, Artificial sequence
  Protein classification predicting sequence
IIETISLFIQP

SEQ ID NO: 40330 - protein, 7 aa, Artificial sequence
  Protein classification predicting sequence
FFSLFVP

SEQ ID NO: 40331 - protein, 8 aa, Artificial sequence
  Protein classification predicting sequence
PIVILIIM

SEQ ID NO: 40332 - protein, 6 aa, Artificial sequence
  Protein classification predicting sequence
ITFIIL

SEQ ID NO: 40333 - protein, 18 aa, Artificial sequence
  Protein classification predicting sequence
LFNNFMGLFPYIFTSTSH

SEQ ID NO: 40334 - protein, 9 aa, Artificial sequence
  Protein classification predicting sequence
LSTLYSSEV

SEQ ID NO: 40335 - protein, 10 aa, Artificial sequence
  Protein classification predicting sequence
LMLMSLILFI

SEQ ID NO: 40336 - protein, 6 aa, Artificial sequence
  Protein classification predicting sequence
SPLDQF

SEQ ID NO: 40337 - protein, 11 aa, Artificial sequence
  Protein classification predicting sequence
QSLVELIYDFV

SEQ ID NO: 40338 - protein, 6 aa, Artificial sequence
  Protein classification predicting sequence
CFRALS

SEQ ID NO: 40339 - protein, 13 aa, Artificial sequence
  Protein classification predicting sequence
GIRLFANMMAGHS

SEQ ID NO: 40340 - protein, 12 aa, Artificial sequence
  Protein classification predicting sequence
VKILSGFAWTML

SEQ ID NO: 40341 - protein, 6 aa, Artificial sequence
  Protein classification predicting sequence
SPLEQF

SEQ ID NO: 40342 - protein, 11 aa, Artificial sequence
  Protein classification predicting sequence
GGNLVPNAWQS

SEQ ID NO: 40343 - protein, 10 aa, Artificial sequence
  Protein classification predicting sequence
FIGITIVGFQ

SEQ ID NO: 40344 - protein, 51 aa, Artificial sequence
  Protein classification predicting sequence
GVPLPLAPFLVLLELISYCFRALSLGIRLFANMMAGHSLVKILSGFAWTML

SEQ ID NO: 40345 - protein, 11 aa, Artificial sequence
  Protein classification predicting sequence
ALTGLELGVAI

SEQ ID NO: 40346 - protein, 7 aa, Artificial sequence
  Protein classification predicting sequence
PLLVLIE

SEQ ID NO: 40347 - protein, 8 aa, Artificial sequence
  Protein classification predicting sequence
MAIPLWAG

SEQ ID NO: 40348 - protein, 8 aa, Artificial sequence
  Protein classification predicting sequence
GLLPYTFT

SEQ ID NO: 40349 - protein, 6 aa, Artificial sequence
  Protein classification predicting sequence
QLSLNM

SEQ ID NO: 40350 - protein, 6 aa, Artificial sequence
  Protein classification predicting sequence
LVSLYL

SEQ ID NO: 40351 - protein, 9 aa, Artificial sequence
  Protein classification predicting sequence
FFPCILVTF

SEQ ID NO: 40352 - protein, 19 aa, Artificial sequence
  Protein classification predicting sequence
LGPLFIVLALTGLELGVAI

SEQ ID NO: 40353 - protein, 8 aa, Artificial sequence
  Protein classification predicting sequence
FTILILLT

SEQ ID NO: 40354 - protein, 21 aa, Artificial sequence
  Protein classification predicting sequence
TNLLGLLPHSFTPTTQLSMNL

SEQ ID NO: 40355 - protein, 8 aa, Artificial sequence
  Protein classification predicting sequence
LEIGVACI

SEQ ID NO: 40356 - protein, 10 aa, Artificial sequence
  Protein classification predicting sequence
FTPTTQLSMN

SEQ ID NO: 40357 - protein, 9 aa, Artificial sequence
  Protein classification predicting sequence
ANLTAGHLL

SEQ ID NO: 40358 - protein, 13 aa, Artificial sequence
  Protein classification predicting sequence
VFVLLLSLYLQEN

SEQ ID NO: 40359 - protein, 7 aa, Artificial sequence
  Protein classification predicting sequence
GFQRHGL

SEQ ID NO: 40360 - protein, 14 aa, Artificial sequence
  Protein classification predicting sequence
LLPLLVLIEFISYL

SEQ ID NO: 40361 - protein, 6 aa, Artificial sequence
  Protein classification predicting sequence
MIPYSF

SEQ ID NO: 40362 - protein, 6 aa, Artificial sequence
  Protein classification predicting sequence
TWSLML

SEQ ID NO: 40363 - protein, 10 aa, Artificial sequence
  Protein classification predicting sequence
ANLTAGHLLI

SEQ ID NO: 40364 - protein, 9 aa, Artificial sequence
  Protein classification predicting sequence
AVAMIQAYV

SEQ ID NO: 40365 - protein, 7 aa, Artificial sequence
  Protein classification predicting sequence
ILFPPLL

SEQ ID NO: 40366 - protein, 7 aa, Artificial sequence
  Protein classification predicting sequence
MAIPLWA

SEQ ID NO: 40367 - protein, 21 aa, Artificial sequence
  Protein classification predicting sequence
ALAVRLTANITAGHLLMHLIG

SEQ ID NO: 40368 - protein, 6 aa, Artificial sequence
  Protein classification predicting sequence
LLTILE

SEQ ID NO: 40369 - protein, 13 aa, Artificial sequence
  Protein classification predicting sequence
INNRLITTQQWLI

SEQ ID NO: 40370 - protein, 12 aa, Artificial sequence
  Protein classification predicting sequence
HNTKGRTWSLML

SEQ ID NO: 40371 - protein, 6 aa, Artificial sequence
  Protein classification predicting sequence
SFATPT

SEQ ID NO: 40372 - protein, 6 aa, Artificial sequence
  Protein classification predicting sequence
MGLPIV

SEQ ID NO: 40373 - protein, 7 aa, Artificial sequence
  Protein classification predicting sequence
RLINNRL

SEQ ID NO: 40374 - protein, 6 aa, Artificial sequence
  Protein classification predicting sequence
VRLTAN

SEQ ID NO: 40375 - protein, 7 aa, Artificial sequence
  Protein classification predicting sequence
GHLLIHL

SEQ ID NO: 40376 - protein, 6 aa, Artificial sequence
  Protein classification predicting sequence
APLLTA

SEQ ID NO: 40377 - protein, 7 aa, Artificial sequence
  Protein classification predicting sequence
ANMMAGH

SEQ ID NO: 40378 - protein, 7 aa, Artificial sequence
  Protein classification predicting sequence
VAILQAY

SEQ ID NO: 40379 - protein, 10 aa, Artificial sequence
  Protein classification predicting sequence
QLIATAAFVL

SEQ ID NO: 40380 - protein, 7 aa, Artificial sequence
  Protein classification predicting sequence
LGIPLIA

SEQ ID NO: 40381 - protein, 6 aa, Artificial sequence
  Protein classification predicting sequence
WFINRF

SEQ ID NO: 40382 - protein, 18 aa, Artificial sequence
  Protein classification predicting sequence
LGLLPYTFTPTTQLSLNM

SEQ ID NO: 40383 - protein, 20 aa, Artificial sequence
  Protein classification predicting sequence
IRPLALGVRLTANLTAGHLL

SEQ ID NO: 40384 - protein, 21 aa, Artificial sequence
  Protein classification predicting sequence
AVAMIQAYVFVLLLSLYLQEN

SEQ ID NO: 40385 - protein, 7 aa, Artificial sequence
  Protein classification predicting sequence
LITKQLM

SEQ ID NO: 40386 - protein, 6 aa, Artificial sequence
  Protein classification predicting sequence
FLFIFV

SEQ ID NO: 40387 - protein, 6 aa, Artificial sequence
  Protein classification predicting sequence
NWSGAL

SEQ ID NO: 40388 - protein, 7 aa, Artificial sequence
  Protein classification predicting sequence
GELAAPT

SEQ ID NO: 40389 - protein, 11 aa, Artificial sequence
  Protein classification predicting sequence
IQALIFATLAA

SEQ ID NO: 40390 - protein, 6 aa, Artificial sequence
  Protein classification predicting sequence
EYVLEF

SEQ ID NO: 40391 - protein, 13 aa, Artificial sequence
  Protein classification predicting sequence
FLFIFVSNWSGAL

SEQ ID NO: 40392 - protein, 17 aa, Artificial sequence
  Protein classification predicting sequence
FLFIFVSNWSGALLPWK

SEQ ID NO: 40393 - protein, 6 aa, Artificial sequence
  Protein classification predicting sequence
AVPLWL

SEQ ID NO: 40394 - protein, 16 aa, Artificial sequence
  Protein classification predicting sequence
VNEQIGGLSGNVKQKF

SEQ ID NO: 40395 - protein, 7 aa, Artificial sequence
  Protein classification predicting sequence
NPQGMIP

SEQ ID NO: 40396 - protein, 15 aa, Artificial sequence
  Protein classification predicting sequence
LSFSIFIGITIVGFQ

SEQ ID NO: 40397 - protein, 22 aa, Artificial sequence
  Protein classification predicting sequence
SFLLPAGVPLPLAPFLVLLELI

SEQ ID NO: 40398 - protein, 9 aa, Artificial sequence
  Protein classification predicting sequence
STSHFILTF

SEQ ID NO: 40399 - protein, 8 aa, Artificial sequence
  Protein classification predicting sequence
GLIPLAFI

SEQ ID NO: 40400 - protein, 9 aa, Artificial sequence
  Protein classification predicting sequence
LTIVYLSMA

SEQ ID NO: 40401 - protein, 7 aa, Artificial sequence
  Protein classification predicting sequence
VTKKGGG

SEQ ID NO: 40402 - protein, 28 aa, Artificial sequence
  Protein classification predicting sequence
ELGVAISQAHVSTISICIYLNDATNLHQ

SEQ ID NO: 40403 - protein, 6 aa, Artificial sequence
  Protein classification predicting sequence
LVIIET

SEQ ID NO: 40404 - protein, 11 aa, Artificial sequence
  Protein classification predicting sequence
QLFSYAILGFA

SEQ ID NO: 40405 - protein, 62 aa, Artificial sequence
  Protein classification predicting sequence
AAKFIGAGAATVGVAGSGAGIGTVFGSLIIGYARNPSLKQQLFSYAILGFALSEAMGLFCLM

SEQ ID NO: 40406 - protein, 21 aa, Artificial sequence
  Protein classification predicting sequence
AYRQMSLLLRRPPGREAYPGD

SEQ ID NO: 40407 - protein, 16 aa, Artificial sequence
  Protein classification predicting sequence
SLLLRRPPGREAYPGD

SEQ ID NO: 40408 - protein, 8 aa, Artificial sequence
  Protein classification predicting sequence
SPRAAELT

SEQ ID NO: 40409 - protein, 15 aa, Artificial sequence
  Protein classification predicting sequence
ALNLENENVGIVVFG

SEQ ID NO: 40410 - protein, 7 aa, Artificial sequence
  Protein classification predicting sequence
GALSDHE

SEQ ID NO: 40411 - protein, 51 aa, Artificial sequence
  Protein classification predicting sequence
GALSDHEQRRVEVKAPGILERKSVHEPMQTGLKAVDSLVPIGRGQRELLIG

SEQ ID NO: 40412 - protein, 10 aa, Artificial sequence
  Protein classification predicting sequence
RRVEVKAPGI

SEQ ID NO: 40413 - protein, 17 aa, Artificial sequence
  Protein classification predicting sequence
RQTGKTTIAIDTILNQK

SEQ ID NO: 40414 - protein, 10 aa, Artificial sequence
  Protein classification predicting sequence
IAIDTILNQK

SEQ ID NO: 40415 - protein, 22 aa, Artificial sequence
  Protein classification predicting sequence
NSVKPELLQALKGGLTNERKME

SEQ ID NO: 40416 - protein, 11 aa, Artificial sequence
  Protein classification predicting sequence
KGGLTNERKME

SEQ ID NO: 40417 - protein, 7 aa, Artificial sequence
  Protein classification predicting sequence
LYCVYVA

SEQ ID NO: 40418 - protein, 31 aa, Artificial sequence
  Protein classification predicting sequence
KQPQYAPLPIEKQILVIYAAVNGFCDRMPLD

SEQ ID NO: 40419 - protein, 7 aa, Artificial sequence
  Protein classification predicting sequence
MKQVCGS

SEQ ID NO: 40420 - protein, 12 aa, Artificial sequence
  Protein classification predicting sequence
KLELAQYREVAA

SEQ ID NO: 40421 - protein, 12 aa, Artificial sequence
  Protein classification predicting sequence
ALNLENENVGIV

SEQ ID NO: 40422 - protein, 11 aa, Artificial sequence
  Protein classification predicting sequence
VKRTGSIVDVP

SEQ ID NO: 40423 - protein, 50 aa, Artificial sequence
  Protein classification predicting sequence
RKSVHEPMQTGLKAVDSLVPIGRGQRELIIGDRQTGKTAIAIDTILNQKQ

SEQ ID NO: 40424 - protein, 10 aa, Artificial sequence
  Protein classification predicting sequence
YSIIVAATAS

SEQ ID NO: 40425 - protein, 43 aa, Artificial sequence
  Protein classification predicting sequence
VAATASDPAPLQFLAPYSGCAMGEYFRDNGMHALIIYDDLSKQ

SEQ ID NO: 40426 - protein, 10 aa, Artificial sequence
  Protein classification predicting sequence
LIIYDDLSKQ

SEQ ID NO: 40427 - protein, 18 aa, Artificial sequence
  Protein classification predicting sequence
VAYRQMSLLLRRPPGREA

SEQ ID NO: 40428 - protein, 18 aa, Artificial sequence
  Protein classification predicting sequence
RPAINVGLSVSRVGSAAQ

SEQ ID NO: 40429 - protein, 28 aa, Artificial sequence
  Protein classification predicting sequence
RPAINVGLSVSRVGSAAQLKAMKQVCGS

SEQ ID NO: 40430 - protein, 10 aa, Artificial sequence
  Protein classification predicting sequence
LLNRGARLTE

SEQ ID NO: 40431 - protein, 6 aa, Artificial sequence
  Protein classification predicting sequence
PIEKQI

SEQ ID NO: 40432 - protein, 6 aa, Artificial sequence
  Protein classification predicting sequence
VIYAAV

SEQ ID NO: 40433 - protein, 7 aa, Artificial sequence
  Protein classification predicting sequence
LGVPIDG

SEQ ID NO: 40434 - protein, 10 aa, Artificial sequence
  Protein classification predicting sequence
NSRATSESET

SEQ ID NO: 40435 - protein, 9 aa, Artificial sequence
  Protein classification predicting sequence
LGRVVDALG

SEQ ID NO: 40436 - protein, 14 aa, Artificial sequence
  Protein classification predicting sequence
KQPQYAPLPIEKQI

SEQ ID NO: 40437 - protein, 22 aa, Artificial sequence
  Protein classification predicting sequence
VIYAAVNGFCDRMPLDRISQYE

SEQ ID NO: 40438 - protein, 9 aa, Artificial sequence
  Protein classification predicting sequence
KGGLTNERK

SEQ ID NO: 40439 - protein, 12 aa, Artificial sequence
  Protein classification predicting sequence
RAAELTTLLESR

SEQ ID NO: 40440 - protein, 28 aa, Artificial sequence
  Protein classification predicting sequence
VEFASGVKGIALNLENENVGIVVFGSDT

SEQ ID NO: 40441 - protein, 11 aa, Artificial sequence
  Protein classification predicting sequence
ELLQSLKGGLT

SEQ ID NO: 40442 - protein, 23 aa, Artificial sequence
  Protein classification predicting sequence
KLELAQYREVAAFAQFGSDLDAA

SEQ ID NO: 40443 - protein, 8 aa, Artificial sequence
  Protein classification predicting sequence
LGRVVNAL

SEQ ID NO: 40444 - protein, 23 aa, Artificial sequence
  Protein classification predicting sequence
HTLIIYDDLSKQAQAYRQMSLLL

SEQ ID NO: 40445 - protein, 9 aa, Artificial sequence
  Protein classification predicting sequence
AYRQMSLLL

SEQ ID NO: 40446 - protein, 9 aa, Artificial sequence
  Protein classification predicting sequence
AEALLKEAI

SEQ ID NO: 40447 - protein, 10 aa, Artificial sequence
  Protein classification predicting sequence
IRPDEISSII

SEQ ID NO: 40448 - protein, 7 aa, Artificial sequence
  Protein classification predicting sequence
RRSVHEP

SEQ ID NO: 40449 - protein, 9 aa, Artificial sequence
  Protein classification predicting sequence
YVAIGQKAS

SEQ ID NO: 40450 - protein, 8 aa, Artificial sequence
  Protein classification predicting sequence
TLVIYDDL

SEQ ID NO: 40451 - protein, 10 aa, Artificial sequence
  Protein classification predicting sequence
GLDEVMAGEL

SEQ ID NO: 40452 - protein, 7 aa, Artificial sequence
  Protein classification predicting sequence
GRVVNPL

SEQ ID NO: 40453 - protein, 6 aa, Artificial sequence
  Protein classification predicting sequence
PATLQY

SEQ ID NO: 40454 - protein, 9 aa, Artificial sequence
  Protein classification predicting sequence
GIRPAINVG

SEQ ID NO: 40455 - protein, 7 aa, Artificial sequence
  Protein classification predicting sequence
QFASDLD

SEQ ID NO: 40456 - protein, 12 aa, Artificial sequence
  Protein classification predicting sequence
EPLQTGIKAIDA

SEQ ID NO: 40457 - protein, 6 aa, Artificial sequence
  Protein classification predicting sequence
GAMEYT

SEQ ID NO: 40458 - protein, 11 aa, Artificial sequence
  Protein classification predicting sequence
HALIIYDDLSK

SEQ ID NO: 40459 - protein, 9 aa, Artificial sequence
  Protein classification predicting sequence
LIIYDDLSK

SEQ ID NO: 40460 - protein, 32 aa, Artificial sequence
  Protein classification predicting sequence
RRPPGREAYPGDVFYLHSRLLERAAKLNDDLG

SEQ ID NO: 40461 - protein, 8 aa, Artificial sequence
  Protein classification predicting sequence
GLSVSRVG

SEQ ID NO: 40462 - protein, 6 aa, Artificial sequence
  Protein classification predicting sequence
LDKATQ

SEQ ID NO: 40463 - protein, 26 aa, Artificial sequence
  Protein classification predicting sequence
ADSPATLQYLAPYTGAALAEYFMYRE

SEQ ID NO: 40464 - protein, 15 aa, Artificial sequence
  Protein classification predicting sequence
LGEGSMTALPIVETQ

SEQ ID NO: 40465 - protein, 30 aa, Artificial sequence
  Protein classification predicting sequence
GIRPAINVGISVSRVGSAAQIKAMKQVAGK

SEQ ID NO: 40466 - protein, 8 aa, Artificial sequence
  Protein classification predicting sequence
KPQFQEII

SEQ ID NO: 40467 - protein, 8 aa, Artificial sequence
  Protein classification predicting sequence
IQEQLERF

SEQ ID NO: 40468 - protein, 7 aa, Artificial sequence
  Protein classification predicting sequence
IESPAPG

SEQ ID NO: 40469 - protein, 8 aa, Artificial sequence
  Protein classification predicting sequence
GVMDRKSV

SEQ ID NO: 40470 - protein, 13 aa, Artificial sequence
  Protein classification predicting sequence
PAPLLFLAPYAGV

SEQ ID NO: 40471 - protein, 31 aa, Artificial sequence
  Protein classification predicting sequence
SLLLRRPPGREAYPGDVFYLHSRLLERAAKL

SEQ ID NO: 40472 - protein, 8 aa, Artificial sequence
  Protein classification predicting sequence
GTLRLDLA

SEQ ID NO: 40473 - protein, 9 aa, Artificial sequence
  Protein classification predicting sequence
ATQAKLNRG

SEQ ID NO: 40474 - protein, 8 aa, Artificial sequence
  Protein classification predicting sequence
RTVEVLKQ

SEQ ID NO: 40475 - protein, 12 aa, Artificial sequence
  Protein classification predicting sequence
RTGRIMEVPVGE

SEQ ID NO: 40476 - protein, 6 aa, Artificial sequence
  Protein classification predicting sequence
TTKTRP

SEQ ID NO: 40477 - protein, 9 aa, Artificial sequence
  Protein classification predicting sequence
AIDTILNQK

SEQ ID NO: 40478 - protein, 30 aa, Artificial sequence
  Protein classification predicting sequence
PTNVISITDGQIFLQSDLFFSGVRPAINAG

SEQ ID NO: 40479 - protein, 17 aa, Artificial sequence
  Protein classification predicting sequence
SVSRVGGSAQIKAMKKV

SEQ ID NO: 40480 - protein, 9 aa, Artificial sequence
  Protein classification predicting sequence
AQIKAMKKV

SEQ ID NO: 40481 - protein, 8 aa, Artificial sequence
  Protein classification predicting sequence
DITRFEDE

SEQ ID NO: 40482 - protein, 7 aa, Artificial sequence
  Protein classification predicting sequence
QIENYES

SEQ ID NO: 40483 - protein, 7 aa, Artificial sequence
  Protein classification predicting sequence
DDLSKQA

SEQ ID NO: 40484 - protein, 10 aa, Artificial sequence
  Protein classification predicting sequence
ETQAGDISAY

SEQ ID NO: 40485 - protein, 9 aa, Artificial sequence
  Protein classification predicting sequence
QVLIIYALT

SEQ ID NO: 40486 - protein, 12 aa, Artificial sequence
  Protein classification predicting sequence
SLLLRRPPGREA

SEQ ID NO: 40487 - protein, 8 aa, Artificial sequence
  Protein classification predicting sequence
IIYALTKG

SEQ ID NO: 40488 - protein, 12 aa, Artificial sequence
  Protein classification predicting sequence
RRPPGREAYPGD

SEQ ID NO: 40489 - protein, 7 aa, Artificial sequence
  Protein classification predicting sequence
IKAEEIS

SEQ ID NO: 40490 - protein, 10 aa, Artificial sequence
  Protein classification predicting sequence
AQNLEESNVG

SEQ ID NO: 40491 - protein, 7 aa, Artificial sequence
  Protein classification predicting sequence
VNPLGQP

SEQ ID NO: 40492 - protein, 13 aa, Artificial sequence
  Protein classification predicting sequence
EPLQTGIKAIDAL

SEQ ID NO: 40493 - protein, 14 aa, Artificial sequence
  Protein classification predicting sequence
GTLRLDLASYRELE

SEQ ID NO: 40494 - protein, 9 aa, Artificial sequence
  Protein classification predicting sequence
ETQSGDVSA

SEQ ID NO: 40495 - protein, 7 aa, Artificial sequence
  Protein classification predicting sequence
QFSSDLD

SEQ ID NO: 40496 - protein, 10 aa, Artificial sequence
  Protein classification predicting sequence
AFSQFASDLD

SEQ ID NO: 40497 - protein, 8 aa, Artificial sequence
  Protein classification predicting sequence
LGRVINAL

SEQ ID NO: 40498 - protein, 8 aa, Artificial sequence
  Protein classification predicting sequence
PGDIFYLH

SEQ ID NO: 40499 - protein, 7 aa, Artificial sequence
  Protein classification predicting sequence
GIRPAIN

SEQ ID NO: 40500 - protein, 20 aa, Artificial sequence
  Protein classification predicting sequence
GRGQRELIIGDRQTGKTAIA

SEQ ID NO: 40501 - protein, 7 aa, Artificial sequence
  Protein classification predicting sequence
GALDYTI

SEQ ID NO: 40502 - protein, 13 aa, Artificial sequence
  Protein classification predicting sequence
PATLQYLAPYTGA

SEQ ID NO: 40503 - protein, 8 aa, Artificial sequence
  Protein classification predicting sequence
NVGAVLMG

SEQ ID NO: 40504 - protein, 10 aa, Artificial sequence
  Protein classification predicting sequence
ADSPATLQYL

SEQ ID NO: 40505 - protein, 7 aa, Artificial sequence
  Protein classification predicting sequence
KQAQAYR

SEQ ID NO: 40506 - protein, 7 aa, Artificial sequence
  Protein classification predicting sequence
GSMTALP

SEQ ID NO: 40507 - protein, 7 aa, Artificial sequence
  Protein classification predicting sequence
GTNGYLD

SEQ ID NO: 40508 - protein, 8 aa, Artificial sequence
  Protein classification predicting sequence
QTGIKAID

SEQ ID NO: 40509 - protein, 7 aa, Artificial sequence
  Protein classification predicting sequence
DTILNQK

SEQ ID NO: 40510 - protein, 6 aa, Artificial sequence
  Protein classification predicting sequence
AAFAQF

SEQ ID NO: 40511 - protein, 5 aa, Artificial sequence
  Protein classification predicting sequence
KQPQY

SEQ ID NO: 40512 - protein, 7 aa, Artificial sequence
  Protein classification predicting sequence
ASASESA

SEQ ID NO: 40513 - protein, 7 aa, Artificial sequence
  Protein classification predicting sequence
YIAPYSG

SEQ ID NO: 40514 - protein, 9 aa, Artificial sequence
  Protein classification predicting sequence
GGGSLTALP

SEQ ID NO: 40515 - protein, 6 aa, Artificial sequence
  Protein classification predicting sequence
LETELF

SEQ ID NO: 40516 - protein, 6 aa, Artificial sequence
  Protein classification predicting sequence
VLMGDG

SEQ ID NO: 40517 - protein, 8 aa, Artificial sequence
  Protein classification predicting sequence
QTGITAID

SEQ ID NO: 40518 - protein, 10 aa, Artificial sequence
  Protein classification predicting sequence
LGGGSMTALP

SEQ ID NO: 40519 - protein, 8 aa, Artificial sequence
  Protein classification predicting sequence
RLRELLKQ

SEQ ID NO: 40520 - protein, 6 aa, Artificial sequence
  Protein classification predicting sequence
QYAPLP

SEQ ID NO: 40521 - protein, 7 aa, Artificial sequence
  Protein classification predicting sequence
PLPVEEQ

SEQ ID NO: 40522 - protein, 8 aa, Artificial sequence
  Protein classification predicting sequence
EEQVAVIY

SEQ ID NO: 40523 - protein, 18 aa, Artificial sequence
  Protein classification predicting sequence
DLEETGRVLSIGDGIARV

SEQ ID NO: 40524 - protein, 12 aa, Artificial sequence
  Protein classification predicting sequence
EMVEFSSGLKGM

SEQ ID NO: 40525 - protein, 20 aa, Artificial sequence
  Protein classification predicting sequence
LNLEPDNVGVVVFGNDKLIK

SEQ ID NO: 40526 - protein, 7 aa, Artificial sequence
  Protein classification predicting sequence
IVDVPVG

SEQ ID NO: 40527 - protein, 26 aa, Artificial sequence
  Protein classification predicting sequence
KAVDSLVPIGRGQRELIIGDRQTGKT

SEQ ID NO: 40528 - protein, 10 aa, Artificial sequence
  Protein classification predicting sequence
LQYLAPYSGC

SEQ ID NO: 40529 - protein, 11 aa, Artificial sequence
  Protein classification predicting sequence
SVSRVGSAAQT

SEQ ID NO: 40530 - protein, 14 aa, Artificial sequence
  Protein classification predicting sequence
RGVRLTELLKQGQY

SEQ ID NO: 40531 - protein, 10 aa, Artificial sequence
  Protein classification predicting sequence
GCAMGEYFRD

SEQ ID NO: 40532 - protein, 10 aa, Artificial sequence
  Protein classification predicting sequence
GRVVNPLGQP

SEQ ID NO: 40533 - protein, 11 aa, Artificial sequence
  Protein classification predicting sequence
LVPIGRGQREL

SEQ ID NO: 40534 - protein, 8 aa, Artificial sequence
  Protein classification predicting sequence
ASQPAPLL

SEQ ID NO: 40535 - protein, 31 aa, Artificial sequence
  Protein classification predicting sequence
TALPFVETQAGDISAYIPTNVISITDGQIFL

SEQ ID NO: 40536 - protein, 14 aa, Artificial sequence
  Protein classification predicting sequence
ATQAKLNRGRRTVE

SEQ ID NO: 40537 - protein, 24 aa, Artificial sequence
  Protein classification predicting sequence
MIPIGRGQRELIIGDRQTGKTAVA

SEQ ID NO: 40538 - protein, 12 aa, Artificial sequence
  Protein classification predicting sequence
GSMTALPIVETQ

SEQ ID NO: 40539 - protein, 7 aa, Artificial sequence
  Protein classification predicting sequence
GTVLQVG

SEQ ID NO: 40540 - protein, 8 aa, Artificial sequence
  Protein classification predicting sequence
GIARVYGL

SEQ ID NO: 40541 - protein, 7 aa, Artificial sequence
  Protein classification predicting sequence
GIALNLE

SEQ ID NO: 40542 - protein, 10 aa, Artificial sequence
  Protein classification predicting sequence
GDGIARVYGL

SEQ ID NO: 40543 - protein, 8 aa, Artificial sequence
  Protein classification predicting sequence
NVGVVLMG

SEQ ID NO: 40544 - protein, 9 aa, Artificial sequence
  Protein classification predicting sequence
EGSSVKATG

SEQ ID NO: 40545 - protein, 6 aa, Artificial sequence
  Protein classification predicting sequence
GALDYT

SEQ ID NO: 40546 - protein, 11 aa, Artificial sequence
  Protein classification predicting sequence
NQLARGQRLRE

SEQ ID NO: 40547 - protein, 10 aa, Artificial sequence
  Protein classification predicting sequence
TIVVAASASE

SEQ ID NO: 40548 - protein, 7 aa, Artificial sequence
  Protein classification predicting sequence
VVRKLEE

SEQ ID NO: 40549 - protein, 9 aa, Artificial sequence
  Protein classification predicting sequence
TALPIVETQ

SEQ ID NO: 40550 - protein, 6 aa, Artificial sequence
  Protein classification predicting sequence
LQYIAP

SEQ ID NO: 40551 - protein, 12 aa, Artificial sequence
  Protein classification predicting sequence
LIGRVVNPLGQP

SEQ ID NO: 40552 - protein, 13 aa, Artificial sequence
  Protein classification predicting sequence
DYTIVVTASASQP

SEQ ID NO: 40553 - protein, 8 aa, Artificial sequence
  Protein classification predicting sequence
RERIEQYN

SEQ ID NO: 40554 - protein, 8 aa, Artificial sequence
  Protein classification predicting sequence
GIALNLES

SEQ ID NO: 40555 - protein, 12 aa, Artificial sequence
  Protein classification predicting sequence
GIALNLESKNVG

SEQ ID NO: 40556 - protein, 14 aa, Artificial sequence
  Protein classification predicting sequence
VKATGRIAQIPVSE

SEQ ID NO: 40557 - protein, 7 aa, Artificial sequence
  Protein classification predicting sequence
VICVYVA

SEQ ID NO: 40558 - protein, 20 aa, Artificial sequence
  Protein classification predicting sequence
ADSPATLQYLAPYTGAALAE

SEQ ID NO: 40559 - protein, 7 aa, Artificial sequence
  Protein classification predicting sequence
QNQLARG

SEQ ID NO: 40560 - protein, 10 aa, Artificial sequence
  Protein classification predicting sequence
RLRELLKQSQ

SEQ ID NO: 40561 - protein, 12 aa, Artificial sequence
  Protein classification predicting sequence
GIALNLESNNVG

SEQ ID NO: 40562 - protein, 7 aa, Artificial sequence
  Protein classification predicting sequence
DDLTKQA

SEQ ID NO: 40563 - protein, 6 aa, Artificial sequence
  Protein classification predicting sequence
GGGSLT

SEQ ID NO: 40564 - protein, 7 aa, Artificial sequence
  Protein classification predicting sequence
RPAINVG

SEQ ID NO: 40565 - protein, 6 aa, Artificial sequence
  Protein classification predicting sequence
EGSSVK

SEQ ID NO: 40566 - protein, 7 aa, Artificial sequence
  Protein classification predicting sequence
KLSDELG

SEQ ID NO: 40567 - protein, 13 aa, Artificial sequence
  Protein classification predicting sequence
VGLSVSRVGSAAQ

SEQ ID NO: 40568 - protein, 7 aa, Artificial sequence
  Protein classification predicting sequence
ATASDPA

SEQ ID NO: 40569 - protein, 7 aa, Artificial sequence
  Protein classification predicting sequence
IRADEIS

SEQ ID NO: 40570 - protein, 7 aa, Artificial sequence
  Protein classification predicting sequence
EVKAPGI

SEQ ID NO: 40571 - protein, 7 aa, Artificial sequence
  Protein classification predicting sequence
AMKQVAG

SEQ ID NO: 40572 - protein, 18 aa, Artificial sequence
  Protein classification predicting sequence
AMKQVAGTMKLELAQYRE

SEQ ID NO: 40573 - protein, 10 aa, Artificial sequence
  Protein classification predicting sequence
AFAQFGSDLD

SEQ ID NO: 40574 - protein, 7 aa, Artificial sequence
  Protein classification predicting sequence
RRSVYEP

SEQ ID NO: 40575 - protein, 8 aa, Artificial sequence
  Protein classification predicting sequence
QTGLIAID

SEQ ID NO: 40576 - protein, 9 aa, Artificial sequence
  Protein classification predicting sequence
TALPVIETQ

SEQ ID NO: 40577 - protein, 11 aa, Artificial sequence
  Protein classification predicting sequence
TIYTGTNGYLD

SEQ ID NO: 40578 - protein, 9 aa, Artificial sequence
  Protein classification predicting sequence
VEFASGVKG

SEQ ID NO: 40579 - protein, 11 aa, Artificial sequence
  Protein classification predicting sequence
GQKRSTVAQLV

SEQ ID NO: 40580 - protein, 21 aa, Artificial sequence
  Protein classification predicting sequence
KQAVAYRQMSLLLRRPPGREA

SEQ ID NO: 40581 - protein, 6 aa, Artificial sequence
  Protein classification predicting sequence
ELFYKG

SEQ ID NO: 40582 - protein, 6 aa, Artificial sequence
  Protein classification predicting sequence
QYSPMA

SEQ ID NO: 40583 - protein, 10 aa, Artificial sequence
  Protein classification predicting sequence
GAALAEYFMY

SEQ ID NO: 40584 - protein, 6 aa, Artificial sequence
  Protein classification predicting sequence
FMYNGK

SEQ ID NO: 40585 - protein, 12 aa, Artificial sequence
  Protein classification predicting sequence
GISVSRVGSAAQ

SEQ ID NO: 40586 - protein, 11 aa, Artificial sequence
  Protein classification predicting sequence
GIRPAINVGIS

SEQ ID NO: 40587 - protein, 8 aa, Artificial sequence
  Protein classification predicting sequence
SRVGSAAQ

SEQ ID NO: 40588 - protein, 7 aa, Artificial sequence
  Protein classification predicting sequence
EIISSTK

SEQ ID NO: 40589 - protein, 17 aa, Artificial sequence
  Protein classification predicting sequence
GCAMGEYFRDRGEDALI

SEQ ID NO: 40590 - protein, 9 aa, Artificial sequence
  Protein classification predicting sequence
VMAGELVEF

SEQ ID NO: 40591 - protein, 13 aa, Artificial sequence
  Protein classification predicting sequence
NALAKPIDGRGEI

SEQ ID NO: 40592 - protein, 7 aa, Artificial sequence
  Protein classification predicting sequence
TIYTGTN

SEQ ID NO: 40593 - protein, 8 aa, Artificial sequence
  Protein classification predicting sequence
LKEAIQEQ

SEQ ID NO: 40594 - protein, 10 aa, Artificial sequence
  Protein classification predicting sequence
VICVYVAIGQ

SEQ ID NO: 40595 - protein, 8 aa, Artificial sequence
  Protein classification predicting sequence
ASSVAQVV

SEQ ID NO: 40596 - protein, 16 aa, Artificial sequence
  Protein classification predicting sequence
ADSPATLQYLAPYTGA

SEQ ID NO: 40597 - protein, 10 aa, Artificial sequence
  Protein classification predicting sequence
IIYDDLSKQA

SEQ ID NO: 40598 - protein, 18 aa, Artificial sequence
  Protein classification predicting sequence
VAGKLKLELAQFAELEAF

SEQ ID NO: 40599 - protein, 8 aa, Artificial sequence
  Protein classification predicting sequence
EGDTVKRT

SEQ ID NO: 40600 - protein, 10 aa, Artificial sequence
  Protein classification predicting sequence
VAATASDPAP

SEQ ID NO: 40601 - protein, 7 aa, Artificial sequence
  Protein classification predicting sequence
RKSVHEP

SEQ ID NO: 40602 - protein, 8 aa, Artificial sequence
  Protein classification predicting sequence
FRDNGMHA

SEQ ID NO: 40603 - protein, 9 aa, Artificial sequence
  Protein classification predicting sequence
LFYKGIRPA

SEQ ID NO: 40604 - protein, 12 aa, Artificial sequence
  Protein classification predicting sequence
GRVLSIGDGIAR

SEQ ID NO: 40605 - protein, 7 aa, Artificial sequence
  Protein classification predicting sequence
FRDNGKH

SEQ ID NO: 40606 - protein, 8 aa, Artificial sequence
  Protein classification predicting sequence
LAQYREVA

SEQ ID NO: 40607 - protein, 13 aa, Artificial sequence
  Protein classification predicting sequence
GTVLQVGDGIARI

SEQ ID NO: 40608 - protein, 27 aa, Artificial sequence
  Protein classification predicting sequence
GRGQRELIIGDRQTGKTAVATDTILNQ

SEQ ID NO: 40609 - protein, 25 aa, Artificial sequence
  Protein classification predicting sequence
GIRPAINVGISVSRVGSAAQIKAMK

SEQ ID NO: 40610 - protein, 10 aa, Artificial sequence
  Protein classification predicting sequence
QSAPLTVEEQ

SEQ ID NO: 40611 - protein, 7 aa, Artificial sequence
  Protein classification predicting sequence
GYLDSLE

SEQ ID NO: 40612 - protein, 19 aa, Artificial sequence
  Protein classification predicting sequence
EGDEVKRTGRIMEVPVGEE

SEQ ID NO: 40613 - protein, 19 aa, Artificial sequence
  Protein classification predicting sequence
IGRVVNPLGQPIDGQGPIN

SEQ ID NO: 40614 - protein, 54 aa, Artificial sequence
  Protein classification predicting sequence
TKTRPVEKKATGVMDRKSVDEPLQTGIKAIDALVPIGRGQRELIIGDRQTGKTT

SEQ ID NO: 40615 - protein, 34 aa, Artificial sequence
  Protein classification predicting sequence
TICIYVAIGQKDSTVRANVEKLRQAGALDYTIVV

SEQ ID NO: 40616 - protein, 9 aa, Artificial sequence
  Protein classification predicting sequence
GALDYTIVV

SEQ ID NO: 40617 - protein, 11 aa, Artificial sequence
  Protein classification predicting sequence
PLPVEHQVLII

SEQ ID NO: 40618 - protein, 19 aa, Artificial sequence
  Protein classification predicting sequence
NHWAESNATELLNEIRETG

SEQ ID NO: 40619 - protein, 9 aa, Artificial sequence
  Protein classification predicting sequence
RRALELQAP

SEQ ID NO: 40620 - protein, 7 aa, Artificial sequence
  Protein classification predicting sequence
VMQRKSV

SEQ ID NO: 40621 - protein, 7 aa, Artificial sequence
  Protein classification predicting sequence
YTTIVAA

SEQ ID NO: 40622 - protein, 6 aa, Artificial sequence
  Protein classification predicting sequence
LAPYTG

SEQ ID NO: 40623 - protein, 10 aa, Artificial sequence
  Protein classification predicting sequence
NVGISVSRVG

SEQ ID NO: 40624 - protein, 7 aa, Artificial sequence
  Protein classification predicting sequence
EISALIK

SEQ ID NO: 40625 - protein, 8 aa, Artificial sequence
  Protein classification predicting sequence
APYAGVAM

SEQ ID NO: 40626 - protein, 27 aa, Artificial sequence
  Protein classification predicting sequence
SLLLRRPPGREAYPGDVFYLHSRLLER

SEQ ID NO: 40627 - protein, 6 aa, Artificial sequence
  Protein classification predicting sequence
GIRPAI

SEQ ID NO: 40628 - protein, 7 aa, Artificial sequence
  Protein classification predicting sequence
GRVVDAL

SEQ ID NO: 40629 - protein, 9 aa, Artificial sequence
  Protein classification predicting sequence
DTILNQKGQ

SEQ ID NO: 40630 - protein, 8 aa, Artificial sequence
  Protein classification predicting sequence
CVYVAIGQ

SEQ ID NO: 40631 - protein, 7 aa, Artificial sequence
  Protein classification predicting sequence
LQYLAPY

SEQ ID NO: 40632 - protein, 7 aa, Artificial sequence
  Protein classification predicting sequence
AFAQFAS

SEQ ID NO: 40633 - protein, 6 aa, Artificial sequence
  Protein classification predicting sequence
AEYFMY

SEQ ID NO: 40634 - protein, 9 aa, Artificial sequence
  Protein classification predicting sequence
GTVLQVGDG

SEQ ID NO: 40635 - protein, 7 aa, Artificial sequence
  Protein classification predicting sequence
TGKTAIA

SEQ ID NO: 40636 - protein, 8 aa, Artificial sequence
  Protein classification predicting sequence
AYRQMSLL

SEQ ID NO: 40637 - protein, 9 aa, Artificial sequence
  Protein classification predicting sequence
QLARGQRLR

SEQ ID NO: 40638 - protein, 7 aa, Artificial sequence
  Protein classification predicting sequence
LGQPVDG

SEQ ID NO: 40639 - protein, 6 aa, Artificial sequence
  Protein classification predicting sequence
QYLAPY

SEQ ID NO: 40640 - protein, 7 aa, Artificial sequence
  Protein classification predicting sequence
MGEYFRD

SEQ ID NO: 40641 - protein, 44 aa, Artificial sequence
  Protein classification predicting sequence
GIRPAINVGISVSRVGSAAQIKAMKQVAGKLKLELAQFAELEAF

SEQ ID NO: 40642 - protein, 20 aa, Artificial sequence
  Protein classification predicting sequence
ALNLERDSVGAVVMGPYADL

SEQ ID NO: 40643 - protein, 8 aa, Artificial sequence
  Protein classification predicting sequence
AIDAIINQ

SEQ ID NO: 40644 - protein, 9 aa, Artificial sequence
  Protein classification predicting sequence
NALAKPIDG

SEQ ID NO: 40645 - protein, 8 aa, Artificial sequence
  Protein classification predicting sequence
RLIESPAP

SEQ ID NO: 40646 - protein, 32 aa, Artificial sequence
  Protein classification predicting sequence
GLRNVQAEEMVEFSSGLKGMSLNLEPDNVGVV

SEQ ID NO: 40647 - protein, 16 aa, Artificial sequence
  Protein classification predicting sequence
KRLTDADAMKYTIVVS

SEQ ID NO: 40648 - protein, 8 aa, Artificial sequence
  Protein classification predicting sequence
PMAIEEQV

SEQ ID NO: 40649 - protein, 9 aa, Artificial sequence
  Protein classification predicting sequence
EPSKITKFE

SEQ ID NO: 40650 - protein, 7 aa, Artificial sequence
  Protein classification predicting sequence
VCQVIGA

SEQ ID NO: 40651 - protein, 21 aa, Artificial sequence
  Protein classification predicting sequence
SEVSALLGRIPSAVGYQPTLA

SEQ ID NO: 40652 - protein, 15 aa, Artificial sequence
  Protein classification predicting sequence
ILVTGIKVVDLLAPY

SEQ ID NO: 40653 - protein, 13 aa, Artificial sequence
  Protein classification predicting sequence
GQMNEPPGARARV

SEQ ID NO: 40654 - protein, 18 aa, Artificial sequence
  Protein classification predicting sequence
YKNLQDIIAILGMDELSE

SEQ ID NO: 40655 - protein, 15 aa, Artificial sequence
  Protein classification predicting sequence
LQDIIAILGMDELSE

SEQ ID NO: 40656 - protein, 7 aa, Artificial sequence
  Protein classification predicting sequence
DELSEED

SEQ ID NO: 40657 - protein, 7 aa, Artificial sequence
  Protein classification predicting sequence
VAEVFTG

SEQ ID NO: 40658 - protein, 6 aa, Artificial sequence
  Protein classification predicting sequence
AFYMVG

SEQ ID NO: 40659 - protein, 7 aa, Artificial sequence
  Protein classification predicting sequence
FYMVGGI

SEQ ID NO: 40660 - protein, 7 aa, Artificial sequence
  Protein classification predicting sequence
IGAVVDV

SEQ ID NO: 40661 - protein, 7 aa, Artificial sequence
  Protein classification predicting sequence
TVRTIAM

SEQ ID NO: 40662 - protein, 20 aa, Artificial sequence
  Protein classification predicting sequence
RARVGLTGLTVAEHFRDAEG

SEQ ID NO: 40663 - protein, 9 aa, Artificial sequence
  Protein classification predicting sequence
FTGAPGKYV

SEQ ID NO: 40664 - protein, 33 aa, Artificial sequence
  Protein classification predicting sequence
MVRTIAMDGTEGLVRGQRVLNTGSPITVPVGRA

SEQ ID NO: 40665 - protein, 8 aa, Artificial sequence
  Protein classification predicting sequence
LDGKYDDL

SEQ ID NO: 40666 - protein, 24 aa, Artificial sequence
  Protein classification predicting sequence
VLQNYKNLQDIIAILGMDELSEDD

SEQ ID NO: 40667 - protein, 9 aa, Artificial sequence
  Protein classification predicting sequence
PIHRSAPAF

SEQ ID NO: 40668 - protein, 23 aa, Artificial sequence
  Protein classification predicting sequence
KGIYPAVDPLDSTSTMLQPRIVG

SEQ ID NO: 40669 - protein, 9 aa, Artificial sequence
  Protein classification predicting sequence
TTVLSRGLA

SEQ ID NO: 40670 - protein, 6 aa, Artificial sequence
  Protein classification predicting sequence
VARARK

SEQ ID NO: 40671 - protein, 16 aa, Artificial sequence
  Protein classification predicting sequence
GQEINVTCEVQQLLGN

SEQ ID NO: 40672 - protein, 7 aa, Artificial sequence
  Protein classification predicting sequence
VIDTGAP

SEQ ID NO: 40673 - protein, 6 aa, Artificial sequence
  Protein classification predicting sequence
TTSPIH

SEQ ID NO: 40674 - protein, 27 aa, Artificial sequence
  Protein classification predicting sequence
GSITSIQAVYVPADDLTDPAPATTFAH

SEQ ID NO: 40675 - protein, 18 aa, Artificial sequence
  Protein classification predicting sequence
YVPADDLTDPAPATTFAH

SEQ ID NO: 40676 - protein, 7 aa, Artificial sequence
  Protein classification predicting sequence
EFEGVKE

SEQ ID NO: 40677 - protein, 7 aa, Artificial sequence
  Protein classification predicting sequence
PIKIPVG

SEQ ID NO: 40678 - protein, 9 aa, Artificial sequence
  Protein classification predicting sequence
EILETGIKV

SEQ ID NO: 40679 - protein, 6 aa, Artificial sequence
  Protein classification predicting sequence
VGEEHY

SEQ ID NO: 40680 - protein, 6 aa, Artificial sequence
  Protein classification predicting sequence
FLSQPF

SEQ ID NO: 40681 - protein, 6 aa, Artificial sequence
  Protein classification predicting sequence
ELSEED

SEQ ID NO: 40682 - protein, 7 aa, Artificial sequence
  Protein classification predicting sequence
PLSVPVG

SEQ ID NO: 40683 - protein, 6 aa, Artificial sequence
  Protein classification predicting sequence
SAPAFI

SEQ ID NO: 40684 - protein, 8 aa, Artificial sequence
  Protein classification predicting sequence
CEVQQLLG

SEQ ID NO: 40685 - protein, 7 aa, Artificial sequence
  Protein classification predicting sequence
RGMEVID

SEQ ID NO: 40686 - protein, 9 aa, Artificial sequence
  Protein classification predicting sequence
GAPISVPVG

SEQ ID NO: 40687 - protein, 22 aa, Artificial sequence
  Protein classification predicting sequence
TSIQAIYVPADDYTDPAPATTF

SEQ ID NO: 40688 - protein, 10 aa, Artificial sequence
  Protein classification predicting sequence
HLDATTNLER

SEQ ID NO: 40689 - protein, 22 aa, Artificial sequence
  Protein classification predicting sequence
RARRIQFFLSQNFHVAEQFTGQ

SEQ ID NO: 40690 - protein, 11 aa, Artificial sequence
  Protein classification predicting sequence
DTGAPISVPVG

SEQ ID NO: 40691 - protein, 7 aa, Artificial sequence
  Protein classification predicting sequence
APKFEEL

SEQ ID NO: 40692 - protein, 7 aa, Artificial sequence
  Protein classification predicting sequence
NIAQEHG

SEQ ID NO: 40693 - protein, 7 aa, Artificial sequence
  Protein classification predicting sequence
GSYVPVK

SEQ ID NO: 40694 - protein, 7 aa, Artificial sequence
  Protein classification predicting sequence
GENTVRT

SEQ ID NO: 40695 - protein, 8 aa, Artificial sequence
  Protein classification predicting sequence
TGIKVIDL

SEQ ID NO: 40696 - protein, 7 aa, Artificial sequence
  Protein classification predicting sequence
VKQILQR

SEQ ID NO: 40697 - protein, 41 aa, Artificial sequence
  Protein classification predicting sequence
EMSDSGVIKKTAMVFGQMNEPPGARMRVALSGLTMAEYFRD

SEQ ID NO: 40698 - protein, 7 aa, Artificial sequence
  Protein classification predicting sequence
IVGEEHY

SEQ ID NO: 40699 - protein, 12 aa, Artificial sequence
  Protein classification predicting sequence
VFGQMNEPPGAR

SEQ ID NO: 40700 - protein, 6 aa, Artificial sequence
  Protein classification predicting sequence
VQQTLQ

SEQ ID NO: 40701 - protein, 12 aa, Artificial sequence
  Protein classification predicting sequence
VTLGRVFNVLGE

SEQ ID NO: 40702 - protein, 20 aa, Artificial sequence
  Protein classification predicting sequence
GYQPTLATEMGQLQERITST

SEQ ID NO: 40703 - protein, 8 aa, Artificial sequence
  Protein classification predicting sequence
GSITSIQA

SEQ ID NO: 40704 - protein, 26 aa, Artificial sequence
  Protein classification predicting sequence
STSRALAPEIVGEEHYQVARKVQQTL

SEQ ID NO: 40705 - protein, 11 aa, Artificial sequence
  Protein classification predicting sequence
TLEVALHLGDD

SEQ ID NO: 40706 - protein, 13 aa, Artificial sequence
  Protein classification predicting sequence
RGMEVIDTGAPIS

SEQ ID NO: 40707 - protein, 30 aa, Artificial sequence
  Protein classification predicting sequence
DLLAPYIKGGKIGLFGGAGVGKTVLIQELI

SEQ ID NO: 40708 - protein, 14 aa, Artificial sequence
  Protein classification predicting sequence
NIAQEHGGISVFAG

SEQ ID NO: 40709 - protein, 23 aa, Artificial sequence
  Protein classification predicting sequence
GERTREGNDLYHEMKDSGVISKT

SEQ ID NO: 40710 - protein, 26 aa, Artificial sequence
  Protein classification predicting sequence
IDLTLEVALHLGDDTVRTIAMASTDG

SEQ ID NO: 40711 - protein, 8 aa, Artificial sequence
  Protein classification predicting sequence
EMSDSGVI

SEQ ID NO: 40712 - protein, 39 aa, Artificial sequence
  Protein classification predicting sequence
VGSVTSIQAIYVPADDYTDPAPATTFAHLDATTNLERKL

SEQ ID NO: 40713 - protein, 14 aa, Artificial sequence
  Protein classification predicting sequence
FAHLDATTNLERKL

SEQ ID NO: 40714 - protein, 18 aa, Artificial sequence
  Protein classification predicting sequence
EMGIYPAVDPLASTSRAL

SEQ ID NO: 40715 - protein, 9 aa, Artificial sequence
  Protein classification predicting sequence
PEIVGEEHY

SEQ ID NO: 40716 - protein, 22 aa, Artificial sequence
  Protein classification predicting sequence
LAAKGIYPAVDPLDSTSTMLQP

SEQ ID NO: 40717 - protein, 12 aa, Artificial sequence
  Protein classification predicting sequence
RGFQLILSGELD

SEQ ID NO: 40718 - protein, 31 aa, Artificial sequence
  Protein classification predicting sequence
IPVGPETLGRIMNVIGEPIDERGPIKTKQFA

SEQ ID NO: 40719 - protein, 17 aa, Artificial sequence
  Protein classification predicting sequence
SKVALVYGQMNEPPGAR

SEQ ID NO: 40720 - protein, 11 aa, Artificial sequence
  Protein classification predicting sequence
FPPGKMPNIYN

SEQ ID NO: 40721 - protein, 26 aa, Artificial sequence
  Protein classification predicting sequence
TLQRYKELQDIIAILGLDELSEEDRL

SEQ ID NO: 40722 - protein, 17 aa, Artificial sequence
  Protein classification predicting sequence
KGGKVGLFGGAGVGKTV

SEQ ID NO: 40723 - protein, 8 aa, Artificial sequence
  Protein classification predicting sequence
AEKFRDEG

SEQ ID NO: 40724 - protein, 29 aa, Artificial sequence
  Protein classification predicting sequence
GSITSVQAVYVPADDLTDPSPATTFAHLD

SEQ ID NO: 40725 - protein, 14 aa, Artificial sequence
  Protein classification predicting sequence
ELKDIIAILGMDEL

SEQ ID NO: 40726 - protein, 6 aa, Artificial sequence
  Protein classification predicting sequence
VRTIAM

SEQ ID NO: 40727 - protein, 6 aa, Artificial sequence
  Protein classification predicting sequence
IHRSAP

SEQ ID NO: 40728 - protein, 6 aa, Artificial sequence
  Protein classification predicting sequence
LGQPID

SEQ ID NO: 40729 - protein, 7 aa, Artificial sequence
  Protein classification predicting sequence
VAEIFTG

SEQ ID NO: 40730 - protein, 14 aa, Artificial sequence
  Protein classification predicting sequence
KVALVYGQMNEPPG

SEQ ID NO: 40731 - protein, 7 aa, Artificial sequence
  Protein classification predicting sequence
VARARKI

SEQ ID NO: 40732 - protein, 27 aa, Artificial sequence
  Protein classification predicting sequence
YVPADDLTDPAPATTFAHLDATTVLSR

SEQ ID NO: 40733 - protein, 6 aa, Artificial sequence
  Protein classification predicting sequence
VINEEN

SEQ ID NO: 40734 - protein, 29 aa, Artificial sequence
  Protein classification predicting sequence
VARARKIERFLSQPFFVAEVFTGSPGKYV

SEQ ID NO: 40735 - protein, 8 aa, Artificial sequence
  Protein classification predicting sequence
QIIGPVLD

SEQ ID NO: 40736 - protein, 6 aa, Artificial sequence
  Protein classification predicting sequence
VRAVSM

SEQ ID NO: 40737 - protein, 13 aa, Artificial sequence
  Protein classification predicting sequence
LAAKGIYPAVDPL

SEQ ID NO: 40738 - protein, 9 aa, Artificial sequence
  Protein classification predicting sequence
LDTKLSIFE

SEQ ID NO: 40739 - protein, 8 aa, Artificial sequence
  Protein classification predicting sequence
EMKDSGVI

SEQ ID NO: 40740 - protein, 7 aa, Artificial sequence
  Protein classification predicting sequence
LGRIFNV

SEQ ID NO: 40741 - protein, 9 aa, Artificial sequence
  Protein classification predicting sequence
SVFTGVGER

SEQ ID NO: 40742 - protein, 8 aa, Artificial sequence
  Protein classification predicting sequence
LEVAQHLG

SEQ ID NO: 40743 - protein, 11 aa, Artificial sequence
  Protein classification predicting sequence
LEVAQHLGDNL

SEQ ID NO: 40744 - protein, 7 aa, Artificial sequence
  Protein classification predicting sequence
PISVPVG

SEQ ID NO: 40745 - protein, 6 aa, Artificial sequence
  Protein classification predicting sequence
RMRVAL

SEQ ID NO: 40746 - protein, 7 aa, Artificial sequence
  Protein classification predicting sequence
FFVAEKF

SEQ ID NO: 40747 - protein, 9 aa, Artificial sequence
  Protein classification predicting sequence
RGMEVIDTG

SEQ ID NO: 40748 - protein, 7 aa, Artificial sequence
  Protein classification predicting sequence
PITVPVG

SEQ ID NO: 40749 - protein, 6 aa, Artificial sequence
  Protein classification predicting sequence
AKAHGG

SEQ ID NO: 40750 - protein, 6 aa, Artificial sequence
  Protein classification predicting sequence
PAFTQL

SEQ ID NO: 40751 - protein, 12 aa, Artificial sequence
  Protein classification predicting sequence
LQERITSTTKGS

SEQ ID NO: 40752 - protein, 7 aa, Artificial sequence
  Protein classification predicting sequence
LPEQAFY

SEQ ID NO: 40753 - protein, 15 aa, Artificial sequence
  Protein classification predicting sequence
GQMNEPPGARARVAL

SEQ ID NO: 40754 - protein, 6 aa, Artificial sequence
  Protein classification predicting sequence
CEVQQL

SEQ ID NO: 40755 - protein, 7 aa, Artificial sequence
  Protein classification predicting sequence
PIRIPVG

SEQ ID NO: 40756 - protein, 13 aa, Artificial sequence
  Protein classification predicting sequence
NVIGEPIDERGPI

SEQ ID NO: 40757 - protein, 79 aa, Artificial sequence
  Protein classification predicting sequence
TSKVALVYGQMNEPPGARARVALTGLTVAEYFRDQEGQDVLLFIDNIFRFTQAGSEVSALLGRIPSAVGYQPTLATDMG

SEQ ID NO: 40758 - protein, 8 aa, Artificial sequence
  Protein classification predicting sequence
IEEVVEKA

SEQ ID NO: 40759 - protein, 8 aa, Artificial sequence
  Protein classification predicting sequence
GKIVQVIG

SEQ ID NO: 40760 - protein, 7 aa, Artificial sequence
  Protein classification predicting sequence
RFLSQPF

SEQ ID NO: 40761 - protein, 17 aa, Artificial sequence
  Protein classification predicting sequence
SVFTGVGERTREGNDLY

SEQ ID NO: 40762 - protein, 20 aa, Artificial sequence
  Protein classification predicting sequence
TSIQAIYVPADDYTDPAPAT

SEQ ID NO: 40763 - protein, 8 aa, Artificial sequence
  Protein classification predicting sequence
QFFLSQNF

SEQ ID NO: 40764 - protein, 6 aa, Artificial sequence
  Protein classification predicting sequence
ESKVAL

SEQ ID NO: 40765 - protein, 20 aa, Artificial sequence
  Protein classification predicting sequence
FLSQPFFVAEVFTGSPGKYV

SEQ ID NO: 40766 - protein, 8 aa, Artificial sequence
  Protein classification predicting sequence
IRNIAIEH

SEQ ID NO: 40767 - protein, 9 aa, Artificial sequence
  Protein classification predicting sequence
QAIYVPADD

SEQ ID NO: 40768 - protein, 9 aa, Artificial sequence
  Protein classification predicting sequence
RARKIQRFL

SEQ ID NO: 40769 - protein, 9 aa, Artificial sequence
  Protein classification predicting sequence
SIFETGIKV

SEQ ID NO: 40770 - protein, 6 aa, Artificial sequence
  Protein classification predicting sequence
VINEKN

SEQ ID NO: 40771 - protein, 19 aa, Artificial sequence
  Protein classification predicting sequence
KGIYPAVDPLDSTSTMLQP

SEQ ID NO: 40772 - protein, 6 aa, Artificial sequence
  Protein classification predicting sequence
TAQRVK

SEQ ID NO: 40773 - protein, 8 aa, Artificial sequence
  Protein classification predicting sequence
FRLVGRIE

SEQ ID NO: 40774 - protein, 10 aa, Artificial sequence
  Protein classification predicting sequence
VTCEVQQLLG

SEQ ID NO: 40775 - protein, 12 aa, Artificial sequence
  Protein classification predicting sequence
VTCEVQQLLGNN

SEQ ID NO: 40776 - protein, 8 aa, Artificial sequence
  Protein classification predicting sequence
APISVPVG

SEQ ID NO: 40777 - protein, 25 aa, Artificial sequence
  Protein classification predicting sequence
GSITSIQAVYVPADDLTDPAPATTF

SEQ ID NO: 40778 - protein, 10 aa, Artificial sequence
  Protein classification predicting sequence
GKIVQIIGAV

SEQ ID NO: 40779 - protein, 8 aa, Artificial sequence
  Protein classification predicting sequence
LEVQQQLG

SEQ ID NO: 40780 - protein, 6 aa, Artificial sequence
  Protein classification predicting sequence
EHYDVA

SEQ ID NO: 40781 - protein, 10 aa, Artificial sequence
  Protein classification predicting sequence
EHYDVARGVQ

SEQ ID NO: 40782 - protein, 6 aa, Artificial sequence
  Protein classification predicting sequence
TEGLVR

SEQ ID NO: 40783 - protein, 11 aa, Artificial sequence
  Protein classification predicting sequence
IPVGPETLGRI

SEQ ID NO: 40784 - protein, 7 aa, Artificial sequence
  Protein classification predicting sequence
SRIMDPN

SEQ ID NO: 40785 - protein, 8 aa, Artificial sequence
  Protein classification predicting sequence
EGRDVLLF

SEQ ID NO: 40786 - protein, 16 aa, Artificial sequence
  Protein classification predicting sequence
GVGERTREGNDLYREM

SEQ ID NO: 40787 - protein, 9 aa, Artificial sequence
  Protein classification predicting sequence
MGLLQERIT

SEQ ID NO: 40788 - protein, 11 aa, Artificial sequence
  Protein classification predicting sequence
QERITTTKKGS

SEQ ID NO: 40789 - protein, 8 aa, Artificial sequence
  Protein classification predicting sequence
TKKGSVTS

SEQ ID NO: 40790 - protein, 13 aa, Artificial sequence
  Protein classification predicting sequence
ELGIYPAVDPLDS

SEQ ID NO: 40791 - protein, 20 aa, Artificial sequence
  Protein classification predicting sequence
TAMVFGQMNEPPGARMRVAL

SEQ ID NO: 40792 - protein, 24 aa, Artificial sequence
  Protein classification predicting sequence
TAMVFGQMNEPPGARMRVALTGLT

SEQ ID NO: 40793 - protein, 18 aa, Artificial sequence
  Protein classification predicting sequence
TSIQAIYVPADDYTDPAP

SEQ ID NO: 40794 - protein, 7 aa, Artificial sequence
  Protein classification predicting sequence
ILEGKYD

SEQ ID NO: 40795 - protein, 7 aa, Artificial sequence
  Protein classification predicting sequence
KITLEVA

SEQ ID NO: 40796 - protein, 7 aa, Artificial sequence
  Protein classification predicting sequence
TDGLTRG

SEQ ID NO: 40797 - protein, 10 aa, Artificial sequence
  Protein classification predicting sequence
TLGRVFNVLG

SEQ ID NO: 40798 - protein, 7 aa, Artificial sequence
  Protein classification predicting sequence
AEYFRDV

SEQ ID NO: 40799 - protein, 9 aa, Artificial sequence
  Protein classification predicting sequence
QIIGPVLDV

SEQ ID NO: 40800 - protein, 7 aa, Artificial sequence
  Protein classification predicting sequence
STIEEKS

SEQ ID NO: 40801 - protein, 32 aa, Artificial sequence
  Protein classification predicting sequence
SRDTADKQINVTCEVQQLLGNNRVRAVAMSAT

SEQ ID NO: 40802 - protein, 12 aa, Artificial sequence
  Protein classification predicting sequence
TLGRIFNVLGEP

SEQ ID NO: 40803 - protein, 8 aa, Artificial sequence
  Protein classification predicting sequence
DNLGPVDT

SEQ ID NO: 40804 - protein, 9 aa, Artificial sequence
  Protein classification predicting sequence
STKKGSITS

SEQ ID NO: 40805 - protein, 54 aa, Artificial sequence
  Protein classification predicting sequence
APAFTQLDTKLSIFETGIKVVDLLAPYRRGGKIGLFGGAGVGKTVLIMELINNI

SEQ ID NO: 40806 - protein, 7 aa, Artificial sequence
  Protein classification predicting sequence
GRDTVGQ

SEQ ID NO: 40807 - protein, 78 aa, Artificial sequence
  Protein classification predicting sequence
LDTKLSIFETGIKVVDLLAPYRRGGKIGLFGGAGVGKTVLIMELINNIAKAHGGVSVFGGVGERTREGNDLYMEMKES

SEQ ID NO: 40808 - protein, 19 aa, Artificial sequence
  Protein classification predicting sequence
FPPGKMPNIYNALVVKGRD

SEQ ID NO: 40809 - protein, 10 aa, Artificial sequence
  Protein classification predicting sequence
EHYETAQRVK

SEQ ID NO: 40810 - protein, 18 aa, Artificial sequence
  Protein classification predicting sequence
PEQAFYLVGNIDEATAKA

SEQ ID NO: 40811 - protein, 7 aa, Artificial sequence
  Protein classification predicting sequence
IERFLSQ

SEQ ID NO: 40812 - protein, 21 aa, Artificial sequence
  Protein classification predicting sequence
PYAKGGKIGLFGGAGVGKTVL

SEQ ID NO: 40813 - protein, 11 aa, Artificial sequence
  Protein classification predicting sequence
LTMAEYFRDVN

SEQ ID NO: 40814 - protein, 24 aa, Artificial sequence
  Protein classification predicting sequence
EVSALLGRMPSAVGYQPTLAEEMG

SEQ ID NO: 40815 - protein, 6 aa, Artificial sequence
  Protein classification predicting sequence
DLLTPY

SEQ ID NO: 40816 - protein, 8 aa, Artificial sequence
  Protein classification predicting sequence
MPNIYNAL

SEQ ID NO: 40817 - protein, 6 aa, Artificial sequence
  Protein classification predicting sequence
ESKVIN

SEQ ID NO: 40818 - protein, 6 aa, Artificial sequence
  Protein classification predicting sequence
QHLGEN

SEQ ID NO: 40819 - protein, 12 aa, Artificial sequence
  Protein classification predicting sequence
IAMDGTEGLVRG

SEQ ID NO: 40820 - protein, 8 aa, Artificial sequence
  Protein classification predicting sequence
PIDERGPI

SEQ ID NO: 40821 - protein, 8 aa, Artificial sequence
  Protein classification predicting sequence
IHAEAPEF

SEQ ID NO: 40822 - protein, 15 aa, Artificial sequence
  Protein classification predicting sequence
SVFTGVGERTREGND

SEQ ID NO: 40823 - protein, 20 aa, Artificial sequence
  Protein classification predicting sequence
CEVQQLLGNNRVRAVAMSAT

SEQ ID NO: 40824 - protein, 17 aa, Artificial sequence
  Protein classification predicting sequence
SVPVGGATLGRIFNVLG

SEQ ID NO: 40825 - protein, 9 aa, Artificial sequence
  Protein classification predicting sequence
EVQQLLGDN

SEQ ID NO: 40826 - protein, 12 aa, Artificial sequence
  Protein classification predicting sequence
ERFLSQPFFVAE

SEQ ID NO: 40827 - protein, 15 aa, Artificial sequence
  Protein classification predicting sequence
FPPGKMPNIYNALVV

SEQ ID NO: 40828 - protein, 11 aa, Artificial sequence
  Protein classification predicting sequence
DTGAPLSVPVG

SEQ ID NO: 40829 - protein, 15 aa, Artificial sequence
  Protein classification predicting sequence
VKETLQRYKELQDII

SEQ ID NO: 40830 - protein, 8 aa, Artificial sequence
  Protein classification predicting sequence
LILSGELD

SEQ ID NO: 40831 - protein, 7 aa, Artificial sequence
  Protein classification predicting sequence
IYNALVV

SEQ ID NO: 40832 - protein, 27 aa, Artificial sequence
  Protein classification predicting sequence
SVPVGGATLGRIFNVLGEPVDNLGPVD

SEQ ID NO: 40833 - protein, 8 aa, Artificial sequence
  Protein classification predicting sequence
LAETIRGF

SEQ ID NO: 40834 - protein, 33 aa, Artificial sequence
  Protein classification predicting sequence
LAETIRGFQLILSGELDGLPEQAFYLVGNIDEA

SEQ ID NO: 40835 - protein, 38 aa, Artificial sequence
  Protein classification predicting sequence
LAETIRGFQLILSGELDGLPEQAFYLVGNIDEASTKAI

SEQ ID NO: 40836 - protein, 7 aa, Artificial sequence
  Protein classification predicting sequence
FPPGKMP

SEQ ID NO: 40837 - protein, 18 aa, Artificial sequence
  Protein classification predicting sequence
SQPFFVAEVFTGSPGKYV

SEQ ID NO: 40838 - protein, 7 aa, Artificial sequence
  Protein classification predicting sequence
PIHRPAP

SEQ ID NO: 40839 - protein, 7 aa, Artificial sequence
  Protein classification predicting sequence
HGGYSVF

SEQ ID NO: 40840 - protein, 35 aa, Artificial sequence
  Protein classification predicting sequence
FTHLDATTVLSRQIAELGIYPAVDPLDSTSRILDP

SEQ ID NO: 40841 - protein, 8 aa, Artificial sequence
  Protein classification predicting sequence
TGSPGKYV

SEQ ID NO: 40842 - protein, 6 aa, Artificial sequence
  Protein classification predicting sequence
MPNIYN

SEQ ID NO: 40843 - protein, 41 aa, Artificial sequence
  Protein classification predicting sequence
ESKVALVYGQMNEPPGARMRVGLTALTMAEYFRDVNEQDVL

SEQ ID NO: 40844 - protein, 25 aa, Artificial sequence
  Protein classification predicting sequence
SRGLAAKGIYPAVDPLDSTSTMLQP

SEQ ID NO: 40845 - protein, 14 aa, Artificial sequence
  Protein classification predicting sequence
FYLVGNIDEATAKA

SEQ ID NO: 40846 - protein, 8 aa, Artificial sequence
  Protein classification predicting sequence
AMSATDGL

SEQ ID NO: 40847 - protein, 8 aa, Artificial sequence
  Protein classification predicting sequence
AEYFRDVN

SEQ ID NO: 40848 - protein, 7 aa, Artificial sequence
  Protein classification predicting sequence
YMEMKES

SEQ ID NO: 40849 - protein, 24 aa, Artificial sequence
  Protein classification predicting sequence
GSITSIQAVYVPADDLTDPAPATT

SEQ ID NO: 40850 - protein, 16 aa, Artificial sequence
  Protein classification predicting sequence
KGIYPAVDPLDSTSTM

SEQ ID NO: 40851 - protein, 23 aa, Artificial sequence
  Protein classification predicting sequence
QRYKELQDIIAILGLDELSEEDR

SEQ ID NO: 40852 - protein, 34 aa, Artificial sequence
  Protein classification predicting sequence
ESKVALVYGQMNEPPGARMRVGLTALTMAEYFRD

SEQ ID NO: 40853 - protein, 36 aa, Artificial sequence
  Protein classification predicting sequence
ESKVALVYGQMNEPPGARMRVGLTALTMAEYFRDVN

SEQ ID NO: 40854 - protein, 7 aa, Artificial sequence
  Protein classification predicting sequence
TEGLVRG

SEQ ID NO: 40855 - protein, 22 aa, Artificial sequence
  Protein classification predicting sequence
SKVALVYGQMNEPPGARARVAL

SEQ ID NO: 40856 - protein, 7 aa, Artificial sequence
  Protein classification predicting sequence
VFTGSPG

SEQ ID NO: 40857 - protein, 28 aa, Artificial sequence
  Protein classification predicting sequence
SVFAGVGERTREGNDLYHEMIESGVINL

SEQ ID NO: 40858 - protein, 7 aa, Artificial sequence
  Protein classification predicting sequence
DDVIAKA

SEQ ID NO: 40859 - protein, 7 aa, Artificial sequence
  Protein classification predicting sequence
LGRIMNV

SEQ ID NO: 40860 - protein, 7 aa, Artificial sequence
  Protein classification predicting sequence
LDPLVVG

SEQ ID NO: 40861 - protein, 8 aa, Artificial sequence
  Protein classification predicting sequence
YKSLQDII

SEQ ID NO: 40862 - protein, 6 aa, Artificial sequence
  Protein classification predicting sequence
EVIDTG

SEQ ID NO: 40863 - protein, 13 aa, Artificial sequence
  Protein classification predicting sequence
RARKIQRFLSQPF

SEQ ID NO: 40864 - protein, 11 aa, Artificial sequence
  Protein classification predicting sequence
TKKGSITSVQA

SEQ ID NO: 40865 - protein, 15 aa, Artificial sequence
  Protein classification predicting sequence
ISELGIYPAVDPLDS

SEQ ID NO: 40866 - protein, 6 aa, Artificial sequence
  Protein classification predicting sequence
GEEHYN

SEQ ID NO: 40867 - protein, 9 aa, Artificial sequence
  Protein classification predicting sequence
FPPGKMPNI

SEQ ID NO: 40868 - protein, 21 aa, Artificial sequence
  Protein classification predicting sequence
VQQLLGNNRVRAVAMSATDGL

SEQ ID NO: 40869 - protein, 8 aa, Artificial sequence
  Protein classification predicting sequence
ILETGIKV

SEQ ID NO: 40870 - protein, 6 aa, Artificial sequence
  Protein classification predicting sequence
TSIQAV

SEQ ID NO: 40871 - protein, 30 aa, Artificial sequence
  Protein classification predicting sequence
QLTLEVALQLGDDVVRTIAMDSTDGVQRGM

SEQ ID NO: 40872 - protein, 11 aa, Artificial sequence
  Protein classification predicting sequence
TLGRVFNVLGE

SEQ ID NO: 40873 - protein, 15 aa, Artificial sequence
  Protein classification predicting sequence
TLGRVFNVLGETIDL

SEQ ID NO: 40874 - protein, 24 aa, Artificial sequence
  Protein classification predicting sequence
KGSVTSIQAVFVPADDYTDPAPAT

SEQ ID NO: 40875 - protein, 8 aa, Artificial sequence
  Protein classification predicting sequence
TTNLERKL

SEQ ID NO: 40876 - protein, 21 aa, Artificial sequence
  Protein classification predicting sequence
DILDGKYDHIPEDAFRLVGSM

SEQ ID NO: 40877 - protein, 8 aa, Artificial sequence
  Protein classification predicting sequence
TALVFGQM

SEQ ID NO: 40878 - protein, 6 aa, Artificial sequence
  Protein classification predicting sequence
ERFLSQ

SEQ ID NO: 40879 - protein, 6 aa, Artificial sequence
  Protein classification predicting sequence
TTNLER

SEQ ID NO: 40880 - protein, 10 aa, Artificial sequence
  Protein classification predicting sequence
SRALSPEIVG

SEQ ID NO: 40881 - protein, 13 aa, Artificial sequence
  Protein classification predicting sequence
RARRIQFFLSQNF

SEQ ID NO: 40882 - protein, 15 aa, Artificial sequence
  Protein classification predicting sequence
ETVRGFKEILEGKYD

SEQ ID NO: 40883 - protein, 6 aa, Artificial sequence
  Protein classification predicting sequence
PEDAFR

SEQ ID NO: 40884 - protein, 8 aa, Artificial sequence
  Protein classification predicting sequence
EMIESGVI

SEQ ID NO: 40885 - protein, 7 aa, Artificial sequence
  Protein classification predicting sequence
TDGLVRG

SEQ ID NO: 40886 - protein, 7 aa, Artificial sequence
  Protein classification predicting sequence
TTSPIHR

SEQ ID NO: 40887 - protein, 21 aa, Artificial sequence
  Protein classification predicting sequence
HGGVSVFGGVGERTREGNDLY

SEQ ID NO: 40888 - protein, 6 aa, Artificial sequence
  Protein classification predicting sequence
KESGVI

SEQ ID NO: 40889 - protein, 14 aa, Artificial sequence
  Protein classification predicting sequence
ALVYGQMNEPPGAR

SEQ ID NO: 40890 - protein, 19 aa, Artificial sequence
  Protein classification predicting sequence
ALVYGQMNEPPGARMRVGL

SEQ ID NO: 40891 - protein, 6 aa, Artificial sequence
  Protein classification predicting sequence
DTGAPI

SEQ ID NO: 40892 - protein, 11 aa, Artificial sequence
  Protein classification predicting sequence
MGELQERITST

SEQ ID NO: 40893 - protein, 6 aa, Artificial sequence
  Protein classification predicting sequence
RARRIQ

SEQ ID NO: 40894 - protein, 6 aa, Artificial sequence
  Protein classification predicting sequence
IHRPAP

SEQ ID NO: 40895 - protein, 7 aa, Artificial sequence
  Protein classification predicting sequence
FRDEGRD

SEQ ID NO: 40896 - protein, 10 aa, Artificial sequence
  Protein classification predicting sequence
LMFIDNIFRY

SEQ ID NO: 40897 - protein, 7 aa, Artificial sequence
  Protein classification predicting sequence
VLSRQIA

SEQ ID NO: 40898 - protein, 9 aa, Artificial sequence
  Protein classification predicting sequence
IAELGIYPA

SEQ ID NO: 40899 - protein, 7 aa, Artificial sequence
  Protein classification predicting sequence
RARKIQR

SEQ ID NO: 40900 - protein, 14 aa, Artificial sequence
  Protein classification predicting sequence
CEVQQLLGNNRVRA

SEQ ID NO: 40901 - protein, 26 aa, Artificial sequence
  Protein classification predicting sequence
TTSPIHRSAPAFIQLDTKLSIFETGI

SEQ ID NO: 40902 - protein, 70 aa, Artificial sequence
  Protein classification predicting sequence
VVDLLAPYRRGGKIGLFGGAGVGKTVLIMELINNIAKAHGGVSVFGGVGERTREGNDLYMEMKESGVINE

SEQ ID NO: 40903 - protein, 18 aa, Artificial sequence
  Protein classification predicting sequence
GLFGGAGVGKTVNMMELI

SEQ ID NO: 40904 - protein, 11 aa, Artificial sequence
  Protein classification predicting sequence
RVALTGLTMAE

SEQ ID NO: 40905 - protein, 7 aa, Artificial sequence
  Protein classification predicting sequence
YPAIDPL

SEQ ID NO: 40906 - protein, 8 aa, Artificial sequence
  Protein classification predicting sequence
DELSEEDK

SEQ ID NO: 40907 - protein, 12 aa, Artificial sequence
  Protein classification predicting sequence
YKDLQDIIAILG

SEQ ID NO: 40908 - protein, 9 aa, Artificial sequence
  Protein classification predicting sequence
VLADNRHIS

SEQ ID NO: 40909 - protein, 8 aa, Artificial sequence
  Protein classification predicting sequence
IESTYELS

SEQ ID NO: 40910 - protein, 14 aa, Artificial sequence
  Protein classification predicting sequence
DLIGGFRVKVGTTV

SEQ ID NO: 40911 - protein, 15 aa, Artificial sequence
  Protein classification predicting sequence
DGSVRNDLVQLQRKF

SEQ ID NO: 40912 - protein, 8 aa, Artificial sequence
  Protein classification predicting sequence
VSAEQEIF

SEQ ID NO: 40913 - protein, 8 aa, Artificial sequence
  Protein classification predicting sequence
GGILEVQP

SEQ ID NO: 40914 - protein, 7 aa, Artificial sequence
  Protein classification predicting sequence
LGILPGH

SEQ ID NO: 40915 - protein, 10 aa, Artificial sequence
  Protein classification predicting sequence
VTVLADTAIR

SEQ ID NO: 40916 - protein, 6 aa, Artificial sequence
  Protein classification predicting sequence
PNRIVW

SEQ ID NO: 40917 - protein, 8 aa, Artificial sequence
  Protein classification predicting sequence
MALMGGFA

SEQ ID NO: 40918 - protein, 10 aa, Artificial sequence
  Protein classification predicting sequence
FKRAKARLEA

SEQ ID NO: 40919 - protein, 10 aa, Artificial sequence
  Protein classification predicting sequence
YVVFGGFADI

SEQ ID NO: 40920 - protein, 20 aa, Artificial sequence
  Protein classification predicting sequence
QWLTMALMGGFARIGNNEIT

SEQ ID NO: 40921 - protein, 7 aa, Artificial sequence
  Protein classification predicting sequence
LNDQWLT

SEQ ID NO: 40922 - protein, 7 aa, Artificial sequence
  Protein classification predicting sequence
LEIAEAN

SEQ ID NO: 40923 - protein, 8 aa, Artificial sequence
  Protein classification predicting sequence
VEMVSVKA

SEQ ID NO: 40924 - protein, 8 aa, Artificial sequence
  Protein classification predicting sequence
EVRPDKVT

SEQ ID NO: 40925 - protein, 9 aa, Artificial sequence
  Protein classification predicting sequence
VTPDGPVYE

SEQ ID NO: 40926 - protein, 15 aa, Artificial sequence
  Protein classification predicting sequence
GILPGHIPTVAPLKI

SEQ ID NO: 40927 - protein, 7 aa, Artificial sequence
  Protein classification predicting sequence
FELVSPE

SEQ ID NO: 40928 - protein, 6 aa, Artificial sequence
  Protein classification predicting sequence
HGDVDY

SEQ ID NO: 40929 - protein, 8 aa, Artificial sequence
  Protein classification predicting sequence
GSEGELGI

SEQ ID NO: 40930 - protein, 9 aa, Artificial sequence
  Protein classification predicting sequence
SGGILEVQP

SEQ ID NO: 40931 - protein, 8 aa, Artificial sequence
  Protein classification predicting sequence
KAIAKLRV

SEQ ID NO: 40932 - protein, 7 aa, Artificial sequence
  Protein classification predicting sequence
IRLNGQW

SEQ ID NO: 40933 - protein, 13 aa, Artificial sequence
  Protein classification predicting sequence
MGGFARIGNNEIT

SEQ ID NO: 40934 - protein, 13 aa, Artificial sequence
  Protein classification predicting sequence
LEIAEANLSKAEG

SEQ ID NO: 40935 - protein, 7 aa, Artificial sequence
  Protein classification predicting sequence
RANEAKR

SEQ ID NO: 40936 - protein, 6 aa, Artificial sequence
  Protein classification predicting sequence
LVNDAE

SEQ ID NO: 40937 - protein, 7 aa, Artificial sequence
  Protein classification predicting sequence
DIDIDRA

SEQ ID NO: 40938 - protein, 6 aa, Artificial sequence
  Protein classification predicting sequence
GILPNH

SEQ ID NO: 40939 - protein, 9 aa, Artificial sequence
  Protein classification predicting sequence
LRVIELTKK

SEQ ID NO: 40940 - protein, 6 aa, Artificial sequence
  Protein classification predicting sequence
ADSAER

SEQ ID NO: 40941 - protein, 12 aa, Artificial sequence
  Protein classification predicting sequence
RDIDVSRAERAK

SEQ ID NO: 40942 - protein, 20 aa, Artificial sequence
  Protein classification predicting sequence
AMTYHLDVVSAEQQMFSGLV

SEQ ID NO: 40943 - protein, 8 aa, Artificial sequence
  Protein classification predicting sequence
LEVQPNMV

SEQ ID NO: 40944 - protein, 6 aa, Artificial sequence
  Protein classification predicting sequence
DTAIRG

SEQ ID NO: 40945 - protein, 14 aa, Artificial sequence
  Protein classification predicting sequence
SHGDVDYAQASAEL

SEQ ID NO: 40946 - protein, 7 aa, Artificial sequence
  Protein classification predicting sequence
AEEVILP

SEQ ID NO: 40947 - protein, 7 aa, Artificial sequence
  Protein classification predicting sequence
TGQLGIL

SEQ ID NO: 40948 - protein, 7 aa, Artificial sequence
  Protein classification predicting sequence
HAPLLTA

SEQ ID NO: 40949 - protein, 10 aa, Artificial sequence
  Protein classification predicting sequence
IAPDRTVWDA

SEQ ID NO: 40950 - protein, 8 aa, Artificial sequence
  Protein classification predicting sequence
AIRGEELD

SEQ ID NO: 40951 - protein, 9 aa, Artificial sequence
  Protein classification predicting sequence
GELGILPGH

SEQ ID NO: 40952 - protein, 12 aa, Artificial sequence
  Protein classification predicting sequence
GHTPLLTAIKPG

SEQ ID NO: 40953 - protein, 18 aa, Artificial sequence
  Protein classification predicting sequence
WDSEVKEIILSTNSGQIG

SEQ ID NO: 40954 - protein, 12 aa, Artificial sequence
  Protein classification predicting sequence
EIILSTNSGQIG

SEQ ID NO: 40955 - protein, 17 aa, Artificial sequence
  Protein classification predicting sequence
TMALMGGFARIGNNEIT

SEQ ID NO: 40956 - protein, 12 aa, Artificial sequence
  Protein classification predicting sequence
LVNDAEKGSDID

SEQ ID NO: 40957 - protein, 6 aa, Artificial sequence
  Protein classification predicting sequence
IDVSRA

SEQ ID NO: 40958 - protein, 9 aa, Artificial sequence
  Protein classification predicting sequence
NGGIIEIKD

SEQ ID NO: 40959 - protein, 9 aa, Artificial sequence
  Protein classification predicting sequence
TIVADSAER

SEQ ID NO: 40960 - protein, 7 aa, Artificial sequence
  Protein classification predicting sequence
WVAVNGG

SEQ ID NO: 40961 - protein, 20 aa, Artificial sequence
  Protein classification predicting sequence
GKRQTIEANLALRRARTRVE

SEQ ID NO: 40962 - protein, 15 aa, Artificial sequence
  Protein classification predicting sequence
IEANLALRRARTRVE

SEQ ID NO: 40963 - protein, 16 aa, Artificial sequence
  Protein classification predicting sequence
ALEIAEANLSKAEGTK

SEQ ID NO: 40964 - protein, 14 aa, Artificial sequence
  Protein classification predicting sequence
LVEAKLALRRARIR

SEQ ID NO: 40965 - protein, 8 aa, Artificial sequence
  Protein classification predicting sequence
NHAPIATA

SEQ ID NO: 40966 - protein, 7 aa, Artificial sequence
  Protein classification predicting sequence
EIILSTN

SEQ ID NO: 40967 - protein, 12 aa, Artificial sequence
  Protein classification predicting sequence
AVDGGFLSVTEE

SEQ ID NO: 40968 - protein, 7 aa, Artificial sequence
  Protein classification predicting sequence
PDKVTVL

SEQ ID NO: 40969 - protein, 7 aa, Artificial sequence
  Protein classification predicting sequence
AELGSDI

SEQ ID NO: 40970 - protein, 7 aa, Artificial sequence
  Protein classification predicting sequence
ISAVRLK

SEQ ID NO: 40971 - protein, 9 aa, Artificial sequence
  Protein classification predicting sequence
RAELALKRA

SEQ ID NO: 40972 - protein, 11 aa, Artificial sequence
  Protein classification predicting sequence
AEGTKELVEAK

SEQ ID NO: 40973 - protein, 8 aa, Artificial sequence
  Protein classification predicting sequence
ALRRARIR

SEQ ID NO: 40974 - protein, 7 aa, Artificial sequence
  Protein classification predicting sequence
GQIGVLP

SEQ ID NO: 40975 - protein, 7 aa, Artificial sequence
  Protein classification predicting sequence
LVNDAEK

SEQ ID NO: 40976 - protein, 7 aa, Artificial sequence
  Protein classification predicting sequence
VVSAEQQ

SEQ ID NO: 40977 - protein, 6 aa, Artificial sequence
  Protein classification predicting sequence
AMTYHL

SEQ ID NO: 40978 - protein, 10 aa, Artificial sequence
  Protein classification predicting sequence
PLLTAIKPGM

SEQ ID NO: 40979 - protein, 21 aa, Artificial sequence
  Protein classification predicting sequence
EVKEIILSTNSGQIGVLPNHA

SEQ ID NO: 40980 - protein, 6 aa, Artificial sequence
  Protein classification predicting sequence
STNSGQ

SEQ ID NO: 40981 - protein, 6 aa, Artificial sequence
  Protein classification predicting sequence
GVLPNH

SEQ ID NO: 40982 - protein, 7 aa, Artificial sequence
  Protein classification predicting sequence
PDKTVWD

SEQ ID NO: 40983 - protein, 7 aa, Artificial sequence
  Protein classification predicting sequence
LPSTTGQ

SEQ ID NO: 40984 - protein, 9 aa, Artificial sequence
  Protein classification predicting sequence
EVILPSTTG

SEQ ID NO: 40985 - protein, 9 aa, Artificial sequence
  Protein classification predicting sequence
VTVLVNAAE

SEQ ID NO: 40986 - protein, 11 aa, Artificial sequence
  Protein classification predicting sequence
HAPLLTALDIG

SEQ ID NO: 40987 - protein, 7 aa, Artificial sequence
  Protein classification predicting sequence
IDPEEAQ

SEQ ID NO: 40988 - protein, 6 aa, Artificial sequence
  Protein classification predicting sequence
IGILRI

SEQ ID NO: 40989 - protein, 9 aa, Artificial sequence
  Protein classification predicting sequence
GGILEVQPG

SEQ ID NO: 40990 - protein, 20 aa, Artificial sequence
  Protein classification predicting sequence
GGILEVQPGSVTVLADTAIR

SEQ ID NO: 40991 - protein, 9 aa, Artificial sequence
  Protein classification predicting sequence
IVTPNGSVY

SEQ ID NO: 40992 - protein, 12 aa, Artificial sequence
  Protein classification predicting sequence
GHIPTVAALKTG

SEQ ID NO: 40993 - protein, 7 aa, Artificial sequence
  Protein classification predicting sequence
IAVSDGF

SEQ ID NO: 40994 - protein, 8 aa, Artificial sequence
  Protein classification predicting sequence
SIIVQTAE

SEQ ID NO: 40995 - protein, 7 aa, Artificial sequence
  Protein classification predicting sequence
RAESHLE

SEQ ID NO: 40996 - protein, 7 aa, Artificial sequence
  Protein classification predicting sequence
DDDNTDI

SEQ ID NO: 40997 - protein, 15 aa, Artificial sequence
  Protein classification predicting sequence
RALERANNRLRVAEL

SEQ ID NO: 40998 - protein, 10 aa, Artificial sequence
  Protein classification predicting sequence
TVQVVTPDGI

SEQ ID NO: 40999 - protein, 7 aa, Artificial sequence
  Protein classification predicting sequence
GEMGILP

SEQ ID NO: 41000 - protein, 7 aa, Artificial sequence
  Protein classification predicting sequence
GILPGHI

SEQ ID NO: 41001 - protein, 10 aa, Artificial sequence
  Protein classification predicting sequence
VALRRALNRI

SEQ ID NO: 41002 - protein, 7 aa, Artificial sequence
  Protein classification predicting sequence
SRAERAK

SEQ ID NO: 41003 - protein, 57 aa, Artificial sequence
  Protein classification predicting sequence
ISVTTPDGEMGILPNHINLIAPLQVHEMKIRRGGEDEKVDWIAINGGIIEIKDNVVT

SEQ ID NO: 41004 - protein, 7 aa, Artificial sequence
  Protein classification predicting sequence
VADSAER

SEQ ID NO: 41005 - protein, 12 aa, Artificial sequence
  Protein classification predicting sequence
SRAERAKLRAER

SEQ ID NO: 41006 - protein, 6 aa, Artificial sequence
  Protein classification predicting sequence
HAPLLT

SEQ ID NO: 41007 - protein, 9 aa, Artificial sequence
  Protein classification predicting sequence
LSTNSGQIG

SEQ ID NO: 41008 - protein, 21 aa, Artificial sequence
  Protein classification predicting sequence
GEQLDFAISGGILEVQPQVVT

SEQ ID NO: 41009 - protein, 15 aa, Artificial sequence
  Protein classification predicting sequence
PKHAPLITRLKPGKV

SEQ ID NO: 41010 - protein, 8 aa, Artificial sequence
  Protein classification predicting sequence
HLDVVSAE

SEQ ID NO: 41011 - protein, 11 aa, Artificial sequence
  Protein classification predicting sequence
QVTGSEGELGI

SEQ ID NO: 41012 - protein, 20 aa, Artificial sequence
  Protein classification predicting sequence
PGHAPLLTAIKPGMIRIVKQ

SEQ ID NO: 41013 - protein, 6 aa, Artificial sequence
  Protein classification predicting sequence
TNLINL

SEQ ID NO: 41014 - protein, 11 aa, Artificial sequence
  Protein classification predicting sequence
GVLIFFGKGVL

SEQ ID NO: 41015 - protein, 11 aa, Artificial sequence
  Protein classification predicting sequence
DLLDNRKQRIL

SEQ ID NO: 41016 - protein, 10 aa, Artificial sequence
  Protein classification predicting sequence
NGYSEIEREK

SEQ ID NO: 41017 - protein, 7 aa, Artificial sequence
  Protein classification predicting sequence
ELHFRTI

SEQ ID NO: 41018 - protein, 9 aa, Artificial sequence
  Protein classification predicting sequence
TIRNSEELR

SEQ ID NO: 41019 - protein, 32 aa, Artificial sequence
  Protein classification predicting sequence
EQLEKARIRLQKVELEADEYRMNGYSEIEREK

SEQ ID NO: 41020 - protein, 34 aa, Artificial sequence
  Protein classification predicting sequence
NLINATSISLEQLEKSKNETLYFEKQRAMNQVRQ

SEQ ID NO: 41021 - protein, 8 aa, Artificial sequence
  Protein classification predicting sequence
AGSFGLNT

SEQ ID NO: 41022 - protein, 7 aa, Artificial sequence
  Protein classification predicting sequence
FGFNTDI

SEQ ID NO: 41023 - protein, 9 aa, Artificial sequence
  Protein classification predicting sequence
VLDSWVRYE

SEQ ID NO: 41024 - protein, 6 aa, Artificial sequence
  Protein classification predicting sequence
ILETGI

SEQ ID NO: 41025 - protein, 7 aa, Artificial sequence
  Protein classification predicting sequence
LLDNRKQ

SEQ ID NO: 41026 - protein, 8 aa, Artificial sequence
  Protein classification predicting sequence
TIRNSEEL

SEQ ID NO: 41027 - protein, 11 aa, Artificial sequence
  Protein classification predicting sequence
GALGTLNSCLN

SEQ ID NO: 41028 - protein, 15 aa, Artificial sequence
  Protein classification predicting sequence
RQKKIADGLQAAERA

SEQ ID NO: 41029 - protein, 8 aa, Artificial sequence
  Protein classification predicting sequence
ADDVFSLF

SEQ ID NO: 41030 - protein, 6 aa, Artificial sequence
  Protein classification predicting sequence
KITEAM

SEQ ID NO: 41031 - protein, 10 aa, Artificial sequence
  Protein classification predicting sequence
YTKFVSLVKS

SEQ ID NO: 41032 - protein, 6 aa, Artificial sequence
  Protein classification predicting sequence
NRTRQA

SEQ ID NO: 41033 - protein, 10 aa, Artificial sequence
  Protein classification predicting sequence
FADGTFDELY

SEQ ID NO: 41034 - protein, 13 aa, Artificial sequence
  Protein classification predicting sequence
KASEHAARMTAMK

SEQ ID NO: 41035 - protein, 8 aa, Artificial sequence
  Protein classification predicting sequence
LLDAKASE

SEQ ID NO: 41036 - protein, 6 aa, Artificial sequence
  Protein classification predicting sequence
ARMTAM

SEQ ID NO: 41037 - protein, 9 aa, Artificial sequence
  Protein classification predicting sequence
RTHSDQFLV

SEQ ID NO: 41038 - protein, 29 aa, Artificial sequence
  Protein classification predicting sequence
PPTFGDASVIALELLNSGYEFDEGSIIFN

SEQ ID NO: 41039 - protein, 6 aa, Artificial sequence
  Protein classification predicting sequence
ESQVYQ

SEQ ID NO: 41040 - protein, 8 aa, Artificial sequence
  Protein classification predicting sequence
ASEHAARM

SEQ ID NO: 41041 - protein, 12 aa, Artificial sequence
  Protein classification predicting sequence
ASEQAARMVAMK

SEQ ID NO: 41042 - protein, 9 aa, Artificial sequence
  Protein classification predicting sequence
SVKNTQKIT

SEQ ID NO: 41043 - protein, 25 aa, Artificial sequence
  Protein classification predicting sequence
AMKLVAAAKVRRAQEAVVNGRPFSE

SEQ ID NO: 41044 - protein, 10 aa, Artificial sequence
  Protein classification predicting sequence
QILDALLPLY

SEQ ID NO: 41045 - protein, 9 aa, Artificial sequence
  Protein classification predicting sequence
AAKYARAER

SEQ ID NO: 41046 - protein, 9 aa, Artificial sequence
  Protein classification predicting sequence
ELIEIISGA

SEQ ID NO: 41047 - protein, 7 aa, Artificial sequence
  Protein classification predicting sequence
WDYLYEP

SEQ ID NO: 41048 - protein, 16 aa, Artificial sequence
  Protein classification predicting sequence
IGVSSDRGLCGAIHSS

SEQ ID NO: 41049 - protein, 8 aa, Artificial sequence
  Protein classification predicting sequence
RLKSIKNI

SEQ ID NO: 41050 - protein, 9 aa, Artificial sequence
  Protein classification predicting sequence
AMDNASKNA

SEQ ID NO: 41051 - protein, 8 aa, Artificial sequence
  Protein classification predicting sequence
LLPQYAES

SEQ ID NO: 41052 - protein, 7 aa, Artificial sequence
  Protein classification predicting sequence
YNRARQA

SEQ ID NO: 41053 - protein, 22 aa, Artificial sequence
  Protein classification predicting sequence
MSIYDDIDADVLQNYQEYNLAN

SEQ ID NO: 41054 - protein, 28 aa, Artificial sequence
  Protein classification predicting sequence
IYYSLKESTTSEQSARMTAMDNASKNAS

SEQ ID NO: 41055 - protein, 6 aa, Artificial sequence
  Protein classification predicting sequence
KITKAM

SEQ ID NO: 41056 - protein, 9 aa, Artificial sequence
  Protein classification predicting sequence
SVKNTKKIT

SEQ ID NO: 41057 - protein, 8 aa, Artificial sequence
  Protein classification predicting sequence
VELLYTKF

SEQ ID NO: 41058 - protein, 8 aa, Artificial sequence
  Protein classification predicting sequence
DMIFEQDP

SEQ ID NO: 41059 - protein, 8 aa, Artificial sequence
  Protein classification predicting sequence
ASELAARM

SEQ ID NO: 41060 - protein, 9 aa, Artificial sequence
  Protein classification predicting sequence
TGDRGLCGG

SEQ ID NO: 41061 - protein, 14 aa, Artificial sequence
  Protein classification predicting sequence
QAKITGEILEIVAG

SEQ ID NO: 41062 - protein, 9 aa, Artificial sequence
  Protein classification predicting sequence
GSLALYEKA

SEQ ID NO: 41063 - protein, 14 aa, Artificial sequence
  Protein classification predicting sequence
SVISYKTEEKPIFS

SEQ ID NO: 41064 - protein, 9 aa, Artificial sequence
  Protein classification predicting sequence
SVKSTQKIT

SEQ ID NO: 41065 - protein, 8 aa, Artificial sequence
  Protein classification predicting sequence
RGLCGAYN

SEQ ID NO: 41066 - protein, 7 aa, Artificial sequence
  Protein classification predicting sequence
YNKARQA

SEQ ID NO: 41067 - protein, 7 aa, Artificial sequence
  Protein classification predicting sequence
ITKAMEM

SEQ ID NO: 41068 - protein, 9 aa, Artificial sequence
  Protein classification predicting sequence
FEQDPVQIL

SEQ ID NO: 41069 - protein, 7 aa, Artificial sequence
  Protein classification predicting sequence
ARMVAMK

SEQ ID NO: 41070 - protein, 6 aa, Artificial sequence
  Protein classification predicting sequence
VEVGQH

SEQ ID NO: 41071 - protein, 7 aa, Artificial sequence
  Protein classification predicting sequence
SNWSGAL

SEQ ID NO: 41072 - protein, 15 aa, Artificial sequence
  Protein classification predicting sequence
VEVGQHFYWQIGGFQ

SEQ ID NO: 41073 - protein, 6 aa, Artificial sequence
  Protein classification predicting sequence
TQIGEE

SEQ ID NO: 41074 - protein, 18 aa, Artificial sequence
  Protein classification predicting sequence
PTPILLPINILEDFTKPL

SEQ ID NO: 41075 - protein, 10 aa, Artificial sequence
  Protein classification predicting sequence
SLVPLVVPIP

SEQ ID NO: 41076 - protein, 8 aa, Artificial sequence
  Protein classification predicting sequence
MFLGLFTS

SEQ ID NO: 41077 - protein, 7 aa, Artificial sequence
  Protein classification predicting sequence
LADELVV

SEQ ID NO: 41078 - protein, 6 aa, Artificial sequence
  Protein classification predicting sequence
IQALIF

SEQ ID NO: 41079 - protein, 21 aa, Artificial sequence
  Protein classification predicting sequence
GELAAPTNDINTTVALALLTS

SEQ ID NO: 41080 - protein, 25 aa, Artificial sequence
  Protein classification predicting sequence
TLKGLYDISGVEVGQHFYWQIGGFQ

SEQ ID NO: 41081 - protein, 5 aa, Artificial sequence
  Protein classification predicting sequence
YFYAG

SEQ ID NO: 41082 - protein, 8 aa, Artificial sequence
  Protein classification predicting sequence
FTSAIQAL

SEQ ID NO: 41083 - protein, 6 aa, Artificial sequence
  Protein classification predicting sequence
AYFYAG

SEQ ID NO: 41084 - protein, 21 aa, Artificial sequence
  Protein classification predicting sequence
TKPLSLSFRLFGNILADELVV

SEQ ID NO: 41085 - protein, 8 aa, Artificial sequence
  Protein classification predicting sequence
MLLGLFTS

SEQ ID NO: 41086 - protein, 6 aa, Artificial sequence
  Protein classification predicting sequence
AYIGES

SEQ ID NO: 41087 - protein, 9 aa, Artificial sequence
  Protein classification predicting sequence
FLFIFVSNW

SEQ ID NO: 41088 - protein, 7 aa, Artificial sequence
  Protein classification predicting sequence
GALIPWK

SEQ ID NO: 41089 - protein, 7 aa, Artificial sequence
  Protein classification predicting sequence
LVPLIVP

SEQ ID NO: 41090 - protein, 6 aa, Artificial sequence
  Protein classification predicting sequence
YRPWVP

SEQ ID NO: 41091 - protein, 9 aa, Artificial sequence
  Protein classification predicting sequence
TVALALLTS

SEQ ID NO: 41092 - protein, 10 aa, Artificial sequence
  Protein classification predicting sequence
YFYAGISKKG

SEQ ID NO: 41093 - protein, 9 aa, Artificial sequence
  Protein classification predicting sequence
EYVLEFIRD

SEQ ID NO: 41094 - protein, 10 aa, Artificial sequence
  Protein classification predicting sequence
YFGKYIQPTP

SEQ ID NO: 41095 - protein, 7 aa, Artificial sequence
  Protein classification predicting sequence
WVPFIGT

SEQ ID NO: 41096 - protein, 7 aa, Artificial sequence
  Protein classification predicting sequence
ALALLTS

SEQ ID NO: 41097 - protein, 7 aa, Artificial sequence
  Protein classification predicting sequence
LVPLVVP

SEQ ID NO: 41098 - protein, 11 aa, Artificial sequence
  Protein classification predicting sequence
AYFYAGLTKKG

SEQ ID NO: 41099 - protein, 7 aa, Artificial sequence
  Protein classification predicting sequence
LIFATLA

SEQ ID NO: 41100 - protein, 7 aa, Artificial sequence
  Protein classification predicting sequence
AAYIGES

SEQ ID NO: 41101 - protein, 23 aa, Artificial sequence
  Protein classification predicting sequence
LLPINILEDFTKPLSLSFRLFGN

SEQ ID NO: 41102 - protein, 6 aa, Artificial sequence
  Protein classification predicting sequence
LEFIRD

SEQ ID NO: 41103 - protein, 8 aa, Artificial sequence
  Protein classification predicting sequence
IQALIFAT

SEQ ID NO: 41104 - protein, 14 aa, Artificial sequence
  Protein classification predicting sequence
QVLITSWVVIAILL

SEQ ID NO: 41105 - protein, 11 aa, Artificial sequence
  Protein classification predicting sequence
PQTIPTGGQNF

SEQ ID NO: 41106 - protein, 18 aa, Artificial sequence
  Protein classification predicting sequence
ISGVEVGQHFYWQIGGFQ

SEQ ID NO: 41107 - protein, 11 aa, Artificial sequence
  Protein classification predicting sequence
ELKTVLKSFLS

SEQ ID NO: 41108 - protein, 14 aa, Artificial sequence
  Protein classification predicting sequence
EGRYATALYSAASK

SEQ ID NO: 41109 - protein, 6 aa, Artificial sequence
  Protein classification predicting sequence
KYVDMS

SEQ ID NO: 41110 - protein, 15 aa, Artificial sequence
  Protein classification predicting sequence
GGMIVRIGEKYVDMS

SEQ ID NO: 41111 - protein, 9 aa, Artificial sequence
  Protein classification predicting sequence
NLLAENGRL

SEQ ID NO: 41112 - protein, 10 aa, Artificial sequence
  Protein classification predicting sequence
HRGEVPCTVT

SEQ ID NO: 41113 - protein, 10 aa, Artificial sequence
  Protein classification predicting sequence
IPEDDPRNPA

SEQ ID NO: 41114 - protein, 11 aa, Artificial sequence
  Protein classification predicting sequence
IADNVGDNVGD

SEQ ID NO: 41115 - protein, 8 aa, Artificial sequence
  Protein classification predicting sequence
GAWDNAKK

SEQ ID NO: 41116 - protein, 9 aa, Artificial sequence
  Protein classification predicting sequence
AVAPTLFYF

SEQ ID NO: 41117 - protein, 9 aa, Artificial sequence
  Protein classification predicting sequence
AFHFVSYVP

SEQ ID NO: 41118 - protein, 7 aa, Artificial sequence
  Protein classification predicting sequence
IRFNLMA

SEQ ID NO: 41119 - protein, 6 aa, Artificial sequence
  Protein classification predicting sequence
FYQYNP

SEQ ID NO: 41120 - protein, 10 aa, Artificial sequence
  Protein classification predicting sequence
SGSIHYPRST

SEQ ID NO: 41121 - protein, 6 aa, Artificial sequence
  Protein classification predicting sequence
TYVFWN

SEQ ID NO: 41122 - protein, 7 aa, Artificial sequence
  Protein classification predicting sequence
GGFPVWL

SEQ ID NO: 41123 - protein, 7 aa, Artificial sequence
  Protein classification predicting sequence
QGGPIIL

SEQ ID NO: 41124 - protein, 6 aa, Artificial sequence
  Protein classification predicting sequence
PKMWTE

SEQ ID NO: 41125 - protein, 13 aa, Artificial sequence
  Protein classification predicting sequence
NYYMYHGGTNFGR

SEQ ID NO: 41126 - protein, 6 aa, Artificial sequence
  Protein classification predicting sequence
GVNRHE

SEQ ID NO: 41127 - protein, 20 aa, Artificial sequence
  Protein classification predicting sequence
GNFSIPSGIPDLPQDTFIQF

SEQ ID NO: 41128 - protein, 8 aa, Artificial sequence
  Protein classification predicting sequence
RLVHYEGV

SEQ ID NO: 41129 - protein, 11 aa, Artificial sequence
  Protein classification predicting sequence
FWSLGNESYAG

SEQ ID NO: 41130 - protein, 7 aa, Artificial sequence
  Protein classification predicting sequence
TCNGFYC

SEQ ID NO: 41131 - protein, 9 aa, Artificial sequence
  Protein classification predicting sequence
LRSSDPDYL

SEQ ID NO: 41132 - protein, 7 aa, Artificial sequence
  Protein classification predicting sequence
LFTTDGA

SEQ ID NO: 41133 - protein, 16 aa, Artificial sequence
  Protein classification predicting sequence
KGQVWINGFNLGRYWP

SEQ ID NO: 41134 - protein, 10 aa, Artificial sequence
  Protein classification predicting sequence
DWIGVNYYTR

SEQ ID NO: 41135 - protein, 8 aa, Artificial sequence
  Protein classification predicting sequence
VILRPGPY

SEQ ID NO: 41136 - protein, 10 aa, Artificial sequence
  Protein classification predicting sequence
VQVENEYGSY

SEQ ID NO: 41137 - protein, 9 aa, Artificial sequence
  Protein classification predicting sequence
NLYMFIGGT

SEQ ID NO: 41138 - protein, 7 aa, Artificial sequence
  Protein classification predicting sequence
TSYDYDA

SEQ ID NO: 41139 - protein, 13 aa, Artificial sequence
  Protein classification predicting sequence
GAVRGVGGIDSWG

SEQ ID NO: 41140 - protein, 10 aa, Artificial sequence
  Protein classification predicting sequence
GLSGETYPDR

SEQ ID NO: 41141 - protein, 9 aa, Artificial sequence
  Protein classification predicting sequence
WSLLDNFEW

SEQ ID NO: 41142 - protein, 6 aa, Artificial sequence
  Protein classification predicting sequence
TLYHWD

SEQ ID NO: 41143 - protein, 6 aa, Artificial sequence
  Protein classification predicting sequence
GYFVWS

SEQ ID NO: 41144 - protein, 7 aa, Artificial sequence
  Protein classification predicting sequence
GDVACDH

SEQ ID NO: 41145 - protein, 10 aa, Artificial sequence
  Protein classification predicting sequence
VVMWSVANEP

SEQ ID NO: 41146 - protein, 7 aa, Artificial sequence
  Protein classification predicting sequence
DFFNYAG

SEQ ID NO: 41147 - protein, 9 aa, Artificial sequence
  Protein classification predicting sequence
GNKKGIFTR

SEQ ID NO: 41148 - protein, 7 aa, Artificial sequence
  Protein classification predicting sequence
TLPPGTI

SEQ ID NO: 41149 - protein, 9 aa, Artificial sequence
  Protein classification predicting sequence
FDFFNYAGL

SEQ ID NO: 41150 - protein, 9 aa, Artificial sequence
  Protein classification predicting sequence
LWWPYLMHE

SEQ ID NO: 41151 - protein, 9 aa, Artificial sequence
  Protein classification predicting sequence
PAYLYSLEV

SEQ ID NO: 41152 - protein, 9 aa, Artificial sequence
  Protein classification predicting sequence
GAPYVDVIC

SEQ ID NO: 41153 - protein, 8 aa, Artificial sequence
  Protein classification predicting sequence
YPKGYFVQ

SEQ ID NO: 41154 - protein, 10 aa, Artificial sequence
  Protein classification predicting sequence
FLINGKPFYF

SEQ ID NO: 41155 - protein, 25 aa, Artificial sequence
  Protein classification predicting sequence
DIRGKGFDWPLLVKDFNLLRWLGAN

SEQ ID NO: 41156 - protein, 12 aa, Artificial sequence
  Protein classification predicting sequence
KDFNLLRWLGAN

SEQ ID NO: 41157 - protein, 8 aa, Artificial sequence
  Protein classification predicting sequence
EKVNLTTG

SEQ ID NO: 41158 - protein, 6 aa, Artificial sequence
  Protein classification predicting sequence
WDTFTH

SEQ ID NO: 41159 - protein, 7 aa, Artificial sequence
  Protein classification predicting sequence
TLNEPWV

SEQ ID NO: 41160 - protein, 7 aa, Artificial sequence
  Protein classification predicting sequence
GWSLGGL

SEQ ID NO: 41161 - protein, 8 aa, Artificial sequence
  Protein classification predicting sequence
AARHPDKV

SEQ ID NO: 41162 - protein, 7 aa, Artificial sequence
  Protein classification predicting sequence
HAPFLSH

SEQ ID NO: 41163 - protein, 12 aa, Artificial sequence
  Protein classification predicting sequence
SHFTLHLVDLPG

SEQ ID NO: 41164 - protein, 10 aa, Artificial sequence
  Protein classification predicting sequence
GTETARQDAR

SEQ ID NO: 41165 - protein, 15 aa, Artificial sequence
  Protein classification predicting sequence
VLNGGLEILKTVDLR

SEQ ID NO: 41166 - protein, 17 aa, Artificial sequence
  Protein classification predicting sequence
MPFLRLYGYLDGLVPRK

SEQ ID NO: 41167 - protein, 8 aa, Artificial sequence
  Protein classification predicting sequence
ALTHPERV

SEQ ID NO: 41168 - protein, 14 aa, Artificial sequence
  Protein classification predicting sequence
ALVTVASSPCFSAR

SEQ ID NO: 41169 - protein, 12 aa, Artificial sequence
  Protein classification predicting sequence
AKAAHAPFISHP

SEQ ID NO: 41170 - protein, 9 aa, Artificial sequence
  Protein classification predicting sequence
WLGWSLGGL

SEQ ID NO: 41171 - protein, 7 aa, Artificial sequence
  Protein classification predicting sequence
GFQQQLS

SEQ ID NO: 41172 - protein, 9 aa, Artificial sequence
  Protein classification predicting sequence
VLNGGLEIL

SEQ ID NO: 41173 - protein, 6 aa, Artificial sequence
  Protein classification predicting sequence
TVASSP

SEQ ID NO: 41174 - protein, 6 aa, Artificial sequence
  Protein classification predicting sequence
GWSLGG

SEQ ID NO: 41175 - protein, 11 aa, Artificial sequence
  Protein classification predicting sequence
LKSVVLAQPMP

SEQ ID NO: 41176 - protein, 11 aa, Artificial sequence
  Protein classification predicting sequence
YGYLDGLVPRK

SEQ ID NO: 41177 - protein, 10 aa, Artificial sequence
  Protein classification predicting sequence
AAHAPFISHP

SEQ ID NO: 41178 - protein, 8 aa, Artificial sequence
  Protein classification predicting sequence
LHLVDLPG

SEQ ID NO: 41179 - protein, 14 aa, Artificial sequence
  Protein classification predicting sequence
LVLLHGWGLNAEVW

SEQ ID NO: 41180 - protein, 17 aa, Artificial sequence
  Protein classification predicting sequence
PHFRLHLVDLPGYGRSQ

SEQ ID NO: 41181 - protein, 8 aa, Artificial sequence
  Protein classification predicting sequence
GFGALSLA

SEQ ID NO: 41182 - protein, 8 aa, Artificial sequence
  Protein classification predicting sequence
ARDEWPGI

SEQ ID NO: 41183 - protein, 7 aa, Artificial sequence
  Protein classification predicting sequence
GQGPDLV

SEQ ID NO: 41184 - protein, 6 aa, Artificial sequence
  Protein classification predicting sequence
WRGIQP

SEQ ID NO: 41185 - protein, 11 aa, Artificial sequence
  Protein classification predicting sequence
HGWGMNGAVWQ

SEQ ID NO: 41186 - protein, 7 aa, Artificial sequence
  Protein classification predicting sequence
HAPFISH

SEQ ID NO: 41187 - protein, 8 aa, Artificial sequence
  Protein classification predicting sequence
LVLLHGWG

SEQ ID NO: 41188 - protein, 6 aa, Artificial sequence
  Protein classification predicting sequence
PHFRLH

SEQ ID NO: 41189 - protein, 15 aa, Artificial sequence
  Protein classification predicting sequence
GWSLGGLFALHAAAT

SEQ ID NO: 41190 - protein, 8 aa, Artificial sequence
  Protein classification predicting sequence
GVFAPLVE

SEQ ID NO: 41191 - protein, 10 aa, Artificial sequence
  Protein classification predicting sequence
RFLALDTLGS

SEQ ID NO: 41192 - protein, 16 aa, Artificial sequence
  Protein classification predicting sequence
PSLWIAGQRDRLVPAA

SEQ ID NO: 41193 - protein, 6 aa, Artificial sequence
  Protein classification predicting sequence
WPGIKP

SEQ ID NO: 41194 - protein, 7 aa, Artificial sequence
  Protein classification predicting sequence
MPDVEVL

SEQ ID NO: 41195 - protein, 6 aa, Artificial sequence
  Protein classification predicting sequence
TPASMA

SEQ ID NO: 41196 - protein, 7 aa, Artificial sequence
  Protein classification predicting sequence
DIRDTST

SEQ ID NO: 41197 - protein, 6 aa, Artificial sequence
  Protein classification predicting sequence
YSDNTA

SEQ ID NO: 41198 - protein, 9 aa, Artificial sequence
  Protein classification predicting sequence
LDRKEPELN

SEQ ID NO: 41199 - protein, 6 aa, Artificial sequence
  Protein classification predicting sequence
RDTTTP

SEQ ID NO: 41200 - protein, 7 aa, Artificial sequence
  Protein classification predicting sequence
IADKTGA

SEQ ID NO: 41201 - protein, 10 aa, Artificial sequence
  Protein classification predicting sequence
LGEIAEAAVR

SEQ ID NO: 41202 - protein, 7 aa, Artificial sequence
  Protein classification predicting sequence
ETELNEA

SEQ ID NO: 41203 - protein, 8 aa, Artificial sequence
  Protein classification predicting sequence
FTVGNALP

SEQ ID NO: 41204 - protein, 6 aa, Artificial sequence
  Protein classification predicting sequence
LRQIGD

SEQ ID NO: 41205 - protein, 9 aa, Artificial sequence
  Protein classification predicting sequence
VGMIEMDLA

SEQ ID NO: 41206 - protein, 24 aa, Artificial sequence
  Protein classification predicting sequence
TLTAWRADERFPMMSTFKVVLCGA

SEQ ID NO: 41207 - protein, 18 aa, Artificial sequence
  Protein classification predicting sequence
LARVDAGDEQLERKIHYR

SEQ ID NO: 41208 - protein, 40 aa, Artificial sequence
  Protein classification predicting sequence
QDLVDYSPVSEKHLADGMTVGELCAAAITMSDNSAANLLL

SEQ ID NO: 41209 - protein, 18 aa, Artificial sequence
  Protein classification predicting sequence
LIRSVLPAGWFIADKTGA

SEQ ID NO: 41210 - protein, 8 aa, Artificial sequence
  Protein classification predicting sequence
WVVGDKTG

SEQ ID NO: 41211 - protein, 7 aa, Artificial sequence
  Protein classification predicting sequence
SDNTAAN

SEQ ID NO: 41212 - protein, 10 aa, Artificial sequence
  Protein classification predicting sequence
GTKYAANAVY

SEQ ID NO: 41213 - protein, 13 aa, Artificial sequence
  Protein classification predicting sequence
QYVVAGHDDWKDQ

SEQ ID NO: 41214 - protein, 15 aa, Artificial sequence
  Protein classification predicting sequence
KLKDNLYVYTTYNTF

SEQ ID NO: 41215 - protein, 23 aa, Artificial sequence
  Protein classification predicting sequence
PWGEDKFKSFTDEIYKKHGKKVI

SEQ ID NO: 41216 - protein, 22 aa, Artificial sequence
  Protein classification predicting sequence
GAKTYSTKMTDSILAKENKPRA

SEQ ID NO: 41217 - protein, 7 aa, Artificial sequence
  Protein classification predicting sequence
FTDEIYK

SEQ ID NO: 41218 - protein, 24 aa, Artificial sequence
  Protein classification predicting sequence
HGKKVIMNIATHSHDDRAGGLEYF

SEQ ID NO: 41219 - protein, 14 aa, Artificial sequence
  Protein classification predicting sequence
EFQVYYPGKGHTAD

SEQ ID NO: 41220 - protein, 8 aa, Artificial sequence
  Protein classification predicting sequence
KVLVGGCI

SEQ ID NO: 41221 - protein, 16 aa, Artificial sequence
  Protein classification predicting sequence
GEAYVNDWTQSVHNIQ

SEQ ID NO: 41222 - protein, 12 aa, Artificial sequence
  Protein classification predicting sequence
YTFDNNKSFKVG

SEQ ID NO: 41223 - protein, 47 aa, Artificial sequence
  Protein classification predicting sequence
IGEAYVNDWTQSIHNIQQKFPDVQYVVAGHDDWKDQTSIQHTLDLIS

SEQ ID NO: 41224 - protein, 8 aa, Artificial sequence
  Protein classification predicting sequence
DNIVVWLP

SEQ ID NO: 41225 - protein, 7 aa, Artificial sequence
  Protein classification predicting sequence
GDPRDTT

SEQ ID NO: 41226 - protein, 12 aa, Artificial sequence
  Protein classification predicting sequence
QLVTWLKGNTTG

SEQ ID NO: 41227 - protein, 8 aa, Artificial sequence
  Protein classification predicting sequence
SSKDEKEA

SEQ ID NO: 41228 - protein, 8 aa, Artificial sequence
  Protein classification predicting sequence
DLVNYNPI

SEQ ID NO: 41229 - protein, 26 aa, Artificial sequence
  Protein classification predicting sequence
KTGQVKHKNQATHKEFSQLEKKFDAR

SEQ ID NO: 41230 - protein, 9 aa, Artificial sequence
  Protein classification predicting sequence
AAAVLKQSE

SEQ ID NO: 41231 - protein, 14 aa, Artificial sequence
  Protein classification predicting sequence
GDYGTTNDIAVIWP

SEQ ID NO: 41232 - protein, 8 aa, Artificial sequence
  Protein classification predicting sequence
LVTYFTQP

SEQ ID NO: 41233 - protein, 9 aa, Artificial sequence
  Protein classification predicting sequence
LAAAAKIVT

SEQ ID NO: 41234 - protein, 9 aa, Artificial sequence
  Protein classification predicting sequence
ISLLATLPL

SEQ ID NO: 41235 - protein, 8 aa, Artificial sequence
  Protein classification predicting sequence
PQPLEQIK

SEQ ID NO: 41236 - protein, 11 aa, Artificial sequence
  Protein classification predicting sequence
SESQLSGRVGM

SEQ ID NO: 41237 - protein, 10 aa, Artificial sequence
  Protein classification predicting sequence
AWRADERFPM

SEQ ID NO: 41238 - protein, 12 aa, Artificial sequence
  Protein classification predicting sequence
LCGAVLARVDAG

SEQ ID NO: 41239 - protein, 19 aa, Artificial sequence
  Protein classification predicting sequence
IHYRQQDLVDYSPVSEKHL

SEQ ID NO: 41240 - protein, 9 aa, Artificial sequence
  Protein classification predicting sequence
GELCAAAIT

SEQ ID NO: 41241 - protein, 32 aa, Artificial sequence
  Protein classification predicting sequence
NLLLATVGGPAGLTAFLRQIGDNVTRLDRWET

SEQ ID NO: 41242 - protein, 10 aa, Artificial sequence
  Protein classification predicting sequence
GWFIADKTGA

SEQ ID NO: 41243 - protein, 20 aa, Artificial sequence
  Protein classification predicting sequence
ERIVVIYLRDTPASMAERNQ

SEQ ID NO: 41244 - protein, 8 aa, Artificial sequence
  Protein classification predicting sequence
AAVRFSDN

SEQ ID NO: 41245 - protein, 7 aa, Artificial sequence
  Protein classification predicting sequence
SDNSAAN

SEQ ID NO: 41246 - protein, 7 aa, Artificial sequence
  Protein classification predicting sequence
PNRKPIV

SEQ ID NO: 41247 - protein, 6 aa, Artificial sequence
  Protein classification predicting sequence
KGNTTG

SEQ ID NO: 41248 - protein, 7 aa, Artificial sequence
  Protein classification predicting sequence
ARLGVYA

SEQ ID NO: 41249 - protein, 7 aa, Artificial sequence
  Protein classification predicting sequence
QYSDNTA

SEQ ID NO: 41250 - protein, 8 aa, Artificial sequence
  Protein classification predicting sequence
WLKGNTTG

SEQ ID NO: 41251 - protein, 6 aa, Artificial sequence
  Protein classification predicting sequence
FAMCST

SEQ ID NO: 41252 - protein, 7 aa, Artificial sequence
  Protein classification predicting sequence
VTAFARS

SEQ ID NO: 41253 - protein, 9 aa, Artificial sequence
  Protein classification predicting sequence
DKTGSGDYG

SEQ ID NO: 41254 - protein, 6 aa, Artificial sequence
  Protein classification predicting sequence
RLDRWE

SEQ ID NO: 41255 - protein, 6 aa, Artificial sequence
  Protein classification predicting sequence
RDTSTP

SEQ ID NO: 41256 - protein, 8 aa, Artificial sequence
  Protein classification predicting sequence
LNTAIPGD

SEQ ID NO: 41257 - protein, 11 aa, Artificial sequence
  Protein classification predicting sequence
ERFPMMSTFKV

SEQ ID NO: 41258 - protein, 8 aa, Artificial sequence
  Protein classification predicting sequence
AAITMSDN

SEQ ID NO: 41259 - protein, 7 aa, Artificial sequence
  Protein classification predicting sequence
TLRKLLT

SEQ ID NO: 41260 - protein, 10 aa, Artificial sequence
  Protein classification predicting sequence
LPAGWFIADK

SEQ ID NO: 41261 - protein, 6 aa, Artificial sequence
  Protein classification predicting sequence
RIVVIY

SEQ ID NO: 41262 - protein, 8 aa, Artificial sequence
  Protein classification predicting sequence
NLTLGKAL

SEQ ID NO: 41263 - protein, 8 aa, Artificial sequence
  Protein classification predicting sequence
QRAQLVTW

SEQ ID NO: 41264 - protein, 7 aa, Artificial sequence
  Protein classification predicting sequence
FLRQIGD

SEQ ID NO: 41265 - protein, 8 aa, Artificial sequence
  Protein classification predicting sequence
SGGRLGVA

SEQ ID NO: 41266 - protein, 7 aa, Artificial sequence
  Protein classification predicting sequence
FSLLIPS

SEQ ID NO: 41267 - protein, 10 aa, Artificial sequence
  Protein classification predicting sequence
SSKFQQVEQD

SEQ ID NO: 41268 - protein, 33 aa, Artificial sequence
  Protein classification predicting sequence
GEYWDYNGNQRFPLTSTFKTIACAKLLYDAEQG

SEQ ID NO: 41269 - protein, 37 aa, Artificial sequence
  Protein classification predicting sequence
EIKKADLVTYSPVIEKQVGQAITLDDACFATMTTSDN

SEQ ID NO: 41270 - protein, 20 aa, Artificial sequence
  Protein classification predicting sequence
VTDFLRQIGDKETRLDRIEP

SEQ ID NO: 41271 - protein, 15 aa, Artificial sequence
  Protein classification predicting sequence
LNEGKLGDLRDTTTP

SEQ ID NO: 41272 - protein, 17 aa, Artificial sequence
  Protein classification predicting sequence
WMVNNQVTGNLLRSVLP

SEQ ID NO: 41273 - protein, 25 aa, Artificial sequence
  Protein classification predicting sequence
GWNIADRSGAGGFGARSITAVVWSE

SEQ ID NO: 41274 - protein, 9 aa, Artificial sequence
  Protein classification predicting sequence
RNDAIVKIG

SEQ ID NO: 41275 - protein, 36 aa, Artificial sequence
  Protein classification predicting sequence
ADERFAMCSTSKVMAAAAVLKQSESDKHLLNQRVEI

SEQ ID NO: 41276 - protein, 21 aa, Artificial sequence
  Protein classification predicting sequence
VGDKTGSGDYGTTNDIAVIWP

SEQ ID NO: 41277 - protein, 23 aa, Artificial sequence
  Protein classification predicting sequence
QKKLESWMVNNQVTGNLLRSVLP

SEQ ID NO: 41278 - protein, 17 aa, Artificial sequence
  Protein classification predicting sequence
IADRSGAGGFGARSITA

SEQ ID NO: 41279 - protein, 10 aa, Artificial sequence
  Protein classification predicting sequence
IIVSIYLAQT

SEQ ID NO: 41280 - protein, 11 aa, Artificial sequence
  Protein classification predicting sequence
SGRCWIFSCLN

SEQ ID NO: 41281 - protein, 8 aa, Artificial sequence
  Protein classification predicting sequence
MRLPFMKK

SEQ ID NO: 41282 - protein, 22 aa, Artificial sequence
  Protein classification predicting sequence
NIEEFEFSQSYLFFWDKVERCY

SEQ ID NO: 41283 - protein, 8 aa, Artificial sequence
  Protein classification predicting sequence
ILNHKMRE

SEQ ID NO: 41284 - protein, 9 aa, Artificial sequence
  Protein classification predicting sequence
CLGNPPETF

SEQ ID NO: 41285 - protein, 12 aa, Artificial sequence
  Protein classification predicting sequence
GGRKTLYNNQPI

SEQ ID NO: 41286 - protein, 7 aa, Artificial sequence
  Protein classification predicting sequence
VWFGCDV

SEQ ID NO: 41287 - protein, 8 aa, Artificial sequence
  Protein classification predicting sequence
HELVFGVS

SEQ ID NO: 41288 - protein, 9 aa, Artificial sequence
  Protein classification predicting sequence
KNMNKAERL

SEQ ID NO: 41289 - protein, 7 aa, Artificial sequence
  Protein classification predicting sequence
SLMTHAM

SEQ ID NO: 41290 - protein, 7 aa, Artificial sequence
  Protein classification predicting sequence
TAVSEKD

SEQ ID NO: 41291 - protein, 11 aa, Artificial sequence
  Protein classification predicting sequence
KWRVENSWGED

SEQ ID NO: 41292 - protein, 8 aa, Artificial sequence
  Protein classification predicting sequence
WDPMGALA

SEQ ID NO: 41293 - protein, 18 aa, Artificial sequence
  Protein classification predicting sequence
NDGGQWDMLVNIVEKYGV

SEQ ID NO: 41294 - protein, 8 aa, Artificial sequence
  Protein classification predicting sequence
SPITEKHL

SEQ ID NO: 41295 - protein, 8 aa, Artificial sequence
  Protein classification predicting sequence
LNSAIPGD

SEQ ID NO: 41296 - protein, 10 aa, Artificial sequence
  Protein classification predicting sequence
RDTTTPLAMA

SEQ ID NO: 41297 - protein, 25 aa, Artificial sequence
  Protein classification predicting sequence
ERSDWRKFFSEFQAKGTIVVADERQ

SEQ ID NO: 41298 - protein, 17 aa, Artificial sequence
  Protein classification predicting sequence
HNQDQDLRSAMRNSTVW

SEQ ID NO: 41299 - protein, 8 aa, Artificial sequence
  Protein classification predicting sequence
DKARRYLK

SEQ ID NO: 41300 - protein, 12 aa, Artificial sequence
  Protein classification predicting sequence
AQEQIAFLRKLY

SEQ ID NO: 41301 - protein, 36 aa, Artificial sequence
  Protein classification predicting sequence
NELPFRVEHQRLVKDLMIVEAGRNWILRAKTGWEGR

SEQ ID NO: 41302 - protein, 12 aa, Artificial sequence
  Protein classification predicting sequence
GWWVGWVEWPTG

SEQ ID NO: 41303 - protein, 10 aa, Artificial sequence
  Protein classification predicting sequence
GVFVLCKSSS

SEQ ID NO: 41304 - protein, 8 aa, Artificial sequence
  Protein classification predicting sequence
PASTFKIP

SEQ ID NO: 41305 - protein, 22 aa, Artificial sequence
  Protein classification predicting sequence
LRGAIQVSAVPVFQQIAREVGE

SEQ ID NO: 41306 - protein, 6 aa, Artificial sequence
  Protein classification predicting sequence
VHSKTG

SEQ ID NO: 41307 - protein, 7 aa, Artificial sequence
  Protein classification predicting sequence
WWVGWVE

SEQ ID NO: 41308 - protein, 14 aa, Artificial sequence
  Protein classification predicting sequence
EVYFFAFNMDIDNE

SEQ ID NO: 41309 - protein, 26 aa, Artificial sequence
  Protein classification predicting sequence
RYSPASTFKIPHTLFALDAGAVRDEF

SEQ ID NO: 41310 - protein, 8 aa, Artificial sequence
  Protein classification predicting sequence
FAGHNQDQ

SEQ ID NO: 41311 - protein, 7 aa, Artificial sequence
  Protein classification predicting sequence
LFAKEIG

SEQ ID NO: 41312 - protein, 8 aa, Artificial sequence
  Protein classification predicting sequence
YGNADPST

SEQ ID NO: 41313 - protein, 25 aa, Artificial sequence
  Protein classification predicting sequence
KLYRNELPFRVEHQRLVKDLMIVEA

SEQ ID NO: 41314 - protein, 9 aa, Artificial sequence
  Protein classification predicting sequence
WILRAKTGW

SEQ ID NO: 41315 - protein, 13 aa, Artificial sequence
  Protein classification predicting sequence
VFFALNIDTPNRM

SEQ ID NO: 41316 - protein, 45 aa, Artificial sequence
  Protein classification predicting sequence
ALQYSDNTAMNKLIAHLGGPDKVTAFARSLGDETFRLDRTEPTLN

SEQ ID NO: 41317 - protein, 7 aa, Artificial sequence
  Protein classification predicting sequence
DLLWSDP

SEQ ID NO: 41318 - protein, 7 aa, Artificial sequence
  Protein classification predicting sequence
LLLALKV

SEQ ID NO: 41319 - protein, 15 aa, Artificial sequence
  Protein classification predicting sequence
DVAESTRLGPLSGEV

SEQ ID NO: 41320 - protein, 24 aa, Artificial sequence
  Protein classification predicting sequence
AGEILHLVGPNGAGKSTLLARMAG

SEQ ID NO: 41321 - protein, 15 aa, Artificial sequence
  Protein classification predicting sequence
PPFAMPVWHYLTLHQ

SEQ ID NO: 41322 - protein, 20 aa, Artificial sequence
  Protein classification predicting sequence
NQLSGGEWQRVRLAAVVLQI

SEQ ID NO: 41323 - protein, 18 aa, Artificial sequence
  Protein classification predicting sequence
GQLLLLDEPMNSLDVAQQ

SEQ ID NO: 41324 - protein, 17 aa, Artificial sequence
  Protein classification predicting sequence
AIVMSSHDLNHTLRHAH

SEQ ID NO: 41325 - protein, 10 aa, Artificial sequence
  Protein classification predicting sequence
PVWHYLTLHQ

SEQ ID NO: 41326 - protein, 8 aa, Artificial sequence
  Protein classification predicting sequence
NSLDVAQQ

SEQ ID NO: 41327 - protein, 11 aa, Artificial sequence
  Protein classification predicting sequence
LSGGEWQRVRL

SEQ ID NO: 41328 - protein, 8 aa, Artificial sequence
  Protein classification predicting sequence
RAYLSQQQ

SEQ ID NO: 41329 - protein, 7 aa, Artificial sequence
  Protein classification predicting sequence
HDLNHTL

SEQ ID NO: 41330 - protein, 7 aa, Artificial sequence
  Protein classification predicting sequence
GEVTSPL

SEQ ID NO: 41331 - protein, 17 aa, Artificial sequence
  Protein classification predicting sequence
EPSEGCFYDYVKISADK

SEQ ID NO: 41332 - protein, 16 aa, Artificial sequence
  Protein classification predicting sequence
CQHLCHNYVGGYFCSC

SEQ ID NO: 41333 - protein, 13 aa, Artificial sequence
  Protein classification predicting sequence
SCQAECSSELYTE

SEQ ID NO: 41334 - protein, 18 aa, Artificial sequence
  Protein classification predicting sequence
YPPDLRCNYSIRVERGLT

SEQ ID NO: 41335 - protein, 7 aa, Artificial sequence
  Protein classification predicting sequence
IKCPQPK

SEQ ID NO: 41336 - protein, 8 aa, Artificial sequence
  Protein classification predicting sequence
LDEFTIIQ

SEQ ID NO: 41337 - protein, 14 aa, Artificial sequence
  Protein classification predicting sequence
DGTWHRAMPRCKIK

SEQ ID NO: 41338 - protein, 12 aa, Artificial sequence
  Protein classification predicting sequence
YTCTAQGIWKNE

SEQ ID NO: 41339 - protein, 14 aa, Artificial sequence
  Protein classification predicting sequence
PRCLPVCGKPVNPV

SEQ ID NO: 41340 - protein, 8 aa, Artificial sequence
  Protein classification predicting sequence
HPDYRQDE

SEQ ID NO: 41341 - protein, 19 aa, Artificial sequence
  Protein classification predicting sequence
NFEGDIALLELENSVTLGP

SEQ ID NO: 41342 - protein, 10 aa, Artificial sequence
  Protein classification predicting sequence
GLMGYVSGFG

SEQ ID NO: 41343 - protein, 16 aa, Artificial sequence
  Protein classification predicting sequence
QDACQGDSGGVFAVRD

SEQ ID NO: 41344 - protein, 19 aa, Artificial sequence
  Protein classification predicting sequence
GYGFYTKVLNYVDWIKKEM

SEQ ID NO: 41345 - protein, 10 aa, Artificial sequence
  Protein classification predicting sequence
QPQYQFRDYF

SEQ ID NO: 41346 - protein, 17 aa, Artificial sequence
  Protein classification predicting sequence
GGGALLGDRWILTAAHT

SEQ ID NO: 41347 - protein, 29 aa, Artificial sequence
  Protein classification predicting sequence
DVPCSHFCNNFIGGYFCSCPPEYFLHDDM

SEQ ID NO: 41348 - protein, 7 aa, Artificial sequence
  Protein classification predicting sequence
KTMQENS

SEQ ID NO: 41349 - protein, 15 aa, Artificial sequence
  Protein classification predicting sequence
IGGYFCSCPPEYFLH

SEQ ID NO: 41350 - protein, 6 aa, Artificial sequence
  Protein classification predicting sequence
PYYYME

SEQ ID NO: 41351 - protein, 9 aa, Artificial sequence
  Protein classification predicting sequence
NFDNDIALV

SEQ ID NO: 41352 - protein, 12 aa, Artificial sequence
  Protein classification predicting sequence
PKFYVAGLVSWG

SEQ ID NO: 41353 - protein, 32 aa, Artificial sequence
  Protein classification predicting sequence
LALMQKHRRRERRFGRDMETIGFAVYEVPPEL

SEQ ID NO: 41354 - protein, 11 aa, Artificial sequence
  Protein classification predicting sequence
KDGKLVFVHSA

SEQ ID NO: 41355 - protein, 21 aa, Artificial sequence
  Protein classification predicting sequence
GNEFWSALLEKAYAKVNGSYE

SEQ ID NO: 41356 - protein, 20 aa, Artificial sequence
  Protein classification predicting sequence
GYAGIFHFQLWQFGEWVDVV

SEQ ID NO: 41357 - protein, 14 aa, Artificial sequence
  Protein classification predicting sequence
VVPSTFEPNKEGDF

SEQ ID NO: 41358 - protein, 15 aa, Artificial sequence
  Protein classification predicting sequence
TILNRIISKHKDLRT

SEQ ID NO: 41359 - protein, 9 aa, Artificial sequence
  Protein classification predicting sequence
AGFKLNKKL

SEQ ID NO: 41360 - protein, 15 aa, Artificial sequence
  Protein classification predicting sequence
ITPVYCTGVSAQVQK

SEQ ID NO: 41361 - protein, 8 aa, Artificial sequence
  Protein classification predicting sequence
KWKRPTEL

SEQ ID NO: 41362 - protein, 13 aa, Artificial sequence
  Protein classification predicting sequence
MEDGEFWMSFRDF

SEQ ID NO: 41363 - protein, 38 aa, Artificial sequence
  Protein classification predicting sequence
GFSLESCRSMVNLMDRDGNGKLGLVEFNILWNRIRNYL

SEQ ID NO: 41364 - protein, 23 aa, Artificial sequence
  Protein classification predicting sequence
IFRKFDLDKSGSMSAYEMRMAIE

SEQ ID NO: 41365 - protein, 34 aa, Artificial sequence
  Protein classification predicting sequence
ELIITRYSEPDLAVDFDNFVCCLVRLETMFRFFK

SEQ ID NO: 41366 - protein, 37 aa, Artificial sequence
  Protein classification predicting sequence
GGATRTDICQGALGDCWLLAAIASLTLNEEILARVVP

SEQ ID NO: 41367 - protein, 16 aa, Artificial sequence
  Protein classification predicting sequence
YAGIFHFQFWQYGEWV

SEQ ID NO: 41368 - protein, 10 aa, Artificial sequence
  Protein classification predicting sequence
VVVDDRLPTK

SEQ ID NO: 41369 - protein, 25 aa, Artificial sequence
  Protein classification predicting sequence
GELLFVHSAEGSEFWSALLEKAYAK

SEQ ID NO: 41370 - protein, 18 aa, Artificial sequence
  Protein classification predicting sequence
TTEGFEDFTGGIAEWYEL

SEQ ID NO: 41371 - protein, 17 aa, Artificial sequence
  Protein classification predicting sequence
QKLVKGHAYSVTGAEEV

SEQ ID NO: 41372 - protein, 19 aa, Artificial sequence
  Protein classification predicting sequence
DFLRHYSRLEICNLTPDTL

SEQ ID NO: 41373 - protein, 7 aa, Artificial sequence
  Protein classification predicting sequence
DGNWRRG

SEQ ID NO: 41374 - protein, 13 aa, Artificial sequence
  Protein classification predicting sequence
TAGGCRNYPNTFW

SEQ ID NO: 41375 - protein, 14 aa, Artificial sequence
  Protein classification predicting sequence
NPQYLIKLEEEDED

SEQ ID NO: 41376 - protein, 13 aa, Artificial sequence
  Protein classification predicting sequence
QRKMGEDMHTIGF

SEQ ID NO: 41377 - protein, 15 aa, Artificial sequence
  Protein classification predicting sequence
TFINLREVLNRFKLP

SEQ ID NO: 41378 - protein, 9 aa, Artificial sequence
  Protein classification predicting sequence
DAEISAFEL

SEQ ID NO: 41379 - protein, 22 aa, Artificial sequence
  Protein classification predicting sequence
LAKRQDIKSDGFSIETCKIMVD

SEQ ID NO: 41380 - protein, 11 aa, Artificial sequence
  Protein classification predicting sequence
DGSGKLGLKEF

SEQ ID NO: 41381 - protein, 29 aa, Artificial sequence
  Protein classification predicting sequence
LWTKIQKYQKIYREIDVDRSGTMNSYEMR

SEQ ID NO: 41382 - protein, 7 aa, Artificial sequence
  Protein classification predicting sequence
IVARFAD

SEQ ID NO: 41383 - protein, 7 aa, Artificial sequence
  Protein classification predicting sequence
LIIDFDN

SEQ ID NO: 41384 - protein, 7 aa, Artificial sequence
  Protein classification predicting sequence
GQTNIHL

SEQ ID NO: 41385 - protein, 16 aa, Artificial sequence
  Protein classification predicting sequence
GDFCIRVFSEKKADYQ

SEQ ID NO: 41386 - protein, 13 aa, Artificial sequence
  Protein classification predicting sequence
LLHRVVPHGQSFQ

SEQ ID NO: 41387 - protein, 18 aa, Artificial sequence
  Protein classification predicting sequence
KMEDGEFWMSFRDFMREF

SEQ ID NO: 41388 - protein, 6 aa, Artificial sequence
  Protein classification predicting sequence
NPQFKI

SEQ ID NO: 41389 - protein, 12 aa, Artificial sequence
  Protein classification predicting sequence
ALMQKHRRRERR

SEQ ID NO: 41390 - protein, 6 aa, Artificial sequence
  Protein classification predicting sequence
YEMRMA

SEQ ID NO: 41391 - protein, 11 aa, Artificial sequence
  Protein classification predicting sequence
VDFDNFVCCLV

SEQ ID NO: 41392 - protein, 8 aa, Artificial sequence
  Protein classification predicting sequence
LETMFRFF

SEQ ID NO: 41393 - protein, 9 aa, Artificial sequence
  Protein classification predicting sequence
KISVPASEF

SEQ ID NO: 41394 - protein, 6 aa, Artificial sequence
  Protein classification predicting sequence
STFEVP

SEQ ID NO: 41395 - protein, 9 aa, Artificial sequence
  Protein classification predicting sequence
LISSCVALA

SEQ ID NO: 41396 - protein, 6 aa, Artificial sequence
  Protein classification predicting sequence
LCTNCG

SEQ ID NO: 41397 - protein, 11 aa, Artificial sequence
  Protein classification predicting sequence
VIVDTGSSDLW

SEQ ID NO: 41398 - protein, 9 aa, Artificial sequence
  Protein classification predicting sequence
LDSGTTITY

SEQ ID NO: 41399 - protein, 10 aa, Artificial sequence
  Protein classification predicting sequence
DNLISQGLIS

SEQ ID NO: 41400 - protein, 15 aa, Artificial sequence
  Protein classification predicting sequence
SNGGGGEYIFGGYDS

SEQ ID NO: 41401 - protein, 12 aa, Artificial sequence
  Protein classification predicting sequence
EKDFIAFCSSTP

SEQ ID NO: 41402 - protein, 8 aa, Artificial sequence
  Protein classification predicting sequence
ENATVMDK

SEQ ID NO: 41403 - protein, 10 aa, Artificial sequence
  Protein classification predicting sequence
RTRLALIICN

SEQ ID NO: 41404 - protein, 15 aa, Artificial sequence
  Protein classification predicting sequence
IMAEIYKNGPVEGAF

SEQ ID NO: 41405 - protein, 22 aa, Artificial sequence
  Protein classification predicting sequence
IRDQGSCGSCWAFGAVEAISDR

SEQ ID NO: 41406 - protein, 18 aa, Artificial sequence
  Protein classification predicting sequence
IRDQGSCGSCWAFGAVEA

SEQ ID NO: 41407 - protein, 12 aa, Artificial sequence
  Protein classification predicting sequence
MLEARIRILTNN

SEQ ID NO: 41408 - protein, 11 aa, Artificial sequence
  Protein classification predicting sequence
CNEALMKLELV

SEQ ID NO: 41409 - protein, 20 aa, Artificial sequence
  Protein classification predicting sequence
GMLEARIRILTNNSQTPILS

SEQ ID NO: 41410 - protein, 21 aa, Artificial sequence
  Protein classification predicting sequence
IYNQGFEIVLNDYKWFAFFKY

SEQ ID NO: 41411 - protein, 8 aa, Artificial sequence
  Protein classification predicting sequence
HNFVKAIN

SEQ ID NO: 41412 - protein, 7 aa, Artificial sequence
  Protein classification predicting sequence
VSPVRNQ

SEQ ID NO: 41413 - protein, 19 aa, Artificial sequence
  Protein classification predicting sequence
DPFNPFELTNHAVLLVGYG

SEQ ID NO: 41414 - protein, 9 aa, Artificial sequence
  Protein classification predicting sequence
ETMTGWVHD

SEQ ID NO: 41415 - protein, 8 aa, Artificial sequence
  Protein classification predicting sequence
LGRNWACF

SEQ ID NO: 41416 - protein, 18 aa, Artificial sequence
  Protein classification predicting sequence
GYFRIRRGTDECAIESIA

SEQ ID NO: 41417 - protein, 15 aa, Artificial sequence
  Protein classification predicting sequence
KYNSDKSSTYVKNGT

SEQ ID NO: 41418 - protein, 23 aa, Artificial sequence
  Protein classification predicting sequence
FDIHYGSGSLSGYLSQDTVSVPC

SEQ ID NO: 41419 - protein, 13 aa, Artificial sequence
  Protein classification predicting sequence
CLSGFMGMDIPPP

SEQ ID NO: 41420 - protein, 14 aa, Artificial sequence
  Protein classification predicting sequence
LKNYMDAQYYGEIG

SEQ ID NO: 41421 - protein, 10 aa, Artificial sequence
  Protein classification predicting sequence
KSSTYVKNGT

SEQ ID NO: 41422 - protein, 19 aa, Artificial sequence
  Protein classification predicting sequence
FIAAKFDGILGMAYPRISV

SEQ ID NO: 41423 - protein, 7 aa, Artificial sequence
  Protein classification predicting sequence
LQKAIGA

SEQ ID NO: 41424 - protein, 9 aa, Artificial sequence
  Protein classification predicting sequence
PLIQGEYMI

SEQ ID NO: 41425 - protein, 12 aa, Artificial sequence
  Protein classification predicting sequence
GCEAIVDTGTSL

SEQ ID NO: 41426 - protein, 9 aa, Artificial sequence
  Protein classification predicting sequence
SQDTVSVPC

SEQ ID NO: 41427 - protein, 9 aa, Artificial sequence
  Protein classification predicting sequence
FGEATKQPG

SEQ ID NO: 41428 - protein, 10 aa, Artificial sequence
  Protein classification predicting sequence
IFSFYLNRDP

SEQ ID NO: 41429 - protein, 9 aa, Artificial sequence
  Protein classification predicting sequence
NVTRKAYWQ

SEQ ID NO: 41430 - protein, 20 aa, Artificial sequence
  Protein classification predicting sequence
KAIGAVPLIQGEYMIPCEKV

SEQ ID NO: 41431 - protein, 12 aa, Artificial sequence
  Protein classification predicting sequence
FIAAKFDGILGM

SEQ ID NO: 41432 - protein, 12 aa, Artificial sequence
  Protein classification predicting sequence
SLRKKLRAQGQL

SEQ ID NO: 41433 - protein, 9 aa, Artificial sequence
  Protein classification predicting sequence
GIIGADQVS

SEQ ID NO: 41434 - protein, 16 aa, Artificial sequence
  Protein classification predicting sequence
GGVTPVFDNMMAQNLV

SEQ ID NO: 41435 - protein, 7 aa, Artificial sequence
  Protein classification predicting sequence
LPMFSVY

SEQ ID NO: 41436 - protein, 16 aa, Artificial sequence
  Protein classification predicting sequence
SSNLWVPSVYCTSPAC

SEQ ID NO: 41437 - protein, 17 aa, Artificial sequence
  Protein classification predicting sequence
YGTGSLTGIIGADQVSV

SEQ ID NO: 41438 - protein, 13 aa, Artificial sequence
  Protein classification predicting sequence
GGSGSELTFGGYD

SEQ ID NO: 41439 - protein, 21 aa, Artificial sequence
  Protein classification predicting sequence
QGQCGSCWAFSSVGALEGQLK

SEQ ID NO: 41440 - protein, 7 aa, Artificial sequence
  Protein classification predicting sequence
LSPQNLV

SEQ ID NO: 41441 - protein, 12 aa, Artificial sequence
  Protein classification predicting sequence
NRGIDSEDAYPY

SEQ ID NO: 41442 - protein, 8 aa, Artificial sequence
  Protein classification predicting sequence
GQDESCMY

SEQ ID NO: 41443 - protein, 16 aa, Artificial sequence
  Protein classification predicting sequence
PTGKAAKCRGYREIPE

SEQ ID NO: 41444 - protein, 11 aa, Artificial sequence
  Protein classification predicting sequence
NEKALKRAVAR

SEQ ID NO: 41445 - protein, 16 aa, Artificial sequence
  Protein classification predicting sequence
KVDEISRRLIWEKNLK

SEQ ID NO: 41446 - protein, 21 aa, Artificial sequence
  Protein classification predicting sequence
KQYNSKVDEISRRLIWEKNLK

SEQ ID NO: 41447 - protein, 15 aa, Artificial sequence
  Protein classification predicting sequence
GALEGQLKKKTGKLL

SEQ ID NO: 41448 - protein, 10 aa, Artificial sequence
  Protein classification predicting sequence
LSPQNLVDCV

SEQ ID NO: 41449 - protein, 12 aa, Artificial sequence
  Protein classification predicting sequence
KAAKCRGYREIP

SEQ ID NO: 41450 - protein, 15 aa, Artificial sequence
  Protein classification predicting sequence
GNEKALKRAVARVGP

SEQ ID NO: 41451 - protein, 10 aa, Artificial sequence
  Protein classification predicting sequence
ARNKNNACGI

SEQ ID NO: 41452 - protein, 58 aa, Artificial sequence
  Protein classification predicting sequence
CMYNPTGKAAKCRGYREIPEGNEKALKRAVARVGPVSVAIDASLTSFQFYSKGVYYDE

SEQ ID NO: 41453 - protein, 20 aa, Artificial sequence
  Protein classification predicting sequence
CNSDNLNHAVLAVGYGIQKG

SEQ ID NO: 41454 - protein, 8 aa, Artificial sequence
  Protein classification predicting sequence
HNLEASLG

SEQ ID NO: 41455 - protein, 12 aa, Artificial sequence
  Protein classification predicting sequence
IDASLTSFQFYS

SEQ ID NO: 41456 - protein, 13 aa, Artificial sequence
  Protein classification predicting sequence
PQREKALMKAVAT

SEQ ID NO: 41457 - protein, 12 aa, Artificial sequence
  Protein classification predicting sequence
EEFRQVMNGFQN

SEQ ID NO: 41458 - protein, 8 aa, Artificial sequence
  Protein classification predicting sequence
DTGFVDIP

SEQ ID NO: 41459 - protein, 15 aa, Artificial sequence
  Protein classification predicting sequence
DWREKGCVTEVKYQG

SEQ ID NO: 41460 - protein, 31 aa, Artificial sequence
  Protein classification predicting sequence
VDWREKGCVTEVKYQGSCGACWAFSAVGALE

SEQ ID NO: 41461 - protein, 9 aa, Artificial sequence
  Protein classification predicting sequence
QLKLKTGKL

SEQ ID NO: 41462 - protein, 7 aa, Artificial sequence
  Protein classification predicting sequence
ASYPYKA

SEQ ID NO: 41463 - protein, 14 aa, Artificial sequence
  Protein classification predicting sequence
MLHNLEHSMGMHSY

SEQ ID NO: 41464 - protein, 14 aa, Artificial sequence
  Protein classification predicting sequence
LPDSVDWREKGCVT

SEQ ID NO: 41465 - protein, 6 aa, Artificial sequence
  Protein classification predicting sequence
DWGEQG

SEQ ID NO: 41466 - protein, 11 aa, Artificial sequence
  Protein classification predicting sequence
FRVQQNINACG

SEQ ID NO: 41467 - protein, 9 aa, Artificial sequence
  Protein classification predicting sequence
INKFSDLSK

SEQ ID NO: 41468 - protein, 6 aa, Artificial sequence
  Protein classification predicting sequence
NINACG

SEQ ID NO: 41469 - protein, 7 aa, Artificial sequence
  Protein classification predicting sequence
FLHKFNK

SEQ ID NO: 41470 - protein, 6 aa, Artificial sequence
  Protein classification predicting sequence
EKLRRF

SEQ ID NO: 41471 - protein, 7 aa, Artificial sequence
  Protein classification predicting sequence
GGLLHTA

SEQ ID NO: 41472 - protein, 7 aa, Artificial sequence
  Protein classification predicting sequence
VKKCYRY

SEQ ID NO: 41473 - protein, 14 aa, Artificial sequence
  Protein classification predicting sequence
VGPIPVAIDASDIV

SEQ ID NO: 41474 - protein, 11 aa, Artificial sequence
  Protein classification predicting sequence
GLNHAVLLVGY

SEQ ID NO: 41475 - protein, 8 aa, Artificial sequence
  Protein classification predicting sequence
EEKLKDLL

SEQ ID NO: 41476 - protein, 10 aa, Artificial sequence
  Protein classification predicting sequence
LSEQQMIDCD

SEQ ID NO: 41477 - protein, 10 aa, Artificial sequence
  Protein classification predicting sequence
VGPIPMAIDA

SEQ ID NO: 41478 - protein, 11 aa, Artificial sequence
  Protein classification predicting sequence
LKAPNYFEEFV

SEQ ID NO: 41479 - protein, 10 aa, Artificial sequence
  Protein classification predicting sequence
KGPLEFDWRR

SEQ ID NO: 41480 - protein, 8 aa, Artificial sequence
  Protein classification predicting sequence
SLESQFAI

SEQ ID NO: 41481 - protein, 12 aa, Artificial sequence
  Protein classification predicting sequence
GPIPVAIDASDI

SEQ ID NO: 41482 - protein, 7 aa, Artificial sequence
  Protein classification predicting sequence
QGIIKYC

SEQ ID NO: 41483 - protein, 6 aa, Artificial sequence
  Protein classification predicting sequence
IFQHNL

SEQ ID NO: 41484 - protein, 7 aa, Artificial sequence
  Protein classification predicting sequence
PPDKGPL

SEQ ID NO: 41485 - protein, 10 aa, Artificial sequence
  Protein classification predicting sequence
LSEQQLIDCD

SEQ ID NO: 41486 - protein, 7 aa, Artificial sequence
  Protein classification predicting sequence
NKVTSVK

SEQ ID NO: 41487 - protein, 12 aa, Artificial sequence
  Protein classification predicting sequence
GLNHAVLLVGYG

SEQ ID NO: 41488 - protein, 7 aa, Artificial sequence
  Protein classification predicting sequence
ENNVPYW

SEQ ID NO: 41489 - protein, 8 aa, Artificial sequence
  Protein classification predicting sequence
YSSESEKL

SEQ ID NO: 41490 - protein, 8 aa, Artificial sequence
  Protein classification predicting sequence
GPLEFDWR

SEQ ID NO: 41491 - protein, 10 aa, Artificial sequence
  Protein classification predicting sequence
CGACWAFATL

SEQ ID NO: 41492 - protein, 7 aa, Artificial sequence
  Protein classification predicting sequence
ESDYPYE

SEQ ID NO: 41493 - protein, 9 aa, Artificial sequence
  Protein classification predicting sequence
EEKLKDLLR

SEQ ID NO: 41494 - protein, 8 aa, Artificial sequence
  Protein classification predicting sequence
VENNIPYW

SEQ ID NO: 41495 - protein, 14 aa, Artificial sequence
  Protein classification predicting sequence
GYFRVQQNINACGI

SEQ ID NO: 41496 - protein, 6 aa, Artificial sequence
  Protein classification predicting sequence
GCDGGL

SEQ ID NO: 41497 - protein, 7 aa, Artificial sequence
  Protein classification predicting sequence
GIHSREW

SEQ ID NO: 41498 - protein, 7 aa, Artificial sequence
  Protein classification predicting sequence
GVWFAKK

SEQ ID NO: 41499 - protein, 29 aa, Artificial sequence
  Protein classification predicting sequence
RPAIWIDTGIHSREWVTQASGVWFAKKIT

SEQ ID NO: 41500 - protein, 8 aa, Artificial sequence
  Protein classification predicting sequence
DEAQVQKV

SEQ ID NO: 41501 - protein, 9 aa, Artificial sequence
  Protein classification predicting sequence
PIDVRVPFP

SEQ ID NO: 41502 - protein, 8 aa, Artificial sequence
  Protein classification predicting sequence
YHTLDEIY

SEQ ID NO: 41503 - protein, 11 aa, Artificial sequence
  Protein classification predicting sequence
YGPGATTIYPA

SEQ ID NO: 41504 - protein, 8 aa, Artificial sequence
  Protein classification predicting sequence
RNFDAGWC

SEQ ID NO: 41505 - protein, 8 aa, Artificial sequence
  Protein classification predicting sequence
IDFWKPDS

SEQ ID NO: 41506 - protein, 7 aa, Artificial sequence
  Protein classification predicting sequence
WETIEAW

SEQ ID NO: 41507 - protein, 26 aa, Artificial sequence
  Protein classification predicting sequence
QEDGISFEYHRYPELREALVSVWLQC

SEQ ID NO: 41508 - protein, 17 aa, Artificial sequence
  Protein classification predicting sequence
SRIYTVGRSFEGRELLV

SEQ ID NO: 41509 - protein, 30 aa, Artificial sequence
  Protein classification predicting sequence
GELKDWFVGRSNAQGIDLNRNFPDLDRIVY

SEQ ID NO: 41510 - protein, 14 aa, Artificial sequence
  Protein classification predicting sequence
IFQSLARAYSSFNP

SEQ ID NO: 41511 - protein, 14 aa, Artificial sequence
  Protein classification predicting sequence
RPPCRKNDDDSSFV

SEQ ID NO: 41512 - protein, 38 aa, Artificial sequence
  Protein classification predicting sequence
AWYSVPGGMQDFNYLSSNCFEITVELSCEKFPPEETLK

SEQ ID NO: 41513 - protein, 22 aa, Artificial sequence
  Protein classification predicting sequence
QIHRGVKGFVRDLQGNPIANAT

SEQ ID NO: 41514 - protein, 8 aa, Artificial sequence
  Protein classification predicting sequence
ISFEYHRY

SEQ ID NO: 41515 - protein, 9 aa, Artificial sequence
  Protein classification predicting sequence
ALVSVWLQC

SEQ ID NO: 41516 - protein, 9 aa, Artificial sequence
  Protein classification predicting sequence
SFEGRELLV

SEQ ID NO: 41517 - protein, 11 aa, Artificial sequence
  Protein classification predicting sequence
HEPGEPEFKYI

SEQ ID NO: 41518 - protein, 14 aa, Artificial sequence
  Protein classification predicting sequence
NMHGNEAVGRELLI

SEQ ID NO: 41519 - protein, 7 aa, Artificial sequence
  Protein classification predicting sequence
LAQYLCN

SEQ ID NO: 41520 - protein, 8 aa, Artificial sequence
  Protein classification predicting sequence
LIHSTRIH

SEQ ID NO: 41521 - protein, 12 aa, Artificial sequence
  Protein classification predicting sequence
KDWFVGRSNAQG

SEQ ID NO: 41522 - protein, 13 aa, Artificial sequence
  Protein classification predicting sequence
IPFVLSANLHGGD

SEQ ID NO: 41523 - protein, 10 aa, Artificial sequence
  Protein classification predicting sequence
VANYPYDETR

SEQ ID NO: 41524 - protein, 9 aa, Artificial sequence
  Protein classification predicting sequence
VRDLQGNPI

SEQ ID NO: 41525 - protein, 10 aa, Artificial sequence
  Protein classification predicting sequence
AKDGDYWRLL

SEQ ID NO: 41526 - protein, 7 aa, Artificial sequence
  Protein classification predicting sequence
VDFELES

SEQ ID NO: 41527 - protein, 16 aa, Artificial sequence
  Protein classification predicting sequence
LSAGQQRRVALARLWL

SEQ ID NO: 41528 - protein, 19 aa, Artificial sequence
  Protein classification predicting sequence
LSAGQQRRVALARLWLTRA

SEQ ID NO: 41529 - protein, 76 aa, Artificial sequence
  Protein classification predicting sequence
LSAGQQRRVALARLWLTRAALWVLDEPFTAIDVNGVARLTRRMAAHTAQGGMVILTTHQPLPGAADTVRRLALTGG

SEQ ID NO: 41530 - protein, 7 aa, Artificial sequence
  Protein classification predicting sequence
LWILDEP

SEQ ID NO: 41531 - protein, 9 aa, Artificial sequence
  Protein classification predicting sequence
CERDERTLF

SEQ ID NO: 41532 - protein, 15 aa, Artificial sequence
  Protein classification predicting sequence
CERDERTLFSGLSFT

SEQ ID NO: 41533 - protein, 8 aa, Artificial sequence
  Protein classification predicting sequence
LSAGQQRR

SEQ ID NO: 41534 - protein, 7 aa, Artificial sequence
  Protein classification predicting sequence
LDEPFTA

SEQ ID NO: 41535 - protein, 7 aa, Artificial sequence
  Protein classification predicting sequence
VILTTHQ

SEQ ID NO: 41536 - protein, 6 aa, Artificial sequence
  Protein classification predicting sequence
WILDEP

SEQ ID NO: 41537 - protein, 9 aa, Artificial sequence
  Protein classification predicting sequence
NGAGKTTLL

SEQ ID NO: 41538 - protein, 16 aa, Artificial sequence
  Protein classification predicting sequence
LLWIGHQPGIKTRLTA

SEQ ID NO: 41539 - protein, 13 aa, Artificial sequence
  Protein classification predicting sequence
EALAQAGLAGFED

SEQ ID NO: 41540 - protein, 9 aa, Artificial sequence
  Protein classification predicting sequence
LDEPFTAID

SEQ ID NO: 41541 - protein, 13 aa, Artificial sequence
  Protein classification predicting sequence
LDEPFTAIDVNGV

SEQ ID NO: 41542 - protein, 7 aa, Artificial sequence
  Protein classification predicting sequence
GHQPGIK

SEQ ID NO: 41543 - protein, 7 aa, Artificial sequence
  Protein classification predicting sequence
VLLTSHQ

SEQ ID NO: 41544 - protein, 11 aa, Artificial sequence
  Protein classification predicting sequence
LSAGQQRRVAL

SEQ ID NO: 41545 - protein, 8 aa, Artificial sequence
  Protein classification predicting sequence
LLRVLAGL

SEQ ID NO: 41546 - protein, 8 aa, Artificial sequence
  Protein classification predicting sequence
RRVALARL

SEQ ID NO: 41547 - protein, 7 aa, Artificial sequence
  Protein classification predicting sequence
RDERVLF

SEQ ID NO: 41548 - protein, 9 aa, Artificial sequence
  Protein classification predicting sequence
GKTSLLRIL

SEQ ID NO: 41549 - protein, 7 aa, Artificial sequence
  Protein classification predicting sequence
ALARLWL

SEQ ID NO: 41550 - protein, 7 aa, Artificial sequence
  Protein classification predicting sequence
QIEGHNG

SEQ ID NO: 41551 - protein, 18 aa, Artificial sequence
  Protein classification predicting sequence
QDLLFLGHQTGVKRELTA

SEQ ID NO: 41552 - protein, 9 aa, Artificial sequence
  Protein classification predicting sequence
ALVVTGPNG

SEQ ID NO: 41553 - protein, 6 aa, Artificial sequence
  Protein classification predicting sequence
WVLDEP

SEQ ID NO: 41554 - protein, 7 aa, Artificial sequence
  Protein classification predicting sequence
LWVLDEP

SEQ ID NO: 41555 - protein, 28 aa, Artificial sequence
  Protein classification predicting sequence
LLWIGHQPGIKTRLTALENLHFYHRDGD

SEQ ID NO: 41556 - protein, 9 aa, Artificial sequence
  Protein classification predicting sequence
NLTAIRDER

SEQ ID NO: 41557 - protein, 8 aa, Artificial sequence
  Protein classification predicting sequence
LLRILAGL

SEQ ID NO: 41558 - protein, 11 aa, Artificial sequence
  Protein classification predicting sequence
MFTLEDTLLGY

SEQ ID NO: 41559 - protein, 6 aa, Artificial sequence
  Protein classification predicting sequence
GCNIEN

SEQ ID NO: 41560 - protein, 17 aa, Artificial sequence
  Protein classification predicting sequence
MQQTVHAEQSAISHAWL

SEQ ID NO: 41561 - protein, 9 aa, Artificial sequence
  Protein classification predicting sequence
YAENAAFNP

SEQ ID NO: 41562 - protein, 12 aa, Artificial sequence
  Protein classification predicting sequence
HAEQSAISHAWL

SEQ ID NO: 41563 - protein, 10 aa, Artificial sequence
  Protein classification predicting sequence
TPNFFWLAWQ

SEQ ID NO: 41564 - protein, 11 aa, Artificial sequence
  Protein classification predicting sequence
GHEYLARRVTE

SEQ ID NO: 41565 - protein, 7 aa, Artificial sequence
  Protein classification predicting sequence
SFVLLAT

SEQ ID NO: 41566 - protein, 8 aa, Artificial sequence
  Protein classification predicting sequence
AGYVVLKD

SEQ ID NO: 41567 - protein, 8 aa, Artificial sequence
  Protein classification predicting sequence
DPSTPNFF

SEQ ID NO: 41568 - protein, 12 aa, Artificial sequence
  Protein classification predicting sequence
QSDNSFVLLATQ

SEQ ID NO: 41569 - protein, 13 aa, Artificial sequence
  Protein classification predicting sequence
YLARRVTESELVQ

SEQ ID NO: 41570 - protein, 7 aa, Artificial sequence
  Protein classification predicting sequence
PCAEVKP

SEQ ID NO: 41571 - protein, 9 aa, Artificial sequence
  Protein classification predicting sequence
AVSLAINSR

SEQ ID NO: 41572 - protein, 16 aa, Artificial sequence
  Protein classification predicting sequence
QRSPFMMLAEEVPEAR

SEQ ID NO: 41573 - protein, 11 aa, Artificial sequence
  Protein classification predicting sequence
NRASAEEIQDH

SEQ ID NO: 41574 - protein, 6 aa, Artificial sequence
  Protein classification predicting sequence
HIHISC

SEQ ID NO: 41575 - protein, 8 aa, Artificial sequence
  Protein classification predicting sequence
QPVAVFLG

SEQ ID NO: 41576 - protein, 8 aa, Artificial sequence
  Protein classification predicting sequence
PFAKPPLG

SEQ ID NO: 41577 - protein, 7 aa, Artificial sequence
  Protein classification predicting sequence
LSKMVMK

SEQ ID NO: 41578 - protein, 10 aa, Artificial sequence
  Protein classification predicting sequence
DDLTKSVQDW

SEQ ID NO: 41579 - protein, 22 aa, Artificial sequence
  Protein classification predicting sequence
CPSGFYPYPVQTRTCRSTGSWS

SEQ ID NO: 41580 - protein, 10 aa, Artificial sequence
  Protein classification predicting sequence
LRGSANRTCQ

SEQ ID NO: 41581 - protein, 7 aa, Artificial sequence
  Protein classification predicting sequence
GQTAICD

SEQ ID NO: 41582 - protein, 19 aa, Artificial sequence
  Protein classification predicting sequence
NPGIPIGTRKVGSQYRLED

SEQ ID NO: 41583 - protein, 9 aa, Artificial sequence
  Protein classification predicting sequence
VTYHCSRGL

SEQ ID NO: 41584 - protein, 21 aa, Artificial sequence
  Protein classification predicting sequence
CQEGGSWSGTEPSCQDSFMYD

SEQ ID NO: 41585 - protein, 18 aa, Artificial sequence
  Protein classification predicting sequence
PQEVAEAFLSSLTETIEG

SEQ ID NO: 41586 - protein, 30 aa, Artificial sequence
  Protein classification predicting sequence
PGEQQKRKIVLDPSGSMNIYLVLDGSDSIG

SEQ ID NO: 41587 - protein, 11 aa, Artificial sequence
  Protein classification predicting sequence
NLIEKVASYGV

SEQ ID NO: 41588 - protein, 13 aa, Artificial sequence
  Protein classification predicting sequence
YEDHKLKSGTNTK

SEQ ID NO: 41589 - protein, 11 aa, Artificial sequence
  Protein classification predicting sequence
ALQAVYSMMSW

SEQ ID NO: 41590 - protein, 13 aa, Artificial sequence
  Protein classification predicting sequence
PPEGWNRTRHVII

SEQ ID NO: 41591 - protein, 10 aa, Artificial sequence
  Protein classification predicting sequence
MTDGLHNMGG

SEQ ID NO: 41592 - protein, 19 aa, Artificial sequence
  Protein classification predicting sequence
KNPREDYLDVYVFGVGPLV

SEQ ID NO: 41593 - protein, 13 aa, Artificial sequence
  Protein classification predicting sequence
VNINALASKKDNE

SEQ ID NO: 41594 - protein, 9 aa, Artificial sequence
  Protein classification predicting sequence
HVFKVKDME

SEQ ID NO: 41595 - protein, 8 aa, Artificial sequence
  Protein classification predicting sequence
VFYQMIDE

SEQ ID NO: 41596 - protein, 11 aa, Artificial sequence
  Protein classification predicting sequence
SLSLCGMVWEH

SEQ ID NO: 41597 - protein, 13 aa, Artificial sequence
  Protein classification predicting sequence
DYHKQPWQAKISV

SEQ ID NO: 41598 - protein, 18 aa, Artificial sequence
  Protein classification predicting sequence
CMGAVVSEYFVLTAAHCF

SEQ ID NO: 41599 - protein, 9 aa, Artificial sequence
  Protein classification predicting sequence
HSIKVSVGG

SEQ ID NO: 41600 - protein, 7 aa, Artificial sequence
  Protein classification predicting sequence
YNINGKK

SEQ ID NO: 41601 - protein, 12 aa, Artificial sequence
  Protein classification predicting sequence
GIPEFYDYDVAL

SEQ ID NO: 41602 - protein, 11 aa, Artificial sequence
  Protein classification predicting sequence
KLKNKLKYGQT

SEQ ID NO: 41603 - protein, 18 aa, Artificial sequence
  Protein classification predicting sequence
RPICLPCTEGTTRALRLP

SEQ ID NO: 41604 - protein, 14 aa, Artificial sequence
  Protein classification predicting sequence
LTRKEVYIKNGDKK

SEQ ID NO: 41605 - protein, 6 aa, Artificial sequence
  Protein classification predicting sequence
SCERDA

SEQ ID NO: 41606 - protein, 14 aa, Artificial sequence
  Protein classification predicting sequence
SEVVTPRFLCTGGV

SEQ ID NO: 41607 - protein, 8 aa, Artificial sequence
  Protein classification predicting sequence
PYADPNTC

SEQ ID NO: 41608 - protein, 29 aa, Artificial sequence
  Protein classification predicting sequence
GDSGGPLIVHKRSRFIQVGVISWGVVDVC

SEQ ID NO: 41609 - protein, 16 aa, Artificial sequence
  Protein classification predicting sequence
ARDFHINLFQVLPWLK

SEQ ID NO: 41610 - protein, 35 aa, Artificial sequence
  Protein classification predicting sequence
QMIDESQSLSLCGMVWEHRKGTDYHKQPWQAKISV

SEQ ID NO: 41611 - protein, 41 aa, Artificial sequence
  Protein classification predicting sequence
RPSKGHESCMGAVVSEYFVLTAAHCFTVDDKEHSIKVSVGG

SEQ ID NO: 41612 - protein, 8 aa, Artificial sequence
  Protein classification predicting sequence
PRGRILGG

SEQ ID NO: 41613 - protein, 8 aa, Artificial sequence
  Protein classification predicting sequence
MRLRPMPV

SEQ ID NO: 41614 - protein, 9 aa, Artificial sequence
  Protein classification predicting sequence
TLRALELGA

SEQ ID NO: 41615 - protein, 9 aa, Artificial sequence
  Protein classification predicting sequence
LTGMGRDGA

SEQ ID NO: 41616 - protein, 5 aa, Artificial sequence
  Protein classification predicting sequence
VQHMP

SEQ ID NO: 41617 - protein, 8 aa, Artificial sequence
  Protein classification predicting sequence
SCVVFGMP

SEQ ID NO: 41618 - protein, 8 aa, Artificial sequence
  Protein classification predicting sequence
GVILTGMG

SEQ ID NO: 41619 - protein, 6 aa, Artificial sequence
  Protein classification predicting sequence
LDVEMP

SEQ ID NO: 41620 - protein, 6 aa, Artificial sequence
  Protein classification predicting sequence
MPVMDG

SEQ ID NO: 41621 - protein, 7 aa, Artificial sequence
  Protein classification predicting sequence
IGTSTGG

SEQ ID NO: 41622 - protein, 6 aa, Artificial sequence
  Protein classification predicting sequence
ILTGMG

SEQ ID NO: 41623 - protein, 6 aa, Artificial sequence
  Protein classification predicting sequence
GMPKAA

SEQ ID NO: 41624 - protein, 8 aa, Artificial sequence
  Protein classification predicting sequence
MDGITAVR

SEQ ID NO: 41625 - protein, 8 aa, Artificial sequence
  Protein classification predicting sequence
LMFSSLTH

SEQ ID NO: 41626 - protein, 9 aa, Artificial sequence
  Protein classification predicting sequence
TLDALDAGA

SEQ ID NO: 41627 - protein, 7 aa, Artificial sequence
  Protein classification predicting sequence
VKEAEDG

SEQ ID NO: 41628 - protein, 9 aa, Artificial sequence
  Protein classification predicting sequence
LAPGGKQMM

SEQ ID NO: 41629 - protein, 15 aa, Artificial sequence
  Protein classification predicting sequence
ILPGDERLNYKPCVD

SEQ ID NO: 41630 - protein, 7 aa, Artificial sequence
  Protein classification predicting sequence
VVLTGMG

SEQ ID NO: 41631 - protein, 17 aa, Artificial sequence
  Protein classification predicting sequence
VWAQDEASCVIYGMPMA

SEQ ID NO: 41632 - protein, 7 aa, Artificial sequence
  Protein classification predicting sequence
NYKPCVD

SEQ ID NO: 41633 - protein, 7 aa, Artificial sequence
  Protein classification predicting sequence
TFGSAAK

SEQ ID NO: 41634 - protein, 28 aa, Artificial sequence
  Protein classification predicting sequence
PTPVLMFSSLTHEGARVTLDALDAGAVD

SEQ ID NO: 41635 - protein, 12 aa, Artificial sequence
  Protein classification predicting sequence
LPKNFEDISRNP

SEQ ID NO: 41636 - protein, 7 aa, Artificial sequence
  Protein classification predicting sequence
AFASRLN

SEQ ID NO: 41637 - protein, 8 aa, Artificial sequence
  Protein classification predicting sequence
SCVVYGMP

SEQ ID NO: 41638 - protein, 43 aa, Artificial sequence
  Protein classification predicting sequence
PILMFSSLTHDGAKATLDALDAGALDFLPKKFEDIARNRDEAV

SEQ ID NO: 41639 - protein, 13 aa, Artificial sequence
  Protein classification predicting sequence
LTGMGADGREGAR

SEQ ID NO: 41640 - protein, 25 aa, Artificial sequence
  Protein classification predicting sequence
NYPHPIVLIQHMPATFTAAFASRLN

SEQ ID NO: 41641 - protein, 7 aa, Artificial sequence
  Protein classification predicting sequence
PDVITLD

SEQ ID NO: 41642 - protein, 8 aa, Artificial sequence
  Protein classification predicting sequence
VREASDGE

SEQ ID NO: 41643 - protein, 8 aa, Artificial sequence
  Protein classification predicting sequence
QHMPATFT

SEQ ID NO: 41644 - protein, 6 aa, Artificial sequence
  Protein classification predicting sequence
AQDEAS

SEQ ID NO: 41645 - protein, 7 aa, Artificial sequence
  Protein classification predicting sequence
VILTGMG

SEQ ID NO: 41646 - protein, 7 aa, Artificial sequence
  Protein classification predicting sequence
EVTLRAL

SEQ ID NO: 41647 - protein, 10 aa, Artificial sequence
  Protein classification predicting sequence
FTRSFADRLN

SEQ ID NO: 41648 - protein, 8 aa, Artificial sequence
  Protein classification predicting sequence
DGPLVSRH

SEQ ID NO: 41649 - protein, 10 aa, Artificial sequence
  Protein classification predicting sequence
IMTGMGDDGA

SEQ ID NO: 41650 - protein, 8 aa, Artificial sequence
  Protein classification predicting sequence
TGMGDDGA

SEQ ID NO: 41651 - protein, 6 aa, Artificial sequence
  Protein classification predicting sequence
MVSSLT

SEQ ID NO: 41652 - protein, 8 aa, Artificial sequence
  Protein classification predicting sequence
QHMPAAFT

SEQ ID NO: 41653 - protein, 8 aa, Artificial sequence
  Protein classification predicting sequence
GRALIAPG

SEQ ID NO: 41654 - protein, 7 aa, Artificial sequence
  Protein classification predicting sequence
VLVVDDS

SEQ ID NO: 41655 - protein, 7 aa, Artificial sequence
  Protein classification predicting sequence
VARDLIK

SEQ ID NO: 41656 - protein, 6 aa, Artificial sequence
  Protein classification predicting sequence
ITQHMP

SEQ ID NO: 41657 - protein, 8 aa, Artificial sequence
  Protein classification predicting sequence
AIGTSTGG

SEQ ID NO: 41658 - protein, 13 aa, Artificial sequence
  Protein classification predicting sequence
AIGTSTGGTQALE

SEQ ID NO: 41659 - protein, 7 aa, Artificial sequence
  Protein classification predicting sequence
AYVAPGD

SEQ ID NO: 41660 - protein, 7 aa, Artificial sequence
  Protein classification predicting sequence
PDVVTLD

SEQ ID NO: 41661 - protein, 8 aa, Artificial sequence
  Protein classification predicting sequence
QHMPAGFT

SEQ ID NO: 41662 - protein, 8 aa, Artificial sequence
  Protein classification predicting sequence
FADRLNKL

SEQ ID NO: 41663 - protein, 9 aa, Artificial sequence
  Protein classification predicting sequence
HRPSVDVLF

SEQ ID NO: 41664 - protein, 7 aa, Artificial sequence
  Protein classification predicting sequence
PDVLTLD

SEQ ID NO: 41665 - protein, 8 aa, Artificial sequence
  Protein classification predicting sequence
ALELGAVD

SEQ ID NO: 41666 - protein, 5 aa, Artificial sequence
  Protein classification predicting sequence
VFGMP

SEQ ID NO: 41667 - protein, 9 aa, Artificial sequence
  Protein classification predicting sequence
VFGMPKEAI

SEQ ID NO: 41668 - protein, 7 aa, Artificial sequence
  Protein classification predicting sequence
EMPRMDG

SEQ ID NO: 41669 - protein, 7 aa, Artificial sequence
  Protein classification predicting sequence
TFLRKIM

SEQ ID NO: 41670 - protein, 9 aa, Artificial sequence
  Protein classification predicting sequence
PDMEVVATA

SEQ ID NO: 41671 - protein, 9 aa, Artificial sequence
  Protein classification predicting sequence
LMRLRPTPV

SEQ ID NO: 41672 - protein, 6 aa, Artificial sequence
  Protein classification predicting sequence
RLNKLC

SEQ ID NO: 41673 - protein, 6 aa, Artificial sequence
  Protein classification predicting sequence
VNRHRP

SEQ ID NO: 41674 - protein, 6 aa, Artificial sequence
  Protein classification predicting sequence
GMPREA

SEQ ID NO: 41675 - protein, 15 aa, Artificial sequence
  Protein classification predicting sequence
CPGIVIVQHMPEKFT

SEQ ID NO: 41676 - protein, 16 aa, Artificial sequence
  Protein classification predicting sequence
MPVMDGVEATRRIMAE

SEQ ID NO: 41677 - protein, 11 aa, Artificial sequence
  Protein classification predicting sequence
EMPRMDGITFL

SEQ ID NO: 41678 - protein, 7 aa, Artificial sequence
  Protein classification predicting sequence
STGGTEA

SEQ ID NO: 41679 - protein, 8 aa, Artificial sequence
  Protein classification predicting sequence
VDDSALMR

SEQ ID NO: 41680 - protein, 10 aa, Artificial sequence
  Protein classification predicting sequence
LGAVDFVAKP

SEQ ID NO: 41681 - protein, 7 aa, Artificial sequence
  Protein classification predicting sequence
LKPDVIT

SEQ ID NO: 41682 - protein, 6 aa, Artificial sequence
  Protein classification predicting sequence
DFVTKP

SEQ ID NO: 41683 - protein, 9 aa, Artificial sequence
  Protein classification predicting sequence
GASTGGTEA

SEQ ID NO: 41684 - protein, 10 aa, Artificial sequence
  Protein classification predicting sequence
EASCVVFGMP

SEQ ID NO: 41685 - protein, 7 aa, Artificial sequence
  Protein classification predicting sequence
VLFRSAA

SEQ ID NO: 41686 - protein, 6 aa, Artificial sequence
  Protein classification predicting sequence
VVFGMP

SEQ ID NO: 41687 - protein, 24 aa, Artificial sequence
  Protein classification predicting sequence
DFVTKPQLGIREGMLAYSEMIAEK

SEQ ID NO: 41688 - protein, 13 aa, Artificial sequence
  Protein classification predicting sequence
TLKAGPLLSSEKL

SEQ ID NO: 41689 - protein, 7 aa, Artificial sequence
  Protein classification predicting sequence
IGASTGG

SEQ ID NO: 41690 - protein, 23 aa, Artificial sequence
  Protein classification predicting sequence
IGASTGGTEAIRHVLQPLPLSSP

SEQ ID NO: 41691 - protein, 10 aa, Artificial sequence
  Protein classification predicting sequence
PGHAYIAPGD

SEQ ID NO: 41692 - protein, 11 aa, Artificial sequence
  Protein classification predicting sequence
ANYQIKIHDGP

SEQ ID NO: 41693 - protein, 22 aa, Artificial sequence
  Protein classification predicting sequence
AQNEASCVVFGMPREAINMGGV

SEQ ID NO: 41694 - protein, 6 aa, Artificial sequence
  Protein classification predicting sequence
VSQQML

SEQ ID NO: 41695 - protein, 8 aa, Artificial sequence
  Protein classification predicting sequence
QHMPEGFT

SEQ ID NO: 41696 - protein, 6 aa, Artificial sequence
  Protein classification predicting sequence
LVVDDS

SEQ ID NO: 41697 - protein, 7 aa, Artificial sequence
  Protein classification predicting sequence
PDVITMD

SEQ ID NO: 41698 - protein, 8 aa, Artificial sequence
  Protein classification predicting sequence
VDDSAFMR

SEQ ID NO: 41699 - protein, 12 aa, Artificial sequence
  Protein classification predicting sequence
NPDVLTLDVEMP

SEQ ID NO: 41700 - protein, 7 aa, Artificial sequence
  Protein classification predicting sequence
GFTRSFA

SEQ ID NO: 41701 - protein, 10 aa, Artificial sequence
  Protein classification predicting sequence
GFTRSFAERL

SEQ ID NO: 41702 - protein, 7 aa, Artificial sequence
  Protein classification predicting sequence
DDSAFMR

SEQ ID NO: 41703 - protein, 9 aa, Artificial sequence
  Protein classification predicting sequence
VQHMPPGFT

SEQ ID NO: 41704 - protein, 6 aa, Artificial sequence
  Protein classification predicting sequence
VDDSAL

SEQ ID NO: 41705 - protein, 10 aa, Artificial sequence
  Protein classification predicting sequence
EIINSHSDME

SEQ ID NO: 41706 - protein, 8 aa, Artificial sequence
  Protein classification predicting sequence
QHMPPGFT

SEQ ID NO: 41707 - protein, 5 aa, Artificial sequence
  Protein classification predicting sequence
EMPRM

SEQ ID NO: 41708 - protein, 8 aa, Artificial sequence
  Protein classification predicting sequence
TGMGRDGA

SEQ ID NO: 41709 - protein, 10 aa, Artificial sequence
  Protein classification predicting sequence
GASTGGTEAI

SEQ ID NO: 41710 - protein, 6 aa, Artificial sequence
  Protein classification predicting sequence
RPSVDV

SEQ ID NO: 41711 - protein, 19 aa, Artificial sequence
  Protein classification predicting sequence
HMELARSGANYQIKIHDGP

SEQ ID NO: 41712 - protein, 7 aa, Artificial sequence
  Protein classification predicting sequence
CVVFGMP

SEQ ID NO: 41713 - protein, 7 aa, Artificial sequence
  Protein classification predicting sequence
PSVDVLF

SEQ ID NO: 41714 - protein, 13 aa, Artificial sequence
  Protein classification predicting sequence
LMTEIINSHPDME

SEQ ID NO: 41715 - protein, 18 aa, Artificial sequence
  Protein classification predicting sequence
IHDGPAVNRHRPSVDVLF

SEQ ID NO: 41716 - protein, 12 aa, Artificial sequence
  Protein classification predicting sequence
VNRHRPSVDVLF

SEQ ID NO: 41717 - protein, 10 aa, Artificial sequence
  Protein classification predicting sequence
RHRPSVDVLF

SEQ ID NO: 41718 - protein, 20 aa, Artificial sequence
  Protein classification predicting sequence
AGRNAVGVILTGMGNDGAAG

SEQ ID NO: 41719 - protein, 14 aa, Artificial sequence
  Protein classification predicting sequence
EASCVVFGMPREAI

SEQ ID NO: 41720 - protein, 6 aa, Artificial sequence
  Protein classification predicting sequence
GCQSQC

SEQ ID NO: 41721 - protein, 14 aa, Artificial sequence
  Protein classification predicting sequence
AAFLAQTSHETTGG

SEQ ID NO: 41722 - protein, 9 aa, Artificial sequence
  Protein classification predicting sequence
QTSHETTGG

SEQ ID NO: 41723 - protein, 6 aa, Artificial sequence
  Protein classification predicting sequence
ISFKSA

SEQ ID NO: 41724 - protein, 6 aa, Artificial sequence
  Protein classification predicting sequence
AGRVPG

SEQ ID NO: 41725 - protein, 9 aa, Artificial sequence
  Protein classification predicting sequence
GRAIGVDLL

SEQ ID NO: 41726 - protein, 7 aa, Artificial sequence
  Protein classification predicting sequence
NGGIECG

SEQ ID NO: 41727 - protein, 10 aa, Artificial sequence
  Protein classification predicting sequence
EQCGSQAGGA

SEQ ID NO: 41728 - protein, 5 aa, Artificial sequence
  Protein classification predicting sequence
FGWCG

SEQ ID NO: 41729 - protein, 6 aa, Artificial sequence
  Protein classification predicting sequence
APDGPY

SEQ ID NO: 41730 - protein, 5 aa, Artificial sequence
  Protein classification predicting sequence
NLDCY

SEQ ID NO: 41731 - protein, 8 aa, Artificial sequence
  Protein classification predicting sequence
WGYCFKQE

SEQ ID NO: 41732 - protein, 6 aa, Artificial sequence
  Protein classification predicting sequence
DRAAGR

SEQ ID NO: 41733 - protein, 6 aa, Artificial sequence
  Protein classification predicting sequence
DRIGFY

SEQ ID NO: 41734 - protein, 8 aa, Artificial sequence
  Protein classification predicting sequence
NPDLVATD

SEQ ID NO: 41735 - protein, 9 aa, Artificial sequence
  Protein classification predicting sequence
PKPSSHAVI

SEQ ID NO: 41736 - protein, 10 aa, Artificial sequence
  Protein classification predicting sequence
GVITNIINGG

SEQ ID NO: 41737 - protein, 7 aa, Artificial sequence
  Protein classification predicting sequence
MLLHRND

SEQ ID NO: 41738 - protein, 13 aa, Artificial sequence
  Protein classification predicting sequence
WFWMTPQSPKPSC

SEQ ID NO: 41739 - protein, 7 aa, Artificial sequence
  Protein classification predicting sequence
TNIINGG

SEQ ID NO: 41740 - protein, 6 aa, Artificial sequence
  Protein classification predicting sequence
AAPQCP

SEQ ID NO: 41741 - protein, 10 aa, Artificial sequence
  Protein classification predicting sequence
QTSHETTGGW

SEQ ID NO: 41742 - protein, 5 aa, Artificial sequence
  Protein classification predicting sequence
CQSQC

SEQ ID NO: 41743 - protein, 11 aa, Artificial sequence
  Protein classification predicting sequence
CGRAIGVDLLN

SEQ ID NO: 41744 - protein, 7 aa, Artificial sequence
  Protein classification predicting sequence
PDLVATD

SEQ ID NO: 41745 - protein, 8 aa, Artificial sequence
  Protein classification predicting sequence
GPYAWGYC

SEQ ID NO: 41746 - protein, 7 aa, Artificial sequence
  Protein classification predicting sequence
WTPSAAD

SEQ ID NO: 41747 - protein, 7 aa, Artificial sequence
  Protein classification predicting sequence
QCGSQAG

SEQ ID NO: 41748 - protein, 8 aa, Artificial sequence
  Protein classification predicting sequence
AAFFAQTS

SEQ ID NO: 41749 - protein, 8 aa, Artificial sequence
  Protein classification predicting sequence
QFYNNPPC

SEQ ID NO: 41750 - protein, 9 aa, Artificial sequence
  Protein classification predicting sequence
NGAPAEKLI

SEQ ID NO: 41751 - protein, 8 aa, Artificial sequence
  Protein classification predicting sequence
GLVFDTSC

SEQ ID NO: 41752 - protein, 6 aa, Artificial sequence
  Protein classification predicting sequence
NLAGHC

SEQ ID NO: 41753 - protein, 15 aa, Artificial sequence
  Protein classification predicting sequence
TGLFDYVWVQFYNNP

SEQ ID NO: 41754 - protein, 6 aa, Artificial sequence
  Protein classification predicting sequence
QTSHET

SEQ ID NO: 41755 - protein, 9 aa, Artificial sequence
  Protein classification predicting sequence
RIGFYRRYC

SEQ ID NO: 41756 - protein, 9 aa, Artificial sequence
  Protein classification predicting sequence
GVITNIING

SEQ ID NO: 41757 - protein, 6 aa, Artificial sequence
  Protein classification predicting sequence
CCSKFG

SEQ ID NO: 41758 - protein, 8 aa, Artificial sequence
  Protein classification predicting sequence
YCGDGCQS

SEQ ID NO: 41759 - protein, 7 aa, Artificial sequence
  Protein classification predicting sequence
GKNFYTR

SEQ ID NO: 41760 - protein, 11 aa, Artificial sequence
  Protein classification predicting sequence
GYTGENSPLYK

SEQ ID NO: 41761 - protein, 6 aa, Artificial sequence
  Protein classification predicting sequence
PKPSCH

SEQ ID NO: 41762 - protein, 8 aa, Artificial sequence
  Protein classification predicting sequence
KPSCHDVI

SEQ ID NO: 41763 - protein, 5 aa, Artificial sequence
  Protein classification predicting sequence
NYNYG

SEQ ID NO: 41764 - protein, 6 aa, Artificial sequence
  Protein classification predicting sequence
RIGFYK

SEQ ID NO: 41765 - protein, 7 aa, Artificial sequence
  Protein classification predicting sequence
YGNNLDC

SEQ ID NO: 41766 - protein, 7 aa, Artificial sequence
  Protein classification predicting sequence
QAGGALC

SEQ ID NO: 41767 - protein, 36 aa, Artificial sequence
  Protein classification predicting sequence
VAAFLAQTSHETTGGWATAPDGAFAWGYCFKQERGA

SEQ ID NO: 41768 - protein, 5 aa, Artificial sequence
  Protein classification predicting sequence
WFWMT

SEQ ID NO: 41769 - protein, 7 aa, Artificial sequence
  Protein classification predicting sequence
VAPGDNL

SEQ ID NO: 41770 - protein, 7 aa, Artificial sequence
  Protein classification predicting sequence
SFPGFGT

SEQ ID NO: 41771 - protein, 7 aa, Artificial sequence
  Protein classification predicting sequence
WFWMTPQ

SEQ ID NO: 41772 - protein, 8 aa, Artificial sequence
  Protein classification predicting sequence
HDVIIGRW

SEQ ID NO: 41773 - protein, 7 aa, Artificial sequence
  Protein classification predicting sequence
RKREIAA

SEQ ID NO: 41774 - protein, 7 aa, Artificial sequence
  Protein classification predicting sequence
MLKNRND

SEQ ID NO: 41775 - protein, 11 aa, Artificial sequence
  Protein classification predicting sequence
FYTYDAFIAAA

SEQ ID NO: 41776 - protein, 6 aa, Artificial sequence
  Protein classification predicting sequence
PDGPYA

SEQ ID NO: 41777 - protein, 10 aa, Artificial sequence
  Protein classification predicting sequence
GNCQSQCPGG

SEQ ID NO: 41778 - protein, 7 aa, Artificial sequence
  Protein classification predicting sequence
GFYKRYC

SEQ ID NO: 41779 - protein, 14 aa, Artificial sequence
  Protein classification predicting sequence
SIITRKEFQEGLKI

SEQ ID NO: 41780 - protein, 13 aa, Artificial sequence
  Protein classification predicting sequence
GDYNIICPALEFT

SEQ ID NO: 41781 - protein, 10 aa, Artificial sequence
  Protein classification predicting sequence
AFFYYFEHRS

SEQ ID NO: 41782 - protein, 11 aa, Artificial sequence
  Protein classification predicting sequence
TKNGKVRGMNL

SEQ ID NO: 41783 - protein, 9 aa, Artificial sequence
  Protein classification predicting sequence
AEEILSRSI

SEQ ID NO: 41784 - protein, 12 aa, Artificial sequence
  Protein classification predicting sequence
TKLRAQQCRFWT

SEQ ID NO: 41785 - protein, 15 aa, Artificial sequence
  Protein classification predicting sequence
NFGPTVDGDFLTDMP

SEQ ID NO: 41786 - protein, 10 aa, Artificial sequence
  Protein classification predicting sequence
ITRKEFQEGL

SEQ ID NO: 41787 - protein, 6 aa, Artificial sequence
  Protein classification predicting sequence
NNAFFY

SEQ ID NO: 41788 - protein, 8 aa, Artificial sequence
  Protein classification predicting sequence
WANFAKYG

SEQ ID NO: 41789 - protein, 12 aa, Artificial sequence
  Protein classification predicting sequence
STEQKYLTLNTE

SEQ ID NO: 41790 - protein, 6 aa, Artificial sequence
  Protein classification predicting sequence
NYMMDW

SEQ ID NO: 41791 - protein, 13 aa, Artificial sequence
  Protein classification predicting sequence
NQFNDYTSKKESC

SEQ ID NO: 41792 - protein, 7 aa, Artificial sequence
  Protein classification predicting sequence
VYDGKFL

SEQ ID NO: 41793 - protein, 9 aa, Artificial sequence
  Protein classification predicting sequence
FNDYTSKKE

SEQ ID NO: 41794 - protein, 8 aa, Artificial sequence
  Protein classification predicting sequence
EQSSRGER

SEQ ID NO: 41795 - protein, 7 aa, Artificial sequence
  Protein classification predicting sequence
SMGSFLL

SEQ ID NO: 41796 - protein, 7 aa, Artificial sequence
  Protein classification predicting sequence
FLGQQVD

SEQ ID NO: 41797 - protein, 8 aa, Artificial sequence
  Protein classification predicting sequence
IVAQLLFL

SEQ ID NO: 41798 - protein, 9 aa, Artificial sequence
  Protein classification predicting sequence
AASMGAFLL

SEQ ID NO: 41799 - protein, 11 aa, Artificial sequence
  Protein classification predicting sequence
SRIMIHQPLGG

SEQ ID NO: 41800 - protein, 16 aa, Artificial sequence
  Protein classification predicting sequence
SRIMIHQPLGGAQGQA

SEQ ID NO: 41801 - protein, 5 aa, Artificial sequence
  Protein classification predicting sequence
MIHQP

SEQ ID NO: 41802 - protein, 10 aa, Artificial sequence
  Protein classification predicting sequence
AASFGALLLL

SEQ ID NO: 41803 - protein, 22 aa, Artificial sequence
  Protein classification predicting sequence
GQATEIEITAKRILKLKHDINK

SEQ ID NO: 41804 - protein, 7 aa, Artificial sequence
  Protein classification predicting sequence
ADRTGQP

SEQ ID NO: 41805 - protein, 6 aa, Artificial sequence
  Protein classification predicting sequence
ALPNSE

SEQ ID NO: 41806 - protein, 10 aa, Artificial sequence
  Protein classification predicting sequence
DTDRDNFMTA

SEQ ID NO: 41807 - protein, 7 aa, Artificial sequence
  Protein classification predicting sequence
YINSPGG

SEQ ID NO: 41808 - protein, 5 aa, Artificial sequence
  Protein classification predicting sequence
VSTIC

SEQ ID NO: 41809 - protein, 6 aa, Artificial sequence
  Protein classification predicting sequence
AQLLFL

SEQ ID NO: 41810 - protein, 9 aa, Artificial sequence
  Protein classification predicting sequence
TICTGMAAS

SEQ ID NO: 41811 - protein, 6 aa, Artificial sequence
  Protein classification predicting sequence
GTKGKR

SEQ ID NO: 41812 - protein, 6 aa, Artificial sequence
  Protein classification predicting sequence
EAKDYG

SEQ ID NO: 41813 - protein, 14 aa, Artificial sequence
  Protein classification predicting sequence
RIIFLGVQVDDASA

SEQ ID NO: 41814 - protein, 11 aa, Artificial sequence
  Protein classification predicting sequence
LPNARVLIHQP

SEQ ID NO: 41815 - protein, 6 aa, Artificial sequence
  Protein classification predicting sequence
ATEIEI

SEQ ID NO: 41816 - protein, 7 aa, Artificial sequence
  Protein classification predicting sequence
LAKHTGQ

SEQ ID NO: 41817 - protein, 10 aa, Artificial sequence
  Protein classification predicting sequence
NSPGGSITAG

SEQ ID NO: 41818 - protein, 6 aa, Artificial sequence
  Protein classification predicting sequence
GAKGKR

SEQ ID NO: 41819 - protein, 6 aa, Artificial sequence
  Protein classification predicting sequence
GQASDI

SEQ ID NO: 41820 - protein, 8 aa, Artificial sequence
  Protein classification predicting sequence
EQSARGER

SEQ ID NO: 41821 - protein, 7 aa, Artificial sequence
  Protein classification predicting sequence
GGVVTSG

SEQ ID NO: 41822 - protein, 6 aa, Artificial sequence
  Protein classification predicting sequence
HQPLGG

SEQ ID NO: 41823 - protein, 6 aa, Artificial sequence
  Protein classification predicting sequence
INSPGG

SEQ ID NO: 41824 - protein, 7 aa, Artificial sequence
  Protein classification predicting sequence
RIMIHQP

SEQ ID NO: 41825 - protein, 25 aa, Artificial sequence
  Protein classification predicting sequence
PIVFVINSPGGSVDAGFAVWDQIKM

SEQ ID NO: 41826 - protein, 19 aa, Artificial sequence
  Protein classification predicting sequence
TTVVTGLAASMGSVLSLCA

SEQ ID NO: 41827 - protein, 9 aa, Artificial sequence
  Protein classification predicting sequence
PGRRFATPH

SEQ ID NO: 41828 - protein, 7 aa, Artificial sequence
  Protein classification predicting sequence
TLARHTG

SEQ ID NO: 41829 - protein, 15 aa, Artificial sequence
  Protein classification predicting sequence
DPDRDITMYINSPGG

SEQ ID NO: 41830 - protein, 7 aa, Artificial sequence
  Protein classification predicting sequence
DPDRDIT

SEQ ID NO: 41831 - protein, 6 aa, Artificial sequence
  Protein classification predicting sequence
LPNSRV

SEQ ID NO: 41832 - protein, 11 aa, Artificial sequence
  Protein classification predicting sequence
INSPGGSVTAG

SEQ ID NO: 41833 - protein, 8 aa, Artificial sequence
  Protein classification predicting sequence
GLAASMGA

SEQ ID NO: 41834 - protein, 7 aa, Artificial sequence
  Protein classification predicting sequence
DTERDFF

SEQ ID NO: 41835 - protein, 8 aa, Artificial sequence
  Protein classification predicting sequence
EQTARGER

SEQ ID NO: 41836 - protein, 9 aa, Artificial sequence
  Protein classification predicting sequence
YINSPGGVV

SEQ ID NO: 41837 - protein, 10 aa, Artificial sequence
  Protein classification predicting sequence
EFGLIDKVVE

SEQ ID NO: 41838 - protein, 7 aa, Artificial sequence
  Protein classification predicting sequence
YGFVDHI

SEQ ID NO: 41839 - protein, 7 aa, Artificial sequence
  Protein classification predicting sequence
TLCLGQA

SEQ ID NO: 41840 - protein, 8 aa, Artificial sequence
  Protein classification predicting sequence
ARIMMHQP

SEQ ID NO: 41841 - protein, 7 aa, Artificial sequence
  Protein classification predicting sequence
DIYSRLL

SEQ ID NO: 41842 - protein, 10 aa, Artificial sequence
  Protein classification predicting sequence
DIYSRLLKER

SEQ ID NO: 41843 - protein, 14 aa, Artificial sequence
  Protein classification predicting sequence
DIYSRLLKERVIFL

SEQ ID NO: 41844 - protein, 12 aa, Artificial sequence
  Protein classification predicting sequence
KDISLYINSPGG

SEQ ID NO: 41845 - protein, 51 aa, Artificial sequence
  Protein classification predicting sequence
KDISLYINSPGGSISAGMAIYDTMVLAPCDIATYAMGMAASMGEFLLAAGT

SEQ ID NO: 41846 - protein, 7 aa, Artificial sequence
  Protein classification predicting sequence
RGERAYD

SEQ ID NO: 41847 - protein, 7 aa, Artificial sequence
  Protein classification predicting sequence
QGQATDI

SEQ ID NO: 41848 - protein, 8 aa, Artificial sequence
  Protein classification predicting sequence
GLAASMGS

SEQ ID NO: 41849 - protein, 11 aa, Artificial sequence
  Protein classification predicting sequence
MTAQEALEFGL

SEQ ID NO: 41850 - protein, 12 aa, Artificial sequence
  Protein classification predicting sequence
LFLEAEDPEKDI

SEQ ID NO: 41851 - protein, 6 aa, Artificial sequence
  Protein classification predicting sequence
GQATDI

SEQ ID NO: 41852 - protein, 11 aa, Artificial sequence
  Protein classification predicting sequence
GLAASMGAFLL

SEQ ID NO: 41853 - protein, 8 aa, Artificial sequence
  Protein classification predicting sequence
FDIYSRLL

SEQ ID NO: 41854 - protein, 6 aa, Artificial sequence
  Protein classification predicting sequence
DIEIHA

SEQ ID NO: 41855 - protein, 11 aa, Artificial sequence
  Protein classification predicting sequence
VIEQSSRGERA

SEQ ID NO: 41856 - protein, 8 aa, Artificial sequence
  Protein classification predicting sequence
ERIIFING

SEQ ID NO: 41857 - protein, 7 aa, Artificial sequence
  Protein classification predicting sequence
VSTVCMG

SEQ ID NO: 41858 - protein, 7 aa, Artificial sequence
  Protein classification predicting sequence
FMTAEEA

SEQ ID NO: 41859 - protein, 7 aa, Artificial sequence
  Protein classification predicting sequence
LPNSRVM

SEQ ID NO: 41860 - protein, 7 aa, Artificial sequence
  Protein classification predicting sequence
DTDRDFF

SEQ ID NO: 41861 - protein, 7 aa, Artificial sequence
  Protein classification predicting sequence
LLLSAED

SEQ ID NO: 41862 - protein, 11 aa, Artificial sequence
  Protein classification predicting sequence
DISLYINSPGG

SEQ ID NO: 41863 - protein, 6 aa, Artificial sequence
  Protein classification predicting sequence
AEHTGQ

SEQ ID NO: 41864 - protein, 8 aa, Artificial sequence
  Protein classification predicting sequence
EQTNRGER

SEQ ID NO: 41865 - protein, 9 aa, Artificial sequence
  Protein classification predicting sequence
AQLLFLESE

SEQ ID NO: 41866 - protein, 6 aa, Artificial sequence
  Protein classification predicting sequence
EILAKH

SEQ ID NO: 41867 - protein, 10 aa, Artificial sequence
  Protein classification predicting sequence
IYLYINSPGG

SEQ ID NO: 41868 - protein, 10 aa, Artificial sequence
  Protein classification predicting sequence
LYINSPGGSV

SEQ ID NO: 41869 - protein, 13 aa, Artificial sequence
  Protein classification predicting sequence
LYINSPGGSVTAG

SEQ ID NO: 41870 - protein, 6 aa, Artificial sequence
  Protein classification predicting sequence
ALPNAR

SEQ ID NO: 41871 - protein, 6 aa, Artificial sequence
  Protein classification predicting sequence
DIEIQA

SEQ ID NO: 41872 - protein, 10 aa, Artificial sequence
  Protein classification predicting sequence
PTVVEQSGRG

SEQ ID NO: 41873 - protein, 6 aa, Artificial sequence
  Protein classification predicting sequence
IPTVIE

SEQ ID NO: 41874 - protein, 14 aa, Artificial sequence
  Protein classification predicting sequence
RAFDIYSRLLRERI

SEQ ID NO: 41875 - protein, 9 aa, Artificial sequence
  Protein classification predicting sequence
HTGKSLEEI

SEQ ID NO: 41876 - protein, 6 aa, Artificial sequence
  Protein classification predicting sequence
KRYALP

SEQ ID NO: 41877 - protein, 7 aa, Artificial sequence
  Protein classification predicting sequence
YGIIDTV

SEQ ID NO: 41878 - protein, 7 aa, Artificial sequence
  Protein classification predicting sequence
GKRFALP

SEQ ID NO: 41879 - protein, 6 aa, Artificial sequence
  Protein classification predicting sequence
EDMERD

SEQ ID NO: 41880 - protein, 6 aa, Artificial sequence
  Protein classification predicting sequence
RYILPS

SEQ ID NO: 41881 - protein, 8 aa, Artificial sequence
  Protein classification predicting sequence
MAQLLVLE

SEQ ID NO: 41882 - protein, 6 aa, Artificial sequence
  Protein classification predicting sequence
DRDKIL

SEQ ID NO: 41883 - protein, 8 aa, Artificial sequence
  Protein classification predicting sequence
RGERSYDI

SEQ ID NO: 41884 - protein, 7 aa, Artificial sequence
  Protein classification predicting sequence
LTGPVED

SEQ ID NO: 41885 - protein, 9 aa, Artificial sequence
  Protein classification predicting sequence
CVGQAASMG

SEQ ID NO: 41886 - protein, 11 aa, Artificial sequence
  Protein classification predicting sequence
GQAASMGSLLL

SEQ ID NO: 41887 - protein, 8 aa, Artificial sequence
  Protein classification predicting sequence
TLDRDHFM

SEQ ID NO: 41888 - protein, 9 aa, Artificial sequence
  Protein classification predicting sequence
YINSPGGSV

SEQ ID NO: 41889 - protein, 8 aa, Artificial sequence
  Protein classification predicting sequence
MIHQPLGG

SEQ ID NO: 41890 - protein, 20 aa, Artificial sequence
  Protein classification predicting sequence
MIHQPLGGAQGQATEIEIAA

SEQ ID NO: 41891 - protein, 6 aa, Artificial sequence
  Protein classification predicting sequence
IVAQLL

SEQ ID NO: 41892 - protein, 11 aa, Artificial sequence
  Protein classification predicting sequence
IVAQLLFLEAE

SEQ ID NO: 41893 - protein, 11 aa, Artificial sequence
  Protein classification predicting sequence
AQLLFLEAENP

SEQ ID NO: 41894 - protein, 6 aa, Artificial sequence
  Protein classification predicting sequence
IMIHQP

SEQ ID NO: 41895 - protein, 7 aa, Artificial sequence
  Protein classification predicting sequence
ITAKRIL

SEQ ID NO: 41896 - protein, 7 aa, Artificial sequence
  Protein classification predicting sequence
FMSAEEA

SEQ ID NO: 41897 - protein, 9 aa, Artificial sequence
  Protein classification predicting sequence
SRLLKDRII

SEQ ID NO: 41898 - protein, 8 aa, Artificial sequence
  Protein classification predicting sequence
AEDPEKDI

SEQ ID NO: 41899 - protein, 6 aa, Artificial sequence
  Protein classification predicting sequence
HQPSGG

SEQ ID NO: 41900 - protein, 6 aa, Artificial sequence
  Protein classification predicting sequence
ATDIEI

SEQ ID NO: 41901 - protein, 8 aa, Artificial sequence
  Protein classification predicting sequence
RGERAYDI

SEQ ID NO: 41902 - protein, 10 aa, Artificial sequence
  Protein classification predicting sequence
SRLLKERIIF

SEQ ID NO: 41903 - protein, 7 aa, Artificial sequence
  Protein classification predicting sequence
AQLLFLE

SEQ ID NO: 41904 - protein, 9 aa, Artificial sequence
  Protein classification predicting sequence
AQLLFLEAE

SEQ ID NO: 41905 - protein, 7 aa, Artificial sequence
  Protein classification predicting sequence
AIYDTMQ

SEQ ID NO: 41906 - protein, 9 aa, Artificial sequence
  Protein classification predicting sequence
AIYDTMQFI

SEQ ID NO: 41907 - protein, 7 aa, Artificial sequence
  Protein classification predicting sequence
GGFQGQA

SEQ ID NO: 41908 - protein, 7 aa, Artificial sequence
  Protein classification predicting sequence
FINSPGG

SEQ ID NO: 41909 - protein, 5 aa, Artificial sequence
  Protein classification predicting sequence
RDFFM

SEQ ID NO: 41910 - protein, 7 aa, Artificial sequence
  Protein classification predicting sequence
PCDIATY

SEQ ID NO: 41911 - protein, 7 aa, Artificial sequence
  Protein classification predicting sequence
EAKDYGL

SEQ ID NO: 41912 - protein, 8 aa, Artificial sequence
  Protein classification predicting sequence
ARYILPSF

SEQ ID NO: 41913 - protein, 6 aa, Artificial sequence
  Protein classification predicting sequence
DPDRDI

SEQ ID NO: 41914 - protein, 8 aa, Artificial sequence
  Protein classification predicting sequence
AIYDTMQY

SEQ ID NO: 41915 - protein, 7 aa, Artificial sequence
  Protein classification predicting sequence
GPVTDES

SEQ ID NO: 41916 - protein, 28 aa, Artificial sequence
  Protein classification predicting sequence
GVIQGQFSDLEIQAAEIERMRTLMETTL

SEQ ID NO: 41917 - protein, 15 aa, Artificial sequence
  Protein classification predicting sequence
ANRLCAQILLLAAED

SEQ ID NO: 41918 - protein, 16 aa, Artificial sequence
  Protein classification predicting sequence
VIKKEMFRLNAEFTGQ

SEQ ID NO: 41919 - protein, 15 aa, Artificial sequence
  Protein classification predicting sequence
EALEYGFVDHIITRA

SEQ ID NO: 41920 - protein, 12 aa, Artificial sequence
  Protein classification predicting sequence
ANVIVAQLLFLE

SEQ ID NO: 41921 - protein, 42 aa, Artificial sequence
  Protein classification predicting sequence
IANKLCAQILLLSAEDPTRDISLYINSPGGSVTAGMAIYDTM

SEQ ID NO: 41922 - protein, 10 aa, Artificial sequence
  Protein classification predicting sequence
TAGMAIYDTM

SEQ ID NO: 41923 - protein, 8 aa, Artificial sequence
  Protein classification predicting sequence
GSAADIAI

SEQ ID NO: 41924 - protein, 8 aa, Artificial sequence
  Protein classification predicting sequence
EDTGRGER

SEQ ID NO: 41925 - protein, 16 aa, Artificial sequence
  Protein classification predicting sequence
NTYCIGQAASMGALLL

SEQ ID NO: 41926 - protein, 11 aa, Artificial sequence
  Protein classification predicting sequence
GQAASMGALLL

SEQ ID NO: 41927 - protein, 11 aa, Artificial sequence
  Protein classification predicting sequence
ERWVDIYTRLG

SEQ ID NO: 41928 - protein, 9 aa, Artificial sequence
  Protein classification predicting sequence
TAGLAIYDT

SEQ ID NO: 41929 - protein, 6 aa, Artificial sequence
  Protein classification predicting sequence
ALPHSR

SEQ ID NO: 41930 - protein, 6 aa, Artificial sequence
  Protein classification predicting sequence
TGPVED

SEQ ID NO: 41931 - protein, 6 aa, Artificial sequence
  Protein classification predicting sequence
GLIDKV

SEQ ID NO: 41932 - protein, 10 aa, Artificial sequence
  Protein classification predicting sequence
CIGQAASMGA

SEQ ID NO: 41933 - protein, 7 aa, Artificial sequence
  Protein classification predicting sequence
FMSADEA

SEQ ID NO: 41934 - protein, 6 aa, Artificial sequence
  Protein classification predicting sequence
GERSYD

SEQ ID NO: 41935 - protein, 11 aa, Artificial sequence
  Protein classification predicting sequence
FTSLMAIYDTM

SEQ ID NO: 41936 - protein, 6 aa, Artificial sequence
  Protein classification predicting sequence
ERVIFL

SEQ ID NO: 41937 - protein, 7 aa, Artificial sequence
  Protein classification predicting sequence
DDASAND

SEQ ID NO: 41938 - protein, 8 aa, Artificial sequence
  Protein classification predicting sequence
GQVSDLEI

SEQ ID NO: 41939 - protein, 8 aa, Artificial sequence
  Protein classification predicting sequence
RDKILTAE

SEQ ID NO: 41940 - protein, 9 aa, Artificial sequence
  Protein classification predicting sequence
KEINMYINS

SEQ ID NO: 41941 - protein, 8 aa, Artificial sequence
  Protein classification predicting sequence
ERDRWMSA

SEQ ID NO: 41942 - protein, 7 aa, Artificial sequence
  Protein classification predicting sequence
VPYRLPG

SEQ ID NO: 41943 - protein, 7 aa, Artificial sequence
  Protein classification predicting sequence
GLAASMG

SEQ ID NO: 41944 - protein, 11 aa, Artificial sequence
  Protein classification predicting sequence
LPHSRIMIHQP

SEQ ID NO: 41945 - protein, 11 aa, Artificial sequence
  Protein classification predicting sequence
DIEIEAREILR

SEQ ID NO: 41946 - protein, 10 aa, Artificial sequence
  Protein classification predicting sequence
PSVPYRLPGS

SEQ ID NO: 41947 - protein, 15 aa, Artificial sequence
  Protein classification predicting sequence
IYLYINSPGGSVTAG

SEQ ID NO: 41948 - protein, 8 aa, Artificial sequence
  Protein classification predicting sequence
ARIMIHQP

SEQ ID NO: 41949 - protein, 10 aa, Artificial sequence
  Protein classification predicting sequence
RIMIHQPLGG

SEQ ID NO: 41950 - protein, 15 aa, Artificial sequence
  Protein classification predicting sequence
RIMIHQPLGGAQGQA

SEQ ID NO: 41951 - protein, 13 aa, Artificial sequence
  Protein classification predicting sequence
LMETTLARHTGKD

SEQ ID NO: 41952 - protein, 15 aa, Artificial sequence
  Protein classification predicting sequence
SGRGERAFDIYSRLL

SEQ ID NO: 41953 - protein, 10 aa, Artificial sequence
  Protein classification predicting sequence
SMGAFLLAGG

SEQ ID NO: 41954 - protein, 7 aa, Artificial sequence
  Protein classification predicting sequence
HTGQSLE

SEQ ID NO: 41955 - protein, 8 aa, Artificial sequence
  Protein classification predicting sequence
FLGSEVND

SEQ ID NO: 41956 - protein, 23 aa, Artificial sequence
  Protein classification predicting sequence
LLAAGTPGKRMALPNARVLIHQP

SEQ ID NO: 41957 - protein, 7 aa, Artificial sequence
  Protein classification predicting sequence
DDTSAND

SEQ ID NO: 41958 - protein, 8 aa, Artificial sequence
  Protein classification predicting sequence
YINSPGGS

SEQ ID NO: 41959 - protein, 7 aa, Artificial sequence
  Protein classification predicting sequence
GKRLALP

SEQ ID NO: 41960 - protein, 8 aa, Artificial sequence
  Protein classification predicting sequence
MANLIVAQ

SEQ ID NO: 41961 - protein, 10 aa, Artificial sequence
  Protein classification predicting sequence
GLMVYLSIED

SEQ ID NO: 41962 - protein, 9 aa, Artificial sequence
  Protein classification predicting sequence
LFINSPGGW

SEQ ID NO: 41963 - protein, 9 aa, Artificial sequence
  Protein classification predicting sequence
SEDMERDVF

SEQ ID NO: 41964 - protein, 8 aa, Artificial sequence
  Protein classification predicting sequence
GVPKVPFR

SEQ ID NO: 41965 - protein, 7 aa, Artificial sequence
  Protein classification predicting sequence
YDAMQFV

SEQ ID NO: 41966 - protein, 7 aa, Artificial sequence
  Protein classification predicting sequence
VYVQRTG

SEQ ID NO: 41967 - protein, 8 aa, Artificial sequence
  Protein classification predicting sequence
EQTSRGER

SEQ ID NO: 41968 - protein, 7 aa, Artificial sequence
  Protein classification predicting sequence
FLEAENP

SEQ ID NO: 41969 - protein, 22 aa, Artificial sequence
  Protein classification predicting sequence
ENPEKDISLYINSPGGVVTAGL

SEQ ID NO: 41970 - protein, 13 aa, Artificial sequence
  Protein classification predicting sequence
YINSPGGVVTAGL

SEQ ID NO: 41971 - protein, 12 aa, Artificial sequence
  Protein classification predicting sequence
YINSPGGVVTAG

SEQ ID NO: 41972 - protein, 6 aa, Artificial sequence
  Protein classification predicting sequence
IYDTMQ

SEQ ID NO: 41973 - protein, 13 aa, Artificial sequence
  Protein classification predicting sequence
AIYDTMQFVRPDV

SEQ ID NO: 41974 - protein, 10 aa, Artificial sequence
  Protein classification predicting sequence
TKRIAFPHAR

SEQ ID NO: 41975 - protein, 12 aa, Artificial sequence
  Protein classification predicting sequence
SEDMERDVFMSA

SEQ ID NO: 41976 - protein, 10 aa, Artificial sequence
  Protein classification predicting sequence
GGAQGQASDI

SEQ ID NO: 41977 - protein, 7 aa, Artificial sequence
  Protein classification predicting sequence
IYVKHTG

SEQ ID NO: 41978 - protein, 16 aa, Artificial sequence
  Protein classification predicting sequence
IDDNVANSIVSQLLFL

SEQ ID NO: 41979 - protein, 11 aa, Artificial sequence
  Protein classification predicting sequence
RIIFLGTQVDD

SEQ ID NO: 41980 - protein, 7 aa, Artificial sequence
  Protein classification predicting sequence
GPVEDGM

SEQ ID NO: 41981 - protein, 12 aa, Artificial sequence
  Protein classification predicting sequence
YINSPGGVVTSG

SEQ ID NO: 41982 - protein, 46 aa, Artificial sequence
  Protein classification predicting sequence
YINSPGGVVTSGMAIYDTMQFIRPPVSTLCMGQAASMGSLLLTAGA

SEQ ID NO: 41983 - protein, 13 aa, Artificial sequence
  Protein classification predicting sequence
GERSYDIYSRLLK

SEQ ID NO: 41984 - protein, 7 aa, Artificial sequence
  Protein classification predicting sequence
ANSIIAQ

SEQ ID NO: 41985 - protein, 9 aa, Artificial sequence
  Protein classification predicting sequence
AASMGSLLL

SEQ ID NO: 41986 - protein, 8 aa, Artificial sequence
  Protein classification predicting sequence
TAGMSIYD

SEQ ID NO: 41987 - protein, 6 aa, Artificial sequence
  Protein classification predicting sequence
MQFVKP

SEQ ID NO: 41988 - protein, 13 aa, Artificial sequence
  Protein classification predicting sequence
LPNSRVMIHQPLG

SEQ ID NO: 41989 - protein, 6 aa, Artificial sequence
  Protein classification predicting sequence
PMVIEQ

SEQ ID NO: 41990 - protein, 9 aa, Artificial sequence
  Protein classification predicting sequence
EQSGRGERA

SEQ ID NO: 41991 - protein, 9 aa, Artificial sequence
  Protein classification predicting sequence
ERLIFLVGP

SEQ ID NO: 41992 - protein, 6 aa, Artificial sequence
  Protein classification predicting sequence
PMVVEQ

SEQ ID NO: 41993 - protein, 7 aa, Artificial sequence
  Protein classification predicting sequence
ASSIVAQ

SEQ ID NO: 41994 - protein, 7 aa, Artificial sequence
  Protein classification predicting sequence
LFLEAEN

SEQ ID NO: 41995 - protein, 10 aa, Artificial sequence
  Protein classification predicting sequence
YINSPGGVIT

SEQ ID NO: 41996 - protein, 10 aa, Artificial sequence
  Protein classification predicting sequence
TAGMSIYDTM

SEQ ID NO: 41997 - protein, 6 aa, Artificial sequence
  Protein classification predicting sequence
KPDVST

SEQ ID NO: 41998 - protein, 9 aa, Artificial sequence
  Protein classification predicting sequence
RERLLFLGQ

SEQ ID NO: 41999 - protein, 19 aa, Artificial sequence
  Protein classification predicting sequence
PDVHTICMGLAASMGSFIL

SEQ ID NO: 42000 - protein, 9 aa, Artificial sequence
  Protein classification predicting sequence
YDIYSRLLK

SEQ ID NO: 42001 - protein, 10 aa, Artificial sequence
  Protein classification predicting sequence
GQASDIERHA

SEQ ID NO: 42002 - protein, 6 aa, Artificial sequence
  Protein classification predicting sequence
GVPKVP

SEQ ID NO: 42003 - protein, 9 aa, Artificial sequence
  Protein classification predicting sequence
AASMGSFIL

SEQ ID NO: 42004 - protein, 9 aa, Artificial sequence
  Protein classification predicting sequence
VYVQRTGKP

SEQ ID NO: 42005 - protein, 8 aa, Artificial sequence
  Protein classification predicting sequence
SRIMIHQP

SEQ ID NO: 42006 - protein, 8 aa, Artificial sequence
  Protein classification predicting sequence
ANQLIGIM

SEQ ID NO: 42007 - protein, 7 aa, Artificial sequence
  Protein classification predicting sequence
SFILAGG

SEQ ID NO: 42008 - protein, 7 aa, Artificial sequence
  Protein classification predicting sequence
RIMVHQP

SEQ ID NO: 42009 - protein, 6 aa, Artificial sequence
  Protein classification predicting sequence
SERTGQ

SEQ ID NO: 42010 - protein, 29 aa, Artificial sequence
  Protein classification predicting sequence
DIYSRLLKERIVFLVGPVTDESANLVVAQ

SEQ ID NO: 42011 - protein, 7 aa, Artificial sequence
  Protein classification predicting sequence
DTMNFIK

SEQ ID NO: 42012 - protein, 10 aa, Artificial sequence
  Protein classification predicting sequence
FIKPDVSTLC

SEQ ID NO: 42013 - protein, 10 aa, Artificial sequence
  Protein classification predicting sequence
NSRVMIHQPL

SEQ ID NO: 42014 - protein, 7 aa, Artificial sequence
  Protein classification predicting sequence
GMAASMG

SEQ ID NO: 42015 - protein, 7 aa, Artificial sequence
  Protein classification predicting sequence
IKPDVST

SEQ ID NO: 42016 - protein, 7 aa, Artificial sequence
  Protein classification predicting sequence
GAKGKRF

SEQ ID NO: 42017 - protein, 8 aa, Artificial sequence
  Protein classification predicting sequence
GKRFALPN

SEQ ID NO: 42018 - protein, 13 aa, Artificial sequence
  Protein classification predicting sequence
MIHQPLGGFQGQA

SEQ ID NO: 42019 - protein, 16 aa, Artificial sequence
  Protein classification predicting sequence
MIHQPLGGFQGQATDI

SEQ ID NO: 42020 - protein, 6 aa, Artificial sequence
  Protein classification predicting sequence
ERDYFM

SEQ ID NO: 42021 - protein, 8 aa, Artificial sequence
  Protein classification predicting sequence
AKDYGLID

SEQ ID NO: 42022 - protein, 8 aa, Artificial sequence
  Protein classification predicting sequence
LFLESENP

SEQ ID NO: 42023 - protein, 7 aa, Artificial sequence
  Protein classification predicting sequence
VSTICVG

SEQ ID NO: 42024 - protein, 7 aa, Artificial sequence
  Protein classification predicting sequence
FMSPEEA

SEQ ID NO: 42025 - protein, 12 aa, Artificial sequence
  Protein classification predicting sequence
YINSPGGSVTAG

SEQ ID NO: 42026 - protein, 13 aa, Artificial sequence
  Protein classification predicting sequence
YINSPGGSVTAGM

SEQ ID NO: 42027 - protein, 6 aa, Artificial sequence
  Protein classification predicting sequence
RDNFMS

SEQ ID NO: 42028 - protein, 9 aa, Artificial sequence
  Protein classification predicting sequence
CMGQAASMG

SEQ ID NO: 42029 - protein, 7 aa, Artificial sequence
  Protein classification predicting sequence
GQAASMG

SEQ ID NO: 42030 - protein, 9 aa, Artificial sequence
  Protein classification predicting sequence
RLLKERIIF

SEQ ID NO: 42031 - protein, 7 aa, Artificial sequence
  Protein classification predicting sequence
IYDTMQY

SEQ ID NO: 42032 - protein, 19 aa, Artificial sequence
  Protein classification predicting sequence
AQDSEKDIYLYINSPGGSV

SEQ ID NO: 42033 - protein, 5 aa, Artificial sequence
  Protein classification predicting sequence
DTMNF

SEQ ID NO: 42034 - protein, 7 aa, Artificial sequence
  Protein classification predicting sequence
KADVQTI

SEQ ID NO: 42035 - protein, 10 aa, Artificial sequence
  Protein classification predicting sequence
GKRFALPNAE

SEQ ID NO: 42036 - protein, 35 aa, Artificial sequence
  Protein classification predicting sequence
GKRFALPNAEIMIHQPLGGAQGQATEIEIAARHIL

SEQ ID NO: 42037 - protein, 8 aa, Artificial sequence
  Protein classification predicting sequence
AKEYGLID

SEQ ID NO: 42038 - protein, 6 aa, Artificial sequence
  Protein classification predicting sequence
PGEEDA

SEQ ID NO: 42039 - protein, 12 aa, Artificial sequence
  Protein classification predicting sequence
PHARVMIHQPAS

SEQ ID NO: 42040 - protein, 10 aa, Artificial sequence
  Protein classification predicting sequence
APHMALVPMV

SEQ ID NO: 42041 - protein, 7 aa, Artificial sequence
  Protein classification predicting sequence
ANLVVAQ

SEQ ID NO: 42042 - protein, 10 aa, Artificial sequence
  Protein classification predicting sequence
VAQMLFLEAE

SEQ ID NO: 42043 - protein, 35 aa, Artificial sequence
  Protein classification predicting sequence
LYINSPGGVITAGMSIYDTMQFIKPDVSTICMGQA

SEQ ID NO: 42044 - protein, 20 aa, Artificial sequence
  Protein classification predicting sequence
CLPNSRVMIHQPLGGFQGQA

SEQ ID NO: 42045 - protein, 6 aa, Artificial sequence
  Protein classification predicting sequence
MNELMA

SEQ ID NO: 42046 - protein, 7 aa, Artificial sequence
  Protein classification predicting sequence
EAVEYGL

SEQ ID NO: 42047 - protein, 9 aa, Artificial sequence
  Protein classification predicting sequence
YDTMQFIKP

SEQ ID NO: 42048 - protein, 15 aa, Artificial sequence
  Protein classification predicting sequence
NSRIMIHQPLISGGL

SEQ ID NO: 42049 - protein, 7 aa, Artificial sequence
  Protein classification predicting sequence
LIPTVIE

SEQ ID NO: 42050 - protein, 19 aa, Artificial sequence
  Protein classification predicting sequence
TNRGERAYDIYSRLLKDRI

SEQ ID NO: 42051 - protein, 12 aa, Artificial sequence
  Protein classification predicting sequence
VANSIVSQLLFL

SEQ ID NO: 42052 - protein, 11 aa, Artificial sequence
  Protein classification predicting sequence
TAGLAIYDTMQ

SEQ ID NO: 42053 - protein, 11 aa, Artificial sequence
  Protein classification predicting sequence
GAKGKRFALPN

SEQ ID NO: 42054 - protein, 8 aa, Artificial sequence
  Protein classification predicting sequence
KLNRILSE

SEQ ID NO: 42055 - protein, 9 aa, Artificial sequence
  Protein classification predicting sequence
GMAIYDTMQ

SEQ ID NO: 42056 - protein, 6 aa, Artificial sequence
  Protein classification predicting sequence
PKVPYR

SEQ ID NO: 42057 - protein, 7 aa, Artificial sequence
  Protein classification predicting sequence
VDDEIAN

SEQ ID NO: 42058 - protein, 9 aa, Artificial sequence
  Protein classification predicting sequence
CVGLAASMG

SEQ ID NO: 42059 - protein, 8 aa, Artificial sequence
  Protein classification predicting sequence
ILSERTGQ

SEQ ID NO: 42060 - protein, 8 aa, Artificial sequence
  Protein classification predicting sequence
VEDHMANL

SEQ ID NO: 42061 - protein, 8 aa, Artificial sequence
  Protein classification predicting sequence
DIYSRLLK

SEQ ID NO: 42062 - protein, 6 aa, Artificial sequence
  Protein classification predicting sequence
RDFFMS

SEQ ID NO: 42063 - protein, 11 aa, Artificial sequence
  Protein classification predicting sequence
LYINSPGGVIT

SEQ ID NO: 42064 - protein, 6 aa, Artificial sequence
  Protein classification predicting sequence
DTMNFI

SEQ ID NO: 42065 - protein, 7 aa, Artificial sequence
  Protein classification predicting sequence
GGAQGQA

SEQ ID NO: 42066 - protein, 14 aa, Artificial sequence
  Protein classification predicting sequence
RERLLFLGQQVDDE

SEQ ID NO: 42067 - protein, 13 aa, Artificial sequence
  Protein classification predicting sequence
DIYSRLLKERVIF

SEQ ID NO: 42068 - protein, 7 aa, Artificial sequence
  Protein classification predicting sequence
PTVIEQT

SEQ ID NO: 42069 - protein, 21 aa, Artificial sequence
  Protein classification predicting sequence
MANSIIAQLLFLDAQDNTKDI

SEQ ID NO: 42070 - protein, 7 aa, Artificial sequence
  Protein classification predicting sequence
IHQPLGG

SEQ ID NO: 42071 - protein, 15 aa, Artificial sequence
  Protein classification predicting sequence
YDIYSRLLKDRIIML

SEQ ID NO: 42072 - protein, 18 aa, Artificial sequence
  Protein classification predicting sequence
IASSGTKGKRFMLPNAEY

SEQ ID NO: 42073 - protein, 9 aa, Artificial sequence
  Protein classification predicting sequence
GTQQTDMAI

SEQ ID NO: 42074 - protein, 9 aa, Artificial sequence
  Protein classification predicting sequence
QIHKDAERD

SEQ ID NO: 42075 - protein, 8 aa, Artificial sequence
  Protein classification predicting sequence
YGFIDEIM

SEQ ID NO: 42076 - protein, 10 aa, Artificial sequence
  Protein classification predicting sequence
ASSGTKGKRF

SEQ ID NO: 42077 - protein, 7 aa, Artificial sequence
  Protein classification predicting sequence
GTKGKRF

SEQ ID NO: 42078 - protein, 9 aa, Artificial sequence
  Protein classification predicting sequence
EQTSRGERS

SEQ ID NO: 42079 - protein, 14 aa, Artificial sequence
  Protein classification predicting sequence
RGERAYDIYSRLLK

SEQ ID NO: 42080 - protein, 20 aa, Artificial sequence
  Protein classification predicting sequence
RGERAYDIYSRLLKDRIIML

SEQ ID NO: 42081 - protein, 22 aa, Artificial sequence
  Protein classification predicting sequence
RGERAYDIYSRLLKDRIIMLGS

SEQ ID NO: 42082 - protein, 20 aa, Artificial sequence
  Protein classification predicting sequence
LYINSPGGSISAGMAIYDTM

SEQ ID NO: 42083 - protein, 8 aa, Artificial sequence
  Protein classification predicting sequence
VAQLLFLE

SEQ ID NO: 42084 - protein, 10 aa, Artificial sequence
  Protein classification predicting sequence
LLAGGAAGKR

SEQ ID NO: 42085 - protein, 8 aa, Artificial sequence
  Protein classification predicting sequence
ARVMIHQP

SEQ ID NO: 42086 - protein, 7 aa, Artificial sequence
  Protein classification predicting sequence
RVMIHQP

SEQ ID NO: 42087 - protein, 8 aa, Artificial sequence
  Protein classification predicting sequence
AKNYGLID

SEQ ID NO: 42088 - protein, 6 aa, Artificial sequence
  Protein classification predicting sequence
PHARVM

SEQ ID NO: 42089 - protein, 6 aa, Artificial sequence
  Protein classification predicting sequence
TGQSLE

SEQ ID NO: 42090 - protein, 7 aa, Artificial sequence
  Protein classification predicting sequence
SGRGERA

SEQ ID NO: 42091 - protein, 6 aa, Artificial sequence
  Protein classification predicting sequence
AKHTGQ

SEQ ID NO: 42092 - protein, 23 aa, Artificial sequence
  Protein classification predicting sequence
PDVHTICMGLAASMGSFILVGGE

SEQ ID NO: 42093 - protein, 11 aa, Artificial sequence
  Protein classification predicting sequence
LEAEELLKLRE

SEQ ID NO: 42094 - protein, 7 aa, Artificial sequence
  Protein classification predicting sequence
AEKTGQP

SEQ ID NO: 42095 - protein, 7 aa, Artificial sequence
  Protein classification predicting sequence
EVIERDT

SEQ ID NO: 42096 - protein, 16 aa, Artificial sequence
  Protein classification predicting sequence
TNHITGLMVYLSIEDG

SEQ ID NO: 42097 - protein, 8 aa, Artificial sequence
  Protein classification predicting sequence
CLGIAASM

SEQ ID NO: 42098 - protein, 9 aa, Artificial sequence
  Protein classification predicting sequence
AIYDTMQFV

SEQ ID NO: 42099 - protein, 10 aa, Artificial sequence
  Protein classification predicting sequence
SPGGHVESGD

SEQ ID NO: 42100 - protein, 9 aa, Artificial sequence
  Protein classification predicting sequence
AQMLFLEAE

SEQ ID NO: 42101 - protein, 15 aa, Artificial sequence
  Protein classification predicting sequence
AQMLFLEAENPEKDI

SEQ ID NO: 42102 - protein, 8 aa, Artificial sequence
  Protein classification predicting sequence
LYINSPGG

SEQ ID NO: 42103 - protein, 15 aa, Artificial sequence
  Protein classification predicting sequence
SMGAFLLTAGAKGKR

SEQ ID NO: 42104 - protein, 7 aa, Artificial sequence
  Protein classification predicting sequence
RMNELMA

SEQ ID NO: 42105 - protein, 108 aa, Artificial sequence
  Protein classification predicting sequence
DALVPMVVEQTSRGERSYDIYSRLLKERVIFLTGQVEDHMANLVVAQLLFLESENPDKDIFLYINSPGGSVTAGMSIYDTMQFIKPNVSTVCMGQACSMGAFLLAGGA

SEQ ID NO: 42106 - protein, 11 aa, Artificial sequence
  Protein classification predicting sequence
GQACSMGAFLL

SEQ ID NO: 42107 - protein, 10 aa, Artificial sequence
  Protein classification predicting sequence
DTDRDNFMSA

SEQ ID NO: 42108 - protein, 20 aa, Artificial sequence
  Protein classification predicting sequence
DTDRDNFMSADQAVEYGLVD

SEQ ID NO: 42109 - protein, 8 aa, Artificial sequence
  Protein classification predicting sequence
ATWVDLYN

SEQ ID NO: 42110 - protein, 7 aa, Artificial sequence
  Protein classification predicting sequence
RDVFMSA

SEQ ID NO: 42111 - protein, 7 aa, Artificial sequence
  Protein classification predicting sequence
GGEITKR

SEQ ID NO: 42112 - protein, 7 aa, Artificial sequence
  Protein classification predicting sequence
NSPGGSV

SEQ ID NO: 42113 - protein, 10 aa, Artificial sequence
  Protein classification predicting sequence
SMGAFLLAAG

SEQ ID NO: 42114 - protein, 6 aa, Artificial sequence
  Protein classification predicting sequence
DIDIHA

SEQ ID NO: 42115 - protein, 7 aa, Artificial sequence
  Protein classification predicting sequence
RDNFMSA

SEQ ID NO: 42116 - protein, 8 aa, Artificial sequence
  Protein classification predicting sequence
LKLRDCIT

SEQ ID NO: 42117 - protein, 7 aa, Artificial sequence
  Protein classification predicting sequence
SEDMERD

SEQ ID NO: 42118 - protein, 7 aa, Artificial sequence
  Protein classification predicting sequence
RLNEIYV

SEQ ID NO: 42119 - protein, 7 aa, Artificial sequence
  Protein classification predicting sequence
DKVIEKR

SEQ ID NO: 42120 - protein, 7 aa, Artificial sequence
  Protein classification predicting sequence
SMGSLLL

SEQ ID NO: 42121 - protein, 8 aa, Artificial sequence
  Protein classification predicting sequence
GQATDIEI

SEQ ID NO: 42122 - protein, 6 aa, Artificial sequence
  Protein classification predicting sequence
AHHTGQ

SEQ ID NO: 42123 - protein, 77 aa, Artificial sequence
  Protein classification predicting sequence
APHMALVPMVIEQTSRGERSFDIYSRLLKERVIFLTGQVEDHMANLIVAQMLFLEAENPEKDIYLYINSPGGVITAG

SEQ ID NO: 42124 - protein, 6 aa, Artificial sequence
  Protein classification predicting sequence
SIYDTM

SEQ ID NO: 42125 - protein, 80 aa, Artificial sequence
  Protein classification predicting sequence
SIYDTMQFIKPDVSTICMGQAASMGAFLLTAGAKGKRFCLPNSRVMIHQPLGGYQGQATDIEIHAREILKVKGRMNELMA

SEQ ID NO: 42126 - protein, 10 aa, Artificial sequence
  Protein classification predicting sequence
IYDTMQFIKP

SEQ ID NO: 42127 - protein, 10 aa, Artificial sequence
  Protein classification predicting sequence
RDNFMSATQA

SEQ ID NO: 42128 - protein, 8 aa, Artificial sequence
  Protein classification predicting sequence
AVEYGLVD

SEQ ID NO: 42129 - protein, 7 aa, Artificial sequence
  Protein classification predicting sequence
LPNSRIM

SEQ ID NO: 42130 - protein, 7 aa, Artificial sequence
  Protein classification predicting sequence
DTDRDNF

SEQ ID NO: 42131 - protein, 13 aa, Artificial sequence
  Protein classification predicting sequence
DMAIAAEHLLKTR

SEQ ID NO: 42132 - protein, 8 aa, Artificial sequence
  Protein classification predicting sequence
DVQTIVMG

SEQ ID NO: 42133 - protein, 12 aa, Artificial sequence
  Protein classification predicting sequence
AASMGTIIASSG

SEQ ID NO: 42134 - protein, 12 aa, Artificial sequence
  Protein classification predicting sequence
KGKRFMLPNAEY

SEQ ID NO: 42135 - protein, 14 aa, Artificial sequence
  Protein classification predicting sequence
IHQPMGGTGGGTQQ

SEQ ID NO: 42136 - protein, 7 aa, Artificial sequence
  Protein classification predicting sequence
DMAIAAE

SEQ ID NO: 42137 - protein, 17 aa, Artificial sequence
  Protein classification predicting sequence
GKTIKQIHKDAERDYWM

SEQ ID NO: 42138 - protein, 7 aa, Artificial sequence
  Protein classification predicting sequence
IAQLLFL

SEQ ID NO: 42139 - protein, 11 aa, Artificial sequence
  Protein classification predicting sequence
IAQLLFLDAQD

SEQ ID NO: 42140 - protein, 29 aa, Artificial sequence
  Protein classification predicting sequence
TKDIYLYVNTPGGSVSAGLAIVDTMNFIK

SEQ ID NO: 42141 - protein, 41 aa, Artificial sequence
  Protein classification predicting sequence
KGKRFMLPNAEYMIHQPMGGTGGGTQQTDMAIAAEHLLKTR

SEQ ID NO: 42142 - protein, 9 aa, Artificial sequence
  Protein classification predicting sequence
VIEQTSRGE

SEQ ID NO: 42143 - protein, 10 aa, Artificial sequence
  Protein classification predicting sequence
SYDIYSRLLK

SEQ ID NO: 42144 - protein, 15 aa, Artificial sequence
  Protein classification predicting sequence
DVQTIVMGMAASMGT

SEQ ID NO: 42145 - protein, 11 aa, Artificial sequence
  Protein classification predicting sequence
IEKIQKDTDRD

SEQ ID NO: 42146 - protein, 9 aa, Artificial sequence
  Protein classification predicting sequence
YDIFSRLLK

SEQ ID NO: 42147 - protein, 8 aa, Artificial sequence
  Protein classification predicting sequence
SRLLKDRI

SEQ ID NO: 42148 - protein, 11 aa, Artificial sequence
  Protein classification predicting sequence
LNEILAKHTGQ

SEQ ID NO: 42149 - protein, 38 aa, Artificial sequence
  Protein classification predicting sequence
GKRYVLPNSRVMIHQPLGGFQGQASDIQIHAQEILTIK

SEQ ID NO: 42150 - protein, 7 aa, Artificial sequence
  Protein classification predicting sequence
DTERDRF

SEQ ID NO: 42151 - protein, 18 aa, Artificial sequence
  Protein classification predicting sequence
RYSLPHSRIMIHQPSGGY

SEQ ID NO: 42152 - protein, 13 aa, Artificial sequence
  Protein classification predicting sequence
YDIYSRLLKDRII

SEQ ID NO: 42153 - protein, 8 aa, Artificial sequence
  Protein classification predicting sequence
GMSIYDTM

SEQ ID NO: 42154 - protein, 10 aa, Artificial sequence
  Protein classification predicting sequence
GQATDIEIHA

SEQ ID NO: 42155 - protein, 8 aa, Artificial sequence
  Protein classification predicting sequence
IYINSPGG

SEQ ID NO: 42156 - protein, 18 aa, Artificial sequence
  Protein classification predicting sequence
RLNEILAKHTGQSLETIA

SEQ ID NO: 42157 - protein, 7 aa, Artificial sequence
  Protein classification predicting sequence
DTERDNF

SEQ ID NO: 42158 - protein, 42 aa, Artificial sequence
  Protein classification predicting sequence
VTKALNLVPMVVEQTSRGERAYDIYSRLLKERLIFLVGPIDD

SEQ ID NO: 42159 - protein, 35 aa, Artificial sequence
  Protein classification predicting sequence
GKRYALPNSRVMIHQPLGGFQGQATDIDIHAREIL

SEQ ID NO: 42160 - protein, 14 aa, Artificial sequence
  Protein classification predicting sequence
LPNSRVMIHQPLGG

SEQ ID NO: 42161 - protein, 7 aa, Artificial sequence
  Protein classification predicting sequence
VEYGLVD

SEQ ID NO: 42162 - protein, 6 aa, Artificial sequence
  Protein classification predicting sequence
VEDHMA

SEQ ID NO: 42163 - protein, 8 aa, Artificial sequence
  Protein classification predicting sequence
PARYDGEC

SEQ ID NO: 42164 - protein, 7 aa, Artificial sequence
  Protein classification predicting sequence
TNNYRAY

SEQ ID NO: 42165 - protein, 21 aa, Artificial sequence
  Protein classification predicting sequence
ECKTLFILRGLPGSGKSTLAR

SEQ ID NO: 42166 - protein, 34 aa, Artificial sequence
  Protein classification predicting sequence
LGMETMAWQEIRHAIILLTDGKSNMGGSPKTAVD

SEQ ID NO: 42167 - protein, 13 aa, Artificial sequence
  Protein classification predicting sequence
FTLSHGWAPGSLL

SEQ ID NO: 42168 - protein, 9 aa, Artificial sequence
  Protein classification predicting sequence
KAVCKPVRC

SEQ ID NO: 42169 - protein, 7 aa, Artificial sequence
  Protein classification predicting sequence
LRGSPVR

SEQ ID NO: 42170 - protein, 12 aa, Artificial sequence
  Protein classification predicting sequence
WDGETAVCDNGA

SEQ ID NO: 42171 - protein, 8 aa, Artificial sequence
  Protein classification predicting sequence
HCPNPGIS

SEQ ID NO: 42172 - protein, 10 aa, Artificial sequence
  Protein classification predicting sequence
GDKVRYRCSS

SEQ ID NO: 42173 - protein, 17 aa, Artificial sequence
  Protein classification predicting sequence
EPICRQPYSYDFPEDVA

SEQ ID NO: 42174 - protein, 8 aa, Artificial sequence
  Protein classification predicting sequence
LGATNPTQ

SEQ ID NO: 42175 - protein, 14 aa, Artificial sequence
  Protein classification predicting sequence
IQRSGHLNLYLLLD

SEQ ID NO: 42176 - protein, 8 aa, Artificial sequence
  Protein classification predicting sequence
VAIITFAS

SEQ ID NO: 42177 - protein, 12 aa, Artificial sequence
  Protein classification predicting sequence
IILLTDGKSNMG

SEQ ID NO: 42178 - protein, 17 aa, Artificial sequence
  Protein classification predicting sequence
DYLDIYAIGVGKLDVDW

SEQ ID NO: 42179 - protein, 20 aa, Artificial sequence
  Protein classification predicting sequence
ELNELGSKKDGERHAFILQD

SEQ ID NO: 42180 - protein, 32 aa, Artificial sequence
  Protein classification predicting sequence
FEHMLDVSKLTDTICGVGNMSANASDQERTPW

SEQ ID NO: 42181 - protein, 9 aa, Artificial sequence
  Protein classification predicting sequence
LWRVNVGDP

SEQ ID NO: 42182 - protein, 16 aa, Artificial sequence
  Protein classification predicting sequence
KVKMSTHARPICLPCT

SEQ ID NO: 42183 - protein, 10 aa, Artificial sequence
  Protein classification predicting sequence
VPAHFVALNG

SEQ ID NO: 42184 - protein, 11 aa, Artificial sequence
  Protein classification predicting sequence
EVVTDQFLCSG

SEQ ID NO: 42185 - protein, 12 aa, Artificial sequence
  Protein classification predicting sequence
PCKGESGGAVFL

SEQ ID NO: 42186 - protein, 12 aa, Artificial sequence
  Protein classification predicting sequence
RFFQVGLVSWGL

SEQ ID NO: 42187 - protein, 8 aa, Artificial sequence
  Protein classification predicting sequence
QPWLRQHL

SEQ ID NO: 42188 - protein, 8 aa, Artificial sequence
  Protein classification predicting sequence
DPGKGIPD

SEQ ID NO: 42189 - protein, 13 aa, Artificial sequence
  Protein classification predicting sequence
RIYRWGYLAVRFM

SEQ ID NO: 42190 - protein, 74 aa, Artificial sequence
  Protein classification predicting sequence
LLNKSANIEFNENETNLDEIFKLIEKLGYSPKKTLAEEKKEFFSPNVKLALAVIFTLFVVYLSMGAMLSPSLLP

SEQ ID NO: 42191 - protein, 43 aa, Artificial sequence
  Protein classification predicting sequence
GRDFYIQGFKALWHRQPNMSSLIAIGTSAALISSLWQLYLVYT

SEQ ID NO: 42192 - protein, 21 aa, Artificial sequence
  Protein classification predicting sequence
QQIEVLVDSIVVGDILKVLPG

SEQ ID NO: 42193 - protein, 9 aa, Artificial sequence
  Protein classification predicting sequence
CPCALGLAT

SEQ ID NO: 42194 - protein, 45 aa, Artificial sequence
  Protein classification predicting sequence
LIVMHLGRDFYIQGFKALWHRQPNMSSLIAIGTSAALISSLWQLY

SEQ ID NO: 42195 - protein, 9 aa, Artificial sequence
  Protein classification predicting sequence
NKNSTLSQI

SEQ ID NO: 42196 - protein, 13 aa, Artificial sequence
  Protein classification predicting sequence
IKVGNSEFFNPIN

SEQ ID NO: 42197 - protein, 20 aa, Artificial sequence
  Protein classification predicting sequence
SIEKSSEHVIAKGIVEYAKE

SEQ ID NO: 42198 - protein, 8 aa, Artificial sequence
  Protein classification predicting sequence
ACSSGIER

SEQ ID NO: 42199 - protein, 6 aa, Artificial sequence
  Protein classification predicting sequence
GFKALW

SEQ ID NO: 42200 - protein, 10 aa, Artificial sequence
  Protein classification predicting sequence
YYFESVCVIL

SEQ ID NO: 42201 - protein, 11 aa, Artificial sequence
  Protein classification predicting sequence
CPCALGLATPM

SEQ ID NO: 42202 - protein, 10 aa, Artificial sequence
  Protein classification predicting sequence
SEHVIAKGIV

SEQ ID NO: 42203 - protein, 7 aa, Artificial sequence
  Protein classification predicting sequence
VSFNNDI

SEQ ID NO: 42204 - protein, 13 aa, Artificial sequence
  Protein classification predicting sequence
LAMSLSSVSVVLN

SEQ ID NO: 42205 - protein, 19 aa, Artificial sequence
  Protein classification predicting sequence
LAFVVWLIIAPKPDFWWNF

SEQ ID NO: 42206 - protein, 19 aa, Artificial sequence
  Protein classification predicting sequence
TNLDEIFKLIEKLGYSPKK

SEQ ID NO: 42207 - protein, 27 aa, Artificial sequence
  Protein classification predicting sequence
NAQSSKAEISRLADKVSSVFVPSVIAI

SEQ ID NO: 42208 - protein, 8 aa, Artificial sequence
  Protein classification predicting sequence
ESYRQGVR

SEQ ID NO: 42209 - protein, 16 aa, Artificial sequence
  Protein classification predicting sequence
IVSTSHRRKGMFETPE

SEQ ID NO: 42210 - protein, 8 aa, Artificial sequence
  Protein classification predicting sequence
LMLGITPV

SEQ ID NO: 42211 - protein, 6 aa, Artificial sequence
  Protein classification predicting sequence
AHIERY

SEQ ID NO: 42212 - protein, 6 aa, Artificial sequence
  Protein classification predicting sequence
MGCYTQ

SEQ ID NO: 42213 - protein, 8 aa, Artificial sequence
  Protein classification predicting sequence
ASDMHNLD

SEQ ID NO: 42214 - protein, 9 aa, Artificial sequence
  Protein classification predicting sequence
KKRARYFLE

SEQ ID NO: 42215 - protein, 8 aa, Artificial sequence
  Protein classification predicting sequence
FTGFAAYY

SEQ ID NO: 42216 - protein, 7 aa, Artificial sequence
  Protein classification predicting sequence
SRRWFHP

SEQ ID NO: 42217 - protein, 8 aa, Artificial sequence
  Protein classification predicting sequence
VTHIKIQN

SEQ ID NO: 42218 - protein, 8 aa, Artificial sequence
  Protein classification predicting sequence
ELVQYYME

SEQ ID NO: 42219 - protein, 9 aa, Artificial sequence
  Protein classification predicting sequence
LSGKEAEKL

SEQ ID NO: 42220 - protein, 10 aa, Artificial sequence
  Protein classification predicting sequence
GSFLVRESQS

SEQ ID NO: 42221 - protein, 8 aa, Artificial sequence
  Protein classification predicting sequence
KYDVGGGE

SEQ ID NO: 42222 - protein, 7 aa, Artificial sequence
  Protein classification predicting sequence
GFWEEFE

SEQ ID NO: 42223 - protein, 7 aa, Artificial sequence
  Protein classification predicting sequence
WPDHGVP

SEQ ID NO: 42224 - protein, 11 aa, Artificial sequence
  Protein classification predicting sequence
TIQMVRSQRSG

SEQ ID NO: 42225 - protein, 7 aa, Artificial sequence
  Protein classification predicting sequence
VQTEAQY

SEQ ID NO: 42226 - protein, 6 aa, Artificial sequence
  Protein classification predicting sequence
AVQHYI

SEQ ID NO: 42227 - protein, 7 aa, Artificial sequence
  Protein classification predicting sequence
EYTNIKY

SEQ ID NO: 42228 - protein, 9 aa, Artificial sequence
  Protein classification predicting sequence
LRDEKGALF

SEQ ID NO: 42229 - protein, 8 aa, Artificial sequence
  Protein classification predicting sequence
AHARYRAD

SEQ ID NO: 42230 - protein, 10 aa, Artificial sequence
  Protein classification predicting sequence
GLEPMGLLWA

SEQ ID NO: 42231 - protein, 9 aa, Artificial sequence
  Protein classification predicting sequence
VELEVLDGH

SEQ ID NO: 42232 - protein, 8 aa, Artificial sequence
  Protein classification predicting sequence
PEQPVTLR

SEQ ID NO: 42233 - protein, 11 aa, Artificial sequence
  Protein classification predicting sequence
LRDEKGALFRA

SEQ ID NO: 42234 - protein, 7 aa, Artificial sequence
  Protein classification predicting sequence
GLEPMGL

SEQ ID NO: 42235 - protein, 30 aa, Artificial sequence
  Protein classification predicting sequence
KSFIPVERSDTTFLFLVGQDDHNWKSEFYA

SEQ ID NO: 42236 - protein, 8 aa, Artificial sequence
  Protein classification predicting sequence
TVSAVCLP

SEQ ID NO: 42237 - protein, 7 aa, Artificial sequence
  Protein classification predicting sequence
AGGYSQG

SEQ ID NO: 42238 - protein, 7 aa, Artificial sequence
  Protein classification predicting sequence
GPAPEFL

SEQ ID NO: 42239 - protein, 6 aa, Artificial sequence
  Protein classification predicting sequence
VLFGYT

SEQ ID NO: 42240 - protein, 6 aa, Artificial sequence
  Protein classification predicting sequence
TKNLQN

SEQ ID NO: 42241 - protein, 7 aa, Artificial sequence
  Protein classification predicting sequence
ELEARQL

SEQ ID NO: 42242 - protein, 6 aa, Artificial sequence
  Protein classification predicting sequence
WDEGFH

SEQ ID NO: 42243 - protein, 8 aa, Artificial sequence
  Protein classification predicting sequence
ANPPTLLL

SEQ ID NO: 42244 - protein, 11 aa, Artificial sequence
  Protein classification predicting sequence
VGFVFQHYALF

SEQ ID NO: 42245 - protein, 19 aa, Artificial sequence
  Protein classification predicting sequence
VGFVFQHYALFRHMTVFDN

SEQ ID NO: 42246 - protein, 7 aa, Artificial sequence
  Protein classification predicting sequence
LLDLVQL

SEQ ID NO: 42247 - protein, 7 aa, Artificial sequence
  Protein classification predicting sequence
FVYGFLG

SEQ ID NO: 42248 - protein, 31 aa, Artificial sequence
  Protein classification predicting sequence
DLVQLSGLEKRYPAQLSGGQRQRVALARAMA

SEQ ID NO: 42249 - protein, 16 aa, Artificial sequence
  Protein classification predicting sequence
VLLLDEPFGALDAQVR

SEQ ID NO: 42250 - protein, 9 aa, Artificial sequence
  Protein classification predicting sequence
SPFVYGFIG

SEQ ID NO: 42251 - protein, 8 aa, Artificial sequence
  Protein classification predicting sequence
FRPHDVEL

SEQ ID NO: 42252 - protein, 10 aa, Artificial sequence
  Protein classification predicting sequence
RYPEQLSGGQ

SEQ ID NO: 42253 - protein, 9 aa, Artificial sequence
  Protein classification predicting sequence
TSVFVTHDQ

SEQ ID NO: 42254 - protein, 21 aa, Artificial sequence
  Protein classification predicting sequence
SGELIALLGPSGSGKTTLLRL

SEQ ID NO: 42255 - protein, 13 aa, Artificial sequence
  Protein classification predicting sequence
RNIGFVFQHYALF

SEQ ID NO: 42256 - protein, 15 aa, Artificial sequence
  Protein classification predicting sequence
LLLDEPFGALDAKVR

SEQ ID NO: 42257 - protein, 11 aa, Artificial sequence
  Protein classification predicting sequence
FVTHDQEEALE

SEQ ID NO: 42258 - protein, 9 aa, Artificial sequence
  Protein classification predicting sequence
FLGNVNLFH

SEQ ID NO: 42259 - protein, 9 aa, Artificial sequence
  Protein classification predicting sequence
LVALLGPSG

SEQ ID NO: 42260 - protein, 23 aa, Artificial sequence
  Protein classification predicting sequence
LVALLGPSGCGKTTLLRIIAGLE

SEQ ID NO: 42261 - protein, 6 aa, Artificial sequence
  Protein classification predicting sequence
LADRYP

SEQ ID NO: 42262 - protein, 20 aa, Artificial sequence
  Protein classification predicting sequence
QLSGGQRQRIALARALAVEP

SEQ ID NO: 42263 - protein, 10 aa, Artificial sequence
  Protein classification predicting sequence
GFVFQHYALF

SEQ ID NO: 42264 - protein, 7 aa, Artificial sequence
  Protein classification predicting sequence
GRVEQVG

SEQ ID NO: 42265 - protein, 11 aa, Artificial sequence
  Protein classification predicting sequence
GELVALLGPSG

SEQ ID NO: 42266 - protein, 6 aa, Artificial sequence
  Protein classification predicting sequence
AYVRPH

SEQ ID NO: 42267 - protein, 7 aa, Artificial sequence
  Protein classification predicting sequence
GLRVKPR

SEQ ID NO: 42268 - protein, 6 aa, Artificial sequence
  Protein classification predicting sequence
WLRKLH

SEQ ID NO: 42269 - protein, 21 aa, Artificial sequence
  Protein classification predicting sequence
AIEPRVLLLDEPFGALDAQVR

SEQ ID NO: 42270 - protein, 9 aa, Artificial sequence
  Protein classification predicting sequence
EALELADRV

SEQ ID NO: 42271 - protein, 8 aa, Artificial sequence
  Protein classification predicting sequence
RRVGFVFQ

SEQ ID NO: 42272 - protein, 16 aa, Artificial sequence
  Protein classification predicting sequence
FVTHDQEEALELADRV

SEQ ID NO: 42273 - protein, 20 aa, Artificial sequence
  Protein classification predicting sequence
FVTHDQEEALELADRVAILN

SEQ ID NO: 42274 - protein, 11 aa, Artificial sequence
  Protein classification predicting sequence
GSVLFAGEDAT

SEQ ID NO: 42275 - protein, 33 aa, Artificial sequence
  Protein classification predicting sequence
VDVRQRQVGFVFQHYALFKHMTVFENVAFGLRV

SEQ ID NO: 42276 - protein, 8 aa, Artificial sequence
  Protein classification predicting sequence
HRSQRPSE

SEQ ID NO: 42277 - protein, 68 aa, Artificial sequence
  Protein classification predicting sequence
DLLGLVQLDWLADRYPAQLSGGQRQRIALARALAVEPRVLLLDEPFGALDAKVRKELRRWLRRLHDEL

SEQ ID NO: 42278 - protein, 7 aa, Artificial sequence
  Protein classification predicting sequence
GRIEQVG

SEQ ID NO: 42279 - protein, 6 aa, Artificial sequence
  Protein classification predicting sequence
PREVWE

SEQ ID NO: 42280 - protein, 16 aa, Artificial sequence
  Protein classification predicting sequence
PATPFVYGFLGDVNQL

SEQ ID NO: 42281 - protein, 10 aa, Artificial sequence
  Protein classification predicting sequence
RYPAQLSGGQ

SEQ ID NO: 42282 - protein, 16 aa, Artificial sequence
  Protein classification predicting sequence
VGFVFQHYALFRHMTV

SEQ ID NO: 42283 - protein, 10 aa, Artificial sequence
  Protein classification predicting sequence
MNKGVIEQIG

SEQ ID NO: 42284 - protein, 7 aa, Artificial sequence
  Protein classification predicting sequence
IEQIGTP

SEQ ID NO: 42285 - protein, 12 aa, Artificial sequence
  Protein classification predicting sequence
FVYHFLGDSNRL

SEQ ID NO: 42286 - protein, 10 aa, Artificial sequence
  Protein classification predicting sequence
LFRPHEVSLS

SEQ ID NO: 42287 - protein, 10 aa, Artificial sequence
  Protein classification predicting sequence
ALARALAVEP

SEQ ID NO: 42288 - protein, 16 aa, Artificial sequence
  Protein classification predicting sequence
EPRVLLLDEPFGALDA

SEQ ID NO: 42289 - protein, 6 aa, Artificial sequence
  Protein classification predicting sequence
EQVGSP

SEQ ID NO: 42290 - protein, 6 aa, Artificial sequence
  Protein classification predicting sequence
EIYDHP

SEQ ID NO: 42291 - protein, 6 aa, Artificial sequence
  Protein classification predicting sequence
LRRWLR

SEQ ID NO: 42292 - protein, 7 aa, Artificial sequence
  Protein classification predicting sequence
WLRRLHD

SEQ ID NO: 42293 - protein, 9 aa, Artificial sequence
  Protein classification predicting sequence
VFDNVAFGL

SEQ ID NO: 42294 - protein, 6 aa, Artificial sequence
  Protein classification predicting sequence
YALFKH

SEQ ID NO: 42295 - protein, 13 aa, Artificial sequence
  Protein classification predicting sequence
IGFVFQHYAAFKH

SEQ ID NO: 42296 - protein, 9 aa, Artificial sequence
  Protein classification predicting sequence
LGFEVRVEL

SEQ ID NO: 42297 - protein, 8 aa, Artificial sequence
  Protein classification predicting sequence
TRGDAEAL

SEQ ID NO: 42298 - protein, 7 aa, Artificial sequence
  Protein classification predicting sequence
FGRTQVL

SEQ ID NO: 42299 - protein, 37 aa, Artificial sequence
  Protein classification predicting sequence
QLSGGQKQRVALARALAVEPQILLLDEPFGALDAQVR

SEQ ID NO: 42300 - protein, 27 aa, Artificial sequence
  Protein classification predicting sequence
ELRRWLRQLHEELKFTSVFVTHDQEEA

SEQ ID NO: 42301 - protein, 12 aa, Artificial sequence
  Protein classification predicting sequence
TSVFVTHDQEEA

SEQ ID NO: 42302 - protein, 6 aa, Artificial sequence
  Protein classification predicting sequence
VQPLGW

SEQ ID NO: 42303 - protein, 6 aa, Artificial sequence
  Protein classification predicting sequence
VQLDWL

SEQ ID NO: 42304 - protein, 13 aa, Artificial sequence
  Protein classification predicting sequence
GKTTLLRIIAGLE

SEQ ID NO: 42305 - protein, 13 aa, Artificial sequence
  Protein classification predicting sequence
RQVGFVFQHYALF

SEQ ID NO: 42306 - protein, 7 aa, Artificial sequence
  Protein classification predicting sequence
VNLFHGR

SEQ ID NO: 42307 - protein, 13 aa, Artificial sequence
  Protein classification predicting sequence
VLLLDEPFGALDA

SEQ ID NO: 42308 - protein, 19 aa, Artificial sequence
  Protein classification predicting sequence
LLLDEPFGALDAKVRKELR

SEQ ID NO: 42309 - protein, 17 aa, Artificial sequence
  Protein classification predicting sequence
SGHIRFHGTDVSRLHAR

SEQ ID NO: 42310 - protein, 13 aa, Artificial sequence
  Protein classification predicting sequence
LLEMVQLAHLADR

SEQ ID NO: 42311 - protein, 19 aa, Artificial sequence
  Protein classification predicting sequence
EASPKGHYTQLVVQPLGWY

SEQ ID NO: 42312 - protein, 49 aa, Artificial sequence
  Protein classification predicting sequence
RGGQFHVGAHRWPLGYTPAYQGPVDLFLRPWEVDISRRTSLDSPLPVQV

SEQ ID NO: 42313 - protein, 7 aa, Artificial sequence
  Protein classification predicting sequence
VQLGHLA

SEQ ID NO: 42314 - protein, 7 aa, Artificial sequence
  Protein classification predicting sequence
AGLEHAD

SEQ ID NO: 42315 - protein, 7 aa, Artificial sequence
  Protein classification predicting sequence
LRRWLRE

SEQ ID NO: 42316 - protein, 30 aa, Artificial sequence
  Protein classification predicting sequence
LDIPSGQMVALLGPSGSGKTTLLRIIAGLE

SEQ ID NO: 42317 - protein, 7 aa, Artificial sequence
  Protein classification predicting sequence
SQGNIEQ

SEQ ID NO: 42318 - protein, 13 aa, Artificial sequence
  Protein classification predicting sequence
VWREPATRFVLEF

SEQ ID NO: 42319 - protein, 9 aa, Artificial sequence
  Protein classification predicting sequence
VDLFLRPWE

SEQ ID NO: 42320 - protein, 16 aa, Artificial sequence
  Protein classification predicting sequence
EVADRVVVMSQGNIEQ

SEQ ID NO: 42321 - protein, 8 aa, Artificial sequence
  Protein classification predicting sequence
NRNGLLWD

SEQ ID NO: 42322 - protein, 6 aa, Artificial sequence
  Protein classification predicting sequence
LHPGEF

SEQ ID NO: 42323 - protein, 12 aa, Artificial sequence
  Protein classification predicting sequence
RLEGKSSLGRLG

SEQ ID NO: 42324 - protein, 8 aa, Artificial sequence
  Protein classification predicting sequence
YQGQRGPT

SEQ ID NO: 42325 - protein, 9 aa, Artificial sequence
  Protein classification predicting sequence
VTLEFSNTT

SEQ ID NO: 42326 - protein, 6 aa, Artificial sequence
  Protein classification predicting sequence
LGNKFR

SEQ ID NO: 42327 - protein, 7 aa, Artificial sequence
  Protein classification predicting sequence
HRIDPGW

SEQ ID NO: 42328 - protein, 10 aa, Artificial sequence
  Protein classification predicting sequence
SYGLSSYGYD

SEQ ID NO: 42329 - protein, 7 aa, Artificial sequence
  Protein classification predicting sequence
EFKIFTN

SEQ ID NO: 42330 - protein, 6 aa, Artificial sequence
  Protein classification predicting sequence
VDPKNF

SEQ ID NO: 42331 - protein, 8 aa, Artificial sequence
  Protein classification predicting sequence
LARTIEYF

SEQ ID NO: 42332 - protein, 7 aa, Artificial sequence
  Protein classification predicting sequence
EFKVFTN

SEQ ID NO: 42333 - protein, 6 aa, Artificial sequence
  Protein classification predicting sequence
IVNVTP

SEQ ID NO: 42334 - protein, 7 aa, Artificial sequence
  Protein classification predicting sequence
AQVLFFE

SEQ ID NO: 42335 - protein, 8 aa, Artificial sequence
  Protein classification predicting sequence
VEYFRIPR

SEQ ID NO: 42336 - protein, 9 aa, Artificial sequence
  Protein classification predicting sequence
GKSTYARCG

SEQ ID NO: 42337 - protein, 6 aa, Artificial sequence
  Protein classification predicting sequence
EPEWEG

SEQ ID NO: 42338 - protein, 13 aa, Artificial sequence
  Protein classification predicting sequence
TIEISNTTPLPAK

SEQ ID NO: 42339 - protein, 7 aa, Artificial sequence
  Protein classification predicting sequence
RCADEFK

SEQ ID NO: 42340 - protein, 21 aa, Artificial sequence
  Protein classification predicting sequence
CIIPPNSFALARTVEYFRIPR

SEQ ID NO: 42341 - protein, 47 aa, Artificial sequence
  Protein classification predicting sequence
VLTVCLGKSTYARCGIIVNVTPFEPEWEGYVTLEFSNTTPLPAKIYA

SEQ ID NO: 42342 - protein, 17 aa, Artificial sequence
  Protein classification predicting sequence
VTLEFSNTTPLPAKIYA

SEQ ID NO: 42343 - protein, 7 aa, Artificial sequence
  Protein classification predicting sequence
LPAKIYA

SEQ ID NO: 42344 - protein, 6 aa, Artificial sequence
  Protein classification predicting sequence
GKYQGQ

SEQ ID NO: 42345 - protein, 8 aa, Artificial sequence
  Protein classification predicting sequence
QPSSIDVR

SEQ ID NO: 42346 - protein, 20 aa, Artificial sequence
  Protein classification predicting sequence
ITLELSNVANLPITLWPGMK

SEQ ID NO: 42347 - protein, 10 aa, Artificial sequence
  Protein classification predicting sequence
SYGTSSYGYD

SEQ ID NO: 42348 - protein, 9 aa, Artificial sequence
  Protein classification predicting sequence
EFKIFTNIN

SEQ ID NO: 42349 - protein, 8 aa, Artificial sequence
  Protein classification predicting sequence
LARTVEYF

SEQ ID NO: 42350 - protein, 12 aa, Artificial sequence
  Protein classification predicting sequence
SYKDRGGKYQGQ

SEQ ID NO: 42351 - protein, 6 aa, Artificial sequence
  Protein classification predicting sequence
IDLSGP

SEQ ID NO: 42352 - protein, 9 aa, Artificial sequence
  Protein classification predicting sequence
LHPGELALA

SEQ ID NO: 42353 - protein, 9 aa, Artificial sequence
  Protein classification predicting sequence
GKLPLALRP

SEQ ID NO: 42354 - protein, 7 aa, Artificial sequence
  Protein classification predicting sequence
IGALSFE

SEQ ID NO: 42355 - protein, 6 aa, Artificial sequence
  Protein classification predicting sequence
GMIEPF

SEQ ID NO: 42356 - protein, 7 aa, Artificial sequence
  Protein classification predicting sequence
EYFRIPR

SEQ ID NO: 42357 - protein, 9 aa, Artificial sequence
  Protein classification predicting sequence
YANEGIAQV

SEQ ID NO: 42358 - protein, 6 aa, Artificial sequence
  Protein classification predicting sequence
GHVTLE

SEQ ID NO: 42359 - protein, 8 aa, Artificial sequence
  Protein classification predicting sequence
TLELSNVA

SEQ ID NO: 42360 - protein, 8 aa, Artificial sequence
  Protein classification predicting sequence
NSTIVDPK

SEQ ID NO: 42361 - protein, 18 aa, Artificial sequence
  Protein classification predicting sequence
CLGKSTYARCGIIVNVTP

SEQ ID NO: 42362 - protein, 43 aa, Artificial sequence
  Protein classification predicting sequence
CLGKSTYARCGIIVNVTPFEPEWEGYVTLEFSNTTPLPAKIYA

SEQ ID NO: 42363 - protein, 6 aa, Artificial sequence
  Protein classification predicting sequence
RPYNRR

SEQ ID NO: 42364 - protein, 12 aa, Artificial sequence
  Protein classification predicting sequence
GMIEPFEPGQVR

SEQ ID NO: 42365 - protein, 7 aa, Artificial sequence
  Protein classification predicting sequence
VDPKNFD

SEQ ID NO: 42366 - protein, 26 aa, Artificial sequence
  Protein classification predicting sequence
FDEKSFVDFKGDVCIIPPNSFALART

SEQ ID NO: 42367 - protein, 15 aa, Artificial sequence
  Protein classification predicting sequence
DVCIIPPNSFALART

SEQ ID NO: 42368 - protein, 9 aa, Artificial sequence
  Protein classification predicting sequence
DRGGKYQGQ

SEQ ID NO: 42369 - protein, 6 aa, Artificial sequence
  Protein classification predicting sequence
SSYGYD

SEQ ID NO: 42370 - protein, 16 aa, Artificial sequence
  Protein classification predicting sequence
GKSTYARCGIIVNVTP

SEQ ID NO: 42371 - protein, 7 aa, Artificial sequence
  Protein classification predicting sequence
FIDLSGP

SEQ ID NO: 42372 - protein, 6 aa, Artificial sequence
  Protein classification predicting sequence
AVASRI

SEQ ID NO: 42373 - protein, 12 aa, Artificial sequence
  Protein classification predicting sequence
SRYQGQRGPTAS

SEQ ID NO: 42374 - protein, 11 aa, Artificial sequence
  Protein classification predicting sequence
GWLDGRSSLAR

SEQ ID NO: 42375 - protein, 12 aa, Artificial sequence
  Protein classification predicting sequence
IVLEFYNSGKLP

SEQ ID NO: 42376 - protein, 18 aa, Artificial sequence
  Protein classification predicting sequence
PPNSFALARTVEYFRIPR

SEQ ID NO: 42377 - protein, 13 aa, Artificial sequence
  Protein classification predicting sequence
VTLEFSNTTPLPA

SEQ ID NO: 42378 - protein, 16 aa, Artificial sequence
  Protein classification predicting sequence
EFKIFTNINSTIVDPK

SEQ ID NO: 42379 - protein, 19 aa, Artificial sequence
  Protein classification predicting sequence
PRPPVERINGATVDVRLGN

SEQ ID NO: 42380 - protein, 22 aa, Artificial sequence
  Protein classification predicting sequence
FRGHTAAFIDLSGPKDEVSAAL

SEQ ID NO: 42381 - protein, 16 aa, Artificial sequence
  Protein classification predicting sequence
LHPGELALAVTLESVT

SEQ ID NO: 42382 - protein, 38 aa, Artificial sequence
  Protein classification predicting sequence
IVLEFYNSGKLPLALRPGMLIGALSFEPLSGPAARPYN

SEQ ID NO: 42383 - protein, 7 aa, Artificial sequence
  Protein classification predicting sequence
HAELNAI

SEQ ID NO: 42384 - protein, 8 aa, Artificial sequence
  Protein classification predicting sequence
GGLRWQIF

SEQ ID NO: 42385 - protein, 9 aa, Artificial sequence
  Protein classification predicting sequence
DGHTCGLNW

SEQ ID NO: 42386 - protein, 66 aa, Artificial sequence
  Protein classification predicting sequence
DMMKEALEKLQLNIVEMKDENATLDGGDVLFTGREFFVGLSKRTNQRGAEILADTFKDYAVSTVPV

SEQ ID NO: 42387 - protein, 46 aa, Artificial sequence
  Protein classification predicting sequence
LHLKSFCSMAGPNLIAIGSSESAQKALKIMQQMSDHRYDKLTVPDD

SEQ ID NO: 42388 - protein, 10 aa, Artificial sequence
  Protein classification predicting sequence
AANCIYLNIP

SEQ ID NO: 42389 - protein, 8 aa, Artificial sequence
  Protein classification predicting sequence
DENATLDG

SEQ ID NO: 42390 - protein, 15 aa, Artificial sequence
  Protein classification predicting sequence
DVLFTGREFFVGLSK

SEQ ID NO: 42391 - protein, 7 aa, Artificial sequence
  Protein classification predicting sequence
MLQTMYS

SEQ ID NO: 42392 - protein, 7 aa, Artificial sequence
  Protein classification predicting sequence
TMYDAPG

SEQ ID NO: 42393 - protein, 7 aa, Artificial sequence
  Protein classification predicting sequence
EGCLSIP

SEQ ID NO: 42394 - protein, 10 aa, Artificial sequence
  Protein classification predicting sequence
DHLNGVLFVD

SEQ ID NO: 42395 - protein, 5 aa, Artificial sequence
  Protein classification predicting sequence
CIQHE

SEQ ID NO: 42396 - protein, 7 aa, Artificial sequence
  Protein classification predicting sequence
FFEGCLS

SEQ ID NO: 42397 - protein, 7 aa, Artificial sequence
  Protein classification predicting sequence
QHECDHL

SEQ ID NO: 42398 - protein, 11 aa, Artificial sequence
  Protein classification predicting sequence
ILEFPDPRLRT

SEQ ID NO: 42399 - protein, 10 aa, Artificial sequence
  Protein classification predicting sequence
DRDGKPFELE

SEQ ID NO: 42400 - protein, 10 aa, Artificial sequence
  Protein classification predicting sequence
GLLAVCVQHE

SEQ ID NO: 42401 - protein, 12 aa, Artificial sequence
  Protein classification predicting sequence
AKPVAVVDDRIR

SEQ ID NO: 42402 - protein, 8 aa, Artificial sequence
  Protein classification predicting sequence
APGIGLAA

SEQ ID NO: 42403 - protein, 9 aa, Artificial sequence
  Protein classification predicting sequence
GKVFVEYLS

SEQ ID NO: 42404 - protein, 7 aa, Artificial sequence
  Protein classification predicting sequence
EGCLSVP

SEQ ID NO: 42405 - protein, 8 aa, Artificial sequence
  Protein classification predicting sequence
EGCLSVPG

SEQ ID NO: 42406 - protein, 7 aa, Artificial sequence
  Protein classification predicting sequence
VLINPEI

SEQ ID NO: 42407 - protein, 35 aa, Artificial sequence
  Protein classification predicting sequence
EKRGEDGIEEGCLSVPGARALVPRAAEVTVKALDR

SEQ ID NO: 42408 - protein, 8 aa, Artificial sequence
  Protein classification predicting sequence
KIKRFNEK

SEQ ID NO: 42409 - protein, 6 aa, Artificial sequence
  Protein classification predicting sequence
DMFETM

SEQ ID NO: 42410 - protein, 7 aa, Artificial sequence
  Protein classification predicting sequence
APAVPRT

SEQ ID NO: 42411 - protein, 8 aa, Artificial sequence
  Protein classification predicting sequence
PTLRQKAA

SEQ ID NO: 42412 - protein, 8 aa, Artificial sequence
  Protein classification predicting sequence
GEGCLSVD

SEQ ID NO: 42413 - protein, 9 aa, Artificial sequence
  Protein classification predicting sequence
QHEIDHLNG

SEQ ID NO: 42414 - protein, 7 aa, Artificial sequence
  Protein classification predicting sequence
GHPALRE

SEQ ID NO: 42415 - protein, 8 aa, Artificial sequence
  Protein classification predicting sequence
GVGLAAPQ

SEQ ID NO: 42416 - protein, 9 aa, Artificial sequence
  Protein classification predicting sequence
NPKIVSHSV

SEQ ID NO: 42417 - protein, 6 aa, Artificial sequence
  Protein classification predicting sequence
AAPQVG

SEQ ID NO: 42418 - protein, 7 aa, Artificial sequence
  Protein classification predicting sequence
LVNPKIV

SEQ ID NO: 42419 - protein, 8 aa, Artificial sequence
  Protein classification predicting sequence
GHLDGFLY

SEQ ID NO: 42420 - protein, 11 aa, Artificial sequence
  Protein classification predicting sequence
HQRIIVIDVSE

SEQ ID NO: 42421 - protein, 11 aa, Artificial sequence
  Protein classification predicting sequence
DLQLVIFGFER

SEQ ID NO: 42422 - protein, 20 aa, Artificial sequence
  Protein classification predicting sequence
GFHARVVQHECDHLIGRLYP

SEQ ID NO: 42423 - protein, 10 aa, Artificial sequence
  Protein classification predicting sequence
KFGYTEVLFP

SEQ ID NO: 42424 - protein, 6 aa, Artificial sequence
  Protein classification predicting sequence
DMFDTM

SEQ ID NO: 42425 - protein, 12 aa, Artificial sequence
  Protein classification predicting sequence
GLAAPQIGVDLQ

SEQ ID NO: 42426 - protein, 12 aa, Artificial sequence
  Protein classification predicting sequence
RNDRYPDAPAVP

SEQ ID NO: 42427 - protein, 8 aa, Artificial sequence
  Protein classification predicting sequence
GLAAPQIG

SEQ ID NO: 42428 - protein, 13 aa, Artificial sequence
  Protein classification predicting sequence
YYADVERYTSVVV

SEQ ID NO: 42429 - protein, 8 aa, Artificial sequence
  Protein classification predicting sequence
MAMKKVKK

SEQ ID NO: 42430 - protein, 7 aa, Artificial sequence
  Protein classification predicting sequence
QHEIDHL

SEQ ID NO: 42431 - protein, 6 aa, Artificial sequence
  Protein classification predicting sequence
EGCLSV

SEQ ID NO: 42432 - protein, 6 aa, Artificial sequence
  Protein classification predicting sequence
LVNPKI

SEQ ID NO: 42433 - protein, 7 aa, Artificial sequence
  Protein classification predicting sequence
EADGLLA

SEQ ID NO: 42434 - protein, 7 aa, Artificial sequence
  Protein classification predicting sequence
QHELDHL

SEQ ID NO: 42435 - protein, 5 aa, Artificial sequence
  Protein classification predicting sequence
MFETM

SEQ ID NO: 42436 - protein, 7 aa, Artificial sequence
  Protein classification predicting sequence
LFVDYLS

SEQ ID NO: 42437 - protein, 6 aa, Artificial sequence
  Protein classification predicting sequence
LVLINP

SEQ ID NO: 42438 - protein, 9 aa, Artificial sequence
  Protein classification predicting sequence
GIGLAATQV

SEQ ID NO: 42439 - protein, 7 aa, Artificial sequence
  Protein classification predicting sequence
YEEGCLS

SEQ ID NO: 42440 - protein, 5 aa, Artificial sequence
  Protein classification predicting sequence
VFQHE

SEQ ID NO: 42441 - protein, 7 aa, Artificial sequence
  Protein classification predicting sequence
TMKDIIR

SEQ ID NO: 42442 - protein, 21 aa, Artificial sequence
  Protein classification predicting sequence
LRGGVGLAAPQLDISKRIIAV

SEQ ID NO: 42443 - protein, 6 aa, Artificial sequence
  Protein classification predicting sequence
QHEIDH

SEQ ID NO: 42444 - protein, 6 aa, Artificial sequence
  Protein classification predicting sequence
MFYDHI

SEQ ID NO: 42445 - protein, 8 aa, Artificial sequence
  Protein classification predicting sequence
GIGLAAIQ

SEQ ID NO: 42446 - protein, 11 aa, Artificial sequence
  Protein classification predicting sequence
EGCLSVPGFYE

SEQ ID NO: 42447 - protein, 9 aa, Artificial sequence
  Protein classification predicting sequence
SQDPVMAEK

SEQ ID NO: 42448 - protein, 8 aa, Artificial sequence
  Protein classification predicting sequence
GVGLAANQ

SEQ ID NO: 42449 - protein, 6 aa, Artificial sequence
  Protein classification predicting sequence
PPKEAY

SEQ ID NO: 42450 - protein, 7 aa, Artificial sequence
  Protein classification predicting sequence
AICVQHE

SEQ ID NO: 42451 - protein, 7 aa, Artificial sequence
  Protein classification predicting sequence
DIIREGN

SEQ ID NO: 42452 - protein, 12 aa, Artificial sequence
  Protein classification predicting sequence
GLRAGVGLAAPQ

SEQ ID NO: 42453 - protein, 7 aa, Artificial sequence
  Protein classification predicting sequence
VLYNPKI

SEQ ID NO: 42454 - protein, 10 aa, Artificial sequence
  Protein classification predicting sequence
GVGLAANQIG

SEQ ID NO: 42455 - protein, 6 aa, Artificial sequence
  Protein classification predicting sequence
MMQFLK

SEQ ID NO: 42456 - protein, 17 aa, Artificial sequence
  Protein classification predicting sequence
LRLKGYPAIVFQHEIDH

SEQ ID NO: 42457 - protein, 11 aa, Artificial sequence
  Protein classification predicting sequence
PAIVFQHEIDH

SEQ ID NO: 42458 - protein, 6 aa, Artificial sequence
  Protein classification predicting sequence
MFETMY

SEQ ID NO: 42459 - protein, 11 aa, Artificial sequence
  Protein classification predicting sequence
QRIRQKVEKLD

SEQ ID NO: 42460 - protein, 8 aa, Artificial sequence
  Protein classification predicting sequence
FRDEMGRP

SEQ ID NO: 42461 - protein, 9 aa, Artificial sequence
  Protein classification predicting sequence
YEEGCLSIP

SEQ ID NO: 42462 - protein, 19 aa, Artificial sequence
  Protein classification predicting sequence
YEEGCLSIPDYYAEVERPA

SEQ ID NO: 42463 - protein, 18 aa, Artificial sequence
  Protein classification predicting sequence
ATCLQHEIDHLNGVLFID

SEQ ID NO: 42464 - protein, 21 aa, Artificial sequence
  Protein classification predicting sequence
DYLSPLKQQRIRQKVEKLDRL

SEQ ID NO: 42465 - protein, 6 aa, Artificial sequence
  Protein classification predicting sequence
AMREFL

SEQ ID NO: 42466 - protein, 18 aa, Artificial sequence
  Protein classification predicting sequence
AKRYGLRSGVGLAAPQIN

SEQ ID NO: 42467 - protein, 13 aa, Artificial sequence
  Protein classification predicting sequence
GKSYDYMLVNPKI

SEQ ID NO: 42468 - protein, 17 aa, Artificial sequence
  Protein classification predicting sequence
SVQEAYLPTGEGCLSVD

SEQ ID NO: 42469 - protein, 11 aa, Artificial sequence
  Protein classification predicting sequence
DIIREGNPTLR

SEQ ID NO: 42470 - protein, 15 aa, Artificial sequence
  Protein classification predicting sequence
LGEKMMQFLKHSQDP

SEQ ID NO: 42471 - protein, 21 aa, Artificial sequence
  Protein classification predicting sequence
VSHSVQDAALSDGEGCLSVDR

SEQ ID NO: 42472 - protein, 9 aa, Artificial sequence
  Protein classification predicting sequence
GEGCLSVDR

SEQ ID NO: 42473 - protein, 10 aa, Artificial sequence
  Protein classification predicting sequence
GYVVRHARVT

SEQ ID NO: 42474 - protein, 16 aa, Artificial sequence
  Protein classification predicting sequence
DGEGCLSVDRVVEGYV

SEQ ID NO: 42475 - protein, 15 aa, Artificial sequence
  Protein classification predicting sequence
YNPKIVSHSVQDAAL

SEQ ID NO: 42476 - protein, 9 aa, Artificial sequence
  Protein classification predicting sequence
HRIKLKGYN

SEQ ID NO: 42477 - protein, 7 aa, Artificial sequence
  Protein classification predicting sequence
GKLFIDY

SEQ ID NO: 42478 - protein, 7 aa, Artificial sequence
  Protein classification predicting sequence
DYLSPLK

SEQ ID NO: 42479 - protein, 6 aa, Artificial sequence
  Protein classification predicting sequence
LKRDMV

SEQ ID NO: 42480 - protein, 27 aa, Artificial sequence
  Protein classification predicting sequence
EIQRIVDDMFETMYAEEGIGLAATQVD

SEQ ID NO: 42481 - protein, 10 aa, Artificial sequence
  Protein classification predicting sequence
GIGLAATQVD

SEQ ID NO: 42482 - protein, 6 aa, Artificial sequence
  Protein classification predicting sequence
QRIRQK

SEQ ID NO: 42483 - protein, 7 aa, Artificial sequence
  Protein classification predicting sequence
QAVFNTM

SEQ ID NO: 42484 - protein, 38 aa, Artificial sequence
  Protein classification predicting sequence
LELQGYRVISGLLEIYRPLLSLSLSDFTELVEKERVKR

SEQ ID NO: 42485 - protein, 13 aa, Artificial sequence
  Protein classification predicting sequence
YLMKKPGYYLSEE

SEQ ID NO: 42486 - protein, 9 aa, Artificial sequence
  Protein classification predicting sequence
YIARLRKEL

SEQ ID NO: 42487 - protein, 7 aa, Artificial sequence
  Protein classification predicting sequence
NAWEKSR

SEQ ID NO: 42488 - protein, 7 aa, Artificial sequence
  Protein classification predicting sequence
IFAGTFN

SEQ ID NO: 42489 - protein, 7 aa, Artificial sequence
  Protein classification predicting sequence
LYKNVAV

SEQ ID NO: 42490 - protein, 12 aa, Artificial sequence
  Protein classification predicting sequence
KLSTRHRLAYVE

SEQ ID NO: 42491 - protein, 8 aa, Artificial sequence
  Protein classification predicting sequence
EYYYRCRL

SEQ ID NO: 42492 - protein, 40 aa, Artificial sequence
  Protein classification predicting sequence
CHFEGNAQGIRLVHTLMRMNLTWAQVGGILKYTRPAWWRG

SEQ ID NO: 42493 - protein, 34 aa, Artificial sequence
  Protein classification predicting sequence
LSRSTEDQFFMYLRVNTLNKLVPYAAQRFIDNLP

SEQ ID NO: 42494 - protein, 13 aa, Artificial sequence
  Protein classification predicting sequence
LELQGYRVISGLL

SEQ ID NO: 42495 - protein, 8 aa, Artificial sequence
  Protein classification predicting sequence
FESDRGRI

SEQ ID NO: 42496 - protein, 21 aa, Artificial sequence
  Protein classification predicting sequence
AIRRLQQKTQVFPLERNAAVR

SEQ ID NO: 42497 - protein, 14 aa, Artificial sequence
  Protein classification predicting sequence
EVQQVGRYIAKEIL

SEQ ID NO: 42498 - protein, 8 aa, Artificial sequence
  Protein classification predicting sequence
PFESIVEM

SEQ ID NO: 42499 - protein, 6 aa, Artificial sequence
  Protein classification predicting sequence
AINDWF

SEQ ID NO: 42500 - protein, 7 aa, Artificial sequence
  Protein classification predicting sequence
YLMKKPG

SEQ ID NO: 42501 - protein, 11 aa, Artificial sequence
  Protein classification predicting sequence
IMEAADDISYC

SEQ ID NO: 42502 - protein, 9 aa, Artificial sequence
  Protein classification predicting sequence
ADLEDAVEK

SEQ ID NO: 42503 - protein, 12 aa, Artificial sequence
  Protein classification predicting sequence
EDQFFMYLRVNT

SEQ ID NO: 42504 - protein, 6 aa, Artificial sequence
  Protein classification predicting sequence
AAQRFI

SEQ ID NO: 42505 - protein, 12 aa, Artificial sequence
  Protein classification predicting sequence
QDYISGMTDLYA

SEQ ID NO: 42506 - protein, 8 aa, Artificial sequence
  Protein classification predicting sequence
DEYRRLMA

SEQ ID NO: 42507 - protein, 6 aa, Artificial sequence
  Protein classification predicting sequence
APDLIG

SEQ ID NO: 42508 - protein, 9 aa, Artificial sequence
  Protein classification predicting sequence
HDWGSALGF

SEQ ID NO: 42509 - protein, 24 aa, Artificial sequence
  Protein classification predicting sequence
PAEAARLAESLPNCKTVDIGPGLH

SEQ ID NO: 42510 - protein, 10 aa, Artificial sequence
  Protein classification predicting sequence
WRNIIPHVAP

SEQ ID NO: 42511 - protein, 9 aa, Artificial sequence
  Protein classification predicting sequence
DHVRYLDAF

SEQ ID NO: 42512 - protein, 12 aa, Artificial sequence
  Protein classification predicting sequence
LHGEPTWSYLYR

SEQ ID NO: 42513 - protein, 7 aa, Artificial sequence
  Protein classification predicting sequence
FTKIPNG

SEQ ID NO: 42514 - protein, 8 aa, Artificial sequence
  Protein classification predicting sequence
WEKGVHSG

SEQ ID NO: 42515 - protein, 6 aa, Artificial sequence
  Protein classification predicting sequence
WADPKV

SEQ ID NO: 42516 - protein, 8 aa, Artificial sequence
  Protein classification predicting sequence
GITGPEGH

SEQ ID NO: 42517 - protein, 22 aa, Artificial sequence
  Protein classification predicting sequence
LGKDDFTKIPNGVNGVEDRMSV

SEQ ID NO: 42518 - protein, 7 aa, Artificial sequence
  Protein classification predicting sequence
AVGKLLD

SEQ ID NO: 42519 - protein, 7 aa, Artificial sequence
  Protein classification predicting sequence
LNQDDPN

SEQ ID NO: 42520 - protein, 11 aa, Artificial sequence
  Protein classification predicting sequence
YHYVVSEPLGR

SEQ ID NO: 42521 - protein, 7 aa, Artificial sequence
  Protein classification predicting sequence
VSVLDSY

SEQ ID NO: 42522 - protein, 9 aa, Artificial sequence
  Protein classification predicting sequence
PLGRNSYKE

SEQ ID NO: 42523 - protein, 6 aa, Artificial sequence
  Protein classification predicting sequence
YDDGCE

SEQ ID NO: 42524 - protein, 6 aa, Artificial sequence
  Protein classification predicting sequence
MGDFNA

SEQ ID NO: 42525 - protein, 10 aa, Artificial sequence
  Protein classification predicting sequence
WLIPDSADTT

SEQ ID NO: 42526 - protein, 7 aa, Artificial sequence
  Protein classification predicting sequence
CAYDRIV

SEQ ID NO: 42527 - protein, 8 aa, Artificial sequence
  Protein classification predicting sequence
SQWSSIRL

SEQ ID NO: 42528 - protein, 10 aa, Artificial sequence
  Protein classification predicting sequence
AISDHYPVEV

SEQ ID NO: 42529 - protein, 12 aa, Artificial sequence
  Protein classification predicting sequence
EIDALYDVYLDV

SEQ ID NO: 42530 - protein, 7 aa, Artificial sequence
  Protein classification predicting sequence
YKERYLF

SEQ ID NO: 42531 - protein, 10 aa, Artificial sequence
  Protein classification predicting sequence
GDFNAGCSYV

SEQ ID NO: 42532 - protein, 7 aa, Artificial sequence
  Protein classification predicting sequence
WSSIRLR

SEQ ID NO: 42533 - protein, 10 aa, Artificial sequence
  Protein classification predicting sequence
WLIPDTADTT

SEQ ID NO: 42534 - protein, 7 aa, Artificial sequence
  Protein classification predicting sequence
FAIVPLH

SEQ ID NO: 42535 - protein, 8 aa, Artificial sequence
  Protein classification predicting sequence
LPQIAVVG

SEQ ID NO: 42536 - protein, 7 aa, Artificial sequence
  Protein classification predicting sequence
GKSSVLE

SEQ ID NO: 42537 - protein, 12 aa, Artificial sequence
  Protein classification predicting sequence
EEWGKFLHTKNK

SEQ ID NO: 42538 - protein, 17 aa, Artificial sequence
  Protein classification predicting sequence
YTDFDEIRQEIENETER

SEQ ID NO: 42539 - protein, 9 aa, Artificial sequence
  Protein classification predicting sequence
NLTLVDLPG

SEQ ID NO: 42540 - protein, 21 aa, Artificial sequence
  Protein classification predicting sequence
TKVPVGDQPKDIELQIRELIL

SEQ ID NO: 42541 - protein, 25 aa, Artificial sequence
  Protein classification predicting sequence
ISNPNSIILAVTAANTDMATSEALK

SEQ ID NO: 42542 - protein, 13 aa, Artificial sequence
  Protein classification predicting sequence
REVDPDGRRTLAV

SEQ ID NO: 42543 - protein, 7 aa, Artificial sequence
  Protein classification predicting sequence
TKLDLMD

SEQ ID NO: 42544 - protein, 26 aa, Artificial sequence
  Protein classification predicting sequence
TKLDLMDAGTDAMDVLMGRVIPVKLG

SEQ ID NO: 42545 - protein, 17 aa, Artificial sequence
  Protein classification predicting sequence
IGVVNRSQLDINNKKSV

SEQ ID NO: 42546 - protein, 44 aa, Artificial sequence
  Protein classification predicting sequence
FLQKKYPSLANRNGTKYLARTLNRLLMHHIRDCLPELKTRINVL

SEQ ID NO: 42547 - protein, 28 aa, Artificial sequence
  Protein classification predicting sequence
SATLLQLITKFATEYCNTIEGTAKYIET

SEQ ID NO: 42548 - protein, 29 aa, Artificial sequence
  Protein classification predicting sequence
ELCGGARICYIFHETFGRTLESVDPLGGL

SEQ ID NO: 42549 - protein, 28 aa, Artificial sequence
  Protein classification predicting sequence
LTAIRNATGPRPALFVPEVSFELLVKRQ

SEQ ID NO: 42550 - protein, 48 aa, Artificial sequence
  Protein classification predicting sequence
KRLEEPSLRCVELVHEEMQRIIQHCSNYSTQELLRFPKLHDAIVEVVT

SEQ ID NO: 42551 - protein, 49 aa, Artificial sequence
  Protein classification predicting sequence
LLRKRLPVTNEMVHNLVAIELAYINTKHPDFADACGLMNNNIEEQRRNR

SEQ ID NO: 42552 - protein, 67 aa, Artificial sequence
  Protein classification predicting sequence
PASPQKGHAVNLLDVPVPVARKLSAREQRDCEVIERLIKSYFLIVRKNIQDSVPKAVMHFLVNHVKD

SEQ ID NO: 42553 - protein, 11 aa, Artificial sequence
  Protein classification predicting sequence
LQSELVGQLYK

SEQ ID NO: 42554 - protein, 16 aa, Artificial sequence
  Protein classification predicting sequence
LLDDLLTESEDMAQRR

SEQ ID NO: 42555 - protein, 10 aa, Artificial sequence
  Protein classification predicting sequence
EAADMLKALQ

SEQ ID NO: 42556 - protein, 6 aa, Artificial sequence
  Protein classification predicting sequence
VTRRPL

SEQ ID NO: 42557 - protein, 9 aa, Artificial sequence
  Protein classification predicting sequence
VGRDFLPRG

SEQ ID NO: 42558 - protein, 8 aa, Artificial sequence
  Protein classification predicting sequence
GIVTRRPL

SEQ ID NO: 42559 - protein, 9 aa, Artificial sequence
  Protein classification predicting sequence
SPHVLNLTL

SEQ ID NO: 42560 - protein, 11 aa, Artificial sequence
  Protein classification predicting sequence
NCLILAVSPAN

SEQ ID NO: 42561 - protein, 6 aa, Artificial sequence
  Protein classification predicting sequence
EVDPQG

SEQ ID NO: 42562 - protein, 7 aa, Artificial sequence
  Protein classification predicting sequence
GVVNRSQ

SEQ ID NO: 42563 - protein, 8 aa, Artificial sequence
  Protein classification predicting sequence
ELCGGARI

SEQ ID NO: 42564 - protein, 12 aa, Artificial sequence
  Protein classification predicting sequence
PVDWFVVYKLPA

SEQ ID NO: 42565 - protein, 15 aa, Artificial sequence
  Protein classification predicting sequence
PDFTSLDVLTFAGSG

SEQ ID NO: 42566 - protein, 10 aa, Artificial sequence
  Protein classification predicting sequence
PAGINIPNYD

SEQ ID NO: 42567 - protein, 13 aa, Artificial sequence
  Protein classification predicting sequence
EGFKNVSLGNVLA

SEQ ID NO: 42568 - protein, 17 aa, Artificial sequence
  Protein classification predicting sequence
VQVGLHELLGHGSGKLF

SEQ ID NO: 42569 - protein, 9 aa, Artificial sequence
  Protein classification predicting sequence
SSYEECRAE

SEQ ID NO: 42570 - protein, 6 aa, Artificial sequence
  Protein classification predicting sequence
IYVNWL

SEQ ID NO: 42571 - protein, 10 aa, Artificial sequence
  Protein classification predicting sequence
VLLEAGEGLV

SEQ ID NO: 42572 - protein, 8 aa, Artificial sequence
  Protein classification predicting sequence
ITVPVVLL

SEQ ID NO: 42573 - protein, 11 aa, Artificial sequence
  Protein classification predicting sequence
IPNNTQWITWS

SEQ ID NO: 42574 - protein, 8 aa, Artificial sequence
  Protein classification predicting sequence
RNLYKIQL

SEQ ID NO: 42575 - protein, 17 aa, Artificial sequence
  Protein classification predicting sequence
VPLIEYSFYSDESLQYP

SEQ ID NO: 42576 - protein, 8 aa, Artificial sequence
  Protein classification predicting sequence
FYKIISNE

SEQ ID NO: 42577 - protein, 9 aa, Artificial sequence
  Protein classification predicting sequence
FNAEYGNSS

SEQ ID NO: 42578 - protein, 15 aa, Artificial sequence
  Protein classification predicting sequence
LRVLEDNSALDKMLQ

SEQ ID NO: 42579 - protein, 12 aa, Artificial sequence
  Protein classification predicting sequence
GNSSIFLENSTF

SEQ ID NO: 42580 - protein, 11 aa, Artificial sequence
  Protein classification predicting sequence
TFLAYAQFNDT

SEQ ID NO: 42581 - protein, 8 aa, Artificial sequence
  Protein classification predicting sequence
GDHYLCDV

SEQ ID NO: 42582 - protein, 12 aa, Artificial sequence
  Protein classification predicting sequence
CTFITKGAWEVI

SEQ ID NO: 42583 - protein, 14 aa, Artificial sequence
  Protein classification predicting sequence
IEALTSDYLYYISN

SEQ ID NO: 42584 - protein, 10 aa, Artificial sequence
  Protein classification predicting sequence
GPGLPLYTLH

SEQ ID NO: 42585 - protein, 9 aa, Artificial sequence
  Protein classification predicting sequence
VYAGPCSQK

SEQ ID NO: 42586 - protein, 12 aa, Artificial sequence
  Protein classification predicting sequence
SKALVDAGVDFQ

SEQ ID NO: 42587 - protein, 12 aa, Artificial sequence
  Protein classification predicting sequence
MWYTDEDHGIAS

SEQ ID NO: 42588 - protein, 14 aa, Artificial sequence
  Protein classification predicting sequence
GRFRPAEPHFTSDG

SEQ ID NO: 42589 - protein, 6 aa, Artificial sequence
  Protein classification predicting sequence
YTERYM

SEQ ID NO: 42590 - protein, 9 aa, Artificial sequence
  Protein classification predicting sequence
GGTTMIIDF

SEQ ID NO: 42591 - protein, 10 aa, Artificial sequence
  Protein classification predicting sequence
LMISVWNRGQ

SEQ ID NO: 42592 - protein, 7 aa, Artificial sequence
  Protein classification predicting sequence
SVWNRGQ

SEQ ID NO: 42593 - protein, 7 aa, Artificial sequence
  Protein classification predicting sequence
RGAGGFG

SEQ ID NO: 42594 - protein, 6 aa, Artificial sequence
  Protein classification predicting sequence
GFGSTG

SEQ ID NO: 42595 - protein, 9 aa, Artificial sequence
  Protein classification predicting sequence
QIRPRSGLA

SEQ ID NO: 42596 - protein, 6 aa, Artificial sequence
  Protein classification predicting sequence
GDRIAQ

SEQ ID NO: 42597 - protein, 7 aa, Artificial sequence
  Protein classification predicting sequence
RIAQIVF

SEQ ID NO: 42598 - protein, 11 aa, Artificial sequence
  Protein classification predicting sequence
PGTIDADYRGE

SEQ ID NO: 42599 - protein, 8 aa, Artificial sequence
  Protein classification predicting sequence
DYRGEVKV

SEQ ID NO: 42600 - protein, 7 aa, Artificial sequence
  Protein classification predicting sequence
RGEGGFG

SEQ ID NO: 42601 - protein, 7 aa, Artificial sequence
  Protein classification predicting sequence
GGFGSTG

SEQ ID NO: 42602 - protein, 7 aa, Artificial sequence
  Protein classification predicting sequence
RPRSGLA

SEQ ID NO: 42603 - protein, 9 aa, Artificial sequence
  Protein classification predicting sequence
RPRSGLALK

SEQ ID NO: 42604 - protein, 9 aa, Artificial sequence
  Protein classification predicting sequence
QVRPRSGLA

SEQ ID NO: 42605 - protein, 9 aa, Artificial sequence
  Protein classification predicting sequence
VKIKKLENF

SEQ ID NO: 42606 - protein, 7 aa, Artificial sequence
  Protein classification predicting sequence
GDAGADL

SEQ ID NO: 42607 - protein, 7 aa, Artificial sequence
  Protein classification predicting sequence
GSAGLDL

SEQ ID NO: 42608 - protein, 6 aa, Artificial sequence
  Protein classification predicting sequence
STWNRG

SEQ ID NO: 42609 - protein, 8 aa, Artificial sequence
  Protein classification predicting sequence
DYRGEIKV

SEQ ID NO: 42610 - protein, 17 aa, Artificial sequence
  Protein classification predicting sequence
GIVLGNLVGLIDSDYQG

SEQ ID NO: 42611 - protein, 20 aa, Artificial sequence
  Protein classification predicting sequence
GIVLGNLVGLIDSDYQGQLM

SEQ ID NO: 42612 - protein, 9 aa, Artificial sequence
  Protein classification predicting sequence
RIAQMIFVP

SEQ ID NO: 42613 - protein, 10 aa, Artificial sequence
  Protein classification predicting sequence
DLKILDARMR

SEQ ID NO: 42614 - protein, 10 aa, Artificial sequence
  Protein classification predicting sequence
PGTVDSDYRG

SEQ ID NO: 42615 - protein, 6 aa, Artificial sequence
  Protein classification predicting sequence
DSDYRG

SEQ ID NO: 42616 - protein, 7 aa, Artificial sequence
  Protein classification predicting sequence
RSGLAVK

SEQ ID NO: 42617 - protein, 6 aa, Artificial sequence
  Protein classification predicting sequence
DYRGEI

SEQ ID NO: 42618 - protein, 6 aa, Artificial sequence
  Protein classification predicting sequence
RIAQMV

SEQ ID NO: 42619 - protein, 7 aa, Artificial sequence
  Protein classification predicting sequence
IDVKILD

SEQ ID NO: 42620 - protein, 7 aa, Artificial sequence
  Protein classification predicting sequence
NSPGTID

SEQ ID NO: 42621 - protein, 8 aa, Artificial sequence
  Protein classification predicting sequence
TGIAIALP

SEQ ID NO: 42622 - protein, 7 aa, Artificial sequence
  Protein classification predicting sequence
RLDPGLP

SEQ ID NO: 42623 - protein, 32 aa, Artificial sequence
  Protein classification predicting sequence
AAGYDLYSAYDYTIPPGERQLIKTDISMSMPK

SEQ ID NO: 42624 - protein, 11 aa, Artificial sequence
  Protein classification predicting sequence
EVQSLDSTDRG

SEQ ID NO: 42625 - protein, 8 aa, Artificial sequence
  Protein classification predicting sequence
AGYDIYAS

SEQ ID NO: 42626 - protein, 15 aa, Artificial sequence
  Protein classification predicting sequence
FVPVVQAEFNLVEDF

SEQ ID NO: 42627 - protein, 11 aa, Artificial sequence
  Protein classification predicting sequence
GSAGLDLRACL

SEQ ID NO: 42628 - protein, 8 aa, Artificial sequence
  Protein classification predicting sequence
MKKIDVKI

SEQ ID NO: 42629 - protein, 15 aa, Artificial sequence
  Protein classification predicting sequence
VLGNLVGLIDSDYQG

SEQ ID NO: 42630 - protein, 18 aa, Artificial sequence
  Protein classification predicting sequence
VLGNLVGLIDSDYQGQLM

SEQ ID NO: 42631 - protein, 9 aa, Artificial sequence
  Protein classification predicting sequence
GLIDSDYQG

SEQ ID NO: 42632 - protein, 7 aa, Artificial sequence
  Protein classification predicting sequence
GGFGHTG

SEQ ID NO: 42633 - protein, 13 aa, Artificial sequence
  Protein classification predicting sequence
YATTGSAGLDLRA

SEQ ID NO: 42634 - protein, 9 aa, Artificial sequence
  Protein classification predicting sequence
GSAGLDLRA

SEQ ID NO: 42635 - protein, 14 aa, Artificial sequence
  Protein classification predicting sequence
LAAVILPRSGLGHK

SEQ ID NO: 42636 - protein, 9 aa, Artificial sequence
  Protein classification predicting sequence
LPRSGLGHK

SEQ ID NO: 42637 - protein, 10 aa, Artificial sequence
  Protein classification predicting sequence
RGEGGFGHSG

SEQ ID NO: 42638 - protein, 8 aa, Artificial sequence
  Protein classification predicting sequence
KILDSRIG

SEQ ID NO: 42639 - protein, 7 aa, Artificial sequence
  Protein classification predicting sequence
VLNSPGT

SEQ ID NO: 42640 - protein, 11 aa, Artificial sequence
  Protein classification predicting sequence
ISEKISETITL

SEQ ID NO: 42641 - protein, 10 aa, Artificial sequence
  Protein classification predicting sequence
LVNRELIWVP

SEQ ID NO: 42642 - protein, 10 aa, Artificial sequence
  Protein classification predicting sequence
LPCYIPEPWE

SEQ ID NO: 42643 - protein, 10 aa, Artificial sequence
  Protein classification predicting sequence
GVIDEDYRGN

SEQ ID NO: 42644 - protein, 6 aa, Artificial sequence
  Protein classification predicting sequence
PTGLAI

SEQ ID NO: 42645 - protein, 7 aa, Artificial sequence
  Protein classification predicting sequence
DLRACLD

SEQ ID NO: 42646 - protein, 5 aa, Artificial sequence
  Protein classification predicting sequence
SCWNR

SEQ ID NO: 42647 - protein, 8 aa, Artificial sequence
  Protein classification predicting sequence
DAGYRGEI

SEQ ID NO: 42648 - protein, 9 aa, Artificial sequence
  Protein classification predicting sequence
IDVGAGVID

SEQ ID NO: 42649 - protein, 12 aa, Artificial sequence
  Protein classification predicting sequence
RVGLSIVNSPGT

SEQ ID NO: 42650 - protein, 10 aa, Artificial sequence
  Protein classification predicting sequence
DAGYRGEIKV

SEQ ID NO: 42651 - protein, 6 aa, Artificial sequence
  Protein classification predicting sequence
LINLDP

SEQ ID NO: 42652 - protein, 33 aa, Artificial sequence
  Protein classification predicting sequence
VVHRGDRIAQLLVQRVELVELVEVSSFDEAGLA

SEQ ID NO: 42653 - protein, 16 aa, Artificial sequence
  Protein classification predicting sequence
RGDRIAQLLVQRVELV

SEQ ID NO: 42654 - protein, 12 aa, Artificial sequence
  Protein classification predicting sequence
GGHGSSGGHASL

SEQ ID NO: 42655 - protein, 10 aa, Artificial sequence
  Protein classification predicting sequence
YGRIAPRSGL

SEQ ID NO: 42656 - protein, 9 aa, Artificial sequence
  Protein classification predicting sequence
EFPLPTYAT

SEQ ID NO: 42657 - protein, 8 aa, Artificial sequence
  Protein classification predicting sequence
GDRIAQLI

SEQ ID NO: 42658 - protein, 6 aa, Artificial sequence
  Protein classification predicting sequence
SVWNRG

SEQ ID NO: 42659 - protein, 11 aa, Artificial sequence
  Protein classification predicting sequence
FTIQPGERIAQ

SEQ ID NO: 42660 - protein, 6 aa, Artificial sequence
  Protein classification predicting sequence
GERIAQ

SEQ ID NO: 42661 - protein, 7 aa, Artificial sequence
  Protein classification predicting sequence
GGFGHSG

SEQ ID NO: 42662 - protein, 10 aa, Artificial sequence
  Protein classification predicting sequence
LIPTGLSIYI

SEQ ID NO: 42663 - protein, 8 aa, Artificial sequence
  Protein classification predicting sequence
EVQSLDST

SEQ ID NO: 42664 - protein, 15 aa, Artificial sequence
  Protein classification predicting sequence
AAGYDLYSAYDYTIP

SEQ ID NO: 42665 - protein, 6 aa, Artificial sequence
  Protein classification predicting sequence
LNTPGT

SEQ ID NO: 42666 - protein, 7 aa, Artificial sequence
  Protein classification predicting sequence
DSDYRGE

SEQ ID NO: 42667 - protein, 10 aa, Artificial sequence
  Protein classification predicting sequence
RGAGGFGSTG

SEQ ID NO: 42668 - protein, 8 aa, Artificial sequence
  Protein classification predicting sequence
FPLPTYAT

SEQ ID NO: 42669 - protein, 19 aa, Artificial sequence
  Protein classification predicting sequence
TTLVPTGLAIHIADPSLAA

SEQ ID NO: 42670 - protein, 30 aa, Artificial sequence
  Protein classification predicting sequence
LPRSGLGHKHGIVLGNLVGLIDSDYQGQLM

SEQ ID NO: 42671 - protein, 10 aa, Artificial sequence
  Protein classification predicting sequence
WNRGQDSFTI

SEQ ID NO: 42672 - protein, 6 aa, Artificial sequence
  Protein classification predicting sequence
PLPAYA

SEQ ID NO: 42673 - protein, 9 aa, Artificial sequence
  Protein classification predicting sequence
IDIGGGVID

SEQ ID NO: 42674 - protein, 23 aa, Artificial sequence
  Protein classification predicting sequence
TFNVNTGDRIAQLIYQRIYYPEL

SEQ ID NO: 42675 - protein, 6 aa, Artificial sequence
  Protein classification predicting sequence
GMDLRA

SEQ ID NO: 42676 - protein, 6 aa, Artificial sequence
  Protein classification predicting sequence
LPTYAT

SEQ ID NO: 42677 - protein, 8 aa, Artificial sequence
  Protein classification predicting sequence
LPRSGLGH

SEQ ID NO: 42678 - protein, 8 aa, Artificial sequence
  Protein classification predicting sequence
GDRIAQLV

SEQ ID NO: 42679 - protein, 7 aa, Artificial sequence
  Protein classification predicting sequence
PLPTYAT

SEQ ID NO: 42680 - protein, 7 aa, Artificial sequence
  Protein classification predicting sequence
ALIPVIN

SEQ ID NO: 42681 - protein, 23 aa, Artificial sequence
  Protein classification predicting sequence
LPQIAVVGGQSAGKSSVLENFVG

SEQ ID NO: 42682 - protein, 15 aa, Artificial sequence
  Protein classification predicting sequence
DFLPRGSGIVTRRPL

SEQ ID NO: 42683 - protein, 20 aa, Artificial sequence
  Protein classification predicting sequence
DFLPRGSGIVTRRPLILQLI

SEQ ID NO: 42684 - protein, 7 aa, Artificial sequence
  Protein classification predicting sequence
EYAEFLH

SEQ ID NO: 42685 - protein, 9 aa, Artificial sequence
  Protein classification predicting sequence
TKVPVGDQP

SEQ ID NO: 42686 - protein, 20 aa, Artificial sequence
  Protein classification predicting sequence
SDALKLAKEVDPQGLRTIGV

SEQ ID NO: 42687 - protein, 13 aa, Artificial sequence
  Protein classification predicting sequence
TKLDLMDEGTDAR

SEQ ID NO: 42688 - protein, 6 aa, Artificial sequence
  Protein classification predicting sequence
AERKFF

SEQ ID NO: 42689 - protein, 7 aa, Artificial sequence
  Protein classification predicting sequence
YRHMADR

SEQ ID NO: 42690 - protein, 10 aa, Artificial sequence
  Protein classification predicting sequence
RKTKALLQMV

SEQ ID NO: 42691 - protein, 10 aa, Artificial sequence
  Protein classification predicting sequence
ELSGGARINR

SEQ ID NO: 42692 - protein, 8 aa, Artificial sequence
  Protein classification predicting sequence
FHERFPFE

SEQ ID NO: 42693 - protein, 15 aa, Artificial sequence
  Protein classification predicting sequence
ELAYMNTNHEDFIGF

SEQ ID NO: 42694 - protein, 9 aa, Artificial sequence
  Protein classification predicting sequence
DLANSDALK

SEQ ID NO: 42695 - protein, 8 aa, Artificial sequence
  Protein classification predicting sequence
AKEVDPQG

SEQ ID NO: 42696 - protein, 15 aa, Artificial sequence
  Protein classification predicting sequence
EKEVEEYKNFRPDDP

SEQ ID NO: 42697 - protein, 8 aa, Artificial sequence
  Protein classification predicting sequence
EPCLKCVD

SEQ ID NO: 42698 - protein, 8 aa, Artificial sequence
  Protein classification predicting sequence
RTGLFTPD

SEQ ID NO: 42699 - protein, 7 aa, Artificial sequence
  Protein classification predicting sequence
AEFLHCK

SEQ ID NO: 42700 - protein, 9 aa, Artificial sequence
  Protein classification predicting sequence
LILAVTPAN

SEQ ID NO: 42701 - protein, 10 aa, Artificial sequence
  Protein classification predicting sequence
LNQQLTNHIR

SEQ ID NO: 42702 - protein, 14 aa, Artificial sequence
  Protein classification predicting sequence
LRREISYAIKNIHG

SEQ ID NO: 42703 - protein, 9 aa, Artificial sequence
  Protein classification predicting sequence
RDVEKGFMS

SEQ ID NO: 42704 - protein, 11 aa, Artificial sequence
  Protein classification predicting sequence
FNTEQRNVYKD

SEQ ID NO: 42705 - protein, 6 aa, Artificial sequence
  Protein classification predicting sequence
QAQRRD

SEQ ID NO: 42706 - protein, 13 aa, Artificial sequence
  Protein classification predicting sequence
LMEESAEQAQRRD

SEQ ID NO: 42707 - protein, 9 aa, Artificial sequence
  Protein classification predicting sequence
MEELIPLVN

SEQ ID NO: 42708 - protein, 14 aa, Artificial sequence
  Protein classification predicting sequence
LIPLVNRLQDAFSA

SEQ ID NO: 42709 - protein, 6 aa, Artificial sequence
  Protein classification predicting sequence
KKFTDF

SEQ ID NO: 42710 - protein, 10 aa, Artificial sequence
  Protein classification predicting sequence
KKFTDFDEVR

SEQ ID NO: 42711 - protein, 15 aa, Artificial sequence
  Protein classification predicting sequence
EVRLEIEAETDRVTG

SEQ ID NO: 42712 - protein, 38 aa, Artificial sequence
  Protein classification predicting sequence
PINLRVYSPHVLNLTLIDLPGITKVPVGDQPPDIEYQI

SEQ ID NO: 42713 - protein, 10 aa, Artificial sequence
  Protein classification predicting sequence
GVVNRSQKDI

SEQ ID NO: 42714 - protein, 16 aa, Artificial sequence
  Protein classification predicting sequence
GVVNRSQKDIDGKKDI

SEQ ID NO: 42715 - protein, 10 aa, Artificial sequence
  Protein classification predicting sequence
AERKFFLSHP

SEQ ID NO: 42716 - protein, 14 aa, Artificial sequence
  Protein classification predicting sequence
AERKFFLSHPAYRH

SEQ ID NO: 42717 - protein, 18 aa, Artificial sequence
  Protein classification predicting sequence
LQKVLNQQLTNHIRDTLP

SEQ ID NO: 42718 - protein, 13 aa, Artificial sequence
  Protein classification predicting sequence
RKTKALLQMVQQF

SEQ ID NO: 42719 - protein, 13 aa, Artificial sequence
  Protein classification predicting sequence
VDFEKRIEGSGDQ

SEQ ID NO: 42720 - protein, 9 aa, Artificial sequence
  Protein classification predicting sequence
AFEAIVKKQ

SEQ ID NO: 42721 - protein, 20 aa, Artificial sequence
  Protein classification predicting sequence
SYINTNHEDFIGFANAQQRS

SEQ ID NO: 42722 - protein, 10 aa, Artificial sequence
  Protein classification predicting sequence
NIGIMKGGSK

SEQ ID NO: 42723 - protein, 16 aa, Artificial sequence
  Protein classification predicting sequence
ELACDSQEDVDSWKAS

SEQ ID NO: 42724 - protein, 7 aa, Artificial sequence
  Protein classification predicting sequence
LRAGVYP

SEQ ID NO: 42725 - protein, 11 aa, Artificial sequence
  Protein classification predicting sequence
PKTIMHLMINN

SEQ ID NO: 42726 - protein, 8 aa, Artificial sequence
  Protein classification predicting sequence
PPQVPSRP

SEQ ID NO: 42727 - protein, 11 aa, Artificial sequence
  Protein classification predicting sequence
EIEAETDRVTG

SEQ ID NO: 42728 - protein, 23 aa, Artificial sequence
  Protein classification predicting sequence
VDFEKRIEGSGDQVDTLELSGGA

SEQ ID NO: 42729 - protein, 16 aa, Artificial sequence
  Protein classification predicting sequence
FALFNTEQRNVYKDYR

SEQ ID NO: 42730 - protein, 9 aa, Artificial sequence
  Protein classification predicting sequence
DQNTLMEES

SEQ ID NO: 42731 - protein, 13 aa, Artificial sequence
  Protein classification predicting sequence
EQAQRRDEMLRMY

SEQ ID NO: 42732 - protein, 8 aa, Artificial sequence
  Protein classification predicting sequence
VNKLQDAF

SEQ ID NO: 42733 - protein, 20 aa, Artificial sequence
  Protein classification predicting sequence
RTIGVITKLDLMDEGTDARD

SEQ ID NO: 42734 - protein, 8 aa, Artificial sequence
  Protein classification predicting sequence
INRIFHER

SEQ ID NO: 42735 - protein, 7 aa, Artificial sequence
  Protein classification predicting sequence
GIMKGGS

SEQ ID NO: 42736 - protein, 6 aa, Artificial sequence
  Protein classification predicting sequence
YWFVLT

SEQ ID NO: 42737 - protein, 45 aa, Artificial sequence
  Protein classification predicting sequence
DVKHIASGMEHARWWVQKNVKDFWPDVKIKYIAVGNEISPVTGTS

SEQ ID NO: 42738 - protein, 7 aa, Artificial sequence
  Protein classification predicting sequence
GEAGLGN

SEQ ID NO: 42739 - protein, 8 aa, Artificial sequence
  Protein classification predicting sequence
SVGIVVSE

SEQ ID NO: 42740 - protein, 7 aa, Artificial sequence
  Protein classification predicting sequence
YQNLFDA

SEQ ID NO: 42741 - protein, 8 aa, Artificial sequence
  Protein classification predicting sequence
ALKGSNIE

SEQ ID NO: 42742 - protein, 13 aa, Artificial sequence
  Protein classification predicting sequence
EIIVSESGWPSEG

SEQ ID NO: 42743 - protein, 7 aa, Artificial sequence
  Protein classification predicting sequence
GNSYPPS

SEQ ID NO: 42744 - protein, 8 aa, Artificial sequence
  Protein classification predicting sequence
QSIGVCYG

SEQ ID NO: 42745 - protein, 14 aa, Artificial sequence
  Protein classification predicting sequence
SGMEHARWWVQKNV

SEQ ID NO: 42746 - protein, 26 aa, Artificial sequence
  Protein classification predicting sequence
IKVSTSVDMTLIGNSYPPSQGSFRND

SEQ ID NO: 42747 - protein, 30 aa, Artificial sequence
  Protein classification predicting sequence
LFTAPNVVVQDGSRQYRNLFDAMLDSVYAA

SEQ ID NO: 42748 - protein, 43 aa, Artificial sequence
  Protein classification predicting sequence
TYLRNLIQHAKEGSPRKPGPIETYIFAMFDENNKNPELEKHFG

SEQ ID NO: 42749 - protein, 6 aa, Artificial sequence
  Protein classification predicting sequence
NVYPYF

SEQ ID NO: 42750 - protein, 14 aa, Artificial sequence
  Protein classification predicting sequence
NLIQHAKEGSPRKP

SEQ ID NO: 42751 - protein, 11 aa, Artificial sequence
  Protein classification predicting sequence
VKIKYIAVGNE

SEQ ID NO: 42752 - protein, 8 aa, Artificial sequence
  Protein classification predicting sequence
FGATYDNA

SEQ ID NO: 42753 - protein, 8 aa, Artificial sequence
  Protein classification predicting sequence
YAALEKAG

SEQ ID NO: 42754 - protein, 6 aa, Artificial sequence
  Protein classification predicting sequence
YIFAMF

SEQ ID NO: 42755 - protein, 7 aa, Artificial sequence
  Protein classification predicting sequence
AKYQLNF

SEQ ID NO: 42756 - protein, 7 aa, Artificial sequence
  Protein classification predicting sequence
GTPKKPG

SEQ ID NO: 42757 - protein, 8 aa, Artificial sequence
  Protein classification predicting sequence
QLYKSRNI

SEQ ID NO: 42758 - protein, 20 aa, Artificial sequence
  Protein classification predicting sequence
KHNTPQMAAITLLGLLLVAS

SEQ ID NO: 42759 - protein, 13 aa, Artificial sequence
  Protein classification predicting sequence
NVYNALAAAGLQD

SEQ ID NO: 42760 - protein, 7 aa, Artificial sequence
  Protein classification predicting sequence
RAPLLVN

SEQ ID NO: 42761 - protein, 39 aa, Artificial sequence
  Protein classification predicting sequence
VPNQDLEALANSSIANGWVQDNIRSHFPYVKFKYISIGN

SEQ ID NO: 42762 - protein, 7 aa, Artificial sequence
  Protein classification predicting sequence
LANTYPP

SEQ ID NO: 42763 - protein, 9 aa, Artificial sequence
  Protein classification predicting sequence
EPFVILLIL

SEQ ID NO: 42764 - protein, 20 aa, Artificial sequence
  Protein classification predicting sequence
YFKIAVALAVAAIPEGLPAV

SEQ ID NO: 42765 - protein, 8 aa, Artificial sequence
  Protein classification predicting sequence
TTCLALGT

SEQ ID NO: 42766 - protein, 16 aa, Artificial sequence
  Protein classification predicting sequence
NAIVRSLPSVETLGCT

SEQ ID NO: 42767 - protein, 11 aa, Artificial sequence
  Protein classification predicting sequence
VICSDKTGTLT

SEQ ID NO: 42768 - protein, 13 aa, Artificial sequence
  Protein classification predicting sequence
VICSDKTGTLTTN

SEQ ID NO: 42769 - protein, 8 aa, Artificial sequence
  Protein classification predicting sequence
VGMLDPPR

SEQ ID NO: 42770 - protein, 13 aa, Artificial sequence
  Protein classification predicting sequence
IGIAMGSGTAVAK

SEQ ID NO: 42771 - protein, 6 aa, Artificial sequence
  Protein classification predicting sequence
KQFIRY

SEQ ID NO: 42772 - protein, 18 aa, Artificial sequence
  Protein classification predicting sequence
PVQLLWVNLVTDGLPATA

SEQ ID NO: 42773 - protein, 7 aa, Artificial sequence
  Protein classification predicting sequence
GWLFFRY

SEQ ID NO: 42774 - protein, 14 aa, Artificial sequence
  Protein classification predicting sequence
YYRACMNETRIEEL

SEQ ID NO: 42775 - protein, 12 aa, Artificial sequence
  Protein classification predicting sequence
KDNFQDTLQVVT

SEQ ID NO: 42776 - protein, 33 aa, Artificial sequence
  Protein classification predicting sequence
FAQVWCSVRTPESSHEGLITDPHSPSRFRVIGS

SEQ ID NO: 42777 - protein, 10 aa, Artificial sequence
  Protein classification predicting sequence
SNSKEFSEHF

SEQ ID NO: 42778 - protein, 24 aa, Artificial sequence
  Protein classification predicting sequence
VDQSGLGLPSRDYYLNKTENEKVL

SEQ ID NO: 42779 - protein, 36 aa, Artificial sequence
  Protein classification predicting sequence
QLRKAPNRDQWSMTPPMVNAYYSPTKNEIVFPAGIL

SEQ ID NO: 42780 - protein, 22 aa, Artificial sequence
  Protein classification predicting sequence
EIILEIKKAFEESLSTLKWMDE

SEQ ID NO: 42781 - protein, 50 aa, Artificial sequence
  Protein classification predicting sequence
SAKEKADAIYNMIGYPNFIMDPKELDKVFNDYTAVPDLYFENAMRFFNFS

SEQ ID NO: 42782 - protein, 8 aa, Artificial sequence
  Protein classification predicting sequence
VYVSADSK

SEQ ID NO: 42783 - protein, 8 aa, Artificial sequence
  Protein classification predicting sequence
IQVDQSGL

SEQ ID NO: 42784 - protein, 9 aa, Artificial sequence
  Protein classification predicting sequence
AKEKADAIY

SEQ ID NO: 42785 - protein, 8 aa, Artificial sequence
  Protein classification predicting sequence
RDQWSMTP

SEQ ID NO: 42786 - protein, 10 aa, Artificial sequence
  Protein classification predicting sequence
ALNFGGIGVV

SEQ ID NO: 42787 - protein, 17 aa, Artificial sequence
  Protein classification predicting sequence
GHELTHAFDDQGREYDK

SEQ ID NO: 42788 - protein, 16 aa, Artificial sequence
  Protein classification predicting sequence
TLGENIADNGGLKAAY

SEQ ID NO: 42789 - protein, 9 aa, Artificial sequence
  Protein classification predicting sequence
GGWNITGPW

SEQ ID NO: 42790 - protein, 13 aa, Artificial sequence
  Protein classification predicting sequence
SNSNVIQVDQSGL

SEQ ID NO: 42791 - protein, 18 aa, Artificial sequence
  Protein classification predicting sequence
PTKNEIVFPAGILQAPFY

SEQ ID NO: 42792 - protein, 14 aa, Artificial sequence
  Protein classification predicting sequence
GDHNLSQNDGTEQY

SEQ ID NO: 42793 - protein, 13 aa, Artificial sequence
  Protein classification predicting sequence
WNSNNVAAGYDIA

SEQ ID NO: 42794 - protein, 7 aa, Artificial sequence
  Protein classification predicting sequence
GTILANN

SEQ ID NO: 42795 - protein, 8 aa, Artificial sequence
  Protein classification predicting sequence
LVLYGHST

SEQ ID NO: 42796 - protein, 8 aa, Artificial sequence
  Protein classification predicting sequence
YVQLGVLP

SEQ ID NO: 42797 - protein, 12 aa, Artificial sequence
  Protein classification predicting sequence
GCNVSRKPTVFT

SEQ ID NO: 42798 - protein, 11 aa, Artificial sequence
  Protein classification predicting sequence
VQKIVVHPYWN

SEQ ID NO: 42799 - protein, 9 aa, Artificial sequence
  Protein classification predicting sequence
AGTILPNNY

SEQ ID NO: 42800 - protein, 14 aa, Artificial sequence
  Protein classification predicting sequence
CYVTGWGRLQTNGA

SEQ ID NO: 42801 - protein, 9 aa, Artificial sequence
  Protein classification predicting sequence
VYKDLRDRG

SEQ ID NO: 42802 - protein, 9 aa, Artificial sequence
  Protein classification predicting sequence
LSLIEAAYL

SEQ ID NO: 42803 - protein, 12 aa, Artificial sequence
  Protein classification predicting sequence
WPAEKENDTGVV

SEQ ID NO: 42804 - protein, 11 aa, Artificial sequence
  Protein classification predicting sequence
GQEEGAYGWIT

SEQ ID NO: 42805 - protein, 15 aa, Artificial sequence
  Protein classification predicting sequence
VYTHSFLCYGKDQAL

SEQ ID NO: 42806 - protein, 8 aa, Artificial sequence
  Protein classification predicting sequence
FGAFSAFY

SEQ ID NO: 42807 - protein, 17 aa, Artificial sequence
  Protein classification predicting sequence
VKEKYLSEYCFSGTYIL

SEQ ID NO: 42808 - protein, 12 aa, Artificial sequence
  Protein classification predicting sequence
GWTLGYMLNLTN

SEQ ID NO: 42809 - protein, 9 aa, Artificial sequence
  Protein classification predicting sequence
MLNLTNMIP

SEQ ID NO: 42810 - protein, 13 aa, Artificial sequence
  Protein classification predicting sequence
VKEKYLSEYCFSG

SEQ ID NO: 42811 - protein, 7 aa, Artificial sequence
  Protein classification predicting sequence
LMVLFSL

SEQ ID NO: 42812 - protein, 11 aa, Artificial sequence
  Protein classification predicting sequence
LGATAGMRLLR

SEQ ID NO: 42813 - protein, 12 aa, Artificial sequence
  Protein classification predicting sequence
VLKATAGLRLLP

SEQ ID NO: 42814 - protein, 9 aa, Artificial sequence
  Protein classification predicting sequence
FYAFSYYYD

SEQ ID NO: 42815 - protein, 7 aa, Artificial sequence
  Protein classification predicting sequence
TVNFLTG

SEQ ID NO: 42816 - protein, 8 aa, Artificial sequence
  Protein classification predicting sequence
YPTKTFPN

SEQ ID NO: 42817 - protein, 8 aa, Artificial sequence
  Protein classification predicting sequence
HGSLNHLL

SEQ ID NO: 42818 - protein, 7 aa, Artificial sequence
  Protein classification predicting sequence
DLGCTCD

SEQ ID NO: 42819 - protein, 9 aa, Artificial sequence
  Protein classification predicting sequence
LMPLWTSYT

SEQ ID NO: 42820 - protein, 7 aa, Artificial sequence
  Protein classification predicting sequence
LPHRPDN

SEQ ID NO: 42821 - protein, 10 aa, Artificial sequence
  Protein classification predicting sequence
TGLYPESHGI

SEQ ID NO: 42822 - protein, 8 aa, Artificial sequence
  Protein classification predicting sequence
CNKFRCGE

SEQ ID NO: 42823 - protein, 8 aa, Artificial sequence
  Protein classification predicting sequence
DGFRAEYL

SEQ ID NO: 42824 - protein, 15 aa, Artificial sequence
  Protein classification predicting sequence
IVTGLYPESHGIIDN

SEQ ID NO: 42825 - protein, 11 aa, Artificial sequence
  Protein classification predicting sequence
YNGSVPFEERI

SEQ ID NO: 42826 - protein, 8 aa, Artificial sequence
  Protein classification predicting sequence
EEPDSSGH

SEQ ID NO: 42827 - protein, 9 aa, Artificial sequence
  Protein classification predicting sequence
FENIEVYNL

SEQ ID NO: 42828 - protein, 6 aa, Artificial sequence
  Protein classification predicting sequence
PVPTHY

SEQ ID NO: 42829 - protein, 7 aa, Artificial sequence
  Protein classification predicting sequence
TSYPPMC

SEQ ID NO: 42830 - protein, 7 aa, Artificial sequence
  Protein classification predicting sequence
WVQDNIA

SEQ ID NO: 42831 - protein, 7 aa, Artificial sequence
  Protein classification predicting sequence
NIASFGG

SEQ ID NO: 42832 - protein, 6 aa, Artificial sequence
  Protein classification predicting sequence
EVAFWT

SEQ ID NO: 42833 - protein, 6 aa, Artificial sequence
  Protein classification predicting sequence
FNTVPY

SEQ ID NO: 42834 - protein, 13 aa, Artificial sequence
  Protein classification predicting sequence
SEDCLYLNIYTPA

SEQ ID NO: 42835 - protein, 7 aa, Artificial sequence
  Protein classification predicting sequence
LDQVAAL

SEQ ID NO: 42836 - protein, 11 aa, Artificial sequence
  Protein classification predicting sequence
LDQVAALHWVQ

SEQ ID NO: 42837 - protein, 9 aa, Artificial sequence
  Protein classification predicting sequence
PAEPWSFVK

SEQ ID NO: 42838 - protein, 7 aa, Artificial sequence
  Protein classification predicting sequence
HENVVVV

SEQ ID NO: 42839 - protein, 13 aa, Artificial sequence
  Protein classification predicting sequence
IQYRLGIWGFFST

SEQ ID NO: 42840 - protein, 10 aa, Artificial sequence
  Protein classification predicting sequence
VLGKYVSLEG

SEQ ID NO: 42841 - protein, 7 aa, Artificial sequence
  Protein classification predicting sequence
VHCLRQK

SEQ ID NO: 42842 - protein, 8 aa, Artificial sequence
  Protein classification predicting sequence
PEEILAEK

SEQ ID NO: 42843 - protein, 6 aa, Artificial sequence
  Protein classification predicting sequence
GDHGDE

SEQ ID NO: 42844 - protein, 7 aa, Artificial sequence
  Protein classification predicting sequence
EGYLQIG

SEQ ID NO: 42845 - protein, 13 aa, Artificial sequence
  Protein classification predicting sequence
PGSVTIFGESAGG

SEQ ID NO: 42846 - protein, 7 aa, Artificial sequence
  Protein classification predicting sequence
LLWKSYP

SEQ ID NO: 42847 - protein, 11 aa, Artificial sequence
  Protein classification predicting sequence
PKTVIGDHGDE

SEQ ID NO: 42848 - protein, 7 aa, Artificial sequence
  Protein classification predicting sequence
CLRQKTE

SEQ ID NO: 42849 - protein, 7 aa, Artificial sequence
  Protein classification predicting sequence
GHPSSPP

SEQ ID NO: 42850 - protein, 7 aa, Artificial sequence
  Protein classification predicting sequence
GKVLGKY

SEQ ID NO: 42851 - protein, 6 aa, Artificial sequence
  Protein classification predicting sequence
ENVVVV

SEQ ID NO: 42852 - protein, 7 aa, Artificial sequence
  Protein classification predicting sequence
GFFSTGD

SEQ ID NO: 42853 - protein, 11 aa, Artificial sequence
  Protein classification predicting sequence
VVVVTIQYRLG

SEQ ID NO: 42854 - protein, 7 aa, Artificial sequence
  Protein classification predicting sequence
NPNGEGL

SEQ ID NO: 42855 - protein, 7 aa, Artificial sequence
  Protein classification predicting sequence
AISESGV

SEQ ID NO: 42856 - protein, 6 aa, Artificial sequence
  Protein classification predicting sequence
GLPHWP

SEQ ID NO: 42857 - protein, 7 aa, Artificial sequence
  Protein classification predicting sequence
PYKQQWT

SEQ ID NO: 42858 - protein, 9 aa, Artificial sequence
  Protein classification predicting sequence
TFDATQPPV

SEQ ID NO: 42859 - protein, 8 aa, Artificial sequence
  Protein classification predicting sequence
YRLGPLGF

SEQ ID NO: 42860 - protein, 10 aa, Artificial sequence
  Protein classification predicting sequence
ESPDAPEAFI

SEQ ID NO: 42861 - protein, 7 aa, Artificial sequence
  Protein classification predicting sequence
HPIDIIK

SEQ ID NO: 42862 - protein, 13 aa, Artificial sequence
  Protein classification predicting sequence
GKSPVYAFVYDNP

SEQ ID NO: 42863 - protein, 8 aa, Artificial sequence
  Protein classification predicting sequence
DIIKSGKF

SEQ ID NO: 42864 - protein, 14 aa, Artificial sequence
  Protein classification predicting sequence
TFDATQPPVLCMQW

SEQ ID NO: 42865 - protein, 10 aa, Artificial sequence
  Protein classification predicting sequence
APEAFISQHP

SEQ ID NO: 42866 - protein, 12 aa, Artificial sequence
  Protein classification predicting sequence
RSDEEIISRNFL

SEQ ID NO: 42867 - protein, 38 aa, Artificial sequence
  Protein classification predicting sequence
PFGPVVESPDAPEAFISQHPVDIIKSGKFAQVPWAVTY

SEQ ID NO: 42868 - protein, 7 aa, Artificial sequence
  Protein classification predicting sequence
QASSGRE

SEQ ID NO: 42869 - protein, 6 aa, Artificial sequence
  Protein classification predicting sequence
RGRDNG

SEQ ID NO: 42870 - protein, 8 aa, Artificial sequence
  Protein classification predicting sequence
CMQWNQFI

SEQ ID NO: 42871 - protein, 8 aa, Artificial sequence
  Protein classification predicting sequence
HGGAFMFG

SEQ ID NO: 42872 - protein, 31 aa, Artificial sequence
  Protein classification predicting sequence
LSGNFGLKDQRLALLWIKQNIASFGGEPENI

SEQ ID NO: 42873 - protein, 15 aa, Artificial sequence
  Protein classification predicting sequence
FELGRIVGCGQASDS

SEQ ID NO: 42874 - protein, 7 aa, Artificial sequence
  Protein classification predicting sequence
CLKSKPA

SEQ ID NO: 42875 - protein, 9 aa, Artificial sequence
  Protein classification predicting sequence
TEDGGYNAA

SEQ ID NO: 42876 - protein, 13 aa, Artificial sequence
  Protein classification predicting sequence
LLEKQASSGRELI

SEQ ID NO: 42877 - protein, 7 aa, Artificial sequence
  Protein classification predicting sequence
FGTVHGD

SEQ ID NO: 42878 - protein, 7 aa, Artificial sequence
  Protein classification predicting sequence
YFLIFEN

SEQ ID NO: 42879 - protein, 7 aa, Artificial sequence
  Protein classification predicting sequence
LQRLFTD

SEQ ID NO: 42880 - protein, 37 aa, Artificial sequence
  Protein classification predicting sequence
STGDADLSGNFGLKDQRLALLWIKQNIASFGGEPENI

SEQ ID NO: 42881 - protein, 9 aa, Artificial sequence
  Protein classification predicting sequence
HRAISESGV

SEQ ID NO: 42882 - protein, 7 aa, Artificial sequence
  Protein classification predicting sequence
EDCLTVS

SEQ ID NO: 42883 - protein, 18 aa, Artificial sequence
  Protein classification predicting sequence
GHSAGGASVHLQMLREDF

SEQ ID NO: 42884 - protein, 6 aa, Artificial sequence
  Protein classification predicting sequence
QVPWAV

SEQ ID NO: 42885 - protein, 9 aa, Artificial sequence
  Protein classification predicting sequence
KDMDDYSRK

SEQ ID NO: 42886 - protein, 10 aa, Artificial sequence
  Protein classification predicting sequence
DLHRKYGKSP

SEQ ID NO: 42887 - protein, 6 aa, Artificial sequence
  Protein classification predicting sequence
SFPVVA

SEQ ID NO: 42888 - protein, 14 aa, Artificial sequence
  Protein classification predicting sequence
ILVKISYRLGPLGF

SEQ ID NO: 42889 - protein, 13 aa, Artificial sequence
  Protein classification predicting sequence
WIKQNIASFGGEP

SEQ ID NO: 42890 - protein, 9 aa, Artificial sequence
  Protein classification predicting sequence
APYLLFYRD

SEQ ID NO: 42891 - protein, 8 aa, Artificial sequence
  Protein classification predicting sequence
LKKCLKSK

SEQ ID NO: 42892 - protein, 8 aa, Artificial sequence
  Protein classification predicting sequence
LGFASTGD

SEQ ID NO: 42893 - protein, 10 aa, Artificial sequence
  Protein classification predicting sequence
SVSVLVLSPL

SEQ ID NO: 42894 - protein, 9 aa, Artificial sequence
  Protein classification predicting sequence
LKEGASEEE

SEQ ID NO: 42895 - protein, 12 aa, Artificial sequence
  Protein classification predicting sequence
EDCLTVSIYKPK

SEQ ID NO: 42896 - protein, 14 aa, Artificial sequence
  Protein classification predicting sequence
LPGNYGLKDQRLAL

SEQ ID NO: 42897 - protein, 8 aa, Artificial sequence
  Protein classification predicting sequence
GHSAGGAS

SEQ ID NO: 42898 - protein, 9 aa, Artificial sequence
  Protein classification predicting sequence
SGNALDPWV

SEQ ID NO: 42899 - protein, 7 aa, Artificial sequence
  Protein classification predicting sequence
TIKDMDD

SEQ ID NO: 42900 - protein, 10 aa, Artificial sequence
  Protein classification predicting sequence
DRRFSVESYW

SEQ ID NO: 42901 - protein, 9 aa, Artificial sequence
  Protein classification predicting sequence
FTDVLFKNS

SEQ ID NO: 42902 - protein, 12 aa, Artificial sequence
  Protein classification predicting sequence
RTDVHFGTVHGD

SEQ ID NO: 42903 - protein, 6 aa, Artificial sequence
  Protein classification predicting sequence
YYSYES

SEQ ID NO: 42904 - protein, 11 aa, Artificial sequence
  Protein classification predicting sequence
GNFGLKDQRLA

SEQ ID NO: 42905 - protein, 9 aa, Artificial sequence
  Protein classification predicting sequence
PFGPVVESP

SEQ ID NO: 42906 - protein, 6 aa, Artificial sequence
  Protein classification predicting sequence
FAQVPW

SEQ ID NO: 42907 - protein, 7 aa, Artificial sequence
  Protein classification predicting sequence
YNAALLL

SEQ ID NO: 42908 - protein, 6 aa, Artificial sequence
  Protein classification predicting sequence
VYDNPA

SEQ ID NO: 42909 - protein, 9 aa, Artificial sequence
  Protein classification predicting sequence
EIPDPYRKS

SEQ ID NO: 42910 - protein, 8 aa, Artificial sequence
  Protein classification predicting sequence
RACYALRP

SEQ ID NO: 42911 - protein, 17 aa, Artificial sequence
  Protein classification predicting sequence
SFNINGLRARPHQLEAI

SEQ ID NO: 42912 - protein, 9 aa, Artificial sequence
  Protein classification predicting sequence
QPDVIGLQE

SEQ ID NO: 42913 - protein, 14 aa, Artificial sequence
  Protein classification predicting sequence
HGQKGHYGVALLTK

SEQ ID NO: 42914 - protein, 13 aa, Artificial sequence
  Protein classification predicting sequence
TVINGYFPQGESR

SEQ ID NO: 42915 - protein, 10 aa, Artificial sequence
  Protein classification predicting sequence
LIMGDMNISP

SEQ ID NO: 42916 - protein, 19 aa, Artificial sequence
  Protein classification predicting sequence
ENRKRWLRTGKCSFLPEER

SEQ ID NO: 42917 - protein, 9 aa, Artificial sequence
  Protein classification predicting sequence
GGPGTGKTT

SEQ ID NO: 42918 - protein, 8 aa, Artificial sequence
  Protein classification predicting sequence
HKSQGSEF

SEQ ID NO: 42919 - protein, 9 aa, Artificial sequence
  Protein classification predicting sequence
LGGWFVLEP

SEQ ID NO: 42920 - protein, 7 aa, Artificial sequence
  Protein classification predicting sequence
DTVIGIE

SEQ ID NO: 42921 - protein, 8 aa, Artificial sequence
  Protein classification predicting sequence
DHHHYQVF

SEQ ID NO: 42922 - protein, 10 aa, Artificial sequence
  Protein classification predicting sequence
GSQNGFDNSG

SEQ ID NO: 42923 - protein, 7 aa, Artificial sequence
  Protein classification predicting sequence
EPFITPS

SEQ ID NO: 42924 - protein, 16 aa, Artificial sequence
  Protein classification predicting sequence
DLHGAPGSQNGFDNSG

SEQ ID NO: 42925 - protein, 9 aa, Artificial sequence
  Protein classification predicting sequence
TDCAKWLNG

SEQ ID NO: 42926 - protein, 6 aa, Artificial sequence
  Protein classification predicting sequence
PVDEYH

SEQ ID NO: 42927 - protein, 11 aa, Artificial sequence
  Protein classification predicting sequence
NEPLGPVLDMD

SEQ ID NO: 42928 - protein, 10 aa, Artificial sequence
  Protein classification predicting sequence
GEWSAALTDC

SEQ ID NO: 42929 - protein, 11 aa, Artificial sequence
  Protein classification predicting sequence
IGIELLNEPLG

SEQ ID NO: 42930 - protein, 7 aa, Artificial sequence
  Protein classification predicting sequence
RRYVEAQ

SEQ ID NO: 42931 - protein, 7 aa, Artificial sequence
  Protein classification predicting sequence
LDNDPYV

SEQ ID NO: 42932 - protein, 6 aa, Artificial sequence
  Protein classification predicting sequence
HWSTFY

SEQ ID NO: 42933 - protein, 6 aa, Artificial sequence
  Protein classification predicting sequence
DHHHYQ

SEQ ID NO: 42934 - protein, 6 aa, Artificial sequence
  Protein classification predicting sequence
NEPLGP

SEQ ID NO: 42935 - protein, 8 aa, Artificial sequence
  Protein classification predicting sequence
WDLDETII

SEQ ID NO: 42936 - protein, 7 aa, Artificial sequence
  Protein classification predicting sequence
LVTTTQL

SEQ ID NO: 42937 - protein, 7 aa, Artificial sequence
  Protein classification predicting sequence
FHSLLTG

SEQ ID NO: 42938 - protein, 19 aa, Artificial sequence
  Protein classification predicting sequence
MEEMIFNLADTHLFFNDLE

SEQ ID NO: 42939 - protein, 18 aa, Artificial sequence
  Protein classification predicting sequence
GGVDWMRKLAFRYRRVKE

SEQ ID NO: 42940 - protein, 11 aa, Artificial sequence
  Protein classification predicting sequence
YNTYKNNVGGL

SEQ ID NO: 42941 - protein, 7 aa, Artificial sequence
  Protein classification predicting sequence
WLQLRAE

SEQ ID NO: 42942 - protein, 11 aa, Artificial sequence
  Protein classification predicting sequence
FPIENIYSATK

SEQ ID NO: 42943 - protein, 9 aa, Artificial sequence
  Protein classification predicting sequence
GKESCFERI

SEQ ID NO: 42944 - protein, 14 aa, Artificial sequence
  Protein classification predicting sequence
GGVDWMRKLAFRYR

SEQ ID NO: 42945 - protein, 9 aa, Artificial sequence
  Protein classification predicting sequence
SDDNGQDLS

SEQ ID NO: 42946 - protein, 11 aa, Artificial sequence
  Protein classification predicting sequence
ERVFVWDLDET

SEQ ID NO: 42947 - protein, 7 aa, Artificial sequence
  Protein classification predicting sequence
IENIYSA

SEQ ID NO: 42948 - protein, 8 aa, Artificial sequence
  Protein classification predicting sequence
IDAELTIV

SEQ ID NO: 42949 - protein, 13 aa, Artificial sequence
  Protein classification predicting sequence
VVFDPLDGSSNID

SEQ ID NO: 42950 - protein, 19 aa, Artificial sequence
  Protein classification predicting sequence
NLLAAGYCMYSSSVIFVLT

SEQ ID NO: 42951 - protein, 9 aa, Artificial sequence
  Protein classification predicting sequence
IYSFNEGNY

SEQ ID NO: 42952 - protein, 11 aa, Artificial sequence
  Protein classification predicting sequence
GTGELTQLLNS

SEQ ID NO: 42953 - protein, 15 aa, Artificial sequence
  Protein classification predicting sequence
TQLLNSLCTAVKAIS

SEQ ID NO: 42954 - protein, 7 aa, Artificial sequence
  Protein classification predicting sequence
GTIFGIY

SEQ ID NO: 42955 - protein, 11 aa, Artificial sequence
  Protein classification predicting sequence
GKLRLLYECNP

SEQ ID NO: 42956 - protein, 10 aa, Artificial sequence
  Protein classification predicting sequence
TQLLNSLCTA

SEQ ID NO: 42957 - protein, 12 aa, Artificial sequence
  Protein classification predicting sequence
ACKQIASLVQRA

SEQ ID NO: 42958 - protein, 14 aa, Artificial sequence
  Protein classification predicting sequence
PTEIHQRVPLYIGS

SEQ ID NO: 42959 - protein, 11 aa, Artificial sequence
  Protein classification predicting sequence
VVFDPLDGSSN

SEQ ID NO: 42960 - protein, 8 aa, Artificial sequence
  Protein classification predicting sequence
DPLDGSSN

SEQ ID NO: 42961 - protein, 7 aa, Artificial sequence
  Protein classification predicting sequence
VKIKKKG

SEQ ID NO: 42962 - protein, 16 aa, Artificial sequence
  Protein classification predicting sequence
PDGKLRLLYECNPMAF

SEQ ID NO: 42963 - protein, 7 aa, Artificial sequence
  Protein classification predicting sequence
KLDVLSN

SEQ ID NO: 42964 - protein, 10 aa, Artificial sequence
  Protein classification predicting sequence
DPLDGSSNID

SEQ ID NO: 42965 - protein, 9 aa, Artificial sequence
  Protein classification predicting sequence
VAAGYALYG

SEQ ID NO: 42966 - protein, 6 aa, Artificial sequence
  Protein classification predicting sequence
LRLLYE

SEQ ID NO: 42967 - protein, 6 aa, Artificial sequence
  Protein classification predicting sequence
NEGYAK

SEQ ID NO: 42968 - protein, 11 aa, Artificial sequence
  Protein classification predicting sequence
NEGYAKDFDPA

SEQ ID NO: 42969 - protein, 6 aa, Artificial sequence
  Protein classification predicting sequence
SNYRHW

SEQ ID NO: 42970 - protein, 6 aa, Artificial sequence
  Protein classification predicting sequence
HQRVPL

SEQ ID NO: 42971 - protein, 19 aa, Artificial sequence
  Protein classification predicting sequence
TNVTGDQVKKLDVLSNDLV

SEQ ID NO: 42972 - protein, 14 aa, Artificial sequence
  Protein classification predicting sequence
QRKKFPPDNSAPYG

SEQ ID NO: 42973 - protein, 20 aa, Artificial sequence
  Protein classification predicting sequence
RYVGSMVADVHRTLVYGGIF

SEQ ID NO: 42974 - protein, 8 aa, Artificial sequence
  Protein classification predicting sequence
YPADKKSP

SEQ ID NO: 42975 - protein, 15 aa, Artificial sequence
  Protein classification predicting sequence
KSKNGKLRLLYECAP

SEQ ID NO: 42976 - protein, 12 aa, Artificial sequence
  Protein classification predicting sequence
TEIHQRVPLYIG

SEQ ID NO: 42977 - protein, 7 aa, Artificial sequence
  Protein classification predicting sequence
RYIGSLV

SEQ ID NO: 42978 - protein, 8 aa, Artificial sequence
  Protein classification predicting sequence
TIVLSSIS

SEQ ID NO: 42979 - protein, 10 aa, Artificial sequence
  Protein classification predicting sequence
ISNLTGVQGA

SEQ ID NO: 42980 - protein, 10 aa, Artificial sequence
  Protein classification predicting sequence
QGEDQKKLDV

SEQ ID NO: 42981 - protein, 9 aa, Artificial sequence
  Protein classification predicting sequence
LYGGIYGYP

SEQ ID NO: 42982 - protein, 8 aa, Artificial sequence
  Protein classification predicting sequence
KKLDVLSN

SEQ ID NO: 42983 - protein, 8 aa, Artificial sequence
  Protein classification predicting sequence
ALVSSGRT

SEQ ID NO: 42984 - protein, 13 aa, Artificial sequence
  Protein classification predicting sequence
MVAAGYCMYGSSC

SEQ ID NO: 42985 - protein, 24 aa, Artificial sequence
  Protein classification predicting sequence
DVLQPGKNMVAAGYCMYGSSCTLV

SEQ ID NO: 42986 - protein, 10 aa, Artificial sequence
  Protein classification predicting sequence
STGSGVNGFT

SEQ ID NO: 42987 - protein, 8 aa, Artificial sequence
  Protein classification predicting sequence
YGGIFMYP

SEQ ID NO: 42988 - protein, 7 aa, Artificial sequence
  Protein classification predicting sequence
DLMTITR

SEQ ID NO: 42989 - protein, 11 aa, Artificial sequence
  Protein classification predicting sequence
NWDGPTTKYVE

SEQ ID NO: 42990 - protein, 18 aa, Artificial sequence
  Protein classification predicting sequence
DKKSPNGKLRVLYEVFPM

SEQ ID NO: 42991 - protein, 8 aa, Artificial sequence
  Protein classification predicting sequence
FLMEQAGG

SEQ ID NO: 42992 - protein, 15 aa, Artificial sequence
  Protein classification predicting sequence
QSSYSTCVLVSEENK

SEQ ID NO: 42993 - protein, 8 aa, Artificial sequence
  Protein classification predicting sequence
TCVLVSEE

SEQ ID NO: 42994 - protein, 33 aa, Artificial sequence
  Protein classification predicting sequence
RGKYVVCFDPLDGSSNIDCLASIGTIFAIYRKT

SEQ ID NO: 42995 - protein, 8 aa, Artificial sequence
  Protein classification predicting sequence
SLNEGYAK

SEQ ID NO: 42996 - protein, 7 aa, Artificial sequence
  Protein classification predicting sequence
IHQRVPL

SEQ ID NO: 42997 - protein, 20 aa, Artificial sequence
  Protein classification predicting sequence
RGKYVVCFDPLDGSSNIDCL

SEQ ID NO: 42998 - protein, 9 aa, Artificial sequence
  Protein classification predicting sequence
RTDLMTITR

SEQ ID NO: 42999 - protein, 14 aa, Artificial sequence
  Protein classification predicting sequence
KLDVLSNEVFVKAL

SEQ ID NO: 43000 - protein, 8 aa, Artificial sequence
  Protein classification predicting sequence
VLQPGKNM

SEQ ID NO: 43001 - protein, 7 aa, Artificial sequence
  Protein classification predicting sequence
AAGYCMY

SEQ ID NO: 43002 - protein, 7 aa, Artificial sequence
  Protein classification predicting sequence
RALDLVP

SEQ ID NO: 43003 - protein, 11 aa, Artificial sequence
  Protein classification predicting sequence
RALDLVPTKIH

SEQ ID NO: 43004 - protein, 9 aa, Artificial sequence
  Protein classification predicting sequence
VEEIKALYA

SEQ ID NO: 43005 - protein, 12 aa, Artificial sequence
  Protein classification predicting sequence
FDPLDGSSNIDC

SEQ ID NO: 43006 - protein, 8 aa, Artificial sequence
  Protein classification predicting sequence
HRTLLYGG

SEQ ID NO: 43007 - protein, 11 aa, Artificial sequence
  Protein classification predicting sequence
LVSEEDEEATF

SEQ ID NO: 43008 - protein, 10 aa, Artificial sequence
  Protein classification predicting sequence
ILTHPDIKIP

SEQ ID NO: 43009 - protein, 16 aa, Artificial sequence
  Protein classification predicting sequence
KGKIYSVNEGNAKNWD

SEQ ID NO: 43010 - protein, 16 aa, Artificial sequence
  Protein classification predicting sequence
VNVTGDEVKKLDVLSN

SEQ ID NO: 43011 - protein, 14 aa, Artificial sequence
  Protein classification predicting sequence
DPLDGSSNIDVNVS

SEQ ID NO: 43012 - protein, 7 aa, Artificial sequence
  Protein classification predicting sequence
YSVNEGN

SEQ ID NO: 43013 - protein, 7 aa, Artificial sequence
  Protein classification predicting sequence
IASEEED

SEQ ID NO: 43014 - protein, 13 aa, Artificial sequence
  Protein classification predicting sequence
AKIIHRDINKAGL

SEQ ID NO: 43015 - protein, 25 aa, Artificial sequence
  Protein classification predicting sequence
DPLDGSSNIDVNVSVGTIFSIYRRV

SEQ ID NO: 43016 - protein, 11 aa, Artificial sequence
  Protein classification predicting sequence
QPGNKQVAAGY

SEQ ID NO: 43017 - protein, 13 aa, Artificial sequence
  Protein classification predicting sequence
VYGSSTMLVYTTG

SEQ ID NO: 43018 - protein, 7 aa, Artificial sequence
  Protein classification predicting sequence
GVKKYIK

SEQ ID NO: 43019 - protein, 21 aa, Artificial sequence
  Protein classification predicting sequence
SRYIGSLVADFHRNLLKGGIY

SEQ ID NO: 43020 - protein, 7 aa, Artificial sequence
  Protein classification predicting sequence
LGEFILT

SEQ ID NO: 43021 - protein, 7 aa, Artificial sequence
  Protein classification predicting sequence
GGIFLYP

SEQ ID NO: 43022 - protein, 8 aa, Artificial sequence
  Protein classification predicting sequence
FIVEQAGG

SEQ ID NO: 43023 - protein, 7 aa, Artificial sequence
  Protein classification predicting sequence
DGSSNID

SEQ ID NO: 43024 - protein, 10 aa, Artificial sequence
  Protein classification predicting sequence
KPYSARYIGS

SEQ ID NO: 43025 - protein, 6 aa, Artificial sequence
  Protein classification predicting sequence
GSMVAD

SEQ ID NO: 43026 - protein, 13 aa, Artificial sequence
  Protein classification predicting sequence
LDRDCTTLSRHVL

SEQ ID NO: 43027 - protein, 7 aa, Artificial sequence
  Protein classification predicting sequence
LVADFHR

SEQ ID NO: 43028 - protein, 7 aa, Artificial sequence
  Protein classification predicting sequence
GGVFLYP

SEQ ID NO: 43029 - protein, 16 aa, Artificial sequence
  Protein classification predicting sequence
PMAFLAEQAGGKASDG

SEQ ID NO: 43030 - protein, 8 aa, Artificial sequence
  Protein classification predicting sequence
NEGNFWQW

SEQ ID NO: 43031 - protein, 9 aa, Artificial sequence
  Protein classification predicting sequence
LGEFILTHP

SEQ ID NO: 43032 - protein, 10 aa, Artificial sequence
  Protein classification predicting sequence
GSMVADVHRT

SEQ ID NO: 43033 - protein, 14 aa, Artificial sequence
  Protein classification predicting sequence
QKTGIVSGFGRTHE

SEQ ID NO: 43034 - protein, 16 aa, Artificial sequence
  Protein classification predicting sequence
EDACQGDSGGPHVTRF

SEQ ID NO: 43035 - protein, 20 aa, Artificial sequence
  Protein classification predicting sequence
DTYFVTGIVSWGEGCARKGK

SEQ ID NO: 43036 - protein, 10 aa, Artificial sequence
  Protein classification predicting sequence
LRLKTPITFR

SEQ ID NO: 43037 - protein, 7 aa, Artificial sequence
  Protein classification predicting sequence
FEGRNCE

SEQ ID NO: 43038 - protein, 13 aa, Artificial sequence
  Protein classification predicting sequence
LTGVVSWGEGCAA

SEQ ID NO: 43039 - protein, 10 aa, Artificial sequence
  Protein classification predicting sequence
VCPKGECPWQ

SEQ ID NO: 43040 - protein, 7 aa, Artificial sequence
  Protein classification predicting sequence
GTWYLTG

SEQ ID NO: 43041 - protein, 9 aa, Artificial sequence
  Protein classification predicting sequence
VPRLMTQDC

SEQ ID NO: 43042 - protein, 9 aa, Artificial sequence
  Protein classification predicting sequence
DNKVVCSCT

SEQ ID NO: 43043 - protein, 9 aa, Artificial sequence
  Protein classification predicting sequence
TEQKRNVIR

SEQ ID NO: 43044 - protein, 12 aa, Artificial sequence
  Protein classification predicting sequence
CKDDINSYECWC

SEQ ID NO: 43045 - protein, 15 aa, Artificial sequence
  Protein classification predicting sequence
SCEPAVPFPCGRVSV

SEQ ID NO: 43046 - protein, 8 aa, Artificial sequence
  Protein classification predicting sequence
IGDYTDFY

SEQ ID NO: 43047 - protein, 12 aa, Artificial sequence
  Protein classification predicting sequence
VLMNDWSARDIQ

SEQ ID NO: 43048 - protein, 9 aa, Artificial sequence
  Protein classification predicting sequence
WEYVPLGPF

SEQ ID NO: 43049 - protein, 8 aa, Artificial sequence
  Protein classification predicting sequence
GGNQGGGM

SEQ ID NO: 43050 - protein, 10 aa, Artificial sequence
  Protein classification predicting sequence
WGDFGGNQGG

SEQ ID NO: 43051 - protein, 6 aa, Artificial sequence
  Protein classification predicting sequence
IRELQQ

SEQ ID NO: 43052 - protein, 7 aa, Artificial sequence
  Protein classification predicting sequence
EAFAVSD

SEQ ID NO: 43053 - protein, 10 aa, Artificial sequence
  Protein classification predicting sequence
VAYMGPQYEV

SEQ ID NO: 43054 - protein, 8 aa, Artificial sequence
  Protein classification predicting sequence
IAGFETPD

SEQ ID NO: 43055 - protein, 13 aa, Artificial sequence
  Protein classification predicting sequence
VTLLGPSGCGKTT

SEQ ID NO: 43056 - protein, 14 aa, Artificial sequence
  Protein classification predicting sequence
PTSGQIFIDGEDVT

SEQ ID NO: 43057 - protein, 19 aa, Artificial sequence
  Protein classification predicting sequence
SIQQRDICMVFQSYALFPH

SEQ ID NO: 43058 - protein, 11 aa, Artificial sequence
  Protein classification predicting sequence
VDQISGGQQQR

SEQ ID NO: 43059 - protein, 7 aa, Artificial sequence
  Protein classification predicting sequence
GVRPEAI

SEQ ID NO: 43060 - protein, 7 aa, Artificial sequence
  Protein classification predicting sequence
IRELQQR

SEQ ID NO: 43061 - protein, 18 aa, Artificial sequence
  Protein classification predicting sequence
VDQISGGQQQRVALARAL

SEQ ID NO: 43062 - protein, 24 aa, Artificial sequence
  Protein classification predicting sequence
GFEDRYVDQISGGQQQRVALARAL

SEQ ID NO: 43063 - protein, 9 aa, Artificial sequence
  Protein classification predicting sequence
IFIDGEDVT

SEQ ID NO: 43064 - protein, 17 aa, Artificial sequence
  Protein classification predicting sequence
PHELSGGQQQRVALARA

SEQ ID NO: 43065 - protein, 8 aa, Artificial sequence
  Protein classification predicting sequence
RKAVAELL

SEQ ID NO: 43066 - protein, 23 aa, Artificial sequence
  Protein classification predicting sequence
RSIQQRDICMVFQSYALFPHMSL

SEQ ID NO: 43067 - protein, 10 aa, Artificial sequence
  Protein classification predicting sequence
ITSLYVTHDQ

SEQ ID NO: 43068 - protein, 6 aa, Artificial sequence
  Protein classification predicting sequence
FMGEAN

SEQ ID NO: 43069 - protein, 13 aa, Artificial sequence
  Protein classification predicting sequence
LMLLDEPFSALDT

SEQ ID NO: 43070 - protein, 7 aa, Artificial sequence
  Protein classification predicting sequence
DSVTRFA

SEQ ID NO: 43071 - protein, 8 aa, Artificial sequence
  Protein classification predicting sequence
LIGERGRE

SEQ ID NO: 43072 - protein, 18 aa, Artificial sequence
  Protein classification predicting sequence
LIGERGREVKDFIENILG

SEQ ID NO: 43073 - protein, 11 aa, Artificial sequence
  Protein classification predicting sequence
IAAPADVSPLL

SEQ ID NO: 43074 - protein, 15 aa, Artificial sequence
  Protein classification predicting sequence
HVLLIMDSLTRYAMA

SEQ ID NO: 43075 - protein, 7 aa, Artificial sequence
  Protein classification predicting sequence
DSLTRFA

SEQ ID NO: 43076 - protein, 8 aa, Artificial sequence
  Protein classification predicting sequence
AQREIGLA

SEQ ID NO: 43077 - protein, 12 aa, Artificial sequence
  Protein classification predicting sequence
LERAFIDPLGLP

SEQ ID NO: 43078 - protein, 10 aa, Artificial sequence
  Protein classification predicting sequence
ILYSDPADYF

SEQ ID NO: 43079 - protein, 13 aa, Artificial sequence
  Protein classification predicting sequence
EPDRYVILGGHRD

SEQ ID NO: 43080 - protein, 9 aa, Artificial sequence
  Protein classification predicting sequence
SFDSLFSAV

SEQ ID NO: 43081 - protein, 8 aa, Artificial sequence
  Protein classification predicting sequence
IPVHPIGY

SEQ ID NO: 43082 - protein, 7 aa, Artificial sequence
  Protein classification predicting sequence
GWRPRRT

SEQ ID NO: 43083 - protein, 30 aa, Artificial sequence
  Protein classification predicting sequence
PRISKLGSGNDFEVFFQRLGIASGRARYTK

SEQ ID NO: 43084 - protein, 7 aa, Artificial sequence
  Protein classification predicting sequence
GSEWFWW

SEQ ID NO: 43085 - protein, 7 aa, Artificial sequence
  Protein classification predicting sequence
KHHEGFT

SEQ ID NO: 43086 - protein, 12 aa, Artificial sequence
  Protein classification predicting sequence
CGGNLLMNIGPT

SEQ ID NO: 43087 - protein, 8 aa, Artificial sequence
  Protein classification predicting sequence
GAKYVVLT

SEQ ID NO: 43088 - protein, 10 aa, Artificial sequence
  Protein classification predicting sequence
KTLPELYELV

SEQ ID NO: 43089 - protein, 8 aa, Artificial sequence
  Protein classification predicting sequence
SLDSRPLP

SEQ ID NO: 43090 - protein, 17 aa, Artificial sequence
  Protein classification predicting sequence
YVVLTTKHHEGFTNWPS

SEQ ID NO: 43091 - protein, 13 aa, Artificial sequence
  Protein classification predicting sequence
DVGPHRDLVGELG

SEQ ID NO: 43092 - protein, 10 aa, Artificial sequence
  Protein classification predicting sequence
PDLIWSDGEW

SEQ ID NO: 43093 - protein, 6 aa, Artificial sequence
  Protein classification predicting sequence
VYAIFL

SEQ ID NO: 43094 - protein, 8 aa, Artificial sequence
  Protein classification predicting sequence
HWGVFSVP

SEQ ID NO: 43095 - protein, 10 aa, Artificial sequence
  Protein classification predicting sequence
PQFTARFFHP

SEQ ID NO: 43096 - protein, 15 aa, Artificial sequence
  Protein classification predicting sequence
INGEAIYASKPWRVQ

SEQ ID NO: 43097 - protein, 8 aa, Artificial sequence
  Protein classification predicting sequence
WFDEAKFG

SEQ ID NO: 43098 - protein, 11 aa, Artificial sequence
  Protein classification predicting sequence
KHHEGFTNWPS

SEQ ID NO: 43099 - protein, 13 aa, Artificial sequence
  Protein classification predicting sequence
RKRNIRYGLYHSL

SEQ ID NO: 43100 - protein, 6 aa, Artificial sequence
  Protein classification predicting sequence
EWFHPL

SEQ ID NO: 43101 - protein, 11 aa, Artificial sequence
  Protein classification predicting sequence
KTMPELYDLVN

SEQ ID NO: 43102 - protein, 16 aa, Artificial sequence
  Protein classification predicting sequence
YKPDLIWSDGEWECPD

SEQ ID NO: 43103 - protein, 12 aa, Artificial sequence
  Protein classification predicting sequence
SLGGNYLLNIGP

SEQ ID NO: 43104 - protein, 8 aa, Artificial sequence
  Protein classification predicting sequence
WLEQQVAK

SEQ ID NO: 43105 - protein, 6 aa, Artificial sequence
  Protein classification predicting sequence
PTDPKF

SEQ ID NO: 43106 - protein, 18 aa, Artificial sequence
  Protein classification predicting sequence
GIVVSILDDGIEKNHPDL

SEQ ID NO: 43107 - protein, 15 aa, Artificial sequence
  Protein classification predicting sequence
DVNDQDPDPQPRYTQ

SEQ ID NO: 43108 - protein, 20 aa, Artificial sequence
  Protein classification predicting sequence
NDNRHGTRCAGEVAAVANNG

SEQ ID NO: 43109 - protein, 47 aa, Artificial sequence
  Protein classification predicting sequence
IGGVRMLDGEVTDAVEARSLGLNPNHIHIYSASWGPEDDGKTVDGPA

SEQ ID NO: 43110 - protein, 9 aa, Artificial sequence
  Protein classification predicting sequence
QGRGGLGSI

SEQ ID NO: 43111 - protein, 30 aa, Artificial sequence
  Protein classification predicting sequence
VWASGNGGREHDSCNCDGYTNSIYTLSISS

SEQ ID NO: 43112 - protein, 38 aa, Artificial sequence
  Protein classification predicting sequence
GNVPWYSEACSSTLATTYSSGNQNEKQIVTTDLRQKCT

SEQ ID NO: 43113 - protein, 24 aa, Artificial sequence
  Protein classification predicting sequence
TNGVGRKVSHSYGYGLLDAGAMVA

SEQ ID NO: 43114 - protein, 7 aa, Artificial sequence
  Protein classification predicting sequence
EPKDIGK

SEQ ID NO: 43115 - protein, 7 aa, Artificial sequence
  Protein classification predicting sequence
SPMGTRS

SEQ ID NO: 43116 - protein, 13 aa, Artificial sequence
  Protein classification predicting sequence
RPHDYSADGFNDW

SEQ ID NO: 43117 - protein, 11 aa, Artificial sequence
  Protein classification predicting sequence
FMTTHSWDEDP

SEQ ID NO: 43118 - protein, 7 aa, Artificial sequence
  Protein classification predicting sequence
LVLYGTA

SEQ ID NO: 43119 - protein, 6 aa, Artificial sequence
  Protein classification predicting sequence
LHQKSC

SEQ ID NO: 43120 - protein, 13 aa, Artificial sequence
  Protein classification predicting sequence
PCHASCATCQGPA

SEQ ID NO: 43121 - protein, 29 aa, Artificial sequence
  Protein classification predicting sequence
TDCLSCPSHASLDPVEQTCSRQSQSSRES

SEQ ID NO: 43122 - protein, 13 aa, Artificial sequence
  Protein classification predicting sequence
EPKDIGKRLEVRK

SEQ ID NO: 43123 - protein, 6 aa, Artificial sequence
  Protein classification predicting sequence
RPYWWV

SEQ ID NO: 43124 - protein, 15 aa, Artificial sequence
  Protein classification predicting sequence
TCETGPGSPSGHAMG

SEQ ID NO: 43125 - protein, 8 aa, Artificial sequence
  Protein classification predicting sequence
AAHFPHQV

SEQ ID NO: 43126 - protein, 21 aa, Artificial sequence
  Protein classification predicting sequence
IKQFPVTCETGPGSPSGHAMG

SEQ ID NO: 43127 - protein, 21 aa, Artificial sequence
  Protein classification predicting sequence
LVSVIADLRNAFYVLFPIWFH

SEQ ID NO: 43128 - protein, 12 aa, Artificial sequence
  Protein classification predicting sequence
WPYVNLQLTAYY

SEQ ID NO: 43129 - protein, 8 aa, Artificial sequence
  Protein classification predicting sequence
CDVYIETP

SEQ ID NO: 43130 - protein, 38 aa, Artificial sequence
  Protein classification predicting sequence
ILDYLFKPNFGASLHILKVEIGGDGQTTDGTEPSHMHY

SEQ ID NO: 43131 - protein, 15 aa, Artificial sequence
  Protein classification predicting sequence
GLMTAQEPWSGHYVV

SEQ ID NO: 43132 - protein, 10 aa, Artificial sequence
  Protein classification predicting sequence
ELQVWYTKLG

SEQ ID NO: 43133 - protein, 16 aa, Artificial sequence
  Protein classification predicting sequence
FSEAPNFADQTGVFEY

SEQ ID NO: 43134 - protein, 19 aa, Artificial sequence
  Protein classification predicting sequence
GGVFIAGRVNKGGILIRSA

SEQ ID NO: 43135 - protein, 8 aa, Artificial sequence
  Protein classification predicting sequence
GWAAIGTH

SEQ ID NO: 43136 - protein, 9 aa, Artificial sequence
  Protein classification predicting sequence
FEFAQFDNF

SEQ ID NO: 43137 - protein, 7 aa, Artificial sequence
  Protein classification predicting sequence
YRFSISW

SEQ ID NO: 43138 - protein, 7 aa, Artificial sequence
  Protein classification predicting sequence
GYSKRFG

SEQ ID NO: 43139 - protein, 11 aa, Artificial sequence
  Protein classification predicting sequence
HMCMVMRGVQK

SEQ ID NO: 43140 - protein, 10 aa, Artificial sequence
  Protein classification predicting sequence
REGLLDTPKR

SEQ ID NO: 43141 - protein, 8 aa, Artificial sequence
  Protein classification predicting sequence
ARRLQIQE

SEQ ID NO: 43142 - protein, 14 aa, Artificial sequence
  Protein classification predicting sequence
EMYARRLQVQERLT

SEQ ID NO: 43143 - protein, 8 aa, Artificial sequence
  Protein classification predicting sequence
REGLLDTP

SEQ ID NO: 43144 - protein, 6 aa, Artificial sequence
  Protein classification predicting sequence
SLCEHH

SEQ ID NO: 43145 - protein, 7 aa, Artificial sequence
  Protein classification predicting sequence
GLSKLAR

SEQ ID NO: 43146 - protein, 8 aa, Artificial sequence
  Protein classification predicting sequence
CEHHMLPF

SEQ ID NO: 43147 - protein, 7 aa, Artificial sequence
  Protein classification predicting sequence
PFYGKAH

SEQ ID NO: 43148 - protein, 7 aa, Artificial sequence
  Protein classification predicting sequence
GLSKIAR

SEQ ID NO: 43149 - protein, 4 aa, Artificial sequence
  Protein classification predicting sequence
HMCM

SEQ ID NO: 43150 - protein, 6 aa, Artificial sequence
  Protein classification predicting sequence
KTREEF

SEQ ID NO: 43151 - protein, 6 aa, Artificial sequence
  Protein classification predicting sequence
MRGIKK

SEQ ID NO: 43152 - protein, 8 aa, Artificial sequence
  Protein classification predicting sequence
EIFSGLDY

SEQ ID NO: 43153 - protein, 6 aa, Artificial sequence
  Protein classification predicting sequence
NFPKIT

SEQ ID NO: 43154 - protein, 9 aa, Artificial sequence
  Protein classification predicting sequence
VVGLSKLAR

SEQ ID NO: 43155 - protein, 7 aa, Artificial sequence
  Protein classification predicting sequence
TPKRVAK

SEQ ID NO: 43156 - protein, 6 aa, Artificial sequence
  Protein classification predicting sequence
STCEHH

SEQ ID NO: 43157 - protein, 9 aa, Artificial sequence
  Protein classification predicting sequence
IGLSKINRI

SEQ ID NO: 43158 - protein, 8 aa, Artificial sequence
  Protein classification predicting sequence
CEHHLVPF

SEQ ID NO: 43159 - protein, 10 aa, Artificial sequence
  Protein classification predicting sequence
GLSKLARIVE

SEQ ID NO: 43160 - protein, 7 aa, Artificial sequence
  Protein classification predicting sequence
KVVGLSK

SEQ ID NO: 43161 - protein, 6 aa, Artificial sequence
  Protein classification predicting sequence
MRGVQK

SEQ ID NO: 43162 - protein, 19 aa, Artificial sequence
  Protein classification predicting sequence
DVLNDAIFDEDHDEMVIVK

SEQ ID NO: 43163 - protein, 7 aa, Artificial sequence
  Protein classification predicting sequence
QVQERLT

SEQ ID NO: 43164 - protein, 12 aa, Artificial sequence
  Protein classification predicting sequence
EATHMCMVMRGV

SEQ ID NO: 43165 - protein, 6 aa, Artificial sequence
  Protein classification predicting sequence
HHLLPF

SEQ ID NO: 43166 - protein, 7 aa, Artificial sequence
  Protein classification predicting sequence
RGIKKPG

SEQ ID NO: 43167 - protein, 8 aa, Artificial sequence
  Protein classification predicting sequence
ILEAIGED

SEQ ID NO: 43168 - protein, 6 aa, Artificial sequence
  Protein classification predicting sequence
PQLQER

SEQ ID NO: 43169 - protein, 9 aa, Artificial sequence
  Protein classification predicting sequence
GEDPDREGL

SEQ ID NO: 43170 - protein, 9 aa, Artificial sequence
  Protein classification predicting sequence
VTGLSKLAR

SEQ ID NO: 43171 - protein, 6 aa, Artificial sequence
  Protein classification predicting sequence
HVAYLP

SEQ ID NO: 43172 - protein, 6 aa, Artificial sequence
  Protein classification predicting sequence
RLQVQE

SEQ ID NO: 43173 - protein, 14 aa, Artificial sequence
  Protein classification predicting sequence
NSKTVTSTMLGVFR

SEQ ID NO: 43174 - protein, 12 aa, Artificial sequence
  Protein classification predicting sequence
DTPKRVAKMYAE

SEQ ID NO: 43175 - protein, 7 aa, Artificial sequence
  Protein classification predicting sequence
RPQLQER

SEQ ID NO: 43176 - protein, 7 aa, Artificial sequence
  Protein classification predicting sequence
AHVGYIP

SEQ ID NO: 43177 - protein, 8 aa, Artificial sequence
  Protein classification predicting sequence
DDSLEETP

SEQ ID NO: 43178 - protein, 7 aa, Artificial sequence
  Protein classification predicting sequence
DYANFPK

SEQ ID NO: 43179 - protein, 7 aa, Artificial sequence
  Protein classification predicting sequence
MKVSEMV

SEQ ID NO: 43180 - protein, 6 aa, Artificial sequence
  Protein classification predicting sequence
RLQIQE

SEQ ID NO: 43181 - protein, 8 aa, Artificial sequence
  Protein classification predicting sequence
EIYSRRLQ

SEQ ID NO: 43182 - protein, 14 aa, Artificial sequence
  Protein classification predicting sequence
EATHMCMVMRGVQK

SEQ ID NO: 43183 - protein, 6 aa, Artificial sequence
  Protein classification predicting sequence
GEDPDR

SEQ ID NO: 43184 - protein, 8 aa, Artificial sequence
  Protein classification predicting sequence
CEHHLLPF

SEQ ID NO: 43185 - protein, 7 aa, Artificial sequence
  Protein classification predicting sequence
VIGLSKI

SEQ ID NO: 43186 - protein, 7 aa, Artificial sequence
  Protein classification predicting sequence
FDEDHDE

SEQ ID NO: 43187 - protein, 12 aa, Artificial sequence
  Protein classification predicting sequence
QERLTSQIADAL

SEQ ID NO: 43188 - protein, 8 aa, Artificial sequence
  Protein classification predicting sequence
MRGVRKPG

SEQ ID NO: 43189 - protein, 6 aa, Artificial sequence
  Protein classification predicting sequence
CEHHLV

SEQ ID NO: 43190 - protein, 8 aa, Artificial sequence
  Protein classification predicting sequence
TTTSAVRG

SEQ ID NO: 43191 - protein, 7 aa, Artificial sequence
  Protein classification predicting sequence
EGHNEMV

SEQ ID NO: 43192 - protein, 15 aa, Artificial sequence
  Protein classification predicting sequence
TLTSTCEHHFVTIDG

SEQ ID NO: 43193 - protein, 17 aa, Artificial sequence
  Protein classification predicting sequence
TTTTSLGGLFKSSQNTR

SEQ ID NO: 43194 - protein, 22 aa, Artificial sequence
  Protein classification predicting sequence
TTTTSLGGLFKSSQNTRQEFLR

SEQ ID NO: 43195 - protein, 8 aa, Artificial sequence
  Protein classification predicting sequence
AVRTLLRW

SEQ ID NO: 43196 - protein, 8 aa, Artificial sequence
  Protein classification predicting sequence
REGLIDTP

SEQ ID NO: 43197 - protein, 6 aa, Artificial sequence
  Protein classification predicting sequence
MRGIRK

SEQ ID NO: 43198 - protein, 7 aa, Artificial sequence
  Protein classification predicting sequence
KDIPFYS

SEQ ID NO: 43199 - protein, 15 aa, Artificial sequence
  Protein classification predicting sequence
SHCEHHMVPIIGKAH

SEQ ID NO: 43200 - protein, 14 aa, Artificial sequence
  Protein classification predicting sequence
ALVARGLETPLRPP

SEQ ID NO: 43201 - protein, 20 aa, Artificial sequence
  Protein classification predicting sequence
DDSLMETPHRIAKMYVDEIF

SEQ ID NO: 43202 - protein, 9 aa, Artificial sequence
  Protein classification predicting sequence
EFLRAVRHH

SEQ ID NO: 43203 - protein, 24 aa, Artificial sequence
  Protein classification predicting sequence
DNETRKSLIAGHMTEIMQLLNLDL

SEQ ID NO: 43204 - protein, 6 aa, Artificial sequence
  Protein classification predicting sequence
MRGVEK

SEQ ID NO: 43205 - protein, 24 aa, Artificial sequence
  Protein classification predicting sequence
KIIGLSKINRIVRFFAQRPQVQER

SEQ ID NO: 43206 - protein, 9 aa, Artificial sequence
  Protein classification predicting sequence
LVALQTLLE

SEQ ID NO: 43207 - protein, 5 aa, Artificial sequence
  Protein classification predicting sequence
HYCVK

SEQ ID NO: 43208 - protein, 11 aa, Artificial sequence
  Protein classification predicting sequence
HYCVKSRGVMD

SEQ ID NO: 43209 - protein, 22 aa, Artificial sequence
  Protein classification predicting sequence
TTTTALGGIFKSNPATRAEFLH

SEQ ID NO: 43210 - protein, 8 aa, Artificial sequence
  Protein classification predicting sequence
AIYQFLEA

SEQ ID NO: 43211 - protein, 11 aa, Artificial sequence
  Protein classification predicting sequence
EAEHMCMTMRG

SEQ ID NO: 43212 - protein, 5 aa, Artificial sequence
  Protein classification predicting sequence
EHMCM

SEQ ID NO: 43213 - protein, 9 aa, Artificial sequence
  Protein classification predicting sequence
KTITSAVRG

SEQ ID NO: 43214 - protein, 6 aa, Artificial sequence
  Protein classification predicting sequence
TSAVRG

SEQ ID NO: 43215 - protein, 10 aa, Artificial sequence
  Protein classification predicting sequence
SMCEHHLVPF

SEQ ID NO: 43216 - protein, 7 aa, Artificial sequence
  Protein classification predicting sequence
AHVAYIP

SEQ ID NO: 43217 - protein, 14 aa, Artificial sequence
  Protein classification predicting sequence
HEDVVIVKDISFYS

SEQ ID NO: 43218 - protein, 7 aa, Artificial sequence
  Protein classification predicting sequence
VVIEAEH

SEQ ID NO: 43219 - protein, 7 aa, Artificial sequence
  Protein classification predicting sequence
EAEHMCM

SEQ ID NO: 43220 - protein, 11 aa, Artificial sequence
  Protein classification predicting sequence
KDPKEEFTAVF

SEQ ID NO: 43221 - protein, 12 aa, Artificial sequence
  Protein classification predicting sequence
VEAEHMCMTMRG

SEQ ID NO: 43222 - protein, 31 aa, Artificial sequence
  Protein classification predicting sequence
VEAEHMCMTMRGIKKPGSKTITTTARGLYKE

SEQ ID NO: 43223 - protein, 11 aa, Artificial sequence
  Protein classification predicting sequence
SKRPQLQERLT

SEQ ID NO: 43224 - protein, 6 aa, Artificial sequence
  Protein classification predicting sequence
CMTMRG

SEQ ID NO: 43225 - protein, 7 aa, Artificial sequence
  Protein classification predicting sequence
KKPGSKT

SEQ ID NO: 43226 - protein, 7 aa, Artificial sequence
  Protein classification predicting sequence
IENKMKV

SEQ ID NO: 43227 - protein, 11 aa, Artificial sequence
  Protein classification predicting sequence
FFAQRPQVQER

SEQ ID NO: 43228 - protein, 7 aa, Artificial sequence
  Protein classification predicting sequence
TSTCEHH

SEQ ID NO: 43229 - protein, 7 aa, Artificial sequence
  Protein classification predicting sequence
VTIDGKA

SEQ ID NO: 43230 - protein, 6 aa, Artificial sequence
  Protein classification predicting sequence
FSGLDY

SEQ ID NO: 43231 - protein, 10 aa, Artificial sequence
  Protein classification predicting sequence
KVVGISKLAR

SEQ ID NO: 43232 - protein, 10 aa, Artificial sequence
  Protein classification predicting sequence
RRLQVQERLT

SEQ ID NO: 43233 - protein, 5 aa, Artificial sequence
  Protein classification predicting sequence
HMCMV

SEQ ID NO: 43234 - protein, 8 aa, Artificial sequence
  Protein classification predicting sequence
LDLTDDSL

SEQ ID NO: 43235 - protein, 69 aa, Artificial sequence
  Protein classification predicting sequence
NKMKVDEMVTVRDITLTSTCEHHFVTIDGKATVAYIPKDSVIGLSKINRIVQFFAQRPQVQERLTQQIL

SEQ ID NO: 43236 - protein, 6 aa, Artificial sequence
  Protein classification predicting sequence
EGRGIG

SEQ ID NO: 43237 - protein, 6 aa, Artificial sequence
  Protein classification predicting sequence
TNNPRK

SEQ ID NO: 43238 - protein, 6 aa, Artificial sequence
  Protein classification predicting sequence
LMTNNP

SEQ ID NO: 43239 - protein, 8 aa, Artificial sequence
  Protein classification predicting sequence
HSECLTGD

SEQ ID NO: 43240 - protein, 10 aa, Artificial sequence
  Protein classification predicting sequence
EGRGIGLINK

SEQ ID NO: 43241 - protein, 6 aa, Artificial sequence
  Protein classification predicting sequence
AYALQD

SEQ ID NO: 43242 - protein, 6 aa, Artificial sequence
  Protein classification predicting sequence
ADERDF

SEQ ID NO: 43243 - protein, 8 aa, Artificial sequence
  Protein classification predicting sequence
AYSLQDKG

SEQ ID NO: 43244 - protein, 6 aa, Artificial sequence
  Protein classification predicting sequence
RVHSEC

SEQ ID NO: 43245 - protein, 5 aa, Artificial sequence
  Protein classification predicting sequence
RCDCG

SEQ ID NO: 43246 - protein, 10 aa, Artificial sequence
  Protein classification predicting sequence
HSECLTGDVF

SEQ ID NO: 43247 - protein, 6 aa, Artificial sequence
  Protein classification predicting sequence
LLTNNP

SEQ ID NO: 43248 - protein, 7 aa, Artificial sequence
  Protein classification predicting sequence
RLLTNNP

SEQ ID NO: 43249 - protein, 6 aa, Artificial sequence
  Protein classification predicting sequence
TNNPKK

SEQ ID NO: 43250 - protein, 7 aa, Artificial sequence
  Protein classification predicting sequence
EGRGIGL

SEQ ID NO: 43251 - protein, 7 aa, Artificial sequence
  Protein classification predicting sequence
CDCGPQL

SEQ ID NO: 43252 - protein, 8 aa, Artificial sequence
  Protein classification predicting sequence
LGFAADER

SEQ ID NO: 43253 - protein, 9 aa, Artificial sequence
  Protein classification predicting sequence
AGINIVERV

SEQ ID NO: 43254 - protein, 7 aa, Artificial sequence
  Protein classification predicting sequence
YLRQEGR

SEQ ID NO: 43255 - protein, 9 aa, Artificial sequence
  Protein classification predicting sequence
GLYNKIDAY

SEQ ID NO: 43256 - protein, 6 aa, Artificial sequence
  Protein classification predicting sequence
RIHSEC

SEQ ID NO: 43257 - protein, 11 aa, Artificial sequence
  Protein classification predicting sequence
YLRQEGRGIGL

SEQ ID NO: 43258 - protein, 17 aa, Artificial sequence
  Protein classification predicting sequence
GDFLMVGFEELATGHDH

SEQ ID NO: 43259 - protein, 12 aa, Artificial sequence
  Protein classification predicting sequence
HSECLTGDALFS

SEQ ID NO: 43260 - protein, 21 aa, Artificial sequence
  Protein classification predicting sequence
HSECLTGDALFSLRCDCGFQL

SEQ ID NO: 43261 - protein, 9 aa, Artificial sequence
  Protein classification predicting sequence
HSECLTGDA

SEQ ID NO: 43262 - protein, 7 aa, Artificial sequence
  Protein classification predicting sequence
IVERVPL

SEQ ID NO: 43263 - protein, 21 aa, Artificial sequence
  Protein classification predicting sequence
DTVEANHQLGFAADERDFTLC

SEQ ID NO: 43264 - protein, 15 aa, Artificial sequence
  Protein classification predicting sequence
VRLLTNNPKKVEILT

SEQ ID NO: 43265 - protein, 10 aa, Artificial sequence
  Protein classification predicting sequence
DNYGPWTVTP

SEQ ID NO: 43266 - protein, 8 aa, Artificial sequence
  Protein classification predicting sequence
WDAEEFGL

SEQ ID NO: 43267 - protein, 12 aa, Artificial sequence
  Protein classification predicting sequence
AEEFGLIGSTEF

SEQ ID NO: 43268 - protein, 7 aa, Artificial sequence
  Protein classification predicting sequence
IAASYVK

SEQ ID NO: 43269 - protein, 6 aa, Artificial sequence
  Protein classification predicting sequence
QWHPEK

SEQ ID NO: 43270 - protein, 16 aa, Artificial sequence
  Protein classification predicting sequence
VLTTHHHWDHAGGNEK

SEQ ID NO: 43271 - protein, 7 aa, Artificial sequence
  Protein classification predicting sequence
FTGDTLF

SEQ ID NO: 43272 - protein, 10 aa, Artificial sequence
  Protein classification predicting sequence
LAIEFSRVTE

SEQ ID NO: 43273 - protein, 8 aa, Artificial sequence
  Protein classification predicting sequence
WLGRGDKN

SEQ ID NO: 43274 - protein, 15 aa, Artificial sequence
  Protein classification predicting sequence
IVIGEGEIDEAPMLY

SEQ ID NO: 43275 - protein, 9 aa, Artificial sequence
  Protein classification predicting sequence
APDMYMEKL

SEQ ID NO: 43276 - protein, 10 aa, Artificial sequence
  Protein classification predicting sequence
LAKPRHDAVI

SEQ ID NO: 43277 - protein, 8 aa, Artificial sequence
  Protein classification predicting sequence
AIPDGDVA

SEQ ID NO: 43278 - protein, 11 aa, Artificial sequence
  Protein classification predicting sequence
LYGIGGAPEGV

SEQ ID NO: 43279 - protein, 8 aa, Artificial sequence
  Protein classification predicting sequence
IQSIHYLD

SEQ ID NO: 43280 - protein, 6 aa, Artificial sequence
  Protein classification predicting sequence
QSISKV

SEQ ID NO: 43281 - protein, 8 aa, Artificial sequence
  Protein classification predicting sequence
NPMINAGA

SEQ ID NO: 43282 - protein, 6 aa, Artificial sequence
  Protein classification predicting sequence
PAKSGV

SEQ ID NO: 43283 - protein, 9 aa, Artificial sequence
  Protein classification predicting sequence
NPMVNAGAI

SEQ ID NO: 43284 - protein, 8 aa, Artificial sequence
  Protein classification predicting sequence
KSGVGGGI

SEQ ID NO: 43285 - protein, 8 aa, Artificial sequence
  Protein classification predicting sequence
NPFINAGA

SEQ ID NO: 43286 - protein, 42 aa, Artificial sequence
  Protein classification predicting sequence
GADPTGLPFNSVIALELHGGKPLSPLVNAGAIATTSLINAEN

SEQ ID NO: 43287 - protein, 7 aa, Artificial sequence
  Protein classification predicting sequence
PRNPFIN

SEQ ID NO: 43288 - protein, 9 aa, Artificial sequence
  Protein classification predicting sequence
VARSEFEHS

SEQ ID NO: 43289 - protein, 8 aa, Artificial sequence
  Protein classification predicting sequence
LMKSFGNF

SEQ ID NO: 43290 - protein, 6 aa, Artificial sequence
  Protein classification predicting sequence
YFHYCA

SEQ ID NO: 43291 - protein, 8 aa, Artificial sequence
  Protein classification predicting sequence
YDGAGEFA

SEQ ID NO: 43292 - protein, 10 aa, Artificial sequence
  Protein classification predicting sequence
GIGIYGPAID

SEQ ID NO: 43293 - protein, 14 aa, Artificial sequence
  Protein classification predicting sequence
PSKPLNPMINAGAL

SEQ ID NO: 43294 - protein, 8 aa, Artificial sequence
  Protein classification predicting sequence
NRAIAWLL

SEQ ID NO: 43295 - protein, 9 aa, Artificial sequence
  Protein classification predicting sequence
SEKETGDRN

SEQ ID NO: 43296 - protein, 7 aa, Artificial sequence
  Protein classification predicting sequence
RNRALAY

SEQ ID NO: 43297 - protein, 15 aa, Artificial sequence
  Protein classification predicting sequence
QLEMEQGIPRNPFIN

SEQ ID NO: 43298 - protein, 8 aa, Artificial sequence
  Protein classification predicting sequence
GKVADYIP

SEQ ID NO: 43299 - protein, 10 aa, Artificial sequence
  Protein classification predicting sequence
FNSIVQLEHE

SEQ ID NO: 43300 - protein, 12 aa, Artificial sequence
  Protein classification predicting sequence
VNAGAIATTSLI

SEQ ID NO: 43301 - protein, 7 aa, Artificial sequence
  Protein classification predicting sequence
TGLPFNS

SEQ ID NO: 43302 - protein, 9 aa, Artificial sequence
  Protein classification predicting sequence
NADYIPFLA

SEQ ID NO: 43303 - protein, 18 aa, Artificial sequence
  Protein classification predicting sequence
GADPTGLPFNSVIALELH

SEQ ID NO: 43304 - protein, 24 aa, Artificial sequence
  Protein classification predicting sequence
EVNQSEQTTNFHNRAIAWLLYSAG

SEQ ID NO: 43305 - protein, 11 aa, Artificial sequence
  Protein classification predicting sequence
GATLAAGGVNP

SEQ ID NO: 43306 - protein, 7 aa, Artificial sequence
  Protein classification predicting sequence
VGKEPSG

SEQ ID NO: 43307 - protein, 10 aa, Artificial sequence
  Protein classification predicting sequence
PRNPFINAGA

SEQ ID NO: 43308 - protein, 12 aa, Artificial sequence
  Protein classification predicting sequence
GIPRNPFINAGA

SEQ ID NO: 43309 - protein, 15 aa, Artificial sequence
  Protein classification predicting sequence
GIPRNPFINAGALVV

SEQ ID NO: 43310 - protein, 7 aa, Artificial sequence
  Protein classification predicting sequence
KSGVGGG

SEQ ID NO: 43311 - protein, 8 aa, Artificial sequence
  Protein classification predicting sequence
RVDVEPTG

SEQ ID NO: 43312 - protein, 7 aa, Artificial sequence
  Protein classification predicting sequence
EIWQRVG

SEQ ID NO: 43313 - protein, 8 aa, Artificial sequence
  Protein classification predicting sequence
QRMLEVVR

SEQ ID NO: 43314 - protein, 9 aa, Artificial sequence
  Protein classification predicting sequence
YFHYCALKM

SEQ ID NO: 43315 - protein, 9 aa, Artificial sequence
  Protein classification predicting sequence
QARQINALM

SEQ ID NO: 43316 - protein, 10 aa, Artificial sequence
  Protein classification predicting sequence
PGKSGVGGGI

SEQ ID NO: 43317 - protein, 6 aa, Artificial sequence
  Protein classification predicting sequence
VWSPEL

SEQ ID NO: 43318 - protein, 8 aa, Artificial sequence
  Protein classification predicting sequence
FSIQSISK

SEQ ID NO: 43319 - protein, 8 aa, Artificial sequence
  Protein classification predicting sequence
FNSLVQLE

SEQ ID NO: 43320 - protein, 6 aa, Artificial sequence
  Protein classification predicting sequence
MKSFGN

SEQ ID NO: 43321 - protein, 14 aa, Artificial sequence
  Protein classification predicting sequence
MLTCGHYDGSGDFA

SEQ ID NO: 43322 - protein, 11 aa, Artificial sequence
  Protein classification predicting sequence
LGIAICTVDGQ

SEQ ID NO: 43323 - protein, 21 aa, Artificial sequence
  Protein classification predicting sequence
ERFSIQSISKVLSLVVAMRHY

SEQ ID NO: 43324 - protein, 29 aa, Artificial sequence
  Protein classification predicting sequence
VARSEFEHSARNAAIAWLMKSFGNFHHDV

SEQ ID NO: 43325 - protein, 16 aa, Artificial sequence
  Protein classification predicting sequence
TVLQNYFHYCALKMSC

SEQ ID NO: 43326 - protein, 13 aa, Artificial sequence
  Protein classification predicting sequence
ELARTFVFLANQG

SEQ ID NO: 43327 - protein, 63 aa, Artificial sequence
  Protein classification predicting sequence
DEPVVTPMQARQINALMATSGMYQNAGEFAWRVGLPAKSGVGGGIVAIVPHEMAIAVWSPELD

SEQ ID NO: 43328 - protein, 6 aa, Artificial sequence
  Protein classification predicting sequence
FNSLVQ

SEQ ID NO: 43329 - protein, 36 aa, Artificial sequence
  Protein classification predicting sequence
RVGKEPSGQAFNSLIQLEMEQGIPRNPFINAGAIVV

SEQ ID NO: 43330 - protein, 8 aa, Artificial sequence
  Protein classification predicting sequence
RLSAPRQR

SEQ ID NO: 43331 - protein, 13 aa, Artificial sequence
  Protein classification predicting sequence
NYFHACALKMSCV

SEQ ID NO: 43332 - protein, 16 aa, Artificial sequence
  Protein classification predicting sequence
PGKSGVGGGIIAVVPG

SEQ ID NO: 43333 - protein, 6 aa, Artificial sequence
  Protein classification predicting sequence
IAVWSP

SEQ ID NO: 43334 - protein, 6 aa, Artificial sequence
  Protein classification predicting sequence
VRPLIG

SEQ ID NO: 43335 - protein, 12 aa, Artificial sequence
  Protein classification predicting sequence
YDKVVAASEMMH

SEQ ID NO: 43336 - protein, 7 aa, Artificial sequence
  Protein classification predicting sequence
HGDRNAA

SEQ ID NO: 43337 - protein, 12 aa, Artificial sequence
  Protein classification predicting sequence
DLLFYTIAEGQE

SEQ ID NO: 43338 - protein, 7 aa, Artificial sequence
  Protein classification predicting sequence
KFVIPDF

SEQ ID NO: 43339 - protein, 9 aa, Artificial sequence
  Protein classification predicting sequence
CTVDGQRHS

SEQ ID NO: 43340 - protein, 11 aa, Artificial sequence
  Protein classification predicting sequence
PFCLQSCVKPL

SEQ ID NO: 43341 - protein, 13 aa, Artificial sequence
  Protein classification predicting sequence
PHNPMVNAGAIVV

SEQ ID NO: 43342 - protein, 10 aa, Artificial sequence
  Protein classification predicting sequence
GFSNATFQSE

SEQ ID NO: 43343 - protein, 11 aa, Artificial sequence
  Protein classification predicting sequence
SVMAATLANGG

SEQ ID NO: 43344 - protein, 32 aa, Artificial sequence
  Protein classification predicting sequence
EAVRNTLSLMHSCGMYDFSGQFAFHVGLPAKS

SEQ ID NO: 43345 - protein, 13 aa, Artificial sequence
  Protein classification predicting sequence
ILLVVPNVMGMMC

SEQ ID NO: 43346 - protein, 10 aa, Artificial sequence
  Protein classification predicting sequence
NFHNYDNLRH

SEQ ID NO: 43347 - protein, 16 aa, Artificial sequence
  Protein classification predicting sequence
DYDSRTALHVAAAEGH

SEQ ID NO: 43348 - protein, 8 aa, Artificial sequence
  Protein classification predicting sequence
EACKVNPF

SEQ ID NO: 43349 - protein, 8 aa, Artificial sequence
  Protein classification predicting sequence
ALTVGVGT

SEQ ID NO: 43350 - protein, 6 aa, Artificial sequence
  Protein classification predicting sequence
EHPESY

SEQ ID NO: 43351 - protein, 9 aa, Artificial sequence
  Protein classification predicting sequence
HPESYHSFM

SEQ ID NO: 43352 - protein, 6 aa, Artificial sequence
  Protein classification predicting sequence
RFFDGD

SEQ ID NO: 43353 - protein, 9 aa, Artificial sequence
  Protein classification predicting sequence
LTDPAYHCA

SEQ ID NO: 43354 - protein, 11 aa, Artificial sequence
  Protein classification predicting sequence
PAVGVINIPAA

SEQ ID NO: 43355 - protein, 23 aa, Artificial sequence
  Protein classification predicting sequence
LAAAGAAVTVAVGTAAAWAHAGA

SEQ ID NO: 43356 - protein, 15 aa, Artificial sequence
  Protein classification predicting sequence
EDLTDPAYHCARVGQ

SEQ ID NO: 43357 - protein, 7 aa, Artificial sequence
  Protein classification predicting sequence
PQALQLH

SEQ ID NO: 43358 - protein, 28 aa, Artificial sequence
  Protein classification predicting sequence
DGHPAVGVINIPAANIASRYDQLVTRVV

SEQ ID NO: 43359 - protein, 9 aa, Artificial sequence
  Protein classification predicting sequence
CAFLSEKCM

SEQ ID NO: 43360 - protein, 8 aa, Artificial sequence
  Protein classification predicting sequence
FNVFSDAA

SEQ ID NO: 43361 - protein, 10 aa, Artificial sequence
  Protein classification predicting sequence
AAGRRGPRAA

SEQ ID NO: 43362 - protein, 8 aa, Artificial sequence
  Protein classification predicting sequence
IVTCTAED

SEQ ID NO: 43363 - protein, 6 aa, Artificial sequence
  Protein classification predicting sequence
WKVTGM

SEQ ID NO: 43364 - protein, 14 aa, Artificial sequence
  Protein classification predicting sequence
HPAVGVINIPAANI

SEQ ID NO: 43365 - protein, 7 aa, Artificial sequence
  Protein classification predicting sequence
TRVVTHE

SEQ ID NO: 43366 - protein, 10 aa, Artificial sequence
  Protein classification predicting sequence
VAKAREQYGC

SEQ ID NO: 43367 - protein, 12 aa, Artificial sequence
  Protein classification predicting sequence
GSAGSHIKMRNA

SEQ ID NO: 43368 - protein, 13 aa, Artificial sequence
  Protein classification predicting sequence
QHRCIHDAMQARV

SEQ ID NO: 43369 - protein, 9 aa, Artificial sequence
  Protein classification predicting sequence
AARCIDGAF

SEQ ID NO: 43370 - protein, 12 aa, Artificial sequence
  Protein classification predicting sequence
CDTATRTYSVQV

SEQ ID NO: 43371 - protein, 15 aa, Artificial sequence
  Protein classification predicting sequence
NSSTAVAKAREQYGC

SEQ ID NO: 43372 - protein, 8 aa, Artificial sequence
  Protein classification predicting sequence
FMDYCPVV

SEQ ID NO: 43373 - protein, 6 aa, Artificial sequence
  Protein classification predicting sequence
WIGNGA

SEQ ID NO: 43374 - protein, 8 aa, Artificial sequence
  Protein classification predicting sequence
AFDLDGTL

SEQ ID NO: 43375 - protein, 15 aa, Artificial sequence
  Protein classification predicting sequence
AFDLDGTLVDSAPGL

SEQ ID NO: 43376 - protein, 11 aa, Artificial sequence
  Protein classification predicting sequence
RILRKLFDRYY

SEQ ID NO: 43377 - protein, 12 aa, Artificial sequence
  Protein classification predicting sequence
TNKPTPFVAPLL

SEQ ID NO: 43378 - protein, 26 aa, Artificial sequence
  Protein classification predicting sequence
IKLIAFDLDGTLLDSVPDLAVAADQA

SEQ ID NO: 43379 - protein, 7 aa, Artificial sequence
  Protein classification predicting sequence
GNGADVL

SEQ ID NO: 43380 - protein, 19 aa, Artificial sequence
  Protein classification predicting sequence
MLMVGDSKNDILAAKNAGC

SEQ ID NO: 43381 - protein, 12 aa, Artificial sequence
  Protein classification predicting sequence
ALVTNKPSKFVP

SEQ ID NO: 43382 - protein, 20 aa, Artificial sequence
  Protein classification predicting sequence
IRGVAFDLDGTLVDSAPGLA

SEQ ID NO: 43383 - protein, 14 aa, Artificial sequence
  Protein classification predicting sequence
RTDLAVEAHQMLQE

SEQ ID NO: 43384 - protein, 36 aa, Artificial sequence
  Protein classification predicting sequence
MGKKPGNYLTLEVQGIRQQDTELQQKVERIFAKEFS

SEQ ID NO: 43385 - protein, 83 aa, Artificial sequence
  Protein classification predicting sequence
FLEEVGVTKEASCLIVGLGNWNVTPDALGPIVVENVLVTRHLFQLQPESVEEGFRPVSAIRPGVMGITGIETSDVIYGIIEKT

SEQ ID NO: 43386 - protein, 44 aa, Artificial sequence
  Protein classification predicting sequence
PDFVIAIDALAARSIERVNSTIQISDTGIHPGSGVGNKRKELSK

SEQ ID NO: 43387 - protein, 14 aa, Artificial sequence
  Protein classification predicting sequence
EDMPDEKSRNMFLG

SEQ ID NO: 43388 - protein, 7 aa, Artificial sequence
  Protein classification predicting sequence
LVTRHLF

SEQ ID NO: 43389 - protein, 14 aa, Artificial sequence
  Protein classification predicting sequence
TGIETSDVIYGIIE

SEQ ID NO: 43390 - protein, 7 aa, Artificial sequence
  Protein classification predicting sequence
RSIERVN

SEQ ID NO: 43391 - protein, 7 aa, Artificial sequence
  Protein classification predicting sequence
LKHFGRE

SEQ ID NO: 43392 - protein, 18 aa, Artificial sequence
  Protein classification predicting sequence
FIEDMANVIASGLNAALH

SEQ ID NO: 43393 - protein, 16 aa, Artificial sequence
  Protein classification predicting sequence
ASCLIVGLGNWNVTPD

SEQ ID NO: 43394 - protein, 7 aa, Artificial sequence
  Protein classification predicting sequence
TGIETSD

SEQ ID NO: 43395 - protein, 12 aa, Artificial sequence
  Protein classification predicting sequence
IERVNSTIQISD

SEQ ID NO: 43396 - protein, 7 aa, Artificial sequence
  Protein classification predicting sequence
ITSDTID

SEQ ID NO: 43397 - protein, 8 aa, Artificial sequence
  Protein classification predicting sequence
GFRPVSAI

SEQ ID NO: 43398 - protein, 27 aa, Artificial sequence
  Protein classification predicting sequence
PTVVDAVSITSDTIDFILKHFGREMKE

SEQ ID NO: 43399 - protein, 10 aa, Artificial sequence
  Protein classification predicting sequence
TFGEKKKLTE

SEQ ID NO: 43400 - protein, 8 aa, Artificial sequence
  Protein classification predicting sequence
FIEDMANV

SEQ ID NO: 43401 - protein, 10 aa, Artificial sequence
  Protein classification predicting sequence
ILKHFGREMK

SEQ ID NO: 43402 - protein, 8 aa, Artificial sequence
  Protein classification predicting sequence
RVNSTIQI

SEQ ID NO: 43403 - protein, 7 aa, Artificial sequence
  Protein classification predicting sequence
PGSGVGN

SEQ ID NO: 43404 - protein, 8 aa, Artificial sequence
  Protein classification predicting sequence
GVPTVVDA

SEQ ID NO: 43405 - protein, 7 aa, Artificial sequence
  Protein classification predicting sequence
VTPKEVD

SEQ ID NO: 43406 - protein, 12 aa, Artificial sequence
  Protein classification predicting sequence
VGLGNWNVTPDA

SEQ ID NO: 43407 - protein, 7 aa, Artificial sequence
  Protein classification predicting sequence
TPDALGP

SEQ ID NO: 43408 - protein, 8 aa, Artificial sequence
  Protein classification predicting sequence
DEEKRKLI

SEQ ID NO: 43409 - protein, 14 aa, Artificial sequence
  Protein classification predicting sequence
PLGHNLMVTPKEVD

SEQ ID NO: 43410 - protein, 7 aa, Artificial sequence
  Protein classification predicting sequence
LTNKHVV

SEQ ID NO: 43411 - protein, 12 aa, Artificial sequence
  Protein classification predicting sequence
NITVTGYPGDKP

SEQ ID NO: 43412 - protein, 6 aa, Artificial sequence
  Protein classification predicting sequence
ATMWES

SEQ ID NO: 43413 - protein, 10 aa, Artificial sequence
  Protein classification predicting sequence
GGNSGSPVFN

SEQ ID NO: 43414 - protein, 9 aa, Artificial sequence
  Protein classification predicting sequence
VSSFFTYTG

SEQ ID NO: 43415 - protein, 7 aa, Artificial sequence
  Protein classification predicting sequence
KIMMNLW

SEQ ID NO: 43416 - protein, 10 aa, Artificial sequence
  Protein classification predicting sequence
WDEIDIEFLG

SEQ ID NO: 43417 - protein, 13 aa, Artificial sequence
  Protein classification predicting sequence
DTTKVQFNYYTNG

SEQ ID NO: 43418 - protein, 10 aa, Artificial sequence
  Protein classification predicting sequence
FNCTWRANNV

SEQ ID NO: 43419 - protein, 8 aa, Artificial sequence
  Protein classification predicting sequence
YGYGLYEV

SEQ ID NO: 43420 - protein, 9 aa, Artificial sequence
  Protein classification predicting sequence
HTYAFDWQP

SEQ ID NO: 43421 - protein, 7 aa, Artificial sequence
  Protein classification predicting sequence
WLGSYNG

SEQ ID NO: 43422 - protein, 8 aa, Artificial sequence
  Protein classification predicting sequence
DPTPPSDP

SEQ ID NO: 43423 - protein, 8 aa, Artificial sequence
  Protein classification predicting sequence
FETMNEPR

SEQ ID NO: 43424 - protein, 7 aa, Artificial sequence
  Protein classification predicting sequence
WRGDSGL

SEQ ID NO: 43425 - protein, 9 aa, Artificial sequence
  Protein classification predicting sequence
KWLRDDWGI

SEQ ID NO: 43426 - protein, 14 aa, Artificial sequence
  Protein classification predicting sequence
NIIIVGTGTWSQDV

SEQ ID NO: 43427 - protein, 12 aa, Artificial sequence
  Protein classification predicting sequence
GAAIFVSEWGTS

SEQ ID NO: 43428 - protein, 15 aa, Artificial sequence
  Protein classification predicting sequence
DLTGGWYDAGDHVKF

SEQ ID NO: 43429 - protein, 9 aa, Artificial sequence
  Protein classification predicting sequence
QLRGMSTHG

SEQ ID NO: 43430 - protein, 7 aa, Artificial sequence
  Protein classification predicting sequence
YVIVDWH

SEQ ID NO: 43431 - protein, 9 aa, Artificial sequence
  Protein classification predicting sequence
YEIANEPNG

SEQ ID NO: 43432 - protein, 8 aa, Artificial sequence
  Protein classification predicting sequence
MYAFHFYA

SEQ ID NO: 43433 - protein, 7 aa, Artificial sequence
  Protein classification predicting sequence
DHSWWGP

SEQ ID NO: 43434 - protein, 7 aa, Artificial sequence
  Protein classification predicting sequence
HFYAGTH

SEQ ID NO: 43435 - protein, 8 aa, Artificial sequence
  Protein classification predicting sequence
GWYDAGDH

SEQ ID NO: 43436 - protein, 6 aa, Artificial sequence
  Protein classification predicting sequence
GWNLGN

SEQ ID NO: 43437 - protein, 9 aa, Artificial sequence
  Protein classification predicting sequence
NPNSGDTGG

SEQ ID NO: 43438 - protein, 7 aa, Artificial sequence
  Protein classification predicting sequence
PHHRTAH

SEQ ID NO: 43439 - protein, 8 aa, Artificial sequence
  Protein classification predicting sequence
DGNIDAID

SEQ ID NO: 43440 - protein, 7 aa, Artificial sequence
  Protein classification predicting sequence
FYNSWSG

SEQ ID NO: 43441 - protein, 7 aa, Artificial sequence
  Protein classification predicting sequence
SSHGLQW

SEQ ID NO: 43442 - protein, 16 aa, Artificial sequence
  Protein classification predicting sequence
IIDWHILSDNDPNIYK

SEQ ID NO: 43443 - protein, 11 aa, Artificial sequence
  Protein classification predicting sequence
IIVGTGTWSQD

SEQ ID NO: 43444 - protein, 7 aa, Artificial sequence
  Protein classification predicting sequence
FVTEWGT

SEQ ID NO: 43445 - protein, 13 aa, Artificial sequence
  Protein classification predicting sequence
QLKGMSSHGLQWY

SEQ ID NO: 43446 - protein, 12 aa, Artificial sequence
  Protein classification predicting sequence
EWGTSDASGNGG

SEQ ID NO: 43447 - protein, 7 aa, Artificial sequence
  Protein classification predicting sequence
WRFNPSY

SEQ ID NO: 43448 - protein, 6 aa, Artificial sequence
  Protein classification predicting sequence
DANWRW

SEQ ID NO: 43449 - protein, 7 aa, Artificial sequence
  Protein classification predicting sequence
EGWEPSS

SEQ ID NO: 43450 - protein, 6 aa, Artificial sequence
  Protein classification predicting sequence
SNIKFG

SEQ ID NO: 43451 - protein, 6 aa, Artificial sequence
  Protein classification predicting sequence
MDADGG

SEQ ID NO: 43452 - protein, 6 aa, Artificial sequence
  Protein classification predicting sequence
CGGTYS

SEQ ID NO: 43453 - protein, 11 aa, Artificial sequence
  Protein classification predicting sequence
GMVLVMSLWDD

SEQ ID NO: 43454 - protein, 9 aa, Artificial sequence
  Protein classification predicting sequence
SNIKFGPIG

SEQ ID NO: 43455 - protein, 6 aa, Artificial sequence
  Protein classification predicting sequence
NWRWTH

SEQ ID NO: 43456 - protein, 7 aa, Artificial sequence
  Protein classification predicting sequence
CDPDGCD

SEQ ID NO: 43457 - protein, 6 aa, Artificial sequence
  Protein classification predicting sequence
MVLVMS

SEQ ID NO: 43458 - protein, 7 aa, Artificial sequence
  Protein classification predicting sequence
FGPIGST

SEQ ID NO: 43459 - protein, 9 aa, Artificial sequence
  Protein classification predicting sequence
GSVVIDANW

SEQ ID NO: 43460 - protein, 27 aa, Artificial sequence
  Protein classification predicting sequence
AGAKYGTGYCDSQCPRDLKFINGQANV

SEQ ID NO: 43461 - protein, 9 aa, Artificial sequence
  Protein classification predicting sequence
VLNPYYSQC

SEQ ID NO: 43462 - protein, 16 aa, Artificial sequence
  Protein classification predicting sequence
TNCYDGNTWSSTLCPD

SEQ ID NO: 43463 - protein, 11 aa, Artificial sequence
  Protein classification predicting sequence
TCAKNCCLDGA

SEQ ID NO: 43464 - protein, 7 aa, Artificial sequence
  Protein classification predicting sequence
TYQEFTL

SEQ ID NO: 43465 - protein, 31 aa, Artificial sequence
  Protein classification predicting sequence
GNEFSFDVDVSQLPCGLNGALYFVSMDADGG

SEQ ID NO: 43466 - protein, 27 aa, Artificial sequence
  Protein classification predicting sequence
GGHGSCCSEMDIWEANSISEALTPHPC

SEQ ID NO: 43467 - protein, 13 aa, Artificial sequence
  Protein classification predicting sequence
LDTTKKLTVVTQF

SEQ ID NO: 43468 - protein, 8 aa, Artificial sequence
  Protein classification predicting sequence
RYYVQNGV

SEQ ID NO: 43469 - protein, 13 aa, Artificial sequence
  Protein classification predicting sequence
GGMVLVMSLWDDY

SEQ ID NO: 43470 - protein, 7 aa, Artificial sequence
  Protein classification predicting sequence
TCQVLNP

SEQ ID NO: 43471 - protein, 17 aa, Artificial sequence
  Protein classification predicting sequence
AGAKYGTGYCDSQCPRD

SEQ ID NO: 43472 - protein, 8 aa, Artificial sequence
  Protein classification predicting sequence
FVSSNAWD

SEQ ID NO: 43473 - protein, 6 aa, Artificial sequence
  Protein classification predicting sequence
NRKSCS

SEQ ID NO: 43474 - protein, 6 aa, Artificial sequence
  Protein classification predicting sequence
FTRPGS

SEQ ID NO: 43475 - protein, 17 aa, Artificial sequence
  Protein classification predicting sequence
QVALENDEREAKNTWRL

SEQ ID NO: 43476 - protein, 9 aa, Artificial sequence
  Protein classification predicting sequence
TLAISAAAL

SEQ ID NO: 43477 - protein, 17 aa, Artificial sequence
  Protein classification predicting sequence
HDPDYIGGIGKELIVDD

SEQ ID NO: 43478 - protein, 20 aa, Artificial sequence
  Protein classification predicting sequence
QQAILSIKVSTSLGEDPVLT

SEQ ID NO: 43479 - protein, 8 aa, Artificial sequence
  Protein classification predicting sequence
TLMGAEGR

SEQ ID NO: 43480 - protein, 18 aa, Artificial sequence
  Protein classification predicting sequence
TATLHSPYTFNAFTRPGS

SEQ ID NO: 43481 - protein, 11 aa, Artificial sequence
  Protein classification predicting sequence
SRSRITRVSSS

SEQ ID NO: 43482 - protein, 8 aa, Artificial sequence
  Protein classification predicting sequence
FFSTLRSI

SEQ ID NO: 43483 - protein, 15 aa, Artificial sequence
  Protein classification predicting sequence
EREAKNTWRLVFRIA

SEQ ID NO: 43484 - protein, 10 aa, Artificial sequence
  Protein classification predicting sequence
SDVTSFYPSA

SEQ ID NO: 43485 - protein, 16 aa, Artificial sequence
  Protein classification predicting sequence
DWVANYPGVGGGSFID

SEQ ID NO: 43486 - protein, 12 aa, Artificial sequence
  Protein classification predicting sequence
QEGKYVIYKRYN

SEQ ID NO: 43487 - protein, 10 aa, Artificial sequence
  Protein classification predicting sequence
TGVYTDPYPL

SEQ ID NO: 43488 - protein, 8 aa, Artificial sequence
  Protein classification predicting sequence
LTVGTSHF

SEQ ID NO: 43489 - protein, 18 aa, Artificial sequence
  Protein classification predicting sequence
YQRGSSYFSPALLYPMTV

SEQ ID NO: 43490 - protein, 14 aa, Artificial sequence
  Protein classification predicting sequence
RNHTLRGVFGTMLD

SEQ ID NO: 43491 - protein, 9 aa, Artificial sequence
  Protein classification predicting sequence
EREAKNTWR

SEQ ID NO: 43492 - protein, 7 aa, Artificial sequence
  Protein classification predicting sequence
DLVGIPT

SEQ ID NO: 43493 - protein, 20 aa, Artificial sequence
  Protein classification predicting sequence
IMNAITSLSYQINGAANNSG

SEQ ID NO: 43494 - protein, 21 aa, Artificial sequence
  Protein classification predicting sequence
QNRKSCSVSATPLGCDMLCSK

SEQ ID NO: 43495 - protein, 8 aa, Artificial sequence
  Protein classification predicting sequence
TETEEEDY

SEQ ID NO: 43496 - protein, 13 aa, Artificial sequence
  Protein classification predicting sequence
VYGGLKPNSPSDT

SEQ ID NO: 43497 - protein, 25 aa, Artificial sequence
  Protein classification predicting sequence
LSIAEISNTLFGEFRIVPLLVEILK

SEQ ID NO: 43498 - protein, 27 aa, Artificial sequence
  Protein classification predicting sequence
YSMGASTPSDLVGIPTRISRAEEKITS

SEQ ID NO: 43499 - protein, 10 aa, Artificial sequence
  Protein classification predicting sequence
ISRAEEKITS

SEQ ID NO: 43500 - protein, 27 aa, Artificial sequence
  Protein classification predicting sequence
LGSNQDVVDRIYKQVALESPLALLNTE

SEQ ID NO: 43501 - protein, 8 aa, Artificial sequence
  Protein classification predicting sequence
GAPIHDPD

SEQ ID NO: 43502 - protein, 14 aa, Artificial sequence
  Protein classification predicting sequence
TETEEEDYNSAVPT

SEQ ID NO: 43503 - protein, 12 aa, Artificial sequence
  Protein classification predicting sequence
SRSRITRVSSSS

SEQ ID NO: 43504 - protein, 8 aa, Artificial sequence
  Protein classification predicting sequence
PTSMVHGR

SEQ ID NO: 43505 - protein, 11 aa, Artificial sequence
  Protein classification predicting sequence
YGGLKPNSPSD

SEQ ID NO: 43506 - protein, 25 aa, Artificial sequence
  Protein classification predicting sequence
QQAILSIKVSTSLGEDPVLTVPPNT

SEQ ID NO: 43507 - protein, 11 aa, Artificial sequence
  Protein classification predicting sequence
IGGIGKELIVD

SEQ ID NO: 43508 - protein, 33 aa, Artificial sequence
  Protein classification predicting sequence
TETTIMNAITSLSYQINGAANNSGWGAPIHDPD

SEQ ID NO: 43509 - protein, 21 aa, Artificial sequence
  Protein classification predicting sequence
HGRLGFDGQYHEKDLDVTTLF

SEQ ID NO: 43510 - protein, 10 aa, Artificial sequence
  Protein classification predicting sequence
PCQASARCPN

SEQ ID NO: 43511 - protein, 12 aa, Artificial sequence
  Protein classification predicting sequence
CVTGVYTDPYPL

SEQ ID NO: 43512 - protein, 6 aa, Artificial sequence
  Protein classification predicting sequence
QARLNP

SEQ ID NO: 43513 - protein, 14 aa, Artificial sequence
  Protein classification predicting sequence
SAAALAYSMEASTP

SEQ ID NO: 43514 - protein, 28 aa, Artificial sequence
  Protein classification predicting sequence
YVIYKRYNDTCPDEQDYQIRMAKSSYKP

SEQ ID NO: 43515 - protein, 13 aa, Artificial sequence
  Protein classification predicting sequence
NHTLRGVFGTMLD

SEQ ID NO: 43516 - protein, 10 aa, Artificial sequence
  Protein classification predicting sequence
IMNAITSLSY

SEQ ID NO: 43517 - protein, 15 aa, Artificial sequence
  Protein classification predicting sequence
MAKSSYKPGRFGGKR

SEQ ID NO: 43518 - protein, 12 aa, Artificial sequence
  Protein classification predicting sequence
NFIPAPTTGSGC

SEQ ID NO: 43519 - protein, 7 aa, Artificial sequence
  Protein classification predicting sequence
AFTRPGS

SEQ ID NO: 43520 - protein, 7 aa, Artificial sequence
  Protein classification predicting sequence
LIRQEVI

SEQ ID NO: 43521 - protein, 7 aa, Artificial sequence
  Protein classification predicting sequence
NIQSSVQ

SEQ ID NO: 43522 - protein, 9 aa, Artificial sequence
  Protein classification predicting sequence
FWRCPVGEP

SEQ ID NO: 43523 - protein, 35 aa, Artificial sequence
  Protein classification predicting sequence
AIYAYSSNLITQGCADIGKSYQVLQLGYISLNSDM

SEQ ID NO: 43524 - protein, 10 aa, Artificial sequence
  Protein classification predicting sequence
DIGKSYQVLQ

SEQ ID NO: 43525 - protein, 15 aa, Artificial sequence
  Protein classification predicting sequence
SHTYDINDNRKSCSV

SEQ ID NO: 43526 - protein, 7 aa, Artificial sequence
  Protein classification predicting sequence
NRKSCSV

SEQ ID NO: 43527 - protein, 9 aa, Artificial sequence
  Protein classification predicting sequence
GTRGYQLCS

SEQ ID NO: 43528 - protein, 19 aa, Artificial sequence
  Protein classification predicting sequence
LIFLGYGGLTTPLQGDTKC

SEQ ID NO: 43529 - protein, 11 aa, Artificial sequence
  Protein classification predicting sequence
YIYTRSSGWHS

SEQ ID NO: 43530 - protein, 17 aa, Artificial sequence
  Protein classification predicting sequence
ECISGVYTDAYPLSPDA

SEQ ID NO: 43531 - protein, 18 aa, Artificial sequence
  Protein classification predicting sequence
TLYANTSRVNPTIMYSNT

SEQ ID NO: 43532 - protein, 9 aa, Artificial sequence
  Protein classification predicting sequence
YTTTSCITH

SEQ ID NO: 43533 - protein, 11 aa, Artificial sequence
  Protein classification predicting sequence
KGYCFHIVEIN

SEQ ID NO: 43534 - protein, 16 aa, Artificial sequence
  Protein classification predicting sequence
SLNTLQPMLFKTSIPK

SEQ ID NO: 43535 - protein, 15 aa, Artificial sequence
  Protein classification predicting sequence
ATSPNGCTRIPSFSL

SEQ ID NO: 43536 - protein, 7 aa, Artificial sequence
  Protein classification predicting sequence
INGINKF

SEQ ID NO: 43537 - protein, 6 aa, Artificial sequence
  Protein classification predicting sequence
CYTHNV

SEQ ID NO: 43538 - protein, 16 aa, Artificial sequence
  Protein classification predicting sequence
NTRLLTIQSHVQNYIP

SEQ ID NO: 43539 - protein, 13 aa, Artificial sequence
  Protein classification predicting sequence
SLTQQMSDLRKFI

SEQ ID NO: 43540 - protein, 11 aa, Artificial sequence
  Protein classification predicting sequence
LIYAYTSNLIT

SEQ ID NO: 43541 - protein, 11 aa, Artificial sequence
  Protein classification predicting sequence
NSDLVPDLNPR

SEQ ID NO: 43542 - protein, 32 aa, Artificial sequence
  Protein classification predicting sequence
DNRKSCSLALLNTDVYQLCSTPKVDERSDYAS

SEQ ID NO: 43543 - protein, 10 aa, Artificial sequence
  Protein classification predicting sequence
GIEDIVLDIV

SEQ ID NO: 43544 - protein, 16 aa, Artificial sequence
  Protein classification predicting sequence
PYAALYPSVGPGIYYK

SEQ ID NO: 43545 - protein, 10 aa, Artificial sequence
  Protein classification predicting sequence
IFLGYGGLEH

SEQ ID NO: 43546 - protein, 13 aa, Artificial sequence
  Protein classification predicting sequence
RRMVNSIIVVDKG

SEQ ID NO: 43547 - protein, 16 aa, Artificial sequence
  Protein classification predicting sequence
MRQNYWGSEGRLLLLG

SEQ ID NO: 43548 - protein, 17 aa, Artificial sequence
  Protein classification predicting sequence
IYIYTRSTSWHSKLQLG

SEQ ID NO: 43549 - protein, 12 aa, Artificial sequence
  Protein classification predicting sequence
WTWHNVLSRPGN

SEQ ID NO: 43550 - protein, 25 aa, Artificial sequence
  Protein classification predicting sequence
ECPWGHSCPDGCITGVYTDAYPLNP

SEQ ID NO: 43551 - protein, 7 aa, Artificial sequence
  Protein classification predicting sequence
RVNELAI

SEQ ID NO: 43552 - protein, 11 aa, Artificial sequence
  Protein classification predicting sequence
TERVNELAIRN

SEQ ID NO: 43553 - protein, 22 aa, Artificial sequence
  Protein classification predicting sequence
KDAGNELETSMATHGNKLTNKI

SEQ ID NO: 43554 - protein, 10 aa, Artificial sequence
  Protein classification predicting sequence
TFQPMLFKTE

SEQ ID NO: 43555 - protein, 10 aa, Artificial sequence
  Protein classification predicting sequence
DINNEFMEIT

SEQ ID NO: 43556 - protein, 24 aa, Artificial sequence
  Protein classification predicting sequence
HDVGIKPLNPDDFWRCTSGLPSLM

SEQ ID NO: 43557 - protein, 7 aa, Artificial sequence
  Protein classification predicting sequence
RIPSFSL

SEQ ID NO: 43558 - protein, 6 aa, Artificial sequence
  Protein classification predicting sequence
CPKECI

SEQ ID NO: 43559 - protein, 10 aa, Artificial sequence
  Protein classification predicting sequence
GCTRIPSFSL

SEQ ID NO: 43560 - protein, 7 aa, Artificial sequence
  Protein classification predicting sequence
TLYLSDG

SEQ ID NO: 43561 - protein, 33 aa, Artificial sequence
  Protein classification predicting sequence
AALINDNRYINGINQFYFSIAEGRNLTLGPLLN

SEQ ID NO: 43562 - protein, 7 aa, Artificial sequence
  Protein classification predicting sequence
LMGAEGR

SEQ ID NO: 43563 - protein, 7 aa, Artificial sequence
  Protein classification predicting sequence
DQEGGRV

SEQ ID NO: 43564 - protein, 7 aa, Artificial sequence
  Protein classification predicting sequence
KHFPGHG

SEQ ID NO: 43565 - protein, 9 aa, Artificial sequence
  Protein classification predicting sequence
GIRVIPEFD

SEQ ID NO: 43566 - protein, 7 aa, Artificial sequence
  Protein classification predicting sequence
HLGGDEV

SEQ ID NO: 43567 - protein, 7 aa, Artificial sequence
  Protein classification predicting sequence
LSAPWYL

SEQ ID NO: 43568 - protein, 11 aa, Artificial sequence
  Protein classification predicting sequence
PGLLTPCYSGS

SEQ ID NO: 43569 - protein, 7 aa, Artificial sequence
  Protein classification predicting sequence
PRFPHRG

SEQ ID NO: 43570 - protein, 15 aa, Artificial sequence
  Protein classification predicting sequence
LLDTSRHYLPLSSIL

SEQ ID NO: 43571 - protein, 10 aa, Artificial sequence
  Protein classification predicting sequence
LRGLETFSQL

SEQ ID NO: 43572 - protein, 8 aa, Artificial sequence
  Protein classification predicting sequence
DTSRHYLP

SEQ ID NO: 43573 - protein, 10 aa, Artificial sequence
  Protein classification predicting sequence
EYARLRGIRV

SEQ ID NO: 43574 - protein, 7 aa, Artificial sequence
  Protein classification predicting sequence
PRLWPRA

SEQ ID NO: 43575 - protein, 6 aa, Artificial sequence
  Protein classification predicting sequence
SWTAKL

SEQ ID NO: 43576 - protein, 9 aa, Artificial sequence
  Protein classification predicting sequence
GEEAVETVI

SEQ ID NO: 43577 - protein, 6 aa, Artificial sequence
  Protein classification predicting sequence
ADLWFH

SEQ ID NO: 43578 - protein, 8 aa, Artificial sequence
  Protein classification predicting sequence
RRFGLSGH

SEQ ID NO: 43579 - protein, 15 aa, Artificial sequence
  Protein classification predicting sequence
ELARREGLSGLEEKA

SEQ ID NO: 43580 - protein, 6 aa, Artificial sequence
  Protein classification predicting sequence
AWMNRE

SEQ ID NO: 43581 - protein, 8 aa, Artificial sequence
  Protein classification predicting sequence
LKDPDAIY

SEQ ID NO: 43582 - protein, 5 aa, Artificial sequence
  Protein classification predicting sequence
DCDGD

SEQ ID NO: 43583 - protein, 6 aa, Artificial sequence
  Protein classification predicting sequence
LMVAWM

SEQ ID NO: 43584 - protein, 8 aa, Artificial sequence
  Protein classification predicting sequence
GIACHTGR

SEQ ID NO: 43585 - protein, 7 aa, Artificial sequence
  Protein classification predicting sequence
DPVLKDP

SEQ ID NO: 43586 - protein, 6 aa, Artificial sequence
  Protein classification predicting sequence
YWSRSR

SEQ ID NO: 43587 - protein, 6 aa, Artificial sequence
  Protein classification predicting sequence
TKRTWF

SEQ ID NO: 43588 - protein, 6 aa, Artificial sequence
  Protein classification predicting sequence
LDCDGD

SEQ ID NO: 43589 - protein, 8 aa, Artificial sequence
  Protein classification predicting sequence
AHYFSRSR

SEQ ID NO: 43590 - protein, 9 aa, Artificial sequence
  Protein classification predicting sequence
TWFFSRSRN

SEQ ID NO: 43591 - protein, 6 aa, Artificial sequence
  Protein classification predicting sequence
KGEESG

SEQ ID NO: 43592 - protein, 8 aa, Artificial sequence
  Protein classification predicting sequence
VLMLAYMN

SEQ ID NO: 43593 - protein, 7 aa, Artificial sequence
  Protein classification predicting sequence
QVGGACH

SEQ ID NO: 43594 - protein, 7 aa, Artificial sequence
  Protein classification predicting sequence
WMKGEES

SEQ ID NO: 43595 - protein, 7 aa, Artificial sequence
  Protein classification predicting sequence
GGACHTG

SEQ ID NO: 43596 - protein, 11 aa, Artificial sequence
  Protein classification predicting sequence
QNGGIACHTGR

SEQ ID NO: 43597 - protein, 9 aa, Artificial sequence
  Protein classification predicting sequence
GGIACHTGR

SEQ ID NO: 43598 - protein, 7 aa, Artificial sequence
  Protein classification predicting sequence
IACHTGR

SEQ ID NO: 43599 - protein, 7 aa, Artificial sequence
  Protein classification predicting sequence
KGEESGH

SEQ ID NO: 43600 - protein, 11 aa, Artificial sequence
  Protein classification predicting sequence
SRSRGKLWRKG

SEQ ID NO: 43601 - protein, 7 aa, Artificial sequence
  Protein classification predicting sequence
KGDTSGH

SEQ ID NO: 43602 - protein, 8 aa, Artificial sequence
  Protein classification predicting sequence
SRSRNELW

SEQ ID NO: 43603 - protein, 5 aa, Artificial sequence
  Protein classification predicting sequence
SCFYR

SEQ ID NO: 43604 - protein, 10 aa, Artificial sequence
  Protein classification predicting sequence
KRDSYWSTSP

SEQ ID NO: 43605 - protein, 15 aa, Artificial sequence
  Protein classification predicting sequence
FTQWALSIATVIICI

SEQ ID NO: 43606 - protein, 9 aa, Artificial sequence
  Protein classification predicting sequence
YSMTVEALN

SEQ ID NO: 43607 - protein, 15 aa, Artificial sequence
  Protein classification predicting sequence
EVKESLTSLIRQEVI

SEQ ID NO: 43608 - protein, 14 aa, Artificial sequence
  Protein classification predicting sequence
DLDHPFSALYPSVG

SEQ ID NO: 43609 - protein, 27 aa, Artificial sequence
  Protein classification predicting sequence
GIATEGSLIFLGYGGLTTPLQGDTKCR

SEQ ID NO: 43610 - protein, 27 aa, Artificial sequence
  Protein classification predicting sequence
VYIYTRSSGWHSQLQIGVLDVSHPLTI

SEQ ID NO: 43611 - protein, 6 aa, Artificial sequence
  Protein classification predicting sequence
LSRPGN

SEQ ID NO: 43612 - protein, 7 aa, Artificial sequence
  Protein classification predicting sequence
KGYCFHI

SEQ ID NO: 43613 - protein, 22 aa, Artificial sequence
  Protein classification predicting sequence
NIQSSVQTGIPVLLNKNSRDVI

SEQ ID NO: 43614 - protein, 18 aa, Artificial sequence
  Protein classification predicting sequence
VDERTDYSSDGIEDLVLD

SEQ ID NO: 43615 - protein, 24 aa, Artificial sequence
  Protein classification predicting sequence
IRVTTIPITQNYLGAEGRLLKLGD

SEQ ID NO: 43616 - protein, 9 aa, Artificial sequence
  Protein classification predicting sequence
DNAGGIAEM

SEQ ID NO: 43617 - protein, 8 aa, Artificial sequence
  Protein classification predicting sequence
LDAVGNTT

SEQ ID NO: 43618 - protein, 7 aa, Artificial sequence
  Protein classification predicting sequence
KEMIPPG

SEQ ID NO: 43619 - protein, 11 aa, Artificial sequence
  Protein classification predicting sequence
GDTVGDPFKDT

SEQ ID NO: 43620 - protein, 22 aa, Artificial sequence
  Protein classification predicting sequence
IPEDDPRNPAVIADNVGDNVGD

SEQ ID NO: 43621 - protein, 27 aa, Artificial sequence
  Protein classification predicting sequence
IPEDDPRNPAVIADNVGDNVGDIAGMG

SEQ ID NO: 43622 - protein, 6 aa, Artificial sequence
  Protein classification predicting sequence
WDNAKK

SEQ ID NO: 43623 - protein, 10 aa, Artificial sequence
  Protein classification predicting sequence
LVAGLALLGV

SEQ ID NO: 43624 - protein, 10 aa, Artificial sequence
  Protein classification predicting sequence
AVDLLTKAAI

SEQ ID NO: 43625 - protein, 20 aa, Artificial sequence
  Protein classification predicting sequence
VTGDTVGDPYKDTAGPAVNP

SEQ ID NO: 43626 - protein, 13 aa, Artificial sequence
  Protein classification predicting sequence
IKITNIVALLLLA

SEQ ID NO: 43627 - protein, 8 aa, Artificial sequence
  Protein classification predicting sequence
GFGASLIS

SEQ ID NO: 43628 - protein, 7 aa, Artificial sequence
  Protein classification predicting sequence
ADLFETY

SEQ ID NO: 43629 - protein, 7 aa, Artificial sequence
  Protein classification predicting sequence
GSEAHKA

SEQ ID NO: 43630 - protein, 7 aa, Artificial sequence
  Protein classification predicting sequence
KDTAGPA

SEQ ID NO: 43631 - protein, 7 aa, Artificial sequence
  Protein classification predicting sequence
GGGIFTK

SEQ ID NO: 43632 - protein, 13 aa, Artificial sequence
  Protein classification predicting sequence
TKAADVGADLVGK

SEQ ID NO: 43633 - protein, 8 aa, Artificial sequence
  Protein classification predicting sequence
GAITGMLV

SEQ ID NO: 43634 - protein, 21 aa, Artificial sequence
  Protein classification predicting sequence
SLISIFARLGGGIFTKGADVG

SEQ ID NO: 43635 - protein, 8 aa, Artificial sequence
  Protein classification predicting sequence
DLVGKVEA

SEQ ID NO: 43636 - protein, 26 aa, Artificial sequence
  Protein classification predicting sequence
IADNVGDNVGDCAGMAADLFETYAVT

SEQ ID NO: 43637 - protein, 8 aa, Artificial sequence
  Protein classification predicting sequence
GGLIPYLF

SEQ ID NO: 43638 - protein, 12 aa, Artificial sequence
  Protein classification predicting sequence
GIMEGTAKPEYG

SEQ ID NO: 43639 - protein, 9 aa, Artificial sequence
  Protein classification predicting sequence
GMHVSVRAN

SEQ ID NO: 43640 - protein, 25 aa, Artificial sequence
  Protein classification predicting sequence
IADNVGDNVGDCAGMAADLFETYAV

SEQ ID NO: 43641 - protein, 8 aa, Artificial sequence
  Protein classification predicting sequence
NPYVVAGL

SEQ ID NO: 43642 - protein, 14 aa, Artificial sequence
  Protein classification predicting sequence
RAVDLLTKAAIREM

SEQ ID NO: 43643 - protein, 8 aa, Artificial sequence
  Protein classification predicting sequence
KGSEAHKA

SEQ ID NO: 43644 - protein, 9 aa, Artificial sequence
  Protein classification predicting sequence
AFRSGAVMG

SEQ ID NO: 43645 - protein, 7 aa, Artificial sequence
  Protein classification predicting sequence
AGMGADL

SEQ ID NO: 43646 - protein, 7 aa, Artificial sequence
  Protein classification predicting sequence
KDTSGPS

SEQ ID NO: 43647 - protein, 7 aa, Artificial sequence
  Protein classification predicting sequence
NILIKLM

SEQ ID NO: 43648 - protein, 8 aa, Artificial sequence
  Protein classification predicting sequence
GTFFVKLG

SEQ ID NO: 43649 - protein, 15 aa, Artificial sequence
  Protein classification predicting sequence
ASVTGHGTNVIQGLA

SEQ ID NO: 43650 - protein, 8 aa, Artificial sequence
  Protein classification predicting sequence
TALPAIVI

SEQ ID NO: 43651 - protein, 6 aa, Artificial sequence
  Protein classification predicting sequence
RMQEIA

SEQ ID NO: 43652 - protein, 9 aa, Artificial sequence
  Protein classification predicting sequence
AFKSGAITG

SEQ ID NO: 43653 - protein, 13 aa, Artificial sequence
  Protein classification predicting sequence
EVRRQFREKPGIM

SEQ ID NO: 43654 - protein, 17 aa, Artificial sequence
  Protein classification predicting sequence
DLVGKVEAGIPEDDPRN

SEQ ID NO: 43655 - protein, 11 aa, Artificial sequence
  Protein classification predicting sequence
VATMVLAAIFF

SEQ ID NO: 43656 - protein, 6 aa, Artificial sequence
  Protein classification predicting sequence
IMGALY

SEQ ID NO: 43657 - protein, 11 aa, Artificial sequence
  Protein classification predicting sequence
GHGTNVIQGLA

SEQ ID NO: 43658 - protein, 9 aa, Artificial sequence
  Protein classification predicting sequence
FDLSNPYVV

SEQ ID NO: 43659 - protein, 6 aa, Artificial sequence
  Protein classification predicting sequence
KDTSGP

SEQ ID NO: 43660 - protein, 7 aa, Artificial sequence
  Protein classification predicting sequence
GPVTDNA

SEQ ID NO: 43661 - protein, 7 aa, Artificial sequence
  Protein classification predicting sequence
IPGIMEG

SEQ ID NO: 43662 - protein, 6 aa, Artificial sequence
  Protein classification predicting sequence
GGAWDN

SEQ ID NO: 43663 - protein, 10 aa, Artificial sequence
  Protein classification predicting sequence
DNAGGIAEMA

SEQ ID NO: 43664 - protein, 22 aa, Artificial sequence
  Protein classification predicting sequence
LDAAGNTTAAIGKGFAIGSAAL

SEQ ID NO: 43665 - protein, 8 aa, Artificial sequence
  Protein classification predicting sequence
AMTMKSVG

SEQ ID NO: 43666 - protein, 15 aa, Artificial sequence
  Protein classification predicting sequence
GGGAWDNAKKYIEDG

SEQ ID NO: 43667 - protein, 6 aa, Artificial sequence
  Protein classification predicting sequence
TKGYAI

SEQ ID NO: 43668 - protein, 10 aa, Artificial sequence
  Protein classification predicting sequence
RRQFREKPGI

SEQ ID NO: 43669 - protein, 7 aa, Artificial sequence
  Protein classification predicting sequence
GDTVGDP

SEQ ID NO: 43670 - protein, 8 aa, Artificial sequence
  Protein classification predicting sequence
GNARMQEI

SEQ ID NO: 43671 - protein, 7 aa, Artificial sequence
  Protein classification predicting sequence
MTAVGRA

SEQ ID NO: 43672 - protein, 7 aa, Artificial sequence
  Protein classification predicting sequence
SIMGALY

SEQ ID NO: 43673 - protein, 55 aa, Artificial sequence
  Protein classification predicting sequence
LIVVITEYYTGTNKRPVNSIAQASVTGHGTNVIQGLAVSLESTALPAIVIVGGII

SEQ ID NO: 43674 - protein, 6 aa, Artificial sequence
  Protein classification predicting sequence
PGIMEG

SEQ ID NO: 43675 - protein, 27 aa, Artificial sequence
  Protein classification predicting sequence
NGLFVAISMTSGGGAWDNAKKSFEDGF

SEQ ID NO: 43676 - protein, 7 aa, Artificial sequence
  Protein classification predicting sequence
SVRANVR

SEQ ID NO: 43677 - protein, 7 aa, Artificial sequence
  Protein classification predicting sequence
TEYYTGT

SEQ ID NO: 43678 - protein, 6 aa, Artificial sequence
  Protein classification predicting sequence
TGHGTN

SEQ ID NO: 43679 - protein, 11 aa, Artificial sequence
  Protein classification predicting sequence
GLGALVLFAAY

SEQ ID NO: 43680 - protein, 8 aa, Artificial sequence
  Protein classification predicting sequence
EVRRQFRE

SEQ ID NO: 43681 - protein, 9 aa, Artificial sequence
  Protein classification predicting sequence
GLFVAISMT

SEQ ID NO: 43682 - protein, 10 aa, Artificial sequence
  Protein classification predicting sequence
GGGAWDNAKK

SEQ ID NO: 43683 - protein, 15 aa, Artificial sequence
  Protein classification predicting sequence
TKAADVGADLVGKVE

SEQ ID NO: 43684 - protein, 7 aa, Artificial sequence
  Protein classification predicting sequence
GPVSDNA

SEQ ID NO: 43685 - protein, 9 aa, Artificial sequence
  Protein classification predicting sequence
PEDDPRNPA

SEQ ID NO: 43686 - protein, 6 aa, Artificial sequence
  Protein classification predicting sequence
DNAGGI

SEQ ID NO: 43687 - protein, 7 aa, Artificial sequence
  Protein classification predicting sequence
VGDNVGD

SEQ ID NO: 43688 - protein, 8 aa, Artificial sequence
  Protein classification predicting sequence
TGAATNII

SEQ ID NO: 43689 - protein, 10 aa, Artificial sequence
  Protein classification predicting sequence
GPITDNAGGI

SEQ ID NO: 43690 - protein, 6 aa, Artificial sequence
  Protein classification predicting sequence
GNTTKA

SEQ ID NO: 43691 - protein, 19 aa, Artificial sequence
  Protein classification predicting sequence
EVRRQFREIPGIMEGTAKP

SEQ ID NO: 43692 - protein, 10 aa, Artificial sequence
  Protein classification predicting sequence
MEGTAKPDYA

SEQ ID NO: 43693 - protein, 13 aa, Artificial sequence
  Protein classification predicting sequence
VVGDTVGDPFKDT

SEQ ID NO: 43694 - protein, 14 aa, Artificial sequence
  Protein classification predicting sequence
IGMNVSVRANVRTA

SEQ ID NO: 43695 - protein, 7 aa, Artificial sequence
  Protein classification predicting sequence
NIVALLL

SEQ ID NO: 43696 - protein, 7 aa, Artificial sequence
  Protein classification predicting sequence
RANNRLR

SEQ ID NO: 43697 - protein, 7 aa, Artificial sequence
  Protein classification predicting sequence
VLGGGHE

SEQ ID NO: 43698 - protein, 8 aa, Artificial sequence
  Protein classification predicting sequence
APGVSAPA

SEQ ID NO: 43699 - protein, 8 aa, Artificial sequence
  Protein classification predicting sequence
GGGHDIAY

SEQ ID NO: 43700 - protein, 7 aa, Artificial sequence
  Protein classification predicting sequence
DAHFDLR

SEQ ID NO: 43701 - protein, 7 aa, Artificial sequence
  Protein classification predicting sequence
APGVSAP

SEQ ID NO: 43702 - protein, 9 aa, Artificial sequence
  Protein classification predicting sequence
DAHFDLRPY

SEQ ID NO: 43703 - protein, 6 aa, Artificial sequence
  Protein classification predicting sequence
LGGGHE

SEQ ID NO: 43704 - protein, 68 aa, Artificial sequence
  Protein classification predicting sequence
PSGVGILGYAVDKGVALNKGRIGAKEGPDAIKQAFAGLPDLNQCETLVDYGNVYHDHEELIDTQKEFA

SEQ ID NO: 43705 - protein, 13 aa, Artificial sequence
  Protein classification predicting sequence
NLWTGRLDSETDP

SEQ ID NO: 43706 - protein, 7 aa, Artificial sequence
  Protein classification predicting sequence
FRHFQTV

SEQ ID NO: 43707 - protein, 12 aa, Artificial sequence
  Protein classification predicting sequence
AFAGLPDLNQCE

SEQ ID NO: 43708 - protein, 24 aa, Artificial sequence
  Protein classification predicting sequence
QTFLLGGGHDIAYAQYLATRKVYP

SEQ ID NO: 43709 - protein, 14 aa, Artificial sequence
  Protein classification predicting sequence
SIGVINIDAHFDTR

SEQ ID NO: 43710 - protein, 8 aa, Artificial sequence
  Protein classification predicting sequence
MFTICMDV

SEQ ID NO: 43711 - protein, 15 aa, Artificial sequence
  Protein classification predicting sequence
DSAFAPGVSAPAVLG

SEQ ID NO: 43712 - protein, 10 aa, Artificial sequence
  Protein classification predicting sequence
SIAEMNPTYD

SEQ ID NO: 43713 - protein, 12 aa, Artificial sequence
  Protein classification predicting sequence
RTAKLVANLVHH

SEQ ID NO: 43714 - protein, 6 aa, Artificial sequence
  Protein classification predicting sequence
APGVSA

SEQ ID NO: 43715 - protein, 133 aa, Artificial sequence
  Protein classification predicting sequence
GIDDDLYTAKWGMVMTFLDLNDSSLTPFEGTHFALIGFKSDKGVYINNGRVGAVESPAAIRTQLAKFPWHLGNQVMVYDVGNIDGPNRSLEQLQNSLSKAIKRMCDLNLKPIVLGGGHETAYGHYLGLRQSLS

SEQ ID NO: 43716 - protein, 6 aa, Artificial sequence
  Protein classification predicting sequence
WQGRHD

SEQ ID NO: 43717 - protein, 8 aa, Artificial sequence
  Protein classification predicting sequence
ALANLAWH

SEQ ID NO: 43718 - protein, 27 aa, Artificial sequence
  Protein classification predicting sequence
HLTQLQHFIDDCDYLYLTIDLDVFPAA

SEQ ID NO: 43719 - protein, 8 aa, Artificial sequence
  Protein classification predicting sequence
YLTIDLDV

SEQ ID NO: 43720 - protein, 8 aa, Artificial sequence
  Protein classification predicting sequence
NKGRIGAK

SEQ ID NO: 43721 - protein, 5 aa, Artificial sequence
  Protein classification predicting sequence
DCHTH

SEQ ID NO: 43722 - protein, 10 aa, Artificial sequence
  Protein classification predicting sequence
PVKLHAEQLS

SEQ ID NO: 43723 - protein, 8 aa, Artificial sequence
  Protein classification predicting sequence
EQLSNLGG

SEQ ID NO: 43724 - protein, 6 aa, Artificial sequence
  Protein classification predicting sequence
LPGAFY

SEQ ID NO: 43725 - protein, 9 aa, Artificial sequence
  Protein classification predicting sequence
KMLRVARRL

SEQ ID NO: 43726 - protein, 7 aa, Artificial sequence
  Protein classification predicting sequence
AVTVNAA

SEQ ID NO: 43727 - protein, 6 aa, Artificial sequence
  Protein classification predicting sequence
NPGTSP

SEQ ID NO: 43728 - protein, 6 aa, Artificial sequence
  Protein classification predicting sequence
KSGYGL

SEQ ID NO: 43729 - protein, 7 aa, Artificial sequence
  Protein classification predicting sequence
AHALPPE

SEQ ID NO: 43730 - protein, 9 aa, Artificial sequence
  Protein classification predicting sequence
ERPAELVYR

SEQ ID NO: 43731 - protein, 7 aa, Artificial sequence
  Protein classification predicting sequence
GGGILST

SEQ ID NO: 43732 - protein, 13 aa, Artificial sequence
  Protein classification predicting sequence
GVTTVEAKSGYGL

SEQ ID NO: 43733 - protein, 11 aa, Artificial sequence
  Protein classification predicting sequence
NLAEFCDIFCE

SEQ ID NO: 43734 - protein, 8 aa, Artificial sequence
  Protein classification predicting sequence
YAPARKMI

SEQ ID NO: 43735 - protein, 7 aa, Artificial sequence
  Protein classification predicting sequence
YHFGINH

SEQ ID NO: 43736 - protein, 11 aa, Artificial sequence
  Protein classification predicting sequence
LPVKLHAEQLS

SEQ ID NO: 43737 - protein, 8 aa, Artificial sequence
  Protein classification predicting sequence
GSSLAARY

SEQ ID NO: 43738 - protein, 8 aa, Artificial sequence
  Protein classification predicting sequence
NMACTLFR

SEQ ID NO: 43739 - protein, 6 aa, Artificial sequence
  Protein classification predicting sequence
TLFRMT

SEQ ID NO: 43740 - protein, 7 aa, Artificial sequence
  Protein classification predicting sequence
YWLGGDL

SEQ ID NO: 43741 - protein, 12 aa, Artificial sequence
  Protein classification predicting sequence
STVRATRAASED

SEQ ID NO: 43742 - protein, 8 aa, Artificial sequence
  Protein classification predicting sequence
MNMAATLF

SEQ ID NO: 43743 - protein, 8 aa, Artificial sequence
  Protein classification predicting sequence
YRIGFNPL

SEQ ID NO: 43744 - protein, 33 aa, Artificial sequence
  Protein classification predicting sequence
STDKPLKGKELDELNVVKNGTVVIKDGKIVYAG

SEQ ID NO: 43745 - protein, 85 aa, Artificial sequence
  Protein classification predicting sequence
YADFADIFCETGVFTIEQSQHYMQKAKEAGFKVKIHADEIDPLGGLELAIDEQAISADHLVASSDKGKEKLRNSDTVAVLLPATT

SEQ ID NO: 43746 - protein, 35 aa, Artificial sequence
  Protein classification predicting sequence
YLGKEDYADARGMLDNNGAIALATDYNPGSSVTNN

SEQ ID NO: 43747 - protein, 7 aa, Artificial sequence
  Protein classification predicting sequence
GGSREHE

SEQ ID NO: 43748 - protein, 6 aa, Artificial sequence
  Protein classification predicting sequence
LAEFCD

SEQ ID NO: 43749 - protein, 7 aa, Artificial sequence
  Protein classification predicting sequence
AISADHL

SEQ ID NO: 43750 - protein, 6 aa, Artificial sequence
  Protein classification predicting sequence
SADHLE

SEQ ID NO: 43751 - protein, 10 aa, Artificial sequence
  Protein classification predicting sequence
AGTVAVLLPG

SEQ ID NO: 43752 - protein, 8 aa, Artificial sequence
  Protein classification predicting sequence
GGGILSTV

SEQ ID NO: 43753 - protein, 13 aa, Artificial sequence
  Protein classification predicting sequence
LLPGAFYFLRETQ

SEQ ID NO: 43754 - protein, 7 aa, Artificial sequence
  Protein classification predicting sequence
GRADDYI

SEQ ID NO: 43755 - protein, 14 aa, Artificial sequence
  Protein classification predicting sequence
LATSVDVFCESIGF

SEQ ID NO: 43756 - protein, 8 aa, Artificial sequence
  Protein classification predicting sequence
EIKSGYGL

SEQ ID NO: 43757 - protein, 8 aa, Artificial sequence
  Protein classification predicting sequence
FCEHLAFS

SEQ ID NO: 43758 - protein, 9 aa, Artificial sequence
  Protein classification predicting sequence
TREAARALG

SEQ ID NO: 43759 - protein, 6 aa, Artificial sequence
  Protein classification predicting sequence
EFEQRL

SEQ ID NO: 43760 - protein, 9 aa, Artificial sequence
  Protein classification predicting sequence
GVSYAEIAA

SEQ ID NO: 43761 - protein, 7 aa, Artificial sequence
  Protein classification predicting sequence
STVRATR

SEQ ID NO: 43762 - protein, 9 aa, Artificial sequence
  Protein classification predicting sequence
LAAHALPPE

SEQ ID NO: 43763 - protein, 14 aa, Artificial sequence
  Protein classification predicting sequence
GEPVFGGLPQNASL

SEQ ID NO: 43764 - protein, 7 aa, Artificial sequence
  Protein classification predicting sequence
ALYPSIY

SEQ ID NO: 43765 - protein, 8 aa, Artificial sequence
  Protein classification predicting sequence
KDIYRQRS

SEQ ID NO: 43766 - protein, 6 aa, Artificial sequence
  Protein classification predicting sequence
FPDCYN

SEQ ID NO: 43767 - protein, 9 aa, Artificial sequence
  Protein classification predicting sequence
QNDQLGWLW

SEQ ID NO: 43768 - protein, 21 aa, Artificial sequence
  Protein classification predicting sequence
FSGLAVIDWEAWRPRWAFNWD

SEQ ID NO: 43769 - protein, 12 aa, Artificial sequence
  Protein classification predicting sequence
LWGYYLFPDCYN

SEQ ID NO: 43770 - protein, 7 aa, Artificial sequence
  Protein classification predicting sequence
EAIRVSK

SEQ ID NO: 43771 - protein, 13 aa, Artificial sequence
  Protein classification predicting sequence
HLWGFYLFPDCYN

SEQ ID NO: 43772 - protein, 9 aa, Artificial sequence
  Protein classification predicting sequence
AVGSDADIV

SEQ ID NO: 43773 - protein, 7 aa, Artificial sequence
  Protein classification predicting sequence
FEGAKYV

SEQ ID NO: 43774 - protein, 6 aa, Artificial sequence
  Protein classification predicting sequence
VHAENG

SEQ ID NO: 43775 - protein, 6 aa, Artificial sequence
  Protein classification predicting sequence
YPHFKT

SEQ ID NO: 43776 - protein, 7 aa, Artificial sequence
  Protein classification predicting sequence
HGWPGSF

SEQ ID NO: 43777 - protein, 7 aa, Artificial sequence
  Protein classification predicting sequence
EFYKIIP

SEQ ID NO: 43778 - protein, 12 aa, Artificial sequence
  Protein classification predicting sequence
GLAAYILEKFST

SEQ ID NO: 43779 - protein, 14 aa, Artificial sequence
  Protein classification predicting sequence
SIRPFKVETSDEEI

SEQ ID NO: 43780 - protein, 7 aa, Artificial sequence
  Protein classification predicting sequence
DLHQRID

SEQ ID NO: 43781 - protein, 7 aa, Artificial sequence
  Protein classification predicting sequence
TKPDTVG

SEQ ID NO: 43782 - protein, 22 aa, Artificial sequence
  Protein classification predicting sequence
YPHFKTKIEGLDIHFIHVKPPQ

SEQ ID NO: 43783 - protein, 12 aa, Artificial sequence
  Protein classification predicting sequence
LEDGGLERKFSL

SEQ ID NO: 43784 - protein, 7 aa, Artificial sequence
  Protein classification predicting sequence
LISYSYM

SEQ ID NO: 43785 - protein, 13 aa, Artificial sequence
  Protein classification predicting sequence
SWRYQIPALAQAG

SEQ ID NO: 43786 - protein, 9 aa, Artificial sequence
  Protein classification predicting sequence
HFDFLIESC

SEQ ID NO: 43787 - protein, 13 aa, Artificial sequence
  Protein classification predicting sequence
PERVRAVASLNTP

SEQ ID NO: 43788 - protein, 11 aa, Artificial sequence
  Protein classification predicting sequence
LTDEPTWIVDP

SEQ ID NO: 43789 - protein, 11 aa, Artificial sequence
  Protein classification predicting sequence
DGTTNFVHGFP

SEQ ID NO: 43790 - protein, 8 aa, Artificial sequence
  Protein classification predicting sequence
DGTTNFVH

SEQ ID NO: 43791 - protein, 7 aa, Artificial sequence
  Protein classification predicting sequence
GAADAYY

SEQ ID NO: 43792 - protein, 9 aa, Artificial sequence
  Protein classification predicting sequence
TDQKVEKML

SEQ ID NO: 43793 - protein, 8 aa, Artificial sequence
  Protein classification predicting sequence
EFGVVYSC

SEQ ID NO: 43794 - protein, 10 aa, Artificial sequence
  Protein classification predicting sequence
EDKMYTGRKG

SEQ ID NO: 43795 - protein, 10 aa, Artificial sequence
  Protein classification predicting sequence
HSFIGEESVA

SEQ ID NO: 43796 - protein, 23 aa, Artificial sequence
  Protein classification predicting sequence
VGTAAVNMCLVATGGADAYYEMG

SEQ ID NO: 43797 - protein, 6 aa, Artificial sequence
  Protein classification predicting sequence
GLHCWD

SEQ ID NO: 43798 - protein, 7 aa, Artificial sequence
  Protein classification predicting sequence
DLVTETD

SEQ ID NO: 43799 - protein, 7 aa, Artificial sequence
  Protein classification predicting sequence
NFVHRFP

SEQ ID NO: 43800 - protein, 7 aa, Artificial sequence
  Protein classification predicting sequence
CGFIIKL

SEQ ID NO: 43801 - protein, 20 aa, Artificial sequence
  Protein classification predicting sequence
PVLFNVGINEQQTLAERFGD

SEQ ID NO: 43802 - protein, 8 aa, Artificial sequence
  Protein classification predicting sequence
CKSAKDRT

SEQ ID NO: 43803 - protein, 8 aa, Artificial sequence
  Protein classification predicting sequence
MSVTLEQC

SEQ ID NO: 43804 - protein, 10 aa, Artificial sequence
  Protein classification predicting sequence
YRPPEGTYGK

SEQ ID NO: 43805 - protein, 7 aa, Artificial sequence
  Protein classification predicting sequence
QDILTEL

SEQ ID NO: 43806 - protein, 12 aa, Artificial sequence
  Protein classification predicting sequence
PNEPQLEFILAC

SEQ ID NO: 43807 - protein, 11 aa, Artificial sequence
  Protein classification predicting sequence
VQISVIHPVEQ

SEQ ID NO: 43808 - protein, 13 aa, Artificial sequence
  Protein classification predicting sequence
LTRYSSTEIVEGT

SEQ ID NO: 43809 - protein, 11 aa, Artificial sequence
  Protein classification predicting sequence
DPLFLTGVTFP

SEQ ID NO: 43810 - protein, 7 aa, Artificial sequence
  Protein classification predicting sequence
YPIYEET

SEQ ID NO: 43811 - protein, 16 aa, Artificial sequence
  Protein classification predicting sequence
ASFKVGELLKSKEQLL

SEQ ID NO: 43812 - protein, 18 aa, Artificial sequence
  Protein classification predicting sequence
LSLRTSDGGKVVGTIEVS

SEQ ID NO: 43813 - protein, 9 aa, Artificial sequence
  Protein classification predicting sequence
VKMGEIEDG

SEQ ID NO: 43814 - protein, 73 aa, Artificial sequence
  Protein classification predicting sequence
NLHLQRMQVHSPHLKDALYDVITVGAPAAHFQGFKNGGLRKLLHRFETERRNTGYQFIYYSPENTAKAKEVLS

SEQ ID NO: 43815 - protein, 8 aa, Artificial sequence
  Protein classification predicting sequence
VDKLIERD

SEQ ID NO: 43816 - protein, 11 aa, Artificial sequence
  Protein classification predicting sequence
SHPREDWYEQL

SEQ ID NO: 43817 - protein, 7 aa, Artificial sequence
  Protein classification predicting sequence
SNDVLPV

SEQ ID NO: 43818 - protein, 15 aa, Artificial sequence
  Protein classification predicting sequence
TGRREHYVVEVKLPA

SEQ ID NO: 43819 - protein, 17 aa, Artificial sequence
  Protein classification predicting sequence
IFMEKMPPDYISHFQEQ

SEQ ID NO: 43820 - protein, 65 aa, Artificial sequence
  Protein classification predicting sequence
KKRKNVEIMWLAATICRKLNGIRFTCCKSAKDRTSMSVTLEQCSILRDEHQLHKDFFIRALDCMR

SEQ ID NO: 43821 - protein, 19 aa, Artificial sequence
  Protein classification predicting sequence
PNEPQLEFILACKDLVAPV

SEQ ID NO: 43822 - protein, 8 aa, Artificial sequence
  Protein classification predicting sequence
SVIHPVEQ

SEQ ID NO: 43823 - protein, 11 aa, Artificial sequence
  Protein classification predicting sequence
IKLTVYDVKDK

SEQ ID NO: 43824 - protein, 7 aa, Artificial sequence
  Protein classification predicting sequence
INQLQPL

SEQ ID NO: 43825 - protein, 8 aa, Artificial sequence
  Protein classification predicting sequence
ATHADLLL

SEQ ID NO: 43826 - protein, 10 aa, Artificial sequence
  Protein classification predicting sequence
SASQHSPDSL

SEQ ID NO: 43827 - protein, 51 aa, Artificial sequence
  Protein classification predicting sequence
FESLPLQIKEGQLLHVYPVLFNVGINEQQTLAERFGDVSLQESINQENFEL

SEQ ID NO: 43828 - protein, 21 aa, Artificial sequence
  Protein classification predicting sequence
IFMEKMPPDYISHFQEQNDLK

SEQ ID NO: 43829 - protein, 81 aa, Artificial sequence
  Protein classification predicting sequence
KKRKNVEIMWLAATICRKLNGIRFTCCKSAKDRTSMSVTLEQCSILRDEHQLHKDFFIRALDCMRREGCRIENVLKNIKCR

SEQ ID NO: 43830 - protein, 13 aa, Artificial sequence
  Protein classification predicting sequence
YAFNMLQLMAFPK

SEQ ID NO: 43831 - protein, 8 aa, Artificial sequence
  Protein classification predicting sequence
FRDPTTAW

SEQ ID NO: 43832 - protein, 16 aa, Artificial sequence
  Protein classification predicting sequence
LVDHSIVESFAQGGRT

SEQ ID NO: 43833 - protein, 8 aa, Artificial sequence
  Protein classification predicting sequence
RTGYHFQP

SEQ ID NO: 43834 - protein, 9 aa, Artificial sequence
  Protein classification predicting sequence
YHLFYQYNP

SEQ ID NO: 43835 - protein, 6 aa, Artificial sequence
  Protein classification predicting sequence
KGWAGI

SEQ ID NO: 43836 - protein, 6 aa, Artificial sequence
  Protein classification predicting sequence
VFFRVF

SEQ ID NO: 43837 - protein, 10 aa, Artificial sequence
  Protein classification predicting sequence
HWLHLPLAMV

SEQ ID NO: 43838 - protein, 6 aa, Artificial sequence
  Protein classification predicting sequence
QVQNLA

SEQ ID NO: 43839 - protein, 7 aa, Artificial sequence
  Protein classification predicting sequence
FRDPTTA

SEQ ID NO: 43840 - protein, 17 aa, Artificial sequence
  Protein classification predicting sequence
HAVPGTGMWECVDFYPV

SEQ ID NO: 43841 - protein, 7 aa, Artificial sequence
  Protein classification predicting sequence
RRVLWGW

SEQ ID NO: 43842 - protein, 6 aa, Artificial sequence
  Protein classification predicting sequence
NDPNGP

SEQ ID NO: 43843 - protein, 9 aa, Artificial sequence
  Protein classification predicting sequence
PAILYTGID

SEQ ID NO: 43844 - protein, 6 aa, Artificial sequence
  Protein classification predicting sequence
FRDPTT

SEQ ID NO: 43845 - protein, 6 aa, Artificial sequence
  Protein classification predicting sequence
TAVFFR

SEQ ID NO: 43846 - protein, 7 aa, Artificial sequence
  Protein classification predicting sequence
SVVESFG

SEQ ID NO: 43847 - protein, 9 aa, Artificial sequence
  Protein classification predicting sequence
FISINPGAP

SEQ ID NO: 43848 - protein, 6 aa, Artificial sequence
  Protein classification predicting sequence
GKDFYA

SEQ ID NO: 43849 - protein, 6 aa, Artificial sequence
  Protein classification predicting sequence
TGMWEC

SEQ ID NO: 43850 - protein, 13 aa, Artificial sequence
  Protein classification predicting sequence
RYDYGNFYASKTF

SEQ ID NO: 43851 - protein, 17 aa, Artificial sequence
  Protein classification predicting sequence
YHLFYQYNPKGAVWGNI

SEQ ID NO: 43852 - protein, 8 aa, Artificial sequence
  Protein classification predicting sequence
GCWSGSAT

SEQ ID NO: 43853 - protein, 8 aa, Artificial sequence
  Protein classification predicting sequence
PTFAGFVD

SEQ ID NO: 43854 - protein, 7 aa, Artificial sequence
  Protein classification predicting sequence
VWGNIVW

SEQ ID NO: 43855 - protein, 7 aa, Artificial sequence
  Protein classification predicting sequence
DPLLREW

SEQ ID NO: 43856 - protein, 8 aa, Artificial sequence
  Protein classification predicting sequence
DHSIVESF

SEQ ID NO: 43857 - protein, 8 aa, Artificial sequence
  Protein classification predicting sequence
NDPNGPMY

SEQ ID NO: 43858 - protein, 7 aa, Artificial sequence
  Protein classification predicting sequence
MLSWQRT

SEQ ID NO: 43859 - protein, 7 aa, Artificial sequence
  Protein classification predicting sequence
GSATILP

SEQ ID NO: 43860 - protein, 13 aa, Artificial sequence
  Protein classification predicting sequence
AVPGTGMWECVDF

SEQ ID NO: 43861 - protein, 7 aa, Artificial sequence
  Protein classification predicting sequence
RRILWGW

SEQ ID NO: 43862 - protein, 10 aa, Artificial sequence
  Protein classification predicting sequence
NPVLVPPPGI

SEQ ID NO: 43863 - protein, 7 aa, Artificial sequence
  Protein classification predicting sequence
DVAKGWA

SEQ ID NO: 43864 - protein, 11 aa, Artificial sequence
  Protein classification predicting sequence
KGWASVQSIPR

SEQ ID NO: 43865 - protein, 10 aa, Artificial sequence
  Protein classification predicting sequence
GKWRITIGSK

SEQ ID NO: 43866 - protein, 7 aa, Artificial sequence
  Protein classification predicting sequence
QYNPNDT

SEQ ID NO: 43867 - protein, 10 aa, Artificial sequence
  Protein classification predicting sequence
WHLYFQYNPN

SEQ ID NO: 43868 - protein, 9 aa, Artificial sequence
  Protein classification predicting sequence
VPTNPWRSS

SEQ ID NO: 43869 - protein, 7 aa, Artificial sequence
  Protein classification predicting sequence
RPSDYSR

SEQ ID NO: 43870 - protein, 6 aa, Artificial sequence
  Protein classification predicting sequence
CCRTHD

SEQ ID NO: 43871 - protein, 6 aa, Artificial sequence
  Protein classification predicting sequence
DGDPLD

SEQ ID NO: 43872 - protein, 14 aa, Artificial sequence
  Protein classification predicting sequence
GDNDPIDVCEIGSK

SEQ ID NO: 43873 - protein, 8 aa, Artificial sequence
  Protein classification predicting sequence
DEGETDWK

SEQ ID NO: 43874 - protein, 8 aa, Artificial sequence
  Protein classification predicting sequence
KPGYLEAT

SEQ ID NO: 43875 - protein, 10 aa, Artificial sequence
  Protein classification predicting sequence
YKVPDGKPEN

SEQ ID NO: 43876 - protein, 11 aa, Artificial sequence
  Protein classification predicting sequence
PDGKPENQFAF

SEQ ID NO: 43877 - protein, 17 aa, Artificial sequence
  Protein classification predicting sequence
CCGDNDPIDVCEIGSKV

SEQ ID NO: 43878 - protein, 16 aa, Artificial sequence
  Protein classification predicting sequence
TPMFYPANYGFIPNTL

SEQ ID NO: 43879 - protein, 9 aa, Artificial sequence
  Protein classification predicting sequence
DGDPLDVLV

SEQ ID NO: 43880 - protein, 6 aa, Artificial sequence
  Protein classification predicting sequence
MTDEAG

SEQ ID NO: 43881 - protein, 12 aa, Artificial sequence
  Protein classification predicting sequence
NYGAIPQTWEDP

SEQ ID NO: 43882 - protein, 7 aa, Artificial sequence
  Protein classification predicting sequence
PQTWEDP

SEQ ID NO: 43883 - protein, 7 aa, Artificial sequence
  Protein classification predicting sequence
VDRFLYT

SEQ ID NO: 43884 - protein, 7 aa, Artificial sequence
  Protein classification predicting sequence
HFFEHYK

SEQ ID NO: 43885 - protein, 7 aa, Artificial sequence
  Protein classification predicting sequence
LEPGKWV

SEQ ID NO: 43886 - protein, 8 aa, Artificial sequence
  Protein classification predicting sequence
DEKILAVP

SEQ ID NO: 43887 - protein, 6 aa, Artificial sequence
  Protein classification predicting sequence
DRVLYS

SEQ ID NO: 43888 - protein, 7 aa, Artificial sequence
  Protein classification predicting sequence
YPFNYGF

SEQ ID NO: 43889 - protein, 6 aa, Artificial sequence
  Protein classification predicting sequence
NYGFVP

SEQ ID NO: 43890 - protein, 7 aa, Artificial sequence
  Protein classification predicting sequence
DRVLYSS

SEQ ID NO: 43891 - protein, 7 aa, Artificial sequence
  Protein classification predicting sequence
HFFERYK

SEQ ID NO: 43892 - protein, 7 aa, Artificial sequence
  Protein classification predicting sequence
YPGNYGF

SEQ ID NO: 43893 - protein, 7 aa, Artificial sequence
  Protein classification predicting sequence
SPFHDIP

SEQ ID NO: 43894 - protein, 9 aa, Artificial sequence
  Protein classification predicting sequence
VDRFLYTPM

SEQ ID NO: 43895 - protein, 10 aa, Artificial sequence
  Protein classification predicting sequence
HFFEHYKDLE

SEQ ID NO: 43896 - protein, 8 aa, Artificial sequence
  Protein classification predicting sequence
MFYPCNYG

SEQ ID NO: 43897 - protein, 6 aa, Artificial sequence
  Protein classification predicting sequence
YPCNYG

SEQ ID NO: 43898 - protein, 7 aa, Artificial sequence
  Protein classification predicting sequence
IKYEIDK

SEQ ID NO: 43899 - protein, 8 aa, Artificial sequence
  Protein classification predicting sequence
CVLTEKNI

SEQ ID NO: 43900 - protein, 11 aa, Artificial sequence
  Protein classification predicting sequence
EIPKGSRNKYE

SEQ ID NO: 43901 - protein, 8 aa, Artificial sequence
  Protein classification predicting sequence
DKWFFISG

SEQ ID NO: 43902 - protein, 7 aa, Artificial sequence
  Protein classification predicting sequence
HDIPLYA

SEQ ID NO: 43903 - protein, 6 aa, Artificial sequence
  Protein classification predicting sequence
VEVPRW

SEQ ID NO: 43904 - protein, 7 aa, Artificial sequence
  Protein classification predicting sequence
PRWTNAK

SEQ ID NO: 43905 - protein, 6 aa, Artificial sequence
  Protein classification predicting sequence
NPIKQD

SEQ ID NO: 43906 - protein, 8 aa, Artificial sequence
  Protein classification predicting sequence
GKDLPNDI

SEQ ID NO: 43907 - protein, 10 aa, Artificial sequence
  Protein classification predicting sequence
NYGYVNHTLS

SEQ ID NO: 43908 - protein, 9 aa, Artificial sequence
  Protein classification predicting sequence
DGDPVDVLV

SEQ ID NO: 43909 - protein, 36 aa, Artificial sequence
  Protein classification predicting sequence
DGDPVDVLVPTPYPLQPGSVIRCRPVGVLKMTDEAG

SEQ ID NO: 43910 - protein, 9 aa, Artificial sequence
  Protein classification predicting sequence
DAKVVAVPH

SEQ ID NO: 43911 - protein, 7 aa, Artificial sequence
  Protein classification predicting sequence
TFPGCVI

SEQ ID NO: 43912 - protein, 6 aa, Artificial sequence
  Protein classification predicting sequence
SNIKYE

SEQ ID NO: 43913 - protein, 6 aa, Artificial sequence
  Protein classification predicting sequence
DGDPVD

SEQ ID NO: 43914 - protein, 11 aa, Artificial sequence
  Protein classification predicting sequence
AHPWHDLEIGP

SEQ ID NO: 43915 - protein, 22 aa, Artificial sequence
  Protein classification predicting sequence
IFNMVVEIPRWTNAKLEITKEE

SEQ ID NO: 43916 - protein, 6 aa, Artificial sequence
  Protein classification predicting sequence
TAMFYP

SEQ ID NO: 43917 - protein, 6 aa, Artificial sequence
  Protein classification predicting sequence
LKMTDE

SEQ ID NO: 43918 - protein, 6 aa, Artificial sequence
  Protein classification predicting sequence
VVIEIP

SEQ ID NO: 43919 - protein, 8 aa, Artificial sequence
  Protein classification predicting sequence
RPVGVLKM

SEQ ID NO: 43920 - protein, 7 aa, Artificial sequence
  Protein classification predicting sequence
HIQDVND

SEQ ID NO: 43921 - protein, 7 aa, Artificial sequence
  Protein classification predicting sequence
DDKIIAV

SEQ ID NO: 43922 - protein, 6 aa, Artificial sequence
  Protein classification predicting sequence
KDLEPG

SEQ ID NO: 43923 - protein, 7 aa, Artificial sequence
  Protein classification predicting sequence
VPEVVYA

SEQ ID NO: 43924 - protein, 7 aa, Artificial sequence
  Protein classification predicting sequence
FYPAEYG

SEQ ID NO: 43925 - protein, 7 aa, Artificial sequence
  Protein classification predicting sequence
YGIIPRT

SEQ ID NO: 43926 - protein, 6 aa, Artificial sequence
  Protein classification predicting sequence
YPANYG

SEQ ID NO: 43927 - protein, 6 aa, Artificial sequence
  Protein classification predicting sequence
DGDELD

SEQ ID NO: 43928 - protein, 6 aa, Artificial sequence
  Protein classification predicting sequence
NYGFIP

SEQ ID NO: 43929 - protein, 7 aa, Artificial sequence
  Protein classification predicting sequence
VYIEKDG

SEQ ID NO: 43930 - protein, 7 aa, Artificial sequence
  Protein classification predicting sequence
LNPIKQD

SEQ ID NO: 43931 - protein, 13 aa, Artificial sequence
  Protein classification predicting sequence
NYGAFPQTWEDPN

SEQ ID NO: 43932 - protein, 6 aa, Artificial sequence
  Protein classification predicting sequence
HPETKA

SEQ ID NO: 43933 - protein, 11 aa, Artificial sequence
  Protein classification predicting sequence
DPMDVLVLMQE

SEQ ID NO: 43934 - protein, 25 aa, Artificial sequence
  Protein classification predicting sequence
FLRARAIGLMPMIDQGEKDDKIIAV

SEQ ID NO: 43935 - protein, 7 aa, Artificial sequence
  Protein classification predicting sequence
LFVDRFM

SEQ ID NO: 43936 - protein, 12 aa, Artificial sequence
  Protein classification predicting sequence
DPFDIMVIMREP

SEQ ID NO: 43937 - protein, 8 aa, Artificial sequence
  Protein classification predicting sequence
DAKLVAVP

SEQ ID NO: 43938 - protein, 6 aa, Artificial sequence
  Protein classification predicting sequence
LFVDRF

SEQ ID NO: 43939 - protein, 9 aa, Artificial sequence
  Protein classification predicting sequence
NPPEDVNVI

SEQ ID NO: 43940 - protein, 6 aa, Artificial sequence
  Protein classification predicting sequence
KYEVDK

SEQ ID NO: 43941 - protein, 6 aa, Artificial sequence
  Protein classification predicting sequence
RPVGVL

SEQ ID NO: 43942 - protein, 6 aa, Artificial sequence
  Protein classification predicting sequence
HYKDLE

SEQ ID NO: 43943 - protein, 8 aa, Artificial sequence
  Protein classification predicting sequence
SGAIFVDR

SEQ ID NO: 43944 - protein, 21 aa, Artificial sequence
  Protein classification predicting sequence
LPEDIYVVIEIPANADPIKYE

SEQ ID NO: 43945 - protein, 50 aa, Artificial sequence
  Protein classification predicting sequence
DKESGALFVDRFMSTAMFYPCNYGYINHTLSLDGDPVDVLVPTPYPLQPG

SEQ ID NO: 43946 - protein, 15 aa, Artificial sequence
  Protein classification predicting sequence
VIRCRPVGVLKMTDE

SEQ ID NO: 43947 - protein, 11 aa, Artificial sequence
  Protein classification predicting sequence
GEDAKLVAVPH

SEQ ID NO: 43948 - protein, 16 aa, Artificial sequence
  Protein classification predicting sequence
NAEAAKAEIVASFERA

SEQ ID NO: 43949 - protein, 10 aa, Artificial sequence
  Protein classification predicting sequence
NMVVEIPRWT

SEQ ID NO: 43950 - protein, 8 aa, Artificial sequence
  Protein classification predicting sequence
AKLEITKE

SEQ ID NO: 43951 - protein, 8 aa, Artificial sequence
  Protein classification predicting sequence
NYGAFPQT

SEQ ID NO: 43952 - protein, 10 aa, Artificial sequence
  Protein classification predicting sequence
DPLDVCEIGE

SEQ ID NO: 43953 - protein, 19 aa, Artificial sequence
  Protein classification predicting sequence
RATNEWFRIYKIPDGKPEN

SEQ ID NO: 43954 - protein, 8 aa, Artificial sequence
  Protein classification predicting sequence
LYSSVVYP

SEQ ID NO: 43955 - protein, 8 aa, Artificial sequence
  Protein classification predicting sequence
AYPTDYGF

SEQ ID NO: 43956 - protein, 7 aa, Artificial sequence
  Protein classification predicting sequence
GSRNKYE

SEQ ID NO: 43957 - protein, 10 aa, Artificial sequence
  Protein classification predicting sequence
KYELDKKTGL

SEQ ID NO: 43958 - protein, 31 aa, Artificial sequence
  Protein classification predicting sequence
IEARPIGLFKMIDSGDKDYKVLAVPVEDPYF

SEQ ID NO: 43959 - protein, 14 aa, Artificial sequence
  Protein classification predicting sequence
DVPKAFLDEIAHFF

SEQ ID NO: 43960 - protein, 8 aa, Artificial sequence
  Protein classification predicting sequence
VYPHNYGF

SEQ ID NO: 43961 - protein, 30 aa, Artificial sequence
  Protein classification predicting sequence
PGSVIRCRPVGVLKMTDESGEDAKVVAVPH

SEQ ID NO: 43962 - protein, 7 aa, Artificial sequence
  Protein classification predicting sequence
SKEYDHI

SEQ ID NO: 43963 - protein, 24 aa, Artificial sequence
  Protein classification predicting sequence
SGAVFVDRFMSAPMFYPCNYGYVN

SEQ ID NO: 43964 - protein, 8 aa, Artificial sequence
  Protein classification predicting sequence
PELLKAQI

SEQ ID NO: 43965 - protein, 9 aa, Artificial sequence
  Protein classification predicting sequence
GKWVKVDGW

SEQ ID NO: 43966 - protein, 7 aa, Artificial sequence
  Protein classification predicting sequence
LVPTPYP

SEQ ID NO: 43967 - protein, 8 aa, Artificial sequence
  Protein classification predicting sequence
DESGEDAK

SEQ ID NO: 43968 - protein, 8 aa, Artificial sequence
  Protein classification predicting sequence
RCRPVGVL

SEQ ID NO: 43969 - protein, 7 aa, Artificial sequence
  Protein classification predicting sequence
NDIEDVE

SEQ ID NO: 43970 - protein, 47 aa, Artificial sequence
  Protein classification predicting sequence
KAENIRLLILDVDGVLSDGLIYMGNNGEELKAFNVRDGYGIRCALTS

SEQ ID NO: 43971 - protein, 23 aa, Artificial sequence
  Protein classification predicting sequence
IEVAIITGRKAKLVEDRCATLGI

SEQ ID NO: 43972 - protein, 64 aa, Artificial sequence
  Protein classification predicting sequence
HLYQGQSNKLIAFSDLLEKLAIAPENVAYVGDDLIDWPVMEKVGLSVAVADAHPLLIPRADYVT

SEQ ID NO: 43973 - protein, 6 aa, Artificial sequence
  Protein classification predicting sequence
TCYGPV

SEQ ID NO: 43974 - protein, 9 aa, Artificial sequence
  Protein classification predicting sequence
SDGLIYMGN

SEQ ID NO: 43975 - protein, 17 aa, Artificial sequence
  Protein classification predicting sequence
GEELKAFNVRDGYGIRC

SEQ ID NO: 43976 - protein, 12 aa, Artificial sequence
  Protein classification predicting sequence
TLGITHLYQGQS

SEQ ID NO: 43977 - protein, 10 aa, Artificial sequence
  Protein classification predicting sequence
GDDLIDWPVM

SEQ ID NO: 43978 - protein, 14 aa, Artificial sequence
  Protein classification predicting sequence
VGLSVAVADAHPLL

SEQ ID NO: 43979 - protein, 12 aa, Artificial sequence
  Protein classification predicting sequence
GGRGAVREVCDL

SEQ ID NO: 43980 - protein, 7 aa, Artificial sequence
  Protein classification predicting sequence
EPSAQHR

SEQ ID NO: 43981 - protein, 8 aa, Artificial sequence
  Protein classification predicting sequence
YTKLIKFT

SEQ ID NO: 43982 - protein, 9 aa, Artificial sequence
  Protein classification predicting sequence
GSTCLASGW

SEQ ID NO: 43983 - protein, 9 aa, Artificial sequence
  Protein classification predicting sequence
WLGKNKLFQ

SEQ ID NO: 43984 - protein, 10 aa, Artificial sequence
  Protein classification predicting sequence
PHPDFNMSLL

SEQ ID NO: 43985 - protein, 5 aa, Artificial sequence
  Protein classification predicting sequence
DLQCV

SEQ ID NO: 43986 - protein, 8 aa, Artificial sequence
  Protein classification predicting sequence
EPKLGSTC

SEQ ID NO: 43987 - protein, 7 aa, Artificial sequence
  Protein classification predicting sequence
KFTSWIK

SEQ ID NO: 43988 - protein, 6 aa, Artificial sequence
  Protein classification predicting sequence
DDLQCV

SEQ ID NO: 43989 - protein, 8 aa, Artificial sequence
  Protein classification predicting sequence
KLLPNEDC

SEQ ID NO: 43990 - protein, 9 aa, Artificial sequence
  Protein classification predicting sequence
DAAPPGQSR

SEQ ID NO: 43991 - protein, 11 aa, Artificial sequence
  Protein classification predicting sequence
GSTCLASGWGS

SEQ ID NO: 43992 - protein, 7 aa, Artificial sequence
  Protein classification predicting sequence
RLVSQSF

SEQ ID NO: 43993 - protein, 7 aa, Artificial sequence
  Protein classification predicting sequence
CLASGWG

SEQ ID NO: 43994 - protein, 6 aa, Artificial sequence
  Protein classification predicting sequence
EPSAQH

SEQ ID NO: 43995 - protein, 8 aa, Artificial sequence
  Protein classification predicting sequence
ELPTQEPE

SEQ ID NO: 43996 - protein, 11 aa, Artificial sequence
  Protein classification predicting sequence
GIRRPWKGVLM

SEQ ID NO: 43997 - protein, 9 aa, Artificial sequence
  Protein classification predicting sequence
LAKAVATEC

SEQ ID NO: 43998 - protein, 9 aa, Artificial sequence
  Protein classification predicting sequence
TIFIDEIDS

SEQ ID NO: 43999 - protein, 30 aa, Artificial sequence
  Protein classification predicting sequence
VMVLAATNFPWDIDEALRRRLEKRIYIPLP

SEQ ID NO: 44000 - protein, 8 aa, Artificial sequence
  Protein classification predicting sequence
TNVCRDAS

SEQ ID NO: 44001 - protein, 7 aa, Artificial sequence
  Protein classification predicting sequence
EHEASRR

SEQ ID NO: 44002 - protein, 19 aa, Artificial sequence
  Protein classification predicting sequence
EHEASRRVKSELLIQMDGV

SEQ ID NO: 44003 - protein, 7 aa, Artificial sequence
  Protein classification predicting sequence
MAMRRRI

SEQ ID NO: 44004 - protein, 8 aa, Artificial sequence
  Protein classification predicting sequence
EAKAFPSD

SEQ ID NO: 44005 - protein, 10 aa, Artificial sequence
  Protein classification predicting sequence
TDGKGRVAWD

SEQ ID NO: 44006 - protein, 8 aa, Artificial sequence
  Protein classification predicting sequence
YHKLFAEC

SEQ ID NO: 44007 - protein, 16 aa, Artificial sequence
  Protein classification predicting sequence
RHVEPFVTLHHFDTPE

SEQ ID NO: 44008 - protein, 8 aa, Artificial sequence
  Protein classification predicting sequence
IYPQGLYD

SEQ ID NO: 44009 - protein, 13 aa, Artificial sequence
  Protein classification predicting sequence
EPFVTLHHFDTPE

SEQ ID NO: 44010 - protein, 13 aa, Artificial sequence
  Protein classification predicting sequence
DGANVKGYFIWSL

SEQ ID NO: 44011 - protein, 13 aa, Artificial sequence
  Protein classification predicting sequence
NYWYTAEPASDFY

SEQ ID NO: 44012 - protein, 28 aa, Artificial sequence
  Protein classification predicting sequence
YWTTFNEIGPIGDGQYLVGKFPPGIKYD

SEQ ID NO: 44013 - protein, 11 aa, Artificial sequence
  Protein classification predicting sequence
KVFQSHHNMMV

SEQ ID NO: 44014 - protein, 7 aa, Artificial sequence
  Protein classification predicting sequence
HARAVKL

SEQ ID NO: 44015 - protein, 14 aa, Artificial sequence
  Protein classification predicting sequence
GEIGVVHALPTKYP

SEQ ID NO: 44016 - protein, 9 aa, Artificial sequence
  Protein classification predicting sequence
GLYDQIMRV

SEQ ID NO: 44017 - protein, 15 aa, Artificial sequence
  Protein classification predicting sequence
KIYITENGLGYKDEF

SEQ ID NO: 44018 - protein, 10 aa, Artificial sequence
  Protein classification predicting sequence
TQERYPKKSA

SEQ ID NO: 44019 - protein, 17 aa, Artificial sequence
  Protein classification predicting sequence
DFIFGGATAAYQAEGAT

SEQ ID NO: 44020 - protein, 39 aa, Artificial sequence
  Protein classification predicting sequence
TDGKGRVAWDTYLEENYWYTAEPASDFYNRYPVDLELSE

SEQ ID NO: 44021 - protein, 42 aa, Artificial sequence
  Protein classification predicting sequence
ECHKRHVEPFVTLHHFDTPEVLHKDGDFLNRKTIDYFVDYAE

SEQ ID NO: 44022 - protein, 48 aa, Artificial sequence
  Protein classification predicting sequence
DPSNPEDVRAAELEDIIHNKFILDATYLGKYSRETMEGVQHILSVNGG

SEQ ID NO: 44023 - protein, 74 aa, Artificial sequence
  Protein classification predicting sequence
GESEITHNATGDKGGSKYQLKGVGQREFDVDVPRTDWDWMIYPQGLYDQIMRVVKDYPNYHKIYITENGLGYKD

SEQ ID NO: 44024 - protein, 9 aa, Artificial sequence
  Protein classification predicting sequence
DGANVKGYF

SEQ ID NO: 44025 - protein, 29 aa, Artificial sequence
  Protein classification predicting sequence
WSLMDVFSWSNGYEKRYGLFYVDFETQER

SEQ ID NO: 44026 - protein, 8 aa, Artificial sequence
  Protein classification predicting sequence
CFKEFPEV

SEQ ID NO: 44027 - protein, 25 aa, Artificial sequence
  Protein classification predicting sequence
YWTTFNEIGPIGDGQYLVGKFPPGI

SEQ ID NO: 44028 - protein, 9 aa, Artificial sequence
  Protein classification predicting sequence
YIEACESGS

SEQ ID NO: 44029 - protein, 8 aa, Artificial sequence
  Protein classification predicting sequence
DFGPVKVP

SEQ ID NO: 44030 - protein, 8 aa, Artificial sequence
  Protein classification predicting sequence
HYVKRLIG

SEQ ID NO: 44031 - protein, 6 aa, Artificial sequence
  Protein classification predicting sequence
FVFFPF

SEQ ID NO: 44032 - protein, 6 aa, Artificial sequence
  Protein classification predicting sequence
SMMPTL

SEQ ID NO: 44033 - protein, 10 aa, Artificial sequence
  Protein classification predicting sequence
SMDSRNGLGL

SEQ ID NO: 44034 - protein, 6 aa, Artificial sequence
  Protein classification predicting sequence
GDFILV

SEQ ID NO: 44035 - protein, 9 aa, Artificial sequence
  Protein classification predicting sequence
GDFILVEKF

SEQ ID NO: 44036 - protein, 7 aa, Artificial sequence
  Protein classification predicting sequence
GLPGDKI

SEQ ID NO: 44037 - protein, 11 aa, Artificial sequence
  Protein classification predicting sequence
YFMMGDNRDNS

SEQ ID NO: 44038 - protein, 7 aa, Artificial sequence
  Protein classification predicting sequence
IWMSFDK

SEQ ID NO: 44039 - protein, 10 aa, Artificial sequence
  Protein classification predicting sequence
EPFQIPSGSM

SEQ ID NO: 44040 - protein, 7 aa, Artificial sequence
  Protein classification predicting sequence
GDNRDNS

SEQ ID NO: 44041 - protein, 9 aa, Artificial sequence
  Protein classification predicting sequence
KRLIGLPGD

SEQ ID NO: 44042 - protein, 9 aa, Artificial sequence
  Protein classification predicting sequence
LERKGYLRR

SEQ ID NO: 44043 - protein, 7 aa, Artificial sequence
  Protein classification predicting sequence
IRLQPEN

SEQ ID NO: 44044 - protein, 7 aa, Artificial sequence
  Protein classification predicting sequence
AAICDGD

SEQ ID NO: 44045 - protein, 6 aa, Artificial sequence
  Protein classification predicting sequence
GMSMKD

SEQ ID NO: 44046 - protein, 7 aa, Artificial sequence
  Protein classification predicting sequence
DEVTVKR

SEQ ID NO: 44047 - protein, 7 aa, Artificial sequence
  Protein classification predicting sequence
LAQQHIE

SEQ ID NO: 44048 - protein, 11 aa, Artificial sequence
  Protein classification predicting sequence
DFAIEGLYCGL

SEQ ID NO: 44049 - protein, 7 aa, Artificial sequence
  Protein classification predicting sequence
GILEGDL

SEQ ID NO: 44050 - protein, 6 aa, Artificial sequence
  Protein classification predicting sequence
DFAIEG

SEQ ID NO: 44051 - protein, 8 aa, Artificial sequence
  Protein classification predicting sequence
AMIDGEAT

SEQ ID NO: 44052 - protein, 17 aa, Artificial sequence
  Protein classification predicting sequence
LERKGYLRRDPNRPRAV

SEQ ID NO: 44053 - protein, 8 aa, Artificial sequence
  Protein classification predicting sequence
NGDIVAAM

SEQ ID NO: 44054 - protein, 8 aa, Artificial sequence
  Protein classification predicting sequence
VWLMPHNP

SEQ ID NO: 44055 - protein, 10 aa, Artificial sequence
  Protein classification predicting sequence
LGKVVTVIRK

SEQ ID NO: 44056 - protein, 11 aa, Artificial sequence
  Protein classification predicting sequence
RAAQYHLEALE

SEQ ID NO: 44057 - protein, 6 aa, Artificial sequence
  Protein classification predicting sequence
VQGDSM

SEQ ID NO: 44058 - protein, 16 aa, Artificial sequence
  Protein classification predicting sequence
LTDTQQAILALIAERI

SEQ ID NO: 44059 - protein, 7 aa, Artificial sequence
  Protein classification predicting sequence
LTPRQAE

SEQ ID NO: 44060 - protein, 7 aa, Artificial sequence
  Protein classification predicting sequence
ADFLLRV

SEQ ID NO: 44061 - protein, 15 aa, Artificial sequence
  Protein classification predicting sequence
GVPPSFDEMKDALDL

SEQ ID NO: 44062 - protein, 9 aa, Artificial sequence
  Protein classification predicting sequence
GDSMIEAGI

SEQ ID NO: 44063 - protein, 7 aa, Artificial sequence
  Protein classification predicting sequence
GEHYALE

SEQ ID NO: 44064 - protein, 7 aa, Artificial sequence
  Protein classification predicting sequence
PPTRAEI

SEQ ID NO: 44065 - protein, 9 aa, Artificial sequence
  Protein classification predicting sequence
GFRSPNAAE

SEQ ID NO: 44066 - protein, 7 aa, Artificial sequence
  Protein classification predicting sequence
SMRDAGI

SEQ ID NO: 44067 - protein, 6 aa, Artificial sequence
  Protein classification predicting sequence
DEVTVK

SEQ ID NO: 44068 - protein, 13 aa, Artificial sequence
  Protein classification predicting sequence
IRRDPTKPRAIEI

SEQ ID NO: 44069 - protein, 6 aa, Artificial sequence
  Protein classification predicting sequence
PITAVE

SEQ ID NO: 44070 - protein, 19 aa, Artificial sequence
  Protein classification predicting sequence
NGDIIVAMTEEDEATVKRF

SEQ ID NO: 44071 - protein, 12 aa, Artificial sequence
  Protein classification predicting sequence
RLQPENSTMEPI

SEQ ID NO: 44072 - protein, 26 aa, Artificial sequence
  Protein classification predicting sequence
KGYPPSVREIGEAVGLASSSTVHGHL

SEQ ID NO: 44073 - protein, 7 aa, Artificial sequence
  Protein classification predicting sequence
PITAVEN

SEQ ID NO: 44074 - protein, 7 aa, Artificial sequence
  Protein classification predicting sequence
SMIEAGI

SEQ ID NO: 44075 - protein, 10 aa, Artificial sequence
  Protein classification predicting sequence
NGDIIVAMTE

SEQ ID NO: 44076 - protein, 7 aa, Artificial sequence
  Protein classification predicting sequence
ILGKVIG

SEQ ID NO: 44077 - protein, 7 aa, Artificial sequence
  Protein classification predicting sequence
VPISAIQ

SEQ ID NO: 44078 - protein, 10 aa, Artificial sequence
  Protein classification predicting sequence
VPLVGRIAAG

SEQ ID NO: 44079 - protein, 10 aa, Artificial sequence
  Protein classification predicting sequence
EEATLKRFRR

SEQ ID NO: 44080 - protein, 9 aa, Artificial sequence
  Protein classification predicting sequence
RQQQVFDLI

SEQ ID NO: 44081 - protein, 8 aa, Artificial sequence
  Protein classification predicting sequence
PPTRAEIA

SEQ ID NO: 44082 - protein, 7 aa, Artificial sequence
  Protein classification predicting sequence
NAAEEHL

SEQ ID NO: 44083 - protein, 10 aa, Artificial sequence
  Protein classification predicting sequence
LPLVGRVAAG

SEQ ID NO: 44084 - protein, 6 aa, Artificial sequence
  Protein classification predicting sequence
GILDGD

SEQ ID NO: 44085 - protein, 7 aa, Artificial sequence
  Protein classification predicting sequence
PSFDEMK

SEQ ID NO: 44086 - protein, 21 aa, Artificial sequence
  Protein classification predicting sequence
SKSGIHRLITALEERGFIRRL

SEQ ID NO: 44087 - protein, 7 aa, Artificial sequence
  Protein classification predicting sequence
RARALEV

SEQ ID NO: 44088 - protein, 9 aa, Artificial sequence
  Protein classification predicting sequence
YETRIFGPD

SEQ ID NO: 44089 - protein, 11 aa, Artificial sequence
  Protein classification predicting sequence
STVHGHLSRLE

SEQ ID NO: 44090 - protein, 12 aa, Artificial sequence
  Protein classification predicting sequence
IRRDPTKPRAIE

SEQ ID NO: 44091 - protein, 6 aa, Artificial sequence
  Protein classification predicting sequence
KRFFKE

SEQ ID NO: 44092 - protein, 9 aa, Artificial sequence
  Protein classification predicting sequence
RQRRILEVI

SEQ ID NO: 44093 - protein, 6 aa, Artificial sequence
  Protein classification predicting sequence
DWVVVR

SEQ ID NO: 44094 - protein, 8 aa, Artificial sequence
  Protein classification predicting sequence
KGFLRRDP

SEQ ID NO: 44095 - protein, 12 aa, Artificial sequence
  Protein classification predicting sequence
VAAMIDGEATVK

SEQ ID NO: 44096 - protein, 13 aa, Artificial sequence
  Protein classification predicting sequence
EIVSGASRGIRLL

SEQ ID NO: 44097 - protein, 11 aa, Artificial sequence
  Protein classification predicting sequence
STVHGHLARLE

SEQ ID NO: 44098 - protein, 7 aa, Artificial sequence
  Protein classification predicting sequence
AGEPILA

SEQ ID NO: 44099 - protein, 7 aa, Artificial sequence
  Protein classification predicting sequence
DLIRDHI

SEQ ID NO: 44100 - protein, 17 aa, Artificial sequence
  Protein classification predicting sequence
FKPSADFLLRVSGMSMK

SEQ ID NO: 44101 - protein, 6 aa, Artificial sequence
  Protein classification predicting sequence
DVRNGQ

SEQ ID NO: 44102 - protein, 19 aa, Artificial sequence
  Protein classification predicting sequence
VVARIDDEVTVKRLKKQGN

SEQ ID NO: 44103 - protein, 9 aa, Artificial sequence
  Protein classification predicting sequence
AENEEFAPI

SEQ ID NO: 44104 - protein, 8 aa, Artificial sequence
  Protein classification predicting sequence
GKVIGVYR

SEQ ID NO: 44105 - protein, 7 aa, Artificial sequence
  Protein classification predicting sequence
ALEERGF

SEQ ID NO: 44106 - protein, 11 aa, Artificial sequence
  Protein classification predicting sequence
RARALEVLRLP

SEQ ID NO: 44107 - protein, 19 aa, Artificial sequence
  Protein classification predicting sequence
GFKSPNAAEEHLKALARKG

SEQ ID NO: 44108 - protein, 16 aa, Artificial sequence
  Protein classification predicting sequence
SPNAAEEHLKALARKG

SEQ ID NO: 44109 - protein, 9 aa, Artificial sequence
  Protein classification predicting sequence
RNGQVVVAR

SEQ ID NO: 44110 - protein, 7 aa, Artificial sequence
  Protein classification predicting sequence
AVGVIRN

SEQ ID NO: 44111 - protein, 10 aa, Artificial sequence
  Protein classification predicting sequence
NAAEEHLKAL

SEQ ID NO: 44112 - protein, 16 aa, Artificial sequence
  Protein classification predicting sequence
AEEHLKALARKGVIEI

SEQ ID NO: 44113 - protein, 6 aa, Artificial sequence
  Protein classification predicting sequence
SRGIRL

SEQ ID NO: 44114 - protein, 6 aa, Artificial sequence
  Protein classification predicting sequence
GMSMRD

SEQ ID NO: 44115 - protein, 7 aa, Artificial sequence
  Protein classification predicting sequence
TKPRAIE

SEQ ID NO: 44116 - protein, 10 aa, Artificial sequence
  Protein classification predicting sequence
GESMINAGIL

SEQ ID NO: 44117 - protein, 6 aa, Artificial sequence
  Protein classification predicting sequence
STVHGH

SEQ ID NO: 44118 - protein, 9 aa, Artificial sequence
  Protein classification predicting sequence
LGKVVGLYR

SEQ ID NO: 44119 - protein, 12 aa, Artificial sequence
  Protein classification predicting sequence
GYLRRDPNRPRA

SEQ ID NO: 44120 - protein, 10 aa, Artificial sequence
  Protein classification predicting sequence
ILGKVVAVLR

SEQ ID NO: 44121 - protein, 7 aa, Artificial sequence
  Protein classification predicting sequence
AGILDGD

SEQ ID NO: 44122 - protein, 12 aa, Artificial sequence
  Protein classification predicting sequence
AGILDGDKVIVR

SEQ ID NO: 44123 - protein, 6 aa, Artificial sequence
  Protein classification predicting sequence
RLQPEN

SEQ ID NO: 44124 - protein, 8 aa, Artificial sequence
  Protein classification predicting sequence
GKVIGLYR

SEQ ID NO: 44125 - protein, 7 aa, Artificial sequence
  Protein classification predicting sequence
SRGIRLL

SEQ ID NO: 44126 - protein, 8 aa, Artificial sequence
  Protein classification predicting sequence
GRVAAGEP

SEQ ID NO: 44127 - protein, 7 aa, Artificial sequence
  Protein classification predicting sequence
DVRNGQV

SEQ ID NO: 44128 - protein, 6 aa, Artificial sequence
  Protein classification predicting sequence
DYLLRV

SEQ ID NO: 44129 - protein, 10 aa, Artificial sequence
  Protein classification predicting sequence
RGYPPSIREI

SEQ ID NO: 44130 - protein, 7 aa, Artificial sequence
  Protein classification predicting sequence
TEVAGSD

SEQ ID NO: 44131 - protein, 6 aa, Artificial sequence
  Protein classification predicting sequence
VVVRQQ

SEQ ID NO: 44132 - protein, 26 aa, Artificial sequence
  Protein classification predicting sequence
PHNPAFDPIPGNDATVLGKVVTVIRK

SEQ ID NO: 44133 - protein, 8 aa, Artificial sequence
  Protein classification predicting sequence
GTLFLLKV

SEQ ID NO: 44134 - protein, 14 aa, Artificial sequence
  Protein classification predicting sequence
AVGLASSSTVHGHL

SEQ ID NO: 44135 - protein, 7 aa, Artificial sequence
  Protein classification predicting sequence
NGEIVVA

SEQ ID NO: 44136 - protein, 6 aa, Artificial sequence
  Protein classification predicting sequence
PIVVDL

SEQ ID NO: 44137 - protein, 17 aa, Artificial sequence
  Protein classification predicting sequence
RDHISQTGMPPTRAEIA

SEQ ID NO: 44138 - protein, 19 aa, Artificial sequence
  Protein classification predicting sequence
LFKPSADFLLRVSGMSMKD

SEQ ID NO: 44139 - protein, 7 aa, Artificial sequence
  Protein classification predicting sequence
GNKVELL

SEQ ID NO: 44140 - protein, 13 aa, Artificial sequence
  Protein classification predicting sequence
NAAEEHLKALARK

SEQ ID NO: 44141 - protein, 8 aa, Artificial sequence
  Protein classification predicting sequence
NGQVVVAR

SEQ ID NO: 44142 - protein, 9 aa, Artificial sequence
  Protein classification predicting sequence
PIVVDLRQQ

SEQ ID NO: 44143 - protein, 6 aa, Artificial sequence
  Protein classification predicting sequence
EVTVKR

SEQ ID NO: 44144 - protein, 23 aa, Artificial sequence
  Protein classification predicting sequence
VVARIGDEVTVKRFKREGSKVWL

SEQ ID NO: 44145 - protein, 7 aa, Artificial sequence
  Protein classification predicting sequence
GASRGIR

SEQ ID NO: 44146 - protein, 10 aa, Artificial sequence
  Protein classification predicting sequence
LEGIAVGLIR

SEQ ID NO: 44147 - protein, 8 aa, Artificial sequence
  Protein classification predicting sequence
SMRDAGIL

SEQ ID NO: 44148 - protein, 7 aa, Artificial sequence
  Protein classification predicting sequence
DDVTVKR

SEQ ID NO: 44149 - protein, 21 aa, Artificial sequence
  Protein classification predicting sequence
PGEIVVALVDEEEATLKRFRR

SEQ ID NO: 44150 - protein, 35 aa, Artificial sequence
  Protein classification predicting sequence
EEATLKRFRRKGASIALEAANPAYETRIFGPDRVK

SEQ ID NO: 44151 - protein, 20 aa, Artificial sequence
  Protein classification predicting sequence
SKSGIHRLITALEERGFIRR

SEQ ID NO: 44152 - protein, 13 aa, Artificial sequence
  Protein classification predicting sequence
IALEAANPAYETR

SEQ ID NO: 44153 - protein, 14 aa, Artificial sequence
  Protein classification predicting sequence
VAAGEPILAQEHVE

SEQ ID NO: 44154 - protein, 33 aa, Artificial sequence
  Protein classification predicting sequence
GLPLVGRVAAGEPLLAQQHIEGHYQVDPSLFKP

SEQ ID NO: 44155 - protein, 66 aa, Artificial sequence
  Protein classification predicting sequence
ADFLLRVSGMSMKDIGIMDGDLLAVHKTQDVRNGQVVVARIDDEVTVKRLKKQGNKVELLPENSEF

SEQ ID NO: 44156 - protein, 7 aa, Artificial sequence
  Protein classification predicting sequence
EATLKRF

SEQ ID NO: 44157 - protein, 49 aa, Artificial sequence
  Protein classification predicting sequence
EETIHVPVIGKVTAGVPITAVENIEEYFPLPEHLTSTHNSDIFILNVVG

SEQ ID NO: 44158 - protein, 11 aa, Artificial sequence
  Protein classification predicting sequence
SMIEAGILDGD

SEQ ID NO: 44159 - protein, 32 aa, Artificial sequence
  Protein classification predicting sequence
SMIEAGILDGDKVIVRSQTIAENGDIIVAMTE

SEQ ID NO: 44160 - protein, 31 aa, Artificial sequence
  Protein classification predicting sequence
EATVKRFYKEKNRYRLQPENSTMEPIYLDNV

SEQ ID NO: 44161 - protein, 9 aa, Artificial sequence
  Protein classification predicting sequence
REIGQAVGL

SEQ ID NO: 44162 - protein, 9 aa, Artificial sequence
  Protein classification predicting sequence
VVGDSMIEA

SEQ ID NO: 44163 - protein, 7 aa, Artificial sequence
  Protein classification predicting sequence
EATVKRF

SEQ ID NO: 44164 - protein, 9 aa, Artificial sequence
  Protein classification predicting sequence
GYPPSVREI

SEQ ID NO: 44165 - protein, 9 aa, Artificial sequence
  Protein classification predicting sequence
RQQEVFDLI

SEQ ID NO: 44166 - protein, 10 aa, Artificial sequence
  Protein classification predicting sequence
IEGLAVGVIR

SEQ ID NO: 44167 - protein, 6 aa, Artificial sequence
  Protein classification predicting sequence
HYQVDP

SEQ ID NO: 44168 - protein, 7 aa, Artificial sequence
  Protein classification predicting sequence
IEGIAVG

SEQ ID NO: 44169 - protein, 7 aa, Artificial sequence
  Protein classification predicting sequence
PIGADIG

SEQ ID NO: 44170 - protein, 8 aa, Artificial sequence
  Protein classification predicting sequence
LDRVFFSP

SEQ ID NO: 44171 - protein, 12 aa, Artificial sequence
  Protein classification predicting sequence
VQGDSMRDEGIF

SEQ ID NO: 44172 - protein, 7 aa, Artificial sequence
  Protein classification predicting sequence
GIFDGDL

SEQ ID NO: 44173 - protein, 9 aa, Artificial sequence
  Protein classification predicting sequence
GDLIGVHRT

SEQ ID NO: 44174 - protein, 9 aa, Artificial sequence
  Protein classification predicting sequence
EITVKLLKI

SEQ ID NO: 44175 - protein, 12 aa, Artificial sequence
  Protein classification predicting sequence
KDRIRLLPRNPD

SEQ ID NO: 44176 - protein, 19 aa, Artificial sequence
  Protein classification predicting sequence
GRVAAGEPLLAQQHIEGHY

SEQ ID NO: 44177 - protein, 8 aa, Artificial sequence
  Protein classification predicting sequence
VDPSLFKP

SEQ ID NO: 44178 - protein, 8 aa, Artificial sequence
  Protein classification predicting sequence
LLPENSEF

SEQ ID NO: 44179 - protein, 16 aa, Artificial sequence
  Protein classification predicting sequence
QSFTIEGLAVGVIRNG

SEQ ID NO: 44180 - protein, 9 aa, Artificial sequence
  Protein classification predicting sequence
SKSGIHRLI

SEQ ID NO: 44181 - protein, 6 aa, Artificial sequence
  Protein classification predicting sequence
YREPFL

SEQ ID NO: 44182 - protein, 15 aa, Artificial sequence
  Protein classification predicting sequence
NSWQLLVRSEDSFGN

SEQ ID NO: 44183 - protein, 19 aa, Artificial sequence
  Protein classification predicting sequence
MWGYSGGSLASGWAAALQP

SEQ ID NO: 44184 - protein, 8 aa, Artificial sequence
  Protein classification predicting sequence
ANEYPEFK

SEQ ID NO: 44185 - protein, 11 aa, Artificial sequence
  Protein classification predicting sequence
HASDAEIDTLM

SEQ ID NO: 44186 - protein, 8 aa, Artificial sequence
  Protein classification predicting sequence
GWAAALQP

SEQ ID NO: 44187 - protein, 6 aa, Artificial sequence
  Protein classification predicting sequence
WCDWGI

SEQ ID NO: 44188 - protein, 13 aa, Artificial sequence
  Protein classification predicting sequence
LPVMLWIFGGGFE

SEQ ID NO: 44189 - protein, 8 aa, Artificial sequence
  Protein classification predicting sequence
GESAGSMS

SEQ ID NO: 44190 - protein, 8 aa, Artificial sequence
  Protein classification predicting sequence
GDNTYNGK

SEQ ID NO: 44191 - protein, 12 aa, Artificial sequence
  Protein classification predicting sequence
SLRLSYLPRPDG

SEQ ID NO: 44192 - protein, 11 aa, Artificial sequence
  Protein classification predicting sequence
LGLYTGKDNFR

SEQ ID NO: 44193 - protein, 11 aa, Artificial sequence
  Protein classification predicting sequence
EDCLTINVVRP

SEQ ID NO: 44194 - protein, 10 aa, Artificial sequence
  Protein classification predicting sequence
TQGSPFDTGI

SEQ ID NO: 44195 - protein, 10 aa, Artificial sequence
  Protein classification predicting sequence
TGILNALTPQ

SEQ ID NO: 44196 - protein, 13 aa, Artificial sequence
  Protein classification predicting sequence
KYSFLSKQLSGLP

SEQ ID NO: 44197 - protein, 16 aa, Artificial sequence
  Protein classification predicting sequence
ALGLYTGKDNFRTAGY

SEQ ID NO: 44198 - protein, 8 aa, Artificial sequence
  Protein classification predicting sequence
IPIFVYHG

SEQ ID NO: 44199 - protein, 10 aa, Artificial sequence
  Protein classification predicting sequence
DNGLVYQKQL

SEQ ID NO: 44200 - protein, 12 aa, Artificial sequence
  Protein classification predicting sequence
VHLIGYSLGAHV

SEQ ID NO: 44201 - protein, 8 aa, Artificial sequence
  Protein classification predicting sequence
SLGAHVAG

SEQ ID NO: 44202 - protein, 13 aa, Artificial sequence
  Protein classification predicting sequence
FYALAPVATVKYT

SEQ ID NO: 44203 - protein, 14 aa, Artificial sequence
  Protein classification predicting sequence
YNHLDFIWAMDAPQ

SEQ ID NO: 44204 - protein, 18 aa, Artificial sequence
  Protein classification predicting sequence
YNHLDFIWAMDAPQEVYN

SEQ ID NO: 44205 - protein, 10 aa, Artificial sequence
  Protein classification predicting sequence
SQMITYWGYP

SEQ ID NO: 44206 - protein, 9 aa, Artificial sequence
  Protein classification predicting sequence
NLPNNSLAF

SEQ ID NO: 44207 - protein, 18 aa, Artificial sequence
  Protein classification predicting sequence
LADAGYDVWLGNSRGNTW

SEQ ID NO: 44208 - protein, 7 aa, Artificial sequence
  Protein classification predicting sequence
DIESKFA

SEQ ID NO: 44209 - protein, 17 aa, Artificial sequence
  Protein classification predicting sequence
RITGLDPAGPNFEYAEA

SEQ ID NO: 44210 - protein, 33 aa, Artificial sequence
  Protein classification predicting sequence
FVDVLHTFTRGSPGRSIGIQKPVGHVDIYPNGG

SEQ ID NO: 44211 - protein, 7 aa, Artificial sequence
  Protein classification predicting sequence
FQPGCNI

SEQ ID NO: 44212 - protein, 14 aa, Artificial sequence
  Protein classification predicting sequence
IEKIRVKAGETQKK

SEQ ID NO: 44213 - protein, 24 aa, Artificial sequence
  Protein classification predicting sequence
SKTFVVIHGWTVTGMYESWVPKLV

SEQ ID NO: 44214 - protein, 11 aa, Artificial sequence
  Protein classification predicting sequence
RSIGIQKPVGH

SEQ ID NO: 44215 - protein, 6 aa, Artificial sequence
  Protein classification predicting sequence
FQPGCN

SEQ ID NO: 44216 - protein, 7 aa, Artificial sequence
  Protein classification predicting sequence
FSWSDWW

SEQ ID NO: 44217 - protein, 13 aa, Artificial sequence
  Protein classification predicting sequence
DIESKFALRTPED

SEQ ID NO: 44218 - protein, 21 aa, Artificial sequence
  Protein classification predicting sequence
FEISLYGTVAESENIPFTLPE

SEQ ID NO: 44219 - protein, 10 aa, Artificial sequence
  Protein classification predicting sequence
CHFNHSSKTF

SEQ ID NO: 44220 - protein, 11 aa, Artificial sequence
  Protein classification predicting sequence
REKVSHLQKGK

SEQ ID NO: 44221 - protein, 8 aa, Artificial sequence
  Protein classification predicting sequence
RGGVAAAD

SEQ ID NO: 44222 - protein, 9 aa, Artificial sequence
  Protein classification predicting sequence
SAGYTKLVG

SEQ ID NO: 44223 - protein, 12 aa, Artificial sequence
  Protein classification predicting sequence
QMPYKVFHYQVK

SEQ ID NO: 44224 - protein, 8 aa, Artificial sequence
  Protein classification predicting sequence
DVARFINW

SEQ ID NO: 44225 - protein, 40 aa, Artificial sequence
  Protein classification predicting sequence
GYEINKVRAKRSSKMYLKTRSQMPYKVFHYQVKIHFSGTE

SEQ ID NO: 44226 - protein, 22 aa, Artificial sequence
  Protein classification predicting sequence
RVIAERGLGDVDQLVKCSHERS

SEQ ID NO: 44227 - protein, 16 aa, Artificial sequence
  Protein classification predicting sequence
YTEVDIGELLMLKLKW

SEQ ID NO: 44228 - protein, 8 aa, Artificial sequence
  Protein classification predicting sequence
VNCICVDW

SEQ ID NO: 44229 - protein, 8 aa, Artificial sequence
  Protein classification predicting sequence
FVDVIHTD

SEQ ID NO: 44230 - protein, 11 aa, Artificial sequence
  Protein classification predicting sequence
ACNHLRSYKYY

SEQ ID NO: 44231 - protein, 9 aa, Artificial sequence
  Protein classification predicting sequence
NNVINPTLP

SEQ ID NO: 44232 - protein, 7 aa, Artificial sequence
  Protein classification predicting sequence
LSQIVDI

SEQ ID NO: 44233 - protein, 7 aa, Artificial sequence
  Protein classification predicting sequence
DMCKNMF

SEQ ID NO: 44234 - protein, 7 aa, Artificial sequence
  Protein classification predicting sequence
NVRVVGA

SEQ ID NO: 44235 - protein, 7 aa, Artificial sequence
  Protein classification predicting sequence
FVDAIHT

SEQ ID NO: 44236 - protein, 7 aa, Artificial sequence
  Protein classification predicting sequence
IHTDAAP

SEQ ID NO: 44237 - protein, 23 aa, Artificial sequence
  Protein classification predicting sequence
DADFVDVIHTDAAPLIPFLGFGT

SEQ ID NO: 44238 - protein, 8 aa, Artificial sequence
  Protein classification predicting sequence
GTAIRPLK

SEQ ID NO: 44239 - protein, 15 aa, Artificial sequence
  Protein classification predicting sequence
TRFLLYTNENPNNFQ

SEQ ID NO: 44240 - protein, 9 aa, Artificial sequence
  Protein classification predicting sequence
VNCICVDWK

SEQ ID NO: 44241 - protein, 7 aa, Artificial sequence
  Protein classification predicting sequence
DFFPNGG

SEQ ID NO: 44242 - protein, 11 aa, Artificial sequence
  Protein classification predicting sequence
LSQIVDIDGIW

SEQ ID NO: 44243 - protein, 7 aa, Artificial sequence
  Protein classification predicting sequence
NFARWRY

SEQ ID NO: 44244 - protein, 20 aa, Artificial sequence
  Protein classification predicting sequence
EFDAKLDVGTIEKVKFLWNN

SEQ ID NO: 44245 - protein, 7 aa, Artificial sequence
  Protein classification predicting sequence
GCPKMGH

SEQ ID NO: 44246 - protein, 8 aa, Artificial sequence
  Protein classification predicting sequence
TIEASNFQ

SEQ ID NO: 44247 - protein, 6 aa, Artificial sequence
  Protein classification predicting sequence
MGHYAD

SEQ ID NO: 44248 - protein, 8 aa, Artificial sequence
  Protein classification predicting sequence
SILNPDGF

SEQ ID NO: 44249 - protein, 6 aa, Artificial sequence
  Protein classification predicting sequence
NSKQYE

SEQ ID NO: 44250 - protein, 6 aa, Artificial sequence
  Protein classification predicting sequence
GFGMSQ

SEQ ID NO: 44251 - protein, 13 aa, Artificial sequence
  Protein classification predicting sequence
DFFPNGGKEMPGC

SEQ ID NO: 44252 - protein, 6 aa, Artificial sequence
  Protein classification predicting sequence
KVKFLW

SEQ ID NO: 44253 - protein, 5 aa, Artificial sequence
  Protein classification predicting sequence
CFPCP

SEQ ID NO: 44254 - protein, 41 aa, Artificial sequence
  Protein classification predicting sequence
SAFGSNYDRAVELYYYIKGGRVDYGAAHAAKYGHERYGKTY

SEQ ID NO: 44255 - protein, 8 aa, Artificial sequence
  Protein classification predicting sequence
HGGEISPL

SEQ ID NO: 44256 - protein, 8 aa, Artificial sequence
  Protein classification predicting sequence
RAVELYYY

SEQ ID NO: 44257 - protein, 11 aa, Artificial sequence
  Protein classification predicting sequence
KGGRVDYGAAH

SEQ ID NO: 44258 - protein, 10 aa, Artificial sequence
  Protein classification predicting sequence
TPHNGTHASD

SEQ ID NO: 44259 - protein, 6 aa, Artificial sequence
  Protein classification predicting sequence
ISSQHP

SEQ ID NO: 44260 - protein, 8 aa, Artificial sequence
  Protein classification predicting sequence
TGHSLGGA

SEQ ID NO: 44261 - protein, 17 aa, Artificial sequence
  Protein classification predicting sequence
KFARSADNQAFLVESVT

SEQ ID NO: 44262 - protein, 35 aa, Artificial sequence
  Protein classification predicting sequence
SRLHLVNLPALVWQDNGKHFLLVKVDTDNNRYLTY

SEQ ID NO: 44263 - protein, 14 aa, Artificial sequence
  Protein classification predicting sequence
IGPRTLVWSEKEQV

SEQ ID NO: 44264 - protein, 7 aa, Artificial sequence
  Protein classification predicting sequence
LVLPPSF

SEQ ID NO: 44265 - protein, 33 aa, Artificial sequence
  Protein classification predicting sequence
YGGMENPCLTFVTPTLLAGDKSLSNVIAHEISH

SEQ ID NO: 44266 - protein, 52 aa, Artificial sequence
  Protein classification predicting sequence
WTGNLVTNKTWDHFWLNEGHTVYLERHICGRLFGEKFRHFHALGGWGELQNT

SEQ ID NO: 44267 - protein, 8 aa, Artificial sequence
  Protein classification predicting sequence
KRMQEVYN

SEQ ID NO: 44268 - protein, 11 aa, Artificial sequence
  Protein classification predicting sequence
KRMQEVYNFNA

SEQ ID NO: 44269 - protein, 10 aa, Artificial sequence
  Protein classification predicting sequence
ALGGWGELQN

SEQ ID NO: 44270 - protein, 10 aa, Artificial sequence
  Protein classification predicting sequence
HLHLRCSVDF

SEQ ID NO: 44271 - protein, 19 aa, Artificial sequence
  Protein classification predicting sequence
YKGSPMEISLPIALSKNQE

SEQ ID NO: 44272 - protein, 26 aa, Artificial sequence
  Protein classification predicting sequence
VIEISFETSPKSSALQWLTPEQTSGK

SEQ ID NO: 44273 - protein, 6 aa, Artificial sequence
  Protein classification predicting sequence
TTDDWK

SEQ ID NO: 44274 - protein, 13 aa, Artificial sequence
  Protein classification predicting sequence
TLTNACIALSQRW

SEQ ID NO: 44275 - protein, 7 aa, Artificial sequence
  Protein classification predicting sequence
HPYLFSQ

SEQ ID NO: 44276 - protein, 8 aa, Artificial sequence
  Protein classification predicting sequence
ITVALAIV

SEQ ID NO: 44277 - protein, 7 aa, Artificial sequence
  Protein classification predicting sequence
GLRTYVF

SEQ ID NO: 44278 - protein, 12 aa, Artificial sequence
  Protein classification predicting sequence
HSTSRIDVELGA

SEQ ID NO: 44279 - protein, 27 aa, Artificial sequence
  Protein classification predicting sequence
RRVGDTVARVRELDQIRNFLTGQALTS

SEQ ID NO: 44280 - protein, 7 aa, Artificial sequence
  Protein classification predicting sequence
LGSLPCY

SEQ ID NO: 44281 - protein, 16 aa, Artificial sequence
  Protein classification predicting sequence
FISPILRRRLDDKFAR

SEQ ID NO: 44282 - protein, 9 aa, Artificial sequence
  Protein classification predicting sequence
WDKQLASYV

SEQ ID NO: 44283 - protein, 11 aa, Artificial sequence
  Protein classification predicting sequence
VTVLATIGQQG

SEQ ID NO: 44284 - protein, 6 aa, Artificial sequence
  Protein classification predicting sequence
FRYKPD

SEQ ID NO: 44285 - protein, 7 aa, Artificial sequence
  Protein classification predicting sequence
QRFYIPE

SEQ ID NO: 44286 - protein, 21 aa, Artificial sequence
  Protein classification predicting sequence
GQVLIDGHDLALADPNWLRRQ

SEQ ID NO: 44287 - protein, 6 aa, Artificial sequence
  Protein classification predicting sequence
PGMPME

SEQ ID NO: 44288 - protein, 20 aa, Artificial sequence
  Protein classification predicting sequence
AAKLAGAHDFISELREGYNT

SEQ ID NO: 44289 - protein, 26 aa, Artificial sequence
  Protein classification predicting sequence
VGEQGAGLSGGQRQRIAIARALVNNP

SEQ ID NO: 44290 - protein, 17 aa, Artificial sequence
  Protein classification predicting sequence
IAHRLSTVKNADRIIVM

SEQ ID NO: 44291 - protein, 10 aa, Artificial sequence
  Protein classification predicting sequence
GLYSYLHQLQ

SEQ ID NO: 44292 - protein, 12 aa, Artificial sequence
  Protein classification predicting sequence
RYLTYNLEQDAP

SEQ ID NO: 44293 - protein, 8 aa, Artificial sequence
  Protein classification predicting sequence
ILVTSRAS

SEQ ID NO: 44294 - protein, 27 aa, Artificial sequence
  Protein classification predicting sequence
VGQLAKFDFTWFIPAVIKYRKIFLETL

SEQ ID NO: 44295 - protein, 29 aa, Artificial sequence
  Protein classification predicting sequence
QVGISVTRLGDVLNSPTEQYQGKLSLPEI

SEQ ID NO: 44296 - protein, 23 aa, Artificial sequence
  Protein classification predicting sequence
FKNIRFRYKPDAPTILNNVNLEI

SEQ ID NO: 44297 - protein, 18 aa, Artificial sequence
  Protein classification predicting sequence
MERVIYAAKLAGAHDFIS

SEQ ID NO: 44298 - protein, 7 aa, Artificial sequence
  Protein classification predicting sequence
LGGVRDE

SEQ ID NO: 44299 - protein, 9 aa, Artificial sequence
  Protein classification predicting sequence
LEVLDPEQN

SEQ ID NO: 44300 - protein, 7 aa, Artificial sequence
  Protein classification predicting sequence
PLRDRME

SEQ ID NO: 44301 - protein, 11 aa, Artificial sequence
  Protein classification predicting sequence
QKEFFLKEQLK

SEQ ID NO: 44302 - protein, 8 aa, Artificial sequence
  Protein classification predicting sequence
LETSSAEY

SEQ ID NO: 44303 - protein, 6 aa, Artificial sequence
  Protein classification predicting sequence
VVRNYL

SEQ ID NO: 44304 - protein, 13 aa, Artificial sequence
  Protein classification predicting sequence
KFFRFSVGGMRDE

SEQ ID NO: 44305 - protein, 6 aa, Artificial sequence
  Protein classification predicting sequence
GHRRTY

SEQ ID NO: 44306 - protein, 7 aa, Artificial sequence
  Protein classification predicting sequence
IDEVDKI

SEQ ID NO: 44307 - protein, 17 aa, Artificial sequence
  Protein classification predicting sequence
HIPEGATPKDGPSAGIT

SEQ ID NO: 44308 - protein, 6 aa, Artificial sequence
  Protein classification predicting sequence
QMEKTQ

SEQ ID NO: 44309 - protein, 12 aa, Artificial sequence
  Protein classification predicting sequence
MSPMSAEATVVR

SEQ ID NO: 44310 - protein, 8 aa, Artificial sequence
  Protein classification predicting sequence
GHRRTYIG

SEQ ID NO: 44311 - protein, 8 aa, Artificial sequence
  Protein classification predicting sequence
IRIAGYTE

SEQ ID NO: 44312 - protein, 8 aa, Artificial sequence
  Protein classification predicting sequence
LGEVMQES

SEQ ID NO: 44313 - protein, 8 aa, Artificial sequence
  Protein classification predicting sequence
PKDGPSAG

SEQ ID NO: 44314 - protein, 8 aa, Artificial sequence
  Protein classification predicting sequence
GIKTVLIP

SEQ ID NO: 44315 - protein, 17 aa, Artificial sequence
  Protein classification predicting sequence
GPILCLVGPPGVGKTSL

SEQ ID NO: 44316 - protein, 6 aa, Artificial sequence
  Protein classification predicting sequence
VMFVAT

SEQ ID NO: 44317 - protein, 6 aa, Artificial sequence
  Protein classification predicting sequence
TGLAWT

SEQ ID NO: 44318 - protein, 6 aa, Artificial sequence
  Protein classification predicting sequence
QREYYL

SEQ ID NO: 44319 - protein, 13 aa, Artificial sequence
  Protein classification predicting sequence
RDEAEIRGHRRTY

SEQ ID NO: 44320 - protein, 11 aa, Artificial sequence
  Protein classification predicting sequence
ALLEVLDPEQN

SEQ ID NO: 44321 - protein, 22 aa, Artificial sequence
  Protein classification predicting sequence
PLRDIVVFPHMIVPLFVGREKS

SEQ ID NO: 44322 - protein, 6 aa, Artificial sequence
  Protein classification predicting sequence
TQKNAA

SEQ ID NO: 44323 - protein, 18 aa, Artificial sequence
  Protein classification predicting sequence
RVKRQMEKTQREYYLNEQ

SEQ ID NO: 44324 - protein, 9 aa, Artificial sequence
  Protein classification predicting sequence
QREYYLNEQ

SEQ ID NO: 44325 - protein, 28 aa, Artificial sequence
  Protein classification predicting sequence
KALAELKKLRSMSPMSAEATVVRNYLDW

SEQ ID NO: 44326 - protein, 9 aa, Artificial sequence
  Protein classification predicting sequence
LGGVRDEAE

SEQ ID NO: 44327 - protein, 17 aa, Artificial sequence
  Protein classification predicting sequence
RGHRRTYIGSMPGKVIQ

SEQ ID NO: 44328 - protein, 11 aa, Artificial sequence
  Protein classification predicting sequence
NPLFLLDEIDK

SEQ ID NO: 44329 - protein, 7 aa, Artificial sequence
  Protein classification predicting sequence
RGDPSSA

SEQ ID NO: 44330 - protein, 11 aa, Artificial sequence
  Protein classification predicting sequence
KDLAEIPDNVK

SEQ ID NO: 44331 - protein, 10 aa, Artificial sequence
  Protein classification predicting sequence
GPPGVGKTSL

SEQ ID NO: 44332 - protein, 7 aa, Artificial sequence
  Protein classification predicting sequence
PLLDRME

SEQ ID NO: 44333 - protein, 6 aa, Artificial sequence
  Protein classification predicting sequence
PLFVGR

SEQ ID NO: 44334 - protein, 8 aa, Artificial sequence
  Protein classification predicting sequence
LQVEKRIR

SEQ ID NO: 44335 - protein, 7 aa, Artificial sequence
  Protein classification predicting sequence
TGRKYVR

SEQ ID NO: 44336 - protein, 20 aa, Artificial sequence
  Protein classification predicting sequence
RDEAEIRGHRRTYIGSMPGK

SEQ ID NO: 44337 - protein, 9 aa, Artificial sequence
  Protein classification predicting sequence
GLAWTEVGG

SEQ ID NO: 44338 - protein, 27 aa, Artificial sequence
  Protein classification predicting sequence
GKGKLTYTGSLGEVMQESIQAALTVVR

SEQ ID NO: 44339 - protein, 9 aa, Artificial sequence
  Protein classification predicting sequence
RILEYLAVQ

SEQ ID NO: 44340 - protein, 9 aa, Artificial sequence
  Protein classification predicting sequence
LLTIETACV

SEQ ID NO: 44341 - protein, 6 aa, Artificial sequence
  Protein classification predicting sequence
HMPLKL

SEQ ID NO: 44342 - protein, 23 aa, Artificial sequence
  Protein classification predicting sequence
KGPILCLVGPPGVGKTSLGQSIA

SEQ ID NO: 44343 - protein, 8 aa, Artificial sequence
  Protein classification predicting sequence
DNLHDYLG

SEQ ID NO: 44344 - protein, 12 aa, Artificial sequence
  Protein classification predicting sequence
GHRRTYIGAMPG

SEQ ID NO: 44345 - protein, 7 aa, Artificial sequence
  Protein classification predicting sequence
RALEEVM

SEQ ID NO: 44346 - protein, 9 aa, Artificial sequence
  Protein classification predicting sequence
EISVLQVEK

SEQ ID NO: 44347 - protein, 26 aa, Artificial sequence
  Protein classification predicting sequence
IRSRVKRQMEKTQREYYLNEQMKAIQ

SEQ ID NO: 44348 - protein, 9 aa, Artificial sequence
  Protein classification predicting sequence
KTKLSKEAR

SEQ ID NO: 44349 - protein, 7 aa, Artificial sequence
  Protein classification predicting sequence
MSPMSAE

SEQ ID NO: 44350 - protein, 17 aa, Artificial sequence
  Protein classification predicting sequence
TVVRNYLDWLLSIPWGK

SEQ ID NO: 44351 - protein, 11 aa, Artificial sequence
  Protein classification predicting sequence
DHYLEVDYDLS

SEQ ID NO: 44352 - protein, 8 aa, Artificial sequence
  Protein classification predicting sequence
VMFVTTAN

SEQ ID NO: 44353 - protein, 14 aa, Artificial sequence
  Protein classification predicting sequence
GYTEDEKLEIAKRH

SEQ ID NO: 44354 - protein, 13 aa, Artificial sequence
  Protein classification predicting sequence
IGGLKEKLLAALR

SEQ ID NO: 44355 - protein, 7 aa, Artificial sequence
  Protein classification predicting sequence
MTGEITL

SEQ ID NO: 44356 - protein, 8 aa, Artificial sequence
  Protein classification predicting sequence
SIAKATGR

SEQ ID NO: 44357 - protein, 8 aa, Artificial sequence
  Protein classification predicting sequence
TVKVLVEG

SEQ ID NO: 44358 - protein, 24 aa, Artificial sequence
  Protein classification predicting sequence
ATGRKYVRMALGGVRDEAEIRGHR

SEQ ID NO: 44359 - protein, 14 aa, Artificial sequence
  Protein classification predicting sequence
LGGVRDEAEIRGHR

SEQ ID NO: 44360 - protein, 12 aa, Artificial sequence
  Protein classification predicting sequence
NPLFLLDEIDKM

SEQ ID NO: 44361 - protein, 20 aa, Artificial sequence
  Protein classification predicting sequence
SDMRGDPASALLEVLDPEQN

SEQ ID NO: 44362 - protein, 11 aa, Artificial sequence
  Protein classification predicting sequence
VTGLAWTEVGG

SEQ ID NO: 44363 - protein, 6 aa, Artificial sequence
  Protein classification predicting sequence
DVMKES

SEQ ID NO: 44364 - protein, 14 aa, Artificial sequence
  Protein classification predicting sequence
GATPKDGPSAGIAM

SEQ ID NO: 44365 - protein, 18 aa, Artificial sequence
  Protein classification predicting sequence
SCLTGNPVRADVAMTGEI

SEQ ID NO: 44366 - protein, 13 aa, Artificial sequence
  Protein classification predicting sequence
RGHRRTYIGSMPG

SEQ ID NO: 44367 - protein, 6 aa, Artificial sequence
  Protein classification predicting sequence
LDPEQN

SEQ ID NO: 44368 - protein, 8 aa, Artificial sequence
  Protein classification predicting sequence
YTREAGVR

SEQ ID NO: 44369 - protein, 6 aa, Artificial sequence
  Protein classification predicting sequence
EYLAVQ

SEQ ID NO: 44370 - protein, 6 aa, Artificial sequence
  Protein classification predicting sequence
EIRGHR

SEQ ID NO: 44371 - protein, 8 aa, Artificial sequence
  Protein classification predicting sequence
GLDKVKER

SEQ ID NO: 44372 - protein, 8 aa, Artificial sequence
  Protein classification predicting sequence
RIVEYLAV

SEQ ID NO: 44373 - protein, 8 aa, Artificial sequence
  Protein classification predicting sequence
ALLEVLDP

SEQ ID NO: 44374 - protein, 6 aa, Artificial sequence
  Protein classification predicting sequence
LLDRME

SEQ ID NO: 44375 - protein, 7 aa, Artificial sequence
  Protein classification predicting sequence
MTGEVTL

SEQ ID NO: 44376 - protein, 14 aa, Artificial sequence
  Protein classification predicting sequence
YVKLNKKISPEVVG

SEQ ID NO: 44377 - protein, 13 aa, Artificial sequence
  Protein classification predicting sequence
DYSKLADTVASHL

SEQ ID NO: 44378 - protein, 7 aa, Artificial sequence
  Protein classification predicting sequence
PWGKKSK

SEQ ID NO: 44379 - protein, 32 aa, Artificial sequence
  Protein classification predicting sequence
QSMKKAKKSNPLFLLDEIDKMGQDFRGDPSSA

SEQ ID NO: 44380 - protein, 18 aa, Artificial sequence
  Protein classification predicting sequence
TFMDHYLEVEYDLSNVMF

SEQ ID NO: 44381 - protein, 12 aa, Artificial sequence
  Protein classification predicting sequence
EIAKRHLLPKAI

SEQ ID NO: 44382 - protein, 11 aa, Artificial sequence
  Protein classification predicting sequence
LARKAVTEILK

SEQ ID NO: 44383 - protein, 89 aa, Artificial sequence
  Protein classification predicting sequence
DQVGVVTGLAWTEVGGELLTIEGVMMPGKGRMTVTGNLRDVMKESISAAASYVRSRAIDFGIEPPLFDKRDIHVHVPEGATPKDGPSAG

SEQ ID NO: 44384 - protein, 21 aa, Artificial sequence
  Protein classification predicting sequence
KRDIHVHVPEGATPKDGPSAG

SEQ ID NO: 44385 - protein, 6 aa, Artificial sequence
  Protein classification predicting sequence
GPILCL

SEQ ID NO: 44386 - protein, 13 aa, Artificial sequence
  Protein classification predicting sequence
DHYLEVEYDLSNV

SEQ ID NO: 44387 - protein, 34 aa, Artificial sequence
  Protein classification predicting sequence
ERSERIEIPVLPLRDVVVYPHMVIPLFVGREKSI

SEQ ID NO: 44388 - protein, 10 aa, Artificial sequence
  Protein classification predicting sequence
PLFVGREKSI

SEQ ID NO: 44389 - protein, 17 aa, Artificial sequence
  Protein classification predicting sequence
LQLLKLPDGTVKVLVEG

SEQ ID NO: 44390 - protein, 15 aa, Artificial sequence
  Protein classification predicting sequence
MESEIDLLQVEKRIR

SEQ ID NO: 44391 - protein, 29 aa, Artificial sequence
  Protein classification predicting sequence
RVKKQMEKSQREYYLNEQMKAIQKELGEM

SEQ ID NO: 44392 - protein, 5 aa, Artificial sequence
  Protein classification predicting sequence
YIDWM

SEQ ID NO: 44393 - protein, 8 aa, Artificial sequence
  Protein classification predicting sequence
PGKLIQKM

SEQ ID NO: 44394 - protein, 8 aa, Artificial sequence
  Protein classification predicting sequence
TGSLGDVM

SEQ ID NO: 44395 - protein, 9 aa, Artificial sequence
  Protein classification predicting sequence
VMQESIQAA

SEQ ID NO: 44396 - protein, 8 aa, Artificial sequence
  Protein classification predicting sequence
GTFLFGAA

SEQ ID NO: 44397 - protein, 7 aa, Artificial sequence
  Protein classification predicting sequence
VCDPDWS

SEQ ID NO: 44398 - protein, 8 aa, Artificial sequence
  Protein classification predicting sequence
SIYVGLSR

SEQ ID NO: 44399 - protein, 7 aa, Artificial sequence
  Protein classification predicting sequence
HTTLHET

SEQ ID NO: 44400 - protein, 7 aa, Artificial sequence
  Protein classification predicting sequence
LPFAILT

SEQ ID NO: 44401 - protein, 11 aa, Artificial sequence
  Protein classification predicting sequence
RLSFYSGHSSF

SEQ ID NO: 44402 - protein, 6 aa, Artificial sequence
  Protein classification predicting sequence
MYCMLF

SEQ ID NO: 44403 - protein, 6 aa, Artificial sequence
  Protein classification predicting sequence
GEVVDF

SEQ ID NO: 44404 - protein, 6 aa, Artificial sequence
  Protein classification predicting sequence
GNFIDR

SEQ ID NO: 44405 - protein, 7 aa, Artificial sequence
  Protein classification predicting sequence
GAAFSFL

SEQ ID NO: 44406 - protein, 7 aa, Artificial sequence
  Protein classification predicting sequence
WHFATFN

SEQ ID NO: 44407 - protein, 8 aa, Artificial sequence
  Protein classification predicting sequence
FNEGAAFG

SEQ ID NO: 44408 - protein, 9 aa, Artificial sequence
  Protein classification predicting sequence
VLIIDLGSK

SEQ ID NO: 44409 - protein, 9 aa, Artificial sequence
  Protein classification predicting sequence
GAAFSFLAD

SEQ ID NO: 44410 - protein, 9 aa, Artificial sequence
  Protein classification predicting sequence
AYALIIGGA

SEQ ID NO: 44411 - protein, 7 aa, Artificial sequence
  Protein classification predicting sequence
NDGAAWS

SEQ ID NO: 44412 - protein, 8 aa, Artificial sequence
  Protein classification predicting sequence
IVSHIALG

SEQ ID NO: 44413 - protein, 9 aa, Artificial sequence
  Protein classification predicting sequence
GAAWSILEG

SEQ ID NO: 44414 - protein, 7 aa, Artificial sequence
  Protein classification predicting sequence
MWFFYLI

SEQ ID NO: 44415 - protein, 8 aa, Artificial sequence
  Protein classification predicting sequence
IIGGALGN

SEQ ID NO: 44416 - protein, 18 aa, Artificial sequence
  Protein classification predicting sequence
FSWTLAYNTGAAFSFLAD

SEQ ID NO: 44417 - protein, 6 aa, Artificial sequence
  Protein classification predicting sequence
GHVVDF

SEQ ID NO: 44418 - protein, 5 aa, Artificial sequence
  Protein classification predicting sequence
GWQRW

SEQ ID NO: 44419 - protein, 35 aa, Artificial sequence
  Protein classification predicting sequence
CSTGLRWLWLVVVVLIIDLGSKYLILQNFALGDTV

SEQ ID NO: 44420 - protein, 24 aa, Artificial sequence
  Protein classification predicting sequence
LFPSLNLHYARNYGAAFSFLADSG

SEQ ID NO: 44421 - protein, 61 aa, Artificial sequence
  Protein classification predicting sequence
VMMYRSKATQKLNNIAYALIIGGALGNLFDRLWHGFVVDMIDFYVGDWHFATFNLADTAIC

SEQ ID NO: 44422 - protein, 9 aa, Artificial sequence
  Protein classification predicting sequence
ILGGAMGNL

SEQ ID NO: 44423 - protein, 16 aa, Artificial sequence
  Protein classification predicting sequence
ITSHRNNGAAWGILSG

SEQ ID NO: 44424 - protein, 19 aa, Artificial sequence
  Protein classification predicting sequence
MQVAISLLFAGALGNFIDR

SEQ ID NO: 44425 - protein, 9 aa, Artificial sequence
  Protein classification predicting sequence
GEVVDFIDT

SEQ ID NO: 44426 - protein, 8 aa, Artificial sequence
  Protein classification predicting sequence
IITIIILI

SEQ ID NO: 44427 - protein, 21 aa, Artificial sequence
  Protein classification predicting sequence
FLNITSHRNNGAAWGILSGKM

SEQ ID NO: 44428 - protein, 31 aa, Artificial sequence
  Protein classification predicting sequence
GEVVDFIDTNIFGYDFPIFNIADSSLTIGVI

SEQ ID NO: 44429 - protein, 7 aa, Artificial sequence
  Protein classification predicting sequence
GWQRWLF

SEQ ID NO: 44430 - protein, 16 aa, Artificial sequence
  Protein classification predicting sequence
GWQRWLFTGIAFVVTG

SEQ ID NO: 44431 - protein, 11 aa, Artificial sequence
  Protein classification predicting sequence
GAAMIILDGFR

SEQ ID NO: 44432 - protein, 11 aa, Artificial sequence
  Protein classification predicting sequence
NMGYGWANRIE

SEQ ID NO: 44433 - protein, 13 aa, Artificial sequence
  Protein classification predicting sequence
HGFVVDYLDFYWG

SEQ ID NO: 44434 - protein, 7 aa, Artificial sequence
  Protein classification predicting sequence
YALIIGG

SEQ ID NO: 44435 - protein, 8 aa, Artificial sequence
  Protein classification predicting sequence
AICIGAAL

SEQ ID NO: 44436 - protein, 11 aa, Artificial sequence
  Protein classification predicting sequence
AGWSNYGGGNQ

SEQ ID NO: 44437 - protein, 7 aa, Artificial sequence
  Protein classification predicting sequence
AEVETSK

SEQ ID NO: 44438 - protein, 9 aa, Artificial sequence
  Protein classification predicting sequence
NLYGSHPFY

SEQ ID NO: 44439 - protein, 13 aa, Artificial sequence
  Protein classification predicting sequence
QQLKGGISAYNAG

SEQ ID NO: 44440 - protein, 8 aa, Artificial sequence
  Protein classification predicting sequence
RCSLAREM

SEQ ID NO: 44441 - protein, 11 aa, Artificial sequence
  Protein classification predicting sequence
CIAEHESSYRT

SEQ ID NO: 44442 - protein, 8 aa, Artificial sequence
  Protein classification predicting sequence
DYGIFQIN

SEQ ID NO: 44443 - protein, 8 aa, Artificial sequence
  Protein classification predicting sequence
GRFSYNEC

SEQ ID NO: 44444 - protein, 33 aa, Artificial sequence
  Protein classification predicting sequence
LGLDGYKGVSLANWLCLTKWESSYNTKATNYNP

SEQ ID NO: 44445 - protein, 5 aa, Artificial sequence
  Protein classification predicting sequence
AWVAW

SEQ ID NO: 44446 - protein, 6 aa, Artificial sequence
  Protein classification predicting sequence
DYGIFQ

SEQ ID NO: 44447 - protein, 6 aa, Artificial sequence
  Protein classification predicting sequence
NSKWWC

SEQ ID NO: 44448 - protein, 9 aa, Artificial sequence
  Protein classification predicting sequence
YKGVSLANW

SEQ ID NO: 44449 - protein, 8 aa, Artificial sequence
  Protein classification predicting sequence
KWESGYNT

SEQ ID NO: 44450 - protein, 6 aa, Artificial sequence
  Protein classification predicting sequence
DYGLFQ

SEQ ID NO: 44451 - protein, 7 aa, Artificial sequence
  Protein classification predicting sequence
GMDGYRG

SEQ ID NO: 44452 - protein, 8 aa, Artificial sequence
  Protein classification predicting sequence
WCNDGKTP

SEQ ID NO: 44453 - protein, 10 aa, Artificial sequence
  Protein classification predicting sequence
HCQNKDVSQY

SEQ ID NO: 44454 - protein, 11 aa, Artificial sequence
  Protein classification predicting sequence
STDYGIFQINS

SEQ ID NO: 44455 - protein, 6 aa, Artificial sequence
  Protein classification predicting sequence
DDITQA

SEQ ID NO: 44456 - protein, 14 aa, Artificial sequence
  Protein classification predicting sequence
LGLDGYKGVSLANW

SEQ ID NO: 44457 - protein, 6 aa, Artificial sequence
  Protein classification predicting sequence
ESSYNT

SEQ ID NO: 44458 - protein, 8 aa, Artificial sequence
  Protein classification predicting sequence
QINSRYWC

SEQ ID NO: 44459 - protein, 6 aa, Artificial sequence
  Protein classification predicting sequence
ATNYNP

SEQ ID NO: 44460 - protein, 21 aa, Artificial sequence
  Protein classification predicting sequence
STDYGIFQINSRYWCNDGKTP

SEQ ID NO: 44461 - protein, 6 aa, Artificial sequence
  Protein classification predicting sequence
ACHISC

SEQ ID NO: 44462 - protein, 6 aa, Artificial sequence
  Protein classification predicting sequence
CSALLQ

SEQ ID NO: 44463 - protein, 32 aa, Artificial sequence
  Protein classification predicting sequence
DDITQAVACAKRVVSDPNGIRAWVAWRAHCEN

SEQ ID NO: 44464 - protein, 5 aa, Artificial sequence
  Protein classification predicting sequence
NWVCL

SEQ ID NO: 44465 - protein, 6 aa, Artificial sequence
  Protein classification predicting sequence
DGRTPG

SEQ ID NO: 44466 - protein, 6 aa, Artificial sequence
  Protein classification predicting sequence
CAKRVV

SEQ ID NO: 44467 - protein, 7 aa, Artificial sequence
  Protein classification predicting sequence
GYRGVSL

SEQ ID NO: 44468 - protein, 6 aa, Artificial sequence
  Protein classification predicting sequence
HCQNRD

SEQ ID NO: 44469 - protein, 15 aa, Artificial sequence
  Protein classification predicting sequence
ATNRNTDGSTDYGIL

SEQ ID NO: 44470 - protein, 7 aa, Artificial sequence
  Protein classification predicting sequence
INSRWWC

SEQ ID NO: 44471 - protein, 6 aa, Artificial sequence
  Protein classification predicting sequence
ESNFNT

SEQ ID NO: 44472 - protein, 27 aa, Artificial sequence
  Protein classification predicting sequence
LFLSVAVQGKVFERCELARTLKKLGLD

SEQ ID NO: 44473 - protein, 14 aa, Artificial sequence
  Protein classification predicting sequence
GDRSTDYGIFQINS

SEQ ID NO: 44474 - protein, 11 aa, Artificial sequence
  Protein classification predicting sequence
GKTPGAVNACH

SEQ ID NO: 44475 - protein, 6 aa, Artificial sequence
  Protein classification predicting sequence
AVNACH

SEQ ID NO: 44476 - protein, 6 aa, Artificial sequence
  Protein classification predicting sequence
ESNYNT

SEQ ID NO: 44477 - protein, 8 aa, Artificial sequence
  Protein classification predicting sequence
GIRAWVAW

SEQ ID NO: 44478 - protein, 13 aa, Artificial sequence
  Protein classification predicting sequence
VQGKVFERCELAR

SEQ ID NO: 44479 - protein, 5 aa, Artificial sequence
  Protein classification predicting sequence
CQNRD

SEQ ID NO: 44480 - protein, 8 aa, Artificial sequence
  Protein classification predicting sequence
LGLLLLSV

SEQ ID NO: 44481 - protein, 10 aa, Artificial sequence
  Protein classification predicting sequence
GYKGVSLANW

SEQ ID NO: 44482 - protein, 10 aa, Artificial sequence
  Protein classification predicting sequence
SLANWMCLAK

SEQ ID NO: 44483 - protein, 11 aa, Artificial sequence
  Protein classification predicting sequence
DDITQAVACAK

SEQ ID NO: 44484 - protein, 7 aa, Artificial sequence
  Protein classification predicting sequence
CSELMEN

SEQ ID NO: 44485 - protein, 15 aa, Artificial sequence
  Protein classification predicting sequence
EQGITAWVAWKSHCR

SEQ ID NO: 44486 - protein, 11 aa, Artificial sequence
  Protein classification predicting sequence
DGYRGISLANW

SEQ ID NO: 44487 - protein, 7 aa, Artificial sequence
  Protein classification predicting sequence
CLAKWES

SEQ ID NO: 44488 - protein, 27 aa, Artificial sequence
  Protein classification predicting sequence
ATNYNPGDQSTDYGIFQINSHYWCNNG

SEQ ID NO: 44489 - protein, 8 aa, Artificial sequence
  Protein classification predicting sequence
SLANWMCL

SEQ ID NO: 44490 - protein, 12 aa, Artificial sequence
  Protein classification predicting sequence
ESTDYGIFQINS

SEQ ID NO: 44491 - protein, 9 aa, Artificial sequence
  Protein classification predicting sequence
YWCNNGKTP

SEQ ID NO: 44492 - protein, 11 aa, Artificial sequence
  Protein classification predicting sequence
CAKRVVRDPQG

SEQ ID NO: 44493 - protein, 24 aa, Artificial sequence
  Protein classification predicting sequence
GLDNYRGYSLGNWVCAAKFESNFN

SEQ ID NO: 44494 - protein, 11 aa, Artificial sequence
  Protein classification predicting sequence
CLAKWESGYNT

SEQ ID NO: 44495 - protein, 33 aa, Artificial sequence
  Protein classification predicting sequence
ATNYNPGDESTDYGIFQINSRYWCNNGKTPGAV

SEQ ID NO: 44496 - protein, 11 aa, Artificial sequence
  Protein classification predicting sequence
DPQGIRAWVAW

SEQ ID NO: 44497 - protein, 6 aa, Artificial sequence
  Protein classification predicting sequence
ANWVCL

SEQ ID NO: 44498 - protein, 13 aa, Artificial sequence
  Protein classification predicting sequence
ATNRNTDGSTDYG

SEQ ID NO: 44499 - protein, 5 aa, Artificial sequence
  Protein classification predicting sequence
WCNDG

SEQ ID NO: 44500 - protein, 11 aa, Artificial sequence
  Protein classification predicting sequence
GRCELAAAMKR

SEQ ID NO: 44501 - protein, 10 aa, Artificial sequence
  Protein classification predicting sequence
RCELAAAMKR

SEQ ID NO: 44502 - protein, 11 aa, Artificial sequence
  Protein classification predicting sequence
GYSLGNWVCAA

SEQ ID NO: 44503 - protein, 19 aa, Artificial sequence
  Protein classification predicting sequence
CAKKIVSDGNGMNAWVAWR

SEQ ID NO: 44504 - protein, 6 aa, Artificial sequence
  Protein classification predicting sequence
AWVAWR

SEQ ID NO: 44505 - protein, 6 aa, Artificial sequence
  Protein classification predicting sequence
CKGTDV

SEQ ID NO: 44506 - protein, 9 aa, Artificial sequence
  Protein classification predicting sequence
DGYRGISLA

SEQ ID NO: 44507 - protein, 8 aa, Artificial sequence
  Protein classification predicting sequence
LGLVLLSV

SEQ ID NO: 44508 - protein, 16 aa, Artificial sequence
  Protein classification predicting sequence
VQGKVFERCELARTLK

SEQ ID NO: 44509 - protein, 9 aa, Artificial sequence
  Protein classification predicting sequence
AVACAKRVV

SEQ ID NO: 44510 - protein, 6 aa, Artificial sequence
  Protein classification predicting sequence
CHIPCS

SEQ ID NO: 44511 - protein, 6 aa, Artificial sequence
  Protein classification predicting sequence
DVSQYV

SEQ ID NO: 44512 - protein, 13 aa, Artificial sequence
  Protein classification predicting sequence
KVFERCELARTLK

SEQ ID NO: 44513 - protein, 9 aa, Artificial sequence
  Protein classification predicting sequence
YNTRATNYN

SEQ ID NO: 44514 - protein, 11 aa, Artificial sequence
  Protein classification predicting sequence
ALLQDNIADAV

SEQ ID NO: 44515 - protein, 38 aa, Artificial sequence
  Protein classification predicting sequence
ALLQDNIADAVACAKRVVRDPQGIRAWVAWRNRCQNRD

SEQ ID NO: 44516 - protein, 9 aa, Artificial sequence
  Protein classification predicting sequence
VQGKVFERC

SEQ ID NO: 44517 - protein, 6 aa, Artificial sequence
  Protein classification predicting sequence
KVFERC

SEQ ID NO: 44518 - protein, 8 aa, Artificial sequence
  Protein classification predicting sequence
TPGSRNLC

SEQ ID NO: 44519 - protein, 13 aa, Artificial sequence
  Protein classification predicting sequence
SLANWVCLAKWES

SEQ ID NO: 44520 - protein, 14 aa, Artificial sequence
  Protein classification predicting sequence
KVYGRCELAAAMKR

SEQ ID NO: 44521 - protein, 15 aa, Artificial sequence
  Protein classification predicting sequence
DPQGIRAWVAWRNHC

SEQ ID NO: 44522 - protein, 6 aa, Artificial sequence
  Protein classification predicting sequence
ESDYNT

SEQ ID NO: 44523 - protein, 6 aa, Artificial sequence
  Protein classification predicting sequence
AVDGCH

SEQ ID NO: 44524 - protein, 8 aa, Artificial sequence
  Protein classification predicting sequence
WYGWKNHC

SEQ ID NO: 44525 - protein, 17 aa, Artificial sequence
  Protein classification predicting sequence
GLDNYRGYSLGNWVCAA

SEQ ID NO: 44526 - protein, 9 aa, Artificial sequence
  Protein classification predicting sequence
GMNAWVAWR

SEQ ID NO: 44527 - protein, 17 aa, Artificial sequence
  Protein classification predicting sequence
GMNAWVAWRKHCKGTDV

SEQ ID NO: 44528 - protein, 8 aa, Artificial sequence
  Protein classification predicting sequence
SLANWVCL

SEQ ID NO: 44529 - protein, 7 aa, Artificial sequence
  Protein classification predicting sequence
YNTRATN

SEQ ID NO: 44530 - protein, 26 aa, Artificial sequence
  Protein classification predicting sequence
ILGLVLLSVTVQGKIFERCELARTLK

SEQ ID NO: 44531 - protein, 12 aa, Artificial sequence
  Protein classification predicting sequence
RAWVAWRNHCQN

SEQ ID NO: 44532 - protein, 10 aa, Artificial sequence
  Protein classification predicting sequence
ERCELARTLK

SEQ ID NO: 44533 - protein, 12 aa, Artificial sequence
  Protein classification predicting sequence
AVACAKRVVSDP

SEQ ID NO: 44534 - protein, 11 aa, Artificial sequence
  Protein classification predicting sequence
FERCELARTLK

SEQ ID NO: 44535 - protein, 14 aa, Artificial sequence
  Protein classification predicting sequence
FERCELARTLKRLG

SEQ ID NO: 44536 - protein, 7 aa, Artificial sequence
  Protein classification predicting sequence
YRGISLA

SEQ ID NO: 44537 - protein, 7 aa, Artificial sequence
  Protein classification predicting sequence
RCKGTDV

SEQ ID NO: 44538 - protein, 14 aa, Artificial sequence
  Protein classification predicting sequence
AWVAWRNRCKGTDV

SEQ ID NO: 44539 - protein, 11 aa, Artificial sequence
  Protein classification predicting sequence
STDYGILQINS

SEQ ID NO: 44540 - protein, 7 aa, Artificial sequence
  Protein classification predicting sequence
RTGVVGP

SEQ ID NO: 44541 - protein, 21 aa, Artificial sequence
  Protein classification predicting sequence
GRFSYNECGLSCNALLTDDIT

SEQ ID NO: 44542 - protein, 8 aa, Artificial sequence
  Protein classification predicting sequence
LGVPRDQL

SEQ ID NO: 44543 - protein, 17 aa, Artificial sequence
  Protein classification predicting sequence
SVRCAQKVLSQQGWSAW

SEQ ID NO: 44544 - protein, 12 aa, Artificial sequence
  Protein classification predicting sequence
WHYCSGWLPSID

SEQ ID NO: 44545 - protein, 18 aa, Artificial sequence
  Protein classification predicting sequence
WACIAEHESSYRTGVVGP

SEQ ID NO: 44546 - protein, 15 aa, Artificial sequence
  Protein classification predicting sequence
QQGWSAWSTWHYCSG

SEQ ID NO: 44547 - protein, 7 aa, Artificial sequence
  Protein classification predicting sequence
PGKDCNV

SEQ ID NO: 44548 - protein, 9 aa, Artificial sequence
  Protein classification predicting sequence
GIWTICRGA

SEQ ID NO: 44549 - protein, 12 aa, Artificial sequence
  Protein classification predicting sequence
ILDQFLDEKEGN

SEQ ID NO: 44550 - protein, 18 aa, Artificial sequence
  Protein classification predicting sequence
GACEAIRWWIKDGGRDCR

SEQ ID NO: 44551 - protein, 8 aa, Artificial sequence
  Protein classification predicting sequence
RRDQESAL

SEQ ID NO: 44552 - protein, 5 aa, Artificial sequence
  Protein classification predicting sequence
WRNHC

SEQ ID NO: 44553 - protein, 22 aa, Artificial sequence
  Protein classification predicting sequence
HYFYNCYPKNANANGSGQTYVN

SEQ ID NO: 44554 - protein, 9 aa, Artificial sequence
  Protein classification predicting sequence
WASGGSSIL

SEQ ID NO: 44555 - protein, 9 aa, Artificial sequence
  Protein classification predicting sequence
YEYLLKAWL

SEQ ID NO: 44556 - protein, 8 aa, Artificial sequence
  Protein classification predicting sequence
LGPEAFRF

SEQ ID NO: 44557 - protein, 9 aa, Artificial sequence
  Protein classification predicting sequence
SVFEVNIRF

SEQ ID NO: 44558 - protein, 9 aa, Artificial sequence
  Protein classification predicting sequence
GLYPNYLNP

SEQ ID NO: 44559 - protein, 13 aa, Artificial sequence
  Protein classification predicting sequence
LGAEIARTCHESY

SEQ ID NO: 44560 - protein, 10 aa, Artificial sequence
  Protein classification predicting sequence
SAFITLCFGA

SEQ ID NO: 44561 - protein, 8 aa, Artificial sequence
  Protein classification predicting sequence
FFLPDSSK

SEQ ID NO: 44562 - protein, 11 aa, Artificial sequence
  Protein classification predicting sequence
GATIVDALDTL

SEQ ID NO: 44563 - protein, 10 aa, Artificial sequence
  Protein classification predicting sequence
AYYLSGEEIF

SEQ ID NO: 44564 - protein, 24 aa, Artificial sequence
  Protein classification predicting sequence
SVGGLGDSFYEYLLKAWLMSDKTD

SEQ ID NO: 44565 - protein, 6 aa, Artificial sequence
  Protein classification predicting sequence
FEVNIR

SEQ ID NO: 44566 - protein, 8 aa, Artificial sequence
  Protein classification predicting sequence
SSILAEFG

SEQ ID NO: 44567 - protein, 7 aa, Artificial sequence
  Protein classification predicting sequence
TWLSPIF

SEQ ID NO: 44568 - protein, 9 aa, Artificial sequence
  Protein classification predicting sequence
SPMVDFGYD

SEQ ID NO: 44569 - protein, 10 aa, Artificial sequence
  Protein classification predicting sequence
YYGLNHFGWW

SEQ ID NO: 44570 - protein, 12 aa, Artificial sequence
  Protein classification predicting sequence
IAGGGSTFTPGI

SEQ ID NO: 44571 - protein, 16 aa, Artificial sequence
  Protein classification predicting sequence
RGVGMVFQSYALYPHL

SEQ ID NO: 44572 - protein, 18 aa, Artificial sequence
  Protein classification predicting sequence
RTMIYVTHDQVEAMTLAD

SEQ ID NO: 44573 - protein, 10 aa, Artificial sequence
  Protein classification predicting sequence
GKPLELYHYP

SEQ ID NO: 44574 - protein, 17 aa, Artificial sequence
  Protein classification predicting sequence
SLGIRPEHLLPSDIADV

SEQ ID NO: 44575 - protein, 6 aa, Artificial sequence
  Protein classification predicting sequence
LGNETQ

SEQ ID NO: 44576 - protein, 7 aa, Artificial sequence
  Protein classification predicting sequence
QNLVYRQ

SEQ ID NO: 44577 - protein, 8 aa, Artificial sequence
  Protein classification predicting sequence
DVVLVEEG

SEQ ID NO: 44578 - protein, 5 aa, Artificial sequence
  Protein classification predicting sequence
RCHLF

SEQ ID NO: 44579 - protein, 7 aa, Artificial sequence
  Protein classification predicting sequence
NVTKAWG

SEQ ID NO: 44580 - protein, 12 aa, Artificial sequence
  Protein classification predicting sequence
VVVSKDINLDIH

SEQ ID NO: 44581 - protein, 6 aa, Artificial sequence
  Protein classification predicting sequence
ACRRLH

SEQ ID NO: 44582 - protein, 36 aa, Artificial sequence
  Protein classification predicting sequence
GEFVVFVGPSGCGKSTLLRMIAGLETITSGDLFIGE

SEQ ID NO: 44583 - protein, 9 aa, Artificial sequence
  Protein classification predicting sequence
ETQIHIQIP

SEQ ID NO: 44584 - protein, 37 aa, Artificial sequence
  Protein classification predicting sequence
IRQNLVYRQNDVVLVEEGATFAIGLPPERCHLFREDG

SEQ ID NO: 44585 - protein, 8 aa, Artificial sequence
  Protein classification predicting sequence
NMSFGLKL

SEQ ID NO: 44586 - protein, 19 aa, Artificial sequence
  Protein classification predicting sequence
PKALSGGQRQRVAIGRTLV

SEQ ID NO: 44587 - protein, 20 aa, Artificial sequence
  Protein classification predicting sequence
VFLLDEPLSNLDAALRVQMR

SEQ ID NO: 44588 - protein, 26 aa, Artificial sequence
  Protein classification predicting sequence
LGCTMIYVTHDQVEAMTMADKIVVLD

SEQ ID NO: 44589 - protein, 14 aa, Artificial sequence
  Protein classification predicting sequence
RFVAGFIGSPKMNF

SEQ ID NO: 44590 - protein, 14 aa, Artificial sequence
  Protein classification predicting sequence
VMIVEKLGNETQVY

SEQ ID NO: 44591 - protein, 18 aa, Artificial sequence
  Protein classification predicting sequence
IGIPAHRCHLFHSDGRAC

SEQ ID NO: 44592 - protein, 36 aa, Artificial sequence
  Protein classification predicting sequence
EGEFVVFVGPSGCGKSTLLRCIAGLEDITSGDLYIG

SEQ ID NO: 44593 - protein, 17 aa, Artificial sequence
  Protein classification predicting sequence
VFLLDEPLSNLDAALRV

SEQ ID NO: 44594 - protein, 10 aa, Artificial sequence
  Protein classification predicting sequence
IAGLEDITSG

SEQ ID NO: 44595 - protein, 27 aa, Artificial sequence
  Protein classification predicting sequence
GMVFQSYALYPHLSVAENMSFGLKLAG

SEQ ID NO: 44596 - protein, 30 aa, Artificial sequence
  Protein classification predicting sequence
VFLLDEPLSNLDAALRVQMRIEISRLHKRL

SEQ ID NO: 44597 - protein, 14 aa, Artificial sequence
  Protein classification predicting sequence
AQVGKPLELYHYPA

SEQ ID NO: 44598 - protein, 19 aa, Artificial sequence
  Protein classification predicting sequence
VQVGANMSLGIRPEHLLPS

SEQ ID NO: 44599 - protein, 21 aa, Artificial sequence
  Protein classification predicting sequence
IRQNLVYRQNDVVLVEEGATF

SEQ ID NO: 44600 - protein, 9 aa, Artificial sequence
  Protein classification predicting sequence
WFKESRSSK

SEQ ID NO: 44601 - protein, 7 aa, Artificial sequence
  Protein classification predicting sequence
NGPRIHE

SEQ ID NO: 44602 - protein, 7 aa, Artificial sequence
  Protein classification predicting sequence
DSFYEYL

SEQ ID NO: 44603 - protein, 8 aa, Artificial sequence
  Protein classification predicting sequence
LGAQKAGW

SEQ ID NO: 44604 - protein, 6 aa, Artificial sequence
  Protein classification predicting sequence
SQYAGW

SEQ ID NO: 44605 - protein, 7 aa, Artificial sequence
  Protein classification predicting sequence
GSGPARA

SEQ ID NO: 44606 - protein, 11 aa, Artificial sequence
  Protein classification predicting sequence
CLGSQYAGWSL

SEQ ID NO: 44607 - protein, 11 aa, Artificial sequence
  Protein classification predicting sequence
VARVLEVALHK

SEQ ID NO: 44608 - protein, 7 aa, Artificial sequence
  Protein classification predicting sequence
AMGRTND

SEQ ID NO: 44609 - protein, 15 aa, Artificial sequence
  Protein classification predicting sequence
EAGRRIAEICLGGLG

SEQ ID NO: 44610 - protein, 16 aa, Artificial sequence
  Protein classification predicting sequence
PVLACLGSQYAGWSLA

SEQ ID NO: 44611 - protein, 9 aa, Artificial sequence
  Protein classification predicting sequence
LTLAVGTLP

SEQ ID NO: 44612 - protein, 17 aa, Artificial sequence
  Protein classification predicting sequence
QFNFVPPGRMCRVAGWG

SEQ ID NO: 44613 - protein, 18 aa, Artificial sequence
  Protein classification predicting sequence
GSDTLQEVKLRLMDPQAC

SEQ ID NO: 44614 - protein, 40 aa, Artificial sequence
  Protein classification predicting sequence
FDHNLQLCVGNPRKTKSAFKGDSGGPLLCAGVAQGIVSYG

SEQ ID NO: 44615 - protein, 19 aa, Artificial sequence
  Protein classification predicting sequence
DAKPPAVFTRISHYRPWIN

SEQ ID NO: 44616 - protein, 12 aa, Artificial sequence
  Protein classification predicting sequence
DAKPPAVFTRIS

SEQ ID NO: 44617 - protein, 7 aa, Artificial sequence
  Protein classification predicting sequence
RVQLREQ

SEQ ID NO: 44618 - protein, 9 aa, Artificial sequence
  Protein classification predicting sequence
LPPASETFP

SEQ ID NO: 44619 - protein, 10 aa, Artificial sequence
  Protein classification predicting sequence
LGMRYLTLTH

SEQ ID NO: 44620 - protein, 9 aa, Artificial sequence
  Protein classification predicting sequence
IDSSLGVLR

SEQ ID NO: 44621 - protein, 6 aa, Artificial sequence
  Protein classification predicting sequence
PCDTQN

SEQ ID NO: 44622 - protein, 10 aa, Artificial sequence
  Protein classification predicting sequence
APVIFSHSSA

SEQ ID NO: 44623 - protein, 7 aa, Artificial sequence
  Protein classification predicting sequence
IFIDEID

SEQ ID NO: 44624 - protein, 10 aa, Artificial sequence
  Protein classification predicting sequence
IANSWRMSGD

SEQ ID NO: 44625 - protein, 45 aa, Artificial sequence
  Protein classification predicting sequence
GIPATRVWRYYVSDTDEYGQGEIQMWSGPLDNGDQVVALLNGGSV

SEQ ID NO: 44626 - protein, 19 aa, Artificial sequence
  Protein classification predicting sequence
RPMNTTLEEIFFDSNLGSK

SEQ ID NO: 44627 - protein, 13 aa, Artificial sequence
  Protein classification predicting sequence
VGNLTDDEEKAHF

SEQ ID NO: 44628 - protein, 23 aa, Artificial sequence
  Protein classification predicting sequence
LKGVFGVSPSYNGLGLTPQMGWD

SEQ ID NO: 44629 - protein, 23 aa, Artificial sequence
  Protein classification predicting sequence
YAGFHCSIMNILNKAAPMGQNAG

SEQ ID NO: 44630 - protein, 13 aa, Artificial sequence
  Protein classification predicting sequence
VDYLKYDNCYNKG

SEQ ID NO: 44631 - protein, 17 aa, Artificial sequence
  Protein classification predicting sequence
HCSIMNILNKAAPMGQN

SEQ ID NO: 44632 - protein, 7 aa, Artificial sequence
  Protein classification predicting sequence
YGQGEIQ

SEQ ID NO: 44633 - protein, 9 aa, Artificial sequence
  Protein classification predicting sequence
HVADHLHNN

SEQ ID NO: 44634 - protein, 28 aa, Artificial sequence
  Protein classification predicting sequence
RYKAMSDALNKTGRPIFYSLCNWGQDLT

SEQ ID NO: 44635 - protein, 13 aa, Artificial sequence
  Protein classification predicting sequence
FTRPDSRCPCDGD

SEQ ID NO: 44636 - protein, 8 aa, Artificial sequence
  Protein classification predicting sequence
LEEIFFDS

SEQ ID NO: 44637 - protein, 16 aa, Artificial sequence
  Protein classification predicting sequence
LNTTVPAHGIAFYRLR

SEQ ID NO: 44638 - protein, 20 aa, Artificial sequence
  Protein classification predicting sequence
RPIFYSLCNWGQDLTFYWGS

SEQ ID NO: 44639 - protein, 8 aa, Artificial sequence
  Protein classification predicting sequence
SGDITAEF

SEQ ID NO: 44640 - protein, 8 aa, Artificial sequence
  Protein classification predicting sequence
SIYSQASV

SEQ ID NO: 44641 - protein, 8 aa, Artificial sequence
  Protein classification predicting sequence
VVALLNGG

SEQ ID NO: 44642 - protein, 15 aa, Artificial sequence
  Protein classification predicting sequence
FGMYSSAGEYTCAGY

SEQ ID NO: 44643 - protein, 8 aa, Artificial sequence
  Protein classification predicting sequence
NSWRMSGD

SEQ ID NO: 44644 - protein, 8 aa, Artificial sequence
  Protein classification predicting sequence
RPDSRCPC

SEQ ID NO: 44645 - protein, 7 aa, Artificial sequence
  Protein classification predicting sequence
GGWNDLD

SEQ ID NO: 44646 - protein, 7 aa, Artificial sequence
  Protein classification predicting sequence
LEVGVGN

SEQ ID NO: 44647 - protein, 21 aa, Artificial sequence
  Protein classification predicting sequence
LFGMYSSAGEYTCAGYPGSLG

SEQ ID NO: 44648 - protein, 10 aa, Artificial sequence
  Protein classification predicting sequence
RYKAMSDALN

SEQ ID NO: 44649 - protein, 9 aa, Artificial sequence
  Protein classification predicting sequence
DEYDCKYAG

SEQ ID NO: 44650 - protein, 16 aa, Artificial sequence
  Protein classification predicting sequence
NDKLMRFFDHCEKFLT

SEQ ID NO: 44651 - protein, 16 aa, Artificial sequence
  Protein classification predicting sequence
TALYHVEAFKTGPEMQ

SEQ ID NO: 44652 - protein, 18 aa, Artificial sequence
  Protein classification predicting sequence
CTPVQLVALIRHGTRYPT

SEQ ID NO: 44653 - protein, 7 aa, Artificial sequence
  Protein classification predicting sequence
NGTIINP

SEQ ID NO: 44654 - protein, 34 aa, Artificial sequence
  Protein classification predicting sequence
GAVSAAAVVLPVLLLLLVLAVGLAVFFFRRHGTP

SEQ ID NO: 44655 - protein, 14 aa, Artificial sequence
  Protein classification predicting sequence
AMRRPRCGVPDKFG

SEQ ID NO: 44656 - protein, 17 aa, Artificial sequence
  Protein classification predicting sequence
LPTDKIDAALFWMPNGK

SEQ ID NO: 44657 - protein, 10 aa, Artificial sequence
  Protein classification predicting sequence
ICDGNFDTVA

SEQ ID NO: 44658 - protein, 35 aa, Artificial sequence
  Protein classification predicting sequence
FSPEAWLQQYGYLPPGDLRTHTQRSPQSLSAAIAA

SEQ ID NO: 44659 - protein, 18 aa, Artificial sequence
  Protein classification predicting sequence
DTMKAMRRPRCGVPDKFG

SEQ ID NO: 44660 - protein, 43 aa, Artificial sequence
  Protein classification predicting sequence
FAEGFHGDSTPFDGEGGFLAHAYFPGPNIGGDTHFDSAEPWTV

SEQ ID NO: 44661 - protein, 7 aa, Artificial sequence
  Protein classification predicting sequence
EKLKQMQ

SEQ ID NO: 44662 - protein, 11 aa, Artificial sequence
  Protein classification predicting sequence
HSTDIGALMYP

SEQ ID NO: 44663 - protein, 7 aa, Artificial sequence
  Protein classification predicting sequence
TKRILTL

SEQ ID NO: 44664 - protein, 12 aa, Artificial sequence
  Protein classification predicting sequence
AIEKAFQLWSNV

SEQ ID NO: 44665 - protein, 10 aa, Artificial sequence
  Protein classification predicting sequence
YNLYRVAAHE

SEQ ID NO: 44666 - protein, 15 aa, Artificial sequence
  Protein classification predicting sequence
RDEVRFFKGNKYWAV

SEQ ID NO: 44667 - protein, 7 aa, Artificial sequence
  Protein classification predicting sequence
ETQEQDV

SEQ ID NO: 44668 - protein, 15 aa, Artificial sequence
  Protein classification predicting sequence
FFGLKVTGKPDAETL

SEQ ID NO: 44669 - protein, 10 aa, Artificial sequence
  Protein classification predicting sequence
MFFKDRFYMR

SEQ ID NO: 44670 - protein, 12 aa, Artificial sequence
  Protein classification predicting sequence
EVELNFISVFWP

SEQ ID NO: 44671 - protein, 8 aa, Artificial sequence
  Protein classification predicting sequence
FFKGNKYW

SEQ ID NO: 44672 - protein, 12 aa, Artificial sequence
  Protein classification predicting sequence
PFDGPGGNLAHA

SEQ ID NO: 44673 - protein, 8 aa, Artificial sequence
  Protein classification predicting sequence
FFHGTRQY

SEQ ID NO: 44674 - protein, 12 aa, Artificial sequence
  Protein classification predicting sequence
AAPSPIIKFPGD

SEQ ID NO: 44675 - protein, 13 aa, Artificial sequence
  Protein classification predicting sequence
PKTDKELAVQYLN

SEQ ID NO: 44676 - protein, 20 aa, Artificial sequence
  Protein classification predicting sequence
CNLFVLKDTLKKMQKFFGLP

SEQ ID NO: 44677 - protein, 12 aa, Artificial sequence
  Protein classification predicting sequence
TGDLDQNTIETM

SEQ ID NO: 44678 - protein, 21 aa, Artificial sequence
  Protein classification predicting sequence
KPRCGNPDVANYNFFPRKPKW

SEQ ID NO: 44679 - protein, 35 aa, Artificial sequence
  Protein classification predicting sequence
DGEADIMINFGRWEHGDGYPFDGKDGLLAHAFAPG

SEQ ID NO: 44680 - protein, 36 aa, Artificial sequence
  Protein classification predicting sequence
GGDSHFDDDELWTLGEGQVVRVKYGNADGEYCKFPF

SEQ ID NO: 44681 - protein, 9 aa, Artificial sequence
  Protein classification predicting sequence
DGFLWCSTT

SEQ ID NO: 44682 - protein, 34 aa, Artificial sequence
  Protein classification predicting sequence
YDDDRKWGFCPDQGYSLFLVAAHEFGHAMGLEHS

SEQ ID NO: 44683 - protein, 9 aa, Artificial sequence
  Protein classification predicting sequence
PTLGPVTPE

SEQ ID NO: 44684 - protein, 14 aa, Artificial sequence
  Protein classification predicting sequence
AQIRGEIFFFKDRF

SEQ ID NO: 44685 - protein, 10 aa, Artificial sequence
  Protein classification predicting sequence
LPEKIDAVYE

SEQ ID NO: 44686 - protein, 7 aa, Artificial sequence
  Protein classification predicting sequence
NKKTYIF

SEQ ID NO: 44687 - protein, 41 aa, Artificial sequence
  Protein classification predicting sequence
SCTDTGRSDGFLWCSTTYNFEKDGKYGFCPHEALFTMGGNA

SEQ ID NO: 44688 - protein, 15 aa, Artificial sequence
  Protein classification predicting sequence
GQPCKFPFRFQGTSY

SEQ ID NO: 44689 - protein, 28 aa, Artificial sequence
  Protein classification predicting sequence
IKFPGDVAPKTDKELAVQYLNTFYGCPK

SEQ ID NO: 44690 - protein, 24 aa, Artificial sequence
  Protein classification predicting sequence
SCNLFVLKDTLKKMQKFFGLPQTG

SEQ ID NO: 44691 - protein, 16 aa, Artificial sequence
  Protein classification predicting sequence
GTGPTPTLGPVTPEIC

SEQ ID NO: 44692 - protein, 29 aa, Artificial sequence
  Protein classification predicting sequence
QDIVFDGIAQIRGEIFFFKDRFIWRTVTP

SEQ ID NO: 44693 - protein, 8 aa, Artificial sequence
  Protein classification predicting sequence
GHSYFFKG

SEQ ID NO: 44694 - protein, 14 aa, Artificial sequence
  Protein classification predicting sequence
YYLKLENQSLKSVK

SEQ ID NO: 44695 - protein, 11 aa, Artificial sequence
  Protein classification predicting sequence
VLAHAYAPGPG

SEQ ID NO: 44696 - protein, 9 aa, Artificial sequence
  Protein classification predicting sequence
KTYFFVEDK

SEQ ID NO: 44697 - protein, 10 aa, Artificial sequence
  Protein classification predicting sequence
LWCATTSNFD

SEQ ID NO: 44698 - protein, 7 aa, Artificial sequence
  Protein classification predicting sequence
GGNSAGE

SEQ ID NO: 44699 - protein, 13 aa, Artificial sequence
  Protein classification predicting sequence
FFFSGRQVWVYTG

SEQ ID NO: 44700 - protein, 8 aa, Artificial sequence
  Protein classification predicting sequence
PQPTAPPT

SEQ ID NO: 44701 - protein, 11 aa, Artificial sequence
  Protein classification predicting sequence
FEGRSYSACTT

SEQ ID NO: 44702 - protein, 7 aa, Artificial sequence
  Protein classification predicting sequence
FDAIAEI

SEQ ID NO: 44703 - protein, 7 aa, Artificial sequence
  Protein classification predicting sequence
FFFSGRQ

SEQ ID NO: 44704 - protein, 25 aa, Artificial sequence
  Protein classification predicting sequence
GYSLFLVAAHEFGHALGLDHSSVPE

SEQ ID NO: 44705 - protein, 6 aa, Artificial sequence
  Protein classification predicting sequence
CTTDGR

SEQ ID NO: 44706 - protein, 10 aa, Artificial sequence
  Protein classification predicting sequence
GYVFQEASLF

SEQ ID NO: 44707 - protein, 8 aa, Artificial sequence
  Protein classification predicting sequence
EILPFLER

SEQ ID NO: 44708 - protein, 7 aa, Artificial sequence
  Protein classification predicting sequence
RLADHLV

SEQ ID NO: 44709 - protein, 8 aa, Artificial sequence
  Protein classification predicting sequence
DEVARLAD

SEQ ID NO: 44710 - protein, 10 aa, Artificial sequence
  Protein classification predicting sequence
PRKRELLPYL

SEQ ID NO: 44711 - protein, 7 aa, Artificial sequence
  Protein classification predicting sequence
LPYLERL

SEQ ID NO: 44712 - protein, 6 aa, Artificial sequence
  Protein classification predicting sequence
PRKREL

SEQ ID NO: 44713 - protein, 8 aa, Artificial sequence
  Protein classification predicting sequence
LLGIEHLL

SEQ ID NO: 44714 - protein, 16 aa, Artificial sequence
  Protein classification predicting sequence
LSGGEKQRVAIGRALL

SEQ ID NO: 44715 - protein, 7 aa, Artificial sequence
  Protein classification predicting sequence
PRKRELL

SEQ ID NO: 44716 - protein, 6 aa, Artificial sequence
  Protein classification predicting sequence
LYVSHS

SEQ ID NO: 44717 - protein, 14 aa, Artificial sequence
  Protein classification predicting sequence
IGYVFQDARLFPHY

SEQ ID NO: 44718 - protein, 12 aa, Artificial sequence
  Protein classification predicting sequence
LLLMDEPLASLD

SEQ ID NO: 44719 - protein, 24 aa, Artificial sequence
  Protein classification predicting sequence
LLLMDEPLASLDLPRKRELLPYLE

SEQ ID NO: 44720 - protein, 8 aa, Artificial sequence
  Protein classification predicting sequence
ASDVSLVL

SEQ ID NO: 44721 - protein, 7 aa, Artificial sequence
  Protein classification predicting sequence
GYVFQDA

SEQ ID NO: 44722 - protein, 5 aa, Artificial sequence
  Protein classification predicting sequence
YVSHS

SEQ ID NO: 44723 - protein, 11 aa, Artificial sequence
  Protein classification predicting sequence
LERLHDELDIP

SEQ ID NO: 44724 - protein, 8 aa, Artificial sequence
  Protein classification predicting sequence
PAANPAHV

SEQ ID NO: 44725 - protein, 7 aa, Artificial sequence
  Protein classification predicting sequence
LLARITR

SEQ ID NO: 44726 - protein, 8 aa, Artificial sequence
  Protein classification predicting sequence
DEPLAALD

SEQ ID NO: 44727 - protein, 7 aa, Artificial sequence
  Protein classification predicting sequence
LGIGHLL

SEQ ID NO: 44728 - protein, 10 aa, Artificial sequence
  Protein classification predicting sequence
QRVAIGRALL

SEQ ID NO: 44729 - protein, 7 aa, Artificial sequence
  Protein classification predicting sequence
GVTALFG

SEQ ID NO: 44730 - protein, 7 aa, Artificial sequence
  Protein classification predicting sequence
LRCMAGL

SEQ ID NO: 44731 - protein, 26 aa, Artificial sequence
  Protein classification predicting sequence
GITAIFGVSGAGKTSLINAISGLTRP

SEQ ID NO: 44732 - protein, 10 aa, Artificial sequence
  Protein classification predicting sequence
GICLTPEKRR

SEQ ID NO: 44733 - protein, 10 aa, Artificial sequence
  Protein classification predicting sequence
LEEVWGSSVM

SEQ ID NO: 44734 - protein, 14 aa, Artificial sequence
  Protein classification predicting sequence
PWLPKEQQSSILKV

SEQ ID NO: 44735 - protein, 9 aa, Artificial sequence
  Protein classification predicting sequence
YDDNGQVEV

SEQ ID NO: 44736 - protein, 14 aa, Artificial sequence
  Protein classification predicting sequence
TLWARISPWARDEL

SEQ ID NO: 44737 - protein, 10 aa, Artificial sequence
  Protein classification predicting sequence
IKPGLWLYAQ

SEQ ID NO: 44738 - protein, 54 aa, Artificial sequence
  Protein classification predicting sequence
LLDRLPGSLSGGEKQRVAIGRALLTAPELLLLDEPLASLDIPRKRELLPYLQRL

SEQ ID NO: 44739 - protein, 22 aa, Artificial sequence
  Protein classification predicting sequence
REINIPMLYVSHSLDEILHLAD

SEQ ID NO: 44740 - protein, 25 aa, Artificial sequence
  Protein classification predicting sequence
VLEHHPHYAMTALALGDQHLWVNKL

SEQ ID NO: 44741 - protein, 30 aa, Artificial sequence
  Protein classification predicting sequence
LRIRIQASDVSLVLQPPQQTSIRNVLRAKV

SEQ ID NO: 44742 - protein, 7 aa, Artificial sequence
  Protein classification predicting sequence
RALLTSP

SEQ ID NO: 44743 - protein, 11 aa, Artificial sequence
  Protein classification predicting sequence
LLMDEPLASLD

SEQ ID NO: 44744 - protein, 7 aa, Artificial sequence
  Protein classification predicting sequence
LEEVWAS

SEQ ID NO: 44745 - protein, 9 aa, Artificial sequence
  Protein classification predicting sequence
AMRPWQSFS

SEQ ID NO: 44746 - protein, 6 aa, Artificial sequence
  Protein classification predicting sequence
RLFPHY

SEQ ID NO: 44747 - protein, 7 aa, Artificial sequence
  Protein classification predicting sequence
GITAIFG

SEQ ID NO: 44748 - protein, 19 aa, Artificial sequence
  Protein classification predicting sequence
PEKRRVGYVFQDARLFPHY

SEQ ID NO: 44749 - protein, 8 aa, Artificial sequence
  Protein classification predicting sequence
LLGIEPLL

SEQ ID NO: 44750 - protein, 11 aa, Artificial sequence
  Protein classification predicting sequence
YAMTALALGDQ

SEQ ID NO: 44751 - protein, 6 aa, Artificial sequence
  Protein classification predicting sequence
RTNCRM

SEQ ID NO: 44752 - protein, 63 aa, Artificial sequence
  Protein classification predicting sequence
LNLLREKDCSVTFSPEQPLTPVTDLAVGFSNLSTFSGETPKRCLDLSNLGDETAPLPTESPDR

SEQ ID NO: 44753 - protein, 7 aa, Artificial sequence
  Protein classification predicting sequence
WKAKKCP

SEQ ID NO: 44754 - protein, 7 aa, Artificial sequence
  Protein classification predicting sequence
NMNSVLP

SEQ ID NO: 44755 - protein, 6 aa, Artificial sequence
  Protein classification predicting sequence
LLCSTP

SEQ ID NO: 44756 - protein, 10 aa, Artificial sequence
  Protein classification predicting sequence
LLCSTPSFKK

SEQ ID NO: 44757 - protein, 11 aa, Artificial sequence
  Protein classification predicting sequence
SNKENEGELFK

SEQ ID NO: 44758 - protein, 18 aa, Artificial sequence
  Protein classification predicting sequence
PNCKPVALLLPQEVVDSQ

SEQ ID NO: 44759 - protein, 14 aa, Artificial sequence
  Protein classification predicting sequence
SMAILLSGPLLNQD

SEQ ID NO: 44760 - protein, 26 aa, Artificial sequence
  Protein classification predicting sequence
KVYALPTVTGRHQDLRYITGETLAAL

SEQ ID NO: 44761 - protein, 17 aa, Artificial sequence
  Protein classification predicting sequence
FIIDCRYPYEYDGGHIK

SEQ ID NO: 44762 - protein, 7 aa, Artificial sequence
  Protein classification predicting sequence
GGHIKGA

SEQ ID NO: 44763 - protein, 42 aa, Artificial sequence
  Protein classification predicting sequence
YPSLYYPELYLLKGGYKDFFPEYKELCEPQSYCPMHHQDFRE

SEQ ID NO: 44764 - protein, 7 aa, Artificial sequence
  Protein classification predicting sequence
YILKGGY

SEQ ID NO: 44765 - protein, 9 aa, Artificial sequence
  Protein classification predicting sequence
LYRSPSMPE

SEQ ID NO: 44766 - protein, 8 aa, Artificial sequence
  Protein classification predicting sequence
GKHQDLKY

SEQ ID NO: 44767 - protein, 13 aa, Artificial sequence
  Protein classification predicting sequence
CEFSSERGPRMCR

SEQ ID NO: 44768 - protein, 6 aa, Artificial sequence
  Protein classification predicting sequence
DFFPEY

SEQ ID NO: 44769 - protein, 6 aa, Artificial sequence
  Protein classification predicting sequence
ELCEPQ

SEQ ID NO: 44770 - protein, 8 aa, Artificial sequence
  Protein classification predicting sequence
YCPMHHQD

SEQ ID NO: 44771 - protein, 7 aa, Artificial sequence
  Protein classification predicting sequence
PQSYCPM

SEQ ID NO: 44772 - protein, 6 aa, Artificial sequence
  Protein classification predicting sequence
GRHQDL

SEQ ID NO: 44773 - protein, 7 aa, Artificial sequence
  Protein classification predicting sequence
LIGDFSK

SEQ ID NO: 44774 - protein, 16 aa, Artificial sequence
  Protein classification predicting sequence
IIIFHCEFSSERGPKM

SEQ ID NO: 44775 - protein, 8 aa, Artificial sequence
  Protein classification predicting sequence
YEYDGGHI

SEQ ID NO: 44776 - protein, 6 aa, Artificial sequence
  Protein classification predicting sequence
HCEFSS

SEQ ID NO: 44777 - protein, 9 aa, Artificial sequence
  Protein classification predicting sequence
IDAGSRYEN

SEQ ID NO: 44778 - protein, 6 aa, Artificial sequence
  Protein classification predicting sequence
DTGLWG

SEQ ID NO: 44779 - protein, 15 aa, Artificial sequence
  Protein classification predicting sequence
NGTAHFLEHMAFKGT

SEQ ID NO: 44780 - protein, 6 aa, Artificial sequence
  Protein classification predicting sequence
TVYYAK

SEQ ID NO: 44781 - protein, 7 aa, Artificial sequence
  Protein classification predicting sequence
PALGGSF

SEQ ID NO: 44782 - protein, 21 aa, Artificial sequence
  Protein classification predicting sequence
PALGGSFSGLEPMGLLWAMEP

SEQ ID NO: 44783 - protein, 11 aa, Artificial sequence
  Protein classification predicting sequence
GRVRATLFLPP

SEQ ID NO: 44784 - protein, 9 aa, Artificial sequence
  Protein classification predicting sequence
IGAMEEEVT

SEQ ID NO: 44785 - protein, 9 aa, Artificial sequence
  Protein classification predicting sequence
LLKSGIGKV

SEQ ID NO: 44786 - protein, 8 aa, Artificial sequence
  Protein classification predicting sequence
INTGSAGG

SEQ ID NO: 44787 - protein, 13 aa, Artificial sequence
  Protein classification predicting sequence
RYHDADVTAFGYE

SEQ ID NO: 44788 - protein, 9 aa, Artificial sequence
  Protein classification predicting sequence
VEMEATAIA

SEQ ID NO: 44789 - protein, 13 aa, Artificial sequence
  Protein classification predicting sequence
FNVPFVVVRAISD

SEQ ID NO: 44790 - protein, 7 aa, Artificial sequence
  Protein classification predicting sequence
DVTAFGY

SEQ ID NO: 44791 - protein, 8 aa, Artificial sequence
  Protein classification predicting sequence
FVLGLPTG

SEQ ID NO: 44792 - protein, 7 aa, Artificial sequence
  Protein classification predicting sequence
FFNHIDI

SEQ ID NO: 44793 - protein, 7 aa, Artificial sequence
  Protein classification predicting sequence
ESTIKAN

SEQ ID NO: 44794 - protein, 9 aa, Artificial sequence
  Protein classification predicting sequence
MSTDLRTIS

SEQ ID NO: 44795 - protein, 16 aa, Artificial sequence
  Protein classification predicting sequence
NFTVIINPSGVVMWYL

SEQ ID NO: 44796 - protein, 7 aa, Artificial sequence
  Protein classification predicting sequence
AQDGWRD

SEQ ID NO: 44797 - protein, 31 aa, Artificial sequence
  Protein classification predicting sequence
GYPKMAAALNATGRPIAFSCSWPAYEGGLPP

SEQ ID NO: 44798 - protein, 6 aa, Artificial sequence
  Protein classification predicting sequence
NLDEYV

SEQ ID NO: 44799 - protein, 13 aa, Artificial sequence
  Protein classification predicting sequence
NGHIGFNEPGTPF

SEQ ID NO: 44800 - protein, 8 aa, Artificial sequence
  Protein classification predicting sequence
EEDVPTHA

SEQ ID NO: 44801 - protein, 11 aa, Artificial sequence
  Protein classification predicting sequence
NGHIGFNEPGT

SEQ ID NO: 44802 - protein, 9 aa, Artificial sequence
  Protein classification predicting sequence
LTDSTREAN

SEQ ID NO: 44803 - protein, 6 aa, Artificial sequence
  Protein classification predicting sequence
ANARFF

SEQ ID NO: 44804 - protein, 6 aa, Artificial sequence
  Protein classification predicting sequence
GFNEPG

SEQ ID NO: 44805 - protein, 7 aa, Artificial sequence
  Protein classification predicting sequence
TFNMDEY

SEQ ID NO: 44806 - protein, 9 aa, Artificial sequence
  Protein classification predicting sequence
SRTRIKTLT

SEQ ID NO: 44807 - protein, 9 aa, Artificial sequence
  Protein classification predicting sequence
IDIQVLGIG

SEQ ID NO: 44808 - protein, 9 aa, Artificial sequence
  Protein classification predicting sequence
TIEANSRFF

SEQ ID NO: 44809 - protein, 7 aa, Artificial sequence
  Protein classification predicting sequence
QSYRYFM

SEQ ID NO: 44810 - protein, 8 aa, Artificial sequence
  Protein classification predicting sequence
GLATGSSP

SEQ ID NO: 44811 - protein, 7 aa, Artificial sequence
  Protein classification predicting sequence
AGEVSFK

SEQ ID NO: 44812 - protein, 8 aa, Artificial sequence
  Protein classification predicting sequence
GHIAFNEP

SEQ ID NO: 44813 - protein, 13 aa, Artificial sequence
  Protein classification predicting sequence
RPFVLGLPTGGTP

SEQ ID NO: 44814 - protein, 9 aa, Artificial sequence
  Protein classification predicting sequence
LGLATGSTP

SEQ ID NO: 44815 - protein, 11 aa, Artificial sequence
  Protein classification predicting sequence
MYNNFFNHIDI

SEQ ID NO: 44816 - protein, 9 aa, Artificial sequence
  Protein classification predicting sequence
DGHIAFNEP

SEQ ID NO: 44817 - protein, 7 aa, Artificial sequence
  Protein classification predicting sequence
RYEEKIK

SEQ ID NO: 44818 - protein, 12 aa, Artificial sequence
  Protein classification predicting sequence
YGKIHLFMGGVG

SEQ ID NO: 44819 - protein, 17 aa, Artificial sequence
  Protein classification predicting sequence
VEGSVNHLWTVSALQLH

SEQ ID NO: 44820 - protein, 6 aa, Artificial sequence
  Protein classification predicting sequence
QILGIG

SEQ ID NO: 44821 - protein, 6 aa, Artificial sequence
  Protein classification predicting sequence
THVVDL

SEQ ID NO: 44822 - protein, 11 aa, Artificial sequence
  Protein classification predicting sequence
THVVDLQESTI

SEQ ID NO: 44823 - protein, 7 aa, Artificial sequence
  Protein classification predicting sequence
NLDEYVG

SEQ ID NO: 44824 - protein, 16 aa, Artificial sequence
  Protein classification predicting sequence
LGIGRNGHIGFNEPGT

SEQ ID NO: 44825 - protein, 12 aa, Artificial sequence
  Protein classification predicting sequence
NGHIGFNEPGTP

SEQ ID NO: 44826 - protein, 7 aa, Artificial sequence
  Protein classification predicting sequence
AFGENKA

SEQ ID NO: 44827 - protein, 8 aa, Artificial sequence
  Protein classification predicting sequence
DEAAASKL

SEQ ID NO: 44828 - protein, 6 aa, Artificial sequence
  Protein classification predicting sequence
SYHYYM

SEQ ID NO: 44829 - protein, 6 aa, Artificial sequence
  Protein classification predicting sequence
ANSRFF

SEQ ID NO: 44830 - protein, 8 aa, Artificial sequence
  Protein classification predicting sequence
NLDEYVGL

SEQ ID NO: 44831 - protein, 8 aa, Artificial sequence
  Protein classification predicting sequence
NFFDHVDI

SEQ ID NO: 44832 - protein, 8 aa, Artificial sequence
  Protein classification predicting sequence
ALQAAVEG

SEQ ID NO: 44833 - protein, 23 aa, Artificial sequence
  Protein classification predicting sequence
TAEQVGKWAARHIVNRINAFKPT

SEQ ID NO: 44834 - protein, 7 aa, Artificial sequence
  Protein classification predicting sequence
ANSRFFD

SEQ ID NO: 44835 - protein, 38 aa, Artificial sequence
  Protein classification predicting sequence
TAEQVGKWAARHIVNRINAFKPTADRPFVLGLPTGGTP

SEQ ID NO: 44836 - protein, 9 aa, Artificial sequence
  Protein classification predicting sequence
ASFYVACEL

SEQ ID NO: 44837 - protein, 12 aa, Artificial sequence
  Protein classification predicting sequence
KLGLATGGTMTD

SEQ ID NO: 44838 - protein, 11 aa, Artificial sequence
  Protein classification predicting sequence
LTESTIKANSR

SEQ ID NO: 44839 - protein, 10 aa, Artificial sequence
  Protein classification predicting sequence
AKRIILLAFG

SEQ ID NO: 44840 - protein, 11 aa, Artificial sequence
  Protein classification predicting sequence
IEGGKIAFTLL

SEQ ID NO: 44841 - protein, 14 aa, Artificial sequence
  Protein classification predicting sequence
NGHIGFNEPGTPFD

SEQ ID NO: 44842 - protein, 6 aa, Artificial sequence
  Protein classification predicting sequence
DEYVGL

SEQ ID NO: 44843 - protein, 10 aa, Artificial sequence
  Protein classification predicting sequence
DVPKQAISMG

SEQ ID NO: 44844 - protein, 25 aa, Artificial sequence
  Protein classification predicting sequence
MIVLLAFGQEKADAIKGMVFGPITE

SEQ ID NO: 44845 - protein, 8 aa, Artificial sequence
  Protein classification predicting sequence
LQNHPDVT

SEQ ID NO: 44846 - protein, 12 aa, Artificial sequence
  Protein classification predicting sequence
AAQVGKWAAAHI

SEQ ID NO: 44847 - protein, 17 aa, Artificial sequence
  Protein classification predicting sequence
VSFKHVVTFNMDEYVGL

SEQ ID NO: 44848 - protein, 9 aa, Artificial sequence
  Protein classification predicting sequence
ENINLLNGN

SEQ ID NO: 44849 - protein, 7 aa, Artificial sequence
  Protein classification predicting sequence
VCDEPST

SEQ ID NO: 44850 - protein, 14 aa, Artificial sequence
  Protein classification predicting sequence
VSFKHVVTFNMDEY

SEQ ID NO: 44851 - protein, 9 aa, Artificial sequence
  Protein classification predicting sequence
AAVEGCVNH

SEQ ID NO: 44852 - protein, 6 aa, Artificial sequence
  Protein classification predicting sequence
VCDEPS

SEQ ID NO: 44853 - protein, 9 aa, Artificial sequence
  Protein classification predicting sequence
ELEAENIKG

SEQ ID NO: 44854 - protein, 7 aa, Artificial sequence
  Protein classification predicting sequence
GVGTLLD

SEQ ID NO: 44855 - protein, 9 aa, Artificial sequence
  Protein classification predicting sequence
LGLPTGGTP

SEQ ID NO: 44856 - protein, 20 aa, Artificial sequence
  Protein classification predicting sequence
NFFDHVDIPAENINLLNGNA

SEQ ID NO: 44857 - protein, 7 aa, Artificial sequence
  Protein classification predicting sequence
DIDAECR

SEQ ID NO: 44858 - protein, 13 aa, Artificial sequence
  Protein classification predicting sequence
DGHIAFNEPASSL

SEQ ID NO: 44859 - protein, 9 aa, Artificial sequence
  Protein classification predicting sequence
TRIANSRFF

SEQ ID NO: 44860 - protein, 7 aa, Artificial sequence
  Protein classification predicting sequence
GVVFSDD

SEQ ID NO: 44861 - protein, 8 aa, Artificial sequence
  Protein classification predicting sequence
EGGRVQRF

SEQ ID NO: 44862 - protein, 6 aa, Artificial sequence
  Protein classification predicting sequence
GFTRLP

SEQ ID NO: 44863 - protein, 11 aa, Artificial sequence
  Protein classification predicting sequence
DLSFTPVLDLD

SEQ ID NO: 44864 - protein, 8 aa, Artificial sequence
  Protein classification predicting sequence
VIGNRAFH

SEQ ID NO: 44865 - protein, 7 aa, Artificial sequence
  Protein classification predicting sequence
AIMPAHV

SEQ ID NO: 44866 - protein, 8 aa, Artificial sequence
  Protein classification predicting sequence
GLILFTRN

SEQ ID NO: 44867 - protein, 7 aa, Artificial sequence
  Protein classification predicting sequence
VGGVILF

SEQ ID NO: 44868 - protein, 13 aa, Artificial sequence
  Protein classification predicting sequence
IAVDHEGGRVQRF

SEQ ID NO: 44869 - protein, 11 aa, Artificial sequence
  Protein classification predicting sequence
CGKHFPGHGFV

SEQ ID NO: 44870 - protein, 10 aa, Artificial sequence
  Protein classification predicting sequence
FSDDLTMEGA

SEQ ID NO: 44871 - protein, 17 aa, Artificial sequence
  Protein classification predicting sequence
ACGVDLSFTPVLDLDYG

SEQ ID NO: 44872 - protein, 8 aa, Artificial sequence
  Protein classification predicting sequence
GKHFPGHG

SEQ ID NO: 44873 - protein, 10 aa, Artificial sequence
  Protein classification predicting sequence
QLRELVRQIR

SEQ ID NO: 44874 - protein, 24 aa, Artificial sequence
  Protein classification predicting sequence
EAGWLMASEMIAMDIDISFAPVLD

SEQ ID NO: 44875 - protein, 7 aa, Artificial sequence
  Protein classification predicting sequence
SFAPVLD

SEQ ID NO: 44876 - protein, 7 aa, Artificial sequence
  Protein classification predicting sequence
MPAHVIY

SEQ ID NO: 44877 - protein, 7 aa, Artificial sequence
  Protein classification predicting sequence
AGCDMIL

SEQ ID NO: 44878 - protein, 9 aa, Artificial sequence
  Protein classification predicting sequence
QPAGFSRRW

SEQ ID NO: 44879 - protein, 9 aa, Artificial sequence
  Protein classification predicting sequence
ELMDSARWK

SEQ ID NO: 44880 - protein, 28 aa, Artificial sequence
  Protein classification predicting sequence
ELDAEEREILAHPLVGGLILFTRNYHDP

SEQ ID NO: 44881 - protein, 7 aa, Artificial sequence
  Protein classification predicting sequence
VGGLILF

SEQ ID NO: 44882 - protein, 12 aa, Artificial sequence
  Protein classification predicting sequence
LDAGCDMILVCN

SEQ ID NO: 44883 - protein, 7 aa, Artificial sequence
  Protein classification predicting sequence
REILAHP

SEQ ID NO: 44884 - protein, 14 aa, Artificial sequence
  Protein classification predicting sequence
FSDDLSMEGAAIMG

SEQ ID NO: 44885 - protein, 7 aa, Artificial sequence
  Protein classification predicting sequence
AGCDMVL

SEQ ID NO: 44886 - protein, 6 aa, Artificial sequence
  Protein classification predicting sequence
LDAGCD

SEQ ID NO: 44887 - protein, 7 aa, Artificial sequence
  Protein classification predicting sequence
DLSFAPV

SEQ ID NO: 44888 - protein, 13 aa, Artificial sequence
  Protein classification predicting sequence
AMDIDISFAPVLD

SEQ ID NO: 44889 - protein, 25 aa, Artificial sequence
  Protein classification predicting sequence
AGMKTTGKHFPGHGAVTADSHKETP

SEQ ID NO: 44890 - protein, 7 aa, Artificial sequence
  Protein classification predicting sequence
LRQELGF

SEQ ID NO: 44891 - protein, 14 aa, Artificial sequence
  Protein classification predicting sequence
GAVSVLDNLSPIKA

SEQ ID NO: 44892 - protein, 6 aa, Artificial sequence
  Protein classification predicting sequence
GWNLPG

SEQ ID NO: 44893 - protein, 14 aa, Artificial sequence
  Protein classification predicting sequence
IEGNYTLRVDCTPL

SEQ ID NO: 44894 - protein, 9 aa, Artificial sequence
  Protein classification predicting sequence
NDQLMLLER

SEQ ID NO: 44895 - protein, 6 aa, Artificial sequence
  Protein classification predicting sequence
YRIPAL

SEQ ID NO: 44896 - protein, 7 aa, Artificial sequence
  Protein classification predicting sequence
RVTFYDM

SEQ ID NO: 44897 - protein, 6 aa, Artificial sequence
  Protein classification predicting sequence
GSVMHY

SEQ ID NO: 44898 - protein, 13 aa, Artificial sequence
  Protein classification predicting sequence
FEPRALKANGEVI

SEQ ID NO: 44899 - protein, 46 aa, Artificial sequence
  Protein classification predicting sequence
QNEGRIVNWKLILHGTSSQPEHMKQPRVYTSYNTVQNDRRGVEKMV

SEQ ID NO: 44900 - protein, 13 aa, Artificial sequence
  Protein classification predicting sequence
AMLRLLQSAFSKN

SEQ ID NO: 44901 - protein, 23 aa, Artificial sequence
  Protein classification predicting sequence
DYVDVFYNTKPYKHRDDRLLQAL

SEQ ID NO: 44902 - protein, 9 aa, Artificial sequence
  Protein classification predicting sequence
KEWTLMLHG

SEQ ID NO: 44903 - protein, 27 aa, Artificial sequence
  Protein classification predicting sequence
EPCTDFFKYACGGWLKRNVIPETSSRY

SEQ ID NO: 44904 - protein, 11 aa, Artificial sequence
  Protein classification predicting sequence
NFDILRDELEV

SEQ ID NO: 44905 - protein, 20 aa, Artificial sequence
  Protein classification predicting sequence
LKDVLQEPKTEDIVAVQKAK

SEQ ID NO: 44906 - protein, 9 aa, Artificial sequence
  Protein classification predicting sequence
FVGTDDKNS

SEQ ID NO: 44907 - protein, 12 aa, Artificial sequence
  Protein classification predicting sequence
NFTNEIMSTVNI

SEQ ID NO: 44908 - protein, 10 aa, Artificial sequence
  Protein classification predicting sequence
GQAYRAYQNY

SEQ ID NO: 44909 - protein, 9 aa, Artificial sequence
  Protein classification predicting sequence
KLKPILTKY

SEQ ID NO: 44910 - protein, 15 aa, Artificial sequence
  Protein classification predicting sequence
SRNAFRKALYGTTSE

SEQ ID NO: 44911 - protein, 43 aa, Artificial sequence
  Protein classification predicting sequence
DLNHKQLFFLNFAQVWCGTYRPEYAVNSIKTDVHSPGNFRIIG

SEQ ID NO: 44912 - protein, 7 aa, Artificial sequence
  Protein classification predicting sequence
QTKQVYD

SEQ ID NO: 44913 - protein, 15 aa, Artificial sequence
  Protein classification predicting sequence
GRNVLRWDLSPEQIK

SEQ ID NO: 44914 - protein, 58 aa, Artificial sequence
  Protein classification predicting sequence
AGRPSLLRHDEVRTYFHEFGHVMHQICAQTDFARFSGTNVETDFVEVPSQMLENWVWD

SEQ ID NO: 44915 - protein, 15 aa, Artificial sequence
  Protein classification predicting sequence
TLKYPHYFPVMKKCC

SEQ ID NO: 44916 - protein, 8 aa, Artificial sequence
  Protein classification predicting sequence
THADFVLE

SEQ ID NO: 44917 - protein, 8 aa, Artificial sequence
  Protein classification predicting sequence
LSKHYKDG

SEQ ID NO: 44918 - protein, 33 aa, Artificial sequence
  Protein classification predicting sequence
LLEKLVASRLVNTGLLTLRQIVLSKVDQSLHTN

SEQ ID NO: 44919 - protein, 8 aa, Artificial sequence
  Protein classification predicting sequence
TFAVGPGH

SEQ ID NO: 44920 - protein, 7 aa, Artificial sequence
  Protein classification predicting sequence
CAYSDLQ

SEQ ID NO: 44921 - protein, 14 aa, Artificial sequence
  Protein classification predicting sequence
WATFAVGPGHGIQL

SEQ ID NO: 44922 - protein, 7 aa, Artificial sequence
  Protein classification predicting sequence
ECQVAEV

SEQ ID NO: 44923 - protein, 8 aa, Artificial sequence
  Protein classification predicting sequence
GCQGSVVS

SEQ ID NO: 44924 - protein, 5 aa, Artificial sequence
  Protein classification predicting sequence
MNPCP

SEQ ID NO: 44925 - protein, 8 aa, Artificial sequence
  Protein classification predicting sequence
YRLPETTR

SEQ ID NO: 44926 - protein, 7 aa, Artificial sequence
  Protein classification predicting sequence
FPYIPTF

SEQ ID NO: 44927 - protein, 7 aa, Artificial sequence
  Protein classification predicting sequence
PYIPGFL

SEQ ID NO: 44928 - protein, 7 aa, Artificial sequence
  Protein classification predicting sequence
LSQKPDL

SEQ ID NO: 44929 - protein, 8 aa, Artificial sequence
  Protein classification predicting sequence
PGLLSFRE

SEQ ID NO: 44930 - protein, 9 aa, Artificial sequence
  Protein classification predicting sequence
GYRLPEPTR

SEQ ID NO: 44931 - protein, 6 aa, Artificial sequence
  Protein classification predicting sequence
LPEPTR

SEQ ID NO: 44932 - protein, 16 aa, Artificial sequence
  Protein classification predicting sequence
PYVPGLLSFRELPALL

SEQ ID NO: 44933 - protein, 7 aa, Artificial sequence
  Protein classification predicting sequence
PTIGVAK

SEQ ID NO: 44934 - protein, 9 aa, Artificial sequence
  Protein classification predicting sequence
LSFREYPAL

SEQ ID NO: 44935 - protein, 14 aa, Artificial sequence
  Protein classification predicting sequence
HPRRLGVASHFGLL

SEQ ID NO: 44936 - protein, 10 aa, Artificial sequence
  Protein classification predicting sequence
RCMKGYRLPE

SEQ ID NO: 44937 - protein, 13 aa, Artificial sequence
  Protein classification predicting sequence
GADVGFEQGGEVT

SEQ ID NO: 44938 - protein, 45 aa, Artificial sequence
  Protein classification predicting sequence
AAMVLLKYPSLELVEYKVARIATTMPYIPGFLSFREYPALLAAWE

SEQ ID NO: 44939 - protein, 9 aa, Artificial sequence
  Protein classification predicting sequence
EDRLDKDPP

SEQ ID NO: 44940 - protein, 31 aa, Artificial sequence
  Protein classification predicting sequence
PLMDKGEQLAWVWRSKARCNPLFIATGHRVS

SEQ ID NO: 44941 - protein, 28 aa, Artificial sequence
  Protein classification predicting sequence
DSALAWVQRCMKGYRLPEPTRWADAVAS

SEQ ID NO: 44942 - protein, 8 aa, Artificial sequence
  Protein classification predicting sequence
YRLPEPTR

SEQ ID NO: 44943 - protein, 6 aa, Artificial sequence
  Protein classification predicting sequence
VDGHGI

SEQ ID NO: 44944 - protein, 8 aa, Artificial sequence
  Protein classification predicting sequence
IGVAKKRL

SEQ ID NO: 44945 - protein, 13 aa, Artificial sequence
  Protein classification predicting sequence
LSFREYPALLAAW

SEQ ID NO: 44946 - protein, 24 aa, Artificial sequence
  Protein classification predicting sequence
HPRRLGVASHFGLLVDVPTIGVAK

SEQ ID NO: 44947 - protein, 10 aa, Artificial sequence
  Protein classification predicting sequence
SALAWVQRCM

SEQ ID NO: 44948 - protein, 10 aa, Artificial sequence
  Protein classification predicting sequence
IQMVSEAARF

SEQ ID NO: 44949 - protein, 9 aa, Artificial sequence
  Protein classification predicting sequence
ADEPTTDLD

SEQ ID NO: 44950 - protein, 8 aa, Artificial sequence
  Protein classification predicting sequence
ATIMQNPR

SEQ ID NO: 44951 - protein, 14 aa, Artificial sequence
  Protein classification predicting sequence
GKIVEQGDVETLFN

SEQ ID NO: 44952 - protein, 9 aa, Artificial sequence
  Protein classification predicting sequence
QNPRSAFNP

SEQ ID NO: 44953 - protein, 11 aa, Artificial sequence
  Protein classification predicting sequence
SGGMLQRMMIA

SEQ ID NO: 44954 - protein, 12 aa, Artificial sequence
  Protein classification predicting sequence
LLVTHDMGVVAR

SEQ ID NO: 44955 - protein, 141 aa, Artificial sequence
  Protein classification predicting sequence
ALRGIKIATIMQNPRSAFNPLHTMHTHARETCLALGKPADDATLTAAIEAVGLENAARVLKLYPFEMSGGMLQRMMIAMAVLCESPFIIADEPTTDLDVVAQARILDLLESIMQKQAPGMLLVTHDMGVVARLADDVAVMS

SEQ ID NO: 44956 - protein, 10 aa, Artificial sequence
  Protein classification predicting sequence
ILDEAVSNLD

SEQ ID NO: 44957 - protein, 7 aa, Artificial sequence
  Protein classification predicting sequence
THDLRLV

SEQ ID NO: 44958 - protein, 9 aa, Artificial sequence
  Protein classification predicting sequence
LPAFPVRRR

SEQ ID NO: 44959 - protein, 71 aa, Artificial sequence
  Protein classification predicting sequence
VCLARALAVEPKLLILDEAVSNLDLVLQAGVIRLLKKLQQQFGTACLFITHDLRLVERFCQRVMVMDNGQI

SEQ ID NO: 44960 - protein, 24 aa, Artificial sequence
  Protein classification predicting sequence
GKYVLRDLSKPTGTQIITYDLQNR

SEQ ID NO: 44961 - protein, 10 aa, Artificial sequence
  Protein classification predicting sequence
LPGTLVSSTT

SEQ ID NO: 44962 - protein, 21 aa, Artificial sequence
  Protein classification predicting sequence
SSQRAAVDAHYNLGKVYDYFY

SEQ ID NO: 44963 - protein, 20 aa, Artificial sequence
  Protein classification predicting sequence
GDQMIYGDGDGSFFSPLSGS

SEQ ID NO: 44964 - protein, 18 aa, Artificial sequence
  Protein classification predicting sequence
DVTAHEMTHGVTQETANL

SEQ ID NO: 44965 - protein, 47 aa, Artificial sequence
  Protein classification predicting sequence
YENQPGALNESFSDVFGYFNDTEDWDIGEDITVSQPALRSLSNPTKY

SEQ ID NO: 44966 - protein, 23 aa, Artificial sequence
  Protein classification predicting sequence
GDYGGVHTNSGIPNKAAYNTITK

SEQ ID NO: 44967 - protein, 25 aa, Artificial sequence
  Protein classification predicting sequence
YLTPSSTFKDAKAALIQSARDLYGS

SEQ ID NO: 44968 - protein, 7 aa, Artificial sequence
  Protein classification predicting sequence
SLMIGCL

SEQ ID NO: 44969 - protein, 14 aa, Artificial sequence
  Protein classification predicting sequence
SSYVCSGLVGDTPR

SEQ ID NO: 44970 - protein, 53 aa, Artificial sequence
  Protein classification predicting sequence
IGIISLILQIGNIISIWVSHSIQTGSQNHTGICNQRIITYENSTWVNQTYVNI

SEQ ID NO: 44971 - protein, 12 aa, Artificial sequence
  Protein classification predicting sequence
NTNVVAGKDTTS

SEQ ID NO: 44972 - protein, 6 aa, Artificial sequence
  Protein classification predicting sequence
PCFWVE

SEQ ID NO: 44973 - protein, 6 aa, Artificial sequence
  Protein classification predicting sequence
SWPDGA

SEQ ID NO: 44974 - protein, 8 aa, Artificial sequence
  Protein classification predicting sequence
PIIIERNI

SEQ ID NO: 44975 - protein, 9 aa, Artificial sequence
  Protein classification predicting sequence
YRNWSKPQC

SEQ ID NO: 44976 - protein, 19 aa, Artificial sequence
  Protein classification predicting sequence
ITGFAPFSKDNSIRLSAGG

SEQ ID NO: 44977 - protein, 9 aa, Artificial sequence
  Protein classification predicting sequence
HSNGTIHDR

SEQ ID NO: 44978 - protein, 8 aa, Artificial sequence
  Protein classification predicting sequence
NATASFIY

SEQ ID NO: 44979 - protein, 7 aa, Artificial sequence
  Protein classification predicting sequence
TDGSASG

SEQ ID NO: 44980 - protein, 8 aa, Artificial sequence
  Protein classification predicting sequence
ADTRILFI

SEQ ID NO: 44981 - protein, 7 aa, Artificial sequence
  Protein classification predicting sequence
RSGYETF

SEQ ID NO: 44982 - protein, 7 aa, Artificial sequence
  Protein classification predicting sequence
NRQVIVD

SEQ ID NO: 44983 - protein, 10 aa, Artificial sequence
  Protein classification predicting sequence
SGYSGIFSVE

SEQ ID NO: 44984 - protein, 16 aa, Artificial sequence
  Protein classification predicting sequence
KSCINRCFYVELIRGR

SEQ ID NO: 44985 - protein, 10 aa, Artificial sequence
  Protein classification predicting sequence
CFYVELIRGR

SEQ ID NO: 44986 - protein, 8 aa, Artificial sequence
  Protein classification predicting sequence
QETRVWWT

SEQ ID NO: 44987 - protein, 22 aa, Artificial sequence
  Protein classification predicting sequence
NSIVVFCGTSGTYGTGSWPDGA

SEQ ID NO: 44988 - protein, 5 aa, Artificial sequence
  Protein classification predicting sequence
RVWWT

SEQ ID NO: 44989 - protein, 11 aa, Artificial sequence
  Protein classification predicting sequence
REYNETVRIEK

SEQ ID NO: 44990 - protein, 15 aa, Artificial sequence
  Protein classification predicting sequence
ECRTFFLTQGSLLND

SEQ ID NO: 44991 - protein, 11 aa, Artificial sequence
  Protein classification predicting sequence
HSNGTVKDRSP

SEQ ID NO: 44992 - protein, 7 aa, Artificial sequence
  Protein classification predicting sequence
DTPRGED

SEQ ID NO: 44993 - protein, 11 aa, Artificial sequence
  Protein classification predicting sequence
LHVVSIIVTVL

SEQ ID NO: 44994 - protein, 19 aa, Artificial sequence
  Protein classification predicting sequence
YRVGYLCAGLPSDTPRGED

SEQ ID NO: 44995 - protein, 6 aa, Artificial sequence
  Protein classification predicting sequence
SWAGDI

SEQ ID NO: 44996 - protein, 12 aa, Artificial sequence
  Protein classification predicting sequence
RTQESSCTCIQG

SEQ ID NO: 44997 - protein, 9 aa, Artificial sequence
  Protein classification predicting sequence
DVWMGRTIS

SEQ ID NO: 44998 - protein, 17 aa, Artificial sequence
  Protein classification predicting sequence
DVWMGRTISRTSRSGFE

SEQ ID NO: 44999 - protein, 7 aa, Artificial sequence
  Protein classification predicting sequence
QNSKDQI

SEQ ID NO: 45000 - protein, 16 aa, Artificial sequence
  Protein classification predicting sequence
TIWTSSSSIVMCGVDH

SEQ ID NO: 45001 - protein, 12 aa, Artificial sequence
  Protein classification predicting sequence
GTYMNNTEAICD

SEQ ID NO: 45002 - protein, 15 aa, Artificial sequence
  Protein classification predicting sequence
SFNGGHIEECSCYPN

SEQ ID NO: 45003 - protein, 9 aa, Artificial sequence
  Protein classification predicting sequence
GKVECVCRD

SEQ ID NO: 45004 - protein, 7 aa, Artificial sequence
  Protein classification predicting sequence
WTGTNRP

SEQ ID NO: 45005 - protein, 7 aa, Artificial sequence
  Protein classification predicting sequence
VGYLCAG

SEQ ID NO: 45006 - protein, 6 aa, Artificial sequence
  Protein classification predicting sequence
KHSNGT

SEQ ID NO: 45007 - protein, 10 aa, Artificial sequence
  Protein classification predicting sequence
GWSSTSCHDG

SEQ ID NO: 45008 - protein, 8 aa, Artificial sequence
  Protein classification predicting sequence
HIEECSCY

SEQ ID NO: 45009 - protein, 6 aa, Artificial sequence
  Protein classification predicting sequence
EECSCY

SEQ ID NO: 45010 - protein, 7 aa, Artificial sequence
  Protein classification predicting sequence
GVKGFGF

SEQ ID NO: 45011 - protein, 9 aa, Artificial sequence
  Protein classification predicting sequence
NTWLGRTIS

SEQ ID NO: 45012 - protein, 7 aa, Artificial sequence
  Protein classification predicting sequence
VWWTSNS

SEQ ID NO: 45013 - protein, 6 aa, Artificial sequence
  Protein classification predicting sequence
ECRTFF

SEQ ID NO: 45014 - protein, 19 aa, Artificial sequence
  Protein classification predicting sequence
GQSPNVYQARFEAVAWSAT

SEQ ID NO: 45015 - protein, 25 aa, Artificial sequence
  Protein classification predicting sequence
QFTGSCTSPMGNQGYGVKGFGFRQG

SEQ ID NO: 45016 - protein, 16 aa, Artificial sequence
  Protein classification predicting sequence
CRDNWTGTNRPILVIS

SEQ ID NO: 45017 - protein, 16 aa, Artificial sequence
  Protein classification predicting sequence
GDCYWVMTDGPANRQA

SEQ ID NO: 45018 - protein, 33 aa, Artificial sequence
  Protein classification predicting sequence
LSYTVGYLCAGIPTDTPRGEDSQFTGSCTSPLG

SEQ ID NO: 45019 - protein, 5 aa, Artificial sequence
  Protein classification predicting sequence
NGWTQ

SEQ ID NO: 45020 - protein, 17 aa, Artificial sequence
  Protein classification predicting sequence
CLVPCFWVEMIRGKPEE

SEQ ID NO: 45021 - protein, 10 aa, Artificial sequence
  Protein classification predicting sequence
REYNETVRIE

SEQ ID NO: 45022 - protein, 7 aa, Artificial sequence
  Protein classification predicting sequence
AVVHYGG

SEQ ID NO: 45023 - protein, 8 aa, Artificial sequence
  Protein classification predicting sequence
IVGQTDVS

SEQ ID NO: 45024 - protein, 11 aa, Artificial sequence
  Protein classification predicting sequence
YGVKGFGFRQG

SEQ ID NO: 45025 - protein, 32 aa, Artificial sequence
  Protein classification predicting sequence
CLVPCFWVEMIRGKPEEKTIWTSSSSIVMCGV

SEQ ID NO: 45026 - protein, 14 aa, Artificial sequence
  Protein classification predicting sequence
TIWTSSSSIVMCGV

SEQ ID NO: 45027 - protein, 9 aa, Artificial sequence
  Protein classification predicting sequence
RFESVAWSA

SEQ ID NO: 45028 - protein, 16 aa, Artificial sequence
  Protein classification predicting sequence
VAWSATACHDGKKWMT

SEQ ID NO: 45029 - protein, 13 aa, Artificial sequence
  Protein classification predicting sequence
DILRTQESSCTCI

SEQ ID NO: 45030 - protein, 9 aa, Artificial sequence
  Protein classification predicting sequence
LVISPDLSY

SEQ ID NO: 45031 - protein, 12 aa, Artificial sequence
  Protein classification predicting sequence
GYGVKGFGFRQG

SEQ ID NO: 45032 - protein, 38 aa, Artificial sequence
  Protein classification predicting sequence
DNLNWSGYSGSFTLPVELTKKGCLVPCFWVEMIRGKPE

SEQ ID NO: 45033 - protein, 6 aa, Artificial sequence
  Protein classification predicting sequence
TTIWTS

SEQ ID NO: 45034 - protein, 36 aa, Artificial sequence
  Protein classification predicting sequence
TTIWTSSSSIVMCGVDHKIASWSWHDGAILPFDIDK

SEQ ID NO: 45035 - protein, 15 aa, Artificial sequence
  Protein classification predicting sequence
WSWHDGAILPFDIDK

SEQ ID NO: 45036 - protein, 7 aa, Artificial sequence
  Protein classification predicting sequence
IGSASLG

SEQ ID NO: 45037 - protein, 18 aa, Artificial sequence
  Protein classification predicting sequence
ILNVILHVVSIIVTVLVL

SEQ ID NO: 45038 - protein, 7 aa, Artificial sequence
  Protein classification predicting sequence
PSNEYYM

SEQ ID NO: 45039 - protein, 30 aa, Artificial sequence
  Protein classification predicting sequence
ECRTFFLTQGSLLNDKHSNGTVKDRSPYRT

SEQ ID NO: 45040 - protein, 7 aa, Artificial sequence
  Protein classification predicting sequence
YGGVPVD

SEQ ID NO: 45041 - protein, 9 aa, Artificial sequence
  Protein classification predicting sequence
GRTISRTSR

SEQ ID NO: 45042 - protein, 10 aa, Artificial sequence
  Protein classification predicting sequence
LNVILHVVSI

SEQ ID NO: 45043 - protein, 15 aa, Artificial sequence
  Protein classification predicting sequence
GFAPFSKDNGIRIGS

SEQ ID NO: 45044 - protein, 15 aa, Artificial sequence
  Protein classification predicting sequence
GHVFVIREPFVSCSP

SEQ ID NO: 45045 - protein, 8 aa, Artificial sequence
  Protein classification predicting sequence
DVINSWAG

SEQ ID NO: 45046 - protein, 12 aa, Artificial sequence
  Protein classification predicting sequence
ILRTQESSCTCI

SEQ ID NO: 45047 - protein, 15 aa, Artificial sequence
  Protein classification predicting sequence
DTPRGEDSQFTGSCT

SEQ ID NO: 45048 - protein, 12 aa, Artificial sequence
  Protein classification predicting sequence
KGFGFRQGNDVW

SEQ ID NO: 45049 - protein, 12 aa, Artificial sequence
  Protein classification predicting sequence
GQSPNVYQARFE

SEQ ID NO: 45050 - protein, 34 aa, Artificial sequence
  Protein classification predicting sequence
ASYRIFKIEKGKITKSIELDAPNSHYEECSCYPD

SEQ ID NO: 45051 - protein, 16 aa, Artificial sequence
  Protein classification predicting sequence
RTLLMNELGVPFHLGT

SEQ ID NO: 45052 - protein, 20 aa, Artificial sequence
  Protein classification predicting sequence
NATASFIYDGRLVDSIGSWS

SEQ ID NO: 45053 - protein, 13 aa, Artificial sequence
  Protein classification predicting sequence
RADTKILFIEEGK

SEQ ID NO: 45054 - protein, 11 aa, Artificial sequence
  Protein classification predicting sequence
CRDNWKGSNRP

SEQ ID NO: 45055 - protein, 10 aa, Artificial sequence
  Protein classification predicting sequence
VDINVKDYSI

SEQ ID NO: 45056 - protein, 7 aa, Artificial sequence
  Protein classification predicting sequence
NPNNEKG

SEQ ID NO: 45057 - protein, 10 aa, Artificial sequence
  Protein classification predicting sequence
ESDHFMNNTE

SEQ ID NO: 45058 - protein, 11 aa, Artificial sequence
  Protein classification predicting sequence
VTREPYVSCDP

SEQ ID NO: 45059 - protein, 11 aa, Artificial sequence
  Protein classification predicting sequence
ILRTQESECVC

SEQ ID NO: 45060 - protein, 31 aa, Artificial sequence
  Protein classification predicting sequence
ILRTQESECVCINGTCTVVMTDGSASGRADT

SEQ ID NO: 45061 - protein, 22 aa, Artificial sequence
  Protein classification predicting sequence
HGVKGWAFDDGNDVWMGRTISE

SEQ ID NO: 45062 - protein, 14 aa, Artificial sequence
  Protein classification predicting sequence
PNSKLQINRQVIVD

SEQ ID NO: 45063 - protein, 14 aa, Artificial sequence
  Protein classification predicting sequence
TWVNQTYVNISNTN

SEQ ID NO: 45064 - protein, 6 aa, Artificial sequence
  Protein classification predicting sequence
IYSKDN

SEQ ID NO: 45065 - protein, 20 aa, Artificial sequence
  Protein classification predicting sequence
GDVFVIREPFISCSHLECRT

SEQ ID NO: 45066 - protein, 18 aa, Artificial sequence
  Protein classification predicting sequence
LLNDKHSNGTVKDRSPYR

SEQ ID NO: 45067 - protein, 6 aa, Artificial sequence
  Protein classification predicting sequence
GISGPD

SEQ ID NO: 45068 - protein, 13 aa, Artificial sequence
  Protein classification predicting sequence
GAVAVLKYNGIIT

SEQ ID NO: 45069 - protein, 6 aa, Artificial sequence
  Protein classification predicting sequence
TIKSWR

SEQ ID NO: 45070 - protein, 8 aa, Artificial sequence
  Protein classification predicting sequence
CVNGSCFT

SEQ ID NO: 45071 - protein, 8 aa, Artificial sequence
  Protein classification predicting sequence
IFKIEKGK

SEQ ID NO: 45072 - protein, 10 aa, Artificial sequence
  Protein classification predicting sequence
HYEECSCYPD

SEQ ID NO: 45073 - protein, 7 aa, Artificial sequence
  Protein classification predicting sequence
CVCRDNW

SEQ ID NO: 45074 - protein, 7 aa, Artificial sequence
  Protein classification predicting sequence
DNPRPND

SEQ ID NO: 45075 - protein, 6 aa, Artificial sequence
  Protein classification predicting sequence
YGVKGF

SEQ ID NO: 45076 - protein, 12 aa, Artificial sequence
  Protein classification predicting sequence
YGNGVWIGRTKS

SEQ ID NO: 45077 - protein, 8 aa, Artificial sequence
  Protein classification predicting sequence
VELIRGRP

SEQ ID NO: 45078 - protein, 14 aa, Artificial sequence
  Protein classification predicting sequence
ISLILQIGNIISIW

SEQ ID NO: 45079 - protein, 56 aa, Artificial sequence
  Protein classification predicting sequence
GNSSLCPIRGWAIYSKDNSIRIGSKGDVFVIREPFISCSHLECRTFFLTQGALLND

SEQ ID NO: 45080 - protein, 21 aa, Artificial sequence
  Protein classification predicting sequence
GAVAVLKYNGIITETIKSWRK

SEQ ID NO: 45081 - protein, 9 aa, Artificial sequence
  Protein classification predicting sequence
ILRTQESEC

SEQ ID NO: 45082 - protein, 24 aa, Artificial sequence
  Protein classification predicting sequence
QNLDYQIGYICSGVFGDNPRPKDG

SEQ ID NO: 45083 - protein, 12 aa, Artificial sequence
  Protein classification predicting sequence
GFEMIWDPNGWT

SEQ ID NO: 45084 - protein, 27 aa, Artificial sequence
  Protein classification predicting sequence
QDVVAMTDWSGYSGSFVQHPELTGLDC

SEQ ID NO: 45085 - protein, 20 aa, Artificial sequence
  Protein classification predicting sequence
KIITIGSISLGLVVFNVLLH

SEQ ID NO: 45086 - protein, 7 aa, Artificial sequence
  Protein classification predicting sequence
LLHIVSI

SEQ ID NO: 45087 - protein, 13 aa, Artificial sequence
  Protein classification predicting sequence
CNETVVREYNETV

SEQ ID NO: 45088 - protein, 5 aa, Artificial sequence
  Protein classification predicting sequence
QWHNT

SEQ ID NO: 45089 - protein, 31 aa, Artificial sequence
  Protein classification predicting sequence
GFAPFSKDNGIRIGSRGHVFVIREPFVSCSP

SEQ ID NO: 45090 - protein, 29 aa, Artificial sequence
  Protein classification predicting sequence
GQSPNVYQARFEAVAWSATACHDGKKWMT

SEQ ID NO: 45091 - protein, 18 aa, Artificial sequence
  Protein classification predicting sequence
NSWAGDILRTQESSCTCI

SEQ ID NO: 45092 - protein, 17 aa, Artificial sequence
  Protein classification predicting sequence
GKVECVCRDNWTGTNRP

SEQ ID NO: 45093 - protein, 8 aa, Artificial sequence
  Protein classification predicting sequence
ITIGSVSL

SEQ ID NO: 45094 - protein, 9 aa, Artificial sequence
  Protein classification predicting sequence
TTVTLHFKQ

SEQ ID NO: 45095 - protein, 10 aa, Artificial sequence
  Protein classification predicting sequence
NTTIEKEICP

SEQ ID NO: 45096 - protein, 18 aa, Artificial sequence
  Protein classification predicting sequence
PHRTLLMNELGVPFHLGT

SEQ ID NO: 45097 - protein, 8 aa, Artificial sequence
  Protein classification predicting sequence
GVKGWAFD

SEQ ID NO: 45098 - protein, 5 aa, Artificial sequence
  Protein classification predicting sequence
CRDNW

SEQ ID NO: 45099 - protein, 6 aa, Artificial sequence
  Protein classification predicting sequence
YNETVR

SEQ ID NO: 45100 - protein, 7 aa, Artificial sequence
  Protein classification predicting sequence
NNTEPLC

SEQ ID NO: 45101 - protein, 10 aa, Artificial sequence
  Protein classification predicting sequence
ECRTFFLTQG

SEQ ID NO: 45102 - protein, 13 aa, Artificial sequence
  Protein classification predicting sequence
WSATACHDGKKWM

SEQ ID NO: 45103 - protein, 12 aa, Artificial sequence
  Protein classification predicting sequence
SWRKQILRTQES

SEQ ID NO: 45104 - protein, 11 aa, Artificial sequence
  Protein classification predicting sequence
CYWVMTDGPAN

SEQ ID NO: 45105 - protein, 12 aa, Artificial sequence
  Protein classification predicting sequence
GGHIEECSCYPN

SEQ ID NO: 45106 - protein, 8 aa, Artificial sequence
  Protein classification predicting sequence
VWAGRTIS

SEQ ID NO: 45107 - protein, 7 aa, Artificial sequence
  Protein classification predicting sequence
IWTSSSS

SEQ ID NO: 45108 - protein, 8 aa, Artificial sequence
  Protein classification predicting sequence
REYNETVR

SEQ ID NO: 45109 - protein, 12 aa, Artificial sequence
  Protein classification predicting sequence
FVIREPFVSCSP

SEQ ID NO: 45110 - protein, 17 aa, Artificial sequence
  Protein classification predicting sequence
CYWVMTDGPANRQAQYR

SEQ ID NO: 45111 - protein, 8 aa, Artificial sequence
  Protein classification predicting sequence
QNSKEQIK

SEQ ID NO: 45112 - protein, 22 aa, Artificial sequence
  Protein classification predicting sequence
QVVVDNLNWSGYSGSFTLPVEL

SEQ ID NO: 45113 - protein, 9 aa, Artificial sequence
  Protein classification predicting sequence
CFLMQIAIL

SEQ ID NO: 45114 - protein, 8 aa, Artificial sequence
  Protein classification predicting sequence
CFLMQIAI

SEQ ID NO: 45115 - protein, 19 aa, Artificial sequence
  Protein classification predicting sequence
WSSSSCHDGKAWLHVCVTG

SEQ ID NO: 45116 - protein, 25 aa, Artificial sequence
  Protein classification predicting sequence
WIGRTKSNSSRKGFEMIWDPNGWTD

SEQ ID NO: 45117 - protein, 9 aa, Artificial sequence
  Protein classification predicting sequence
DSNFLVKQD

SEQ ID NO: 45118 - protein, 8 aa, Artificial sequence
  Protein classification predicting sequence
TDWSGYSG

SEQ ID NO: 45119 - protein, 9 aa, Artificial sequence
  Protein classification predicting sequence
NQVMPCEPI

SEQ ID NO: 45120 - protein, 19 aa, Artificial sequence
  Protein classification predicting sequence
DYSIDSSYVCSGLVGDTPR

SEQ ID NO: 45121 - protein, 9 aa, Artificial sequence
  Protein classification predicting sequence
QNHTGICNQ

SEQ ID NO: 45122 - protein, 13 aa, Artificial sequence
  Protein classification predicting sequence
GNSSLCPIRGWAI

SEQ ID NO: 45123 - protein, 7 aa, Artificial sequence
  Protein classification predicting sequence
LLNDKHS

SEQ ID NO: 45124 - protein, 7 aa, Artificial sequence
  Protein classification predicting sequence
KDRSPYR

SEQ ID NO: 45125 - protein, 7 aa, Artificial sequence
  Protein classification predicting sequence
SGYSGSF

SEQ ID NO: 45126 - protein, 7 aa, Artificial sequence
  Protein classification predicting sequence
TIGSVSL

SEQ ID NO: 45127 - protein, 17 aa, Artificial sequence
  Protein classification predicting sequence
PCEPIIIERNITEIVYL

SEQ ID NO: 45128 - protein, 7 aa, Artificial sequence
  Protein classification predicting sequence
NTTIEKE

SEQ ID NO: 45129 - protein, 15 aa, Artificial sequence
  Protein classification predicting sequence
VRCICRDNWKGSNRP

SEQ ID NO: 45130 - protein, 13 aa, Artificial sequence
  Protein classification predicting sequence
RSGYETFKVIGGW

SEQ ID NO: 45131 - protein, 7 aa, Artificial sequence
  Protein classification predicting sequence
GSWPDGA

SEQ ID NO: 45132 - protein, 28 aa, Artificial sequence
  Protein classification predicting sequence
RSGYSGIFSVEGKSCINRCFYVELIRGR

SEQ ID NO: 45133 - protein, 7 aa, Artificial sequence
  Protein classification predicting sequence
ILFIEEG

SEQ ID NO: 45134 - protein, 7 aa, Artificial sequence
  Protein classification predicting sequence
ACGPKEC

SEQ ID NO: 45135 - protein, 19 aa, Artificial sequence
  Protein classification predicting sequence
HFALTHYAAQPGGYYNGTR

SEQ ID NO: 45136 - protein, 23 aa, Artificial sequence
  Protein classification predicting sequence
LTSGGVLLSLYVSASLSYLLYSD

SEQ ID NO: 45137 - protein, 7 aa, Artificial sequence
  Protein classification predicting sequence
TAPTMSL

SEQ ID NO: 45138 - protein, 8 aa, Artificial sequence
  Protein classification predicting sequence
SATKEMTF

SEQ ID NO: 45139 - protein, 12 aa, Artificial sequence
  Protein classification predicting sequence
GNSAPLIIREPF

SEQ ID NO: 45140 - protein, 8 aa, Artificial sequence
  Protein classification predicting sequence
DRNKLRHL

SEQ ID NO: 45141 - protein, 16 aa, Artificial sequence
  Protein classification predicting sequence
KIKYGEAYTDTYHSYA

SEQ ID NO: 45142 - protein, 8 aa, Artificial sequence
  Protein classification predicting sequence
NILRTQES

SEQ ID NO: 45143 - protein, 9 aa, Artificial sequence
  Protein classification predicting sequence
GPCESNGDK

SEQ ID NO: 45144 - protein, 27 aa, Artificial sequence
  Protein classification predicting sequence
GGIKGGFVHQRMASKIGRWYSRTMSKT

SEQ ID NO: 45145 - protein, 31 aa, Artificial sequence
  Protein classification predicting sequence
EPGWYSFGFEIKDKKCDVPCIGIEMVHDGGK

SEQ ID NO: 45146 - protein, 8 aa, Artificial sequence
  Protein classification predicting sequence
TMSLDCAN

SEQ ID NO: 45147 - protein, 13 aa, Artificial sequence
  Protein classification predicting sequence
LDCANASNVQAVN

SEQ ID NO: 45148 - protein, 7 aa, Artificial sequence
  Protein classification predicting sequence
PSGVMVS

SEQ ID NO: 45149 - protein, 29 aa, Artificial sequence
  Protein classification predicting sequence
EPEWTYPRLSCQGSTFQKALLISPHRFGE

SEQ ID NO: 45150 - protein, 7 aa, Artificial sequence
  Protein classification predicting sequence
YCAPTAD

SEQ ID NO: 45151 - protein, 9 aa, Artificial sequence
  Protein classification predicting sequence
EGGCFVLSA

SEQ ID NO: 45152 - protein, 7 aa, Artificial sequence
  Protein classification predicting sequence
LERCIWG

SEQ ID NO: 45153 - protein, 8 aa, Artificial sequence
  Protein classification predicting sequence
GDGSTIPV

SEQ ID NO: 45154 - protein, 7 aa, Artificial sequence
  Protein classification predicting sequence
FLGKHRK

SEQ ID NO: 45155 - protein, 12 aa, Artificial sequence
  Protein classification predicting sequence
GDGSTIPVYDTP

SEQ ID NO: 45156 - protein, 9 aa, Artificial sequence
  Protein classification predicting sequence
ARQIGKMLN

SEQ ID NO: 45157 - protein, 11 aa, Artificial sequence
  Protein classification predicting sequence
IIFDEIDAICK

SEQ ID NO: 45158 - protein, 12 aa, Artificial sequence
  Protein classification predicting sequence
DEALLRPGRLEV

SEQ ID NO: 45159 - protein, 7 aa, Artificial sequence
  Protein classification predicting sequence
IGPRFSN

SEQ ID NO: 45160 - protein, 7 aa, Artificial sequence
  Protein classification predicting sequence
SIINPDW

SEQ ID NO: 45161 - protein, 7 aa, Artificial sequence
  Protein classification predicting sequence
MGIGGLD

SEQ ID NO: 45162 - protein, 14 aa, Artificial sequence
  Protein classification predicting sequence
ARQIGKMLNAREPK

SEQ ID NO: 45163 - protein, 10 aa, Artificial sequence
  Protein classification predicting sequence
RKLFADAEEE

SEQ ID NO: 45164 - protein, 27 aa, Artificial sequence
  Protein classification predicting sequence
GANSGLHIIIFDEIDAICKQRGSMAGS

SEQ ID NO: 45165 - protein, 12 aa, Artificial sequence
  Protein classification predicting sequence
VHDTVVNQLLSK

SEQ ID NO: 45166 - protein, 17 aa, Artificial sequence
  Protein classification predicting sequence
DGVEQLNNILVIGMTNR

SEQ ID NO: 45167 - protein, 7 aa, Artificial sequence
  Protein classification predicting sequence
IHTARMR

SEQ ID NO: 45168 - protein, 18 aa, Artificial sequence
  Protein classification predicting sequence
TKNFSGAELEGLVRAAQS

SEQ ID NO: 45169 - protein, 15 aa, Artificial sequence
  Protein classification predicting sequence
RLLIIIDEVHKLISR

SEQ ID NO: 45170 - protein, 10 aa, Artificial sequence
  Protein classification predicting sequence
IILNSRGKVL

SEQ ID NO: 45171 - protein, 6 aa, Artificial sequence
  Protein classification predicting sequence
IRLNSH

SEQ ID NO: 45172 - protein, 7 aa, Artificial sequence
  Protein classification predicting sequence
RYVNVHF

SEQ ID NO: 45173 - protein, 8 aa, Artificial sequence
  Protein classification predicting sequence
AAYIDYAL

SEQ ID NO: 45174 - protein, 7 aa, Artificial sequence
  Protein classification predicting sequence
NYDDQNF

SEQ ID NO: 45175 - protein, 8 aa, Artificial sequence
  Protein classification predicting sequence
NKFFTNIK

SEQ ID NO: 45176 - protein, 9 aa, Artificial sequence
  Protein classification predicting sequence
GKCLVFEPF

SEQ ID NO: 45177 - protein, 17 aa, Artificial sequence
  Protein classification predicting sequence
SINDIFILDMTWNEASL

SEQ ID NO: 45178 - protein, 9 aa, Artificial sequence
  Protein classification predicting sequence
PPERRYVNV

SEQ ID NO: 45179 - protein, 9 aa, Artificial sequence
  Protein classification predicting sequence
IIQSKSKEF

SEQ ID NO: 45180 - protein, 9 aa, Artificial sequence
  Protein classification predicting sequence
HINYALDKT

SEQ ID NO: 45181 - protein, 14 aa, Artificial sequence
  Protein classification predicting sequence
EFNNLIGLLRPNVM

SEQ ID NO: 45182 - protein, 11 aa, Artificial sequence
  Protein classification predicting sequence
CSYKRLIEADS

SEQ ID NO: 45183 - protein, 7 aa, Artificial sequence
  Protein classification predicting sequence
YHNIIMS

SEQ ID NO: 45184 - protein, 14 aa, Artificial sequence
  Protein classification predicting sequence
SSFAFYDLKIKGDL

SEQ ID NO: 45185 - protein, 18 aa, Artificial sequence
  Protein classification predicting sequence
NDIIILDMPWNESELKQI

SEQ ID NO: 45186 - protein, 8 aa, Artificial sequence
  Protein classification predicting sequence
VFLGLDSM

SEQ ID NO: 45187 - protein, 9 aa, Artificial sequence
  Protein classification predicting sequence
CLSATPIVN

SEQ ID NO: 45188 - protein, 7 aa, Artificial sequence
  Protein classification predicting sequence
ELVSKLG

SEQ ID NO: 45189 - protein, 7 aa, Artificial sequence
  Protein classification predicting sequence
RRMAATF

SEQ ID NO: 45190 - protein, 8 aa, Artificial sequence
  Protein classification predicting sequence
IFIKKSLY

SEQ ID NO: 45191 - protein, 10 aa, Artificial sequence
  Protein classification predicting sequence
LGGLKTMRRL

SEQ ID NO: 45192 - protein, 8 aa, Artificial sequence
  Protein classification predicting sequence
AGSEGISF

SEQ ID NO: 45193 - protein, 15 aa, Artificial sequence
  Protein classification predicting sequence
MHSLLLFHETGVGKT

SEQ ID NO: 45194 - protein, 9 aa, Artificial sequence
  Protein classification predicting sequence
IILLVKKAL

SEQ ID NO: 45195 - protein, 8 aa, Artificial sequence
  Protein classification predicting sequence
YQKAKLAE

SEQ ID NO: 45196 - protein, 7 aa, Artificial sequence
  Protein classification predicting sequence
GISSFRI

SEQ ID NO: 45197 - protein, 15 aa, Artificial sequence
  Protein classification predicting sequence
GKCLVFEPFVNQSGI

SEQ ID NO: 45198 - protein, 7 aa, Artificial sequence
  Protein classification predicting sequence
FNISYIE

SEQ ID NO: 45199 - protein, 7 aa, Artificial sequence
  Protein classification predicting sequence
PTVDEDL

SEQ ID NO: 45200 - protein, 57 aa, Artificial sequence
  Protein classification predicting sequence
EKELVSKLGGLCSYIVNNEFSIFDDVEGSASFAKKTVLMRYVNMSKKQEEIYQKAKL

SEQ ID NO: 45201 - protein, 47 aa, Artificial sequence
  Protein classification predicting sequence
EIKTGISSFRILRRMATTFTFDSFPERQNRDPGEYAQEIATLYNDFK

SEQ ID NO: 45202 - protein, 12 aa, Artificial sequence
  Protein classification predicting sequence
ILKHLKDIYTNW

SEQ ID NO: 45203 - protein, 8 aa, Artificial sequence
  Protein classification predicting sequence
CIFINYDD

SEQ ID NO: 45204 - protein, 26 aa, Artificial sequence
  Protein classification predicting sequence
SGGEGISFFSINDIFILDMTWNEASL

SEQ ID NO: 45205 - protein, 12 aa, Artificial sequence
  Protein classification predicting sequence
QIVGRAIRLNSH

SEQ ID NO: 45206 - protein, 8 aa, Artificial sequence
  Protein classification predicting sequence
FPVIKHRW

SEQ ID NO: 45207 - protein, 7 aa, Artificial sequence
  Protein classification predicting sequence
ATLEDDR

SEQ ID NO: 45208 - protein, 10 aa, Artificial sequence
  Protein classification predicting sequence
VLSLPRVALV

SEQ ID NO: 45209 - protein, 8 aa, Artificial sequence
  Protein classification predicting sequence
DEVHEHDQ

SEQ ID NO: 45210 - protein, 8 aa, Artificial sequence
  Protein classification predicting sequence
FVASVAQC

SEQ ID NO: 45211 - protein, 9 aa, Artificial sequence
  Protein classification predicting sequence
THVYDTGRV

SEQ ID NO: 45212 - protein, 7 aa, Artificial sequence
  Protein classification predicting sequence
RIDSEFL

SEQ ID NO: 45213 - protein, 8 aa, Artificial sequence
  Protein classification predicting sequence
QRKGRVGR

SEQ ID NO: 45214 - protein, 9 aa, Artificial sequence
  Protein classification predicting sequence
YGIVFSTHK

SEQ ID NO: 45215 - protein, 7 aa, Artificial sequence
  Protein classification predicting sequence
GDIIIAV

SEQ ID NO: 45216 - protein, 11 aa, Artificial sequence
  Protein classification predicting sequence
FLMTATLEDDR

SEQ ID NO: 45217 - protein, 9 aa, Artificial sequence
  Protein classification predicting sequence
YIEEEKRNL

SEQ ID NO: 45218 - protein, 6 aa, Artificial sequence
  Protein classification predicting sequence
YIIHGK

SEQ ID NO: 45219 - protein, 17 aa, Artificial sequence
  Protein classification predicting sequence
FISKSMRDQRKGRVGRV

SEQ ID NO: 45220 - protein, 35 aa, Artificial sequence
  Protein classification predicting sequence
ERDSFSLAVFPVIKHRWHNAHVVKHKGIYKVSTEA

SEQ ID NO: 45221 - protein, 12 aa, Artificial sequence
  Protein classification predicting sequence
GKKVSPPSLGKP

SEQ ID NO: 45222 - protein, 29 aa, Artificial sequence
  Protein classification predicting sequence
HINLTAKQYIYSEHTISFECYSFLKCITN

SEQ ID NO: 45223 - protein, 16 aa, Artificial sequence
  Protein classification predicting sequence
ILEKVYSSPNVSIIIS

SEQ ID NO: 45224 - protein, 37 aa, Artificial sequence
  Protein classification predicting sequence
FISKSMRDQRKGRVGRVNPGTYVYFYDLSYMKSIQRI

SEQ ID NO: 45225 - protein, 90 aa, Artificial sequence
  Protein classification predicting sequence
SEFLHNYILYANKFNLTLPEDLFIIPTNLDILWRTKEYIDSFDISTETWNKLLSNYYMKMIEYAKLYVLSPILAEELDNFERTGELTSIV

SEQ ID NO: 45226 - protein, 19 aa, Artificial sequence
  Protein classification predicting sequence
EAILSLNLRIKILNFKHKD

SEQ ID NO: 45227 - protein, 6 aa, Artificial sequence
  Protein classification predicting sequence
LAGFVE

SEQ ID NO: 45228 - protein, 6 aa, Artificial sequence
  Protein classification predicting sequence
GWWVVS

SEQ ID NO: 45229 - protein, 16 aa, Artificial sequence
  Protein classification predicting sequence
LPPPGTVARRLIEDTV

SEQ ID NO: 45230 - protein, 7 aa, Artificial sequence
  Protein classification predicting sequence
SQPWPFP

SEQ ID NO: 45231 - protein, 6 aa, Artificial sequence
  Protein classification predicting sequence
PCIIVA

SEQ ID NO: 45232 - protein, 8 aa, Artificial sequence
  Protein classification predicting sequence
WLPKGELP

SEQ ID NO: 45233 - protein, 19 aa, Artificial sequence
  Protein classification predicting sequence
GLFQLAGRGVQLAEFYRSH

SEQ ID NO: 45234 - protein, 8 aa, Artificial sequence
  Protein classification predicting sequence
ARRLIEDT

SEQ ID NO: 45235 - protein, 10 aa, Artificial sequence
  Protein classification predicting sequence
VSHEQKLWLP

SEQ ID NO: 45236 - protein, 12 aa, Artificial sequence
  Protein classification predicting sequence
AANFDLVGQRAL

SEQ ID NO: 45237 - protein, 6 aa, Artificial sequence
  Protein classification predicting sequence
CGYCGH

SEQ ID NO: 45238 - protein, 14 aa, Artificial sequence
  Protein classification predicting sequence
PSKTEWAMLCSHCR

SEQ ID NO: 45239 - protein, 6 aa, Artificial sequence
  Protein classification predicting sequence
MGSVRQ

SEQ ID NO: 45240 - protein, 13 aa, Artificial sequence
  Protein classification predicting sequence
HCRERYYPQIAPC

SEQ ID NO: 45241 - protein, 8 aa, Artificial sequence
  Protein classification predicting sequence
ESRKSKDN

SEQ ID NO: 45242 - protein, 13 aa, Artificial sequence
  Protein classification predicting sequence
AVVYQIYPRSFYD

SEQ ID NO: 45243 - protein, 7 aa, Artificial sequence
  Protein classification predicting sequence
ELFRIGG

SEQ ID NO: 45244 - protein, 22 aa, Artificial sequence
  Protein classification predicting sequence
PDTNYLFMGDYVDRGYYSVETV

SEQ ID NO: 45245 - protein, 9 aa, Artificial sequence
  Protein classification predicting sequence
LLVALKVRY

SEQ ID NO: 45246 - protein, 6 aa, Artificial sequence
  Protein classification predicting sequence
LRGNHE

SEQ ID NO: 45247 - protein, 6 aa, Artificial sequence
  Protein classification predicting sequence
HGGLSP

SEQ ID NO: 45248 - protein, 7 aa, Artificial sequence
  Protein classification predicting sequence
FNHNNGL

SEQ ID NO: 45249 - protein, 9 aa, Artificial sequence
  Protein classification predicting sequence
RAHQLVMEG

SEQ ID NO: 45250 - protein, 11 aa, Artificial sequence
  Protein classification predicting sequence
HGQFHDLMELF

SEQ ID NO: 45251 - protein, 6 aa, Artificial sequence
  Protein classification predicting sequence
FLQFDP

SEQ ID NO: 45252 - protein, 38 aa, Artificial sequence
  Protein classification predicting sequence
QEVPHEGPMCDLLWSDPDDRCGWGISPRGAGYTFGQDI

SEQ ID NO: 45253 - protein, 13 aa, Artificial sequence
  Protein classification predicting sequence
CPVTVCGDIHGQF

SEQ ID NO: 45254 - protein, 22 aa, Artificial sequence
  Protein classification predicting sequence
CPVTVCGDIHGQFYDLIELFRI

SEQ ID NO: 45255 - protein, 6 aa, Artificial sequence
  Protein classification predicting sequence
QFNHTN

SEQ ID NO: 45256 - protein, 16 aa, Artificial sequence
  Protein classification predicting sequence
PDTNYLFMGDYVDRGY

SEQ ID NO: 45257 - protein, 8 aa, Artificial sequence
  Protein classification predicting sequence
GDYVDRGY

SEQ ID NO: 45258 - protein, 22 aa, Artificial sequence
  Protein classification predicting sequence
NVVTIFSAPNYCYRCGNQAAIM

SEQ ID NO: 45259 - protein, 7 aa, Artificial sequence
  Protein classification predicting sequence
HGQFHDL

SEQ ID NO: 45260 - protein, 20 aa, Artificial sequence
  Protein classification predicting sequence
QEVPHEGPMCDLLWSDPDDR

SEQ ID NO: 45261 - protein, 10 aa, Artificial sequence
  Protein classification predicting sequence
GWGISPRGAG

SEQ ID NO: 45262 - protein, 10 aa, Artificial sequence
  Protein classification predicting sequence
SRAHQLVMEG

SEQ ID NO: 45263 - protein, 7 aa, Artificial sequence
  Protein classification predicting sequence
CGDIHGQ

SEQ ID NO: 45264 - protein, 5 aa, Artificial sequence
  Protein classification predicting sequence
ANVWK

SEQ ID NO: 45265 - protein, 7 aa, Artificial sequence
  Protein classification predicting sequence
PLTALIE

SEQ ID NO: 45266 - protein, 19 aa, Artificial sequence
  Protein classification predicting sequence
GWGISPRGAGYTFGQDISE

SEQ ID NO: 45267 - protein, 27 aa, Artificial sequence
  Protein classification predicting sequence
GWGISPRGAGYTFGQDISETFNHANGL

SEQ ID NO: 45268 - protein, 8 aa, Artificial sequence
  Protein classification predicting sequence
TFGQDISE

SEQ ID NO: 45269 - protein, 12 aa, Artificial sequence
  Protein classification predicting sequence
LLVALKVRYRDR

SEQ ID NO: 45270 - protein, 10 aa, Artificial sequence
  Protein classification predicting sequence
GDFVDRGFYS

SEQ ID NO: 45271 - protein, 14 aa, Artificial sequence
  Protein classification predicting sequence
RYPDRITLIRGNHE

SEQ ID NO: 45272 - protein, 6 aa, Artificial sequence
  Protein classification predicting sequence
YGFYDE

SEQ ID NO: 45273 - protein, 12 aa, Artificial sequence
  Protein classification predicting sequence
IRTIDRKQEVPH

SEQ ID NO: 45274 - protein, 7 aa, Artificial sequence
  Protein classification predicting sequence
QEVPHEG

SEQ ID NO: 45275 - protein, 6 aa, Artificial sequence
  Protein classification predicting sequence
WSDPED

SEQ ID NO: 45276 - protein, 10 aa, Artificial sequence
  Protein classification predicting sequence
WSDPEDVDTW

SEQ ID NO: 45277 - protein, 8 aa, Artificial sequence
  Protein classification predicting sequence
QIEQLMEC

SEQ ID NO: 45278 - protein, 11 aa, Artificial sequence
  Protein classification predicting sequence
CGDIHGQFHDL

SEQ ID NO: 45279 - protein, 12 aa, Artificial sequence
  Protein classification predicting sequence
IFCLHGGLSPSI

SEQ ID NO: 45280 - protein, 12 aa, Artificial sequence
  Protein classification predicting sequence
RAHQLVMEGYNW

SEQ ID NO: 45281 - protein, 8 aa, Artificial sequence
  Protein classification predicting sequence
DLVWSDPE

SEQ ID NO: 45282 - protein, 10 aa, Artificial sequence
  Protein classification predicting sequence
SPRGAGYTFG

SEQ ID NO: 45283 - protein, 13 aa, Artificial sequence
  Protein classification predicting sequence
FTDLFDYLPLTAL

SEQ ID NO: 45284 - protein, 9 aa, Artificial sequence
  Protein classification predicting sequence
LCEKAKEIL

SEQ ID NO: 45285 - protein, 10 aa, Artificial sequence
  Protein classification predicting sequence
LIARAHQLVM

SEQ ID NO: 45286 - protein, 7 aa, Artificial sequence
  Protein classification predicting sequence
QFDPAPR

SEQ ID NO: 45287 - protein, 8 aa, Artificial sequence
  Protein classification predicting sequence
PAPRRGEP

SEQ ID NO: 45288 - protein, 7 aa, Artificial sequence
  Protein classification predicting sequence
QLSESQV

SEQ ID NO: 45289 - protein, 8 aa, Artificial sequence
  Protein classification predicting sequence
FTKELDQW

SEQ ID NO: 45290 - protein, 6 aa, Artificial sequence
  Protein classification predicting sequence
NVQPVK

SEQ ID NO: 45291 - protein, 9 aa, Artificial sequence
  Protein classification predicting sequence
SVETVTLLV

SEQ ID NO: 45292 - protein, 6 aa, Artificial sequence
  Protein classification predicting sequence
FTDLFD

SEQ ID NO: 45293 - protein, 9 aa, Artificial sequence
  Protein classification predicting sequence
FCLHGGLSP

SEQ ID NO: 45294 - protein, 18 aa, Artificial sequence
  Protein classification predicting sequence
QEVPHEGPMCDLLWSDPD

SEQ ID NO: 45295 - protein, 16 aa, Artificial sequence
  Protein classification predicting sequence
VVTIFSAPNYCYRCGN

SEQ ID NO: 45296 - protein, 8 aa, Artificial sequence
  Protein classification predicting sequence
KESNVQEV

SEQ ID NO: 45297 - protein, 8 aa, Artificial sequence
  Protein classification predicting sequence
CPVTVCGD

SEQ ID NO: 45298 - protein, 53 aa, Artificial sequence
  Protein classification predicting sequence
LDHIRALDRLQEVPHEGPMCDLLWSDPDDRGGWGISPRGAGYTFGQDISETFN

SEQ ID NO: 45299 - protein, 43 aa, Artificial sequence
  Protein classification predicting sequence
NGLTLVSRAHQLVMEGYNWCHDRNVVTIFSAPNYCYRCGNQAA

SEQ ID NO: 45300 - protein, 20 aa, Artificial sequence
  Protein classification predicting sequence
RITILRGNHESRQITQVYGF

SEQ ID NO: 45301 - protein, 8 aa, Artificial sequence
  Protein classification predicting sequence
DECLRKYG

SEQ ID NO: 45302 - protein, 10 aa, Artificial sequence
  Protein classification predicting sequence
FCLHGGLSPS

SEQ ID NO: 45303 - protein, 14 aa, Artificial sequence
  Protein classification predicting sequence
FSAPNYCYRCGNMA

SEQ ID NO: 45304 - protein, 10 aa, Artificial sequence
  Protein classification predicting sequence
SAPNYCYRCG

SEQ ID NO: 45305 - protein, 11 aa, Artificial sequence
  Protein classification predicting sequence
MAAILEIGENM

SEQ ID NO: 45306 - protein, 12 aa, Artificial sequence
  Protein classification predicting sequence
QNFLQFDPAPRQ

SEQ ID NO: 45307 - protein, 9 aa, Artificial sequence
  Protein classification predicting sequence
MCDLLWSDP

SEQ ID NO: 45308 - protein, 8 aa, Artificial sequence
  Protein classification predicting sequence
TIFSAPNY

SEQ ID NO: 45309 - protein, 14 aa, Artificial sequence
  Protein classification predicting sequence
TIFSAPNYCYRCGN

SEQ ID NO: 45310 - protein, 7 aa, Artificial sequence
  Protein classification predicting sequence
QFEPAPR

SEQ ID NO: 45311 - protein, 30 aa, Artificial sequence
  Protein classification predicting sequence
MCDLLWSDPDDRCGWGISPRGAGYTFGQDI

SEQ ID NO: 45312 - protein, 27 aa, Artificial sequence
  Protein classification predicting sequence
QKVVTIFSAPNYCYRCGNMASILEVDD

SEQ ID NO: 45313 - protein, 22 aa, Artificial sequence
  Protein classification predicting sequence
NNLLSIIRAHEAQDAGYRMYRK

SEQ ID NO: 45314 - protein, 12 aa, Artificial sequence
  Protein classification predicting sequence
TIFSAPNYLDVY

SEQ ID NO: 45315 - protein, 9 aa, Artificial sequence
  Protein classification predicting sequence
NKAAVLKYE

SEQ ID NO: 45316 - protein, 10 aa, Artificial sequence
  Protein classification predicting sequence
VALRIITEGA

SEQ ID NO: 45317 - protein, 7 aa, Artificial sequence
  Protein classification predicting sequence
KLFEVGG

SEQ ID NO: 45318 - protein, 7 aa, Artificial sequence
  Protein classification predicting sequence
LLRGNHE

SEQ ID NO: 45319 - protein, 12 aa, Artificial sequence
  Protein classification predicting sequence
QFLCIHGGLSPE

SEQ ID NO: 45320 - protein, 10 aa, Artificial sequence
  Protein classification predicting sequence
EPPAYGPMCD

SEQ ID NO: 45321 - protein, 6 aa, Artificial sequence
  Protein classification predicting sequence
NNLLSI

SEQ ID NO: 45322 - protein, 11 aa, Artificial sequence
  Protein classification predicting sequence
IRNKIRAIGKM

SEQ ID NO: 45323 - protein, 8 aa, Artificial sequence
  Protein classification predicting sequence
LKGLTPTG

SEQ ID NO: 45324 - protein, 7 aa, Artificial sequence
  Protein classification predicting sequence
NERMPPR

SEQ ID NO: 45325 - protein, 11 aa, Artificial sequence
  Protein classification predicting sequence
PVTVCGDIHGQ

SEQ ID NO: 45326 - protein, 11 aa, Artificial sequence
  Protein classification predicting sequence
YLFLGDYVDRG

SEQ ID NO: 45327 - protein, 17 aa, Artificial sequence
  Protein classification predicting sequence
YLFLGDYVDRGYFSIEC

SEQ ID NO: 45328 - protein, 7 aa, Artificial sequence
  Protein classification predicting sequence
GYRMYRK

SEQ ID NO: 45329 - protein, 58 aa, Artificial sequence
  Protein classification predicting sequence
TIFSAPNYLDVYNNKAAVLKYENNVMNIRQFNCSPHPYWLPNFMDVFTWSLPFVGEKV

SEQ ID NO: 45330 - protein, 8 aa, Artificial sequence
  Protein classification predicting sequence
ICGDIHGQ

SEQ ID NO: 45331 - protein, 18 aa, Artificial sequence
  Protein classification predicting sequence
LLSIIRAHEAQDAGYRMY

SEQ ID NO: 45332 - protein, 8 aa, Artificial sequence
  Protein classification predicting sequence
TGFPSLIT

SEQ ID NO: 45333 - protein, 6 aa, Artificial sequence
  Protein classification predicting sequence
FSAPNY

SEQ ID NO: 45334 - protein, 8 aa, Artificial sequence
  Protein classification predicting sequence
NVMNIRQF

SEQ ID NO: 45335 - protein, 7 aa, Artificial sequence
  Protein classification predicting sequence
VPFPPSH

SEQ ID NO: 45336 - protein, 10 aa, Artificial sequence
  Protein classification predicting sequence
DLMKLFEVGG

SEQ ID NO: 45337 - protein, 22 aa, Artificial sequence
  Protein classification predicting sequence
YLFLGDYVDRGYFSIECVLYLW

SEQ ID NO: 45338 - protein, 15 aa, Artificial sequence
  Protein classification predicting sequence
NQQFLCVHGGLSPEI

SEQ ID NO: 45339 - protein, 25 aa, Artificial sequence
  Protein classification predicting sequence
DIRRLDRFKEPPAFGPMCDLLWSDP

SEQ ID NO: 45340 - protein, 11 aa, Artificial sequence
  Protein classification predicting sequence
GPMCDLLWSDP

SEQ ID NO: 45341 - protein, 15 aa, Artificial sequence
  Protein classification predicting sequence
RAHEAQDAGYRMYRK

SEQ ID NO: 45342 - protein, 6 aa, Artificial sequence
  Protein classification predicting sequence
HKITSF

SEQ ID NO: 45343 - protein, 6 aa, Artificial sequence
  Protein classification predicting sequence
LCVHGG

SEQ ID NO: 45344 - protein, 6 aa, Artificial sequence
  Protein classification predicting sequence
VRGCSY

SEQ ID NO: 45345 - protein, 6 aa, Artificial sequence
  Protein classification predicting sequence
YNNKAA

SEQ ID NO: 45346 - protein, 14 aa, Artificial sequence
  Protein classification predicting sequence
LKYENNVMNIRQFN

SEQ ID NO: 45347 - protein, 7 aa, Artificial sequence
  Protein classification predicting sequence
PHPYWLP

SEQ ID NO: 45348 - protein, 21 aa, Artificial sequence
  Protein classification predicting sequence
FMDVFTWSLPFVGEKVTEMLV

SEQ ID NO: 45349 - protein, 11 aa, Artificial sequence
  Protein classification predicting sequence
DRVVKAVPFPP

SEQ ID NO: 45350 - protein, 33 aa, Artificial sequence
  Protein classification predicting sequence
TLFLLRGNHECRHLTEYFTFKQECKIKYSERVY

SEQ ID NO: 45351 - protein, 7 aa, Artificial sequence
  Protein classification predicting sequence
EDFGNEK

SEQ ID NO: 45352 - protein, 7 aa, Artificial sequence
  Protein classification predicting sequence
ICSDDEL

SEQ ID NO: 45353 - protein, 13 aa, Artificial sequence
  Protein classification predicting sequence
QTLQSATVEAIEA

SEQ ID NO: 45354 - protein, 42 aa, Artificial sequence
  Protein classification predicting sequence
IRNKIRAIGKMARVFSVLREESESVLTLKGLTPTGMLPSGVL

SEQ ID NO: 45355 - protein, 7 aa, Artificial sequence
  Protein classification predicting sequence
LSTTDRV

SEQ ID NO: 45356 - protein, 7 aa, Artificial sequence
  Protein classification predicting sequence
KAVPFPP

SEQ ID NO: 45357 - protein, 7 aa, Artificial sequence
  Protein classification predicting sequence
EKTMIEV

SEQ ID NO: 45358 - protein, 17 aa, Artificial sequence
  Protein classification predicting sequence
PKTLFLLRGNHECRHLT

SEQ ID NO: 45359 - protein, 15 aa, Artificial sequence
  Protein classification predicting sequence
TLFLLRGNHECRHLT

SEQ ID NO: 45360 - protein, 5 aa, Artificial sequence
  Protein classification predicting sequence
YFTFK

SEQ ID NO: 45361 - protein, 8 aa, Artificial sequence
  Protein classification predicting sequence
YFTFKQEC

SEQ ID NO: 45362 - protein, 6 aa, Artificial sequence
  Protein classification predicting sequence
VYDACM

SEQ ID NO: 45363 - protein, 7 aa, Artificial sequence
  Protein classification predicting sequence
EPPAFGP

SEQ ID NO: 45364 - protein, 17 aa, Artificial sequence
  Protein classification predicting sequence
RAHEAQDAGYRMYRKSQ

SEQ ID NO: 45365 - protein, 16 aa, Artificial sequence
  Protein classification predicting sequence
IRNKIRAIGKMARVFS

SEQ ID NO: 45366 - protein, 9 aa, Artificial sequence
  Protein classification predicting sequence
GVLSGGKQT

SEQ ID NO: 45367 - protein, 12 aa, Artificial sequence
  Protein classification predicting sequence
GLDRINERMPPR

SEQ ID NO: 45368 - protein, 8 aa, Artificial sequence
  Protein classification predicting sequence
DIRKLDRF

SEQ ID NO: 45369 - protein, 7 aa, Artificial sequence
  Protein classification predicting sequence
VRGCSYF

SEQ ID NO: 45370 - protein, 13 aa, Artificial sequence
  Protein classification predicting sequence
NKIRAIGKMARVF

SEQ ID NO: 45371 - protein, 8 aa, Artificial sequence
  Protein classification predicting sequence
APITVCGD

SEQ ID NO: 45372 - protein, 12 aa, Artificial sequence
  Protein classification predicting sequence
LLRGNHECRHLT

SEQ ID NO: 45373 - protein, 33 aa, Artificial sequence
  Protein classification predicting sequence
TIFSAPNYLDVYNNKAAVLKYENNVMNIRQFNC

SEQ ID NO: 45374 - protein, 20 aa, Artificial sequence
  Protein classification predicting sequence
EIWRELFSPLHALNFGIGGD

SEQ ID NO: 45375 - protein, 9 aa, Artificial sequence
  Protein classification predicting sequence
VVWVGTNNH

SEQ ID NO: 45376 - protein, 8 aa, Artificial sequence
  Protein classification predicting sequence
VLGLLPRG

SEQ ID NO: 45377 - protein, 71 aa, Artificial sequence
  Protein classification predicting sequence
ENPASKPTPVQDVQGDGRWMSLHHRFVADSKDKEPEVVFIGDSLVQLMHQCEIWRELFSPLHALNFGIGGD

SEQ ID NO: 45378 - protein, 6 aa, Artificial sequence
  Protein classification predicting sequence
YGCYCG

SEQ ID NO: 45379 - protein, 13 aa, Artificial sequence
  Protein classification predicting sequence
LDRCCYVHDNCYG

SEQ ID NO: 45380 - protein, 6 aa, Artificial sequence
  Protein classification predicting sequence
HDNCYG

SEQ ID NO: 45381 - protein, 7 aa, Artificial sequence
  Protein classification predicting sequence
CYGEAEK

SEQ ID NO: 45382 - protein, 6 aa, Artificial sequence
  Protein classification predicting sequence
CDRTAA

SEQ ID NO: 45383 - protein, 6 aa, Artificial sequence
  Protein classification predicting sequence
AAICFA

SEQ ID NO: 45384 - protein, 6 aa, Artificial sequence
  Protein classification predicting sequence
AAKCFA

SEQ ID NO: 45385 - protein, 7 aa, Artificial sequence
  Protein classification predicting sequence
NMIQCAN

SEQ ID NO: 45386 - protein, 9 aa, Artificial sequence
  Protein classification predicting sequence
YADYGCYCG

SEQ ID NO: 45387 - protein, 14 aa, Artificial sequence
  Protein classification predicting sequence
GGSGTPVDELDRCC

SEQ ID NO: 45388 - protein, 5 aa, Artificial sequence
  Protein classification predicting sequence
HDDCY

SEQ ID NO: 45389 - protein, 8 aa, Artificial sequence
  Protein classification predicting sequence
PKLTLYSW

SEQ ID NO: 45390 - protein, 21 aa, Artificial sequence
  Protein classification predicting sequence
GGSGTPVDELDRCCQTHDNCY

SEQ ID NO: 45391 - protein, 9 aa, Artificial sequence
  Protein classification predicting sequence
CQRFVCDCD

SEQ ID NO: 45392 - protein, 5 aa, Artificial sequence
  Protein classification predicting sequence
GPYCR

SEQ ID NO: 45393 - protein, 21 aa, Artificial sequence
  Protein classification predicting sequence
IKKECQRFVCDCDVEAAKCFA

SEQ ID NO: 45394 - protein, 6 aa, Artificial sequence
  Protein classification predicting sequence
GGSGTP

SEQ ID NO: 45395 - protein, 6 aa, Artificial sequence
  Protein classification predicting sequence
DELDRC

SEQ ID NO: 45396 - protein, 7 aa, Artificial sequence
  Protein classification predicting sequence
QTHDNCY

SEQ ID NO: 45397 - protein, 6 aa, Artificial sequence
  Protein classification predicting sequence
AAAICF

SEQ ID NO: 45398 - protein, 10 aa, Artificial sequence
  Protein classification predicting sequence
AAAICFRDNL

SEQ ID NO: 45399 - protein, 7 aa, Artificial sequence
  Protein classification predicting sequence
TYKKRYM

SEQ ID NO: 45400 - protein, 8 aa, Artificial sequence
  Protein classification predicting sequence
YTYSEENG

SEQ ID NO: 45401 - protein, 6 aa, Artificial sequence
  Protein classification predicting sequence
VCGGDD

SEQ ID NO: 45402 - protein, 8 aa, Artificial sequence
  Protein classification predicting sequence
GGSGTPVD

SEQ ID NO: 45403 - protein, 10 aa, Artificial sequence
  Protein classification predicting sequence
PYNKEHKNLD

SEQ ID NO: 45404 - protein, 15 aa, Artificial sequence
  Protein classification predicting sequence
MIRYTIPCEKTWGEY

SEQ ID NO: 45405 - protein, 11 aa, Artificial sequence
  Protein classification predicting sequence
PKTQSYSYKLT

SEQ ID NO: 45406 - protein, 14 aa, Artificial sequence
  Protein classification predicting sequence
AVCVSLLGAANIPP

SEQ ID NO: 45407 - protein, 9 aa, Artificial sequence
  Protein classification predicting sequence
CCQTHDHCY

SEQ ID NO: 45408 - protein, 10 aa, Artificial sequence
  Protein classification predicting sequence
HKNLDTKKYC

SEQ ID NO: 45409 - protein, 7 aa, Artificial sequence
  Protein classification predicting sequence
GCYPKLT

SEQ ID NO: 45410 - protein, 10 aa, Artificial sequence
  Protein classification predicting sequence
YYCGGDGPYC

SEQ ID NO: 45411 - protein, 7 aa, Artificial sequence
  Protein classification predicting sequence
FICNCDR

SEQ ID NO: 45412 - protein, 6 aa, Artificial sequence
  Protein classification predicting sequence
CTVPNR

SEQ ID NO: 45413 - protein, 5 aa, Artificial sequence
  Protein classification predicting sequence
WWHFA

SEQ ID NO: 45414 - protein, 9 aa, Artificial sequence
  Protein classification predicting sequence
YGCYCGRGG

SEQ ID NO: 45415 - protein, 17 aa, Artificial sequence
  Protein classification predicting sequence
AAVCNCDLVAANCFAGA

SEQ ID NO: 45416 - protein, 7 aa, Artificial sequence
  Protein classification predicting sequence
YIDANYN

SEQ ID NO: 45417 - protein, 6 aa, Artificial sequence
  Protein classification predicting sequence
NMIKCT

SEQ ID NO: 45418 - protein, 6 aa, Artificial sequence
  Protein classification predicting sequence
CTVPSR

SEQ ID NO: 45419 - protein, 5 aa, Artificial sequence
  Protein classification predicting sequence
HDNCY

SEQ ID NO: 45420 - protein, 8 aa, Artificial sequence
  Protein classification predicting sequence
KISGCWPY

SEQ ID NO: 45421 - protein, 6 aa, Artificial sequence
  Protein classification predicting sequence
VCDCDR

SEQ ID NO: 45422 - protein, 18 aa, Artificial sequence
  Protein classification predicting sequence
VCDCDRLAAICFAGAPYN

SEQ ID NO: 45423 - protein, 11 aa, Artificial sequence
  Protein classification predicting sequence
AAICFAGAPYN

SEQ ID NO: 45424 - protein, 6 aa, Artificial sequence
  Protein classification predicting sequence
CDRVAA

SEQ ID NO: 45425 - protein, 10 aa, Artificial sequence
  Protein classification predicting sequence
PYNNNNYNID

SEQ ID NO: 45426 - protein, 9 aa, Artificial sequence
  Protein classification predicting sequence
YMDYGCYCG

SEQ ID NO: 45427 - protein, 5 aa, Artificial sequence
  Protein classification predicting sequence
CYGEA

SEQ ID NO: 45428 - protein, 6 aa, Artificial sequence
  Protein classification predicting sequence
CAPYWT

SEQ ID NO: 45429 - protein, 6 aa, Artificial sequence
  Protein classification predicting sequence
CQRFVC

SEQ ID NO: 45430 - protein, 7 aa, Artificial sequence
  Protein classification predicting sequence
AAECFAR

SEQ ID NO: 45431 - protein, 7 aa, Artificial sequence
  Protein classification predicting sequence
CFARSPY

SEQ ID NO: 45432 - protein, 8 aa, Artificial sequence
  Protein classification predicting sequence
NIDTKKRC

SEQ ID NO: 45433 - protein, 5 aa, Artificial sequence
  Protein classification predicting sequence
DNDEC

SEQ ID NO: 45434 - protein, 8 aa, Artificial sequence
  Protein classification predicting sequence
AFICNCDR

SEQ ID NO: 45435 - protein, 16 aa, Artificial sequence
  Protein classification predicting sequence
PKDATDRCCFVHDCCY

SEQ ID NO: 45436 - protein, 5 aa, Artificial sequence
  Protein classification predicting sequence
GCNPK

SEQ ID NO: 45437 - protein, 8 aa, Artificial sequence
  Protein classification predicting sequence
AAICFRDN

SEQ ID NO: 45438 - protein, 12 aa, Artificial sequence
  Protein classification predicting sequence
DRCCFVHDCCYG

SEQ ID NO: 45439 - protein, 7 aa, Artificial sequence
  Protein classification predicting sequence
AGRSGVW

SEQ ID NO: 45440 - protein, 9 aa, Artificial sequence
  Protein classification predicting sequence
YGCYCGAGG

SEQ ID NO: 45441 - protein, 8 aa, Artificial sequence
  Protein classification predicting sequence
GGQGRPQD

SEQ ID NO: 45442 - protein, 17 aa, Artificial sequence
  Protein classification predicting sequence
DRCCFVHDCCYGKVTGC

SEQ ID NO: 45443 - protein, 6 aa, Artificial sequence
  Protein classification predicting sequence
FPAKNC

SEQ ID NO: 45444 - protein, 15 aa, Artificial sequence
  Protein classification predicting sequence
DATDRCCFVHDCCYG

SEQ ID NO: 45445 - protein, 16 aa, Artificial sequence
  Protein classification predicting sequence
PQDASDRCCFVHDCCY

SEQ ID NO: 45446 - protein, 5 aa, Artificial sequence
  Protein classification predicting sequence
CECDR

SEQ ID NO: 45447 - protein, 15 aa, Artificial sequence
  Protein classification predicting sequence
GGSGTPVDDLDRCCQ

SEQ ID NO: 45448 - protein, 7 aa, Artificial sequence
  Protein classification predicting sequence
AEKISGC

SEQ ID NO: 45449 - protein, 8 aa, Artificial sequence
  Protein classification predicting sequence
AAICFAGA

SEQ ID NO: 45450 - protein, 6 aa, Artificial sequence
  Protein classification predicting sequence
NNYNID

SEQ ID NO: 45451 - protein, 21 aa, Artificial sequence
  Protein classification predicting sequence
CWPYFKTYSYECSQGTLTCKG

SEQ ID NO: 45452 - protein, 23 aa, Artificial sequence
  Protein classification predicting sequence
ACAAAVCDCDRLAAICFAGAPYN

SEQ ID NO: 45453 - protein, 8 aa, Artificial sequence
  Protein classification predicting sequence
WYYGSYGC

SEQ ID NO: 45454 - protein, 14 aa, Artificial sequence
  Protein classification predicting sequence
DRCCFVHDCCYGKV

SEQ ID NO: 45455 - protein, 10 aa, Artificial sequence
  Protein classification predicting sequence
CSQGKLTCSG

SEQ ID NO: 45456 - protein, 6 aa, Artificial sequence
  Protein classification predicting sequence
MIQCAN

SEQ ID NO: 45457 - protein, 12 aa, Artificial sequence
  Protein classification predicting sequence
MIQCANHGRRPT

SEQ ID NO: 45458 - protein, 9 aa, Artificial sequence
  Protein classification predicting sequence
YGCYCGWGG

SEQ ID NO: 45459 - protein, 7 aa, Artificial sequence
  Protein classification predicting sequence
DATDRCC

SEQ ID NO: 45460 - protein, 7 aa, Artificial sequence
  Protein classification predicting sequence
DNKDTYD

SEQ ID NO: 45461 - protein, 7 aa, Artificial sequence
  Protein classification predicting sequence
PAHLLVL

SEQ ID NO: 45462 - protein, 6 aa, Artificial sequence
  Protein classification predicting sequence
QFKNMI

SEQ ID NO: 45463 - protein, 19 aa, Artificial sequence
  Protein classification predicting sequence
AYVKYGCYCGPGGTGTPLD

SEQ ID NO: 45464 - protein, 6 aa, Artificial sequence
  Protein classification predicting sequence
PYFKTY

SEQ ID NO: 45465 - protein, 9 aa, Artificial sequence
  Protein classification predicting sequence
AVCVSLLGA

SEQ ID NO: 45466 - protein, 19 aa, Artificial sequence
  Protein classification predicting sequence
VCECDRVAAICFGENMNTY

SEQ ID NO: 45467 - protein, 9 aa, Artificial sequence
  Protein classification predicting sequence
PYNNKNYNI

SEQ ID NO: 45468 - protein, 7 aa, Artificial sequence
  Protein classification predicting sequence
DYGCYCG

SEQ ID NO: 45469 - protein, 6 aa, Artificial sequence
  Protein classification predicting sequence
CTIPGS

SEQ ID NO: 45470 - protein, 6 aa, Artificial sequence
  Protein classification predicting sequence
LDRCCQ

SEQ ID NO: 45471 - protein, 7 aa, Artificial sequence
  Protein classification predicting sequence
APYNKEN

SEQ ID NO: 45472 - protein, 6 aa, Artificial sequence
  Protein classification predicting sequence
GVEGNL

SEQ ID NO: 45473 - protein, 7 aa, Artificial sequence
  Protein classification predicting sequence
CYCGWGG

SEQ ID NO: 45474 - protein, 6 aa, Artificial sequence
  Protein classification predicting sequence
NLGTYN

SEQ ID NO: 45475 - protein, 9 aa, Artificial sequence
  Protein classification predicting sequence
YAFYGCYCG

SEQ ID NO: 45476 - protein, 9 aa, Artificial sequence
  Protein classification predicting sequence
GYITCGKGT

SEQ ID NO: 45477 - protein, 7 aa, Artificial sequence
  Protein classification predicting sequence
PPQPLNL

SEQ ID NO: 45478 - protein, 5 aa, Artificial sequence
  Protein classification predicting sequence
GCYCG

SEQ ID NO: 45479 - protein, 5 aa, Artificial sequence
  Protein classification predicting sequence
DDPCK

SEQ ID NO: 45480 - protein, 11 aa, Artificial sequence
  Protein classification predicting sequence
YGCYCGAGGSG

SEQ ID NO: 45481 - protein, 7 aa, Artificial sequence
  Protein classification predicting sequence
NGDIVCG

SEQ ID NO: 45482 - protein, 8 aa, Artificial sequence
  Protein classification predicting sequence
CECDRVAA

SEQ ID NO: 45483 - protein, 7 aa, Artificial sequence
  Protein classification predicting sequence
YLIQCAN

SEQ ID NO: 45484 - protein, 10 aa, Artificial sequence
  Protein classification predicting sequence
CQRYVCACDL

SEQ ID NO: 45485 - protein, 7 aa, Artificial sequence
  Protein classification predicting sequence
CFARAPY

SEQ ID NO: 45486 - protein, 7 aa, Artificial sequence
  Protein classification predicting sequence
IQCANHG

SEQ ID NO: 45487 - protein, 11 aa, Artificial sequence
  Protein classification predicting sequence
IQCANHGRRPT

SEQ ID NO: 45488 - protein, 7 aa, Artificial sequence
  Protein classification predicting sequence
MIQCTIP

SEQ ID NO: 45489 - protein, 10 aa, Artificial sequence
  Protein classification predicting sequence
LTCNDDNDEC

SEQ ID NO: 45490 - protein, 9 aa, Artificial sequence
  Protein classification predicting sequence
LDRCCKTHD

SEQ ID NO: 45491 - protein, 13 aa, Artificial sequence
  Protein classification predicting sequence
LDRCCKTHDECYA

SEQ ID NO: 45492 - protein, 6 aa, Artificial sequence
  Protein classification predicting sequence
TYSYEC

SEQ ID NO: 45493 - protein, 7 aa, Artificial sequence
  Protein classification predicting sequence
KKGCYPK

SEQ ID NO: 45494 - protein, 6 aa, Artificial sequence
  Protein classification predicting sequence
LWIVAV

SEQ ID NO: 45495 - protein, 8 aa, Artificial sequence
  Protein classification predicting sequence
LWIVAVLL

SEQ ID NO: 45496 - protein, 16 aa, Artificial sequence
  Protein classification predicting sequence
LLQFRKMIKKMTGKEP

SEQ ID NO: 45497 - protein, 6 aa, Artificial sequence
  Protein classification predicting sequence
TGCDPK

SEQ ID NO: 45498 - protein, 18 aa, Artificial sequence
  Protein classification predicting sequence
YMDYGCYCGKGGSGTPVD

SEQ ID NO: 45499 - protein, 19 aa, Artificial sequence
  Protein classification predicting sequence
PIDALDRCCYVHDNCYGDA

SEQ ID NO: 45500 - protein, 45 aa, Artificial sequence
  Protein classification predicting sequence
MINGKLGAFSVWNYISYGCYCGWGGQGTPKDATDRCCFVHDCCYG

SEQ ID NO: 45501 - protein, 17 aa, Artificial sequence
  Protein classification predicting sequence
PKDATDRCCFVHDCCYG

SEQ ID NO: 45502 - protein, 13 aa, Artificial sequence
  Protein classification predicting sequence
GCNPKLAIYSYSF

SEQ ID NO: 45503 - protein, 9 aa, Artificial sequence
  Protein classification predicting sequence
ICECDRVAA

SEQ ID NO: 45504 - protein, 21 aa, Artificial sequence
  Protein classification predicting sequence
ICECDRVAANCFHQNKNTYNK

SEQ ID NO: 45505 - protein, 5 aa, Artificial sequence
  Protein classification predicting sequence
DRCCF

SEQ ID NO: 45506 - protein, 5 aa, Artificial sequence
  Protein classification predicting sequence
HDCCY

SEQ ID NO: 45507 - protein, 6 aa, Artificial sequence
  Protein classification predicting sequence
AGKKGC

SEQ ID NO: 45508 - protein, 9 aa, Artificial sequence
  Protein classification predicting sequence
GCYPKLTMY

SEQ ID NO: 45509 - protein, 40 aa, Artificial sequence
  Protein classification predicting sequence
GPYCNSKTECQRFVCDCDVRAADCFARYPYNNKNYNINTS

SEQ ID NO: 45510 - protein, 19 aa, Artificial sequence
  Protein classification predicting sequence
AEKMGCYPKLTMYNYYCGT

SEQ ID NO: 45511 - protein, 11 aa, Artificial sequence
  Protein classification predicting sequence
KMIKKMTGKEP

SEQ ID NO: 45512 - protein, 35 aa, Artificial sequence
  Protein classification predicting sequence
GDIVCGGDDPCKKEICECDRAAAICFRDNLNTYND

SEQ ID NO: 45513 - protein, 10 aa, Artificial sequence
  Protein classification predicting sequence
HDDCYGEAEK

SEQ ID NO: 45514 - protein, 8 aa, Artificial sequence
  Protein classification predicting sequence
PDCSPKTD

SEQ ID NO: 45515 - protein, 6 aa, Artificial sequence
  Protein classification predicting sequence
YHRENG

SEQ ID NO: 45516 - protein, 5 aa, Artificial sequence
  Protein classification predicting sequence
ICECD

SEQ ID NO: 45517 - protein, 11 aa, Artificial sequence
  Protein classification predicting sequence
LLAVCVSLLGA

SEQ ID NO: 45518 - protein, 16 aa, Artificial sequence
  Protein classification predicting sequence
LLAVCVSLLGAASIPP

SEQ ID NO: 45519 - protein, 12 aa, Artificial sequence
  Protein classification predicting sequence
CGKGNTCQRFVC

SEQ ID NO: 45520 - protein, 21 aa, Artificial sequence
  Protein classification predicting sequence
LLAVCVSLLGASAIPPLPLNL

SEQ ID NO: 45521 - protein, 7 aa, Artificial sequence
  Protein classification predicting sequence
CYAEAGK

SEQ ID NO: 45522 - protein, 10 aa, Artificial sequence
  Protein classification predicting sequence
AAKCFAKAPY

SEQ ID NO: 45523 - protein, 14 aa, Artificial sequence
  Protein classification predicting sequence
AAKCFAKAPYKKEN

SEQ ID NO: 45524 - protein, 7 aa, Artificial sequence
  Protein classification predicting sequence
NWNIDTK

SEQ ID NO: 45525 - protein, 6 aa, Artificial sequence
  Protein classification predicting sequence
CECDKA

SEQ ID NO: 45526 - protein, 10 aa, Artificial sequence
  Protein classification predicting sequence
LIMKVAGRSG

SEQ ID NO: 45527 - protein, 20 aa, Artificial sequence
  Protein classification predicting sequence
DATDRCCFVHDCCYGKVTGC

SEQ ID NO: 45528 - protein, 6 aa, Artificial sequence
  Protein classification predicting sequence
LDRCCK

SEQ ID NO: 45529 - protein, 9 aa, Artificial sequence
  Protein classification predicting sequence
VCDCDVEAA

SEQ ID NO: 45530 - protein, 9 aa, Artificial sequence
  Protein classification predicting sequence
LDRCCQTHD

SEQ ID NO: 45531 - protein, 5 aa, Artificial sequence
  Protein classification predicting sequence
YGCYC

SEQ ID NO: 45532 - protein, 9 aa, Artificial sequence
  Protein classification predicting sequence
KGGSGTPVD

SEQ ID NO: 45533 - protein, 10 aa, Artificial sequence
  Protein classification predicting sequence
HYTDYGCYCG

SEQ ID NO: 45534 - protein, 11 aa, Artificial sequence
  Protein classification predicting sequence
AAKCFAKAPYN

SEQ ID NO: 45535 - protein, 8 aa, Artificial sequence
  Protein classification predicting sequence
CFAKAPYN

SEQ ID NO: 45536 - protein, 27 aa, Artificial sequence
  Protein classification predicting sequence
GGKGTPKDATDRCCFVHDCCYGNLPDC

SEQ ID NO: 45537 - protein, 13 aa, Artificial sequence
  Protein classification predicting sequence
KGTSCENRICECD

SEQ ID NO: 45538 - protein, 7 aa, Artificial sequence
  Protein classification predicting sequence
GCFPKLT

SEQ ID NO: 45539 - protein, 9 aa, Artificial sequence
  Protein classification predicting sequence
IQCANKGSR

SEQ ID NO: 45540 - protein, 31 aa, Artificial sequence
  Protein classification predicting sequence
HDDCYGEAEKMGCYPKLTMYNYYCGTEGPYC

SEQ ID NO: 45541 - protein, 6 aa, Artificial sequence
  Protein classification predicting sequence
CCQVHD

SEQ ID NO: 45542 - protein, 22 aa, Artificial sequence
  Protein classification predicting sequence
YGCYCGRGGSGTPVDDLDRCCQ

SEQ ID NO: 45543 - protein, 5 aa, Artificial sequence
  Protein classification predicting sequence
GCYPK

SEQ ID NO: 45544 - protein, 7 aa, Artificial sequence
  Protein classification predicting sequence
KNAIPFY

SEQ ID NO: 45545 - protein, 6 aa, Artificial sequence
  Protein classification predicting sequence
YMFYPD

SEQ ID NO: 45546 - protein, 8 aa, Artificial sequence
  Protein classification predicting sequence
ENGAIVCG

SEQ ID NO: 45547 - protein, 7 aa, Artificial sequence
  Protein classification predicting sequence
NTYDKKY

SEQ ID NO: 45548 - protein, 9 aa, Artificial sequence
  Protein classification predicting sequence
AVLLVGVEG

SEQ ID NO: 45549 - protein, 15 aa, Artificial sequence
  Protein classification predicting sequence
GGSGTPVDELDRCCK

SEQ ID NO: 45550 - protein, 8 aa, Artificial sequence
  Protein classification predicting sequence
NLYQFKNM

SEQ ID NO: 45551 - protein, 6 aa, Artificial sequence
  Protein classification predicting sequence
QFSNMI

SEQ ID NO: 45552 - protein, 7 aa, Artificial sequence
  Protein classification predicting sequence
GSGTPVD

SEQ ID NO: 45553 - protein, 8 aa, Artificial sequence
  Protein classification predicting sequence
KVTGCDPK

SEQ ID NO: 45554 - protein, 5 aa, Artificial sequence
  Protein classification predicting sequence
CFRDN

SEQ ID NO: 45555 - protein, 6 aa, Artificial sequence
  Protein classification predicting sequence
FVCACD

SEQ ID NO: 45556 - protein, 7 aa, Artificial sequence
  Protein classification predicting sequence
YSWDCTG

SEQ ID NO: 45557 - protein, 6 aa, Artificial sequence
  Protein classification predicting sequence
CCKTHD

SEQ ID NO: 45558 - protein, 10 aa, Artificial sequence
  Protein classification predicting sequence
VGVEGHLLQF

SEQ ID NO: 45559 - protein, 8 aa, Artificial sequence
  Protein classification predicting sequence
AAKCFAKA

SEQ ID NO: 45560 - protein, 28 aa, Artificial sequence
  Protein classification predicting sequence
SYHYADYGCYCGAGGSGTPVDELDRCCK

SEQ ID NO: 45561 - protein, 11 aa, Artificial sequence
  Protein classification predicting sequence
GTPKDATDRCC

SEQ ID NO: 45562 - protein, 9 aa, Artificial sequence
  Protein classification predicting sequence
PKDATDRCC

SEQ ID NO: 45563 - protein, 6 aa, Artificial sequence
  Protein classification predicting sequence
PKDATD

SEQ ID NO: 45564 - protein, 6 aa, Artificial sequence
  Protein classification predicting sequence
VCACDL

SEQ ID NO: 45565 - protein, 7 aa, Artificial sequence
  Protein classification predicting sequence
PLNLVQF

SEQ ID NO: 45566 - protein, 9 aa, Artificial sequence
  Protein classification predicting sequence
GGSGTPVDE

SEQ ID NO: 45567 - protein, 11 aa, Artificial sequence
  Protein classification predicting sequence
DRCCQTHDNCY

SEQ ID NO: 45568 - protein, 13 aa, Artificial sequence
  Protein classification predicting sequence
LPDCSPKTDRYKY

SEQ ID NO: 45569 - protein, 7 aa, Artificial sequence
  Protein classification predicting sequence
NLRTYKK

SEQ ID NO: 45570 - protein, 6 aa, Artificial sequence
  Protein classification predicting sequence
NLYQFG

SEQ ID NO: 45571 - protein, 6 aa, Artificial sequence
  Protein classification predicting sequence
QFGNMI

SEQ ID NO: 45572 - protein, 8 aa, Artificial sequence
  Protein classification predicting sequence
QFKNMIQC

SEQ ID NO: 45573 - protein, 19 aa, Artificial sequence
  Protein classification predicting sequence
VCDCDRAAAICFAAAPYNL

SEQ ID NO: 45574 - protein, 5 aa, Artificial sequence
  Protein classification predicting sequence
VCECD

SEQ ID NO: 45575 - protein, 7 aa, Artificial sequence
  Protein classification predicting sequence
PGTLWCG

SEQ ID NO: 45576 - protein, 8 aa, Artificial sequence
  Protein classification predicting sequence
QFETLIMK

SEQ ID NO: 45577 - protein, 6 aa, Artificial sequence
  Protein classification predicting sequence
YGCFCG

SEQ ID NO: 45578 - protein, 16 aa, Artificial sequence
  Protein classification predicting sequence
DATDRCCFVHDCCYGK

SEQ ID NO: 45579 - protein, 13 aa, Artificial sequence
  Protein classification predicting sequence
DRCCFVHDCCYGK

SEQ ID NO: 45580 - protein, 6 aa, Artificial sequence
  Protein classification predicting sequence
YDNKYW

SEQ ID NO: 45581 - protein, 7 aa, Artificial sequence
  Protein classification predicting sequence
CGGDDPC

SEQ ID NO: 45582 - protein, 16 aa, Artificial sequence
  Protein classification predicting sequence
PQDATDRCCFVHDCCY

SEQ ID NO: 45583 - protein, 8 aa, Artificial sequence
  Protein classification predicting sequence
YSYSFQNG

SEQ ID NO: 45584 - protein, 7 aa, Artificial sequence
  Protein classification predicting sequence
KIAGRSG

SEQ ID NO: 45585 - protein, 9 aa, Artificial sequence
  Protein classification predicting sequence
YGCYCGLGG

SEQ ID NO: 45586 - protein, 6 aa, Artificial sequence
  Protein classification predicting sequence
CKEESE

SEQ ID NO: 45587 - protein, 11 aa, Artificial sequence
  Protein classification predicting sequence
YGCYCGWGGQG

SEQ ID NO: 45588 - protein, 6 aa, Artificial sequence
  Protein classification predicting sequence
NGCDPK

SEQ ID NO: 45589 - protein, 8 aa, Artificial sequence
  Protein classification predicting sequence
DLQDMSPM

SEQ ID NO: 45590 - protein, 10 aa, Artificial sequence
  Protein classification predicting sequence
EFGYIEAPHK

SEQ ID NO: 45591 - protein, 7 aa, Artificial sequence
  Protein classification predicting sequence
LDSFGNL

SEQ ID NO: 45592 - protein, 8 aa, Artificial sequence
  Protein classification predicting sequence
VGHVDEFL

SEQ ID NO: 45593 - protein, 6 aa, Artificial sequence
  Protein classification predicting sequence
CIDWNR

SEQ ID NO: 45594 - protein, 11 aa, Artificial sequence
  Protein classification predicting sequence
HCGTNVRRKPF

SEQ ID NO: 45595 - protein, 7 aa, Artificial sequence
  Protein classification predicting sequence
APWIMTP

SEQ ID NO: 45596 - protein, 16 aa, Artificial sequence
  Protein classification predicting sequence
HCGTNVRRKPFTFKWW

SEQ ID NO: 45597 - protein, 9 aa, Artificial sequence
  Protein classification predicting sequence
LGIPKPFGP

SEQ ID NO: 45598 - protein, 10 aa, Artificial sequence
  Protein classification predicting sequence
GAILLVNCDR

SEQ ID NO: 45599 - protein, 7 aa, Artificial sequence
  Protein classification predicting sequence
DRWIQDE

SEQ ID NO: 45600 - protein, 9 aa, Artificial sequence
  Protein classification predicting sequence
YPLGRILIG

SEQ ID NO: 45601 - protein, 7 aa, Artificial sequence
  Protein classification predicting sequence
VGHVDEF

SEQ ID NO: 45602 - protein, 6 aa, Artificial sequence
  Protein classification predicting sequence
CTFIDD

SEQ ID NO: 45603 - protein, 8 aa, Artificial sequence
  Protein classification predicting sequence
FPYKRILG

SEQ ID NO: 45604 - protein, 9 aa, Artificial sequence
  Protein classification predicting sequence
TLLDDSNED

SEQ ID NO: 45605 - protein, 8 aa, Artificial sequence
  Protein classification predicting sequence
VVMNSPSN

SEQ ID NO: 45606 - protein, 8 aa, Artificial sequence
  Protein classification predicting sequence
LLVNCDRD

SEQ ID NO: 45607 - protein, 20 aa, Artificial sequence
  Protein classification predicting sequence
CPQAENRNDRWIQDEMELGY

SEQ ID NO: 45608 - protein, 9 aa, Artificial sequence
  Protein classification predicting sequence
PVVFDSPRN

SEQ ID NO: 45609 - protein, 30 aa, Artificial sequence
  Protein classification predicting sequence
SVSGLDSFGNLEVSPPVVANGKEYPLGRIL

SEQ ID NO: 45610 - protein, 6 aa, Artificial sequence
  Protein classification predicting sequence
VGHVDE

SEQ ID NO: 45611 - protein, 6 aa, Artificial sequence
  Protein classification predicting sequence
DIPQLF

SEQ ID NO: 45612 - protein, 10 aa, Artificial sequence
  Protein classification predicting sequence
FRVAPWIMTP

SEQ ID NO: 45613 - protein, 7 aa, Artificial sequence
  Protein classification predicting sequence
CKLTICP

SEQ ID NO: 45614 - protein, 8 aa, Artificial sequence
  Protein classification predicting sequence
AQQVQAPV

SEQ ID NO: 45615 - protein, 6 aa, Artificial sequence
  Protein classification predicting sequence
LYSDWL

SEQ ID NO: 45616 - protein, 15 aa, Artificial sequence
  Protein classification predicting sequence
VGHVDEFLSFVPAPD

SEQ ID NO: 45617 - protein, 7 aa, Artificial sequence
  Protein classification predicting sequence
CTFINDF

SEQ ID NO: 45618 - protein, 12 aa, Artificial sequence
  Protein classification predicting sequence
VGHVDEFLSFVP

SEQ ID NO: 45619 - protein, 8 aa, Artificial sequence
  Protein classification predicting sequence
VNMLVLGK

SEQ ID NO: 45620 - protein, 7 aa, Artificial sequence
  Protein classification predicting sequence
GRCCLEE

SEQ ID NO: 45621 - protein, 8 aa, Artificial sequence
  Protein classification predicting sequence
GAILLVNC

SEQ ID NO: 45622 - protein, 6 aa, Artificial sequence
  Protein classification predicting sequence
QAPHKT

SEQ ID NO: 45623 - protein, 8 aa, Artificial sequence
  Protein classification predicting sequence
GKEYPLGR

SEQ ID NO: 45624 - protein, 6 aa, Artificial sequence
  Protein classification predicting sequence
GHVDEF

SEQ ID NO: 45625 - protein, 6 aa, Artificial sequence
  Protein classification predicting sequence
CCLEEK

SEQ ID NO: 45626 - protein, 7 aa, Artificial sequence
  Protein classification predicting sequence
PFAFKWW

SEQ ID NO: 45627 - protein, 8 aa, Artificial sequence
  Protein classification predicting sequence
VNLMKKIC

SEQ ID NO: 45628 - protein, 8 aa, Artificial sequence
  Protein classification predicting sequence
VAAVEHRD

SEQ ID NO: 45629 - protein, 15 aa, Artificial sequence
  Protein classification predicting sequence
SRVAVMGHSFGGATA

SEQ ID NO: 45630 - protein, 8 aa, Artificial sequence
  Protein classification predicting sequence
LAFLQKHL

SEQ ID NO: 45631 - protein, 8 aa, Artificial sequence
  Protein classification predicting sequence
GHSFGGAT

SEQ ID NO: 45632 - protein, 9 aa, Artificial sequence
  Protein classification predicting sequence
FSHGLGAFR

SEQ ID NO: 45633 - protein, 10 aa, Artificial sequence
  Protein classification predicting sequence
NKASLAFLQK

SEQ ID NO: 45634 - protein, 7 aa, Artificial sequence
  Protein classification predicting sequence
VGCTDLM

SEQ ID NO: 45635 - protein, 10 aa, Artificial sequence
  Protein classification predicting sequence
LSEDQRFRCG

SEQ ID NO: 45636 - protein, 7 aa, Artificial sequence
  Protein classification predicting sequence
AFLQKHL

SEQ ID NO: 45637 - protein, 8 aa, Artificial sequence
  Protein classification predicting sequence
SKENNNTR

SEQ ID NO: 45638 - protein, 8 aa, Artificial sequence
  Protein classification predicting sequence
RDNQQFLT

SEQ ID NO: 45639 - protein, 28 aa, Artificial sequence
  Protein classification predicting sequence
KDLWDNKHVKMPCSEQNLYPVEDENGER

SEQ ID NO: 45640 - protein, 14 aa, Artificial sequence
  Protein classification predicting sequence
AGSRWELIQTALLN

SEQ ID NO: 45641 - protein, 22 aa, Artificial sequence
  Protein classification predicting sequence
TEIVAIDALHFRRYLDQFVPEK

SEQ ID NO: 45642 - protein, 7 aa, Artificial sequence
  Protein classification predicting sequence
CTFPRRN

SEQ ID NO: 45643 - protein, 8 aa, Artificial sequence
  Protein classification predicting sequence
PDINFNRL

SEQ ID NO: 45644 - protein, 7 aa, Artificial sequence
  Protein classification predicting sequence
VQEEIRF

SEQ ID NO: 45645 - protein, 9 aa, Artificial sequence
  Protein classification predicting sequence
IVAIDALHF

SEQ ID NO: 45646 - protein, 14 aa, Artificial sequence
  Protein classification predicting sequence
VATGNWGCGAFGGD

SEQ ID NO: 45647 - protein, 34 aa, Artificial sequence
  Protein classification predicting sequence
SRLFTEVLDHNECLIITGTEQYSEYTGYAETYRW

SEQ ID NO: 45648 - protein, 10 aa, Artificial sequence
  Protein classification predicting sequence
SCQDSEADEE

SEQ ID NO: 45649 - protein, 27 aa, Artificial sequence
  Protein classification predicting sequence
ENLSAVATGNWGCGAFGGDARLKALIQ

SEQ ID NO: 45650 - protein, 9 aa, Artificial sequence
  Protein classification predicting sequence
KLYPFIYHA

SEQ ID NO: 45651 - protein, 7 aa, Artificial sequence
  Protein classification predicting sequence
HEAGYDA

SEQ ID NO: 45652 - protein, 7 aa, Artificial sequence
  Protein classification predicting sequence
DTPEERY

SEQ ID NO: 45653 - protein, 7 aa, Artificial sequence
  Protein classification predicting sequence
FLLFQFG

SEQ ID NO: 45654 - protein, 10 aa, Artificial sequence
  Protein classification predicting sequence
GIPYLNQEEE

SEQ ID NO: 45655 - protein, 15 aa, Artificial sequence
  Protein classification predicting sequence
EQEELNDAVGFSRVI

SEQ ID NO: 45656 - protein, 18 aa, Artificial sequence
  Protein classification predicting sequence
VFPRLLDTKLMASTQPFK

SEQ ID NO: 45657 - protein, 23 aa, Artificial sequence
  Protein classification predicting sequence
VTFPKEWKTSDLYQLFSAFGNIQ

SEQ ID NO: 45658 - protein, 11 aa, Artificial sequence
  Protein classification predicting sequence
DDTSAFVSLSQ

SEQ ID NO: 45659 - protein, 13 aa, Artificial sequence
  Protein classification predicting sequence
YAESYRIQTYAEY

SEQ ID NO: 45660 - protein, 11 aa, Artificial sequence
  Protein classification predicting sequence
GHNMLLDVMHT

SEQ ID NO: 45661 - protein, 7 aa, Artificial sequence
  Protein classification predicting sequence
AIEEADF

SEQ ID NO: 45662 - protein, 9 aa, Artificial sequence
  Protein classification predicting sequence
QRKLIYQTL

SEQ ID NO: 45663 - protein, 13 aa, Artificial sequence
  Protein classification predicting sequence
NTSLAELEKRLKE

SEQ ID NO: 45664 - protein, 18 aa, Artificial sequence
  Protein classification predicting sequence
MDIPYLNLEGPDLQPKRD

SEQ ID NO: 45665 - protein, 7 aa, Artificial sequence
  Protein classification predicting sequence
LAQYHNI

SEQ ID NO: 45666 - protein, 9 aa, Artificial sequence
  Protein classification predicting sequence
PEEIKHKFD

SEQ ID NO: 45667 - protein, 7 aa, Artificial sequence
  Protein classification predicting sequence
WLLAAKS

SEQ ID NO: 45668 - protein, 12 aa, Artificial sequence
  Protein classification predicting sequence
LAKFDFTWFIPA

SEQ ID NO: 45669 - protein, 7 aa, Artificial sequence
  Protein classification predicting sequence
IKYRKIF

SEQ ID NO: 45670 - protein, 26 aa, Artificial sequence
  Protein classification predicting sequence
FALITPLFFQVVMDKVLVHRGFSTLN

SEQ ID NO: 45671 - protein, 34 aa, Artificial sequence
  Protein classification predicting sequence
IFEIVLSGLRTYVFSHSTSRIDVELGAKLFRHLL

SEQ ID NO: 45672 - protein, 14 aa, Artificial sequence
  Protein classification predicting sequence
WSIFISPILRRRLD

SEQ ID NO: 45673 - protein, 22 aa, Artificial sequence
  Protein classification predicting sequence
FRVTVLATIGQQGVQLIQKTVM

SEQ ID NO: 45674 - protein, 9 aa, Artificial sequence
  Protein classification predicting sequence
QGKLSLPEI

SEQ ID NO: 45675 - protein, 13 aa, Artificial sequence
  Protein classification predicting sequence
FKNIRFRYKPDAP

SEQ ID NO: 45676 - protein, 8 aa, Artificial sequence
  Protein classification predicting sequence
IAHRLSTV

SEQ ID NO: 45677 - protein, 7 aa, Artificial sequence
  Protein classification predicting sequence
DARIPDN

SEQ ID NO: 45678 - protein, 6 aa, Artificial sequence
  Protein classification predicting sequence
FYGLMH

SEQ ID NO: 45679 - protein, 45 aa, Artificial sequence
  Protein classification predicting sequence
QPDAVLCIGQAGGRTGLTPERVAINQDDARIPDNEGNQPIDTPIR

SEQ ID NO: 45680 - protein, 19 aa, Artificial sequence
  Protein classification predicting sequence
AGTFVCNHLMYQALYLVDK

SEQ ID NO: 45681 - protein, 7 aa, Artificial sequence
  Protein classification predicting sequence
AGFMHIP

SEQ ID NO: 45682 - protein, 7 aa, Artificial sequence
  Protein classification predicting sequence
AYFATIP

SEQ ID NO: 45683 - protein, 6 aa, Artificial sequence
  Protein classification predicting sequence
SNSAGT

SEQ ID NO: 45684 - protein, 7 aa, Artificial sequence
  Protein classification predicting sequence
VCNHLMY

SEQ ID NO: 45685 - protein, 7 aa, Artificial sequence
  Protein classification predicting sequence
TGFEPFG

SEQ ID NO: 45686 - protein, 10 aa, Artificial sequence
  Protein classification predicting sequence
GNQPVDVPVV

SEQ ID NO: 45687 - protein, 8 aa, Artificial sequence
  Protein classification predicting sequence
VPTVFHKS

SEQ ID NO: 45688 - protein, 10 aa, Artificial sequence
  Protein classification predicting sequence
HLMYQALYLV

SEQ ID NO: 45689 - protein, 7 aa, Artificial sequence
  Protein classification predicting sequence
QPIDTPI

SEQ ID NO: 45690 - protein, 9 aa, Artificial sequence
  Protein classification predicting sequence
TGFDPFGGE

SEQ ID NO: 45691 - protein, 12 aa, Artificial sequence
  Protein classification predicting sequence
ERVAINIDDARI

SEQ ID NO: 45692 - protein, 7 aa, Artificial sequence
  Protein classification predicting sequence
DNEGNQP

SEQ ID NO: 45693 - protein, 13 aa, Artificial sequence
  Protein classification predicting sequence
AYWSTLPMKAIVK

SEQ ID NO: 45694 - protein, 37 aa, Artificial sequence
  Protein classification predicting sequence
LHEKTIGEYKIISKQVPTVFHKSISVLKEYIEELAPE

SEQ ID NO: 45695 - protein, 8 aa, Artificial sequence
  Protein classification predicting sequence
VDIVEVGG

SEQ ID NO: 45696 - protein, 17 aa, Artificial sequence
  Protein classification predicting sequence
EYKIISKQVPTVFHKSI

SEQ ID NO: 45697 - protein, 6 aa, Artificial sequence
  Protein classification predicting sequence
TGFDPF

SEQ ID NO: 45698 - protein, 8 aa, Artificial sequence
  Protein classification predicting sequence
AGTFVCNH

SEQ ID NO: 45699 - protein, 7 aa, Artificial sequence
  Protein classification predicting sequence
GIPASVS

SEQ ID NO: 45700 - protein, 6 aa, Artificial sequence
  Protein classification predicting sequence
TGFEPF

SEQ ID NO: 45701 - protein, 7 aa, Artificial sequence
  Protein classification predicting sequence
IGQAGGR

SEQ ID NO: 45702 - protein, 6 aa, Artificial sequence
  Protein classification predicting sequence
AINIDD

SEQ ID NO: 45703 - protein, 7 aa, Artificial sequence
  Protein classification predicting sequence
AYFSTLP

SEQ ID NO: 45704 - protein, 6 aa, Artificial sequence
  Protein classification predicting sequence
GFIHIP

SEQ ID NO: 45705 - protein, 7 aa, Artificial sequence
  Protein classification predicting sequence
TGFDPFG

SEQ ID NO: 45706 - protein, 8 aa, Artificial sequence
  Protein classification predicting sequence
HIPFLPEQ

SEQ ID NO: 45707 - protein, 8 aa, Artificial sequence
  Protein classification predicting sequence
YFSSLPIK

SEQ ID NO: 45708 - protein, 6 aa, Artificial sequence
  Protein classification predicting sequence
CNHVMY

SEQ ID NO: 45709 - protein, 7 aa, Artificial sequence
  Protein classification predicting sequence
AGTFVCN

SEQ ID NO: 45710 - protein, 8 aa, Artificial sequence
  Protein classification predicting sequence
TGFEPFGG

SEQ ID NO: 45711 - protein, 6 aa, Artificial sequence
  Protein classification predicting sequence
GFIHVP

SEQ ID NO: 45712 - protein, 12 aa, Artificial sequence
  Protein classification predicting sequence
INPSWEAVTQLE

SEQ ID NO: 45713 - protein, 20 aa, Artificial sequence
  Protein classification predicting sequence
IIGTHTIDKLKLPTSFKKVD

SEQ ID NO: 45714 - protein, 37 aa, Artificial sequence
  Protein classification predicting sequence
GKPDTPSMPLEKIVAGLTAAIEAISNDEDLHLALGTT

SEQ ID NO: 45715 - protein, 59 aa, Artificial sequence
  Protein classification predicting sequence
IINKTLASNHYDVVLAIGQAGGRNAITPERVAINIDDARIPDNDDFQPIDQAIHLDGAP

SEQ ID NO: 45716 - protein, 13 aa, Artificial sequence
  Protein classification predicting sequence
YFSNLPVKAMTQS

SEQ ID NO: 45717 - protein, 8 aa, Artificial sequence
  Protein classification predicting sequence
DTPSMPLE

SEQ ID NO: 45718 - protein, 13 aa, Artificial sequence
  Protein classification predicting sequence
IVAGLTAAIEAIS

SEQ ID NO: 45719 - protein, 6 aa, Artificial sequence
  Protein classification predicting sequence
GPAAYF

SEQ ID NO: 45720 - protein, 7 aa, Artificial sequence
  Protein classification predicting sequence
SNTAGTF

SEQ ID NO: 45721 - protein, 8 aa, Artificial sequence
  Protein classification predicting sequence
PEQVIGKP

SEQ ID NO: 45722 - protein, 7 aa, Artificial sequence
  Protein classification predicting sequence
INPALEA

SEQ ID NO: 45723 - protein, 6 aa, Artificial sequence
  Protein classification predicting sequence
GNQPID

SEQ ID NO: 45724 - protein, 10 aa, Artificial sequence
  Protein classification predicting sequence
DITIERVAIN

SEQ ID NO: 45725 - protein, 7 aa, Artificial sequence
  Protein classification predicting sequence
LPIKAMV

SEQ ID NO: 45726 - protein, 8 aa, Artificial sequence
  Protein classification predicting sequence
LNIPDAYA

SEQ ID NO: 45727 - protein, 6 aa, Artificial sequence
  Protein classification predicting sequence
KNPYHN

SEQ ID NO: 45728 - protein, 10 aa, Artificial sequence
  Protein classification predicting sequence
HAADVTQTVH

SEQ ID NO: 45729 - protein, 9 aa, Artificial sequence
  Protein classification predicting sequence
LHAADISHP

SEQ ID NO: 45730 - protein, 7 aa, Artificial sequence
  Protein classification predicting sequence
LHHRWTM

SEQ ID NO: 45731 - protein, 18 aa, Artificial sequence
  Protein classification predicting sequence
QGDKEAELGLPFSPLCDR

SEQ ID NO: 45732 - protein, 18 aa, Artificial sequence
  Protein classification predicting sequence
VAQSQIGFIDFIVEPTFS

SEQ ID NO: 45733 - protein, 8 aa, Artificial sequence
  Protein classification predicting sequence
LVKQLERG

SEQ ID NO: 45734 - protein, 7 aa, Artificial sequence
  Protein classification predicting sequence
VYIDETR

SEQ ID NO: 45735 - protein, 22 aa, Artificial sequence
  Protein classification predicting sequence
EEKPKFRSIVHAVQAGIFVERM

SEQ ID NO: 45736 - protein, 37 aa, Artificial sequence
  Protein classification predicting sequence
ESDCPSPLELKSAPSKKMWIKLRSLLRYMVKQLENGE

SEQ ID NO: 45737 - protein, 31 aa, Artificial sequence
  Protein classification predicting sequence
LAIIFAAAIHDYEHTGTTNSFHIQTKSECAI

SEQ ID NO: 45738 - protein, 11 aa, Artificial sequence
  Protein classification predicting sequence
YNDRSVLENHH

SEQ ID NO: 45739 - protein, 17 aa, Artificial sequence
  Protein classification predicting sequence
YNDRSVLENHHISSVFR

SEQ ID NO: 45740 - protein, 19 aa, Artificial sequence
  Protein classification predicting sequence
KALSLLLHAADISHPTKQW

SEQ ID NO: 45741 - protein, 33 aa, Artificial sequence
  Protein classification predicting sequence
IQENKQKWKERAASGITNQMSIDELSPCEEEAP

SEQ ID NO: 45742 - protein, 15 aa, Artificial sequence
  Protein classification predicting sequence
SIVHAVQAGIFVERM

SEQ ID NO: 45743 - protein, 8 aa, Artificial sequence
  Protein classification predicting sequence
LISRFKIP

SEQ ID NO: 45744 - protein, 6 aa, Artificial sequence
  Protein classification predicting sequence
LVIEMV

SEQ ID NO: 45745 - protein, 10 aa, Artificial sequence
  Protein classification predicting sequence
ATDMSCHFQQ

SEQ ID NO: 45746 - protein, 7 aa, Artificial sequence
  Protein classification predicting sequence
MKTALQQ

SEQ ID NO: 45747 - protein, 11 aa, Artificial sequence
  Protein classification predicting sequence
GFIDFIVEPTF

SEQ ID NO: 45748 - protein, 106 aa, Artificial sequence
  Protein classification predicting sequence
EIFALFISCMCHDLDHRGTNNSFQVASKSVLAALYSSEGSVMERHHFAQAIAILNTHGCNIFDHFSRKDYQRMLDLMRDIILATDLAHHLRIFKDLQKMAEVGYDR

SEQ ID NO: 45749 - protein, 6 aa, Artificial sequence
  Protein classification predicting sequence
KKLMHS

SEQ ID NO: 45750 - protein, 9 aa, Artificial sequence
  Protein classification predicting sequence
IFQERDLLK

SEQ ID NO: 45751 - protein, 7 aa, Artificial sequence
  Protein classification predicting sequence
FAAAIHD

SEQ ID NO: 45752 - protein, 9 aa, Artificial sequence
  Protein classification predicting sequence
DLIVTPFAQ

SEQ ID NO: 45753 - protein, 12 aa, Artificial sequence
  Protein classification predicting sequence
EELDWCLDQLET

SEQ ID NO: 45754 - protein, 11 aa, Artificial sequence
  Protein classification predicting sequence
QTYRSVSEMAS

SEQ ID NO: 45755 - protein, 14 aa, Artificial sequence
  Protein classification predicting sequence
QISGVKKLMHSSSL

SEQ ID NO: 45756 - protein, 12 aa, Artificial sequence
  Protein classification predicting sequence
QSTHVLLSTPAL

SEQ ID NO: 45757 - protein, 14 aa, Artificial sequence
  Protein classification predicting sequence
AVFTDLEILAAIFA

SEQ ID NO: 45758 - protein, 13 aa, Artificial sequence
  Protein classification predicting sequence
KKQRQTLRKMVID

SEQ ID NO: 45759 - protein, 7 aa, Artificial sequence
  Protein classification predicting sequence
LRKMVID

SEQ ID NO: 45760 - protein, 9 aa, Artificial sequence
  Protein classification predicting sequence
SGVLLLDNY

SEQ ID NO: 45761 - protein, 6 aa, Artificial sequence
  Protein classification predicting sequence
DRIQVL

SEQ ID NO: 45762 - protein, 14 aa, Artificial sequence
  Protein classification predicting sequence
LYRQWTDRIMEEFF

SEQ ID NO: 45763 - protein, 7 aa, Artificial sequence
  Protein classification predicting sequence
QGDKERE

SEQ ID NO: 45764 - protein, 7 aa, Artificial sequence
  Protein classification predicting sequence
CDIFQNL

SEQ ID NO: 45765 - protein, 10 aa, Artificial sequence
  Protein classification predicting sequence
KFQFELTLEE

SEQ ID NO: 45766 - protein, 13 aa, Artificial sequence
  Protein classification predicting sequence
QRRESFLYRSDSD

SEQ ID NO: 45767 - protein, 13 aa, Artificial sequence
  Protein classification predicting sequence
SPKSMSRNSSIAS

SEQ ID NO: 45768 - protein, 7 aa, Artificial sequence
  Protein classification predicting sequence
KFKRMLN

SEQ ID NO: 45769 - protein, 9 aa, Artificial sequence
  Protein classification predicting sequence
HNSLHAADV

SEQ ID NO: 45770 - protein, 7 aa, Artificial sequence
  Protein classification predicting sequence
HAADVTQ

SEQ ID NO: 45771 - protein, 7 aa, Artificial sequence
  Protein classification predicting sequence
TDMSKHM

SEQ ID NO: 45772 - protein, 14 aa, Artificial sequence
  Protein classification predicting sequence
LLADLKTMVETKKV

SEQ ID NO: 45773 - protein, 7 aa, Artificial sequence
  Protein classification predicting sequence
HLWRQPR

SEQ ID NO: 45774 - protein, 7 aa, Artificial sequence
  Protein classification predicting sequence
PIRIQQR

SEQ ID NO: 45775 - protein, 13 aa, Artificial sequence
  Protein classification predicting sequence
IVTPFAQVLASLR

SEQ ID NO: 45776 - protein, 18 aa, Artificial sequence
  Protein classification predicting sequence
ELDWCLDQLETLQTRHSV

SEQ ID NO: 45777 - protein, 9 aa, Artificial sequence
  Protein classification predicting sequence
EMASNKFKR

SEQ ID NO: 45778 - protein, 10 aa, Artificial sequence
  Protein classification predicting sequence
LNRELTHLSE

SEQ ID NO: 45779 - protein, 10 aa, Artificial sequence
  Protein classification predicting sequence
AELSGNRPLT

SEQ ID NO: 45780 - protein, 7 aa, Artificial sequence
  Protein classification predicting sequence
QSTHVLL

SEQ ID NO: 45781 - protein, 16 aa, Artificial sequence
  Protein classification predicting sequence
TPALEAVFTDLEILAA

SEQ ID NO: 45782 - protein, 11 aa, Artificial sequence
  Protein classification predicting sequence
AVFTDLEILAA

SEQ ID NO: 45783 - protein, 28 aa, Artificial sequence
  Protein classification predicting sequence
AIHDVDHPGVSNQFLINTNSELALMYND

SEQ ID NO: 45784 - protein, 16 aa, Artificial sequence
  Protein classification predicting sequence
SVLENHHLAVGFKLLQ

SEQ ID NO: 45785 - protein, 15 aa, Artificial sequence
  Protein classification predicting sequence
MVIDMVLATDMSKHM

SEQ ID NO: 45786 - protein, 7 aa, Artificial sequence
  Protein classification predicting sequence
VLATDMS

SEQ ID NO: 45787 - protein, 10 aa, Artificial sequence
  Protein classification predicting sequence
VLATDMSKHM

SEQ ID NO: 45788 - protein, 16 aa, Artificial sequence
  Protein classification predicting sequence
LLADLKTMVETKKVTS

SEQ ID NO: 45789 - protein, 8 aa, Artificial sequence
  Protein classification predicting sequence
GVLLLDNY

SEQ ID NO: 45790 - protein, 18 aa, Artificial sequence
  Protein classification predicting sequence
NLVHCADLSNPTKPLPLY

SEQ ID NO: 45791 - protein, 22 aa, Artificial sequence
  Protein classification predicting sequence
LYRQWTDRIMAEFFQQGDRERE

SEQ ID NO: 45792 - protein, 6 aa, Artificial sequence
  Protein classification predicting sequence
ISPMCD

SEQ ID NO: 45793 - protein, 8 aa, Artificial sequence
  Protein classification predicting sequence
LDTLEDNR

SEQ ID NO: 45794 - protein, 13 aa, Artificial sequence
  Protein classification predicting sequence
LDTLEDNREWYQS

SEQ ID NO: 45795 - protein, 8 aa, Artificial sequence
  Protein classification predicting sequence
RMSWPSSF

SEQ ID NO: 45796 - protein, 8 aa, Artificial sequence
  Protein classification predicting sequence
KKEQMPLT

SEQ ID NO: 45797 - protein, 38 aa, Artificial sequence
  Protein classification predicting sequence
WILSVKKNYRKNVAYHNWRHAFNTAQCMFAALKAGKIQ

SEQ ID NO: 45798 - protein, 19 aa, Artificial sequence
  Protein classification predicting sequence
SNNCIRLEWNKGIVGHVAA

SEQ ID NO: 45799 - protein, 42 aa, Artificial sequence
  Protein classification predicting sequence
DEGDQCSRLLELVKDISSHLDVTALCHKIFLHIHGLISADRY

SEQ ID NO: 45800 - protein, 9 aa, Artificial sequence
  Protein classification predicting sequence
LFLVCEDSS

SEQ ID NO: 45801 - protein, 8 aa, Artificial sequence
  Protein classification predicting sequence
VFHMECEE

SEQ ID NO: 45802 - protein, 63 aa, Artificial sequence
  Protein classification predicting sequence
LALLIAALSHDLDHRGVNNSYIQRSEHPLAQLYCHSIMEHHHFDQCLMILNSPGNQILSGLSI

SEQ ID NO: 45803 - protein, 14 aa, Artificial sequence
  Protein classification predicting sequence
EFFDQGDRERKELN

SEQ ID NO: 45804 - protein, 30 aa, Artificial sequence
  Protein classification predicting sequence
CIRSLLCTPIKNGKKNKVIGVCQLVNKMEE

SEQ ID NO: 45805 - protein, 36 aa, Artificial sequence
  Protein classification predicting sequence
LALLIAALSHDLDHRGVNNSYIQRSEHPLAQLYCHS

SEQ ID NO: 45806 - protein, 11 aa, Artificial sequence
  Protein classification predicting sequence
MEHHHFDQCLM

SEQ ID NO: 45807 - protein, 33 aa, Artificial sequence
  Protein classification predicting sequence
QKELFLAMLMTACDLSAITKPWPIQQRIAELVA

SEQ ID NO: 45808 - protein, 17 aa, Artificial sequence
  Protein classification predicting sequence
PLLDGCRKNRQKWQALA

SEQ ID NO: 45809 - protein, 10 aa, Artificial sequence
  Protein classification predicting sequence
EAAVDFSNYH

SEQ ID NO: 45810 - protein, 10 aa, Artificial sequence
  Protein classification predicting sequence
GPRTPDGREI

SEQ ID NO: 45811 - protein, 8 aa, Artificial sequence
  Protein classification predicting sequence
SGLPTYVA

SEQ ID NO: 45812 - protein, 10 aa, Artificial sequence
  Protein classification predicting sequence
MNKLENRKDI

SEQ ID NO: 45813 - protein, 10 aa, Artificial sequence
  Protein classification predicting sequence
QNLNRRQHEH

SEQ ID NO: 45814 - protein, 10 aa, Artificial sequence
  Protein classification predicting sequence
PIMNGKDVVA

SEQ ID NO: 45815 - protein, 9 aa, Artificial sequence
  Protein classification predicting sequence
QFLGWSVLN

SEQ ID NO: 45816 - protein, 7 aa, Artificial sequence
  Protein classification predicting sequence
LENRKDI

SEQ ID NO: 45817 - protein, 13 aa, Artificial sequence
  Protein classification predicting sequence
NNRKEWKALADEY

SEQ ID NO: 45818 - protein, 7 aa, Artificial sequence
  Protein classification predicting sequence
EIVFPLD

SEQ ID NO: 45819 - protein, 6 aa, Artificial sequence
  Protein classification predicting sequence
IMAVNK

SEQ ID NO: 45820 - protein, 12 aa, Artificial sequence
  Protein classification predicting sequence
ITYHNWRHGFNV

SEQ ID NO: 45821 - protein, 27 aa, Artificial sequence
  Protein classification predicting sequence
TRKEIVMAMMMTACDLSAITKPWEVQS

SEQ ID NO: 45822 - protein, 20 aa, Artificial sequence
  Protein classification predicting sequence
VALLVAAEFWEQGDLERTVL

SEQ ID NO: 45823 - protein, 11 aa, Artificial sequence
  Protein classification predicting sequence
FNVMKKLCFLL

SEQ ID NO: 45824 - protein, 10 aa, Artificial sequence
  Protein classification predicting sequence
DHWALVSGLP

SEQ ID NO: 45825 - protein, 44 aa, Artificial sequence
  Protein classification predicting sequence
FQKEPLDESGWMIKNVLSMPIVNKKEEIVGVATFYNRKDGKPFD

SEQ ID NO: 45826 - protein, 29 aa, Artificial sequence
  Protein classification predicting sequence
YEINKFHFSDLPLTELELVKCGIQMYYEL

SEQ ID NO: 45827 - protein, 39 aa, Artificial sequence
  Protein classification predicting sequence
CHDIDHRGTNNLYQMKSQNPLAKLHGSSILERHHLEFGK

SEQ ID NO: 45828 - protein, 15 aa, Artificial sequence
  Protein classification predicting sequence
LNCDRYSVGLLDMTK

SEQ ID NO: 45829 - protein, 19 aa, Artificial sequence
  Protein classification predicting sequence
FYKVIDYILHGKEDIKVIP

SEQ ID NO: 45830 - protein, 6 aa, Artificial sequence
  Protein classification predicting sequence
ICNIMN

SEQ ID NO: 45831 - protein, 9 aa, Artificial sequence
  Protein classification predicting sequence
GWVIKNVLS

SEQ ID NO: 45832 - protein, 8 aa, Artificial sequence
  Protein classification predicting sequence
NMERVVFK

SEQ ID NO: 45833 - protein, 7 aa, Artificial sequence
  Protein classification predicting sequence
KEFFDVW

SEQ ID NO: 45834 - protein, 11 aa, Artificial sequence
  Protein classification predicting sequence
ADHWALASGLP

SEQ ID NO: 45835 - protein, 26 aa, Artificial sequence
  Protein classification predicting sequence
NTDTYDKMNKLENRKDIAQDMVLYHV

SEQ ID NO: 45836 - protein, 6 aa, Artificial sequence
  Protein classification predicting sequence
YHVKCD

SEQ ID NO: 45837 - protein, 9 aa, Artificial sequence
  Protein classification predicting sequence
RLGKEPADC

SEQ ID NO: 45838 - protein, 16 aa, Artificial sequence
  Protein classification predicting sequence
FDIYEFHFSDLECTEL

SEQ ID NO: 45839 - protein, 31 aa, Artificial sequence
  Protein classification predicting sequence
LVKCGIQMYYELGVVRKFQIPQEVLVRFLFS

SEQ ID NO: 45840 - protein, 17 aa, Artificial sequence
  Protein classification predicting sequence
MDIAIIATDLALYFKKR

SEQ ID NO: 45841 - protein, 7 aa, Artificial sequence
  Protein classification predicting sequence
MFQKIVD

SEQ ID NO: 45842 - protein, 12 aa, Artificial sequence
  Protein classification predicting sequence
MFQKIVDESKNY

SEQ ID NO: 45843 - protein, 8 aa, Artificial sequence
  Protein classification predicting sequence
AELATRLF

SEQ ID NO: 45844 - protein, 19 aa, Artificial sequence
  Protein classification predicting sequence
LEDCLVPPDSEIVFPLDIG

SEQ ID NO: 45845 - protein, 10 aa, Artificial sequence
  Protein classification predicting sequence
VGHVAQTKKM

SEQ ID NO: 45846 - protein, 8 aa, Artificial sequence
  Protein classification predicting sequence
YLNCERYS

SEQ ID NO: 45847 - protein, 11 aa, Artificial sequence
  Protein classification predicting sequence
GLLDMTKEKEF

SEQ ID NO: 45848 - protein, 9 aa, Artificial sequence
  Protein classification predicting sequence
IDYILHGKE

SEQ ID NO: 45849 - protein, 7 aa, Artificial sequence
  Protein classification predicting sequence
PIVNKKE

SEQ ID NO: 45850 - protein, 13 aa, Artificial sequence
  Protein classification predicting sequence
KMNKLENRKDIAQ

SEQ ID NO: 45851 - protein, 10 aa, Artificial sequence
  Protein classification predicting sequence
YYTDLEAFAM

SEQ ID NO: 45852 - protein, 13 aa, Artificial sequence
  Protein classification predicting sequence
LHGSSILERHHLE

SEQ ID NO: 45853 - protein, 11 aa, Artificial sequence
  Protein classification predicting sequence
DESLNIFQNLN

SEQ ID NO: 45854 - protein, 6 aa, Artificial sequence
  Protein classification predicting sequence
EITPML

SEQ ID NO: 45855 - protein, 22 aa, Artificial sequence
  Protein classification predicting sequence
LLWSANKVFEELTDIERQFHKA

SEQ ID NO: 45856 - protein, 16 aa, Artificial sequence
  Protein classification predicting sequence
KVFEELTDIERQFHKA

SEQ ID NO: 45857 - protein, 6 aa, Artificial sequence
  Protein classification predicting sequence
MAMMMT

SEQ ID NO: 45858 - protein, 10 aa, Artificial sequence
  Protein classification predicting sequence
HGFNVGQTMF

SEQ ID NO: 45859 - protein, 5 aa, Artificial sequence
  Protein classification predicting sequence
NPYHN

SEQ ID NO: 45860 - protein, 7 aa, Artificial sequence
  Protein classification predicting sequence
IDMVLAT

SEQ ID NO: 45861 - protein, 7 aa, Artificial sequence
  Protein classification predicting sequence
HDVDHPG

SEQ ID NO: 45862 - protein, 10 aa, Artificial sequence
  Protein classification predicting sequence
QAVSERLFYY

SEQ ID NO: 45863 - protein, 9 aa, Artificial sequence
  Protein classification predicting sequence
VAFSGATAC

SEQ ID NO: 45864 - protein, 7 aa, Artificial sequence
  Protein classification predicting sequence
LLPILQW

SEQ ID NO: 45865 - protein, 18 aa, Artificial sequence
  Protein classification predicting sequence
PEVTYHRLRPQDKFLVLA

SEQ ID NO: 45866 - protein, 12 aa, Artificial sequence
  Protein classification predicting sequence
DQNAATHLIRHA

SEQ ID NO: 45867 - protein, 8 aa, Artificial sequence
  Protein classification predicting sequence
IQSYIGAS

SEQ ID NO: 45868 - protein, 28 aa, Artificial sequence
  Protein classification predicting sequence
KVPLVRKKSLRRNLSEHGLLKDFLKKHN

SEQ ID NO: 45869 - protein, 6 aa, Artificial sequence
  Protein classification predicting sequence
ALSECI

SEQ ID NO: 45870 - protein, 21 aa, Artificial sequence
  Protein classification predicting sequence
HKVPLVRKKSLRKNLIEKGLL

SEQ ID NO: 45871 - protein, 8 aa, Artificial sequence
  Protein classification predicting sequence
FNPEDSST

SEQ ID NO: 45872 - protein, 9 aa, Artificial sequence
  Protein classification predicting sequence
DTNQIFGLS

SEQ ID NO: 45873 - protein, 8 aa, Artificial sequence
  Protein classification predicting sequence
DLFSVYLS

SEQ ID NO: 45874 - protein, 11 aa, Artificial sequence
  Protein classification predicting sequence
IVFTINGVQYP

SEQ ID NO: 45875 - protein, 19 aa, Artificial sequence
  Protein classification predicting sequence
VGGISDTNQIFGLSETEPG

SEQ ID NO: 45876 - protein, 12 aa, Artificial sequence
  Protein classification predicting sequence
LVSQDLFSVYLS

SEQ ID NO: 45877 - protein, 57 aa, Artificial sequence
  Protein classification predicting sequence
LVSQDLFSVYLSADDQSGSVVIFGGIDSSYYTGSLNWVPVSVEGYWQISVDSITMNG

SEQ ID NO: 45878 - protein, 8 aa, Artificial sequence
  Protein classification predicting sequence
VDSITMNG

SEQ ID NO: 45879 - protein, 7 aa, Artificial sequence
  Protein classification predicting sequence
GFTINQI

SEQ ID NO: 45880 - protein, 26 aa, Artificial sequence
  Protein classification predicting sequence
GGIQSNSGLGLSILGDVFLKSQYVVF

SEQ ID NO: 45881 - protein, 9 aa, Artificial sequence
  Protein classification predicting sequence
FNPQDSSTY

SEQ ID NO: 45882 - protein, 8 aa, Artificial sequence
  Protein classification predicting sequence
SGSVVIFG

SEQ ID NO: 45883 - protein, 6 aa, Artificial sequence
  Protein classification predicting sequence
IDSSYY

SEQ ID NO: 45884 - protein, 20 aa, Artificial sequence
  Protein classification predicting sequence
YGTGSMTGILGYDTVQVGGI

SEQ ID NO: 45885 - protein, 7 aa, Artificial sequence
  Protein classification predicting sequence
DQSGSVV

SEQ ID NO: 45886 - protein, 28 aa, Artificial sequence
  Protein classification predicting sequence
VDSITMNGEAIACAEGCQAIVDTGTSLL

SEQ ID NO: 45887 - protein, 11 aa, Artificial sequence
  Protein classification predicting sequence
GPTSPIANIQS

SEQ ID NO: 45888 - protein, 7 aa, Artificial sequence
  Protein classification predicting sequence
IGASENS

SEQ ID NO: 45889 - protein, 7 aa, Artificial sequence
  Protein classification predicting sequence
LVALSEC

SEQ ID NO: 45890 - protein, 11 aa, Artificial sequence
  Protein classification predicting sequence
KVPLVRKKSLR

SEQ ID NO: 45891 - protein, 7 aa, Artificial sequence
  Protein classification predicting sequence
ATPVFDN

SEQ ID NO: 45892 - protein, 14 aa, Artificial sequence
  Protein classification predicting sequence
PSISSSGATPVFDN

SEQ ID NO: 45893 - protein, 17 aa, Artificial sequence
  Protein classification predicting sequence
EYFGTIGIGTPAQDFTV

SEQ ID NO: 45894 - protein, 9 aa, Artificial sequence
  Protein classification predicting sequence
DSSTYQSTS

SEQ ID NO: 45895 - protein, 6 aa, Artificial sequence
  Protein classification predicting sequence
EGYWQI

SEQ ID NO: 45896 - protein, 17 aa, Artificial sequence
  Protein classification predicting sequence
NIQSDIGASENSDGEMV

SEQ ID NO: 45897 - protein, 8 aa, Artificial sequence
  Protein classification predicting sequence
KKSLRKNL

SEQ ID NO: 45898 - protein, 8 aa, Artificial sequence
  Protein classification predicting sequence
EPGSFLYY

SEQ ID NO: 45899 - protein, 10 aa, Artificial sequence
  Protein classification predicting sequence
ATPVFDNMWN

SEQ ID NO: 45900 - protein, 7 aa, Artificial sequence
  Protein classification predicting sequence
GLLKDFL

SEQ ID NO: 45901 - protein, 6 aa, Artificial sequence
  Protein classification predicting sequence
WAFWQG

SEQ ID NO: 45902 - protein, 8 aa, Artificial sequence
  Protein classification predicting sequence
DWVRDTIN

SEQ ID NO: 45903 - protein, 12 aa, Artificial sequence
  Protein classification predicting sequence
YRITKGEDLREQ

SEQ ID NO: 45904 - protein, 13 aa, Artificial sequence
  Protein classification predicting sequence
MDSMKSDMGGAAT

SEQ ID NO: 45905 - protein, 6 aa, Artificial sequence
  Protein classification predicting sequence
LCCADN

SEQ ID NO: 45906 - protein, 10 aa, Artificial sequence
  Protein classification predicting sequence
GASTAAAFLS

SEQ ID NO: 45907 - protein, 17 aa, Artificial sequence
  Protein classification predicting sequence
NYQQGWLHIDCSATYRK

SEQ ID NO: 45908 - protein, 9 aa, Artificial sequence
  Protein classification predicting sequence
GATGLGVRT

SEQ ID NO: 45909 - protein, 6 aa, Artificial sequence
  Protein classification predicting sequence
LCCAEN

SEQ ID NO: 45910 - protein, 8 aa, Artificial sequence
  Protein classification predicting sequence
ATLTGAAK

SEQ ID NO: 45911 - protein, 7 aa, Artificial sequence
  Protein classification predicting sequence
FVKNYQQ

SEQ ID NO: 45912 - protein, 8 aa, Artificial sequence
  Protein classification predicting sequence
RKIDGQGI

SEQ ID NO: 45913 - protein, 8 aa, Artificial sequence
  Protein classification predicting sequence
KGEDLREQ

SEQ ID NO: 45914 - protein, 10 aa, Artificial sequence
  Protein classification predicting sequence
LLALDYNPTG

SEQ ID NO: 45915 - protein, 7 aa, Artificial sequence
  Protein classification predicting sequence
ACLVGKG

SEQ ID NO: 45916 - protein, 7 aa, Artificial sequence
  Protein classification predicting sequence
RVKLFLC

SEQ ID NO: 45917 - protein, 6 aa, Artificial sequence
  Protein classification predicting sequence
LPSNFA

SEQ ID NO: 45918 - protein, 17 aa, Artificial sequence
  Protein classification predicting sequence
KATYSINNDGITLHLNG

SEQ ID NO: 45919 - protein, 19 aa, Artificial sequence
  Protein classification predicting sequence
DDLGLIQRAARKIDGLGIK

SEQ ID NO: 45920 - protein, 6 aa, Artificial sequence
  Protein classification predicting sequence
RCWAFW

SEQ ID NO: 45921 - protein, 16 aa, Artificial sequence
  Protein classification predicting sequence
WPDLDDAQRQELDNRL

SEQ ID NO: 45922 - protein, 18 aa, Artificial sequence
  Protein classification predicting sequence
IIDWVRDTINAPAEELGP

SEQ ID NO: 45923 - protein, 9 aa, Artificial sequence
  Protein classification predicting sequence
QLAQRAVDL

SEQ ID NO: 45924 - protein, 13 aa, Artificial sequence
  Protein classification predicting sequence
YMGLHTVGRGSER

SEQ ID NO: 45925 - protein, 23 aa, Artificial sequence
  Protein classification predicting sequence
APVYACLVGKGITFDSGGYSIKQ

SEQ ID NO: 45926 - protein, 19 aa, Artificial sequence
  Protein classification predicting sequence
YPAGASTAAGFLSHFVENY

SEQ ID NO: 45927 - protein, 19 aa, Artificial sequence
  Protein classification predicting sequence
GWLHIDCSATYRKAPVEQW

SEQ ID NO: 45928 - protein, 9 aa, Artificial sequence
  Protein classification predicting sequence
RIVKDKDLL

SEQ ID NO: 45929 - protein, 13 aa, Artificial sequence
  Protein classification predicting sequence
EGWEGIYAVGRGS

SEQ ID NO: 45930 - protein, 16 aa, Artificial sequence
  Protein classification predicting sequence
ACLVGKGITFDSGGYS

SEQ ID NO: 45931 - protein, 6 aa, Artificial sequence
  Protein classification predicting sequence
NKRVKL

SEQ ID NO: 45932 - protein, 8 aa, Artificial sequence
  Protein classification predicting sequence
KLGDIITY

SEQ ID NO: 45933 - protein, 9 aa, Artificial sequence
  Protein classification predicting sequence
ALGNDYHAL

SEQ ID NO: 45934 - protein, 8 aa, Artificial sequence
  Protein classification predicting sequence
DCSATYRK

SEQ ID NO: 45935 - protein, 6 aa, Artificial sequence
  Protein classification predicting sequence
IQRAAR

SEQ ID NO: 45936 - protein, 8 aa, Artificial sequence
  Protein classification predicting sequence
KGWLHFDC

SEQ ID NO: 45937 - protein, 6 aa, Artificial sequence
  Protein classification predicting sequence
FMDSMK

SEQ ID NO: 45938 - protein, 14 aa, Artificial sequence
  Protein classification predicting sequence
IIDWVRDTINAPAE

SEQ ID NO: 45939 - protein, 7 aa, Artificial sequence
  Protein classification predicting sequence
VGRGSDR

SEQ ID NO: 45940 - protein, 23 aa, Artificial sequence
  Protein classification predicting sequence
NGKTVEIMNTDAEGRLVLADGLI

SEQ ID NO: 45941 - protein, 16 aa, Artificial sequence
  Protein classification predicting sequence
MNTDAEGRLVLADGLI

SEQ ID NO: 45942 - protein, 13 aa, Artificial sequence
  Protein classification predicting sequence
QWSAGATGLGVRT

SEQ ID NO: 45943 - protein, 9 aa, Artificial sequence
  Protein classification predicting sequence
YEPMAYMDA

SEQ ID NO: 45944 - protein, 11 aa, Artificial sequence
  Protein classification predicting sequence
QEGALTSPVFS

SEQ ID NO: 45945 - protein, 11 aa, Artificial sequence
  Protein classification predicting sequence
TPQQDGGQWDM

SEQ ID NO: 45946 - protein, 7 aa, Artificial sequence
  Protein classification predicting sequence
DGGQWDM

SEQ ID NO: 45947 - protein, 8 aa, Artificial sequence
  Protein classification predicting sequence
EKYGVVPK

SEQ ID NO: 45948 - protein, 9 aa, Artificial sequence
  Protein classification predicting sequence
GQTFSLQYG

SEQ ID NO: 45949 - protein, 11 aa, Artificial sequence
  Protein classification predicting sequence
GGATTALQGML

SEQ ID NO: 45950 - protein, 10 aa, Artificial sequence
  Protein classification predicting sequence
PVTQELYWQI

SEQ ID NO: 45951 - protein, 6 aa, Artificial sequence
  Protein classification predicting sequence
EPGTNF

SEQ ID NO: 45952 - protein, 7 aa, Artificial sequence
  Protein classification predicting sequence
IYWAPVT

SEQ ID NO: 45953 - protein, 8 aa, Artificial sequence
  Protein classification predicting sequence
VVKVPLKK

SEQ ID NO: 45954 - protein, 12 aa, Artificial sequence
  Protein classification predicting sequence
SPVFSFYLSNQQ

SEQ ID NO: 45955 - protein, 8 aa, Artificial sequence
  Protein classification predicting sequence
LLLLSNST

SEQ ID NO: 45956 - protein, 6 aa, Artificial sequence
  Protein classification predicting sequence
GGGNTF

SEQ ID NO: 45957 - protein, 7 aa, Artificial sequence
  Protein classification predicting sequence
GWSAGAN

SEQ ID NO: 45958 - protein, 7 aa, Artificial sequence
  Protein classification predicting sequence
TTNDMPI

SEQ ID NO: 45959 - protein, 6 aa, Artificial sequence
  Protein classification predicting sequence
QINPHF

SEQ ID NO: 45960 - protein, 8 aa, Artificial sequence
  Protein classification predicting sequence
FDALNLFP

SEQ ID NO: 45961 - protein, 18 aa, Artificial sequence
  Protein classification predicting sequence
GRRSAVFIPFAGVTQTWD

SEQ ID NO: 45962 - protein, 8 aa, Artificial sequence
  Protein classification predicting sequence
RERGLLAP

SEQ ID NO: 45963 - protein, 25 aa, Artificial sequence
  Protein classification predicting sequence
LFPLQINPHFTNALPEGHKGETREQ

SEQ ID NO: 45964 - protein, 12 aa, Artificial sequence
  Protein classification predicting sequence
IRELLVVAPELT

SEQ ID NO: 45965 - protein, 9 aa, Artificial sequence
  Protein classification predicting sequence
IGLPEGNWI

SEQ ID NO: 45966 - protein, 9 aa, Artificial sequence
  Protein classification predicting sequence
VFKAGEEAV

SEQ ID NO: 45967 - protein, 12 aa, Artificial sequence
  Protein classification predicting sequence
IVGGGNTFQLLK

SEQ ID NO: 45968 - protein, 32 aa, Artificial sequence
  Protein classification predicting sequence
VKRGALYIGWSAGANLACPTIRTTNDMPIVDP

SEQ ID NO: 45969 - protein, 7 aa, Artificial sequence
  Protein classification predicting sequence
GSAVTTP

SEQ ID NO: 45970 - protein, 13 aa, Artificial sequence
  Protein classification predicting sequence
TVKSQLDSPLFAV

SEQ ID NO: 45971 - protein, 7 aa, Artificial sequence
  Protein classification predicting sequence
YDFGYID

SEQ ID NO: 45972 - protein, 7 aa, Artificial sequence
  Protein classification predicting sequence
MATLPAN

SEQ ID NO: 45973 - protein, 6 aa, Artificial sequence
  Protein classification predicting sequence
DGGPLG

SEQ ID NO: 45974 - protein, 9 aa, Artificial sequence
  Protein classification predicting sequence
HPGTAKNKM

SEQ ID NO: 45975 - protein, 8 aa, Artificial sequence
  Protein classification predicting sequence
PIRGGTDG

SEQ ID NO: 45976 - protein, 8 aa, Artificial sequence
  Protein classification predicting sequence
MEKAVQVI

SEQ ID NO: 45977 - protein, 11 aa, Artificial sequence
  Protein classification predicting sequence
DTATDFTGKNV

SEQ ID NO: 45978 - protein, 7 aa, Artificial sequence
  Protein classification predicting sequence
KAGIAEI

SEQ ID NO: 45979 - protein, 11 aa, Artificial sequence
  Protein classification predicting sequence
FTPDEEIGRGP

SEQ ID NO: 45980 - protein, 16 aa, Artificial sequence
  Protein classification predicting sequence
FTPDEEIGRGPHKFDV

SEQ ID NO: 45981 - protein, 8 aa, Artificial sequence
  Protein classification predicting sequence
DGGPLGEL

SEQ ID NO: 45982 - protein, 7 aa, Artificial sequence
  Protein classification predicting sequence
YIIRDFD

SEQ ID NO: 45983 - protein, 14 aa, Artificial sequence
  Protein classification predicting sequence
IEPKISPIRGGTDG

SEQ ID NO: 45984 - protein, 7 aa, Artificial sequence
  Protein classification predicting sequence
HPEIKHG

SEQ ID NO: 45985 - protein, 6 aa, Artificial sequence
  Protein classification predicting sequence
PDEEIG

SEQ ID NO: 45986 - protein, 6 aa, Artificial sequence
  Protein classification predicting sequence
ENFNAA

SEQ ID NO: 45987 - protein, 10 aa, Artificial sequence
  Protein classification predicting sequence
KPIRGGTDGA

SEQ ID NO: 45988 - protein, 8 aa, Artificial sequence
  Protein classification predicting sequence
GFISHMDT

SEQ ID NO: 45989 - protein, 6 aa, Artificial sequence
  Protein classification predicting sequence
FTPDEE

SEQ ID NO: 45990 - protein, 13 aa, Artificial sequence
  Protein classification predicting sequence
APEYTEGYEGFYH

SEQ ID NO: 45991 - protein, 9 aa, Artificial sequence
  Protein classification predicting sequence
TEGYEGFYH

SEQ ID NO: 45992 - protein, 8 aa, Artificial sequence
  Protein classification predicting sequence
TLLGADDK

SEQ ID NO: 45993 - protein, 7 aa, Artificial sequence
  Protein classification predicting sequence
TEGYEGF

SEQ ID NO: 45994 - protein, 6 aa, Artificial sequence
  Protein classification predicting sequence
IIRDFD

SEQ ID NO: 45995 - protein, 7 aa, Artificial sequence
  Protein classification predicting sequence
GGENFHG

SEQ ID NO: 45996 - protein, 10 aa, Artificial sequence
  Protein classification predicting sequence
IRVAFTPDEE

SEQ ID NO: 45997 - protein, 8 aa, Artificial sequence
  Protein classification predicting sequence
GIAEIMTA

SEQ ID NO: 45998 - protein, 6 aa, Artificial sequence
  Protein classification predicting sequence
EGFYHL

SEQ ID NO: 45999 - protein, 10 aa, Artificial sequence
  Protein classification predicting sequence
RGGTDGSKIS

SEQ ID NO: 46000 - protein, 7 aa, Artificial sequence
  Protein classification predicting sequence
FPNLKNY

SEQ ID NO: 46001 - protein, 16 aa, Artificial sequence
  Protein classification predicting sequence
TLITTDGTTLLGADDK

SEQ ID NO: 46002 - protein, 8 aa, Artificial sequence
  Protein classification predicting sequence
AYTMDGGP

SEQ ID NO: 46003 - protein, 6 aa, Artificial sequence
  Protein classification predicting sequence
GELEYE

SEQ ID NO: 46004 - protein, 7 aa, Artificial sequence
  Protein classification predicting sequence
IRGGTDG

SEQ ID NO: 46005 - protein, 14 aa, Artificial sequence
  Protein classification predicting sequence
IRGGTDGSKISFMG

SEQ ID NO: 46006 - protein, 6 aa, Artificial sequence
  Protein classification predicting sequence
PTPNIF

SEQ ID NO: 46007 - protein, 6 aa, Artificial sequence
  Protein classification predicting sequence
DTADFN

SEQ ID NO: 46008 - protein, 6 aa, Artificial sequence
  Protein classification predicting sequence
KHGKIR

SEQ ID NO: 46009 - protein, 6 aa, Artificial sequence
  Protein classification predicting sequence
ENMHGR

SEQ ID NO: 46010 - protein, 8 aa, Artificial sequence
  Protein classification predicting sequence
TDGTTLLG

SEQ ID NO: 46011 - protein, 14 aa, Artificial sequence
  Protein classification predicting sequence
FGPDEEIGVGADKF

SEQ ID NO: 46012 - protein, 6 aa, Artificial sequence
  Protein classification predicting sequence
DQYYNM

SEQ ID NO: 46013 - protein, 7 aa, Artificial sequence
  Protein classification predicting sequence
GKNVNPQ

SEQ ID NO: 46014 - protein, 8 aa, Artificial sequence
  Protein classification predicting sequence
FDVEAFGA

SEQ ID NO: 46015 - protein, 9 aa, Artificial sequence
  Protein classification predicting sequence
LEYESFNAA

SEQ ID NO: 46016 - protein, 17 aa, Artificial sequence
  Protein classification predicting sequence
LEYESFNAAGAKLTFNG

SEQ ID NO: 46017 - protein, 7 aa, Artificial sequence
  Protein classification predicting sequence
PEYTDGY

SEQ ID NO: 46018 - protein, 12 aa, Artificial sequence
  Protein classification predicting sequence
PIRGGTDGAQLS

SEQ ID NO: 46019 - protein, 7 aa, Artificial sequence
  Protein classification predicting sequence
YESFNAA

SEQ ID NO: 46020 - protein, 25 aa, Artificial sequence
  Protein classification predicting sequence
RGGTDGSQLSYMGLPTPNIFTGGEN

SEQ ID NO: 46021 - protein, 7 aa, Artificial sequence
  Protein classification predicting sequence
PQIVENY

SEQ ID NO: 46022 - protein, 9 aa, Artificial sequence
  Protein classification predicting sequence
CHGVNVHPG

SEQ ID NO: 46023 - protein, 9 aa, Artificial sequence
  Protein classification predicting sequence
YVSLDTQSK

SEQ ID NO: 46024 - protein, 15 aa, Artificial sequence
  Protein classification predicting sequence
GVRQVPSTEGQWKLL

SEQ ID NO: 46025 - protein, 16 aa, Artificial sequence
  Protein classification predicting sequence
TLSEKGTLMATLPANV

SEQ ID NO: 46026 - protein, 17 aa, Artificial sequence
  Protein classification predicting sequence
GDIPAIGFISHVDTSPD

SEQ ID NO: 46027 - protein, 7 aa, Artificial sequence
  Protein classification predicting sequence
HVDTSPD

SEQ ID NO: 46028 - protein, 18 aa, Artificial sequence
  Protein classification predicting sequence
VAFTPDEEVGKGAKHFDV

SEQ ID NO: 46029 - protein, 17 aa, Artificial sequence
  Protein classification predicting sequence
TEGYEGFYHLASMKGTV

SEQ ID NO: 46030 - protein, 63 aa, Artificial sequence
  Protein classification predicting sequence
DFDRKQFEARKRKMMEIAKKVGKGLHPDCYIELVIEDSYYNMREKVVEHPHILDIAQQAMRDC

SEQ ID NO: 46031 - protein, 55 aa, Artificial sequence
  Protein classification predicting sequence
KPIRGGTDGAQLSFMGLPCPNLFTGGYNYHGKHEFVTLEGMEKAVQVIVRIAELT

SEQ ID NO: 46032 - protein, 59 aa, Artificial sequence
  Protein classification predicting sequence
WAYTVDGGGVGELEFENFNAASVNIKIVGNNVHPGTAKGVMVNALSLAARIHAEVPADE

SEQ ID NO: 46033 - protein, 7 aa, Artificial sequence
  Protein classification predicting sequence
STTTPST

SEQ ID NO: 46034 - protein, 7 aa, Artificial sequence
  Protein classification predicting sequence
LLGADDK

SEQ ID NO: 46035 - protein, 9 aa, Artificial sequence
  Protein classification predicting sequence
PIRGGTDGS

SEQ ID NO: 46036 - protein, 7 aa, Artificial sequence
  Protein classification predicting sequence
MGLPTPN

SEQ ID NO: 46037 - protein, 10 aa, Artificial sequence
  Protein classification predicting sequence
FALTILKPEM

SEQ ID NO: 46038 - protein, 7 aa, Artificial sequence
  Protein classification predicting sequence
FPNLNNY

SEQ ID NO: 46039 - protein, 8 aa, Artificial sequence
  Protein classification predicting sequence
FGPDEEIG

SEQ ID NO: 46040 - protein, 16 aa, Artificial sequence
  Protein classification predicting sequence
DGGPLGELQYETFSAA

SEQ ID NO: 46041 - protein, 6 aa, Artificial sequence
  Protein classification predicting sequence
YIIRDF

SEQ ID NO: 46042 - protein, 8 aa, Artificial sequence
  Protein classification predicting sequence
RAVDVIIG

SEQ ID NO: 46043 - protein, 8 aa, Artificial sequence
  Protein classification predicting sequence
YVKVNTRS

SEQ ID NO: 46044 - protein, 8 aa, Artificial sequence
  Protein classification predicting sequence
GYQGFYHL

SEQ ID NO: 46045 - protein, 8 aa, Artificial sequence
  Protein classification predicting sequence
LTRKIGFI

SEQ ID NO: 46046 - protein, 9 aa, Artificial sequence
  Protein classification predicting sequence
GQTLITTDG

SEQ ID NO: 46047 - protein, 29 aa, Artificial sequence
  Protein classification predicting sequence
GQTLITTDGTTLLGADDKSGIAEIMTAIE

SEQ ID NO: 46048 - protein, 6 aa, Artificial sequence
  Protein classification predicting sequence
HPEIKH

SEQ ID NO: 46049 - protein, 14 aa, Artificial sequence
  Protein classification predicting sequence
VEEARASYIIRDFE

SEQ ID NO: 46050 - protein, 17 aa, Artificial sequence
  Protein classification predicting sequence
IEPIRGGTDGSKISFMG

SEQ ID NO: 46051 - protein, 11 aa, Artificial sequence
  Protein classification predicting sequence
VKPQIIENYDG

SEQ ID NO: 46052 - protein, 11 aa, Artificial sequence
  Protein classification predicting sequence
TLLGADDKAGI

SEQ ID NO: 46053 - protein, 7 aa, Artificial sequence
  Protein classification predicting sequence
GGDIALG

SEQ ID NO: 46054 - protein, 6 aa, Artificial sequence
  Protein classification predicting sequence
EGFFHL

SEQ ID NO: 46055 - protein, 6 aa, Artificial sequence
  Protein classification predicting sequence
YYNMRE

SEQ ID NO: 46056 - protein, 27 aa, Artificial sequence
  Protein classification predicting sequence
IKPIRGGTDGARLSFMGLPCPNIFTGG

SEQ ID NO: 46057 - protein, 7 aa, Artificial sequence
  Protein classification predicting sequence
PNIFTGG

SEQ ID NO: 46058 - protein, 7 aa, Artificial sequence
  Protein classification predicting sequence
TLITTDG

SEQ ID NO: 46059 - protein, 7 aa, Artificial sequence
  Protein classification predicting sequence
AFTPDEE

SEQ ID NO: 46060 - protein, 12 aa, Artificial sequence
  Protein classification predicting sequence
AFTPDEEVGKGA

SEQ ID NO: 46061 - protein, 11 aa, Artificial sequence
  Protein classification predicting sequence
IKIVGNNVHPG

SEQ ID NO: 46062 - protein, 12 aa, Artificial sequence
  Protein classification predicting sequence
AKGVMVNALSLA

SEQ ID NO: 46063 - protein, 7 aa, Artificial sequence
  Protein classification predicting sequence
KGTVERA

SEQ ID NO: 46064 - protein, 6 aa, Artificial sequence
  Protein classification predicting sequence
FTGGYN

SEQ ID NO: 46065 - protein, 13 aa, Artificial sequence
  Protein classification predicting sequence
FTGGYNYHGKHEF

SEQ ID NO: 46066 - protein, 9 aa, Artificial sequence
  Protein classification predicting sequence
TLEGMEKAV

SEQ ID NO: 46067 - protein, 6 aa, Artificial sequence
  Protein classification predicting sequence
DWNVKP

SEQ ID NO: 46068 - protein, 7 aa, Artificial sequence
  Protein classification predicting sequence
HLFLHQG

SEQ ID NO: 46069 - protein, 6 aa, Artificial sequence
  Protein classification predicting sequence
FFNGKS

SEQ ID NO: 46070 - protein, 8 aa, Artificial sequence
  Protein classification predicting sequence
ATTGVDGL

SEQ ID NO: 46071 - protein, 8 aa, Artificial sequence
  Protein classification predicting sequence
HGLQDWNV

SEQ ID NO: 46072 - protein, 6 aa, Artificial sequence
  Protein classification predicting sequence
WQSIDF

SEQ ID NO: 46073 - protein, 6 aa, Artificial sequence
  Protein classification predicting sequence
LQPTIY

SEQ ID NO: 46074 - protein, 8 aa, Artificial sequence
  Protein classification predicting sequence
ATTGVEGL

SEQ ID NO: 46075 - protein, 10 aa, Artificial sequence
  Protein classification predicting sequence
NDYFLARGFA

SEQ ID NO: 46076 - protein, 12 aa, Artificial sequence
  Protein classification predicting sequence
YHFFNGKSLATF

SEQ ID NO: 46077 - protein, 7 aa, Artificial sequence
  Protein classification predicting sequence
KVNIIRP

SEQ ID NO: 46078 - protein, 6 aa, Artificial sequence
  Protein classification predicting sequence
SPYHQG

SEQ ID NO: 46079 - protein, 7 aa, Artificial sequence
  Protein classification predicting sequence
YVSGVGT

SEQ ID NO: 46080 - protein, 7 aa, Artificial sequence
  Protein classification predicting sequence
SYLGTMS

SEQ ID NO: 46081 - protein, 9 aa, Artificial sequence
  Protein classification predicting sequence
SPGGYPGED

SEQ ID NO: 46082 - protein, 12 aa, Artificial sequence
  Protein classification predicting sequence
KHLFFHNGAHVY

SEQ ID NO: 46083 - protein, 11 aa, Artificial sequence
  Protein classification predicting sequence
LNLQNRTDLLT

SEQ ID NO: 46084 - protein, 7 aa, Artificial sequence
  Protein classification predicting sequence
TDLLTFF

SEQ ID NO: 46085 - protein, 20 aa, Artificial sequence
  Protein classification predicting sequence
PLDTDQDGQLDLIKVNIIRP

SEQ ID NO: 46086 - protein, 8 aa, Artificial sequence
  Protein classification predicting sequence
VANDKKLY

SEQ ID NO: 46087 - protein, 6 aa, Artificial sequence
  Protein classification predicting sequence
LNDYFL

SEQ ID NO: 46088 - protein, 11 aa, Artificial sequence
  Protein classification predicting sequence
IIAESAISSWY

SEQ ID NO: 46089 - protein, 32 aa, Artificial sequence
  Protein classification predicting sequence
YYRENGLVCSPGGYPGEDLDVLTELTYSRNLL

SEQ ID NO: 46090 - protein, 8 aa, Artificial sequence
  Protein classification predicting sequence
VKSSENKG

SEQ ID NO: 46091 - protein, 9 aa, Artificial sequence
  Protein classification predicting sequence
LEKGDTLRV

SEQ ID NO: 46092 - protein, 9 aa, Artificial sequence
  Protein classification predicting sequence
LYTTDFEHT

SEQ ID NO: 46093 - protein, 9 aa, Artificial sequence
  Protein classification predicting sequence
FNGKSLATF

SEQ ID NO: 46094 - protein, 10 aa, Artificial sequence
  Protein classification predicting sequence
VYVEAPLDTD

SEQ ID NO: 46095 - protein, 10 aa, Artificial sequence
  Protein classification predicting sequence
YVSGVGTKDS

SEQ ID NO: 46096 - protein, 11 aa, Artificial sequence
  Protein classification predicting sequence
SIDNGQNFSRE

SEQ ID NO: 46097 - protein, 7 aa, Artificial sequence
  Protein classification predicting sequence
LYTTDFE

SEQ ID NO: 46098 - protein, 267 aa, Artificial sequence
  Protein classification predicting sequence
LESFLRKLFFHYPDSDYPLSHLIAKNDMDALSFFQSEQELSKEVFDLLALQVLGFIPGVDFTEADAFLDKLAFPIHFDETEIIKHIHHLLATRCKSGMTLIDDLVSQGMLTMDNDYHFFNGKSLATFDTSQLIREVVYVEAPLDTDQDGQLDLIKVNIIRPQSQKPLPTLMTPSPYHQGINEVANDKKLYRMEKELVVKKRRQITVEDRDFIPLETQPCKLPIGQNLESFSYINSYSLNDYFLARGFANIYVSGVGTAGSTGFMTSG

SEQ ID NO: 46099 - protein, 8 aa, Artificial sequence
  Protein classification predicting sequence
YYRENGLV

SEQ ID NO: 46100 - protein, 7 aa, Artificial sequence
  Protein classification predicting sequence
NQFSYIP

SEQ ID NO: 46101 - protein, 8 aa, Artificial sequence
  Protein classification predicting sequence
GFMTSGDY

SEQ ID NO: 46102 - protein, 7 aa, Artificial sequence
  Protein classification predicting sequence
YYRENGL

SEQ ID NO: 46103 - protein, 14 aa, Artificial sequence
  Protein classification predicting sequence
VVFTHGSQDWNVKP

SEQ ID NO: 46104 - protein, 7 aa, Artificial sequence
  Protein classification predicting sequence
CQKLLGL

SEQ ID NO: 46105 - protein, 7 aa, Artificial sequence
  Protein classification predicting sequence
GTTLDLT

SEQ ID NO: 46106 - protein, 14 aa, Artificial sequence
  Protein classification predicting sequence
VIFSGETTFGYKEW

SEQ ID NO: 46107 - protein, 8 aa, Artificial sequence
  Protein classification predicting sequence
GPLISVSG

SEQ ID NO: 46108 - protein, 8 aa, Artificial sequence
  Protein classification predicting sequence
VTYKDITL

SEQ ID NO: 46109 - protein, 7 aa, Artificial sequence
  Protein classification predicting sequence
IAKYGIV

SEQ ID NO: 46110 - protein, 8 aa, Artificial sequence
  Protein classification predicting sequence
GGKTSSKC

SEQ ID NO: 46111 - protein, 6 aa, Artificial sequence
  Protein classification predicting sequence
CTFTSA

SEQ ID NO: 46112 - protein, 5 aa, Artificial sequence
  Protein classification predicting sequence
NQDDC

SEQ ID NO: 46113 - protein, 8 aa, Artificial sequence
  Protein classification predicting sequence
TTFGYKEW

SEQ ID NO: 46114 - protein, 6 aa, Artificial sequence
  Protein classification predicting sequence
GSRWWD

SEQ ID NO: 46115 - protein, 13 aa, Artificial sequence
  Protein classification predicting sequence
NGGKTKPKFFYAH

SEQ ID NO: 46116 - protein, 7 aa, Artificial sequence
  Protein classification predicting sequence
NQDDCLA

SEQ ID NO: 46117 - protein, 6 aa, Artificial sequence
  Protein classification predicting sequence
PTGKPT

SEQ ID NO: 46118 - protein, 9 aa, Artificial sequence
  Protein classification predicting sequence
VPAGETLDL

SEQ ID NO: 46119 - protein, 8 aa, Artificial sequence
  Protein classification predicting sequence
NTPVQGFS

SEQ ID NO: 46120 - protein, 8 aa, Artificial sequence
  Protein classification predicting sequence
GHGLSIGS

SEQ ID NO: 46121 - protein, 11 aa, Artificial sequence
  Protein classification predicting sequence
NQDDCLAINSG

SEQ ID NO: 46122 - protein, 15 aa, Artificial sequence
  Protein classification predicting sequence
CSGGHGLSIGSVGGR

SEQ ID NO: 46123 - protein, 13 aa, Artificial sequence
  Protein classification predicting sequence
GGHGLSIGSVGGR

SEQ ID NO: 46124 - protein, 13 aa, Artificial sequence
  Protein classification predicting sequence
VIEQDYENGSPTG

SEQ ID NO: 46125 - protein, 8 aa, Artificial sequence
  Protein classification predicting sequence
KPKFFYAH

SEQ ID NO: 46126 - protein, 9 aa, Artificial sequence
  Protein classification predicting sequence
LDSSSITGL

SEQ ID NO: 46127 - protein, 11 aa, Artificial sequence
  Protein classification predicting sequence
GGHGLSIGSVG

SEQ ID NO: 46128 - protein, 15 aa, Artificial sequence
  Protein classification predicting sequence
TLDLTGLNDGTTVIF

SEQ ID NO: 46129 - protein, 11 aa, Artificial sequence
  Protein classification predicting sequence
VAVPSGTTLDL

SEQ ID NO: 46130 - protein, 7 aa, Artificial sequence
  Protein classification predicting sequence
GETTFGY

SEQ ID NO: 46131 - protein, 9 aa, Artificial sequence
  Protein classification predicting sequence
NGGKTKPKF

SEQ ID NO: 46132 - protein, 10 aa, Artificial sequence
  Protein classification predicting sequence
RIKTWQGGSG

SEQ ID NO: 46133 - protein, 22 aa, Artificial sequence
  Protein classification predicting sequence
TTFGYKEWEGPLISVSGTNIKV

SEQ ID NO: 46134 - protein, 6 aa, Artificial sequence
  Protein classification predicting sequence
WWDGKG

SEQ ID NO: 46135 - protein, 7 aa, Artificial sequence
  Protein classification predicting sequence
HNTDAFD

SEQ ID NO: 46136 - protein, 6 aa, Artificial sequence
  Protein classification predicting sequence
CSGGHG

SEQ ID NO: 46137 - protein, 7 aa, Artificial sequence
  Protein classification predicting sequence
VVNSQNG

SEQ ID NO: 46138 - protein, 6 aa, Artificial sequence
  Protein classification predicting sequence
FGYKEW

SEQ ID NO: 46139 - protein, 7 aa, Artificial sequence
  Protein classification predicting sequence
KTSCSTI

SEQ ID NO: 46140 - protein, 9 aa, Artificial sequence
  Protein classification predicting sequence
GPLVSVSGT

SEQ ID NO: 46141 - protein, 9 aa, Artificial sequence
  Protein classification predicting sequence
WSGVSITGG

SEQ ID NO: 46142 - protein, 7 aa, Artificial sequence
  Protein classification predicting sequence
FEGTTTF

SEQ ID NO: 46143 - protein, 6 aa, Artificial sequence
  Protein classification predicting sequence
NTDGFD

SEQ ID NO: 46144 - protein, 6 aa, Artificial sequence
  Protein classification predicting sequence
FDVGSS

SEQ ID NO: 46145 - protein, 7 aa, Artificial sequence
  Protein classification predicting sequence
DIDGTIT

SEQ ID NO: 46146 - protein, 8 aa, Artificial sequence
  Protein classification predicting sequence
KKPWINKG

SEQ ID NO: 46147 - protein, 12 aa, Artificial sequence
  Protein classification predicting sequence
DIGYNFLIGGDG

SEQ ID NO: 46148 - protein, 9 aa, Artificial sequence
  Protein classification predicting sequence
QVLLVGAPT

SEQ ID NO: 46149 - protein, 8 aa, Artificial sequence
  Protein classification predicting sequence
GLGFRVPC

SEQ ID NO: 46150 - protein, 10 aa, Artificial sequence
  Protein classification predicting sequence
IEKAYGAGPC

SEQ ID NO: 46151 - protein, 8 aa, Artificial sequence
  Protein classification predicting sequence
GWNPMTQA

SEQ ID NO: 46152 - protein, 10 aa, Artificial sequence
  Protein classification predicting sequence
QDHFWDPDTD

SEQ ID NO: 46153 - protein, 11 aa, Artificial sequence
  Protein classification predicting sequence
NPAVWEKTALI

SEQ ID NO: 46154 - protein, 7 aa, Artificial sequence
  Protein classification predicting sequence
FDHTSQL

SEQ ID NO: 46155 - protein, 8 aa, Artificial sequence
  Protein classification predicting sequence
HQDAYQAG

SEQ ID NO: 46156 - protein, 14 aa, Artificial sequence
  Protein classification predicting sequence
AGDFGGDVLSQFEF

SEQ ID NO: 46157 - protein, 6 aa, Artificial sequence
  Protein classification predicting sequence
GSPTWK

SEQ ID NO: 46158 - protein, 10 aa, Artificial sequence
  Protein classification predicting sequence
THWTPFLNAS

SEQ ID NO: 46159 - protein, 12 aa, Artificial sequence
  Protein classification predicting sequence
PDLAVGAPSVGS

SEQ ID NO: 46160 - protein, 6 aa, Artificial sequence
  Protein classification predicting sequence
ILADEP

SEQ ID NO: 46161 - protein, 12 aa, Artificial sequence
  Protein classification predicting sequence
ILADEPIASLDP

SEQ ID NO: 46162 - protein, 16 aa, Artificial sequence
  Protein classification predicting sequence
ILADEPIASLDPESAR

SEQ ID NO: 46163 - protein, 7 aa, Artificial sequence
  Protein classification predicting sequence
LERVNIL

SEQ ID NO: 46164 - protein, 20 aa, Artificial sequence
  Protein classification predicting sequence
LSGGQQQRVSIARALAQEAK

SEQ ID NO: 46165 - protein, 9 aa, Artificial sequence
  Protein classification predicting sequence
TTKQVMDDL

SEQ ID NO: 46166 - protein, 9 aa, Artificial sequence
  Protein classification predicting sequence
INLHFVDLA

SEQ ID NO: 46167 - protein, 8 aa, Artificial sequence
  Protein classification predicting sequence
YATRIIGL

SEQ ID NO: 46168 - protein, 6 aa, Artificial sequence
  Protein classification predicting sequence
NLVKRS

SEQ ID NO: 46169 - protein, 8 aa, Artificial sequence
  Protein classification predicting sequence
ITTIVNLH

SEQ ID NO: 46170 - protein, 6 aa, Artificial sequence
  Protein classification predicting sequence
LADEPV

SEQ ID NO: 46171 - protein, 9 aa, Artificial sequence
  Protein classification predicting sequence
RADELSGGQ

SEQ ID NO: 46172 - protein, 12 aa, Artificial sequence
  Protein classification predicting sequence
TVVVTLHQVDYA

SEQ ID NO: 46173 - protein, 11 aa, Artificial sequence
  Protein classification predicting sequence
LADEPVASLDP

SEQ ID NO: 46174 - protein, 7 aa, Artificial sequence
  Protein classification predicting sequence
IEFKNVS

SEQ ID NO: 46175 - protein, 6 aa, Artificial sequence
  Protein classification predicting sequence
GRVGYH

SEQ ID NO: 46176 - protein, 8 aa, Artificial sequence
  Protein classification predicting sequence
LGLFPKED

SEQ ID NO: 46177 - protein, 12 aa, Artificial sequence
  Protein classification predicting sequence
VGLSGAGKSTLL

SEQ ID NO: 46178 - protein, 16 aa, Artificial sequence
  Protein classification predicting sequence
SVNRLHEITEGEIMIE

SEQ ID NO: 46179 - protein, 9 aa, Artificial sequence
  Protein classification predicting sequence
ESITAAKGK

SEQ ID NO: 46180 - protein, 24 aa, Artificial sequence
  Protein classification predicting sequence
LARQYATRIIGLHAGEIVFDGLVE

SEQ ID NO: 46181 - protein, 8 aa, Artificial sequence
  Protein classification predicting sequence
YPNGTKGL

SEQ ID NO: 46182 - protein, 7 aa, Artificial sequence
  Protein classification predicting sequence
FNLVKRS

SEQ ID NO: 46183 - protein, 11 aa, Artificial sequence
  Protein classification predicting sequence
ASLDPLTTKQV

SEQ ID NO: 46184 - protein, 8 aa, Artificial sequence
  Protein classification predicting sequence
MIFQHFNL

SEQ ID NO: 46185 - protein, 8 aa, Artificial sequence
  Protein classification predicting sequence
RRMRRDIG

SEQ ID NO: 46186 - protein, 6 aa, Artificial sequence
  Protein classification predicting sequence
QQFNLV

SEQ ID NO: 46187 - protein, 16 aa, Artificial sequence
  Protein classification predicting sequence
TVVVTLHQVDYALRYC

SEQ ID NO: 46188 - protein, 7 aa, Artificial sequence
  Protein classification predicting sequence
IDLARQY

SEQ ID NO: 46189 - protein, 8 aa, Artificial sequence
  Protein classification predicting sequence
VSKVYPNG

SEQ ID NO: 46190 - protein, 13 aa, Artificial sequence
  Protein classification predicting sequence
VSKVYPNGHVGLK

SEQ ID NO: 46191 - protein, 8 aa, Artificial sequence
  Protein classification predicting sequence
INLNIEKG

SEQ ID NO: 46192 - protein, 25 aa, Artificial sequence
  Protein classification predicting sequence
FAVIVGLSGAGKSTLLRSVNRLHDI

SEQ ID NO: 46193 - protein, 18 aa, Artificial sequence
  Protein classification predicting sequence
VLRNVLSGRVGYHPTWKM

SEQ ID NO: 46194 - protein, 12 aa, Artificial sequence
  Protein classification predicting sequence
DALERVNILDKY

SEQ ID NO: 46195 - protein, 18 aa, Artificial sequence
  Protein classification predicting sequence
LSGGQQQRISIARALCQE

SEQ ID NO: 46196 - protein, 20 aa, Artificial sequence
  Protein classification predicting sequence
ELGITILINLHFVDLAKEYG

SEQ ID NO: 46197 - protein, 9 aa, Artificial sequence
  Protein classification predicting sequence
RCINRLIEP

SEQ ID NO: 46198 - protein, 9 aa, Artificial sequence
  Protein classification predicting sequence
LMDMCSFDT

SEQ ID NO: 46199 - protein, 10 aa, Artificial sequence
  Protein classification predicting sequence
NDRVVPLHGC

SEQ ID NO: 46200 - protein, 8 aa, Artificial sequence
  Protein classification predicting sequence
VNSGIKFY

SEQ ID NO: 46201 - protein, 9 aa, Artificial sequence
  Protein classification predicting sequence
VRVLVNDRV

SEQ ID NO: 46202 - protein, 7 aa, Artificial sequence
  Protein classification predicting sequence
SSHNTYL

SEQ ID NO: 46203 - protein, 10 aa, Artificial sequence
  Protein classification predicting sequence
SPYPVILSLE

SEQ ID NO: 46204 - protein, 10 aa, Artificial sequence
  Protein classification predicting sequence
VFGGSWGSTL

SEQ ID NO: 46205 - protein, 14 aa, Artificial sequence
  Protein classification predicting sequence
VFGGSWGSTLALAY

SEQ ID NO: 46206 - protein, 9 aa, Artificial sequence
  Protein classification predicting sequence
SGGGYRAML

SEQ ID NO: 46207 - protein, 14 aa, Artificial sequence
  Protein classification predicting sequence
SGGGYRAMLSGAGM

SEQ ID NO: 46208 - protein, 6 aa, Artificial sequence
  Protein classification predicting sequence
PTFFGC

SEQ ID NO: 46209 - protein, 7 aa, Artificial sequence
  Protein classification predicting sequence
WGRALSY

SEQ ID NO: 46210 - protein, 7 aa, Artificial sequence
  Protein classification predicting sequence
LFNQFLL

SEQ ID NO: 46211 - protein, 12 aa, Artificial sequence
  Protein classification predicting sequence
CFTNYCWNGTID

SEQ ID NO: 46212 - protein, 8 aa, Artificial sequence
  Protein classification predicting sequence
DGGEDGQN

SEQ ID NO: 46213 - protein, 10 aa, Artificial sequence
  Protein classification predicting sequence
AMDNRTDGAN

SEQ ID NO: 46214 - protein, 7 aa, Artificial sequence
  Protein classification predicting sequence
LVDGGED

SEQ ID NO: 46215 - protein, 7 aa, Artificial sequence
  Protein classification predicting sequence
DCWDGPN

SEQ ID NO: 46216 - protein, 10 aa, Artificial sequence
  Protein classification predicting sequence
RCWEDIFDAI

SEQ ID NO: 46217 - protein, 7 aa, Artificial sequence
  Protein classification predicting sequence
YNFEQRW

SEQ ID NO: 46218 - protein, 6 aa, Artificial sequence
  Protein classification predicting sequence
TMQMMY

SEQ ID NO: 46219 - protein, 7 aa, Artificial sequence
  Protein classification predicting sequence
LYQDAHV

SEQ ID NO: 46220 - protein, 9 aa, Artificial sequence
  Protein classification predicting sequence
DLCDGRYDT

SEQ ID NO: 46221 - protein, 8 aa, Artificial sequence
  Protein classification predicting sequence
AGLVSGKD

SEQ ID NO: 46222 - protein, 13 aa, Artificial sequence
  Protein classification predicting sequence
FIYIENQYFLGSS

SEQ ID NO: 46223 - protein, 10 aa, Artificial sequence
  Protein classification predicting sequence
HHDDFHQPNF

SEQ ID NO: 46224 - protein, 9 aa, Artificial sequence
  Protein classification predicting sequence
ALHLIPKEL

SEQ ID NO: 46225 - protein, 7 aa, Artificial sequence
  Protein classification predicting sequence
YPIGVAS

SEQ ID NO: 46226 - protein, 19 aa, Artificial sequence
  Protein classification predicting sequence
IFTVKDDNPIGATLIGRAY

SEQ ID NO: 46227 - protein, 9 aa, Artificial sequence
  Protein classification predicting sequence
YEPHRCWED

SEQ ID NO: 46228 - protein, 9 aa, Artificial sequence
  Protein classification predicting sequence
FDAITNAKH

SEQ ID NO: 46229 - protein, 6 aa, Artificial sequence
  Protein classification predicting sequence
VHCVLC

SEQ ID NO: 46230 - protein, 7 aa, Artificial sequence
  Protein classification predicting sequence
IIPPSPV

SEQ ID NO: 46231 - protein, 10 aa, Artificial sequence
  Protein classification predicting sequence
WNVQLFRSID

SEQ ID NO: 46232 - protein, 12 aa, Artificial sequence
  Protein classification predicting sequence
RSIQDAYIHAIR

SEQ ID NO: 46233 - protein, 7 aa, Artificial sequence
  Protein classification predicting sequence
RFTVYVV

SEQ ID NO: 46234 - protein, 7 aa, Artificial sequence
  Protein classification predicting sequence
DSEIAMG

SEQ ID NO: 46235 - protein, 6 aa, Artificial sequence
  Protein classification predicting sequence
WVEILD

SEQ ID NO: 46236 - protein, 8 aa, Artificial sequence
  Protein classification predicting sequence
DLCDGRYD

SEQ ID NO: 46237 - protein, 14 aa, Artificial sequence
  Protein classification predicting sequence
WNVQLFRSIDGGAA

SEQ ID NO: 46238 - protein, 8 aa, Artificial sequence
  Protein classification predicting sequence
AGERFTVY

SEQ ID NO: 46239 - protein, 7 aa, Artificial sequence
  Protein classification predicting sequence
RTMEMMY

SEQ ID NO: 46240 - protein, 26 aa, Artificial sequence
  Protein classification predicting sequence
SFVGGIDLCDGRYDTPFHSLFRTLDT

SEQ ID NO: 46241 - protein, 6 aa, Artificial sequence
  Protein classification predicting sequence
YLTFFC

SEQ ID NO: 46242 - protein, 8 aa, Artificial sequence
  Protein classification predicting sequence
RRFMIYVH

SEQ ID NO: 46243 - protein, 11 aa, Artificial sequence
  Protein classification predicting sequence
KMMIVDDEYII

SEQ ID NO: 46244 - protein, 21 aa, Artificial sequence
  Protein classification predicting sequence
GSANINQRSMDGARDSEIAMG

SEQ ID NO: 46245 - protein, 14 aa, Artificial sequence
  Protein classification predicting sequence
LWYEHLGMLDETFL

SEQ ID NO: 46246 - protein, 7 aa, Artificial sequence
  Protein classification predicting sequence
FPDTKAR

SEQ ID NO: 46247 - protein, 7 aa, Artificial sequence
  Protein classification predicting sequence
RDSRRPK

SEQ ID NO: 46248 - protein, 9 aa, Artificial sequence
  Protein classification predicting sequence
SVQAILDWQ

SEQ ID NO: 46249 - protein, 6 aa, Artificial sequence
  Protein classification predicting sequence
QPARGQ

SEQ ID NO: 46250 - protein, 14 aa, Artificial sequence
  Protein classification predicting sequence
GFRMSLWYEHLGML

SEQ ID NO: 46251 - protein, 9 aa, Artificial sequence
  Protein classification predicting sequence
LHATIYEVD

SEQ ID NO: 46252 - protein, 13 aa, Artificial sequence
  Protein classification predicting sequence
GCKVSLYQDAHIP

SEQ ID NO: 46253 - protein, 17 aa, Artificial sequence
  Protein classification predicting sequence
IDRSIQDAYIHAIRRAK

SEQ ID NO: 46254 - protein, 7 aa, Artificial sequence
  Protein classification predicting sequence
LYATIDL

SEQ ID NO: 46255 - protein, 7 aa, Artificial sequence
  Protein classification predicting sequence
ARVGRTR

SEQ ID NO: 46256 - protein, 6 aa, Artificial sequence
  Protein classification predicting sequence
NPRWYE

SEQ ID NO: 46257 - protein, 7 aa, Artificial sequence
  Protein classification predicting sequence
PIGATLI

SEQ ID NO: 46258 - protein, 11 aa, Artificial sequence
  Protein classification predicting sequence
PGVPYTFFSQR

SEQ ID NO: 46259 - protein, 5 aa, Artificial sequence
  Protein classification predicting sequence
RCWED

SEQ ID NO: 46260 - protein, 7 aa, Artificial sequence
  Protein classification predicting sequence
TLGELLK

SEQ ID NO: 46261 - protein, 9 aa, Artificial sequence
  Protein classification predicting sequence
LVWDDRTSV

SEQ ID NO: 46262 - protein, 8 aa, Artificial sequence
  Protein classification predicting sequence
RRIVSFVG

SEQ ID NO: 46263 - protein, 15 aa, Artificial sequence
  Protein classification predicting sequence
IDRSIQDAYIHAIRR

SEQ ID NO: 46264 - protein, 8 aa, Artificial sequence
  Protein classification predicting sequence
KIEAGERF

SEQ ID NO: 46265 - protein, 6 aa, Artificial sequence
  Protein classification predicting sequence
PMWPEG

SEQ ID NO: 46266 - protein, 7 aa, Artificial sequence
  Protein classification predicting sequence
HGNLDIW

SEQ ID NO: 46267 - protein, 6 aa, Artificial sequence
  Protein classification predicting sequence
DDFHNP

SEQ ID NO: 46268 - protein, 7 aa, Artificial sequence
  Protein classification predicting sequence
PREPWHD

SEQ ID NO: 46269 - protein, 21 aa, Artificial sequence
  Protein classification predicting sequence
PREPWHDLHSKIDGPAAYDVL

SEQ ID NO: 46270 - protein, 6 aa, Artificial sequence
  Protein classification predicting sequence
NFEERW

SEQ ID NO: 46271 - protein, 10 aa, Artificial sequence
  Protein classification predicting sequence
QRILYWQHKT

SEQ ID NO: 46272 - protein, 12 aa, Artificial sequence
  Protein classification predicting sequence
YVHSKGMVVDDE

SEQ ID NO: 46273 - protein, 8 aa, Artificial sequence
  Protein classification predicting sequence
GHLLKYPV

SEQ ID NO: 46274 - protein, 10 aa, Artificial sequence
  Protein classification predicting sequence
GVPGTYFPLR

SEQ ID NO: 46275 - protein, 5 aa, Artificial sequence
  Protein classification predicting sequence
LVWDD

SEQ ID NO: 46276 - protein, 9 aa, Artificial sequence
  Protein classification predicting sequence
DEETRRFFK

SEQ ID NO: 46277 - protein, 10 aa, Artificial sequence
  Protein classification predicting sequence
SSVQVLLCPR

SEQ ID NO: 46278 - protein, 15 aa, Artificial sequence
  Protein classification predicting sequence
NRRKIVAFVGGLDLC

SEQ ID NO: 46279 - protein, 7 aa, Artificial sequence
  Protein classification predicting sequence
HGKCWED

SEQ ID NO: 46280 - protein, 10 aa, Artificial sequence
  Protein classification predicting sequence
IDGPAAYDVL

SEQ ID NO: 46281 - protein, 7 aa, Artificial sequence
  Protein classification predicting sequence
SVKGFPK

SEQ ID NO: 46282 - protein, 19 aa, Artificial sequence
  Protein classification predicting sequence
IRSAQHFIYIENQYFLGSS

SEQ ID NO: 46283 - protein, 6 aa, Artificial sequence
  Protein classification predicting sequence
NLIPME

SEQ ID NO: 46284 - protein, 7 aa, Artificial sequence
  Protein classification predicting sequence
LKIVSKI

SEQ ID NO: 46285 - protein, 7 aa, Artificial sequence
  Protein classification predicting sequence
RFMIYVH

SEQ ID NO: 46286 - protein, 7 aa, Artificial sequence
  Protein classification predicting sequence
MIVDDEY

SEQ ID NO: 46287 - protein, 6 aa, Artificial sequence
  Protein classification predicting sequence
LYQDAH

SEQ ID NO: 46288 - protein, 6 aa, Artificial sequence
  Protein classification predicting sequence
NFEQRW

SEQ ID NO: 46289 - protein, 9 aa, Artificial sequence
  Protein classification predicting sequence
FIYIENQYF

SEQ ID NO: 46290 - protein, 10 aa, Artificial sequence
  Protein classification predicting sequence
YIVIPMWPEG

SEQ ID NO: 46291 - protein, 7 aa, Artificial sequence
  Protein classification predicting sequence
AKHLIYI

SEQ ID NO: 46292 - protein, 8 aa, Artificial sequence
  Protein classification predicting sequence
LVWDDRTS

SEQ ID NO: 46293 - protein, 7 aa, Artificial sequence
  Protein classification predicting sequence
DFHQPNF

SEQ ID NO: 46294 - protein, 12 aa, Artificial sequence
  Protein classification predicting sequence
AWDVLYNFEQRW

SEQ ID NO: 46295 - protein, 7 aa, Artificial sequence
  Protein classification predicting sequence
RSIQDAY

SEQ ID NO: 46296 - protein, 11 aa, Artificial sequence
  Protein classification predicting sequence
FQYHSKEQQCV

SEQ ID NO: 46297 - protein, 9 aa, Artificial sequence
  Protein classification predicting sequence
CMHCSGENY

SEQ ID NO: 46298 - protein, 9 aa, Artificial sequence
  Protein classification predicting sequence
LEENYCRNP

SEQ ID NO: 46299 - protein, 7 aa, Artificial sequence
  Protein classification predicting sequence
CNLKKCS

SEQ ID NO: 46300 - protein, 7 aa, Artificial sequence
  Protein classification predicting sequence
VIPACLP

SEQ ID NO: 46301 - protein, 11 aa, Artificial sequence
  Protein classification predicting sequence
LPVIENKVCNR

SEQ ID NO: 46302 - protein, 6 aa, Artificial sequence
  Protein classification predicting sequence
TCQKWS

SEQ ID NO: 46303 - protein, 6 aa, Artificial sequence
  Protein classification predicting sequence
PWCFTT

SEQ ID NO: 46304 - protein, 9 aa, Artificial sequence
  Protein classification predicting sequence
TTDPSVRWE

SEQ ID NO: 46305 - protein, 13 aa, Artificial sequence
  Protein classification predicting sequence
HFCGGTLISPEWV

SEQ ID NO: 46306 - protein, 16 aa, Artificial sequence
  Protein classification predicting sequence
FQYHSKEQQCVIMAEN

SEQ ID NO: 46307 - protein, 8 aa, Artificial sequence
  Protein classification predicting sequence
PWCFTTDP

SEQ ID NO: 46308 - protein, 8 aa, Artificial sequence
  Protein classification predicting sequence
YKVILGAH

SEQ ID NO: 46309 - protein, 12 aa, Artificial sequence
  Protein classification predicting sequence
AGLEKNYCRNPD

SEQ ID NO: 46310 - protein, 16 aa, Artificial sequence
  Protein classification predicting sequence
NYCRNPDGEPRPWCFT

SEQ ID NO: 46311 - protein, 12 aa, Artificial sequence
  Protein classification predicting sequence
QCLKGRGENYRG

SEQ ID NO: 46312 - protein, 10 aa, Artificial sequence
  Protein classification predicting sequence
HNRTPENFPC

SEQ ID NO: 46313 - protein, 7 aa, Artificial sequence
  Protein classification predicting sequence
AQEPHRH

SEQ ID NO: 46314 - protein, 10 aa, Artificial sequence
  Protein classification predicting sequence
LEENYCRNPD

SEQ ID NO: 46315 - protein, 19 aa, Artificial sequence
  Protein classification predicting sequence
CRSFQYHSKEQQCVIMAEN

SEQ ID NO: 46316 - protein, 8 aa, Artificial sequence
  Protein classification predicting sequence
TPVVQECY

SEQ ID NO: 46317 - protein, 6 aa, Artificial sequence
  Protein classification predicting sequence
TPENFP

SEQ ID NO: 46318 - protein, 6 aa, Artificial sequence
  Protein classification predicting sequence
FQYHSK

SEQ ID NO: 46319 - protein, 9 aa, Artificial sequence
  Protein classification predicting sequence
SQSPHAHGY

SEQ ID NO: 46320 - protein, 11 aa, Artificial sequence
  Protein classification predicting sequence
CDIPRCTTPPP

SEQ ID NO: 46321 - protein, 7 aa, Artificial sequence
  Protein classification predicting sequence
WAAQEPH

SEQ ID NO: 46322 - protein, 9 aa, Artificial sequence
  Protein classification predicting sequence
PNYVVADRT

SEQ ID NO: 46323 - protein, 13 aa, Artificial sequence
  Protein classification predicting sequence
WDSQSPHAHGYIP

SEQ ID NO: 46324 - protein, 7 aa, Artificial sequence
  Protein classification predicting sequence
MAIALAN

SEQ ID NO: 46325 - protein, 10 aa, Artificial sequence
  Protein classification predicting sequence
LTGESLPVTK

SEQ ID NO: 46326 - protein, 8 aa, Artificial sequence
  Protein classification predicting sequence
GHFQQVLT

SEQ ID NO: 46327 - protein, 21 aa, Artificial sequence
  Protein classification predicting sequence
NLLVLLIGGIPIAMPTVLSVT

SEQ ID NO: 46328 - protein, 11 aa, Artificial sequence
  Protein classification predicting sequence
VKMITGDQLAI

SEQ ID NO: 46329 - protein, 10 aa, Artificial sequence
  Protein classification predicting sequence
YAVSITIRIV

SEQ ID NO: 46330 - protein, 17 aa, Artificial sequence
  Protein classification predicting sequence
PADARLLEGDPLKIDQS

SEQ ID NO: 46331 - protein, 26 aa, Artificial sequence
  Protein classification predicting sequence
LTGESLPVTKGPGDGVYSGSTCKQGE

SEQ ID NO: 46332 - protein, 9 aa, Artificial sequence
  Protein classification predicting sequence
SGSTCKQGE

SEQ ID NO: 46333 - protein, 21 aa, Artificial sequence
  Protein classification predicting sequence
VLTAIGNFCICSIAVGMIIEI

SEQ ID NO: 46334 - protein, 15 aa, Artificial sequence
  Protein classification predicting sequence
LAAGLEDWVDFGVIC

SEQ ID NO: 46335 - protein, 11 aa, Artificial sequence
  Protein classification predicting sequence
TATGDNTFVGR

SEQ ID NO: 46336 - protein, 16 aa, Artificial sequence
  Protein classification predicting sequence
DLMLTACLAASRKKKG

SEQ ID NO: 46337 - protein, 16 aa, Artificial sequence
  Protein classification predicting sequence
YKVLEFHPFDPVSKKV

SEQ ID NO: 46338 - protein, 7 aa, Artificial sequence
  Protein classification predicting sequence
CVKGAPL

SEQ ID NO: 46339 - protein, 10 aa, Artificial sequence
  Protein classification predicting sequence
LGVARKRGEG

SEQ ID NO: 46340 - protein, 6 aa, Artificial sequence
  Protein classification predicting sequence
DPPRHD

SEQ ID NO: 46341 - protein, 8 aa, Artificial sequence
  Protein classification predicting sequence
VFIAIFAD

SEQ ID NO: 46342 - protein, 14 aa, Artificial sequence
  Protein classification predicting sequence
ISLTENWLIFITRA

SEQ ID NO: 46343 - protein, 12 aa, Artificial sequence
  Protein classification predicting sequence
AQLVATLIAVYA

SEQ ID NO: 46344 - protein, 10 aa, Artificial sequence
  Protein classification predicting sequence
TAFTTKKDYG

SEQ ID NO: 46345 - protein, 7 aa, Artificial sequence
  Protein classification predicting sequence
KLKGLDI

SEQ ID NO: 46346 - protein, 6 aa, Artificial sequence
  Protein classification predicting sequence
YGLNQM

SEQ ID NO: 46347 - protein, 16 aa, Artificial sequence
  Protein classification predicting sequence
LGVARKRGEGHWEILG

SEQ ID NO: 46348 - protein, 12 aa, Artificial sequence
  Protein classification predicting sequence
MPCMDPPRDDTA

SEQ ID NO: 46349 - protein, 7 aa, Artificial sequence
  Protein classification predicting sequence
HPIPEDV

SEQ ID NO: 46350 - protein, 8 aa, Artificial sequence
  Protein classification predicting sequence
KVLRDGKW

SEQ ID NO: 46351 - protein, 7 aa, Artificial sequence
  Protein classification predicting sequence
ENQDAID

SEQ ID NO: 46352 - protein, 7 aa, Artificial sequence
  Protein classification predicting sequence
HFLPFNP

SEQ ID NO: 46353 - protein, 10 aa, Artificial sequence
  Protein classification predicting sequence
DQSALTGESL

SEQ ID NO: 46354 - protein, 8 aa, Artificial sequence
  Protein classification predicting sequence
MPCMDPPR

SEQ ID NO: 46355 - protein, 27 aa, Artificial sequence
  Protein classification predicting sequence
RQLGLGTNIYNAERLGLGGGGDMPGSE

SEQ ID NO: 46356 - protein, 16 aa, Artificial sequence
  Protein classification predicting sequence
DAARSAADIVFLAPGL

SEQ ID NO: 46357 - protein, 17 aa, Artificial sequence
  Protein classification predicting sequence
AIIDALKTSRQIFHRMY

SEQ ID NO: 46358 - protein, 7 aa, Artificial sequence
  Protein classification predicting sequence
NKLEEKK

SEQ ID NO: 46359 - protein, 7 aa, Artificial sequence
  Protein classification predicting sequence
LGVNVKM

SEQ ID NO: 46360 - protein, 31 aa, Artificial sequence
  Protein classification predicting sequence
AQLVATLIAVYANWSFAAIEGIGWGWAGVIW

SEQ ID NO: 46361 - protein, 11 aa, Artificial sequence
  Protein classification predicting sequence
GIGWGWAGVIW

SEQ ID NO: 46362 - protein, 9 aa, Artificial sequence
  Protein classification predicting sequence
DWVDFGVIC

SEQ ID NO: 46363 - protein, 16 aa, Artificial sequence
  Protein classification predicting sequence
LCSDKTGTLTKNKLSL

SEQ ID NO: 46364 - protein, 10 aa, Artificial sequence
  Protein classification predicting sequence
LTACLAASRK

SEQ ID NO: 46365 - protein, 12 aa, Artificial sequence
  Protein classification predicting sequence
GTNIYNAERLGL

SEQ ID NO: 46366 - protein, 10 aa, Artificial sequence
  Protein classification predicting sequence
ISLTENWLIF

SEQ ID NO: 46367 - protein, 7 aa, Artificial sequence
  Protein classification predicting sequence
SIKLGDI

SEQ ID NO: 46368 - protein, 19 aa, Artificial sequence
  Protein classification predicting sequence
AGMDVLCSDKTGTLTLNKL

SEQ ID NO: 46369 - protein, 8 aa, Artificial sequence
  Protein classification predicting sequence
SKGAPEQI

SEQ ID NO: 46370 - protein, 22 aa, Artificial sequence
  Protein classification predicting sequence
GMTGDGVNDAPALKKADIGIAV

SEQ ID NO: 46371 - protein, 20 aa, Artificial sequence
  Protein classification predicting sequence
IFQRMKNYTIYAVSITIRIV

SEQ ID NO: 46372 - protein, 25 aa, Artificial sequence
  Protein classification predicting sequence
IFQRMKNYTIYAVSITIRIVLGFML

SEQ ID NO: 46373 - protein, 8 aa, Artificial sequence
  Protein classification predicting sequence
ALIWKFDF

SEQ ID NO: 46374 - protein, 6 aa, Artificial sequence
  Protein classification predicting sequence
YLQVSI

SEQ ID NO: 46375 - protein, 20 aa, Artificial sequence
  Protein classification predicting sequence
SQALIFVTRSRSWSFVERPG

SEQ ID NO: 46376 - protein, 13 aa, Artificial sequence
  Protein classification predicting sequence
AKRRAEIARLREL

SEQ ID NO: 46377 - protein, 17 aa, Artificial sequence
  Protein classification predicting sequence
TLKGHVESVVKLKGLDI

SEQ ID NO: 46378 - protein, 11 aa, Artificial sequence
  Protein classification predicting sequence
GHFTEVLNGIG

SEQ ID NO: 46379 - protein, 12 aa, Artificial sequence
  Protein classification predicting sequence
GPFWSSIPSWQL

SEQ ID NO: 46380 - protein, 9 aa, Artificial sequence
  Protein classification predicting sequence
QEFQAGSIV

SEQ ID NO: 46381 - protein, 15 aa, Artificial sequence
  Protein classification predicting sequence
GVPVGLPAVVTTTMA

SEQ ID NO: 46382 - protein, 29 aa, Artificial sequence
  Protein classification predicting sequence
DDLMLTACLAASRKKKGLDAIDKAFLKSL

SEQ ID NO: 46383 - protein, 10 aa, Artificial sequence
  Protein classification predicting sequence
AERLGLGGGG

SEQ ID NO: 46384 - protein, 8 aa, Artificial sequence
  Protein classification predicting sequence
RVSTQHEK

SEQ ID NO: 46385 - protein, 7 aa, Artificial sequence
  Protein classification predicting sequence
EREAQWA

SEQ ID NO: 46386 - protein, 8 aa, Artificial sequence
  Protein classification predicting sequence
GGIIQNFG

SEQ ID NO: 46387 - protein, 10 aa, Artificial sequence
  Protein classification predicting sequence
IEIVVMYPIQ

SEQ ID NO: 46388 - protein, 8 aa, Artificial sequence
  Protein classification predicting sequence
VDKNLIEV

SEQ ID NO: 46389 - protein, 8 aa, Artificial sequence
  Protein classification predicting sequence
ENQDAIDA

SEQ ID NO: 46390 - protein, 16 aa, Artificial sequence
  Protein classification predicting sequence
VGMLADPKEARAGIRE

SEQ ID NO: 46391 - protein, 10 aa, Artificial sequence
  Protein classification predicting sequence
AERGLRSLAV

SEQ ID NO: 46392 - protein, 9 aa, Artificial sequence
  Protein classification predicting sequence
AQRTLHGLQ

SEQ ID NO: 46393 - protein, 8 aa, Artificial sequence
  Protein classification predicting sequence
YRELSEIA

SEQ ID NO: 46394 - protein, 8 aa, Artificial sequence
  Protein classification predicting sequence
VGMLADPK

SEQ ID NO: 46395 - protein, 15 aa, Artificial sequence
  Protein classification predicting sequence
LGVNVKMITGDQLAI

SEQ ID NO: 46396 - protein, 6 aa, Artificial sequence
  Protein classification predicting sequence
PDSWKL

SEQ ID NO: 46397 - protein, 10 aa, Artificial sequence
  Protein classification predicting sequence
PPDWQDFVGI

SEQ ID NO: 46398 - protein, 8 aa, Artificial sequence
  Protein classification predicting sequence
CKQGEIEA

SEQ ID NO: 46399 - protein, 18 aa, Artificial sequence
  Protein classification predicting sequence
VIATGVHTFFGKAAHLVD

SEQ ID NO: 46400 - protein, 8 aa, Artificial sequence
  Protein classification predicting sequence
GHFQKVLT

SEQ ID NO: 46401 - protein, 6 aa, Artificial sequence
  Protein classification predicting sequence
VMYPIQ

SEQ ID NO: 46402 - protein, 21 aa, Artificial sequence
  Protein classification predicting sequence
YRDGIDNLLVLLIGGIPIAMP

SEQ ID NO: 46403 - protein, 7 aa, Artificial sequence
  Protein classification predicting sequence
VLSVTMA

SEQ ID NO: 46404 - protein, 11 aa, Artificial sequence
  Protein classification predicting sequence
DKTGTLTLNKL

SEQ ID NO: 46405 - protein, 11 aa, Artificial sequence
  Protein classification predicting sequence
AERGLRSLAVA

SEQ ID NO: 46406 - protein, 7 aa, Artificial sequence
  Protein classification predicting sequence
DATDAAR

SEQ ID NO: 46407 - protein, 10 aa, Artificial sequence
  Protein classification predicting sequence
AFVIAQLVAT

SEQ ID NO: 46408 - protein, 11 aa, Artificial sequence
  Protein classification predicting sequence
EQEAAILVPGD

SEQ ID NO: 46409 - protein, 7 aa, Artificial sequence
  Protein classification predicting sequence
MYPIQHR

SEQ ID NO: 46410 - protein, 9 aa, Artificial sequence
  Protein classification predicting sequence
KRTAITYID

SEQ ID NO: 46411 - protein, 14 aa, Artificial sequence
  Protein classification predicting sequence
ASDIVLTEPGLSVI

SEQ ID NO: 46412 - protein, 8 aa, Artificial sequence
  Protein classification predicting sequence
AQRTLHGL

SEQ ID NO: 46413 - protein, 10 aa, Artificial sequence
  Protein classification predicting sequence
ELSEIAEQAK

SEQ ID NO: 46414 - protein, 7 aa, Artificial sequence
  Protein classification predicting sequence
INSTISF

SEQ ID NO: 46415 - protein, 14 aa, Artificial sequence
  Protein classification predicting sequence
EENNAGNAAAALMA

SEQ ID NO: 46416 - protein, 13 aa, Artificial sequence
  Protein classification predicting sequence
PADARLLEGDPLK

SEQ ID NO: 46417 - protein, 34 aa, Artificial sequence
  Protein classification predicting sequence
QQGAITKRMTAIEEMAGMDVLCSDKTGTLTLNKL

SEQ ID NO: 46418 - protein, 22 aa, Artificial sequence
  Protein classification predicting sequence
RTALTYLDGEGKMHRVSKGAPE

SEQ ID NO: 46419 - protein, 43 aa, Artificial sequence
  Protein classification predicting sequence
ASDIVLTEPGLSVIISAVLTSRAIFQRMKNYTIYAVSITIRIV

SEQ ID NO: 46420 - protein, 21 aa, Artificial sequence
  Protein classification predicting sequence
IAILNDGTIMTISKDRVKPSP

SEQ ID NO: 46421 - protein, 7 aa, Artificial sequence
  Protein classification predicting sequence
LANGGGK

SEQ ID NO: 46422 - protein, 6 aa, Artificial sequence
  Protein classification predicting sequence
PDWQDF

SEQ ID NO: 46423 - protein, 9 aa, Artificial sequence
  Protein classification predicting sequence
IGNFCICSI

SEQ ID NO: 46424 - protein, 9 aa, Artificial sequence
  Protein classification predicting sequence
FAERGLRSL

SEQ ID NO: 46425 - protein, 15 aa, Artificial sequence
  Protein classification predicting sequence
ETGRRLGMGTNMYPS

SEQ ID NO: 46426 - protein, 10 aa, Artificial sequence
  Protein classification predicting sequence
DLEKIPIEEV

SEQ ID NO: 46427 - protein, 8 aa, Artificial sequence
  Protein classification predicting sequence
NKLEEKKE

SEQ ID NO: 46428 - protein, 22 aa, Artificial sequence
  Protein classification predicting sequence
INSTISFIEENNAGNAAAALMA

SEQ ID NO: 46429 - protein, 10 aa, Artificial sequence
  Protein classification predicting sequence
PFNPVDKRTA

SEQ ID NO: 46430 - protein, 11 aa, Artificial sequence
  Protein classification predicting sequence
HRVSKGAPEQI

SEQ ID NO: 46431 - protein, 20 aa, Artificial sequence
  Protein classification predicting sequence
AILNDGTIMTISKDRVKPSP

SEQ ID NO: 46432 - protein, 6 aa, Artificial sequence
  Protein classification predicting sequence
HSNRQF

SEQ ID NO: 46433 - protein, 14 aa, Artificial sequence
  Protein classification predicting sequence
WLSGVLTNHVTCLD

SEQ ID NO: 46434 - protein, 8 aa, Artificial sequence
  Protein classification predicting sequence
VVAKDGSG

SEQ ID NO: 46435 - protein, 16 aa, Artificial sequence
  Protein classification predicting sequence
TIITGSRNVVDGSTTF

SEQ ID NO: 46436 - protein, 15 aa, Artificial sequence
  Protein classification predicting sequence
VINRCRIDAYQDTLY

SEQ ID NO: 46437 - protein, 6 aa, Artificial sequence
  Protein classification predicting sequence
RQFYRD

SEQ ID NO: 46438 - protein, 7 aa, Artificial sequence
  Protein classification predicting sequence
DFALKTL

SEQ ID NO: 46439 - protein, 8 aa, Artificial sequence
  Protein classification predicting sequence
LIQGGSWL

SEQ ID NO: 46440 - protein, 9 aa, Artificial sequence
  Protein classification predicting sequence
TLFVALFLV

SEQ ID NO: 46441 - protein, 16 aa, Artificial sequence
  Protein classification predicting sequence
AYQDTLYVHSNRQFFV

SEQ ID NO: 46442 - protein, 11 aa, Artificial sequence
  Protein classification predicting sequence
DPNQNTGIVIQ

SEQ ID NO: 46443 - protein, 8 aa, Artificial sequence
  Protein classification predicting sequence
STGFPFSL

SEQ ID NO: 46444 - protein, 7 aa, Artificial sequence
  Protein classification predicting sequence
HQAVALR

SEQ ID NO: 46445 - protein, 10 aa, Artificial sequence
  Protein classification predicting sequence
TAQGRTDPNQ

SEQ ID NO: 46446 - protein, 6 aa, Artificial sequence
  Protein classification predicting sequence
LGRPWK

SEQ ID NO: 46447 - protein, 7 aa, Artificial sequence
  Protein classification predicting sequence
NVVDGST

SEQ ID NO: 46448 - protein, 13 aa, Artificial sequence
  Protein classification predicting sequence
NMVTAQGRTDPNQ

SEQ ID NO: 46449 - protein, 8 aa, Artificial sequence
  Protein classification predicting sequence
QDTLYAHS

SEQ ID NO: 46450 - protein, 12 aa, Artificial sequence
  Protein classification predicting sequence
LARDITFQNTAG

SEQ ID NO: 46451 - protein, 9 aa, Artificial sequence
  Protein classification predicting sequence
GTVDFIFGN

SEQ ID NO: 46452 - protein, 8 aa, Artificial sequence
  Protein classification predicting sequence
RIGATSDL

SEQ ID NO: 46453 - protein, 6 aa, Artificial sequence
  Protein classification predicting sequence
YLGRPW

SEQ ID NO: 46454 - protein, 10 aa, Artificial sequence
  Protein classification predicting sequence
LYVHSNRQFF

SEQ ID NO: 46455 - protein, 8 aa, Artificial sequence
  Protein classification predicting sequence
DGSGQFKT

SEQ ID NO: 46456 - protein, 7 aa, Artificial sequence
  Protein classification predicting sequence
QAVALRV

SEQ ID NO: 46457 - protein, 8 aa, Artificial sequence
  Protein classification predicting sequence
LTINNGEF

SEQ ID NO: 46458 - protein, 7 aa, Artificial sequence
  Protein classification predicting sequence
TMSDRIV

SEQ ID NO: 46459 - protein, 9 aa, Artificial sequence
  Protein classification predicting sequence
TVFQDYALF

SEQ ID NO: 46460 - protein, 36 aa, Artificial sequence
  Protein classification predicting sequence
QLDLTINNGEFLTLLGPSGCGKTTVLRLIAGLETVD

SEQ ID NO: 46461 - protein, 27 aa, Artificial sequence
  Protein classification predicting sequence
IEQDGTPREIYEEPKNLFVAGFIGEIN

SEQ ID NO: 46462 - protein, 14 aa, Artificial sequence
  Protein classification predicting sequence
ATVIERLDEQRVRA

SEQ ID NO: 46463 - protein, 20 aa, Artificial sequence
  Protein classification predicting sequence
VEGRECNIYVNFAVEPGQKL

SEQ ID NO: 46464 - protein, 18 aa, Artificial sequence
  Protein classification predicting sequence
VLLRPEDLRVEEINDDNH

SEQ ID NO: 46465 - protein, 52 aa, Artificial sequence
  Protein classification predicting sequence
EGLIGYVRERNYKGMTLESVVELENGKMVMVSEFFNEDDPDFDHSLDQKMAI

SEQ ID NO: 46466 - protein, 24 aa, Artificial sequence
  Protein classification predicting sequence
NYLFLGDYVDRGKQSLETICLLLA

SEQ ID NO: 46467 - protein, 9 aa, Artificial sequence
  Protein classification predicting sequence
KIKYPENFF

SEQ ID NO: 46468 - protein, 13 aa, Artificial sequence
  Protein classification predicting sequence
LWKTFTDCFNCLP

SEQ ID NO: 46469 - protein, 17 aa, Artificial sequence
  Protein classification predicting sequence
DPDKDVQGWGENDRGVS

SEQ ID NO: 46470 - protein, 10 aa, Artificial sequence
  Protein classification predicting sequence
GWGENDRGVS

SEQ ID NO: 46471 - protein, 16 aa, Artificial sequence
  Protein classification predicting sequence
MSVDDTLMCSFQILKP

SEQ ID NO: 46472 - protein, 7 aa, Artificial sequence
  Protein classification predicting sequence
ILCMHGG

SEQ ID NO: 46473 - protein, 6 aa, Artificial sequence
  Protein classification predicting sequence
NDRGVS

SEQ ID NO: 46474 - protein, 18 aa, Artificial sequence
  Protein classification predicting sequence
FSAPNYCGEFDNAGAMMS

SEQ ID NO: 46475 - protein, 10 aa, Artificial sequence
  Protein classification predicting sequence
LMCSFQILKP

SEQ ID NO: 46476 - protein, 14 aa, Artificial sequence
  Protein classification predicting sequence
LMCSFQILKPSEKK

SEQ ID NO: 46477 - protein, 7 aa, Artificial sequence
  Protein classification predicting sequence
RLLEVRG

SEQ ID NO: 46478 - protein, 8 aa, Artificial sequence
  Protein classification predicting sequence
HGGLSPDL

SEQ ID NO: 46479 - protein, 16 aa, Artificial sequence
  Protein classification predicting sequence
SMEQIRRIMRPTDVPD

SEQ ID NO: 46480 - protein, 14 aa, Artificial sequence
  Protein classification predicting sequence
GLLCDLLWSDPDKD

SEQ ID NO: 46481 - protein, 20 aa, Artificial sequence
  Protein classification predicting sequence
FSAPNYCGEFDNAGAMMSVD

SEQ ID NO: 46482 - protein, 14 aa, Artificial sequence
  Protein classification predicting sequence
DLLRLFEYGGFPPE

SEQ ID NO: 46483 - protein, 17 aa, Artificial sequence
  Protein classification predicting sequence
NYLFLGDYVDRGKQSLE

SEQ ID NO: 46484 - protein, 7 aa, Artificial sequence
  Protein classification predicting sequence
RPTDVPD

SEQ ID NO: 46485 - protein, 6 aa, Artificial sequence
  Protein classification predicting sequence
FLHKHD

SEQ ID NO: 46486 - protein, 14 aa, Artificial sequence
  Protein classification predicting sequence
CRAHQVVEDGYEFF

SEQ ID NO: 46487 - protein, 6 aa, Artificial sequence
  Protein classification predicting sequence
SREIFL

SEQ ID NO: 46488 - protein, 6 aa, Artificial sequence
  Protein classification predicting sequence
CFNCLP

SEQ ID NO: 46489 - protein, 12 aa, Artificial sequence
  Protein classification predicting sequence
CFNCLPVAALID

SEQ ID NO: 46490 - protein, 9 aa, Artificial sequence
  Protein classification predicting sequence
FLGDYVDRG

SEQ ID NO: 46491 - protein, 8 aa, Artificial sequence
  Protein classification predicting sequence
ICLLLAYK

SEQ ID NO: 46492 - protein, 6 aa, Artificial sequence
  Protein classification predicting sequence
DECKRR

SEQ ID NO: 46493 - protein, 8 aa, Artificial sequence
  Protein classification predicting sequence
CDLLWSDP

SEQ ID NO: 46494 - protein, 12 aa, Artificial sequence
  Protein classification predicting sequence
PVTVCGDIHGQF

SEQ ID NO: 46495 - protein, 8 aa, Artificial sequence
  Protein classification predicting sequence
CGDIHGQF

SEQ ID NO: 46496 - protein, 9 aa, Artificial sequence
  Protein classification predicting sequence
LCVHGGLSP

SEQ ID NO: 46497 - protein, 7 aa, Artificial sequence
  Protein classification predicting sequence
CKRRYNI

SEQ ID NO: 46498 - protein, 8 aa, Artificial sequence
  Protein classification predicting sequence
CMHGGLSP

SEQ ID NO: 46499 - protein, 5 aa, Artificial sequence
  Protein classification predicting sequence
FNCLP

SEQ ID NO: 46500 - protein, 10 aa, Artificial sequence
  Protein classification predicting sequence
DLLRLFEYGG

SEQ ID NO: 46501 - protein, 6 aa, Artificial sequence
  Protein classification predicting sequence
GLLCDL

SEQ ID NO: 46502 - protein, 8 aa, Artificial sequence
  Protein classification predicting sequence
TFGADVVS

SEQ ID NO: 46503 - protein, 12 aa, Artificial sequence
  Protein classification predicting sequence
FSAPNYCGEFDN

SEQ ID NO: 46504 - protein, 6 aa, Artificial sequence
  Protein classification predicting sequence
GAMMSV

SEQ ID NO: 46505 - protein, 8 aa, Artificial sequence
  Protein classification predicting sequence
TDCFNCLP

SEQ ID NO: 46506 - protein, 14 aa, Artificial sequence
  Protein classification predicting sequence
TDCFNCLPVAALID

SEQ ID NO: 46507 - protein, 10 aa, Artificial sequence
  Protein classification predicting sequence
NDRGVSYTFG

SEQ ID NO: 46508 - protein, 7 aa, Artificial sequence
  Protein classification predicting sequence
DKVAEFL

SEQ ID NO: 46509 - protein, 8 aa, Artificial sequence
  Protein classification predicting sequence
RLLEVRGS

SEQ ID NO: 46510 - protein, 10 aa, Artificial sequence
  Protein classification predicting sequence
KICGDIHGQY

SEQ ID NO: 46511 - protein, 9 aa, Artificial sequence
  Protein classification predicting sequence
CSFQILKPA

SEQ ID NO: 46512 - protein, 15 aa, Artificial sequence
  Protein classification predicting sequence
NYLFLGDYVDRGKQS

SEQ ID NO: 46513 - protein, 7 aa, Artificial sequence
  Protein classification predicting sequence
CSFQILK

SEQ ID NO: 46514 - protein, 11 aa, Artificial sequence
  Protein classification predicting sequence
KILCMHGGLSP

SEQ ID NO: 46515 - protein, 6 aa, Artificial sequence
  Protein classification predicting sequence
KHDLDL

SEQ ID NO: 46516 - protein, 20 aa, Artificial sequence
  Protein classification predicting sequence
FSAPNYCGEFDNAGALMSVD

SEQ ID NO: 46517 - protein, 6 aa, Artificial sequence
  Protein classification predicting sequence
EIRQLC

SEQ ID NO: 46518 - protein, 10 aa, Artificial sequence
  Protein classification predicting sequence
YGFYDECKRR

SEQ ID NO: 46519 - protein, 6 aa, Artificial sequence
  Protein classification predicting sequence
LWKTFT

SEQ ID NO: 46520 - protein, 6 aa, Artificial sequence
  Protein classification predicting sequence
DVPDQG

SEQ ID NO: 46521 - protein, 7 aa, Artificial sequence
  Protein classification predicting sequence
LLELEAP

SEQ ID NO: 46522 - protein, 21 aa, Artificial sequence
  Protein classification predicting sequence
INRIYGFYDECKRRFNVRLWK

SEQ ID NO: 46523 - protein, 11 aa, Artificial sequence
  Protein classification predicting sequence
GLLCDLLWSDP

SEQ ID NO: 46524 - protein, 7 aa, Artificial sequence
  Protein classification predicting sequence
DLDLICR

SEQ ID NO: 46525 - protein, 39 aa, Artificial sequence
  Protein classification predicting sequence
LPIAAIVDEKIFCCHGGLSPDLQSMEQIRRIMRPTDVPD

SEQ ID NO: 46526 - protein, 27 aa, Artificial sequence
  Protein classification predicting sequence
NYLFLGDYVDRGKQSLETICLLLAYKI

SEQ ID NO: 46527 - protein, 29 aa, Artificial sequence
  Protein classification predicting sequence
KSREIFLSQPILLELEAPLKICGDIHGQY

SEQ ID NO: 46528 - protein, 26 aa, Artificial sequence
  Protein classification predicting sequence
HDLDLICRAHQVVEDGYEFFAKRQLV

SEQ ID NO: 46529 - protein, 56 aa, Artificial sequence
  Protein classification predicting sequence
LFSAPNYCGEFDNAGGMMSVDETLMCSFQILKPSEKKAKYQYGGLNSGRPVTPPRT

SEQ ID NO: 46530 - protein, 12 aa, Artificial sequence
  Protein classification predicting sequence
VQMTEAEVRGLC

SEQ ID NO: 46531 - protein, 13 aa, Artificial sequence
  Protein classification predicting sequence
DLLRLFEYGGFPP

SEQ ID NO: 46532 - protein, 8 aa, Artificial sequence
  Protein classification predicting sequence
MRPTDVPD

SEQ ID NO: 46533 - protein, 30 aa, Artificial sequence
  Protein classification predicting sequence
GLLCDLLWSDPDKDVQGWGENDRGVSFTFG

SEQ ID NO: 46534 - protein, 14 aa, Artificial sequence
  Protein classification predicting sequence
GWGENDRGVSFTFG

SEQ ID NO: 46535 - protein, 10 aa, Artificial sequence
  Protein classification predicting sequence
DVVSKFLNRH

SEQ ID NO: 46536 - protein, 20 aa, Artificial sequence
  Protein classification predicting sequence
RQLVTLFSAPNYCGEFDNAG

SEQ ID NO: 46537 - protein, 11 aa, Artificial sequence
  Protein classification predicting sequence
TLMCSFQILKP

SEQ ID NO: 46538 - protein, 7 aa, Artificial sequence
  Protein classification predicting sequence
PGKNVQL

SEQ ID NO: 46539 - protein, 7 aa, Artificial sequence
  Protein classification predicting sequence
RPVTPPR

SEQ ID NO: 46540 - protein, 15 aa, Artificial sequence
  Protein classification predicting sequence
SINRIYGFYDECKRR

SEQ ID NO: 46541 - protein, 10 aa, Artificial sequence
  Protein classification predicting sequence
VTVFSAPNYC

SEQ ID NO: 46542 - protein, 23 aa, Artificial sequence
  Protein classification predicting sequence
LRGNHECASINRIYGFYDECKRR

SEQ ID NO: 46543 - protein, 44 aa, Artificial sequence
  Protein classification predicting sequence
LRGNHECASINRIYGFYDECKRRYNIKLWKTFTDCFNCLPIAAI

SEQ ID NO: 46544 - protein, 8 aa, Artificial sequence
  Protein classification predicting sequence
GRPITPPR

SEQ ID NO: 46545 - protein, 13 aa, Artificial sequence
  Protein classification predicting sequence
NRIYGFYDECKRR

SEQ ID NO: 46546 - protein, 7 aa, Artificial sequence
  Protein classification predicting sequence
TFGADKV

SEQ ID NO: 46547 - protein, 7 aa, Artificial sequence
  Protein classification predicting sequence
DLDLVCR

SEQ ID NO: 46548 - protein, 5 aa, Artificial sequence
  Protein classification predicting sequence
MQGWR

SEQ ID NO: 46549 - protein, 11 aa, Artificial sequence
  Protein classification predicting sequence
LALSRAIGDFE

SEQ ID NO: 46550 - protein, 10 aa, Artificial sequence
  Protein classification predicting sequence
YGLSSMQGWR

SEQ ID NO: 46551 - protein, 8 aa, Artificial sequence
  Protein classification predicting sequence
FFAVYDGH

SEQ ID NO: 46552 - protein, 5 aa, Artificial sequence
  Protein classification predicting sequence
VYDGH

SEQ ID NO: 46553 - protein, 8 aa, Artificial sequence
  Protein classification predicting sequence
LACDGIWD

SEQ ID NO: 46554 - protein, 6 aa, Artificial sequence
  Protein classification predicting sequence
SRAIGD

SEQ ID NO: 46555 - protein, 6 aa, Artificial sequence
  Protein classification predicting sequence
NCGDSR

SEQ ID NO: 46556 - protein, 51 aa, Artificial sequence
  Protein classification predicting sequence
EGVPDLVHVMRTLASENIPSLPPGGELASKRNVIEAVYNRLNPYKNDDTDS

SEQ ID NO: 46557 - protein, 13 aa, Artificial sequence
  Protein classification predicting sequence
WSFFAVYDGHAGS

SEQ ID NO: 46558 - protein, 10 aa, Artificial sequence
  Protein classification predicting sequence
DRSGSTAVGV

SEQ ID NO: 46559 - protein, 15 aa, Artificial sequence
  Protein classification predicting sequence
GKGPTEQLVSPEPEV

SEQ ID NO: 46560 - protein, 8 aa, Artificial sequence
  Protein classification predicting sequence
KGSRDNMS

SEQ ID NO: 46561 - protein, 7 aa, Artificial sequence
  Protein classification predicting sequence
GIRTGFL

SEQ ID NO: 46562 - protein, 25 aa, Artificial sequence
  Protein classification predicting sequence
GNGLRYGLSSMQGWRVEMEDAHTAV

SEQ ID NO: 46563 - protein, 7 aa, Artificial sequence
  Protein classification predicting sequence
PSVENVK

SEQ ID NO: 46564 - protein, 29 aa, Artificial sequence
  Protein classification predicting sequence
EKERIQNAGGSVMIQRVNGSLAVSRALGD

SEQ ID NO: 46565 - protein, 6 aa, Artificial sequence
  Protein classification predicting sequence
ACDGIW

SEQ ID NO: 46566 - protein, 8 aa, Artificial sequence
  Protein classification predicting sequence
FLAQYGYM

SEQ ID NO: 46567 - protein, 9 aa, Artificial sequence
  Protein classification predicting sequence
SAGANTLSA

SEQ ID NO: 46568 - protein, 10 aa, Artificial sequence
  Protein classification predicting sequence
EASGKSLFKT

SEQ ID NO: 46569 - protein, 9 aa, Artificial sequence
  Protein classification predicting sequence
WSIAEHGPT

SEQ ID NO: 46570 - protein, 27 aa, Artificial sequence
  Protein classification predicting sequence
LRFVAVGDWGGVPNAPFHTAREMANAK

SEQ ID NO: 46571 - protein, 14 aa, Artificial sequence
  Protein classification predicting sequence
DKRFQETFEDVFSD

SEQ ID NO: 46572 - protein, 20 aa, Artificial sequence
  Protein classification predicting sequence
VTAYLCGHDHNLQYLQDENG

SEQ ID NO: 46573 - protein, 12 aa, Artificial sequence
  Protein classification predicting sequence
VLSGAGNFMDPS

SEQ ID NO: 46574 - protein, 11 aa, Artificial sequence
  Protein classification predicting sequence
GNVSAQIAYSK

SEQ ID NO: 46575 - protein, 9 aa, Artificial sequence
  Protein classification predicting sequence
SKRWNFPSP

SEQ ID NO: 46576 - protein, 37 aa, Artificial sequence
  Protein classification predicting sequence
YGVTAYLCGHDHNLQYLQDENGVGYVLSGAGNFMDPS

SEQ ID NO: 46577 - protein, 7 aa, Artificial sequence
  Protein classification predicting sequence
RHGDRSP

SEQ ID NO: 46578 - protein, 9 aa, Artificial sequence
  Protein classification predicting sequence
WPQGFGQLT

SEQ ID NO: 46579 - protein, 7 aa, Artificial sequence
  Protein classification predicting sequence
DRTLMSA

SEQ ID NO: 46580 - protein, 9 aa, Artificial sequence
  Protein classification predicting sequence
WQPIPVHTV

SEQ ID NO: 46581 - protein, 14 aa, Artificial sequence
  Protein classification predicting sequence
YKPDFMLDKMSDLL

SEQ ID NO: 46582 - protein, 34 aa, Artificial sequence
  Protein classification predicting sequence
TYYPNQYKREDVLPFIGPSLHDTFSKIDESKVEE

SEQ ID NO: 46583 - protein, 20 aa, Artificial sequence
  Protein classification predicting sequence
FNHDHHDELVEEYETVYETV

SEQ ID NO: 46584 - protein, 24 aa, Artificial sequence
  Protein classification predicting sequence
ELKKQGYKVGIVTTKARQTVEMGL

SEQ ID NO: 46585 - protein, 26 aa, Artificial sequence
  Protein classification predicting sequence
INTVLFDLDGTLINTNELIISSFLHT

SEQ ID NO: 46586 - protein, 16 aa, Artificial sequence
  Protein classification predicting sequence
LFDLDGTLINTNELII

SEQ ID NO: 46587 - protein, 7 aa, Artificial sequence
  Protein classification predicting sequence
YKREDVL

SEQ ID NO: 46588 - protein, 8 aa, Artificial sequence
  Protein classification predicting sequence
EYETVYET

SEQ ID NO: 46589 - protein, 7 aa, Artificial sequence
  Protein classification predicting sequence
NAKPDPE

SEQ ID NO: 46590 - protein, 6 aa, Artificial sequence
  Protein classification predicting sequence
GDNYHD

SEQ ID NO: 46591 - protein, 12 aa, Artificial sequence
  Protein classification predicting sequence
PDFMLEKMSDLL

SEQ ID NO: 46592 - protein, 8 aa, Artificial sequence
  Protein classification predicting sequence
LGIVSTKM

SEQ ID NO: 46593 - protein, 11 aa, Artificial sequence
  Protein classification predicting sequence
LMVGDNHHDIV

SEQ ID NO: 46594 - protein, 8 aa, Artificial sequence
  Protein classification predicting sequence
GSYPSGHT

SEQ ID NO: 46595 - protein, 8 aa, Artificial sequence
  Protein classification predicting sequence
IPVEEENP

SEQ ID NO: 46596 - protein, 8 aa, Artificial sequence
  Protein classification predicting sequence
LYGNGPGY

SEQ ID NO: 46597 - protein, 7 aa, Artificial sequence
  Protein classification predicting sequence
PSLKDMT

SEQ ID NO: 46598 - protein, 9 aa, Artificial sequence
  Protein classification predicting sequence
PIQTSAKNL

SEQ ID NO: 46599 - protein, 11 aa, Artificial sequence
  Protein classification predicting sequence
GDGMGVSTVTA

SEQ ID NO: 46600 - protein, 7 aa, Artificial sequence
  Protein classification predicting sequence
LAMDRFP

SEQ ID NO: 46601 - protein, 15 aa, Artificial sequence
  Protein classification predicting sequence
IGLSAAARFNQCNTT

SEQ ID NO: 46602 - protein, 7 aa, Artificial sequence
  Protein classification predicting sequence
SIFGLAP

SEQ ID NO: 46603 - protein, 9 aa, Artificial sequence
  Protein classification predicting sequence
ILYGNGPGY

SEQ ID NO: 46604 - protein, 6 aa, Artificial sequence
  Protein classification predicting sequence
CLEPYT

SEQ ID NO: 46605 - protein, 11 aa, Artificial sequence
  Protein classification predicting sequence
CLEPYTDCGLA

SEQ ID NO: 46606 - protein, 10 aa, Artificial sequence
  Protein classification predicting sequence
LGPETPLAMD

SEQ ID NO: 46607 - protein, 6 aa, Artificial sequence
  Protein classification predicting sequence
QVPDSA

SEQ ID NO: 46608 - protein, 7 aa, Artificial sequence
  Protein classification predicting sequence
TTRGNEV

SEQ ID NO: 46609 - protein, 14 aa, Artificial sequence
  Protein classification predicting sequence
YAHTVNRNWYSDAD

SEQ ID NO: 46610 - protein, 11 aa, Artificial sequence
  Protein classification predicting sequence
VEGGRIDHGHH

SEQ ID NO: 46611 - protein, 9 aa, Artificial sequence
  Protein classification predicting sequence
ALTEAVMFD

SEQ ID NO: 46612 - protein, 8 aa, Artificial sequence
  Protein classification predicting sequence
FLGDGMGV

SEQ ID NO: 46613 - protein, 10 aa, Artificial sequence
  Protein classification predicting sequence
TATAYLCGVK

SEQ ID NO: 46614 - protein, 8 aa, Artificial sequence
  Protein classification predicting sequence
HTVNRNWY

SEQ ID NO: 46615 - protein, 7 aa, Artificial sequence
  Protein classification predicting sequence
NLVQEWL

SEQ ID NO: 46616 - protein, 9 aa, Artificial sequence
  Protein classification predicting sequence
ETHGGEDVA

SEQ ID NO: 46617 - protein, 10 aa, Artificial sequence
  Protein classification predicting sequence
SAAARFNQCN

SEQ ID NO: 46618 - protein, 8 aa, Artificial sequence
  Protein classification predicting sequence
GTPDPEYP

SEQ ID NO: 46619 - protein, 7 aa, Artificial sequence
  Protein classification predicting sequence
LMGLFEP

SEQ ID NO: 46620 - protein, 12 aa, Artificial sequence
  Protein classification predicting sequence
GFYLFVEGGRID

SEQ ID NO: 46621 - protein, 11 aa, Artificial sequence
  Protein classification predicting sequence
RAKKAGKSVGV

SEQ ID NO: 46622 - protein, 9 aa, Artificial sequence
  Protein classification predicting sequence
FARGPQAHL

SEQ ID NO: 46623 - protein, 40 aa, Artificial sequence
  Protein classification predicting sequence
VALSKTYNTNAQVPDSAGTATAYLCGVKANEGTVGVSAAT

SEQ ID NO: 46624 - protein, 32 aa, Artificial sequence
  Protein classification predicting sequence
YAHSADRDWYSDNEMPPEALSQGCKDIAYQLM

SEQ ID NO: 46625 - protein, 7 aa, Artificial sequence
  Protein classification predicting sequence
GGGRKYM

SEQ ID NO: 46626 - protein, 11 aa, Artificial sequence
  Protein classification predicting sequence
HKHSHYVWNRT

SEQ ID NO: 46627 - protein, 9 aa, Artificial sequence
  Protein classification predicting sequence
HGVQEQNYI

SEQ ID NO: 46628 - protein, 11 aa, Artificial sequence
  Protein classification predicting sequence
EVTSILRWAKD

SEQ ID NO: 46629 - protein, 6 aa, Artificial sequence
  Protein classification predicting sequence
GCKDIA

SEQ ID NO: 46630 - protein, 6 aa, Artificial sequence
  Protein classification predicting sequence
GTRLDG

SEQ ID NO: 46631 - protein, 29 aa, Artificial sequence
  Protein classification predicting sequence
GFFLLVEGGRIDHGHHEGKAKQALHEAVE

SEQ ID NO: 46632 - protein, 7 aa, Artificial sequence
  Protein classification predicting sequence
EQNYIPH

SEQ ID NO: 46633 - protein, 8 aa, Artificial sequence
  Protein classification predicting sequence
MAYAACIG

SEQ ID NO: 46634 - protein, 8 aa, Artificial sequence
  Protein classification predicting sequence
LQKLNTNV

SEQ ID NO: 46635 - protein, 12 aa, Artificial sequence
  Protein classification predicting sequence
DEKARGTRLDGL

SEQ ID NO: 46636 - protein, 20 aa, Artificial sequence
  Protein classification predicting sequence
VDYLLGLFEPGDMQYELNRN

SEQ ID NO: 46637 - protein, 9 aa, Artificial sequence
  Protein classification predicting sequence
VTADHSHVF

SEQ ID NO: 46638 - protein, 17 aa, Artificial sequence
  Protein classification predicting sequence
DIDVIMGGGRKYMYPKN

SEQ ID NO: 46639 - protein, 9 aa, Artificial sequence
  Protein classification predicting sequence
TDPSLSEMV

SEQ ID NO: 46640 - protein, 11 aa, Artificial sequence
  Protein classification predicting sequence
ETHGGEDVAVF

SEQ ID NO: 46641 - protein, 16 aa, Artificial sequence
  Protein classification predicting sequence
KGPMAHLLHGVHEQNY

SEQ ID NO: 46642 - protein, 8 aa, Artificial sequence
  Protein classification predicting sequence
VPEKEKDP

SEQ ID NO: 46643 - protein, 7 aa, Artificial sequence
  Protein classification predicting sequence
NAQVPDS

SEQ ID NO: 46644 - protein, 7 aa, Artificial sequence
  Protein classification predicting sequence
GNMPVRW

SEQ ID NO: 46645 - protein, 11 aa, Artificial sequence
  Protein classification predicting sequence
DRDWYSDNEMP

SEQ ID NO: 46646 - protein, 16 aa, Artificial sequence
  Protein classification predicting sequence
LLVEGGRIDHGHHEGK

SEQ ID NO: 46647 - protein, 7 aa, Artificial sequence
  Protein classification predicting sequence
HEAVEMD

SEQ ID NO: 46648 - protein, 12 aa, Artificial sequence
  Protein classification predicting sequence
DTLTVVTADHSH

SEQ ID NO: 46649 - protein, 9 aa, Artificial sequence
  Protein classification predicting sequence
FGGYTPRGN

SEQ ID NO: 46650 - protein, 15 aa, Artificial sequence
  Protein classification predicting sequence
KPFTAILYGNGPGYK

SEQ ID NO: 46651 - protein, 7 aa, Artificial sequence
  Protein classification predicting sequence
RGGGEYG

SEQ ID NO: 46652 - protein, 33 aa, Artificial sequence
  Protein classification predicting sequence
FKKGKRYFYFYNTGLQNQRVLYVQDSLEGEARV

SEQ ID NO: 46653 - protein, 25 aa, Artificial sequence
  Protein classification predicting sequence
AYGLSASGSDWVTIKFMKVDGAKEL

SEQ ID NO: 46654 - protein, 7 aa, Artificial sequence
  Protein classification predicting sequence
KFIATLQ

SEQ ID NO: 46655 - protein, 7 aa, Artificial sequence
  Protein classification predicting sequence
DGTKIPM

SEQ ID NO: 46656 - protein, 7 aa, Artificial sequence
  Protein classification predicting sequence
YGGFNIS

SEQ ID NO: 46657 - protein, 8 aa, Artificial sequence
  Protein classification predicting sequence
DHDDRVVP

SEQ ID NO: 46658 - protein, 32 aa, Artificial sequence
  Protein classification predicting sequence
GILKWVKLIDNFEGEYDYVTNEGTVFTFKTNR

SEQ ID NO: 46659 - protein, 13 aa, Artificial sequence
  Protein classification predicting sequence
EIFYQFTSFLSPG

SEQ ID NO: 46660 - protein, 13 aa, Artificial sequence
  Protein classification predicting sequence
IYHCDLTKEELEP

SEQ ID NO: 46661 - protein, 12 aa, Artificial sequence
  Protein classification predicting sequence
VFREVTVKGIDA

SEQ ID NO: 46662 - protein, 14 aa, Artificial sequence
  Protein classification predicting sequence
TIGHAWTTDYGCSD

SEQ ID NO: 46663 - protein, 7 aa, Artificial sequence
  Protein classification predicting sequence
KQHFEWL

SEQ ID NO: 46664 - protein, 7 aa, Artificial sequence
  Protein classification predicting sequence
VVTIFSA

SEQ ID NO: 46665 - protein, 31 aa, Artificial sequence
  Protein classification predicting sequence
ITLLRGNHESRQITQVYGFYDECQTKYGNAN

SEQ ID NO: 46666 - protein, 7 aa, Artificial sequence
  Protein classification predicting sequence
YGFYDEC

SEQ ID NO: 46667 - protein, 11 aa, Artificial sequence
  Protein classification predicting sequence
MKVWLSGHVPP

SEQ ID NO: 46668 - protein, 7 aa, Artificial sequence
  Protein classification predicting sequence
NPLVDNC

SEQ ID NO: 46669 - protein, 7 aa, Artificial sequence
  Protein classification predicting sequence
ESNVQPV

SEQ ID NO: 46670 - protein, 5 aa, Artificial sequence
  Protein classification predicting sequence
PDTNY

SEQ ID NO: 46671 - protein, 7 aa, Artificial sequence
  Protein classification predicting sequence
LICRAHQ

SEQ ID NO: 46672 - protein, 6 aa, Artificial sequence
  Protein classification predicting sequence
RAHQLV

SEQ ID NO: 46673 - protein, 9 aa, Artificial sequence
  Protein classification predicting sequence
FMGDFVDRG

SEQ ID NO: 46674 - protein, 7 aa, Artificial sequence
  Protein classification predicting sequence
GDFVDRG

SEQ ID NO: 46675 - protein, 11 aa, Artificial sequence
  Protein classification predicting sequence
HMVVEDGYEFF

SEQ ID NO: 46676 - protein, 9 aa, Artificial sequence
  Protein classification predicting sequence
VVEDGYEFF

SEQ ID NO: 46677 - protein, 10 aa, Artificial sequence
  Protein classification predicting sequence
FSAPNYCGEF

SEQ ID NO: 46678 - protein, 26 aa, Artificial sequence
  Protein classification predicting sequence
IVDPVDSEWFGFYRSGQAKETIPLQE

SEQ ID NO: 46679 - protein, 15 aa, Artificial sequence
  Protein classification predicting sequence
PLVIWHGMGDSCCNP

SEQ ID NO: 46680 - protein, 11 aa, Artificial sequence
  Protein classification predicting sequence
KDPKLQQGYNA

SEQ ID NO: 46681 - protein, 17 aa, Artificial sequence
  Protein classification predicting sequence
GFSQGGQFLRAVAQRCP

SEQ ID NO: 46682 - protein, 30 aa, Artificial sequence
  Protein classification predicting sequence
LISVGGQHQGVFGLPRCPGESSHICDFIRK

SEQ ID NO: 46683 - protein, 11 aa, Artificial sequence
  Protein classification predicting sequence
SIFLADINQER

SEQ ID NO: 46684 - protein, 7 aa, Artificial sequence
  Protein classification predicting sequence
AHIIPFL

SEQ ID NO: 46685 - protein, 12 aa, Artificial sequence
  Protein classification predicting sequence
EDVENSFFLNVN

SEQ ID NO: 46686 - protein, 13 aa, Artificial sequence
  Protein classification predicting sequence
NLMALKKFVMVKF

SEQ ID NO: 46687 - protein, 6 aa, Artificial sequence
  Protein classification predicting sequence
HGQFYD

SEQ ID NO: 46688 - protein, 9 aa, Artificial sequence
  Protein classification predicting sequence
FNGDFVDRG

SEQ ID NO: 46689 - protein, 9 aa, Artificial sequence
  Protein classification predicting sequence
TVFSAPNYC

SEQ ID NO: 46690 - protein, 15 aa, Artificial sequence
  Protein classification predicting sequence
PVTVCGDIHGQFYDL

SEQ ID NO: 46691 - protein, 6 aa, Artificial sequence
  Protein classification predicting sequence
KYGNAN

SEQ ID NO: 46692 - protein, 14 aa, Artificial sequence
  Protein classification predicting sequence
KGAFCDLVWSDPED

SEQ ID NO: 46693 - protein, 14 aa, Artificial sequence
  Protein classification predicting sequence
TVWSAPNYCYRCGN

SEQ ID NO: 46694 - protein, 8 aa, Artificial sequence
  Protein classification predicting sequence
ESEVKALC

SEQ ID NO: 46695 - protein, 13 aa, Artificial sequence
  Protein classification predicting sequence
EILVEESNVQRVD

SEQ ID NO: 46696 - protein, 12 aa, Artificial sequence
  Protein classification predicting sequence
VGGDVPETNYLF

SEQ ID NO: 46697 - protein, 17 aa, Artificial sequence
  Protein classification predicting sequence
SVETFLLLLALKVRYPD

SEQ ID NO: 46698 - protein, 21 aa, Artificial sequence
  Protein classification predicting sequence
RGNHESRQITQVYGFYDECLR

SEQ ID NO: 46699 - protein, 9 aa, Artificial sequence
  Protein classification predicting sequence
IFDYLSLSA

SEQ ID NO: 46700 - protein, 16 aa, Artificial sequence
  Protein classification predicting sequence
TVWSAPNYCYRCGNVA

SEQ ID NO: 46701 - protein, 8 aa, Artificial sequence
  Protein classification predicting sequence
DIGGGSTE

SEQ ID NO: 46702 - protein, 7 aa, Artificial sequence
  Protein classification predicting sequence
THTLRQA

SEQ ID NO: 46703 - protein, 8 aa, Artificial sequence
  Protein classification predicting sequence
SDGALREG

SEQ ID NO: 46704 - protein, 10 aa, Artificial sequence
  Protein classification predicting sequence
NFFLLRGNHE

SEQ ID NO: 46705 - protein, 6 aa, Artificial sequence
  Protein classification predicting sequence
FTDCFN

SEQ ID NO: 46706 - protein, 10 aa, Artificial sequence
  Protein classification predicting sequence
IFCCHGGLSP

SEQ ID NO: 46707 - protein, 19 aa, Artificial sequence
  Protein classification predicting sequence
NYLFLGDYVDRGKQSLETI

SEQ ID NO: 46708 - protein, 8 aa, Artificial sequence
  Protein classification predicting sequence
CVHGGLSP

SEQ ID NO: 46709 - protein, 7 aa, Artificial sequence
  Protein classification predicting sequence
GWEGRFC

SEQ ID NO: 46710 - protein, 8 aa, Artificial sequence
  Protein classification predicting sequence
LLDSKKKL

SEQ ID NO: 46711 - protein, 16 aa, Artificial sequence
  Protein classification predicting sequence
GTWFLVGLVSWGEGCG

SEQ ID NO: 46712 - protein, 7 aa, Artificial sequence
  Protein classification predicting sequence
CDSPCCG

SEQ ID NO: 46713 - protein, 7 aa, Artificial sequence
  Protein classification predicting sequence
CCGHGTC

SEQ ID NO: 46714 - protein, 10 aa, Artificial sequence
  Protein classification predicting sequence
VRLGEYDLRR

SEQ ID NO: 46715 - protein, 7 aa, Artificial sequence
  Protein classification predicting sequence
IAHADYP

SEQ ID NO: 46716 - protein, 6 aa, Artificial sequence
  Protein classification predicting sequence
EYAMEA

SEQ ID NO: 46717 - protein, 8 aa, Artificial sequence
  Protein classification predicting sequence
RPYGVGLL

SEQ ID NO: 46718 - protein, 10 aa, Artificial sequence
  Protein classification predicting sequence
DVTVWSPQGR

SEQ ID NO: 46719 - protein, 8 aa, Artificial sequence
  Protein classification predicting sequence
KQGSATVG

SEQ ID NO: 46720 - protein, 6 aa, Artificial sequence
  Protein classification predicting sequence
GRRPFG

SEQ ID NO: 46721 - protein, 8 aa, Artificial sequence
  Protein classification predicting sequence
SIGIVGKD

SEQ ID NO: 46722 - protein, 37 aa, Artificial sequence
  Protein classification predicting sequence
CNLNELVKHGLRALRETLPAEQDLTTKNVSIGIVGKD

SEQ ID NO: 46723 - protein, 10 aa, Artificial sequence
  Protein classification predicting sequence
EFTIYDDDDV

SEQ ID NO: 46724 - protein, 7 aa, Artificial sequence
  Protein classification predicting sequence
TTFSPSG

SEQ ID NO: 46725 - protein, 16 aa, Artificial sequence
  Protein classification predicting sequence
GRIHQIEYAMEAVKQG

SEQ ID NO: 46726 - protein, 14 aa, Artificial sequence
  Protein classification predicting sequence
TQRYGRRPYGVGLL

SEQ ID NO: 46727 - protein, 10 aa, Artificial sequence
  Protein classification predicting sequence
RSQSARTYLE

SEQ ID NO: 46728 - protein, 36 aa, Artificial sequence
  Protein classification predicting sequence
FQTCPSANYFDCRAMSIGARSQSARTYLERHMSEFM

SEQ ID NO: 46729 - protein, 10 aa, Artificial sequence
  Protein classification predicting sequence
GVGLLIAGYD

SEQ ID NO: 46730 - protein, 8 aa, Artificial sequence
  Protein classification predicting sequence
ARTYLERH

SEQ ID NO: 46731 - protein, 12 aa, Artificial sequence
  Protein classification predicting sequence
SPTGRLFQVEYA

SEQ ID NO: 46732 - protein, 9 aa, Artificial sequence
  Protein classification predicting sequence
GRLFQVEYA

SEQ ID NO: 46733 - protein, 10 aa, Artificial sequence
  Protein classification predicting sequence
THAVLVALKR

SEQ ID NO: 46734 - protein, 8 aa, Artificial sequence
  Protein classification predicting sequence
VYSGMGPD

SEQ ID NO: 46735 - protein, 12 aa, Artificial sequence
  Protein classification predicting sequence
FSLTTFSPSGKL

SEQ ID NO: 46736 - protein, 27 aa, Artificial sequence
  Protein classification predicting sequence
RGYSFSLTTFSPSGKLVQIEYALAAVA

SEQ ID NO: 46737 - protein, 9 aa, Artificial sequence
  Protein classification predicting sequence
GAPSVGIKA

SEQ ID NO: 46738 - protein, 18 aa, Artificial sequence
  Protein classification predicting sequence
NGVVLATEKKQKSILYDE

SEQ ID NO: 46739 - protein, 8 aa, Artificial sequence
  Protein classification predicting sequence
EPITKHIG

SEQ ID NO: 46740 - protein, 9 aa, Artificial sequence
  Protein classification predicting sequence
RARKLAQQY

SEQ ID NO: 46741 - protein, 9 aa, Artificial sequence
  Protein classification predicting sequence
LVYQEPIPT

SEQ ID NO: 46742 - protein, 28 aa, Artificial sequence
  Protein classification predicting sequence
QLVQRVASVMQEYTQSGGVRPFGVSLLI

SEQ ID NO: 46743 - protein, 23 aa, Artificial sequence
  Protein classification predicting sequence
RPYLFQSDPSGAYFAWKATAMGK

SEQ ID NO: 46744 - protein, 39 aa, Artificial sequence
  Protein classification predicting sequence
YVNGKTFLEKRYNEDLELEDAIHTAILTLKESFEGQMTE

SEQ ID NO: 46745 - protein, 6 aa, Artificial sequence
  Protein classification predicting sequence
QSDPSG

SEQ ID NO: 46746 - protein, 9 aa, Artificial sequence
  Protein classification predicting sequence
GIKAANGVV

SEQ ID NO: 46747 - protein, 10 aa, Artificial sequence
  Protein classification predicting sequence
TQSGGVRPFG

SEQ ID NO: 46748 - protein, 11 aa, Artificial sequence
  Protein classification predicting sequence
HKVEPITKHIG

SEQ ID NO: 46749 - protein, 48 aa, Artificial sequence
  Protein classification predicting sequence
RARKLAQQYYLVYQEPIPTAQLVQRVASVMQEYTQSGGVRPFGVSLLI

SEQ ID NO: 46750 - protein, 11 aa, Artificial sequence
  Protein classification predicting sequence
RPFGVSLLIAG

SEQ ID NO: 46751 - protein, 8 aa, Artificial sequence
  Protein classification predicting sequence
LELEDAIH

SEQ ID NO: 46752 - protein, 10 aa, Artificial sequence
  Protein classification predicting sequence
QAAKTEIEKL

SEQ ID NO: 46753 - protein, 7 aa, Artificial sequence
  Protein classification predicting sequence
VVLGVEK

SEQ ID NO: 46754 - protein, 7 aa, Artificial sequence
  Protein classification predicting sequence
VVLAVEK

SEQ ID NO: 46755 - protein, 7 aa, Artificial sequence
  Protein classification predicting sequence
GMAVAGL

SEQ ID NO: 46756 - protein, 15 aa, Artificial sequence
  Protein classification predicting sequence
YVHAYTLYSAVRPFG

SEQ ID NO: 46757 - protein, 6 aa, Artificial sequence
  Protein classification predicting sequence
VLGVEK

SEQ ID NO: 46758 - protein, 8 aa, Artificial sequence
  Protein classification predicting sequence
GWKATCIG

SEQ ID NO: 46759 - protein, 9 aa, Artificial sequence
  Protein classification predicting sequence
HAGTCLGIL

SEQ ID NO: 46760 - protein, 7 aa, Artificial sequence
  Protein classification predicting sequence
DANILIN

SEQ ID NO: 46761 - protein, 20 aa, Artificial sequence
  Protein classification predicting sequence
GGKRPFGVSLLYIGWDKHYG

SEQ ID NO: 46762 - protein, 8 aa, Artificial sequence
  Protein classification predicting sequence
RPFGVSLL

SEQ ID NO: 46763 - protein, 9 aa, Artificial sequence
  Protein classification predicting sequence
VAGITSDAN

SEQ ID NO: 46764 - protein, 11 aa, Artificial sequence
  Protein classification predicting sequence
YQEPMPVEQLV

SEQ ID NO: 46765 - protein, 14 aa, Artificial sequence
  Protein classification predicting sequence
CSVAGITSDANVLT

SEQ ID NO: 46766 - protein, 9 aa, Artificial sequence
  Protein classification predicting sequence
ELRLIAQRY

SEQ ID NO: 46767 - protein, 7 aa, Artificial sequence
  Protein classification predicting sequence
IPCEQLV

SEQ ID NO: 46768 - protein, 14 aa, Artificial sequence
  Protein classification predicting sequence
ACAVAGIMSDANIL

SEQ ID NO: 46769 - protein, 6 aa, Artificial sequence
  Protein classification predicting sequence
YQEPIP

SEQ ID NO: 46770 - protein, 7 aa, Artificial sequence
  Protein classification predicting sequence
SDPSGNY

SEQ ID NO: 46771 - protein, 15 aa, Artificial sequence
  Protein classification predicting sequence
TIFSPEGRLYQVEYA

SEQ ID NO: 46772 - protein, 6 aa, Artificial sequence
  Protein classification predicting sequence
YTQHGG

SEQ ID NO: 46773 - protein, 7 aa, Artificial sequence
  Protein classification predicting sequence
MSRPFGV

SEQ ID NO: 46774 - protein, 9 aa, Artificial sequence
  Protein classification predicting sequence
LAVEKRITS

SEQ ID NO: 46775 - protein, 7 aa, Artificial sequence
  Protein classification predicting sequence
RARVECQ

SEQ ID NO: 46776 - protein, 9 aa, Artificial sequence
  Protein classification predicting sequence
HMDPSGTFV

SEQ ID NO: 46777 - protein, 8 aa, Artificial sequence
  Protein classification predicting sequence
RPFGVALL

SEQ ID NO: 46778 - protein, 8 aa, Artificial sequence
  Protein classification predicting sequence
ARVETQNH

SEQ ID NO: 46779 - protein, 9 aa, Artificial sequence
  Protein classification predicting sequence
GVVLAVEKR

SEQ ID NO: 46780 - protein, 23 aa, Artificial sequence
  Protein classification predicting sequence
EYDRGVNTFSPEGRLFQVEYAIE

SEQ ID NO: 46781 - protein, 14 aa, Artificial sequence
  Protein classification predicting sequence
EYDRGVNTFSPEGR

SEQ ID NO: 46782 - protein, 6 aa, Artificial sequence
  Protein classification predicting sequence
EYDRGV

SEQ ID NO: 46783 - protein, 9 aa, Artificial sequence
  Protein classification predicting sequence
HIGCAMSGL

SEQ ID NO: 46784 - protein, 7 aa, Artificial sequence
  Protein classification predicting sequence
FSPEGRL

SEQ ID NO: 46785 - protein, 8 aa, Artificial sequence
  Protein classification predicting sequence
GHKATSAG

SEQ ID NO: 46786 - protein, 8 aa, Artificial sequence
  Protein classification predicting sequence
NFLEKKMK

SEQ ID NO: 46787 - protein, 8 aa, Artificial sequence
  Protein classification predicting sequence
TIFSPEGR

SEQ ID NO: 46788 - protein, 8 aa, Artificial sequence
  Protein classification predicting sequence
YTQNAEMR

SEQ ID NO: 46789 - protein, 8 aa, Artificial sequence
  Protein classification predicting sequence
ADSRSQVQ

SEQ ID NO: 46790 - protein, 14 aa, Artificial sequence
  Protein classification predicting sequence
QVYTQNAEMRPLGC

SEQ ID NO: 46791 - protein, 13 aa, Artificial sequence
  Protein classification predicting sequence
DRHITIFSPEGRL

SEQ ID NO: 46792 - protein, 8 aa, Artificial sequence
  Protein classification predicting sequence
QVEYAFKA

SEQ ID NO: 46793 - protein, 25 aa, Artificial sequence
  Protein classification predicting sequence
TSIGVRGKDSVCVVTQKKVPDKLLD

SEQ ID NO: 46794 - protein, 9 aa, Artificial sequence
  Protein classification predicting sequence
KKVPDKLLD

SEQ ID NO: 46795 - protein, 7 aa, Artificial sequence
  Protein classification predicting sequence
EKGPQLF

SEQ ID NO: 46796 - protein, 7 aa, Artificial sequence
  Protein classification predicting sequence
EIEVGVV

SEQ ID NO: 46797 - protein, 8 aa, Artificial sequence
  Protein classification predicting sequence
AYMRPLGV

SEQ ID NO: 46798 - protein, 7 aa, Artificial sequence
  Protein classification predicting sequence
IEKEKEE

SEQ ID NO: 46799 - protein, 8 aa, Artificial sequence
  Protein classification predicting sequence
EYITRYIA

SEQ ID NO: 46800 - protein, 6 aa, Artificial sequence
  Protein classification predicting sequence
EYITRY

SEQ ID NO: 46801 - protein, 7 aa, Artificial sequence
  Protein classification predicting sequence
GLTADAR

SEQ ID NO: 46802 - protein, 11 aa, Artificial sequence
  Protein classification predicting sequence
YTQSNGRRPFG

SEQ ID NO: 46803 - protein, 6 aa, Artificial sequence
  Protein classification predicting sequence
RPFGVS

SEQ ID NO: 46804 - protein, 6 aa, Artificial sequence
  Protein classification predicting sequence
VCMAFA

SEQ ID NO: 46805 - protein, 14 aa, Artificial sequence
  Protein classification predicting sequence
LTVEDPVTVEYITR

SEQ ID NO: 46806 - protein, 21 aa, Artificial sequence
  Protein classification predicting sequence
RLYQTDPSGTYHAWKANAIGR

SEQ ID NO: 46807 - protein, 12 aa, Artificial sequence
  Protein classification predicting sequence
IKALLEVVQSGG

SEQ ID NO: 46808 - protein, 18 aa, Artificial sequence
  Protein classification predicting sequence
IKALLEVVQSGGKNIELA

SEQ ID NO: 46809 - protein, 7 aa, Artificial sequence
  Protein classification predicting sequence
RRDQPLK

SEQ ID NO: 46810 - protein, 6 aa, Artificial sequence
  Protein classification predicting sequence
YDRAIT

SEQ ID NO: 46811 - protein, 13 aa, Artificial sequence
  Protein classification predicting sequence
FSPDGHLFQVEYA

SEQ ID NO: 46812 - protein, 7 aa, Artificial sequence
  Protein classification predicting sequence
ARIECQS

SEQ ID NO: 46813 - protein, 20 aa, Artificial sequence
  Protein classification predicting sequence
YDRAITVFSPDGHLFQVEYA

SEQ ID NO: 46814 - protein, 11 aa, Artificial sequence
  Protein classification predicting sequence
ERTVRKICALD

SEQ ID NO: 46815 - protein, 50 aa, Artificial sequence
  Protein classification predicting sequence
LKQRYTQSNGRRPFGISALIVGFDFDGTPRLYQTDPSGTYHAWKANAIGR

SEQ ID NO: 46816 - protein, 46 aa, Artificial sequence
  Protein classification predicting sequence
RRPFGISALIVGFDFDGTPRLYQTDPSGTYHAWKANAIGRGAKSVR

SEQ ID NO: 46817 - protein, 6 aa, Artificial sequence
  Protein classification predicting sequence
EAVRKG

SEQ ID NO: 46818 - protein, 6 aa, Artificial sequence
  Protein classification predicting sequence
QRYTQS

SEQ ID NO: 46819 - protein, 6 aa, Artificial sequence
  Protein classification predicting sequence
AVGVRG

SEQ ID NO: 46820 - protein, 16 aa, Artificial sequence
  Protein classification predicting sequence
HIALACAGLKADARVL

SEQ ID NO: 46821 - protein, 11 aa, Artificial sequence
  Protein classification predicting sequence
VTVEYITRYIA

SEQ ID NO: 46822 - protein, 24 aa, Artificial sequence
  Protein classification predicting sequence
LYQTDPSGTFSAWKANATGRNSNS

SEQ ID NO: 46823 - protein, 19 aa, Artificial sequence
  Protein classification predicting sequence
KLAIRALLEVVESGGKNIE

SEQ ID NO: 46824 - protein, 24 aa, Artificial sequence
  Protein classification predicting sequence
GLTADARIVINRARVECQSHRLTV

SEQ ID NO: 46825 - protein, 13 aa, Artificial sequence
  Protein classification predicting sequence
DPVTVEYITRYIA

SEQ ID NO: 46826 - protein, 41 aa, Artificial sequence
  Protein classification predicting sequence
AIETDDLTIKLVIKALLEVVQSGGKNIELAVMRRDQPLKIL

SEQ ID NO: 46827 - protein, 9 aa, Artificial sequence
  Protein classification predicting sequence
QVEYAQEAV

SEQ ID NO: 46828 - protein, 6 aa, Artificial sequence
  Protein classification predicting sequence
FQVEYA

SEQ ID NO: 46829 - protein, 8 aa, Artificial sequence
  Protein classification predicting sequence
LGADTRAT

SEQ ID NO: 46830 - protein, 7 aa, Artificial sequence
  Protein classification predicting sequence
IYCCGAG

SEQ ID NO: 46831 - protein, 10 aa, Artificial sequence
  Protein classification predicting sequence
VASDTRLSEG

SEQ ID NO: 46832 - protein, 11 aa, Artificial sequence
  Protein classification predicting sequence
RDSPKCYKLTD

SEQ ID NO: 46833 - protein, 32 aa, Artificial sequence
  Protein classification predicting sequence
TVIGCSGFHGDCLTLTKIIEARLKMYKHSNNK

SEQ ID NO: 46834 - protein, 12 aa, Artificial sequence
  Protein classification predicting sequence
GAIAAMLSTILY

SEQ ID NO: 46835 - protein, 17 aa, Artificial sequence
  Protein classification predicting sequence
KAGGSASAMLQPLLDNQ

SEQ ID NO: 46836 - protein, 20 aa, Artificial sequence
  Protein classification predicting sequence
LVKDVFISAAERDVYTGDAL

SEQ ID NO: 46837 - protein, 8 aa, Artificial sequence
  Protein classification predicting sequence
TKEGIREE

SEQ ID NO: 46838 - protein, 6 aa, Artificial sequence
  Protein classification predicting sequence
RFFPYY

SEQ ID NO: 46839 - protein, 8 aa, Artificial sequence
  Protein classification predicting sequence
FISAAERD

SEQ ID NO: 46840 - protein, 8 aa, Artificial sequence
  Protein classification predicting sequence
ERDIYTGD

SEQ ID NO: 46841 - protein, 14 aa, Artificial sequence
  Protein classification predicting sequence
GEAGDTVQFAEYIQ

SEQ ID NO: 46842 - protein, 8 aa, Artificial sequence
  Protein classification predicting sequence
LYEKRFGP

SEQ ID NO: 46843 - protein, 7 aa, Artificial sequence
  Protein classification predicting sequence
RFGIQAQ

SEQ ID NO: 46844 - protein, 8 aa, Artificial sequence
  Protein classification predicting sequence
LFETISQA

SEQ ID NO: 46845 - protein, 11 aa, Artificial sequence
  Protein classification predicting sequence
CVAIAADRRFG

SEQ ID NO: 46846 - protein, 33 aa, Artificial sequence
  Protein classification predicting sequence
QAQMVTTDFQKIFPMGDRLYIGLAGLATDVQTV

SEQ ID NO: 46847 - protein, 20 aa, Artificial sequence
  Protein classification predicting sequence
QRLKFRLNLYELKEGRQIKP

SEQ ID NO: 46848 - protein, 12 aa, Artificial sequence
  Protein classification predicting sequence
EPVIAGLDPKTF

SEQ ID NO: 46849 - protein, 15 aa, Artificial sequence
  Protein classification predicting sequence
PFICSLDLIGCPMVT

SEQ ID NO: 46850 - protein, 23 aa, Artificial sequence
  Protein classification predicting sequence
LFETISQAMLNAVDRDAVSGMGV

SEQ ID NO: 46851 - protein, 12 aa, Artificial sequence
  Protein classification predicting sequence
FRHKLYQLREER

SEQ ID NO: 46852 - protein, 10 aa, Artificial sequence
  Protein classification predicting sequence
RRSKMNPLWN

SEQ ID NO: 46853 - protein, 11 aa, Artificial sequence
  Protein classification predicting sequence
MRVLYYRDARS

SEQ ID NO: 46854 - protein, 7 aa, Artificial sequence
  Protein classification predicting sequence
GTTTLAF

SEQ ID NO: 46855 - protein, 6 aa, Artificial sequence
  Protein classification predicting sequence
IEINPY

SEQ ID NO: 46856 - protein, 8 aa, Artificial sequence
  Protein classification predicting sequence
GPGLYYVD

SEQ ID NO: 46857 - protein, 7 aa, Artificial sequence
  Protein classification predicting sequence
YAYGVMD

SEQ ID NO: 46858 - protein, 8 aa, Artificial sequence
  Protein classification predicting sequence
ISVSAASK

SEQ ID NO: 46859 - protein, 11 aa, Artificial sequence
  Protein classification predicting sequence
GPGLYYVDSEG

SEQ ID NO: 46860 - protein, 13 aa, Artificial sequence
  Protein classification predicting sequence
ASQTVKKVIEINP

SEQ ID NO: 46861 - protein, 11 aa, Artificial sequence
  Protein classification predicting sequence
KERISVAAASK

SEQ ID NO: 46862 - protein, 6 aa, Artificial sequence
  Protein classification predicting sequence
VYQYKG

SEQ ID NO: 46863 - protein, 8 aa, Artificial sequence
  Protein classification predicting sequence
TGTTIMAV

SEQ ID NO: 46864 - protein, 10 aa, Artificial sequence
  Protein classification predicting sequence
GSGSLAAMAV

SEQ ID NO: 46865 - protein, 8 aa, Artificial sequence
  Protein classification predicting sequence
NDLGSGSN

SEQ ID NO: 46866 - protein, 7 aa, Artificial sequence
  Protein classification predicting sequence
KVIEINP

SEQ ID NO: 46867 - protein, 18 aa, Artificial sequence
  Protein classification predicting sequence
EVHTGTTIMAVEFDGGVV

SEQ ID NO: 46868 - protein, 14 aa, Artificial sequence
  Protein classification predicting sequence
AVVNRVFDKLSPLH

SEQ ID NO: 46869 - protein, 12 aa, Artificial sequence
  Protein classification predicting sequence
ADMAAYQLELHG

SEQ ID NO: 46870 - protein, 10 aa, Artificial sequence
  Protein classification predicting sequence
NISYKYREDL

SEQ ID NO: 46871 - protein, 15 aa, Artificial sequence
  Protein classification predicting sequence
VAGWDQREGGQVYGT

SEQ ID NO: 46872 - protein, 13 aa, Artificial sequence
  Protein classification predicting sequence
IYGYVDAAYKPGM

SEQ ID NO: 46873 - protein, 11 aa, Artificial sequence
  Protein classification predicting sequence
CALSGSAADAQ

SEQ ID NO: 46874 - protein, 9 aa, Artificial sequence
  Protein classification predicting sequence
AHLIVAGWD

SEQ ID NO: 46875 - protein, 7 aa, Artificial sequence
  Protein classification predicting sequence
GGSGSSY

SEQ ID NO: 46876 - protein, 9 aa, Artificial sequence
  Protein classification predicting sequence
GSDSRVSAG

SEQ ID NO: 46877 - protein, 12 aa, Artificial sequence
  Protein classification predicting sequence
LAMNRDGSSGGV

SEQ ID NO: 46878 - protein, 11 aa, Artificial sequence
  Protein classification predicting sequence
AGAPTAGSFRT

SEQ ID NO: 46879 - protein, 39 aa, Artificial sequence
  Protein classification predicting sequence
CALSGSAADAQAIADMAAYQLELHGLELEEPPLVLAAAN

SEQ ID NO: 46880 - protein, 16 aa, Artificial sequence
  Protein classification predicting sequence
VKNISYKYREDLLAHL

SEQ ID NO: 46881 - protein, 18 aa, Artificial sequence
  Protein classification predicting sequence
EGGQVYGTMGGMLIRQPF

SEQ ID NO: 46882 - protein, 7 aa, Artificial sequence
  Protein classification predicting sequence
RPFGVAL

SEQ ID NO: 46883 - protein, 33 aa, Artificial sequence
  Protein classification predicting sequence
QQAYDRGITIFSPDGRLYQVEYAREAVKRGTAS

SEQ ID NO: 46884 - protein, 8 aa, Artificial sequence
  Protein classification predicting sequence
AGHVADAR

SEQ ID NO: 46885 - protein, 7 aa, Artificial sequence
  Protein classification predicting sequence
TIFSPEG

SEQ ID NO: 46886 - protein, 17 aa, Artificial sequence
  Protein classification predicting sequence
YDRAITVFSPDGRLFQV

SEQ ID NO: 46887 - protein, 12 aa, Artificial sequence
  Protein classification predicting sequence
QVEYAREAVKRG

SEQ ID NO: 46888 - protein, 9 aa, Artificial sequence
  Protein classification predicting sequence
YAREAVKRG

SEQ ID NO: 46889 - protein, 8 aa, Artificial sequence
  Protein classification predicting sequence
TQYGGVRP

SEQ ID NO: 46890 - protein, 8 aa, Artificial sequence
  Protein classification predicting sequence
EYKATAIG

SEQ ID NO: 46891 - protein, 12 aa, Artificial sequence
  Protein classification predicting sequence
ASAGHVADARQL

SEQ ID NO: 46892 - protein, 6 aa, Artificial sequence
  Protein classification predicting sequence
TDPSGT

SEQ ID NO: 46893 - protein, 10 aa, Artificial sequence
  Protein classification predicting sequence
YDRAITVFSP

SEQ ID NO: 46894 - protein, 9 aa, Artificial sequence
  Protein classification predicting sequence
GRLYQVEYA

SEQ ID NO: 46895 - protein, 9 aa, Artificial sequence
  Protein classification predicting sequence
CDIKQAYTQ

SEQ ID NO: 46896 - protein, 25 aa, Artificial sequence
  Protein classification predicting sequence
YDRAITVFSPDGRLFQVEYAREAVK

SEQ ID NO: 46897 - protein, 6 aa, Artificial sequence
  Protein classification predicting sequence
ICDLKQ

SEQ ID NO: 46898 - protein, 7 aa, Artificial sequence
  Protein classification predicting sequence
GGVRPFG

SEQ ID NO: 46899 - protein, 10 aa, Artificial sequence
  Protein classification predicting sequence
GTALLIAGVD

SEQ ID NO: 46900 - protein, 9 aa, Artificial sequence
  Protein classification predicting sequence
EAVKKGSTA

SEQ ID NO: 46901 - protein, 11 aa, Artificial sequence
  Protein classification predicting sequence
DPSGAYFAWKA

SEQ ID NO: 46902 - protein, 8 aa, Artificial sequence
  Protein classification predicting sequence
RILIDYAR

SEQ ID NO: 46903 - protein, 8 aa, Artificial sequence
  Protein classification predicting sequence
LYQTDPSG

SEQ ID NO: 46904 - protein, 7 aa, Artificial sequence
  Protein classification predicting sequence
EFLEKNY

SEQ ID NO: 46905 - protein, 11 aa, Artificial sequence
  Protein classification predicting sequence
SGIIADARVLV

SEQ ID NO: 46906 - protein, 7 aa, Artificial sequence
  Protein classification predicting sequence
ADARVLV

SEQ ID NO: 46907 - protein, 7 aa, Artificial sequence
  Protein classification predicting sequence
DPSGAYF

SEQ ID NO: 46908 - protein, 7 aa, Artificial sequence
  Protein classification predicting sequence
EDYSELD

SEQ ID NO: 46909 - protein, 7 aa, Artificial sequence
  Protein classification predicting sequence
KGTTTVG

SEQ ID NO: 46910 - protein, 7 aa, Artificial sequence
  Protein classification predicting sequence
LKEKYTI

SEQ ID NO: 46911 - protein, 7 aa, Artificial sequence
  Protein classification predicting sequence
EIVEKSL

SEQ ID NO: 46912 - protein, 7 aa, Artificial sequence
  Protein classification predicting sequence
TAFFYMG

SEQ ID NO: 46913 - protein, 7 aa, Artificial sequence
  Protein classification predicting sequence
NPKDQRT

SEQ ID NO: 46914 - protein, 11 aa, Artificial sequence
  Protein classification predicting sequence
GMVFQQPNPFP

SEQ ID NO: 46915 - protein, 13 aa, Artificial sequence
  Protein classification predicting sequence
DEPTSALDPISTL

SEQ ID NO: 46916 - protein, 7 aa, Artificial sequence
  Protein classification predicting sequence
LRCFNRM

SEQ ID NO: 46917 - protein, 6 aa, Artificial sequence
  Protein classification predicting sequence
MVFQKP

SEQ ID NO: 46918 - protein, 7 aa, Artificial sequence
  Protein classification predicting sequence
AALWDEV

SEQ ID NO: 46919 - protein, 13 aa, Artificial sequence
  Protein classification predicting sequence
LSGGQQQRLCIAR

SEQ ID NO: 46920 - protein, 8 aa, Artificial sequence
  Protein classification predicting sequence
TALIGPSG

SEQ ID NO: 46921 - protein, 6 aa, Artificial sequence
  Protein classification predicting sequence
NRMNDL

SEQ ID NO: 46922 - protein, 6 aa, Artificial sequence
  Protein classification predicting sequence
WDEVKD

SEQ ID NO: 46923 - protein, 7 aa, Artificial sequence
  Protein classification predicting sequence
LKKDYTI

SEQ ID NO: 46924 - protein, 9 aa, Artificial sequence
  Protein classification predicting sequence
LRSLNRMND

SEQ ID NO: 46925 - protein, 9 aa, Artificial sequence
  Protein classification predicting sequence
DEPASALDP

SEQ ID NO: 46926 - protein, 9 aa, Artificial sequence
  Protein classification predicting sequence
KKVLDEIVE

SEQ ID NO: 46927 - protein, 12 aa, Artificial sequence
  Protein classification predicting sequence
VTALIGPSGCGK

SEQ ID NO: 46928 - protein, 7 aa, Artificial sequence
  Protein classification predicting sequence
LRTLNRM

SEQ ID NO: 46929 - protein, 6 aa, Artificial sequence
  Protein classification predicting sequence
LDPIST

SEQ ID NO: 46930 - protein, 8 aa, Artificial sequence
  Protein classification predicting sequence
EARGEVLL

SEQ ID NO: 46931 - protein, 9 aa, Artificial sequence
  Protein classification predicting sequence
AALWDEVKD

SEQ ID NO: 46932 - protein, 12 aa, Artificial sequence
  Protein classification predicting sequence
SALDPISTGRIE

SEQ ID NO: 46933 - protein, 8 aa, Artificial sequence
  Protein classification predicting sequence
YGDKQALF

SEQ ID NO: 46934 - protein, 26 aa, Artificial sequence
  Protein classification predicting sequence
VTAFIGPSGCGKSTLLRCINRMNDLV

SEQ ID NO: 46935 - protein, 7 aa, Artificial sequence
  Protein classification predicting sequence
NRMNDLV

SEQ ID NO: 46936 - protein, 12 aa, Artificial sequence
  Protein classification predicting sequence
VGMVFQRPNPFP

SEQ ID NO: 46937 - protein, 27 aa, Artificial sequence
  Protein classification predicting sequence
VGMVFQRPNPFPKSIYENVVYGLRLQG

SEQ ID NO: 46938 - protein, 10 aa, Artificial sequence
  Protein classification predicting sequence
SLRGAAIWDE

SEQ ID NO: 46939 - protein, 5 aa, Artificial sequence
  Protein classification predicting sequence
TAFMY

SEQ ID NO: 46940 - protein, 8 aa, Artificial sequence
  Protein classification predicting sequence
YSPRTDTV

SEQ ID NO: 46941 - protein, 17 aa, Artificial sequence
  Protein classification predicting sequence
LRKEIGMVFQQPNPFPM

SEQ ID NO: 46942 - protein, 6 aa, Artificial sequence
  Protein classification predicting sequence
PNPFPM

SEQ ID NO: 46943 - protein, 23 aa, Artificial sequence
  Protein classification predicting sequence
IILLDEPTSALDPISAGKIEETL

SEQ ID NO: 46944 - protein, 8 aa, Artificial sequence
  Protein classification predicting sequence
SDRTGFFL

SEQ ID NO: 46945 - protein, 6 aa, Artificial sequence
  Protein classification predicting sequence
DLSVYY

SEQ ID NO: 46946 - protein, 8 aa, Artificial sequence
  Protein classification predicting sequence
YNGHNIYS

SEQ ID NO: 46947 - protein, 9 aa, Artificial sequence
  Protein classification predicting sequence
GLSGGQQQR

SEQ ID NO: 46948 - protein, 20 aa, Artificial sequence
  Protein classification predicting sequence
IILLDEPTSALDPISAGKIE

SEQ ID NO: 46949 - protein, 7 aa, Artificial sequence
  Protein classification predicting sequence
DLNPEVT

SEQ ID NO: 46950 - protein, 6 aa, Artificial sequence
  Protein classification predicting sequence
LKKDYT

SEQ ID NO: 46951 - protein, 10 aa, Artificial sequence
  Protein classification predicting sequence
VTRSMQQASR

SEQ ID NO: 46952 - protein, 15 aa, Artificial sequence
  Protein classification predicting sequence
VYNGHNIYSPRTDTV

SEQ ID NO: 46953 - protein, 8 aa, Artificial sequence
  Protein classification predicting sequence
ARVLATSP

SEQ ID NO: 46954 - protein, 7 aa, Artificial sequence
  Protein classification predicting sequence
FQRPNPF

SEQ ID NO: 46955 - protein, 31 aa, Artificial sequence
  Protein classification predicting sequence
RQVTALIGPSGCGKSTLLRCLNRMNDLIEGV

SEQ ID NO: 46956 - protein, 16 aa, Artificial sequence
  Protein classification predicting sequence
VGMVFQKPNPFPMSIY

SEQ ID NO: 46957 - protein, 9 aa, Artificial sequence
  Protein classification predicting sequence
LSGGQQQRL

SEQ ID NO: 46958 - protein, 35 aa, Artificial sequence
  Protein classification predicting sequence
LKKNYTIVIVTHSMQQARRISDRTAFFLMGELVEH

SEQ ID NO: 46959 - protein, 13 aa, Artificial sequence
  Protein classification predicting sequence
VTHNMQQAARVSD

SEQ ID NO: 46960 - protein, 8 aa, Artificial sequence
  Protein classification predicting sequence
SALDPIAT

SEQ ID NO: 46961 - protein, 7 aa, Artificial sequence
  Protein classification predicting sequence
TAFFLNG

SEQ ID NO: 46962 - protein, 9 aa, Artificial sequence
  Protein classification predicting sequence
LYPEQRAEG

SEQ ID NO: 46963 - protein, 31 aa, Artificial sequence
  Protein classification predicting sequence
ETKDKLHQSGYSLSGGQQQRLCIARGIAIRP

SEQ ID NO: 46964 - protein, 16 aa, Artificial sequence
  Protein classification predicting sequence
VLLLDEPCSALDPIST

SEQ ID NO: 46965 - protein, 23 aa, Artificial sequence
  Protein classification predicting sequence
VLLLDEPCSALDPISTGRIEELI

SEQ ID NO: 46966 - protein, 7 aa, Artificial sequence
  Protein classification predicting sequence
DTDTLFT

SEQ ID NO: 46967 - protein, 9 aa, Artificial sequence
  Protein classification predicting sequence
IYDNITYGP

SEQ ID NO: 46968 - protein, 8 aa, Artificial sequence
  Protein classification predicting sequence
PNPFPKSI

SEQ ID NO: 46969 - protein, 10 aa, Artificial sequence
  Protein classification predicting sequence
LRRAALWDEV

SEQ ID NO: 46970 - protein, 14 aa, Artificial sequence
  Protein classification predicting sequence
GLSGGQQQRLCIAR

SEQ ID NO: 46971 - protein, 7 aa, Artificial sequence
  Protein classification predicting sequence
GKSTYLR

SEQ ID NO: 46972 - protein, 6 aa, Artificial sequence
  Protein classification predicting sequence
LNRMND

SEQ ID NO: 46973 - protein, 7 aa, Artificial sequence
  Protein classification predicting sequence
QRLCIAR

SEQ ID NO: 46974 - protein, 16 aa, Artificial sequence
  Protein classification predicting sequence
LRKEIGMVFQQPNPFP

SEQ ID NO: 46975 - protein, 6 aa, Artificial sequence
  Protein classification predicting sequence
AAIWDE

SEQ ID NO: 46976 - protein, 9 aa, Artificial sequence
  Protein classification predicting sequence
MQQASRISD

SEQ ID NO: 46977 - protein, 7 aa, Artificial sequence
  Protein classification predicting sequence
DLHVYYG

SEQ ID NO: 46978 - protein, 9 aa, Artificial sequence
  Protein classification predicting sequence
RKEIGMVFQ

SEQ ID NO: 46979 - protein, 6 aa, Artificial sequence
  Protein classification predicting sequence
RRRVGM

SEQ ID NO: 46980 - protein, 7 aa, Artificial sequence
  Protein classification predicting sequence
QAARISD

SEQ ID NO: 46981 - protein, 20 aa, Artificial sequence
  Protein classification predicting sequence
VTAFIGPSGCGKSTLLRTFN

SEQ ID NO: 46982 - protein, 7 aa, Artificial sequence
  Protein classification predicting sequence
EGVKITG

SEQ ID NO: 46983 - protein, 23 aa, Artificial sequence
  Protein classification predicting sequence
VILMDEPTSALDPIATHKIEELM

SEQ ID NO: 46984 - protein, 7 aa, Artificial sequence
  Protein classification predicting sequence
TIVIVTH

SEQ ID NO: 46985 - protein, 10 aa, Artificial sequence
  Protein classification predicting sequence
ERHIITFPEE

SEQ ID NO: 46986 - protein, 34 aa, Artificial sequence
  Protein classification predicting sequence
KITALIGPSGCGKSTYLRSLNRMNDTIDIARVTG

SEQ ID NO: 46987 - protein, 21 aa, Artificial sequence
  Protein classification predicting sequence
GMVFQRPNPFAKSIYKNITFA

SEQ ID NO: 46988 - protein, 15 aa, Artificial sequence
  Protein classification predicting sequence
LSGGQQQRLCIARAI

SEQ ID NO: 46989 - protein, 8 aa, Artificial sequence
  Protein classification predicting sequence
ERAGVKDK

SEQ ID NO: 46990 - protein, 27 aa, Artificial sequence
  Protein classification predicting sequence
QVKDDLHKSAFTLSGGQQQRLCIARAI

SEQ ID NO: 46991 - protein, 27 aa, Artificial sequence
  Protein classification predicting sequence
VKPDILLMDEPASALDPIATMQLEETM

SEQ ID NO: 46992 - protein, 27 aa, Artificial sequence
  Protein classification predicting sequence
NYTIIIVTHNMQQAARASDYTAFFYLG

SEQ ID NO: 46993 - protein, 10 aa, Artificial sequence
  Protein classification predicting sequence
GMVFQRPNPF

SEQ ID NO: 46994 - protein, 25 aa, Artificial sequence
  Protein classification predicting sequence
INVYEMRKHIGMVFQRPNPFAKSIY

SEQ ID NO: 46995 - protein, 14 aa, Artificial sequence
  Protein classification predicting sequence
NITFAHERAGVKDK

SEQ ID NO: 46996 - protein, 12 aa, Artificial sequence
  Protein classification predicting sequence
TIIIVTHNMQQA

SEQ ID NO: 46997 - protein, 19 aa, Artificial sequence
  Protein classification predicting sequence
TIIIVTHNMQQAARASDYT

SEQ ID NO: 46998 - protein, 8 aa, Artificial sequence
  Protein classification predicting sequence
VTHSMQQA

SEQ ID NO: 46999 - protein, 6 aa, Artificial sequence
  Protein classification predicting sequence
MQQAAR

SEQ ID NO: 47000 - protein, 16 aa, Artificial sequence
  Protein classification predicting sequence
LSGGQQQRLCIARAIA

SEQ ID NO: 47001 - protein, 5 aa, Artificial sequence
  Protein classification predicting sequence
YYGKF

SEQ ID NO: 47002 - protein, 9 aa, Artificial sequence
  Protein classification predicting sequence
SIYDNIAFG

SEQ ID NO: 47003 - protein, 12 aa, Artificial sequence
  Protein classification predicting sequence
SGGQQQRLCIAR

SEQ ID NO: 47004 - protein, 6 aa, Artificial sequence
  Protein classification predicting sequence
SIYDNI

SEQ ID NO: 47005 - protein, 7 aa, Artificial sequence
  Protein classification predicting sequence
EAIKGID

SEQ ID NO: 47006 - protein, 8 aa, Artificial sequence
  Protein classification predicting sequence
MQQAARVS

SEQ ID NO: 47007 - protein, 9 aa, Artificial sequence
  Protein classification predicting sequence
RVGMVFQKP

SEQ ID NO: 47008 - protein, 6 aa, Artificial sequence
  Protein classification predicting sequence
IYENIA

SEQ ID NO: 47009 - protein, 12 aa, Artificial sequence
  Protein classification predicting sequence
TIVIVTHSMQQA

SEQ ID NO: 47010 - protein, 8 aa, Artificial sequence
  Protein classification predicting sequence
NKVTALIG

SEQ ID NO: 47011 - protein, 12 aa, Artificial sequence
  Protein classification predicting sequence
GMVFQKPNPFPK

SEQ ID NO: 47012 - protein, 11 aa, Artificial sequence
  Protein classification predicting sequence
TAIIGPSGCGK

SEQ ID NO: 47013 - protein, 8 aa, Artificial sequence
  Protein classification predicting sequence
QQAARISD

SEQ ID NO: 47014 - protein, 23 aa, Artificial sequence
  Protein classification predicting sequence
LDEIVEKSLRGAAIWDELKDRLH

SEQ ID NO: 47015 - protein, 12 aa, Artificial sequence
  Protein classification predicting sequence
PNPFPKSIYENV

SEQ ID NO: 47016 - protein, 8 aa, Artificial sequence
  Protein classification predicting sequence
VTHNMQQA

SEQ ID NO: 47017 - protein, 7 aa, Artificial sequence
  Protein classification predicting sequence
SDKTAFF

SEQ ID NO: 47018 - protein, 11 aa, Artificial sequence
  Protein classification predicting sequence
KTLNRMVELVP

SEQ ID NO: 47019 - protein, 8 aa, Artificial sequence
  Protein classification predicting sequence
WDEVKDRL

SEQ ID NO: 47020 - protein, 13 aa, Artificial sequence
  Protein classification predicting sequence
VILMDEPTSALDP

SEQ ID NO: 47021 - protein, 11 aa, Artificial sequence
  Protein classification predicting sequence
LMDEPTSALDP

SEQ ID NO: 47022 - protein, 14 aa, Artificial sequence
  Protein classification predicting sequence
IVTHNMQQAARISD

SEQ ID NO: 47023 - protein, 7 aa, Artificial sequence
  Protein classification predicting sequence
TAFFYLG

SEQ ID NO: 47024 - protein, 7 aa, Artificial sequence
  Protein classification predicting sequence
NRMNDTI

SEQ ID NO: 47025 - protein, 6 aa, Artificial sequence
  Protein classification predicting sequence
PFPKSI

SEQ ID NO: 47026 - protein, 14 aa, Artificial sequence
  Protein classification predicting sequence
LSGGQQQRLCIARA

SEQ ID NO: 47027 - protein, 7 aa, Artificial sequence
  Protein classification predicting sequence
TAFMYLG

SEQ ID NO: 47028 - protein, 7 aa, Artificial sequence
  Protein classification predicting sequence
LRGANLW

SEQ ID NO: 47029 - protein, 8 aa, Artificial sequence
  Protein classification predicting sequence
EDLINELK

SEQ ID NO: 47030 - protein, 8 aa, Artificial sequence
  Protein classification predicting sequence
KDKLHQSG

SEQ ID NO: 47031 - protein, 13 aa, Artificial sequence
  Protein classification predicting sequence
TALIGPSGCGKST

SEQ ID NO: 47032 - protein, 7 aa, Artificial sequence
  Protein classification predicting sequence
YGPKIHG

SEQ ID NO: 47033 - protein, 8 aa, Artificial sequence
  Protein classification predicting sequence
ALWDEVKD

SEQ ID NO: 47034 - protein, 13 aa, Artificial sequence
  Protein classification predicting sequence
IGPSGCGKSTLLR

SEQ ID NO: 47035 - protein, 17 aa, Artificial sequence
  Protein classification predicting sequence
IGPSGCGKSTLLRIFNR

SEQ ID NO: 47036 - protein, 7 aa, Artificial sequence
  Protein classification predicting sequence
LYPGQRA

SEQ ID NO: 47037 - protein, 8 aa, Artificial sequence
  Protein classification predicting sequence
SEMDDRVE

SEQ ID NO: 47038 - protein, 10 aa, Artificial sequence
  Protein classification predicting sequence
SALDPISTAK

SEQ ID NO: 47039 - protein, 6 aa, Artificial sequence
  Protein classification predicting sequence
NVAYGP

SEQ ID NO: 47040 - protein, 7 aa, Artificial sequence
  Protein classification predicting sequence
GMVFQKP

SEQ ID NO: 47041 - protein, 22 aa, Artificial sequence
  Protein classification predicting sequence
GMVFQKPTPFPMSIYDNIAFGV

SEQ ID NO: 47042 - protein, 13 aa, Artificial sequence
  Protein classification predicting sequence
TAFIGPSGCGKST

SEQ ID NO: 47043 - protein, 6 aa, Artificial sequence
  Protein classification predicting sequence
LWNEVK

SEQ ID NO: 47044 - protein, 8 aa, Artificial sequence
  Protein classification predicting sequence
QQAARCSD

SEQ ID NO: 47045 - protein, 7 aa, Artificial sequence
  Protein classification predicting sequence
VTHNMQQ

SEQ ID NO: 47046 - protein, 10 aa, Artificial sequence
  Protein classification predicting sequence
GLSGGQQQRL

SEQ ID NO: 47047 - protein, 7 aa, Artificial sequence
  Protein classification predicting sequence
LRAINRM

SEQ ID NO: 47048 - protein, 6 aa, Artificial sequence
  Protein classification predicting sequence
RVSDYT

SEQ ID NO: 47049 - protein, 10 aa, Artificial sequence
  Protein classification predicting sequence
IIVTHNMQQA

SEQ ID NO: 47050 - protein, 14 aa, Artificial sequence
  Protein classification predicting sequence
VTALIGPSGCGKST

SEQ ID NO: 47051 - protein, 17 aa, Artificial sequence
  Protein classification predicting sequence
VTALIGPSGCGKSTFLR

SEQ ID NO: 47052 - protein, 7 aa, Artificial sequence
  Protein classification predicting sequence
CIARAIA

SEQ ID NO: 47053 - protein, 9 aa, Artificial sequence
  Protein classification predicting sequence
LRSINRMND

SEQ ID NO: 47054 - protein, 6 aa, Artificial sequence
  Protein classification predicting sequence
AALWDE

SEQ ID NO: 47055 - protein, 12 aa, Artificial sequence
  Protein classification predicting sequence
SALDPISTSKIE

SEQ ID NO: 47056 - protein, 7 aa, Artificial sequence
  Protein classification predicting sequence
LRSINRM

SEQ ID NO: 47057 - protein, 29 aa, Artificial sequence
  Protein classification predicting sequence
EVKDRLDKPGGGLSGGQQQRLCIARAIAV

SEQ ID NO: 47058 - protein, 17 aa, Artificial sequence
  Protein classification predicting sequence
LSGGQQQRLCIARAIAV

SEQ ID NO: 47059 - protein, 6 aa, Artificial sequence
  Protein classification predicting sequence
NRMHEV

SEQ ID NO: 47060 - protein, 7 aa, Artificial sequence
  Protein classification predicting sequence
GEILLDG

SEQ ID NO: 47061 - protein, 7 aa, Artificial sequence
  Protein classification predicting sequence
EKSLRGA

SEQ ID NO: 47062 - protein, 6 aa, Artificial sequence
  Protein classification predicting sequence
NRMHDL

SEQ ID NO: 47063 - protein, 9 aa, Artificial sequence
  Protein classification predicting sequence
RRRVGMVFQ

SEQ ID NO: 47064 - protein, 10 aa, Artificial sequence
  Protein classification predicting sequence
IGPSGCGKST

SEQ ID NO: 47065 - protein, 13 aa, Artificial sequence
  Protein classification predicting sequence
IGPSGCGKSTFLR

SEQ ID NO: 47066 - protein, 7 aa, Artificial sequence
  Protein classification predicting sequence
YGPRIHG

SEQ ID NO: 47067 - protein, 7 aa, Artificial sequence
  Protein classification predicting sequence
LWDEVKD

SEQ ID NO: 47068 - protein, 7 aa, Artificial sequence
  Protein classification predicting sequence
RVSQRTA

SEQ ID NO: 47069 - protein, 17 aa, Artificial sequence
  Protein classification predicting sequence
VTAFIGPSGCGKSTLLR

SEQ ID NO: 47070 - protein, 22 aa, Artificial sequence
  Protein classification predicting sequence
VTAFIGPSGCGKSTLLRTFNKM

SEQ ID NO: 47071 - protein, 18 aa, Artificial sequence
  Protein classification predicting sequence
PEVLLLDEPCSALDPIST

SEQ ID NO: 47072 - protein, 12 aa, Artificial sequence
  Protein classification predicting sequence
DEPCSALDPIST

SEQ ID NO: 47073 - protein, 12 aa, Artificial sequence
  Protein classification predicting sequence
SALDPISTSRIE

SEQ ID NO: 47074 - protein, 30 aa, Artificial sequence
  Protein classification predicting sequence
RIEELITELKQDYTVVIVTHNMQQAARCSD

SEQ ID NO: 47075 - protein, 14 aa, Artificial sequence
  Protein classification predicting sequence
LNFYYGKFHALKNI

SEQ ID NO: 47076 - protein, 16 aa, Artificial sequence
  Protein classification predicting sequence
LRCFNRMHDLYPGNRY

SEQ ID NO: 47077 - protein, 8 aa, Artificial sequence
  Protein classification predicting sequence
WNEVKDRL

SEQ ID NO: 47078 - protein, 6 aa, Artificial sequence
  Protein classification predicting sequence
SDYTAF

SEQ ID NO: 47079 - protein, 7 aa, Artificial sequence
  Protein classification predicting sequence
YYGKFHA

SEQ ID NO: 47080 - protein, 29 aa, Artificial sequence
  Protein classification predicting sequence
EPRSVTAFIGPSGCGKSTFLRTLNRMHEV

SEQ ID NO: 47081 - protein, 10 aa, Artificial sequence
  Protein classification predicting sequence
LRTLNRMHEV

SEQ ID NO: 47082 - protein, 7 aa, Artificial sequence
  Protein classification predicting sequence
TLKVEEL

SEQ ID NO: 47083 - protein, 6 aa, Artificial sequence
  Protein classification predicting sequence
AALWNE

SEQ ID NO: 47084 - protein, 6 aa, Artificial sequence
  Protein classification predicting sequence
IVTHSM

SEQ ID NO: 47085 - protein, 7 aa, Artificial sequence
  Protein classification predicting sequence
NRLNDLI

SEQ ID NO: 47086 - protein, 10 aa, Artificial sequence
  Protein classification predicting sequence
VTHNMQQASR

SEQ ID NO: 47087 - protein, 8 aa, Artificial sequence
  Protein classification predicting sequence
LIEFGETE

SEQ ID NO: 47088 - protein, 17 aa, Artificial sequence
  Protein classification predicting sequence
NTVTALIGPSGCGKSTF

SEQ ID NO: 47089 - protein, 15 aa, Artificial sequence
  Protein classification predicting sequence
VTALIGPSGCGKSTF

SEQ ID NO: 47090 - protein, 11 aa, Artificial sequence
  Protein classification predicting sequence
IGPSGCGKSTF

SEQ ID NO: 47091 - protein, 9 aa, Artificial sequence
  Protein classification predicting sequence
PEVILMDEP

SEQ ID NO: 47092 - protein, 8 aa, Artificial sequence
  Protein classification predicting sequence
HALKDINL

SEQ ID NO: 47093 - protein, 12 aa, Artificial sequence
  Protein classification predicting sequence
LRSKVGMVFQKP

SEQ ID NO: 47094 - protein, 7 aa, Artificial sequence
  Protein classification predicting sequence
SIYDNIA

SEQ ID NO: 47095 - protein, 11 aa, Artificial sequence
  Protein classification predicting sequence
PDVLLMDEPCS

SEQ ID NO: 47096 - protein, 13 aa, Artificial sequence
  Protein classification predicting sequence
SLRSAALWDEVKD

SEQ ID NO: 47097 - protein, 8 aa, Artificial sequence
  Protein classification predicting sequence
LKEKYTII

SEQ ID NO: 47098 - protein, 9 aa, Artificial sequence
  Protein classification predicting sequence
VLLMDEPCS

SEQ ID NO: 47099 - protein, 9 aa, Artificial sequence
  Protein classification predicting sequence
FHAVADVSL

SEQ ID NO: 47100 - protein, 6 aa, Artificial sequence
  Protein classification predicting sequence
FFNLEA

SEQ ID NO: 47101 - protein, 13 aa, Artificial sequence
  Protein classification predicting sequence
TAIIGPSGCGKST

SEQ ID NO: 47102 - protein, 8 aa, Artificial sequence
  Protein classification predicting sequence
YGPKIHGI

SEQ ID NO: 47103 - protein, 25 aa, Artificial sequence
  Protein classification predicting sequence
YGPKIHGIKNKKVLDEIVEKSLRGA

SEQ ID NO: 47104 - protein, 8 aa, Artificial sequence
  Protein classification predicting sequence
EELVQELK

SEQ ID NO: 47105 - protein, 21 aa, Artificial sequence
  Protein classification predicting sequence
RAKVGMVFQKPTPFPMSIYDN

SEQ ID NO: 47106 - protein, 6 aa, Artificial sequence
  Protein classification predicting sequence
RVEWAL

SEQ ID NO: 47107 - protein, 28 aa, Artificial sequence
  Protein classification predicting sequence
AIKPEVLLLDEPCSALDPISTAKIEELI

SEQ ID NO: 47108 - protein, 10 aa, Artificial sequence
  Protein classification predicting sequence
VTHNMQQAAR

SEQ ID NO: 47109 - protein, 6 aa, Artificial sequence
  Protein classification predicting sequence
EQRAEG

SEQ ID NO: 47110 - protein, 8 aa, Artificial sequence
  Protein classification predicting sequence
NILTDKQD

SEQ ID NO: 47111 - protein, 8 aa, Artificial sequence
  Protein classification predicting sequence
VGMVFQKP

SEQ ID NO: 47112 - protein, 32 aa, Artificial sequence
  Protein classification predicting sequence
VGMVFQKPTPFPMSIYDNIAFGVRLFEKLSRA

SEQ ID NO: 47113 - protein, 15 aa, Artificial sequence
  Protein classification predicting sequence
MDERVQWALTKAALW

SEQ ID NO: 47114 - protein, 15 aa, Artificial sequence
  Protein classification predicting sequence
YTVVIVTHNMQQAAR

SEQ ID NO: 47115 - protein, 18 aa, Artificial sequence
  Protein classification predicting sequence
YTVVIVTHNMQQAARCSD

SEQ ID NO: 47116 - protein, 32 aa, Artificial sequence
  Protein classification predicting sequence
YTVVIVTHNMQQAARCSDHTAFMYLGELIEFS

SEQ ID NO: 47117 - protein, 11 aa, Artificial sequence
  Protein classification predicting sequence
FIGPSGCGKST

SEQ ID NO: 47118 - protein, 11 aa, Artificial sequence
  Protein classification predicting sequence
AALWDEVKDRL

SEQ ID NO: 47119 - protein, 28 aa, Artificial sequence
  Protein classification predicting sequence
AIEPEVLLLDEPTSALDPISTLTIEELI

SEQ ID NO: 47120 - protein, 9 aa, Artificial sequence
  Protein classification predicting sequence
IVTHNMQQA

SEQ ID NO: 47121 - protein, 11 aa, Artificial sequence
  Protein classification predicting sequence
IVTHNMQQAAR

SEQ ID NO: 47122 - protein, 14 aa, Artificial sequence
  Protein classification predicting sequence
IVTHNMQQAARVSD

SEQ ID NO: 47123 - protein, 8 aa, Artificial sequence
  Protein classification predicting sequence
TEDYITGR

SEQ ID NO: 47124 - protein, 7 aa, Artificial sequence
  Protein classification predicting sequence
ELKERFT

SEQ ID NO: 47125 - protein, 12 aa, Artificial sequence
  Protein classification predicting sequence
VIVTHNMQQAAR

SEQ ID NO: 47126 - protein, 15 aa, Artificial sequence
  Protein classification predicting sequence
VIVTHNMQQAARVSD

SEQ ID NO: 47127 - protein, 6 aa, Artificial sequence
  Protein classification predicting sequence
TAFFNL

SEQ ID NO: 47128 - protein, 15 aa, Artificial sequence
  Protein classification predicting sequence
FNRMNDLVDGCRVEG

SEQ ID NO: 47129 - protein, 10 aa, Artificial sequence
  Protein classification predicting sequence
IYENVVYGLR

SEQ ID NO: 47130 - protein, 50 aa, Artificial sequence
  Protein classification predicting sequence
EVKDRLHESALGLSGGQQQRLVIARTIAVEPEVLLLDEPCSALDPISTLK

SEQ ID NO: 47131 - protein, 14 aa, Artificial sequence
  Protein classification predicting sequence
DEPCSALDPISTLK

SEQ ID NO: 47132 - protein, 10 aa, Artificial sequence
  Protein classification predicting sequence
EELIYELKSK

SEQ ID NO: 47133 - protein, 12 aa, Artificial sequence
  Protein classification predicting sequence
TIVIVTHNMQQA

SEQ ID NO: 47134 - protein, 17 aa, Artificial sequence
  Protein classification predicting sequence
TIVIVTHNMQQAARVSD

SEQ ID NO: 47135 - protein, 7 aa, Artificial sequence
  Protein classification predicting sequence
TIVLVTH

SEQ ID NO: 47136 - protein, 6 aa, Artificial sequence
  Protein classification predicting sequence
LHVYYG

SEQ ID NO: 47137 - protein, 15 aa, Artificial sequence
  Protein classification predicting sequence
GPSGCGKSTLLRTFN

SEQ ID NO: 47138 - protein, 9 aa, Artificial sequence
  Protein classification predicting sequence
RKKVGMVFQ

SEQ ID NO: 47139 - protein, 7 aa, Artificial sequence
  Protein classification predicting sequence
TAKIEEL

SEQ ID NO: 47140 - protein, 7 aa, Artificial sequence
  Protein classification predicting sequence
PFPMSIY

SEQ ID NO: 47141 - protein, 8 aa, Artificial sequence
  Protein classification predicting sequence
NIAFGVRL

SEQ ID NO: 47142 - protein, 10 aa, Artificial sequence
  Protein classification predicting sequence
LRRRVGMVFQ

SEQ ID NO: 47143 - protein, 7 aa, Artificial sequence
  Protein classification predicting sequence
SIYDNVA

SEQ ID NO: 47144 - protein, 9 aa, Artificial sequence
  Protein classification predicting sequence
VRDLNFYYG

SEQ ID NO: 47145 - protein, 7 aa, Artificial sequence
  Protein classification predicting sequence
LRGAALW

SEQ ID NO: 47146 - protein, 11 aa, Artificial sequence
  Protein classification predicting sequence
LYPEQRAEGEI

SEQ ID NO: 47147 - protein, 21 aa, Artificial sequence
  Protein classification predicting sequence
LYPEQRAEGEILLDGDNILTN

SEQ ID NO: 47148 - protein, 9 aa, Artificial sequence
  Protein classification predicting sequence
LNRMVELVP

SEQ ID NO: 47149 - protein, 13 aa, Artificial sequence
  Protein classification predicting sequence
LSGGQQQRVCIAR

SEQ ID NO: 47150 - protein, 16 aa, Artificial sequence
  Protein classification predicting sequence
VILMDEPTSALDPIST

SEQ ID NO: 47151 - protein, 17 aa, Artificial sequence
  Protein classification predicting sequence
VILMDEPTSALDPISTL

SEQ ID NO: 47152 - protein, 23 aa, Artificial sequence
  Protein classification predicting sequence
YSTQNLDLWYGENHALQNINLDI

SEQ ID NO: 47153 - protein, 28 aa, Artificial sequence
  Protein classification predicting sequence
LRTNVGMVFQQPNPFPKSIYDNITYGPK

SEQ ID NO: 47154 - protein, 28 aa, Artificial sequence
  Protein classification predicting sequence
VILMDEPTSALDPISTLRVEELVQELKE

SEQ ID NO: 47155 - protein, 39 aa, Artificial sequence
  Protein classification predicting sequence
IIMVTHNMQQAARVSDKTAFFLNGYVNEYDDTDKIFSNP

SEQ ID NO: 47156 - protein, 6 aa, Artificial sequence
  Protein classification predicting sequence
GPRIHG

SEQ ID NO: 47157 - protein, 14 aa, Artificial sequence
  Protein classification predicting sequence
VTAFIGPSGCGKST

SEQ ID NO: 47158 - protein, 10 aa, Artificial sequence
  Protein classification predicting sequence
GMVFQKPTPF

SEQ ID NO: 47159 - protein, 6 aa, Artificial sequence
  Protein classification predicting sequence
IIIVTH

SEQ ID NO: 47160 - protein, 6 aa, Artificial sequence
  Protein classification predicting sequence
PFPMTI

SEQ ID NO: 47161 - protein, 8 aa, Artificial sequence
  Protein classification predicting sequence
GLLGISKG

SEQ ID NO: 47162 - protein, 16 aa, Artificial sequence
  Protein classification predicting sequence
MASFLKGITAAVVING

SEQ ID NO: 47163 - protein, 18 aa, Artificial sequence
  Protein classification predicting sequence
FLFLVGQDDHNWKSEFYA

SEQ ID NO: 47164 - protein, 22 aa, Artificial sequence
  Protein classification predicting sequence
GLLEYRASLLAGKGFAVMALAY

SEQ ID NO: 47165 - protein, 8 aa, Artificial sequence
  Protein classification predicting sequence
IPVERSDT

SEQ ID NO: 47166 - protein, 11 aa, Artificial sequence
  Protein classification predicting sequence
DAWQQLQTFFH

SEQ ID NO: 47167 - protein, 12 aa, Artificial sequence
  Protein classification predicting sequence
PFVVELEVLDGH

SEQ ID NO: 47168 - protein, 12 aa, Artificial sequence
  Protein classification predicting sequence
VKGPGIGLLGIS

SEQ ID NO: 47169 - protein, 8 aa, Artificial sequence
  Protein classification predicting sequence
VGQDDHNW

SEQ ID NO: 47170 - protein, 14 aa, Artificial sequence
  Protein classification predicting sequence
VELEVLDGHEPDGG

SEQ ID NO: 47171 - protein, 6 aa, Artificial sequence
  Protein classification predicting sequence
YFEEAV

SEQ ID NO: 47172 - protein, 10 aa, Artificial sequence
  Protein classification predicting sequence
GHYIEPPYFP

SEQ ID NO: 47173 - protein, 11 aa, Artificial sequence
  Protein classification predicting sequence
PLLVVGLGNPG

SEQ ID NO: 47174 - protein, 9 aa, Artificial sequence
  Protein classification predicting sequence
LVVGLGNPG

SEQ ID NO: 47175 - protein, 7 aa, Artificial sequence
  Protein classification predicting sequence
KGKIAAQ

SEQ ID NO: 47176 - protein, 6 aa, Artificial sequence
  Protein classification predicting sequence
AHDELD

SEQ ID NO: 47177 - protein, 10 aa, Artificial sequence
  Protein classification predicting sequence
RLRIGIGHPG

SEQ ID NO: 47178 - protein, 6 aa, Artificial sequence
  Protein classification predicting sequence
PWSKKF

SEQ ID NO: 47179 - protein, 10 aa, Artificial sequence
  Protein classification predicting sequence
GGGNAGHNGL

SEQ ID NO: 47180 - protein, 8 aa, Artificial sequence
  Protein classification predicting sequence
GSAGGHNG

SEQ ID NO: 47181 - protein, 7 aa, Artificial sequence
  Protein classification predicting sequence
RLRIGIG

SEQ ID NO: 47182 - protein, 7 aa, Artificial sequence
  Protein classification predicting sequence
VGLGNPG

SEQ ID NO: 47183 - protein, 6 aa, Artificial sequence
  Protein classification predicting sequence
NPGAEY

SEQ ID NO: 47184 - protein, 6 aa, Artificial sequence
  Protein classification predicting sequence
GHNGLK

SEQ ID NO: 47185 - protein, 16 aa, Artificial sequence
  Protein classification predicting sequence
RLRQKGSAGGHNGMKS

SEQ ID NO: 47186 - protein, 11 aa, Artificial sequence
  Protein classification predicting sequence
NGMKVVDYVLG

SEQ ID NO: 47187 - protein, 6 aa, Artificial sequence
  Protein classification predicting sequence
VMNEFN

SEQ ID NO: 47188 - protein, 10 aa, Artificial sequence
  Protein classification predicting sequence
GLGNPGKKYE

SEQ ID NO: 47189 - protein, 7 aa, Artificial sequence
  Protein classification predicting sequence
LDKQKFK

SEQ ID NO: 47190 - protein, 6 aa, Artificial sequence
  Protein classification predicting sequence
GKIRLR

SEQ ID NO: 47191 - protein, 7 aa, Artificial sequence
  Protein classification predicting sequence
FNRIRVG

SEQ ID NO: 47192 - protein, 8 aa, Artificial sequence
  Protein classification predicting sequence
TRHNVGFM

SEQ ID NO: 47193 - protein, 7 aa, Artificial sequence
  Protein classification predicting sequence
RPLMDYY

SEQ ID NO: 47194 - protein, 7 aa, Artificial sequence
  Protein classification predicting sequence
KKFQAEI

SEQ ID NO: 47195 - protein, 8 aa, Artificial sequence
  Protein classification predicting sequence
DELDLPPG

SEQ ID NO: 47196 - protein, 7 aa, Artificial sequence
  Protein classification predicting sequence
TYMNLSG

SEQ ID NO: 47197 - protein, 9 aa, Artificial sequence
  Protein classification predicting sequence
LIAGLGNPG

SEQ ID NO: 47198 - protein, 8 aa, Artificial sequence
  Protein classification predicting sequence
GHNGLKDI

SEQ ID NO: 47199 - protein, 7 aa, Artificial sequence
  Protein classification predicting sequence
HNGLKSI

SEQ ID NO: 47200 - protein, 6 aa, Artificial sequence
  Protein classification predicting sequence
VILLKP

SEQ ID NO: 47201 - protein, 6 aa, Artificial sequence
  Protein classification predicting sequence
PTTYMN

SEQ ID NO: 47202 - protein, 6 aa, Artificial sequence
  Protein classification predicting sequence
EKKFFG

SEQ ID NO: 47203 - protein, 7 aa, Artificial sequence
  Protein classification predicting sequence
VIHDDID

SEQ ID NO: 47204 - protein, 8 aa, Artificial sequence
  Protein classification predicting sequence
GFMVVDEL

SEQ ID NO: 47205 - protein, 7 aa, Artificial sequence
  Protein classification predicting sequence
NLSGKAV

SEQ ID NO: 47206 - protein, 6 aa, Artificial sequence
  Protein classification predicting sequence
LRLGIG

SEQ ID NO: 47207 - protein, 6 aa, Artificial sequence
  Protein classification predicting sequence
KGSAGG

SEQ ID NO: 47208 - protein, 10 aa, Artificial sequence
  Protein classification predicting sequence
LIVGLGNPGP

SEQ ID NO: 47209 - protein, 19 aa, Artificial sequence
  Protein classification predicting sequence
KVILLKPLTYMNLSGESIR

SEQ ID NO: 47210 - protein, 7 aa, Artificial sequence
  Protein classification predicting sequence
VLYDDLD

SEQ ID NO: 47211 - protein, 9 aa, Artificial sequence
  Protein classification predicting sequence
SGQAVAALA

SEQ ID NO: 47212 - protein, 6 aa, Artificial sequence
  Protein classification predicting sequence
RLRIGI

SEQ ID NO: 47213 - protein, 6 aa, Artificial sequence
  Protein classification predicting sequence
HPGHKD

SEQ ID NO: 47214 - protein, 14 aa, Artificial sequence
  Protein classification predicting sequence
GEKVLLVKPQTFMN

SEQ ID NO: 47215 - protein, 15 aa, Artificial sequence
  Protein classification predicting sequence
VDLLAERLRAPLREE

SEQ ID NO: 47216 - protein, 39 aa, Artificial sequence
  Protein classification predicting sequence
GIGHPGDKNKVVGFVLGKPPVSEQKLIDEAIDEAARCTE

SEQ ID NO: 47217 - protein, 5 aa, Artificial sequence
  Protein classification predicting sequence
HNIGF

SEQ ID NO: 47218 - protein, 7 aa, Artificial sequence
  Protein classification predicting sequence
VIYDDLD

SEQ ID NO: 47219 - protein, 13 aa, Artificial sequence
  Protein classification predicting sequence
QSLKEESKFFGYT

SEQ ID NO: 47220 - protein, 18 aa, Artificial sequence
  Protein classification predicting sequence
FYRIQPDEILVAHDELDL

SEQ ID NO: 47221 - protein, 29 aa, Artificial sequence
  Protein classification predicting sequence
KLGGGHGGHNGLKDIISKLGNNPNFHRLR

SEQ ID NO: 47222 - protein, 8 aa, Artificial sequence
  Protein classification predicting sequence
GIGHPGDK

SEQ ID NO: 47223 - protein, 11 aa, Artificial sequence
  Protein classification predicting sequence
VGLGNPGKEYE

SEQ ID NO: 47224 - protein, 9 aa, Artificial sequence
  Protein classification predicting sequence
IDELAKRWN

SEQ ID NO: 47225 - protein, 8 aa, Artificial sequence
  Protein classification predicting sequence
GGHNGVKS

SEQ ID NO: 47226 - protein, 8 aa, Artificial sequence
  Protein classification predicting sequence
QFKRIRIG

SEQ ID NO: 47227 - protein, 8 aa, Artificial sequence
  Protein classification predicting sequence
DYVLGRFT

SEQ ID NO: 47228 - protein, 6 aa, Artificial sequence
  Protein classification predicting sequence
NPGAKY

SEQ ID NO: 47229 - protein, 6 aa, Artificial sequence
  Protein classification predicting sequence
ASFYRI

SEQ ID NO: 47230 - protein, 6 aa, Artificial sequence
  Protein classification predicting sequence
VGLGNP

SEQ ID NO: 47231 - protein, 11 aa, Artificial sequence
  Protein classification predicting sequence
GGGNGGHNGLK

SEQ ID NO: 47232 - protein, 6 aa, Artificial sequence
  Protein classification predicting sequence
GFVLGK

SEQ ID NO: 47233 - protein, 9 aa, Artificial sequence
  Protein classification predicting sequence
KGSAGGHNG

SEQ ID NO: 47234 - protein, 6 aa, Artificial sequence
  Protein classification predicting sequence
HNIGFM

SEQ ID NO: 47235 - protein, 6 aa, Artificial sequence
  Protein classification predicting sequence
VLLVKP

SEQ ID NO: 47236 - protein, 7 aa, Artificial sequence
  Protein classification predicting sequence
IKLIVGL

SEQ ID NO: 47237 - protein, 6 aa, Artificial sequence
  Protein classification predicting sequence
RHNIGF

SEQ ID NO: 47238 - protein, 6 aa, Artificial sequence
  Protein classification predicting sequence
PQTYMN

SEQ ID NO: 47239 - protein, 5 aa, Artificial sequence
  Protein classification predicting sequence
MNNSG

SEQ ID NO: 47240 - protein, 8 aa, Artificial sequence
  Protein classification predicting sequence
DLKMGKGK

SEQ ID NO: 47241 - protein, 6 aa, Artificial sequence
  Protein classification predicting sequence
HNGIKS

SEQ ID NO: 47242 - protein, 6 aa, Artificial sequence
  Protein classification predicting sequence
TKHNVG

SEQ ID NO: 47243 - protein, 7 aa, Artificial sequence
  Protein classification predicting sequence
RIGIGRP

SEQ ID NO: 47244 - protein, 7 aa, Artificial sequence
  Protein classification predicting sequence
YEKTKHN

SEQ ID NO: 47245 - protein, 6 aa, Artificial sequence
  Protein classification predicting sequence
HNVGFM

SEQ ID NO: 47246 - protein, 7 aa, Artificial sequence
  Protein classification predicting sequence
GHPGDRN

SEQ ID NO: 47247 - protein, 7 aa, Artificial sequence
  Protein classification predicting sequence
GEKVILL

SEQ ID NO: 47248 - protein, 8 aa, Artificial sequence
  Protein classification predicting sequence
KPFLEVMN

SEQ ID NO: 47249 - protein, 10 aa, Artificial sequence
  Protein classification predicting sequence
GGGHGGHNGL

SEQ ID NO: 47250 - protein, 7 aa, Artificial sequence
  Protein classification predicting sequence
DILIKDG

SEQ ID NO: 47251 - protein, 6 aa, Artificial sequence
  Protein classification predicting sequence
KFFGYT

SEQ ID NO: 47252 - protein, 10 aa, Artificial sequence
  Protein classification predicting sequence
PTTFMNLSGK

SEQ ID NO: 47253 - protein, 6 aa, Artificial sequence
  Protein classification predicting sequence
MNLSGK

SEQ ID NO: 47254 - protein, 19 aa, Artificial sequence
  Protein classification predicting sequence
PDEILVAHDELDLPPGVAK

SEQ ID NO: 47255 - protein, 6 aa, Artificial sequence
  Protein classification predicting sequence
GNNPNF

SEQ ID NO: 47256 - protein, 14 aa, Artificial sequence
  Protein classification predicting sequence
EYAKTRHNAGAWVV

SEQ ID NO: 47257 - protein, 6 aa, Artificial sequence
  Protein classification predicting sequence
TRHNAG

SEQ ID NO: 47258 - protein, 7 aa, Artificial sequence
  Protein classification predicting sequence
RLLIPTT

SEQ ID NO: 47259 - protein, 10 aa, Artificial sequence
  Protein classification predicting sequence
GNNKEFYRLR

SEQ ID NO: 47260 - protein, 7 aa, Artificial sequence
  Protein classification predicting sequence
KAQNRLH

SEQ ID NO: 47261 - protein, 6 aa, Artificial sequence
  Protein classification predicting sequence
TRHNVG

SEQ ID NO: 47262 - protein, 9 aa, Artificial sequence
  Protein classification predicting sequence
GLGNPGSKY

SEQ ID NO: 47263 - protein, 7 aa, Artificial sequence
  Protein classification predicting sequence
GGHNGLK

SEQ ID NO: 47264 - protein, 9 aa, Artificial sequence
  Protein classification predicting sequence
GGHNGLKDI

SEQ ID NO: 47265 - protein, 9 aa, Artificial sequence
  Protein classification predicting sequence
GLGNPGKEY

SEQ ID NO: 47266 - protein, 9 aa, Artificial sequence
  Protein classification predicting sequence
RLRVGIGHP

SEQ ID NO: 47267 - protein, 8 aa, Artificial sequence
  Protein classification predicting sequence
QSHIRQAR

SEQ ID NO: 47268 - protein, 11 aa, Artificial sequence
  Protein classification predicting sequence
GHPGAKELVHN

SEQ ID NO: 47269 - protein, 9 aa, Artificial sequence
  Protein classification predicting sequence
RIRIGVGRP

SEQ ID NO: 47270 - protein, 12 aa, Artificial sequence
  Protein classification predicting sequence
EYAATRHNAGAW

SEQ ID NO: 47271 - protein, 64 aa, Artificial sequence
  Protein classification predicting sequence
EYAATRHNAGAWYVDLLAERLRAPLREEPKFFGYTSRITLEGEDVRLLVPTTFMNLSGKAVGAM

SEQ ID NO: 47272 - protein, 7 aa, Artificial sequence
  Protein classification predicting sequence
RLHTFKA

SEQ ID NO: 47273 - protein, 8 aa, Artificial sequence
  Protein classification predicting sequence
TRHNAGAW

SEQ ID NO: 47274 - protein, 19 aa, Artificial sequence
  Protein classification predicting sequence
EDVRLLVPTTFMNLSGKAV

SEQ ID NO: 47275 - protein, 14 aa, Artificial sequence
  Protein classification predicting sequence
LDKQKFKGAYTIER

SEQ ID NO: 47276 - protein, 15 aa, Artificial sequence
  Protein classification predicting sequence
KVLFIEPMTMMNLSG

SEQ ID NO: 47277 - protein, 6 aa, Artificial sequence
  Protein classification predicting sequence
PLMDYY

SEQ ID NO: 47278 - protein, 57 aa, Artificial sequence
  Protein classification predicting sequence
EDLIVLYDDLDLEQGQVRLRQKGSAGGHNGMKSIIKMLGTDQFKRIRIGVGRPTNGM

SEQ ID NO: 47279 - protein, 7 aa, Artificial sequence
  Protein classification predicting sequence
MEKVIEH

SEQ ID NO: 47280 - protein, 7 aa, Artificial sequence
  Protein classification predicting sequence
KPTTFMN

SEQ ID NO: 47281 - protein, 22 aa, Artificial sequence
  Protein classification predicting sequence
KPTTFMNNSGIAVKALLTYYNI

SEQ ID NO: 47282 - protein, 9 aa, Artificial sequence
  Protein classification predicting sequence
RIKVGIGRP

SEQ ID NO: 47283 - protein, 7 aa, Artificial sequence
  Protein classification predicting sequence
RHNVGFM

SEQ ID NO: 47284 - protein, 9 aa, Artificial sequence
  Protein classification predicting sequence
IYDDLDMEV

SEQ ID NO: 47285 - protein, 14 aa, Artificial sequence
  Protein classification predicting sequence
KGSAGGHNGIKSII

SEQ ID NO: 47286 - protein, 6 aa, Artificial sequence
  Protein classification predicting sequence
ALLTYY

SEQ ID NO: 47287 - protein, 6 aa, Artificial sequence
  Protein classification predicting sequence
RPKNGM

SEQ ID NO: 47288 - protein, 6 aa, Artificial sequence
  Protein classification predicting sequence
VNYYLQ

SEQ ID NO: 47289 - protein, 13 aa, Artificial sequence
  Protein classification predicting sequence
EKVYFVKPTTFMN

SEQ ID NO: 47290 - protein, 15 aa, Artificial sequence
  Protein classification predicting sequence
MGKGKIAAQVAHAAV

SEQ ID NO: 47291 - protein, 10 aa, Artificial sequence
  Protein classification predicting sequence
KPLTYMNLSG

SEQ ID NO: 47292 - protein, 7 aa, Artificial sequence
  Protein classification predicting sequence
ISHLGTQ

SEQ ID NO: 47293 - protein, 7 aa, Artificial sequence
  Protein classification predicting sequence
RLRLGIG

SEQ ID NO: 47294 - protein, 5 aa, Artificial sequence
  Protein classification predicting sequence
GGHNG

SEQ ID NO: 47295 - protein, 10 aa, Artificial sequence
  Protein classification predicting sequence
GGHNGMKSII

SEQ ID NO: 47296 - protein, 7 aa, Artificial sequence
  Protein classification predicting sequence
ILVVHDE

SEQ ID NO: 47297 - protein, 6 aa, Artificial sequence
  Protein classification predicting sequence
VWLLKP

SEQ ID NO: 47298 - protein, 10 aa, Artificial sequence
  Protein classification predicting sequence
RLRLGIGHPG

SEQ ID NO: 47299 - protein, 8 aa, Artificial sequence
  Protein classification predicting sequence
RLGIGHPG

SEQ ID NO: 47300 - protein, 9 aa, Artificial sequence
  Protein classification predicting sequence
GIGHPGHKD

SEQ ID NO: 47301 - protein, 9 aa, Artificial sequence
  Protein classification predicting sequence
LIVGLGNPG

SEQ ID NO: 47302 - protein, 16 aa, Artificial sequence
  Protein classification predicting sequence
RLKFDGGHGGQNGLRD

SEQ ID NO: 47303 - protein, 18 aa, Artificial sequence
  Protein classification predicting sequence
FHRLRVGIGHPGHKDRVV

SEQ ID NO: 47304 - protein, 7 aa, Artificial sequence
  Protein classification predicting sequence
TFMNLSG

SEQ ID NO: 47305 - protein, 8 aa, Artificial sequence
  Protein classification predicting sequence
TFMNLSGK

SEQ ID NO: 47306 - protein, 16 aa, Artificial sequence
  Protein classification predicting sequence
KLGGGNGGHNGLKDIQ

SEQ ID NO: 47307 - protein, 8 aa, Artificial sequence
  Protein classification predicting sequence
KLGNNPNF

SEQ ID NO: 47308 - protein, 71 aa, Artificial sequence
  Protein classification predicting sequence
GAVTHIKIQNTGDYYDLYGGEKFATLAELVQYYMEHHGQLKEKNGDVIELKYPLNCADPTSERWFHGHLSG

SEQ ID NO: 47309 - protein, 6 aa, Artificial sequence
  Protein classification predicting sequence
VHCSAG

SEQ ID NO: 47310 - protein, 20 aa, Artificial sequence
  Protein classification predicting sequence
NKNRNRYRDVSPFDHSRIKL

SEQ ID NO: 47311 - protein, 7 aa, Artificial sequence
  Protein classification predicting sequence
KCAQYWP

SEQ ID NO: 47312 - protein, 17 aa, Artificial sequence
  Protein classification predicting sequence
DTCLLLMDKRKDPSSVD

SEQ ID NO: 47313 - protein, 11 aa, Artificial sequence
  Protein classification predicting sequence
MRKYRMGLIQT

SEQ ID NO: 47314 - protein, 28 aa, Artificial sequence
  Protein classification predicting sequence
RMGLIQTADQLRFSYLAVIEGAKFIMGD

SEQ ID NO: 47315 - protein, 7 aa, Artificial sequence
  Protein classification predicting sequence
WKPFLVN

SEQ ID NO: 47316 - protein, 10 aa, Artificial sequence
  Protein classification predicting sequence
NRNRYRDVSP

SEQ ID NO: 47317 - protein, 18 aa, Artificial sequence
  Protein classification predicting sequence
EEAQRSYILTQGPLPNTC

SEQ ID NO: 47318 - protein, 12 aa, Artificial sequence
  Protein classification predicting sequence
HCSAGIGRSGTF

SEQ ID NO: 47319 - protein, 7 aa, Artificial sequence
  Protein classification predicting sequence
DQLRFSY

SEQ ID NO: 47320 - protein, 30 aa, Artificial sequence
  Protein classification predicting sequence
HFHYTTWPDFGVPESPASFLNFLFKVRESG

SEQ ID NO: 47321 - protein, 11 aa, Artificial sequence
  Protein classification predicting sequence
VHCSAGIGRTG

SEQ ID NO: 47322 - protein, 8 aa, Artificial sequence
  Protein classification predicting sequence
GSFLARPS

SEQ ID NO: 47323 - protein, 7 aa, Artificial sequence
  Protein classification predicting sequence
LKYPLNC

SEQ ID NO: 47324 - protein, 7 aa, Artificial sequence
  Protein classification predicting sequence
DPTSERW

SEQ ID NO: 47325 - protein, 10 aa, Artificial sequence
  Protein classification predicting sequence
FDSLTDLVEH

SEQ ID NO: 47326 - protein, 7 aa, Artificial sequence
  Protein classification predicting sequence
YINANYI

SEQ ID NO: 47327 - protein, 6 aa, Artificial sequence
  Protein classification predicting sequence
TVNDFW

SEQ ID NO: 47328 - protein, 11 aa, Artificial sequence
  Protein classification predicting sequence
QENSRVIVMTT

SEQ ID NO: 47329 - protein, 9 aa, Artificial sequence
  Protein classification predicting sequence
RYKTILPNP

SEQ ID NO: 47330 - protein, 6 aa, Artificial sequence
  Protein classification predicting sequence
FWEMVW

SEQ ID NO: 47331 - protein, 7 aa, Artificial sequence
  Protein classification predicting sequence
IGCQQLK

SEQ ID NO: 47332 - protein, 7 aa, Artificial sequence
  Protein classification predicting sequence
YINASFI

SEQ ID NO: 47333 - protein, 8 aa, Artificial sequence
  Protein classification predicting sequence
TQGPLPNT

SEQ ID NO: 47334 - protein, 9 aa, Artificial sequence
  Protein classification predicting sequence
PIIVHCSAG

SEQ ID NO: 47335 - protein, 10 aa, Artificial sequence
  Protein classification predicting sequence
SDYINASFIN

SEQ ID NO: 47336 - protein, 6 aa, Artificial sequence
  Protein classification predicting sequence
HSRVIL

SEQ ID NO: 47337 - protein, 8 aa, Artificial sequence
  Protein classification predicting sequence
YILTQGPL

SEQ ID NO: 47338 - protein, 10 aa, Artificial sequence
  Protein classification predicting sequence
FHYTTWPDFG

SEQ ID NO: 47339 - protein, 11 aa, Artificial sequence
  Protein classification predicting sequence
RMGLIQTADQL

SEQ ID NO: 47340 - protein, 5 aa, Artificial sequence
  Protein classification predicting sequence
DFWRM

SEQ ID NO: 47341 - protein, 8 aa, Artificial sequence
  Protein classification predicting sequence
DFWRMIWE

SEQ ID NO: 47342 - protein, 10 aa, Artificial sequence
  Protein classification predicting sequence
LRLQRPHMVQ

SEQ ID NO: 47343 - protein, 12 aa, Artificial sequence
  Protein classification predicting sequence
EKNKFIAAQGPK

SEQ ID NO: 47344 - protein, 8 aa, Artificial sequence
  Protein classification predicting sequence
TNLKERKE

SEQ ID NO: 47345 - protein, 25 aa, Artificial sequence
  Protein classification predicting sequence
HFTSWPDFGVPFTPIGMLKFLKKVK

SEQ ID NO: 47346 - protein, 10 aa, Artificial sequence
  Protein classification predicting sequence
GPIVVHCSAG

SEQ ID NO: 47347 - protein, 8 aa, Artificial sequence
  Protein classification predicting sequence
IVVHCSAG

SEQ ID NO: 47348 - protein, 8 aa, Artificial sequence
  Protein classification predicting sequence
FIYQALLE

SEQ ID NO: 47349 - protein, 8 aa, Artificial sequence
  Protein classification predicting sequence
YLYGDTEL

SEQ ID NO: 47350 - protein, 12 aa, Artificial sequence
  Protein classification predicting sequence
EDFWRMIWEWKS

SEQ ID NO: 47351 - protein, 10 aa, Artificial sequence
  Protein classification predicting sequence
RQFHFHGWPE

SEQ ID NO: 47352 - protein, 10 aa, Artificial sequence
  Protein classification predicting sequence
IAAVQKQQQQ

SEQ ID NO: 47353 - protein, 19 aa, Artificial sequence
  Protein classification predicting sequence
GNHPITVHCSAGAGRTGTF

SEQ ID NO: 47354 - protein, 7 aa, Artificial sequence
  Protein classification predicting sequence
WFKALLL

SEQ ID NO: 47355 - protein, 41 aa, Artificial sequence
  Protein classification predicting sequence
VQKQLGADGSEWCRNKDVVVDKKQSVIFEKAGNSTDSALAA

SEQ ID NO: 47356 - protein, 10 aa, Artificial sequence
  Protein classification predicting sequence
QETIRKSDKD

SEQ ID NO: 47357 - protein, 10 aa, Artificial sequence
  Protein classification predicting sequence
RQYQAIRLDN

SEQ ID NO: 47358 - protein, 22 aa, Artificial sequence
  Protein classification predicting sequence
MVVLLVSDPQAVKSLSALVVPV

SEQ ID NO: 47359 - protein, 7 aa, Artificial sequence
  Protein classification predicting sequence
SLEDPEA

SEQ ID NO: 47360 - protein, 10 aa, Artificial sequence
  Protein classification predicting sequence
QGLAHYLEHM

SEQ ID NO: 47361 - protein, 18 aa, Artificial sequence
  Protein classification predicting sequence
LMGSKKYPQADSLAEYLK

SEQ ID NO: 47362 - protein, 7 aa, Artificial sequence
  Protein classification predicting sequence
FHEKYYS

SEQ ID NO: 47363 - protein, 17 aa, Artificial sequence
  Protein classification predicting sequence
NLMKAVIYSNKPLPELA

SEQ ID NO: 47364 - protein, 9 aa, Artificial sequence
  Protein classification predicting sequence
KKPEITVPV

SEQ ID NO: 47365 - protein, 8 aa, Artificial sequence
  Protein classification predicting sequence
FRSKTDEL

SEQ ID NO: 47366 - protein, 11 aa, Artificial sequence
  Protein classification predicting sequence
SDPIVNGNSGV

SEQ ID NO: 47367 - protein, 10 aa, Artificial sequence
  Protein classification predicting sequence
LTDKGLANRD

SEQ ID NO: 47368 - protein, 10 aa, Artificial sequence
  Protein classification predicting sequence
VVAAIFSYLN

SEQ ID NO: 47369 - protein, 8 aa, Artificial sequence
  Protein classification predicting sequence
LREKGIDK

SEQ ID NO: 47370 - protein, 7 aa, Artificial sequence
  Protein classification predicting sequence
NIADRYD

SEQ ID NO: 47371 - protein, 17 aa, Artificial sequence
  Protein classification predicting sequence
RLAMMTPQNARIWYISP

SEQ ID NO: 47372 - protein, 16 aa, Artificial sequence
  Protein classification predicting sequence
IALSLPELNPYIPDDF

SEQ ID NO: 47373 - protein, 9 aa, Artificial sequence
  Protein classification predicting sequence
AMDSARNQV

SEQ ID NO: 47374 - protein, 9 aa, Artificial sequence
  Protein classification predicting sequence
FALNDYLAG

SEQ ID NO: 47375 - protein, 12 aa, Artificial sequence
  Protein classification predicting sequence
ANGYTQRLPQLF

SEQ ID NO: 47376 - protein, 9 aa, Artificial sequence
  Protein classification predicting sequence
ALLEGYFSY

SEQ ID NO: 47377 - protein, 11 aa, Artificial sequence
  Protein classification predicting sequence
QMMDSAEKGKA

SEQ ID NO: 47378 - protein, 12 aa, Artificial sequence
  Protein classification predicting sequence
SQVPYFSRDERR

SEQ ID NO: 47379 - protein, 9 aa, Artificial sequence
  Protein classification predicting sequence
LPSITLKEV

SEQ ID NO: 47380 - protein, 9 aa, Artificial sequence
  Protein classification predicting sequence
WCRNKDVVV

SEQ ID NO: 47381 - protein, 11 aa, Artificial sequence
  Protein classification predicting sequence
KKQSVIFEKAG

SEQ ID NO: 47382 - protein, 10 aa, Artificial sequence
  Protein classification predicting sequence
AEAKLRAMKP

SEQ ID NO: 47383 - protein, 18 aa, Artificial sequence
  Protein classification predicting sequence
LSKDFDRGNMRFDSRDKI

SEQ ID NO: 47384 - protein, 12 aa, Artificial sequence
  Protein classification predicting sequence
GSQNGKAEYVHP

SEQ ID NO: 47385 - protein, 8 aa, Artificial sequence
  Protein classification predicting sequence
NVSALQQT

SEQ ID NO: 47386 - protein, 37 aa, Artificial sequence
  Protein classification predicting sequence
HGGSHNASTAPYRTAFYLEVENDALPGAVDRLADAIA

SEQ ID NO: 47387 - protein, 41 aa, Artificial sequence
  Protein classification predicting sequence
KKYAERERNAVNAELTMARTRDGMRMAQVSAETINPAHPGS

SEQ ID NO: 47388 - protein, 21 aa, Artificial sequence
  Protein classification predicting sequence
FSGGNLETLSDKPGNPVQQAL

SEQ ID NO: 47389 - protein, 29 aa, Artificial sequence
  Protein classification predicting sequence
AQKGIIIHYVPALPRKVLRVEFRIDNNSA

SEQ ID NO: 47390 - protein, 26 aa, Artificial sequence
  Protein classification predicting sequence
YLIGNRSPGTLSDWLQKQGLVEGISA

SEQ ID NO: 47391 - protein, 26 aa, Artificial sequence
  Protein classification predicting sequence
DFRYPSITRDMDYVEWLADTMIRVPV

SEQ ID NO: 47392 - protein, 48 aa, Artificial sequence
  Protein classification predicting sequence
LGQIVQPWFYNQLRTEEQLGYAVFAFPMSVGRQWGMGFLLQSNDKQPS

SEQ ID NO: 47393 - protein, 31 aa, Artificial sequence
  Protein classification predicting sequence
AQIKLLTPQKLADFFHQAVVEPQGMAILSQI

SEQ ID NO: 47394 - protein, 27 aa, Artificial sequence
  Protein classification predicting sequence
NANGYTQRLPQLFQALLEGYFSYTATE

SEQ ID NO: 47395 - protein, 9 aa, Artificial sequence
  Protein classification predicting sequence
INIHHSFLP

SEQ ID NO: 47396 - protein, 8 aa, Artificial sequence
  Protein classification predicting sequence
ITNICYKH

SEQ ID NO: 47397 - protein, 12 aa, Artificial sequence
  Protein classification predicting sequence
FFMRTELEGIFN

SEQ ID NO: 47398 - protein, 15 aa, Artificial sequence
  Protein classification predicting sequence
RIVILVTKEAHCLGD

SEQ ID NO: 47399 - protein, 13 aa, Artificial sequence
  Protein classification predicting sequence
LDVEIAAVIGNHD

SEQ ID NO: 47400 - protein, 9 aa, Artificial sequence
  Protein classification predicting sequence
VLAKYMRVL

SEQ ID NO: 47401 - protein, 11 aa, Artificial sequence
  Protein classification predicting sequence
RGVKIIGATAH

SEQ ID NO: 47402 - protein, 6 aa, Artificial sequence
  Protein classification predicting sequence
GPIIMQ

SEQ ID NO: 47403 - protein, 10 aa, Artificial sequence
  Protein classification predicting sequence
MMRAGRDVEK

SEQ ID NO: 47404 - protein, 6 aa, Artificial sequence
  Protein classification predicting sequence
IATQGP

SEQ ID NO: 47405 - protein, 6 aa, Artificial sequence
  Protein classification predicting sequence
VTPHHL

SEQ ID NO: 47406 - protein, 7 aa, Artificial sequence
  Protein classification predicting sequence
MPVLERM

SEQ ID NO: 47407 - protein, 7 aa, Artificial sequence
  Protein classification predicting sequence
EPLRQRL

SEQ ID NO: 47408 - protein, 8 aa, Artificial sequence
  Protein classification predicting sequence
RAIVMPNL

SEQ ID NO: 47409 - protein, 8 aa, Artificial sequence
  Protein classification predicting sequence
MPNLKPPV

SEQ ID NO: 47410 - protein, 10 aa, Artificial sequence
  Protein classification predicting sequence
MPLLVHGEVT

SEQ ID NO: 47411 - protein, 10 aa, Artificial sequence
  Protein classification predicting sequence
RKESSCGCAG

SEQ ID NO: 47412 - protein, 6 aa, Artificial sequence
  Protein classification predicting sequence
EVTPHH

SEQ ID NO: 47413 - protein, 7 aa, Artificial sequence
  Protein classification predicting sequence
ASDHAPH

SEQ ID NO: 47414 - protein, 14 aa, Artificial sequence
  Protein classification predicting sequence
AAALDMAIVAHCED

SEQ ID NO: 47415 - protein, 8 aa, Artificial sequence
  Protein classification predicting sequence
RDAKRAGI

SEQ ID NO: 47416 - protein, 7 aa, Artificial sequence
  Protein classification predicting sequence
VRVLPYA

SEQ ID NO: 47417 - protein, 7 aa, Artificial sequence
  Protein classification predicting sequence
ITTRQLG

SEQ ID NO: 47418 - protein, 6 aa, Artificial sequence
  Protein classification predicting sequence
HYHVCH

SEQ ID NO: 47419 - protein, 19 aa, Artificial sequence
  Protein classification predicting sequence
FGIVGLETAFPLLYTHFVK

SEQ ID NO: 47420 - protein, 7 aa, Artificial sequence
  Protein classification predicting sequence
KETIETG

SEQ ID NO: 47421 - protein, 18 aa, Artificial sequence
  Protein classification predicting sequence
FEALKEAGAFAFTDDGVG

SEQ ID NO: 47422 - protein, 11 aa, Artificial sequence
  Protein classification predicting sequence
GAFAFTDDGVG

SEQ ID NO: 47423 - protein, 10 aa, Artificial sequence
  Protein classification predicting sequence
MYEAMKRAAA

SEQ ID NO: 47424 - protein, 7 aa, Artificial sequence
  Protein classification predicting sequence
IARDVLL

SEQ ID NO: 47425 - protein, 7 aa, Artificial sequence
  Protein classification predicting sequence
VTAEVSP

SEQ ID NO: 47426 - protein, 6 aa, Artificial sequence
  Protein classification predicting sequence
PHHLLL

SEQ ID NO: 47427 - protein, 6 aa, Artificial sequence
  Protein classification predicting sequence
TIKPCE

SEQ ID NO: 47428 - protein, 8 aa, Artificial sequence
  Protein classification predicting sequence
PLMTCYLT

SEQ ID NO: 47429 - protein, 7 aa, Artificial sequence
  Protein classification predicting sequence
YCLPILK

SEQ ID NO: 47430 - protein, 8 aa, Artificial sequence
  Protein classification predicting sequence
RAIIMPNL

SEQ ID NO: 47431 - protein, 7 aa, Artificial sequence
  Protein classification predicting sequence
PHLYCLP

SEQ ID NO: 47432 - protein, 11 aa, Artificial sequence
  Protein classification predicting sequence
VFEEMNALQHF

SEQ ID NO: 47433 - protein, 8 aa, Artificial sequence
  Protein classification predicting sequence
VLIAQHAE

SEQ ID NO: 47434 - protein, 7 aa, Artificial sequence
  Protein classification predicting sequence
EVTPHHL

SEQ ID NO: 47435 - protein, 7 aa, Artificial sequence
  Protein classification predicting sequence
LLDGTID

SEQ ID NO: 47436 - protein, 6 aa, Artificial sequence
  Protein classification predicting sequence
HLREPG

SEQ ID NO: 47437 - protein, 8 aa, Artificial sequence
  Protein classification predicting sequence
LLEGLLDG

SEQ ID NO: 47438 - protein, 9 aa, Artificial sequence
  Protein classification predicting sequence
NRNHMLVGG

SEQ ID NO: 47439 - protein, 6 aa, Artificial sequence
  Protein classification predicting sequence
GGFTTV

SEQ ID NO: 47440 - protein, 7 aa, Artificial sequence
  Protein classification predicting sequence
PVPDSVE

SEQ ID NO: 47441 - protein, 10 aa, Artificial sequence
  Protein classification predicting sequence
GGAMHEGKRS

SEQ ID NO: 47442 - protein, 6 aa, Artificial sequence
  Protein classification predicting sequence
LDGTID

SEQ ID NO: 47443 - protein, 10 aa, Artificial sequence
  Protein classification predicting sequence
FGIVGSETAF

SEQ ID NO: 47444 - protein, 8 aa, Artificial sequence
  Protein classification predicting sequence
LPYGKLEE

SEQ ID NO: 47445 - protein, 7 aa, Artificial sequence
  Protein classification predicting sequence
SKGKNTP

SEQ ID NO: 47446 - protein, 6 aa, Artificial sequence
  Protein classification predicting sequence
MNPPLR

SEQ ID NO: 47447 - protein, 7 aa, Artificial sequence
  Protein classification predicting sequence
AVIMPNL

SEQ ID NO: 47448 - protein, 13 aa, Artificial sequence
  Protein classification predicting sequence
HVHFREPGQTHKE

SEQ ID NO: 47449 - protein, 7 aa, Artificial sequence
  Protein classification predicting sequence
AAAGGFT

SEQ ID NO: 47450 - protein, 7 aa, Artificial sequence
  Protein classification predicting sequence
VVMMANT

SEQ ID NO: 47451 - protein, 8 aa, Artificial sequence
  Protein classification predicting sequence
FSDDGIPL

SEQ ID NO: 47452 - protein, 6 aa, Artificial sequence
  Protein classification predicting sequence
HIQHLS

SEQ ID NO: 47453 - protein, 6 aa, Artificial sequence
  Protein classification predicting sequence
KAPSGM

SEQ ID NO: 47454 - protein, 17 aa, Artificial sequence
  Protein classification predicting sequence
FDAGYLAENGPADLVIF

SEQ ID NO: 47455 - protein, 8 aa, Artificial sequence
  Protein classification predicting sequence
APGLVDIH

SEQ ID NO: 47456 - protein, 8 aa, Artificial sequence
  Protein classification predicting sequence
AGTMYEAM

SEQ ID NO: 47457 - protein, 9 aa, Artificial sequence
  Protein classification predicting sequence
CHVSTKESV

SEQ ID NO: 47458 - protein, 15 aa, Artificial sequence
  Protein classification predicting sequence
HFVSPGFVDVHVHLR

SEQ ID NO: 47459 - protein, 7 aa, Artificial sequence
  Protein classification predicting sequence
DVHVHLR

SEQ ID NO: 47460 - protein, 8 aa, Artificial sequence
  Protein classification predicting sequence
GLLDGTID

SEQ ID NO: 47461 - protein, 7 aa, Artificial sequence
  Protein classification predicting sequence
KMNPPLR

SEQ ID NO: 47462 - protein, 6 aa, Artificial sequence
  Protein classification predicting sequence
MPNTRP

SEQ ID NO: 47463 - protein, 16 aa, Artificial sequence
  Protein classification predicting sequence
KLYPAGATTNSDSGVT

SEQ ID NO: 47464 - protein, 10 aa, Artificial sequence
  Protein classification predicting sequence
LKVVFEHITT

SEQ ID NO: 47465 - protein, 8 aa, Artificial sequence
  Protein classification predicting sequence
LVGGVRPH

SEQ ID NO: 47466 - protein, 10 aa, Artificial sequence
  Protein classification predicting sequence
GPDFYGLPRN

SEQ ID NO: 47467 - protein, 8 aa, Artificial sequence
  Protein classification predicting sequence
EHITTSDA

SEQ ID NO: 47468 - protein, 6 aa, Artificial sequence
  Protein classification predicting sequence
CHVSTK

SEQ ID NO: 47469 - protein, 15 aa, Artificial sequence
  Protein classification predicting sequence
ADFYKIFMGASTGGI

SEQ ID NO: 47470 - protein, 6 aa, Artificial sequence
  Protein classification predicting sequence
VCHVST

SEQ ID NO: 47471 - protein, 12 aa, Artificial sequence
  Protein classification predicting sequence
ALKVVFEHITTK

SEQ ID NO: 47472 - protein, 7 aa, Artificial sequence
  Protein classification predicting sequence
VGGIRPH

SEQ ID NO: 47473 - protein, 6 aa, Artificial sequence
  Protein classification predicting sequence
RPDDWH

SEQ ID NO: 47474 - protein, 20 aa, Artificial sequence
  Protein classification predicting sequence
RPHLYCLPILKRNIHQQALR

SEQ ID NO: 47475 - protein, 9 aa, Artificial sequence
  Protein classification predicting sequence
FLGTDSAPH

SEQ ID NO: 47476 - protein, 10 aa, Artificial sequence
  Protein classification predicting sequence
CGCAGCFNAP

SEQ ID NO: 47477 - protein, 8 aa, Artificial sequence
  Protein classification predicting sequence
VFEEMNAL

SEQ ID NO: 47478 - protein, 7 aa, Artificial sequence
  Protein classification predicting sequence
HFEAFCS

SEQ ID NO: 47479 - protein, 15 aa, Artificial sequence
  Protein classification predicting sequence
LVPFLAGETVRWSVK

SEQ ID NO: 47480 - protein, 29 aa, Artificial sequence
  Protein classification predicting sequence
HLRDGDMLKTVVPYTSEIYGRAIVMPNLA

SEQ ID NO: 47481 - protein, 9 aa, Artificial sequence
  Protein classification predicting sequence
PLLVHGEVT

SEQ ID NO: 47482 - protein, 25 aa, Artificial sequence
  Protein classification predicting sequence
VMEPLRQRLTALKVVFEHITTKDAA

SEQ ID NO: 47483 - protein, 27 aa, Artificial sequence
  Protein classification predicting sequence
RPHLYCLPILKRNIHQQALRELVASGF

SEQ ID NO: 47484 - protein, 9 aa, Artificial sequence
  Protein classification predicting sequence
NGPQFYGLP

SEQ ID NO: 47485 - protein, 12 aa, Artificial sequence
  Protein classification predicting sequence
DVHVHLREPGGE

SEQ ID NO: 47486 - protein, 17 aa, Artificial sequence
  Protein classification predicting sequence
FAFTDDGVGVQTASMMY

SEQ ID NO: 47487 - protein, 17 aa, Artificial sequence
  Protein classification predicting sequence
IVAHCEDNSLIYGGAMH

SEQ ID NO: 47488 - protein, 10 aa, Artificial sequence
  Protein classification predicting sequence
ELGIPGIPNI

SEQ ID NO: 47489 - protein, 20 aa, Artificial sequence
  Protein classification predicting sequence
GIPNIAESVQIARDVLLAEA

SEQ ID NO: 47490 - protein, 14 aa, Artificial sequence
  Protein classification predicting sequence
ESVQIARDVLLAEA

SEQ ID NO: 47491 - protein, 6 aa, Artificial sequence
  Protein classification predicting sequence
EKAQPM

SEQ ID NO: 47492 - protein, 7 aa, Artificial sequence
  Protein classification predicting sequence
LQQLVDY

SEQ ID NO: 47493 - protein, 14 aa, Artificial sequence
  Protein classification predicting sequence
EDFLSKADNTPFIG

SEQ ID NO: 47494 - protein, 24 aa, Artificial sequence
  Protein classification predicting sequence
GTKAAARGGFTTVCPMPNTRPVPD

SEQ ID NO: 47495 - protein, 22 aa, Artificial sequence
  Protein classification predicting sequence
GCHYHVCHVSTKESVRVIRDAK

SEQ ID NO: 47496 - protein, 26 aa, Artificial sequence
  Protein classification predicting sequence
EDREALLEGLLDGTIDCIATDHAPHA

SEQ ID NO: 47497 - protein, 21 aa, Artificial sequence
  Protein classification predicting sequence
KAPFGIVGSETAFPLLYTHFV

SEQ ID NO: 47498 - protein, 34 aa, Artificial sequence
  Protein classification predicting sequence
VAPGLVDIHVHFREPGQTHKEDIHTGALAAAAGG

SEQ ID NO: 47499 - protein, 10 aa, Artificial sequence
  Protein classification predicting sequence
TFISLHEEDP

SEQ ID NO: 47500 - protein, 9 aa, Artificial sequence
  Protein classification predicting sequence
LNGVLGFNE

SEQ ID NO: 47501 - protein, 44 aa, Artificial sequence
  Protein classification predicting sequence
AGTSAKMNPPLRTQRDRLAVIEGLKSGVITVIATDHAPHHKDEK

SEQ ID NO: 47502 - protein, 12 aa, Artificial sequence
  Protein classification predicting sequence
LIKNGRVMDPKS

SEQ ID NO: 47503 - protein, 8 aa, Artificial sequence
  Protein classification predicting sequence
ISDVETLQ

SEQ ID NO: 47504 - protein, 9 aa, Artificial sequence
  Protein classification predicting sequence
CGATGVAEY

SEQ ID NO: 47505 - protein, 10 aa, Artificial sequence
  Protein classification predicting sequence
AHVHIQHLSK

SEQ ID NO: 47506 - protein, 16 aa, Artificial sequence
  Protein classification predicting sequence
TKAPSGMTGLETSLSL

SEQ ID NO: 47507 - protein, 11 aa, Artificial sequence
  Protein classification predicting sequence
AGYLAENGPAD

SEQ ID NO: 47508 - protein, 7 aa, Artificial sequence
  Protein classification predicting sequence
LIKNGRV

SEQ ID NO: 47509 - protein, 17 aa, Artificial sequence
  Protein classification predicting sequence
CGATGVAEYSMIARDVM

SEQ ID NO: 47510 - protein, 15 aa, Artificial sequence
  Protein classification predicting sequence
QAHVHIQHLSKAESV

SEQ ID NO: 47511 - protein, 23 aa, Artificial sequence
  Protein classification predicting sequence
LYGFDAGYLAENGPADLVIFADK

SEQ ID NO: 47512 - protein, 6 aa, Artificial sequence
  Protein classification predicting sequence
ITAHHL

SEQ ID NO: 47513 - protein, 9 aa, Artificial sequence
  Protein classification predicting sequence
AATITPQHL

SEQ ID NO: 47514 - protein, 11 aa, Artificial sequence
  Protein classification predicting sequence
PHFYCLPILKR

SEQ ID NO: 47515 - protein, 7 aa, Artificial sequence
  Protein classification predicting sequence
AFPLLYT

SEQ ID NO: 47516 - protein, 7 aa, Artificial sequence
  Protein classification predicting sequence
ATDHAPH

SEQ ID NO: 47517 - protein, 7 aa, Artificial sequence
  Protein classification predicting sequence
MPNLVPP

SEQ ID NO: 47518 - protein, 7 aa, Artificial sequence
  Protein classification predicting sequence
TTNSDSG

SEQ ID NO: 47519 - protein, 6 aa, Artificial sequence
  Protein classification predicting sequence
ACGCAG

SEQ ID NO: 47520 - protein, 24 aa, Artificial sequence
  Protein classification predicting sequence
DTVRDISRYNGRALIMPNTVPPVT

SEQ ID NO: 47521 - protein, 8 aa, Artificial sequence
  Protein classification predicting sequence
LLVHGEVT

SEQ ID NO: 47522 - protein, 8 aa, Artificial sequence
  Protein classification predicting sequence
ELYAEVFE

SEQ ID NO: 47523 - protein, 11 aa, Artificial sequence
  Protein classification predicting sequence
RPDDWHIHLRD

SEQ ID NO: 47524 - protein, 17 aa, Artificial sequence
  Protein classification predicting sequence
GVFTAAKLYPANATTNS

SEQ ID NO: 47525 - protein, 7 aa, Artificial sequence
  Protein classification predicting sequence
VFEHITT

SEQ ID NO: 47526 - protein, 10 aa, Artificial sequence
  Protein classification predicting sequence
GENGAGKSTL

SEQ ID NO: 47527 - protein, 9 aa, Artificial sequence
  Protein classification predicting sequence
SHRMEEIFA

SEQ ID NO: 47528 - protein, 8 aa, Artificial sequence
  Protein classification predicting sequence
LFRVIREL

SEQ ID NO: 47529 - protein, 8 aa, Artificial sequence
  Protein classification predicting sequence
LLINPTDS

SEQ ID NO: 47530 - protein, 9 aa, Artificial sequence
  Protein classification predicting sequence
ADFDRTKGL

SEQ ID NO: 47531 - protein, 9 aa, Artificial sequence
  Protein classification predicting sequence
NDEMALGAL

SEQ ID NO: 47532 - protein, 8 aa, Artificial sequence
  Protein classification predicting sequence
LVVLDSQN

SEQ ID NO: 47533 - protein, 7 aa, Artificial sequence
  Protein classification predicting sequence
PAKELAN

SEQ ID NO: 47534 - protein, 9 aa, Artificial sequence
  Protein classification predicting sequence
VVSHIASDN

SEQ ID NO: 47535 - protein, 15 aa, Artificial sequence
  Protein classification predicting sequence
GIAGTSAARERGEGF

SEQ ID NO: 47536 - protein, 14 aa, Artificial sequence
  Protein classification predicting sequence
FAQNDEMALGALRA

SEQ ID NO: 47537 - protein, 8 aa, Artificial sequence
  Protein classification predicting sequence
IRSHECKP

SEQ ID NO: 47538 - protein, 8 aa, Artificial sequence
  Protein classification predicting sequence
ISCMCHDL

SEQ ID NO: 47539 - protein, 7 aa, Artificial sequence
  Protein classification predicting sequence
SVLENHH

SEQ ID NO: 47540 - protein, 14 aa, Artificial sequence
  Protein classification predicting sequence
MKGVSVGSSTLLCE

SEQ ID NO: 47541 - protein, 8 aa, Artificial sequence
  Protein classification predicting sequence
PTLPDISF

SEQ ID NO: 47542 - protein, 9 aa, Artificial sequence
  Protein classification predicting sequence
SPVVLTNYL

SEQ ID NO: 47543 - protein, 17 aa, Artificial sequence
  Protein classification predicting sequence
QYYGEIGIGTPPQTFKV

SEQ ID NO: 47544 - protein, 7 aa, Artificial sequence
  Protein classification predicting sequence
VLGGSDP

SEQ ID NO: 47545 - protein, 20 aa, Artificial sequence
  Protein classification predicting sequence
MPRWGLLLLLWGSCTFGLPT

SEQ ID NO: 47546 - protein, 24 aa, Artificial sequence
  Protein classification predicting sequence
LKRMPSIRESLKERGVDMARLGPE

SEQ ID NO: 47547 - protein, 89 aa, Artificial sequence
  Protein classification predicting sequence
TSSVILTNYMDTQYYGEIGIGTPPQTFKVVFDTGSSNVWVPSSKCSRLYTACVYHKLFDASDSSSYKHNGTELTLRYSTGTVSGFLSQD

SEQ ID NO: 47548 - protein, 9 aa, Artificial sequence
  Protein classification predicting sequence
TVGGITVTQ

SEQ ID NO: 47549 - protein, 25 aa, Artificial sequence
  Protein classification predicting sequence
FGEVTEMPALPFMLAEFDGVVGMGF

SEQ ID NO: 47550 - protein, 125 aa, Artificial sequence
  Protein classification predicting sequence
MKGVSVGSSTLLCEDGCLALVDTGASYISGSTSSIEKLMEALGAKKRLFDYVVKCNEGPTLPDISFHLGGKEYTLTSADYVFQESYSSKKLCTLAIHAMDIPPPTGPTWALGATFIRKFYTEFDR

SEQ ID NO: 47551 - protein, 10 aa, Artificial sequence
  Protein classification predicting sequence
LWGSCTFGLP

SEQ ID NO: 47552 - protein, 10 aa, Artificial sequence
  Protein classification predicting sequence
VDTGASYISG

SEQ ID NO: 47553 - protein, 12 aa, Artificial sequence
  Protein classification predicting sequence
PPPTGPVWVLGA

SEQ ID NO: 47554 - protein, 11 aa, Artificial sequence
  Protein classification predicting sequence
FIRKFYTEFDR

SEQ ID NO: 47555 - protein, 9 aa, Artificial sequence
  Protein classification predicting sequence
NNRIGFALA

SEQ ID NO: 47556 - protein, 21 aa, Artificial sequence
  Protein classification predicting sequence
QTFKVIFDTGSANLWVPSTKC

SEQ ID NO: 47557 - protein, 8 aa, Artificial sequence
  Protein classification predicting sequence
DIPPPTGP

SEQ ID NO: 47558 - protein, 20 aa, Artificial sequence
  Protein classification predicting sequence
VTVGGITVTQTFGEVTELPL

SEQ ID NO: 47559 - protein, 9 aa, Artificial sequence
  Protein classification predicting sequence
NFHYVSISK

SEQ ID NO: 47560 - protein, 8 aa, Artificial sequence
  Protein classification predicting sequence
LMEALGAK

SEQ ID NO: 47561 - protein, 9 aa, Artificial sequence
  Protein classification predicting sequence
YTLTSADYV

SEQ ID NO: 47562 - protein, 15 aa, Artificial sequence
  Protein classification predicting sequence
LGATFIRKFYTEFDR

SEQ ID NO: 47563 - protein, 7 aa, Artificial sequence
  Protein classification predicting sequence
PGHIFPL

SEQ ID NO: 47564 - protein, 7 aa, Artificial sequence
  Protein classification predicting sequence
YVMIYDC

SEQ ID NO: 47565 - protein, 8 aa, Artificial sequence
  Protein classification predicting sequence
RGTVSLGL

SEQ ID NO: 47566 - protein, 8 aa, Artificial sequence
  Protein classification predicting sequence
NVNRAYYF

SEQ ID NO: 47567 - protein, 12 aa, Artificial sequence
  Protein classification predicting sequence
ITSAELTALFPE

SEQ ID NO: 47568 - protein, 9 aa, Artificial sequence
  Protein classification predicting sequence
SRKELGLGI

SEQ ID NO: 47569 - protein, 18 aa, Artificial sequence
  Protein classification predicting sequence
KNGVFNKDYDFGFGKVRQ

SEQ ID NO: 47570 - protein, 8 aa, Artificial sequence
  Protein classification predicting sequence
KDLQMGLL

SEQ ID NO: 47571 - protein, 10 aa, Artificial sequence
  Protein classification predicting sequence
GDVSFRLSGA

SEQ ID NO: 47572 - protein, 7 aa, Artificial sequence
  Protein classification predicting sequence
LPYSGNY

SEQ ID NO: 47573 - protein, 8 aa, Artificial sequence
  Protein classification predicting sequence
YVVAYRAG

SEQ ID NO: 47574 - protein, 8 aa, Artificial sequence
  Protein classification predicting sequence
WSALSKQI

SEQ ID NO: 47575 - protein, 42 aa, Artificial sequence
  Protein classification predicting sequence
KFLRINFQSSRGTVSLGLKRDNLYVVAYLAMDNTNVNRAYYF

SEQ ID NO: 47576 - protein, 34 aa, Artificial sequence
  Protein classification predicting sequence
TALFPEATTANQKALEYTEDYQSIEKNAQITQGD

SEQ ID NO: 47577 - protein, 7 aa, Artificial sequence
  Protein classification predicting sequence
KNFPNKF

SEQ ID NO: 47578 - protein, 13 aa, Artificial sequence
  Protein classification predicting sequence
LKCYGIPMLPNTN

SEQ ID NO: 47579 - protein, 6 aa, Artificial sequence
  Protein classification predicting sequence
DVTNVY

SEQ ID NO: 47580 - protein, 7 aa, Artificial sequence
  Protein classification predicting sequence
AAGKIRE

SEQ ID NO: 47581 - protein, 8 aa, Artificial sequence
  Protein classification predicting sequence
VQLGIQIL

SEQ ID NO: 47582 - protein, 10 aa, Artificial sequence
  Protein classification predicting sequence
DVTNVYIMGY

SEQ ID NO: 47583 - protein, 9 aa, Artificial sequence
  Protein classification predicting sequence
KFERQHMDS

SEQ ID NO: 47584 - protein, 7 aa, Artificial sequence
  Protein classification predicting sequence
VNTFVHE

SEQ ID NO: 47585 - protein, 20 aa, Artificial sequence
  Protein classification predicting sequence
RCKPVNTFVHESLADVQAVC

SEQ ID NO: 47586 - protein, 6 aa, Artificial sequence
  Protein classification predicting sequence
YCNQMM

SEQ ID NO: 47587 - protein, 23 aa, Artificial sequence
  Protein classification predicting sequence
TQDRCKPVNTFVHESLADVQAVC

SEQ ID NO: 47588 - protein, 6 aa, Artificial sequence
  Protein classification predicting sequence
YKTTQA

SEQ ID NO: 47589 - protein, 14 aa, Artificial sequence
  Protein classification predicting sequence
TQGRCKPVNTFVHE

SEQ ID NO: 47590 - protein, 7 aa, Artificial sequence
  Protein classification predicting sequence
RRNMTQG

SEQ ID NO: 47591 - protein, 8 aa, Artificial sequence
  Protein classification predicting sequence
STSSASSS

SEQ ID NO: 47592 - protein, 8 aa, Artificial sequence
  Protein classification predicting sequence
SYSTMSIT

SEQ ID NO: 47593 - protein, 8 aa, Artificial sequence
  Protein classification predicting sequence
VQPSLGKE

SEQ ID NO: 47594 - protein, 12 aa, Artificial sequence
  Protein classification predicting sequence
YCNQMMKRREMT

SEQ ID NO: 47595 - protein, 7 aa, Artificial sequence
  Protein classification predicting sequence
CKPVNTF

SEQ ID NO: 47596 - protein, 8 aa, Artificial sequence
  Protein classification predicting sequence
CKNGQTNC

SEQ ID NO: 47597 - protein, 7 aa, Artificial sequence
  Protein classification predicting sequence
IIVACEG

SEQ ID NO: 47598 - protein, 5 aa, Artificial sequence
  Protein classification predicting sequence
NTFVH

SEQ ID NO: 47599 - protein, 6 aa, Artificial sequence
  Protein classification predicting sequence
SKYPNC

SEQ ID NO: 47600 - protein, 7 aa, Artificial sequence
  Protein classification predicting sequence
NVTCKNG

SEQ ID NO: 47601 - protein, 8 aa, Artificial sequence
  Protein classification predicting sequence
LADVQAVC

SEQ ID NO: 47602 - protein, 10 aa, Artificial sequence
  Protein classification predicting sequence
LADVQAVCSQ

SEQ ID NO: 47603 - protein, 8 aa, Artificial sequence
  Protein classification predicting sequence
TQDRCKPV

SEQ ID NO: 47604 - protein, 7 aa, Artificial sequence
  Protein classification predicting sequence
NYCNEMM

SEQ ID NO: 47605 - protein, 7 aa, Artificial sequence
  Protein classification predicting sequence
VPVHFDA

SEQ ID NO: 47606 - protein, 11 aa, Artificial sequence
  Protein classification predicting sequence
CKNGQTNCYQS

SEQ ID NO: 47607 - protein, 11 aa, Artificial sequence
  Protein classification predicting sequence
KERHIIVACEG

SEQ ID NO: 47608 - protein, 7 aa, Artificial sequence
  Protein classification predicting sequence
MHITDCR

SEQ ID NO: 47609 - protein, 6 aa, Artificial sequence
  Protein classification predicting sequence
PYVPVH

SEQ ID NO: 47610 - protein, 6 aa, Artificial sequence
  Protein classification predicting sequence
RQHMDS

SEQ ID NO: 47611 - protein, 8 aa, Artificial sequence
  Protein classification predicting sequence
STYCNQMM

SEQ ID NO: 47612 - protein, 14 aa, Artificial sequence
  Protein classification predicting sequence
TQDRCKPVNTFVHE

SEQ ID NO: 47613 - protein, 8 aa, Artificial sequence
  Protein classification predicting sequence
AVCFQKNV

SEQ ID NO: 47614 - protein, 7 aa, Artificial sequence
  Protein classification predicting sequence
TGSSKYP

SEQ ID NO: 47615 - protein, 12 aa, Artificial sequence
  Protein classification predicting sequence
CKPVNTFVHEPL

SEQ ID NO: 47616 - protein, 6 aa, Artificial sequence
  Protein classification predicting sequence
YPNCAY

SEQ ID NO: 47617 - protein, 10 aa, Artificial sequence
  Protein classification predicting sequence
CKPVNTFVHE

SEQ ID NO: 47618 - protein, 28 aa, Artificial sequence
  Protein classification predicting sequence
SSMHITDCRLTNGSRYPNCAYRTSPKER

SEQ ID NO: 47619 - protein, 9 aa, Artificial sequence
  Protein classification predicting sequence
VPVHFDASV

SEQ ID NO: 47620 - protein, 15 aa, Artificial sequence
  Protein classification predicting sequence
CKPVNTFVHESLADV

SEQ ID NO: 47621 - protein, 11 aa, Artificial sequence
  Protein classification predicting sequence
CKNGKSNCYKS

SEQ ID NO: 47622 - protein, 7 aa, Artificial sequence
  Protein classification predicting sequence
KYPNCDY

SEQ ID NO: 47623 - protein, 7 aa, Artificial sequence
  Protein classification predicting sequence
TYCNQMM

SEQ ID NO: 47624 - protein, 8 aa, Artificial sequence
  Protein classification predicting sequence
QENVTCKN

SEQ ID NO: 47625 - protein, 10 aa, Artificial sequence
  Protein classification predicting sequence
LKGNSKYPNC

SEQ ID NO: 47626 - protein, 6 aa, Artificial sequence
  Protein classification predicting sequence
MMKSRN

SEQ ID NO: 47627 - protein, 10 aa, Artificial sequence
  Protein classification predicting sequence
LVLGWVQPSL

SEQ ID NO: 47628 - protein, 11 aa, Artificial sequence
  Protein classification predicting sequence
ESRAKKFQRQH

SEQ ID NO: 47629 - protein, 6 aa, Artificial sequence
  Protein classification predicting sequence
SSNYCN

SEQ ID NO: 47630 - protein, 10 aa, Artificial sequence
  Protein classification predicting sequence
SNSTYCNQMM

SEQ ID NO: 47631 - protein, 11 aa, Artificial sequence
  Protein classification predicting sequence
SSMHITDCRLT

SEQ ID NO: 47632 - protein, 6 aa, Artificial sequence
  Protein classification predicting sequence
RNMTQG

SEQ ID NO: 47633 - protein, 27 aa, Artificial sequence
  Protein classification predicting sequence
VNTFVHEPLVDVQNVCFQEKVTCKNGQ

SEQ ID NO: 47634 - protein, 7 aa, Artificial sequence
  Protein classification predicting sequence
CRLTNGS

SEQ ID NO: 47635 - protein, 8 aa, Artificial sequence
  Protein classification predicting sequence
PYVPVHFD

SEQ ID NO: 47636 - protein, 9 aa, Artificial sequence
  Protein classification predicting sequence
CKNGQSNCY

SEQ ID NO: 47637 - protein, 9 aa, Artificial sequence
  Protein classification predicting sequence
KSIIVACEG

SEQ ID NO: 47638 - protein, 8 aa, Artificial sequence
  Protein classification predicting sequence
QPSLGRES

SEQ ID NO: 47639 - protein, 8 aa, Artificial sequence
  Protein classification predicting sequence
MHITDCRE

SEQ ID NO: 47640 - protein, 7 aa, Artificial sequence
  Protein classification predicting sequence
HITECRL

SEQ ID NO: 47641 - protein, 13 aa, Artificial sequence
  Protein classification predicting sequence
VCFQEKVTCKNGQ

SEQ ID NO: 47642 - protein, 9 aa, Artificial sequence
  Protein classification predicting sequence
NCYKSSSSM

SEQ ID NO: 47643 - protein, 14 aa, Artificial sequence
  Protein classification predicting sequence
ESRAKKFQRQHMDS

SEQ ID NO: 47644 - protein, 9 aa, Artificial sequence
  Protein classification predicting sequence
KFQRQHMDS

SEQ ID NO: 47645 - protein, 6 aa, Artificial sequence
  Protein classification predicting sequence
CSQKNV

SEQ ID NO: 47646 - protein, 8 aa, Artificial sequence
  Protein classification predicting sequence
SALHITDC

SEQ ID NO: 47647 - protein, 9 aa, Artificial sequence
  Protein classification predicting sequence
CKPVNTFVH

SEQ ID NO: 47648 - protein, 6 aa, Artificial sequence
  Protein classification predicting sequence
CAYKTT

SEQ ID NO: 47649 - protein, 10 aa, Artificial sequence
  Protein classification predicting sequence
TYCNQMMKRR

SEQ ID NO: 47650 - protein, 7 aa, Artificial sequence
  Protein classification predicting sequence
NSKYPNC

SEQ ID NO: 47651 - protein, 9 aa, Artificial sequence
  Protein classification predicting sequence
RCKNQNTFL

SEQ ID NO: 47652 - protein, 7 aa, Artificial sequence
  Protein classification predicting sequence
VVNVCGN

SEQ ID NO: 47653 - protein, 14 aa, Artificial sequence
  Protein classification predicting sequence
RDPPQYPVVPVHLD

SEQ ID NO: 47654 - protein, 8 aa, Artificial sequence
  Protein classification predicting sequence
YTQTTANK

SEQ ID NO: 47655 - protein, 9 aa, Artificial sequence
  Protein classification predicting sequence
QFTWAQWFE

SEQ ID NO: 47656 - protein, 6 aa, Artificial sequence
  Protein classification predicting sequence
NCHHSG

SEQ ID NO: 47657 - protein, 9 aa, Artificial sequence
  Protein classification predicting sequence
ICLLLLLGL

SEQ ID NO: 47658 - protein, 20 aa, Artificial sequence
  Protein classification predicting sequence
ICLLLLLGLMGVEGSLHAKP

SEQ ID NO: 47659 - protein, 7 aa, Artificial sequence
  Protein classification predicting sequence
QHINMTS

SEQ ID NO: 47660 - protein, 16 aa, Artificial sequence
  Protein classification predicting sequence
VINNYQRRCKNQNTFL

SEQ ID NO: 47661 - protein, 15 aa, Artificial sequence
  Protein classification predicting sequence
RDPPQYPVVPVHLDR

SEQ ID NO: 47662 - protein, 6 aa, Artificial sequence
  Protein classification predicting sequence
TRKNCH

SEQ ID NO: 47663 - protein, 28 aa, Artificial sequence
  Protein classification predicting sequence
GSLHVKPPQFTWAQWFETQHINMTSQQC

SEQ ID NO: 47664 - protein, 13 aa, Artificial sequence
  Protein classification predicting sequence
QVPLIHCNLTTPS

SEQ ID NO: 47665 - protein, 7 aa, Artificial sequence
  Protein classification predicting sequence
VACDNRD

SEQ ID NO: 47666 - protein, 8 aa, Artificial sequence
  Protein classification predicting sequence
GFGFLEVD

SEQ ID NO: 47667 - protein, 9 aa, Artificial sequence
  Protein classification predicting sequence
PWWVTLARH

SEQ ID NO: 47668 - protein, 8 aa, Artificial sequence
  Protein classification predicting sequence
GFGIYNVH

SEQ ID NO: 47669 - protein, 11 aa, Artificial sequence
  Protein classification predicting sequence
YATWTSPIRKY

SEQ ID NO: 47670 - protein, 8 aa, Artificial sequence
  Protein classification predicting sequence
NRMAERDV

SEQ ID NO: 47671 - protein, 8 aa, Artificial sequence
  Protein classification predicting sequence
NPLLAQLK

SEQ ID NO: 47672 - protein, 6 aa, Artificial sequence
  Protein classification predicting sequence
PWWVTL

SEQ ID NO: 47673 - protein, 7 aa, Artificial sequence
  Protein classification predicting sequence
EPFLTRF

SEQ ID NO: 47674 - protein, 8 aa, Artificial sequence
  Protein classification predicting sequence
FTNYLPGF

SEQ ID NO: 47675 - protein, 7 aa, Artificial sequence
  Protein classification predicting sequence
GFCKLRR

SEQ ID NO: 47676 - protein, 7 aa, Artificial sequence
  Protein classification predicting sequence
AIADPTA

SEQ ID NO: 47677 - protein, 7 aa, Artificial sequence
  Protein classification predicting sequence
KSYFIPP

SEQ ID NO: 47678 - protein, 8 aa, Artificial sequence
  Protein classification predicting sequence
MKKVMHGD

SEQ ID NO: 47679 - protein, 24 aa, Artificial sequence
  Protein classification predicting sequence
FTNYLPGFNIPMLPRELSDDLCSL

SEQ ID NO: 47680 - protein, 6 aa, Artificial sequence
  Protein classification predicting sequence
DWLYAR

SEQ ID NO: 47681 - protein, 7 aa, Artificial sequence
  Protein classification predicting sequence
IVEEAMI

SEQ ID NO: 47682 - protein, 7 aa, Artificial sequence
  Protein classification predicting sequence
ADPTAYI

SEQ ID NO: 47683 - protein, 13 aa, Artificial sequence
  Protein classification predicting sequence
PDHPLLKDAIPCR

SEQ ID NO: 47684 - protein, 7 aa, Artificial sequence
  Protein classification predicting sequence
NIPMLPR

SEQ ID NO: 47685 - protein, 15 aa, Artificial sequence
  Protein classification predicting sequence
AFIPAPFLHAVRDEL

SEQ ID NO: 47686 - protein, 12 aa, Artificial sequence
  Protein classification predicting sequence
EKERESAEPEEL

SEQ ID NO: 47687 - protein, 18 aa, Artificial sequence
  Protein classification predicting sequence
EPFLTRFVGKVQGKNDRL

SEQ ID NO: 47688 - protein, 19 aa, Artificial sequence
  Protein classification predicting sequence
IVPDHPLLKDAIPCRAARG

SEQ ID NO: 47689 - protein, 11 aa, Artificial sequence
  Protein classification predicting sequence
GVATEMLDEGL

SEQ ID NO: 47690 - protein, 17 aa, Artificial sequence
  Protein classification predicting sequence
VAIADPTAWIAEGSKLD

SEQ ID NO: 47691 - protein, 18 aa, Artificial sequence
  Protein classification predicting sequence
CAARVLRDKLGFGIYNVH

SEQ ID NO: 47692 - protein, 7 aa, Artificial sequence
  Protein classification predicting sequence
TRFAAEI

SEQ ID NO: 47693 - protein, 26 aa, Artificial sequence
  Protein classification predicting sequence
HEFKEGDWAVAEMRRHPLKGDRSFYA

SEQ ID NO: 47694 - protein, 21 aa, Artificial sequence
  Protein classification predicting sequence
DDHFVPWWVTLARHNLEKEAP

SEQ ID NO: 47695 - protein, 12 aa, Artificial sequence
  Protein classification predicting sequence
FFAATIESKAKL

SEQ ID NO: 47696 - protein, 24 aa, Artificial sequence
  Protein classification predicting sequence
LGEKGEVLDIVAEPRRIANRIVEE

SEQ ID NO: 47697 - protein, 29 aa, Artificial sequence
  Protein classification predicting sequence
GFDPANADALAALLKTHGLHVDAEEVLTL

SEQ ID NO: 47698 - protein, 12 aa, Artificial sequence
  Protein classification predicting sequence
IRTENEREVAEP

SEQ ID NO: 47699 - protein, 7 aa, Artificial sequence
  Protein classification predicting sequence
RHPLKGD

SEQ ID NO: 47700 - protein, 19 aa, Artificial sequence
  Protein classification predicting sequence
PFVTIDGESTKDMDDALYA

SEQ ID NO: 47701 - protein, 9 aa, Artificial sequence
  Protein classification predicting sequence
KDGVIGDDI

SEQ ID NO: 47702 - protein, 12 aa, Artificial sequence
  Protein classification predicting sequence
FFAANIKSHARL

SEQ ID NO: 47703 - protein, 8 aa, Artificial sequence
  Protein classification predicting sequence
WQPSEEIA

SEQ ID NO: 47704 - protein, 15 aa, Artificial sequence
  Protein classification predicting sequence
AVVFPDRPDYRFELS

SEQ ID NO: 47705 - protein, 7 aa, Artificial sequence
  Protein classification predicting sequence
DRPDYRF

SEQ ID NO: 47706 - protein, 7 aa, Artificial sequence
  Protein classification predicting sequence
EIFDINR

SEQ ID NO: 47707 - protein, 9 aa, Artificial sequence
  Protein classification predicting sequence
VNQENRSLV

SEQ ID NO: 47708 - protein, 7 aa, Artificial sequence
  Protein classification predicting sequence
PWWVTLA

SEQ ID NO: 47709 - protein, 11 aa, Artificial sequence
  Protein classification predicting sequence
NDLPNSEPAGI

SEQ ID NO: 47710 - protein, 18 aa, Artificial sequence
  Protein classification predicting sequence
TIYLPGRNIPMLPRDLAD

SEQ ID NO: 47711 - protein, 19 aa, Artificial sequence
  Protein classification predicting sequence
VGEELALHRKHHKIAERNV

SEQ ID NO: 47712 - protein, 8 aa, Artificial sequence
  Protein classification predicting sequence
GDWAVAEM

SEQ ID NO: 47713 - protein, 16 aa, Artificial sequence
  Protein classification predicting sequence
DHFVPWWVTLARHNLE

SEQ ID NO: 47714 - protein, 10 aa, Artificial sequence
  Protein classification predicting sequence
LGEKGEVLDI

SEQ ID NO: 47715 - protein, 10 aa, Artificial sequence
  Protein classification predicting sequence
RRIANRIVEE

SEQ ID NO: 47716 - protein, 25 aa, Artificial sequence
  Protein classification predicting sequence
PGPHFGLGLEAYATWTSPIRKYGDM

SEQ ID NO: 47717 - protein, 21 aa, Artificial sequence
  Protein classification predicting sequence
AERRRLNRMAERDVGDWLYAR

SEQ ID NO: 47718 - protein, 7 aa, Artificial sequence
  Protein classification predicting sequence
AGTDTRF

SEQ ID NO: 47719 - protein, 8 aa, Artificial sequence
  Protein classification predicting sequence
ITHTGASG

SEQ ID NO: 47720 - protein, 6 aa, Artificial sequence
  Protein classification predicting sequence
ALTHRS

SEQ ID NO: 47721 - protein, 14 aa, Artificial sequence
  Protein classification predicting sequence
NERLEFLGDAILNF

SEQ ID NO: 47722 - protein, 10 aa, Artificial sequence
  Protein classification predicting sequence
RPALLADVFE

SEQ ID NO: 47723 - protein, 14 aa, Artificial sequence
  Protein classification predicting sequence
NERLEFLGDAVLEL

SEQ ID NO: 47724 - protein, 7 aa, Artificial sequence
  Protein classification predicting sequence
IVCEPSL

SEQ ID NO: 47725 - protein, 9 aa, Artificial sequence
  Protein classification predicting sequence
NERLEFLGD

SEQ ID NO: 47726 - protein, 7 aa, Artificial sequence
  Protein classification predicting sequence
RLEFLGD

SEQ ID NO: 47727 - protein, 7 aa, Artificial sequence
  Protein classification predicting sequence
VIANALY

SEQ ID NO: 47728 - protein, 10 aa, Artificial sequence
  Protein classification predicting sequence
GELKSGGFRR

SEQ ID NO: 47729 - protein, 7 aa, Artificial sequence
  Protein classification predicting sequence
SRRKAEQ

SEQ ID NO: 47730 - protein, 20 aa, Artificial sequence
  Protein classification predicting sequence
SKHNERLEFLGDSILSFVIA

SEQ ID NO: 47731 - protein, 14 aa, Artificial sequence
  Protein classification predicting sequence
EGDMSRMRATLVRG

SEQ ID NO: 47732 - protein, 9 aa, Artificial sequence
  Protein classification predicting sequence
HLPLPSYLV

SEQ ID NO: 47733 - protein, 7 aa, Artificial sequence
  Protein classification predicting sequence
GDRVLGL

SEQ ID NO: 47734 - protein, 8 aa, Artificial sequence
  Protein classification predicting sequence
ERLEFLGD

SEQ ID NO: 47735 - protein, 11 aa, Artificial sequence
  Protein classification predicting sequence
ERLEFLGDAVL

SEQ ID NO: 47736 - protein, 7 aa, Artificial sequence
  Protein classification predicting sequence
ALTHPSY

SEQ ID NO: 47737 - protein, 12 aa, Artificial sequence
  Protein classification predicting sequence
NERLEFLGDAVL

SEQ ID NO: 47738 - protein, 6 aa, Artificial sequence
  Protein classification predicting sequence
TGGRTR

SEQ ID NO: 47739 - protein, 9 aa, Artificial sequence
  Protein classification predicting sequence
SILADAVEA

SEQ ID NO: 47740 - protein, 12 aa, Artificial sequence
  Protein classification predicting sequence
NERLEFLGDSIL

SEQ ID NO: 47741 - protein, 9 aa, Artificial sequence
  Protein classification predicting sequence
SRMRATLVR

SEQ ID NO: 47742 - protein, 6 aa, Artificial sequence
  Protein classification predicting sequence
RRESIL

SEQ ID NO: 47743 - protein, 10 aa, Artificial sequence
  Protein classification predicting sequence
QKDPKTRLQE

SEQ ID NO: 47744 - protein, 16 aa, Artificial sequence
  Protein classification predicting sequence
QKDPKTRLQEFLQGRR

SEQ ID NO: 47745 - protein, 14 aa, Artificial sequence
  Protein classification predicting sequence
GSSRRKAEQAAAEQ

SEQ ID NO: 47746 - protein, 7 aa, Artificial sequence
  Protein classification predicting sequence
KEEGPAH

SEQ ID NO: 47747 - protein, 8 aa, Artificial sequence
  Protein classification predicting sequence
EFLGDAVL

SEQ ID NO: 47748 - protein, 8 aa, Artificial sequence
  Protein classification predicting sequence
GDVAIDYQ

SEQ ID NO: 47749 - protein, 7 aa, Artificial sequence
  Protein classification predicting sequence
LGKGEEK

SEQ ID NO: 47750 - protein, 8 aa, Artificial sequence
  Protein classification predicting sequence
FIGALYLD

SEQ ID NO: 47751 - protein, 12 aa, Artificial sequence
  Protein classification predicting sequence
AFTHSSYVNEHR

SEQ ID NO: 47752 - protein, 8 aa, Artificial sequence
  Protein classification predicting sequence
FEAFLGAL

SEQ ID NO: 47753 - protein, 8 aa, Artificial sequence
  Protein classification predicting sequence
GALYLDQG

SEQ ID NO: 47754 - protein, 11 aa, Artificial sequence
  Protein classification predicting sequence
SRRKAEQAAAE

SEQ ID NO: 47755 - protein, 7 aa, Artificial sequence
  Protein classification predicting sequence
RKLGYTF

SEQ ID NO: 47756 - protein, 38 aa, Artificial sequence
  Protein classification predicting sequence
LGECLRLGPGELKSGGFRRESILADTVEALIGGVFLDS

SEQ ID NO: 47757 - protein, 25 aa, Artificial sequence
  Protein classification predicting sequence
QALTHRSASSKHNERLEFLGDSILS

SEQ ID NO: 47758 - protein, 38 aa, Artificial sequence
  Protein classification predicting sequence
VIANALYHRFPRVDEGDMSRMRATLVRGNTLAELAREF

SEQ ID NO: 47759 - protein, 6 aa, Artificial sequence
  Protein classification predicting sequence
SYANEH

SEQ ID NO: 47760 - protein, 10 aa, Artificial sequence
  Protein classification predicting sequence
HNERLEFLGD

SEQ ID NO: 47761 - protein, 13 aa, Artificial sequence
  Protein classification predicting sequence
HNERLEFLGDAVL

SEQ ID NO: 47762 - protein, 8 aa, Artificial sequence
  Protein classification predicting sequence
FAEKVIFP

SEQ ID NO: 47763 - protein, 14 aa, Artificial sequence
  Protein classification predicting sequence
GVVDFKTQFQEYVH

SEQ ID NO: 47764 - protein, 8 aa, Artificial sequence
  Protein classification predicting sequence
QNKGDVTY

SEQ ID NO: 47765 - protein, 19 aa, Artificial sequence
  Protein classification predicting sequence
LIKEEGPAHHRLFTSEVIL

SEQ ID NO: 47766 - protein, 13 aa, Artificial sequence
  Protein classification predicting sequence
AEGKGKTKKESEQ

SEQ ID NO: 47767 - protein, 23 aa, Artificial sequence
  Protein classification predicting sequence
NIDLYQQAFSHSSFINDFNMNRL

SEQ ID NO: 47768 - protein, 23 aa, Artificial sequence
  Protein classification predicting sequence
HNERLEFLGDAVLELTVSRYLFD

SEQ ID NO: 47769 - protein, 26 aa, Artificial sequence
  Protein classification predicting sequence
LPEGNLTKMRATIVCEPSLVIFANKI

SEQ ID NO: 47770 - protein, 26 aa, Artificial sequence
  Protein classification predicting sequence
ILLGKGEEKTGGRTRPSLISDAFEAF

SEQ ID NO: 47771 - protein, 16 aa, Artificial sequence
  Protein classification predicting sequence
LGAGLDWKTSLQELTA

SEQ ID NO: 47772 - protein, 7 aa, Artificial sequence
  Protein classification predicting sequence
SKKEAEQ

SEQ ID NO: 47773 - protein, 18 aa, Artificial sequence
  Protein classification predicting sequence
LLETAFTHTSYANEHRLL

SEQ ID NO: 47774 - protein, 11 aa, Artificial sequence
  Protein classification predicting sequence
MIVREESLAGF

SEQ ID NO: 47775 - protein, 13 aa, Artificial sequence
  Protein classification predicting sequence
IKLGKGEEKSGGR

SEQ ID NO: 47776 - protein, 8 aa, Artificial sequence
  Protein classification predicting sequence
RDSILADA

SEQ ID NO: 47777 - protein, 8 aa, Artificial sequence
  Protein classification predicting sequence
AVYLDGGL

SEQ ID NO: 47778 - protein, 6 aa, Artificial sequence
  Protein classification predicting sequence
YLDGGL

SEQ ID NO: 47779 - protein, 7 aa, Artificial sequence
  Protein classification predicting sequence
FEAFIGA

SEQ ID NO: 47780 - protein, 39 aa, Artificial sequence
  Protein classification predicting sequence
SQKDPKTRLQEFLQGRRKPLPVYTVTNIKGEAHNQEFTV

SEQ ID NO: 47781 - protein, 6 aa, Artificial sequence
  Protein classification predicting sequence
LYHRFP

SEQ ID NO: 47782 - protein, 9 aa, Artificial sequence
  Protein classification predicting sequence
LVRGNTLAE

SEQ ID NO: 47783 - protein, 7 aa, Artificial sequence
  Protein classification predicting sequence
GELKSGG

SEQ ID NO: 47784 - protein, 9 aa, Artificial sequence
  Protein classification predicting sequence
KDPKTRLQE

SEQ ID NO: 47785 - protein, 27 aa, Artificial sequence
  Protein classification predicting sequence
EISPGDKQKDPKTRLQEYLQGRHLPLP

SEQ ID NO: 47786 - protein, 24 aa, Artificial sequence
  Protein classification predicting sequence
YLVVQVRGEAHDQEFTIHCQVSGL

SEQ ID NO: 47787 - protein, 19 aa, Artificial sequence
  Protein classification predicting sequence
GTGSSRRKAEQAAAEQALK

SEQ ID NO: 47788 - protein, 9 aa, Artificial sequence
  Protein classification predicting sequence
ITHTGASGN

SEQ ID NO: 47789 - protein, 11 aa, Artificial sequence
  Protein classification predicting sequence
AGVDEAGRGPL

SEQ ID NO: 47790 - protein, 8 aa, Artificial sequence
  Protein classification predicting sequence
VVAAAVIL

SEQ ID NO: 47791 - protein, 8 aa, Artificial sequence
  Protein classification predicting sequence
GVDEAGRG

SEQ ID NO: 47792 - protein, 8 aa, Artificial sequence
  Protein classification predicting sequence
AASIVAKV

SEQ ID NO: 47793 - protein, 8 aa, Artificial sequence
  Protein classification predicting sequence
GSGYPSDP

SEQ ID NO: 47794 - protein, 7 aa, Artificial sequence
  Protein classification predicting sequence
AKVTRDR

SEQ ID NO: 47795 - protein, 7 aa, Artificial sequence
  Protein classification predicting sequence
ASIIAKV

SEQ ID NO: 47796 - protein, 6 aa, Artificial sequence
  Protein classification predicting sequence
IDEINI

SEQ ID NO: 47797 - protein, 7 aa, Artificial sequence
  Protein classification predicting sequence
RKGVQKL

SEQ ID NO: 47798 - protein, 13 aa, Artificial sequence
  Protein classification predicting sequence
EMSKYENALREKG

SEQ ID NO: 47799 - protein, 21 aa, Artificial sequence
  Protein classification predicting sequence
SISAASIIAKVTRDRMMKELG

SEQ ID NO: 47800 - protein, 19 aa, Artificial sequence
  Protein classification predicting sequence
YGFEQHMGYGTKQHLEAIE

SEQ ID NO: 47801 - protein, 7 aa, Artificial sequence
  Protein classification predicting sequence
DERKGVQ

SEQ ID NO: 47802 - protein, 8 aa, Artificial sequence
  Protein classification predicting sequence
DEVGRGPL

SEQ ID NO: 47803 - protein, 6 aa, Artificial sequence
  Protein classification predicting sequence
SLIKGD

SEQ ID NO: 47804 - protein, 7 aa, Artificial sequence
  Protein classification predicting sequence
IKGDAKS

SEQ ID NO: 47805 - protein, 8 aa, Artificial sequence
  Protein classification predicting sequence
VIDEINIY

SEQ ID NO: 47806 - protein, 9 aa, Artificial sequence
  Protein classification predicting sequence
SIIKGDAKS

SEQ ID NO: 47807 - protein, 6 aa, Artificial sequence
  Protein classification predicting sequence
DEAGRG

SEQ ID NO: 47808 - protein, 6 aa, Artificial sequence
  Protein classification predicting sequence
LIDGNR

SEQ ID NO: 47809 - protein, 6 aa, Artificial sequence
  Protein classification predicting sequence
ISAASI

SEQ ID NO: 47810 - protein, 6 aa, Artificial sequence
  Protein classification predicting sequence
AKVTRD

SEQ ID NO: 47811 - protein, 6 aa, Artificial sequence
  Protein classification predicting sequence
DEVGRG

SEQ ID NO: 47812 - protein, 6 aa, Artificial sequence
  Protein classification predicting sequence
IAGIDE

SEQ ID NO: 47813 - protein, 7 aa, Artificial sequence
  Protein classification predicting sequence
GLNDSKK

SEQ ID NO: 47814 - protein, 6 aa, Artificial sequence
  Protein classification predicting sequence
LNILHA

SEQ ID NO: 47815 - protein, 7 aa, Artificial sequence
  Protein classification predicting sequence
SIAAASI

SEQ ID NO: 47816 - protein, 11 aa, Artificial sequence
  Protein classification predicting sequence
YGFDKHKGYGT

SEQ ID NO: 47817 - protein, 7 aa, Artificial sequence
  Protein classification predicting sequence
NILEATK

SEQ ID NO: 47818 - protein, 8 aa, Artificial sequence
  Protein classification predicting sequence
DSKKLTPK

SEQ ID NO: 47819 - protein, 9 aa, Artificial sequence
  Protein classification predicting sequence
AGVDEAGRG

SEQ ID NO: 47820 - protein, 13 aa, Artificial sequence
  Protein classification predicting sequence
AGVDEAGRGPLAG

SEQ ID NO: 47821 - protein, 8 aa, Artificial sequence
  Protein classification predicting sequence
LAKTARDA

SEQ ID NO: 47822 - protein, 6 aa, Artificial sequence
  Protein classification predicting sequence
PQYGFA

SEQ ID NO: 47823 - protein, 8 aa, Artificial sequence
  Protein classification predicting sequence
GRGPLAGP

SEQ ID NO: 47824 - protein, 7 aa, Artificial sequence
  Protein classification predicting sequence
IKEKALS

SEQ ID NO: 47825 - protein, 6 aa, Artificial sequence
  Protein classification predicting sequence
HKGYGT

SEQ ID NO: 47826 - protein, 7 aa, Artificial sequence
  Protein classification predicting sequence
VRPGYVL

SEQ ID NO: 47827 - protein, 13 aa, Artificial sequence
  Protein classification predicting sequence
LVAGVDEVGRGPL

SEQ ID NO: 47828 - protein, 10 aa, Artificial sequence
  Protein classification predicting sequence
MAVVKGDSRV

SEQ ID NO: 47829 - protein, 11 aa, Artificial sequence
  Protein classification predicting sequence
INIYQATKQAM

SEQ ID NO: 47830 - protein, 7 aa, Artificial sequence
  Protein classification predicting sequence
PDFVLID

SEQ ID NO: 47831 - protein, 9 aa, Artificial sequence
  Protein classification predicting sequence
VLIDGNRCP

SEQ ID NO: 47832 - protein, 19 aa, Artificial sequence
  Protein classification predicting sequence
YGFAQHKGYPTAFHLEKLA

SEQ ID NO: 47833 - protein, 6 aa, Artificial sequence
  Protein classification predicting sequence
NDSKKL

SEQ ID NO: 47834 - protein, 24 aa, Artificial sequence
  Protein classification predicting sequence
AGVDEVGRGPLVGAVVTAAVILDP

SEQ ID NO: 47835 - protein, 8 aa, Artificial sequence
  Protein classification predicting sequence
DSKKLSEK

SEQ ID NO: 47836 - protein, 10 aa, Artificial sequence
  Protein classification predicting sequence
DSKKLSEKKR

SEQ ID NO: 47837 - protein, 7 aa, Artificial sequence
  Protein classification predicting sequence
WSLGRAE

SEQ ID NO: 47838 - protein, 7 aa, Artificial sequence
  Protein classification predicting sequence
FEYPQGY

SEQ ID NO: 47839 - protein, 13 aa, Artificial sequence
  Protein classification predicting sequence
RDQEMEELDKQYP

SEQ ID NO: 47840 - protein, 8 aa, Artificial sequence
  Protein classification predicting sequence
HRRSFAPV

SEQ ID NO: 47841 - protein, 7 aa, Artificial sequence
  Protein classification predicting sequence
GYGTKQH

SEQ ID NO: 47842 - protein, 10 aa, Artificial sequence
  Protein classification predicting sequence
EKALAIGIGI

SEQ ID NO: 47843 - protein, 8 aa, Artificial sequence
  Protein classification predicting sequence
AIAIGVGI

SEQ ID NO: 47844 - protein, 11 aa, Artificial sequence
  Protein classification predicting sequence
GRGPLAGPVVA

SEQ ID NO: 47845 - protein, 7 aa, Artificial sequence
  Protein classification predicting sequence
AAVILDP

SEQ ID NO: 47846 - protein, 13 aa, Artificial sequence
  Protein classification predicting sequence
DEAGRGPVLGPMV

SEQ ID NO: 47847 - protein, 6 aa, Artificial sequence
  Protein classification predicting sequence
GVKDSK

SEQ ID NO: 47848 - protein, 7 aa, Artificial sequence
  Protein classification predicting sequence
GPCPEHR

SEQ ID NO: 47849 - protein, 6 aa, Artificial sequence
  Protein classification predicting sequence
LSEKKR

SEQ ID NO: 47850 - protein, 9 aa, Artificial sequence
  Protein classification predicting sequence
ISAASILAK

SEQ ID NO: 47851 - protein, 25 aa, Artificial sequence
  Protein classification predicting sequence
YIAGVDEVGRGPLAGPVVAAAVILP

SEQ ID NO: 47852 - protein, 8 aa, Artificial sequence
  Protein classification predicting sequence
GLNDSKKL

SEQ ID NO: 47853 - protein, 11 aa, Artificial sequence
  Protein classification predicting sequence
LNILHATMLAM

SEQ ID NO: 47854 - protein, 15 aa, Artificial sequence
  Protein classification predicting sequence
LNILHATMLAMKRAV

SEQ ID NO: 47855 - protein, 12 aa, Artificial sequence
  Protein classification predicting sequence
PEYVLIDGNRCP

SEQ ID NO: 47856 - protein, 13 aa, Artificial sequence
  Protein classification predicting sequence
HKGYPTAFHLEKL

SEQ ID NO: 47857 - protein, 7 aa, Artificial sequence
  Protein classification predicting sequence
GATEHHR

SEQ ID NO: 47858 - protein, 10 aa, Artificial sequence
  Protein classification predicting sequence
VVTAAVILDP

SEQ ID NO: 47859 - protein, 14 aa, Artificial sequence
  Protein classification predicting sequence
VVTAAVILDPNNPI

SEQ ID NO: 47860 - protein, 11 aa, Artificial sequence
  Protein classification predicting sequence
AAAVILPADFS

SEQ ID NO: 47861 - protein, 8 aa, Artificial sequence
  Protein classification predicting sequence
KNKGYGTK

SEQ ID NO: 47862 - protein, 8 aa, Artificial sequence
  Protein classification predicting sequence
LIDGNRCP

SEQ ID NO: 47863 - protein, 12 aa, Artificial sequence
  Protein classification predicting sequence
GAVVTAAVILDP

SEQ ID NO: 47864 - protein, 16 aa, Artificial sequence
  Protein classification predicting sequence
GAVVTAAVILDPARPI

SEQ ID NO: 47865 - protein, 8 aa, Artificial sequence
  Protein classification predicting sequence
EIDSLNIL

SEQ ID NO: 47866 - protein, 6 aa, Artificial sequence
  Protein classification predicting sequence
HKGYPT

SEQ ID NO: 47867 - protein, 8 aa, Artificial sequence
  Protein classification predicting sequence
AASILAKV

SEQ ID NO: 47868 - protein, 9 aa, Artificial sequence
  Protein classification predicting sequence
GIDEAGRGP

SEQ ID NO: 47869 - protein, 6 aa, Artificial sequence
  Protein classification predicting sequence
DGNRCP

SEQ ID NO: 47870 - protein, 10 aa, Artificial sequence
  Protein classification predicting sequence
PEGLDDSKRL

SEQ ID NO: 47871 - protein, 11 aa, Artificial sequence
  Protein classification predicting sequence
DGRDVPPGLPC

SEQ ID NO: 47872 - protein, 10 aa, Artificial sequence
  Protein classification predicting sequence
RSVSIAAASI

SEQ ID NO: 47873 - protein, 9 aa, Artificial sequence
  Protein classification predicting sequence
AKVTRDRMM

SEQ ID NO: 47874 - protein, 7 aa, Artificial sequence
  Protein classification predicting sequence
GYGTKEH

SEQ ID NO: 47875 - protein, 8 aa, Artificial sequence
  Protein classification predicting sequence
INILEATK

SEQ ID NO: 47876 - protein, 13 aa, Artificial sequence
  Protein classification predicting sequence
AGVDEVGRGPLVG

SEQ ID NO: 47877 - protein, 12 aa, Artificial sequence
  Protein classification predicting sequence
AASIIAKVTRDR

SEQ ID NO: 47878 - protein, 38 aa, Artificial sequence
  Protein classification predicting sequence
HEIDELNILHATMLAMQRAVAGLHIAPEYVLIDGNRCP

SEQ ID NO: 47879 - protein, 45 aa, Artificial sequence
  Protein classification predicting sequence
EISAASILAKVTRDAEMAALDIVFPQYGFAQHKGYPTAFHLEKLA

SEQ ID NO: 47880 - protein, 20 aa, Artificial sequence
  Protein classification predicting sequence
ICGIDEVGRGPLAGPVVACA

SEQ ID NO: 47881 - protein, 9 aa, Artificial sequence
  Protein classification predicting sequence
LLIDAMTLD

SEQ ID NO: 47882 - protein, 8 aa, Artificial sequence
  Protein classification predicting sequence
GYGTKQHL

SEQ ID NO: 47883 - protein, 7 aa, Artificial sequence
  Protein classification predicting sequence
SFEPIKS

SEQ ID NO: 47884 - protein, 13 aa, Artificial sequence
  Protein classification predicting sequence
DEVGRGPLAGPVV

SEQ ID NO: 47885 - protein, 7 aa, Artificial sequence
  Protein classification predicting sequence
NIYEATK

SEQ ID NO: 47886 - protein, 13 aa, Artificial sequence
  Protein classification predicting sequence
YGITPIHRKSFEP

SEQ ID NO: 47887 - protein, 7 aa, Artificial sequence
  Protein classification predicting sequence
HRKSFEP

SEQ ID NO: 47888 - protein, 9 aa, Artificial sequence
  Protein classification predicting sequence
AGVDEVGRG

SEQ ID NO: 47889 - protein, 8 aa, Artificial sequence
  Protein classification predicting sequence
AAASVLAK

SEQ ID NO: 47890 - protein, 14 aa, Artificial sequence
  Protein classification predicting sequence
SIAAASIVAKVTRD

SEQ ID NO: 47891 - protein, 6 aa, Artificial sequence
  Protein classification predicting sequence
FEPIKS

SEQ ID NO: 47892 - protein, 28 aa, Artificial sequence
  Protein classification predicting sequence
GYQAIAGIDEVGRGPLAGPVVAACVILP

SEQ ID NO: 47893 - protein, 21 aa, Artificial sequence
  Protein classification predicting sequence
KGDANSLSIAAASIVAKVTRD

SEQ ID NO: 47894 - protein, 14 aa, Artificial sequence
  Protein classification predicting sequence
CKIKGLNDSKKIPK

SEQ ID NO: 47895 - protein, 12 aa, Artificial sequence
  Protein classification predicting sequence
LNDSKKIPKKKH

SEQ ID NO: 47896 - protein, 9 aa, Artificial sequence
  Protein classification predicting sequence
QTSIIKGDA

SEQ ID NO: 47897 - protein, 7 aa, Artificial sequence
  Protein classification predicting sequence
SFEPVKS

SEQ ID NO: 47898 - protein, 8 aa, Artificial sequence
  Protein classification predicting sequence
GPVVAAAV

SEQ ID NO: 47899 - protein, 7 aa, Artificial sequence
  Protein classification predicting sequence
GYGTAKH

SEQ ID NO: 47900 - protein, 10 aa, Artificial sequence
  Protein classification predicting sequence
LAGPVVAAAV

SEQ ID NO: 47901 - protein, 11 aa, Artificial sequence
  Protein classification predicting sequence
VVTAAVILDPN

SEQ ID NO: 47902 - protein, 12 aa, Artificial sequence
  Protein classification predicting sequence
KALAWAVGRCSP

SEQ ID NO: 47903 - protein, 7 aa, Artificial sequence
  Protein classification predicting sequence
EIDELNI

SEQ ID NO: 47904 - protein, 9 aa, Artificial sequence
  Protein classification predicting sequence
AMQRAVAGL

SEQ ID NO: 47905 - protein, 7 aa, Artificial sequence
  Protein classification predicting sequence
PVKRALG

SEQ ID NO: 47906 - protein, 11 aa, Artificial sequence
  Protein classification predicting sequence
AGVDEVGRGPL

SEQ ID NO: 47907 - protein, 8 aa, Artificial sequence
  Protein classification predicting sequence
EIDELNIL

SEQ ID NO: 47908 - protein, 7 aa, Artificial sequence
  Protein classification predicting sequence
EMEELDK

SEQ ID NO: 47909 - protein, 7 aa, Artificial sequence
  Protein classification predicting sequence
PVKRVLG

SEQ ID NO: 47910 - protein, 6 aa, Artificial sequence
  Protein classification predicting sequence
GLNDSK

SEQ ID NO: 47911 - protein, 6 aa, Artificial sequence
  Protein classification predicting sequence
NIYQAT

SEQ ID NO: 47912 - protein, 7 aa, Artificial sequence
  Protein classification predicting sequence
HRRSFAP

SEQ ID NO: 47913 - protein, 6 aa, Artificial sequence
  Protein classification predicting sequence
HHRRSF

SEQ ID NO: 47914 - protein, 7 aa, Artificial sequence
  Protein classification predicting sequence
LHNEKYN

SEQ ID NO: 47915 - protein, 5 aa, Artificial sequence
  Protein classification predicting sequence
HFANT

SEQ ID NO: 47916 - protein, 8 aa, Artificial sequence
  Protein classification predicting sequence
HFANTEKA

SEQ ID NO: 47917 - protein, 9 aa, Artificial sequence
  Protein classification predicting sequence
GSDEVGTGD

SEQ ID NO: 47918 - protein, 6 aa, Artificial sequence
  Protein classification predicting sequence
LHNQAI

SEQ ID NO: 47919 - protein, 11 aa, Artificial sequence
  Protein classification predicting sequence
PEAILIDQFAE

SEQ ID NO: 47920 - protein, 7 aa, Artificial sequence
  Protein classification predicting sequence
KLHFANT

SEQ ID NO: 47921 - protein, 10 aa, Artificial sequence
  Protein classification predicting sequence
LPKGAGPHVD

SEQ ID NO: 47922 - protein, 8 aa, Artificial sequence
  Protein classification predicting sequence
FFLEPEIL

SEQ ID NO: 47923 - protein, 9 aa, Artificial sequence
  Protein classification predicting sequence
VFAISDQFA

SEQ ID NO: 47924 - protein, 9 aa, Artificial sequence
  Protein classification predicting sequence
KVALHNQAI

SEQ ID NO: 47925 - protein, 7 aa, Artificial sequence
  Protein classification predicting sequence
IVIDAFT

SEQ ID NO: 47926 - protein, 9 aa, Artificial sequence
  Protein classification predicting sequence
LAVAVSSII

SEQ ID NO: 47927 - protein, 6 aa, Artificial sequence
  Protein classification predicting sequence
SIISRY

SEQ ID NO: 47928 - protein, 9 aa, Artificial sequence
  Protein classification predicting sequence
VAAASILAR

SEQ ID NO: 47929 - protein, 40 aa, Artificial sequence
  Protein classification predicting sequence
FDTENLPQGMKARAKYQNTTVNIYQSGKVMFQGNHAEAVS

SEQ ID NO: 47930 - protein, 18 aa, Artificial sequence
  Protein classification predicting sequence
ELLPQHSQLNTNKTKKKN

SEQ ID NO: 47931 - protein, 8 aa, Artificial sequence
  Protein classification predicting sequence
LPQGMKAR

SEQ ID NO: 47932 - protein, 21 aa, Artificial sequence
  Protein classification predicting sequence
CIGSDEAGSGDYFGPLTVCAA

SEQ ID NO: 47933 - protein, 16 aa, Artificial sequence
  Protein classification predicting sequence
QLDYIVIDQFAKREVY

SEQ ID NO: 47934 - protein, 16 aa, Artificial sequence
  Protein classification predicting sequence
KTKFETKGESKSLAIA

SEQ ID NO: 47935 - protein, 7 aa, Artificial sequence
  Protein classification predicting sequence
AVVASFV

SEQ ID NO: 47936 - protein, 14 aa, Artificial sequence
  Protein classification predicting sequence
KVALHNQAIFLLLQ

SEQ ID NO: 47937 - protein, 8 aa, Artificial sequence
  Protein classification predicting sequence
IVIDAFTS

SEQ ID NO: 47938 - protein, 16 aa, Artificial sequence
  Protein classification predicting sequence
YLAVAVSSIIARNLFL

SEQ ID NO: 47939 - protein, 14 aa, Artificial sequence
  Protein classification predicting sequence
NAVSVKVALHNQAI

SEQ ID NO: 47940 - protein, 10 aa, Artificial sequence
  Protein classification predicting sequence
LGYQLPSGAG

SEQ ID NO: 47941 - protein, 7 aa, Artificial sequence
  Protein classification predicting sequence
IGSDEVG

SEQ ID NO: 47942 - protein, 11 aa, Artificial sequence
  Protein classification predicting sequence
DEVGNGSYFGG

SEQ ID NO: 47943 - protein, 7 aa, Artificial sequence
  Protein classification predicting sequence
DSKNLND

SEQ ID NO: 47944 - protein, 7 aa, Artificial sequence
  Protein classification predicting sequence
LGVDDSK

SEQ ID NO: 47945 - protein, 7 aa, Artificial sequence
  Protein classification predicting sequence
GNPGPGG

SEQ ID NO: 47946 - protein, 6 aa, Artificial sequence
  Protein classification predicting sequence
GMEPFK

SEQ ID NO: 47947 - protein, 7 aa, Artificial sequence
  Protein classification predicting sequence
MELMAAI

SEQ ID NO: 47948 - protein, 7 aa, Artificial sequence
  Protein classification predicting sequence
VDLYTDS

SEQ ID NO: 47949 - protein, 11 aa, Artificial sequence
  Protein classification predicting sequence
TDSQYVRQGIT

SEQ ID NO: 47950 - protein, 7 aa, Artificial sequence
  Protein classification predicting sequence
GWKRNGW

SEQ ID NO: 47951 - protein, 6 aa, Artificial sequence
  Protein classification predicting sequence
YTDGAC

SEQ ID NO: 47952 - protein, 6 aa, Artificial sequence
  Protein classification predicting sequence
ALKEPC

SEQ ID NO: 47953 - protein, 11 aa, Artificial sequence
  Protein classification predicting sequence
KGHAGHPENER

SEQ ID NO: 47954 - protein, 5 aa, Artificial sequence
  Protein classification predicting sequence
DSQYV

SEQ ID NO: 47955 - protein, 7 aa, Artificial sequence
  Protein classification predicting sequence
VKNVDLW

SEQ ID NO: 47956 - protein, 12 aa, Artificial sequence
  Protein classification predicting sequence
TTNNRMELMAAI

SEQ ID NO: 47957 - protein, 11 aa, Artificial sequence
  Protein classification predicting sequence
WKTADKKPVKN

SEQ ID NO: 47958 - protein, 8 aa, Artificial sequence
  Protein classification predicting sequence
TTNNRMEL

SEQ ID NO: 47959 - protein, 8 aa, Artificial sequence
  Protein classification predicting sequence
WVKGHAGH

SEQ ID NO: 47960 - protein, 12 aa, Artificial sequence
  Protein classification predicting sequence
WVKGHAGHRENE

SEQ ID NO: 47961 - protein, 8 aa, Artificial sequence
  Protein classification predicting sequence
LTTDSQYV

SEQ ID NO: 47962 - protein, 8 aa, Artificial sequence
  Protein classification predicting sequence
NVDLWQRL

SEQ ID NO: 47963 - protein, 5 aa, Artificial sequence
  Protein classification predicting sequence
WVKGH

SEQ ID NO: 47964 - protein, 6 aa, Artificial sequence
  Protein classification predicting sequence
TDSQYV

SEQ ID NO: 47965 - protein, 8 aa, Artificial sequence
  Protein classification predicting sequence
LRYKQHEK

SEQ ID NO: 47966 - protein, 6 aa, Artificial sequence
  Protein classification predicting sequence
LWQALD

SEQ ID NO: 47967 - protein, 9 aa, Artificial sequence
  Protein classification predicting sequence
PVKNADLWQ

SEQ ID NO: 47968 - protein, 9 aa, Artificial sequence
  Protein classification predicting sequence
DGACKGNPG

SEQ ID NO: 47969 - protein, 8 aa, Artificial sequence
  Protein classification predicting sequence
PVKNDDLW

SEQ ID NO: 47970 - protein, 9 aa, Artificial sequence
  Protein classification predicting sequence
KQVEIFTDG

SEQ ID NO: 47971 - protein, 6 aa, Artificial sequence
  Protein classification predicting sequence
PCEVDL

SEQ ID NO: 47972 - protein, 8 aa, Artificial sequence
  Protein classification predicting sequence
GNPGPGGW

SEQ ID NO: 47973 - protein, 9 aa, Artificial sequence
  Protein classification predicting sequence
PVKNVELWQ

SEQ ID NO: 47974 - protein, 7 aa, Artificial sequence
  Protein classification predicting sequence
VKGHAGH

SEQ ID NO: 47975 - protein, 24 aa, Artificial sequence
  Protein classification predicting sequence
TTNNRMELMAAIVALEALKEHCEV

SEQ ID NO: 47976 - protein, 13 aa, Artificial sequence
  Protein classification predicting sequence
RLDAALGQHQIKW

SEQ ID NO: 47977 - protein, 8 aa, Artificial sequence
  Protein classification predicting sequence
PVKNVDLW

SEQ ID NO: 47978 - protein, 6 aa, Artificial sequence
  Protein classification predicting sequence
NPGPGG

SEQ ID NO: 47979 - protein, 6 aa, Artificial sequence
  Protein classification predicting sequence
ENERCD

SEQ ID NO: 47980 - protein, 7 aa, Artificial sequence
  Protein classification predicting sequence
GHPENER

SEQ ID NO: 47981 - protein, 7 aa, Artificial sequence
  Protein classification predicting sequence
GITQWIH

SEQ ID NO: 47982 - protein, 6 aa, Artificial sequence
  Protein classification predicting sequence
RGWKTA

SEQ ID NO: 47983 - protein, 13 aa, Artificial sequence
  Protein classification predicting sequence
RGWKTADKKPVKN

SEQ ID NO: 47984 - protein, 21 aa, Artificial sequence
  Protein classification predicting sequence
WRWVKGHAGHRENEMCDELAR

SEQ ID NO: 47985 - protein, 7 aa, Artificial sequence
  Protein classification predicting sequence
TTNNRME

SEQ ID NO: 47986 - protein, 15 aa, Artificial sequence
  Protein classification predicting sequence
TDSQYVRQGITQWIH

SEQ ID NO: 47987 - protein, 6 aa, Artificial sequence
  Protein classification predicting sequence
ADKKPV

SEQ ID NO: 47988 - protein, 11 aa, Artificial sequence
  Protein classification predicting sequence
GYTLTTNNRME

SEQ ID NO: 47989 - protein, 9 aa, Artificial sequence
  Protein classification predicting sequence
CLGNPGPGG

SEQ ID NO: 47990 - protein, 6 aa, Artificial sequence
  Protein classification predicting sequence
TNNRME

SEQ ID NO: 47991 - protein, 11 aa, Artificial sequence
  Protein classification predicting sequence
TNNRMELMAAI

SEQ ID NO: 47992 - protein, 16 aa, Artificial sequence
  Protein classification predicting sequence
LHTDSQYVRQGITEWM

SEQ ID NO: 47993 - protein, 10 aa, Artificial sequence
  Protein classification predicting sequence
DNERVDVLAR

SEQ ID NO: 47994 - protein, 21 aa, Artificial sequence
  Protein classification predicting sequence
KQVEIFTDGSCLGNPGPGGYG

SEQ ID NO: 47995 - protein, 26 aa, Artificial sequence
  Protein classification predicting sequence
KQVEIFTDGSCLGNPGPGGYGAILRY

SEQ ID NO: 47996 - protein, 8 aa, Artificial sequence
  Protein classification predicting sequence
EKTFSAGY

SEQ ID NO: 47997 - protein, 8 aa, Artificial sequence
  Protein classification predicting sequence
PTLDDTGY

SEQ ID NO: 47998 - protein, 27 aa, Artificial sequence
  Protein classification predicting sequence
LSTDSQYVRQGITQWIHNWKKRGWKTA

SEQ ID NO: 47999 - protein, 7 aa, Artificial sequence
  Protein classification predicting sequence
GGWGALL

SEQ ID NO: 48000 - protein, 7 aa, Artificial sequence
  Protein classification predicting sequence
KKPVKNA

SEQ ID NO: 48001 - protein, 8 aa, Artificial sequence
  Protein classification predicting sequence
PVKNADLW

SEQ ID NO: 48002 - protein, 6 aa, Artificial sequence
  Protein classification predicting sequence
IHGLWP

SEQ ID NO: 48003 - protein, 7 aa, Artificial sequence
  Protein classification predicting sequence
LGVSGTI

SEQ ID NO: 48004 - protein, 11 aa, Artificial sequence
  Protein classification predicting sequence
RAHERNRIKRL

SEQ ID NO: 48005 - protein, 7 aa, Artificial sequence
  Protein classification predicting sequence
RNRIKRL

SEQ ID NO: 48006 - protein, 8 aa, Artificial sequence
  Protein classification predicting sequence
ANRQFVVY

SEQ ID NO: 48007 - protein, 14 aa, Artificial sequence
  Protein classification predicting sequence
MKKKHRIKKNDEFQ

SEQ ID NO: 48008 - protein, 48 aa, Artificial sequence
  Protein classification predicting sequence
VFQKGKSNANRQFVVYQLDKEEQPNFRIGLSVSKKIGNAVVRNRIKRM

SEQ ID NO: 48009 - protein, 20 aa, Artificial sequence
  Protein classification predicting sequence
SGKDFVIIARKPCAEMTYEE

SEQ ID NO: 48010 - protein, 7 aa, Artificial sequence
  Protein classification predicting sequence
KKSLIHV

SEQ ID NO: 48011 - protein, 17 aa, Artificial sequence
  Protein classification predicting sequence
KKSLIHVFKRSGMKRIK

SEQ ID NO: 48012 - protein, 7 aa, Artificial sequence
  Protein classification predicting sequence
GNAVTRN

SEQ ID NO: 48013 - protein, 6 aa, Artificial sequence
  Protein classification predicting sequence
ANRQFV

SEQ ID NO: 48014 - protein, 6 aa, Artificial sequence
  Protein classification predicting sequence
DFVVIA

SEQ ID NO: 48015 - protein, 8 aa, Artificial sequence
  Protein classification predicting sequence
ITILGRLN

SEQ ID NO: 48016 - protein, 9 aa, Artificial sequence
  Protein classification predicting sequence
RLGLVIGKK

SEQ ID NO: 48017 - protein, 7 aa, Artificial sequence
  Protein classification predicting sequence
VSKKVGK

SEQ ID NO: 48018 - protein, 6 aa, Artificial sequence
  Protein classification predicting sequence
GNAVTR

SEQ ID NO: 48019 - protein, 26 aa, Artificial sequence
  Protein classification predicting sequence
HFRVGISVGKKIGNAVTRNAVKRKIR

SEQ ID NO: 48020 - protein, 7 aa, Artificial sequence
  Protein classification predicting sequence
KKIGNAV

SEQ ID NO: 48021 - protein, 7 aa, Artificial sequence
  Protein classification predicting sequence
GLTVAKK

SEQ ID NO: 48022 - protein, 7 aa, Artificial sequence
  Protein classification predicting sequence
SVSKKLG

SEQ ID NO: 48023 - protein, 7 aa, Artificial sequence
  Protein classification predicting sequence
GKAVVRN

SEQ ID NO: 48024 - protein, 8 aa, Artificial sequence
  Protein classification predicting sequence
RELRLLTP

SEQ ID NO: 48025 - protein, 7 aa, Artificial sequence
  Protein classification predicting sequence
GLSVSKK

SEQ ID NO: 48026 - protein, 7 aa, Artificial sequence
  Protein classification predicting sequence
LGHPRIG

SEQ ID NO: 48027 - protein, 6 aa, Artificial sequence
  Protein classification predicting sequence
RNRLKR

SEQ ID NO: 48028 - protein, 9 aa, Artificial sequence
  Protein classification predicting sequence
IRQSITELK

SEQ ID NO: 48029 - protein, 7 aa, Artificial sequence
  Protein classification predicting sequence
RAHERNR

SEQ ID NO: 48030 - protein, 6 aa, Artificial sequence
  Protein classification predicting sequence
RESFRL

SEQ ID NO: 48031 - protein, 7 aa, Artificial sequence
  Protein classification predicting sequence
KKLGNAV

SEQ ID NO: 48032 - protein, 6 aa, Artificial sequence
  Protein classification predicting sequence
HPRLGL

SEQ ID NO: 48033 - protein, 11 aa, Artificial sequence
  Protein classification predicting sequence
RAGFVVSKAVG

SEQ ID NO: 48034 - protein, 7 aa, Artificial sequence
  Protein classification predicting sequence
GNAVVRN

SEQ ID NO: 48035 - protein, 7 aa, Artificial sequence
  Protein classification predicting sequence
NGLDHPR

SEQ ID NO: 48036 - protein, 10 aa, Artificial sequence
  Protein classification predicting sequence
RHRVARRLRH

SEQ ID NO: 48037 - protein, 7 aa, Artificial sequence
  Protein classification predicting sequence
FRIGLSV

SEQ ID NO: 48038 - protein, 8 aa, Artificial sequence
  Protein classification predicting sequence
RQSFHELE

SEQ ID NO: 48039 - protein, 12 aa, Artificial sequence
  Protein classification predicting sequence
VFQQAHRAGSPH

SEQ ID NO: 48040 - protein, 16 aa, Artificial sequence
  Protein classification predicting sequence
HPRLGLAVPKKQIKTA

SEQ ID NO: 48041 - protein, 13 aa, Artificial sequence
  Protein classification predicting sequence
AVFDSPTGKVPGK

SEQ ID NO: 48042 - protein, 7 aa, Artificial sequence
  Protein classification predicting sequence
VVIARKG

SEQ ID NO: 48043 - protein, 8 aa, Artificial sequence
  Protein classification predicting sequence
FGKLWKRL

SEQ ID NO: 48044 - protein, 10 aa, Artificial sequence
  Protein classification predicting sequence
NRLRRREDFA

SEQ ID NO: 48045 - protein, 8 aa, Artificial sequence
  Protein classification predicting sequence
GIVVSKKV

SEQ ID NO: 48046 - protein, 16 aa, Artificial sequence
  Protein classification predicting sequence
HFRLGISVSKKLGNAV

SEQ ID NO: 48047 - protein, 13 aa, Artificial sequence
  Protein classification predicting sequence
IKRAIRENFKVHK

SEQ ID NO: 48048 - protein, 15 aa, Artificial sequence
  Protein classification predicting sequence
AKDIIVIARQPAKDM

SEQ ID NO: 48049 - protein, 6 aa, Artificial sequence
  Protein classification predicting sequence
ANRKFV

SEQ ID NO: 48050 - protein, 7 aa, Artificial sequence
  Protein classification predicting sequence
KRKIRHV

SEQ ID NO: 48051 - protein, 6 aa, Artificial sequence
  Protein classification predicting sequence
VKRRLR

SEQ ID NO: 48052 - protein, 10 aa, Artificial sequence
  Protein classification predicting sequence
DFVVIARKGV

SEQ ID NO: 48053 - protein, 8 aa, Artificial sequence
  Protein classification predicting sequence
RVKREKDF

SEQ ID NO: 48054 - protein, 8 aa, Artificial sequence
  Protein classification predicting sequence
ANRKFVVY

SEQ ID NO: 48055 - protein, 10 aa, Artificial sequence
  Protein classification predicting sequence
AGQDPRLPGP

SEQ ID NO: 48056 - protein, 11 aa, Artificial sequence
  Protein classification predicting sequence
SLKGDRAFQRL

SEQ ID NO: 48057 - protein, 10 aa, Artificial sequence
  Protein classification predicting sequence
REILRRLHLP

SEQ ID NO: 48058 - protein, 8 aa, Artificial sequence
  Protein classification predicting sequence
GQDPRLPG

SEQ ID NO: 48059 - protein, 8 aa, Artificial sequence
  Protein classification predicting sequence
ASPEAREA

SEQ ID NO: 48060 - protein, 17 aa, Artificial sequence
  Protein classification predicting sequence
TYAFNRELRLLTPEHYQ

SEQ ID NO: 48061 - protein, 22 aa, Artificial sequence
  Protein classification predicting sequence
LSHPRLGLAVPKKQIKTAVGRN

SEQ ID NO: 48062 - protein, 12 aa, Artificial sequence
  Protein classification predicting sequence
KDFVVIAKKSAQ

SEQ ID NO: 48063 - protein, 12 aa, Artificial sequence
  Protein classification predicting sequence
KKGVADLDNRAL

SEQ ID NO: 48064 - protein, 7 aa, Artificial sequence
  Protein classification predicting sequence
SPGADRV

SEQ ID NO: 48065 - protein, 5 aa, Artificial sequence
  Protein classification predicting sequence
KHGTC

SEQ ID NO: 48066 - protein, 7 aa, Artificial sequence
  Protein classification predicting sequence
ESSAMKF

SEQ ID NO: 48067 - protein, 6 aa, Artificial sequence
  Protein classification predicting sequence
KFERQH

SEQ ID NO: 48068 - protein, 7 aa, Artificial sequence
  Protein classification predicting sequence
VQAVCSQ

SEQ ID NO: 48069 - protein, 33 aa, Artificial sequence
  Protein classification predicting sequence
VNTFVHEPLVDVQNVCFQEKVTCKNGQTNCFKS

SEQ ID NO: 48070 - protein, 7 aa, Artificial sequence
  Protein classification predicting sequence
PKLKCQK

SEQ ID NO: 48071 - protein, 7 aa, Artificial sequence
  Protein classification predicting sequence
SSSNYCN

SEQ ID NO: 48072 - protein, 7 aa, Artificial sequence
  Protein classification predicting sequence
YNNYEGF

SEQ ID NO: 48073 - protein, 7 aa, Artificial sequence
  Protein classification predicting sequence
LLIHEAT

SEQ ID NO: 48074 - protein, 6 aa, Artificial sequence
  Protein classification predicting sequence
DCGEGT

SEQ ID NO: 48075 - protein, 8 aa, Artificial sequence
  Protein classification predicting sequence
ALASLGKP

SEQ ID NO: 48076 - protein, 12 aa, Artificial sequence
  Protein classification predicting sequence
GRTMSQGRTISQ

SEQ ID NO: 48077 - protein, 9 aa, Artificial sequence
  Protein classification predicting sequence
NTVYLQVVA

SEQ ID NO: 48078 - protein, 16 aa, Artificial sequence
  Protein classification predicting sequence
DETMTVYQIPIHSEQR

SEQ ID NO: 48079 - protein, 14 aa, Artificial sequence
  Protein classification predicting sequence
RLSPERSSDSESNE

SEQ ID NO: 48080 - protein, 10 aa, Artificial sequence
  Protein classification predicting sequence
GVSQRRGVRD

SEQ ID NO: 48081 - protein, 15 aa, Artificial sequence
  Protein classification predicting sequence
SLVVAFICKLHLKRG

SEQ ID NO: 48082 - protein, 52 aa, Artificial sequence
  Protein classification predicting sequence
GLPVGTAAIAPIIAAVKDGKSITHEGREILAEELCTPPDPGAAFVVVECPDE

SEQ ID NO: 48083 - protein, 32 aa, Artificial sequence
  Protein classification predicting sequence
DSRYQQWMERFGPDTQHLVLNENCASVHNLRS

SEQ ID NO: 48084 - protein, 10 aa, Artificial sequence
  Protein classification predicting sequence
KKEGPTLSVP

SEQ ID NO: 48085 - protein, 31 aa, Artificial sequence
  Protein classification predicting sequence
VQGECLLKYQLRPRREWQRDAIITCNPEEFI

SEQ ID NO: 48086 - protein, 9 aa, Artificial sequence
  Protein classification predicting sequence
EALQLPNFQ

SEQ ID NO: 48087 - protein, 28 aa, Artificial sequence
  Protein classification predicting sequence
RNVSATLVNISPDTSLLLDCGEGTFGQL

SEQ ID NO: 48088 - protein, 12 aa, Artificial sequence
  Protein classification predicting sequence
RHYGDQVDRVLG

SEQ ID NO: 48089 - protein, 19 aa, Artificial sequence
  Protein classification predicting sequence
QLKAWLQQYHNQCQEVLHH

SEQ ID NO: 48090 - protein, 33 aa, Artificial sequence
  Protein classification predicting sequence
GAEISSPAVERLISSLLRTCDLEEFQTCLVRHC

SEQ ID NO: 48091 - protein, 17 aa, Artificial sequence
  Protein classification predicting sequence
LEDGEPQQKRAHTEEPQ

SEQ ID NO: 48092 - protein, 15 aa, Artificial sequence
  Protein classification predicting sequence
KDPLRHLRTREKRGP

SEQ ID NO: 48093 - protein, 14 aa, Artificial sequence
  Protein classification predicting sequence
GGPNTVYLQVVAAG

SEQ ID NO: 48094 - protein, 11 aa, Artificial sequence
  Protein classification predicting sequence
AEELCTPPDPG

SEQ ID NO: 48095 - protein, 18 aa, Artificial sequence
  Protein classification predicting sequence
DSRYQQWMERFGPDTQHL

SEQ ID NO: 48096 - protein, 8 aa, Artificial sequence
  Protein classification predicting sequence
LIHPDIFP

SEQ ID NO: 48097 - protein, 6 aa, Artificial sequence
  Protein classification predicting sequence
REWQRD

SEQ ID NO: 48098 - protein, 16 aa, Artificial sequence
  Protein classification predicting sequence
FLGTGSAIPMKIRNVS

SEQ ID NO: 48099 - protein, 8 aa, Artificial sequence
  Protein classification predicting sequence
LLDCGEGT

SEQ ID NO: 48100 - protein, 17 aa, Artificial sequence
  Protein classification predicting sequence
LLDCGEGTFGQLCRHYG

SEQ ID NO: 48101 - protein, 23 aa, Artificial sequence
  Protein classification predicting sequence
AVFVSHLHADHHTGLLNILLQRE

SEQ ID NO: 48102 - protein, 18 aa, Artificial sequence
  Protein classification predicting sequence
PKLIPPLKALFAGDIEEM

SEQ ID NO: 48103 - protein, 9 aa, Artificial sequence
  Protein classification predicting sequence
ERREKRELR

SEQ ID NO: 48104 - protein, 9 aa, Artificial sequence
  Protein classification predicting sequence
EPQQKRAHT

SEQ ID NO: 48105 - protein, 39 aa, Artificial sequence
  Protein classification predicting sequence
GMILTLKETGLPKCVLSGPPQLEKYLEAIKIFSGPLKGI

SEQ ID NO: 48106 - protein, 8 aa, Artificial sequence
  Protein classification predicting sequence
FIQPICEN

SEQ ID NO: 48107 - protein, 7 aa, Artificial sequence
  Protein classification predicting sequence
TFQRYQG

SEQ ID NO: 48108 - protein, 7 aa, Artificial sequence
  Protein classification predicting sequence
GECLLKY

SEQ ID NO: 48109 - protein, 12 aa, Artificial sequence
  Protein classification predicting sequence
AWLQQYHNQCQE

SEQ ID NO: 48110 - protein, 21 aa, Artificial sequence
  Protein classification predicting sequence
VGMRMNAEFIMLNHFSQRYAK

SEQ ID NO: 48111 - protein, 6 aa, Artificial sequence
  Protein classification predicting sequence
HFSARY

SEQ ID NO: 48112 - protein, 6 aa, Artificial sequence
  Protein classification predicting sequence
HVSSRY

SEQ ID NO: 48113 - protein, 12 aa, Artificial sequence
  Protein classification predicting sequence
WLFDCGEGTQHQ

SEQ ID NO: 48114 - protein, 7 aa, Artificial sequence
  Protein classification predicting sequence
GEGTQHQ

SEQ ID NO: 48115 - protein, 9 aa, Artificial sequence
  Protein classification predicting sequence
ELAQDADVL

SEQ ID NO: 48116 - protein, 6 aa, Artificial sequence
  Protein classification predicting sequence
LFDCGE

SEQ ID NO: 48117 - protein, 12 aa, Artificial sequence
  Protein classification predicting sequence
ANVKKLILTHIS

SEQ ID NO: 48118 - protein, 10 aa, Artificial sequence
  Protein classification predicting sequence
HGDHIFGLPG

SEQ ID NO: 48119 - protein, 7 aa, Artificial sequence
  Protein classification predicting sequence
SRSFQGG

SEQ ID NO: 48120 - protein, 90 aa, Artificial sequence
  Protein classification predicting sequence
CEASRELAQDADVLVHEATFAAEDEQQAYDYFHSTSKQAASIALQANAKRLILTHISSRYQGDTYKELLKEARELFSNTEIATDLKSFPV

SEQ ID NO: 48121 - protein, 15 aa, Artificial sequence
  Protein classification predicting sequence
VEITEEGTVFEDNEF

SEQ ID NO: 48122 - protein, 17 aa, Artificial sequence
  Protein classification predicting sequence
VETKRLSHGIECFGYRI

SEQ ID NO: 48123 - protein, 9 aa, Artificial sequence
  Protein classification predicting sequence
FGYRIVEKD

SEQ ID NO: 48124 - protein, 13 aa, Artificial sequence
  Protein classification predicting sequence
FKRLKDGEVVELE

SEQ ID NO: 48125 - protein, 8 aa, Artificial sequence
  Protein classification predicting sequence
ITILGDTR

SEQ ID NO: 48126 - protein, 5 aa, Artificial sequence
  Protein classification predicting sequence
DCGEG

SEQ ID NO: 48127 - protein, 6 aa, Artificial sequence
  Protein classification predicting sequence
HLHGDH

SEQ ID NO: 48128 - protein, 7 aa, Artificial sequence
  Protein classification predicting sequence
WLFDCGE

SEQ ID NO: 48129 - protein, 7 aa, Artificial sequence
  Protein classification predicting sequence
FLGTGAG

SEQ ID NO: 48130 - protein, 7 aa, Artificial sequence
  Protein classification predicting sequence
EGTVFED

SEQ ID NO: 48131 - protein, 7 aa, Artificial sequence
  Protein classification predicting sequence
ADVLVHE

SEQ ID NO: 48132 - protein, 6 aa, Artificial sequence
  Protein classification predicting sequence
GLPGLL

SEQ ID NO: 48133 - protein, 6 aa, Artificial sequence
  Protein classification predicting sequence
GDTKPC

SEQ ID NO: 48134 - protein, 11 aa, Artificial sequence
  Protein classification predicting sequence
ILGCSSQQPTR

SEQ ID NO: 48135 - protein, 7 aa, Artificial sequence
  Protein classification predicting sequence
GEGTQRQ

SEQ ID NO: 48136 - protein, 10 aa, Artificial sequence
  Protein classification predicting sequence
LCESTYLEEH

SEQ ID NO: 48137 - protein, 20 aa, Artificial sequence
  Protein classification predicting sequence
HPIHCYYPASGKKYFDRLRY

SEQ ID NO: 48138 - protein, 7 aa, Artificial sequence
  Protein classification predicting sequence
TIYHETI

SEQ ID NO: 48139 - protein, 8 aa, Artificial sequence
  Protein classification predicting sequence
EGIVEDFG

SEQ ID NO: 48140 - protein, 13 aa, Artificial sequence
  Protein classification predicting sequence
EGIVEDFGNFRIE

SEQ ID NO: 48141 - protein, 9 aa, Artificial sequence
  Protein classification predicting sequence
RYLFNCGEG

SEQ ID NO: 48142 - protein, 7 aa, Artificial sequence
  Protein classification predicting sequence
TCLVRHC

SEQ ID NO: 48143 - protein, 6 aa, Artificial sequence
  Protein classification predicting sequence
HFSQRY

SEQ ID NO: 48144 - protein, 8 aa, Artificial sequence
  Protein classification predicting sequence
RNVTAILL

SEQ ID NO: 48145 - protein, 23 aa, Artificial sequence
  Protein classification predicting sequence
IFISHLHGDHLFGLPGLLCSRSM

SEQ ID NO: 48146 - protein, 10 aa, Artificial sequence
  Protein classification predicting sequence
EHPLECYGYR

SEQ ID NO: 48147 - protein, 10 aa, Artificial sequence
  Protein classification predicting sequence
EHDKPGALNA

SEQ ID NO: 48148 - protein, 6 aa, Artificial sequence
  Protein classification predicting sequence
DVMVHE

SEQ ID NO: 48149 - protein, 8 aa, Artificial sequence
  Protein classification predicting sequence
RGHSSTRQ

SEQ ID NO: 48150 - protein, 10 aa, Artificial sequence
  Protein classification predicting sequence
SSRYDDKGCQ

SEQ ID NO: 48151 - protein, 8 aa, Artificial sequence
  Protein classification predicting sequence
IFPATELA

SEQ ID NO: 48152 - protein, 31 aa, Artificial sequence
  Protein classification predicting sequence
GIREFVETALRISGSWTDYPLEIVEIGAGEI

SEQ ID NO: 48153 - protein, 9 aa, Artificial sequence
  Protein classification predicting sequence
DDGLRKVTA

SEQ ID NO: 48154 - protein, 12 aa, Artificial sequence
  Protein classification predicting sequence
DGRQINGADYLA

SEQ ID NO: 48155 - protein, 20 aa, Artificial sequence
  Protein classification predicting sequence
PVPGKALAIFGDTGPCDAAL

SEQ ID NO: 48156 - protein, 15 aa, Artificial sequence
  Protein classification predicting sequence
LAKGVDVMVHEATLD

SEQ ID NO: 48157 - protein, 17 aa, Artificial sequence
  Protein classification predicting sequence
MEAKANSRGHSSTRQAA

SEQ ID NO: 48158 - protein, 44 aa, Artificial sequence
  Protein classification predicting sequence
LAREAGVGKLIITHVSSRYDDKGCQHLLRECRSIFPATELANDF

SEQ ID NO: 48159 - protein, 12 aa, Artificial sequence
  Protein classification predicting sequence
HGDHIFGLPGLL

SEQ ID NO: 48160 - protein, 7 aa, Artificial sequence
  Protein classification predicting sequence
TILGDTR

SEQ ID NO: 48161 - protein, 6 aa, Artificial sequence
  Protein classification predicting sequence
RPRRIE

SEQ ID NO: 48162 - protein, 15 aa, Artificial sequence
  Protein classification predicting sequence
AKRLILTHISSRYQG

SEQ ID NO: 48163 - protein, 8 aa, Artificial sequence
  Protein classification predicting sequence
RNVTSIAL

SEQ ID NO: 48164 - protein, 10 aa, Artificial sequence
  Protein classification predicting sequence
HLHGDHLFGL

SEQ ID NO: 48165 - protein, 8 aa, Artificial sequence
  Protein classification predicting sequence
LALGADVL

SEQ ID NO: 48166 - protein, 10 aa, Artificial sequence
  Protein classification predicting sequence
QFLGTGAGQP

SEQ ID NO: 48167 - protein, 9 aa, Artificial sequence
  Protein classification predicting sequence
ADVLVHEST

SEQ ID NO: 48168 - protein, 6 aa, Artificial sequence
  Protein classification predicting sequence
HISARY

SEQ ID NO: 48169 - protein, 7 aa, Artificial sequence
  Protein classification predicting sequence
FLGTSAG

SEQ ID NO: 48170 - protein, 7 aa, Artificial sequence
  Protein classification predicting sequence
LSSRSFQ

SEQ ID NO: 48171 - protein, 8 aa, Artificial sequence
  Protein classification predicting sequence
RNTQAIAL

SEQ ID NO: 48172 - protein, 8 aa, Artificial sequence
  Protein classification predicting sequence
TALRISGS

SEQ ID NO: 48173 - protein, 20 aa, Artificial sequence
  Protein classification predicting sequence
HGDHIFGLPGLLSSRSFQGG

SEQ ID NO: 48174 - protein, 6 aa, Artificial sequence
  Protein classification predicting sequence
LVHEST

SEQ ID NO: 48175 - protein, 11 aa, Artificial sequence
  Protein classification predicting sequence
VFLGTGAGVPS

SEQ ID NO: 48176 - protein, 6 aa, Artificial sequence
  Protein classification predicting sequence
LTIYGP

SEQ ID NO: 48177 - protein, 7 aa, Artificial sequence
  Protein classification predicting sequence
LVHEATF

SEQ ID NO: 48178 - protein, 7 aa, Artificial sequence
  Protein classification predicting sequence
VVYSGDT

SEQ ID NO: 48179 - protein, 6 aa, Artificial sequence
  Protein classification predicting sequence
LIHEAT

SEQ ID NO: 48180 - protein, 6 aa, Artificial sequence
  Protein classification predicting sequence
HFHGDH

SEQ ID NO: 48181 - protein, 6 aa, Artificial sequence
  Protein classification predicting sequence
YYPASG

SEQ ID NO: 48182 - protein, 9 aa, Artificial sequence
  Protein classification predicting sequence
GLPGFLSSR

SEQ ID NO: 48183 - protein, 19 aa, Artificial sequence
  Protein classification predicting sequence
LFDPGEGTQRQFIFANIAP

SEQ ID NO: 48184 - protein, 26 aa, Artificial sequence
  Protein classification predicting sequence
HPIHCYYPASGKKYFDRLRYGTIYHE

SEQ ID NO: 48185 - protein, 6 aa, Artificial sequence
  Protein classification predicting sequence
GWRITE

SEQ ID NO: 48186 - protein, 12 aa, Artificial sequence
  Protein classification predicting sequence
HILGCGSALPTT

SEQ ID NO: 48187 - protein, 7 aa, Artificial sequence
  Protein classification predicting sequence
CGEGVQR

SEQ ID NO: 48188 - protein, 15 aa, Artificial sequence
  Protein classification predicting sequence
HIFISHLHGDHCFGL

SEQ ID NO: 48189 - protein, 7 aa, Artificial sequence
  Protein classification predicting sequence
YAYCSDT

SEQ ID NO: 48190 - protein, 6 aa, Artificial sequence
  Protein classification predicting sequence
HMHGDH

SEQ ID NO: 48191 - protein, 7 aa, Artificial sequence
  Protein classification predicting sequence
FGLPGLL

SEQ ID NO: 48192 - protein, 6 aa, Artificial sequence
  Protein classification predicting sequence
CTDTVF

SEQ ID NO: 48193 - protein, 10 aa, Artificial sequence
  Protein classification predicting sequence
RNVSSLALKL

SEQ ID NO: 48194 - protein, 10 aa, Artificial sequence
  Protein classification predicting sequence
FLGTSAGVPT

SEQ ID NO: 48195 - protein, 8 aa, Artificial sequence
  Protein classification predicting sequence
KVVYSGDT

SEQ ID NO: 48196 - protein, 7 aa, Artificial sequence
  Protein classification predicting sequence
THISSRY

SEQ ID NO: 48197 - protein, 26 aa, Artificial sequence
  Protein classification predicting sequence
IALNLEPYSNSIWLFDVGEGTQHQIL

SEQ ID NO: 48198 - protein, 15 aa, Artificial sequence
  Protein classification predicting sequence
LSESHLNYPITYIEI

SEQ ID NO: 48199 - protein, 7 aa, Artificial sequence
  Protein classification predicting sequence
LNHGIPS

SEQ ID NO: 48200 - protein, 13 aa, Artificial sequence
  Protein classification predicting sequence
IGLEPGPKYQEVK

SEQ ID NO: 48201 - protein, 10 aa, Artificial sequence
  Protein classification predicting sequence
LANNYHHSHI

SEQ ID NO: 48202 - protein, 6 aa, Artificial sequence
  Protein classification predicting sequence
FVKDFD

SEQ ID NO: 48203 - protein, 11 aa, Artificial sequence
  Protein classification predicting sequence
EEQTDLDIYGP

SEQ ID NO: 48204 - protein, 11 aa, Artificial sequence
  Protein classification predicting sequence
SLGKIMETDKF

SEQ ID NO: 48205 - protein, 5 aa, Artificial sequence
  Protein classification predicting sequence
HTIFC

SEQ ID NO: 48206 - protein, 10 aa, Artificial sequence
  Protein classification predicting sequence
HGHSTNMQAA

SEQ ID NO: 48207 - protein, 13 aa, Artificial sequence
  Protein classification predicting sequence
AKRLLLNHVSARF

SEQ ID NO: 48208 - protein, 22 aa, Artificial sequence
  Protein classification predicting sequence
WMFDCGEGTQRQILETTIKPRK

SEQ ID NO: 48209 - protein, 35 aa, Artificial sequence
  Protein classification predicting sequence
WMFDCGEGTQRQILETTIKPRKIRKIFITHLHGDH

SEQ ID NO: 48210 - protein, 10 aa, Artificial sequence
  Protein classification predicting sequence
IFITHLHGDH

SEQ ID NO: 48211 - protein, 7 aa, Artificial sequence
  Protein classification predicting sequence
IHFHEFD

SEQ ID NO: 48212 - protein, 16 aa, Artificial sequence
  Protein classification predicting sequence
GYRVVQKDLEGTLDAE

SEQ ID NO: 48213 - protein, 10 aa, Artificial sequence
  Protein classification predicting sequence
ADVLVHESTY

SEQ ID NO: 48214 - protein, 6 aa, Artificial sequence
  Protein classification predicting sequence
GDTRKT

SEQ ID NO: 48215 - protein, 6 aa, Artificial sequence
  Protein classification predicting sequence
RNVSSL

SEQ ID NO: 48216 - protein, 6 aa, Artificial sequence
  Protein classification predicting sequence
ILETTI

SEQ ID NO: 48217 - protein, 10 aa, Artificial sequence
  Protein classification predicting sequence
FGLPGFLSSR

SEQ ID NO: 48218 - protein, 11 aa, Artificial sequence
  Protein classification predicting sequence
QKDLEGTLDAE

SEQ ID NO: 48219 - protein, 15 aa, Artificial sequence
  Protein classification predicting sequence
ADVLVHESTYGKGDE

SEQ ID NO: 48220 - protein, 10 aa, Artificial sequence
  Protein classification predicting sequence
KDAATIFENV

SEQ ID NO: 48221 - protein, 8 aa, Artificial sequence
  Protein classification predicting sequence
ISAPKKGK

SEQ ID NO: 48222 - protein, 17 aa, Artificial sequence
  Protein classification predicting sequence
AKRLLLNHVSARFLGRD

SEQ ID NO: 48223 - protein, 9 aa, Artificial sequence
  Protein classification predicting sequence
GVPTRTRNV

SEQ ID NO: 48224 - protein, 8 aa, Artificial sequence
  Protein classification predicting sequence
HGDHIFGL

SEQ ID NO: 48225 - protein, 9 aa, Artificial sequence
  Protein classification predicting sequence
HSTSTMAAQ

SEQ ID NO: 48226 - protein, 7 aa, Artificial sequence
  Protein classification predicting sequence
DGRVIDG

SEQ ID NO: 48227 - protein, 8 aa, Artificial sequence
  Protein classification predicting sequence
SHLHADHH

SEQ ID NO: 48228 - protein, 12 aa, Artificial sequence
  Protein classification predicting sequence
EAAVEQTFVNKD

SEQ ID NO: 48229 - protein, 8 aa, Artificial sequence
  Protein classification predicting sequence
LKLGQARG

SEQ ID NO: 48230 - protein, 7 aa, Artificial sequence
  Protein classification predicting sequence
HAHHRQS

SEQ ID NO: 48231 - protein, 7 aa, Artificial sequence
  Protein classification predicting sequence
AVALTHA

SEQ ID NO: 48232 - protein, 8 aa, Artificial sequence
  Protein classification predicting sequence
VVRTPSDA

SEQ ID NO: 48233 - protein, 7 aa, Artificial sequence
  Protein classification predicting sequence
CHCWRAP

SEQ ID NO: 48234 - protein, 7 aa, Artificial sequence
  Protein classification predicting sequence
GIDPGSR

SEQ ID NO: 48235 - protein, 6 aa, Artificial sequence
  Protein classification predicting sequence
QVQHMV

SEQ ID NO: 48236 - protein, 10 aa, Artificial sequence
  Protein classification predicting sequence
DALAIALCHA

SEQ ID NO: 48237 - protein, 7 aa, Artificial sequence
  Protein classification predicting sequence
YTPLQVK

SEQ ID NO: 48238 - protein, 7 aa, Artificial sequence
  Protein classification predicting sequence
AIVAAVN

SEQ ID NO: 48239 - protein, 14 aa, Artificial sequence
  Protein classification predicting sequence
IYAGVTEIITQFQP

SEQ ID NO: 48240 - protein, 9 aa, Artificial sequence
  Protein classification predicting sequence
ILGIDPGSR

SEQ ID NO: 48241 - protein, 8 aa, Artificial sequence
  Protein classification predicting sequence
QVAFMVKR

SEQ ID NO: 48242 - protein, 6 aa, Artificial sequence
  Protein classification predicting sequence
AIAITH

SEQ ID NO: 48243 - protein, 7 aa, Artificial sequence
  Protein classification predicting sequence
YVASGCI

SEQ ID NO: 48244 - protein, 6 aa, Artificial sequence
  Protein classification predicting sequence
KQAVVG

SEQ ID NO: 48245 - protein, 6 aa, Artificial sequence
  Protein classification predicting sequence
AICHAH

SEQ ID NO: 48246 - protein, 10 aa, Artificial sequence
  Protein classification predicting sequence
SALKLGQARG

SEQ ID NO: 48247 - protein, 11 aa, Artificial sequence
  Protein classification predicting sequence
AEKSQVQHMVR

SEQ ID NO: 48248 - protein, 7 aa, Artificial sequence
  Protein classification predicting sequence
ILGIDPG

SEQ ID NO: 48249 - protein, 7 aa, Artificial sequence
  Protein classification predicting sequence
ADALAIA

SEQ ID NO: 48250 - protein, 7 aa, Artificial sequence
  Protein classification predicting sequence
YVASGTI

SEQ ID NO: 48251 - protein, 7 aa, Artificial sequence
  Protein classification predicting sequence
VFVNVNP

SEQ ID NO: 48252 - protein, 7 aa, Artificial sequence
  Protein classification predicting sequence
LGQARGA

SEQ ID NO: 48253 - protein, 13 aa, Artificial sequence
  Protein classification predicting sequence
TGYGVIRQVGRQL

SEQ ID NO: 48254 - protein, 13 aa, Artificial sequence
  Protein classification predicting sequence
NADSALKLGQARG

SEQ ID NO: 48255 - protein, 9 aa, Artificial sequence
  Protein classification predicting sequence
PQADAADAL

SEQ ID NO: 48256 - protein, 8 aa, Artificial sequence
  Protein classification predicting sequence
TVMGTAQA

SEQ ID NO: 48257 - protein, 8 aa, Artificial sequence
  Protein classification predicting sequence
TGYGVIRQ

SEQ ID NO: 48258 - protein, 8 aa, Artificial sequence
  Protein classification predicting sequence
YLGSGCIR

SEQ ID NO: 48259 - protein, 8 aa, Artificial sequence
  Protein classification predicting sequence
FAIEQVFM

SEQ ID NO: 48260 - protein, 17 aa, Artificial sequence
  Protein classification predicting sequence
MLKLPAKPQADAADALG

SEQ ID NO: 48261 - protein, 6 aa, Artificial sequence
  Protein classification predicting sequence
GIDPGS

SEQ ID NO: 48262 - protein, 15 aa, Artificial sequence
  Protein classification predicting sequence
ILGIDPGSRNCGYAI

SEQ ID NO: 48263 - protein, 10 aa, Artificial sequence
  Protein classification predicting sequence
RDLPVHEYAA

SEQ ID NO: 48264 - protein, 8 aa, Artificial sequence
  Protein classification predicting sequence
ADSALKLG

SEQ ID NO: 48265 - protein, 14 aa, Artificial sequence
  Protein classification predicting sequence
KNADSALKLGQARG

SEQ ID NO: 48266 - protein, 8 aa, Artificial sequence
  Protein classification predicting sequence
LGIDPGSR

SEQ ID NO: 48267 - protein, 19 aa, Artificial sequence
  Protein classification predicting sequence
RLKLIYAGVTEIITQFQPD

SEQ ID NO: 48268 - protein, 13 aa, Artificial sequence
  Protein classification predicting sequence
EYAARQVKQTVVG

SEQ ID NO: 48269 - protein, 24 aa, Artificial sequence
  Protein classification predicting sequence
LLKLPANPQADAADALAIAITHCH

SEQ ID NO: 48270 - protein, 9 aa, Artificial sequence
  Protein classification predicting sequence
ADKLLFEAL

SEQ ID NO: 48271 - protein, 14 aa, Artificial sequence
  Protein classification predicting sequence
VGTIFGVWPGDKLT

SEQ ID NO: 48272 - protein, 8 aa, Artificial sequence
  Protein classification predicting sequence
MGIYGPRT

SEQ ID NO: 48273 - protein, 10 aa, Artificial sequence
  Protein classification predicting sequence
EKYTLRYTGG

SEQ ID NO: 48274 - protein, 8 aa, Artificial sequence
  Protein classification predicting sequence
QIIVKEKG

SEQ ID NO: 48275 - protein, 7 aa, Artificial sequence
  Protein classification predicting sequence
LFEVAPL

SEQ ID NO: 48276 - protein, 18 aa, Artificial sequence
  Protein classification predicting sequence
ITGSLHMTIQTAVLIETL

SEQ ID NO: 48277 - protein, 7 aa, Artificial sequence
  Protein classification predicting sequence
DDGGDAT

SEQ ID NO: 48278 - protein, 7 aa, Artificial sequence
  Protein classification predicting sequence
EETTTGV

SEQ ID NO: 48279 - protein, 10 aa, Artificial sequence
  Protein classification predicting sequence
GYGDVGKGCA

SEQ ID NO: 48280 - protein, 13 aa, Artificial sequence
  Protein classification predicting sequence
VYVLPKHLDEKVA

SEQ ID NO: 48281 - protein, 10 aa, Artificial sequence
  Protein classification predicting sequence
LPKHLDEKVA

SEQ ID NO: 48282 - protein, 8 aa, Artificial sequence
  Protein classification predicting sequence
LTKLSKDQ

SEQ ID NO: 48283 - protein, 7 aa, Artificial sequence
  Protein classification predicting sequence
EFGPSQP

SEQ ID NO: 48284 - protein, 8 aa, Artificial sequence
  Protein classification predicting sequence
LTKLTKDQ

SEQ ID NO: 48285 - protein, 6 aa, Artificial sequence
  Protein classification predicting sequence
EMPGLM

SEQ ID NO: 48286 - protein, 9 aa, Artificial sequence
  Protein classification predicting sequence
QTAVLIETL

SEQ ID NO: 48287 - protein, 6 aa, Artificial sequence
  Protein classification predicting sequence
AWKGET

SEQ ID NO: 48288 - protein, 31 aa, Artificial sequence
  Protein classification predicting sequence
FGARVIITEIDPINALQAAMEGYEVTTMDEA

SEQ ID NO: 48289 - protein, 7 aa, Artificial sequence
  Protein classification predicting sequence
IFVTTTG

SEQ ID NO: 48290 - protein, 10 aa, Artificial sequence
  Protein classification predicting sequence
DVKWLNENAV

SEQ ID NO: 48291 - protein, 8 aa, Artificial sequence
  Protein classification predicting sequence
GHPSFVMS

SEQ ID NO: 48292 - protein, 6 aa, Artificial sequence
  Protein classification predicting sequence
SFTNQV

SEQ ID NO: 48293 - protein, 11 aa, Artificial sequence
  Protein classification predicting sequence
FLPKKLDEAVA

SEQ ID NO: 48294 - protein, 7 aa, Artificial sequence
  Protein classification predicting sequence
ITEIDPI

SEQ ID NO: 48295 - protein, 25 aa, Artificial sequence
  Protein classification predicting sequence
ITEIDPINALQAAMEGYEVTTMDEA

SEQ ID NO: 48296 - protein, 7 aa, Artificial sequence
  Protein classification predicting sequence
NIKPQVD

SEQ ID NO: 48297 - protein, 9 aa, Artificial sequence
  Protein classification predicting sequence
NIKPQVDRY

SEQ ID NO: 48298 - protein, 6 aa, Artificial sequence
  Protein classification predicting sequence
VTTTGN

SEQ ID NO: 48299 - protein, 7 aa, Artificial sequence
  Protein classification predicting sequence
EVKPQVH

SEQ ID NO: 48300 - protein, 10 aa, Artificial sequence
  Protein classification predicting sequence
NLGNATGHPS

SEQ ID NO: 48301 - protein, 8 aa, Artificial sequence
  Protein classification predicting sequence
TAVLVETL

SEQ ID NO: 48302 - protein, 10 aa, Artificial sequence
  Protein classification predicting sequence
EETTTGVIRL

SEQ ID NO: 48303 - protein, 11 aa, Artificial sequence
  Protein classification predicting sequence
LRATNILIAGK

SEQ ID NO: 48304 - protein, 6 aa, Artificial sequence
  Protein classification predicting sequence
VTEVDP

SEQ ID NO: 48305 - protein, 6 aa, Artificial sequence
  Protein classification predicting sequence
AAMDGF

SEQ ID NO: 48306 - protein, 9 aa, Artificial sequence
  Protein classification predicting sequence
EMPGLMSCR

SEQ ID NO: 48307 - protein, 7 aa, Artificial sequence
  Protein classification predicting sequence
PLKGARI

SEQ ID NO: 48308 - protein, 8 aa, Artificial sequence
  Protein classification predicting sequence
PVFAVKGE

SEQ ID NO: 48309 - protein, 16 aa, Artificial sequence
  Protein classification predicting sequence
SNMILDDGGDATMYIL

SEQ ID NO: 48310 - protein, 14 aa, Artificial sequence
  Protein classification predicting sequence
GARAEAGEDVLSNP

SEQ ID NO: 48311 - protein, 7 aa, Artificial sequence
  Protein classification predicting sequence
TTTGNKD

SEQ ID NO: 48312 - protein, 8 aa, Artificial sequence
  Protein classification predicting sequence
LRNLKWTN

SEQ ID NO: 48313 - protein, 21 aa, Artificial sequence
  Protein classification predicting sequence
LSEGRLLNLGNATGHPSFVMS

SEQ ID NO: 48314 - protein, 7 aa, Artificial sequence
  Protein classification predicting sequence
SFTNQVL

SEQ ID NO: 48315 - protein, 6 aa, Artificial sequence
  Protein classification predicting sequence
EETTTG

SEQ ID NO: 48316 - protein, 6 aa, Artificial sequence
  Protein classification predicting sequence
GYGWCG

SEQ ID NO: 48317 - protein, 16 aa, Artificial sequence
  Protein classification predicting sequence
WSSCNIFSTQDHAAAA

SEQ ID NO: 48318 - protein, 8 aa, Artificial sequence
  Protein classification predicting sequence
EVTTMEEA

SEQ ID NO: 48319 - protein, 16 aa, Artificial sequence
  Protein classification predicting sequence
ENAVEKVNIKPQVDRY

SEQ ID NO: 48320 - protein, 8 aa, Artificial sequence
  Protein classification predicting sequence
SFVMSNSF

SEQ ID NO: 48321 - protein, 6 aa, Artificial sequence
  Protein classification predicting sequence
LPKKLD

SEQ ID NO: 48322 - protein, 9 aa, Artificial sequence
  Protein classification predicting sequence
HVTTETANL

SEQ ID NO: 48323 - protein, 6 aa, Artificial sequence
  Protein classification predicting sequence
VVAGYG

SEQ ID NO: 48324 - protein, 7 aa, Artificial sequence
  Protein classification predicting sequence
RARGMGA

SEQ ID NO: 48325 - protein, 11 aa, Artificial sequence
  Protein classification predicting sequence
VTEYKLKDGRR

SEQ ID NO: 48326 - protein, 10 aa, Artificial sequence
  Protein classification predicting sequence
ELTEEQKKYL

SEQ ID NO: 48327 - protein, 8 aa, Artificial sequence
  Protein classification predicting sequence
AAKIGDIF

SEQ ID NO: 48328 - protein, 8 aa, Artificial sequence
  Protein classification predicting sequence
LADFGRKE

SEQ ID NO: 48329 - protein, 8 aa, Artificial sequence
  Protein classification predicting sequence
ALGAEVRW

SEQ ID NO: 48330 - protein, 5 aa, Artificial sequence
  Protein classification predicting sequence
YWWCT

SEQ ID NO: 48331 - protein, 8 aa, Artificial sequence
  Protein classification predicting sequence
GARVLVTE

SEQ ID NO: 48332 - protein, 18 aa, Artificial sequence
  Protein classification predicting sequence
GRLVNLGCATGHPSFVMS

SEQ ID NO: 48333 - protein, 7 aa, Artificial sequence
  Protein classification predicting sequence
LPKHLDE

SEQ ID NO: 48334 - protein, 7 aa, Artificial sequence
  Protein classification predicting sequence
EMPGLMA

SEQ ID NO: 48335 - protein, 7 aa, Artificial sequence
  Protein classification predicting sequence
QRAAIKG

SEQ ID NO: 48336 - protein, 7 aa, Artificial sequence
  Protein classification predicting sequence
YGCRESL

SEQ ID NO: 48337 - protein, 5 aa, Artificial sequence
  Protein classification predicting sequence
DHMRK

SEQ ID NO: 48338 - protein, 10 aa, Artificial sequence
  Protein classification predicting sequence
GNIGHFDNEI

SEQ ID NO: 48339 - protein, 6 aa, Artificial sequence
  Protein classification predicting sequence
LAQIEL

SEQ ID NO: 48340 - protein, 8 aa, Artificial sequence
  Protein classification predicting sequence
EQAAYIGV

SEQ ID NO: 48341 - protein, 18 aa, Artificial sequence
  Protein classification predicting sequence
NIFSTQDHAAAAIAATGT

SEQ ID NO: 48342 - protein, 10 aa, Artificial sequence
  Protein classification predicting sequence
GVSEETTTGV

SEQ ID NO: 48343 - protein, 8 aa, Artificial sequence
  Protein classification predicting sequence
TDVMIAGK

SEQ ID NO: 48344 - protein, 9 aa, Artificial sequence
  Protein classification predicting sequence
VGKGSAASL

SEQ ID NO: 48345 - protein, 7 aa, Artificial sequence
  Protein classification predicting sequence
GAGARVK

SEQ ID NO: 48346 - protein, 9 aa, Artificial sequence
  Protein classification predicting sequence
YIGVTPQGP

SEQ ID NO: 48347 - protein, 6 aa, Artificial sequence
  Protein classification predicting sequence
VFAWKG

SEQ ID NO: 48348 - protein, 7 aa, Artificial sequence
  Protein classification predicting sequence
LKVPAIN

SEQ ID NO: 48349 - protein, 14 aa, Artificial sequence
  Protein classification predicting sequence
DGIKRATDVMVAGK

SEQ ID NO: 48350 - protein, 7 aa, Artificial sequence
  Protein classification predicting sequence
SLRGLGA

SEQ ID NO: 48351 - protein, 7 aa, Artificial sequence
  Protein classification predicting sequence
VTEIDPI

SEQ ID NO: 48352 - protein, 16 aa, Artificial sequence
  Protein classification predicting sequence
VTEIDPICALQAAMEG

SEQ ID NO: 48353 - protein, 6 aa, Artificial sequence
  Protein classification predicting sequence
GDVGKG

SEQ ID NO: 48354 - protein, 6 aa, Artificial sequence
  Protein classification predicting sequence
VYVLPK

SEQ ID NO: 48355 - protein, 7 aa, Artificial sequence
  Protein classification predicting sequence
KIGVKLT

SEQ ID NO: 48356 - protein, 9 aa, Artificial sequence
  Protein classification predicting sequence
DISLADWGR

SEQ ID NO: 48357 - protein, 7 aa, Artificial sequence
  Protein classification predicting sequence
LGAEVRW

SEQ ID NO: 48358 - protein, 10 aa, Artificial sequence
  Protein classification predicting sequence
GVTEETTTGV

SEQ ID NO: 48359 - protein, 10 aa, Artificial sequence
  Protein classification predicting sequence
GYGDVGKGSA

SEQ ID NO: 48360 - protein, 7 aa, Artificial sequence
  Protein classification predicting sequence
DHMRKMK

SEQ ID NO: 48361 - protein, 21 aa, Artificial sequence
  Protein classification predicting sequence
NVNDSVTKSKFDNLYGCRESL

SEQ ID NO: 48362 - protein, 10 aa, Artificial sequence
  Protein classification predicting sequence
ADIFVTATGN

SEQ ID NO: 48363 - protein, 7 aa, Artificial sequence
  Protein classification predicting sequence
QAAYIGV

SEQ ID NO: 48364 - protein, 14 aa, Artificial sequence
  Protein classification predicting sequence
LHMTIQTAVLIETL

SEQ ID NO: 48365 - protein, 7 aa, Artificial sequence
  Protein classification predicting sequence
AGKVAVV

SEQ ID NO: 48366 - protein, 11 aa, Artificial sequence
  Protein classification predicting sequence
EFGPSQPFKGA

SEQ ID NO: 48367 - protein, 6 aa, Artificial sequence
  Protein classification predicting sequence
HKIFEW

SEQ ID NO: 48368 - protein, 8 aa, Artificial sequence
  Protein classification predicting sequence
GARVIVTE

SEQ ID NO: 48369 - protein, 17 aa, Artificial sequence
  Protein classification predicting sequence
MRKMKNNAIVCNIGHFD

SEQ ID NO: 48370 - protein, 8 aa, Artificial sequence
  Protein classification predicting sequence
IVLSEGRL

SEQ ID NO: 48371 - protein, 7 aa, Artificial sequence
  Protein classification predicting sequence
PAINVND

SEQ ID NO: 48372 - protein, 10 aa, Artificial sequence
  Protein classification predicting sequence
LLAEGRLVNL

SEQ ID NO: 48373 - protein, 7 aa, Artificial sequence
  Protein classification predicting sequence
QADYIGV

SEQ ID NO: 48374 - protein, 7 aa, Artificial sequence
  Protein classification predicting sequence
CNIGHFD

SEQ ID NO: 48375 - protein, 14 aa, Artificial sequence
  Protein classification predicting sequence
ILLAEGRLVNLGCA

SEQ ID NO: 48376 - protein, 7 aa, Artificial sequence
  Protein classification predicting sequence
GARITGS

SEQ ID NO: 48377 - protein, 14 aa, Artificial sequence
  Protein classification predicting sequence
PVFAWKGETLEEYW

SEQ ID NO: 48378 - protein, 8 aa, Artificial sequence
  Protein classification predicting sequence
VTKSKFDN

SEQ ID NO: 48379 - protein, 11 aa, Artificial sequence
  Protein classification predicting sequence
VTKSKFDNKYG

SEQ ID NO: 48380 - protein, 11 aa, Artificial sequence
  Protein classification predicting sequence
CGYGDVGKGCA

SEQ ID NO: 48381 - protein, 8 aa, Artificial sequence
  Protein classification predicting sequence
GARVKVTE

SEQ ID NO: 48382 - protein, 10 aa, Artificial sequence
  Protein classification predicting sequence
ATGHPSFVMS

SEQ ID NO: 48383 - protein, 9 aa, Artificial sequence
  Protein classification predicting sequence
SCNIFSTQD

SEQ ID NO: 48384 - protein, 5 aa, Artificial sequence
  Protein classification predicting sequence
EYWWC

SEQ ID NO: 48385 - protein, 9 aa, Artificial sequence
  Protein classification predicting sequence
CGYGDVGKG

SEQ ID NO: 48386 - protein, 11 aa, Artificial sequence
  Protein classification predicting sequence
NIGHFDNEIDM

SEQ ID NO: 48387 - protein, 6 aa, Artificial sequence
  Protein classification predicting sequence
LDDGGD

SEQ ID NO: 48388 - protein, 11 aa, Artificial sequence
  Protein classification predicting sequence
EETTTGVHRLY

SEQ ID NO: 48389 - protein, 16 aa, Artificial sequence
  Protein classification predicting sequence
PAINVNDSVTKSKFDN

SEQ ID NO: 48390 - protein, 21 aa, Artificial sequence
  Protein classification predicting sequence
PAINVNDSVTKSKFDNLYGCR

SEQ ID NO: 48391 - protein, 24 aa, Artificial sequence
  Protein classification predicting sequence
PAINVNDSVTKSKFDNLYGCRESL

SEQ ID NO: 48392 - protein, 13 aa, Artificial sequence
  Protein classification predicting sequence
TEIDPICALQAAM

SEQ ID NO: 48393 - protein, 6 aa, Artificial sequence
  Protein classification predicting sequence
YWWCTE

SEQ ID NO: 48394 - protein, 16 aa, Artificial sequence
  Protein classification predicting sequence
VTKSKFDNLYGCRESL

SEQ ID NO: 48395 - protein, 7 aa, Artificial sequence
  Protein classification predicting sequence
HMEAMKD

SEQ ID NO: 48396 - protein, 14 aa, Artificial sequence
  Protein classification predicting sequence
AIVCNIGHFDNEID

SEQ ID NO: 48397 - protein, 10 aa, Artificial sequence
  Protein classification predicting sequence
NIGHFDNEID

SEQ ID NO: 48398 - protein, 9 aa, Artificial sequence
  Protein classification predicting sequence
IIVLAEGRL

SEQ ID NO: 48399 - protein, 7 aa, Artificial sequence
  Protein classification predicting sequence
KDQADYI

SEQ ID NO: 48400 - protein, 11 aa, Artificial sequence
  Protein classification predicting sequence
WSSCNIFSTQD

SEQ ID NO: 48401 - protein, 13 aa, Artificial sequence
  Protein classification predicting sequence
PLNMILDDGGDLT

SEQ ID NO: 48402 - protein, 7 aa, Artificial sequence
  Protein classification predicting sequence
GISEETT

SEQ ID NO: 48403 - protein, 8 aa, Artificial sequence
  Protein classification predicting sequence
GVHNLYKM

SEQ ID NO: 48404 - protein, 11 aa, Artificial sequence
  Protein classification predicting sequence
GYGDVGKGCAQ

SEQ ID NO: 48405 - protein, 7 aa, Artificial sequence
  Protein classification predicting sequence
KPQVDRY

SEQ ID NO: 48406 - protein, 7 aa, Artificial sequence
  Protein classification predicting sequence
NQTLAQI

SEQ ID NO: 48407 - protein, 6 aa, Artificial sequence
  Protein classification predicting sequence
GCLHMT

SEQ ID NO: 48408 - protein, 15 aa, Artificial sequence
  Protein classification predicting sequence
DGIKRATDVMIAGKV

SEQ ID NO: 48409 - protein, 11 aa, Artificial sequence
  Protein classification predicting sequence
NMILDDGGDAT

SEQ ID NO: 48410 - protein, 12 aa, Artificial sequence
  Protein classification predicting sequence
IKGVTEETTTGV

SEQ ID NO: 48411 - protein, 6 aa, Artificial sequence
  Protein classification predicting sequence
VGKGCA

SEQ ID NO: 48412 - protein, 18 aa, Artificial sequence
  Protein classification predicting sequence
VWVTEIDPICALQAAMEG

SEQ ID NO: 48413 - protein, 7 aa, Artificial sequence
  Protein classification predicting sequence
VITHDHM

SEQ ID NO: 48414 - protein, 18 aa, Artificial sequence
  Protein classification predicting sequence
QYQWENIKPQVDHIIFPD

SEQ ID NO: 48415 - protein, 6 aa, Artificial sequence
  Protein classification predicting sequence
SFANQT

SEQ ID NO: 48416 - protein, 6 aa, Artificial sequence
  Protein classification predicting sequence
IRREHF

SEQ ID NO: 48417 - protein, 6 aa, Artificial sequence
  Protein classification predicting sequence
TTTGNK

SEQ ID NO: 48418 - protein, 30 aa, Artificial sequence
  Protein classification predicting sequence
YSASKPLKGARIAGCLHMTVETAVLIETLV

SEQ ID NO: 48419 - protein, 24 aa, Artificial sequence
  Protein classification predicting sequence
WSSCNIFSTQDHAAAAIAKAGIPV

SEQ ID NO: 48420 - protein, 11 aa, Artificial sequence
  Protein classification predicting sequence
NMILDDGGDLT

SEQ ID NO: 48421 - protein, 8 aa, Artificial sequence
  Protein classification predicting sequence
SEETTTGV

SEQ ID NO: 48422 - protein, 9 aa, Artificial sequence
  Protein classification predicting sequence
GRLVNLGCA

SEQ ID NO: 48423 - protein, 7 aa, Artificial sequence
  Protein classification predicting sequence
GAKLTKL

SEQ ID NO: 48424 - protein, 6 aa, Artificial sequence
  Protein classification predicting sequence
VTATGN

SEQ ID NO: 48425 - protein, 7 aa, Artificial sequence
  Protein classification predicting sequence
STDNAEF

SEQ ID NO: 48426 - protein, 18 aa, Artificial sequence
  Protein classification predicting sequence
VGVSEETTTGVKRLYQMQ

SEQ ID NO: 48427 - protein, 18 aa, Artificial sequence
  Protein classification predicting sequence
PGVKRITIKPQTDRWVFP

SEQ ID NO: 48428 - protein, 14 aa, Artificial sequence
  Protein classification predicting sequence
LIETLTALGAEVRW

SEQ ID NO: 48429 - protein, 19 aa, Artificial sequence
  Protein classification predicting sequence
INVNDSVTKSKFDNLYGCR

SEQ ID NO: 48430 - protein, 12 aa, Artificial sequence
  Protein classification predicting sequence
TLLIHEGVKAEE

SEQ ID NO: 48431 - protein, 11 aa, Artificial sequence
  Protein classification predicting sequence
RATDVMIAGKV

SEQ ID NO: 48432 - protein, 29 aa, Artificial sequence
  Protein classification predicting sequence
LGCATGHPSFVMSCSFTNQVIAQLELWNE

SEQ ID NO: 48433 - protein, 7 aa, Artificial sequence
  Protein classification predicting sequence
AGKNVVV

SEQ ID NO: 48434 - protein, 8 aa, Artificial sequence
  Protein classification predicting sequence
ALEARMDG

SEQ ID NO: 48435 - protein, 8 aa, Artificial sequence
  Protein classification predicting sequence
KVADLSLA

SEQ ID NO: 48436 - protein, 14 aa, Artificial sequence
  Protein classification predicting sequence
GVTEETTTGVHRLY

SEQ ID NO: 48437 - protein, 21 aa, Artificial sequence
  Protein classification predicting sequence
GYGDVGKGCAQSLRGLGATVW

SEQ ID NO: 48438 - protein, 14 aa, Artificial sequence
  Protein classification predicting sequence
MKDQAIVCNIGHFD

SEQ ID NO: 48439 - protein, 10 aa, Artificial sequence
  Protein classification predicting sequence
AIVCNIGHFD

SEQ ID NO: 48440 - protein, 8 aa, Artificial sequence
  Protein classification predicting sequence
DIFITTTG

SEQ ID NO: 48441 - protein, 9 aa, Artificial sequence
  Protein classification predicting sequence
DNRYGTGQS

SEQ ID NO: 48442 - protein, 6 aa, Artificial sequence
  Protein classification predicting sequence
RATNIL

SEQ ID NO: 48443 - protein, 8 aa, Artificial sequence
  Protein classification predicting sequence
NPLSTQDD

SEQ ID NO: 48444 - protein, 12 aa, Artificial sequence
  Protein classification predicting sequence
GHPAEIMDMSFA

SEQ ID NO: 48445 - protein, 6 aa, Artificial sequence
  Protein classification predicting sequence
MDMSFA

SEQ ID NO: 48446 - protein, 7 aa, Artificial sequence
  Protein classification predicting sequence
EMPGLMS

SEQ ID NO: 48447 - protein, 7 aa, Artificial sequence
  Protein classification predicting sequence
TGNKDII

SEQ ID NO: 48448 - protein, 17 aa, Artificial sequence
  Protein classification predicting sequence
NMILDDGGDATMLVLRG

SEQ ID NO: 48449 - protein, 8 aa, Artificial sequence
  Protein classification predicting sequence
ALQALMEG

SEQ ID NO: 48450 - protein, 11 aa, Artificial sequence
  Protein classification predicting sequence
LPKHLDEKVAR

SEQ ID NO: 48451 - protein, 7 aa, Artificial sequence
  Protein classification predicting sequence
LDEKVAR

SEQ ID NO: 48452 - protein, 16 aa, Artificial sequence
  Protein classification predicting sequence
GSLHMTVQTAVLIETL

SEQ ID NO: 48453 - protein, 14 aa, Artificial sequence
  Protein classification predicting sequence
SCNIFSTQDHAAAA

SEQ ID NO: 48454 - protein, 7 aa, Artificial sequence
  Protein classification predicting sequence
EQALTWP

SEQ ID NO: 48455 - protein, 44 aa, Artificial sequence
  Protein classification predicting sequence
KGVTEETTTGVLRLYQFAAAGDLAFPAINVNDSVTKSKFDNKYG

SEQ ID NO: 48456 - protein, 20 aa, Artificial sequence
  Protein classification predicting sequence
FPAINVNDSVTKSKFDNKYG

SEQ ID NO: 48457 - protein, 10 aa, Artificial sequence
  Protein classification predicting sequence
RHSLIDGINR

SEQ ID NO: 48458 - protein, 8 aa, Artificial sequence
  Protein classification predicting sequence
TDVLIGGK

SEQ ID NO: 48459 - protein, 8 aa, Artificial sequence
  Protein classification predicting sequence
PQVDLWTF

SEQ ID NO: 48460 - protein, 11 aa, Artificial sequence
  Protein classification predicting sequence
IAETEMPGLMA

SEQ ID NO: 48461 - protein, 7 aa, Artificial sequence
  Protein classification predicting sequence
IKPQVDH

SEQ ID NO: 48462 - protein, 11 aa, Artificial sequence
  Protein classification predicting sequence
IKPQVDHVIFP

SEQ ID NO: 48463 - protein, 6 aa, Artificial sequence
  Protein classification predicting sequence
VARLHL

SEQ ID NO: 48464 - protein, 7 aa, Artificial sequence
  Protein classification predicting sequence
LHLGKLG

SEQ ID NO: 48465 - protein, 18 aa, Artificial sequence
  Protein classification predicting sequence
VRWASCNIFSTQDHAAAA

SEQ ID NO: 48466 - protein, 23 aa, Artificial sequence
  Protein classification predicting sequence
VFAWKGETLEEYWWAAEQMLTWP

SEQ ID NO: 48467 - protein, 20 aa, Artificial sequence
  Protein classification predicting sequence
GVTEETTTGVLRLYQFAAAG

SEQ ID NO: 48468 - protein, 17 aa, Artificial sequence
  Protein classification predicting sequence
FPAINVNDSVTKSKFDN

SEQ ID NO: 48469 - protein, 12 aa, Artificial sequence
  Protein classification predicting sequence
CGYGDVGKGCAE

SEQ ID NO: 48470 - protein, 8 aa, Artificial sequence
  Protein classification predicting sequence
DPINALQA

SEQ ID NO: 48471 - protein, 5 aa, Artificial sequence
  Protein classification predicting sequence
HMKAM

SEQ ID NO: 48472 - protein, 6 aa, Artificial sequence
  Protein classification predicting sequence
MKDQAI

SEQ ID NO: 48473 - protein, 6 aa, Artificial sequence
  Protein classification predicting sequence
IKPQVD

SEQ ID NO: 48474 - protein, 27 aa, Artificial sequence
  Protein classification predicting sequence
EYDNEVYRLPKHLDEKVARIHVEALGG

SEQ ID NO: 48475 - protein, 7 aa, Artificial sequence
  Protein classification predicting sequence
ADFGRLE

SEQ ID NO: 48476 - protein, 16 aa, Artificial sequence
  Protein classification predicting sequence
GSLHMTIQTAVLIETL

SEQ ID NO: 48477 - protein, 14 aa, Artificial sequence
  Protein classification predicting sequence
PGVKRITIKPQTDR

SEQ ID NO: 48478 - protein, 9 aa, Artificial sequence
  Protein classification predicting sequence
VFPDTNSGI

SEQ ID NO: 48479 - protein, 14 aa, Artificial sequence
  Protein classification predicting sequence
NLGCATGHPSFVMS

SEQ ID NO: 48480 - protein, 9 aa, Artificial sequence
  Protein classification predicting sequence
AENEMPGLM

SEQ ID NO: 48481 - protein, 15 aa, Artificial sequence
  Protein classification predicting sequence
PLNMILDDGGDLTNL

SEQ ID NO: 48482 - protein, 15 aa, Artificial sequence
  Protein classification predicting sequence
GHPSFVMSNSFTNQV

SEQ ID NO: 48483 - protein, 7 aa, Artificial sequence
  Protein classification predicting sequence
AQIELWT

SEQ ID NO: 48484 - protein, 5 aa, Artificial sequence
  Protein classification predicting sequence
LHMTI

SEQ ID NO: 48485 - protein, 7 aa, Artificial sequence
  Protein classification predicting sequence
RWCSCNI

SEQ ID NO: 48486 - protein, 9 aa, Artificial sequence
  Protein classification predicting sequence
GPDLIVDDG

SEQ ID NO: 48487 - protein, 16 aa, Artificial sequence
  Protein classification predicting sequence
YGCRHSLPDGLMRATD

SEQ ID NO: 48488 - protein, 6 aa, Artificial sequence
  Protein classification predicting sequence
KMKNNA

SEQ ID NO: 48489 - protein, 6 aa, Artificial sequence
  Protein classification predicting sequence
NIGHFD

SEQ ID NO: 48490 - protein, 7 aa, Artificial sequence
  Protein classification predicting sequence
ETLEEYW

SEQ ID NO: 48491 - protein, 9 aa, Artificial sequence
  Protein classification predicting sequence
DDGGDATLL

SEQ ID NO: 48492 - protein, 9 aa, Artificial sequence
  Protein classification predicting sequence
PFKGAKITG

SEQ ID NO: 48493 - protein, 6 aa, Artificial sequence
  Protein classification predicting sequence
RLYQMQ

SEQ ID NO: 48494 - protein, 12 aa, Artificial sequence
  Protein classification predicting sequence
PNMILDDGGDAT

SEQ ID NO: 48495 - protein, 10 aa, Artificial sequence
  Protein classification predicting sequence
VYVLPKHLDE

SEQ ID NO: 48496 - protein, 10 aa, Artificial sequence
  Protein classification predicting sequence
VARLHLEKIG

SEQ ID NO: 48497 - protein, 9 aa, Artificial sequence
  Protein classification predicting sequence
KGESLDEYW

SEQ ID NO: 48498 - protein, 8 aa, Artificial sequence
  Protein classification predicting sequence
GDVGKGSA

SEQ ID NO: 48499 - protein, 6 aa, Artificial sequence
  Protein classification predicting sequence
QPLKGA

SEQ ID NO: 48500 - protein, 6 aa, Artificial sequence
  Protein classification predicting sequence
HMTIQT

SEQ ID NO: 48501 - protein, 7 aa, Artificial sequence
  Protein classification predicting sequence
EGRLVNL

SEQ ID NO: 48502 - protein, 8 aa, Artificial sequence
  Protein classification predicting sequence
EGRLVNLG

SEQ ID NO: 48503 - protein, 7 aa, Artificial sequence
  Protein classification predicting sequence
NQVLAQI

SEQ ID NO: 48504 - protein, 7 aa, Artificial sequence
  Protein classification predicting sequence
QAEYIGV

SEQ ID NO: 48505 - protein, 6 aa, Artificial sequence
  Protein classification predicting sequence
LAAWGR

SEQ ID NO: 48506 - protein, 7 aa, Artificial sequence
  Protein classification predicting sequence
VKDISLA

SEQ ID NO: 48507 - protein, 21 aa, Artificial sequence
  Protein classification predicting sequence
VSAAASNPLSTQDDVVAALAK

SEQ ID NO: 48508 - protein, 6 aa, Artificial sequence
  Protein classification predicting sequence
ANAGHF

SEQ ID NO: 48509 - protein, 15 aa, Artificial sequence
  Protein classification predicting sequence
IEELTEEQKKYLESW

SEQ ID NO: 48510 - protein, 7 aa, Artificial sequence
  Protein classification predicting sequence
LHVTKET

SEQ ID NO: 48511 - protein, 13 aa, Artificial sequence
  Protein classification predicting sequence
KYLFDNRYGTGQS

SEQ ID NO: 48512 - protein, 8 aa, Artificial sequence
  Protein classification predicting sequence
IEELTEEQ

SEQ ID NO: 48513 - protein, 15 aa, Artificial sequence
  Protein classification predicting sequence
SEETTTGVIRLRAME

SEQ ID NO: 48514 - protein, 27 aa, Artificial sequence
  Protein classification predicting sequence
KPFKGVRIAATLHLEMKTAFLLLTLKA

SEQ ID NO: 48515 - protein, 11 aa, Artificial sequence
  Protein classification predicting sequence
EHFELMKDGAI

SEQ ID NO: 48516 - protein, 12 aa, Artificial sequence
  Protein classification predicting sequence
AIAETEMPGLMA

SEQ ID NO: 48517 - protein, 14 aa, Artificial sequence
  Protein classification predicting sequence
GARIAGSLHMTIQT

SEQ ID NO: 48518 - protein, 9 aa, Artificial sequence
  Protein classification predicting sequence
GSLHMTIQT

SEQ ID NO: 48519 - protein, 13 aa, Artificial sequence
  Protein classification predicting sequence
NMILDDGGDATLL

SEQ ID NO: 48520 - protein, 10 aa, Artificial sequence
  Protein classification predicting sequence
RATDVMIAGK

SEQ ID NO: 48521 - protein, 21 aa, Artificial sequence
  Protein classification predicting sequence
TEIDPICALQAAMEGYRVVTM

SEQ ID NO: 48522 - protein, 18 aa, Artificial sequence
  Protein classification predicting sequence
QWEEIKPQVDHVIFPDGK

SEQ ID NO: 48523 - protein, 7 aa, Artificial sequence
  Protein classification predicting sequence
VADISLA

SEQ ID NO: 48524 - protein, 9 aa, Artificial sequence
  Protein classification predicting sequence
GYGDVGKGS

SEQ ID NO: 48525 - protein, 12 aa, Artificial sequence
  Protein classification predicting sequence
DPICALQAAMDG

SEQ ID NO: 48526 - protein, 19 aa, Artificial sequence
  Protein classification predicting sequence
MKDMAIVGNIGHFDNEIQV

SEQ ID NO: 48527 - protein, 11 aa, Artificial sequence
  Protein classification predicting sequence
NIGHFDNEIQV

SEQ ID NO: 48528 - protein, 9 aa, Artificial sequence
  Protein classification predicting sequence
PLKGARIAG

SEQ ID NO: 48529 - protein, 15 aa, Artificial sequence
  Protein classification predicting sequence
TKSKFDNLYGCRESL

SEQ ID NO: 48530 - protein, 7 aa, Artificial sequence
  Protein classification predicting sequence
KRATDVM

SEQ ID NO: 48531 - protein, 8 aa, Artificial sequence
  Protein classification predicting sequence
ALQAAMEG

SEQ ID NO: 48532 - protein, 7 aa, Artificial sequence
  Protein classification predicting sequence
LPKELDE

SEQ ID NO: 48533 - protein, 10 aa, Artificial sequence
  Protein classification predicting sequence
LDEKVARLHL

SEQ ID NO: 48534 - protein, 8 aa, Artificial sequence
  Protein classification predicting sequence
FPAINVND

SEQ ID NO: 48535 - protein, 10 aa, Artificial sequence
  Protein classification predicting sequence
ADIFITTTGN

SEQ ID NO: 48536 - protein, 33 aa, Artificial sequence
  Protein classification predicting sequence
LPFPAINVNDSVTKSKFDNKYGCKESLVDGIRR

SEQ ID NO: 48537 - protein, 9 aa, Artificial sequence
  Protein classification predicting sequence
MMAGKVAVV

SEQ ID NO: 48538 - protein, 6 aa, Artificial sequence
  Protein classification predicting sequence
YDNEVY

SEQ ID NO: 48539 - protein, 6 aa, Artificial sequence
  Protein classification predicting sequence
WSSCNI

SEQ ID NO: 48540 - protein, 12 aa, Artificial sequence
  Protein classification predicting sequence
STQDHAAAAIAA

SEQ ID NO: 48541 - protein, 9 aa, Artificial sequence
  Protein classification predicting sequence
EEYLWCIEQ

SEQ ID NO: 48542 - protein, 5 aa, Artificial sequence
  Protein classification predicting sequence
WCIEQ

SEQ ID NO: 48543 - protein, 7 aa, Artificial sequence
  Protein classification predicting sequence
ESLVDGI

SEQ ID NO: 48544 - protein, 8 aa, Artificial sequence
  Protein classification predicting sequence
ALQAAMDG

SEQ ID NO: 48545 - protein, 14 aa, Artificial sequence
  Protein classification predicting sequence
IVCNIGHFDVEIDV

SEQ ID NO: 48546 - protein, 8 aa, Artificial sequence
  Protein classification predicting sequence
SCNIFSTQ

SEQ ID NO: 48547 - protein, 10 aa, Artificial sequence
  Protein classification predicting sequence
LLFPAINVND

SEQ ID NO: 48548 - protein, 46 aa, Artificial sequence
  Protein classification predicting sequence
LLFPAINVNDAVTKSKFDNKYGCRHSLIDGINRATDVLIGGKTAVV

SEQ ID NO: 48549 - protein, 10 aa, Artificial sequence
  Protein classification predicting sequence
SLRGQGARVI

SEQ ID NO: 48550 - protein, 23 aa, Artificial sequence
  Protein classification predicting sequence
MKHQAIVGNIGHFDNEIDMAGLA

SEQ ID NO: 48551 - protein, 7 aa, Artificial sequence
  Protein classification predicting sequence
PGIVKDE

SEQ ID NO: 48552 - protein, 12 aa, Artificial sequence
  Protein classification predicting sequence
AEHEMPGLMSIR

SEQ ID NO: 48553 - protein, 6 aa, Artificial sequence
  Protein classification predicting sequence
VEGPFK

SEQ ID NO: 48554 - protein, 6 aa, Artificial sequence
  Protein classification predicting sequence
PLAGAR

SEQ ID NO: 48555 - protein, 9 aa, Artificial sequence
  Protein classification predicting sequence
PVFAWKGET

SEQ ID NO: 48556 - protein, 24 aa, Artificial sequence
  Protein classification predicting sequence
PVFAWKGETLEEYWWCTEQALTWP

SEQ ID NO: 48557 - protein, 9 aa, Artificial sequence
  Protein classification predicting sequence
AEHEMPGLM

SEQ ID NO: 48558 - protein, 6 aa, Artificial sequence
  Protein classification predicting sequence
VEGPYK

SEQ ID NO: 48559 - protein, 10 aa, Artificial sequence
  Protein classification predicting sequence
GYGWVGRGIA

SEQ ID NO: 48560 - protein, 6 aa, Artificial sequence
  Protein classification predicting sequence
GHFNVE

SEQ ID NO: 48561 - protein, 11 aa, Artificial sequence
  Protein classification predicting sequence
AAEGHPSEVMD

SEQ ID NO: 48562 - protein, 8 aa, Artificial sequence
  Protein classification predicting sequence
VIVTEIDP

SEQ ID NO: 48563 - protein, 12 aa, Artificial sequence
  Protein classification predicting sequence
IKRATDVMVAGK

SEQ ID NO: 48564 - protein, 12 aa, Artificial sequence
  Protein classification predicting sequence
DPICALQAAMEG

SEQ ID NO: 48565 - protein, 15 aa, Artificial sequence
  Protein classification predicting sequence
NIKPQVDHITLPSGN

SEQ ID NO: 48566 - protein, 9 aa, Artificial sequence
  Protein classification predicting sequence
FPAMNVNDA

SEQ ID NO: 48567 - protein, 6 aa, Artificial sequence
  Protein classification predicting sequence
VIVTEI

SEQ ID NO: 48568 - protein, 9 aa, Artificial sequence
  Protein classification predicting sequence
MALHVEAKT

SEQ ID NO: 48569 - protein, 7 aa, Artificial sequence
  Protein classification predicting sequence
HLEAKTA

SEQ ID NO: 48570 - protein, 6 aa, Artificial sequence
  Protein classification predicting sequence
GHFDNE

SEQ ID NO: 48571 - protein, 9 aa, Artificial sequence
  Protein classification predicting sequence
YSASKPLKG

SEQ ID NO: 48572 - protein, 7 aa, Artificial sequence
  Protein classification predicting sequence
YGCRHSL

SEQ ID NO: 48573 - protein, 8 aa, Artificial sequence
  Protein classification predicting sequence
DPICALQA

SEQ ID NO: 48574 - protein, 13 aa, Artificial sequence
  Protein classification predicting sequence
AIVGNIGHFDNEI

SEQ ID NO: 48575 - protein, 14 aa, Artificial sequence
  Protein classification predicting sequence
VEKTSSGREYKVKD

SEQ ID NO: 48576 - protein, 6 aa, Artificial sequence
  Protein classification predicting sequence
SCNIFS

SEQ ID NO: 48577 - protein, 9 aa, Artificial sequence
  Protein classification predicting sequence
VFAWKGETL

SEQ ID NO: 48578 - protein, 7 aa, Artificial sequence
  Protein classification predicting sequence
EYWWCTE

SEQ ID NO: 48579 - protein, 7 aa, Artificial sequence
  Protein classification predicting sequence
STDNPEF

SEQ ID NO: 48580 - protein, 17 aa, Artificial sequence
  Protein classification predicting sequence
GARVIVTEIDPICALQA

SEQ ID NO: 48581 - protein, 9 aa, Artificial sequence
  Protein classification predicting sequence
GRKELDIAE

SEQ ID NO: 48582 - protein, 6 aa, Artificial sequence
  Protein classification predicting sequence
YEKKVY

SEQ ID NO: 48583 - protein, 7 aa, Artificial sequence
  Protein classification predicting sequence
QADYLGV

SEQ ID NO: 48584 - protein, 8 aa, Artificial sequence
  Protein classification predicting sequence
YKIADISL

SEQ ID NO: 48585 - protein, 7 aa, Artificial sequence
  Protein classification predicting sequence
DVMLAGK

SEQ ID NO: 48586 - protein, 9 aa, Artificial sequence
  Protein classification predicting sequence
IVCNIGHFD

SEQ ID NO: 48587 - protein, 12 aa, Artificial sequence
  Protein classification predicting sequence
IVCNIGHFDNEI

SEQ ID NO: 48588 - protein, 10 aa, Artificial sequence
  Protein classification predicting sequence
LDEEVARLHL

SEQ ID NO: 48589 - protein, 8 aa, Artificial sequence
  Protein classification predicting sequence
EETTTGVH

SEQ ID NO: 48590 - protein, 10 aa, Artificial sequence
  Protein classification predicting sequence
DGIKRATDVM

SEQ ID NO: 48591 - protein, 6 aa, Artificial sequence
  Protein classification predicting sequence
FVTTTG

SEQ ID NO: 48592 - protein, 6 aa, Artificial sequence
  Protein classification predicting sequence
MWECPD

SEQ ID NO: 48593 - protein, 7 aa, Artificial sequence
  Protein classification predicting sequence
EGIDELA

SEQ ID NO: 48594 - protein, 8 aa, Artificial sequence
  Protein classification predicting sequence
MIGDGATD

SEQ ID NO: 48595 - protein, 8 aa, Artificial sequence
  Protein classification predicting sequence
FIGFGGNV

SEQ ID NO: 48596 - protein, 13 aa, Artificial sequence
  Protein classification predicting sequence
QPTAESGGKGKVI

SEQ ID NO: 48597 - protein, 7 aa, Artificial sequence
  Protein classification predicting sequence
DLKTGSL

SEQ ID NO: 48598 - protein, 12 aa, Artificial sequence
  Protein classification predicting sequence
YWNNGNNGGRAY

SEQ ID NO: 48599 - protein, 9 aa, Artificial sequence
  Protein classification predicting sequence
VAEKRAANP

SEQ ID NO: 48600 - protein, 11 aa, Artificial sequence
  Protein classification predicting sequence
HETGHVLGLPD

SEQ ID NO: 48601 - protein, 13 aa, Artificial sequence
  Protein classification predicting sequence
LMSGGGPGPSCTN

SEQ ID NO: 48602 - protein, 9 aa, Artificial sequence
  Protein classification predicting sequence
GMPMDWTVS

SEQ ID NO: 48603 - protein, 13 aa, Artificial sequence
  Protein classification predicting sequence
VYVTIDIDVLDPA

SEQ ID NO: 48604 - protein, 9 aa, Artificial sequence
  Protein classification predicting sequence
GGEHLVSWP

SEQ ID NO: 48605 - protein, 9 aa, Artificial sequence
  Protein classification predicting sequence
SVQIGIRTE

SEQ ID NO: 48606 - protein, 7 aa, Artificial sequence
  Protein classification predicting sequence
GFTVLDA

SEQ ID NO: 48607 - protein, 13 aa, Artificial sequence
  Protein classification predicting sequence
PVYLTFDIDCLDP

SEQ ID NO: 48608 - protein, 9 aa, Artificial sequence
  Protein classification predicting sequence
TFDIDCLDP

SEQ ID NO: 48609 - protein, 16 aa, Artificial sequence
  Protein classification predicting sequence
IVGMDVVEVAPSYDQS

SEQ ID NO: 48610 - protein, 7 aa, Artificial sequence
  Protein classification predicting sequence
DNSLVSN

SEQ ID NO: 48611 - protein, 9 aa, Artificial sequence
  Protein classification predicting sequence
HFDAHTDTY

SEQ ID NO: 48612 - protein, 17 aa, Artificial sequence
  Protein classification predicting sequence
DHGTMFYTAPKEGLIDP

SEQ ID NO: 48613 - protein, 17 aa, Artificial sequence
  Protein classification predicting sequence
WVITGVPFDMATSGRAG

SEQ ID NO: 48614 - protein, 17 aa, Artificial sequence
  Protein classification predicting sequence
RHGPAAIRQVSTNLAWE

SEQ ID NO: 48615 - protein, 8 aa, Artificial sequence
  Protein classification predicting sequence
KLQAHAEK

SEQ ID NO: 48616 - protein, 12 aa, Artificial sequence
  Protein classification predicting sequence
GKRMLSFGGDHF

SEQ ID NO: 48617 - protein, 5 aa, Artificial sequence
  Protein classification predicting sequence
GGDHF

SEQ ID NO: 48618 - protein, 15 aa, Artificial sequence
  Protein classification predicting sequence
GGDHFITLPLLRAHA

SEQ ID NO: 48619 - protein, 23 aa, Artificial sequence
  Protein classification predicting sequence
TLPLLRAHAKHFGKMALVHFDAH

SEQ ID NO: 48620 - protein, 9 aa, Artificial sequence
  Protein classification predicting sequence
QVNDRSVDD

SEQ ID NO: 48621 - protein, 32 aa, Artificial sequence
  Protein classification predicting sequence
VGDMPVYLTFDIDCLDPAFAPGTGTPVIGGLT

SEQ ID NO: 48622 - protein, 24 aa, Artificial sequence
  Protein classification predicting sequence
LNIVGMDVVEVAPAYDQSEITALA

SEQ ID NO: 48623 - protein, 17 aa, Artificial sequence
  Protein classification predicting sequence
ITALAGATIALEMLYLQ

SEQ ID NO: 48624 - protein, 8 aa, Artificial sequence
  Protein classification predicting sequence
SNAFGFLR

SEQ ID NO: 48625 - protein, 7 aa, Artificial sequence
  Protein classification predicting sequence
STNLAWE

SEQ ID NO: 48626 - protein, 6 aa, Artificial sequence
  Protein classification predicting sequence
DCGDLV

SEQ ID NO: 48627 - protein, 9 aa, Artificial sequence
  Protein classification predicting sequence
QVNDRGVDD

SEQ ID NO: 48628 - protein, 16 aa, Artificial sequence
  Protein classification predicting sequence
YDQSDITALAGATIAL

SEQ ID NO: 48629 - protein, 42 aa, Artificial sequence
  Protein classification predicting sequence
RFPWNFDMRERLNVVDCGDLVYAFGDAREMSEKLQAHAEKLL

SEQ ID NO: 48630 - protein, 28 aa, Artificial sequence
  Protein classification predicting sequence
HSVQIGIRTEFDKDNGFTVLDACQVNDR

SEQ ID NO: 48631 - protein, 299 aa, Artificial sequence
  Protein classification predicting sequence
RLLSLLALGGFVLANPVFADQNFARNEKEAKDSAITFIQKSAAIKAGARSAEDIKLDKVNLGGELSGSNMYVYNISTGGFVIVSGDKRSPEILGYSTSGSFDANGKENIASFMESYVEQIKENKKLDTTYAGTAEIKQPVVKSLLDSKGIHYNQGNPYNLLTPVIEKVKPGEQSFVGQHAATGCVATATAQIMKYHNYPNKGLKDYTYTLSSNNPYFNHPKNLFAAISTRQYNWNNILPTYSGRESNVQKMAISELMADVGISVDMDYGPSSGSAGSSRVQRALKENFGYNQSVHQINR

SEQ ID NO: 48632 - protein, 7 aa, Artificial sequence
  Protein classification predicting sequence
GVNLGGW

SEQ ID NO: 48633 - protein, 53 aa, Artificial sequence
  Protein classification predicting sequence
ANVILPNNDRHQITDTTNGHYAPVTYIQVEAPTGTFIASGVVVGKDTLLTNKH

SEQ ID NO: 48634 - protein, 14 aa, Artificial sequence
  Protein classification predicting sequence
VDATHGDPHALKAF

SEQ ID NO: 48635 - protein, 123 aa, Artificial sequence
  Protein classification predicting sequence
SAINQDNYPNGGFTAEQITKYSGEGDLAIVKFSPNEQNKHIGEVVKPATMSNNAETQVNQNITVTGYPGDKPVATMWESKGKITYLKGEAMQYDLSTTGGNSGSPVFNEKNEVIGIHWGGVPN

SEQ ID NO: 48636 - protein, 22 aa, Artificial sequence
  Protein classification predicting sequence
FNGAVFINENVRNFLKQNIEDI

SEQ ID NO: 48637 - protein, 9 aa, Artificial sequence
  Protein classification predicting sequence
PNNPDNPDN

SEQ ID NO: 48638 - protein, 6 aa, Artificial sequence
  Protein classification predicting sequence
PNNPDN

SEQ ID NO: 48639 - protein, 14 aa, Artificial sequence
  Protein classification predicting sequence
NPDNPNNPDNPNNP

SEQ ID NO: 48640 - protein, 24 aa, Artificial sequence
  Protein classification predicting sequence
NKLENFKIRETQGNNGWCAGYTMS

SEQ ID NO: 48641 - protein, 23 aa, Artificial sequence
  Protein classification predicting sequence
WDNGFMTQDAKNNVIPVSNGDHY

SEQ ID NO: 48642 - protein, 17 aa, Artificial sequence
  Protein classification predicting sequence
TPIANAESNSNIKAKDK

SEQ ID NO: 48643 - protein, 12 aa, Artificial sequence
  Protein classification predicting sequence
SSSSSKYTINVS

SEQ ID NO: 48644 - protein, 80 aa, Artificial sequence
  Protein classification predicting sequence
HVQVNVEDKSVPTDVRNLAQKDYLSYVTSLDKIYNKEKASYTLGEPFKIYKFNKKSDGNYYFPVLNTEGNIDYIVTISPK

SEQ ID NO: 48645 - protein, 37 aa, Artificial sequence
  Protein classification predicting sequence
YKDQQITILTNSKGYYVVTQNHKAKLVLKTPRLEDKK

SEQ ID NO: 48646 - protein, 14 aa, Artificial sequence
  Protein classification predicting sequence
FQFTGLTPREMIYF

SEQ ID NO: 48647 - protein, 30 aa, Artificial sequence
  Protein classification predicting sequence
QTQGRSPQLLNRMTTYNEVDNLTKNNKGIA

SEQ ID NO: 48648 - protein, 25 aa, Artificial sequence
  Protein classification predicting sequence
LGSRVESRNGMHAGHAMAVVGNAKL

SEQ ID NO: 48649 - protein, 32 aa, Artificial sequence
  Protein classification predicting sequence
SLSVTPIANAESNSNIKAKDKKHVQVNVEDKS

SEQ ID NO: 48650 - protein, 18 aa, Artificial sequence
  Protein classification predicting sequence
AIVCSPKFQETGFFKLTD

SEQ ID NO: 48651 - protein, 9 aa, Artificial sequence
  Protein classification predicting sequence
CRQKGFHPH

SEQ ID NO: 48652 - protein, 9 aa, Artificial sequence
  Protein classification predicting sequence
AFPKAEELK

SEQ ID NO: 48653 - protein, 27 aa, Artificial sequence
  Protein classification predicting sequence
TLGWIHTHPTQTAFLSSVDLHTHCSYQ

SEQ ID NO: 48654 - protein, 8 aa, Artificial sequence
  Protein classification predicting sequence
RGGASFVP

SEQ ID NO: 48655 - protein, 7 aa, Artificial sequence
  Protein classification predicting sequence
LYAVKVL

SEQ ID NO: 48656 - protein, 6 aa, Artificial sequence
  Protein classification predicting sequence
GGASFV

SEQ ID NO: 48657 - protein, 11 aa, Artificial sequence
  Protein classification predicting sequence
SFYYGKGLINV

SEQ ID NO: 48658 - protein, 8 aa, Artificial sequence
  Protein classification predicting sequence
WISLLFAL

SEQ ID NO: 48659 - protein, 7 aa, Artificial sequence
  Protein classification predicting sequence
LIFTMAF

SEQ ID NO: 48660 - protein, 13 aa, Artificial sequence
  Protein classification predicting sequence
EKKYIVGFKQTMS

SEQ ID NO: 48661 - protein, 21 aa, Artificial sequence
  Protein classification predicting sequence
AKKKDVISEKGGKVQKQFKYV

SEQ ID NO: 48662 - protein, 20 aa, Artificial sequence
  Protein classification predicting sequence
EKAVKELKKDPSVAYVEEDH

SEQ ID NO: 48663 - protein, 34 aa, Artificial sequence
  Protein classification predicting sequence
SQIKAPALHSQGYTGSNVKVAVIDSGIDSSHPDL

SEQ ID NO: 48664 - protein, 16 aa, Artificial sequence
  Protein classification predicting sequence
GSGQYSWIINGIEWAI

SEQ ID NO: 48665 - protein, 17 aa, Artificial sequence
  Protein classification predicting sequence
ELDVMAPGVSIQSTLPG

SEQ ID NO: 48666 - protein, 10 aa, Artificial sequence
  Protein classification predicting sequence
YGAYNGTSMA

SEQ ID NO: 48667 - protein, 7 aa, Artificial sequence
  Protein classification predicting sequence
SHPDLNV

SEQ ID NO: 48668 - protein, 31 aa, Artificial sequence
  Protein classification predicting sequence
GSTALKTVVDKAVSSGIVVAAAAGNEGSSGS

SEQ ID NO: 48669 - protein, 9 aa, Artificial sequence
  Protein classification predicting sequence
DPLDGTTNF

SEQ ID NO: 48670 - protein, 8 aa, Artificial sequence
  Protein classification predicting sequence
RAARKAGN

SEQ ID NO: 48671 - protein, 8 aa, Artificial sequence
  Protein classification predicting sequence
PHFAVSIA

SEQ ID NO: 48672 - protein, 12 aa, Artificial sequence
  Protein classification predicting sequence
WIVDPLDGTTNF

SEQ ID NO: 48673 - protein, 6 aa, Artificial sequence
  Protein classification predicting sequence
DCVKLA

SEQ ID NO: 48674 - protein, 9 aa, Artificial sequence
  Protein classification predicting sequence
PDLVLSGIN

SEQ ID NO: 48675 - protein, 6 aa, Artificial sequence
  Protein classification predicting sequence
SGINLG

SEQ ID NO: 48676 - protein, 6 aa, Artificial sequence
  Protein classification predicting sequence
LYSGTV

SEQ ID NO: 48677 - protein, 6 aa, Artificial sequence
  Protein classification predicting sequence
VAPDRN

SEQ ID NO: 48678 - protein, 9 aa, Artificial sequence
  Protein classification predicting sequence
GEDITYSGT

SEQ ID NO: 48679 - protein, 6 aa, Artificial sequence
  Protein classification predicting sequence
GTPTDC

SEQ ID NO: 48680 - protein, 9 aa, Artificial sequence
  Protein classification predicting sequence
LYSGTVAAA

SEQ ID NO: 48681 - protein, 9 aa, Artificial sequence
  Protein classification predicting sequence
VSVTPLRLD

SEQ ID NO: 48682 - protein, 6 aa, Artificial sequence
  Protein classification predicting sequence
YSGTVA

SEQ ID NO: 48683 - protein, 7 aa, Artificial sequence
  Protein classification predicting sequence
GTPTDCV

SEQ ID NO: 48684 - protein, 10 aa, Artificial sequence
  Protein classification predicting sequence
SGTVAGAIEG

SEQ ID NO: 48685 - protein, 6 aa, Artificial sequence
  Protein classification predicting sequence
LTNDDG

SEQ ID NO: 48686 - protein, 13 aa, Artificial sequence
  Protein classification predicting sequence
RDRSGASNSLTLD

SEQ ID NO: 48687 - protein, 8 aa, Artificial sequence
  Protein classification predicting sequence
SLTLDRPL

SEQ ID NO: 48688 - protein, 7 aa, Artificial sequence
  Protein classification predicting sequence
LLTNDDG

SEQ ID NO: 48689 - protein, 6 aa, Artificial sequence
  Protein classification predicting sequence
SNDDGV

SEQ ID NO: 48690 - protein, 12 aa, Artificial sequence
  Protein classification predicting sequence
AAMEGRFLGLPA

SEQ ID NO: 48691 - protein, 6 aa, Artificial sequence
  Protein classification predicting sequence
VSITPL

SEQ ID NO: 48692 - protein, 7 aa, Artificial sequence
  Protein classification predicting sequence
SGTVAAA

SEQ ID NO: 48693 - protein, 7 aa, Artificial sequence
  Protein classification predicting sequence
ERSATGH

SEQ ID NO: 48694 - protein, 7 aa, Artificial sequence
  Protein classification predicting sequence
APDRNRS

SEQ ID NO: 48695 - protein, 8 aa, Artificial sequence
  Protein classification predicting sequence
YSGTVAAA

SEQ ID NO: 48696 - protein, 6 aa, Artificial sequence
  Protein classification predicting sequence
NMGDDT

SEQ ID NO: 48697 - protein, 7 aa, Artificial sequence
  Protein classification predicting sequence
GYVSITP

SEQ ID NO: 48698 - protein, 7 aa, Artificial sequence
  Protein classification predicting sequence
GTPADCV

SEQ ID NO: 48699 - protein, 8 aa, Artificial sequence
  Protein classification predicting sequence
DAGAGTDF

SEQ ID NO: 48700 - protein, 7 aa, Artificial sequence
  Protein classification predicting sequence
PDLVLSG

SEQ ID NO: 48701 - protein, 6 aa, Artificial sequence
  Protein classification predicting sequence
SNSLTL

SEQ ID NO: 48702 - protein, 7 aa, Artificial sequence
  Protein classification predicting sequence
VSITPLQ

SEQ ID NO: 48703 - protein, 6 aa, Artificial sequence
  Protein classification predicting sequence
SGINHG

SEQ ID NO: 48704 - protein, 7 aa, Artificial sequence
  Protein classification predicting sequence
LSGINHG

SEQ ID NO: 48705 - protein, 10 aa, Artificial sequence
  Protein classification predicting sequence
SGTVAAALEG

SEQ ID NO: 48706 - protein, 10 aa, Artificial sequence
  Protein classification predicting sequence
LLLNLNIPPC

SEQ ID NO: 48707 - protein, 7 aa, Artificial sequence
  Protein classification predicting sequence
WTRLSIR

SEQ ID NO: 48708 - protein, 7 aa, Artificial sequence
  Protein classification predicting sequence
VTVVCPD

SEQ ID NO: 48709 - protein, 6 aa, Artificial sequence
  Protein classification predicting sequence
LNVNVP

SEQ ID NO: 48710 - protein, 7 aa, Artificial sequence
  Protein classification predicting sequence
LNVNIPN

SEQ ID NO: 48711 - protein, 7 aa, Artificial sequence
  Protein classification predicting sequence
TRLGKRH

SEQ ID NO: 48712 - protein, 7 aa, Artificial sequence
  Protein classification predicting sequence
SEPLRLR

SEQ ID NO: 48713 - protein, 10 aa, Artificial sequence
  Protein classification predicting sequence
SDDVWVVAPE

SEQ ID NO: 48714 - protein, 18 aa, Artificial sequence
  Protein classification predicting sequence
DQSGLAHSLTLSEPLRLR

SEQ ID NO: 48715 - protein, 8 aa, Artificial sequence
  Protein classification predicting sequence
NLNFPNCA

SEQ ID NO: 48716 - protein, 8 aa, Artificial sequence
  Protein classification predicting sequence
DLVVSGIN

SEQ ID NO: 48717 - protein, 9 aa, Artificial sequence
  Protein classification predicting sequence
SGASNSLTL

SEQ ID NO: 48718 - protein, 6 aa, Artificial sequence
  Protein classification predicting sequence
GTDFHA

SEQ ID NO: 48719 - protein, 13 aa, Artificial sequence
  Protein classification predicting sequence
VVCPDRERSATGH

SEQ ID NO: 48720 - protein, 6 aa, Artificial sequence
  Protein classification predicting sequence
VVSGIN

SEQ ID NO: 48721 - protein, 6 aa, Artificial sequence
  Protein classification predicting sequence
GTPADC

SEQ ID NO: 48722 - protein, 7 aa, Artificial sequence
  Protein classification predicting sequence
LVSNDDG

SEQ ID NO: 48723 - protein, 7 aa, Artificial sequence
  Protein classification predicting sequence
NHGANLG

SEQ ID NO: 48724 - protein, 9 aa, Artificial sequence
  Protein classification predicting sequence
VVAPDRDRS

SEQ ID NO: 48725 - protein, 18 aa, Artificial sequence
  Protein classification predicting sequence
IVAPDRNRSGASNSLTLE

SEQ ID NO: 48726 - protein, 14 aa, Artificial sequence
  Protein classification predicting sequence
TPLQVDLTAHESLR

SEQ ID NO: 48727 - protein, 7 aa, Artificial sequence
  Protein classification predicting sequence
ANLGDDV

SEQ ID NO: 48728 - protein, 7 aa, Artificial sequence
  Protein classification predicting sequence
LNVNVPD

SEQ ID NO: 48729 - protein, 10 aa, Artificial sequence
  Protein classification predicting sequence
GQLTGIENIE

SEQ ID NO: 48730 - protein, 14 aa, Artificial sequence
  Protein classification predicting sequence
LVIDEALSVGDQTF

SEQ ID NO: 48731 - protein, 8 aa, Artificial sequence
  Protein classification predicting sequence
SDKIKGLF

SEQ ID NO: 48732 - protein, 8 aa, Artificial sequence
  Protein classification predicting sequence
KTIFFVSH

SEQ ID NO: 48733 - protein, 9 aa, Artificial sequence
  Protein classification predicting sequence
NGETSLIAI

SEQ ID NO: 48734 - protein, 8 aa, Artificial sequence
  Protein classification predicting sequence
DEALSVGD

SEQ ID NO: 48735 - protein, 8 aa, Artificial sequence
  Protein classification predicting sequence
IGDFINQP

SEQ ID NO: 48736 - protein, 8 aa, Artificial sequence
  Protein classification predicting sequence
IIEFSELG

SEQ ID NO: 48737 - protein, 13 aa, Artificial sequence
  Protein classification predicting sequence
YSSGMRAKLGFSI

SEQ ID NO: 48738 - protein, 7 aa, Artificial sequence
  Protein classification predicting sequence
AKLGFSI

SEQ ID NO: 48739 - protein, 8 aa, Artificial sequence
  Protein classification predicting sequence
FADIGDFI

SEQ ID NO: 48740 - protein, 10 aa, Artificial sequence
  Protein classification predicting sequence
GMRSRLGFAI

SEQ ID NO: 48741 - protein, 11 aa, Artificial sequence
  Protein classification predicting sequence
DEALSVGDQTF

SEQ ID NO: 48742 - protein, 8 aa, Artificial sequence
  Protein classification predicting sequence
TKEYRIYR

SEQ ID NO: 48743 - protein, 7 aa, Artificial sequence
  Protein classification predicting sequence
KDALIPK

SEQ ID NO: 48744 - protein, 20 aa, Artificial sequence
  Protein classification predicting sequence
EGDVIGLVGINGSGKSTLSN

SEQ ID NO: 48745 - protein, 18 aa, Artificial sequence
  Protein classification predicting sequence
ENIEFKMLCMGFKRKEIK

SEQ ID NO: 48746 - protein, 52 aa, Artificial sequence
  Protein classification predicting sequence
IIEFSELGEFIYQPVKKYSSGMRAKLGFSINITVNPDILVIDEALSVGDQTF

SEQ ID NO: 48747 - protein, 11 aa, Artificial sequence
  Protein classification predicting sequence
QKCLDKIYEFK

SEQ ID NO: 48748 - protein, 14 aa, Artificial sequence
  Protein classification predicting sequence
FCTKIAWIEGGKLK

SEQ ID NO: 48749 - protein, 22 aa, Artificial sequence
  Protein classification predicting sequence
FKKKSKAEQKEFRNKLDESRFV

SEQ ID NO: 48750 - protein, 9 aa, Artificial sequence
  Protein classification predicting sequence
LITHDIEEA

SEQ ID NO: 48751 - protein, 11 aa, Artificial sequence
  Protein classification predicting sequence
GPGAERGVVFQ

SEQ ID NO: 48752 - protein, 33 aa, Artificial sequence
  Protein classification predicting sequence
GPGAERGVVFQNEGLLPWRNVQDNVAFGLQLAG

SEQ ID NO: 48753 - protein, 12 aa, Artificial sequence
  Protein classification predicting sequence
EKMQRLEIAHQM

SEQ ID NO: 48754 - protein, 11 aa, Artificial sequence
  Protein classification predicting sequence
LITHDIEEAVF

SEQ ID NO: 48755 - protein, 8 aa, Artificial sequence
  Protein classification predicting sequence
VVFQDDAL

SEQ ID NO: 48756 - protein, 20 aa, Artificial sequence
  Protein classification predicting sequence
VVLGPSGCGKTTLLNLIAGF

SEQ ID NO: 48757 - protein, 16 aa, Artificial sequence
  Protein classification predicting sequence
AERGVVFQNEGLLPWR

SEQ ID NO: 48758 - protein, 20 aa, Artificial sequence
  Protein classification predicting sequence
DEPFGALDAFTREQMQELLL

SEQ ID NO: 48759 - protein, 9 aa, Artificial sequence
  Protein classification predicting sequence
GYCLGGALA

SEQ ID NO: 48760 - protein, 7 aa, Artificial sequence
  Protein classification predicting sequence
TPHRGSE

SEQ ID NO: 48761 - protein, 19 aa, Artificial sequence
  Protein classification predicting sequence
LIGKQTDELGHTVMRFEQR

SEQ ID NO: 48762 - protein, 9 aa, Artificial sequence
  Protein classification predicting sequence
PGGGQPVAG

SEQ ID NO: 48763 - protein, 10 aa, Artificial sequence
  Protein classification predicting sequence
LPGCLALAAL

SEQ ID NO: 48764 - protein, 14 aa, Artificial sequence
  Protein classification predicting sequence
GEADCGLRPLFEKK

SEQ ID NO: 48765 - protein, 16 aa, Artificial sequence
  Protein classification predicting sequence
DLLVRIGKHSRTRYER

SEQ ID NO: 48766 - protein, 10 aa, Artificial sequence
  Protein classification predicting sequence
KIYIHPRYNW

SEQ ID NO: 48767 - protein, 11 aa, Artificial sequence
  Protein classification predicting sequence
QPSVLQVVNLP

SEQ ID NO: 48768 - protein, 13 aa, Artificial sequence
  Protein classification predicting sequence
GKYGFYTHVFRLK

SEQ ID NO: 48769 - protein, 11 aa, Artificial sequence
  Protein classification predicting sequence
INSTTHPGADL

SEQ ID NO: 48770 - protein, 19 aa, Artificial sequence
  Protein classification predicting sequence
KRGDACEGDSGGPFVMKSP

SEQ ID NO: 48771 - protein, 9 aa, Artificial sequence
  Protein classification predicting sequence
TEERLQELG

SEQ ID NO: 48772 - protein, 8 aa, Artificial sequence
  Protein classification predicting sequence
VYLQRFRP

SEQ ID NO: 48773 - protein, 11 aa, Artificial sequence
  Protein classification predicting sequence
DFGYAVGEVEA

SEQ ID NO: 48774 - protein, 21 aa, Artificial sequence
  Protein classification predicting sequence
AVHCVAGLGRAPVLVALALIE

SEQ ID NO: 48775 - protein, 26 aa, Artificial sequence
  Protein classification predicting sequence
LVEKEGIHVLDWPFDDGAPPSNQIVD

SEQ ID NO: 48776 - protein, 18 aa, Artificial sequence
  Protein classification predicting sequence
NMRFLITHNPTNATLNKF

SEQ ID NO: 48777 - protein, 10 aa, Artificial sequence
  Protein classification predicting sequence
EELKKYGVTT

SEQ ID NO: 48778 - protein, 19 aa, Artificial sequence
  Protein classification predicting sequence
VEKEGIHVLDWPFDDGAPP

SEQ ID NO: 48779 - protein, 8 aa, Artificial sequence
  Protein classification predicting sequence
NQIVDDWL

SEQ ID NO: 48780 - protein, 9 aa, Artificial sequence
  Protein classification predicting sequence
KFREEPGCC

SEQ ID NO: 48781 - protein, 38 aa, Artificial sequence
  Protein classification predicting sequence
GMKYEDAVQFIRQKRRGAFNSKQLLYLEKYRPKMRLRF

SEQ ID NO: 48782 - protein, 14 aa, Artificial sequence
  Protein classification predicting sequence
MRFLITHNPTNATL

SEQ ID NO: 48783 - protein, 10 aa, Artificial sequence
  Protein classification predicting sequence
DWPFDDGAPP

SEQ ID NO: 48784 - protein, 7 aa, Artificial sequence
  Protein classification predicting sequence
GMKYEDA

SEQ ID NO: 48785 - protein, 10 aa, Artificial sequence
  Protein classification predicting sequence
QFIRQKRRGA

SEQ ID NO: 48786 - protein, 8 aa, Artificial sequence
  Protein classification predicting sequence
YLEKYRPK

SEQ ID NO: 48787 - protein, 7 aa, Artificial sequence
  Protein classification predicting sequence
RRGARSY

SEQ ID NO: 48788 - protein, 7 aa, Artificial sequence
  Protein classification predicting sequence
CFNGGTC

SEQ ID NO: 48789 - protein, 8 aa, Artificial sequence
  Protein classification predicting sequence
SDFVCQCP

SEQ ID NO: 48790 - protein, 9 aa, Artificial sequence
  Protein classification predicting sequence
ATCYKDQGV

SEQ ID NO: 48791 - protein, 6 aa, Artificial sequence
  Protein classification predicting sequence
LGRTYR

SEQ ID NO: 48792 - protein, 6 aa, Artificial sequence
  Protein classification predicting sequence
DNHMTL

SEQ ID NO: 48793 - protein, 6 aa, Artificial sequence
  Protein classification predicting sequence
KPWCYV

SEQ ID NO: 48794 - protein, 7 aa, Artificial sequence
  Protein classification predicting sequence
GVTYRGT

SEQ ID NO: 48795 - protein, 8 aa, Artificial sequence
  Protein classification predicting sequence
GERFLCGG

SEQ ID NO: 48796 - protein, 8 aa, Artificial sequence
  Protein classification predicting sequence
LISSCWVL

SEQ ID NO: 48797 - protein, 19 aa, Artificial sequence
  Protein classification predicting sequence
LFNKTVTNNMLCAGDTRSG

SEQ ID NO: 48798 - protein, 17 aa, Artificial sequence
  Protein classification predicting sequence
GGLFTDITSHPWQAAIF

SEQ ID NO: 48799 - protein, 16 aa, Artificial sequence
  Protein classification predicting sequence
QLPDWTECELSGYGKH

SEQ ID NO: 48800 - protein, 19 aa, Artificial sequence
  Protein classification predicting sequence
EEELSLTFALRQQNVERLS

SEQ ID NO: 48801 - protein, 8 aa, Artificial sequence
  Protein classification predicting sequence
LVQAVSDP

SEQ ID NO: 48802 - protein, 8 aa, Artificial sequence
  Protein classification predicting sequence
YGKYLTLE

SEQ ID NO: 48803 - protein, 10 aa, Artificial sequence
  Protein classification predicting sequence
TQDFLTCWLS

SEQ ID NO: 48804 - protein, 15 aa, Artificial sequence
  Protein classification predicting sequence
GTVGLHLGVTPSVIR

SEQ ID NO: 48805 - protein, 15 aa, Artificial sequence
  Protein classification predicting sequence
NNSQACAQFLEQYFH

SEQ ID NO: 48806 - protein, 21 aa, Artificial sequence
  Protein classification predicting sequence
YLMSAGANISTWVYSSPGRHE

SEQ ID NO: 48807 - protein, 8 aa, Artificial sequence
  Protein classification predicting sequence
QEPFLQWL

SEQ ID NO: 48808 - protein, 6 aa, Artificial sequence
  Protein classification predicting sequence
RHQFRP

SEQ ID NO: 48809 - protein, 13 aa, Artificial sequence
  Protein classification predicting sequence
PPLGFLNPRLYQQ

SEQ ID NO: 48810 - protein, 98 aa, Artificial sequence
  Protein classification predicting sequence
EDSLSSAYIQRVNTELMKAAARGLTLLFASGDSGAGCWSVSGRHQFRPTFPASSPYVTTVGGTSFQEPFLITNEIVDYISGGGFSNVFPRPSYQEEAV

SEQ ID NO: 48811 - protein, 6 aa, Artificial sequence
  Protein classification predicting sequence
PEPDQR

SEQ ID NO: 48812 - protein, 10 aa, Artificial sequence
  Protein classification predicting sequence
LPPGWVSLGR

SEQ ID NO: 48813 - protein, 13 aa, Artificial sequence
  Protein classification predicting sequence
RQAELLLPGAEFH

SEQ ID NO: 48814 - protein, 7 aa, Artificial sequence
  Protein classification predicting sequence
RQRPEPQ

SEQ ID NO: 48815 - protein, 9 aa, Artificial sequence
  Protein classification predicting sequence
LHLGVTPSV

SEQ ID NO: 48816 - protein, 14 aa, Artificial sequence
  Protein classification predicting sequence
QGRGRAGIEASLDV

SEQ ID NO: 48817 - protein, 18 aa, Artificial sequence
  Protein classification predicting sequence
LPHVHTVSYGDDEDSLSS

SEQ ID NO: 48818 - protein, 8 aa, Artificial sequence
  Protein classification predicting sequence
YIQRVNTE

SEQ ID NO: 48819 - protein, 16 aa, Artificial sequence
  Protein classification predicting sequence
MKAAARGLTLLFASGD

SEQ ID NO: 48820 - protein, 11 aa, Artificial sequence
  Protein classification predicting sequence
GAGCWSVSGRH

SEQ ID NO: 48821 - protein, 16 aa, Artificial sequence
  Protein classification predicting sequence
FPASSPYVTTVGGTSF

SEQ ID NO: 48822 - protein, 30 aa, Artificial sequence
  Protein classification predicting sequence
HLPPSSYFNASGRAYPDVAALSDGYWVVSN

SEQ ID NO: 48823 - protein, 17 aa, Artificial sequence
  Protein classification predicting sequence
GRPPLGFLNPRLYQQHG

SEQ ID NO: 48824 - protein, 7 aa, Artificial sequence
  Protein classification predicting sequence
GCHESCL

SEQ ID NO: 48825 - protein, 65 aa, Artificial sequence
  Protein classification predicting sequence
EDSLSSAYIQRVNTELMKAAARGLTLLFASGDSGAGCWSVSGRHQFRPTFPASSPYVTTVGGTSF

SEQ ID NO: 48826 - protein, 17 aa, Artificial sequence
  Protein classification predicting sequence
RSPHPYQLPQALAPHVD

SEQ ID NO: 48827 - protein, 7 aa, Artificial sequence
  Protein classification predicting sequence
GLHRFPP

SEQ ID NO: 48828 - protein, 12 aa, Artificial sequence
  Protein classification predicting sequence
FAHQASVARVVG

SEQ ID NO: 48829 - protein, 14 aa, Artificial sequence
  Protein classification predicting sequence
VDYISGGGFSNVFP

SEQ ID NO: 48830 - protein, 6 aa, Artificial sequence
  Protein classification predicting sequence
PDSKTF

SEQ ID NO: 48831 - protein, 6 aa, Artificial sequence
  Protein classification predicting sequence
GHIPNG

SEQ ID NO: 48832 - protein, 8 aa, Artificial sequence
  Protein classification predicting sequence
QWDFPNAW

SEQ ID NO: 48833 - protein, 6 aa, Artificial sequence
  Protein classification predicting sequence
QDGFGW

SEQ ID NO: 48834 - protein, 7 aa, Artificial sequence
  Protein classification predicting sequence
VVPGGRF

SEQ ID NO: 48835 - protein, 9 aa, Artificial sequence
  Protein classification predicting sequence
EFYYWDSYW

SEQ ID NO: 48836 - protein, 6 aa, Artificial sequence
  Protein classification predicting sequence
DFSSRW

SEQ ID NO: 48837 - protein, 6 aa, Artificial sequence
  Protein classification predicting sequence
TGEQWD

SEQ ID NO: 48838 - protein, 6 aa, Artificial sequence
  Protein classification predicting sequence
VPGGRF

SEQ ID NO: 48839 - protein, 15 aa, Artificial sequence
  Protein classification predicting sequence
VPGGRFNELYGWDSY

SEQ ID NO: 48840 - protein, 7 aa, Artificial sequence
  Protein classification predicting sequence
EGFGWVN

SEQ ID NO: 48841 - protein, 7 aa, Artificial sequence
  Protein classification predicting sequence
GFGWTNG

SEQ ID NO: 48842 - protein, 7 aa, Artificial sequence
  Protein classification predicting sequence
LASIRTT

SEQ ID NO: 48843 - protein, 7 aa, Artificial sequence
  Protein classification predicting sequence
IVPVDLN

SEQ ID NO: 48844 - protein, 7 aa, Artificial sequence
  Protein classification predicting sequence
YGHIPNG

SEQ ID NO: 48845 - protein, 16 aa, Artificial sequence
  Protein classification predicting sequence
PYVVPGGRFREVYYWD

SEQ ID NO: 48846 - protein, 7 aa, Artificial sequence
  Protein classification predicting sequence
MLDNFAY

SEQ ID NO: 48847 - protein, 9 aa, Artificial sequence
  Protein classification predicting sequence
YYLSRSQPP

SEQ ID NO: 48848 - protein, 7 aa, Artificial sequence
  Protein classification predicting sequence
FALMVEL

SEQ ID NO: 48849 - protein, 7 aa, Artificial sequence
  Protein classification predicting sequence
KEYAYWM

SEQ ID NO: 48850 - protein, 14 aa, Artificial sequence
  Protein classification predicting sequence
QQWDAPNGWAPLQW

SEQ ID NO: 48851 - protein, 15 aa, Artificial sequence
  Protein classification predicting sequence
PNSDPLMILADYRMQ

SEQ ID NO: 48852 - protein, 9 aa, Artificial sequence
  Protein classification predicting sequence
SGFDLRHFV

SEQ ID NO: 48853 - protein, 19 aa, Artificial sequence
  Protein classification predicting sequence
GQSLREHIDGLWPVLTRST

SEQ ID NO: 48854 - protein, 27 aa, Artificial sequence
  Protein classification predicting sequence
LNRYWDDRDTPRPESWVEDIATAKSNP

SEQ ID NO: 48855 - protein, 31 aa, Artificial sequence
  Protein classification predicting sequence
RPATEIYRDLRSAAASGWDFSSRWMDNPQQL

SEQ ID NO: 48856 - protein, 7 aa, Artificial sequence
  Protein classification predicting sequence
LANARQK

SEQ ID NO: 48857 - protein, 20 aa, Artificial sequence
  Protein classification predicting sequence
QLTAAALFPLYVNAAAKDRA

SEQ ID NO: 48858 - protein, 8 aa, Artificial sequence
  Protein classification predicting sequence
HLLQPGGL

SEQ ID NO: 48859 - protein, 23 aa, Artificial sequence
  Protein classification predicting sequence
TTSVKSGQQWDAPNGWAPLQWVA

SEQ ID NO: 48860 - protein, 8 aa, Artificial sequence
  Protein classification predicting sequence
EGLQNYGQ

SEQ ID NO: 48861 - protein, 14 aa, Artificial sequence
  Protein classification predicting sequence
GGGGEYPLQDGFGW

SEQ ID NO: 48862 - protein, 13 aa, Artificial sequence
  Protein classification predicting sequence
NGVTLKMLDLICP

SEQ ID NO: 48863 - protein, 11 aa, Artificial sequence
  Protein classification predicting sequence
MVELLAQHEGD

SEQ ID NO: 48864 - protein, 18 aa, Artificial sequence
  Protein classification predicting sequence
FLTNVQHTYDREKKLVEK

SEQ ID NO: 48865 - protein, 6 aa, Artificial sequence
  Protein classification predicting sequence
QITIED

SEQ ID NO: 48866 - protein, 11 aa, Artificial sequence
  Protein classification predicting sequence
QITIEDTGPKV

SEQ ID NO: 48867 - protein, 12 aa, Artificial sequence
  Protein classification predicting sequence
HDRAVRESGHDT

SEQ ID NO: 48868 - protein, 7 aa, Artificial sequence
  Protein classification predicting sequence
AEYGNQG

SEQ ID NO: 48869 - protein, 11 aa, Artificial sequence
  Protein classification predicting sequence
YFTMLGLAESG

SEQ ID NO: 48870 - protein, 27 aa, Artificial sequence
  Protein classification predicting sequence
YFTMLGLAESGHWDKVADMVANFAHEI

SEQ ID NO: 48871 - protein, 73 aa, Artificial sequence
  Protein classification predicting sequence
TYGHIPNGNRSYYLSRSQPPFFALMVELLAQHEGDAALKQYLPQMQKEYAYWMDGVENLQAGQQEKRVVKLQD

SEQ ID NO: 48872 - protein, 7 aa, Artificial sequence
  Protein classification predicting sequence
FDLRKFV

SEQ ID NO: 48873 - protein, 7 aa, Artificial sequence
  Protein classification predicting sequence
SSLLALP

SEQ ID NO: 48874 - protein, 12 aa, Artificial sequence
  Protein classification predicting sequence
YYWDSYFTMLGL

SEQ ID NO: 48875 - protein, 6 aa, Artificial sequence
  Protein classification predicting sequence
LNRYWD

SEQ ID NO: 48876 - protein, 7 aa, Artificial sequence
  Protein classification predicting sequence
RDTPRPE

SEQ ID NO: 48877 - protein, 11 aa, Artificial sequence
  Protein classification predicting sequence
LQDGFGWTNGV

SEQ ID NO: 48878 - protein, 9 aa, Artificial sequence
  Protein classification predicting sequence
VYRDLRAGA

SEQ ID NO: 48879 - protein, 12 aa, Artificial sequence
  Protein classification predicting sequence
NENPVNRLSRLI

SEQ ID NO: 48880 - protein, 9 aa, Artificial sequence
  Protein classification predicting sequence
PNGWAPLQW

SEQ ID NO: 48881 - protein, 10 aa, Artificial sequence
  Protein classification predicting sequence
FVENHFWLPE

SEQ ID NO: 48882 - protein, 12 aa, Artificial sequence
  Protein classification predicting sequence
NSLKEHIDQLWP

SEQ ID NO: 48883 - protein, 20 aa, Artificial sequence
  Protein classification predicting sequence
GRLASIRTTQFIPIDLNAFL

SEQ ID NO: 48884 - protein, 15 aa, Artificial sequence
  Protein classification predicting sequence
KLESAIANISALKGE

SEQ ID NO: 48885 - protein, 10 aa, Artificial sequence
  Protein classification predicting sequence
TEALFRQKAS

SEQ ID NO: 48886 - protein, 8 aa, Artificial sequence
  Protein classification predicting sequence
YLWDDENG

SEQ ID NO: 48887 - protein, 9 aa, Artificial sequence
  Protein classification predicting sequence
YRDYDWRRE

SEQ ID NO: 48888 - protein, 19 aa, Artificial sequence
  Protein classification predicting sequence
IVPLYVGMANHEQADRLAN

SEQ ID NO: 48889 - protein, 11 aa, Artificial sequence
  Protein classification predicting sequence
VRSRLLTPGGI

SEQ ID NO: 48890 - protein, 41 aa, Artificial sequence
  Protein classification predicting sequence
ELKLDEMIEAEPEPEMIEGLPASDALTPADRYLELFEHVQS

SEQ ID NO: 48891 - protein, 35 aa, Artificial sequence
  Protein classification predicting sequence
FPDSKTFPDCAPKMDPLDILIRYRKVRRHRDFDLR

SEQ ID NO: 48892 - protein, 122 aa, Artificial sequence
  Protein classification predicting sequence
LTREPQDHIPWSSLLALPQSYIVPGGRFSETYYWDSYFTMLGLAESGREDLLKCMADNFAWMIENYGHIPNGNRTYYLSRSQPPVFALMVELFEEDGVRGARRYLDHLKMEYAFWMDGAESL

SEQ ID NO: 48893 - protein, 69 aa, Artificial sequence
  Protein classification predicting sequence
NQAYRHVVRMPDGSLLNRYWDDRDTPRDESWLEDVETAKHSGRPPNEVYRDLRAGAASGWDYSSRWLRD

SEQ ID NO: 48894 - protein, 26 aa, Artificial sequence
  Protein classification predicting sequence
EYETGEQWDKPNGWAPLQWMAIQGFK

SEQ ID NO: 48895 - protein, 8 aa, Artificial sequence
  Protein classification predicting sequence
ASEITGLS

SEQ ID NO: 48896 - protein, 7 aa, Artificial sequence
  Protein classification predicting sequence
CLVAHNG

SEQ ID NO: 48897 - protein, 15 aa, Artificial sequence
  Protein classification predicting sequence
TPWQFFTSHPEPELG

SEQ ID NO: 48898 - protein, 15 aa, Artificial sequence
  Protein classification predicting sequence
RMGWDPAVVPDPQDP

SEQ ID NO: 48899 - protein, 7 aa, Artificial sequence
  Protein classification predicting sequence
SHPEPEL

SEQ ID NO: 48900 - protein, 7 aa, Artificial sequence
  Protein classification predicting sequence
EGGEQFI

SEQ ID NO: 48901 - protein, 9 aa, Artificial sequence
  Protein classification predicting sequence
DNDIMLIKL

SEQ ID NO: 48902 - protein, 19 aa, Artificial sequence
  Protein classification predicting sequence
EGGKDSCQGDSGGPVVCNG

SEQ ID NO: 48903 - protein, 7 aa, Artificial sequence
  Protein classification predicting sequence
DKIVGGY

SEQ ID NO: 48904 - protein, 9 aa, Artificial sequence
  Protein classification predicting sequence
GYHFCGGSL

SEQ ID NO: 48905 - protein, 8 aa, Artificial sequence
  Protein classification predicting sequence
NDIMLIKL

SEQ ID NO: 48906 - protein, 9 aa, Artificial sequence
  Protein classification predicting sequence
SVPYQVSLN

SEQ ID NO: 48907 - protein, 10 aa, Artificial sequence
  Protein classification predicting sequence
EQFINAAKII

SEQ ID NO: 48908 - protein, 8 aa, Artificial sequence
  Protein classification predicting sequence
VRLGEHNI

SEQ ID NO: 48909 - protein, 11 aa, Artificial sequence
  Protein classification predicting sequence
CLISGWGNTLS

SEQ ID NO: 48910 - protein, 7 aa, Artificial sequence
  Protein classification predicting sequence
CNGQLQG

SEQ ID NO: 48911 - protein, 10 aa, Artificial sequence
  Protein classification predicting sequence
PGVYTKVCNY

SEQ ID NO: 48912 - protein, 10 aa, Artificial sequence
  Protein classification predicting sequence
GYHFCGGSLI

SEQ ID NO: 48913 - protein, 7 aa, Artificial sequence
  Protein classification predicting sequence
CEASYPG

SEQ ID NO: 48914 - protein, 8 aa, Artificial sequence
  Protein classification predicting sequence
VLEGNEQF

SEQ ID NO: 48915 - protein, 6 aa, Artificial sequence
  Protein classification predicting sequence
IRHPNY

SEQ ID NO: 48916 - protein, 8 aa, Artificial sequence
  Protein classification predicting sequence
DDDKIVGG

SEQ ID NO: 48917 - protein, 9 aa, Artificial sequence
  Protein classification predicting sequence
PGVYTKVCN

SEQ ID NO: 48918 - protein, 8 aa, Artificial sequence
  Protein classification predicting sequence
MCTVSGWG

SEQ ID NO: 48919 - protein, 11 aa, Artificial sequence
  Protein classification predicting sequence
GFLEGGKDSCQ

SEQ ID NO: 48920 - protein, 10 aa, Artificial sequence
  Protein classification predicting sequence
DSGGPVVCNG

SEQ ID NO: 48921 - protein, 14 aa, Artificial sequence
  Protein classification predicting sequence
DSGGPVVCNGQLQG

SEQ ID NO: 48922 - protein, 6 aa, Artificial sequence
  Protein classification predicting sequence
SGWGNT

SEQ ID NO: 48923 - protein, 7 aa, Artificial sequence
  Protein classification predicting sequence
SYPGKIT

SEQ ID NO: 48924 - protein, 25 aa, Artificial sequence
  Protein classification predicting sequence
RMLCAGYQQGGKDACQGDSGGPLVA

SEQ ID NO: 48925 - protein, 7 aa, Artificial sequence
  Protein classification predicting sequence
SAAHCYK

SEQ ID NO: 48926 - protein, 6 aa, Artificial sequence
  Protein classification predicting sequence
KIIRHP

SEQ ID NO: 48927 - protein, 7 aa, Artificial sequence
  Protein classification predicting sequence
SYPGQIT

SEQ ID NO: 48928 - protein, 10 aa, Artificial sequence
  Protein classification predicting sequence
GFLEGGKDSC

SEQ ID NO: 48929 - protein, 10 aa, Artificial sequence
  Protein classification predicting sequence
PQLDGRIVGG

SEQ ID NO: 48930 - protein, 24 aa, Artificial sequence
  Protein classification predicting sequence
ATTISSFPWQISLQRSGSHSCGGS

SEQ ID NO: 48931 - protein, 12 aa, Artificial sequence
  Protein classification predicting sequence
IVTAAHCLQSVS

SEQ ID NO: 48932 - protein, 15 aa, Artificial sequence
  Protein classification predicting sequence
TMVNDIAVIRLSSSL

SEQ ID NO: 48933 - protein, 14 aa, Artificial sequence
  Protein classification predicting sequence
IVTAAHCLQSVSAS

SEQ ID NO: 48934 - protein, 6 aa, Artificial sequence
  Protein classification predicting sequence
VSGWGT

SEQ ID NO: 48935 - protein, 10 aa, Artificial sequence
  Protein classification predicting sequence
YVNVNIVSQS

SEQ ID NO: 48936 - protein, 10 aa, Artificial sequence
  Protein classification predicting sequence
CASSTYGYGS

SEQ ID NO: 48937 - protein, 34 aa, Artificial sequence
  Protein classification predicting sequence
TMICAAASGKDACQGDSGGPLVSGGVLVGVVSWG

SEQ ID NO: 48938 - protein, 8 aa, Artificial sequence
  Protein classification predicting sequence
LVGVVSWG

SEQ ID NO: 48939 - protein, 12 aa, Artificial sequence
  Protein classification predicting sequence
GCAYSNYPGVYA

SEQ ID NO: 48940 - protein, 7 aa, Artificial sequence
  Protein classification predicting sequence
TMVNDIA

SEQ ID NO: 48941 - protein, 6 aa, Artificial sequence
  Protein classification predicting sequence
TCRSRY

SEQ ID NO: 48942 - protein, 26 aa, Artificial sequence
  Protein classification predicting sequence
TDNMLCSGWLDVGGRDQCQGDSGGPL

SEQ ID NO: 48943 - protein, 8 aa, Artificial sequence
  Protein classification predicting sequence
VSWGYGCA

SEQ ID NO: 48944 - protein, 9 aa, Artificial sequence
  Protein classification predicting sequence
PLKQVKVPI

SEQ ID NO: 48945 - protein, 8 aa, Artificial sequence
  Protein classification predicting sequence
EQHLYYQD

SEQ ID NO: 48946 - protein, 8 aa, Artificial sequence
  Protein classification predicting sequence
VSRIIVHP

SEQ ID NO: 48947 - protein, 7 aa, Artificial sequence
  Protein classification predicting sequence
DGRIVGG

SEQ ID NO: 48948 - protein, 11 aa, Artificial sequence
  Protein classification predicting sequence
FHCEFSSERGP

SEQ ID NO: 48949 - protein, 7 aa, Artificial sequence
  Protein classification predicting sequence
YPELYIL

SEQ ID NO: 48950 - protein, 7 aa, Artificial sequence
  Protein classification predicting sequence
CIELFTT

SEQ ID NO: 48951 - protein, 5 aa, Artificial sequence
  Protein classification predicting sequence
PWYCP

SEQ ID NO: 48952 - protein, 7 aa, Artificial sequence
  Protein classification predicting sequence
QQDAQEF

SEQ ID NO: 48953 - protein, 10 aa, Artificial sequence
  Protein classification predicting sequence
ENLWLNLTDG

SEQ ID NO: 48954 - protein, 7 aa, Artificial sequence
  Protein classification predicting sequence
KEGRWVI

SEQ ID NO: 48955 - protein, 13 aa, Artificial sequence
  Protein classification predicting sequence
PPMVFKAQLFALT

SEQ ID NO: 48956 - protein, 7 aa, Artificial sequence
  Protein classification predicting sequence
SGGGDWH

SEQ ID NO: 48957 - protein, 29 aa, Artificial sequence
  Protein classification predicting sequence
LMMGSADALPEEPSAKTVFVEDMTEEQLA

SEQ ID NO: 48958 - protein, 123 aa, Artificial sequence
  Protein classification predicting sequence
AMELPCGLTNLGNTCYMNATVQCIRSVPELKDALKRYAGALRASGEMASAQYITAALRDLFDSMDKTSSSIPPIILLQFLHMAFPQFAEKGEQGQYLQQDANECWIQMMRVLQQKLEAIEDDS

SEQ ID NO: 48959 - protein, 28 aa, Artificial sequence
  Protein classification predicting sequence
GVELNTDEPPMVFKAQLFALTGVQPARQ

SEQ ID NO: 48960 - protein, 47 aa, Artificial sequence
  Protein classification predicting sequence
DEWIKFDDDKVSIVTPEDILRLSGGGDWHIAYVLLYGPRRVEIMEEE

SEQ ID NO: 48961 - protein, 6 aa, Artificial sequence
  Protein classification predicting sequence
QCLSNT

SEQ ID NO: 48962 - protein, 6 aa, Artificial sequence
  Protein classification predicting sequence
LHLKRF

SEQ ID NO: 48963 - protein, 7 aa, Artificial sequence
  Protein classification predicting sequence
NLGNSCY

SEQ ID NO: 48964 - protein, 9 aa, Artificial sequence
  Protein classification predicting sequence
DLFVGQLKS

SEQ ID NO: 48965 - protein, 9 aa, Artificial sequence
  Protein classification predicting sequence
NLGNTCYMN

SEQ ID NO: 48966 - protein, 7 aa, Artificial sequence
  Protein classification predicting sequence
FLLDGLH

SEQ ID NO: 48967 - protein, 6 aa, Artificial sequence
  Protein classification predicting sequence
AYVLFY

SEQ ID NO: 48968 - protein, 18 aa, Artificial sequence
  Protein classification predicting sequence
NFGNTCYCNSVLQALYFC

SEQ ID NO: 48969 - protein, 8 aa, Artificial sequence
  Protein classification predicting sequence
LTNETRCL

SEQ ID NO: 48970 - protein, 12 aa, Artificial sequence
  Protein classification predicting sequence
KLSYRVVFPLEL

SEQ ID NO: 48971 - protein, 6 aa, Artificial sequence
  Protein classification predicting sequence
GYQQQD

SEQ ID NO: 48972 - protein, 6 aa, Artificial sequence
  Protein classification predicting sequence
NLGNTC

SEQ ID NO: 48973 - protein, 10 aa, Artificial sequence
  Protein classification predicting sequence
KAAYVLFYQR

SEQ ID NO: 48974 - protein, 6 aa, Artificial sequence
  Protein classification predicting sequence
GHYTAY

SEQ ID NO: 48975 - protein, 9 aa, Artificial sequence
  Protein classification predicting sequence
RFAPQFSGY

SEQ ID NO: 48976 - protein, 7 aa, Artificial sequence
  Protein classification predicting sequence
KSTLVCP

SEQ ID NO: 48977 - protein, 7 aa, Artificial sequence
  Protein classification predicting sequence
GYSQQDA

SEQ ID NO: 48978 - protein, 7 aa, Artificial sequence
  Protein classification predicting sequence
VKLGTIT

SEQ ID NO: 48979 - protein, 9 aa, Artificial sequence
  Protein classification predicting sequence
LKKFLEESV

SEQ ID NO: 48980 - protein, 54 aa, Artificial sequence
  Protein classification predicting sequence
PRPVCAVLLLFPITEKYEVFRTEEEEKIKSQGQDVTSSVYFMKQTISNACGTIG

SEQ ID NO: 48981 - protein, 6 aa, Artificial sequence
  Protein classification predicting sequence
LYELDG

SEQ ID NO: 48982 - protein, 6 aa, Artificial sequence
  Protein classification predicting sequence
EFSFFL

SEQ ID NO: 48983 - protein, 8 aa, Artificial sequence
  Protein classification predicting sequence
ISALLLGI

SEQ ID NO: 48984 - protein, 8 aa, Artificial sequence
  Protein classification predicting sequence
IQLGAILA

SEQ ID NO: 48985 - protein, 8 aa, Artificial sequence
  Protein classification predicting sequence
VLFETPML

SEQ ID NO: 48986 - protein, 9 aa, Artificial sequence
  Protein classification predicting sequence
VGHLLGFEG

SEQ ID NO: 48987 - protein, 11 aa, Artificial sequence
  Protein classification predicting sequence
DPNLDTLFVPY

SEQ ID NO: 48988 - protein, 17 aa, Artificial sequence
  Protein classification predicting sequence
ALIPGISRSGATIVAAM

SEQ ID NO: 48989 - protein, 6 aa, Artificial sequence
  Protein classification predicting sequence
WFMNIM

SEQ ID NO: 48990 - protein, 9 aa, Artificial sequence
  Protein classification predicting sequence
IEGFSFELL

SEQ ID NO: 48991 - protein, 13 aa, Artificial sequence
  Protein classification predicting sequence
IATIPAGVIGVLF

SEQ ID NO: 48992 - protein, 18 aa, Artificial sequence
  Protein classification predicting sequence
ETALRFSFLLYIPVSLGG

SEQ ID NO: 48993 - protein, 6 aa, Artificial sequence
  Protein classification predicting sequence
LSITDI

SEQ ID NO: 48994 - protein, 11 aa, Artificial sequence
  Protein classification predicting sequence
WFMNIMAKGNL

SEQ ID NO: 48995 - protein, 8 aa, Artificial sequence
  Protein classification predicting sequence
QCLALIPG

SEQ ID NO: 48996 - protein, 6 aa, Artificial sequence
  Protein classification predicting sequence
AAEFSF

SEQ ID NO: 48997 - protein, 8 aa, Artificial sequence
  Protein classification predicting sequence
LPISSTGH

SEQ ID NO: 48998 - protein, 7 aa, Artificial sequence
  Protein classification predicting sequence
IQLGAIL

SEQ ID NO: 48999 - protein, 6 aa, Artificial sequence
  Protein classification predicting sequence
FFLAIP

SEQ ID NO: 49000 - protein, 6 aa, Artificial sequence
  Protein classification predicting sequence
AVLVYF

SEQ ID NO: 49001 - protein, 12 aa, Artificial sequence
  Protein classification predicting sequence
PGTSRSGATILG

SEQ ID NO: 49002 - protein, 6 aa, Artificial sequence
  Protein classification predicting sequence
EGLTEF

SEQ ID NO: 49003 - protein, 14 aa, Artificial sequence
  Protein classification predicting sequence
LIQLGAILAILSVY

SEQ ID NO: 49004 - protein, 7 aa, Artificial sequence
  Protein classification predicting sequence
PGTSRSG

SEQ ID NO: 49005 - protein, 7 aa, Artificial sequence
  Protein classification predicting sequence
SRSGSTI

SEQ ID NO: 49006 - protein, 14 aa, Artificial sequence
  Protein classification predicting sequence
ISRMGMTPFVIYRL

SEQ ID NO: 49007 - protein, 8 aa, Artificial sequence
  Protein classification predicting sequence
QGLTEFLP

SEQ ID NO: 49008 - protein, 7 aa, Artificial sequence
  Protein classification predicting sequence
GLTEFLP

SEQ ID NO: 49009 - protein, 10 aa, Artificial sequence
  Protein classification predicting sequence
ALIPGVSRSG

SEQ ID NO: 49010 - protein, 7 aa, Artificial sequence
  Protein classification predicting sequence
SFLLAVP

SEQ ID NO: 49011 - protein, 61 aa, Artificial sequence
  Protein classification predicting sequence
RAKVFEVVIQLGSILAVVVIFWKRLWSLVGIGKVTDGPSLNLLHIIIGMIPAGVLGVLFHS

SEQ ID NO: 49012 - protein, 101 aa, Artificial sequence
  Protein classification predicting sequence
LFGPGPVVISLVAGGILMIVAEKFSKPSTARTLDEITYKQAFTIGMFQCLALWPGFSRSGSTISGGLLARVSHTAAAEYTFILAVPMMVAASGLDLIKSWD

SEQ ID NO: 49013 - protein, 7 aa, Artificial sequence
  Protein classification predicting sequence
PVSSTGH

SEQ ID NO: 49014 - protein, 7 aa, Artificial sequence
  Protein classification predicting sequence
DYIDQYL

SEQ ID NO: 49015 - protein, 6 aa, Artificial sequence
  Protein classification predicting sequence
VIQLGS

SEQ ID NO: 49016 - protein, 7 aa, Artificial sequence
  Protein classification predicting sequence
YRIALGL

SEQ ID NO: 49017 - protein, 11 aa, Artificial sequence
  Protein classification predicting sequence
TEFLPVSSTGH

SEQ ID NO: 49018 - protein, 7 aa, Artificial sequence
  Protein classification predicting sequence
SRSASTI

SEQ ID NO: 49019 - protein, 6 aa, Artificial sequence
  Protein classification predicting sequence
LPISST

SEQ ID NO: 49020 - protein, 6 aa, Artificial sequence
  Protein classification predicting sequence
PFVIYR

SEQ ID NO: 49021 - protein, 6 aa, Artificial sequence
  Protein classification predicting sequence
ILAVCW

SEQ ID NO: 49022 - protein, 7 aa, Artificial sequence
  Protein classification predicting sequence
SRKAATE

SEQ ID NO: 49023 - protein, 7 aa, Artificial sequence
  Protein classification predicting sequence
TISGGLL

SEQ ID NO: 49024 - protein, 13 aa, Artificial sequence
  Protein classification predicting sequence
ATEFSFFLAMPTM

SEQ ID NO: 49025 - protein, 77 aa, Artificial sequence
  Protein classification predicting sequence
LDEAGLFLDTMLHIGTLLAVFIYYKKEFIYLIKNPFSKLMLLLIVGTIPAVVIGLLFKDFFEDISKTGITIGWEFLV

SEQ ID NO: 49026 - protein, 8 aa, Artificial sequence
  Protein classification predicting sequence
TEFLPISS

SEQ ID NO: 49027 - protein, 7 aa, Artificial sequence
  Protein classification predicting sequence
AFTAIIQ

SEQ ID NO: 49028 - protein, 6 aa, Artificial sequence
  Protein classification predicting sequence
IQLGSI

SEQ ID NO: 49029 - protein, 11 aa, Artificial sequence
  Protein classification predicting sequence
IQLGSILAVVV

SEQ ID NO: 49030 - protein, 6 aa, Artificial sequence
  Protein classification predicting sequence
FSFLLA

SEQ ID NO: 49031 - protein, 6 aa, Artificial sequence
  Protein classification predicting sequence
FKIVIQ

SEQ ID NO: 49032 - protein, 10 aa, Artificial sequence
  Protein classification predicting sequence
PGTSRSGATI

SEQ ID NO: 49033 - protein, 7 aa, Artificial sequence
  Protein classification predicting sequence
SRSGATI

SEQ ID NO: 49034 - protein, 6 aa, Artificial sequence
  Protein classification predicting sequence
FAWYRI

SEQ ID NO: 49035 - protein, 6 aa, Artificial sequence
  Protein classification predicting sequence
GLFQCL

SEQ ID NO: 49036 - protein, 6 aa, Artificial sequence
  Protein classification predicting sequence
IQFGAI

SEQ ID NO: 49037 - protein, 10 aa, Artificial sequence
  Protein classification predicting sequence
AFLPAAVIGA

SEQ ID NO: 49038 - protein, 10 aa, Artificial sequence
  Protein classification predicting sequence
GITEFLPISS

SEQ ID NO: 49039 - protein, 15 aa, Artificial sequence
  Protein classification predicting sequence
AQCVAMIPGVSRSGA

SEQ ID NO: 49040 - protein, 11 aa, Artificial sequence
  Protein classification predicting sequence
AMIPGVSRSGA

SEQ ID NO: 49041 - protein, 8 aa, Artificial sequence
  Protein classification predicting sequence
IVAAMLLG

SEQ ID NO: 49042 - protein, 7 aa, Artificial sequence
  Protein classification predicting sequence
IKSLFNP

SEQ ID NO: 49043 - protein, 25 aa, Artificial sequence
  Protein classification predicting sequence
DKRSAAEFSFFLAMPTMAGAFAYDL

SEQ ID NO: 49044 - protein, 7 aa, Artificial sequence
  Protein classification predicting sequence
EVVIQLG

SEQ ID NO: 49045 - protein, 7 aa, Artificial sequence
  Protein classification predicting sequence
LGLLFHD

SEQ ID NO: 49046 - protein, 6 aa, Artificial sequence
  Protein classification predicting sequence
GCFQCL

SEQ ID NO: 49047 - protein, 9 aa, Artificial sequence
  Protein classification predicting sequence
SSTGHLILV

SEQ ID NO: 49048 - protein, 9 aa, Artificial sequence
  Protein classification predicting sequence
FQCLALWPG

SEQ ID NO: 49049 - protein, 7 aa, Artificial sequence
  Protein classification predicting sequence
TISAGLF

SEQ ID NO: 49050 - protein, 9 aa, Artificial sequence
  Protein classification predicting sequence
DAGASFTAV

SEQ ID NO: 49051 - protein, 8 aa, Artificial sequence
  Protein classification predicting sequence
WFAAYRIP

SEQ ID NO: 49052 - protein, 6 aa, Artificial sequence
  Protein classification predicting sequence
YRIAFG

SEQ ID NO: 49053 - protein, 7 aa, Artificial sequence
  Protein classification predicting sequence
SSTGHLI

SEQ ID NO: 49054 - protein, 9 aa, Artificial sequence
  Protein classification predicting sequence
IQLGAILAV

SEQ ID NO: 49055 - protein, 7 aa, Artificial sequence
  Protein classification predicting sequence
TIMGGML

SEQ ID NO: 49056 - protein, 7 aa, Artificial sequence
  Protein classification predicting sequence
KPKEPRA

SEQ ID NO: 49057 - protein, 8 aa, Artificial sequence
  Protein classification predicting sequence
FILAVPMM

SEQ ID NO: 49058 - protein, 7 aa, Artificial sequence
  Protein classification predicting sequence
LDLYKSW

SEQ ID NO: 49059 - protein, 7 aa, Artificial sequence
  Protein classification predicting sequence
PMFAVGF

SEQ ID NO: 49060 - protein, 7 aa, Artificial sequence
  Protein classification predicting sequence
IVEGITE

SEQ ID NO: 49061 - protein, 6 aa, Artificial sequence
  Protein classification predicting sequence
IQLGAI

SEQ ID NO: 49062 - protein, 7 aa, Artificial sequence
  Protein classification predicting sequence
VEGLTEF

SEQ ID NO: 49063 - protein, 9 aa, Artificial sequence
  Protein classification predicting sequence
PVSSTGHMI

SEQ ID NO: 49064 - protein, 8 aa, Artificial sequence
  Protein classification predicting sequence
IQLGSILA

SEQ ID NO: 49065 - protein, 9 aa, Artificial sequence
  Protein classification predicting sequence
PAGVLGVLF

SEQ ID NO: 49066 - protein, 6 aa, Artificial sequence
  Protein classification predicting sequence
QTVDQI

SEQ ID NO: 49067 - protein, 7 aa, Artificial sequence
  Protein classification predicting sequence
ITYKQAF

SEQ ID NO: 49068 - protein, 11 aa, Artificial sequence
  Protein classification predicting sequence
DFTFIMAVPIM

SEQ ID NO: 49069 - protein, 6 aa, Artificial sequence
  Protein classification predicting sequence
AVVIYF

SEQ ID NO: 49070 - protein, 7 aa, Artificial sequence
  Protein classification predicting sequence
PGVSRSG

SEQ ID NO: 49071 - protein, 9 aa, Artificial sequence
  Protein classification predicting sequence
PGVSRSGST

SEQ ID NO: 49072 - protein, 7 aa, Artificial sequence
  Protein classification predicting sequence
AVHVGTL

SEQ ID NO: 49073 - protein, 11 aa, Artificial sequence
  Protein classification predicting sequence
KDAIIVGLAQA

SEQ ID NO: 49074 - protein, 6 aa, Artificial sequence
  Protein classification predicting sequence
FEVVIQ

SEQ ID NO: 49075 - protein, 7 aa, Artificial sequence
  Protein classification predicting sequence
LFKDFFE

SEQ ID NO: 49076 - protein, 7 aa, Artificial sequence
  Protein classification predicting sequence
SRSGITI

SEQ ID NO: 49077 - protein, 6 aa, Artificial sequence
  Protein classification predicting sequence
GWYVII

SEQ ID NO: 49078 - protein, 11 aa, Artificial sequence
  Protein classification predicting sequence
ASGLFSLPDAF

SEQ ID NO: 49079 - protein, 11 aa, Artificial sequence
  Protein classification predicting sequence
TEPIPISSSGH

SEQ ID NO: 49080 - protein, 7 aa, Artificial sequence
  Protein classification predicting sequence
PISSSGH

SEQ ID NO: 49081 - protein, 7 aa, Artificial sequence
  Protein classification predicting sequence
IVGLAQA

SEQ ID NO: 49082 - protein, 16 aa, Artificial sequence
  Protein classification predicting sequence
TALRFSFLLYIPVSLG

SEQ ID NO: 49083 - protein, 6 aa, Artificial sequence
  Protein classification predicting sequence
VMYALV

SEQ ID NO: 49084 - protein, 15 aa, Artificial sequence
  Protein classification predicting sequence
LIKRISFIPFAIYRF

SEQ ID NO: 49085 - protein, 22 aa, Artificial sequence
  Protein classification predicting sequence
LIKRISFIPFAIYRFIVAAAVY

SEQ ID NO: 49086 - protein, 12 aa, Artificial sequence
  Protein classification predicting sequence
LALIQGLTEFLP

SEQ ID NO: 49087 - protein, 6 aa, Artificial sequence
  Protein classification predicting sequence
SSSAHL

SEQ ID NO: 49088 - protein, 7 aa, Artificial sequence
  Protein classification predicting sequence
LLWWVDK

SEQ ID NO: 49089 - protein, 9 aa, Artificial sequence
  Protein classification predicting sequence
PGTSRSGAT

SEQ ID NO: 49090 - protein, 25 aa, Artificial sequence
  Protein classification predicting sequence
TAALYLGFTREAAARFSFLMSIPII

SEQ ID NO: 49091 - protein, 9 aa, Artificial sequence
  Protein classification predicting sequence
VEGLTEFLP

SEQ ID NO: 49092 - protein, 7 aa, Artificial sequence
  Protein classification predicting sequence
FAVGFVT

SEQ ID NO: 49093 - protein, 8 aa, Artificial sequence
  Protein classification predicting sequence
QCLAMIPG

SEQ ID NO: 49094 - protein, 7 aa, Artificial sequence
  Protein classification predicting sequence
AAILGVV

SEQ ID NO: 49095 - protein, 6 aa, Artificial sequence
  Protein classification predicting sequence
FEIVIQ

SEQ ID NO: 49096 - protein, 7 aa, Artificial sequence
  Protein classification predicting sequence
EFLPISS

SEQ ID NO: 49097 - protein, 13 aa, Artificial sequence
  Protein classification predicting sequence
DKRSAAEFSFFLA

SEQ ID NO: 49098 - protein, 9 aa, Artificial sequence
  Protein classification predicting sequence
AAEFSFFLA

SEQ ID NO: 49099 - protein, 7 aa, Artificial sequence
  Protein classification predicting sequence
EFSFFLA

SEQ ID NO: 49100 - protein, 14 aa, Artificial sequence
  Protein classification predicting sequence
LFGLIGIHFGRPLQ

SEQ ID NO: 49101 - protein, 25 aa, Artificial sequence
  Protein classification predicting sequence
EGESKGRLTLIHILLGMIPAVVLGL

SEQ ID NO: 49102 - protein, 7 aa, Artificial sequence
  Protein classification predicting sequence
GITEFLP

SEQ ID NO: 49103 - protein, 61 aa, Artificial sequence
  Protein classification predicting sequence
QQRRSKPRRLNLLHVLVGMVPAGILGLLFDDFIEEHLFSVPTVMIGLFVGAIYMIIADKYS

SEQ ID NO: 49104 - protein, 8 aa, Artificial sequence
  Protein classification predicting sequence
LIAIKTFL

SEQ ID NO: 49105 - protein, 9 aa, Artificial sequence
  Protein classification predicting sequence
ELIKGIILG

SEQ ID NO: 49106 - protein, 26 aa, Artificial sequence
  Protein classification predicting sequence
VEGLTEFAPVSSTGHMILVDDMWLKS

SEQ ID NO: 49107 - protein, 11 aa, Artificial sequence
  Protein classification predicting sequence
FLGSQSAFTFK

SEQ ID NO: 49108 - protein, 10 aa, Artificial sequence
  Protein classification predicting sequence
RRSKPRRLNL

SEQ ID NO: 49109 - protein, 13 aa, Artificial sequence
  Protein classification predicting sequence
HVLVGMVPAGILG

SEQ ID NO: 49110 - protein, 7 aa, Artificial sequence
  Protein classification predicting sequence
LFSVPTV

SEQ ID NO: 49111 - protein, 12 aa, Artificial sequence
  Protein classification predicting sequence
GAIYMIIADKYS

SEQ ID NO: 49112 - protein, 16 aa, Artificial sequence
  Protein classification predicting sequence
VPIMLAASGLSLLKHY

SEQ ID NO: 49113 - protein, 12 aa, Artificial sequence
  Protein classification predicting sequence
IPFYILGFLAAF

SEQ ID NO: 49114 - protein, 25 aa, Artificial sequence
  Protein classification predicting sequence
VIQLGSVFAAAWVFRERFLEILHIG

SEQ ID NO: 49115 - protein, 33 aa, Artificial sequence
  Protein classification predicting sequence
AMWPGFSRSGSTISTGVLMKLNHKAASDFTFIM

SEQ ID NO: 49116 - protein, 18 aa, Artificial sequence
  Protein classification predicting sequence
TEWLPVSSTGHLILVQEF

SEQ ID NO: 49117 - protein, 9 aa, Artificial sequence
  Protein classification predicting sequence
RLNPFQPGK

SEQ ID NO: 49118 - protein, 20 aa, Artificial sequence
  Protein classification predicting sequence
LTWQLWLKVVIACIPSILIA

SEQ ID NO: 49119 - protein, 8 aa, Artificial sequence
  Protein classification predicting sequence
DNWFEAHF

SEQ ID NO: 49120 - protein, 7 aa, Artificial sequence
  Protein classification predicting sequence
MSYKTAF

SEQ ID NO: 49121 - protein, 25 aa, Artificial sequence
  Protein classification predicting sequence
IGCFQVLSIVPGTSRSGATILGAII

SEQ ID NO: 49122 - protein, 15 aa, Artificial sequence
  Protein classification predicting sequence
LILLVASLTAFVVSL

SEQ ID NO: 49123 - protein, 17 aa, Artificial sequence
  Protein classification predicting sequence
HDFTIFGKYRIVLGSLL

SEQ ID NO: 49124 - protein, 8 aa, Artificial sequence
  Protein classification predicting sequence
YKTAFFIG

SEQ ID NO: 49125 - protein, 6 aa, Artificial sequence
  Protein classification predicting sequence
FGKYRI

SEQ ID NO: 49126 - protein, 7 aa, Artificial sequence
  Protein classification predicting sequence
IIELLKA

SEQ ID NO: 49127 - protein, 18 aa, Artificial sequence
  Protein classification predicting sequence
RLNPFQPGKTAREVQLTW

SEQ ID NO: 49128 - protein, 12 aa, Artificial sequence
  Protein classification predicting sequence
LWLKVVIACIPS

SEQ ID NO: 49129 - protein, 9 aa, Artificial sequence
  Protein classification predicting sequence
VAADFTFFL

SEQ ID NO: 49130 - protein, 5 aa, Artificial sequence
  Protein classification predicting sequence
IPTMF

SEQ ID NO: 49131 - protein, 14 aa, Artificial sequence
  Protein classification predicting sequence
IPTMFGYSGLKAVK

SEQ ID NO: 49132 - protein, 11 aa, Artificial sequence
  Protein classification predicting sequence
MFNIVIQLGAI

SEQ ID NO: 49133 - protein, 7 aa, Artificial sequence
  Protein classification predicting sequence
AARFSFL

SEQ ID NO: 49134 - protein, 6 aa, Artificial sequence
  Protein classification predicting sequence
PFAYYR

SEQ ID NO: 49135 - protein, 7 aa, Artificial sequence
  Protein classification predicting sequence
VIATTTI

SEQ ID NO: 49136 - protein, 15 aa, Artificial sequence
  Protein classification predicting sequence
DQGLAFDVAVHVGTL

SEQ ID NO: 49137 - protein, 6 aa, Artificial sequence
  Protein classification predicting sequence
YRIVLG

SEQ ID NO: 49138 - protein, 10 aa, Artificial sequence
  Protein classification predicting sequence
SSTGHLLIAE

SEQ ID NO: 49139 - protein, 17 aa, Artificial sequence
  Protein classification predicting sequence
RSDFFNIVIQAGAILAI

SEQ ID NO: 49140 - protein, 24 aa, Artificial sequence
  Protein classification predicting sequence
ILGVVEGLTEFLPVSSTGHMIIVG

SEQ ID NO: 49141 - protein, 6 aa, Artificial sequence
  Protein classification predicting sequence
TYRQAF

SEQ ID NO: 49142 - protein, 25 aa, Artificial sequence
  Protein classification predicting sequence
IGCFQCLALWPGFSRSGATISGGML

SEQ ID NO: 49143 - protein, 8 aa, Artificial sequence
  Protein classification predicting sequence
SSTGHLIL

SEQ ID NO: 49144 - protein, 8 aa, Artificial sequence
  Protein classification predicting sequence
TAGGIDTH

SEQ ID NO: 49145 - protein, 7 aa, Artificial sequence
  Protein classification predicting sequence
TTMIGGG

SEQ ID NO: 49146 - protein, 7 aa, Artificial sequence
  Protein classification predicting sequence
LPASTNP

SEQ ID NO: 49147 - protein, 6 aa, Artificial sequence
  Protein classification predicting sequence
DMGVFS

SEQ ID NO: 49148 - protein, 8 aa, Artificial sequence
  Protein classification predicting sequence
RTWQTADK

SEQ ID NO: 49149 - protein, 22 aa, Artificial sequence
  Protein classification predicting sequence
IAAEGKIVTAGGIDTHVHFINP

SEQ ID NO: 49150 - protein, 8 aa, Artificial sequence
  Protein classification predicting sequence
TTVTPGPW

SEQ ID NO: 49151 - protein, 7 aa, Artificial sequence
  Protein classification predicting sequence
DVQVAIH

SEQ ID NO: 49152 - protein, 7 aa, Artificial sequence
  Protein classification predicting sequence
HSDTLNE

SEQ ID NO: 49153 - protein, 10 aa, Artificial sequence
  Protein classification predicting sequence
EGAGGGHAPD

SEQ ID NO: 49154 - protein, 6 aa, Artificial sequence
  Protein classification predicting sequence
GPTVGD

SEQ ID NO: 49155 - protein, 8 aa, Artificial sequence
  Protein classification predicting sequence
LFIEIEKD

SEQ ID NO: 49156 - protein, 7 aa, Artificial sequence
  Protein classification predicting sequence
IGKAGNP

SEQ ID NO: 49157 - protein, 8 aa, Artificial sequence
  Protein classification predicting sequence
IVTAGGID

SEQ ID NO: 49158 - protein, 7 aa, Artificial sequence
  Protein classification predicting sequence
TPGPWNI

SEQ ID NO: 49159 - protein, 5 aa, Artificial sequence
  Protein classification predicting sequence
HEDWG

SEQ ID NO: 49160 - protein, 23 aa, Artificial sequence
  Protein classification predicting sequence
IPEDIAFADSRIRKETIAAEDVL

SEQ ID NO: 49161 - protein, 20 aa, Artificial sequence
  Protein classification predicting sequence
GVFSMISSDSQAMGRVGEVI

SEQ ID NO: 49162 - protein, 7 aa, Artificial sequence
  Protein classification predicting sequence
GSVEVGK

SEQ ID NO: 49163 - protein, 6 aa, Artificial sequence
  Protein classification predicting sequence
MVCHHL

SEQ ID NO: 49164 - protein, 14 aa, Artificial sequence
  Protein classification predicting sequence
SSDSQAMGRVGEVI

SEQ ID NO: 49165 - protein, 6 aa, Artificial sequence
  Protein classification predicting sequence
RTWQVA

SEQ ID NO: 49166 - protein, 9 aa, Artificial sequence
  Protein classification predicting sequence
ADKMKKQRG

SEQ ID NO: 49167 - protein, 7 aa, Artificial sequence
  Protein classification predicting sequence
KADIGIK

SEQ ID NO: 49168 - protein, 6 aa, Artificial sequence
  Protein classification predicting sequence
GFVEDT

SEQ ID NO: 49169 - protein, 7 aa, Artificial sequence
  Protein classification predicting sequence
PAFFGVK

SEQ ID NO: 49170 - protein, 10 aa, Artificial sequence
  Protein classification predicting sequence
IVTAGGIDTH

SEQ ID NO: 49171 - protein, 7 aa, Artificial sequence
  Protein classification predicting sequence
HEDWGAT

SEQ ID NO: 49172 - protein, 8 aa, Artificial sequence
  Protein classification predicting sequence
ADKYDVQV

SEQ ID NO: 49173 - protein, 13 aa, Artificial sequence
  Protein classification predicting sequence
YHTEGAGGGHAPD

SEQ ID NO: 49174 - protein, 7 aa, Artificial sequence
  Protein classification predicting sequence
FADSRIR

SEQ ID NO: 49175 - protein, 8 aa, Artificial sequence
  Protein classification predicting sequence
AMGRIGEV

SEQ ID NO: 49176 - protein, 6 aa, Artificial sequence
  Protein classification predicting sequence
NASIPT

SEQ ID NO: 49177 - protein, 7 aa, Artificial sequence
  Protein classification predicting sequence
RLGDTNL

SEQ ID NO: 49178 - protein, 11 aa, Artificial sequence
  Protein classification predicting sequence
PTPQPVFYRPM

SEQ ID NO: 49179 - protein, 7 aa, Artificial sequence
  Protein classification predicting sequence
TNALIVD

SEQ ID NO: 49180 - protein, 14 aa, Artificial sequence
  Protein classification predicting sequence
NILPSSTNPTLPYT

SEQ ID NO: 49181 - protein, 7 aa, Artificial sequence
  Protein classification predicting sequence
GGGTGPA

SEQ ID NO: 49182 - protein, 8 aa, Artificial sequence
  Protein classification predicting sequence
VHTDSLNE

SEQ ID NO: 49183 - protein, 8 aa, Artificial sequence
  Protein classification predicting sequence
DNNRIKRY

SEQ ID NO: 49184 - protein, 7 aa, Artificial sequence
  Protein classification predicting sequence
LPLTQRY

SEQ ID NO: 49185 - protein, 8 aa, Artificial sequence
  Protein classification predicting sequence
IGKAGNPD

SEQ ID NO: 49186 - protein, 8 aa, Artificial sequence
  Protein classification predicting sequence
RYIAKYTI

SEQ ID NO: 49187 - protein, 6 aa, Artificial sequence
  Protein classification predicting sequence
PAFFGV

SEQ ID NO: 49188 - protein, 6 aa, Artificial sequence
  Protein classification predicting sequence
RPMFGA

SEQ ID NO: 49189 - protein, 12 aa, Artificial sequence
  Protein classification predicting sequence
HTEGAGGGHAPD

SEQ ID NO: 49190 - protein, 7 aa, Artificial sequence
  Protein classification predicting sequence
IPTPQPV

SEQ ID NO: 49191 - protein, 9 aa, Artificial sequence
  Protein classification predicting sequence
EGKIVTAGG

SEQ ID NO: 49192 - protein, 8 aa, Artificial sequence
  Protein classification predicting sequence
IHTDTLNE

SEQ ID NO: 49193 - protein, 8 aa, Artificial sequence
  Protein classification predicting sequence
AFAESRIR

SEQ ID NO: 49194 - protein, 12 aa, Artificial sequence
  Protein classification predicting sequence
SRIRKETIAAED

SEQ ID NO: 49195 - protein, 7 aa, Artificial sequence
  Protein classification predicting sequence
IEVDPET

SEQ ID NO: 49196 - protein, 19 aa, Artificial sequence
  Protein classification predicting sequence
SSDSQAMGRVGEVITRTWQ

SEQ ID NO: 49197 - protein, 13 aa, Artificial sequence
  Protein classification predicting sequence
QYTSLYGPTVGDS

SEQ ID NO: 49198 - protein, 13 aa, Artificial sequence
  Protein classification predicting sequence
VKADIGIKNGYIF

SEQ ID NO: 49199 - protein, 15 aa, Artificial sequence
  Protein classification predicting sequence
AGNPDIMDNVDIIIG

SEQ ID NO: 49200 - protein, 20 aa, Artificial sequence
  Protein classification predicting sequence
KATTVTPGPWHIHRMLEAAE

SEQ ID NO: 49201 - protein, 7 aa, Artificial sequence
  Protein classification predicting sequence
AGAIGLK

SEQ ID NO: 49202 - protein, 32 aa, Artificial sequence
  Protein classification predicting sequence
AGAIGLKVHEDWGATPSALSHALDVADEFDVQ

SEQ ID NO: 49203 - protein, 34 aa, Artificial sequence
  Protein classification predicting sequence
SNILPSSTNPTLPYTHNTVDEHLDMVMITHHLNA

SEQ ID NO: 49204 - protein, 22 aa, Artificial sequence
  Protein classification predicting sequence
TRTWQVAHRMKEQRGPLDGDFE

SEQ ID NO: 49205 - protein, 18 aa, Artificial sequence
  Protein classification predicting sequence
INSAVNGDANGSIPTSEP

SEQ ID NO: 49206 - protein, 10 aa, Artificial sequence
  Protein classification predicting sequence
LNLKRMVRPV

SEQ ID NO: 49207 - protein, 7 aa, Artificial sequence
  Protein classification predicting sequence
KADMKNN

SEQ ID NO: 49208 - protein, 15 aa, Artificial sequence
  Protein classification predicting sequence
FGGGKSIRDGMAQNP

SEQ ID NO: 49209 - protein, 20 aa, Artificial sequence
  Protein classification predicting sequence
VALESGITTHIGGGTGASEG

SEQ ID NO: 49210 - protein, 19 aa, Artificial sequence
  Protein classification predicting sequence
AGAIGLKVHEDWGATPSAL

SEQ ID NO: 49211 - protein, 31 aa, Artificial sequence
  Protein classification predicting sequence
TMAAVKDRVLHMYHTEGAGGGHAPDLIKSAA

SEQ ID NO: 49212 - protein, 6 aa, Artificial sequence
  Protein classification predicting sequence
DEHLDM

SEQ ID NO: 49213 - protein, 15 aa, Artificial sequence
  Protein classification predicting sequence
DEHLDMVMITHHLNA

SEQ ID NO: 49214 - protein, 13 aa, Artificial sequence
  Protein classification predicting sequence
NGDANGSIPTSEP

SEQ ID NO: 49215 - protein, 7 aa, Artificial sequence
  Protein classification predicting sequence
TSMTFVS

SEQ ID NO: 49216 - protein, 12 aa, Artificial sequence
  Protein classification predicting sequence
KADMKNNSATPK

SEQ ID NO: 49217 - protein, 7 aa, Artificial sequence
  Protein classification predicting sequence
HTFHTEG

SEQ ID NO: 49218 - protein, 10 aa, Artificial sequence
  Protein classification predicting sequence
DVSFAESRVR

SEQ ID NO: 49219 - protein, 7 aa, Artificial sequence
  Protein classification predicting sequence
VITNALI

SEQ ID NO: 49220 - protein, 7 aa, Artificial sequence
  Protein classification predicting sequence
HFICPQQ

SEQ ID NO: 49221 - protein, 6 aa, Artificial sequence
  Protein classification predicting sequence
RTWQTA

SEQ ID NO: 49222 - protein, 7 aa, Artificial sequence
  Protein classification predicting sequence
VKNIRQL

SEQ ID NO: 49223 - protein, 13 aa, Artificial sequence
  Protein classification predicting sequence
HTEGAGGGHAPDI

SEQ ID NO: 49224 - protein, 8 aa, Artificial sequence
  Protein classification predicting sequence
DNNRVKRY

SEQ ID NO: 49225 - protein, 10 aa, Artificial sequence
  Protein classification predicting sequence
NVLPSSTNPT

SEQ ID NO: 49226 - protein, 8 aa, Artificial sequence
  Protein classification predicting sequence
LPSSTNPT

SEQ ID NO: 49227 - protein, 11 aa, Artificial sequence
  Protein classification predicting sequence
LPSSTNPTLPY

SEQ ID NO: 49228 - protein, 9 aa, Artificial sequence
  Protein classification predicting sequence
GTAVRFEPG

SEQ ID NO: 49229 - protein, 7 aa, Artificial sequence
  Protein classification predicting sequence
GRSVAEL

SEQ ID NO: 49230 - protein, 6 aa, Artificial sequence
  Protein classification predicting sequence
GSHYHF

SEQ ID NO: 49231 - protein, 7 aa, Artificial sequence
  Protein classification predicting sequence
SHFHFFE

SEQ ID NO: 49232 - protein, 8 aa, Artificial sequence
  Protein classification predicting sequence
AAEVARRR

SEQ ID NO: 49233 - protein, 6 aa, Artificial sequence
  Protein classification predicting sequence
GLKLNY

SEQ ID NO: 49234 - protein, 8 aa, Artificial sequence
  Protein classification predicting sequence
FDREKAYG

SEQ ID NO: 49235 - protein, 12 aa, Artificial sequence
  Protein classification predicting sequence
IPAGTAVRFEPG

SEQ ID NO: 49236 - protein, 10 aa, Artificial sequence
  Protein classification predicting sequence
GDRPIQVGSH

SEQ ID NO: 49237 - protein, 12 aa, Artificial sequence
  Protein classification predicting sequence
NTGDRPIQVGSH

SEQ ID NO: 49238 - protein, 6 aa, Artificial sequence
  Protein classification predicting sequence
IQVGSH

SEQ ID NO: 49239 - protein, 7 aa, Artificial sequence
  Protein classification predicting sequence
RLNIPAG

SEQ ID NO: 49240 - protein, 6 aa, Artificial sequence
  Protein classification predicting sequence
GDRPIQ

SEQ ID NO: 49241 - protein, 19 aa, Artificial sequence
  Protein classification predicting sequence
GRTIHTFHTEGAGGGHAPD

SEQ ID NO: 49242 - protein, 6 aa, Artificial sequence
  Protein classification predicting sequence
KYTINP

SEQ ID NO: 49243 - protein, 23 aa, Artificial sequence
  Protein classification predicting sequence
TTMIGGGTGPADGTNATTITPGR

SEQ ID NO: 49244 - protein, 15 aa, Artificial sequence
  Protein classification predicting sequence
FADSRIRPQTIAAED

SEQ ID NO: 49245 - protein, 41 aa, Artificial sequence
  Protein classification predicting sequence
LHDMGIFSITSSDSQAMGRVGEVITRTWQTADKNKKEFGRL

SEQ ID NO: 49246 - protein, 8 aa, Artificial sequence
  Protein classification predicting sequence
KYTINPAI

SEQ ID NO: 49247 - protein, 7 aa, Artificial sequence
  Protein classification predicting sequence
QVGSHYH

SEQ ID NO: 49248 - protein, 9 aa, Artificial sequence
  Protein classification predicting sequence
HHPETVIEV

SEQ ID NO: 49249 - protein, 20 aa, Artificial sequence
  Protein classification predicting sequence
AYGKHLDIPAGAAVRFEPGD

SEQ ID NO: 49250 - protein, 7 aa, Artificial sequence
  Protein classification predicting sequence
EGARDGR

SEQ ID NO: 49251 - protein, 12 aa, Artificial sequence
  Protein classification predicting sequence
RGLKLNYPEAVA

SEQ ID NO: 49252 - protein, 9 aa, Artificial sequence
  Protein classification predicting sequence
QVEATFPDG

SEQ ID NO: 49253 - protein, 6 aa, Artificial sequence
  Protein classification predicting sequence
KLVTVH

SEQ ID NO: 49254 - protein, 7 aa, Artificial sequence
  Protein classification predicting sequence
EGARDGK

SEQ ID NO: 49255 - protein, 8 aa, Artificial sequence
  Protein classification predicting sequence
KLMIVVAA

SEQ ID NO: 49256 - protein, 7 aa, Artificial sequence
  Protein classification predicting sequence
EMIPDIQ

SEQ ID NO: 49257 - protein, 6 aa, Artificial sequence
  Protein classification predicting sequence
LNYPEA

SEQ ID NO: 49258 - protein, 7 aa, Artificial sequence
  Protein classification predicting sequence
DGTKLVT

SEQ ID NO: 49259 - protein, 8 aa, Artificial sequence
  Protein classification predicting sequence
TFPDGTKL

SEQ ID NO: 49260 - protein, 6 aa, Artificial sequence
  Protein classification predicting sequence
GIPEMI

SEQ ID NO: 49261 - protein, 10 aa, Artificial sequence
  Protein classification predicting sequence
LTPREKDKLL

SEQ ID NO: 49262 - protein, 35 aa, Artificial sequence
  Protein classification predicting sequence
LTPREKDKLLIFTAALLAERRRARGLKLNYPETVA

SEQ ID NO: 49263 - protein, 6 aa, Artificial sequence
  Protein classification predicting sequence
TVHHPI

SEQ ID NO: 49264 - protein, 6 aa, Artificial sequence
  Protein classification predicting sequence
QVEATF

SEQ ID NO: 49265 - protein, 6 aa, Artificial sequence
  Protein classification predicting sequence
RGLKLN

SEQ ID NO: 49266 - protein, 9 aa, Artificial sequence
  Protein classification predicting sequence
DGTKLVTVH

SEQ ID NO: 49267 - protein, 9 aa, Artificial sequence
  Protein classification predicting sequence
KLVTVHNPI

SEQ ID NO: 49268 - protein, 6 aa, Artificial sequence
  Protein classification predicting sequence
GVPEMI

SEQ ID NO: 49269 - protein, 16 aa, Artificial sequence
  Protein classification predicting sequence
QVEATFPDGTKLVTVH

SEQ ID NO: 49270 - protein, 20 aa, Artificial sequence
  Protein classification predicting sequence
VQVEAIFTDGSRLVTVHDPI

SEQ ID NO: 49271 - protein, 8 aa, Artificial sequence
  Protein classification predicting sequence
LVTVHDPI

SEQ ID NO: 49272 - protein, 16 aa, Artificial sequence
  Protein classification predicting sequence
QVECTFPDGTKLVSIH

SEQ ID NO: 49273 - protein, 7 aa, Artificial sequence
  Protein classification predicting sequence
EKDKLLI

SEQ ID NO: 49274 - protein, 9 aa, Artificial sequence
  Protein classification predicting sequence
TAALLAERR

SEQ ID NO: 49275 - protein, 9 aa, Artificial sequence
  Protein classification predicting sequence
RGLKLNYPE

SEQ ID NO: 49276 - protein, 8 aa, Artificial sequence
  Protein classification predicting sequence
GLKLNYPE

SEQ ID NO: 49277 - protein, 14 aa, Artificial sequence
  Protein classification predicting sequence
GLKLNYPESVALIS

SEQ ID NO: 49278 - protein, 19 aa, Artificial sequence
  Protein classification predicting sequence
QVEATFPDGTKLVTVHQPI

SEQ ID NO: 49279 - protein, 10 aa, Artificial sequence
  Protein classification predicting sequence
ARGLKLNYPE

SEQ ID NO: 49280 - protein, 6 aa, Artificial sequence
  Protein classification predicting sequence
RGVKLN

SEQ ID NO: 49281 - protein, 8 aa, Artificial sequence
  Protein classification predicting sequence
PREKDKLL

SEQ ID NO: 49282 - protein, 7 aa, Artificial sequence
  Protein classification predicting sequence
KLNHPEA

SEQ ID NO: 49283 - protein, 9 aa, Artificial sequence
  Protein classification predicting sequence
RKARGLKLN

SEQ ID NO: 49284 - protein, 6 aa, Artificial sequence
  Protein classification predicting sequence
KLNHPE

SEQ ID NO: 49285 - protein, 7 aa, Artificial sequence
  Protein classification predicting sequence
VMEGVPE

SEQ ID NO: 49286 - protein, 13 aa, Artificial sequence
  Protein classification predicting sequence
IQVEVTFPDGTKL

SEQ ID NO: 49287 - protein, 15 aa, Artificial sequence
  Protein classification predicting sequence
AERRRARGLKLNYPE

SEQ ID NO: 49288 - protein, 7 aa, Artificial sequence
  Protein classification predicting sequence
PREVEKL

SEQ ID NO: 49289 - protein, 10 aa, Artificial sequence
  Protein classification predicting sequence
LNYTEAVALI

SEQ ID NO: 49290 - protein, 7 aa, Artificial sequence
  Protein classification predicting sequence
KTVAQLM

SEQ ID NO: 49291 - protein, 9 aa, Artificial sequence
  Protein classification predicting sequence
KADIGIKDG

SEQ ID NO: 49292 - protein, 9 aa, Artificial sequence
  Protein classification predicting sequence
DMLMVCHHL

SEQ ID NO: 49293 - protein, 8 aa, Artificial sequence
  Protein classification predicting sequence
GEVITRTW

SEQ ID NO: 49294 - protein, 7 aa, Artificial sequence
  Protein classification predicting sequence
EHLDMLM

SEQ ID NO: 49295 - protein, 7 aa, Artificial sequence
  Protein classification predicting sequence
LKADDVM

SEQ ID NO: 49296 - protein, 9 aa, Artificial sequence
  Protein classification predicting sequence
MIHEVGIEA

SEQ ID NO: 49297 - protein, 10 aa, Artificial sequence
  Protein classification predicting sequence
GTAVRFEPGE

SEQ ID NO: 49298 - protein, 7 aa, Artificial sequence
  Protein classification predicting sequence
LVDRQAD

SEQ ID NO: 49299 - protein, 6 aa, Artificial sequence
  Protein classification predicting sequence
VMDGVA

SEQ ID NO: 49300 - protein, 15 aa, Artificial sequence
  Protein classification predicting sequence
LTPKELDKLMLHYAG

SEQ ID NO: 49301 - protein, 10 aa, Artificial sequence
  Protein classification predicting sequence
FGGGKVIRDG

SEQ ID NO: 49302 - protein, 8 aa, Artificial sequence
  Protein classification predicting sequence
DNFRVKRY

SEQ ID NO: 49303 - protein, 17 aa, Artificial sequence
  Protein classification predicting sequence
ENQPWFAAIYRRHRGGS

SEQ ID NO: 49304 - protein, 7 aa, Artificial sequence
  Protein classification predicting sequence
LRPRFKI

SEQ ID NO: 49305 - protein, 10 aa, Artificial sequence
  Protein classification predicting sequence
ENQPWFAAIY

SEQ ID NO: 49306 - protein, 11 aa, Artificial sequence
  Protein classification predicting sequence
CGGSLISPCWV

SEQ ID NO: 49307 - protein, 8 aa, Artificial sequence
  Protein classification predicting sequence
GEMKFEVE

SEQ ID NO: 49308 - protein, 13 aa, Artificial sequence
  Protein classification predicting sequence
SCSEPRCFNGGTC

SEQ ID NO: 49309 - protein, 11 aa, Artificial sequence
  Protein classification predicting sequence
QGVTYRGTWST

SEQ ID NO: 49310 - protein, 12 aa, Artificial sequence
  Protein classification predicting sequence
LGLGNHNYCRNP

SEQ ID NO: 49311 - protein, 8 aa, Artificial sequence
  Protein classification predicting sequence
PGEEEQTF

SEQ ID NO: 49312 - protein, 61 aa, Artificial sequence
  Protein classification predicting sequence
SPQCAQESDSVRAICLPEANLQLPDWTECELSGYGKHKSSSPFYSEQLKEGHVRLYPSSRC

SEQ ID NO: 49313 - protein, 10 aa, Artificial sequence
  Protein classification predicting sequence
HVRLYPSSRC

SEQ ID NO: 49314 - protein, 63 aa, Artificial sequence
  Protein classification predicting sequence
KFLFNKTVTNNMLCAGDTRSGEIYPNVHDACQGDSGGPLVCMNDNHMTLLGIISWGVGCGEKD

SEQ ID NO: 49315 - protein, 11 aa, Artificial sequence
  Protein classification predicting sequence
PGVYTKVTNYL

SEQ ID NO: 49316 - protein, 8 aa, Artificial sequence
  Protein classification predicting sequence
DNGYLEGL

SEQ ID NO: 49317 - protein, 6 aa, Artificial sequence
  Protein classification predicting sequence
HMRNHA

SEQ ID NO: 49318 - protein, 11 aa, Artificial sequence
  Protein classification predicting sequence
ILLITGTLHQR

SEQ ID NO: 49319 - protein, 14 aa, Artificial sequence
  Protein classification predicting sequence
PKCHPLGSFEQMEA

SEQ ID NO: 49320 - protein, 8 aa, Artificial sequence
  Protein classification predicting sequence
TPAELYNA

SEQ ID NO: 49321 - protein, 26 aa, Artificial sequence
  Protein classification predicting sequence
DCISEQDLDEMNIEIIRNTLYKAYLE

SEQ ID NO: 49322 - protein, 11 aa, Artificial sequence
  Protein classification predicting sequence
LARADDYEQVK

SEQ ID NO: 49323 - protein, 9 aa, Artificial sequence
  Protein classification predicting sequence
NPGDKTLED

SEQ ID NO: 49324 - protein, 8 aa, Artificial sequence
  Protein classification predicting sequence
LLITGTLH

SEQ ID NO: 49325 - protein, 13 aa, Artificial sequence
  Protein classification predicting sequence
EIIRNTLYKAYLE

SEQ ID NO: 49326 - protein, 6 aa, Artificial sequence
  Protein classification predicting sequence
FEADRR

SEQ ID NO: 49327 - protein, 7 aa, Artificial sequence
  Protein classification predicting sequence
ITINSFG

SEQ ID NO: 49328 - protein, 19 aa, Artificial sequence
  Protein classification predicting sequence
DYLNLVQCETLEDLKLHLQ

SEQ ID NO: 49329 - protein, 6 aa, Artificial sequence
  Protein classification predicting sequence
RNTLYK

SEQ ID NO: 49330 - protein, 9 aa, Artificial sequence
  Protein classification predicting sequence
NSFGTELSK

SEQ ID NO: 49331 - protein, 8 aa, Artificial sequence
  Protein classification predicting sequence
STDYGNFL

SEQ ID NO: 49332 - protein, 8 aa, Artificial sequence
  Protein classification predicting sequence
MNIEIIRN

SEQ ID NO: 49333 - protein, 7 aa, Artificial sequence
  Protein classification predicting sequence
LYKAYLE

SEQ ID NO: 49334 - protein, 13 aa, Artificial sequence
  Protein classification predicting sequence
EQQVPLVLWSSDR

SEQ ID NO: 49335 - protein, 19 aa, Artificial sequence
  Protein classification predicting sequence
PALLLIRLPYTASSGLMAP

SEQ ID NO: 49336 - protein, 9 aa, Artificial sequence
  Protein classification predicting sequence
GGLGRQLLQ

SEQ ID NO: 49337 - protein, 13 aa, Artificial sequence
  Protein classification predicting sequence
RILFWAQNFSVAY

SEQ ID NO: 49338 - protein, 10 aa, Artificial sequence
  Protein classification predicting sequence
LNLTGSFWND

SEQ ID NO: 49339 - protein, 68 aa, Artificial sequence
  Protein classification predicting sequence
QLSTYLDPALELGPRNVLLFLQDKLSIEDFTAYGGVFGNKQDSAFSNLENALDLAPSSLVLPAVDWYA

SEQ ID NO: 49340 - protein, 23 aa, Artificial sequence
  Protein classification predicting sequence
STLTTYLQEKLGASPLHVDLATL

SEQ ID NO: 49341 - protein, 18 aa, Artificial sequence
  Protein classification predicting sequence
LGPGILGNIFDGIQRPLK

SEQ ID NO: 49342 - protein, 7 aa, Artificial sequence
  Protein classification predicting sequence
GTVTYIA

SEQ ID NO: 49343 - protein, 25 aa, Artificial sequence
  Protein classification predicting sequence
VYVGCGERGNEMAEVLMDFPQLTMT

SEQ ID NO: 49344 - protein, 7 aa, Artificial sequence
  Protein classification predicting sequence
ESIMKRT

SEQ ID NO: 49345 - protein, 21 aa, Artificial sequence
  Protein classification predicting sequence
IVGAVSPPGGDFSDPVTSATL

SEQ ID NO: 49346 - protein, 20 aa, Artificial sequence
  Protein classification predicting sequence
IVQVFWGLDKKLAQRKHFPS

SEQ ID NO: 49347 - protein, 15 aa, Artificial sequence
  Protein classification predicting sequence
LNEIVQLVGKDALAE

SEQ ID NO: 49348 - protein, 7 aa, Artificial sequence
  Protein classification predicting sequence
SQKFEDP

SEQ ID NO: 49349 - protein, 8 aa, Artificial sequence
  Protein classification predicting sequence
EFVPLRTK

SEQ ID NO: 49350 - protein, 10 aa, Artificial sequence
  Protein classification predicting sequence
KEILQEEEDL

SEQ ID NO: 49351 - protein, 9 aa, Artificial sequence
  Protein classification predicting sequence
IFDGIQRPL

SEQ ID NO: 49352 - protein, 9 aa, Artificial sequence
  Protein classification predicting sequence
VGSHITGGD

SEQ ID NO: 49353 - protein, 8 aa, Artificial sequence
  Protein classification predicting sequence
VHENTLVK

SEQ ID NO: 49354 - protein, 7 aa, Artificial sequence
  Protein classification predicting sequence
TGQRVLD

SEQ ID NO: 49355 - protein, 11 aa, Artificial sequence
  Protein classification predicting sequence
TGQRVLDSLFP

SEQ ID NO: 49356 - protein, 15 aa, Artificial sequence
  Protein classification predicting sequence
AIPGAFGCGKTVISQ

SEQ ID NO: 49357 - protein, 10 aa, Artificial sequence
  Protein classification predicting sequence
EYFRDMGYNV

SEQ ID NO: 49358 - protein, 6 aa, Artificial sequence
  Protein classification predicting sequence
FYERAG

SEQ ID NO: 49359 - protein, 8 aa, Artificial sequence
  Protein classification predicting sequence
FYERAGRV

SEQ ID NO: 49360 - protein, 9 aa, Artificial sequence
  Protein classification predicting sequence
NWLISYSKY

SEQ ID NO: 49361 - protein, 14 aa, Artificial sequence
  Protein classification predicting sequence
NWLISYSKYMRALD

SEQ ID NO: 49362 - protein, 19 aa, Artificial sequence
  Protein classification predicting sequence
NWLISYSKYMRALDEYYDK

SEQ ID NO: 49363 - protein, 16 aa, Artificial sequence
  Protein classification predicting sequence
EIVQLVGKASLAETDK

SEQ ID NO: 49364 - protein, 19 aa, Artificial sequence
  Protein classification predicting sequence
TLEVAKLLKDDFLQQNSYS

SEQ ID NO: 49365 - protein, 13 aa, Artificial sequence
  Protein classification predicting sequence
ILYKLSSMKFKDP

SEQ ID NO: 49366 - protein, 9 aa, Artificial sequence
  Protein classification predicting sequence
LSSMKFKDP

SEQ ID NO: 49367 - protein, 8 aa, Artificial sequence
  Protein classification predicting sequence
KDGEAKIK

SEQ ID NO: 49368 - protein, 11 aa, Artificial sequence
  Protein classification predicting sequence
VGDPVLRTGKP

SEQ ID NO: 49369 - protein, 11 aa, Artificial sequence
  Protein classification predicting sequence
VTYIAPPGNYD

SEQ ID NO: 49370 - protein, 7 aa, Artificial sequence
  Protein classification predicting sequence
KEILQEE

SEQ ID NO: 49371 - protein, 58 aa, Artificial sequence
  Protein classification predicting sequence
DLAEIVQLVGKASLAETDKITLEVAKLIKDDFLQQNGYTPYDRFCPFYKTVGMLSNMI

SEQ ID NO: 49372 - protein, 18 aa, Artificial sequence
  Protein classification predicting sequence
LSKYSNSDVIIYVGCGER

SEQ ID NO: 49373 - protein, 8 aa, Artificial sequence
  Protein classification predicting sequence
FPVAKGGT

SEQ ID NO: 49374 - protein, 11 aa, Artificial sequence
  Protein classification predicting sequence
ACGERAGEVVE

SEQ ID NO: 49375 - protein, 9 aa, Artificial sequence
  Protein classification predicting sequence
CNTSSMPVA

SEQ ID NO: 49376 - protein, 17 aa, Artificial sequence
  Protein classification predicting sequence
SGRLEEIPGEEAFPAYL

SEQ ID NO: 49377 - protein, 7 aa, Artificial sequence
  Protein classification predicting sequence
EDYLAQN

SEQ ID NO: 49378 - protein, 6 aa, Artificial sequence
  Protein classification predicting sequence
QVWPVR

SEQ ID NO: 49379 - protein, 8 aa, Artificial sequence
  Protein classification predicting sequence
DSGYPAYL

SEQ ID NO: 49380 - protein, 33 aa, Artificial sequence
  Protein classification predicting sequence
GSAMYELVRVGYYELVGEIIRLEGDMATIQVYE

SEQ ID NO: 49381 - protein, 25 aa, Artificial sequence
  Protein classification predicting sequence
LFPCVQGGTTAIPGAFGCGKTVISQ

SEQ ID NO: 49382 - protein, 17 aa, Artificial sequence
  Protein classification predicting sequence
IVGAVSPPGGDFSDPVT

SEQ ID NO: 49383 - protein, 9 aa, Artificial sequence
  Protein classification predicting sequence
IYDGIQRPL

SEQ ID NO: 49384 - protein, 13 aa, Artificial sequence
  Protein classification predicting sequence
GRMEEMPAEEGFP

SEQ ID NO: 49385 - protein, 7 aa, Artificial sequence
  Protein classification predicting sequence
REGSVSI

SEQ ID NO: 49386 - protein, 8 aa, Artificial sequence
  Protein classification predicting sequence
YIAPPGNY

SEQ ID NO: 49387 - protein, 8 aa, Artificial sequence
  Protein classification predicting sequence
AVETTAQS

SEQ ID NO: 49388 - protein, 8 aa, Artificial sequence
  Protein classification predicting sequence
EEMPAEEG

SEQ ID NO: 49389 - protein, 36 aa, Artificial sequence
  Protein classification predicting sequence
VNDPVLRTHKPLSVELGPGILGNIFDGIQRPLKTIA

SEQ ID NO: 49390 - protein, 18 aa, Artificial sequence
  Protein classification predicting sequence
SGDVYIPRGVSVPALDKD

SEQ ID NO: 49391 - protein, 6 aa, Artificial sequence
  Protein classification predicting sequence
LWEFQP

SEQ ID NO: 49392 - protein, 6 aa, Artificial sequence
  Protein classification predicting sequence
TGGDLY

SEQ ID NO: 49393 - protein, 6 aa, Artificial sequence
  Protein classification predicting sequence
FCPFYK

SEQ ID NO: 49394 - protein, 7 aa, Artificial sequence
  Protein classification predicting sequence
LDRKAKW

SEQ ID NO: 49395 - protein, 20 aa, Artificial sequence
  Protein classification predicting sequence
AKGGTAAIPGPFGSGKTVTQ

SEQ ID NO: 49396 - protein, 11 aa, Artificial sequence
  Protein classification predicting sequence
GAVSPPGGDFS

SEQ ID NO: 49397 - protein, 9 aa, Artificial sequence
  Protein classification predicting sequence
LQEIVQLVG

SEQ ID NO: 49398 - protein, 14 aa, Artificial sequence
  Protein classification predicting sequence
IPGAFGCGKTVISQ

SEQ ID NO: 49399 - protein, 8 aa, Artificial sequence
  Protein classification predicting sequence
LSKYSNSD

SEQ ID NO: 49400 - protein, 9 aa, Artificial sequence
  Protein classification predicting sequence
GGDFSDPVT

SEQ ID NO: 49401 - protein, 18 aa, Artificial sequence
  Protein classification predicting sequence
QVFWGLDKKLAQRKHFPS

SEQ ID NO: 49402 - protein, 6 aa, Artificial sequence
  Protein classification predicting sequence
VQLVGK

SEQ ID NO: 49403 - protein, 14 aa, Artificial sequence
  Protein classification predicting sequence
TTFEDSEKESEYGY

SEQ ID NO: 49404 - protein, 9 aa, Artificial sequence
  Protein classification predicting sequence
ATIQVYEET

SEQ ID NO: 49405 - protein, 9 aa, Artificial sequence
  Protein classification predicting sequence
ENSLMQHHV

SEQ ID NO: 49406 - protein, 11 aa, Artificial sequence
  Protein classification predicting sequence
DTVLELEFQGV

SEQ ID NO: 49407 - protein, 6 aa, Artificial sequence
  Protein classification predicting sequence
GGTCAI

SEQ ID NO: 49408 - protein, 21 aa, Artificial sequence
  Protein classification predicting sequence
GAFGCGKTVISQALSKYSNSD

SEQ ID NO: 49409 - protein, 14 aa, Artificial sequence
  Protein classification predicting sequence
SRWAEALREISGRL

SEQ ID NO: 49410 - protein, 27 aa, Artificial sequence
  Protein classification predicting sequence
SRWAEALREISGRLAEMPADSGYPAYL

SEQ ID NO: 49411 - protein, 8 aa, Artificial sequence
  Protein classification predicting sequence
ARLASFYE

SEQ ID NO: 49412 - protein, 16 aa, Artificial sequence
  Protein classification predicting sequence
TAKLLREDYLAQNAFT

SEQ ID NO: 49413 - protein, 6 aa, Artificial sequence
  Protein classification predicting sequence
FRNLED

SEQ ID NO: 49414 - protein, 17 aa, Artificial sequence
  Protein classification predicting sequence
RTCIICNTSSMPVAARE

SEQ ID NO: 49415 - protein, 27 aa, Artificial sequence
  Protein classification predicting sequence
SLMHRTCIICNTSSMPVAARESSIYLG

SEQ ID NO: 49416 - protein, 12 aa, Artificial sequence
  Protein classification predicting sequence
SRIAAFYERGGA

SEQ ID NO: 49417 - protein, 27 aa, Artificial sequence
  Protein classification predicting sequence
KDGSEGSLTICGAVSPAGGNFEEPVTQ

SEQ ID NO: 49418 - protein, 23 aa, Artificial sequence
  Protein classification predicting sequence
VVGAFCGLSKARADARRYPSIDP

SEQ ID NO: 49419 - protein, 17 aa, Artificial sequence
  Protein classification predicting sequence
ARSFFLELQSKIKTLNG

SEQ ID NO: 49420 - protein, 17 aa, Artificial sequence
  Protein classification predicting sequence
EKESEYGYVRKVSGPVV

SEQ ID NO: 49421 - protein, 7 aa, Artificial sequence
  Protein classification predicting sequence
HKIMLPP

SEQ ID NO: 49422 - protein, 7 aa, Artificial sequence
  Protein classification predicting sequence
EYYRDMG

SEQ ID NO: 49423 - protein, 16 aa, Artificial sequence
  Protein classification predicting sequence
FTMLQTWPVRTPRPVA

SEQ ID NO: 49424 - protein, 29 aa, Artificial sequence
  Protein classification predicting sequence
IRTKAREVLQREDDLNEIVQLVGKDALAE

SEQ ID NO: 49425 - protein, 40 aa, Artificial sequence
  Protein classification predicting sequence
DKITLETAKLLREDYLAQNAFTPYDKFCPFYKSVWMMRNI

SEQ ID NO: 49426 - protein, 7 aa, Artificial sequence
  Protein classification predicting sequence
LANQAVE

SEQ ID NO: 49427 - protein, 12 aa, Artificial sequence
  Protein classification predicting sequence
LMADSTSRWAEA

SEQ ID NO: 49428 - protein, 19 aa, Artificial sequence
  Protein classification predicting sequence
AKGGTAAIPGPFGSGKTVT

SEQ ID NO: 49429 - protein, 7 aa, Artificial sequence
  Protein classification predicting sequence
EIVQLVG

SEQ ID NO: 49430 - protein, 25 aa, Artificial sequence
  Protein classification predicting sequence
ELVGEIIRLEGDMATIQVYEETSGV

SEQ ID NO: 49431 - protein, 24 aa, Artificial sequence
  Protein classification predicting sequence
ATLGIVQVFWGLDKKLAQRKHFPS

SEQ ID NO: 49432 - protein, 7 aa, Artificial sequence
  Protein classification predicting sequence
TAQSDNK

SEQ ID NO: 49433 - protein, 7 aa, Artificial sequence
  Protein classification predicting sequence
PLVTGQR

SEQ ID NO: 49434 - protein, 15 aa, Artificial sequence
  Protein classification predicting sequence
RLEEMPGEEGYPAYL

SEQ ID NO: 49435 - protein, 13 aa, Artificial sequence
  Protein classification predicting sequence
ITAIGAVSPPGGD

SEQ ID NO: 49436 - protein, 9 aa, Artificial sequence
  Protein classification predicting sequence
GAVSPPGGD

SEQ ID NO: 49437 - protein, 10 aa, Artificial sequence
  Protein classification predicting sequence
LSVELGPGLL

SEQ ID NO: 49438 - protein, 11 aa, Artificial sequence
  Protein classification predicting sequence
DKAVIQVYEET

SEQ ID NO: 49439 - protein, 7 aa, Artificial sequence
  Protein classification predicting sequence
PLITGQR

SEQ ID NO: 49440 - protein, 9 aa, Artificial sequence
  Protein classification predicting sequence
EPVTSNTLR

SEQ ID NO: 49441 - protein, 10 aa, Artificial sequence
  Protein classification predicting sequence
VGPDALPDRE

SEQ ID NO: 49442 - protein, 7 aa, Artificial sequence
  Protein classification predicting sequence
REDFLQQ

SEQ ID NO: 49443 - protein, 18 aa, Artificial sequence
  Protein classification predicting sequence
DAQVVVYIGCGERGNEMT

SEQ ID NO: 49444 - protein, 14 aa, Artificial sequence
  Protein classification predicting sequence
VVYIGCGERGNEMT

SEQ ID NO: 49445 - protein, 15 aa, Artificial sequence
  Protein classification predicting sequence
LVANTSNMPVAAREA

SEQ ID NO: 49446 - protein, 22 aa, Artificial sequence
  Protein classification predicting sequence
REISGRLEEMPGEEGYPAYLAS

SEQ ID NO: 49447 - protein, 6 aa, Artificial sequence
  Protein classification predicting sequence
DFLQQN

SEQ ID NO: 49448 - protein, 9 aa, Artificial sequence
  Protein classification predicting sequence
PLSVELGPG

SEQ ID NO: 49449 - protein, 8 aa, Artificial sequence
  Protein classification predicting sequence
NVDPEWRK

SEQ ID NO: 49450 - protein, 15 aa, Artificial sequence
  Protein classification predicting sequence
AMALLQKEAELQEIV

SEQ ID NO: 49451 - protein, 7 aa, Artificial sequence
  Protein classification predicting sequence
ELGPGLL

SEQ ID NO: 49452 - protein, 7 aa, Artificial sequence
  Protein classification predicting sequence
FPIAKGG

SEQ ID NO: 49453 - protein, 18 aa, Artificial sequence
  Protein classification predicting sequence
VLEEFPKLKDPKTGKPLM

SEQ ID NO: 49454 - protein, 7 aa, Artificial sequence
  Protein classification predicting sequence
LAEFYER

SEQ ID NO: 49455 - protein, 8 aa, Artificial sequence
  Protein classification predicting sequence
LQQDAFDE

SEQ ID NO: 49456 - protein, 13 aa, Artificial sequence
  Protein classification predicting sequence
MAGAAMYELVRVG

SEQ ID NO: 49457 - protein, 22 aa, Artificial sequence
  Protein classification predicting sequence
LVANTSNMPVAAREASIYTGIT

SEQ ID NO: 49458 - protein, 9 aa, Artificial sequence
  Protein classification predicting sequence
ARLASFYER

SEQ ID NO: 49459 - protein, 11 aa, Artificial sequence
  Protein classification predicting sequence
GKVKCLGGPER

SEQ ID NO: 49460 - protein, 19 aa, Artificial sequence
  Protein classification predicting sequence
GDLFYRLVSQKFEDPAEGE

SEQ ID NO: 49461 - protein, 10 aa, Artificial sequence
  Protein classification predicting sequence
SQALSKYSNS

SEQ ID NO: 49462 - protein, 11 aa, Artificial sequence
  Protein classification predicting sequence
ARLASFYERAG

SEQ ID NO: 49463 - protein, 16 aa, Artificial sequence
  Protein classification predicting sequence
FWGLDKKLAQRKHFPS

SEQ ID NO: 49464 - protein, 9 aa, Artificial sequence
  Protein classification predicting sequence
IYDGVQRPL

SEQ ID NO: 49465 - protein, 7 aa, Artificial sequence
  Protein classification predicting sequence
AKGGTAA

SEQ ID NO: 49466 - protein, 8 aa, Artificial sequence
  Protein classification predicting sequence
MYELVRVG

SEQ ID NO: 49467 - protein, 6 aa, Artificial sequence
  Protein classification predicting sequence
AEYYRD

SEQ ID NO: 49468 - protein, 11 aa, Artificial sequence
  Protein classification predicting sequence
SEPVTQNTLRI

SEQ ID NO: 49469 - protein, 40 aa, Artificial sequence
  Protein classification predicting sequence
KVFWGLDAPLAQRRHFPAINWLTSYSLYQDDVGSYIDRKQ

SEQ ID NO: 49470 - protein, 17 aa, Artificial sequence
  Protein classification predicting sequence
RTILVANTSNMPVAARE

SEQ ID NO: 49471 - protein, 8 aa, Artificial sequence
  Protein classification predicting sequence
WWHKNVDP

SEQ ID NO: 49472 - protein, 6 aa, Artificial sequence
  Protein classification predicting sequence
TGAPLS

SEQ ID NO: 49473 - protein, 7 aa, Artificial sequence
  Protein classification predicting sequence
YERAGRV

SEQ ID NO: 49474 - protein, 9 aa, Artificial sequence
  Protein classification predicting sequence
SGDFIARGL

SEQ ID NO: 49475 - protein, 8 aa, Artificial sequence
  Protein classification predicting sequence
PGPFGSGK

SEQ ID NO: 49476 - protein, 10 aa, Artificial sequence
  Protein classification predicting sequence
IGAVSPPGGD

SEQ ID NO: 49477 - protein, 7 aa, Artificial sequence
  Protein classification predicting sequence
LIGEIIR

SEQ ID NO: 49478 - protein, 19 aa, Artificial sequence
  Protein classification predicting sequence
YVGCGERGNEMAEVLMDFP

SEQ ID NO: 49479 - protein, 8 aa, Artificial sequence
  Protein classification predicting sequence
IVQVFWGL

SEQ ID NO: 49480 - protein, 9 aa, Artificial sequence
  Protein classification predicting sequence
LAQRKHFPS

SEQ ID NO: 49481 - protein, 9 aa, Artificial sequence
  Protein classification predicting sequence
QNAFTPYDK

SEQ ID NO: 49482 - protein, 8 aa, Artificial sequence
  Protein classification predicting sequence
EIVNIRLG

SEQ ID NO: 49483 - protein, 6 aa, Artificial sequence
  Protein classification predicting sequence
LGRVFN

SEQ ID NO: 49484 - protein, 9 aa, Artificial sequence
  Protein classification predicting sequence
FSAAGLPHN

SEQ ID NO: 49485 - protein, 15 aa, Artificial sequence
  Protein classification predicting sequence
FAIVFAAMGVNMETA

SEQ ID NO: 49486 - protein, 12 aa, Artificial sequence
  Protein classification predicting sequence
SAAREEVPGRRG

SEQ ID NO: 49487 - protein, 7 aa, Artificial sequence
  Protein classification predicting sequence
VSNQLYA

SEQ ID NO: 49488 - protein, 7 aa, Artificial sequence
  Protein classification predicting sequence
YAIGKDV

SEQ ID NO: 49489 - protein, 10 aa, Artificial sequence
  Protein classification predicting sequence
SLDLAWTLLR

SEQ ID NO: 49490 - protein, 7 aa, Artificial sequence
  Protein classification predicting sequence
VQVFEGT

SEQ ID NO: 49491 - protein, 29 aa, Artificial sequence
  Protein classification predicting sequence
CEFTGDILRTPVSEDMLGRVFNGSGKPID

SEQ ID NO: 49492 - protein, 11 aa, Artificial sequence
  Protein classification predicting sequence
MNSIARGQKIP

SEQ ID NO: 49493 - protein, 20 aa, Artificial sequence
  Protein classification predicting sequence
NFAIVFAAMGVNMETARFFK

SEQ ID NO: 49494 - protein, 24 aa, Artificial sequence
  Protein classification predicting sequence
NFAIVFAAMGVNMETARFFKSDFE

SEQ ID NO: 49495 - protein, 8 aa, Artificial sequence
  Protein classification predicting sequence
DVSNQLYA

SEQ ID NO: 49496 - protein, 8 aa, Artificial sequence
  Protein classification predicting sequence
DLLYLEFL

SEQ ID NO: 49497 - protein, 6 aa, Artificial sequence
  Protein classification predicting sequence
LGRIFN

SEQ ID NO: 49498 - protein, 9 aa, Artificial sequence
  Protein classification predicting sequence
FNGSGKPID

SEQ ID NO: 49499 - protein, 45 aa, Artificial sequence
  Protein classification predicting sequence
DVSNQLYANYAIGKDVQAMKAVVGEEALSSEDLLYLEFLDKFERK

SEQ ID NO: 49500 - protein, 35 aa, Artificial sequence
  Protein classification predicting sequence
QGAYDTRNIFQSLDLAWTLLRIFPRELLHRIPAKT

SEQ ID NO: 49501 - protein, 17 aa, Artificial sequence
  Protein classification predicting sequence
DNFAIVFAAMGVNMETA

SEQ ID NO: 49502 - protein, 19 aa, Artificial sequence
  Protein classification predicting sequence
GSITQIPILTMPNDDITHP

SEQ ID NO: 49503 - protein, 35 aa, Artificial sequence
  Protein classification predicting sequence
MNSIARGQKIPIFSAAGLPHNEIAAQICRQAGLVK

SEQ ID NO: 49504 - protein, 7 aa, Artificial sequence
  Protein classification predicting sequence
QGPYENR

SEQ ID NO: 49505 - protein, 10 aa, Artificial sequence
  Protein classification predicting sequence
PFGSLSRLKQ

SEQ ID NO: 49506 - protein, 8 aa, Artificial sequence
  Protein classification predicting sequence
VNIPLEEA

SEQ ID NO: 49507 - protein, 15 aa, Artificial sequence
  Protein classification predicting sequence
GSSINPSERTYPEEM

SEQ ID NO: 49508 - protein, 12 aa, Artificial sequence
  Protein classification predicting sequence
IAAQICRQAGLV

SEQ ID NO: 49509 - protein, 18 aa, Artificial sequence
  Protein classification predicting sequence
LSRLMKSAIGEGMTRKDH

SEQ ID NO: 49510 - protein, 6 aa, Artificial sequence
  Protein classification predicting sequence
VSNQLY

SEQ ID NO: 49511 - protein, 7 aa, Artificial sequence
  Protein classification predicting sequence
EFYPRDS

SEQ ID NO: 49512 - protein, 6 aa, Artificial sequence
  Protein classification predicting sequence
YENRTV

SEQ ID NO: 49513 - protein, 10 aa, Artificial sequence
  Protein classification predicting sequence
PILTMPNDDI

SEQ ID NO: 49514 - protein, 7 aa, Artificial sequence
  Protein classification predicting sequence
IGEGMTR

SEQ ID NO: 49515 - protein, 15 aa, Artificial sequence
  Protein classification predicting sequence
GKKGSITQMPILTMP

SEQ ID NO: 49516 - protein, 19 aa, Artificial sequence
  Protein classification predicting sequence
DDITHPIPDLTGYITEGQI

SEQ ID NO: 49517 - protein, 7 aa, Artificial sequence
  Protein classification predicting sequence
KYHPKYR

SEQ ID NO: 49518 - protein, 43 aa, Artificial sequence
  Protein classification predicting sequence
EEGTLEIGMEYRTVSGVAGPLVILDKVKGPKYQEIVNIRLGDG

SEQ ID NO: 49519 - protein, 28 aa, Artificial sequence
  Protein classification predicting sequence
TRRGQVLEVDGEKAVVQVFEGTSGIDNK

SEQ ID NO: 49520 - protein, 33 aa, Artificial sequence
  Protein classification predicting sequence
DRQLHNRQIYPPINVLPSLSRLMKSAIGEGMTR

SEQ ID NO: 49521 - protein, 20 aa, Artificial sequence
  Protein classification predicting sequence
NVLPSLSRLMKSAIGEGMTR

SEQ ID NO: 49522 - protein, 23 aa, Artificial sequence
  Protein classification predicting sequence
NVLPSLSRLMKSAIGEGMTRKDH

SEQ ID NO: 49523 - protein, 8 aa, Artificial sequence
  Protein classification predicting sequence
KEYKTITQ

SEQ ID NO: 49524 - protein, 7 aa, Artificial sequence
  Protein classification predicting sequence
FAAMGIT

SEQ ID NO: 49525 - protein, 6 aa, Artificial sequence
  Protein classification predicting sequence
TGALER

SEQ ID NO: 49526 - protein, 10 aa, Artificial sequence
  Protein classification predicting sequence
ALTAAEFLAY

SEQ ID NO: 49527 - protein, 10 aa, Artificial sequence
  Protein classification predicting sequence
DDITHPIPDL

SEQ ID NO: 49528 - protein, 10 aa, Artificial sequence
  Protein classification predicting sequence
DLRGLVAIVG

SEQ ID NO: 49529 - protein, 7 aa, Artificial sequence
  Protein classification predicting sequence
GPLVILD

SEQ ID NO: 49530 - protein, 9 aa, Artificial sequence
  Protein classification predicting sequence
ILTDMSSYA

SEQ ID NO: 49531 - protein, 7 aa, Artificial sequence
  Protein classification predicting sequence
DRQLHNR

SEQ ID NO: 49532 - protein, 12 aa, Artificial sequence
  Protein classification predicting sequence
AMKAVVGEEALS

SEQ ID NO: 49533 - protein, 7 aa, Artificial sequence
  Protein classification predicting sequence
KFEKNFI

SEQ ID NO: 49534 - protein, 34 aa, Artificial sequence
  Protein classification predicting sequence
TSCEFTGDILRTPVSEDMLGRVFNGSGKPIDRGP

SEQ ID NO: 49535 - protein, 75 aa, Artificial sequence
  Protein classification predicting sequence
VLAEDFLDIMGQPINPQCRIYPEEMIQTGISAIDGMNSIARGQKIPIFSAAGLPHNEIAAQICRQAGLVKKSKDV

SEQ ID NO: 49536 - protein, 6 aa, Artificial sequence
  Protein classification predicting sequence
DDITHP

SEQ ID NO: 49537 - protein, 13 aa, Artificial sequence
  Protein classification predicting sequence
DGRSSYASVLRFD

SEQ ID NO: 49538 - protein, 17 aa, Artificial sequence
  Protein classification predicting sequence
HNALLMRIAAQTDADIV

SEQ ID NO: 49539 - protein, 23 aa, Artificial sequence
  Protein classification predicting sequence
LGFADKCVMFIHKAVDAPVECVL

SEQ ID NO: 49540 - protein, 22 aa, Artificial sequence
  Protein classification predicting sequence
RLMSLEVNIPLEEALDIGWKIL

SEQ ID NO: 49541 - protein, 6 aa, Artificial sequence
  Protein classification predicting sequence
EYRTVS

SEQ ID NO: 49542 - protein, 12 aa, Artificial sequence
  Protein classification predicting sequence
LKTPVSLDMLGR

SEQ ID NO: 49543 - protein, 18 aa, Artificial sequence
  Protein classification predicting sequence
FAIVFAAMGVNMETARFF

SEQ ID NO: 49544 - protein, 18 aa, Artificial sequence
  Protein classification predicting sequence
LFLNLANDPTIERIITPR

SEQ ID NO: 49545 - protein, 6 aa, Artificial sequence
  Protein classification predicting sequence
YERAGR

SEQ ID NO: 49546 - protein, 7 aa, Artificial sequence
  Protein classification predicting sequence
QLYAAYA

SEQ ID NO: 49547 - protein, 8 aa, Artificial sequence
  Protein classification predicting sequence
ISGPLLFV

SEQ ID NO: 49548 - protein, 8 aa, Artificial sequence
  Protein classification predicting sequence
ADDPAVER

SEQ ID NO: 49549 - protein, 23 aa, Artificial sequence
  Protein classification predicting sequence
MPDDDITHPIPDLTGYITEGQIV

SEQ ID NO: 49550 - protein, 20 aa, Artificial sequence
  Protein classification predicting sequence
DDITHPIPDLTGYITEGQIV

SEQ ID NO: 49551 - protein, 9 aa, Artificial sequence
  Protein classification predicting sequence
GYITEGQIV

SEQ ID NO: 49552 - protein, 14 aa, Artificial sequence
  Protein classification predicting sequence
PGYMYTDLATIYER

SEQ ID NO: 49553 - protein, 5 aa, Artificial sequence
  Protein classification predicting sequence
IYPPI

SEQ ID NO: 49554 - protein, 110 aa, Artificial sequence
  Protein classification predicting sequence
AEFLAYQCEKHVLVILTDMSSYAEALREVSAAREEVPGRRGFPGYMYTDLATIYERAGRVEGRNGSITQIPILTMPNDDITHPIPDLTGYITEGQIYVDRQLHNRQIYPP

SEQ ID NO: 49555 - protein, 29 aa, Artificial sequence
  Protein classification predicting sequence
DVSNQLYACYAIGKDVQAMKAVVGEEALT

SEQ ID NO: 49556 - protein, 20 aa, Artificial sequence
  Protein classification predicting sequence
LDIGWQLLRIFPKEMLKRIP

SEQ ID NO: 49557 - protein, 7 aa, Artificial sequence
  Protein classification predicting sequence
NLADDPA

SEQ ID NO: 49558 - protein, 13 aa, Artificial sequence
  Protein classification predicting sequence
NTLVRGQKLPIFS

SEQ ID NO: 49559 - protein, 7 aa, Artificial sequence
  Protein classification predicting sequence
VSDQMYA

SEQ ID NO: 49560 - protein, 14 aa, Artificial sequence
  Protein classification predicting sequence
KAVVQVFEGTSGID

SEQ ID NO: 49561 - protein, 7 aa, Artificial sequence
  Protein classification predicting sequence
FTGETLK

SEQ ID NO: 49562 - protein, 8 aa, Artificial sequence
  Protein classification predicting sequence
GLPHNEIA

SEQ ID NO: 49563 - protein, 11 aa, Artificial sequence
  Protein classification predicting sequence
LAAQIARQAKV

SEQ ID NO: 49564 - protein, 6 aa, Artificial sequence
  Protein classification predicting sequence
EEANFF

SEQ ID NO: 49565 - protein, 9 aa, Artificial sequence
  Protein classification predicting sequence
ALTVAEYLA

SEQ ID NO: 49566 - protein, 22 aa, Artificial sequence
  Protein classification predicting sequence
YAAYAEGRSLRDLVAVVGEEAL

SEQ ID NO: 49567 - protein, 8 aa, Artificial sequence
  Protein classification predicting sequence
AVVGEEAL

SEQ ID NO: 49568 - protein, 8 aa, Artificial sequence
  Protein classification predicting sequence
LKFADEFE

SEQ ID NO: 49569 - protein, 7 aa, Artificial sequence
  Protein classification predicting sequence
ERIITPR

SEQ ID NO: 49570 - protein, 6 aa, Artificial sequence
  Protein classification predicting sequence
KGSITQ

SEQ ID NO: 49571 - protein, 6 aa, Artificial sequence
  Protein classification predicting sequence
GIYPPI

SEQ ID NO: 49572 - protein, 6 aa, Artificial sequence
  Protein classification predicting sequence
SNQLYA

SEQ ID NO: 49573 - protein, 8 aa, Artificial sequence
  Protein classification predicting sequence
YAEGRDLR

SEQ ID NO: 49574 - protein, 6 aa, Artificial sequence
  Protein classification predicting sequence
EEANYF

SEQ ID NO: 49575 - protein, 9 aa, Artificial sequence
  Protein classification predicting sequence
LHRKGIYPP

SEQ ID NO: 49576 - protein, 7 aa, Artificial sequence
  Protein classification predicting sequence
DFEENGS

SEQ ID NO: 49577 - protein, 8 aa, Artificial sequence
  Protein classification predicting sequence
PGYMYTDL

SEQ ID NO: 49578 - protein, 8 aa, Artificial sequence
  Protein classification predicting sequence
FIAQGPYE

SEQ ID NO: 49579 - protein, 7 aa, Artificial sequence
  Protein classification predicting sequence
TIYERAG

SEQ ID NO: 49580 - protein, 6 aa, Artificial sequence
  Protein classification predicting sequence
SLSRLM

SEQ ID NO: 49581 - protein, 10 aa, Artificial sequence
  Protein classification predicting sequence
QVFEGTSGID

SEQ ID NO: 49582 - protein, 14 aa, Artificial sequence
  Protein classification predicting sequence
MLGRVFNGSGKPID

SEQ ID NO: 49583 - protein, 7 aa, Artificial sequence
  Protein classification predicting sequence
PINPQCR

SEQ ID NO: 49584 - protein, 7 aa, Artificial sequence
  Protein classification predicting sequence
IDVMNSI

SEQ ID NO: 49585 - protein, 6 aa, Artificial sequence
  Protein classification predicting sequence
RGQKIP

SEQ ID NO: 49586 - protein, 9 aa, Artificial sequence
  Protein classification predicting sequence
SDDNFAVVF

SEQ ID NO: 49587 - protein, 9 aa, Artificial sequence
  Protein classification predicting sequence
AMGVNMETA

SEQ ID NO: 49588 - protein, 14 aa, Artificial sequence
  Protein classification predicting sequence
LFLNLANDPTIERI

SEQ ID NO: 49589 - protein, 6 aa, Artificial sequence
  Protein classification predicting sequence
LYLEFL

SEQ ID NO: 49590 - protein, 11 aa, Artificial sequence
  Protein classification predicting sequence
FAVVFAAMGIT

SEQ ID NO: 49591 - protein, 10 aa, Artificial sequence
  Protein classification predicting sequence
LVILTDMTNY

SEQ ID NO: 49592 - protein, 12 aa, Artificial sequence
  Protein classification predicting sequence
LDLGWELLSILP

SEQ ID NO: 49593 - protein, 9 aa, Artificial sequence
  Protein classification predicting sequence
LPESELKRV

SEQ ID NO: 49594 - protein, 9 aa, Artificial sequence
  Protein classification predicting sequence
AIVQVFEGT

SEQ ID NO: 49595 - protein, 13 aa, Artificial sequence
  Protein classification predicting sequence
KGSITQMPILTMP

SEQ ID NO: 49596 - protein, 10 aa, Artificial sequence
  Protein classification predicting sequence
NSIARGQKIP

SEQ ID NO: 49597 - protein, 6 aa, Artificial sequence
  Protein classification predicting sequence
EFLAYQ

SEQ ID NO: 49598 - protein, 26 aa, Artificial sequence
  Protein classification predicting sequence
PILTMPNDDITHPIPDLTGYITEGQI

SEQ ID NO: 49599 - protein, 7 aa, Artificial sequence
  Protein classification predicting sequence
VVGEEAL

SEQ ID NO: 49600 - protein, 7 aa, Artificial sequence
  Protein classification predicting sequence
REEVPGR

SEQ ID NO: 49601 - protein, 7 aa, Artificial sequence
  Protein classification predicting sequence
SLSRLMK

SEQ ID NO: 49602 - protein, 12 aa, Artificial sequence
  Protein classification predicting sequence
PRIALTTAEYLA

SEQ ID NO: 49603 - protein, 14 aa, Artificial sequence
  Protein classification predicting sequence
RGQKLPIFSGSGLP

SEQ ID NO: 49604 - protein, 7 aa, Artificial sequence
  Protein classification predicting sequence
NEIAAQI

SEQ ID NO: 49605 - protein, 7 aa, Artificial sequence
  Protein classification predicting sequence
DPTIERI

SEQ ID NO: 49606 - protein, 8 aa, Artificial sequence
  Protein classification predicting sequence
NRSIEESL

SEQ ID NO: 49607 - protein, 6 aa, Artificial sequence
  Protein classification predicting sequence
RQAGLV

SEQ ID NO: 49608 - protein, 9 aa, Artificial sequence
  Protein classification predicting sequence
IVFAAMGVN

SEQ ID NO: 49609 - protein, 6 aa, Artificial sequence
  Protein classification predicting sequence
ETARFF

SEQ ID NO: 49610 - protein, 34 aa, Artificial sequence
  Protein classification predicting sequence
CGKHVLVILTDMSSYADALREVSAAREEVPGRRG

SEQ ID NO: 49611 - protein, 17 aa, Artificial sequence
  Protein classification predicting sequence
ALREVSAAREEVPGRRG

SEQ ID NO: 49612 - protein, 8 aa, Artificial sequence
  Protein classification predicting sequence
AIGEGMTR

SEQ ID NO: 49613 - protein, 9 aa, Artificial sequence
  Protein classification predicting sequence
AMKAVVGEE

SEQ ID NO: 49614 - protein, 7 aa, Artificial sequence
  Protein classification predicting sequence
LSSEDLL

SEQ ID NO: 49615 - protein, 9 aa, Artificial sequence
  Protein classification predicting sequence
WQLLRIFPK

SEQ ID NO: 49616 - protein, 6 aa, Artificial sequence
  Protein classification predicting sequence
VKFPRY

SEQ ID NO: 49617 - protein, 6 aa, Artificial sequence
  Protein classification predicting sequence
ALTTAE

SEQ ID NO: 49618 - protein, 8 aa, Artificial sequence
  Protein classification predicting sequence
IYPPINVL

SEQ ID NO: 49619 - protein, 8 aa, Artificial sequence
  Protein classification predicting sequence
RTVFESLD

SEQ ID NO: 49620 - protein, 7 aa, Artificial sequence
  Protein classification predicting sequence
LKVGTLD

SEQ ID NO: 49621 - protein, 21 aa, Artificial sequence
  Protein classification predicting sequence
KALRVFVESVLRYGLPVNFQA

SEQ ID NO: 49622 - protein, 7 aa, Artificial sequence
  Protein classification predicting sequence
QIDNDLK

SEQ ID NO: 49623 - protein, 8 aa, Artificial sequence
  Protein classification predicting sequence
EFWLISAP

SEQ ID NO: 49624 - protein, 16 aa, Artificial sequence
  Protein classification predicting sequence
TRFQWDMAKYPIKQSL

SEQ ID NO: 49625 - protein, 13 aa, Artificial sequence
  Protein classification predicting sequence
AYNNLKGNLQNLE

SEQ ID NO: 49626 - protein, 7 aa, Artificial sequence
  Protein classification predicting sequence
KFIVRDF

SEQ ID NO: 49627 - protein, 9 aa, Artificial sequence
  Protein classification predicting sequence
LKGNLQNLE

SEQ ID NO: 49628 - protein, 20 aa, Artificial sequence
  Protein classification predicting sequence
TDKKKQFGPLVRWLKVNFSE

SEQ ID NO: 49629 - protein, 6 aa, Artificial sequence
  Protein classification predicting sequence
WDVRNI

SEQ ID NO: 49630 - protein, 12 aa, Artificial sequence
  Protein classification predicting sequence
WKYTPYSYPNAR

SEQ ID NO: 49631 - protein, 10 aa, Artificial sequence
  Protein classification predicting sequence
VESVLRYGLP

SEQ ID NO: 49632 - protein, 12 aa, Artificial sequence
  Protein classification predicting sequence
EAAFSLAEAKFT

SEQ ID NO: 49633 - protein, 17 aa, Artificial sequence
  Protein classification predicting sequence
LLVELASLQTSFVTLDE

SEQ ID NO: 49634 - protein, 12 aa, Artificial sequence
  Protein classification predicting sequence
EREEFYRLKKIQ

SEQ ID NO: 49635 - protein, 10 aa, Artificial sequence
  Protein classification predicting sequence
LLKKKSDALT

SEQ ID NO: 49636 - protein, 6 aa, Artificial sequence
  Protein classification predicting sequence
RLKKIQ

SEQ ID NO: 49637 - protein, 7 aa, Artificial sequence
  Protein classification predicting sequence
AAFSLAE

SEQ ID NO: 49638 - protein, 9 aa, Artificial sequence
  Protein classification predicting sequence
LVELASLQT

SEQ ID NO: 49639 - protein, 9 aa, Artificial sequence
  Protein classification predicting sequence
REEFYRLKK

SEQ ID NO: 49640 - protein, 11 aa, Artificial sequence
  Protein classification predicting sequence
MEFFTIYDEAL

SEQ ID NO: 49641 - protein, 9 aa, Artificial sequence
  Protein classification predicting sequence
TKRRVNALE

SEQ ID NO: 49642 - protein, 11 aa, Artificial sequence
  Protein classification predicting sequence
KKDNVAGVTLP

SEQ ID NO: 49643 - protein, 6 aa, Artificial sequence
  Protein classification predicting sequence
EMEREN

SEQ ID NO: 49644 - protein, 8 aa, Artificial sequence
  Protein classification predicting sequence
FRLKRVKA

SEQ ID NO: 49645 - protein, 8 aa, Artificial sequence
  Protein classification predicting sequence
RLKGAQTG

SEQ ID NO: 49646 - protein, 9 aa, Artificial sequence
  Protein classification predicting sequence
MKARLKGAQ

SEQ ID NO: 49647 - protein, 8 aa, Artificial sequence
  Protein classification predicting sequence
GHSLLKRK

SEQ ID NO: 49648 - protein, 11 aa, Artificial sequence
  Protein classification predicting sequence
DALTLRFRQIL

SEQ ID NO: 49649 - protein, 8 aa, Artificial sequence
  Protein classification predicting sequence
FSLAEAKF

SEQ ID NO: 49650 - protein, 21 aa, Artificial sequence
  Protein classification predicting sequence
ELDEREREEFYRLKKIQEKKK

SEQ ID NO: 49651 - protein, 7 aa, Artificial sequence
  Protein classification predicting sequence
YEKKEKQ

SEQ ID NO: 49652 - protein, 18 aa, Artificial sequence
  Protein classification predicting sequence
YSMQLNASRIKVLQAQDD

SEQ ID NO: 49653 - protein, 8 aa, Artificial sequence
  Protein classification predicting sequence
LEEAERAS

SEQ ID NO: 49654 - protein, 8 aa, Artificial sequence
  Protein classification predicting sequence
NQARLKVL

SEQ ID NO: 49655 - protein, 24 aa, Artificial sequence
  Protein classification predicting sequence
ADVQKQIKHMMAFIEQEANEKAEE

SEQ ID NO: 49656 - protein, 9 aa, Artificial sequence
  Protein classification predicting sequence
AEEEFNIEK

SEQ ID NO: 49657 - protein, 21 aa, Artificial sequence
  Protein classification predicting sequence
AEEEFNIEKLQLVEAEKKKIR

SEQ ID NO: 49658 - protein, 7 aa, Artificial sequence
  Protein classification predicting sequence
VQSLLRL

SEQ ID NO: 49659 - protein, 10 aa, Artificial sequence
  Protein classification predicting sequence
DVGIILITER

SEQ ID NO: 49660 - protein, 9 aa, Artificial sequence
  Protein classification predicting sequence
GFLLGGIGE

SEQ ID NO: 49661 - protein, 7 aa, Artificial sequence
  Protein classification predicting sequence
KDSILRR

SEQ ID NO: 49662 - protein, 6 aa, Artificial sequence
  Protein classification predicting sequence
GFRLAG

SEQ ID NO: 49663 - protein, 8 aa, Artificial sequence
  Protein classification predicting sequence
IQQLLAAE

SEQ ID NO: 49664 - protein, 6 aa, Artificial sequence
  Protein classification predicting sequence
EVEQYR

SEQ ID NO: 49665 - protein, 25 aa, Artificial sequence
  Protein classification predicting sequence
EFQSKQQAAMGSQGNLSAEVEQATR

SEQ ID NO: 49666 - protein, 10 aa, Artificial sequence
  Protein classification predicting sequence
VRPQVHPNYR

SEQ ID NO: 49667 - protein, 9 aa, Artificial sequence
  Protein classification predicting sequence
QLLQAEKRA

SEQ ID NO: 49668 - protein, 14 aa, Artificial sequence
  Protein classification predicting sequence
GDSGANVKRLEQET

SEQ ID NO: 49669 - protein, 13 aa, Artificial sequence
  Protein classification predicting sequence
ARKRKARRLKQAK

SEQ ID NO: 49670 - protein, 9 aa, Artificial sequence
  Protein classification predicting sequence
AEKRAAEKV

SEQ ID NO: 49671 - protein, 49 aa, Artificial sequence
  Protein classification predicting sequence
WLLAFSPQMCEHLRRYNIIPVLSDILQESVKEKVTRIILAAFRNFLEKS

SEQ ID NO: 49672 - protein, 8 aa, Artificial sequence
  Protein classification predicting sequence
QCKVLKQL

SEQ ID NO: 49673 - protein, 12 aa, Artificial sequence
  Protein classification predicting sequence
SGRLEWSPVHKS

SEQ ID NO: 49674 - protein, 10 aa, Artificial sequence
  Protein classification predicting sequence
RLNEKNYELL

SEQ ID NO: 49675 - protein, 11 aa, Artificial sequence
  Protein classification predicting sequence
GEYVRHYPRGK

SEQ ID NO: 49676 - protein, 7 aa, Artificial sequence
  Protein classification predicting sequence
EQLGGKQ

SEQ ID NO: 49677 - protein, 20 aa, Artificial sequence
  Protein classification predicting sequence
ALLAVQKLMVHNWEYLGKQL

SEQ ID NO: 49678 - protein, 11 aa, Artificial sequence
  Protein classification predicting sequence
NWQSYLQGQMI

SEQ ID NO: 49679 - protein, 9 aa, Artificial sequence
  Protein classification predicting sequence
SVQDLSSFD

SEQ ID NO: 49680 - protein, 8 aa, Artificial sequence
  Protein classification predicting sequence
EIISSSKT

SEQ ID NO: 49681 - protein, 6 aa, Artificial sequence
  Protein classification predicting sequence
LYGLIV

SEQ ID NO: 49682 - protein, 11 aa, Artificial sequence
  Protein classification predicting sequence
AIGIVGDAGVR

SEQ ID NO: 49683 - protein, 6 aa, Artificial sequence
  Protein classification predicting sequence
AYGTAK

SEQ ID NO: 49684 - protein, 12 aa, Artificial sequence
  Protein classification predicting sequence
MAGIIAIYGLVV

SEQ ID NO: 49685 - protein, 6 aa, Artificial sequence
  Protein classification predicting sequence
APFFGF

SEQ ID NO: 49686 - protein, 6 aa, Artificial sequence
  Protein classification predicting sequence
GTAKSG

SEQ ID NO: 49687 - protein, 16 aa, Artificial sequence
  Protein classification predicting sequence
MHQPRLFVGIVLILIF

SEQ ID NO: 49688 - protein, 6 aa, Artificial sequence
  Protein classification predicting sequence
VMRPEL

SEQ ID NO: 49689 - protein, 7 aa, Artificial sequence
  Protein classification predicting sequence
AIGIVGD

SEQ ID NO: 49690 - protein, 7 aa, Artificial sequence
  Protein classification predicting sequence
EVLGLYG

SEQ ID NO: 49691 - protein, 9 aa, Artificial sequence
  Protein classification predicting sequence
LIPVVMSGI

SEQ ID NO: 49692 - protein, 8 aa, Artificial sequence
  Protein classification predicting sequence
LVVAVLIA

SEQ ID NO: 49693 - protein, 12 aa, Artificial sequence
  Protein classification predicting sequence
MKSLIPVVMSGI

SEQ ID NO: 49694 - protein, 19 aa, Artificial sequence
  Protein classification predicting sequence
LFDGYAHLSSGLACGLAGL

SEQ ID NO: 49695 - protein, 56 aa, Artificial sequence
  Protein classification predicting sequence
AGMAIGIVGDAGVRANAQQPKLFVGMILILIFAEALALYGLIVGIILSSRAGQSRA

SEQ ID NO: 49696 - protein, 7 aa, Artificial sequence
  Protein classification predicting sequence
LGLYGLI

SEQ ID NO: 49697 - protein, 77 aa, Artificial sequence
  Protein classification predicting sequence
GDETAPFFGFLGAAAALVFSCMGAAYGTAKSGVGVASMGVMRPELVMKSIVPVVMAGVLGIYGLIIAVIISTGINPK

SEQ ID NO: 49698 - protein, 6 aa, Artificial sequence
  Protein classification predicting sequence
AMVFSA

SEQ ID NO: 49699 - protein, 14 aa, Artificial sequence
  Protein classification predicting sequence
FSALGAAYGTAKSG

SEQ ID NO: 49700 - protein, 10 aa, Artificial sequence
  Protein classification predicting sequence
GAAYGTAKSG

SEQ ID NO: 49701 - protein, 11 aa, Artificial sequence
  Protein classification predicting sequence
VGMILILIFAE

SEQ ID NO: 49702 - protein, 21 aa, Artificial sequence
  Protein classification predicting sequence
VGMILILIFAEVLGLYGLIVA

SEQ ID NO: 49703 - protein, 6 aa, Artificial sequence
  Protein classification predicting sequence
IYGLVV

SEQ ID NO: 49704 - protein, 19 aa, Artificial sequence
  Protein classification predicting sequence
PVVMAGVLGIYGLIIAVII

SEQ ID NO: 49705 - protein, 7 aa, Artificial sequence
  Protein classification predicting sequence
LILIFAE

SEQ ID NO: 49706 - protein, 8 aa, Artificial sequence
  Protein classification predicting sequence
GAAYGTAK

SEQ ID NO: 49707 - protein, 9 aa, Artificial sequence
  Protein classification predicting sequence
MILILIFAE

SEQ ID NO: 49708 - protein, 26 aa, Artificial sequence
  Protein classification predicting sequence
FSALGAAYGTAKSGTGIAAMSVMRPE

SEQ ID NO: 49709 - protein, 9 aa, Artificial sequence
  Protein classification predicting sequence
LLSTAVNNM

SEQ ID NO: 49710 - protein, 15 aa, Artificial sequence
  Protein classification predicting sequence
DSGGPLICNGQFQGI

SEQ ID NO: 49711 - protein, 7 aa, Artificial sequence
  Protein classification predicting sequence
AWLFNLR

SEQ ID NO: 49712 - protein, 89 aa, Artificial sequence
  Protein classification predicting sequence
SYLAVYGWVNYPQAEYYIVEDYGDYNPCSSATSLGTVYSDGSTYQVCTDTRTNEPSITGTSTFTQYFSVRESTRTSGTVTVANHFNFWA

SEQ ID NO: 49713 - protein, 12 aa, Artificial sequence
  Protein classification predicting sequence
HGFGNSDFNYQV

SEQ ID NO: 49714 - protein, 9 aa, Artificial sequence
  Protein classification predicting sequence
VGGKGWNPG

SEQ ID NO: 49715 - protein, 6 aa, Artificial sequence
  Protein classification predicting sequence
NHFNAW

SEQ ID NO: 49716 - protein, 7 aa, Artificial sequence
  Protein classification predicting sequence
GTYKGTV

SEQ ID NO: 49717 - protein, 9 aa, Artificial sequence
  Protein classification predicting sequence
GNFVGGKGW

SEQ ID NO: 49718 - protein, 7 aa, Artificial sequence
  Protein classification predicting sequence
IVATEGY

SEQ ID NO: 49719 - protein, 6 aa, Artificial sequence
  Protein classification predicting sequence
EYYIVE

SEQ ID NO: 49720 - protein, 9 aa, Artificial sequence
  Protein classification predicting sequence
AKLYINDYN

SEQ ID NO: 49721 - protein, 6 aa, Artificial sequence
  Protein classification predicting sequence
WTDGGG

SEQ ID NO: 49722 - protein, 7 aa, Artificial sequence
  Protein classification predicting sequence
PSGNGYL

SEQ ID NO: 49723 - protein, 7 aa, Artificial sequence
  Protein classification predicting sequence
EGYQSSG

SEQ ID NO: 49724 - protein, 9 aa, Artificial sequence
  Protein classification predicting sequence
VRIAFETAR

SEQ ID NO: 49725 - protein, 8 aa, Artificial sequence
  Protein classification predicting sequence
TELDIAGA

SEQ ID NO: 49726 - protein, 10 aa, Artificial sequence
  Protein classification predicting sequence
YGWTRNPLVE

SEQ ID NO: 49727 - protein, 11 aa, Artificial sequence
  Protein classification predicting sequence
NAPSIDGTQTF

SEQ ID NO: 49728 - protein, 7 aa, Artificial sequence
  Protein classification predicting sequence
FHGGFGL

SEQ ID NO: 49729 - protein, 14 aa, Artificial sequence
  Protein classification predicting sequence
VGNFVGGKGWNPGS

SEQ ID NO: 49730 - protein, 7 aa, Artificial sequence
  Protein classification predicting sequence
GHTLVWH

SEQ ID NO: 49731 - protein, 6 aa, Artificial sequence
  Protein classification predicting sequence
QYFSVR

SEQ ID NO: 49732 - protein, 9 aa, Artificial sequence
  Protein classification predicting sequence
GNFVAGKGW

SEQ ID NO: 49733 - protein, 8 aa, Artificial sequence
  Protein classification predicting sequence
ATAGMRLL

SEQ ID NO: 49734 - protein, 5 aa, Artificial sequence
  Protein classification predicting sequence
YMNRS

SEQ ID NO: 49735 - protein, 7 aa, Artificial sequence
  Protein classification predicting sequence
WPEWMGV

SEQ ID NO: 49736 - protein, 6 aa, Artificial sequence
  Protein classification predicting sequence
GSEMWN

SEQ ID NO: 49737 - protein, 6 aa, Artificial sequence
  Protein classification predicting sequence
DQQLAL

SEQ ID NO: 49738 - protein, 6 aa, Artificial sequence
  Protein classification predicting sequence
FGESAG

SEQ ID NO: 49739 - protein, 7 aa, Artificial sequence
  Protein classification predicting sequence
FARTGNP

SEQ ID NO: 49740 - protein, 10 aa, Artificial sequence
  Protein classification predicting sequence
FGESAGAASV

SEQ ID NO: 49741 - protein, 13 aa, Artificial sequence
  Protein classification predicting sequence
HGYEIEFVFGLPL

SEQ ID NO: 49742 - protein, 6 aa, Artificial sequence
  Protein classification predicting sequence
EMWNPN

SEQ ID NO: 49743 - protein, 7 aa, Artificial sequence
  Protein classification predicting sequence
WIYGGGF

SEQ ID NO: 49744 - protein, 7 aa, Artificial sequence
  Protein classification predicting sequence
YWANFAR

SEQ ID NO: 49745 - protein, 6 aa, Artificial sequence
  Protein classification predicting sequence
PFAKPP

SEQ ID NO: 49746 - protein, 8 aa, Artificial sequence
  Protein classification predicting sequence
VSMNYRVG

SEQ ID NO: 49747 - protein, 7 aa, Artificial sequence
  Protein classification predicting sequence
SAGGASV

SEQ ID NO: 49748 - protein, 7 aa, Artificial sequence
  Protein classification predicting sequence
GVNKDEG

SEQ ID NO: 49749 - protein, 7 aa, Artificial sequence
  Protein classification predicting sequence
CYVTGWG

SEQ ID NO: 49750 - protein, 7 aa, Artificial sequence
  Protein classification predicting sequence
NDIALIK

SEQ ID NO: 49751 - protein, 7 aa, Artificial sequence
  Protein classification predicting sequence
GEECDCG

SEQ ID NO: 49752 - protein, 7 aa, Artificial sequence
  Protein classification predicting sequence
RNISQVL

SEQ ID NO: 49753 - protein, 5 aa, Artificial sequence
  Protein classification predicting sequence
CEHHL

SEQ ID NO: 49754 - protein, 7 aa, Artificial sequence
  Protein classification predicting sequence
LESVKLP

SEQ ID NO: 49755 - protein, 6 aa, Artificial sequence
  Protein classification predicting sequence
GELRYP

SEQ ID NO: 49756 - protein, 7 aa, Artificial sequence
  Protein classification predicting sequence
INQDPLG

SEQ ID NO: 49757 - protein, 7 aa, Artificial sequence
  Protein classification predicting sequence
LGYHQSR

SEQ ID NO: 49758 - protein, 6 aa, Artificial sequence
  Protein classification predicting sequence
DMNEPS

SEQ ID NO: 49759 - protein, 7 aa, Artificial sequence
  Protein classification predicting sequence
PFYRNHN

SEQ ID NO: 49760 - protein, 12 aa, Artificial sequence
  Protein classification predicting sequence
MDLVVNHTSDEH

SEQ ID NO: 49761 - protein, 10 aa, Artificial sequence
  Protein classification predicting sequence
WNSLFWNNHD

SEQ ID NO: 49762 - protein, 6 aa, Artificial sequence
  Protein classification predicting sequence
SWPAYE

SEQ ID NO: 49763 - protein, 5 aa, Artificial sequence
  Protein classification predicting sequence
CGSCW

SEQ ID NO: 49764 - protein, 6 aa, Artificial sequence
  Protein classification predicting sequence
WGADWG

SEQ ID NO: 49765 - protein, 6 aa, Artificial sequence
  Protein classification predicting sequence
EESYPY

SEQ ID NO: 49766 - protein, 6 aa, Artificial sequence
  Protein classification predicting sequence
HVCHVS

SEQ ID NO: 49767 - protein, 6 aa, Artificial sequence
  Protein classification predicting sequence
FPEYST

SEQ ID NO: 49768 - protein, 9 aa, Artificial sequence
  Protein classification predicting sequence
LVGKGITFD

SEQ ID NO: 49769 - protein, 10 aa, Artificial sequence
  Protein classification predicting sequence
NTDAEGRLVL

SEQ ID NO: 49770 - protein, 7 aa, Artificial sequence
  Protein classification predicting sequence
WFGNLVT

SEQ ID NO: 49771 - protein, 6 aa, Artificial sequence
  Protein classification predicting sequence
WLNEGF

SEQ ID NO: 49772 - protein, 10 aa, Artificial sequence
  Protein classification predicting sequence
DLWLNEGFAS

SEQ ID NO: 49773 - protein, 13 aa, Artificial sequence
  Protein classification predicting sequence
GAMENWGLVTYRE

SEQ ID NO: 49774 - protein, 6 aa, Artificial sequence
  Protein classification predicting sequence
HQWFGN

SEQ ID NO: 49775 - protein, 8 aa, Artificial sequence
  Protein classification predicting sequence
NTDAEGRL

SEQ ID NO: 49776 - protein, 9 aa, Artificial sequence
  Protein classification predicting sequence
HELAHQWFG

SEQ ID NO: 49777 - protein, 7 aa, Artificial sequence
  Protein classification predicting sequence
WLNEGFA

SEQ ID NO: 49778 - protein, 8 aa, Artificial sequence
  Protein classification predicting sequence
DLVVNHTS

SEQ ID NO: 49779 - protein, 6 aa, Artificial sequence
  Protein classification predicting sequence
DAVFNH

SEQ ID NO: 49780 - protein, 6 aa, Artificial sequence
  Protein classification predicting sequence
GVAGFR

SEQ ID NO: 49781 - protein, 6 aa, Artificial sequence
  Protein classification predicting sequence
FVDNHD

SEQ ID NO: 49782 - protein, 7 aa, Artificial sequence
  Protein classification predicting sequence
GHWGGDN

SEQ ID NO: 49783 - protein, 7 aa, Artificial sequence
  Protein classification predicting sequence
NQSGFDL

SEQ ID NO: 49784 - protein, 6 aa, Artificial sequence
  Protein classification predicting sequence
LPFDID

SEQ ID NO: 49785 - protein, 6 aa, Artificial sequence
  Protein classification predicting sequence
IWLSPV

SEQ ID NO: 49786 - protein, 12 aa, Artificial sequence
  Protein classification predicting sequence
ENGNYDYLMYAD

SEQ ID NO: 49787 - protein, 6 aa, Artificial sequence
  Protein classification predicting sequence
DGFRID

SEQ ID NO: 49788 - protein, 7 aa, Artificial sequence
  Protein classification predicting sequence
YTGLSLP

SEQ ID NO: 49789 - protein, 7 aa, Artificial sequence
  Protein classification predicting sequence
CGSCWAF

SEQ ID NO: 49790 - protein, 7 aa, Artificial sequence
  Protein classification predicting sequence
GAMENWG

SEQ ID NO: 49791 - protein, 8 aa, Artificial sequence
  Protein classification predicting sequence
KGASILRM

SEQ ID NO: 49792 - protein, 6 aa, Artificial sequence
  Protein classification predicting sequence
LTLIHI

SEQ ID NO: 49793 - protein, 9 aa, Artificial sequence
  Protein classification predicting sequence
SIAWTRIFP

SEQ ID NO: 49794 - protein, 7 aa, Artificial sequence
  Protein classification predicting sequence
LGGDHSI

SEQ ID NO: 49795 - protein, 7 aa, Artificial sequence
  Protein classification predicting sequence
AFAPGVS

SEQ ID NO: 49796 - protein, 6 aa, Artificial sequence
  Protein classification predicting sequence
LGGDHS

SEQ ID NO: 49797 - protein, 8 aa, Artificial sequence
  Protein classification predicting sequence
LCTPSRAA

SEQ ID NO: 49798 - protein, 6 aa, Artificial sequence
  Protein classification predicting sequence
GKWHLG

SEQ ID NO: 49799 - protein, 6 aa, Artificial sequence
  Protein classification predicting sequence
GIAFYR

SEQ ID NO: 49800 - protein, 8 aa, Artificial sequence
  Protein classification predicting sequence
VITHGTDT

SEQ ID NO: 49801 - protein, 12 aa, Artificial sequence
  Protein classification predicting sequence
DGIVITHGTDTL

SEQ ID NO: 49802 - protein, 7 aa, Artificial sequence
  Protein classification predicting sequence
LNPQKAR

SEQ ID NO: 49803 - protein, 6 aa, Artificial sequence
  Protein classification predicting sequence
THGTDT

SEQ ID NO: 49804 - protein, 7 aa, Artificial sequence
  Protein classification predicting sequence
ITHGTDT

SEQ ID NO: 49805 - protein, 9 aa, Artificial sequence
  Protein classification predicting sequence
CSDKTGTLT

SEQ ID NO: 49806 - protein, 14 aa, Artificial sequence
  Protein classification predicting sequence
MTGDGVNDAPALKK

SEQ ID NO: 49807 - protein, 6 aa, Artificial sequence
  Protein classification predicting sequence
LGMAIP

SEQ ID NO: 49808 - protein, 9 aa, Artificial sequence
  Protein classification predicting sequence
MTGDGVNDA

SEQ ID NO: 49809 - protein, 5 aa, Artificial sequence
  Protein classification predicting sequence
VMFVV

SEQ ID NO: 49810 - protein, 8 aa, Artificial sequence
  Protein classification predicting sequence
ADVGIAMG

SEQ ID NO: 49811 - protein, 6 aa, Artificial sequence
  Protein classification predicting sequence
VFGGVG

SEQ ID NO: 49812 - protein, 8 aa, Artificial sequence
  Protein classification predicting sequence
LPFNPTDK

SEQ ID NO: 49813 - protein, 6 aa, Artificial sequence
  Protein classification predicting sequence
VFTLLV

SEQ ID NO: 49814 - protein, 7 aa, Artificial sequence
  Protein classification predicting sequence
GDIIPAD

SEQ ID NO: 49815 - protein, 7 aa, Artificial sequence
  Protein classification predicting sequence
NDAPALA

SEQ ID NO: 49816 - protein, 7 aa, Artificial sequence
  Protein classification predicting sequence
NDVVLVE

SEQ ID NO: 49817 - protein, 7 aa, Artificial sequence
  Protein classification predicting sequence
DGEIIEG

SEQ ID NO: 49818 - protein, 6 aa, Artificial sequence
  Protein classification predicting sequence
MITGDN

SEQ ID NO: 49819 - protein, 6 aa, Artificial sequence
  Protein classification predicting sequence
GYLVAM

SEQ ID NO: 49820 - protein, 11 aa, Artificial sequence
  Protein classification predicting sequence
NDAPALAQADV

SEQ ID NO: 49821 - protein, 6 aa, Artificial sequence
  Protein classification predicting sequence
MLTMVY

SEQ ID NO: 49822 - protein, 6 aa, Artificial sequence
  Protein classification predicting sequence
QLIATA

SEQ ID NO: 49823 - protein, 7 aa, Artificial sequence
  Protein classification predicting sequence
GRGQREL

SEQ ID NO: 49824 - protein, 5 aa, Artificial sequence
  Protein classification predicting sequence
AIGQK

SEQ ID NO: 49825 - protein, 13 aa, Artificial sequence
  Protein classification predicting sequence
FYLHSRLLERAAK

SEQ ID NO: 49826 - protein, 6 aa, Artificial sequence
  Protein classification predicting sequence
PIDGKG

SEQ ID NO: 49827 - protein, 9 aa, Artificial sequence
  Protein classification predicting sequence
PIGRGQREL

SEQ ID NO: 49828 - protein, 6 aa, Artificial sequence
  Protein classification predicting sequence
RQTGKT

SEQ ID NO: 49829 - protein, 6 aa, Artificial sequence
  Protein classification predicting sequence
ITDGQI

SEQ ID NO: 49830 - protein, 8 aa, Artificial sequence
  Protein classification predicting sequence
AQFGSDLD

SEQ ID NO: 49831 - protein, 17 aa, Artificial sequence
  Protein classification predicting sequence
PGDVFYLHSRLLERAAK

SEQ ID NO: 49832 - protein, 7 aa, Artificial sequence
  Protein classification predicting sequence
GRVVNAL

SEQ ID NO: 49833 - protein, 10 aa, Artificial sequence
  Protein classification predicting sequence
ICIYVAIGQK

SEQ ID NO: 49834 - protein, 14 aa, Artificial sequence
  Protein classification predicting sequence
ICIYVAIGQKDSTV

SEQ ID NO: 49835 - protein, 9 aa, Artificial sequence
  Protein classification predicting sequence
CIYVAIGQK

SEQ ID NO: 49836 - protein, 9 aa, Artificial sequence
  Protein classification predicting sequence
IAPYSGVTM

SEQ ID NO: 49837 - protein, 6 aa, Artificial sequence
  Protein classification predicting sequence
TMAEYF

SEQ ID NO: 49838 - protein, 6 aa, Artificial sequence
  Protein classification predicting sequence
MKKVAG

SEQ ID NO: 49839 - protein, 21 aa, Artificial sequence
  Protein classification predicting sequence
GDVSAYIPTNVISITDGQIFL

SEQ ID NO: 49840 - protein, 6 aa, Artificial sequence
  Protein classification predicting sequence
TIAEYF

SEQ ID NO: 49841 - protein, 7 aa, Artificial sequence
  Protein classification predicting sequence
GIRPAVN

SEQ ID NO: 49842 - protein, 6 aa, Artificial sequence
  Protein classification predicting sequence
GYLDDI

SEQ ID NO: 49843 - protein, 6 aa, Artificial sequence
  Protein classification predicting sequence
YTIVVA

SEQ ID NO: 49844 - protein, 8 aa, Artificial sequence
  Protein classification predicting sequence
NLEEDNVG

SEQ ID NO: 49845 - protein, 6 aa, Artificial sequence
  Protein classification predicting sequence
DGKGPI

SEQ ID NO: 49846 - protein, 16 aa, Artificial sequence
  Protein classification predicting sequence
MIPIGRGQRELIIGDR

SEQ ID NO: 49847 - protein, 17 aa, Artificial sequence
  Protein classification predicting sequence
GRGQRELIIGDRQTGKT

SEQ ID NO: 49848 - protein, 7 aa, Artificial sequence
  Protein classification predicting sequence
DTIINQK

SEQ ID NO: 49849 - protein, 7 aa, Artificial sequence
  Protein classification predicting sequence
AQIKAMK

SEQ ID NO: 49850 - protein, 12 aa, Artificial sequence
  Protein classification predicting sequence
PTNVISITDGQI

SEQ ID NO: 49851 - protein, 14 aa, Artificial sequence
  Protein classification predicting sequence
PTNVISITDGQIFL

SEQ ID NO: 49852 - protein, 7 aa, Artificial sequence
  Protein classification predicting sequence
SVSRVGG

SEQ ID NO: 49853 - protein, 6 aa, Artificial sequence
  Protein classification predicting sequence
GDGIAR

SEQ ID NO: 49854 - protein, 11 aa, Artificial sequence
  Protein classification predicting sequence
FYLHSRLLERA

SEQ ID NO: 49855 - protein, 6 aa, Artificial sequence
  Protein classification predicting sequence
KTGSIT

SEQ ID NO: 49856 - protein, 9 aa, Artificial sequence
  Protein classification predicting sequence
LIVYDDLSK

SEQ ID NO: 49857 - protein, 9 aa, Artificial sequence
  Protein classification predicting sequence
TALPIIETQ

SEQ ID NO: 49858 - protein, 8 aa, Artificial sequence
  Protein classification predicting sequence
QVGDGIAR

SEQ ID NO: 49859 - protein, 12 aa, Artificial sequence
  Protein classification predicting sequence
QVGDGIARIYGL

SEQ ID NO: 49860 - protein, 8 aa, Artificial sequence
  Protein classification predicting sequence
TALPIIET

SEQ ID NO: 49861 - protein, 16 aa, Artificial sequence
  Protein classification predicting sequence
YIPTNVISITDGQIFL

SEQ ID NO: 49862 - protein, 9 aa, Artificial sequence
  Protein classification predicting sequence
FAQFGSDLD

SEQ ID NO: 49863 - protein, 17 aa, Artificial sequence
  Protein classification predicting sequence
AYIPTNVISITDGQIFL

SEQ ID NO: 49864 - protein, 19 aa, Artificial sequence
  Protein classification predicting sequence
PIGRGQRELIIGDRQTGKT

SEQ ID NO: 49865 - protein, 18 aa, Artificial sequence
  Protein classification predicting sequence
SAYIPTNVISITDGQIFL

SEQ ID NO: 49866 - protein, 24 aa, Artificial sequence
  Protein classification predicting sequence
AIDSMIPIGRGQRELIIGDRQTGK

SEQ ID NO: 49867 - protein, 10 aa, Artificial sequence
  Protein classification predicting sequence
SVSRVGGSAQ

SEQ ID NO: 49868 - protein, 13 aa, Artificial sequence
  Protein classification predicting sequence
PIGRGQRELIIGD

SEQ ID NO: 49869 - protein, 6 aa, Artificial sequence
  Protein classification predicting sequence
PGDVFY

SEQ ID NO: 49870 - protein, 11 aa, Artificial sequence
  Protein classification predicting sequence
HSRLLERAAKL

SEQ ID NO: 49871 - protein, 7 aa, Artificial sequence
  Protein classification predicting sequence
QFGSDLD

SEQ ID NO: 49872 - protein, 6 aa, Artificial sequence
  Protein classification predicting sequence
YVAIGQ

SEQ ID NO: 49873 - protein, 7 aa, Artificial sequence
  Protein classification predicting sequence
PIGRGQR

SEQ ID NO: 49874 - protein, 6 aa, Artificial sequence
  Protein classification predicting sequence
LPIIET

SEQ ID NO: 49875 - protein, 6 aa, Artificial sequence
  Protein classification predicting sequence
GQRELI

SEQ ID NO: 49876 - protein, 7 aa, Artificial sequence
  Protein classification predicting sequence
RPPGREA

SEQ ID NO: 49877 - protein, 7 aa, Artificial sequence
  Protein classification predicting sequence
KLELAQY

SEQ ID NO: 49878 - protein, 6 aa, Artificial sequence
  Protein classification predicting sequence
LGEPVD

SEQ ID NO: 49879 - protein, 6 aa, Artificial sequence
  Protein classification predicting sequence
EAFPGD

SEQ ID NO: 49880 - protein, 7 aa, Artificial sequence
  Protein classification predicting sequence
VGDGIAR

SEQ ID NO: 49881 - protein, 9 aa, Artificial sequence
  Protein classification predicting sequence
QVGDGIARI

SEQ ID NO: 49882 - protein, 7 aa, Artificial sequence
  Protein classification predicting sequence
SDLDKAT

SEQ ID NO: 49883 - protein, 15 aa, Artificial sequence
  Protein classification predicting sequence
IPTNVISITDGQIFL

SEQ ID NO: 49884 - protein, 9 aa, Artificial sequence
  Protein classification predicting sequence
GQKRSTVAQ

SEQ ID NO: 49885 - protein, 5 aa, Artificial sequence
  Protein classification predicting sequence
YTIVV

SEQ ID NO: 49886 - protein, 20 aa, Artificial sequence
  Protein classification predicting sequence
PIGRGQRELIIGDRQTGKTA

SEQ ID NO: 49887 - protein, 20 aa, Artificial sequence
  Protein classification predicting sequence
GRGQRELIIGDRQTGKTAVA

SEQ ID NO: 49888 - protein, 6 aa, Artificial sequence
  Protein classification predicting sequence
DTIINQ

SEQ ID NO: 49889 - protein, 6 aa, Artificial sequence
  Protein classification predicting sequence
LPIVET

SEQ ID NO: 49890 - protein, 12 aa, Artificial sequence
  Protein classification predicting sequence
IPTNVISITDGQ

SEQ ID NO: 49891 - protein, 8 aa, Artificial sequence
  Protein classification predicting sequence
GISVSRVG

SEQ ID NO: 49892 - protein, 6 aa, Artificial sequence
  Protein classification predicting sequence
KAMKQV

SEQ ID NO: 49893 - protein, 16 aa, Artificial sequence
  Protein classification predicting sequence
PGDVFYLHSRLLERAA

SEQ ID NO: 49894 - protein, 7 aa, Artificial sequence
  Protein classification predicting sequence
RPAINAG

SEQ ID NO: 49895 - protein, 16 aa, Artificial sequence
  Protein classification predicting sequence
GDVFYLHSRLLERAAK

SEQ ID NO: 49896 - protein, 8 aa, Artificial sequence
  Protein classification predicting sequence
YVAIGQKR

SEQ ID NO: 49897 - protein, 24 aa, Artificial sequence
  Protein classification predicting sequence
GGKIGLFGGAGVGKTVLIMELINN

SEQ ID NO: 49898 - protein, 7 aa, Artificial sequence
  Protein classification predicting sequence
AMDSTDG

SEQ ID NO: 49899 - protein, 6 aa, Artificial sequence
  Protein classification predicting sequence
LVRGQK

SEQ ID NO: 49900 - protein, 9 aa, Artificial sequence
  Protein classification predicting sequence
GGKIGLFGG

SEQ ID NO: 49901 - protein, 13 aa, Artificial sequence
  Protein classification predicting sequence
VGKTVLIMELINN

SEQ ID NO: 49902 - protein, 8 aa, Artificial sequence
  Protein classification predicting sequence
EMMESGVI

SEQ ID NO: 49903 - protein, 6 aa, Artificial sequence
  Protein classification predicting sequence
FRFTQA

SEQ ID NO: 49904 - protein, 7 aa, Artificial sequence
  Protein classification predicting sequence
ELINNIA

SEQ ID NO: 49905 - protein, 6 aa, Artificial sequence
  Protein classification predicting sequence
EHYETA

SEQ ID NO: 49906 - protein, 6 aa, Artificial sequence
  Protein classification predicting sequence
QIIGPV

SEQ ID NO: 49907 - protein, 6 aa, Artificial sequence
  Protein classification predicting sequence
MELINN

SEQ ID NO: 49908 - protein, 6 aa, Artificial sequence
  Protein classification predicting sequence
TTVLSR

SEQ ID NO: 49909 - protein, 8 aa, Artificial sequence
  Protein classification predicting sequence
QAGSEVSA

SEQ ID NO: 49910 - protein, 9 aa, Artificial sequence
  Protein classification predicting sequence
QAVYVPADD

SEQ ID NO: 49911 - protein, 6 aa, Artificial sequence
  Protein classification predicting sequence
IIAILG

SEQ ID NO: 49912 - protein, 7 aa, Artificial sequence
  Protein classification predicting sequence
ELSDEDK

SEQ ID NO: 49913 - protein, 7 aa, Artificial sequence
  Protein classification predicting sequence
QAGSEVS

SEQ ID NO: 49914 - protein, 13 aa, Artificial sequence
  Protein classification predicting sequence
QDVLLFIDNIFRF

SEQ ID NO: 49915 - protein, 10 aa, Artificial sequence
  Protein classification predicting sequence
GLTMAEYFRD

SEQ ID NO: 49916 - protein, 9 aa, Artificial sequence
  Protein classification predicting sequence
TDPAPATTF

SEQ ID NO: 49917 - protein, 6 aa, Artificial sequence
  Protein classification predicting sequence
HLDATT

SEQ ID NO: 49918 - protein, 18 aa, Artificial sequence
  Protein classification predicting sequence
GGKIGLFGGAGVGKTVLI

SEQ ID NO: 49919 - protein, 26 aa, Artificial sequence
  Protein classification predicting sequence
GGKIGLFGGAGVGKTVLIQELINNIA

SEQ ID NO: 49920 - protein, 8 aa, Artificial sequence
  Protein classification predicting sequence
GSITSVQA

SEQ ID NO: 49921 - protein, 8 aa, Artificial sequence
  Protein classification predicting sequence
STSRILDP

SEQ ID NO: 49922 - protein, 7 aa, Artificial sequence
  Protein classification predicting sequence
PIHREAP

SEQ ID NO: 49923 - protein, 10 aa, Artificial sequence
  Protein classification predicting sequence
GQMNEPPGAR

SEQ ID NO: 49924 - protein, 13 aa, Artificial sequence
  Protein classification predicting sequence
RYKELQDIIAILG

SEQ ID NO: 49925 - protein, 8 aa, Artificial sequence
  Protein classification predicting sequence
GQMNEPPG

SEQ ID NO: 49926 - protein, 12 aa, Artificial sequence
  Protein classification predicting sequence
GVGERTREGNDL

SEQ ID NO: 49927 - protein, 19 aa, Artificial sequence
  Protein classification predicting sequence
GSITSVQAVYVPADDLTDP

SEQ ID NO: 49928 - protein, 10 aa, Artificial sequence
  Protein classification predicting sequence
YVPADDLTDP

SEQ ID NO: 49929 - protein, 11 aa, Artificial sequence
  Protein classification predicting sequence
DIIAILGMDEL

SEQ ID NO: 49930 - protein, 8 aa, Artificial sequence
  Protein classification predicting sequence
EVSALLGR

SEQ ID NO: 49931 - protein, 10 aa, Artificial sequence
  Protein classification predicting sequence
PSAVGYQPTL

SEQ ID NO: 49932 - protein, 11 aa, Artificial sequence
  Protein classification predicting sequence
GVGERTREGND

SEQ ID NO: 49933 - protein, 8 aa, Artificial sequence
  Protein classification predicting sequence
LTGLTMAE

SEQ ID NO: 49934 - protein, 9 aa, Artificial sequence
  Protein classification predicting sequence
DVLFFVDNI

SEQ ID NO: 49935 - protein, 11 aa, Artificial sequence
  Protein classification predicting sequence
LVYGQMNEPPG

SEQ ID NO: 49936 - protein, 12 aa, Artificial sequence
  Protein classification predicting sequence
IYPAVDPLDSTS

SEQ ID NO: 49937 - protein, 6 aa, Artificial sequence
  Protein classification predicting sequence
ETIRGF

SEQ ID NO: 49938 - protein, 8 aa, Artificial sequence
  Protein classification predicting sequence
FIDNIFRF

SEQ ID NO: 49939 - protein, 24 aa, Artificial sequence
  Protein classification predicting sequence
EVSALLGRMPSAVGYQPTLATEMG

SEQ ID NO: 49940 - protein, 9 aa, Artificial sequence
  Protein classification predicting sequence
GIYPAVDPL

SEQ ID NO: 49941 - protein, 9 aa, Artificial sequence
  Protein classification predicting sequence
LQDIIAILG

SEQ ID NO: 49942 - protein, 18 aa, Artificial sequence
  Protein classification predicting sequence
LQDIIAILGMDELSDEDK

SEQ ID NO: 49943 - protein, 11 aa, Artificial sequence
  Protein classification predicting sequence
PSAVGYQPTLA

SEQ ID NO: 49944 - protein, 7 aa, Artificial sequence
  Protein classification predicting sequence
DELSDED

SEQ ID NO: 49945 - protein, 7 aa, Artificial sequence
  Protein classification predicting sequence
VAEQFTG

SEQ ID NO: 49946 - protein, 15 aa, Artificial sequence
  Protein classification predicting sequence
PSAVGYQPTLATEMG

SEQ ID NO: 49947 - protein, 6 aa, Artificial sequence
  Protein classification predicting sequence
SRILDP

SEQ ID NO: 49948 - protein, 9 aa, Artificial sequence
  Protein classification predicting sequence
GVGERTREG

SEQ ID NO: 49949 - protein, 6 aa, Artificial sequence
  Protein classification predicting sequence
STSRIL

SEQ ID NO: 49950 - protein, 13 aa, Artificial sequence
  Protein classification predicting sequence
GVGERTREGNDLY

SEQ ID NO: 49951 - protein, 11 aa, Artificial sequence
  Protein classification predicting sequence
YGQMNEPPGAR

SEQ ID NO: 49952 - protein, 6 aa, Artificial sequence
  Protein classification predicting sequence
QVIGPV

SEQ ID NO: 49953 - protein, 14 aa, Artificial sequence
  Protein classification predicting sequence
GLFGGAGVGKTVLI

SEQ ID NO: 49954 - protein, 7 aa, Artificial sequence
  Protein classification predicting sequence
YPAVDPL

SEQ ID NO: 49955 - protein, 15 aa, Artificial sequence
  Protein classification predicting sequence
LQRYKELQDIIAILG

SEQ ID NO: 49956 - protein, 16 aa, Artificial sequence
  Protein classification predicting sequence
YVPADDLTDPAPATTF

SEQ ID NO: 49957 - protein, 10 aa, Artificial sequence
  Protein classification predicting sequence
HLDATTVLSR

SEQ ID NO: 49958 - protein, 7 aa, Artificial sequence
  Protein classification predicting sequence
LQRYKEL

SEQ ID NO: 49959 - protein, 6 aa, Artificial sequence
  Protein classification predicting sequence
SALLGR

SEQ ID NO: 49960 - protein, 6 aa, Artificial sequence
  Protein classification predicting sequence
REGNDL

SEQ ID NO: 49961 - protein, 7 aa, Artificial sequence
  Protein classification predicting sequence
VGYQPTL

SEQ ID NO: 49962 - protein, 15 aa, Artificial sequence
  Protein classification predicting sequence
TDPAPATTFAHLDAT

SEQ ID NO: 49963 - protein, 11 aa, Artificial sequence
  Protein classification predicting sequence
GIYPAVDPLDS

SEQ ID NO: 49964 - protein, 9 aa, Artificial sequence
  Protein classification predicting sequence
LQERITSTK

SEQ ID NO: 49965 - protein, 23 aa, Artificial sequence
  Protein classification predicting sequence
QAGSEVSALLGRMPSAVGYQPTL

SEQ ID NO: 49966 - protein, 7 aa, Artificial sequence
  Protein classification predicting sequence
GVSTLEK

SEQ ID NO: 49967 - protein, 13 aa, Artificial sequence
  Protein classification predicting sequence
LFGGAGVGKTVLI

SEQ ID NO: 49968 - protein, 17 aa, Artificial sequence
  Protein classification predicting sequence
GGKIGLFGGAGVGKTVL

SEQ ID NO: 49969 - protein, 9 aa, Artificial sequence
  Protein classification predicting sequence
LTMAEYFRD

SEQ ID NO: 49970 - protein, 19 aa, Artificial sequence
  Protein classification predicting sequence
EVSALLGRMPSAVGYQPTL

SEQ ID NO: 49971 - protein, 21 aa, Artificial sequence
  Protein classification predicting sequence
QDVLLFIDNIFRFTQAGSEVS

SEQ ID NO: 49972 - protein, 9 aa, Artificial sequence
  Protein classification predicting sequence
FGGAGVGKT

SEQ ID NO: 49973 - protein, 13 aa, Artificial sequence
  Protein classification predicting sequence
QAVYVPADDLTDP

SEQ ID NO: 49974 - protein, 12 aa, Artificial sequence
  Protein classification predicting sequence
FTHLDATTVLSR

SEQ ID NO: 49975 - protein, 13 aa, Artificial sequence
  Protein classification predicting sequence
YKELQDIIAILGM

SEQ ID NO: 49976 - protein, 6 aa, Artificial sequence
  Protein classification predicting sequence
HYNTAR

SEQ ID NO: 49977 - protein, 6 aa, Artificial sequence
  Protein classification predicting sequence
VRAVAM

SEQ ID NO: 49978 - protein, 7 aa, Artificial sequence
  Protein classification predicting sequence
TDGLQRG

SEQ ID NO: 49979 - protein, 6 aa, Artificial sequence
  Protein classification predicting sequence
EGQDVL

SEQ ID NO: 49980 - protein, 9 aa, Artificial sequence
  Protein classification predicting sequence
DNIFRFTQA

SEQ ID NO: 49981 - protein, 13 aa, Artificial sequence
  Protein classification predicting sequence
GIYPAVDPLDSTS

SEQ ID NO: 49982 - protein, 8 aa, Artificial sequence
  Protein classification predicting sequence
RARKIERF

SEQ ID NO: 49983 - protein, 15 aa, Artificial sequence
  Protein classification predicting sequence
GGKIGLFGGAGVGKT

SEQ ID NO: 49984 - protein, 8 aa, Artificial sequence
  Protein classification predicting sequence
LIMELINN

SEQ ID NO: 49985 - protein, 19 aa, Artificial sequence
  Protein classification predicting sequence
DNIFRFTQAGSEVSALLGR

SEQ ID NO: 49986 - protein, 12 aa, Artificial sequence
  Protein classification predicting sequence
FAHLDATTVLSR

SEQ ID NO: 49987 - protein, 18 aa, Artificial sequence
  Protein classification predicting sequence
GLFGGAGVGKTVLIQELI

SEQ ID NO: 49988 - protein, 19 aa, Artificial sequence
  Protein classification predicting sequence
KGGKIGLFGGAGVGKTVLI

SEQ ID NO: 49989 - protein, 12 aa, Artificial sequence
  Protein classification predicting sequence
TGIKVVDLLAPY

SEQ ID NO: 49990 - protein, 14 aa, Artificial sequence
  Protein classification predicting sequence
YVPADDLTDPAPAT

SEQ ID NO: 49991 - protein, 10 aa, Artificial sequence
  Protein classification predicting sequence
FAHLDATTVL

SEQ ID NO: 49992 - protein, 16 aa, Artificial sequence
  Protein classification predicting sequence
FIDNIFRFTQAGSEVS

SEQ ID NO: 49993 - protein, 13 aa, Artificial sequence
  Protein classification predicting sequence
LLGRMPSAVGYQP

SEQ ID NO: 49994 - protein, 6 aa, Artificial sequence
  Protein classification predicting sequence
QDVLLF

SEQ ID NO: 49995 - protein, 8 aa, Artificial sequence
  Protein classification predicting sequence
FVDNIFRF

SEQ ID NO: 49996 - protein, 10 aa, Artificial sequence
  Protein classification predicting sequence
GVGERTREGN

SEQ ID NO: 49997 - protein, 16 aa, Artificial sequence
  Protein classification predicting sequence
GGKIGLFGGAGVGKTV

SEQ ID NO: 49998 - protein, 10 aa, Artificial sequence
  Protein classification predicting sequence
VYGQMNEPPG

SEQ ID NO: 49999 - protein, 7 aa, Artificial sequence
  Protein classification predicting sequence
DPLDSTS

SEQ ID NO: 50000 - protein, 15 aa, Artificial sequence
  Protein classification predicting sequence
SVFAGVGERTREGND

SEQ ID NO: 50001 - protein, 6 aa, Artificial sequence
  Protein classification predicting sequence
IDVERA

SEQ ID NO: 50002 - protein, 6 aa, Artificial sequence
  Protein classification predicting sequence
GEKQRV

SEQ ID NO: 50003 - protein, 7 aa, Artificial sequence
  Protein classification predicting sequence
IGQLIAF

SEQ ID NO: 50004 - protein, 7 aa, Artificial sequence
  Protein classification predicting sequence
VATLAIA

SEQ ID NO: 50005 - protein, 5 aa, Artificial sequence
  Protein classification predicting sequence
ITKAM

SEQ ID NO: 50006 - protein, 6 aa, Artificial sequence
  Protein classification predicting sequence
DRGLCG

SEQ ID NO: 50007 - protein, 7 aa, Artificial sequence
  Protein classification predicting sequence
GLCGGFN

SEQ ID NO: 50008 - protein, 7 aa, Artificial sequence
  Protein classification predicting sequence
EVSVIAI

SEQ ID NO: 50009 - protein, 6 aa, Artificial sequence
  Protein classification predicting sequence
RQAAIT

SEQ ID NO: 50010 - protein, 6 aa, Artificial sequence
  Protein classification predicting sequence
DIAKNQ

SEQ ID NO: 50011 - protein, 6 aa, Artificial sequence
  Protein classification predicting sequence
FYNVLL

SEQ ID NO: 50012 - protein, 7 aa, Artificial sequence
  Protein classification predicting sequence
LVISCPC

SEQ ID NO: 50013 - protein, 11 aa, Artificial sequence
  Protein classification predicting sequence
THGVTQETANL

SEQ ID NO: 50014 - protein, 14 aa, Artificial sequence
  Protein classification predicting sequence
GALNESFSDVFGYF

SEQ ID NO: 50015 - protein, 8 aa, Artificial sequence
  Protein classification predicting sequence
GDALRSMS

SEQ ID NO: 50016 - protein, 16 aa, Artificial sequence
  Protein classification predicting sequence
GGVHTNSGIPNKAAYN

SEQ ID NO: 50017 - protein, 8 aa, Artificial sequence
  Protein classification predicting sequence
QIYYRALT

SEQ ID NO: 50018 - protein, 7 aa, Artificial sequence
  Protein classification predicting sequence
GILGLAY

SEQ ID NO: 50019 - protein, 6 aa, Artificial sequence
  Protein classification predicting sequence
IGTPPQ

SEQ ID NO: 50020 - protein, 12 aa, Artificial sequence
  Protein classification predicting sequence
ILVDTGSSNFAV

SEQ ID NO: 50021 - protein, 9 aa, Artificial sequence
  Protein classification predicting sequence
SFRITILPQ

SEQ ID NO: 50022 - protein, 6 aa, Artificial sequence
  Protein classification predicting sequence
GLQNYG

SEQ ID NO: 50023 - protein, 6 aa, Artificial sequence
  Protein classification predicting sequence
RTSHYP

SEQ ID NO: 50024 - protein, 6 aa, Artificial sequence
  Protein classification predicting sequence
GVNKHE

SEQ ID NO: 50025 - protein, 7 aa, Artificial sequence
  Protein classification predicting sequence
GGWEHRD

SEQ ID NO: 50026 - protein, 6 aa, Artificial sequence
  Protein classification predicting sequence
DNFEWA

SEQ ID NO: 50027 - protein, 5 aa, Artificial sequence
  Protein classification predicting sequence
YWGQN

SEQ ID NO: 50028 - protein, 6 aa, Artificial sequence
  Protein classification predicting sequence
ATAAYQ

SEQ ID NO: 50029 - protein, 6 aa, Artificial sequence
  Protein classification predicting sequence
WSRIFP

SEQ ID NO: 50030 - protein, 7 aa, Artificial sequence
  Protein classification predicting sequence
WGWQIDP

SEQ ID NO: 50031 - protein, 7 aa, Artificial sequence
  Protein classification predicting sequence
FLGINYY

SEQ ID NO: 50032 - protein, 7 aa, Artificial sequence
  Protein classification predicting sequence
IYITENG

SEQ ID NO: 50033 - protein, 7 aa, Artificial sequence
  Protein classification predicting sequence
YHRYKED

SEQ ID NO: 50034 - protein, 6 aa, Artificial sequence
  Protein classification predicting sequence
HWDLPQ

SEQ ID NO: 50035 - protein, 6 aa, Artificial sequence
  Protein classification predicting sequence
APGRCS

SEQ ID NO: 50036 - protein, 8 aa, Artificial sequence
  Protein classification predicting sequence
GFTVRFGL

SEQ ID NO: 50037 - protein, 7 aa, Artificial sequence
  Protein classification predicting sequence
GYIRMAR

SEQ ID NO: 50038 - protein, 6 aa, Artificial sequence
  Protein classification predicting sequence
LLLDEP

SEQ ID NO: 50039 - protein, 7 aa, Artificial sequence
  Protein classification predicting sequence
SFTAVCQ

SEQ ID NO: 50040 - protein, 6 aa, Artificial sequence
  Protein classification predicting sequence
GIVSWG

SEQ ID NO: 50041 - protein, 6 aa, Artificial sequence
  Protein classification predicting sequence
GWKLRY

SEQ ID NO: 50042 - protein, 6 aa, Artificial sequence
  Protein classification predicting sequence
LISGWG

SEQ ID NO: 50043 - protein, 7 aa, Artificial sequence
  Protein classification predicting sequence
CKGDSGG

SEQ ID NO: 50044 - protein, 7 aa, Artificial sequence
  Protein classification predicting sequence
WVLTAAH

SEQ ID NO: 50045 - protein, 7 aa, Artificial sequence
  Protein classification predicting sequence
CNGDSGG

SEQ ID NO: 50046 - protein, 6 aa, Artificial sequence
  Protein classification predicting sequence
GLVSWG

SEQ ID NO: 50047 - protein, 6 aa, Artificial sequence
  Protein classification predicting sequence
GIYTRV

SEQ ID NO: 50048 - protein, 7 aa, Artificial sequence
  Protein classification predicting sequence
CEGDSGG

SEQ ID NO: 50049 - protein, 7 aa, Artificial sequence
  Protein classification predicting sequence
GGCRNYP

SEQ ID NO: 50050 - protein, 7 aa, Artificial sequence
  Protein classification predicting sequence
FEDFTGG

SEQ ID NO: 50051 - protein, 8 aa, Artificial sequence
  Protein classification predicting sequence
GSLLGCSI

SEQ ID NO: 50052 - protein, 9 aa, Artificial sequence
  Protein classification predicting sequence
GHAYSVTGA

SEQ ID NO: 50053 - protein, 9 aa, Artificial sequence
  Protein classification predicting sequence
LEICNLTPD

SEQ ID NO: 50054 - protein, 8 aa, Artificial sequence
  Protein classification predicting sequence
YAGIFHFQ

SEQ ID NO: 50055 - protein, 10 aa, Artificial sequence
  Protein classification predicting sequence
GEWVDVVVDD

SEQ ID NO: 50056 - protein, 7 aa, Artificial sequence
  Protein classification predicting sequence
EDGEFWM

SEQ ID NO: 50057 - protein, 9 aa, Artificial sequence
  Protein classification predicting sequence
TAGGCRNYP

SEQ ID NO: 50058 - protein, 6 aa, Artificial sequence
  Protein classification predicting sequence
WKRPTE

SEQ ID NO: 50059 - protein, 7 aa, Artificial sequence
  Protein classification predicting sequence
YEALSGG

SEQ ID NO: 50060 - protein, 5 aa, Artificial sequence
  Protein classification predicting sequence
EWYEL

SEQ ID NO: 50061 - protein, 7 aa, Artificial sequence
  Protein classification predicting sequence
VPSTFEP

SEQ ID NO: 50062 - protein, 8 aa, Artificial sequence
  Protein classification predicting sequence
LGFKELGP

SEQ ID NO: 50063 - protein, 21 aa, Artificial sequence
  Protein classification predicting sequence
GATRTDICQGALGDCWLLAAI

SEQ ID NO: 50064 - protein, 6 aa, Artificial sequence
  Protein classification predicting sequence
LPTKDG

SEQ ID NO: 50065 - protein, 13 aa, Artificial sequence
  Protein classification predicting sequence
EFWSALLEKAYAK

SEQ ID NO: 50066 - protein, 9 aa, Artificial sequence
  Protein classification predicting sequence
EGFEDFTGG

SEQ ID NO: 50067 - protein, 10 aa, Artificial sequence
  Protein classification predicting sequence
GSLLGCSIDI

SEQ ID NO: 50068 - protein, 11 aa, Artificial sequence
  Protein classification predicting sequence
KLVKGHAYSVT

SEQ ID NO: 50069 - protein, 7 aa, Artificial sequence
  Protein classification predicting sequence
DMHTIGF

SEQ ID NO: 50070 - protein, 7 aa, Artificial sequence
  Protein classification predicting sequence
FINLREV

SEQ ID NO: 50071 - protein, 6 aa, Artificial sequence
  Protein classification predicting sequence
YGDGSS

SEQ ID NO: 50072 - protein, 6 aa, Artificial sequence
  Protein classification predicting sequence
DTGSSD

SEQ ID NO: 50073 - protein, 7 aa, Artificial sequence
  Protein classification predicting sequence
AILDTGT

SEQ ID NO: 50074 - protein, 8 aa, Artificial sequence
  Protein classification predicting sequence
DSGTTISY

SEQ ID NO: 50075 - protein, 8 aa, Artificial sequence
  Protein classification predicting sequence
DTGSSDLW

SEQ ID NO: 50076 - protein, 9 aa, Artificial sequence
  Protein classification predicting sequence
DGLLGLAFS

SEQ ID NO: 50077 - protein, 8 aa, Artificial sequence
  Protein classification predicting sequence
YTGSITYT

SEQ ID NO: 50078 - protein, 6 aa, Artificial sequence
  Protein classification predicting sequence
DTGSSN

SEQ ID NO: 50079 - protein, 7 aa, Artificial sequence
  Protein classification predicting sequence
NNRIGFA

SEQ ID NO: 50080 - protein, 7 aa, Artificial sequence
  Protein classification predicting sequence
GTPPQNF

SEQ ID NO: 50081 - protein, 8 aa, Artificial sequence
  Protein classification predicting sequence
DTGTSLIT

SEQ ID NO: 50082 - protein, 9 aa, Artificial sequence
  Protein classification predicting sequence
FTVVFDTGS

SEQ ID NO: 50083 - protein, 6 aa, Artificial sequence
  Protein classification predicting sequence
NLWVPS

SEQ ID NO: 50084 - protein, 13 aa, Artificial sequence
  Protein classification predicting sequence
AIVDTGTSLITGP

SEQ ID NO: 50085 - protein, 14 aa, Artificial sequence
  Protein classification predicting sequence
PPAGPLWILGDVFI

SEQ ID NO: 50086 - protein, 6 aa, Artificial sequence
  Protein classification predicting sequence
NRVGFA

SEQ ID NO: 50087 - protein, 12 aa, Artificial sequence
  Protein classification predicting sequence
GPLWILGDVFIG

SEQ ID NO: 50088 - protein, 8 aa, Artificial sequence
  Protein classification predicting sequence
IGIGTPPQ

SEQ ID NO: 50089 - protein, 6 aa, Artificial sequence
  Protein classification predicting sequence
YFGEIS

SEQ ID NO: 50090 - protein, 7 aa, Artificial sequence
  Protein classification predicting sequence
TFIINGV

SEQ ID NO: 50091 - protein, 8 aa, Artificial sequence
  Protein classification predicting sequence
LWILGDVF

SEQ ID NO: 50092 - protein, 11 aa, Artificial sequence
  Protein classification predicting sequence
LWILGDVFIRQ

SEQ ID NO: 50093 - protein, 8 aa, Artificial sequence
  Protein classification predicting sequence
GGVTPVFD

SEQ ID NO: 50094 - protein, 7 aa, Artificial sequence
  Protein classification predicting sequence
FTVIFDT

SEQ ID NO: 50095 - protein, 8 aa, Artificial sequence
  Protein classification predicting sequence
SSNLWVPS

SEQ ID NO: 50096 - protein, 10 aa, Artificial sequence
  Protein classification predicting sequence
FDGILGLAYP

SEQ ID NO: 50097 - protein, 6 aa, Artificial sequence
  Protein classification predicting sequence
PVFDNM

SEQ ID NO: 50098 - protein, 6 aa, Artificial sequence
  Protein classification predicting sequence
DWRKKG

SEQ ID NO: 50099 - protein, 9 aa, Artificial sequence
  Protein classification predicting sequence
AEAGEIIGG

SEQ ID NO: 50100 - protein, 12 aa, Artificial sequence
  Protein classification predicting sequence
AFKGDSGGPLLC

SEQ ID NO: 50101 - protein, 6 aa, Artificial sequence
  Protein classification predicting sequence
VFTRVS

SEQ ID NO: 50102 - protein, 9 aa, Artificial sequence
  Protein classification predicting sequence
VAQGIVSYG

SEQ ID NO: 50103 - protein, 8 aa, Artificial sequence
  Protein classification predicting sequence
KGYVTPVK

SEQ ID NO: 50104 - protein, 11 aa, Artificial sequence
  Protein classification predicting sequence
QGQCGSCWAFS

SEQ ID NO: 50105 - protein, 7 aa, Artificial sequence
  Protein classification predicting sequence
VLVVGYG

SEQ ID NO: 50106 - protein, 10 aa, Artificial sequence
  Protein classification predicting sequence
NHAVLAVGYG

SEQ ID NO: 50107 - protein, 11 aa, Artificial sequence
  Protein classification predicting sequence
CWAFSAVGALE

SEQ ID NO: 50108 - protein, 21 aa, Artificial sequence
  Protein classification predicting sequence
NEEGWRRAVWEKNMKMIELHN

SEQ ID NO: 50109 - protein, 9 aa, Artificial sequence
  Protein classification predicting sequence
QCGSCWAFS

SEQ ID NO: 50110 - protein, 6 aa, Artificial sequence
  Protein classification predicting sequence
PKSVDW

SEQ ID NO: 50111 - protein, 8 aa, Artificial sequence
  Protein classification predicting sequence
CGSCWAFS

SEQ ID NO: 50112 - protein, 12 aa, Artificial sequence
  Protein classification predicting sequence
NGGLDSEESYPY

SEQ ID NO: 50113 - protein, 7 aa, Artificial sequence
  Protein classification predicting sequence
KGAVTPV

SEQ ID NO: 50114 - protein, 9 aa, Artificial sequence
  Protein classification predicting sequence
HAVLAVGYG

SEQ ID NO: 50115 - protein, 10 aa, Artificial sequence
  Protein classification predicting sequence
EKALMKAVAT

SEQ ID NO: 50116 - protein, 10 aa, Artificial sequence
  Protein classification predicting sequence
SFQFYKSGIY

SEQ ID NO: 50117 - protein, 6 aa, Artificial sequence
  Protein classification predicting sequence
GALEGQ

SEQ ID NO: 50118 - protein, 7 aa, Artificial sequence
  Protein classification predicting sequence
HGVLVVG

SEQ ID NO: 50119 - protein, 9 aa, Artificial sequence
  Protein classification predicting sequence
YWLVKNSWG

SEQ ID NO: 50120 - protein, 7 aa, Artificial sequence
  Protein classification predicting sequence
GDMTSEE

SEQ ID NO: 50121 - protein, 6 aa, Artificial sequence
  Protein classification predicting sequence
AFQYVQ

SEQ ID NO: 50122 - protein, 7 aa, Artificial sequence
  Protein classification predicting sequence
THRRLYG

SEQ ID NO: 50123 - protein, 6 aa, Artificial sequence
  Protein classification predicting sequence
LEGQMF

SEQ ID NO: 50124 - protein, 14 aa, Artificial sequence
  Protein classification predicting sequence
MNAFGDMTNEEFRQ

SEQ ID NO: 50125 - protein, 6 aa, Artificial sequence
  Protein classification predicting sequence
DWREKG

SEQ ID NO: 50126 - protein, 9 aa, Artificial sequence
  Protein classification predicting sequence
KTGKLVSLS

SEQ ID NO: 50127 - protein, 10 aa, Artificial sequence
  Protein classification predicting sequence
RRLIWEKNLK

SEQ ID NO: 50128 - protein, 8 aa, Artificial sequence
  Protein classification predicting sequence
MNHLGDMT

SEQ ID NO: 50129 - protein, 9 aa, Artificial sequence
  Protein classification predicting sequence
HGVLVVGYG

SEQ ID NO: 50130 - protein, 7 aa, Artificial sequence
  Protein classification predicting sequence
GDMTNEE

SEQ ID NO: 50131 - protein, 7 aa, Artificial sequence
  Protein classification predicting sequence
QNLVDCS

SEQ ID NO: 50132 - protein, 8 aa, Artificial sequence
  Protein classification predicting sequence
GCGGGYMT

SEQ ID NO: 50133 - protein, 6 aa, Artificial sequence
  Protein classification predicting sequence
YKSGVY

SEQ ID NO: 50134 - protein, 6 aa, Artificial sequence
  Protein classification predicting sequence
KLENFK

SEQ ID NO: 50135 - protein, 7 aa, Artificial sequence
  Protein classification predicting sequence
VTPVKNQ

SEQ ID NO: 50136 - protein, 8 aa, Artificial sequence
  Protein classification predicting sequence
GPVSVAID

SEQ ID NO: 50137 - protein, 6 aa, Artificial sequence
  Protein classification predicting sequence
CGSCWA

SEQ ID NO: 50138 - protein, 7 aa, Artificial sequence
  Protein classification predicting sequence
EQQLVDC

SEQ ID NO: 50139 - protein, 8 aa, Artificial sequence
  Protein classification predicting sequence
GESYAGHY

SEQ ID NO: 50140 - protein, 7 aa, Artificial sequence
  Protein classification predicting sequence
GGPGCSS

SEQ ID NO: 50141 - protein, 6 aa, Artificial sequence
  Protein classification predicting sequence
WRKTRS

SEQ ID NO: 50142 - protein, 6 aa, Artificial sequence
  Protein classification predicting sequence
IYQASG

SEQ ID NO: 50143 - protein, 7 aa, Artificial sequence
  Protein classification predicting sequence
FELRDTG

SEQ ID NO: 50144 - protein, 8 aa, Artificial sequence
  Protein classification predicting sequence
EHLQLDFW

SEQ ID NO: 50145 - protein, 8 aa, Artificial sequence
  Protein classification predicting sequence
GASSNPCS

SEQ ID NO: 50146 - protein, 12 aa, Artificial sequence
  Protein classification predicting sequence
NSEVEVKSIVDF

SEQ ID NO: 50147 - protein, 6 aa, Artificial sequence
  Protein classification predicting sequence
GIKYSF

SEQ ID NO: 50148 - protein, 11 aa, Artificial sequence
  Protein classification predicting sequence
HAREWISPAFC

SEQ ID NO: 50149 - protein, 6 aa, Artificial sequence
  Protein classification predicting sequence
FYVLPV

SEQ ID NO: 50150 - protein, 5 aa, Artificial sequence
  Protein classification predicting sequence
RMWRK

SEQ ID NO: 50151 - protein, 6 aa, Artificial sequence
  Protein classification predicting sequence
EIYSWI

SEQ ID NO: 50152 - protein, 7 aa, Artificial sequence
  Protein classification predicting sequence
PTAEETW

SEQ ID NO: 50153 - protein, 6 aa, Artificial sequence
  Protein classification predicting sequence
HAREWI

SEQ ID NO: 50154 - protein, 10 aa, Artificial sequence
  Protein classification predicting sequence
HAREWISPAF

SEQ ID NO: 50155 - protein, 6 aa, Artificial sequence
  Protein classification predicting sequence
QWFVRE

SEQ ID NO: 50156 - protein, 7 aa, Artificial sequence
  Protein classification predicting sequence
HAREWIS

SEQ ID NO: 50157 - protein, 13 aa, Artificial sequence
  Protein classification predicting sequence
QGIKYSFTFELRD

SEQ ID NO: 50158 - protein, 6 aa, Artificial sequence
  Protein classification predicting sequence
ELRDTG

SEQ ID NO: 50159 - protein, 13 aa, Artificial sequence
  Protein classification predicting sequence
ELRDTGRYGFLLP

SEQ ID NO: 50160 - protein, 9 aa, Artificial sequence
  Protein classification predicting sequence
DLNRNFPDL

SEQ ID NO: 50161 - protein, 7 aa, Artificial sequence
  Protein classification predicting sequence
VANYPYD

SEQ ID NO: 50162 - protein, 10 aa, Artificial sequence
  Protein classification predicting sequence
CFEITLELSC

SEQ ID NO: 50163 - protein, 8 aa, Artificial sequence
  Protein classification predicting sequence
GMQDFNYL

SEQ ID NO: 50164 - protein, 6 aa, Artificial sequence
  Protein classification predicting sequence
KFPPEE

SEQ ID NO: 50165 - protein, 7 aa, Artificial sequence
  Protein classification predicting sequence
GKSTLLR

SEQ ID NO: 50166 - protein, 7 aa, Artificial sequence
  Protein classification predicting sequence
GKTSLLR

SEQ ID NO: 50167 - protein, 6 aa, Artificial sequence
  Protein classification predicting sequence
KQREQY

SEQ ID NO: 50168 - protein, 8 aa, Artificial sequence
  Protein classification predicting sequence
GAGKTTLL

SEQ ID NO: 50169 - protein, 7 aa, Artificial sequence
  Protein classification predicting sequence
GPNGAGK

SEQ ID NO: 50170 - protein, 8 aa, Artificial sequence
  Protein classification predicting sequence
DEPTSALD

SEQ ID NO: 50171 - protein, 6 aa, Artificial sequence
  Protein classification predicting sequence
MTVFEN

SEQ ID NO: 50172 - protein, 7 aa, Artificial sequence
  Protein classification predicting sequence
LHQLQLN

SEQ ID NO: 50173 - protein, 6 aa, Artificial sequence
  Protein classification predicting sequence
DGWRLD

SEQ ID NO: 50174 - protein, 8 aa, Artificial sequence
  Protein classification predicting sequence
RKAHPALR

SEQ ID NO: 50175 - protein, 9 aa, Artificial sequence
  Protein classification predicting sequence
GDSGGPLVC

SEQ ID NO: 50176 - protein, 6 aa, Artificial sequence
  Protein classification predicting sequence
PGIYTR

SEQ ID NO: 50177 - protein, 6 aa, Artificial sequence
  Protein classification predicting sequence
GAVDFI

SEQ ID NO: 50178 - protein, 6 aa, Artificial sequence
  Protein classification predicting sequence
AKWWTQ

SEQ ID NO: 50179 - protein, 7 aa, Artificial sequence
  Protein classification predicting sequence
FGESAGA

SEQ ID NO: 50180 - protein, 11 aa, Artificial sequence
  Protein classification predicting sequence
LSEDCLYLNVW

SEQ ID NO: 50181 - protein, 8 aa, Artificial sequence
  Protein classification predicting sequence
PPLGSLRF

SEQ ID NO: 50182 - protein, 7 aa, Artificial sequence
  Protein classification predicting sequence
LALQWVQ

SEQ ID NO: 50183 - protein, 5 aa, Artificial sequence
  Protein classification predicting sequence
WANFA

SEQ ID NO: 50184 - protein, 7 aa, Artificial sequence
  Protein classification predicting sequence
WVPSIYC

SEQ ID NO: 50185 - protein, 7 aa, Artificial sequence
  Protein classification predicting sequence
QDLFSVY

SEQ ID NO: 50186 - protein, 7 aa, Artificial sequence
  Protein classification predicting sequence
SYYTGSL

SEQ ID NO: 50187 - protein, 6 aa, Artificial sequence
  Protein classification predicting sequence
FDTGSS

SEQ ID NO: 50188 - protein, 8 aa, Artificial sequence
  Protein classification predicting sequence
LWVPSVYC

SEQ ID NO: 50189 - protein, 6 aa, Artificial sequence
  Protein classification predicting sequence
PWQISL

SEQ ID NO: 50190 - protein, 7 aa, Artificial sequence
  Protein classification predicting sequence
VLTAAHC

SEQ ID NO: 50191 - protein, 6 aa, Artificial sequence
  Protein classification predicting sequence
VYTRVS

SEQ ID NO: 50192 - protein, 6 aa, Artificial sequence
  Protein classification predicting sequence
CGGSLI

SEQ ID NO: 50193 - protein, 7 aa, Artificial sequence
  Protein classification predicting sequence
ASHGFIV

SEQ ID NO: 50194 - protein, 5 aa, Artificial sequence
  Protein classification predicting sequence
RCCKI

SEQ ID NO: 50195 - protein, 8 aa, Artificial sequence
  Protein classification predicting sequence
RDFHINLF

SEQ ID NO: 50196 - protein, 7 aa, Artificial sequence
  Protein classification predicting sequence
SESSESS

SEQ ID NO: 50197 - protein, 7 aa, Artificial sequence
  Protein classification predicting sequence
PLHLDLT

SEQ ID NO: 50198 - protein, 6 aa, Artificial sequence
  Protein classification predicting sequence
PYQVSL

SEQ ID NO: 50199 - protein, 5 aa, Artificial sequence
  Protein classification predicting sequence
WQVSL

SEQ ID NO: 50200 - protein, 7 aa, Artificial sequence
  Protein classification predicting sequence
GIVSWGS

SEQ ID NO: 50201 - protein, 6 aa, Artificial sequence
  Protein classification predicting sequence
EFSELG

SEQ ID NO: 50202 - protein, 7 aa, Artificial sequence
  Protein classification predicting sequence
GKTTLLR

SEQ ID NO: 50203 - protein, 6 aa, Artificial sequence
  Protein classification predicting sequence
DNIAFG

SEQ ID NO: 50204 - protein, 8 aa, Artificial sequence
  Protein classification predicting sequence
QRVALARA

SEQ ID NO: 50205 - protein, 9 aa, Artificial sequence
  Protein classification predicting sequence
FVTHDQEEA

SEQ ID NO: 50206 - protein, 6 aa, Artificial sequence
  Protein classification predicting sequence
QISGGQ

SEQ ID NO: 50207 - protein, 9 aa, Artificial sequence
  Protein classification predicting sequence
VFQSYALFP

SEQ ID NO: 50208 - protein, 7 aa, Artificial sequence
  Protein classification predicting sequence
ADRVVVM

SEQ ID NO: 50209 - protein, 8 aa, Artificial sequence
  Protein classification predicting sequence
GKTTLLRL

SEQ ID NO: 50210 - protein, 9 aa, Artificial sequence
  Protein classification predicting sequence
HMTVFENVA

SEQ ID NO: 50211 - protein, 7 aa, Artificial sequence
  Protein classification predicting sequence
FHALKNI

SEQ ID NO: 50212 - protein, 6 aa, Artificial sequence
  Protein classification predicting sequence
NIAFGL

SEQ ID NO: 50213 - protein, 9 aa, Artificial sequence
  Protein classification predicting sequence
QLSGGQRQR

SEQ ID NO: 50214 - protein, 9 aa, Artificial sequence
  Protein classification predicting sequence
VFENVAFGL

SEQ ID NO: 50215 - protein, 12 aa, Artificial sequence
  Protein classification predicting sequence
LLLDEPFGALDA

SEQ ID NO: 50216 - protein, 6 aa, Artificial sequence
  Protein classification predicting sequence
DRVVVM

SEQ ID NO: 50217 - protein, 8 aa, Artificial sequence
  Protein classification predicting sequence
LSGGQRQR

SEQ ID NO: 50218 - protein, 10 aa, Artificial sequence
  Protein classification predicting sequence
LSGGQRQRIA

SEQ ID NO: 50219 - protein, 7 aa, Artificial sequence
  Protein classification predicting sequence
NIAFGLE

SEQ ID NO: 50220 - protein, 7 aa, Artificial sequence
  Protein classification predicting sequence
ALARALA

SEQ ID NO: 50221 - protein, 6 aa, Artificial sequence
  Protein classification predicting sequence
GGQRQR

SEQ ID NO: 50222 - protein, 6 aa, Artificial sequence
  Protein classification predicting sequence
VGRTPE

SEQ ID NO: 50223 - protein, 6 aa, Artificial sequence
  Protein classification predicting sequence
IGFVFQ

SEQ ID NO: 50224 - protein, 9 aa, Artificial sequence
  Protein classification predicting sequence
VTHDQEEAL

SEQ ID NO: 50225 - protein, 10 aa, Artificial sequence
  Protein classification predicting sequence
VFVTHDQEEA

SEQ ID NO: 50226 - protein, 7 aa, Artificial sequence
  Protein classification predicting sequence
ALKDINL

SEQ ID NO: 50227 - protein, 6 aa, Artificial sequence
  Protein classification predicting sequence
VPFDEG

SEQ ID NO: 50228 - protein, 11 aa, Artificial sequence
  Protein classification predicting sequence
GRDNARTPMQW

SEQ ID NO: 50229 - protein, 7 aa, Artificial sequence
  Protein classification predicting sequence
DDNGYDI

SEQ ID NO: 50230 - protein, 6 aa, Artificial sequence
  Protein classification predicting sequence
RDYYIW

SEQ ID NO: 50231 - protein, 6 aa, Artificial sequence
  Protein classification predicting sequence
ALANHK

SEQ ID NO: 50232 - protein, 6 aa, Artificial sequence
  Protein classification predicting sequence
DLNWEN

SEQ ID NO: 50233 - protein, 7 aa, Artificial sequence
  Protein classification predicting sequence
VALALIE

SEQ ID NO: 50234 - protein, 9 aa, Artificial sequence
  Protein classification predicting sequence
WVLDPIDGT

SEQ ID NO: 50235 - protein, 6 aa, Artificial sequence
  Protein classification predicting sequence
RLYDPN

SEQ ID NO: 50236 - protein, 6 aa, Artificial sequence
  Protein classification predicting sequence
YPYFSY

SEQ ID NO: 50237 - protein, 7 aa, Artificial sequence
  Protein classification predicting sequence
NLIQHVK

SEQ ID NO: 50238 - protein, 6 aa, Artificial sequence
  Protein classification predicting sequence
IKVSTS

SEQ ID NO: 50239 - protein, 6 aa, Artificial sequence
  Protein classification predicting sequence
NIYPYF

SEQ ID NO: 50240 - protein, 7 aa, Artificial sequence
  Protein classification predicting sequence
FAMFDEN

SEQ ID NO: 50241 - protein, 7 aa, Artificial sequence
  Protein classification predicting sequence
YRNLFDA

SEQ ID NO: 50242 - protein, 7 aa, Artificial sequence
  Protein classification predicting sequence
IKWYVDG

SEQ ID NO: 50243 - protein, 8 aa, Artificial sequence
  Protein classification predicting sequence
ALRGSNIE

SEQ ID NO: 50244 - protein, 6 aa, Artificial sequence
  Protein classification predicting sequence
FAMFDE

SEQ ID NO: 50245 - protein, 7 aa, Artificial sequence
  Protein classification predicting sequence
YIAVGNE

SEQ ID NO: 50246 - protein, 7 aa, Artificial sequence
  Protein classification predicting sequence
EKHFGLF

SEQ ID NO: 50247 - protein, 8 aa, Artificial sequence
  Protein classification predicting sequence
DMTLIGNS

SEQ ID NO: 50248 - protein, 8 aa, Artificial sequence
  Protein classification predicting sequence
PELEKHFG

SEQ ID NO: 50249 - protein, 7 aa, Artificial sequence
  Protein classification predicting sequence
ALRGSNI

SEQ ID NO: 50250 - protein, 7 aa, Artificial sequence
  Protein classification predicting sequence
SESGWPS

SEQ ID NO: 50251 - protein, 6 aa, Artificial sequence
  Protein classification predicting sequence
SKGAPE

SEQ ID NO: 50252 - protein, 8 aa, Artificial sequence
  Protein classification predicting sequence
PCYITGWG

SEQ ID NO: 50253 - protein, 6 aa, Artificial sequence
  Protein classification predicting sequence
TAAHCV

SEQ ID NO: 50254 - protein, 11 aa, Artificial sequence
  Protein classification predicting sequence
WQVHGIVSFGS

SEQ ID NO: 50255 - protein, 9 aa, Artificial sequence
  Protein classification predicting sequence
VLLGAHSLS

SEQ ID NO: 50256 - protein, 7 aa, Artificial sequence
  Protein classification predicting sequence
DIALIKL

SEQ ID NO: 50257 - protein, 11 aa, Artificial sequence
  Protein classification predicting sequence
CNGDSGGPLNC

SEQ ID NO: 50258 - protein, 6 aa, Artificial sequence
  Protein classification predicting sequence
YHTCGG

SEQ ID NO: 50259 - protein, 7 aa, Artificial sequence
  Protein classification predicting sequence
PDKLQQA

SEQ ID NO: 50260 - protein, 9 aa, Artificial sequence
  Protein classification predicting sequence
VHGVTSFVS

SEQ ID NO: 50261 - protein, 7 aa, Artificial sequence
  Protein classification predicting sequence
LYTHSYL

SEQ ID NO: 50262 - protein, 9 aa, Artificial sequence
  Protein classification predicting sequence
DLGGGSTQI

SEQ ID NO: 50263 - protein, 7 aa, Artificial sequence
  Protein classification predicting sequence
SAGAASV

SEQ ID NO: 50264 - protein, 8 aa, Artificial sequence
  Protein classification predicting sequence
SEDCLYLN

SEQ ID NO: 50265 - protein, 7 aa, Artificial sequence
  Protein classification predicting sequence
NIANFGG

SEQ ID NO: 50266 - protein, 6 aa, Artificial sequence
  Protein classification predicting sequence
WANFAR

SEQ ID NO: 50267 - protein, 6 aa, Artificial sequence
  Protein classification predicting sequence
SAGGAS

SEQ ID NO: 50268 - protein, 7 aa, Artificial sequence
  Protein classification predicting sequence
FLGIPFA

SEQ ID NO: 50269 - protein, 6 aa, Artificial sequence
  Protein classification predicting sequence
PYAEPP

SEQ ID NO: 50270 - protein, 6 aa, Artificial sequence
  Protein classification predicting sequence
KNSQPW

SEQ ID NO: 50271 - protein, 7 aa, Artificial sequence
  Protein classification predicting sequence
SHDLMLL

SEQ ID NO: 50272 - protein, 11 aa, Artificial sequence
  Protein classification predicting sequence
QKVTKFMLCAG

SEQ ID NO: 50273 - protein, 6 aa, Artificial sequence
  Protein classification predicting sequence
GITSWG

SEQ ID NO: 50274 - protein, 6 aa, Artificial sequence
  Protein classification predicting sequence
WIKDTM

SEQ ID NO: 50275 - protein, 7 aa, Artificial sequence
  Protein classification predicting sequence
PVGELRF

SEQ ID NO: 50276 - protein, 7 aa, Artificial sequence
  Protein classification predicting sequence
VTIFGES

SEQ ID NO: 50277 - protein, 8 aa, Artificial sequence
  Protein classification predicting sequence
DQRLALQW

SEQ ID NO: 50278 - protein, 7 aa, Artificial sequence
  Protein classification predicting sequence
DPLDGSS

SEQ ID NO: 50279 - protein, 6 aa, Artificial sequence
  Protein classification predicting sequence
DPLDGS

SEQ ID NO: 50280 - protein, 8 aa, Artificial sequence
  Protein classification predicting sequence
GFEGKNCE

SEQ ID NO: 50281 - protein, 5 aa, Artificial sequence
  Protein classification predicting sequence
MFCAG

SEQ ID NO: 50282 - protein, 6 aa, Artificial sequence
  Protein classification predicting sequence
GDSGGP

SEQ ID NO: 50283 - protein, 8 aa, Artificial sequence
  Protein classification predicting sequence
CQGDSGGP

SEQ ID NO: 50284 - protein, 8 aa, Artificial sequence
  Protein classification predicting sequence
RANSFLEE

SEQ ID NO: 50285 - protein, 8 aa, Artificial sequence
  Protein classification predicting sequence
LERECMEE

SEQ ID NO: 50286 - protein, 6 aa, Artificial sequence
  Protein classification predicting sequence
MFCAGY

SEQ ID NO: 50287 - protein, 12 aa, Artificial sequence
  Protein classification predicting sequence
YVDGDQCESNPC

SEQ ID NO: 50288 - protein, 7 aa, Artificial sequence
  Protein classification predicting sequence
EKTTEFW

SEQ ID NO: 50289 - protein, 6 aa, Artificial sequence
  Protein classification predicting sequence
CQFFTY

SEQ ID NO: 50290 - protein, 9 aa, Artificial sequence
  Protein classification predicting sequence
CKGDSGGPL

SEQ ID NO: 50291 - protein, 6 aa, Artificial sequence
  Protein classification predicting sequence
SWGEGC

SEQ ID NO: 50292 - protein, 8 aa, Artificial sequence
  Protein classification predicting sequence
GDSGGPLV

SEQ ID NO: 50293 - protein, 6 aa, Artificial sequence
  Protein classification predicting sequence
NKPGVY

SEQ ID NO: 50294 - protein, 8 aa, Artificial sequence
  Protein classification predicting sequence
WVVSAAHC

SEQ ID NO: 50295 - protein, 8 aa, Artificial sequence
  Protein classification predicting sequence
CKGDSGGP

SEQ ID NO: 50296 - protein, 6 aa, Artificial sequence
  Protein classification predicting sequence
GECPWQ

SEQ ID NO: 50297 - protein, 6 aa, Artificial sequence
  Protein classification predicting sequence
CGGTLI

SEQ ID NO: 50298 - protein, 6 aa, Artificial sequence
  Protein classification predicting sequence
TLNSYV

SEQ ID NO: 50299 - protein, 5 aa, Artificial sequence
  Protein classification predicting sequence
DGDQC

SEQ ID NO: 50300 - protein, 6 aa, Artificial sequence
  Protein classification predicting sequence
GGKDTC

SEQ ID NO: 50301 - protein, 7 aa, Artificial sequence
  Protein classification predicting sequence
SWGEECA

SEQ ID NO: 50302 - protein, 10 aa, Artificial sequence
  Protein classification predicting sequence
LGPSGCGKTT

SEQ ID NO: 50303 - protein, 28 aa, Artificial sequence
  Protein classification predicting sequence
VNTVFQSYALFPHMTVFENVAFGLRMQK

SEQ ID NO: 50304 - protein, 7 aa, Artificial sequence
  Protein classification predicting sequence
NVAFGLR

SEQ ID NO: 50305 - protein, 24 aa, Artificial sequence
  Protein classification predicting sequence
RKPHQLSGGQQQRVAIARAVVNKP

SEQ ID NO: 50306 - protein, 8 aa, Artificial sequence
  Protein classification predicting sequence
PKVLLLDE

SEQ ID NO: 50307 - protein, 19 aa, Artificial sequence
  Protein classification predicting sequence
LLLDESLSALDYKLRKQMQ

SEQ ID NO: 50308 - protein, 7 aa, Artificial sequence
  Protein classification predicting sequence
VLLRPED

SEQ ID NO: 50309 - protein, 7 aa, Artificial sequence
  Protein classification predicting sequence
IGYVRER

SEQ ID NO: 50310 - protein, 13 aa, Artificial sequence
  Protein classification predicting sequence
VMVSEFFNEDDPD

SEQ ID NO: 50311 - protein, 12 aa, Artificial sequence
  Protein classification predicting sequence
WVESWEVVLADE

SEQ ID NO: 50312 - protein, 11 aa, Artificial sequence
  Protein classification predicting sequence
VFQSYALFPHM

SEQ ID NO: 50313 - protein, 8 aa, Artificial sequence
  Protein classification predicting sequence
LFPHLNVY

SEQ ID NO: 50314 - protein, 9 aa, Artificial sequence
  Protein classification predicting sequence
SGGQQQRVA

SEQ ID NO: 50315 - protein, 6 aa, Artificial sequence
  Protein classification predicting sequence
LKNVCK

SEQ ID NO: 50316 - protein, 7 aa, Artificial sequence
  Protein classification predicting sequence
SGGQQQR

SEQ ID NO: 50317 - protein, 7 aa, Artificial sequence
  Protein classification predicting sequence
ALDAKVR

SEQ ID NO: 50318 - protein, 8 aa, Artificial sequence
  Protein classification predicting sequence
FVADFIGE

SEQ ID NO: 50319 - protein, 6 aa, Artificial sequence
  Protein classification predicting sequence
YVTHDQ

SEQ ID NO: 50320 - protein, 7 aa, Artificial sequence
  Protein classification predicting sequence
IPQGQMV

SEQ ID NO: 50321 - protein, 12 aa, Artificial sequence
  Protein classification predicting sequence
TLLGPSGCGKTT

SEQ ID NO: 50322 - protein, 8 aa, Artificial sequence
  Protein classification predicting sequence
LRLVAGLE

SEQ ID NO: 50323 - protein, 9 aa, Artificial sequence
  Protein classification predicting sequence
PDVLLMDEP

SEQ ID NO: 50324 - protein, 9 aa, Artificial sequence
  Protein classification predicting sequence
DEPLSNLDA

SEQ ID NO: 50325 - protein, 8 aa, Artificial sequence
  Protein classification predicting sequence
VTHDQEEA

SEQ ID NO: 50326 - protein, 7 aa, Artificial sequence
  Protein classification predicting sequence
VLNDISL

SEQ ID NO: 50327 - protein, 14 aa, Artificial sequence
  Protein classification predicting sequence
SGGQQQRVALARAL

SEQ ID NO: 50328 - protein, 9 aa, Artificial sequence
  Protein classification predicting sequence
QRVALARAL

SEQ ID NO: 50329 - protein, 13 aa, Artificial sequence
  Protein classification predicting sequence
SGGQQQRVALARA

SEQ ID NO: 50330 - protein, 6 aa, Artificial sequence
  Protein classification predicting sequence
LVTHDQ

SEQ ID NO: 50331 - protein, 8 aa, Artificial sequence
  Protein classification predicting sequence
VVMRDGRI

SEQ ID NO: 50332 - protein, 6 aa, Artificial sequence
  Protein classification predicting sequence
FTLPVE

SEQ ID NO: 50333 - protein, 5 aa, Artificial sequence
  Protein classification predicting sequence
WECPD

SEQ ID NO: 50334 - protein, 8 aa, Artificial sequence
  Protein classification predicting sequence
IYSASWGP

SEQ ID NO: 50335 - protein, 5 aa, Artificial sequence
  Protein classification predicting sequence
VWASG

SEQ ID NO: 50336 - protein, 9 aa, Artificial sequence
  Protein classification predicting sequence
VWASGNGGR

SEQ ID NO: 50337 - protein, 8 aa, Artificial sequence
  Protein classification predicting sequence
YRLYNLDV

SEQ ID NO: 50338 - protein, 10 aa, Artificial sequence
  Protein classification predicting sequence
PPLFSLGYHQ

SEQ ID NO: 50339 - protein, 8 aa, Artificial sequence
  Protein classification predicting sequence
GKRYFTWD

SEQ ID NO: 50340 - protein, 10 aa, Artificial sequence
  Protein classification predicting sequence
WNDMNEPSVF

SEQ ID NO: 50341 - protein, 12 aa, Artificial sequence
  Protein classification predicting sequence
GAVWTGDNTAEW

SEQ ID NO: 50342 - protein, 8 aa, Artificial sequence
  Protein classification predicting sequence
ELLVRWYQ

SEQ ID NO: 50343 - protein, 8 aa, Artificial sequence
  Protein classification predicting sequence
GAYQPFFR

SEQ ID NO: 50344 - protein, 6 aa, Artificial sequence
  Protein classification predicting sequence
RREPWL

SEQ ID NO: 50345 - protein, 8 aa, Artificial sequence
  Protein classification predicting sequence
IPVFQRGG

SEQ ID NO: 50346 - protein, 8 aa, Artificial sequence
  Protein classification predicting sequence
DLGGASTQ

SEQ ID NO: 50347 - protein, 7 aa, Artificial sequence
  Protein classification predicting sequence
SPPTQKL

SEQ ID NO: 50348 - protein, 6 aa, Artificial sequence
  Protein classification predicting sequence
RNAAIA

SEQ ID NO: 50349 - protein, 6 aa, Artificial sequence
  Protein classification predicting sequence
YYLFPD

SEQ ID NO: 50350 - protein, 6 aa, Artificial sequence
  Protein classification predicting sequence
CEGDSG

SEQ ID NO: 50351 - protein, 12 aa, Artificial sequence
  Protein classification predicting sequence
GVCYGMLGNNLP

SEQ ID NO: 50352 - protein, 9 aa, Artificial sequence
  Protein classification predicting sequence
GSNIEVMLG

SEQ ID NO: 50353 - protein, 7 aa, Artificial sequence
  Protein classification predicting sequence
SPVTGTS

SEQ ID NO: 50354 - protein, 13 aa, Artificial sequence
  Protein classification predicting sequence
LFTAPNVVVQDGS

SEQ ID NO: 50355 - protein, 7 aa, Artificial sequence
  Protein classification predicting sequence
EFTFDVD

SEQ ID NO: 50356 - protein, 7 aa, Artificial sequence
  Protein classification predicting sequence
YGTGYCD

SEQ ID NO: 50357 - protein, 8 aa, Artificial sequence
  Protein classification predicting sequence
PTPTPTPT

SEQ ID NO: 50358 - protein, 7 aa, Artificial sequence
  Protein classification predicting sequence
CNWYGTL

SEQ ID NO: 50359 - protein, 6 aa, Artificial sequence
  Protein classification predicting sequence
LTTRSG

SEQ ID NO: 50360 - protein, 7 aa, Artificial sequence
  Protein classification predicting sequence
GYCDAQC

SEQ ID NO: 50361 - protein, 8 aa, Artificial sequence
  Protein classification predicting sequence
EMDIWEAN

SEQ ID NO: 50362 - protein, 6 aa, Artificial sequence
  Protein classification predicting sequence
TVVTQF

SEQ ID NO: 50363 - protein, 8 aa, Artificial sequence
  Protein classification predicting sequence
WRQKQLEY

SEQ ID NO: 50364 - protein, 7 aa, Artificial sequence
  Protein classification predicting sequence
LNTPYDY

SEQ ID NO: 50365 - protein, 8 aa, Artificial sequence
  Protein classification predicting sequence
NSKVVNSQ

SEQ ID NO: 50366 - protein, 5 aa, Artificial sequence
  Protein classification predicting sequence
TGYCD

SEQ ID NO: 50367 - protein, 8 aa, Artificial sequence
  Protein classification predicting sequence
VAAHEFGH

SEQ ID NO: 50368 - protein, 6 aa, Artificial sequence
  Protein classification predicting sequence
GHSLGL

SEQ ID NO: 50369 - protein, 6 aa, Artificial sequence
  Protein classification predicting sequence
NLVGLI

SEQ ID NO: 50370 - protein, 8 aa, Artificial sequence
  Protein classification predicting sequence
ALPKGAVQ

SEQ ID NO: 50371 - protein, 10 aa, Artificial sequence
  Protein classification predicting sequence
EAPKMCGVTQ

SEQ ID NO: 50372 - protein, 11 aa, Artificial sequence
  Protein classification predicting sequence
GSSIILESGNV

SEQ ID NO: 50373 - protein, 9 aa, Artificial sequence
  Protein classification predicting sequence
GHNLGMEHD

SEQ ID NO: 50374 - protein, 20 aa, Artificial sequence
  Protein classification predicting sequence
FPYQGSSIILESGNVNDYEV

SEQ ID NO: 50375 - protein, 6 aa, Artificial sequence
  Protein classification predicting sequence
VQIGIR

SEQ ID NO: 50376 - protein, 7 aa, Artificial sequence
  Protein classification predicting sequence
DLVELNP

SEQ ID NO: 50377 - protein, 6 aa, Artificial sequence
  Protein classification predicting sequence
HYGGIP

SEQ ID NO: 50378 - protein, 8 aa, Artificial sequence
  Protein classification predicting sequence
FGDFNFRL

SEQ ID NO: 50379 - protein, 6 aa, Artificial sequence
  Protein classification predicting sequence
PAWCDR

SEQ ID NO: 50380 - protein, 6 aa, Artificial sequence
  Protein classification predicting sequence
WGHAVS

SEQ ID NO: 50381 - protein, 8 aa, Artificial sequence
  Protein classification predicting sequence
FRDPKVFW

SEQ ID NO: 50382 - protein, 13 aa, Artificial sequence
  Protein classification predicting sequence
GKDYYALQTFFNT

SEQ ID NO: 50383 - protein, 6 aa, Artificial sequence
  Protein classification predicting sequence
AWASNW

SEQ ID NO: 50384 - protein, 7 aa, Artificial sequence
  Protein classification predicting sequence
WMNDPNG

SEQ ID NO: 50385 - protein, 7 aa, Artificial sequence
  Protein classification predicting sequence
WASNWQY

SEQ ID NO: 50386 - protein, 9 aa, Artificial sequence
  Protein classification predicting sequence
GWMNDPNGL

SEQ ID NO: 50387 - protein, 9 aa, Artificial sequence
  Protein classification predicting sequence
APGAYVKGA

SEQ ID NO: 50388 - protein, 8 aa, Artificial sequence
  Protein classification predicting sequence
HGTRCAGE

SEQ ID NO: 50389 - protein, 9 aa, Artificial sequence
  Protein classification predicting sequence
SWGPTDNGK

SEQ ID NO: 50390 - protein, 8 aa, Artificial sequence
  Protein classification predicting sequence
DGYTNSIY

SEQ ID NO: 50391 - protein, 6 aa, Artificial sequence
  Protein classification predicting sequence
YSEACS

SEQ ID NO: 50392 - protein, 9 aa, Artificial sequence
  Protein classification predicting sequence
ANPNLTWRD

SEQ ID NO: 50393 - protein, 8 aa, Artificial sequence
  Protein classification predicting sequence
CEKNSQPW

SEQ ID NO: 50394 - protein, 13 aa, Artificial sequence
  Protein classification predicting sequence
GDSGGPLICDGVL

SEQ ID NO: 50395 - protein, 6 aa, Artificial sequence
  Protein classification predicting sequence
PADITD

SEQ ID NO: 50396 - protein, 6 aa, Artificial sequence
  Protein classification predicting sequence
LEGGKD

SEQ ID NO: 50397 - protein, 9 aa, Artificial sequence
  Protein classification predicting sequence
CNGDSGGPL

SEQ ID NO: 50398 - protein, 7 aa, Artificial sequence
  Protein classification predicting sequence
GDSGGPL

SEQ ID NO: 50399 - protein, 6 aa, Artificial sequence
  Protein classification predicting sequence
VWLGKN

SEQ ID NO: 50400 - protein, 9 aa, Artificial sequence
  Protein classification predicting sequence
LFQEEPSAQ

SEQ ID NO: 50401 - protein, 7 aa, Artificial sequence
  Protein classification predicting sequence
LALSLGG

SEQ ID NO: 50402 - protein, 9 aa, Artificial sequence
  Protein classification predicting sequence
DAAPPVQSR

SEQ ID NO: 50403 - protein, 11 aa, Artificial sequence
  Protein classification predicting sequence
FLILFLALSLG

SEQ ID NO: 50404 - protein, 7 aa, Artificial sequence
  Protein classification predicting sequence
DLMLLRL

SEQ ID NO: 50405 - protein, 9 aa, Artificial sequence
  Protein classification predicting sequence
GGWECEKHS

SEQ ID NO: 50406 - protein, 11 aa, Artificial sequence
  Protein classification predicting sequence
HPQWVLTAAHC

SEQ ID NO: 50407 - protein, 6 aa, Artificial sequence
  Protein classification predicting sequence
SRIVGG

SEQ ID NO: 50408 - protein, 18 aa, Artificial sequence
  Protein classification predicting sequence
SRIVGGWECEKHSQPWQV

SEQ ID NO: 50409 - protein, 6 aa, Artificial sequence
  Protein classification predicting sequence
SQPWQV

SEQ ID NO: 50410 - protein, 5 aa, Artificial sequence
  Protein classification predicting sequence
WIKDT

SEQ ID NO: 50411 - protein, 17 aa, Artificial sequence
  Protein classification predicting sequence
SNDLMLLRLSKPADITD

SEQ ID NO: 50412 - protein, 7 aa, Artificial sequence
  Protein classification predicting sequence
VLQGITS

SEQ ID NO: 50413 - protein, 8 aa, Artificial sequence
  Protein classification predicting sequence
LSKPADIT

SEQ ID NO: 50414 - protein, 8 aa, Artificial sequence
  Protein classification predicting sequence
GPPGTGKT

SEQ ID NO: 50415 - protein, 6 aa, Artificial sequence
  Protein classification predicting sequence
DFYHRY

SEQ ID NO: 50416 - protein, 7 aa, Artificial sequence
  Protein classification predicting sequence
TEDGYIL

SEQ ID NO: 50417 - protein, 10 aa, Artificial sequence
  Protein classification predicting sequence
DEMAKYDLPA

SEQ ID NO: 50418 - protein, 7 aa, Artificial sequence
  Protein classification predicting sequence
GLKDQRL

SEQ ID NO: 50419 - protein, 7 aa, Artificial sequence
  Protein classification predicting sequence
NIAAFGG

SEQ ID NO: 50420 - protein, 8 aa, Artificial sequence
  Protein classification predicting sequence
PPVGDLRF

SEQ ID NO: 50421 - protein, 7 aa, Artificial sequence
  Protein classification predicting sequence
EDCLYLN

SEQ ID NO: 50422 - protein, 5 aa, Artificial sequence
  Protein classification predicting sequence
VMVWI

SEQ ID NO: 50423 - protein, 7 aa, Artificial sequence
  Protein classification predicting sequence
VSMNYRV

SEQ ID NO: 50424 - protein, 6 aa, Artificial sequence
  Protein classification predicting sequence
VWIHGG

SEQ ID NO: 50425 - protein, 9 aa, Artificial sequence
  Protein classification predicting sequence
PPVGNLRFK

SEQ ID NO: 50426 - protein, 8 aa, Artificial sequence
  Protein classification predicting sequence
RITGLDPA

SEQ ID NO: 50427 - protein, 10 aa, Artificial sequence
  Protein classification predicting sequence
RITGLDPAGP

SEQ ID NO: 50428 - protein, 7 aa, Artificial sequence
  Protein classification predicting sequence
DIYPNGG

SEQ ID NO: 50429 - protein, 10 aa, Artificial sequence
  Protein classification predicting sequence
CLSCRKNRCN

SEQ ID NO: 50430 - protein, 8 aa, Artificial sequence
  Protein classification predicting sequence
GNSRGNTW

SEQ ID NO: 50431 - protein, 7 aa, Artificial sequence
  Protein classification predicting sequence
RLSPDDA

SEQ ID NO: 50432 - protein, 7 aa, Artificial sequence
  Protein classification predicting sequence
KCSHERS

SEQ ID NO: 50433 - protein, 7 aa, Artificial sequence
  Protein classification predicting sequence
VKAGETQ

SEQ ID NO: 50434 - protein, 7 aa, Artificial sequence
  Protein classification predicting sequence
HLFIDSL

SEQ ID NO: 50435 - protein, 7 aa, Artificial sequence
  Protein classification predicting sequence
KMYLKTR

SEQ ID NO: 50436 - protein, 8 aa, Artificial sequence
  Protein classification predicting sequence
SLGAHAAG

SEQ ID NO: 50437 - protein, 7 aa, Artificial sequence
  Protein classification predicting sequence
DADFVDV

SEQ ID NO: 50438 - protein, 7 aa, Artificial sequence
  Protein classification predicting sequence
RITGLDP

SEQ ID NO: 50439 - protein, 7 aa, Artificial sequence
  Protein classification predicting sequence
TLLQYLN

SEQ ID NO: 50440 - protein, 6 aa, Artificial sequence
  Protein classification predicting sequence
KQPDLN

SEQ ID NO: 50441 - protein, 6 aa, Artificial sequence
  Protein classification predicting sequence
GFRIDA

SEQ ID NO: 50442 - protein, 6 aa, Artificial sequence
  Protein classification predicting sequence
NHTSDE

SEQ ID NO: 50443 - protein, 12 aa, Artificial sequence
  Protein classification predicting sequence
GPSGCGKSTLLR

SEQ ID NO: 50444 - protein, 8 aa, Artificial sequence
  Protein classification predicting sequence
GVDGFRID

SEQ ID NO: 50445 - protein, 7 aa, Artificial sequence
  Protein classification predicting sequence
RDNARTP

SEQ ID NO: 50446 - protein, 7 aa, Artificial sequence
  Protein classification predicting sequence
NYKEINV

SEQ ID NO: 50447 - protein, 5 aa, Artificial sequence
  Protein classification predicting sequence
EWFWW

SEQ ID NO: 50448 - protein, 6 aa, Artificial sequence
  Protein classification predicting sequence
GGKDSC

SEQ ID NO: 50449 - protein, 6 aa, Artificial sequence
  Protein classification predicting sequence
GRIVGG

SEQ ID NO: 50450 - protein, 8 aa, Artificial sequence
  Protein classification predicting sequence
ALIKLKNK

SEQ ID NO: 50451 - protein, 7 aa, Artificial sequence
  Protein classification predicting sequence
WPWQVSL

SEQ ID NO: 50452 - protein, 9 aa, Artificial sequence
  Protein classification predicting sequence
IRNISQVLE

SEQ ID NO: 50453 - protein, 8 aa, Artificial sequence
  Protein classification predicting sequence
LDFPQHVS

SEQ ID NO: 50454 - protein, 12 aa, Artificial sequence
  Protein classification predicting sequence
LCIDFNKNLNED

SEQ ID NO: 50455 - protein, 12 aa, Artificial sequence
  Protein classification predicting sequence
FYLDLYPREGKY

SEQ ID NO: 50456 - protein, 12 aa, Artificial sequence
  Protein classification predicting sequence
HAACFGLQPGCL

SEQ ID NO: 50457 - protein, 12 aa, Artificial sequence
  Protein classification predicting sequence
TYFHEFGHVMHQ

SEQ ID NO: 50458 - protein, 19 aa, Artificial sequence
  Protein classification predicting sequence
ATPGTNMPATFGHLAGGYD

SEQ ID NO: 50459 - protein, 10 aa, Artificial sequence
  Protein classification predicting sequence
QYYGYLWSEV

SEQ ID NO: 50460 - protein, 7 aa, Artificial sequence
  Protein classification predicting sequence
THLTYRI

SEQ ID NO: 50461 - protein, 8 aa, Artificial sequence
  Protein classification predicting sequence
LFLVAAHE

SEQ ID NO: 50462 - protein, 8 aa, Artificial sequence
  Protein classification predicting sequence
DKYWRFDE

SEQ ID NO: 50463 - protein, 6 aa, Artificial sequence
  Protein classification predicting sequence
PFDGPG

SEQ ID NO: 50464 - protein, 6 aa, Artificial sequence
  Protein classification predicting sequence
LMYPVY

SEQ ID NO: 50465 - protein, 7 aa, Artificial sequence
  Protein classification predicting sequence
YRIVNYT

SEQ ID NO: 50466 - protein, 6 aa, Artificial sequence
  Protein classification predicting sequence
KIQEMQ

SEQ ID NO: 50467 - protein, 7 aa, Artificial sequence
  Protein classification predicting sequence
WSNVTPL

SEQ ID NO: 50468 - protein, 6 aa, Artificial sequence
  Protein classification predicting sequence
FFKDRF

SEQ ID NO: 50469 - protein, 5 aa, Artificial sequence
  Protein classification predicting sequence
TYFFV

SEQ ID NO: 50470 - protein, 8 aa, Artificial sequence
  Protein classification predicting sequence
GTNLFLVA

SEQ ID NO: 50471 - protein, 10 aa, Artificial sequence
  Protein classification predicting sequence
FLVAVHELGH

SEQ ID NO: 50472 - protein, 6 aa, Artificial sequence
  Protein classification predicting sequence
IQSLYG

SEQ ID NO: 50473 - protein, 8 aa, Artificial sequence
  Protein classification predicting sequence
PGPGIGGD

SEQ ID NO: 50474 - protein, 8 aa, Artificial sequence
  Protein classification predicting sequence
IGGDTHFD

SEQ ID NO: 50475 - protein, 7 aa, Artificial sequence
  Protein classification predicting sequence
MDAGYPK

SEQ ID NO: 50476 - protein, 6 aa, Artificial sequence
  Protein classification predicting sequence
RCGVPD

SEQ ID NO: 50477 - protein, 7 aa, Artificial sequence
  Protein classification predicting sequence
PRCGVPD

SEQ ID NO: 50478 - protein, 8 aa, Artificial sequence
  Protein classification predicting sequence
VWSDVTPL

SEQ ID NO: 50479 - protein, 6 aa, Artificial sequence
  Protein classification predicting sequence
VTPLTF

SEQ ID NO: 50480 - protein, 8 aa, Artificial sequence
  Protein classification predicting sequence
LTFDAITT

SEQ ID NO: 50481 - protein, 6 aa, Artificial sequence
  Protein classification predicting sequence
KTYFFV

SEQ ID NO: 50482 - protein, 6 aa, Artificial sequence
  Protein classification predicting sequence
LTFDAI

SEQ ID NO: 50483 - protein, 7 aa, Artificial sequence
  Protein classification predicting sequence
MQKFFGL

SEQ ID NO: 50484 - protein, 9 aa, Artificial sequence
  Protein classification predicting sequence
PRCGVPDVA

SEQ ID NO: 50485 - protein, 6 aa, Artificial sequence
  Protein classification predicting sequence
GDAHFD

SEQ ID NO: 50486 - protein, 6 aa, Artificial sequence
  Protein classification predicting sequence
GFFYFF

SEQ ID NO: 50487 - protein, 6 aa, Artificial sequence
  Protein classification predicting sequence
NYTPDL

SEQ ID NO: 50488 - protein, 8 aa, Artificial sequence
  Protein classification predicting sequence
IGGDAHFD

SEQ ID NO: 50489 - protein, 6 aa, Artificial sequence
  Protein classification predicting sequence
GYPKDI

SEQ ID NO: 50490 - protein, 8 aa, Artificial sequence
  Protein classification predicting sequence
LAHAFQPG

SEQ ID NO: 50491 - protein, 6 aa, Artificial sequence
  Protein classification predicting sequence
EILFFK

SEQ ID NO: 50492 - protein, 7 aa, Artificial sequence
  Protein classification predicting sequence
GLQAAYE

SEQ ID NO: 50493 - protein, 6 aa, Artificial sequence
  Protein classification predicting sequence
DGYRWC

SEQ ID NO: 50494 - protein, 9 aa, Artificial sequence
  Protein classification predicting sequence
EVTPLTFSR

SEQ ID NO: 50495 - protein, 8 aa, Artificial sequence
  Protein classification predicting sequence
HAYPPGPG

SEQ ID NO: 50496 - protein, 12 aa, Artificial sequence
  Protein classification predicting sequence
LSFDAISTLRGE

SEQ ID NO: 50497 - protein, 13 aa, Artificial sequence
  Protein classification predicting sequence
VKKIQEMQKFLGL

SEQ ID NO: 50498 - protein, 7 aa, Artificial sequence
  Protein classification predicting sequence
GIQSLYG

SEQ ID NO: 50499 - protein, 6 aa, Artificial sequence
  Protein classification predicting sequence
EPGYPK

SEQ ID NO: 50500 - protein, 8 aa, Artificial sequence
  Protein classification predicting sequence
YLENYYNL

SEQ ID NO: 50501 - protein, 8 aa, Artificial sequence
  Protein classification predicting sequence
TGKLDSNT

SEQ ID NO: 50502 - protein, 8 aa, Artificial sequence
  Protein classification predicting sequence
EPEFHLIS

SEQ ID NO: 50503 - protein, 6 aa, Artificial sequence
  Protein classification predicting sequence
EFDPNA

SEQ ID NO: 50504 - protein, 7 aa, Artificial sequence
  Protein classification predicting sequence
GGDAHFD

SEQ ID NO: 50505 - protein, 12 aa, Artificial sequence
  Protein classification predicting sequence
QDDIDGIQAIYG

SEQ ID NO: 50506 - protein, 6 aa, Artificial sequence
  Protein classification predicting sequence
FWPSLP

SEQ ID NO: 50507 - protein, 11 aa, Artificial sequence
  Protein classification predicting sequence
EHGDGYPFDGK

SEQ ID NO: 50508 - protein, 7 aa, Artificial sequence
  Protein classification predicting sequence
GLLAHAF

SEQ ID NO: 50509 - protein, 5 aa, Artificial sequence
  Protein classification predicting sequence
WCSTT

SEQ ID NO: 50510 - protein, 6 aa, Artificial sequence
  Protein classification predicting sequence
PCVFPF

SEQ ID NO: 50511 - protein, 6 aa, Artificial sequence
  Protein classification predicting sequence
HFDDDE

SEQ ID NO: 50512 - protein, 6 aa, Artificial sequence
  Protein classification predicting sequence
TTANYD

SEQ ID NO: 50513 - protein, 6 aa, Artificial sequence
  Protein classification predicting sequence
EALMYP

SEQ ID NO: 50514 - protein, 7 aa, Artificial sequence
  Protein classification predicting sequence
DDIDGIQ

SEQ ID NO: 50515 - protein, 7 aa, Artificial sequence
  Protein classification predicting sequence
KWGFCPD

SEQ ID NO: 50516 - protein, 15 aa, Artificial sequence
  Protein classification predicting sequence
GYSLFLVAAHEFGHA

SEQ ID NO: 50517 - protein, 6 aa, Artificial sequence
  Protein classification predicting sequence
KYGFCP

SEQ ID NO: 50518 - protein, 6 aa, Artificial sequence
  Protein classification predicting sequence
SDVTSF

SEQ ID NO: 50519 - protein, 9 aa, Artificial sequence
  Protein classification predicting sequence
LSGGERQRV

SEQ ID NO: 50520 - protein, 6 aa, Artificial sequence
  Protein classification predicting sequence
LSVGDQ

SEQ ID NO: 50521 - protein, 8 aa, Artificial sequence
  Protein classification predicting sequence
SLEEIVRL

SEQ ID NO: 50522 - protein, 7 aa, Artificial sequence
  Protein classification predicting sequence
HLLDRKP

SEQ ID NO: 50523 - protein, 6 aa, Artificial sequence
  Protein classification predicting sequence
LLMDEP

SEQ ID NO: 50524 - protein, 9 aa, Artificial sequence
  Protein classification predicting sequence
PDVLLLDEP

SEQ ID NO: 50525 - protein, 7 aa, Artificial sequence
  Protein classification predicting sequence
LLMDEPL

SEQ ID NO: 50526 - protein, 9 aa, Artificial sequence
  Protein classification predicting sequence
PKILLMDEP

SEQ ID NO: 50527 - protein, 7 aa, Artificial sequence
  Protein classification predicting sequence
VKDLSRL

SEQ ID NO: 50528 - protein, 6 aa, Artificial sequence
  Protein classification predicting sequence
NVKGYF

SEQ ID NO: 50529 - protein, 7 aa, Artificial sequence
  Protein classification predicting sequence
WNDPDML

SEQ ID NO: 50530 - protein, 5 aa, Artificial sequence
  Protein classification predicting sequence
TCIRF

SEQ ID NO: 50531 - protein, 7 aa, Artificial sequence
  Protein classification predicting sequence
QKGIIIH

SEQ ID NO: 50532 - protein, 7 aa, Artificial sequence
  Protein classification predicting sequence
SRTDRDD

SEQ ID NO: 50533 - protein, 9 aa, Artificial sequence
  Protein classification predicting sequence
HEHTRPDRD

SEQ ID NO: 50534 - protein, 7 aa, Artificial sequence
  Protein classification predicting sequence
HALGFFH

SEQ ID NO: 50535 - protein, 5 aa, Artificial sequence
  Protein classification predicting sequence
SIMHY

SEQ ID NO: 50536 - protein, 6 aa, Artificial sequence
  Protein classification predicting sequence
RIFQHE

SEQ ID NO: 50537 - protein, 12 aa, Artificial sequence
  Protein classification predicting sequence
NLTWRDMQHLVV

SEQ ID NO: 50538 - protein, 9 aa, Artificial sequence
  Protein classification predicting sequence
LTWRDMQHL

SEQ ID NO: 50539 - protein, 7 aa, Artificial sequence
  Protein classification predicting sequence
LDAGAMV

SEQ ID NO: 50540 - protein, 7 aa, Artificial sequence
  Protein classification predicting sequence
CGVGVAY

SEQ ID NO: 50541 - protein, 6 aa, Artificial sequence
  Protein classification predicting sequence
FAQVWC

SEQ ID NO: 50542 - protein, 11 aa, Artificial sequence
  Protein classification predicting sequence
TLGENIADNGG

SEQ ID NO: 50543 - protein, 9 aa, Artificial sequence
  Protein classification predicting sequence
TLKYPHYFP

SEQ ID NO: 50544 - protein, 9 aa, Artificial sequence
  Protein classification predicting sequence
LARALAVEP

SEQ ID NO: 50545 - protein, 8 aa, Artificial sequence
  Protein classification predicting sequence
QLSGGQLQ

SEQ ID NO: 50546 - protein, 9 aa, Artificial sequence
  Protein classification predicting sequence
GGVHTNSGI

SEQ ID NO: 50547 - protein, 9 aa, Artificial sequence
  Protein classification predicting sequence
YYLQDNTRG

SEQ ID NO: 50548 - protein, 11 aa, Artificial sequence
  Protein classification predicting sequence
SDIFGTLVEFY

SEQ ID NO: 50549 - protein, 16 aa, Artificial sequence
  Protein classification predicting sequence
NRNPDWEIGEDIYTPG

SEQ ID NO: 50550 - protein, 11 aa, Artificial sequence
  Protein classification predicting sequence
AGDALRSMSDP

SEQ ID NO: 50551 - protein, 9 aa, Artificial sequence
  Protein classification predicting sequence
VQAAADLYG

SEQ ID NO: 50552 - protein, 28 aa, Artificial sequence
  Protein classification predicting sequence
ELVYRYLDQEKNTFQLGGQARERLSLIG

SEQ ID NO: 50553 - protein, 12 aa, Artificial sequence
  Protein classification predicting sequence
DELGHTVMRFEQ

SEQ ID NO: 50554 - protein, 50 aa, Artificial sequence
  Protein classification predicting sequence
GAVLVAHVNDGELSSLSGTLIPNLDKRTLKTEAAISIQQAEMIAKQDVAD

SEQ ID NO: 50555 - protein, 21 aa, Artificial sequence
  Protein classification predicting sequence
VTKERPAAEEGKPTRLVIYPD

SEQ ID NO: 50556 - protein, 46 aa, Artificial sequence
  Protein classification predicting sequence
ETPRLAYEVNVRFLTPVPGNWIYMIDAADGKVLNKWNQMDEAKPGG

SEQ ID NO: 50557 - protein, 7 aa, Artificial sequence
  Protein classification predicting sequence
IRSTVHY

SEQ ID NO: 50558 - protein, 12 aa, Artificial sequence
  Protein classification predicting sequence
TAGLVYQNESGA

SEQ ID NO: 50559 - protein, 8 aa, Artificial sequence
  Protein classification predicting sequence
GEDIYTPG

SEQ ID NO: 50560 - protein, 13 aa, Artificial sequence
  Protein classification predicting sequence
YGDPDHYSKRYTG

SEQ ID NO: 50561 - protein, 11 aa, Artificial sequence
  Protein classification predicting sequence
YNNAFWNGSQM

SEQ ID NO: 50562 - protein, 6 aa, Artificial sequence
  Protein classification predicting sequence
YGDGDG

SEQ ID NO: 50563 - protein, 6 aa, Artificial sequence
  Protein classification predicting sequence
GIFTYD

SEQ ID NO: 50564 - protein, 8 aa, Artificial sequence
  Protein classification predicting sequence
LPGSLWAD

SEQ ID NO: 50565 - protein, 10 aa, Artificial sequence
  Protein classification predicting sequence
DNQFFASYDA

SEQ ID NO: 50566 - protein, 8 aa, Artificial sequence
  Protein classification predicting sequence
YDYYKNVH

SEQ ID NO: 50567 - protein, 11 aa, Artificial sequence
  Protein classification predicting sequence
YQNESGAINEA

SEQ ID NO: 50568 - protein, 9 aa, Artificial sequence
  Protein classification predicting sequence
NPDWEIGED

SEQ ID NO: 50569 - protein, 6 aa, Artificial sequence
  Protein classification predicting sequence
HYGVSV

SEQ ID NO: 50570 - protein, 8 aa, Artificial sequence
  Protein classification predicting sequence
GKIFYRAL

SEQ ID NO: 50571 - protein, 14 aa, Artificial sequence
  Protein classification predicting sequence
YLTPTSNFSQLRAA

SEQ ID NO: 50572 - protein, 10 aa, Artificial sequence
  Protein classification predicting sequence
DLYGSTSQEV

SEQ ID NO: 50573 - protein, 18 aa, Artificial sequence
  Protein classification predicting sequence
ASIQVYEETSGIGPGEPV

SEQ ID NO: 50574 - protein, 8 aa, Artificial sequence
  Protein classification predicting sequence
LSVELGPG

SEQ ID NO: 50575 - protein, 37 aa, Artificial sequence
  Protein classification predicting sequence
TGQRVIDTFFPVTKGGAAAVPGPFGAGKTVVQHQIAK

SEQ ID NO: 50576 - protein, 12 aa, Artificial sequence
  Protein classification predicting sequence
NEFPELIDPNTG

SEQ ID NO: 50577 - protein, 15 aa, Artificial sequence
  Protein classification predicting sequence
EMPGDEGYPAYLGSR

SEQ ID NO: 50578 - protein, 6 aa, Artificial sequence
  Protein classification predicting sequence
AEYYER

SEQ ID NO: 50579 - protein, 10 aa, Artificial sequence
  Protein classification predicting sequence
SEPVTQNTLR

SEQ ID NO: 50580 - protein, 16 aa, Artificial sequence
  Protein classification predicting sequence
KALSLGAYFNEIMEGT

SEQ ID NO: 50581 - protein, 7 aa, Artificial sequence
  Protein classification predicting sequence
EVVGPLM

SEQ ID NO: 50582 - protein, 7 aa, Artificial sequence
  Protein classification predicting sequence
FEGTSGI

SEQ ID NO: 50583 - protein, 6 aa, Artificial sequence
  Protein classification predicting sequence
YLDING

SEQ ID NO: 50584 - protein, 38 aa, Artificial sequence
  Protein classification predicting sequence
ARDYPDEFIQTGISAIDHLNTLVRGQKLPVFSGSGLPH

SEQ ID NO: 50585 - protein, 7 aa, Artificial sequence
  Protein classification predicting sequence
FAVVFAA

SEQ ID NO: 50586 - protein, 11 aa, Artificial sequence
  Protein classification predicting sequence
GITFEEAEFFM

SEQ ID NO: 50587 - protein, 8 aa, Artificial sequence
  Protein classification predicting sequence
TGAIDRSV

SEQ ID NO: 50588 - protein, 15 aa, Artificial sequence
  Protein classification predicting sequence
NLANDPAIERIATPR

SEQ ID NO: 50589 - protein, 22 aa, Artificial sequence
  Protein classification predicting sequence
AEYLAYEKGMHVLVIMTDMTNY

SEQ ID NO: 50590 - protein, 7 aa, Artificial sequence
  Protein classification predicting sequence
EALREIS

SEQ ID NO: 50591 - protein, 10 aa, Artificial sequence
  Protein classification predicting sequence
EALREISAAR

SEQ ID NO: 50592 - protein, 21 aa, Artificial sequence
  Protein classification predicting sequence
SAARREVPGRRGYPGYLYTNL

SEQ ID NO: 50593 - protein, 7 aa, Artificial sequence
  Protein classification predicting sequence
EVPGRRG

SEQ ID NO: 50594 - protein, 16 aa, Artificial sequence
  Protein classification predicting sequence
KGSVTQIPILTMPEDD

SEQ ID NO: 50595 - protein, 8 aa, Artificial sequence
  Protein classification predicting sequence
VLPSLSRL

SEQ ID NO: 50596 - protein, 12 aa, Artificial sequence
  Protein classification predicting sequence
VLPSLSRLKDKG

SEQ ID NO: 50597 - protein, 32 aa, Artificial sequence
  Protein classification predicting sequence
DHAATMNQLFAAYAQGKQAKELAVVLGESALS

SEQ ID NO: 50598 - protein, 12 aa, Artificial sequence
  Protein classification predicting sequence
LPRTELKRIKDD

SEQ ID NO: 50599 - protein, 6 aa, Artificial sequence
  Protein classification predicting sequence
PTRMEL

SEQ ID NO: 50600 - protein, 12 aa, Artificial sequence
  Protein classification predicting sequence
TATRGHKLLKDK

SEQ ID NO: 50601 - protein, 12 aa, Artificial sequence
  Protein classification predicting sequence
LAEVEKTCQLMA

SEQ ID NO: 50602 - protein, 9 aa, Artificial sequence
  Protein classification predicting sequence
IEKTRRRVN

SEQ ID NO: 50603 - protein, 8 aa, Artificial sequence
  Protein classification predicting sequence
IPQLEETI

SEQ ID NO: 50604 - protein, 10 aa, Artificial sequence
  Protein classification predicting sequence
FSKKQPDLNW

SEQ ID NO: 50605 - protein, 7 aa, Artificial sequence
  Protein classification predicting sequence
SPVYDSP

SEQ ID NO: 50606 - protein, 7 aa, Artificial sequence
  Protein classification predicting sequence
ENHDQAR

SEQ ID NO: 50607 - protein, 7 aa, Artificial sequence
  Protein classification predicting sequence
SDEHAWF

SEQ ID NO: 50608 - protein, 8 aa, Artificial sequence
  Protein classification predicting sequence
GTSMATPH

SEQ ID NO: 50609 - protein, 7 aa, Artificial sequence
  Protein classification predicting sequence
VAYVEED

SEQ ID NO: 50610 - protein, 6 aa, Artificial sequence
  Protein classification predicting sequence
GTSTGG

SEQ ID NO: 50611 - protein, 6 aa, Artificial sequence
  Protein classification predicting sequence
PVKNQG

SEQ ID NO: 50612 - protein, 7 aa, Artificial sequence
  Protein classification predicting sequence
VRLGEHN

SEQ ID NO: 50613 - protein, 10 aa, Artificial sequence
  Protein classification predicting sequence
DACQGDSGGP

SEQ ID NO: 50614 - protein, 7 aa, Artificial sequence
  Protein classification predicting sequence
SVKKNYR

SEQ ID NO: 50615 - protein, 7 aa, Artificial sequence
  Protein classification predicting sequence
HDLDHRG

SEQ ID NO: 50616 - protein, 11 aa, Artificial sequence
  Protein classification predicting sequence
AIIATDLALYF

SEQ ID NO: 50617 - protein, 7 aa, Artificial sequence
  Protein classification predicting sequence
DHRGTNN

SEQ ID NO: 50618 - protein, 5 aa, Artificial sequence
  Protein classification predicting sequence
VAYHN

SEQ ID NO: 50619 - protein, 6 aa, Artificial sequence
  Protein classification predicting sequence
QVGFID

SEQ ID NO: 50620 - protein, 6 aa, Artificial sequence
  Protein classification predicting sequence
EYFGTI

SEQ ID NO: 50621 - protein, 7 aa, Artificial sequence
  Protein classification predicting sequence
YCSSLAC

SEQ ID NO: 50622 - protein, 7 aa, Artificial sequence
  Protein classification predicting sequence
VDTGTSL

SEQ ID NO: 50623 - protein, 12 aa, Artificial sequence
  Protein classification predicting sequence
CQAIVDTGTSLL

SEQ ID NO: 50624 - protein, 6 aa, Artificial sequence
  Protein classification predicting sequence
TPVFDN

SEQ ID NO: 50625 - protein, 9 aa, Artificial sequence
  Protein classification predicting sequence
QTTFFDTVK

SEQ ID NO: 50626 - protein, 16 aa, Artificial sequence
  Protein classification predicting sequence
FTVIFDTGSSNLWVPS

SEQ ID NO: 50627 - protein, 14 aa, Artificial sequence
  Protein classification predicting sequence
VIFDTGSSNLWVPS

SEQ ID NO: 50628 - protein, 6 aa, Artificial sequence
  Protein classification predicting sequence
FDRANN

SEQ ID NO: 50629 - protein, 12 aa, Artificial sequence
  Protein classification predicting sequence
FDTGSSNLWVPS

SEQ ID NO: 50630 - protein, 15 aa, Artificial sequence
  Protein classification predicting sequence
FDTGSSNLWVPSVYC

SEQ ID NO: 50631 - protein, 8 aa, Artificial sequence
  Protein classification predicting sequence
GSLNWVPV

SEQ ID NO: 50632 - protein, 15 aa, Artificial sequence
  Protein classification predicting sequence
FDTGSSNLWVPSTYC

SEQ ID NO: 50633 - protein, 10 aa, Artificial sequence
  Protein classification predicting sequence
GCQGIVDTGT

SEQ ID NO: 50634 - protein, 6 aa, Artificial sequence
  Protein classification predicting sequence
YYTVFD

SEQ ID NO: 50635 - protein, 6 aa, Artificial sequence
  Protein classification predicting sequence
LFSVYL

SEQ ID NO: 50636 - protein, 7 aa, Artificial sequence
  Protein classification predicting sequence
WILGDVF

SEQ ID NO: 50637 - protein, 7 aa, Artificial sequence
  Protein classification predicting sequence
NNRVGFA

SEQ ID NO: 50638 - protein, 8 aa, Artificial sequence
  Protein classification predicting sequence
ACSNHNRF

SEQ ID NO: 50639 - protein, 7 aa, Artificial sequence
  Protein classification predicting sequence
PLPPSAY

SEQ ID NO: 50640 - protein, 7 aa, Artificial sequence
  Protein classification predicting sequence
ILGDVFL

SEQ ID NO: 50641 - protein, 6 aa, Artificial sequence
  Protein classification predicting sequence
GNNRVG

SEQ ID NO: 50642 - protein, 10 aa, Artificial sequence
  Protein classification predicting sequence
YFGEISIGTP

SEQ ID NO: 50643 - protein, 6 aa, Artificial sequence
  Protein classification predicting sequence
HNRFNP

SEQ ID NO: 50644 - protein, 9 aa, Artificial sequence
  Protein classification predicting sequence
FGLSETEPG

SEQ ID NO: 50645 - protein, 9 aa, Artificial sequence
  Protein classification predicting sequence
YGDGSSASG

SEQ ID NO: 50646 - protein, 15 aa, Artificial sequence
  Protein classification predicting sequence
NDGLLGLAFSSINTV

SEQ ID NO: 50647 - protein, 7 aa, Artificial sequence
  Protein classification predicting sequence
NGVRIKT

SEQ ID NO: 50648 - protein, 6 aa, Artificial sequence
  Protein classification predicting sequence
DCSNAF

SEQ ID NO: 50649 - protein, 6 aa, Artificial sequence
  Protein classification predicting sequence
CAGLPS

SEQ ID NO: 50650 - protein, 6 aa, Artificial sequence
  Protein classification predicting sequence
NTDGIH

SEQ ID NO: 50651 - protein, 6 aa, Artificial sequence
  Protein classification predicting sequence
SIGSLG

SEQ ID NO: 50652 - protein, 6 aa, Artificial sequence
  Protein classification predicting sequence
NGVRIK

SEQ ID NO: 50653 - protein, 8 aa, Artificial sequence
  Protein classification predicting sequence
GHGISIGS

SEQ ID NO: 50654 - protein, 7 aa, Artificial sequence
  Protein classification predicting sequence
LIPKGDF

SEQ ID NO: 50655 - protein, 6 aa, Artificial sequence
  Protein classification predicting sequence
SPNTDG

SEQ ID NO: 50656 - protein, 15 aa, Artificial sequence
  Protein classification predicting sequence
TAPGDSPNTDGIHMG

SEQ ID NO: 50657 - protein, 6 aa, Artificial sequence
  Protein classification predicting sequence
CGPGHG

SEQ ID NO: 50658 - protein, 8 aa, Artificial sequence
  Protein classification predicting sequence
GKTDSTKA

SEQ ID NO: 50659 - protein, 13 aa, Artificial sequence
  Protein classification predicting sequence
CGPGHGISIGSLG

SEQ ID NO: 50660 - protein, 6 aa, Artificial sequence
  Protein classification predicting sequence
EYPYQT

SEQ ID NO: 50661 - protein, 6 aa, Artificial sequence
  Protein classification predicting sequence
NKGFVY

SEQ ID NO: 50662 - protein, 8 aa, Artificial sequence
  Protein classification predicting sequence
HNVYMLST

SEQ ID NO: 50663 - protein, 10 aa, Artificial sequence
  Protein classification predicting sequence
EDGGVAIVSK

SEQ ID NO: 50664 - protein, 10 aa, Artificial sequence
  Protein classification predicting sequence
SNKGFVYTKI

SEQ ID NO: 50665 - protein, 7 aa, Artificial sequence
  Protein classification predicting sequence
NSIAKYN

SEQ ID NO: 50666 - protein, 6 aa, Artificial sequence
  Protein classification predicting sequence
RVYQDM

SEQ ID NO: 50667 - protein, 10 aa, Artificial sequence
  Protein classification predicting sequence
SGSGKSTLLR

SEQ ID NO: 50668 - protein, 7 aa, Artificial sequence
  Protein classification predicting sequence
KEDELLG

SEQ ID NO: 50669 - protein, 8 aa, Artificial sequence
  Protein classification predicting sequence
QRVGIARA

SEQ ID NO: 50670 - protein, 6 aa, Artificial sequence
  Protein classification predicting sequence
AQQPRL

SEQ ID NO: 50671 - protein, 9 aa, Artificial sequence
  Protein classification predicting sequence
LSGGQRQRV

SEQ ID NO: 50672 - protein, 6 aa, Artificial sequence
  Protein classification predicting sequence
QLSGGQ

SEQ ID NO: 50673 - protein, 8 aa, Artificial sequence
  Protein classification predicting sequence
QRVAIARA

SEQ ID NO: 50674 - protein, 6 aa, Artificial sequence
  Protein classification predicting sequence
IGMIFQ

SEQ ID NO: 50675 - protein, 11 aa, Artificial sequence
  Protein classification predicting sequence
LSGGEKQRVAI

SEQ ID NO: 50676 - protein, 9 aa, Artificial sequence
  Protein classification predicting sequence
LSGGQQQRV

SEQ ID NO: 50677 - protein, 6 aa, Artificial sequence
  Protein classification predicting sequence
LKDINL

SEQ ID NO: 50678 - protein, 6 aa, Artificial sequence
  Protein classification predicting sequence
SALDPI

SEQ ID NO: 50679 - protein, 5 aa, Artificial sequence
  Protein classification predicting sequence
RCINR

SEQ ID NO: 50680 - protein, 7 aa, Artificial sequence
  Protein classification predicting sequence
RHGERYP

SEQ ID NO: 50681 - protein, 7 aa, Artificial sequence
  Protein classification predicting sequence
AERGLGD

SEQ ID NO: 50682 - protein, 6 aa, Artificial sequence
  Protein classification predicting sequence
YFTVFD

SEQ ID NO: 50683 - protein, 6 aa, Artificial sequence
  Protein classification predicting sequence
PWCYTT

SEQ ID NO: 50684 - protein, 7 aa, Artificial sequence
  Protein classification predicting sequence
CYITGWG

SEQ ID NO: 50685 - protein, 13 aa, Artificial sequence
  Protein classification predicting sequence
DSCQGDSGGPLVC

SEQ ID NO: 50686 - protein, 8 aa, Artificial sequence
  Protein classification predicting sequence
WVVTAAHC

SEQ ID NO: 50687 - protein, 8 aa, Artificial sequence
  Protein classification predicting sequence
NYCRNPDG

SEQ ID NO: 50688 - protein, 8 aa, Artificial sequence
  Protein classification predicting sequence
LQGVTSWG

SEQ ID NO: 50689 - protein, 9 aa, Artificial sequence
  Protein classification predicting sequence
NYCRNPDGD

SEQ ID NO: 50690 - protein, 7 aa, Artificial sequence
  Protein classification predicting sequence
NYCRNPD

SEQ ID NO: 50691 - protein, 8 aa, Artificial sequence
  Protein classification predicting sequence
VSRYVNWI

SEQ ID NO: 50692 - protein, 7 aa, Artificial sequence
  Protein classification predicting sequence
SAITGES

SEQ ID NO: 50693 - protein, 7 aa, Artificial sequence
  Protein classification predicting sequence
KSLALKA

SEQ ID NO: 50694 - protein, 7 aa, Artificial sequence
  Protein classification predicting sequence
IQNFGAM

SEQ ID NO: 50695 - protein, 7 aa, Artificial sequence
  Protein classification predicting sequence
LTGESLP

SEQ ID NO: 50696 - protein, 7 aa, Artificial sequence
  Protein classification predicting sequence
DKTGTLT

SEQ ID NO: 50697 - protein, 13 aa, Artificial sequence
  Protein classification predicting sequence
MTGDGVNDAPALK

SEQ ID NO: 50698 - protein, 9 aa, Artificial sequence
  Protein classification predicting sequence
FENVAFGLR

SEQ ID NO: 50699 - protein, 10 aa, Artificial sequence
  Protein classification predicting sequence
AIARAVVNKP

SEQ ID NO: 50700 - protein, 15 aa, Artificial sequence
  Protein classification predicting sequence
LGITFIFVTHDQEEA

SEQ ID NO: 50701 - protein, 10 aa, Artificial sequence
  Protein classification predicting sequence
VSEFFNEDDP

SEQ ID NO: 50702 - protein, 9 aa, Artificial sequence
  Protein classification predicting sequence
EPEILLLDE

SEQ ID NO: 50703 - protein, 7 aa, Artificial sequence
  Protein classification predicting sequence
YDNIAFG

SEQ ID NO: 50704 - protein, 11 aa, Artificial sequence
  Protein classification predicting sequence
LLLDESLSALD

SEQ ID NO: 50705 - protein, 7 aa, Artificial sequence
  Protein classification predicting sequence
VFDGHAG

SEQ ID NO: 50706 - protein, 6 aa, Artificial sequence
  Protein classification predicting sequence
GGRKYM

SEQ ID NO: 50707 - protein, 8 aa, Artificial sequence
  Protein classification predicting sequence
GPEETSEK

SEQ ID NO: 50708 - protein, 11 aa, Artificial sequence
  Protein classification predicting sequence
LWLNGGPGCSS

SEQ ID NO: 50709 - protein, 8 aa, Artificial sequence
  Protein classification predicting sequence
DLGSNSFH

SEQ ID NO: 50710 - protein, 9 aa, Artificial sequence
  Protein classification predicting sequence
DLGSNSFHM

SEQ ID NO: 50711 - protein, 8 aa, Artificial sequence
  Protein classification predicting sequence
FEEAREIF

SEQ ID NO: 50712 - protein, 10 aa, Artificial sequence
  Protein classification predicting sequence
DACEGDSGGP

SEQ ID NO: 50713 - protein, 7 aa, Artificial sequence
  Protein classification predicting sequence
YGIYTKV

SEQ ID NO: 50714 - protein, 7 aa, Artificial sequence
  Protein classification predicting sequence
YTKVSRY

SEQ ID NO: 50715 - protein, 5 aa, Artificial sequence
  Protein classification predicting sequence
PICLP

SEQ ID NO: 50716 - protein, 6 aa, Artificial sequence
  Protein classification predicting sequence
PICLPD

SEQ ID NO: 50717 - protein, 6 aa, Artificial sequence
  Protein classification predicting sequence
VTGWGY

SEQ ID NO: 50718 - protein, 7 aa, Artificial sequence
  Protein classification predicting sequence
DIALLRL

SEQ ID NO: 50719 - protein, 7 aa, Artificial sequence
  Protein classification predicting sequence
GKYGHAA

SEQ ID NO: 50720 - protein, 11 aa, Artificial sequence
  Protein classification predicting sequence
DFVEAPSQMLE

SEQ ID NO: 50721 - protein, 6 aa, Artificial sequence
  Protein classification predicting sequence
PHSRPY

SEQ ID NO: 50722 - protein, 6 aa, Artificial sequence
  Protein classification predicting sequence
IQHLYG

SEQ ID NO: 50723 - protein, 7 aa, Artificial sequence
  Protein classification predicting sequence
ALIGPSG

SEQ ID NO: 50724 - protein, 12 aa, Artificial sequence
  Protein classification predicting sequence
GPSGSGKSTLLR

SEQ ID NO: 50725 - protein, 7 aa, Artificial sequence
  Protein classification predicting sequence
VLLLDEP

SEQ ID NO: 50726 - protein, 9 aa, Artificial sequence
  Protein classification predicting sequence
PDVILMDEP

SEQ ID NO: 50727 - protein, 8 aa, Artificial sequence
  Protein classification predicting sequence
DEATSALD

SEQ ID NO: 50728 - protein, 9 aa, Artificial sequence
  Protein classification predicting sequence
TLSGGQQQR

SEQ ID NO: 50729 - protein, 9 aa, Artificial sequence
  Protein classification predicting sequence
RRRIGMVFQ

SEQ ID NO: 50730 - protein, 6 aa, Artificial sequence
  Protein classification predicting sequence
ENVAYG

SEQ ID NO: 50731 - protein, 9 aa, Artificial sequence
  Protein classification predicting sequence
DEPTSALDP

SEQ ID NO: 50732 - protein, 8 aa, Artificial sequence
  Protein classification predicting sequence
ARALAVEP

SEQ ID NO: 50733 - protein, 7 aa, Artificial sequence
  Protein classification predicting sequence
TVFENVA

SEQ ID NO: 50734 - protein, 8 aa, Artificial sequence
  Protein classification predicting sequence
ARALAVNP

SEQ ID NO: 50735 - protein, 7 aa, Artificial sequence
  Protein classification predicting sequence
SGCGKTT

SEQ ID NO: 50736 - protein, 6 aa, Artificial sequence
  Protein classification predicting sequence
LTVLPR

SEQ ID NO: 50737 - protein, 6 aa, Artificial sequence
  Protein classification predicting sequence
VGMVFQ

SEQ ID NO: 50738 - protein, 7 aa, Artificial sequence
  Protein classification predicting sequence
VLLMDEP

SEQ ID NO: 50739 - protein, 6 aa, Artificial sequence
  Protein classification predicting sequence
IGMVFQ

SEQ ID NO: 50740 - protein, 7 aa, Artificial sequence
  Protein classification predicting sequence
VILMDEP

SEQ ID NO: 50741 - protein, 5 aa, Artificial sequence
  Protein classification predicting sequence
DYTIV

SEQ ID NO: 50742 - protein, 8 aa, Artificial sequence
  Protein classification predicting sequence
LSGGQQQR

SEQ ID NO: 50743 - protein, 6 aa, Artificial sequence
  Protein classification predicting sequence
PFVAVS

SEQ ID NO: 50744 - protein, 6 aa, Artificial sequence
  Protein classification predicting sequence
SFKVFM

SEQ ID NO: 50745 - protein, 8 aa, Artificial sequence
  Protein classification predicting sequence
SIRENIAL

SEQ ID NO: 50746 - protein, 6 aa, Artificial sequence
  Protein classification predicting sequence
IHYGSG

SEQ ID NO: 50747 - protein, 13 aa, Artificial sequence
  Protein classification predicting sequence
QYYGEIGIGTPPQ

SEQ ID NO: 50748 - protein, 7 aa, Artificial sequence
  Protein classification predicting sequence
FDTGSSN

SEQ ID NO: 50749 - protein, 11 aa, Artificial sequence
  Protein classification predicting sequence
QYYGEIGIGTP

SEQ ID NO: 50750 - protein, 6 aa, Artificial sequence
  Protein classification predicting sequence
VDTGTS

SEQ ID NO: 50751 - protein, 5 aa, Artificial sequence
  Protein classification predicting sequence
HGLWP

SEQ ID NO: 50752 - protein, 14 aa, Artificial sequence
  Protein classification predicting sequence
VNGEPVVLHLEKNK

SEQ ID NO: 50753 - protein, 18 aa, Artificial sequence
  Protein classification predicting sequence
ASISACNGLKGHFKLQGE

SEQ ID NO: 50754 - protein, 7 aa, Artificial sequence
  Protein classification predicting sequence
DSEAHAV

SEQ ID NO: 50755 - protein, 6 aa, Artificial sequence
  Protein classification predicting sequence
YHLFYQ

SEQ ID NO: 50756 - protein, 6 aa, Artificial sequence
  Protein classification predicting sequence
MNDPNG

SEQ ID NO: 50757 - protein, 8 aa, Artificial sequence
  Protein classification predicting sequence
VEVAPAYD

SEQ ID NO: 50758 - protein, 8 aa, Artificial sequence
  Protein classification predicting sequence
EITAARNY

SEQ ID NO: 50759 - protein, 12 aa, Artificial sequence
  Protein classification predicting sequence
GFFLQVEGASID

SEQ ID NO: 50760 - protein, 8 aa, Artificial sequence
  Protein classification predicting sequence
HGTHVAGT

SEQ ID NO: 50761 - protein, 7 aa, Artificial sequence
  Protein classification predicting sequence
HGTHVAG

SEQ ID NO: 50762 - protein, 6 aa, Artificial sequence
  Protein classification predicting sequence
NVAFGL

SEQ ID NO: 50763 - protein, 17 aa, Artificial sequence
  Protein classification predicting sequence
VWNEQWKTPSFVSGSLL

SEQ ID NO: 50764 - protein, 6 aa, Artificial sequence
  Protein classification predicting sequence
VTKERP

SEQ ID NO: 50765 - protein, 18 aa, Artificial sequence
  Protein classification predicting sequence
RLAYEVNVRFLTPVPGNW

SEQ ID NO: 50766 - protein, 54 aa, Artificial sequence
  Protein classification predicting sequence
STVGVGRGVLGDQKYINTTYSSYYGYYYLQDNTRGSGIFTYDGRNRTVLPGSLW

SEQ ID NO: 50767 - protein, 133 aa, Artificial sequence
  Protein classification predicting sequence
ASYDAAAVDAHYYAGVVYDYYKNVHGRLSYDGSNAAIRSTVHYGRGYNNAFWNGSQMVYGDGDGQTFLPFSGGIDVVGHELTHAVTDYTAGLVYQNESGAINEAMSDIFGTLVEFYANRNPDWEIGEDIYTPG

SEQ ID NO: 50768 - protein, 8 aa, Artificial sequence
  Protein classification predicting sequence
SDIFGTLV

SEQ ID NO: 50769 - protein, 30 aa, Artificial sequence
  Protein classification predicting sequence
LRSMSDPAKYGDPDHYSKRYTGTQDNGGVH

SEQ ID NO: 50770 - protein, 8 aa, Artificial sequence
  Protein classification predicting sequence
WVLTAAHC

SEQ ID NO: 50771 - protein, 9 aa, Artificial sequence
  Protein classification predicting sequence
GPWCYTTDP

SEQ ID NO: 50772 - protein, 7 aa, Artificial sequence
  Protein classification predicting sequence
LGLGKHN

SEQ ID NO: 50773 - protein, 6 aa, Artificial sequence
  Protein classification predicting sequence
NMLCAG

SEQ ID NO: 50774 - protein, 11 aa, Artificial sequence
  Protein classification predicting sequence
CQGDSGGPLVC

SEQ ID NO: 50775 - protein, 6 aa, Artificial sequence
  Protein classification predicting sequence
GIISWG

SEQ ID NO: 50776 - protein, 6 aa, Artificial sequence
  Protein classification predicting sequence
NHDQPR

SEQ ID NO: 50777 - protein, 6 aa, Artificial sequence
  Protein classification predicting sequence
GVVSWG

SEQ ID NO: 50778 - protein, 7 aa, Artificial sequence
  Protein classification predicting sequence
PGVYTKV

SEQ ID NO: 50779 - protein, 6 aa, Artificial sequence
  Protein classification predicting sequence
VRLGEH

SEQ ID NO: 50780 - protein, 8 aa, Artificial sequence
  Protein classification predicting sequence
HFCGGSLI

SEQ ID NO: 50781 - protein, 5 aa, Artificial sequence
  Protein classification predicting sequence
AAHCY

SEQ ID NO: 50782 - protein, 7 aa, Artificial sequence
  Protein classification predicting sequence
LISDQWV

SEQ ID NO: 50783 - protein, 6 aa, Artificial sequence
  Protein classification predicting sequence
NYVDWI

SEQ ID NO: 50784 - protein, 6 aa, Artificial sequence
  Protein classification predicting sequence
NMFCAG

SEQ ID NO: 50785 - protein, 10 aa, Artificial sequence
  Protein classification predicting sequence
DSCQGDSGGP

SEQ ID NO: 50786 - protein, 7 aa, Artificial sequence
  Protein classification predicting sequence
PGVYARV

SEQ ID NO: 50787 - protein, 5 aa, Artificial sequence
  Protein classification predicting sequence
DSGGP

SEQ ID NO: 50788 - protein, 7 aa, Artificial sequence
  Protein classification predicting sequence
IVTAAHC

SEQ ID NO: 50789 - protein, 6 aa, Artificial sequence
  Protein classification predicting sequence
WVVSAA

SEQ ID NO: 50790 - protein, 9 aa, Artificial sequence
  Protein classification predicting sequence
CQGDSGGPL

SEQ ID NO: 50791 - protein, 6 aa, Artificial sequence
  Protein classification predicting sequence
CNGDSG

SEQ ID NO: 50792 - protein, 7 aa, Artificial sequence
  Protein classification predicting sequence
CWVTGWG

SEQ ID NO: 50793 - protein, 7 aa, Artificial sequence
  Protein classification predicting sequence
LVVASIS

SEQ ID NO: 50794 - protein, 6 aa, Artificial sequence
  Protein classification predicting sequence
DNDIAL

SEQ ID NO: 50795 - protein, 7 aa, Artificial sequence
  Protein classification predicting sequence
SVELGPG

SEQ ID NO: 50796 - protein, 10 aa, Artificial sequence
  Protein classification predicting sequence
PGPFGAGKTV

SEQ ID NO: 50797 - protein, 8 aa, Artificial sequence
  Protein classification predicting sequence
EYFRDMGY

SEQ ID NO: 50798 - protein, 6 aa, Artificial sequence
  Protein classification predicting sequence
IDTFFP

SEQ ID NO: 50799 - protein, 7 aa, Artificial sequence
  Protein classification predicting sequence
GITIAEY

SEQ ID NO: 50800 - protein, 10 aa, Artificial sequence
  Protein classification predicting sequence
ADSTSRWAEA

SEQ ID NO: 50801 - protein, 7 aa, Artificial sequence
  Protein classification predicting sequence
DGIQRPL

SEQ ID NO: 50802 - protein, 11 aa, Artificial sequence
  Protein classification predicting sequence
YVGCGERGNEM

SEQ ID NO: 50803 - protein, 7 aa, Artificial sequence
  Protein classification predicting sequence
MPVAARE

SEQ ID NO: 50804 - protein, 6 aa, Artificial sequence
  Protein classification predicting sequence
NSVFIP

SEQ ID NO: 50805 - protein, 6 aa, Artificial sequence
  Protein classification predicting sequence
SEPVTQ

SEQ ID NO: 50806 - protein, 9 aa, Artificial sequence
  Protein classification predicting sequence
IQVYEETSG

SEQ ID NO: 50807 - protein, 7 aa, Artificial sequence
  Protein classification predicting sequence
IQVYEET

SEQ ID NO: 50808 - protein, 9 aa, Artificial sequence
  Protein classification predicting sequence
GCGERGNEM

SEQ ID NO: 50809 - protein, 19 aa, Artificial sequence
  Protein classification predicting sequence
RTVLIANTSNMPVAAREAS

SEQ ID NO: 50810 - protein, 9 aa, Artificial sequence
  Protein classification predicting sequence
YTGITIAEY

SEQ ID NO: 50811 - protein, 10 aa, Artificial sequence
  Protein classification predicting sequence
GCGERGNEMT

SEQ ID NO: 50812 - protein, 6 aa, Artificial sequence
  Protein classification predicting sequence
IYTGIT

SEQ ID NO: 50813 - protein, 18 aa, Artificial sequence
  Protein classification predicting sequence
RTVLIANTSNMPVAAREA

SEQ ID NO: 50814 - protein, 8 aa, Artificial sequence
  Protein classification predicting sequence
AAREASIY

SEQ ID NO: 50815 - protein, 20 aa, Artificial sequence
  Protein classification predicting sequence
ANTSNMPVAAREASIYTGIT

SEQ ID NO: 50816 - protein, 9 aa, Artificial sequence
  Protein classification predicting sequence
AEYFRDMGY

SEQ ID NO: 50817 - protein, 6 aa, Artificial sequence
  Protein classification predicting sequence
LQQNAF

SEQ ID NO: 50818 - protein, 7 aa, Artificial sequence
  Protein classification predicting sequence
CGERGNE

SEQ ID NO: 50819 - protein, 8 aa, Artificial sequence
  Protein classification predicting sequence
ADSTSRWA

SEQ ID NO: 50820 - protein, 6 aa, Artificial sequence
  Protein classification predicting sequence
VELGPG

SEQ ID NO: 50821 - protein, 8 aa, Artificial sequence
  Protein classification predicting sequence
TIAEYFRD

SEQ ID NO: 50822 - protein, 6 aa, Artificial sequence
  Protein classification predicting sequence
GYPAYL

SEQ ID NO: 50823 - protein, 6 aa, Artificial sequence
  Protein classification predicting sequence
ITEGQI

SEQ ID NO: 50824 - protein, 6 aa, Artificial sequence
  Protein classification predicting sequence
IQTGIS

SEQ ID NO: 50825 - protein, 9 aa, Artificial sequence
  Protein classification predicting sequence
ALTAAEYLA

SEQ ID NO: 50826 - protein, 6 aa, Artificial sequence
  Protein classification predicting sequence
LPRTEL

SEQ ID NO: 50827 - protein, 7 aa, Artificial sequence
  Protein classification predicting sequence
AEYLAYE

SEQ ID NO: 50828 - protein, 6 aa, Artificial sequence
  Protein classification predicting sequence
TDMTNY

SEQ ID NO: 50829 - protein, 7 aa, Artificial sequence
  Protein classification predicting sequence
LPSLSRL

SEQ ID NO: 50830 - protein, 7 aa, Artificial sequence
  Protein classification predicting sequence
QLFAAYA

SEQ ID NO: 50831 - protein, 8 aa, Artificial sequence
  Protein classification predicting sequence
TNYAEALR

SEQ ID NO: 50832 - protein, 6 aa, Artificial sequence
  Protein classification predicting sequence
TQIPIL

SEQ ID NO: 50833 - protein, 9 aa, Artificial sequence
  Protein classification predicting sequence
TQIPILTMP

SEQ ID NO: 50834 - protein, 9 aa, Artificial sequence
  Protein classification predicting sequence
LAAQIARQA

SEQ ID NO: 50835 - protein, 7 aa, Artificial sequence
  Protein classification predicting sequence
TPRMALT

SEQ ID NO: 50836 - protein, 7 aa, Artificial sequence
  Protein classification predicting sequence
TGISAID

SEQ ID NO: 50837 - protein, 8 aa, Artificial sequence
  Protein classification predicting sequence
LDLGWELL

SEQ ID NO: 50838 - protein, 10 aa, Artificial sequence
  Protein classification predicting sequence
KGSVTQIPIL

SEQ ID NO: 50839 - protein, 7 aa, Artificial sequence
  Protein classification predicting sequence
LQNVTKA

SEQ ID NO: 50840 - protein, 6 aa, Artificial sequence
  Protein classification predicting sequence
RRVNAL

SEQ ID NO: 50841 - protein, 7 aa, Artificial sequence
  Protein classification predicting sequence
RRVNALE

SEQ ID NO: 50842 - protein, 6 aa, Artificial sequence
  Protein classification predicting sequence
ARKRGE

SEQ ID NO: 50843 - protein, 6 aa, Artificial sequence
  Protein classification predicting sequence
VFIAIF

SEQ ID NO: 50844 - protein, 7 aa, Artificial sequence
  Protein classification predicting sequence
EIRKHLG

SEQ ID NO: 50845 - protein, 6 aa, Artificial sequence
  Protein classification predicting sequence
GIYTKV

SEQ ID NO: 50846 - protein, 8 aa, Artificial sequence
  Protein classification predicting sequence
DSGGPLIC

SEQ ID NO: 50847 - protein, 10 aa, Artificial sequence
  Protein classification predicting sequence
GGDECNINEH

SEQ ID NO: 50848 - protein, 7 aa, Artificial sequence
  Protein classification predicting sequence
CRIMGWG

SEQ ID NO: 50849 - protein, 7 aa, Artificial sequence
  Protein classification predicting sequence
GGTGGGT

SEQ ID NO: 50850 - protein, 9 aa, Artificial sequence
  Protein classification predicting sequence
KKAESLGAK

SEQ ID NO: 50851 - protein, 5 aa, Artificial sequence
  Protein classification predicting sequence
WHSQL

SEQ ID NO: 50852 - protein, 6 aa, Artificial sequence
  Protein classification predicting sequence
SCSVSA

SEQ ID NO: 50853 - protein, 7 aa, Artificial sequence
  Protein classification predicting sequence
GGASTQI

SEQ ID NO: 50854 - protein, 6 aa, Artificial sequence
  Protein classification predicting sequence
PKPKNA

SEQ ID NO: 50855 - protein, 6 aa, Artificial sequence
  Protein classification predicting sequence
LERGVK

SEQ ID NO: 50856 - protein, 7 aa, Artificial sequence
  Protein classification predicting sequence
PGLVDPH

SEQ ID NO: 50857 - protein, 6 aa, Artificial sequence
  Protein classification predicting sequence
AECFKL

SEQ ID NO: 50858 - protein, 6 aa, Artificial sequence
  Protein classification predicting sequence
GAIATT

SEQ ID NO: 50859 - protein, 6 aa, Artificial sequence
  Protein classification predicting sequence
ILEFPD

SEQ ID NO: 50860 - protein, 6 aa, Artificial sequence
  Protein classification predicting sequence
IHQVYK

SEQ ID NO: 50861 - protein, 7 aa, Artificial sequence
  Protein classification predicting sequence
GPFFLGI

SEQ ID NO: 50862 - protein, 6 aa, Artificial sequence
  Protein classification predicting sequence
ATRVWR

SEQ ID NO: 50863 - protein, 6 aa, Artificial sequence
  Protein classification predicting sequence
LLHKHP

SEQ ID NO: 50864 - protein, 6 aa, Artificial sequence
  Protein classification predicting sequence
VIFDTG

SEQ ID NO: 50865 - protein, 6 aa, Artificial sequence
  Protein classification predicting sequence
GRIAAG

SEQ ID NO: 50866 - protein, 6 aa, Artificial sequence
  Protein classification predicting sequence
NYNLFL

SEQ ID NO: 50867 - protein, 5 aa, Artificial sequence
  Protein classification predicting sequence
HQWFG

SEQ ID NO: 50868 - protein, 7 aa, Artificial sequence
  Protein classification predicting sequence
VLAAANV

SEQ ID NO: 50869 - protein, 6 aa, Artificial sequence
  Protein classification predicting sequence
VKRFYK

SEQ ID NO: 50870 - protein, 7 aa, Artificial sequence
  Protein classification predicting sequence
TIEGLAV

SEQ ID NO: 50871 - protein, 6 aa, Artificial sequence
  Protein classification predicting sequence
NWLRRQ

SEQ ID NO: 50872 - protein, 7 aa, Artificial sequence
  Protein classification predicting sequence
SLEKARL

SEQ ID NO: 50873 - protein, 6 aa, Artificial sequence
  Protein classification predicting sequence
EEDKLT

SEQ ID NO: 50874 - protein, 6 aa, Artificial sequence
  Protein classification predicting sequence
RSAVFI

SEQ ID NO: 50875 - protein, 6 aa, Artificial sequence
  Protein classification predicting sequence
ALAKPI

SEQ ID NO: 50876 - protein, 5 aa, Artificial sequence
  Protein classification predicting sequence
VHSEC

SEQ ID NO: 50877 - protein, 7 aa, Artificial sequence
  Protein classification predicting sequence
AAVRTRL

SEQ ID NO: 50878 - protein, 6 aa, Artificial sequence
  Protein classification predicting sequence
VFVPVV

SEQ ID NO: 50879 - protein, 6 aa, Artificial sequence
  Protein classification predicting sequence
TALPVI

SEQ ID NO: 50880 - protein, 7 aa, Artificial sequence
  Protein classification predicting sequence
HFCKILF

SEQ ID NO: 50881 - protein, 7 aa, Artificial sequence
  Protein classification predicting sequence
VSPGFVD

SEQ ID NO: 50882 - protein, 6 aa, Artificial sequence
  Protein classification predicting sequence
FCLPNS

SEQ ID NO: 50883 - protein, 8 aa, Artificial sequence
  Protein classification predicting sequence
GLVRTASL

SEQ ID NO: 50884 - protein, 7 aa, Artificial sequence
  Protein classification predicting sequence
NVEALKN

SEQ ID NO: 50885 - protein, 6 aa, Artificial sequence
  Protein classification predicting sequence
AHCLQS

SEQ ID NO: 50886 - protein, 7 aa, Artificial sequence
  Protein classification predicting sequence
PFPAPQT

SEQ ID NO: 50887 - protein, 6 aa, Artificial sequence
  Protein classification predicting sequence
DAQYYG

SEQ ID NO: 50888 - protein, 6 aa, Artificial sequence
  Protein classification predicting sequence
KGNKYW

SEQ ID NO: 50889 - protein, 7 aa, Artificial sequence
  Protein classification predicting sequence
VLLVGYG

SEQ ID NO: 50890 - protein, 5 aa, Artificial sequence
  Protein classification predicting sequence
KFWIV

SEQ ID NO: 50891 - protein, 8 aa, Artificial sequence
  Protein classification predicting sequence
WIVKNSWG

SEQ ID NO: 50892 - protein, 5 aa, Artificial sequence
  Protein classification predicting sequence
KNSWG

SEQ ID NO: 50893 - protein, 6 aa, Artificial sequence
  Protein classification predicting sequence
PCSETY

SEQ ID NO: 50894 - protein, 7 aa, Artificial sequence
  Protein classification predicting sequence
RNNLSSI

SEQ ID NO: 50895 - protein, 6 aa, Artificial sequence
  Protein classification predicting sequence
LLPGAF

SEQ ID NO: 50896 - protein, 5 aa, Artificial sequence
  Protein classification predicting sequence
TFGQD

SEQ ID NO: 50897 - protein, 5 aa, Artificial sequence
  Protein classification predicting sequence
FYDEC

SEQ ID NO: 50898 - protein, 5 aa, Artificial sequence
  Protein classification predicting sequence
CVGQA

SEQ ID NO: 50899 - protein, 5 aa, Artificial sequence
  Protein classification predicting sequence
RDNFM

SEQ ID NO: 50900 - protein, 6 aa, Artificial sequence
  Protein classification predicting sequence
TIQMVR

SEQ ID NO: 50901 - protein, 6 aa, Artificial sequence
  Protein classification predicting sequence
LSAITK

SEQ ID NO: 50902 - protein, 7 aa, Artificial sequence
  Protein classification predicting sequence
WIIKNSW

SEQ ID NO: 50903 - protein, 8 aa, Artificial sequence
  Protein classification predicting sequence
GGYAAGYY

SEQ ID NO: 50904 - protein, 6 aa, Artificial sequence
  Protein classification predicting sequence
PAGPNF

SEQ ID NO: 50905 - protein, 6 aa, Artificial sequence
  Protein classification predicting sequence
GGIDTH

SEQ ID NO: 50906 - protein, 5 aa, Artificial sequence
  Protein classification predicting sequence
ALFPH

SEQ ID NO: 50907 - protein, 5 aa, Artificial sequence
  Protein classification predicting sequence
LPCYI

SEQ ID NO: 50908 - protein, 6 aa, Artificial sequence
  Protein classification predicting sequence
DVVSAE

SEQ ID NO: 50909 - protein, 6 aa, Artificial sequence
  Protein classification predicting sequence
IQELIN

SEQ ID NO: 50910 - protein, 6 aa, Artificial sequence
  Protein classification predicting sequence
RPTDVP

SEQ ID NO: 50911 - protein, 7 aa, Artificial sequence
  Protein classification predicting sequence
AREGWPG

SEQ ID NO: 50912 - protein, 6 aa, Artificial sequence
  Protein classification predicting sequence
GYEFFA

SEQ ID NO: 50913 - protein, 6 aa, Artificial sequence
  Protein classification predicting sequence
AGLYQG

SEQ ID NO: 50914 - protein, 5 aa, Artificial sequence
  Protein classification predicting sequence
GNTCY

SEQ ID NO: 50915 - protein, 5 aa, Artificial sequence
  Protein classification predicting sequence
WCATT

SEQ ID NO: 50916 - protein, 6 aa, Artificial sequence
  Protein classification predicting sequence
TRDPAA

SEQ ID NO: 50917 - protein, 7 aa, Artificial sequence
  Protein classification predicting sequence
STVGGNS

SEQ ID NO: 50918 - protein, 6 aa, Artificial sequence
  Protein classification predicting sequence
SFDGRG

SEQ ID NO: 50919 - protein, 6 aa, Artificial sequence
  Protein classification predicting sequence
EGTSGI

SEQ ID NO: 50920 - protein, 7 aa, Artificial sequence
  Protein classification predicting sequence
LELAFQS

SEQ ID NO: 50921 - protein, 7 aa, Artificial sequence
  Protein classification predicting sequence
EVGKLAD

SEQ ID NO: 50922 - protein, 5 aa, Artificial sequence
  Protein classification predicting sequence
YFTRD

SEQ ID NO: 50923 - protein, 8 aa, Artificial sequence
  Protein classification predicting sequence
ADIVLWDP

SEQ ID NO: 50924 - protein, 5 aa, Artificial sequence
  Protein classification predicting sequence
YEIEF

SEQ ID NO: 50925 - protein, 6 aa, Artificial sequence
  Protein classification predicting sequence
MERLCS

SEQ ID NO: 50926 - protein, 6 aa, Artificial sequence
  Protein classification predicting sequence
RQQEAL

SEQ ID NO: 50927 - protein, 7 aa, Artificial sequence
  Protein classification predicting sequence
GQIFVDR

SEQ ID NO: 50928 - protein, 6 aa, Artificial sequence
  Protein classification predicting sequence
SPKLTL

SEQ ID NO: 50929 - protein, 5 aa, Artificial sequence
  Protein classification predicting sequence
MDEPT

SEQ ID NO: 50930 - protein, 6 aa, Artificial sequence
  Protein classification predicting sequence
NYKNLQ

SEQ ID NO: 50931 - protein, 6 aa, Artificial sequence
  Protein classification predicting sequence
KAHIEK

SEQ ID NO: 50932 - protein, 5 aa, Artificial sequence
  Protein classification predicting sequence
FFPYY

SEQ ID NO: 50933 - protein, 7 aa, Artificial sequence
  Protein classification predicting sequence
RRSAIAS

SEQ ID NO: 50934 - protein, 7 aa, Artificial sequence
  Protein classification predicting sequence
KIQLIDD

SEQ ID NO: 50935 - protein, 6 aa, Artificial sequence
  Protein classification predicting sequence
TFFGTS

SEQ ID NO: 50936 - protein, 7 aa, Artificial sequence
  Protein classification predicting sequence
SLKPPSQ

SEQ ID NO: 50937 - protein, 6 aa, Artificial sequence
  Protein classification predicting sequence
AFNIRT

SEQ ID NO: 50938 - protein, 8 aa, Artificial sequence
  Protein classification predicting sequence
TEPDTIKF

SEQ ID NO: 50939 - protein, 5 aa, Artificial sequence
  Protein classification predicting sequence
MNIRQ

SEQ ID NO: 50940 - protein, 7 aa, Artificial sequence
  Protein classification predicting sequence
NKENEAF

SEQ ID NO: 50941 - protein, 7 aa, Artificial sequence
  Protein classification predicting sequence
TLRGEVL

SEQ ID NO: 50942 - protein, 6 aa, Artificial sequence
  Protein classification predicting sequence
GNYYFP

SEQ ID NO: 50943 - protein, 6 aa, Artificial sequence
  Protein classification predicting sequence
QVFMLR

SEQ ID NO: 50944 - protein, 6 aa, Artificial sequence
  Protein classification predicting sequence
RVVETG

SEQ ID NO: 50945 - protein, 6 aa, Artificial sequence
  Protein classification predicting sequence
TEDEKL

SEQ ID NO: 50946 - protein, 6 aa, Artificial sequence
  Protein classification predicting sequence
FPKLIA

SEQ ID NO: 50947 - protein, 7 aa, Artificial sequence
  Protein classification predicting sequence
LATRRPE

SEQ ID NO: 50948 - protein, 6 aa, Artificial sequence
  Protein classification predicting sequence
SDKVAS

SEQ ID NO: 50949 - protein, 5 aa, Artificial sequence
  Protein classification predicting sequence
NHHWR

SEQ ID NO: 50950 - protein, 6 aa, Artificial sequence
  Protein classification predicting sequence
KHKNQA

SEQ ID NO: 50951 - protein, 7 aa, Artificial sequence
  Protein classification predicting sequence
STYSTNG

SEQ ID NO: 50952 - protein, 7 aa, Artificial sequence
  Protein classification predicting sequence
QALVDIL

SEQ ID NO: 50953 - protein, 7 aa, Artificial sequence
  Protein classification predicting sequence
EPAVLLR

SEQ ID NO: 50954 - protein, 7 aa, Artificial sequence
  Protein classification predicting sequence
KRYGDFV

SEQ ID NO: 50955 - protein, 6 aa, Artificial sequence
  Protein classification predicting sequence
DVEGQD

SEQ ID NO: 50956 - protein, 6 aa, Artificial sequence
  Protein classification predicting sequence
GKTAVA

SEQ ID NO: 50957 - protein, 6 aa, Artificial sequence
  Protein classification predicting sequence
IILSTN

SEQ ID NO: 50958 - protein, 7 aa, Artificial sequence
  Protein classification predicting sequence
AYTSGAN

SEQ ID NO: 50959 - protein, 6 aa, Artificial sequence
  Protein classification predicting sequence
YINANY

SEQ ID NO: 50960 - protein, 6 aa, Artificial sequence
  Protein classification predicting sequence
LEPLGL

SEQ ID NO: 50961 - protein, 6 aa, Artificial sequence
  Protein classification predicting sequence
LFNVGI

SEQ ID NO: 50962 - protein, 6 aa, Artificial sequence
  Protein classification predicting sequence
GFRASY

SEQ ID NO: 50963 - protein, 6 aa, Artificial sequence
  Protein classification predicting sequence
WSKINC

SEQ ID NO: 50964 - protein, 7 aa, Artificial sequence
  Protein classification predicting sequence
ELHGLEL

SEQ ID NO: 50965 - protein, 8 aa, Artificial sequence
  Protein classification predicting sequence
GAHHLDLR

SEQ ID NO: 50966 - protein, 8 aa, Artificial sequence
  Protein classification predicting sequence
SNIIFSNG

SEQ ID NO: 50967 - protein, 8 aa, Artificial sequence
  Protein classification predicting sequence
ERVAVNII

SEQ ID NO: 50968 - protein, 6 aa, Artificial sequence
  Protein classification predicting sequence
ESENIP

SEQ ID NO: 50969 - protein, 5 aa, Artificial sequence
  Protein classification predicting sequence
PPSAY

SEQ ID NO: 50970 - protein, 5 aa, Artificial sequence
  Protein classification predicting sequence
PPQNF

SEQ ID NO: 50971 - protein, 8 aa, Artificial sequence
  Protein classification predicting sequence
ALVLGGVD

SEQ ID NO: 50972 - protein, 6 aa, Artificial sequence
  Protein classification predicting sequence
LSQNQP

SEQ ID NO: 50973 - protein, 10 aa, Artificial sequence
  Protein classification predicting sequence
PGMVLTVEPG

SEQ ID NO: 50974 - protein, 6 aa, Artificial sequence
  Protein classification predicting sequence
VNPQFK

SEQ ID NO: 50975 - protein, 6 aa, Artificial sequence
  Protein classification predicting sequence
GVRIED

SEQ ID NO: 50976 - protein, 6 aa, Artificial sequence
  Protein classification predicting sequence
KMGEDM

SEQ ID NO: 50977 - protein, 7 aa, Artificial sequence
  Protein classification predicting sequence
DSDVDVG

SEQ ID NO: 50978 - protein, 6 aa, Artificial sequence
  Protein classification predicting sequence
SDHYPV

SEQ ID NO: 50979 - protein, 6 aa, Artificial sequence
  Protein classification predicting sequence
NKNVNE

SEQ ID NO: 50980 - protein, 7 aa, Artificial sequence
  Protein classification predicting sequence
DSKKIPK

SEQ ID NO: 50981 - protein, 6 aa, Artificial sequence
  Protein classification predicting sequence
SGAIFV

SEQ ID NO: 50982 - protein, 7 aa, Artificial sequence
  Protein classification predicting sequence
LADTVEA

SEQ ID NO: 50983 - protein, 8 aa, Artificial sequence
  Protein classification predicting sequence
IAAIQKSA

SEQ ID NO: 50984 - protein, 7 aa, Artificial sequence
  Protein classification predicting sequence
EVLDGHE

SEQ ID NO: 50985 - protein, 6 aa, Artificial sequence
  Protein classification predicting sequence
IEIPAN

SEQ ID NO: 50986 - protein, 7 aa, Artificial sequence
  Protein classification predicting sequence
IMFLGDG

SEQ ID NO: 50987 - protein, 6 aa, Artificial sequence
  Protein classification predicting sequence
IYSFNE

SEQ ID NO: 50988 - protein, 6 aa, Artificial sequence
  Protein classification predicting sequence
DFGGNQ

SEQ ID NO: 50989 - protein, 6 aa, Artificial sequence
  Protein classification predicting sequence
KVEELI

SEQ ID NO: 50990 - protein, 6 aa, Artificial sequence
  Protein classification predicting sequence
AFIGPS

SEQ ID NO: 50991 - protein, 5 aa, Artificial sequence
  Protein classification predicting sequence
TNDAP

SEQ ID NO: 50992 - protein, 6 aa, Artificial sequence
  Protein classification predicting sequence
AQQPKL

SEQ ID NO: 50993 - protein, 7 aa, Artificial sequence
  Protein classification predicting sequence
DIAGTAW

SEQ ID NO: 50994 - protein, 6 aa, Artificial sequence
  Protein classification predicting sequence
YQVDPS

SEQ ID NO: 50995 - protein, 6 aa, Artificial sequence
  Protein classification predicting sequence
VEVGET

SEQ ID NO: 50996 - protein, 6 aa, Artificial sequence
  Protein classification predicting sequence
IARAIA

SEQ ID NO: 50997 - protein, 6 aa, Artificial sequence
  Protein classification predicting sequence
DFTFIM

SEQ ID NO: 50998 - protein, 6 aa, Artificial sequence
  Protein classification predicting sequence
RTKEYI

SEQ ID NO: 50999 - protein, 7 aa, Artificial sequence
  Protein classification predicting sequence
SEDESDE

SEQ ID NO: 51000 - protein, 7 aa, Artificial sequence
  Protein classification predicting sequence
IGVGKGE

SEQ ID NO: 51001 - protein, 6 aa, Artificial sequence
  Protein classification predicting sequence
AKYQNT

SEQ ID NO: 51002 - protein, 6 aa, Artificial sequence
  Protein classification predicting sequence
GRSSLA

SEQ ID NO: 51003 - protein, 7 aa, Artificial sequence
  Protein classification predicting sequence
FTLTEHD

SEQ ID NO: 51004 - protein, 6 aa, Artificial sequence
  Protein classification predicting sequence
VPYDMA

SEQ ID NO: 51005 - protein, 6 aa, Artificial sequence
  Protein classification predicting sequence
ACEGNP

SEQ ID NO: 51006 - protein, 8 aa, Artificial sequence
  Protein classification predicting sequence
LKGDRAFQ

SEQ ID NO: 51007 - protein, 7 aa, Artificial sequence
  Protein classification predicting sequence
LEFGKFL

SEQ ID NO: 51008 - protein, 6 aa, Artificial sequence
  Protein classification predicting sequence
RCRAVV

SEQ ID NO: 51009 - protein, 5 aa, Artificial sequence
  Protein classification predicting sequence
GNPGP

SEQ ID NO: 51010 - protein, 6 aa, Artificial sequence
  Protein classification predicting sequence
GVIICG

SEQ ID NO: 51011 - protein, 6 aa, Artificial sequence
  Protein classification predicting sequence
QGSPFD

SEQ ID NO: 51012 - protein, 6 aa, Artificial sequence
  Protein classification predicting sequence
EENPSK

SEQ ID NO: 51013 - protein, 6 aa, Artificial sequence
  Protein classification predicting sequence
VAKFLH

SEQ ID NO: 51014 - protein, 7 aa, Artificial sequence
  Protein classification predicting sequence
EIVDISR

SEQ ID NO: 51015 - protein, 7 aa, Artificial sequence
  Protein classification predicting sequence
APRQIEP

SEQ ID NO: 51016 - protein, 5 aa, Artificial sequence
  Protein classification predicting sequence
HISAR

SEQ ID NO: 51017 - protein, 6 aa, Artificial sequence
  Protein classification predicting sequence
MVETKK

SEQ ID NO: 51018 - protein, 7 aa, Artificial sequence
  Protein classification predicting sequence
QLEKAPP

SEQ ID NO: 51019 - protein, 7 aa, Artificial sequence
  Protein classification predicting sequence
VIDTSGG

SEQ ID NO: 51020 - protein, 6 aa, Artificial sequence
  Protein classification predicting sequence
TGGADK

SEQ ID NO: 51021 - protein, 6 aa, Artificial sequence
  Protein classification predicting sequence
VYQARF

SEQ ID NO: 51022 - protein, 6 aa, Artificial sequence
  Protein classification predicting sequence
RNKVKR

SEQ ID NO: 51023 - protein, 6 aa, Artificial sequence
  Protein classification predicting sequence
VIQKSR

SEQ ID NO: 51024 - protein, 5 aa, Artificial sequence
  Protein classification predicting sequence
PTDCV

SEQ ID NO: 51025 - protein, 6 aa, Artificial sequence
  Protein classification predicting sequence
KTHFKT

SEQ ID NO: 51026 - protein, 7 aa, Artificial sequence
  Protein classification predicting sequence
PTLNNTK

SEQ ID NO: 51027 - protein, 7 aa, Artificial sequence
  Protein classification predicting sequence
EKKRLAL

SEQ ID NO: 51028 - protein, 7 aa, Artificial sequence
  Protein classification predicting sequence
GNVAAIL

SEQ ID NO: 51029 - protein, 6 aa, Artificial sequence
  Protein classification predicting sequence
LYYISN

SEQ ID NO: 51030 - protein, 6 aa, Artificial sequence
  Protein classification predicting sequence
LGLGRH

SEQ ID NO: 51031 - protein, 6 aa, Artificial sequence
  Protein classification predicting sequence
LDGSSN

SEQ ID NO: 51032 - protein, 6 aa, Artificial sequence
  Protein classification predicting sequence
APSRLS

SEQ ID NO: 51033 - protein, 6 aa, Artificial sequence
  Protein classification predicting sequence
PYLLFY

SEQ ID NO: 51034 - protein, 7 aa, Artificial sequence
  Protein classification predicting sequence
ENVKDNE

SEQ ID NO: 51035 - protein, 7 aa, Artificial sequence
  Protein classification predicting sequence
SSTSSAS

SEQ ID NO: 51036 - protein, 6 aa, Artificial sequence
  Protein classification predicting sequence
SPDAPE

SEQ ID NO: 51037 - protein, 6 aa, Artificial sequence
  Protein classification predicting sequence
IILSSR

SEQ ID NO: 51038 - protein, 6 aa, Artificial sequence
  Protein classification predicting sequence
SMIPIG

SEQ ID NO: 51039 - protein, 7 aa, Artificial sequence
  Protein classification predicting sequence
LIVIENN

SEQ ID NO: 51040 - protein, 7 aa, Artificial sequence
  Protein classification predicting sequence
LGLFFKD

SEQ ID NO: 51041 - protein, 6 aa, Artificial sequence
  Protein classification predicting sequence
LELAQY

SEQ ID NO: 51042 - protein, 7 aa, Artificial sequence
  Protein classification predicting sequence
AIALILW

SEQ ID NO: 51043 - protein, 7 aa, Artificial sequence
  Protein classification predicting sequence
FDREKTF

SEQ ID NO: 51044 - protein, 7 aa, Artificial sequence
  Protein classification predicting sequence
YDSTRVT

SEQ ID NO: 51045 - protein, 7 aa, Artificial sequence
  Protein classification predicting sequence
RSKEAKL

SEQ ID NO: 51046 - protein, 6 aa, Artificial sequence
  Protein classification predicting sequence
AYTVDG

SEQ ID NO: 51047 - protein, 6 aa, Artificial sequence
  Protein classification predicting sequence
DRGNMR

SEQ ID NO: 51048 - protein, 7 aa, Artificial sequence
  Protein classification predicting sequence
LSLENHC

SEQ ID NO: 51049 - protein, 7 aa, Artificial sequence
  Protein classification predicting sequence
PASSPYV

SEQ ID NO: 51050 - protein, 6 aa, Artificial sequence
  Protein classification predicting sequence
ISLLFA

SEQ ID NO: 51051 - protein, 7 aa, Artificial sequence
  Protein classification predicting sequence
GLDKFFQ

SEQ ID NO: 51052 - protein, 6 aa, Artificial sequence
  Protein classification predicting sequence
RQGWRT

SEQ ID NO: 51053 - protein, 6 aa, Artificial sequence
  Protein classification predicting sequence
CYGMMG

SEQ ID NO: 51054 - protein, 7 aa, Artificial sequence
  Protein classification predicting sequence
NYSTQEL

SEQ ID NO: 51055 - protein, 5 aa, Artificial sequence
  Protein classification predicting sequence
GFQMI

SEQ ID NO: 51056 - protein, 7 aa, Artificial sequence
  Protein classification predicting sequence
ELIAELK

SEQ ID NO: 51057 - protein, 7 aa, Artificial sequence
  Protein classification predicting sequence
KFNSKYN

SEQ ID NO: 51058 - protein, 6 aa, Artificial sequence
  Protein classification predicting sequence
ITVVSN

SEQ ID NO: 51059 - protein, 6 aa, Artificial sequence
  Protein classification predicting sequence
SGYPSD

SEQ ID NO: 51060 - protein, 6 aa, Artificial sequence
  Protein classification predicting sequence
IHLSFD

SEQ ID NO: 51061 - protein, 5 aa, Artificial sequence
  Protein classification predicting sequence
VTPHH

SEQ ID NO: 51062 - protein, 7 aa, Artificial sequence
  Protein classification predicting sequence
AFLKKIG

SEQ ID NO: 51063 - protein, 6 aa, Artificial sequence
  Protein classification predicting sequence
NQKRFN

SEQ ID NO: 51064 - protein, 6 aa, Artificial sequence
  Protein classification predicting sequence
FRLRQH

SEQ ID NO: 51065 - protein, 6 aa, Artificial sequence
  Protein classification predicting sequence
GYAVDK

SEQ ID NO: 51066 - protein, 7 aa, Artificial sequence
  Protein classification predicting sequence
GYTEDEK

SEQ ID NO: 51067 - protein, 5 aa, Artificial sequence
  Protein classification predicting sequence
FQRQH

SEQ ID NO: 51068 - protein, 6 aa, Artificial sequence
  Protein classification predicting sequence
GYGVKG

SEQ ID NO: 51069 - protein, 6 aa, Artificial sequence
  Protein classification predicting sequence
SVTVQG

SEQ ID NO: 51070 - protein, 6 aa, Artificial sequence
  Protein classification predicting sequence
GKRMLS

SEQ ID NO: 51071 - protein, 6 aa, Artificial sequence
  Protein classification predicting sequence
EAEDPE

SEQ ID NO: 51072 - protein, 6 aa, Artificial sequence
  Protein classification predicting sequence
FYNRKD

SEQ ID NO: 51073 - protein, 5 aa, Artificial sequence
  Protein classification predicting sequence
NSKWW

SEQ ID NO: 51074 - protein, 6 aa, Artificial sequence
  Protein classification predicting sequence
TGISTI

SEQ ID NO: 51075 - protein, 6 aa, Artificial sequence
  Protein classification predicting sequence
FFEHEV

SEQ ID NO: 51076 - protein, 5 aa, Artificial sequence
  Protein classification predicting sequence
GNEMT

SEQ ID NO: 51077 - protein, 6 aa, Artificial sequence
  Protein classification predicting sequence
PYTAQD

SEQ ID NO: 51078 - protein, 6 aa, Artificial sequence
  Protein classification predicting sequence
PDEEVG

SEQ ID NO: 51079 - protein, 6 aa, Artificial sequence
  Protein classification predicting sequence
KSGIHR

SEQ ID NO: 51080 - protein, 5 aa, Artificial sequence
  Protein classification predicting sequence
RIDHG

SEQ ID NO: 51081 - protein, 7 aa, Artificial sequence
  Protein classification predicting sequence
DIKGNLI

SEQ ID NO: 51082 - protein, 6 aa, Artificial sequence
  Protein classification predicting sequence
QSFPYQ

SEQ ID NO: 51083 - protein, 6 aa, Artificial sequence
  Protein classification predicting sequence
DHPELI

SEQ ID NO: 51084 - protein, 6 aa, Artificial sequence
  Protein classification predicting sequence
IKGGFV

SEQ ID NO: 51085 - protein, 6 aa, Artificial sequence
  Protein classification predicting sequence
HDSHNI

SEQ ID NO: 51086 - protein, 7 aa, Artificial sequence
  Protein classification predicting sequence
ERIVAIG

SEQ ID NO: 51087 - protein, 6 aa, Artificial sequence
  Protein classification predicting sequence
YLARRV

SEQ ID NO: 51088 - protein, 5 aa, Artificial sequence
  Protein classification predicting sequence
HDSHN

SEQ ID NO: 51089 - protein, 6 aa, Artificial sequence
  Protein classification predicting sequence
GLDEVM

SEQ ID NO: 51090 - protein, 6 aa, Artificial sequence
  Protein classification predicting sequence
PGGVVT

SEQ ID NO: 51091 - protein, 6 aa, Artificial sequence
  Protein classification predicting sequence
VKGFGF

SEQ ID NO: 51092 - protein, 6 aa, Artificial sequence
  Protein classification predicting sequence
SCVPAT

SEQ ID NO: 51093 - protein, 6 aa, Artificial sequence
  Protein classification predicting sequence
SNKSME

SEQ ID NO: 51094 - protein, 6 aa, Artificial sequence
  Protein classification predicting sequence
FIKSDV

SEQ ID NO: 51095 - protein, 7 aa, Artificial sequence
  Protein classification predicting sequence
KNNNISF

SEQ ID NO: 51096 - protein, 6 aa, Artificial sequence
  Protein classification predicting sequence
RLGGGI

SEQ ID NO: 51097 - protein, 6 aa, Artificial sequence
  Protein classification predicting sequence
VRNGQV

SEQ ID NO: 51098 - protein, 7 aa, Artificial sequence
  Protein classification predicting sequence
IGGLLSA

SEQ ID NO: 51099 - protein, 6 aa, Artificial sequence
  Protein classification predicting sequence
EGGRID

SEQ ID NO: 51100 - protein, 6 aa, Artificial sequence
  Protein classification predicting sequence
DPEKDI

SEQ ID NO: 51101 - protein, 6 aa, Artificial sequence
  Protein classification predicting sequence
SSFFRR

SEQ ID NO: 51102 - protein, 7 aa, Artificial sequence
  Protein classification predicting sequence
AMLLQPN

SEQ ID NO: 51103 - protein, 6 aa, Artificial sequence
  Protein classification predicting sequence
GGEKIN

SEQ ID NO: 51104 - protein, 6 aa, Artificial sequence
  Protein classification predicting sequence
EFYRLK

SEQ ID NO: 51105 - protein, 6 aa, Artificial sequence
  Protein classification predicting sequence
LNPKQL

SEQ ID NO: 51106 - protein, 6 aa, Artificial sequence
  Protein classification predicting sequence
TNIKTI

SEQ ID NO: 51107 - protein, 6 aa, Artificial sequence
  Protein classification predicting sequence
AVNQDK

SEQ ID NO: 51108 - protein, 6 aa, Artificial sequence
  Protein classification predicting sequence
RPDEIS

SEQ ID NO: 51109 - protein, 5 aa, Artificial sequence
  Protein classification predicting sequence
TAFHL

SEQ ID NO: 51110 - protein, 6 aa, Artificial sequence
  Protein classification predicting sequence
SIQAVY

SEQ ID NO: 51111 - protein, 6 aa, Artificial sequence
  Protein classification predicting sequence
TNANNG

SEQ ID NO: 51112 - protein, 6 aa, Artificial sequence
  Protein classification predicting sequence
LYQFKN

SEQ ID NO: 51113 - protein, 7 aa, Artificial sequence
  Protein classification predicting sequence
PNARVLI

SEQ ID NO: 51114 - protein, 5 aa, Artificial sequence
  Protein classification predicting sequence
CHDGK

SEQ ID NO: 51115 - protein, 7 aa, Artificial sequence
  Protein classification predicting sequence
ESLDPDR

SEQ ID NO: 51116 - protein, 6 aa, Artificial sequence
  Protein classification predicting sequence
HLASMK

SEQ ID NO: 51117 - protein, 7 aa, Artificial sequence
  Protein classification predicting sequence
VLIGMGE

SEQ ID NO: 51118 - protein, 6 aa, Artificial sequence
  Protein classification predicting sequence
QFASDL

SEQ ID NO: 51119 - protein, 5 aa, Artificial sequence
  Protein classification predicting sequence
WYYFD

SEQ ID NO: 51120 - protein, 6 aa, Artificial sequence
  Protein classification predicting sequence
KVAEFL

SEQ ID NO: 51121 - protein, 6 aa, Artificial sequence
  Protein classification predicting sequence
SIDTLD

SEQ ID NO: 51122 - protein, 8 aa, Artificial sequence
  Protein classification predicting sequence
VAALAKAG

SEQ ID NO: 51123 - protein, 6 aa, Artificial sequence
  Protein classification predicting sequence
GATILG

SEQ ID NO: 51124 - protein, 6 aa, Artificial sequence
  Protein classification predicting sequence
MQRAVA

SEQ ID NO: 51125 - protein, 7 aa, Artificial sequence
  Protein classification predicting sequence
AKARNLS

SEQ ID NO: 51126 - protein, 6 aa, Artificial sequence
  Protein classification predicting sequence
GPKGIK

SEQ ID NO: 51127 - protein, 6 aa, Artificial sequence
  Protein classification predicting sequence
IKLGDI

SEQ ID NO: 51128 - protein, 6 aa, Artificial sequence
  Protein classification predicting sequence
YIAVGN

SEQ ID NO: 51129 - protein, 7 aa, Artificial sequence
  Protein classification predicting sequence
IHVHDEK

SEQ ID NO: 51130 - protein, 7 aa, Artificial sequence
  Protein classification predicting sequence
NEALVRQ

SEQ ID NO: 51131 - protein, 6 aa, Artificial sequence
  Protein classification predicting sequence
YKTTLK

SEQ ID NO: 51132 - protein, 6 aa, Artificial sequence
  Protein classification predicting sequence
VKGRDT

SEQ ID NO: 51133 - protein, 6 aa, Artificial sequence
  Protein classification predicting sequence
GPYVWG

SEQ ID NO: 51134 - protein, 13 aa, Artificial sequence
  Protein classification predicting sequence
GGMENPCLTFVTP

SEQ ID NO: 51135 - protein, 5 aa, Artificial sequence
  Protein classification predicting sequence
RQHMD

SEQ ID NO: 51136 - protein, 7 aa, Artificial sequence
  Protein classification predicting sequence
KTSAADL

SEQ ID NO: 51137 - protein, 6 aa, Artificial sequence
  Protein classification predicting sequence
WMIQVP

SEQ ID NO: 51138 - protein, 7 aa, Artificial sequence
  Protein classification predicting sequence
EQVRLLA

SEQ ID NO: 51139 - protein, 6 aa, Artificial sequence
  Protein classification predicting sequence
SNMPVA

SEQ ID NO: 51140 - protein, 6 aa, Artificial sequence
  Protein classification predicting sequence
IGGIGK

SEQ ID NO: 51141 - protein, 6 aa, Artificial sequence
  Protein classification predicting sequence
TKELDQ

SEQ ID NO: 51142 - protein, 5 aa, Artificial sequence
  Protein classification predicting sequence
CHNFI

SEQ ID NO: 51143 - protein, 6 aa, Artificial sequence
  Protein classification predicting sequence
PMINAG

SEQ ID NO: 51144 - protein, 6 aa, Artificial sequence
  Protein classification predicting sequence
LALYFK

SEQ ID NO: 51145 - protein, 6 aa, Artificial sequence
  Protein classification predicting sequence
SNFRRQ

SEQ ID NO: 51146 - protein, 6 aa, Artificial sequence
  Protein classification predicting sequence
NSMKWD

SEQ ID NO: 51147 - protein, 6 aa, Artificial sequence
  Protein classification predicting sequence
GNRIAS

SEQ ID NO: 51148 - protein, 7 aa, Artificial sequence
  Protein classification predicting sequence
GKSIVRL

SEQ ID NO: 51149 - protein, 6 aa, Artificial sequence
  Protein classification predicting sequence
GQKNMV

SEQ ID NO: 51150 - protein, 5 aa, Artificial sequence
  Protein classification predicting sequence
HYNTA

SEQ ID NO: 51151 - protein, 6 aa, Artificial sequence
  Protein classification predicting sequence
NSEIRF

SEQ ID NO: 51152 - protein, 6 aa, Artificial sequence
  Protein classification predicting sequence
EPVASL

SEQ ID NO: 51153 - protein, 6 aa, Artificial sequence
  Protein classification predicting sequence
TLVDSA

SEQ ID NO: 51154 - protein, 7 aa, Artificial sequence
  Protein classification predicting sequence
GGTSDGR

SEQ ID NO: 51155 - protein, 6 aa, Artificial sequence
  Protein classification predicting sequence
GKVIRD

SEQ ID NO: 51156 - protein, 6 aa, Artificial sequence
  Protein classification predicting sequence
EQIKLS

SEQ ID NO: 51157 - protein, 5 aa, Artificial sequence
  Protein classification predicting sequence
ATNYN

SEQ ID NO: 51158 - protein, 5 aa, Artificial sequence
  Protein classification predicting sequence
DVWWG

SEQ ID NO: 51159 - protein, 6 aa, Artificial sequence
  Protein classification predicting sequence
SVLENH

SEQ ID NO: 51160 - protein, 7 aa, Artificial sequence
  Protein classification predicting sequence
SNNNQAY

SEQ ID NO: 51161 - protein, 5 aa, Artificial sequence
  Protein classification predicting sequence
YCDSQ

SEQ ID NO: 51162 - protein, 6 aa, Artificial sequence
  Protein classification predicting sequence
TFLDKQ

SEQ ID NO: 51163 - protein, 6 aa, Artificial sequence
  Protein classification predicting sequence
TVVSRI

SEQ ID NO: 51164 - protein, 6 aa, Artificial sequence
  Protein classification predicting sequence
TGSANL

SEQ ID NO: 51165 - protein, 6 aa, Artificial sequence
  Protein classification predicting sequence
VTIDGK

SEQ ID NO: 51166 - protein, 7 aa, Artificial sequence
  Protein classification predicting sequence
FVLLLSL

SEQ ID NO: 51167 - protein, 6 aa, Artificial sequence
  Protein classification predicting sequence
FPGVPY

SEQ ID NO: 51168 - protein, 6 aa, Artificial sequence
  Protein classification predicting sequence
AASTQG

SEQ ID NO: 51169 - protein, 6 aa, Artificial sequence
  Protein classification predicting sequence
SAASIL

SEQ ID NO: 51170 - protein, 6 aa, Artificial sequence
  Protein classification predicting sequence
TLQSIS

SEQ ID NO: 51171 - protein, 6 aa, Artificial sequence
  Protein classification predicting sequence
SRSGST

SEQ ID NO: 51172 - protein, 6 aa, Artificial sequence
  Protein classification predicting sequence
AAGSPI

SEQ ID NO: 51173 - protein, 7 aa, Artificial sequence
  Protein classification predicting sequence
VKTTGEI

SEQ ID NO: 51174 - protein, 5 aa, Artificial sequence
  Protein classification predicting sequence
WWDNG

SEQ ID NO: 51175 - protein, 6 aa, Artificial sequence
  Protein classification predicting sequence
RFPRVD

SEQ ID NO: 51176 - protein, 5 aa, Artificial sequence
  Protein classification predicting sequence
FKNMI

SEQ ID NO: 51177 - protein, 7 aa, Artificial sequence
  Protein classification predicting sequence
VALLLLA

SEQ ID NO: 51178 - protein, 6 aa, Artificial sequence
  Protein classification predicting sequence
VLGNHD

SEQ ID NO: 51179 - protein, 6 aa, Artificial sequence
  Protein classification predicting sequence
FNAFTR

SEQ ID NO: 51180 - protein, 6 aa, Artificial sequence
  Protein classification predicting sequence
RGPDSL

SEQ ID NO: 51181 - protein, 7 aa, Artificial sequence
  Protein classification predicting sequence
LQDKIKV

SEQ ID NO: 51182 - protein, 7 aa, Artificial sequence
  Protein classification predicting sequence
LSAGGDI

SEQ ID NO: 51183 - protein, 5 aa, Artificial sequence
  Protein classification predicting sequence
EYYIV

SEQ ID NO: 51184 - protein, 6 aa, Artificial sequence
  Protein classification predicting sequence
LNNVNL

SEQ ID NO: 51185 - protein, 7 aa, Artificial sequence
  Protein classification predicting sequence
NPTFYTA

SEQ ID NO: 51186 - protein, 5 aa, Artificial sequence
  Protein classification predicting sequence
YPGYM

SEQ ID NO: 51187 - protein, 6 aa, Artificial sequence
  Protein classification predicting sequence
PYLESS

SEQ ID NO: 51188 - protein, 7 aa, Artificial sequence
  Protein classification predicting sequence
SLDDLVN

SEQ ID NO: 51189 - protein, 6 aa, Artificial sequence
  Protein classification predicting sequence
SMSLVR

SEQ ID NO: 51190 - protein, 6 aa, Artificial sequence
  Protein classification predicting sequence
VIEIPA

SEQ ID NO: 51191 - protein, 6 aa, Artificial sequence
  Protein classification predicting sequence
LAIAPG

SEQ ID NO: 51192 - protein, 6 aa, Artificial sequence
  Protein classification predicting sequence
DTLDNI

SEQ ID NO: 51193 - protein, 6 aa, Artificial sequence
  Protein classification predicting sequence
YPFFLD

SEQ ID NO: 51194 - protein, 6 aa, Artificial sequence
  Protein classification predicting sequence
GVGERT

SEQ ID NO: 51195 - protein, 7 aa, Artificial sequence
  Protein classification predicting sequence
LAIKPGL

SEQ ID NO: 51196 - protein, 7 aa, Artificial sequence
  Protein classification predicting sequence
SSNPANG

SEQ ID NO: 51197 - protein, 8 aa, Artificial sequence
  Protein classification predicting sequence
LGFSINIT

SEQ ID NO: 51198 - protein, 5 aa, Artificial sequence
  Protein classification predicting sequence
TERDN

SEQ ID NO: 51199 - protein, 6 aa, Artificial sequence
  Protein classification predicting sequence
LDPSDA

SEQ ID NO: 51200 - protein, 6 aa, Artificial sequence
  Protein classification predicting sequence
TGKTAV

SEQ ID NO: 51201 - protein, 5 aa, Artificial sequence
  Protein classification predicting sequence
FLSQP

SEQ ID NO: 51202 - protein, 6 aa, Artificial sequence
  Protein classification predicting sequence
WVQPSL

SEQ ID NO: 51203 - protein, 5 aa, Artificial sequence
  Protein classification predicting sequence
RMTAM

SEQ ID NO: 51204 - protein, 5 aa, Artificial sequence
  Protein classification predicting sequence
YPSYP

SEQ ID NO: 51205 - protein, 6 aa, Artificial sequence
  Protein classification predicting sequence
LYDLSQ

SEQ ID NO: 51206 - protein, 6 aa, Artificial sequence
  Protein classification predicting sequence
HVGAHR

SEQ ID NO: 51207 - protein, 7 aa, Artificial sequence
  Protein classification predicting sequence
KALVDAG

SEQ ID NO: 51208 - protein, 7 aa, Artificial sequence
  Protein classification predicting sequence
RLKQAKE

SEQ ID NO: 51209 - protein, 6 aa, Artificial sequence
  Protein classification predicting sequence
PEANYL

SEQ ID NO: 51210 - protein, 6 aa, Artificial sequence
  Protein classification predicting sequence
LLRIFP

SEQ ID NO: 51211 - protein, 6 aa, Artificial sequence
  Protein classification predicting sequence
TAFFLN

SEQ ID NO: 51212 - protein, 6 aa, Artificial sequence
  Protein classification predicting sequence
PRVDIL

SEQ ID NO: 51213 - protein, 7 aa, Artificial sequence
  Protein classification predicting sequence
IVATGGT

SEQ ID NO: 51214 - protein, 5 aa, Artificial sequence
  Protein classification predicting sequence
VMNIR

SEQ ID NO: 51215 - protein, 7 aa, Artificial sequence
  Protein classification predicting sequence
LALGVLR

SEQ ID NO: 51216 - protein, 6 aa, Artificial sequence
  Protein classification predicting sequence
TFGPSP

SEQ ID NO: 51217 - protein, 7 aa, Artificial sequence
  Protein classification predicting sequence
AVKTFAD

SEQ ID NO: 51218 - protein, 6 aa, Artificial sequence
  Protein classification predicting sequence
TRVQHA

SEQ ID NO: 51219 - protein, 6 aa, Artificial sequence
  Protein classification predicting sequence
KNAGYG

SEQ ID NO: 51220 - protein, 6 aa, Artificial sequence
  Protein classification predicting sequence
IGVILI

SEQ ID NO: 51221 - protein, 6 aa, Artificial sequence
  Protein classification predicting sequence
TLIVII

SEQ ID NO: 51222 - protein, 6 aa, Artificial sequence
  Protein classification predicting sequence
WQLALN

SEQ ID NO: 51223 - protein, 7 aa, Artificial sequence
  Protein classification predicting sequence
SGFTGVG

SEQ ID NO: 51224 - protein, 6 aa, Artificial sequence
  Protein classification predicting sequence
ASLSYL

SEQ ID NO: 51225 - protein, 5 aa, Artificial sequence
  Protein classification predicting sequence
ANINQ

SEQ ID NO: 51226 - protein, 6 aa, Artificial sequence
  Protein classification predicting sequence
AEGRLV

SEQ ID NO: 51227 - protein, 5 aa, Artificial sequence
  Protein classification predicting sequence
EGTQR

SEQ ID NO: 51228 - protein, 6 aa, Artificial sequence
  Protein classification predicting sequence
AQDFHP

SEQ ID NO: 51229 - protein, 6 aa, Artificial sequence
  Protein classification predicting sequence
AISESG

SEQ ID NO: 51230 - protein, 6 aa, Artificial sequence
  Protein classification predicting sequence
QQGAVA

SEQ ID NO: 51231 - protein, 7 aa, Artificial sequence
  Protein classification predicting sequence
PLQGALI

SEQ ID NO: 51232 - protein, 5 aa, Artificial sequence
  Protein classification predicting sequence
LWKTF

SEQ ID NO: 51233 - protein, 8 aa, Artificial sequence
  Protein classification predicting sequence
ADVGISVD

SEQ ID NO: 51234 - protein, 6 aa, Artificial sequence
  Protein classification predicting sequence
PHRPIE

SEQ ID NO: 51235 - protein, 6 aa, Artificial sequence
  Protein classification predicting sequence
EMDKFP

SEQ ID NO: 51236 - protein, 6 aa, Artificial sequence
  Protein classification predicting sequence
GTHYGV

SEQ ID NO: 51237 - protein, 6 aa, Artificial sequence
  Protein classification predicting sequence
SFITPT

SEQ ID NO: 51238 - protein, 7 aa, Artificial sequence
  Protein classification predicting sequence
VLFRSVA

SEQ ID NO: 51239 - protein, 5 aa, Artificial sequence
  Protein classification predicting sequence
GWFIA

SEQ ID NO: 51240 - protein, 5 aa, Artificial sequence
  Protein classification predicting sequence
TSVFV

SEQ ID NO: 51241 - protein, 7 aa, Artificial sequence
  Protein classification predicting sequence
LLPLLVL

SEQ ID NO: 51242 - protein, 6 aa, Artificial sequence
  Protein classification predicting sequence
FDFFYF

SEQ ID NO: 51243 - protein, 5 aa, Artificial sequence
  Protein classification predicting sequence
RQITQ

SEQ ID NO: 51244 - protein, 6 aa, Artificial sequence
  Protein classification predicting sequence
QTGIKA

SEQ ID NO: 51245 - protein, 7 aa, Artificial sequence
  Protein classification predicting sequence
ETGIEEG

SEQ ID NO: 51246 - protein, 6 aa, Artificial sequence
  Protein classification predicting sequence
DTILNQ

SEQ ID NO: 51247 - protein, 6 aa, Artificial sequence
  Protein classification predicting sequence
AVAYRQ

SEQ ID NO: 51248 - protein, 7 aa, Artificial sequence
  Protein classification predicting sequence
DVSKLSA

SEQ ID NO: 51249 - protein, 6 aa, Artificial sequence
  Protein classification predicting sequence
EPLQTG

SEQ ID NO: 51250 - protein, 6 aa, Artificial sequence
  Protein classification predicting sequence
LAQYRE

SEQ ID NO: 51251 - protein, 5 aa, Artificial sequence
  Protein classification predicting sequence
CVYVA

SEQ ID NO: 51252 - protein, 6 aa, Artificial sequence
  Protein classification predicting sequence
GLSVSR

SEQ ID NO: 51253 - protein, 6 aa, Artificial sequence
  Protein classification predicting sequence
GIALNL

SEQ ID NO: 51254 - protein, 7 aa, Artificial sequence
  Protein classification predicting sequence
IVDVPAG

SEQ ID NO: 51255 - protein, 5 aa, Artificial sequence
  Protein classification predicting sequence
YNDAN

SEQ ID NO: 51256 - protein, 6 aa, Artificial sequence
  Protein classification predicting sequence
STVRAT

SEQ ID NO: 51257 - protein, 6 aa, Artificial sequence
  Protein classification predicting sequence
LQERIT

SEQ ID NO: 51258 - protein, 7 aa, Artificial sequence
  Protein classification predicting sequence
QERITTT

SEQ ID NO: 51259 - protein, 5 aa, Artificial sequence
  Protein classification predicting sequence
GEEHY

SEQ ID NO: 51260 - protein, 6 aa, Artificial sequence
  Protein classification predicting sequence
LPPILT

SEQ ID NO: 51261 - protein, 6 aa, Artificial sequence
  Protein classification predicting sequence
VQSTLQ

SEQ ID NO: 51262 - protein, 7 aa, Artificial sequence
  Protein classification predicting sequence
QERITST

SEQ ID NO: 51263 - protein, 6 aa, Artificial sequence
  Protein classification predicting sequence
LGDNTV

SEQ ID NO: 51264 - protein, 7 aa, Artificial sequence
  Protein classification predicting sequence
GKFVSLE

SEQ ID NO: 51265 - protein, 8 aa, Artificial sequence
  Protein classification predicting sequence
LQERITST

SEQ ID NO: 51266 - protein, 7 aa, Artificial sequence
  Protein classification predicting sequence
YNAISIK

SEQ ID NO: 51267 - protein, 6 aa, Artificial sequence
  Protein classification predicting sequence
QLKNYF

SEQ ID NO: 51268 - protein, 5 aa, Artificial sequence
  Protein classification predicting sequence
WILGD

SEQ ID NO: 51269 - protein, 7 aa, Artificial sequence
  Protein classification predicting sequence
TNTSISA

SEQ ID NO: 51270 - protein, 6 aa, Artificial sequence
  Protein classification predicting sequence
FAHLDA

SEQ ID NO: 51271 - protein, 7 aa, Artificial sequence
  Protein classification predicting sequence
LYQTDPS

SEQ ID NO: 51272 - protein, 7 aa, Artificial sequence
  Protein classification predicting sequence
LVMVHAE

SEQ ID NO: 51273 - protein, 6 aa, Artificial sequence
  Protein classification predicting sequence
SEKRRL

SEQ ID NO: 51274 - protein, 7 aa, Artificial sequence
  Protein classification predicting sequence
IAFFQDS

SEQ ID NO: 51275 - protein, 6 aa, Artificial sequence
  Protein classification predicting sequence
SEKGLT

SEQ ID NO: 51276 - protein, 7 aa, Artificial sequence
  Protein classification predicting sequence
NLAAAEG

SEQ ID NO: 51277 - protein, 7 aa, Artificial sequence
  Protein classification predicting sequence
KKIKISL

SEQ ID NO: 51278 - protein, 6 aa, Artificial sequence
  Protein classification predicting sequence
VLPGHA

SEQ ID NO: 51279 - protein, 6 aa, Artificial sequence
  Protein classification predicting sequence
LERKIH

SEQ ID NO: 51280 - protein, 6 aa, Artificial sequence
  Protein classification predicting sequence
VALPMF

SEQ ID NO: 51281 - protein, 6 aa, Artificial sequence
  Protein classification predicting sequence
GHAPLL

SEQ ID NO: 51282 - protein, 7 aa, Artificial sequence
  Protein classification predicting sequence
DRKILQL

SEQ ID NO: 51283 - protein, 7 aa, Artificial sequence
  Protein classification predicting sequence
LAQGKLD

SEQ ID NO: 51284 - protein, 6 aa, Artificial sequence
  Protein classification predicting sequence
AQDILD

SEQ ID NO: 51285 - protein, 7 aa, Artificial sequence
  Protein classification predicting sequence
VESVTQA

SEQ ID NO: 51286 - protein, 6 aa, Artificial sequence
  Protein classification predicting sequence
DSKNDI

SEQ ID NO: 51287 - protein, 7 aa, Artificial sequence
  Protein classification predicting sequence
EIVSGAS

SEQ ID NO: 51288 - protein, 7 aa, Artificial sequence
  Protein classification predicting sequence
ALTFFKS

SEQ ID NO: 51289 - protein, 6 aa, Artificial sequence
  Protein classification predicting sequence
VSQDLF

SEQ ID NO: 51290 - protein, 7 aa, Artificial sequence
  Protein classification predicting sequence
IASTLVD

SEQ ID NO: 51291 - protein, 6 aa, Artificial sequence
  Protein classification predicting sequence
LTLSYN

SEQ ID NO: 51292 - protein, 7 aa, Artificial sequence
  Protein classification predicting sequence
LIEIPNG

SEQ ID NO: 51293 - protein, 7 aa, Artificial sequence
  Protein classification predicting sequence
LAKDPKL

SEQ ID NO: 51294 - protein, 6 aa, Artificial sequence
  Protein classification predicting sequence
FTRSFA

SEQ ID NO: 51295 - protein, 6 aa, Artificial sequence
  Protein classification predicting sequence
GATPKD

SEQ ID NO: 51296 - protein, 6 aa, Artificial sequence
  Protein classification predicting sequence
MRDAGI

SEQ ID NO: 51297 - protein, 6 aa, Artificial sequence
  Protein classification predicting sequence
YTVDGG

SEQ ID NO: 51298 - protein, 6 aa, Artificial sequence
  Protein classification predicting sequence
GSCGSC

SEQ ID NO: 51299 - protein, 7 aa, Artificial sequence
  Protein classification predicting sequence
NVLAVRV

SEQ ID NO: 51300 - protein, 6 aa, Artificial sequence
  Protein classification predicting sequence
YFRIPR

SEQ ID NO: 51301 - protein, 6 aa, Artificial sequence
  Protein classification predicting sequence
DHKAVS

SEQ ID NO: 51302 - protein, 6 aa, Artificial sequence
  Protein classification predicting sequence
PNEVAL

SEQ ID NO: 51303 - protein, 6 aa, Artificial sequence
  Protein classification predicting sequence
PSDHYA

SEQ ID NO: 51304 - protein, 5 aa, Artificial sequence
  Protein classification predicting sequence
HGQFH

SEQ ID NO: 51305 - protein, 6 aa, Artificial sequence
  Protein classification predicting sequence
NYGGWK

SEQ ID NO: 51306 - protein, 6 aa, Artificial sequence
  Protein classification predicting sequence
FLDAMY

SEQ ID NO: 51307 - protein, 6 aa, Artificial sequence
  Protein classification predicting sequence
KESVRV

SEQ ID NO: 51308 - protein, 5 aa, Artificial sequence
  Protein classification predicting sequence
ANRQF

SEQ ID NO: 51309 - protein, 6 aa, Artificial sequence
  Protein classification predicting sequence
HLVGPN

SEQ ID NO: 51310 - protein, 6 aa, Artificial sequence
  Protein classification predicting sequence
DAHTDT

SEQ ID NO: 51311 - protein, 7 aa, Artificial sequence
  Protein classification predicting sequence
RERKELN

SEQ ID NO: 51312 - protein, 6 aa, Artificial sequence
  Protein classification predicting sequence
TIVIVT

SEQ ID NO: 51313 - protein, 5 aa, Artificial sequence
  Protein classification predicting sequence
HAPFL

SEQ ID NO: 51314 - protein, 6 aa, Artificial sequence
  Protein classification predicting sequence
QVKQVK

SEQ ID NO: 51315 - protein, 6 aa, Artificial sequence
  Protein classification predicting sequence
SQLSGR

SEQ ID NO: 51316 - protein, 6 aa, Artificial sequence
  Protein classification predicting sequence
GGGHAP

SEQ ID NO: 51317 - protein, 6 aa, Artificial sequence
  Protein classification predicting sequence
FGTELS

SEQ ID NO: 51318 - protein, 6 aa, Artificial sequence
  Protein classification predicting sequence
CVSLLG

SEQ ID NO: 51319 - protein, 6 aa, Artificial sequence
  Protein classification predicting sequence
YWLVKN

SEQ ID NO: 51320 - protein, 6 aa, Artificial sequence
  Protein classification predicting sequence
TYASRN

SEQ ID NO: 51321 - protein, 6 aa, Artificial sequence
  Protein classification predicting sequence
IVLVIF

SEQ ID NO: 51322 - protein, 6 aa, Artificial sequence
  Protein classification predicting sequence
ATVGVA

SEQ ID NO: 51323 - protein, 5 aa, Artificial sequence
  Protein classification predicting sequence
VQFYN

SEQ ID NO: 51324 - protein, 6 aa, Artificial sequence
  Protein classification predicting sequence
LMIVEA

SEQ ID NO: 51325 - protein, 7 aa, Artificial sequence
  Protein classification predicting sequence
VYSAGDS

SEQ ID NO: 51326 - protein, 8 aa, Artificial sequence
  Protein classification predicting sequence
ELVVLGTA

SEQ ID NO: 51327 - protein, 7 aa, Artificial sequence
  Protein classification predicting sequence
VGIRIYV

SEQ ID NO: 51328 - protein, 6 aa, Artificial sequence
  Protein classification predicting sequence
EYPKNI

SEQ ID NO: 51329 - protein, 5 aa, Artificial sequence
  Protein classification predicting sequence
TCKQG

SEQ ID NO: 51330 - protein, 6 aa, Artificial sequence
  Protein classification predicting sequence
LSGGST

SEQ ID NO: 51331 - protein, 7 aa, Artificial sequence
  Protein classification predicting sequence
EFDISED

SEQ ID NO: 51332 - protein, 6 aa, Artificial sequence
  Protein classification predicting sequence
QVFEGT

SEQ ID NO: 51333 - protein, 6 aa, Artificial sequence
  Protein classification predicting sequence
ADVTQT

SEQ ID NO: 51334 - protein, 6 aa, Artificial sequence
  Protein classification predicting sequence
SQDLNT

SEQ ID NO: 51335 - protein, 6 aa, Artificial sequence
  Protein classification predicting sequence
LHNEAI

SEQ ID NO: 51336 - protein, 6 aa, Artificial sequence
  Protein classification predicting sequence
DMTLTN

SEQ ID NO: 51337 - protein, 6 aa, Artificial sequence
  Protein classification predicting sequence
KQGFWE

SEQ ID NO: 51338 - protein, 6 aa, Artificial sequence
  Protein classification predicting sequence
PQAVQD

SEQ ID NO: 51339 - protein, 6 aa, Artificial sequence
  Protein classification predicting sequence
ELEAFA

SEQ ID NO: 51340 - protein, 6 aa, Artificial sequence
  Protein classification predicting sequence
VNTVFQ

SEQ ID NO: 51341 - protein, 5 aa, Artificial sequence
  Protein classification predicting sequence
AREQW

SEQ ID NO: 51342 - protein, 6 aa, Artificial sequence
  Protein classification predicting sequence
IRRGTD

SEQ ID NO: 51343 - protein, 6 aa, Artificial sequence
  Protein classification predicting sequence
YGSGSL

SEQ ID NO: 51344 - protein, 6 aa, Artificial sequence
  Protein classification predicting sequence
FTINGI

SEQ ID NO: 51345 - protein, 6 aa, Artificial sequence
  Protein classification predicting sequence
HGISHP

SEQ ID NO: 51346 - protein, 6 aa, Artificial sequence
  Protein classification predicting sequence
IFKQNL

SEQ ID NO: 51347 - protein, 6 aa, Artificial sequence
  Protein classification predicting sequence
WGTDWG

SEQ ID NO: 51348 - protein, 6 aa, Artificial sequence
  Protein classification predicting sequence
YEINKF

SEQ ID NO: 51349 - protein, 5 aa, Artificial sequence
  Protein classification predicting sequence
CANHG

SEQ ID NO: 51350 - protein, 5 aa, Artificial sequence
  Protein classification predicting sequence
KNTWG

SEQ ID NO: 51351 - protein, 6 aa, Artificial sequence
  Protein classification predicting sequence
VYSGDT

SEQ ID NO: 51352 - protein, 7 aa, Artificial sequence
  Protein classification predicting sequence
KVARIAT

SEQ ID NO: 51353 - protein, 7 aa, Artificial sequence
  Protein classification predicting sequence
QVATDNP

SEQ ID NO: 51354 - protein, 6 aa, Artificial sequence
  Protein classification predicting sequence
GLYPES

SEQ ID NO: 51355 - protein, 6 aa, Artificial sequence
  Protein classification predicting sequence
NALVVQ

SEQ ID NO: 51356 - protein, 6 aa, Artificial sequence
  Protein classification predicting sequence
PKKGKI

SEQ ID NO: 51357 - protein, 6 aa, Artificial sequence
  Protein classification predicting sequence
SQSAFT

SEQ ID NO: 51358 - protein, 6 aa, Artificial sequence
  Protein classification predicting sequence
ILGIDP

SEQ ID NO: 51359 - protein, 5 aa, Artificial sequence
  Protein classification predicting sequence
FFDQF

SEQ ID NO: 51360 - protein, 6 aa, Artificial sequence
  Protein classification predicting sequence
HRTLLY

SEQ ID NO: 51361 - protein, 7 aa, Artificial sequence
  Protein classification predicting sequence
LHAEQLS

SEQ ID NO: 51362 - protein, 7 aa, Artificial sequence
  Protein classification predicting sequence
LIALVVG

SEQ ID NO: 51363 - protein, 6 aa, Artificial sequence
  Protein classification predicting sequence
NQPFKS

SEQ ID NO: 51364 - protein, 6 aa, Artificial sequence
  Protein classification predicting sequence
IRGISE

SEQ ID NO: 51365 - protein, 6 aa, Artificial sequence
  Protein classification predicting sequence
SDADWV

SEQ ID NO: 51366 - protein, 5 aa, Artificial sequence
  Protein classification predicting sequence
WASCN

SEQ ID NO: 51367 - protein, 6 aa, Artificial sequence
  Protein classification predicting sequence
EQEANE

SEQ ID NO: 51368 - protein, 6 aa, Artificial sequence
  Protein classification predicting sequence
KGTIDL

SEQ ID NO: 51369 - protein, 6 aa, Artificial sequence
  Protein classification predicting sequence
GFTGKG

SEQ ID NO: 51370 - protein, 6 aa, Artificial sequence
  Protein classification predicting sequence
DVVKPI

SEQ ID NO: 51371 - protein, 6 aa, Artificial sequence
  Protein classification predicting sequence
APGDFH

SEQ ID NO: 51372 - protein, 6 aa, Artificial sequence
  Protein classification predicting sequence
GASTGG

SEQ ID NO: 51373 - protein, 6 aa, Artificial sequence
  Protein classification predicting sequence
QQGAIT

SEQ ID NO: 51374 - protein, 7 aa, Artificial sequence
  Protein classification predicting sequence
RREREQE

SEQ ID NO: 51375 - protein, 7 aa, Artificial sequence
  Protein classification predicting sequence
AFKGESL

SEQ ID NO: 51376 - protein, 7 aa, Artificial sequence
  Protein classification predicting sequence
LIEKVAS

SEQ ID NO: 51377 - protein, 6 aa, Artificial sequence
  Protein classification predicting sequence
DEATSA

SEQ ID NO: 51378 - protein, 6 aa, Artificial sequence
  Protein classification predicting sequence
QPTPIL

SEQ ID NO: 51379 - protein, 6 aa, Artificial sequence
  Protein classification predicting sequence
ESDPDI

SEQ ID NO: 51380 - protein, 6 aa, Artificial sequence
  Protein classification predicting sequence
GPKIHG

SEQ ID NO: 51381 - protein, 6 aa, Artificial sequence
  Protein classification predicting sequence
MEVIDT

SEQ ID NO: 51382 - protein, 6 aa, Artificial sequence
  Protein classification predicting sequence
GALTTF

SEQ ID NO: 51383 - protein, 6 aa, Artificial sequence
  Protein classification predicting sequence
SDILLK

SEQ ID NO: 51384 - protein, 5 aa, Artificial sequence
  Protein classification predicting sequence
YGWCG

SEQ ID NO: 51385 - protein, 8 aa, Artificial sequence
  Protein classification predicting sequence
PSLASEYS

SEQ ID NO: 51386 - protein, 6 aa, Artificial sequence
  Protein classification predicting sequence
GEDPER

SEQ ID NO: 51387 - protein, 6 aa, Artificial sequence
  Protein classification predicting sequence
NPLAKL

SEQ ID NO: 51388 - protein, 6 aa, Artificial sequence
  Protein classification predicting sequence
SSFNWD

SEQ ID NO: 51389 - protein, 7 aa, Artificial sequence
  Protein classification predicting sequence
AQYAPGY

SEQ ID NO: 51390 - protein, 6 aa, Artificial sequence
  Protein classification predicting sequence
YTREAG

SEQ ID NO: 51391 - protein, 6 aa, Artificial sequence
  Protein classification predicting sequence
LVANTS

SEQ ID NO: 51392 - protein, 8 aa, Artificial sequence
  Protein classification predicting sequence
LFSLLVLV

SEQ ID NO: 51393 - protein, 7 aa, Artificial sequence
  Protein classification predicting sequence
GPGSPSG

SEQ ID NO: 51394 - protein, 6 aa, Artificial sequence
  Protein classification predicting sequence
QPLEQI

SEQ ID NO: 51395 - protein, 6 aa, Artificial sequence
  Protein classification predicting sequence
RIIFLG

SEQ ID NO: 51396 - protein, 7 aa, Artificial sequence
  Protein classification predicting sequence
LLNNILS

SEQ ID NO: 51397 - protein, 5 aa, Artificial sequence
  Protein classification predicting sequence
NSPGG

SEQ ID NO: 51398 - protein, 6 aa, Artificial sequence
  Protein classification predicting sequence
SDPDKD

SEQ ID NO: 51399 - protein, 7 aa, Artificial sequence
  Protein classification predicting sequence
VAQMLFL

SEQ ID NO: 51400 - protein, 6 aa, Artificial sequence
  Protein classification predicting sequence
VFEELT

SEQ ID NO: 51401 - protein, 6 aa, Artificial sequence
  Protein classification predicting sequence
IYETHT

SEQ ID NO: 51402 - protein, 7 aa, Artificial sequence
  Protein classification predicting sequence
AQMLFLE

SEQ ID NO: 51403 - protein, 6 aa, Artificial sequence
  Protein classification predicting sequence
GMAASM

SEQ ID NO: 51404 - protein, 6 aa, Artificial sequence
  Protein classification predicting sequence
ALPHAR

SEQ ID NO: 51405 - protein, 7 aa, Artificial sequence
  Protein classification predicting sequence
RATRSAS

SEQ ID NO: 51406 - protein, 6 aa, Artificial sequence
  Protein classification predicting sequence
LGNHEF

SEQ ID NO: 51407 - protein, 8 aa, Artificial sequence
  Protein classification predicting sequence
EANLALRR

SEQ ID NO: 51408 - protein, 6 aa, Artificial sequence
  Protein classification predicting sequence
LGDVLN

SEQ ID NO: 51409 - protein, 6 aa, Artificial sequence
  Protein classification predicting sequence
YNAGNV

SEQ ID NO: 51410 - protein, 5 aa, Artificial sequence
  Protein classification predicting sequence
WNDGS

SEQ ID NO: 51411 - protein, 6 aa, Artificial sequence
  Protein classification predicting sequence
PISSSG

SEQ ID NO: 51412 - protein, 6 aa, Artificial sequence
  Protein classification predicting sequence
TAIDVN

SEQ ID NO: 51413 - protein, 5 aa, Artificial sequence
  Protein classification predicting sequence
FQVQQ

SEQ ID NO: 51414 - protein, 7 aa, Artificial sequence
  Protein classification predicting sequence
GMGLSMG

SEQ ID NO: 51415 - protein, 5 aa, Artificial sequence
  Protein classification predicting sequence
AHPFE

SEQ ID NO: 51416 - protein, 6 aa, Artificial sequence
  Protein classification predicting sequence
GIFHFQ

SEQ ID NO: 51417 - protein, 6 aa, Artificial sequence
  Protein classification predicting sequence
HVDEFL

SEQ ID NO: 51418 - protein, 6 aa, Artificial sequence
  Protein classification predicting sequence
TAIEEM

SEQ ID NO: 51419 - protein, 6 aa, Artificial sequence
  Protein classification predicting sequence
TGDGTN

SEQ ID NO: 51420 - protein, 6 aa, Artificial sequence
  Protein classification predicting sequence
IRRFQS

SEQ ID NO: 51421 - protein, 6 aa, Artificial sequence
  Protein classification predicting sequence
SRRKAE

SEQ ID NO: 51422 - protein, 6 aa, Artificial sequence
  Protein classification predicting sequence
RRRVSE

SEQ ID NO: 51423 - protein, 6 aa, Artificial sequence
  Protein classification predicting sequence
LGISKG

SEQ ID NO: 51424 - protein, 7 aa, Artificial sequence
  Protein classification predicting sequence
FDGQYHE

SEQ ID NO: 51425 - protein, 7 aa, Artificial sequence
  Protein classification predicting sequence
VRKKSLR

SEQ ID NO: 51426 - protein, 6 aa, Artificial sequence
  Protein classification predicting sequence
DDVQQS

SEQ ID NO: 51427 - protein, 6 aa, Artificial sequence
  Protein classification predicting sequence
PDDGSI

SEQ ID NO: 51428 - protein, 6 aa, Artificial sequence
  Protein classification predicting sequence
LHDEVH

SEQ ID NO: 51429 - protein, 6 aa, Artificial sequence
  Protein classification predicting sequence
QNRDVS

SEQ ID NO: 51430 - protein, 6 aa, Artificial sequence
  Protein classification predicting sequence
GSFQPG

SEQ ID NO: 51431 - protein, 6 aa, Artificial sequence
  Protein classification predicting sequence
LSPDDA

SEQ ID NO: 51432 - protein, 6 aa, Artificial sequence
  Protein classification predicting sequence
HFVTID

SEQ ID NO: 51433 - protein, 7 aa, Artificial sequence
  Protein classification predicting sequence
VLFFEGD

SEQ ID NO: 51434 - protein, 6 aa, Artificial sequence
  Protein classification predicting sequence
PLSGSA

SEQ ID NO: 51435 - protein, 8 aa, Artificial sequence
  Protein classification predicting sequence
RGTWTLEL

SEQ ID NO: 51436 - protein, 6 aa, Artificial sequence
  Protein classification predicting sequence
IYANEG

SEQ ID NO: 51437 - protein, 6 aa, Artificial sequence
  Protein classification predicting sequence
GDPVLR

SEQ ID NO: 51438 - protein, 7 aa, Artificial sequence
  Protein classification predicting sequence
STEIVEG

SEQ ID NO: 51439 - protein, 6 aa, Artificial sequence
  Protein classification predicting sequence
DPVLRT

SEQ ID NO: 51440 - protein, 6 aa, Artificial sequence
  Protein classification predicting sequence
QFSSDL

SEQ ID NO: 51441 - protein, 6 aa, Artificial sequence
  Protein classification predicting sequence
EIVEKS

SEQ ID NO: 51442 - protein, 6 aa, Artificial sequence
  Protein classification predicting sequence
SFPGIY

SEQ ID NO: 51443 - protein, 7 aa, Artificial sequence
  Protein classification predicting sequence
SVDGFRA

SEQ ID NO: 51444 - protein, 7 aa, Artificial sequence
  Protein classification predicting sequence
VGDPVLR

SEQ ID NO: 51445 - protein, 6 aa, Artificial sequence
  Protein classification predicting sequence
SILQML

SEQ ID NO: 51446 - protein, 8 aa, Artificial sequence
  Protein classification predicting sequence
GKEIIVEG

SEQ ID NO: 51447 - protein, 6 aa, Artificial sequence
  Protein classification predicting sequence
INMNDP

SEQ ID NO: 51448 - protein, 6 aa, Artificial sequence
  Protein classification predicting sequence
DKSLNK

SEQ ID NO: 51449 - protein, 5 aa, Artificial sequence
  Protein classification predicting sequence
QHKGY

SEQ ID NO: 51450 - protein, 6 aa, Artificial sequence
  Protein classification predicting sequence
IRALDR

SEQ ID NO: 51451 - protein, 6 aa, Artificial sequence
  Protein classification predicting sequence
KQILVI

SEQ ID NO: 51452 - protein, 6 aa, Artificial sequence
  Protein classification predicting sequence
LHYLGD

SEQ ID NO: 51453 - protein, 5 aa, Artificial sequence
  Protein classification predicting sequence
EMMNF

SEQ ID NO: 51454 - protein, 6 aa, Artificial sequence
  Protein classification predicting sequence
LQNYKN

SEQ ID NO: 51455 - protein, 6 aa, Artificial sequence
  Protein classification predicting sequence
NMNINS

SEQ ID NO: 51456 - protein, 6 aa, Artificial sequence
  Protein classification predicting sequence
HGIVLG

SEQ ID NO: 51457 - protein, 7 aa, Artificial sequence
  Protein classification predicting sequence
LAFPREL

SEQ ID NO: 51458 - protein, 6 aa, Artificial sequence
  Protein classification predicting sequence
SRVMSS

SEQ ID NO: 51459 - protein, 5 aa, Artificial sequence
  Protein classification predicting sequence
MIQCA

SEQ ID NO: 51460 - protein, 5 aa, Artificial sequence
  Protein classification predicting sequence
PTTQL

SEQ ID NO: 51461 - protein, 7 aa, Artificial sequence
  Protein classification predicting sequence
REALVSV

SEQ ID NO: 51462 - protein, 7 aa, Artificial sequence
  Protein classification predicting sequence
QVAGSLK

SEQ ID NO: 51463 - protein, 6 aa, Artificial sequence
  Protein classification predicting sequence
LVDLPG

SEQ ID NO: 51464 - protein, 6 aa, Artificial sequence
  Protein classification predicting sequence
INENFG

SEQ ID NO: 51465 - protein, 6 aa, Artificial sequence
  Protein classification predicting sequence
QFSKMG

SEQ ID NO: 51466 - protein, 6 aa, Artificial sequence
  Protein classification predicting sequence
KRETHR

SEQ ID NO: 51467 - protein, 6 aa, Artificial sequence
  Protein classification predicting sequence
FDLDGT

SEQ ID NO: 51468 - protein, 6 aa, Artificial sequence
  Protein classification predicting sequence
GCQRLL

SEQ ID NO: 51469 - protein, 6 aa, Artificial sequence
  Protein classification predicting sequence
RWWIKD

SEQ ID NO: 51470 - protein, 4 aa, Artificial sequence
  Protein classification predicting sequence
YWWC

SEQ ID NO: 51471 - protein, 6 aa, Artificial sequence
  Protein classification predicting sequence
LHYLQE

SEQ ID NO: 51472 - protein, 5 aa, Artificial sequence
  Protein classification predicting sequence
GMAIY

SEQ ID NO: 51473 - protein, 6 aa, Artificial sequence
  Protein classification predicting sequence
GVKGFG

SEQ ID NO: 51474 - protein, 5 aa, Artificial sequence
  Protein classification predicting sequence
RWASC

SEQ ID NO: 51475 - protein, 6 aa, Artificial sequence
  Protein classification predicting sequence
DISLYI

SEQ ID NO: 51476 - protein, 6 aa, Artificial sequence
  Protein classification predicting sequence
VTEIIT

SEQ ID NO: 51477 - protein, 6 aa, Artificial sequence
  Protein classification predicting sequence
LIATPS

SEQ ID NO: 51478 - protein, 7 aa, Artificial sequence
  Protein classification predicting sequence
DSALAAV

SEQ ID NO: 51479 - protein, 5 aa, Artificial sequence
  Protein classification predicting sequence
CLSIP

SEQ ID NO: 51480 - protein, 7 aa, Artificial sequence
  Protein classification predicting sequence
STATYLG

SEQ ID NO: 51481 - protein, 7 aa, Artificial sequence
  Protein classification predicting sequence
NRKDGKP

SEQ ID NO: 51482 - protein, 6 aa, Artificial sequence
  Protein classification predicting sequence
HFGVFY

SEQ ID NO: 51483 - protein, 6 aa, Artificial sequence
  Protein classification predicting sequence
IPKGSR

SEQ ID NO: 51484 - protein, 6 aa, Artificial sequence
  Protein classification predicting sequence
WVQDNI

SEQ ID NO: 51485 - protein, 7 aa, Artificial sequence
  Protein classification predicting sequence
IDIDIES

SEQ ID NO: 51486 - protein, 7 aa, Artificial sequence
  Protein classification predicting sequence
LGFGLGP

SEQ ID NO: 51487 - protein, 5 aa, Artificial sequence
  Protein classification predicting sequence
TVDPC

SEQ ID NO: 51488 - protein, 7 aa, Artificial sequence
  Protein classification predicting sequence
ALLTGEQ

SEQ ID NO: 51489 - protein, 6 aa, Artificial sequence
  Protein classification predicting sequence
TREQMQ

SEQ ID NO: 51490 - protein, 7 aa, Artificial sequence
  Protein classification predicting sequence
IDSIIQR

SEQ ID NO: 51491 - protein, 7 aa, Artificial sequence
  Protein classification predicting sequence
NKKSVTD

SEQ ID NO: 51492 - protein, 7 aa, Artificial sequence
  Protein classification predicting sequence
VDLAKEY

SEQ ID NO: 51493 - protein, 6 aa, Artificial sequence
  Protein classification predicting sequence
CERDER

SEQ ID NO: 51494 - protein, 6 aa, Artificial sequence
  Protein classification predicting sequence
EDPDRE

SEQ ID NO: 51495 - protein, 6 aa, Artificial sequence
  Protein classification predicting sequence
TKESNV

SEQ ID NO: 51496 - protein, 6 aa, Artificial sequence
  Protein classification predicting sequence
LPPLQG

SEQ ID NO: 51497 - protein, 6 aa, Artificial sequence
  Protein classification predicting sequence
EKVTEM

SEQ ID NO: 51498 - protein, 6 aa, Artificial sequence
  Protein classification predicting sequence
KYQYGG

SEQ ID NO: 51499 - protein, 7 aa, Artificial sequence
  Protein classification predicting sequence
WALGATF

SEQ ID NO: 51500 - protein, 6 aa, Artificial sequence
  Protein classification predicting sequence
NYKNET

SEQ ID NO: 51501 - protein, 6 aa, Artificial sequence
  Protein classification predicting sequence
YTDLAT

SEQ ID NO: 51502 - protein, 5 aa, Artificial sequence
  Protein classification predicting sequence
PTMMG

SEQ ID NO: 51503 - protein, 6 aa, Artificial sequence
  Protein classification predicting sequence
RMYSYV

SEQ ID NO: 51504 - protein, 6 aa, Artificial sequence
  Protein classification predicting sequence
FIATFI

SEQ ID NO: 51505 - protein, 6 aa, Artificial sequence
  Protein classification predicting sequence
IPTNVI

SEQ ID NO: 51506 - protein, 6 aa, Artificial sequence
  Protein classification predicting sequence
NVIGEP

SEQ ID NO: 51507 - protein, 6 aa, Artificial sequence
  Protein classification predicting sequence
ILYTGI

SEQ ID NO: 51508 - protein, 6 aa, Artificial sequence
  Protein classification predicting sequence
RNVVTI

SEQ ID NO: 51509 - protein, 7 aa, Artificial sequence
  Protein classification predicting sequence
LVLAVPL

SEQ ID NO: 51510 - protein, 7 aa, Artificial sequence
  Protein classification predicting sequence
QRKGLEW

SEQ ID NO: 51511 - protein, 6 aa, Artificial sequence
  Protein classification predicting sequence
EFFQQG

SEQ ID NO: 51512 - protein, 6 aa, Artificial sequence
  Protein classification predicting sequence
WDLQRL

SEQ ID NO: 51513 - protein, 6 aa, Artificial sequence
  Protein classification predicting sequence
EREEFY

SEQ ID NO: 51514 - protein, 6 aa, Artificial sequence
  Protein classification predicting sequence
LWPGMK

SEQ ID NO: 51515 - protein, 6 aa, Artificial sequence
  Protein classification predicting sequence
RFVKET

SEQ ID NO: 51516 - protein, 6 aa, Artificial sequence
  Protein classification predicting sequence
CSFEEA

SEQ ID NO: 51517 - protein, 5 aa, Artificial sequence
  Protein classification predicting sequence
QYKMA

SEQ ID NO: 51518 - protein, 6 aa, Artificial sequence
  Protein classification predicting sequence
HGSSIL

SEQ ID NO: 51519 - protein, 7 aa, Artificial sequence
  Protein classification predicting sequence
FADQTLA

SEQ ID NO: 51520 - protein, 6 aa, Artificial sequence
  Protein classification predicting sequence
VAGEHN

SEQ ID NO: 51521 - protein, 8 aa, Artificial sequence
  Protein classification predicting sequence
APEMRGKV

SEQ ID NO: 51522 - protein, 6 aa, Artificial sequence
  Protein classification predicting sequence
DPRPRI

SEQ ID NO: 51523 - protein, 6 aa, Artificial sequence
  Protein classification predicting sequence
TGASYI

SEQ ID NO: 51524 - protein, 6 aa, Artificial sequence
  Protein classification predicting sequence
LQRKLG

SEQ ID NO: 51525 - protein, 6 aa, Artificial sequence
  Protein classification predicting sequence
SPRGAG

SEQ ID NO: 51526 - protein, 6 aa, Artificial sequence
  Protein classification predicting sequence
YLGGHI

SEQ ID NO: 51527 - protein, 6 aa, Artificial sequence
  Protein classification predicting sequence
EFLGDA

SEQ ID NO: 51528 - protein, 6 aa, Artificial sequence
  Protein classification predicting sequence
IGKSYQ

SEQ ID NO: 51529 - protein, 7 aa, Artificial sequence
  Protein classification predicting sequence
QFLQKIS

SEQ ID NO: 51530 - protein, 5 aa, Artificial sequence
  Protein classification predicting sequence
ISRVM

SEQ ID NO: 51531 - protein, 6 aa, Artificial sequence
  Protein classification predicting sequence
ISRVMS

SEQ ID NO: 51532 - protein, 8 aa, Artificial sequence
  Protein classification predicting sequence
RSPTSSPT

SEQ ID NO: 51533 - protein, 6 aa, Artificial sequence
  Protein classification predicting sequence
MGAYQP

SEQ ID NO: 51534 - protein, 5 aa, Artificial sequence
  Protein classification predicting sequence
IYGFY

SEQ ID NO: 51535 - protein, 7 aa, Artificial sequence
  Protein classification predicting sequence
FEHLQIL

SEQ ID NO: 51536 - protein, 7 aa, Artificial sequence
  Protein classification predicting sequence
LFREKQK

SEQ ID NO: 51537 - protein, 6 aa, Artificial sequence
  Protein classification predicting sequence
IETIQQ

SEQ ID NO: 51538 - protein, 6 aa, Artificial sequence
  Protein classification predicting sequence
VYYQGV

SEQ ID NO: 51539 - protein, 7 aa, Artificial sequence
  Protein classification predicting sequence
RSIEETL

SEQ ID NO: 51540 - protein, 7 aa, Artificial sequence
  Protein classification predicting sequence
FLALQTL

SEQ ID NO: 51541 - protein, 6 aa, Artificial sequence
  Protein classification predicting sequence
NPEREG

SEQ ID NO: 51542 - protein, 7 aa, Artificial sequence
  Protein classification predicting sequence
ARTLVEH

SEQ ID NO: 51543 - protein, 7 aa, Artificial sequence
  Protein classification predicting sequence
EKTFSEG

SEQ ID NO: 51544 - protein, 8 aa, Artificial sequence
  Protein classification predicting sequence
DAQAVAVV

SEQ ID NO: 51545 - protein, 6 aa, Artificial sequence
  Protein classification predicting sequence
PDNPNN

SEQ ID NO: 51546 - protein, 6 aa, Artificial sequence
  Protein classification predicting sequence
VQERLT

SEQ ID NO: 51547 - protein, 7 aa, Artificial sequence
  Protein classification predicting sequence
LSRPSRG

SEQ ID NO: 51548 - protein, 6 aa, Artificial sequence
  Protein classification predicting sequence
VLVKDI

SEQ ID NO: 51549 - protein, 6 aa, Artificial sequence
  Protein classification predicting sequence
RGLYKE

SEQ ID NO: 51550 - protein, 6 aa, Artificial sequence
  Protein classification predicting sequence
TREEFL

SEQ ID NO: 51551 - protein, 7 aa, Artificial sequence
  Protein classification predicting sequence
NGQEVKY

SEQ ID NO: 51552 - protein, 6 aa, Artificial sequence
  Protein classification predicting sequence
PRKGRI

SEQ ID NO: 51553 - protein, 6 aa, Artificial sequence
  Protein classification predicting sequence
VALVYG

SEQ ID NO: 51554 - protein, 6 aa, Artificial sequence
  Protein classification predicting sequence
KLPTSF

SEQ ID NO: 51555 - protein, 6 aa, Artificial sequence
  Protein classification predicting sequence
DTVEAN

SEQ ID NO: 51556 - protein, 6 aa, Artificial sequence
  Protein classification predicting sequence
SFTALG

SEQ ID NO: 51557 - protein, 6 aa, Artificial sequence
  Protein classification predicting sequence
NRYNTE

SEQ ID NO: 51558 - protein, 6 aa, Artificial sequence
  Protein classification predicting sequence
FATFTM

SEQ ID NO: 51559 - protein, 5 aa, Artificial sequence
  Protein classification predicting sequence
CGFQL

SEQ ID NO: 51560 - protein, 5 aa, Artificial sequence
  Protein classification predicting sequence
PRKRE

SEQ ID NO: 51561 - protein, 7 aa, Artificial sequence
  Protein classification predicting sequence
VYTLKQE

SEQ ID NO: 51562 - protein, 5 aa, Artificial sequence
  Protein classification predicting sequence
DNFMS

SEQ ID NO: 51563 - protein, 7 aa, Artificial sequence
  Protein classification predicting sequence
GFVNGEK

SEQ ID NO: 51564 - protein, 6 aa, Artificial sequence
  Protein classification predicting sequence
ESLVDG

SEQ ID NO: 51565 - protein, 6 aa, Artificial sequence
  Protein classification predicting sequence
ILTHPG

SEQ ID NO: 51566 - protein, 7 aa, Artificial sequence
  Protein classification predicting sequence
IAGYGLN

SEQ ID NO: 51567 - protein, 6 aa, Artificial sequence
  Protein classification predicting sequence
GLVASQ

SEQ ID NO: 51568 - protein, 7 aa, Artificial sequence
  Protein classification predicting sequence
QLYDALY

SEQ ID NO: 51569 - protein, 7 aa, Artificial sequence
  Protein classification predicting sequence
PQAVQDK

SEQ ID NO: 51570 - protein, 6 aa, Artificial sequence
  Protein classification predicting sequence
KSPTEK

SEQ ID NO: 51571 - protein, 6 aa, Artificial sequence
  Protein classification predicting sequence
LMLTCG

SEQ ID NO: 51572 - protein, 5 aa, Artificial sequence
  Protein classification predicting sequence
PRNPF

SEQ ID NO: 51573 - protein, 5 aa, Artificial sequence
  Protein classification predicting sequence
MLTCG

SEQ ID NO: 51574 - protein, 5 aa, Artificial sequence
  Protein classification predicting sequence
CHTGR

SEQ ID NO: 51575 - protein, 6 aa, Artificial sequence
  Protein classification predicting sequence
GYYTAL

SEQ ID NO: 51576 - protein, 6 aa, Artificial sequence
  Protein classification predicting sequence
DEQRVR

SEQ ID NO: 51577 - protein, 8 aa, Artificial sequence
  Protein classification predicting sequence
AGTKTAAV

SEQ ID NO: 51578 - protein, 6 aa, Artificial sequence
  Protein classification predicting sequence
DIAKYF

SEQ ID NO: 51579 - protein, 5 aa, Artificial sequence
  Protein classification predicting sequence
GCVWG

SEQ ID NO: 51580 - protein, 5 aa, Artificial sequence
  Protein classification predicting sequence
RRFMI

SEQ ID NO: 51581 - protein, 6 aa, Artificial sequence
  Protein classification predicting sequence
NDTIDI

SEQ ID NO: 51582 - protein, 6 aa, Artificial sequence
  Protein classification predicting sequence
TALVFG

SEQ ID NO: 51583 - protein, 5 aa, Artificial sequence
  Protein classification predicting sequence
MMDRN

SEQ ID NO: 51584 - protein, 7 aa, Artificial sequence
  Protein classification predicting sequence
LVYSAHD

SEQ ID NO: 51585 - protein, 6 aa, Artificial sequence
  Protein classification predicting sequence
NVMYAL

SEQ ID NO: 51586 - protein, 5 aa, Artificial sequence
  Protein classification predicting sequence
HRCWE

SEQ ID NO: 51587 - protein, 6 aa, Artificial sequence
  Protein classification predicting sequence
RVNQVA

SEQ ID NO: 51588 - protein, 6 aa, Artificial sequence
  Protein classification predicting sequence
KVYPPL

SEQ ID NO: 51589 - protein, 6 aa, Artificial sequence
  Protein classification predicting sequence
VTNPDG

SEQ ID NO: 51590 - protein, 6 aa, Artificial sequence
  Protein classification predicting sequence
LFIDNI

SEQ ID NO: 51591 - protein, 6 aa, Artificial sequence
  Protein classification predicting sequence
EPVDNL

SEQ ID NO: 51592 - protein, 6 aa, Artificial sequence
  Protein classification predicting sequence
EYGLVD

SEQ ID NO: 51593 - protein, 6 aa, Artificial sequence
  Protein classification predicting sequence
GVSSCM

SEQ ID NO: 51594 - protein, 6 aa, Artificial sequence
  Protein classification predicting sequence
YELAMN

SEQ ID NO: 51595 - protein, 6 aa, Artificial sequence
  Protein classification predicting sequence
VTLYQD

SEQ ID NO: 51596 - protein, 6 aa, Artificial sequence
  Protein classification predicting sequence
QNFALG

SEQ ID NO: 51597 - protein, 6 aa, Artificial sequence
  Protein classification predicting sequence
LKRYLL

SEQ ID NO: 51598 - protein, 6 aa, Artificial sequence
  Protein classification predicting sequence
EDDRER

SEQ ID NO: 51599 - protein, 5 aa, Artificial sequence
  Protein classification predicting sequence
YCGEF

SEQ ID NO: 51600 - protein, 7 aa, Artificial sequence
  Protein classification predicting sequence
IEKVREM

SEQ ID NO: 51601 - protein, 6 aa, Artificial sequence
  Protein classification predicting sequence
KMYKHS

SEQ ID NO: 51602 - protein, 6 aa, Artificial sequence
  Protein classification predicting sequence
ASGNNF

SEQ ID NO: 51603 - protein, 7 aa, Artificial sequence
  Protein classification predicting sequence
FIDIRTK

SEQ ID NO: 51604 - protein, 6 aa, Artificial sequence
  Protein classification predicting sequence
NKARQA

SEQ ID NO: 51605 - protein, 5 aa, Artificial sequence
  Protein classification predicting sequence
ELYHY

SEQ ID NO: 51606 - protein, 6 aa, Artificial sequence
  Protein classification predicting sequence
TTDGTT

SEQ ID NO: 51607 - protein, 6 aa, Artificial sequence
  Protein classification predicting sequence
QRQRVA

SEQ ID NO: 51608 - protein, 6 aa, Artificial sequence
  Protein classification predicting sequence
PSSALL

SEQ ID NO: 51609 - protein, 6 aa, Artificial sequence
  Protein classification predicting sequence
TNQGEV

SEQ ID NO: 51610 - protein, 5 aa, Artificial sequence
  Protein classification predicting sequence
TPHPC

SEQ ID NO: 51611 - protein, 5 aa, Artificial sequence
  Protein classification predicting sequence
VPKVP

SEQ ID NO: 51612 - protein, 6 aa, Artificial sequence
  Protein classification predicting sequence
AMVFGQ

SEQ ID NO: 51613 - protein, 6 aa, Artificial sequence
  Protein classification predicting sequence
LRTGMV

SEQ ID NO: 51614 - protein, 6 aa, Artificial sequence
  Protein classification predicting sequence
GWTGPT

SEQ ID NO: 51615 - protein, 6 aa, Artificial sequence
  Protein classification predicting sequence
FSLAND

SEQ ID NO: 51616 - protein, 6 aa, Artificial sequence
  Protein classification predicting sequence
DSSLTI

SEQ ID NO: 51617 - protein, 6 aa, Artificial sequence
  Protein classification predicting sequence
SVREIG

SEQ ID NO: 51618 - protein, 5 aa, Artificial sequence
  Protein classification predicting sequence
KQTLQ

SEQ ID NO: 51619 - protein, 6 aa, Artificial sequence
  Protein classification predicting sequence
TGVYTD

SEQ ID NO: 51620 - protein, 6 aa, Artificial sequence
  Protein classification predicting sequence
NDTFIE

SEQ ID NO: 51621 - protein, 5 aa, Artificial sequence
  Protein classification predicting sequence
TSMAT

SEQ ID NO: 51622 - protein, 6 aa, Artificial sequence
  Protein classification predicting sequence
YHLGYL

SEQ ID NO: 51623 - protein, 7 aa, Artificial sequence
  Protein classification predicting sequence
SATLLQL

SEQ ID NO: 51624 - protein, 6 aa, Artificial sequence
  Protein classification predicting sequence
GHLLRY

SEQ ID NO: 51625 - protein, 6 aa, Artificial sequence
  Protein classification predicting sequence
LISYCF

SEQ ID NO: 51626 - protein, 6 aa, Artificial sequence
  Protein classification predicting sequence
WTGAWS

SEQ ID NO: 51627 - protein, 7 aa, Artificial sequence
  Protein classification predicting sequence
DPRIAAR

SEQ ID NO: 51628 - protein, 6 aa, Artificial sequence
  Protein classification predicting sequence
GLVVAV

SEQ ID NO: 51629 - protein, 7 aa, Artificial sequence
  Protein classification predicting sequence
NLTLESG

SEQ ID NO: 51630 - protein, 6 aa, Artificial sequence
  Protein classification predicting sequence
LMTAFM

SEQ ID NO: 51631 - protein, 7 aa, Artificial sequence
  Protein classification predicting sequence
ARAGGGI

SEQ ID NO: 51632 - protein, 6 aa, Artificial sequence
  Protein classification predicting sequence
SIAAAS

SEQ ID NO: 51633 - protein, 6 aa, Artificial sequence
  Protein classification predicting sequence
GGKPFP

SEQ ID NO: 51634 - protein, 6 aa, Artificial sequence
  Protein classification predicting sequence
EVRRQF

SEQ ID NO: 51635 - protein, 6 aa, Artificial sequence
  Protein classification predicting sequence
RVGGGI

SEQ ID NO: 51636 - protein, 5 aa, Artificial sequence
  Protein classification predicting sequence
SKPQC

SEQ ID NO: 51637 - protein, 7 aa, Artificial sequence
  Protein classification predicting sequence
GVKVYTM

SEQ ID NO: 51638 - protein, 6 aa, Artificial sequence
  Protein classification predicting sequence
ISVDMD

SEQ ID NO: 51639 - protein, 6 aa, Artificial sequence
  Protein classification predicting sequence
IARNHG

SEQ ID NO: 51640 - protein, 6 aa, Artificial sequence
  Protein classification predicting sequence
LLNHVS

SEQ ID NO: 51641 - protein, 6 aa, Artificial sequence
  Protein classification predicting sequence
GFNVAQ

SEQ ID NO: 51642 - protein, 6 aa, Artificial sequence
  Protein classification predicting sequence
SKGGEL

SEQ ID NO: 51643 - protein, 7 aa, Artificial sequence
  Protein classification predicting sequence
VSRLHAR

SEQ ID NO: 51644 - protein, 6 aa, Artificial sequence
  Protein classification predicting sequence
THLIYA

SEQ ID NO: 51645 - protein, 6 aa, Artificial sequence
  Protein classification predicting sequence
PVDNLG

SEQ ID NO: 51646 - protein, 6 aa, Artificial sequence
  Protein classification predicting sequence
HQAVVE

SEQ ID NO: 51647 - protein, 6 aa, Artificial sequence
  Protein classification predicting sequence
GVNKGR

SEQ ID NO: 51648 - protein, 6 aa, Artificial sequence
  Protein classification predicting sequence
SAFPFE

SEQ ID NO: 51649 - protein, 6 aa, Artificial sequence
  Protein classification predicting sequence
GPTEQL

SEQ ID NO: 51650 - protein, 6 aa, Artificial sequence
  Protein classification predicting sequence
MTGEIT

SEQ ID NO: 51651 - protein, 5 aa, Artificial sequence
  Protein classification predicting sequence
MSKHM

SEQ ID NO: 51652 - protein, 6 aa, Artificial sequence
  Protein classification predicting sequence
RSEFEH

SEQ ID NO: 51653 - protein, 5 aa, Artificial sequence
  Protein classification predicting sequence
IFQQF

SEQ ID NO: 51654 - protein, 6 aa, Artificial sequence
  Protein classification predicting sequence
GVPPGP

SEQ ID NO: 51655 - protein, 6 aa, Artificial sequence
  Protein classification predicting sequence
FSDPVT

SEQ ID NO: 51656 - protein, 6 aa, Artificial sequence
  Protein classification predicting sequence
DRVGNI

SEQ ID NO: 51657 - protein, 7 aa, Artificial sequence
  Protein classification predicting sequence
FTSGDGK

SEQ ID NO: 51658 - protein, 6 aa, Artificial sequence
  Protein classification predicting sequence
EIHFLP

SEQ ID NO: 51659 - protein, 5 aa, Artificial sequence
  Protein classification predicting sequence
LQTFF

SEQ ID NO: 51660 - protein, 5 aa, Artificial sequence
  Protein classification predicting sequence
IDHGH

SEQ ID NO: 51661 - protein, 7 aa, Artificial sequence
  Protein classification predicting sequence
NTFLLSG

SEQ ID NO: 51662 - protein, 5 aa, Artificial sequence
  Protein classification predicting sequence
NPVMF

SEQ ID NO: 51663 - protein, 6 aa, Artificial sequence
  Protein classification predicting sequence
NNGLVE

SEQ ID NO: 51664 - protein, 7 aa, Artificial sequence
  Protein classification predicting sequence
ELNSSVD

SEQ ID NO: 51665 - protein, 6 aa, Artificial sequence
  Protein classification predicting sequence
AINVND

SEQ ID NO: 51666 - protein, 7 aa, Artificial sequence
  Protein classification predicting sequence
DKESGAL

SEQ ID NO: 51667 - protein, 7 aa, Artificial sequence
  Protein classification predicting sequence
DSLRQAQ

SEQ ID NO: 51668 - protein, 7 aa, Artificial sequence
  Protein classification predicting sequence
SPILRRR

SEQ ID NO: 51669 - protein, 6 aa, Artificial sequence
  Protein classification predicting sequence
HPDYKP

SEQ ID NO: 51670 - protein, 6 aa, Artificial sequence
  Protein classification predicting sequence
NDLMLL

SEQ ID NO: 51671 - protein, 5 aa, Artificial sequence
  Protein classification predicting sequence
NHMCG

SEQ ID NO: 51672 - protein, 6 aa, Artificial sequence
  Protein classification predicting sequence
QHELPA

SEQ ID NO: 51673 - protein, 6 aa, Artificial sequence
  Protein classification predicting sequence
QRAARK

SEQ ID NO: 51674 - protein, 6 aa, Artificial sequence
  Protein classification predicting sequence
KGHFVS

SEQ ID NO: 51675 - protein, 6 aa, Artificial sequence
  Protein classification predicting sequence
MDVFTW

SEQ ID NO: 51676 - protein, 6 aa, Artificial sequence
  Protein classification predicting sequence
VMLLVY

SEQ ID NO: 51677 - protein, 6 aa, Artificial sequence
  Protein classification predicting sequence
LNPYKN

SEQ ID NO: 51678 - protein, 6 aa, Artificial sequence
  Protein classification predicting sequence
IYGVIY

SEQ ID NO: 51679 - protein, 7 aa, Artificial sequence
  Protein classification predicting sequence
LPVAGVV

SEQ ID NO: 51680 - protein, 6 aa, Artificial sequence
  Protein classification predicting sequence
PILAEE

SEQ ID NO: 51681 - protein, 7 aa, Artificial sequence
  Protein classification predicting sequence
GQIVVAR

SEQ ID NO: 51682 - protein, 6 aa, Artificial sequence
  Protein classification predicting sequence
RRTPDY

SEQ ID NO: 51683 - protein, 5 aa, Artificial sequence
  Protein classification predicting sequence
GDSMI

SEQ ID NO: 51684 - protein, 6 aa, Artificial sequence
  Protein classification predicting sequence
GSTASP

SEQ ID NO: 51685 - protein, 6 aa, Artificial sequence
  Protein classification predicting sequence
GEIVVA

SEQ ID NO: 51686 - protein, 7 aa, Artificial sequence
  Protein classification predicting sequence
NSAVNGD

SEQ ID NO: 51687 - protein, 7 aa, Artificial sequence
  Protein classification predicting sequence
VLEVQGD

SEQ ID NO: 51688 - protein, 7 aa, Artificial sequence
  Protein classification predicting sequence
AVLRFIY

SEQ ID NO: 51689 - protein, 6 aa, Artificial sequence
  Protein classification predicting sequence
IEIISG

SEQ ID NO: 51690 - protein, 7 aa, Artificial sequence
  Protein classification predicting sequence
RAEKVKI

SEQ ID NO: 51691 - protein, 5 aa, Artificial sequence
  Protein classification predicting sequence
HIDCS

SEQ ID NO: 51692 - protein, 6 aa, Artificial sequence
  Protein classification predicting sequence
HNVILS

SEQ ID NO: 51693 - protein, 6 aa, Artificial sequence
  Protein classification predicting sequence
RLASFY

SEQ ID NO: 51694 - protein, 6 aa, Artificial sequence
  Protein classification predicting sequence
QFGSDL

SEQ ID NO: 51695 - protein, 6 aa, Artificial sequence
  Protein classification predicting sequence
DGVLNY

SEQ ID NO: 51696 - protein, 8 aa, Artificial sequence
  Protein classification predicting sequence
ELSSSLLG

SEQ ID NO: 51697 - protein, 5 aa, Artificial sequence
  Protein classification predicting sequence
AVGYQ

SEQ ID NO: 51698 - protein, 6 aa, Artificial sequence
  Protein classification predicting sequence
GCPVQV

SEQ ID NO: 51699 - protein, 6 aa, Artificial sequence
  Protein classification predicting sequence
RCNNVG

SEQ ID NO: 51700 - protein, 6 aa, Artificial sequence
  Protein classification predicting sequence
LSTEMG

SEQ ID NO: 51701 - protein, 5 aa, Artificial sequence
  Protein classification predicting sequence
DNIAF

SEQ ID NO: 51702 - protein, 5 aa, Artificial sequence
  Protein classification predicting sequence
EDNMA

SEQ ID NO: 51703 - protein, 7 aa, Artificial sequence
  Protein classification predicting sequence
IIILIAL

SEQ ID NO: 51704 - protein, 6 aa, Artificial sequence
  Protein classification predicting sequence
HVPEGA

SEQ ID NO: 51705 - protein, 6 aa, Artificial sequence
  Protein classification predicting sequence
KGSAAS

SEQ ID NO: 51706 - protein, 5 aa, Artificial sequence
  Protein classification predicting sequence
RGGIK

SEQ ID NO: 51707 - protein, 6 aa, Artificial sequence
  Protein classification predicting sequence
IQDEIE

SEQ ID NO: 51708 - protein, 6 aa, Artificial sequence
  Protein classification predicting sequence
EEIGMT

SEQ ID NO: 51709 - protein, 6 aa, Artificial sequence
  Protein classification predicting sequence
VLPLRD

SEQ ID NO: 51710 - protein, 6 aa, Artificial sequence
  Protein classification predicting sequence
GLEKSL

SEQ ID NO: 51711 - protein, 6 aa, Artificial sequence
  Protein classification predicting sequence
IAKYTI

SEQ ID NO: 51712 - protein, 6 aa, Artificial sequence
  Protein classification predicting sequence
FFLAMP

SEQ ID NO: 51713 - protein, 6 aa, Artificial sequence
  Protein classification predicting sequence
FSIFIG

SEQ ID NO: 51714 - protein, 6 aa, Artificial sequence
  Protein classification predicting sequence
ILYQYS

SEQ ID NO: 51715 - protein, 6 aa, Artificial sequence
  Protein classification predicting sequence
AIILGI

SEQ ID NO: 51716 - protein, 6 aa, Artificial sequence
  Protein classification predicting sequence
SPALLY

SEQ ID NO: 51717 - protein, 6 aa, Artificial sequence
  Protein classification predicting sequence
LADTAI

SEQ ID NO: 51718 - protein, 6 aa, Artificial sequence
  Protein classification predicting sequence
VGVVLM

SEQ ID NO: 51719 - protein, 6 aa, Artificial sequence
  Protein classification predicting sequence
FLIQMF

SEQ ID NO: 51720 - protein, 6 aa, Artificial sequence
  Protein classification predicting sequence
AYVPTN

SEQ ID NO: 51721 - protein, 5 aa, Artificial sequence
  Protein classification predicting sequence
QINSR

SEQ ID NO: 51722 - protein, 6 aa, Artificial sequence
  Protein classification predicting sequence
AASDFT

SEQ ID NO: 51723 - protein, 6 aa, Artificial sequence
  Protein classification predicting sequence
LRKINQ

SEQ ID NO: 51724 - protein, 6 aa, Artificial sequence
  Protein classification predicting sequence
GGLLSA

SEQ ID NO: 51725 - protein, 5 aa, Artificial sequence
  Protein classification predicting sequence
IRQYF

SEQ ID NO: 51726 - protein, 6 aa, Artificial sequence
  Protein classification predicting sequence
HRPVVL

SEQ ID NO: 51727 - protein, 6 aa, Artificial sequence
  Protein classification predicting sequence
LPMNFQ

SEQ ID NO: 51728 - protein, 6 aa, Artificial sequence
  Protein classification predicting sequence
DMGYDV

SEQ ID NO: 51729 - protein, 7 aa, Artificial sequence
  Protein classification predicting sequence
GDWGVEN

SEQ ID NO: 51730 - protein, 6 aa, Artificial sequence
  Protein classification predicting sequence
GFTVLD

SEQ ID NO: 51731 - protein, 6 aa, Artificial sequence
  Protein classification predicting sequence
YKTILP

SEQ ID NO: 51732 - protein, 7 aa, Artificial sequence
  Protein classification predicting sequence
TVREDVL

SEQ ID NO: 51733 - protein, 7 aa, Artificial sequence
  Protein classification predicting sequence
KNYFHYN

SEQ ID NO: 51734 - protein, 6 aa, Artificial sequence
  Protein classification predicting sequence
TVLADT

SEQ ID NO: 51735 - protein, 5 aa, Artificial sequence
  Protein classification predicting sequence
HEQSR

SEQ ID NO: 51736 - protein, 6 aa, Artificial sequence
  Protein classification predicting sequence
DDHNWK

SEQ ID NO: 51737 - protein, 6 aa, Artificial sequence
  Protein classification predicting sequence
DQDIFD

SEQ ID NO: 51738 - protein, 6 aa, Artificial sequence
  Protein classification predicting sequence
QDGSRQ

SEQ ID NO: 51739 - protein, 6 aa, Artificial sequence
  Protein classification predicting sequence
VSQRTA

SEQ ID NO: 51740 - protein, 6 aa, Artificial sequence
  Protein classification predicting sequence
GHSSDP

SEQ ID NO: 51741 - protein, 6 aa, Artificial sequence
  Protein classification predicting sequence
AWLQQY

SEQ ID NO: 51742 - protein, 6 aa, Artificial sequence
  Protein classification predicting sequence
DVGEYV

SEQ ID NO: 51743 - protein, 7 aa, Artificial sequence
  Protein classification predicting sequence
AFAPGTG

SEQ ID NO: 51744 - protein, 6 aa, Artificial sequence
  Protein classification predicting sequence
KTHLTY

SEQ ID NO: 51745 - protein, 7 aa, Artificial sequence
  Protein classification predicting sequence
LPLSQEA

SEQ ID NO: 51746 - protein, 9 aa, Artificial sequence
  Protein classification predicting sequence
LVLVLLVLG

SEQ ID NO: 51747 - protein, 7 aa, Artificial sequence
  Protein classification predicting sequence
PTASLDP

SEQ ID NO: 51748 - protein, 6 aa, Artificial sequence
  Protein classification predicting sequence
IQRSEH

SEQ ID NO: 51749 - protein, 6 aa, Artificial sequence
  Protein classification predicting sequence
QRVAIA

SEQ ID NO: 51750 - protein, 7 aa, Artificial sequence
  Protein classification predicting sequence
EVARLAD

SEQ ID NO: 51751 - protein, 6 aa, Artificial sequence
  Protein classification predicting sequence
AVLIET

SEQ ID NO: 51752 - protein, 7 aa, Artificial sequence
  Protein classification predicting sequence
TTHDLLD

SEQ ID NO: 51753 - protein, 6 aa, Artificial sequence
  Protein classification predicting sequence
GDETAP

SEQ ID NO: 51754 - protein, 6 aa, Artificial sequence
  Protein classification predicting sequence
LFEEDG

SEQ ID NO: 51755 - protein, 6 aa, Artificial sequence
  Protein classification predicting sequence
FRKLAS

SEQ ID NO: 51756 - protein, 6 aa, Artificial sequence
  Protein classification predicting sequence
DTGLLC

SEQ ID NO: 51757 - protein, 5 aa, Artificial sequence
  Protein classification predicting sequence
NMRWI

SEQ ID NO: 51758 - protein, 6 aa, Artificial sequence
  Protein classification predicting sequence
EASIYT

SEQ ID NO: 51759 - protein, 6 aa, Artificial sequence
  Protein classification predicting sequence
AKSGVG

SEQ ID NO: 51760 - protein, 6 aa, Artificial sequence
  Protein classification predicting sequence
LQSGIG

SEQ ID NO: 51761 - protein, 6 aa, Artificial sequence
  Protein classification predicting sequence
ERRRLN

SEQ ID NO: 51762 - protein, 6 aa, Artificial sequence
  Protein classification predicting sequence
EFSETE

SEQ ID NO: 51763 - protein, 6 aa, Artificial sequence
  Protein classification predicting sequence
HNPNFV

SEQ ID NO: 51764 - protein, 6 aa, Artificial sequence
  Protein classification predicting sequence
YAKICK

SEQ ID NO: 51765 - protein, 7 aa, Artificial sequence
  Protein classification predicting sequence
EAAAIMA

SEQ ID NO: 51766 - protein, 6 aa, Artificial sequence
  Protein classification predicting sequence
EPTSAL

SEQ ID NO: 51767 - protein, 6 aa, Artificial sequence
  Protein classification predicting sequence
GGKIGL

SEQ ID NO: 51768 - protein, 6 aa, Artificial sequence
  Protein classification predicting sequence
FALRQQ

SEQ ID NO: 51769 - protein, 7 aa, Artificial sequence
  Protein classification predicting sequence
IEAGILD

SEQ ID NO: 51770 - protein, 6 aa, Artificial sequence
  Protein classification predicting sequence
SRLLER

SEQ ID NO: 51771 - protein, 6 aa, Artificial sequence
  Protein classification predicting sequence
LNDGTI

SEQ ID NO: 51772 - protein, 7 aa, Artificial sequence
  Protein classification predicting sequence
PYTISSQ

SEQ ID NO: 51773 - protein, 7 aa, Artificial sequence
  Protein classification predicting sequence
VRSEFID

SEQ ID NO: 51774 - protein, 5 aa, Artificial sequence
  Protein classification predicting sequence
CMHGG

SEQ ID NO: 51775 - protein, 7 aa, Artificial sequence
  Protein classification predicting sequence
EFVEMKA

SEQ ID NO: 51776 - protein, 8 aa, Artificial sequence
  Protein classification predicting sequence
NELIIKTF

SEQ ID NO: 51777 - protein, 7 aa, Artificial sequence
  Protein classification predicting sequence
LTFSSDA

SEQ ID NO: 51778 - protein, 6 aa, Artificial sequence
  Protein classification predicting sequence
SSQQRN

SEQ ID NO: 51779 - protein, 6 aa, Artificial sequence
  Protein classification predicting sequence
SAAANN

SEQ ID NO: 51780 - protein, 6 aa, Artificial sequence
  Protein classification predicting sequence
MSKKQE

SEQ ID NO: 51781 - protein, 6 aa, Artificial sequence
  Protein classification predicting sequence
GWPVAT

SEQ ID NO: 51782 - protein, 6 aa, Artificial sequence
  Protein classification predicting sequence
QLTMTL

SEQ ID NO: 51783 - protein, 6 aa, Artificial sequence
  Protein classification predicting sequence
QKPTPF

SEQ ID NO: 51784 - protein, 6 aa, Artificial sequence
  Protein classification predicting sequence
VWEQKS

SEQ ID NO: 51785 - protein, 6 aa, Artificial sequence
  Protein classification predicting sequence
VDGDFL

SEQ ID NO: 51786 - protein, 6 aa, Artificial sequence
  Protein classification predicting sequence
GYPKPL

SEQ ID NO: 51787 - protein, 7 aa, Artificial sequence
  Protein classification predicting sequence
STDSALA

SEQ ID NO: 51788 - protein, 6 aa, Artificial sequence
  Protein classification predicting sequence
PGAVNA

SEQ ID NO: 51789 - protein, 8 aa, Artificial sequence
  Protein classification predicting sequence
DAETGKIL

SEQ ID NO: 51790 - protein, 7 aa, Artificial sequence
  Protein classification predicting sequence
NSQKVSS

SEQ ID NO: 51791 - protein, 5 aa, Artificial sequence
  Protein classification predicting sequence
CVCRD

SEQ ID NO: 51792 - protein, 5 aa, Artificial sequence
  Protein classification predicting sequence
WPDGA

SEQ ID NO: 51793 - protein, 6 aa, Artificial sequence
  Protein classification predicting sequence
QRKHFP

SEQ ID NO: 51794 - protein, 6 aa, Artificial sequence
  Protein classification predicting sequence
VFEASN

SEQ ID NO: 51795 - protein, 6 aa, Artificial sequence
  Protein classification predicting sequence
TADFNA

SEQ ID NO: 51796 - protein, 6 aa, Artificial sequence
  Protein classification predicting sequence
FIKICS

SEQ ID NO: 51797 - protein, 7 aa, Artificial sequence
  Protein classification predicting sequence
DFQYLKQ

SEQ ID NO: 51798 - protein, 6 aa, Artificial sequence
  Protein classification predicting sequence
TNNIAE

SEQ ID NO: 51799 - protein, 5 aa, Artificial sequence
  Protein classification predicting sequence
EPVDN

SEQ ID NO: 51800 - protein, 6 aa, Artificial sequence
  Protein classification predicting sequence
IFNIAD

SEQ ID NO: 51801 - protein, 6 aa, Artificial sequence
  Protein classification predicting sequence
LKLNYP

SEQ ID NO: 51802 - protein, 6 aa, Artificial sequence
  Protein classification predicting sequence
VYLTFD

SEQ ID NO: 51803 - protein, 6 aa, Artificial sequence
  Protein classification predicting sequence
GSTAGG

SEQ ID NO: 51804 - protein, 6 aa, Artificial sequence
  Protein classification predicting sequence
ISAIQN

SEQ ID NO: 51805 - protein, 6 aa, Artificial sequence
  Protein classification predicting sequence
AHGGVS

SEQ ID NO: 51806 - protein, 7 aa, Artificial sequence
  Protein classification predicting sequence
RIVSRFG

SEQ ID NO: 51807 - protein, 6 aa, Artificial sequence
  Protein classification predicting sequence
MDVINM

SEQ ID NO: 51808 - protein, 6 aa, Artificial sequence
  Protein classification predicting sequence
DANIPI

SEQ ID NO: 51809 - protein, 5 aa, Artificial sequence
  Protein classification predicting sequence
YSGSF

SEQ ID NO: 51810 - protein, 7 aa, Artificial sequence
  Protein classification predicting sequence
FDLDGTL

SEQ ID NO: 51811 - protein, 5 aa, Artificial sequence
  Protein classification predicting sequence
GFNWA

SEQ ID NO: 51812 - protein, 6 aa, Artificial sequence
  Protein classification predicting sequence
LRSINR

SEQ ID NO: 51813 - protein, 6 aa, Artificial sequence
  Protein classification predicting sequence
AAICFS

SEQ ID NO: 51814 - protein, 5 aa, Artificial sequence
  Protein classification predicting sequence
LWQFG

SEQ ID NO: 51815 - protein, 5 aa, Artificial sequence
  Protein classification predicting sequence
IQCAN

SEQ ID NO: 51816 - protein, 5 aa, Artificial sequence
  Protein classification predicting sequence
LYQFK

SEQ ID NO: 51817 - protein, 5 aa, Artificial sequence
  Protein classification predicting sequence
YSYSF

SEQ ID NO: 51818 - protein, 5 aa, Artificial sequence
  Protein classification predicting sequence
GMNAW

SEQ ID NO: 51819 - protein, 6 aa, Artificial sequence
  Protein classification predicting sequence
GAILLV

SEQ ID NO: 51820 - protein, 6 aa, Artificial sequence
  Protein classification predicting sequence
STTLRV

SEQ ID NO: 51821 - protein, 6 aa, Artificial sequence
  Protein classification predicting sequence
PWLPKE

SEQ ID NO: 51822 - protein, 7 aa, Artificial sequence
  Protein classification predicting sequence
ELASRGF

SEQ ID NO: 51823 - protein, 6 aa, Artificial sequence
  Protein classification predicting sequence
SLVDGI

SEQ ID NO: 51824 - protein, 5 aa, Artificial sequence
  Protein classification predicting sequence
HFDNE

SEQ ID NO: 51825 - protein, 6 aa, Artificial sequence
  Protein classification predicting sequence
WGTAWG

SEQ ID NO: 51826 - protein, 6 aa, Artificial sequence
  Protein classification predicting sequence
DDHSDT

SEQ ID NO: 51827 - protein, 6 aa, Artificial sequence
  Protein classification predicting sequence
DWQRRT

SEQ ID NO: 51828 - protein, 6 aa, Artificial sequence
  Protein classification predicting sequence
IHAIAN

SEQ ID NO: 51829 - protein, 7 aa, Artificial sequence
  Protein classification predicting sequence
DVTFKNI

SEQ ID NO: 51830 - protein, 6 aa, Artificial sequence
  Protein classification predicting sequence
GAEVRW

SEQ ID NO: 51831 - protein, 7 aa, Artificial sequence
  Protein classification predicting sequence
IVKKLQE

SEQ ID NO: 51832 - protein, 5 aa, Artificial sequence
  Protein classification predicting sequence
GPAAY

SEQ ID NO: 51833 - protein, 6 aa, Artificial sequence
  Protein classification predicting sequence
LSVYYN

SEQ ID NO: 51834 - protein, 7 aa, Artificial sequence
  Protein classification predicting sequence
DMQVLVI

SEQ ID NO: 51835 - protein, 6 aa, Artificial sequence
  Protein classification predicting sequence
LYDLDA

SEQ ID NO: 51836 - protein, 8 aa, Artificial sequence
  Protein classification predicting sequence
EQEASILV

SEQ ID NO: 51837 - protein, 6 aa, Artificial sequence
  Protein classification predicting sequence
ILKTRE

SEQ ID NO: 51838 - protein, 5 aa, Artificial sequence
  Protein classification predicting sequence
EFRFS

SEQ ID NO: 51839 - protein, 5 aa, Artificial sequence
  Protein classification predicting sequence
CNIFS

SEQ ID NO: 51840 - protein, 6 aa, Artificial sequence
  Protein classification predicting sequence
VRNCEL

SEQ ID NO: 51841 - protein, 6 aa, Artificial sequence
  Protein classification predicting sequence
FLESEN

SEQ ID NO: 51842 - protein, 6 aa, Artificial sequence
  Protein classification predicting sequence
GGIQSN

SEQ ID NO: 51843 - protein, 7 aa, Artificial sequence
  Protein classification predicting sequence
KTIACAK

SEQ ID NO: 51844 - protein, 6 aa, Artificial sequence
  Protein classification predicting sequence
RKGAVD

SEQ ID NO: 51845 - protein, 8 aa, Artificial sequence
  Protein classification predicting sequence
DFVRGIIN

SEQ ID NO: 51846 - protein, 7 aa, Artificial sequence
  Protein classification predicting sequence
SVVLAGD

SEQ ID NO: 51847 - protein, 6 aa, Artificial sequence
  Protein classification predicting sequence
FLLAVP

SEQ ID NO: 51848 - protein, 5 aa, Artificial sequence
  Protein classification predicting sequence
FYTYD

SEQ ID NO: 51849 - protein, 5 aa, Artificial sequence
  Protein classification predicting sequence
YWQIG

SEQ ID NO: 51850 - protein, 6 aa, Artificial sequence
  Protein classification predicting sequence
NDTVHD

SEQ ID NO: 51851 - protein, 6 aa, Artificial sequence
  Protein classification predicting sequence
EHHLLP

SEQ ID NO: 51852 - protein, 6 aa, Artificial sequence
  Protein classification predicting sequence
DVPTIG

SEQ ID NO: 51853 - protein, 6 aa, Artificial sequence
  Protein classification predicting sequence
SFMGLP

SEQ ID NO: 51854 - protein, 5 aa, Artificial sequence
  Protein classification predicting sequence
TRDPF

SEQ ID NO: 51855 - protein, 6 aa, Artificial sequence
  Protein classification predicting sequence
LDFVPN

SEQ ID NO: 51856 - protein, 4 aa, Artificial sequence
  Protein classification predicting sequence
WWCN

SEQ ID NO: 51857 - protein, 6 aa, Artificial sequence
  Protein classification predicting sequence
LNLQNR

SEQ ID NO: 51858 - protein, 6 aa, Artificial sequence
  Protein classification predicting sequence
NQSEQT

SEQ ID NO: 51859 - protein, 5 aa, Artificial sequence
  Protein classification predicting sequence
DNGKH

SEQ ID NO: 51860 - protein, 7 aa, Artificial sequence
  Protein classification predicting sequence
LAATITP

SEQ ID NO: 51861 - protein, 6 aa, Artificial sequence
  Protein classification predicting sequence
VRIKTV

SEQ ID NO: 51862 - protein, 7 aa, Artificial sequence
  Protein classification predicting sequence
AATVGAA

SEQ ID NO: 51863 - protein, 7 aa, Artificial sequence
  Protein classification predicting sequence
GDSAGAH

SEQ ID NO: 51864 - protein, 7 aa, Artificial sequence
  Protein classification predicting sequence
ISFKNIR

SEQ ID NO: 51865 - protein, 6 aa, Artificial sequence
  Protein classification predicting sequence
YDNIAF

SEQ ID NO: 51866 - protein, 6 aa, Artificial sequence
  Protein classification predicting sequence
GQALTS

SEQ ID NO: 51867 - protein, 5 aa, Artificial sequence
  Protein classification predicting sequence
FSIQS

SEQ ID NO: 51868 - protein, 8 aa, Artificial sequence
  Protein classification predicting sequence
KALPYAVA

SEQ ID NO: 51869 - protein, 7 aa, Artificial sequence
  Protein classification predicting sequence
LALRRAR

SEQ ID NO: 51870 - protein, 6 aa, Artificial sequence
  Protein classification predicting sequence
LLWSDP

SEQ ID NO: 51871 - protein, 7 aa, Artificial sequence
  Protein classification predicting sequence
DSLAEYL

SEQ ID NO: 51872 - protein, 6 aa, Artificial sequence
  Protein classification predicting sequence
IQVEAT

SEQ ID NO: 51873 - protein, 7 aa, Artificial sequence
  Protein classification predicting sequence
RALAVEP

SEQ ID NO: 51874 - protein, 7 aa, Artificial sequence
  Protein classification predicting sequence
LLVGALT

SEQ ID NO: 51875 - protein, 6 aa, Artificial sequence
  Protein classification predicting sequence
DGACVN

SEQ ID NO: 51876 - protein, 5 aa, Artificial sequence
  Protein classification predicting sequence
MFDEN

SEQ ID NO: 51877 - protein, 6 aa, Artificial sequence
  Protein classification predicting sequence
LSLTFA

SEQ ID NO: 51878 - protein, 6 aa, Artificial sequence
  Protein classification predicting sequence
NLVPRL

SEQ ID NO: 51879 - protein, 6 aa, Artificial sequence
  Protein classification predicting sequence
RGKPEE

SEQ ID NO: 51880 - protein, 6 aa, Artificial sequence
  Protein classification predicting sequence
NDIAVI

SEQ ID NO: 51881 - protein, 6 aa, Artificial sequence
  Protein classification predicting sequence
QSLSKY

SEQ ID NO: 51882 - protein, 6 aa, Artificial sequence
  Protein classification predicting sequence
THPERV

SEQ ID NO: 51883 - protein, 6 aa, Artificial sequence
  Protein classification predicting sequence
KYRIVL

SEQ ID NO: 51884 - protein, 7 aa, Artificial sequence
  Protein classification predicting sequence
EGATSFL

SEQ ID NO: 51885 - protein, 6 aa, Artificial sequence
  Protein classification predicting sequence
GVIRNG

SEQ ID NO: 51886 - protein, 5 aa, Artificial sequence
  Protein classification predicting sequence
YTREA

SEQ ID NO: 51887 - protein, 6 aa, Artificial sequence
  Protein classification predicting sequence
NKVTSV

SEQ ID NO: 51888 - protein, 6 aa, Artificial sequence
  Protein classification predicting sequence
TLHGLQ

SEQ ID NO: 51889 - protein, 7 aa, Artificial sequence
  Protein classification predicting sequence
KKFRHFQ

SEQ ID NO: 51890 - protein, 5 aa, Artificial sequence
  Protein classification predicting sequence
THDQE

SEQ ID NO: 51891 - protein, 6 aa, Artificial sequence
  Protein classification predicting sequence
VVLPMW

SEQ ID NO: 51892 - protein, 6 aa, Artificial sequence
  Protein classification predicting sequence
PGVPYT

SEQ ID NO: 51893 - protein, 6 aa, Artificial sequence
  Protein classification predicting sequence
DKFVPQ

SEQ ID NO: 51894 - protein, 7 aa, Artificial sequence
  Protein classification predicting sequence
GGDITLG

SEQ ID NO: 51895 - protein, 7 aa, Artificial sequence
  Protein classification predicting sequence
GEVTELP

SEQ ID NO: 51896 - protein, 6 aa, Artificial sequence
  Protein classification predicting sequence
TQFHSL

SEQ ID NO: 51897 - protein, 7 aa, Artificial sequence
  Protein classification predicting sequence
IRLDNGM

SEQ ID NO: 51898 - protein, 7 aa, Artificial sequence
  Protein classification predicting sequence
GIGKGRT

SEQ ID NO: 51899 - protein, 7 aa, Artificial sequence
  Protein classification predicting sequence
ILNSRGK

SEQ ID NO: 51900 - protein, 7 aa, Artificial sequence
  Protein classification predicting sequence
GVDDAVA

SEQ ID NO: 51901 - protein, 6 aa, Artificial sequence
  Protein classification predicting sequence
TVGGPA

SEQ ID NO: 51902 - protein, 6 aa, Artificial sequence
  Protein classification predicting sequence
GENYRG

SEQ ID NO: 51903 - protein, 5 aa, Artificial sequence
  Protein classification predicting sequence
CMYGS

SEQ ID NO: 51904 - protein, 7 aa, Artificial sequence
  Protein classification predicting sequence
DTRIKAV

SEQ ID NO: 51905 - protein, 6 aa, Artificial sequence
  Protein classification predicting sequence
KGAPEQ

SEQ ID NO: 51906 - protein, 6 aa, Artificial sequence
  Protein classification predicting sequence
KVLRDG

SEQ ID NO: 51907 - protein, 7 aa, Artificial sequence
  Protein classification predicting sequence
TSEEVVQ

SEQ ID NO: 51908 - protein, 7 aa, Artificial sequence
  Protein classification predicting sequence
MSIILGI

SEQ ID NO: 51909 - protein, 7 aa, Artificial sequence
  Protein classification predicting sequence
EEAEEDD

SEQ ID NO: 51910 - protein, 7 aa, Artificial sequence
  Protein classification predicting sequence
TMAGGAA

SEQ ID NO: 51911 - protein, 6 aa, Artificial sequence
  Protein classification predicting sequence
MKDIGI

SEQ ID NO: 51912 - protein, 7 aa, Artificial sequence
  Protein classification predicting sequence
SATEAQA

SEQ ID NO: 51913 - protein, 7 aa, Artificial sequence
  Protein classification predicting sequence
EALKLVK

SEQ ID NO: 51914 - protein, 6 aa, Artificial sequence
  Protein classification predicting sequence
ISSSAH

SEQ ID NO: 51915 - protein, 6 aa, Artificial sequence
  Protein classification predicting sequence
SDDGIP

SEQ ID NO: 51916 - protein, 6 aa, Artificial sequence
  Protein classification predicting sequence
SFIPFA

SEQ ID NO: 51917 - protein, 6 aa, Artificial sequence
  Protein classification predicting sequence
GLDLRA

SEQ ID NO: 51918 - protein, 6 aa, Artificial sequence
  Protein classification predicting sequence
GNSLAG

SEQ ID NO: 51919 - protein, 6 aa, Artificial sequence
  Protein classification predicting sequence
DLLRLF

SEQ ID NO: 51920 - protein, 6 aa, Artificial sequence
  Protein classification predicting sequence
RPFSET

SEQ ID NO: 51921 - protein, 6 aa, Artificial sequence
  Protein classification predicting sequence
NILADE

SEQ ID NO: 51922 - protein, 5 aa, Artificial sequence
  Protein classification predicting sequence
DGHAG

SEQ ID NO: 51923 - protein, 7 aa, Artificial sequence
  Protein classification predicting sequence
GSTAVGV

SEQ ID NO: 51924 - protein, 6 aa, Artificial sequence
  Protein classification predicting sequence
FSTQDH

SEQ ID NO: 51925 - protein, 5 aa, Artificial sequence
  Protein classification predicting sequence
CEVQQ

SEQ ID NO: 51926 - protein, 5 aa, Artificial sequence
  Protein classification predicting sequence
FRIPR

SEQ ID NO: 51927 - protein, 5 aa, Artificial sequence
  Protein classification predicting sequence
YHRQE

SEQ ID NO: 51928 - protein, 6 aa, Artificial sequence
  Protein classification predicting sequence
GNEVTS

SEQ ID NO: 51929 - protein, 6 aa, Artificial sequence
  Protein classification predicting sequence
GYTLRG

SEQ ID NO: 51930 - protein, 7 aa, Artificial sequence
  Protein classification predicting sequence
DSAIEKA

SEQ ID NO: 51931 - protein, 7 aa, Artificial sequence
  Protein classification predicting sequence
IAHQLIK

SEQ ID NO: 51932 - protein, 6 aa, Artificial sequence
  Protein classification predicting sequence
EYPLGR

SEQ ID NO: 51933 - protein, 6 aa, Artificial sequence
  Protein classification predicting sequence
LETPLR

SEQ ID NO: 51934 - protein, 7 aa, Artificial sequence
  Protein classification predicting sequence
LGSVLEE

SEQ ID NO: 51935 - protein, 7 aa, Artificial sequence
  Protein classification predicting sequence
TKERNTQ

SEQ ID NO: 51936 - protein, 7 aa, Artificial sequence
  Protein classification predicting sequence
SEAAISS

SEQ ID NO: 51937 - protein, 6 aa, Artificial sequence
  Protein classification predicting sequence
GCRDHS

SEQ ID NO: 51938 - protein, 7 aa, Artificial sequence
  Protein classification predicting sequence
QKHLDLK

SEQ ID NO: 51939 - protein, 6 aa, Artificial sequence
  Protein classification predicting sequence
TSNYMD

SEQ ID NO: 51940 - protein, 5 aa, Artificial sequence
  Protein classification predicting sequence
TNYLF

SEQ ID NO: 51941 - protein, 7 aa, Artificial sequence
  Protein classification predicting sequence
SSYNTKA

SEQ ID NO: 51942 - protein, 6 aa, Artificial sequence
  Protein classification predicting sequence
DPLDST

SEQ ID NO: 51943 - protein, 5 aa, Artificial sequence
  Protein classification predicting sequence
MMKRR

SEQ ID NO: 51944 - protein, 5 aa, Artificial sequence
  Protein classification predicting sequence
GRPWK

SEQ ID NO: 51945 - protein, 6 aa, Artificial sequence
  Protein classification predicting sequence
NAPFHT

SEQ ID NO: 51946 - protein, 6 aa, Artificial sequence
  Protein classification predicting sequence
RDGKTV

SEQ ID NO: 51947 - protein, 6 aa, Artificial sequence
  Protein classification predicting sequence
YQVEYA

SEQ ID NO: 51948 - protein, 6 aa, Artificial sequence
  Protein classification predicting sequence
DLERTV

SEQ ID NO: 51949 - protein, 6 aa, Artificial sequence
  Protein classification predicting sequence
LNPEEI

SEQ ID NO: 51950 - protein, 6 aa, Artificial sequence
  Protein classification predicting sequence
LIVGFD

SEQ ID NO: 51951 - protein, 5 aa, Artificial sequence
  Protein classification predicting sequence
ECQRF

SEQ ID NO: 51952 - protein, 5 aa, Artificial sequence
  Protein classification predicting sequence
INSRY

SEQ ID NO: 51953 - protein, 7 aa, Artificial sequence
  Protein classification predicting sequence
LLAGFDV

SEQ ID NO: 51954 - protein, 6 aa, Artificial sequence
  Protein classification predicting sequence
DKTRQL

SEQ ID NO: 51955 - protein, 7 aa, Artificial sequence
  Protein classification predicting sequence
VGLSGLA

SEQ ID NO: 51956 - protein, 6 aa, Artificial sequence
  Protein classification predicting sequence
QTFAQK

SEQ ID NO: 51957 - protein, 6 aa, Artificial sequence
  Protein classification predicting sequence
FDGGVV

SEQ ID NO: 51958 - protein, 7 aa, Artificial sequence
  Protein classification predicting sequence
TAEQVME

SEQ ID NO: 51959 - protein, 6 aa, Artificial sequence
  Protein classification predicting sequence
IHFISP

SEQ ID NO: 51960 - protein, 6 aa, Artificial sequence
  Protein classification predicting sequence
AGRNAV

SEQ ID NO: 51961 - protein, 6 aa, Artificial sequence
  Protein classification predicting sequence
ITTLMS

SEQ ID NO: 51962 - protein, 6 aa, Artificial sequence
  Protein classification predicting sequence
TTPTTP

SEQ ID NO: 51963 - protein, 5 aa, Artificial sequence
  Protein classification predicting sequence
SIYDN

SEQ ID NO: 51964 - protein, 5 aa, Artificial sequence
  Protein classification predicting sequence
NPNQK

SEQ ID NO: 51965 - protein, 9 aa, Artificial sequence
  Protein classification predicting sequence
LDEAVERSL

SEQ ID NO: 51966 - protein, 6 aa, Artificial sequence
  Protein classification predicting sequence
GLMHEL

SEQ ID NO: 51967 - protein, 6 aa, Artificial sequence
  Protein classification predicting sequence
NSGIIN

SEQ ID NO: 51968 - protein, 6 aa, Artificial sequence
  Protein classification predicting sequence
VEEGPT

SEQ ID NO: 51969 - protein, 7 aa, Artificial sequence
  Protein classification predicting sequence
EIDSICS

SEQ ID NO: 51970 - protein, 6 aa, Artificial sequence
  Protein classification predicting sequence
PDHYRY

SEQ ID NO: 51971 - protein, 6 aa, Artificial sequence
  Protein classification predicting sequence
PGGEYK

SEQ ID NO: 51972 - protein, 6 aa, Artificial sequence
  Protein classification predicting sequence
QARQNQ

SEQ ID NO: 51973 - protein, 6 aa, Artificial sequence
  Protein classification predicting sequence
ATSESE

SEQ ID NO: 51974 - protein, 5 aa, Artificial sequence
  Protein classification predicting sequence
DHYLE

SEQ ID NO: 51975 - protein, 7 aa, Artificial sequence
  Protein classification predicting sequence
LIVGLGN

SEQ ID NO: 51976 - protein, 6 aa, Artificial sequence
  Protein classification predicting sequence
LIIYDD

SEQ ID NO: 51977 - protein, 6 aa, Artificial sequence
  Protein classification predicting sequence
LVIYDD

SEQ ID NO: 51978 - protein, 5 aa, Artificial sequence
  Protein classification predicting sequence
GTQEF

SEQ ID NO: 51979 - protein, 6 aa, Artificial sequence
  Protein classification predicting sequence
QILVIY

SEQ ID NO: 51980 - protein, 6 aa, Artificial sequence
  Protein classification predicting sequence
EPKFFG

SEQ ID NO: 51981 - protein, 6 aa, Artificial sequence
  Protein classification predicting sequence
DNPRWL

SEQ ID NO: 51982 - protein, 5 aa, Artificial sequence
  Protein classification predicting sequence
YDMCG

SEQ ID NO: 51983 - protein, 6 aa, Artificial sequence
  Protein classification predicting sequence
DMNDII

SEQ ID NO: 51984 - protein, 6 aa, Artificial sequence
  Protein classification predicting sequence
TIRNLV

SEQ ID NO: 51985 - protein, 6 aa, Artificial sequence
  Protein classification predicting sequence
LAEDFL

SEQ ID NO: 51986 - protein, 6 aa, Artificial sequence
  Protein classification predicting sequence
LSVTVQ

SEQ ID NO: 51987 - protein, 7 aa, Artificial sequence
  Protein classification predicting sequence
EVSALLG

SEQ ID NO: 51988 - protein, 7 aa, Artificial sequence
  Protein classification predicting sequence
APFGIVG

SEQ ID NO: 51989 - protein, 6 aa, Artificial sequence
  Protein classification predicting sequence
LYFNDG

SEQ ID NO: 51990 - protein, 6 aa, Artificial sequence
  Protein classification predicting sequence
LHHISM

SEQ ID NO: 51991 - protein, 7 aa, Artificial sequence
  Protein classification predicting sequence
NRDEVLD

SEQ ID NO: 51992 - protein, 7 aa, Artificial sequence
  Protein classification predicting sequence
LSEEEID

SEQ ID NO: 51993 - protein, 7 aa, Artificial sequence
  Protein classification predicting sequence
MSLSTIR

SEQ ID NO: 51994 - protein, 5 aa, Artificial sequence
  Protein classification predicting sequence
HEGPM

SEQ ID NO: 51995 - protein, 6 aa, Artificial sequence
  Protein classification predicting sequence
NTVPYI

SEQ ID NO: 51996 - protein, 6 aa, Artificial sequence
  Protein classification predicting sequence
IPLALK

SEQ ID NO: 51997 - protein, 7 aa, Artificial sequence
  Protein classification predicting sequence
RDCITKV

SEQ ID NO: 51998 - protein, 6 aa, Artificial sequence
  Protein classification predicting sequence
FVLSAN

SEQ ID NO: 51999 - protein, 6 aa, Artificial sequence
  Protein classification predicting sequence
DGAILP

SEQ ID NO: 52000 - protein, 5 aa, Artificial sequence
  Protein classification predicting sequence
TPQHL

SEQ ID NO: 52001 - protein, 6 aa, Artificial sequence
  Protein classification predicting sequence
SIGTGY

SEQ ID NO: 52002 - protein, 7 aa, Artificial sequence
  Protein classification predicting sequence
LLLSLYL

SEQ ID NO: 52003 - protein, 6 aa, Artificial sequence
  Protein classification predicting sequence
TIQTAV

SEQ ID NO: 52004 - protein, 6 aa, Artificial sequence
  Protein classification predicting sequence
YGENHA

SEQ ID NO: 52005 - protein, 5 aa, Artificial sequence
  Protein classification predicting sequence
LLMHL

SEQ ID NO: 52006 - protein, 7 aa, Artificial sequence
  Protein classification predicting sequence
YFFSGSS

SEQ ID NO: 52007 - protein, 6 aa, Artificial sequence
  Protein classification predicting sequence
RFKYIE

SEQ ID NO: 52008 - protein, 7 aa, Artificial sequence
  Protein classification predicting sequence
AKYVFKD

SEQ ID NO: 52009 - protein, 6 aa, Artificial sequence
  Protein classification predicting sequence
RSRYPH

SEQ ID NO: 52010 - protein, 6 aa, Artificial sequence
  Protein classification predicting sequence
KLGDII

SEQ ID NO: 52011 - protein, 6 aa, Artificial sequence
  Protein classification predicting sequence
TGYITE

SEQ ID NO: 52012 - protein, 7 aa, Artificial sequence
  Protein classification predicting sequence
AEKAAAE

SEQ ID NO: 52013 - protein, 5 aa, Artificial sequence
  Protein classification predicting sequence
EHYET

SEQ ID NO: 52014 - protein, 5 aa, Artificial sequence
  Protein classification predicting sequence
KHHTK

SEQ ID NO: 52015 - protein, 7 aa, Artificial sequence
  Protein classification predicting sequence
ITEEGAE

SEQ ID NO: 52016 - protein, 6 aa, Artificial sequence
  Protein classification predicting sequence
RKFYTE

SEQ ID NO: 52017 - protein, 6 aa, Artificial sequence
  Protein classification predicting sequence
LNYYFN

SEQ ID NO: 52018 - protein, 5 aa, Artificial sequence
  Protein classification predicting sequence
CRTFF

SEQ ID NO: 52019 - protein, 6 aa, Artificial sequence
  Protein classification predicting sequence
LQQRLG

SEQ ID NO: 52020 - protein, 6 aa, Artificial sequence
  Protein classification predicting sequence
KPELLQ

SEQ ID NO: 52021 - protein, 6 aa, Artificial sequence
  Protein classification predicting sequence
FWVDVT

SEQ ID NO: 52022 - protein, 6 aa, Artificial sequence
  Protein classification predicting sequence
PLPTYA

SEQ ID NO: 52023 - protein, 6 aa, Artificial sequence
  Protein classification predicting sequence
EHRKSF

SEQ ID NO: 52024 - protein, 7 aa, Artificial sequence
  Protein classification predicting sequence
KGLKLIK

SEQ ID NO: 52025 - protein, 6 aa, Artificial sequence
  Protein classification predicting sequence
IQRFLS

SEQ ID NO: 52026 - protein, 6 aa, Artificial sequence
  Protein classification predicting sequence
NVAKAH

SEQ ID NO: 52027 - protein, 5 aa, Artificial sequence
  Protein classification predicting sequence
HRKSF

SEQ ID NO: 52028 - protein, 6 aa, Artificial sequence
  Protein classification predicting sequence
ATKLAM

SEQ ID NO: 52029 - protein, 6 aa, Artificial sequence
  Protein classification predicting sequence
AAVILP

SEQ ID NO: 52030 - protein, 6 aa, Artificial sequence
  Protein classification predicting sequence
FNLVED

SEQ ID NO: 52031 - protein, 6 aa, Artificial sequence
  Protein classification predicting sequence
VTAIIG

SEQ ID NO: 52032 - protein, 6 aa, Artificial sequence
  Protein classification predicting sequence
LPPGEY

SEQ ID NO: 52033 - protein, 6 aa, Artificial sequence
  Protein classification predicting sequence
GLDDSK

SEQ ID NO: 52034 - protein, 6 aa, Artificial sequence
  Protein classification predicting sequence
VQIARD

SEQ ID NO: 52035 - protein, 6 aa, Artificial sequence
  Protein classification predicting sequence
YNSGKL

SEQ ID NO: 52036 - protein, 5 aa, Artificial sequence
  Protein classification predicting sequence
YGKFH

SEQ ID NO: 52037 - protein, 5 aa, Artificial sequence
  Protein classification predicting sequence
LKEPC

SEQ ID NO: 52038 - protein, 6 aa, Artificial sequence
  Protein classification predicting sequence
QGITSW

SEQ ID NO: 52039 - protein, 7 aa, Artificial sequence
  Protein classification predicting sequence
GITEWLP

SEQ ID NO: 52040 - protein, 6 aa, Artificial sequence
  Protein classification predicting sequence
GWKKNG

SEQ ID NO: 52041 - protein, 6 aa, Artificial sequence
  Protein classification predicting sequence
KKPVKN

SEQ ID NO: 52042 - protein, 6 aa, Artificial sequence
  Protein classification predicting sequence
IKKEIS

SEQ ID NO: 52043 - protein, 8 aa, Artificial sequence
  Protein classification predicting sequence
AVRELLIA

SEQ ID NO: 52044 - protein, 6 aa, Artificial sequence
  Protein classification predicting sequence
YYEDGA

SEQ ID NO: 52045 - protein, 6 aa, Artificial sequence
  Protein classification predicting sequence
MDGFEV

SEQ ID NO: 52046 - protein, 6 aa, Artificial sequence
  Protein classification predicting sequence
DSEVKE

SEQ ID NO: 52047 - protein, 6 aa, Artificial sequence
  Protein classification predicting sequence
RNRVKR

SEQ ID NO: 52048 - protein, 6 aa, Artificial sequence
  Protein classification predicting sequence
IYSRLL

SEQ ID NO: 52049 - protein, 6 aa, Artificial sequence
  Protein classification predicting sequence
GISVSR

SEQ ID NO: 52050 - protein, 6 aa, Artificial sequence
  Protein classification predicting sequence
QHRLVS

SEQ ID NO: 52051 - protein, 6 aa, Artificial sequence
  Protein classification predicting sequence
VYTLPK

SEQ ID NO: 52052 - protein, 6 aa, Artificial sequence
  Protein classification predicting sequence
LLEVLD

SEQ ID NO: 52053 - protein, 5 aa, Artificial sequence
  Protein classification predicting sequence
RCFNR

SEQ ID NO: 52054 - protein, 8 aa, Artificial sequence
  Protein classification predicting sequence
AGYDLYSA

SEQ ID NO: 52055 - protein, 6 aa, Artificial sequence
  Protein classification predicting sequence
TLSDVA

SEQ ID NO: 52056 - protein, 6 aa, Artificial sequence
  Protein classification predicting sequence
EDDPRN

SEQ ID NO: 52057 - protein, 6 aa, Artificial sequence
  Protein classification predicting sequence
TPQMAA

SEQ ID NO: 52058 - protein, 6 aa, Artificial sequence
  Protein classification predicting sequence
KQLVIG

SEQ ID NO: 52059 - protein, 6 aa, Artificial sequence
  Protein classification predicting sequence
TRDGMR

SEQ ID NO: 52060 - protein, 6 aa, Artificial sequence
  Protein classification predicting sequence
LGLRQS

SEQ ID NO: 52061 - protein, 7 aa, Artificial sequence
  Protein classification predicting sequence
SPHLPPS

SEQ ID NO: 52062 - protein, 6 aa, Artificial sequence
  Protein classification predicting sequence
CQAIVD

SEQ ID NO: 52063 - protein, 7 aa, Artificial sequence
  Protein classification predicting sequence
AAEVARR

SEQ ID NO: 52064 - protein, 5 aa, Artificial sequence
  Protein classification predicting sequence
KSMHG

SEQ ID NO: 52065 - protein, 6 aa, Artificial sequence
  Protein classification predicting sequence
IALNLE

SEQ ID NO: 52066 - protein, 5 aa, Artificial sequence
  Protein classification predicting sequence
TGPCE

SEQ ID NO: 52067 - protein, 6 aa, Artificial sequence
  Protein classification predicting sequence
FIAIFA

SEQ ID NO: 52068 - protein, 6 aa, Artificial sequence
  Protein classification predicting sequence
SVTKSK

SEQ ID NO: 52069 - protein, 5 aa, Artificial sequence
  Protein classification predicting sequence
TREDH

SEQ ID NO: 52070 - protein, 6 aa, Artificial sequence
  Protein classification predicting sequence
VTEKLP

SEQ ID NO: 52071 - protein, 6 aa, Artificial sequence
  Protein classification predicting sequence
SPLECR

SEQ ID NO: 52072 - protein, 7 aa, Artificial sequence
  Protein classification predicting sequence
SLVLLNG

SEQ ID NO: 52073 - protein, 7 aa, Artificial sequence
  Protein classification predicting sequence
GTVTSDG

SEQ ID NO: 52074 - protein, 6 aa, Artificial sequence
  Protein classification predicting sequence
EMDLAS

SEQ ID NO: 52075 - protein, 6 aa, Artificial sequence
  Protein classification predicting sequence
QYQGKL

SEQ ID NO: 52076 - protein, 6 aa, Artificial sequence
  Protein classification predicting sequence
RLKQIY

SEQ ID NO: 52077 - protein, 6 aa, Artificial sequence
  Protein classification predicting sequence
ADKSQV

SEQ ID NO: 52078 - protein, 6 aa, Artificial sequence
  Protein classification predicting sequence
YIVKHH

SEQ ID NO: 52079 - protein, 6 aa, Artificial sequence
  Protein classification predicting sequence
VGKGSA

SEQ ID NO: 52080 - protein, 5 aa, Artificial sequence
  Protein classification predicting sequence
EGPYK

SEQ ID NO: 52081 - protein, 5 aa, Artificial sequence
  Protein classification predicting sequence
LDWGP

SEQ ID NO: 52082 - protein, 6 aa, Artificial sequence
  Protein classification predicting sequence
VYRLPK

SEQ ID NO: 52083 - protein, 7 aa, Artificial sequence
  Protein classification predicting sequence
LPKILDE

SEQ ID NO: 52084 - protein, 6 aa, Artificial sequence
  Protein classification predicting sequence
LDEKVA

SEQ ID NO: 52085 - protein, 6 aa, Artificial sequence
  Protein classification predicting sequence
GSSKYP

SEQ ID NO: 52086 - protein, 6 aa, Artificial sequence
  Protein classification predicting sequence
EKMNVF

SEQ ID NO: 52087 - protein, 6 aa, Artificial sequence
  Protein classification predicting sequence
FRDPKV

SEQ ID NO: 52088 - protein, 6 aa, Artificial sequence
  Protein classification predicting sequence
NIYQSG

SEQ ID NO: 52089 - protein, 6 aa, Artificial sequence
  Protein classification predicting sequence
YAAQRF

SEQ ID NO: 52090 - protein, 6 aa, Artificial sequence
  Protein classification predicting sequence
NPLSWV

SEQ ID NO: 52091 - protein, 7 aa, Artificial sequence
  Protein classification predicting sequence
LIKEDGK

SEQ ID NO: 52092 - protein, 6 aa, Artificial sequence
  Protein classification predicting sequence
ATSGRA

SEQ ID NO: 52093 - protein, 6 aa, Artificial sequence
  Protein classification predicting sequence
REESVM

SEQ ID NO: 52094 - protein, 7 aa, Artificial sequence
  Protein classification predicting sequence
PGALSNS

SEQ ID NO: 52095 - protein, 6 aa, Artificial sequence
  Protein classification predicting sequence
AHEADP

SEQ ID NO: 52096 - protein, 7 aa, Artificial sequence
  Protein classification predicting sequence
VMAATLA

SEQ ID NO: 52097 - protein, 6 aa, Artificial sequence
  Protein classification predicting sequence
PHLPPS

SEQ ID NO: 52098 - protein, 6 aa, Artificial sequence
  Protein classification predicting sequence
IVTEID

SEQ ID NO: 52099 - protein, 6 aa, Artificial sequence
  Protein classification predicting sequence
NWSGYS

SEQ ID NO: 52100 - protein, 5 aa, Artificial sequence
  Protein classification predicting sequence
NDDGI

SEQ ID NO: 52101 - protein, 8 aa, Artificial sequence
  Protein classification predicting sequence
GISVTRLG

SEQ ID NO: 52102 - protein, 7 aa, Artificial sequence
  Protein classification predicting sequence
GIIVLAE

SEQ ID NO: 52103 - protein, 5 aa, Artificial sequence
  Protein classification predicting sequence
YVFQE

SEQ ID NO: 52104 - protein, 6 aa, Artificial sequence
  Protein classification predicting sequence
ELIRNI

SEQ ID NO: 52105 - protein, 6 aa, Artificial sequence
  Protein classification predicting sequence
KPLEQR

SEQ ID NO: 52106 - protein, 5 aa, Artificial sequence
  Protein classification predicting sequence
RWRQI

SEQ ID NO: 52107 - protein, 5 aa, Artificial sequence
  Protein classification predicting sequence
EYRNW

SEQ ID NO: 52108 - protein, 6 aa, Artificial sequence
  Protein classification predicting sequence
FQLSTS

SEQ ID NO: 52109 - protein, 6 aa, Artificial sequence
  Protein classification predicting sequence
ATASFI

SEQ ID NO: 52110 - protein, 7 aa, Artificial sequence
  Protein classification predicting sequence
LALKHGI

SEQ ID NO: 52111 - protein, 7 aa, Artificial sequence
  Protein classification predicting sequence
GINKFII

SEQ ID NO: 52112 - protein, 6 aa, Artificial sequence
  Protein classification predicting sequence
QVKSLC

SEQ ID NO: 52113 - protein, 7 aa, Artificial sequence
  Protein classification predicting sequence
ASEVRAS

SEQ ID NO: 52114 - protein, 7 aa, Artificial sequence
  Protein classification predicting sequence
GNVSVTR

SEQ ID NO: 52115 - protein, 7 aa, Artificial sequence
  Protein classification predicting sequence
DGSITGP

SEQ ID NO: 52116 - protein, 6 aa, Artificial sequence
  Protein classification predicting sequence
CNSGLA

SEQ ID NO: 52117 - protein, 5 aa, Artificial sequence
  Protein classification predicting sequence
AEFHR

SEQ ID NO: 52118 - protein, 6 aa, Artificial sequence
  Protein classification predicting sequence
YSLFLV

SEQ ID NO: 52119 - protein, 6 aa, Artificial sequence
  Protein classification predicting sequence
GGGGEY

SEQ ID NO: 52120 - protein, 6 aa, Artificial sequence
  Protein classification predicting sequence
LDVQYL

SEQ ID NO: 52121 - protein, 6 aa, Artificial sequence
  Protein classification predicting sequence
NNAIPV

SEQ ID NO: 52122 - protein, 8 aa, Artificial sequence
  Protein classification predicting sequence
ALPPPCES

SEQ ID NO: 52123 - protein, 6 aa, Artificial sequence
  Protein classification predicting sequence
EAISND

SEQ ID NO: 52124 - protein, 6 aa, Artificial sequence
  Protein classification predicting sequence
ARVVQH

SEQ ID NO: 52125 - protein, 6 aa, Artificial sequence
  Protein classification predicting sequence
HPLLIL

SEQ ID NO: 52126 - protein, 6 aa, Artificial sequence
  Protein classification predicting sequence
EAYPGD

SEQ ID NO: 52127 - protein, 6 aa, Artificial sequence
  Protein classification predicting sequence
ANYPGV

SEQ ID NO: 52128 - protein, 5 aa, Artificial sequence
  Protein classification predicting sequence
NVGDN

SEQ ID NO: 52129 - protein, 5 aa, Artificial sequence
  Protein classification predicting sequence
HFCGG

SEQ ID NO: 52130 - protein, 6 aa, Artificial sequence
  Protein classification predicting sequence
KIAKVF

SEQ ID NO: 52131 - protein, 6 aa, Artificial sequence
  Protein classification predicting sequence
ARAVVN

SEQ ID NO: 52132 - protein, 7 aa, Artificial sequence
  Protein classification predicting sequence
VSPVNEN

SEQ ID NO: 52133 - protein, 6 aa, Artificial sequence
  Protein classification predicting sequence
IVFSTH

SEQ ID NO: 52134 - protein, 6 aa, Artificial sequence
  Protein classification predicting sequence
TPDLDP

SEQ ID NO: 52135 - protein, 7 aa, Artificial sequence
  Protein classification predicting sequence
AEEISAL

SEQ ID NO: 52136 - protein, 6 aa, Artificial sequence
  Protein classification predicting sequence
RNSEEL

SEQ ID NO: 52137 - protein, 6 aa, Artificial sequence
  Protein classification predicting sequence
EHVIIP

SEQ ID NO: 52138 - protein, 7 aa, Artificial sequence
  Protein classification predicting sequence
KRPFVKL

SEQ ID NO: 52139 - protein, 6 aa, Artificial sequence
  Protein classification predicting sequence
ITLSEY

SEQ ID NO: 52140 - protein, 7 aa, Artificial sequence
  Protein classification predicting sequence
SDTAIKE

SEQ ID NO: 52141 - protein, 6 aa, Artificial sequence
  Protein classification predicting sequence
YVGCGE

SEQ ID NO: 52142 - protein, 6 aa, Artificial sequence
  Protein classification predicting sequence
KDVQAM

SEQ ID NO: 52143 - protein, 7 aa, Artificial sequence
  Protein classification predicting sequence
TSPKSSA

SEQ ID NO: 52144 - protein, 7 aa, Artificial sequence
  Protein classification predicting sequence
KKKRRKK

SEQ ID NO: 52145 - protein, 7 aa, Artificial sequence
  Protein classification predicting sequence
KKAKKSN

SEQ ID NO: 52146 - protein, 7 aa, Artificial sequence
  Protein classification predicting sequence
PASFKDS

SEQ ID NO: 52147 - protein, 6 aa, Artificial sequence
  Protein classification predicting sequence
KYLENY

SEQ ID NO: 52148 - protein, 7 aa, Artificial sequence
  Protein classification predicting sequence
SGVLAIS

SEQ ID NO: 52149 - protein, 6 aa, Artificial sequence
  Protein classification predicting sequence
IAFIPA

SEQ ID NO: 52150 - protein, 7 aa, Artificial sequence
  Protein classification predicting sequence
AAIFSYL

SEQ ID NO: 52151 - protein, 5 aa, Artificial sequence
  Protein classification predicting sequence
VPHEG

SEQ ID NO: 52152 - protein, 6 aa, Artificial sequence
  Protein classification predicting sequence
FLGKDT

SEQ ID NO: 52153 - protein, 7 aa, Artificial sequence
  Protein classification predicting sequence
AIAFIPA

SEQ ID NO: 52154 - protein, 8 aa, Artificial sequence
  Protein classification predicting sequence
RKFDRATA

SEQ ID NO: 52155 - protein, 7 aa, Artificial sequence
  Protein classification predicting sequence
KLIKNGK

SEQ ID NO: 52156 - protein, 6 aa, Artificial sequence
  Protein classification predicting sequence
GDKVRL

SEQ ID NO: 52157 - protein, 6 aa, Artificial sequence
  Protein classification predicting sequence
DGRIVG

SEQ ID NO: 52158 - protein, 7 aa, Artificial sequence
  Protein classification predicting sequence
GEILSPN

SEQ ID NO: 52159 - protein, 6 aa, Artificial sequence
  Protein classification predicting sequence
KQGEIE

SEQ ID NO: 52160 - protein, 6 aa, Artificial sequence
  Protein classification predicting sequence
RIKRYI

SEQ ID NO: 52161 - protein, 5 aa, Artificial sequence
  Protein classification predicting sequence
SMNLG

SEQ ID NO: 52162 - protein, 6 aa, Artificial sequence
  Protein classification predicting sequence
LVAERR

SEQ ID NO: 52163 - protein, 6 aa, Artificial sequence
  Protein classification predicting sequence
GGIAEM

SEQ ID NO: 52164 - protein, 6 aa, Artificial sequence
  Protein classification predicting sequence
EMNREV

SEQ ID NO: 52165 - protein, 6 aa, Artificial sequence
  Protein classification predicting sequence
SRVECI

SEQ ID NO: 52166 - protein, 6 aa, Artificial sequence
  Protein classification predicting sequence
DEEIGR

SEQ ID NO: 52167 - protein, 7 aa, Artificial sequence
  Protein classification predicting sequence
EPVVGTG

SEQ ID NO: 52168 - protein, 7 aa, Artificial sequence
  Protein classification predicting sequence
EKVKPGE

SEQ ID NO: 52169 - protein, 6 aa, Artificial sequence
  Protein classification predicting sequence
VHVDGH

SEQ ID NO: 52170 - protein, 6 aa, Artificial sequence
  Protein classification predicting sequence
EIEGDL

SEQ ID NO: 52171 - protein, 6 aa, Artificial sequence
  Protein classification predicting sequence
PAINWL

SEQ ID NO: 52172 - protein, 6 aa, Artificial sequence
  Protein classification predicting sequence
MLREDF

SEQ ID NO: 52173 - protein, 6 aa, Artificial sequence
  Protein classification predicting sequence
TEKIQM

SEQ ID NO: 52174 - protein, 6 aa, Artificial sequence
  Protein classification predicting sequence
VNFTLP

SEQ ID NO: 52175 - protein, 6 aa, Artificial sequence
  Protein classification predicting sequence
RRGQVL

SEQ ID NO: 52176 - protein, 7 aa, Artificial sequence
  Protein classification predicting sequence
TRRGQVL

SEQ ID NO: 52177 - protein, 6 aa, Artificial sequence
  Protein classification predicting sequence
AWGILS

SEQ ID NO: 52178 - protein, 6 aa, Artificial sequence
  Protein classification predicting sequence
LNTETT

SEQ ID NO: 52179 - protein, 6 aa, Artificial sequence
  Protein classification predicting sequence
PDGEPR

SEQ ID NO: 52180 - protein, 5 aa, Artificial sequence
  Protein classification predicting sequence
WMHFC

SEQ ID NO: 52181 - protein, 6 aa, Artificial sequence
  Protein classification predicting sequence
YRFTVP

SEQ ID NO: 52182 - protein, 6 aa, Artificial sequence
  Protein classification predicting sequence
NMQKKQ

SEQ ID NO: 52183 - protein, 7 aa, Artificial sequence
  Protein classification predicting sequence
LKALERG

SEQ ID NO: 52184 - protein, 6 aa, Artificial sequence
  Protein classification predicting sequence
TNRRVN

SEQ ID NO: 52185 - protein, 6 aa, Artificial sequence
  Protein classification predicting sequence
ATFPDG

SEQ ID NO: 52186 - protein, 7 aa, Artificial sequence
  Protein classification predicting sequence
DSILADA

SEQ ID NO: 52187 - protein, 5 aa, Artificial sequence
  Protein classification predicting sequence
DHHHY

SEQ ID NO: 52188 - protein, 6 aa, Artificial sequence
  Protein classification predicting sequence
PYQIHF

SEQ ID NO: 52189 - protein, 7 aa, Artificial sequence
  Protein classification predicting sequence
VMEEKLN

SEQ ID NO: 52190 - protein, 6 aa, Artificial sequence
  Protein classification predicting sequence
NKAERI

SEQ ID NO: 52191 - protein, 6 aa, Artificial sequence
  Protein classification predicting sequence
PKSVCI

SEQ ID NO: 52192 - protein, 5 aa, Artificial sequence
  Protein classification predicting sequence
MKGFF

SEQ ID NO: 52193 - protein, 6 aa, Artificial sequence
  Protein classification predicting sequence
AERGVV

SEQ ID NO: 52194 - protein, 7 aa, Artificial sequence
  Protein classification predicting sequence
QERYPKK

SEQ ID NO: 52195 - protein, 8 aa, Artificial sequence
  Protein classification predicting sequence
SAGLGALV

SEQ ID NO: 52196 - protein, 7 aa, Artificial sequence
  Protein classification predicting sequence
LTPSQFT

SEQ ID NO: 52197 - protein, 6 aa, Artificial sequence
  Protein classification predicting sequence
AKNADS

SEQ ID NO: 52198 - protein, 6 aa, Artificial sequence
  Protein classification predicting sequence
LAAPTN

SEQ ID NO: 52199 - protein, 6 aa, Artificial sequence
  Protein classification predicting sequence
GVPIDG

SEQ ID NO: 52200 - protein, 7 aa, Artificial sequence
  Protein classification predicting sequence
VQQALKD

SEQ ID NO: 52201 - protein, 6 aa, Artificial sequence
  Protein classification predicting sequence
VMEKGE

SEQ ID NO: 52202 - protein, 7 aa, Artificial sequence
  Protein classification predicting sequence
ESFKKNL

SEQ ID NO: 52203 - protein, 9 aa, Artificial sequence
  Protein classification predicting sequence
ASDSPLLFD

SEQ ID NO: 52204 - protein, 6 aa, Artificial sequence
  Protein classification predicting sequence
PGDAFL

SEQ ID NO: 52205 - protein, 15 aa, Artificial sequence
  Protein classification predicting sequence
PYYPGFDRDLKWRTG

SEQ ID NO: 52206 - protein, 8 aa, Artificial sequence
  Protein classification predicting sequence
GLPGFRVG

SEQ ID NO: 52207 - protein, 9 aa, Artificial sequence
  Protein classification predicting sequence
FDRDLKWRT

SEQ ID NO: 52208 - protein, 6 aa, Artificial sequence
  Protein classification predicting sequence
LMFCLA

SEQ ID NO: 52209 - protein, 8 aa, Artificial sequence
  Protein classification predicting sequence
ASICTPEG

SEQ ID NO: 52210 - protein, 6 aa, Artificial sequence
  Protein classification predicting sequence
FQDYHG

SEQ ID NO: 52211 - protein, 10 aa, Artificial sequence
  Protein classification predicting sequence
TNPSNPLGTT

SEQ ID NO: 52212 - protein, 7 aa, Artificial sequence
  Protein classification predicting sequence
RVGIVYS

SEQ ID NO: 52213 - protein, 8 aa, Artificial sequence
  Protein classification predicting sequence
NVSPGSSF

SEQ ID NO: 52214 - protein, 10 aa, Artificial sequence
  Protein classification predicting sequence
IQMGLAENQL

SEQ ID NO: 52215 - protein, 7 aa, Artificial sequence
  Protein classification predicting sequence
FQDYHGL

SEQ ID NO: 52216 - protein, 7 aa, Artificial sequence
  Protein classification predicting sequence
AYKKAQE

SEQ ID NO: 52217 - protein, 6 aa, Artificial sequence
  Protein classification predicting sequence
SNAGLF

SEQ ID NO: 52218 - protein, 5 aa, Artificial sequence
  Protein classification predicting sequence
WMDLR

SEQ ID NO: 52219 - protein, 6 aa, Artificial sequence
  Protein classification predicting sequence
EPGWFR

SEQ ID NO: 52220 - protein, 7 aa, Artificial sequence
  Protein classification predicting sequence
LSDKKFT

SEQ ID NO: 52221 - protein, 9 aa, Artificial sequence
  Protein classification predicting sequence
HIVYSLSKD

SEQ ID NO: 52222 - protein, 7 aa, Artificial sequence
  Protein classification predicting sequence
NAGLFCW

SEQ ID NO: 52223 - protein, 18 aa, Artificial sequence
  Protein classification predicting sequence
RVHIVYSLSKDLGLPGFR

SEQ ID NO: 52224 - protein, 14 aa, Artificial sequence
  Protein classification predicting sequence
VYSLSKDLGLPGFR

SEQ ID NO: 52225 - protein, 7 aa, Artificial sequence
  Protein classification predicting sequence
LWKKIVY

SEQ ID NO: 52226 - protein, 7 aa, Artificial sequence
  Protein classification predicting sequence
SSYFLGW

SEQ ID NO: 52227 - protein, 7 aa, Artificial sequence
  Protein classification predicting sequence
ENQKRLK

SEQ ID NO: 52228 - protein, 6 aa, Artificial sequence
  Protein classification predicting sequence
RDLRWR

SEQ ID NO: 52229 - protein, 8 aa, Artificial sequence
  Protein classification predicting sequence
KGLILTNP

SEQ ID NO: 52230 - protein, 7 aa, Artificial sequence
  Protein classification predicting sequence
SLSKDLG

SEQ ID NO: 52231 - protein, 6 aa, Artificial sequence
  Protein classification predicting sequence
PGFRVG

SEQ ID NO: 52232 - protein, 9 aa, Artificial sequence
  Protein classification predicting sequence
TNPSNPLGT

SEQ ID NO: 52233 - protein, 8 aa, Artificial sequence
  Protein classification predicting sequence
YFDGWKAY

SEQ ID NO: 52234 - protein, 8 aa, Artificial sequence
  Protein classification predicting sequence
AKFMEKTR

SEQ ID NO: 52235 - protein, 8 aa, Artificial sequence
  Protein classification predicting sequence
MSSFGLVS

SEQ ID NO: 52236 - protein, 8 aa, Artificial sequence
  Protein classification predicting sequence
VKLNVSPG

SEQ ID NO: 52237 - protein, 6 aa, Artificial sequence
  Protein classification predicting sequence
GWKAYD

SEQ ID NO: 52238 - protein, 8 aa, Artificial sequence
  Protein classification predicting sequence
TNPSNPLG

SEQ ID NO: 52239 - protein, 7 aa, Artificial sequence
  Protein classification predicting sequence
LVSSQTQ

SEQ ID NO: 52240 - protein, 11 aa, Artificial sequence
  Protein classification predicting sequence
LNISPGSSCHC

SEQ ID NO: 52241 - protein, 8 aa, Artificial sequence
  Protein classification predicting sequence
HGQDSSYF

SEQ ID NO: 52242 - protein, 10 aa, Artificial sequence
  Protein classification predicting sequence
ANETLMFCLA

SEQ ID NO: 52243 - protein, 10 aa, Artificial sequence
  Protein classification predicting sequence
FQDYHGLPEF

SEQ ID NO: 52244 - protein, 11 aa, Artificial sequence
  Protein classification predicting sequence
NIHLVCDEIYA

SEQ ID NO: 52245 - protein, 8 aa, Artificial sequence
  Protein classification predicting sequence
YSLSKDMG

SEQ ID NO: 52246 - protein, 11 aa, Artificial sequence
  Protein classification predicting sequence
EPGWFRVCFAN

SEQ ID NO: 52247 - protein, 10 aa, Artificial sequence
  Protein classification predicting sequence
PYYPGFDRDL

SEQ ID NO: 52248 - protein, 9 aa, Artificial sequence
  Protein classification predicting sequence
DEIYSATVF

SEQ ID NO: 52249 - protein, 6 aa, Artificial sequence
  Protein classification predicting sequence
QTQYLL

SEQ ID NO: 52250 - protein, 9 aa, Artificial sequence
  Protein classification predicting sequence
EMELWRVII

SEQ ID NO: 52251 - protein, 11 aa, Artificial sequence
  Protein classification predicting sequence
HCTEPGWFRVC

SEQ ID NO: 52252 - protein, 11 aa, Artificial sequence
  Protein classification predicting sequence
THTSVAIRDAL

SEQ ID NO: 52253 - protein, 14 aa, Artificial sequence
  Protein classification predicting sequence
FQSNHEGAIIDRIH

SEQ ID NO: 52254 - protein, 7 aa, Artificial sequence
  Protein classification predicting sequence
SNVHARE

SEQ ID NO: 52255 - protein, 7 aa, Artificial sequence
  Protein classification predicting sequence
STDEVYG

SEQ ID NO: 52256 - protein, 7 aa, Artificial sequence
  Protein classification predicting sequence
CSNNYGP

SEQ ID NO: 52257 - protein, 13 aa, Artificial sequence
  Protein classification predicting sequence
TKKCGHMAGKVLV

SEQ ID NO: 52258 - protein, 17 aa, Artificial sequence
  Protein classification predicting sequence
LFWDWDLPRTREGFYRF

SEQ ID NO: 52259 - protein, 28 aa, Artificial sequence
  Protein classification predicting sequence
TASTSNEPGPDLADYPMDTVPNKVEHLF

SEQ ID NO: 52260 - protein, 7 aa, Artificial sequence
  Protein classification predicting sequence
HDRKQRE

SEQ ID NO: 52261 - protein, 6 aa, Artificial sequence
  Protein classification predicting sequence
DYLRPI

SEQ ID NO: 52262 - protein, 9 aa, Artificial sequence
  Protein classification predicting sequence
ADADTGHGG

SEQ ID NO: 52263 - protein, 7 aa, Artificial sequence
  Protein classification predicting sequence
ADLIWME

SEQ ID NO: 52264 - protein, 14 aa, Artificial sequence
  Protein classification predicting sequence
WQFITLAGLHTTAL

SEQ ID NO: 52265 - protein, 13 aa, Artificial sequence
  Protein classification predicting sequence
YPDQSLYPANSVP

SEQ ID NO: 52266 - protein, 12 aa, Artificial sequence
  Protein classification predicting sequence
PIVADAEAGFGG

SEQ ID NO: 52267 - protein, 9 aa, Artificial sequence
  Protein classification predicting sequence
VHFEDQLAS

SEQ ID NO: 52268 - protein, 22 aa, Artificial sequence
  Protein classification predicting sequence
EDQLASEKKCGHLGGKVLIPTQ

SEQ ID NO: 52269 - protein, 15 aa, Artificial sequence
  Protein classification predicting sequence
PGKLLAYNCSPSFNW

SEQ ID NO: 52270 - protein, 8 aa, Artificial sequence
  Protein classification predicting sequence
EVGTGYFD

SEQ ID NO: 52271 - protein, 8 aa, Artificial sequence
  Protein classification predicting sequence
RDHQFILG

SEQ ID NO: 52272 - protein, 7 aa, Artificial sequence
  Protein classification predicting sequence
TFGALDP

SEQ ID NO: 52273 - protein, 7 aa, Artificial sequence
  Protein classification predicting sequence
QMAKYLD

SEQ ID NO: 52274 - protein, 6 aa, Artificial sequence
  Protein classification predicting sequence
APYADL

SEQ ID NO: 52275 - protein, 6 aa, Artificial sequence
  Protein classification predicting sequence
STAAMG

SEQ ID NO: 52276 - protein, 7 aa, Artificial sequence
  Protein classification predicting sequence
WWSEPRW

SEQ ID NO: 52277 - protein, 6 aa, Artificial sequence
  Protein classification predicting sequence
FHDRKQ

SEQ ID NO: 52278 - protein, 9 aa, Artificial sequence
  Protein classification predicting sequence
HQKWSGANY

SEQ ID NO: 52279 - protein, 10 aa, Artificial sequence
  Protein classification predicting sequence
REGYYRYQGG

SEQ ID NO: 52280 - protein, 7 aa, Artificial sequence
  Protein classification predicting sequence
GVHAVWP

SEQ ID NO: 52281 - protein, 14 aa, Artificial sequence
  Protein classification predicting sequence
QKLAYNLSPSFNWK

SEQ ID NO: 52282 - protein, 6 aa, Artificial sequence
  Protein classification predicting sequence
TVPNKV

SEQ ID NO: 52283 - protein, 18 aa, Artificial sequence
  Protein classification predicting sequence
ADADTGHGGLTAVMKLTK

SEQ ID NO: 52284 - protein, 11 aa, Artificial sequence
  Protein classification predicting sequence
LAYNLSPSFNW

SEQ ID NO: 52285 - protein, 10 aa, Artificial sequence
  Protein classification predicting sequence
WQFITLAGLH

SEQ ID NO: 52286 - protein, 7 aa, Artificial sequence
  Protein classification predicting sequence
HQKWSGA

SEQ ID NO: 52287 - protein, 13 aa, Artificial sequence
  Protein classification predicting sequence
YLSGWQVAGDANL

SEQ ID NO: 52288 - protein, 8 aa, Artificial sequence
  Protein classification predicting sequence
EPCIARAK

SEQ ID NO: 52289 - protein, 7 aa, Artificial sequence
  Protein classification predicting sequence
TPDLELA

SEQ ID NO: 52290 - protein, 12 aa, Artificial sequence
  Protein classification predicting sequence
KHQREVGAGYFD

SEQ ID NO: 52291 - protein, 22 aa, Artificial sequence
  Protein classification predicting sequence
TASRTFGALDPVQVTMMAKHLD

SEQ ID NO: 52292 - protein, 11 aa, Artificial sequence
  Protein classification predicting sequence
IYVSGWQCSST

SEQ ID NO: 52293 - protein, 13 aa, Artificial sequence
  Protein classification predicting sequence
IYVSGWQCSSTHT

SEQ ID NO: 52294 - protein, 19 aa, Artificial sequence
  Protein classification predicting sequence
DYARRGMLAYVERIQREER

SEQ ID NO: 52295 - protein, 6 aa, Artificial sequence
  Protein classification predicting sequence
KLTKLF

SEQ ID NO: 52296 - protein, 29 aa, Artificial sequence
  Protein classification predicting sequence
ERGAAGIHIEDQAPGTKKCGHMAGKVLVP

SEQ ID NO: 52297 - protein, 7 aa, Artificial sequence
  Protein classification predicting sequence
AYAPYAD

SEQ ID NO: 52298 - protein, 6 aa, Artificial sequence
  Protein classification predicting sequence
RFEAEV

SEQ ID NO: 52299 - protein, 6 aa, Artificial sequence
  Protein classification predicting sequence
LTRRPY

SEQ ID NO: 52300 - protein, 5 aa, Artificial sequence
  Protein classification predicting sequence
HDRKQ

SEQ ID NO: 52301 - protein, 12 aa, Artificial sequence
  Protein classification predicting sequence
PIIADGDTGFGG

SEQ ID NO: 52302 - protein, 14 aa, Artificial sequence
  Protein classification predicting sequence
MLAYNLSPSFNWDA

SEQ ID NO: 52303 - protein, 8 aa, Artificial sequence
  Protein classification predicting sequence
YLSGWQVA

SEQ ID NO: 52304 - protein, 7 aa, Artificial sequence
  Protein classification predicting sequence
QFITLAG

SEQ ID NO: 52305 - protein, 11 aa, Artificial sequence
  Protein classification predicting sequence
AMPRDEQETYI

SEQ ID NO: 52306 - protein, 17 aa, Artificial sequence
  Protein classification predicting sequence
WQFITLAGLHTTALISD

SEQ ID NO: 52307 - protein, 8 aa, Artificial sequence
  Protein classification predicting sequence
HQKWSGAN

SEQ ID NO: 52308 - protein, 29 aa, Artificial sequence
  Protein classification predicting sequence
YDRYLKTVQGGISSTAAMGKGVTEEQFKE

SEQ ID NO: 52309 - protein, 15 aa, Artificial sequence
  Protein classification predicting sequence
KLTKMFIERGAAGIH

SEQ ID NO: 52310 - protein, 6 aa, Artificial sequence
  Protein classification predicting sequence
EHINRL

SEQ ID NO: 52311 - protein, 6 aa, Artificial sequence
  Protein classification predicting sequence
YVSGWQ

SEQ ID NO: 52312 - protein, 10 aa, Artificial sequence
  Protein classification predicting sequence
SSTASSTDEP

SEQ ID NO: 52313 - protein, 51 aa, Artificial sequence
  Protein classification predicting sequence
GAAGIHIEDQAPGTKKCGHMAGKVLVPISEHINRLVAIRAQADIMGTDLLA

SEQ ID NO: 52314 - protein, 6 aa, Artificial sequence
  Protein classification predicting sequence
DLVWME

SEQ ID NO: 52315 - protein, 13 aa, Artificial sequence
  Protein classification predicting sequence
IARTDAEAATLIT

SEQ ID NO: 52316 - protein, 6 aa, Artificial sequence
  Protein classification predicting sequence
PRTREG

SEQ ID NO: 52317 - protein, 6 aa, Artificial sequence
  Protein classification predicting sequence
CAINRA

SEQ ID NO: 52318 - protein, 10 aa, Artificial sequence
  Protein classification predicting sequence
IWMESKLPDY

SEQ ID NO: 52319 - protein, 7 aa, Artificial sequence
  Protein classification predicting sequence
GVTEDQF

SEQ ID NO: 52320 - protein, 9 aa, Artificial sequence
  Protein classification predicting sequence
VVRRINNAL

SEQ ID NO: 52321 - protein, 8 aa, Artificial sequence
  Protein classification predicting sequence
RTREGFYR

SEQ ID NO: 52322 - protein, 15 aa, Artificial sequence
  Protein classification predicting sequence
AMGFKFQFITLAGFH

SEQ ID NO: 52323 - protein, 9 aa, Artificial sequence
  Protein classification predicting sequence
QFITLAGFH

SEQ ID NO: 52324 - protein, 6 aa, Artificial sequence
  Protein classification predicting sequence
GKVLVP

SEQ ID NO: 52325 - protein, 8 aa, Artificial sequence
  Protein classification predicting sequence
ARTDAEAA

SEQ ID NO: 52326 - protein, 13 aa, Artificial sequence
  Protein classification predicting sequence
MLAYNLSPSFNWD

SEQ ID NO: 52327 - protein, 11 aa, Artificial sequence
  Protein classification predicting sequence
TKRPFTAEQIV

SEQ ID NO: 52328 - protein, 17 aa, Artificial sequence
  Protein classification predicting sequence
EHINRLVAIRAQADIMG

SEQ ID NO: 52329 - protein, 6 aa, Artificial sequence
  Protein classification predicting sequence
REGYYR

SEQ ID NO: 52330 - protein, 6 aa, Artificial sequence
  Protein classification predicting sequence
GMRAYG

SEQ ID NO: 52331 - protein, 13 aa, Artificial sequence
  Protein classification predicting sequence
GMRAYGELVQEPE

SEQ ID NO: 52332 - protein, 8 aa, Artificial sequence
  Protein classification predicting sequence
LKIEYPSN

SEQ ID NO: 52333 - protein, 13 aa, Artificial sequence
  Protein classification predicting sequence
AYAKQGMRAYGEL

SEQ ID NO: 52334 - protein, 10 aa, Artificial sequence
  Protein classification predicting sequence
SGWQSSSTAS

SEQ ID NO: 52335 - protein, 7 aa, Artificial sequence
  Protein classification predicting sequence
PDLADYP

SEQ ID NO: 52336 - protein, 14 aa, Artificial sequence
  Protein classification predicting sequence
EHLWFAQLFHDRKQ

SEQ ID NO: 52337 - protein, 5 aa, Artificial sequence
  Protein classification predicting sequence
QETYI

SEQ ID NO: 52338 - protein, 16 aa, Artificial sequence
  Protein classification predicting sequence
PDLADYPMDTVPNKVE

SEQ ID NO: 52339 - protein, 10 aa, Artificial sequence
  Protein classification predicting sequence
EHINRLVAIR

SEQ ID NO: 52340 - protein, 11 aa, Artificial sequence
  Protein classification predicting sequence
VARTDSEAATL

SEQ ID NO: 52341 - protein, 6 aa, Artificial sequence
  Protein classification predicting sequence
LHTTAL

SEQ ID NO: 52342 - protein, 8 aa, Artificial sequence
  Protein classification predicting sequence
GVTEDQFK

SEQ ID NO: 52343 - protein, 6 aa, Artificial sequence
  Protein classification predicting sequence
MAKYLD

SEQ ID NO: 52344 - protein, 28 aa, Artificial sequence
  Protein classification predicting sequence
TNEPGPDLADYPYDTVPNKVEHLFFAQQ

SEQ ID NO: 52345 - protein, 23 aa, Artificial sequence
  Protein classification predicting sequence
TATVKLCKLFVERGAAGVHIEDQ

SEQ ID NO: 52346 - protein, 6 aa, Artificial sequence
  Protein classification predicting sequence
HIEDQA

SEQ ID NO: 52347 - protein, 8 aa, Artificial sequence
  Protein classification predicting sequence
VAARLQFD

SEQ ID NO: 52348 - protein, 9 aa, Artificial sequence
  Protein classification predicting sequence
LKTVQGGIS

SEQ ID NO: 52349 - protein, 10 aa, Artificial sequence
  Protein classification predicting sequence
YINSLGALTG

SEQ ID NO: 52350 - protein, 20 aa, Artificial sequence
  Protein classification predicting sequence
IARTDAEAATLITSDVDERD

SEQ ID NO: 52351 - protein, 9 aa, Artificial sequence
  Protein classification predicting sequence
SEHINRLVA

SEQ ID NO: 52352 - protein, 7 aa, Artificial sequence
  Protein classification predicting sequence
LVARTDA

SEQ ID NO: 52353 - protein, 11 aa, Artificial sequence
  Protein classification predicting sequence
TNPNLRGKSLA

SEQ ID NO: 52354 - protein, 13 aa, Artificial sequence
  Protein classification predicting sequence
ARTDSEAATLITS

SEQ ID NO: 52355 - protein, 6 aa, Artificial sequence
  Protein classification predicting sequence
KLFHEA

SEQ ID NO: 52356 - protein, 11 aa, Artificial sequence
  Protein classification predicting sequence
WQFITLAGLHT

SEQ ID NO: 52357 - protein, 5 aa, Artificial sequence
  Protein classification predicting sequence
PVQEH

SEQ ID NO: 52358 - protein, 14 aa, Artificial sequence
  Protein classification predicting sequence
AGLKLFHEAVIDEI

SEQ ID NO: 52359 - protein, 7 aa, Artificial sequence
  Protein classification predicting sequence
PFKPARV

SEQ ID NO: 52360 - protein, 6 aa, Artificial sequence
  Protein classification predicting sequence
GFFPVD

SEQ ID NO: 52361 - protein, 14 aa, Artificial sequence
  Protein classification predicting sequence
LVVAYALAGTVDID

SEQ ID NO: 52362 - protein, 10 aa, Artificial sequence
  Protein classification predicting sequence
FNSYGSRRGN

SEQ ID NO: 52363 - protein, 6 aa, Artificial sequence
  Protein classification predicting sequence
LPYSIR

SEQ ID NO: 52364 - protein, 8 aa, Artificial sequence
  Protein classification predicting sequence
KLTGRSDE

SEQ ID NO: 52365 - protein, 7 aa, Artificial sequence
  Protein classification predicting sequence
DPNSTYI

SEQ ID NO: 52366 - protein, 8 aa, Artificial sequence
  Protein classification predicting sequence
RGTFANIR

SEQ ID NO: 52367 - protein, 16 aa, Artificial sequence
  Protein classification predicting sequence
PDTLVGTDSHTTMING

SEQ ID NO: 52368 - protein, 6 aa, Artificial sequence
  Protein classification predicting sequence
PEYGAT

SEQ ID NO: 52369 - protein, 11 aa, Artificial sequence
  Protein classification predicting sequence
PEYGATCGFFP

SEQ ID NO: 52370 - protein, 7 aa, Artificial sequence
  Protein classification predicting sequence
GPKRPQD

SEQ ID NO: 52371 - protein, 17 aa, Artificial sequence
  Protein classification predicting sequence
VVIAAITSCTNTSNPSV

SEQ ID NO: 52372 - protein, 9 aa, Artificial sequence
  Protein classification predicting sequence
AGLLAKKAV

SEQ ID NO: 52373 - protein, 17 aa, Artificial sequence
  Protein classification predicting sequence
VLSGNRNFEGRIHPLVK

SEQ ID NO: 52374 - protein, 13 aa, Artificial sequence
  Protein classification predicting sequence
GDSVTTDHISPAG

SEQ ID NO: 52375 - protein, 9 aa, Artificial sequence
  Protein classification predicting sequence
TTDHISPAG

SEQ ID NO: 52376 - protein, 9 aa, Artificial sequence
  Protein classification predicting sequence
RGTFANIRI

SEQ ID NO: 52377 - protein, 8 aa, Artificial sequence
  Protein classification predicting sequence
ERIHRSNL

SEQ ID NO: 52378 - protein, 13 aa, Artificial sequence
  Protein classification predicting sequence
PGCSLCMGNQARV

SEQ ID NO: 52379 - protein, 13 aa, Artificial sequence
  Protein classification predicting sequence
EVFIGSCMTNIGH

SEQ ID NO: 52380 - protein, 29 aa, Artificial sequence
  Protein classification predicting sequence
VPFKPSRVILQDFTGVPAVVDLASLRKAM

SEQ ID NO: 52381 - protein, 6 aa, Artificial sequence
  Protein classification predicting sequence
LEFERN

SEQ ID NO: 52382 - protein, 41 aa, Artificial sequence
  Protein classification predicting sequence
PDTLVGTDSHTTMINGIGVLGWGVGGIEAEAGMLGQPSYFP

SEQ ID NO: 52383 - protein, 11 aa, Artificial sequence
  Protein classification predicting sequence
GAGLVAKKAVE

SEQ ID NO: 52384 - protein, 19 aa, Artificial sequence
  Protein classification predicting sequence
TSVLSGNRNFEGRIHPLVK

SEQ ID NO: 52385 - protein, 6 aa, Artificial sequence
  Protein classification predicting sequence
NYLASP

SEQ ID NO: 52386 - protein, 7 aa, Artificial sequence
  Protein classification predicting sequence
STYIQNP

SEQ ID NO: 52387 - protein, 11 aa, Artificial sequence
  Protein classification predicting sequence
RGTFANIRIKN

SEQ ID NO: 52388 - protein, 14 aa, Artificial sequence
  Protein classification predicting sequence
APGTEGGFTTYWPT

SEQ ID NO: 52389 - protein, 14 aa, Artificial sequence
  Protein classification predicting sequence
DYYRHGGILQMVLR

SEQ ID NO: 52390 - protein, 42 aa, Artificial sequence
  Protein classification predicting sequence
VAEKEGWPLDIRVGLIGSCTNSSYEDMGRSAAVAKQALAHGL

SEQ ID NO: 52391 - protein, 21 aa, Artificial sequence
  Protein classification predicting sequence
VDVSPTSQRLQLLEPFDKWDG

SEQ ID NO: 52392 - protein, 46 aa, Artificial sequence
  Protein classification predicting sequence
DLEDLQILIKVKGKCTTDHISAAGPWLKFRGHLDNISNNLLIGAIN

SEQ ID NO: 52393 - protein, 40 aa, Artificial sequence
  Protein classification predicting sequence
CIIKHPNGTQETILLNHTFNETQIEWFRAGSALNRMKELQ

SEQ ID NO: 52394 - protein, 14 aa, Artificial sequence
  Protein classification predicting sequence
YPDSLVGTDSHTTM

SEQ ID NO: 52395 - protein, 15 aa, Artificial sequence
  Protein classification predicting sequence
TATDLVLTVTQMLRK

SEQ ID NO: 52396 - protein, 6 aa, Artificial sequence
  Protein classification predicting sequence
PAGKYL

SEQ ID NO: 52397 - protein, 7 aa, Artificial sequence
  Protein classification predicting sequence
YGHLDDP

SEQ ID NO: 52398 - protein, 13 aa, Artificial sequence
  Protein classification predicting sequence
VAVPSTIHCDHLI

SEQ ID NO: 52399 - protein, 10 aa, Artificial sequence
  Protein classification predicting sequence
PKVIGVKLTG

SEQ ID NO: 52400 - protein, 25 aa, Artificial sequence
  Protein classification predicting sequence
SPKDVILKVAGILTVKGGTGAIVEY

SEQ ID NO: 52401 - protein, 14 aa, Artificial sequence
  Protein classification predicting sequence
TICNMGAEIGATTS

SEQ ID NO: 52402 - protein, 14 aa, Artificial sequence
  Protein classification predicting sequence
PHINGPFTPDLAHP

SEQ ID NO: 52403 - protein, 15 aa, Artificial sequence
  Protein classification predicting sequence
VGLIGSCTNSSYEDM

SEQ ID NO: 52404 - protein, 13 aa, Artificial sequence
  Protein classification predicting sequence
VLANACGPCIGQW

SEQ ID NO: 52405 - protein, 17 aa, Artificial sequence
  Protein classification predicting sequence
AGPWLKFRGHLDNISNN

SEQ ID NO: 52406 - protein, 15 aa, Artificial sequence
  Protein classification predicting sequence
KSFARIHETNLKKQG

SEQ ID NO: 52407 - protein, 10 aa, Artificial sequence
  Protein classification predicting sequence
EWFRAGSALN

SEQ ID NO: 52408 - protein, 7 aa, Artificial sequence
  Protein classification predicting sequence
QEIERGK

SEQ ID NO: 52409 - protein, 17 aa, Artificial sequence
  Protein classification predicting sequence
KVAVPSTIHCDHLIEAQ

SEQ ID NO: 52410 - protein, 32 aa, Artificial sequence
  Protein classification predicting sequence
GGEKDLRRAKDINQEVYNFLATAGAKYGVGFW

SEQ ID NO: 52411 - protein, 8 aa, Artificial sequence
  Protein classification predicting sequence
PGSGIIHQ

SEQ ID NO: 52412 - protein, 73 aa, Artificial sequence
  Protein classification predicting sequence
GGIVLANACGPCIGQWDRKDIKKGEKNTIVTSYNRNFTGRNDANPETHAFVTSPEIVTALAIAGTLKFNPETD

SEQ ID NO: 52413 - protein, 10 aa, Artificial sequence
  Protein classification predicting sequence
LEAPDADELP

SEQ ID NO: 52414 - protein, 9 aa, Artificial sequence
  Protein classification predicting sequence
GVVGKFVEF

SEQ ID NO: 52415 - protein, 16 aa, Artificial sequence
  Protein classification predicting sequence
NMAPEYGATCGFFPVD

SEQ ID NO: 52416 - protein, 11 aa, Artificial sequence
  Protein classification predicting sequence
VLSGNRNFEGR

SEQ ID NO: 52417 - protein, 6 aa, Artificial sequence
  Protein classification predicting sequence
AGKEYG

SEQ ID NO: 52418 - protein, 19 aa, Artificial sequence
  Protein classification predicting sequence
ELKPHINGPFTPDLAHPVA

SEQ ID NO: 52419 - protein, 7 aa, Artificial sequence
  Protein classification predicting sequence
QDFTGVP

SEQ ID NO: 52420 - protein, 7 aa, Artificial sequence
  Protein classification predicting sequence
EYLARVV

SEQ ID NO: 52421 - protein, 9 aa, Artificial sequence
  Protein classification predicting sequence
VGTDSHTTM

SEQ ID NO: 52422 - protein, 13 aa, Artificial sequence
  Protein classification predicting sequence
VGTDSHTTMVNGL

SEQ ID NO: 52423 - protein, 9 aa, Artificial sequence
  Protein classification predicting sequence
TSCTNTSNP

SEQ ID NO: 52424 - protein, 8 aa, Artificial sequence
  Protein classification predicting sequence
RRGNHEVM

SEQ ID NO: 52425 - protein, 24 aa, Artificial sequence
  Protein classification predicting sequence
KANSVRNAVTQEFGPVPDTARYYK

SEQ ID NO: 52426 - protein, 14 aa, Artificial sequence
  Protein classification predicting sequence
LCQRAKVAMSHFEP

SEQ ID NO: 52427 - protein, 8 aa, Artificial sequence
  Protein classification predicting sequence
QDFTGVPA

SEQ ID NO: 52428 - protein, 7 aa, Artificial sequence
  Protein classification predicting sequence
VDLAAMR

SEQ ID NO: 52429 - protein, 8 aa, Artificial sequence
  Protein classification predicting sequence
VIGVKLTG

SEQ ID NO: 52430 - protein, 7 aa, Artificial sequence
  Protein classification predicting sequence
LVVAYAL

SEQ ID NO: 52431 - protein, 7 aa, Artificial sequence
  Protein classification predicting sequence
SPAAKYL

SEQ ID NO: 52432 - protein, 15 aa, Artificial sequence
  Protein classification predicting sequence
VVPPGTGICHQVNLE

SEQ ID NO: 52433 - protein, 7 aa, Artificial sequence
  Protein classification predicting sequence
ELDLSTV

SEQ ID NO: 52434 - protein, 18 aa, Artificial sequence
  Protein classification predicting sequence
LGFNLVGYGCTTCIGNSG

SEQ ID NO: 52435 - protein, 13 aa, Artificial sequence
  Protein classification predicting sequence
GFWRPGSGIIHQI

SEQ ID NO: 52436 - protein, 16 aa, Artificial sequence
  Protein classification predicting sequence
PWELKCPKVIGVKLTG

SEQ ID NO: 52437 - protein, 9 aa, Artificial sequence
  Protein classification predicting sequence
NGPFTPDLA

SEQ ID NO: 52438 - protein, 17 aa, Artificial sequence
  Protein classification predicting sequence
IVTSYNRNFTGRNDANP

SEQ ID NO: 52439 - protein, 17 aa, Artificial sequence
  Protein classification predicting sequence
KGKCTTDHISAAGPWLK

SEQ ID NO: 52440 - protein, 6 aa, Artificial sequence
  Protein classification predicting sequence
HGIRWV

SEQ ID NO: 52441 - protein, 14 aa, Artificial sequence
  Protein classification predicting sequence
GEGSSREHAALEPR

SEQ ID NO: 52442 - protein, 6 aa, Artificial sequence
  Protein classification predicting sequence
LNHTFN

SEQ ID NO: 52443 - protein, 7 aa, Artificial sequence
  Protein classification predicting sequence
ANYLASP

SEQ ID NO: 52444 - protein, 9 aa, Artificial sequence
  Protein classification predicting sequence
LVVAYALAG

SEQ ID NO: 52445 - protein, 11 aa, Artificial sequence
  Protein classification predicting sequence
LNGQSYTYYDL

SEQ ID NO: 52446 - protein, 18 aa, Artificial sequence
  Protein classification predicting sequence
LRQEDDFVITDDHIKALS

SEQ ID NO: 52447 - protein, 74 aa, Artificial sequence
  Protein classification predicting sequence
KINPEVPVDLVIDHSVQVDSYANPEALERNMKLEFERNYERYQFLNWATKAFDNYNAVPPATGIVHQVNLEYLA

SEQ ID NO: 52448 - protein, 9 aa, Artificial sequence
  Protein classification predicting sequence
HQVNLEYLA

SEQ ID NO: 52449 - protein, 47 aa, Artificial sequence
  Protein classification predicting sequence
ELRKKGVVGKFVEFFGPGVQHLPLADRATIANMAPEYGATCGFFPVD

SEQ ID NO: 52450 - protein, 11 aa, Artificial sequence
  Protein classification predicting sequence
ESLKYMKLTGR

SEQ ID NO: 52451 - protein, 13 aa, Artificial sequence
  Protein classification predicting sequence
QNHMFFDVEKEDP

SEQ ID NO: 52452 - protein, 26 aa, Artificial sequence
  Protein classification predicting sequence
LDLSTVEASLSGPKRPQDLIFLSDMK

SEQ ID NO: 52453 - protein, 14 aa, Artificial sequence
  Protein classification predicting sequence
SVTAPAGNQGHGLD

SEQ ID NO: 52454 - protein, 11 aa, Artificial sequence
  Protein classification predicting sequence
SEFDKKAEINF

SEQ ID NO: 52455 - protein, 48 aa, Artificial sequence
  Protein classification predicting sequence
DGSKATMKTGDIAIAAITSCTNTSNPYVMLGAGLVAKKAVEKGLKVPE

SEQ ID NO: 52456 - protein, 31 aa, Artificial sequence
  Protein classification predicting sequence
YLDDLGFNLVGYGCTTCIGNSGPLLPEIEKA

SEQ ID NO: 52457 - protein, 15 aa, Artificial sequence
  Protein classification predicting sequence
PLYDFDPNSTYIQNP

SEQ ID NO: 52458 - protein, 10 aa, Artificial sequence
  Protein classification predicting sequence
FFQGLSKEPG

SEQ ID NO: 52459 - protein, 14 aa, Artificial sequence
  Protein classification predicting sequence
FNSYGSRRGNHEVM

SEQ ID NO: 52460 - protein, 42 aa, Artificial sequence
  Protein classification predicting sequence
FNSYGSRRGNHEVMVRGTFANIRIKNQLAPGTEGGFTTYWPT

SEQ ID NO: 52461 - protein, 63 aa, Artificial sequence
  Protein classification predicting sequence
DAAMKYKEDGTGLVVLAGNDYGMGSSRDWAAKGTNLLGVKTVIAQSYERIHRSNLVMMGVLPL

SEQ ID NO: 52462 - protein, 8 aa, Artificial sequence
  Protein classification predicting sequence
AVPPATGI

SEQ ID NO: 52463 - protein, 13 aa, Artificial sequence
  Protein classification predicting sequence
SYFPIPEVIGVRL

SEQ ID NO: 52464 - protein, 16 aa, Artificial sequence
  Protein classification predicting sequence
AIAAITSCTNTSNPYV

SEQ ID NO: 52465 - protein, 25 aa, Artificial sequence
  Protein classification predicting sequence
GDSVTTDHISPAGNIARNSPAARYL

SEQ ID NO: 52466 - protein, 10 aa, Artificial sequence
  Protein classification predicting sequence
GSSRDWAAKG

SEQ ID NO: 52467 - protein, 9 aa, Artificial sequence
  Protein classification predicting sequence
IVRKRLNRP

SEQ ID NO: 52468 - protein, 6 aa, Artificial sequence
  Protein classification predicting sequence
HCDHLI

SEQ ID NO: 52469 - protein, 7 aa, Artificial sequence
  Protein classification predicting sequence
GWTSPKD

SEQ ID NO: 52470 - protein, 15 aa, Artificial sequence
  Protein classification predicting sequence
TPGSEQIRATIERDG

SEQ ID NO: 52471 - protein, 7 aa, Artificial sequence
  Protein classification predicting sequence
SYNRNFT

SEQ ID NO: 52472 - protein, 6 aa, Artificial sequence
  Protein classification predicting sequence
TTDHIS

SEQ ID NO: 52473 - protein, 8 aa, Artificial sequence
  Protein classification predicting sequence
WVVIGDEN

SEQ ID NO: 52474 - protein, 14 aa, Artificial sequence
  Protein classification predicting sequence
IGGVILFHETLYQK

SEQ ID NO: 52475 - protein, 13 aa, Artificial sequence
  Protein classification predicting sequence
YLEGTLLKPNMVT

SEQ ID NO: 52476 - protein, 143 aa, Artificial sequence
  Protein classification predicting sequence
DIAHRIVAPGKGILAADESTGSIAKRLQSIGTENTEENRRFYRQLLLTADDRVNPCIGGVILFHETLYQKADDGRPFPQVIKSKGGVVGIKVDKGVVPLAGTNGETTTQGLDGLSERCAQYKKDGADFAKWRCVLKIGEHTPS

SEQ ID NO: 52477 - protein, 15 aa, Artificial sequence
  Protein classification predicting sequence
GVTFLSGGQSEEEAS

SEQ ID NO: 52478 - protein, 10 aa, Artificial sequence
  Protein classification predicting sequence
GKGILAADES

SEQ ID NO: 52479 - protein, 12 aa, Artificial sequence
  Protein classification predicting sequence
GKGILAADESVG

SEQ ID NO: 52480 - protein, 21 aa, Artificial sequence
  Protein classification predicting sequence
GKGILAADESVGTMGNRLQRI

SEQ ID NO: 52481 - protein, 8 aa, Artificial sequence
  Protein classification predicting sequence
ETTIQGLD

SEQ ID NO: 52482 - protein, 8 aa, Artificial sequence
  Protein classification predicting sequence
PLPKPWKL

SEQ ID NO: 52483 - protein, 10 aa, Artificial sequence
  Protein classification predicting sequence
FSYGRALQAS

SEQ ID NO: 52484 - protein, 12 aa, Artificial sequence
  Protein classification predicting sequence
FSYGRALQASAL

SEQ ID NO: 52485 - protein, 6 aa, Artificial sequence
  Protein classification predicting sequence
KWRAVL

SEQ ID NO: 52486 - protein, 7 aa, Artificial sequence
  Protein classification predicting sequence
PDGDHDL

SEQ ID NO: 52487 - protein, 10 aa, Artificial sequence
  Protein classification predicting sequence
ATQEAFMKRA

SEQ ID NO: 52488 - protein, 11 aa, Artificial sequence
  Protein classification predicting sequence
EKVLAAVYKAL

SEQ ID NO: 52489 - protein, 15 aa, Artificial sequence
  Protein classification predicting sequence
DHHVYLEGTLLKPNM

SEQ ID NO: 52490 - protein, 32 aa, Artificial sequence
  Protein classification predicting sequence
TAGHACTKKYTPEQVAMATVTALHRTVPAAVP

SEQ ID NO: 52491 - protein, 8 aa, Artificial sequence
  Protein classification predicting sequence
RTVPAAVP

SEQ ID NO: 52492 - protein, 11 aa, Artificial sequence
  Protein classification predicting sequence
APLAGTNKETT

SEQ ID NO: 52493 - protein, 7 aa, Artificial sequence
  Protein classification predicting sequence
LARYASI

SEQ ID NO: 52494 - protein, 9 aa, Artificial sequence
  Protein classification predicting sequence
VPIVEPEIL

SEQ ID NO: 52495 - protein, 8 aa, Artificial sequence
  Protein classification predicting sequence
AMATVTAL

SEQ ID NO: 52496 - protein, 16 aa, Artificial sequence
  Protein classification predicting sequence
KCIGGVIFFHETLYQK

SEQ ID NO: 52497 - protein, 8 aa, Artificial sequence
  Protein classification predicting sequence
FHETLYQK

SEQ ID NO: 52498 - protein, 12 aa, Artificial sequence
  Protein classification predicting sequence
FHETLYQKADDG

SEQ ID NO: 52499 - protein, 7 aa, Artificial sequence
  Protein classification predicting sequence
GIVVGIK

SEQ ID NO: 52500 - protein, 16 aa, Artificial sequence
  Protein classification predicting sequence
VVGIKVDKGVVPLAGT

SEQ ID NO: 52501 - protein, 9 aa, Artificial sequence
  Protein classification predicting sequence
VLAACYKAL

SEQ ID NO: 52502 - protein, 18 aa, Artificial sequence
  Protein classification predicting sequence
EIAMATVTALRRTVPPAV

SEQ ID NO: 52503 - protein, 11 aa, Artificial sequence
  Protein classification predicting sequence
GETTTQGLDGL

SEQ ID NO: 52504 - protein, 11 aa, Artificial sequence
  Protein classification predicting sequence
PGKGILAADES

SEQ ID NO: 52505 - protein, 38 aa, Artificial sequence
  Protein classification predicting sequence
ENANVLARYASICQQNGIVPIVEPEILPDGDHDLKRCQ

SEQ ID NO: 52506 - protein, 40 aa, Artificial sequence
  Protein classification predicting sequence
VTEKVLAAVYKALSDHHVYLEGTLLKPNMVTPGHACPIKY

SEQ ID NO: 52507 - protein, 17 aa, Artificial sequence
  Protein classification predicting sequence
PWALTFSYGRALQASAL

SEQ ID NO: 52508 - protein, 10 aa, Artificial sequence
  Protein classification predicting sequence
DGGAAAQSLY

SEQ ID NO: 52509 - protein, 8 aa, Artificial sequence
  Protein classification predicting sequence
SIGLENTE

SEQ ID NO: 52510 - protein, 8 aa, Artificial sequence
  Protein classification predicting sequence
ENTEENRR

SEQ ID NO: 52511 - protein, 10 aa, Artificial sequence
  Protein classification predicting sequence
NGLVPIVEPE

SEQ ID NO: 52512 - protein, 7 aa, Artificial sequence
  Protein classification predicting sequence
SLFVANH

SEQ ID NO: 52513 - protein, 18 aa, Artificial sequence
  Protein classification predicting sequence
KGFIAALDQSGGSTPKAL

SEQ ID NO: 52514 - protein, 7 aa, Artificial sequence
  Protein classification predicting sequence
KYTADYL

SEQ ID NO: 52515 - protein, 14 aa, Artificial sequence
  Protein classification predicting sequence
RANERHIFGTKMRS

SEQ ID NO: 52516 - protein, 7 aa, Artificial sequence
  Protein classification predicting sequence
PIIEPEV

SEQ ID NO: 52517 - protein, 11 aa, Artificial sequence
  Protein classification predicting sequence
LSGGYSREKAN

SEQ ID NO: 52518 - protein, 8 aa, Artificial sequence
  Protein classification predicting sequence
IASFSRAL

SEQ ID NO: 52519 - protein, 15 aa, Artificial sequence
  Protein classification predicting sequence
GKGILAADESVGTMG

SEQ ID NO: 52520 - protein, 8 aa, Artificial sequence
  Protein classification predicting sequence
RRFYRQLL

SEQ ID NO: 52521 - protein, 15 aa, Artificial sequence
  Protein classification predicting sequence
VGIKVDKGVVPLAGT

SEQ ID NO: 52522 - protein, 10 aa, Artificial sequence
  Protein classification predicting sequence
ENANVLARYA

SEQ ID NO: 52523 - protein, 15 aa, Artificial sequence
  Protein classification predicting sequence
LKAWGGKKENLKAAQ

SEQ ID NO: 52524 - protein, 6 aa, Artificial sequence
  Protein classification predicting sequence
GAILFE

SEQ ID NO: 52525 - protein, 6 aa, Artificial sequence
  Protein classification predicting sequence
ETLYQK

SEQ ID NO: 52526 - protein, 20 aa, Artificial sequence
  Protein classification predicting sequence
AGARFAKWRAVLKIGPNEPS

SEQ ID NO: 52527 - protein, 12 aa, Artificial sequence
  Protein classification predicting sequence
LEGTLLKPNMVT

SEQ ID NO: 52528 - protein, 7 aa, Artificial sequence
  Protein classification predicting sequence
FGTKMRS

SEQ ID NO: 52529 - protein, 16 aa, Artificial sequence
  Protein classification predicting sequence
KEDYRVVMYGARAAAE

SEQ ID NO: 52530 - protein, 12 aa, Artificial sequence
  Protein classification predicting sequence
GADMIKTYWTGS

SEQ ID NO: 52531 - protein, 5 aa, Artificial sequence
  Protein classification predicting sequence
HQDHG

SEQ ID NO: 52532 - protein, 6 aa, Artificial sequence
  Protein classification predicting sequence
DYDYNV

SEQ ID NO: 52533 - protein, 6 aa, Artificial sequence
  Protein classification predicting sequence
RFEAFG

SEQ ID NO: 52534 - protein, 7 aa, Artificial sequence
  Protein classification predicting sequence
FDPRKFL

SEQ ID NO: 52535 - protein, 7 aa, Artificial sequence
  Protein classification predicting sequence
SVEGELG

SEQ ID NO: 52536 - protein, 10 aa, Artificial sequence
  Protein classification predicting sequence
GVRKVNIDTD

SEQ ID NO: 52537 - protein, 8 aa, Artificial sequence
  Protein classification predicting sequence
LVHDMRTR

SEQ ID NO: 52538 - protein, 21 aa, Artificial sequence
  Protein classification predicting sequence
KILGAILFEQTMDREVEGKYT

SEQ ID NO: 52539 - protein, 8 aa, Artificial sequence
  Protein classification predicting sequence
IFGTKMRS

SEQ ID NO: 52540 - protein, 10 aa, Artificial sequence
  Protein classification predicting sequence
GLVPIIEPEV

SEQ ID NO: 52541 - protein, 17 aa, Artificial sequence
  Protein classification predicting sequence
GLVPIIEPEVNINAKDK

SEQ ID NO: 52542 - protein, 76 aa, Artificial sequence
  Protein classification predicting sequence
GKGFIAALDQSGGSTPKALKEYGVNEDQYSNEDEMFQLVHDMRTRVVTSPSFSPDKILGAILFEQTMDREVEGKYT

SEQ ID NO: 52543 - protein, 21 aa, Artificial sequence
  Protein classification predicting sequence
DYLADKGVVPFLKVDKGLAEE

SEQ ID NO: 52544 - protein, 35 aa, Artificial sequence
  Protein classification predicting sequence
LDRANERHIFGTKMRSNILELNEQGIKDVVEQQFE

SEQ ID NO: 52545 - protein, 9 aa, Artificial sequence
  Protein classification predicting sequence
EIEKVLKAE

SEQ ID NO: 52546 - protein, 8 aa, Artificial sequence
  Protein classification predicting sequence
KKGLDSLN

SEQ ID NO: 52547 - protein, 13 aa, Artificial sequence
  Protein classification predicting sequence
DQLVMLKLTIPTE

SEQ ID NO: 52548 - protein, 11 aa, Artificial sequence
  Protein classification predicting sequence
EEFDKALGDAV

SEQ ID NO: 52549 - protein, 8 aa, Artificial sequence
  Protein classification predicting sequence
GVVPLAGT

SEQ ID NO: 52550 - protein, 6 aa, Artificial sequence
  Protein classification predicting sequence
NLNAIN

SEQ ID NO: 52551 - protein, 11 aa, Artificial sequence
  Protein classification predicting sequence
CQYVTEKVLAA

SEQ ID NO: 52552 - protein, 19 aa, Artificial sequence
  Protein classification predicting sequence
KYYEAGARFAKWRAVLKIG

SEQ ID NO: 52553 - protein, 19 aa, Artificial sequence
  Protein classification predicting sequence
ICQENGLVPIVEPEILVDG

SEQ ID NO: 52554 - protein, 9 aa, Artificial sequence
  Protein classification predicting sequence
YKALSDHHV

SEQ ID NO: 52555 - protein, 7 aa, Artificial sequence
  Protein classification predicting sequence
ILFEETL

SEQ ID NO: 52556 - protein, 7 aa, Artificial sequence
  Protein classification predicting sequence
LGSLETG

SEQ ID NO: 52557 - protein, 7 aa, Artificial sequence
  Protein classification predicting sequence
EAFGTAG

SEQ ID NO: 52558 - protein, 37 aa, Artificial sequence
  Protein classification predicting sequence
NNLEFTQAILEASQEENAPVILGVSEGAARYMSGFYT

SEQ ID NO: 52559 - protein, 54 aa, Artificial sequence
  Protein classification predicting sequence
VKMVEGLMHDLNITIPVAIHLDHGSSFEKCKEAIDAGFTSVMIDASHSPFEENV

SEQ ID NO: 52560 - protein, 22 aa, Artificial sequence
  Protein classification predicting sequence
GVSVEAELGTVGGQEDDVVADG

SEQ ID NO: 52561 - protein, 18 aa, Artificial sequence
  Protein classification predicting sequence
IYADPKECQELVEKTGID

SEQ ID NO: 52562 - protein, 27 aa, Artificial sequence
  Protein classification predicting sequence
LAPALGSVHGPYKGEPKLGFKEMEEIG

SEQ ID NO: 52563 - protein, 24 aa, Artificial sequence
  Protein classification predicting sequence
STGLPLVLHGGTGIPTKDIQKAIP

SEQ ID NO: 52564 - protein, 20 aa, Artificial sequence
  Protein classification predicting sequence
GTAKINVNTENQIASAKAVR

SEQ ID NO: 52565 - protein, 23 aa, Artificial sequence
  Protein classification predicting sequence
VYDPRKYLGPAREAIKETVKGKI

SEQ ID NO: 52566 - protein, 8 aa, Artificial sequence
  Protein classification predicting sequence
PGIKVDKG

SEQ ID NO: 52567 - protein, 8 aa, Artificial sequence
  Protein classification predicting sequence
FLSGGQSE

SEQ ID NO: 52568 - protein, 6 aa, Artificial sequence
  Protein classification predicting sequence
QGLDGL

SEQ ID NO: 52569 - protein, 6 aa, Artificial sequence
  Protein classification predicting sequence
PPAVPG

SEQ ID NO: 52570 - protein, 7 aa, Artificial sequence
  Protein classification predicting sequence
LSGGQSE

SEQ ID NO: 52571 - protein, 8 aa, Artificial sequence
  Protein classification predicting sequence
GILAADES

SEQ ID NO: 52572 - protein, 13 aa, Artificial sequence
  Protein classification predicting sequence
YYEAGARFAKWRA

SEQ ID NO: 52573 - protein, 11 aa, Artificial sequence
  Protein classification predicting sequence
FSSHMIDLSEE

SEQ ID NO: 52574 - protein, 6 aa, Artificial sequence
  Protein classification predicting sequence
NINNLE

SEQ ID NO: 52575 - protein, 10 aa, Artificial sequence
  Protein classification predicting sequence
NNLEWTQAIL

SEQ ID NO: 52576 - protein, 14 aa, Artificial sequence
  Protein classification predicting sequence
PVILGVSEGAARYM

SEQ ID NO: 52577 - protein, 12 aa, Artificial sequence
  Protein classification predicting sequence
ITVPVAIHLDHG

SEQ ID NO: 52578 - protein, 16 aa, Artificial sequence
  Protein classification predicting sequence
PVAIHLDHGSSFEKCK

SEQ ID NO: 52579 - protein, 15 aa, Artificial sequence
  Protein classification predicting sequence
AIDAGFTSVMIDASH

SEQ ID NO: 52580 - protein, 9 aa, Artificial sequence
  Protein classification predicting sequence
VGGQEDDVV

SEQ ID NO: 52581 - protein, 8 aa, Artificial sequence
  Protein classification predicting sequence
IYADPKEC

SEQ ID NO: 52582 - protein, 20 aa, Artificial sequence
  Protein classification predicting sequence
LAPALGSVHGPYKGEPKLGF

SEQ ID NO: 52583 - protein, 12 aa, Artificial sequence
  Protein classification predicting sequence
PLVLHGGTGIPT

SEQ ID NO: 52584 - protein, 11 aa, Artificial sequence
  Protein classification predicting sequence
KINVNTENQIA

SEQ ID NO: 52585 - protein, 7 aa, Artificial sequence
  Protein classification predicting sequence
SHMIDLS

SEQ ID NO: 52586 - protein, 8 aa, Artificial sequence
  Protein classification predicting sequence
VFHGGSGS

SEQ ID NO: 52587 - protein, 6 aa, Artificial sequence
  Protein classification predicting sequence
LHTDHC

SEQ ID NO: 52588 - protein, 9 aa, Artificial sequence
  Protein classification predicting sequence
PNKKYYDPR

SEQ ID NO: 52589 - protein, 12 aa, Artificial sequence
  Protein classification predicting sequence
LFSSHMLDLSEE

SEQ ID NO: 52590 - protein, 7 aa, Artificial sequence
  Protein classification predicting sequence
TGGEEDG

SEQ ID NO: 52591 - protein, 13 aa, Artificial sequence
  Protein classification predicting sequence
FGNVHGVYKPGNV

SEQ ID NO: 52592 - protein, 9 aa, Artificial sequence
  Protein classification predicting sequence
ILFEETLYQ

SEQ ID NO: 52593 - protein, 12 aa, Artificial sequence
  Protein classification predicting sequence
AFPAINCTSSET

SEQ ID NO: 52594 - protein, 23 aa, Artificial sequence
  Protein classification predicting sequence
YLLAATFGNVHGVYKPGNVKLRP

SEQ ID NO: 52595 - protein, 9 aa, Artificial sequence
  Protein classification predicting sequence
RCAQYKKDG

SEQ ID NO: 52596 - protein, 11 aa, Artificial sequence
  Protein classification predicting sequence
DFAKWRCVLKI

SEQ ID NO: 52597 - protein, 14 aa, Artificial sequence
  Protein classification predicting sequence
ENANVLARYASICQ

SEQ ID NO: 52598 - protein, 9 aa, Artificial sequence
  Protein classification predicting sequence
LARYASICQ

SEQ ID NO: 52599 - protein, 7 aa, Artificial sequence
  Protein classification predicting sequence
VPIVEPE

SEQ ID NO: 52600 - protein, 9 aa, Artificial sequence
  Protein classification predicting sequence
VLAAVYKAL

SEQ ID NO: 52601 - protein, 17 aa, Artificial sequence
  Protein classification predicting sequence
DHHVYLEGTLLKPNMVT

SEQ ID NO: 52602 - protein, 7 aa, Artificial sequence
  Protein classification predicting sequence
RTVPAAV

SEQ ID NO: 52603 - protein, 14 aa, Artificial sequence
  Protein classification predicting sequence
GVTFLSGGQSEEEA

SEQ ID NO: 52604 - protein, 11 aa, Artificial sequence
  Protein classification predicting sequence
FLSGGQSEEEA

SEQ ID NO: 52605 - protein, 15 aa, Artificial sequence
  Protein classification predicting sequence
PWALTFSYGRALQAS

SEQ ID NO: 52606 - protein, 7 aa, Artificial sequence
  Protein classification predicting sequence
AKKLLPW

SEQ ID NO: 52607 - protein, 12 aa, Artificial sequence
  Protein classification predicting sequence
AGFTSVMIDASH

SEQ ID NO: 52608 - protein, 20 aa, Artificial sequence
  Protein classification predicting sequence
QWLEMEIGITGGEEDGVNNE

SEQ ID NO: 52609 - protein, 9 aa, Artificial sequence
  Protein classification predicting sequence
FGNVHGVYK

SEQ ID NO: 52610 - protein, 6 aa, Artificial sequence
  Protein classification predicting sequence
ETTTQG

SEQ ID NO: 52611 - protein, 7 aa, Artificial sequence
  Protein classification predicting sequence
GRALQAS

SEQ ID NO: 52612 - protein, 5 aa, Artificial sequence
  Protein classification predicting sequence
HLDHG

SEQ ID NO: 52613 - protein, 8 aa, Artificial sequence
  Protein classification predicting sequence
MFDGSHLP

SEQ ID NO: 52614 - protein, 11 aa, Artificial sequence
  Protein classification predicting sequence
EVGTIGGEEDG

SEQ ID NO: 52615 - protein, 8 aa, Artificial sequence
  Protein classification predicting sequence
VLHGGSGI

SEQ ID NO: 52616 - protein, 8 aa, Artificial sequence
  Protein classification predicting sequence
SHMWDGSA

SEQ ID NO: 52617 - protein, 6 aa, Artificial sequence
  Protein classification predicting sequence
GGEEDG

SEQ ID NO: 52618 - protein, 7 aa, Artificial sequence
  Protein classification predicting sequence
PIILQTS

SEQ ID NO: 52619 - protein, 8 aa, Artificial sequence
  Protein classification predicting sequence
FGNVHGVY

SEQ ID NO: 52620 - protein, 9 aa, Artificial sequence
  Protein classification predicting sequence
GAAYFAGKG

SEQ ID NO: 52621 - protein, 8 aa, Artificial sequence
  Protein classification predicting sequence
GARFAKWR

SEQ ID NO: 52622 - protein, 10 aa, Artificial sequence
  Protein classification predicting sequence
ETYGVPVEEI

SEQ ID NO: 52623 - protein, 9 aa, Artificial sequence
  Protein classification predicting sequence
EENRRLYRQ

SEQ ID NO: 52624 - protein, 7 aa, Artificial sequence
  Protein classification predicting sequence
GIKVDKG

SEQ ID NO: 52625 - protein, 7 aa, Artificial sequence
  Protein classification predicting sequence
PWALTFS

SEQ ID NO: 52626 - protein, 10 aa, Artificial sequence
  Protein classification predicting sequence
DHCAKKLLPW

SEQ ID NO: 52627 - protein, 7 aa, Artificial sequence
  Protein classification predicting sequence
PYFSIAA

SEQ ID NO: 52628 - protein, 14 aa, Artificial sequence
  Protein classification predicting sequence
ILAADESTGTIGKR

SEQ ID NO: 52629 - protein, 8 aa, Artificial sequence
  Protein classification predicting sequence
LAILENAN

SEQ ID NO: 52630 - protein, 9 aa, Artificial sequence
  Protein classification predicting sequence
YKALNDHHV

SEQ ID NO: 52631 - protein, 8 aa, Artificial sequence
  Protein classification predicting sequence
FSYGRALQ

SEQ ID NO: 52632 - protein, 7 aa, Artificial sequence
  Protein classification predicting sequence
NSEATLG

SEQ ID NO: 52633 - protein, 8 aa, Artificial sequence
  Protein classification predicting sequence
PAINVTSS

SEQ ID NO: 52634 - protein, 13 aa, Artificial sequence
  Protein classification predicting sequence
ALHTDHCPKDKLD

SEQ ID NO: 52635 - protein, 7 aa, Artificial sequence
  Protein classification predicting sequence
YVRPLLA

SEQ ID NO: 52636 - protein, 12 aa, Artificial sequence
  Protein classification predicting sequence
PFDFVFHGGSGS

SEQ ID NO: 52637 - protein, 6 aa, Artificial sequence
  Protein classification predicting sequence
GVVKMN

SEQ ID NO: 52638 - protein, 13 aa, Artificial sequence
  Protein classification predicting sequence
AIVSAEKFVQAAR

SEQ ID NO: 52639 - protein, 20 aa, Artificial sequence
  Protein classification predicting sequence
APVLIQTSMGAAKYMGGYKV

SEQ ID NO: 52640 - protein, 15 aa, Artificial sequence
  Protein classification predicting sequence
PGFPIVLHGGSGIPD

SEQ ID NO: 52641 - protein, 11 aa, Artificial sequence
  Protein classification predicting sequence
LGVAKVNVNTE

SEQ ID NO: 52642 - protein, 9 aa, Artificial sequence
  Protein classification predicting sequence
YEANEAEYD

SEQ ID NO: 52643 - protein, 11 aa, Artificial sequence
  Protein classification predicting sequence
KKLFDPRKFLA

SEQ ID NO: 52644 - protein, 10 aa, Artificial sequence
  Protein classification predicting sequence
VEERIDVFGS

SEQ ID NO: 52645 - protein, 26 aa, Artificial sequence
  Protein classification predicting sequence
NGYAVGGFNTNNLEWTQAILRAAEAK

SEQ ID NO: 52646 - protein, 51 aa, Artificial sequence
  Protein classification predicting sequence
SVEAEVGTIGGEEDGIIGKGELAPIEDAKAMVETGIDFLAAGIGNIHGPYP

SEQ ID NO: 52647 - protein, 9 aa, Artificial sequence
  Protein classification predicting sequence
EFTQAILEA

SEQ ID NO: 52648 - protein, 7 aa, Artificial sequence
  Protein classification predicting sequence
CPLPRPW

SEQ ID NO: 52649 - protein, 9 aa, Artificial sequence
  Protein classification predicting sequence
NSLAQLGKY

SEQ ID NO: 52650 - protein, 7 aa, Artificial sequence
  Protein classification predicting sequence
QIAFSNA

SEQ ID NO: 52651 - protein, 8 aa, Artificial sequence
  Protein classification predicting sequence
SVMMDGSL

SEQ ID NO: 52652 - protein, 17 aa, Artificial sequence
  Protein classification predicting sequence
AIGTSHGAYKFTRKPTG

SEQ ID NO: 52653 - protein, 14 aa, Artificial sequence
  Protein classification predicting sequence
NHTGKSMRKWALGS

SEQ ID NO: 52654 - protein, 10 aa, Artificial sequence
  Protein classification predicting sequence
FAQANGVDLR

SEQ ID NO: 52655 - protein, 7 aa, Artificial sequence
  Protein classification predicting sequence
SKYEGSD

SEQ ID NO: 52656 - protein, 8 aa, Artificial sequence
  Protein classification predicting sequence
VLAGVKDP

SEQ ID NO: 52657 - protein, 7 aa, Artificial sequence
  Protein classification predicting sequence
KRRQRAL

SEQ ID NO: 52658 - protein, 12 aa, Artificial sequence
  Protein classification predicting sequence
RSKNVGWRLDYF

SEQ ID NO: 52659 - protein, 12 aa, Artificial sequence
  Protein classification predicting sequence
LHTARSRNDQVA

SEQ ID NO: 52660 - protein, 10 aa, Artificial sequence
  Protein classification predicting sequence
TVMPGFTHLQ

SEQ ID NO: 52661 - protein, 7 aa, Artificial sequence
  Protein classification predicting sequence
KGLPLAY

SEQ ID NO: 52662 - protein, 6 aa, Artificial sequence
  Protein classification predicting sequence
AHHVTG

SEQ ID NO: 52663 - protein, 13 aa, Artificial sequence
  Protein classification predicting sequence
SNQMWGGRFASGP

SEQ ID NO: 52664 - protein, 8 aa, Artificial sequence
  Protein classification predicting sequence
TVMPGFTH

SEQ ID NO: 52665 - protein, 17 aa, Artificial sequence
  Protein classification predicting sequence
AQPVTFGHHCMAYVEMF

SEQ ID NO: 52666 - protein, 6 aa, Artificial sequence
  Protein classification predicting sequence
AYVEMF

SEQ ID NO: 52667 - protein, 15 aa, Artificial sequence
  Protein classification predicting sequence
FSTGSSIMPQKKNPD

SEQ ID NO: 52668 - protein, 7 aa, Artificial sequence
  Protein classification predicting sequence
TATDLAD

SEQ ID NO: 52669 - protein, 6 aa, Artificial sequence
  Protein classification predicting sequence
AELLGF

SEQ ID NO: 52670 - protein, 6 aa, Artificial sequence
  Protein classification predicting sequence
PFREAH

SEQ ID NO: 52671 - protein, 6 aa, Artificial sequence
  Protein classification predicting sequence
LWGGRF

SEQ ID NO: 52672 - protein, 10 aa, Artificial sequence
  Protein classification predicting sequence
LRAGRSRNDQ

SEQ ID NO: 52673 - protein, 6 aa, Artificial sequence
  Protein classification predicting sequence
RSRNDQ

SEQ ID NO: 52674 - protein, 6 aa, Artificial sequence
  Protein classification predicting sequence
GHHLMA

SEQ ID NO: 52675 - protein, 21 aa, Artificial sequence
  Protein classification predicting sequence
STGSSIMPQKKNPDVAELTRG

SEQ ID NO: 52676 - protein, 8 aa, Artificial sequence
  Protein classification predicting sequence
MPGFTHLQ

SEQ ID NO: 52677 - protein, 5 aa, Artificial sequence
  Protein classification predicting sequence
AWFEM

SEQ ID NO: 52678 - protein, 8 aa, Artificial sequence
  Protein classification predicting sequence
GTTYPIDR

SEQ ID NO: 52679 - protein, 7 aa, Artificial sequence
  Protein classification predicting sequence
LWTSAQF

SEQ ID NO: 52680 - protein, 6 aa, Artificial sequence
  Protein classification predicting sequence
ELIRGK

SEQ ID NO: 52681 - protein, 10 aa, Artificial sequence
  Protein classification predicting sequence
TATDLADYLV

SEQ ID NO: 52682 - protein, 9 aa, Artificial sequence
  Protein classification predicting sequence
ATDLADYLV

SEQ ID NO: 52683 - protein, 7 aa, Artificial sequence
  Protein classification predicting sequence
AHEIVGK

SEQ ID NO: 52684 - protein, 6 aa, Artificial sequence
  Protein classification predicting sequence
AHHLLA

SEQ ID NO: 52685 - protein, 7 aa, Artificial sequence
  Protein classification predicting sequence
AHHLLAY

SEQ ID NO: 52686 - protein, 10 aa, Artificial sequence
  Protein classification predicting sequence
VSDRDFAIEF

SEQ ID NO: 52687 - protein, 10 aa, Artificial sequence
  Protein classification predicting sequence
AVTQDFSNAT

SEQ ID NO: 52688 - protein, 7 aa, Artificial sequence
  Protein classification predicting sequence
GVPFREA

SEQ ID NO: 52689 - protein, 10 aa, Artificial sequence
  Protein classification predicting sequence
RDFIIEFLSN

SEQ ID NO: 52690 - protein, 6 aa, Artificial sequence
  Protein classification predicting sequence
HHLLAY

SEQ ID NO: 52691 - protein, 11 aa, Artificial sequence
  Protein classification predicting sequence
SSIMPQKKNPD

SEQ ID NO: 52692 - protein, 7 aa, Artificial sequence
  Protein classification predicting sequence
DVPLATY

SEQ ID NO: 52693 - protein, 12 aa, Artificial sequence
  Protein classification predicting sequence
YENSLDAVSDRD

SEQ ID NO: 52694 - protein, 13 aa, Artificial sequence
  Protein classification predicting sequence
AHVTMLAKQGIVT

SEQ ID NO: 52695 - protein, 14 aa, Artificial sequence
  Protein classification predicting sequence
EEAEKIKIGLQYLL

SEQ ID NO: 52696 - protein, 10 aa, Artificial sequence
  Protein classification predicting sequence
AHEIVGKLVL

SEQ ID NO: 52697 - protein, 8 aa, Artificial sequence
  Protein classification predicting sequence
CTQKGIYL

SEQ ID NO: 52698 - protein, 7 aa, Artificial sequence
  Protein classification predicting sequence
EFLSNSS

SEQ ID NO: 52699 - protein, 15 aa, Artificial sequence
  Protein classification predicting sequence
LMMHLSRFCEELILW

SEQ ID NO: 52700 - protein, 8 aa, Artificial sequence
  Protein classification predicting sequence
ADYLASKG

SEQ ID NO: 52701 - protein, 12 aa, Artificial sequence
  Protein classification predicting sequence
NEDIHLNIEKLL

SEQ ID NO: 52702 - protein, 11 aa, Artificial sequence
  Protein classification predicting sequence
PGYTHLQRAQP

SEQ ID NO: 52703 - protein, 6 aa, Artificial sequence
  Protein classification predicting sequence
QEDKEG

SEQ ID NO: 52704 - protein, 6 aa, Artificial sequence
  Protein classification predicting sequence
GMIQTM

SEQ ID NO: 52705 - protein, 36 aa, Artificial sequence
  Protein classification predicting sequence
DLYEVLSPYAAVKRRNSAGGTGFEQIEKALEKAKGL

SEQ ID NO: 52706 - protein, 8 aa, Artificial sequence
  Protein classification predicting sequence
YSAELLGF

SEQ ID NO: 52707 - protein, 6 aa, Artificial sequence
  Protein classification predicting sequence
VSDRDF

SEQ ID NO: 52708 - protein, 8 aa, Artificial sequence
  Protein classification predicting sequence
MPQKKNPD

SEQ ID NO: 52709 - protein, 16 aa, Artificial sequence
  Protein classification predicting sequence
MPQKKNPDMAELIRGK

SEQ ID NO: 52710 - protein, 7 aa, Artificial sequence
  Protein classification predicting sequence
AELIRGK

SEQ ID NO: 52711 - protein, 11 aa, Artificial sequence
  Protein classification predicting sequence
MKGLPLAYNKD

SEQ ID NO: 52712 - protein, 28 aa, Artificial sequence
  Protein classification predicting sequence
MKGLPLAYNKDLQEDKEGMFDTVKTVEG

SEQ ID NO: 52713 - protein, 12 aa, Artificial sequence
  Protein classification predicting sequence
DFSNATELADYL

SEQ ID NO: 52714 - protein, 8 aa, Artificial sequence
  Protein classification predicting sequence
ALERGLID

SEQ ID NO: 52715 - protein, 8 aa, Artificial sequence
  Protein classification predicting sequence
AQPVLLAH

SEQ ID NO: 52716 - protein, 6 aa, Artificial sequence
  Protein classification predicting sequence
SRLSEE

SEQ ID NO: 52717 - protein, 14 aa, Artificial sequence
  Protein classification predicting sequence
STGSSIMPQKKNPD

SEQ ID NO: 52718 - protein, 7 aa, Artificial sequence
  Protein classification predicting sequence
GLLATLK

SEQ ID NO: 52719 - protein, 6 aa, Artificial sequence
  Protein classification predicting sequence
IMEEIN

SEQ ID NO: 52720 - protein, 7 aa, Artificial sequence
  Protein classification predicting sequence
SRFAEEI

SEQ ID NO: 52721 - protein, 7 aa, Artificial sequence
  Protein classification predicting sequence
AEEIVIW

SEQ ID NO: 52722 - protein, 6 aa, Artificial sequence
  Protein classification predicting sequence
EDIHSW

SEQ ID NO: 52723 - protein, 9 aa, Artificial sequence
  Protein classification predicting sequence
HTGRSRNDQ

SEQ ID NO: 52724 - protein, 7 aa, Artificial sequence
  Protein classification predicting sequence
TDLKLWC

SEQ ID NO: 52725 - protein, 8 aa, Artificial sequence
  Protein classification predicting sequence
ADYLVKKG

SEQ ID NO: 52726 - protein, 13 aa, Artificial sequence
  Protein classification predicting sequence
GKKLHTGRSRNDQ

SEQ ID NO: 52727 - protein, 5 aa, Artificial sequence
  Protein classification predicting sequence
WCLAY

SEQ ID NO: 52728 - protein, 9 aa, Artificial sequence
  Protein classification predicting sequence
YNKDMQEDK

SEQ ID NO: 52729 - protein, 7 aa, Artificial sequence
  Protein classification predicting sequence
PGFTHLQ

SEQ ID NO: 52730 - protein, 21 aa, Artificial sequence
  Protein classification predicting sequence
RVNRLPLGAAALAGTSYPIDR

SEQ ID NO: 52731 - protein, 14 aa, Artificial sequence
  Protein classification predicting sequence
QPLAYNKDNQEDKE

SEQ ID NO: 52732 - protein, 7 aa, Artificial sequence
  Protein classification predicting sequence
KLWGGRF

SEQ ID NO: 52733 - protein, 6 aa, Artificial sequence
  Protein classification predicting sequence
AQPIRW

SEQ ID NO: 52734 - protein, 6 aa, Artificial sequence
  Protein classification predicting sequence
AHARML

SEQ ID NO: 52735 - protein, 7 aa, Artificial sequence
  Protein classification predicting sequence
NSLDSVS

SEQ ID NO: 52736 - protein, 12 aa, Artificial sequence
  Protein classification predicting sequence
DEDIHTANERRL

SEQ ID NO: 52737 - protein, 12 aa, Artificial sequence
  Protein classification predicting sequence
GSSLMPQKKNPD

SEQ ID NO: 52738 - protein, 6 aa, Artificial sequence
  Protein classification predicting sequence
YLVRKG

SEQ ID NO: 52739 - protein, 14 aa, Artificial sequence
  Protein classification predicting sequence
YLVRKGVPFRETHH

SEQ ID NO: 52740 - protein, 6 aa, Artificial sequence
  Protein classification predicting sequence
DEDIHT

SEQ ID NO: 52741 - protein, 7 aa, Artificial sequence
  Protein classification predicting sequence
RLKELIG

SEQ ID NO: 52742 - protein, 10 aa, Artificial sequence
  Protein classification predicting sequence
GYTHLQRAQP

SEQ ID NO: 52743 - protein, 7 aa, Artificial sequence
  Protein classification predicting sequence
DAVSDRD

SEQ ID NO: 52744 - protein, 11 aa, Artificial sequence
  Protein classification predicting sequence
TGSSIMPQKKN

SEQ ID NO: 52745 - protein, 6 aa, Artificial sequence
  Protein classification predicting sequence
LAYVEM

SEQ ID NO: 52746 - protein, 15 aa, Artificial sequence
  Protein classification predicting sequence
RVNRLPLGAAALAGT

SEQ ID NO: 52747 - protein, 10 aa, Artificial sequence
  Protein classification predicting sequence
PLGAAALAGT

SEQ ID NO: 52748 - protein, 15 aa, Artificial sequence
  Protein classification predicting sequence
NSLDAVSDRDFAIEF

SEQ ID NO: 52749 - protein, 7 aa, Artificial sequence
  Protein classification predicting sequence
RGKSGRV

SEQ ID NO: 52750 - protein, 6 aa, Artificial sequence
  Protein classification predicting sequence
QPLAYN

SEQ ID NO: 52751 - protein, 6 aa, Artificial sequence
  Protein classification predicting sequence
AHVKML

SEQ ID NO: 52752 - protein, 6 aa, Artificial sequence
  Protein classification predicting sequence
MMHLSR

SEQ ID NO: 52753 - protein, 10 aa, Artificial sequence
  Protein classification predicting sequence
HLSRLSEELI

SEQ ID NO: 52754 - protein, 8 aa, Artificial sequence
  Protein classification predicting sequence
KDMQEDKE

SEQ ID NO: 52755 - protein, 6 aa, Artificial sequence
  Protein classification predicting sequence
EEIIIW

SEQ ID NO: 52756 - protein, 9 aa, Artificial sequence
  Protein classification predicting sequence
QEDKEALFD

SEQ ID NO: 52757 - protein, 6 aa, Artificial sequence
  Protein classification predicting sequence
AHEIVG

SEQ ID NO: 52758 - protein, 13 aa, Artificial sequence
  Protein classification predicting sequence
SPYGSGALAGSSL

SEQ ID NO: 52759 - protein, 6 aa, Artificial sequence
  Protein classification predicting sequence
RGKTGR

SEQ ID NO: 52760 - protein, 7 aa, Artificial sequence
  Protein classification predicting sequence
GRLIGNL

SEQ ID NO: 52761 - protein, 7 aa, Artificial sequence
  Protein classification predicting sequence
GYSTATD

SEQ ID NO: 52762 - protein, 6 aa, Artificial sequence
  Protein classification predicting sequence
AHHIVG

SEQ ID NO: 52763 - protein, 9 aa, Artificial sequence
  Protein classification predicting sequence
AALAGTTYP

SEQ ID NO: 52764 - protein, 6 aa, Artificial sequence
  Protein classification predicting sequence
QEDKEP

SEQ ID NO: 52765 - protein, 6 aa, Artificial sequence
  Protein classification predicting sequence
IMAGML

SEQ ID NO: 52766 - protein, 6 aa, Artificial sequence
  Protein classification predicting sequence
WSKALV

SEQ ID NO: 52767 - protein, 27 aa, Artificial sequence
  Protein classification predicting sequence
NQDAVMPGYTHLQRAQPVTFAHWCLAY

SEQ ID NO: 52768 - protein, 6 aa, Artificial sequence
  Protein classification predicting sequence
RDESRL

SEQ ID NO: 52769 - protein, 19 aa, Artificial sequence
  Protein classification predicting sequence
LKRLDVSPLGCGALAGTAY

SEQ ID NO: 52770 - protein, 7 aa, Artificial sequence
  Protein classification predicting sequence
IDREQLA

SEQ ID NO: 52771 - protein, 13 aa, Artificial sequence
  Protein classification predicting sequence
WLGFASATRNSLD

SEQ ID NO: 52772 - protein, 12 aa, Artificial sequence
  Protein classification predicting sequence
VSDRDHVLELLS

SEQ ID NO: 52773 - protein, 9 aa, Artificial sequence
  Protein classification predicting sequence
GIQVKRPRC

SEQ ID NO: 52774 - protein, 7 aa, Artificial sequence
  Protein classification predicting sequence
TELADYL

SEQ ID NO: 52775 - protein, 33 aa, Artificial sequence
  Protein classification predicting sequence
TELADYLVAKGVPFREAHHIVGEAVVEAIRQGK

SEQ ID NO: 52776 - protein, 8 aa, Artificial sequence
  Protein classification predicting sequence
LQSCLDKR

SEQ ID NO: 52777 - protein, 9 aa, Artificial sequence
  Protein classification predicting sequence
GGVSPQQVA

SEQ ID NO: 52778 - protein, 7 aa, Artificial sequence
  Protein classification predicting sequence
VSDRDFI

SEQ ID NO: 52779 - protein, 12 aa, Artificial sequence
  Protein classification predicting sequence
AHEIVGKLVLHC

SEQ ID NO: 52780 - protein, 16 aa, Artificial sequence
  Protein classification predicting sequence
AGKRLHTGRSRNDQVA

SEQ ID NO: 52781 - protein, 12 aa, Artificial sequence
  Protein classification predicting sequence
LHTGRSRNDQVA

SEQ ID NO: 52782 - protein, 7 aa, Artificial sequence
  Protein classification predicting sequence
GFSTATD

SEQ ID NO: 52783 - protein, 7 aa, Artificial sequence
  Protein classification predicting sequence
RLVELVG

SEQ ID NO: 52784 - protein, 11 aa, Artificial sequence
  Protein classification predicting sequence
ENSLDAVSDRD

SEQ ID NO: 52785 - protein, 17 aa, Artificial sequence
  Protein classification predicting sequence
KGLPLAYNKDLQEDKEG

SEQ ID NO: 52786 - protein, 7 aa, Artificial sequence
  Protein classification predicting sequence
LEAMTIL

SEQ ID NO: 52787 - protein, 12 aa, Artificial sequence
  Protein classification predicting sequence
FNDSLRFDYRLA

SEQ ID NO: 52788 - protein, 9 aa, Artificial sequence
  Protein classification predicting sequence
AEDIHSWVE

SEQ ID NO: 52789 - protein, 21 aa, Artificial sequence
  Protein classification predicting sequence
ELSDRVTSGSSLMPQKKNPDA

SEQ ID NO: 52790 - protein, 9 aa, Artificial sequence
  Protein classification predicting sequence
MPQKKNPDA

SEQ ID NO: 52791 - protein, 8 aa, Artificial sequence
  Protein classification predicting sequence
RSRNDQVA

SEQ ID NO: 52792 - protein, 5 aa, Artificial sequence
  Protein classification predicting sequence
KLWCK

SEQ ID NO: 52793 - protein, 6 aa, Artificial sequence
  Protein classification predicting sequence
FNSGEA

SEQ ID NO: 52794 - protein, 7 aa, Artificial sequence
  Protein classification predicting sequence
FDALDTW

SEQ ID NO: 52795 - protein, 6 aa, Artificial sequence
  Protein classification predicting sequence
HHIVGE

SEQ ID NO: 52796 - protein, 8 aa, Artificial sequence
  Protein classification predicting sequence
HTARSRND

SEQ ID NO: 52797 - protein, 6 aa, Artificial sequence
  Protein classification predicting sequence
GGKLHT

SEQ ID NO: 52798 - protein, 6 aa, Artificial sequence
  Protein classification predicting sequence
VMKGLP

SEQ ID NO: 52799 - protein, 7 aa, Artificial sequence
  Protein classification predicting sequence
EEFGASI

SEQ ID NO: 52800 - protein, 6 aa, Artificial sequence
  Protein classification predicting sequence
EDIHMN

SEQ ID NO: 52801 - protein, 10 aa, Artificial sequence
  Protein classification predicting sequence
RSRNDQVVTD

SEQ ID NO: 52802 - protein, 6 aa, Artificial sequence
  Protein classification predicting sequence
TDMHLY

SEQ ID NO: 52803 - protein, 11 aa, Artificial sequence
  Protein classification predicting sequence
ALAGTTFPIDR

SEQ ID NO: 52804 - protein, 7 aa, Artificial sequence
  Protein classification predicting sequence
GIYLQDV

SEQ ID NO: 52805 - protein, 9 aa, Artificial sequence
  Protein classification predicting sequence
FGASISFDQ

SEQ ID NO: 52806 - protein, 13 aa, Artificial sequence
  Protein classification predicting sequence
GELEFSTVNEDIH

SEQ ID NO: 52807 - protein, 11 aa, Artificial sequence
  Protein classification predicting sequence
LHTARSRNDQV

SEQ ID NO: 52808 - protein, 14 aa, Artificial sequence
  Protein classification predicting sequence
LHTARSRNDQVATD

SEQ ID NO: 52809 - protein, 15 aa, Artificial sequence
  Protein classification predicting sequence
ALAGTTFPIDREYSA

SEQ ID NO: 52810 - protein, 7 aa, Artificial sequence
  Protein classification predicting sequence
IVGKLVL

SEQ ID NO: 52811 - protein, 6 aa, Artificial sequence
  Protein classification predicting sequence
STHFDW

SEQ ID NO: 52812 - protein, 7 aa, Artificial sequence
  Protein classification predicting sequence
AGSRAHA

SEQ ID NO: 52813 - protein, 13 aa, Artificial sequence
  Protein classification predicting sequence
PGRTHLQHAQPVL

SEQ ID NO: 52814 - protein, 18 aa, Artificial sequence
  Protein classification predicting sequence
PLAYNRDLQEDKEPVFDS

SEQ ID NO: 52815 - protein, 8 aa, Artificial sequence
  Protein classification predicting sequence
GGTAPERV

SEQ ID NO: 52816 - protein, 9 aa, Artificial sequence
  Protein classification predicting sequence
LKGLPSTYN

SEQ ID NO: 52817 - protein, 16 aa, Artificial sequence
  Protein classification predicting sequence
RSRNDQVATDMHLYLK

SEQ ID NO: 52818 - protein, 6 aa, Artificial sequence
  Protein classification predicting sequence
EELILW

SEQ ID NO: 52819 - protein, 5 aa, Artificial sequence
  Protein classification predicting sequence
SFAHH

SEQ ID NO: 52820 - protein, 6 aa, Artificial sequence
  Protein classification predicting sequence
AYVEML

SEQ ID NO: 52821 - protein, 6 aa, Artificial sequence
  Protein classification predicting sequence
PFRTAH

SEQ ID NO: 52822 - protein, 9 aa, Artificial sequence
  Protein classification predicting sequence
AQPVTFGHH

SEQ ID NO: 52823 - protein, 12 aa, Artificial sequence
  Protein classification predicting sequence
QVLTLEGSVAAR

SEQ ID NO: 52824 - protein, 6 aa, Artificial sequence
  Protein classification predicting sequence
AQPVTF

SEQ ID NO: 52825 - protein, 6 aa, Artificial sequence
  Protein classification predicting sequence
YNRDLQ

SEQ ID NO: 52826 - protein, 9 aa, Artificial sequence
  Protein classification predicting sequence
SRNDQVATD

SEQ ID NO: 52827 - protein, 8 aa, Artificial sequence
  Protein classification predicting sequence
RLQDTLKR

SEQ ID NO: 52828 - protein, 7 aa, Artificial sequence
  Protein classification predicting sequence
YNRDLQE

SEQ ID NO: 52829 - protein, 12 aa, Artificial sequence
  Protein classification predicting sequence
EEQRDGLLAGLD

SEQ ID NO: 52830 - protein, 7 aa, Artificial sequence
  Protein classification predicting sequence
DVADGSF

SEQ ID NO: 52831 - protein, 11 aa, Artificial sequence
  Protein classification predicting sequence
LAPAGYTLATD

SEQ ID NO: 52832 - protein, 7 aa, Artificial sequence
  Protein classification predicting sequence
LWGGRFA

SEQ ID NO: 52833 - protein, 16 aa, Artificial sequence
  Protein classification predicting sequence
LLAHHLLAHAHPLLRD

SEQ ID NO: 52834 - protein, 15 aa, Artificial sequence
  Protein classification predicting sequence
WSTGSSIMPQKKNPD

SEQ ID NO: 52835 - protein, 17 aa, Artificial sequence
  Protein classification predicting sequence
PLAYNRDLQEDKEPVFD

SEQ ID NO: 52836 - protein, 6 aa, Artificial sequence
  Protein classification predicting sequence
GSLAHA

SEQ ID NO: 52837 - protein, 9 aa, Artificial sequence
  Protein classification predicting sequence
ADCRRRVNR

SEQ ID NO: 52838 - protein, 8 aa, Artificial sequence
  Protein classification predicting sequence
HLSRLSEE

SEQ ID NO: 52839 - protein, 8 aa, Artificial sequence
  Protein classification predicting sequence
LFDTADTL

SEQ ID NO: 52840 - protein, 6 aa, Artificial sequence
  Protein classification predicting sequence
MVHLSR

SEQ ID NO: 52841 - protein, 9 aa, Artificial sequence
  Protein classification predicting sequence
GGTAPEQVR

SEQ ID NO: 52842 - protein, 10 aa, Artificial sequence
  Protein classification predicting sequence
RSRNDQVATD

SEQ ID NO: 52843 - protein, 12 aa, Artificial sequence
  Protein classification predicting sequence
NGHLVALLTLMK

SEQ ID NO: 52844 - protein, 25 aa, Artificial sequence
  Protein classification predicting sequence
DFDKRAAVSPYGSGALAGSSLGLDP

SEQ ID NO: 52845 - protein, 19 aa, Artificial sequence
  Protein classification predicting sequence
AVSPYGSGALAGSSLGLDP

SEQ ID NO: 52846 - protein, 9 aa, Artificial sequence
  Protein classification predicting sequence
AMIAVDLSR

SEQ ID NO: 52847 - protein, 37 aa, Artificial sequence
  Protein classification predicting sequence
GLLATLKAQPLAYNRDLQEDKEPVFDSVAQLELLLPA

SEQ ID NO: 52848 - protein, 6 aa, Artificial sequence
  Protein classification predicting sequence
GLEQIR

SEQ ID NO: 52849 - protein, 9 aa, Artificial sequence
  Protein classification predicting sequence
GSLAHVAML

SEQ ID NO: 52850 - protein, 11 aa, Artificial sequence
  Protein classification predicting sequence
MAALVLDGIQV

SEQ ID NO: 52851 - protein, 9 aa, Artificial sequence
  Protein classification predicting sequence
GSVAWSKAL

SEQ ID NO: 52852 - protein, 7 aa, Artificial sequence
  Protein classification predicting sequence
NPQAILQ

SEQ ID NO: 52853 - protein, 7 aa, Artificial sequence
  Protein classification predicting sequence
HLSRFAE

SEQ ID NO: 52854 - protein, 17 aa, Artificial sequence
  Protein classification predicting sequence
WLDCLHMAALVLDGIQV

SEQ ID NO: 52855 - protein, 7 aa, Artificial sequence
  Protein classification predicting sequence
ALWGGRF

SEQ ID NO: 52856 - protein, 14 aa, Artificial sequence
  Protein classification predicting sequence
ALWGGRFSGGPSEA

SEQ ID NO: 52857 - protein, 13 aa, Artificial sequence
  Protein classification predicting sequence
GGRLRAGRSRNDQ

SEQ ID NO: 52858 - protein, 7 aa, Artificial sequence
  Protein classification predicting sequence
LSRLSEE

SEQ ID NO: 52859 - protein, 22 aa, Artificial sequence
  Protein classification predicting sequence
STGSSIMPQKKNPDIAELARGK

SEQ ID NO: 52860 - protein, 12 aa, Artificial sequence
  Protein classification predicting sequence
AEWLVRQGVPFR

SEQ ID NO: 52861 - protein, 8 aa, Artificial sequence
  Protein classification predicting sequence
LTPQVREV

SEQ ID NO: 52862 - protein, 11 aa, Artificial sequence
  Protein classification predicting sequence
NSLDAVSDRDF

SEQ ID NO: 52863 - protein, 9 aa, Artificial sequence
  Protein classification predicting sequence
LIMTHISRL

SEQ ID NO: 52864 - protein, 6 aa, Artificial sequence
  Protein classification predicting sequence
DFSNAT

SEQ ID NO: 52865 - protein, 6 aa, Artificial sequence
  Protein classification predicting sequence
KNIPFR

SEQ ID NO: 52866 - protein, 11 aa, Artificial sequence
  Protein classification predicting sequence
EDVHFAVERRL

SEQ ID NO: 52867 - protein, 7 aa, Artificial sequence
  Protein classification predicting sequence
LAHHLLA

SEQ ID NO: 52868 - protein, 6 aa, Artificial sequence
  Protein classification predicting sequence
WASEEF

SEQ ID NO: 52869 - protein, 6 aa, Artificial sequence
  Protein classification predicting sequence
VPFREA

SEQ ID NO: 52870 - protein, 14 aa, Artificial sequence
  Protein classification predicting sequence
LHTGRSRNDQVATD

SEQ ID NO: 52871 - protein, 7 aa, Artificial sequence
  Protein classification predicting sequence
HIGGTAP

SEQ ID NO: 52872 - protein, 6 aa, Artificial sequence
  Protein classification predicting sequence
SPLGAG

SEQ ID NO: 52873 - protein, 9 aa, Artificial sequence
  Protein classification predicting sequence
PDSHVSTSS

SEQ ID NO: 52874 - protein, 11 aa, Artificial sequence
  Protein classification predicting sequence
SDLVKRYTASV

SEQ ID NO: 52875 - protein, 7 aa, Artificial sequence
  Protein classification predicting sequence
MLAKQGI

SEQ ID NO: 52876 - protein, 26 aa, Artificial sequence
  Protein classification predicting sequence
GDAGKRLHTGRSRNDQVATDIRLWLR

SEQ ID NO: 52877 - protein, 19 aa, Artificial sequence
  Protein classification predicting sequence
LGFDGVCRNSLDAVSDRDF

SEQ ID NO: 52878 - protein, 18 aa, Artificial sequence
  Protein classification predicting sequence
QPLAYNKDNQEDKEPLFD

SEQ ID NO: 52879 - protein, 17 aa, Artificial sequence
  Protein classification predicting sequence
DEDIHTANERRLKELIG

SEQ ID NO: 52880 - protein, 6 aa, Artificial sequence
  Protein classification predicting sequence
LNSMDA

SEQ ID NO: 52881 - protein, 12 aa, Artificial sequence
  Protein classification predicting sequence
LNSMDATSERDF

SEQ ID NO: 52882 - protein, 6 aa, Artificial sequence
  Protein classification predicting sequence
YSTGSS

SEQ ID NO: 52883 - protein, 18 aa, Artificial sequence
  Protein classification predicting sequence
LKGLPSTYNKDLQEDKEA

SEQ ID NO: 52884 - protein, 8 aa, Artificial sequence
  Protein classification predicting sequence
GVISTLQI

SEQ ID NO: 52885 - protein, 6 aa, Artificial sequence
  Protein classification predicting sequence
PFRQAH

SEQ ID NO: 52886 - protein, 8 aa, Artificial sequence
  Protein classification predicting sequence
MVDRAEAE

SEQ ID NO: 52887 - protein, 31 aa, Artificial sequence
  Protein classification predicting sequence
VLFPGYTHLQRAQPIRWSHWILSHAVALTRD

SEQ ID NO: 52888 - protein, 31 aa, Artificial sequence
  Protein classification predicting sequence
FVQLSDAYSTGSSLMPQKKNPDSLELIRSKA

SEQ ID NO: 52889 - protein, 38 aa, Artificial sequence
  Protein classification predicting sequence
RVFGRCAGLLMTLKGLPSTYNKDLQEDKEAVFEVSDTM

SEQ ID NO: 52890 - protein, 34 aa, Artificial sequence
  Protein classification predicting sequence
QALSPDMLATDLAYYLVRKGMPFRQAHEASGKAV

SEQ ID NO: 52891 - protein, 9 aa, Artificial sequence
  Protein classification predicting sequence
TGSSIMPQK

SEQ ID NO: 52892 - protein, 7 aa, Artificial sequence
  Protein classification predicting sequence
ALAGTTF

SEQ ID NO: 52893 - protein, 10 aa, Artificial sequence
  Protein classification predicting sequence
AELARGKSGR

SEQ ID NO: 52894 - protein, 8 aa, Artificial sequence
  Protein classification predicting sequence
MLAAQGII

SEQ ID NO: 52895 - protein, 10 aa, Artificial sequence
  Protein classification predicting sequence
GSSLMPQKKN

SEQ ID NO: 52896 - protein, 9 aa, Artificial sequence
  Protein classification predicting sequence
QEDKEPLFD

SEQ ID NO: 52897 - protein, 11 aa, Artificial sequence
  Protein classification predicting sequence
QLEEALNVLLE

SEQ ID NO: 52898 - protein, 44 aa, Artificial sequence
  Protein classification predicting sequence
SDAEDIHSWVEGKLIDKVGQLGKKLHTGRSRNDQVATDLKLWCK

SEQ ID NO: 52899 - protein, 18 aa, Artificial sequence
  Protein classification predicting sequence
ELLTANRQLQSALVETAQ

SEQ ID NO: 52900 - protein, 17 aa, Artificial sequence
  Protein classification predicting sequence
IGMVHLSRFAEDLIFFN

SEQ ID NO: 52901 - protein, 7 aa, Artificial sequence
  Protein classification predicting sequence
AKGGVSP

SEQ ID NO: 52902 - protein, 9 aa, Artificial sequence
  Protein classification predicting sequence
GSMAYAKAL

SEQ ID NO: 52903 - protein, 8 aa, Artificial sequence
  Protein classification predicting sequence
HTANERRL

SEQ ID NO: 52904 - protein, 9 aa, Artificial sequence
  Protein classification predicting sequence
PLGAGALAG

SEQ ID NO: 52905 - protein, 10 aa, Artificial sequence
  Protein classification predicting sequence
YNKDLQEDKE

SEQ ID NO: 52906 - protein, 7 aa, Artificial sequence
  Protein classification predicting sequence
DLQEDKE

SEQ ID NO: 52907 - protein, 6 aa, Artificial sequence
  Protein classification predicting sequence
AEDIHS

SEQ ID NO: 52908 - protein, 10 aa, Artificial sequence
  Protein classification predicting sequence
NSLDSVSDRD

SEQ ID NO: 52909 - protein, 14 aa, Artificial sequence
  Protein classification predicting sequence
AEDLIFFNTGEAGF

SEQ ID NO: 52910 - protein, 10 aa, Artificial sequence
  Protein classification predicting sequence
NATELADYLV

SEQ ID NO: 52911 - protein, 8 aa, Artificial sequence
  Protein classification predicting sequence
EDIHLNIE

SEQ ID NO: 52912 - protein, 13 aa, Artificial sequence
  Protein classification predicting sequence
QPEEWVDDFNASI

SEQ ID NO: 52913 - protein, 9 aa, Artificial sequence
  Protein classification predicting sequence
GSIAHATML

SEQ ID NO: 52914 - protein, 15 aa, Artificial sequence
  Protein classification predicting sequence
ASLEDIHLNIEHELI

SEQ ID NO: 52915 - protein, 8 aa, Artificial sequence
  Protein classification predicting sequence
YFWMLERD

SEQ ID NO: 52916 - protein, 9 aa, Artificial sequence
  Protein classification predicting sequence
KRIDISPLG

SEQ ID NO: 52917 - protein, 15 aa, Artificial sequence
  Protein classification predicting sequence
LYENSLDAVSDRDYI

SEQ ID NO: 52918 - protein, 10 aa, Artificial sequence
  Protein classification predicting sequence
KGSLRIFEGM

SEQ ID NO: 52919 - protein, 14 aa, Artificial sequence
  Protein classification predicting sequence
PFRTAHEIVGKIVL

SEQ ID NO: 52920 - protein, 16 aa, Artificial sequence
  Protein classification predicting sequence
PENCLKRRQSYGSTGQ

SEQ ID NO: 52921 - protein, 24 aa, Artificial sequence
  Protein classification predicting sequence
AGGKLHTGRSRNDQVATDMHLYTK

SEQ ID NO: 52922 - protein, 30 aa, Artificial sequence
  Protein classification predicting sequence
VDTIMPGYTHLQRAQPISFAHHIMTYFWML

SEQ ID NO: 52923 - protein, 66 aa, Artificial sequence
  Protein classification predicting sequence
ISLTMVHLSRFAEEIIFWSTDEAKFITLSDAFSTGSSIMPQKKNPDMAELIRGKVGRTTGHLMSML

SEQ ID NO: 52924 - protein, 23 aa, Artificial sequence
  Protein classification predicting sequence
TLKGLPLAYNKDMQEDKEGLFDA

SEQ ID NO: 52925 - protein, 26 aa, Artificial sequence
  Protein classification predicting sequence
TLKGLPLAYNKDMQEDKEGLFDAVHT

SEQ ID NO: 52926 - protein, 13 aa, Artificial sequence
  Protein classification predicting sequence
WVEEFGASISFDQ

SEQ ID NO: 52927 - protein, 8 aa, Artificial sequence
  Protein classification predicting sequence
MPGYTHLQ

SEQ ID NO: 52928 - protein, 13 aa, Artificial sequence
  Protein classification predicting sequence
TGSSIMPQKKNPD

SEQ ID NO: 52929 - protein, 21 aa, Artificial sequence
  Protein classification predicting sequence
TGSSIMPQKKNPDMAELIRGK

SEQ ID NO: 52930 - protein, 8 aa, Artificial sequence
  Protein classification predicting sequence
MLETMTVN

SEQ ID NO: 52931 - protein, 7 aa, Artificial sequence
  Protein classification predicting sequence
AVKRRNS

SEQ ID NO: 52932 - protein, 17 aa, Artificial sequence
  Protein classification predicting sequence
LRAGRSRNDQVATLFRM

SEQ ID NO: 52933 - protein, 6 aa, Artificial sequence
  Protein classification predicting sequence
TRDSER

SEQ ID NO: 52934 - protein, 6 aa, Artificial sequence
  Protein classification predicting sequence
SILMMH

SEQ ID NO: 52935 - protein, 6 aa, Artificial sequence
  Protein classification predicting sequence
LLTVMK

SEQ ID NO: 52936 - protein, 18 aa, Artificial sequence
  Protein classification predicting sequence
ESTQKDFSNATELADYLA

SEQ ID NO: 52937 - protein, 13 aa, Artificial sequence
  Protein classification predicting sequence
DFSNATELADYLA

SEQ ID NO: 52938 - protein, 8 aa, Artificial sequence
  Protein classification predicting sequence
AHEIVGKL

SEQ ID NO: 52939 - protein, 7 aa, Artificial sequence
  Protein classification predicting sequence
AQPISFA

SEQ ID NO: 52940 - protein, 9 aa, Artificial sequence
  Protein classification predicting sequence
HLMAYYNMF

SEQ ID NO: 52941 - protein, 6 aa, Artificial sequence
  Protein classification predicting sequence
VNKEKM

SEQ ID NO: 52942 - protein, 6 aa, Artificial sequence
  Protein classification predicting sequence
DVSPLG

SEQ ID NO: 52943 - protein, 7 aa, Artificial sequence
  Protein classification predicting sequence
WSSTEFG

SEQ ID NO: 52944 - protein, 12 aa, Artificial sequence
  Protein classification predicting sequence
GALAGTTFPIDR

SEQ ID NO: 52945 - protein, 17 aa, Artificial sequence
  Protein classification predicting sequence
TGSSIMPQKKNPDVPEL

SEQ ID NO: 52946 - protein, 21 aa, Artificial sequence
  Protein classification predicting sequence
TGSSIMPQKKNPDVPELVRGK

SEQ ID NO: 52947 - protein, 12 aa, Artificial sequence
  Protein classification predicting sequence
GVPFREAYNLVG

SEQ ID NO: 52948 - protein, 9 aa, Artificial sequence
  Protein classification predicting sequence
RNSYGGTGF

SEQ ID NO: 52949 - protein, 7 aa, Artificial sequence
  Protein classification predicting sequence
GGTGFDQ

SEQ ID NO: 52950 - protein, 10 aa, Artificial sequence
  Protein classification predicting sequence
NSLDAVSDRD

SEQ ID NO: 52951 - protein, 15 aa, Artificial sequence
  Protein classification predicting sequence
PQKKNPDVPELVRGK

SEQ ID NO: 52952 - protein, 6 aa, Artificial sequence
  Protein classification predicting sequence
CATGSS

SEQ ID NO: 52953 - protein, 6 aa, Artificial sequence
  Protein classification predicting sequence
GSIAHA

SEQ ID NO: 52954 - protein, 7 aa, Artificial sequence
  Protein classification predicting sequence
NSMDGVS

SEQ ID NO: 52955 - protein, 6 aa, Artificial sequence
  Protein classification predicting sequence
FSTGSS

SEQ ID NO: 52956 - protein, 6 aa, Artificial sequence
  Protein classification predicting sequence
SRNDQV

SEQ ID NO: 52957 - protein, 16 aa, Artificial sequence
  Protein classification predicting sequence
FNDSLRFDYRLAEQDI

SEQ ID NO: 52958 - protein, 8 aa, Artificial sequence
  Protein classification predicting sequence
RLNTSPLG

SEQ ID NO: 52959 - protein, 7 aa, Artificial sequence
  Protein classification predicting sequence
ATRNSLD

SEQ ID NO: 52960 - protein, 10 aa, Artificial sequence
  Protein classification predicting sequence
PFREAHHIVG

SEQ ID NO: 52961 - protein, 10 aa, Artificial sequence
  Protein classification predicting sequence
KGLPLAYNKD

SEQ ID NO: 52962 - protein, 15 aa, Artificial sequence
  Protein classification predicting sequence
GSVAWSKALVTVGVL

SEQ ID NO: 52963 - protein, 7 aa, Artificial sequence
  Protein classification predicting sequence
KLIDKVG

SEQ ID NO: 52964 - protein, 8 aa, Artificial sequence
  Protein classification predicting sequence
GALAGTAY

SEQ ID NO: 52965 - protein, 38 aa, Artificial sequence
  Protein classification predicting sequence
LSDRVTSGSSLMPQKKNPDALELIRGKCGRVQGALTGM

SEQ ID NO: 52966 - protein, 5 aa, Artificial sequence
  Protein classification predicting sequence
EDIHM

SEQ ID NO: 52967 - protein, 7 aa, Artificial sequence
  Protein classification predicting sequence
TAKALGF

SEQ ID NO: 52968 - protein, 8 aa, Artificial sequence
  Protein classification predicting sequence
MKGLPLAY

SEQ ID NO: 52969 - protein, 8 aa, Artificial sequence
  Protein classification predicting sequence
PFREAHHI

SEQ ID NO: 52970 - protein, 7 aa, Artificial sequence
  Protein classification predicting sequence
RNSYGGT

SEQ ID NO: 52971 - protein, 7 aa, Artificial sequence
  Protein classification predicting sequence
KNMVGTF

SEQ ID NO: 52972 - protein, 6 aa, Artificial sequence
  Protein classification predicting sequence
LNLGHT

SEQ ID NO: 52973 - protein, 7 aa, Artificial sequence
  Protein classification predicting sequence
GHTIGHA

SEQ ID NO: 52974 - protein, 7 aa, Artificial sequence
  Protein classification predicting sequence
PAGEKTK

SEQ ID NO: 52975 - protein, 7 aa, Artificial sequence
  Protein classification predicting sequence
AGIVRRG

SEQ ID NO: 52976 - protein, 7 aa, Artificial sequence
  Protein classification predicting sequence
VVADEKE

SEQ ID NO: 52977 - protein, 13 aa, Artificial sequence
  Protein classification predicting sequence
RALLNLGHTFGHA

SEQ ID NO: 52978 - protein, 6 aa, Artificial sequence
  Protein classification predicting sequence
GKNLIG

SEQ ID NO: 52979 - protein, 8 aa, Artificial sequence
  Protein classification predicting sequence
GKNLIGAF

SEQ ID NO: 52980 - protein, 15 aa, Artificial sequence
  Protein classification predicting sequence
MRGIRFVQVPTTLLA

SEQ ID NO: 52981 - protein, 6 aa, Artificial sequence
  Protein classification predicting sequence
PTTLLA

SEQ ID NO: 52982 - protein, 10 aa, Artificial sequence
  Protein classification predicting sequence
NHPLGKNMIG

SEQ ID NO: 52983 - protein, 8 aa, Artificial sequence
  Protein classification predicting sequence
IVAQDETE

SEQ ID NO: 52984 - protein, 6 aa, Artificial sequence
  Protein classification predicting sequence
GFVAAT

SEQ ID NO: 52985 - protein, 8 aa, Artificial sequence
  Protein classification predicting sequence
DSSVGGKV

SEQ ID NO: 52986 - protein, 6 aa, Artificial sequence
  Protein classification predicting sequence
TLPERE

SEQ ID NO: 52987 - protein, 11 aa, Artificial sequence
  Protein classification predicting sequence
GHAIEAELGYG

SEQ ID NO: 52988 - protein, 7 aa, Artificial sequence
  Protein classification predicting sequence
NHPLGKN

SEQ ID NO: 52989 - protein, 9 aa, Artificial sequence
  Protein classification predicting sequence
ALGGGVIGD

SEQ ID NO: 52990 - protein, 9 aa, Artificial sequence
  Protein classification predicting sequence
PTTLLAQVD

SEQ ID NO: 52991 - protein, 6 aa, Artificial sequence
  Protein classification predicting sequence
GKNMIG

SEQ ID NO: 52992 - protein, 6 aa, Artificial sequence
  Protein classification predicting sequence
VDLDCL

SEQ ID NO: 52993 - protein, 6 aa, Artificial sequence
  Protein classification predicting sequence
RCCELK

SEQ ID NO: 52994 - protein, 8 aa, Artificial sequence
  Protein classification predicting sequence
LPDGEAHK

SEQ ID NO: 52995 - protein, 6 aa, Artificial sequence
  Protein classification predicting sequence
GAFHQP

SEQ ID NO: 52996 - protein, 10 aa, Artificial sequence
  Protein classification predicting sequence
AGYAEVAKYG

SEQ ID NO: 52997 - protein, 8 aa, Artificial sequence
  Protein classification predicting sequence
VGGKTGIN

SEQ ID NO: 52998 - protein, 6 aa, Artificial sequence
  Protein classification predicting sequence
DGEQYK

SEQ ID NO: 52999 - protein, 8 aa, Artificial sequence
  Protein classification predicting sequence
GKNMIGSF

SEQ ID NO: 53000 - protein, 7 aa, Artificial sequence
  Protein classification predicting sequence
AISVGMV

SEQ ID NO: 53001 - protein, 7 aa, Artificial sequence
  Protein classification predicting sequence
MMRDKKV

SEQ ID NO: 53002 - protein, 7 aa, Artificial sequence
  Protein classification predicting sequence
GGKTGVN

SEQ ID NO: 53003 - protein, 6 aa, Artificial sequence
  Protein classification predicting sequence
LNFGHT

SEQ ID NO: 53004 - protein, 6 aa, Artificial sequence
  Protein classification predicting sequence
WLHGEA

SEQ ID NO: 53005 - protein, 6 aa, Artificial sequence
  Protein classification predicting sequence
YYRGIP

SEQ ID NO: 53006 - protein, 7 aa, Artificial sequence
  Protein classification predicting sequence
DSSIGGK

SEQ ID NO: 53007 - protein, 6 aa, Artificial sequence
  Protein classification predicting sequence
LPDGEQ

SEQ ID NO: 53008 - protein, 15 aa, Artificial sequence
  Protein classification predicting sequence
HKDWQTLNLIFDALL

SEQ ID NO: 53009 - protein, 10 aa, Artificial sequence
  Protein classification predicting sequence
ALGGGVIGDM

SEQ ID NO: 53010 - protein, 7 aa, Artificial sequence
  Protein classification predicting sequence
MSHDKKV

SEQ ID NO: 53011 - protein, 6 aa, Artificial sequence
  Protein classification predicting sequence
EVIKYG

SEQ ID NO: 53012 - protein, 12 aa, Artificial sequence
  Protein classification predicting sequence
LLAQVDSSVGGK

SEQ ID NO: 53013 - protein, 7 aa, Artificial sequence
  Protein classification predicting sequence
PTTLLSQ

SEQ ID NO: 53014 - protein, 7 aa, Artificial sequence
  Protein classification predicting sequence
KNLIGSF

SEQ ID NO: 53015 - protein, 8 aa, Artificial sequence
  Protein classification predicting sequence
EVIKYGLI

SEQ ID NO: 53016 - protein, 7 aa, Artificial sequence
  Protein classification predicting sequence
DLAGFVA

SEQ ID NO: 53017 - protein, 9 aa, Artificial sequence
  Protein classification predicting sequence
VGGKTGINT

SEQ ID NO: 53018 - protein, 6 aa, Artificial sequence
  Protein classification predicting sequence
MLRDKK

SEQ ID NO: 53019 - protein, 10 aa, Artificial sequence
  Protein classification predicting sequence
TTLIALGGGV

SEQ ID NO: 53020 - protein, 13 aa, Artificial sequence
  Protein classification predicting sequence
VTLGERSYPITIA

SEQ ID NO: 53021 - protein, 7 aa, Artificial sequence
  Protein classification predicting sequence
GGKTAVN

SEQ ID NO: 53022 - protein, 14 aa, Artificial sequence
  Protein classification predicting sequence
VGTFAQPDGVLIDP

SEQ ID NO: 53023 - protein, 8 aa, Artificial sequence
  Protein classification predicting sequence
GDMAGFAA

SEQ ID NO: 53024 - protein, 7 aa, Artificial sequence
  Protein classification predicting sequence
PTTLLAQ

SEQ ID NO: 53025 - protein, 8 aa, Artificial sequence
  Protein classification predicting sequence
FFEWLEQH

SEQ ID NO: 53026 - protein, 6 aa, Artificial sequence
  Protein classification predicting sequence
GHTFGH

SEQ ID NO: 53027 - protein, 5 aa, Artificial sequence
  Protein classification predicting sequence
WLHGE

SEQ ID NO: 53028 - protein, 6 aa, Artificial sequence
  Protein classification predicting sequence
ERSYPI

SEQ ID NO: 53029 - protein, 10 aa, Artificial sequence
  Protein classification predicting sequence
LNLGHTFGHA

SEQ ID NO: 53030 - protein, 9 aa, Artificial sequence
  Protein classification predicting sequence
QPDGVLIDP

SEQ ID NO: 53031 - protein, 10 aa, Artificial sequence
  Protein classification predicting sequence
LNFGHTIGHA

SEQ ID NO: 53032 - protein, 7 aa, Artificial sequence
  Protein classification predicting sequence
PYPVVIG

SEQ ID NO: 53033 - protein, 6 aa, Artificial sequence
  Protein classification predicting sequence
GKNLVG

SEQ ID NO: 53034 - protein, 9 aa, Artificial sequence
  Protein classification predicting sequence
GHTLGHAIE

SEQ ID NO: 53035 - protein, 6 aa, Artificial sequence
  Protein classification predicting sequence
GDFAGF

SEQ ID NO: 53036 - protein, 7 aa, Artificial sequence
  Protein classification predicting sequence
RGIRFVQ

SEQ ID NO: 53037 - protein, 7 aa, Artificial sequence
  Protein classification predicting sequence
GGGVIGD

SEQ ID NO: 53038 - protein, 10 aa, Artificial sequence
  Protein classification predicting sequence
WLHGEAVAAG

SEQ ID NO: 53039 - protein, 13 aa, Artificial sequence
  Protein classification predicting sequence
QVDSSVGGKTGIN

SEQ ID NO: 53040 - protein, 6 aa, Artificial sequence
  Protein classification predicting sequence
FFDWLE

SEQ ID NO: 53041 - protein, 8 aa, Artificial sequence
  Protein classification predicting sequence
YAIRRSCE

SEQ ID NO: 53042 - protein, 12 aa, Artificial sequence
  Protein classification predicting sequence
LNLGHTFGHAIE

SEQ ID NO: 53043 - protein, 9 aa, Artificial sequence
  Protein classification predicting sequence
RKFLNLGHT

SEQ ID NO: 53044 - protein, 7 aa, Artificial sequence
  Protein classification predicting sequence
GHTLGHA

SEQ ID NO: 53045 - protein, 9 aa, Artificial sequence
  Protein classification predicting sequence
YQRGVRFIQ

SEQ ID NO: 53046 - protein, 11 aa, Artificial sequence
  Protein classification predicting sequence
GKNMIGAFYQP

SEQ ID NO: 53047 - protein, 14 aa, Artificial sequence
  Protein classification predicting sequence
SGLAEVIKYGIILD

SEQ ID NO: 53048 - protein, 7 aa, Artificial sequence
  Protein classification predicting sequence
WLHGEAV

SEQ ID NO: 53049 - protein, 7 aa, Artificial sequence
  Protein classification predicting sequence
TLPQREF

SEQ ID NO: 53050 - protein, 6 aa, Artificial sequence
  Protein classification predicting sequence
PTTLLS

SEQ ID NO: 53051 - protein, 16 aa, Artificial sequence
  Protein classification predicting sequence
RKTTLIALGGGVIGDM

SEQ ID NO: 53052 - protein, 9 aa, Artificial sequence
  Protein classification predicting sequence
GLAEVIKYG

SEQ ID NO: 53053 - protein, 11 aa, Artificial sequence
  Protein classification predicting sequence
GYGVWLHGEAV

SEQ ID NO: 53054 - protein, 6 aa, Artificial sequence
  Protein classification predicting sequence
RELSAG

SEQ ID NO: 53055 - protein, 6 aa, Artificial sequence
  Protein classification predicting sequence
GAFYQP

SEQ ID NO: 53056 - protein, 7 aa, Artificial sequence
  Protein classification predicting sequence
GGKTGIN

SEQ ID NO: 53057 - protein, 6 aa, Artificial sequence
  Protein classification predicting sequence
TVAPLY

SEQ ID NO: 53058 - protein, 13 aa, Artificial sequence
  Protein classification predicting sequence
INHPLGKNMIGAF

SEQ ID NO: 53059 - protein, 8 aa, Artificial sequence
  Protein classification predicting sequence
QPQAVLAD

SEQ ID NO: 53060 - protein, 17 aa, Artificial sequence
  Protein classification predicting sequence
GLGYGEWLHGEAVGCGM

SEQ ID NO: 53061 - protein, 6 aa, Artificial sequence
  Protein classification predicting sequence
FVQVPT

SEQ ID NO: 53062 - protein, 6 aa, Artificial sequence
  Protein classification predicting sequence
FIQIPT

SEQ ID NO: 53063 - protein, 7 aa, Artificial sequence
  Protein classification predicting sequence
QVPTTLL

SEQ ID NO: 53064 - protein, 9 aa, Artificial sequence
  Protein classification predicting sequence
VDSSVGGKT

SEQ ID NO: 53065 - protein, 10 aa, Artificial sequence
  Protein classification predicting sequence
HAIEATAGYG

SEQ ID NO: 53066 - protein, 15 aa, Artificial sequence
  Protein classification predicting sequence
GLFNEPASFLPLKSG

SEQ ID NO: 53067 - protein, 19 aa, Artificial sequence
  Protein classification predicting sequence
AGVNVDSVILPDGEQYKSL

SEQ ID NO: 53068 - protein, 10 aa, Artificial sequence
  Protein classification predicting sequence
VLDTVFTALL

SEQ ID NO: 53069 - protein, 16 aa, Artificial sequence
  Protein classification predicting sequence
KPHGRDTTLVALGGGV

SEQ ID NO: 53070 - protein, 18 aa, Artificial sequence
  Protein classification predicting sequence
RELASGLAEVIKYGIILD

SEQ ID NO: 53071 - protein, 10 aa, Artificial sequence
  Protein classification predicting sequence
SERLGQFSSA

SEQ ID NO: 53072 - protein, 6 aa, Artificial sequence
  Protein classification predicting sequence
AIADCQ

SEQ ID NO: 53073 - protein, 34 aa, Artificial sequence
  Protein classification predicting sequence
NLDALLRLDGPAMAYCIRRCCELKAEVVAADERE

SEQ ID NO: 53074 - protein, 15 aa, Artificial sequence
  Protein classification predicting sequence
NHPLGKNMIGAFYQP

SEQ ID NO: 53075 - protein, 7 aa, Artificial sequence
  Protein classification predicting sequence
QDETEQG

SEQ ID NO: 53076 - protein, 15 aa, Artificial sequence
  Protein classification predicting sequence
RALLNLGHTFGHAIE

SEQ ID NO: 53077 - protein, 8 aa, Artificial sequence
  Protein classification predicting sequence
FGDIVVQH

SEQ ID NO: 53078 - protein, 14 aa, Artificial sequence
  Protein classification predicting sequence
IEQHFKDREILQSL

SEQ ID NO: 53079 - protein, 22 aa, Artificial sequence
  Protein classification predicting sequence
GAIDHISTYIDQFDQSFILIDE

SEQ ID NO: 53080 - protein, 25 aa, Artificial sequence
  Protein classification predicting sequence
KFDDILSYENVHKVIIPAGEKTKTF

SEQ ID NO: 53081 - protein, 8 aa, Artificial sequence
  Protein classification predicting sequence
AATLLRGV

SEQ ID NO: 53082 - protein, 21 aa, Artificial sequence
  Protein classification predicting sequence
QVPTTILAHDSSVGGKVGINS

SEQ ID NO: 53083 - protein, 17 aa, Artificial sequence
  Protein classification predicting sequence
ILSGYAEVYKHALLNGE

SEQ ID NO: 53084 - protein, 7 aa, Artificial sequence
  Protein classification predicting sequence
YQFIVAN

SEQ ID NO: 53085 - protein, 7 aa, Artificial sequence
  Protein classification predicting sequence
AATWLRG

SEQ ID NO: 53086 - protein, 25 aa, Artificial sequence
  Protein classification predicting sequence
FLETLPQREFSCGISEMLKIGFIHD

SEQ ID NO: 53087 - protein, 6 aa, Artificial sequence
  Protein classification predicting sequence
QIPTSL

SEQ ID NO: 53088 - protein, 6 aa, Artificial sequence
  Protein classification predicting sequence
HGEAVA

SEQ ID NO: 53089 - protein, 6 aa, Artificial sequence
  Protein classification predicting sequence
REFRAG

SEQ ID NO: 53090 - protein, 8 aa, Artificial sequence
  Protein classification predicting sequence
LGGGVIGD

SEQ ID NO: 53091 - protein, 6 aa, Artificial sequence
  Protein classification predicting sequence
PTSLLA

SEQ ID NO: 53092 - protein, 6 aa, Artificial sequence
  Protein classification predicting sequence
LNYGHT

SEQ ID NO: 53093 - protein, 7 aa, Artificial sequence
  Protein classification predicting sequence
AEVIKYG

SEQ ID NO: 53094 - protein, 9 aa, Artificial sequence
  Protein classification predicting sequence
AEVIKYGII

SEQ ID NO: 53095 - protein, 16 aa, Artificial sequence
  Protein classification predicting sequence
RALLNLGHTFGHAIEA

SEQ ID NO: 53096 - protein, 11 aa, Artificial sequence
  Protein classification predicting sequence
GYGNWLHGEAV

SEQ ID NO: 53097 - protein, 10 aa, Artificial sequence
  Protein classification predicting sequence
IALGGGVIGD

SEQ ID NO: 53098 - protein, 7 aa, Artificial sequence
  Protein classification predicting sequence
AACWMRG

SEQ ID NO: 53099 - protein, 15 aa, Artificial sequence
  Protein classification predicting sequence
AALAQAIARSCEHKA

SEQ ID NO: 53100 - protein, 9 aa, Artificial sequence
  Protein classification predicting sequence
GDLTGFAAA

SEQ ID NO: 53101 - protein, 50 aa, Artificial sequence
  Protein classification predicting sequence
YQRGVRFIQVPTTLLSQVDSSVGGKTAVNHPLGKNMIGAFYQPASVVVDL

SEQ ID NO: 53102 - protein, 6 aa, Artificial sequence
  Protein classification predicting sequence
RPGHAD

SEQ ID NO: 53103 - protein, 7 aa, Artificial sequence
  Protein classification predicting sequence
RSSARET

SEQ ID NO: 53104 - protein, 22 aa, Artificial sequence
  Protein classification predicting sequence
EGMPIGVGSYVHYDRKLDAKLA

SEQ ID NO: 53105 - protein, 8 aa, Artificial sequence
  Protein classification predicting sequence
GYTRRTNN

SEQ ID NO: 53106 - protein, 8 aa, Artificial sequence
  Protein classification predicting sequence
MSINAFKG

SEQ ID NO: 53107 - protein, 6 aa, Artificial sequence
  Protein classification predicting sequence
SGVRHG

SEQ ID NO: 53108 - protein, 18 aa, Artificial sequence
  Protein classification predicting sequence
SIEELKSITEASPVRCLD

SEQ ID NO: 53109 - protein, 9 aa, Artificial sequence
  Protein classification predicting sequence
EASPVRCLD

SEQ ID NO: 53110 - protein, 7 aa, Artificial sequence
  Protein classification predicting sequence
VHDEILW

SEQ ID NO: 53111 - protein, 56 aa, Artificial sequence
  Protein classification predicting sequence
KRKVTKPRPGHADLNGAIKYGHRDMRNVLERSSARETTVRVAAGAVAKKVLAELGI

SEQ ID NO: 53112 - protein, 9 aa, Artificial sequence
  Protein classification predicting sequence
GRGRRMQIE

SEQ ID NO: 53113 - protein, 10 aa, Artificial sequence
  Protein classification predicting sequence
DTVEIVSGVR

SEQ ID NO: 53114 - protein, 10 aa, Artificial sequence
  Protein classification predicting sequence
TKPRPGHADL

SEQ ID NO: 53115 - protein, 33 aa, Artificial sequence
  Protein classification predicting sequence
TLGSPITLIVKNDDFKHWTKVMGAEPISEKESK

SEQ ID NO: 53116 - protein, 52 aa, Artificial sequence
  Protein classification predicting sequence
MKRTITKPRPGHADLNGAIKYGHRDIRNVLERSSARETTVRVAAGAVAKQIL

SEQ ID NO: 53117 - protein, 15 aa, Artificial sequence
  Protein classification predicting sequence
VRGVMKPIPTLYKPL

SEQ ID NO: 53118 - protein, 54 aa, Artificial sequence
  Protein classification predicting sequence
VRGVMKPIPTLYKPLASVDIDTKEAFQASIERSDSCAVPAAGVVAESVVAWELA

SEQ ID NO: 53119 - protein, 13 aa, Artificial sequence
  Protein classification predicting sequence
ALVEQFGKDRMEL

SEQ ID NO: 53120 - protein, 6 aa, Artificial sequence
  Protein classification predicting sequence
IENTDQ

SEQ ID NO: 53121 - protein, 28 aa, Artificial sequence
  Protein classification predicting sequence
RDYRGGGRSSARETAMRVAAGAIAKKYL

SEQ ID NO: 53122 - protein, 33 aa, Artificial sequence
  Protein classification predicting sequence
RDYRGGGRSSARETAMRVAAGAIAKKYLAEKFG

SEQ ID NO: 53123 - protein, 6 aa, Artificial sequence
  Protein classification predicting sequence
LRHRAQ

SEQ ID NO: 53124 - protein, 6 aa, Artificial sequence
  Protein classification predicting sequence
TTGAPI

SEQ ID NO: 53125 - protein, 6 aa, Artificial sequence
  Protein classification predicting sequence
DYRGGG

SEQ ID NO: 53126 - protein, 7 aa, Artificial sequence
  Protein classification predicting sequence
VAAGAIA

SEQ ID NO: 53127 - protein, 7 aa, Artificial sequence
  Protein classification predicting sequence
PPGLGDP

SEQ ID NO: 53128 - protein, 8 aa, Artificial sequence
  Protein classification predicting sequence
SGGIQGGI

SEQ ID NO: 53129 - protein, 7 aa, Artificial sequence
  Protein classification predicting sequence
TAGESHG

SEQ ID NO: 53130 - protein, 10 aa, Artificial sequence
  Protein classification predicting sequence
SARETAARVA

SEQ ID NO: 53131 - protein, 7 aa, Artificial sequence
  Protein classification predicting sequence
GMPIVVR

SEQ ID NO: 53132 - protein, 7 aa, Artificial sequence
  Protein classification predicting sequence
MKPIPTL

SEQ ID NO: 53133 - protein, 7 aa, Artificial sequence
  Protein classification predicting sequence
QFDLDRR

SEQ ID NO: 53134 - protein, 6 aa, Artificial sequence
  Protein classification predicting sequence
RRPGQS

SEQ ID NO: 53135 - protein, 18 aa, Artificial sequence
  Protein classification predicting sequence
RRPGQSRITTPRKETDTC

SEQ ID NO: 53136 - protein, 6 aa, Artificial sequence
  Protein classification predicting sequence
TTGTPI

SEQ ID NO: 53137 - protein, 8 aa, Artificial sequence
  Protein classification predicting sequence
VPNTDQRG

SEQ ID NO: 53138 - protein, 23 aa, Artificial sequence
  Protein classification predicting sequence
KYGVRSVQGGGRSSARETIGRVA

SEQ ID NO: 53139 - protein, 15 aa, Artificial sequence
  Protein classification predicting sequence
GGGRSSARETIGRVA

SEQ ID NO: 53140 - protein, 6 aa, Artificial sequence
  Protein classification predicting sequence
NIVRCP

SEQ ID NO: 53141 - protein, 10 aa, Artificial sequence
  Protein classification predicting sequence
RVTTWGESHG

SEQ ID NO: 53142 - protein, 7 aa, Artificial sequence
  Protein classification predicting sequence
RASARET

SEQ ID NO: 53143 - protein, 7 aa, Artificial sequence
  Protein classification predicting sequence
GLGEPVF

SEQ ID NO: 53144 - protein, 8 aa, Artificial sequence
  Protein classification predicting sequence
AVKGVEIG

SEQ ID NO: 53145 - protein, 6 aa, Artificial sequence
  Protein classification predicting sequence
FGESHG

SEQ ID NO: 53146 - protein, 6 aa, Artificial sequence
  Protein classification predicting sequence
DGCPPG

SEQ ID NO: 53147 - protein, 7 aa, Artificial sequence
  Protein classification predicting sequence
RPGHADY

SEQ ID NO: 53148 - protein, 8 aa, Artificial sequence
  Protein classification predicting sequence
NPFFAPNA

SEQ ID NO: 53149 - protein, 7 aa, Artificial sequence
  Protein classification predicting sequence
GDSVGAR

SEQ ID NO: 53150 - protein, 8 aa, Artificial sequence
  Protein classification predicting sequence
DRLDADIA

SEQ ID NO: 53151 - protein, 6 aa, Artificial sequence
  Protein classification predicting sequence
KPTSSI

SEQ ID NO: 53152 - protein, 6 aa, Artificial sequence
  Protein classification predicting sequence
HADYTY

SEQ ID NO: 53153 - protein, 7 aa, Artificial sequence
  Protein classification predicting sequence
GRHDPCV

SEQ ID NO: 53154 - protein, 8 aa, Artificial sequence
  Protein classification predicting sequence
IEKDQVQI

SEQ ID NO: 53155 - protein, 8 aa, Artificial sequence
  Protein classification predicting sequence
PIALVVEN

SEQ ID NO: 53156 - protein, 7 aa, Artificial sequence
  Protein classification predicting sequence
SPVRCLD

SEQ ID NO: 53157 - protein, 7 aa, Artificial sequence
  Protein classification predicting sequence
VEVIVEG

SEQ ID NO: 53158 - protein, 7 aa, Artificial sequence
  Protein classification predicting sequence
PIGLGSH

SEQ ID NO: 53159 - protein, 7 aa, Artificial sequence
  Protein classification predicting sequence
GLGSHVH

SEQ ID NO: 53160 - protein, 9 aa, Artificial sequence
  Protein classification predicting sequence
SINAFKGVE

SEQ ID NO: 53161 - protein, 7 aa, Artificial sequence
  Protein classification predicting sequence
GIGFEAA

SEQ ID NO: 53162 - protein, 7 aa, Artificial sequence
  Protein classification predicting sequence
EGGMTNG

SEQ ID NO: 53163 - protein, 25 aa, Artificial sequence
  Protein classification predicting sequence
GMPIVVRGVMKPIPTLYKPLQSVDI

SEQ ID NO: 53164 - protein, 11 aa, Artificial sequence
  Protein classification predicting sequence
TAGESHGPQLT

SEQ ID NO: 53165 - protein, 15 aa, Artificial sequence
  Protein classification predicting sequence
PVGVGSYVHYDRKLD

SEQ ID NO: 53166 - protein, 14 aa, Artificial sequence
  Protein classification predicting sequence
AVLSINAFKGVEFG

SEQ ID NO: 53167 - protein, 7 aa, Artificial sequence
  Protein classification predicting sequence
GGLEGGM

SEQ ID NO: 53168 - protein, 31 aa, Artificial sequence
  Protein classification predicting sequence
TKEPFTASIERSDSCAVPAASVVAEAVVAWE

SEQ ID NO: 53169 - protein, 8 aa, Artificial sequence
  Protein classification predicting sequence
RQGGYGRG

SEQ ID NO: 53170 - protein, 8 aa, Artificial sequence
  Protein classification predicting sequence
IVSGVRHG

SEQ ID NO: 53171 - protein, 7 aa, Artificial sequence
  Protein classification predicting sequence
VENKDWK

SEQ ID NO: 53172 - protein, 9 aa, Artificial sequence
  Protein classification predicting sequence
WTKIMGAEP

SEQ ID NO: 53173 - protein, 7 aa, Artificial sequence
  Protein classification predicting sequence
PRPGHAD

SEQ ID NO: 53174 - protein, 7 aa, Artificial sequence
  Protein classification predicting sequence
IGGIVEV

SEQ ID NO: 53175 - protein, 8 aa, Artificial sequence
  Protein classification predicting sequence
VHYDRKLD

SEQ ID NO: 53176 - protein, 11 aa, Artificial sequence
  Protein classification predicting sequence
LGGFEGGMTNG

SEQ ID NO: 53177 - protein, 13 aa, Artificial sequence
  Protein classification predicting sequence
GVMKPIPTLYKPL

SEQ ID NO: 53178 - protein, 14 aa, Artificial sequence
  Protein classification predicting sequence
ERSDSCAVPAASVV

SEQ ID NO: 53179 - protein, 5 aa, Artificial sequence
  Protein classification predicting sequence
SGVRH

SEQ ID NO: 53180 - protein, 8 aa, Artificial sequence
  Protein classification predicting sequence
KIMGAAPI

SEQ ID NO: 53181 - protein, 6 aa, Artificial sequence
  Protein classification predicting sequence
KMKGSE

SEQ ID NO: 53182 - protein, 8 aa, Artificial sequence
  Protein classification predicting sequence
CVLPRAVP

SEQ ID NO: 53183 - protein, 15 aa, Artificial sequence
  Protein classification predicting sequence
KRKPGQSKYTTQRRE

SEQ ID NO: 53184 - protein, 7 aa, Artificial sequence
  Protein classification predicting sequence
YTTQRRE

SEQ ID NO: 53185 - protein, 11 aa, Artificial sequence
  Protein classification predicting sequence
AVPAASVVAEA

SEQ ID NO: 53186 - protein, 9 aa, Artificial sequence
  Protein classification predicting sequence
RPGHADYTY

SEQ ID NO: 53187 - protein, 6 aa, Artificial sequence
  Protein classification predicting sequence
NPFFCP

SEQ ID NO: 53188 - protein, 6 aa, Artificial sequence
  Protein classification predicting sequence
EIGDGF

SEQ ID NO: 53189 - protein, 6 aa, Artificial sequence
  Protein classification predicting sequence
GRHDPC

SEQ ID NO: 53190 - protein, 6 aa, Artificial sequence
  Protein classification predicting sequence
PIAEAM

SEQ ID NO: 53191 - protein, 6 aa, Artificial sequence
  Protein classification predicting sequence
RAQCGD

SEQ ID NO: 53192 - protein, 10 aa, Artificial sequence
  Protein classification predicting sequence
PGTSRHVTQR

SEQ ID NO: 53193 - protein, 7 aa, Artificial sequence
  Protein classification predicting sequence
LLIRNTD

SEQ ID NO: 53194 - protein, 6 aa, Artificial sequence
  Protein classification predicting sequence
SNHAGG

SEQ ID NO: 53195 - protein, 8 aa, Artificial sequence
  Protein classification predicting sequence
LGGISTGQ

SEQ ID NO: 53196 - protein, 11 aa, Artificial sequence
  Protein classification predicting sequence
LALVLIDHALR

SEQ ID NO: 53197 - protein, 7 aa, Artificial sequence
  Protein classification predicting sequence
IPLTEAD

SEQ ID NO: 53198 - protein, 8 aa, Artificial sequence
  Protein classification predicting sequence
RVAAGAIA

SEQ ID NO: 53199 - protein, 8 aa, Artificial sequence
  Protein classification predicting sequence
FLSNHAGG

SEQ ID NO: 53200 - protein, 9 aa, Artificial sequence
  Protein classification predicting sequence
RVAAGAIAR

SEQ ID NO: 53201 - protein, 7 aa, Artificial sequence
  Protein classification predicting sequence
PIYGKLD

SEQ ID NO: 53202 - protein, 14 aa, Artificial sequence
  Protein classification predicting sequence
GRHDPCVGIRAVPI

SEQ ID NO: 53203 - protein, 8 aa, Artificial sequence
  Protein classification predicting sequence
TTGTSIGL

SEQ ID NO: 53204 - protein, 6 aa, Artificial sequence
  Protein classification predicting sequence
DYSDIK

SEQ ID NO: 53205 - protein, 12 aa, Artificial sequence
  Protein classification predicting sequence
DIKNLFRPGHAD

SEQ ID NO: 53206 - protein, 8 aa, Artificial sequence
  Protein classification predicting sequence
GRHDPCVG

SEQ ID NO: 53207 - protein, 7 aa, Artificial sequence
  Protein classification predicting sequence
DYSEIKD

SEQ ID NO: 53208 - protein, 7 aa, Artificial sequence
  Protein classification predicting sequence
GSENRDE

SEQ ID NO: 53209 - protein, 19 aa, Artificial sequence
  Protein classification predicting sequence
KGRHDPCVGIRAVPIAEAM

SEQ ID NO: 53210 - protein, 6 aa, Artificial sequence
  Protein classification predicting sequence
LRHRGQ

SEQ ID NO: 53211 - protein, 9 aa, Artificial sequence
  Protein classification predicting sequence
RGGGRSSAR

SEQ ID NO: 53212 - protein, 7 aa, Artificial sequence
  Protein classification predicting sequence
AGAIAKK

SEQ ID NO: 53213 - protein, 7 aa, Artificial sequence
  Protein classification predicting sequence
HGDELTP

SEQ ID NO: 53214 - protein, 6 aa, Artificial sequence
  Protein classification predicting sequence
HADFTY

SEQ ID NO: 53215 - protein, 7 aa, Artificial sequence
  Protein classification predicting sequence
ALMSINA

SEQ ID NO: 53216 - protein, 9 aa, Artificial sequence
  Protein classification predicting sequence
KGVEIGDGF

SEQ ID NO: 53217 - protein, 7 aa, Artificial sequence
  Protein classification predicting sequence
VPVVEAM

SEQ ID NO: 53218 - protein, 8 aa, Artificial sequence
  Protein classification predicting sequence
AFKPTSSI

SEQ ID NO: 53219 - protein, 6 aa, Artificial sequence
  Protein classification predicting sequence
YTYEKK

SEQ ID NO: 53220 - protein, 6 aa, Artificial sequence
  Protein classification predicting sequence
KETTYR

SEQ ID NO: 53221 - protein, 11 aa, Artificial sequence
  Protein classification predicting sequence
GYGRGGRMKIE

SEQ ID NO: 53222 - protein, 11 aa, Artificial sequence
  Protein classification predicting sequence
CAVPAAGVVAE

SEQ ID NO: 53223 - protein, 8 aa, Artificial sequence
  Protein classification predicting sequence
VVAEAVVA

SEQ ID NO: 53224 - protein, 6 aa, Artificial sequence
  Protein classification predicting sequence
EIGAGF

SEQ ID NO: 53225 - protein, 12 aa, Artificial sequence
  Protein classification predicting sequence
NIADTFRPGHAD

SEQ ID NO: 53226 - protein, 8 aa, Artificial sequence
  Protein classification predicting sequence
PIAEAMLA

SEQ ID NO: 53227 - protein, 7 aa, Artificial sequence
  Protein classification predicting sequence
SHVISIG

SEQ ID NO: 53228 - protein, 10 aa, Artificial sequence
  Protein classification predicting sequence
MGIQAIKGVE

SEQ ID NO: 53229 - protein, 6 aa, Artificial sequence
  Protein classification predicting sequence
TLGSPI

SEQ ID NO: 53230 - protein, 12 aa, Artificial sequence
  Protein classification predicting sequence
AGMLKYGFDDAR

SEQ ID NO: 53231 - protein, 12 aa, Artificial sequence
  Protein classification predicting sequence
RNVLERSSARET

SEQ ID NO: 53232 - protein, 10 aa, Artificial sequence
  Protein classification predicting sequence
LTRPRPGHAD

SEQ ID NO: 53233 - protein, 15 aa, Artificial sequence
  Protein classification predicting sequence
LGVEVLSHVISIGAS

SEQ ID NO: 53234 - protein, 8 aa, Artificial sequence
  Protein classification predicting sequence
PVFDKLEA

SEQ ID NO: 53235 - protein, 29 aa, Artificial sequence
  Protein classification predicting sequence
PVFDKLEAELAKACMSLPATKGFEFGSGF

SEQ ID NO: 53236 - protein, 15 aa, Artificial sequence
  Protein classification predicting sequence
PRAVPMVEAMVALVL

SEQ ID NO: 53237 - protein, 8 aa, Artificial sequence
  Protein classification predicting sequence
EAMVALVL

SEQ ID NO: 53238 - protein, 6 aa, Artificial sequence
  Protein classification predicting sequence
EADIQP

SEQ ID NO: 53239 - protein, 10 aa, Artificial sequence
  Protein classification predicting sequence
TTGTPIALLI

SEQ ID NO: 53240 - protein, 12 aa, Artificial sequence
  Protein classification predicting sequence
MGINAVKGVEIG

SEQ ID NO: 53241 - protein, 10 aa, Artificial sequence
  Protein classification predicting sequence
INAVKGVEIG

SEQ ID NO: 53242 - protein, 6 aa, Artificial sequence
  Protein classification predicting sequence
ALVLMD

SEQ ID NO: 53243 - protein, 7 aa, Artificial sequence
  Protein classification predicting sequence
LTAIIEG

SEQ ID NO: 53244 - protein, 5 aa, Artificial sequence
  Protein classification predicting sequence
IDGCP

SEQ ID NO: 53245 - protein, 6 aa, Artificial sequence
  Protein classification predicting sequence
RPSHAD

SEQ ID NO: 53246 - protein, 7 aa, Artificial sequence
  Protein classification predicting sequence
LSGVFEG

SEQ ID NO: 53247 - protein, 7 aa, Artificial sequence
  Protein classification predicting sequence
DYRGGGR

SEQ ID NO: 53248 - protein, 8 aa, Artificial sequence
  Protein classification predicting sequence
GLGEPVFD

SEQ ID NO: 53249 - protein, 6 aa, Artificial sequence
  Protein classification predicting sequence
AVKGVE

SEQ ID NO: 53250 - protein, 16 aa, Artificial sequence
  Protein classification predicting sequence
AHALMSINAVKGVEIG

SEQ ID NO: 53251 - protein, 14 aa, Artificial sequence
  Protein classification predicting sequence
VVALRGSQNRDEIT

SEQ ID NO: 53252 - protein, 20 aa, Artificial sequence
  Protein classification predicting sequence
AHMALKPTSSITVPGRTINR

SEQ ID NO: 53253 - protein, 10 aa, Artificial sequence
  Protein classification predicting sequence
AIVLMDHLLR

SEQ ID NO: 53254 - protein, 7 aa, Artificial sequence
  Protein classification predicting sequence
RAQNADV

SEQ ID NO: 53255 - protein, 30 aa, Artificial sequence
  Protein classification predicting sequence
GLGEPVFDRLDADIAHALMSINAVKGVEIG

SEQ ID NO: 53256 - protein, 9 aa, Artificial sequence
  Protein classification predicting sequence
RRQGGYGRG

SEQ ID NO: 53257 - protein, 14 aa, Artificial sequence
  Protein classification predicting sequence
PRPGHADLVGGMKY

SEQ ID NO: 53258 - protein, 12 aa, Artificial sequence
  Protein classification predicting sequence
VSINAFKGAEFG

SEQ ID NO: 53259 - protein, 8 aa, Artificial sequence
  Protein classification predicting sequence
AVPAASVV

SEQ ID NO: 53260 - protein, 20 aa, Artificial sequence
  Protein classification predicting sequence
AIKDVFRPGHADYTYEQKYG

SEQ ID NO: 53261 - protein, 7 aa, Artificial sequence
  Protein classification predicting sequence
NPFFCPD

SEQ ID NO: 53262 - protein, 8 aa, Artificial sequence
  Protein classification predicting sequence
ALKPTSSI

SEQ ID NO: 53263 - protein, 7 aa, Artificial sequence
  Protein classification predicting sequence
RAQCGDV

SEQ ID NO: 53264 - protein, 10 aa, Artificial sequence
  Protein classification predicting sequence
RVAAGAIAKK

SEQ ID NO: 53265 - protein, 8 aa, Artificial sequence
  Protein classification predicting sequence
PVFDRLDA

SEQ ID NO: 53266 - protein, 7 aa, Artificial sequence
  Protein classification predicting sequence
MSINAVK

SEQ ID NO: 53267 - protein, 8 aa, Artificial sequence
  Protein classification predicting sequence
QKGSQHRD

SEQ ID NO: 53268 - protein, 12 aa, Artificial sequence
  Protein classification predicting sequence
TKGRHDPCVGIR

SEQ ID NO: 53269 - protein, 8 aa, Artificial sequence
  Protein classification predicting sequence
AEHINKEL

SEQ ID NO: 53270 - protein, 5 aa, Artificial sequence
  Protein classification predicting sequence
DFKHW

SEQ ID NO: 53271 - protein, 6 aa, Artificial sequence
  Protein classification predicting sequence
KYGHRD

SEQ ID NO: 53272 - protein, 11 aa, Artificial sequence
  Protein classification predicting sequence
VAGHVIEIGGV

SEQ ID NO: 53273 - protein, 6 aa, Artificial sequence
  Protein classification predicting sequence
TNRAGG

SEQ ID NO: 53274 - protein, 11 aa, Artificial sequence
  Protein classification predicting sequence
ERSDSCAVPAA

SEQ ID NO: 53275 - protein, 7 aa, Artificial sequence
  Protein classification predicting sequence
RAAMKPI

SEQ ID NO: 53276 - protein, 7 aa, Artificial sequence
  Protein classification predicting sequence
ATVERSD

SEQ ID NO: 53277 - protein, 10 aa, Artificial sequence
  Protein classification predicting sequence
RSDVCAVPAA

SEQ ID NO: 53278 - protein, 7 aa, Artificial sequence
  Protein classification predicting sequence
GESHGPA

SEQ ID NO: 53279 - protein, 6 aa, Artificial sequence
  Protein classification predicting sequence
EGLPAG

SEQ ID NO: 53280 - protein, 6 aa, Artificial sequence
  Protein classification predicting sequence
AMMGIN

SEQ ID NO: 53281 - protein, 7 aa, Artificial sequence
  Protein classification predicting sequence
VKGVEIG

SEQ ID NO: 53282 - protein, 6 aa, Artificial sequence
  Protein classification predicting sequence
GIRAVP

SEQ ID NO: 53283 - protein, 9 aa, Artificial sequence
  Protein classification predicting sequence
VTTFGESHG

SEQ ID NO: 53284 - protein, 7 aa, Artificial sequence
  Protein classification predicting sequence
LKKEGDS

SEQ ID NO: 53285 - protein, 6 aa, Artificial sequence
  Protein classification predicting sequence
HRDQMT

SEQ ID NO: 53286 - protein, 7 aa, Artificial sequence
  Protein classification predicting sequence
TTGTSIG

SEQ ID NO: 53287 - protein, 7 aa, Artificial sequence
  Protein classification predicting sequence
VRGFLSQ

SEQ ID NO: 53288 - protein, 7 aa, Artificial sequence
  Protein classification predicting sequence
MGINAVK

SEQ ID NO: 53289 - protein, 6 aa, Artificial sequence
  Protein classification predicting sequence
QRGSEH

SEQ ID NO: 53290 - protein, 8 aa, Artificial sequence
  Protein classification predicting sequence
VQILSGVF

SEQ ID NO: 53291 - protein, 10 aa, Artificial sequence
  Protein classification predicting sequence
RGGGRSSARE

SEQ ID NO: 53292 - protein, 7 aa, Artificial sequence
  Protein classification predicting sequence
PAGLGEP

SEQ ID NO: 53293 - protein, 6 aa, Artificial sequence
  Protein classification predicting sequence
VEIGDG

SEQ ID NO: 53294 - protein, 7 aa, Artificial sequence
  Protein classification predicting sequence
IKNLFRP

SEQ ID NO: 53295 - protein, 6 aa, Artificial sequence
  Protein classification predicting sequence
AMMGLN

SEQ ID NO: 53296 - protein, 6 aa, Artificial sequence
  Protein classification predicting sequence
VVDGCP

SEQ ID NO: 53297 - protein, 6 aa, Artificial sequence
  Protein classification predicting sequence
LTQMGD

SEQ ID NO: 53298 - protein, 8 aa, Artificial sequence
  Protein classification predicting sequence
PRPGHADL

SEQ ID NO: 53299 - protein, 9 aa, Artificial sequence
  Protein classification predicting sequence
LERSSARET

SEQ ID NO: 53300 - protein, 7 aa, Artificial sequence
  Protein classification predicting sequence
GLGSYVQ

SEQ ID NO: 53301 - protein, 17 aa, Artificial sequence
  Protein classification predicting sequence
VERSDPTALPAAGVVME

SEQ ID NO: 53302 - protein, 8 aa, Artificial sequence
  Protein classification predicting sequence
MENVVATV

SEQ ID NO: 53303 - protein, 14 aa, Artificial sequence
  Protein classification predicting sequence
LERASARETAARVA

SEQ ID NO: 53304 - protein, 6 aa, Artificial sequence
  Protein classification predicting sequence
GLGSYV

SEQ ID NO: 53305 - protein, 6 aa, Artificial sequence
  Protein classification predicting sequence
TVPRAL

SEQ ID NO: 53306 - protein, 6 aa, Artificial sequence
  Protein classification predicting sequence
GGGRSS

SEQ ID NO: 53307 - protein, 7 aa, Artificial sequence
  Protein classification predicting sequence
LTTIIEG

SEQ ID NO: 53308 - protein, 6 aa, Artificial sequence
  Protein classification predicting sequence
GRGARM

SEQ ID NO: 53309 - protein, 6 aa, Artificial sequence
  Protein classification predicting sequence
GAVAKK

SEQ ID NO: 53310 - protein, 7 aa, Artificial sequence
  Protein classification predicting sequence
DGCPPGL

SEQ ID NO: 53311 - protein, 6 aa, Artificial sequence
  Protein classification predicting sequence
TTQRRE

SEQ ID NO: 53312 - protein, 7 aa, Artificial sequence
  Protein classification predicting sequence
IGLLIEN

SEQ ID NO: 53313 - protein, 7 aa, Artificial sequence
  Protein classification predicting sequence
DQRSKDY

SEQ ID NO: 53314 - protein, 20 aa, Artificial sequence
  Protein classification predicting sequence
GRHDPCVGIRATPIAEAMMA

SEQ ID NO: 53315 - protein, 8 aa, Artificial sequence
  Protein classification predicting sequence
LPLSEEDI

SEQ ID NO: 53316 - protein, 14 aa, Artificial sequence
  Protein classification predicting sequence
DIQKELDRRRPGQS

SEQ ID NO: 53317 - protein, 6 aa, Artificial sequence
  Protein classification predicting sequence
GAIAKK

SEQ ID NO: 53318 - protein, 6 aa, Artificial sequence
  Protein classification predicting sequence
PAGLPL

SEQ ID NO: 53319 - protein, 7 aa, Artificial sequence
  Protein classification predicting sequence
EAMVALV

SEQ ID NO: 53320 - protein, 6 aa, Artificial sequence
  Protein classification predicting sequence
INAVKG

SEQ ID NO: 53321 - protein, 8 aa, Artificial sequence
  Protein classification predicting sequence
VMAADPVD

SEQ ID NO: 53322 - protein, 14 aa, Artificial sequence
  Protein classification predicting sequence
LGLPVGLGSFTSGD

SEQ ID NO: 53323 - protein, 6 aa, Artificial sequence
  Protein classification predicting sequence
TNRSGG

SEQ ID NO: 53324 - protein, 10 aa, Artificial sequence
  Protein classification predicting sequence
GGLEGGMTNG

SEQ ID NO: 53325 - protein, 17 aa, Artificial sequence
  Protein classification predicting sequence
LRWITAGESHGRALVAV

SEQ ID NO: 53326 - protein, 8 aa, Artificial sequence
  Protein classification predicting sequence
GYGRGARM

SEQ ID NO: 53327 - protein, 10 aa, Artificial sequence
  Protein classification predicting sequence
FRPGHADYTY

SEQ ID NO: 53328 - protein, 12 aa, Artificial sequence
  Protein classification predicting sequence
GLGEPVFDRLDA

SEQ ID NO: 53329 - protein, 7 aa, Artificial sequence
  Protein classification predicting sequence
PATKGFE

SEQ ID NO: 53330 - protein, 7 aa, Artificial sequence
  Protein classification predicting sequence
VVPRAVP

SEQ ID NO: 53331 - protein, 12 aa, Artificial sequence
  Protein classification predicting sequence
RGGGRSSARETA

SEQ ID NO: 53332 - protein, 14 aa, Artificial sequence
  Protein classification predicting sequence
GRHDPCVGIRATPI

SEQ ID NO: 53333 - protein, 9 aa, Artificial sequence
  Protein classification predicting sequence
DHALRHRAQ

SEQ ID NO: 53334 - protein, 11 aa, Artificial sequence
  Protein classification predicting sequence
LRWITAGESHG

SEQ ID NO: 53335 - protein, 10 aa, Artificial sequence
  Protein classification predicting sequence
FLRQALGVEV

SEQ ID NO: 53336 - protein, 22 aa, Artificial sequence
  Protein classification predicting sequence
PLRVRAAMKPISTVPRALATVD

SEQ ID NO: 53337 - protein, 8 aa, Artificial sequence
  Protein classification predicting sequence
NDDFKHWT

SEQ ID NO: 53338 - protein, 12 aa, Artificial sequence
  Protein classification predicting sequence
RSSARETAARVA

SEQ ID NO: 53339 - protein, 13 aa, Artificial sequence
  Protein classification predicting sequence
GVGSYVHYDRKLD

SEQ ID NO: 53340 - protein, 11 aa, Artificial sequence
  Protein classification predicting sequence
VRGVMKPIPTL

SEQ ID NO: 53341 - protein, 6 aa, Artificial sequence
  Protein classification predicting sequence
RHDPCV

SEQ ID NO: 53342 - protein, 11 aa, Artificial sequence
  Protein classification predicting sequence
FRVTTFGESHG

SEQ ID NO: 53343 - protein, 7 aa, Artificial sequence
  Protein classification predicting sequence
VEQNPFF

SEQ ID NO: 53344 - protein, 7 aa, Artificial sequence
  Protein classification predicting sequence
GDSIGAK

SEQ ID NO: 53345 - protein, 6 aa, Artificial sequence
  Protein classification predicting sequence
GEEVEM

SEQ ID NO: 53346 - protein, 7 aa, Artificial sequence
  Protein classification predicting sequence
LGCIIDG

SEQ ID NO: 53347 - protein, 12 aa, Artificial sequence
  Protein classification predicting sequence
DEVKILSGVFEG

SEQ ID NO: 53348 - protein, 10 aa, Artificial sequence
  Protein classification predicting sequence
VKILSGVFEG

SEQ ID NO: 53349 - protein, 8 aa, Artificial sequence
  Protein classification predicting sequence
ILSGVFEG

SEQ ID NO: 53350 - protein, 15 aa, Artificial sequence
  Protein classification predicting sequence
FRPGHADYTYHQKYG

SEQ ID NO: 53351 - protein, 22 aa, Artificial sequence
  Protein classification predicting sequence
RDYRGGGRSSARETAMRVAAGA

SEQ ID NO: 53352 - protein, 8 aa, Artificial sequence
  Protein classification predicting sequence
RAYLSQMG

SEQ ID NO: 53353 - protein, 6 aa, Artificial sequence
  Protein classification predicting sequence
GSQHRD

SEQ ID NO: 53354 - protein, 6 aa, Artificial sequence
  Protein classification predicting sequence
KYGIRD

SEQ ID NO: 53355 - protein, 6 aa, Artificial sequence
  Protein classification predicting sequence
AGAVAK

SEQ ID NO: 53356 - protein, 7 aa, Artificial sequence
  Protein classification predicting sequence
GGISTGQ

SEQ ID NO: 53357 - protein, 17 aa, Artificial sequence
  Protein classification predicting sequence
LTRPRPGHADLAGMQKY

SEQ ID NO: 53358 - protein, 10 aa, Artificial sequence
  Protein classification predicting sequence
MSLPATKGFE

SEQ ID NO: 53359 - protein, 7 aa, Artificial sequence
  Protein classification predicting sequence
FKPTATI

SEQ ID NO: 53360 - protein, 12 aa, Artificial sequence
  Protein classification predicting sequence
SGGGRASARETI

SEQ ID NO: 53361 - protein, 7 aa, Artificial sequence
  Protein classification predicting sequence
DYSAIKD

SEQ ID NO: 53362 - protein, 7 aa, Artificial sequence
  Protein classification predicting sequence
LMDHLLR

SEQ ID NO: 53363 - protein, 10 aa, Artificial sequence
  Protein classification predicting sequence
RGYMSQLGPI

SEQ ID NO: 53364 - protein, 5 aa, Artificial sequence
  Protein classification predicting sequence
FFCPD

SEQ ID NO: 53365 - protein, 7 aa, Artificial sequence
  Protein classification predicting sequence
GGVLGGI

SEQ ID NO: 53366 - protein, 7 aa, Artificial sequence
  Protein classification predicting sequence
VLADHLL

SEQ ID NO: 53367 - protein, 8 aa, Artificial sequence
  Protein classification predicting sequence
TTFGESHG

SEQ ID NO: 53368 - protein, 7 aa, Artificial sequence
  Protein classification predicting sequence
RGGGRAS

SEQ ID NO: 53369 - protein, 15 aa, Artificial sequence
  Protein classification predicting sequence
DIQPDLDRRKPGTSR

SEQ ID NO: 53370 - protein, 10 aa, Artificial sequence
  Protein classification predicting sequence
LDRRKPGTSR

SEQ ID NO: 53371 - protein, 12 aa, Artificial sequence
  Protein classification predicting sequence
RDPRGGGRSSAR

SEQ ID NO: 53372 - protein, 16 aa, Artificial sequence
  Protein classification predicting sequence
LRRDGDSVGARIEVVA

SEQ ID NO: 53373 - protein, 10 aa, Artificial sequence
  Protein classification predicting sequence
DRLDADIAHA

SEQ ID NO: 53374 - protein, 7 aa, Artificial sequence
  Protein classification predicting sequence
KPTSSIR

SEQ ID NO: 53375 - protein, 23 aa, Artificial sequence
  Protein classification predicting sequence
GRHDPCVGIRATPIAEALLALVL

SEQ ID NO: 53376 - protein, 7 aa, Artificial sequence
  Protein classification predicting sequence
TQRQEAD

SEQ ID NO: 53377 - protein, 10 aa, Artificial sequence
  Protein classification predicting sequence
LLIENTDQRS

SEQ ID NO: 53378 - protein, 23 aa, Artificial sequence
  Protein classification predicting sequence
DALDELMRALKKEGDSIGAKVTV

SEQ ID NO: 53379 - protein, 47 aa, Artificial sequence
  Protein classification predicting sequence
IVDGVPPGIPLTEADLQHDLDRRRPGTSRYTTQRREPDQVKILSGVF

SEQ ID NO: 53380 - protein, 11 aa, Artificial sequence
  Protein classification predicting sequence
GRHDPCVVPRA

SEQ ID NO: 53381 - protein, 8 aa, Artificial sequence
  Protein classification predicting sequence
RSSARETA

SEQ ID NO: 53382 - protein, 12 aa, Artificial sequence
  Protein classification predicting sequence
MSINAVKGVEIG

SEQ ID NO: 53383 - protein, 31 aa, Artificial sequence
  Protein classification predicting sequence
GDSIGGVVQVVVENMPVGVGSYVHYDRKLDG

SEQ ID NO: 53384 - protein, 25 aa, Artificial sequence
  Protein classification predicting sequence
APISDEERENMKRTITKPRPGHADL

SEQ ID NO: 53385 - protein, 62 aa, Artificial sequence
  Protein classification predicting sequence
KVEDINKEMFKRQGGYGRGRRMQIEKDTVEIVSGVRNGYTLGSPITMVVTNDDFTHWRKIMG

SEQ ID NO: 53386 - protein, 20 aa, Artificial sequence
  Protein classification predicting sequence
EERENMKRTITKPRPGHADL

SEQ ID NO: 53387 - protein, 11 aa, Artificial sequence
  Protein classification predicting sequence
GESHGPQLTVI

SEQ ID NO: 53388 - protein, 7 aa, Artificial sequence
  Protein classification predicting sequence
IIEGVPA

SEQ ID NO: 53389 - protein, 7 aa, Artificial sequence
  Protein classification predicting sequence
PANLEIK

SEQ ID NO: 53390 - protein, 20 aa, Artificial sequence
  Protein classification predicting sequence
EDINKEMFKRQGGYGRGRRM

SEQ ID NO: 53391 - protein, 15 aa, Artificial sequence
  Protein classification predicting sequence
VVTNDDFTHWRKIMG

SEQ ID NO: 53392 - protein, 6 aa, Artificial sequence
  Protein classification predicting sequence
RVAVGA

SEQ ID NO: 53393 - protein, 13 aa, Artificial sequence
  Protein classification predicting sequence
YSRVVEIGGIKDK

SEQ ID NO: 53394 - protein, 7 aa, Artificial sequence
  Protein classification predicting sequence
NDVRVID

SEQ ID NO: 53395 - protein, 9 aa, Artificial sequence
  Protein classification predicting sequence
MRDKIDEAK

SEQ ID NO: 53396 - protein, 49 aa, Artificial sequence
  Protein classification predicting sequence
GVGSYVHYDRKLDGRIAQGVVSINAFKGVSFGEGFKAAEKPGSEIQDEI

SEQ ID NO: 53397 - protein, 8 aa, Artificial sequence
  Protein classification predicting sequence
LGGFEGGM

SEQ ID NO: 53398 - protein, 30 aa, Artificial sequence
  Protein classification predicting sequence
GGMKYNHRDLRNVLERSSARETAARVAVGA

SEQ ID NO: 53399 - protein, 53 aa, Artificial sequence
  Protein classification predicting sequence
EGGMSNGMPIIVNGVMKPIPTLYKPLNSVDINTKEDFKATIERSDSCAVPAAS

SEQ ID NO: 53400 - protein, 8 aa, Artificial sequence
  Protein classification predicting sequence
VVFGGKEI

SEQ ID NO: 53401 - protein, 9 aa, Artificial sequence
  Protein classification predicting sequence
EQEIKDYID

SEQ ID NO: 53402 - protein, 12 aa, Artificial sequence
  Protein classification predicting sequence
VGGVPVGLGSYV

SEQ ID NO: 53403 - protein, 15 aa, Artificial sequence
  Protein classification predicting sequence
ARNAPLTRPRPGHAD

SEQ ID NO: 53404 - protein, 6 aa, Artificial sequence
  Protein classification predicting sequence
PVRCLD

SEQ ID NO: 53405 - protein, 6 aa, Artificial sequence
  Protein classification predicting sequence
WDRKLD

SEQ ID NO: 53406 - protein, 12 aa, Artificial sequence
  Protein classification predicting sequence
ALMGIQAIKGVE

SEQ ID NO: 53407 - protein, 6 aa, Artificial sequence
  Protein classification predicting sequence
HQRSDV

SEQ ID NO: 53408 - protein, 21 aa, Artificial sequence
  Protein classification predicting sequence
DLRNSLERSSARETTMRVAVG

SEQ ID NO: 53409 - protein, 16 aa, Artificial sequence
  Protein classification predicting sequence
LERSSARETTMRVAVG

SEQ ID NO: 53410 - protein, 9 aa, Artificial sequence
  Protein classification predicting sequence
GLGSYVQWD

SEQ ID NO: 53411 - protein, 14 aa, Artificial sequence
  Protein classification predicting sequence
IAQGVVSINAFKGV

SEQ ID NO: 53412 - protein, 7 aa, Artificial sequence
  Protein classification predicting sequence
WSKEDGY

SEQ ID NO: 53413 - protein, 13 aa, Artificial sequence
  Protein classification predicting sequence
NNLGGFEGGMTNG

SEQ ID NO: 53414 - protein, 45 aa, Artificial sequence
  Protein classification predicting sequence
NNLGGFEGGMTNGQPIVVRGVMKPIPTLYKPLMSVDIETHEPYKA

SEQ ID NO: 53415 - protein, 8 aa, Artificial sequence
  Protein classification predicting sequence
VERSDPTA

SEQ ID NO: 53416 - protein, 6 aa, Artificial sequence
  Protein classification predicting sequence
KFSSDN

SEQ ID NO: 53417 - protein, 11 aa, Artificial sequence
  Protein classification predicting sequence
VINKDHQKWLD

SEQ ID NO: 53418 - protein, 11 aa, Artificial sequence
  Protein classification predicting sequence
SINAFKGVEFG

SEQ ID NO: 53419 - protein, 18 aa, Artificial sequence
  Protein classification predicting sequence
GVMKPIPTLYKPLMSVDI

SEQ ID NO: 53420 - protein, 11 aa, Artificial sequence
  Protein classification predicting sequence
PRPGHADLVGG

SEQ ID NO: 53421 - protein, 8 aa, Artificial sequence
  Protein classification predicting sequence
DEILWNEE

SEQ ID NO: 53422 - protein, 6 aa, Artificial sequence
  Protein classification predicting sequence
VAEAMV

SEQ ID NO: 53423 - protein, 9 aa, Artificial sequence
  Protein classification predicting sequence
TRPRPGHAD

SEQ ID NO: 53424 - protein, 6 aa, Artificial sequence
  Protein classification predicting sequence
RVAFKP

SEQ ID NO: 53425 - protein, 6 aa, Artificial sequence
  Protein classification predicting sequence
GSEHND

SEQ ID NO: 53426 - protein, 7 aa, Artificial sequence
  Protein classification predicting sequence
LDRRRPG

SEQ ID NO: 53427 - protein, 9 aa, Artificial sequence
  Protein classification predicting sequence
LDRRRPGQS

SEQ ID NO: 53428 - protein, 8 aa, Artificial sequence
  Protein classification predicting sequence
QGGISNGE

SEQ ID NO: 53429 - protein, 6 aa, Artificial sequence
  Protein classification predicting sequence
GGITNG

SEQ ID NO: 53430 - protein, 11 aa, Artificial sequence
  Protein classification predicting sequence
RQKGYGRGRRM

SEQ ID NO: 53431 - protein, 10 aa, Artificial sequence
  Protein classification predicting sequence
SARETAMRVA

SEQ ID NO: 53432 - protein, 7 aa, Artificial sequence
  Protein classification predicting sequence
TFGESHG

SEQ ID NO: 53433 - protein, 17 aa, Artificial sequence
  Protein classification predicting sequence
TTGTSIGLLIENTDQRS

SEQ ID NO: 53434 - protein, 26 aa, Artificial sequence
  Protein classification predicting sequence
AFDQLIRDLKKEGDSIGAKIQVVATN

SEQ ID NO: 53435 - protein, 10 aa, Artificial sequence
  Protein classification predicting sequence
IALKPTSSIT

SEQ ID NO: 53436 - protein, 13 aa, Artificial sequence
  Protein classification predicting sequence
IALKPTSSITVPG

SEQ ID NO: 53437 - protein, 9 aa, Artificial sequence
  Protein classification predicting sequence
ALKPTSSIT

SEQ ID NO: 53438 - protein, 25 aa, Artificial sequence
  Protein classification predicting sequence
ITKGRHDPCVGIRAVPIAEAMLAIV

SEQ ID NO: 53439 - protein, 20 aa, Artificial sequence
  Protein classification predicting sequence
DLDRRRPGTSRYTTQRREPD

SEQ ID NO: 53440 - protein, 73 aa, Artificial sequence
  Protein classification predicting sequence
DLDRRRPGTSRYTTQRREPDEVKILSGVFEGKTTGTSIGLLIENTDQRSKDYSDIKDKFRPGHADYTYHQKYG

SEQ ID NO: 53441 - protein, 11 aa, Artificial sequence
  Protein classification predicting sequence
LKKEGDSIGAK

SEQ ID NO: 53442 - protein, 17 aa, Artificial sequence
  Protein classification predicting sequence
LKKEGDSIGAKIQVVAT

SEQ ID NO: 53443 - protein, 8 aa, Artificial sequence
  Protein classification predicting sequence
GGILGGIS

SEQ ID NO: 53444 - protein, 8 aa, Artificial sequence
  Protein classification predicting sequence
ALGCIVDG

SEQ ID NO: 53445 - protein, 12 aa, Artificial sequence
  Protein classification predicting sequence
EIRAYLSQMGDV

SEQ ID NO: 53446 - protein, 9 aa, Artificial sequence
  Protein classification predicting sequence
VDWNEIENN

SEQ ID NO: 53447 - protein, 10 aa, Artificial sequence
  Protein classification predicting sequence
FRPGHADFTY

SEQ ID NO: 53448 - protein, 15 aa, Artificial sequence
  Protein classification predicting sequence
FRPGHADFTYHYKYG

SEQ ID NO: 53449 - protein, 7 aa, Artificial sequence
  Protein classification predicting sequence
PIGLGEP

SEQ ID NO: 53450 - protein, 7 aa, Artificial sequence
  Protein classification predicting sequence
HDLQRRA

SEQ ID NO: 53451 - protein, 9 aa, Artificial sequence
  Protein classification predicting sequence
NTDQRSKDY

SEQ ID NO: 53452 - protein, 12 aa, Artificial sequence
  Protein classification predicting sequence
RSSARETTMRVA

SEQ ID NO: 53453 - protein, 7 aa, Artificial sequence
  Protein classification predicting sequence
GWGEPIY

SEQ ID NO: 53454 - protein, 6 aa, Artificial sequence
  Protein classification predicting sequence
GTEHRD

SEQ ID NO: 53455 - protein, 8 aa, Artificial sequence
  Protein classification predicting sequence
DGCPPGLE

SEQ ID NO: 53456 - protein, 12 aa, Artificial sequence
  Protein classification predicting sequence
SRHTSARREADE

SEQ ID NO: 53457 - protein, 7 aa, Artificial sequence
  Protein classification predicting sequence
VEILSGV

SEQ ID NO: 53458 - protein, 6 aa, Artificial sequence
  Protein classification predicting sequence
EILSGV

SEQ ID NO: 53459 - protein, 9 aa, Artificial sequence
  Protein classification predicting sequence
EILSGVYEG

SEQ ID NO: 53460 - protein, 11 aa, Artificial sequence
  Protein classification predicting sequence
AKKWLKQRYGV

SEQ ID NO: 53461 - protein, 13 aa, Artificial sequence
  Protein classification predicting sequence
VRGFLSQLGEIRP

SEQ ID NO: 53462 - protein, 12 aa, Artificial sequence
  Protein classification predicting sequence
WDAVEDNPFFWP

SEQ ID NO: 53463 - protein, 8 aa, Artificial sequence
  Protein classification predicting sequence
AAQVPELE

SEQ ID NO: 53464 - protein, 20 aa, Artificial sequence
  Protein classification predicting sequence
ALVLMDQALRHRAQCGDVGE

SEQ ID NO: 53465 - protein, 37 aa, Artificial sequence
  Protein classification predicting sequence
QFRPGHADYTYWQKYGIRDPRGGGRSSARETTMRVAA

SEQ ID NO: 53466 - protein, 14 aa, Artificial sequence
  Protein classification predicting sequence
EDNPFFWPHAAQVP

SEQ ID NO: 53467 - protein, 6 aa, Artificial sequence
  Protein classification predicting sequence
LEAYMD

SEQ ID NO: 53468 - protein, 7 aa, Artificial sequence
  Protein classification predicting sequence
DSIGGVV

SEQ ID NO: 53469 - protein, 8 aa, Artificial sequence
  Protein classification predicting sequence
IENTDQRS

SEQ ID NO: 53470 - protein, 7 aa, Artificial sequence
  Protein classification predicting sequence
DIQPFLD

SEQ ID NO: 53471 - protein, 7 aa, Artificial sequence
  Protein classification predicting sequence
LDRRKPG

SEQ ID NO: 53472 - protein, 15 aa, Artificial sequence
  Protein classification predicting sequence
RDYRGGGRSSARETA

SEQ ID NO: 53473 - protein, 6 aa, Artificial sequence
  Protein classification predicting sequence
KPTPSI

SEQ ID NO: 53474 - protein, 15 aa, Artificial sequence
  Protein classification predicting sequence
TKGRHDPCVGIRAVP

SEQ ID NO: 53475 - protein, 6 aa, Artificial sequence
  Protein classification predicting sequence
RLRKMQ

SEQ ID NO: 53476 - protein, 7 aa, Artificial sequence
  Protein classification predicting sequence
LTLLDAT

SEQ ID NO: 53477 - protein, 7 aa, Artificial sequence
  Protein classification predicting sequence
EWRADFL

SEQ ID NO: 53478 - protein, 6 aa, Artificial sequence
  Protein classification predicting sequence
MSNHDF

SEQ ID NO: 53479 - protein, 6 aa, Artificial sequence
  Protein classification predicting sequence
AVMPQS

SEQ ID NO: 53480 - protein, 10 aa, Artificial sequence
  Protein classification predicting sequence
SRLAGEVFGS

SEQ ID NO: 53481 - protein, 12 aa, Artificial sequence
  Protein classification predicting sequence
LFTFRSAKEGGE

SEQ ID NO: 53482 - protein, 9 aa, Artificial sequence
  Protein classification predicting sequence
KKASAPGQI

SEQ ID NO: 53483 - protein, 17 aa, Artificial sequence
  Protein classification predicting sequence
KPLLFTFRSAKEGGEQA

SEQ ID NO: 53484 - protein, 8 aa, Artificial sequence
  Protein classification predicting sequence
YIALNRAA

SEQ ID NO: 53485 - protein, 7 aa, Artificial sequence
  Protein classification predicting sequence
ADIPKIA

SEQ ID NO: 53486 - protein, 8 aa, Artificial sequence
  Protein classification predicting sequence
PKIIVSLM

SEQ ID NO: 53487 - protein, 15 aa, Artificial sequence
  Protein classification predicting sequence
PLLFTFRSAKEGGEQ

SEQ ID NO: 53488 - protein, 22 aa, Artificial sequence
  Protein classification predicting sequence
LNRAAIDSGLVDMIDLELFTGD

SEQ ID NO: 53489 - protein, 21 aa, Artificial sequence
  Protein classification predicting sequence
GVISRLAGEVFGSAATFGAVK

SEQ ID NO: 53490 - protein, 25 aa, Artificial sequence
  Protein classification predicting sequence
IEETLIQKINHRIDAIDVLELRIDQ

SEQ ID NO: 53491 - protein, 39 aa, Artificial sequence
  Protein classification predicting sequence
ENVTVDQVAEMITKLKVMQDSFKLLVTYRTKLQGGYGQF

SEQ ID NO: 53492 - protein, 7 aa, Artificial sequence
  Protein classification predicting sequence
DMIDIEW

SEQ ID NO: 53493 - protein, 5 aa, Artificial sequence
  Protein classification predicting sequence
SHHNF

SEQ ID NO: 53494 - protein, 6 aa, Artificial sequence
  Protein classification predicting sequence
VGISMS

SEQ ID NO: 53495 - protein, 11 aa, Artificial sequence
  Protein classification predicting sequence
VAPAIFEKFAG

SEQ ID NO: 53496 - protein, 8 aa, Artificial sequence
  Protein classification predicting sequence
PDYIDFEY

SEQ ID NO: 53497 - protein, 8 aa, Artificial sequence
  Protein classification predicting sequence
EMLDFPNL

SEQ ID NO: 53498 - protein, 22 aa, Artificial sequence
  Protein classification predicting sequence
EQDVLDLMNYTRGFKTLNPEQE

SEQ ID NO: 53499 - protein, 7 aa, Artificial sequence
  Protein classification predicting sequence
REPEIYG

SEQ ID NO: 53500 - protein, 6 aa, Artificial sequence
  Protein classification predicting sequence
QSNHEG

SEQ ID NO: 53501 - protein, 6 aa, Artificial sequence
  Protein classification predicting sequence
EVHISN

SEQ ID NO: 53502 - protein, 9 aa, Artificial sequence
  Protein classification predicting sequence
QSNREYELI

SEQ ID NO: 53503 - protein, 7 aa, Artificial sequence
  Protein classification predicting sequence
SNVHKRE

SEQ ID NO: 53504 - protein, 5 aa, Artificial sequence
  Protein classification predicting sequence
FRHHS

SEQ ID NO: 53505 - protein, 11 aa, Artificial sequence
  Protein classification predicting sequence
THTSVALRDAL

SEQ ID NO: 53506 - protein, 6 aa, Artificial sequence
  Protein classification predicting sequence
REPFRH

SEQ ID NO: 53507 - protein, 7 aa, Artificial sequence
  Protein classification predicting sequence
REPAVYG

SEQ ID NO: 53508 - protein, 9 aa, Artificial sequence
  Protein classification predicting sequence
HISNVHARE

SEQ ID NO: 53509 - protein, 7 aa, Artificial sequence
  Protein classification predicting sequence
REPEVYG

SEQ ID NO: 53510 - protein, 6 aa, Artificial sequence
  Protein classification predicting sequence
THTSVA

SEQ ID NO: 53511 - protein, 6 aa, Artificial sequence
  Protein classification predicting sequence
LGKREP

SEQ ID NO: 53512 - protein, 7 aa, Artificial sequence
  Protein classification predicting sequence
RDALLAV

SEQ ID NO: 53513 - protein, 12 aa, Artificial sequence
  Protein classification predicting sequence
IPFIEVHLSNVH

SEQ ID NO: 53514 - protein, 10 aa, Artificial sequence
  Protein classification predicting sequence
THTSVALRDA

SEQ ID NO: 53515 - protein, 22 aa, Artificial sequence
  Protein classification predicting sequence
ILNPGAFTHYSYAIRDAIASIS

SEQ ID NO: 53516 - protein, 6 aa, Artificial sequence
  Protein classification predicting sequence
EVHLSN

SEQ ID NO: 53517 - protein, 6 aa, Artificial sequence
  Protein classification predicting sequence
HSYLSD

SEQ ID NO: 53518 - protein, 8 aa, Artificial sequence
  Protein classification predicting sequence
GPNLNLLG

SEQ ID NO: 53519 - protein, 6 aa, Artificial sequence
  Protein classification predicting sequence
AREEFR

SEQ ID NO: 53520 - protein, 7 aa, Artificial sequence
  Protein classification predicting sequence
SIALRDA

SEQ ID NO: 53521 - protein, 6 aa, Artificial sequence
  Protein classification predicting sequence
HSYFSD

SEQ ID NO: 53522 - protein, 7 aa, Artificial sequence
  Protein classification predicting sequence
GFGFYGY

SEQ ID NO: 53523 - protein, 7 aa, Artificial sequence
  Protein classification predicting sequence
HAREEFR

SEQ ID NO: 53524 - protein, 8 aa, Artificial sequence
  Protein classification predicting sequence
GGLTHTSV

SEQ ID NO: 53525 - protein, 6 aa, Artificial sequence
  Protein classification predicting sequence
THYSYA

SEQ ID NO: 53526 - protein, 8 aa, Artificial sequence
  Protein classification predicting sequence
GPNLNMLG

SEQ ID NO: 53527 - protein, 7 aa, Artificial sequence
  Protein classification predicting sequence
REPGIYG

SEQ ID NO: 53528 - protein, 18 aa, Artificial sequence
  Protein classification predicting sequence
AAYTHTSVAIRDALAAVA

SEQ ID NO: 53529 - protein, 9 aa, Artificial sequence
  Protein classification predicting sequence
PFVEIHLSN

SEQ ID NO: 53530 - protein, 21 aa, Artificial sequence
  Protein classification predicting sequence
HLSNVHKREPFRHHSYFSDVA

SEQ ID NO: 53531 - protein, 7 aa, Artificial sequence
  Protein classification predicting sequence
IEVHISN

SEQ ID NO: 53532 - protein, 22 aa, Artificial sequence
  Protein classification predicting sequence
IEVHISNVHAREEFRRHSYLSP

SEQ ID NO: 53533 - protein, 7 aa, Artificial sequence
  Protein classification predicting sequence
LECFQSN

SEQ ID NO: 53534 - protein, 13 aa, Artificial sequence
  Protein classification predicting sequence
IDFRQSNHEGDLV

SEQ ID NO: 53535 - protein, 7 aa, Artificial sequence
  Protein classification predicting sequence
VELHLSN

SEQ ID NO: 53536 - protein, 7 aa, Artificial sequence
  Protein classification predicting sequence
SNIHARE

SEQ ID NO: 53537 - protein, 6 aa, Artificial sequence
  Protein classification predicting sequence
GIVINP

SEQ ID NO: 53538 - protein, 7 aa, Artificial sequence
  Protein classification predicting sequence
SNIHQRE

SEQ ID NO: 53539 - protein, 8 aa, Artificial sequence
  Protein classification predicting sequence
EGALVERI

SEQ ID NO: 53540 - protein, 6 aa, Artificial sequence
  Protein classification predicting sequence
NGPNLN

SEQ ID NO: 53541 - protein, 7 aa, Artificial sequence
  Protein classification predicting sequence
NPGAFTH

SEQ ID NO: 53542 - protein, 8 aa, Artificial sequence
  Protein classification predicting sequence
INPAAYTH

SEQ ID NO: 53543 - protein, 7 aa, Artificial sequence
  Protein classification predicting sequence
EVHISNI

SEQ ID NO: 53544 - protein, 7 aa, Artificial sequence
  Protein classification predicting sequence
GVICGLG

SEQ ID NO: 53545 - protein, 19 aa, Artificial sequence
  Protein classification predicting sequence
GVICGLGAQGYEFALSAAI

SEQ ID NO: 53546 - protein, 7 aa, Artificial sequence
  Protein classification predicting sequence
GLGADGY

SEQ ID NO: 53547 - protein, 7 aa, Artificial sequence
  Protein classification predicting sequence
QGGAGTS

SEQ ID NO: 53548 - protein, 6 aa, Artificial sequence
  Protein classification predicting sequence
YPTGFR

SEQ ID NO: 53549 - protein, 13 aa, Artificial sequence
  Protein classification predicting sequence
KMGRTQLQDAVPM

SEQ ID NO: 53550 - protein, 14 aa, Artificial sequence
  Protein classification predicting sequence
QAGSSIMPAKVNPV

SEQ ID NO: 53551 - protein, 9 aa, Artificial sequence
  Protein classification predicting sequence
MGHQKGEYQ

SEQ ID NO: 53552 - protein, 21 aa, Artificial sequence
  Protein classification predicting sequence
CNDLRLLSSGPRAGLNEINLP

SEQ ID NO: 53553 - protein, 9 aa, Artificial sequence
  Protein classification predicting sequence
YYGIQTLRA

SEQ ID NO: 53554 - protein, 6 aa, Artificial sequence
  Protein classification predicting sequence
GSEHTV

SEQ ID NO: 53555 - protein, 6 aa, Artificial sequence
  Protein classification predicting sequence
GHSFNV

SEQ ID NO: 53556 - protein, 6 aa, Artificial sequence
  Protein classification predicting sequence
YAAELH

SEQ ID NO: 53557 - protein, 6 aa, Artificial sequence
  Protein classification predicting sequence
VLWTVF

SEQ ID NO: 53558 - protein, 6 aa, Artificial sequence
  Protein classification predicting sequence
ELHIVH

SEQ ID NO: 53559 - protein, 14 aa, Artificial sequence
  Protein classification predicting sequence
FEDNDNRSVLKGGP

SEQ ID NO: 53560 - protein, 7 aa, Artificial sequence
  Protein classification predicting sequence
DNRSVLK

SEQ ID NO: 53561 - protein, 11 aa, Artificial sequence
  Protein classification predicting sequence
GSEHTVDGVKY

SEQ ID NO: 53562 - protein, 6 aa, Artificial sequence
  Protein classification predicting sequence
ESVTWI

SEQ ID NO: 53563 - protein, 11 aa, Artificial sequence
  Protein classification predicting sequence
QFRSLLSNVEG

SEQ ID NO: 53564 - protein, 40 aa, Artificial sequence
  Protein classification predicting sequence
GSLTHPPLYESVTWIICKESISVSSEQLAQFRSLLSNVEG

SEQ ID NO: 53565 - protein, 29 aa, Artificial sequence
  Protein classification predicting sequence
AIKTKGKRAPFTNFDPSTLLPSSLDFWTY

SEQ ID NO: 53566 - protein, 42 aa, Artificial sequence
  Protein classification predicting sequence
GSLTHPPLYESVTWIICKESISVSSEQLAQFRSLLSNVEGDN

SEQ ID NO: 53567 - protein, 6 aa, Artificial sequence
  Protein classification predicting sequence
NGPEHW

SEQ ID NO: 53568 - protein, 10 aa, Artificial sequence
  Protein classification predicting sequence
WSKLYPIANG

SEQ ID NO: 53569 - protein, 17 aa, Artificial sequence
  Protein classification predicting sequence
SLKPISVSYNPATAKEI

SEQ ID NO: 53570 - protein, 6 aa, Artificial sequence
  Protein classification predicting sequence
FANFDP

SEQ ID NO: 53571 - protein, 16 aa, Artificial sequence
  Protein classification predicting sequence
QWSKLYPIANGNNQSP

SEQ ID NO: 53572 - protein, 7 aa, Artificial sequence
  Protein classification predicting sequence
SKADGLA

SEQ ID NO: 53573 - protein, 7 aa, Artificial sequence
  Protein classification predicting sequence
LLPSSLD

SEQ ID NO: 53574 - protein, 6 aa, Artificial sequence
  Protein classification predicting sequence
QPLKGR

SEQ ID NO: 53575 - protein, 10 aa, Artificial sequence
  Protein classification predicting sequence
PIANGNNQSP

SEQ ID NO: 53576 - protein, 12 aa, Artificial sequence
  Protein classification predicting sequence
NVGHSFHVNFED

SEQ ID NO: 53577 - protein, 8 aa, Artificial sequence
  Protein classification predicting sequence
LQKVLDAL

SEQ ID NO: 53578 - protein, 9 aa, Artificial sequence
  Protein classification predicting sequence
APFTNFDPS

SEQ ID NO: 53579 - protein, 10 aa, Artificial sequence
  Protein classification predicting sequence
EQLAQFRSLL

SEQ ID NO: 53580 - protein, 6 aa, Artificial sequence
  Protein classification predicting sequence
AFVVRN

SEQ ID NO: 53581 - protein, 9 aa, Artificial sequence
  Protein classification predicting sequence
ANMVPPFDK

SEQ ID NO: 53582 - protein, 8 aa, Artificial sequence
  Protein classification predicting sequence
CLPAKSKV

SEQ ID NO: 53583 - protein, 7 aa, Artificial sequence
  Protein classification predicting sequence
TLALKGG

SEQ ID NO: 53584 - protein, 20 aa, Artificial sequence
  Protein classification predicting sequence
KKYAAELHLVHWNTKYGDFG

SEQ ID NO: 53585 - protein, 7 aa, Artificial sequence
  Protein classification predicting sequence
YRLVQFH

SEQ ID NO: 53586 - protein, 7 aa, Artificial sequence
  Protein classification predicting sequence
MVDNWRP

SEQ ID NO: 53587 - protein, 8 aa, Artificial sequence
  Protein classification predicting sequence
QFHFHWGS

SEQ ID NO: 53588 - protein, 6 aa, Artificial sequence
  Protein classification predicting sequence
VTWIVL

SEQ ID NO: 53589 - protein, 9 aa, Artificial sequence
  Protein classification predicting sequence
RPTQPLKGR

SEQ ID NO: 53590 - protein, 7 aa, Artificial sequence
  Protein classification predicting sequence
RPPQPLK

SEQ ID NO: 53591 - protein, 19 aa, Artificial sequence
  Protein classification predicting sequence
YPIAKGDNQSPIELHTKDI

SEQ ID NO: 53592 - protein, 5 aa, Artificial sequence
  Protein classification predicting sequence
DYWTY

SEQ ID NO: 53593 - protein, 20 aa, Artificial sequence
  Protein classification predicting sequence
GSFTTPPCEECIVWLLLKEP

SEQ ID NO: 53594 - protein, 12 aa, Artificial sequence
  Protein classification predicting sequence
NQSPIELHTKDI

SEQ ID NO: 53595 - protein, 7 aa, Artificial sequence
  Protein classification predicting sequence
GIFLKIG

SEQ ID NO: 53596 - protein, 37 aa, Artificial sequence
  Protein classification predicting sequence
YRLRQFHLHWGSSDDHGSEHTVDGVKYAAELHLVHWN

SEQ ID NO: 53597 - protein, 13 aa, Artificial sequence
  Protein classification predicting sequence
TVSSDQMAKLRSL

SEQ ID NO: 53598 - protein, 8 aa, Artificial sequence
  Protein classification predicting sequence
HNGPEHWH

SEQ ID NO: 53599 - protein, 16 aa, Artificial sequence
  Protein classification predicting sequence
LDALDKIKTKGKEAPF

SEQ ID NO: 53600 - protein, 11 aa, Artificial sequence
  Protein classification predicting sequence
SAENEPPVPLV

SEQ ID NO: 53601 - protein, 6 aa, Artificial sequence
  Protein classification predicting sequence
NNGHTV

SEQ ID NO: 53602 - protein, 6 aa, Artificial sequence
  Protein classification predicting sequence
QLHLHW

SEQ ID NO: 53603 - protein, 9 aa, Artificial sequence
  Protein classification predicting sequence
MKDNVRPLQ

SEQ ID NO: 53604 - protein, 8 aa, Artificial sequence
  Protein classification predicting sequence
AMEMHIVH

SEQ ID NO: 53605 - protein, 8 aa, Artificial sequence
  Protein classification predicting sequence
FDPSTLLP

SEQ ID NO: 53606 - protein, 6 aa, Artificial sequence
  Protein classification predicting sequence
RPLQPL

SEQ ID NO: 53607 - protein, 6 aa, Artificial sequence
  Protein classification predicting sequence
FDPSCL

SEQ ID NO: 53608 - protein, 8 aa, Artificial sequence
  Protein classification predicting sequence
NFRPLQPL

SEQ ID NO: 53609 - protein, 5 aa, Artificial sequence
  Protein classification predicting sequence
HFHWG

SEQ ID NO: 53610 - protein, 7 aa, Artificial sequence
  Protein classification predicting sequence
HIVHYNS

SEQ ID NO: 53611 - protein, 7 aa, Artificial sequence
  Protein classification predicting sequence
TYPGSLT

SEQ ID NO: 53612 - protein, 7 aa, Artificial sequence
  Protein classification predicting sequence
GSLTTPP

SEQ ID NO: 53613 - protein, 7 aa, Artificial sequence
  Protein classification predicting sequence
QFHFHWG

SEQ ID NO: 53614 - protein, 8 aa, Artificial sequence
  Protein classification predicting sequence
GSLTTPPL

SEQ ID NO: 53615 - protein, 5 aa, Artificial sequence
  Protein classification predicting sequence
HLHWG

SEQ ID NO: 53616 - protein, 7 aa, Artificial sequence
  Protein classification predicting sequence
DSRVCPS

SEQ ID NO: 53617 - protein, 8 aa, Artificial sequence
  Protein classification predicting sequence
RNIANMVP

SEQ ID NO: 53618 - protein, 11 aa, Artificial sequence
  Protein classification predicting sequence
VIGHSRCGGIK

SEQ ID NO: 53619 - protein, 7 aa, Artificial sequence
  Protein classification predicting sequence
GGHYDFV

SEQ ID NO: 53620 - protein, 32 aa, Artificial sequence
  Protein classification predicting sequence
FMVFACSDSRVCPSHVLDFQPGEAFVVRNVAN

SEQ ID NO: 53621 - protein, 9 aa, Artificial sequence
  Protein classification predicting sequence
EYAVLHLKV

SEQ ID NO: 53622 - protein, 16 aa, Artificial sequence
  Protein classification predicting sequence
NIVVIGHSACGGIKGL

SEQ ID NO: 53623 - protein, 23 aa, Artificial sequence
  Protein classification predicting sequence
KGQSPKFMVFACSDSRVCPSHVL

SEQ ID NO: 53624 - protein, 34 aa, Artificial sequence
  Protein classification predicting sequence
GVGAAIEYAVLHLKVENIVVIGHSACGGIKGLMS

SEQ ID NO: 53625 - protein, 7 aa, Artificial sequence
  Protein classification predicting sequence
FIEDWVK

SEQ ID NO: 53626 - protein, 48 aa, Artificial sequence
  Protein classification predicting sequence
SSSSSSSATPPSLIRNEPVFAAPAPIITPNWTEDGNESYEEAIDALKK

SEQ ID NO: 53627 - protein, 12 aa, Artificial sequence
  Protein classification predicting sequence
LIEKGELEPVAA

SEQ ID NO: 53628 - protein, 8 aa, Artificial sequence
  Protein classification predicting sequence
ELHLVHWN

SEQ ID NO: 53629 - protein, 6 aa, Artificial sequence
  Protein classification predicting sequence
ELHLVH

SEQ ID NO: 53630 - protein, 6 aa, Artificial sequence
  Protein classification predicting sequence
QSPINI

SEQ ID NO: 53631 - protein, 7 aa, Artificial sequence
  Protein classification predicting sequence
NNGHTVQ

SEQ ID NO: 53632 - protein, 12 aa, Artificial sequence
  Protein classification predicting sequence
LVPGKVSEDDKL

SEQ ID NO: 53633 - protein, 7 aa, Artificial sequence
  Protein classification predicting sequence
LNKSPEE

SEQ ID NO: 53634 - protein, 6 aa, Artificial sequence
  Protein classification predicting sequence
SMWRCN

SEQ ID NO: 53635 - protein, 7 aa, Artificial sequence
  Protein classification predicting sequence
DLPKTEE

SEQ ID NO: 53636 - protein, 6 aa, Artificial sequence
  Protein classification predicting sequence
LRAIPW

SEQ ID NO: 53637 - protein, 7 aa, Artificial sequence
  Protein classification predicting sequence
RTDEIRR

SEQ ID NO: 53638 - protein, 8 aa, Artificial sequence
  Protein classification predicting sequence
PTPQDEMR

SEQ ID NO: 53639 - protein, 7 aa, Artificial sequence
  Protein classification predicting sequence
RRVDTAL

SEQ ID NO: 53640 - protein, 7 aa, Artificial sequence
  Protein classification predicting sequence
RQESTRH

SEQ ID NO: 53641 - protein, 8 aa, Artificial sequence
  Protein classification predicting sequence
RQESTRHT

SEQ ID NO: 53642 - protein, 9 aa, Artificial sequence
  Protein classification predicting sequence
PLFETLDDL

SEQ ID NO: 53643 - protein, 7 aa, Artificial sequence
  Protein classification predicting sequence
QEWRDLM

SEQ ID NO: 53644 - protein, 7 aa, Artificial sequence
  Protein classification predicting sequence
LNIGSRP

SEQ ID NO: 53645 - protein, 7 aa, Artificial sequence
  Protein classification predicting sequence
HLPVWLG

SEQ ID NO: 53646 - protein, 8 aa, Artificial sequence
  Protein classification predicting sequence
EYDALLLD

SEQ ID NO: 53647 - protein, 27 aa, Artificial sequence
  Protein classification predicting sequence
EYDALLLDKFLDILQDLHGEDLKEAVQ

SEQ ID NO: 53648 - protein, 11 aa, Artificial sequence
  Protein classification predicting sequence
EVFDALKNQTV

SEQ ID NO: 53649 - protein, 57 aa, Artificial sequence
  Protein classification predicting sequence
REIQAAFRTDEIRRTPPTPQDEMRAGMSYFHETIWKGVPKFLRRVDTALKNIGINER

SEQ ID NO: 53650 - protein, 9 aa, Artificial sequence
  Protein classification predicting sequence
YFSQIEDLM

SEQ ID NO: 53651 - protein, 23 aa, Artificial sequence
  Protein classification predicting sequence
EMSMWRCNSELRVRAEELYRTAR

SEQ ID NO: 53652 - protein, 8 aa, Artificial sequence
  Protein classification predicting sequence
KHYIEFWK

SEQ ID NO: 53653 - protein, 14 aa, Artificial sequence
  Protein classification predicting sequence
PYRVILGDVRDKLY

SEQ ID NO: 53654 - protein, 7 aa, Artificial sequence
  Protein classification predicting sequence
LDIRQES

SEQ ID NO: 53655 - protein, 11 aa, Artificial sequence
  Protein classification predicting sequence
LDIRQESDRHT

SEQ ID NO: 53656 - protein, 7 aa, Artificial sequence
  Protein classification predicting sequence
HLEIGSY

SEQ ID NO: 53657 - protein, 7 aa, Artificial sequence
  Protein classification predicting sequence
PSDVLAV

SEQ ID NO: 53658 - protein, 28 aa, Artificial sequence
  Protein classification predicting sequence
AKEFGVKLVIFHGRGGTVGRGGGPTHLA

SEQ ID NO: 53659 - protein, 65 aa, Artificial sequence
  Protein classification predicting sequence
GSLRVTVQGEVIEQSFGEEHLCFRTLQRFCAATLEHGMNPPISPRPEWRELMDQMAVVATEEYRS

SEQ ID NO: 53660 - protein, 8 aa, Artificial sequence
  Protein classification predicting sequence
AATLEHGM

SEQ ID NO: 53661 - protein, 11 aa, Artificial sequence
  Protein classification predicting sequence
MAVVATEEYRS

SEQ ID NO: 53662 - protein, 33 aa, Artificial sequence
  Protein classification predicting sequence
KDSKNLQMLQEMYKTWPFFRVTIDLVEMVFAKG

SEQ ID NO: 53663 - protein, 18 aa, Artificial sequence
  Protein classification predicting sequence
WPFFRVTIDLVEMVFAKG

SEQ ID NO: 53664 - protein, 9 aa, Artificial sequence
  Protein classification predicting sequence
DKLLVSEDL

SEQ ID NO: 53665 - protein, 14 aa, Artificial sequence
  Protein classification predicting sequence
PFGESLRANYEETK

SEQ ID NO: 53666 - protein, 12 aa, Artificial sequence
  Protein classification predicting sequence
RRSLLQKHGRIR

SEQ ID NO: 53667 - protein, 19 aa, Artificial sequence
  Protein classification predicting sequence
PYNAPLIQFSSWMGGDRDG

SEQ ID NO: 53668 - protein, 8 aa, Artificial sequence
  Protein classification predicting sequence
ELSGKRPL

SEQ ID NO: 53669 - protein, 18 aa, Artificial sequence
  Protein classification predicting sequence
FHGRGGTVGRGGGPTHLA

SEQ ID NO: 53670 - protein, 9 aa, Artificial sequence
  Protein classification predicting sequence
GRMNIGSRP

SEQ ID NO: 53671 - protein, 10 aa, Artificial sequence
  Protein classification predicting sequence
ESLRAIPWIF

SEQ ID NO: 53672 - protein, 7 aa, Artificial sequence
  Protein classification predicting sequence
ILQDLHG

SEQ ID NO: 53673 - protein, 7 aa, Artificial sequence
  Protein classification predicting sequence
TAHPTQS

SEQ ID NO: 53674 - protein, 7 aa, Artificial sequence
  Protein classification predicting sequence
RRSLLQK

SEQ ID NO: 53675 - protein, 6 aa, Artificial sequence
  Protein classification predicting sequence
YIEFWK

SEQ ID NO: 53676 - protein, 7 aa, Artificial sequence
  Protein classification predicting sequence
SLCDCGD

SEQ ID NO: 53677 - protein, 7 aa, Artificial sequence
  Protein classification predicting sequence
TFGLSLV

SEQ ID NO: 53678 - protein, 5 aa, Artificial sequence
  Protein classification predicting sequence
RHTDV

SEQ ID NO: 53679 - protein, 6 aa, Artificial sequence
  Protein classification predicting sequence
VVPLFE

SEQ ID NO: 53680 - protein, 7 aa, Artificial sequence
  Protein classification predicting sequence
SAAWQLY

SEQ ID NO: 53681 - protein, 8 aa, Artificial sequence
  Protein classification predicting sequence
YFRSATPE

SEQ ID NO: 53682 - protein, 11 aa, Artificial sequence
  Protein classification predicting sequence
EYGRMNIGSRP

SEQ ID NO: 53683 - protein, 7 aa, Artificial sequence
  Protein classification predicting sequence
GSRPAKR

SEQ ID NO: 53684 - protein, 9 aa, Artificial sequence
  Protein classification predicting sequence
GSRPAKRRP

SEQ ID NO: 53685 - protein, 7 aa, Artificial sequence
  Protein classification predicting sequence
YITTLNV

SEQ ID NO: 53686 - protein, 8 aa, Artificial sequence
  Protein classification predicting sequence
KVSEDDKL

SEQ ID NO: 53687 - protein, 10 aa, Artificial sequence
  Protein classification predicting sequence
HDPKKLEELG

SEQ ID NO: 53688 - protein, 9 aa, Artificial sequence
  Protein classification predicting sequence
LKNQTVDLV

SEQ ID NO: 53689 - protein, 20 aa, Artificial sequence
  Protein classification predicting sequence
TAHPTQSVRRSLLQKHGRIR

SEQ ID NO: 53690 - protein, 8 aa, Artificial sequence
  Protein classification predicting sequence
GVPKFLRR

SEQ ID NO: 53691 - protein, 9 aa, Artificial sequence
  Protein classification predicting sequence
DTALKNIGI

SEQ ID NO: 53692 - protein, 10 aa, Artificial sequence
  Protein classification predicting sequence
LMFELSMWRC

SEQ ID NO: 53693 - protein, 10 aa, Artificial sequence
  Protein classification predicting sequence
LVKLDIRQES

SEQ ID NO: 53694 - protein, 8 aa, Artificial sequence
  Protein classification predicting sequence
EIADVLDT

SEQ ID NO: 53695 - protein, 19 aa, Artificial sequence
  Protein classification predicting sequence
PLRVVPLFEKLADLEAAPA

SEQ ID NO: 53696 - protein, 18 aa, Artificial sequence
  Protein classification predicting sequence
GKQEVMIGYSDSGKDAGR

SEQ ID NO: 53697 - protein, 11 aa, Artificial sequence
  Protein classification predicting sequence
QGEVIEQSFGE

SEQ ID NO: 53698 - protein, 9 aa, Artificial sequence
  Protein classification predicting sequence
EMVFAKGDP

SEQ ID NO: 53699 - protein, 6 aa, Artificial sequence
  Protein classification predicting sequence
LRANYE

SEQ ID NO: 53700 - protein, 19 aa, Artificial sequence
  Protein classification predicting sequence
YITTLNVCQAYTLKRIRDP

SEQ ID NO: 53701 - protein, 14 aa, Artificial sequence
  Protein classification predicting sequence
QIEDLMFELSMWRC

SEQ ID NO: 53702 - protein, 19 aa, Artificial sequence
  Protein classification predicting sequence
QIEDLMFELSMWRCSDELR

SEQ ID NO: 53703 - protein, 8 aa, Artificial sequence
  Protein classification predicting sequence
DVLDTFHV

SEQ ID NO: 53704 - protein, 20 aa, Artificial sequence
  Protein classification predicting sequence
ISMATAPSDVLAVELLQREC

SEQ ID NO: 53705 - protein, 6 aa, Artificial sequence
  Protein classification predicting sequence
WYRNRI

SEQ ID NO: 53706 - protein, 6 aa, Artificial sequence
  Protein classification predicting sequence
RDSYIT

SEQ ID NO: 53707 - protein, 7 aa, Artificial sequence
  Protein classification predicting sequence
LNVCQAY

SEQ ID NO: 53708 - protein, 7 aa, Artificial sequence
  Protein classification predicting sequence
LKRIRDP

SEQ ID NO: 53709 - protein, 10 aa, Artificial sequence
  Protein classification predicting sequence
TESDIEETLK

SEQ ID NO: 53710 - protein, 12 aa, Artificial sequence
  Protein classification predicting sequence
DTALKNIGINER

SEQ ID NO: 53711 - protein, 7 aa, Artificial sequence
  Protein classification predicting sequence
GKRPLFG

SEQ ID NO: 53712 - protein, 13 aa, Artificial sequence
  Protein classification predicting sequence
GSLRVTVQGEVIE

SEQ ID NO: 53713 - protein, 12 aa, Artificial sequence
  Protein classification predicting sequence
TAATLEHGMHPP

SEQ ID NO: 53714 - protein, 6 aa, Artificial sequence
  Protein classification predicting sequence
YDKLLV

SEQ ID NO: 53715 - protein, 8 aa, Artificial sequence
  Protein classification predicting sequence
ASIDAQLR

SEQ ID NO: 53716 - protein, 9 aa, Artificial sequence
  Protein classification predicting sequence
TFHVIAELP

SEQ ID NO: 53717 - protein, 20 aa, Artificial sequence
  Protein classification predicting sequence
PLRVVPLFEKLADLEAAPAA

SEQ ID NO: 53718 - protein, 21 aa, Artificial sequence
  Protein classification predicting sequence
TIHGSLRVTVQGEVIEQSFGE

SEQ ID NO: 53719 - protein, 18 aa, Artificial sequence
  Protein classification predicting sequence
GSLRVTVQGEVIEQSFGE

SEQ ID NO: 53720 - protein, 7 aa, Artificial sequence
  Protein classification predicting sequence
LLVSEDL

SEQ ID NO: 53721 - protein, 8 aa, Artificial sequence
  Protein classification predicting sequence
LLLQVAGH

SEQ ID NO: 53722 - protein, 6 aa, Artificial sequence
  Protein classification predicting sequence
GDFADE

SEQ ID NO: 53723 - protein, 7 aa, Artificial sequence
  Protein classification predicting sequence
GRIRDCL

SEQ ID NO: 53724 - protein, 8 aa, Artificial sequence
  Protein classification predicting sequence
SAAWQLYK

SEQ ID NO: 53725 - protein, 11 aa, Artificial sequence
  Protein classification predicting sequence
SAAWQLYKTQE

SEQ ID NO: 53726 - protein, 6 aa, Artificial sequence
  Protein classification predicting sequence
LMDEMA

SEQ ID NO: 53727 - protein, 7 aa, Artificial sequence
  Protein classification predicting sequence
ATEEYRS

SEQ ID NO: 53728 - protein, 19 aa, Artificial sequence
  Protein classification predicting sequence
VFKEPRFVEYFRLATPELE

SEQ ID NO: 53729 - protein, 14 aa, Artificial sequence
  Protein classification predicting sequence
YITTLNVCQAYTLK

SEQ ID NO: 53730 - protein, 10 aa, Artificial sequence
  Protein classification predicting sequence
SEYAPGLEDT

SEQ ID NO: 53731 - protein, 13 aa, Artificial sequence
  Protein classification predicting sequence
FSHMLNLANLAEE

SEQ ID NO: 53732 - protein, 7 aa, Artificial sequence
  Protein classification predicting sequence
SIDAQLR

SEQ ID NO: 53733 - protein, 9 aa, Artificial sequence
  Protein classification predicting sequence
AKHYIEFWK

SEQ ID NO: 53734 - protein, 7 aa, Artificial sequence
  Protein classification predicting sequence
DVRDKLY

SEQ ID NO: 53735 - protein, 12 aa, Artificial sequence
  Protein classification predicting sequence
LEPLELCYRSLC

SEQ ID NO: 53736 - protein, 9 aa, Artificial sequence
  Protein classification predicting sequence
RQEWLLSEL

SEQ ID NO: 53737 - protein, 8 aa, Artificial sequence
  Protein classification predicting sequence
PKPEWRAL

SEQ ID NO: 53738 - protein, 21 aa, Artificial sequence
  Protein classification predicting sequence
SEYAPGLEDTLILTMKGIAAG

SEQ ID NO: 53739 - protein, 21 aa, Artificial sequence
  Protein classification predicting sequence
EYDALLLDRFLDILQDLHGED

SEQ ID NO: 53740 - protein, 10 aa, Artificial sequence
  Protein classification predicting sequence
ELGSVLTSLD

SEQ ID NO: 53741 - protein, 10 aa, Artificial sequence
  Protein classification predicting sequence
ATTESDIEET

SEQ ID NO: 53742 - protein, 9 aa, Artificial sequence
  Protein classification predicting sequence
CGDRPIADG

SEQ ID NO: 53743 - protein, 8 aa, Artificial sequence
  Protein classification predicting sequence
LLDFLRQV

SEQ ID NO: 53744 - protein, 13 aa, Artificial sequence
  Protein classification predicting sequence
AGHKDLLEGDPYL

SEQ ID NO: 53745 - protein, 16 aa, Artificial sequence
  Protein classification predicting sequence
VEQLLEPLELCYRSLC

SEQ ID NO: 53746 - protein, 6 aa, Artificial sequence
  Protein classification predicting sequence
SDIPEE

SEQ ID NO: 53747 - protein, 9 aa, Artificial sequence
  Protein classification predicting sequence
LELCYRSLC

SEQ ID NO: 53748 - protein, 7 aa, Artificial sequence
  Protein classification predicting sequence
WPFFRVT

SEQ ID NO: 53749 - protein, 20 aa, Artificial sequence
  Protein classification predicting sequence
CLAQLYAKDITPDDKQELDE

SEQ ID NO: 53750 - protein, 6 aa, Artificial sequence
  Protein classification predicting sequence
RQEWLL

SEQ ID NO: 53751 - protein, 18 aa, Artificial sequence
  Protein classification predicting sequence
YITTLNVCQAYTLKRIRD

SEQ ID NO: 53752 - protein, 14 aa, Artificial sequence
  Protein classification predicting sequence
REIQAAFRTDEIRR

SEQ ID NO: 53753 - protein, 11 aa, Artificial sequence
  Protein classification predicting sequence
SWMGGDRDGNP

SEQ ID NO: 53754 - protein, 8 aa, Artificial sequence
  Protein classification predicting sequence
RMMAANLY

SEQ ID NO: 53755 - protein, 16 aa, Artificial sequence
  Protein classification predicting sequence
TAPSDVLAVELLQREC

SEQ ID NO: 53756 - protein, 13 aa, Artificial sequence
  Protein classification predicting sequence
LQRFTAATLEHGM

SEQ ID NO: 53757 - protein, 16 aa, Artificial sequence
  Protein classification predicting sequence
LQRFTAATLEHGMHPP

SEQ ID NO: 53758 - protein, 11 aa, Artificial sequence
  Protein classification predicting sequence
QAYTLKRIRDP

SEQ ID NO: 53759 - protein, 8 aa, Artificial sequence
  Protein classification predicting sequence
VLTAHPTE

SEQ ID NO: 53760 - protein, 14 aa, Artificial sequence
  Protein classification predicting sequence
SWMGGDRDGNPNVT

SEQ ID NO: 53761 - protein, 13 aa, Artificial sequence
  Protein classification predicting sequence
VMIGYSDSAKDAG

SEQ ID NO: 53762 - protein, 6 aa, Artificial sequence
  Protein classification predicting sequence
SQPPGS

SEQ ID NO: 53763 - protein, 8 aa, Artificial sequence
  Protein classification predicting sequence
IDMLEMVL

SEQ ID NO: 53764 - protein, 7 aa, Artificial sequence
  Protein classification predicting sequence
AYRRRIK

SEQ ID NO: 53765 - protein, 8 aa, Artificial sequence
  Protein classification predicting sequence
KKGDFADE

SEQ ID NO: 53766 - protein, 7 aa, Artificial sequence
  Protein classification predicting sequence
QLYAKDI

SEQ ID NO: 53767 - protein, 11 aa, Artificial sequence
  Protein classification predicting sequence
RQVSTFGLSLV

SEQ ID NO: 53768 - protein, 14 aa, Artificial sequence
  Protein classification predicting sequence
PLRVVPLFEKLADL

SEQ ID NO: 53769 - protein, 16 aa, Artificial sequence
  Protein classification predicting sequence
QEVMIGYSDSGKDAGR

SEQ ID NO: 53770 - protein, 8 aa, Artificial sequence
  Protein classification predicting sequence
LSQPPDTI

SEQ ID NO: 53771 - protein, 6 aa, Artificial sequence
  Protein classification predicting sequence
GSLRVT

SEQ ID NO: 53772 - protein, 6 aa, Artificial sequence
  Protein classification predicting sequence
EYRSVV

SEQ ID NO: 53773 - protein, 13 aa, Artificial sequence
  Protein classification predicting sequence
GGIETLRAIPWIF

SEQ ID NO: 53774 - protein, 13 aa, Artificial sequence
  Protein classification predicting sequence
WTQTRFHLPVWLG

SEQ ID NO: 53775 - protein, 5 aa, Artificial sequence
  Protein classification predicting sequence
MYNQW

SEQ ID NO: 53776 - protein, 8 aa, Artificial sequence
  Protein classification predicting sequence
FFRVTIDL

SEQ ID NO: 53777 - protein, 6 aa, Artificial sequence
  Protein classification predicting sequence
DPYLKQ

SEQ ID NO: 53778 - protein, 7 aa, Artificial sequence
  Protein classification predicting sequence
TTLNVFQ

SEQ ID NO: 53779 - protein, 10 aa, Artificial sequence
  Protein classification predicting sequence
LVKLNPTSEY

SEQ ID NO: 53780 - protein, 14 aa, Artificial sequence
  Protein classification predicting sequence
EVMLGYSDSNKDGG

SEQ ID NO: 53781 - protein, 9 aa, Artificial sequence
  Protein classification predicting sequence
RLTEQGEVI

SEQ ID NO: 53782 - protein, 10 aa, Artificial sequence
  Protein classification predicting sequence
RLTEQGEVIA

SEQ ID NO: 53783 - protein, 6 aa, Artificial sequence
  Protein classification predicting sequence
RLDIRQ

SEQ ID NO: 53784 - protein, 9 aa, Artificial sequence
  Protein classification predicting sequence
IVPLFETIE

SEQ ID NO: 53785 - protein, 9 aa, Artificial sequence
  Protein classification predicting sequence
VGRGGGPSY

SEQ ID NO: 53786 - protein, 10 aa, Artificial sequence
  Protein classification predicting sequence
FSWAQCRLML

SEQ ID NO: 53787 - protein, 16 aa, Artificial sequence
  Protein classification predicting sequence
RLTVADEIENALSYYR

SEQ ID NO: 53788 - protein, 7 aa, Artificial sequence
  Protein classification predicting sequence
DEPYRRA

SEQ ID NO: 53789 - protein, 17 aa, Artificial sequence
  Protein classification predicting sequence
LRLFHGRGGTVGRGGGP

SEQ ID NO: 53790 - protein, 9 aa, Artificial sequence
  Protein classification predicting sequence
IEDLRAIPW

SEQ ID NO: 53791 - protein, 11 aa, Artificial sequence
  Protein classification predicting sequence
NVVPVLTAHPT

SEQ ID NO: 53792 - protein, 16 aa, Artificial sequence
  Protein classification predicting sequence
QEIMLGYSDSNKDGGY

SEQ ID NO: 53793 - protein, 7 aa, Artificial sequence
  Protein classification predicting sequence
LFHGRGG

SEQ ID NO: 53794 - protein, 7 aa, Artificial sequence
  Protein classification predicting sequence
VGRGGGP

SEQ ID NO: 53795 - protein, 10 aa, Artificial sequence
  Protein classification predicting sequence
LNIGSRPASR

SEQ ID NO: 53796 - protein, 10 aa, Artificial sequence
  Protein classification predicting sequence
LTAHPTEVQR

SEQ ID NO: 53797 - protein, 9 aa, Artificial sequence
  Protein classification predicting sequence
MPLDLRQHA

SEQ ID NO: 53798 - protein, 14 aa, Artificial sequence
  Protein classification predicting sequence
IRITEQGEVITAKY

SEQ ID NO: 53799 - protein, 8 aa, Artificial sequence
  Protein classification predicting sequence
MLSNMEQV

SEQ ID NO: 53800 - protein, 6 aa, Artificial sequence
  Protein classification predicting sequence
RAFSYF

SEQ ID NO: 53801 - protein, 8 aa, Artificial sequence
  Protein classification predicting sequence
LWQTALIR

SEQ ID NO: 53802 - protein, 8 aa, Artificial sequence
  Protein classification predicting sequence
AELGLVEL

SEQ ID NO: 53803 - protein, 8 aa, Artificial sequence
  Protein classification predicting sequence
YDAILAQP

SEQ ID NO: 53804 - protein, 7 aa, Artificial sequence
  Protein classification predicting sequence
ELLRRYR

SEQ ID NO: 53805 - protein, 6 aa, Artificial sequence
  Protein classification predicting sequence
PVARAF

SEQ ID NO: 53806 - protein, 6 aa, Artificial sequence
  Protein classification predicting sequence
PLFETI

SEQ ID NO: 53807 - protein, 7 aa, Artificial sequence
  Protein classification predicting sequence
RVTEQGE

SEQ ID NO: 53808 - protein, 8 aa, Artificial sequence
  Protein classification predicting sequence
LLALADAG

SEQ ID NO: 53809 - protein, 14 aa, Artificial sequence
  Protein classification predicting sequence
ATPELLALVGEEGA

SEQ ID NO: 53810 - protein, 9 aa, Artificial sequence
  Protein classification predicting sequence
TVSSLSLYT

SEQ ID NO: 53811 - protein, 14 aa, Artificial sequence
  Protein classification predicting sequence
AILEANLLPPPEPK

SEQ ID NO: 53812 - protein, 10 aa, Artificial sequence
  Protein classification predicting sequence
IMDELSVISC

SEQ ID NO: 53813 - protein, 6 aa, Artificial sequence
  Protein classification predicting sequence
GMLEMV

SEQ ID NO: 53814 - protein, 9 aa, Artificial sequence
  Protein classification predicting sequence
LWPLGKELR

SEQ ID NO: 53815 - protein, 15 aa, Artificial sequence
  Protein classification predicting sequence
PDPRVEQALMVTIAG

SEQ ID NO: 53816 - protein, 7 aa, Artificial sequence
  Protein classification predicting sequence
NTAEQYH

SEQ ID NO: 53817 - protein, 7 aa, Artificial sequence
  Protein classification predicting sequence
GEAASNP

SEQ ID NO: 53818 - protein, 6 aa, Artificial sequence
  Protein classification predicting sequence
CLKQLD

SEQ ID NO: 53819 - protein, 19 aa, Artificial sequence
  Protein classification predicting sequence
MRRLRQLIAQSWHTDEIRK

SEQ ID NO: 53820 - protein, 9 aa, Artificial sequence
  Protein classification predicting sequence
DEAKWGFAV

SEQ ID NO: 53821 - protein, 9 aa, Artificial sequence
  Protein classification predicting sequence
VLLLSRWKA

SEQ ID NO: 53822 - protein, 6 aa, Artificial sequence
  Protein classification predicting sequence
ACYQSL

SEQ ID NO: 53823 - protein, 7 aa, Artificial sequence
  Protein classification predicting sequence
CGMGIIA

SEQ ID NO: 53824 - protein, 8 aa, Artificial sequence
  Protein classification predicting sequence
GDYESWSE

SEQ ID NO: 53825 - protein, 15 aa, Artificial sequence
  Protein classification predicting sequence
PVAPLFETLDDLNNA

SEQ ID NO: 53826 - protein, 28 aa, Artificial sequence
  Protein classification predicting sequence
IQGKQMVMIGYSDSAKDAGVMAASWAQY

SEQ ID NO: 53827 - protein, 14 aa, Artificial sequence
  Protein classification predicting sequence
AQDALIKTCEKAGI

SEQ ID NO: 53828 - protein, 18 aa, Artificial sequence
  Protein classification predicting sequence
LYTGAILEANLLPPPEPK

SEQ ID NO: 53829 - protein, 8 aa, Artificial sequence
  Protein classification predicting sequence
YRGYVREN

SEQ ID NO: 53830 - protein, 14 aa, Artificial sequence
  Protein classification predicting sequence
ELGKLPLGSRPAKR

SEQ ID NO: 53831 - protein, 15 aa, Artificial sequence
  Protein classification predicting sequence
GGVESLRAIPWIFAW

SEQ ID NO: 53832 - protein, 6 aa, Artificial sequence
  Protein classification predicting sequence
LEEMCR

SEQ ID NO: 53833 - protein, 7 aa, Artificial sequence
  Protein classification predicting sequence
WPFFSTR

SEQ ID NO: 53834 - protein, 13 aa, Artificial sequence
  Protein classification predicting sequence
YTDPLNVLQAELL

SEQ ID NO: 53835 - protein, 18 aa, Artificial sequence
  Protein classification predicting sequence
YTDPLNVLQAELLHRSRQ

SEQ ID NO: 53836 - protein, 10 aa, Artificial sequence
  Protein classification predicting sequence
LRAIPWVFSW

SEQ ID NO: 53837 - protein, 12 aa, Artificial sequence
  Protein classification predicting sequence
PVARAFSQFLNL

SEQ ID NO: 53838 - protein, 6 aa, Artificial sequence
  Protein classification predicting sequence
TAHPTE

SEQ ID NO: 53839 - protein, 5 aa, Artificial sequence
  Protein classification predicting sequence
CYQSL

SEQ ID NO: 53840 - protein, 6 aa, Artificial sequence
  Protein classification predicting sequence
TCKVIA

SEQ ID NO: 53841 - protein, 14 aa, Artificial sequence
  Protein classification predicting sequence
GLRVTEQGEMIRFK

SEQ ID NO: 53842 - protein, 11 aa, Artificial sequence
  Protein classification predicting sequence
KLPLGSRPAKR

SEQ ID NO: 53843 - protein, 9 aa, Artificial sequence
  Protein classification predicting sequence
QNRLMLPAW

SEQ ID NO: 53844 - protein, 7 aa, Artificial sequence
  Protein classification predicting sequence
GMLEMVF

SEQ ID NO: 53845 - protein, 10 aa, Artificial sequence
  Protein classification predicting sequence
LRNIYTDPLN

SEQ ID NO: 53846 - protein, 11 aa, Artificial sequence
  Protein classification predicting sequence
LPLLINISEDV

SEQ ID NO: 53847 - protein, 17 aa, Artificial sequence
  Protein classification predicting sequence
ILENVNVVPVLTAHPTQ

SEQ ID NO: 53848 - protein, 7 aa, Artificial sequence
  Protein classification predicting sequence
MQTDIIR

SEQ ID NO: 53849 - protein, 15 aa, Artificial sequence
  Protein classification predicting sequence
HGRGGTVGRGGGPSY

SEQ ID NO: 53850 - protein, 8 aa, Artificial sequence
  Protein classification predicting sequence
AYYNLEML

SEQ ID NO: 53851 - protein, 14 aa, Artificial sequence
  Protein classification predicting sequence
RIMFPGWYGVGSAF

SEQ ID NO: 53852 - protein, 8 aa, Artificial sequence
  Protein classification predicting sequence
SLLSNVDM

SEQ ID NO: 53853 - protein, 7 aa, Artificial sequence
  Protein classification predicting sequence
LNYIQIE

SEQ ID NO: 53854 - protein, 12 aa, Artificial sequence
  Protein classification predicting sequence
VQEVYELSAEYE

SEQ ID NO: 53855 - protein, 8 aa, Artificial sequence
  Protein classification predicting sequence
YELSAEYE

SEQ ID NO: 53856 - protein, 7 aa, Artificial sequence
  Protein classification predicting sequence
KLKKGDF

SEQ ID NO: 53857 - protein, 11 aa, Artificial sequence
  Protein classification predicting sequence
NATTESDIEET

SEQ ID NO: 53858 - protein, 6 aa, Artificial sequence
  Protein classification predicting sequence
VRDKLY

SEQ ID NO: 53859 - protein, 11 aa, Artificial sequence
  Protein classification predicting sequence
GKRPLFGPDLP

SEQ ID NO: 53860 - protein, 6 aa, Artificial sequence
  Protein classification predicting sequence
NLHMLQ

SEQ ID NO: 53861 - protein, 5 aa, Artificial sequence
  Protein classification predicting sequence
WIGGD

SEQ ID NO: 53862 - protein, 7 aa, Artificial sequence
  Protein classification predicting sequence
LVAATLE

SEQ ID NO: 53863 - protein, 7 aa, Artificial sequence
  Protein classification predicting sequence
LSNIAED

SEQ ID NO: 53864 - protein, 11 aa, Artificial sequence
  Protein classification predicting sequence
GGDRDGNPFVT

SEQ ID NO: 53865 - protein, 10 aa, Artificial sequence
  Protein classification predicting sequence
PEIGRRNLET

SEQ ID NO: 53866 - protein, 10 aa, Artificial sequence
  Protein classification predicting sequence
RNLETLVAAT

SEQ ID NO: 53867 - protein, 9 aa, Artificial sequence
  Protein classification predicting sequence
LLSNMDMVL

SEQ ID NO: 53868 - protein, 8 aa, Artificial sequence
  Protein classification predicting sequence
LLANLAED

SEQ ID NO: 53869 - protein, 6 aa, Artificial sequence
  Protein classification predicting sequence
VGLRYY

SEQ ID NO: 53870 - protein, 5 aa, Artificial sequence
  Protein classification predicting sequence
WPFFR

SEQ ID NO: 53871 - protein, 10 aa, Artificial sequence
  Protein classification predicting sequence
CYQSLQACGM

SEQ ID NO: 53872 - protein, 8 aa, Artificial sequence
  Protein classification predicting sequence
RLDIRQES

SEQ ID NO: 53873 - protein, 6 aa, Artificial sequence
  Protein classification predicting sequence
EVLDTC

SEQ ID NO: 53874 - protein, 6 aa, Artificial sequence
  Protein classification predicting sequence
YIISMA

SEQ ID NO: 53875 - protein, 10 aa, Artificial sequence
  Protein classification predicting sequence
SDVLAVHLLL

SEQ ID NO: 53876 - protein, 8 aa, Artificial sequence
  Protein classification predicting sequence
MAASWAQY

SEQ ID NO: 53877 - protein, 9 aa, Artificial sequence
  Protein classification predicting sequence
DLPWIAESI

SEQ ID NO: 53878 - protein, 10 aa, Artificial sequence
  Protein classification predicting sequence
LRNVYTDPLN

SEQ ID NO: 53879 - protein, 27 aa, Artificial sequence
  Protein classification predicting sequence
GKQEVMIGYSDSGKDAGRFSAAWQLYK

SEQ ID NO: 53880 - protein, 8 aa, Artificial sequence
  Protein classification predicting sequence
LRAIPWIF

SEQ ID NO: 53881 - protein, 11 aa, Artificial sequence
  Protein classification predicting sequence
PPISPKPEWRA

SEQ ID NO: 53882 - protein, 6 aa, Artificial sequence
  Protein classification predicting sequence
ITTLNV

SEQ ID NO: 53883 - protein, 8 aa, Artificial sequence
  Protein classification predicting sequence
RSNVSMLG

SEQ ID NO: 53884 - protein, 12 aa, Artificial sequence
  Protein classification predicting sequence
LLGDTIKEALGE

SEQ ID NO: 53885 - protein, 7 aa, Artificial sequence
  Protein classification predicting sequence
RRTLIHK

SEQ ID NO: 53886 - protein, 7 aa, Artificial sequence
  Protein classification predicting sequence
MRRLRQL

SEQ ID NO: 53887 - protein, 6 aa, Artificial sequence
  Protein classification predicting sequence
VENSLW

SEQ ID NO: 53888 - protein, 17 aa, Artificial sequence
  Protein classification predicting sequence
DIQVLVSELSMSECTPE

SEQ ID NO: 53889 - protein, 14 aa, Artificial sequence
  Protein classification predicting sequence
LVRIDVRQESTRHT

SEQ ID NO: 53890 - protein, 12 aa, Artificial sequence
  Protein classification predicting sequence
PLFETLDDLNNA

SEQ ID NO: 53891 - protein, 7 aa, Artificial sequence
  Protein classification predicting sequence
WAQYRAQ

SEQ ID NO: 53892 - protein, 9 aa, Artificial sequence
  Protein classification predicting sequence
LTLFHGRGG

SEQ ID NO: 53893 - protein, 17 aa, Artificial sequence
  Protein classification predicting sequence
IGRGGAPAHAALLSQPP

SEQ ID NO: 53894 - protein, 8 aa, Artificial sequence
  Protein classification predicting sequence
MCRDWPFF

SEQ ID NO: 53895 - protein, 19 aa, Artificial sequence
  Protein classification predicting sequence
GMLEMVFAKADLWLAEYYD

SEQ ID NO: 53896 - protein, 13 aa, Artificial sequence
  Protein classification predicting sequence
HLMADLPWIAESI

SEQ ID NO: 53897 - protein, 13 aa, Artificial sequence
  Protein classification predicting sequence
LRNVYTDPLNVLQ

SEQ ID NO: 53898 - protein, 12 aa, Artificial sequence
  Protein classification predicting sequence
YSALRSNVSMLG

SEQ ID NO: 53899 - protein, 16 aa, Artificial sequence
  Protein classification predicting sequence
KVETIRKLSKSARAGN

SEQ ID NO: 53900 - protein, 7 aa, Artificial sequence
  Protein classification predicting sequence
LLSRWKA

SEQ ID NO: 53901 - protein, 7 aa, Artificial sequence
  Protein classification predicting sequence
SKRPLLP

SEQ ID NO: 53902 - protein, 11 aa, Artificial sequence
  Protein classification predicting sequence
PLFETLDDLNN

SEQ ID NO: 53903 - protein, 6 aa, Artificial sequence
  Protein classification predicting sequence
WAQYRA

SEQ ID NO: 53904 - protein, 18 aa, Artificial sequence
  Protein classification predicting sequence
SLKGGLRVTEQGEMIRFK

SEQ ID NO: 53905 - protein, 28 aa, Artificial sequence
  Protein classification predicting sequence
SLKGGLRVTEQGEMIRFKLGLPDVAVNS

SEQ ID NO: 53906 - protein, 9 aa, Artificial sequence
  Protein classification predicting sequence
LEANLLPPP

SEQ ID NO: 53907 - protein, 6 aa, Artificial sequence
  Protein classification predicting sequence
FVPYFR

SEQ ID NO: 53908 - protein, 19 aa, Artificial sequence
  Protein classification predicting sequence
ATPELELGKLPLGSRPAKR

SEQ ID NO: 53909 - protein, 5 aa, Artificial sequence
  Protein classification predicting sequence
WSQNR

SEQ ID NO: 53910 - protein, 11 aa, Artificial sequence
  Protein classification predicting sequence
DIKAVLNVENN

SEQ ID NO: 53911 - protein, 16 aa, Artificial sequence
  Protein classification predicting sequence
EPLNMLQAELLYRTRQ

SEQ ID NO: 53912 - protein, 7 aa, Artificial sequence
  Protein classification predicting sequence
LEEALMV

SEQ ID NO: 53913 - protein, 9 aa, Artificial sequence
  Protein classification predicting sequence
EKMASIDAQ

SEQ ID NO: 53914 - protein, 6 aa, Artificial sequence
  Protein classification predicting sequence
VQECYE

SEQ ID NO: 53915 - protein, 6 aa, Artificial sequence
  Protein classification predicting sequence
KDITPD

SEQ ID NO: 53916 - protein, 6 aa, Artificial sequence
  Protein classification predicting sequence
IGINER

SEQ ID NO: 53917 - protein, 12 aa, Artificial sequence
  Protein classification predicting sequence
RVILGDVRDKLY

SEQ ID NO: 53918 - protein, 10 aa, Artificial sequence
  Protein classification predicting sequence
LDIRQESDRH

SEQ ID NO: 53919 - protein, 6 aa, Artificial sequence
  Protein classification predicting sequence
WLLSEL

SEQ ID NO: 53920 - protein, 11 aa, Artificial sequence
  Protein classification predicting sequence
FGAYIISMATA

SEQ ID NO: 53921 - protein, 35 aa, Artificial sequence
  Protein classification predicting sequence
RVTVQGEVIEQSFGEEHLCFRTLQRFTAATLEHGM

SEQ ID NO: 53922 - protein, 38 aa, Artificial sequence
  Protein classification predicting sequence
RVTVQGEVIEQSFGEEHLCFRTLQRFTAATLEHGMRPP

SEQ ID NO: 53923 - protein, 8 aa, Artificial sequence
  Protein classification predicting sequence
YQAILAQP

SEQ ID NO: 53924 - protein, 7 aa, Artificial sequence
  Protein classification predicting sequence
HRIRRRR

SEQ ID NO: 53925 - protein, 8 aa, Artificial sequence
  Protein classification predicting sequence
WHTDEIRK

SEQ ID NO: 53926 - protein, 11 aa, Artificial sequence
  Protein classification predicting sequence
FVEYFRLATPE

SEQ ID NO: 53927 - protein, 10 aa, Artificial sequence
  Protein classification predicting sequence
TEQGEMIRFK

SEQ ID NO: 53928 - protein, 8 aa, Artificial sequence
  Protein classification predicting sequence
YFRQATPE

SEQ ID NO: 53929 - protein, 7 aa, Artificial sequence
  Protein classification predicting sequence
TAVRFRR

SEQ ID NO: 53930 - protein, 7 aa, Artificial sequence
  Protein classification predicting sequence
HHNRRRR

SEQ ID NO: 53931 - protein, 8 aa, Artificial sequence
  Protein classification predicting sequence
LWQTRMLR

SEQ ID NO: 53932 - protein, 12 aa, Artificial sequence
  Protein classification predicting sequence
VADEIENALSYY

SEQ ID NO: 53933 - protein, 12 aa, Artificial sequence
  Protein classification predicting sequence
SHTETLSDLLEV

SEQ ID NO: 53934 - protein, 8 aa, Artificial sequence
  Protein classification predicting sequence
IRLTEQGE

SEQ ID NO: 53935 - protein, 8 aa, Artificial sequence
  Protein classification predicting sequence
GSRPASRK

SEQ ID NO: 53936 - protein, 10 aa, Artificial sequence
  Protein classification predicting sequence
QEIMLGYSDS

SEQ ID NO: 53937 - protein, 7 aa, Artificial sequence
  Protein classification predicting sequence
MLGYSDS

SEQ ID NO: 53938 - protein, 8 aa, Artificial sequence
  Protein classification predicting sequence
LPIASRPV

SEQ ID NO: 53939 - protein, 7 aa, Artificial sequence
  Protein classification predicting sequence
EPYASAQ

SEQ ID NO: 53940 - protein, 7 aa, Artificial sequence
  Protein classification predicting sequence
LDMRQNS

SEQ ID NO: 53941 - protein, 8 aa, Artificial sequence
  Protein classification predicting sequence
FRTLLSNM

SEQ ID NO: 53942 - protein, 19 aa, Artificial sequence
  Protein classification predicting sequence
TRYLGIGDYESWSEADKQA

SEQ ID NO: 53943 - protein, 16 aa, Artificial sequence
  Protein classification predicting sequence
LIRELNSKRPLLPRNW

SEQ ID NO: 53944 - protein, 7 aa, Artificial sequence
  Protein classification predicting sequence
KADLWLA

SEQ ID NO: 53945 - protein, 9 aa, Artificial sequence
  Protein classification predicting sequence
WLEARLKGE

SEQ ID NO: 53946 - protein, 14 aa, Artificial sequence
  Protein classification predicting sequence
WLEARLKGEELPKP

SEQ ID NO: 53947 - protein, 15 aa, Artificial sequence
  Protein classification predicting sequence
GGLRVTEQGEMIRFK

SEQ ID NO: 53948 - protein, 55 aa, Artificial sequence
  Protein classification predicting sequence
ANRQELLTTLQNLSNDELLPVARAFSQFLNLANTAEQYHSISPKGEAASNPEVIA

SEQ ID NO: 53949 - protein, 9 aa, Artificial sequence
  Protein classification predicting sequence
TLRKLKNQP

SEQ ID NO: 53950 - protein, 155 aa, Artificial sequence
  Protein classification predicting sequence
TLRKLKNQPDLNDATIKKAVESLSLELVLTAHPTEITRRTLIHKMGEINNCLKQLDNTDIADYERHQVMRRLRQLIAQSWHTDEIRKQRPSPVDEAKWGFAVVENSLWQGVPNYLRELNEQLEENLGYKLPVDFVPVRFTSWMGGDRDGNPNVTA

SEQ ID NO: 53951 - protein, 21 aa, Artificial sequence
  Protein classification predicting sequence
ITRHVLLLSRWKATDLFLKDI

SEQ ID NO: 53952 - protein, 8 aa, Artificial sequence
  Protein classification predicting sequence
AFNQFLNL

SEQ ID NO: 53953 - protein, 8 aa, Artificial sequence
  Protein classification predicting sequence
LVLTAHPT

SEQ ID NO: 53954 - protein, 8 aa, Artificial sequence
  Protein classification predicting sequence
RLRQLIAQ

SEQ ID NO: 53955 - protein, 8 aa, Artificial sequence
  Protein classification predicting sequence
RPTPVDEA

SEQ ID NO: 53956 - protein, 6 aa, Artificial sequence
  Protein classification predicting sequence
YVISMA

SEQ ID NO: 53957 - protein, 8 aa, Artificial sequence
  Protein classification predicting sequence
VMIGYSDS

SEQ ID NO: 53958 - protein, 8 aa, Artificial sequence
  Protein classification predicting sequence
LLPPPEPK

SEQ ID NO: 53959 - protein, 8 aa, Artificial sequence
  Protein classification predicting sequence
YFRAATPE

SEQ ID NO: 53960 - protein, 8 aa, Artificial sequence
  Protein classification predicting sequence
LPAWLGAG

SEQ ID NO: 53961 - protein, 8 aa, Artificial sequence
  Protein classification predicting sequence
LRNPYIDP

SEQ ID NO: 53962 - protein, 31 aa, Artificial sequence
  Protein classification predicting sequence
TIKKAVESLSLELVLTAHPTEITRRTLIHKM

SEQ ID NO: 53963 - protein, 6 aa, Artificial sequence
  Protein classification predicting sequence
DIADYE

SEQ ID NO: 53964 - protein, 44 aa, Artificial sequence
  Protein classification predicting sequence
RPSPVDEAKWGFAVVENSLWQGVPNYLRELNEQLEENLGYKLPV

SEQ ID NO: 53965 - protein, 23 aa, Artificial sequence
  Protein classification predicting sequence
LWEPLYACYQSLQACGMGIIANG

SEQ ID NO: 53966 - protein, 33 aa, Artificial sequence
  Protein classification predicting sequence
LLDTLRRVKCFGVPLVRIDIRQESTRHTEALGE

SEQ ID NO: 53967 - protein, 48 aa, Artificial sequence
  Protein classification predicting sequence
GSIAAYVISMAKTPSDVLAVHLLLKEAGIGFAMPVAPLFETLDDLNNA

SEQ ID NO: 53968 - protein, 104 aa, Artificial sequence
  Protein classification predicting sequence
YRGYVRENKDFVPYFRSATPEQELGKLPLGSRPAKRRPTGGVESLRAIPWIFAWTQNRLMLPAWLGAGTALQKVVEDGKQSELEAMCRDWPFFSTRLGMLEMVF

SEQ ID NO: 53969 - protein, 31 aa, Artificial sequence
  Protein classification predicting sequence
EEDIKVVLAIANDSHLMADLPWIAESIQLRN

SEQ ID NO: 53970 - protein, 7 aa, Artificial sequence
  Protein classification predicting sequence
LYQTRER

SEQ ID NO: 53971 - protein, 14 aa, Artificial sequence
  Protein classification predicting sequence
FHGRGGTVGRGGGP

SEQ ID NO: 53972 - protein, 9 aa, Artificial sequence
  Protein classification predicting sequence
HLAILSQPP

SEQ ID NO: 53973 - protein, 7 aa, Artificial sequence
  Protein classification predicting sequence
SPKPEWR

SEQ ID NO: 53974 - protein, 18 aa, Artificial sequence
  Protein classification predicting sequence
VNVVPVLTAHPTQVQRKT

SEQ ID NO: 53975 - protein, 8 aa, Artificial sequence
  Protein classification predicting sequence
QAVDIFGF

SEQ ID NO: 53976 - protein, 8 aa, Artificial sequence
  Protein classification predicting sequence
IDMRQDSS

SEQ ID NO: 53977 - protein, 12 aa, Artificial sequence
  Protein classification predicting sequence
ANIVDDYSSLSE

SEQ ID NO: 53978 - protein, 13 aa, Artificial sequence
  Protein classification predicting sequence
SGWTLYKAQNELT

SEQ ID NO: 53979 - protein, 29 aa, Artificial sequence
  Protein classification predicting sequence
AITSQPFGSIKDRIRLTEQGEIIENKYGN

SEQ ID NO: 53980 - protein, 9 aa, Artificial sequence
  Protein classification predicting sequence
LEMLISASI

SEQ ID NO: 53981 - protein, 29 aa, Artificial sequence
  Protein classification predicting sequence
GLRAIPWVFSWSQNRIMFPGWYGVGSAFK

SEQ ID NO: 53982 - protein, 18 aa, Artificial sequence
  Protein classification predicting sequence
SLLSNVDMVLSKSNMNIA

SEQ ID NO: 53983 - protein, 6 aa, Artificial sequence
  Protein classification predicting sequence
EWQLTK

SEQ ID NO: 53984 - protein, 10 aa, Artificial sequence
  Protein classification predicting sequence
RLPYFNVLNY

SEQ ID NO: 53985 - protein, 7 aa, Artificial sequence
  Protein classification predicting sequence
QIELIKR

SEQ ID NO: 53986 - protein, 8 aa, Artificial sequence
  Protein classification predicting sequence
EAAAELLR

SEQ ID NO: 53987 - protein, 9 aa, Artificial sequence
  Protein classification predicting sequence
LVRAFSTYF

SEQ ID NO: 53988 - protein, 10 aa, Artificial sequence
  Protein classification predicting sequence
WIGGDRDGNP

SEQ ID NO: 53989 - protein, 10 aa, Artificial sequence
  Protein classification predicting sequence
QEVMLGYSDS

SEQ ID NO: 53990 - protein, 8 aa, Artificial sequence
  Protein classification predicting sequence
LRAIPWVF

SEQ ID NO: 53991 - protein, 10 aa, Artificial sequence
  Protein classification predicting sequence
LAYEINYQNN

SEQ ID NO: 53992 - protein, 6 aa, Artificial sequence
  Protein classification predicting sequence
IREKKL

SEQ ID NO: 53993 - protein, 8 aa, Artificial sequence
  Protein classification predicting sequence
LYRTFSLS

SEQ ID NO: 53994 - protein, 20 aa, Artificial sequence
  Protein classification predicting sequence
KITFFHGRGGTVGRGGGPSY

SEQ ID NO: 53995 - protein, 7 aa, Artificial sequence
  Protein classification predicting sequence
RLTEQGE

SEQ ID NO: 53996 - protein, 7 aa, Artificial sequence
  Protein classification predicting sequence
NKYGNKD

SEQ ID NO: 53997 - protein, 11 aa, Artificial sequence
  Protein classification predicting sequence
NKYGNKDVAYY

SEQ ID NO: 53998 - protein, 17 aa, Artificial sequence
  Protein classification predicting sequence
IYRDLVFGNEHFYDYFF

SEQ ID NO: 53999 - protein, 15 aa, Artificial sequence
  Protein classification predicting sequence
ILDEWQLTKNVILAI

SEQ ID NO: 54000 - protein, 8 aa, Artificial sequence
  Protein classification predicting sequence
LIHITING

SEQ ID NO: 54001 - protein, 7 aa, Artificial sequence
  Protein classification predicting sequence
LLRKYRD

SEQ ID NO: 54002 - protein, 19 aa, Artificial sequence
  Protein classification predicting sequence
NYQEIMLGYSDSNKDGGYL

SEQ ID NO: 54003 - protein, 83 aa, Artificial sequence
  Protein classification predicting sequence
IIAEEVALLKEMLENITRRMIGDDAFTVIESIMVLSEKQDYIELEKVVANISNQEMEVISRYFSILPLLINISEDVDLAYEIN

SEQ ID NO: 54004 - protein, 18 aa, Artificial sequence
  Protein classification predicting sequence
NEIDSFREIMDSIVADSN

SEQ ID NO: 54005 - protein, 16 aa, Artificial sequence
  Protein classification predicting sequence
NVVPVLTAHPTQVQRK

SEQ ID NO: 54006 - protein, 7 aa, Artificial sequence
  Protein classification predicting sequence
WTLYKAQ

SEQ ID NO: 54007 - protein, 6 aa, Artificial sequence
  Protein classification predicting sequence
AITSQP

SEQ ID NO: 54008 - protein, 10 aa, Artificial sequence
  Protein classification predicting sequence
MFPGWYGVGS

SEQ ID NO: 54009 - protein, 8 aa, Artificial sequence
  Protein classification predicting sequence
PGWYGVGS

SEQ ID NO: 54010 - protein, 8 aa, Artificial sequence
  Protein classification predicting sequence
TKNVILAI

SEQ ID NO: 54011 - protein, 8 aa, Artificial sequence
  Protein classification predicting sequence
KLESSNNQ

SEQ ID NO: 54012 - protein, 16 aa, Artificial sequence
  Protein classification predicting sequence
LPLLINISEDVDLAYE

SEQ ID NO: 54013 - protein, 6 aa, Artificial sequence
  Protein classification predicting sequence
DNARDI

SEQ ID NO: 54014 - protein, 10 aa, Artificial sequence
  Protein classification predicting sequence
QSEVILNYYI

SEQ ID NO: 54015 - protein, 25 aa, Artificial sequence
  Protein classification predicting sequence
LGEEVIKQHIISHTESVSDMFELAI

SEQ ID NO: 54016 - protein, 12 aa, Artificial sequence
  Protein classification predicting sequence
IKDRIRLTEQGE

SEQ ID NO: 54017 - protein, 9 aa, Artificial sequence
  Protein classification predicting sequence
FREIMDSIV

SEQ ID NO: 54018 - protein, 17 aa, Artificial sequence
  Protein classification predicting sequence
GLRAIPWVFSWSQNRIM

SEQ ID NO: 54019 - protein, 11 aa, Artificial sequence
  Protein classification predicting sequence
TAHPTETRRRT

SEQ ID NO: 54020 - protein, 10 aa, Artificial sequence
  Protein classification predicting sequence
FGAYIISMAT

SEQ ID NO: 54021 - protein, 11 aa, Artificial sequence
  Protein classification predicting sequence
PLRVVPLFEKL

SEQ ID NO: 54022 - protein, 6 aa, Artificial sequence
  Protein classification predicting sequence
GKQEVM

SEQ ID NO: 54023 - protein, 11 aa, Artificial sequence
  Protein classification predicting sequence
GYSDSGKDAGR

SEQ ID NO: 54024 - protein, 7 aa, Artificial sequence
  Protein classification predicting sequence
SNVSMLG

SEQ ID NO: 54025 - protein, 15 aa, Artificial sequence
  Protein classification predicting sequence
ELVLTAHPTEITRRT

SEQ ID NO: 54026 - protein, 7 aa, Artificial sequence
  Protein classification predicting sequence
LVSELSM

SEQ ID NO: 54027 - protein, 11 aa, Artificial sequence
  Protein classification predicting sequence
KAFGVHLVRLD

SEQ ID NO: 54028 - protein, 8 aa, Artificial sequence
  Protein classification predicting sequence
SKRPLLPR

SEQ ID NO: 54029 - protein, 7 aa, Artificial sequence
  Protein classification predicting sequence
EWRALMD

SEQ ID NO: 54030 - protein, 35 aa, Artificial sequence
  Protein classification predicting sequence
VVRGEPDFVPYFRQATPELELGKLPLGSRPAKRNP

SEQ ID NO: 54031 - protein, 13 aa, Artificial sequence
  Protein classification predicting sequence
GGVESLRAIPWIF

SEQ ID NO: 54032 - protein, 9 aa, Artificial sequence
  Protein classification predicting sequence
VETIRKLSK

SEQ ID NO: 54033 - protein, 20 aa, Artificial sequence
  Protein classification predicting sequence
RRTMINKLVKINECLSKLEL

SEQ ID NO: 54034 - protein, 15 aa, Artificial sequence
  Protein classification predicting sequence
DEAKWGFAVVENSLW

SEQ ID NO: 54035 - protein, 10 aa, Artificial sequence
  Protein classification predicting sequence
PLFETLDDLN

SEQ ID NO: 54036 - protein, 7 aa, Artificial sequence
  Protein classification predicting sequence
LFSIDWY

SEQ ID NO: 54037 - protein, 25 aa, Artificial sequence
  Protein classification predicting sequence
YRGFIQNHQMVMIGYSDSAKDAGVM

SEQ ID NO: 54038 - protein, 17 aa, Artificial sequence
  Protein classification predicting sequence
QMVMIGYSDSAKDAGVM

SEQ ID NO: 54039 - protein, 6 aa, Artificial sequence
  Protein classification predicting sequence
AGWAQY

SEQ ID NO: 54040 - protein, 11 aa, Artificial sequence
  Protein classification predicting sequence
IELTLFHGRGG

SEQ ID NO: 54041 - protein, 7 aa, Artificial sequence
  Protein classification predicting sequence
VAVNSFN

SEQ ID NO: 54042 - protein, 11 aa, Artificial sequence
  Protein classification predicting sequence
GQKLAVKAPLQ

SEQ ID NO: 54043 - protein, 9 aa, Artificial sequence
  Protein classification predicting sequence
TRYLGIGDY

SEQ ID NO: 54044 - protein, 16 aa, Artificial sequence
  Protein classification predicting sequence
GRGGAPAHAALLSQPP

SEQ ID NO: 54045 - protein, 27 aa, Artificial sequence
  Protein classification predicting sequence
VLNVENNENLMQSDPWGQESIRLRNIY

SEQ ID NO: 54046 - protein, 7 aa, Artificial sequence
  Protein classification predicting sequence
AYVISMA

SEQ ID NO: 54047 - protein, 8 aa, Artificial sequence
  Protein classification predicting sequence
GYSDSGKD

SEQ ID NO: 54048 - protein, 8 aa, Artificial sequence
  Protein classification predicting sequence
LLEAAAEL

SEQ ID NO: 54049 - protein, 7 aa, Artificial sequence
  Protein classification predicting sequence
TEQGEVI

SEQ ID NO: 54050 - protein, 7 aa, Artificial sequence
  Protein classification predicting sequence
YFRLATP

SEQ ID NO: 54051 - protein, 11 aa, Artificial sequence
  Protein classification predicting sequence
AQSWHTDEIRK

SEQ ID NO: 54052 - protein, 18 aa, Artificial sequence
  Protein classification predicting sequence
RFTSWMGGDRDGNPNVTA

SEQ ID NO: 54053 - protein, 18 aa, Artificial sequence
  Protein classification predicting sequence
ITRHVLLLSRWKATDLFL

SEQ ID NO: 54054 - protein, 8 aa, Artificial sequence
  Protein classification predicting sequence
LEARLKGE

SEQ ID NO: 54055 - protein, 19 aa, Artificial sequence
  Protein classification predicting sequence
VIAEAPQGSIAAYVISMAK

SEQ ID NO: 54056 - protein, 26 aa, Artificial sequence
  Protein classification predicting sequence
ALGEHILDRVETIRKLSKSSRAGNEA

SEQ ID NO: 54057 - protein, 25 aa, Artificial sequence
  Protein classification predicting sequence
GMLEMVFAKADLWLAEYYDQRLVDK

SEQ ID NO: 54058 - protein, 7 aa, Artificial sequence
  Protein classification predicting sequence
PFDRHDW

SEQ ID NO: 54059 - protein, 12 aa, Artificial sequence
  Protein classification predicting sequence
TKLVWIETPTNP

SEQ ID NO: 54060 - protein, 13 aa, Artificial sequence
  Protein classification predicting sequence
DTLIRLSVGLEDE

SEQ ID NO: 54061 - protein, 6 aa, Artificial sequence
  Protein classification predicting sequence
RMEKHF

SEQ ID NO: 54062 - protein, 11 aa, Artificial sequence
  Protein classification predicting sequence
RINVLPLGSGA

SEQ ID NO: 54063 - protein, 7 aa, Artificial sequence
  Protein classification predicting sequence
LPLGSGA

SEQ ID NO: 54064 - protein, 8 aa, Artificial sequence
  Protein classification predicting sequence
SDVSQVFN

SEQ ID NO: 54065 - protein, 15 aa, Artificial sequence
  Protein classification predicting sequence
PIRWSQFLLSHAVAL

SEQ ID NO: 54066 - protein, 22 aa, Artificial sequence
  Protein classification predicting sequence
PQKKNPDSLELIRSKAGRVFGR

SEQ ID NO: 54067 - protein, 14 aa, Artificial sequence
  Protein classification predicting sequence
AVLQVATGVISTLQ

SEQ ID NO: 54068 - protein, 8 aa, Artificial sequence
  Protein classification predicting sequence
LLLDEFYR

SEQ ID NO: 54069 - protein, 8 aa, Artificial sequence
  Protein classification predicting sequence
MQSYRNLI

SEQ ID NO: 54070 - protein, 8 aa, Artificial sequence
  Protein classification predicting sequence
CLVGSVDL

SEQ ID NO: 54071 - protein, 11 aa, Artificial sequence
  Protein classification predicting sequence
TILGKMHQDAA

SEQ ID NO: 54072 - protein, 7 aa, Artificial sequence
  Protein classification predicting sequence
ECIELRL

SEQ ID NO: 54073 - protein, 6 aa, Artificial sequence
  Protein classification predicting sequence
ISHNKL

SEQ ID NO: 54074 - protein, 7 aa, Artificial sequence
  Protein classification predicting sequence
NIYILDE

SEQ ID NO: 54075 - protein, 21 aa, Artificial sequence
  Protein classification predicting sequence
YIETLKQRLDAINQLRVDRAL

SEQ ID NO: 54076 - protein, 11 aa, Artificial sequence
  Protein classification predicting sequence
PAFQQVYSLLP

SEQ ID NO: 54077 - protein, 9 aa, Artificial sequence
  Protein classification predicting sequence
HHPLMPGYL

SEQ ID NO: 54078 - protein, 19 aa, Artificial sequence
  Protein classification predicting sequence
GQSCSSDLDIWVCHQSWLD

SEQ ID NO: 54079 - protein, 6 aa, Artificial sequence
  Protein classification predicting sequence
KCSLLE

SEQ ID NO: 54080 - protein, 11 aa, Artificial sequence
  Protein classification predicting sequence
AGKRILWNMVP

SEQ ID NO: 54081 - protein, 40 aa, Artificial sequence
  Protein classification predicting sequence
LSAEEYFGASLWQLYKSIDSPYKAVLKTLLLEAYSWEYPN

SEQ ID NO: 54082 - protein, 24 aa, Artificial sequence
  Protein classification predicting sequence
TRLDLVRRCFYLKVCEKLSRERAC

SEQ ID NO: 54083 - protein, 12 aa, Artificial sequence
  Protein classification predicting sequence
GRANRSGWYLYN

SEQ ID NO: 54084 - protein, 20 aa, Artificial sequence
  Protein classification predicting sequence
IISHQPLEYNRYLNKLVAWA

SEQ ID NO: 54085 - protein, 23 aa, Artificial sequence
  Protein classification predicting sequence
APTPKALYSPCEIRHLAIIVNLE

SEQ ID NO: 54086 - protein, 9 aa, Artificial sequence
  Protein classification predicting sequence
TWGLFFERL

SEQ ID NO: 54087 - protein, 7 aa, Artificial sequence
  Protein classification predicting sequence
EFYGAIS

SEQ ID NO: 54088 - protein, 6 aa, Artificial sequence
  Protein classification predicting sequence
QVIPFR

SEQ ID NO: 54089 - protein, 7 aa, Artificial sequence
  Protein classification predicting sequence
AVRLAGK

SEQ ID NO: 54090 - protein, 8 aa, Artificial sequence
  Protein classification predicting sequence
EYFGASLW

SEQ ID NO: 54091 - protein, 6 aa, Artificial sequence
  Protein classification predicting sequence
IDSPYK

SEQ ID NO: 54092 - protein, 5 aa, Artificial sequence
  Protein classification predicting sequence
QFFFE

SEQ ID NO: 54093 - protein, 6 aa, Artificial sequence
  Protein classification predicting sequence
RANWKI

SEQ ID NO: 54094 - protein, 7 aa, Artificial sequence
  Protein classification predicting sequence
LLHYHHP

SEQ ID NO: 54095 - protein, 7 aa, Artificial sequence
  Protein classification predicting sequence
GELPITG

SEQ ID NO: 54096 - protein, 11 aa, Artificial sequence
  Protein classification predicting sequence
YSMGSTSSIGQ

SEQ ID NO: 54097 - protein, 11 aa, Artificial sequence
  Protein classification predicting sequence
DIWVCHQSWLD

SEQ ID NO: 54098 - protein, 11 aa, Artificial sequence
  Protein classification predicting sequence
FFLIDENRFRH

SEQ ID NO: 54099 - protein, 18 aa, Artificial sequence
  Protein classification predicting sequence
LYAQGVLTPNEWLDLGGL

SEQ ID NO: 54100 - protein, 17 aa, Artificial sequence
  Protein classification predicting sequence
LSAEEYFGASLWQLYKS

SEQ ID NO: 54101 - protein, 9 aa, Artificial sequence
  Protein classification predicting sequence
DSPYKAVLK

SEQ ID NO: 54102 - protein, 13 aa, Artificial sequence
  Protein classification predicting sequence
RRCFYLKVCEKLS

SEQ ID NO: 54103 - protein, 7 aa, Artificial sequence
  Protein classification predicting sequence
AHNELLD

SEQ ID NO: 54104 - protein, 29 aa, Artificial sequence
  Protein classification predicting sequence
GQTWGLFFERLNVSVQKLENAIEFYGAIS

SEQ ID NO: 54105 - protein, 9 aa, Artificial sequence
  Protein classification predicting sequence
EGIIQFFFE

SEQ ID NO: 54106 - protein, 20 aa, Artificial sequence
  Protein classification predicting sequence
YTPDETQRHYLNELELYRGM

SEQ ID NO: 54107 - protein, 16 aa, Artificial sequence
  Protein classification predicting sequence
VVHFDFRKLDVFSFGE

SEQ ID NO: 54108 - protein, 8 aa, Artificial sequence
  Protein classification predicting sequence
PPANQDHD

SEQ ID NO: 54109 - protein, 41 aa, Artificial sequence
  Protein classification predicting sequence
QDPPKGELPITGVYTMGSTSSVGQSCSSDLDIWVCHQSWLD

SEQ ID NO: 54110 - protein, 31 aa, Artificial sequence
  Protein classification predicting sequence
SIISHQPLEYNRYLNKLVAWAWFNGLLTSRT

SEQ ID NO: 54111 - protein, 5 aa, Artificial sequence
  Protein classification predicting sequence
WVCHQ

SEQ ID NO: 54112 - protein, 23 aa, Artificial sequence
  Protein classification predicting sequence
SGSLGGEDCGSTQHILLLDEFYR

SEQ ID NO: 54113 - protein, 6 aa, Artificial sequence
  Protein classification predicting sequence
IKQRLH

SEQ ID NO: 54114 - protein, 5 aa, Artificial sequence
  Protein classification predicting sequence
YCMML

SEQ ID NO: 54115 - protein, 16 aa, Artificial sequence
  Protein classification predicting sequence
LVRRCFYLKVCEKLSR

SEQ ID NO: 54116 - protein, 10 aa, Artificial sequence
  Protein classification predicting sequence
LSQLVSEWGW

SEQ ID NO: 54117 - protein, 15 aa, Artificial sequence
  Protein classification predicting sequence
VFCYSQHLRGLIRTR

SEQ ID NO: 54118 - protein, 16 aa, Artificial sequence
  Protein classification predicting sequence
VVDGFASEGIIQFFFE

SEQ ID NO: 54119 - protein, 6 aa, Artificial sequence
  Protein classification predicting sequence
VYSLLP

SEQ ID NO: 54120 - protein, 10 aa, Artificial sequence
  Protein classification predicting sequence
MPGYLDGNVP

SEQ ID NO: 54121 - protein, 8 aa, Artificial sequence
  Protein classification predicting sequence
GVEVSFFL

SEQ ID NO: 54122 - protein, 9 aa, Artificial sequence
  Protein classification predicting sequence
EEEHYDDYV

SEQ ID NO: 54123 - protein, 9 aa, Artificial sequence
  Protein classification predicting sequence
GEIVSFGLD

SEQ ID NO: 54124 - protein, 68 aa, Artificial sequence
  Protein classification predicting sequence
VREAHNELLDAMMQSYRNLIRFARRNNLSVSASPQDIGVLTRKLYAAFEALPGKVTLVNPQISPDLSE

SEQ ID NO: 54125 - protein, 8 aa, Artificial sequence
  Protein classification predicting sequence
SHHFPLRL

SEQ ID NO: 54126 - protein, 9 aa, Artificial sequence
  Protein classification predicting sequence
LRLSSTRQE

SEQ ID NO: 54127 - protein, 17 aa, Artificial sequence
  Protein classification predicting sequence
PTDPLIYRFYEIMQVYG

SEQ ID NO: 54128 - protein, 7 aa, Artificial sequence
  Protein classification predicting sequence
TLDGKYL

SEQ ID NO: 54129 - protein, 5 aa, Artificial sequence
  Protein classification predicting sequence
YRFYE

SEQ ID NO: 54130 - protein, 14 aa, Artificial sequence
  Protein classification predicting sequence
FGDGIISAINFKLD

SEQ ID NO: 54131 - protein, 7 aa, Artificial sequence
  Protein classification predicting sequence
EQFGDGI

SEQ ID NO: 54132 - protein, 7 aa, Artificial sequence
  Protein classification predicting sequence
DPTIYRF

SEQ ID NO: 54133 - protein, 7 aa, Artificial sequence
  Protein classification predicting sequence
FGDGIMS

SEQ ID NO: 54134 - protein, 9 aa, Artificial sequence
  Protein classification predicting sequence
LFVIRNAGN

SEQ ID NO: 54135 - protein, 8 aa, Artificial sequence
  Protein classification predicting sequence
ILVVDNTF

SEQ ID NO: 54136 - protein, 12 aa, Artificial sequence
  Protein classification predicting sequence
KTPYLPDGRFDL

SEQ ID NO: 54137 - protein, 14 aa, Artificial sequence
  Protein classification predicting sequence
GAEGVIVGGTTGEG

SEQ ID NO: 54138 - protein, 19 aa, Artificial sequence
  Protein classification predicting sequence
LMSWDEHIMLIGHTVNCFG

SEQ ID NO: 54139 - protein, 12 aa, Artificial sequence
  Protein classification predicting sequence
ALHINPYYGKTS

SEQ ID NO: 54140 - protein, 7 aa, Artificial sequence
  Protein classification predicting sequence
YNVPGRT

SEQ ID NO: 54141 - protein, 6 aa, Artificial sequence
  Protein classification predicting sequence
CHDSRW

SEQ ID NO: 54142 - protein, 5 aa, Artificial sequence
  Protein classification predicting sequence
EPNPI

SEQ ID NO: 54143 - protein, 6 aa, Artificial sequence
  Protein classification predicting sequence
PYYNKP

SEQ ID NO: 54144 - protein, 6 aa, Artificial sequence
  Protein classification predicting sequence
QHFKAI

SEQ ID NO: 54145 - protein, 6 aa, Artificial sequence
  Protein classification predicting sequence
YNIPGR

SEQ ID NO: 54146 - protein, 7 aa, Artificial sequence
  Protein classification predicting sequence
RVPVIAG

SEQ ID NO: 54147 - protein, 16 aa, Artificial sequence
  Protein classification predicting sequence
EAIELAQHAEKAGADA

SEQ ID NO: 54148 - protein, 6 aa, Artificial sequence
  Protein classification predicting sequence
AMVTPF

SEQ ID NO: 54149 - protein, 8 aa, Artificial sequence
  Protein classification predicting sequence
GTTGESPT

SEQ ID NO: 54150 - protein, 15 aa, Artificial sequence
  Protein classification predicting sequence
IKVIGNTGSNSTREA

SEQ ID NO: 54151 - protein, 8 aa, Artificial sequence
  Protein classification predicting sequence
NPYYGKTS

SEQ ID NO: 54152 - protein, 16 aa, Artificial sequence
  Protein classification predicting sequence
KTPYLPDGRFDLEAYD

SEQ ID NO: 54153 - protein, 6 aa, Artificial sequence
  Protein classification predicting sequence
WSGNDD

SEQ ID NO: 54154 - protein, 9 aa, Artificial sequence
  Protein classification predicting sequence
TTGETPTLS

SEQ ID NO: 54155 - protein, 7 aa, Artificial sequence
  Protein classification predicting sequence
LYDIPGR

SEQ ID NO: 54156 - protein, 16 aa, Artificial sequence
  Protein classification predicting sequence
DDYLPMRSTEVKNRTS

SEQ ID NO: 54157 - protein, 18 aa, Artificial sequence
  Protein classification predicting sequence
IKVIGNTGSNSTREAIHA

SEQ ID NO: 54158 - protein, 13 aa, Artificial sequence
  Protein classification predicting sequence
EQGFAVGMHAALH

SEQ ID NO: 54159 - protein, 8 aa, Artificial sequence
  Protein classification predicting sequence
PETMGALV

SEQ ID NO: 54160 - protein, 6 aa, Artificial sequence
  Protein classification predicting sequence
NIVGVK

SEQ ID NO: 54161 - protein, 8 aa, Artificial sequence
  Protein classification predicting sequence
GDDSLTLP

SEQ ID NO: 54162 - protein, 9 aa, Artificial sequence
  Protein classification predicting sequence
GSIVALITP

SEQ ID NO: 54163 - protein, 15 aa, Artificial sequence
  Protein classification predicting sequence
GADGALVVVPYYNKP

SEQ ID NO: 54164 - protein, 8 aa, Artificial sequence
  Protein classification predicting sequence
QRGLYEHF

SEQ ID NO: 54165 - protein, 7 aa, Artificial sequence
  Protein classification predicting sequence
IHQKLLP

SEQ ID NO: 54166 - protein, 7 aa, Artificial sequence
  Protein classification predicting sequence
KDATGDL

SEQ ID NO: 54167 - protein, 10 aa, Artificial sequence
  Protein classification predicting sequence
AIVSVGTTGE

SEQ ID NO: 54168 - protein, 7 aa, Artificial sequence
  Protein classification predicting sequence
PVIAGTG

SEQ ID NO: 54169 - protein, 8 aa, Artificial sequence
  Protein classification predicting sequence
VTPYYNRP

SEQ ID NO: 54170 - protein, 8 aa, Artificial sequence
  Protein classification predicting sequence
PQILYNVP

SEQ ID NO: 54171 - protein, 8 aa, Artificial sequence
  Protein classification predicting sequence
RTGCDLLP

SEQ ID NO: 54172 - protein, 8 aa, Artificial sequence
  Protein classification predicting sequence
NPIPVKWA

SEQ ID NO: 54173 - protein, 8 aa, Artificial sequence
  Protein classification predicting sequence
DTLRLPMT

SEQ ID NO: 54174 - protein, 10 aa, Artificial sequence
  Protein classification predicting sequence
LVVTPYYNKP

SEQ ID NO: 54175 - protein, 8 aa, Artificial sequence
  Protein classification predicting sequence
VTPYYNKP

SEQ ID NO: 54176 - protein, 6 aa, Artificial sequence
  Protein classification predicting sequence
ISVTSN

SEQ ID NO: 54177 - protein, 7 aa, Artificial sequence
  Protein classification predicting sequence
IAGTGAN

SEQ ID NO: 54178 - protein, 6 aa, Artificial sequence
  Protein classification predicting sequence
NPIPIK

SEQ ID NO: 54179 - protein, 6 aa, Artificial sequence
  Protein classification predicting sequence
GTTGES

SEQ ID NO: 54180 - protein, 8 aa, Artificial sequence
  Protein classification predicting sequence
GVISVTAN

SEQ ID NO: 54181 - protein, 8 aa, Artificial sequence
  Protein classification predicting sequence
PYYNKPTQ

SEQ ID NO: 54182 - protein, 10 aa, Artificial sequence
  Protein classification predicting sequence
GLVPVGTTGE

SEQ ID NO: 54183 - protein, 7 aa, Artificial sequence
  Protein classification predicting sequence
QEGMYQH

SEQ ID NO: 54184 - protein, 15 aa, Artificial sequence
  Protein classification predicting sequence
VLPMGPTIIYNVPSR

SEQ ID NO: 54185 - protein, 6 aa, Artificial sequence
  Protein classification predicting sequence
YNVPSR

SEQ ID NO: 54186 - protein, 6 aa, Artificial sequence
  Protein classification predicting sequence
KPSQEG

SEQ ID NO: 54187 - protein, 6 aa, Artificial sequence
  Protein classification predicting sequence
LNLPWL

SEQ ID NO: 54188 - protein, 13 aa, Artificial sequence
  Protein classification predicting sequence
KLGGQGVISVTNN

SEQ ID NO: 54189 - protein, 6 aa, Artificial sequence
  Protein classification predicting sequence
VPVIAG

SEQ ID NO: 54190 - protein, 7 aa, Artificial sequence
  Protein classification predicting sequence
LASHPNI

SEQ ID NO: 54191 - protein, 7 aa, Artificial sequence
  Protein classification predicting sequence
LPMLSVG

SEQ ID NO: 54192 - protein, 6 aa, Artificial sequence
  Protein classification predicting sequence
ALITPF

SEQ ID NO: 54193 - protein, 6 aa, Artificial sequence
  Protein classification predicting sequence
PYYNRP

SEQ ID NO: 54194 - protein, 6 aa, Artificial sequence
  Protein classification predicting sequence
VPSRTG

SEQ ID NO: 54195 - protein, 9 aa, Artificial sequence
  Protein classification predicting sequence
GSIVALVTP

SEQ ID NO: 54196 - protein, 17 aa, Artificial sequence
  Protein classification predicting sequence
LAGTTAESPTLTHDEEL

SEQ ID NO: 54197 - protein, 10 aa, Artificial sequence
  Protein classification predicting sequence
PYYNKPSQEG

SEQ ID NO: 54198 - protein, 7 aa, Artificial sequence
  Protein classification predicting sequence
ASDLPII

SEQ ID NO: 54199 - protein, 9 aa, Artificial sequence
  Protein classification predicting sequence
GTTGESPTL

SEQ ID NO: 54200 - protein, 6 aa, Artificial sequence
  Protein classification predicting sequence
ETNPIP

SEQ ID NO: 54201 - protein, 11 aa, Artificial sequence
  Protein classification predicting sequence
IGRENFVGQKE

SEQ ID NO: 54202 - protein, 8 aa, Artificial sequence
  Protein classification predicting sequence
VVPYYNKP

SEQ ID NO: 54203 - protein, 10 aa, Artificial sequence
  Protein classification predicting sequence
LTLPILAVGG

SEQ ID NO: 54204 - protein, 7 aa, Artificial sequence
  Protein classification predicting sequence
IIGIKEA

SEQ ID NO: 54205 - protein, 6 aa, Artificial sequence
  Protein classification predicting sequence
GFISVI

SEQ ID NO: 54206 - protein, 14 aa, Artificial sequence
  Protein classification predicting sequence
GTTGESATLSVEEH

SEQ ID NO: 54207 - protein, 6 aa, Artificial sequence
  Protein classification predicting sequence
INQRLM

SEQ ID NO: 54208 - protein, 7 aa, Artificial sequence
  Protein classification predicting sequence
QEGLYQH

SEQ ID NO: 54209 - protein, 8 aa, Artificial sequence
  Protein classification predicting sequence
LYNVPGRT

SEQ ID NO: 54210 - protein, 6 aa, Artificial sequence
  Protein classification predicting sequence
RLMPLH

SEQ ID NO: 54211 - protein, 8 aa, Artificial sequence
  Protein classification predicting sequence
GVVSVASH

SEQ ID NO: 54212 - protein, 8 aa, Artificial sequence
  Protein classification predicting sequence
QEGMYQHF

SEQ ID NO: 54213 - protein, 10 aa, Artificial sequence
  Protein classification predicting sequence
FDEKAFRAFV

SEQ ID NO: 54214 - protein, 12 aa, Artificial sequence
  Protein classification predicting sequence
KNIVGVKDATGK

SEQ ID NO: 54215 - protein, 20 aa, Artificial sequence
  Protein classification predicting sequence
SSLSFEEYKLLLQTSVEIVN

SEQ ID NO: 54216 - protein, 8 aa, Artificial sequence
  Protein classification predicting sequence
LAAESTKI

SEQ ID NO: 54217 - protein, 33 aa, Artificial sequence
  Protein classification predicting sequence
VKKDFNILTGNDEVVLAFNAQGGVGWTSVASNI

SEQ ID NO: 54218 - protein, 27 aa, Artificial sequence
  Protein classification predicting sequence
CKELLEKWNKNDTKGALEIHQKLLPLY

SEQ ID NO: 54219 - protein, 23 aa, Artificial sequence
  Protein classification predicting sequence
PLTEASDSAKKQIENIITSLSIK

SEQ ID NO: 54220 - protein, 11 aa, Artificial sequence
  Protein classification predicting sequence
SLSFEEYKLLL

SEQ ID NO: 54221 - protein, 15 aa, Artificial sequence
  Protein classification predicting sequence
DFNILTGNDEVVLAF

SEQ ID NO: 54222 - protein, 8 aa, Artificial sequence
  Protein classification predicting sequence
CKELLEKW

SEQ ID NO: 54223 - protein, 13 aa, Artificial sequence
  Protein classification predicting sequence
GALEIHQKLLPLY

SEQ ID NO: 54224 - protein, 6 aa, Artificial sequence
  Protein classification predicting sequence
NPIPVK

SEQ ID NO: 54225 - protein, 7 aa, Artificial sequence
  Protein classification predicting sequence
TSVEIVN

SEQ ID NO: 54226 - protein, 10 aa, Artificial sequence
  Protein classification predicting sequence
VTPMDEKGNV

SEQ ID NO: 54227 - protein, 10 aa, Artificial sequence
  Protein classification predicting sequence
QIKELVSDDF

SEQ ID NO: 54228 - protein, 8 aa, Artificial sequence
  Protein classification predicting sequence
MCKLAAEG

SEQ ID NO: 54229 - protein, 18 aa, Artificial sequence
  Protein classification predicting sequence
LGLVATDTLRLPMTPITD

SEQ ID NO: 54230 - protein, 30 aa, Artificial sequence
  Protein classification predicting sequence
LLSGDDASALDFMQLGGHGVISVTANVAAR

SEQ ID NO: 54231 - protein, 26 aa, Artificial sequence
  Protein classification predicting sequence
INQRLMPLHNKLFVEPNPIPVKWACK

SEQ ID NO: 54232 - protein, 6 aa, Artificial sequence
  Protein classification predicting sequence
GRIPVI

SEQ ID NO: 54233 - protein, 11 aa, Artificial sequence
  Protein classification predicting sequence
GTTGESPTLSH

SEQ ID NO: 54234 - protein, 7 aa, Artificial sequence
  Protein classification predicting sequence
HTVNCFG

SEQ ID NO: 54235 - protein, 10 aa, Artificial sequence
  Protein classification predicting sequence
MGPTIIYNVP

SEQ ID NO: 54236 - protein, 8 aa, Artificial sequence
  Protein classification predicting sequence
RTGQDIPP

SEQ ID NO: 54237 - protein, 7 aa, Artificial sequence
  Protein classification predicting sequence
GVVSVAS

SEQ ID NO: 54238 - protein, 32 aa, Artificial sequence
  Protein classification predicting sequence
QAKALGADAIMLITPYYNKTNQRGLVKHFEAI

SEQ ID NO: 54239 - protein, 135 aa, Artificial sequence
  Protein classification predicting sequence
DAVKLPVVLYNVPSRTNMTIEPETVEILSQHPYIVALKDATNDFEYLEEVKKRIDTNSFALYSGNDDNVVEYYQRGGQGVISVIANVIPKEFQALYDAQQSGLDIQDQFKPIGTLLSALSVDINPIPIKALTSYL

SEQ ID NO: 54240 - protein, 31 aa, Artificial sequence
  Protein classification predicting sequence
HVNFLLENNAQAIIVNGTTAESPTLTTDEKE

SEQ ID NO: 54241 - protein, 6 aa, Artificial sequence
  Protein classification predicting sequence
TPFTNN

SEQ ID NO: 54242 - protein, 15 aa, Artificial sequence
  Protein classification predicting sequence
QAIIVNGTTAESPTL

SEQ ID NO: 54243 - protein, 8 aa, Artificial sequence
  Protein classification predicting sequence
VPVIAGTG

SEQ ID NO: 54244 - protein, 10 aa, Artificial sequence
  Protein classification predicting sequence
VPVIAGTGTN

SEQ ID NO: 54245 - protein, 15 aa, Artificial sequence
  Protein classification predicting sequence
MLITPYYNKTNQRGL

SEQ ID NO: 54246 - protein, 17 aa, Artificial sequence
  Protein classification predicting sequence
LYNVPSRTNMTIEPETV

SEQ ID NO: 54247 - protein, 13 aa, Artificial sequence
  Protein classification predicting sequence
PYIVALKDATNDF

SEQ ID NO: 54248 - protein, 12 aa, Artificial sequence
  Protein classification predicting sequence
FALYSGNDDNVV

SEQ ID NO: 54249 - protein, 11 aa, Artificial sequence
  Protein classification predicting sequence
GVISVIANVIP

SEQ ID NO: 54250 - protein, 7 aa, Artificial sequence
  Protein classification predicting sequence
IAGTGSN

SEQ ID NO: 54251 - protein, 10 aa, Artificial sequence
  Protein classification predicting sequence
VGPVRLPLVD

SEQ ID NO: 54252 - protein, 7 aa, Artificial sequence
  Protein classification predicting sequence
TNPIPVK

SEQ ID NO: 54253 - protein, 9 aa, Artificial sequence
  Protein classification predicting sequence
WSGNDDECH

SEQ ID NO: 54254 - protein, 7 aa, Artificial sequence
  Protein classification predicting sequence
PETVARL

SEQ ID NO: 54255 - protein, 8 aa, Artificial sequence
  Protein classification predicting sequence
IVALKDAT

SEQ ID NO: 54256 - protein, 8 aa, Artificial sequence
  Protein classification predicting sequence
NIAAKDMA

SEQ ID NO: 54257 - protein, 8 aa, Artificial sequence
  Protein classification predicting sequence
LDFMQLGG

SEQ ID NO: 54258 - protein, 7 aa, Artificial sequence
  Protein classification predicting sequence
QEGLFQH

SEQ ID NO: 54259 - protein, 12 aa, Artificial sequence
  Protein classification predicting sequence
ALFVESNPIPIK

SEQ ID NO: 54260 - protein, 7 aa, Artificial sequence
  Protein classification predicting sequence
IAGSTGE

SEQ ID NO: 54261 - protein, 8 aa, Artificial sequence
  Protein classification predicting sequence
LYNVPSRT

SEQ ID NO: 54262 - protein, 19 aa, Artificial sequence
  Protein classification predicting sequence
AIVSVGTTGESATLNHDEH

SEQ ID NO: 54263 - protein, 11 aa, Artificial sequence
  Protein classification predicting sequence
EAISLTQRFND

SEQ ID NO: 54264 - protein, 9 aa, Artificial sequence
  Protein classification predicting sequence
ISVTANVAP

SEQ ID NO: 54265 - protein, 6 aa, Artificial sequence
  Protein classification predicting sequence
YTRGSF

SEQ ID NO: 54266 - protein, 14 aa, Artificial sequence
  Protein classification predicting sequence
GSMTDNSGIRKILP

SEQ ID NO: 54267 - protein, 7 aa, Artificial sequence
  Protein classification predicting sequence
SAIGFEG

SEQ ID NO: 54268 - protein, 7 aa, Artificial sequence
  Protein classification predicting sequence
PAECTIV

SEQ ID NO: 54269 - protein, 8 aa, Artificial sequence
  Protein classification predicting sequence
VRYTRGSF

SEQ ID NO: 54270 - protein, 14 aa, Artificial sequence
  Protein classification predicting sequence
VDSYVLSESSLFVY

SEQ ID NO: 54271 - protein, 12 aa, Artificial sequence
  Protein classification predicting sequence
TPEDGFSYASFE

SEQ ID NO: 54272 - protein, 7 aa, Artificial sequence
  Protein classification predicting sequence
YVLSESS

SEQ ID NO: 54273 - protein, 8 aa, Artificial sequence
  Protein classification predicting sequence
KSQIDEIL

SEQ ID NO: 54274 - protein, 7 aa, Artificial sequence
  Protein classification predicting sequence
KASVFYK

SEQ ID NO: 54275 - protein, 15 aa, Artificial sequence
  Protein classification predicting sequence
ICDFEFEPCGYSMNS

SEQ ID NO: 54276 - protein, 10 aa, Artificial sequence
  Protein classification predicting sequence
PKQFSVAVHS

SEQ ID NO: 54277 - protein, 28 aa, Artificial sequence
  Protein classification predicting sequence
EGDAISTIHVTPEDGFSYASFEAVGYDF

SEQ ID NO: 54278 - protein, 68 aa, Artificial sequence
  Protein classification predicting sequence
FVSKRRFILKTCGTTLLLKALVPLLKLARDYSGFDSIQSFFYSRKNFMKPSHQGYPHRNFQEEIEFLN

SEQ ID NO: 54279 - protein, 15 aa, Artificial sequence
  Protein classification predicting sequence
QGSGDLRTIPRSEWD

SEQ ID NO: 54280 - protein, 50 aa, Artificial sequence
  Protein classification predicting sequence
QPDQTLEILMSELDPAVMDQFYMKDGVTAKDVTRESGIRDLIPGSVIDAT

SEQ ID NO: 54281 - protein, 10 aa, Artificial sequence
  Protein classification predicting sequence
GFKRLDCQSA

SEQ ID NO: 54282 - protein, 11 aa, Artificial sequence
  Protein classification predicting sequence
DSYVLSESSLF

SEQ ID NO: 54283 - protein, 6 aa, Artificial sequence
  Protein classification predicting sequence
KTCGTT

SEQ ID NO: 54284 - protein, 17 aa, Artificial sequence
  Protein classification predicting sequence
YTRGSFIFPGAQSFPHR

SEQ ID NO: 54285 - protein, 8 aa, Artificial sequence
  Protein classification predicting sequence
SGIRKILP

SEQ ID NO: 54286 - protein, 13 aa, Artificial sequence
  Protein classification predicting sequence
TPEDGFSYASFEA

SEQ ID NO: 54287 - protein, 6 aa, Artificial sequence
  Protein classification predicting sequence
FSVAVH

SEQ ID NO: 54288 - protein, 14 aa, Artificial sequence
  Protein classification predicting sequence
YKIIIKTCGTTKLL

SEQ ID NO: 54289 - protein, 8 aa, Artificial sequence
  Protein classification predicting sequence
TPEDGFSY

SEQ ID NO: 54290 - protein, 6 aa, Artificial sequence
  Protein classification predicting sequence
CWYLYT

SEQ ID NO: 54291 - protein, 7 aa, Artificial sequence
  Protein classification predicting sequence
TIHITPE

SEQ ID NO: 54292 - protein, 9 aa, Artificial sequence
  Protein classification predicting sequence
FSYVSFETN

SEQ ID NO: 54293 - protein, 6 aa, Artificial sequence
  Protein classification predicting sequence
FKPGKF

SEQ ID NO: 54294 - protein, 6 aa, Artificial sequence
  Protein classification predicting sequence
ASVFFK

SEQ ID NO: 54295 - protein, 6 aa, Artificial sequence
  Protein classification predicting sequence
ICDFDF

SEQ ID NO: 54296 - protein, 7 aa, Artificial sequence
  Protein classification predicting sequence
PSEFSVA

SEQ ID NO: 54297 - protein, 7 aa, Artificial sequence
  Protein classification predicting sequence
FIFPGAQ

SEQ ID NO: 54298 - protein, 10 aa, Artificial sequence
  Protein classification predicting sequence
TPEDGFSYAS

SEQ ID NO: 54299 - protein, 8 aa, Artificial sequence
  Protein classification predicting sequence
LDGYFGKL

SEQ ID NO: 54300 - protein, 6 aa, Artificial sequence
  Protein classification predicting sequence
ESSLFV

SEQ ID NO: 54301 - protein, 8 aa, Artificial sequence
  Protein classification predicting sequence
FSEEVAVL

SEQ ID NO: 54302 - protein, 7 aa, Artificial sequence
  Protein classification predicting sequence
SGIRKIL

SEQ ID NO: 54303 - protein, 9 aa, Artificial sequence
  Protein classification predicting sequence
FEPCGYSMN

SEQ ID NO: 54304 - protein, 13 aa, Artificial sequence
  Protein classification predicting sequence
FEPCGYSMNSVEG

SEQ ID NO: 54305 - protein, 6 aa, Artificial sequence
  Protein classification predicting sequence
PESRVI

SEQ ID NO: 54306 - protein, 5 aa, Artificial sequence
  Protein classification predicting sequence
TCGTT

SEQ ID NO: 54307 - protein, 17 aa, Artificial sequence
  Protein classification predicting sequence
SSAAHMTVRSGIRKILP

SEQ ID NO: 54308 - protein, 13 aa, Artificial sequence
  Protein classification predicting sequence
ALHADVATKLLER

SEQ ID NO: 54309 - protein, 8 aa, Artificial sequence
  Protein classification predicting sequence
HRSFSEEV

SEQ ID NO: 54310 - protein, 21 aa, Artificial sequence
  Protein classification predicting sequence
FSEEVAVLDGYFGKLAAGSKA

SEQ ID NO: 54311 - protein, 7 aa, Artificial sequence
  Protein classification predicting sequence
DSDHYFL

SEQ ID NO: 54312 - protein, 6 aa, Artificial sequence
  Protein classification predicting sequence
EPCGYS

SEQ ID NO: 54313 - protein, 10 aa, Artificial sequence
  Protein classification predicting sequence
CGSPRSTLKC

SEQ ID NO: 54314 - protein, 13 aa, Artificial sequence
  Protein classification predicting sequence
AAHFFEGTEKLLE

SEQ ID NO: 54315 - protein, 11 aa, Artificial sequence
  Protein classification predicting sequence
FFYSRKNFMKP

SEQ ID NO: 54316 - protein, 12 aa, Artificial sequence
  Protein classification predicting sequence
IFPNGAAYCMGR

SEQ ID NO: 54317 - protein, 11 aa, Artificial sequence
  Protein classification predicting sequence
NSDCWYLYTLD

SEQ ID NO: 54318 - protein, 8 aa, Artificial sequence
  Protein classification predicting sequence
VMDQFYMK

SEQ ID NO: 54319 - protein, 7 aa, Artificial sequence
  Protein classification predicting sequence
GSVIDAT

SEQ ID NO: 54320 - protein, 7 aa, Artificial sequence
  Protein classification predicting sequence
PCGYSMN

SEQ ID NO: 54321 - protein, 24 aa, Artificial sequence
  Protein classification predicting sequence
PCGYSMNGMKSDGTYWTIHITPEP

SEQ ID NO: 54322 - protein, 16 aa, Artificial sequence
  Protein classification predicting sequence
KFVTTLFVNQSSKCRT

SEQ ID NO: 54323 - protein, 13 aa, Artificial sequence
  Protein classification predicting sequence
FNDYNFVFTSFAK

SEQ ID NO: 54324 - protein, 7 aa, Artificial sequence
  Protein classification predicting sequence
LSESSLF

SEQ ID NO: 54325 - protein, 7 aa, Artificial sequence
  Protein classification predicting sequence
RVNPDVD

SEQ ID NO: 54326 - protein, 6 aa, Artificial sequence
  Protein classification predicting sequence
MSSNYN

SEQ ID NO: 54327 - protein, 6 aa, Artificial sequence
  Protein classification predicting sequence
DEDDFR

SEQ ID NO: 54328 - protein, 10 aa, Artificial sequence
  Protein classification predicting sequence
VEPGRAIAGP

SEQ ID NO: 54329 - protein, 8 aa, Artificial sequence
  Protein classification predicting sequence
AATGAYCY

SEQ ID NO: 54330 - protein, 11 aa, Artificial sequence
  Protein classification predicting sequence
LEIEPGRFLVA

SEQ ID NO: 54331 - protein, 6 aa, Artificial sequence
  Protein classification predicting sequence
CHIGSQ

SEQ ID NO: 54332 - protein, 7 aa, Artificial sequence
  Protein classification predicting sequence
EPGRSLV

SEQ ID NO: 54333 - protein, 7 aa, Artificial sequence
  Protein classification predicting sequence
SMANNYN

SEQ ID NO: 54334 - protein, 20 aa, Artificial sequence
  Protein classification predicting sequence
VEPGRAIAGPGTITLYEVGT

SEQ ID NO: 54335 - protein, 7 aa, Artificial sequence
  Protein classification predicting sequence
GAYGASM

SEQ ID NO: 54336 - protein, 15 aa, Artificial sequence
  Protein classification predicting sequence
THPYISTGLKENKFG

SEQ ID NO: 54337 - protein, 7 aa, Artificial sequence
  Protein classification predicting sequence
KTNTGGE

SEQ ID NO: 54338 - protein, 7 aa, Artificial sequence
  Protein classification predicting sequence
RPAMYGS

SEQ ID NO: 54339 - protein, 6 aa, Artificial sequence
  Protein classification predicting sequence
HGNNKS

SEQ ID NO: 54340 - protein, 7 aa, Artificial sequence
  Protein classification predicting sequence
DAAMNDL

SEQ ID NO: 54341 - protein, 7 aa, Artificial sequence
  Protein classification predicting sequence
QIINDEL

SEQ ID NO: 54342 - protein, 7 aa, Artificial sequence
  Protein classification predicting sequence
QVCWEKF

SEQ ID NO: 54343 - protein, 9 aa, Artificial sequence
  Protein classification predicting sequence
SGHKYGLVY

SEQ ID NO: 54344 - protein, 6 aa, Artificial sequence
  Protein classification predicting sequence
GWVIWR

SEQ ID NO: 54345 - protein, 7 aa, Artificial sequence
  Protein classification predicting sequence
FTSEHSH

SEQ ID NO: 54346 - protein, 15 aa, Artificial sequence
  Protein classification predicting sequence
ERQSSKNLLSCENSD

SEQ ID NO: 54347 - protein, 12 aa, Artificial sequence
  Protein classification predicting sequence
DLLPAKNGEEQT

SEQ ID NO: 54348 - protein, 8 aa, Artificial sequence
  Protein classification predicting sequence
TLKKMREI

SEQ ID NO: 54349 - protein, 34 aa, Artificial sequence
  Protein classification predicting sequence
SHYSIKKAGAALGFGTDNVILIKCNERGKIIPAD

SEQ ID NO: 54350 - protein, 51 aa, Artificial sequence
  Protein classification predicting sequence
YVNATAGTTVYGAFDPIQEIADICEKYNLWLHVDAAWGGGLLMSRKHRHKL

SEQ ID NO: 54351 - protein, 26 aa, Artificial sequence
  Protein classification predicting sequence
GIERANSVTWNPHKMMGVLLQCSAIL

SEQ ID NO: 54352 - protein, 59 aa, Artificial sequence
  Protein classification predicting sequence
KEKGILQGCNQMCAGYLFQPDKQYDVSYDTGDKAIQCGRHVDIFKFWLMWKAKGTVGFE

SEQ ID NO: 54353 - protein, 11 aa, Artificial sequence
  Protein classification predicting sequence
SKNLLSCENSD

SEQ ID NO: 54354 - protein, 29 aa, Artificial sequence
  Protein classification predicting sequence
DKPNIVTGANVQVCWEKFARYFEVELKEV

SEQ ID NO: 54355 - protein, 7 aa, Artificial sequence
  Protein classification predicting sequence
FDRSTKV

SEQ ID NO: 54356 - protein, 9 aa, Artificial sequence
  Protein classification predicting sequence
FNQLSTGLD

SEQ ID NO: 54357 - protein, 21 aa, Artificial sequence
  Protein classification predicting sequence
WLTSTANTNMFTYEIAPVFVL

SEQ ID NO: 54358 - protein, 15 aa, Artificial sequence
  Protein classification predicting sequence
GDGIFSPGGAISNMY

SEQ ID NO: 54359 - protein, 6 aa, Artificial sequence
  Protein classification predicting sequence
VILIKC

SEQ ID NO: 54360 - protein, 13 aa, Artificial sequence
  Protein classification predicting sequence
ATAGTTVYGAFDP

SEQ ID NO: 54361 - protein, 53 aa, Artificial sequence
  Protein classification predicting sequence
CNQMHASYLFQQDKHYDLSYDTGDKALQCGRHVDVFKLWLMWRAKGTTGFEAH

SEQ ID NO: 54362 - protein, 10 aa, Artificial sequence
  Protein classification predicting sequence
KCLELAEYLY

SEQ ID NO: 54363 - protein, 13 aa, Artificial sequence
  Protein classification predicting sequence
NFFRMVISNPAAT

SEQ ID NO: 54364 - protein, 21 aa, Artificial sequence
  Protein classification predicting sequence
NEERMSRLSKVAPVIKARMME

SEQ ID NO: 54365 - protein, 9 aa, Artificial sequence
  Protein classification predicting sequence
MMESGTTMV

SEQ ID NO: 54366 - protein, 10 aa, Artificial sequence
  Protein classification predicting sequence
LHATDLLPAC

SEQ ID NO: 54367 - protein, 12 aa, Artificial sequence
  Protein classification predicting sequence
RSELLDSRFGAK

SEQ ID NO: 54368 - protein, 11 aa, Artificial sequence
  Protein classification predicting sequence
EKNAIDKSEYP

SEQ ID NO: 54369 - protein, 14 aa, Artificial sequence
  Protein classification predicting sequence
GSSEACMLGGMAMK

SEQ ID NO: 54370 - protein, 6 aa, Artificial sequence
  Protein classification predicting sequence
GWQVPA

SEQ ID NO: 54371 - protein, 47 aa, Artificial sequence
  Protein classification predicting sequence
ISTIAESKRFPLHEMRDDVAFQIINDELYLDGNARQNLATFCQTWDD

SEQ ID NO: 54372 - protein, 82 aa, Artificial sequence
  Protein classification predicting sequence
NVHKLMDLSINKNWIDKEEYPQSAAIDLRCVNMVADLWHAPAPKNGQAVGTNTIGSSEACMLGGMAMKWRWRKRMEAAGKPT

SEQ ID NO: 54373 - protein, 7 aa, Artificial sequence
  Protein classification predicting sequence
ADLWHAP

SEQ ID NO: 54374 - protein, 10 aa, Artificial sequence
  Protein classification predicting sequence
GSSEACMLGG

SEQ ID NO: 54375 - protein, 17 aa, Artificial sequence
  Protein classification predicting sequence
ISSGYQVCWEKFCVYWD

SEQ ID NO: 54376 - protein, 8 aa, Artificial sequence
  Protein classification predicting sequence
WTLYDLAD

SEQ ID NO: 54377 - protein, 7 aa, Artificial sequence
  Protein classification predicting sequence
LPIVCYK

SEQ ID NO: 54378 - protein, 8 aa, Artificial sequence
  Protein classification predicting sequence
KVLDFHHP

SEQ ID NO: 54379 - protein, 15 aa, Artificial sequence
  Protein classification predicting sequence
TANTNMFTYEIAPVF

SEQ ID NO: 54380 - protein, 8 aa, Artificial sequence
  Protein classification predicting sequence
SVTWNPHK

SEQ ID NO: 54381 - protein, 7 aa, Artificial sequence
  Protein classification predicting sequence
SYDTGDK

SEQ ID NO: 54382 - protein, 6 aa, Artificial sequence
  Protein classification predicting sequence
MVGYQP

SEQ ID NO: 54383 - protein, 11 aa, Artificial sequence
  Protein classification predicting sequence
NLATFCQTYME

SEQ ID NO: 54384 - protein, 7 aa, Artificial sequence
  Protein classification predicting sequence
IGQYYNF

SEQ ID NO: 54385 - protein, 27 aa, Artificial sequence
  Protein classification predicting sequence
ETAVGVGTVGSSEAIMLAGLAFKRKWQ

SEQ ID NO: 54386 - protein, 8 aa, Artificial sequence
  Protein classification predicting sequence
EGYYVMDP

SEQ ID NO: 54387 - protein, 16 aa, Artificial sequence
  Protein classification predicting sequence
VDENTICVAAILGSTL

SEQ ID NO: 54388 - protein, 26 aa, Artificial sequence
  Protein classification predicting sequence
LEWDFRLPLVKSINVSGHKYGLVYAG

SEQ ID NO: 54389 - protein, 7 aa, Artificial sequence
  Protein classification predicting sequence
FHINYLG

SEQ ID NO: 54390 - protein, 13 aa, Artificial sequence
  Protein classification predicting sequence
DQPTFTLNFSKGS

SEQ ID NO: 54391 - protein, 11 aa, Artificial sequence
  Protein classification predicting sequence
VLRVVIREDFS

SEQ ID NO: 54392 - protein, 7 aa, Artificial sequence
  Protein classification predicting sequence
LNLASFV

SEQ ID NO: 54393 - protein, 6 aa, Artificial sequence
  Protein classification predicting sequence
NTSGHK

SEQ ID NO: 54394 - protein, 13 aa, Artificial sequence
  Protein classification predicting sequence
NFSLRGEALQKAI

SEQ ID NO: 54395 - protein, 10 aa, Artificial sequence
  Protein classification predicting sequence
HWQSPHMHAY

SEQ ID NO: 54396 - protein, 29 aa, Artificial sequence
  Protein classification predicting sequence
PSLLGDMLADAINCLGFTWASSPACTELE

SEQ ID NO: 54397 - protein, 9 aa, Artificial sequence
  Protein classification predicting sequence
VCATLGTTG

SEQ ID NO: 54398 - protein, 14 aa, Artificial sequence
  Protein classification predicting sequence
DFMHWQIPLSRRFR

SEQ ID NO: 54399 - protein, 8 aa, Artificial sequence
  Protein classification predicting sequence
TISGSRNG

SEQ ID NO: 54400 - protein, 9 aa, Artificial sequence
  Protein classification predicting sequence
LSELGPICA

SEQ ID NO: 54401 - protein, 7 aa, Artificial sequence
  Protein classification predicting sequence
QLPCCPL

SEQ ID NO: 54402 - protein, 11 aa, Artificial sequence
  Protein classification predicting sequence
NYLLNSFDFEK

SEQ ID NO: 54403 - protein, 7 aa, Artificial sequence
  Protein classification predicting sequence
RSLSCNS

SEQ ID NO: 54404 - protein, 6 aa, Artificial sequence
  Protein classification predicting sequence
GYPESA

SEQ ID NO: 54405 - protein, 9 aa, Artificial sequence
  Protein classification predicting sequence
FSINNCGDW

SEQ ID NO: 54406 - protein, 16 aa, Artificial sequence
  Protein classification predicting sequence
VSGHKMIGSPIPCGIV

SEQ ID NO: 54407 - protein, 9 aa, Artificial sequence
  Protein classification predicting sequence
TVVFPCPSE

SEQ ID NO: 54408 - protein, 9 aa, Artificial sequence
  Protein classification predicting sequence
DLLKLIENN

SEQ ID NO: 54409 - protein, 16 aa, Artificial sequence
  Protein classification predicting sequence
HHNLPDLMYRAFEVLP

SEQ ID NO: 54410 - protein, 6 aa, Artificial sequence
  Protein classification predicting sequence
YFKEEP

SEQ ID NO: 54411 - protein, 20 aa, Artificial sequence
  Protein classification predicting sequence
SDISISVSELGSLLDHSGPH

SEQ ID NO: 54412 - protein, 16 aa, Artificial sequence
  Protein classification predicting sequence
VTNGTSTANKIVGMYS

SEQ ID NO: 54413 - protein, 18 aa, Artificial sequence
  Protein classification predicting sequence
RPTRNAYGILGGIPQSEF

SEQ ID NO: 54414 - protein, 11 aa, Artificial sequence
  Protein classification predicting sequence
TPNATWPVHAV

SEQ ID NO: 54415 - protein, 8 aa, Artificial sequence
  Protein classification predicting sequence
TNSTYDGL

SEQ ID NO: 54416 - protein, 19 aa, Artificial sequence
  Protein classification predicting sequence
TLDVKSIHFDSAWVPYTNF

SEQ ID NO: 54417 - protein, 35 aa, Artificial sequence
  Protein classification predicting sequence
TSPHYGIVASTETAAAMMKGNAGKRLINGSIERAI

SEQ ID NO: 54418 - protein, 8 aa, Artificial sequence
  Protein classification predicting sequence
DLNLRVKN

SEQ ID NO: 54419 - protein, 8 aa, Artificial sequence
  Protein classification predicting sequence
MRIQELAQ

SEQ ID NO: 54420 - protein, 12 aa, Artificial sequence
  Protein classification predicting sequence
ANMILPYPPGVP

SEQ ID NO: 54421 - protein, 21 aa, Artificial sequence
  Protein classification predicting sequence
FLQMLCEIGAHYPGFETDIHG

SEQ ID NO: 54422 - protein, 12 aa, Artificial sequence
  Protein classification predicting sequence
ESDGWFFDVWQP

SEQ ID NO: 54423 - protein, 14 aa, Artificial sequence
  Protein classification predicting sequence
KYTFCTPGHMGGTA

SEQ ID NO: 54424 - protein, 7 aa, Artificial sequence
  Protein classification predicting sequence
NKIVGMY

SEQ ID NO: 54425 - protein, 10 aa, Artificial sequence
  Protein classification predicting sequence
LIDRNCHKSL

SEQ ID NO: 54426 - protein, 20 aa, Artificial sequence
  Protein classification predicting sequence
WPVHAVITNSTYDGLLYNTD

SEQ ID NO: 54427 - protein, 12 aa, Artificial sequence
  Protein classification predicting sequence
SIHFDSAWVPYT

SEQ ID NO: 54428 - protein, 7 aa, Artificial sequence
  Protein classification predicting sequence
ETQSTHK

SEQ ID NO: 54429 - protein, 8 aa, Artificial sequence
  Protein classification predicting sequence
MMHTTTSP

SEQ ID NO: 54430 - protein, 8 aa, Artificial sequence
  Protein classification predicting sequence
ESDGWFFD

SEQ ID NO: 54431 - protein, 7 aa, Artificial sequence
  Protein classification predicting sequence
LLQAEDR

SEQ ID NO: 54432 - protein, 7 aa, Artificial sequence
  Protein classification predicting sequence
MLSEWFS

SEQ ID NO: 54433 - protein, 10 aa, Artificial sequence
  Protein classification predicting sequence
GFLNLERVTW

SEQ ID NO: 54434 - protein, 10 aa, Artificial sequence
  Protein classification predicting sequence
SPCEVLQKIS

SEQ ID NO: 54435 - protein, 16 aa, Artificial sequence
  Protein classification predicting sequence
KRRVGPYRRCYFFSHC

SEQ ID NO: 54436 - protein, 10 aa, Artificial sequence
  Protein classification predicting sequence
QQGLQGVELG

SEQ ID NO: 54437 - protein, 32 aa, Artificial sequence
  Protein classification predicting sequence
PLMRLCAWYLYGEKHRGYALNPVANFHLQNGA

SEQ ID NO: 54438 - protein, 7 aa, Artificial sequence
  Protein classification predicting sequence
QKINEVS

SEQ ID NO: 54439 - protein, 11 aa, Artificial sequence
  Protein classification predicting sequence
SDDKDAFYVAD

SEQ ID NO: 54440 - protein, 7 aa, Artificial sequence
  Protein classification predicting sequence
ELMKVAR

SEQ ID NO: 54441 - protein, 6 aa, Artificial sequence
  Protein classification predicting sequence
PKPDEK

SEQ ID NO: 54442 - protein, 19 aa, Artificial sequence
  Protein classification predicting sequence
YSSSIWGPTCDGLDRIVER

SEQ ID NO: 54443 - protein, 27 aa, Artificial sequence
  Protein classification predicting sequence
VGDWMLFENMGAYTVAAASTFNGFQRP

SEQ ID NO: 54444 - protein, 8 aa, Artificial sequence
  Protein classification predicting sequence
SCAQESGM

SEQ ID NO: 54445 - protein, 12 aa, Artificial sequence
  Protein classification predicting sequence
PERIIYANPCKQ

SEQ ID NO: 54446 - protein, 7 aa, Artificial sequence
  Protein classification predicting sequence
SQIKYAA

SEQ ID NO: 54447 - protein, 10 aa, Artificial sequence
  Protein classification predicting sequence
VLRIATDDSK

SEQ ID NO: 54448 - protein, 8 aa, Artificial sequence
  Protein classification predicting sequence
RLSVKFGA

SEQ ID NO: 54449 - protein, 19 aa, Artificial sequence
  Protein classification predicting sequence
LDEGFTAKDILDQKINEVS

SEQ ID NO: 54450 - protein, 12 aa, Artificial sequence
  Protein classification predicting sequence
LKKHLRWLKALP

SEQ ID NO: 54451 - protein, 25 aa, Artificial sequence
  Protein classification predicting sequence
KLVLRIATDDSKAVCRLSVKFGATL

SEQ ID NO: 54452 - protein, 8 aa, Artificial sequence
  Protein classification predicting sequence
GSDDEDES

SEQ ID NO: 54453 - protein, 9 aa, Artificial sequence
  Protein classification predicting sequence
IQLGTYDGT

SEQ ID NO: 54454 - protein, 9 aa, Artificial sequence
  Protein classification predicting sequence
GVSFHVGSG

SEQ ID NO: 54455 - protein, 8 aa, Artificial sequence
  Protein classification predicting sequence
KLKFEEIT

SEQ ID NO: 54456 - protein, 41 aa, Artificial sequence
  Protein classification predicting sequence
VINPALDKYFPSDSGVRIIAEPGRYYVASAFTLAVNIIAKK

SEQ ID NO: 54457 - protein, 32 aa, Artificial sequence
  Protein classification predicting sequence
LPEMHVGDWMLFENMGAYTVAAASTFNGFQRP

SEQ ID NO: 54458 - protein, 9 aa, Artificial sequence
  Protein classification predicting sequence
FPPEVEEQD

SEQ ID NO: 54459 - protein, 13 aa, Artificial sequence
  Protein classification predicting sequence
GDLVLFDRNNHKS

SEQ ID NO: 54460 - protein, 15 aa, Artificial sequence
  Protein classification predicting sequence
FDSAWVGYEQFIPMM

SEQ ID NO: 54461 - protein, 7 aa, Artificial sequence
  Protein classification predicting sequence
STSPFYP

SEQ ID NO: 54462 - protein, 8 aa, Artificial sequence
  Protein classification predicting sequence
DLNSILFL

SEQ ID NO: 54463 - protein, 6 aa, Artificial sequence
  Protein classification predicting sequence
YYVNDG

SEQ ID NO: 54464 - protein, 10 aa, Artificial sequence
  Protein classification predicting sequence
NDGVYGSFNC

SEQ ID NO: 54465 - protein, 8 aa, Artificial sequence
  Protein classification predicting sequence
AASTFNGF

SEQ ID NO: 54466 - protein, 9 aa, Artificial sequence
  Protein classification predicting sequence
GAYTVAAAS

SEQ ID NO: 54467 - protein, 6 aa, Artificial sequence
  Protein classification predicting sequence
NDGVYG

SEQ ID NO: 54468 - protein, 9 aa, Artificial sequence
  Protein classification predicting sequence
RFRLLREHG

SEQ ID NO: 54469 - protein, 47 aa, Artificial sequence
  Protein classification predicting sequence
WTLQNYKPSFEEFKANALPTCGYAMLAITSFVGMGDIVTPETFKWAA

SEQ ID NO: 54470 - protein, 22 aa, Artificial sequence
  Protein classification predicting sequence
KRHQQLKEEVRKMIVAPMANST

SEQ ID NO: 54471 - protein, 9 aa, Artificial sequence
  Protein classification predicting sequence
KLAFIDSVQ

SEQ ID NO: 54472 - protein, 11 aa, Artificial sequence
  Protein classification predicting sequence
KEIEDELENIY

SEQ ID NO: 54473 - protein, 7 aa, Artificial sequence
  Protein classification predicting sequence
FNKFKDE

SEQ ID NO: 54474 - protein, 17 aa, Artificial sequence
  Protein classification predicting sequence
HALKQSIRRGLPRVEAR

SEQ ID NO: 54475 - protein, 12 aa, Artificial sequence
  Protein classification predicting sequence
ARDRVVEGYFWI

SEQ ID NO: 54476 - protein, 35 aa, Artificial sequence
  Protein classification predicting sequence
GVYFEPQYSLGRKMLTKVIAMASIVDDTYDSYATY

SEQ ID NO: 54477 - protein, 10 aa, Artificial sequence
  Protein classification predicting sequence
GRQYRVEYAK

SEQ ID NO: 54478 - protein, 8 aa, Artificial sequence
  Protein classification predicting sequence
GYAMLAIT

SEQ ID NO: 54479 - protein, 9 aa, Artificial sequence
  Protein classification predicting sequence
TPETFKWAA

SEQ ID NO: 54480 - protein, 11 aa, Artificial sequence
  Protein classification predicting sequence
ASTIICRFMDD

SEQ ID NO: 54481 - protein, 14 aa, Artificial sequence
  Protein classification predicting sequence
HRREDDCSAIECYM

SEQ ID NO: 54482 - protein, 9 aa, Artificial sequence
  Protein classification predicting sequence
YGVTAQEAY

SEQ ID NO: 54483 - protein, 20 aa, Artificial sequence
  Protein classification predicting sequence
RSLNLARVMDVLYREGDGYT

SEQ ID NO: 54484 - protein, 14 aa, Artificial sequence
  Protein classification predicting sequence
VGKAAKGGITSLLI

SEQ ID NO: 54485 - protein, 6 aa, Artificial sequence
  Protein classification predicting sequence
EVTLQP

SEQ ID NO: 54486 - protein, 6 aa, Artificial sequence
  Protein classification predicting sequence
QGNLDP

SEQ ID NO: 54487 - protein, 9 aa, Artificial sequence
  Protein classification predicting sequence
WMMRQAGRY

SEQ ID NO: 54488 - protein, 10 aa, Artificial sequence
  Protein classification predicting sequence
PDGVILFSDI

SEQ ID NO: 54489 - protein, 16 aa, Artificial sequence
  Protein classification predicting sequence
FKPDGVILFSDILTPL

SEQ ID NO: 54490 - protein, 6 aa, Artificial sequence
  Protein classification predicting sequence
EGGSSK

SEQ ID NO: 54491 - protein, 15 aa, Artificial sequence
  Protein classification predicting sequence
WYMRQAGRSQPEYRK

SEQ ID NO: 54492 - protein, 7 aa, Artificial sequence
  Protein classification predicting sequence
KEKYSLF

SEQ ID NO: 54493 - protein, 8 aa, Artificial sequence
  Protein classification predicting sequence
PELCAYVT

SEQ ID NO: 54494 - protein, 16 aa, Artificial sequence
  Protein classification predicting sequence
GAPFTLASYMIEGGPS

SEQ ID NO: 54495 - protein, 7 aa, Artificial sequence
  Protein classification predicting sequence
IFNLGHG

SEQ ID NO: 54496 - protein, 13 aa, Artificial sequence
  Protein classification predicting sequence
DAAILYKDIMTPL

SEQ ID NO: 54497 - protein, 17 aa, Artificial sequence
  Protein classification predicting sequence
GAPFTLASYMIEGGPSK

SEQ ID NO: 54498 - protein, 8 aa, Artificial sequence
  Protein classification predicting sequence
FGVGASHL

SEQ ID NO: 54499 - protein, 13 aa, Artificial sequence
  Protein classification predicting sequence
DLPLDVVGLDWRL

SEQ ID NO: 54500 - protein, 18 aa, Artificial sequence
  Protein classification predicting sequence
MRQAGRSQPEYRKLKEKY

SEQ ID NO: 54501 - protein, 18 aa, Artificial sequence
  Protein classification predicting sequence
QYGVDAAILYKDIMTPLP

SEQ ID NO: 54502 - protein, 13 aa, Artificial sequence
  Protein classification predicting sequence
QGNLDPSILLAPW

SEQ ID NO: 54503 - protein, 10 aa, Artificial sequence
  Protein classification predicting sequence
IFNLGHGVFP

SEQ ID NO: 54504 - protein, 6 aa, Artificial sequence
  Protein classification predicting sequence
AMGLGL

SEQ ID NO: 54505 - protein, 11 aa, Artificial sequence
  Protein classification predicting sequence
MRQAGRYLPEY

SEQ ID NO: 54506 - protein, 12 aa, Artificial sequence
  Protein classification predicting sequence
AGHGTPDQAPAR

SEQ ID NO: 54507 - protein, 7 aa, Artificial sequence
  Protein classification predicting sequence
TLQPLRR

SEQ ID NO: 54508 - protein, 6 aa, Artificial sequence
  Protein classification predicting sequence
YMIEGG

SEQ ID NO: 54509 - protein, 8 aa, Artificial sequence
  Protein classification predicting sequence
FSDILVVP

SEQ ID NO: 54510 - protein, 12 aa, Artificial sequence
  Protein classification predicting sequence
KALIGFCGSPWT

SEQ ID NO: 54511 - protein, 6 aa, Artificial sequence
  Protein classification predicting sequence
QIFDSW

SEQ ID NO: 54512 - protein, 7 aa, Artificial sequence
  Protein classification predicting sequence
FEAGEGP

SEQ ID NO: 54513 - protein, 10 aa, Artificial sequence
  Protein classification predicting sequence
EATLLGPSLL

SEQ ID NO: 54514 - protein, 6 aa, Artificial sequence
  Protein classification predicting sequence
GHGILP

SEQ ID NO: 54515 - protein, 7 aa, Artificial sequence
  Protein classification predicting sequence
PFTLASY

SEQ ID NO: 54516 - protein, 9 aa, Artificial sequence
  Protein classification predicting sequence
AGASAVQLF

SEQ ID NO: 54517 - protein, 10 aa, Artificial sequence
  Protein classification predicting sequence
ADTLHPDYHV

SEQ ID NO: 54518 - protein, 5 aa, Artificial sequence
  Protein classification predicting sequence
KKMMY

SEQ ID NO: 54519 - protein, 9 aa, Artificial sequence
  Protein classification predicting sequence
LRALLKEPV

SEQ ID NO: 54520 - protein, 10 aa, Artificial sequence
  Protein classification predicting sequence
GHVFNLGHGI

SEQ ID NO: 54521 - protein, 8 aa, Artificial sequence
  Protein classification predicting sequence
VEAVHRLS

SEQ ID NO: 54522 - protein, 7 aa, Artificial sequence
  Protein classification predicting sequence
EGGPSKN

SEQ ID NO: 54523 - protein, 9 aa, Artificial sequence
  Protein classification predicting sequence
RALLRQPVD

SEQ ID NO: 54524 - protein, 6 aa, Artificial sequence
  Protein classification predicting sequence
TLACYM

SEQ ID NO: 54525 - protein, 6 aa, Artificial sequence
  Protein classification predicting sequence
FDTWGG

SEQ ID NO: 54526 - protein, 6 aa, Artificial sequence
  Protein classification predicting sequence
GGQWLE

SEQ ID NO: 54527 - protein, 10 aa, Artificial sequence
  Protein classification predicting sequence
GCDAVGLDWT

SEQ ID NO: 54528 - protein, 10 aa, Artificial sequence
  Protein classification predicting sequence
PVWFMRQAGR

SEQ ID NO: 54529 - protein, 6 aa, Artificial sequence
  Protein classification predicting sequence
DAAILF

SEQ ID NO: 54530 - protein, 10 aa, Artificial sequence
  Protein classification predicting sequence
MRQAGRYLPE

SEQ ID NO: 54531 - protein, 12 aa, Artificial sequence
  Protein classification predicting sequence
LYLNAQIKAGAQ

SEQ ID NO: 54532 - protein, 6 aa, Artificial sequence
  Protein classification predicting sequence
PYTPIW

SEQ ID NO: 54533 - protein, 9 aa, Artificial sequence
  Protein classification predicting sequence
DAAILFSDI

SEQ ID NO: 54534 - protein, 6 aa, Artificial sequence
  Protein classification predicting sequence
GEGPKF

SEQ ID NO: 54535 - protein, 10 aa, Artificial sequence
  Protein classification predicting sequence
GSPWTLATYM

SEQ ID NO: 54536 - protein, 6 aa, Artificial sequence
  Protein classification predicting sequence
FNLGHG

SEQ ID NO: 54537 - protein, 8 aa, Artificial sequence
  Protein classification predicting sequence
FSDIVVPL

SEQ ID NO: 54538 - protein, 8 aa, Artificial sequence
  Protein classification predicting sequence
YLVEGGPS

SEQ ID NO: 54539 - protein, 6 aa, Artificial sequence
  Protein classification predicting sequence
ITHQPE

SEQ ID NO: 54540 - protein, 9 aa, Artificial sequence
  Protein classification predicting sequence
GAPFTLASY

SEQ ID NO: 54541 - protein, 6 aa, Artificial sequence
  Protein classification predicting sequence
LPEYRA

SEQ ID NO: 54542 - protein, 7 aa, Artificial sequence
  Protein classification predicting sequence
TLQPIRR

SEQ ID NO: 54543 - protein, 7 aa, Artificial sequence
  Protein classification predicting sequence
VVGVDWR

SEQ ID NO: 54544 - protein, 9 aa, Artificial sequence
  Protein classification predicting sequence
GHVFNLGHG

SEQ ID NO: 54545 - protein, 8 aa, Artificial sequence
  Protein classification predicting sequence
TRARAGSF

SEQ ID NO: 54546 - protein, 7 aa, Artificial sequence
  Protein classification predicting sequence
RVPLIGF

SEQ ID NO: 54547 - protein, 8 aa, Artificial sequence
  Protein classification predicting sequence
AAYQEFSL

SEQ ID NO: 54548 - protein, 12 aa, Artificial sequence
  Protein classification predicting sequence
MRQAGRSQPEYR

SEQ ID NO: 54549 - protein, 8 aa, Artificial sequence
  Protein classification predicting sequence
LKEKYSLF

SEQ ID NO: 54550 - protein, 10 aa, Artificial sequence
  Protein classification predicting sequence
DAAILYKDIM

SEQ ID NO: 54551 - protein, 18 aa, Artificial sequence
  Protein classification predicting sequence
GVDVEIKSGIGPVIHNPI

SEQ ID NO: 54552 - protein, 8 aa, Artificial sequence
  Protein classification predicting sequence
VPLIGFSG

SEQ ID NO: 54553 - protein, 6 aa, Artificial sequence
  Protein classification predicting sequence
TWFALM

SEQ ID NO: 54554 - protein, 9 aa, Artificial sequence
  Protein classification predicting sequence
GLDWRTSIN

SEQ ID NO: 54555 - protein, 7 aa, Artificial sequence
  Protein classification predicting sequence
LKNDRYL

SEQ ID NO: 54556 - protein, 8 aa, Artificial sequence
  Protein classification predicting sequence
AGDFMSLC

SEQ ID NO: 54557 - protein, 7 aa, Artificial sequence
  Protein classification predicting sequence
LPIPDPE

SEQ ID NO: 54558 - protein, 27 aa, Artificial sequence
  Protein classification predicting sequence
VPLIGFSGSPWTLATYMVEGGSSKAFT

SEQ ID NO: 54559 - protein, 8 aa, Artificial sequence
  Protein classification predicting sequence
FDTWGGVL

SEQ ID NO: 54560 - protein, 11 aa, Artificial sequence
  Protein classification predicting sequence
LKNDRYLRALL

SEQ ID NO: 54561 - protein, 15 aa, Artificial sequence
  Protein classification predicting sequence
RYPLDAAILFSDILT

SEQ ID NO: 54562 - protein, 11 aa, Artificial sequence
  Protein classification predicting sequence
YLNAQIKAGAQ

SEQ ID NO: 54563 - protein, 14 aa, Artificial sequence
  Protein classification predicting sequence
YLNAQIKAGAQSVM

SEQ ID NO: 54564 - protein, 9 aa, Artificial sequence
  Protein classification predicting sequence
FDTWGGVLT

SEQ ID NO: 54565 - protein, 15 aa, Artificial sequence
  Protein classification predicting sequence
KVALQGNMDPSMLYA

SEQ ID NO: 54566 - protein, 9 aa, Artificial sequence
  Protein classification predicting sequence
AGVFVEAVH

SEQ ID NO: 54567 - protein, 7 aa, Artificial sequence
  Protein classification predicting sequence
QGNVDPG

SEQ ID NO: 54568 - protein, 14 aa, Artificial sequence
  Protein classification predicting sequence
VLGFVGAPWTLAAY

SEQ ID NO: 54569 - protein, 6 aa, Artificial sequence
  Protein classification predicting sequence
GEGPRF

SEQ ID NO: 54570 - protein, 9 aa, Artificial sequence
  Protein classification predicting sequence
KIVDGLIRE

SEQ ID NO: 54571 - protein, 6 aa, Artificial sequence
  Protein classification predicting sequence
VALQGN

SEQ ID NO: 54572 - protein, 8 aa, Artificial sequence
  Protein classification predicting sequence
HLLLDKLA

SEQ ID NO: 54573 - protein, 6 aa, Artificial sequence
  Protein classification predicting sequence
RENDGR

SEQ ID NO: 54574 - protein, 6 aa, Artificial sequence
  Protein classification predicting sequence
FTKGGG

SEQ ID NO: 54575 - protein, 13 aa, Artificial sequence
  Protein classification predicting sequence
WLMRQAGRYLPEY

SEQ ID NO: 54576 - protein, 8 aa, Artificial sequence
  Protein classification predicting sequence
PDAMGLGL

SEQ ID NO: 54577 - protein, 8 aa, Artificial sequence
  Protein classification predicting sequence
HRILEINA

SEQ ID NO: 54578 - protein, 6 aa, Artificial sequence
  Protein classification predicting sequence
YLNAQI

SEQ ID NO: 54579 - protein, 7 aa, Artificial sequence
  Protein classification predicting sequence
LVDEVHT

SEQ ID NO: 54580 - protein, 9 aa, Artificial sequence
  Protein classification predicting sequence
ATRAQAGDF

SEQ ID NO: 54581 - protein, 10 aa, Artificial sequence
  Protein classification predicting sequence
EVATILAGFG

SEQ ID NO: 54582 - protein, 6 aa, Artificial sequence
  Protein classification predicting sequence
LSAQYH

SEQ ID NO: 54583 - protein, 80 aa, Artificial sequence
  Protein classification predicting sequence
VMIFDTWGGVLTGRDYQQFSLYYMHKIVDGLLRENDGRRVPVTLFTKGGGQWLEAMAETGCDALGLDWTTDIADARRRVG

SEQ ID NO: 54584 - protein, 22 aa, Artificial sequence
  Protein classification predicting sequence
GEGHVFNLGHGIHQDVPPEHAG

SEQ ID NO: 54585 - protein, 7 aa, Artificial sequence
  Protein classification predicting sequence
LGYVMDA

SEQ ID NO: 54586 - protein, 8 aa, Artificial sequence
  Protein classification predicting sequence
NLGHGITP

SEQ ID NO: 54587 - protein, 12 aa, Artificial sequence
  Protein classification predicting sequence
ELKNDRYLRALL

SEQ ID NO: 54588 - protein, 12 aa, Artificial sequence
  Protein classification predicting sequence
IPDPEDELGYVM

SEQ ID NO: 54589 - protein, 21 aa, Artificial sequence
  Protein classification predicting sequence
MRQAGRSQPEYRKLKEKYSLF

SEQ ID NO: 54590 - protein, 19 aa, Artificial sequence
  Protein classification predicting sequence
ITHQPELCAYVTHLPVDNY

SEQ ID NO: 54591 - protein, 11 aa, Artificial sequence
  Protein classification predicting sequence
TWFALMNHLVD

SEQ ID NO: 54592 - protein, 7 aa, Artificial sequence
  Protein classification predicting sequence
QGNLDPS

SEQ ID NO: 54593 - protein, 12 aa, Artificial sequence
  Protein classification predicting sequence
IFNLGHGVFPEV

SEQ ID NO: 54594 - protein, 7 aa, Artificial sequence
  Protein classification predicting sequence
PETLRKV

SEQ ID NO: 54595 - protein, 26 aa, Artificial sequence
  Protein classification predicting sequence
LYKDIMTPLKPIGVDVEIKSGIGPVI

SEQ ID NO: 54596 - protein, 56 aa, Artificial sequence
  Protein classification predicting sequence
RDVPYVLDTIKLLTEEKLNVPLIGFTGAPFTLASYMIEGGPSKNYNFTKAMMYRDE

SEQ ID NO: 54597 - protein, 28 aa, Artificial sequence
  Protein classification predicting sequence
ILFGVGASHLINEWNDLPIDVLGLDWRT

SEQ ID NO: 54598 - protein, 11 aa, Artificial sequence
  Protein classification predicting sequence
PVWFMRQAGRS

SEQ ID NO: 54599 - protein, 8 aa, Artificial sequence
  Protein classification predicting sequence
FDSWVGAL

SEQ ID NO: 54600 - protein, 7 aa, Artificial sequence
  Protein classification predicting sequence
PLIGFAG

SEQ ID NO: 54601 - protein, 9 aa, Artificial sequence
  Protein classification predicting sequence
WLMRQAGRY

SEQ ID NO: 54602 - protein, 9 aa, Artificial sequence
  Protein classification predicting sequence
GAPWTLAAY

SEQ ID NO: 54603 - protein, 8 aa, Artificial sequence
  Protein classification predicting sequence
DPGVLFGS

SEQ ID NO: 54604 - protein, 9 aa, Artificial sequence
  Protein classification predicting sequence
ILYISGSAG

SEQ ID NO: 54605 - protein, 6 aa, Artificial sequence
  Protein classification predicting sequence
QGNMDP

SEQ ID NO: 54606 - protein, 6 aa, Artificial sequence
  Protein classification predicting sequence
DAAIIF

SEQ ID NO: 54607 - protein, 8 aa, Artificial sequence
  Protein classification predicting sequence
LCKNAELA

SEQ ID NO: 54608 - protein, 21 aa, Artificial sequence
  Protein classification predicting sequence
PDPEGELQYVMNAVRQIRKDL

SEQ ID NO: 54609 - protein, 7 aa, Artificial sequence
  Protein classification predicting sequence
YVMNAVR

SEQ ID NO: 54610 - protein, 17 aa, Artificial sequence
  Protein classification predicting sequence
FSLQYMHKIVDGLIREN

SEQ ID NO: 54611 - protein, 11 aa, Artificial sequence
  Protein classification predicting sequence
GRRVPVTLFTK

SEQ ID NO: 54612 - protein, 6 aa, Artificial sequence
  Protein classification predicting sequence
TCKADV

SEQ ID NO: 54613 - protein, 36 aa, Artificial sequence
  Protein classification predicting sequence
GTGHVFNLGHGIHLDVPPENAGVFVEAVHELSKPYH

SEQ ID NO: 54614 - protein, 13 aa, Artificial sequence
  Protein classification predicting sequence
PLIGFSGSPWTLA

SEQ ID NO: 54615 - protein, 10 aa, Artificial sequence
  Protein classification predicting sequence
WMMRQAGRYL

SEQ ID NO: 54616 - protein, 8 aa, Artificial sequence
  Protein classification predicting sequence
AGSFLDLC

SEQ ID NO: 54617 - protein, 6 aa, Artificial sequence
  Protein classification predicting sequence
PDAMGL

SEQ ID NO: 54618 - protein, 14 aa, Artificial sequence
  Protein classification predicting sequence
VPLIGFSGSPWTLA

SEQ ID NO: 54619 - protein, 6 aa, Artificial sequence
  Protein classification predicting sequence
FSLPYL

SEQ ID NO: 54620 - protein, 7 aa, Artificial sequence
  Protein classification predicting sequence
DVVSLDW

SEQ ID NO: 54621 - protein, 7 aa, Artificial sequence
  Protein classification predicting sequence
ELACEVT

SEQ ID NO: 54622 - protein, 23 aa, Artificial sequence
  Protein classification predicting sequence
KKMMYAEPQTLHLLLDKLADSVI

SEQ ID NO: 54623 - protein, 9 aa, Artificial sequence
  Protein classification predicting sequence
LYAPPARIE

SEQ ID NO: 54624 - protein, 18 aa, Artificial sequence
  Protein classification predicting sequence
GEGHVFNLGHGIHQDVPP

SEQ ID NO: 54625 - protein, 8 aa, Artificial sequence
  Protein classification predicting sequence
LTRFPRLE

SEQ ID NO: 54626 - protein, 12 aa, Artificial sequence
  Protein classification predicting sequence
IGAPTPLEYLPR

SEQ ID NO: 54627 - protein, 8 aa, Artificial sequence
  Protein classification predicting sequence
SDYLGREI

SEQ ID NO: 54628 - protein, 15 aa, Artificial sequence
  Protein classification predicting sequence
EAQGFRPYVIPVGGS

SEQ ID NO: 54629 - protein, 9 aa, Artificial sequence
  Protein classification predicting sequence
GYVESALEI

SEQ ID NO: 54630 - protein, 15 aa, Artificial sequence
  Protein classification predicting sequence
LWDDYFAPGYGVPND

SEQ ID NO: 54631 - protein, 9 aa, Artificial sequence
  Protein classification predicting sequence
GMEAVKLLA

SEQ ID NO: 54632 - protein, 14 aa, Artificial sequence
  Protein classification predicting sequence
GYVESALEIAQQCE

SEQ ID NO: 54633 - protein, 25 aa, Artificial sequence
  Protein classification predicting sequence
SSVVVASGSAGTHAGLAVGLEHLMP

SEQ ID NO: 54634 - protein, 23 aa, Artificial sequence
  Protein classification predicting sequence
LLDPVYTGKAMAGLIDGISQKRF

SEQ ID NO: 54635 - protein, 17 aa, Artificial sequence
  Protein classification predicting sequence
GGNKLRKLEFLAADALR

SEQ ID NO: 54636 - protein, 34 aa, Artificial sequence
  Protein classification predicting sequence
TAGAIQSNHVRQTAAVAAKLGLHCVALLENPIGT

SEQ ID NO: 54637 - protein, 15 aa, Artificial sequence
  Protein classification predicting sequence
NYLTNGNRLLLDLFN

SEQ ID NO: 54638 - protein, 12 aa, Artificial sequence
  Protein classification predicting sequence
GGSNALGALGYV

SEQ ID NO: 54639 - protein, 20 aa, Artificial sequence
  Protein classification predicting sequence
SSVVVASGSAGTHAGLAVGL

SEQ ID NO: 54640 - protein, 10 aa, Artificial sequence
  Protein classification predicting sequence
ELIGVTVSRS

SEQ ID NO: 54641 - protein, 19 aa, Artificial sequence
  Protein classification predicting sequence
GPILFIHTGGAPALFAYHP

SEQ ID NO: 54642 - protein, 11 aa, Artificial sequence
  Protein classification predicting sequence
LERDKAAGLIP

SEQ ID NO: 54643 - protein, 12 aa, Artificial sequence
  Protein classification predicting sequence
INSAKKIHLVPC

SEQ ID NO: 54644 - protein, 6 aa, Artificial sequence
  Protein classification predicting sequence
PHKWLL

SEQ ID NO: 54645 - protein, 11 aa, Artificial sequence
  Protein classification predicting sequence
SPYFFAYFPTA

SEQ ID NO: 54646 - protein, 10 aa, Artificial sequence
  Protein classification predicting sequence
MLADMLCGAI

SEQ ID NO: 54647 - protein, 19 aa, Artificial sequence
  Protein classification predicting sequence
CIGFSWAASPACTELETVM

SEQ ID NO: 54648 - protein, 7 aa, Artificial sequence
  Protein classification predicting sequence
DWLGKML

SEQ ID NO: 54649 - protein, 28 aa, Artificial sequence
  Protein classification predicting sequence
GVEFADSFNFNPHKWLLVNFDCSAMWVK

SEQ ID NO: 54650 - protein, 16 aa, Artificial sequence
  Protein classification predicting sequence
HEFESLVRQDPRFEIC

SEQ ID NO: 54651 - protein, 11 aa, Artificial sequence
  Protein classification predicting sequence
ADSFNFNPHKW

SEQ ID NO: 54652 - protein, 10 aa, Artificial sequence
  Protein classification predicting sequence
LVNFDCSAMW

SEQ ID NO: 54653 - protein, 15 aa, Artificial sequence
  Protein classification predicting sequence
EALERDKAAGLIPFF

SEQ ID NO: 54654 - protein, 12 aa, Artificial sequence
  Protein classification predicting sequence
TQAAIMEKLVAY

SEQ ID NO: 54655 - protein, 11 aa, Artificial sequence
  Protein classification predicting sequence
GLVCFRLKGSN

SEQ ID NO: 54656 - protein, 66 aa, Artificial sequence
  Protein classification predicting sequence
EKIIMPGVTHWHSPYFFAYFPTASSYPAMLADMLCGAIGCIGFSWAASPACTELETVMMDWLGKML

SEQ ID NO: 54657 - protein, 6 aa, Artificial sequence
  Protein classification predicting sequence
KYIDHT

SEQ ID NO: 54658 - protein, 7 aa, Artificial sequence
  Protein classification predicting sequence
LKPDTTK

SEQ ID NO: 54659 - protein, 8 aa, Artificial sequence
  Protein classification predicting sequence
VKASGGVR

SEQ ID NO: 54660 - protein, 41 aa, Artificial sequence
  Protein classification predicting sequence
FKSVCVNPTHVKYAAERLADSEVLVCTVIGFPLGASTTATK

SEQ ID NO: 54661 - protein, 7 aa, Artificial sequence
  Protein classification predicting sequence
CTVIGFP

SEQ ID NO: 54662 - protein, 7 aa, Artificial sequence
  Protein classification predicting sequence
GVKASGG

SEQ ID NO: 54663 - protein, 25 aa, Artificial sequence
  Protein classification predicting sequence
IDHTLLKPESTRTQIDQIIDEAKAY

SEQ ID NO: 54664 - protein, 21 aa, Artificial sequence
  Protein classification predicting sequence
FKSVCVNPTHVKYAAERLADS

SEQ ID NO: 54665 - protein, 7 aa, Artificial sequence
  Protein classification predicting sequence
KVIALCH

SEQ ID NO: 54666 - protein, 21 aa, Artificial sequence
  Protein classification predicting sequence
AKTPVGNTAAICIYPRFIPIA

SEQ ID NO: 54667 - protein, 10 aa, Artificial sequence
  Protein classification predicting sequence
HYRFGASSLL

SEQ ID NO: 54668 - protein, 14 aa, Artificial sequence
  Protein classification predicting sequence
GNTAAICIYPRFIP

SEQ ID NO: 54669 - protein, 22 aa, Artificial sequence
  Protein classification predicting sequence
CKEACAAANVLLKVIIETGELK

SEQ ID NO: 54670 - protein, 18 aa, Artificial sequence
  Protein classification predicting sequence
AGADFIKTSTGKVPVNAT

SEQ ID NO: 54671 - protein, 6 aa, Artificial sequence
  Protein classification predicting sequence
WADARH

SEQ ID NO: 54672 - protein, 12 aa, Artificial sequence
  Protein classification predicting sequence
RFGASSLLASLL

SEQ ID NO: 54673 - protein, 17 aa, Artificial sequence
  Protein classification predicting sequence
GADFIKTSTGKVAVNAT

SEQ ID NO: 54674 - protein, 8 aa, Artificial sequence
  Protein classification predicting sequence
VGFKPAGG

SEQ ID NO: 54675 - protein, 8 aa, Artificial sequence
  Protein classification predicting sequence
KASGGIRT

SEQ ID NO: 54676 - protein, 14 aa, Artificial sequence
  Protein classification predicting sequence
VCTVIGFPLGASTT

SEQ ID NO: 54677 - protein, 29 aa, Artificial sequence
  Protein classification predicting sequence
DFVKTSTGFSTGGATAEDIALMRKTVGPN

SEQ ID NO: 54678 - protein, 7 aa, Artificial sequence
  Protein classification predicting sequence
EVDMVIN

SEQ ID NO: 54679 - protein, 7 aa, Artificial sequence
  Protein classification predicting sequence
AGATRIG

SEQ ID NO: 54680 - protein, 15 aa, Artificial sequence
  Protein classification predicting sequence
AGATRIGASAGVAIV

SEQ ID NO: 54681 - protein, 15 aa, Artificial sequence
  Protein classification predicting sequence
IGVKASGGVRTKEDV

SEQ ID NO: 54682 - protein, 6 aa, Artificial sequence
  Protein classification predicting sequence
ASEISI

SEQ ID NO: 54683 - protein, 16 aa, Artificial sequence
  Protein classification predicting sequence
IDHTALKPDTTKEQIL

SEQ ID NO: 54684 - protein, 7 aa, Artificial sequence
  Protein classification predicting sequence
LMRKTVG

SEQ ID NO: 54685 - protein, 7 aa, Artificial sequence
  Protein classification predicting sequence
LMRETVG

SEQ ID NO: 54686 - protein, 13 aa, Artificial sequence
  Protein classification predicting sequence
VCTVIGFPLGANT

SEQ ID NO: 54687 - protein, 10 aa, Artificial sequence
  Protein classification predicting sequence
DMVINIGALK

SEQ ID NO: 54688 - protein, 9 aa, Artificial sequence
  Protein classification predicting sequence
LMDLTTLND

SEQ ID NO: 54689 - protein, 8 aa, Artificial sequence
  Protein classification predicting sequence
RFGASSLL

SEQ ID NO: 54690 - protein, 7 aa, Artificial sequence
  Protein classification predicting sequence
QIIDEAK

SEQ ID NO: 54691 - protein, 11 aa, Artificial sequence
  Protein classification predicting sequence
NGADEIDMVIN

SEQ ID NO: 54692 - protein, 6 aa, Artificial sequence
  Protein classification predicting sequence
VQQDIE

SEQ ID NO: 54693 - protein, 7 aa, Artificial sequence
  Protein classification predicting sequence
EIVKASE

SEQ ID NO: 54694 - protein, 7 aa, Artificial sequence
  Protein classification predicting sequence
DAIQNGA

SEQ ID NO: 54695 - protein, 6 aa, Artificial sequence
  Protein classification predicting sequence
LKVIVE

SEQ ID NO: 54696 - protein, 6 aa, Artificial sequence
  Protein classification predicting sequence
SVCVNP

SEQ ID NO: 54697 - protein, 10 aa, Artificial sequence
  Protein classification predicting sequence
GADFIKTSTG

SEQ ID NO: 54698 - protein, 7 aa, Artificial sequence
  Protein classification predicting sequence
KTSTGFS

SEQ ID NO: 54699 - protein, 16 aa, Artificial sequence
  Protein classification predicting sequence
IKTSTGFSTAGATFED

SEQ ID NO: 54700 - protein, 7 aa, Artificial sequence
  Protein classification predicting sequence
ALCHQAK

SEQ ID NO: 54701 - protein, 19 aa, Artificial sequence
  Protein classification predicting sequence
ACAAANVLLKVIIETGELK

SEQ ID NO: 54702 - protein, 12 aa, Artificial sequence
  Protein classification predicting sequence
LLKVIIETGELK

SEQ ID NO: 54703 - protein, 13 aa, Artificial sequence
  Protein classification predicting sequence
AGADFIKTSTGKV

SEQ ID NO: 54704 - protein, 20 aa, Artificial sequence
  Protein classification predicting sequence
VNATPESARIMMEVIRDMGV

SEQ ID NO: 54705 - protein, 10 aa, Artificial sequence
  Protein classification predicting sequence
LAIADELFGA

SEQ ID NO: 54706 - protein, 26 aa, Artificial sequence
  Protein classification predicting sequence
EALIRKASEISIKAGADFIKTSTGKV

SEQ ID NO: 54707 - protein, 14 aa, Artificial sequence
  Protein classification predicting sequence
LAIADELFGADWAD

SEQ ID NO: 54708 - protein, 10 aa, Artificial sequence
  Protein classification predicting sequence
VGFKPAGGVR

SEQ ID NO: 54709 - protein, 19 aa, Artificial sequence
  Protein classification predicting sequence
AYGADEVDVVFPYRALMAG

SEQ ID NO: 54710 - protein, 11 aa, Artificial sequence
  Protein classification predicting sequence
FKSVCVNPTHV

SEQ ID NO: 54711 - protein, 17 aa, Artificial sequence
  Protein classification predicting sequence
EIDMVINIGALKDGRFD

SEQ ID NO: 54712 - protein, 11 aa, Artificial sequence
  Protein classification predicting sequence
TVKVIIETVLL

SEQ ID NO: 54713 - protein, 14 aa, Artificial sequence
  Protein classification predicting sequence
FVKTSTGFAGGGAT

SEQ ID NO: 54714 - protein, 11 aa, Artificial sequence
  Protein classification predicting sequence
EDVKLMKDTVG

SEQ ID NO: 54715 - protein, 15 aa, Artificial sequence
  Protein classification predicting sequence
EVKASGGVRNLEDFN

SEQ ID NO: 54716 - protein, 13 aa, Artificial sequence
  Protein classification predicting sequence
EAGATRIGASAGV

SEQ ID NO: 54717 - protein, 20 aa, Artificial sequence
  Protein classification predicting sequence
FIALGASRLGTSRIIKIVKN

SEQ ID NO: 54718 - protein, 32 aa, Artificial sequence
  Protein classification predicting sequence
NGADEIDMVINLTDVKNGDFDTVEEEIRQIKA

SEQ ID NO: 54719 - protein, 76 aa, Artificial sequence
  Protein classification predicting sequence
CQDHILKVIVETCQLTKEELIELCGVVTRSGADFIKTSTGFSTAGATFEDVEVMAKYVGEGVKIKAAGGISSLEDA

SEQ ID NO: 54720 - protein, 9 aa, Artificial sequence
  Protein classification predicting sequence
KAFETKDAI

SEQ ID NO: 54721 - protein, 8 aa, Artificial sequence
  Protein classification predicting sequence
KTSTGFST

SEQ ID NO: 54722 - protein, 10 aa, Artificial sequence
  Protein classification predicting sequence
GADEIDMVIN

SEQ ID NO: 54723 - protein, 5 aa, Artificial sequence
  Protein classification predicting sequence
VCVNP

SEQ ID NO: 54724 - protein, 11 aa, Artificial sequence
  Protein classification predicting sequence
EAREYGFASVC

SEQ ID NO: 54725 - protein, 6 aa, Artificial sequence
  Protein classification predicting sequence
KVIVET

SEQ ID NO: 54726 - protein, 9 aa, Artificial sequence
  Protein classification predicting sequence
ADFIKTSTG

SEQ ID NO: 54727 - protein, 7 aa, Artificial sequence
  Protein classification predicting sequence
IKASGGI

SEQ ID NO: 54728 - protein, 14 aa, Artificial sequence
  Protein classification predicting sequence
LRALKLMDLTTLND

SEQ ID NO: 54729 - protein, 6 aa, Artificial sequence
  Protein classification predicting sequence
LCHDAK

SEQ ID NO: 54730 - protein, 16 aa, Artificial sequence
  Protein classification predicting sequence
AYGADEVDVVFPYRAL

SEQ ID NO: 54731 - protein, 6 aa, Artificial sequence
  Protein classification predicting sequence
LVKQCK

SEQ ID NO: 54732 - protein, 48 aa, Artificial sequence
  Protein classification predicting sequence
EALIKKASQICIEAGADFIKTSTGKVPVNATPEYARMMLEVIRDMGVA

SEQ ID NO: 54733 - protein, 18 aa, Artificial sequence
  Protein classification predicting sequence
KTVGFKPAGGVRTAEDAQ

SEQ ID NO: 54734 - protein, 17 aa, Artificial sequence
  Protein classification predicting sequence
VGNTAAICIYPRFIPIA

SEQ ID NO: 54735 - protein, 11 aa, Artificial sequence
  Protein classification predicting sequence
FAAGADIKEMQ

SEQ ID NO: 54736 - protein, 15 aa, Artificial sequence
  Protein classification predicting sequence
AMAKESVNAAFEMTL

SEQ ID NO: 54737 - protein, 13 aa, Artificial sequence
  Protein classification predicting sequence
KLEKKLFYSTFAT

SEQ ID NO: 54738 - protein, 16 aa, Artificial sequence
  Protein classification predicting sequence
VGLIQLNRPKALNALC

SEQ ID NO: 54739 - protein, 21 aa, Artificial sequence
  Protein classification predicting sequence
GGGCELAMMCDIIYAGEKAQF

SEQ ID NO: 54740 - protein, 12 aa, Artificial sequence
  Protein classification predicting sequence
KKPVIAAVNGYA

SEQ ID NO: 54741 - protein, 30 aa, Artificial sequence
  Protein classification predicting sequence
VGKSLAMEMVLTGDRISAQDAKQAGLVSKI

SEQ ID NO: 54742 - protein, 12 aa, Artificial sequence
  Protein classification predicting sequence
AFVEKRKANFKD

SEQ ID NO: 54743 - protein, 8 aa, Artificial sequence
  Protein classification predicting sequence
GVPAMCDG

SEQ ID NO: 54744 - protein, 14 aa, Artificial sequence
  Protein classification predicting sequence
AGGVPAMCDGVTQG

SEQ ID NO: 54745 - protein, 8 aa, Artificial sequence
  Protein classification predicting sequence
ILSAQSTD

SEQ ID NO: 54746 - protein, 7 aa, Artificial sequence
  Protein classification predicting sequence
YIKSIGL

SEQ ID NO: 54747 - protein, 8 aa, Artificial sequence
  Protein classification predicting sequence
IGLFNSKA

SEQ ID NO: 54748 - protein, 8 aa, Artificial sequence
  Protein classification predicting sequence
VATILSAQ

SEQ ID NO: 54749 - protein, 7 aa, Artificial sequence
  Protein classification predicting sequence
FTLLVAV

SEQ ID NO: 54750 - protein, 8 aa, Artificial sequence
  Protein classification predicting sequence
VPSGASTG

SEQ ID NO: 54751 - protein, 5 aa, Artificial sequence
  Protein classification predicting sequence
QEFMI

SEQ ID NO: 54752 - protein, 9 aa, Artificial sequence
  Protein classification predicting sequence
LLLKVNQIG

SEQ ID NO: 54753 - protein, 6 aa, Artificial sequence
  Protein classification predicting sequence
NVNNII

SEQ ID NO: 54754 - protein, 6 aa, Artificial sequence
  Protein classification predicting sequence
NVLNGG

SEQ ID NO: 54755 - protein, 8 aa, Artificial sequence
  Protein classification predicting sequence
SRGNPTVE

SEQ ID NO: 54756 - protein, 13 aa, Artificial sequence
  Protein classification predicting sequence
SRGNPTVEVDLYT

SEQ ID NO: 54757 - protein, 11 aa, Artificial sequence
  Protein classification predicting sequence
RAAVPSGASTG

SEQ ID NO: 54758 - protein, 10 aa, Artificial sequence
  Protein classification predicting sequence
LELRDNDKTR

SEQ ID NO: 54759 - protein, 13 aa, Artificial sequence
  Protein classification predicting sequence
LELRDNDKTRYMG

SEQ ID NO: 54760 - protein, 23 aa, Artificial sequence
  Protein classification predicting sequence
MDGSENKSKFGANAILGVSLAVC

SEQ ID NO: 54761 - protein, 6 aa, Artificial sequence
  Protein classification predicting sequence
NVINGG

SEQ ID NO: 54762 - protein, 8 aa, Artificial sequence
  Protein classification predicting sequence
LELLKTAI

SEQ ID NO: 54763 - protein, 21 aa, Artificial sequence
  Protein classification predicting sequence
VIGMDVAASEFYRDGKYDLDF

SEQ ID NO: 54764 - protein, 9 aa, Artificial sequence
  Protein classification predicting sequence
SPDDPSRYI

SEQ ID NO: 54765 - protein, 8 aa, Artificial sequence
  Protein classification predicting sequence
VGDDLTVT

SEQ ID NO: 54766 - protein, 6 aa, Artificial sequence
  Protein classification predicting sequence
SGETED

SEQ ID NO: 54767 - protein, 7 aa, Artificial sequence
  Protein classification predicting sequence
ADLVVGL

SEQ ID NO: 54768 - protein, 15 aa, Artificial sequence
  Protein classification predicting sequence
ADLVVGLCTGQIKTG

SEQ ID NO: 54769 - protein, 13 aa, Artificial sequence
  Protein classification predicting sequence
KLGANAILGVSLA

SEQ ID NO: 54770 - protein, 11 aa, Artificial sequence
  Protein classification predicting sequence
GANAILGVSLA

SEQ ID NO: 54771 - protein, 7 aa, Artificial sequence
  Protein classification predicting sequence
AIDKAGY

SEQ ID NO: 54772 - protein, 7 aa, Artificial sequence
  Protein classification predicting sequence
RSERLAK

SEQ ID NO: 54773 - protein, 11 aa, Artificial sequence
  Protein classification predicting sequence
NQILRIEEELG

SEQ ID NO: 54774 - protein, 8 aa, Artificial sequence
  Protein classification predicting sequence
LRIEEELG

SEQ ID NO: 54775 - protein, 6 aa, Artificial sequence
  Protein classification predicting sequence
ESIRMG

SEQ ID NO: 54776 - protein, 12 aa, Artificial sequence
  Protein classification predicting sequence
VPSGASTGVHEA

SEQ ID NO: 54777 - protein, 7 aa, Artificial sequence
  Protein classification predicting sequence
MIKLDGT

SEQ ID NO: 54778 - protein, 7 aa, Artificial sequence
  Protein classification predicting sequence
VIKAKYG

SEQ ID NO: 54779 - protein, 14 aa, Artificial sequence
  Protein classification predicting sequence
DATNVGDEGGFAPN

SEQ ID NO: 54780 - protein, 10 aa, Artificial sequence
  Protein classification predicting sequence
VGDEGGFAPN

SEQ ID NO: 54781 - protein, 6 aa, Artificial sequence
  Protein classification predicting sequence
AASEFY

SEQ ID NO: 54782 - protein, 5 aa, Artificial sequence
  Protein classification predicting sequence
GWGVM

SEQ ID NO: 54783 - protein, 9 aa, Artificial sequence
  Protein classification predicting sequence
SHRSGETED

SEQ ID NO: 54784 - protein, 15 aa, Artificial sequence
  Protein classification predicting sequence
SHRSGETEDTFIADL

SEQ ID NO: 54785 - protein, 11 aa, Artificial sequence
  Protein classification predicting sequence
IFDSRGNPTVE

SEQ ID NO: 54786 - protein, 9 aa, Artificial sequence
  Protein classification predicting sequence
DSRGNPTVE

SEQ ID NO: 54787 - protein, 10 aa, Artificial sequence
  Protein classification predicting sequence
VSLAVCKAGA

SEQ ID NO: 54788 - protein, 7 aa, Artificial sequence
  Protein classification predicting sequence
TGQIKTG

SEQ ID NO: 54789 - protein, 29 aa, Artificial sequence
  Protein classification predicting sequence
TGQIKTGAPCRSERLAKYNQLLRIEEELG

SEQ ID NO: 54790 - protein, 9 aa, Artificial sequence
  Protein classification predicting sequence
ELRDGDKSR

SEQ ID NO: 54791 - protein, 7 aa, Artificial sequence
  Protein classification predicting sequence
LDGTPNK

SEQ ID NO: 54792 - protein, 9 aa, Artificial sequence
  Protein classification predicting sequence
NKGRLGANA

SEQ ID NO: 54793 - protein, 9 aa, Artificial sequence
  Protein classification predicting sequence
NQIGTLTET

SEQ ID NO: 54794 - protein, 16 aa, Artificial sequence
  Protein classification predicting sequence
AGYTAVVSHRSGETED

SEQ ID NO: 54795 - protein, 7 aa, Artificial sequence
  Protein classification predicting sequence
RIEEALG

SEQ ID NO: 54796 - protein, 6 aa, Artificial sequence
  Protein classification predicting sequence
AQYKGI

SEQ ID NO: 54797 - protein, 13 aa, Artificial sequence
  Protein classification predicting sequence
YAREVLDSRGNPT

SEQ ID NO: 54798 - protein, 7 aa, Artificial sequence
  Protein classification predicting sequence
MIALDGT

SEQ ID NO: 54799 - protein, 7 aa, Artificial sequence
  Protein classification predicting sequence
LDGTENK

SEQ ID NO: 54800 - protein, 6 aa, Artificial sequence
  Protein classification predicting sequence
YLGGFN

SEQ ID NO: 54801 - protein, 28 aa, Artificial sequence
  Protein classification predicting sequence
KVLPTPMMNIINGGSHSDAPIAFQEFMI

SEQ ID NO: 54802 - protein, 10 aa, Artificial sequence
  Protein classification predicting sequence
GAPTFKEALR

SEQ ID NO: 54803 - protein, 9 aa, Artificial sequence
  Protein classification predicting sequence
FHALKKILK

SEQ ID NO: 54804 - protein, 8 aa, Artificial sequence
  Protein classification predicting sequence
KVQLVGDD

SEQ ID NO: 54805 - protein, 7 aa, Artificial sequence
  Protein classification predicting sequence
VQLVGDD

SEQ ID NO: 54806 - protein, 12 aa, Artificial sequence
  Protein classification predicting sequence
SHRSGETEDSTI

SEQ ID NO: 54807 - protein, 13 aa, Artificial sequence
  Protein classification predicting sequence
AKYNQLLRIEDQL

SEQ ID NO: 54808 - protein, 7 aa, Artificial sequence
  Protein classification predicting sequence
EVAQYKG

SEQ ID NO: 54809 - protein, 9 aa, Artificial sequence
  Protein classification predicting sequence
PMMNVINGG

SEQ ID NO: 54810 - protein, 8 aa, Artificial sequence
  Protein classification predicting sequence
NAGQIKTG

SEQ ID NO: 54811 - protein, 9 aa, Artificial sequence
  Protein classification predicting sequence
AVPSGASTG

SEQ ID NO: 54812 - protein, 9 aa, Artificial sequence
  Protein classification predicting sequence
SFKEAMKMG

SEQ ID NO: 54813 - protein, 33 aa, Artificial sequence
  Protein classification predicting sequence
IKKKYGQDATNVGDEGGFAPNIQENKEGLELLK

SEQ ID NO: 54814 - protein, 13 aa, Artificial sequence
  Protein classification predicting sequence
KVVIGMDVAASEF

SEQ ID NO: 54815 - protein, 21 aa, Artificial sequence
  Protein classification predicting sequence
CNALLLKVNQIGSVTESIEAV

SEQ ID NO: 54816 - protein, 7 aa, Artificial sequence
  Protein classification predicting sequence
PSGASTG

SEQ ID NO: 54817 - protein, 6 aa, Artificial sequence
  Protein classification predicting sequence
NILNGG

SEQ ID NO: 54818 - protein, 7 aa, Artificial sequence
  Protein classification predicting sequence
PVGAPSF

SEQ ID NO: 54819 - protein, 8 aa, Artificial sequence
  Protein classification predicting sequence
SIEDGLAE

SEQ ID NO: 54820 - protein, 9 aa, Artificial sequence
  Protein classification predicting sequence
LIKLNQIGT

SEQ ID NO: 54821 - protein, 6 aa, Artificial sequence
  Protein classification predicting sequence
AMIALD

SEQ ID NO: 54822 - protein, 12 aa, Artificial sequence
  Protein classification predicting sequence
NNIDIQEFMIQP

SEQ ID NO: 54823 - protein, 9 aa, Artificial sequence
  Protein classification predicting sequence
DIQEFMIQP

SEQ ID NO: 54824 - protein, 6 aa, Artificial sequence
  Protein classification predicting sequence
GTEIFH

SEQ ID NO: 54825 - protein, 8 aa, Artificial sequence
  Protein classification predicting sequence
SIEDGLDE

SEQ ID NO: 54826 - protein, 19 aa, Artificial sequence
  Protein classification predicting sequence
QLVGDDLFVTNTKILKEGI

SEQ ID NO: 54827 - protein, 8 aa, Artificial sequence
  Protein classification predicting sequence
GDEGGFAP

SEQ ID NO: 54828 - protein, 13 aa, Artificial sequence
  Protein classification predicting sequence
GDEGGFAPNLGSN

SEQ ID NO: 54829 - protein, 5 aa, Artificial sequence
  Protein classification predicting sequence
DWDGW

SEQ ID NO: 54830 - protein, 7 aa, Artificial sequence
  Protein classification predicting sequence
RYLGKGV

SEQ ID NO: 54831 - protein, 18 aa, Artificial sequence
  Protein classification predicting sequence
KACNCLLLKVNQIGSVTE

SEQ ID NO: 54832 - protein, 11 aa, Artificial sequence
  Protein classification predicting sequence
IQTAEEALDLI

SEQ ID NO: 54833 - protein, 11 aa, Artificial sequence
  Protein classification predicting sequence
LRTGQIKTGAP

SEQ ID NO: 54834 - protein, 6 aa, Artificial sequence
  Protein classification predicting sequence
GAEVFH

SEQ ID NO: 54835 - protein, 12 aa, Artificial sequence
  Protein classification predicting sequence
STAVGDEGGFAP

SEQ ID NO: 54836 - protein, 13 aa, Artificial sequence
  Protein classification predicting sequence
SHRSGETEDTTIA

SEQ ID NO: 54837 - protein, 10 aa, Artificial sequence
  Protein classification predicting sequence
GQIKTGSMSR

SEQ ID NO: 54838 - protein, 6 aa, Artificial sequence
  Protein classification predicting sequence
IDRTMI

SEQ ID NO: 54839 - protein, 7 aa, Artificial sequence
  Protein classification predicting sequence
SHRSGET

SEQ ID NO: 54840 - protein, 6 aa, Artificial sequence
  Protein classification predicting sequence
DTFIAD

SEQ ID NO: 54841 - protein, 7 aa, Artificial sequence
  Protein classification predicting sequence
VATNAGQ

SEQ ID NO: 54842 - protein, 8 aa, Artificial sequence
  Protein classification predicting sequence
GAPARSER

SEQ ID NO: 54843 - protein, 13 aa, Artificial sequence
  Protein classification predicting sequence
IFDSRGNPTVEVD

SEQ ID NO: 54844 - protein, 11 aa, Artificial sequence
  Protein classification predicting sequence
DSRGNPTVEVD

SEQ ID NO: 54845 - protein, 8 aa, Artificial sequence
  Protein classification predicting sequence
GKGVSKAV

SEQ ID NO: 54846 - protein, 16 aa, Artificial sequence
  Protein classification predicting sequence
DGTFARAAVPSGASTG

SEQ ID NO: 54847 - protein, 6 aa, Artificial sequence
  Protein classification predicting sequence
FTSEEF

SEQ ID NO: 54848 - protein, 6 aa, Artificial sequence
  Protein classification predicting sequence
GDKARY

SEQ ID NO: 54849 - protein, 11 aa, Artificial sequence
  Protein classification predicting sequence
RYSGKGVLKAV

SEQ ID NO: 54850 - protein, 11 aa, Artificial sequence
  Protein classification predicting sequence
NAILGVSLAVA

SEQ ID NO: 54851 - protein, 6 aa, Artificial sequence
  Protein classification predicting sequence
NGGVHA

SEQ ID NO: 54852 - protein, 6 aa, Artificial sequence
  Protein classification predicting sequence
EALRWG

SEQ ID NO: 54853 - protein, 6 aa, Artificial sequence
  Protein classification predicting sequence
EDGLAE

SEQ ID NO: 54854 - protein, 7 aa, Artificial sequence
  Protein classification predicting sequence
EAVELRD

SEQ ID NO: 54855 - protein, 8 aa, Artificial sequence
  Protein classification predicting sequence
KSRLGANA

SEQ ID NO: 54856 - protein, 6 aa, Artificial sequence
  Protein classification predicting sequence
RLGANA

SEQ ID NO: 54857 - protein, 9 aa, Artificial sequence
  Protein classification predicting sequence
PMMNIVNGG

SEQ ID NO: 54858 - protein, 8 aa, Artificial sequence
  Protein classification predicting sequence
NGGAHADN

SEQ ID NO: 54859 - protein, 6 aa, Artificial sequence
  Protein classification predicting sequence
EAVRMG

SEQ ID NO: 54860 - protein, 6 aa, Artificial sequence
  Protein classification predicting sequence
EVFHTL

SEQ ID NO: 54861 - protein, 7 aa, Artificial sequence
  Protein classification predicting sequence
IADLAVA

SEQ ID NO: 54862 - protein, 8 aa, Artificial sequence
  Protein classification predicting sequence
LMVEELDG

SEQ ID NO: 54863 - protein, 6 aa, Artificial sequence
  Protein classification predicting sequence
YDLDFK

SEQ ID NO: 54864 - protein, 13 aa, Artificial sequence
  Protein classification predicting sequence
YDLDFKTPNNDKS

SEQ ID NO: 54865 - protein, 12 aa, Artificial sequence
  Protein classification predicting sequence
GKGVMNAVNNVN

SEQ ID NO: 54866 - protein, 6 aa, Artificial sequence
  Protein classification predicting sequence
EAMRIG

SEQ ID NO: 54867 - protein, 14 aa, Artificial sequence
  Protein classification predicting sequence
WGVMVSHRSGETED

SEQ ID NO: 54868 - protein, 6 aa, Artificial sequence
  Protein classification predicting sequence
AVNNVN

SEQ ID NO: 54869 - protein, 6 aa, Artificial sequence
  Protein classification predicting sequence
VYHTLK

SEQ ID NO: 54870 - protein, 7 aa, Artificial sequence
  Protein classification predicting sequence
LMLEMDG

SEQ ID NO: 54871 - protein, 7 aa, Artificial sequence
  Protein classification predicting sequence
EALELLK

SEQ ID NO: 54872 - protein, 6 aa, Artificial sequence
  Protein classification predicting sequence
DLYKSF

SEQ ID NO: 54873 - protein, 8 aa, Artificial sequence
  Protein classification predicting sequence
NKTIAPAL

SEQ ID NO: 54874 - protein, 6 aa, Artificial sequence
  Protein classification predicting sequence
AWKKFT

SEQ ID NO: 54875 - protein, 21 aa, Artificial sequence
  Protein classification predicting sequence
KSKFGANAILGVSLAVCKAGA

SEQ ID NO: 54876 - protein, 16 aa, Artificial sequence
  Protein classification predicting sequence
DKVVIGMDVAASEFYR

SEQ ID NO: 54877 - protein, 13 aa, Artificial sequence
  Protein classification predicting sequence
VIGMDVAASEFYR

SEQ ID NO: 54878 - protein, 7 aa, Artificial sequence
  Protein classification predicting sequence
LLLKVNQ

SEQ ID NO: 54879 - protein, 11 aa, Artificial sequence
  Protein classification predicting sequence
LVVGLCTGQIK

SEQ ID NO: 54880 - protein, 9 aa, Artificial sequence
  Protein classification predicting sequence
FAGRNFRNP

SEQ ID NO: 54881 - protein, 8 aa, Artificial sequence
  Protein classification predicting sequence
PDQLADLY

SEQ ID NO: 54882 - protein, 7 aa, Artificial sequence
  Protein classification predicting sequence
AIGKAGY

SEQ ID NO: 54883 - protein, 11 aa, Artificial sequence
  Protein classification predicting sequence
LRIEEELGSKA

SEQ ID NO: 54884 - protein, 17 aa, Artificial sequence
  Protein classification predicting sequence
AVEHINKTIAPALVSKK

SEQ ID NO: 54885 - protein, 16 aa, Artificial sequence
  Protein classification predicting sequence
EKGVPLYRHIADLAGN

SEQ ID NO: 54886 - protein, 20 aa, Artificial sequence
  Protein classification predicting sequence
GIQVVGDDLTVTNPKRIAKA

SEQ ID NO: 54887 - protein, 7 aa, Artificial sequence
  Protein classification predicting sequence
DSRGNPT

SEQ ID NO: 54888 - protein, 12 aa, Artificial sequence
  Protein classification predicting sequence
GKYDLDFKSPDD

SEQ ID NO: 54889 - protein, 16 aa, Artificial sequence
  Protein classification predicting sequence
FIKNYPVVSIEDPFDQ

SEQ ID NO: 54890 - protein, 47 aa, Artificial sequence
  Protein classification predicting sequence
NGWGVMVSHRSGETEDTFIADLVVGLCTGQIKTGAPCRSERLAKYNQ

SEQ ID NO: 54891 - protein, 10 aa, Artificial sequence
  Protein classification predicting sequence
LRIEEELGSK

SEQ ID NO: 54892 - protein, 11 aa, Artificial sequence
  Protein classification predicting sequence
RFAGRNFRNPR

SEQ ID NO: 54893 - protein, 21 aa, Artificial sequence
  Protein classification predicting sequence
KYGKDATNVGDEGGFAPNILE

SEQ ID NO: 54894 - protein, 6 aa, Artificial sequence
  Protein classification predicting sequence
CNCLLL

SEQ ID NO: 54895 - protein, 13 aa, Artificial sequence
  Protein classification predicting sequence
DGTENKSKFGANA

SEQ ID NO: 54896 - protein, 14 aa, Artificial sequence
  Protein classification predicting sequence
KACNCLLLKVNQIG

SEQ ID NO: 54897 - protein, 12 aa, Artificial sequence
  Protein classification predicting sequence
PTVEVDLHTAKG

SEQ ID NO: 54898 - protein, 8 aa, Artificial sequence
  Protein classification predicting sequence
LPVGAASF

SEQ ID NO: 54899 - protein, 10 aa, Artificial sequence
  Protein classification predicting sequence
KYGKDATNVG

SEQ ID NO: 54900 - protein, 6 aa, Artificial sequence
  Protein classification predicting sequence
EGGFAP

SEQ ID NO: 54901 - protein, 6 aa, Artificial sequence
  Protein classification predicting sequence
LDFKSP

SEQ ID NO: 54902 - protein, 27 aa, Artificial sequence
  Protein classification predicting sequence
ACNCLLLKVNQIGSVTESIQACKLAQS

SEQ ID NO: 54903 - protein, 31 aa, Artificial sequence
  Protein classification predicting sequence
LPVPAFNVINGGSHAGNKLAMQEFMILPVGA

SEQ ID NO: 54904 - protein, 16 aa, Artificial sequence
  Protein classification predicting sequence
IQIVGDDLTVTNPKRI

SEQ ID NO: 54905 - protein, 9 aa, Artificial sequence
  Protein classification predicting sequence
GKGVLKAVE

SEQ ID NO: 54906 - protein, 8 aa, Artificial sequence
  Protein classification predicting sequence
RIGAEVYH

SEQ ID NO: 54907 - protein, 15 aa, Artificial sequence
  Protein classification predicting sequence
LLLKVNQIGSVTESI

SEQ ID NO: 54908 - protein, 8 aa, Artificial sequence
  Protein classification predicting sequence
LSVVDQEK

SEQ ID NO: 54909 - protein, 84 aa, Artificial sequence
  Protein classification predicting sequence
AWSKFTANVGIQIVGDDLTVTNPKRIERAVEEKACNCLLLKVNQIGSVTEAIQACKLAQENGWGVMVSHRSGETEDTFIADLVV

SEQ ID NO: 54910 - protein, 21 aa, Artificial sequence
  Protein classification predicting sequence
FRAAVPSGASTGIYEALELRD

SEQ ID NO: 54911 - protein, 15 aa, Artificial sequence
  Protein classification predicting sequence
YPVVSIEDPFDQDDW

SEQ ID NO: 54912 - protein, 20 aa, Artificial sequence
  Protein classification predicting sequence
APSGASTGSREALELRDGDK

SEQ ID NO: 54913 - protein, 7 aa, Artificial sequence
  Protein classification predicting sequence
ARAAADE

SEQ ID NO: 54914 - protein, 7 aa, Artificial sequence
  Protein classification predicting sequence
SFSEALR

SEQ ID NO: 54915 - protein, 11 aa, Artificial sequence
  Protein classification predicting sequence
QLVGDDLFVTN

SEQ ID NO: 54916 - protein, 7 aa, Artificial sequence
  Protein classification predicting sequence
RFLGKGV

SEQ ID NO: 54917 - protein, 6 aa, Artificial sequence
  Protein classification predicting sequence
FLEELT

SEQ ID NO: 54918 - protein, 7 aa, Artificial sequence
  Protein classification predicting sequence
PIVSIED

SEQ ID NO: 54919 - protein, 9 aa, Artificial sequence
  Protein classification predicting sequence
VGDDLFVTN

SEQ ID NO: 54920 - protein, 10 aa, Artificial sequence
  Protein classification predicting sequence
MIALDGTPNK

SEQ ID NO: 54921 - protein, 6 aa, Artificial sequence
  Protein classification predicting sequence
EDGMAE

SEQ ID NO: 54922 - protein, 6 aa, Artificial sequence
  Protein classification predicting sequence
DWEGWK

SEQ ID NO: 54923 - protein, 14 aa, Artificial sequence
  Protein classification predicting sequence
ARQIFDSRGNPTVE

SEQ ID NO: 54924 - protein, 7 aa, Artificial sequence
  Protein classification predicting sequence
EVYHHLK

SEQ ID NO: 54925 - protein, 7 aa, Artificial sequence
  Protein classification predicting sequence
AIAKAGY

SEQ ID NO: 54926 - protein, 19 aa, Artificial sequence
  Protein classification predicting sequence
EYPIVSIEDPFDQDDWEHY

SEQ ID NO: 54927 - protein, 14 aa, Artificial sequence
  Protein classification predicting sequence
HRSGETEDTFIADL

SEQ ID NO: 54928 - protein, 8 aa, Artificial sequence
  Protein classification predicting sequence
GKGVTKAV

SEQ ID NO: 54929 - protein, 6 aa, Artificial sequence
  Protein classification predicting sequence
PLYAHI

SEQ ID NO: 54930 - protein, 6 aa, Artificial sequence
  Protein classification predicting sequence
EAEVHL

SEQ ID NO: 54931 - protein, 9 aa, Artificial sequence
  Protein classification predicting sequence
AGQIKTGSL

SEQ ID NO: 54932 - protein, 6 aa, Artificial sequence
  Protein classification predicting sequence
RVAKYN

SEQ ID NO: 54933 - protein, 5 aa, Artificial sequence
  Protein classification predicting sequence
HADNN

SEQ ID NO: 54934 - protein, 11 aa, Artificial sequence
  Protein classification predicting sequence
ASSEFYENGVY

SEQ ID NO: 54935 - protein, 10 aa, Artificial sequence
  Protein classification predicting sequence
MSENDWEGWK

SEQ ID NO: 54936 - protein, 8 aa, Artificial sequence
  Protein classification predicting sequence
ENDWEGWK

SEQ ID NO: 54937 - protein, 6 aa, Artificial sequence
  Protein classification predicting sequence
LLRIEE

SEQ ID NO: 54938 - protein, 10 aa, Artificial sequence
  Protein classification predicting sequence
AAVPSGASTG

SEQ ID NO: 54939 - protein, 10 aa, Artificial sequence
  Protein classification predicting sequence
DSRGNPTVEV

SEQ ID NO: 54940 - protein, 7 aa, Artificial sequence
  Protein classification predicting sequence
NKTIAPA

SEQ ID NO: 54941 - protein, 12 aa, Artificial sequence
  Protein classification predicting sequence
KAGAAEKGVPLY

SEQ ID NO: 54942 - protein, 7 aa, Artificial sequence
  Protein classification predicting sequence
TIADIAV

SEQ ID NO: 54943 - protein, 7 aa, Artificial sequence
  Protein classification predicting sequence
DVLLESG

SEQ ID NO: 54944 - protein, 10 aa, Artificial sequence
  Protein classification predicting sequence
DRTLIELDGT

SEQ ID NO: 54945 - protein, 20 aa, Artificial sequence
  Protein classification predicting sequence
AKAAAEEAGLPLYRYFGGSG

SEQ ID NO: 54946 - protein, 9 aa, Artificial sequence
  Protein classification predicting sequence
LYRYFGGSG

SEQ ID NO: 54947 - protein, 7 aa, Artificial sequence
  Protein classification predicting sequence
MPVPMMN

SEQ ID NO: 54948 - protein, 14 aa, Artificial sequence
  Protein classification predicting sequence
NGGAHANNSLDIQE

SEQ ID NO: 54949 - protein, 8 aa, Artificial sequence
  Protein classification predicting sequence
DCAASEFY

SEQ ID NO: 54950 - protein, 7 aa, Artificial sequence
  Protein classification predicting sequence
YVLAGEG

SEQ ID NO: 54951 - protein, 6 aa, Artificial sequence
  Protein classification predicting sequence
DWAGWK

SEQ ID NO: 54952 - protein, 6 aa, Artificial sequence
  Protein classification predicting sequence
NQIGTL

SEQ ID NO: 54953 - protein, 12 aa, Artificial sequence
  Protein classification predicting sequence
QIKTGSLSRSDR

SEQ ID NO: 54954 - protein, 6 aa, Artificial sequence
  Protein classification predicting sequence
AFYNLR

SEQ ID NO: 54955 - protein, 6 aa, Artificial sequence
  Protein classification predicting sequence
IDRAMI

SEQ ID NO: 54956 - protein, 7 aa, Artificial sequence
  Protein classification predicting sequence
HADNNVD

SEQ ID NO: 54957 - protein, 7 aa, Artificial sequence
  Protein classification predicting sequence
LTERIGD

SEQ ID NO: 54958 - protein, 14 aa, Artificial sequence
  Protein classification predicting sequence
SHRSGETEDATIAD

SEQ ID NO: 54959 - protein, 28 aa, Artificial sequence
  Protein classification predicting sequence
VPSGASTGEHEAVELRDGDKSRYLGKGV

SEQ ID NO: 54960 - protein, 15 aa, Artificial sequence
  Protein classification predicting sequence
ELRDGDKSRYLGKGV

SEQ ID NO: 54961 - protein, 8 aa, Artificial sequence
  Protein classification predicting sequence
GHKLLTER

SEQ ID NO: 54962 - protein, 13 aa, Artificial sequence
  Protein classification predicting sequence
KVQLVGDDLFVTN

SEQ ID NO: 54963 - protein, 7 aa, Artificial sequence
  Protein classification predicting sequence
EQIDYLE

SEQ ID NO: 54964 - protein, 8 aa, Artificial sequence
  Protein classification predicting sequence
EAVELRDG

SEQ ID NO: 54965 - protein, 7 aa, Artificial sequence
  Protein classification predicting sequence
IAPELIG

SEQ ID NO: 54966 - protein, 13 aa, Artificial sequence
  Protein classification predicting sequence
TAVGDEGGFAPNL

SEQ ID NO: 54967 - protein, 16 aa, Artificial sequence
  Protein classification predicting sequence
KYPIISIEDGLDENDW

SEQ ID NO: 54968 - protein, 6 aa, Artificial sequence
  Protein classification predicting sequence
DAIEMA

SEQ ID NO: 54969 - protein, 10 aa, Artificial sequence
  Protein classification predicting sequence
NAGQIKTGAP

SEQ ID NO: 54970 - protein, 9 aa, Artificial sequence
  Protein classification predicting sequence
LESGVMGRA

SEQ ID NO: 54971 - protein, 9 aa, Artificial sequence
  Protein classification predicting sequence
GANAILGVS

SEQ ID NO: 54972 - protein, 6 aa, Artificial sequence
  Protein classification predicting sequence
DIQEFM

SEQ ID NO: 54973 - protein, 12 aa, Artificial sequence
  Protein classification predicting sequence
GEGKVLSSEEMV

SEQ ID NO: 54974 - protein, 24 aa, Artificial sequence
  Protein classification predicting sequence
GNSILIKVNQIGTLTETFDAIEMA

SEQ ID NO: 54975 - protein, 17 aa, Artificial sequence
  Protein classification predicting sequence
TIADIAVATNAGQIKTG

SEQ ID NO: 54976 - protein, 6 aa, Artificial sequence
  Protein classification predicting sequence
KSFYNL

SEQ ID NO: 54977 - protein, 7 aa, Artificial sequence
  Protein classification predicting sequence
EVEVYTE

SEQ ID NO: 54978 - protein, 7 aa, Artificial sequence
  Protein classification predicting sequence
ASSEFYN

SEQ ID NO: 54979 - protein, 7 aa, Artificial sequence
  Protein classification predicting sequence
TSAEMVD

SEQ ID NO: 54980 - protein, 16 aa, Artificial sequence
  Protein classification predicting sequence
RTDRVAKYNQLLRIED

SEQ ID NO: 54981 - protein, 10 aa, Artificial sequence
  Protein classification predicting sequence
AKYNQLLRIE

SEQ ID NO: 54982 - protein, 8 aa, Artificial sequence
  Protein classification predicting sequence
YDYTKFEG

SEQ ID NO: 54983 - protein, 6 aa, Artificial sequence
  Protein classification predicting sequence
EQVDYL

SEQ ID NO: 54984 - protein, 7 aa, Artificial sequence
  Protein classification predicting sequence
AVAAVNG

SEQ ID NO: 54985 - protein, 7 aa, Artificial sequence
  Protein classification predicting sequence
TLKEAVR

SEQ ID NO: 54986 - protein, 11 aa, Artificial sequence
  Protein classification predicting sequence
TNVGDEGGFAP

SEQ ID NO: 54987 - protein, 6 aa, Artificial sequence
  Protein classification predicting sequence
KAVDNV

SEQ ID NO: 54988 - protein, 6 aa, Artificial sequence
  Protein classification predicting sequence
NGGAHA

SEQ ID NO: 54989 - protein, 8 aa, Artificial sequence
  Protein classification predicting sequence
NGGAHANN

SEQ ID NO: 54990 - protein, 8 aa, Artificial sequence
  Protein classification predicting sequence
GDDLFVTN

SEQ ID NO: 54991 - protein, 6 aa, Artificial sequence
  Protein classification predicting sequence
VTNPKR

SEQ ID NO: 54992 - protein, 7 aa, Artificial sequence
  Protein classification predicting sequence
QIKTGSL

SEQ ID NO: 54993 - protein, 7 aa, Artificial sequence
  Protein classification predicting sequence
MIELDGT

SEQ ID NO: 54994 - protein, 7 aa, Artificial sequence
  Protein classification predicting sequence
SEALRAG

SEQ ID NO: 54995 - protein, 8 aa, Artificial sequence
  Protein classification predicting sequence
DVASSEFY

SEQ ID NO: 54996 - protein, 15 aa, Artificial sequence
  Protein classification predicting sequence
DVASSEFYNKETGKY

SEQ ID NO: 54997 - protein, 8 aa, Artificial sequence
  Protein classification predicting sequence
NQIGSVTE

SEQ ID NO: 54998 - protein, 7 aa, Artificial sequence
  Protein classification predicting sequence
PVPMMNI

SEQ ID NO: 54999 - protein, 13 aa, Artificial sequence
  Protein classification predicting sequence
REILDSRGNPTVE

SEQ ID NO: 55000 - protein, 12 aa, Artificial sequence
  Protein classification predicting sequence
VPSGASTGSREA

SEQ ID NO: 55001 - protein, 7 aa, Artificial sequence
  Protein classification predicting sequence
GKGVLKA

SEQ ID NO: 55002 - protein, 7 aa, Artificial sequence
  Protein classification predicting sequence
IADLVVA

SEQ ID NO: 55003 - protein, 10 aa, Artificial sequence
  Protein classification predicting sequence
GQIKTGSLSR

SEQ ID NO: 55004 - protein, 6 aa, Artificial sequence
  Protein classification predicting sequence
RIEEEL

SEQ ID NO: 55005 - protein, 12 aa, Artificial sequence
  Protein classification predicting sequence
GRAAVPSGASTG

SEQ ID NO: 55006 - protein, 9 aa, Artificial sequence
  Protein classification predicting sequence
LGKGVTKAV

SEQ ID NO: 55007 - protein, 14 aa, Artificial sequence
  Protein classification predicting sequence
LGKGVTKAVGAVNG

SEQ ID NO: 55008 - protein, 10 aa, Artificial sequence
  Protein classification predicting sequence
QEFMILPVGA

SEQ ID NO: 55009 - protein, 11 aa, Artificial sequence
  Protein classification predicting sequence
VMSHRSGETED

SEQ ID NO: 55010 - protein, 9 aa, Artificial sequence
  Protein classification predicting sequence
AKYNQLLRI

SEQ ID NO: 55011 - protein, 16 aa, Artificial sequence
  Protein classification predicting sequence
LPVPMMNIINGGAHAD

SEQ ID NO: 55012 - protein, 11 aa, Artificial sequence
  Protein classification predicting sequence
FQEFMILPVGA

SEQ ID NO: 55013 - protein, 8 aa, Artificial sequence
  Protein classification predicting sequence
IALGLDCA

SEQ ID NO: 55014 - protein, 8 aa, Artificial sequence
  Protein classification predicting sequence
GKGVEKAV

SEQ ID NO: 55015 - protein, 6 aa, Artificial sequence
  Protein classification predicting sequence
EIFHAL

SEQ ID NO: 55016 - protein, 8 aa, Artificial sequence
  Protein classification predicting sequence
TTVGDEGG

SEQ ID NO: 55017 - protein, 7 aa, Artificial sequence
  Protein classification predicting sequence
EFTHYLE

SEQ ID NO: 55018 - protein, 10 aa, Artificial sequence
  Protein classification predicting sequence
KGIANSILIK

SEQ ID NO: 55019 - protein, 6 aa, Artificial sequence
  Protein classification predicting sequence
RTSKYN

SEQ ID NO: 55020 - protein, 7 aa, Artificial sequence
  Protein classification predicting sequence
LEGGFVG

SEQ ID NO: 55021 - protein, 6 aa, Artificial sequence
  Protein classification predicting sequence
IDQTMI

SEQ ID NO: 55022 - protein, 7 aa, Artificial sequence
  Protein classification predicting sequence
PLYQHIA

SEQ ID NO: 55023 - protein, 8 aa, Artificial sequence
  Protein classification predicting sequence
REIIDSRG

SEQ ID NO: 55024 - protein, 6 aa, Artificial sequence
  Protein classification predicting sequence
IDKIMI

SEQ ID NO: 55025 - protein, 6 aa, Artificial sequence
  Protein classification predicting sequence
FREALR

SEQ ID NO: 55026 - protein, 8 aa, Artificial sequence
  Protein classification predicting sequence
AIEMAKRA

SEQ ID NO: 55027 - protein, 14 aa, Artificial sequence
  Protein classification predicting sequence
YTAVISHRSGETED

SEQ ID NO: 55028 - protein, 12 aa, Artificial sequence
  Protein classification predicting sequence
FRAAVPSGASTG

SEQ ID NO: 55029 - protein, 14 aa, Artificial sequence
  Protein classification predicting sequence
LLLKVNQIGSVTES

SEQ ID NO: 55030 - protein, 6 aa, Artificial sequence
  Protein classification predicting sequence
RTAKYN

SEQ ID NO: 55031 - protein, 9 aa, Artificial sequence
  Protein classification predicting sequence
PMMNIINGG

SEQ ID NO: 55032 - protein, 7 aa, Artificial sequence
  Protein classification predicting sequence
QEFMILP

SEQ ID NO: 55033 - protein, 9 aa, Artificial sequence
  Protein classification predicting sequence
VGDEGGFAP

SEQ ID NO: 55034 - protein, 8 aa, Artificial sequence
  Protein classification predicting sequence
TIADLAVA

SEQ ID NO: 55035 - protein, 10 aa, Artificial sequence
  Protein classification predicting sequence
TIADLAVALN

SEQ ID NO: 55036 - protein, 8 aa, Artificial sequence
  Protein classification predicting sequence
NCGQIKTG

SEQ ID NO: 55037 - protein, 6 aa, Artificial sequence
  Protein classification predicting sequence
YRYLGG

SEQ ID NO: 55038 - protein, 11 aa, Artificial sequence
  Protein classification predicting sequence
TGVGDEGGFAP

SEQ ID NO: 55039 - protein, 6 aa, Artificial sequence
  Protein classification predicting sequence
RIAKYN

SEQ ID NO: 55040 - protein, 15 aa, Artificial sequence
  Protein classification predicting sequence
LPCPMMNLINGGMHA

SEQ ID NO: 55041 - protein, 11 aa, Artificial sequence
  Protein classification predicting sequence
AGQIKTGSLSR

SEQ ID NO: 55042 - protein, 7 aa, Artificial sequence
  Protein classification predicting sequence
NGGSHAG

SEQ ID NO: 55043 - protein, 6 aa, Artificial sequence
  Protein classification predicting sequence
AVDNVN

SEQ ID NO: 55044 - protein, 7 aa, Artificial sequence
  Protein classification predicting sequence
LYQYLGG

SEQ ID NO: 55045 - protein, 11 aa, Artificial sequence
  Protein classification predicting sequence
TAVGDEGGFAP

SEQ ID NO: 55046 - protein, 6 aa, Artificial sequence
  Protein classification predicting sequence
EFYENG

SEQ ID NO: 55047 - protein, 11 aa, Artificial sequence
  Protein classification predicting sequence
VGDEGGFAPNL

SEQ ID NO: 55048 - protein, 14 aa, Artificial sequence
  Protein classification predicting sequence
VGDEGGFAPNLKSN

SEQ ID NO: 55049 - protein, 6 aa, Artificial sequence
  Protein classification predicting sequence
DAASSE

SEQ ID NO: 55050 - protein, 13 aa, Artificial sequence
  Protein classification predicting sequence
GIEKGIANSILIK

SEQ ID NO: 55051 - protein, 9 aa, Artificial sequence
  Protein classification predicting sequence
NKGKLGANA

SEQ ID NO: 55052 - protein, 9 aa, Artificial sequence
  Protein classification predicting sequence
IVEAIEKAG

SEQ ID NO: 55053 - protein, 6 aa, Artificial sequence
  Protein classification predicting sequence
EYRGLK

SEQ ID NO: 55054 - protein, 7 aa, Artificial sequence
  Protein classification predicting sequence
LGANAIL

SEQ ID NO: 55055 - protein, 10 aa, Artificial sequence
  Protein classification predicting sequence
LGANAILGVS

SEQ ID NO: 55056 - protein, 7 aa, Artificial sequence
  Protein classification predicting sequence
QEFMIAP

SEQ ID NO: 55057 - protein, 8 aa, Artificial sequence
  Protein classification predicting sequence
LVKVNQIG

SEQ ID NO: 55058 - protein, 13 aa, Artificial sequence
  Protein classification predicting sequence
LVKVNQIGTLTET

SEQ ID NO: 55059 - protein, 18 aa, Artificial sequence
  Protein classification predicting sequence
LVKVNQIGTLTETFDAVD

SEQ ID NO: 55060 - protein, 11 aa, Artificial sequence
  Protein classification predicting sequence
KVNQIGTLTET

SEQ ID NO: 55061 - protein, 6 aa, Artificial sequence
  Protein classification predicting sequence
EFFKDG

SEQ ID NO: 55062 - protein, 8 aa, Artificial sequence
  Protein classification predicting sequence
YPIVSIED

SEQ ID NO: 55063 - protein, 6 aa, Artificial sequence
  Protein classification predicting sequence
EILDSR

SEQ ID NO: 55064 - protein, 6 aa, Artificial sequence
  Protein classification predicting sequence
YVPGKD

SEQ ID NO: 55065 - protein, 7 aa, Artificial sequence
  Protein classification predicting sequence
MNIINGG

SEQ ID NO: 55066 - protein, 12 aa, Artificial sequence
  Protein classification predicting sequence
AREILDSRGNPT

SEQ ID NO: 55067 - protein, 7 aa, Artificial sequence
  Protein classification predicting sequence
LPVPLMN

SEQ ID NO: 55068 - protein, 7 aa, Artificial sequence
  Protein classification predicting sequence
QEFMIMP

SEQ ID NO: 55069 - protein, 7 aa, Artificial sequence
  Protein classification predicting sequence
ALRMGAE

SEQ ID NO: 55070 - protein, 11 aa, Artificial sequence
  Protein classification predicting sequence
PSGASTGSREA

SEQ ID NO: 55071 - protein, 8 aa, Artificial sequence
  Protein classification predicting sequence
HIADLAGN

SEQ ID NO: 55072 - protein, 16 aa, Artificial sequence
  Protein classification predicting sequence
TAVGDEGGFAPNIQSN

SEQ ID NO: 55073 - protein, 20 aa, Artificial sequence
  Protein classification predicting sequence
TGQIKTGAPCRSERLAKYNQ

SEQ ID NO: 55074 - protein, 7 aa, Artificial sequence
  Protein classification predicting sequence
DGTENKS

SEQ ID NO: 55075 - protein, 8 aa, Artificial sequence
  Protein classification predicting sequence
TAVGDEGG

SEQ ID NO: 55076 - protein, 18 aa, Artificial sequence
  Protein classification predicting sequence
LMVEELDGSKNEWGWSKS

SEQ ID NO: 55077 - protein, 6 aa, Artificial sequence
  Protein classification predicting sequence
NGGKHA

SEQ ID NO: 55078 - protein, 9 aa, Artificial sequence
  Protein classification predicting sequence
VPSGASTGE

SEQ ID NO: 55079 - protein, 7 aa, Artificial sequence
  Protein classification predicting sequence
MIDLDGT

SEQ ID NO: 55080 - protein, 19 aa, Artificial sequence
  Protein classification predicting sequence
LDGTPNKGKLGANAILGVS

SEQ ID NO: 55081 - protein, 14 aa, Artificial sequence
  Protein classification predicting sequence
LPTPMMNIINGGSH

SEQ ID NO: 55082 - protein, 8 aa, Artificial sequence
  Protein classification predicting sequence
EALRMGAE

SEQ ID NO: 55083 - protein, 14 aa, Artificial sequence
  Protein classification predicting sequence
PIISIEDGLDENDW

SEQ ID NO: 55084 - protein, 17 aa, Artificial sequence
  Protein classification predicting sequence
ANSILIKVNQIGTLTET

SEQ ID NO: 55085 - protein, 7 aa, Artificial sequence
  Protein classification predicting sequence
RYGGKGV

SEQ ID NO: 55086 - protein, 9 aa, Artificial sequence
  Protein classification predicting sequence
AVNGPIAQA

SEQ ID NO: 55087 - protein, 14 aa, Artificial sequence
  Protein classification predicting sequence
AKAAAASKGLPLYA

SEQ ID NO: 55088 - protein, 10 aa, Artificial sequence
  Protein classification predicting sequence
HIAELNGTPG

SEQ ID NO: 55089 - protein, 11 aa, Artificial sequence
  Protein classification predicting sequence
FTSEEFTHFLE

SEQ ID NO: 55090 - protein, 6 aa, Artificial sequence
  Protein classification predicting sequence
EVYHNL

SEQ ID NO: 55091 - protein, 6 aa, Artificial sequence
  Protein classification predicting sequence
AGYEPG

SEQ ID NO: 55092 - protein, 7 aa, Artificial sequence
  Protein classification predicting sequence
ILAKGIE

SEQ ID NO: 55093 - protein, 12 aa, Artificial sequence
  Protein classification predicting sequence
VPSGASTGSHEA

SEQ ID NO: 55094 - protein, 9 aa, Artificial sequence
  Protein classification predicting sequence
PMMNILNGG

SEQ ID NO: 55095 - protein, 7 aa, Artificial sequence
  Protein classification predicting sequence
NGGAHAD

SEQ ID NO: 55096 - protein, 15 aa, Artificial sequence
  Protein classification predicting sequence
EAVKAAGYELGKDIT

SEQ ID NO: 55097 - protein, 7 aa, Artificial sequence
  Protein classification predicting sequence
KAVENVN

SEQ ID NO: 55098 - protein, 15 aa, Artificial sequence
  Protein classification predicting sequence
HADNNVDIQEFMIMP

SEQ ID NO: 55099 - protein, 7 aa, Artificial sequence
  Protein classification predicting sequence
PVGAESF

SEQ ID NO: 55100 - protein, 13 aa, Artificial sequence
  Protein classification predicting sequence
AIEMAKRAGYTAV

SEQ ID NO: 55101 - protein, 11 aa, Artificial sequence
  Protein classification predicting sequence
TIADIAVATNA

SEQ ID NO: 55102 - protein, 8 aa, Artificial sequence
  Protein classification predicting sequence
LDSRGNPT

SEQ ID NO: 55103 - protein, 13 aa, Artificial sequence
  Protein classification predicting sequence
LDSRGNPTLEVEV

SEQ ID NO: 55104 - protein, 9 aa, Artificial sequence
  Protein classification predicting sequence
GVANSILIK

SEQ ID NO: 55105 - protein, 7 aa, Artificial sequence
  Protein classification predicting sequence
AKRAGYT

SEQ ID NO: 55106 - protein, 8 aa, Artificial sequence
  Protein classification predicting sequence
GQIKTGSL

SEQ ID NO: 55107 - protein, 6 aa, Artificial sequence
  Protein classification predicting sequence
DGTANK

SEQ ID NO: 55108 - protein, 8 aa, Artificial sequence
  Protein classification predicting sequence
PLYRYLGG

SEQ ID NO: 55109 - protein, 5 aa, Artificial sequence
  Protein classification predicting sequence
YPIVS

SEQ ID NO: 55110 - protein, 10 aa, Artificial sequence
  Protein classification predicting sequence
TAAGQIKTGS

SEQ ID NO: 55111 - protein, 9 aa, Artificial sequence
  Protein classification predicting sequence
HEAVELRDG

SEQ ID NO: 55112 - protein, 7 aa, Artificial sequence
  Protein classification predicting sequence
AIRMGSE

SEQ ID NO: 55113 - protein, 6 aa, Artificial sequence
  Protein classification predicting sequence
EAAGYK

SEQ ID NO: 55114 - protein, 29 aa, Artificial sequence
  Protein classification predicting sequence
SMPLPMMNIINGGEHADNNVDIQEFMIQP

SEQ ID NO: 55115 - protein, 17 aa, Artificial sequence
  Protein classification predicting sequence
TLAMDCASSEFYNKENG

SEQ ID NO: 55116 - protein, 7 aa, Artificial sequence
  Protein classification predicting sequence
GFAYQTK

SEQ ID NO: 55117 - protein, 25 aa, Artificial sequence
  Protein classification predicting sequence
KIVKVIGREIIDSRGNPTVEAEVHL

SEQ ID NO: 55118 - protein, 19 aa, Artificial sequence
  Protein classification predicting sequence
FGANAILAVSLANAKAAAA

SEQ ID NO: 55119 - protein, 7 aa, Artificial sequence
  Protein classification predicting sequence
IAELNGT

SEQ ID NO: 55120 - protein, 9 aa, Artificial sequence
  Protein classification predicting sequence
LAKVLKAKG

SEQ ID NO: 55121 - protein, 6 aa, Artificial sequence
  Protein classification predicting sequence
TVEAEV

SEQ ID NO: 55122 - protein, 10 aa, Artificial sequence
  Protein classification predicting sequence
AIVPSGASTG

SEQ ID NO: 55123 - protein, 6 aa, Artificial sequence
  Protein classification predicting sequence
GWKLLT

SEQ ID NO: 55124 - protein, 6 aa, Artificial sequence
  Protein classification predicting sequence
LDGTPN

SEQ ID NO: 55125 - protein, 9 aa, Artificial sequence
  Protein classification predicting sequence
SHRSGESED

SEQ ID NO: 55126 - protein, 7 aa, Artificial sequence
  Protein classification predicting sequence
AVEKKAC

SEQ ID NO: 55127 - protein, 9 aa, Artificial sequence
  Protein classification predicting sequence
EALELRDGD

SEQ ID NO: 55128 - protein, 12 aa, Artificial sequence
  Protein classification predicting sequence
AVISHRSGETED

SEQ ID NO: 55129 - protein, 18 aa, Artificial sequence
  Protein classification predicting sequence
TIADLAVGTAAGQIKTGS

SEQ ID NO: 55130 - protein, 12 aa, Artificial sequence
  Protein classification predicting sequence
HADNNVDFQEFM

SEQ ID NO: 55131 - protein, 7 aa, Artificial sequence
  Protein classification predicting sequence
IEDGLDE

SEQ ID NO: 55132 - protein, 11 aa, Artificial sequence
  Protein classification predicting sequence
NSILIKVNQIG

SEQ ID NO: 55133 - protein, 12 aa, Artificial sequence
  Protein classification predicting sequence
SHRSGETEDVTI

SEQ ID NO: 55134 - protein, 7 aa, Artificial sequence
  Protein classification predicting sequence
GFDVTDQ

SEQ ID NO: 55135 - protein, 12 aa, Artificial sequence
  Protein classification predicting sequence
QLVGDDLFVTNT

SEQ ID NO: 55136 - protein, 6 aa, Artificial sequence
  Protein classification predicting sequence
EAMKMG

SEQ ID NO: 55137 - protein, 7 aa, Artificial sequence
  Protein classification predicting sequence
QIVGDDL

SEQ ID NO: 55138 - protein, 11 aa, Artificial sequence
  Protein classification predicting sequence
NALLLKVNQIG

SEQ ID NO: 55139 - protein, 19 aa, Artificial sequence
  Protein classification predicting sequence
LLLKVNQIGSVTESIQACK

SEQ ID NO: 55140 - protein, 15 aa, Artificial sequence
  Protein classification predicting sequence
GWGVMVSHRSGETED

SEQ ID NO: 55141 - protein, 9 aa, Artificial sequence
  Protein classification predicting sequence
LGDKAVFAG

SEQ ID NO: 55142 - protein, 6 aa, Artificial sequence
  Protein classification predicting sequence
IIGPAL

SEQ ID NO: 55143 - protein, 8 aa, Artificial sequence
  Protein classification predicting sequence
KLGANAIL

SEQ ID NO: 55144 - protein, 20 aa, Artificial sequence
  Protein classification predicting sequence
KAGYTGKVVIGMDVAASEFY

SEQ ID NO: 55145 - protein, 7 aa, Artificial sequence
  Protein classification predicting sequence
AVNNEIA

SEQ ID NO: 55146 - protein, 12 aa, Artificial sequence
  Protein classification predicting sequence
APNLGSNAEALA

SEQ ID NO: 55147 - protein, 7 aa, Artificial sequence
  Protein classification predicting sequence
YEMKGEG

SEQ ID NO: 55148 - protein, 8 aa, Artificial sequence
  Protein classification predicting sequence
IGMDVAAS

SEQ ID NO: 55149 - protein, 8 aa, Artificial sequence
  Protein classification predicting sequence
GQIKTGAP

SEQ ID NO: 55150 - protein, 9 aa, Artificial sequence
  Protein classification predicting sequence
EALELRDGG

SEQ ID NO: 55151 - protein, 6 aa, Artificial sequence
  Protein classification predicting sequence
NVNEII

SEQ ID NO: 55152 - protein, 6 aa, Artificial sequence
  Protein classification predicting sequence
AGWGVM

SEQ ID NO: 55153 - protein, 6 aa, Artificial sequence
  Protein classification predicting sequence
DCASSE

SEQ ID NO: 55154 - protein, 10 aa, Artificial sequence
  Protein classification predicting sequence
TIADLAVAFN

SEQ ID NO: 55155 - protein, 6 aa, Artificial sequence
  Protein classification predicting sequence
SIEDPF

SEQ ID NO: 55156 - protein, 6 aa, Artificial sequence
  Protein classification predicting sequence
AGRNFR

SEQ ID NO: 55157 - protein, 8 aa, Artificial sequence
  Protein classification predicting sequence
GKGVRRAV

SEQ ID NO: 55158 - protein, 7 aa, Artificial sequence
  Protein classification predicting sequence
EIIAPEI

SEQ ID NO: 55159 - protein, 6 aa, Artificial sequence
  Protein classification predicting sequence
ETYHVL

SEQ ID NO: 55160 - protein, 8 aa, Artificial sequence
  Protein classification predicting sequence
KVQIVGDD

SEQ ID NO: 55161 - protein, 9 aa, Artificial sequence
  Protein classification predicting sequence
VLDSRGNPT

SEQ ID NO: 55162 - protein, 11 aa, Artificial sequence
  Protein classification predicting sequence
VLDSRGNPTVE

SEQ ID NO: 55163 - protein, 13 aa, Artificial sequence
  Protein classification predicting sequence
AVNVGDEGGFAPP

SEQ ID NO: 55164 - protein, 10 aa, Artificial sequence
  Protein classification predicting sequence
GQIKTGAPAR

SEQ ID NO: 55165 - protein, 8 aa, Artificial sequence
  Protein classification predicting sequence
IKTGAPAR

SEQ ID NO: 55166 - protein, 10 aa, Artificial sequence
  Protein classification predicting sequence
PSGASTGSRE

SEQ ID NO: 55167 - protein, 6 aa, Artificial sequence
  Protein classification predicting sequence
PVGAKT

SEQ ID NO: 55168 - protein, 11 aa, Artificial sequence
  Protein classification predicting sequence
GDEGGFAPNLK

SEQ ID NO: 55169 - protein, 7 aa, Artificial sequence
  Protein classification predicting sequence
AEEALDL

SEQ ID NO: 55170 - protein, 6 aa, Artificial sequence
  Protein classification predicting sequence
QIVGDD

SEQ ID NO: 55171 - protein, 7 aa, Artificial sequence
  Protein classification predicting sequence
VFHNLAK

SEQ ID NO: 55172 - protein, 10 aa, Artificial sequence
  Protein classification predicting sequence
TAVISHRSGE

SEQ ID NO: 55173 - protein, 8 aa, Artificial sequence
  Protein classification predicting sequence
AVLDEIGP

SEQ ID NO: 55174 - protein, 38 aa, Artificial sequence
  Protein classification predicting sequence
DLDGTPDKSRLGGNAILGVSLAVAKAAADSAELPLFRY

SEQ ID NO: 55175 - protein, 24 aa, Artificial sequence
  Protein classification predicting sequence
NAHILPVPMMNILNGGAHADTAVD

SEQ ID NO: 55176 - protein, 10 aa, Artificial sequence
  Protein classification predicting sequence
VAGTTAALDL

SEQ ID NO: 55177 - protein, 10 aa, Artificial sequence
  Protein classification predicting sequence
YPLVSIEDPL

SEQ ID NO: 55178 - protein, 26 aa, Artificial sequence
  Protein classification predicting sequence
YPLVSIEDPLSEDDWDGWAALTASIG

SEQ ID NO: 55179 - protein, 6 aa, Artificial sequence
  Protein classification predicting sequence
TNPERL

SEQ ID NO: 55180 - protein, 10 aa, Artificial sequence
  Protein classification predicting sequence
TNPERLEEGI

SEQ ID NO: 55181 - protein, 13 aa, Artificial sequence
  Protein classification predicting sequence
LGDAARYAGDLAF

SEQ ID NO: 55182 - protein, 7 aa, Artificial sequence
  Protein classification predicting sequence
ILAVSLA

SEQ ID NO: 55183 - protein, 8 aa, Artificial sequence
  Protein classification predicting sequence
PLYKYLGG

SEQ ID NO: 55184 - protein, 13 aa, Artificial sequence
  Protein classification predicting sequence
TAVVSHRSGETED

SEQ ID NO: 55185 - protein, 18 aa, Artificial sequence
  Protein classification predicting sequence
SHRSGETEDTTIADLAVA

SEQ ID NO: 55186 - protein, 28 aa, Artificial sequence
  Protein classification predicting sequence
SHRSGETEDTTIADLAVAFNTGQIKTGS

SEQ ID NO: 55187 - protein, 7 aa, Artificial sequence
  Protein classification predicting sequence
GQIKTGS

SEQ ID NO: 55188 - protein, 11 aa, Artificial sequence
  Protein classification predicting sequence
GQIKTGSMSRS

SEQ ID NO: 55189 - protein, 9 aa, Artificial sequence
  Protein classification predicting sequence
EAVELRDGG

SEQ ID NO: 55190 - protein, 6 aa, Artificial sequence
  Protein classification predicting sequence
LPLFRY

SEQ ID NO: 55191 - protein, 9 aa, Artificial sequence
  Protein classification predicting sequence
EGIEKGVAN

SEQ ID NO: 55192 - protein, 9 aa, Artificial sequence
  Protein classification predicting sequence
ALDPATSEL

SEQ ID NO: 55193 - protein, 10 aa, Artificial sequence
  Protein classification predicting sequence
VPMLNVINGG

SEQ ID NO: 55194 - protein, 9 aa, Artificial sequence
  Protein classification predicting sequence
PMLNVINGG

SEQ ID NO: 55195 - protein, 6 aa, Artificial sequence
  Protein classification predicting sequence
TFKESL

SEQ ID NO: 55196 - protein, 6 aa, Artificial sequence
  Protein classification predicting sequence
KYNRLL

SEQ ID NO: 55197 - protein, 10 aa, Artificial sequence
  Protein classification predicting sequence
LVKVNQIGTL

SEQ ID NO: 55198 - protein, 8 aa, Artificial sequence
  Protein classification predicting sequence
KVNQIGTL

SEQ ID NO: 55199 - protein, 6 aa, Artificial sequence
  Protein classification predicting sequence
VSIEDP

SEQ ID NO: 55200 - protein, 6 aa, Artificial sequence
  Protein classification predicting sequence
EKKACN

SEQ ID NO: 55201 - protein, 9 aa, Artificial sequence
  Protein classification predicting sequence
DSRGNPTIE

SEQ ID NO: 55202 - protein, 10 aa, Artificial sequence
  Protein classification predicting sequence
VSHRSGETED

SEQ ID NO: 55203 - protein, 15 aa, Artificial sequence
  Protein classification predicting sequence
VSHRSGETEDTTIAD

SEQ ID NO: 55204 - protein, 14 aa, Artificial sequence
  Protein classification predicting sequence
SHRSGETEDTTIAD

SEQ ID NO: 55205 - protein, 7 aa, Artificial sequence
  Protein classification predicting sequence
YAGRSAF

SEQ ID NO: 55206 - protein, 12 aa, Artificial sequence
  Protein classification predicting sequence
DLDGTPDKSRLG

SEQ ID NO: 55207 - protein, 8 aa, Artificial sequence
  Protein classification predicting sequence
LPVPMMNI

SEQ ID NO: 55208 - protein, 14 aa, Artificial sequence
  Protein classification predicting sequence
GLSTGLGDEGGFAP

SEQ ID NO: 55209 - protein, 19 aa, Artificial sequence
  Protein classification predicting sequence
GLSTGLGDEGGFAPDVAGT

SEQ ID NO: 55210 - protein, 7 aa, Artificial sequence
  Protein classification predicting sequence
EDDWDGW

SEQ ID NO: 55211 - protein, 15 aa, Artificial sequence
  Protein classification predicting sequence
RSERVAKYNQLLRIE

SEQ ID NO: 55212 - protein, 6 aa, Artificial sequence
  Protein classification predicting sequence
WYEEMI

SEQ ID NO: 55213 - protein, 12 aa, Artificial sequence
  Protein classification predicting sequence
AREVLDSRGNPT

SEQ ID NO: 55214 - protein, 20 aa, Artificial sequence
  Protein classification predicting sequence
AREVLDSRGNPTVEVEVYTE

SEQ ID NO: 55215 - protein, 36 aa, Artificial sequence
  Protein classification predicting sequence
AREVLDSRGNPTVEVEVYTESGAFGRAIVPSGASTG

SEQ ID NO: 55216 - protein, 11 aa, Artificial sequence
  Protein classification predicting sequence
VISHRSGETED

SEQ ID NO: 55217 - protein, 7 aa, Artificial sequence
  Protein classification predicting sequence
APFLGLK

SEQ ID NO: 55218 - protein, 11 aa, Artificial sequence
  Protein classification predicting sequence
DNFMVQQLDGT

SEQ ID NO: 55219 - protein, 9 aa, Artificial sequence
  Protein classification predicting sequence
MDVAASEFY

SEQ ID NO: 55220 - protein, 6 aa, Artificial sequence
  Protein classification predicting sequence
DGTDNK

SEQ ID NO: 55221 - protein, 22 aa, Artificial sequence
  Protein classification predicting sequence
AAAPSGASTGSREALELRDGDK

SEQ ID NO: 55222 - protein, 10 aa, Artificial sequence
  Protein classification predicting sequence
RFLGKGVLKA

SEQ ID NO: 55223 - protein, 25 aa, Artificial sequence
  Protein classification predicting sequence
FGANAILAVSLANAKAAAAAKGMPL

SEQ ID NO: 55224 - protein, 35 aa, Artificial sequence
  Protein classification predicting sequence
DAKDQANIDKIMIDLDGTENKSQFGANAILAVSLA

SEQ ID NO: 55225 - protein, 9 aa, Artificial sequence
  Protein classification predicting sequence
KGEGKTFTS

SEQ ID NO: 55226 - protein, 10 aa, Artificial sequence
  Protein classification predicting sequence
GFAYQTKVLG

SEQ ID NO: 55227 - protein, 13 aa, Artificial sequence
  Protein classification predicting sequence
KIQLVGDDLFVTN

SEQ ID NO: 55228 - protein, 25 aa, Artificial sequence
  Protein classification predicting sequence
GREIIDSRGNPTVEAEVHLEGGFVG

SEQ ID NO: 55229 - protein, 7 aa, Artificial sequence
  Protein classification predicting sequence
AVNGPIA

SEQ ID NO: 55230 - protein, 9 aa, Artificial sequence
  Protein classification predicting sequence
AAGYELGKD

SEQ ID NO: 55231 - protein, 8 aa, Artificial sequence
  Protein classification predicting sequence
YNMKGEGK

SEQ ID NO: 55232 - protein, 13 aa, Artificial sequence
  Protein classification predicting sequence
VGDDLFVTNTKIL

SEQ ID NO: 55233 - protein, 7 aa, Artificial sequence
  Protein classification predicting sequence
ANSILIK

SEQ ID NO: 55234 - protein, 74 aa, Artificial sequence
  Protein classification predicting sequence
ANSILIKFNQIGSLTETLAAIKMAKDAGYTAVISHRSGETEDATIADLAVGTAAGQIKTGSMSRSDRVAKYNQL

SEQ ID NO: 55235 - protein, 7 aa, Artificial sequence
  Protein classification predicting sequence
LKVNQIG

SEQ ID NO: 55236 - protein, 15 aa, Artificial sequence
  Protein classification predicting sequence
AIKNINEIIAPKLIG

SEQ ID NO: 55237 - protein, 20 aa, Artificial sequence
  Protein classification predicting sequence
EWGWSKSKLGANAILAISMA

SEQ ID NO: 55238 - protein, 37 aa, Artificial sequence
  Protein classification predicting sequence
LPVPCLNVINGGSHAGNKLSFQEFMIVPVGAPSFKEA

SEQ ID NO: 55239 - protein, 38 aa, Artificial sequence
  Protein classification predicting sequence
RYGAEVYHTLKSEIKKKYGIDATNVGDEGGFAPNILNA

SEQ ID NO: 55240 - protein, 17 aa, Artificial sequence
  Protein classification predicting sequence
KVKIAMDVAASEFYNSE

SEQ ID NO: 55241 - protein, 20 aa, Artificial sequence
  Protein classification predicting sequence
KTYDLDFKTPNNDKSLVKTG

SEQ ID NO: 55242 - protein, 7 aa, Artificial sequence
  Protein classification predicting sequence
LVKKYPI

SEQ ID NO: 55243 - protein, 18 aa, Artificial sequence
  Protein classification predicting sequence
SIEDPFDQDDWENYAKLT

SEQ ID NO: 55244 - protein, 21 aa, Artificial sequence
  Protein classification predicting sequence
AIGKDVQIVGDDLLVTNPTRI

SEQ ID NO: 55245 - protein, 8 aa, Artificial sequence
  Protein classification predicting sequence
RNAKYNQL

SEQ ID NO: 55246 - protein, 14 aa, Artificial sequence
  Protein classification predicting sequence
GLSTAVGDEGGFAP

SEQ ID NO: 55247 - protein, 10 aa, Artificial sequence
  Protein classification predicting sequence
EAAGYVPGKD

SEQ ID NO: 55248 - protein, 6 aa, Artificial sequence
  Protein classification predicting sequence
VYHSLK

SEQ ID NO: 55249 - protein, 8 aa, Artificial sequence
  Protein classification predicting sequence
SIEDGLSE

SEQ ID NO: 55250 - protein, 10 aa, Artificial sequence
  Protein classification predicting sequence
ISHRSGETED

SEQ ID NO: 55251 - protein, 12 aa, Artificial sequence
  Protein classification predicting sequence
VPSGASTGAHEA

SEQ ID NO: 55252 - protein, 6 aa, Artificial sequence
  Protein classification predicting sequence
EFYKDG

SEQ ID NO: 55253 - protein, 5 aa, Artificial sequence
  Protein classification predicting sequence
DWEGW

SEQ ID NO: 55254 - protein, 12 aa, Artificial sequence
  Protein classification predicting sequence
DSRGNPTVEADV

SEQ ID NO: 55255 - protein, 6 aa, Artificial sequence
  Protein classification predicting sequence
LNGTPG

SEQ ID NO: 55256 - protein, 7 aa, Artificial sequence
  Protein classification predicting sequence
EGIEKGI

SEQ ID NO: 55257 - protein, 13 aa, Artificial sequence
  Protein classification predicting sequence
QIKTGSLCRSDRV

SEQ ID NO: 55258 - protein, 6 aa, Artificial sequence
  Protein classification predicting sequence
AGYKLG

SEQ ID NO: 55259 - protein, 13 aa, Artificial sequence
  Protein classification predicting sequence
MGRAAVPSGASTG

SEQ ID NO: 55260 - protein, 17 aa, Artificial sequence
  Protein classification predicting sequence
SFREAIRWVSETYHVLK

SEQ ID NO: 55261 - protein, 21 aa, Artificial sequence
  Protein classification predicting sequence
RYHGKGVRRAVENVNKIIAPE

SEQ ID NO: 55262 - protein, 13 aa, Artificial sequence
  Protein classification predicting sequence
REVLDSRGNPTVE

SEQ ID NO: 55263 - protein, 10 aa, Artificial sequence
  Protein classification predicting sequence
LDSRGNPTVE

SEQ ID NO: 55264 - protein, 8 aa, Artificial sequence
  Protein classification predicting sequence
RYLGKGVL

SEQ ID NO: 55265 - protein, 17 aa, Artificial sequence
  Protein classification predicting sequence
LIDLDGTENKGRLGANA

SEQ ID NO: 55266 - protein, 12 aa, Artificial sequence
  Protein classification predicting sequence
LPVPMMNIINGG

SEQ ID NO: 55267 - protein, 13 aa, Artificial sequence
  Protein classification predicting sequence
HADNPIDFQEFMI

SEQ ID NO: 55268 - protein, 7 aa, Artificial sequence
  Protein classification predicting sequence
DFQEFMI

SEQ ID NO: 55269 - protein, 6 aa, Artificial sequence
  Protein classification predicting sequence
DWDGWK

SEQ ID NO: 55270 - protein, 9 aa, Artificial sequence
  Protein classification predicting sequence
INGGEHADN

SEQ ID NO: 55271 - protein, 7 aa, Artificial sequence
  Protein classification predicting sequence
WCDKYPI

SEQ ID NO: 55272 - protein, 7 aa, Artificial sequence
  Protein classification predicting sequence
LAHRNGY

SEQ ID NO: 55273 - protein, 14 aa, Artificial sequence
  Protein classification predicting sequence
GREILDSRGNPTVE

SEQ ID NO: 55274 - protein, 8 aa, Artificial sequence
  Protein classification predicting sequence
IDFQEFMI

SEQ ID NO: 55275 - protein, 7 aa, Artificial sequence
  Protein classification predicting sequence
LKSLTKK

SEQ ID NO: 55276 - protein, 7 aa, Artificial sequence
  Protein classification predicting sequence
SEFYKDG

SEQ ID NO: 55277 - protein, 10 aa, Artificial sequence
  Protein classification predicting sequence
YPIVSIEDPF

SEQ ID NO: 55278 - protein, 10 aa, Artificial sequence
  Protein classification predicting sequence
KTGAPARSER

SEQ ID NO: 55279 - protein, 21 aa, Artificial sequence
  Protein classification predicting sequence
NEWGWCKQKLGANAILAVSLA

SEQ ID NO: 55280 - protein, 8 aa, Artificial sequence
  Protein classification predicting sequence
GKDAKDQA

SEQ ID NO: 55281 - protein, 93 aa, Artificial sequence
  Protein classification predicting sequence
FGANAILAVSLANAKAAAAAKGMPLYEHIAELNGTPGKYSMPVPMMNIINGGEHADNNVDIQEFMIQPVGAKTVKEAIRMGSEVFHHLAKVLK

SEQ ID NO: 55282 - protein, 6 aa, Artificial sequence
  Protein classification predicting sequence
MIELDG

SEQ ID NO: 55283 - protein, 9 aa, Artificial sequence
  Protein classification predicting sequence
FIADLVVGL

SEQ ID NO: 55284 - protein, 11 aa, Artificial sequence
  Protein classification predicting sequence
NGGEHADNNVD

SEQ ID NO: 55285 - protein, 9 aa, Artificial sequence
  Protein classification predicting sequence
KYNQLLRIE

SEQ ID NO: 55286 - protein, 5 aa, Artificial sequence
  Protein classification predicting sequence
PLYRY

SEQ ID NO: 55287 - protein, 11 aa, Artificial sequence
  Protein classification predicting sequence
AKYNQLIRIEE

SEQ ID NO: 55288 - protein, 7 aa, Artificial sequence
  Protein classification predicting sequence
LGEVAEY

SEQ ID NO: 55289 - protein, 17 aa, Artificial sequence
  Protein classification predicting sequence
NGGSHSDAPIAFQEFMI

SEQ ID NO: 55290 - protein, 17 aa, Artificial sequence
  Protein classification predicting sequence
EGEFSVLDQVSIDKMMI

SEQ ID NO: 55291 - protein, 14 aa, Artificial sequence
  Protein classification predicting sequence
NKGKLGANAILGVS

SEQ ID NO: 55292 - protein, 8 aa, Artificial sequence
  Protein classification predicting sequence
FKESLRWG

SEQ ID NO: 55293 - protein, 10 aa, Artificial sequence
  Protein classification predicting sequence
KFEGEHGAKR

SEQ ID NO: 55294 - protein, 10 aa, Artificial sequence
  Protein classification predicting sequence
IEDGMDENDW

SEQ ID NO: 55295 - protein, 12 aa, Artificial sequence
  Protein classification predicting sequence
VQLVGDDLFVTN

SEQ ID NO: 55296 - protein, 19 aa, Artificial sequence
  Protein classification predicting sequence
SRTDRIAKYNQLLRIEDEL

SEQ ID NO: 55297 - protein, 23 aa, Artificial sequence
  Protein classification predicting sequence
NKGKLGANAILGVSIAVARAAAD

SEQ ID NO: 55298 - protein, 71 aa, Artificial sequence
  Protein classification predicting sequence
NKGKLGANAILGVSIAVARAAADLLGQPLYKYLGGFNGKQLPVPMMNIVNGGSHSDAPIAFQEFMILPVGA

SEQ ID NO: 55299 - protein, 83 aa, Artificial sequence
  Protein classification predicting sequence
GIGNSILIKVNQIGTLTETFDAIEMAQKAGYTAVVSHRSGETEDTTIADIAVATNAGQIKTGSLSRTDRIAKYNQLLRIEDEL

SEQ ID NO: 55300 - protein, 9 aa, Artificial sequence
  Protein classification predicting sequence
PVGAPTFKE

SEQ ID NO: 55301 - protein, 13 aa, Artificial sequence
  Protein classification predicting sequence
FHALKKILKERGL

SEQ ID NO: 55302 - protein, 15 aa, Artificial sequence
  Protein classification predicting sequence
RGLETAVGDEGGFAP

SEQ ID NO: 55303 - protein, 18 aa, Artificial sequence
  Protein classification predicting sequence
TAVGDEGGFAPKFEGTED

SEQ ID NO: 55304 - protein, 7 aa, Artificial sequence
  Protein classification predicting sequence
ASSEFYD

SEQ ID NO: 55305 - protein, 10 aa, Artificial sequence
  Protein classification predicting sequence
VYDYSKFEGE

SEQ ID NO: 55306 - protein, 52 aa, Artificial sequence
  Protein classification predicting sequence
TAVGDEGGFAPKFEGTEDGVETILKAIEAAGYEAGENGIMIGFDCASSEFYD

SEQ ID NO: 55307 - protein, 11 aa, Artificial sequence
  Protein classification predicting sequence
TGLGDEGGFAP

SEQ ID NO: 55308 - protein, 13 aa, Artificial sequence
  Protein classification predicting sequence
VFLGFDCASSEFY

SEQ ID NO: 55309 - protein, 31 aa, Artificial sequence
  Protein classification predicting sequence
GFDCASSEFYDKERKVYDYTKFEGEGAAVRT

SEQ ID NO: 55310 - protein, 8 aa, Artificial sequence
  Protein classification predicting sequence
DCASSEFY

SEQ ID NO: 55311 - protein, 20 aa, Artificial sequence
  Protein classification predicting sequence
KYPIITIEDGMDENDWDGWK

SEQ ID NO: 55312 - protein, 16 aa, Artificial sequence
  Protein classification predicting sequence
NSILIKVNQIGTLTET

SEQ ID NO: 55313 - protein, 27 aa, Artificial sequence
  Protein classification predicting sequence
NAGQIKTGSLSRTDRIAKYNQLLRIED

SEQ ID NO: 55314 - protein, 10 aa, Artificial sequence
  Protein classification predicting sequence
GTEDAVETII

SEQ ID NO: 55315 - protein, 14 aa, Artificial sequence
  Protein classification predicting sequence
EELVNKYPIITIED

SEQ ID NO: 55316 - protein, 10 aa, Artificial sequence
  Protein classification predicting sequence
MDENDWDGWK

SEQ ID NO: 55317 - protein, 15 aa, Artificial sequence
  Protein classification predicting sequence
SHRSGETEDSTIADI

SEQ ID NO: 55318 - protein, 28 aa, Artificial sequence
  Protein classification predicting sequence
DYLEELVNKYPIITIEDGMDENDWDGWK

SEQ ID NO: 55319 - protein, 16 aa, Artificial sequence
  Protein classification predicting sequence
GLGTQKAVDNVNNIIA

SEQ ID NO: 55320 - protein, 6 aa, Artificial sequence
  Protein classification predicting sequence
FQEFMI

SEQ ID NO: 55321 - protein, 13 aa, Artificial sequence
  Protein classification predicting sequence
VQLVGDDFFVTNT

SEQ ID NO: 55322 - protein, 20 aa, Artificial sequence
  Protein classification predicting sequence
VPSGASTGEHEAVELRDGDK

SEQ ID NO: 55323 - protein, 10 aa, Artificial sequence
  Protein classification predicting sequence
EAVELRDGDK

SEQ ID NO: 55324 - protein, 7 aa, Artificial sequence
  Protein classification predicting sequence
ELRDGDK

SEQ ID NO: 55325 - protein, 16 aa, Artificial sequence
  Protein classification predicting sequence
RYGGLGTQKAVDNVNN

SEQ ID NO: 55326 - protein, 9 aa, Artificial sequence
  Protein classification predicting sequence
GTEDGVETI

SEQ ID NO: 55327 - protein, 19 aa, Artificial sequence
  Protein classification predicting sequence
ERKVYDYTKFEGEGAAVRT

SEQ ID NO: 55328 - protein, 17 aa, Artificial sequence
  Protein classification predicting sequence
NSILIKVNQIGTLTETF

SEQ ID NO: 55329 - protein, 6 aa, Artificial sequence
  Protein classification predicting sequence
EIIDSR

SEQ ID NO: 55330 - protein, 6 aa, Artificial sequence
  Protein classification predicting sequence
HAGNKL

SEQ ID NO: 55331 - protein, 6 aa, Artificial sequence
  Protein classification predicting sequence
KQYPIV

SEQ ID NO: 55332 - protein, 7 aa, Artificial sequence
  Protein classification predicting sequence
EAIELRD

SEQ ID NO: 55333 - protein, 8 aa, Artificial sequence
  Protein classification predicting sequence
GDEGGVAP

SEQ ID NO: 55334 - protein, 12 aa, Artificial sequence
  Protein classification predicting sequence
LGANAILGVSLA

SEQ ID NO: 55335 - protein, 8 aa, Artificial sequence
  Protein classification predicting sequence
RVQLVGDD

SEQ ID NO: 55336 - protein, 15 aa, Artificial sequence
  Protein classification predicting sequence
RTDRVAKYNQLLRIE

SEQ ID NO: 55337 - protein, 12 aa, Artificial sequence
  Protein classification predicting sequence
RVAKYNQLLRIE

SEQ ID NO: 55338 - protein, 7 aa, Artificial sequence
  Protein classification predicting sequence
MNVINGG

SEQ ID NO: 55339 - protein, 7 aa, Artificial sequence
  Protein classification predicting sequence
PIGAPSF

SEQ ID NO: 55340 - protein, 7 aa, Artificial sequence
  Protein classification predicting sequence
PTVEAEV

SEQ ID NO: 55341 - protein, 6 aa, Artificial sequence
  Protein classification predicting sequence
KAVENV

SEQ ID NO: 55342 - protein, 6 aa, Artificial sequence
  Protein classification predicting sequence
DFQEFM

SEQ ID NO: 55343 - protein, 8 aa, Artificial sequence
  Protein classification predicting sequence
NKEALELL

SEQ ID NO: 55344 - protein, 11 aa, Artificial sequence
  Protein classification predicting sequence
TSVGDEGGFAP

SEQ ID NO: 55345 - protein, 7 aa, Artificial sequence
  Protein classification predicting sequence
SFREALR

SEQ ID NO: 55346 - protein, 8 aa, Artificial sequence
  Protein classification predicting sequence
IKTGSLSR

SEQ ID NO: 55347 - protein, 6 aa, Artificial sequence
  Protein classification predicting sequence
AVENVN

SEQ ID NO: 55348 - protein, 6 aa, Artificial sequence
  Protein classification predicting sequence
YRDGKY

SEQ ID NO: 55349 - protein, 8 aa, Artificial sequence
  Protein classification predicting sequence
GKGVLKAV

SEQ ID NO: 55350 - protein, 6 aa, Artificial sequence
  Protein classification predicting sequence
IDKAMI

SEQ ID NO: 55351 - protein, 14 aa, Artificial sequence
  Protein classification predicting sequence
KVQLVGDDLFVTNT

SEQ ID NO: 55352 - protein, 13 aa, Artificial sequence
  Protein classification predicting sequence
VQLVGDDLFVTNT

SEQ ID NO: 55353 - protein, 7 aa, Artificial sequence
  Protein classification predicting sequence
MIMPVGA

SEQ ID NO: 55354 - protein, 6 aa, Artificial sequence
  Protein classification predicting sequence
GVPLYR

SEQ ID NO: 55355 - protein, 9 aa, Artificial sequence
  Protein classification predicting sequence
YPIVSIEDP

SEQ ID NO: 55356 - protein, 7 aa, Artificial sequence
  Protein classification predicting sequence
LARGIKE

SEQ ID NO: 55357 - protein, 13 aa, Artificial sequence
  Protein classification predicting sequence
GQIKTGSMSRSDR

SEQ ID NO: 55358 - protein, 7 aa, Artificial sequence
  Protein classification predicting sequence
PIISIED

SEQ ID NO: 55359 - protein, 20 aa, Artificial sequence
  Protein classification predicting sequence
GREIIDSRGNPTVEAEVHLE

SEQ ID NO: 55360 - protein, 10 aa, Artificial sequence
  Protein classification predicting sequence
EALELRDGDK

SEQ ID NO: 55361 - protein, 13 aa, Artificial sequence
  Protein classification predicting sequence
GAEVFHNLAKVLK

SEQ ID NO: 55362 - protein, 32 aa, Artificial sequence
  Protein classification predicting sequence
TAVGDEGGFAPNLKSNAEALEVIAEAVAAAGY

SEQ ID NO: 55363 - protein, 16 aa, Artificial sequence
  Protein classification predicting sequence
LDGTENKSKFGANAIL

SEQ ID NO: 55364 - protein, 28 aa, Artificial sequence
  Protein classification predicting sequence
PMMNIINGGEHADNNVDIQEFMIQPVGA

SEQ ID NO: 55365 - protein, 58 aa, Artificial sequence
  Protein classification predicting sequence
TLKEAVRMGAEVFHNLAKVLKSKGYNTAVGDEGGFAPNLKSNAEALEVIAEAVAAAGY

SEQ ID NO: 55366 - protein, 14 aa, Artificial sequence
  Protein classification predicting sequence
PIVSIEDGLDESDW

SEQ ID NO: 55367 - protein, 12 aa, Artificial sequence
  Protein classification predicting sequence
KVIGREIIDSRG

SEQ ID NO: 55368 - protein, 6 aa, Artificial sequence
  Protein classification predicting sequence
IDQIMI

SEQ ID NO: 55369 - protein, 9 aa, Artificial sequence
  Protein classification predicting sequence
GANAILAVS

SEQ ID NO: 55370 - protein, 11 aa, Artificial sequence
  Protein classification predicting sequence
GANAILAVSLA

SEQ ID NO: 55371 - protein, 6 aa, Artificial sequence
  Protein classification predicting sequence
PNLKSN

SEQ ID NO: 55372 - protein, 10 aa, Artificial sequence
  Protein classification predicting sequence
KIQLVGDDLF

SEQ ID NO: 55373 - protein, 9 aa, Artificial sequence
  Protein classification predicting sequence
AREILDSRG

SEQ ID NO: 55374 - protein, 6 aa, Artificial sequence
  Protein classification predicting sequence
LSEDDW

SEQ ID NO: 55375 - protein, 9 aa, Artificial sequence
  Protein classification predicting sequence
CVMSHRSGE

SEQ ID NO: 55376 - protein, 12 aa, Artificial sequence
  Protein classification predicting sequence
RSERIAKYNRLL

SEQ ID NO: 55377 - protein, 9 aa, Artificial sequence
  Protein classification predicting sequence
RIAKYNRLL

SEQ ID NO: 55378 - protein, 11 aa, Artificial sequence
  Protein classification predicting sequence
ARYAGRDAFVS

SEQ ID NO: 55379 - protein, 19 aa, Artificial sequence
  Protein classification predicting sequence
AREILDSRGNPTLEAEVTL

SEQ ID NO: 55380 - protein, 6 aa, Artificial sequence
  Protein classification predicting sequence
RKQPLW

SEQ ID NO: 55381 - protein, 7 aa, Artificial sequence
  Protein classification predicting sequence
LPVPMMN

SEQ ID NO: 55382 - protein, 7 aa, Artificial sequence
  Protein classification predicting sequence
DVASSEF

SEQ ID NO: 55383 - protein, 6 aa, Artificial sequence
  Protein classification predicting sequence
LTERIG

SEQ ID NO: 55384 - protein, 7 aa, Artificial sequence
  Protein classification predicting sequence
ANAILIK

SEQ ID NO: 55385 - protein, 8 aa, Artificial sequence
  Protein classification predicting sequence
IADIAVAT

SEQ ID NO: 55386 - protein, 33 aa, Artificial sequence
  Protein classification predicting sequence
GRAAVPSGASTGTKEAVELRDGDKTRYLGKGVR

SEQ ID NO: 55387 - protein, 24 aa, Artificial sequence
  Protein classification predicting sequence
GLSTAVGDEGGFAPDFRSNVEALD

SEQ ID NO: 55388 - protein, 22 aa, Artificial sequence
  Protein classification predicting sequence
NGKYNLVGENKRLTSEQFVDFL

SEQ ID NO: 55389 - protein, 11 aa, Artificial sequence
  Protein classification predicting sequence
SIEDGLAEDDW

SEQ ID NO: 55390 - protein, 38 aa, Artificial sequence
  Protein classification predicting sequence
IADIAVATTATQIKTGSLCRSDRVAKYNQLLRIEQALG

SEQ ID NO: 55391 - protein, 6 aa, Artificial sequence
  Protein classification predicting sequence
GSEVFH

SEQ ID NO: 55392 - protein, 9 aa, Artificial sequence
  Protein classification predicting sequence
NTAVGDEGG

SEQ ID NO: 55393 - protein, 11 aa, Artificial sequence
  Protein classification predicting sequence
TLAMDCAASEF

SEQ ID NO: 55394 - protein, 11 aa, Artificial sequence
  Protein classification predicting sequence
AHVLPVPMMNI

SEQ ID NO: 55395 - protein, 6 aa, Artificial sequence
  Protein classification predicting sequence
NQIGSL

SEQ ID NO: 55396 - protein, 7 aa, Artificial sequence
  Protein classification predicting sequence
TAPVNIA

SEQ ID NO: 55397 - protein, 15 aa, Artificial sequence
  Protein classification predicting sequence
NNFPTAAGLASSAAG

SEQ ID NO: 55398 - protein, 9 aa, Artificial sequence
  Protein classification predicting sequence
GSGSACRSL

SEQ ID NO: 55399 - protein, 12 aa, Artificial sequence
  Protein classification predicting sequence
VAYTFDAGPNAV

SEQ ID NO: 55400 - protein, 6 aa, Artificial sequence
  Protein classification predicting sequence
LAMQEF

SEQ ID NO: 55401 - protein, 7 aa, Artificial sequence
  Protein classification predicting sequence
FYKDGKY

SEQ ID NO: 55402 - protein, 7 aa, Artificial sequence
  Protein classification predicting sequence
YDLNFKE

SEQ ID NO: 55403 - protein, 8 aa, Artificial sequence
  Protein classification predicting sequence
NQIGTLTE

SEQ ID NO: 55404 - protein, 6 aa, Artificial sequence
  Protein classification predicting sequence
GERPGL

SEQ ID NO: 55405 - protein, 8 aa, Artificial sequence
  Protein classification predicting sequence
DIKKQLLV

SEQ ID NO: 55406 - protein, 9 aa, Artificial sequence
  Protein classification predicting sequence
RADHAAAQD

SEQ ID NO: 55407 - protein, 7 aa, Artificial sequence
  Protein classification predicting sequence
AQDSVFS

SEQ ID NO: 55408 - protein, 13 aa, Artificial sequence
  Protein classification predicting sequence
VGDGLSSAAIEAN

SEQ ID NO: 55409 - protein, 15 aa, Artificial sequence
  Protein classification predicting sequence
RYKTETILRFRADHA

SEQ ID NO: 55410 - protein, 19 aa, Artificial sequence
  Protein classification predicting sequence
GERPGLVTAESMSAYIAYK

SEQ ID NO: 55411 - protein, 12 aa, Artificial sequence
  Protein classification predicting sequence
VSEDLVKEMNFI

SEQ ID NO: 55412 - protein, 16 aa, Artificial sequence
  Protein classification predicting sequence
VVGDGLSSAAIEANIK

SEQ ID NO: 55413 - protein, 8 aa, Artificial sequence
  Protein classification predicting sequence
MYNLDFDN

SEQ ID NO: 55414 - protein, 6 aa, Artificial sequence
  Protein classification predicting sequence
RPDLGR

SEQ ID NO: 55415 - protein, 9 aa, Artificial sequence
  Protein classification predicting sequence
TAESMSAYI

SEQ ID NO: 55416 - protein, 8 aa, Artificial sequence
  Protein classification predicting sequence
GGTPPVEA

SEQ ID NO: 55417 - protein, 12 aa, Artificial sequence
  Protein classification predicting sequence
GPRPRTQALLRF

SEQ ID NO: 55418 - protein, 15 aa, Artificial sequence
  Protein classification predicting sequence
ADHSRSKDTVLKEVP

SEQ ID NO: 55419 - protein, 6 aa, Artificial sequence
  Protein classification predicting sequence
YLTRPD

SEQ ID NO: 55420 - protein, 19 aa, Artificial sequence
  Protein classification predicting sequence
GTPFFVRYGRVKIEDQIGE

SEQ ID NO: 55421 - protein, 18 aa, Artificial sequence
  Protein classification predicting sequence
GERPGLGQSESLSCYAVY

SEQ ID NO: 55422 - protein, 13 aa, Artificial sequence
  Protein classification predicting sequence
TVEADRTCISNIH

SEQ ID NO: 55423 - protein, 11 aa, Artificial sequence
  Protein classification predicting sequence
AHAQARDAVHL

SEQ ID NO: 55424 - protein, 11 aa, Artificial sequence
  Protein classification predicting sequence
VVADGLSALAV

SEQ ID NO: 55425 - protein, 10 aa, Artificial sequence
  Protein classification predicting sequence
LTPARIALGR

SEQ ID NO: 55426 - protein, 8 aa, Artificial sequence
  Protein classification predicting sequence
LLYLMREA

SEQ ID NO: 55427 - protein, 28 aa, Artificial sequence
  Protein classification predicting sequence
KAQGLLEVRSEISDKNLYLTRPDMGRRL

SEQ ID NO: 55428 - protein, 9 aa, Artificial sequence
  Protein classification predicting sequence
NYEEILPPL

SEQ ID NO: 55429 - protein, 52 aa, Artificial sequence
  Protein classification predicting sequence
VGTPFFVRYGRVKIEDQIGEILGAKVVILLVGERPGLGQSESLSCYAVYSPR

SEQ ID NO: 55430 - protein, 17 aa, Artificial sequence
  Protein classification predicting sequence
LIGERPGLSSPDSLGLY

SEQ ID NO: 55431 - protein, 8 aa, Artificial sequence
  Protein classification predicting sequence
LPAPNMLM

SEQ ID NO: 55432 - protein, 6 aa, Artificial sequence
  Protein classification predicting sequence
GRALGV

SEQ ID NO: 55433 - protein, 6 aa, Artificial sequence
  Protein classification predicting sequence
PDLWFF

SEQ ID NO: 55434 - protein, 12 aa, Artificial sequence
  Protein classification predicting sequence
DPVMPGCLGLDA

SEQ ID NO: 55435 - protein, 8 aa, Artificial sequence
  Protein classification predicting sequence
MPGCLGLD

SEQ ID NO: 55436 - protein, 6 aa, Artificial sequence
  Protein classification predicting sequence
GFFLGW

SEQ ID NO: 55437 - protein, 9 aa, Artificial sequence
  Protein classification predicting sequence
FGPGNAQLP

SEQ ID NO: 55438 - protein, 8 aa, Artificial sequence
  Protein classification predicting sequence
PMLMFDRI

SEQ ID NO: 55439 - protein, 6 aa, Artificial sequence
  Protein classification predicting sequence
RKLVMG

SEQ ID NO: 55440 - protein, 7 aa, Artificial sequence
  Protein classification predicting sequence
DLKVGLF

SEQ ID NO: 55441 - protein, 20 aa, Artificial sequence
  Protein classification predicting sequence
GPQLPAPNMLMMDRVVKMTE

SEQ ID NO: 55442 - protein, 13 aa, Artificial sequence
  Protein classification predicting sequence
GKGRALGVGEVKF

SEQ ID NO: 55443 - protein, 6 aa, Artificial sequence
  Protein classification predicting sequence
LKVGLF

SEQ ID NO: 55444 - protein, 7 aa, Artificial sequence
  Protein classification predicting sequence
NRKLVMG

SEQ ID NO: 55445 - protein, 6 aa, Artificial sequence
  Protein classification predicting sequence
MLMMDR

SEQ ID NO: 55446 - protein, 7 aa, Artificial sequence
  Protein classification predicting sequence
LPTAKKV

SEQ ID NO: 55447 - protein, 7 aa, Artificial sequence
  Protein classification predicting sequence
GPQLPAP

SEQ ID NO: 55448 - protein, 16 aa, Artificial sequence
  Protein classification predicting sequence
GKGRALGVGEVKFTGQ

SEQ ID NO: 55449 - protein, 9 aa, Artificial sequence
  Protein classification predicting sequence
DLKVGLFQD

SEQ ID NO: 55450 - protein, 7 aa, Artificial sequence
  Protein classification predicting sequence
GGAFDKG

SEQ ID NO: 55451 - protein, 15 aa, Artificial sequence
  Protein classification predicting sequence
DPVMPGCLGLDAMWQ

SEQ ID NO: 55452 - protein, 7 aa, Artificial sequence
  Protein classification predicting sequence
VGFYLGW

SEQ ID NO: 55453 - protein, 11 aa, Artificial sequence
  Protein classification predicting sequence
GRALGVGEVKF

SEQ ID NO: 55454 - protein, 19 aa, Artificial sequence
  Protein classification predicting sequence
DPVMPGCLGLDAMWQLVGF

SEQ ID NO: 55455 - protein, 14 aa, Artificial sequence
  Protein classification predicting sequence
LIMGLADGEVLVDG

SEQ ID NO: 55456 - protein, 7 aa, Artificial sequence
  Protein classification predicting sequence
NMLMIDR

SEQ ID NO: 55457 - protein, 23 aa, Artificial sequence
  Protein classification predicting sequence
ADGRVLVDGKEIYVAKDLKVGLF

SEQ ID NO: 55458 - protein, 9 aa, Artificial sequence
  Protein classification predicting sequence
LPTAKKVTY

SEQ ID NO: 55459 - protein, 6 aa, Artificial sequence
  Protein classification predicting sequence
RGELFG

SEQ ID NO: 55460 - protein, 10 aa, Artificial sequence
  Protein classification predicting sequence
PDLWFFACHF

SEQ ID NO: 55461 - protein, 6 aa, Artificial sequence
  Protein classification predicting sequence
WQLTGF

SEQ ID NO: 55462 - protein, 6 aa, Artificial sequence
  Protein classification predicting sequence
DLKVGL

SEQ ID NO: 55463 - protein, 17 aa, Artificial sequence
  Protein classification predicting sequence
GDPVMPGCLGLDAMWQL

SEQ ID NO: 55464 - protein, 7 aa, Artificial sequence
  Protein classification predicting sequence
GEVKFTG

SEQ ID NO: 55465 - protein, 7 aa, Artificial sequence
  Protein classification predicting sequence
VGFFLGW

SEQ ID NO: 55466 - protein, 8 aa, Artificial sequence
  Protein classification predicting sequence
KFTGQVLP

SEQ ID NO: 55467 - protein, 35 aa, Artificial sequence
  Protein classification predicting sequence
KVTYRIHFKRIVNRRLIMGLADGEVLVDGRLIYTA

SEQ ID NO: 55468 - protein, 8 aa, Artificial sequence
  Protein classification predicting sequence
TKMSETEG

SEQ ID NO: 55469 - protein, 11 aa, Artificial sequence
  Protein classification predicting sequence
DLKVGLFQDTS

SEQ ID NO: 55470 - protein, 6 aa, Artificial sequence
  Protein classification predicting sequence
KRESYT

SEQ ID NO: 55471 - protein, 7 aa, Artificial sequence
  Protein classification predicting sequence
AELDINP

SEQ ID NO: 55472 - protein, 11 aa, Artificial sequence
  Protein classification predicting sequence
GEVKFTGQVLP

SEQ ID NO: 55473 - protein, 21 aa, Artificial sequence
  Protein classification predicting sequence
CHFIGDPVMPGCLGLDAMWQL

SEQ ID NO: 55474 - protein, 7 aa, Artificial sequence
  Protein classification predicting sequence
VDGREIY

SEQ ID NO: 55475 - protein, 12 aa, Artificial sequence
  Protein classification predicting sequence
VDKRESYTKEDL

SEQ ID NO: 55476 - protein, 6 aa, Artificial sequence
  Protein classification predicting sequence
AKKVTY

SEQ ID NO: 55477 - protein, 6 aa, Artificial sequence
  Protein classification predicting sequence
FYGYHG

SEQ ID NO: 55478 - protein, 8 aa, Artificial sequence
  Protein classification predicting sequence
EHLAERIA

SEQ ID NO: 55479 - protein, 33 aa, Artificial sequence
  Protein classification predicting sequence
YNRVMETKVRITKENPPIPGHYDGVGIEIVREN

SEQ ID NO: 55480 - protein, 6 aa, Artificial sequence
  Protein classification predicting sequence
KENPPI

SEQ ID NO: 55481 - protein, 6 aa, Artificial sequence
  Protein classification predicting sequence
DTVHYG

SEQ ID NO: 55482 - protein, 11 aa, Artificial sequence
  Protein classification predicting sequence
VFDSVRQLVEG

SEQ ID NO: 55483 - protein, 8 aa, Artificial sequence
  Protein classification predicting sequence
RFYGYHGA

SEQ ID NO: 55484 - protein, 26 aa, Artificial sequence
  Protein classification predicting sequence
KEEQTLGQIFLVDLELSVDLQAASLS

SEQ ID NO: 55485 - protein, 10 aa, Artificial sequence
  Protein classification predicting sequence
KIGRTHTQDA

SEQ ID NO: 55486 - protein, 10 aa, Artificial sequence
  Protein classification predicting sequence
TLGQEFGGYA

SEQ ID NO: 55487 - protein, 6 aa, Artificial sequence
  Protein classification predicting sequence
AQVMGN

SEQ ID NO: 55488 - protein, 10 aa, Artificial sequence
  Protein classification predicting sequence
GHFELNVFKP

SEQ ID NO: 55489 - protein, 8 aa, Artificial sequence
  Protein classification predicting sequence
FELNVFKP

SEQ ID NO: 55490 - protein, 6 aa, Artificial sequence
  Protein classification predicting sequence
SLMLVT

SEQ ID NO: 55491 - protein, 11 aa, Artificial sequence
  Protein classification predicting sequence
AQVMGNHVAVT

SEQ ID NO: 55492 - protein, 6 aa, Artificial sequence
  Protein classification predicting sequence
YWGAQT

SEQ ID NO: 55493 - protein, 8 aa, Artificial sequence
  Protein classification predicting sequence
NEVIANRA

SEQ ID NO: 55494 - protein, 9 aa, Artificial sequence
  Protein classification predicting sequence
VNMSQSSND

SEQ ID NO: 55495 - protein, 8 aa, Artificial sequence
  Protein classification predicting sequence
IVKIGRTH

SEQ ID NO: 55496 - protein, 12 aa, Artificial sequence
  Protein classification predicting sequence
LGSGPRSGLGEL

SEQ ID NO: 55497 - protein, 6 aa, Artificial sequence
  Protein classification predicting sequence
QTGSGT

SEQ ID NO: 55498 - protein, 6 aa, Artificial sequence
  Protein classification predicting sequence
MVAAQV

SEQ ID NO: 55499 - protein, 6 aa, Artificial sequence
  Protein classification predicting sequence
TGSGTQ

SEQ ID NO: 55500 - protein, 8 aa, Artificial sequence
  Protein classification predicting sequence
GGTAVGTG

SEQ ID NO: 55501 - protein, 8 aa, Artificial sequence
  Protein classification predicting sequence
FVSAPNKF

SEQ ID NO: 55502 - protein, 6 aa, Artificial sequence
  Protein classification predicting sequence
AHDALV

SEQ ID NO: 55503 - protein, 18 aa, Artificial sequence
  Protein classification predicting sequence
PENEPGSSIMPGKVNPTQ

SEQ ID NO: 55504 - protein, 7 aa, Artificial sequence
  Protein classification predicting sequence
KPLIIHN

SEQ ID NO: 55505 - protein, 8 aa, Artificial sequence
  Protein classification predicting sequence
NMNVNEVI

SEQ ID NO: 55506 - protein, 6 aa, Artificial sequence
  Protein classification predicting sequence
QVMGND

SEQ ID NO: 55507 - protein, 14 aa, Artificial sequence
  Protein classification predicting sequence
HIGYDKAAEIAKKA

SEQ ID NO: 55508 - protein, 7 aa, Artificial sequence
  Protein classification predicting sequence
WVRPEQM

SEQ ID NO: 55509 - protein, 7 aa, Artificial sequence
  Protein classification predicting sequence
GFAEKVA

SEQ ID NO: 55510 - protein, 25 aa, Artificial sequence
  Protein classification predicting sequence
GLGELSLPENEPGSSIMPGKVNPTQ

SEQ ID NO: 55511 - protein, 7 aa, Artificial sequence
  Protein classification predicting sequence
VPADKLW

SEQ ID NO: 55512 - protein, 7 aa, Artificial sequence
  Protein classification predicting sequence
LMKIAND

SEQ ID NO: 55513 - protein, 16 aa, Artificial sequence
  Protein classification predicting sequence
LMKIANDVRWLASGPR

SEQ ID NO: 55514 - protein, 22 aa, Artificial sequence
  Protein classification predicting sequence
LMKIANDVRWLASGPRSGLGEI

SEQ ID NO: 55515 - protein, 16 aa, Artificial sequence
  Protein classification predicting sequence
NEPGSSIMPGKVNPTQ

SEQ ID NO: 55516 - protein, 10 aa, Artificial sequence
  Protein classification predicting sequence
FELNVFKPVI

SEQ ID NO: 55517 - protein, 14 aa, Artificial sequence
  Protein classification predicting sequence
SLMLVTALNPHIGY

SEQ ID NO: 55518 - protein, 8 aa, Artificial sequence
  Protein classification predicting sequence
WGAQTQRS

SEQ ID NO: 55519 - protein, 16 aa, Artificial sequence
  Protein classification predicting sequence
GRTHLQDATPLTLGQE

SEQ ID NO: 55520 - protein, 7 aa, Artificial sequence
  Protein classification predicting sequence
KIANDIR

SEQ ID NO: 55521 - protein, 9 aa, Artificial sequence
  Protein classification predicting sequence
SLMLVTALN

SEQ ID NO: 55522 - protein, 11 aa, Artificial sequence
  Protein classification predicting sequence
LAIGGTAVGTG

SEQ ID NO: 55523 - protein, 19 aa, Artificial sequence
  Protein classification predicting sequence
LAIGGTAVGTGINAHPEFG

SEQ ID NO: 55524 - protein, 6 aa, Artificial sequence
  Protein classification predicting sequence
YNFLQS

SEQ ID NO: 55525 - protein, 7 aa, Artificial sequence
  Protein classification predicting sequence
ISTEKMP

SEQ ID NO: 55526 - protein, 6 aa, Artificial sequence
  Protein classification predicting sequence
HIGYDK

SEQ ID NO: 55527 - protein, 6 aa, Artificial sequence
  Protein classification predicting sequence
AAAKVN

SEQ ID NO: 55528 - protein, 9 aa, Artificial sequence
  Protein classification predicting sequence
GIEPNRERI

SEQ ID NO: 55529 - protein, 7 aa, Artificial sequence
  Protein classification predicting sequence
IGYDNAA

SEQ ID NO: 55530 - protein, 7 aa, Artificial sequence
  Protein classification predicting sequence
KVPNDKY

SEQ ID NO: 55531 - protein, 19 aa, Artificial sequence
  Protein classification predicting sequence
IPENEPGSSIMPGKVNPTQ

SEQ ID NO: 55532 - protein, 21 aa, Artificial sequence
  Protein classification predicting sequence
IPENEPGSSIMPGKVNPTQCE

SEQ ID NO: 55533 - protein, 11 aa, Artificial sequence
  Protein classification predicting sequence
TMVAVQVMGND

SEQ ID NO: 55534 - protein, 6 aa, Artificial sequence
  Protein classification predicting sequence
GIEPNR

SEQ ID NO: 55535 - protein, 7 aa, Artificial sequence
  Protein classification predicting sequence
NKFEALA

SEQ ID NO: 55536 - protein, 6 aa, Artificial sequence
  Protein classification predicting sequence
NFLQSV

SEQ ID NO: 55537 - protein, 8 aa, Artificial sequence
  Protein classification predicting sequence
NFLQSVRL

SEQ ID NO: 55538 - protein, 10 aa, Artificial sequence
  Protein classification predicting sequence
PVLGYDKCSK

SEQ ID NO: 55539 - protein, 14 aa, Artificial sequence
  Protein classification predicting sequence
HPNDHVNKSQSSND

SEQ ID NO: 55540 - protein, 9 aa, Artificial sequence
  Protein classification predicting sequence
VNKSQSSND

SEQ ID NO: 55541 - protein, 6 aa, Artificial sequence
  Protein classification predicting sequence
KPVIIY

SEQ ID NO: 55542 - protein, 8 aa, Artificial sequence
  Protein classification predicting sequence
SLMLVTAL

SEQ ID NO: 55543 - protein, 8 aa, Artificial sequence
  Protein classification predicting sequence
LALGYLSE

SEQ ID NO: 55544 - protein, 7 aa, Artificial sequence
  Protein classification predicting sequence
LAIGGTA

SEQ ID NO: 55545 - protein, 7 aa, Artificial sequence
  Protein classification predicting sequence
HPNDDVN

SEQ ID NO: 55546 - protein, 6 aa, Artificial sequence
  Protein classification predicting sequence
FPTAMH

SEQ ID NO: 55547 - protein, 9 aa, Artificial sequence
  Protein classification predicting sequence
SGPRSGLGE

SEQ ID NO: 55548 - protein, 7 aa, Artificial sequence
  Protein classification predicting sequence
TMLCCQV

SEQ ID NO: 55549 - protein, 9 aa, Artificial sequence
  Protein classification predicting sequence
EAALALGHL

SEQ ID NO: 55550 - protein, 10 aa, Artificial sequence
  Protein classification predicting sequence
QSSNDTFPTA

SEQ ID NO: 55551 - protein, 8 aa, Artificial sequence
  Protein classification predicting sequence
GRTHLMDA

SEQ ID NO: 55552 - protein, 9 aa, Artificial sequence
  Protein classification predicting sequence
GKLNDHFPL

SEQ ID NO: 55553 - protein, 12 aa, Artificial sequence
  Protein classification predicting sequence
WQTGSGTQTNMN

SEQ ID NO: 55554 - protein, 7 aa, Artificial sequence
  Protein classification predicting sequence
SGYVAQL

SEQ ID NO: 55555 - protein, 16 aa, Artificial sequence
  Protein classification predicting sequence
LALGGTAVGTGLNTHP

SEQ ID NO: 55556 - protein, 9 aa, Artificial sequence
  Protein classification predicting sequence
LMKIANDIR

SEQ ID NO: 55557 - protein, 6 aa, Artificial sequence
  Protein classification predicting sequence
EAMTMV

SEQ ID NO: 55558 - protein, 6 aa, Artificial sequence
  Protein classification predicting sequence
QSIYLL

SEQ ID NO: 55559 - protein, 6 aa, Artificial sequence
  Protein classification predicting sequence
HFPLVV

SEQ ID NO: 55560 - protein, 11 aa, Artificial sequence
  Protein classification predicting sequence
QTGSGTQSNMN

SEQ ID NO: 55561 - protein, 8 aa, Artificial sequence
  Protein classification predicting sequence
VHPNDHVN

SEQ ID NO: 55562 - protein, 10 aa, Artificial sequence
  Protein classification predicting sequence
GRTHLQDATP

SEQ ID NO: 55563 - protein, 7 aa, Artificial sequence
  Protein classification predicting sequence
VAQLDYA

SEQ ID NO: 55564 - protein, 7 aa, Artificial sequence
  Protein classification predicting sequence
NAHPKFG

SEQ ID NO: 55565 - protein, 14 aa, Artificial sequence
  Protein classification predicting sequence
WVRPEQMVGSMKAG

SEQ ID NO: 55566 - protein, 6 aa, Artificial sequence
  Protein classification predicting sequence
AQTERS

SEQ ID NO: 55567 - protein, 12 aa, Artificial sequence
  Protein classification predicting sequence
WQTGSGTQSNMN

SEQ ID NO: 55568 - protein, 7 aa, Artificial sequence
  Protein classification predicting sequence
ENFPISG

SEQ ID NO: 55569 - protein, 18 aa, Artificial sequence
  Protein classification predicting sequence
ELALGGTAVGTGLNTHPE

SEQ ID NO: 55570 - protein, 6 aa, Artificial sequence
  Protein classification predicting sequence
LASGPR

SEQ ID NO: 55571 - protein, 12 aa, Artificial sequence
  Protein classification predicting sequence
PGSSIMPGKINP

SEQ ID NO: 55572 - protein, 7 aa, Artificial sequence
  Protein classification predicting sequence
GIEPNRE

SEQ ID NO: 55573 - protein, 7 aa, Artificial sequence
  Protein classification predicting sequence
LDEHFPL

SEQ ID NO: 55574 - protein, 14 aa, Artificial sequence
  Protein classification predicting sequence
PLTLGQEFSGYVQQ

SEQ ID NO: 55575 - protein, 22 aa, Artificial sequence
  Protein classification predicting sequence
EISIPENEPGSSIMPGKVNPTQ

SEQ ID NO: 55576 - protein, 12 aa, Artificial sequence
  Protein classification predicting sequence
GGASGNFELNVF

SEQ ID NO: 55577 - protein, 6 aa, Artificial sequence
  Protein classification predicting sequence
FELNVF

SEQ ID NO: 55578 - protein, 7 aa, Artificial sequence
  Protein classification predicting sequence
EQFDQWV

SEQ ID NO: 55579 - protein, 17 aa, Artificial sequence
  Protein classification predicting sequence
VWQTGSGTQSNMNVNEV

SEQ ID NO: 55580 - protein, 19 aa, Artificial sequence
  Protein classification predicting sequence
NEPGSSIMPGKVNPTQCEA

SEQ ID NO: 55581 - protein, 9 aa, Artificial sequence
  Protein classification predicting sequence
SQGNFELNV

SEQ ID NO: 55582 - protein, 15 aa, Artificial sequence
  Protein classification predicting sequence
EPGSSIMPGKVNPTQ

SEQ ID NO: 55583 - protein, 7 aa, Artificial sequence
  Protein classification predicting sequence
DASVSFT

SEQ ID NO: 55584 - protein, 12 aa, Artificial sequence
  Protein classification predicting sequence
IAKTAHKNGTTL

SEQ ID NO: 55585 - protein, 10 aa, Artificial sequence
  Protein classification predicting sequence
RTEKDTFGPI

SEQ ID NO: 55586 - protein, 11 aa, Artificial sequence
  Protein classification predicting sequence
AADEVLAGQHD

SEQ ID NO: 55587 - protein, 13 aa, Artificial sequence
  Protein classification predicting sequence
FPLSVWQTGSGTQ

SEQ ID NO: 55588 - protein, 14 aa, Artificial sequence
  Protein classification predicting sequence
NEVLANRASELLGG

SEQ ID NO: 55589 - protein, 18 aa, Artificial sequence
  Protein classification predicting sequence
NEVLANRASELLGGERGE

SEQ ID NO: 55590 - protein, 8 aa, Artificial sequence
  Protein classification predicting sequence
HPNDDVNK

SEQ ID NO: 55591 - protein, 5 aa, Artificial sequence
  Protein classification predicting sequence
FPTAM

SEQ ID NO: 55592 - protein, 10 aa, Artificial sequence
  Protein classification predicting sequence
GGTAVGTGLN

SEQ ID NO: 55593 - protein, 7 aa, Artificial sequence
  Protein classification predicting sequence
GGASGNF

SEQ ID NO: 55594 - protein, 6 aa, Artificial sequence
  Protein classification predicting sequence
LNVFKP

SEQ ID NO: 55595 - protein, 6 aa, Artificial sequence
  Protein classification predicting sequence
EHDTMG

SEQ ID NO: 55596 - protein, 7 aa, Artificial sequence
  Protein classification predicting sequence
GNFELNV

SEQ ID NO: 55597 - protein, 7 aa, Artificial sequence
  Protein classification predicting sequence
CAVGIEP

SEQ ID NO: 55598 - protein, 8 aa, Artificial sequence
  Protein classification predicting sequence
AADEVLAG

SEQ ID NO: 55599 - protein, 13 aa, Artificial sequence
  Protein classification predicting sequence
FPLVVWQTGSGTQ

SEQ ID NO: 55600 - protein, 10 aa, Artificial sequence
  Protein classification predicting sequence
QVMGNDVAIN

SEQ ID NO: 55601 - protein, 6 aa, Artificial sequence
  Protein classification predicting sequence
GNFELN

SEQ ID NO: 55602 - protein, 8 aa, Artificial sequence
  Protein classification predicting sequence
HIGYDKAA

SEQ ID NO: 55603 - protein, 15 aa, Artificial sequence
  Protein classification predicting sequence
SLMLVTALNPHIGYE

SEQ ID NO: 55604 - protein, 7 aa, Artificial sequence
  Protein classification predicting sequence
VPADKYW

SEQ ID NO: 55605 - protein, 6 aa, Artificial sequence
  Protein classification predicting sequence
EKDSMG

SEQ ID NO: 55606 - protein, 9 aa, Artificial sequence
  Protein classification predicting sequence
FPTAMHVAA

SEQ ID NO: 55607 - protein, 12 aa, Artificial sequence
  Protein classification predicting sequence
FVTAPNKFEALA

SEQ ID NO: 55608 - protein, 6 aa, Artificial sequence
  Protein classification predicting sequence
MKIAND

SEQ ID NO: 55609 - protein, 37 aa, Artificial sequence
  Protein classification predicting sequence
QLLNESLMLVTALNTHIGYDKAAEIAKKAHKEGLTLK

SEQ ID NO: 55610 - protein, 7 aa, Artificial sequence
  Protein classification predicting sequence
PLTLGQE

SEQ ID NO: 55611 - protein, 14 aa, Artificial sequence
  Protein classification predicting sequence
NEPGSSIMPGKVNP

SEQ ID NO: 55612 - protein, 22 aa, Artificial sequence
  Protein classification predicting sequence
NEPGSSIMPGKVNPTQCEALSM

SEQ ID NO: 55613 - protein, 7 aa, Artificial sequence
  Protein classification predicting sequence
IGYEKAA

SEQ ID NO: 55614 - protein, 6 aa, Artificial sequence
  Protein classification predicting sequence
GKERMP

SEQ ID NO: 55615 - protein, 12 aa, Artificial sequence
  Protein classification predicting sequence
GGTAVGTGLNAP

SEQ ID NO: 55616 - protein, 8 aa, Artificial sequence
  Protein classification predicting sequence
IGFAASQG

SEQ ID NO: 55617 - protein, 8 aa, Artificial sequence
  Protein classification predicting sequence
LNVFKPVI

SEQ ID NO: 55618 - protein, 13 aa, Artificial sequence
  Protein classification predicting sequence
VWQTGSGTQSNMN

SEQ ID NO: 55619 - protein, 5 aa, Artificial sequence
  Protein classification predicting sequence
PNKFE

SEQ ID NO: 55620 - protein, 7 aa, Artificial sequence
  Protein classification predicting sequence
LHSARLL

SEQ ID NO: 55621 - protein, 7 aa, Artificial sequence
  Protein classification predicting sequence
NAAKIAK

SEQ ID NO: 55622 - protein, 6 aa, Artificial sequence
  Protein classification predicting sequence
VRPEDM

SEQ ID NO: 55623 - protein, 7 aa, Artificial sequence
  Protein classification predicting sequence
DRYWGAQ

SEQ ID NO: 55624 - protein, 6 aa, Artificial sequence
  Protein classification predicting sequence
SNRAIE

SEQ ID NO: 55625 - protein, 10 aa, Artificial sequence
  Protein classification predicting sequence
GGTAVGTGIN

SEQ ID NO: 55626 - protein, 7 aa, Artificial sequence
  Protein classification predicting sequence
ELNVFKP

SEQ ID NO: 55627 - protein, 17 aa, Artificial sequence
  Protein classification predicting sequence
SLIHALALTKRAAAKVN

SEQ ID NO: 55628 - protein, 23 aa, Artificial sequence
  Protein classification predicting sequence
WQTGSGTQSNMNMNEVLANRASE

SEQ ID NO: 55629 - protein, 30 aa, Artificial sequence
  Protein classification predicting sequence
DEFPLAIWQTGSGTQSNMNMNEVLANRASE

SEQ ID NO: 55630 - protein, 40 aa, Artificial sequence
  Protein classification predicting sequence
LGGVRGMERKVHPNDDVNKSQSSNDVFPTAMHVAALLALR

SEQ ID NO: 55631 - protein, 36 aa, Artificial sequence
  Protein classification predicting sequence
AFADIVKIGRTHLQDATPLTLGQEISGWVAMLEHNL

SEQ ID NO: 55632 - protein, 30 aa, Artificial sequence
  Protein classification predicting sequence
SLPHVAELALGGTAVGTGLNTHPEYARRVA

SEQ ID NO: 55633 - protein, 54 aa, Artificial sequence
  Protein classification predicting sequence
APFVTAPNKFEALATCDALVQAHGALKGLAASLMKIANDVRWLASGPRCGIGEI

SEQ ID NO: 55634 - protein, 27 aa, Artificial sequence
  Protein classification predicting sequence
TMLCCQVMGNDVAINMGGASGNFELNV

SEQ ID NO: 55635 - protein, 8 aa, Artificial sequence
  Protein classification predicting sequence
VRLLADGM

SEQ ID NO: 55636 - protein, 16 aa, Artificial sequence
  Protein classification predicting sequence
VRLLADGMESFNKHCA

SEQ ID NO: 55637 - protein, 13 aa, Artificial sequence
  Protein classification predicting sequence
SQSSNDTFPTAMH

SEQ ID NO: 55638 - protein, 42 aa, Artificial sequence
  Protein classification predicting sequence
SQSSNDTFPTAMHVALYQEVETKLEPALKLLRNTLKEKEDKF

SEQ ID NO: 55639 - protein, 20 aa, Artificial sequence
  Protein classification predicting sequence
DKYWGAQTERSKRNFPVGKE

SEQ ID NO: 55640 - protein, 8 aa, Artificial sequence
  Protein classification predicting sequence
YGFAQLKR

SEQ ID NO: 55641 - protein, 16 aa, Artificial sequence
  Protein classification predicting sequence
WQTGSGTQSNMNVNEV

SEQ ID NO: 55642 - protein, 8 aa, Artificial sequence
  Protein classification predicting sequence
IHPNDDVN

SEQ ID NO: 55643 - protein, 10 aa, Artificial sequence
  Protein classification predicting sequence
EVETKLEPAL

SEQ ID NO: 55644 - protein, 12 aa, Artificial sequence
  Protein classification predicting sequence
FVSSENKFHALT

SEQ ID NO: 55645 - protein, 7 aa, Artificial sequence
  Protein classification predicting sequence
NKFHALT

SEQ ID NO: 55646 - protein, 11 aa, Artificial sequence
  Protein classification predicting sequence
VQLHGTLKALA

SEQ ID NO: 55647 - protein, 8 aa, Artificial sequence
  Protein classification predicting sequence
RWLASGPR

SEQ ID NO: 55648 - protein, 19 aa, Artificial sequence
  Protein classification predicting sequence
KPVIMHNTLQSIYLLADGM

SEQ ID NO: 55649 - protein, 6 aa, Artificial sequence
  Protein classification predicting sequence
LLADGM

SEQ ID NO: 55650 - protein, 22 aa, Artificial sequence
  Protein classification predicting sequence
WQTGSGTQSNMNVNEVVSYVAN

SEQ ID NO: 55651 - protein, 29 aa, Artificial sequence
  Protein classification predicting sequence
SIIKIGRTHLQDATPIKLGQEISGWRYML

SEQ ID NO: 55652 - protein, 29 aa, Artificial sequence
  Protein classification predicting sequence
LSESKKHILNLAIGGTAVGTGINAHPEFG

SEQ ID NO: 55653 - protein, 50 aa, Artificial sequence
  Protein classification predicting sequence
RWLASGPRAGLAEISIPENEPGSSIMPGKVNPTQCEMLTMVAVQVMGNDT

SEQ ID NO: 55654 - protein, 41 aa, Artificial sequence
  Protein classification predicting sequence
NYLNQSLMLVTALNPHIGYEKAAQIAKKAHKEGLTLKESAI

SEQ ID NO: 55655 - protein, 6 aa, Artificial sequence
  Protein classification predicting sequence
EHDSMG

SEQ ID NO: 55656 - protein, 14 aa, Artificial sequence
  Protein classification predicting sequence
DVFQTGSGTSSNMN

SEQ ID NO: 55657 - protein, 13 aa, Artificial sequence
  Protein classification predicting sequence
FPLAIWQTGSGTQ

SEQ ID NO: 55658 - protein, 6 aa, Artificial sequence
  Protein classification predicting sequence
IANDIR

SEQ ID NO: 55659 - protein, 7 aa, Artificial sequence
  Protein classification predicting sequence
GGELGSK

SEQ ID NO: 55660 - protein, 9 aa, Artificial sequence
  Protein classification predicting sequence
WGAQTQRSL

SEQ ID NO: 55661 - protein, 11 aa, Artificial sequence
  Protein classification predicting sequence
QTGSGTQTNMN

SEQ ID NO: 55662 - protein, 11 aa, Artificial sequence
  Protein classification predicting sequence
QSSNDTFPTAM

SEQ ID NO: 55663 - protein, 7 aa, Artificial sequence
  Protein classification predicting sequence
RWLASGP

SEQ ID NO: 55664 - protein, 7 aa, Artificial sequence
  Protein classification predicting sequence
LNVYKPV

SEQ ID NO: 55665 - protein, 9 aa, Artificial sequence
  Protein classification predicting sequence
IGYDKAAEI

SEQ ID NO: 55666 - protein, 8 aa, Artificial sequence
  Protein classification predicting sequence
IIKIGRTH

SEQ ID NO: 55667 - protein, 6 aa, Artificial sequence
  Protein classification predicting sequence
NDIRWL

SEQ ID NO: 55668 - protein, 9 aa, Artificial sequence
  Protein classification predicting sequence
SGPRCGIGE

SEQ ID NO: 55669 - protein, 7 aa, Artificial sequence
  Protein classification predicting sequence
WGAQTQR

SEQ ID NO: 55670 - protein, 8 aa, Artificial sequence
  Protein classification predicting sequence
LLPALKHL

SEQ ID NO: 55671 - protein, 9 aa, Artificial sequence
  Protein classification predicting sequence
AIMRAADEV

SEQ ID NO: 55672 - protein, 9 aa, Artificial sequence
  Protein classification predicting sequence
DTFGELKVP

SEQ ID NO: 55673 - protein, 15 aa, Artificial sequence
  Protein classification predicting sequence
DKYYGAQTVRSTMNF

SEQ ID NO: 55674 - protein, 9 aa, Artificial sequence
  Protein classification predicting sequence
AIMKAADEV

SEQ ID NO: 55675 - protein, 15 aa, Artificial sequence
  Protein classification predicting sequence
DHFPLVVWQTGSGTQ

SEQ ID NO: 55676 - protein, 9 aa, Artificial sequence
  Protein classification predicting sequence
PVHPNDHVN

SEQ ID NO: 55677 - protein, 25 aa, Artificial sequence
  Protein classification predicting sequence
YELAAGGTAVGTGLNTRIGFAEKVA

SEQ ID NO: 55678 - protein, 18 aa, Artificial sequence
  Protein classification predicting sequence
NKFEALAAHDALVELSGA

SEQ ID NO: 55679 - protein, 8 aa, Artificial sequence
  Protein classification predicting sequence
MKIANDIR

SEQ ID NO: 55680 - protein, 6 aa, Artificial sequence
  Protein classification predicting sequence
NCVVGI

SEQ ID NO: 55681 - protein, 10 aa, Artificial sequence
  Protein classification predicting sequence
ANTERINKLM

SEQ ID NO: 55682 - protein, 10 aa, Artificial sequence
  Protein classification predicting sequence
ESLMLVTALN

SEQ ID NO: 55683 - protein, 14 aa, Artificial sequence
  Protein classification predicting sequence
AFGILKRAAAEVNQ

SEQ ID NO: 55684 - protein, 7 aa, Artificial sequence
  Protein classification predicting sequence
IKIGRTH

SEQ ID NO: 55685 - protein, 11 aa, Artificial sequence
  Protein classification predicting sequence
IKIGRTHTQDA

SEQ ID NO: 55686 - protein, 21 aa, Artificial sequence
  Protein classification predicting sequence
PENEPGSSIMPGKVNPTQCEA

SEQ ID NO: 55687 - protein, 6 aa, Artificial sequence
  Protein classification predicting sequence
EALTMV

SEQ ID NO: 55688 - protein, 46 aa, Artificial sequence
  Protein classification predicting sequence
TMVAAQVMGNHVAVTVGGSNGHFELNVFKPMMIKNVLHSARLLGDA

SEQ ID NO: 55689 - protein, 56 aa, Artificial sequence
  Protein classification predicting sequence
VSFTENCVVGIQANTERINKLMNESLMLVTALNPHIGYDKAAKIAKTAHKNGSTLK

SEQ ID NO: 55690 - protein, 16 aa, Artificial sequence
  Protein classification predicting sequence
ELGYLTAEQFDEWVKP

SEQ ID NO: 55691 - protein, 5 aa, Artificial sequence
  Protein classification predicting sequence
QVMGN

SEQ ID NO: 55692 - protein, 8 aa, Artificial sequence
  Protein classification predicting sequence
AAQEVIDG

SEQ ID NO: 55693 - protein, 10 aa, Artificial sequence
  Protein classification predicting sequence
SQSSNDTFPT

SEQ ID NO: 55694 - protein, 8 aa, Artificial sequence
  Protein classification predicting sequence
LGQEFSGY

SEQ ID NO: 55695 - protein, 8 aa, Artificial sequence
  Protein classification predicting sequence
GLGELILP

SEQ ID NO: 55696 - protein, 7 aa, Artificial sequence
  Protein classification predicting sequence
AKIAKTA

SEQ ID NO: 55697 - protein, 10 aa, Artificial sequence
  Protein classification predicting sequence
NEVISNRAIE

SEQ ID NO: 55698 - protein, 11 aa, Artificial sequence
  Protein classification predicting sequence
PLTLGQEFSGY

SEQ ID NO: 55699 - protein, 6 aa, Artificial sequence
  Protein classification predicting sequence
SGPRCG

SEQ ID NO: 55700 - protein, 7 aa, Artificial sequence
  Protein classification predicting sequence
LVIRNYG

SEQ ID NO: 55701 - protein, 7 aa, Artificial sequence
  Protein classification predicting sequence
PRYCLFG

SEQ ID NO: 55702 - protein, 14 aa, Artificial sequence
  Protein classification predicting sequence
LDSLHYFIDHVVYK

SEQ ID NO: 55703 - protein, 12 aa, Artificial sequence
  Protein classification predicting sequence
CPFSLLAPGQVP

SEQ ID NO: 55704 - protein, 8 aa, Artificial sequence
  Protein classification predicting sequence
VYYFFPKR

SEQ ID NO: 55705 - protein, 14 aa, Artificial sequence
  Protein classification predicting sequence
QTFSGIMTMLNMQF

SEQ ID NO: 55706 - protein, 15 aa, Artificial sequence
  Protein classification predicting sequence
KKSSRVMDLKGQMIY

SEQ ID NO: 55707 - protein, 8 aa, Artificial sequence
  Protein classification predicting sequence
MPRYCLFG

SEQ ID NO: 55708 - protein, 10 aa, Artificial sequence
  Protein classification predicting sequence
ILFLGSPCVD

SEQ ID NO: 55709 - protein, 7 aa, Artificial sequence
  Protein classification predicting sequence
LSDIPIH

SEQ ID NO: 55710 - protein, 8 aa, Artificial sequence
  Protein classification predicting sequence
AQDGLKKR

SEQ ID NO: 55711 - protein, 15 aa, Artificial sequence
  Protein classification predicting sequence
VTMLFSDIVGFTAIC

SEQ ID NO: 55712 - protein, 6 aa, Artificial sequence
  Protein classification predicting sequence
LYTRFD

SEQ ID NO: 55713 - protein, 12 aa, Artificial sequence
  Protein classification predicting sequence
IALMALKMMELS

SEQ ID NO: 55714 - protein, 9 aa, Artificial sequence
  Protein classification predicting sequence
MPRYCLFGN

SEQ ID NO: 55715 - protein, 14 aa, Artificial sequence
  Protein classification predicting sequence
MPRYCLFGNNVTLA

SEQ ID NO: 55716 - protein, 8 aa, Artificial sequence
  Protein classification predicting sequence
PRSREELP

SEQ ID NO: 55717 - protein, 7 aa, Artificial sequence
  Protein classification predicting sequence
VAQQLWQ

SEQ ID NO: 55718 - protein, 9 aa, Artificial sequence
  Protein classification predicting sequence
FKICYEEDE

SEQ ID NO: 55719 - protein, 29 aa, Artificial sequence
  Protein classification predicting sequence
ILGVVGGTLKDFLNSFSTLLKQSSHCQEA

SEQ ID NO: 55720 - protein, 7 aa, Artificial sequence
  Protein classification predicting sequence
LKGQMIY

SEQ ID NO: 55721 - protein, 9 aa, Artificial sequence
  Protein classification predicting sequence
RGLYLSDIP

SEQ ID NO: 55722 - protein, 6 aa, Artificial sequence
  Protein classification predicting sequence
VYKVET

SEQ ID NO: 55723 - protein, 12 aa, Artificial sequence
  Protein classification predicting sequence
TRDLILLNQQRL

SEQ ID NO: 55724 - protein, 10 aa, Artificial sequence
  Protein classification predicting sequence
GEQARAQDGL

SEQ ID NO: 55725 - protein, 8 aa, Artificial sequence
  Protein classification predicting sequence
IKMRIGLH

SEQ ID NO: 55726 - protein, 7 aa, Artificial sequence
  Protein classification predicting sequence
FAAFVSS

SEQ ID NO: 55727 - protein, 8 aa, Artificial sequence
  Protein classification predicting sequence
AHNHACGC

SEQ ID NO: 55728 - protein, 22 aa, Artificial sequence
  Protein classification predicting sequence
TGQDGSYLAEFLLEKGYEVHGI

SEQ ID NO: 55729 - protein, 7 aa, Artificial sequence
  Protein classification predicting sequence
EYTADVD

SEQ ID NO: 55730 - protein, 18 aa, Artificial sequence
  Protein classification predicting sequence
VQEIPQKETTPFYPRSPY

SEQ ID NO: 55731 - protein, 8 aa, Artificial sequence
  Protein classification predicting sequence
AKLYAYWI

SEQ ID NO: 55732 - protein, 10 aa, Artificial sequence
  Protein classification predicting sequence
RDWGHAKDYV

SEQ ID NO: 55733 - protein, 9 aa, Artificial sequence
  Protein classification predicting sequence
PEDFVIATG

SEQ ID NO: 55734 - protein, 9 aa, Artificial sequence
  Protein classification predicting sequence
GILFNHESP

SEQ ID NO: 55735 - protein, 7 aa, Artificial sequence
  Protein classification predicting sequence
DAKRDWG

SEQ ID NO: 55736 - protein, 6 aa, Artificial sequence
  Protein classification predicting sequence
FVTRKI

SEQ ID NO: 55737 - protein, 7 aa, Artificial sequence
  Protein classification predicting sequence
KGYEVHG

SEQ ID NO: 55738 - protein, 6 aa, Artificial sequence
  Protein classification predicting sequence
CFCEYT

SEQ ID NO: 55739 - protein, 7 aa, Artificial sequence
  Protein classification predicting sequence
YSAKFAS

SEQ ID NO: 55740 - protein, 7 aa, Artificial sequence
  Protein classification predicting sequence
RAAFQET

SEQ ID NO: 55741 - protein, 7 aa, Artificial sequence
  Protein classification predicting sequence
VSGEYSM

SEQ ID NO: 55742 - protein, 6 aa, Artificial sequence
  Protein classification predicting sequence
VAPSDM

SEQ ID NO: 55743 - protein, 8 aa, Artificial sequence
  Protein classification predicting sequence
TDHGHCGV

SEQ ID NO: 55744 - protein, 6 aa, Artificial sequence
  Protein classification predicting sequence
HGHCGV

SEQ ID NO: 55745 - protein, 20 aa, Artificial sequence
  Protein classification predicting sequence
FGDRKTYQMDPANRLEALRE

SEQ ID NO: 55746 - protein, 11 aa, Artificial sequence
  Protein classification predicting sequence
IVKPALSYLDI

SEQ ID NO: 55747 - protein, 6 aa, Artificial sequence
  Protein classification predicting sequence
YLDIIR

SEQ ID NO: 55748 - protein, 6 aa, Artificial sequence
  Protein classification predicting sequence
ILTYFA

SEQ ID NO: 55749 - protein, 6 aa, Artificial sequence
  Protein classification predicting sequence
IYPIFV

SEQ ID NO: 55750 - protein, 7 aa, Artificial sequence
  Protein classification predicting sequence
NIPIMSY

SEQ ID NO: 55751 - protein, 6 aa, Artificial sequence
  Protein classification predicting sequence
FYGPFR

SEQ ID NO: 55752 - protein, 14 aa, Artificial sequence
  Protein classification predicting sequence
FGDRKTYQMDPANR

SEQ ID NO: 55753 - protein, 9 aa, Artificial sequence
  Protein classification predicting sequence
KAAAQNGWI

SEQ ID NO: 55754 - protein, 9 aa, Artificial sequence
  Protein classification predicting sequence
YTDVALDPY

SEQ ID NO: 55755 - protein, 7 aa, Artificial sequence
  Protein classification predicting sequence
YTAKYAS

SEQ ID NO: 55756 - protein, 7 aa, Artificial sequence
  Protein classification predicting sequence
YGPFRDA

SEQ ID NO: 55757 - protein, 10 aa, Artificial sequence
  Protein classification predicting sequence
MVKPGMPYLD

SEQ ID NO: 55758 - protein, 8 aa, Artificial sequence
  Protein classification predicting sequence
PSDMMDGR

SEQ ID NO: 55759 - protein, 10 aa, Artificial sequence
  Protein classification predicting sequence
EGADIVMVKP

SEQ ID NO: 55760 - protein, 7 aa, Artificial sequence
  Protein classification predicting sequence
VSGEYAM

SEQ ID NO: 55761 - protein, 8 aa, Artificial sequence
  Protein classification predicting sequence
GDRKSYQM

SEQ ID NO: 55762 - protein, 7 aa, Artificial sequence
  Protein classification predicting sequence
YNVSGEY

SEQ ID NO: 55763 - protein, 10 aa, Artificial sequence
  Protein classification predicting sequence
PLFIHEGEED

SEQ ID NO: 55764 - protein, 19 aa, Artificial sequence
  Protein classification predicting sequence
YTDVALDPYSSDGHDGIVR

SEQ ID NO: 55765 - protein, 7 aa, Artificial sequence
  Protein classification predicting sequence
QLCKQAV

SEQ ID NO: 55766 - protein, 9 aa, Artificial sequence
  Protein classification predicting sequence
AGADVVSPS

SEQ ID NO: 55767 - protein, 6 aa, Artificial sequence
  Protein classification predicting sequence
MMDGRV

SEQ ID NO: 55768 - protein, 45 aa, Artificial sequence
  Protein classification predicting sequence
VSIMSYTAKYASSFYGPFREALDSNPRFGDKKTYQMNPANYREAL

SEQ ID NO: 55769 - protein, 7 aa, Artificial sequence
  Protein classification predicting sequence
LIYPIFV

SEQ ID NO: 55770 - protein, 10 aa, Artificial sequence
  Protein classification predicting sequence
SLPGVARYGV

SEQ ID NO: 55771 - protein, 20 aa, Artificial sequence
  Protein classification predicting sequence
CLCPYTSHGHCGLLSENGAF

SEQ ID NO: 55772 - protein, 6 aa, Artificial sequence
  Protein classification predicting sequence
CLCEYT

SEQ ID NO: 55773 - protein, 5 aa, Artificial sequence
  Protein classification predicting sequence
HGHCG

SEQ ID NO: 55774 - protein, 8 aa, Artificial sequence
  Protein classification predicting sequence
YTSHGHCG

SEQ ID NO: 55775 - protein, 7 aa, Artificial sequence
  Protein classification predicting sequence
KYASAFY

SEQ ID NO: 55776 - protein, 7 aa, Artificial sequence
  Protein classification predicting sequence
YQMDPAN

SEQ ID NO: 55777 - protein, 10 aa, Artificial sequence
  Protein classification predicting sequence
AYNVSGEYSM

SEQ ID NO: 55778 - protein, 14 aa, Artificial sequence
  Protein classification predicting sequence
QSVLHSGYFHPLLR

SEQ ID NO: 55779 - protein, 10 aa, Artificial sequence
  Protein classification predicting sequence
LEEMLRPLVE

SEQ ID NO: 55780 - protein, 7 aa, Artificial sequence
  Protein classification predicting sequence
GSAADSE

SEQ ID NO: 55781 - protein, 7 aa, Artificial sequence
  Protein classification predicting sequence
LLRKTFP

SEQ ID NO: 55782 - protein, 9 aa, Artificial sequence
  Protein classification predicting sequence
VKPGLPYLD

SEQ ID NO: 55783 - protein, 6 aa, Artificial sequence
  Protein classification predicting sequence
IITYFA

SEQ ID NO: 55784 - protein, 7 aa, Artificial sequence
  Protein classification predicting sequence
GDRRTYQ

SEQ ID NO: 55785 - protein, 7 aa, Artificial sequence
  Protein classification predicting sequence
RRAGADI

SEQ ID NO: 55786 - protein, 23 aa, Artificial sequence
  Protein classification predicting sequence
RVSVMSYSAKFASCFYGPFRDAA

SEQ ID NO: 55787 - protein, 14 aa, Artificial sequence
  Protein classification predicting sequence
CLDEFTDHGHCGVL

SEQ ID NO: 55788 - protein, 7 aa, Artificial sequence
  Protein classification predicting sequence
HGHCGVL

SEQ ID NO: 55789 - protein, 7 aa, Artificial sequence
  Protein classification predicting sequence
YSAKYAS

SEQ ID NO: 55790 - protein, 7 aa, Artificial sequence
  Protein classification predicting sequence
TDVALDP

SEQ ID NO: 55791 - protein, 18 aa, Artificial sequence
  Protein classification predicting sequence
QSVLHSGYFHPLLRAWQT

SEQ ID NO: 55792 - protein, 14 aa, Artificial sequence
  Protein classification predicting sequence
NLIYPIFVTDVPDD

SEQ ID NO: 55793 - protein, 37 aa, Artificial sequence
  Protein classification predicting sequence
AEESRQRLAEVALAYAKAGCQVVAPSDMMDGRVEAIK

SEQ ID NO: 55794 - protein, 7 aa, Artificial sequence
  Protein classification predicting sequence
EVKDKHP

SEQ ID NO: 55795 - protein, 12 aa, Artificial sequence
  Protein classification predicting sequence
VSGEFAMLWHGA

SEQ ID NO: 55796 - protein, 8 aa, Artificial sequence
  Protein classification predicting sequence
RDVREGAD

SEQ ID NO: 55797 - protein, 8 aa, Artificial sequence
  Protein classification predicting sequence
PIGAMPGC

SEQ ID NO: 55798 - protein, 17 aa, Artificial sequence
  Protein classification predicting sequence
LDSNPRFGDKKTYQMNP

SEQ ID NO: 55799 - protein, 7 aa, Artificial sequence
  Protein classification predicting sequence
DGHDGIV

SEQ ID NO: 55800 - protein, 7 aa, Artificial sequence
  Protein classification predicting sequence
TDHGHCG

SEQ ID NO: 55801 - protein, 8 aa, Artificial sequence
  Protein classification predicting sequence
KDICRYLD

SEQ ID NO: 55802 - protein, 15 aa, Artificial sequence
  Protein classification predicting sequence
HVRKEDLIYPIFVVE

SEQ ID NO: 55803 - protein, 8 aa, Artificial sequence
  Protein classification predicting sequence
YQISLNLL

SEQ ID NO: 55804 - protein, 18 aa, Artificial sequence
  Protein classification predicting sequence
KEAYDLGIRAIMFFGVPN

SEQ ID NO: 55805 - protein, 67 aa, Artificial sequence
  Protein classification predicting sequence
DLLIVADTCLCEYTDHGHCGVIDDHTHDVDNDKSLPLLVKTAISQVEAGADIIAPSNMMDGFVAEIR

SEQ ID NO: 55806 - protein, 55 aa, Artificial sequence
  Protein classification predicting sequence
KYASSFFGPFRDAADSAPSFGDRKTYQMDPANRLEALRELESDLKEGCDMMIVKP

SEQ ID NO: 55807 - protein, 21 aa, Artificial sequence
  Protein classification predicting sequence
TNVPVVAYNVSGEYSMTKAAA

SEQ ID NO: 55808 - protein, 7 aa, Artificial sequence
  Protein classification predicting sequence
GDRKTYQ

SEQ ID NO: 55809 - protein, 10 aa, Artificial sequence
  Protein classification predicting sequence
EGADMVMVKP

SEQ ID NO: 55810 - protein, 6 aa, Artificial sequence
  Protein classification predicting sequence
SGEYSM

SEQ ID NO: 55811 - protein, 9 aa, Artificial sequence
  Protein classification predicting sequence
AGADIIAPS

SEQ ID NO: 55812 - protein, 8 aa, Artificial sequence
  Protein classification predicting sequence
KRAGADLI

SEQ ID NO: 55813 - protein, 7 aa, Artificial sequence
  Protein classification predicting sequence
PFLYNLF

SEQ ID NO: 55814 - protein, 6 aa, Artificial sequence
  Protein classification predicting sequence
WLKPYT

SEQ ID NO: 55815 - protein, 6 aa, Artificial sequence
  Protein classification predicting sequence
MHNDGI

SEQ ID NO: 55816 - protein, 16 aa, Artificial sequence
  Protein classification predicting sequence
PVGFVAEHLEVLYDND

SEQ ID NO: 55817 - protein, 44 aa, Artificial sequence
  Protein classification predicting sequence
ETADYIARGAEVANYAVGWQSAGNTPDPWIGPDVQDLTRELNEK

SEQ ID NO: 55818 - protein, 8 aa, Artificial sequence
  Protein classification predicting sequence
WTEQGSPL

SEQ ID NO: 55819 - protein, 6 aa, Artificial sequence
  Protein classification predicting sequence
LGMSYG

SEQ ID NO: 55820 - protein, 6 aa, Artificial sequence
  Protein classification predicting sequence
FQSRFG

SEQ ID NO: 55821 - protein, 7 aa, Artificial sequence
  Protein classification predicting sequence
FLHAGGE

SEQ ID NO: 55822 - protein, 8 aa, Artificial sequence
  Protein classification predicting sequence
LPLYPQFS

SEQ ID NO: 55823 - protein, 10 aa, Artificial sequence
  Protein classification predicting sequence
GLLVMAYGTP

SEQ ID NO: 55824 - protein, 6 aa, Artificial sequence
  Protein classification predicting sequence
YLGLKH

SEQ ID NO: 55825 - protein, 14 aa, Artificial sequence
  Protein classification predicting sequence
FTEYEFNCYLGLKH

SEQ ID NO: 55826 - protein, 37 aa, Artificial sequence
  Protein classification predicting sequence
APFIEDAVEEMKRDGIEQAISIVLAPHYSTFSIKAYN

SEQ ID NO: 55827 - protein, 32 aa, Artificial sequence
  Protein classification predicting sequence
DLIGRYKAIGGISPLAKITKEQAHKLTDSMNN

SEQ ID NO: 55828 - protein, 6 aa, Artificial sequence
  Protein classification predicting sequence
FTEYEF

SEQ ID NO: 55829 - protein, 18 aa, Artificial sequence
  Protein classification predicting sequence
ISIVLAPHYSTFSIKAYN

SEQ ID NO: 55830 - protein, 21 aa, Artificial sequence
  Protein classification predicting sequence
QWYDEPKFISYWADQIKETFT

SEQ ID NO: 55831 - protein, 8 aa, Artificial sequence
  Protein classification predicting sequence
GPDVQDLT

SEQ ID NO: 55832 - protein, 8 aa, Artificial sequence
  Protein classification predicting sequence
GWQSAGNT

SEQ ID NO: 55833 - protein, 11 aa, Artificial sequence
  Protein classification predicting sequence
FLSDPRVVEIP

SEQ ID NO: 55834 - protein, 7 aa, Artificial sequence
  Protein classification predicting sequence
ILYGIVL

SEQ ID NO: 55835 - protein, 7 aa, Artificial sequence
  Protein classification predicting sequence
TFQSRFG

SEQ ID NO: 55836 - protein, 7 aa, Artificial sequence
  Protein classification predicting sequence
YIPALND

SEQ ID NO: 55837 - protein, 11 aa, Artificial sequence
  Protein classification predicting sequence
FSADCLETLEE

SEQ ID NO: 55838 - protein, 6 aa, Artificial sequence
  Protein classification predicting sequence
LRTYTR

SEQ ID NO: 55839 - protein, 6 aa, Artificial sequence
  Protein classification predicting sequence
PLYPQY

SEQ ID NO: 55840 - protein, 14 aa, Artificial sequence
  Protein classification predicting sequence
PLYPQYAASTTATV

SEQ ID NO: 55841 - protein, 8 aa, Artificial sequence
  Protein classification predicting sequence
TTATVNDK

SEQ ID NO: 55842 - protein, 7 aa, Artificial sequence
  Protein classification predicting sequence
TARLLRE

SEQ ID NO: 55843 - protein, 9 aa, Artificial sequence
  Protein classification predicting sequence
EEWLQPYTD

SEQ ID NO: 55844 - protein, 6 aa, Artificial sequence
  Protein classification predicting sequence
SWYKEP

SEQ ID NO: 55845 - protein, 6 aa, Artificial sequence
  Protein classification predicting sequence
SAHSLP

SEQ ID NO: 55846 - protein, 14 aa, Artificial sequence
  Protein classification predicting sequence
KKKIGLLVMAYGTP

SEQ ID NO: 55847 - protein, 10 aa, Artificial sequence
  Protein classification predicting sequence
PFIEDAVEQM

SEQ ID NO: 55848 - protein, 7 aa, Artificial sequence
  Protein classification predicting sequence
SIVLAPH

SEQ ID NO: 55849 - protein, 8 aa, Artificial sequence
  Protein classification predicting sequence
STFSVKSY

SEQ ID NO: 55850 - protein, 5 aa, Artificial sequence
  Protein classification predicting sequence
WYDEP

SEQ ID NO: 55851 - protein, 7 aa, Artificial sequence
  Protein classification predicting sequence
FIQYWVD

SEQ ID NO: 55852 - protein, 9 aa, Artificial sequence
  Protein classification predicting sequence
SAHSLPEKI

SEQ ID NO: 55853 - protein, 12 aa, Artificial sequence
  Protein classification predicting sequence
PWLGPDVQDLTR

SEQ ID NO: 55854 - protein, 7 aa, Artificial sequence
  Protein classification predicting sequence
PFIEDAV

SEQ ID NO: 55855 - protein, 8 aa, Artificial sequence
  Protein classification predicting sequence
GWQSEGNT

SEQ ID NO: 55856 - protein, 9 aa, Artificial sequence
  Protein classification predicting sequence
GPDVQDLTR

SEQ ID NO: 55857 - protein, 6 aa, Artificial sequence
  Protein classification predicting sequence
RPPMPN

SEQ ID NO: 55858 - protein, 13 aa, Artificial sequence
  Protein classification predicting sequence
GLLVMAYGTPYKE

SEQ ID NO: 55859 - protein, 29 aa, Artificial sequence
  Protein classification predicting sequence
GLLVMAYGTPYKEEDIERYYTHIRRGRKP

SEQ ID NO: 55860 - protein, 9 aa, Artificial sequence
  Protein classification predicting sequence
LQDLKDRYE

SEQ ID NO: 55861 - protein, 9 aa, Artificial sequence
  Protein classification predicting sequence
AIGGISPLA

SEQ ID NO: 55862 - protein, 7 aa, Artificial sequence
  Protein classification predicting sequence
WYDEPKF

SEQ ID NO: 55863 - protein, 12 aa, Artificial sequence
  Protein classification predicting sequence
LIVSAHSLPEKI

SEQ ID NO: 55864 - protein, 13 aa, Artificial sequence
  Protein classification predicting sequence
FVADCIETLEEIG

SEQ ID NO: 55865 - protein, 25 aa, Artificial sequence
  Protein classification predicting sequence
AFTQYPQYSCSTTGSSLNAIYRYYN

SEQ ID NO: 55866 - protein, 5 aa, Artificial sequence
  Protein classification predicting sequence
YPQYS

SEQ ID NO: 55867 - protein, 6 aa, Artificial sequence
  Protein classification predicting sequence
MRYWHP

SEQ ID NO: 55868 - protein, 7 aa, Artificial sequence
  Protein classification predicting sequence
YQSRVGP

SEQ ID NO: 55869 - protein, 10 aa, Artificial sequence
  Protein classification predicting sequence
QGEGMVKLLD

SEQ ID NO: 55870 - protein, 25 aa, Artificial sequence
  Protein classification predicting sequence
TAPHKYYIGFRYVHPLTEEAIEEME

SEQ ID NO: 55871 - protein, 22 aa, Artificial sequence
  Protein classification predicting sequence
LLVPIAFTSDHIETLYELDIEY

SEQ ID NO: 55872 - protein, 10 aa, Artificial sequence
  Protein classification predicting sequence
YLLANFGGPR

SEQ ID NO: 55873 - protein, 6 aa, Artificial sequence
  Protein classification predicting sequence
GFISDH

SEQ ID NO: 55874 - protein, 7 aa, Artificial sequence
  Protein classification predicting sequence
SDHIETL

SEQ ID NO: 55875 - protein, 7 aa, Artificial sequence
  Protein classification predicting sequence
FLSDPRV

SEQ ID NO: 55876 - protein, 12 aa, Artificial sequence
  Protein classification predicting sequence
FLSDPRVIEIPR

SEQ ID NO: 55877 - protein, 5 aa, Artificial sequence
  Protein classification predicting sequence
IPCLN

SEQ ID NO: 55878 - protein, 9 aa, Artificial sequence
  Protein classification predicting sequence
PVYFGNRNW

SEQ ID NO: 55879 - protein, 7 aa, Artificial sequence
  Protein classification predicting sequence
HFGGVSP

SEQ ID NO: 55880 - protein, 7 aa, Artificial sequence
  Protein classification predicting sequence
PWLEPDI

SEQ ID NO: 55881 - protein, 6 aa, Artificial sequence
  Protein classification predicting sequence
LFSYHG

SEQ ID NO: 55882 - protein, 8 aa, Artificial sequence
  Protein classification predicting sequence
NWGRVPAL

SEQ ID NO: 55883 - protein, 7 aa, Artificial sequence
  Protein classification predicting sequence
IGGGSPL

SEQ ID NO: 55884 - protein, 6 aa, Artificial sequence
  Protein classification predicting sequence
YPQYSC

SEQ ID NO: 55885 - protein, 6 aa, Artificial sequence
  Protein classification predicting sequence
ELDIEY

SEQ ID NO: 55886 - protein, 8 aa, Artificial sequence
  Protein classification predicting sequence
LLVNLGTP

SEQ ID NO: 55887 - protein, 7 aa, Artificial sequence
  Protein classification predicting sequence
FLSDRRV

SEQ ID NO: 55888 - protein, 10 aa, Artificial sequence
  Protein classification predicting sequence
FLSDRRVVDT

SEQ ID NO: 55889 - protein, 12 aa, Artificial sequence
  Protein classification predicting sequence
FIRDYAEHPAYI

SEQ ID NO: 55890 - protein, 10 aa, Artificial sequence
  Protein classification predicting sequence
EGDDYPQRCR

SEQ ID NO: 55891 - protein, 14 aa, Artificial sequence
  Protein classification predicting sequence
MMTFQSRFGREPWL

SEQ ID NO: 55892 - protein, 6 aa, Artificial sequence
  Protein classification predicting sequence
PYTDET

SEQ ID NO: 55893 - protein, 9 aa, Artificial sequence
  Protein classification predicting sequence
DCLETLEEI

SEQ ID NO: 55894 - protein, 16 aa, Artificial sequence
  Protein classification predicting sequence
IFPLYPQYSATTTATV

SEQ ID NO: 55895 - protein, 11 aa, Artificial sequence
  Protein classification predicting sequence
YYTHIRHGRKP

SEQ ID NO: 55896 - protein, 8 aa, Artificial sequence
  Protein classification predicting sequence
IGGLSPLA

SEQ ID NO: 55897 - protein, 10 aa, Artificial sequence
  Protein classification predicting sequence
RLNEVQDEVE

SEQ ID NO: 55898 - protein, 13 aa, Artificial sequence
  Protein classification predicting sequence
GLKHIEPFIEDAV

SEQ ID NO: 55899 - protein, 12 aa, Artificial sequence
  Protein classification predicting sequence
IVLAPHYSTFSI

SEQ ID NO: 55900 - protein, 15 aa, Artificial sequence
  Protein classification predicting sequence
AVLIVSAHSLPEKII

SEQ ID NO: 55901 - protein, 10 aa, Artificial sequence
  Protein classification predicting sequence
SAHSLPEKII

SEQ ID NO: 55902 - protein, 6 aa, Artificial sequence
  Protein classification predicting sequence
GWQSAG

SEQ ID NO: 55903 - protein, 14 aa, Artificial sequence
  Protein classification predicting sequence
GYTSFVYAPVGFVA

SEQ ID NO: 55904 - protein, 9 aa, Artificial sequence
  Protein classification predicting sequence
HLEVLYDND

SEQ ID NO: 55905 - protein, 8 aa, Artificial sequence
  Protein classification predicting sequence
YYRPEMPN

SEQ ID NO: 55906 - protein, 6 aa, Artificial sequence
  Protein classification predicting sequence
EIDIEY

SEQ ID NO: 55907 - protein, 8 aa, Artificial sequence
  Protein classification predicting sequence
IGGGSPLR

SEQ ID NO: 55908 - protein, 12 aa, Artificial sequence
  Protein classification predicting sequence
GMRYWHPFTEEA

SEQ ID NO: 55909 - protein, 8 aa, Artificial sequence
  Protein classification predicting sequence
LPLYPQYS

SEQ ID NO: 55910 - protein, 9 aa, Artificial sequence
  Protein classification predicting sequence
SLLAVPVSF

SEQ ID NO: 55911 - protein, 7 aa, Artificial sequence
  Protein classification predicting sequence
SEHIETL

SEQ ID NO: 55912 - protein, 7 aa, Artificial sequence
  Protein classification predicting sequence
QSRFGRE

SEQ ID NO: 55913 - protein, 6 aa, Artificial sequence
  Protein classification predicting sequence
SYHGIP

SEQ ID NO: 55914 - protein, 11 aa, Artificial sequence
  Protein classification predicting sequence
LLLVNLGSPAS

SEQ ID NO: 55915 - protein, 8 aa, Artificial sequence
  Protein classification predicting sequence
DCLETLEE

SEQ ID NO: 55916 - protein, 7 aa, Artificial sequence
  Protein classification predicting sequence
NVTRGRG

SEQ ID NO: 55917 - protein, 6 aa, Artificial sequence
  Protein classification predicting sequence
PISFVS

SEQ ID NO: 55918 - protein, 11 aa, Artificial sequence
  Protein classification predicting sequence
VLAPHYSSFSV

SEQ ID NO: 55919 - protein, 7 aa, Artificial sequence
  Protein classification predicting sequence
DPYPDQL

SEQ ID NO: 55920 - protein, 6 aa, Artificial sequence
  Protein classification predicting sequence
GWQSEG

SEQ ID NO: 55921 - protein, 8 aa, Artificial sequence
  Protein classification predicting sequence
ECKVVTDE

SEQ ID NO: 55922 - protein, 6 aa, Artificial sequence
  Protein classification predicting sequence
NLGTPD

SEQ ID NO: 55923 - protein, 18 aa, Artificial sequence
  Protein classification predicting sequence
ICPGFSADCLETLEEIKE

SEQ ID NO: 55924 - protein, 8 aa, Artificial sequence
  Protein classification predicting sequence
VDVVCPGF

SEQ ID NO: 55925 - protein, 21 aa, Artificial sequence
  Protein classification predicting sequence
AVIVCPIGFVADHIEVVWDLD

SEQ ID NO: 55926 - protein, 11 aa, Artificial sequence
  Protein classification predicting sequence
TSAWSGYSSCT

SEQ ID NO: 55927 - protein, 17 aa, Artificial sequence
  Protein classification predicting sequence
LVKLRPYFDHPLFVEMF

SEQ ID NO: 55928 - protein, 9 aa, Artificial sequence
  Protein classification predicting sequence
ARLVFTAHS

SEQ ID NO: 55929 - protein, 7 aa, Artificial sequence
  Protein classification predicting sequence
SPLAKIT

SEQ ID NO: 55930 - protein, 15 aa, Artificial sequence
  Protein classification predicting sequence
LVLAPHYSTFSVKSY

SEQ ID NO: 55931 - protein, 9 aa, Artificial sequence
  Protein classification predicting sequence
FIYTPVGFV

SEQ ID NO: 55932 - protein, 15 aa, Artificial sequence
  Protein classification predicting sequence
HLEVLYDNDYECKVV

SEQ ID NO: 55933 - protein, 6 aa, Artificial sequence
  Protein classification predicting sequence
PLFPQY

SEQ ID NO: 55934 - protein, 6 aa, Artificial sequence
  Protein classification predicting sequence
SFHGLP

SEQ ID NO: 55935 - protein, 6 aa, Artificial sequence
  Protein classification predicting sequence
FQSRLG

SEQ ID NO: 55936 - protein, 7 aa, Artificial sequence
  Protein classification predicting sequence
EWLQPYT

SEQ ID NO: 55937 - protein, 8 aa, Artificial sequence
  Protein classification predicting sequence
DPEIIRLP

SEQ ID NO: 55938 - protein, 6 aa, Artificial sequence
  Protein classification predicting sequence
QKPLAW

SEQ ID NO: 55939 - protein, 6 aa, Artificial sequence
  Protein classification predicting sequence
YPQERW

SEQ ID NO: 55940 - protein, 12 aa, Artificial sequence
  Protein classification predicting sequence
AMRYWHPFTESA

SEQ ID NO: 55941 - protein, 7 aa, Artificial sequence
  Protein classification predicting sequence
VVLPLYP

SEQ ID NO: 55942 - protein, 21 aa, Artificial sequence
  Protein classification predicting sequence
VVLPLYPHFSISTSGSSFREL

SEQ ID NO: 55943 - protein, 6 aa, Artificial sequence
  Protein classification predicting sequence
EHIETL

SEQ ID NO: 55944 - protein, 8 aa, Artificial sequence
  Protein classification predicting sequence
QFLMDPYV

SEQ ID NO: 55945 - protein, 14 aa, Artificial sequence
  Protein classification predicting sequence
VTLAPLYPQFADST

SEQ ID NO: 55946 - protein, 6 aa, Artificial sequence
  Protein classification predicting sequence
NDHPEW

SEQ ID NO: 55947 - protein, 6 aa, Artificial sequence
  Protein classification predicting sequence
CYRAQC

SEQ ID NO: 55948 - protein, 8 aa, Artificial sequence
  Protein classification predicting sequence
GSPLLVYS

SEQ ID NO: 55949 - protein, 7 aa, Artificial sequence
  Protein classification predicting sequence
LLLSFHG

SEQ ID NO: 55950 - protein, 12 aa, Artificial sequence
  Protein classification predicting sequence
NESPLRTYTRAQ

SEQ ID NO: 55951 - protein, 14 aa, Artificial sequence
  Protein classification predicting sequence
FPLYPQYSATTTAT

SEQ ID NO: 55952 - protein, 10 aa, Artificial sequence
  Protein classification predicting sequence
CLETTRLLRE

SEQ ID NO: 55953 - protein, 8 aa, Artificial sequence
  Protein classification predicting sequence
EFLSDRRV

SEQ ID NO: 55954 - protein, 14 aa, Artificial sequence
  Protein classification predicting sequence
VVVDWAMRYGQPSI

SEQ ID NO: 55955 - protein, 8 aa, Artificial sequence
  Protein classification predicting sequence
PVYIDALA

SEQ ID NO: 55956 - protein, 7 aa, Artificial sequence
  Protein classification predicting sequence
YSGCRQY

SEQ ID NO: 55957 - protein, 7 aa, Artificial sequence
  Protein classification predicting sequence
FTAHSIP

SEQ ID NO: 55958 - protein, 6 aa, Artificial sequence
  Protein classification predicting sequence
PWLEPD

SEQ ID NO: 55959 - protein, 12 aa, Artificial sequence
  Protein classification predicting sequence
IPGISFIRDYAD

SEQ ID NO: 55960 - protein, 30 aa, Artificial sequence
  Protein classification predicting sequence
HGEPDLLLLSYHGIPQRYADEGDDYPQRCR

SEQ ID NO: 55961 - protein, 18 aa, Artificial sequence
  Protein classification predicting sequence
PEKVMMTFQSRFGREPWL

SEQ ID NO: 55962 - protein, 10 aa, Artificial sequence
  Protein classification predicting sequence
QSRFGREPWL

SEQ ID NO: 55963 - protein, 9 aa, Artificial sequence
  Protein classification predicting sequence
ALNATPEHI

SEQ ID NO: 55964 - protein, 24 aa, Artificial sequence
  Protein classification predicting sequence
LLLSYHGIPQRYADEGDDYPQRCR

SEQ ID NO: 55965 - protein, 27 aa, Artificial sequence
  Protein classification predicting sequence
GHIQVMCPGFAADCLETLEEIAEQNRE

SEQ ID NO: 55966 - protein, 7 aa, Artificial sequence
  Protein classification predicting sequence
FSAHSLP

SEQ ID NO: 55967 - protein, 20 aa, Artificial sequence
  Protein classification predicting sequence
GSPLMVYSRQQQQALAQRLP

SEQ ID NO: 55968 - protein, 7 aa, Artificial sequence
  Protein classification predicting sequence
YIGLKHI

SEQ ID NO: 55969 - protein, 7 aa, Artificial sequence
  Protein classification predicting sequence
GLKHISP

SEQ ID NO: 55970 - protein, 17 aa, Artificial sequence
  Protein classification predicting sequence
TVVLAPHYSSFSVGSYD

SEQ ID NO: 55971 - protein, 16 aa, Artificial sequence
  Protein classification predicting sequence
TVLVVSAHSLPKGLIE

SEQ ID NO: 55972 - protein, 16 aa, Artificial sequence
  Protein classification predicting sequence
MPNTHPLFIGAIVDEI

SEQ ID NO: 55973 - protein, 25 aa, Artificial sequence
  Protein classification predicting sequence
EEELQDLKDRYEFIGGLSPLAGTTD

SEQ ID NO: 55974 - protein, 12 aa, Artificial sequence
  Protein classification predicting sequence
FKLYLGLKHISP

SEQ ID NO: 55975 - protein, 25 aa, Artificial sequence
  Protein classification predicting sequence
GWQSEGNTGTPWLGPDVQDLTRDLY

SEQ ID NO: 55976 - protein, 31 aa, Artificial sequence
  Protein classification predicting sequence
FIYTPVGFVCEHLEVLYDNDYECKVVCDDIG

SEQ ID NO: 55977 - protein, 7 aa, Artificial sequence
  Protein classification predicting sequence
HGIPQRY

SEQ ID NO: 55978 - protein, 9 aa, Artificial sequence
  Protein classification predicting sequence
QSRFGPEEW

SEQ ID NO: 55979 - protein, 7 aa, Artificial sequence
  Protein classification predicting sequence
PYTDETL

SEQ ID NO: 55980 - protein, 7 aa, Artificial sequence
  Protein classification predicting sequence
VIFSAHS

SEQ ID NO: 55981 - protein, 8 aa, Artificial sequence
  Protein classification predicting sequence
FFSAHGVP

SEQ ID NO: 55982 - protein, 7 aa, Artificial sequence
  Protein classification predicting sequence
VKLYPQE

SEQ ID NO: 55983 - protein, 7 aa, Artificial sequence
  Protein classification predicting sequence
NTHPLFI

SEQ ID NO: 55984 - protein, 6 aa, Artificial sequence
  Protein classification predicting sequence
PWLGPD

SEQ ID NO: 55985 - protein, 6 aa, Artificial sequence
  Protein classification predicting sequence
SDHMEV

SEQ ID NO: 55986 - protein, 8 aa, Artificial sequence
  Protein classification predicting sequence
GSPLMVYS

SEQ ID NO: 55987 - protein, 6 aa, Artificial sequence
  Protein classification predicting sequence
PVELGM

SEQ ID NO: 55988 - protein, 7 aa, Artificial sequence
  Protein classification predicting sequence
PLYPQYS

SEQ ID NO: 55989 - protein, 12 aa, Artificial sequence
  Protein classification predicting sequence
PLYPQYSATTTA

SEQ ID NO: 55990 - protein, 9 aa, Artificial sequence
  Protein classification predicting sequence
FIRDYHDHP

SEQ ID NO: 55991 - protein, 7 aa, Artificial sequence
  Protein classification predicting sequence
PFLFNLF

SEQ ID NO: 55992 - protein, 10 aa, Artificial sequence
  Protein classification predicting sequence
LYPQYSTTTT

SEQ ID NO: 55993 - protein, 6 aa, Artificial sequence
  Protein classification predicting sequence
VNLGTP

SEQ ID NO: 55994 - protein, 13 aa, Artificial sequence
  Protein classification predicting sequence
TAPHKYYIGFRYV

SEQ ID NO: 55995 - protein, 25 aa, Artificial sequence
  Protein classification predicting sequence
KNILLVPIAFTSDHIETLYELDIEY

SEQ ID NO: 55996 - protein, 17 aa, Artificial sequence
  Protein classification predicting sequence
ESLNGNPLFSKALADLV

SEQ ID NO: 55997 - protein, 10 aa, Artificial sequence
  Protein classification predicting sequence
RRYLGEFLSD

SEQ ID NO: 55998 - protein, 9 aa, Artificial sequence
  Protein classification predicting sequence
NPYRLVWQS

SEQ ID NO: 55999 - protein, 12 aa, Artificial sequence
  Protein classification predicting sequence
LWWPLLRGVILP

SEQ ID NO: 56000 - protein, 8 aa, Artificial sequence
  Protein classification predicting sequence
PYTDETLK

SEQ ID NO: 56001 - protein, 15 aa, Artificial sequence
  Protein classification predicting sequence
GVILPLRSPRVAKLY

SEQ ID NO: 56002 - protein, 7 aa, Artificial sequence
  Protein classification predicting sequence
LVMSFHG

SEQ ID NO: 56003 - protein, 7 aa, Artificial sequence
  Protein classification predicting sequence
ARALRQA

SEQ ID NO: 56004 - protein, 6 aa, Artificial sequence
  Protein classification predicting sequence
TNETKI

SEQ ID NO: 56005 - protein, 5 aa, Artificial sequence
  Protein classification predicting sequence
FLDHM

SEQ ID NO: 56006 - protein, 7 aa, Artificial sequence
  Protein classification predicting sequence
ALGDKKG

SEQ ID NO: 56007 - protein, 6 aa, Artificial sequence
  Protein classification predicting sequence
SGRPGL

SEQ ID NO: 56008 - protein, 13 aa, Artificial sequence
  Protein classification predicting sequence
VNHALMTLHIDNL

SEQ ID NO: 56009 - protein, 7 aa, Artificial sequence
  Protein classification predicting sequence
FTRARIG

SEQ ID NO: 56010 - protein, 10 aa, Artificial sequence
  Protein classification predicting sequence
EFFQGFVNHA

SEQ ID NO: 56011 - protein, 7 aa, Artificial sequence
  Protein classification predicting sequence
FKAFARA

SEQ ID NO: 56012 - protein, 7 aa, Artificial sequence
  Protein classification predicting sequence
VEAEGDV

SEQ ID NO: 56013 - protein, 6 aa, Artificial sequence
  Protein classification predicting sequence
HHTVED

SEQ ID NO: 56014 - protein, 8 aa, Artificial sequence
  Protein classification predicting sequence
REKIGDLS

SEQ ID NO: 56015 - protein, 7 aa, Artificial sequence
  Protein classification predicting sequence
HVDCLRG

SEQ ID NO: 56016 - protein, 6 aa, Artificial sequence
  Protein classification predicting sequence
ESAFKA

SEQ ID NO: 56017 - protein, 9 aa, Artificial sequence
  Protein classification predicting sequence
DVPSTKGVL

SEQ ID NO: 56018 - protein, 14 aa, Artificial sequence
  Protein classification predicting sequence
ETRIRVAVNLDGTG

SEQ ID NO: 56019 - protein, 9 aa, Artificial sequence
  Protein classification predicting sequence
TGVGFLDHM

SEQ ID NO: 56020 - protein, 7 aa, Artificial sequence
  Protein classification predicting sequence
HIDAHHT

SEQ ID NO: 56021 - protein, 5 aa, Artificial sequence
  Protein classification predicting sequence
HHTTE

SEQ ID NO: 56022 - protein, 8 aa, Artificial sequence
  Protein classification predicting sequence
RYGHAYVP

SEQ ID NO: 56023 - protein, 52 aa, Artificial sequence
  Protein classification predicting sequence
TGVGFFDHMLTLFARHGRFGLQVEAEGDVFVDAHHTVEDVGIVLGNCLKEAL

SEQ ID NO: 56024 - protein, 8 aa, Artificial sequence
  Protein classification predicting sequence
FKAFGRAL

SEQ ID NO: 56025 - protein, 10 aa, Artificial sequence
  Protein classification predicting sequence
RETTETKIKL

SEQ ID NO: 56026 - protein, 37 aa, Artificial sequence
  Protein classification predicting sequence
VFQGELTNPKLGDFDTELTEEFFRAVAHAANITLHAR

SEQ ID NO: 56027 - protein, 8 aa, Artificial sequence
  Protein classification predicting sequence
GTFDTELV

SEQ ID NO: 56028 - protein, 7 aa, Artificial sequence
  Protein classification predicting sequence
GRDPHHI

SEQ ID NO: 56029 - protein, 7 aa, Artificial sequence
  Protein classification predicting sequence
LSRVVID

SEQ ID NO: 56030 - protein, 9 aa, Artificial sequence
  Protein classification predicting sequence
FKAFGRALR

SEQ ID NO: 56031 - protein, 6 aa, Artificial sequence
  Protein classification predicting sequence
GFLDHM

SEQ ID NO: 56032 - protein, 8 aa, Artificial sequence
  Protein classification predicting sequence
ESAFKALA

SEQ ID NO: 56033 - protein, 10 aa, Artificial sequence
  Protein classification predicting sequence
GDLHIDDHHT

SEQ ID NO: 56034 - protein, 6 aa, Artificial sequence
  Protein classification predicting sequence
PMDETL

SEQ ID NO: 56035 - protein, 8 aa, Artificial sequence
  Protein classification predicting sequence
DAHHTVED

SEQ ID NO: 56036 - protein, 6 aa, Artificial sequence
  Protein classification predicting sequence
HGLIDL

SEQ ID NO: 56037 - protein, 11 aa, Artificial sequence
  Protein classification predicting sequence
YGRDPHHITEA

SEQ ID NO: 56038 - protein, 7 aa, Artificial sequence
  Protein classification predicting sequence
GDLSTEM

SEQ ID NO: 56039 - protein, 6 aa, Artificial sequence
  Protein classification predicting sequence
EFFRAV

SEQ ID NO: 56040 - protein, 6 aa, Artificial sequence
  Protein classification predicting sequence
HHTAED

SEQ ID NO: 56041 - protein, 6 aa, Artificial sequence
  Protein classification predicting sequence
HHEIEA

SEQ ID NO: 56042 - protein, 8 aa, Artificial sequence
  Protein classification predicting sequence
IELSINLD

SEQ ID NO: 56043 - protein, 8 aa, Artificial sequence
  Protein classification predicting sequence
LHARILYG

SEQ ID NO: 56044 - protein, 7 aa, Artificial sequence
  Protein classification predicting sequence
FKAFGRA

SEQ ID NO: 56045 - protein, 8 aa, Artificial sequence
  Protein classification predicting sequence
PLDEALVQ

SEQ ID NO: 56046 - protein, 14 aa, Artificial sequence
  Protein classification predicting sequence
ELTNPKLGDFDTEL

SEQ ID NO: 56047 - protein, 17 aa, Artificial sequence
  Protein classification predicting sequence
INRYGSAYVPMDESLGF

SEQ ID NO: 56048 - protein, 6 aa, Artificial sequence
  Protein classification predicting sequence
VEDVGI

SEQ ID NO: 56049 - protein, 11 aa, Artificial sequence
  Protein classification predicting sequence
HHKIEALFKAF

SEQ ID NO: 56050 - protein, 9 aa, Artificial sequence
  Protein classification predicting sequence
RRARIERRT

SEQ ID NO: 56051 - protein, 19 aa, Artificial sequence
  Protein classification predicting sequence
FYDHMLTALGSHASFDLTV

SEQ ID NO: 56052 - protein, 19 aa, Artificial sequence
  Protein classification predicting sequence
GDVEIEAHHTIEDTAIALG

SEQ ID NO: 56053 - protein, 6 aa, Artificial sequence
  Protein classification predicting sequence
KKGIRR

SEQ ID NO: 56054 - protein, 16 aa, Artificial sequence
  Protein classification predicting sequence
GIRRFGDAFIPMDETL

SEQ ID NO: 56055 - protein, 6 aa, Artificial sequence
  Protein classification predicting sequence
GSSVPY

SEQ ID NO: 56056 - protein, 8 aa, Artificial sequence
  Protein classification predicting sequence
GEPDHLQH

SEQ ID NO: 56057 - protein, 7 aa, Artificial sequence
  Protein classification predicting sequence
DQIARHG

SEQ ID NO: 56058 - protein, 14 aa, Artificial sequence
  Protein classification predicting sequence
YVPLDEALSRVVID

SEQ ID NO: 56059 - protein, 6 aa, Artificial sequence
  Protein classification predicting sequence
HASFDL

SEQ ID NO: 56060 - protein, 15 aa, Artificial sequence
  Protein classification predicting sequence
NARIALHVRVLYGRD

SEQ ID NO: 56061 - protein, 7 aa, Artificial sequence
  Protein classification predicting sequence
GFFDHML

SEQ ID NO: 56062 - protein, 6 aa, Artificial sequence
  Protein classification predicting sequence
FLDHML

SEQ ID NO: 56063 - protein, 7 aa, Artificial sequence
  Protein classification predicting sequence
APLDEAL

SEQ ID NO: 56064 - protein, 8 aa, Artificial sequence
  Protein classification predicting sequence
ALGERRGI

SEQ ID NO: 56065 - protein, 7 aa, Artificial sequence
  Protein classification predicting sequence
NNHHIAE

SEQ ID NO: 56066 - protein, 8 aa, Artificial sequence
  Protein classification predicting sequence
PLDEALSR

SEQ ID NO: 56067 - protein, 13 aa, Artificial sequence
  Protein classification predicting sequence
NGTNDVPSTKGVL

SEQ ID NO: 56068 - protein, 7 aa, Artificial sequence
  Protein classification predicting sequence
AFKEALG

SEQ ID NO: 56069 - protein, 13 aa, Artificial sequence
  Protein classification predicting sequence
GFAPLDEALSRAV

SEQ ID NO: 56070 - protein, 8 aa, Artificial sequence
  Protein classification predicting sequence
EAISSNGT

SEQ ID NO: 56071 - protein, 8 aa, Artificial sequence
  Protein classification predicting sequence
GIGFLDHM

SEQ ID NO: 56072 - protein, 10 aa, Artificial sequence
  Protein classification predicting sequence
APLDEALVQV

SEQ ID NO: 56073 - protein, 7 aa, Artificial sequence
  Protein classification predicting sequence
TLHIRQL

SEQ ID NO: 56074 - protein, 7 aa, Artificial sequence
  Protein classification predicting sequence
FKAFSRA

SEQ ID NO: 56075 - protein, 7 aa, Artificial sequence
  Protein classification predicting sequence
HVPFTRA

SEQ ID NO: 56076 - protein, 6 aa, Artificial sequence
  Protein classification predicting sequence
GDKKGI

SEQ ID NO: 56077 - protein, 8 aa, Artificial sequence
  Protein classification predicting sequence
LDGTGKQT

SEQ ID NO: 56078 - protein, 10 aa, Artificial sequence
  Protein classification predicting sequence
GDTHIDDHHT

SEQ ID NO: 56079 - protein, 7 aa, Artificial sequence
  Protein classification predicting sequence
YGANNHH

SEQ ID NO: 56080 - protein, 6 aa, Artificial sequence
  Protein classification predicting sequence
GVKRFG

SEQ ID NO: 56081 - protein, 22 aa, Artificial sequence
  Protein classification predicting sequence
MDETLARVVVDISGRPYLSFNA

SEQ ID NO: 56082 - protein, 7 aa, Artificial sequence
  Protein classification predicting sequence
ETQLNIS

SEQ ID NO: 56083 - protein, 12 aa, Artificial sequence
  Protein classification predicting sequence
HMLTLFTFHSGL

SEQ ID NO: 56084 - protein, 14 aa, Artificial sequence
  Protein classification predicting sequence
TEDIGIVIGQLLLE

SEQ ID NO: 56085 - protein, 14 aa, Artificial sequence
  Protein classification predicting sequence
RGGNTHHEIEAIFK

SEQ ID NO: 56086 - protein, 8 aa, Artificial sequence
  Protein classification predicting sequence
HHTIEDTA

SEQ ID NO: 56087 - protein, 14 aa, Artificial sequence
  Protein classification predicting sequence
TINPEIKGVNSTKG

SEQ ID NO: 56088 - protein, 7 aa, Artificial sequence
  Protein classification predicting sequence
GVNSTKG

SEQ ID NO: 56089 - protein, 6 aa, Artificial sequence
  Protein classification predicting sequence
FLNHML

SEQ ID NO: 56090 - protein, 6 aa, Artificial sequence
  Protein classification predicting sequence
EEFFRA

SEQ ID NO: 56091 - protein, 8 aa, Artificial sequence
  Protein classification predicting sequence
EDVGITLG

SEQ ID NO: 56092 - protein, 7 aa, Artificial sequence
  Protein classification predicting sequence
PFLDHML

SEQ ID NO: 56093 - protein, 8 aa, Artificial sequence
  Protein classification predicting sequence
ALGDRRGI

SEQ ID NO: 56094 - protein, 7 aa, Artificial sequence
  Protein classification predicting sequence
RPHLEFR

SEQ ID NO: 56095 - protein, 7 aa, Artificial sequence
  Protein classification predicting sequence
VRGYVSC

SEQ ID NO: 56096 - protein, 7 aa, Artificial sequence
  Protein classification predicting sequence
LGCPYEG

SEQ ID NO: 56097 - protein, 16 aa, Artificial sequence
  Protein classification predicting sequence
ALAVHCHDTYGQALAN

SEQ ID NO: 56098 - protein, 9 aa, Artificial sequence
  Protein classification predicting sequence
ATEDLVYML

SEQ ID NO: 56099 - protein, 8 aa, Artificial sequence
  Protein classification predicting sequence
GLGIHTGV

SEQ ID NO: 56100 - protein, 7 aa, Artificial sequence
  Protein classification predicting sequence
PRRLVGL

SEQ ID NO: 56101 - protein, 11 aa, Artificial sequence
  Protein classification predicting sequence
NCSIEESFQRF

SEQ ID NO: 56102 - protein, 6 aa, Artificial sequence
  Protein classification predicting sequence
VHCHDT

SEQ ID NO: 56103 - protein, 8 aa, Artificial sequence
  Protein classification predicting sequence
GQALANTL

SEQ ID NO: 56104 - protein, 15 aa, Artificial sequence
  Protein classification predicting sequence
GASGNLATEDLVYML

SEQ ID NO: 56105 - protein, 17 aa, Artificial sequence
  Protein classification predicting sequence
GLGIHTGVNLQKLLEAG

SEQ ID NO: 56106 - protein, 11 aa, Artificial sequence
  Protein classification predicting sequence
EVGPRDGLQNE

SEQ ID NO: 56107 - protein, 10 aa, Artificial sequence
  Protein classification predicting sequence
RLVGLASLRA

SEQ ID NO: 56108 - protein, 16 aa, Artificial sequence
  Protein classification predicting sequence
TPVKIKLIDMLSEAGL

SEQ ID NO: 56109 - protein, 19 aa, Artificial sequence
  Protein classification predicting sequence
AALAVHCHDTYGQALANTL

SEQ ID NO: 56110 - protein, 10 aa, Artificial sequence
  Protein classification predicting sequence
YGITTGFGKF

SEQ ID NO: 56111 - protein, 12 aa, Artificial sequence
  Protein classification predicting sequence
GLGKAYYKGELL

SEQ ID NO: 56112 - protein, 7 aa, Artificial sequence
  Protein classification predicting sequence
NAVTDNP

SEQ ID NO: 56113 - protein, 8 aa, Artificial sequence
  Protein classification predicting sequence
PASVDSIP

SEQ ID NO: 56114 - protein, 12 aa, Artificial sequence
  Protein classification predicting sequence
PTSANQEDHVSM

SEQ ID NO: 56115 - protein, 5 aa, Artificial sequence
  Protein classification predicting sequence
YSLRC

SEQ ID NO: 56116 - protein, 7 aa, Artificial sequence
  Protein classification predicting sequence
ISGGNFH

SEQ ID NO: 56117 - protein, 7 aa, Artificial sequence
  Protein classification predicting sequence
FLVKNGG

SEQ ID NO: 56118 - protein, 9 aa, Artificial sequence
  Protein classification predicting sequence
VRLIMALKL

SEQ ID NO: 56119 - protein, 10 aa, Artificial sequence
  Protein classification predicting sequence
SLGRGASGVR

SEQ ID NO: 56120 - protein, 16 aa, Artificial sequence
  Protein classification predicting sequence
KGSVGASGDLAPLAHM

SEQ ID NO: 56121 - protein, 8 aa, Artificial sequence
  Protein classification predicting sequence
ALVTGALS

SEQ ID NO: 56122 - protein, 7 aa, Artificial sequence
  Protein classification predicting sequence
RVQDPYC

SEQ ID NO: 56123 - protein, 29 aa, Artificial sequence
  Protein classification predicting sequence
HPASVDSTPTSANQEDHVSMACHGARRLL

SEQ ID NO: 56124 - protein, 11 aa, Artificial sequence
  Protein classification predicting sequence
VTAAALASENK

SEQ ID NO: 56125 - protein, 20 aa, Artificial sequence
  Protein classification predicting sequence
PQQGSLGASGDLAPLSHLAL

SEQ ID NO: 56126 - protein, 8 aa, Artificial sequence
  Protein classification predicting sequence
VISGGNFH

SEQ ID NO: 56127 - protein, 38 aa, Artificial sequence
  Protein classification predicting sequence
FLSPEPGLQSGAMIMQYAAASLVSENKTLAHPASVDSI

SEQ ID NO: 56128 - protein, 6 aa, Artificial sequence
  Protein classification predicting sequence
PQVHGA

SEQ ID NO: 56129 - protein, 28 aa, Artificial sequence
  Protein classification predicting sequence
MAELANISERRIERLVNPQLNDLPPFLS

SEQ ID NO: 56130 - protein, 20 aa, Artificial sequence
  Protein classification predicting sequence
AASLVSENKTLAHPASVDSI

SEQ ID NO: 56131 - protein, 7 aa, Artificial sequence
  Protein classification predicting sequence
QIIQNVR

SEQ ID NO: 56132 - protein, 18 aa, Artificial sequence
  Protein classification predicting sequence
QGSLGASGDLAPLSHLAL

SEQ ID NO: 56133 - protein, 7 aa, Artificial sequence
  Protein classification predicting sequence
SGGNFHG

SEQ ID NO: 56134 - protein, 9 aa, Artificial sequence
  Protein classification predicting sequence
PIAFAMDFL

SEQ ID NO: 56135 - protein, 9 aa, Artificial sequence
  Protein classification predicting sequence
ERRVERLVN

SEQ ID NO: 56136 - protein, 12 aa, Artificial sequence
  Protein classification predicting sequence
PGLQSGAMIMQY

SEQ ID NO: 56137 - protein, 8 aa, Artificial sequence
  Protein classification predicting sequence
ERVKKSRA

SEQ ID NO: 56138 - protein, 14 aa, Artificial sequence
  Protein classification predicting sequence
TIEGLQGIIDAFDE

SEQ ID NO: 56139 - protein, 6 aa, Artificial sequence
  Protein classification predicting sequence
DNPLIF

SEQ ID NO: 56140 - protein, 21 aa, Artificial sequence
  Protein classification predicting sequence
KVISGGNFHGQPIAFAMDFLK

SEQ ID NO: 56141 - protein, 5 aa, Artificial sequence
  Protein classification predicting sequence
VRLMM

SEQ ID NO: 56142 - protein, 12 aa, Artificial sequence
  Protein classification predicting sequence
AKEGLALINGTQ

SEQ ID NO: 56143 - protein, 8 aa, Artificial sequence
  Protein classification predicting sequence
APFHPDIH

SEQ ID NO: 56144 - protein, 12 aa, Artificial sequence
  Protein classification predicting sequence
SGGNFHAEPVAF

SEQ ID NO: 56145 - protein, 14 aa, Artificial sequence
  Protein classification predicting sequence
PVYGINTGFGKLAS

SEQ ID NO: 56146 - protein, 7 aa, Artificial sequence
  Protein classification predicting sequence
SHCCGVG

SEQ ID NO: 56147 - protein, 11 aa, Artificial sequence
  Protein classification predicting sequence
KEGLALINGTQ

SEQ ID NO: 56148 - protein, 8 aa, Artificial sequence
  Protein classification predicting sequence
NGTQFSTA

SEQ ID NO: 56149 - protein, 8 aa, Artificial sequence
  Protein classification predicting sequence
ALALSEIG

SEQ ID NO: 56150 - protein, 13 aa, Artificial sequence
  Protein classification predicting sequence
PTSANQEDHVSMA

SEQ ID NO: 56151 - protein, 6 aa, Artificial sequence
  Protein classification predicting sequence
YFAPDI

SEQ ID NO: 56152 - protein, 7 aa, Artificial sequence
  Protein classification predicting sequence
PFDPRIH

SEQ ID NO: 56153 - protein, 6 aa, Artificial sequence
  Protein classification predicting sequence
LVSENK

SEQ ID NO: 56154 - protein, 11 aa, Artificial sequence
  Protein classification predicting sequence
YGINTGFGLLA

SEQ ID NO: 56155 - protein, 12 aa, Artificial sequence
  Protein classification predicting sequence
GSVGASGDLAPL

SEQ ID NO: 56156 - protein, 9 aa, Artificial sequence
  Protein classification predicting sequence
SVEAALGSR

SEQ ID NO: 56157 - protein, 7 aa, Artificial sequence
  Protein classification predicting sequence
PFDARIH

SEQ ID NO: 56158 - protein, 14 aa, Artificial sequence
  Protein classification predicting sequence
NGGVNSGFMIAQVT

SEQ ID NO: 56159 - protein, 25 aa, Artificial sequence
  Protein classification predicting sequence
EKGSLGASGDLAPLAHMVLPMLGLG

SEQ ID NO: 56160 - protein, 14 aa, Artificial sequence
  Protein classification predicting sequence
QGELRVQDAYSLRC

SEQ ID NO: 56161 - protein, 7 aa, Artificial sequence
  Protein classification predicting sequence
PQIHGAS

SEQ ID NO: 56162 - protein, 11 aa, Artificial sequence
  Protein classification predicting sequence
ANVSERRLERL

SEQ ID NO: 56163 - protein, 8 aa, Artificial sequence
  Protein classification predicting sequence
GLNSGFMI

SEQ ID NO: 56164 - protein, 6 aa, Artificial sequence
  Protein classification predicting sequence
SANQED

SEQ ID NO: 56165 - protein, 7 aa, Artificial sequence
  Protein classification predicting sequence
ELGKGTK

SEQ ID NO: 56166 - protein, 9 aa, Artificial sequence
  Protein classification predicting sequence
SGGNFHGQP

SEQ ID NO: 56167 - protein, 6 aa, Artificial sequence
  Protein classification predicting sequence
MIAQYT

SEQ ID NO: 56168 - protein, 17 aa, Artificial sequence
  Protein classification predicting sequence
KGSVGASGDLAPLAHMS

SEQ ID NO: 56169 - protein, 9 aa, Artificial sequence
  Protein classification predicting sequence
SGGNFHAEP

SEQ ID NO: 56170 - protein, 8 aa, Artificial sequence
  Protein classification predicting sequence
SEWIAALT

SEQ ID NO: 56171 - protein, 15 aa, Artificial sequence
  Protein classification predicting sequence
LEIEMNAATDNPLIF

SEQ ID NO: 56172 - protein, 8 aa, Artificial sequence
  Protein classification predicting sequence
ERLVNPQL

SEQ ID NO: 56173 - protein, 13 aa, Artificial sequence
  Protein classification predicting sequence
SSANQEDHVSMGT

SEQ ID NO: 56174 - protein, 8 aa, Artificial sequence
  Protein classification predicting sequence
NTGFGKLA

SEQ ID NO: 56175 - protein, 7 aa, Artificial sequence
  Protein classification predicting sequence
VLSHAAG

SEQ ID NO: 56176 - protein, 10 aa, Artificial sequence
  Protein classification predicting sequence
LRCQPQVMGA

SEQ ID NO: 56177 - protein, 7 aa, Artificial sequence
  Protein classification predicting sequence
NSGFMIA

SEQ ID NO: 56178 - protein, 6 aa, Artificial sequence
  Protein classification predicting sequence
RVQDAY

SEQ ID NO: 56179 - protein, 6 aa, Artificial sequence
  Protein classification predicting sequence
EDHVSM

SEQ ID NO: 56180 - protein, 12 aa, Artificial sequence
  Protein classification predicting sequence
GASGDLAPLAHM

SEQ ID NO: 56181 - protein, 15 aa, Artificial sequence
  Protein classification predicting sequence
KEGLALLNGTQASTA

SEQ ID NO: 56182 - protein, 9 aa, Artificial sequence
  Protein classification predicting sequence
EIGALSERR

SEQ ID NO: 56183 - protein, 9 aa, Artificial sequence
  Protein classification predicting sequence
KEGLALLNG

SEQ ID NO: 56184 - protein, 18 aa, Artificial sequence
  Protein classification predicting sequence
SVDSLPTSANQEDHVSMA

SEQ ID NO: 56185 - protein, 8 aa, Artificial sequence
  Protein classification predicting sequence
ALIALVNA

SEQ ID NO: 56186 - protein, 8 aa, Artificial sequence
  Protein classification predicting sequence
ALRGLFEA

SEQ ID NO: 56187 - protein, 19 aa, Artificial sequence
  Protein classification predicting sequence
KVQDPYSLRCQPQVMGACL

SEQ ID NO: 56188 - protein, 22 aa, Artificial sequence
  Protein classification predicting sequence
SVDSLPTSANQEDHVSMAPAAG

SEQ ID NO: 56189 - protein, 8 aa, Artificial sequence
  Protein classification predicting sequence
ENTRGILA

SEQ ID NO: 56190 - protein, 8 aa, Artificial sequence
  Protein classification predicting sequence
DRFFAPDI

SEQ ID NO: 56191 - protein, 9 aa, Artificial sequence
  Protein classification predicting sequence
VYGINTGFG

SEQ ID NO: 56192 - protein, 9 aa, Artificial sequence
  Protein classification predicting sequence
ATVCGAMSV

SEQ ID NO: 56193 - protein, 8 aa, Artificial sequence
  Protein classification predicting sequence
ELLAAAQG

SEQ ID NO: 56194 - protein, 14 aa, Artificial sequence
  Protein classification predicting sequence
RTAYGINTGFGLLA

SEQ ID NO: 56195 - protein, 18 aa, Artificial sequence
  Protein classification predicting sequence
RTAYGINTGFGLLASTRI

SEQ ID NO: 56196 - protein, 10 aa, Artificial sequence
  Protein classification predicting sequence
AEIGSLSERR

SEQ ID NO: 56197 - protein, 10 aa, Artificial sequence
  Protein classification predicting sequence
HMSQLPPFLV

SEQ ID NO: 56198 - protein, 7 aa, Artificial sequence
  Protein classification predicting sequence
NKALAHP

SEQ ID NO: 56199 - protein, 7 aa, Artificial sequence
  Protein classification predicting sequence
RQAAEVL

SEQ ID NO: 56200 - protein, 35 aa, Artificial sequence
  Protein classification predicting sequence
EANAVSDNPLVFAAEGDVISGGNFHAEPVAMAADN

SEQ ID NO: 56201 - protein, 14 aa, Artificial sequence
  Protein classification predicting sequence
ALAIAEIGSLSERR

SEQ ID NO: 56202 - protein, 13 aa, Artificial sequence
  Protein classification predicting sequence
NLQRSLVLSHAAG

SEQ ID NO: 56203 - protein, 14 aa, Artificial sequence
  Protein classification predicting sequence
LAAKEGLALLNGTQ

SEQ ID NO: 56204 - protein, 8 aa, Artificial sequence
  Protein classification predicting sequence
RGQRGQID

SEQ ID NO: 56205 - protein, 8 aa, Artificial sequence
  Protein classification predicting sequence
LLGEGKAR

SEQ ID NO: 56206 - protein, 15 aa, Artificial sequence
  Protein classification predicting sequence
PCIPSKGSVGASGDL

SEQ ID NO: 56207 - protein, 12 aa, Artificial sequence
  Protein classification predicting sequence
VQDPYSLRCQPQ

SEQ ID NO: 56208 - protein, 11 aa, Artificial sequence
  Protein classification predicting sequence
SGGNFHAEPVA

SEQ ID NO: 56209 - protein, 15 aa, Artificial sequence
  Protein classification predicting sequence
SGGNFHAEPVAFAAD

SEQ ID NO: 56210 - protein, 9 aa, Artificial sequence
  Protein classification predicting sequence
LALAIAEIG

SEQ ID NO: 56211 - protein, 9 aa, Artificial sequence
  Protein classification predicting sequence
ERRIALLID

SEQ ID NO: 56212 - protein, 6 aa, Artificial sequence
  Protein classification predicting sequence
FAPDIE

SEQ ID NO: 56213 - protein, 8 aa, Artificial sequence
  Protein classification predicting sequence
GALSTDAA

SEQ ID NO: 56214 - protein, 9 aa, Artificial sequence
  Protein classification predicting sequence
EIGSLSERR

SEQ ID NO: 56215 - protein, 29 aa, Artificial sequence
  Protein classification predicting sequence
AYPASVDSIPTSANQEDHVSMAAHGARRL

SEQ ID NO: 56216 - protein, 43 aa, Artificial sequence
  Protein classification predicting sequence
SGIRLSVIEALIALVNAGVYPLIPAKGSVGASGDLAPLAHLSL

SEQ ID NO: 56217 - protein, 11 aa, Artificial sequence
  Protein classification predicting sequence
KEGLALLNGTQ

SEQ ID NO: 56218 - protein, 15 aa, Artificial sequence
  Protein classification predicting sequence
LMMDKHMSQLPPFLV

SEQ ID NO: 56219 - protein, 6 aa, Artificial sequence
  Protein classification predicting sequence
RLWEMA

SEQ ID NO: 56220 - protein, 13 aa, Artificial sequence
  Protein classification predicting sequence
EANAVSDNPLVFA

SEQ ID NO: 56221 - protein, 37 aa, Artificial sequence
  Protein classification predicting sequence
AGEVISGGNFHAEPVAMAADNLALAIAEIGALSERRI

SEQ ID NO: 56222 - protein, 12 aa, Artificial sequence
  Protein classification predicting sequence
LQRSIVLSHAAG

SEQ ID NO: 56223 - protein, 8 aa, Artificial sequence
  Protein classification predicting sequence
MVLKINSL

SEQ ID NO: 56224 - protein, 7 aa, Artificial sequence
  Protein classification predicting sequence
RGFSGIR

SEQ ID NO: 56225 - protein, 8 aa, Artificial sequence
  Protein classification predicting sequence
GAMSVEAA

SEQ ID NO: 56226 - protein, 7 aa, Artificial sequence
  Protein classification predicting sequence
GSRSPFD

SEQ ID NO: 56227 - protein, 23 aa, Artificial sequence
  Protein classification predicting sequence
NGGVNSGFMIAQVTAAALASENK

SEQ ID NO: 56228 - protein, 8 aa, Artificial sequence
  Protein classification predicting sequence
LAIELLAA

SEQ ID NO: 56229 - protein, 7 aa, Artificial sequence
  Protein classification predicting sequence
RLMMVLK

SEQ ID NO: 56230 - protein, 6 aa, Artificial sequence
  Protein classification predicting sequence
RCQPQV

SEQ ID NO: 56231 - protein, 10 aa, Artificial sequence
  Protein classification predicting sequence
SGGNFHAEPV

SEQ ID NO: 56232 - protein, 6 aa, Artificial sequence
  Protein classification predicting sequence
QTSTAL

SEQ ID NO: 56233 - protein, 62 aa, Artificial sequence
  Protein classification predicting sequence
IKSFLQQQSKIEIIDDALERVKKSRAVVERIIENEETVYGITTGFGLFSDVRIDPTQYNELQ

SEQ ID NO: 56234 - protein, 10 aa, Artificial sequence
  Protein classification predicting sequence
EFRSIVPSIT

SEQ ID NO: 56235 - protein, 7 aa, Artificial sequence
  Protein classification predicting sequence
NSATDNP

SEQ ID NO: 56236 - protein, 10 aa, Artificial sequence
  Protein classification predicting sequence
NSGFMIAQVT

SEQ ID NO: 56237 - protein, 7 aa, Artificial sequence
  Protein classification predicting sequence
DSIPSSA

SEQ ID NO: 56238 - protein, 22 aa, Artificial sequence
  Protein classification predicting sequence
EGSQNTTVATQSRVQDPYTLRC

SEQ ID NO: 56239 - protein, 5 aa, Artificial sequence
  Protein classification predicting sequence
YTLRC

SEQ ID NO: 56240 - protein, 17 aa, Artificial sequence
  Protein classification predicting sequence
RIVATEIMAACQALDLK

SEQ ID NO: 56241 - protein, 39 aa, Artificial sequence
  Protein classification predicting sequence
ENHELGKGTKVAYDLFRKEVNFIEHDKHIEIYDELNKAS

SEQ ID NO: 56242 - protein, 9 aa, Artificial sequence
  Protein classification predicting sequence
VYGITTGFG

SEQ ID NO: 56243 - protein, 12 aa, Artificial sequence
  Protein classification predicting sequence
GSLGASGDLAPL

SEQ ID NO: 56244 - protein, 9 aa, Artificial sequence
  Protein classification predicting sequence
VSMGTTAAR

SEQ ID NO: 56245 - protein, 7 aa, Artificial sequence
  Protein classification predicting sequence
RRVLAIE

SEQ ID NO: 56246 - protein, 17 aa, Artificial sequence
  Protein classification predicting sequence
GKVVYGITTGFGKFSDV

SEQ ID NO: 56247 - protein, 15 aa, Artificial sequence
  Protein classification predicting sequence
EIRVQDAYTLRCIPQ

SEQ ID NO: 56248 - protein, 6 aa, Artificial sequence
  Protein classification predicting sequence
LRCIPQ

SEQ ID NO: 56249 - protein, 6 aa, Artificial sequence
  Protein classification predicting sequence
THASGF

SEQ ID NO: 56250 - protein, 10 aa, Artificial sequence
  Protein classification predicting sequence
GSLGASGDLA

SEQ ID NO: 56251 - protein, 9 aa, Artificial sequence
  Protein classification predicting sequence
LAHPASVDS

SEQ ID NO: 56252 - protein, 10 aa, Artificial sequence
  Protein classification predicting sequence
LAHPASVDSI

SEQ ID NO: 56253 - protein, 37 aa, Artificial sequence
  Protein classification predicting sequence
AEDLFASATVCGAMSVEAALGSRRPFDPRIHRVRGHR

SEQ ID NO: 56254 - protein, 14 aa, Artificial sequence
  Protein classification predicting sequence
MGENTRGILAVEYL

SEQ ID NO: 56255 - protein, 18 aa, Artificial sequence
  Protein classification predicting sequence
ASATVCGAMSVEAALGSR

SEQ ID NO: 56256 - protein, 18 aa, Artificial sequence
  Protein classification predicting sequence
VQDPYSLRCQPQVMGACL

SEQ ID NO: 56257 - protein, 6 aa, Artificial sequence
  Protein classification predicting sequence
LEIEAN

SEQ ID NO: 56258 - protein, 9 aa, Artificial sequence
  Protein classification predicting sequence
VSDNPLVFA

SEQ ID NO: 56259 - protein, 19 aa, Artificial sequence
  Protein classification predicting sequence
DSLPTSANQEDHVSMATFA

SEQ ID NO: 56260 - protein, 8 aa, Artificial sequence
  Protein classification predicting sequence
AALASENK

SEQ ID NO: 56261 - protein, 11 aa, Artificial sequence
  Protein classification predicting sequence
GASGDLAPLSH

SEQ ID NO: 56262 - protein, 9 aa, Artificial sequence
  Protein classification predicting sequence
VLSHAAGVG

SEQ ID NO: 56263 - protein, 25 aa, Artificial sequence
  Protein classification predicting sequence
VYPHIPLKGSVGASGDLAPLAHMSL

SEQ ID NO: 56264 - protein, 18 aa, Artificial sequence
  Protein classification predicting sequence
NGGVNSGFMIAQVTAAAL

SEQ ID NO: 56265 - protein, 14 aa, Artificial sequence
  Protein classification predicting sequence
TEAPLRMLMNNLDP

SEQ ID NO: 56266 - protein, 13 aa, Artificial sequence
  Protein classification predicting sequence
VQSGKPVGVFRTH

SEQ ID NO: 56267 - protein, 18 aa, Artificial sequence
  Protein classification predicting sequence
APRVLIANSNLVPHWANW

SEQ ID NO: 56268 - protein, 7 aa, Artificial sequence
  Protein classification predicting sequence
GIGPFRW

SEQ ID NO: 56269 - protein, 9 aa, Artificial sequence
  Protein classification predicting sequence
KTDAKVKEL

SEQ ID NO: 56270 - protein, 6 aa, Artificial sequence
  Protein classification predicting sequence
GELKAP

SEQ ID NO: 56271 - protein, 18 aa, Artificial sequence
  Protein classification predicting sequence
NDPATGVMRHADAGYDIA

SEQ ID NO: 56272 - protein, 7 aa, Artificial sequence
  Protein classification predicting sequence
CAKEQGL

SEQ ID NO: 56273 - protein, 7 aa, Artificial sequence
  Protein classification predicting sequence
WANWDHF

SEQ ID NO: 56274 - protein, 7 aa, Artificial sequence
  Protein classification predicting sequence
QGTYETF

SEQ ID NO: 56275 - protein, 7 aa, Artificial sequence
  Protein classification predicting sequence
WLGYGER

SEQ ID NO: 56276 - protein, 11 aa, Artificial sequence
  Protein classification predicting sequence
APIVIGRDHLD

SEQ ID NO: 56277 - protein, 17 aa, Artificial sequence
  Protein classification predicting sequence
HHGGGVGMGYSLHAGMV

SEQ ID NO: 56278 - protein, 8 aa, Artificial sequence
  Protein classification predicting sequence
RHVDAGYD

SEQ ID NO: 56279 - protein, 24 aa, Artificial sequence
  Protein classification predicting sequence
ECKGWEQEAVLRMLYNNLDPEVAE

SEQ ID NO: 56280 - protein, 6 aa, Artificial sequence
  Protein classification predicting sequence
VYGGIG

SEQ ID NO: 56281 - protein, 7 aa, Artificial sequence
  Protein classification predicting sequence
QSGKPVG

SEQ ID NO: 56282 - protein, 6 aa, Artificial sequence
  Protein classification predicting sequence
LVPKWA

SEQ ID NO: 56283 - protein, 18 aa, Artificial sequence
  Protein classification predicting sequence
MYGQMTAGSWIYIGSQGI

SEQ ID NO: 56284 - protein, 9 aa, Artificial sequence
  Protein classification predicting sequence
LSIGLVGNA

SEQ ID NO: 56285 - protein, 10 aa, Artificial sequence
  Protein classification predicting sequence
DYGNNIRQVA

SEQ ID NO: 56286 - protein, 10 aa, Artificial sequence
  Protein classification predicting sequence
FQGLPARICW

SEQ ID NO: 56287 - protein, 15 aa, Artificial sequence
  Protein classification predicting sequence
LNALINTAAGGSWIS

SEQ ID NO: 56288 - protein, 10 aa, Artificial sequence
  Protein classification predicting sequence
RVLTTDPGMG

SEQ ID NO: 56289 - protein, 7 aa, Artificial sequence
  Protein classification predicting sequence
RHADAGY

SEQ ID NO: 56290 - protein, 11 aa, Artificial sequence
  Protein classification predicting sequence
GWEQEAVLRML

SEQ ID NO: 56291 - protein, 11 aa, Artificial sequence
  Protein classification predicting sequence
GLGGMGGAQPL

SEQ ID NO: 56292 - protein, 12 aa, Artificial sequence
  Protein classification predicting sequence
DIVTDQTSAHDP

SEQ ID NO: 56293 - protein, 16 aa, Artificial sequence
  Protein classification predicting sequence
FPGFVPAYIRPLFCEG

SEQ ID NO: 56294 - protein, 8 aa, Artificial sequence
  Protein classification predicting sequence
MKDGSDAV

SEQ ID NO: 56295 - protein, 24 aa, Artificial sequence
  Protein classification predicting sequence
QSGKPVGVFRTHADAPRVLIANSN

SEQ ID NO: 56296 - protein, 10 aa, Artificial sequence
  Protein classification predicting sequence
APRVLIANSN

SEQ ID NO: 56297 - protein, 5 aa, Artificial sequence
  Protein classification predicting sequence
VPHWA

SEQ ID NO: 56298 - protein, 6 aa, Artificial sequence
  Protein classification predicting sequence
HFNELD

SEQ ID NO: 56299 - protein, 14 aa, Artificial sequence
  Protein classification predicting sequence
GLGGMGGAQPLAAT

SEQ ID NO: 56300 - protein, 6 aa, Artificial sequence
  Protein classification predicting sequence
RLRTGY

SEQ ID NO: 56301 - protein, 20 aa, Artificial sequence
  Protein classification predicting sequence
NAFDFPGFVPAYIRPLFCRG

SEQ ID NO: 56302 - protein, 17 aa, Artificial sequence
  Protein classification predicting sequence
DGSDAVSDWPLLNALLN

SEQ ID NO: 56303 - protein, 13 aa, Artificial sequence
  Protein classification predicting sequence
QGIVQGTYETFVE

SEQ ID NO: 56304 - protein, 9 aa, Artificial sequence
  Protein classification predicting sequence
HLHNWLDMA

SEQ ID NO: 56305 - protein, 8 aa, Artificial sequence
  Protein classification predicting sequence
VIGRDHLD

SEQ ID NO: 56306 - protein, 16 aa, Artificial sequence
  Protein classification predicting sequence
LAMYGQMTAGSWIYIG

SEQ ID NO: 56307 - protein, 17 aa, Artificial sequence
  Protein classification predicting sequence
ELVVYGGIGRAARDWES

SEQ ID NO: 56308 - protein, 13 aa, Artificial sequence
  Protein classification predicting sequence
APRVLIANSNLVP

SEQ ID NO: 56309 - protein, 18 aa, Artificial sequence
  Protein classification predicting sequence
GLGGMGGAQPLAAVMAGA

SEQ ID NO: 56310 - protein, 6 aa, Artificial sequence
  Protein classification predicting sequence
RGVRPD

SEQ ID NO: 56311 - protein, 19 aa, Artificial sequence
  Protein classification predicting sequence
KVKELIPDNPHLHNWLDMA

SEQ ID NO: 56312 - protein, 40 aa, Artificial sequence
  Protein classification predicting sequence
DGSDAVSDWPLLNALLNTASGATWVSLHHGGGVGMGFSQH

SEQ ID NO: 56313 - protein, 6 aa, Artificial sequence
  Protein classification predicting sequence
IRAPRG

SEQ ID NO: 56314 - protein, 12 aa, Artificial sequence
  Protein classification predicting sequence
LVVYGGIGRAAR

SEQ ID NO: 56315 - protein, 16 aa, Artificial sequence
  Protein classification predicting sequence
LTGGLGGMGGAQPLAA

SEQ ID NO: 56316 - protein, 6 aa, Artificial sequence
  Protein classification predicting sequence
RIDFRL

SEQ ID NO: 56317 - protein, 7 aa, Artificial sequence
  Protein classification predicting sequence
GYLPQGW

SEQ ID NO: 56318 - protein, 7 aa, Artificial sequence
  Protein classification predicting sequence
RPLFCEG

SEQ ID NO: 56319 - protein, 5 aa, Artificial sequence
  Protein classification predicting sequence
GPFRW

SEQ ID NO: 56320 - protein, 13 aa, Artificial sequence
  Protein classification predicting sequence
ALSGDPEDIYKTD

SEQ ID NO: 56321 - protein, 8 aa, Artificial sequence
  Protein classification predicting sequence
KVKELIPD

SEQ ID NO: 56322 - protein, 6 aa, Artificial sequence
  Protein classification predicting sequence
AFNEMV

SEQ ID NO: 56323 - protein, 20 aa, Artificial sequence
  Protein classification predicting sequence
VIGRDHLDSGSVASPNRETE

SEQ ID NO: 56324 - protein, 11 aa, Artificial sequence
  Protein classification predicting sequence
TGVMRHADAGY

SEQ ID NO: 56325 - protein, 9 aa, Artificial sequence
  Protein classification predicting sequence
RMLMNNLDP

SEQ ID NO: 56326 - protein, 6 aa, Artificial sequence
  Protein classification predicting sequence
LVVYGG

SEQ ID NO: 56327 - protein, 6 aa, Artificial sequence
  Protein classification predicting sequence
AARNWE

SEQ ID NO: 56328 - protein, 8 aa, Artificial sequence
  Protein classification predicting sequence
LVQSGKPV

SEQ ID NO: 56329 - protein, 9 aa, Artificial sequence
  Protein classification predicting sequence
TDQTSAHDP

SEQ ID NO: 56330 - protein, 6 aa, Artificial sequence
  Protein classification predicting sequence
GSVASP

SEQ ID NO: 56331 - protein, 6 aa, Artificial sequence
  Protein classification predicting sequence
RETEAM

SEQ ID NO: 56332 - protein, 7 aa, Artificial sequence
  Protein classification predicting sequence
VIVADGT

SEQ ID NO: 56333 - protein, 6 aa, Artificial sequence
  Protein classification predicting sequence
GRWVLT

SEQ ID NO: 56334 - protein, 7 aa, Artificial sequence
  Protein classification predicting sequence
YIRPLFC

SEQ ID NO: 56335 - protein, 9 aa, Artificial sequence
  Protein classification predicting sequence
WLDMARERI

SEQ ID NO: 56336 - protein, 15 aa, Artificial sequence
  Protein classification predicting sequence
NDPATGVMRHADAGY

SEQ ID NO: 56337 - protein, 17 aa, Artificial sequence
  Protein classification predicting sequence
NAPRVLIANSNLVPHWA

SEQ ID NO: 56338 - protein, 16 aa, Artificial sequence
  Protein classification predicting sequence
VTDQTSAHDPLNGYLP

SEQ ID NO: 56339 - protein, 10 aa, Artificial sequence
  Protein classification predicting sequence
DIYKTDAKVK

SEQ ID NO: 56340 - protein, 8 aa, Artificial sequence
  Protein classification predicting sequence
WEHFNELD

SEQ ID NO: 56341 - protein, 10 aa, Artificial sequence
  Protein classification predicting sequence
GPFRWAALSG

SEQ ID NO: 56342 - protein, 9 aa, Artificial sequence
  Protein classification predicting sequence
SPNRETEAM

SEQ ID NO: 56343 - protein, 14 aa, Artificial sequence
  Protein classification predicting sequence
TGVMRHADAGYDIA

SEQ ID NO: 56344 - protein, 6 aa, Artificial sequence
  Protein classification predicting sequence
LTAKSW

SEQ ID NO: 56345 - protein, 24 aa, Artificial sequence
  Protein classification predicting sequence
WEHFNELDAKGLAMYGQMTAGSWI

SEQ ID NO: 56346 - protein, 9 aa, Artificial sequence
  Protein classification predicting sequence
SPNRETESM

SEQ ID NO: 56347 - protein, 6 aa, Artificial sequence
  Protein classification predicting sequence
IECQQS

SEQ ID NO: 56348 - protein, 16 aa, Artificial sequence
  Protein classification predicting sequence
DAVSDWPLLNALLNTA

SEQ ID NO: 56349 - protein, 16 aa, Artificial sequence
  Protein classification predicting sequence
GATWVSLHHGGGVGMG

SEQ ID NO: 56350 - protein, 9 aa, Artificial sequence
  Protein classification predicting sequence
HHGGGVGMG

SEQ ID NO: 56351 - protein, 13 aa, Artificial sequence
  Protein classification predicting sequence
ELVVYGGIGRAAR

SEQ ID NO: 56352 - protein, 16 aa, Artificial sequence
  Protein classification predicting sequence
APRVLIANSNLVPHWA

SEQ ID NO: 56353 - protein, 9 aa, Artificial sequence
  Protein classification predicting sequence
FNELDKKGL

SEQ ID NO: 56354 - protein, 14 aa, Artificial sequence
  Protein classification predicting sequence
FQGLPARICWVGLG

SEQ ID NO: 56355 - protein, 9 aa, Artificial sequence
  Protein classification predicting sequence
GNAAEILPE

SEQ ID NO: 56356 - protein, 14 aa, Artificial sequence
  Protein classification predicting sequence
FPGFVPAYIRPLFC

SEQ ID NO: 56357 - protein, 9 aa, Artificial sequence
  Protein classification predicting sequence
LGLAFNEMV

SEQ ID NO: 56358 - protein, 10 aa, Artificial sequence
  Protein classification predicting sequence
LGLAFNEMVR

SEQ ID NO: 56359 - protein, 12 aa, Artificial sequence
  Protein classification predicting sequence
QSGKPVGVFKTH

SEQ ID NO: 56360 - protein, 8 aa, Artificial sequence
  Protein classification predicting sequence
LDDALARI

SEQ ID NO: 56361 - protein, 7 aa, Artificial sequence
  Protein classification predicting sequence
KSWLTEA

SEQ ID NO: 56362 - protein, 15 aa, Artificial sequence
  Protein classification predicting sequence
VAERPEDLVVYGGIG

SEQ ID NO: 56363 - protein, 8 aa, Artificial sequence
  Protein classification predicting sequence
LVVYGGIG

SEQ ID NO: 56364 - protein, 29 aa, Artificial sequence
  Protein classification predicting sequence
APRVLIANSNLVPHWANWEHFNELDKQGL

SEQ ID NO: 56365 - protein, 9 aa, Artificial sequence
  Protein classification predicting sequence
GLGGMGGAQ

SEQ ID NO: 56366 - protein, 6 aa, Artificial sequence
  Protein classification predicting sequence
TMAGFS

SEQ ID NO: 56367 - protein, 10 aa, Artificial sequence
  Protein classification predicting sequence
NAADVFAELV

SEQ ID NO: 56368 - protein, 20 aa, Artificial sequence
  Protein classification predicting sequence
NAFDFPGFVPAYIRPLFCEG

SEQ ID NO: 56369 - protein, 6 aa, Artificial sequence
  Protein classification predicting sequence
APRVLI

SEQ ID NO: 56370 - protein, 13 aa, Artificial sequence
  Protein classification predicting sequence
TDQTSAHDPLNGY

SEQ ID NO: 56371 - protein, 11 aa, Artificial sequence
  Protein classification predicting sequence
GSVASPNRETE

SEQ ID NO: 56372 - protein, 9 aa, Artificial sequence
  Protein classification predicting sequence
NNLDPEVAE

SEQ ID NO: 56373 - protein, 18 aa, Artificial sequence
  Protein classification predicting sequence
MYGQMTAGSWIYIGTQGI

SEQ ID NO: 56374 - protein, 20 aa, Artificial sequence
  Protein classification predicting sequence
TLTAGLGGMGGAQPLAVTMN

SEQ ID NO: 56375 - protein, 7 aa, Artificial sequence
  Protein classification predicting sequence
IGRDHLD

SEQ ID NO: 56376 - protein, 16 aa, Artificial sequence
  Protein classification predicting sequence
AGLGGMGGAQPLAITM

SEQ ID NO: 56377 - protein, 7 aa, Artificial sequence
  Protein classification predicting sequence
DYGNNIR

SEQ ID NO: 56378 - protein, 9 aa, Artificial sequence
  Protein classification predicting sequence
APIVIGRDH

SEQ ID NO: 56379 - protein, 8 aa, Artificial sequence
  Protein classification predicting sequence
LNALLNTA

SEQ ID NO: 56380 - protein, 6 aa, Artificial sequence
  Protein classification predicting sequence
GATWVS

SEQ ID NO: 56381 - protein, 9 aa, Artificial sequence
  Protein classification predicting sequence
NNLDPDVAE

SEQ ID NO: 56382 - protein, 14 aa, Artificial sequence
  Protein classification predicting sequence
MYGQMTAGSWIYIG

SEQ ID NO: 56383 - protein, 7 aa, Artificial sequence
  Protein classification predicting sequence
QGIVQGT

SEQ ID NO: 56384 - protein, 8 aa, Artificial sequence
  Protein classification predicting sequence
ETFVEAGR

SEQ ID NO: 56385 - protein, 40 aa, Artificial sequence
  Protein classification predicting sequence
DGSDAVSDWPLLNALLNTAGGATWVSLHHGGGVGMGFSQH

SEQ ID NO: 56386 - protein, 9 aa, Artificial sequence
  Protein classification predicting sequence
SVGLLGNAA

SEQ ID NO: 56387 - protein, 21 aa, Artificial sequence
  Protein classification predicting sequence
RGAATLDYGNNIRQMALEEGV

SEQ ID NO: 56388 - protein, 64 aa, Artificial sequence
  Protein classification predicting sequence
NAFDFPGFVPAYIRPLFCEGIGPFRWAALSGDPEDIYKTDQKVKELIPDNPHLHNWLDMARERI

SEQ ID NO: 56389 - protein, 13 aa, Artificial sequence
  Protein classification predicting sequence
HLHNWLDMARERI

SEQ ID NO: 56390 - protein, 13 aa, Artificial sequence
  Protein classification predicting sequence
FQGLPARICWVGL

SEQ ID NO: 56391 - protein, 28 aa, Artificial sequence
  Protein classification predicting sequence
LRAKSWLTEAPLRMLMNNLDPDVAEHPH

SEQ ID NO: 56392 - protein, 27 aa, Artificial sequence
  Protein classification predicting sequence
MYGQMTAGSWIYIGSQGIVQGTYETFV

SEQ ID NO: 56393 - protein, 12 aa, Artificial sequence
  Protein classification predicting sequence
GLGGMGGAQPLA

SEQ ID NO: 56394 - protein, 27 aa, Artificial sequence
  Protein classification predicting sequence
TMAGFSMIAVECDESRIDYRLRTGYVD

SEQ ID NO: 56395 - protein, 10 aa, Artificial sequence
  Protein classification predicting sequence
VTDQTSAHDP

SEQ ID NO: 56396 - protein, 13 aa, Artificial sequence
  Protein classification predicting sequence
TLLVQSGKPVGVF

SEQ ID NO: 56397 - protein, 7 aa, Artificial sequence
  Protein classification predicting sequence
SVGLLGN

SEQ ID NO: 56398 - protein, 7 aa, Artificial sequence
  Protein classification predicting sequence
MVRSGEL

SEQ ID NO: 56399 - protein, 13 aa, Artificial sequence
  Protein classification predicting sequence
GSVASPNRETEAM

SEQ ID NO: 56400 - protein, 18 aa, Artificial sequence
  Protein classification predicting sequence
QGIVQGTYETFVEAGRQH

SEQ ID NO: 56401 - protein, 10 aa, Artificial sequence
  Protein classification predicting sequence
DYGNNIRQMA

SEQ ID NO: 56402 - protein, 10 aa, Artificial sequence
  Protein classification predicting sequence
GPFRWVALSG

SEQ ID NO: 56403 - protein, 7 aa, Artificial sequence
  Protein classification predicting sequence
SREIIAD

SEQ ID NO: 56404 - protein, 7 aa, Artificial sequence
  Protein classification predicting sequence
CDKNMPG

SEQ ID NO: 56405 - protein, 10 aa, Artificial sequence
  Protein classification predicting sequence
CGGMYTANTM

SEQ ID NO: 56406 - protein, 7 aa, Artificial sequence
  Protein classification predicting sequence
PGMPEML

SEQ ID NO: 56407 - protein, 8 aa, Artificial sequence
  Protein classification predicting sequence
DFTMSDID

SEQ ID NO: 56408 - protein, 9 aa, Artificial sequence
  Protein classification predicting sequence
IGHASPEAA

SEQ ID NO: 56409 - protein, 7 aa, Artificial sequence
  Protein classification predicting sequence
LVAREIE

SEQ ID NO: 56410 - protein, 23 aa, Artificial sequence
  Protein classification predicting sequence
DFGKPIIAVVNSFTQFVPGHVHL

SEQ ID NO: 56411 - protein, 21 aa, Artificial sequence
  Protein classification predicting sequence
AGGVAKEFNTIAVDDGIAMGH

SEQ ID NO: 56412 - protein, 10 aa, Artificial sequence
  Protein classification predicting sequence
GMLYSLPSRE

SEQ ID NO: 56413 - protein, 7 aa, Artificial sequence
  Protein classification predicting sequence
LHLLAAA

SEQ ID NO: 56414 - protein, 12 aa, Artificial sequence
  Protein classification predicting sequence
GGPGMQEMLYPT

SEQ ID NO: 56415 - protein, 17 aa, Artificial sequence
  Protein classification predicting sequence
GGPGMQEMLYPTSYLKS

SEQ ID NO: 56416 - protein, 8 aa, Artificial sequence
  Protein classification predicting sequence
IAIDIPNR

SEQ ID NO: 56417 - protein, 10 aa, Artificial sequence
  Protein classification predicting sequence
TQFVPGHVHL

SEQ ID NO: 56418 - protein, 7 aa, Artificial sequence
  Protein classification predicting sequence
DESALPR

SEQ ID NO: 56419 - protein, 8 aa, Artificial sequence
  Protein classification predicting sequence
AMGGSTNT

SEQ ID NO: 56420 - protein, 7 aa, Artificial sequence
  Protein classification predicting sequence
LHILAAA

SEQ ID NO: 56421 - protein, 6 aa, Artificial sequence
  Protein classification predicting sequence
RWDSLD

SEQ ID NO: 56422 - protein, 9 aa, Artificial sequence
  Protein classification predicting sequence
GGPGMQEML

SEQ ID NO: 56423 - protein, 6 aa, Artificial sequence
  Protein classification predicting sequence
LIEDGD

SEQ ID NO: 56424 - protein, 7 aa, Artificial sequence
  Protein classification predicting sequence
AMGHEGM

SEQ ID NO: 56425 - protein, 6 aa, Artificial sequence
  Protein classification predicting sequence
MGHEGM

SEQ ID NO: 56426 - protein, 10 aa, Artificial sequence
  Protein classification predicting sequence
GSCAGMFTAN

SEQ ID NO: 56427 - protein, 7 aa, Artificial sequence
  Protein classification predicting sequence
TDGRFSG

SEQ ID NO: 56428 - protein, 9 aa, Artificial sequence
  Protein classification predicting sequence
GQLVAREIE

SEQ ID NO: 56429 - protein, 6 aa, Artificial sequence
  Protein classification predicting sequence
LPRSIA

SEQ ID NO: 56430 - protein, 14 aa, Artificial sequence
  Protein classification predicting sequence
AAPGGVPTQVAFSQ

SEQ ID NO: 56431 - protein, 7 aa, Artificial sequence
  Protein classification predicting sequence
RKVTTAL

SEQ ID NO: 56432 - protein, 9 aa, Artificial sequence
  Protein classification predicting sequence
GGPGMREML

SEQ ID NO: 56433 - protein, 11 aa, Artificial sequence
  Protein classification predicting sequence
TDGRFSGATRG

SEQ ID NO: 56434 - protein, 7 aa, Artificial sequence
  Protein classification predicting sequence
PEAAAGG

SEQ ID NO: 56435 - protein, 9 aa, Artificial sequence
  Protein classification predicting sequence
VYGGTIKPG

SEQ ID NO: 56436 - protein, 10 aa, Artificial sequence
  Protein classification predicting sequence
GMVVGHVAPE

SEQ ID NO: 56437 - protein, 6 aa, Artificial sequence
  Protein classification predicting sequence
SLPSRE

SEQ ID NO: 56438 - protein, 6 aa, Artificial sequence
  Protein classification predicting sequence
PRDIVT

SEQ ID NO: 56439 - protein, 7 aa, Artificial sequence
  Protein classification predicting sequence
ADLKPGG

SEQ ID NO: 56440 - protein, 14 aa, Artificial sequence
  Protein classification predicting sequence
DIKPRSRDVTDGLE

SEQ ID NO: 56441 - protein, 9 aa, Artificial sequence
  Protein classification predicting sequence
RGMLRAVGM

SEQ ID NO: 56442 - protein, 16 aa, Artificial sequence
  Protein classification predicting sequence
AERLDGSVLLAGCDKS

SEQ ID NO: 56443 - protein, 12 aa, Artificial sequence
  Protein classification predicting sequence
PVVMKALLDAGL

SEQ ID NO: 56444 - protein, 16 aa, Artificial sequence
  Protein classification predicting sequence
IRYEGPKGGPGMREML

SEQ ID NO: 56445 - protein, 26 aa, Artificial sequence
  Protein classification predicting sequence
IRYEGPKGGPGMREMLAITGAIKGAG

SEQ ID NO: 56446 - protein, 6 aa, Artificial sequence
  Protein classification predicting sequence
VDESIL

SEQ ID NO: 56447 - protein, 7 aa, Artificial sequence
  Protein classification predicting sequence
YSLPSRE

SEQ ID NO: 56448 - protein, 10 aa, Artificial sequence
  Protein classification predicting sequence
LHGDCLTVTG

SEQ ID NO: 56449 - protein, 16 aa, Artificial sequence
  Protein classification predicting sequence
IADSVEYMVNAHCADA

SEQ ID NO: 56450 - protein, 9 aa, Artificial sequence
  Protein classification predicting sequence
SKDGGLAVL

SEQ ID NO: 56451 - protein, 8 aa, Artificial sequence
  Protein classification predicting sequence
GNIALDGC

SEQ ID NO: 56452 - protein, 19 aa, Artificial sequence
  Protein classification predicting sequence
IRYEGPKGGPGMQEMLYPT

SEQ ID NO: 56453 - protein, 16 aa, Artificial sequence
  Protein classification predicting sequence
TDGRFSGGTSGLSIGH

SEQ ID NO: 56454 - protein, 11 aa, Artificial sequence
  Protein classification predicting sequence
AIGGCDKNMPG

SEQ ID NO: 56455 - protein, 10 aa, Artificial sequence
  Protein classification predicting sequence
GHLAILKGNL

SEQ ID NO: 56456 - protein, 15 aa, Artificial sequence
  Protein classification predicting sequence
IALVQEGDSITIDAH

SEQ ID NO: 56457 - protein, 8 aa, Artificial sequence
  Protein classification predicting sequence
EVLGLALP

SEQ ID NO: 56458 - protein, 9 aa, Artificial sequence
  Protein classification predicting sequence
ILAIDPRRE

SEQ ID NO: 56459 - protein, 7 aa, Artificial sequence
  Protein classification predicting sequence
KPRDIVT

SEQ ID NO: 56460 - protein, 8 aa, Artificial sequence
  Protein classification predicting sequence
NTILHLLA

SEQ ID NO: 56461 - protein, 7 aa, Artificial sequence
  Protein classification predicting sequence
VKTAGVD

SEQ ID NO: 56462 - protein, 15 aa, Artificial sequence
  Protein classification predicting sequence
VVVIRYEGPKGGPGM

SEQ ID NO: 56463 - protein, 8 aa, Artificial sequence
  Protein classification predicting sequence
IALVEDGD

SEQ ID NO: 56464 - protein, 8 aa, Artificial sequence
  Protein classification predicting sequence
LAKYAKLV

SEQ ID NO: 56465 - protein, 9 aa, Artificial sequence
  Protein classification predicting sequence
NCDKITPGM

SEQ ID NO: 56466 - protein, 12 aa, Artificial sequence
  Protein classification predicting sequence
NIPTVFVSGGPM

SEQ ID NO: 56467 - protein, 9 aa, Artificial sequence
  Protein classification predicting sequence
GGPGMPEML

SEQ ID NO: 56468 - protein, 7 aa, Artificial sequence
  Protein classification predicting sequence
VTSANTG

SEQ ID NO: 56469 - protein, 6 aa, Artificial sequence
  Protein classification predicting sequence
NSYIDI

SEQ ID NO: 56470 - protein, 10 aa, Artificial sequence
  Protein classification predicting sequence
NSYIDIIPGH

SEQ ID NO: 56471 - protein, 40 aa, Artificial sequence
  Protein classification predicting sequence
VAKEAIREAGGIPFEFNTIGVDDGIAMGHIGMRYSLPSRE

SEQ ID NO: 56472 - protein, 16 aa, Artificial sequence
  Protein classification predicting sequence
DAAETVINAHWFDGVF

SEQ ID NO: 56473 - protein, 6 aa, Artificial sequence
  Protein classification predicting sequence
ALPGNG

SEQ ID NO: 56474 - protein, 8 aa, Artificial sequence
  Protein classification predicting sequence
ALPGNGTI

SEQ ID NO: 56475 - protein, 11 aa, Artificial sequence
  Protein classification predicting sequence
KDIRPRDIITK

SEQ ID NO: 56476 - protein, 23 aa, Artificial sequence
  Protein classification predicting sequence
IDDAFALDMAMGGSTNTVLHTLA

SEQ ID NO: 56477 - protein, 6 aa, Artificial sequence
  Protein classification predicting sequence
HPDRIT

SEQ ID NO: 56478 - protein, 10 aa, Artificial sequence
  Protein classification predicting sequence
NPYSPVGGLS

SEQ ID NO: 56479 - protein, 7 aa, Artificial sequence
  Protein classification predicting sequence
GAVIKVG

SEQ ID NO: 56480 - protein, 25 aa, Artificial sequence
  Protein classification predicting sequence
GHVVVIRYEGPKGGPGMPEMLAPTS

SEQ ID NO: 56481 - protein, 13 aa, Artificial sequence
  Protein classification predicting sequence
GGPGMPEMLAPTS

SEQ ID NO: 56482 - protein, 7 aa, Artificial sequence
  Protein classification predicting sequence
IDLPNRT

SEQ ID NO: 56483 - protein, 6 aa, Artificial sequence
  Protein classification predicting sequence
GYLARY

SEQ ID NO: 56484 - protein, 39 aa, Artificial sequence
  Protein classification predicting sequence
VPFEFNTIGVDDGIAMGHIGMRYSLPSREIIADSVETVV

SEQ ID NO: 56485 - protein, 6 aa, Artificial sequence
  Protein classification predicting sequence
AHWFDG

SEQ ID NO: 56486 - protein, 12 aa, Artificial sequence
  Protein classification predicting sequence
NCDKITPGMLMA

SEQ ID NO: 56487 - protein, 7 aa, Artificial sequence
  Protein classification predicting sequence
FVSGGPM

SEQ ID NO: 56488 - protein, 7 aa, Artificial sequence
  Protein classification predicting sequence
AFALDMA

SEQ ID NO: 56489 - protein, 9 aa, Artificial sequence
  Protein classification predicting sequence
GGSTNTVLH

SEQ ID NO: 56490 - protein, 12 aa, Artificial sequence
  Protein classification predicting sequence
GGSTNTVLHTLA

SEQ ID NO: 56491 - protein, 6 aa, Artificial sequence
  Protein classification predicting sequence
GLSIGH

SEQ ID NO: 56492 - protein, 9 aa, Artificial sequence
  Protein classification predicting sequence
GMLYSLPSR

SEQ ID NO: 56493 - protein, 6 aa, Artificial sequence
  Protein classification predicting sequence
LCKVAP

SEQ ID NO: 56494 - protein, 10 aa, Artificial sequence
  Protein classification predicting sequence
KPIIAIANSF

SEQ ID NO: 56495 - protein, 7 aa, Artificial sequence
  Protein classification predicting sequence
EAIREAG

SEQ ID NO: 56496 - protein, 6 aa, Artificial sequence
  Protein classification predicting sequence
IPNCDK

SEQ ID NO: 56497 - protein, 7 aa, Artificial sequence
  Protein classification predicting sequence
PGMLMAA

SEQ ID NO: 56498 - protein, 7 aa, Artificial sequence
  Protein classification predicting sequence
CPTCGSC

SEQ ID NO: 56499 - protein, 11 aa, Artificial sequence
  Protein classification predicting sequence
GMFTANSMNCL

SEQ ID NO: 56500 - protein, 8 aa, Artificial sequence
  Protein classification predicting sequence
TKEAFENA

SEQ ID NO: 56501 - protein, 11 aa, Artificial sequence
  Protein classification predicting sequence
AMGGSTNTVLH

SEQ ID NO: 56502 - protein, 7 aa, Artificial sequence
  Protein classification predicting sequence
DVHRAGG

SEQ ID NO: 56503 - protein, 7 aa, Artificial sequence
  Protein classification predicting sequence
SGGSSGL

SEQ ID NO: 56504 - protein, 8 aa, Artificial sequence
  Protein classification predicting sequence
GDIIDIDI

SEQ ID NO: 56505 - protein, 6 aa, Artificial sequence
  Protein classification predicting sequence
ALKAYA

SEQ ID NO: 56506 - protein, 6 aa, Artificial sequence
  Protein classification predicting sequence
SADKGA

SEQ ID NO: 56507 - protein, 7 aa, Artificial sequence
  Protein classification predicting sequence
LWRATGM

SEQ ID NO: 56508 - protein, 8 aa, Artificial sequence
  Protein classification predicting sequence
FVSGGPME

SEQ ID NO: 56509 - protein, 17 aa, Artificial sequence
  Protein classification predicting sequence
GDVVVIRYEGPKGGPGM

SEQ ID NO: 56510 - protein, 26 aa, Artificial sequence
  Protein classification predicting sequence
YRSRTTTHGRNMAGARGLWRATGMKD

SEQ ID NO: 56511 - protein, 12 aa, Artificial sequence
  Protein classification predicting sequence
VFVSGGPMEAGK

SEQ ID NO: 56512 - protein, 7 aa, Artificial sequence
  Protein classification predicting sequence
LDLVDAM

SEQ ID NO: 56513 - protein, 9 aa, Artificial sequence
  Protein classification predicting sequence
AFENAMTLD

SEQ ID NO: 56514 - protein, 35 aa, Artificial sequence
  Protein classification predicting sequence
AFENAMTLDIAMGGSTNTVLHLLAAAQEAEIDFTM

SEQ ID NO: 56515 - protein, 6 aa, Artificial sequence
  Protein classification predicting sequence
HMEDVH

SEQ ID NO: 56516 - protein, 6 aa, Artificial sequence
  Protein classification predicting sequence
IRYEGP

SEQ ID NO: 56517 - protein, 8 aa, Artificial sequence
  Protein classification predicting sequence
TDGRFSGG

SEQ ID NO: 56518 - protein, 19 aa, Artificial sequence
  Protein classification predicting sequence
GGPGMQEMLYPTSYLKSKG

SEQ ID NO: 56519 - protein, 10 aa, Artificial sequence
  Protein classification predicting sequence
KPIIAVVNSF

SEQ ID NO: 56520 - protein, 6 aa, Artificial sequence
  Protein classification predicting sequence
QFVPGH

SEQ ID NO: 56521 - protein, 11 aa, Artificial sequence
  Protein classification predicting sequence
GGVAKEFNTIA

SEQ ID NO: 56522 - protein, 6 aa, Artificial sequence
  Protein classification predicting sequence
LPGNGT

SEQ ID NO: 56523 - protein, 8 aa, Artificial sequence
  Protein classification predicting sequence
EDVHRAGG

SEQ ID NO: 56524 - protein, 7 aa, Artificial sequence
  Protein classification predicting sequence
SQDGGLA

SEQ ID NO: 56525 - protein, 6 aa, Artificial sequence
  Protein classification predicting sequence
LYGNLA

SEQ ID NO: 56526 - protein, 13 aa, Artificial sequence
  Protein classification predicting sequence
VIRYEGPKGGPGM

SEQ ID NO: 56527 - protein, 20 aa, Artificial sequence
  Protein classification predicting sequence
VIRYEGPKGGPGMQEMLYPT

SEQ ID NO: 56528 - protein, 6 aa, Artificial sequence
  Protein classification predicting sequence
THGRNM

SEQ ID NO: 56529 - protein, 26 aa, Artificial sequence
  Protein classification predicting sequence
KEFNTIAIDDGIAMGHSGMLYSLPSR

SEQ ID NO: 56530 - protein, 7 aa, Artificial sequence
  Protein classification predicting sequence
NCDKITP

SEQ ID NO: 56531 - protein, 25 aa, Artificial sequence
  Protein classification predicting sequence
VIRYEGPKGGPGMQEMLYPTTYLKS

SEQ ID NO: 56532 - protein, 20 aa, Artificial sequence
  Protein classification predicting sequence
CALITDGRFSGGTSGLSIGH

SEQ ID NO: 56533 - protein, 10 aa, Artificial sequence
  Protein classification predicting sequence
GARALWRATG

SEQ ID NO: 56534 - protein, 7 aa, Artificial sequence
  Protein classification predicting sequence
KEFNTIA

SEQ ID NO: 56535 - protein, 6 aa, Artificial sequence
  Protein classification predicting sequence
HRAGGV

SEQ ID NO: 56536 - protein, 9 aa, Artificial sequence
  Protein classification predicting sequence
GCIVKTAGV

SEQ ID NO: 56537 - protein, 9 aa, Artificial sequence
  Protein classification predicting sequence
TSADKGAVR

SEQ ID NO: 56538 - protein, 11 aa, Artificial sequence
  Protein classification predicting sequence
LDIAMGGSTNT

SEQ ID NO: 56539 - protein, 9 aa, Artificial sequence
  Protein classification predicting sequence
LHLLAAAQE

SEQ ID NO: 56540 - protein, 14 aa, Artificial sequence
  Protein classification predicting sequence
LHLLAAAQEAEIDF

SEQ ID NO: 56541 - protein, 6 aa, Artificial sequence
  Protein classification predicting sequence
PAGIRT

SEQ ID NO: 56542 - protein, 8 aa, Artificial sequence
  Protein classification predicting sequence
SADKGAVR

SEQ ID NO: 56543 - protein, 8 aa, Artificial sequence
  Protein classification predicting sequence
GRNMAGAR

SEQ ID NO: 56544 - protein, 8 aa, Artificial sequence
  Protein classification predicting sequence
DFKKPIIA

SEQ ID NO: 56545 - protein, 9 aa, Artificial sequence
  Protein classification predicting sequence
FTANSMNCL

SEQ ID NO: 56546 - protein, 5 aa, Artificial sequence
  Protein classification predicting sequence
YHMED

SEQ ID NO: 56547 - protein, 6 aa, Artificial sequence
  Protein classification predicting sequence
LYGNIA

SEQ ID NO: 56548 - protein, 9 aa, Artificial sequence
  Protein classification predicting sequence
GCVVKTAGV

SEQ ID NO: 56549 - protein, 8 aa, Artificial sequence
  Protein classification predicting sequence
GHISPEAA

SEQ ID NO: 56550 - protein, 6 aa, Artificial sequence
  Protein classification predicting sequence
VFESQE

SEQ ID NO: 56551 - protein, 12 aa, Artificial sequence
  Protein classification predicting sequence
GLKDEDFDKPFI

SEQ ID NO: 56552 - protein, 7 aa, Artificial sequence
  Protein classification predicting sequence
GNGTILA

SEQ ID NO: 56553 - protein, 7 aa, Artificial sequence
  Protein classification predicting sequence
FNSQDEA

SEQ ID NO: 56554 - protein, 25 aa, Artificial sequence
  Protein classification predicting sequence
NSFTQFVPGHVHLKDLGQLVAREIE

SEQ ID NO: 56555 - protein, 17 aa, Artificial sequence
  Protein classification predicting sequence
VCISNCDKITPGMLMAA

SEQ ID NO: 56556 - protein, 8 aa, Artificial sequence
  Protein classification predicting sequence
LDLVDAMV

SEQ ID NO: 56557 - protein, 10 aa, Artificial sequence
  Protein classification predicting sequence
HMEDVHRAGG

SEQ ID NO: 56558 - protein, 9 aa, Artificial sequence
  Protein classification predicting sequence
PFEFNTIGV

SEQ ID NO: 56559 - protein, 16 aa, Artificial sequence
  Protein classification predicting sequence
CGSCSGMFTANSMNCL

SEQ ID NO: 56560 - protein, 12 aa, Artificial sequence
  Protein classification predicting sequence
DRAGGISAILKE

SEQ ID NO: 56561 - protein, 9 aa, Artificial sequence
  Protein classification predicting sequence
GGLAVLYGN

SEQ ID NO: 56562 - protein, 11 aa, Artificial sequence
  Protein classification predicting sequence
GDVVVIRYEGP

SEQ ID NO: 56563 - protein, 7 aa, Artificial sequence
  Protein classification predicting sequence
PTSAIIG

SEQ ID NO: 56564 - protein, 12 aa, Artificial sequence
  Protein classification predicting sequence
MVTSANTGAVLK

SEQ ID NO: 56565 - protein, 8 aa, Artificial sequence
  Protein classification predicting sequence
DFGKPIIA

SEQ ID NO: 56566 - protein, 13 aa, Artificial sequence
  Protein classification predicting sequence
NSFTQFVPGHVHL

SEQ ID NO: 56567 - protein, 8 aa, Artificial sequence
  Protein classification predicting sequence
DDGIAMGH

SEQ ID NO: 56568 - protein, 18 aa, Artificial sequence
  Protein classification predicting sequence
DDGIAMGHGGMLYSLPSR

SEQ ID NO: 56569 - protein, 7 aa, Artificial sequence
  Protein classification predicting sequence
LPRGIAT

SEQ ID NO: 56570 - protein, 7 aa, Artificial sequence
  Protein classification predicting sequence
DIDRISR

SEQ ID NO: 56571 - protein, 7 aa, Artificial sequence
  Protein classification predicting sequence
EIDIPNR

SEQ ID NO: 56572 - protein, 13 aa, Artificial sequence
  Protein classification predicting sequence
EIDIPNRRIHLAV

SEQ ID NO: 56573 - protein, 6 aa, Artificial sequence
  Protein classification predicting sequence
ELIPGH

SEQ ID NO: 56574 - protein, 14 aa, Artificial sequence
  Protein classification predicting sequence
IGLVEEGDTIEIDI

SEQ ID NO: 56575 - protein, 9 aa, Artificial sequence
  Protein classification predicting sequence
VVELCRRYY

SEQ ID NO: 56576 - protein, 7 aa, Artificial sequence
  Protein classification predicting sequence
YRSRTTT

SEQ ID NO: 56577 - protein, 21 aa, Artificial sequence
  Protein classification predicting sequence
NSFTQFVPGHVHLKDLGQLVA

SEQ ID NO: 56578 - protein, 9 aa, Artificial sequence
  Protein classification predicting sequence
AGHLIVDLA

SEQ ID NO: 56579 - protein, 8 aa, Artificial sequence
  Protein classification predicting sequence
SPEAAEGG

SEQ ID NO: 56580 - protein, 10 aa, Artificial sequence
  Protein classification predicting sequence
DESALPRNIA

SEQ ID NO: 56581 - protein, 9 aa, Artificial sequence
  Protein classification predicting sequence
GGSTNAVLH

SEQ ID NO: 56582 - protein, 9 aa, Artificial sequence
  Protein classification predicting sequence
AGGIPQVMK

SEQ ID NO: 56583 - protein, 12 aa, Artificial sequence
  Protein classification predicting sequence
PTSAIIGAGLGD

SEQ ID NO: 56584 - protein, 8 aa, Artificial sequence
  Protein classification predicting sequence
AAMRLNIP

SEQ ID NO: 56585 - protein, 8 aa, Artificial sequence
  Protein classification predicting sequence
IFVSGGPM

SEQ ID NO: 56586 - protein, 8 aa, Artificial sequence
  Protein classification predicting sequence
AADPNVSD

SEQ ID NO: 56587 - protein, 7 aa, Artificial sequence
  Protein classification predicting sequence
RYYEQDD

SEQ ID NO: 56588 - protein, 9 aa, Artificial sequence
  Protein classification predicting sequence
SQEGGLAVL

SEQ ID NO: 56589 - protein, 8 aa, Artificial sequence
  Protein classification predicting sequence
REVSFALK

SEQ ID NO: 56590 - protein, 12 aa, Artificial sequence
  Protein classification predicting sequence
ATSADKGAVRDK

SEQ ID NO: 56591 - protein, 8 aa, Artificial sequence
  Protein classification predicting sequence
FGTITISD

SEQ ID NO: 56592 - protein, 7 aa, Artificial sequence
  Protein classification predicting sequence
VFEGVGA

SEQ ID NO: 56593 - protein, 6 aa, Artificial sequence
  Protein classification predicting sequence
VLHLLA

SEQ ID NO: 56594 - protein, 7 aa, Artificial sequence
  Protein classification predicting sequence
ECNACPG

SEQ ID NO: 56595 - protein, 7 aa, Artificial sequence
  Protein classification predicting sequence
YSPVGGL

SEQ ID NO: 56596 - protein, 8 aa, Artificial sequence
  Protein classification predicting sequence
GCDKNMPG

SEQ ID NO: 56597 - protein, 6 aa, Artificial sequence
  Protein classification predicting sequence
VYGGTI

SEQ ID NO: 56598 - protein, 6 aa, Artificial sequence
  Protein classification predicting sequence
GTARVF

SEQ ID NO: 56599 - protein, 25 aa, Artificial sequence
  Protein classification predicting sequence
GGVPVVMKALLDAGLLHGDCLTVTG

SEQ ID NO: 56600 - protein, 10 aa, Artificial sequence
  Protein classification predicting sequence
YEGPKGGPGM

SEQ ID NO: 56601 - protein, 17 aa, Artificial sequence
  Protein classification predicting sequence
YEGPKGGPGMREMLAIT

SEQ ID NO: 56602 - protein, 8 aa, Artificial sequence
  Protein classification predicting sequence
PHLADLKP

SEQ ID NO: 56603 - protein, 12 aa, Artificial sequence
  Protein classification predicting sequence
QAPARSLLHATG

SEQ ID NO: 56604 - protein, 7 aa, Artificial sequence
  Protein classification predicting sequence
SREVIAD

SEQ ID NO: 56605 - protein, 11 aa, Artificial sequence
  Protein classification predicting sequence
IPNCDKITPGM

SEQ ID NO: 56606 - protein, 8 aa, Artificial sequence
  Protein classification predicting sequence
DYDLERIN

SEQ ID NO: 56607 - protein, 6 aa, Artificial sequence
  Protein classification predicting sequence
TVTGKT

SEQ ID NO: 56608 - protein, 9 aa, Artificial sequence
  Protein classification predicting sequence
IKVGGVDPS

SEQ ID NO: 56609 - protein, 11 aa, Artificial sequence
  Protein classification predicting sequence
SHDEAVEAIDN

SEQ ID NO: 56610 - protein, 9 aa, Artificial sequence
  Protein classification predicting sequence
VGHISPEAA

SEQ ID NO: 56611 - protein, 6 aa, Artificial sequence
  Protein classification predicting sequence
NRTLNV

SEQ ID NO: 56612 - protein, 20 aa, Artificial sequence
  Protein classification predicting sequence
FKAKVKTGYLARYTALVTSA

SEQ ID NO: 56613 - protein, 21 aa, Artificial sequence
  Protein classification predicting sequence
AICNSYIDIVPGHVHLRELAD

SEQ ID NO: 56614 - protein, 30 aa, Artificial sequence
  Protein classification predicting sequence
IADAAETVINAHWFDGVFYIPNCDKITPGM

SEQ ID NO: 56615 - protein, 23 aa, Artificial sequence
  Protein classification predicting sequence
PYLSKIAPSSSYSMHDVHEAGGV

SEQ ID NO: 56616 - protein, 61 aa, Artificial sequence
  Protein classification predicting sequence
GHVVVIRYEGPKGGPGMPEMLAPTSSIVGRGLGKDVALITDGRFSGATRGIAVGHISPEAA

SEQ ID NO: 56617 - protein, 6 aa, Artificial sequence
  Protein classification predicting sequence
VVNSFT

SEQ ID NO: 56618 - protein, 7 aa, Artificial sequence
  Protein classification predicting sequence
GLRILKG

SEQ ID NO: 56619 - protein, 12 aa, Artificial sequence
  Protein classification predicting sequence
RGPCIGHVSPEA

SEQ ID NO: 56620 - protein, 17 aa, Artificial sequence
  Protein classification predicting sequence
GSCAGMFTANTMACMTE

SEQ ID NO: 56621 - protein, 8 aa, Artificial sequence
  Protein classification predicting sequence
GGVPAVMK

SEQ ID NO: 56622 - protein, 8 aa, Artificial sequence
  Protein classification predicting sequence
APKGAVIK

SEQ ID NO: 56623 - protein, 7 aa, Artificial sequence
  Protein classification predicting sequence
GHVSPEA

SEQ ID NO: 56624 - protein, 7 aa, Artificial sequence
  Protein classification predicting sequence
VEEGDTI

SEQ ID NO: 56625 - protein, 8 aa, Artificial sequence
  Protein classification predicting sequence
PFEFNTIG

SEQ ID NO: 56626 - protein, 6 aa, Artificial sequence
  Protein classification predicting sequence
DIVPGH

SEQ ID NO: 56627 - protein, 6 aa, Artificial sequence
  Protein classification predicting sequence
GMKYSL

SEQ ID NO: 56628 - protein, 7 aa, Artificial sequence
  Protein classification predicting sequence
CLTEALG

SEQ ID NO: 56629 - protein, 10 aa, Artificial sequence
  Protein classification predicting sequence
PTSAIAGMGL

SEQ ID NO: 56630 - protein, 13 aa, Artificial sequence
  Protein classification predicting sequence
TDGRFSGGTRGPC

SEQ ID NO: 56631 - protein, 7 aa, Artificial sequence
  Protein classification predicting sequence
LAPDGAV

SEQ ID NO: 56632 - protein, 11 aa, Artificial sequence
  Protein classification predicting sequence
FVSGGPMEAGK

SEQ ID NO: 56633 - protein, 8 aa, Artificial sequence
  Protein classification predicting sequence
ACPTCGSC

SEQ ID NO: 56634 - protein, 7 aa, Artificial sequence
  Protein classification predicting sequence
TKRYYEQ

SEQ ID NO: 56635 - protein, 8 aa, Artificial sequence
  Protein classification predicting sequence
RTTQAFSQ

SEQ ID NO: 56636 - protein, 9 aa, Artificial sequence
  Protein classification predicting sequence
SQDGGLAVL

SEQ ID NO: 56637 - protein, 6 aa, Artificial sequence
  Protein classification predicting sequence
LFGNIA

SEQ ID NO: 56638 - protein, 10 aa, Artificial sequence
  Protein classification predicting sequence
VKTAGVDESI

SEQ ID NO: 56639 - protein, 20 aa, Artificial sequence
  Protein classification predicting sequence
FTGRARVFESQEDAVEGILG

SEQ ID NO: 56640 - protein, 7 aa, Artificial sequence
  Protein classification predicting sequence
LHGDCLT

SEQ ID NO: 56641 - protein, 9 aa, Artificial sequence
  Protein classification predicting sequence
YGGTIAPGN

SEQ ID NO: 56642 - protein, 6 aa, Artificial sequence
  Protein classification predicting sequence
ACPGAG

SEQ ID NO: 56643 - protein, 11 aa, Artificial sequence
  Protein classification predicting sequence
GAVAKVSGVKV

SEQ ID NO: 56644 - protein, 10 aa, Artificial sequence
  Protein classification predicting sequence
PEAQDGGPIA

SEQ ID NO: 56645 - protein, 14 aa, Artificial sequence
  Protein classification predicting sequence
FVSGGPMEAGKTKL

SEQ ID NO: 56646 - protein, 10 aa, Artificial sequence
  Protein classification predicting sequence
KVAPNTQKYH

SEQ ID NO: 56647 - protein, 7 aa, Artificial sequence
  Protein classification predicting sequence
DAMIQGA

SEQ ID NO: 56648 - protein, 8 aa, Artificial sequence
  Protein classification predicting sequence
KAAFENAM

SEQ ID NO: 56649 - protein, 7 aa, Artificial sequence
  Protein classification predicting sequence
VKNVLGL

SEQ ID NO: 56650 - protein, 7 aa, Artificial sequence
  Protein classification predicting sequence
ESQEDAV

SEQ ID NO: 56651 - protein, 10 aa, Artificial sequence
  Protein classification predicting sequence
TVTGKTLREN

SEQ ID NO: 56652 - protein, 9 aa, Artificial sequence
  Protein classification predicting sequence
PGAGSCGGM

SEQ ID NO: 56653 - protein, 8 aa, Artificial sequence
  Protein classification predicting sequence
SSTMAAED

SEQ ID NO: 56654 - protein, 6 aa, Artificial sequence
  Protein classification predicting sequence
LKGNLA

SEQ ID NO: 56655 - protein, 7 aa, Artificial sequence
  Protein classification predicting sequence
EGCVAKI

SEQ ID NO: 56656 - protein, 6 aa, Artificial sequence
  Protein classification predicting sequence
ARVFES

SEQ ID NO: 56657 - protein, 8 aa, Artificial sequence
  Protein classification predicting sequence
PSIFIYGG

SEQ ID NO: 56658 - protein, 8 aa, Artificial sequence
  Protein classification predicting sequence
YGGTIKPG

SEQ ID NO: 56659 - protein, 7 aa, Artificial sequence
  Protein classification predicting sequence
CDLKPSG

SEQ ID NO: 56660 - protein, 16 aa, Artificial sequence
  Protein classification predicting sequence
TDGRFSGGTYGLVVGH

SEQ ID NO: 56661 - protein, 9 aa, Artificial sequence
  Protein classification predicting sequence
VPQLCKVAP

SEQ ID NO: 56662 - protein, 29 aa, Artificial sequence
  Protein classification predicting sequence
IRYEGPKGGPGMQEMLYPTSYLKSKGLGK

SEQ ID NO: 56663 - protein, 7 aa, Artificial sequence
  Protein classification predicting sequence
GGAIGLV

SEQ ID NO: 56664 - protein, 7 aa, Artificial sequence
  Protein classification predicting sequence
YRSKTST

SEQ ID NO: 56665 - protein, 11 aa, Artificial sequence
  Protein classification predicting sequence
YSLPSREIIAD

SEQ ID NO: 56666 - protein, 12 aa, Artificial sequence
  Protein classification predicting sequence
VEYMVNAHCADA

SEQ ID NO: 56667 - protein, 15 aa, Artificial sequence
  Protein classification predicting sequence
NSFTQFVPGHVHLKD

SEQ ID NO: 56668 - protein, 7 aa, Artificial sequence
  Protein classification predicting sequence
GQLVARE

SEQ ID NO: 56669 - protein, 11 aa, Artificial sequence
  Protein classification predicting sequence
LHLLAAAQEAE

SEQ ID NO: 56670 - protein, 7 aa, Artificial sequence
  Protein classification predicting sequence
KGWKPVE

SEQ ID NO: 56671 - protein, 10 aa, Artificial sequence
  Protein classification predicting sequence
ATSADKGAVR

SEQ ID NO: 56672 - protein, 7 aa, Artificial sequence
  Protein classification predicting sequence
DGIAMGH

SEQ ID NO: 56673 - protein, 8 aa, Artificial sequence
  Protein classification predicting sequence
EMLAPTSA

SEQ ID NO: 56674 - protein, 7 aa, Artificial sequence
  Protein classification predicting sequence
SRDLIAD

SEQ ID NO: 56675 - protein, 7 aa, Artificial sequence
  Protein classification predicting sequence
EALGLSL

SEQ ID NO: 56676 - protein, 11 aa, Artificial sequence
  Protein classification predicting sequence
VALITDGRFSG

SEQ ID NO: 56677 - protein, 15 aa, Artificial sequence
  Protein classification predicting sequence
VALITDGRFSGATRG

SEQ ID NO: 56678 - protein, 6 aa, Artificial sequence
  Protein classification predicting sequence
ADKGAV

SEQ ID NO: 56679 - protein, 7 aa, Artificial sequence
  Protein classification predicting sequence
MYYALGY

SEQ ID NO: 56680 - protein, 21 aa, Artificial sequence
  Protein classification predicting sequence
NPMIGVANGHSTITPCNSGLQ

SEQ ID NO: 56681 - protein, 21 aa, Artificial sequence
  Protein classification predicting sequence
FGTPTISDGMSMGTEGMKYSL

SEQ ID NO: 56682 - protein, 11 aa, Artificial sequence
  Protein classification predicting sequence
SMGTEGMKYSL

SEQ ID NO: 56683 - protein, 23 aa, Artificial sequence
  Protein classification predicting sequence
AQGQWMDGVVVIGGCDKNMPGGM

SEQ ID NO: 56684 - protein, 15 aa, Artificial sequence
  Protein classification predicting sequence
NVPGIYVYGGTIKPG

SEQ ID NO: 56685 - protein, 9 aa, Artificial sequence
  Protein classification predicting sequence
KGKDLTIVS

SEQ ID NO: 56686 - protein, 15 aa, Artificial sequence
  Protein classification predicting sequence
SAAESARVLVEAVRR

SEQ ID NO: 56687 - protein, 6 aa, Artificial sequence
  Protein classification predicting sequence
PRDIIT

SEQ ID NO: 56688 - protein, 21 aa, Artificial sequence
  Protein classification predicting sequence
SIENAVAVIMATGGSTNAVLH

SEQ ID NO: 56689 - protein, 6 aa, Artificial sequence
  Protein classification predicting sequence
IDDFER

SEQ ID NO: 56690 - protein, 12 aa, Artificial sequence
  Protein classification predicting sequence
VAKITGLKNPVI

SEQ ID NO: 56691 - protein, 6 aa, Artificial sequence
  Protein classification predicting sequence
RGVLAK

SEQ ID NO: 56692 - protein, 12 aa, Artificial sequence
  Protein classification predicting sequence
KFFRAAPGGIPT

SEQ ID NO: 56693 - protein, 7 aa, Artificial sequence
  Protein classification predicting sequence
DGGLAVL

SEQ ID NO: 56694 - protein, 12 aa, Artificial sequence
  Protein classification predicting sequence
ATSADRGAVRDL

SEQ ID NO: 56695 - protein, 11 aa, Artificial sequence
  Protein classification predicting sequence
CGGMYTANTMA

SEQ ID NO: 56696 - protein, 8 aa, Artificial sequence
  Protein classification predicting sequence
PAVMKYLL

SEQ ID NO: 56697 - protein, 7 aa, Artificial sequence
  Protein classification predicting sequence
DFGKPII

SEQ ID NO: 56698 - protein, 15 aa, Artificial sequence
  Protein classification predicting sequence
VVNSFTQFVPGHVHL

SEQ ID NO: 56699 - protein, 20 aa, Artificial sequence
  Protein classification predicting sequence
GGVAKEFNTIAVDDGIAMGH

SEQ ID NO: 56700 - protein, 37 aa, Artificial sequence
  Protein classification predicting sequence
AYSKDGGLAVLYGNFAENGCIVKTAGVDDSILKFTGP

SEQ ID NO: 56701 - protein, 19 aa, Artificial sequence
  Protein classification predicting sequence
KVYESQDDAVEAILGGKVV

SEQ ID NO: 56702 - protein, 8 aa, Artificial sequence
  Protein classification predicting sequence
SPEAASGG

SEQ ID NO: 56703 - protein, 15 aa, Artificial sequence
  Protein classification predicting sequence
GRNMAGARALWRATG

SEQ ID NO: 56704 - protein, 45 aa, Artificial sequence
  Protein classification predicting sequence
AKEFNTIAVDDGIAMGHGGMLYSLPSRELIADSVEYMVNAHCADA

SEQ ID NO: 56705 - protein, 16 aa, Artificial sequence
  Protein classification predicting sequence
VCISNCDKITPGMLMA

SEQ ID NO: 56706 - protein, 23 aa, Artificial sequence
  Protein classification predicting sequence
VCISNCDKITPGMLMAALRLNIP

SEQ ID NO: 56707 - protein, 8 aa, Artificial sequence
  Protein classification predicting sequence
LTKRYYEQ

SEQ ID NO: 56708 - protein, 8 aa, Artificial sequence
  Protein classification predicting sequence
GLGKACAL

SEQ ID NO: 56709 - protein, 8 aa, Artificial sequence
  Protein classification predicting sequence
SPEAAAGG

SEQ ID NO: 56710 - protein, 20 aa, Artificial sequence
  Protein classification predicting sequence
RTNVPAIFCSGGPMKAGLSA

SEQ ID NO: 56711 - protein, 8 aa, Artificial sequence
  Protein classification predicting sequence
LVENIKND

SEQ ID NO: 56712 - protein, 24 aa, Artificial sequence
  Protein classification predicting sequence
AIDDAFALDMAMGGSTNTVLHTLA

SEQ ID NO: 56713 - protein, 17 aa, Artificial sequence
  Protein classification predicting sequence
APKGAVIKVGGVDPSIK

SEQ ID NO: 56714 - protein, 12 aa, Artificial sequence
  Protein classification predicting sequence
AKVKTGYLARYT

SEQ ID NO: 56715 - protein, 57 aa, Artificial sequence
  Protein classification predicting sequence
FLDMEQNACPTCGSCAGMFTANSMNCLMEVLGLALPYNGTALAVSDQRREMIRQAAF

SEQ ID NO: 56716 - protein, 39 aa, Artificial sequence
  Protein classification predicting sequence
AIDDAFALDMAMGGSTNTVLHTLAIANEAGIDYDLERIN

SEQ ID NO: 56717 - protein, 11 aa, Artificial sequence
  Protein classification predicting sequence
KPIIAVANSFT

SEQ ID NO: 56718 - protein, 9 aa, Artificial sequence
  Protein classification predicting sequence
IADSVEYMV

SEQ ID NO: 56719 - protein, 8 aa, Artificial sequence
  Protein classification predicting sequence
GLSLPGNG

SEQ ID NO: 56720 - protein, 8 aa, Artificial sequence
  Protein classification predicting sequence
GLGKTCAL

SEQ ID NO: 56721 - protein, 13 aa, Artificial sequence
  Protein classification predicting sequence
CISNCDKITPGML

SEQ ID NO: 56722 - protein, 6 aa, Artificial sequence
  Protein classification predicting sequence
RWDTLD

SEQ ID NO: 56723 - protein, 8 aa, Artificial sequence
  Protein classification predicting sequence
PNRAMLRA

SEQ ID NO: 56724 - protein, 6 aa, Artificial sequence
  Protein classification predicting sequence
DGIAMG

SEQ ID NO: 56725 - protein, 9 aa, Artificial sequence
  Protein classification predicting sequence
TDGRFSGGT

SEQ ID NO: 56726 - protein, 6 aa, Artificial sequence
  Protein classification predicting sequence
MGTEGM

SEQ ID NO: 56727 - protein, 8 aa, Artificial sequence
  Protein classification predicting sequence
CSGMFTAN

SEQ ID NO: 56728 - protein, 6 aa, Artificial sequence
  Protein classification predicting sequence
HTLALA

SEQ ID NO: 56729 - protein, 7 aa, Artificial sequence
  Protein classification predicting sequence
EGMKYSL

SEQ ID NO: 56730 - protein, 6 aa, Artificial sequence
  Protein classification predicting sequence
GPARVF

SEQ ID NO: 56731 - protein, 7 aa, Artificial sequence
  Protein classification predicting sequence
STITPCN

SEQ ID NO: 56732 - protein, 8 aa, Artificial sequence
  Protein classification predicting sequence
AGLLHGDC

SEQ ID NO: 56733 - protein, 5 aa, Artificial sequence
  Protein classification predicting sequence
LHGDC

SEQ ID NO: 56734 - protein, 6 aa, Artificial sequence
  Protein classification predicting sequence
DFGKPI

SEQ ID NO: 56735 - protein, 8 aa, Artificial sequence
  Protein classification predicting sequence
QSMDGVLA

SEQ ID NO: 56736 - protein, 9 aa, Artificial sequence
  Protein classification predicting sequence
GGCDKNMPG

SEQ ID NO: 56737 - protein, 8 aa, Artificial sequence
  Protein classification predicting sequence
AGGIPQVM

SEQ ID NO: 56738 - protein, 7 aa, Artificial sequence
  Protein classification predicting sequence
SRGAVTD

SEQ ID NO: 56739 - protein, 7 aa, Artificial sequence
  Protein classification predicting sequence
DALTITG

SEQ ID NO: 56740 - protein, 7 aa, Artificial sequence
  Protein classification predicting sequence
PVITGPA

SEQ ID NO: 56741 - protein, 13 aa, Artificial sequence
  Protein classification predicting sequence
LITDGRFSGGTYG

SEQ ID NO: 56742 - protein, 9 aa, Artificial sequence
  Protein classification predicting sequence
LITDGRFSG

SEQ ID NO: 56743 - protein, 11 aa, Artificial sequence
  Protein classification predicting sequence
LITDGRFSGGT

SEQ ID NO: 56744 - protein, 6 aa, Artificial sequence
  Protein classification predicting sequence
SSWNEI

SEQ ID NO: 56745 - protein, 6 aa, Artificial sequence
  Protein classification predicting sequence
FTANTM

SEQ ID NO: 56746 - protein, 9 aa, Artificial sequence
  Protein classification predicting sequence
VVVIRYEGP

SEQ ID NO: 56747 - protein, 9 aa, Artificial sequence
  Protein classification predicting sequence
VKDGDLIEI

SEQ ID NO: 56748 - protein, 7 aa, Artificial sequence
  Protein classification predicting sequence
ILTKEAF

SEQ ID NO: 56749 - protein, 8 aa, Artificial sequence
  Protein classification predicting sequence
SDGISMGT

SEQ ID NO: 56750 - protein, 8 aa, Artificial sequence
  Protein classification predicting sequence
SLVSREVI

SEQ ID NO: 56751 - protein, 23 aa, Artificial sequence
  Protein classification predicting sequence
IERAICPGEGACGGMYTANTMAS

SEQ ID NO: 56752 - protein, 7 aa, Artificial sequence
  Protein classification predicting sequence
EALGMSL

SEQ ID NO: 56753 - protein, 23 aa, Artificial sequence
  Protein classification predicting sequence
RGITARDILTKEAFENAIAVVMA

SEQ ID NO: 56754 - protein, 6 aa, Artificial sequence
  Protein classification predicting sequence
GLGKDV

SEQ ID NO: 56755 - protein, 17 aa, Artificial sequence
  Protein classification predicting sequence
THGRNMAGARALWRATG

SEQ ID NO: 56756 - protein, 9 aa, Artificial sequence
  Protein classification predicting sequence
QGADPKVSD

SEQ ID NO: 56757 - protein, 12 aa, Artificial sequence
  Protein classification predicting sequence
RIVELTKRYYEQ

SEQ ID NO: 56758 - protein, 11 aa, Artificial sequence
  Protein classification predicting sequence
AFSQDGGLAVL

SEQ ID NO: 56759 - protein, 8 aa, Artificial sequence
  Protein classification predicting sequence
LKSMGLGK

SEQ ID NO: 56760 - protein, 23 aa, Artificial sequence
  Protein classification predicting sequence
YRSATTTHGRNMAGARALWRATG

SEQ ID NO: 56761 - protein, 40 aa, Artificial sequence
  Protein classification predicting sequence
RLNIPVIFVSGGPMEAGKTKLSDQIIKLDLVDAMIQGADP

SEQ ID NO: 56762 - protein, 7 aa, Artificial sequence
  Protein classification predicting sequence
KTVLGLT

SEQ ID NO: 56763 - protein, 22 aa, Artificial sequence
  Protein classification predicting sequence
VVVIRYEGPKGGPGMQEMLYPT

SEQ ID NO: 56764 - protein, 7 aa, Artificial sequence
  Protein classification predicting sequence
EIEAAGG

SEQ ID NO: 56765 - protein, 7 aa, Artificial sequence
  Protein classification predicting sequence
APHRSLL

SEQ ID NO: 56766 - protein, 17 aa, Artificial sequence
  Protein classification predicting sequence
PFEFNTIGVDDGIAMGH

SEQ ID NO: 56767 - protein, 9 aa, Artificial sequence
  Protein classification predicting sequence
VDDGIAMGH

SEQ ID NO: 56768 - protein, 9 aa, Artificial sequence
  Protein classification predicting sequence
GALRVNVPT

SEQ ID NO: 56769 - protein, 7 aa, Artificial sequence
  Protein classification predicting sequence
GGVAKEF

SEQ ID NO: 56770 - protein, 12 aa, Artificial sequence
  Protein classification predicting sequence
TIAVDDGIAMGH

SEQ ID NO: 56771 - protein, 6 aa, Artificial sequence
  Protein classification predicting sequence
ATHADR

SEQ ID NO: 56772 - protein, 6 aa, Artificial sequence
  Protein classification predicting sequence
DIDRLS

SEQ ID NO: 56773 - protein, 9 aa, Artificial sequence
  Protein classification predicting sequence
EDVHRAGGI

SEQ ID NO: 56774 - protein, 10 aa, Artificial sequence
  Protein classification predicting sequence
KAGPAGIPTQ

SEQ ID NO: 56775 - protein, 8 aa, Artificial sequence
  Protein classification predicting sequence
IGLVREGD

SEQ ID NO: 56776 - protein, 7 aa, Artificial sequence
  Protein classification predicting sequence
ESQDSAV

SEQ ID NO: 56777 - protein, 8 aa, Artificial sequence
  Protein classification predicting sequence
IADSVEYM

SEQ ID NO: 56778 - protein, 7 aa, Artificial sequence
  Protein classification predicting sequence
DEAVHTF

SEQ ID NO: 56779 - protein, 7 aa, Artificial sequence
  Protein classification predicting sequence
TQVAFSQ

SEQ ID NO: 56780 - protein, 22 aa, Artificial sequence
  Protein classification predicting sequence
TDGRFSGGTSGLSIGHASPEAA

SEQ ID NO: 56781 - protein, 6 aa, Artificial sequence
  Protein classification predicting sequence
GGAIGL

SEQ ID NO: 56782 - protein, 23 aa, Artificial sequence
  Protein classification predicting sequence
ERSACPTCGSCSGMFTANSMNCL

SEQ ID NO: 56783 - protein, 6 aa, Artificial sequence
  Protein classification predicting sequence
LSRKVP

SEQ ID NO: 56784 - protein, 22 aa, Artificial sequence
  Protein classification predicting sequence
LCKVAPSTQKYHMEDVHRAGGV

SEQ ID NO: 56785 - protein, 8 aa, Artificial sequence
  Protein classification predicting sequence
YDVMLTQD

SEQ ID NO: 56786 - protein, 7 aa, Artificial sequence
  Protein classification predicting sequence
AFSQDCR

SEQ ID NO: 56787 - protein, 13 aa, Artificial sequence
  Protein classification predicting sequence
RLPFSIRVLLEAA

SEQ ID NO: 56788 - protein, 7 aa, Artificial sequence
  Protein classification predicting sequence
SIRVLLE

SEQ ID NO: 56789 - protein, 6 aa, Artificial sequence
  Protein classification predicting sequence
EVPFKP

SEQ ID NO: 56790 - protein, 7 aa, Artificial sequence
  Protein classification predicting sequence
DLVIDHS

SEQ ID NO: 56791 - protein, 14 aa, Artificial sequence
  Protein classification predicting sequence
DSLQKNQDLEFERN

SEQ ID NO: 56792 - protein, 24 aa, Artificial sequence
  Protein classification predicting sequence
NMRIIPPGSGIIHQVNLEYLARVV

SEQ ID NO: 56793 - protein, 29 aa, Artificial sequence
  Protein classification predicting sequence
DGLGVLGWGVGGIEAEAVMLGQPISMVLP

SEQ ID NO: 56794 - protein, 9 aa, Artificial sequence
  Protein classification predicting sequence
ADRATIANM

SEQ ID NO: 56795 - protein, 14 aa, Artificial sequence
  Protein classification predicting sequence
SQDPDFTQVVELDL

SEQ ID NO: 56796 - protein, 12 aa, Artificial sequence
  Protein classification predicting sequence
CLGAKQGFKGFQ

SEQ ID NO: 56797 - protein, 25 aa, Artificial sequence
  Protein classification predicting sequence
YLSQLGFDVVGYGCMTCIGNSGPLP

SEQ ID NO: 56798 - protein, 10 aa, Artificial sequence
  Protein classification predicting sequence
TCIGNSGPLP

SEQ ID NO: 56799 - protein, 6 aa, Artificial sequence
  Protein classification predicting sequence
LKDIWP

SEQ ID NO: 56800 - protein, 14 aa, Artificial sequence
  Protein classification predicting sequence
WNPKSTYIKSPPFF

SEQ ID NO: 56801 - protein, 7 aa, Artificial sequence
  Protein classification predicting sequence
DAYVLLN

SEQ ID NO: 56802 - protein, 15 aa, Artificial sequence
  Protein classification predicting sequence
PSGETLDVFDAAERY

SEQ ID NO: 56803 - protein, 11 aa, Artificial sequence
  Protein classification predicting sequence
PLIVLAGKEYG

SEQ ID NO: 56804 - protein, 15 aa, Artificial sequence
  Protein classification predicting sequence
GSSRDWAAKGPFLLG

SEQ ID NO: 56805 - protein, 24 aa, Artificial sequence
  Protein classification predicting sequence
KAVLAESYERIHRSNLVGMGVIPL

SEQ ID NO: 56806 - protein, 9 aa, Artificial sequence
  Protein classification predicting sequence
ERIHRSNLV

SEQ ID NO: 56807 - protein, 6 aa, Artificial sequence
  Protein classification predicting sequence
SWNALA

SEQ ID NO: 56808 - protein, 13 aa, Artificial sequence
  Protein classification predicting sequence
NGGILNYMIRKMA

SEQ ID NO: 56809 - protein, 11 aa, Artificial sequence
  Protein classification predicting sequence
RVILQDFTGVP

SEQ ID NO: 56810 - protein, 24 aa, Artificial sequence
  Protein classification predicting sequence
GVAQLSIADRATIANMCPEYGATA

SEQ ID NO: 56811 - protein, 10 aa, Artificial sequence
  Protein classification predicting sequence
RIDFEKEPLG

SEQ ID NO: 56812 - protein, 15 aa, Artificial sequence
  Protein classification predicting sequence
EIQAVERQYVIPGMF

SEQ ID NO: 56813 - protein, 10 aa, Artificial sequence
  Protein classification predicting sequence
EVYQKIETVN

SEQ ID NO: 56814 - protein, 10 aa, Artificial sequence
  Protein classification predicting sequence
RFDTDVELTY

SEQ ID NO: 56815 - protein, 6 aa, Artificial sequence
  Protein classification predicting sequence
GREEGI

SEQ ID NO: 56816 - protein, 8 aa, Artificial sequence
  Protein classification predicting sequence
LLHAITDA

SEQ ID NO: 56817 - protein, 6 aa, Artificial sequence
  Protein classification predicting sequence
KATTTE

SEQ ID NO: 56818 - protein, 10 aa, Artificial sequence
  Protein classification predicting sequence
GHSDADVLLH

SEQ ID NO: 56819 - protein, 7 aa, Artificial sequence
  Protein classification predicting sequence
PKMAPHI

SEQ ID NO: 56820 - protein, 8 aa, Artificial sequence
  Protein classification predicting sequence
EGIASQAV

SEQ ID NO: 56821 - protein, 8 aa, Artificial sequence
  Protein classification predicting sequence
GYTLGNVD

SEQ ID NO: 56822 - protein, 7 aa, Artificial sequence
  Protein classification predicting sequence
GREEGIA

SEQ ID NO: 56823 - protein, 7 aa, Artificial sequence
  Protein classification predicting sequence
EGIAAQA

SEQ ID NO: 56824 - protein, 6 aa, Artificial sequence
  Protein classification predicting sequence
FKDADS

SEQ ID NO: 56825 - protein, 7 aa, Artificial sequence
  Protein classification predicting sequence
GRKEGIA

SEQ ID NO: 56826 - protein, 9 aa, Artificial sequence
  Protein classification predicting sequence
GAAALGDIG

SEQ ID NO: 56827 - protein, 7 aa, Artificial sequence
  Protein classification predicting sequence
LHAISDA

SEQ ID NO: 56828 - protein, 10 aa, Artificial sequence
  Protein classification predicting sequence
GDIGKHFPDT

SEQ ID NO: 56829 - protein, 9 aa, Artificial sequence
  Protein classification predicting sequence
GVQCFCVLT

SEQ ID NO: 56830 - protein, 10 aa, Artificial sequence
  Protein classification predicting sequence
LGDIGKLFPD

SEQ ID NO: 56831 - protein, 15 aa, Artificial sequence
  Protein classification predicting sequence
GLLGHSDADVLLHAI

SEQ ID NO: 56832 - protein, 6 aa, Artificial sequence
  Protein classification predicting sequence
LGFTGR

SEQ ID NO: 56833 - protein, 8 aa, Artificial sequence
  Protein classification predicting sequence
GFTGRGEG

SEQ ID NO: 56834 - protein, 7 aa, Artificial sequence
  Protein classification predicting sequence
PYEKGLL

SEQ ID NO: 56835 - protein, 6 aa, Artificial sequence
  Protein classification predicting sequence
DAILGA

SEQ ID NO: 56836 - protein, 8 aa, Artificial sequence
  Protein classification predicting sequence
IGGVRIPY

SEQ ID NO: 56837 - protein, 10 aa, Artificial sequence
  Protein classification predicting sequence
GLLAHSDGDV

SEQ ID NO: 56838 - protein, 9 aa, Artificial sequence
  Protein classification predicting sequence
LLREAWRRI

SEQ ID NO: 56839 - protein, 5 aa, Artificial sequence
  Protein classification predicting sequence
PKMAP

SEQ ID NO: 56840 - protein, 14 aa, Artificial sequence
  Protein classification predicting sequence
DVLLHAITDAIIGA

SEQ ID NO: 56841 - protein, 7 aa, Artificial sequence
  Protein classification predicting sequence
GRGEGIA

SEQ ID NO: 56842 - protein, 10 aa, Artificial sequence
  Protein classification predicting sequence
ADSRGLLREA

SEQ ID NO: 56843 - protein, 8 aa, Artificial sequence
  Protein classification predicting sequence
NVKATTTE

SEQ ID NO: 56844 - protein, 15 aa, Artificial sequence
  Protein classification predicting sequence
NVKATTTEKLGFTGR

SEQ ID NO: 56845 - protein, 13 aa, Artificial sequence
  Protein classification predicting sequence
ALGDIGKLFPDTD

SEQ ID NO: 56846 - protein, 11 aa, Artificial sequence
  Protein classification predicting sequence
DVTIIAQAPKM

SEQ ID NO: 56847 - protein, 6 aa, Artificial sequence
  Protein classification predicting sequence
HSDGDV

SEQ ID NO: 56848 - protein, 6 aa, Artificial sequence
  Protein classification predicting sequence
HALCDA

SEQ ID NO: 56849 - protein, 9 aa, Artificial sequence
  Protein classification predicting sequence
GLLGHSDAD

SEQ ID NO: 56850 - protein, 7 aa, Artificial sequence
  Protein classification predicting sequence
PHIPQMR

SEQ ID NO: 56851 - protein, 8 aa, Artificial sequence
  Protein classification predicting sequence
IPYEKGLL

SEQ ID NO: 56852 - protein, 14 aa, Artificial sequence
  Protein classification predicting sequence
TTTDGLGLTGRGEG

SEQ ID NO: 56853 - protein, 12 aa, Artificial sequence
  Protein classification predicting sequence
RIGHGFDVHAFG

SEQ ID NO: 56854 - protein, 6 aa, Artificial sequence
  Protein classification predicting sequence
FGGEGP

SEQ ID NO: 56855 - protein, 9 aa, Artificial sequence
  Protein classification predicting sequence
TIIAQAPKM

SEQ ID NO: 56856 - protein, 8 aa, Artificial sequence
  Protein classification predicting sequence
PHIPQMRV

SEQ ID NO: 56857 - protein, 17 aa, Artificial sequence
  Protein classification predicting sequence
PHIPQMRVNLAEDLQCH

SEQ ID NO: 56858 - protein, 11 aa, Artificial sequence
  Protein classification predicting sequence
AHSDGDVALHA

SEQ ID NO: 56859 - protein, 11 aa, Artificial sequence
  Protein classification predicting sequence
GDIGRHFPDTD

SEQ ID NO: 56860 - protein, 6 aa, Artificial sequence
  Protein classification predicting sequence
KGADSR

SEQ ID NO: 56861 - protein, 8 aa, Artificial sequence
  Protein classification predicting sequence
EGIACEAV

SEQ ID NO: 56862 - protein, 9 aa, Artificial sequence
  Protein classification predicting sequence
RIGQGYDVH

SEQ ID NO: 56863 - protein, 9 aa, Artificial sequence
  Protein classification predicting sequence
DVHALVEGR

SEQ ID NO: 56864 - protein, 9 aa, Artificial sequence
  Protein classification predicting sequence
GAAGLGDIG

SEQ ID NO: 56865 - protein, 7 aa, Artificial sequence
  Protein classification predicting sequence
AGLGDIG

SEQ ID NO: 56866 - protein, 10 aa, Artificial sequence
  Protein classification predicting sequence
AQKPKMAPHI

SEQ ID NO: 56867 - protein, 7 aa, Artificial sequence
  Protein classification predicting sequence
VVAERPK

SEQ ID NO: 56868 - protein, 8 aa, Artificial sequence
  Protein classification predicting sequence
GHSDADVL

SEQ ID NO: 56869 - protein, 11 aa, Artificial sequence
  Protein classification predicting sequence
GHSDADVLTHA

SEQ ID NO: 56870 - protein, 10 aa, Artificial sequence
  Protein classification predicting sequence
LGFTGREEGI

SEQ ID NO: 56871 - protein, 9 aa, Artificial sequence
  Protein classification predicting sequence
RIGHGFDVH

SEQ ID NO: 56872 - protein, 12 aa, Artificial sequence
  Protein classification predicting sequence
FGGEGPIIIGGV

SEQ ID NO: 56873 - protein, 8 aa, Artificial sequence
  Protein classification predicting sequence
LGNADVTI

SEQ ID NO: 56874 - protein, 11 aa, Artificial sequence
  Protein classification predicting sequence
LGFTGRGEGIA

SEQ ID NO: 56875 - protein, 10 aa, Artificial sequence
  Protein classification predicting sequence
DQRGALKRMM

SEQ ID NO: 56876 - protein, 12 aa, Artificial sequence
  Protein classification predicting sequence
KKAYIERIGSEC

SEQ ID NO: 56877 - protein, 6 aa, Artificial sequence
  Protein classification predicting sequence
IPFFLE

SEQ ID NO: 56878 - protein, 8 aa, Artificial sequence
  Protein classification predicting sequence
FQETLKFA

SEQ ID NO: 56879 - protein, 10 aa, Artificial sequence
  Protein classification predicting sequence
LKVLVAEELT

SEQ ID NO: 56880 - protein, 12 aa, Artificial sequence
  Protein classification predicting sequence
GLLLAYEKTGYD

SEQ ID NO: 56881 - protein, 8 aa, Artificial sequence
  Protein classification predicting sequence
WSAKRIKE

SEQ ID NO: 56882 - protein, 6 aa, Artificial sequence
  Protein classification predicting sequence
LFQETL

SEQ ID NO: 56883 - protein, 10 aa, Artificial sequence
  Protein classification predicting sequence
LLDPEYGLPA

SEQ ID NO: 56884 - protein, 6 aa, Artificial sequence
  Protein classification predicting sequence
RLPDCL

SEQ ID NO: 56885 - protein, 9 aa, Artificial sequence
  Protein classification predicting sequence
KFLLYYDVD

SEQ ID NO: 56886 - protein, 10 aa, Artificial sequence
  Protein classification predicting sequence
AYIERIGSEC

SEQ ID NO: 56887 - protein, 9 aa, Artificial sequence
  Protein classification predicting sequence
AEDIPFFLE

SEQ ID NO: 56888 - protein, 15 aa, Artificial sequence
  Protein classification predicting sequence
AEDIPFFLEILAYDE

SEQ ID NO: 56889 - protein, 17 aa, Artificial sequence
  Protein classification predicting sequence
WLRTEGFKNIDELNKVL

SEQ ID NO: 56890 - protein, 10 aa, Artificial sequence
  Protein classification predicting sequence
RLPDCLVEWS

SEQ ID NO: 56891 - protein, 18 aa, Artificial sequence
  Protein classification predicting sequence
YEKTGYDATTTSRLPDCL

SEQ ID NO: 56892 - protein, 7 aa, Artificial sequence
  Protein classification predicting sequence
GIISALA

SEQ ID NO: 56893 - protein, 7 aa, Artificial sequence
  Protein classification predicting sequence
DQRGALK

SEQ ID NO: 56894 - protein, 7 aa, Artificial sequence
  Protein classification predicting sequence
ELTPYAS

SEQ ID NO: 56895 - protein, 10 aa, Artificial sequence
  Protein classification predicting sequence
YEKTGYDATT

SEQ ID NO: 56896 - protein, 11 aa, Artificial sequence
  Protein classification predicting sequence
FNGVLCGRATW

SEQ ID NO: 56897 - protein, 16 aa, Artificial sequence
  Protein classification predicting sequence
RLPDCLDVWSAKRIKE

SEQ ID NO: 56898 - protein, 14 aa, Artificial sequence
  Protein classification predicting sequence
GSECVAEDIPFFLE

SEQ ID NO: 56899 - protein, 8 aa, Artificial sequence
  Protein classification predicting sequence
AKVKPRKV

SEQ ID NO: 56900 - protein, 14 aa, Artificial sequence
  Protein classification predicting sequence
RFNIDVLKVEVPVN

SEQ ID NO: 56901 - protein, 10 aa, Artificial sequence
  Protein classification predicting sequence
DVLKVEVPVN

SEQ ID NO: 56902 - protein, 6 aa, Artificial sequence
  Protein classification predicting sequence
KYVEGF

SEQ ID NO: 56903 - protein, 13 aa, Artificial sequence
  Protein classification predicting sequence
ISALAFDQRGALK

SEQ ID NO: 56904 - protein, 6 aa, Artificial sequence
  Protein classification predicting sequence
EPTVAQ

SEQ ID NO: 56905 - protein, 8 aa, Artificial sequence
  Protein classification predicting sequence
LLDPEYGL

SEQ ID NO: 56906 - protein, 8 aa, Artificial sequence
  Protein classification predicting sequence
LEILTYDE

SEQ ID NO: 56907 - protein, 6 aa, Artificial sequence
  Protein classification predicting sequence
AMKVFS

SEQ ID NO: 56908 - protein, 12 aa, Artificial sequence
  Protein classification predicting sequence
YVEGFAEGEVVY

SEQ ID NO: 56909 - protein, 18 aa, Artificial sequence
  Protein classification predicting sequence
QEASTDLPYIYLSAGVSA

SEQ ID NO: 56910 - protein, 12 aa, Artificial sequence
  Protein classification predicting sequence
LPYIYLSAGVSA

SEQ ID NO: 56911 - protein, 17 aa, Artificial sequence
  Protein classification predicting sequence
ISALAFDQRGALKRMMA

SEQ ID NO: 56912 - protein, 8 aa, Artificial sequence
  Protein classification predicting sequence
LVSEELTP

SEQ ID NO: 56913 - protein, 6 aa, Artificial sequence
  Protein classification predicting sequence
AEDIPF

SEQ ID NO: 56914 - protein, 6 aa, Artificial sequence
  Protein classification predicting sequence
EFAKVK

SEQ ID NO: 56915 - protein, 7 aa, Artificial sequence
  Protein classification predicting sequence
TKEEAAQ

SEQ ID NO: 56916 - protein, 8 aa, Artificial sequence
  Protein classification predicting sequence
AAREWLRT

SEQ ID NO: 56917 - protein, 7 aa, Artificial sequence
  Protein classification predicting sequence
IYLSAGV

SEQ ID NO: 56918 - protein, 10 aa, Artificial sequence
  Protein classification predicting sequence
GVLCGRATWA

SEQ ID NO: 56919 - protein, 7 aa, Artificial sequence
  Protein classification predicting sequence
RLPDCLV

SEQ ID NO: 56920 - protein, 9 aa, Artificial sequence
  Protein classification predicting sequence
QIEQLKVLV

SEQ ID NO: 56921 - protein, 25 aa, Artificial sequence
  Protein classification predicting sequence
EELTQYASSILLDPEYGLPASDARN

SEQ ID NO: 56922 - protein, 39 aa, Artificial sequence
  Protein classification predicting sequence
EEINIQKKAYIERIGSECVAEDIPFFLEVLTYDDNIPDN

SEQ ID NO: 56923 - protein, 19 aa, Artificial sequence
  Protein classification predicting sequence
EFAKVKPRKVNEAMKLFSE

SEQ ID NO: 56924 - protein, 14 aa, Artificial sequence
  Protein classification predicting sequence
FNVDVLKVEVPVNM

SEQ ID NO: 56925 - protein, 15 aa, Artificial sequence
  Protein classification predicting sequence
EGEVVYTKEEAAQHF

SEQ ID NO: 56926 - protein, 8 aa, Artificial sequence
  Protein classification predicting sequence
VKVYIEEG

SEQ ID NO: 56927 - protein, 6 aa, Artificial sequence
  Protein classification predicting sequence
TATSWK

SEQ ID NO: 56928 - protein, 13 aa, Artificial sequence
  Protein classification predicting sequence
AGLLLAYEKTGYD

SEQ ID NO: 56929 - protein, 10 aa, Artificial sequence
  Protein classification predicting sequence
HQTEEPTVAQ

SEQ ID NO: 56930 - protein, 15 aa, Artificial sequence
  Protein classification predicting sequence
PYIYLSAGVSAKLFQ

SEQ ID NO: 56931 - protein, 21 aa, Artificial sequence
  Protein classification predicting sequence
PYIYLSAGVSAKLFQDTLVFA

SEQ ID NO: 56932 - protein, 9 aa, Artificial sequence
  Protein classification predicting sequence
FDHQVPADS

SEQ ID NO: 56933 - protein, 6 aa, Artificial sequence
  Protein classification predicting sequence
CNMAIE

SEQ ID NO: 56934 - protein, 7 aa, Artificial sequence
  Protein classification predicting sequence
STSNRNF

SEQ ID NO: 56935 - protein, 6 aa, Artificial sequence
  Protein classification predicting sequence
GLIAPD

SEQ ID NO: 56936 - protein, 8 aa, Artificial sequence
  Protein classification predicting sequence
VDGRVPDP

SEQ ID NO: 56937 - protein, 7 aa, Artificial sequence
  Protein classification predicting sequence
YMGLKPG

SEQ ID NO: 56938 - protein, 5 aa, Artificial sequence
  Protein classification predicting sequence
CTNGR

SEQ ID NO: 56939 - protein, 7 aa, Artificial sequence
  Protein classification predicting sequence
SPAVAAA

SEQ ID NO: 56940 - protein, 7 aa, Artificial sequence
  Protein classification predicting sequence
CHQVLPE

SEQ ID NO: 56941 - protein, 6 aa, Artificial sequence
  Protein classification predicting sequence
GAFATG

SEQ ID NO: 56942 - protein, 8 aa, Artificial sequence
  Protein classification predicting sequence
FATGKLWF

SEQ ID NO: 56943 - protein, 6 aa, Artificial sequence
  Protein classification predicting sequence
CGPCLG

SEQ ID NO: 56944 - protein, 7 aa, Artificial sequence
  Protein classification predicting sequence
GVLAEGE

SEQ ID NO: 56945 - protein, 7 aa, Artificial sequence
  Protein classification predicting sequence
STTNRNF

SEQ ID NO: 56946 - protein, 9 aa, Artificial sequence
  Protein classification predicting sequence
EKILSRASG

SEQ ID NO: 56947 - protein, 10 aa, Artificial sequence
  Protein classification predicting sequence
DVSDLEPQVA

SEQ ID NO: 56948 - protein, 8 aa, Artificial sequence
  Protein classification predicting sequence
CGPCLGGH

SEQ ID NO: 56949 - protein, 6 aa, Artificial sequence
  Protein classification predicting sequence
TSNRNF

SEQ ID NO: 56950 - protein, 10 aa, Artificial sequence
  Protein classification predicting sequence
VAFPHLPENT

SEQ ID NO: 56951 - protein, 9 aa, Artificial sequence
  Protein classification predicting sequence
HEVTSPQAF

SEQ ID NO: 56952 - protein, 15 aa, Artificial sequence
  Protein classification predicting sequence
GEMARIQMQELIKNC

SEQ ID NO: 56953 - protein, 9 aa, Artificial sequence
  Protein classification predicting sequence
PQVTWGTNP

SEQ ID NO: 56954 - protein, 7 aa, Artificial sequence
  Protein classification predicting sequence
IPDPASF

SEQ ID NO: 56955 - protein, 10 aa, Artificial sequence
  Protein classification predicting sequence
VFIGSCTNSR

SEQ ID NO: 56956 - protein, 6 aa, Artificial sequence
  Protein classification predicting sequence
DQVFIG

SEQ ID NO: 56957 - protein, 7 aa, Artificial sequence
  Protein classification predicting sequence
TLYDKIW

SEQ ID NO: 56958 - protein, 6 aa, Artificial sequence
  Protein classification predicting sequence
RQGIVH

SEQ ID NO: 56959 - protein, 9 aa, Artificial sequence
  Protein classification predicting sequence
TIVCGDSHT

SEQ ID NO: 56960 - protein, 6 aa, Artificial sequence
  Protein classification predicting sequence
CNMSIE

SEQ ID NO: 56961 - protein, 7 aa, Artificial sequence
  Protein classification predicting sequence
GTKITDI

SEQ ID NO: 56962 - protein, 9 aa, Artificial sequence
  Protein classification predicting sequence
GALGAFATG

SEQ ID NO: 56963 - protein, 14 aa, Artificial sequence
  Protein classification predicting sequence
EGVCHQVLPEKGHV

SEQ ID NO: 56964 - protein, 7 aa, Artificial sequence
  Protein classification predicting sequence
GSCTNGR

SEQ ID NO: 56965 - protein, 6 aa, Artificial sequence
  Protein classification predicting sequence
WFKVPE

SEQ ID NO: 56966 - protein, 10 aa, Artificial sequence
  Protein classification predicting sequence
ACPHNVDNVK

SEQ ID NO: 56967 - protein, 8 aa, Artificial sequence
  Protein classification predicting sequence
EGVCHQVL

SEQ ID NO: 56968 - protein, 11 aa, Artificial sequence
  Protein classification predicting sequence
TTNRNFRGRMG

SEQ ID NO: 56969 - protein, 9 aa, Artificial sequence
  Protein classification predicting sequence
DERLTLTNF

SEQ ID NO: 56970 - protein, 7 aa, Artificial sequence
  Protein classification predicting sequence
FIGSCTN

SEQ ID NO: 56971 - protein, 6 aa, Artificial sequence
  Protein classification predicting sequence
GCSMCL

SEQ ID NO: 56972 - protein, 9 aa, Artificial sequence
  Protein classification predicting sequence
GCSMCLAMN

SEQ ID NO: 56973 - protein, 6 aa, Artificial sequence
  Protein classification predicting sequence
LMSPAM

SEQ ID NO: 56974 - protein, 6 aa, Artificial sequence
  Protein classification predicting sequence
DHNVPT

SEQ ID NO: 56975 - protein, 6 aa, Artificial sequence
  Protein classification predicting sequence
TLDDNC

SEQ ID NO: 56976 - protein, 6 aa, Artificial sequence
  Protein classification predicting sequence
THGAFG

SEQ ID NO: 56977 - protein, 8 aa, Artificial sequence
  Protein classification predicting sequence
WGTSPEMV

SEQ ID NO: 56978 - protein, 8 aa, Artificial sequence
  Protein classification predicting sequence
AGHFVDVR

SEQ ID NO: 56979 - protein, 8 aa, Artificial sequence
  Protein classification predicting sequence
GADWDAAV

SEQ ID NO: 56980 - protein, 8 aa, Artificial sequence
  Protein classification predicting sequence
TWGTNPGQ

SEQ ID NO: 56981 - protein, 8 aa, Artificial sequence
  Protein classification predicting sequence
IGTAGGTG

SEQ ID NO: 56982 - protein, 14 aa, Artificial sequence
  Protein classification predicting sequence
LPPIVSWGSSPEDV

SEQ ID NO: 56983 - protein, 7 aa, Artificial sequence
  Protein classification predicting sequence
VPNPDDI

SEQ ID NO: 56984 - protein, 10 aa, Artificial sequence
  Protein classification predicting sequence
DRVFIGSCTN

SEQ ID NO: 56985 - protein, 13 aa, Artificial sequence
  Protein classification predicting sequence
WREPGCSMCLAMN

SEQ ID NO: 56986 - protein, 9 aa, Artificial sequence
  Protein classification predicting sequence
TQLFIGLHL

SEQ ID NO: 56987 - protein, 7 aa, Artificial sequence
  Protein classification predicting sequence
CGDSHTS

SEQ ID NO: 56988 - protein, 6 aa, Artificial sequence
  Protein classification predicting sequence
MEERMT

SEQ ID NO: 56989 - protein, 9 aa, Artificial sequence
  Protein classification predicting sequence
CNMAIEGGA

SEQ ID NO: 56990 - protein, 8 aa, Artificial sequence
  Protein classification predicting sequence
IGVDGALY

SEQ ID NO: 56991 - protein, 7 aa, Artificial sequence
  Protein classification predicting sequence
NMAIEAG

SEQ ID NO: 56992 - protein, 9 aa, Artificial sequence
  Protein classification predicting sequence
GRMGHPKSE

SEQ ID NO: 56993 - protein, 13 aa, Artificial sequence
  Protein classification predicting sequence
RRDDGSSLIYIDR

SEQ ID NO: 56994 - protein, 7 aa, Artificial sequence
  Protein classification predicting sequence
HEVTSPQ

SEQ ID NO: 56995 - protein, 19 aa, Artificial sequence
  Protein classification predicting sequence
GALAHGIGTSEVEHVLATQ

SEQ ID NO: 56996 - protein, 7 aa, Artificial sequence
  Protein classification predicting sequence
AKDIVLA

SEQ ID NO: 56997 - protein, 7 aa, Artificial sequence
  Protein classification predicting sequence
FDTVVEL

SEQ ID NO: 56998 - protein, 7 aa, Artificial sequence
  Protein classification predicting sequence
PQVTWGT

SEQ ID NO: 56999 - protein, 11 aa, Artificial sequence
  Protein classification predicting sequence
GCSMCLAMNPD

SEQ ID NO: 57000 - protein, 17 aa, Artificial sequence
  Protein classification predicting sequence
GGRTHLVSPAMAAAAAV

SEQ ID NO: 57001 - protein, 7 aa, Artificial sequence
  Protein classification predicting sequence
THGAFGA

SEQ ID NO: 57002 - protein, 86 aa, Artificial sequence
  Protein classification predicting sequence
NCKQFQVPLADIGDEEQGIVHVIGPELGLTQPGKTIVCGDSHTATHGAFGALAFGIGTSEVEHVLATQTLWQRKPKAMGIELKGKL

SEQ ID NO: 57003 - protein, 11 aa, Artificial sequence
  Protein classification predicting sequence
GVYAKDIILHL

SEQ ID NO: 57004 - protein, 30 aa, Artificial sequence
  Protein classification predicting sequence
GVYAKDIILHLLSKYGVAVGTGYVMEFYGE

SEQ ID NO: 57005 - protein, 30 aa, Artificial sequence
  Protein classification predicting sequence
DVTDLAPYVTWGTNPSMGVRIDEKLPEKHD

SEQ ID NO: 57006 - protein, 7 aa, Artificial sequence
  Protein classification predicting sequence
VVKGRKV

SEQ ID NO: 57007 - protein, 8 aa, Artificial sequence
  Protein classification predicting sequence
YGVDFGTG

SEQ ID NO: 57008 - protein, 9 aa, Artificial sequence
  Protein classification predicting sequence
CNMSIEAGA

SEQ ID NO: 57009 - protein, 6 aa, Artificial sequence
  Protein classification predicting sequence
LAYMGL

SEQ ID NO: 57010 - protein, 7 aa, Artificial sequence
  Protein classification predicting sequence
YMGLEPG

SEQ ID NO: 57011 - protein, 7 aa, Artificial sequence
  Protein classification predicting sequence
AEKEGLD

SEQ ID NO: 57012 - protein, 7 aa, Artificial sequence
  Protein classification predicting sequence
RTHLVSP

SEQ ID NO: 57013 - protein, 36 aa, Artificial sequence
  Protein classification predicting sequence
VRRPDLTFATMDHNIPTKDVWNITDRIAKQQLDTLR

SEQ ID NO: 57014 - protein, 12 aa, Artificial sequence
  Protein classification predicting sequence
AFGIGTSEVEHV

SEQ ID NO: 57015 - protein, 10 aa, Artificial sequence
  Protein classification predicting sequence
GIGTSEVEHV

SEQ ID NO: 57016 - protein, 7 aa, Artificial sequence
  Protein classification predicting sequence
ATQTIWQ

SEQ ID NO: 57017 - protein, 14 aa, Artificial sequence
  Protein classification predicting sequence
CASTSNRNFEGRQG

SEQ ID NO: 57018 - protein, 6 aa, Artificial sequence
  Protein classification predicting sequence
LLYIDL

SEQ ID NO: 57019 - protein, 13 aa, Artificial sequence
  Protein classification predicting sequence
HEVTSPQAFEGLR

SEQ ID NO: 57020 - protein, 8 aa, Artificial sequence
  Protein classification predicting sequence
TFATMDHN

SEQ ID NO: 57021 - protein, 8 aa, Artificial sequence
  Protein classification predicting sequence
RAYEYMGL

SEQ ID NO: 57022 - protein, 7 aa, Artificial sequence
  Protein classification predicting sequence
AGFEWRE

SEQ ID NO: 57023 - protein, 6 aa, Artificial sequence
  Protein classification predicting sequence
DHNTPT

SEQ ID NO: 57024 - protein, 8 aa, Artificial sequence
  Protein classification predicting sequence
GIGTSEVE

SEQ ID NO: 57025 - protein, 5 aa, Artificial sequence
  Protein classification predicting sequence
CLAMN

SEQ ID NO: 57026 - protein, 12 aa, Artificial sequence
  Protein classification predicting sequence
STSNRNFEGRQG

SEQ ID NO: 57027 - protein, 7 aa, Artificial sequence
  Protein classification predicting sequence
TLAEKVW

SEQ ID NO: 57028 - protein, 17 aa, Artificial sequence
  Protein classification predicting sequence
HEVTSPQAFEGLRLAGR

SEQ ID NO: 57029 - protein, 6 aa, Artificial sequence
  Protein classification predicting sequence
PFKTMA

SEQ ID NO: 57030 - protein, 7 aa, Artificial sequence
  Protein classification predicting sequence
DDDAVFD

SEQ ID NO: 57031 - protein, 16 aa, Artificial sequence
  Protein classification predicting sequence
VCGDSHTSTHGAFGAL

SEQ ID NO: 57032 - protein, 8 aa, Artificial sequence
  Protein classification predicting sequence
THGAFGAL

SEQ ID NO: 57033 - protein, 6 aa, Artificial sequence
  Protein classification predicting sequence
TWGTNP

SEQ ID NO: 57034 - protein, 12 aa, Artificial sequence
  Protein classification predicting sequence
HEVTSPQAFEGL

SEQ ID NO: 57035 - protein, 7 aa, Artificial sequence
  Protein classification predicting sequence
AGFDWRE

SEQ ID NO: 57036 - protein, 17 aa, Artificial sequence
  Protein classification predicting sequence
VRQPKKTFATMDHNVST

SEQ ID NO: 57037 - protein, 12 aa, Artificial sequence
  Protein classification predicting sequence
KTFATMDHNVST

SEQ ID NO: 57038 - protein, 10 aa, Artificial sequence
  Protein classification predicting sequence
DINASGSMAK

SEQ ID NO: 57039 - protein, 9 aa, Artificial sequence
  Protein classification predicting sequence
QMQELIKNC

SEQ ID NO: 57040 - protein, 8 aa, Artificial sequence
  Protein classification predicting sequence
VTAKDLIL

SEQ ID NO: 57041 - protein, 9 aa, Artificial sequence
  Protein classification predicting sequence
GGRTHLVSP

SEQ ID NO: 57042 - protein, 12 aa, Artificial sequence
  Protein classification predicting sequence
HLVHEVTSPQAF

SEQ ID NO: 57043 - protein, 16 aa, Artificial sequence
  Protein classification predicting sequence
ERCASTSNRNFEGRQG

SEQ ID NO: 57044 - protein, 9 aa, Artificial sequence
  Protein classification predicting sequence
KTLYEKIYD

SEQ ID NO: 57045 - protein, 12 aa, Artificial sequence
  Protein classification predicting sequence
HLLHEVTSPQAF

SEQ ID NO: 57046 - protein, 10 aa, Artificial sequence
  Protein classification predicting sequence
RMTVCNMAIE

SEQ ID NO: 57047 - protein, 7 aa, Artificial sequence
  Protein classification predicting sequence
EGLDKIF

SEQ ID NO: 57048 - protein, 8 aa, Artificial sequence
  Protein classification predicting sequence
GRTHLVSP

SEQ ID NO: 57049 - protein, 12 aa, Artificial sequence
  Protein classification predicting sequence
GRTHLVSPIMAA

SEQ ID NO: 57050 - protein, 7 aa, Artificial sequence
  Protein classification predicting sequence
LYIDLHL

SEQ ID NO: 57051 - protein, 14 aa, Artificial sequence
  Protein classification predicting sequence
RQPKKTFATMDHNV

SEQ ID NO: 57052 - protein, 6 aa, Artificial sequence
  Protein classification predicting sequence
LYDINH

SEQ ID NO: 57053 - protein, 6 aa, Artificial sequence
  Protein classification predicting sequence
YIDLHL

SEQ ID NO: 57054 - protein, 7 aa, Artificial sequence
  Protein classification predicting sequence
IQMQQLI

SEQ ID NO: 57055 - protein, 6 aa, Artificial sequence
  Protein classification predicting sequence
FDAHVV

SEQ ID NO: 57056 - protein, 7 aa, Artificial sequence
  Protein classification predicting sequence
VCGDSHT

SEQ ID NO: 57057 - protein, 7 aa, Artificial sequence
  Protein classification predicting sequence
ATQTLKQ

SEQ ID NO: 57058 - protein, 6 aa, Artificial sequence
  Protein classification predicting sequence
KTMKIE

SEQ ID NO: 57059 - protein, 7 aa, Artificial sequence
  Protein classification predicting sequence
LSMEARM

SEQ ID NO: 57060 - protein, 7 aa, Artificial sequence
  Protein classification predicting sequence
TFEYIKG

SEQ ID NO: 57061 - protein, 8 aa, Artificial sequence
  Protein classification predicting sequence
SRLQVQTL

SEQ ID NO: 57062 - protein, 7 aa, Artificial sequence
  Protein classification predicting sequence
SGMERAL

SEQ ID NO: 57063 - protein, 6 aa, Artificial sequence
  Protein classification predicting sequence
FRKHCL

SEQ ID NO: 57064 - protein, 8 aa, Artificial sequence
  Protein classification predicting sequence
TLYDKIWD

SEQ ID NO: 57065 - protein, 6 aa, Artificial sequence
  Protein classification predicting sequence
DHNIPT

SEQ ID NO: 57066 - protein, 17 aa, Artificial sequence
  Protein classification predicting sequence
VCGDSHTSTHGAFGALA

SEQ ID NO: 57067 - protein, 16 aa, Artificial sequence
  Protein classification predicting sequence
GIGTSEVEHVLATQTL

SEQ ID NO: 57068 - protein, 12 aa, Artificial sequence
  Protein classification predicting sequence
VPGSGLVKEQAE

SEQ ID NO: 57069 - protein, 6 aa, Artificial sequence
  Protein classification predicting sequence
GITAKD

SEQ ID NO: 57070 - protein, 17 aa, Artificial sequence
  Protein classification predicting sequence
AGFEWREPGCSMCLAMN

SEQ ID NO: 57071 - protein, 21 aa, Artificial sequence
  Protein classification predicting sequence
AGFEWREPGCSMCLAMNADRL

SEQ ID NO: 57072 - protein, 19 aa, Artificial sequence
  Protein classification predicting sequence
GGRTHLVSPAMAAAAAVAG

SEQ ID NO: 57073 - protein, 7 aa, Artificial sequence
  Protein classification predicting sequence
TGVGSTD

SEQ ID NO: 57074 - protein, 6 aa, Artificial sequence
  Protein classification predicting sequence
GSTDMA

SEQ ID NO: 57075 - protein, 8 aa, Artificial sequence
  Protein classification predicting sequence
IGTGGGQG

SEQ ID NO: 57076 - protein, 7 aa, Artificial sequence
  Protein classification predicting sequence
EYRGEAI

SEQ ID NO: 57077 - protein, 7 aa, Artificial sequence
  Protein classification predicting sequence
RMTVCNM

SEQ ID NO: 57078 - protein, 8 aa, Artificial sequence
  Protein classification predicting sequence
AVAYWKTL

SEQ ID NO: 57079 - protein, 6 aa, Artificial sequence
  Protein classification predicting sequence
AGAQWR

SEQ ID NO: 57080 - protein, 8 aa, Artificial sequence
  Protein classification predicting sequence
RKLRRPDL

SEQ ID NO: 57081 - protein, 8 aa, Artificial sequence
  Protein classification predicting sequence
TFEYVKGR

SEQ ID NO: 57082 - protein, 14 aa, Artificial sequence
  Protein classification predicting sequence
AGCSMCLGMNPDQL

SEQ ID NO: 57083 - protein, 19 aa, Artificial sequence
  Protein classification predicting sequence
GGRTHLVSPAVAAATAVRG

SEQ ID NO: 57084 - protein, 6 aa, Artificial sequence
  Protein classification predicting sequence
KLFDAH

SEQ ID NO: 57085 - protein, 21 aa, Artificial sequence
  Protein classification predicting sequence
TLPGMTIVCGDSHTATHGAFG

SEQ ID NO: 57086 - protein, 21 aa, Artificial sequence
  Protein classification predicting sequence
LAFGIGTSEVEHVLATQTLKQ

SEQ ID NO: 57087 - protein, 6 aa, Artificial sequence
  Protein classification predicting sequence
KALAYM

SEQ ID NO: 57088 - protein, 9 aa, Artificial sequence
  Protein classification predicting sequence
FIEAGFEWR

SEQ ID NO: 57089 - protein, 6 aa, Artificial sequence
  Protein classification predicting sequence
NCAEFG

SEQ ID NO: 57090 - protein, 6 aa, Artificial sequence
  Protein classification predicting sequence
CGDSHT

SEQ ID NO: 57091 - protein, 7 aa, Artificial sequence
  Protein classification predicting sequence
KLKVRRI

SEQ ID NO: 57092 - protein, 13 aa, Artificial sequence
  Protein classification predicting sequence
HEVTSPQAFDGLR

SEQ ID NO: 57093 - protein, 6 aa, Artificial sequence
  Protein classification predicting sequence
QGIVHV

SEQ ID NO: 57094 - protein, 14 aa, Artificial sequence
  Protein classification predicting sequence
TLPGMTIVCGDSHT

SEQ ID NO: 57095 - protein, 7 aa, Artificial sequence
  Protein classification predicting sequence
FDTVVTL

SEQ ID NO: 57096 - protein, 8 aa, Artificial sequence
  Protein classification predicting sequence
VFIGSCTN

SEQ ID NO: 57097 - protein, 6 aa, Artificial sequence
  Protein classification predicting sequence
NYERAY

SEQ ID NO: 57098 - protein, 6 aa, Artificial sequence
  Protein classification predicting sequence
YIDRHL

SEQ ID NO: 57099 - protein, 7 aa, Artificial sequence
  Protein classification predicting sequence
GEPQLLY

SEQ ID NO: 57100 - protein, 7 aa, Artificial sequence
  Protein classification predicting sequence
GLTQPGK

SEQ ID NO: 57101 - protein, 6 aa, Artificial sequence
  Protein classification predicting sequence
SEVEHV

SEQ ID NO: 57102 - protein, 11 aa, Artificial sequence
  Protein classification predicting sequence
VTWGTNPEMGV

SEQ ID NO: 57103 - protein, 7 aa, Artificial sequence
  Protein classification predicting sequence
IVKGNKV

SEQ ID NO: 57104 - protein, 14 aa, Artificial sequence
  Protein classification predicting sequence
AGFEWREPGCSMCL

SEQ ID NO: 57105 - protein, 22 aa, Artificial sequence
  Protein classification predicting sequence
AGFEWREPGCSMCLGMNPDQVP

SEQ ID NO: 57106 - protein, 6 aa, Artificial sequence
  Protein classification predicting sequence
KIWDDH

SEQ ID NO: 57107 - protein, 8 aa, Artificial sequence
  Protein classification predicting sequence
PIADPVSR

SEQ ID NO: 57108 - protein, 6 aa, Artificial sequence
  Protein classification predicting sequence
APDETT

SEQ ID NO: 57109 - protein, 8 aa, Artificial sequence
  Protein classification predicting sequence
AEKALAYM

SEQ ID NO: 57110 - protein, 11 aa, Artificial sequence
  Protein classification predicting sequence
TSNRNFEGRQG

SEQ ID NO: 57111 - protein, 10 aa, Artificial sequence
  Protein classification predicting sequence
GGRTHLVSPA

SEQ ID NO: 57112 - protein, 7 aa, Artificial sequence
  Protein classification predicting sequence
GVTAKDI

SEQ ID NO: 57113 - protein, 7 aa, Artificial sequence
  Protein classification predicting sequence
SMEGRMT

SEQ ID NO: 57114 - protein, 6 aa, Artificial sequence
  Protein classification predicting sequence
PGERCA

SEQ ID NO: 57115 - protein, 13 aa, Artificial sequence
  Protein classification predicting sequence
TSNRNFEGRQGKG

SEQ ID NO: 57116 - protein, 9 aa, Artificial sequence
  Protein classification predicting sequence
GIGTSEVEH

SEQ ID NO: 57117 - protein, 8 aa, Artificial sequence
  Protein classification predicting sequence
LSMEGRMT

SEQ ID NO: 57118 - protein, 7 aa, Artificial sequence
  Protein classification predicting sequence
RMTLCNM

SEQ ID NO: 57119 - protein, 8 aa, Artificial sequence
  Protein classification predicting sequence
ITEFRMND

SEQ ID NO: 57120 - protein, 5 aa, Artificial sequence
  Protein classification predicting sequence
THGAF

SEQ ID NO: 57121 - protein, 14 aa, Artificial sequence
  Protein classification predicting sequence
GIGTSEVEHVLATQ

SEQ ID NO: 57122 - protein, 6 aa, Artificial sequence
  Protein classification predicting sequence
YMGLKP

SEQ ID NO: 57123 - protein, 10 aa, Artificial sequence
  Protein classification predicting sequence
GPQLGLTQPG

SEQ ID NO: 57124 - protein, 7 aa, Artificial sequence
  Protein classification predicting sequence
GARAGLI

SEQ ID NO: 57125 - protein, 9 aa, Artificial sequence
  Protein classification predicting sequence
GCSMCLGMN

SEQ ID NO: 57126 - protein, 7 aa, Artificial sequence
  Protein classification predicting sequence
GHFVDVR

SEQ ID NO: 57127 - protein, 13 aa, Artificial sequence
  Protein classification predicting sequence
KTLYEKLFDAHVV

SEQ ID NO: 57128 - protein, 13 aa, Artificial sequence
  Protein classification predicting sequence
RHLVHEVTSPQAF

SEQ ID NO: 57129 - protein, 9 aa, Artificial sequence
  Protein classification predicting sequence
QALVVPGSG

SEQ ID NO: 57130 - protein, 18 aa, Artificial sequence
  Protein classification predicting sequence
PGERCASTSNRNFEGRQG

SEQ ID NO: 57131 - protein, 22 aa, Artificial sequence
  Protein classification predicting sequence
QPGKTFATMDHNVSTQTKDINA

SEQ ID NO: 57132 - protein, 12 aa, Artificial sequence
  Protein classification predicting sequence
GIGTSEVEHVLA

SEQ ID NO: 57133 - protein, 21 aa, Artificial sequence
  Protein classification predicting sequence
ITAKDIVLAIIGKTGSAGGTG

SEQ ID NO: 57134 - protein, 6 aa, Artificial sequence
  Protein classification predicting sequence
VVEFCG

SEQ ID NO: 57135 - protein, 13 aa, Artificial sequence
  Protein classification predicting sequence
PQVTWGTNPGQVI

SEQ ID NO: 57136 - protein, 13 aa, Artificial sequence
  Protein classification predicting sequence
GVQAIVVPGSGPV

SEQ ID NO: 57137 - protein, 14 aa, Artificial sequence
  Protein classification predicting sequence
RTHLVSPAMAAAAA

SEQ ID NO: 57138 - protein, 23 aa, Artificial sequence
  Protein classification predicting sequence
RTHLVSPAMAAAAAINGHFIDIR

SEQ ID NO: 57139 - protein, 15 aa, Artificial sequence
  Protein classification predicting sequence
IDRHLVHEVTSPQAF

SEQ ID NO: 57140 - protein, 18 aa, Artificial sequence
  Protein classification predicting sequence
IDRHLVHEVTSPQAFEGL

SEQ ID NO: 57141 - protein, 7 aa, Artificial sequence
  Protein classification predicting sequence
MERALEY

SEQ ID NO: 57142 - protein, 6 aa, Artificial sequence
  Protein classification predicting sequence
PDFVLN

SEQ ID NO: 57143 - protein, 6 aa, Artificial sequence
  Protein classification predicting sequence
GVCHQV

SEQ ID NO: 57144 - protein, 9 aa, Artificial sequence
  Protein classification predicting sequence
ATVDHIVPT

SEQ ID NO: 57145 - protein, 7 aa, Artificial sequence
  Protein classification predicting sequence
QGIVHVI

SEQ ID NO: 57146 - protein, 5 aa, Artificial sequence
  Protein classification predicting sequence
KLKVR

SEQ ID NO: 57147 - protein, 9 aa, Artificial sequence
  Protein classification predicting sequence
VTWGITPGQ

SEQ ID NO: 57148 - protein, 8 aa, Artificial sequence
  Protein classification predicting sequence
TWGITPGQ

SEQ ID NO: 57149 - protein, 9 aa, Artificial sequence
  Protein classification predicting sequence
FIGSCTNGR

SEQ ID NO: 57150 - protein, 15 aa, Artificial sequence
  Protein classification predicting sequence
SASSSNRNFKGRQGS

SEQ ID NO: 57151 - protein, 7 aa, Artificial sequence
  Protein classification predicting sequence
LIYIDRH

SEQ ID NO: 57152 - protein, 6 aa, Artificial sequence
  Protein classification predicting sequence
IGTAGG

SEQ ID NO: 57153 - protein, 8 aa, Artificial sequence
  Protein classification predicting sequence
YVKGRPFA

SEQ ID NO: 57154 - protein, 8 aa, Artificial sequence
  Protein classification predicting sequence
RALKYMGL

SEQ ID NO: 57155 - protein, 10 aa, Artificial sequence
  Protein classification predicting sequence
GVTAKDIVLA

SEQ ID NO: 57156 - protein, 18 aa, Artificial sequence
  Protein classification predicting sequence
VFIGSCTNSRIEDLRAAA

SEQ ID NO: 57157 - protein, 27 aa, Artificial sequence
  Protein classification predicting sequence
VFIGSCTNSRIEDLRAAAEIAKGRKVA

SEQ ID NO: 57158 - protein, 9 aa, Artificial sequence
  Protein classification predicting sequence
VVPGSGLVK

SEQ ID NO: 57159 - protein, 9 aa, Artificial sequence
  Protein classification predicting sequence
FHDLTGYHV

SEQ ID NO: 57160 - protein, 20 aa, Artificial sequence
  Protein classification predicting sequence
VEGTKIDQVFIGSCTNGRFE

SEQ ID NO: 57161 - protein, 16 aa, Artificial sequence
  Protein classification predicting sequence
ILPPGCGPCLGRHMGV

SEQ ID NO: 57162 - protein, 18 aa, Artificial sequence
  Protein classification predicting sequence
VDLVYAHDGTMPLIIEAF

SEQ ID NO: 57163 - protein, 8 aa, Artificial sequence
  Protein classification predicting sequence
SALYGEIT

SEQ ID NO: 57164 - protein, 7 aa, Artificial sequence
  Protein classification predicting sequence
LHSDEGA

SEQ ID NO: 57165 - protein, 6 aa, Artificial sequence
  Protein classification predicting sequence
TLYDKI

SEQ ID NO: 57166 - protein, 6 aa, Artificial sequence
  Protein classification predicting sequence
DHNVST

SEQ ID NO: 57167 - protein, 6 aa, Artificial sequence
  Protein classification predicting sequence
AYWKTL

SEQ ID NO: 57168 - protein, 9 aa, Artificial sequence
  Protein classification predicting sequence
PGTKITDIA

SEQ ID NO: 57169 - protein, 71 aa, Artificial sequence
  Protein classification predicting sequence
DKRQGIVHIVGPEQGFTLPGMTIVCGDSHTSTHGAFGALAHGIGTSEVEHVLATQTLIQKKAKNMLVRVDG

SEQ ID NO: 57170 - protein, 8 aa, Artificial sequence
  Protein classification predicting sequence
PDDITFEY

SEQ ID NO: 57171 - protein, 13 aa, Artificial sequence
  Protein classification predicting sequence
PGERCASTSNRNF

SEQ ID NO: 57172 - protein, 9 aa, Artificial sequence
  Protein classification predicting sequence
CASTSNRNF

SEQ ID NO: 57173 - protein, 16 aa, Artificial sequence
  Protein classification predicting sequence
CGDSHTSTHGAFGALA

SEQ ID NO: 57174 - protein, 6 aa, Artificial sequence
  Protein classification predicting sequence
SMEARM

SEQ ID NO: 57175 - protein, 8 aa, Artificial sequence
  Protein classification predicting sequence
IAPDETTF

SEQ ID NO: 57176 - protein, 6 aa, Artificial sequence
  Protein classification predicting sequence
TWGTSP

SEQ ID NO: 57177 - protein, 9 aa, Artificial sequence
  Protein classification predicting sequence
GPEQGFTLP

SEQ ID NO: 57178 - protein, 7 aa, Artificial sequence
  Protein classification predicting sequence
ICNMSIE

SEQ ID NO: 57179 - protein, 10 aa, Artificial sequence
  Protein classification predicting sequence
IATPDHNVPT

SEQ ID NO: 57180 - protein, 7 aa, Artificial sequence
  Protein classification predicting sequence
TLRENCK

SEQ ID NO: 57181 - protein, 12 aa, Artificial sequence
  Protein classification predicting sequence
PGMTIVCGDSHT

SEQ ID NO: 57182 - protein, 19 aa, Artificial sequence
  Protein classification predicting sequence
PGMTIVCGDSHTATHGAFG

SEQ ID NO: 57183 - protein, 8 aa, Artificial sequence
  Protein classification predicting sequence
AMIVPGSG

SEQ ID NO: 57184 - protein, 27 aa, Artificial sequence
  Protein classification predicting sequence
NETPLLYIDRHLVHEVTSPQAFDGLRA

SEQ ID NO: 57185 - protein, 102 aa, Artificial sequence
  Protein classification predicting sequence
AKGRKVAPGVQALVVPGSGPVKAQAEAEGLDKIFIEAGFEWRLPGCSMCLAMNNDRLNPGERCASTSNRNFEGRQGRGGRTHLVSPAMAAAAAVTGHFADIR

SEQ ID NO: 57186 - protein, 8 aa, Artificial sequence
  Protein classification predicting sequence
TLYDKVWD

SEQ ID NO: 57187 - protein, 10 aa, Artificial sequence
  Protein classification predicting sequence
LATVDHNIPT

SEQ ID NO: 57188 - protein, 10 aa, Artificial sequence
  Protein classification predicting sequence
QGIVHVMGPE

SEQ ID NO: 57189 - protein, 8 aa, Artificial sequence
  Protein classification predicting sequence
IVCGDSHT

SEQ ID NO: 57190 - protein, 8 aa, Artificial sequence
  Protein classification predicting sequence
AKTMKIEV

SEQ ID NO: 57191 - protein, 7 aa, Artificial sequence
  Protein classification predicting sequence
AKGRKVA

SEQ ID NO: 57192 - protein, 15 aa, Artificial sequence
  Protein classification predicting sequence
RCASTSNRNFEGRQG

SEQ ID NO: 57193 - protein, 20 aa, Artificial sequence
  Protein classification predicting sequence
LSMEGRMTLCNMAIEMGAKA

SEQ ID NO: 57194 - protein, 40 aa, Artificial sequence
  Protein classification predicting sequence
QNRKLRRPDLTFATLDHNVPTIDIFNIKDEIANKQITTLQ

SEQ ID NO: 57195 - protein, 77 aa, Artificial sequence
  Protein classification predicting sequence
DFGVHIFDMGSDEQGIVHMVGPETGLTQPGKTIVCGDSHTATHGAFGAIAFGIGTSEVEHVFATQTLWQTKPKNLKI

SEQ ID NO: 57196 - protein, 23 aa, Artificial sequence
  Protein classification predicting sequence
YGVDFGTGYALEFTGETIKNLSM

SEQ ID NO: 57197 - protein, 7 aa, Artificial sequence
  Protein classification predicting sequence
RMTICNM

SEQ ID NO: 57198 - protein, 8 aa, Artificial sequence
  Protein classification predicting sequence
NMAIEAGA

SEQ ID NO: 57199 - protein, 8 aa, Artificial sequence
  Protein classification predicting sequence
ELYSDDDA

SEQ ID NO: 57200 - protein, 11 aa, Artificial sequence
  Protein classification predicting sequence
NDQRAYDYMGL

SEQ ID NO: 57201 - protein, 8 aa, Artificial sequence
  Protein classification predicting sequence
PGQKAEDI

SEQ ID NO: 57202 - protein, 23 aa, Artificial sequence
  Protein classification predicting sequence
LGYVFLGSCTNARLSDLIEASHI

SEQ ID NO: 57203 - protein, 21 aa, Artificial sequence
  Protein classification predicting sequence
VHPNITAIVVPGSRTVKKEAE

SEQ ID NO: 57204 - protein, 9 aa, Artificial sequence
  Protein classification predicting sequence
RIEDLRAAA

SEQ ID NO: 57205 - protein, 7 aa, Artificial sequence
  Protein classification predicting sequence
RRPDLTF

SEQ ID NO: 57206 - protein, 12 aa, Artificial sequence
  Protein classification predicting sequence
QGIVHMVGPETG

SEQ ID NO: 57207 - protein, 15 aa, Artificial sequence
  Protein classification predicting sequence
IVCGDSHTATHGAFG

SEQ ID NO: 57208 - protein, 7 aa, Artificial sequence
  Protein classification predicting sequence
VIELDVS

SEQ ID NO: 57209 - protein, 7 aa, Artificial sequence
  Protein classification predicting sequence
VTWGTNP

SEQ ID NO: 57210 - protein, 11 aa, Artificial sequence
  Protein classification predicting sequence
VTWGTNPSMGV

SEQ ID NO: 57211 - protein, 6 aa, Artificial sequence
  Protein classification predicting sequence
RAYDYM

SEQ ID NO: 57212 - protein, 17 aa, Artificial sequence
  Protein classification predicting sequence
LGYVFLGSCTNARLSDL

SEQ ID NO: 57213 - protein, 6 aa, Artificial sequence
  Protein classification predicting sequence
NPGQVI

SEQ ID NO: 57214 - protein, 7 aa, Artificial sequence
  Protein classification predicting sequence
TLFDKVW

SEQ ID NO: 57215 - protein, 11 aa, Artificial sequence
  Protein classification predicting sequence
VKAQAEAEGLD

SEQ ID NO: 57216 - protein, 14 aa, Artificial sequence
  Protein classification predicting sequence
AFGIGTSQVRDVLA

SEQ ID NO: 57217 - protein, 6 aa, Artificial sequence
  Protein classification predicting sequence
PDETTF

SEQ ID NO: 57218 - protein, 10 aa, Artificial sequence
  Protein classification predicting sequence
PGCSMCLAMN

SEQ ID NO: 57219 - protein, 12 aa, Artificial sequence
  Protein classification predicting sequence
PGCSMCLAMNPD

SEQ ID NO: 57220 - protein, 6 aa, Artificial sequence
  Protein classification predicting sequence
TTNRNF

SEQ ID NO: 57221 - protein, 7 aa, Artificial sequence
  Protein classification predicting sequence
IRSLSME

SEQ ID NO: 57222 - protein, 8 aa, Artificial sequence
  Protein classification predicting sequence
VPGSGLVK

SEQ ID NO: 57223 - protein, 20 aa, Artificial sequence
  Protein classification predicting sequence
IIPKQFLKTIKRTGLGSALF

SEQ ID NO: 57224 - protein, 30 aa, Artificial sequence
  Protein classification predicting sequence
GETPILYIDRHLVHEVTSPQAFDGLREKGR

SEQ ID NO: 57225 - protein, 33 aa, Artificial sequence
  Protein classification predicting sequence
VRQVSKTFATMDHNVSTTTKDINASGEMARIQM

SEQ ID NO: 57226 - protein, 9 aa, Artificial sequence
  Protein classification predicting sequence
VVEFCGEAI

SEQ ID NO: 57227 - protein, 19 aa, Artificial sequence
  Protein classification predicting sequence
VVEFCGEAIRDLSMEGRMT

SEQ ID NO: 57228 - protein, 7 aa, Artificial sequence
  Protein classification predicting sequence
FDAVVTL

SEQ ID NO: 57229 - protein, 9 aa, Artificial sequence
  Protein classification predicting sequence
IKPQVTWGT

SEQ ID NO: 57230 - protein, 11 aa, Artificial sequence
  Protein classification predicting sequence
SAEKALAYMGL

SEQ ID NO: 57231 - protein, 8 aa, Artificial sequence
  Protein classification predicting sequence
VFVGSCTN

SEQ ID NO: 57232 - protein, 10 aa, Artificial sequence
  Protein classification predicting sequence
GSCTNSRIED

SEQ ID NO: 57233 - protein, 27 aa, Artificial sequence
  Protein classification predicting sequence
KVASHVQALIVPGSEQVKAQAEAEGLD

SEQ ID NO: 57234 - protein, 7 aa, Artificial sequence
  Protein classification predicting sequence
EAGFEWR

SEQ ID NO: 57235 - protein, 22 aa, Artificial sequence
  Protein classification predicting sequence
EAGFEWRLPGCSMCLAMNNDRL

SEQ ID NO: 57236 - protein, 7 aa, Artificial sequence
  Protein classification predicting sequence
GHFVDIR

SEQ ID NO: 57237 - protein, 7 aa, Artificial sequence
  Protein classification predicting sequence
AGLIAPD

SEQ ID NO: 57238 - protein, 11 aa, Artificial sequence
  Protein classification predicting sequence
AGLIAPDETTF

SEQ ID NO: 57239 - protein, 7 aa, Artificial sequence
  Protein classification predicting sequence
YIKGRKF

SEQ ID NO: 57240 - protein, 9 aa, Artificial sequence
  Protein classification predicting sequence
RAKTMKIEV

SEQ ID NO: 57241 - protein, 7 aa, Artificial sequence
  Protein classification predicting sequence
GKITDPR

SEQ ID NO: 57242 - protein, 7 aa, Artificial sequence
  Protein classification predicting sequence
TLYDKLW

SEQ ID NO: 57243 - protein, 6 aa, Artificial sequence
  Protein classification predicting sequence
GRPFAP

SEQ ID NO: 57244 - protein, 18 aa, Artificial sequence
  Protein classification predicting sequence
VSRLQVQTLDENCDDFGI

SEQ ID NO: 57245 - protein, 8 aa, Artificial sequence
  Protein classification predicting sequence
EFSGSTIR

SEQ ID NO: 57246 - protein, 17 aa, Artificial sequence
  Protein classification predicting sequence
GEHCASTSNRNFEGRQG

SEQ ID NO: 57247 - protein, 13 aa, Artificial sequence
  Protein classification predicting sequence
DCTLATVDHNIPT

SEQ ID NO: 57248 - protein, 16 aa, Artificial sequence
  Protein classification predicting sequence
TVVCGDSHTSTHGAFG

SEQ ID NO: 57249 - protein, 13 aa, Artificial sequence
  Protein classification predicting sequence
IGTAGGTGCVIEF

SEQ ID NO: 57250 - protein, 7 aa, Artificial sequence
  Protein classification predicting sequence
WREAGCS

SEQ ID NO: 57251 - protein, 7 aa, Artificial sequence
  Protein classification predicting sequence
NGLDDIG

SEQ ID NO: 57252 - protein, 27 aa, Artificial sequence
  Protein classification predicting sequence
LAFGIGTSEVEHVLATQTLKQGRAKTM

SEQ ID NO: 57253 - protein, 7 aa, Artificial sequence
  Protein classification predicting sequence
DTDQIIP

SEQ ID NO: 57254 - protein, 8 aa, Artificial sequence
  Protein classification predicting sequence
AKSFARIF

SEQ ID NO: 57255 - protein, 6 aa, Artificial sequence
  Protein classification predicting sequence
FVLNFP

SEQ ID NO: 57256 - protein, 14 aa, Artificial sequence
  Protein classification predicting sequence
VDELFALVKANPGI

SEQ ID NO: 57257 - protein, 5 aa, Artificial sequence
  Protein classification predicting sequence
FRRHC

SEQ ID NO: 57258 - protein, 12 aa, Artificial sequence
  Protein classification predicting sequence
NGLDSIGLTLQH

SEQ ID NO: 57259 - protein, 7 aa, Artificial sequence
  Protein classification predicting sequence
KPGDIIV

SEQ ID NO: 57260 - protein, 12 aa, Artificial sequence
  Protein classification predicting sequence
ITPGRYNLTKDP

SEQ ID NO: 57261 - protein, 7 aa, Artificial sequence
  Protein classification predicting sequence
RIFFRNA

SEQ ID NO: 57262 - protein, 6 aa, Artificial sequence
  Protein classification predicting sequence
TDAIIP

SEQ ID NO: 57263 - protein, 7 aa, Artificial sequence
  Protein classification predicting sequence
GDIIVAG

SEQ ID NO: 57264 - protein, 8 aa, Artificial sequence
  Protein classification predicting sequence
LTVDLAAQ

SEQ ID NO: 57265 - protein, 7 aa, Artificial sequence
  Protein classification predicting sequence
DIFYMNC

SEQ ID NO: 57266 - protein, 13 aa, Artificial sequence
  Protein classification predicting sequence
GDNFGCGSSREHA

SEQ ID NO: 57267 - protein, 8 aa, Artificial sequence
  Protein classification predicting sequence
DYGFRVVI

SEQ ID NO: 57268 - protein, 10 aa, Artificial sequence
  Protein classification predicting sequence
IAPSFADIFY

SEQ ID NO: 57269 - protein, 6 aa, Artificial sequence
  Protein classification predicting sequence
NCFKNG

SEQ ID NO: 57270 - protein, 8 aa, Artificial sequence
  Protein classification predicting sequence
HCLLNGLD

SEQ ID NO: 57271 - protein, 7 aa, Artificial sequence
  Protein classification predicting sequence
IIPKQFL

SEQ ID NO: 57272 - protein, 7 aa, Artificial sequence
  Protein classification predicting sequence
GFGKHLF

SEQ ID NO: 57273 - protein, 7 aa, Artificial sequence
  Protein classification predicting sequence
HLFNDWR

SEQ ID NO: 57274 - protein, 16 aa, Artificial sequence
  Protein classification predicting sequence
LLARENFGCGSSREHA

SEQ ID NO: 57275 - protein, 6 aa, Artificial sequence
  Protein classification predicting sequence
LFHDWR

SEQ ID NO: 57276 - protein, 7 aa, Artificial sequence
  Protein classification predicting sequence
NASILLT

SEQ ID NO: 57277 - protein, 13 aa, Artificial sequence
  Protein classification predicting sequence
NFGCGSSREHAVW

SEQ ID NO: 57278 - protein, 7 aa, Artificial sequence
  Protein classification predicting sequence
CLLNGLD

SEQ ID NO: 57279 - protein, 11 aa, Artificial sequence
  Protein classification predicting sequence
GSSREHAVWAL

SEQ ID NO: 57280 - protein, 6 aa, Artificial sequence
  Protein classification predicting sequence
DIFFNN

SEQ ID NO: 57281 - protein, 8 aa, Artificial sequence
  Protein classification predicting sequence
NSFNNQLL

SEQ ID NO: 57282 - protein, 11 aa, Artificial sequence
  Protein classification predicting sequence
CVISTSFADIF

SEQ ID NO: 57283 - protein, 7 aa, Artificial sequence
  Protein classification predicting sequence
IGLTLQH

SEQ ID NO: 57284 - protein, 23 aa, Artificial sequence
  Protein classification predicting sequence
GLVVPLDAANVDTDAIIPKQFLQ

SEQ ID NO: 57285 - protein, 9 aa, Artificial sequence
  Protein classification predicting sequence
GCGSSREHA

SEQ ID NO: 57286 - protein, 11 aa, Artificial sequence
  Protein classification predicting sequence
GSSREHAAWAL

SEQ ID NO: 57287 - protein, 11 aa, Artificial sequence
  Protein classification predicting sequence
IIAGSYSDIFY

SEQ ID NO: 57288 - protein, 6 aa, Artificial sequence
  Protein classification predicting sequence
DIFYNN

SEQ ID NO: 57289 - protein, 8 aa, Artificial sequence
  Protein classification predicting sequence
DTDQIIPK

SEQ ID NO: 57290 - protein, 10 aa, Artificial sequence
  Protein classification predicting sequence
LKTIKRTGLG

SEQ ID NO: 57291 - protein, 7 aa, Artificial sequence
  Protein classification predicting sequence
FDEWRYL

SEQ ID NO: 57292 - protein, 11 aa, Artificial sequence
  Protein classification predicting sequence
NFGCGSSREHA

SEQ ID NO: 57293 - protein, 8 aa, Artificial sequence
  Protein classification predicting sequence
IIPKQFLK

SEQ ID NO: 57294 - protein, 21 aa, Artificial sequence
  Protein classification predicting sequence
ILVAGDNFGCGSSREHAPWAL

SEQ ID NO: 57295 - protein, 7 aa, Artificial sequence
  Protein classification predicting sequence
DDIALTL

SEQ ID NO: 57296 - protein, 6 aa, Artificial sequence
  Protein classification predicting sequence
FKQHTG

SEQ ID NO: 57297 - protein, 13 aa, Artificial sequence
  Protein classification predicting sequence
NVDTDAIIPKQFL

SEQ ID NO: 57298 - protein, 20 aa, Artificial sequence
  Protein classification predicting sequence
LLARENFGCGSSREHAPWAL

SEQ ID NO: 57299 - protein, 15 aa, Artificial sequence
  Protein classification predicting sequence
NFGCGSSREHAPWAL

SEQ ID NO: 57300 - protein, 9 aa, Artificial sequence
  Protein classification predicting sequence
IAPSFADIF

SEQ ID NO: 57301 - protein, 7 aa, Artificial sequence
  Protein classification predicting sequence
NPDFVLN

SEQ ID NO: 57302 - protein, 7 aa, Artificial sequence
  Protein classification predicting sequence
ADIFFNN

SEQ ID NO: 57303 - protein, 17 aa, Artificial sequence
  Protein classification predicting sequence
FRKHCLLNGLDDIGLTL

SEQ ID NO: 57304 - protein, 7 aa, Artificial sequence
  Protein classification predicting sequence
VAGKNFG

SEQ ID NO: 57305 - protein, 9 aa, Artificial sequence
  Protein classification predicting sequence
RIFYRNAIN

SEQ ID NO: 57306 - protein, 13 aa, Artificial sequence
  Protein classification predicting sequence
NFGIGSSRESAAL

SEQ ID NO: 57307 - protein, 25 aa, Artificial sequence
  Protein classification predicting sequence
IIPKQFLKSIKRTGFGPNLFDEWRY

SEQ ID NO: 57308 - protein, 20 aa, Artificial sequence
  Protein classification predicting sequence
DTDMIIPKDYLKTIKRTGLG

SEQ ID NO: 57309 - protein, 8 aa, Artificial sequence
  Protein classification predicting sequence
LVKANPGI

SEQ ID NO: 57310 - protein, 21 aa, Artificial sequence
  Protein classification predicting sequence
VLVAGPDFGTGSSREHAVWAL

SEQ ID NO: 57311 - protein, 9 aa, Artificial sequence
  Protein classification predicting sequence
ILITGDNFG

SEQ ID NO: 57312 - protein, 7 aa, Artificial sequence
  Protein classification predicting sequence
WALADYG

SEQ ID NO: 57313 - protein, 15 aa, Artificial sequence
  Protein classification predicting sequence
KYGDNIDTDVIIPAR

SEQ ID NO: 57314 - protein, 18 aa, Artificial sequence
  Protein classification predicting sequence
GFGKHLFHDWRFLDDAGE

SEQ ID NO: 57315 - protein, 23 aa, Artificial sequence
  Protein classification predicting sequence
ASILLARENFGCGSSREHAPWAL

SEQ ID NO: 57316 - protein, 9 aa, Artificial sequence
  Protein classification predicting sequence
SFARIFYRN

SEQ ID NO: 57317 - protein, 9 aa, Artificial sequence
  Protein classification predicting sequence
NVDTDQIIP

SEQ ID NO: 57318 - protein, 7 aa, Artificial sequence
  Protein classification predicting sequence
GLVAPLD

SEQ ID NO: 57319 - protein, 27 aa, Artificial sequence
  Protein classification predicting sequence
PLDAANVDTDAIIPKQFLQKVTRTGFG

SEQ ID NO: 57320 - protein, 6 aa, Artificial sequence
  Protein classification predicting sequence
PRYQGA

SEQ ID NO: 57321 - protein, 21 aa, Artificial sequence
  Protein classification predicting sequence
ILLARENFGCGSSREHAPWAL

SEQ ID NO: 57322 - protein, 12 aa, Artificial sequence
  Protein classification predicting sequence
LLRTSENPEYKY

SEQ ID NO: 57323 - protein, 7 aa, Artificial sequence
  Protein classification predicting sequence
LAFVGYG

SEQ ID NO: 57324 - protein, 10 aa, Artificial sequence
  Protein classification predicting sequence
AFIKDPDGYW

SEQ ID NO: 57325 - protein, 7 aa, Artificial sequence
  Protein classification predicting sequence
PDGYWIE

SEQ ID NO: 57326 - protein, 14 aa, Artificial sequence
  Protein classification predicting sequence
VESFELDHTIVKAP

SEQ ID NO: 57327 - protein, 8 aa, Artificial sequence
  Protein classification predicting sequence
VNKFDIRF

SEQ ID NO: 57328 - protein, 10 aa, Artificial sequence
  Protein classification predicting sequence
QCGQAKLHDL

SEQ ID NO: 57329 - protein, 8 aa, Artificial sequence
  Protein classification predicting sequence
IDISPMGC

SEQ ID NO: 57330 - protein, 7 aa, Artificial sequence
  Protein classification predicting sequence
IHTLEHL

SEQ ID NO: 57331 - protein, 22 aa, Artificial sequence
  Protein classification predicting sequence
HFDIIDISPMGCQTGYYLVVSG

SEQ ID NO: 57332 - protein, 17 aa, Artificial sequence
  Protein classification predicting sequence
QCGQAKLHDLEGAKRLM

SEQ ID NO: 57333 - protein, 5 aa, Artificial sequence
  Protein classification predicting sequence
HTIEH

SEQ ID NO: 57334 - protein, 9 aa, Artificial sequence
  Protein classification predicting sequence
PMGCRTGFY

SEQ ID NO: 57335 - protein, 5 aa, Artificial sequence
  Protein classification predicting sequence
CGNYK

SEQ ID NO: 57336 - protein, 7 aa, Artificial sequence
  Protein classification predicting sequence
CGNYKDH

SEQ ID NO: 57337 - protein, 11 aa, Artificial sequence
  Protein classification predicting sequence
VFDLRFCIPNK

SEQ ID NO: 57338 - protein, 21 aa, Artificial sequence
  Protein classification predicting sequence
VEIIDISPMGCRTGFYMSLIG

SEQ ID NO: 57339 - protein, 6 aa, Artificial sequence
  Protein classification predicting sequence
HTIEHL

SEQ ID NO: 57340 - protein, 9 aa, Artificial sequence
  Protein classification predicting sequence
PMGCQTGFY

SEQ ID NO: 57341 - protein, 8 aa, Artificial sequence
  Protein classification predicting sequence
VESFELDH

SEQ ID NO: 57342 - protein, 6 aa, Artificial sequence
  Protein classification predicting sequence
HTLEHL

SEQ ID NO: 57343 - protein, 14 aa, Artificial sequence
  Protein classification predicting sequence
GIHTLEHLFAGFMR

SEQ ID NO: 57344 - protein, 22 aa, Artificial sequence
  Protein classification predicting sequence
DVLKVTDQRKIPELNEYQCGTY

SEQ ID NO: 57345 - protein, 7 aa, Artificial sequence
  Protein classification predicting sequence
VKAPYVR

SEQ ID NO: 57346 - protein, 15 aa, Artificial sequence
  Protein classification predicting sequence
HFDIIDISPMGCQTG

SEQ ID NO: 57347 - protein, 10 aa, Artificial sequence
  Protein classification predicting sequence
DISPMGCQTG

SEQ ID NO: 57348 - protein, 9 aa, Artificial sequence
  Protein classification predicting sequence
AGFMRDHLN

SEQ ID NO: 57349 - protein, 20 aa, Artificial sequence
  Protein classification predicting sequence
EIIDISPMGCRTGFYMSLIG

SEQ ID NO: 57350 - protein, 6 aa, Artificial sequence
  Protein classification predicting sequence
AWLASM

SEQ ID NO: 57351 - protein, 10 aa, Artificial sequence
  Protein classification predicting sequence
IPELNIYQCG

SEQ ID NO: 57352 - protein, 12 aa, Artificial sequence
  Protein classification predicting sequence
AKTMQTPKGDTI

SEQ ID NO: 57353 - protein, 6 aa, Artificial sequence
  Protein classification predicting sequence
VFDLRF

SEQ ID NO: 57354 - protein, 8 aa, Artificial sequence
  Protein classification predicting sequence
MHSLKEAQ

SEQ ID NO: 57355 - protein, 6 aa, Artificial sequence
  Protein classification predicting sequence
RFKQPN

SEQ ID NO: 57356 - protein, 5 aa, Artificial sequence
  Protein classification predicting sequence
HMDMP

SEQ ID NO: 57357 - protein, 9 aa, Artificial sequence
  Protein classification predicting sequence
TWEDVPGTT

SEQ ID NO: 57358 - protein, 7 aa, Artificial sequence
  Protein classification predicting sequence
GISDDPF

SEQ ID NO: 57359 - protein, 6 aa, Artificial sequence
  Protein classification predicting sequence
LDHTKV

SEQ ID NO: 57360 - protein, 7 aa, Artificial sequence
  Protein classification predicting sequence
RIDGMID

SEQ ID NO: 57361 - protein, 9 aa, Artificial sequence
  Protein classification predicting sequence
TGFHMIMWG

SEQ ID NO: 57362 - protein, 21 aa, Artificial sequence
  Protein classification predicting sequence
SCGNYKDHSLFSAKEWAKLIL

SEQ ID NO: 57363 - protein, 12 aa, Artificial sequence
  Protein classification predicting sequence
TAGLHTIEHLLA

SEQ ID NO: 57364 - protein, 8 aa, Artificial sequence
  Protein classification predicting sequence
KSSLEEIA

SEQ ID NO: 57365 - protein, 10 aa, Artificial sequence
  Protein classification predicting sequence
DHSLFSAKEW

SEQ ID NO: 57366 - protein, 10 aa, Artificial sequence
  Protein classification predicting sequence
RFKQPNKEHM

SEQ ID NO: 57367 - protein, 21 aa, Artificial sequence
  Protein classification predicting sequence
VPACNEVQCGWAASHSLEGAK

SEQ ID NO: 57368 - protein, 16 aa, Artificial sequence
  Protein classification predicting sequence
SPMGCQTGFYVSFINH

SEQ ID NO: 57369 - protein, 14 aa, Artificial sequence
  Protein classification predicting sequence
ITVFDLRFCVPNKE

SEQ ID NO: 57370 - protein, 10 aa, Artificial sequence
  Protein classification predicting sequence
APAVRVAKTM

SEQ ID NO: 57371 - protein, 11 aa, Artificial sequence
  Protein classification predicting sequence
YQCGTYQMHSL

SEQ ID NO: 57372 - protein, 9 aa, Artificial sequence
  Protein classification predicting sequence
KGIHTLEHL

SEQ ID NO: 57373 - protein, 20 aa, Artificial sequence
  Protein classification predicting sequence
KGIHTLEHLFAGFMRDHLNG

SEQ ID NO: 57374 - protein, 11 aa, Artificial sequence
  Protein classification predicting sequence
YQCGTYHMHSL

SEQ ID NO: 57375 - protein, 11 aa, Artificial sequence
  Protein classification predicting sequence
VNKNDELALPE

SEQ ID NO: 57376 - protein, 8 aa, Artificial sequence
  Protein classification predicting sequence
GIHTLEHL

SEQ ID NO: 57377 - protein, 9 aa, Artificial sequence
  Protein classification predicting sequence
AGFMRNHLN

SEQ ID NO: 57378 - protein, 23 aa, Artificial sequence
  Protein classification predicting sequence
VEIIDISPMGCRTGFYMSLIGTP

SEQ ID NO: 57379 - protein, 7 aa, Artificial sequence
  Protein classification predicting sequence
AAMEDVL

SEQ ID NO: 57380 - protein, 7 aa, Artificial sequence
  Protein classification predicting sequence
MHSLEEA

SEQ ID NO: 57381 - protein, 14 aa, Artificial sequence
  Protein classification predicting sequence
KMNVESFNLDHTKV

SEQ ID NO: 57382 - protein, 7 aa, Artificial sequence
  Protein classification predicting sequence
RFCQPNK

SEQ ID NO: 57383 - protein, 7 aa, Artificial sequence
  Protein classification predicting sequence
NEVQCGW

SEQ ID NO: 57384 - protein, 11 aa, Artificial sequence
  Protein classification predicting sequence
GDTITVFDLRF

SEQ ID NO: 57385 - protein, 6 aa, Artificial sequence
  Protein classification predicting sequence
AWKAAM

SEQ ID NO: 57386 - protein, 8 aa, Artificial sequence
  Protein classification predicting sequence
PNKEVMPE

SEQ ID NO: 57387 - protein, 27 aa, Artificial sequence
  Protein classification predicting sequence
DVLKVQDQNQIPELNVYQCGTYQMHSL

SEQ ID NO: 57388 - protein, 20 aa, Artificial sequence
  Protein classification predicting sequence
AKTMNTPHGDAITVFDLRFC

SEQ ID NO: 57389 - protein, 19 aa, Artificial sequence
  Protein classification predicting sequence
GIHTLEHLFAGFMRDHLNG

SEQ ID NO: 57390 - protein, 8 aa, Artificial sequence
  Protein classification predicting sequence
APAVRVAK

SEQ ID NO: 57391 - protein, 12 aa, Artificial sequence
  Protein classification predicting sequence
GDAITVFDLRFC

SEQ ID NO: 57392 - protein, 9 aa, Artificial sequence
  Protein classification predicting sequence
ITVFDLRFC

SEQ ID NO: 57393 - protein, 7 aa, Artificial sequence
  Protein classification predicting sequence
MEDVLKV

SEQ ID NO: 57394 - protein, 13 aa, Artificial sequence
  Protein classification predicting sequence
PLLDSFTVDHTRM

SEQ ID NO: 57395 - protein, 7 aa, Artificial sequence
  Protein classification predicting sequence
YDDVLNI

SEQ ID NO: 57396 - protein, 23 aa, Artificial sequence
  Protein classification predicting sequence
DKVVDLSPMGCQTGFYVSFINHD

SEQ ID NO: 57397 - protein, 13 aa, Artificial sequence
  Protein classification predicting sequence
IDCSPFGCRTGFH

SEQ ID NO: 57398 - protein, 10 aa, Artificial sequence
  Protein classification predicting sequence
IAKVIKSSLE

SEQ ID NO: 57399 - protein, 7 aa, Artificial sequence
  Protein classification predicting sequence
EWAKLIL

SEQ ID NO: 57400 - protein, 18 aa, Artificial sequence
  Protein classification predicting sequence
VKAPYVRLISEEFGPKGD

SEQ ID NO: 57401 - protein, 42 aa, Artificial sequence
  Protein classification predicting sequence
TAGLHTIEHLLAKLIRQRIDGMIDCSPFGCRTGFHLIMWGKH

SEQ ID NO: 57402 - protein, 6 aa, Artificial sequence
  Protein classification predicting sequence
DVPGTT

SEQ ID NO: 57403 - protein, 29 aa, Artificial sequence
  Protein classification predicting sequence
MEDVLKVESQNKIPELNEYQCGTAAMHSL

SEQ ID NO: 57404 - protein, 11 aa, Artificial sequence
  Protein classification predicting sequence
IPELNEYQCGT

SEQ ID NO: 57405 - protein, 17 aa, Artificial sequence
  Protein classification predicting sequence
IPELNEYQCGTAAMHSL

SEQ ID NO: 57406 - protein, 11 aa, Artificial sequence
  Protein classification predicting sequence
NDELALPESML

SEQ ID NO: 57407 - protein, 50 aa, Artificial sequence
  Protein classification predicting sequence
APAVRVAKTMQTPKGDTITVFDLRFTAPNKDILSEKGIHTLEHLYAGFMR

SEQ ID NO: 57408 - protein, 6 aa, Artificial sequence
  Protein classification predicting sequence
RDVRIN

SEQ ID NO: 57409 - protein, 11 aa, Artificial sequence
  Protein classification predicting sequence
NEELALPKEKL

SEQ ID NO: 57410 - protein, 11 aa, Artificial sequence
  Protein classification predicting sequence
PLLDSFTVDHT

SEQ ID NO: 57411 - protein, 7 aa, Artificial sequence
  Protein classification predicting sequence
NPRNFIN

SEQ ID NO: 57412 - protein, 7 aa, Artificial sequence
  Protein classification predicting sequence
CVSGMKK

SEQ ID NO: 57413 - protein, 10 aa, Artificial sequence
  Protein classification predicting sequence
PLPENQTDDA

SEQ ID NO: 57414 - protein, 10 aa, Artificial sequence
  Protein classification predicting sequence
VASYWHYHGG

SEQ ID NO: 57415 - protein, 6 aa, Artificial sequence
  Protein classification predicting sequence
DFYQCS

SEQ ID NO: 57416 - protein, 11 aa, Artificial sequence
  Protein classification predicting sequence
ALRVVDGSTFP

SEQ ID NO: 57417 - protein, 8 aa, Artificial sequence
  Protein classification predicting sequence
TPVERFVS

SEQ ID NO: 57418 - protein, 10 aa, Artificial sequence
  Protein classification predicting sequence
PQLLLLSGVG

SEQ ID NO: 57419 - protein, 6 aa, Artificial sequence
  Protein classification predicting sequence
FNYYSN

SEQ ID NO: 57420 - protein, 8 aa, Artificial sequence
  Protein classification predicting sequence
PKPVVAMV

SEQ ID NO: 57421 - protein, 8 aa, Artificial sequence
  Protein classification predicting sequence
GPKVGSFD

SEQ ID NO: 57422 - protein, 7 aa, Artificial sequence
  Protein classification predicting sequence
GQKKARE

SEQ ID NO: 57423 - protein, 8 aa, Artificial sequence
  Protein classification predicting sequence
LNADCDGQ

SEQ ID NO: 57424 - protein, 6 aa, Artificial sequence
  Protein classification predicting sequence
TMLFYM

SEQ ID NO: 57425 - protein, 25 aa, Artificial sequence
  Protein classification predicting sequence
NAIFGQTGPKVGSFDGGWGASYMAR

SEQ ID NO: 57426 - protein, 16 aa, Artificial sequence
  Protein classification predicting sequence
VGQKKAREIWFLCRQY

SEQ ID NO: 57427 - protein, 9 aa, Artificial sequence
  Protein classification predicting sequence
MGLVNTVVP

SEQ ID NO: 57428 - protein, 7 aa, Artificial sequence
  Protein classification predicting sequence
WCALDTL

SEQ ID NO: 57429 - protein, 11 aa, Artificial sequence
  Protein classification predicting sequence
SFCCHVHFFAS

SEQ ID NO: 57430 - protein, 11 aa, Artificial sequence
  Protein classification predicting sequence
WCALDTLIFPA

SEQ ID NO: 57431 - protein, 10 aa, Artificial sequence
  Protein classification predicting sequence
TAVVSIVTPD

SEQ ID NO: 57432 - protein, 5 aa, Artificial sequence
  Protein classification predicting sequence
AHFSF

SEQ ID NO: 57433 - protein, 6 aa, Artificial sequence
  Protein classification predicting sequence
TIDPHK

SEQ ID NO: 57434 - protein, 11 aa, Artificial sequence
  Protein classification predicting sequence
DAAFGGFVIPF

SEQ ID NO: 57435 - protein, 6 aa, Artificial sequence
  Protein classification predicting sequence
DPHKMG

SEQ ID NO: 57436 - protein, 6 aa, Artificial sequence
  Protein classification predicting sequence
LGSMCT

SEQ ID NO: 57437 - protein, 9 aa, Artificial sequence
  Protein classification predicting sequence
TITGTRPGA

SEQ ID NO: 57438 - protein, 6 aa, Artificial sequence
  Protein classification predicting sequence
SAHFSF

SEQ ID NO: 57439 - protein, 26 aa, Artificial sequence
  Protein classification predicting sequence
TIGIVGIAGTTGLGVVDDIPALSDLA

SEQ ID NO: 57440 - protein, 17 aa, Artificial sequence
  Protein classification predicting sequence
PLHVDAAFGGFVIPFAK

SEQ ID NO: 57441 - protein, 10 aa, Artificial sequence
  Protein classification predicting sequence
SAHRGYIRIV

SEQ ID NO: 57442 - protein, 14 aa, Artificial sequence
  Protein classification predicting sequence
VYDIPMALNRATAE

SEQ ID NO: 57443 - protein, 35 aa, Artificial sequence
  Protein classification predicting sequence
DMVSFAYAYKPIFEQHELFATGTTGLRIMEATGLV

SEQ ID NO: 57444 - protein, 7 aa, Artificial sequence
  Protein classification predicting sequence
IALIAHD

SEQ ID NO: 57445 - protein, 8 aa, Artificial sequence
  Protein classification predicting sequence
DPLTAQPH

SEQ ID NO: 57446 - protein, 8 aa, Artificial sequence
  Protein classification predicting sequence
SGPLGGDQ

SEQ ID NO: 57447 - protein, 12 aa, Artificial sequence
  Protein classification predicting sequence
RDPLTAQPHEPD

SEQ ID NO: 57448 - protein, 6 aa, Artificial sequence
  Protein classification predicting sequence
RLCDVY

SEQ ID NO: 57449 - protein, 7 aa, Artificial sequence
  Protein classification predicting sequence
SGPLGGD

SEQ ID NO: 57450 - protein, 12 aa, Artificial sequence
  Protein classification predicting sequence
DVYEIPLATNIG

SEQ ID NO: 57451 - protein, 9 aa, Artificial sequence
  Protein classification predicting sequence
VWNIPVATN

SEQ ID NO: 57452 - protein, 8 aa, Artificial sequence
  Protein classification predicting sequence
IPDYQRYL

SEQ ID NO: 57453 - protein, 8 aa, Artificial sequence
  Protein classification predicting sequence
LYATGTTG

SEQ ID NO: 57454 - protein, 12 aa, Artificial sequence
  Protein classification predicting sequence
VPHDPDVKALLR

SEQ ID NO: 57455 - protein, 24 aa, Artificial sequence
  Protein classification predicting sequence
VPHDPDVKALLRLATVWNIPVATN

SEQ ID NO: 57456 - protein, 18 aa, Artificial sequence
  Protein classification predicting sequence
MISGPMGGDQQLGALISE

SEQ ID NO: 57457 - protein, 6 aa, Artificial sequence
  Protein classification predicting sequence
GALISE

SEQ ID NO: 57458 - protein, 6 aa, Artificial sequence
  Protein classification predicting sequence
ATGTTG

SEQ ID NO: 57459 - protein, 8 aa, Artificial sequence
  Protein classification predicting sequence
GGDLQIGA

SEQ ID NO: 57460 - protein, 6 aa, Artificial sequence
  Protein classification predicting sequence
QPHEPD

SEQ ID NO: 57461 - protein, 17 aa, Artificial sequence
  Protein classification predicting sequence
RKHIALVAHDHCKQMLM

SEQ ID NO: 57462 - protein, 10 aa, Artificial sequence
  Protein classification predicting sequence
WVERHQPLLE

SEQ ID NO: 57463 - protein, 11 aa, Artificial sequence
  Protein classification predicting sequence
LYATGTTGNLI

SEQ ID NO: 57464 - protein, 22 aa, Artificial sequence
  Protein classification predicting sequence
TADFIIQSPHFNDAVDILIPDY

SEQ ID NO: 57465 - protein, 13 aa, Artificial sequence
  Protein classification predicting sequence
KSGPLGGDQQIGA

SEQ ID NO: 57466 - protein, 6 aa, Artificial sequence
  Protein classification predicting sequence
ALIAHD

SEQ ID NO: 57467 - protein, 20 aa, Artificial sequence
  Protein classification predicting sequence
FFWDPLNAVPHDPDVKALLR

SEQ ID NO: 57468 - protein, 5 aa, Artificial sequence
  Protein classification predicting sequence
HDHCK

SEQ ID NO: 57469 - protein, 21 aa, Artificial sequence
  Protein classification predicting sequence
IIDSADGLPMVVYNIPALSGV

SEQ ID NO: 57470 - protein, 9 aa, Artificial sequence
  Protein classification predicting sequence
ALKQTSGDL

SEQ ID NO: 57471 - protein, 15 aa, Artificial sequence
  Protein classification predicting sequence
LVLYNGYDEIFASGL

SEQ ID NO: 57472 - protein, 18 aa, Artificial sequence
  Protein classification predicting sequence
AGADGGIGSTYNIMGWRY

SEQ ID NO: 57473 - protein, 11 aa, Artificial sequence
  Protein classification predicting sequence
DGLYVGGSTGE

SEQ ID NO: 57474 - protein, 7 aa, Artificial sequence
  Protein classification predicting sequence
DFYLLER

SEQ ID NO: 57475 - protein, 9 aa, Artificial sequence
  Protein classification predicting sequence
GVDGAIGST

SEQ ID NO: 57476 - protein, 12 aa, Artificial sequence
  Protein classification predicting sequence
ELGKYATELGYD

SEQ ID NO: 57477 - protein, 15 aa, Artificial sequence
  Protein classification predicting sequence
AFPDKLILSGFDEML

SEQ ID NO: 57478 - protein, 6 aa, Artificial sequence
  Protein classification predicting sequence
IGSTYN

SEQ ID NO: 57479 - protein, 6 aa, Artificial sequence
  Protein classification predicting sequence
YNGYDE

SEQ ID NO: 57480 - protein, 11 aa, Artificial sequence
  Protein classification predicting sequence
GVMAALLTPFD

SEQ ID NO: 57481 - protein, 20 aa, Artificial sequence
  Protein classification predicting sequence
QGIDGLYVGGSTGEAFVQSL

SEQ ID NO: 57482 - protein, 17 aa, Artificial sequence
  Protein classification predicting sequence
EREQVLEIVAEEAKGKI

SEQ ID NO: 57483 - protein, 10 aa, Artificial sequence
  Protein classification predicting sequence
VSTAESQQLA

SEQ ID NO: 57484 - protein, 8 aa, Artificial sequence
  Protein classification predicting sequence
PVDEKYLP

SEQ ID NO: 57485 - protein, 9 aa, Artificial sequence
  Protein classification predicting sequence
LKALAQQLM

SEQ ID NO: 57486 - protein, 41 aa, Artificial sequence
  Protein classification predicting sequence
HPDLVLYNGYDEIFASGLLAGADGGIGSTYNIMGWRYQGIV

SEQ ID NO: 57487 - protein, 40 aa, Artificial sequence
  Protein classification predicting sequence
LQTECNKVIDLLIKTGVFRGLKTVLHYMDVVSVPLCRKPF

SEQ ID NO: 57488 - protein, 8 aa, Artificial sequence
  Protein classification predicting sequence
SAVTPFYY

SEQ ID NO: 57489 - protein, 8 aa, Artificial sequence
  Protein classification predicting sequence
WPVLGLPP

SEQ ID NO: 57490 - protein, 11 aa, Artificial sequence
  Protein classification predicting sequence
VCTLCSCYPWP

SEQ ID NO: 57491 - protein, 8 aa, Artificial sequence
  Protein classification predicting sequence
RRSSSFNT

SEQ ID NO: 57492 - protein, 9 aa, Artificial sequence
  Protein classification predicting sequence
TPFYPRSPY

SEQ ID NO: 57493 - protein, 12 aa, Artificial sequence
  Protein classification predicting sequence
AAKLYAYWIVVN

SEQ ID NO: 57494 - protein, 32 aa, Artificial sequence
  Protein classification predicting sequence
IFMGVGAMTDFGPLLANPRTLLLGAAAQFGIF

SEQ ID NO: 57495 - protein, 21 aa, Artificial sequence
  Protein classification predicting sequence
LPQAAAIGIIGGADGPTAIYL

SEQ ID NO: 57496 - protein, 13 aa, Artificial sequence
  Protein classification predicting sequence
ERKIRMVQLRTVS

SEQ ID NO: 57497 - protein, 10 aa, Artificial sequence
  Protein classification predicting sequence
SVDHMMKLVL

SEQ ID NO: 57498 - protein, 11 aa, Artificial sequence
  Protein classification predicting sequence
GVIELMPTSDG

SEQ ID NO: 57499 - protein, 14 aa, Artificial sequence
  Protein classification predicting sequence
LYGFKYVNGHPKNT

SEQ ID NO: 57500 - protein, 15 aa, Artificial sequence
  Protein classification predicting sequence
EMTILTALRTAATSA

SEQ ID NO: 57501 - protein, 12 aa, Artificial sequence
  Protein classification predicting sequence
RSDIFVEYPPQT

SEQ ID NO: 57502 - protein, 7 aa, Artificial sequence
  Protein classification predicting sequence
FDSVGFA

SEQ ID NO: 57503 - protein, 10 aa, Artificial sequence
  Protein classification predicting sequence
EDFSALRYVR

SEQ ID NO: 57504 - protein, 19 aa, Artificial sequence
  Protein classification predicting sequence
LDLLADPDEPRDLYGMLLR

SEQ ID NO: 57505 - protein, 10 aa, Artificial sequence
  Protein classification predicting sequence
AVEGADIITT

SEQ ID NO: 57506 - protein, 10 aa, Artificial sequence
  Protein classification predicting sequence
VGGDCPGKTE

SEQ ID NO: 57507 - protein, 13 aa, Artificial sequence
  Protein classification predicting sequence
PPQTRIEGEIQQL

SEQ ID NO: 57508 - protein, 11 aa, Artificial sequence
  Protein classification predicting sequence
QITLFDSVGFA

SEQ ID NO: 57509 - protein, 13 aa, Artificial sequence
  Protein classification predicting sequence
LDLLADPDEPRDL

SEQ ID NO: 57510 - protein, 7 aa, Artificial sequence
  Protein classification predicting sequence
VKVELSE

SEQ ID NO: 57511 - protein, 6 aa, Artificial sequence
  Protein classification predicting sequence
NTLLQG

SEQ ID NO: 57512 - protein, 7 aa, Artificial sequence
  Protein classification predicting sequence
LNNNITP

SEQ ID NO: 57513 - protein, 21 aa, Artificial sequence
  Protein classification predicting sequence
IEREINSVNDNPLIDVSRNKA

SEQ ID NO: 57514 - protein, 25 aa, Artificial sequence
  Protein classification predicting sequence
IGKLMFAQFSELVNDFYNNGLPSNL

SEQ ID NO: 57515 - protein, 9 aa, Artificial sequence
  Protein classification predicting sequence
YNNGLPSNL

SEQ ID NO: 57516 - protein, 10 aa, Artificial sequence
  Protein classification predicting sequence
DDPCSATYPL

SEQ ID NO: 57517 - protein, 7 aa, Artificial sequence
  Protein classification predicting sequence
NGESEKN

SEQ ID NO: 57518 - protein, 6 aa, Artificial sequence
  Protein classification predicting sequence
AIPNRI

SEQ ID NO: 57519 - protein, 6 aa, Artificial sequence
  Protein classification predicting sequence
GKIIDP

SEQ ID NO: 57520 - protein, 6 aa, Artificial sequence
  Protein classification predicting sequence
TVSQVA

SEQ ID NO: 57521 - protein, 10 aa, Artificial sequence
  Protein classification predicting sequence
DLRHLEENLK

SEQ ID NO: 57522 - protein, 13 aa, Artificial sequence
  Protein classification predicting sequence
GVNGELHPSRFCE

SEQ ID NO: 57523 - protein, 6 aa, Artificial sequence
  Protein classification predicting sequence
IIDPLL

SEQ ID NO: 57524 - protein, 8 aa, Artificial sequence
  Protein classification predicting sequence
WNGAPLPI

SEQ ID NO: 57525 - protein, 8 aa, Artificial sequence
  Protein classification predicting sequence
TESCHTLP

SEQ ID NO: 57526 - protein, 9 aa, Artificial sequence
  Protein classification predicting sequence
ASMVLFEAN

SEQ ID NO: 57527 - protein, 12 aa, Artificial sequence
  Protein classification predicting sequence
SEVLSAIFAEVM

SEQ ID NO: 57528 - protein, 16 aa, Artificial sequence
  Protein classification predicting sequence
IEREINSVNDNPLIDV

SEQ ID NO: 57529 - protein, 10 aa, Artificial sequence
  Protein classification predicting sequence
FAQFSELVND

SEQ ID NO: 57530 - protein, 8 aa, Artificial sequence
  Protein classification predicting sequence
RKTAEAVD

SEQ ID NO: 57531 - protein, 7 aa, Artificial sequence
  Protein classification predicting sequence
LKLMSST

SEQ ID NO: 57532 - protein, 6 aa, Artificial sequence
  Protein classification predicting sequence
NGELHP

SEQ ID NO: 57533 - protein, 8 aa, Artificial sequence
  Protein classification predicting sequence
DKVFTAMC

SEQ ID NO: 57534 - protein, 8 aa, Artificial sequence
  Protein classification predicting sequence
DPLNWEMA

SEQ ID NO: 57535 - protein, 13 aa, Artificial sequence
  Protein classification predicting sequence
GVKASSDWVMDSM

SEQ ID NO: 57536 - protein, 8 aa, Artificial sequence
  Protein classification predicting sequence
SAIFAEVM

SEQ ID NO: 57537 - protein, 10 aa, Artificial sequence
  Protein classification predicting sequence
EAVEILKLMS

SEQ ID NO: 57538 - protein, 11 aa, Artificial sequence
  Protein classification predicting sequence
GVNGELHPSRF

SEQ ID NO: 57539 - protein, 6 aa, Artificial sequence
  Protein classification predicting sequence
YADDPC

SEQ ID NO: 57540 - protein, 8 aa, Artificial sequence
  Protein classification predicting sequence
ECRSYPLY

SEQ ID NO: 57541 - protein, 12 aa, Artificial sequence
  Protein classification predicting sequence
ECRSYPLYKFVR

SEQ ID NO: 57542 - protein, 8 aa, Artificial sequence
  Protein classification predicting sequence
GSHLDEVK

SEQ ID NO: 57543 - protein, 7 aa, Artificial sequence
  Protein classification predicting sequence
ASIVLFE

SEQ ID NO: 57544 - protein, 7 aa, Artificial sequence
  Protein classification predicting sequence
GKPEFTD

SEQ ID NO: 57545 - protein, 7 aa, Artificial sequence
  Protein classification predicting sequence
LNAGIFG

SEQ ID NO: 57546 - protein, 7 aa, Artificial sequence
  Protein classification predicting sequence
RAAMLVR

SEQ ID NO: 57547 - protein, 7 aa, Artificial sequence
  Protein classification predicting sequence
EAFKLAG

SEQ ID NO: 57548 - protein, 8 aa, Artificial sequence
  Protein classification predicting sequence
EVMNGKPE

SEQ ID NO: 57549 - protein, 9 aa, Artificial sequence
  Protein classification predicting sequence
AAAIMEHIL

SEQ ID NO: 57550 - protein, 7 aa, Artificial sequence
  Protein classification predicting sequence
TKSIERE

SEQ ID NO: 57551 - protein, 7 aa, Artificial sequence
  Protein classification predicting sequence
NSVNDNP

SEQ ID NO: 57552 - protein, 7 aa, Artificial sequence
  Protein classification predicting sequence
EIAMASY

SEQ ID NO: 57553 - protein, 9 aa, Artificial sequence
  Protein classification predicting sequence
SELQYLANP

SEQ ID NO: 57554 - protein, 8 aa, Artificial sequence
  Protein classification predicting sequence
DLRHLEEN

SEQ ID NO: 57555 - protein, 7 aa, Artificial sequence
  Protein classification predicting sequence
FVREELG

SEQ ID NO: 57556 - protein, 7 aa, Artificial sequence
  Protein classification predicting sequence
CLKEWNG

SEQ ID NO: 57557 - protein, 22 aa, Artificial sequence
  Protein classification predicting sequence
DPLQKPKQDRYALRTSPQWLGP

SEQ ID NO: 57558 - protein, 23 aa, Artificial sequence
  Protein classification predicting sequence
HVQSAEQHNQDVNSLGLISSRKT

SEQ ID NO: 57559 - protein, 6 aa, Artificial sequence
  Protein classification predicting sequence
FEDELK

SEQ ID NO: 57560 - protein, 7 aa, Artificial sequence
  Protein classification predicting sequence
CRSYPLY

SEQ ID NO: 57561 - protein, 11 aa, Artificial sequence
  Protein classification predicting sequence
GSHLDEVKKMV

SEQ ID NO: 57562 - protein, 6 aa, Artificial sequence
  Protein classification predicting sequence
VLFEAN

SEQ ID NO: 57563 - protein, 7 aa, Artificial sequence
  Protein classification predicting sequence
TSIFQKI

SEQ ID NO: 57564 - protein, 6 aa, Artificial sequence
  Protein classification predicting sequence
SPGEEF

SEQ ID NO: 57565 - protein, 10 aa, Artificial sequence
  Protein classification predicting sequence
LQKELIRFLN

SEQ ID NO: 57566 - protein, 9 aa, Artificial sequence
  Protein classification predicting sequence
LEAITKLLN

SEQ ID NO: 57567 - protein, 21 aa, Artificial sequence
  Protein classification predicting sequence
NITPCLPLRGTITASGDLVPL

SEQ ID NO: 57568 - protein, 9 aa, Artificial sequence
  Protein classification predicting sequence
YIAGLLTGR

SEQ ID NO: 57569 - protein, 18 aa, Artificial sequence
  Protein classification predicting sequence
IEREINSVNDNPLIDVSR

SEQ ID NO: 57570 - protein, 5 aa, Artificial sequence
  Protein classification predicting sequence
HTLPH

SEQ ID NO: 57571 - protein, 15 aa, Artificial sequence
  Protein classification predicting sequence
SVNDNPLIDVSRNKA

SEQ ID NO: 57572 - protein, 6 aa, Artificial sequence
  Protein classification predicting sequence
YRKPVV

SEQ ID NO: 57573 - protein, 13 aa, Artificial sequence
  Protein classification predicting sequence
LPHTATRAAMLVR

SEQ ID NO: 57574 - protein, 7 aa, Artificial sequence
  Protein classification predicting sequence
LAVLSEV

SEQ ID NO: 57575 - protein, 7 aa, Artificial sequence
  Protein classification predicting sequence
VAKRTLT

SEQ ID NO: 57576 - protein, 6 aa, Artificial sequence
  Protein classification predicting sequence
YIDDPC

SEQ ID NO: 57577 - protein, 6 aa, Artificial sequence
  Protein classification predicting sequence
FEEELK

SEQ ID NO: 57578 - protein, 51 aa, Artificial sequence
  Protein classification predicting sequence
HTLPHSATRAAMLVRINTLLQGYSGIRFEILEAITKLINSNITPCLPLRGT

SEQ ID NO: 57579 - protein, 25 aa, Artificial sequence
  Protein classification predicting sequence
LTHKLKHHPGQIEAAAIMEHILDGS

SEQ ID NO: 57580 - protein, 16 aa, Artificial sequence
  Protein classification predicting sequence
HGGNFQGTPIGVSMDN

SEQ ID NO: 57581 - protein, 8 aa, Artificial sequence
  Protein classification predicting sequence
LGGETLTI

SEQ ID NO: 57582 - protein, 8 aa, Artificial sequence
  Protein classification predicting sequence
VELSESAR

SEQ ID NO: 57583 - protein, 24 aa, Artificial sequence
  Protein classification predicting sequence
FFELQPKEGLALVNGTAVGSGLAS

SEQ ID NO: 57584 - protein, 8 aa, Artificial sequence
  Protein classification predicting sequence
KAAKKLHE

SEQ ID NO: 57585 - protein, 10 aa, Artificial sequence
  Protein classification predicting sequence
RLALASIGKL

SEQ ID NO: 57586 - protein, 7 aa, Artificial sequence
  Protein classification predicting sequence
LMSSTFL

SEQ ID NO: 57587 - protein, 5 aa, Artificial sequence
  Protein classification predicting sequence
DPLNW

SEQ ID NO: 57588 - protein, 24 aa, Artificial sequence
  Protein classification predicting sequence
SMNKGTDSYGVTTGFGATSHRRTK

SEQ ID NO: 57589 - protein, 21 aa, Artificial sequence
  Protein classification predicting sequence
KGTDSYGVTTGFGATSHRRTK

SEQ ID NO: 57590 - protein, 6 aa, Artificial sequence
  Protein classification predicting sequence
FGNGTE

SEQ ID NO: 57591 - protein, 11 aa, Artificial sequence
  Protein classification predicting sequence
YNNGLPSNLTA

SEQ ID NO: 57592 - protein, 11 aa, Artificial sequence
  Protein classification predicting sequence
RNPSLDYGFKG

SEQ ID NO: 57593 - protein, 6 aa, Artificial sequence
  Protein classification predicting sequence
DPLNWG

SEQ ID NO: 57594 - protein, 9 aa, Artificial sequence
  Protein classification predicting sequence
ELIRFLNAG

SEQ ID NO: 57595 - protein, 8 aa, Artificial sequence
  Protein classification predicting sequence
LTISQVAA

SEQ ID NO: 57596 - protein, 8 aa, Artificial sequence
  Protein classification predicting sequence
VKASSDWV

SEQ ID NO: 57597 - protein, 7 aa, Artificial sequence
  Protein classification predicting sequence
YVKAAQK

SEQ ID NO: 57598 - protein, 8 aa, Artificial sequence
  Protein classification predicting sequence
ILKLMSST

SEQ ID NO: 57599 - protein, 12 aa, Artificial sequence
  Protein classification predicting sequence
LVALCQAIDLRH

SEQ ID NO: 57600 - protein, 7 aa, Artificial sequence
  Protein classification predicting sequence
REYVFAY

SEQ ID NO: 57601 - protein, 10 aa, Artificial sequence
  Protein classification predicting sequence
GSHLDEVKRM

SEQ ID NO: 57602 - protein, 20 aa, Artificial sequence
  Protein classification predicting sequence
GTDSYGVTTGFGATSHRRTK

SEQ ID NO: 57603 - protein, 12 aa, Artificial sequence
  Protein classification predicting sequence
EIAMASYCSELQ

SEQ ID NO: 57604 - protein, 8 aa, Artificial sequence
  Protein classification predicting sequence
QVAKRTLT

SEQ ID NO: 57605 - protein, 8 aa, Artificial sequence
  Protein classification predicting sequence
QKLRQVLV

SEQ ID NO: 57606 - protein, 22 aa, Artificial sequence
  Protein classification predicting sequence
GFFELQPKEGLALVNGTAVGSG

SEQ ID NO: 57607 - protein, 9 aa, Artificial sequence
  Protein classification predicting sequence
MDNTRLAIA

SEQ ID NO: 57608 - protein, 22 aa, Artificial sequence
  Protein classification predicting sequence
PSLDYGFKGAEIAMASYCSELQ

SEQ ID NO: 57609 - protein, 7 aa, Artificial sequence
  Protein classification predicting sequence
LVALCQA

SEQ ID NO: 57610 - protein, 6 aa, Artificial sequence
  Protein classification predicting sequence
LHPSRF

SEQ ID NO: 57611 - protein, 24 aa, Artificial sequence
  Protein classification predicting sequence
KPKQDRYALRTSPQWLGPQIEVIR

SEQ ID NO: 57612 - protein, 10 aa, Artificial sequence
  Protein classification predicting sequence
SMDNTRLAIA

SEQ ID NO: 57613 - protein, 7 aa, Artificial sequence
  Protein classification predicting sequence
EYRKPVV

SEQ ID NO: 57614 - protein, 13 aa, Artificial sequence
  Protein classification predicting sequence
SMNKGTDSYGVTT

SEQ ID NO: 57615 - protein, 31 aa, Artificial sequence
  Protein classification predicting sequence
ATRAAMLVRINTLLQGYSGIRFEILEAITKL

SEQ ID NO: 57616 - protein, 5 aa, Artificial sequence
  Protein classification predicting sequence
SDWVM

SEQ ID NO: 57617 - protein, 23 aa, Artificial sequence
  Protein classification predicting sequence
NTLLQGYSGIRFEILEAITKLLN

SEQ ID NO: 57618 - protein, 14 aa, Artificial sequence
  Protein classification predicting sequence
IEREINSVNDNPLI

SEQ ID NO: 57619 - protein, 10 aa, Artificial sequence
  Protein classification predicting sequence
IGKLMFAQFS

SEQ ID NO: 57620 - protein, 8 aa, Artificial sequence
  Protein classification predicting sequence
SPGEECDK

SEQ ID NO: 57621 - protein, 16 aa, Artificial sequence
  Protein classification predicting sequence
ARAGVKASSDWVMDSM

SEQ ID NO: 57622 - protein, 20 aa, Artificial sequence
  Protein classification predicting sequence
GKPEFTDHLTHKLKHHPGQI

SEQ ID NO: 57623 - protein, 12 aa, Artificial sequence
  Protein classification predicting sequence
AAAIMEHILDGS

SEQ ID NO: 57624 - protein, 15 aa, Artificial sequence
  Protein classification predicting sequence
KLHEIDPLQKPKQDR

SEQ ID NO: 57625 - protein, 11 aa, Artificial sequence
  Protein classification predicting sequence
ALRTSPQWLGP

SEQ ID NO: 57626 - protein, 7 aa, Artificial sequence
  Protein classification predicting sequence
QVAAIAA

SEQ ID NO: 57627 - protein, 6 aa, Artificial sequence
  Protein classification predicting sequence
ASMVLF

SEQ ID NO: 57628 - protein, 15 aa, Artificial sequence
  Protein classification predicting sequence
HVQSAEQHNQDVNSL

SEQ ID NO: 57629 - protein, 6 aa, Artificial sequence
  Protein classification predicting sequence
SIFQKI

SEQ ID NO: 57630 - protein, 12 aa, Artificial sequence
  Protein classification predicting sequence
NRIKECRSYPLY

SEQ ID NO: 57631 - protein, 6 aa, Artificial sequence
  Protein classification predicting sequence
EVKKMV

SEQ ID NO: 57632 - protein, 8 aa, Artificial sequence
  Protein classification predicting sequence
VELSEEAR

SEQ ID NO: 57633 - protein, 6 aa, Artificial sequence
  Protein classification predicting sequence
LNAGIF

SEQ ID NO: 57634 - protein, 15 aa, Artificial sequence
  Protein classification predicting sequence
ELVNDFYNNGLPSNL

SEQ ID NO: 57635 - protein, 10 aa, Artificial sequence
  Protein classification predicting sequence
AMASYCSELQ

SEQ ID NO: 57636 - protein, 15 aa, Artificial sequence
  Protein classification predicting sequence
QHNQDVNSLGLISSR

SEQ ID NO: 57637 - protein, 8 aa, Artificial sequence
  Protein classification predicting sequence
ILKLMSTT

SEQ ID NO: 57638 - protein, 7 aa, Artificial sequence
  Protein classification predicting sequence
PLMQKLR

SEQ ID NO: 57639 - protein, 19 aa, Artificial sequence
  Protein classification predicting sequence
FAYIDDPCSATYPLMQKLR

SEQ ID NO: 57640 - protein, 12 aa, Artificial sequence
  Protein classification predicting sequence
LTGEKVRSPGEE

SEQ ID NO: 57641 - protein, 6 aa, Artificial sequence
  Protein classification predicting sequence
PLSYIA

SEQ ID NO: 57642 - protein, 9 aa, Artificial sequence
  Protein classification predicting sequence
GKPEFTDHL

SEQ ID NO: 57643 - protein, 6 aa, Artificial sequence
  Protein classification predicting sequence
DPLQKP

SEQ ID NO: 57644 - protein, 8 aa, Artificial sequence
  Protein classification predicting sequence
TSPQWLGP

SEQ ID NO: 57645 - protein, 15 aa, Artificial sequence
  Protein classification predicting sequence
GGNFQGTPIGVSMDN

SEQ ID NO: 57646 - protein, 6 aa, Artificial sequence
  Protein classification predicting sequence
YCSELQ

SEQ ID NO: 57647 - protein, 14 aa, Artificial sequence
  Protein classification predicting sequence
EQHNQDVNSLGLIS

SEQ ID NO: 57648 - protein, 7 aa, Artificial sequence
  Protein classification predicting sequence
DLRHLEE

SEQ ID NO: 57649 - protein, 6 aa, Artificial sequence
  Protein classification predicting sequence
KIGAFE

SEQ ID NO: 57650 - protein, 8 aa, Artificial sequence
  Protein classification predicting sequence
TRAAMLVR

SEQ ID NO: 57651 - protein, 6 aa, Artificial sequence
  Protein classification predicting sequence
YNNGLP

SEQ ID NO: 57652 - protein, 13 aa, Artificial sequence
  Protein classification predicting sequence
NLTAGRNPSLDYG

SEQ ID NO: 57653 - protein, 10 aa, Artificial sequence
  Protein classification predicting sequence
VKNTVSQVAK

SEQ ID NO: 57654 - protein, 5 aa, Artificial sequence
  Protein classification predicting sequence
WNGAP

SEQ ID NO: 57655 - protein, 6 aa, Artificial sequence
  Protein classification predicting sequence
LGPQIE

SEQ ID NO: 57656 - protein, 6 aa, Artificial sequence
  Protein classification predicting sequence
DNPLID

SEQ ID NO: 57657 - protein, 6 aa, Artificial sequence
  Protein classification predicting sequence
HGGNFQ

SEQ ID NO: 57658 - protein, 8 aa, Artificial sequence
  Protein classification predicting sequence
FLNAGIFG

SEQ ID NO: 57659 - protein, 6 aa, Artificial sequence
  Protein classification predicting sequence
GSSYMK

SEQ ID NO: 57660 - protein, 20 aa, Artificial sequence
  Protein classification predicting sequence
HGGNFQGTPIGVSMDNTRLA

SEQ ID NO: 57661 - protein, 6 aa, Artificial sequence
  Protein classification predicting sequence
LTIGQV

SEQ ID NO: 57662 - protein, 16 aa, Artificial sequence
  Protein classification predicting sequence
NTLLQGYSGIRFEILE

SEQ ID NO: 57663 - protein, 6 aa, Artificial sequence
  Protein classification predicting sequence
DDPCSA

SEQ ID NO: 57664 - protein, 9 aa, Artificial sequence
  Protein classification predicting sequence
SQVAKRTLT

SEQ ID NO: 57665 - protein, 7 aa, Artificial sequence
  Protein classification predicting sequence
YNNGLPS

SEQ ID NO: 57666 - protein, 6 aa, Artificial sequence
  Protein classification predicting sequence
IPNRIK

SEQ ID NO: 57667 - protein, 11 aa, Artificial sequence
  Protein classification predicting sequence
GSHLDEVKRMV

SEQ ID NO: 57668 - protein, 10 aa, Artificial sequence
  Protein classification predicting sequence
NTLLQGYSGI

SEQ ID NO: 57669 - protein, 20 aa, Artificial sequence
  Protein classification predicting sequence
FAQFSELVNDFYNNGLPSNL

SEQ ID NO: 57670 - protein, 19 aa, Artificial sequence
  Protein classification predicting sequence
HVQSAEQHNQDVNSLGLIS

SEQ ID NO: 57671 - protein, 17 aa, Artificial sequence
  Protein classification predicting sequence
ALRTSPQWLGPQIEVIR

SEQ ID NO: 57672 - protein, 9 aa, Artificial sequence
  Protein classification predicting sequence
TYPLMQKLR

SEQ ID NO: 57673 - protein, 13 aa, Artificial sequence
  Protein classification predicting sequence
TYPLMQKLRQVLV

SEQ ID NO: 57674 - protein, 7 aa, Artificial sequence
  Protein classification predicting sequence
EAAAIME

SEQ ID NO: 57675 - protein, 6 aa, Artificial sequence
  Protein classification predicting sequence
LDGSSY

SEQ ID NO: 57676 - protein, 12 aa, Artificial sequence
  Protein classification predicting sequence
IEREINSVNDNP

SEQ ID NO: 57677 - protein, 15 aa, Artificial sequence
  Protein classification predicting sequence
IGKLMFAQFSELVND

SEQ ID NO: 57678 - protein, 6 aa, Artificial sequence
  Protein classification predicting sequence
GLPSNL

SEQ ID NO: 57679 - protein, 7 aa, Artificial sequence
  Protein classification predicting sequence
YLANPVT

SEQ ID NO: 57680 - protein, 17 aa, Artificial sequence
  Protein classification predicting sequence
HVQSAEQHNQDVNSLGL

SEQ ID NO: 57681 - protein, 6 aa, Artificial sequence
  Protein classification predicting sequence
VSQVAK

SEQ ID NO: 57682 - protein, 7 aa, Artificial sequence
  Protein classification predicting sequence
AQVASIA

SEQ ID NO: 57683 - protein, 7 aa, Artificial sequence
  Protein classification predicting sequence
ASMVLFE

SEQ ID NO: 57684 - protein, 8 aa, Artificial sequence
  Protein classification predicting sequence
VKNTVSQV

SEQ ID NO: 57685 - protein, 6 aa, Artificial sequence
  Protein classification predicting sequence
PLRGTI

SEQ ID NO: 57686 - protein, 7 aa, Artificial sequence
  Protein classification predicting sequence
SPQWLGP

SEQ ID NO: 57687 - protein, 7 aa, Artificial sequence
  Protein classification predicting sequence
DNPLIDV

SEQ ID NO: 57688 - protein, 6 aa, Artificial sequence
  Protein classification predicting sequence
LANPVT

SEQ ID NO: 57689 - protein, 10 aa, Artificial sequence
  Protein classification predicting sequence
LANPVTTHVQ

SEQ ID NO: 57690 - protein, 6 aa, Artificial sequence
  Protein classification predicting sequence
QAIDLR

SEQ ID NO: 57691 - protein, 7 aa, Artificial sequence
  Protein classification predicting sequence
LNAKEAF

SEQ ID NO: 57692 - protein, 7 aa, Artificial sequence
  Protein classification predicting sequence
VGSGLAS

SEQ ID NO: 57693 - protein, 19 aa, Artificial sequence
  Protein classification predicting sequence
EIAMASYCSELQYLANPVT

SEQ ID NO: 57694 - protein, 17 aa, Artificial sequence
  Protein classification predicting sequence
ALCQAIDLRHLEENLKN

SEQ ID NO: 57695 - protein, 7 aa, Artificial sequence
  Protein classification predicting sequence
WNGAPLP

SEQ ID NO: 57696 - protein, 30 aa, Artificial sequence
  Protein classification predicting sequence
GKPEFTDHLTHKLKHHPGQIEAAAIMEHIL

SEQ ID NO: 57697 - protein, 8 aa, Artificial sequence
  Protein classification predicting sequence
TGFGGSAD

SEQ ID NO: 57698 - protein, 5 aa, Artificial sequence
  Protein classification predicting sequence
HPGQI

SEQ ID NO: 57699 - protein, 6 aa, Artificial sequence
  Protein classification predicting sequence
HVQSAE

SEQ ID NO: 57700 - protein, 6 aa, Artificial sequence
  Protein classification predicting sequence
TGRPNS

SEQ ID NO: 57701 - protein, 6 aa, Artificial sequence
  Protein classification predicting sequence
YPLMQK

SEQ ID NO: 57702 - protein, 8 aa, Artificial sequence
  Protein classification predicting sequence
KIHRATVT

SEQ ID NO: 57703 - protein, 6 aa, Artificial sequence
  Protein classification predicting sequence
NYVGSI

SEQ ID NO: 57704 - protein, 7 aa, Artificial sequence
  Protein classification predicting sequence
LNGAAAR

SEQ ID NO: 57705 - protein, 10 aa, Artificial sequence
  Protein classification predicting sequence
QEPKIAVLDD

SEQ ID NO: 57706 - protein, 11 aa, Artificial sequence
  Protein classification predicting sequence
NLNYVGSITID

SEQ ID NO: 57707 - protein, 6 aa, Artificial sequence
  Protein classification predicting sequence
TIDEDL

SEQ ID NO: 57708 - protein, 7 aa, Artificial sequence
  Protein classification predicting sequence
GERGSGV

SEQ ID NO: 57709 - protein, 11 aa, Artificial sequence
  Protein classification predicting sequence
CLNGAAARLVQ

SEQ ID NO: 57710 - protein, 12 aa, Artificial sequence
  Protein classification predicting sequence
NEKVQIVNNNNG

SEQ ID NO: 57711 - protein, 9 aa, Artificial sequence
  Protein classification predicting sequence
ICLNGAAAR

SEQ ID NO: 57712 - protein, 14 aa, Artificial sequence
  Protein classification predicting sequence
NEKVQIVNNNNGAR

SEQ ID NO: 57713 - protein, 8 aa, Artificial sequence
  Protein classification predicting sequence
HEPTVVFV

SEQ ID NO: 57714 - protein, 7 aa, Artificial sequence
  Protein classification predicting sequence
RFSTYAI

SEQ ID NO: 57715 - protein, 8 aa, Artificial sequence
  Protein classification predicting sequence
VTQADLDY

SEQ ID NO: 57716 - protein, 8 aa, Artificial sequence
  Protein classification predicting sequence
YEGSIAID

SEQ ID NO: 57717 - protein, 7 aa, Artificial sequence
  Protein classification predicting sequence
RFTTYAI

SEQ ID NO: 57718 - protein, 9 aa, Artificial sequence
  Protein classification predicting sequence
NGAAARLVQ

SEQ ID NO: 57719 - protein, 7 aa, Artificial sequence
  Protein classification predicting sequence
YEGSITI

SEQ ID NO: 57720 - protein, 6 aa, Artificial sequence
  Protein classification predicting sequence
VNNNNG

SEQ ID NO: 57721 - protein, 6 aa, Artificial sequence
  Protein classification predicting sequence
NGAAAR

SEQ ID NO: 57722 - protein, 7 aa, Artificial sequence
  Protein classification predicting sequence
IWNVTNG

SEQ ID NO: 57723 - protein, 6 aa, Artificial sequence
  Protein classification predicting sequence
TIDADL

SEQ ID NO: 57724 - protein, 8 aa, Artificial sequence
  Protein classification predicting sequence
EPKVVLVD

SEQ ID NO: 57725 - protein, 6 aa, Artificial sequence
  Protein classification predicting sequence
NNGERF

SEQ ID NO: 57726 - protein, 6 aa, Artificial sequence
  Protein classification predicting sequence
YVGSIT

SEQ ID NO: 57727 - protein, 14 aa, Artificial sequence
  Protein classification predicting sequence
ERGSRIISVNGAAA

SEQ ID NO: 57728 - protein, 6 aa, Artificial sequence
  Protein classification predicting sequence
PKVAYF

SEQ ID NO: 57729 - protein, 9 aa, Artificial sequence
  Protein classification predicting sequence
NNGARFETY

SEQ ID NO: 57730 - protein, 6 aa, Artificial sequence
  Protein classification predicting sequence
ICLNGA

SEQ ID NO: 57731 - protein, 6 aa, Artificial sequence
  Protein classification predicting sequence
VIIASF

SEQ ID NO: 57732 - protein, 8 aa, Artificial sequence
  Protein classification predicting sequence
YEGSCAID

SEQ ID NO: 57733 - protein, 8 aa, Artificial sequence
  Protein classification predicting sequence
ISVNGAAA

SEQ ID NO: 57734 - protein, 22 aa, Artificial sequence
  Protein classification predicting sequence
GVIGINGAAAHLVHPGDLVILI

SEQ ID NO: 57735 - protein, 6 aa, Artificial sequence
  Protein classification predicting sequence
GERGSG

SEQ ID NO: 57736 - protein, 7 aa, Artificial sequence
  Protein classification predicting sequence
KSKIHRA

SEQ ID NO: 57737 - protein, 8 aa, Artificial sequence
  Protein classification predicting sequence
CLNGAAAR

SEQ ID NO: 57738 - protein, 23 aa, Artificial sequence
  Protein classification predicting sequence
RFSTYAIAAERGSRIISVNGAAA

SEQ ID NO: 57739 - protein, 6 aa, Artificial sequence
  Protein classification predicting sequence
NNNGAR

SEQ ID NO: 57740 - protein, 7 aa, Artificial sequence
  Protein classification predicting sequence
IYNVDNG

SEQ ID NO: 57741 - protein, 11 aa, Artificial sequence
  Protein classification predicting sequence
ISLNGAAARRA

SEQ ID NO: 57742 - protein, 6 aa, Artificial sequence
  Protein classification predicting sequence
LIICTY

SEQ ID NO: 57743 - protein, 8 aa, Artificial sequence
  Protein classification predicting sequence
VGDKLIIC

SEQ ID NO: 57744 - protein, 13 aa, Artificial sequence
  Protein classification predicting sequence
VGDIVIIASFVTM

SEQ ID NO: 57745 - protein, 9 aa, Artificial sequence
  Protein classification predicting sequence
DEEARTWRP

SEQ ID NO: 57746 - protein, 34 aa, Artificial sequence
  Protein classification predicting sequence
AVDILPNEKVAIVNNNNGARFETYVIAGERGSGK

SEQ ID NO: 57747 - protein, 15 aa, Artificial sequence
  Protein classification predicting sequence
CLNGAASRLVEVGDV

SEQ ID NO: 57748 - protein, 10 aa, Artificial sequence
  Protein classification predicting sequence
IIMTYAQLNE

SEQ ID NO: 57749 - protein, 6 aa, Artificial sequence
  Protein classification predicting sequence
EKENTI

SEQ ID NO: 57750 - protein, 6 aa, Artificial sequence
  Protein classification predicting sequence
LKSKIH

SEQ ID NO: 57751 - protein, 13 aa, Artificial sequence
  Protein classification predicting sequence
LSLLKAKIHRATV

SEQ ID NO: 57752 - protein, 9 aa, Artificial sequence
  Protein classification predicting sequence
HTNHSIPTQ

SEQ ID NO: 57753 - protein, 11 aa, Artificial sequence
  Protein classification predicting sequence
TKLNAFDNALL

SEQ ID NO: 57754 - protein, 16 aa, Artificial sequence
  Protein classification predicting sequence
AEGGTKLNAFDNALLK

SEQ ID NO: 57755 - protein, 20 aa, Artificial sequence
  Protein classification predicting sequence
GIGNVNLVKLSSVIPAHIEW

SEQ ID NO: 57756 - protein, 6 aa, Artificial sequence
  Protein classification predicting sequence
PGDFNL

SEQ ID NO: 57757 - protein, 11 aa, Artificial sequence
  Protein classification predicting sequence
FIGTYWGAVST

SEQ ID NO: 57758 - protein, 9 aa, Artificial sequence
  Protein classification predicting sequence
VTFTVGGLS

SEQ ID NO: 57759 - protein, 9 aa, Artificial sequence
  Protein classification predicting sequence
EIVESADAY

SEQ ID NO: 57760 - protein, 16 aa, Artificial sequence
  Protein classification predicting sequence
HKDDTSKELLEWGSRV

SEQ ID NO: 57761 - protein, 7 aa, Artificial sequence
  Protein classification predicting sequence
LPEGCGY

SEQ ID NO: 57762 - protein, 22 aa, Artificial sequence
  Protein classification predicting sequence
YEFQMQYGSIGWSVGATLGYAQ

SEQ ID NO: 57763 - protein, 27 aa, Artificial sequence
  Protein classification predicting sequence
IIFLINNGGYTIEVEIHDGPYNVIKNW

SEQ ID NO: 57764 - protein, 8 aa, Artificial sequence
  Protein classification predicting sequence
GAYSENLP

SEQ ID NO: 57765 - protein, 13 aa, Artificial sequence
  Protein classification predicting sequence
CNELNAGYAADGY

SEQ ID NO: 57766 - protein, 7 aa, Artificial sequence
  Protein classification predicting sequence
NAIAGAY

SEQ ID NO: 57767 - protein, 7 aa, Artificial sequence
  Protein classification predicting sequence
IIFLINN

SEQ ID NO: 57768 - protein, 9 aa, Artificial sequence
  Protein classification predicting sequence
NNDGYTIER

SEQ ID NO: 57769 - protein, 11 aa, Artificial sequence
  Protein classification predicting sequence
LLLHHTLGNGD

SEQ ID NO: 57770 - protein, 10 aa, Artificial sequence
  Protein classification predicting sequence
ISQVLWGSIG

SEQ ID NO: 57771 - protein, 8 aa, Artificial sequence
  Protein classification predicting sequence
GDGSLQLT

SEQ ID NO: 57772 - protein, 8 aa, Artificial sequence
  Protein classification predicting sequence
QEISTMIR

SEQ ID NO: 57773 - protein, 9 aa, Artificial sequence
  Protein classification predicting sequence
YAEHVGVLH

SEQ ID NO: 57774 - protein, 17 aa, Artificial sequence
  Protein classification predicting sequence
SQAKQLLLHHTLGNGDF

SEQ ID NO: 57775 - protein, 15 aa, Artificial sequence
  Protein classification predicting sequence
QRPVYLGLPANLVDL

SEQ ID NO: 57776 - protein, 13 aa, Artificial sequence
  Protein classification predicting sequence
TETGTSAFGINQT

SEQ ID NO: 57777 - protein, 12 aa, Artificial sequence
  Protein classification predicting sequence
GDGSLQLTVQEI

SEQ ID NO: 57778 - protein, 8 aa, Artificial sequence
  Protein classification predicting sequence
IRWGLKPY

SEQ ID NO: 57779 - protein, 7 aa, Artificial sequence
  Protein classification predicting sequence
TGDSWFN

SEQ ID NO: 57780 - protein, 10 aa, Artificial sequence
  Protein classification predicting sequence
GDGSFQVTAQ

SEQ ID NO: 57781 - protein, 11 aa, Artificial sequence
  Protein classification predicting sequence
GYTIEVEIHDG

SEQ ID NO: 57782 - protein, 7 aa, Artificial sequence
  Protein classification predicting sequence
IHDGPYN

SEQ ID NO: 57783 - protein, 11 aa, Artificial sequence
  Protein classification predicting sequence
GKKVKGGAYPL

SEQ ID NO: 57784 - protein, 10 aa, Artificial sequence
  Protein classification predicting sequence
IKEFTKGITI

SEQ ID NO: 57785 - protein, 7 aa, Artificial sequence
  Protein classification predicting sequence
SYNYIHG

SEQ ID NO: 57786 - protein, 8 aa, Artificial sequence
  Protein classification predicting sequence
DQKARSQI

SEQ ID NO: 57787 - protein, 10 aa, Artificial sequence
  Protein classification predicting sequence
GDGWNAEWDA

SEQ ID NO: 57788 - protein, 12 aa, Artificial sequence
  Protein classification predicting sequence
ATTGWATQNGGT

SEQ ID NO: 57789 - protein, 7 aa, Artificial sequence
  Protein classification predicting sequence
KNAAELK

SEQ ID NO: 57790 - protein, 8 aa, Artificial sequence
  Protein classification predicting sequence
ENPWDPEP

SEQ ID NO: 57791 - protein, 17 aa, Artificial sequence
  Protein classification predicting sequence
RPKQHHDGALDVKNGAN

SEQ ID NO: 57792 - protein, 12 aa, Artificial sequence
  Protein classification predicting sequence
HEKNNLIGSSDS

SEQ ID NO: 57793 - protein, 8 aa, Artificial sequence
  Protein classification predicting sequence
GQVHLYNN

SEQ ID NO: 57794 - protein, 7 aa, Artificial sequence
  Protein classification predicting sequence
IGWTPPY

SEQ ID NO: 57795 - protein, 11 aa, Artificial sequence
  Protein classification predicting sequence
LFMHNMCIRPT

SEQ ID NO: 57796 - protein, 13 aa, Artificial sequence
  Protein classification predicting sequence
FFGLSGTGKTTLS

SEQ ID NO: 57797 - protein, 7 aa, Artificial sequence
  Protein classification predicting sequence
LIGDDEH

SEQ ID NO: 57798 - protein, 9 aa, Artificial sequence
  Protein classification predicting sequence
NIEGGCYAK

SEQ ID NO: 57799 - protein, 7 aa, Artificial sequence
  Protein classification predicting sequence
EGGCYAK

SEQ ID NO: 57800 - protein, 6 aa, Artificial sequence
  Protein classification predicting sequence
HPTKYA

SEQ ID NO: 57801 - protein, 6 aa, Artificial sequence
  Protein classification predicting sequence
LVNTGW

SEQ ID NO: 57802 - protein, 13 aa, Artificial sequence
  Protein classification predicting sequence
GALATLSGAKTGR

SEQ ID NO: 57803 - protein, 9 aa, Artificial sequence
  Protein classification predicting sequence
LIGDDEHCW

SEQ ID NO: 57804 - protein, 10 aa, Artificial sequence
  Protein classification predicting sequence
NIEGGCYAKC

SEQ ID NO: 57805 - protein, 12 aa, Artificial sequence
  Protein classification predicting sequence
YTRKIIDAIHSG

SEQ ID NO: 57806 - protein, 7 aa, Artificial sequence
  Protein classification predicting sequence
EMVILGT

SEQ ID NO: 57807 - protein, 12 aa, Artificial sequence
  Protein classification predicting sequence
ILSLHSGCNMGK

SEQ ID NO: 57808 - protein, 18 aa, Artificial sequence
  Protein classification predicting sequence
GDVALFFGLSGTGKTTLS

SEQ ID NO: 57809 - protein, 11 aa, Artificial sequence
  Protein classification predicting sequence
LIGDDEHCWSD

SEQ ID NO: 57810 - protein, 14 aa, Artificial sequence
  Protein classification predicting sequence
LWWGKGSPNIEMDE

SEQ ID NO: 57811 - protein, 6 aa, Artificial sequence
  Protein classification predicting sequence
YGVGKR

SEQ ID NO: 57812 - protein, 6 aa, Artificial sequence
  Protein classification predicting sequence
IVIRSA

SEQ ID NO: 57813 - protein, 12 aa, Artificial sequence
  Protein classification predicting sequence
QFHPESILTTHG

SEQ ID NO: 57814 - protein, 8 aa, Artificial sequence
  Protein classification predicting sequence
MHNRLRMI

SEQ ID NO: 57815 - protein, 6 aa, Artificial sequence
  Protein classification predicting sequence
GWMHNR

SEQ ID NO: 57816 - protein, 8 aa, Artificial sequence
  Protein classification predicting sequence
RMITASFL

SEQ ID NO: 57817 - protein, 45 aa, Artificial sequence
  Protein classification predicting sequence
FHFKDFNRAFGFMTRVALQAEKLDHHPEWFNVYNKVHITLSTHEC

SEQ ID NO: 57818 - protein, 7 aa, Artificial sequence
  Protein classification predicting sequence
HHPEWFN

SEQ ID NO: 57819 - protein, 11 aa, Artificial sequence
  Protein classification predicting sequence
QLLPNLRAVGW

SEQ ID NO: 57820 - protein, 33 aa, Artificial sequence
  Protein classification predicting sequence
FHFKDFNRAFGFMTRVALQAEKLDHHPEWFNVY

SEQ ID NO: 57821 - protein, 9 aa, Artificial sequence
  Protein classification predicting sequence
KVHITLSTH

SEQ ID NO: 57822 - protein, 15 aa, Artificial sequence
  Protein classification predicting sequence
GLSERDINLASFIEQ

SEQ ID NO: 57823 - protein, 13 aa, Artificial sequence
  Protein classification predicting sequence
LYKSVPTRLLSRA

SEQ ID NO: 57824 - protein, 19 aa, Artificial sequence
  Protein classification predicting sequence
EVEQVKGVTYSLESFLGPR

SEQ ID NO: 57825 - protein, 10 aa, Artificial sequence
  Protein classification predicting sequence
EQRDTVPIPK

SEQ ID NO: 57826 - protein, 10 aa, Artificial sequence
  Protein classification predicting sequence
LLGKKCFALR

SEQ ID NO: 57827 - protein, 12 aa, Artificial sequence
  Protein classification predicting sequence
AAAFPSACGKTN

SEQ ID NO: 57828 - protein, 15 aa, Artificial sequence
  Protein classification predicting sequence
AAAFPSACGKTNLAM

SEQ ID NO: 57829 - protein, 19 aa, Artificial sequence
  Protein classification predicting sequence
WESPEGVPIEGIIFGGRRP

SEQ ID NO: 57830 - protein, 30 aa, Artificial sequence
  Protein classification predicting sequence
GVPLVYEALSWQHGVFVGAAMRSEATAAAE

SEQ ID NO: 57831 - protein, 6 aa, Artificial sequence
  Protein classification predicting sequence
PLVYEA

SEQ ID NO: 57832 - protein, 7 aa, Artificial sequence
  Protein classification predicting sequence
ISKEFWE

SEQ ID NO: 57833 - protein, 6 aa, Artificial sequence
  Protein classification predicting sequence
RFPGCM

SEQ ID NO: 57834 - protein, 18 aa, Artificial sequence
  Protein classification predicting sequence
LRAINPENGFFGVAPGTS

SEQ ID NO: 57835 - protein, 10 aa, Artificial sequence
  Protein classification predicting sequence
GFFGVAPGTS

SEQ ID NO: 57836 - protein, 7 aa, Artificial sequence
  Protein classification predicting sequence
GENSRVL

SEQ ID NO: 57837 - protein, 18 aa, Artificial sequence
  Protein classification predicting sequence
PAAKLPKIFHVNWFRKDK

SEQ ID NO: 57838 - protein, 7 aa, Artificial sequence
  Protein classification predicting sequence
KCLHSVG

SEQ ID NO: 57839 - protein, 7 aa, Artificial sequence
  Protein classification predicting sequence
YLEDQVN

SEQ ID NO: 57840 - protein, 7 aa, Artificial sequence
  Protein classification predicting sequence
CDGSEEE

SEQ ID NO: 57841 - protein, 8 aa, Artificial sequence
  Protein classification predicting sequence
TDPRDVAR

SEQ ID NO: 57842 - protein, 6 aa, Artificial sequence
  Protein classification predicting sequence
MRIMTR

SEQ ID NO: 57843 - protein, 8 aa, Artificial sequence
  Protein classification predicting sequence
IIFGGRRP

SEQ ID NO: 57844 - protein, 6 aa, Artificial sequence
  Protein classification predicting sequence
PFFGYN

SEQ ID NO: 57845 - protein, 5 aa, Artificial sequence
  Protein classification predicting sequence
WPGFG

SEQ ID NO: 57846 - protein, 5 aa, Artificial sequence
  Protein classification predicting sequence
NCWLA

SEQ ID NO: 57847 - protein, 6 aa, Artificial sequence
  Protein classification predicting sequence
GRTMYV

SEQ ID NO: 57848 - protein, 6 aa, Artificial sequence
  Protein classification predicting sequence
PFSMGP

SEQ ID NO: 57849 - protein, 7 aa, Artificial sequence
  Protein classification predicting sequence
GDDIAWM

SEQ ID NO: 57850 - protein, 6 aa, Artificial sequence
  Protein classification predicting sequence
HGVFVG

SEQ ID NO: 57851 - protein, 8 aa, Artificial sequence
  Protein classification predicting sequence
IFHVNWFR

SEQ ID NO: 57852 - protein, 18 aa, Artificial sequence
  Protein classification predicting sequence
FTNVAETSDGGVYWEGID

SEQ ID NO: 57853 - protein, 6 aa, Artificial sequence
  Protein classification predicting sequence
QCPSID

SEQ ID NO: 57854 - protein, 8 aa, Artificial sequence
  Protein classification predicting sequence
DPFAMLPF

SEQ ID NO: 57855 - protein, 11 aa, Artificial sequence
  Protein classification predicting sequence
FGLSGTGKTTL

SEQ ID NO: 57856 - protein, 18 aa, Artificial sequence
  Protein classification predicting sequence
TGQHTGRSPKDKFVVRDA

SEQ ID NO: 57857 - protein, 14 aa, Artificial sequence
  Protein classification predicting sequence
AWHSLFIRNLLIRP

SEQ ID NO: 57858 - protein, 16 aa, Artificial sequence
  Protein classification predicting sequence
FFGLSGTGKTTLSADP

SEQ ID NO: 57859 - protein, 10 aa, Artificial sequence
  Protein classification predicting sequence
FNFEGGCYAK

SEQ ID NO: 57860 - protein, 7 aa, Artificial sequence
  Protein classification predicting sequence
GHPKTII

SEQ ID NO: 57861 - protein, 11 aa, Artificial sequence
  Protein classification predicting sequence
QAMYHFLSGYT

SEQ ID NO: 57862 - protein, 6 aa, Artificial sequence
  Protein classification predicting sequence
KNDNKP

SEQ ID NO: 57863 - protein, 5 aa, Artificial sequence
  Protein classification predicting sequence
FCGAN

SEQ ID NO: 57864 - protein, 6 aa, Artificial sequence
  Protein classification predicting sequence
MHCSAN

SEQ ID NO: 57865 - protein, 9 aa, Artificial sequence
  Protein classification predicting sequence
LIGDDEHGW

SEQ ID NO: 57866 - protein, 16 aa, Artificial sequence
  Protein classification predicting sequence
VIFLSADAFGVLPPVS

SEQ ID NO: 57867 - protein, 24 aa, Artificial sequence
  Protein classification predicting sequence
FLSGFTAKLAGTERGITEPTPTFS

SEQ ID NO: 57868 - protein, 9 aa, Artificial sequence
  Protein classification predicting sequence
YAEVLVKRM

SEQ ID NO: 57869 - protein, 9 aa, Artificial sequence
  Protein classification predicting sequence
SFGSGYGGN

SEQ ID NO: 57870 - protein, 6 aa, Artificial sequence
  Protein classification predicting sequence
AEHMLI

SEQ ID NO: 57871 - protein, 6 aa, Artificial sequence
  Protein classification predicting sequence
PTIPGW

SEQ ID NO: 57872 - protein, 6 aa, Artificial sequence
  Protein classification predicting sequence
GDDIAW

SEQ ID NO: 57873 - protein, 10 aa, Artificial sequence
  Protein classification predicting sequence
PKIFHVNWFR

SEQ ID NO: 57874 - protein, 15 aa, Artificial sequence
  Protein classification predicting sequence
FFGLSGTGKTTLSAD

SEQ ID NO: 57875 - protein, 7 aa, Artificial sequence
  Protein classification predicting sequence
GSVLENV

SEQ ID NO: 57876 - protein, 14 aa, Artificial sequence
  Protein classification predicting sequence
DSSITENTRCAYPI

SEQ ID NO: 57877 - protein, 6 aa, Artificial sequence
  Protein classification predicting sequence
NTGWTG

SEQ ID NO: 57878 - protein, 15 aa, Artificial sequence
  Protein classification predicting sequence
GGKRCPLKYTRAILD

SEQ ID NO: 57879 - protein, 7 aa, Artificial sequence
  Protein classification predicting sequence
HSVGAPL

SEQ ID NO: 57880 - protein, 23 aa, Artificial sequence
  Protein classification predicting sequence
GSGYGGNALLGKKCFALRIASTM

SEQ ID NO: 57881 - protein, 6 aa, Artificial sequence
  Protein classification predicting sequence
LLGKKC

SEQ ID NO: 57882 - protein, 7 aa, Artificial sequence
  Protein classification predicting sequence
VPLVYEA

SEQ ID NO: 57883 - protein, 9 aa, Artificial sequence
  Protein classification predicting sequence
RVLKWIVDR

SEQ ID NO: 57884 - protein, 7 aa, Artificial sequence
  Protein classification predicting sequence
FTIVSAP

SEQ ID NO: 57885 - protein, 6 aa, Artificial sequence
  Protein classification predicting sequence
TELGAV

SEQ ID NO: 57886 - protein, 10 aa, Artificial sequence
  Protein classification predicting sequence
YTGRSPKDKF

SEQ ID NO: 57887 - protein, 13 aa, Artificial sequence
  Protein classification predicting sequence
TWYGGEMKKGMFS

SEQ ID NO: 57888 - protein, 10 aa, Artificial sequence
  Protein classification predicting sequence
LIGDDEHGWD

SEQ ID NO: 57889 - protein, 10 aa, Artificial sequence
  Protein classification predicting sequence
TENTRVSYPI

SEQ ID NO: 57890 - protein, 13 aa, Artificial sequence
  Protein classification predicting sequence
TENTRVSYPIYHI

SEQ ID NO: 57891 - protein, 10 aa, Artificial sequence
  Protein classification predicting sequence
GKRISIKDTR

SEQ ID NO: 57892 - protein, 8 aa, Artificial sequence
  Protein classification predicting sequence
PTELPGVD

SEQ ID NO: 57893 - protein, 8 aa, Artificial sequence
  Protein classification predicting sequence
ILDPRDTY

SEQ ID NO: 57894 - protein, 6 aa, Artificial sequence
  Protein classification predicting sequence
FVIISF

SEQ ID NO: 57895 - protein, 10 aa, Artificial sequence
  Protein classification predicting sequence
LIGDDEHGWS

SEQ ID NO: 57896 - protein, 6 aa, Artificial sequence
  Protein classification predicting sequence
EKEPQI

SEQ ID NO: 57897 - protein, 8 aa, Artificial sequence
  Protein classification predicting sequence
TENTRAAY

SEQ ID NO: 57898 - protein, 17 aa, Artificial sequence
  Protein classification predicting sequence
PSVAGHPNTIIFLTADA

SEQ ID NO: 57899 - protein, 7 aa, Artificial sequence
  Protein classification predicting sequence
IFLTADA

SEQ ID NO: 57900 - protein, 10 aa, Artificial sequence
  Protein classification predicting sequence
RYAEMLGEKI

SEQ ID NO: 57901 - protein, 10 aa, Artificial sequence
  Protein classification predicting sequence
TSKLAGTERG

SEQ ID NO: 57902 - protein, 8 aa, Artificial sequence
  Protein classification predicting sequence
KLAGTERG

SEQ ID NO: 57903 - protein, 8 aa, Artificial sequence
  Protein classification predicting sequence
VNQPISEE

SEQ ID NO: 57904 - protein, 6 aa, Artificial sequence
  Protein classification predicting sequence
QLFIRP

SEQ ID NO: 57905 - protein, 6 aa, Artificial sequence
  Protein classification predicting sequence
VSFEKR

SEQ ID NO: 57906 - protein, 13 aa, Artificial sequence
  Protein classification predicting sequence
LIGGTEYAGEMKK

SEQ ID NO: 57907 - protein, 25 aa, Artificial sequence
  Protein classification predicting sequence
LIGGTEYAGEMKKSIFSIMNFLLPE

SEQ ID NO: 57908 - protein, 10 aa, Artificial sequence
  Protein classification predicting sequence
SMHCSANVGE

SEQ ID NO: 57909 - protein, 20 aa, Artificial sequence
  Protein classification predicting sequence
GDVALFFGLSGTGKTTLSAD

SEQ ID NO: 57910 - protein, 10 aa, Artificial sequence
  Protein classification predicting sequence
TENTRAAYPI

SEQ ID NO: 57911 - protein, 7 aa, Artificial sequence
  Protein classification predicting sequence
MYHFLSG

SEQ ID NO: 57912 - protein, 7 aa, Artificial sequence
  Protein classification predicting sequence
HVPGVPD

SEQ ID NO: 57913 - protein, 7 aa, Artificial sequence
  Protein classification predicting sequence
KRLFVVD

SEQ ID NO: 57914 - protein, 7 aa, Artificial sequence
  Protein classification predicting sequence
RDALLEN

SEQ ID NO: 57915 - protein, 7 aa, Artificial sequence
  Protein classification predicting sequence
YAGEMKK

SEQ ID NO: 57916 - protein, 6 aa, Artificial sequence
  Protein classification predicting sequence
FSTCFG

SEQ ID NO: 57917 - protein, 9 aa, Artificial sequence
  Protein classification predicting sequence
LVNTGWTGG

SEQ ID NO: 57918 - protein, 6 aa, Artificial sequence
  Protein classification predicting sequence
DFDDGS

SEQ ID NO: 57919 - protein, 15 aa, Artificial sequence
  Protein classification predicting sequence
QAMYHFLSGYTAKVA

SEQ ID NO: 57920 - protein, 18 aa, Artificial sequence
  Protein classification predicting sequence
QAMYHFLSGYTAKVAGTE

SEQ ID NO: 57921 - protein, 6 aa, Artificial sequence
  Protein classification predicting sequence
EYDRLC

SEQ ID NO: 57922 - protein, 10 aa, Artificial sequence
  Protein classification predicting sequence
SDPSDVARVE

SEQ ID NO: 57923 - protein, 8 aa, Artificial sequence
  Protein classification predicting sequence
VPCVHSVG

SEQ ID NO: 57924 - protein, 7 aa, Artificial sequence
  Protein classification predicting sequence
FGVAPGT

SEQ ID NO: 57925 - protein, 6 aa, Artificial sequence
  Protein classification predicting sequence
GEMKKG

SEQ ID NO: 57926 - protein, 17 aa, Artificial sequence
  Protein classification predicting sequence
DVALFFGLSGTGKTTLS

SEQ ID NO: 57927 - protein, 11 aa, Artificial sequence
  Protein classification predicting sequence
LIGDDEHGWDD

SEQ ID NO: 57928 - protein, 9 aa, Artificial sequence
  Protein classification predicting sequence
IFLSADAFG

SEQ ID NO: 57929 - protein, 10 aa, Artificial sequence
  Protein classification predicting sequence
SKLSKEQAMY

SEQ ID NO: 57930 - protein, 13 aa, Artificial sequence
  Protein classification predicting sequence
FLSGYTAKVAGTE

SEQ ID NO: 57931 - protein, 7 aa, Artificial sequence
  Protein classification predicting sequence
TFSACFG

SEQ ID NO: 57932 - protein, 7 aa, Artificial sequence
  Protein classification predicting sequence
EKEPEIF

SEQ ID NO: 57933 - protein, 9 aa, Artificial sequence
  Protein classification predicting sequence
GVLPPVSKL

SEQ ID NO: 57934 - protein, 6 aa, Artificial sequence
  Protein classification predicting sequence
FLSLHP

SEQ ID NO: 57935 - protein, 12 aa, Artificial sequence
  Protein classification predicting sequence
LKYTRAILDAIH

SEQ ID NO: 57936 - protein, 9 aa, Artificial sequence
  Protein classification predicting sequence
FPSACGKTN

SEQ ID NO: 57937 - protein, 8 aa, Artificial sequence
  Protein classification predicting sequence
SPEGVPIE

SEQ ID NO: 57938 - protein, 19 aa, Artificial sequence
  Protein classification predicting sequence
GKLRHDPFAMLPFCGYNMA

SEQ ID NO: 57939 - protein, 5 aa, Artificial sequence
  Protein classification predicting sequence
DPFAM

SEQ ID NO: 57940 - protein, 6 aa, Artificial sequence
  Protein classification predicting sequence
YFDHWL

SEQ ID NO: 57941 - protein, 28 aa, Artificial sequence
  Protein classification predicting sequence
MRIVHFQDDSSVMSFGSGYGGNALLGKK

SEQ ID NO: 57942 - protein, 15 aa, Artificial sequence
  Protein classification predicting sequence
SFGSGYGGNALLGKK

SEQ ID NO: 57943 - protein, 6 aa, Artificial sequence
  Protein classification predicting sequence
IFGGRR

SEQ ID NO: 57944 - protein, 7 aa, Artificial sequence
  Protein classification predicting sequence
AAHPNSR

SEQ ID NO: 57945 - protein, 7 aa, Artificial sequence
  Protein classification predicting sequence
PISAFIF

SEQ ID NO: 57946 - protein, 11 aa, Artificial sequence
  Protein classification predicting sequence
DPFAMLPFCGY

SEQ ID NO: 57947 - protein, 7 aa, Artificial sequence
  Protein classification predicting sequence
AGPTNNW

SEQ ID NO: 57948 - protein, 8 aa, Artificial sequence
  Protein classification predicting sequence
GWLAEHML

SEQ ID NO: 57949 - protein, 6 aa, Artificial sequence
  Protein classification predicting sequence
GFFGVA

SEQ ID NO: 57950 - protein, 10 aa, Artificial sequence
  Protein classification predicting sequence
HPNCFLVRSS

SEQ ID NO: 57951 - protein, 17 aa, Artificial sequence
  Protein classification predicting sequence
TDSPYVVCSMKIMTRMG

SEQ ID NO: 57952 - protein, 6 aa, Artificial sequence
  Protein classification predicting sequence
VNWFRK

SEQ ID NO: 57953 - protein, 14 aa, Artificial sequence
  Protein classification predicting sequence
DGDVWWEGMTDTPP

SEQ ID NO: 57954 - protein, 6 aa, Artificial sequence
  Protein classification predicting sequence
PSDVAR

SEQ ID NO: 57955 - protein, 7 aa, Artificial sequence
  Protein classification predicting sequence
AGPTNHW

SEQ ID NO: 57956 - protein, 7 aa, Artificial sequence
  Protein classification predicting sequence
TDSEYVV

SEQ ID NO: 57957 - protein, 7 aa, Artificial sequence
  Protein classification predicting sequence
DVAWPCN

SEQ ID NO: 57958 - protein, 20 aa, Artificial sequence
  Protein classification predicting sequence
AAAFPSACGKTNLAMLQPTI

SEQ ID NO: 57959 - protein, 13 aa, Artificial sequence
  Protein classification predicting sequence
NPENGFFGVAPGT

SEQ ID NO: 57960 - protein, 9 aa, Artificial sequence
  Protein classification predicting sequence
GFFGVAPGT

SEQ ID NO: 57961 - protein, 7 aa, Artificial sequence
  Protein classification predicting sequence
FTNVALT

SEQ ID NO: 57962 - protein, 7 aa, Artificial sequence
  Protein classification predicting sequence
QTAAAEG

SEQ ID NO: 57963 - protein, 7 aa, Artificial sequence
  Protein classification predicting sequence
FLWPGFG

SEQ ID NO: 57964 - protein, 13 aa, Artificial sequence
  Protein classification predicting sequence
NSRVLKWIVDRIE

SEQ ID NO: 57965 - protein, 9 aa, Artificial sequence
  Protein classification predicting sequence
EDAGPTNNW

SEQ ID NO: 57966 - protein, 7 aa, Artificial sequence
  Protein classification predicting sequence
LYAVNPE

SEQ ID NO: 57967 - protein, 6 aa, Artificial sequence
  Protein classification predicting sequence
RTFICS

SEQ ID NO: 57968 - protein, 7 aa, Artificial sequence
  Protein classification predicting sequence
VPFCMGP

SEQ ID NO: 57969 - protein, 4 aa, Artificial sequence
  Protein classification predicting sequence
WPCN

SEQ ID NO: 57970 - protein, 10 aa, Artificial sequence
  Protein classification predicting sequence
QPTIPGWRAE

SEQ ID NO: 57971 - protein, 7 aa, Artificial sequence
  Protein classification predicting sequence
MEPGNTL

SEQ ID NO: 57972 - protein, 6 aa, Artificial sequence
  Protein classification predicting sequence
TNVALT

SEQ ID NO: 57973 - protein, 7 aa, Artificial sequence
  Protein classification predicting sequence
TGRSPKD

SEQ ID NO: 57974 - protein, 9 aa, Artificial sequence
  Protein classification predicting sequence
EGGCYAKCI

SEQ ID NO: 57975 - protein, 6 aa, Artificial sequence
  Protein classification predicting sequence
GVLPPV

SEQ ID NO: 57976 - protein, 15 aa, Artificial sequence
  Protein classification predicting sequence
STFSTCFGAPFFPRP

SEQ ID NO: 57977 - protein, 12 aa, Artificial sequence
  Protein classification predicting sequence
LVNTGWTGGAYG

SEQ ID NO: 57978 - protein, 7 aa, Artificial sequence
  Protein classification predicting sequence
LSAEAEP

SEQ ID NO: 57979 - protein, 7 aa, Artificial sequence
  Protein classification predicting sequence
TFSTCFG

SEQ ID NO: 57980 - protein, 10 aa, Artificial sequence
  Protein classification predicting sequence
TFSTCFGAPF

SEQ ID NO: 57981 - protein, 15 aa, Artificial sequence
  Protein classification predicting sequence
TFSTCFGAPFMPRHP

SEQ ID NO: 57982 - protein, 8 aa, Artificial sequence
  Protein classification predicting sequence
MKGRTMYV

SEQ ID NO: 57983 - protein, 7 aa, Artificial sequence
  Protein classification predicting sequence
LTDSAYV

SEQ ID NO: 57984 - protein, 7 aa, Artificial sequence
  Protein classification predicting sequence
GSGYGGN

SEQ ID NO: 57985 - protein, 11 aa, Artificial sequence
  Protein classification predicting sequence
FGGRRPAGVPL

SEQ ID NO: 57986 - protein, 7 aa, Artificial sequence
  Protein classification predicting sequence
SMHCSAN

SEQ ID NO: 57987 - protein, 7 aa, Artificial sequence
  Protein classification predicting sequence
VRVVCAR

SEQ ID NO: 57988 - protein, 6 aa, Artificial sequence
  Protein classification predicting sequence
YHALFM

SEQ ID NO: 57989 - protein, 6 aa, Artificial sequence
  Protein classification predicting sequence
NMLIRP

SEQ ID NO: 57990 - protein, 11 aa, Artificial sequence
  Protein classification predicting sequence
GTEYAGEMKKG

SEQ ID NO: 57991 - protein, 9 aa, Artificial sequence
  Protein classification predicting sequence
TENTRCAYP

SEQ ID NO: 57992 - protein, 7 aa, Artificial sequence
  Protein classification predicting sequence
HFISGYT

SEQ ID NO: 57993 - protein, 7 aa, Artificial sequence
  Protein classification predicting sequence
GKGKNDN

SEQ ID NO: 57994 - protein, 17 aa, Artificial sequence
  Protein classification predicting sequence
TEVAWQAHFVKNMFIRP

SEQ ID NO: 57995 - protein, 14 aa, Artificial sequence
  Protein classification predicting sequence
PDFIVMNGAKCTNP

SEQ ID NO: 57996 - protein, 8 aa, Artificial sequence
  Protein classification predicting sequence
LTADAFGV

SEQ ID NO: 57997 - protein, 20 aa, Artificial sequence
  Protein classification predicting sequence
QTQYHFLSGFTAKLAGTERG

SEQ ID NO: 57998 - protein, 16 aa, Artificial sequence
  Protein classification predicting sequence
TEPTPTFSACFGAAFL

SEQ ID NO: 57999 - protein, 14 aa, Artificial sequence
  Protein classification predicting sequence
LHPTQYAEVLVKRM

SEQ ID NO: 58000 - protein, 10 aa, Artificial sequence
  Protein classification predicting sequence
AYLVNTGWNG

SEQ ID NO: 58001 - protein, 7 aa, Artificial sequence
  Protein classification predicting sequence
PAGAALV

SEQ ID NO: 58002 - protein, 18 aa, Artificial sequence
  Protein classification predicting sequence
FFGLSGTGKTTLSADPNR

SEQ ID NO: 58003 - protein, 11 aa, Artificial sequence
  Protein classification predicting sequence
RKLIGDDEHGW

SEQ ID NO: 58004 - protein, 6 aa, Artificial sequence
  Protein classification predicting sequence
IFLTAD

SEQ ID NO: 58005 - protein, 7 aa, Artificial sequence
  Protein classification predicting sequence
GVLPPIS

SEQ ID NO: 58006 - protein, 6 aa, Artificial sequence
  Protein classification predicting sequence
KLAGTE

SEQ ID NO: 58007 - protein, 6 aa, Artificial sequence
  Protein classification predicting sequence
LKYTRA

SEQ ID NO: 58008 - protein, 5 aa, Artificial sequence
  Protein classification predicting sequence
WCDGS

SEQ ID NO: 58009 - protein, 10 aa, Artificial sequence
  Protein classification predicting sequence
WCDGSQEEYD

SEQ ID NO: 58010 - protein, 8 aa, Artificial sequence
  Protein classification predicting sequence
MRIMTRMG

SEQ ID NO: 58011 - protein, 8 aa, Artificial sequence
  Protein classification predicting sequence
KYIVHFPE

SEQ ID NO: 58012 - protein, 18 aa, Artificial sequence
  Protein classification predicting sequence
AAFPSACGKTNFAMLIPP

SEQ ID NO: 58013 - protein, 6 aa, Artificial sequence
  Protein classification predicting sequence
PASQCP

SEQ ID NO: 58014 - protein, 7 aa, Artificial sequence
  Protein classification predicting sequence
AHPNSRF

SEQ ID NO: 58015 - protein, 6 aa, Artificial sequence
  Protein classification predicting sequence
DAFCGA

SEQ ID NO: 58016 - protein, 18 aa, Artificial sequence
  Protein classification predicting sequence
QLIGGTWYGGEMKKGMFS

SEQ ID NO: 58017 - protein, 7 aa, Artificial sequence
  Protein classification predicting sequence
GKEGDVA

SEQ ID NO: 58018 - protein, 8 aa, Artificial sequence
  Protein classification predicting sequence
RDALLENV

SEQ ID NO: 58019 - protein, 9 aa, Artificial sequence
  Protein classification predicting sequence
ILDPRDTYA

SEQ ID NO: 58020 - protein, 6 aa, Artificial sequence
  Protein classification predicting sequence
VYNPSY

SEQ ID NO: 58021 - protein, 16 aa, Artificial sequence
  Protein classification predicting sequence
QLIGGTWYGGEMKKGM

SEQ ID NO: 58022 - protein, 7 aa, Artificial sequence
  Protein classification predicting sequence
NIVKPVS

SEQ ID NO: 58023 - protein, 11 aa, Artificial sequence
  Protein classification predicting sequence
ADAFGVLPPVS

SEQ ID NO: 58024 - protein, 9 aa, Artificial sequence
  Protein classification predicting sequence
ADAFGVLPP

SEQ ID NO: 58025 - protein, 10 aa, Artificial sequence
  Protein classification predicting sequence
DAFGVLPPVS

SEQ ID NO: 58026 - protein, 6 aa, Artificial sequence
  Protein classification predicting sequence
FNLAIP

SEQ ID NO: 58027 - protein, 6 aa, Artificial sequence
  Protein classification predicting sequence
KTGRSP

SEQ ID NO: 58028 - protein, 10 aa, Artificial sequence
  Protein classification predicting sequence
KTGRSPRDKR

SEQ ID NO: 58029 - protein, 11 aa, Artificial sequence
  Protein classification predicting sequence
GVLPPVSKLTP

SEQ ID NO: 58030 - protein, 6 aa, Artificial sequence
  Protein classification predicting sequence
VWCDGS

SEQ ID NO: 58031 - protein, 19 aa, Artificial sequence
  Protein classification predicting sequence
EIWSYGSGYGGNAILAKKC

SEQ ID NO: 58032 - protein, 6 aa, Artificial sequence
  Protein classification predicting sequence
ALRIAS

SEQ ID NO: 58033 - protein, 5 aa, Artificial sequence
  Protein classification predicting sequence
DDIAW

SEQ ID NO: 58034 - protein, 6 aa, Artificial sequence
  Protein classification predicting sequence
GNDWTP

SEQ ID NO: 58035 - protein, 9 aa, Artificial sequence
  Protein classification predicting sequence
SEQTAAAEG

SEQ ID NO: 58036 - protein, 6 aa, Artificial sequence
  Protein classification predicting sequence
FLWPGF

SEQ ID NO: 58037 - protein, 6 aa, Artificial sequence
  Protein classification predicting sequence
IGGTEY

SEQ ID NO: 58038 - protein, 10 aa, Artificial sequence
  Protein classification predicting sequence
TFSACFGAAF

SEQ ID NO: 58039 - protein, 9 aa, Artificial sequence
  Protein classification predicting sequence
EVAWQAHFV

SEQ ID NO: 58040 - protein, 7 aa, Artificial sequence
  Protein classification predicting sequence
ATKVIFL

SEQ ID NO: 58041 - protein, 8 aa, Artificial sequence
  Protein classification predicting sequence
DGDVWWEG

SEQ ID NO: 58042 - protein, 8 aa, Artificial sequence
  Protein classification predicting sequence
PSDVARVE

SEQ ID NO: 58043 - protein, 21 aa, Artificial sequence
  Protein classification predicting sequence
NSRYCTPMSQCPILAPEWDDP

SEQ ID NO: 58044 - protein, 6 aa, Artificial sequence
  Protein classification predicting sequence
ATMGSE

SEQ ID NO: 58045 - protein, 13 aa, Artificial sequence
  Protein classification predicting sequence
LPKVFFVNWFRRG

SEQ ID NO: 58046 - protein, 7 aa, Artificial sequence
  Protein classification predicting sequence
VNWFRRG

SEQ ID NO: 58047 - protein, 13 aa, Artificial sequence
  Protein classification predicting sequence
FLWPGFGENSRVL

SEQ ID NO: 58048 - protein, 16 aa, Artificial sequence
  Protein classification predicting sequence
EDPKLGVEITDSEYVV

SEQ ID NO: 58049 - protein, 6 aa, Artificial sequence
  Protein classification predicting sequence
WQHGVF

SEQ ID NO: 58050 - protein, 20 aa, Artificial sequence
  Protein classification predicting sequence
DESKLPKVFFVNWFRRGDDG

SEQ ID NO: 58051 - protein, 12 aa, Artificial sequence
  Protein classification predicting sequence
GDDGFFVKALHS

SEQ ID NO: 58052 - protein, 8 aa, Artificial sequence
  Protein classification predicting sequence
GAPLEPGQ

SEQ ID NO: 58053 - protein, 14 aa, Artificial sequence
  Protein classification predicting sequence
GSGYGGNALLGKKC

SEQ ID NO: 58054 - protein, 47 aa, Artificial sequence
  Protein classification predicting sequence
GSGYGGNALLGKKCYSLRIASAMAHDEGWLAEHMLILKLISPENKAY

SEQ ID NO: 58055 - protein, 10 aa, Artificial sequence
  Protein classification predicting sequence
TDDGDVWWEG

SEQ ID NO: 58056 - protein, 9 aa, Artificial sequence
  Protein classification predicting sequence
ECVGDDIAW

SEQ ID NO: 58057 - protein, 7 aa, Artificial sequence
  Protein classification predicting sequence
SETTAAA

SEQ ID NO: 58058 - protein, 15 aa, Artificial sequence
  Protein classification predicting sequence
AKLPKIFHVNWFRKD

SEQ ID NO: 58059 - protein, 7 aa, Artificial sequence
  Protein classification predicting sequence
VNWFRKD

SEQ ID NO: 58060 - protein, 5 aa, Artificial sequence
  Protein classification predicting sequence
FLWPG

SEQ ID NO: 58061 - protein, 8 aa, Artificial sequence
  Protein classification predicting sequence
IPNAKIPC

SEQ ID NO: 58062 - protein, 9 aa, Artificial sequence
  Protein classification predicting sequence
GVLPPISKL

SEQ ID NO: 58063 - protein, 40 aa, Artificial sequence
  Protein classification predicting sequence
PGWRAETLGDDIAWMRFGKDGRLYAVNPEFGFFGVAPGTN

SEQ ID NO: 58064 - protein, 10 aa, Artificial sequence
  Protein classification predicting sequence
GFFGVAPGTN

SEQ ID NO: 58065 - protein, 17 aa, Artificial sequence
  Protein classification predicting sequence
YRLPIQVINEYAWHNLF

SEQ ID NO: 58066 - protein, 10 aa, Artificial sequence
  Protein classification predicting sequence
LIGGTEYAGE

SEQ ID NO: 58067 - protein, 7 aa, Artificial sequence
  Protein classification predicting sequence
GTVLENV

SEQ ID NO: 58068 - protein, 9 aa, Artificial sequence
  Protein classification predicting sequence
QLSGKRLFV

SEQ ID NO: 58069 - protein, 16 aa, Artificial sequence
  Protein classification predicting sequence
LIGDDEHGWDDDGVFN

SEQ ID NO: 58070 - protein, 9 aa, Artificial sequence
  Protein classification predicting sequence
EGGCYAKTI

SEQ ID NO: 58071 - protein, 18 aa, Artificial sequence
  Protein classification predicting sequence
FFGLSGTGKTTLSTDPKR

SEQ ID NO: 58072 - protein, 7 aa, Artificial sequence
  Protein classification predicting sequence
LSKEAEP

SEQ ID NO: 58073 - protein, 8 aa, Artificial sequence
  Protein classification predicting sequence
NIVKPVSK

SEQ ID NO: 58074 - protein, 8 aa, Artificial sequence
  Protein classification predicting sequence
TGRSPKDK

SEQ ID NO: 58075 - protein, 7 aa, Artificial sequence
  Protein classification predicting sequence
WWADQGK

SEQ ID NO: 58076 - protein, 9 aa, Artificial sequence
  Protein classification predicting sequence
VMNGAKCTN

SEQ ID NO: 58077 - protein, 14 aa, Artificial sequence
  Protein classification predicting sequence
GLNSENFTVFNLTE

SEQ ID NO: 58078 - protein, 17 aa, Artificial sequence
  Protein classification predicting sequence
QLIGGTWYGGEMKKGMF

SEQ ID NO: 58079 - protein, 8 aa, Artificial sequence
  Protein classification predicting sequence
MMNYFLPL

SEQ ID NO: 58080 - protein, 12 aa, Artificial sequence
  Protein classification predicting sequence
GVFNFEGGCYAK

SEQ ID NO: 58081 - protein, 14 aa, Artificial sequence
  Protein classification predicting sequence
PIFNLEVPTSLPGV

SEQ ID NO: 58082 - protein, 16 aa, Artificial sequence
  Protein classification predicting sequence
EVAWQAHFVKNMFIRP

SEQ ID NO: 58083 - protein, 7 aa, Artificial sequence
  Protein classification predicting sequence
GVLPPVS

SEQ ID NO: 58084 - protein, 6 aa, Artificial sequence
  Protein classification predicting sequence
YHFLSG

SEQ ID NO: 58085 - protein, 6 aa, Artificial sequence
  Protein classification predicting sequence
AWHNLF

SEQ ID NO: 58086 - protein, 14 aa, Artificial sequence
  Protein classification predicting sequence
PKIFAVNYFLRENG

SEQ ID NO: 58087 - protein, 7 aa, Artificial sequence
  Protein classification predicting sequence
TPIGYIP

SEQ ID NO: 58088 - protein, 6 aa, Artificial sequence
  Protein classification predicting sequence
FLAEWI

SEQ ID NO: 58089 - protein, 14 aa, Artificial sequence
  Protein classification predicting sequence
FTIPAVQLTDSAYV

SEQ ID NO: 58090 - protein, 9 aa, Artificial sequence
  Protein classification predicting sequence
VQLTDSAYV

SEQ ID NO: 58091 - protein, 8 aa, Artificial sequence
  Protein classification predicting sequence
HGVITMGA

SEQ ID NO: 58092 - protein, 15 aa, Artificial sequence
  Protein classification predicting sequence
HTVHYDNYYDQARDK

SEQ ID NO: 58093 - protein, 7 aa, Artificial sequence
  Protein classification predicting sequence
GDYISPF

SEQ ID NO: 58094 - protein, 13 aa, Artificial sequence
  Protein classification predicting sequence
LYRKGYEEFKRLG

SEQ ID NO: 58095 - protein, 26 aa, Artificial sequence
  Protein classification predicting sequence
FVHSAGELDERKTSKNLDKRRIYIDL

SEQ ID NO: 58096 - protein, 7 aa, Artificial sequence
  Protein classification predicting sequence
TVYSVNT

SEQ ID NO: 58097 - protein, 16 aa, Artificial sequence
  Protein classification predicting sequence
EGWLSEHMFLMRVNGP

SEQ ID NO: 58098 - protein, 32 aa, Artificial sequence
  Protein classification predicting sequence
GRKTYFTGAYPSMCGKTSTAMIPWENIVGDDL

SEQ ID NO: 58099 - protein, 20 aa, Artificial sequence
  Protein classification predicting sequence
MGIEIPDEGENHSGKWWRGK

SEQ ID NO: 58100 - protein, 6 aa, Artificial sequence
  Protein classification predicting sequence
NARFTV

SEQ ID NO: 58101 - protein, 10 aa, Artificial sequence
  Protein classification predicting sequence
FNPMAILDFM

SEQ ID NO: 58102 - protein, 7 aa, Artificial sequence
  Protein classification predicting sequence
GCMRGRT

SEQ ID NO: 58103 - protein, 10 aa, Artificial sequence
  Protein classification predicting sequence
HFPETREIWS

SEQ ID NO: 58104 - protein, 17 aa, Artificial sequence
  Protein classification predicting sequence
EGVYMAATMGSETTAAA

SEQ ID NO: 58105 - protein, 6 aa, Artificial sequence
  Protein classification predicting sequence
LTENTR

SEQ ID NO: 58106 - protein, 9 aa, Artificial sequence
  Protein classification predicting sequence
FRTDANFGF

SEQ ID NO: 58107 - protein, 6 aa, Artificial sequence
  Protein classification predicting sequence
LTADAF

SEQ ID NO: 58108 - protein, 6 aa, Artificial sequence
  Protein classification predicting sequence
AYDAQA

SEQ ID NO: 58109 - protein, 7 aa, Artificial sequence
  Protein classification predicting sequence
PMHCSAN

SEQ ID NO: 58110 - protein, 8 aa, Artificial sequence
  Protein classification predicting sequence
AGTERGVT

SEQ ID NO: 58111 - protein, 7 aa, Artificial sequence
  Protein classification predicting sequence
TWADKAA

SEQ ID NO: 58112 - protein, 7 aa, Artificial sequence
  Protein classification predicting sequence
PGLEGYE

SEQ ID NO: 58113 - protein, 11 aa, Artificial sequence
  Protein classification predicting sequence
ETWQHLKGLVT

SEQ ID NO: 58114 - protein, 6 aa, Artificial sequence
  Protein classification predicting sequence
MNYLLP

SEQ ID NO: 58115 - protein, 14 aa, Artificial sequence
  Protein classification predicting sequence
AIRRDALLENVTVR

SEQ ID NO: 58116 - protein, 12 aa, Artificial sequence
  Protein classification predicting sequence
LAIPTELPGVDT

SEQ ID NO: 58117 - protein, 8 aa, Artificial sequence
  Protein classification predicting sequence
KYTDTPAG

SEQ ID NO: 58118 - protein, 39 aa, Artificial sequence
  Protein classification predicting sequence
GYERGVLTNLGAVAVDTGIFTGRSPKDKYIVRDDTTRDT

SEQ ID NO: 58119 - protein, 8 aa, Artificial sequence
  Protein classification predicting sequence
FGVLPPVS

SEQ ID NO: 58120 - protein, 12 aa, Artificial sequence
  Protein classification predicting sequence
TGIFTGRSPKDK

SEQ ID NO: 58121 - protein, 5 aa, Artificial sequence
  Protein classification predicting sequence
DTVWW

SEQ ID NO: 58122 - protein, 7 aa, Artificial sequence
  Protein classification predicting sequence
LPLKGIA

SEQ ID NO: 58123 - protein, 28 aa, Artificial sequence
  Protein classification predicting sequence
FLSGFTAKLAGTERGITEPTPTFSACFG

SEQ ID NO: 58124 - protein, 6 aa, Artificial sequence
  Protein classification predicting sequence
NFDKYT

SEQ ID NO: 58125 - protein, 9 aa, Artificial sequence
  Protein classification predicting sequence
DEETFLKLY

SEQ ID NO: 58126 - protein, 7 aa, Artificial sequence
  Protein classification predicting sequence
GYAGSDK

SEQ ID NO: 58127 - protein, 12 aa, Artificial sequence
  Protein classification predicting sequence
VINELAWHNLFA

SEQ ID NO: 58128 - protein, 6 aa, Artificial sequence
  Protein classification predicting sequence
NMFIRP

SEQ ID NO: 58129 - protein, 15 aa, Artificial sequence
  Protein classification predicting sequence
IKPNFTIVSAPHFKA

SEQ ID NO: 58130 - protein, 21 aa, Artificial sequence
  Protein classification predicting sequence
GDVALFFGLSGTGKTTLSADP

SEQ ID NO: 58131 - protein, 8 aa, Artificial sequence
  Protein classification predicting sequence
DGTIDFDD

SEQ ID NO: 58132 - protein, 12 aa, Artificial sequence
  Protein classification predicting sequence
KLAGTERGVTEP

SEQ ID NO: 58133 - protein, 11 aa, Artificial sequence
  Protein classification predicting sequence
PSFSTCFGAPF

SEQ ID NO: 58134 - protein, 5 aa, Artificial sequence
  Protein classification predicting sequence
PTKYA

SEQ ID NO: 58135 - protein, 10 aa, Artificial sequence
  Protein classification predicting sequence
GRRISLHYTR

SEQ ID NO: 58136 - protein, 9 aa, Artificial sequence
  Protein classification predicting sequence
QAISGKLKN

SEQ ID NO: 58137 - protein, 9 aa, Artificial sequence
  Protein classification predicting sequence
TILNPINAW

SEQ ID NO: 58138 - protein, 38 aa, Artificial sequence
  Protein classification predicting sequence
SETFVIISFKHKVILIGGTEYAGEMKKGIFSVMNYLLP

SEQ ID NO: 58139 - protein, 36 aa, Artificial sequence
  Protein classification predicting sequence
QDIMSMHCSANVGEKGDVALFFGLSGTGKTTLSADP

SEQ ID NO: 58140 - protein, 28 aa, Artificial sequence
  Protein classification predicting sequence
RKLIGDDEHGWNKNGVFNIEGGCYAKAI

SEQ ID NO: 58141 - protein, 27 aa, Artificial sequence
  Protein classification predicting sequence
PSKAAHPNTIIFLTADAFGVIPPISKL

SEQ ID NO: 58142 - protein, 26 aa, Artificial sequence
  Protein classification predicting sequence
KDQAMYHFLSGFTSKLAGTERGVTEP

SEQ ID NO: 58143 - protein, 7 aa, Artificial sequence
  Protein classification predicting sequence
VVWCDGS

SEQ ID NO: 58144 - protein, 7 aa, Artificial sequence
  Protein classification predicting sequence
DWKGNDW

SEQ ID NO: 58145 - protein, 9 aa, Artificial sequence
  Protein classification predicting sequence
TAAAEGKVG

SEQ ID NO: 58146 - protein, 7 aa, Artificial sequence
  Protein classification predicting sequence
WPGFGEN

SEQ ID NO: 58147 - protein, 7 aa, Artificial sequence
  Protein classification predicting sequence
HPNARFT

SEQ ID NO: 58148 - protein, 7 aa, Artificial sequence
  Protein classification predicting sequence
IEGIIFG

SEQ ID NO: 58149 - protein, 7 aa, Artificial sequence
  Protein classification predicting sequence
EDYEKQF

SEQ ID NO: 58150 - protein, 7 aa, Artificial sequence
  Protein classification predicting sequence
YGGNALL

SEQ ID NO: 58151 - protein, 7 aa, Artificial sequence
  Protein classification predicting sequence
GKTNLAM

SEQ ID NO: 58152 - protein, 9 aa, Artificial sequence
  Protein classification predicting sequence
TGRSPKDKF

SEQ ID NO: 58153 - protein, 21 aa, Artificial sequence
  Protein classification predicting sequence
GDVAVFFGLSGTGKTTLSTDP

SEQ ID NO: 58154 - protein, 16 aa, Artificial sequence
  Protein classification predicting sequence
FFGLSGTGKTTLSTDP

SEQ ID NO: 58155 - protein, 6 aa, Artificial sequence
  Protein classification predicting sequence
NSEAFI

SEQ ID NO: 58156 - protein, 6 aa, Artificial sequence
  Protein classification predicting sequence
FLSGYT

SEQ ID NO: 58157 - protein, 6 aa, Artificial sequence
  Protein classification predicting sequence
AHPNSR

SEQ ID NO: 58158 - protein, 6 aa, Artificial sequence
  Protein classification predicting sequence
CLHSVG

SEQ ID NO: 58159 - protein, 14 aa, Artificial sequence
  Protein classification predicting sequence
AAFPSACGKTNLAM

SEQ ID NO: 58160 - protein, 12 aa, Artificial sequence
  Protein classification predicting sequence
GVFNIEGGCYAK

SEQ ID NO: 58161 - protein, 8 aa, Artificial sequence
  Protein classification predicting sequence
QEVWNDLK

SEQ ID NO: 58162 - protein, 21 aa, Artificial sequence
  Protein classification predicting sequence
TEPTPTFSACFGAAFLTLHPT

SEQ ID NO: 58163 - protein, 21 aa, Artificial sequence
  Protein classification predicting sequence
GKRISIKDTRGIIDAILDGSI

SEQ ID NO: 58164 - protein, 8 aa, Artificial sequence
  Protein classification predicting sequence
NPSYELLF

SEQ ID NO: 58165 - protein, 7 aa, Artificial sequence
  Protein classification predicting sequence
GLNSENF

SEQ ID NO: 58166 - protein, 9 aa, Artificial sequence
  Protein classification predicting sequence
IASMHCSAN

SEQ ID NO: 58167 - protein, 14 aa, Artificial sequence
  Protein classification predicting sequence
DTRGIIDAILDGSI

SEQ ID NO: 58168 - protein, 6 aa, Artificial sequence
  Protein classification predicting sequence
GKRISI

SEQ ID NO: 58169 - protein, 6 aa, Artificial sequence
  Protein classification predicting sequence
AWQAHF

SEQ ID NO: 58170 - protein, 6 aa, Artificial sequence
  Protein classification predicting sequence
LNSENF

SEQ ID NO: 58171 - protein, 6 aa, Artificial sequence
  Protein classification predicting sequence
FSVMNY

SEQ ID NO: 58172 - protein, 6 aa, Artificial sequence
  Protein classification predicting sequence
FLSGFT

SEQ ID NO: 58173 - protein, 8 aa, Artificial sequence
  Protein classification predicting sequence
AFLSLHPT

SEQ ID NO: 58174 - protein, 8 aa, Artificial sequence
  Protein classification predicting sequence
GALIAYSG

SEQ ID NO: 58175 - protein, 17 aa, Artificial sequence
  Protein classification predicting sequence
FGEPDFTVWNAGQFPAN

SEQ ID NO: 58176 - protein, 18 aa, Artificial sequence
  Protein classification predicting sequence
AVDTGIFTGRSPKDKYIV

SEQ ID NO: 58177 - protein, 15 aa, Artificial sequence
  Protein classification predicting sequence
SMHCSANVGEKGDVA

SEQ ID NO: 58178 - protein, 33 aa, Artificial sequence
  Protein classification predicting sequence
GAQAYLVNTGWNGTGKRISIKDTRAIIDAILNG

SEQ ID NO: 58179 - protein, 7 aa, Artificial sequence
  Protein classification predicting sequence
DYHRFHF

SEQ ID NO: 58180 - protein, 8 aa, Artificial sequence
  Protein classification predicting sequence
SPSDGKIL

SEQ ID NO: 58181 - protein, 10 aa, Artificial sequence
  Protein classification predicting sequence
VIYLAPGDYH

SEQ ID NO: 58182 - protein, 6 aa, Artificial sequence
  Protein classification predicting sequence
RRHFPG

SEQ ID NO: 58183 - protein, 7 aa, Artificial sequence
  Protein classification predicting sequence
PGDLFSV

SEQ ID NO: 58184 - protein, 7 aa, Artificial sequence
  Protein classification predicting sequence
FFTRALK

SEQ ID NO: 58185 - protein, 13 aa, Artificial sequence
  Protein classification predicting sequence
YLSPRDYHRVHMP

SEQ ID NO: 58186 - protein, 7 aa, Artificial sequence
  Protein classification predicting sequence
LFARNER

SEQ ID NO: 58187 - protein, 10 aa, Artificial sequence
  Protein classification predicting sequence
GLIRFGSRLD

SEQ ID NO: 58188 - protein, 7 aa, Artificial sequence
  Protein classification predicting sequence
IRFGSRV

SEQ ID NO: 58189 - protein, 63 aa, Artificial sequence
  Protein classification predicting sequence
RYAGGTYMVIYLSPSHYHRIHSPLSGSVTERFVLGRKSYPVNAAGMEYGKEPLSKNYRSVTEV

SEQ ID NO: 58190 - protein, 13 aa, Artificial sequence
  Protein classification predicting sequence
YLSPSHYHRIHSP

SEQ ID NO: 58191 - protein, 52 aa, Artificial sequence
  Protein classification predicting sequence
KVFQINQDEMEKGLKEYRTLHELFTRKLKEGKRSIDTDASSIVSPVDGVFAD

SEQ ID NO: 58192 - protein, 5 aa, Artificial sequence
  Protein classification predicting sequence
YHRFH

SEQ ID NO: 58193 - protein, 6 aa, Artificial sequence
  Protein classification predicting sequence
ICLFDT

SEQ ID NO: 58194 - protein, 7 aa, Artificial sequence
  Protein classification predicting sequence
MAQILVG

SEQ ID NO: 58195 - protein, 8 aa, Artificial sequence
  Protein classification predicting sequence
GSTVINLF

SEQ ID NO: 58196 - protein, 12 aa, Artificial sequence
  Protein classification predicting sequence
EMGRFKLGSTVI

SEQ ID NO: 58197 - protein, 9 aa, Artificial sequence
  Protein classification predicting sequence
GQTAIAGET

SEQ ID NO: 58198 - protein, 5 aa, Artificial sequence
  Protein classification predicting sequence
WCIYF

SEQ ID NO: 58199 - protein, 8 aa, Artificial sequence
  Protein classification predicting sequence
RDPERVTP

SEQ ID NO: 58200 - protein, 10 aa, Artificial sequence
  Protein classification predicting sequence
DDLVISPADG

SEQ ID NO: 58201 - protein, 7 aa, Artificial sequence
  Protein classification predicting sequence
SVFMNVF

SEQ ID NO: 58202 - protein, 11 aa, Artificial sequence
  Protein classification predicting sequence
LDKASTENERN

SEQ ID NO: 58203 - protein, 8 aa, Artificial sequence
  Protein classification predicting sequence
AGLVARRI

SEQ ID NO: 58204 - protein, 8 aa, Artificial sequence
  Protein classification predicting sequence
IRFGSRVD

SEQ ID NO: 58205 - protein, 8 aa, Artificial sequence
  Protein classification predicting sequence
LGSTIVLI

SEQ ID NO: 58206 - protein, 6 aa, Artificial sequence
  Protein classification predicting sequence
FTRKLK

SEQ ID NO: 58207 - protein, 7 aa, Artificial sequence
  Protein classification predicting sequence
LKPDARP

SEQ ID NO: 58208 - protein, 7 aa, Artificial sequence
  Protein classification predicting sequence
SLESFLG

SEQ ID NO: 58209 - protein, 8 aa, Artificial sequence
  Protein classification predicting sequence
FFTRALKP

SEQ ID NO: 58210 - protein, 8 aa, Artificial sequence
  Protein classification predicting sequence
GRIFQAKG

SEQ ID NO: 58211 - protein, 9 aa, Artificial sequence
  Protein classification predicting sequence
YLSPRDYHR

SEQ ID NO: 58212 - protein, 5 aa, Artificial sequence
  Protein classification predicting sequence
YHRIH

SEQ ID NO: 58213 - protein, 6 aa, Artificial sequence
  Protein classification predicting sequence
YVPGDL

SEQ ID NO: 58214 - protein, 12 aa, Artificial sequence
  Protein classification predicting sequence
RLCPTDYHRFHF

SEQ ID NO: 58215 - protein, 11 aa, Artificial sequence
  Protein classification predicting sequence
EKGYFKFGGST

SEQ ID NO: 58216 - protein, 6 aa, Artificial sequence
  Protein classification predicting sequence
YNRKTK

SEQ ID NO: 58217 - protein, 9 aa, Artificial sequence
  Protein classification predicting sequence
YYSVNPIAL

SEQ ID NO: 58218 - protein, 7 aa, Artificial sequence
  Protein classification predicting sequence
FNAFFTR

SEQ ID NO: 58219 - protein, 6 aa, Artificial sequence
  Protein classification predicting sequence
LFSVNP

SEQ ID NO: 58220 - protein, 6 aa, Artificial sequence
  Protein classification predicting sequence
ISPADG

SEQ ID NO: 58221 - protein, 14 aa, Artificial sequence
  Protein classification predicting sequence
ALKISIFMNVFNVH

SEQ ID NO: 58222 - protein, 7 aa, Artificial sequence
  Protein classification predicting sequence
PGKFFNA

SEQ ID NO: 58223 - protein, 6 aa, Artificial sequence
  Protein classification predicting sequence
ARRIVC

SEQ ID NO: 58224 - protein, 13 aa, Artificial sequence
  Protein classification predicting sequence
LVMPADGVISQLG

SEQ ID NO: 58225 - protein, 12 aa, Artificial sequence
  Protein classification predicting sequence
SLSVTKIGQPLA

SEQ ID NO: 58226 - protein, 10 aa, Artificial sequence
  Protein classification predicting sequence
AEHDASPLVD

SEQ ID NO: 58227 - protein, 9 aa, Artificial sequence
  Protein classification predicting sequence
LTKLVIDLF

SEQ ID NO: 58228 - protein, 7 aa, Artificial sequence
  Protein classification predicting sequence
PDTASYR

SEQ ID NO: 58229 - protein, 6 aa, Artificial sequence
  Protein classification predicting sequence
FFVRPL

SEQ ID NO: 58230 - protein, 14 aa, Artificial sequence
  Protein classification predicting sequence
YLSPRDYHRVHMPC

SEQ ID NO: 58231 - protein, 8 aa, Artificial sequence
  Protein classification predicting sequence
QILVGATI

SEQ ID NO: 58232 - protein, 11 aa, Artificial sequence
  Protein classification predicting sequence
TPPREGIIKRW

SEQ ID NO: 58233 - protein, 10 aa, Artificial sequence
  Protein classification predicting sequence
PDTASYRTFN

SEQ ID NO: 58234 - protein, 7 aa, Artificial sequence
  Protein classification predicting sequence
FDTEFGP

SEQ ID NO: 58235 - protein, 15 aa, Artificial sequence
  Protein classification predicting sequence
EMGRFKLGSTVINLF

SEQ ID NO: 58236 - protein, 8 aa, Artificial sequence
  Protein classification predicting sequence
FATIYLSP

SEQ ID NO: 58237 - protein, 13 aa, Artificial sequence
  Protein classification predicting sequence
YLSPKDYHRVHMP

SEQ ID NO: 58238 - protein, 8 aa, Artificial sequence
  Protein classification predicting sequence
DYHRVHMP

SEQ ID NO: 58239 - protein, 8 aa, Artificial sequence
  Protein classification predicting sequence
INQDEMEK

SEQ ID NO: 58240 - protein, 9 aa, Artificial sequence
  Protein classification predicting sequence
LGRKSYPVN

SEQ ID NO: 58241 - protein, 10 aa, Artificial sequence
  Protein classification predicting sequence
GAMFVNSIEL

SEQ ID NO: 58242 - protein, 8 aa, Artificial sequence
  Protein classification predicting sequence
KGEEMAYF

SEQ ID NO: 58243 - protein, 6 aa, Artificial sequence
  Protein classification predicting sequence
KISIFM

SEQ ID NO: 58244 - protein, 5 aa, Artificial sequence
  Protein classification predicting sequence
VFNVH

SEQ ID NO: 58245 - protein, 6 aa, Artificial sequence
  Protein classification predicting sequence
TRLAGW

SEQ ID NO: 58246 - protein, 6 aa, Artificial sequence
  Protein classification predicting sequence
KQYNVN

SEQ ID NO: 58247 - protein, 6 aa, Artificial sequence
  Protein classification predicting sequence
PVRMGE

SEQ ID NO: 58248 - protein, 6 aa, Artificial sequence
  Protein classification predicting sequence
NVHVNR

SEQ ID NO: 58249 - protein, 6 aa, Artificial sequence
  Protein classification predicting sequence
PKDYHR

SEQ ID NO: 58250 - protein, 7 aa, Artificial sequence
  Protein classification predicting sequence
SVNPLTA

SEQ ID NO: 58251 - protein, 6 aa, Artificial sequence
  Protein classification predicting sequence
KGQEMG

SEQ ID NO: 58252 - protein, 7 aa, Artificial sequence
  Protein classification predicting sequence
ASTENER

SEQ ID NO: 58253 - protein, 19 aa, Artificial sequence
  Protein classification predicting sequence
IGDTYGLIRFGSRLDTYLP

SEQ ID NO: 58254 - protein, 9 aa, Artificial sequence
  Protein classification predicting sequence
ACAGFFRHP

SEQ ID NO: 58255 - protein, 6 aa, Artificial sequence
  Protein classification predicting sequence
VQVAGL

SEQ ID NO: 58256 - protein, 28 aa, Artificial sequence
  Protein classification predicting sequence
CCGWWSLPFWVFTVFALQFFRDPAREIP

SEQ ID NO: 58257 - protein, 6 aa, Artificial sequence
  Protein classification predicting sequence
ENERNA

SEQ ID NO: 58258 - protein, 13 aa, Artificial sequence
  Protein classification predicting sequence
IGDTYGLIRFGSR

SEQ ID NO: 58259 - protein, 8 aa, Artificial sequence
  Protein classification predicting sequence
GLIRFGSR

SEQ ID NO: 58260 - protein, 12 aa, Artificial sequence
  Protein classification predicting sequence
MIYVPGDLFSVN

SEQ ID NO: 58261 - protein, 16 aa, Artificial sequence
  Protein classification predicting sequence
EMGRFKLGSTVINLFA

SEQ ID NO: 58262 - protein, 10 aa, Artificial sequence
  Protein classification predicting sequence
LTRLVGKLAS

SEQ ID NO: 58263 - protein, 10 aa, Artificial sequence
  Protein classification predicting sequence
LTTAIIRWFI

SEQ ID NO: 58264 - protein, 10 aa, Artificial sequence
  Protein classification predicting sequence
RELKEGARPI

SEQ ID NO: 58265 - protein, 9 aa, Artificial sequence
  Protein classification predicting sequence
HPADACVSQ

SEQ ID NO: 58266 - protein, 40 aa, Artificial sequence
  Protein classification predicting sequence
FATLYLSPRDYHRVHMPCDGTLRQMIYVPGDLFSVNPLTA

SEQ ID NO: 58267 - protein, 16 aa, Artificial sequence
  Protein classification predicting sequence
MIYVPGDLFSVNPLTA

SEQ ID NO: 58268 - protein, 12 aa, Artificial sequence
  Protein classification predicting sequence
NVPNLFARNERV

SEQ ID NO: 58269 - protein, 18 aa, Artificial sequence
  Protein classification predicting sequence
NVPNLFARNERVVCIFDT

SEQ ID NO: 58270 - protein, 14 aa, Artificial sequence
  Protein classification predicting sequence
AQVLVGATIVGSIE

SEQ ID NO: 58271 - protein, 11 aa, Artificial sequence
  Protein classification predicting sequence
LVGATIVGSIE

SEQ ID NO: 58272 - protein, 8 aa, Artificial sequence
  Protein classification predicting sequence
PADGAISQ

SEQ ID NO: 58273 - protein, 8 aa, Artificial sequence
  Protein classification predicting sequence
LFARNERV

SEQ ID NO: 58274 - protein, 21 aa, Artificial sequence
  Protein classification predicting sequence
VLVGAMIVASIETVWAGLVTP

SEQ ID NO: 58275 - protein, 8 aa, Artificial sequence
  Protein classification predicting sequence
MSEALVED

SEQ ID NO: 58276 - protein, 17 aa, Artificial sequence
  Protein classification predicting sequence
DYHRVHMPLAGTLREMV

SEQ ID NO: 58277 - protein, 8 aa, Artificial sequence
  Protein classification predicting sequence
AGLIARRI

SEQ ID NO: 58278 - protein, 6 aa, Artificial sequence
  Protein classification predicting sequence
HVNRAP

SEQ ID NO: 58279 - protein, 9 aa, Artificial sequence
  Protein classification predicting sequence
PIHREGYPF

SEQ ID NO: 58280 - protein, 8 aa, Artificial sequence
  Protein classification predicting sequence
PPPELGLG

SEQ ID NO: 58281 - protein, 41 aa, Artificial sequence
  Protein classification predicting sequence
FRNGTFVTTYLSPRDYHRVHMPCNGILREMIYVPGDLFSVN

SEQ ID NO: 58282 - protein, 28 aa, Artificial sequence
  Protein classification predicting sequence
IEEDKILQAKGHNYSLEALLAGNYLMAD

SEQ ID NO: 58283 - protein, 31 aa, Artificial sequence
  Protein classification predicting sequence
GSVALLKGQEMGRFKLGSTVINLFAPGKVNL

SEQ ID NO: 58284 - protein, 9 aa, Artificial sequence
  Protein classification predicting sequence
PIIAREGWP

SEQ ID NO: 58285 - protein, 7 aa, Artificial sequence
  Protein classification predicting sequence
GLIRFGS

SEQ ID NO: 58286 - protein, 9 aa, Artificial sequence
  Protein classification predicting sequence
TPPRGNTVY

SEQ ID NO: 58287 - protein, 8 aa, Artificial sequence
  Protein classification predicting sequence
FATLYLSP

SEQ ID NO: 58288 - protein, 42 aa, Artificial sequence
  Protein classification predicting sequence
MIYVPGDLFSVNPLTAENVPNLFARNERVVCIFDTEFGPMAQ

SEQ ID NO: 58289 - protein, 8 aa, Artificial sequence
  Protein classification predicting sequence
QAKGHNYS

SEQ ID NO: 58290 - protein, 10 aa, Artificial sequence
  Protein classification predicting sequence
VWAGTITPPR

SEQ ID NO: 58291 - protein, 6 aa, Artificial sequence
  Protein classification predicting sequence
TTYLSP

SEQ ID NO: 58292 - protein, 13 aa, Artificial sequence
  Protein classification predicting sequence
LMPADGRISQLGP

SEQ ID NO: 58293 - protein, 17 aa, Artificial sequence
  Protein classification predicting sequence
TVHVPGRLFSVGPDAVR

SEQ ID NO: 58294 - protein, 8 aa, Artificial sequence
  Protein classification predicting sequence
KQWLIDTV

SEQ ID NO: 58295 - protein, 15 aa, Artificial sequence
  Protein classification predicting sequence
VMVGALLVSGVETVW

SEQ ID NO: 58296 - protein, 16 aa, Artificial sequence
  Protein classification predicting sequence
PRLFARNERLVCHFDT

SEQ ID NO: 58297 - protein, 13 aa, Artificial sequence
  Protein classification predicting sequence
YRTFNEFFVRPLR

SEQ ID NO: 58298 - protein, 20 aa, Artificial sequence
  Protein classification predicting sequence
ILQAKGHNYSLEALLAGNYL

SEQ ID NO: 58299 - protein, 6 aa, Artificial sequence
  Protein classification predicting sequence
FVTTYL

SEQ ID NO: 58300 - protein, 31 aa, Artificial sequence
  Protein classification predicting sequence
FGPMAQILVGATIVGSIETVWAGTITPPREG

SEQ ID NO: 58301 - protein, 10 aa, Artificial sequence
  Protein classification predicting sequence
FVNADLDKAS

SEQ ID NO: 58302 - protein, 7 aa, Artificial sequence
  Protein classification predicting sequence
LDHKNLD

SEQ ID NO: 58303 - protein, 7 aa, Artificial sequence
  Protein classification predicting sequence
TGMVMNL

SEQ ID NO: 58304 - protein, 6 aa, Artificial sequence
  Protein classification predicting sequence
AHLPGM

SEQ ID NO: 58305 - protein, 12 aa, Artificial sequence
  Protein classification predicting sequence
GVDSLYSIVQMP

SEQ ID NO: 58306 - protein, 7 aa, Artificial sequence
  Protein classification predicting sequence
VSAHRTP

SEQ ID NO: 58307 - protein, 8 aa, Artificial sequence
  Protein classification predicting sequence
AAMTPLPV

SEQ ID NO: 58308 - protein, 16 aa, Artificial sequence
  Protein classification predicting sequence
IIAGAGGAAHLPGMVA

SEQ ID NO: 58309 - protein, 7 aa, Artificial sequence
  Protein classification predicting sequence
TNAIMLN

SEQ ID NO: 58310 - protein, 7 aa, Artificial sequence
  Protein classification predicting sequence
RKVGHIN

SEQ ID NO: 58311 - protein, 14 aa, Artificial sequence
  Protein classification predicting sequence
IIAGAGGAAHLPGM

SEQ ID NO: 58312 - protein, 7 aa, Artificial sequence
  Protein classification predicting sequence
IMGSDSD

SEQ ID NO: 58313 - protein, 6 aa, Artificial sequence
  Protein classification predicting sequence
SAHRTP

SEQ ID NO: 58314 - protein, 10 aa, Artificial sequence
  Protein classification predicting sequence
GIPVGTLAIG

SEQ ID NO: 58315 - protein, 7 aa, Artificial sequence
  Protein classification predicting sequence
GIPVATV

SEQ ID NO: 58316 - protein, 7 aa, Artificial sequence
  Protein classification predicting sequence
AYDGRGN

SEQ ID NO: 58317 - protein, 8 aa, Artificial sequence
  Protein classification predicting sequence
AIMLNVLG

SEQ ID NO: 58318 - protein, 7 aa, Artificial sequence
  Protein classification predicting sequence
PVATVAI

SEQ ID NO: 58319 - protein, 7 aa, Artificial sequence
  Protein classification predicting sequence
SVYLYGK

SEQ ID NO: 58320 - protein, 8 aa, Artificial sequence
  Protein classification predicting sequence
ERDLTNSS

SEQ ID NO: 58321 - protein, 8 aa, Artificial sequence
  Protein classification predicting sequence
CTSEDINN

SEQ ID NO: 58322 - protein, 12 aa, Artificial sequence
  Protein classification predicting sequence
WNPYTTQIEPHD

SEQ ID NO: 58323 - protein, 7 aa, Artificial sequence
  Protein classification predicting sequence
HCCPKAA

SEQ ID NO: 58324 - protein, 18 aa, Artificial sequence
  Protein classification predicting sequence
IIHLGATSCYVGDNTDLI

SEQ ID NO: 58325 - protein, 17 aa, Artificial sequence
  Protein classification predicting sequence
LLLPKLARVISRLADFA

SEQ ID NO: 58326 - protein, 33 aa, Artificial sequence
  Protein classification predicting sequence
RKVDIEVLSVLASLGASVHKICTDIRLLANLKE

SEQ ID NO: 58327 - protein, 6 aa, Artificial sequence
  Protein classification predicting sequence
GSSAMP

SEQ ID NO: 58328 - protein, 22 aa, Artificial sequence
  Protein classification predicting sequence
DPLQTASVQWFERTLDDSANRR

SEQ ID NO: 58329 - protein, 10 aa, Artificial sequence
  Protein classification predicting sequence
CLAEAFLTAD

SEQ ID NO: 58330 - protein, 16 aa, Artificial sequence
  Protein classification predicting sequence
TLQNISEGLVVYPKVI

SEQ ID NO: 58331 - protein, 24 aa, Artificial sequence
  Protein classification predicting sequence
RRIRQELPFMATENIIMAMVKAGG

SEQ ID NO: 58332 - protein, 8 aa, Artificial sequence
  Protein classification predicting sequence
EILGKING

SEQ ID NO: 58333 - protein, 7 aa, Artificial sequence
  Protein classification predicting sequence
SRWQRDL

SEQ ID NO: 58334 - protein, 7 aa, Artificial sequence
  Protein classification predicting sequence
DSTVLRN

SEQ ID NO: 58335 - protein, 11 aa, Artificial sequence
  Protein classification predicting sequence
KLPISRWQRDL

SEQ ID NO: 58336 - protein, 15 aa, Artificial sequence
  Protein classification predicting sequence
GQKGSSAMPHKRNPI

SEQ ID NO: 58337 - protein, 6 aa, Artificial sequence
  Protein classification predicting sequence
LVVYPK

SEQ ID NO: 58338 - protein, 8 aa, Artificial sequence
  Protein classification predicting sequence
GRTHGQHA

SEQ ID NO: 58339 - protein, 6 aa, Artificial sequence
  Protein classification predicting sequence
LWHERD

SEQ ID NO: 58340 - protein, 7 aa, Artificial sequence
  Protein classification predicting sequence
TWRQLWL

SEQ ID NO: 58341 - protein, 7 aa, Artificial sequence
  Protein classification predicting sequence
RHDVMAH

SEQ ID NO: 58342 - protein, 11 aa, Artificial sequence
  Protein classification predicting sequence
TDIRLLANLKE

SEQ ID NO: 58343 - protein, 7 aa, Artificial sequence
  Protein classification predicting sequence
YKRNPMR

SEQ ID NO: 58344 - protein, 14 aa, Artificial sequence
  Protein classification predicting sequence
TASVQWFERTLDDS

SEQ ID NO: 58345 - protein, 14 aa, Artificial sequence
  Protein classification predicting sequence
ELPFMATENIIMAM

SEQ ID NO: 58346 - protein, 11 aa, Artificial sequence
  Protein classification predicting sequence
EGGDNDLIERI

SEQ ID NO: 58347 - protein, 8 aa, Artificial sequence
  Protein classification predicting sequence
GKISGAVG

SEQ ID NO: 58348 - protein, 8 aa, Artificial sequence
  Protein classification predicting sequence
EIRNLQRT

SEQ ID NO: 58349 - protein, 14 aa, Artificial sequence
  Protein classification predicting sequence
RGVKGTTGTQASFL

SEQ ID NO: 58350 - protein, 7 aa, Artificial sequence
  Protein classification predicting sequence
CSLARHL

SEQ ID NO: 58351 - protein, 16 aa, Artificial sequence
  Protein classification predicting sequence
QTASVQWFERTLDDSA

SEQ ID NO: 58352 - protein, 7 aa, Artificial sequence
  Protein classification predicting sequence
LLVNELA

SEQ ID NO: 58353 - protein, 6 aa, Artificial sequence
  Protein classification predicting sequence
SQFEQH

SEQ ID NO: 58354 - protein, 8 aa, Artificial sequence
  Protein classification predicting sequence
AQDKLVMR

SEQ ID NO: 58355 - protein, 10 aa, Artificial sequence
  Protein classification predicting sequence
VNELAMRPHN

SEQ ID NO: 58356 - protein, 6 aa, Artificial sequence
  Protein classification predicting sequence
GQLGRM

SEQ ID NO: 58357 - protein, 7 aa, Artificial sequence
  Protein classification predicting sequence
RPHNSGH

SEQ ID NO: 58358 - protein, 6 aa, Artificial sequence
  Protein classification predicting sequence
NEIAPR

SEQ ID NO: 58359 - protein, 5 aa, Artificial sequence
  Protein classification predicting sequence
HNSGH

SEQ ID NO: 58360 - protein, 13 aa, Artificial sequence
  Protein classification predicting sequence
LCLLGVTVLTSMD

SEQ ID NO: 58361 - protein, 6 aa, Artificial sequence
  Protein classification predicting sequence
DGVVCS

SEQ ID NO: 58362 - protein, 6 aa, Artificial sequence
  Protein classification predicting sequence
IIVGRG

SEQ ID NO: 58363 - protein, 11 aa, Artificial sequence
  Protein classification predicting sequence
DKDFVIGFIAQ

SEQ ID NO: 58364 - protein, 18 aa, Artificial sequence
  Protein classification predicting sequence
GFDWLIMTPGVGLDDKGD

SEQ ID NO: 58365 - protein, 8 aa, Artificial sequence
  Protein classification predicting sequence
IIVGRGLF

SEQ ID NO: 58366 - protein, 7 aa, Artificial sequence
  Protein classification predicting sequence
RYRKAGW

SEQ ID NO: 58367 - protein, 6 aa, Artificial sequence
  Protein classification predicting sequence
DIGNTV

SEQ ID NO: 58368 - protein, 6 aa, Artificial sequence
  Protein classification predicting sequence
SKGSLA

SEQ ID NO: 58369 - protein, 6 aa, Artificial sequence
  Protein classification predicting sequence
KKTNLC

SEQ ID NO: 58370 - protein, 7 aa, Artificial sequence
  Protein classification predicting sequence
LLILAEM

SEQ ID NO: 58371 - protein, 6 aa, Artificial sequence
  Protein classification predicting sequence
GFIAQR

SEQ ID NO: 58372 - protein, 8 aa, Artificial sequence
  Protein classification predicting sequence
DIIIVGRG

SEQ ID NO: 58373 - protein, 7 aa, Artificial sequence
  Protein classification predicting sequence
HDIPNTV

SEQ ID NO: 58374 - protein, 10 aa, Artificial sequence
  Protein classification predicting sequence
VTPGIRLASD

SEQ ID NO: 58375 - protein, 6 aa, Artificial sequence
  Protein classification predicting sequence
GMELYY

SEQ ID NO: 58376 - protein, 9 aa, Artificial sequence
  Protein classification predicting sequence
GGRRMMEAA

SEQ ID NO: 58377 - protein, 9 aa, Artificial sequence
  Protein classification predicting sequence
VKVGMELFY

SEQ ID NO: 58378 - protein, 8 aa, Artificial sequence
  Protein classification predicting sequence
IVVGRSIT

SEQ ID NO: 58379 - protein, 11 aa, Artificial sequence
  Protein classification predicting sequence
LFVKVGMELFY

SEQ ID NO: 58380 - protein, 9 aa, Artificial sequence
  Protein classification predicting sequence
FLDLKLHDI

SEQ ID NO: 58381 - protein, 7 aa, Artificial sequence
  Protein classification predicting sequence
VCSVFES

SEQ ID NO: 58382 - protein, 8 aa, Artificial sequence
  Protein classification predicting sequence
SPVARRLF

SEQ ID NO: 58383 - protein, 18 aa, Artificial sequence
  Protein classification predicting sequence
NFMIFEDRKFADIGNTVK

SEQ ID NO: 58384 - protein, 8 aa, Artificial sequence
  Protein classification predicting sequence
LGQQYRTV

SEQ ID NO: 58385 - protein, 7 aa, Artificial sequence
  Protein classification predicting sequence
AGWNAYL

SEQ ID NO: 58386 - protein, 14 aa, Artificial sequence
  Protein classification predicting sequence
IIVGRGLFGKGRDP

SEQ ID NO: 58387 - protein, 12 aa, Artificial sequence
  Protein classification predicting sequence
KHNFLIFEDRKF

SEQ ID NO: 58388 - protein, 8 aa, Artificial sequence
  Protein classification predicting sequence
FVIGFIAQ

SEQ ID NO: 58389 - protein, 13 aa, Artificial sequence
  Protein classification predicting sequence
IMTPGVGLDDKGD

SEQ ID NO: 58390 - protein, 9 aa, Artificial sequence
  Protein classification predicting sequence
DIIIVGRGL

SEQ ID NO: 58391 - protein, 5 aa, Artificial sequence
  Protein classification predicting sequence
NLCAS

SEQ ID NO: 58392 - protein, 20 aa, Artificial sequence
  Protein classification predicting sequence
KHNFMIFEDRKFADIGNTVK

SEQ ID NO: 58393 - protein, 14 aa, Artificial sequence
  Protein classification predicting sequence
FEDRKFADIGNTVK

SEQ ID NO: 58394 - protein, 7 aa, Artificial sequence
  Protein classification predicting sequence
DFSYEGT

SEQ ID NO: 58395 - protein, 12 aa, Artificial sequence
  Protein classification predicting sequence
IIVGRGLFGKGR

SEQ ID NO: 58396 - protein, 6 aa, Artificial sequence
  Protein classification predicting sequence
RASKHP

SEQ ID NO: 58397 - protein, 15 aa, Artificial sequence
  Protein classification predicting sequence
IFEDRKFADIGNTVK

SEQ ID NO: 58398 - protein, 18 aa, Artificial sequence
  Protein classification predicting sequence
IFEDRKFADIGNTVKLQY

SEQ ID NO: 58399 - protein, 18 aa, Artificial sequence
  Protein classification predicting sequence
EPRGLLMLAELSSKGSLA

SEQ ID NO: 58400 - protein, 23 aa, Artificial sequence
  Protein classification predicting sequence
EPRGLLMLAELSSKGSLAYGEYT

SEQ ID NO: 58401 - protein, 5 aa, Artificial sequence
  Protein classification predicting sequence
EWAHI

SEQ ID NO: 58402 - protein, 9 aa, Artificial sequence
  Protein classification predicting sequence
DGRKGSIVS

SEQ ID NO: 58403 - protein, 8 aa, Artificial sequence
  Protein classification predicting sequence
SPVVVALD

SEQ ID NO: 58404 - protein, 8 aa, Artificial sequence
  Protein classification predicting sequence
CRLKVGKE

SEQ ID NO: 58405 - protein, 8 aa, Artificial sequence
  Protein classification predicting sequence
GLDGVVCS

SEQ ID NO: 58406 - protein, 9 aa, Artificial sequence
  Protein classification predicting sequence
FKLVTPGIR

SEQ ID NO: 58407 - protein, 6 aa, Artificial sequence
  Protein classification predicting sequence
VTPGIR

SEQ ID NO: 58408 - protein, 7 aa, Artificial sequence
  Protein classification predicting sequence
VKPQVAF

SEQ ID NO: 58409 - protein, 9 aa, Artificial sequence
  Protein classification predicting sequence
GDQKRVMTP

SEQ ID NO: 58410 - protein, 6 aa, Artificial sequence
  Protein classification predicting sequence
GRPITQ

SEQ ID NO: 58411 - protein, 7 aa, Artificial sequence
  Protein classification predicting sequence
DITNAHG

SEQ ID NO: 58412 - protein, 48 aa, Artificial sequence
  Protein classification predicting sequence
ELQQRGFDIFLDLKFHDIPNTAAHAVAAAADLGVWMVNVHASGGARMM

SEQ ID NO: 58413 - protein, 6 aa, Artificial sequence
  Protein classification predicting sequence
KTHIDI

SEQ ID NO: 58414 - protein, 14 aa, Artificial sequence
  Protein classification predicting sequence
GRGADFIIAGRGIY

SEQ ID NO: 58415 - protein, 8 aa, Artificial sequence
  Protein classification predicting sequence
WADITNAH

SEQ ID NO: 58416 - protein, 11 aa, Artificial sequence
  Protein classification predicting sequence
TPGVGLDDKGD

SEQ ID NO: 58417 - protein, 17 aa, Artificial sequence
  Protein classification predicting sequence
GHDVFLDLKLHDIPNTV

SEQ ID NO: 58418 - protein, 14 aa, Artificial sequence
  Protein classification predicting sequence
VFLDLKLHDIPNTV

SEQ ID NO: 58419 - protein, 10 aa, Artificial sequence
  Protein classification predicting sequence
EQNIQTSIEE

SEQ ID NO: 58420 - protein, 6 aa, Artificial sequence
  Protein classification predicting sequence
ADIGNT

SEQ ID NO: 58421 - protein, 7 aa, Artificial sequence
  Protein classification predicting sequence
LGPYICL

SEQ ID NO: 58422 - protein, 6 aa, Artificial sequence
  Protein classification predicting sequence
LGQQYR

SEQ ID NO: 58423 - protein, 10 aa, Artificial sequence
  Protein classification predicting sequence
DITNAHGVTG

SEQ ID NO: 58424 - protein, 6 aa, Artificial sequence
  Protein classification predicting sequence
GMELFY

SEQ ID NO: 58425 - protein, 18 aa, Artificial sequence
  Protein classification predicting sequence
LGHSVFLDLKLHDIPNTV

SEQ ID NO: 58426 - protein, 7 aa, Artificial sequence
  Protein classification predicting sequence
NVHAAGG

SEQ ID NO: 58427 - protein, 11 aa, Artificial sequence
  Protein classification predicting sequence
NVHAAGGVEMM

SEQ ID NO: 58428 - protein, 6 aa, Artificial sequence
  Protein classification predicting sequence
TQLTST

SEQ ID NO: 58429 - protein, 6 aa, Artificial sequence
  Protein classification predicting sequence
MVNVHA

SEQ ID NO: 58430 - protein, 10 aa, Artificial sequence
  Protein classification predicting sequence
SLLESVLHYS

SEQ ID NO: 58431 - protein, 10 aa, Artificial sequence
  Protein classification predicting sequence
VDAIKVGYPL

SEQ ID NO: 58432 - protein, 7 aa, Artificial sequence
  Protein classification predicting sequence
IVGRSIY

SEQ ID NO: 58433 - protein, 7 aa, Artificial sequence
  Protein classification predicting sequence
GVVVGAT

SEQ ID NO: 58434 - protein, 6 aa, Artificial sequence
  Protein classification predicting sequence
IIALDF

SEQ ID NO: 58435 - protein, 8 aa, Artificial sequence
  Protein classification predicting sequence
VLNYAKLA

SEQ ID NO: 58436 - protein, 9 aa, Artificial sequence
  Protein classification predicting sequence
GIDPHPELL

SEQ ID NO: 58437 - protein, 5 aa, Artificial sequence
  Protein classification predicting sequence
GVWMV

SEQ ID NO: 58438 - protein, 18 aa, Artificial sequence
  Protein classification predicting sequence
PLLIGVTVLTSMEQSDLA

SEQ ID NO: 58439 - protein, 8 aa, Artificial sequence
  Protein classification predicting sequence
DQRRIMTP

SEQ ID NO: 58440 - protein, 12 aa, Artificial sequence
  Protein classification predicting sequence
GPSIVVLKTHYD

SEQ ID NO: 58441 - protein, 15 aa, Artificial sequence
  Protein classification predicting sequence
LARKHGFLIFEDRKF

SEQ ID NO: 58442 - protein, 6 aa, Artificial sequence
  Protein classification predicting sequence
TVQKQY

SEQ ID NO: 58443 - protein, 8 aa, Artificial sequence
  Protein classification predicting sequence
FIHMTPGC

SEQ ID NO: 58444 - protein, 12 aa, Artificial sequence
  Protein classification predicting sequence
FLDLKFHDIPNT

SEQ ID NO: 58445 - protein, 9 aa, Artificial sequence
  Protein classification predicting sequence
GLDGVVCSA

SEQ ID NO: 58446 - protein, 9 aa, Artificial sequence
  Protein classification predicting sequence
FLTLTPGIR

SEQ ID NO: 58447 - protein, 10 aa, Artificial sequence
  Protein classification predicting sequence
GIVKGLKEAA

SEQ ID NO: 58448 - protein, 9 aa, Artificial sequence
  Protein classification predicting sequence
KGDKLGQQY

SEQ ID NO: 58449 - protein, 10 aa, Artificial sequence
  Protein classification predicting sequence
EDFVVFTTGV

SEQ ID NO: 58450 - protein, 6 aa, Artificial sequence
  Protein classification predicting sequence
GFVSTR

SEQ ID NO: 58451 - protein, 12 aa, Artificial sequence
  Protein classification predicting sequence
CRLKVGKEMFTL

SEQ ID NO: 58452 - protein, 13 aa, Artificial sequence
  Protein classification predicting sequence
VFLDLKFHDIPNT

SEQ ID NO: 58453 - protein, 8 aa, Artificial sequence
  Protein classification predicting sequence
LAKKHDFL

SEQ ID NO: 58454 - protein, 8 aa, Artificial sequence
  Protein classification predicting sequence
GLKQAAEE

SEQ ID NO: 58455 - protein, 12 aa, Artificial sequence
  Protein classification predicting sequence
LMESKKTNLCAS

SEQ ID NO: 58456 - protein, 10 aa, Artificial sequence
  Protein classification predicting sequence
KTHIDIIDDF

SEQ ID NO: 58457 - protein, 10 aa, Artificial sequence
  Protein classification predicting sequence
WADITNAHGV

SEQ ID NO: 58458 - protein, 8 aa, Artificial sequence
  Protein classification predicting sequence
DITNAHGV

SEQ ID NO: 58459 - protein, 6 aa, Artificial sequence
  Protein classification predicting sequence
VCSPLE

SEQ ID NO: 58460 - protein, 8 aa, Artificial sequence
  Protein classification predicting sequence
GVWMVNVH

SEQ ID NO: 58461 - protein, 14 aa, Artificial sequence
  Protein classification predicting sequence
IIADLKLADIPNTN

SEQ ID NO: 58462 - protein, 12 aa, Artificial sequence
  Protein classification predicting sequence
SMLTLHAYPKAM

SEQ ID NO: 58463 - protein, 10 aa, Artificial sequence
  Protein classification predicting sequence
FLDMKLLDID

SEQ ID NO: 58464 - protein, 6 aa, Artificial sequence
  Protein classification predicting sequence
GDQKRV

SEQ ID NO: 58465 - protein, 8 aa, Artificial sequence
  Protein classification predicting sequence
AVEAARGS

SEQ ID NO: 58466 - protein, 6 aa, Artificial sequence
  Protein classification predicting sequence
VVGRPI

SEQ ID NO: 58467 - protein, 6 aa, Artificial sequence
  Protein classification predicting sequence
PGVGLD

SEQ ID NO: 58468 - protein, 28 aa, Artificial sequence
  Protein classification predicting sequence
EVGLPLGRGLLLLAEMSSKGALTKGSYT

SEQ ID NO: 58469 - protein, 23 aa, Artificial sequence
  Protein classification predicting sequence
EPRGLLMLAELSSKGSLAHGEYT

SEQ ID NO: 58470 - protein, 8 aa, Artificial sequence
  Protein classification predicting sequence
KKTNLCAS

SEQ ID NO: 58471 - protein, 7 aa, Artificial sequence
  Protein classification predicting sequence
GEYTEKT

SEQ ID NO: 58472 - protein, 6 aa, Artificial sequence
  Protein classification predicting sequence
SDKEFV

SEQ ID NO: 58473 - protein, 7 aa, Artificial sequence
  Protein classification predicting sequence
LQQRGFD

SEQ ID NO: 58474 - protein, 7 aa, Artificial sequence
  Protein classification predicting sequence
VTVLTSM

SEQ ID NO: 58475 - protein, 9 aa, Artificial sequence
  Protein classification predicting sequence
DLGVTLSPA

SEQ ID NO: 58476 - protein, 6 aa, Artificial sequence
  Protein classification predicting sequence
GPYICL

SEQ ID NO: 58477 - protein, 16 aa, Artificial sequence
  Protein classification predicting sequence
FLIFEDRKFADIGNTV

SEQ ID NO: 58478 - protein, 7 aa, Artificial sequence
  Protein classification predicting sequence
LQYSSGV

SEQ ID NO: 58479 - protein, 12 aa, Artificial sequence
  Protein classification predicting sequence
KIASWSHITNAH

SEQ ID NO: 58480 - protein, 13 aa, Artificial sequence
  Protein classification predicting sequence
PLGRGLLLLAEMS

SEQ ID NO: 58481 - protein, 6 aa, Artificial sequence
  Protein classification predicting sequence
GQQYRT

SEQ ID NO: 58482 - protein, 20 aa, Artificial sequence
  Protein classification predicting sequence
EVGLPLGRGLLLLAEMSSKG

SEQ ID NO: 58483 - protein, 7 aa, Artificial sequence
  Protein classification predicting sequence
SSKGSLA

SEQ ID NO: 58484 - protein, 7 aa, Artificial sequence
  Protein classification predicting sequence
VALDYDN

SEQ ID NO: 58485 - protein, 10 aa, Artificial sequence
  Protein classification predicting sequence
LDGVVCSAQE

SEQ ID NO: 58486 - protein, 10 aa, Artificial sequence
  Protein classification predicting sequence
KTHIDIVSDF

SEQ ID NO: 58487 - protein, 9 aa, Artificial sequence
  Protein classification predicting sequence
GIVEALAQT

SEQ ID NO: 58488 - protein, 8 aa, Artificial sequence
  Protein classification predicting sequence
RGLLMLAE

SEQ ID NO: 58489 - protein, 6 aa, Artificial sequence
  Protein classification predicting sequence
FVIGFI

SEQ ID NO: 58490 - protein, 7 aa, Artificial sequence
  Protein classification predicting sequence
VFTTGVN

SEQ ID NO: 58491 - protein, 7 aa, Artificial sequence
  Protein classification predicting sequence
KGLRKHN

SEQ ID NO: 58492 - protein, 13 aa, Artificial sequence
  Protein classification predicting sequence
FLKVTPGIRPKGA

SEQ ID NO: 58493 - protein, 15 aa, Artificial sequence
  Protein classification predicting sequence
LGSTHIVVGRPITQS

SEQ ID NO: 58494 - protein, 10 aa, Artificial sequence
  Protein classification predicting sequence
SYHKIKESWL

SEQ ID NO: 58495 - protein, 7 aa, Artificial sequence
  Protein classification predicting sequence
PIIALDF

SEQ ID NO: 58496 - protein, 8 aa, Artificial sequence
  Protein classification predicting sequence
RYIKSLGH

SEQ ID NO: 58497 - protein, 22 aa, Artificial sequence
  Protein classification predicting sequence
DMTNVHAAGGVEMMKAAREGLG

SEQ ID NO: 58498 - protein, 15 aa, Artificial sequence
  Protein classification predicting sequence
EEKLYVKIGMELYYA

SEQ ID NO: 58499 - protein, 13 aa, Artificial sequence
  Protein classification predicting sequence
FLDLKLHDIPNTV

SEQ ID NO: 58500 - protein, 17 aa, Artificial sequence
  Protein classification predicting sequence
FLDLKLHDIPNTVKSAM

SEQ ID NO: 58501 - protein, 10 aa, Artificial sequence
  Protein classification predicting sequence
AAYQAIKAEW

SEQ ID NO: 58502 - protein, 8 aa, Artificial sequence
  Protein classification predicting sequence
KAAREGLG

SEQ ID NO: 58503 - protein, 6 aa, Artificial sequence
  Protein classification predicting sequence
VCSAQE

SEQ ID NO: 58504 - protein, 7 aa, Artificial sequence
  Protein classification predicting sequence
GRPITQA

SEQ ID NO: 58505 - protein, 7 aa, Artificial sequence
  Protein classification predicting sequence
PGVGAQG

SEQ ID NO: 58506 - protein, 7 aa, Artificial sequence
  Protein classification predicting sequence
KVGLELF

SEQ ID NO: 58507 - protein, 7 aa, Artificial sequence
  Protein classification predicting sequence
ADIPNTN

SEQ ID NO: 58508 - protein, 8 aa, Artificial sequence
  Protein classification predicting sequence
KRGDIGST

SEQ ID NO: 58509 - protein, 8 aa, Artificial sequence
  Protein classification predicting sequence
DFKVADIP

SEQ ID NO: 58510 - protein, 11 aa, Artificial sequence
  Protein classification predicting sequence
RGLLILAQMSS

SEQ ID NO: 58511 - protein, 8 aa, Artificial sequence
  Protein classification predicting sequence
MERKQTNL

SEQ ID NO: 58512 - protein, 15 aa, Artificial sequence
  Protein classification predicting sequence
CRLKVGKEMFTLFGP

SEQ ID NO: 58513 - protein, 45 aa, Artificial sequence
  Protein classification predicting sequence
CRLKVGKEMFTLFGPDFVRELHKRGFSVFLDLKFHDIPNTCSKAV

SEQ ID NO: 58514 - protein, 11 aa, Artificial sequence
  Protein classification predicting sequence
ASREILEPYGK

SEQ ID NO: 58515 - protein, 8 aa, Artificial sequence
  Protein classification predicting sequence
VTVLTSME

SEQ ID NO: 58516 - protein, 8 aa, Artificial sequence
  Protein classification predicting sequence
RLATLTKN

SEQ ID NO: 58517 - protein, 10 aa, Artificial sequence
  Protein classification predicting sequence
FKLVTPGIRP

SEQ ID NO: 58518 - protein, 9 aa, Artificial sequence
  Protein classification predicting sequence
RLIFALDVP

SEQ ID NO: 58519 - protein, 10 aa, Artificial sequence
  Protein classification predicting sequence
GFIAQRDMGG

SEQ ID NO: 58520 - protein, 8 aa, Artificial sequence
  Protein classification predicting sequence
DVTTTKEL

SEQ ID NO: 58521 - protein, 9 aa, Artificial sequence
  Protein classification predicting sequence
KGSLATGEY

SEQ ID NO: 58522 - protein, 17 aa, Artificial sequence
  Protein classification predicting sequence
FEDRKFADIGNTVKLQY

SEQ ID NO: 58523 - protein, 13 aa, Artificial sequence
  Protein classification predicting sequence
LGVWMVNVHASGG

SEQ ID NO: 58524 - protein, 10 aa, Artificial sequence
  Protein classification predicting sequence
GVDYMVIGRP

SEQ ID NO: 58525 - protein, 11 aa, Artificial sequence
  Protein classification predicting sequence
DWLIMTPGVGL

SEQ ID NO: 58526 - protein, 6 aa, Artificial sequence
  Protein classification predicting sequence
AGVKEY

SEQ ID NO: 58527 - protein, 6 aa, Artificial sequence
  Protein classification predicting sequence
IQVERD

SEQ ID NO: 58528 - protein, 6 aa, Artificial sequence
  Protein classification predicting sequence
KGHYLN

SEQ ID NO: 58529 - protein, 5 aa, Artificial sequence
  Protein classification predicting sequence
CRDNG

SEQ ID NO: 58530 - protein, 8 aa, Artificial sequence
  Protein classification predicting sequence
HGIHFRVL

SEQ ID NO: 58531 - protein, 11 aa, Artificial sequence
  Protein classification predicting sequence
AYPIDLFEEGS

SEQ ID NO: 58532 - protein, 6 aa, Artificial sequence
  Protein classification predicting sequence
TPEEMY

SEQ ID NO: 58533 - protein, 6 aa, Artificial sequence
  Protein classification predicting sequence
PIVMHD

SEQ ID NO: 58534 - protein, 11 aa, Artificial sequence
  Protein classification predicting sequence
HSGTVVGKLEG

SEQ ID NO: 58535 - protein, 14 aa, Artificial sequence
  Protein classification predicting sequence
IFGDDSVLQFGGGT

SEQ ID NO: 58536 - protein, 8 aa, Artificial sequence
  Protein classification predicting sequence
VLQFGGGT

SEQ ID NO: 58537 - protein, 8 aa, Artificial sequence
  Protein classification predicting sequence
ALFRITPQ

SEQ ID NO: 58538 - protein, 7 aa, Artificial sequence
  Protein classification predicting sequence
GVDPIEA

SEQ ID NO: 58539 - protein, 7 aa, Artificial sequence
  Protein classification predicting sequence
EAAAAVA

SEQ ID NO: 58540 - protein, 21 aa, Artificial sequence
  Protein classification predicting sequence
EAAAAVAGESSTATWTVVWTD

SEQ ID NO: 58541 - protein, 6 aa, Artificial sequence
  Protein classification predicting sequence
RLEDMR

SEQ ID NO: 58542 - protein, 6 aa, Artificial sequence
  Protein classification predicting sequence
RQKNHG

SEQ ID NO: 58543 - protein, 6 aa, Artificial sequence
  Protein classification predicting sequence
VGKLEG

SEQ ID NO: 58544 - protein, 6 aa, Artificial sequence
  Protein classification predicting sequence
GQMHQL

SEQ ID NO: 58545 - protein, 6 aa, Artificial sequence
  Protein classification predicting sequence
AGVKDY

SEQ ID NO: 58546 - protein, 8 aa, Artificial sequence
  Protein classification predicting sequence
TWTTVWTD

SEQ ID NO: 58547 - protein, 8 aa, Artificial sequence
  Protein classification predicting sequence
RWRDRFLF

SEQ ID NO: 58548 - protein, 6 aa, Artificial sequence
  Protein classification predicting sequence
FRVLAK

SEQ ID NO: 58549 - protein, 6 aa, Artificial sequence
  Protein classification predicting sequence
RAEFAK

SEQ ID NO: 58550 - protein, 9 aa, Artificial sequence
  Protein classification predicting sequence
VGKLEGDPL

SEQ ID NO: 58551 - protein, 6 aa, Artificial sequence
  Protein classification predicting sequence
ARNEGR

SEQ ID NO: 58552 - protein, 11 aa, Artificial sequence
  Protein classification predicting sequence
GPPHGIQVERD

SEQ ID NO: 58553 - protein, 7 aa, Artificial sequence
  Protein classification predicting sequence
WRDRFLF

SEQ ID NO: 58554 - protein, 6 aa, Artificial sequence
  Protein classification predicting sequence
LARWCR

SEQ ID NO: 58555 - protein, 11 aa, Artificial sequence
  Protein classification predicting sequence
LLHIHRAMHAV

SEQ ID NO: 58556 - protein, 13 aa, Artificial sequence
  Protein classification predicting sequence
DRNPHHGIHFRVL

SEQ ID NO: 58557 - protein, 8 aa, Artificial sequence
  Protein classification predicting sequence
LRLSGGDH

SEQ ID NO: 58558 - protein, 11 aa, Artificial sequence
  Protein classification predicting sequence
AYPLDLFEEGS

SEQ ID NO: 58559 - protein, 7 aa, Artificial sequence
  Protein classification predicting sequence
GIQVERD

SEQ ID NO: 58560 - protein, 12 aa, Artificial sequence
  Protein classification predicting sequence
LGATVKPKLGLS

SEQ ID NO: 58561 - protein, 5 aa, Artificial sequence
  Protein classification predicting sequence
TCEEM

SEQ ID NO: 58562 - protein, 7 aa, Artificial sequence
  Protein classification predicting sequence
RAEFAKE

SEQ ID NO: 58563 - protein, 6 aa, Artificial sequence
  Protein classification predicting sequence
PIIMHD

SEQ ID NO: 58564 - protein, 10 aa, Artificial sequence
  Protein classification predicting sequence
LRLSGGDHLH

SEQ ID NO: 58565 - protein, 6 aa, Artificial sequence
  Protein classification predicting sequence
TLGFVD

SEQ ID NO: 58566 - protein, 8 aa, Artificial sequence
  Protein classification predicting sequence
GAAANRVA

SEQ ID NO: 58567 - protein, 6 aa, Artificial sequence
  Protein classification predicting sequence
RWRDRF

SEQ ID NO: 58568 - protein, 6 aa, Artificial sequence
  Protein classification predicting sequence
GFTANT

SEQ ID NO: 58569 - protein, 6 aa, Artificial sequence
  Protein classification predicting sequence
LANWCR

SEQ ID NO: 58570 - protein, 10 aa, Artificial sequence
  Protein classification predicting sequence
HGIHFRVLAK

SEQ ID NO: 58571 - protein, 10 aa, Artificial sequence
  Protein classification predicting sequence
ANRVALEACV

SEQ ID NO: 58572 - protein, 6 aa, Artificial sequence
  Protein classification predicting sequence
TAIQSM

SEQ ID NO: 58573 - protein, 15 aa, Artificial sequence
  Protein classification predicting sequence
TTDDFTRGVDALVYE

SEQ ID NO: 58574 - protein, 7 aa, Artificial sequence
  Protein classification predicting sequence
GVDALVY

SEQ ID NO: 58575 - protein, 12 aa, Artificial sequence
  Protein classification predicting sequence
GTIIKPKLGLRP

SEQ ID NO: 58576 - protein, 14 aa, Artificial sequence
  Protein classification predicting sequence
LHYHRAGHGAVTSP

SEQ ID NO: 58577 - protein, 8 aa, Artificial sequence
  Protein classification predicting sequence
ARAFESFP

SEQ ID NO: 58578 - protein, 6 aa, Artificial sequence
  Protein classification predicting sequence
RNTYWE

SEQ ID NO: 58579 - protein, 26 aa, Artificial sequence
  Protein classification predicting sequence
NKYGRPLLGCTIKPKLGLSAKNYGRA

SEQ ID NO: 58580 - protein, 9 aa, Artificial sequence
  Protein classification predicting sequence
LLHIHRAMH

SEQ ID NO: 58581 - protein, 7 aa, Artificial sequence
  Protein classification predicting sequence
VASGGIH

SEQ ID NO: 58582 - protein, 8 aa, Artificial sequence
  Protein classification predicting sequence
AAESSTGT

SEQ ID NO: 58583 - protein, 8 aa, Artificial sequence
  Protein classification predicting sequence
GNNQGMGD

SEQ ID NO: 58584 - protein, 14 aa, Artificial sequence
  Protein classification predicting sequence
FWLGGDFIKNDEPQ

SEQ ID NO: 58585 - protein, 6 aa, Artificial sequence
  Protein classification predicting sequence
EEMIKR

SEQ ID NO: 58586 - protein, 6 aa, Artificial sequence
  Protein classification predicting sequence
HRAGHG

SEQ ID NO: 58587 - protein, 8 aa, Artificial sequence
  Protein classification predicting sequence
FCYVAYDL

SEQ ID NO: 58588 - protein, 23 aa, Artificial sequence
  Protein classification predicting sequence
LFEEGSIANLTASIIGNVFSFKP

SEQ ID NO: 58589 - protein, 8 aa, Artificial sequence
  Protein classification predicting sequence
KPKLGLSG

SEQ ID NO: 58590 - protein, 16 aa, Artificial sequence
  Protein classification predicting sequence
NYGRVVYEGLKGGLDF

SEQ ID NO: 58591 - protein, 10 aa, Artificial sequence
  Protein classification predicting sequence
WCRQNDMILH

SEQ ID NO: 58592 - protein, 16 aa, Artificial sequence
  Protein classification predicting sequence
SFRVIAKWLRLAGVDH

SEQ ID NO: 58593 - protein, 6 aa, Artificial sequence
  Protein classification predicting sequence
FFDQDW

SEQ ID NO: 58594 - protein, 20 aa, Artificial sequence
  Protein classification predicting sequence
QFIAYVAYPLDLFEEGSVTN

SEQ ID NO: 58595 - protein, 11 aa, Artificial sequence
  Protein classification predicting sequence
GTVVGKLEGER

SEQ ID NO: 58596 - protein, 21 aa, Artificial sequence
  Protein classification predicting sequence
TLGFVDLLRDDFIEKDRSRGI

SEQ ID NO: 58597 - protein, 7 aa, Artificial sequence
  Protein classification predicting sequence
FTQDWVS

SEQ ID NO: 58598 - protein, 7 aa, Artificial sequence
  Protein classification predicting sequence
TPQPGVP

SEQ ID NO: 58599 - protein, 7 aa, Artificial sequence
  Protein classification predicting sequence
SGGDHIH

SEQ ID NO: 58600 - protein, 7 aa, Artificial sequence
  Protein classification predicting sequence
RGIYFTQ

SEQ ID NO: 58601 - protein, 25 aa, Artificial sequence
  Protein classification predicting sequence
FTSIVGNVFGFKALRALRLEDLRIP

SEQ ID NO: 58602 - protein, 18 aa, Artificial sequence
  Protein classification predicting sequence
HFRVLAKALRMSGGDHIH

SEQ ID NO: 58603 - protein, 6 aa, Artificial sequence
  Protein classification predicting sequence
YKGRAY

SEQ ID NO: 58604 - protein, 12 aa, Artificial sequence
  Protein classification predicting sequence
TSLVGNVFGFKA

SEQ ID NO: 58605 - protein, 7 aa, Artificial sequence
  Protein classification predicting sequence
RALRLED

SEQ ID NO: 58606 - protein, 23 aa, Artificial sequence
  Protein classification predicting sequence
KRAEYAKEIGAPIIMHDYITGGF

SEQ ID NO: 58607 - protein, 9 aa, Artificial sequence
  Protein classification predicting sequence
MHDYITGGF

SEQ ID NO: 58608 - protein, 8 aa, Artificial sequence
  Protein classification predicting sequence
TGGFTANT

SEQ ID NO: 58609 - protein, 11 aa, Artificial sequence
  Protein classification predicting sequence
GTVVGKLEGDR

SEQ ID NO: 58610 - protein, 12 aa, Artificial sequence
  Protein classification predicting sequence
SGGIHVWHMPAL

SEQ ID NO: 58611 - protein, 8 aa, Artificial sequence
  Protein classification predicting sequence
LTYYTPEY

SEQ ID NO: 58612 - protein, 13 aa, Artificial sequence
  Protein classification predicting sequence
AMHAVIDRQKNHG

SEQ ID NO: 58613 - protein, 7 aa, Artificial sequence
  Protein classification predicting sequence
RGIFFTQ

SEQ ID NO: 58614 - protein, 10 aa, Artificial sequence
  Protein classification predicting sequence
LTYYTPEYET

SEQ ID NO: 58615 - protein, 22 aa, Artificial sequence
  Protein classification predicting sequence
QAETGEIKGHYLNATAGTCEEM

SEQ ID NO: 58616 - protein, 10 aa, Artificial sequence
  Protein classification predicting sequence
HFRVLAKALR

SEQ ID NO: 58617 - protein, 12 aa, Artificial sequence
  Protein classification predicting sequence
GTVVGKLEGERE

SEQ ID NO: 58618 - protein, 6 aa, Artificial sequence
  Protein classification predicting sequence
LTYYTP

SEQ ID NO: 58619 - protein, 9 aa, Artificial sequence
  Protein classification predicting sequence
LDRYKGRCY

SEQ ID NO: 58620 - protein, 8 aa, Artificial sequence
  Protein classification predicting sequence
KDDENINS

SEQ ID NO: 58621 - protein, 6 aa, Artificial sequence
  Protein classification predicting sequence
MHDYLT

SEQ ID NO: 58622 - protein, 6 aa, Artificial sequence
  Protein classification predicting sequence
WCRDNG

SEQ ID NO: 58623 - protein, 19 aa, Artificial sequence
  Protein classification predicting sequence
LLHIHRAMHAVIDRQKNHG

SEQ ID NO: 58624 - protein, 7 aa, Artificial sequence
  Protein classification predicting sequence
GFVDLLR

SEQ ID NO: 58625 - protein, 14 aa, Artificial sequence
  Protein classification predicting sequence
VASGGIHVWHMPAL

SEQ ID NO: 58626 - protein, 7 aa, Artificial sequence
  Protein classification predicting sequence
KWSPELA

SEQ ID NO: 58627 - protein, 8 aa, Artificial sequence
  Protein classification predicting sequence
KSQAETGE

SEQ ID NO: 58628 - protein, 16 aa, Artificial sequence
  Protein classification predicting sequence
HFRVLAKALRMSGGDH

SEQ ID NO: 58629 - protein, 13 aa, Artificial sequence
  Protein classification predicting sequence
YETKDTDILAAFR

SEQ ID NO: 58630 - protein, 16 aa, Artificial sequence
  Protein classification predicting sequence
RYESGVIPYAKMGYWD

SEQ ID NO: 58631 - protein, 15 aa, Artificial sequence
  Protein classification predicting sequence
AGESSTATWTVVWTD

SEQ ID NO: 58632 - protein, 6 aa, Artificial sequence
  Protein classification predicting sequence
QGPATG

SEQ ID NO: 58633 - protein, 8 aa, Artificial sequence
  Protein classification predicting sequence
PVASGGIH

SEQ ID NO: 58634 - protein, 7 aa, Artificial sequence
  Protein classification predicting sequence
ANRVALE

SEQ ID NO: 58635 - protein, 19 aa, Artificial sequence
  Protein classification predicting sequence
DAAKTCGPLQTALDLWKDI

SEQ ID NO: 58636 - protein, 10 aa, Artificial sequence
  Protein classification predicting sequence
ALRLEDLRIP

SEQ ID NO: 58637 - protein, 13 aa, Artificial sequence
  Protein classification predicting sequence
ALRLEDLRIPPAY

SEQ ID NO: 58638 - protein, 8 aa, Artificial sequence
  Protein classification predicting sequence
EKDRSRGI

SEQ ID NO: 58639 - protein, 6 aa, Artificial sequence
  Protein classification predicting sequence
HRAMHA

SEQ ID NO: 58640 - protein, 11 aa, Artificial sequence
  Protein classification predicting sequence
HRAMHAAFTRN

SEQ ID NO: 58641 - protein, 7 aa, Artificial sequence
  Protein classification predicting sequence
SGGLHPG

SEQ ID NO: 58642 - protein, 6 aa, Artificial sequence
  Protein classification predicting sequence
AYIKTF

SEQ ID NO: 58643 - protein, 18 aa, Artificial sequence
  Protein classification predicting sequence
KRAVFARELGVPIVMHDY

SEQ ID NO: 58644 - protein, 24 aa, Artificial sequence
  Protein classification predicting sequence
GTVVGKLEGERDITLGFVDLLRDD

SEQ ID NO: 58645 - protein, 9 aa, Artificial sequence
  Protein classification predicting sequence
LFEEGSVTN

SEQ ID NO: 58646 - protein, 6 aa, Artificial sequence
  Protein classification predicting sequence
VERDKL

SEQ ID NO: 58647 - protein, 7 aa, Artificial sequence
  Protein classification predicting sequence
EEMYKRA

SEQ ID NO: 58648 - protein, 18 aa, Artificial sequence
  Protein classification predicting sequence
HFRVLAKALRLSGGDHIH

SEQ ID NO: 58649 - protein, 9 aa, Artificial sequence
  Protein classification predicting sequence
TETKASVGF

SEQ ID NO: 58650 - protein, 13 aa, Artificial sequence
  Protein classification predicting sequence
AGVKDYKLTYYTP

SEQ ID NO: 58651 - protein, 29 aa, Artificial sequence
  Protein classification predicting sequence
YECLRGGLDFTKDDENVNSQPFMRWRDRF

SEQ ID NO: 58652 - protein, 10 aa, Artificial sequence
  Protein classification predicting sequence
KRAVFARELG

SEQ ID NO: 58653 - protein, 8 aa, Artificial sequence
  Protein classification predicting sequence
TDILAAFR

SEQ ID NO: 58654 - protein, 11 aa, Artificial sequence
  Protein classification predicting sequence
RALRLEDLRIP

SEQ ID NO: 58655 - protein, 20 aa, Artificial sequence
  Protein classification predicting sequence
KSQAETGEIKGHYLNATAGT

SEQ ID NO: 58656 - protein, 18 aa, Artificial sequence
  Protein classification predicting sequence
QAETGEIKGHYLNATAGT

SEQ ID NO: 58657 - protein, 11 aa, Artificial sequence
  Protein classification predicting sequence
TLGFVDLLRDD

SEQ ID NO: 58658 - protein, 6 aa, Artificial sequence
  Protein classification predicting sequence
AYVKTF

SEQ ID NO: 58659 - protein, 7 aa, Artificial sequence
  Protein classification predicting sequence
PKTETKA

SEQ ID NO: 58660 - protein, 15 aa, Artificial sequence
  Protein classification predicting sequence
ELGVPIIMHDYLTGG

SEQ ID NO: 58661 - protein, 8 aa, Artificial sequence
  Protein classification predicting sequence
MHDYLTGG

SEQ ID NO: 58662 - protein, 6 aa, Artificial sequence
  Protein classification predicting sequence
EIFGDD

SEQ ID NO: 58663 - protein, 13 aa, Artificial sequence
  Protein classification predicting sequence
ITLGFVDLLRDDF

SEQ ID NO: 58664 - protein, 7 aa, Artificial sequence
  Protein classification predicting sequence
IKFEFPA

SEQ ID NO: 58665 - protein, 21 aa, Artificial sequence
  Protein classification predicting sequence
YETKDTDILAAFRVTPQPGVP

SEQ ID NO: 58666 - protein, 8 aa, Artificial sequence
  Protein classification predicting sequence
LTYYTPDY

SEQ ID NO: 58667 - protein, 27 aa, Artificial sequence
  Protein classification predicting sequence
TKDTDILAAFRVTPQPGVPPEEAGAAV

SEQ ID NO: 58668 - protein, 27 aa, Artificial sequence
  Protein classification predicting sequence
AESSTGTWTTVWTDGLTSLDRYKGRCY

SEQ ID NO: 58669 - protein, 16 aa, Artificial sequence
  Protein classification predicting sequence
YVAYPLDLFEEGSVTN

SEQ ID NO: 58670 - protein, 16 aa, Artificial sequence
  Protein classification predicting sequence
QAETGEIKGHYLNATA

SEQ ID NO: 58671 - protein, 15 aa, Artificial sequence
  Protein classification predicting sequence
QFIAYVAYPLDLFEE

SEQ ID NO: 58672 - protein, 13 aa, Artificial sequence
  Protein classification predicting sequence
IAYVAYPLDLFEE

SEQ ID NO: 58673 - protein, 29 aa, Artificial sequence
  Protein classification predicting sequence
VTNMFTSIVGNVFGFKALRALRLEDLRIP

SEQ ID NO: 58674 - protein, 6 aa, Artificial sequence
  Protein classification predicting sequence
KTFQGP

SEQ ID NO: 58675 - protein, 20 aa, Artificial sequence
  Protein classification predicting sequence
KWSPELAAACEVWKEIKFEF

SEQ ID NO: 58676 - protein, 21 aa, Artificial sequence
  Protein classification predicting sequence
HGMHFRVLAKALRMSGGDHIH

SEQ ID NO: 58677 - protein, 33 aa, Artificial sequence
  Protein classification predicting sequence
HGMHFRVLAKALRMSGGDHIHAGTVVGKLEGER

SEQ ID NO: 58678 - protein, 16 aa, Artificial sequence
  Protein classification predicting sequence
GFKAGVKDYRLTYYTP

SEQ ID NO: 58679 - protein, 21 aa, Artificial sequence
  Protein classification predicting sequence
ANRVALEACVQARNEGRDLAR

SEQ ID NO: 58680 - protein, 8 aa, Artificial sequence
  Protein classification predicting sequence
KAQAETGE

SEQ ID NO: 58681 - protein, 11 aa, Artificial sequence
  Protein classification predicting sequence
KGHYLNATAGT

SEQ ID NO: 58682 - protein, 8 aa, Artificial sequence
  Protein classification predicting sequence
LRMSGGDH

SEQ ID NO: 58683 - protein, 18 aa, Artificial sequence
  Protein classification predicting sequence
LQFGGGTLGHPWGNAPGA

SEQ ID NO: 58684 - protein, 6 aa, Artificial sequence
  Protein classification predicting sequence
EFDTID

SEQ ID NO: 58685 - protein, 10 aa, Artificial sequence
  Protein classification predicting sequence
DLFEEGSVTN

SEQ ID NO: 58686 - protein, 9 aa, Artificial sequence
  Protein classification predicting sequence
ANRVALEAC

SEQ ID NO: 58687 - protein, 9 aa, Artificial sequence
  Protein classification predicting sequence
FRVLAKALR

SEQ ID NO: 58688 - protein, 17 aa, Artificial sequence
  Protein classification predicting sequence
SGGDHLHSGTVVGKLEG

SEQ ID NO: 58689 - protein, 9 aa, Artificial sequence
  Protein classification predicting sequence
MPVASGGIH

SEQ ID NO: 58690 - protein, 16 aa, Artificial sequence
  Protein classification predicting sequence
MPVASGGIHVWHMPAL

SEQ ID NO: 58691 - protein, 9 aa, Artificial sequence
  Protein classification predicting sequence
EGNEIIREA

SEQ ID NO: 58692 - protein, 21 aa, Artificial sequence
  Protein classification predicting sequence
YVAYPLDLFEEGSVTNMFTSI

SEQ ID NO: 58693 - protein, 20 aa, Artificial sequence
  Protein classification predicting sequence
GNVFGFKALRALRLEDLRIP

SEQ ID NO: 58694 - protein, 15 aa, Artificial sequence
  Protein classification predicting sequence
KGHYLNATAGTCEEM

SEQ ID NO: 58695 - protein, 9 aa, Artificial sequence
  Protein classification predicting sequence
ARNEGRDLA

SEQ ID NO: 58696 - protein, 9 aa, Artificial sequence
  Protein classification predicting sequence
GFKAGVKDY

SEQ ID NO: 58697 - protein, 30 aa, Artificial sequence
  Protein classification predicting sequence
HFRVLAKALRMSGGDHIHAGTVVGKLEGER

SEQ ID NO: 58698 - protein, 10 aa, Artificial sequence
  Protein classification predicting sequence
KSQAETGEIK

SEQ ID NO: 58699 - protein, 8 aa, Artificial sequence
  Protein classification predicting sequence
QAETGEIK

SEQ ID NO: 58700 - protein, 15 aa, Artificial sequence
  Protein classification predicting sequence
LNATAGTCEEMMKRA

SEQ ID NO: 58701 - protein, 20 aa, Artificial sequence
  Protein classification predicting sequence
QYIAYVAYPLDLFEEGSVTN

SEQ ID NO: 58702 - protein, 15 aa, Artificial sequence
  Protein classification predicting sequence
ITLGFVDLLRDDFVE

SEQ ID NO: 58703 - protein, 8 aa, Artificial sequence
  Protein classification predicting sequence
DRSRGIYF

SEQ ID NO: 58704 - protein, 5 aa, Artificial sequence
  Protein classification predicting sequence
QDWVS

SEQ ID NO: 58705 - protein, 8 aa, Artificial sequence
  Protein classification predicting sequence
GNVFGFKA

SEQ ID NO: 58706 - protein, 11 aa, Artificial sequence
  Protein classification predicting sequence
YLKTFQGPATG

SEQ ID NO: 58707 - protein, 21 aa, Artificial sequence
  Protein classification predicting sequence
FLKDDENINSQPFMRWRERFL

SEQ ID NO: 58708 - protein, 9 aa, Artificial sequence
  Protein classification predicting sequence
NRASAATGE

SEQ ID NO: 58709 - protein, 6 aa, Artificial sequence
  Protein classification predicting sequence
TMEEMY

SEQ ID NO: 58710 - protein, 19 aa, Artificial sequence
  Protein classification predicting sequence
MIDLVIGYTAIQSMAIWAR

SEQ ID NO: 58711 - protein, 18 aa, Artificial sequence
  Protein classification predicting sequence
GVDHIHAGTVVGKLEGDP

SEQ ID NO: 58712 - protein, 13 aa, Artificial sequence
  Protein classification predicting sequence
PVASGGIHAGQMH

SEQ ID NO: 58713 - protein, 7 aa, Artificial sequence
  Protein classification predicting sequence
LDLWKDI

SEQ ID NO: 58714 - protein, 17 aa, Artificial sequence
  Protein classification predicting sequence
YVAYPLDLFEEGSVTNM

SEQ ID NO: 58715 - protein, 6 aa, Artificial sequence
  Protein classification predicting sequence
DRSRGI

SEQ ID NO: 58716 - protein, 5 aa, Artificial sequence
  Protein classification predicting sequence
FTQDW

SEQ ID NO: 58717 - protein, 6 aa, Artificial sequence
  Protein classification predicting sequence
WHMPAL

SEQ ID NO: 58718 - protein, 6 aa, Artificial sequence
  Protein classification predicting sequence
IFGDDS

SEQ ID NO: 58719 - protein, 20 aa, Artificial sequence
  Protein classification predicting sequence
AGESSTATWTVVWTDLLTAC

SEQ ID NO: 58720 - protein, 11 aa, Artificial sequence
  Protein classification predicting sequence
TAATMEEVYKR

SEQ ID NO: 58721 - protein, 11 aa, Artificial sequence
  Protein classification predicting sequence
LHLHRAGNSTY

SEQ ID NO: 58722 - protein, 33 aa, Artificial sequence
  Protein classification predicting sequence
YLGDDVVLQFGGGTIGHPDGIQAGATANRVALE

SEQ ID NO: 58723 - protein, 8 aa, Artificial sequence
  Protein classification predicting sequence
MVLARNEG

SEQ ID NO: 58724 - protein, 6 aa, Artificial sequence
  Protein classification predicting sequence
GPQILR

SEQ ID NO: 58725 - protein, 9 aa, Artificial sequence
  Protein classification predicting sequence
AAKTCGPLQ

SEQ ID NO: 58726 - protein, 8 aa, Artificial sequence
  Protein classification predicting sequence
ALDLWKDI

SEQ ID NO: 58727 - protein, 12 aa, Artificial sequence
  Protein classification predicting sequence
AATGEVKGSYLN

SEQ ID NO: 58728 - protein, 7 aa, Artificial sequence
  Protein classification predicting sequence
KDTDILA

SEQ ID NO: 58729 - protein, 6 aa, Artificial sequence
  Protein classification predicting sequence
FAYIAY

SEQ ID NO: 58730 - protein, 10 aa, Artificial sequence
  Protein classification predicting sequence
GATANRVALE

SEQ ID NO: 58731 - protein, 6 aa, Artificial sequence
  Protein classification predicting sequence
YTSTDT

SEQ ID NO: 58732 - protein, 18 aa, Artificial sequence
  Protein classification predicting sequence
EACVQARNEGRDLATEGN

SEQ ID NO: 58733 - protein, 6 aa, Artificial sequence
  Protein classification predicting sequence
EPVPGE

SEQ ID NO: 58734 - protein, 8 aa, Artificial sequence
  Protein classification predicting sequence
REGGDVIR

SEQ ID NO: 58735 - protein, 30 aa, Artificial sequence
  Protein classification predicting sequence
HFRVLAKALRMSGGDHIHSGTVVGKLEGER

SEQ ID NO: 58736 - protein, 15 aa, Artificial sequence
  Protein classification predicting sequence
RYESGVIPYAKMGYW

SEQ ID NO: 58737 - protein, 8 aa, Artificial sequence
  Protein classification predicting sequence
QYFAYIAY

SEQ ID NO: 58738 - protein, 8 aa, Artificial sequence
  Protein classification predicting sequence
ALRLEDMR

SEQ ID NO: 58739 - protein, 12 aa, Artificial sequence
  Protein classification predicting sequence
MIDLVIGYTAIQ

SEQ ID NO: 58740 - protein, 7 aa, Artificial sequence
  Protein classification predicting sequence
EGPEILR

SEQ ID NO: 58741 - protein, 9 aa, Artificial sequence
  Protein classification predicting sequence
TALDLWKDI

SEQ ID NO: 58742 - protein, 9 aa, Artificial sequence
  Protein classification predicting sequence
DFVETPTAN

SEQ ID NO: 58743 - protein, 18 aa, Artificial sequence
  Protein classification predicting sequence
VFGFKALRALRLEDLRIP

SEQ ID NO: 58744 - protein, 13 aa, Artificial sequence
  Protein classification predicting sequence
MHDYLTGGFTANT

SEQ ID NO: 58745 - protein, 14 aa, Artificial sequence
  Protein classification predicting sequence
KWSPELAAACEVWK

SEQ ID NO: 58746 - protein, 10 aa, Artificial sequence
  Protein classification predicting sequence
KDTDILAAFR

SEQ ID NO: 58747 - protein, 8 aa, Artificial sequence
  Protein classification predicting sequence
IEPVPGEE

SEQ ID NO: 58748 - protein, 17 aa, Artificial sequence
  Protein classification predicting sequence
TLGFVDLLRDDFIEKDR

SEQ ID NO: 58749 - protein, 11 aa, Artificial sequence
  Protein classification predicting sequence
RGIYFTQDWVS

SEQ ID NO: 58750 - protein, 12 aa, Artificial sequence
  Protein classification predicting sequence
YRAKAYRVDPVP

SEQ ID NO: 58751 - protein, 7 aa, Artificial sequence
  Protein classification predicting sequence
DLFEEGS

SEQ ID NO: 58752 - protein, 25 aa, Artificial sequence
  Protein classification predicting sequence
GGLDFLKDDENINSQPFMRWKERFL

SEQ ID NO: 58753 - protein, 11 aa, Artificial sequence
  Protein classification predicting sequence
TMEDMYERAEF

SEQ ID NO: 58754 - protein, 7 aa, Artificial sequence
  Protein classification predicting sequence
ARNEGRD

SEQ ID NO: 58755 - protein, 21 aa, Artificial sequence
  Protein classification predicting sequence
VANRVALEACVQARNEGRDLA

SEQ ID NO: 58756 - protein, 11 aa, Artificial sequence
  Protein classification predicting sequence
YSKTFQGPPHG

SEQ ID NO: 58757 - protein, 8 aa, Artificial sequence
  Protein classification predicting sequence
RFVFCAEA

SEQ ID NO: 58758 - protein, 16 aa, Artificial sequence
  Protein classification predicting sequence
EKDRSRGIYFTQDWVS

SEQ ID NO: 58759 - protein, 15 aa, Artificial sequence
  Protein classification predicting sequence
TKDTDILAAFRVTPQ

SEQ ID NO: 58760 - protein, 25 aa, Artificial sequence
  Protein classification predicting sequence
GTVVGKLEGERDITLGFVDLLRDDF

SEQ ID NO: 58761 - protein, 10 aa, Artificial sequence
  Protein classification predicting sequence
EKDRSRGIYF

SEQ ID NO: 58762 - protein, 27 aa, Artificial sequence
  Protein classification predicting sequence
GNEIIREASKWSPELAAACEVWKEIKF

SEQ ID NO: 58763 - protein, 18 aa, Artificial sequence
  Protein classification predicting sequence
KWSPELAAACEVWKEIKF

SEQ ID NO: 58764 - protein, 14 aa, Artificial sequence
  Protein classification predicting sequence
TETKASVGFKAGVK

SEQ ID NO: 58765 - protein, 23 aa, Artificial sequence
  Protein classification predicting sequence
FARELGVPIVMHDYLTGGFTANT

SEQ ID NO: 58766 - protein, 6 aa, Artificial sequence
  Protein classification predicting sequence
IEPVPG

SEQ ID NO: 58767 - protein, 5 aa, Artificial sequence
  Protein classification predicting sequence
ACKWS

SEQ ID NO: 58768 - protein, 7 aa, Artificial sequence
  Protein classification predicting sequence
ELAAACE

SEQ ID NO: 58769 - protein, 6 aa, Artificial sequence
  Protein classification predicting sequence
WKEIKF

SEQ ID NO: 58770 - protein, 19 aa, Artificial sequence
  Protein classification predicting sequence
PIVMHDYLTGGFTANTSLA

SEQ ID NO: 58771 - protein, 6 aa, Artificial sequence
  Protein classification predicting sequence
PQPGVP

SEQ ID NO: 58772 - protein, 31 aa, Artificial sequence
  Protein classification predicting sequence
YECLRGGLDFTKDDENVNSQPFMRWRDRFLF

SEQ ID NO: 58773 - protein, 8 aa, Artificial sequence
  Protein classification predicting sequence
AEAIFKSQ

SEQ ID NO: 58774 - protein, 6 aa, Artificial sequence
  Protein classification predicting sequence
YFTQDW

SEQ ID NO: 58775 - protein, 6 aa, Artificial sequence
  Protein classification predicting sequence
ETGERK

SEQ ID NO: 58776 - protein, 7 aa, Artificial sequence
  Protein classification predicting sequence
FPVASGG

SEQ ID NO: 58777 - protein, 6 aa, Artificial sequence
  Protein classification predicting sequence
GWTAIQ

SEQ ID NO: 58778 - protein, 26 aa, Artificial sequence
  Protein classification predicting sequence
EEAGAAVAAESSTGTWTTVWTDGLTS

SEQ ID NO: 58779 - protein, 10 aa, Artificial sequence
  Protein classification predicting sequence
DRYKGRCYHI

SEQ ID NO: 58780 - protein, 10 aa, Artificial sequence
  Protein classification predicting sequence
NATAGTCEEM

SEQ ID NO: 58781 - protein, 7 aa, Artificial sequence
  Protein classification predicting sequence
AVDVLDK

SEQ ID NO: 58782 - protein, 7 aa, Artificial sequence
  Protein classification predicting sequence
EEMLKRA

SEQ ID NO: 58783 - protein, 31 aa, Artificial sequence
  Protein classification predicting sequence
SGGDHLHSGTVVGKLEGEREVTLGFVDLMRD

SEQ ID NO: 58784 - protein, 22 aa, Artificial sequence
  Protein classification predicting sequence
ACKWSPELAAACEVWKEIKFEF

SEQ ID NO: 58785 - protein, 10 aa, Artificial sequence
  Protein classification predicting sequence
WKEIKFEFDT

SEQ ID NO: 58786 - protein, 14 aa, Artificial sequence
  Protein classification predicting sequence
NHGMHFRVLAKALR

SEQ ID NO: 58787 - protein, 12 aa, Artificial sequence
  Protein classification predicting sequence
ACKWSPELAAAC

SEQ ID NO: 58788 - protein, 34 aa, Artificial sequence
  Protein classification predicting sequence
HRAMHAVIDRQKNHGIHFRVLAKALRMSGGDHIH

SEQ ID NO: 58789 - protein, 7 aa, Artificial sequence
  Protein classification predicting sequence
YAFIAYP

SEQ ID NO: 58790 - protein, 13 aa, Artificial sequence
  Protein classification predicting sequence
LRGGLDFTKDDEN

SEQ ID NO: 58791 - protein, 30 aa, Artificial sequence
  Protein classification predicting sequence
ETGERKGHYLNVTAPTPEEMYKRAEYAKEI

SEQ ID NO: 58792 - protein, 6 aa, Artificial sequence
  Protein classification predicting sequence
EDRSRG

SEQ ID NO: 58793 - protein, 7 aa, Artificial sequence
  Protein classification predicting sequence
GYTAIQS

SEQ ID NO: 58794 - protein, 14 aa, Artificial sequence
  Protein classification predicting sequence
GIQAGATANRVALE

SEQ ID NO: 58795 - protein, 17 aa, Artificial sequence
  Protein classification predicting sequence
RYESGVIPYAKMGYWDA

SEQ ID NO: 58796 - protein, 6 aa, Artificial sequence
  Protein classification predicting sequence
TPQPGV

SEQ ID NO: 58797 - protein, 9 aa, Artificial sequence
  Protein classification predicting sequence
GEVKGSYLN

SEQ ID NO: 58798 - protein, 12 aa, Artificial sequence
  Protein classification predicting sequence
WKAIKFEFEPVD

SEQ ID NO: 58799 - protein, 10 aa, Artificial sequence
  Protein classification predicting sequence
VGFKAGVKDY

SEQ ID NO: 58800 - protein, 7 aa, Artificial sequence
  Protein classification predicting sequence
IEPVPGE

SEQ ID NO: 58801 - protein, 19 aa, Artificial sequence
  Protein classification predicting sequence
SGGDHIHAGTVVGKLEGER

SEQ ID NO: 58802 - protein, 32 aa, Artificial sequence
  Protein classification predicting sequence
SGGDHIHAGTVVGKLEGEREITLGFVDLLRDD

SEQ ID NO: 58803 - protein, 16 aa, Artificial sequence
  Protein classification predicting sequence
KWSPELAAACEVWKEI

SEQ ID NO: 58804 - protein, 16 aa, Artificial sequence
  Protein classification predicting sequence
TETKASVGFKAGVKDY

SEQ ID NO: 58805 - protein, 8 aa, Artificial sequence
  Protein classification predicting sequence
FCAEAIYK

SEQ ID NO: 58806 - protein, 14 aa, Artificial sequence
  Protein classification predicting sequence
KSQAETGEIKGHYL

SEQ ID NO: 58807 - protein, 12 aa, Artificial sequence
  Protein classification predicting sequence
QAETGEIKGHYL

SEQ ID NO: 58808 - protein, 6 aa, Artificial sequence
  Protein classification predicting sequence
YYTPEY

SEQ ID NO: 58809 - protein, 17 aa, Artificial sequence
  Protein classification predicting sequence
DTDILAAFRVTPQPGVP

SEQ ID NO: 58810 - protein, 6 aa, Artificial sequence
  Protein classification predicting sequence
LFCAEA

SEQ ID NO: 58811 - protein, 16 aa, Artificial sequence
  Protein classification predicting sequence
PIVMHDYLTGGFTANT

SEQ ID NO: 58812 - protein, 20 aa, Artificial sequence
  Protein classification predicting sequence
LAHYCRDNGLLLHIHRAMHA

SEQ ID NO: 58813 - protein, 8 aa, Artificial sequence
  Protein classification predicting sequence
IDRQKNHG

SEQ ID NO: 58814 - protein, 45 aa, Artificial sequence
  Protein classification predicting sequence
PGVLPVASGGIHVWHMPALTEIFGDDSVLQFGGGTLGHPWGNAPG

SEQ ID NO: 58815 - protein, 13 aa, Artificial sequence
  Protein classification predicting sequence
YQTKDTDILAAFR

SEQ ID NO: 58816 - protein, 11 aa, Artificial sequence
  Protein classification predicting sequence
TKDTDILAAFR

SEQ ID NO: 58817 - protein, 29 aa, Artificial sequence
  Protein classification predicting sequence
TLGFVDLLRDDYIEKDRSRGIYFTQDWVS

SEQ ID NO: 58818 - protein, 8 aa, Artificial sequence
  Protein classification predicting sequence
IEPVAGEE

SEQ ID NO: 58819 - protein, 8 aa, Artificial sequence
  Protein classification predicting sequence
GEESQFIA

SEQ ID NO: 58820 - protein, 15 aa, Artificial sequence
  Protein classification predicting sequence
VAYPLDLFEEGSVTN

SEQ ID NO: 58821 - protein, 8 aa, Artificial sequence
  Protein classification predicting sequence
GEETQFIA

SEQ ID NO: 58822 - protein, 19 aa, Artificial sequence
  Protein classification predicting sequence
TKDTDILAAFRVTPQPGVP

SEQ ID NO: 58823 - protein, 21 aa, Artificial sequence
  Protein classification predicting sequence
IEKDRSRGIYFTQDWVSMPGV

SEQ ID NO: 58824 - protein, 15 aa, Artificial sequence
  Protein classification predicting sequence
PVASGGIHVWHMPAL

SEQ ID NO: 58825 - protein, 11 aa, Artificial sequence
  Protein classification predicting sequence
KWSPELAAACE

SEQ ID NO: 58826 - protein, 20 aa, Artificial sequence
  Protein classification predicting sequence
KWSPELAAACEIWKEIKFEF

SEQ ID NO: 58827 - protein, 13 aa, Artificial sequence
  Protein classification predicting sequence
HAGTVVGKLEGER

SEQ ID NO: 58828 - protein, 8 aa, Artificial sequence
  Protein classification predicting sequence
IEKDRSRG

SEQ ID NO: 58829 - protein, 13 aa, Artificial sequence
  Protein classification predicting sequence
YIAYDIDLFEEGS

SEQ ID NO: 58830 - protein, 15 aa, Artificial sequence
  Protein classification predicting sequence
FGFKAVKALRLEDMR

SEQ ID NO: 58831 - protein, 15 aa, Artificial sequence
  Protein classification predicting sequence
KPKLGLSGKNYGRVV

SEQ ID NO: 58832 - protein, 6 aa, Artificial sequence
  Protein classification predicting sequence
TAATME

SEQ ID NO: 58833 - protein, 11 aa, Artificial sequence
  Protein classification predicting sequence
NFRVICKWMRM

SEQ ID NO: 58834 - protein, 8 aa, Artificial sequence
  Protein classification predicting sequence
YKLTYYTP

SEQ ID NO: 58835 - protein, 6 aa, Artificial sequence
  Protein classification predicting sequence
DRYKGR

SEQ ID NO: 58836 - protein, 12 aa, Artificial sequence
  Protein classification predicting sequence
EKDRSRGIYFTQ

SEQ ID NO: 58837 - protein, 7 aa, Artificial sequence
  Protein classification predicting sequence
GEENQYI

SEQ ID NO: 58838 - protein, 11 aa, Artificial sequence
  Protein classification predicting sequence
FTQDWVSMPGV

SEQ ID NO: 58839 - protein, 12 aa, Artificial sequence
  Protein classification predicting sequence
VGFKAGVKEYKL

SEQ ID NO: 58840 - protein, 20 aa, Artificial sequence
  Protein classification predicting sequence
ETGEIKGHYLNATAGTCEEM

SEQ ID NO: 58841 - protein, 24 aa, Artificial sequence
  Protein classification predicting sequence
ETGEIKGHYLNATAGTCEEMMKRA

SEQ ID NO: 58842 - protein, 8 aa, Artificial sequence
  Protein classification predicting sequence
TDVLALFR

SEQ ID NO: 58843 - protein, 25 aa, Artificial sequence
  Protein classification predicting sequence
GVDHIHAGTVVGKLEGDPLMIKGFY

SEQ ID NO: 58844 - protein, 18 aa, Artificial sequence
  Protein classification predicting sequence
AAVAAESSTGTWTTVWTD

SEQ ID NO: 58845 - protein, 7 aa, Artificial sequence
  Protein classification predicting sequence
TLGFVDL

SEQ ID NO: 58846 - protein, 7 aa, Artificial sequence
  Protein classification predicting sequence
LRLEDVR

SEQ ID NO: 58847 - protein, 10 aa, Artificial sequence
  Protein classification predicting sequence
TPQPGVPPEE

SEQ ID NO: 58848 - protein, 22 aa, Artificial sequence
  Protein classification predicting sequence
YCRDNGLLLHIHRAMHAVIDRQ

SEQ ID NO: 58849 - protein, 26 aa, Artificial sequence
  Protein classification predicting sequence
HAGTVVGKLEGERDVTLGFVDLLRDD

SEQ ID NO: 58850 - protein, 8 aa, Artificial sequence
  Protein classification predicting sequence
YFTQDWVS

SEQ ID NO: 58851 - protein, 5 aa, Artificial sequence
  Protein classification predicting sequence
QKNHG

SEQ ID NO: 58852 - protein, 5 aa, Artificial sequence
  Protein classification predicting sequence
QYICY

SEQ ID NO: 58853 - protein, 41 aa, Artificial sequence
  Protein classification predicting sequence
PVASGGIHVWHMPALTEIFGDDSVLQFGGGTLGHPWGNAPG

SEQ ID NO: 58854 - protein, 6 aa, Artificial sequence
  Protein classification predicting sequence
YKLTYY

SEQ ID NO: 58855 - protein, 21 aa, Artificial sequence
  Protein classification predicting sequence
QYIAYVAYPLDLFEEGSVTNM

SEQ ID NO: 58856 - protein, 6 aa, Artificial sequence
  Protein classification predicting sequence
QVERDK

SEQ ID NO: 58857 - protein, 14 aa, Artificial sequence
  Protein classification predicting sequence
LDRYKGRCYHIEPV

SEQ ID NO: 58858 - protein, 12 aa, Artificial sequence
  Protein classification predicting sequence
LTDLDRYKGRCY

SEQ ID NO: 58859 - protein, 8 aa, Artificial sequence
  Protein classification predicting sequence
TAGTCEEM

SEQ ID NO: 58860 - protein, 8 aa, Artificial sequence
  Protein classification predicting sequence
WKEIKFEF

SEQ ID NO: 58861 - protein, 7 aa, Artificial sequence
  Protein classification predicting sequence
KAGVKDY

SEQ ID NO: 58862 - protein, 7 aa, Artificial sequence
  Protein classification predicting sequence
CYHIEPV

SEQ ID NO: 58863 - protein, 19 aa, Artificial sequence
  Protein classification predicting sequence
LLHIHRAMHAVIDRQRNHG

SEQ ID NO: 58864 - protein, 6 aa, Artificial sequence
  Protein classification predicting sequence
YKGRCY

SEQ ID NO: 58865 - protein, 19 aa, Artificial sequence
  Protein classification predicting sequence
NKYGRPLLGCTIKPKLGLS

SEQ ID NO: 58866 - protein, 7 aa, Artificial sequence
  Protein classification predicting sequence
KPKLGLS

SEQ ID NO: 58867 - protein, 7 aa, Artificial sequence
  Protein classification predicting sequence
LRLSGGD

SEQ ID NO: 58868 - protein, 5 aa, Artificial sequence
  Protein classification predicting sequence
GHPWG

SEQ ID NO: 58869 - protein, 7 aa, Artificial sequence
  Protein classification predicting sequence
DRQKNHG

SEQ ID NO: 58870 - protein, 8 aa, Artificial sequence
  Protein classification predicting sequence
DRSRGIFF

SEQ ID NO: 58871 - protein, 23 aa, Artificial sequence
  Protein classification predicting sequence
LHLHRAGNSTYARQKNHGINFRV

SEQ ID NO: 58872 - protein, 6 aa, Artificial sequence
  Protein classification predicting sequence
CKWMRM

SEQ ID NO: 58873 - protein, 6 aa, Artificial sequence
  Protein classification predicting sequence
YVAYPL

SEQ ID NO: 58874 - protein, 9 aa, Artificial sequence
  Protein classification predicting sequence
RGIYFTQSW

SEQ ID NO: 58875 - protein, 7 aa, Artificial sequence
  Protein classification predicting sequence
EGNTIIR

SEQ ID NO: 58876 - protein, 10 aa, Artificial sequence
  Protein classification predicting sequence
TLGFVDLLRD

SEQ ID NO: 58877 - protein, 17 aa, Artificial sequence
  Protein classification predicting sequence
IEKDRSRGIYFTQDWVS

SEQ ID NO: 58878 - protein, 16 aa, Artificial sequence
  Protein classification predicting sequence
GFKAGVKDYKLTYYTP

SEQ ID NO: 58879 - protein, 23 aa, Artificial sequence
  Protein classification predicting sequence
YKAQAETGEIKGHYLNATAGTCE

SEQ ID NO: 58880 - protein, 13 aa, Artificial sequence
  Protein classification predicting sequence
HSGTVVGKLEGER

SEQ ID NO: 58881 - protein, 14 aa, Artificial sequence
  Protein classification predicting sequence
DRSRGIYFTQDWVS

SEQ ID NO: 58882 - protein, 29 aa, Artificial sequence
  Protein classification predicting sequence
IAYVAYPLDLFEEGSVTNMFTSIVGNVFG

SEQ ID NO: 58883 - protein, 27 aa, Artificial sequence
  Protein classification predicting sequence
YVAYPLDLFEEGSVTNMFTSIVGNVFG

SEQ ID NO: 58884 - protein, 25 aa, Artificial sequence
  Protein classification predicting sequence
PGVLPVASGGIHVWHMPALTEIFGD

SEQ ID NO: 58885 - protein, 21 aa, Artificial sequence
  Protein classification predicting sequence
PVASGGIHVWHMPALTEIFGD

SEQ ID NO: 58886 - protein, 10 aa, Artificial sequence
  Protein classification predicting sequence
DTDILAAFRV

SEQ ID NO: 58887 - protein, 6 aa, Artificial sequence
  Protein classification predicting sequence
FRVTPQ

SEQ ID NO: 58888 - protein, 6 aa, Artificial sequence
  Protein classification predicting sequence
PGQYFC

SEQ ID NO: 58889 - protein, 19 aa, Artificial sequence
  Protein classification predicting sequence
LFEEGSIANLTASIIGNVF

SEQ ID NO: 58890 - protein, 6 aa, Artificial sequence
  Protein classification predicting sequence
PLLGAT

SEQ ID NO: 58891 - protein, 21 aa, Artificial sequence
  Protein classification predicting sequence
HGISFRVIAKWLRLAGVDHLH

SEQ ID NO: 58892 - protein, 7 aa, Artificial sequence
  Protein classification predicting sequence
ASNGGRV

SEQ ID NO: 58893 - protein, 6 aa, Artificial sequence
  Protein classification predicting sequence
CMQVWP

SEQ ID NO: 58894 - protein, 8 aa, Artificial sequence
  Protein classification predicting sequence
LAKEVDYL

SEQ ID NO: 58895 - protein, 12 aa, Artificial sequence
  Protein classification predicting sequence
EFELEHGFVYRE

SEQ ID NO: 58896 - protein, 15 aa, Artificial sequence
  Protein classification predicting sequence
PGYYDGRYWTMWKLP

SEQ ID NO: 58897 - protein, 6 aa, Artificial sequence
  Protein classification predicting sequence
FPVTRK

SEQ ID NO: 58898 - protein, 14 aa, Artificial sequence
  Protein classification predicting sequence
GKKKFETLSYLPDL

SEQ ID NO: 58899 - protein, 7 aa, Artificial sequence
  Protein classification predicting sequence
HGFVYRE

SEQ ID NO: 58900 - protein, 26 aa, Artificial sequence
  Protein classification predicting sequence
HGFVYREHGNTPGYYDGRYWTMWKLP

SEQ ID NO: 58901 - protein, 17 aa, Artificial sequence
  Protein classification predicting sequence
LPPLTDEQISKQVDYIL

SEQ ID NO: 58902 - protein, 5 aa, Artificial sequence
  Protein classification predicting sequence
PCLEF

SEQ ID NO: 58903 - protein, 6 aa, Artificial sequence
  Protein classification predicting sequence
EFELEH

SEQ ID NO: 58904 - protein, 7 aa, Artificial sequence
  Protein classification predicting sequence
SFIAYKP

SEQ ID NO: 58905 - protein, 9 aa, Artificial sequence
  Protein classification predicting sequence
SNGGRVSCM

SEQ ID NO: 58906 - protein, 7 aa, Artificial sequence
  Protein classification predicting sequence
CMKVWPP

SEQ ID NO: 58907 - protein, 12 aa, Artificial sequence
  Protein classification predicting sequence
GKKKFETLSYLP

SEQ ID NO: 58908 - protein, 10 aa, Artificial sequence
  Protein classification predicting sequence
ACTKAFPDAY

SEQ ID NO: 58909 - protein, 6 aa, Artificial sequence
  Protein classification predicting sequence
DNYAQS

SEQ ID NO: 58910 - protein, 8 aa, Artificial sequence
  Protein classification predicting sequence
EHGFVYRE

SEQ ID NO: 58911 - protein, 6 aa, Artificial sequence
  Protein classification predicting sequence
SAFPVT

SEQ ID NO: 58912 - protein, 7 aa, Artificial sequence
  Protein classification predicting sequence
GFVYREN

SEQ ID NO: 58913 - protein, 8 aa, Artificial sequence
  Protein classification predicting sequence
EEAKKAYP

SEQ ID NO: 58914 - protein, 7 aa, Artificial sequence
  Protein classification predicting sequence
RIIGFDN

SEQ ID NO: 58915 - protein, 17 aa, Artificial sequence
  Protein classification predicting sequence
EYLLKNGWVPCLEFETE

SEQ ID NO: 58916 - protein, 18 aa, Artificial sequence
  Protein classification predicting sequence
RIIGFDNVRQVQCISFIA

SEQ ID NO: 58917 - protein, 21 aa, Artificial sequence
  Protein classification predicting sequence
RIIGFDNVRQVQCISFIAYKP

SEQ ID NO: 58918 - protein, 8 aa, Artificial sequence
  Protein classification predicting sequence
FPVTKKNN

SEQ ID NO: 58919 - protein, 8 aa, Artificial sequence
  Protein classification predicting sequence
NGGRVQCM

SEQ ID NO: 58920 - protein, 13 aa, Artificial sequence
  Protein classification predicting sequence
RIIGFDNVRQVQC

SEQ ID NO: 58921 - protein, 7 aa, Artificial sequence
  Protein classification predicting sequence
CMQVWPP

SEQ ID NO: 58922 - protein, 8 aa, Artificial sequence
  Protein classification predicting sequence
LLKQIEYL

SEQ ID NO: 58923 - protein, 6 aa, Artificial sequence
  Protein classification predicting sequence
ISFIAY

SEQ ID NO: 58924 - protein, 16 aa, Artificial sequence
  Protein classification predicting sequence
KQNLDITSIASNGGRV

SEQ ID NO: 58925 - protein, 9 aa, Artificial sequence
  Protein classification predicting sequence
GWVPCLEFE

SEQ ID NO: 58926 - protein, 7 aa, Artificial sequence
  Protein classification predicting sequence
EAKKAYP

SEQ ID NO: 58927 - protein, 12 aa, Artificial sequence
  Protein classification predicting sequence
DITSIASNGGRV

SEQ ID NO: 58928 - protein, 12 aa, Artificial sequence
  Protein classification predicting sequence
KKYETLSYLPDL

SEQ ID NO: 58929 - protein, 6 aa, Artificial sequence
  Protein classification predicting sequence
GFVYRE

SEQ ID NO: 58930 - protein, 19 aa, Artificial sequence
  Protein classification predicting sequence
VAPFQGLKSTAGLPVSRRS

SEQ ID NO: 58931 - protein, 6 aa, Artificial sequence
  Protein classification predicting sequence
SKQVDY

SEQ ID NO: 58932 - protein, 7 aa, Artificial sequence
  Protein classification predicting sequence
WVPCLEF

SEQ ID NO: 58933 - protein, 7 aa, Artificial sequence
  Protein classification predicting sequence
RVIGFDN

SEQ ID NO: 58934 - protein, 6 aa, Artificial sequence
  Protein classification predicting sequence
FPVTKK

SEQ ID NO: 58935 - protein, 20 aa, Artificial sequence
  Protein classification predicting sequence
DITSIASNGGRVQCMQVWPP

SEQ ID NO: 58936 - protein, 6 aa, Artificial sequence
  Protein classification predicting sequence
SYLPPL

SEQ ID NO: 58937 - protein, 22 aa, Artificial sequence
  Protein classification predicting sequence
SFPVSRKQNLDITSIASNGGRV

SEQ ID NO: 58938 - protein, 13 aa, Artificial sequence
  Protein classification predicting sequence
KKYETLSYLPDLS

SEQ ID NO: 58939 - protein, 7 aa, Artificial sequence
  Protein classification predicting sequence
VSNGGRI

SEQ ID NO: 58940 - protein, 21 aa, Artificial sequence
  Protein classification predicting sequence
MQVWPIEGIKKFETLSYLPPL

SEQ ID NO: 58941 - protein, 7 aa, Artificial sequence
  Protein classification predicting sequence
KEVEYLL

SEQ ID NO: 58942 - protein, 21 aa, Artificial sequence
  Protein classification predicting sequence
NKSPGYYDGRYWTMWKLPMFG

SEQ ID NO: 58943 - protein, 7 aa, Artificial sequence
  Protein classification predicting sequence
SSAAVAT

SEQ ID NO: 58944 - protein, 16 aa, Artificial sequence
  Protein classification predicting sequence
MVAPFTGLKSAASFPV

SEQ ID NO: 58945 - protein, 11 aa, Artificial sequence
  Protein classification predicting sequence
GCTDPAQVLNE

SEQ ID NO: 58946 - protein, 6 aa, Artificial sequence
  Protein classification predicting sequence
RIIGFD

SEQ ID NO: 58947 - protein, 16 aa, Artificial sequence
  Protein classification predicting sequence
MMVWQPFNNKMFETFS

SEQ ID NO: 58948 - protein, 15 aa, Artificial sequence
  Protein classification predicting sequence
RYWTMWKLPMFGCTD

SEQ ID NO: 58949 - protein, 6 aa, Artificial sequence
  Protein classification predicting sequence
TRKANN

SEQ ID NO: 58950 - protein, 12 aa, Artificial sequence
  Protein classification predicting sequence
KKFETLSYLPPL

SEQ ID NO: 58951 - protein, 10 aa, Artificial sequence
  Protein classification predicting sequence
EAKKAYPQAW

SEQ ID NO: 58952 - protein, 9 aa, Artificial sequence
  Protein classification predicting sequence
AQANMVAPF

SEQ ID NO: 58953 - protein, 10 aa, Artificial sequence
  Protein classification predicting sequence
KKYETLSYLP

SEQ ID NO: 58954 - protein, 8 aa, Artificial sequence
  Protein classification predicting sequence
YETLSYLP

SEQ ID NO: 58955 - protein, 24 aa, Artificial sequence
  Protein classification predicting sequence
NNKSPGYYDGRYWTMWKLPMFGCT

SEQ ID NO: 58956 - protein, 21 aa, Artificial sequence
  Protein classification predicting sequence
WTPCLEFAASDQAYAGNENCI

SEQ ID NO: 58957 - protein, 11 aa, Artificial sequence
  Protein classification predicting sequence
VQCMQVWPPLG

SEQ ID NO: 58958 - protein, 9 aa, Artificial sequence
  Protein classification predicting sequence
SNGGRVQCM

SEQ ID NO: 58959 - protein, 13 aa, Artificial sequence
  Protein classification predicting sequence
SNGGRVQCMKVWP

SEQ ID NO: 58960 - protein, 12 aa, Artificial sequence
  Protein classification predicting sequence
EQLLSEIEYLLK

SEQ ID NO: 58961 - protein, 14 aa, Artificial sequence
  Protein classification predicting sequence
AQASMVAPFTGLKS

SEQ ID NO: 58962 - protein, 8 aa, Artificial sequence
  Protein classification predicting sequence
SSAAVATR

SEQ ID NO: 58963 - protein, 7 aa, Artificial sequence
  Protein classification predicting sequence
SFIVHKP

SEQ ID NO: 58964 - protein, 8 aa, Artificial sequence
  Protein classification predicting sequence
TDDPHPRN

SEQ ID NO: 58965 - protein, 13 aa, Artificial sequence
  Protein classification predicting sequence
RYWTMWKLPMFGC

SEQ ID NO: 58966 - protein, 9 aa, Artificial sequence
  Protein classification predicting sequence
FSFLPDLTD

SEQ ID NO: 58967 - protein, 10 aa, Artificial sequence
  Protein classification predicting sequence
GLKSAASFPV

SEQ ID NO: 58968 - protein, 8 aa, Artificial sequence
  Protein classification predicting sequence
VQCMKVWP

SEQ ID NO: 58969 - protein, 18 aa, Artificial sequence
  Protein classification predicting sequence
YDGRYWTMWKLPMFGCTD

SEQ ID NO: 58970 - protein, 8 aa, Artificial sequence
  Protein classification predicting sequence
VLSEIQAC

SEQ ID NO: 58971 - protein, 13 aa, Artificial sequence
  Protein classification predicting sequence
TQGCFSFLPDLTD

SEQ ID NO: 58972 - protein, 11 aa, Artificial sequence
  Protein classification predicting sequence
TQGCFSFLPDL

SEQ ID NO: 58973 - protein, 7 aa, Artificial sequence
  Protein classification predicting sequence
FSFLPDL

SEQ ID NO: 58974 - protein, 6 aa, Artificial sequence
  Protein classification predicting sequence
NNDITS

SEQ ID NO: 58975 - protein, 6 aa, Artificial sequence
  Protein classification predicting sequence
FVYREN

SEQ ID NO: 58976 - protein, 11 aa, Artificial sequence
  Protein classification predicting sequence
MWKLPMFGCTD

SEQ ID NO: 58977 - protein, 32 aa, Artificial sequence
  Protein classification predicting sequence
QLAKEVDYLLRNKWVPCLEFELEHGFVYRENA

SEQ ID NO: 58978 - protein, 22 aa, Artificial sequence
  Protein classification predicting sequence
SPGYYDGRYWTMWKLPMFGCTD

SEQ ID NO: 58979 - protein, 19 aa, Artificial sequence
  Protein classification predicting sequence
YPQAWIRIIGFDNVRQVQC

SEQ ID NO: 58980 - protein, 14 aa, Artificial sequence
  Protein classification predicting sequence
IRIIGFDNVRQVQC

SEQ ID NO: 58981 - protein, 11 aa, Artificial sequence
  Protein classification predicting sequence
IGFDNVRQVQC

SEQ ID NO: 58982 - protein, 7 aa, Artificial sequence
  Protein classification predicting sequence
SFIVNRP

SEQ ID NO: 58983 - protein, 9 aa, Artificial sequence
  Protein classification predicting sequence
SIASNGGRV

SEQ ID NO: 58984 - protein, 15 aa, Artificial sequence
  Protein classification predicting sequence
PCLEFELEHGFVYRE

SEQ ID NO: 58985 - protein, 9 aa, Artificial sequence
  Protein classification predicting sequence
FGCTDASQV

SEQ ID NO: 58986 - protein, 11 aa, Artificial sequence
  Protein classification predicting sequence
GLKSASAFPVT

SEQ ID NO: 58987 - protein, 9 aa, Artificial sequence
  Protein classification predicting sequence
FGCTDSAQV

SEQ ID NO: 58988 - protein, 6 aa, Artificial sequence
  Protein classification predicting sequence
CKKEYP

SEQ ID NO: 58989 - protein, 8 aa, Artificial sequence
  Protein classification predicting sequence
KWVPCLEF

SEQ ID NO: 58990 - protein, 11 aa, Artificial sequence
  Protein classification predicting sequence
KEVEYLLRKGW

SEQ ID NO: 58991 - protein, 6 aa, Artificial sequence
  Protein classification predicting sequence
VYREYH

SEQ ID NO: 58992 - protein, 7 aa, Artificial sequence
  Protein classification predicting sequence
RNKWIPC

SEQ ID NO: 58993 - protein, 29 aa, Artificial sequence
  Protein classification predicting sequence
SPGYYDGRYWTMWKLPMFGCTDSAQVMKE

SEQ ID NO: 58994 - protein, 7 aa, Artificial sequence
  Protein classification predicting sequence
ECKKEYP

SEQ ID NO: 58995 - protein, 10 aa, Artificial sequence
  Protein classification predicting sequence
AFIRVIGFDN

SEQ ID NO: 58996 - protein, 6 aa, Artificial sequence
  Protein classification predicting sequence
FTGLKS

SEQ ID NO: 58997 - protein, 7 aa, Artificial sequence
  Protein classification predicting sequence
YPNAFIR

SEQ ID NO: 58998 - protein, 6 aa, Artificial sequence
  Protein classification predicting sequence
GLKSTA

SEQ ID NO: 58999 - protein, 10 aa, Artificial sequence
  Protein classification predicting sequence
KKFETLSYLP

SEQ ID NO: 59000 - protein, 21 aa, Artificial sequence
  Protein classification predicting sequence
PGYYDGRYWTMWKLPMFGCTD

SEQ ID NO: 59001 - protein, 5 aa, Artificial sequence
  Protein classification predicting sequence
CMQVW

SEQ ID NO: 59002 - protein, 8 aa, Artificial sequence
  Protein classification predicting sequence
AVTTVNRA

SEQ ID NO: 59003 - protein, 6 aa, Artificial sequence
  Protein classification predicting sequence
KEVEYL

SEQ ID NO: 59004 - protein, 8 aa, Artificial sequence
  Protein classification predicting sequence
PCLEFELE

SEQ ID NO: 59005 - protein, 15 aa, Artificial sequence
  Protein classification predicting sequence
LPSNGGRVQCMKVWP

SEQ ID NO: 59006 - protein, 6 aa, Artificial sequence
  Protein classification predicting sequence
KQIEYL

SEQ ID NO: 59007 - protein, 5 aa, Artificial sequence
  Protein classification predicting sequence
MWKLP

SEQ ID NO: 59008 - protein, 11 aa, Artificial sequence
  Protein classification predicting sequence
YWELWGLPLFD

SEQ ID NO: 59009 - protein, 6 aa, Artificial sequence
  Protein classification predicting sequence
SYLPDL

SEQ ID NO: 59010 - protein, 9 aa, Artificial sequence
  Protein classification predicting sequence
KFETLSYLP

SEQ ID NO: 59011 - protein, 10 aa, Artificial sequence
  Protein classification predicting sequence
WELWGLPLFD

SEQ ID NO: 59012 - protein, 7 aa, Artificial sequence
  Protein classification predicting sequence
YIVSKGW

SEQ ID NO: 59013 - protein, 12 aa, Artificial sequence
  Protein classification predicting sequence
EFSKEGFVYREN

SEQ ID NO: 59014 - protein, 6 aa, Artificial sequence
  Protein classification predicting sequence
FIAYKP

SEQ ID NO: 59015 - protein, 6 aa, Artificial sequence
  Protein classification predicting sequence
FPVSRK

SEQ ID NO: 59016 - protein, 11 aa, Artificial sequence
  Protein classification predicting sequence
LKKFETLSYLP

SEQ ID NO: 59017 - protein, 13 aa, Artificial sequence
  Protein classification predicting sequence
RQVQCISFIAYKP

SEQ ID NO: 59018 - protein, 10 aa, Artificial sequence
  Protein classification predicting sequence
MVAPFTGLKS

SEQ ID NO: 59019 - protein, 14 aa, Artificial sequence
  Protein classification predicting sequence
NLDITSIASNGGRV

SEQ ID NO: 59020 - protein, 7 aa, Artificial sequence
  Protein classification predicting sequence
WTMWKLP

SEQ ID NO: 59021 - protein, 8 aa, Artificial sequence
  Protein classification predicting sequence
ESCVMSFI

SEQ ID NO: 59022 - protein, 8 aa, Artificial sequence
  Protein classification predicting sequence
YWYMWKLP

SEQ ID NO: 59023 - protein, 5 aa, Artificial sequence
  Protein classification predicting sequence
GWVPC

SEQ ID NO: 59024 - protein, 19 aa, Artificial sequence
  Protein classification predicting sequence
IRIIGFDNVRQVQCISFIA

SEQ ID NO: 59025 - protein, 7 aa, Artificial sequence
  Protein classification predicting sequence
YLIRNGW

SEQ ID NO: 59026 - protein, 8 aa, Artificial sequence
  Protein classification predicting sequence
RQVQCISF

SEQ ID NO: 59027 - protein, 8 aa, Artificial sequence
  Protein classification predicting sequence
DKLTYAGN

SEQ ID NO: 59028 - protein, 12 aa, Artificial sequence
  Protein classification predicting sequence
YAPSSPYSASKA

SEQ ID NO: 59029 - protein, 7 aa, Artificial sequence
  Protein classification predicting sequence
DHLVRAW

SEQ ID NO: 59030 - protein, 14 aa, Artificial sequence
  Protein classification predicting sequence
FPEKLIPLMILNAL

SEQ ID NO: 59031 - protein, 6 aa, Artificial sequence
  Protein classification predicting sequence
QIRDWL

SEQ ID NO: 59032 - protein, 8 aa, Artificial sequence
  Protein classification predicting sequence
NTQDSVVN

SEQ ID NO: 59033 - protein, 21 aa, Artificial sequence
  Protein classification predicting sequence
YAPSSPYSASKASSDHLVRAW

SEQ ID NO: 59034 - protein, 16 aa, Artificial sequence
  Protein classification predicting sequence
TGGAGFIGSAVVRHII

SEQ ID NO: 59035 - protein, 23 aa, Artificial sequence
  Protein classification predicting sequence
LPIYGKGDQIRDWLYVEDHARAL

SEQ ID NO: 59036 - protein, 21 aa, Artificial sequence
  Protein classification predicting sequence
VVTEGKAGETYNIGGHNEKKN

SEQ ID NO: 59037 - protein, 23 aa, Artificial sequence
  Protein classification predicting sequence
SYREQITYVADRPGHDRRYAIDA

SEQ ID NO: 59038 - protein, 6 aa, Artificial sequence
  Protein classification predicting sequence
ETFESG

SEQ ID NO: 59039 - protein, 8 aa, Artificial sequence
  Protein classification predicting sequence
SPYSASKA

SEQ ID NO: 59040 - protein, 14 aa, Artificial sequence
  Protein classification predicting sequence
GPAAFIETNIVGTY

SEQ ID NO: 59041 - protein, 11 aa, Artificial sequence
  Protein classification predicting sequence
GETYNIGGHNE

SEQ ID NO: 59042 - protein, 8 aa, Artificial sequence
  Protein classification predicting sequence
RKTVQWYL

SEQ ID NO: 59043 - protein, 6 aa, Artificial sequence
  Protein classification predicting sequence
DKLTYA

SEQ ID NO: 59044 - protein, 15 aa, Artificial sequence
  Protein classification predicting sequence
FRFHHISTDEVYGDL

SEQ ID NO: 59045 - protein, 11 aa, Artificial sequence
  Protein classification predicting sequence
QIRDWLFVEDH

SEQ ID NO: 59046 - protein, 6 aa, Artificial sequence
  Protein classification predicting sequence
DRPGHD

SEQ ID NO: 59047 - protein, 15 aa, Artificial sequence
  Protein classification predicting sequence
NLYRLGWDERNGGNI

SEQ ID NO: 59048 - protein, 7 aa, Artificial sequence
  Protein classification predicting sequence
KLAGKYF

SEQ ID NO: 59049 - protein, 11 aa, Artificial sequence
  Protein classification predicting sequence
VTGSGKYFKNV

SEQ ID NO: 59050 - protein, 17 aa, Artificial sequence
  Protein classification predicting sequence
FTRTLWQMCTECLVVFP

SEQ ID NO: 59051 - protein, 15 aa, Artificial sequence
  Protein classification predicting sequence
FGLIETAEKAAEVYT

SEQ ID NO: 59052 - protein, 18 aa, Artificial sequence
  Protein classification predicting sequence
FIVTGSGKFFRNVQLDPA

SEQ ID NO: 59053 - protein, 9 aa, Artificial sequence
  Protein classification predicting sequence
GWDERNGGN

SEQ ID NO: 59054 - protein, 7 aa, Artificial sequence
  Protein classification predicting sequence
RVIMHCH

SEQ ID NO: 59055 - protein, 8 aa, Artificial sequence
  Protein classification predicting sequence
TECLVVFP

SEQ ID NO: 59056 - protein, 11 aa, Artificial sequence
  Protein classification predicting sequence
SWFVQGMIKAT

SEQ ID NO: 59057 - protein, 7 aa, Artificial sequence
  Protein classification predicting sequence
QSHIVRM

SEQ ID NO: 59058 - protein, 22 aa, Artificial sequence
  Protein classification predicting sequence
GKDRVIMHCHATNLIALTYVLE

SEQ ID NO: 59059 - protein, 6 aa, Artificial sequence
  Protein classification predicting sequence
FHGVFG

SEQ ID NO: 59060 - protein, 9 aa, Artificial sequence
  Protein classification predicting sequence
VTGSGKFFR

SEQ ID NO: 59061 - protein, 8 aa, Artificial sequence
  Protein classification predicting sequence
AMTFTHEL

SEQ ID NO: 59062 - protein, 22 aa, Artificial sequence
  Protein classification predicting sequence
FTRTLWQMCTECLVVFPEGVGI

SEQ ID NO: 59063 - protein, 14 aa, Artificial sequence
  Protein classification predicting sequence
DSDGAGYHILWGLT

SEQ ID NO: 59064 - protein, 21 aa, Artificial sequence
  Protein classification predicting sequence
AVPTSELPAHFLSHCERIKAT

SEQ ID NO: 59065 - protein, 10 aa, Artificial sequence
  Protein classification predicting sequence
YSMGGMKQTI

SEQ ID NO: 59066 - protein, 11 aa, Artificial sequence
  Protein classification predicting sequence
FGLIDTAEKSA

SEQ ID NO: 59067 - protein, 7 aa, Artificial sequence
  Protein classification predicting sequence
QGMIKAT

SEQ ID NO: 59068 - protein, 14 aa, Artificial sequence
  Protein classification predicting sequence
RVIMHCHATNLIAL

SEQ ID NO: 59069 - protein, 15 aa, Artificial sequence
  Protein classification predicting sequence
LWEGSTECLVVFPDG

SEQ ID NO: 59070 - protein, 8 aa, Artificial sequence
  Protein classification predicting sequence
LKICSWNV

SEQ ID NO: 59071 - protein, 8 aa, Artificial sequence
  Protein classification predicting sequence
AYTFWTYM

SEQ ID NO: 59072 - protein, 7 aa, Artificial sequence
  Protein classification predicting sequence
GPSSSHT

SEQ ID NO: 59073 - protein, 26 aa, Artificial sequence
  Protein classification predicting sequence
GGIIESELVAIPAMQKRLEKEYQQPI

SEQ ID NO: 59074 - protein, 7 aa, Artificial sequence
  Protein classification predicting sequence
KAFPETA

SEQ ID NO: 59075 - protein, 7 aa, Artificial sequence
  Protein classification predicting sequence
HAEKLAL

SEQ ID NO: 59076 - protein, 18 aa, Artificial sequence
  Protein classification predicting sequence
QYSIAVGSTGNLGLSIGI

SEQ ID NO: 59077 - protein, 8 aa, Artificial sequence
  Protein classification predicting sequence
VHMSADAR

SEQ ID NO: 59078 - protein, 7 aa, Artificial sequence
  Protein classification predicting sequence
KLRSHGV

SEQ ID NO: 59079 - protein, 11 aa, Artificial sequence
  Protein classification predicting sequence
PNCFFIDDENS

SEQ ID NO: 59080 - protein, 31 aa, Artificial sequence
  Protein classification predicting sequence
PLFVYLPCGVGGGPGGVAFGLKLAFGDHVHC

SEQ ID NO: 59081 - protein, 8 aa, Artificial sequence
  Protein classification predicting sequence
FAEPTHSP

SEQ ID NO: 59082 - protein, 8 aa, Artificial sequence
  Protein classification predicting sequence
VQDIGIDN

SEQ ID NO: 59083 - protein, 10 aa, Artificial sequence
  Protein classification predicting sequence
EGIRLEPSAL

SEQ ID NO: 59084 - protein, 12 aa, Artificial sequence
  Protein classification predicting sequence
GLPYVGLTEQDV

SEQ ID NO: 59085 - protein, 14 aa, Artificial sequence
  Protein classification predicting sequence
VAIPAMQKRLEKEY

SEQ ID NO: 59086 - protein, 8 aa, Artificial sequence
  Protein classification predicting sequence
LLKKDSHL

SEQ ID NO: 59087 - protein, 15 aa, Artificial sequence
  Protein classification predicting sequence
ISGSIKARGGIYEVL

SEQ ID NO: 59088 - protein, 15 aa, Artificial sequence
  Protein classification predicting sequence
VAGQRLKAQFAQQGR

SEQ ID NO: 59089 - protein, 27 aa, Artificial sequence
  Protein classification predicting sequence
PLFVYLPCGVGGGPGGVAFGLKLAFGD

SEQ ID NO: 59090 - protein, 18 aa, Artificial sequence
  Protein classification predicting sequence
VHCFFAEPTHSPCMLLGV

SEQ ID NO: 59091 - protein, 32 aa, Artificial sequence
  Protein classification predicting sequence
DQTMYDMLGWLAQEEGIRLEPSALAGMAGPQR

SEQ ID NO: 59092 - protein, 32 aa, Artificial sequence
  Protein classification predicting sequence
LLSPEFKQFFSQYSIAVGSTGNLGLSIGIMSA

SEQ ID NO: 59093 - protein, 32 aa, Artificial sequence
  Protein classification predicting sequence
IGFKVTVHMSADARAWKKAKLRSHGVTVVEYE

SEQ ID NO: 59094 - protein, 26 aa, Artificial sequence
  Protein classification predicting sequence
GRKAAQSDPNCFFIDDENSRTLFLGY

SEQ ID NO: 59095 - protein, 36 aa, Artificial sequence
  Protein classification predicting sequence
TTSLAEGLPYVGLTEQDVQDAHARLSRFAPYLAKAF

SEQ ID NO: 59096 - protein, 13 aa, Artificial sequence
  Protein classification predicting sequence
GIGPSSSHTVGPM

SEQ ID NO: 59097 - protein, 7 aa, Artificial sequence
  Protein classification predicting sequence
LGLTCDP

SEQ ID NO: 59098 - protein, 12 aa, Artificial sequence
  Protein classification predicting sequence
MEHNLGLTCDPV

SEQ ID NO: 59099 - protein, 15 aa, Artificial sequence
  Protein classification predicting sequence
VKGVTSISADTHKYG

SEQ ID NO: 59100 - protein, 9 aa, Artificial sequence
  Protein classification predicting sequence
GLEAGSKPE

SEQ ID NO: 59101 - protein, 6 aa, Artificial sequence
  Protein classification predicting sequence
GHFGST

SEQ ID NO: 59102 - protein, 8 aa, Artificial sequence
  Protein classification predicting sequence
GGGLGVDY

SEQ ID NO: 59103 - protein, 6 aa, Artificial sequence
  Protein classification predicting sequence
PIHRLD

SEQ ID NO: 59104 - protein, 6 aa, Artificial sequence
  Protein classification predicting sequence
LNTVIV

SEQ ID NO: 59105 - protein, 8 aa, Artificial sequence
  Protein classification predicting sequence
RAIVSHHS

SEQ ID NO: 59106 - protein, 10 aa, Artificial sequence
  Protein classification predicting sequence
DLTCDSDGKI

SEQ ID NO: 59107 - protein, 16 aa, Artificial sequence
  Protein classification predicting sequence
HEPELMFQTLKHRAEE

SEQ ID NO: 59108 - protein, 18 aa, Artificial sequence
  Protein classification predicting sequence
KHPVICSESGRAIVSHHS

SEQ ID NO: 59109 - protein, 8 aa, Artificial sequence
  Protein classification predicting sequence
LIFEAVSA

SEQ ID NO: 59110 - protein, 9 aa, Artificial sequence
  Protein classification predicting sequence
DLTCDSDGK

SEQ ID NO: 59111 - protein, 7 aa, Artificial sequence
  Protein classification predicting sequence
TCDSDGK

SEQ ID NO: 59112 - protein, 12 aa, Artificial sequence
  Protein classification predicting sequence
HNLFGGPSVVRV

SEQ ID NO: 59113 - protein, 9 aa, Artificial sequence
  Protein classification predicting sequence
LPLLVRFPD

SEQ ID NO: 59114 - protein, 13 aa, Artificial sequence
  Protein classification predicting sequence
YQGVYPVKCNQDR

SEQ ID NO: 59115 - protein, 6 aa, Artificial sequence
  Protein classification predicting sequence
CNGYKD

SEQ ID NO: 59116 - protein, 8 aa, Artificial sequence
  Protein classification predicting sequence
RAKLRTKH

SEQ ID NO: 59117 - protein, 7 aa, Artificial sequence
  Protein classification predicting sequence
VSHHSVL

SEQ ID NO: 59118 - protein, 7 aa, Artificial sequence
  Protein classification predicting sequence
NLSVFTS

SEQ ID NO: 59119 - protein, 6 aa, Artificial sequence
  Protein classification predicting sequence
VLRSMQ

SEQ ID NO: 59120 - protein, 8 aa, Artificial sequence
  Protein classification predicting sequence
ISVRPHGS

SEQ ID NO: 59121 - protein, 8 aa, Artificial sequence
  Protein classification predicting sequence
TKHSGHFG

SEQ ID NO: 59122 - protein, 17 aa, Artificial sequence
  Protein classification predicting sequence
MLDCLQLLHFHIGSQIP

SEQ ID NO: 59123 - protein, 6 aa, Artificial sequence
  Protein classification predicting sequence
CNGFKD

SEQ ID NO: 59124 - protein, 18 aa, Artificial sequence
  Protein classification predicting sequence
PVIGLRAKLRTKHSGHFG

SEQ ID NO: 59125 - protein, 27 aa, Artificial sequence
  Protein classification predicting sequence
SVKHPVICSESGRAIVSHHSVLIFEAV

SEQ ID NO: 59126 - protein, 5 aa, Artificial sequence
  Protein classification predicting sequence
VYPIK

SEQ ID NO: 59127 - protein, 7 aa, Artificial sequence
  Protein classification predicting sequence
LQLLHFH

SEQ ID NO: 59128 - protein, 6 aa, Artificial sequence
  Protein classification predicting sequence
IDQLFP

SEQ ID NO: 59129 - protein, 7 aa, Artificial sequence
  Protein classification predicting sequence
YYLGMFL

SEQ ID NO: 59130 - protein, 6 aa, Artificial sequence
  Protein classification predicting sequence
LHFHLG

SEQ ID NO: 59131 - protein, 11 aa, Artificial sequence
  Protein classification predicting sequence
VGGGLAVDYDG

SEQ ID NO: 59132 - protein, 6 aa, Artificial sequence
  Protein classification predicting sequence
QNYAND

SEQ ID NO: 59133 - protein, 7 aa, Artificial sequence
  Protein classification predicting sequence
SESGRAI

SEQ ID NO: 59134 - protein, 6 aa, Artificial sequence
  Protein classification predicting sequence
PVKCNQ

SEQ ID NO: 59135 - protein, 6 aa, Artificial sequence
  Protein classification predicting sequence
GAYQEI

SEQ ID NO: 59136 - protein, 8 aa, Artificial sequence
  Protein classification predicting sequence
LGISHGIT

SEQ ID NO: 59137 - protein, 19 aa, Artificial sequence
  Protein classification predicting sequence
AATSVHKLGGSLTQSSILN

SEQ ID NO: 59138 - protein, 8 aa, Artificial sequence
  Protein classification predicting sequence
HHSVLIFE

SEQ ID NO: 59139 - protein, 8 aa, Artificial sequence
  Protein classification predicting sequence
PDSWAIDQ

SEQ ID NO: 59140 - protein, 20 aa, Artificial sequence
  Protein classification predicting sequence
FLVGAYQEILGDMHNLFGDT

SEQ ID NO: 59141 - protein, 11 aa, Artificial sequence
  Protein classification predicting sequence
YGIRHWGAGYF

SEQ ID NO: 59142 - protein, 7 aa, Artificial sequence
  Protein classification predicting sequence
YPIKVNQ

SEQ ID NO: 59143 - protein, 11 aa, Artificial sequence
  Protein classification predicting sequence
VFIVIEKESEV

SEQ ID NO: 59144 - protein, 14 aa, Artificial sequence
  Protein classification predicting sequence
GLRVRLSSLASSKW

SEQ ID NO: 59145 - protein, 8 aa, Artificial sequence
  Protein classification predicting sequence
GEKGKFGL

SEQ ID NO: 59146 - protein, 8 aa, Artificial sequence
  Protein classification predicting sequence
HFHMGSQI

SEQ ID NO: 59147 - protein, 9 aa, Artificial sequence
  Protein classification predicting sequence
HVDVGGGLG

SEQ ID NO: 59148 - protein, 12 aa, Artificial sequence
  Protein classification predicting sequence
DVGGGLGVDYDG

SEQ ID NO: 59149 - protein, 17 aa, Artificial sequence
  Protein classification predicting sequence
DVGGGLGVDYDGTHSRN

SEQ ID NO: 59150 - protein, 6 aa, Artificial sequence
  Protein classification predicting sequence
PDTWAI

SEQ ID NO: 59151 - protein, 16 aa, Artificial sequence
  Protein classification predicting sequence
HDTIEDMLRYVHLSPE

SEQ ID NO: 59152 - protein, 6 aa, Artificial sequence
  Protein classification predicting sequence
YQGVFP

SEQ ID NO: 59153 - protein, 8 aa, Artificial sequence
  Protein classification predicting sequence
FIDLRDVK

SEQ ID NO: 59154 - protein, 8 aa, Artificial sequence
  Protein classification predicting sequence
CNFSVFQS

SEQ ID NO: 59155 - protein, 8 aa, Artificial sequence
  Protein classification predicting sequence
GAYQEILG

SEQ ID NO: 59156 - protein, 13 aa, Artificial sequence
  Protein classification predicting sequence
IVCNGYKDREYIR

SEQ ID NO: 59157 - protein, 7 aa, Artificial sequence
  Protein classification predicting sequence
VYLVIEK

SEQ ID NO: 59158 - protein, 16 aa, Artificial sequence
  Protein classification predicting sequence
ESARFYVELHKLGVNI

SEQ ID NO: 59159 - protein, 14 aa, Artificial sequence
  Protein classification predicting sequence
CFDVGGGLGVDYEG

SEQ ID NO: 59160 - protein, 8 aa, Artificial sequence
  Protein classification predicting sequence
QSDCSVNY

SEQ ID NO: 59161 - protein, 6 aa, Artificial sequence
  Protein classification predicting sequence
ITESGR

SEQ ID NO: 59162 - protein, 7 aa, Artificial sequence
  Protein classification predicting sequence
TAHHAVL

SEQ ID NO: 59163 - protein, 6 aa, Artificial sequence
  Protein classification predicting sequence
SMWETW

SEQ ID NO: 59164 - protein, 8 aa, Artificial sequence
  Protein classification predicting sequence
IIDELQER

SEQ ID NO: 59165 - protein, 6 aa, Artificial sequence
  Protein classification predicting sequence
VCPDPD

SEQ ID NO: 59166 - protein, 7 aa, Artificial sequence
  Protein classification predicting sequence
LFCFPQI

SEQ ID NO: 59167 - protein, 8 aa, Artificial sequence
  Protein classification predicting sequence
QHRLRSIN

SEQ ID NO: 59168 - protein, 8 aa, Artificial sequence
  Protein classification predicting sequence
GEKLGHKV

SEQ ID NO: 59169 - protein, 10 aa, Artificial sequence
  Protein classification predicting sequence
GHKVYLVIEK

SEQ ID NO: 59170 - protein, 14 aa, Artificial sequence
  Protein classification predicting sequence
QSDCSVNYGLNEYA

SEQ ID NO: 59171 - protein, 9 aa, Artificial sequence
  Protein classification predicting sequence
LVYPIKVNQ

SEQ ID NO: 59172 - protein, 7 aa, Artificial sequence
  Protein classification predicting sequence
EAERLNV

SEQ ID NO: 59173 - protein, 18 aa, Artificial sequence
  Protein classification predicting sequence
PRLGVRARLASQGSGKWQ

SEQ ID NO: 59174 - protein, 15 aa, Artificial sequence
  Protein classification predicting sequence
GKWQASGGEKSKFGL

SEQ ID NO: 59175 - protein, 10 aa, Artificial sequence
  Protein classification predicting sequence
SGGEKSKFGL

SEQ ID NO: 59176 - protein, 23 aa, Artificial sequence
  Protein classification predicting sequence
SGGEKSKFGLAATQVLQLVETLR

SEQ ID NO: 59177 - protein, 11 aa, Artificial sequence
  Protein classification predicting sequence
LQLLHFHLGSQ

SEQ ID NO: 59178 - protein, 61 aa, Artificial sequence
  Protein classification predicting sequence
ANIRDIATGVRESARFYVELHKLGVNIQCFDVGGGLGVDYEGTRSQSDCSVNYGLNEYANN

SEQ ID NO: 59179 - protein, 10 aa, Artificial sequence
  Protein classification predicting sequence
TAHHTVLVSN

SEQ ID NO: 59180 - protein, 8 aa, Artificial sequence
  Protein classification predicting sequence
WETWQEMH

SEQ ID NO: 59181 - protein, 6 aa, Artificial sequence
  Protein classification predicting sequence
LYLNIC

SEQ ID NO: 59182 - protein, 18 aa, Artificial sequence
  Protein classification predicting sequence
NRAHRPIIDELQERMADK

SEQ ID NO: 59183 - protein, 9 aa, Artificial sequence
  Protein classification predicting sequence
YVNFSLFQS

SEQ ID NO: 59184 - protein, 12 aa, Artificial sequence
  Protein classification predicting sequence
PDAWGIDQLFPV

SEQ ID NO: 59185 - protein, 14 aa, Artificial sequence
  Protein classification predicting sequence
RRAVLLDITCDSDG

SEQ ID NO: 59186 - protein, 5 aa, Artificial sequence
  Protein classification predicting sequence
TMPMP

SEQ ID NO: 59187 - protein, 22 aa, Artificial sequence
  Protein classification predicting sequence
GFFMVGAYQEILGNMHNLFGDT

SEQ ID NO: 59188 - protein, 8 aa, Artificial sequence
  Protein classification predicting sequence
VADMLQYV

SEQ ID NO: 59189 - protein, 8 aa, Artificial sequence
  Protein classification predicting sequence
GEKSKFGL

SEQ ID NO: 59190 - protein, 9 aa, Artificial sequence
  Protein classification predicting sequence
MGNLHNLFG

SEQ ID NO: 59191 - protein, 6 aa, Artificial sequence
  Protein classification predicting sequence
KCNQQR

SEQ ID NO: 59192 - protein, 9 aa, Artificial sequence
  Protein classification predicting sequence
YIETAILAR

SEQ ID NO: 59193 - protein, 13 aa, Artificial sequence
  Protein classification predicting sequence
STNYSLQNYANDV

SEQ ID NO: 59194 - protein, 12 aa, Artificial sequence
  Protein classification predicting sequence
SESGRSLTAHHA

SEQ ID NO: 59195 - protein, 7 aa, Artificial sequence
  Protein classification predicting sequence
HRLDEEP

SEQ ID NO: 59196 - protein, 6 aa, Artificial sequence
  Protein classification predicting sequence
PIKVNQ

SEQ ID NO: 59197 - protein, 11 aa, Artificial sequence
  Protein classification predicting sequence
PIKVNQQREVV

SEQ ID NO: 59198 - protein, 7 aa, Artificial sequence
  Protein classification predicting sequence
NFSLFQS

SEQ ID NO: 59199 - protein, 7 aa, Artificial sequence
  Protein classification predicting sequence
HNLFGDT

SEQ ID NO: 59200 - protein, 8 aa, Artificial sequence
  Protein classification predicting sequence
EVLGYVQY

SEQ ID NO: 59201 - protein, 57 aa, Artificial sequence
  Protein classification predicting sequence
GVLRSMQEVAMSSQEASKMLRTYNIAWWGNNYYDVNELGHISVCPDPDVPEARVDLA

SEQ ID NO: 59202 - protein, 129 aa, Artificial sequence
  Protein classification predicting sequence
REAQGQRLPALFCFPQILQHRLRSINAAFKRARESYGYNGDYFLVYPIKVNQHRRVIESLIHSGEPLGLEAGSKAELMAVLAHAGMTRSVIVCNGYKDREYIRLALIGEKMGHKVYLVIEKMSEIAIVL

SEQ ID NO: 59203 - protein, 35 aa, Artificial sequence
  Protein classification predicting sequence
GLPHPTVITESGRAVTAHHTVLVSNIIGVERNEYT

SEQ ID NO: 59204 - protein, 28 aa, Artificial sequence
  Protein classification predicting sequence
PGTRRSLREWLHDSQMDLHDIHIGYSSG

SEQ ID NO: 59205 - protein, 7 aa, Artificial sequence
  Protein classification predicting sequence
EILASQA

SEQ ID NO: 59206 - protein, 10 aa, Artificial sequence
  Protein classification predicting sequence
GLEAGSKPEL

SEQ ID NO: 59207 - protein, 8 aa, Artificial sequence
  Protein classification predicting sequence
IVCNGYKD

SEQ ID NO: 59208 - protein, 6 aa, Artificial sequence
  Protein classification predicting sequence
ANIRDI

SEQ ID NO: 59209 - protein, 6 aa, Artificial sequence
  Protein classification predicting sequence
GTRSQS

SEQ ID NO: 59210 - protein, 6 aa, Artificial sequence
  Protein classification predicting sequence
EYANNI

SEQ ID NO: 59211 - protein, 7 aa, Artificial sequence
  Protein classification predicting sequence
RALIEIY

SEQ ID NO: 59212 - protein, 8 aa, Artificial sequence
  Protein classification predicting sequence
HRPIIDEL

SEQ ID NO: 59213 - protein, 8 aa, Artificial sequence
  Protein classification predicting sequence
VNFSLFQS

SEQ ID NO: 59214 - protein, 6 aa, Artificial sequence
  Protein classification predicting sequence
PERRAV

SEQ ID NO: 59215 - protein, 8 aa, Artificial sequence
  Protein classification predicting sequence
YVDGQGIE

SEQ ID NO: 59216 - protein, 16 aa, Artificial sequence
  Protein classification predicting sequence
YPNKYLLVYPIKVNQQ

SEQ ID NO: 59217 - protein, 6 aa, Artificial sequence
  Protein classification predicting sequence
GAGKWQ

SEQ ID NO: 59218 - protein, 13 aa, Artificial sequence
  Protein classification predicting sequence
HFHLGSQMANIRD

SEQ ID NO: 59219 - protein, 7 aa, Artificial sequence
  Protein classification predicting sequence
RFYCELR

SEQ ID NO: 59220 - protein, 7 aa, Artificial sequence
  Protein classification predicting sequence
EYARNIV

SEQ ID NO: 59221 - protein, 14 aa, Artificial sequence
  Protein classification predicting sequence
RALIEIYNDTQSDL

SEQ ID NO: 59222 - protein, 12 aa, Artificial sequence
  Protein classification predicting sequence
KNRFHRPILDEL

SEQ ID NO: 59223 - protein, 9 aa, Artificial sequence
  Protein classification predicting sequence
LDITCDSDG

SEQ ID NO: 59224 - protein, 13 aa, Artificial sequence
  Protein classification predicting sequence
GQGIESTLPVPAW

SEQ ID NO: 59225 - protein, 12 aa, Artificial sequence
  Protein classification predicting sequence
FLVGAYQEILGD

SEQ ID NO: 59226 - protein, 13 aa, Artificial sequence
  Protein classification predicting sequence
VEDMMRYVHIDVD

SEQ ID NO: 59227 - protein, 15 aa, Artificial sequence
  Protein classification predicting sequence
WGIDQVFPVLPLSGL

SEQ ID NO: 59228 - protein, 7 aa, Artificial sequence
  Protein classification predicting sequence
DYEGTRS

SEQ ID NO: 59229 - protein, 6 aa, Artificial sequence
  Protein classification predicting sequence
TCDSDG

SEQ ID NO: 59230 - protein, 9 aa, Artificial sequence
  Protein classification predicting sequence
LRSMQEVAM

SEQ ID NO: 59231 - protein, 18 aa, Artificial sequence
  Protein classification predicting sequence
NYYDVNELGHISVCPDPD

SEQ ID NO: 59232 - protein, 9 aa, Artificial sequence
  Protein classification predicting sequence
GLEAGSKAE

SEQ ID NO: 59233 - protein, 54 aa, Artificial sequence
  Protein classification predicting sequence
TGVRESARFYVELHKLGVNIQCFDVGGGLGVDYEGTRSQSDCSVNYGLNEYANN

SEQ ID NO: 59234 - protein, 17 aa, Artificial sequence
  Protein classification predicting sequence
RRSLREWLHDSQMDLHD

SEQ ID NO: 59235 - protein, 29 aa, Artificial sequence
  Protein classification predicting sequence
YVNFSLFQSMPDAWGIDQLFPVLPLEGLD

SEQ ID NO: 59236 - protein, 9 aa, Artificial sequence
  Protein classification predicting sequence
IDHYIDGDG

SEQ ID NO: 59237 - protein, 9 aa, Artificial sequence
  Protein classification predicting sequence
TVADMLEYV

SEQ ID NO: 59238 - protein, 8 aa, Artificial sequence
  Protein classification predicting sequence
TCSIIGAN

SEQ ID NO: 59239 - protein, 18 aa, Artificial sequence
  Protein classification predicting sequence
AHLDKSHICVHTYPESHP

SEQ ID NO: 59240 - protein, 9 aa, Artificial sequence
  Protein classification predicting sequence
YRVRGFTRD

SEQ ID NO: 59241 - protein, 16 aa, Artificial sequence
  Protein classification predicting sequence
YDMVDVNVYQENIFHT

SEQ ID NO: 59242 - protein, 12 aa, Artificial sequence
  Protein classification predicting sequence
DVNVYQENIFHT

SEQ ID NO: 59243 - protein, 11 aa, Artificial sequence
  Protein classification predicting sequence
KEMREIYYGRN

SEQ ID NO: 59244 - protein, 7 aa, Artificial sequence
  Protein classification predicting sequence
YEMFDVN

SEQ ID NO: 59245 - protein, 8 aa, Artificial sequence
  Protein classification predicting sequence
YQENIFHT

SEQ ID NO: 59246 - protein, 10 aa, Artificial sequence
  Protein classification predicting sequence
IIGANILNIA

SEQ ID NO: 59247 - protein, 13 aa, Artificial sequence
  Protein classification predicting sequence
QDYDPQGASVTIL

SEQ ID NO: 59248 - protein, 8 aa, Artificial sequence
  Protein classification predicting sequence
AHLDKSHI

SEQ ID NO: 59249 - protein, 6 aa, Artificial sequence
  Protein classification predicting sequence
VHTYPE

SEQ ID NO: 59250 - protein, 11 aa, Artificial sequence
  Protein classification predicting sequence
FIDHKINSIQN

SEQ ID NO: 59251 - protein, 6 aa, Artificial sequence
  Protein classification predicting sequence
INSIQN

SEQ ID NO: 59252 - protein, 7 aa, Artificial sequence
  Protein classification predicting sequence
GFNNLTK

SEQ ID NO: 59253 - protein, 7 aa, Artificial sequence
  Protein classification predicting sequence
LSFNIYD

SEQ ID NO: 59254 - protein, 10 aa, Artificial sequence
  Protein classification predicting sequence
QDYEPQGASV

SEQ ID NO: 59255 - protein, 6 aa, Artificial sequence
  Protein classification predicting sequence
HLDKSH

SEQ ID NO: 59256 - protein, 12 aa, Artificial sequence
  Protein classification predicting sequence
TIDYRVRGFTRD

SEQ ID NO: 59257 - protein, 10 aa, Artificial sequence
  Protein classification predicting sequence
DYRVRGFTRD

SEQ ID NO: 59258 - protein, 6 aa, Artificial sequence
  Protein classification predicting sequence
DVNVYQ

SEQ ID NO: 59259 - protein, 7 aa, Artificial sequence
  Protein classification predicting sequence
NIFHTKM

SEQ ID NO: 59260 - protein, 19 aa, Artificial sequence
  Protein classification predicting sequence
NGMKHFIDHEINSIQNFMS

SEQ ID NO: 59261 - protein, 10 aa, Artificial sequence
  Protein classification predicting sequence
YNANRLTEIL

SEQ ID NO: 59262 - protein, 8 aa, Artificial sequence
  Protein classification predicting sequence
LNIARQDY

SEQ ID NO: 59263 - protein, 14 aa, Artificial sequence
  Protein classification predicting sequence
PQGASVTILVSEEP

SEQ ID NO: 59264 - protein, 7 aa, Artificial sequence
  Protein classification predicting sequence
EHPGPLP

SEQ ID NO: 59265 - protein, 6 aa, Artificial sequence
  Protein classification predicting sequence
KHFIDH

SEQ ID NO: 59266 - protein, 5 aa, Artificial sequence
  Protein classification predicting sequence
QNFMS

SEQ ID NO: 59267 - protein, 7 aa, Artificial sequence
  Protein classification predicting sequence
EIYYGRN

SEQ ID NO: 59268 - protein, 29 aa, Artificial sequence
  Protein classification predicting sequence
YNANRLTEILSETCSIIGANILNIARQDY

SEQ ID NO: 59269 - protein, 5 aa, Artificial sequence
  Protein classification predicting sequence
FHTKM

SEQ ID NO: 59270 - protein, 9 aa, Artificial sequence
  Protein classification predicting sequence
RLTQILTDV

SEQ ID NO: 59271 - protein, 27 aa, Artificial sequence
  Protein classification predicting sequence
IIGANILNIARQDYDPQGASVTILISE

SEQ ID NO: 59272 - protein, 7 aa, Artificial sequence
  Protein classification predicting sequence
PGPLPET

SEQ ID NO: 59273 - protein, 18 aa, Artificial sequence
  Protein classification predicting sequence
VSTCGVISPLKALNYLIH

SEQ ID NO: 59274 - protein, 17 aa, Artificial sequence
  Protein classification predicting sequence
ITAALWKEMREIYYGRN

SEQ ID NO: 59275 - protein, 39 aa, Artificial sequence
  Protein classification predicting sequence
LYDMVDVNVYQENIFHTKMLLKEFDLKHYMFHTKPEDLT

SEQ ID NO: 59276 - protein, 21 aa, Artificial sequence
  Protein classification predicting sequence
ERQEITAALWKEMREIYYGRN

SEQ ID NO: 59277 - protein, 6 aa, Artificial sequence
  Protein classification predicting sequence
TFRADI

SEQ ID NO: 59278 - protein, 15 aa, Artificial sequence
  Protein classification predicting sequence
TCGVISPLKALNYLI

SEQ ID NO: 59279 - protein, 9 aa, Artificial sequence
  Protein classification predicting sequence
IDHKINSIQ

SEQ ID NO: 59280 - protein, 6 aa, Artificial sequence
  Protein classification predicting sequence
LESDIV

SEQ ID NO: 59281 - protein, 11 aa, Artificial sequence
  Protein classification predicting sequence
NLSFKERMKIE

SEQ ID NO: 59282 - protein, 11 aa, Artificial sequence
  Protein classification predicting sequence
EIEELFHGRNL

SEQ ID NO: 59283 - protein, 36 aa, Artificial sequence
  Protein classification predicting sequence
GLCTFRADIEVSTCGVISPLKALNYLIHQLESDIVT

SEQ ID NO: 59284 - protein, 7 aa, Artificial sequence
  Protein classification predicting sequence
SHITVHT

SEQ ID NO: 59285 - protein, 7 aa, Artificial sequence
  Protein classification predicting sequence
ESHLTIH

SEQ ID NO: 59286 - protein, 5 aa, Artificial sequence
  Protein classification predicting sequence
IHTWP

SEQ ID NO: 59287 - protein, 6 aa, Artificial sequence
  Protein classification predicting sequence
LTKISS

SEQ ID NO: 59288 - protein, 5 aa, Artificial sequence
  Protein classification predicting sequence
HTWPE

SEQ ID NO: 59289 - protein, 7 aa, Artificial sequence
  Protein classification predicting sequence
TMGRHVI

SEQ ID NO: 59290 - protein, 15 aa, Artificial sequence
  Protein classification predicting sequence
FPEHGYASIDVYTCG

SEQ ID NO: 59291 - protein, 9 aa, Artificial sequence
  Protein classification predicting sequence
AVDVFTCGD

SEQ ID NO: 59292 - protein, 11 aa, Artificial sequence
  Protein classification predicting sequence
ESHISIHTWPE

SEQ ID NO: 59293 - protein, 8 aa, Artificial sequence
  Protein classification predicting sequence
ESHLSIHT

SEQ ID NO: 59294 - protein, 32 aa, Artificial sequence
  Protein classification predicting sequence
GVSGVVIVAESHISVHTWPEKGYAALDVYTCG

SEQ ID NO: 59295 - protein, 6 aa, Artificial sequence
  Protein classification predicting sequence
IHTWPE

SEQ ID NO: 59296 - protein, 11 aa, Artificial sequence
  Protein classification predicting sequence
GVACSMAAAGL

SEQ ID NO: 59297 - protein, 7 aa, Artificial sequence
  Protein classification predicting sequence
AGQGTLA

SEQ ID NO: 59298 - protein, 9 aa, Artificial sequence
  Protein classification predicting sequence
WNISLFHYR

SEQ ID NO: 59299 - protein, 7 aa, Artificial sequence
  Protein classification predicting sequence
SGANMNF

SEQ ID NO: 59300 - protein, 6 aa, Artificial sequence
  Protein classification predicting sequence
PPFDHP

SEQ ID NO: 59301 - protein, 7 aa, Artificial sequence
  Protein classification predicting sequence
AQVTPLQ

SEQ ID NO: 59302 - protein, 9 aa, Artificial sequence
  Protein classification predicting sequence
SAGNHAQGV

SEQ ID NO: 59303 - protein, 6 aa, Artificial sequence
  Protein classification predicting sequence
LFCTLG

SEQ ID NO: 59304 - protein, 6 aa, Artificial sequence
  Protein classification predicting sequence
PNNWPR

SEQ ID NO: 59305 - protein, 6 aa, Artificial sequence
  Protein classification predicting sequence
SEPHAA

SEQ ID NO: 59306 - protein, 10 aa, Artificial sequence
  Protein classification predicting sequence
GNFGNLTAGL

SEQ ID NO: 59307 - protein, 6 aa, Artificial sequence
  Protein classification predicting sequence
TSGDTG

SEQ ID NO: 59308 - protein, 8 aa, Artificial sequence
  Protein classification predicting sequence
GPTLAFKD

SEQ ID NO: 59309 - protein, 11 aa, Artificial sequence
  Protein classification predicting sequence
NPTGSFKDRGM

SEQ ID NO: 59310 - protein, 13 aa, Artificial sequence
  Protein classification predicting sequence
IPVGNAGNITAYW

SEQ ID NO: 59311 - protein, 10 aa, Artificial sequence
  Protein classification predicting sequence
ATAIRIGNPA

SEQ ID NO: 59312 - protein, 10 aa, Artificial sequence
  Protein classification predicting sequence
EPKVLRHFTA

SEQ ID NO: 59313 - protein, 13 aa, Artificial sequence
  Protein classification predicting sequence
TIPTHQGRGAEQI

SEQ ID NO: 59314 - protein, 7 aa, Artificial sequence
  Protein classification predicting sequence
ARFAENA

SEQ ID NO: 59315 - protein, 6 aa, Artificial sequence
  Protein classification predicting sequence
MSAKKD

SEQ ID NO: 59316 - protein, 8 aa, Artificial sequence
  Protein classification predicting sequence
RCVPMEGF

SEQ ID NO: 59317 - protein, 7 aa, Artificial sequence
  Protein classification predicting sequence
RAVEIGS

SEQ ID NO: 59318 - protein, 6 aa, Artificial sequence
  Protein classification predicting sequence
LRHFTA

SEQ ID NO: 59319 - protein, 11 aa, Artificial sequence
  Protein classification predicting sequence
LAYRINQVEYL

SEQ ID NO: 59320 - protein, 9 aa, Artificial sequence
  Protein classification predicting sequence
ELLRLTIPR

SEQ ID NO: 59321 - protein, 10 aa, Artificial sequence
  Protein classification predicting sequence
IKGLTFTYEP

SEQ ID NO: 59322 - protein, 9 aa, Artificial sequence
  Protein classification predicting sequence
YEPPVLRHF

SEQ ID NO: 59323 - protein, 11 aa, Artificial sequence
  Protein classification predicting sequence
GMNPFLLDSED

SEQ ID NO: 59324 - protein, 10 aa, Artificial sequence
  Protein classification predicting sequence
EKGLDRSKMV

SEQ ID NO: 59325 - protein, 17 aa, Artificial sequence
  Protein classification predicting sequence
FSNYFFDTTQGHSQING

SEQ ID NO: 59326 - protein, 13 aa, Artificial sequence
  Protein classification predicting sequence
TVRNVYIKEAFDT

SEQ ID NO: 59327 - protein, 9 aa, Artificial sequence
  Protein classification predicting sequence
NSAGGQPVS

SEQ ID NO: 59328 - protein, 12 aa, Artificial sequence
  Protein classification predicting sequence
MDSARFAENAYF

SEQ ID NO: 59329 - protein, 15 aa, Artificial sequence
  Protein classification predicting sequence
YADGLAMSAKKDAMV

SEQ ID NO: 59330 - protein, 15 aa, Artificial sequence
  Protein classification predicting sequence
LAMSAKKDAMVPMGG

SEQ ID NO: 59331 - protein, 30 aa, Artificial sequence
  Protein classification predicting sequence
ECRTLCVVQEGFPTYGGLEGGAMERLAVGL

SEQ ID NO: 59332 - protein, 6 aa, Artificial sequence
  Protein classification predicting sequence
WLAYRI

SEQ ID NO: 59333 - protein, 39 aa, Artificial sequence
  Protein classification predicting sequence
CELYKVAGIRAVEIGSFLLGRDPKTGKQLPCPAELLRLT

SEQ ID NO: 59334 - protein, 17 aa, Artificial sequence
  Protein classification predicting sequence
PRATYTQTHMDFIIEAF

SEQ ID NO: 59335 - protein, 19 aa, Artificial sequence
  Protein classification predicting sequence
NIKGLTFTYEPKVLRHFTA

SEQ ID NO: 59336 - protein, 7 aa, Artificial sequence
  Protein classification predicting sequence
VLRHFTA

SEQ ID NO: 59337 - protein, 24 aa, Artificial sequence
  Protein classification predicting sequence
GMNPFLLDSEDVFIDLLTDSGTGA

SEQ ID NO: 59338 - protein, 12 aa, Artificial sequence
  Protein classification predicting sequence
RGDEAYSGSRSY

SEQ ID NO: 59339 - protein, 7 aa, Artificial sequence
  Protein classification predicting sequence
FDLEKLE

SEQ ID NO: 59340 - protein, 23 aa, Artificial sequence
  Protein classification predicting sequence
IAKKYDIPVVMDSARFAENAYFI

SEQ ID NO: 59341 - protein, 17 aa, Artificial sequence
  Protein classification predicting sequence
MDSARFAENAYFIQQRE

SEQ ID NO: 59342 - protein, 6 aa, Artificial sequence
  Protein classification predicting sequence
MGGLLC

SEQ ID NO: 59343 - protein, 14 aa, Artificial sequence
  Protein classification predicting sequence
DGMRQDWLAYRINQ

SEQ ID NO: 59344 - protein, 7 aa, Artificial sequence
  Protein classification predicting sequence
IGVVCQQ

SEQ ID NO: 59345 - protein, 11 aa, Artificial sequence
  Protein classification predicting sequence
LLGRDPKTGKQ

SEQ ID NO: 59346 - protein, 19 aa, Artificial sequence
  Protein classification predicting sequence
PVFISNFHFDTTAAHVELN

SEQ ID NO: 59347 - protein, 9 aa, Artificial sequence
  Protein classification predicting sequence
EPFRIKMVE

SEQ ID NO: 59348 - protein, 9 aa, Artificial sequence
  Protein classification predicting sequence
EGFPTYGGL

SEQ ID NO: 59349 - protein, 7 aa, Artificial sequence
  Protein classification predicting sequence
AGIRAVE

SEQ ID NO: 59350 - protein, 7 aa, Artificial sequence
  Protein classification predicting sequence
GRDPETG

SEQ ID NO: 59351 - protein, 11 aa, Artificial sequence
  Protein classification predicting sequence
IDLLTDSGTGA

SEQ ID NO: 59352 - protein, 11 aa, Artificial sequence
  Protein classification predicting sequence
SNYFFDTTQGH

SEQ ID NO: 59353 - protein, 7 aa, Artificial sequence
  Protein classification predicting sequence
EAFDTGV

SEQ ID NO: 59354 - protein, 27 aa, Artificial sequence
  Protein classification predicting sequence
CQQAGGHAAFVDAGKLLPHIPADQFPA

SEQ ID NO: 59355 - protein, 12 aa, Artificial sequence
  Protein classification predicting sequence
HQGRGAEQILFP

SEQ ID NO: 59356 - protein, 23 aa, Artificial sequence
  Protein classification predicting sequence
TIPTHQGRGAEQIYIPVLIKKRE

SEQ ID NO: 59357 - protein, 22 aa, Artificial sequence
  Protein classification predicting sequence
NFKHLPEPFRIRVIEPVKRTTR

SEQ ID NO: 59358 - protein, 8 aa, Artificial sequence
  Protein classification predicting sequence
IVHEMFSY

SEQ ID NO: 59359 - protein, 12 aa, Artificial sequence
  Protein classification predicting sequence
REAMQYEYIEHR

SEQ ID NO: 59360 - protein, 18 aa, Artificial sequence
  Protein classification predicting sequence
FYDATRCVENAYFIKEQE

SEQ ID NO: 59361 - protein, 14 aa, Artificial sequence
  Protein classification predicting sequence
YPAEPFRIKSVETV

SEQ ID NO: 59362 - protein, 7 aa, Artificial sequence
  Protein classification predicting sequence
AGYNTFL

SEQ ID NO: 59363 - protein, 17 aa, Artificial sequence
  Protein classification predicting sequence
FGFKHIVPTHQGRGAEN

SEQ ID NO: 59364 - protein, 9 aa, Artificial sequence
  Protein classification predicting sequence
GNMYFTTTR

SEQ ID NO: 59365 - protein, 13 aa, Artificial sequence
  Protein classification predicting sequence
GNMYFTTTRYHQE

SEQ ID NO: 59366 - protein, 16 aa, Artificial sequence
  Protein classification predicting sequence
CLAVTVNLAGGQPVSM

SEQ ID NO: 59367 - protein, 27 aa, Artificial sequence
  Protein classification predicting sequence
VVVYEGMPSYGGLAGRDMEAMAIGLRE

SEQ ID NO: 59368 - protein, 7 aa, Artificial sequence
  Protein classification predicting sequence
PKLETVR

SEQ ID NO: 59369 - protein, 14 aa, Artificial sequence
  Protein classification predicting sequence
DATRCVENAYFIKE

SEQ ID NO: 59370 - protein, 23 aa, Artificial sequence
  Protein classification predicting sequence
SYADGCTMSGKKDCLVNIGGFLC

SEQ ID NO: 59371 - protein, 20 aa, Artificial sequence
  Protein classification predicting sequence
EGMPSYGGLAGRDMEAMAIG

SEQ ID NO: 59372 - protein, 19 aa, Artificial sequence
  Protein classification predicting sequence
DGCTMSGKKDCLVNIGGFL

SEQ ID NO: 59373 - protein, 10 aa, Artificial sequence
  Protein classification predicting sequence
MERGIVSAGR

SEQ ID NO: 59374 - protein, 6 aa, Artificial sequence
  Protein classification predicting sequence
CIIYMG

SEQ ID NO: 59375 - protein, 7 aa, Artificial sequence
  Protein classification predicting sequence
SGRGDKD

SEQ ID NO: 59376 - protein, 9 aa, Artificial sequence
  Protein classification predicting sequence
AEHIMLVDL

SEQ ID NO: 59377 - protein, 7 aa, Artificial sequence
  Protein classification predicting sequence
IERYSHV

SEQ ID NO: 59378 - protein, 8 aa, Artificial sequence
  Protein classification predicting sequence
GAGIVADS

SEQ ID NO: 59379 - protein, 7 aa, Artificial sequence
  Protein classification predicting sequence
LANVRAK

SEQ ID NO: 59380 - protein, 6 aa, Artificial sequence
  Protein classification predicting sequence
SEWAYP

SEQ ID NO: 59381 - protein, 51 aa, Artificial sequence
  Protein classification predicting sequence
LKVDPKRLQASLQTIVGMVVYSWAKVSKECMADLSIHYTYTLVLDDSSDDP

SEQ ID NO: 59382 - protein, 23 aa, Artificial sequence
  Protein classification predicting sequence
DYPQFLRRMNGLGHCVGASLWPK

SEQ ID NO: 59383 - protein, 12 aa, Artificial sequence
  Protein classification predicting sequence
TLHSSKQMVAVF

SEQ ID NO: 59384 - protein, 9 aa, Artificial sequence
  Protein classification predicting sequence
EQAANVGAV

SEQ ID NO: 59385 - protein, 8 aa, Artificial sequence
  Protein classification predicting sequence
VAQLANVR

SEQ ID NO: 59386 - protein, 7 aa, Artificial sequence
  Protein classification predicting sequence
PAMLNYF

SEQ ID NO: 59387 - protein, 47 aa, Artificial sequence
  Protein classification predicting sequence
LKVDPKRLQASLQTIVGMVVYSWAKVSKECMADLSIHYTYTLVLDDS

SEQ ID NO: 59388 - protein, 7 aa, Artificial sequence
  Protein classification predicting sequence
EIYEKVK

SEQ ID NO: 59389 - protein, 81 aa, Artificial sequence
  Protein classification predicting sequence
DKDPQVMDTIECFMHGYVTWHLCDARYRLHEIYEKVKDQDTEDAKKFCKFFEQAANVGAVAPSEWAYPQVAQLANVRAKDD

SEQ ID NO: 59390 - protein, 7 aa, Artificial sequence
  Protein classification predicting sequence
FPTEYFL

SEQ ID NO: 59391 - protein, 10 aa, Artificial sequence
  Protein classification predicting sequence
TIVGMVVYSW

SEQ ID NO: 59392 - protein, 25 aa, Artificial sequence
  Protein classification predicting sequence
LVNEHFPNVLRHFGPFCSLNLIRST

SEQ ID NO: 59393 - protein, 13 aa, Artificial sequence
  Protein classification predicting sequence
DFFEGCWIEQYNF

SEQ ID NO: 59394 - protein, 13 aa, Artificial sequence
  Protein classification predicting sequence
FLRRMNGLGHCVG

SEQ ID NO: 59395 - protein, 8 aa, Artificial sequence
  Protein classification predicting sequence
SLVKNYVV

SEQ ID NO: 59396 - protein, 9 aa, Artificial sequence
  Protein classification predicting sequence
TIECFMHGY

SEQ ID NO: 59397 - protein, 6 aa, Artificial sequence
  Protein classification predicting sequence
TWHLCD

SEQ ID NO: 59398 - protein, 11 aa, Artificial sequence
  Protein classification predicting sequence
YRDSNYTREER

SEQ ID NO: 59399 - protein, 16 aa, Artificial sequence
  Protein classification predicting sequence
TIVGMVVYSWAKVSKE

SEQ ID NO: 59400 - protein, 6 aa, Artificial sequence
  Protein classification predicting sequence
YFDDLQ

SEQ ID NO: 59401 - protein, 7 aa, Artificial sequence
  Protein classification predicting sequence
FLEITSA

SEQ ID NO: 59402 - protein, 22 aa, Artificial sequence
  Protein classification predicting sequence
AQMENWMVWVNDLMSFYKEFDD

SEQ ID NO: 59403 - protein, 7 aa, Artificial sequence
  Protein classification predicting sequence
ALEKLTQ

SEQ ID NO: 59404 - protein, 11 aa, Artificial sequence
  Protein classification predicting sequence
MDTIECFMHGY

SEQ ID NO: 59405 - protein, 5 aa, Artificial sequence
  Protein classification predicting sequence
HFAQP

SEQ ID NO: 59406 - protein, 12 aa, Artificial sequence
  Protein classification predicting sequence
MADLSIHYTYTL

SEQ ID NO: 59407 - protein, 8 aa, Artificial sequence
  Protein classification predicting sequence
NGLGHCVG

SEQ ID NO: 59408 - protein, 9 aa, Artificial sequence
  Protein classification predicting sequence
AQMENWMVW

SEQ ID NO: 59409 - protein, 6 aa, Artificial sequence
  Protein classification predicting sequence
SQILKK

SEQ ID NO: 59410 - protein, 7 aa, Artificial sequence
  Protein classification predicting sequence
SDPLADG

SEQ ID NO: 59411 - protein, 9 aa, Artificial sequence
  Protein classification predicting sequence
TYFMGGDPD

SEQ ID NO: 59412 - protein, 9 aa, Artificial sequence
  Protein classification predicting sequence
AGADVIELG

SEQ ID NO: 59413 - protein, 8 aa, Artificial sequence
  Protein classification predicting sequence
MGYYNPIY

SEQ ID NO: 59414 - protein, 7 aa, Artificial sequence
  Protein classification predicting sequence
GINFIRL

SEQ ID NO: 59415 - protein, 10 aa, Artificial sequence
  Protein classification predicting sequence
NTSGFVYYVS

SEQ ID NO: 59416 - protein, 14 aa, Artificial sequence
  Protein classification predicting sequence
SGFVYYVSMNGITG

SEQ ID NO: 59417 - protein, 5 aa, Artificial sequence
  Protein classification predicting sequence
YYNPI

SEQ ID NO: 59418 - protein, 6 aa, Artificial sequence
  Protein classification predicting sequence
LMTYYN

SEQ ID NO: 59419 - protein, 7 aa, Artificial sequence
  Protein classification predicting sequence
PVAVGFG

SEQ ID NO: 59420 - protein, 8 aa, Artificial sequence
  Protein classification predicting sequence
TPVVLMGY

SEQ ID NO: 59421 - protein, 13 aa, Artificial sequence
  Protein classification predicting sequence
TPVVLMGYANPIE

SEQ ID NO: 59422 - protein, 10 aa, Artificial sequence
  Protein classification predicting sequence
YYVSLKGVTG

SEQ ID NO: 59423 - protein, 8 aa, Artificial sequence
  Protein classification predicting sequence
PVVAGFGI

SEQ ID NO: 59424 - protein, 7 aa, Artificial sequence
  Protein classification predicting sequence
DGVVVGS

SEQ ID NO: 59425 - protein, 32 aa, Artificial sequence
  Protein classification predicting sequence
EIHSYLEKVKSHTHLPVVAGFGISTKEHVEEM

SEQ ID NO: 59426 - protein, 26 aa, Artificial sequence
  Protein classification predicting sequence
TICDGVVVGSKVIELLENEKREEICE

SEQ ID NO: 59427 - protein, 45 aa, Artificial sequence
  Protein classification predicting sequence
LKERIRFLDEAGASIVEIGIPFSDPVADGPTIQRAGKRALDSGVT

SEQ ID NO: 59428 - protein, 7 aa, Artificial sequence
  Protein classification predicting sequence
KGIFQAL

SEQ ID NO: 59429 - protein, 17 aa, Artificial sequence
  Protein classification predicting sequence
EAGVDGIIVPDLPYEEQ

SEQ ID NO: 59430 - protein, 17 aa, Artificial sequence
  Protein classification predicting sequence
NIALIPLVTVTSPIERI

SEQ ID NO: 59431 - protein, 26 aa, Artificial sequence
  Protein classification predicting sequence
KITSESEGFVYAVTVAGVTGVRQNFK

SEQ ID NO: 59432 - protein, 12 aa, Artificial sequence
  Protein classification predicting sequence
EIHSYLEKVKSH

SEQ ID NO: 59433 - protein, 15 aa, Artificial sequence
  Protein classification predicting sequence
IPIILFTYYNPVLQL

SEQ ID NO: 59434 - protein, 9 aa, Artificial sequence
  Protein classification predicting sequence
PVAVGFGIS

SEQ ID NO: 59435 - protein, 11 aa, Artificial sequence
  Protein classification predicting sequence
SGADVLELGIP

SEQ ID NO: 59436 - protein, 7 aa, Artificial sequence
  Protein classification predicting sequence
LDRIFLV

SEQ ID NO: 59437 - protein, 6 aa, Artificial sequence
  Protein classification predicting sequence
GAFVPF

SEQ ID NO: 59438 - protein, 9 aa, Artificial sequence
  Protein classification predicting sequence
ELGIPFSDP

SEQ ID NO: 59439 - protein, 7 aa, Artificial sequence
  Protein classification predicting sequence
YLLSRSG

SEQ ID NO: 59440 - protein, 8 aa, Artificial sequence
  Protein classification predicting sequence
ADAVVIGS

SEQ ID NO: 59441 - protein, 7 aa, Artificial sequence
  Protein classification predicting sequence
GDPDLET

SEQ ID NO: 59442 - protein, 7 aa, Artificial sequence
  Protein classification predicting sequence
GIPFSDP

SEQ ID NO: 59443 - protein, 7 aa, Artificial sequence
  Protein classification predicting sequence
DSVLIAD

SEQ ID NO: 59444 - protein, 8 aa, Artificial sequence
  Protein classification predicting sequence
GYIYLLSR

SEQ ID NO: 59445 - protein, 7 aa, Artificial sequence
  Protein classification predicting sequence
TIPIGLL

SEQ ID NO: 59446 - protein, 5 aa, Artificial sequence
  Protein classification predicting sequence
FICPP

SEQ ID NO: 59447 - protein, 6 aa, Artificial sequence
  Protein classification predicting sequence
DGKTIQ

SEQ ID NO: 59448 - protein, 7 aa, Artificial sequence
  Protein classification predicting sequence
ADGVIVG

SEQ ID NO: 59449 - protein, 7 aa, Artificial sequence
  Protein classification predicting sequence
PFSDPMA

SEQ ID NO: 59450 - protein, 7 aa, Artificial sequence
  Protein classification predicting sequence
LMGYLNP

SEQ ID NO: 59451 - protein, 9 aa, Artificial sequence
  Protein classification predicting sequence
PTTDDARLP

SEQ ID NO: 59452 - protein, 8 aa, Artificial sequence
  Protein classification predicting sequence
SGFVYYVS

SEQ ID NO: 59453 - protein, 6 aa, Artificial sequence
  Protein classification predicting sequence
IELGMP

SEQ ID NO: 59454 - protein, 7 aa, Artificial sequence
  Protein classification predicting sequence
LTVSLMH

SEQ ID NO: 59455 - protein, 7 aa, Artificial sequence
  Protein classification predicting sequence
DGVIIGS

SEQ ID NO: 59456 - protein, 7 aa, Artificial sequence
  Protein classification predicting sequence
ADGPTIQ

SEQ ID NO: 59457 - protein, 8 aa, Artificial sequence
  Protein classification predicting sequence
VSVTGVTG

SEQ ID NO: 59458 - protein, 6 aa, Artificial sequence
  Protein classification predicting sequence
IIPDLP

SEQ ID NO: 59459 - protein, 18 aa, Artificial sequence
  Protein classification predicting sequence
LELGIPFSDPLADGPTIQ

SEQ ID NO: 59460 - protein, 7 aa, Artificial sequence
  Protein classification predicting sequence
QCFEMLA

SEQ ID NO: 59461 - protein, 13 aa, Artificial sequence
  Protein classification predicting sequence
VGVDSVLVADVPV

SEQ ID NO: 59462 - protein, 11 aa, Artificial sequence
  Protein classification predicting sequence
AAPPLQGFGIS

SEQ ID NO: 59463 - protein, 6 aa, Artificial sequence
  Protein classification predicting sequence
IPIGLL

SEQ ID NO: 59464 - protein, 8 aa, Artificial sequence
  Protein classification predicting sequence
GYTYLLSR

SEQ ID NO: 59465 - protein, 14 aa, Artificial sequence
  Protein classification predicting sequence
ELGVPFSDPMADGP

SEQ ID NO: 59466 - protein, 7 aa, Artificial sequence
  Protein classification predicting sequence
GVPFSDP

SEQ ID NO: 59467 - protein, 8 aa, Artificial sequence
  Protein classification predicting sequence
GLIIPDLP

SEQ ID NO: 59468 - protein, 8 aa, Artificial sequence
  Protein classification predicting sequence
GADALELG

SEQ ID NO: 59469 - protein, 11 aa, Artificial sequence
  Protein classification predicting sequence
FYQRCAEVGVD

SEQ ID NO: 59470 - protein, 6 aa, Artificial sequence
  Protein classification predicting sequence
SRAGVT

SEQ ID NO: 59471 - protein, 8 aa, Artificial sequence
  Protein classification predicting sequence
AGAISGSA

SEQ ID NO: 59472 - protein, 8 aa, Artificial sequence
  Protein classification predicting sequence
GADVIELG

SEQ ID NO: 59473 - protein, 8 aa, Artificial sequence
  Protein classification predicting sequence
GLVVPDLP

SEQ ID NO: 59474 - protein, 6 aa, Artificial sequence
  Protein classification predicting sequence
DVIELG

SEQ ID NO: 59475 - protein, 8 aa, Artificial sequence
  Protein classification predicting sequence
PFVTLGDP

SEQ ID NO: 59476 - protein, 8 aa, Artificial sequence
  Protein classification predicting sequence
GAFVPFVT

SEQ ID NO: 59477 - protein, 7 aa, Artificial sequence
  Protein classification predicting sequence
GIDAFYA

SEQ ID NO: 59478 - protein, 23 aa, Artificial sequence
  Protein classification predicting sequence
VGVDSVLVADVPVEESAPFRQAA

SEQ ID NO: 59479 - protein, 21 aa, Artificial sequence
  Protein classification predicting sequence
RHNIAPIFICPPNADDDLLRQ

SEQ ID NO: 59480 - protein, 45 aa, Artificial sequence
  Protein classification predicting sequence
APIFICPPNADDDLLRQIASYGRGYTYLLSRAGVTGAENRAALPL

SEQ ID NO: 59481 - protein, 7 aa, Artificial sequence
  Protein classification predicting sequence
ALPLHHL

SEQ ID NO: 59482 - protein, 21 aa, Artificial sequence
  Protein classification predicting sequence
AAIDAGAAGAISGSAIVKIIE

SEQ ID NO: 59483 - protein, 6 aa, Artificial sequence
  Protein classification predicting sequence
FIPYIM

SEQ ID NO: 59484 - protein, 10 aa, Artificial sequence
  Protein classification predicting sequence
VKGLIIPDLP

SEQ ID NO: 59485 - protein, 6 aa, Artificial sequence
  Protein classification predicting sequence
GLIIPD

SEQ ID NO: 59486 - protein, 8 aa, Artificial sequence
  Protein classification predicting sequence
VSSLGVTG

SEQ ID NO: 59487 - protein, 7 aa, Artificial sequence
  Protein classification predicting sequence
GFIYLVS

SEQ ID NO: 59488 - protein, 7 aa, Artificial sequence
  Protein classification predicting sequence
PIGVGFG

SEQ ID NO: 59489 - protein, 11 aa, Artificial sequence
  Protein classification predicting sequence
GIPFSDPVADG

SEQ ID NO: 59490 - protein, 9 aa, Artificial sequence
  Protein classification predicting sequence
PFSDPVADG

SEQ ID NO: 59491 - protein, 7 aa, Artificial sequence
  Protein classification predicting sequence
GSAIVKI

SEQ ID NO: 59492 - protein, 7 aa, Artificial sequence
  Protein classification predicting sequence
ELGVPFS

SEQ ID NO: 59493 - protein, 6 aa, Artificial sequence
  Protein classification predicting sequence
AFVPFV

SEQ ID NO: 59494 - protein, 6 aa, Artificial sequence
  Protein classification predicting sequence
TPVVLM

SEQ ID NO: 59495 - protein, 9 aa, Artificial sequence
  Protein classification predicting sequence
APNTPDERL

SEQ ID NO: 59496 - protein, 15 aa, Artificial sequence
  Protein classification predicting sequence
RAALIGYLPTGYPDV

SEQ ID NO: 59497 - protein, 16 aa, Artificial sequence
  Protein classification predicting sequence
EVGVPYSDPGMDGPTI

SEQ ID NO: 59498 - protein, 16 aa, Artificial sequence
  Protein classification predicting sequence
GGVRVRDTLAAVEAIS

SEQ ID NO: 59499 - protein, 14 aa, Artificial sequence
  Protein classification predicting sequence
AVVMTYWNPVLRYG

SEQ ID NO: 59500 - protein, 22 aa, Artificial sequence
  Protein classification predicting sequence
TVEASRGFVYAASTMGVTGARD

SEQ ID NO: 59501 - protein, 19 aa, Artificial sequence
  Protein classification predicting sequence
AGGRAVVMTYWNPVLRYGV

SEQ ID NO: 59502 - protein, 15 aa, Artificial sequence
  Protein classification predicting sequence
HRLDRIFLVAPSSTP

SEQ ID NO: 59503 - protein, 15 aa, Artificial sequence
  Protein classification predicting sequence
IELGVPFSDPMADGP

SEQ ID NO: 59504 - protein, 7 aa, Artificial sequence
  Protein classification predicting sequence
GVAYSDP

SEQ ID NO: 59505 - protein, 6 aa, Artificial sequence
  Protein classification predicting sequence
DGPTIQ

SEQ ID NO: 59506 - protein, 12 aa, Artificial sequence
  Protein classification predicting sequence
LDRIFLVAPSST

SEQ ID NO: 59507 - protein, 10 aa, Artificial sequence
  Protein classification predicting sequence
IFVPYIMAGD

SEQ ID NO: 59508 - protein, 7 aa, Artificial sequence
  Protein classification predicting sequence
FICPPNA

SEQ ID NO: 59509 - protein, 7 aa, Artificial sequence
  Protein classification predicting sequence
GAISGSA

SEQ ID NO: 59510 - protein, 15 aa, Artificial sequence
  Protein classification predicting sequence
PFSDPLADGPTIQNA

SEQ ID NO: 59511 - protein, 6 aa, Artificial sequence
  Protein classification predicting sequence
KIIDTL

SEQ ID NO: 59512 - protein, 7 aa, Artificial sequence
  Protein classification predicting sequence
PIILFTY

SEQ ID NO: 59513 - protein, 10 aa, Artificial sequence
  Protein classification predicting sequence
PYSDPLADGP

SEQ ID NO: 59514 - protein, 15 aa, Artificial sequence
  Protein classification predicting sequence
GFTYLVSVTGVTGER

SEQ ID NO: 59515 - protein, 9 aa, Artificial sequence
  Protein classification predicting sequence
TLQMVREFR

SEQ ID NO: 59516 - protein, 6 aa, Artificial sequence
  Protein classification predicting sequence
DPMADG

SEQ ID NO: 59517 - protein, 9 aa, Artificial sequence
  Protein classification predicting sequence
AGQTLAKTL

SEQ ID NO: 59518 - protein, 7 aa, Artificial sequence
  Protein classification predicting sequence
FITAGDP

SEQ ID NO: 59519 - protein, 12 aa, Artificial sequence
  Protein classification predicting sequence
ITAGDPYPELTV

SEQ ID NO: 59520 - protein, 10 aa, Artificial sequence
  Protein classification predicting sequence
TPTTDDKRLP

SEQ ID NO: 59521 - protein, 7 aa, Artificial sequence
  Protein classification predicting sequence
ADGVVVG

SEQ ID NO: 59522 - protein, 10 aa, Artificial sequence
  Protein classification predicting sequence
PFSDPMADGP

SEQ ID NO: 59523 - protein, 7 aa, Artificial sequence
  Protein classification predicting sequence
GVPYSDP

SEQ ID NO: 59524 - protein, 10 aa, Artificial sequence
  Protein classification predicting sequence
DPMADGPAIQ

SEQ ID NO: 59525 - protein, 8 aa, Artificial sequence
  Protein classification predicting sequence
SLKIIDTL

SEQ ID NO: 59526 - protein, 6 aa, Artificial sequence
  Protein classification predicting sequence
DIIELG

SEQ ID NO: 59527 - protein, 36 aa, Artificial sequence
  Protein classification predicting sequence
YVLMTYYNIICHYGEQAFFEKCRDTGVYGLIIPDLP

SEQ ID NO: 59528 - protein, 35 aa, Artificial sequence
  Protein classification predicting sequence
ELSQRLKQQFSHYGVKIISLVAMTTDDKRIKDIVS

SEQ ID NO: 59529 - protein, 46 aa, Artificial sequence
  Protein classification predicting sequence
AEGFIYTVTMNATTGQNGAFHPELKRKIESIKAIANVPVVAGFGIR

SEQ ID NO: 59530 - protein, 9 aa, Artificial sequence
  Protein classification predicting sequence
KLFIPYIMG

SEQ ID NO: 59531 - protein, 14 aa, Artificial sequence
  Protein classification predicting sequence
EGFIYTVTMNATTG

SEQ ID NO: 59532 - protein, 14 aa, Artificial sequence
  Protein classification predicting sequence
VADGIVIGSEIVKR

SEQ ID NO: 59533 - protein, 7 aa, Artificial sequence
  Protein classification predicting sequence
VMTYWNP

SEQ ID NO: 59534 - protein, 12 aa, Artificial sequence
  Protein classification predicting sequence
TDIALIPLVSLT

SEQ ID NO: 59535 - protein, 6 aa, Artificial sequence
  Protein classification predicting sequence
PLVSLT

SEQ ID NO: 59536 - protein, 6 aa, Artificial sequence
  Protein classification predicting sequence
DLDKHL

SEQ ID NO: 59537 - protein, 11 aa, Artificial sequence
  Protein classification predicting sequence
YAVAINGVTGK

SEQ ID NO: 59538 - protein, 5 aa, Artificial sequence
  Protein classification predicting sequence
MTYYN

SEQ ID NO: 59539 - protein, 7 aa, Artificial sequence
  Protein classification predicting sequence
PDLPLEE

SEQ ID NO: 59540 - protein, 10 aa, Artificial sequence
  Protein classification predicting sequence
LMTYLNPVLA

SEQ ID NO: 59541 - protein, 8 aa, Artificial sequence
  Protein classification predicting sequence
FLLAPTST

SEQ ID NO: 59542 - protein, 13 aa, Artificial sequence
  Protein classification predicting sequence
PFSDPLADGPTIQ

SEQ ID NO: 59543 - protein, 14 aa, Artificial sequence
  Protein classification predicting sequence
PIFIAPPTASDETL

SEQ ID NO: 59544 - protein, 8 aa, Artificial sequence
  Protein classification predicting sequence
LLMYANLV

SEQ ID NO: 59545 - protein, 9 aa, Artificial sequence
  Protein classification predicting sequence
DSVLIADVP

SEQ ID NO: 59546 - protein, 6 aa, Artificial sequence
  Protein classification predicting sequence
GVTGAE

SEQ ID NO: 59547 - protein, 13 aa, Artificial sequence
  Protein classification predicting sequence
GVTGAETKANMPV

SEQ ID NO: 59548 - protein, 10 aa, Artificial sequence
  Protein classification predicting sequence
GAAGAISGSA

SEQ ID NO: 59549 - protein, 22 aa, Artificial sequence
  Protein classification predicting sequence
GADALELGIPFSDPLADGPTIQ

SEQ ID NO: 59550 - protein, 8 aa, Artificial sequence
  Protein classification predicting sequence
FVSAMKAA

SEQ ID NO: 59551 - protein, 14 aa, Artificial sequence
  Protein classification predicting sequence
AIDAGAAGAISGSA

SEQ ID NO: 59552 - protein, 6 aa, Artificial sequence
  Protein classification predicting sequence
MGYLNP

SEQ ID NO: 59553 - protein, 10 aa, Artificial sequence
  Protein classification predicting sequence
AQGYLYYVSF

SEQ ID NO: 59554 - protein, 7 aa, Artificial sequence
  Protein classification predicting sequence
GAFVPFV

SEQ ID NO: 59555 - protein, 9 aa, Artificial sequence
  Protein classification predicting sequence
AGADALELG

SEQ ID NO: 59556 - protein, 7 aa, Artificial sequence
  Protein classification predicting sequence
LQGFGIS

SEQ ID NO: 59557 - protein, 11 aa, Artificial sequence
  Protein classification predicting sequence
AGAAGAISGSA

SEQ ID NO: 59558 - protein, 19 aa, Artificial sequence
  Protein classification predicting sequence
AGAAGAISGSAIVKIIEKN

SEQ ID NO: 59559 - protein, 7 aa, Artificial sequence
  Protein classification predicting sequence
LMGYANP

SEQ ID NO: 59560 - protein, 7 aa, Artificial sequence
  Protein classification predicting sequence
IRLATPT

SEQ ID NO: 59561 - protein, 10 aa, Artificial sequence
  Protein classification predicting sequence
YYVSVAGVTG

SEQ ID NO: 59562 - protein, 6 aa, Artificial sequence
  Protein classification predicting sequence
HPGSLG

SEQ ID NO: 59563 - protein, 8 aa, Artificial sequence
  Protein classification predicting sequence
ACVGGGSN

SEQ ID NO: 59564 - protein, 6 aa, Artificial sequence
  Protein classification predicting sequence
GEYRYD

SEQ ID NO: 59565 - protein, 12 aa, Artificial sequence
  Protein classification predicting sequence
IAETGAGQHGVA

SEQ ID NO: 59566 - protein, 14 aa, Artificial sequence
  Protein classification predicting sequence
IAETGAGQHGVATA

SEQ ID NO: 59567 - protein, 22 aa, Artificial sequence
  Protein classification predicting sequence
IAETGAGQHGVATATVCARFGL

SEQ ID NO: 59568 - protein, 6 aa, Artificial sequence
  Protein classification predicting sequence
CVIYMG

SEQ ID NO: 59569 - protein, 9 aa, Artificial sequence
  Protein classification predicting sequence
RQALNVFRM

SEQ ID NO: 59570 - protein, 7 aa, Artificial sequence
  Protein classification predicting sequence
NVFRMKL

SEQ ID NO: 59571 - protein, 35 aa, Artificial sequence
  Protein classification predicting sequence
TLKDATSEAIRDWVTNVETTHYILGSVAGPHPYPM

SEQ ID NO: 59572 - protein, 11 aa, Artificial sequence
  Protein classification predicting sequence
HSISAGLDYPG

SEQ ID NO: 59573 - protein, 9 aa, Artificial sequence
  Protein classification predicting sequence
RAEYYSVTD

SEQ ID NO: 59574 - protein, 6 aa, Artificial sequence
  Protein classification predicting sequence
VPETLM

SEQ ID NO: 59575 - protein, 8 aa, Artificial sequence
  Protein classification predicting sequence
LKREDLLH

SEQ ID NO: 59576 - protein, 9 aa, Artificial sequence
  Protein classification predicting sequence
NLSGRGDKD

SEQ ID NO: 59577 - protein, 10 aa, Artificial sequence
  Protein classification predicting sequence
ERQKMNVFRM

SEQ ID NO: 59578 - protein, 9 aa, Artificial sequence
  Protein classification predicting sequence
IGSVVGPHP

SEQ ID NO: 59579 - protein, 6 aa, Artificial sequence
  Protein classification predicting sequence
GPHPFP

SEQ ID NO: 59580 - protein, 9 aa, Artificial sequence
  Protein classification predicting sequence
ACVGGGSNA

SEQ ID NO: 59581 - protein, 11 aa, Artificial sequence
  Protein classification predicting sequence
VGGGSNAMGIF

SEQ ID NO: 59582 - protein, 7 aa, Artificial sequence
  Protein classification predicting sequence
VRLIGVE

SEQ ID NO: 59583 - protein, 7 aa, Artificial sequence
  Protein classification predicting sequence
NEALRDW

SEQ ID NO: 59584 - protein, 7 aa, Artificial sequence
  Protein classification predicting sequence
PTIVREF

SEQ ID NO: 59585 - protein, 7 aa, Artificial sequence
  Protein classification predicting sequence
GLDSGKH

SEQ ID NO: 59586 - protein, 6 aa, Artificial sequence
  Protein classification predicting sequence
VGPQHA

SEQ ID NO: 59587 - protein, 9 aa, Artificial sequence
  Protein classification predicting sequence
ALESSHALA

SEQ ID NO: 59588 - protein, 9 aa, Artificial sequence
  Protein classification predicting sequence
TLKDAINEA

SEQ ID NO: 59589 - protein, 7 aa, Artificial sequence
  Protein classification predicting sequence
YMGAKDV

SEQ ID NO: 59590 - protein, 6 aa, Artificial sequence
  Protein classification predicting sequence
RDWVTN

SEQ ID NO: 59591 - protein, 7 aa, Artificial sequence
  Protein classification predicting sequence
GAEVIPV

SEQ ID NO: 59592 - protein, 9 aa, Artificial sequence
  Protein classification predicting sequence
SGSRTLKDA

SEQ ID NO: 59593 - protein, 7 aa, Artificial sequence
  Protein classification predicting sequence
VDDTHYL

SEQ ID NO: 59594 - protein, 8 aa, Artificial sequence
  Protein classification predicting sequence
LQDGDGQI

SEQ ID NO: 59595 - protein, 10 aa, Artificial sequence
  Protein classification predicting sequence
PALESAHAIA

SEQ ID NO: 59596 - protein, 12 aa, Artificial sequence
  Protein classification predicting sequence
RLIAETGAGQHG

SEQ ID NO: 59597 - protein, 10 aa, Artificial sequence
  Protein classification predicting sequence
NVFRMKLLGA

SEQ ID NO: 59598 - protein, 8 aa, Artificial sequence
  Protein classification predicting sequence
HGGAHKTN

SEQ ID NO: 59599 - protein, 6 aa, Artificial sequence
  Protein classification predicting sequence
GPHPYP

SEQ ID NO: 59600 - protein, 10 aa, Artificial sequence
  Protein classification predicting sequence
IVRDFQSVIG

SEQ ID NO: 59601 - protein, 7 aa, Artificial sequence
  Protein classification predicting sequence
QILEAEG

SEQ ID NO: 59602 - protein, 12 aa, Artificial sequence
  Protein classification predicting sequence
VACVGGGSNAMG

SEQ ID NO: 59603 - protein, 7 aa, Artificial sequence
  Protein classification predicting sequence
CVGGGSN

SEQ ID NO: 59604 - protein, 6 aa, Artificial sequence
  Protein classification predicting sequence
AKIYFK

SEQ ID NO: 59605 - protein, 9 aa, Artificial sequence
  Protein classification predicting sequence
TGSHKINTA

SEQ ID NO: 59606 - protein, 9 aa, Artificial sequence
  Protein classification predicting sequence
HTGAHKINN

SEQ ID NO: 59607 - protein, 8 aa, Artificial sequence
  Protein classification predicting sequence
LLAKKMGK

SEQ ID NO: 59608 - protein, 6 aa, Artificial sequence
  Protein classification predicting sequence
IGEETK

SEQ ID NO: 59609 - protein, 6 aa, Artificial sequence
  Protein classification predicting sequence
GVGPEH

SEQ ID NO: 59610 - protein, 6 aa, Artificial sequence
  Protein classification predicting sequence
YVPQIL

SEQ ID NO: 59611 - protein, 16 aa, Artificial sequence
  Protein classification predicting sequence
PTIVREFQRMIGEETK

SEQ ID NO: 59612 - protein, 10 aa, Artificial sequence
  Protein classification predicting sequence
WYNILPDLPE

SEQ ID NO: 59613 - protein, 8 aa, Artificial sequence
  Protein classification predicting sequence
IYYKYEGV

SEQ ID NO: 59614 - protein, 8 aa, Artificial sequence
  Protein classification predicting sequence
AGGLRYHG

SEQ ID NO: 59615 - protein, 7 aa, Artificial sequence
  Protein classification predicting sequence
APTLSVL

SEQ ID NO: 59616 - protein, 8 aa, Artificial sequence
  Protein classification predicting sequence
YVGRATPL

SEQ ID NO: 59617 - protein, 8 aa, Artificial sequence
  Protein classification predicting sequence
HQTVIGLE

SEQ ID NO: 59618 - protein, 8 aa, Artificial sequence
  Protein classification predicting sequence
SGHGLLDL

SEQ ID NO: 59619 - protein, 6 aa, Artificial sequence
  Protein classification predicting sequence
YMGAKD

SEQ ID NO: 59620 - protein, 7 aa, Artificial sequence
  Protein classification predicting sequence
PYPEMVR

SEQ ID NO: 59621 - protein, 7 aa, Artificial sequence
  Protein classification predicting sequence
FGEYGGQ

SEQ ID NO: 59622 - protein, 6 aa, Artificial sequence
  Protein classification predicting sequence
HGGAHK

SEQ ID NO: 59623 - protein, 7 aa, Artificial sequence
  Protein classification predicting sequence
GPHPFPT

SEQ ID NO: 59624 - protein, 14 aa, Artificial sequence
  Protein classification predicting sequence
EGIIPALESSHALA

SEQ ID NO: 59625 - protein, 10 aa, Artificial sequence
  Protein classification predicting sequence
YSLGSVLNHV

SEQ ID NO: 59626 - protein, 8 aa, Artificial sequence
  Protein classification predicting sequence
LGSVLNHV

SEQ ID NO: 59627 - protein, 15 aa, Artificial sequence
  Protein classification predicting sequence
TETGAGQWGTALSLA

SEQ ID NO: 59628 - protein, 7 aa, Artificial sequence
  Protein classification predicting sequence
FNLSGHG

SEQ ID NO: 59629 - protein, 6 aa, Artificial sequence
  Protein classification predicting sequence
SYEQKP

SEQ ID NO: 59630 - protein, 8 aa, Artificial sequence
  Protein classification predicting sequence
VALASALF

SEQ ID NO: 59631 - protein, 14 aa, Artificial sequence
  Protein classification predicting sequence
FKTIAGMEAKKQME

SEQ ID NO: 59632 - protein, 9 aa, Artificial sequence
  Protein classification predicting sequence
NTAIAQAYY

SEQ ID NO: 59633 - protein, 6 aa, Artificial sequence
  Protein classification predicting sequence
FGEYGG

SEQ ID NO: 59634 - protein, 7 aa, Artificial sequence
  Protein classification predicting sequence
LAKKMGK

SEQ ID NO: 59635 - protein, 9 aa, Artificial sequence
  Protein classification predicting sequence
EGIIPAIES

SEQ ID NO: 59636 - protein, 7 aa, Artificial sequence
  Protein classification predicting sequence
YVGRPSP

SEQ ID NO: 59637 - protein, 7 aa, Artificial sequence
  Protein classification predicting sequence
IGTVAGP

SEQ ID NO: 59638 - protein, 8 aa, Artificial sequence
  Protein classification predicting sequence
VRDFQSVI

SEQ ID NO: 59639 - protein, 9 aa, Artificial sequence
  Protein classification predicting sequence
ACIGGGSNA

SEQ ID NO: 59640 - protein, 7 aa, Artificial sequence
  Protein classification predicting sequence
GPEHAYL

SEQ ID NO: 59641 - protein, 8 aa, Artificial sequence
  Protein classification predicting sequence
PDARGHFG

SEQ ID NO: 59642 - protein, 12 aa, Artificial sequence
  Protein classification predicting sequence
IYLKREDLNHTG

SEQ ID NO: 59643 - protein, 6 aa, Artificial sequence
  Protein classification predicting sequence
GLECVV

SEQ ID NO: 59644 - protein, 7 aa, Artificial sequence
  Protein classification predicting sequence
RMRLLGA

SEQ ID NO: 59645 - protein, 6 aa, Artificial sequence
  Protein classification predicting sequence
VRDFQS

SEQ ID NO: 59646 - protein, 11 aa, Artificial sequence
  Protein classification predicting sequence
LNHTGSHKINN

SEQ ID NO: 59647 - protein, 5 aa, Artificial sequence
  Protein classification predicting sequence
HKINN

SEQ ID NO: 59648 - protein, 12 aa, Artificial sequence
  Protein classification predicting sequence
NLSGRGDKDVHT

SEQ ID NO: 59649 - protein, 11 aa, Artificial sequence
  Protein classification predicting sequence
AETGAGQHGVA

SEQ ID NO: 59650 - protein, 17 aa, Artificial sequence
  Protein classification predicting sequence
AETGAGQHGVATATVCA

SEQ ID NO: 59651 - protein, 6 aa, Artificial sequence
  Protein classification predicting sequence
YWVSHV

SEQ ID NO: 59652 - protein, 16 aa, Artificial sequence
  Protein classification predicting sequence
DTHYIMGSVLGPHPFP

SEQ ID NO: 59653 - protein, 10 aa, Artificial sequence
  Protein classification predicting sequence
VACIGGGSNA

SEQ ID NO: 59654 - protein, 6 aa, Artificial sequence
  Protein classification predicting sequence
HTGAHK

SEQ ID NO: 59655 - protein, 7 aa, Artificial sequence
  Protein classification predicting sequence
ARFGLEC

SEQ ID NO: 59656 - protein, 12 aa, Artificial sequence
  Protein classification predicting sequence
DMERQALNVFRM

SEQ ID NO: 59657 - protein, 11 aa, Artificial sequence
  Protein classification predicting sequence
GQALLAKRMGK

SEQ ID NO: 59658 - protein, 8 aa, Artificial sequence
  Protein classification predicting sequence
VRLVGVEA

SEQ ID NO: 59659 - protein, 7 aa, Artificial sequence
  Protein classification predicting sequence
AGKGIDT

SEQ ID NO: 59660 - protein, 7 aa, Artificial sequence
  Protein classification predicting sequence
GRPTALT

SEQ ID NO: 59661 - protein, 8 aa, Artificial sequence
  Protein classification predicting sequence
HAATISKG

SEQ ID NO: 59662 - protein, 6 aa, Artificial sequence
  Protein classification predicting sequence
YLIQDE

SEQ ID NO: 59663 - protein, 7 aa, Artificial sequence
  Protein classification predicting sequence
SITDEEA

SEQ ID NO: 59664 - protein, 7 aa, Artificial sequence
  Protein classification predicting sequence
YFGEFGG

SEQ ID NO: 59665 - protein, 11 aa, Artificial sequence
  Protein classification predicting sequence
YLKREDLLHGG

SEQ ID NO: 59666 - protein, 9 aa, Artificial sequence
  Protein classification predicting sequence
TLKDACNEA

SEQ ID NO: 59667 - protein, 7 aa, Artificial sequence
  Protein classification predicting sequence
GIYFGMK

SEQ ID NO: 59668 - protein, 10 aa, Artificial sequence
  Protein classification predicting sequence
VGRPSPVYHA

SEQ ID NO: 59669 - protein, 6 aa, Artificial sequence
  Protein classification predicting sequence
NNCIGQ

SEQ ID NO: 59670 - protein, 21 aa, Artificial sequence
  Protein classification predicting sequence
TFYIIGTVAGPDPYPRMVRDF

SEQ ID NO: 59671 - protein, 7 aa, Artificial sequence
  Protein classification predicting sequence
VGGGSNA

SEQ ID NO: 59672 - protein, 9 aa, Artificial sequence
  Protein classification predicting sequence
KREELNHTG

SEQ ID NO: 59673 - protein, 6 aa, Artificial sequence
  Protein classification predicting sequence
NNVLGQ

SEQ ID NO: 59674 - protein, 7 aa, Artificial sequence
  Protein classification predicting sequence
RDWVTNV

SEQ ID NO: 59675 - protein, 8 aa, Artificial sequence
  Protein classification predicting sequence
GGGSNAMG

SEQ ID NO: 59676 - protein, 15 aa, Artificial sequence
  Protein classification predicting sequence
SISAGLDYPGIGPEH

SEQ ID NO: 59677 - protein, 6 aa, Artificial sequence
  Protein classification predicting sequence
TDDEAL

SEQ ID NO: 59678 - protein, 8 aa, Artificial sequence
  Protein classification predicting sequence
PNVFRMKL

SEQ ID NO: 59679 - protein, 18 aa, Artificial sequence
  Protein classification predicting sequence
GTLKDAMNEALRDWVTNV

SEQ ID NO: 59680 - protein, 10 aa, Artificial sequence
  Protein classification predicting sequence
PGVLHGNRTY

SEQ ID NO: 59681 - protein, 8 aa, Artificial sequence
  Protein classification predicting sequence
PALESAHA

SEQ ID NO: 59682 - protein, 7 aa, Artificial sequence
  Protein classification predicting sequence
FVSAQKD

SEQ ID NO: 59683 - protein, 9 aa, Artificial sequence
  Protein classification predicting sequence
SISAGLDFP

SEQ ID NO: 59684 - protein, 9 aa, Artificial sequence
  Protein classification predicting sequence
RQSPNVFRM

SEQ ID NO: 59685 - protein, 6 aa, Artificial sequence
  Protein classification predicting sequence
YVSITD

SEQ ID NO: 59686 - protein, 16 aa, Artificial sequence
  Protein classification predicting sequence
SHYMIGTAAGPHPYPT

SEQ ID NO: 59687 - protein, 11 aa, Artificial sequence
  Protein classification predicting sequence
GTAAGPHPYPT

SEQ ID NO: 59688 - protein, 6 aa, Artificial sequence
  Protein classification predicting sequence
FQSIIG

SEQ ID NO: 59689 - protein, 8 aa, Artificial sequence
  Protein classification predicting sequence
NLTKGTKT

SEQ ID NO: 59690 - protein, 15 aa, Artificial sequence
  Protein classification predicting sequence
IIAETGAGQHGVATA

SEQ ID NO: 59691 - protein, 8 aa, Artificial sequence
  Protein classification predicting sequence
TGIFFGMK

SEQ ID NO: 59692 - protein, 18 aa, Artificial sequence
  Protein classification predicting sequence
AHYMLGTAAGPHPYPTIV

SEQ ID NO: 59693 - protein, 8 aa, Artificial sequence
  Protein classification predicting sequence
RDWVTNVE

SEQ ID NO: 59694 - protein, 7 aa, Artificial sequence
  Protein classification predicting sequence
GRPSPLY

SEQ ID NO: 59695 - protein, 9 aa, Artificial sequence
  Protein classification predicting sequence
TLKDAMNEA

SEQ ID NO: 59696 - protein, 10 aa, Artificial sequence
  Protein classification predicting sequence
GTAAGPHPYP

SEQ ID NO: 59697 - protein, 8 aa, Artificial sequence
  Protein classification predicting sequence
EAREQILE

SEQ ID NO: 59698 - protein, 8 aa, Artificial sequence
  Protein classification predicting sequence
LPDAVVAC

SEQ ID NO: 59699 - protein, 10 aa, Artificial sequence
  Protein classification predicting sequence
GRGDKDIFTV

SEQ ID NO: 59700 - protein, 8 aa, Artificial sequence
  Protein classification predicting sequence
IWLKREDL

SEQ ID NO: 59701 - protein, 6 aa, Artificial sequence
  Protein classification predicting sequence
RMGKKR

SEQ ID NO: 59702 - protein, 8 aa, Artificial sequence
  Protein classification predicting sequence
CALFGLDC

SEQ ID NO: 59703 - protein, 6 aa, Artificial sequence
  Protein classification predicting sequence
RQAPNV

SEQ ID NO: 59704 - protein, 8 aa, Artificial sequence
  Protein classification predicting sequence
GVLHGSMM

SEQ ID NO: 59705 - protein, 13 aa, Artificial sequence
  Protein classification predicting sequence
SAGLDYPGVGPEH

SEQ ID NO: 59706 - protein, 7 aa, Artificial sequence
  Protein classification predicting sequence
LKNYAGR

SEQ ID NO: 59707 - protein, 6 aa, Artificial sequence
  Protein classification predicting sequence
NNALGQ

SEQ ID NO: 59708 - protein, 14 aa, Artificial sequence
  Protein classification predicting sequence
AETGAGQHGVATAT

SEQ ID NO: 59709 - protein, 6 aa, Artificial sequence
  Protein classification predicting sequence
LKDAVN

SEQ ID NO: 59710 - protein, 12 aa, Artificial sequence
  Protein classification predicting sequence
KREDLNHTGAHK

SEQ ID NO: 59711 - protein, 7 aa, Artificial sequence
  Protein classification predicting sequence
AGPHPYP

SEQ ID NO: 59712 - protein, 6 aa, Artificial sequence
  Protein classification predicting sequence
SYLMQD

SEQ ID NO: 59713 - protein, 16 aa, Artificial sequence
  Protein classification predicting sequence
HSVSAGLDYPGVGPEH

SEQ ID NO: 59714 - protein, 6 aa, Artificial sequence
  Protein classification predicting sequence
AFHDCC

SEQ ID NO: 59715 - protein, 23 aa, Artificial sequence
  Protein classification predicting sequence
MGKDQVILVNLSGRGDKDINTVA

SEQ ID NO: 59716 - protein, 7 aa, Artificial sequence
  Protein classification predicting sequence
TLKDAIN

SEQ ID NO: 59717 - protein, 9 aa, Artificial sequence
  Protein classification predicting sequence
GPHPYPTIV

SEQ ID NO: 59718 - protein, 8 aa, Artificial sequence
  Protein classification predicting sequence
LLAKRMGK

SEQ ID NO: 59719 - protein, 6 aa, Artificial sequence
  Protein classification predicting sequence
YVPETL

SEQ ID NO: 59720 - protein, 6 aa, Artificial sequence
  Protein classification predicting sequence
CVVYMG

SEQ ID NO: 59721 - protein, 9 aa, Artificial sequence
  Protein classification predicting sequence
RQSLNVFRM

SEQ ID NO: 59722 - protein, 11 aa, Artificial sequence
  Protein classification predicting sequence
TLKDATNEAIR

SEQ ID NO: 59723 - protein, 7 aa, Artificial sequence
  Protein classification predicting sequence
PDAIVAC

SEQ ID NO: 59724 - protein, 10 aa, Artificial sequence
  Protein classification predicting sequence
RLEGIIPALE

SEQ ID NO: 59725 - protein, 7 aa, Artificial sequence
  Protein classification predicting sequence
HAISYAV

SEQ ID NO: 59726 - protein, 6 aa, Artificial sequence
  Protein classification predicting sequence
GLDYPG

SEQ ID NO: 59727 - protein, 7 aa, Artificial sequence
  Protein classification predicting sequence
RMKLLGA

SEQ ID NO: 59728 - protein, 15 aa, Artificial sequence
  Protein classification predicting sequence
TLKDATSEAIRDWVT

SEQ ID NO: 59729 - protein, 8 aa, Artificial sequence
  Protein classification predicting sequence
GQVQEAHS

SEQ ID NO: 59730 - protein, 8 aa, Artificial sequence
  Protein classification predicting sequence
EGIIPALE

SEQ ID NO: 59731 - protein, 13 aa, Artificial sequence
  Protein classification predicting sequence
IIAETGAGQHGVA

SEQ ID NO: 59732 - protein, 14 aa, Artificial sequence
  Protein classification predicting sequence
GIETGEHGAPLKHG

SEQ ID NO: 59733 - protein, 8 aa, Artificial sequence
  Protein classification predicting sequence
HGAPLKHG

SEQ ID NO: 59734 - protein, 9 aa, Artificial sequence
  Protein classification predicting sequence
AETGAGQHG

SEQ ID NO: 59735 - protein, 6 aa, Artificial sequence
  Protein classification predicting sequence
GRPTPL

SEQ ID NO: 59736 - protein, 7 aa, Artificial sequence
  Protein classification predicting sequence
KHFVGRP

SEQ ID NO: 59737 - protein, 12 aa, Artificial sequence
  Protein classification predicting sequence
RVIAETGAGQHG

SEQ ID NO: 59738 - protein, 10 aa, Artificial sequence
  Protein classification predicting sequence
IAETGAGQHG

SEQ ID NO: 59739 - protein, 8 aa, Artificial sequence
  Protein classification predicting sequence
SISAGLDY

SEQ ID NO: 59740 - protein, 7 aa, Artificial sequence
  Protein classification predicting sequence
DTHYLLG

SEQ ID NO: 59741 - protein, 16 aa, Artificial sequence
  Protein classification predicting sequence
HSISAGLDYPGVGPEH

SEQ ID NO: 59742 - protein, 18 aa, Artificial sequence
  Protein classification predicting sequence
IYLKREDLNHTGAHKINN

SEQ ID NO: 59743 - protein, 9 aa, Artificial sequence
  Protein classification predicting sequence
MGEEDVKRQ

SEQ ID NO: 59744 - protein, 6 aa, Artificial sequence
  Protein classification predicting sequence
VEDTHY

SEQ ID NO: 59745 - protein, 6 aa, Artificial sequence
  Protein classification predicting sequence
IVRDYQ

SEQ ID NO: 59746 - protein, 16 aa, Artificial sequence
  Protein classification predicting sequence
SISAGLDYPGIGPEHS

SEQ ID NO: 59747 - protein, 13 aa, Artificial sequence
  Protein classification predicting sequence
EGIIPALESSHAI

SEQ ID NO: 59748 - protein, 14 aa, Artificial sequence
  Protein classification predicting sequence
RVIAETGAGQHGVA

SEQ ID NO: 59749 - protein, 7 aa, Artificial sequence
  Protein classification predicting sequence
QRIIGEE

SEQ ID NO: 59750 - protein, 8 aa, Artificial sequence
  Protein classification predicting sequence
VRLVGFEA

SEQ ID NO: 59751 - protein, 6 aa, Artificial sequence
  Protein classification predicting sequence
HAATIT

SEQ ID NO: 59752 - protein, 8 aa, Artificial sequence
  Protein classification predicting sequence
LLQDEDGQ

SEQ ID NO: 59753 - protein, 9 aa, Artificial sequence
  Protein classification predicting sequence
TLKDATSEA

SEQ ID NO: 59754 - protein, 6 aa, Artificial sequence
  Protein classification predicting sequence
LNVFRM

SEQ ID NO: 59755 - protein, 6 aa, Artificial sequence
  Protein classification predicting sequence
VREFQR

SEQ ID NO: 59756 - protein, 13 aa, Artificial sequence
  Protein classification predicting sequence
SGRGDKDVQTVAK

SEQ ID NO: 59757 - protein, 6 aa, Artificial sequence
  Protein classification predicting sequence
YAGRPT

SEQ ID NO: 59758 - protein, 12 aa, Artificial sequence
  Protein classification predicting sequence
IACVGGGSNAIG

SEQ ID NO: 59759 - protein, 15 aa, Artificial sequence
  Protein classification predicting sequence
IACVGGGSNAIGIFS

SEQ ID NO: 59760 - protein, 6 aa, Artificial sequence
  Protein classification predicting sequence
THYLLG

SEQ ID NO: 59761 - protein, 19 aa, Artificial sequence
  Protein classification predicting sequence
LVACIGGGSNAMGLFHPFL

SEQ ID NO: 59762 - protein, 8 aa, Artificial sequence
  Protein classification predicting sequence
GTAAGPHP

SEQ ID NO: 59763 - protein, 11 aa, Artificial sequence
  Protein classification predicting sequence
EALMAVIEEVT

SEQ ID NO: 59764 - protein, 15 aa, Artificial sequence
  Protein classification predicting sequence
LQANYAGRPSPLYEA

SEQ ID NO: 59765 - protein, 10 aa, Artificial sequence
  Protein classification predicting sequence
GGGSNAIGIF

SEQ ID NO: 59766 - protein, 7 aa, Artificial sequence
  Protein classification predicting sequence
AGLDYPG

SEQ ID NO: 59767 - protein, 10 aa, Artificial sequence
  Protein classification predicting sequence
NNTIGQALLA

SEQ ID NO: 59768 - protein, 8 aa, Artificial sequence
  Protein classification predicting sequence
ATVAARFG

SEQ ID NO: 59769 - protein, 8 aa, Artificial sequence
  Protein classification predicting sequence
GSRTLKDA

SEQ ID NO: 59770 - protein, 7 aa, Artificial sequence
  Protein classification predicting sequence
TFYIIGT

SEQ ID NO: 59771 - protein, 8 aa, Artificial sequence
  Protein classification predicting sequence
SAGLDYPG

SEQ ID NO: 59772 - protein, 11 aa, Artificial sequence
  Protein classification predicting sequence
EGIIPALESSH

SEQ ID NO: 59773 - protein, 7 aa, Artificial sequence
  Protein classification predicting sequence
APKMGKD

SEQ ID NO: 59774 - protein, 13 aa, Artificial sequence
  Protein classification predicting sequence
LKREDLNHTGAHK

SEQ ID NO: 59775 - protein, 14 aa, Artificial sequence
  Protein classification predicting sequence
SAGLDYPGIGPEHS

SEQ ID NO: 59776 - protein, 14 aa, Artificial sequence
  Protein classification predicting sequence
DLLKNYAGRPTALT

SEQ ID NO: 59777 - protein, 9 aa, Artificial sequence
  Protein classification predicting sequence
EGIIPALES

SEQ ID NO: 59778 - protein, 6 aa, Artificial sequence
  Protein classification predicting sequence
LNPYFG

SEQ ID NO: 59779 - protein, 7 aa, Artificial sequence
  Protein classification predicting sequence
KCRIYMG

SEQ ID NO: 59780 - protein, 53 aa, Artificial sequence
  Protein classification predicting sequence
KCRIYMGAKDVERQSPNVFRMRLMGAEVIPVHSGSATLKDACNEALRDWSGSY

SEQ ID NO: 59781 - protein, 12 aa, Artificial sequence
  Protein classification predicting sequence
HYLLGTAAGPHP

SEQ ID NO: 59782 - protein, 11 aa, Artificial sequence
  Protein classification predicting sequence
VREFQRMIGEE

SEQ ID NO: 59783 - protein, 20 aa, Artificial sequence
  Protein classification predicting sequence
GRADYVSITDDEALEAFKTL

SEQ ID NO: 59784 - protein, 7 aa, Artificial sequence
  Protein classification predicting sequence
PDKEQLL

SEQ ID NO: 59785 - protein, 10 aa, Artificial sequence
  Protein classification predicting sequence
VNLSGRGDKD

SEQ ID NO: 59786 - protein, 19 aa, Artificial sequence
  Protein classification predicting sequence
VNLSGRGDKDIFTVHDILK

SEQ ID NO: 59787 - protein, 7 aa, Artificial sequence
  Protein classification predicting sequence
TGSHKIN

SEQ ID NO: 59788 - protein, 6 aa, Artificial sequence
  Protein classification predicting sequence
GEYKYD

SEQ ID NO: 59789 - protein, 8 aa, Artificial sequence
  Protein classification predicting sequence
GVLHGAMS

SEQ ID NO: 59790 - protein, 15 aa, Artificial sequence
  Protein classification predicting sequence
EAAGDGVETGRHAAT

SEQ ID NO: 59791 - protein, 6 aa, Artificial sequence
  Protein classification predicting sequence
EDIKRQ

SEQ ID NO: 59792 - protein, 17 aa, Artificial sequence
  Protein classification predicting sequence
NVETTHYILGSVAGPHP

SEQ ID NO: 59793 - protein, 22 aa, Artificial sequence
  Protein classification predicting sequence
IAETGAGMHGVATATVAARFGL

SEQ ID NO: 59794 - protein, 15 aa, Artificial sequence
  Protein classification predicting sequence
RQQANVFRMKLLGAE

SEQ ID NO: 59795 - protein, 19 aa, Artificial sequence
  Protein classification predicting sequence
KHAASLNGGVPGVLHGNRT

SEQ ID NO: 59796 - protein, 8 aa, Artificial sequence
  Protein classification predicting sequence
LSGRGDKD

SEQ ID NO: 59797 - protein, 13 aa, Artificial sequence
  Protein classification predicting sequence
LSGRGDKDMQTVM

SEQ ID NO: 59798 - protein, 11 aa, Artificial sequence
  Protein classification predicting sequence
LNHTGAHKVNN

SEQ ID NO: 59799 - protein, 21 aa, Artificial sequence
  Protein classification predicting sequence
GTLKDAMNEALRDWVTNVEDT

SEQ ID NO: 59800 - protein, 6 aa, Artificial sequence
  Protein classification predicting sequence
PGVLHG

SEQ ID NO: 59801 - protein, 14 aa, Artificial sequence
  Protein classification predicting sequence
PGVLHGNRTYLLQD

SEQ ID NO: 59802 - protein, 5 aa, Artificial sequence
  Protein classification predicting sequence
TDKHA

SEQ ID NO: 59803 - protein, 8 aa, Artificial sequence
  Protein classification predicting sequence
VAETLMPL

SEQ ID NO: 59804 - protein, 11 aa, Artificial sequence
  Protein classification predicting sequence
NVFRMKLLGAE

SEQ ID NO: 59805 - protein, 9 aa, Artificial sequence
  Protein classification predicting sequence
TETGAGQWG

SEQ ID NO: 59806 - protein, 13 aa, Artificial sequence
  Protein classification predicting sequence
PDVAVACVGGGSN

SEQ ID NO: 59807 - protein, 6 aa, Artificial sequence
  Protein classification predicting sequence
GLRYHG

SEQ ID NO: 59808 - protein, 7 aa, Artificial sequence
  Protein classification predicting sequence
SGHGLLD

SEQ ID NO: 59809 - protein, 21 aa, Artificial sequence
  Protein classification predicting sequence
RLVTETGAGQWGTALSLAGAL

SEQ ID NO: 59810 - protein, 6 aa, Artificial sequence
  Protein classification predicting sequence
VGRPSP

SEQ ID NO: 59811 - protein, 10 aa, Artificial sequence
  Protein classification predicting sequence
VGRPSPIYHA

SEQ ID NO: 59812 - protein, 9 aa, Artificial sequence
  Protein classification predicting sequence
RLTEHCGGA

SEQ ID NO: 59813 - protein, 7 aa, Artificial sequence
  Protein classification predicting sequence
IGQALLA

SEQ ID NO: 59814 - protein, 17 aa, Artificial sequence
  Protein classification predicting sequence
RVIAETGAGQHGVATAT

SEQ ID NO: 59815 - protein, 11 aa, Artificial sequence
  Protein classification predicting sequence
ACVGGGSNAMG

SEQ ID NO: 59816 - protein, 11 aa, Artificial sequence
  Protein classification predicting sequence
LVNLSGRGDKD

SEQ ID NO: 59817 - protein, 17 aa, Artificial sequence
  Protein classification predicting sequence
LVNLSGRGDKDMHTVAE

SEQ ID NO: 59818 - protein, 7 aa, Artificial sequence
  Protein classification predicting sequence
RDYIGRP

SEQ ID NO: 59819 - protein, 6 aa, Artificial sequence
  Protein classification predicting sequence
GTLKDA

SEQ ID NO: 59820 - protein, 7 aa, Artificial sequence
  Protein classification predicting sequence
FHPFLDD

SEQ ID NO: 59821 - protein, 14 aa, Artificial sequence
  Protein classification predicting sequence
RIIAETGAGQHGVA

SEQ ID NO: 59822 - protein, 13 aa, Artificial sequence
  Protein classification predicting sequence
PGVLHGNRTYLLQ

SEQ ID NO: 59823 - protein, 8 aa, Artificial sequence
  Protein classification predicting sequence
DPEFQREL

SEQ ID NO: 59824 - protein, 6 aa, Artificial sequence
  Protein classification predicting sequence
RQKPNV

SEQ ID NO: 59825 - protein, 8 aa, Artificial sequence
  Protein classification predicting sequence
EGILAALE

SEQ ID NO: 59826 - protein, 19 aa, Artificial sequence
  Protein classification predicting sequence
QLEEAFVSAQKDPEFQAQF

SEQ ID NO: 59827 - protein, 14 aa, Artificial sequence
  Protein classification predicting sequence
EIIAETGAGQHGVA

SEQ ID NO: 59828 - protein, 26 aa, Artificial sequence
  Protein classification predicting sequence
EGRLPDAVIACVGGGSNAIGMFADFI

SEQ ID NO: 59829 - protein, 23 aa, Artificial sequence
  Protein classification predicting sequence
DLLKNYAGRPTALTKCQNITAGT

SEQ ID NO: 59830 - protein, 40 aa, Artificial sequence
  Protein classification predicting sequence
VGLIGVEPGGHGIETGEHGAPLKHGRVGIYFGMKAPMMQT

SEQ ID NO: 59831 - protein, 23 aa, Artificial sequence
  Protein classification predicting sequence
HEGIIPALESSHALAHALKMMRE

SEQ ID NO: 59832 - protein, 9 aa, Artificial sequence
  Protein classification predicting sequence
YAGRPTALT

SEQ ID NO: 59833 - protein, 7 aa, Artificial sequence
  Protein classification predicting sequence
ALLGLKC

SEQ ID NO: 59834 - protein, 9 aa, Artificial sequence
  Protein classification predicting sequence
PTIVREFQR

SEQ ID NO: 59835 - protein, 17 aa, Artificial sequence
  Protein classification predicting sequence
ACVGGGSNAIGMFADFI

SEQ ID NO: 59836 - protein, 23 aa, Artificial sequence
  Protein classification predicting sequence
HGAPLKHGKTGIFFGMKAPLMQD

SEQ ID NO: 59837 - protein, 14 aa, Artificial sequence
  Protein classification predicting sequence
SAGLDFPSVGPQHA

SEQ ID NO: 59838 - protein, 6 aa, Artificial sequence
  Protein classification predicting sequence
QDEDGQ

SEQ ID NO: 59839 - protein, 20 aa, Artificial sequence
  Protein classification predicting sequence
AKIYLKREDLNHTGAHKINN

SEQ ID NO: 59840 - protein, 9 aa, Artificial sequence
  Protein classification predicting sequence
YYLSEYVGR

SEQ ID NO: 59841 - protein, 8 aa, Artificial sequence
  Protein classification predicting sequence
YVGRETPL

SEQ ID NO: 59842 - protein, 6 aa, Artificial sequence
  Protein classification predicting sequence
GRETPL

SEQ ID NO: 59843 - protein, 14 aa, Artificial sequence
  Protein classification predicting sequence
AETGAGQHGVASAT

SEQ ID NO: 59844 - protein, 14 aa, Artificial sequence
  Protein classification predicting sequence
LNVFRMELLGAKVV

SEQ ID NO: 59845 - protein, 17 aa, Artificial sequence
  Protein classification predicting sequence
DTHYLLGSALGPDPFPT

SEQ ID NO: 59846 - protein, 7 aa, Artificial sequence
  Protein classification predicting sequence
EIKSQIL

SEQ ID NO: 59847 - protein, 6 aa, Artificial sequence
  Protein classification predicting sequence
KMYLIQ

SEQ ID NO: 59848 - protein, 12 aa, Artificial sequence
  Protein classification predicting sequence
EGIIPAIESAHA

SEQ ID NO: 59849 - protein, 17 aa, Artificial sequence
  Protein classification predicting sequence
EGIIPAIESAHALSYVE

SEQ ID NO: 59850 - protein, 17 aa, Artificial sequence
  Protein classification predicting sequence
IIVVTISGRGDKDMETI

SEQ ID NO: 59851 - protein, 29 aa, Artificial sequence
  Protein classification predicting sequence
DELGFFGEYGGQYVPETLMPAIIELKKAY

SEQ ID NO: 59852 - protein, 26 aa, Artificial sequence
  Protein classification predicting sequence
VFMGSEDIKRQQLNVFRMELLGAKVV

SEQ ID NO: 59853 - protein, 21 aa, Artificial sequence
  Protein classification predicting sequence
LAHSISAGLDYPGIGPEHSYY

SEQ ID NO: 59854 - protein, 10 aa, Artificial sequence
  Protein classification predicting sequence
RQALNVARMR

SEQ ID NO: 59855 - protein, 11 aa, Artificial sequence
  Protein classification predicting sequence
ACVGGGSNAIG

SEQ ID NO: 59856 - protein, 7 aa, Artificial sequence
  Protein classification predicting sequence
AGHGLET

SEQ ID NO: 59857 - protein, 7 aa, Artificial sequence
  Protein classification predicting sequence
AALFDME

SEQ ID NO: 59858 - protein, 10 aa, Artificial sequence
  Protein classification predicting sequence
GGGSNAIGLF

SEQ ID NO: 59859 - protein, 10 aa, Artificial sequence
  Protein classification predicting sequence
SISAGLDYPG

SEQ ID NO: 59860 - protein, 12 aa, Artificial sequence
  Protein classification predicting sequence
EGIIPALESSHA

SEQ ID NO: 59861 - protein, 7 aa, Artificial sequence
  Protein classification predicting sequence
LAKRMGK

SEQ ID NO: 59862 - protein, 7 aa, Artificial sequence
  Protein classification predicting sequence
THYILGS

SEQ ID NO: 59863 - protein, 6 aa, Artificial sequence
  Protein classification predicting sequence
GLFHPF

SEQ ID NO: 59864 - protein, 13 aa, Artificial sequence
  Protein classification predicting sequence
ACVGGGSNAMGLF

SEQ ID NO: 59865 - protein, 8 aa, Artificial sequence
  Protein classification predicting sequence
PALETAHA

SEQ ID NO: 59866 - protein, 8 aa, Artificial sequence
  Protein classification predicting sequence
SGRGDKDV

SEQ ID NO: 59867 - protein, 6 aa, Artificial sequence
  Protein classification predicting sequence
TGRHAA

SEQ ID NO: 59868 - protein, 8 aa, Artificial sequence
  Protein classification predicting sequence
PDTPGSLG

SEQ ID NO: 59869 - protein, 8 aa, Artificial sequence
  Protein classification predicting sequence
GGQYVPET

SEQ ID NO: 59870 - protein, 6 aa, Artificial sequence
  Protein classification predicting sequence
LQDEEG

SEQ ID NO: 59871 - protein, 10 aa, Artificial sequence
  Protein classification predicting sequence
QLEQAFIDAQ

SEQ ID NO: 59872 - protein, 15 aa, Artificial sequence
  Protein classification predicting sequence
LLQEYAGRPTALTLT

SEQ ID NO: 59873 - protein, 17 aa, Artificial sequence
  Protein classification predicting sequence
YMGAKDVERQSPNVFRM

SEQ ID NO: 59874 - protein, 14 aa, Artificial sequence
  Protein classification predicting sequence
TLKDACNEALRDWS

SEQ ID NO: 59875 - protein, 7 aa, Artificial sequence
  Protein classification predicting sequence
EPAGKGI

SEQ ID NO: 59876 - protein, 16 aa, Artificial sequence
  Protein classification predicting sequence
YLKREDLLHGGAHKTN

SEQ ID NO: 59877 - protein, 8 aa, Artificial sequence
  Protein classification predicting sequence
GGGSNAIG

SEQ ID NO: 59878 - protein, 14 aa, Artificial sequence
  Protein classification predicting sequence
GGGSNAIGMFADFI

SEQ ID NO: 59879 - protein, 6 aa, Artificial sequence
  Protein classification predicting sequence
YMGATD

SEQ ID NO: 59880 - protein, 10 aa, Artificial sequence
  Protein classification predicting sequence
YMGATDIERQ

SEQ ID NO: 59881 - protein, 7 aa, Artificial sequence
  Protein classification predicting sequence
GREAREQ

SEQ ID NO: 59882 - protein, 24 aa, Artificial sequence
  Protein classification predicting sequence
DALVLCNLSGRGDKDVHTIAAREG

SEQ ID NO: 59883 - protein, 6 aa, Artificial sequence
  Protein classification predicting sequence
DDDGQI

SEQ ID NO: 59884 - protein, 9 aa, Artificial sequence
  Protein classification predicting sequence
GGRFVAETL

SEQ ID NO: 59885 - protein, 7 aa, Artificial sequence
  Protein classification predicting sequence
LKDYVGR

SEQ ID NO: 59886 - protein, 31 aa, Artificial sequence
  Protein classification predicting sequence
LYLKREDLLHGGAHKTNQVLGQALLAKRMGK

SEQ ID NO: 59887 - protein, 14 aa, Artificial sequence
  Protein classification predicting sequence
GRADYVSITDDEAL

SEQ ID NO: 59888 - protein, 10 aa, Artificial sequence
  Protein classification predicting sequence
YVSITDDEAL

SEQ ID NO: 59889 - protein, 19 aa, Artificial sequence
  Protein classification predicting sequence
EGIIPALESSHALAHALKM

SEQ ID NO: 59890 - protein, 7 aa, Artificial sequence
  Protein classification predicting sequence
YQVYEAR

SEQ ID NO: 59891 - protein, 8 aa, Artificial sequence
  Protein classification predicting sequence
DVLVEVHD

SEQ ID NO: 59892 - protein, 7 aa, Artificial sequence
  Protein classification predicting sequence
LLIVAAL

SEQ ID NO: 59893 - protein, 6 aa, Artificial sequence
  Protein classification predicting sequence
LVEVHD

SEQ ID NO: 59894 - protein, 8 aa, Artificial sequence
  Protein classification predicting sequence
GADAILLI

SEQ ID NO: 59895 - protein, 7 aa, Artificial sequence
  Protein classification predicting sequence
PVLRKDF

SEQ ID NO: 59896 - protein, 7 aa, Artificial sequence
  Protein classification predicting sequence
CLSVLTD

SEQ ID NO: 59897 - protein, 7 aa, Artificial sequence
  Protein classification predicting sequence
LTDEKYF

SEQ ID NO: 59898 - protein, 10 aa, Artificial sequence
  Protein classification predicting sequence
GADAVLLIAA

SEQ ID NO: 59899 - protein, 6 aa, Artificial sequence
  Protein classification predicting sequence
ASPSKG

SEQ ID NO: 59900 - protein, 7 aa, Artificial sequence
  Protein classification predicting sequence
ISESGIH

SEQ ID NO: 59901 - protein, 8 aa, Artificial sequence
  Protein classification predicting sequence
KKASPSKG

SEQ ID NO: 59902 - protein, 7 aa, Artificial sequence
  Protein classification predicting sequence
RLKELYD

SEQ ID NO: 59903 - protein, 6 aa, Artificial sequence
  Protein classification predicting sequence
GESLMR

SEQ ID NO: 59904 - protein, 7 aa, Artificial sequence
  Protein classification predicting sequence
LLIGEAL

SEQ ID NO: 59905 - protein, 7 aa, Artificial sequence
  Protein classification predicting sequence
GESLMRQ

SEQ ID NO: 59906 - protein, 7 aa, Artificial sequence
  Protein classification predicting sequence
SILTDEK

SEQ ID NO: 59907 - protein, 10 aa, Artificial sequence
  Protein classification predicting sequence
YKREEIAAAK

SEQ ID NO: 59908 - protein, 11 aa, Artificial sequence
  Protein classification predicting sequence
GGAACLSVLTD

SEQ ID NO: 59909 - protein, 17 aa, Artificial sequence
  Protein classification predicting sequence
GGAACLSVLTDTPSFQG

SEQ ID NO: 59910 - protein, 6 aa, Artificial sequence
  Protein classification predicting sequence
GADCIL

SEQ ID NO: 59911 - protein, 6 aa, Artificial sequence
  Protein classification predicting sequence
LAPLIP

SEQ ID NO: 59912 - protein, 16 aa, Artificial sequence
  Protein classification predicting sequence
LIAEIKKASPSKGLIR

SEQ ID NO: 59913 - protein, 8 aa, Artificial sequence
  Protein classification predicting sequence
ADAVLLIA

SEQ ID NO: 59914 - protein, 11 aa, Artificial sequence
  Protein classification predicting sequence
LGLEVLVETHN

SEQ ID NO: 59915 - protein, 7 aa, Artificial sequence
  Protein classification predicting sequence
YISESGI

SEQ ID NO: 59916 - protein, 8 aa, Artificial sequence
  Protein classification predicting sequence
ASPSKGLI

SEQ ID NO: 59917 - protein, 7 aa, Artificial sequence
  Protein classification predicting sequence
GVNARDL

SEQ ID NO: 59918 - protein, 6 aa, Artificial sequence
  Protein classification predicting sequence
KDFIID

SEQ ID NO: 59919 - protein, 12 aa, Artificial sequence
  Protein classification predicting sequence
IAEIKKASPSKG

SEQ ID NO: 59920 - protein, 15 aa, Artificial sequence
  Protein classification predicting sequence
IAEIKKASPSKGLIR

SEQ ID NO: 59921 - protein, 12 aa, Artificial sequence
  Protein classification predicting sequence
VGLDVLVEVHDG

SEQ ID NO: 59922 - protein, 20 aa, Artificial sequence
  Protein classification predicting sequence
NNRNLHTFEVSLETTLDLLP

SEQ ID NO: 59923 - protein, 10 aa, Artificial sequence
  Protein classification predicting sequence
FLVGEAFMRA

SEQ ID NO: 59924 - protein, 8 aa, Artificial sequence
  Protein classification predicting sequence
LIGTALMK

SEQ ID NO: 59925 - protein, 6 aa, Artificial sequence
  Protein classification predicting sequence
TFEVSL

SEQ ID NO: 59926 - protein, 71 aa, Artificial sequence
  Protein classification predicting sequence
EIVKYKQSLLQNGYYQDKLNTLKSVKIQNKKSFINAIEKEPKLAIIAEIKSKSPTVNDLPERDLSQQISDY

SEQ ID NO: 59927 - protein, 17 aa, Artificial sequence
  Protein classification predicting sequence
LLQNGYYQDKLNTLKSV

SEQ ID NO: 59928 - protein, 12 aa, Artificial sequence
  Protein classification predicting sequence
NHYYISESGIHD

SEQ ID NO: 59929 - protein, 9 aa, Artificial sequence
  Protein classification predicting sequence
IAEIKSKSP

SEQ ID NO: 59930 - protein, 10 aa, Artificial sequence
  Protein classification predicting sequence
ILLIVNILSD

SEQ ID NO: 59931 - protein, 6 aa, Artificial sequence
  Protein classification predicting sequence
IGVNNR

SEQ ID NO: 59932 - protein, 7 aa, Artificial sequence
  Protein classification predicting sequence
LVGEALM

SEQ ID NO: 59933 - protein, 7 aa, Artificial sequence
  Protein classification predicting sequence
EKYFGGS

SEQ ID NO: 59934 - protein, 8 aa, Artificial sequence
  Protein classification predicting sequence
NNRNLKTF

SEQ ID NO: 59935 - protein, 6 aa, Artificial sequence
  Protein classification predicting sequence
KKASPS

SEQ ID NO: 59936 - protein, 11 aa, Artificial sequence
  Protein classification predicting sequence
KKASPSKGVIR

SEQ ID NO: 59937 - protein, 8 aa, Artificial sequence
  Protein classification predicting sequence
VNAFLVGE

SEQ ID NO: 59938 - protein, 9 aa, Artificial sequence
  Protein classification predicting sequence
MLVDLARND

SEQ ID NO: 59939 - protein, 9 aa, Artificial sequence
  Protein classification predicting sequence
GGLVGYFGY

SEQ ID NO: 59940 - protein, 11 aa, Artificial sequence
  Protein classification predicting sequence
FHIVGSSPEIL

SEQ ID NO: 59941 - protein, 8 aa, Artificial sequence
  Protein classification predicting sequence
AGEAFQVV

SEQ ID NO: 59942 - protein, 8 aa, Artificial sequence
  Protein classification predicting sequence
DEKERAEH

SEQ ID NO: 59943 - protein, 9 aa, Artificial sequence
  Protein classification predicting sequence
GGEKWGRYS

SEQ ID NO: 59944 - protein, 7 aa, Artificial sequence
  Protein classification predicting sequence
GGLVGYF

SEQ ID NO: 59945 - protein, 13 aa, Artificial sequence
  Protein classification predicting sequence
SIVGSSPEALVTV

SEQ ID NO: 59946 - protein, 12 aa, Artificial sequence
  Protein classification predicting sequence
YGGVVGYLDFAG

SEQ ID NO: 59947 - protein, 7 aa, Artificial sequence
  Protein classification predicting sequence
IVGSSPE

SEQ ID NO: 59948 - protein, 8 aa, Artificial sequence
  Protein classification predicting sequence
RPATLLLE

SEQ ID NO: 59949 - protein, 22 aa, Artificial sequence
  Protein classification predicting sequence
IKKLQKLIQKGEIFQVVPSRKF

SEQ ID NO: 59950 - protein, 7 aa, Artificial sequence
  Protein classification predicting sequence
LDALHAY

SEQ ID NO: 59951 - protein, 29 aa, Artificial sequence
  Protein classification predicting sequence
RGSYGGAIGYFTDLGNLDTCITIRSAYVE

SEQ ID NO: 59952 - protein, 7 aa, Artificial sequence
  Protein classification predicting sequence
IRSAYVE

SEQ ID NO: 59953 - protein, 14 aa, Artificial sequence
  Protein classification predicting sequence
ESLNKAQAVINAIK

SEQ ID NO: 59954 - protein, 9 aa, Artificial sequence
  Protein classification predicting sequence
PIAGTRPRG

SEQ ID NO: 59955 - protein, 11 aa, Artificial sequence
  Protein classification predicting sequence
NPSPYMFFMQD

SEQ ID NO: 59956 - protein, 6 aa, Artificial sequence
  Protein classification predicting sequence
YHPDPT

SEQ ID NO: 59957 - protein, 8 aa, Artificial sequence
  Protein classification predicting sequence
GAPKIRAM

SEQ ID NO: 59958 - protein, 11 aa, Artificial sequence
  Protein classification predicting sequence
MFFGGLFSYDL

SEQ ID NO: 59959 - protein, 14 aa, Artificial sequence
  Protein classification predicting sequence
IFQVVPSRKFYLPC

SEQ ID NO: 59960 - protein, 8 aa, Artificial sequence
  Protein classification predicting sequence
LTKVDRYS

SEQ ID NO: 59961 - protein, 7 aa, Artificial sequence
  Protein classification predicting sequence
QAGAGIV

SEQ ID NO: 59962 - protein, 9 aa, Artificial sequence
  Protein classification predicting sequence
GGLFAYDLV

SEQ ID NO: 59963 - protein, 14 aa, Artificial sequence
  Protein classification predicting sequence
EHLMLVDLARNDLA

SEQ ID NO: 59964 - protein, 7 aa, Artificial sequence
  Protein classification predicting sequence
RYVADLT

SEQ ID NO: 59965 - protein, 12 aa, Artificial sequence
  Protein classification predicting sequence
HAYQACMNMGTL

SEQ ID NO: 59966 - protein, 8 aa, Artificial sequence
  Protein classification predicting sequence
GTLSGAPK

SEQ ID NO: 59967 - protein, 6 aa, Artificial sequence
  Protein classification predicting sequence
RGSYGG

SEQ ID NO: 59968 - protein, 7 aa, Artificial sequence
  Protein classification predicting sequence
LLSDEKE

SEQ ID NO: 59969 - protein, 6 aa, Artificial sequence
  Protein classification predicting sequence
DLGRND

SEQ ID NO: 59970 - protein, 10 aa, Artificial sequence
  Protein classification predicting sequence
PAGTLSGAPK

SEQ ID NO: 59971 - protein, 8 aa, Artificial sequence
  Protein classification predicting sequence
LFGASPES

SEQ ID NO: 59972 - protein, 7 aa, Artificial sequence
  Protein classification predicting sequence
CIVIRSA

SEQ ID NO: 59973 - protein, 7 aa, Artificial sequence
  Protein classification predicting sequence
EIYPIAG

SEQ ID NO: 59974 - protein, 9 aa, Artificial sequence
  Protein classification predicting sequence
DTCIVIRSA

SEQ ID NO: 59975 - protein, 7 aa, Artificial sequence
  Protein classification predicting sequence
YGGGVGY

SEQ ID NO: 59976 - protein, 7 aa, Artificial sequence
  Protein classification predicting sequence
NPSPYMF

SEQ ID NO: 59977 - protein, 6 aa, Artificial sequence
  Protein classification predicting sequence
SHVQHI

SEQ ID NO: 59978 - protein, 6 aa, Artificial sequence
  Protein classification predicting sequence
FQVVPS

SEQ ID NO: 59979 - protein, 6 aa, Artificial sequence
  Protein classification predicting sequence
GVVADS

SEQ ID NO: 59980 - protein, 15 aa, Artificial sequence
  Protein classification predicting sequence
GKHVDVYQNGEIVEQ

SEQ ID NO: 59981 - protein, 13 aa, Artificial sequence
  Protein classification predicting sequence
YNFEHFAHRLKNT

SEQ ID NO: 59982 - protein, 14 aa, Artificial sequence
  Protein classification predicting sequence
AVSEFGEEPFKACV

SEQ ID NO: 59983 - protein, 13 aa, Artificial sequence
  Protein classification predicting sequence
SEWQETQNKARAV

SEQ ID NO: 59984 - protein, 38 aa, Artificial sequence
  Protein classification predicting sequence
DGNPLPFIEAFHNRFKTPEIPSLPRFTGGLVGYFGYET

SEQ ID NO: 59985 - protein, 28 aa, Artificial sequence
  Protein classification predicting sequence
YERARERLEDIRTQLRQSCAIPLSLGSK

SEQ ID NO: 59986 - protein, 26 aa, Artificial sequence
  Protein classification predicting sequence
KIKDYIFAGDCMQVVPSQRMSMEFTD

SEQ ID NO: 59987 - protein, 29 aa, Artificial sequence
  Protein classification predicting sequence
TNMDILAATFPAGTLSGAPKVRAMEIIEE

SEQ ID NO: 59988 - protein, 28 aa, Artificial sequence
  Protein classification predicting sequence
KRGIYGGAVGVWGFNNDMDLAIAIRTAV

SEQ ID NO: 59989 - protein, 7 aa, Artificial sequence
  Protein classification predicting sequence
GYNRIPL

SEQ ID NO: 59990 - protein, 14 aa, Artificial sequence
  Protein classification predicting sequence
EQDLLSDAKEIAEH

SEQ ID NO: 59991 - protein, 21 aa, Artificial sequence
  Protein classification predicting sequence
KEIAEHLMLIDLGRNDVGRVS

SEQ ID NO: 59992 - protein, 10 aa, Artificial sequence
  Protein classification predicting sequence
MQVVPSQRMS

SEQ ID NO: 59993 - protein, 10 aa, Artificial sequence
  Protein classification predicting sequence
PAGTVSGAPK

SEQ ID NO: 59994 - protein, 8 aa, Artificial sequence
  Protein classification predicting sequence
DLDSRIEL

SEQ ID NO: 59995 - protein, 7 aa, Artificial sequence
  Protein classification predicting sequence
RRGSYGG

SEQ ID NO: 59996 - protein, 15 aa, Artificial sequence
  Protein classification predicting sequence
FCFYLAETLLVLDHQ

SEQ ID NO: 59997 - protein, 22 aa, Artificial sequence
  Protein classification predicting sequence
HKELAEHLMLVDLARNDLARIC

SEQ ID NO: 59998 - protein, 9 aa, Artificial sequence
  Protein classification predicting sequence
PIAGTRRRG

SEQ ID NO: 59999 - protein, 7 aa, Artificial sequence
  Protein classification predicting sequence
VEGRLKD

SEQ ID NO: 60000 - protein, 7 aa, Artificial sequence
  Protein classification predicting sequence
QAGGGIV

SEQ ID NO: 60001 - protein, 7 aa, Artificial sequence
  Protein classification predicting sequence
PTGGDPL

SEQ ID NO: 60002 - protein, 6 aa, Artificial sequence
  Protein classification predicting sequence
AGTRPR

SEQ ID NO: 60003 - protein, 9 aa, Artificial sequence
  Protein classification predicting sequence
MLVDLGRND

SEQ ID NO: 60004 - protein, 7 aa, Artificial sequence
  Protein classification predicting sequence
RNDLGKV

SEQ ID NO: 60005 - protein, 10 aa, Artificial sequence
  Protein classification predicting sequence
LPCPSPLAAY

SEQ ID NO: 60006 - protein, 5 aa, Artificial sequence
  Protein classification predicting sequence
SHVQH

SEQ ID NO: 60007 - protein, 15 aa, Artificial sequence
  Protein classification predicting sequence
GICLGHQAIVEAYGG

SEQ ID NO: 60008 - protein, 6 aa, Artificial sequence
  Protein classification predicting sequence
DNFDSF

SEQ ID NO: 60009 - protein, 8 aa, Artificial sequence
  Protein classification predicting sequence
GADIIELG

SEQ ID NO: 60010 - protein, 7 aa, Artificial sequence
  Protein classification predicting sequence
GGQYVPE

SEQ ID NO: 60011 - protein, 6 aa, Artificial sequence
  Protein classification predicting sequence
GRADYV

SEQ ID NO: 60012 - protein, 8 aa, Artificial sequence
  Protein classification predicting sequence
DAVNEALR

SEQ ID NO: 60013 - protein, 11 aa, Artificial sequence
  Protein classification predicting sequence
DAVNEALRYWV

SEQ ID NO: 60014 - protein, 6 aa, Artificial sequence
  Protein classification predicting sequence
ADGPTI

SEQ ID NO: 60015 - protein, 6 aa, Artificial sequence
  Protein classification predicting sequence
FQSVIG

SEQ ID NO: 60016 - protein, 11 aa, Artificial sequence
  Protein classification predicting sequence
SDQTHSALQKA

SEQ ID NO: 60017 - protein, 7 aa, Artificial sequence
  Protein classification predicting sequence
VGTTSST

SEQ ID NO: 60018 - protein, 8 aa, Artificial sequence
  Protein classification predicting sequence
NAHKWFLT

SEQ ID NO: 60019 - protein, 9 aa, Artificial sequence
  Protein classification predicting sequence
VVDYKDWQI

SEQ ID NO: 60020 - protein, 20 aa, Artificial sequence
  Protein classification predicting sequence
GIRTVCYNFMPVLDWTRTDL

SEQ ID NO: 60021 - protein, 17 aa, Artificial sequence
  Protein classification predicting sequence
TVCYNFMPVLDWTRTDL

SEQ ID NO: 60022 - protein, 6 aa, Artificial sequence
  Protein classification predicting sequence
HILKRP

SEQ ID NO: 60023 - protein, 7 aa, Artificial sequence
  Protein classification predicting sequence
PVAEEVG

SEQ ID NO: 60024 - protein, 6 aa, Artificial sequence
  Protein classification predicting sequence
RADNDL

SEQ ID NO: 60025 - protein, 12 aa, Artificial sequence
  Protein classification predicting sequence
RPGYGLYDRALG

SEQ ID NO: 60026 - protein, 5 aa, Artificial sequence
  Protein classification predicting sequence
DWTRT

SEQ ID NO: 60027 - protein, 6 aa, Artificial sequence
  Protein classification predicting sequence
CTGSYG

SEQ ID NO: 60028 - protein, 14 aa, Artificial sequence
  Protein classification predicting sequence
VIESVPVHEDIKLG

SEQ ID NO: 60029 - protein, 8 aa, Artificial sequence
  Protein classification predicting sequence
VHEDIKLG

SEQ ID NO: 60030 - protein, 7 aa, Artificial sequence
  Protein classification predicting sequence
NYKQTLR

SEQ ID NO: 60031 - protein, 7 aa, Artificial sequence
  Protein classification predicting sequence
CYNFMPV

SEQ ID NO: 60032 - protein, 11 aa, Artificial sequence
  Protein classification predicting sequence
RPDHGRMIWGE

SEQ ID NO: 60033 - protein, 7 aa, Artificial sequence
  Protein classification predicting sequence
MTFRWYG

SEQ ID NO: 60034 - protein, 5 aa, Artificial sequence
  Protein classification predicting sequence
FRWYG

SEQ ID NO: 60035 - protein, 7 aa, Artificial sequence
  Protein classification predicting sequence
QIPGVEG

SEQ ID NO: 60036 - protein, 7 aa, Artificial sequence
  Protein classification predicting sequence
DWTRTDL

SEQ ID NO: 60037 - protein, 8 aa, Artificial sequence
  Protein classification predicting sequence
FGLPRIIT

SEQ ID NO: 60038 - protein, 6 aa, Artificial sequence
  Protein classification predicting sequence
HPDDPP

SEQ ID NO: 60039 - protein, 6 aa, Artificial sequence
  Protein classification predicting sequence
DWTRTD

SEQ ID NO: 60040 - protein, 11 aa, Artificial sequence
  Protein classification predicting sequence
ALHHIPNGEVW

SEQ ID NO: 60041 - protein, 7 aa, Artificial sequence
  Protein classification predicting sequence
ILGLPRI

SEQ ID NO: 60042 - protein, 8 aa, Artificial sequence
  Protein classification predicting sequence
GVRADNDL

SEQ ID NO: 60043 - protein, 6 aa, Artificial sequence
  Protein classification predicting sequence
WSVVES

SEQ ID NO: 60044 - protein, 9 aa, Artificial sequence
  Protein classification predicting sequence
MCTGSYGVR

SEQ ID NO: 60045 - protein, 9 aa, Artificial sequence
  Protein classification predicting sequence
EEILKRKAI

SEQ ID NO: 60046 - protein, 9 aa, Artificial sequence
  Protein classification predicting sequence
PGYGLYDRA

SEQ ID NO: 60047 - protein, 21 aa, Artificial sequence
  Protein classification predicting sequence
DVRQAGATGVVTALHHIPNGE

SEQ ID NO: 60048 - protein, 9 aa, Artificial sequence
  Protein classification predicting sequence
ALHHIPNGE

SEQ ID NO: 60049 - protein, 8 aa, Artificial sequence
  Protein classification predicting sequence
WSVVESVP

SEQ ID NO: 60050 - protein, 6 aa, Artificial sequence
  Protein classification predicting sequence
IANYQQ

SEQ ID NO: 60051 - protein, 9 aa, Artificial sequence
  Protein classification predicting sequence
LRNLAQCGI

SEQ ID NO: 60052 - protein, 8 aa, Artificial sequence
  Protein classification predicting sequence
NIIAGLPG

SEQ ID NO: 60053 - protein, 6 aa, Artificial sequence
  Protein classification predicting sequence
ILGLPR

SEQ ID NO: 60054 - protein, 6 aa, Artificial sequence
  Protein classification predicting sequence
WRWYGP

SEQ ID NO: 60055 - protein, 7 aa, Artificial sequence
  Protein classification predicting sequence
DNDLVKM

SEQ ID NO: 60056 - protein, 8 aa, Artificial sequence
  Protein classification predicting sequence
RGLEMALK

SEQ ID NO: 60057 - protein, 7 aa, Artificial sequence
  Protein classification predicting sequence
FLKAIIP

SEQ ID NO: 60058 - protein, 8 aa, Artificial sequence
  Protein classification predicting sequence
ALHHIPNG

SEQ ID NO: 60059 - protein, 7 aa, Artificial sequence
  Protein classification predicting sequence
KRKAIIE

SEQ ID NO: 60060 - protein, 12 aa, Artificial sequence
  Protein classification predicting sequence
PDGSKALRFDQI

SEQ ID NO: 60061 - protein, 23 aa, Artificial sequence
  Protein classification predicting sequence
QLTSNIIAGLPGAEEGYTLEEFQ

SEQ ID NO: 60062 - protein, 7 aa, Artificial sequence
  Protein classification predicting sequence
IHPDDPP

SEQ ID NO: 60063 - protein, 12 aa, Artificial sequence
  Protein classification predicting sequence
IHPDDPPWSIFG

SEQ ID NO: 60064 - protein, 8 aa, Artificial sequence
  Protein classification predicting sequence
GPNDPVSL

SEQ ID NO: 60065 - protein, 18 aa, Artificial sequence
  Protein classification predicting sequence
TVCYNFMPVLDWTRTDLE

SEQ ID NO: 60066 - protein, 15 aa, Artificial sequence
  Protein classification predicting sequence
NIIAGLPGAEEGYTL

SEQ ID NO: 60067 - protein, 15 aa, Artificial sequence
  Protein classification predicting sequence
HPDDPPRPILGLPRI

SEQ ID NO: 60068 - protein, 10 aa, Artificial sequence
  Protein classification predicting sequence
GDVDMYNVVM

SEQ ID NO: 60069 - protein, 6 aa, Artificial sequence
  Protein classification predicting sequence
TNPGYS

SEQ ID NO: 60070 - protein, 9 aa, Artificial sequence
  Protein classification predicting sequence
IGRLKGLAE

SEQ ID NO: 60071 - protein, 11 aa, Artificial sequence
  Protein classification predicting sequence
DGSKALRFDQI

SEQ ID NO: 60072 - protein, 23 aa, Artificial sequence
  Protein classification predicting sequence
AVHPDDPPRPILGLPRIVSTIED

SEQ ID NO: 60073 - protein, 28 aa, Artificial sequence
  Protein classification predicting sequence
AVHPDDPPRPILGLPRIVSTIEDIDWLT

SEQ ID NO: 60074 - protein, 7 aa, Artificial sequence
  Protein classification predicting sequence
FHEAAHL

SEQ ID NO: 60075 - protein, 21 aa, Artificial sequence
  Protein classification predicting sequence
KKTNPGYSAIGRLKGLAEVRG

SEQ ID NO: 60076 - protein, 6 aa, Artificial sequence
  Protein classification predicting sequence
RFATMS

SEQ ID NO: 60077 - protein, 11 aa, Artificial sequence
  Protein classification predicting sequence
YKDIDKAKLRE

SEQ ID NO: 60078 - protein, 43 aa, Artificial sequence
  Protein classification predicting sequence
TVNSMANGFTMCTGSYGVRADNDLVDMIKQFGPRIYFTHLRST

SEQ ID NO: 60079 - protein, 10 aa, Artificial sequence
  Protein classification predicting sequence
RIYFTHLRST

SEQ ID NO: 60080 - protein, 39 aa, Artificial sequence
  Protein classification predicting sequence
TVCYNFMPVLDWTRTDLEYVLPDGSKALRFDQIEFAAFE

SEQ ID NO: 60081 - protein, 27 aa, Artificial sequence
  Protein classification predicting sequence
EDKARLTRNIIAGLPGAEEGYTLDQFR

SEQ ID NO: 60082 - protein, 34 aa, Artificial sequence
  Protein classification predicting sequence
EVGVRMAVHPDDPPRPILGLPRIVSTIEDMQWMV

SEQ ID NO: 60083 - protein, 23 aa, Artificial sequence
  Protein classification predicting sequence
GDVDMYEVVKAIVEEEHRRKAEG

SEQ ID NO: 60084 - protein, 7 aa, Artificial sequence
  Protein classification predicting sequence
RQAGATG

SEQ ID NO: 60085 - protein, 8 aa, Artificial sequence
  Protein classification predicting sequence
NYQQTLRN

SEQ ID NO: 60086 - protein, 19 aa, Artificial sequence
  Protein classification predicting sequence
NIIAGLPGAEEGYTLDQFR

SEQ ID NO: 60087 - protein, 7 aa, Artificial sequence
  Protein classification predicting sequence
FTHLRST

SEQ ID NO: 60088 - protein, 7 aa, Artificial sequence
  Protein classification predicting sequence
NPKTFHE

SEQ ID NO: 60089 - protein, 6 aa, Artificial sequence
  Protein classification predicting sequence
GDVDMY

SEQ ID NO: 60090 - protein, 9 aa, Artificial sequence
  Protein classification predicting sequence
GVYFEPQYS

SEQ ID NO: 60091 - protein, 6 aa, Artificial sequence
  Protein classification predicting sequence
SPSFNW

SEQ ID NO: 60092 - protein, 9 aa, Artificial sequence
  Protein classification predicting sequence
YNLSPSFNW

SEQ ID NO: 60093 - protein, 6 aa, Artificial sequence
  Protein classification predicting sequence
GAAGIH

SEQ ID NO: 60094 - protein, 7 aa, Artificial sequence
  Protein classification predicting sequence
GSSREHA

SEQ ID NO: 60095 - protein, 6 aa, Artificial sequence
  Protein classification predicting sequence
GSSREH

SEQ ID NO: 60096 - protein, 6 aa, Artificial sequence
  Protein classification predicting sequence
GTDSHT

SEQ ID NO: 60097 - protein, 7 aa, Artificial sequence
  Protein classification predicting sequence
LGSLLDH

SEQ ID NO: 60098 - protein, 7 aa, Artificial sequence
  Protein classification predicting sequence
DRNCHKS

SEQ ID NO: 60099 - protein, 6 aa, Artificial sequence
  Protein classification predicting sequence
AINFSR

SEQ ID NO: 60100 - protein, 5 aa, Artificial sequence
  Protein classification predicting sequence
PYPPG

SEQ ID NO: 60101 - protein, 6 aa, Artificial sequence
  Protein classification predicting sequence
ITSITS

SEQ ID NO: 60102 - protein, 6 aa, Artificial sequence
  Protein classification predicting sequence
FSTGGA

SEQ ID NO: 60103 - protein, 7 aa, Artificial sequence
  Protein classification predicting sequence
THFQPAQ

SEQ ID NO: 60104 - protein, 6 aa, Artificial sequence
  Protein classification predicting sequence
VPVGLG

SEQ ID NO: 60105 - protein, 7 aa, Artificial sequence
  Protein classification predicting sequence
ESEGADI

SEQ ID NO: 60106 - protein, 6 aa, Artificial sequence
  Protein classification predicting sequence
APVVIG

SEQ ID NO: 60107 - protein, 7 aa, Artificial sequence
  Protein classification predicting sequence
QQAIKQG

SEQ ID NO: 60108 - protein, 6 aa, Artificial sequence
  Protein classification predicting sequence
SIEDGL

SEQ ID NO: 60109 - protein, 6 aa, Artificial sequence
  Protein classification predicting sequence
NIHARE

SEQ ID NO: 60110 - protein, 6 aa, Artificial sequence
  Protein classification predicting sequence
TNGRLS

SEQ ID NO: 60111 - protein, 6 aa, Artificial sequence
  Protein classification predicting sequence
ALYKAQ

SEQ ID NO: 60112 - protein, 7 aa, Artificial sequence
  Protein classification predicting sequence
EPAPLPA

SEQ ID NO: 60113 - protein, 7 aa, Artificial sequence
  Protein classification predicting sequence
PLRDDVR

SEQ ID NO: 60114 - protein, 7 aa, Artificial sequence
  Protein classification predicting sequence
VHGEDIL

SEQ ID NO: 60115 - protein, 6 aa, Artificial sequence
  Protein classification predicting sequence
PRLEAR

SEQ ID NO: 60116 - protein, 6 aa, Artificial sequence
  Protein classification predicting sequence
PYARDR

SEQ ID NO: 60117 - protein, 6 aa, Artificial sequence
  Protein classification predicting sequence
IRQIPG

SEQ ID NO: 60118 - protein, 9 aa, Artificial sequence
  Protein classification predicting sequence
NRPKALNAL

SEQ ID NO: 60119 - protein, 10 aa, Artificial sequence
  Protein classification predicting sequence
TGHPRFFNQL

SEQ ID NO: 60120 - protein, 8 aa, Artificial sequence
  Protein classification predicting sequence
VPFLVSAT

SEQ ID NO: 60121 - protein, 9 aa, Artificial sequence
  Protein classification predicting sequence
ASYLFQQDK

SEQ ID NO: 60122 - protein, 6 aa, Artificial sequence
  Protein classification predicting sequence
WLMWKA

SEQ ID NO: 60123 - protein, 5 aa, Artificial sequence
  Protein classification predicting sequence
NVCFW

SEQ ID NO: 60124 - protein, 8 aa, Artificial sequence
  Protein classification predicting sequence
RLSKVAPV

SEQ ID NO: 60125 - protein, 5 aa, Artificial sequence
  Protein classification predicting sequence
NVDFQ

SEQ ID NO: 60126 - protein, 6 aa, Artificial sequence
  Protein classification predicting sequence
PVIIYN

SEQ ID NO: 60127 - protein, 6 aa, Artificial sequence
  Protein classification predicting sequence
VRSVRY

SEQ ID NO: 60128 - protein, 6 aa, Artificial sequence
  Protein classification predicting sequence
FPEVQP

SEQ ID NO: 60129 - protein, 5 aa, Artificial sequence
  Protein classification predicting sequence
NFNPH

SEQ ID NO: 60130 - protein, 8 aa, Artificial sequence
  Protein classification predicting sequence
GGGLGIDY

SEQ ID NO: 60131 - protein, 7 aa, Artificial sequence
  Protein classification predicting sequence
DLKFFDI

SEQ ID NO: 60132 - protein, 6 aa, Artificial sequence
  Protein classification predicting sequence
NATAGT

SEQ ID NO: 60133 - protein, 12 aa, Artificial sequence
  Protein classification predicting sequence
NVCFWFVPPSLR

SEQ ID NO: 60134 - protein, 7 aa, Artificial sequence
  Protein classification predicting sequence
PGGSISN

SEQ ID NO: 60135 - protein, 9 aa, Artificial sequence
  Protein classification predicting sequence
GTTVLGAFD

SEQ ID NO: 60136 - protein, 5 aa, Artificial sequence
  Protein classification predicting sequence
WNPHK

SEQ ID NO: 60137 - protein, 8 aa, Artificial sequence
  Protein classification predicting sequence
SPACTELE

SEQ ID NO: 60138 - protein, 10 aa, Artificial sequence
  Protein classification predicting sequence
WLHIDAAYAG

SEQ ID NO: 60139 - protein, 6 aa, Artificial sequence
  Protein classification predicting sequence
HWQIPL

SEQ ID NO: 60140 - protein, 9 aa, Artificial sequence
  Protein classification predicting sequence
PGITHWQSP

SEQ ID NO: 60141 - protein, 9 aa, Artificial sequence
  Protein classification predicting sequence
SDQAHSSVE

SEQ ID NO: 60142 - protein, 6 aa, Artificial sequence
  Protein classification predicting sequence
CSFDNL

SEQ ID NO: 60143 - protein, 8 aa, Artificial sequence
  Protein classification predicting sequence
LWLHVDAA

SEQ ID NO: 60144 - protein, 6 aa, Artificial sequence
  Protein classification predicting sequence
FLEPLE

SEQ ID NO: 60145 - protein, 10 aa, Artificial sequence
  Protein classification predicting sequence
TTFGVGELSA

SEQ ID NO: 60146 - protein, 11 aa, Artificial sequence
  Protein classification predicting sequence
NGIAGSYAEHV

SEQ ID NO: 60147 - protein, 6 aa, Artificial sequence
  Protein classification predicting sequence
GLEAGS

SEQ ID NO: 60148 - protein, 6 aa, Artificial sequence
  Protein classification predicting sequence
YAVKCN

SEQ ID NO: 60149 - protein, 5 aa, Artificial sequence
  Protein classification predicting sequence
VNFDC

SEQ ID NO: 60150 - protein, 5 aa, Artificial sequence
  Protein classification predicting sequence
ANPCK

SEQ ID NO: 60151 - protein, 6 aa, Artificial sequence
  Protein classification predicting sequence
NMGAYT

SEQ ID NO: 60152 - protein, 6 aa, Artificial sequence
  Protein classification predicting sequence
FYDFFG

SEQ ID NO: 60153 - protein, 7 aa, Artificial sequence
  Protein classification predicting sequence
LPYPPGV

SEQ ID NO: 60154 - protein, 5 aa, Artificial sequence
  Protein classification predicting sequence
GRTMY

SEQ ID NO: 60155 - protein, 6 aa, Artificial sequence
  Protein classification predicting sequence
SMPDAW

SEQ ID NO: 60156 - protein, 8 aa, Artificial sequence
  Protein classification predicting sequence
SPAATELE

SEQ ID NO: 60157 - protein, 10 aa, Artificial sequence
  Protein classification predicting sequence
HVDAAYAGSA

SEQ ID NO: 60158 - protein, 6 aa, Artificial sequence
  Protein classification predicting sequence
ICPEFR

SEQ ID NO: 60159 - protein, 5 aa, Artificial sequence
  Protein classification predicting sequence
GVTHW

SEQ ID NO: 60160 - protein, 7 aa, Artificial sequence
  Protein classification predicting sequence
QAHSSVE

SEQ ID NO: 60161 - protein, 8 aa, Artificial sequence
  Protein classification predicting sequence
RGKEMVDY

SEQ ID NO: 60162 - protein, 6 aa, Artificial sequence
  Protein classification predicting sequence
TLLKPN

SEQ ID NO: 60163 - protein, 5 aa, Artificial sequence
  Protein classification predicting sequence
AQSWH

SEQ ID NO: 60164 - protein, 6 aa, Artificial sequence
  Protein classification predicting sequence
GALSFG

SEQ ID NO: 60165 - protein, 7 aa, Artificial sequence
  Protein classification predicting sequence
KDGDLIE

SEQ ID NO: 60166 - protein, 7 aa, Artificial sequence
  Protein classification predicting sequence
ATGGSTN

SEQ ID NO: 60167 - protein, 6 aa, Artificial sequence
  Protein classification predicting sequence
VDFFED

SEQ ID NO: 60168 - protein, 6 aa, Artificial sequence
  Protein classification predicting sequence
AANFKE

SEQ ID NO: 60169 - protein, 6 aa, Artificial sequence
  Protein classification predicting sequence
NVNEVI

SEQ ID NO: 60170 - protein, 6 aa, Artificial sequence
  Protein classification predicting sequence
PVTTHV

SEQ ID NO: 60171 - protein, 5 aa, Artificial sequence
  Protein classification predicting sequence
GNNQS

SEQ ID NO: 60172 - protein, 8 aa, Artificial sequence
  Protein classification predicting sequence
AAVAKQAL

SEQ ID NO: 60173 - protein, 5 aa, Artificial sequence
  Protein classification predicting sequence
PFITA

SEQ ID NO: 60174 - protein, 7 aa, Artificial sequence
  Protein classification predicting sequence
ASALASA

SEQ ID NO: 60175 - protein, 6 aa, Artificial sequence
  Protein classification predicting sequence
YHSISP

SEQ ID NO: 60176 - protein, 14 aa, Artificial sequence
  Protein classification predicting sequence
IFMGVGAMTDFGPL

SEQ ID NO: 60177 - protein, 9 aa, Artificial sequence
  Protein classification predicting sequence
TLLLGAAAQ

SEQ ID NO: 60178 - protein, 12 aa, Artificial sequence
  Protein classification predicting sequence
AIGIIGGADGPT

SEQ ID NO: 60179 - protein, 13 aa, Artificial sequence
  Protein classification predicting sequence
LLGAIAVAAYSYM

SEQ ID NO: 60180 - protein, 8 aa, Artificial sequence
  Protein classification predicting sequence
LVPLIQPP

SEQ ID NO: 60181 - protein, 19 aa, Artificial sequence
  Protein classification predicting sequence
NPLIGSAGVSAVPMAARVS

SEQ ID NO: 60182 - protein, 5 aa, Artificial sequence
  Protein classification predicting sequence
IFYNN

SEQ ID NO: 60183 - protein, 7 aa, Artificial sequence
  Protein classification predicting sequence
AARLGLE

SEQ ID NO: 60184 - protein, 7 aa, Artificial sequence
  Protein classification predicting sequence
AFAAGVT

SEQ ID NO: 60185 - protein, 6 aa, Artificial sequence
  Protein classification predicting sequence
RPRRNR

SEQ ID NO: 60186 - protein, 8 aa, Artificial sequence
  Protein classification predicting sequence
YGITTGFG

SEQ ID NO: 60187 - protein, 7 aa, Artificial sequence
  Protein classification predicting sequence
SGDLSPL

SEQ ID NO: 60188 - protein, 8 aa, Artificial sequence
  Protein classification predicting sequence
YGINTGFG

SEQ ID NO: 60189 - protein, 8 aa, Artificial sequence
  Protein classification predicting sequence
YGVTTGFG

SEQ ID NO: 60190 - protein, 6 aa, Artificial sequence
  Protein classification predicting sequence
GYSGIR

SEQ ID NO: 60191 - protein, 6 aa, Artificial sequence
  Protein classification predicting sequence
RQVLVD

SEQ ID NO: 60192 - protein, 8 aa, Artificial sequence
  Protein classification predicting sequence
ASGDLVPL

SEQ ID NO: 60193 - protein, 10 aa, Artificial sequence
  Protein classification predicting sequence
KEGLALVNGT

SEQ ID NO: 60194 - protein, 7 aa, Artificial sequence
  Protein classification predicting sequence
CDKIVPG

SEQ ID NO: 60195 - protein, 7 aa, Artificial sequence
  Protein classification predicting sequence
KVKEGVR

SEQ ID NO: 60196 - protein, 7 aa, Artificial sequence
  Protein classification predicting sequence
IAEAVKA

SEQ ID NO: 60197 - protein, 7 aa, Artificial sequence
  Protein classification predicting sequence
IVRDVKN

SEQ ID NO: 60198 - protein, 7 aa, Artificial sequence
  Protein classification predicting sequence
LHLLAIA

SEQ ID NO: 60199 - protein, 9 aa, Artificial sequence
  Protein classification predicting sequence
ELVERNITP

SEQ ID NO: 60200 - protein, 6 aa, Artificial sequence
  Protein classification predicting sequence
READFD

SEQ ID NO: 60201 - protein, 6 aa, Artificial sequence
  Protein classification predicting sequence
EKGFNI

SEQ ID NO: 60202 - protein, 7 aa, Artificial sequence
  Protein classification predicting sequence
LGLSLPG

SEQ ID NO: 60203 - protein, 5 aa, Artificial sequence
  Protein classification predicting sequence
ICPPN

SEQ ID NO: 60204 - protein, 6 aa, Artificial sequence
  Protein classification predicting sequence
GMVIVC

SEQ ID NO: 60205 - protein, 6 aa, Artificial sequence
  Protein classification predicting sequence
IKTGSL

SEQ ID NO: 60206 - protein, 6 aa, Artificial sequence
  Protein classification predicting sequence
GICHQV

SEQ ID NO: 60207 - protein, 6 aa, Artificial sequence
  Protein classification predicting sequence
LAPEGA

SEQ ID NO: 60208 - protein, 6 aa, Artificial sequence
  Protein classification predicting sequence
RNFKGR

SEQ ID NO: 60209 - protein, 6 aa, Artificial sequence
  Protein classification predicting sequence
KFGDSV

SEQ ID NO: 60210 - protein, 9 aa, Artificial sequence
  Protein classification predicting sequence
NFGCGSSRE

SEQ ID NO: 60211 - protein, 6 aa, Artificial sequence
  Protein classification predicting sequence
VIAESF

SEQ ID NO: 60212 - protein, 6 aa, Artificial sequence
  Protein classification predicting sequence
RVDPSF

SEQ ID NO: 60213 - protein, 6 aa, Artificial sequence
  Protein classification predicting sequence
LSHCER

SEQ ID NO: 60214 - protein, 10 aa, Artificial sequence
  Protein classification predicting sequence
SCTNARLSDL

SEQ ID NO: 60215 - protein, 6 aa, Artificial sequence
  Protein classification predicting sequence
MGLADG

SEQ ID NO: 60216 - protein, 6 aa, Artificial sequence
  Protein classification predicting sequence
SCTNSR

SEQ ID NO: 60217 - protein, 8 aa, Artificial sequence
  Protein classification predicting sequence
RLSVGLED

SEQ ID NO: 60218 - protein, 5 aa, Artificial sequence
  Protein classification predicting sequence
QMNPA

SEQ ID NO: 60219 - protein, 6 aa, Artificial sequence
  Protein classification predicting sequence
GVNSGF

SEQ ID NO: 60220 - protein, 7 aa, Artificial sequence
  Protein classification predicting sequence
AHVGDKL

SEQ ID NO: 60221 - protein, 6 aa, Artificial sequence
  Protein classification predicting sequence
YAADGY

SEQ ID NO: 60222 - protein, 6 aa, Artificial sequence
  Protein classification predicting sequence
LHHTLG

SEQ ID NO: 60223 - protein, 5 aa, Artificial sequence
  Protein classification predicting sequence
VWIDH

SEQ ID NO: 60224 - protein, 6 aa, Artificial sequence
  Protein classification predicting sequence
NRIDGK

SEQ ID NO: 60225 - protein, 5 aa, Artificial sequence
  Protein classification predicting sequence
VWWEG

SEQ ID NO: 60226 - protein, 6 aa, Artificial sequence
  Protein classification predicting sequence
GPDLPK

SEQ ID NO: 60227 - protein, 6 aa, Artificial sequence
  Protein classification predicting sequence
WKAIKF

SEQ ID NO: 60228 - protein, 6 aa, Artificial sequence
  Protein classification predicting sequence
GETIIA

SEQ ID NO: 60229 - protein, 7 aa, Artificial sequence
  Protein classification predicting sequence
IEGIKKF

SEQ ID NO: 60230 - protein, 6 aa, Artificial sequence
  Protein classification predicting sequence
YRDAGW

SEQ ID NO: 60231 - protein, 6 aa, Artificial sequence
  Protein classification predicting sequence
MQAVGA

SEQ ID NO: 60232 - protein, 6 aa, Artificial sequence
  Protein classification predicting sequence
THYVIG

SEQ ID NO: 60233 - protein, 7 aa, Artificial sequence
  Protein classification predicting sequence
LGEKIAT

SEQ ID NO: 60234 - protein, 6 aa, Artificial sequence
  Protein classification predicting sequence
ARMMAA

SEQ ID NO: 60235 - protein, 7 aa, Artificial sequence
  Protein classification predicting sequence
RVKEIRK

SEQ ID NO: 60236 - protein, 8 aa, Artificial sequence
  Protein classification predicting sequence
LQLPKSFL

SEQ ID NO: 60237 - protein, 6 aa, Artificial sequence
  Protein classification predicting sequence
HMIRLI

SEQ ID NO: 60238 - protein, 6 aa, Artificial sequence
  Protein classification predicting sequence
SPAGNI

SEQ ID NO: 60239 - protein, 6 aa, Artificial sequence
  Protein classification predicting sequence
FLKVDK

SEQ ID NO: 60240 - protein, 7 aa, Artificial sequence
  Protein classification predicting sequence
PFLKVDK

SEQ ID NO: 60241 - protein, 6 aa, Artificial sequence
  Protein classification predicting sequence
HIGSQI

SEQ ID NO: 60242 - protein, 6 aa, Artificial sequence
  Protein classification predicting sequence
IRRVKV

SEQ ID NO: 60243 - protein, 5 aa, Artificial sequence
  Protein classification predicting sequence
VNVYQ

SEQ ID NO: 60244 - protein, 6 aa, Artificial sequence
  Protein classification predicting sequence
PIDLFE

SEQ ID NO: 60245 - protein, 5 aa, Artificial sequence
  Protein classification predicting sequence
CYAKT

SEQ ID NO: 60246 - protein, 6 aa, Artificial sequence
  Protein classification predicting sequence
LSTTFK

SEQ ID NO: 60247 - protein, 5 aa, Artificial sequence
  Protein classification predicting sequence
PFDAR

SEQ ID NO: 60248 - protein, 7 aa, Artificial sequence
  Protein classification predicting sequence
IPRRVYT

SEQ ID NO: 60249 - protein, 6 aa, Artificial sequence
  Protein classification predicting sequence
EPFRIK

SEQ ID NO: 60250 - protein, 6 aa, Artificial sequence
  Protein classification predicting sequence
GGQPVS

SEQ ID NO: 60251 - protein, 11 aa, Artificial sequence
  Protein classification predicting sequence
VYIDLLTDSGT

SEQ ID NO: 60252 - protein, 7 aa, Artificial sequence
  Protein classification predicting sequence
HQGRGAE

SEQ ID NO: 60253 - protein, 9 aa, Artificial sequence
  Protein classification predicting sequence
YGGLAGRDM

SEQ ID NO: 60254 - protein, 7 aa, Artificial sequence
  Protein classification predicting sequence
DQFPAQA

SEQ ID NO: 60255 - protein, 6 aa, Artificial sequence
  Protein classification predicting sequence
PTHQGR

SEQ ID NO: 60256 - protein, 6 aa, Artificial sequence
  Protein classification predicting sequence
QWAGMM

SEQ ID NO: 60257 - protein, 13 aa, Artificial sequence
  Protein classification predicting sequence
KYVVPTHQGRGAE

SEQ ID NO: 60258 - protein, 9 aa, Artificial sequence
  Protein classification predicting sequence
PTHQGRGAE

SEQ ID NO: 60259 - protein, 11 aa, Artificial sequence
  Protein classification predicting sequence
YGGLAGRDMEA

SEQ ID NO: 60260 - protein, 7 aa, Artificial sequence
  Protein classification predicting sequence
AGRDMEA

SEQ ID NO: 60261 - protein, 15 aa, Artificial sequence
  Protein classification predicting sequence
YIDLLTDSGTNAMSD

SEQ ID NO: 60262 - protein, 6 aa, Artificial sequence
  Protein classification predicting sequence
DQFPAQ

SEQ ID NO: 60263 - protein, 8 aa, Artificial sequence
  Protein classification predicting sequence
AGGQPVSM

SEQ ID NO: 60264 - protein, 8 aa, Artificial sequence
  Protein classification predicting sequence
TIPRRVYT

SEQ ID NO: 60265 - protein, 10 aa, Artificial sequence
  Protein classification predicting sequence
VPTHQGRGAE

SEQ ID NO: 60266 - protein, 7 aa, Artificial sequence
  Protein classification predicting sequence
REAEYKD

SEQ ID NO: 60267 - protein, 7 aa, Artificial sequence
  Protein classification predicting sequence
GDEAYAG

SEQ ID NO: 60268 - protein, 9 aa, Artificial sequence
  Protein classification predicting sequence
TALGLRTLR

SEQ ID NO: 60269 - protein, 8 aa, Artificial sequence
  Protein classification predicting sequence
PTFEEYLK

SEQ ID NO: 60270 - protein, 7 aa, Artificial sequence
  Protein classification predicting sequence
EAAERIA

SEQ ID NO: 60271 - protein, 7 aa, Artificial sequence
  Protein classification predicting sequence
VERIQAA

SEQ ID NO: 60272 - protein, 7 aa, Artificial sequence
  Protein classification predicting sequence
EIIADAA

SEQ ID NO: 60273 - protein, 7 aa, Artificial sequence
  Protein classification predicting sequence
AGVDGVL

SEQ ID NO: 60274 - protein, 6 aa, Artificial sequence
  Protein classification predicting sequence
GIIAPD

SEQ ID NO: 60275 - protein, 7 aa, Artificial sequence
  Protein classification predicting sequence
RAGADLI

SEQ ID NO: 60276 - protein, 6 aa, Artificial sequence
  Protein classification predicting sequence
LTYPFV

SEQ ID NO: 60277 - protein, 6 aa, Artificial sequence
  Protein classification predicting sequence
GQVLPT

SEQ ID NO: 60278 - protein, 7 aa, Artificial sequence
  Protein classification predicting sequence
HSWLSDI

SEQ ID NO: 60279 - protein, 7 aa, Artificial sequence
  Protein classification predicting sequence
VLGQALL

SEQ ID NO: 60280 - protein, 6 aa, Artificial sequence
  Protein classification predicting sequence
ETVMNA

SEQ ID NO: 60281 - protein, 8 aa, Artificial sequence
  Protein classification predicting sequence
IAGSYAEH

SEQ ID NO: 60282 - protein, 7 aa, Artificial sequence
  Protein classification predicting sequence
TVITESG

SEQ ID NO: 60283 - protein, 7 aa, Artificial sequence
  Protein classification predicting sequence
TLPQTLE

SEQ ID NO: 60284 - protein, 6 aa, Artificial sequence
  Protein classification predicting sequence
VQPGYL

SEQ ID NO: 60285 - protein, 12 aa, Artificial sequence
  Protein classification predicting sequence
GGGVIQGSASEA

SEQ ID NO: 60286 - protein, 5 aa, Artificial sequence
  Protein classification predicting sequence
NFDCS

SEQ ID NO: 60287 - protein, 6 aa, Artificial sequence
  Protein classification predicting sequence
LVCFRL

SEQ ID NO: 60288 - protein, 6 aa, Artificial sequence
  Protein classification predicting sequence
FFAYFP

SEQ ID NO: 60289 - protein, 6 aa, Artificial sequence
  Protein classification predicting sequence
SFREAL

SEQ ID NO: 60290 - protein, 6 aa, Artificial sequence
  Protein classification predicting sequence
EAGFGG

SEQ ID NO: 60291 - protein, 7 aa, Artificial sequence
  Protein classification predicting sequence
DPRKYLG

SEQ ID NO: 60292 - protein, 6 aa, Artificial sequence
  Protein classification predicting sequence
GFVAST

SEQ ID NO: 60293 - protein, 6 aa, Artificial sequence
  Protein classification predicting sequence
CDQILS

SEQ ID NO: 60294 - protein, 6 aa, Artificial sequence
  Protein classification predicting sequence
AQVDSS

SEQ ID NO: 60295 - protein, 6 aa, Artificial sequence
  Protein classification predicting sequence
VGLGDR

SEQ ID NO: 60296 - protein, 6 aa, Artificial sequence
  Protein classification predicting sequence
VKNVLG

SEQ ID NO: 60297 - protein, 7 aa, Artificial sequence
  Protein classification predicting sequence
AHYLGLC

SEQ ID NO: 60298 - protein, 6 aa, Artificial sequence
  Protein classification predicting sequence
HGGGVG

SEQ ID NO: 60299 - protein, 5 aa, Artificial sequence
  Protein classification predicting sequence
NAHHQ

SEQ ID NO: 60300 - protein, 7 aa, Artificial sequence
  Protein classification predicting sequence
EELIKQA

SEQ ID NO: 60301 - protein, 6 aa, Artificial sequence
  Protein classification predicting sequence
LVSEEL

SEQ ID NO: 60302 - protein, 6 aa, Artificial sequence
  Protein classification predicting sequence
QAGAGI

SEQ ID NO: 60303 - protein, 6 aa, Artificial sequence
  Protein classification predicting sequence
DESNAT

SEQ ID NO: 60304 - protein, 5 aa, Artificial sequence
  Protein classification predicting sequence
DRKQR

SEQ ID NO: 60305 - protein, 5 aa, Artificial sequence
  Protein classification predicting sequence
HGPQL

SEQ ID NO: 60306 - protein, 7 aa, Artificial sequence
  Protein classification predicting sequence
KAEIEKV

SEQ ID NO: 60307 - protein, 6 aa, Artificial sequence
  Protein classification predicting sequence
GVKIKA

SEQ ID NO: 60308 - protein, 7 aa, Artificial sequence
  Protein classification predicting sequence
DDYVEKD

SEQ ID NO: 60309 - protein, 5 aa, Artificial sequence
  Protein classification predicting sequence
YETKD

SEQ ID NO: 60310 - protein, 6 aa, Artificial sequence
  Protein classification predicting sequence
DVASSE

SEQ ID NO: 60311 - protein, 6 aa, Artificial sequence
  Protein classification predicting sequence
HYGIVA

SEQ ID NO: 60312 - protein, 6 aa, Artificial sequence
  Protein classification predicting sequence
QPASVV

SEQ ID NO: 60313 - protein, 6 aa, Artificial sequence
  Protein classification predicting sequence
DSIGGV

SEQ ID NO: 60314 - protein, 6 aa, Artificial sequence
  Protein classification predicting sequence
ASIERS

SEQ ID NO: 60315 - protein, 5 aa, Artificial sequence
  Protein classification predicting sequence
NDHHR

SEQ ID NO: 60316 - protein, 7 aa, Artificial sequence
  Protein classification predicting sequence
GVLEQAG

SEQ ID NO: 60317 - protein, 6 aa, Artificial sequence
  Protein classification predicting sequence
KLNDHF

SEQ ID NO: 60318 - protein, 6 aa, Artificial sequence
  Protein classification predicting sequence
AFENAM

SEQ ID NO: 60319 - protein, 6 aa, Artificial sequence
  Protein classification predicting sequence
SEAIRD

SEQ ID NO: 60320 - protein, 5 aa, Artificial sequence
  Protein classification predicting sequence
CHEIT

SEQ ID NO: 60321 - protein, 6 aa, Artificial sequence
  Protein classification predicting sequence
GGKTGI

SEQ ID NO: 60322 - protein, 5 aa, Artificial sequence
  Protein classification predicting sequence
WDAAV

SEQ ID NO: 60323 - protein, 7 aa, Artificial sequence
  Protein classification predicting sequence
PGIPLTE

SEQ ID NO: 60324 - protein, 6 aa, Artificial sequence
  Protein classification predicting sequence
VTTYGE

SEQ ID NO: 60325 - protein, 6 aa, Artificial sequence
  Protein classification predicting sequence
SARFSE

SEQ ID NO: 60326 - protein, 7 aa, Artificial sequence
  Protein classification predicting sequence
DQEAASH

SEQ ID NO: 60327 - protein, 7 aa, Artificial sequence
  Protein classification predicting sequence
YYVAPNG

SEQ ID NO: 60328 - protein, 5 aa, Artificial sequence
  Protein classification predicting sequence
NNHHI

SEQ ID NO: 60329 - protein, 7 aa, Artificial sequence
  Protein classification predicting sequence
GDPQHLI

SEQ ID NO: 60330 - protein, 5 aa, Artificial sequence
  Protein classification predicting sequence
DYDPQ

SEQ ID NO: 60331 - protein, 6 aa, Artificial sequence
  Protein classification predicting sequence
GGLGVD

SEQ ID NO: 60332 - protein, 5 aa, Artificial sequence
  Protein classification predicting sequence
DQDDW

SEQ ID NO: 60333 - protein, 6 aa, Artificial sequence
  Protein classification predicting sequence
TSWKNK

SEQ ID NO: 60334 - protein, 6 aa, Artificial sequence
  Protein classification predicting sequence
YAEMLG

SEQ ID NO: 60335 - protein, 6 aa, Artificial sequence
  Protein classification predicting sequence
PIEDAK

SEQ ID NO: 60336 - protein, 7 aa, Artificial sequence
  Protein classification predicting sequence
GHAVFLD

SEQ ID NO: 60337 - protein, 6 aa, Artificial sequence
  Protein classification predicting sequence
VFLDLK

SEQ ID NO: 60338 - protein, 6 aa, Artificial sequence
  Protein classification predicting sequence
VPIVEP

SEQ ID NO: 60339 - protein, 6 aa, Artificial sequence
  Protein classification predicting sequence
PYPTMV

SEQ ID NO: 60340 - protein, 6 aa, Artificial sequence
  Protein classification predicting sequence
PILLMG

SEQ ID NO: 60341 - protein, 6 aa, Artificial sequence
  Protein classification predicting sequence
GISNGE

SEQ ID NO: 60342 - protein, 6 aa, Artificial sequence
  Protein classification predicting sequence
RFIPIA

SEQ ID NO: 60343 - protein, 5 aa, Artificial sequence
  Protein classification predicting sequence
QGNMD

SEQ ID NO: 60344 - protein, 6 aa, Artificial sequence
  Protein classification predicting sequence
APKIKA

SEQ ID NO: 60345 - protein, 5 aa, Artificial sequence
  Protein classification predicting sequence
MYYVN

SEQ ID NO: 60346 - protein, 6 aa, Artificial sequence
  Protein classification predicting sequence
GEREIT

SEQ ID NO: 60347 - protein, 6 aa, Artificial sequence
  Protein classification predicting sequence
SLFTAS

SEQ ID NO: 60348 - protein, 6 aa, Artificial sequence
  Protein classification predicting sequence
GGTIGH

SEQ ID NO: 60349 - protein, 6 aa, Artificial sequence
  Protein classification predicting sequence
AKFMGK

SEQ ID NO: 60350 - protein, 6 aa, Artificial sequence
  Protein classification predicting sequence
IAVDDG

SEQ ID NO: 60351 - protein, 6 aa, Artificial sequence
  Protein classification predicting sequence
IAIDDG

SEQ ID NO: 60352 - protein, 6 aa, Artificial sequence
  Protein classification predicting sequence
MLSDKK

SEQ ID NO: 60353 - protein, 6 aa, Artificial sequence
  Protein classification predicting sequence
GKARFD

SEQ ID NO: 60354 - protein, 6 aa, Artificial sequence
  Protein classification predicting sequence
HPKENP

SEQ ID NO: 60355 - protein, 5 aa, Artificial sequence
  Protein classification predicting sequence
DQRSK

SEQ ID NO: 60356 - protein, 7 aa, Artificial sequence
  Protein classification predicting sequence
NEKSRRV

SEQ ID NO: 60357 - protein, 6 aa, Artificial sequence
  Protein classification predicting sequence
SDQMAK

SEQ ID NO: 60358 - protein, 7 aa, Artificial sequence
  Protein classification predicting sequence
VVALRGS

SEQ ID NO: 60359 - protein, 6 aa, Artificial sequence
  Protein classification predicting sequence
VTEEQF

SEQ ID NO: 60360 - protein, 6 aa, Artificial sequence
  Protein classification predicting sequence
EARMSM

SEQ ID NO: 60361 - protein, 5 aa, Artificial sequence
  Protein classification predicting sequence
CKVAP

SEQ ID NO: 60362 - protein, 6 aa, Artificial sequence
  Protein classification predicting sequence
LSVFDA

SEQ ID NO: 60363 - protein, 6 aa, Artificial sequence
  Protein classification predicting sequence
RNEGRD

SEQ ID NO: 60364 - protein, 5 aa, Artificial sequence
  Protein classification predicting sequence
AIPWV

SEQ ID NO: 60365 - protein, 6 aa, Artificial sequence
  Protein classification predicting sequence
FDSEVE

SEQ ID NO: 60366 - protein, 6 aa, Artificial sequence
  Protein classification predicting sequence
EACMLG

SEQ ID NO: 60367 - protein, 6 aa, Artificial sequence
  Protein classification predicting sequence
EAHNEL

SEQ ID NO: 60368 - protein, 6 aa, Artificial sequence
  Protein classification predicting sequence
ATATDL

SEQ ID NO: 60369 - protein, 6 aa, Artificial sequence
  Protein classification predicting sequence
RFVAET

SEQ ID NO: 60370 - protein, 6 aa, Artificial sequence
  Protein classification predicting sequence
RMKLLG

SEQ ID NO: 60371 - protein, 7 aa, Artificial sequence
  Protein classification predicting sequence
IASFALV

SEQ ID NO: 60372 - protein, 5 aa, Artificial sequence
  Protein classification predicting sequence
LYHCV

SEQ ID NO: 60373 - protein, 6 aa, Artificial sequence
  Protein classification predicting sequence
GVGFEA

SEQ ID NO: 60374 - protein, 6 aa, Artificial sequence
  Protein classification predicting sequence
SGWHRM

SEQ ID NO: 60375 - protein, 6 aa, Artificial sequence
  Protein classification predicting sequence
TFNVNG

SEQ ID NO: 60376 - protein, 6 aa, Artificial sequence
  Protein classification predicting sequence
LFVESN

SEQ ID NO: 60377 - protein, 6 aa, Artificial sequence
  Protein classification predicting sequence
VITESG

SEQ ID NO: 60378 - protein, 7 aa, Artificial sequence
  Protein classification predicting sequence
MKAGLSA

SEQ ID NO: 60379 - protein, 6 aa, Artificial sequence
  Protein classification predicting sequence
LTDRIG

SEQ ID NO: 60380 - protein, 6 aa, Artificial sequence
  Protein classification predicting sequence
AHATML

SEQ ID NO: 60381 - protein, 7 aa, Artificial sequence
  Protein classification predicting sequence
GVLTAEE

SEQ ID NO: 60382 - protein, 6 aa, Artificial sequence
  Protein classification predicting sequence
GSIGWS

SEQ ID NO: 60383 - protein, 6 aa, Artificial sequence
  Protein classification predicting sequence
VEGFAE

SEQ ID NO: 60384 - protein, 6 aa, Artificial sequence
  Protein classification predicting sequence
AHAQML

SEQ ID NO: 60385 - protein, 6 aa, Artificial sequence
  Protein classification predicting sequence
HQAIVE

SEQ ID NO: 60386 - protein, 7 aa, Artificial sequence
  Protein classification predicting sequence
LGFDVVG

SEQ ID NO: 60387 - protein, 7 aa, Artificial sequence
  Protein classification predicting sequence
PAGGVRT

SEQ ID NO: 60388 - protein, 6 aa, Artificial sequence
  Protein classification predicting sequence
ILFSDI

SEQ ID NO: 60389 - protein, 6 aa, Artificial sequence
  Protein classification predicting sequence
VLAPHY

SEQ ID NO: 60390 - protein, 7 aa, Artificial sequence
  Protein classification predicting sequence
GRFSGAT

SEQ ID NO: 60391 - protein, 6 aa, Artificial sequence
  Protein classification predicting sequence
GSSIMP

SEQ ID NO: 60392 - protein, 6 aa, Artificial sequence
  Protein classification predicting sequence
LGLHCV

SEQ ID NO: 60393 - protein, 6 aa, Artificial sequence
  Protein classification predicting sequence
SNPLGT

SEQ ID NO: 60394 - protein, 7 aa, Artificial sequence
  Protein classification predicting sequence
RAAIDSG

SEQ ID NO: 60395 - protein, 7 aa, Artificial sequence
  Protein classification predicting sequence
CDAVLSA

SEQ ID NO: 60396 - protein, 6 aa, Artificial sequence
  Protein classification predicting sequence
GAERWL

SEQ ID NO: 60397 - protein, 6 aa, Artificial sequence
  Protein classification predicting sequence
GDLTGF

SEQ ID NO: 60398 - protein, 6 aa, Artificial sequence
  Protein classification predicting sequence
GGEKSK

SEQ ID NO: 60399 - protein, 6 aa, Artificial sequence
  Protein classification predicting sequence
ENALSY

SEQ ID NO: 60400 - protein, 5 aa, Artificial sequence
  Protein classification predicting sequence
ADIGN

SEQ ID NO: 60401 - protein, 7 aa, Artificial sequence
  Protein classification predicting sequence
RHVLLLS

SEQ ID NO: 60402 - protein, 7 aa, Artificial sequence
  Protein classification predicting sequence
SFKPLKA

SEQ ID NO: 60403 - protein, 6 aa, Artificial sequence
  Protein classification predicting sequence
TNNAGG

SEQ ID NO: 60404 - protein, 7 aa, Artificial sequence
  Protein classification predicting sequence
NEKVQIV

SEQ ID NO: 60405 - protein, 6 aa, Artificial sequence
  Protein classification predicting sequence
RSITRA

SEQ ID NO: 60406 - protein, 6 aa, Artificial sequence
  Protein classification predicting sequence
SQYTYE

SEQ ID NO: 60407 - protein, 6 aa, Artificial sequence
  Protein classification predicting sequence
AISQNL

SEQ ID NO: 60408 - protein, 5 aa, Artificial sequence
  Protein classification predicting sequence
RQESD

SEQ ID NO: 60409 - protein, 6 aa, Artificial sequence
  Protein classification predicting sequence
KKATQE

SEQ ID NO: 60410 - protein, 6 aa, Artificial sequence
  Protein classification predicting sequence
RQESDR

SEQ ID NO: 60411 - protein, 6 aa, Artificial sequence
  Protein classification predicting sequence
DIEAVV

SEQ ID NO: 60412 - protein, 6 aa, Artificial sequence
  Protein classification predicting sequence
LSRERA

SEQ ID NO: 60413 - protein, 5 aa, Artificial sequence
  Protein classification predicting sequence
GWGEP

SEQ ID NO: 60414 - protein, 6 aa, Artificial sequence
  Protein classification predicting sequence
ELAAAC

SEQ ID NO: 60415 - protein, 6 aa, Artificial sequence
  Protein classification predicting sequence
SDKNLY

SEQ ID NO: 60416 - protein, 6 aa, Artificial sequence
  Protein classification predicting sequence
IHAARG

SEQ ID NO: 60417 - protein, 12 aa, Artificial sequence
  Protein classification predicting sequence
ASGPRAGLAEIS

SEQ ID NO: 60418 - protein, 14 aa, Artificial sequence
  Protein classification predicting sequence
QPGSSIMPGKVNPV

SEQ ID NO: 60419 - protein, 6 aa, Artificial sequence
  Protein classification predicting sequence
SFTDNC

SEQ ID NO: 60420 - protein, 6 aa, Artificial sequence
  Protein classification predicting sequence
ACDQIL

SEQ ID NO: 60421 - protein, 7 aa, Artificial sequence
  Protein classification predicting sequence
NMNTNEV

SEQ ID NO: 60422 - protein, 7 aa, Artificial sequence
  Protein classification predicting sequence
DAINQLR

SEQ ID NO: 60423 - protein, 7 aa, Artificial sequence
  Protein classification predicting sequence
NMNMNEV

SEQ ID NO: 60424 - protein, 6 aa, Artificial sequence
  Protein classification predicting sequence
ALEYMG

SEQ ID NO: 60425 - protein, 10 aa, Artificial sequence
  Protein classification predicting sequence
VTALNPHIGY

SEQ ID NO: 60426 - protein, 6 aa, Artificial sequence
  Protein classification predicting sequence
NEVIAN

SEQ ID NO: 60427 - protein, 6 aa, Artificial sequence
  Protein classification predicting sequence
LHSLEH

SEQ ID NO: 60428 - protein, 6 aa, Artificial sequence
  Protein classification predicting sequence
PNVLRH

SEQ ID NO: 60429 - protein, 6 aa, Artificial sequence
  Protein classification predicting sequence
LQAELL

SEQ ID NO: 60430 - protein, 7 aa, Artificial sequence
  Protein classification predicting sequence
QPVLLAH

SEQ ID NO: 60431 - protein, 6 aa, Artificial sequence
  Protein classification predicting sequence
DIRFLG

SEQ ID NO: 60432 - protein, 6 aa, Artificial sequence
  Protein classification predicting sequence
NDIRLL

SEQ ID NO: 60433 - protein, 5 aa, Artificial sequence
  Protein classification predicting sequence
PQVTW

SEQ ID NO: 60434 - protein, 5 aa, Artificial sequence
  Protein classification predicting sequence
HFPLV

SEQ ID NO: 60435 - protein, 6 aa, Artificial sequence
  Protein classification predicting sequence
NPSNPL

SEQ ID NO: 60436 - protein, 5 aa, Artificial sequence
  Protein classification predicting sequence
GDVWW

SEQ ID NO: 60437 - protein, 7 aa, Artificial sequence
  Protein classification predicting sequence
RRVSRPR

SEQ ID NO: 60438 - protein, 6 aa, Artificial sequence
  Protein classification predicting sequence
DREKAS

SEQ ID NO: 60439 - protein, 6 aa, Artificial sequence
  Protein classification predicting sequence
LPKEVE

SEQ ID NO: 60440 - protein, 6 aa, Artificial sequence
  Protein classification predicting sequence
QLTDSA

SEQ ID NO: 60441 - protein, 6 aa, Artificial sequence
  Protein classification predicting sequence
PVLRYG

SEQ ID NO: 60442 - protein, 6 aa, Artificial sequence
  Protein classification predicting sequence
ERLHHL

SEQ ID NO: 60443 - protein, 6 aa, Artificial sequence
  Protein classification predicting sequence
INDQTR

SEQ ID NO: 60444 - protein, 6 aa, Artificial sequence
  Protein classification predicting sequence
RISEWA

SEQ ID NO: 60445 - protein, 6 aa, Artificial sequence
  Protein classification predicting sequence
NAILGV

SEQ ID NO: 60446 - protein, 5 aa, Artificial sequence
  Protein classification predicting sequence
EAKWG

SEQ ID NO: 60447 - protein, 7 aa, Artificial sequence
  Protein classification predicting sequence
KKQIENI

SEQ ID NO: 60448 - protein, 6 aa, Artificial sequence
  Protein classification predicting sequence
VEDPDG

SEQ ID NO: 60449 - protein, 6 aa, Artificial sequence
  Protein classification predicting sequence
STRTQI

SEQ ID NO: 60450 - protein, 6 aa, Artificial sequence
  Protein classification predicting sequence
INDELY

SEQ ID NO: 60451 - protein, 7 aa, Artificial sequence
  Protein classification predicting sequence
VTPFYYP

SEQ ID NO: 60452 - protein, 6 aa, Artificial sequence
  Protein classification predicting sequence
ALQGNM

SEQ ID NO: 60453 - protein, 7 aa, Artificial sequence
  Protein classification predicting sequence
LAEKGRE

SEQ ID NO: 60454 - protein, 7 aa, Artificial sequence
  Protein classification predicting sequence
VSNIIGV

SEQ ID NO: 60455 - protein, 6 aa, Artificial sequence
  Protein classification predicting sequence
SFEAVG

SEQ ID NO: 60456 - protein, 6 aa, Artificial sequence
  Protein classification predicting sequence
RHYLSV

SEQ ID NO: 60457 - protein, 6 aa, Artificial sequence
  Protein classification predicting sequence
PNLNLL

SEQ ID NO: 60458 - protein, 7 aa, Artificial sequence
  Protein classification predicting sequence
ALVEQFG

SEQ ID NO: 60459 - protein, 6 aa, Artificial sequence
  Protein classification predicting sequence
KCLELA

SEQ ID NO: 60460 - protein, 6 aa, Artificial sequence
  Protein classification predicting sequence
ELADYL

SEQ ID NO: 60461 - protein, 6 aa, Artificial sequence
  Protein classification predicting sequence
GGGVLQ

SEQ ID NO: 60462 - protein, 5 aa, Artificial sequence
  Protein classification predicting sequence
NCLTE

SEQ ID NO: 60463 - protein, 5 aa, Artificial sequence
  Protein classification predicting sequence
ICWVG

SEQ ID NO: 60464 - protein, 6 aa, Artificial sequence
  Protein classification predicting sequence
KAGAAE

SEQ ID NO: 60465 - protein, 6 aa, Artificial sequence
  Protein classification predicting sequence
GFDCAS

SEQ ID NO: 60466 - protein, 6 aa, Artificial sequence
  Protein classification predicting sequence
KHILNL

SEQ ID NO: 60467 - protein, 6 aa, Artificial sequence
  Protein classification predicting sequence
ILNLGH

SEQ ID NO: 60468 - protein, 6 aa, Artificial sequence
  Protein classification predicting sequence
RVNTLL

SEQ ID NO: 60469 - protein, 6 aa, Artificial sequence
  Protein classification predicting sequence
PLAKIT

SEQ ID NO: 60470 - protein, 6 aa, Artificial sequence
  Protein classification predicting sequence
AEAKQA

SEQ ID NO: 60471 - protein, 6 aa, Artificial sequence
  Protein classification predicting sequence
EIDMVI

SEQ ID NO: 60472 - protein, 6 aa, Artificial sequence
  Protein classification predicting sequence
KTSTGF

SEQ ID NO: 60473 - protein, 6 aa, Artificial sequence
  Protein classification predicting sequence
IHVTPE

SEQ ID NO: 60474 - protein, 6 aa, Artificial sequence
  Protein classification predicting sequence
GVNGEL

SEQ ID NO: 60475 - protein, 6 aa, Artificial sequence
  Protein classification predicting sequence
GNTAAI

SEQ ID NO: 60476 - protein, 6 aa, Artificial sequence
  Protein classification predicting sequence
IGSLSE

SEQ ID NO: 60477 - protein, 6 aa, Artificial sequence
  Protein classification predicting sequence
TEKMVI

SEQ ID NO: 60478 - protein, 8 aa, Artificial sequence
  Protein classification predicting sequence
FDQTLIDQ

SEQ ID NO: 60479 - protein, 6 aa, Artificial sequence
  Protein classification predicting sequence
DGSKTE

SEQ ID NO: 60480 - protein, 6 aa, Artificial sequence
  Protein classification predicting sequence
LEGGAM

SEQ ID NO: 60481 - protein, 6 aa, Artificial sequence
  Protein classification predicting sequence
EIFHNL

SEQ ID NO: 60482 - protein, 5 aa, Artificial sequence
  Protein classification predicting sequence
IFYMN

SEQ ID NO: 60483 - protein, 6 aa, Artificial sequence
  Protein classification predicting sequence
YMTSST

SEQ ID NO: 60484 - protein, 7 aa, Artificial sequence
  Protein classification predicting sequence
SALVTAL

SEQ ID NO: 60485 - protein, 6 aa, Artificial sequence
  Protein classification predicting sequence
VAPSTQ

SEQ ID NO: 60486 - protein, 6 aa, Artificial sequence
  Protein classification predicting sequence
QTAQPV

SEQ ID NO: 60487 - protein, 6 aa, Artificial sequence
  Protein classification predicting sequence
TLGQEF

SEQ ID NO: 60488 - protein, 6 aa, Artificial sequence
  Protein classification predicting sequence
IMENAN

SEQ ID NO: 60489 - protein, 6 aa, Artificial sequence
  Protein classification predicting sequence
SFEEHC

SEQ ID NO: 60490 - protein, 7 aa, Artificial sequence
  Protein classification predicting sequence
HPNDHVN

SEQ ID NO: 60491 - protein, 5 aa, Artificial sequence
  Protein classification predicting sequence
RIEHD

SEQ ID NO: 60492 - protein, 6 aa, Artificial sequence
  Protein classification predicting sequence
EVAQTM

SEQ ID NO: 60493 - protein, 6 aa, Artificial sequence
  Protein classification predicting sequence
STGIYE

SEQ ID NO: 60494 - protein, 6 aa, Artificial sequence
  Protein classification predicting sequence
VPAASV

SEQ ID NO: 60495 - protein, 6 aa, Artificial sequence
  Protein classification predicting sequence
LRSNVS

SEQ ID NO: 60496 - protein, 6 aa, Artificial sequence
  Protein classification predicting sequence
VIIMSY

SEQ ID NO: 60497 - protein, 5 aa, Artificial sequence
  Protein classification predicting sequence
GDPYP

SEQ ID NO: 60498 - protein, 7 aa, Artificial sequence
  Protein classification predicting sequence
ETLEEIG

SEQ ID NO: 60499 - protein, 6 aa, Artificial sequence
  Protein classification predicting sequence
EGDPYL

SEQ ID NO: 60500 - protein, 5 aa, Artificial sequence
  Protein classification predicting sequence
GAPCR

SEQ ID NO: 60501 - protein, 6 aa, Artificial sequence
  Protein classification predicting sequence
LPVPAF

SEQ ID NO: 60502 - protein, 5 aa, Artificial sequence
  Protein classification predicting sequence
LCYRS

SEQ ID NO: 60503 - protein, 6 aa, Artificial sequence
  Protein classification predicting sequence
GHLIVD

SEQ ID NO: 60504 - protein, 6 aa, Artificial sequence
  Protein classification predicting sequence
YDALLL

SEQ ID NO: 60505 - protein, 6 aa, Artificial sequence
  Protein classification predicting sequence
ERLGQD

SEQ ID NO: 60506 - protein, 7 aa, Artificial sequence
  Protein classification predicting sequence
VLREAYD

SEQ ID NO: 60507 - protein, 5 aa, Artificial sequence
  Protein classification predicting sequence
GFVNH

SEQ ID NO: 60508 - protein, 6 aa, Artificial sequence
  Protein classification predicting sequence
VAVDTG

SEQ ID NO: 60509 - protein, 6 aa, Artificial sequence
  Protein classification predicting sequence
GFVNHA

SEQ ID NO: 60510 - protein, 6 aa, Artificial sequence
  Protein classification predicting sequence
PNLKGF

SEQ ID NO: 60511 - protein, 6 aa, Artificial sequence
  Protein classification predicting sequence
TIGQAL

SEQ ID NO: 60512 - protein, 6 aa, Artificial sequence
  Protein classification predicting sequence
TGFGKF

SEQ ID NO: 60513 - protein, 6 aa, Artificial sequence
  Protein classification predicting sequence
RGIIDA

SEQ ID NO: 60514 - protein, 6 aa, Artificial sequence
  Protein classification predicting sequence
EQGEVI

SEQ ID NO: 60515 - protein, 6 aa, Artificial sequence
  Protein classification predicting sequence
EMLISA

SEQ ID NO: 60516 - protein, 6 aa, Artificial sequence
  Protein classification predicting sequence
TGAPAR

SEQ ID NO: 60517 - protein, 6 aa, Artificial sequence
  Protein classification predicting sequence
TTLLAQ

SEQ ID NO: 60518 - protein, 5 aa, Artificial sequence
  Protein classification predicting sequence
VQDPY

SEQ ID NO: 60519 - protein, 6 aa, Artificial sequence
  Protein classification predicting sequence
TTATKA

SEQ ID NO: 60520 - protein, 6 aa, Artificial sequence
  Protein classification predicting sequence
LSKVAP

SEQ ID NO: 60521 - protein, 6 aa, Artificial sequence
  Protein classification predicting sequence
LVQEGD

SEQ ID NO: 60522 - protein, 6 aa, Artificial sequence
  Protein classification predicting sequence
LLSKWE

SEQ ID NO: 60523 - protein, 6 aa, Artificial sequence
  Protein classification predicting sequence
AGKLHT

SEQ ID NO: 60524 - protein, 7 aa, Artificial sequence
  Protein classification predicting sequence
DLISVFE

SEQ ID NO: 60525 - protein, 6 aa, Artificial sequence
  Protein classification predicting sequence
IAYECD

SEQ ID NO: 60526 - protein, 6 aa, Artificial sequence
  Protein classification predicting sequence
EVELSD

SEQ ID NO: 60527 - protein, 6 aa, Artificial sequence
  Protein classification predicting sequence
GDDSVL

SEQ ID NO: 60528 - protein, 7 aa, Artificial sequence
  Protein classification predicting sequence
GVKLTLD

SEQ ID NO: 60529 - protein, 6 aa, Artificial sequence
  Protein classification predicting sequence
GSTVVL

SEQ ID NO: 60530 - protein, 6 aa, Artificial sequence
  Protein classification predicting sequence
EIQAVE

SEQ ID NO: 60531 - protein, 6 aa, Artificial sequence
  Protein classification predicting sequence
PLEYLP

SEQ ID NO: 60532 - protein, 6 aa, Artificial sequence
  Protein classification predicting sequence
ALLIKE

SEQ ID NO: 60533 - protein, 6 aa, Artificial sequence
  Protein classification predicting sequence
YDVSYD

SEQ ID NO: 60534 - protein, 6 aa, Artificial sequence
  Protein classification predicting sequence
LGEGEV

SEQ ID NO: 60535 - protein, 5 aa, Artificial sequence
  Protein classification predicting sequence
DHNVP

SEQ ID NO: 60536 - protein, 6 aa, Artificial sequence
  Protein classification predicting sequence
ITNPEG

SEQ ID NO: 60537 - protein, 5 aa, Artificial sequence
  Protein classification predicting sequence
KLGPY

SEQ ID NO: 60538 - protein, 6 aa, Artificial sequence
  Protein classification predicting sequence
VIEKMS

SEQ ID NO: 60539 - protein, 6 aa, Artificial sequence
  Protein classification predicting sequence
ESALKY

SEQ ID NO: 60540 - protein, 7 aa, Artificial sequence
  Protein classification predicting sequence
AVITNST

SEQ ID NO: 60541 - protein, 6 aa, Artificial sequence
  Protein classification predicting sequence
KPLVNN

SEQ ID NO: 60542 - protein, 6 aa, Artificial sequence
  Protein classification predicting sequence
ETGEIK

SEQ ID NO: 60543 - protein, 5 aa, Artificial sequence
  Protein classification predicting sequence
HRFHF

SEQ ID NO: 60544 - protein, 6 aa, Artificial sequence
  Protein classification predicting sequence
KNNTIL

SEQ ID NO: 60545 - protein, 5 aa, Artificial sequence
  Protein classification predicting sequence
WKAAM

SEQ ID NO: 60546 - protein, 6 aa, Artificial sequence
  Protein classification predicting sequence
ATEVPA

SEQ ID NO: 60547 - protein, 6 aa, Artificial sequence
  Protein classification predicting sequence
SLINHD

SEQ ID NO: 60548 - protein, 6 aa, Artificial sequence
  Protein classification predicting sequence
PQGVSG

SEQ ID NO: 60549 - protein, 7 aa, Artificial sequence
  Protein classification predicting sequence
IAPKLIG

SEQ ID NO: 60550 - protein, 6 aa, Artificial sequence
  Protein classification predicting sequence
PITLTV

SEQ ID NO: 60551 - protein, 7 aa, Artificial sequence
  Protein classification predicting sequence
LPALKAL

SEQ ID NO: 60552 - protein, 6 aa, Artificial sequence
  Protein classification predicting sequence
IGVEPA

SEQ ID NO: 60553 - protein, 6 aa, Artificial sequence
  Protein classification predicting sequence
RLDVRQ

SEQ ID NO: 60554 - protein, 6 aa, Artificial sequence
  Protein classification predicting sequence
AFGIGT

SEQ ID NO: 60555 - protein, 6 aa, Artificial sequence
  Protein classification predicting sequence
GMAEVI

SEQ ID NO: 60556 - protein, 6 aa, Artificial sequence
  Protein classification predicting sequence
YLSPSH

SEQ ID NO: 60557 - protein, 5 aa, Artificial sequence
  Protein classification predicting sequence
PSGMM

SEQ ID NO: 60558 - protein, 6 aa, Artificial sequence
  Protein classification predicting sequence
SATLKD

SEQ ID NO: 60559 - protein, 6 aa, Artificial sequence
  Protein classification predicting sequence
GVKASS

SEQ ID NO: 60560 - protein, 6 aa, Artificial sequence
  Protein classification predicting sequence
VNEVVS

SEQ ID NO: 60561 - protein, 6 aa, Artificial sequence
  Protein classification predicting sequence
VCFDAN

SEQ ID NO: 60562 - protein, 5 aa, Artificial sequence
  Protein classification predicting sequence
IIMSY

SEQ ID NO: 60563 - protein, 6 aa, Artificial sequence
  Protein classification predicting sequence
LTTDEK

SEQ ID NO: 60564 - protein, 6 aa, Artificial sequence
  Protein classification predicting sequence
ASRNPS

SEQ ID NO: 60565 - protein, 6 aa, Artificial sequence
  Protein classification predicting sequence
YRQYVL

SEQ ID NO: 60566 - protein, 7 aa, Artificial sequence
  Protein classification predicting sequence
AAAAAIA

SEQ ID NO: 60567 - protein, 6 aa, Artificial sequence
  Protein classification predicting sequence
RQLLDH

SEQ ID NO: 60568 - protein, 6 aa, Artificial sequence
  Protein classification predicting sequence
DNLALA

SEQ ID NO: 60569 - protein, 6 aa, Artificial sequence
  Protein classification predicting sequence
SLSERR

SEQ ID NO: 60570 - protein, 7 aa, Artificial sequence
  Protein classification predicting sequence
AGDATSR

SEQ ID NO: 60571 - protein, 6 aa, Artificial sequence
  Protein classification predicting sequence
RYQQAG

SEQ ID NO: 60572 - protein, 5 aa, Artificial sequence
  Protein classification predicting sequence
EDLNH

SEQ ID NO: 60573 - protein, 6 aa, Artificial sequence
  Protein classification predicting sequence
VTSPQA

SEQ ID NO: 60574 - protein, 5 aa, Artificial sequence
  Protein classification predicting sequence
MWWAG

SEQ ID NO: 60575 - protein, 5 aa, Artificial sequence
  Protein classification predicting sequence
LWMSP

SEQ ID NO: 60576 - protein, 6 aa, Artificial sequence
  Protein classification predicting sequence
GTIVPL

SEQ ID NO: 60577 - protein, 6 aa, Artificial sequence
  Protein classification predicting sequence
QNREIF

SEQ ID NO: 60578 - protein, 6 aa, Artificial sequence
  Protein classification predicting sequence
EHFPNV

SEQ ID NO: 60579 - protein, 7 aa, Artificial sequence
  Protein classification predicting sequence
IYTPVGF

SEQ ID NO: 60580 - protein, 7 aa, Artificial sequence
  Protein classification predicting sequence
KVETVGD

SEQ ID NO: 60581 - protein, 6 aa, Artificial sequence
  Protein classification predicting sequence
GRTLLM

SEQ ID NO: 60582 - protein, 6 aa, Artificial sequence
  Protein classification predicting sequence
EKLSRE

SEQ ID NO: 60583 - protein, 6 aa, Artificial sequence
  Protein classification predicting sequence
GTLTET

SEQ ID NO: 60584 - protein, 6 aa, Artificial sequence
  Protein classification predicting sequence
FIDEFN

SEQ ID NO: 60585 - protein, 6 aa, Artificial sequence
  Protein classification predicting sequence
SQLGPI

SEQ ID NO: 60586 - protein, 6 aa, Artificial sequence
  Protein classification predicting sequence
GFAADC

SEQ ID NO: 60587 - protein, 6 aa, Artificial sequence
  Protein classification predicting sequence
LIADVP

SEQ ID NO: 60588 - protein, 6 aa, Artificial sequence
  Protein classification predicting sequence
FLLENN

SEQ ID NO: 60589 - protein, 7 aa, Artificial sequence
  Protein classification predicting sequence
QAKAGIE

SEQ ID NO: 60590 - protein, 6 aa, Artificial sequence
  Protein classification predicting sequence
LNALLN

SEQ ID NO: 60591 - protein, 6 aa, Artificial sequence
  Protein classification predicting sequence
LKEFCD

SEQ ID NO: 60592 - protein, 6 aa, Artificial sequence
  Protein classification predicting sequence
NAVLHL

SEQ ID NO: 60593 - protein, 6 aa, Artificial sequence
  Protein classification predicting sequence
LVQSGK

SEQ ID NO: 60594 - protein, 7 aa, Artificial sequence
  Protein classification predicting sequence
DFSDETI

SEQ ID NO: 60595 - protein, 5 aa, Artificial sequence
  Protein classification predicting sequence
QSNMN

SEQ ID NO: 60596 - protein, 6 aa, Artificial sequence
  Protein classification predicting sequence
SIGGVV

SEQ ID NO: 60597 - protein, 7 aa, Artificial sequence
  Protein classification predicting sequence
ETVAYAH

SEQ ID NO: 60598 - protein, 6 aa, Artificial sequence
  Protein classification predicting sequence
YGERAK

SEQ ID NO: 60599 - protein, 7 aa, Artificial sequence
  Protein classification predicting sequence
TALRTAA

SEQ ID NO: 60600 - protein, 6 aa, Artificial sequence
  Protein classification predicting sequence
KHQYKN

SEQ ID NO: 60601 - protein, 6 aa, Artificial sequence
  Protein classification predicting sequence
GTPGQY

SEQ ID NO: 60602 - protein, 6 aa, Artificial sequence
  Protein classification predicting sequence
VHPIEP

SEQ ID NO: 60603 - protein, 6 aa, Artificial sequence
  Protein classification predicting sequence
PPSYVK

SEQ ID NO: 60604 - protein, 6 aa, Artificial sequence
  Protein classification predicting sequence
KLLPHI

SEQ ID NO: 60605 - protein, 6 aa, Artificial sequence
  Protein classification predicting sequence
KYDIRF

SEQ ID NO: 60606 - protein, 7 aa, Artificial sequence
  Protein classification predicting sequence
GAMKIVN

SEQ ID NO: 60607 - protein, 6 aa, Artificial sequence
  Protein classification predicting sequence
GPMEAG

SEQ ID NO: 60608 - protein, 6 aa, Artificial sequence
  Protein classification predicting sequence
INDFLL

SEQ ID NO: 60609 - protein, 6 aa, Artificial sequence
  Protein classification predicting sequence
TAAGPH

SEQ ID NO: 60610 - protein, 6 aa, Artificial sequence
  Protein classification predicting sequence
EVVSYV

SEQ ID NO: 60611 - protein, 6 aa, Artificial sequence
  Protein classification predicting sequence
VQLAHS

SEQ ID NO: 60612 - protein, 6 aa, Artificial sequence
  Protein classification predicting sequence
GSTNAV

SEQ ID NO: 60613 - protein, 6 aa, Artificial sequence
  Protein classification predicting sequence
AHQTQL

SEQ ID NO: 60614 - protein, 5 aa, Artificial sequence
  Protein classification predicting sequence
TLFHG

SEQ ID NO: 60615 - protein, 5 aa, Artificial sequence
  Protein classification predicting sequence
GAFHQ

SEQ ID NO: 60616 - protein, 6 aa, Artificial sequence
  Protein classification predicting sequence
AIKDVF

SEQ ID NO: 60617 - protein, 6 aa, Artificial sequence
  Protein classification predicting sequence
TQEQRD

SEQ ID NO: 60618 - protein, 7 aa, Artificial sequence
  Protein classification predicting sequence
QALEEEK

SEQ ID NO: 60619 - protein, 6 aa, Artificial sequence
  Protein classification predicting sequence
FLQRTN

SEQ ID NO: 60620 - protein, 7 aa, Artificial sequence
  Protein classification predicting sequence
AETVINA

SEQ ID NO: 60621 - protein, 6 aa, Artificial sequence
  Protein classification predicting sequence
TREERI

SEQ ID NO: 60622 - protein, 6 aa, Artificial sequence
  Protein classification predicting sequence
KELAEH

SEQ ID NO: 60623 - protein, 6 aa, Artificial sequence
  Protein classification predicting sequence
KEAQKP

SEQ ID NO: 60624 - protein, 6 aa, Artificial sequence
  Protein classification predicting sequence
MVAEFR

SEQ ID NO: 60625 - protein, 7 aa, Artificial sequence
  Protein classification predicting sequence
RELKEGA

SEQ ID NO: 60626 - protein, 7 aa, Artificial sequence
  Protein classification predicting sequence
QLSPQDY

SEQ ID NO: 60627 - protein, 6 aa, Artificial sequence
  Protein classification predicting sequence
GILAAD

SEQ ID NO: 60628 - protein, 6 aa, Artificial sequence
  Protein classification predicting sequence
AFVDKI

SEQ ID NO: 60629 - protein, 5 aa, Artificial sequence
  Protein classification predicting sequence
VRHCG

SEQ ID NO: 60630 - protein, 7 aa, Artificial sequence
  Protein classification predicting sequence
LEAKQKG

SEQ ID NO: 60631 - protein, 6 aa, Artificial sequence
  Protein classification predicting sequence
DPKKLE

SEQ ID NO: 60632 - protein, 6 aa, Artificial sequence
  Protein classification predicting sequence
NDDIEI

SEQ ID NO: 60633 - protein, 6 aa, Artificial sequence
  Protein classification predicting sequence
NITAGT

SEQ ID NO: 60634 - protein, 6 aa, Artificial sequence
  Protein classification predicting sequence
MPALTE

SEQ ID NO: 60635 - protein, 8 aa, Artificial sequence
  Protein classification predicting sequence
IYLKREDL

SEQ ID NO: 60636 - protein, 9 aa, Artificial sequence
  Protein classification predicting sequence
KLLARLEGI

SEQ ID NO: 60637 - protein, 5 aa, Artificial sequence
  Protein classification predicting sequence
GHADY

SEQ ID NO: 60638 - protein, 6 aa, Artificial sequence
  Protein classification predicting sequence
NHRDLR

SEQ ID NO: 60639 - protein, 5 aa, Artificial sequence
  Protein classification predicting sequence
YRGGG

SEQ ID NO: 60640 - protein, 8 aa, Artificial sequence
  Protein classification predicting sequence
AVKLPVVL

SEQ ID NO: 60641 - protein, 6 aa, Artificial sequence
  Protein classification predicting sequence
GIEPIE

SEQ ID NO: 60642 - protein, 7 aa, Artificial sequence
  Protein classification predicting sequence
ELLENEK

SEQ ID NO: 60643 - protein, 6 aa, Artificial sequence
  Protein classification predicting sequence
ELGIPF

SEQ ID NO: 60644 - protein, 6 aa, Artificial sequence
  Protein classification predicting sequence
GLIDLD

SEQ ID NO: 60645 - protein, 6 aa, Artificial sequence
  Protein classification predicting sequence
EADETR

SEQ ID NO: 60646 - protein, 6 aa, Artificial sequence
  Protein classification predicting sequence
GIFHAF

SEQ ID NO: 60647 - protein, 5 aa, Artificial sequence
  Protein classification predicting sequence
DHYID

SEQ ID NO: 60648 - protein, 6 aa, Artificial sequence
  Protein classification predicting sequence
VDILKL

SEQ ID NO: 60649 - protein, 6 aa, Artificial sequence
  Protein classification predicting sequence
GMNRLG

SEQ ID NO: 60650 - protein, 8 aa, Artificial sequence
  Protein classification predicting sequence
GTKVTLIG

SEQ ID NO: 60651 - protein, 8 aa, Artificial sequence
  Protein classification predicting sequence
RPGIILYG

SEQ ID NO: 60652 - protein, 21 aa, Artificial sequence
  Protein classification predicting sequence
INRRALRHNLQRLRELAPASK

SEQ ID NO: 60653 - protein, 13 aa, Artificial sequence
  Protein classification predicting sequence
VAVVKANAYGHGL

SEQ ID NO: 60654 - protein, 29 aa, Artificial sequence
  Protein classification predicting sequence
ETARTLPDADAFGVARLEEALRLRAGGIT

SEQ ID NO: 60655 - protein, 7 aa, Artificial sequence
  Protein classification predicting sequence
DLPTISA

SEQ ID NO: 60656 - protein, 31 aa, Artificial sequence
  Protein classification predicting sequence
IFNTFCEGKPGQRSIAASGGILLWPQSHFDW

SEQ ID NO: 60657 - protein, 13 aa, Artificial sequence
  Protein classification predicting sequence
VWLKLDSGMHRLG

SEQ ID NO: 60658 - protein, 6 aa, Artificial sequence
  Protein classification predicting sequence
GMHRLG

SEQ ID NO: 60659 - protein, 6 aa, Artificial sequence
  Protein classification predicting sequence
HTAVHN

SEQ ID NO: 60660 - protein, 7 aa, Artificial sequence
  Protein classification predicting sequence
EQLAALE

SEQ ID NO: 60661 - protein, 20 aa, Artificial sequence
  Protein classification predicting sequence
CKNVRQPVNIVSHFARADEP

SEQ ID NO: 60662 - protein, 24 aa, Artificial sequence
  Protein classification predicting sequence
GKPGQRSIAASGGILLWPQSHFDW

SEQ ID NO: 60663 - protein, 13 aa, Artificial sequence
  Protein classification predicting sequence
RPGIILYGVSPLE

SEQ ID NO: 60664 - protein, 14 aa, Artificial sequence
  Protein classification predicting sequence
QPVMSLTSSLIAVR

SEQ ID NO: 60665 - protein, 66 aa, Artificial sequence
  Protein classification predicting sequence
HKAGEPVGYGGTWVSERDTRLGVVAMGYGDGYPRAAPSGTPVLVNGREVPIVGRVAMDMICVDLGP

SEQ ID NO: 60666 - protein, 34 aa, Artificial sequence
  Protein classification predicting sequence
LWGEGLPVERIAEMTKVSAYELITRLTSRVAMKY

SEQ ID NO: 60667 - protein, 12 aa, Artificial sequence
  Protein classification predicting sequence
GRVSMDMLTVDL

SEQ ID NO: 60668 - protein, 8 aa, Artificial sequence
  Protein classification predicting sequence
YELVTKLT

SEQ ID NO: 60669 - protein, 38 aa, Artificial sequence
  Protein classification predicting sequence
TYQEVIEIIQQYEQLVFEGVFTHFACADEPGDMTTEQY

SEQ ID NO: 60670 - protein, 160 aa, Artificial sequence
  Protein classification predicting sequence
RFKDMVNEAIKPEYIHCQNSAGSLLMDCQFCNAIRPGISLYGYYPSEYVQQKVKVHLKPSVQLIANVVQTKTLQAGESVSYGATYTATDPTTIALLPIGYADGYLRIMQGSFVNVNGHQCEVIGRVCMDQTIVKVPDQVKAGDSVILIDNHRESPQSVEV

SEQ ID NO: 60671 - protein, 7 aa, Artificial sequence
  Protein classification predicting sequence
GRVCMDQ

SEQ ID NO: 60672 - protein, 6 aa, Artificial sequence
  Protein classification predicting sequence
RVPRVY

SEQ ID NO: 60673 - protein, 8 aa, Artificial sequence
  Protein classification predicting sequence
PILLLEGF

SEQ ID NO: 60674 - protein, 7 aa, Artificial sequence
  Protein classification predicting sequence
VGYGGTW

SEQ ID NO: 60675 - protein, 6 aa, Artificial sequence
  Protein classification predicting sequence
LYGVSP

SEQ ID NO: 60676 - protein, 8 aa, Artificial sequence
  Protein classification predicting sequence
GYGDGYPR

SEQ ID NO: 60677 - protein, 8 aa, Artificial sequence
  Protein classification predicting sequence
IVGRVSMD

SEQ ID NO: 60678 - protein, 7 aa, Artificial sequence
  Protein classification predicting sequence
SAYELIT

SEQ ID NO: 60679 - protein, 7 aa, Artificial sequence
  Protein classification predicting sequence
LTSRVAM

SEQ ID NO: 60680 - protein, 6 aa, Artificial sequence
  Protein classification predicting sequence
GRVSMD

SEQ ID NO: 60681 - protein, 6 aa, Artificial sequence
  Protein classification predicting sequence
GIFTHF

SEQ ID NO: 60682 - protein, 12 aa, Artificial sequence
  Protein classification predicting sequence
DGFALLNLEEAI

SEQ ID NO: 60683 - protein, 8 aa, Artificial sequence
  Protein classification predicting sequence
TVWQQLRA

SEQ ID NO: 60684 - protein, 9 aa, Artificial sequence
  Protein classification predicting sequence
RIEQAAEGL

SEQ ID NO: 60685 - protein, 9 aa, Artificial sequence
  Protein classification predicting sequence
HFDWVRPGI

SEQ ID NO: 60686 - protein, 10 aa, Artificial sequence
  Protein classification predicting sequence
LYGASPSGQW

SEQ ID NO: 60687 - protein, 7 aa, Artificial sequence
  Protein classification predicting sequence
SEIIGVQ

SEQ ID NO: 60688 - protein, 8 aa, Artificial sequence
  Protein classification predicting sequence
GYADGYPR

SEQ ID NO: 60689 - protein, 19 aa, Artificial sequence
  Protein classification predicting sequence
VSMDMLAVDLTPCPQAGIG

SEQ ID NO: 60690 - protein, 12 aa, Artificial sequence
  Protein classification predicting sequence
GTVGYELMCALA

SEQ ID NO: 60691 - protein, 7 aa, Artificial sequence
  Protein classification predicting sequence
PIGYADG

SEQ ID NO: 60692 - protein, 13 aa, Artificial sequence
  Protein classification predicting sequence
KADAYGHGAVRCA

SEQ ID NO: 60693 - protein, 7 aa, Artificial sequence
  Protein classification predicting sequence
GVVAMGY

SEQ ID NO: 60694 - protein, 18 aa, Artificial sequence
  Protein classification predicting sequence
GRVSMDMLTVDLTDHPQA

SEQ ID NO: 60695 - protein, 18 aa, Artificial sequence
  Protein classification predicting sequence
ARVWSVVKANAYGHGIER

SEQ ID NO: 60696 - protein, 14 aa, Artificial sequence
  Protein classification predicting sequence
HSNWQLKALQNARL

SEQ ID NO: 60697 - protein, 12 aa, Artificial sequence
  Protein classification predicting sequence
NVGEMTLMSHFA

SEQ ID NO: 60698 - protein, 15 aa, Artificial sequence
  Protein classification predicting sequence
PVMTLSSEIIGVQTL

SEQ ID NO: 60699 - protein, 9 aa, Artificial sequence
  Protein classification predicting sequence
AGERVGYGG

SEQ ID NO: 60700 - protein, 31 aa, Artificial sequence
  Protein classification predicting sequence
LNLEEAITLRERGWKGPILMLEGFFHAQDLE

SEQ ID NO: 60701 - protein, 22 aa, Artificial sequence
  Protein classification predicting sequence
DWVRPGIILYGASPSGQWRDIA

SEQ ID NO: 60702 - protein, 29 aa, Artificial sequence
  Protein classification predicting sequence
EQRIGIVAAGYADGYPRHAPTGTPVLVDG

SEQ ID NO: 60703 - protein, 34 aa, Artificial sequence
  Protein classification predicting sequence
TVGTVSMDMLAVDLTPCPQAGIGTPVELWGKEIK

SEQ ID NO: 60704 - protein, 6 aa, Artificial sequence
  Protein classification predicting sequence
DTGMGR

SEQ ID NO: 60705 - protein, 6 aa, Artificial sequence
  Protein classification predicting sequence
KANGYG

SEQ ID NO: 60706 - protein, 6 aa, Artificial sequence
  Protein classification predicting sequence
CNLSRR

SEQ ID NO: 60707 - protein, 7 aa, Artificial sequence
  Protein classification predicting sequence
MYGLTPS

SEQ ID NO: 60708 - protein, 7 aa, Artificial sequence
  Protein classification predicting sequence
THFATAD

SEQ ID NO: 60709 - protein, 8 aa, Artificial sequence
  Protein classification predicting sequence
TINYEVTC

SEQ ID NO: 60710 - protein, 6 aa, Artificial sequence
  Protein classification predicting sequence
DTGMHR

SEQ ID NO: 60711 - protein, 7 aa, Artificial sequence
  Protein classification predicting sequence
VKADAYG

SEQ ID NO: 60712 - protein, 9 aa, Artificial sequence
  Protein classification predicting sequence
IVAAGYADG

SEQ ID NO: 60713 - protein, 7 aa, Artificial sequence
  Protein classification predicting sequence
ADAFGVA

SEQ ID NO: 60714 - protein, 6 aa, Artificial sequence
  Protein classification predicting sequence
LRPVMT

SEQ ID NO: 60715 - protein, 7 aa, Artificial sequence
  Protein classification predicting sequence
GRICMDQ

SEQ ID NO: 60716 - protein, 6 aa, Artificial sequence
  Protein classification predicting sequence
TWIEID

SEQ ID NO: 60717 - protein, 6 aa, Artificial sequence
  Protein classification predicting sequence
RSIAAS

SEQ ID NO: 60718 - protein, 9 aa, Artificial sequence
  Protein classification predicting sequence
EWVRPGIIM

SEQ ID NO: 60719 - protein, 7 aa, Artificial sequence
  Protein classification predicting sequence
VPIVGRV

SEQ ID NO: 60720 - protein, 10 aa, Artificial sequence
  Protein classification predicting sequence
FGVARLEEAL

SEQ ID NO: 60721 - protein, 5 aa, Artificial sequence
  Protein classification predicting sequence
VCMDQ

SEQ ID NO: 60722 - protein, 8 aa, Artificial sequence
  Protein classification predicting sequence
CVSNLDEA

SEQ ID NO: 60723 - protein, 8 aa, Artificial sequence
  Protein classification predicting sequence
TVGYGATY

SEQ ID NO: 60724 - protein, 8 aa, Artificial sequence
  Protein classification predicting sequence
TINYEVLC

SEQ ID NO: 60725 - protein, 7 aa, Artificial sequence
  Protein classification predicting sequence
YGLNPSG

SEQ ID NO: 60726 - protein, 11 aa, Artificial sequence
  Protein classification predicting sequence
GFCVAILDEAL

SEQ ID NO: 60727 - protein, 14 aa, Artificial sequence
  Protein classification predicting sequence
VRPGIAVYGLSPVP

SEQ ID NO: 60728 - protein, 8 aa, Artificial sequence
  Protein classification predicting sequence
FRSLGGRL

SEQ ID NO: 60729 - protein, 14 aa, Artificial sequence
  Protein classification predicting sequence
DVAEGDEAILFGPG

SEQ ID NO: 60730 - protein, 9 aa, Artificial sequence
  Protein classification predicting sequence
DTGLNRNGV

SEQ ID NO: 60731 - protein, 11 aa, Artificial sequence
  Protein classification predicting sequence
RGRITRTYREA

SEQ ID NO: 60732 - protein, 14 aa, Artificial sequence
  Protein classification predicting sequence
GRTATVTVKVDTGL

SEQ ID NO: 60733 - protein, 7 aa, Artificial sequence
  Protein classification predicting sequence
AILFGPG

SEQ ID NO: 60734 - protein, 8 aa, Artificial sequence
  Protein classification predicting sequence
NNIQTVVH

SEQ ID NO: 60735 - protein, 7 aa, Artificial sequence
  Protein classification predicting sequence
LTSSLIA

SEQ ID NO: 60736 - protein, 8 aa, Artificial sequence
  Protein classification predicting sequence
KANAYGHG

SEQ ID NO: 60737 - protein, 6 aa, Artificial sequence
  Protein classification predicting sequence
DWVRPG

SEQ ID NO: 60738 - protein, 10 aa, Artificial sequence
  Protein classification predicting sequence
TPVLVDGVRT

SEQ ID NO: 60739 - protein, 20 aa, Artificial sequence
  Protein classification predicting sequence
GATFFAVATLDEAIELRMHG

SEQ ID NO: 60740 - protein, 14 aa, Artificial sequence
  Protein classification predicting sequence
KAIQHRVALTVPSK

SEQ ID NO: 60741 - protein, 14 aa, Artificial sequence
  Protein classification predicting sequence
YIHCQNSAGSLLMD

SEQ ID NO: 60742 - protein, 7 aa, Artificial sequence
  Protein classification predicting sequence
QFCNAIR

SEQ ID NO: 60743 - protein, 13 aa, Artificial sequence
  Protein classification predicting sequence
GISLYGYYPSEYV

SEQ ID NO: 60744 - protein, 8 aa, Artificial sequence
  Protein classification predicting sequence
LPIGYADG

SEQ ID NO: 60745 - protein, 6 aa, Artificial sequence
  Protein classification predicting sequence
FVNVNG

SEQ ID NO: 60746 - protein, 18 aa, Artificial sequence
  Protein classification predicting sequence
TINYEVLCNLSRRLPRIY

SEQ ID NO: 60747 - protein, 9 aa, Artificial sequence
  Protein classification predicting sequence
MDQFVVDLG

SEQ ID NO: 60748 - protein, 7 aa, Artificial sequence
  Protein classification predicting sequence
YGATYTA

SEQ ID NO: 60749 - protein, 9 aa, Artificial sequence
  Protein classification predicting sequence
LVHASNSAT

SEQ ID NO: 60750 - protein, 7 aa, Artificial sequence
  Protein classification predicting sequence
TIFNAVR

SEQ ID NO: 60751 - protein, 6 aa, Artificial sequence
  Protein classification predicting sequence
KLDTGM

SEQ ID NO: 60752 - protein, 5 aa, Artificial sequence
  Protein classification predicting sequence
ICMDQ

SEQ ID NO: 60753 - protein, 6 aa, Artificial sequence
  Protein classification predicting sequence
TLMSHF

SEQ ID NO: 60754 - protein, 7 aa, Artificial sequence
  Protein classification predicting sequence
GYADGYP

SEQ ID NO: 60755 - protein, 7 aa, Artificial sequence
  Protein classification predicting sequence
GSDTAHL

SEQ ID NO: 60756 - protein, 7 aa, Artificial sequence
  Protein classification predicting sequence
GRGPFEA

SEQ ID NO: 60757 - protein, 7 aa, Artificial sequence
  Protein classification predicting sequence
DRRAGRI

SEQ ID NO: 60758 - protein, 7 aa, Artificial sequence
  Protein classification predicting sequence
HTGDPVP

SEQ ID NO: 60759 - protein, 7 aa, Artificial sequence
  Protein classification predicting sequence
SIFGYDP

SEQ ID NO: 60760 - protein, 5 aa, Artificial sequence
  Protein classification predicting sequence
AFRCN

SEQ ID NO: 60761 - protein, 7 aa, Artificial sequence
  Protein classification predicting sequence
HSGDPVP

SEQ ID NO: 60762 - protein, 14 aa, Artificial sequence
  Protein classification predicting sequence
VIAITGDHSTPCEV

SEQ ID NO: 60763 - protein, 6 aa, Artificial sequence
  Protein classification predicting sequence
DRRAGR

SEQ ID NO: 60764 - protein, 13 aa, Artificial sequence
  Protein classification predicting sequence
ANYLLIRGAGTYP

SEQ ID NO: 60765 - protein, 13 aa, Artificial sequence
  Protein classification predicting sequence
IPMKFTEQWKVKA

SEQ ID NO: 60766 - protein, 6 aa, Artificial sequence
  Protein classification predicting sequence
GSDTSH

SEQ ID NO: 60767 - protein, 15 aa, Artificial sequence
  Protein classification predicting sequence
GYGFAGEGDWKTAAL

SEQ ID NO: 60768 - protein, 6 aa, Artificial sequence
  Protein classification predicting sequence
PARLIF

SEQ ID NO: 60769 - protein, 7 aa, Artificial sequence
  Protein classification predicting sequence
GSQHLYG

SEQ ID NO: 60770 - protein, 14 aa, Artificial sequence
  Protein classification predicting sequence
ITWMHTFSPAKMWI

SEQ ID NO: 60771 - protein, 10 aa, Artificial sequence
  Protein classification predicting sequence
HTFSPAKMWI

SEQ ID NO: 60772 - protein, 7 aa, Artificial sequence
  Protein classification predicting sequence
RFGDNMR

SEQ ID NO: 60773 - protein, 9 aa, Artificial sequence
  Protein classification predicting sequence
VAVTEGDKV

SEQ ID NO: 60774 - protein, 12 aa, Artificial sequence
  Protein classification predicting sequence
GEGDWKTAALLR

SEQ ID NO: 60775 - protein, 6 aa, Artificial sequence
  Protein classification predicting sequence
PKLPVA

SEQ ID NO: 60776 - protein, 10 aa, Artificial sequence
  Protein classification predicting sequence
AGGAHHTVFS

SEQ ID NO: 60777 - protein, 8 aa, Artificial sequence
  Protein classification predicting sequence
ARFGDNMR

SEQ ID NO: 60778 - protein, 14 aa, Artificial sequence
  Protein classification predicting sequence
PWDSIDMDFMNLNQ

SEQ ID NO: 60779 - protein, 10 aa, Artificial sequence
  Protein classification predicting sequence
IDMDFMNLNQ

SEQ ID NO: 60780 - protein, 7 aa, Artificial sequence
  Protein classification predicting sequence
GFIGARM

SEQ ID NO: 60781 - protein, 15 aa, Artificial sequence
  Protein classification predicting sequence
GYGFGGEGDWKTAAL

SEQ ID NO: 60782 - protein, 12 aa, Artificial sequence
  Protein classification predicting sequence
EAWILAGGAHHT

SEQ ID NO: 60783 - protein, 12 aa, Artificial sequence
  Protein classification predicting sequence
RFGDNMREVAVT

SEQ ID NO: 60784 - protein, 12 aa, Artificial sequence
  Protein classification predicting sequence
KPLLQFHTQFNA

SEQ ID NO: 60785 - protein, 26 aa, Artificial sequence
  Protein classification predicting sequence
DMDFMNLNQTAHGGREFGFIGARMRQ

SEQ ID NO: 60786 - protein, 13 aa, Artificial sequence
  Protein classification predicting sequence
IELGMKRFLEQGG

SEQ ID NO: 60787 - protein, 20 aa, Artificial sequence
  Protein classification predicting sequence
GLKQLPGLAVQRLMQQGYGF

SEQ ID NO: 60788 - protein, 17 aa, Artificial sequence
  Protein classification predicting sequence
GEGDWKTAALLRIMKVM

SEQ ID NO: 60789 - protein, 12 aa, Artificial sequence
  Protein classification predicting sequence
FKDALRWNEVYY

SEQ ID NO: 60790 - protein, 6 aa, Artificial sequence
  Protein classification predicting sequence
AHGDRE

SEQ ID NO: 60791 - protein, 7 aa, Artificial sequence
  Protein classification predicting sequence
RIGSWMR

SEQ ID NO: 60792 - protein, 6 aa, Artificial sequence
  Protein classification predicting sequence
EGDWKT

SEQ ID NO: 60793 - protein, 7 aa, Artificial sequence
  Protein classification predicting sequence
HMLEVCP

SEQ ID NO: 60794 - protein, 8 aa, Artificial sequence
  Protein classification predicting sequence
VAVTDGDK

SEQ ID NO: 60795 - protein, 12 aa, Artificial sequence
  Protein classification predicting sequence
WMRQAVSKQDTR

SEQ ID NO: 60796 - protein, 8 aa, Artificial sequence
  Protein classification predicting sequence
TPATQIHG

SEQ ID NO: 60797 - protein, 82 aa, Artificial sequence
  Protein classification predicting sequence
EAARIELGMKRFLEQGGFHAFTTTFEDLHGLKQLPGLAVQRLMQQGYGFAGEGDWKTAALLRIMKVMSTGLQGGTSFMEDYT

SEQ ID NO: 60798 - protein, 9 aa, Artificial sequence
  Protein classification predicting sequence
LNDMRQFAE

SEQ ID NO: 60799 - protein, 37 aa, Artificial sequence
  Protein classification predicting sequence
PDEITAICRDANYDDRCAGLVVWLHTFSPAKMWINGL

SEQ ID NO: 60800 - protein, 46 aa, Artificial sequence
  Protein classification predicting sequence
LKVCRFGDNMREVAVTDGDKVAAQIKFGFSVNTWAVGDLVQVVNSI

SEQ ID NO: 60801 - protein, 7 aa, Artificial sequence
  Protein classification predicting sequence
WMHTFSP

SEQ ID NO: 60802 - protein, 10 aa, Artificial sequence
  Protein classification predicting sequence
IGGKADPARL

SEQ ID NO: 60803 - protein, 9 aa, Artificial sequence
  Protein classification predicting sequence
EVWFVIGSQ

SEQ ID NO: 60804 - protein, 8 aa, Artificial sequence
  Protein classification predicting sequence
GDKVAAQI

SEQ ID NO: 60805 - protein, 8 aa, Artificial sequence
  Protein classification predicting sequence
AARIELGM

SEQ ID NO: 60806 - protein, 7 aa, Artificial sequence
  Protein classification predicting sequence
AFTTNFE

SEQ ID NO: 60807 - protein, 7 aa, Artificial sequence
  Protein classification predicting sequence
RWNEVYY

SEQ ID NO: 60808 - protein, 8 aa, Artificial sequence
  Protein classification predicting sequence
GGIVHTHS

SEQ ID NO: 60809 - protein, 8 aa, Artificial sequence
  Protein classification predicting sequence
GTTHADYF

SEQ ID NO: 60810 - protein, 6 aa, Artificial sequence
  Protein classification predicting sequence
TWGNVS

SEQ ID NO: 60811 - protein, 9 aa, Artificial sequence
  Protein classification predicting sequence
KPSSDTPTH

SEQ ID NO: 60812 - protein, 9 aa, Artificial sequence
  Protein classification predicting sequence
LYGGTMLEG

SEQ ID NO: 60813 - protein, 9 aa, Artificial sequence
  Protein classification predicting sequence
GTELFGPLL

SEQ ID NO: 60814 - protein, 7 aa, Artificial sequence
  Protein classification predicting sequence
FTQSPLG

SEQ ID NO: 60815 - protein, 12 aa, Artificial sequence
  Protein classification predicting sequence
LPLTGQQYSEKV

SEQ ID NO: 60816 - protein, 6 aa, Artificial sequence
  Protein classification predicting sequence
KSVGTY

SEQ ID NO: 60817 - protein, 7 aa, Artificial sequence
  Protein classification predicting sequence
SFSKDGS

SEQ ID NO: 60818 - protein, 9 aa, Artificial sequence
  Protein classification predicting sequence
EAVLESIIG

SEQ ID NO: 60819 - protein, 12 aa, Artificial sequence
  Protein classification predicting sequence
FLGGAGERGLTI

SEQ ID NO: 60820 - protein, 8 aa, Artificial sequence
  Protein classification predicting sequence
AETIKVII

SEQ ID NO: 60821 - protein, 8 aa, Artificial sequence
  Protein classification predicting sequence
ALHDLKAR

SEQ ID NO: 60822 - protein, 7 aa, Artificial sequence
  Protein classification predicting sequence
RRHNRFK

SEQ ID NO: 60823 - protein, 14 aa, Artificial sequence
  Protein classification predicting sequence
NGVAILADESLSSL

SEQ ID NO: 60824 - protein, 13 aa, Artificial sequence
  Protein classification predicting sequence
GTAAALHVYATLP

SEQ ID NO: 60825 - protein, 7 aa, Artificial sequence
  Protein classification predicting sequence
LEIKDFE

SEQ ID NO: 60826 - protein, 10 aa, Artificial sequence
  Protein classification predicting sequence
CENFLALCAS

SEQ ID NO: 60827 - protein, 7 aa, Artificial sequence
  Protein classification predicting sequence
HLDMKYT

SEQ ID NO: 60828 - protein, 6 aa, Artificial sequence
  Protein classification predicting sequence
TAENFR

SEQ ID NO: 60829 - protein, 7 aa, Artificial sequence
  Protein classification predicting sequence
SIYGSKF

SEQ ID NO: 60830 - protein, 10 aa, Artificial sequence
  Protein classification predicting sequence
WLDGKHVVFG

SEQ ID NO: 60831 - protein, 10 aa, Artificial sequence
  Protein classification predicting sequence
YKGSTFHRVI

SEQ ID NO: 60832 - protein, 6 aa, Artificial sequence
  Protein classification predicting sequence
QGGDFT

SEQ ID NO: 60833 - protein, 7 aa, Artificial sequence
  Protein classification predicting sequence
RSRSRDR

SEQ ID NO: 60834 - protein, 7 aa, Artificial sequence
  Protein classification predicting sequence
LSMANAG

SEQ ID NO: 60835 - protein, 6 aa, Artificial sequence
  Protein classification predicting sequence
KHTGPG

SEQ ID NO: 60836 - protein, 7 aa, Artificial sequence
  Protein classification predicting sequence
DVVPKTA

SEQ ID NO: 60837 - protein, 9 aa, Artificial sequence
  Protein classification predicting sequence
NFRALCTGE

SEQ ID NO: 60838 - protein, 8 aa, Artificial sequence
  Protein classification predicting sequence
QGGDFTRG

SEQ ID NO: 60839 - protein, 6 aa, Artificial sequence
  Protein classification predicting sequence
FADENF

SEQ ID NO: 60840 - protein, 6 aa, Artificial sequence
  Protein classification predicting sequence
DENFKL

SEQ ID NO: 60841 - protein, 14 aa, Artificial sequence
  Protein classification predicting sequence
DTNGSQFFITTVKT

SEQ ID NO: 60842 - protein, 9 aa, Artificial sequence
  Protein classification predicting sequence
LDGKHVVFG

SEQ ID NO: 60843 - protein, 6 aa, Artificial sequence
  Protein classification predicting sequence
FEDENF

SEQ ID NO: 60844 - protein, 10 aa, Artificial sequence
  Protein classification predicting sequence
DIVPKTAENF

SEQ ID NO: 60845 - protein, 8 aa, Artificial sequence
  Protein classification predicting sequence
TNGSQFFI

SEQ ID NO: 60846 - protein, 7 aa, Artificial sequence
  Protein classification predicting sequence
GKHVVFG

SEQ ID NO: 60847 - protein, 37 aa, Artificial sequence
  Protein classification predicting sequence
GYKNSKFHRVIKDFMIQGGDFTRGDGTGGKSIYGERF

SEQ ID NO: 60848 - protein, 19 aa, Artificial sequence
  Protein classification predicting sequence
LSMANAGPNTNGSQFFICT

SEQ ID NO: 60849 - protein, 7 aa, Artificial sequence
  Protein classification predicting sequence
GGKSIYG

SEQ ID NO: 60850 - protein, 10 aa, Artificial sequence
  Protein classification predicting sequence
TNGSQFFITT

SEQ ID NO: 60851 - protein, 10 aa, Artificial sequence
  Protein classification predicting sequence
IKDFMIQGGD

SEQ ID NO: 60852 - protein, 7 aa, Artificial sequence
  Protein classification predicting sequence
FMIQGGD

SEQ ID NO: 60853 - protein, 12 aa, Artificial sequence
  Protein classification predicting sequence
IPGFMCQGGDFT

SEQ ID NO: 60854 - protein, 6 aa, Artificial sequence
  Protein classification predicting sequence
PRVFFD

SEQ ID NO: 60855 - protein, 7 aa, Artificial sequence
  Protein classification predicting sequence
GRIVMEL

SEQ ID NO: 60856 - protein, 5 aa, Artificial sequence
  Protein classification predicting sequence
DCGQL

SEQ ID NO: 60857 - protein, 7 aa, Artificial sequence
  Protein classification predicting sequence
GKTSKKI

SEQ ID NO: 60858 - protein, 6 aa, Artificial sequence
  Protein classification predicting sequence
FHRIIP

SEQ ID NO: 60859 - protein, 33 aa, Artificial sequence
  Protein classification predicting sequence
ADVVPKTAENFRALCTGEKGFGYKGSTFHRVIP

SEQ ID NO: 60860 - protein, 6 aa, Artificial sequence
  Protein classification predicting sequence
FHRVIP

SEQ ID NO: 60861 - protein, 10 aa, Artificial sequence
  Protein classification predicting sequence
PKTAENFRAL

SEQ ID NO: 60862 - protein, 16 aa, Artificial sequence
  Protein classification predicting sequence
PKTAENFRALCTGEKG

SEQ ID NO: 60863 - protein, 10 aa, Artificial sequence
  Protein classification predicting sequence
TNGSQFFICT

SEQ ID NO: 60864 - protein, 16 aa, Artificial sequence
  Protein classification predicting sequence
TNGSQFFICTAKTEWL

SEQ ID NO: 60865 - protein, 16 aa, Artificial sequence
  Protein classification predicting sequence
LSMANAGPNTNGSQFF

SEQ ID NO: 60866 - protein, 7 aa, Artificial sequence
  Protein classification predicting sequence
GFGYKGS

SEQ ID NO: 60867 - protein, 8 aa, Artificial sequence
  Protein classification predicting sequence
DENFKLKH

SEQ ID NO: 60868 - protein, 6 aa, Artificial sequence
  Protein classification predicting sequence
FGYKGS

SEQ ID NO: 60869 - protein, 9 aa, Artificial sequence
  Protein classification predicting sequence
FMCQGGDFT

SEQ ID NO: 60870 - protein, 11 aa, Artificial sequence
  Protein classification predicting sequence
TNGSQFFITTV

SEQ ID NO: 60871 - protein, 7 aa, Artificial sequence
  Protein classification predicting sequence
LYDDVVP

SEQ ID NO: 60872 - protein, 6 aa, Artificial sequence
  Protein classification predicting sequence
GPDTNG

SEQ ID NO: 60873 - protein, 6 aa, Artificial sequence
  Protein classification predicting sequence
WLDGKH

SEQ ID NO: 60874 - protein, 7 aa, Artificial sequence
  Protein classification predicting sequence
KFDDENF

SEQ ID NO: 60875 - protein, 6 aa, Artificial sequence
  Protein classification predicting sequence
SMGNPH

SEQ ID NO: 60876 - protein, 6 aa, Artificial sequence
  Protein classification predicting sequence
GTNVNF

SEQ ID NO: 60877 - protein, 7 aa, Artificial sequence
  Protein classification predicting sequence
KMHGLGN

SEQ ID NO: 60878 - protein, 6 aa, Artificial sequence
  Protein classification predicting sequence
VTVDMG

SEQ ID NO: 60879 - protein, 19 aa, Artificial sequence
  Protein classification predicting sequence
RVWERGSGITQACGTGACA

SEQ ID NO: 60880 - protein, 10 aa, Artificial sequence
  Protein classification predicting sequence
TQACGTGACA

SEQ ID NO: 60881 - protein, 9 aa, Artificial sequence
  Protein classification predicting sequence
IELQIGPID

SEQ ID NO: 60882 - protein, 7 aa, Artificial sequence
  Protein classification predicting sequence
FPERANI

SEQ ID NO: 60883 - protein, 5 aa, Artificial sequence
  Protein classification predicting sequence
NDFMV

SEQ ID NO: 60884 - protein, 9 aa, Artificial sequence
  Protein classification predicting sequence
DFHYRIFNA

SEQ ID NO: 60885 - protein, 8 aa, Artificial sequence
  Protein classification predicting sequence
QCGNGARC

SEQ ID NO: 60886 - protein, 7 aa, Artificial sequence
  Protein classification predicting sequence
ERGVGET

SEQ ID NO: 60887 - protein, 7 aa, Artificial sequence
  Protein classification predicting sequence
GIQQGLL

SEQ ID NO: 60888 - protein, 7 aa, Artificial sequence
  Protein classification predicting sequence
LYMTGPA

SEQ ID NO: 60889 - protein, 6 aa, Artificial sequence
  Protein classification predicting sequence
MNGLGN

SEQ ID NO: 60890 - protein, 9 aa, Artificial sequence
  Protein classification predicting sequence
ACGNGTRCV

SEQ ID NO: 60891 - protein, 7 aa, Artificial sequence
  Protein classification predicting sequence
VSMGNPH

SEQ ID NO: 60892 - protein, 6 aa, Artificial sequence
  Protein classification predicting sequence
WERGAG

SEQ ID NO: 60893 - protein, 8 aa, Artificial sequence
  Protein classification predicting sequence
WERGAGLT

SEQ ID NO: 60894 - protein, 9 aa, Artificial sequence
  Protein classification predicting sequence
CGTGTVAAA

SEQ ID NO: 60895 - protein, 6 aa, Artificial sequence
  Protein classification predicting sequence
FSKMHG

SEQ ID NO: 60896 - protein, 10 aa, Artificial sequence
  Protein classification predicting sequence
GLGADGVLRV

SEQ ID NO: 60897 - protein, 18 aa, Artificial sequence
  Protein classification predicting sequence
ERGVGETRSCGTGTVAAA

SEQ ID NO: 60898 - protein, 5 aa, Artificial sequence
  Protein classification predicting sequence
MGNPH

SEQ ID NO: 60899 - protein, 9 aa, Artificial sequence
  Protein classification predicting sequence
LIRRLADRH

SEQ ID NO: 60900 - protein, 6 aa, Artificial sequence
  Protein classification predicting sequence
FPERAN

SEQ ID NO: 60901 - protein, 11 aa, Artificial sequence
  Protein classification predicting sequence
FSKMHGLGNDF

SEQ ID NO: 60902 - protein, 9 aa, Artificial sequence
  Protein classification predicting sequence
KMHGLGNDF

SEQ ID NO: 60903 - protein, 6 aa, Artificial sequence
  Protein classification predicting sequence
GFDQLL

SEQ ID NO: 60904 - protein, 21 aa, Artificial sequence
  Protein classification predicting sequence
LGPLLESHERFPERVNAGFMQ

SEQ ID NO: 60905 - protein, 15 aa, Artificial sequence
  Protein classification predicting sequence
ASMCGNGLRTVARYL

SEQ ID NO: 60906 - protein, 20 aa, Artificial sequence
  Protein classification predicting sequence
VRTFERGVGFTNACGTAMSA

SEQ ID NO: 60907 - protein, 8 aa, Artificial sequence
  Protein classification predicting sequence
LIGNATFV

SEQ ID NO: 60908 - protein, 7 aa, Artificial sequence
  Protein classification predicting sequence
AEMCGNG

SEQ ID NO: 60909 - protein, 7 aa, Artificial sequence
  Protein classification predicting sequence
MRVHERG

SEQ ID NO: 60910 - protein, 7 aa, Artificial sequence
  Protein classification predicting sequence
ERGAGET

SEQ ID NO: 60911 - protein, 6 aa, Artificial sequence
  Protein classification predicting sequence
GNPHAV

SEQ ID NO: 60912 - protein, 8 aa, Artificial sequence
  Protein classification predicting sequence
KMHGLGND

SEQ ID NO: 60913 - protein, 11 aa, Artificial sequence
  Protein classification predicting sequence
YRIFNADGSEV

SEQ ID NO: 60914 - protein, 6 aa, Artificial sequence
  Protein classification predicting sequence
FPERVN

SEQ ID NO: 60915 - protein, 6 aa, Artificial sequence
  Protein classification predicting sequence
GFMQVV

SEQ ID NO: 60916 - protein, 6 aa, Artificial sequence
  Protein classification predicting sequence
RLADRH

SEQ ID NO: 60917 - protein, 7 aa, Artificial sequence
  Protein classification predicting sequence
VEPPYDP

SEQ ID NO: 60918 - protein, 15 aa, Artificial sequence
  Protein classification predicting sequence
LDFHYRIFNADGSEV

SEQ ID NO: 60919 - protein, 7 aa, Artificial sequence
  Protein classification predicting sequence
GPLLENH

SEQ ID NO: 60920 - protein, 19 aa, Artificial sequence
  Protein classification predicting sequence
DGSEVEQCGNGARCFARFV

SEQ ID NO: 60921 - protein, 8 aa, Artificial sequence
  Protein classification predicting sequence
ACGTGACA

SEQ ID NO: 60922 - protein, 9 aa, Artificial sequence
  Protein classification predicting sequence
FDQIMAIHD

SEQ ID NO: 60923 - protein, 12 aa, Artificial sequence
  Protein classification predicting sequence
RCVVQALAAETG

SEQ ID NO: 60924 - protein, 7 aa, Artificial sequence
  Protein classification predicting sequence
DVWSYEL

SEQ ID NO: 60925 - protein, 11 aa, Artificial sequence
  Protein classification predicting sequence
SMGNPHAIFWV

SEQ ID NO: 60926 - protein, 13 aa, Artificial sequence
  Protein classification predicting sequence
LVRVNMGEPNFEP

SEQ ID NO: 60927 - protein, 36 aa, Artificial sequence
  Protein classification predicting sequence
DRHLGVGFDQLLVVEPPYDPELDFHYRIFNADGSEV

SEQ ID NO: 60928 - protein, 31 aa, Artificial sequence
  Protein classification predicting sequence
VDTAAVETLGPVLESHERFPERANIGFMQVV

SEQ ID NO: 60929 - protein, 49 aa, Artificial sequence
  Protein classification predicting sequence
ACGSGACAAVAVGIQQGLLAEEVRVELPGGRLDIAWKGPGHPLYMTGPA

SEQ ID NO: 60930 - protein, 12 aa, Artificial sequence
  Protein classification predicting sequence
CGNGARCFARFV

SEQ ID NO: 60931 - protein, 6 aa, Artificial sequence
  Protein classification predicting sequence
KGLTNK

SEQ ID NO: 60932 - protein, 7 aa, Artificial sequence
  Protein classification predicting sequence
TVNMGVP

SEQ ID NO: 60933 - protein, 6 aa, Artificial sequence
  Protein classification predicting sequence
KAEKTY

SEQ ID NO: 60934 - protein, 10 aa, Artificial sequence
  Protein classification predicting sequence
MCGNGVRVFA

SEQ ID NO: 60935 - protein, 9 aa, Artificial sequence
  Protein classification predicting sequence
GETRSCGTG

SEQ ID NO: 60936 - protein, 6 aa, Artificial sequence
  Protein classification predicting sequence
ACGSGA

SEQ ID NO: 60937 - protein, 14 aa, Artificial sequence
  Protein classification predicting sequence
DFHYRIFNADGSEV

SEQ ID NO: 60938 - protein, 8 aa, Artificial sequence
  Protein classification predicting sequence
VSTKKGKM

SEQ ID NO: 60939 - protein, 20 aa, Artificial sequence
  Protein classification predicting sequence
TLFCGAVSMGNPHVVTVVDD

SEQ ID NO: 60940 - protein, 13 aa, Artificial sequence
  Protein classification predicting sequence
AVAVGILQGLLDE

SEQ ID NO: 60941 - protein, 13 aa, Artificial sequence
  Protein classification predicting sequence
QCGNGARCFARFV

SEQ ID NO: 60942 - protein, 21 aa, Artificial sequence
  Protein classification predicting sequence
QCGNGARCFARFVRLKGLTNK

SEQ ID NO: 60943 - protein, 16 aa, Artificial sequence
  Protein classification predicting sequence
TVNMGVPEFEPNKIPF

SEQ ID NO: 60944 - protein, 7 aa, Artificial sequence
  Protein classification predicting sequence
EKTYIMR

SEQ ID NO: 60945 - protein, 5 aa, Artificial sequence
  Protein classification predicting sequence
FSKMH

SEQ ID NO: 60946 - protein, 6 aa, Artificial sequence
  Protein classification predicting sequence
FTKMHG

SEQ ID NO: 60947 - protein, 6 aa, Artificial sequence
  Protein classification predicting sequence
VNVSFV

SEQ ID NO: 60948 - protein, 6 aa, Artificial sequence
  Protein classification predicting sequence
GVGFDQ

SEQ ID NO: 60949 - protein, 16 aa, Artificial sequence
  Protein classification predicting sequence
HERFPERANIGFMQVV

SEQ ID NO: 60950 - protein, 8 aa, Artificial sequence
  Protein classification predicting sequence
PLYMTGPA

SEQ ID NO: 60951 - protein, 7 aa, Artificial sequence
  Protein classification predicting sequence
DSVFQIA

SEQ ID NO: 60952 - protein, 6 aa, Artificial sequence
  Protein classification predicting sequence
QIAAHE

SEQ ID NO: 60953 - protein, 7 aa, Artificial sequence
  Protein classification predicting sequence
RTGNRRD

SEQ ID NO: 60954 - protein, 7 aa, Artificial sequence
  Protein classification predicting sequence
GTDHTRE

SEQ ID NO: 60955 - protein, 20 aa, Artificial sequence
  Protein classification predicting sequence
GKDTMTGHWEIMGLYIDTPF

SEQ ID NO: 60956 - protein, 11 aa, Artificial sequence
  Protein classification predicting sequence
SFLNLVDFDAL

SEQ ID NO: 60957 - protein, 21 aa, Artificial sequence
  Protein classification predicting sequence
SFLNLVDFDALFGHRRDPQGY

SEQ ID NO: 60958 - protein, 8 aa, Artificial sequence
  Protein classification predicting sequence
NLVDFDAL

SEQ ID NO: 60959 - protein, 14 aa, Artificial sequence
  Protein classification predicting sequence
GKDTMTGHWEIMGL

SEQ ID NO: 60960 - protein, 6 aa, Artificial sequence
  Protein classification predicting sequence
PFRVFP

SEQ ID NO: 60961 - protein, 6 aa, Artificial sequence
  Protein classification predicting sequence
NGFPEE

SEQ ID NO: 60962 - protein, 24 aa, Artificial sequence
  Protein classification predicting sequence
EHVKTGALIVYTSADSVLQIAAHE

SEQ ID NO: 60963 - protein, 8 aa, Artificial sequence
  Protein classification predicting sequence
VLQIAAHE

SEQ ID NO: 60964 - protein, 16 aa, Artificial sequence
  Protein classification predicting sequence
KAEKPLAYYTKMQEAS

SEQ ID NO: 60965 - protein, 10 aa, Artificial sequence
  Protein classification predicting sequence
GKDTMTGHWE

SEQ ID NO: 60966 - protein, 6 aa, Artificial sequence
  Protein classification predicting sequence
GNFQRT

SEQ ID NO: 60967 - protein, 7 aa, Artificial sequence
  Protein classification predicting sequence
GKIADIY

SEQ ID NO: 60968 - protein, 6 aa, Artificial sequence
  Protein classification predicting sequence
RETFAD

SEQ ID NO: 60969 - protein, 15 aa, Artificial sequence
  Protein classification predicting sequence
LIVMDSVGIGEAPDA

SEQ ID NO: 60970 - protein, 7 aa, Artificial sequence
  Protein classification predicting sequence
GRIIARP

SEQ ID NO: 60971 - protein, 10 aa, Artificial sequence
  Protein classification predicting sequence
NRHDYALKPF

SEQ ID NO: 60972 - protein, 7 aa, Artificial sequence
  Protein classification predicting sequence
FGHRRDP

SEQ ID NO: 60973 - protein, 12 aa, Artificial sequence
  Protein classification predicting sequence
SGHWEIAGVPVL

SEQ ID NO: 60974 - protein, 8 aa, Artificial sequence
  Protein classification predicting sequence
GNCHASGT

SEQ ID NO: 60975 - protein, 5 aa, Artificial sequence
  Protein classification predicting sequence
RTGNR

SEQ ID NO: 60976 - protein, 8 aa, Artificial sequence
  Protein classification predicting sequence
ASGTEIIK

SEQ ID NO: 60977 - protein, 6 aa, Artificial sequence
  Protein classification predicting sequence
PVLFDW

SEQ ID NO: 60978 - protein, 6 aa, Artificial sequence
  Protein classification predicting sequence
RIIARP

SEQ ID NO: 60979 - protein, 10 aa, Artificial sequence
  Protein classification predicting sequence
DIGQTLAKYF

SEQ ID NO: 60980 - protein, 20 aa, Artificial sequence
  Protein classification predicting sequence
SSGKDTPSGHWEIAGVPVLF

SEQ ID NO: 60981 - protein, 5 aa, Artificial sequence
  Protein classification predicting sequence
LGNCH

SEQ ID NO: 60982 - protein, 11 aa, Artificial sequence
  Protein classification predicting sequence
YNIGRVIARPF

SEQ ID NO: 60983 - protein, 6 aa, Artificial sequence
  Protein classification predicting sequence
DDILIL

SEQ ID NO: 60984 - protein, 9 aa, Artificial sequence
  Protein classification predicting sequence
ADHGCDPTW

SEQ ID NO: 60985 - protein, 12 aa, Artificial sequence
  Protein classification predicting sequence
GTDHTREHIPVL

SEQ ID NO: 60986 - protein, 8 aa, Artificial sequence
  Protein classification predicting sequence
GRKVIGNK

SEQ ID NO: 60987 - protein, 7 aa, Artificial sequence
  Protein classification predicting sequence
FPQELLD

SEQ ID NO: 60988 - protein, 7 aa, Artificial sequence
  Protein classification predicting sequence
DIFDGEG

SEQ ID NO: 60989 - protein, 9 aa, Artificial sequence
  Protein classification predicting sequence
ITADHGNDP

SEQ ID NO: 60990 - protein, 7 aa, Artificial sequence
  Protein classification predicting sequence
IARPYVG

SEQ ID NO: 60991 - protein, 7 aa, Artificial sequence
  Protein classification predicting sequence
NKPYSGT

SEQ ID NO: 60992 - protein, 12 aa, Artificial sequence
  Protein classification predicting sequence
QIAAHEDVVPLE

SEQ ID NO: 60993 - protein, 6 aa, Artificial sequence
  Protein classification predicting sequence
FTNLVD

SEQ ID NO: 60994 - protein, 6 aa, Artificial sequence
  Protein classification predicting sequence
DHGNDP

SEQ ID NO: 60995 - protein, 11 aa, Artificial sequence
  Protein classification predicting sequence
DSVGIGEAPDA

SEQ ID NO: 60996 - protein, 16 aa, Artificial sequence
  Protein classification predicting sequence
GKDTMTGHWEIMGLNI

SEQ ID NO: 60997 - protein, 10 aa, Artificial sequence
  Protein classification predicting sequence
RTSNRHDYAL

SEQ ID NO: 60998 - protein, 7 aa, Artificial sequence
  Protein classification predicting sequence
NRHDYAL

SEQ ID NO: 60999 - protein, 8 aa, Artificial sequence
  Protein classification predicting sequence
RTKSNMDG

SEQ ID NO: 61000 - protein, 10 aa, Artificial sequence
  Protein classification predicting sequence
SFTNLVDFDA

SEQ ID NO: 61001 - protein, 6 aa, Artificial sequence
  Protein classification predicting sequence
PLLAYS

SEQ ID NO: 61002 - protein, 9 aa, Artificial sequence
  Protein classification predicting sequence
PVLFEWGYF

SEQ ID NO: 61003 - protein, 11 aa, Artificial sequence
  Protein classification predicting sequence
YTSADSVFQIA

SEQ ID NO: 61004 - protein, 11 aa, Artificial sequence
  Protein classification predicting sequence
DSVGIGAAPDA

SEQ ID NO: 61005 - protein, 16 aa, Artificial sequence
  Protein classification predicting sequence
DSVGIGAAPDADKFFN

SEQ ID NO: 61006 - protein, 7 aa, Artificial sequence
  Protein classification predicting sequence
YVTKLEE

SEQ ID NO: 61007 - protein, 6 aa, Artificial sequence
  Protein classification predicting sequence
DFGPRQ

SEQ ID NO: 61008 - protein, 11 aa, Artificial sequence
  Protein classification predicting sequence
GRIIARPYVGE

SEQ ID NO: 61009 - protein, 5 aa, Artificial sequence
  Protein classification predicting sequence
DMGHN

SEQ ID NO: 61010 - protein, 7 aa, Artificial sequence
  Protein classification predicting sequence
ATVADNF

SEQ ID NO: 61011 - protein, 7 aa, Artificial sequence
  Protein classification predicting sequence
VKMPEYG

SEQ ID NO: 61012 - protein, 13 aa, Artificial sequence
  Protein classification predicting sequence
VMDSVGIGEAPDA

SEQ ID NO: 61013 - protein, 7 aa, Artificial sequence
  Protein classification predicting sequence
GHWEMMG

SEQ ID NO: 61014 - protein, 6 aa, Artificial sequence
  Protein classification predicting sequence
RVIARP

SEQ ID NO: 61015 - protein, 6 aa, Artificial sequence
  Protein classification predicting sequence
NRHDYA

SEQ ID NO: 61016 - protein, 9 aa, Artificial sequence
  Protein classification predicting sequence
AVGKINDIF

SEQ ID NO: 61017 - protein, 7 aa, Artificial sequence
  Protein classification predicting sequence
LGLSNIR

SEQ ID NO: 61018 - protein, 6 aa, Artificial sequence
  Protein classification predicting sequence
GKISDI

SEQ ID NO: 61019 - protein, 7 aa, Artificial sequence
  Protein classification predicting sequence
DGEGVTE

SEQ ID NO: 61020 - protein, 7 aa, Artificial sequence
  Protein classification predicting sequence
NLVDFDA

SEQ ID NO: 61021 - protein, 14 aa, Artificial sequence
  Protein classification predicting sequence
DDLLIITADHGNDP

SEQ ID NO: 61022 - protein, 13 aa, Artificial sequence
  Protein classification predicting sequence
LYELCEIAREELT

SEQ ID NO: 61023 - protein, 24 aa, Artificial sequence
  Protein classification predicting sequence
GDKAGNFQRTGNRHDLAVEPPAPT

SEQ ID NO: 61024 - protein, 7 aa, Artificial sequence
  Protein classification predicting sequence
GYAAALE

SEQ ID NO: 61025 - protein, 16 aa, Artificial sequence
  Protein classification predicting sequence
PGSLGHRETFADIGQT

SEQ ID NO: 61026 - protein, 7 aa, Artificial sequence
  Protein classification predicting sequence
HIAEACA

SEQ ID NO: 61027 - protein, 6 aa, Artificial sequence
  Protein classification predicting sequence
FDWGYF

SEQ ID NO: 61028 - protein, 6 aa, Artificial sequence
  Protein classification predicting sequence
NFVDFD

SEQ ID NO: 61029 - protein, 7 aa, Artificial sequence
  Protein classification predicting sequence
FDRRLPE

SEQ ID NO: 61030 - protein, 6 aa, Artificial sequence
  Protein classification predicting sequence
TFADIG

SEQ ID NO: 61031 - protein, 7 aa, Artificial sequence
  Protein classification predicting sequence
DTLGHIA

SEQ ID NO: 61032 - protein, 8 aa, Artificial sequence
  Protein classification predicting sequence
KAHEGSTG

SEQ ID NO: 61033 - protein, 10 aa, Artificial sequence
  Protein classification predicting sequence
VIGAYAWAHE

SEQ ID NO: 61034 - protein, 8 aa, Artificial sequence
  Protein classification predicting sequence
KEMKEAGD

SEQ ID NO: 61035 - protein, 12 aa, Artificial sequence
  Protein classification predicting sequence
TIVFTNFVDFDS

SEQ ID NO: 61036 - protein, 19 aa, Artificial sequence
  Protein classification predicting sequence
TIVFTNFVDFDSSWGHRRD

SEQ ID NO: 61037 - protein, 18 aa, Artificial sequence
  Protein classification predicting sequence
AGYAAGLELFDRRLPELM

SEQ ID NO: 61038 - protein, 14 aa, Artificial sequence
  Protein classification predicting sequence
WTGTDHTREHIPVL

SEQ ID NO: 61039 - protein, 12 aa, Artificial sequence
  Protein classification predicting sequence
YFGTSPMDYGKN

SEQ ID NO: 61040 - protein, 33 aa, Artificial sequence
  Protein classification predicting sequence
DTLGHIAEACAKGEADNGRKGPLNLPNLTRLGL

SEQ ID NO: 61041 - protein, 32 aa, Artificial sequence
  Protein classification predicting sequence
VVSVGKIADIYANCGITKKVKATGLDALFDAT

SEQ ID NO: 61042 - protein, 8 aa, Artificial sequence
  Protein classification predicting sequence
FGDVGSDT

SEQ ID NO: 61043 - protein, 8 aa, Artificial sequence
  Protein classification predicting sequence
DTFGHIAK

SEQ ID NO: 61044 - protein, 9 aa, Artificial sequence
  Protein classification predicting sequence
NSFPKELTD

SEQ ID NO: 61045 - protein, 9 aa, Artificial sequence
  Protein classification predicting sequence
LCEIAREEL

SEQ ID NO: 61046 - protein, 12 aa, Artificial sequence
  Protein classification predicting sequence
VVSVGKIADIYA

SEQ ID NO: 61047 - protein, 8 aa, Artificial sequence
  Protein classification predicting sequence
GKIADIYA

SEQ ID NO: 61048 - protein, 9 aa, Artificial sequence
  Protein classification predicting sequence
CGITKKVKA

SEQ ID NO: 61049 - protein, 10 aa, Artificial sequence
  Protein classification predicting sequence
GHRRDVAGYA

SEQ ID NO: 61050 - protein, 7 aa, Artificial sequence
  Protein classification predicting sequence
NKPASGT

SEQ ID NO: 61051 - protein, 7 aa, Artificial sequence
  Protein classification predicting sequence
DEGSHTL

SEQ ID NO: 61052 - protein, 37 aa, Artificial sequence
  Protein classification predicting sequence
YTKLSEASVGKDTMTGHWEIMGLNIMQPFKVYPNGFP

SEQ ID NO: 61053 - protein, 9 aa, Artificial sequence
  Protein classification predicting sequence
MTGRKVVAN

SEQ ID NO: 61054 - protein, 38 aa, Artificial sequence
  Protein classification predicting sequence
PASGTQIIDEWGEHQMKTGDLIVYTSADPVLQIAAHED

SEQ ID NO: 61055 - protein, 22 aa, Artificial sequence
  Protein classification predicting sequence
GYDVIAIGKINDIYDGEGVTEA

SEQ ID NO: 61056 - protein, 20 aa, Artificial sequence
  Protein classification predicting sequence
GISFLNLVDFDALYGHRRDK

SEQ ID NO: 61057 - protein, 10 aa, Artificial sequence
  Protein classification predicting sequence
GYAQAIKDFD

SEQ ID NO: 61058 - protein, 10 aa, Artificial sequence
  Protein classification predicting sequence
GTDHTREYIP

SEQ ID NO: 61059 - protein, 8 aa, Artificial sequence
  Protein classification predicting sequence
DTTFSSIG

SEQ ID NO: 61060 - protein, 6 aa, Artificial sequence
  Protein classification predicting sequence
TIADNF

SEQ ID NO: 61061 - protein, 33 aa, Artificial sequence
  Protein classification predicting sequence
EVSLGKDTMTGHWEIMGLNITEPFDTFWNGFPE

SEQ ID NO: 61062 - protein, 9 aa, Artificial sequence
  Protein classification predicting sequence
ICEYARSIT

SEQ ID NO: 61063 - protein, 18 aa, Artificial sequence
  Protein classification predicting sequence
DMGHNKSNSHGIDTLIKT

SEQ ID NO: 61064 - protein, 9 aa, Artificial sequence
  Protein classification predicting sequence
SFTGNGLIP

SEQ ID NO: 61065 - protein, 15 aa, Artificial sequence
  Protein classification predicting sequence
YTSADPVLQIAAHED

SEQ ID NO: 61066 - protein, 10 aa, Artificial sequence
  Protein classification predicting sequence
GRIIARPYVG

SEQ ID NO: 61067 - protein, 29 aa, Artificial sequence
  Protein classification predicting sequence
TYAVGKINDIFNGSGITNDMGHNKSNSHG

SEQ ID NO: 61068 - protein, 6 aa, Artificial sequence
  Protein classification predicting sequence
DTLIKT

SEQ ID NO: 61069 - protein, 8 aa, Artificial sequence
  Protein classification predicting sequence
GTDHTREY

SEQ ID NO: 61070 - protein, 7 aa, Artificial sequence
  Protein classification predicting sequence
SDTLGHI

SEQ ID NO: 61071 - protein, 7 aa, Artificial sequence
  Protein classification predicting sequence
PGNFTRT

SEQ ID NO: 61072 - protein, 10 aa, Artificial sequence
  Protein classification predicting sequence
GYRDCLHEFD

SEQ ID NO: 61073 - protein, 8 aa, Artificial sequence
  Protein classification predicting sequence
QMETGELI

SEQ ID NO: 61074 - protein, 20 aa, Artificial sequence
  Protein classification predicting sequence
LIVYTSADPVLQIAAHEDII

SEQ ID NO: 61075 - protein, 8 aa, Artificial sequence
  Protein classification predicting sequence
AMIGESFL

SEQ ID NO: 61076 - protein, 14 aa, Artificial sequence
  Protein classification predicting sequence
IREANKPYSGTAVI

SEQ ID NO: 61077 - protein, 15 aa, Artificial sequence
  Protein classification predicting sequence
DMGHNKSNSHGIDTL

SEQ ID NO: 61078 - protein, 5 aa, Artificial sequence
  Protein classification predicting sequence
PNMAK

SEQ ID NO: 61079 - protein, 8 aa, Artificial sequence
  Protein classification predicting sequence
IEEFSGRK

SEQ ID NO: 61080 - protein, 18 aa, Artificial sequence
  Protein classification predicting sequence
YTSADPVLQIAAHEDIIP

SEQ ID NO: 61081 - protein, 23 aa, Artificial sequence
  Protein classification predicting sequence
YTSADPVLQIAAHEDIIPVEELY

SEQ ID NO: 61082 - protein, 18 aa, Artificial sequence
  Protein classification predicting sequence
GRIIARPYVGEPGNFTRT

SEQ ID NO: 61083 - protein, 21 aa, Artificial sequence
  Protein classification predicting sequence
GRIIARPYVGEPGNFTRTSNR

SEQ ID NO: 61084 - protein, 8 aa, Artificial sequence
  Protein classification predicting sequence
DMGHNKSN

SEQ ID NO: 61085 - protein, 12 aa, Artificial sequence
  Protein classification predicting sequence
GFSFTNLVDFDA

SEQ ID NO: 61086 - protein, 9 aa, Artificial sequence
  Protein classification predicting sequence
IVYTSADSV

SEQ ID NO: 61087 - protein, 7 aa, Artificial sequence
  Protein classification predicting sequence
PEGFPKE

SEQ ID NO: 61088 - protein, 6 aa, Artificial sequence
  Protein classification predicting sequence
CEIARE

SEQ ID NO: 61089 - protein, 8 aa, Artificial sequence
  Protein classification predicting sequence
FDERLPEI

SEQ ID NO: 61090 - protein, 16 aa, Artificial sequence
  Protein classification predicting sequence
FGDVGSDTLGHIADQC

SEQ ID NO: 61091 - protein, 25 aa, Artificial sequence
  Protein classification predicting sequence
LPNLSKLGLAMAHKESTGRFAPGLD

SEQ ID NO: 61092 - protein, 23 aa, Artificial sequence
  Protein classification predicting sequence
PIFYTSADSVFQIACHEETFGLD

SEQ ID NO: 61093 - protein, 7 aa, Artificial sequence
  Protein classification predicting sequence
GPGKGQF

SEQ ID NO: 61094 - protein, 16 aa, Artificial sequence
  Protein classification predicting sequence
AGDNTIVFTNFVDFDS

SEQ ID NO: 61095 - protein, 10 aa, Artificial sequence
  Protein classification predicting sequence
TFADIGQTLA

SEQ ID NO: 61096 - protein, 22 aa, Artificial sequence
  Protein classification predicting sequence
ELSSGKDTPSGHWEIAGVPVLF

SEQ ID NO: 61097 - protein, 9 aa, Artificial sequence
  Protein classification predicting sequence
LGEEHMKTG

SEQ ID NO: 61098 - protein, 20 aa, Artificial sequence
  Protein classification predicting sequence
GKIADIYANCGITKKVKATG

SEQ ID NO: 61099 - protein, 13 aa, Artificial sequence
  Protein classification predicting sequence
LILTADHGCDPTW

SEQ ID NO: 61100 - protein, 6 aa, Artificial sequence
  Protein classification predicting sequence
WGYFSD

SEQ ID NO: 61101 - protein, 13 aa, Artificial sequence
  Protein classification predicting sequence
ENSFPQELLDKLV

SEQ ID NO: 61102 - protein, 17 aa, Artificial sequence
  Protein classification predicting sequence
GGYNIGRVIARPFIGDK

SEQ ID NO: 61103 - protein, 18 aa, Artificial sequence
  Protein classification predicting sequence
FQRTGNRHDLAVEPPAPT

SEQ ID NO: 61104 - protein, 15 aa, Artificial sequence
  Protein classification predicting sequence
GTDHTREHIPVLVYG

SEQ ID NO: 61105 - protein, 8 aa, Artificial sequence
  Protein classification predicting sequence
SPMDYGKN

SEQ ID NO: 61106 - protein, 6 aa, Artificial sequence
  Protein classification predicting sequence
CWFAVC

SEQ ID NO: 61107 - protein, 8 aa, Artificial sequence
  Protein classification predicting sequence
LWGPLSLW

SEQ ID NO: 61108 - protein, 6 aa, Artificial sequence
  Protein classification predicting sequence
YFWFYF

SEQ ID NO: 61109 - protein, 7 aa, Artificial sequence
  Protein classification predicting sequence
QLPDGGW

SEQ ID NO: 61110 - protein, 8 aa, Artificial sequence
  Protein classification predicting sequence
EVFGDIMI

SEQ ID NO: 61111 - protein, 7 aa, Artificial sequence
  Protein classification predicting sequence
WGKFWLA

SEQ ID NO: 61112 - protein, 7 aa, Artificial sequence
  Protein classification predicting sequence
KPLDYYR

SEQ ID NO: 61113 - protein, 6 aa, Artificial sequence
  Protein classification predicting sequence
RDYIHV

SEQ ID NO: 61114 - protein, 7 aa, Artificial sequence
  Protein classification predicting sequence
GKKFDSS

SEQ ID NO: 61115 - protein, 7 aa, Artificial sequence
  Protein classification predicting sequence
IPPDATL

SEQ ID NO: 61116 - protein, 6 aa, Artificial sequence
  Protein classification predicting sequence
RYHYNG

SEQ ID NO: 61117 - protein, 5 aa, Artificial sequence
  Protein classification predicting sequence
RYHYN

SEQ ID NO: 61118 - protein, 6 aa, Artificial sequence
  Protein classification predicting sequence
VIKGWD

SEQ ID NO: 61119 - protein, 14 aa, Artificial sequence
  Protein classification predicting sequence
KFDSSRDRNKPFKF

SEQ ID NO: 61120 - protein, 9 aa, Artificial sequence
  Protein classification predicting sequence
GHPGVIPPN

SEQ ID NO: 61121 - protein, 7 aa, Artificial sequence
  Protein classification predicting sequence
IPPNSTL

SEQ ID NO: 61122 - protein, 8 aa, Artificial sequence
  Protein classification predicting sequence
IPPELAYG

SEQ ID NO: 61123 - protein, 13 aa, Artificial sequence
  Protein classification predicting sequence
ETISPGDGRTFPK

SEQ ID NO: 61124 - protein, 16 aa, Artificial sequence
  Protein classification predicting sequence
GKKFDSSRDRNKPFKF

SEQ ID NO: 61125 - protein, 8 aa, Artificial sequence
  Protein classification predicting sequence
GDGRTFPK

SEQ ID NO: 61126 - protein, 39 aa, Artificial sequence
  Protein classification predicting sequence
GDGRTFPKRGQTCVVHYTGMLEDGKKFDSSRDRNKPFKF

SEQ ID NO: 61127 - protein, 25 aa, Artificial sequence
  Protein classification predicting sequence
LGKQEVIRGWEEGVAQMSVGQRAKL

SEQ ID NO: 61128 - protein, 19 aa, Artificial sequence
  Protein classification predicting sequence
EVIRGWEEGVAQMSVGQRA

SEQ ID NO: 61129 - protein, 9 aa, Artificial sequence
  Protein classification predicting sequence
AYGATGHPG

SEQ ID NO: 61130 - protein, 41 aa, Artificial sequence
  Protein classification predicting sequence
CVVHYTGMLQNGKKFDSSRDRNKPFKFRIGKQEVIKGFEEG

SEQ ID NO: 61131 - protein, 7 aa, Artificial sequence
  Protein classification predicting sequence
GSPPKIP

SEQ ID NO: 61132 - protein, 9 aa, Artificial sequence
  Protein classification predicting sequence
EKKLYANMF

SEQ ID NO: 61133 - protein, 8 aa, Artificial sequence
  Protein classification predicting sequence
KFDSSRDR

SEQ ID NO: 61134 - protein, 9 aa, Artificial sequence
  Protein classification predicting sequence
IKKGGKIKL

SEQ ID NO: 61135 - protein, 8 aa, Artificial sequence
  Protein classification predicting sequence
TLVFEVEL

SEQ ID NO: 61136 - protein, 6 aa, Artificial sequence
  Protein classification predicting sequence
DGTVFD

SEQ ID NO: 61137 - protein, 6 aa, Artificial sequence
  Protein classification predicting sequence
KLVSMK

SEQ ID NO: 61138 - protein, 7 aa, Artificial sequence
  Protein classification predicting sequence
VIKAWDI

SEQ ID NO: 61139 - protein, 8 aa, Artificial sequence
  Protein classification predicting sequence
EDGGIIRR

SEQ ID NO: 61140 - protein, 13 aa, Artificial sequence
  Protein classification predicting sequence
LKSFEKAKESWEM

SEQ ID NO: 61141 - protein, 6 aa, Artificial sequence
  Protein classification predicting sequence
GTVYFK

SEQ ID NO: 61142 - protein, 7 aa, Artificial sequence
  Protein classification predicting sequence
KIVSWLE

SEQ ID NO: 61143 - protein, 6 aa, Artificial sequence
  Protein classification predicting sequence
LNLAMC

SEQ ID NO: 61144 - protein, 7 aa, Artificial sequence
  Protein classification predicting sequence
ETPMIGD

SEQ ID NO: 61145 - protein, 8 aa, Artificial sequence
  Protein classification predicting sequence
CKPEYAYG

SEQ ID NO: 61146 - protein, 6 aa, Artificial sequence
  Protein classification predicting sequence
TLVFEV

SEQ ID NO: 61147 - protein, 11 aa, Artificial sequence
  Protein classification predicting sequence
GEGYSNPNEGA

SEQ ID NO: 61148 - protein, 7 aa, Artificial sequence
  Protein classification predicting sequence
EQGEDIT

SEQ ID NO: 61149 - protein, 14 aa, Artificial sequence
  Protein classification predicting sequence
KKDRGVLKIVKRVG

SEQ ID NO: 61150 - protein, 16 aa, Artificial sequence
  Protein classification predicting sequence
KRKGEGYSNPNEGATV

SEQ ID NO: 61151 - protein, 23 aa, Artificial sequence
  Protein classification predicting sequence
YEVTLKSFEKAKESWEMDTKEKL

SEQ ID NO: 61152 - protein, 6 aa, Artificial sequence
  Protein classification predicting sequence
QAVIQY

SEQ ID NO: 61153 - protein, 41 aa, Artificial sequence
  Protein classification predicting sequence
KIVSWLEMEYGLSEKESKASESFLLAAFLNLAMCYLKLREY

SEQ ID NO: 61154 - protein, 12 aa, Artificial sequence
  Protein classification predicting sequence
FESAKGDFEKVL

SEQ ID NO: 61155 - protein, 10 aa, Artificial sequence
  Protein classification predicting sequence
AARLQISMCQ

SEQ ID NO: 61156 - protein, 11 aa, Artificial sequence
  Protein classification predicting sequence
KAKEHNERDRR

SEQ ID NO: 61157 - protein, 10 aa, Artificial sequence
  Protein classification predicting sequence
YANMFKKFAE

SEQ ID NO: 61158 - protein, 6 aa, Artificial sequence
  Protein classification predicting sequence
DAKEEA

SEQ ID NO: 61159 - protein, 22 aa, Artificial sequence
  Protein classification predicting sequence
KLREYTKAVECCDKALGLDSAN

SEQ ID NO: 61160 - protein, 19 aa, Artificial sequence
  Protein classification predicting sequence
TMKKGEICHLLCKPEYAYG

SEQ ID NO: 61161 - protein, 8 aa, Artificial sequence
  Protein classification predicting sequence
NGKKFDSS

SEQ ID NO: 61162 - protein, 6 aa, Artificial sequence
  Protein classification predicting sequence
IPPNAT

SEQ ID NO: 61163 - protein, 6 aa, Artificial sequence
  Protein classification predicting sequence
GLLGMC

SEQ ID NO: 61164 - protein, 7 aa, Artificial sequence
  Protein classification predicting sequence
IPPHATL

SEQ ID NO: 61165 - protein, 5 aa, Artificial sequence
  Protein classification predicting sequence
CWCYG

SEQ ID NO: 61166 - protein, 16 aa, Artificial sequence
  Protein classification predicting sequence
WGFNGTERPGAVYLAA

SEQ ID NO: 61167 - protein, 10 aa, Artificial sequence
  Protein classification predicting sequence
VSMGIAGSIV

SEQ ID NO: 61168 - protein, 6 aa, Artificial sequence
  Protein classification predicting sequence
YFRGGG

SEQ ID NO: 61169 - protein, 14 aa, Artificial sequence
  Protein classification predicting sequence
IKGLGPVLQIAEGW

SEQ ID NO: 61170 - protein, 7 aa, Artificial sequence
  Protein classification predicting sequence
TWPTTWF

SEQ ID NO: 61171 - protein, 6 aa, Artificial sequence
  Protein classification predicting sequence
DVYSVM

SEQ ID NO: 61172 - protein, 5 aa, Artificial sequence
  Protein classification predicting sequence
DYRAC

SEQ ID NO: 61173 - protein, 11 aa, Artificial sequence
  Protein classification predicting sequence
ITLASMLRIPV

SEQ ID NO: 61174 - protein, 20 aa, Artificial sequence
  Protein classification predicting sequence
KAIWGFNGTERPGAVYLAAA

SEQ ID NO: 61175 - protein, 7 aa, Artificial sequence
  Protein classification predicting sequence
IYGHDVQ

SEQ ID NO: 61176 - protein, 7 aa, Artificial sequence
  Protein classification predicting sequence
SMGIAGS

SEQ ID NO: 61177 - protein, 10 aa, Artificial sequence
  Protein classification predicting sequence
GFQGQRQWTD

SEQ ID NO: 61178 - protein, 6 aa, Artificial sequence
  Protein classification predicting sequence
KIGIRP

SEQ ID NO: 61179 - protein, 13 aa, Artificial sequence
  Protein classification predicting sequence
IDGRRMGVRESLE

SEQ ID NO: 61180 - protein, 23 aa, Artificial sequence
  Protein classification predicting sequence
NVGLTITVTPCWCYGSETIDMDP

SEQ ID NO: 61181 - protein, 23 aa, Artificial sequence
  Protein classification predicting sequence
PKAIWGFNGTERPGAVYLAAALA

SEQ ID NO: 61182 - protein, 15 aa, Artificial sequence
  Protein classification predicting sequence
EKLLRFARAGLAVAS

SEQ ID NO: 61183 - protein, 11 aa, Artificial sequence
  Protein classification predicting sequence
FFQEYLGMRNE

SEQ ID NO: 61184 - protein, 6 aa, Artificial sequence
  Protein classification predicting sequence
DWNGVR

SEQ ID NO: 61185 - protein, 9 aa, Artificial sequence
  Protein classification predicting sequence
FADVRTYWS

SEQ ID NO: 61186 - protein, 11 aa, Artificial sequence
  Protein classification predicting sequence
TWPTTWFVPRL

SEQ ID NO: 61187 - protein, 7 aa, Artificial sequence
  Protein classification predicting sequence
PRLTGKG

SEQ ID NO: 61188 - protein, 15 aa, Artificial sequence
  Protein classification predicting sequence
FTDVYSVMANWGANH

SEQ ID NO: 61189 - protein, 6 aa, Artificial sequence
  Protein classification predicting sequence
RHACGA

SEQ ID NO: 61190 - protein, 9 aa, Artificial sequence
  Protein classification predicting sequence
DTCIAGMAE

SEQ ID NO: 61191 - protein, 13 aa, Artificial sequence
  Protein classification predicting sequence
AACEEKFSSQNVG

SEQ ID NO: 61192 - protein, 16 aa, Artificial sequence
  Protein classification predicting sequence
ESLLMAMCIRDMMQGN

SEQ ID NO: 61193 - protein, 19 aa, Artificial sequence
  Protein classification predicting sequence
LAEHGIIHLINSGSAALDG

SEQ ID NO: 61194 - protein, 8 aa, Artificial sequence
  Protein classification predicting sequence
CKQRDSEG

SEQ ID NO: 61195 - protein, 15 aa, Artificial sequence
  Protein classification predicting sequence
RTNSTWPTTWFAPRL

SEQ ID NO: 61196 - protein, 35 aa, Artificial sequence
  Protein classification predicting sequence
GKGPFTDVYSVMANWGANHGVLTIGHVGADFITLA

SEQ ID NO: 61197 - protein, 63 aa, Artificial sequence
  Protein classification predicting sequence
GGVSMGIAGSIVDHNFFESWLGMKVQAVDMTELRRRIDQKIYDEAELEMALAWADKNFRYGED

SEQ ID NO: 61198 - protein, 32 aa, Artificial sequence
  Protein classification predicting sequence
VEESLGYNAIAAGFQGQRHWTDQYPNGDTAEA

SEQ ID NO: 61199 - protein, 75 aa, Artificial sequence
  Protein classification predicting sequence
PTMKPHWEISQQEADACLAATEWCPAIHEYFRGGGYSSRFLTEGGVPFTMTRVNIIKGLGPVLQIAEGWSVELPK

SEQ ID NO: 61200 - protein, 7 aa, Artificial sequence
  Protein classification predicting sequence
GVRESLE

SEQ ID NO: 61201 - protein, 7 aa, Artificial sequence
  Protein classification predicting sequence
QTMNMAK

SEQ ID NO: 61202 - protein, 14 aa, Artificial sequence
  Protein classification predicting sequence
TITVTPCWCYGSET

SEQ ID NO: 61203 - protein, 6 aa, Artificial sequence
  Protein classification predicting sequence
DYRACQ

SEQ ID NO: 61204 - protein, 10 aa, Artificial sequence
  Protein classification predicting sequence
ITVTPCWCYG

SEQ ID NO: 61205 - protein, 7 aa, Artificial sequence
  Protein classification predicting sequence
ETIDMDP

SEQ ID NO: 61206 - protein, 7 aa, Artificial sequence
  Protein classification predicting sequence
YLGMRNE

SEQ ID NO: 61207 - protein, 8 aa, Artificial sequence
  Protein classification predicting sequence
EEALGHNA

SEQ ID NO: 61208 - protein, 10 aa, Artificial sequence
  Protein classification predicting sequence
GFQGQRHWTD

SEQ ID NO: 61209 - protein, 7 aa, Artificial sequence
  Protein classification predicting sequence
DVRTYWS

SEQ ID NO: 61210 - protein, 9 aa, Artificial sequence
  Protein classification predicting sequence
NSGSAALDG

SEQ ID NO: 61211 - protein, 9 aa, Artificial sequence
  Protein classification predicting sequence
GPVLQIAEG

SEQ ID NO: 61212 - protein, 6 aa, Artificial sequence
  Protein classification predicting sequence
MHNVEE

SEQ ID NO: 61213 - protein, 7 aa, Artificial sequence
  Protein classification predicting sequence
VLHVALR

SEQ ID NO: 61214 - protein, 6 aa, Artificial sequence
  Protein classification predicting sequence
SKTFTT

SEQ ID NO: 61215 - protein, 8 aa, Artificial sequence
  Protein classification predicting sequence
SILLPTLD

SEQ ID NO: 61216 - protein, 11 aa, Artificial sequence
  Protein classification predicting sequence
EGFNFSTKTLL

SEQ ID NO: 61217 - protein, 7 aa, Artificial sequence
  Protein classification predicting sequence
IKKTHLR

SEQ ID NO: 61218 - protein, 15 aa, Artificial sequence
  Protein classification predicting sequence
EGFNFSTKTLLTRYL

SEQ ID NO: 61219 - protein, 28 aa, Artificial sequence
  Protein classification predicting sequence
FAFWDWVGGRYSVCSAVGVLPLSLQYGF

SEQ ID NO: 61220 - protein, 9 aa, Artificial sequence
  Protein classification predicting sequence
SRVKGEPVE

SEQ ID NO: 61221 - protein, 18 aa, Artificial sequence
  Protein classification predicting sequence
INSTENRSVLHVALRAPR

SEQ ID NO: 61222 - protein, 40 aa, Artificial sequence
  Protein classification predicting sequence
LAIYEHRVAVQGFVWGINSFDQWGVELGKSLATQVRKQLH

SEQ ID NO: 61223 - protein, 19 aa, Artificial sequence
  Protein classification predicting sequence
EFDNIFLDYSRQQASPDTI

SEQ ID NO: 61224 - protein, 36 aa, Artificial sequence
  Protein classification predicting sequence
HLRELMGDTERCQSMMVEFDNIFLDYSRQQASPDTI

SEQ ID NO: 61225 - protein, 14 aa, Artificial sequence
  Protein classification predicting sequence
VKSQQPVYLKGEVV

SEQ ID NO: 61226 - protein, 11 aa, Artificial sequence
  Protein classification predicting sequence
LDYSKNRINDE

SEQ ID NO: 61227 - protein, 8 aa, Artificial sequence
  Protein classification predicting sequence
LALIGIWY

SEQ ID NO: 61228 - protein, 6 aa, Artificial sequence
  Protein classification predicting sequence
MESNGK

SEQ ID NO: 61229 - protein, 10 aa, Artificial sequence
  Protein classification predicting sequence
GKTPDEVRAE

SEQ ID NO: 61230 - protein, 7 aa, Artificial sequence
  Protein classification predicting sequence
FVQGIIW

SEQ ID NO: 61231 - protein, 8 aa, Artificial sequence
  Protein classification predicting sequence
PVLLALLG

SEQ ID NO: 61232 - protein, 6 aa, Artificial sequence
  Protein classification predicting sequence
LLGVWY

SEQ ID NO: 61233 - protein, 8 aa, Artificial sequence
  Protein classification predicting sequence
YEHKVFVQ

SEQ ID NO: 61234 - protein, 9 aa, Artificial sequence
  Protein classification predicting sequence
RAVLHTALR

SEQ ID NO: 61235 - protein, 12 aa, Artificial sequence
  Protein classification predicting sequence
TLFVIASKTFTT

SEQ ID NO: 61236 - protein, 9 aa, Artificial sequence
  Protein classification predicting sequence
ETITNATSA

SEQ ID NO: 61237 - protein, 7 aa, Artificial sequence
  Protein classification predicting sequence
LIALYEH

SEQ ID NO: 61238 - protein, 19 aa, Artificial sequence
  Protein classification predicting sequence
LISETEAWKDLKAHLEGIK

SEQ ID NO: 61239 - protein, 9 aa, Artificial sequence
  Protein classification predicting sequence
VLDKIKDFS

SEQ ID NO: 61240 - protein, 39 aa, Artificial sequence
  Protein classification predicting sequence
GATGKELKDVIAVGIGGSFLGPLFVHTALQTDPEASKNA

SEQ ID NO: 61241 - protein, 14 aa, Artificial sequence
  Protein classification predicting sequence
GRELRFLANVDPID

SEQ ID NO: 61242 - protein, 14 aa, Artificial sequence
  Protein classification predicting sequence
SAVAKHMVAVSTNL

SEQ ID NO: 61243 - protein, 6 aa, Artificial sequence
  Protein classification predicting sequence
KLYKLA

SEQ ID NO: 61244 - protein, 5 aa, Artificial sequence
  Protein classification predicting sequence
WYNNF

SEQ ID NO: 61245 - protein, 6 aa, Artificial sequence
  Protein classification predicting sequence
QLDMES

SEQ ID NO: 61246 - protein, 6 aa, Artificial sequence
  Protein classification predicting sequence
MESLGK

SEQ ID NO: 61247 - protein, 9 aa, Artificial sequence
  Protein classification predicting sequence
NPFDQWGVE

SEQ ID NO: 61248 - protein, 6 aa, Artificial sequence
  Protein classification predicting sequence
THLRDL

SEQ ID NO: 61249 - protein, 9 aa, Artificial sequence
  Protein classification predicting sequence
GIGGSDLGP

SEQ ID NO: 61250 - protein, 20 aa, Artificial sequence
  Protein classification predicting sequence
FGIDTANMFEFWDWVGGRYS

SEQ ID NO: 61251 - protein, 32 aa, Artificial sequence
  Protein classification predicting sequence
AQSHAVLPYSHYLSKFTAYLQQLDMESNGKSV

SEQ ID NO: 61252 - protein, 7 aa, Artificial sequence
  Protein classification predicting sequence
TGPVVWG

SEQ ID NO: 61253 - protein, 35 aa, Artificial sequence
  Protein classification predicting sequence
WNIDSFDQWGVELGKVLAKRVEPALTEGADVPGLD

SEQ ID NO: 61254 - protein, 9 aa, Artificial sequence
  Protein classification predicting sequence
LTPSVLGQL

SEQ ID NO: 61255 - protein, 7 aa, Artificial sequence
  Protein classification predicting sequence
FDYSKAL

SEQ ID NO: 61256 - protein, 9 aa, Artificial sequence
  Protein classification predicting sequence
FDYSKALSF

SEQ ID NO: 61257 - protein, 9 aa, Artificial sequence
  Protein classification predicting sequence
TYLRDAVKV

SEQ ID NO: 61258 - protein, 21 aa, Artificial sequence
  Protein classification predicting sequence
LEGKDFSINVISKSGTTTEPA

SEQ ID NO: 61259 - protein, 10 aa, Artificial sequence
  Protein classification predicting sequence
NIEEMMKGAA

SEQ ID NO: 61260 - protein, 8 aa, Artificial sequence
  Protein classification predicting sequence
TDLHSLGQ

SEQ ID NO: 61261 - protein, 8 aa, Artificial sequence
  Protein classification predicting sequence
ALQTDPEA

SEQ ID NO: 61262 - protein, 6 aa, Artificial sequence
  Protein classification predicting sequence
AVAKHM

SEQ ID NO: 61263 - protein, 9 aa, Artificial sequence
  Protein classification predicting sequence
LVEKFGIDP

SEQ ID NO: 61264 - protein, 36 aa, Artificial sequence
  Protein classification predicting sequence
FEKNIPVLLGLLSVWNVSFLGYPARAILPYSQALEK

SEQ ID NO: 61265 - protein, 6 aa, Artificial sequence
  Protein classification predicting sequence
APHIQQ

SEQ ID NO: 61266 - protein, 7 aa, Artificial sequence
  Protein classification predicting sequence
SMESNGK

SEQ ID NO: 61267 - protein, 13 aa, Artificial sequence
  Protein classification predicting sequence
SMESNGKGVSIDG

SEQ ID NO: 61268 - protein, 9 aa, Artificial sequence
  Protein classification predicting sequence
GIGGSYLGA

SEQ ID NO: 61269 - protein, 7 aa, Artificial sequence
  Protein classification predicting sequence
DVLEGKD

SEQ ID NO: 61270 - protein, 12 aa, Artificial sequence
  Protein classification predicting sequence
KYGKEEARKRIY

SEQ ID NO: 61271 - protein, 8 aa, Artificial sequence
  Protein classification predicting sequence
YQYAAVRN

SEQ ID NO: 61272 - protein, 6 aa, Artificial sequence
  Protein classification predicting sequence
LVNYEP

SEQ ID NO: 61273 - protein, 8 aa, Artificial sequence
  Protein classification predicting sequence
TDLHSMGQ

SEQ ID NO: 61274 - protein, 9 aa, Artificial sequence
  Protein classification predicting sequence
GQYVQEGRR

SEQ ID NO: 61275 - protein, 6 aa, Artificial sequence
  Protein classification predicting sequence
GTLLAH

SEQ ID NO: 61276 - protein, 6 aa, Artificial sequence
  Protein classification predicting sequence
NEYTFG

SEQ ID NO: 61277 - protein, 5 aa, Artificial sequence
  Protein classification predicting sequence
VYFFE

SEQ ID NO: 61278 - protein, 12 aa, Artificial sequence
  Protein classification predicting sequence
NMFALLGKPGFE

SEQ ID NO: 61279 - protein, 6 aa, Artificial sequence
  Protein classification predicting sequence
KINYTE

SEQ ID NO: 61280 - protein, 7 aa, Artificial sequence
  Protein classification predicting sequence
GGSDLGP

SEQ ID NO: 61281 - protein, 7 aa, Artificial sequence
  Protein classification predicting sequence
IGLPIAL

SEQ ID NO: 61282 - protein, 6 aa, Artificial sequence
  Protein classification predicting sequence
DEHFRT

SEQ ID NO: 61283 - protein, 7 aa, Artificial sequence
  Protein classification predicting sequence
QHAFYQL

SEQ ID NO: 61284 - protein, 6 aa, Artificial sequence
  Protein classification predicting sequence
NCLAQS

SEQ ID NO: 61285 - protein, 9 aa, Artificial sequence
  Protein classification predicting sequence
DQHFQTAPF

SEQ ID NO: 61286 - protein, 8 aa, Artificial sequence
  Protein classification predicting sequence
FAAYLQQL

SEQ ID NO: 61287 - protein, 7 aa, Artificial sequence
  Protein classification predicting sequence
DASTQGL

SEQ ID NO: 61288 - protein, 7 aa, Artificial sequence
  Protein classification predicting sequence
WKGYTGK

SEQ ID NO: 61289 - protein, 8 aa, Artificial sequence
  Protein classification predicting sequence
MVTEALKP

SEQ ID NO: 61290 - protein, 14 aa, Artificial sequence
  Protein classification predicting sequence
ASKTFTTQETITNA

SEQ ID NO: 61291 - protein, 10 aa, Artificial sequence
  Protein classification predicting sequence
FWDWVGGRYS

SEQ ID NO: 61292 - protein, 12 aa, Artificial sequence
  Protein classification predicting sequence
YFQQGDMESNGK

SEQ ID NO: 61293 - protein, 6 aa, Artificial sequence
  Protein classification predicting sequence
GTNGQH

SEQ ID NO: 61294 - protein, 8 aa, Artificial sequence
  Protein classification predicting sequence
FYQLIHQG

SEQ ID NO: 61295 - protein, 6 aa, Artificial sequence
  Protein classification predicting sequence
SNFFAQ

SEQ ID NO: 61296 - protein, 11 aa, Artificial sequence
  Protein classification predicting sequence
LFIIASKTFTT

SEQ ID NO: 61297 - protein, 6 aa, Artificial sequence
  Protein classification predicting sequence
GPVVWG

SEQ ID NO: 61298 - protein, 16 aa, Artificial sequence
  Protein classification predicting sequence
ANCLAQSEALMKGRTL

SEQ ID NO: 61299 - protein, 6 aa, Artificial sequence
  Protein classification predicting sequence
DWVGGR

SEQ ID NO: 61300 - protein, 8 aa, Artificial sequence
  Protein classification predicting sequence
TEAWKDLK

SEQ ID NO: 61301 - protein, 6 aa, Artificial sequence
  Protein classification predicting sequence
RCQSMM

SEQ ID NO: 61302 - protein, 7 aa, Artificial sequence
  Protein classification predicting sequence
DGKNVVP

SEQ ID NO: 61303 - protein, 9 aa, Artificial sequence
  Protein classification predicting sequence
VWNVLDKIK

SEQ ID NO: 61304 - protein, 6 aa, Artificial sequence
  Protein classification predicting sequence
DVARNI

SEQ ID NO: 61305 - protein, 29 aa, Artificial sequence
  Protein classification predicting sequence
DFGEPGTNGQHSFYQLIHQGRVIPCDFIG

SEQ ID NO: 61306 - protein, 6 aa, Artificial sequence
  Protein classification predicting sequence
FSGNRP

SEQ ID NO: 61307 - protein, 6 aa, Artificial sequence
  Protein classification predicting sequence
TEDRAV

SEQ ID NO: 61308 - protein, 10 aa, Artificial sequence
  Protein classification predicting sequence
HFVSNIDGTH

SEQ ID NO: 61309 - protein, 9 aa, Artificial sequence
  Protein classification predicting sequence
SKTFTTAET

SEQ ID NO: 61310 - protein, 6 aa, Artificial sequence
  Protein classification predicting sequence
GLLSVW

SEQ ID NO: 61311 - protein, 7 aa, Artificial sequence
  Protein classification predicting sequence
GEWKGYT

SEQ ID NO: 61312 - protein, 6 aa, Artificial sequence
  Protein classification predicting sequence
AMDKHF

SEQ ID NO: 61313 - protein, 17 aa, Artificial sequence
  Protein classification predicting sequence
ILFGEPATNAQHSFFQL

SEQ ID NO: 61314 - protein, 7 aa, Artificial sequence
  Protein classification predicting sequence
QLLHQGT

SEQ ID NO: 61315 - protein, 8 aa, Artificial sequence
  Protein classification predicting sequence
HQGTKLIP

SEQ ID NO: 61316 - protein, 15 aa, Artificial sequence
  Protein classification predicting sequence
GNRPTTSILAQKITP

SEQ ID NO: 61317 - protein, 13 aa, Artificial sequence
  Protein classification predicting sequence
NVISKSGTTTEPA

SEQ ID NO: 61318 - protein, 7 aa, Artificial sequence
  Protein classification predicting sequence
EGYETFV

SEQ ID NO: 61319 - protein, 7 aa, Artificial sequence
  Protein classification predicting sequence
VGLLPIA

SEQ ID NO: 61320 - protein, 10 aa, Artificial sequence
  Protein classification predicting sequence
VGLLPIAVSG

SEQ ID NO: 61321 - protein, 5 aa, Artificial sequence
  Protein classification predicting sequence
AYQYA

SEQ ID NO: 61322 - protein, 6 aa, Artificial sequence
  Protein classification predicting sequence
EWWKQL

SEQ ID NO: 61323 - protein, 7 aa, Artificial sequence
  Protein classification predicting sequence
DLPVNYD

SEQ ID NO: 61324 - protein, 22 aa, Artificial sequence
  Protein classification predicting sequence
ENPAYQYAVVRNALYNKGKTIE

SEQ ID NO: 61325 - protein, 9 aa, Artificial sequence
  Protein classification predicting sequence
LYNKGKTIE

SEQ ID NO: 61326 - protein, 11 aa, Artificial sequence
  Protein classification predicting sequence
LQYFSEWWKQL

SEQ ID NO: 61327 - protein, 8 aa, Artificial sequence
  Protein classification predicting sequence
GRRDLFET

SEQ ID NO: 61328 - protein, 12 aa, Artificial sequence
  Protein classification predicting sequence
DLDGLNYLAGET

SEQ ID NO: 61329 - protein, 7 aa, Artificial sequence
  Protein classification predicting sequence
DFVNKKA

SEQ ID NO: 61330 - protein, 6 aa, Artificial sequence
  Protein classification predicting sequence
FFGEHE

SEQ ID NO: 61331 - protein, 18 aa, Artificial sequence
  Protein classification predicting sequence
LLVVGIGGSYLGARAAIE

SEQ ID NO: 61332 - protein, 14 aa, Artificial sequence
  Protein classification predicting sequence
GIGGSYLGARAAIE

SEQ ID NO: 61333 - protein, 12 aa, Artificial sequence
  Protein classification predicting sequence
DLDGLNYLAGKT

SEQ ID NO: 61334 - protein, 6 aa, Artificial sequence
  Protein classification predicting sequence
LAHTDG

SEQ ID NO: 61335 - protein, 18 aa, Artificial sequence
  Protein classification predicting sequence
AFRIFRKLLEEKYGKEEA

SEQ ID NO: 61336 - protein, 14 aa, Artificial sequence
  Protein classification predicting sequence
EWWKQLFGESEGKD

SEQ ID NO: 61337 - protein, 7 aa, Artificial sequence
  Protein classification predicting sequence
GESEGKD

SEQ ID NO: 61338 - protein, 9 aa, Artificial sequence
  Protein classification predicting sequence
KGIYPSSAN

SEQ ID NO: 61339 - protein, 9 aa, Artificial sequence
  Protein classification predicting sequence
STDLHSLGQ

SEQ ID NO: 61340 - protein, 23 aa, Artificial sequence
  Protein classification predicting sequence
STDLHSLGQYVQEGRRDLFETVL

SEQ ID NO: 61341 - protein, 12 aa, Artificial sequence
  Protein classification predicting sequence
VPNLIVNIPELN

SEQ ID NO: 61342 - protein, 6 aa, Artificial sequence
  Protein classification predicting sequence
PYHDGP

SEQ ID NO: 61343 - protein, 12 aa, Artificial sequence
  Protein classification predicting sequence
FRFWDWVGGRYS

SEQ ID NO: 61344 - protein, 8 aa, Artificial sequence
  Protein classification predicting sequence
GTNGQHAF

SEQ ID NO: 61345 - protein, 6 aa, Artificial sequence
  Protein classification predicting sequence
HFVAVS

SEQ ID NO: 61346 - protein, 9 aa, Artificial sequence
  Protein classification predicting sequence
FGIDPNNAF

SEQ ID NO: 61347 - protein, 11 aa, Artificial sequence
  Protein classification predicting sequence
WVGGRYSVDSA

SEQ ID NO: 61348 - protein, 15 aa, Artificial sequence
  Protein classification predicting sequence
WGEPGTNGQHAFYQL

SEQ ID NO: 61349 - protein, 7 aa, Artificial sequence
  Protein classification predicting sequence
LIPADFI

SEQ ID NO: 61350 - protein, 9 aa, Artificial sequence
  Protein classification predicting sequence
DQWGVELGK

SEQ ID NO: 61351 - protein, 6 aa, Artificial sequence
  Protein classification predicting sequence
LDYSKN

SEQ ID NO: 61352 - protein, 8 aa, Artificial sequence
  Protein classification predicting sequence
VNIGIGGS

SEQ ID NO: 61353 - protein, 9 aa, Artificial sequence
  Protein classification predicting sequence
SKTFTTQET

SEQ ID NO: 61354 - protein, 6 aa, Artificial sequence
  Protein classification predicting sequence
NMFEFW

SEQ ID NO: 61355 - protein, 16 aa, Artificial sequence
  Protein classification predicting sequence
NIPVILALIGIWYNNF

SEQ ID NO: 61356 - protein, 11 aa, Artificial sequence
  Protein classification predicting sequence
LALIGIWYNNF

SEQ ID NO: 61357 - protein, 5 aa, Artificial sequence
  Protein classification predicting sequence
PYDQY

SEQ ID NO: 61358 - protein, 6 aa, Artificial sequence
  Protein classification predicting sequence
YQTGPI

SEQ ID NO: 61359 - protein, 7 aa, Artificial sequence
  Protein classification predicting sequence
PYTLGAL

SEQ ID NO: 61360 - protein, 7 aa, Artificial sequence
  Protein classification predicting sequence
QQLEMES

SEQ ID NO: 61361 - protein, 6 aa, Artificial sequence
  Protein classification predicting sequence
YEHKVF

SEQ ID NO: 61362 - protein, 6 aa, Artificial sequence
  Protein classification predicting sequence
YDITIE

SEQ ID NO: 61363 - protein, 8 aa, Artificial sequence
  Protein classification predicting sequence
KINISENR

SEQ ID NO: 61364 - protein, 10 aa, Artificial sequence
  Protein classification predicting sequence
GTDVQHSFFQ

SEQ ID NO: 61365 - protein, 6 aa, Artificial sequence
  Protein classification predicting sequence
QHSFFQ

SEQ ID NO: 61366 - protein, 6 aa, Artificial sequence
  Protein classification predicting sequence
INSFDQ

SEQ ID NO: 61367 - protein, 5 aa, Artificial sequence
  Protein classification predicting sequence
WGGVG

SEQ ID NO: 61368 - protein, 14 aa, Artificial sequence
  Protein classification predicting sequence
VNIGIGGSDLGPVM

SEQ ID NO: 61369 - protein, 6 aa, Artificial sequence
  Protein classification predicting sequence
WSAIGL

SEQ ID NO: 61370 - protein, 7 aa, Artificial sequence
  Protein classification predicting sequence
PAYLQQL

SEQ ID NO: 61371 - protein, 12 aa, Artificial sequence
  Protein classification predicting sequence
FDQWGVELGKEL

SEQ ID NO: 61372 - protein, 8 aa, Artificial sequence
  Protein classification predicting sequence
VSNIDGTH

SEQ ID NO: 61373 - protein, 8 aa, Artificial sequence
  Protein classification predicting sequence
FWDWVGGR

SEQ ID NO: 61374 - protein, 9 aa, Artificial sequence
  Protein classification predicting sequence
PYDQYMHRF

SEQ ID NO: 61375 - protein, 9 aa, Artificial sequence
  Protein classification predicting sequence
YEHKIFVQG

SEQ ID NO: 61376 - protein, 7 aa, Artificial sequence
  Protein classification predicting sequence
ALRNRSN

SEQ ID NO: 61377 - protein, 8 aa, Artificial sequence
  Protein classification predicting sequence
EKFLQGAH

SEQ ID NO: 61378 - protein, 12 aa, Artificial sequence
  Protein classification predicting sequence
WGEPGTNGQHAF

SEQ ID NO: 61379 - protein, 6 aa, Artificial sequence
  Protein classification predicting sequence
NFLAQT

SEQ ID NO: 61380 - protein, 10 aa, Artificial sequence
  Protein classification predicting sequence
AQTQVLAFGK

SEQ ID NO: 61381 - protein, 6 aa, Artificial sequence
  Protein classification predicting sequence
SKNRIT

SEQ ID NO: 61382 - protein, 7 aa, Artificial sequence
  Protein classification predicting sequence
IKSMFSG

SEQ ID NO: 61383 - protein, 15 aa, Artificial sequence
  Protein classification predicting sequence
VNIGIGGSDLGPKMV

SEQ ID NO: 61384 - protein, 7 aa, Artificial sequence
  Protein classification predicting sequence
SETEAIF

SEQ ID NO: 61385 - protein, 7 aa, Artificial sequence
  Protein classification predicting sequence
AQSEALM

SEQ ID NO: 61386 - protein, 7 aa, Artificial sequence
  Protein classification predicting sequence
WVGGRYS

SEQ ID NO: 61387 - protein, 5 aa, Artificial sequence
  Protein classification predicting sequence
LVPHK

SEQ ID NO: 61388 - protein, 7 aa, Artificial sequence
  Protein classification predicting sequence
YEHKTFV

SEQ ID NO: 61389 - protein, 8 aa, Artificial sequence
  Protein classification predicting sequence
ANRILPEL

SEQ ID NO: 61390 - protein, 6 aa, Artificial sequence
  Protein classification predicting sequence
FVSNVD

SEQ ID NO: 61391 - protein, 6 aa, Artificial sequence
  Protein classification predicting sequence
SKSGTT

SEQ ID NO: 61392 - protein, 8 aa, Artificial sequence
  Protein classification predicting sequence
WGINSFDQ

SEQ ID NO: 61393 - protein, 7 aa, Artificial sequence
  Protein classification predicting sequence
LVVVVSK

SEQ ID NO: 61394 - protein, 17 aa, Artificial sequence
  Protein classification predicting sequence
FWDWVGGRYSLWSAIGL

SEQ ID NO: 61395 - protein, 7 aa, Artificial sequence
  Protein classification predicting sequence
TGPVIWG

SEQ ID NO: 61396 - protein, 6 aa, Artificial sequence
  Protein classification predicting sequence
GEPGTN

SEQ ID NO: 61397 - protein, 6 aa, Artificial sequence
  Protein classification predicting sequence
EALMKG

SEQ ID NO: 61398 - protein, 17 aa, Artificial sequence
  Protein classification predicting sequence
INSFDQWGVELGKQLAK

SEQ ID NO: 61399 - protein, 6 aa, Artificial sequence
  Protein classification predicting sequence
GSPMDD

SEQ ID NO: 61400 - protein, 9 aa, Artificial sequence
  Protein classification predicting sequence
DFLGWVDLP

SEQ ID NO: 61401 - protein, 17 aa, Artificial sequence
  Protein classification predicting sequence
NVISKSGTTTEPAIAFR

SEQ ID NO: 61402 - protein, 9 aa, Artificial sequence
  Protein classification predicting sequence
DNEGYETFV

SEQ ID NO: 61403 - protein, 7 aa, Artificial sequence
  Protein classification predicting sequence
PDDVGGR

SEQ ID NO: 61404 - protein, 12 aa, Artificial sequence
  Protein classification predicting sequence
SVLTAVGLLPIA

SEQ ID NO: 61405 - protein, 6 aa, Artificial sequence
  Protein classification predicting sequence
AYQYAA

SEQ ID NO: 61406 - protein, 6 aa, Artificial sequence
  Protein classification predicting sequence
YAAARN

SEQ ID NO: 61407 - protein, 9 aa, Artificial sequence
  Protein classification predicting sequence
YFGEWWKQL

SEQ ID NO: 61408 - protein, 6 aa, Artificial sequence
  Protein classification predicting sequence
TGAGND

SEQ ID NO: 61409 - protein, 9 aa, Artificial sequence
  Protein classification predicting sequence
RNALYNKGK

SEQ ID NO: 61410 - protein, 9 aa, Artificial sequence
  Protein classification predicting sequence
YFNEWWKQL

SEQ ID NO: 61411 - protein, 6 aa, Artificial sequence
  Protein classification predicting sequence
GNSISS

SEQ ID NO: 61412 - protein, 7 aa, Artificial sequence
  Protein classification predicting sequence
FSTDLHS

SEQ ID NO: 61413 - protein, 6 aa, Artificial sequence
  Protein classification predicting sequence
ATAGIN

SEQ ID NO: 61414 - protein, 6 aa, Artificial sequence
  Protein classification predicting sequence
FFGAET

SEQ ID NO: 61415 - protein, 9 aa, Artificial sequence
  Protein classification predicting sequence
RFPAYLQQL

SEQ ID NO: 61416 - protein, 15 aa, Artificial sequence
  Protein classification predicting sequence
VNIGIGGSDLGPAMA

SEQ ID NO: 61417 - protein, 7 aa, Artificial sequence
  Protein classification predicting sequence
PTTTILA

SEQ ID NO: 61418 - protein, 7 aa, Artificial sequence
  Protein classification predicting sequence
ALLGVWY

SEQ ID NO: 61419 - protein, 5 aa, Artificial sequence
  Protein classification predicting sequence
IWYIN

SEQ ID NO: 61420 - protein, 6 aa, Artificial sequence
  Protein classification predicting sequence
LIANCL

SEQ ID NO: 61421 - protein, 6 aa, Artificial sequence
  Protein classification predicting sequence
VQSVIW

SEQ ID NO: 61422 - protein, 8 aa, Artificial sequence
  Protein classification predicting sequence
WNINPFDQ

SEQ ID NO: 61423 - protein, 16 aa, Artificial sequence
  Protein classification predicting sequence
ITDIVNIGIGGSDLGP

SEQ ID NO: 61424 - protein, 9 aa, Artificial sequence
  Protein classification predicting sequence
MVTEALKPY

SEQ ID NO: 61425 - protein, 16 aa, Artificial sequence
  Protein classification predicting sequence
WFVSNIDGTHIAKTLA

SEQ ID NO: 61426 - protein, 7 aa, Artificial sequence
  Protein classification predicting sequence
PESSLFI

SEQ ID NO: 61427 - protein, 9 aa, Artificial sequence
  Protein classification predicting sequence
LFIVASKTF

SEQ ID NO: 61428 - protein, 22 aa, Artificial sequence
  Protein classification predicting sequence
ASKTFTTQETITNAETAKEWFL

SEQ ID NO: 61429 - protein, 36 aa, Artificial sequence
  Protein classification predicting sequence
KVKEFGIDPQNMFEFWDWVGGRYSLWSAIGLSIALH

SEQ ID NO: 61430 - protein, 20 aa, Artificial sequence
  Protein classification predicting sequence
GFDNFEQLLSGAHWMDQHFR

SEQ ID NO: 61431 - protein, 6 aa, Artificial sequence
  Protein classification predicting sequence
LPYDQY

SEQ ID NO: 61432 - protein, 7 aa, Artificial sequence
  Protein classification predicting sequence
SGTRVDH

SEQ ID NO: 61433 - protein, 7 aa, Artificial sequence
  Protein classification predicting sequence
TGPIVWG

SEQ ID NO: 61434 - protein, 6 aa, Artificial sequence
  Protein classification predicting sequence
NVVPEV

SEQ ID NO: 61435 - protein, 6 aa, Artificial sequence
  Protein classification predicting sequence
IPCDFI

SEQ ID NO: 61436 - protein, 15 aa, Artificial sequence
  Protein classification predicting sequence
WDINSFDQWGVELGK

SEQ ID NO: 61437 - protein, 9 aa, Artificial sequence
  Protein classification predicting sequence
LMALIGIWN

SEQ ID NO: 61438 - protein, 8 aa, Artificial sequence
  Protein classification predicting sequence
AEVLKKVN

SEQ ID NO: 61439 - protein, 20 aa, Artificial sequence
  Protein classification predicting sequence
WGEPGTNGQHAFYQLIHQGT

SEQ ID NO: 61440 - protein, 6 aa, Artificial sequence
  Protein classification predicting sequence
HHKILL

SEQ ID NO: 61441 - protein, 7 aa, Artificial sequence
  Protein classification predicting sequence
LLPHKVF

SEQ ID NO: 61442 - protein, 8 aa, Artificial sequence
  Protein classification predicting sequence
GNRPTNSI

SEQ ID NO: 61443 - protein, 19 aa, Artificial sequence
  Protein classification predicting sequence
DLAGAIKSMFSGEKINRTE

SEQ ID NO: 61444 - protein, 6 aa, Artificial sequence
  Protein classification predicting sequence
GWIDLP

SEQ ID NO: 61445 - protein, 11 aa, Artificial sequence
  Protein classification predicting sequence
VIGIGGSYLGA

SEQ ID NO: 61446 - protein, 9 aa, Artificial sequence
  Protein classification predicting sequence
YFSEWWKQL

SEQ ID NO: 61447 - protein, 9 aa, Artificial sequence
  Protein classification predicting sequence
QTAAWQALQ

SEQ ID NO: 61448 - protein, 6 aa, Artificial sequence
  Protein classification predicting sequence
AWQALQ

SEQ ID NO: 61449 - protein, 6 aa, Artificial sequence
  Protein classification predicting sequence
DSDRFA

SEQ ID NO: 61450 - protein, 8 aa, Artificial sequence
  Protein classification predicting sequence
GEKINRTE

SEQ ID NO: 61451 - protein, 16 aa, Artificial sequence
  Protein classification predicting sequence
RAVLHVALRNRSNTPI

SEQ ID NO: 61452 - protein, 6 aa, Artificial sequence
  Protein classification predicting sequence
NPETTL

SEQ ID NO: 61453 - protein, 23 aa, Artificial sequence
  Protein classification predicting sequence
NMFEFWDWVGGRYSLWSAIGLSI

SEQ ID NO: 61454 - protein, 12 aa, Artificial sequence
  Protein classification predicting sequence
LLSGAHAMDKHF

SEQ ID NO: 61455 - protein, 8 aa, Artificial sequence
  Protein classification predicting sequence
PCDFIAPA

SEQ ID NO: 61456 - protein, 8 aa, Artificial sequence
  Protein classification predicting sequence
HNPLSDHH

SEQ ID NO: 61457 - protein, 23 aa, Artificial sequence
  Protein classification predicting sequence
KLLSNFFAQTEALAFGKSREVVE

SEQ ID NO: 61458 - protein, 26 aa, Artificial sequence
  Protein classification predicting sequence
ILNIFTFDQWGVELGKQLANRILPEL

SEQ ID NO: 61459 - protein, 6 aa, Artificial sequence
  Protein classification predicting sequence
PETTLF

SEQ ID NO: 61460 - protein, 6 aa, Artificial sequence
  Protein classification predicting sequence
SQSQAL

SEQ ID NO: 61461 - protein, 6 aa, Artificial sequence
  Protein classification predicting sequence
QLLHQG

SEQ ID NO: 61462 - protein, 10 aa, Artificial sequence
  Protein classification predicting sequence
HKVIPGNRPS

SEQ ID NO: 61463 - protein, 8 aa, Artificial sequence
  Protein classification predicting sequence
FLGWLDLP

SEQ ID NO: 61464 - protein, 9 aa, Artificial sequence
  Protein classification predicting sequence
YDKEEFSRI

SEQ ID NO: 61465 - protein, 13 aa, Artificial sequence
  Protein classification predicting sequence
VIGIGGSYLGARA

SEQ ID NO: 61466 - protein, 14 aa, Artificial sequence
  Protein classification predicting sequence
GIGGSYLGARAVIE

SEQ ID NO: 61467 - protein, 15 aa, Artificial sequence
  Protein classification predicting sequence
ISKSGTTTEPAIAFR

SEQ ID NO: 61468 - protein, 21 aa, Artificial sequence
  Protein classification predicting sequence
ISKSGTTTEPAIAFRVFKELL

SEQ ID NO: 61469 - protein, 8 aa, Artificial sequence
  Protein classification predicting sequence
IDALMNGA

SEQ ID NO: 61470 - protein, 11 aa, Artificial sequence
  Protein classification predicting sequence
GESEGKDKKGI

SEQ ID NO: 61471 - protein, 5 aa, Artificial sequence
  Protein classification predicting sequence
GQYIQ

SEQ ID NO: 61472 - protein, 8 aa, Artificial sequence
  Protein classification predicting sequence
EELSKELN

SEQ ID NO: 61473 - protein, 7 aa, Artificial sequence
  Protein classification predicting sequence
RIYATTD

SEQ ID NO: 61474 - protein, 10 aa, Artificial sequence
  Protein classification predicting sequence
NMFALLGKPG

SEQ ID NO: 61475 - protein, 7 aa, Artificial sequence
  Protein classification predicting sequence
DGENVVP

SEQ ID NO: 61476 - protein, 6 aa, Artificial sequence
  Protein classification predicting sequence
AKHFVA

SEQ ID NO: 61477 - protein, 6 aa, Artificial sequence
  Protein classification predicting sequence
FGIDTA

SEQ ID NO: 61478 - protein, 6 aa, Artificial sequence
  Protein classification predicting sequence
LIGLWY

SEQ ID NO: 61479 - protein, 9 aa, Artificial sequence
  Protein classification predicting sequence
YQTGPIIWG

SEQ ID NO: 61480 - protein, 9 aa, Artificial sequence
  Protein classification predicting sequence
LMANFFAQT

SEQ ID NO: 61481 - protein, 6 aa, Artificial sequence
  Protein classification predicting sequence
GNRPTN

SEQ ID NO: 61482 - protein, 5 aa, Artificial sequence
  Protein classification predicting sequence
DYSKN

SEQ ID NO: 61483 - protein, 18 aa, Artificial sequence
  Protein classification predicting sequence
NIGIGGSDLGPYMVTEAL

SEQ ID NO: 61484 - protein, 6 aa, Artificial sequence
  Protein classification predicting sequence
NFEQLL

SEQ ID NO: 61485 - protein, 15 aa, Artificial sequence
  Protein classification predicting sequence
LIPCDFIAPAQTHNP

SEQ ID NO: 61486 - protein, 10 aa, Artificial sequence
  Protein classification predicting sequence
FDQWGVELGK

SEQ ID NO: 61487 - protein, 13 aa, Artificial sequence
  Protein classification predicting sequence
FDQWGVELGKQLA

SEQ ID NO: 61488 - protein, 17 aa, Artificial sequence
  Protein classification predicting sequence
KLLSNFFAQTEALAFGK

SEQ ID NO: 61489 - protein, 6 aa, Artificial sequence
  Protein classification predicting sequence
PTNSIL

SEQ ID NO: 61490 - protein, 9 aa, Artificial sequence
  Protein classification predicting sequence
PFTLGALIA

SEQ ID NO: 61491 - protein, 14 aa, Artificial sequence
  Protein classification predicting sequence
FDQWGVELGKQLAN

SEQ ID NO: 61492 - protein, 10 aa, Artificial sequence
  Protein classification predicting sequence
TLFIVASKTF

SEQ ID NO: 61493 - protein, 12 aa, Artificial sequence
  Protein classification predicting sequence
TLFIVASKTFST

SEQ ID NO: 61494 - protein, 11 aa, Artificial sequence
  Protein classification predicting sequence
VDGKDVMPEVN

SEQ ID NO: 61495 - protein, 14 aa, Artificial sequence
  Protein classification predicting sequence
VSNIDGTHIAKTLA

SEQ ID NO: 61496 - protein, 6 aa, Artificial sequence
  Protein classification predicting sequence
AMYEHK

SEQ ID NO: 61497 - protein, 6 aa, Artificial sequence
  Protein classification predicting sequence
ALRNRS

SEQ ID NO: 61498 - protein, 14 aa, Artificial sequence
  Protein classification predicting sequence
ETTLFLIASKTFTT

SEQ ID NO: 61499 - protein, 7 aa, Artificial sequence
  Protein classification predicting sequence
QHSFFQL

SEQ ID NO: 61500 - protein, 7 aa, Artificial sequence
  Protein classification predicting sequence
LPTDYDK

SEQ ID NO: 61501 - protein, 12 aa, Artificial sequence
  Protein classification predicting sequence
NVISKSGTTTEP

SEQ ID NO: 61502 - protein, 6 aa, Artificial sequence
  Protein classification predicting sequence
IAFRVF

SEQ ID NO: 61503 - protein, 6 aa, Artificial sequence
  Protein classification predicting sequence
TFVIPD

SEQ ID NO: 61504 - protein, 7 aa, Artificial sequence
  Protein classification predicting sequence
DEFTLGY

SEQ ID NO: 61505 - protein, 6 aa, Artificial sequence
  Protein classification predicting sequence
KDFSIN

SEQ ID NO: 61506 - protein, 7 aa, Artificial sequence
  Protein classification predicting sequence
GGRFSVL

SEQ ID NO: 61507 - protein, 5 aa, Artificial sequence
  Protein classification predicting sequence
YQYAA

SEQ ID NO: 61508 - protein, 9 aa, Artificial sequence
  Protein classification predicting sequence
NPFNQPGVE

SEQ ID NO: 61509 - protein, 7 aa, Artificial sequence
  Protein classification predicting sequence
AGNSISS

SEQ ID NO: 61510 - protein, 20 aa, Artificial sequence
  Protein classification predicting sequence
ADKDFSVNVISKSGTTTEPA

SEQ ID NO: 61511 - protein, 9 aa, Artificial sequence
  Protein classification predicting sequence
ATTDKEKGA

SEQ ID NO: 61512 - protein, 6 aa, Artificial sequence
  Protein classification predicting sequence
KGAVKV

SEQ ID NO: 61513 - protein, 13 aa, Artificial sequence
  Protein classification predicting sequence
ADANNWETFVVPD

SEQ ID NO: 61514 - protein, 9 aa, Artificial sequence
  Protein classification predicting sequence
VGGRFSVLT

SEQ ID NO: 61515 - protein, 17 aa, Artificial sequence
  Protein classification predicting sequence
VGGRFSVLTAVGLLPIA

SEQ ID NO: 61516 - protein, 35 aa, Artificial sequence
  Protein classification predicting sequence
VGGRFSVLTAVGLLPIAASGADITALMEGANAARK

SEQ ID NO: 61517 - protein, 34 aa, Artificial sequence
  Protein classification predicting sequence
EWWKQLAGESEGKDQKGIYPTSANFSTDLHSLGQ

SEQ ID NO: 61518 - protein, 13 aa, Artificial sequence
  Protein classification predicting sequence
SANFSTDLHSLGQ

SEQ ID NO: 61519 - protein, 8 aa, Artificial sequence
  Protein classification predicting sequence
IYFFELAI

SEQ ID NO: 61520 - protein, 15 aa, Artificial sequence
  Protein classification predicting sequence
NLPTDYDKEEFARIK

SEQ ID NO: 61521 - protein, 8 aa, Artificial sequence
  Protein classification predicting sequence
VNTKAFEG

SEQ ID NO: 61522 - protein, 12 aa, Artificial sequence
  Protein classification predicting sequence
DGGVPNMVVNIP

SEQ ID NO: 61523 - protein, 11 aa, Artificial sequence
  Protein classification predicting sequence
TTLFIVSSKSF

SEQ ID NO: 61524 - protein, 7 aa, Artificial sequence
  Protein classification predicting sequence
WDWVGGR

SEQ ID NO: 61525 - protein, 8 aa, Artificial sequence
  Protein classification predicting sequence
YEHKIFVQ

SEQ ID NO: 61526 - protein, 8 aa, Artificial sequence
  Protein classification predicting sequence
RVRLNSDS

SEQ ID NO: 61527 - protein, 10 aa, Artificial sequence
  Protein classification predicting sequence
VVPDSNNYES

SEQ ID NO: 61528 - protein, 6 aa, Artificial sequence
  Protein classification predicting sequence
KQINCI

SEQ ID NO: 61529 - protein, 25 aa, Artificial sequence
  Protein classification predicting sequence
YDYSRQRVNRTIIDLLIDLANEVKL

SEQ ID NO: 61530 - protein, 28 aa, Artificial sequence
  Protein classification predicting sequence
EKIDNLINGKKINISENRPALHTALRDL

SEQ ID NO: 61531 - protein, 8 aa, Artificial sequence
  Protein classification predicting sequence
IDGLDIMS

SEQ ID NO: 61532 - protein, 8 aa, Artificial sequence
  Protein classification predicting sequence
IREKKWLG

SEQ ID NO: 61533 - protein, 12 aa, Artificial sequence
  Protein classification predicting sequence
ITDVVNIGIGGS

SEQ ID NO: 61534 - protein, 16 aa, Artificial sequence
  Protein classification predicting sequence
VNIGIGGSDLGPRVCI

SEQ ID NO: 61535 - protein, 21 aa, Artificial sequence
  Protein classification predicting sequence
SKEFNYHFISDVDPASFNDVI

SEQ ID NO: 61536 - protein, 29 aa, Artificial sequence
  Protein classification predicting sequence
TTLFIVSSKSFTTKETLLNARKAFALYED

SEQ ID NO: 61537 - protein, 17 aa, Artificial sequence
  Protein classification predicting sequence
ASIDQHFIAVTAHPERA

SEQ ID NO: 61538 - protein, 31 aa, Artificial sequence
  Protein classification predicting sequence
DTHVQFTDFKNNIPVLMALIGIWNNNFLNIH

SEQ ID NO: 61539 - protein, 8 aa, Artificial sequence
  Protein classification predicting sequence
ALYEHKIF

SEQ ID NO: 61540 - protein, 7 aa, Artificial sequence
  Protein classification predicting sequence
VDGKDVM

SEQ ID NO: 61541 - protein, 9 aa, Artificial sequence
  Protein classification predicting sequence
FVSNVDGTH

SEQ ID NO: 61542 - protein, 6 aa, Artificial sequence
  Protein classification predicting sequence
ETLTNA

SEQ ID NO: 61543 - protein, 11 aa, Artificial sequence
  Protein classification predicting sequence
FWDWVGGRYSV

SEQ ID NO: 61544 - protein, 8 aa, Artificial sequence
  Protein classification predicting sequence
WVGGRYSV

SEQ ID NO: 61545 - protein, 5 aa, Artificial sequence
  Protein classification predicting sequence
QTGPI

SEQ ID NO: 61546 - protein, 8 aa, Artificial sequence
  Protein classification predicting sequence
KRIYATTD

SEQ ID NO: 61547 - protein, 8 aa, Artificial sequence
  Protein classification predicting sequence
RNVLYRKG

SEQ ID NO: 61548 - protein, 15 aa, Artificial sequence
  Protein classification predicting sequence
WGINSFDQWGVELGK

SEQ ID NO: 61549 - protein, 14 aa, Artificial sequence
  Protein classification predicting sequence
NMFGFWDWVGGRYS

SEQ ID NO: 61550 - protein, 12 aa, Artificial sequence
  Protein classification predicting sequence
FGFWDWVGGRYS

SEQ ID NO: 61551 - protein, 19 aa, Artificial sequence
  Protein classification predicting sequence
FWDWVGGRYSLWSAIGLSI

SEQ ID NO: 61552 - protein, 6 aa, Artificial sequence
  Protein classification predicting sequence
GFENFE

SEQ ID NO: 61553 - protein, 10 aa, Artificial sequence
  Protein classification predicting sequence
LIPCDFIAPA

SEQ ID NO: 61554 - protein, 12 aa, Artificial sequence
  Protein classification predicting sequence
EITPFSLGALIA

SEQ ID NO: 61555 - protein, 9 aa, Artificial sequence
  Protein classification predicting sequence
GALKTLADN

SEQ ID NO: 61556 - protein, 6 aa, Artificial sequence
  Protein classification predicting sequence
RNALYN

SEQ ID NO: 61557 - protein, 6 aa, Artificial sequence
  Protein classification predicting sequence
DGLNYL

SEQ ID NO: 61558 - protein, 9 aa, Artificial sequence
  Protein classification predicting sequence
FGYLVYFFE

SEQ ID NO: 61559 - protein, 8 aa, Artificial sequence
  Protein classification predicting sequence
QPGVEVYK

SEQ ID NO: 61560 - protein, 6 aa, Artificial sequence
  Protein classification predicting sequence
LLGKPG

SEQ ID NO: 61561 - protein, 16 aa, Artificial sequence
  Protein classification predicting sequence
ITDVVNIGIGGSDLGP

SEQ ID NO: 61562 - protein, 7 aa, Artificial sequence
  Protein classification predicting sequence
VAEFGID

SEQ ID NO: 61563 - protein, 16 aa, Artificial sequence
  Protein classification predicting sequence
WDWVGGRYSLWSAIGL

SEQ ID NO: 61564 - protein, 7 aa, Artificial sequence
  Protein classification predicting sequence
GNKPTNS

SEQ ID NO: 61565 - protein, 6 aa, Artificial sequence
  Protein classification predicting sequence
STNGLI

SEQ ID NO: 61566 - protein, 11 aa, Artificial sequence
  Protein classification predicting sequence
LAKSRGVEAAR

SEQ ID NO: 61567 - protein, 23 aa, Artificial sequence
  Protein classification predicting sequence
INIGIGGSDLGPLMVTEALKPYS

SEQ ID NO: 61568 - protein, 17 aa, Artificial sequence
  Protein classification predicting sequence
HRFAAYFQQGDMESNGK

SEQ ID NO: 61569 - protein, 23 aa, Artificial sequence
  Protein classification predicting sequence
HRFAAYFQQGDMESNGKYITKSG

SEQ ID NO: 61570 - protein, 19 aa, Artificial sequence
  Protein classification predicting sequence
WDINSFDQWGVELGKQLAK

SEQ ID NO: 61571 - protein, 25 aa, Artificial sequence
  Protein classification predicting sequence
WDINSFDQWGVELGKQLAKKIEPEL

SEQ ID NO: 61572 - protein, 7 aa, Artificial sequence
  Protein classification predicting sequence
MESNGKS

SEQ ID NO: 61573 - protein, 7 aa, Artificial sequence
  Protein classification predicting sequence
PADFIGF

SEQ ID NO: 61574 - protein, 8 aa, Artificial sequence
  Protein classification predicting sequence
PADFIGFA

SEQ ID NO: 61575 - protein, 9 aa, Artificial sequence
  Protein classification predicting sequence
HKVMPGNRP

SEQ ID NO: 61576 - protein, 6 aa, Artificial sequence
  Protein classification predicting sequence
LISYEP

SEQ ID NO: 61577 - protein, 7 aa, Artificial sequence
  Protein classification predicting sequence
VLHTALR

SEQ ID NO: 61578 - protein, 18 aa, Artificial sequence
  Protein classification predicting sequence
FTDRLRSGEWTGATGKRI

SEQ ID NO: 61579 - protein, 19 aa, Artificial sequence
  Protein classification predicting sequence
APLESNAPVLLGLIGLWYS

SEQ ID NO: 61580 - protein, 14 aa, Artificial sequence
  Protein classification predicting sequence
AYLQQLTMESNGKS

SEQ ID NO: 61581 - protein, 11 aa, Artificial sequence
  Protein classification predicting sequence
GTNGQHAFYQL

SEQ ID NO: 61582 - protein, 6 aa, Artificial sequence
  Protein classification predicting sequence
GNRPTT

SEQ ID NO: 61583 - protein, 11 aa, Artificial sequence
  Protein classification predicting sequence
LVRRYRTERGR

SEQ ID NO: 61584 - protein, 7 aa, Artificial sequence
  Protein classification predicting sequence
EPSIAFR

SEQ ID NO: 61585 - protein, 13 aa, Artificial sequence
  Protein classification predicting sequence
PDITATPAWDALR

SEQ ID NO: 61586 - protein, 6 aa, Artificial sequence
  Protein classification predicting sequence
TDKEKG

SEQ ID NO: 61587 - protein, 10 aa, Artificial sequence
  Protein classification predicting sequence
VLVVIGIGGS

SEQ ID NO: 61588 - protein, 7 aa, Artificial sequence
  Protein classification predicting sequence
EPAIAFR

SEQ ID NO: 61589 - protein, 7 aa, Artificial sequence
  Protein classification predicting sequence
DLHSLGQ

SEQ ID NO: 61590 - protein, 15 aa, Artificial sequence
  Protein classification predicting sequence
FTDRLRSGEWTGATG

SEQ ID NO: 61591 - protein, 7 aa, Artificial sequence
  Protein classification predicting sequence
SKNLVTE

SEQ ID NO: 61592 - protein, 6 aa, Artificial sequence
  Protein classification predicting sequence
HVALRN

SEQ ID NO: 61593 - protein, 19 aa, Artificial sequence
  Protein classification predicting sequence
NIGIGGSDLGPVMVTEALK

SEQ ID NO: 61594 - protein, 8 aa, Artificial sequence
  Protein classification predicting sequence
TFTEGAIW

SEQ ID NO: 61595 - protein, 6 aa, Artificial sequence
  Protein classification predicting sequence
LHIALR

SEQ ID NO: 61596 - protein, 6 aa, Artificial sequence
  Protein classification predicting sequence
NAHSAR

SEQ ID NO: 61597 - protein, 5 aa, Artificial sequence
  Protein classification predicting sequence
LIGIW

SEQ ID NO: 61598 - protein, 10 aa, Artificial sequence
  Protein classification predicting sequence
HINTSEDRAV

SEQ ID NO: 61599 - protein, 6 aa, Artificial sequence
  Protein classification predicting sequence
HQGTRL

SEQ ID NO: 61600 - protein, 9 aa, Artificial sequence
  Protein classification predicting sequence
KGKVTELLI

SEQ ID NO: 61601 - protein, 6 aa, Artificial sequence
  Protein classification predicting sequence
LINYEP

SEQ ID NO: 61602 - protein, 28 aa, Artificial sequence
  Protein classification predicting sequence
QKGIYPSSANFTTDLHSLGQYIQEGRRN

SEQ ID NO: 61603 - protein, 7 aa, Artificial sequence
  Protein classification predicting sequence
LLAHTDG

SEQ ID NO: 61604 - protein, 13 aa, Artificial sequence
  Protein classification predicting sequence
YTFGYLVYFFEKA

SEQ ID NO: 61605 - protein, 7 aa, Artificial sequence
  Protein classification predicting sequence
ARNISGL

SEQ ID NO: 61606 - protein, 25 aa, Artificial sequence
  Protein classification predicting sequence
PETTLVVVVSKTFTTAETMLNARTL

SEQ ID NO: 61607 - protein, 8 aa, Artificial sequence
  Protein classification predicting sequence
EPALAFRI

SEQ ID NO: 61608 - protein, 6 aa, Artificial sequence
  Protein classification predicting sequence
PTLDAY

SEQ ID NO: 61609 - protein, 6 aa, Artificial sequence
  Protein classification predicting sequence
GAHEMD

SEQ ID NO: 61610 - protein, 7 aa, Artificial sequence
  Protein classification predicting sequence
QLIHQGT

SEQ ID NO: 61611 - protein, 7 aa, Artificial sequence
  Protein classification predicting sequence
PYKNHLN

SEQ ID NO: 61612 - protein, 11 aa, Artificial sequence
  Protein classification predicting sequence
HFVSNVDGTHI

SEQ ID NO: 61613 - protein, 6 aa, Artificial sequence
  Protein classification predicting sequence
HFRTAP

SEQ ID NO: 61614 - protein, 12 aa, Artificial sequence
  Protein classification predicting sequence
DRFAKFSATFDD

SEQ ID NO: 61615 - protein, 7 aa, Artificial sequence
  Protein classification predicting sequence
FSGEKIN

SEQ ID NO: 61616 - protein, 7 aa, Artificial sequence
  Protein classification predicting sequence
ASKTFTT

SEQ ID NO: 61617 - protein, 10 aa, Artificial sequence
  Protein classification predicting sequence
ASKTFTTQET

SEQ ID NO: 61618 - protein, 15 aa, Artificial sequence
  Protein classification predicting sequence
ASKTFTTQETMTNAH

SEQ ID NO: 61619 - protein, 9 aa, Artificial sequence
  Protein classification predicting sequence
FGIDTKNMF

SEQ ID NO: 61620 - protein, 6 aa, Artificial sequence
  Protein classification predicting sequence
GAHAMD

SEQ ID NO: 61621 - protein, 6 aa, Artificial sequence
  Protein classification predicting sequence
KNINPT

SEQ ID NO: 61622 - protein, 6 aa, Artificial sequence
  Protein classification predicting sequence
WKGYTG

SEQ ID NO: 61623 - protein, 12 aa, Artificial sequence
  Protein classification predicting sequence
GIGGSDLGPYMV

SEQ ID NO: 61624 - protein, 12 aa, Artificial sequence
  Protein classification predicting sequence
HVAKHFAALSTN

SEQ ID NO: 61625 - protein, 15 aa, Artificial sequence
  Protein classification predicting sequence
NMFEFWDWVGGRYSL

SEQ ID NO: 61626 - protein, 10 aa, Artificial sequence
  Protein classification predicting sequence
WDWVGGRYSL

SEQ ID NO: 61627 - protein, 28 aa, Artificial sequence
  Protein classification predicting sequence
PVILALIGIWYNNFHGAESEAILPYDQY

SEQ ID NO: 61628 - protein, 17 aa, Artificial sequence
  Protein classification predicting sequence
HRFAAYFQQGNMESNGK

SEQ ID NO: 61629 - protein, 9 aa, Artificial sequence
  Protein classification predicting sequence
LIPCDFIAP

SEQ ID NO: 61630 - protein, 13 aa, Artificial sequence
  Protein classification predicting sequence
NFFAQTEALAFGK

SEQ ID NO: 61631 - protein, 29 aa, Artificial sequence
  Protein classification predicting sequence
QGVIWNIFSFDQWGVELGKQLANQILPEL

SEQ ID NO: 61632 - protein, 8 aa, Artificial sequence
  Protein classification predicting sequence
RFLANVDP

SEQ ID NO: 61633 - protein, 10 aa, Artificial sequence
  Protein classification predicting sequence
QQLSMESNGK

SEQ ID NO: 61634 - protein, 8 aa, Artificial sequence
  Protein classification predicting sequence
MESNGKSV

SEQ ID NO: 61635 - protein, 6 aa, Artificial sequence
  Protein classification predicting sequence
NHDELM

SEQ ID NO: 61636 - protein, 24 aa, Artificial sequence
  Protein classification predicting sequence
LLPHKVFEGNRPTNSIVFTKLTPF

SEQ ID NO: 61637 - protein, 6 aa, Artificial sequence
  Protein classification predicting sequence
DLDGLN

SEQ ID NO: 61638 - protein, 6 aa, Artificial sequence
  Protein classification predicting sequence
NMFALL

SEQ ID NO: 61639 - protein, 11 aa, Artificial sequence
  Protein classification predicting sequence
GIGGSDLGPVM

SEQ ID NO: 61640 - protein, 6 aa, Artificial sequence
  Protein classification predicting sequence
PETTLV

SEQ ID NO: 61641 - protein, 9 aa, Artificial sequence
  Protein classification predicting sequence
SKTFTTLET

SEQ ID NO: 61642 - protein, 7 aa, Artificial sequence
  Protein classification predicting sequence
HFVAVST

SEQ ID NO: 61643 - protein, 6 aa, Artificial sequence
  Protein classification predicting sequence
QYLHRF

SEQ ID NO: 61644 - protein, 6 aa, Artificial sequence
  Protein classification predicting sequence
RPTTSI

SEQ ID NO: 61645 - protein, 15 aa, Artificial sequence
  Protein classification predicting sequence
WGIDSFDQWGVELGK

SEQ ID NO: 61646 - protein, 12 aa, Artificial sequence
  Protein classification predicting sequence
YLQQLVMESLGK

SEQ ID NO: 61647 - protein, 9 aa, Artificial sequence
  Protein classification predicting sequence
PRRLGALVA

SEQ ID NO: 61648 - protein, 6 aa, Artificial sequence
  Protein classification predicting sequence
NPAALL

SEQ ID NO: 61649 - protein, 9 aa, Artificial sequence
  Protein classification predicting sequence
GIGGSFLGP

SEQ ID NO: 61650 - protein, 31 aa, Artificial sequence
  Protein classification predicting sequence
AFGIREENIFPMWDWVGGRYSLWSAIGLPIA

SEQ ID NO: 61651 - protein, 9 aa, Artificial sequence
  Protein classification predicting sequence
NIPVLLGLL

SEQ ID NO: 61652 - protein, 6 aa, Artificial sequence
  Protein classification predicting sequence
AILPYD

SEQ ID NO: 61653 - protein, 8 aa, Artificial sequence
  Protein classification predicting sequence
WGINAFDQ

SEQ ID NO: 61654 - protein, 9 aa, Artificial sequence
  Protein classification predicting sequence
RHFIAVSSN

SEQ ID NO: 61655 - protein, 6 aa, Artificial sequence
  Protein classification predicting sequence
IPADFI

SEQ ID NO: 61656 - protein, 11 aa, Artificial sequence
  Protein classification predicting sequence
FDQWGVELGKE

SEQ ID NO: 61657 - protein, 16 aa, Artificial sequence
  Protein classification predicting sequence
LYPGKVGKEFFFTKGH

SEQ ID NO: 61658 - protein, 13 aa, Artificial sequence
  Protein classification predicting sequence
DLAKSRGVEAARE

SEQ ID NO: 61659 - protein, 7 aa, Artificial sequence
  Protein classification predicting sequence
LPYDQYL

SEQ ID NO: 61660 - protein, 6 aa, Artificial sequence
  Protein classification predicting sequence
QLIHQG

SEQ ID NO: 61661 - protein, 6 aa, Artificial sequence
  Protein classification predicting sequence
VSNIDG

SEQ ID NO: 61662 - protein, 6 aa, Artificial sequence
  Protein classification predicting sequence
GYPARA

SEQ ID NO: 61663 - protein, 8 aa, Artificial sequence
  Protein classification predicting sequence
VDGKDVMP

SEQ ID NO: 61664 - protein, 9 aa, Artificial sequence
  Protein classification predicting sequence
DGAHIADTL

SEQ ID NO: 61665 - protein, 6 aa, Artificial sequence
  Protein classification predicting sequence
NFEAFL

SEQ ID NO: 61666 - protein, 6 aa, Artificial sequence
  Protein classification predicting sequence
TPLEKN

SEQ ID NO: 61667 - protein, 7 aa, Artificial sequence
  Protein classification predicting sequence
DQYLHRF

SEQ ID NO: 61668 - protein, 14 aa, Artificial sequence
  Protein classification predicting sequence
NGQHAYHQLLHQGT

SEQ ID NO: 61669 - protein, 13 aa, Artificial sequence
  Protein classification predicting sequence
INSFDQWGVELGK

SEQ ID NO: 61670 - protein, 11 aa, Artificial sequence
  Protein classification predicting sequence
SFDQWGVELGK

SEQ ID NO: 61671 - protein, 12 aa, Artificial sequence
  Protein classification predicting sequence
VNIGIGGSDLGP

SEQ ID NO: 61672 - protein, 6 aa, Artificial sequence
  Protein classification predicting sequence
ETMTNA

SEQ ID NO: 61673 - protein, 6 aa, Artificial sequence
  Protein classification predicting sequence
IGLSLM

SEQ ID NO: 61674 - protein, 19 aa, Artificial sequence
  Protein classification predicting sequence
WGEPGTNGQHAFYQLIHQG

SEQ ID NO: 61675 - protein, 6 aa, Artificial sequence
  Protein classification predicting sequence
IALYEH

SEQ ID NO: 61676 - protein, 7 aa, Artificial sequence
  Protein classification predicting sequence
SMMVEFD

SEQ ID NO: 61677 - protein, 12 aa, Artificial sequence
  Protein classification predicting sequence
EFDGLLLDYSRQ

SEQ ID NO: 61678 - protein, 9 aa, Artificial sequence
  Protein classification predicting sequence
LRFLANVDP

SEQ ID NO: 61679 - protein, 15 aa, Artificial sequence
  Protein classification predicting sequence
VEKFLKGASSIDQHF

SEQ ID NO: 61680 - protein, 6 aa, Artificial sequence
  Protein classification predicting sequence
SIDQHF

SEQ ID NO: 61681 - protein, 7 aa, Artificial sequence
  Protein classification predicting sequence
WNVSFLG

SEQ ID NO: 61682 - protein, 13 aa, Artificial sequence
  Protein classification predicting sequence
KSQQPVYLKGEVV

SEQ ID NO: 61683 - protein, 21 aa, Artificial sequence
  Protein classification predicting sequence
NHDELMSNFFAQPDALAYGKT

SEQ ID NO: 61684 - protein, 7 aa, Artificial sequence
  Protein classification predicting sequence
GNRPSLS

SEQ ID NO: 61685 - protein, 19 aa, Artificial sequence
  Protein classification predicting sequence
LTAYNVGQLLAIYEHRVAV

SEQ ID NO: 61686 - protein, 13 aa, Artificial sequence
  Protein classification predicting sequence
GQLLAIYEHRVAV

SEQ ID NO: 61687 - protein, 7 aa, Artificial sequence
  Protein classification predicting sequence
QVRKQLH

SEQ ID NO: 61688 - protein, 6 aa, Artificial sequence
  Protein classification predicting sequence
TSDVPA

SEQ ID NO: 61689 - protein, 6 aa, Artificial sequence
  Protein classification predicting sequence
YGKEEA

SEQ ID NO: 61690 - protein, 7 aa, Artificial sequence
  Protein classification predicting sequence
NIAYQYA

SEQ ID NO: 61691 - protein, 14 aa, Artificial sequence
  Protein classification predicting sequence
EYPEIVFVGNHLSS

SEQ ID NO: 61692 - protein, 18 aa, Artificial sequence
  Protein classification predicting sequence
KDFSVNVISKSGTTTEPA

SEQ ID NO: 61693 - protein, 14 aa, Artificial sequence
  Protein classification predicting sequence
MIGAAKAREELSSD

SEQ ID NO: 61694 - protein, 11 aa, Artificial sequence
  Protein classification predicting sequence
DLDGLNYLAGK

SEQ ID NO: 61695 - protein, 11 aa, Artificial sequence
  Protein classification predicting sequence
LLAHTDGGVPN

SEQ ID NO: 61696 - protein, 13 aa, Artificial sequence
  Protein classification predicting sequence
NMFALLGKPGFED

SEQ ID NO: 61697 - protein, 22 aa, Artificial sequence
  Protein classification predicting sequence
DLPVDYDKEEFSRIVEASKRIK

SEQ ID NO: 61698 - protein, 29 aa, Artificial sequence
  Protein classification predicting sequence
NSDVLVVIGIGGSYLGARAAIEMLTSSFR

SEQ ID NO: 61699 - protein, 30 aa, Artificial sequence
  Protein classification predicting sequence
KDFSVNVISKSGTTTEPAVAFRLFKQLVEE

SEQ ID NO: 61700 - protein, 28 aa, Artificial sequence
  Protein classification predicting sequence
VPDDVGGRYSVLTAVGLLPIATAGINIE

SEQ ID NO: 61701 - protein, 25 aa, Artificial sequence
  Protein classification predicting sequence
KGYTTEMLINYEPSMQYFNEWWKQL

SEQ ID NO: 61702 - protein, 47 aa, Artificial sequence
  Protein classification predicting sequence
GESEGKDFKGIYPSSANYTTDLHSLGQYVQEGRRFLFETVVKVNHPK

SEQ ID NO: 61703 - protein, 23 aa, Artificial sequence
  Protein classification predicting sequence
IDEVNTKAFEGTLLAHTDGGVPN

SEQ ID NO: 61704 - protein, 58 aa, Artificial sequence
  Protein classification predicting sequence
VVNIPQLDEETFGYVVYFFELACAMSGYQLGVNPFNQPGVEAYKQNMFALLGKPGFED

SEQ ID NO: 61705 - protein, 7 aa, Artificial sequence
  Protein classification predicting sequence
GSDFLGW

SEQ ID NO: 61706 - protein, 7 aa, Artificial sequence
  Protein classification predicting sequence
RNLFETV

SEQ ID NO: 61707 - protein, 42 aa, Artificial sequence
  Protein classification predicting sequence
EDLDGLGYLQGKDVDFVNKKATDGVLLAHTDGGVPNMFVTLP

SEQ ID NO: 61708 - protein, 13 aa, Artificial sequence
  Protein classification predicting sequence
TLGYTIYFFELAI

SEQ ID NO: 61709 - protein, 8 aa, Artificial sequence
  Protein classification predicting sequence
HIKFDYSK

SEQ ID NO: 61710 - protein, 11 aa, Artificial sequence
  Protein classification predicting sequence
KGAVKVEADAN

SEQ ID NO: 61711 - protein, 14 aa, Artificial sequence
  Protein classification predicting sequence
GVNPFDQPGVEAYK

SEQ ID NO: 61712 - protein, 9 aa, Artificial sequence
  Protein classification predicting sequence
YDKEEFARI

SEQ ID NO: 61713 - protein, 14 aa, Artificial sequence
  Protein classification predicting sequence
VLVVIGIGGSYLGA

SEQ ID NO: 61714 - protein, 26 aa, Artificial sequence
  Protein classification predicting sequence
ERKAPQILYAGNSISSTYLADLVEYV

SEQ ID NO: 61715 - protein, 15 aa, Artificial sequence
  Protein classification predicting sequence
FTLGYTIYFFELAIA

SEQ ID NO: 61716 - protein, 7 aa, Artificial sequence
  Protein classification predicting sequence
NPFDQPG

SEQ ID NO: 61717 - protein, 12 aa, Artificial sequence
  Protein classification predicting sequence
NPFDQPGVEAYK

SEQ ID NO: 61718 - protein, 5 aa, Artificial sequence
  Protein classification predicting sequence
DFLGW

SEQ ID NO: 61719 - protein, 7 aa, Artificial sequence
  Protein classification predicting sequence
DLPENYD

SEQ ID NO: 61720 - protein, 7 aa, Artificial sequence
  Protein classification predicting sequence
HFANLQT

SEQ ID NO: 61721 - protein, 6 aa, Artificial sequence
  Protein classification predicting sequence
AFRLFK

SEQ ID NO: 61722 - protein, 11 aa, Artificial sequence
  Protein classification predicting sequence
ALMEGANAARK

SEQ ID NO: 61723 - protein, 8 aa, Artificial sequence
  Protein classification predicting sequence
GESEGKDQ

SEQ ID NO: 61724 - protein, 37 aa, Artificial sequence
  Protein classification predicting sequence
IPELAEDLDGLGYLQGKDVDFVNKKATDGVLLAHTDG

SEQ ID NO: 61725 - protein, 32 aa, Artificial sequence
  Protein classification predicting sequence
EDLDGLGYLQGKDVDFVNKKATDGVLLAHTDG

SEQ ID NO: 61726 - protein, 8 aa, Artificial sequence
  Protein classification predicting sequence
GALIALYE

SEQ ID NO: 61727 - protein, 6 aa, Artificial sequence
  Protein classification predicting sequence
LDISRM

SEQ ID NO: 61728 - protein, 7 aa, Artificial sequence
  Protein classification predicting sequence
VGHYWLR

SEQ ID NO: 61729 - protein, 11 aa, Artificial sequence
  Protein classification predicting sequence
VYVPPYWAHRT

SEQ ID NO: 61730 - protein, 6 aa, Artificial sequence
  Protein classification predicting sequence
LVYFFE

SEQ ID NO: 61731 - protein, 7 aa, Artificial sequence
  Protein classification predicting sequence
EAFLKGA

SEQ ID NO: 61732 - protein, 9 aa, Artificial sequence
  Protein classification predicting sequence
AILPYSQAL

SEQ ID NO: 61733 - protein, 10 aa, Artificial sequence
  Protein classification predicting sequence
QQLDMESNGK

SEQ ID NO: 61734 - protein, 14 aa, Artificial sequence
  Protein classification predicting sequence
FGEPGTNGQHSFYQ

SEQ ID NO: 61735 - protein, 6 aa, Artificial sequence
  Protein classification predicting sequence
NTTENR

SEQ ID NO: 61736 - protein, 6 aa, Artificial sequence
  Protein classification predicting sequence
TEALKP

SEQ ID NO: 61737 - protein, 6 aa, Artificial sequence
  Protein classification predicting sequence
NFVELL

SEQ ID NO: 61738 - protein, 5 aa, Artificial sequence
  Protein classification predicting sequence
VNNHD

SEQ ID NO: 61739 - protein, 6 aa, Artificial sequence
  Protein classification predicting sequence
DYSKNL

SEQ ID NO: 61740 - protein, 8 aa, Artificial sequence
  Protein classification predicting sequence
GEAINQTE

SEQ ID NO: 61741 - protein, 6 aa, Artificial sequence
  Protein classification predicting sequence
PYKNHL

SEQ ID NO: 61742 - protein, 12 aa, Artificial sequence
  Protein classification predicting sequence
ARDWFLKAAGDE

SEQ ID NO: 61743 - protein, 6 aa, Artificial sequence
  Protein classification predicting sequence
EFGIDT

SEQ ID NO: 61744 - protein, 7 aa, Artificial sequence
  Protein classification predicting sequence
DNFVELL

SEQ ID NO: 61745 - protein, 9 aa, Artificial sequence
  Protein classification predicting sequence
EAILPYDQY

SEQ ID NO: 61746 - protein, 6 aa, Artificial sequence
  Protein classification predicting sequence
DHHQKL

SEQ ID NO: 61747 - protein, 15 aa, Artificial sequence
  Protein classification predicting sequence
PFKVFEGNRPTNSIL

SEQ ID NO: 61748 - protein, 16 aa, Artificial sequence
  Protein classification predicting sequence
SHDSSTNGLINAFKAF

SEQ ID NO: 61749 - protein, 6 aa, Artificial sequence
  Protein classification predicting sequence
ARDWFL

SEQ ID NO: 61750 - protein, 6 aa, Artificial sequence
  Protein classification predicting sequence
INPTQT

SEQ ID NO: 61751 - protein, 6 aa, Artificial sequence
  Protein classification predicting sequence
YDQYMH

SEQ ID NO: 61752 - protein, 6 aa, Artificial sequence
  Protein classification predicting sequence
GTNSQH

SEQ ID NO: 61753 - protein, 8 aa, Artificial sequence
  Protein classification predicting sequence
SDHHQKLL

SEQ ID NO: 61754 - protein, 6 aa, Artificial sequence
  Protein classification predicting sequence
NFFAQT

SEQ ID NO: 61755 - protein, 6 aa, Artificial sequence
  Protein classification predicting sequence
YEHKIF

SEQ ID NO: 61756 - protein, 19 aa, Artificial sequence
  Protein classification predicting sequence
QYARQVGPLYFNFARQKYD

SEQ ID NO: 61757 - protein, 14 aa, Artificial sequence
  Protein classification predicting sequence
SVGIGGSDLGPRLV

SEQ ID NO: 61758 - protein, 15 aa, Artificial sequence
  Protein classification predicting sequence
RFRVHFVSNVDGAAM

SEQ ID NO: 61759 - protein, 20 aa, Artificial sequence
  Protein classification predicting sequence
RTAGILISKTFGTQETLLNG

SEQ ID NO: 61760 - protein, 19 aa, Artificial sequence
  Protein classification predicting sequence
PLEENVAVLHGLTAVWNRN

SEQ ID NO: 61761 - protein, 12 aa, Artificial sequence
  Protein classification predicting sequence
ILLDALTPQALG

SEQ ID NO: 61762 - protein, 19 aa, Artificial sequence
  Protein classification predicting sequence
VTDIVSVGIGGSDLGPRLV

SEQ ID NO: 61763 - protein, 11 aa, Artificial sequence
  Protein classification predicting sequence
WLGGSERLYAV

SEQ ID NO: 61764 - protein, 7 aa, Artificial sequence
  Protein classification predicting sequence
ANPERAA

SEQ ID NO: 61765 - protein, 9 aa, Artificial sequence
  Protein classification predicting sequence
YDQRLALLP

SEQ ID NO: 61766 - protein, 12 aa, Artificial sequence
  Protein classification predicting sequence
FSATFDDQMLVD

SEQ ID NO: 61767 - protein, 34 aa, Artificial sequence
  Protein classification predicting sequence
KLQDLAKETDLAGAIKSMFSGEKINRTEDRAVLH

SEQ ID NO: 61768 - protein, 23 aa, Artificial sequence
  Protein classification predicting sequence
HVAKHFAALSTNAKAVGEFGIDT

SEQ ID NO: 61769 - protein, 28 aa, Artificial sequence
  Protein classification predicting sequence
YQTGPIIWGEPGTNGQHAFYQLIHQGTK

SEQ ID NO: 61770 - protein, 44 aa, Artificial sequence
  Protein classification predicting sequence
PFKVFEGNRPTNSILLREITPFSLGALIALYEHKIFTQGVILNI

SEQ ID NO: 61771 - protein, 6 aa, Artificial sequence
  Protein classification predicting sequence
GSIGED

SEQ ID NO: 61772 - protein, 8 aa, Artificial sequence
  Protein classification predicting sequence
VIHFAGLK

SEQ ID NO: 61773 - protein, 14 aa, Artificial sequence
  Protein classification predicting sequence
VIHFAGLKAVGESV

SEQ ID NO: 61774 - protein, 6 aa, Artificial sequence
  Protein classification predicting sequence
GAHPSG

SEQ ID NO: 61775 - protein, 15 aa, Artificial sequence
  Protein classification predicting sequence
DGTGVRDYIHVVDLA

SEQ ID NO: 61776 - protein, 12 aa, Artificial sequence
  Protein classification predicting sequence
YNLGTGTGYSVL

SEQ ID NO: 61777 - protein, 7 aa, Artificial sequence
  Protein classification predicting sequence
TFVEGDI

SEQ ID NO: 61778 - protein, 8 aa, Artificial sequence
  Protein classification predicting sequence
ILDNLCNS

SEQ ID NO: 61779 - protein, 9 aa, Artificial sequence
  Protein classification predicting sequence
FSSSATVYG

SEQ ID NO: 61780 - protein, 11 aa, Artificial sequence
  Protein classification predicting sequence
VIHFAGLKAVG

SEQ ID NO: 61781 - protein, 10 aa, Artificial sequence
  Protein classification predicting sequence
LRYFNPVGAH

SEQ ID NO: 61782 - protein, 6 aa, Artificial sequence
  Protein classification predicting sequence
GIPNNL

SEQ ID NO: 61783 - protein, 7 aa, Artificial sequence
  Protein classification predicting sequence
PYIAQVA

SEQ ID NO: 61784 - protein, 20 aa, Artificial sequence
  Protein classification predicting sequence
DYPTEDGTGVRDYIHVMDLA

SEQ ID NO: 61785 - protein, 10 aa, Artificial sequence
  Protein classification predicting sequence
RDYIHVMDLA

SEQ ID NO: 61786 - protein, 7 aa, Artificial sequence
  Protein classification predicting sequence
AFEKASG

SEQ ID NO: 61787 - protein, 10 aa, Artificial sequence
  Protein classification predicting sequence
VFSSSATVYG

SEQ ID NO: 61788 - protein, 6 aa, Artificial sequence
  Protein classification predicting sequence
MVEQIL

SEQ ID NO: 61789 - protein, 9 aa, Artificial sequence
  Protein classification predicting sequence
GGAGYIGSH

SEQ ID NO: 61790 - protein, 7 aa, Artificial sequence
  Protein classification predicting sequence
LLRYFNP

SEQ ID NO: 61791 - protein, 11 aa, Artificial sequence
  Protein classification predicting sequence
TGGTGFIGSHT

SEQ ID NO: 61792 - protein, 14 aa, Artificial sequence
  Protein classification predicting sequence
GSLVLAEEMARAGV

SEQ ID NO: 61793 - protein, 8 aa, Artificial sequence
  Protein classification predicting sequence
KVPYTEDM

SEQ ID NO: 61794 - protein, 15 aa, Artificial sequence
  Protein classification predicting sequence
SVLEIIRAFEAASGL

SEQ ID NO: 61795 - protein, 11 aa, Artificial sequence
  Protein classification predicting sequence
QMMEDSWRWVS

SEQ ID NO: 61796 - protein, 12 aa, Artificial sequence
  Protein classification predicting sequence
VIHFAGLKAVGE

SEQ ID NO: 61797 - protein, 6 aa, Artificial sequence
  Protein classification predicting sequence
DTWHWQ

SEQ ID NO: 61798 - protein, 7 aa, Artificial sequence
  Protein classification predicting sequence
YFNVAGA

SEQ ID NO: 61799 - protein, 11 aa, Artificial sequence
  Protein classification predicting sequence
GGTTNPYGTSK

SEQ ID NO: 61800 - protein, 6 aa, Artificial sequence
  Protein classification predicting sequence
PNNLLP

SEQ ID NO: 61801 - protein, 18 aa, Artificial sequence
  Protein classification predicting sequence
VLVTGGSGYIGSHTCVQL

SEQ ID NO: 61802 - protein, 10 aa, Artificial sequence
  Protein classification predicting sequence
IPYVESFPTG

SEQ ID NO: 61803 - protein, 8 aa, Artificial sequence
  Protein classification predicting sequence
GIPNNLMP

SEQ ID NO: 61804 - protein, 9 aa, Artificial sequence
  Protein classification predicting sequence
AFSKACGKP

SEQ ID NO: 61805 - protein, 7 aa, Artificial sequence
  Protein classification predicting sequence
GDQGFPG

SEQ ID NO: 61806 - protein, 11 aa, Artificial sequence
  Protein classification predicting sequence
VNLTNHSYFNL

SEQ ID NO: 61807 - protein, 12 aa, Artificial sequence
  Protein classification predicting sequence
YPKHSGFCLETQ

SEQ ID NO: 61808 - protein, 8 aa, Artificial sequence
  Protein classification predicting sequence
WPDAVNQP

SEQ ID NO: 61809 - protein, 7 aa, Artificial sequence
  Protein classification predicting sequence
LRPGEEY

SEQ ID NO: 61810 - protein, 16 aa, Artificial sequence
  Protein classification predicting sequence
TPVNLTNHSYFNLAGQ

SEQ ID NO: 61811 - protein, 13 aa, Artificial sequence
  Protein classification predicting sequence
VDIISWGCTITAL

SEQ ID NO: 61812 - protein, 6 aa, Artificial sequence
  Protein classification predicting sequence
VKDRQG

SEQ ID NO: 61813 - protein, 9 aa, Artificial sequence
  Protein classification predicting sequence
GFDKVLWTP

SEQ ID NO: 61814 - protein, 13 aa, Artificial sequence
  Protein classification predicting sequence
GTAFDLRKPVELG

SEQ ID NO: 61815 - protein, 9 aa, Artificial sequence
  Protein classification predicting sequence
GFDHNFCLK

SEQ ID NO: 61816 - protein, 15 aa, Artificial sequence
  Protein classification predicting sequence
QFYTGNFLDGTLKGK

SEQ ID NO: 61817 - protein, 17 aa, Artificial sequence
  Protein classification predicting sequence
GTAFDLRKPVELGKHLQ

SEQ ID NO: 61818 - protein, 6 aa, Artificial sequence
  Protein classification predicting sequence
VDGDQI

SEQ ID NO: 61819 - protein, 7 aa, Artificial sequence
  Protein classification predicting sequence
DNGIKFF

SEQ ID NO: 61820 - protein, 7 aa, Artificial sequence
  Protein classification predicting sequence
KYFGTDG

SEQ ID NO: 61821 - protein, 8 aa, Artificial sequence
  Protein classification predicting sequence
GGEQSGHI

SEQ ID NO: 61822 - protein, 8 aa, Artificial sequence
  Protein classification predicting sequence
LKLGWAAG

SEQ ID NO: 61823 - protein, 10 aa, Artificial sequence
  Protein classification predicting sequence
GKDTRISGYM

SEQ ID NO: 61824 - protein, 13 aa, Artificial sequence
  Protein classification predicting sequence
AEAGIVISASHNP

SEQ ID NO: 61825 - protein, 6 aa, Artificial sequence
  Protein classification predicting sequence
VGDRYV

SEQ ID NO: 61826 - protein, 6 aa, Artificial sequence
  Protein classification predicting sequence
SGTEPL

SEQ ID NO: 61827 - protein, 12 aa, Artificial sequence
  Protein classification predicting sequence
SGTEPLVRVMVE

SEQ ID NO: 61828 - protein, 10 aa, Artificial sequence
  Protein classification predicting sequence
ISTPGVAYLT

SEQ ID NO: 61829 - protein, 29 aa, Artificial sequence
  Protein classification predicting sequence
LGVMISASHNPVADNGIKFFGSDGFKLSD

SEQ ID NO: 61830 - protein, 61 aa, Artificial sequence
  Protein classification predicting sequence
DIVHYSDYFEGAQKYLSYLKSTVDVNFEGLKIVLDGANGSTSSLAPFLFGDLEADTETIGC

SEQ ID NO: 61831 - protein, 8 aa, Artificial sequence
  Protein classification predicting sequence
PDGYNINE

SEQ ID NO: 61832 - protein, 40 aa, Artificial sequence
  Protein classification predicting sequence
ETESDFGLAFDGDGDRIIAVDENGQIVDGDQIMFIIGQEM

SEQ ID NO: 61833 - protein, 17 aa, Artificial sequence
  Protein classification predicting sequence
MIVSTVMSNLGFYKALE

SEQ ID NO: 61834 - protein, 31 aa, Artificial sequence
  Protein classification predicting sequence
SNKTKVGDRYVVEEMRRGNYNLGGEQSGHIV

SEQ ID NO: 61835 - protein, 13 aa, Artificial sequence
  Protein classification predicting sequence
MDYNTTGDGLLTG

SEQ ID NO: 61836 - protein, 23 aa, Artificial sequence
  Protein classification predicting sequence
QMKKYPQSLINVRVTDKYRVEEN

SEQ ID NO: 61837 - protein, 28 aa, Artificial sequence
  Protein classification predicting sequence
EMNGEGRILVRPSGTEPLVRVMVEAATD

SEQ ID NO: 61838 - protein, 18 aa, Artificial sequence
  Protein classification predicting sequence
EPFIFLAIYPADAGHDYG

SEQ ID NO: 61839 - protein, 12 aa, Artificial sequence
  Protein classification predicting sequence
GEVKVVDNPRWK

SEQ ID NO: 61840 - protein, 7 aa, Artificial sequence
  Protein classification predicting sequence
PIRHYYL

SEQ ID NO: 61841 - protein, 7 aa, Artificial sequence
  Protein classification predicting sequence
ENRFTGW

SEQ ID NO: 61842 - protein, 10 aa, Artificial sequence
  Protein classification predicting sequence
LIRHGQSLWN

SEQ ID NO: 61843 - protein, 9 aa, Artificial sequence
  Protein classification predicting sequence
LQGLDKAET

SEQ ID NO: 61844 - protein, 11 aa, Artificial sequence
  Protein classification predicting sequence
VLVAAHGNSLR

SEQ ID NO: 61845 - protein, 7 aa, Artificial sequence
  Protein classification predicting sequence
AHGNSLR

SEQ ID NO: 61846 - protein, 12 aa, Artificial sequence
  Protein classification predicting sequence
ENRFTGWTDVDL

SEQ ID NO: 61847 - protein, 7 aa, Artificial sequence
  Protein classification predicting sequence
LNERHYG

SEQ ID NO: 61848 - protein, 14 aa, Artificial sequence
  Protein classification predicting sequence
QVHIWRRSYDVLPP

SEQ ID NO: 61849 - protein, 9 aa, Artificial sequence
  Protein classification predicting sequence
DRRYADLDP

SEQ ID NO: 61850 - protein, 9 aa, Artificial sequence
  Protein classification predicting sequence
ENLKVTLER

SEQ ID NO: 61851 - protein, 8 aa, Artificial sequence
  Protein classification predicting sequence
TSLLKRAI

SEQ ID NO: 61852 - protein, 6 aa, Artificial sequence
  Protein classification predicting sequence
WRRSYD

SEQ ID NO: 61853 - protein, 6 aa, Artificial sequence
  Protein classification predicting sequence
WVPVHK

SEQ ID NO: 61854 - protein, 8 aa, Artificial sequence
  Protein classification predicting sequence
RHGQSEWN

SEQ ID NO: 61855 - protein, 10 aa, Artificial sequence
  Protein classification predicting sequence
YGDLSGLNKD

SEQ ID NO: 61856 - protein, 10 aa, Artificial sequence
  Protein classification predicting sequence
AAHGNSLRAL

SEQ ID NO: 61857 - protein, 8 aa, Artificial sequence
  Protein classification predicting sequence
KLVLIRHG

SEQ ID NO: 61858 - protein, 8 aa, Artificial sequence
  Protein classification predicting sequence
DVDLSEKG

SEQ ID NO: 61859 - protein, 7 aa, Artificial sequence
  Protein classification predicting sequence
FTGWVDV

SEQ ID NO: 61860 - protein, 8 aa, Artificial sequence
  Protein classification predicting sequence
TSLLRRAI

SEQ ID NO: 61861 - protein, 13 aa, Artificial sequence
  Protein classification predicting sequence
WRLNERHYGALQG

SEQ ID NO: 61862 - protein, 6 aa, Artificial sequence
  Protein classification predicting sequence
LQGKNK

SEQ ID NO: 61863 - protein, 5 aa, Artificial sequence
  Protein classification predicting sequence
WRRSY

SEQ ID NO: 61864 - protein, 8 aa, Artificial sequence
  Protein classification predicting sequence
AHGNSLRA

SEQ ID NO: 61865 - protein, 6 aa, Artificial sequence
  Protein classification predicting sequence
VLIRHG

SEQ ID NO: 61866 - protein, 6 aa, Artificial sequence
  Protein classification predicting sequence
NRFTGW

SEQ ID NO: 61867 - protein, 8 aa, Artificial sequence
  Protein classification predicting sequence
AHGNSIRA

SEQ ID NO: 61868 - protein, 7 aa, Artificial sequence
  Protein classification predicting sequence
ETAAKYG

SEQ ID NO: 61869 - protein, 6 aa, Artificial sequence
  Protein classification predicting sequence
TECLKD

SEQ ID NO: 61870 - protein, 6 aa, Artificial sequence
  Protein classification predicting sequence
RVIPYW

SEQ ID NO: 61871 - protein, 8 aa, Artificial sequence
  Protein classification predicting sequence
PIKHYYLG

SEQ ID NO: 61872 - protein, 7 aa, Artificial sequence
  Protein classification predicting sequence
LVLVRHG

SEQ ID NO: 61873 - protein, 19 aa, Artificial sequence
  Protein classification predicting sequence
ALNERDYGDLSGLNKDDAR

SEQ ID NO: 61874 - protein, 7 aa, Artificial sequence
  Protein classification predicting sequence
IWRRSYD

SEQ ID NO: 61875 - protein, 8 aa, Artificial sequence
  Protein classification predicting sequence
GLNKDDAR

SEQ ID NO: 61876 - protein, 6 aa, Artificial sequence
  Protein classification predicting sequence
GLNKDD

SEQ ID NO: 61877 - protein, 6 aa, Artificial sequence
  Protein classification predicting sequence
RVLPYW

SEQ ID NO: 61878 - protein, 7 aa, Artificial sequence
  Protein classification predicting sequence
LVLLRHG

SEQ ID NO: 61879 - protein, 9 aa, Artificial sequence
  Protein classification predicting sequence
LPIDCIFTS

SEQ ID NO: 61880 - protein, 12 aa, Artificial sequence
  Protein classification predicting sequence
GWVDIPLSQQGI

SEQ ID NO: 61881 - protein, 8 aa, Artificial sequence
  Protein classification predicting sequence
RHGESQWN

SEQ ID NO: 61882 - protein, 7 aa, Artificial sequence
  Protein classification predicting sequence
LKDTVAR

SEQ ID NO: 61883 - protein, 9 aa, Artificial sequence
  Protein classification predicting sequence
AHGNSLRAL

SEQ ID NO: 61884 - protein, 9 aa, Artificial sequence
  Protein classification predicting sequence
VLSLELPTG

SEQ ID NO: 61885 - protein, 7 aa, Artificial sequence
  Protein classification predicting sequence
LLRHGQS

SEQ ID NO: 61886 - protein, 6 aa, Artificial sequence
  Protein classification predicting sequence
KYGDEQ

SEQ ID NO: 61887 - protein, 10 aa, Artificial sequence
  Protein classification predicting sequence
TSVLTRAIKT

SEQ ID NO: 61888 - protein, 7 aa, Artificial sequence
  Protein classification predicting sequence
IAPALKD

SEQ ID NO: 61889 - protein, 11 aa, Artificial sequence
  Protein classification predicting sequence
KSWRLNERHYG

SEQ ID NO: 61890 - protein, 8 aa, Artificial sequence
  Protein classification predicting sequence
DVGLTDKG

SEQ ID NO: 61891 - protein, 6 aa, Artificial sequence
  Protein classification predicting sequence
AFTSVL

SEQ ID NO: 61892 - protein, 13 aa, Artificial sequence
  Protein classification predicting sequence
AHGNSLRALAKHI

SEQ ID NO: 61893 - protein, 11 aa, Artificial sequence
  Protein classification predicting sequence
LPFWEDQIAPA

SEQ ID NO: 61894 - protein, 13 aa, Artificial sequence
  Protein classification predicting sequence
KLVFARHGESEWN

SEQ ID NO: 61895 - protein, 8 aa, Artificial sequence
  Protein classification predicting sequence
RHGESEWN

SEQ ID NO: 61896 - protein, 6 aa, Artificial sequence
  Protein classification predicting sequence
DDEIMD

SEQ ID NO: 61897 - protein, 6 aa, Artificial sequence
  Protein classification predicting sequence
NSLRAL

SEQ ID NO: 61898 - protein, 7 aa, Artificial sequence
  Protein classification predicting sequence
KHIEGIS

SEQ ID NO: 61899 - protein, 7 aa, Artificial sequence
  Protein classification predicting sequence
SLRALVK

SEQ ID NO: 61900 - protein, 25 aa, Artificial sequence
  Protein classification predicting sequence
LWIPVRRSWRLNERHYGALQGLDKA

SEQ ID NO: 61901 - protein, 8 aa, Artificial sequence
  Protein classification predicting sequence
TKARYGEE

SEQ ID NO: 61902 - protein, 16 aa, Artificial sequence
  Protein classification predicting sequence
FMAWRRSYDTPPPPIE

SEQ ID NO: 61903 - protein, 15 aa, Artificial sequence
  Protein classification predicting sequence
DIGGGPLTECLADVV

SEQ ID NO: 61904 - protein, 19 aa, Artificial sequence
  Protein classification predicting sequence
TVLIVAHGNSLRALVKHLD

SEQ ID NO: 61905 - protein, 14 aa, Artificial sequence
  Protein classification predicting sequence
AHGNSLRALVKHLD

SEQ ID NO: 61906 - protein, 18 aa, Artificial sequence
  Protein classification predicting sequence
LYTSLLRRAITTAHLALD

SEQ ID NO: 61907 - protein, 9 aa, Artificial sequence
  Protein classification predicting sequence
SAHKDRRYA

SEQ ID NO: 61908 - protein, 13 aa, Artificial sequence
  Protein classification predicting sequence
VLVAAHGNSLRAL

SEQ ID NO: 61909 - protein, 6 aa, Artificial sequence
  Protein classification predicting sequence
NLFTGW

SEQ ID NO: 61910 - protein, 24 aa, Artificial sequence
  Protein classification predicting sequence
EFDIAFTSVLTRAIKTCNIVLEES

SEQ ID NO: 61911 - protein, 7 aa, Artificial sequence
  Protein classification predicting sequence
PDAENLK

SEQ ID NO: 61912 - protein, 18 aa, Artificial sequence
  Protein classification predicting sequence
FDFAYTSVLKRAIHTLWN

SEQ ID NO: 61913 - protein, 21 aa, Artificial sequence
  Protein classification predicting sequence
WLPVEKSWKLNERHYGALQGL

SEQ ID NO: 61914 - protein, 12 aa, Artificial sequence
  Protein classification predicting sequence
LNERHYGALQGL

SEQ ID NO: 61915 - protein, 7 aa, Artificial sequence
  Protein classification predicting sequence
LTKDDER

SEQ ID NO: 61916 - protein, 7 aa, Artificial sequence
  Protein classification predicting sequence
PYWNETI

SEQ ID NO: 61917 - protein, 7 aa, Artificial sequence
  Protein classification predicting sequence
SDDDIVG

SEQ ID NO: 61918 - protein, 6 aa, Artificial sequence
  Protein classification predicting sequence
PPGGES

SEQ ID NO: 61919 - protein, 7 aa, Artificial sequence
  Protein classification predicting sequence
KNLFTGW

SEQ ID NO: 61920 - protein, 7 aa, Artificial sequence
  Protein classification predicting sequence
GLKFDIA

SEQ ID NO: 61921 - protein, 24 aa, Artificial sequence
  Protein classification predicting sequence
TIRDQALNERDYGDLSGLNKDDAR

SEQ ID NO: 61922 - protein, 7 aa, Artificial sequence
  Protein classification predicting sequence
PPGGESL

SEQ ID NO: 61923 - protein, 11 aa, Artificial sequence
  Protein classification predicting sequence
DTGARVWPYYL

SEQ ID NO: 61924 - protein, 23 aa, Artificial sequence
  Protein classification predicting sequence
EILELNIPTGVPLVYEFDENFKP

SEQ ID NO: 61925 - protein, 33 aa, Artificial sequence
  Protein classification predicting sequence
TILPRMKSGERVIIAAHGNSLRALVKYLDNMSE

SEQ ID NO: 61926 - protein, 6 aa, Artificial sequence
  Protein classification predicting sequence
DIAFTS

SEQ ID NO: 61927 - protein, 10 aa, Artificial sequence
  Protein classification predicting sequence
AFTSLLTRAL

SEQ ID NO: 61928 - protein, 30 aa, Artificial sequence
  Protein classification predicting sequence
QQWIPVYKSWRLNERHYGGLQGLNKDDARK

SEQ ID NO: 61929 - protein, 8 aa, Artificial sequence
  Protein classification predicting sequence
EEQREAYL

SEQ ID NO: 61930 - protein, 9 aa, Artificial sequence
  Protein classification predicting sequence
PFWTDHISQ

SEQ ID NO: 61931 - protein, 19 aa, Artificial sequence
  Protein classification predicting sequence
TVLVSAHGNSIRALIKYLE

SEQ ID NO: 61932 - protein, 17 aa, Artificial sequence
  Protein classification predicting sequence
YEIKTGAPLVYELTDDL

SEQ ID NO: 61933 - protein, 26 aa, Artificial sequence
  Protein classification predicting sequence
LSDDEIMDVEIPNFPPLVFEFDEKLN

SEQ ID NO: 61934 - protein, 12 aa, Artificial sequence
  Protein classification predicting sequence
SEWNAKNLFTGW

SEQ ID NO: 61935 - protein, 6 aa, Artificial sequence
  Protein classification predicting sequence
KRAIRT

SEQ ID NO: 61936 - protein, 8 aa, Artificial sequence
  Protein classification predicting sequence
ADRHWIPV

SEQ ID NO: 61937 - protein, 6 aa, Artificial sequence
  Protein classification predicting sequence
EFGEEQ

SEQ ID NO: 61938 - protein, 11 aa, Artificial sequence
  Protein classification predicting sequence
RAIKTTNLALE

SEQ ID NO: 61939 - protein, 13 aa, Artificial sequence
  Protein classification predicting sequence
LTGKNKAEAAEQF

SEQ ID NO: 61940 - protein, 16 aa, Artificial sequence
  Protein classification predicting sequence
DEQVHIWRRSYDVLPP

SEQ ID NO: 61941 - protein, 14 aa, Artificial sequence
  Protein classification predicting sequence
IPDAENLKVTLERA

SEQ ID NO: 61942 - protein, 22 aa, Artificial sequence
  Protein classification predicting sequence
DGKNVFVGAHGNSIRALVKHIK

SEQ ID NO: 61943 - protein, 20 aa, Artificial sequence
  Protein classification predicting sequence
LSDDEIMDVEIPNFPPLVFE

SEQ ID NO: 61944 - protein, 60 aa, Artificial sequence
  Protein classification predicting sequence
DRRYASLDDSVIPDAENLKVTLERALPFWEDKIAPALKDGKNVFVGAHGNSIRALVKHIK

SEQ ID NO: 61945 - protein, 8 aa, Artificial sequence
  Protein classification predicting sequence
TSVLKRAI

SEQ ID NO: 61946 - protein, 6 aa, Artificial sequence
  Protein classification predicting sequence
PVHKSW

SEQ ID NO: 61947 - protein, 5 aa, Artificial sequence
  Protein classification predicting sequence
RFTGW

SEQ ID NO: 61948 - protein, 6 aa, Artificial sequence
  Protein classification predicting sequence
FTGWVD

SEQ ID NO: 61949 - protein, 10 aa, Artificial sequence
  Protein classification predicting sequence
TAAKHGEEQV

SEQ ID NO: 61950 - protein, 7 aa, Artificial sequence
  Protein classification predicting sequence
TLERVLP

SEQ ID NO: 61951 - protein, 11 aa, Artificial sequence
  Protein classification predicting sequence
SEAKAAGKLLK

SEQ ID NO: 61952 - protein, 10 aa, Artificial sequence
  Protein classification predicting sequence
LDELDQAWLP

SEQ ID NO: 61953 - protein, 19 aa, Artificial sequence
  Protein classification predicting sequence
ETAEKYGDEQVKQWRRGFA

SEQ ID NO: 61954 - protein, 10 aa, Artificial sequence
  Protein classification predicting sequence
WNLENRFTGW

SEQ ID NO: 61955 - protein, 16 aa, Artificial sequence
  Protein classification predicting sequence
EFDIAFTSVLTRAIKT

SEQ ID NO: 61956 - protein, 12 aa, Artificial sequence
  Protein classification predicting sequence
AFTSVLTRAIKT

SEQ ID NO: 61957 - protein, 6 aa, Artificial sequence
  Protein classification predicting sequence
PLVYEL

SEQ ID NO: 61958 - protein, 6 aa, Artificial sequence
  Protein classification predicting sequence
LIILDG

SEQ ID NO: 61959 - protein, 6 aa, Artificial sequence
  Protein classification predicting sequence
ILDGWG

SEQ ID NO: 61960 - protein, 5 aa, Artificial sequence
  Protein classification predicting sequence
MGNSE

SEQ ID NO: 61961 - protein, 9 aa, Artificial sequence
  Protein classification predicting sequence
HAFLDGRDV

SEQ ID NO: 61962 - protein, 6 aa, Artificial sequence
  Protein classification predicting sequence
IFFNFR

SEQ ID NO: 61963 - protein, 17 aa, Artificial sequence
  Protein classification predicting sequence
GQMGNSEVGHLNIGAGR

SEQ ID NO: 61964 - protein, 6 aa, Artificial sequence
  Protein classification predicting sequence
GDFFEN

SEQ ID NO: 61965 - protein, 9 aa, Artificial sequence
  Protein classification predicting sequence
GRYYAMDRD

SEQ ID NO: 61966 - protein, 6 aa, Artificial sequence
  Protein classification predicting sequence
AVEAVD

SEQ ID NO: 61967 - protein, 6 aa, Artificial sequence
  Protein classification predicting sequence
SDGGVH

SEQ ID NO: 61968 - protein, 6 aa, Artificial sequence
  Protein classification predicting sequence
RVEKAY

SEQ ID NO: 61969 - protein, 7 aa, Artificial sequence
  Protein classification predicting sequence
LADVAPT

SEQ ID NO: 61970 - protein, 6 aa, Artificial sequence
  Protein classification predicting sequence
AKTPVM

SEQ ID NO: 61971 - protein, 12 aa, Artificial sequence
  Protein classification predicting sequence
NYANPDMVGHTG

SEQ ID NO: 61972 - protein, 9 aa, Artificial sequence
  Protein classification predicting sequence
QMGNSEVGH

SEQ ID NO: 61973 - protein, 7 aa, Artificial sequence
  Protein classification predicting sequence
EEPFPGE

SEQ ID NO: 61974 - protein, 7 aa, Artificial sequence
  Protein classification predicting sequence
NYANPDM

SEQ ID NO: 61975 - protein, 7 aa, Artificial sequence
  Protein classification predicting sequence
LADIAPT

SEQ ID NO: 61976 - protein, 11 aa, Artificial sequence
  Protein classification predicting sequence
GLLSDGGVHSH

SEQ ID NO: 61977 - protein, 8 aa, Artificial sequence
  Protein classification predicting sequence
SDGGVHSH

SEQ ID NO: 61978 - protein, 6 aa, Artificial sequence
  Protein classification predicting sequence
GGVHSH

SEQ ID NO: 61979 - protein, 5 aa, Artificial sequence
  Protein classification predicting sequence
DMVGH

SEQ ID NO: 61980 - protein, 6 aa, Artificial sequence
  Protein classification predicting sequence
EPTIKA

SEQ ID NO: 61981 - protein, 7 aa, Artificial sequence
  Protein classification predicting sequence
GLVSDGG

SEQ ID NO: 61982 - protein, 10 aa, Artificial sequence
  Protein classification predicting sequence
VCLTHFSETV

SEQ ID NO: 61983 - protein, 9 aa, Artificial sequence
  Protein classification predicting sequence
NLDNTLGEV

SEQ ID NO: 61984 - protein, 7 aa, Artificial sequence
  Protein classification predicting sequence
IILNFAN

SEQ ID NO: 61985 - protein, 9 aa, Artificial sequence
  Protein classification predicting sequence
EPTIKAVEA

SEQ ID NO: 61986 - protein, 6 aa, Artificial sequence
  Protein classification predicting sequence
VPVIVT

SEQ ID NO: 61987 - protein, 7 aa, Artificial sequence
  Protein classification predicting sequence
LREDGIL

SEQ ID NO: 61988 - protein, 7 aa, Artificial sequence
  Protein classification predicting sequence
FLDGRDV

SEQ ID NO: 61989 - protein, 7 aa, Artificial sequence
  Protein classification predicting sequence
MDRDKRW

SEQ ID NO: 61990 - protein, 11 aa, Artificial sequence
  Protein classification predicting sequence
SGGREAEFPGE

SEQ ID NO: 61991 - protein, 11 aa, Artificial sequence
  Protein classification predicting sequence
LNFANPDMVGH

SEQ ID NO: 61992 - protein, 18 aa, Artificial sequence
  Protein classification predicting sequence
LNFANPDMVGHSGMLEPT

SEQ ID NO: 61993 - protein, 7 aa, Artificial sequence
  Protein classification predicting sequence
LGDLAPT

SEQ ID NO: 61994 - protein, 7 aa, Artificial sequence
  Protein classification predicting sequence
GNAVAQA

SEQ ID NO: 61995 - protein, 10 aa, Artificial sequence
  Protein classification predicting sequence
QLRIAETEKY

SEQ ID NO: 61996 - protein, 16 aa, Artificial sequence
  Protein classification predicting sequence
QLRIAETEKYPHVTFF

SEQ ID NO: 61997 - protein, 8 aa, Artificial sequence
  Protein classification predicting sequence
ANPDMVGH

SEQ ID NO: 61998 - protein, 8 aa, Artificial sequence
  Protein classification predicting sequence
ALIILDGF

SEQ ID NO: 61999 - protein, 15 aa, Artificial sequence
  Protein classification predicting sequence
LHLFGLLSDGGVHSH

SEQ ID NO: 62000 - protein, 12 aa, Artificial sequence
  Protein classification predicting sequence
DSYANGIYDEFV

SEQ ID NO: 62001 - protein, 31 aa, Artificial sequence
  Protein classification predicting sequence
SGGREAEFPGEERILINSPKVATYDLKPEMS

SEQ ID NO: 62002 - protein, 18 aa, Artificial sequence
  Protein classification predicting sequence
SPKVATYDLKPEMSAYEV

SEQ ID NO: 62003 - protein, 21 aa, Artificial sequence
  Protein classification predicting sequence
DKHDAIILNFANPDMVGHSGM

SEQ ID NO: 62004 - protein, 19 aa, Artificial sequence
  Protein classification predicting sequence
EPTIKAIEAVDECLGEVVD

SEQ ID NO: 62005 - protein, 7 aa, Artificial sequence
  Protein classification predicting sequence
HTTNPVP

SEQ ID NO: 62006 - protein, 12 aa, Artificial sequence
  Protein classification predicting sequence
HTTNPVPVIVTK

SEQ ID NO: 62007 - protein, 9 aa, Artificial sequence
  Protein classification predicting sequence
ETEKYAHVT

SEQ ID NO: 62008 - protein, 20 aa, Artificial sequence
  Protein classification predicting sequence
SPKVATYDLKPEMSAYEVKD

SEQ ID NO: 62009 - protein, 14 aa, Artificial sequence
  Protein classification predicting sequence
GQMGNSEVGHMCIG

SEQ ID NO: 62010 - protein, 7 aa, Artificial sequence
  Protein classification predicting sequence
SDGGVHS

SEQ ID NO: 62011 - protein, 6 aa, Artificial sequence
  Protein classification predicting sequence
DHGNCE

SEQ ID NO: 62012 - protein, 7 aa, Artificial sequence
  Protein classification predicting sequence
GNSEVGH

SEQ ID NO: 62013 - protein, 16 aa, Artificial sequence
  Protein classification predicting sequence
DGDALIFMNFRADRAR

SEQ ID NO: 62014 - protein, 8 aa, Artificial sequence
  Protein classification predicting sequence
NFRADRAR

SEQ ID NO: 62015 - protein, 7 aa, Artificial sequence
  Protein classification predicting sequence
NGDMVGH

SEQ ID NO: 62016 - protein, 6 aa, Artificial sequence
  Protein classification predicting sequence
ILDGFG

SEQ ID NO: 62017 - protein, 7 aa, Artificial sequence
  Protein classification predicting sequence
IEDGDFF

SEQ ID NO: 62018 - protein, 8 aa, Artificial sequence
  Protein classification predicting sequence
DRARQITR

SEQ ID NO: 62019 - protein, 9 aa, Artificial sequence
  Protein classification predicting sequence
ASGLEVGLP

SEQ ID NO: 62020 - protein, 6 aa, Artificial sequence
  Protein classification predicting sequence
LTRITK

SEQ ID NO: 62021 - protein, 7 aa, Artificial sequence
  Protein classification predicting sequence
DGRDVAP

SEQ ID NO: 62022 - protein, 9 aa, Artificial sequence
  Protein classification predicting sequence
DRAREITRA

SEQ ID NO: 62023 - protein, 15 aa, Artificial sequence
  Protein classification predicting sequence
DSIIFFNFRPDRARQ

SEQ ID NO: 62024 - protein, 6 aa, Artificial sequence
  Protein classification predicting sequence
AYDLLT

SEQ ID NO: 62025 - protein, 10 aa, Artificial sequence
  Protein classification predicting sequence
NFANPDMVGH

SEQ ID NO: 62026 - protein, 13 aa, Artificial sequence
  Protein classification predicting sequence
VGGEALITADHGN

SEQ ID NO: 62027 - protein, 6 aa, Artificial sequence
  Protein classification predicting sequence
PHTAHT

SEQ ID NO: 62028 - protein, 7 aa, Artificial sequence
  Protein classification predicting sequence
VPLIYVG

SEQ ID NO: 62029 - protein, 8 aa, Artificial sequence
  Protein classification predicting sequence
MGNSEVGH

SEQ ID NO: 62030 - protein, 7 aa, Artificial sequence
  Protein classification predicting sequence
TLGEVVA

SEQ ID NO: 62031 - protein, 8 aa, Artificial sequence
  Protein classification predicting sequence
GAGRIVYQ

SEQ ID NO: 62032 - protein, 6 aa, Artificial sequence
  Protein classification predicting sequence
LIPSPK

SEQ ID NO: 62033 - protein, 5 aa, Artificial sequence
  Protein classification predicting sequence
HTAHT

SEQ ID NO: 62034 - protein, 7 aa, Artificial sequence
  Protein classification predicting sequence
DGRDTPP

SEQ ID NO: 62035 - protein, 6 aa, Artificial sequence
  Protein classification predicting sequence
DEFVLP

SEQ ID NO: 62036 - protein, 8 aa, Artificial sequence
  Protein classification predicting sequence
TYDLKPEM

SEQ ID NO: 62037 - protein, 9 aa, Artificial sequence
  Protein classification predicting sequence
IFFNFRPDR

SEQ ID NO: 62038 - protein, 7 aa, Artificial sequence
  Protein classification predicting sequence
LIPSPKV

SEQ ID NO: 62039 - protein, 9 aa, Artificial sequence
  Protein classification predicting sequence
YAMDRDKRW

SEQ ID NO: 62040 - protein, 6 aa, Artificial sequence
  Protein classification predicting sequence
YAMDRD

SEQ ID NO: 62041 - protein, 11 aa, Artificial sequence
  Protein classification predicting sequence
DDMGNSEVGHN

SEQ ID NO: 62042 - protein, 12 aa, Artificial sequence
  Protein classification predicting sequence
VYIHAFLDGRDV

SEQ ID NO: 62043 - protein, 7 aa, Artificial sequence
  Protein classification predicting sequence
IATVSGR

SEQ ID NO: 62044 - protein, 9 aa, Artificial sequence
  Protein classification predicting sequence
RILINSPKV

SEQ ID NO: 62045 - protein, 8 aa, Artificial sequence
  Protein classification predicting sequence
PVPVIVTK

SEQ ID NO: 62046 - protein, 8 aa, Artificial sequence
  Protein classification predicting sequence
PEMSAYEV

SEQ ID NO: 62047 - protein, 10 aa, Artificial sequence
  Protein classification predicting sequence
GQMGNSEVGH

SEQ ID NO: 62048 - protein, 6 aa, Artificial sequence
  Protein classification predicting sequence
VYQDLT

SEQ ID NO: 62049 - protein, 13 aa, Artificial sequence
  Protein classification predicting sequence
DAVIFYNFRPDRA

SEQ ID NO: 62050 - protein, 7 aa, Artificial sequence
  Protein classification predicting sequence
NFRPDRA

SEQ ID NO: 62051 - protein, 7 aa, Artificial sequence
  Protein classification predicting sequence
QLRIAET

SEQ ID NO: 62052 - protein, 6 aa, Artificial sequence
  Protein classification predicting sequence
EERILI

SEQ ID NO: 62053 - protein, 9 aa, Artificial sequence
  Protein classification predicting sequence
QLRIAETEK

SEQ ID NO: 62054 - protein, 9 aa, Artificial sequence
  Protein classification predicting sequence
NAILNAKTP

SEQ ID NO: 62055 - protein, 7 aa, Artificial sequence
  Protein classification predicting sequence
VGLPDGQ

SEQ ID NO: 62056 - protein, 6 aa, Artificial sequence
  Protein classification predicting sequence
HTTNPV

SEQ ID NO: 62057 - protein, 6 aa, Artificial sequence
  Protein classification predicting sequence
KYAHVT

SEQ ID NO: 62058 - protein, 10 aa, Artificial sequence
  Protein classification predicting sequence
FSETVDGYVA

SEQ ID NO: 62059 - protein, 17 aa, Artificial sequence
  Protein classification predicting sequence
LIDSPKVATYDLKPEMS

SEQ ID NO: 62060 - protein, 14 aa, Artificial sequence
  Protein classification predicting sequence
SPKVATYDLKPEMS

SEQ ID NO: 62061 - protein, 7 aa, Artificial sequence
  Protein classification predicting sequence
YEVTDAL

SEQ ID NO: 62062 - protein, 6 aa, Artificial sequence
  Protein classification predicting sequence
VYQSLT

SEQ ID NO: 62063 - protein, 6 aa, Artificial sequence
  Protein classification predicting sequence
DRDNNW

SEQ ID NO: 62064 - protein, 9 aa, Artificial sequence
  Protein classification predicting sequence
ADHGNAEQM

SEQ ID NO: 62065 - protein, 6 aa, Artificial sequence
  Protein classification predicting sequence
TAHTTN

SEQ ID NO: 62066 - protein, 16 aa, Artificial sequence
  Protein classification predicting sequence
DVGLPDGQMGNSEVGH

SEQ ID NO: 62067 - protein, 9 aa, Artificial sequence
  Protein classification predicting sequence
RGAEKIYLH

SEQ ID NO: 62068 - protein, 12 aa, Artificial sequence
  Protein classification predicting sequence
FLDGRDTPPRSA

SEQ ID NO: 62069 - protein, 9 aa, Artificial sequence
  Protein classification predicting sequence
ENDEFVKAT

SEQ ID NO: 62070 - protein, 6 aa, Artificial sequence
  Protein classification predicting sequence
IRAEGQ

SEQ ID NO: 62071 - protein, 12 aa, Artificial sequence
  Protein classification predicting sequence
RADRAREITRAF

SEQ ID NO: 62072 - protein, 17 aa, Artificial sequence
  Protein classification predicting sequence
LVASPKVATYDLQPEMS

SEQ ID NO: 62073 - protein, 8 aa, Artificial sequence
  Protein classification predicting sequence
DMVGHTGV

SEQ ID NO: 62074 - protein, 6 aa, Artificial sequence
  Protein classification predicting sequence
LHLIGL

SEQ ID NO: 62075 - protein, 7 aa, Artificial sequence
  Protein classification predicting sequence
TISGRYY

SEQ ID NO: 62076 - protein, 7 aa, Artificial sequence
  Protein classification predicting sequence
QELVRIS

SEQ ID NO: 62077 - protein, 7 aa, Artificial sequence
  Protein classification predicting sequence
MDRDNRW

SEQ ID NO: 62078 - protein, 10 aa, Artificial sequence
  Protein classification predicting sequence
AETEKYPHVT

SEQ ID NO: 62079 - protein, 6 aa, Artificial sequence
  Protein classification predicting sequence
DGRDTP

SEQ ID NO: 62080 - protein, 6 aa, Artificial sequence
  Protein classification predicting sequence
ITDGRD

SEQ ID NO: 62081 - protein, 9 aa, Artificial sequence
  Protein classification predicting sequence
PSPRVATYD

SEQ ID NO: 62082 - protein, 9 aa, Artificial sequence
  Protein classification predicting sequence
GAGRVVYQD

SEQ ID NO: 62083 - protein, 7 aa, Artificial sequence
  Protein classification predicting sequence
ASIIGRY

SEQ ID NO: 62084 - protein, 7 aa, Artificial sequence
  Protein classification predicting sequence
DEFVKAT

SEQ ID NO: 62085 - protein, 9 aa, Artificial sequence
  Protein classification predicting sequence
TGQAHTAHT

SEQ ID NO: 62086 - protein, 11 aa, Artificial sequence
  Protein classification predicting sequence
NPVLTGAVDKA

SEQ ID NO: 62087 - protein, 7 aa, Artificial sequence
  Protein classification predicting sequence
AAYARDE

SEQ ID NO: 62088 - protein, 8 aa, Artificial sequence
  Protein classification predicting sequence
VMLTQYAA

SEQ ID NO: 62089 - protein, 7 aa, Artificial sequence
  Protein classification predicting sequence
GEERILI

SEQ ID NO: 62090 - protein, 9 aa, Artificial sequence
  Protein classification predicting sequence
LREGGRLAD

SEQ ID NO: 62091 - protein, 6 aa, Artificial sequence
  Protein classification predicting sequence
NFRADR

SEQ ID NO: 62092 - protein, 7 aa, Artificial sequence
  Protein classification predicting sequence
AAIKAVE

SEQ ID NO: 62093 - protein, 7 aa, Artificial sequence
  Protein classification predicting sequence
LSDLAPT

SEQ ID NO: 62094 - protein, 13 aa, Artificial sequence
  Protein classification predicting sequence
KFAALGKGRVASI

SEQ ID NO: 62095 - protein, 12 aa, Artificial sequence
  Protein classification predicting sequence
GRYYAMDRDNRW

SEQ ID NO: 62096 - protein, 8 aa, Artificial sequence
  Protein classification predicting sequence
DAAMEDGD

SEQ ID NO: 62097 - protein, 29 aa, Artificial sequence
  Protein classification predicting sequence
KAVESVGGQLLITADHGNAEQMRDPATGQ

SEQ ID NO: 62098 - protein, 33 aa, Artificial sequence
  Protein classification predicting sequence
LIFMNFRADRAREITRAFVNADFDGFARKKVVN

SEQ ID NO: 62099 - protein, 22 aa, Artificial sequence
  Protein classification predicting sequence
FVMLTEYAADIKTAVAYPPASL

SEQ ID NO: 62100 - protein, 36 aa, Artificial sequence
  Protein classification predicting sequence
NTFGEWMAKNDKTQLRISETEKYAHVTFFFNGGVEE

SEQ ID NO: 62101 - protein, 26 aa, Artificial sequence
  Protein classification predicting sequence
SGKYDTIICNYPNGDMVGHTGVMEAA

SEQ ID NO: 62102 - protein, 8 aa, Artificial sequence
  Protein classification predicting sequence
RDENDEFV

SEQ ID NO: 62103 - protein, 6 aa, Artificial sequence
  Protein classification predicting sequence
FDGFAR

SEQ ID NO: 62104 - protein, 9 aa, Artificial sequence
  Protein classification predicting sequence
LTEYAADIK

SEQ ID NO: 62105 - protein, 9 aa, Artificial sequence
  Protein classification predicting sequence
NGDMVGHTG

SEQ ID NO: 62106 - protein, 7 aa, Artificial sequence
  Protein classification predicting sequence
DMVGHTG

SEQ ID NO: 62107 - protein, 6 aa, Artificial sequence
  Protein classification predicting sequence
PAEMTG

SEQ ID NO: 62108 - protein, 22 aa, Artificial sequence
  Protein classification predicting sequence
PTALIILDGFANRESEHGNAVK

SEQ ID NO: 62109 - protein, 51 aa, Artificial sequence
  Protein classification predicting sequence
KYPTTQIEASGLDVGLPEGQMGNSEVGHMNIGAGRIVYQSLTRINKSIEDG

SEQ ID NO: 62110 - protein, 12 aa, Artificial sequence
  Protein classification predicting sequence
FGLLSDGGVHSH

SEQ ID NO: 62111 - protein, 8 aa, Artificial sequence
  Protein classification predicting sequence
LELAKKQG

SEQ ID NO: 62112 - protein, 26 aa, Artificial sequence
  Protein classification predicting sequence
KVYVHAFLDGRDVDQKSALKYIEETE

SEQ ID NO: 62113 - protein, 19 aa, Artificial sequence
  Protein classification predicting sequence
GQFASVSGRYYAMDRDKRW

SEQ ID NO: 62114 - protein, 12 aa, Artificial sequence
  Protein classification predicting sequence
GRYYAMDRDKRW

SEQ ID NO: 62115 - protein, 7 aa, Artificial sequence
  Protein classification predicting sequence
GFKVEQV

SEQ ID NO: 62116 - protein, 12 aa, Artificial sequence
  Protein classification predicting sequence
LFYATFTKYNDN

SEQ ID NO: 62117 - protein, 14 aa, Artificial sequence
  Protein classification predicting sequence
IVFEKVDLNNTIGE

SEQ ID NO: 62118 - protein, 14 aa, Artificial sequence
  Protein classification predicting sequence
QLRIAETEKYPHVT

SEQ ID NO: 62119 - protein, 25 aa, Artificial sequence
  Protein classification predicting sequence
QLRIAETEKYPHVTYFMSGGRNEEF

SEQ ID NO: 62120 - protein, 34 aa, Artificial sequence
  Protein classification predicting sequence
GERRRLIDSPKVATYDLKPEMSAYEVKDALLEEL

SEQ ID NO: 62121 - protein, 36 aa, Artificial sequence
  Protein classification predicting sequence
LNFANPDMVGHSGMLEPTIKAIEAVDECLGEVVDKI

SEQ ID NO: 62122 - protein, 59 aa, Artificial sequence
  Protein classification predicting sequence
AIITADHGNSDQVLTDDDQPMTTHTTNPVPVIVTKEGVTLRETGRLGDLAPTLLDLLNV

SEQ ID NO: 62123 - protein, 7 aa, Artificial sequence
  Protein classification predicting sequence
MTGESLI

SEQ ID NO: 62124 - protein, 7 aa, Artificial sequence
  Protein classification predicting sequence
RIAETEK

SEQ ID NO: 62125 - protein, 10 aa, Artificial sequence
  Protein classification predicting sequence
GGVHSHIDHL

SEQ ID NO: 62126 - protein, 6 aa, Artificial sequence
  Protein classification predicting sequence
GAGRVV

SEQ ID NO: 62127 - protein, 6 aa, Artificial sequence
  Protein classification predicting sequence
FFFDGG

SEQ ID NO: 62128 - protein, 6 aa, Artificial sequence
  Protein classification predicting sequence
DHGNAE

SEQ ID NO: 62129 - protein, 17 aa, Artificial sequence
  Protein classification predicting sequence
GQMGNSEVGHTNIGAGR

SEQ ID NO: 62130 - protein, 7 aa, Artificial sequence
  Protein classification predicting sequence
VYQDLTR

SEQ ID NO: 62131 - protein, 6 aa, Artificial sequence
  Protein classification predicting sequence
AGKAVH

SEQ ID NO: 62132 - protein, 16 aa, Artificial sequence
  Protein classification predicting sequence
MGLMSPGGVHSHEDHI

SEQ ID NO: 62133 - protein, 13 aa, Artificial sequence
  Protein classification predicting sequence
RFQDLFAKLGKGR

SEQ ID NO: 62134 - protein, 7 aa, Artificial sequence
  Protein classification predicting sequence
LQAAYAR

SEQ ID NO: 62135 - protein, 13 aa, Artificial sequence
  Protein classification predicting sequence
FVMLTQYAADIPL

SEQ ID NO: 62136 - protein, 14 aa, Artificial sequence
  Protein classification predicting sequence
PASLENTYGEWLSK

SEQ ID NO: 62137 - protein, 23 aa, Artificial sequence
  Protein classification predicting sequence
GEERQLVASPKVATYDLQPEMSS

SEQ ID NO: 62138 - protein, 14 aa, Artificial sequence
  Protein classification predicting sequence
SPKVATYDLQPEMS

SEQ ID NO: 62139 - protein, 15 aa, Artificial sequence
  Protein classification predicting sequence
SPKVATYDLQPEMSS

SEQ ID NO: 62140 - protein, 6 aa, Artificial sequence
  Protein classification predicting sequence
EAVDEC

SEQ ID NO: 62141 - protein, 11 aa, Artificial sequence
  Protein classification predicting sequence
LVILDGYGYRE

SEQ ID NO: 62142 - protein, 8 aa, Artificial sequence
  Protein classification predicting sequence
HAFLDGRD

SEQ ID NO: 62143 - protein, 9 aa, Artificial sequence
  Protein classification predicting sequence
REEQQDNAI

SEQ ID NO: 62144 - protein, 26 aa, Artificial sequence
  Protein classification predicting sequence
QMGNSEVGHVNLGAGRIVYQDLTRLD

SEQ ID NO: 62145 - protein, 30 aa, Artificial sequence
  Protein classification predicting sequence
GKAVHIMGLLSAGGVHSHEDHIMAMVELAA

SEQ ID NO: 62146 - protein, 22 aa, Artificial sequence
  Protein classification predicting sequence
IYLHAFLDGRDTPPRSAESSLK

SEQ ID NO: 62147 - protein, 13 aa, Artificial sequence
  Protein classification predicting sequence
RADRARQITRTFV

SEQ ID NO: 62148 - protein, 7 aa, Artificial sequence
  Protein classification predicting sequence
AYPPASL

SEQ ID NO: 62149 - protein, 11 aa, Artificial sequence
  Protein classification predicting sequence
ETEKYAHVTFF

SEQ ID NO: 62150 - protein, 7 aa, Artificial sequence
  Protein classification predicting sequence
AAVKAVE

SEQ ID NO: 62151 - protein, 13 aa, Artificial sequence
  Protein classification predicting sequence
GQLLITADHGNAE

SEQ ID NO: 62152 - protein, 11 aa, Artificial sequence
  Protein classification predicting sequence
DIDGNEYIDYV

SEQ ID NO: 62153 - protein, 6 aa, Artificial sequence
  Protein classification predicting sequence
KGTSFG

SEQ ID NO: 62154 - protein, 8 aa, Artificial sequence
  Protein classification predicting sequence
VSSGTEAT

SEQ ID NO: 62155 - protein, 7 aa, Artificial sequence
  Protein classification predicting sequence
KILKFEG

SEQ ID NO: 62156 - protein, 22 aa, Artificial sequence
  Protein classification predicting sequence
DSLLIKAGSGVATLGLPDSPGV

SEQ ID NO: 62157 - protein, 8 aa, Artificial sequence
  Protein classification predicting sequence
TITVPYND

SEQ ID NO: 62158 - protein, 15 aa, Artificial sequence
  Protein classification predicting sequence
GALLIFDEVMTGFRV

SEQ ID NO: 62159 - protein, 13 aa, Artificial sequence
  Protein classification predicting sequence
LLIFDEVMTGFRV

SEQ ID NO: 62160 - protein, 7 aa, Artificial sequence
  Protein classification predicting sequence
GGKKEIM

SEQ ID NO: 62161 - protein, 20 aa, Artificial sequence
  Protein classification predicting sequence
VIVEPVAGNMGVVPPIEGFL

SEQ ID NO: 62162 - protein, 9 aa, Artificial sequence
  Protein classification predicting sequence
KFEGCYHGH

SEQ ID NO: 62163 - protein, 7 aa, Artificial sequence
  Protein classification predicting sequence
PVGAFGG

SEQ ID NO: 62164 - protein, 16 aa, Artificial sequence
  Protein classification predicting sequence
LMPGGVNSPVRAFKSV

SEQ ID NO: 62165 - protein, 11 aa, Artificial sequence
  Protein classification predicting sequence
DKGTSFGASTL

SEQ ID NO: 62166 - protein, 9 aa, Artificial sequence
  Protein classification predicting sequence
ANKSDLKLF

SEQ ID NO: 62167 - protein, 10 aa, Artificial sequence
  Protein classification predicting sequence
DIEKTIQAFD

SEQ ID NO: 62168 - protein, 26 aa, Artificial sequence
  Protein classification predicting sequence
LMPGGVNSPVRAFKSVDTPAIFMDHG

SEQ ID NO: 62169 - protein, 38 aa, Artificial sequence
  Protein classification predicting sequence
LVIDRVPSIEKVRMVSSGTEATLDTLRLARGYTGRNKI

SEQ ID NO: 62170 - protein, 27 aa, Artificial sequence
  Protein classification predicting sequence
IYQAGTLSGNPLAMTSGYETLSQLTPE

SEQ ID NO: 62171 - protein, 31 aa, Artificial sequence
  Protein classification predicting sequence
VFAKHNVPITVNRAGSMIGYFLNEGPVTNFE

SEQ ID NO: 62172 - protein, 28 aa, Artificial sequence
  Protein classification predicting sequence
MYREMAKEGVFLPPSQFEGTFLSTAHTK

SEQ ID NO: 62173 - protein, 8 aa, Artificial sequence
  Protein classification predicting sequence
ILEPVVGN

SEQ ID NO: 62174 - protein, 7 aa, Artificial sequence
  Protein classification predicting sequence
GMFGFFF

SEQ ID NO: 62175 - protein, 7 aa, Artificial sequence
  Protein classification predicting sequence
MLEEGVY

SEQ ID NO: 62176 - protein, 6 aa, Artificial sequence
  Protein classification predicting sequence
GGVNSP

SEQ ID NO: 62177 - protein, 8 aa, Artificial sequence
  Protein classification predicting sequence
GHAHPHIT

SEQ ID NO: 62178 - protein, 8 aa, Artificial sequence
  Protein classification predicting sequence
GTPTELEI

SEQ ID NO: 62179 - protein, 6 aa, Artificial sequence
  Protein classification predicting sequence
FSKKLR

SEQ ID NO: 62180 - protein, 11 aa, Artificial sequence
  Protein classification predicting sequence
AGIALLEVLEQ

SEQ ID NO: 62181 - protein, 17 aa, Artificial sequence
  Protein classification predicting sequence
ITATINRIYGSLTLYFT

SEQ ID NO: 62182 - protein, 6 aa, Artificial sequence
  Protein classification predicting sequence
EKVTHY

SEQ ID NO: 62183 - protein, 50 aa, Artificial sequence
  Protein classification predicting sequence
ESERLQQLSNEYILGGVNSPSRSYKAVGGGAPVVMKEGHGAYLYDVDGNK

SEQ ID NO: 62184 - protein, 66 aa, Artificial sequence
  Protein classification predicting sequence
PSLEKIRFVNSGTEAVMTTIRVARAYTKRNKIIKFAGSYHGHSDLVLVAAGSGPSQLGSPDSAGVP

SEQ ID NO: 62185 - protein, 27 aa, Artificial sequence
  Protein classification predicting sequence
IAAVLVEPIVGNFGMVMPQPGFLEEVN

SEQ ID NO: 62186 - protein, 27 aa, Artificial sequence
  Protein classification predicting sequence
NGTLVIYDEVITAFRFHYGAAQDLLGV

SEQ ID NO: 62187 - protein, 27 aa, Artificial sequence
  Protein classification predicting sequence
PDLTAFGKIVGGGLPIGGYGGRQDIME

SEQ ID NO: 62188 - protein, 31 aa, Artificial sequence
  Protein classification predicting sequence
FFKLMLNQGINLAPSKFEAWFLTTEHTEEDI

SEQ ID NO: 62189 - protein, 9 aa, Artificial sequence
  Protein classification predicting sequence
GGVNSPSRS

SEQ ID NO: 62190 - protein, 9 aa, Artificial sequence
  Protein classification predicting sequence
KAVGGGAPV

SEQ ID NO: 62191 - protein, 10 aa, Artificial sequence
  Protein classification predicting sequence
NGVLYGTPTK

SEQ ID NO: 62192 - protein, 10 aa, Artificial sequence
  Protein classification predicting sequence
AIPSLEKVRF

SEQ ID NO: 62193 - protein, 6 aa, Artificial sequence
  Protein classification predicting sequence
GCYHGH

SEQ ID NO: 62194 - protein, 6 aa, Artificial sequence
  Protein classification predicting sequence
YHGHSD

SEQ ID NO: 62195 - protein, 17 aa, Artificial sequence
  Protein classification predicting sequence
YHGHSDLVLVAAGSGPS

SEQ ID NO: 62196 - protein, 6 aa, Artificial sequence
  Protein classification predicting sequence
PDSAGV

SEQ ID NO: 62197 - protein, 8 aa, Artificial sequence
  Protein classification predicting sequence
EVITVPFN

SEQ ID NO: 62198 - protein, 13 aa, Artificial sequence
  Protein classification predicting sequence
AAVLVEPIVGNFG

SEQ ID NO: 62199 - protein, 13 aa, Artificial sequence
  Protein classification predicting sequence
LVIYDEVITAFRF

SEQ ID NO: 62200 - protein, 9 aa, Artificial sequence
  Protein classification predicting sequence
GKIIGGGLP

SEQ ID NO: 62201 - protein, 17 aa, Artificial sequence
  Protein classification predicting sequence
VAPLGPAYQAGTMAGNP

SEQ ID NO: 62202 - protein, 6 aa, Artificial sequence
  Protein classification predicting sequence
EAWFLT

SEQ ID NO: 62203 - protein, 11 aa, Artificial sequence
  Protein classification predicting sequence
TFAKMLKEAIP

SEQ ID NO: 62204 - protein, 19 aa, Artificial sequence
  Protein classification predicting sequence
LVIYDEVITAFRFMYGGAQ

SEQ ID NO: 62205 - protein, 21 aa, Artificial sequence
  Protein classification predicting sequence
IMEQVAPLGPAYQAGTMAGNP

SEQ ID NO: 62206 - protein, 17 aa, Artificial sequence
  Protein classification predicting sequence
AGNPASILSGIACLEVL

SEQ ID NO: 62207 - protein, 7 aa, Artificial sequence
  Protein classification predicting sequence
GALTVYF

SEQ ID NO: 62208 - protein, 6 aa, Artificial sequence
  Protein classification predicting sequence
FFKLML

SEQ ID NO: 62209 - protein, 8 aa, Artificial sequence
  Protein classification predicting sequence
GINLAPSK

SEQ ID NO: 62210 - protein, 13 aa, Artificial sequence
  Protein classification predicting sequence
GPIITGHAHPHIT

SEQ ID NO: 62211 - protein, 18 aa, Artificial sequence
  Protein classification predicting sequence
NSGTEAVMTTIRVARAYT

SEQ ID NO: 62212 - protein, 9 aa, Artificial sequence
  Protein classification predicting sequence
LGVIPDLTA

SEQ ID NO: 62213 - protein, 12 aa, Artificial sequence
  Protein classification predicting sequence
VAPLGPAYQAGT

SEQ ID NO: 62214 - protein, 21 aa, Artificial sequence
  Protein classification predicting sequence
DEDDKRYVDYVGSWGPMILGH

SEQ ID NO: 62215 - protein, 13 aa, Artificial sequence
  Protein classification predicting sequence
DYVGSWGPMILGH

SEQ ID NO: 62216 - protein, 7 aa, Artificial sequence
  Protein classification predicting sequence
PSIEMVR

SEQ ID NO: 62217 - protein, 7 aa, Artificial sequence
  Protein classification predicting sequence
AIRLARG

SEQ ID NO: 62218 - protein, 6 aa, Artificial sequence
  Protein classification predicting sequence
TGRDKI

SEQ ID NO: 62219 - protein, 14 aa, Artificial sequence
  Protein classification predicting sequence
KFEGCYHGHSDSLL

SEQ ID NO: 62220 - protein, 20 aa, Artificial sequence
  Protein classification predicting sequence
KFEGCYHGHSDSLLVKAGSG

SEQ ID NO: 62221 - protein, 9 aa, Artificial sequence
  Protein classification predicting sequence
IVEPVAGNM

SEQ ID NO: 62222 - protein, 11 aa, Artificial sequence
  Protein classification predicting sequence
DEVMTGFRVAL

SEQ ID NO: 62223 - protein, 15 aa, Artificial sequence
  Protein classification predicting sequence
DEVMTGFRVALGGAQ

SEQ ID NO: 62224 - protein, 8 aa, Artificial sequence
  Protein classification predicting sequence
PDLTTLGK

SEQ ID NO: 62225 - protein, 10 aa, Artificial sequence
  Protein classification predicting sequence
LAPSAFEAGF

SEQ ID NO: 62226 - protein, 9 aa, Artificial sequence
  Protein classification predicting sequence
SPVRAFKSV

SEQ ID NO: 62227 - protein, 19 aa, Artificial sequence
  Protein classification predicting sequence
AVPSIEMVRFVNSGTEACM

SEQ ID NO: 62228 - protein, 7 aa, Artificial sequence
  Protein classification predicting sequence
AYGGAQE

SEQ ID NO: 62229 - protein, 9 aa, Artificial sequence
  Protein classification predicting sequence
IGGGLPVGA

SEQ ID NO: 62230 - protein, 10 aa, Artificial sequence
  Protein classification predicting sequence
YQAGTLSGNP

SEQ ID NO: 62231 - protein, 13 aa, Artificial sequence
  Protein classification predicting sequence
YQAGTLSGNPLAM

SEQ ID NO: 62232 - protein, 7 aa, Artificial sequence
  Protein classification predicting sequence
MFGLFFT

SEQ ID NO: 62233 - protein, 7 aa, Artificial sequence
  Protein classification predicting sequence
GVYLAPS

SEQ ID NO: 62234 - protein, 11 aa, Artificial sequence
  Protein classification predicting sequence
VNSGTEATMSA

SEQ ID NO: 62235 - protein, 7 aa, Artificial sequence
  Protein classification predicting sequence
AGSGVAT

SEQ ID NO: 62236 - protein, 8 aa, Artificial sequence
  Protein classification predicting sequence
TIVLPYND

SEQ ID NO: 62237 - protein, 10 aa, Artificial sequence
  Protein classification predicting sequence
LVIERVPSIE

SEQ ID NO: 62238 - protein, 6 aa, Artificial sequence
  Protein classification predicting sequence
PGFLEE

SEQ ID NO: 62239 - protein, 20 aa, Artificial sequence
  Protein classification predicting sequence
LLIFDEVMTGFRVGYHCAQG

SEQ ID NO: 62240 - protein, 8 aa, Artificial sequence
  Protein classification predicting sequence
EIMEQIAP

SEQ ID NO: 62241 - protein, 13 aa, Artificial sequence
  Protein classification predicting sequence
GPIYQAGTLSGNP

SEQ ID NO: 62242 - protein, 8 aa, Artificial sequence
  Protein classification predicting sequence
LPPSQFEG

SEQ ID NO: 62243 - protein, 38 aa, Artificial sequence
  Protein classification predicting sequence
DSLLIKAGSGVATLGLPDSPGVPEGIAKNTITVPYNDL

SEQ ID NO: 62244 - protein, 27 aa, Artificial sequence
  Protein classification predicting sequence
CAQGYFGVTPDLTCLGKVIGGGLPVGA

SEQ ID NO: 62245 - protein, 8 aa, Artificial sequence
  Protein classification predicting sequence
NRAGSMIG

SEQ ID NO: 62246 - protein, 8 aa, Artificial sequence
  Protein classification predicting sequence
ETELAKLV

SEQ ID NO: 62247 - protein, 12 aa, Artificial sequence
  Protein classification predicting sequence
KILKFEGCYHGH

SEQ ID NO: 62248 - protein, 11 aa, Artificial sequence
  Protein classification predicting sequence
VYQAGTLSGNP

SEQ ID NO: 62249 - protein, 9 aa, Artificial sequence
  Protein classification predicting sequence
QAGTLSGNP

SEQ ID NO: 62250 - protein, 6 aa, Artificial sequence
  Protein classification predicting sequence
FLSTAH

SEQ ID NO: 62251 - protein, 6 aa, Artificial sequence
  Protein classification predicting sequence
FISSAH

SEQ ID NO: 62252 - protein, 16 aa, Artificial sequence
  Protein classification predicting sequence
PGGVNSPVRAFRSVGG

SEQ ID NO: 62253 - protein, 10 aa, Artificial sequence
  Protein classification predicting sequence
DVDGNKYIDY

SEQ ID NO: 62254 - protein, 7 aa, Artificial sequence
  Protein classification predicting sequence
KGTSFGA

SEQ ID NO: 62255 - protein, 7 aa, Artificial sequence
  Protein classification predicting sequence
VIDRVPS

SEQ ID NO: 62256 - protein, 7 aa, Artificial sequence
  Protein classification predicting sequence
VSSGTEA

SEQ ID NO: 62257 - protein, 7 aa, Artificial sequence
  Protein classification predicting sequence
GKVIGGG

SEQ ID NO: 62258 - protein, 6 aa, Artificial sequence
  Protein classification predicting sequence
AHSEAD

SEQ ID NO: 62259 - protein, 7 aa, Artificial sequence
  Protein classification predicting sequence
AARRVFA

SEQ ID NO: 62260 - protein, 8 aa, Artificial sequence
  Protein classification predicting sequence
WGPMILGH

SEQ ID NO: 62261 - protein, 7 aa, Artificial sequence
  Protein classification predicting sequence
RDKIIKF

SEQ ID NO: 62262 - protein, 8 aa, Artificial sequence
  Protein classification predicting sequence
AAVIIEPV

SEQ ID NO: 62263 - protein, 7 aa, Artificial sequence
  Protein classification predicting sequence
EPVAGNM

SEQ ID NO: 62264 - protein, 8 aa, Artificial sequence
  Protein classification predicting sequence
GPVYQAGT

SEQ ID NO: 62265 - protein, 10 aa, Artificial sequence
  Protein classification predicting sequence
GALLIFDEVM

SEQ ID NO: 62266 - protein, 9 aa, Artificial sequence
  Protein classification predicting sequence
SWGPMILGH

SEQ ID NO: 62267 - protein, 10 aa, Artificial sequence
  Protein classification predicting sequence
SGTEATMSAI

SEQ ID NO: 62268 - protein, 6 aa, Artificial sequence
  Protein classification predicting sequence
IIKFAG

SEQ ID NO: 62269 - protein, 16 aa, Artificial sequence
  Protein classification predicting sequence
PGGVNSPVRAFGSVGG

SEQ ID NO: 62270 - protein, 11 aa, Artificial sequence
  Protein classification predicting sequence
YVDLVCSWGPM

SEQ ID NO: 62271 - protein, 9 aa, Artificial sequence
  Protein classification predicting sequence
RLARGFTGR

SEQ ID NO: 62272 - protein, 8 aa, Artificial sequence
  Protein classification predicting sequence
DEVMTGFR

SEQ ID NO: 62273 - protein, 7 aa, Artificial sequence
  Protein classification predicting sequence
WFVSAAL

SEQ ID NO: 62274 - protein, 7 aa, Artificial sequence
  Protein classification predicting sequence
PAAAFGG

SEQ ID NO: 62275 - protein, 9 aa, Artificial sequence
  Protein classification predicting sequence
RLARGYTGR

SEQ ID NO: 62276 - protein, 7 aa, Artificial sequence
  Protein classification predicting sequence
PSSAGVP

SEQ ID NO: 62277 - protein, 8 aa, Artificial sequence
  Protein classification predicting sequence
PDLTCLGK

SEQ ID NO: 62278 - protein, 15 aa, Artificial sequence
  Protein classification predicting sequence
HETLDELTTRLAEGL

SEQ ID NO: 62279 - protein, 9 aa, Artificial sequence
  Protein classification predicting sequence
TLTCTYNDL

SEQ ID NO: 62280 - protein, 8 aa, Artificial sequence
  Protein classification predicting sequence
GAYLYDVD

SEQ ID NO: 62281 - protein, 12 aa, Artificial sequence
  Protein classification predicting sequence
AYIDYVGSWGPM

SEQ ID NO: 62282 - protein, 23 aa, Artificial sequence
  Protein classification predicting sequence
MDMVRMVNSGTEATMSAIRLARG

SEQ ID NO: 62283 - protein, 5 aa, Artificial sequence
  Protein classification predicting sequence
HTLTC

SEQ ID NO: 62284 - protein, 12 aa, Artificial sequence
  Protein classification predicting sequence
IIVEPVAGNMNC

SEQ ID NO: 62285 - protein, 15 aa, Artificial sequence
  Protein classification predicting sequence
FLPGLRALCDEFGAL

SEQ ID NO: 62286 - protein, 17 aa, Artificial sequence
  Protein classification predicting sequence
IIDEVMTGFRVALAGAQ

SEQ ID NO: 62287 - protein, 12 aa, Artificial sequence
  Protein classification predicting sequence
IGGGMPVGAFGG

SEQ ID NO: 62288 - protein, 28 aa, Artificial sequence
  Protein classification predicting sequence
ALAPTGPVYQAGTLSGNPIAMAAGFACL

SEQ ID NO: 62289 - protein, 6 aa, Artificial sequence
  Protein classification predicting sequence
IPLVVN

SEQ ID NO: 62290 - protein, 11 aa, Artificial sequence
  Protein classification predicting sequence
CDVERFKRFFH

SEQ ID NO: 62291 - protein, 9 aa, Artificial sequence
  Protein classification predicting sequence
SGTEATMSA

SEQ ID NO: 62292 - protein, 6 aa, Artificial sequence
  Protein classification predicting sequence
ALGGAQ

SEQ ID NO: 62293 - protein, 13 aa, Artificial sequence
  Protein classification predicting sequence
PVGAFGGKKEIMD

SEQ ID NO: 62294 - protein, 8 aa, Artificial sequence
  Protein classification predicting sequence
AGTLSGNP

SEQ ID NO: 62295 - protein, 9 aa, Artificial sequence
  Protein classification predicting sequence
GKVIGGGMP

SEQ ID NO: 62296 - protein, 13 aa, Artificial sequence
  Protein classification predicting sequence
GGVYQAGTLSGNP

SEQ ID NO: 62297 - protein, 7 aa, Artificial sequence
  Protein classification predicting sequence
FETGFIC

SEQ ID NO: 62298 - protein, 11 aa, Artificial sequence
  Protein classification predicting sequence
SPVRAFKSVGG

SEQ ID NO: 62299 - protein, 9 aa, Artificial sequence
  Protein classification predicting sequence
DGNEYIDYV

SEQ ID NO: 62300 - protein, 22 aa, Artificial sequence
  Protein classification predicting sequence
DGNEYIDYVGSWGPAIIGHADD

SEQ ID NO: 62301 - protein, 24 aa, Artificial sequence
  Protein classification predicting sequence
MVISAVPSIEMVRFVNSGTEACMG

SEQ ID NO: 62302 - protein, 8 aa, Artificial sequence
  Protein classification predicting sequence
FLVKAGSG

SEQ ID NO: 62303 - protein, 8 aa, Artificial sequence
  Protein classification predicting sequence
TLTAPYND

SEQ ID NO: 62304 - protein, 9 aa, Artificial sequence
  Protein classification predicting sequence
FDEVMTGFR

SEQ ID NO: 62305 - protein, 24 aa, Artificial sequence
  Protein classification predicting sequence
FDEVMTGFRLAYGGAQEYFGITPD

SEQ ID NO: 62306 - protein, 35 aa, Artificial sequence
  Protein classification predicting sequence
DIMEMVAPAGPMYQAGTLSGNPLAMTAGIHTLKRL

SEQ ID NO: 62307 - protein, 6 aa, Artificial sequence
  Protein classification predicting sequence
GTEATM

SEQ ID NO: 62308 - protein, 7 aa, Artificial sequence
  Protein classification predicting sequence
NMGVVPP

SEQ ID NO: 62309 - protein, 9 aa, Artificial sequence
  Protein classification predicting sequence
GALLILDEV

SEQ ID NO: 62310 - protein, 15 aa, Artificial sequence
  Protein classification predicting sequence
GPVYQAGTLSGNPVA

SEQ ID NO: 62311 - protein, 10 aa, Artificial sequence
  Protein classification predicting sequence
ALPAAARAAA

SEQ ID NO: 62312 - protein, 12 aa, Artificial sequence
  Protein classification predicting sequence
IPGGVNSPVRAF

SEQ ID NO: 62313 - protein, 10 aa, Artificial sequence
  Protein classification predicting sequence
AGSGVATLGL

SEQ ID NO: 62314 - protein, 6 aa, Artificial sequence
  Protein classification predicting sequence
PSSPGV

SEQ ID NO: 62315 - protein, 9 aa, Artificial sequence
  Protein classification predicting sequence
DEVMTGFRV

SEQ ID NO: 62316 - protein, 6 aa, Artificial sequence
  Protein classification predicting sequence
FKRFFH

SEQ ID NO: 62317 - protein, 6 aa, Artificial sequence
  Protein classification predicting sequence
DMVRMV

SEQ ID NO: 62318 - protein, 5 aa, Artificial sequence
  Protein classification predicting sequence
NCIPP

SEQ ID NO: 62319 - protein, 13 aa, Artificial sequence
  Protein classification predicting sequence
GPVYQAGTLSGNP

SEQ ID NO: 62320 - protein, 10 aa, Artificial sequence
  Protein classification predicting sequence
VGGMFGIFFT

SEQ ID NO: 62321 - protein, 9 aa, Artificial sequence
  Protein classification predicting sequence
FNRFFHAML

SEQ ID NO: 62322 - protein, 30 aa, Artificial sequence
  Protein classification predicting sequence
ADGAYLYDVDGKAYIDYVGSWGPMVLGHNH

SEQ ID NO: 62323 - protein, 7 aa, Artificial sequence
  Protein classification predicting sequence
AIRNAVI

SEQ ID NO: 62324 - protein, 10 aa, Artificial sequence
  Protein classification predicting sequence
MAQLVTELVP

SEQ ID NO: 62325 - protein, 8 aa, Artificial sequence
  Protein classification predicting sequence
VTCYQDVM

SEQ ID NO: 62326 - protein, 7 aa, Artificial sequence
  Protein classification predicting sequence
CDIERFK

SEQ ID NO: 62327 - protein, 11 aa, Artificial sequence
  Protein classification predicting sequence
YIDYVGSWGPM

SEQ ID NO: 62328 - protein, 15 aa, Artificial sequence
  Protein classification predicting sequence
IACIIVEPVAGNMNC

SEQ ID NO: 62329 - protein, 19 aa, Artificial sequence
  Protein classification predicting sequence
IACIIVEPVAGNMNCIPPV

SEQ ID NO: 62330 - protein, 7 aa, Artificial sequence
  Protein classification predicting sequence
GFLEGLR

SEQ ID NO: 62331 - protein, 12 aa, Artificial sequence
  Protein classification predicting sequence
YNIKPDLTTLGK

SEQ ID NO: 62332 - protein, 9 aa, Artificial sequence
  Protein classification predicting sequence
EEGNEKRLA

SEQ ID NO: 62333 - protein, 6 aa, Artificial sequence
  Protein classification predicting sequence
FTSLAH

SEQ ID NO: 62334 - protein, 7 aa, Artificial sequence
  Protein classification predicting sequence
KEIEATL

SEQ ID NO: 62335 - protein, 8 aa, Artificial sequence
  Protein classification predicting sequence
SGTEAVMT

SEQ ID NO: 62336 - protein, 11 aa, Artificial sequence
  Protein classification predicting sequence
PGGVNSPVRAF

SEQ ID NO: 62337 - protein, 7 aa, Artificial sequence
  Protein classification predicting sequence
VGGTPLF

SEQ ID NO: 62338 - protein, 11 aa, Artificial sequence
  Protein classification predicting sequence
LLVKAGSGALT

SEQ ID NO: 62339 - protein, 19 aa, Artificial sequence
  Protein classification predicting sequence
LIFDEVMTGFRVALGGAQA

SEQ ID NO: 62340 - protein, 6 aa, Artificial sequence
  Protein classification predicting sequence
MFGLYF

SEQ ID NO: 62341 - protein, 7 aa, Artificial sequence
  Protein classification predicting sequence
FAKHTLT

SEQ ID NO: 62342 - protein, 11 aa, Artificial sequence
  Protein classification predicting sequence
GKIIGGGMPVG

SEQ ID NO: 62343 - protein, 23 aa, Artificial sequence
  Protein classification predicting sequence
EAGIPLVVNHVGGMFGIFFTDAE

SEQ ID NO: 62344 - protein, 20 aa, Artificial sequence
  Protein classification predicting sequence
EGVYLAPSAFEAGFMSVAHS

SEQ ID NO: 62345 - protein, 14 aa, Artificial sequence
  Protein classification predicting sequence
SVRAAFEQYPQEIA

SEQ ID NO: 62346 - protein, 8 aa, Artificial sequence
  Protein classification predicting sequence
ERFKRFFH

SEQ ID NO: 62347 - protein, 20 aa, Artificial sequence
  Protein classification predicting sequence
TIPGGVNSPVRAFNGVGGSP

SEQ ID NO: 62348 - protein, 11 aa, Artificial sequence
  Protein classification predicting sequence
KFEGCYHGHAD

SEQ ID NO: 62349 - protein, 15 aa, Artificial sequence
  Protein classification predicting sequence
LLVKAGSGALTLGQP

SEQ ID NO: 62350 - protein, 8 aa, Artificial sequence
  Protein classification predicting sequence
DFAKHTLT

SEQ ID NO: 62351 - protein, 9 aa, Artificial sequence
  Protein classification predicting sequence
EPVAGNMNC

SEQ ID NO: 62352 - protein, 7 aa, Artificial sequence
  Protein classification predicting sequence
GVTPDLT

SEQ ID NO: 62353 - protein, 12 aa, Artificial sequence
  Protein classification predicting sequence
MLDEGVYLAPSA

SEQ ID NO: 62354 - protein, 8 aa, Artificial sequence
  Protein classification predicting sequence
GVYLAPSA

SEQ ID NO: 62355 - protein, 13 aa, Artificial sequence
  Protein classification predicting sequence
YGGAQEYFGITPD

SEQ ID NO: 62356 - protein, 15 aa, Artificial sequence
  Protein classification predicting sequence
VITEASPGNMGVVPP

SEQ ID NO: 62357 - protein, 10 aa, Artificial sequence
  Protein classification predicting sequence
DYVGSWGPAI

SEQ ID NO: 62358 - protein, 14 aa, Artificial sequence
  Protein classification predicting sequence
EMVRFVNSGTEACM

SEQ ID NO: 62359 - protein, 6 aa, Artificial sequence
  Protein classification predicting sequence
YIDYVG

SEQ ID NO: 62360 - protein, 7 aa, Artificial sequence
  Protein classification predicting sequence
VGNSGFI

SEQ ID NO: 62361 - protein, 8 aa, Artificial sequence
  Protein classification predicting sequence
GFLEGLRE

SEQ ID NO: 62362 - protein, 6 aa, Artificial sequence
  Protein classification predicting sequence
TYEYLD

SEQ ID NO: 62363 - protein, 7 aa, Artificial sequence
  Protein classification predicting sequence
EIFAAAQ

SEQ ID NO: 62364 - protein, 6 aa, Artificial sequence
  Protein classification predicting sequence
LMPGGV

SEQ ID NO: 62365 - protein, 7 aa, Artificial sequence
  Protein classification predicting sequence
VLRLMRA

SEQ ID NO: 62366 - protein, 21 aa, Artificial sequence
  Protein classification predicting sequence
FLVKAGSGVATLGLPDSPGVP

SEQ ID NO: 62367 - protein, 16 aa, Artificial sequence
  Protein classification predicting sequence
KAGSGVATLGLPDSPG

SEQ ID NO: 62368 - protein, 19 aa, Artificial sequence
  Protein classification predicting sequence
RMVNSGTEATMSAIRLARG

SEQ ID NO: 62369 - protein, 13 aa, Artificial sequence
  Protein classification predicting sequence
IGGGMPVGAFGGR

SEQ ID NO: 62370 - protein, 9 aa, Artificial sequence
  Protein classification predicting sequence
GLSFGAPTE

SEQ ID NO: 62371 - protein, 11 aa, Artificial sequence
  Protein classification predicting sequence
VRMVSSGTEAT

SEQ ID NO: 62372 - protein, 38 aa, Artificial sequence
  Protein classification predicting sequence
KFEGCYHGHADSLLVKAGSGALTLGQPSSPGVPADFAK

SEQ ID NO: 62373 - protein, 10 aa, Artificial sequence
  Protein classification predicting sequence
SPGVPADFAK

SEQ ID NO: 62374 - protein, 9 aa, Artificial sequence
  Protein classification predicting sequence
AMAAGFACL

SEQ ID NO: 62375 - protein, 11 aa, Artificial sequence
  Protein classification predicting sequence
GVYLAPSAFEA

SEQ ID NO: 62376 - protein, 11 aa, Artificial sequence
  Protein classification predicting sequence
KEIEATLEAAD

SEQ ID NO: 62377 - protein, 18 aa, Artificial sequence
  Protein classification predicting sequence
AYIDYVGSWGPMILGHNH

SEQ ID NO: 62378 - protein, 26 aa, Artificial sequence
  Protein classification predicting sequence
AYIDYVGSWGPMILGHNHAVIREAVI

SEQ ID NO: 62379 - protein, 14 aa, Artificial sequence
  Protein classification predicting sequence
MAELVSELVPSMEQ

SEQ ID NO: 62380 - protein, 16 aa, Artificial sequence
  Protein classification predicting sequence
APTGPVYQAGTLSGNP

SEQ ID NO: 62381 - protein, 7 aa, Artificial sequence
  Protein classification predicting sequence
TFGNPSS

SEQ ID NO: 62382 - protein, 7 aa, Artificial sequence
  Protein classification predicting sequence
LIFDEVM

SEQ ID NO: 62383 - protein, 11 aa, Artificial sequence
  Protein classification predicting sequence
IIKFEGCYHGH

SEQ ID NO: 62384 - protein, 24 aa, Artificial sequence
  Protein classification predicting sequence
GALLIFDEVMTGFRVALGGAQAHY

SEQ ID NO: 62385 - protein, 12 aa, Artificial sequence
  Protein classification predicting sequence
YQAGTLSGNPVA

SEQ ID NO: 62386 - protein, 6 aa, Artificial sequence
  Protein classification predicting sequence
EAGFMS

SEQ ID NO: 62387 - protein, 7 aa, Artificial sequence
  Protein classification predicting sequence
PVGAYGG

SEQ ID NO: 62388 - protein, 8 aa, Artificial sequence
  Protein classification predicting sequence
PSAYEAGF

SEQ ID NO: 62389 - protein, 12 aa, Artificial sequence
  Protein classification predicting sequence
MVRMVNSGTEAT

SEQ ID NO: 62390 - protein, 8 aa, Artificial sequence
  Protein classification predicting sequence
GSGMLTLG

SEQ ID NO: 62391 - protein, 11 aa, Artificial sequence
  Protein classification predicting sequence
GYLQHLRTLCT

SEQ ID NO: 62392 - protein, 25 aa, Artificial sequence
  Protein classification predicting sequence
YGVTPDLTTFGKIIGGGMPVGAYGG

SEQ ID NO: 62393 - protein, 7 aa, Artificial sequence
  Protein classification predicting sequence
YAQATAC

SEQ ID NO: 62394 - protein, 27 aa, Artificial sequence
  Protein classification predicting sequence
LVPTMDMVRMVNSGTEATMSAIRLARG

SEQ ID NO: 62395 - protein, 15 aa, Artificial sequence
  Protein classification predicting sequence
SGTEATMSAIRLARG

SEQ ID NO: 62396 - protein, 14 aa, Artificial sequence
  Protein classification predicting sequence
ACIIVEPVAGNMNC

SEQ ID NO: 62397 - protein, 16 aa, Artificial sequence
  Protein classification predicting sequence
EGVYLAPSAFEAGFMS

SEQ ID NO: 62398 - protein, 7 aa, Artificial sequence
  Protein classification predicting sequence
PNLLVNG

SEQ ID NO: 62399 - protein, 11 aa, Artificial sequence
  Protein classification predicting sequence
NGSSGIAVGMA

SEQ ID NO: 62400 - protein, 7 aa, Artificial sequence
  Protein classification predicting sequence
GIAVGMA

SEQ ID NO: 62401 - protein, 7 aa, Artificial sequence
  Protein classification predicting sequence
AYRTGRG

SEQ ID NO: 62402 - protein, 13 aa, Artificial sequence
  Protein classification predicting sequence
ALANIDPIIELIR

SEQ ID NO: 62403 - protein, 16 aa, Artificial sequence
  Protein classification predicting sequence
AGDDAARPEWLEPEFG

SEQ ID NO: 62404 - protein, 14 aa, Artificial sequence
  Protein classification predicting sequence
LTEQQAQAILDLRL

SEQ ID NO: 62405 - protein, 7 aa, Artificial sequence
  Protein classification predicting sequence
QAQAILD

SEQ ID NO: 62406 - protein, 7 aa, Artificial sequence
  Protein classification predicting sequence
RLMEVIR

SEQ ID NO: 62407 - protein, 9 aa, Artificial sequence
  Protein classification predicting sequence
EDVVVTLSH

SEQ ID NO: 62408 - protein, 7 aa, Artificial sequence
  Protein classification predicting sequence
GYVKYQP

SEQ ID NO: 62409 - protein, 7 aa, Artificial sequence
  Protein classification predicting sequence
TENGYGK

SEQ ID NO: 62410 - protein, 7 aa, Artificial sequence
  Protein classification predicting sequence
EYPTKSR

SEQ ID NO: 62411 - protein, 6 aa, Artificial sequence
  Protein classification predicting sequence
GVRLIR

SEQ ID NO: 62412 - protein, 8 aa, Artificial sequence
  Protein classification predicting sequence
KKSARIVG

SEQ ID NO: 62413 - protein, 7 aa, Artificial sequence
  Protein classification predicting sequence
GQGNFGS

SEQ ID NO: 62414 - protein, 11 aa, Artificial sequence
  Protein classification predicting sequence
PSKFPNLLCNG

SEQ ID NO: 62415 - protein, 6 aa, Artificial sequence
  Protein classification predicting sequence
IPPHNL

SEQ ID NO: 62416 - protein, 6 aa, Artificial sequence
  Protein classification predicting sequence
EMKTSF

SEQ ID NO: 62417 - protein, 14 aa, Artificial sequence
  Protein classification predicting sequence
VIGKYHPHGDSAVY

SEQ ID NO: 62418 - protein, 6 aa, Artificial sequence
  Protein classification predicting sequence
MVRMAQ

SEQ ID NO: 62419 - protein, 12 aa, Artificial sequence
  Protein classification predicting sequence
MVRMAQDFSYRY

SEQ ID NO: 62420 - protein, 8 aa, Artificial sequence
  Protein classification predicting sequence
DGHGNFGS

SEQ ID NO: 62421 - protein, 9 aa, Artificial sequence
  Protein classification predicting sequence
RDINKDTID

SEQ ID NO: 62422 - protein, 8 aa, Artificial sequence
  Protein classification predicting sequence
IEKIAELV

SEQ ID NO: 62423 - protein, 22 aa, Artificial sequence
  Protein classification predicting sequence
IEKIAELVRDKKIDGITDLRDE

SEQ ID NO: 62424 - protein, 7 aa, Artificial sequence
  Protein classification predicting sequence
GMRIVIE

SEQ ID NO: 62425 - protein, 8 aa, Artificial sequence
  Protein classification predicting sequence
LNNLYKQT

SEQ ID NO: 62426 - protein, 6 aa, Artificial sequence
  Protein classification predicting sequence
LQTSFG

SEQ ID NO: 62427 - protein, 10 aa, Artificial sequence
  Protein classification predicting sequence
IALDHLDEVI

SEQ ID NO: 62428 - protein, 7 aa, Artificial sequence
  Protein classification predicting sequence
LFFTNKG

SEQ ID NO: 62429 - protein, 8 aa, Artificial sequence
  Protein classification predicting sequence
RGGKGIKT

SEQ ID NO: 62430 - protein, 13 aa, Artificial sequence
  Protein classification predicting sequence
QDNYDGSEREPVV

SEQ ID NO: 62431 - protein, 13 aa, Artificial sequence
  Protein classification predicting sequence
GIAVGMATNIPPH

SEQ ID NO: 62432 - protein, 13 aa, Artificial sequence
  Protein classification predicting sequence
ELMEVIPGPDFPT

SEQ ID NO: 62433 - protein, 8 aa, Artificial sequence
  Protein classification predicting sequence
IPGPDFPT

SEQ ID NO: 62434 - protein, 7 aa, Artificial sequence
  Protein classification predicting sequence
LVRDKKI

SEQ ID NO: 62435 - protein, 8 aa, Artificial sequence
  Protein classification predicting sequence
GITDLRDE

SEQ ID NO: 62436 - protein, 7 aa, Artificial sequence
  Protein classification predicting sequence
RLTGLER

SEQ ID NO: 62437 - protein, 6 aa, Artificial sequence
  Protein classification predicting sequence
EDEDLI

SEQ ID NO: 62438 - protein, 6 aa, Artificial sequence
  Protein classification predicting sequence
THDTIL

SEQ ID NO: 62439 - protein, 12 aa, Artificial sequence
  Protein classification predicting sequence
YEIPEYGRTAKG

SEQ ID NO: 62440 - protein, 7 aa, Artificial sequence
  Protein classification predicting sequence
GVKGITL

SEQ ID NO: 62441 - protein, 7 aa, Artificial sequence
  Protein classification predicting sequence
QSRGGKG

SEQ ID NO: 62442 - protein, 6 aa, Artificial sequence
  Protein classification predicting sequence
GPDFPT

SEQ ID NO: 62443 - protein, 13 aa, Artificial sequence
  Protein classification predicting sequence
VGDVIGKYHPHGD

SEQ ID NO: 62444 - protein, 11 aa, Artificial sequence
  Protein classification predicting sequence
RNTQGVILIRT

SEQ ID NO: 62445 - protein, 16 aa, Artificial sequence
  Protein classification predicting sequence
RALPDVRDGLKPVHRR

SEQ ID NO: 62446 - protein, 6 aa, Artificial sequence
  Protein classification predicting sequence
GCLAYI

SEQ ID NO: 62447 - protein, 6 aa, Artificial sequence
  Protein classification predicting sequence
NPDISI

SEQ ID NO: 62448 - protein, 8 aa, Artificial sequence
  Protein classification predicting sequence
ERITAILP

SEQ ID NO: 62449 - protein, 7 aa, Artificial sequence
  Protein classification predicting sequence
DQIMMIT

SEQ ID NO: 62450 - protein, 8 aa, Artificial sequence
  Protein classification predicting sequence
DGQGNFGS

SEQ ID NO: 62451 - protein, 6 aa, Artificial sequence
  Protein classification predicting sequence
NYDGTE

SEQ ID NO: 62452 - protein, 18 aa, Artificial sequence
  Protein classification predicting sequence
NGSSGIAVGMATNIPPHN

SEQ ID NO: 62453 - protein, 10 aa, Artificial sequence
  Protein classification predicting sequence
GPDFPTAGLI

SEQ ID NO: 62454 - protein, 6 aa, Artificial sequence
  Protein classification predicting sequence
GYVKYQ

SEQ ID NO: 62455 - protein, 6 aa, Artificial sequence
  Protein classification predicting sequence
KEEDFI

SEQ ID NO: 62456 - protein, 6 aa, Artificial sequence
  Protein classification predicting sequence
LNNLFK

SEQ ID NO: 62457 - protein, 6 aa, Artificial sequence
  Protein classification predicting sequence
GIVKRT

SEQ ID NO: 62458 - protein, 7 aa, Artificial sequence
  Protein classification predicting sequence
NKARLIE

SEQ ID NO: 62459 - protein, 9 aa, Artificial sequence
  Protein classification predicting sequence
AAMRYTEAR

SEQ ID NO: 62460 - protein, 8 aa, Artificial sequence
  Protein classification predicting sequence
RDESDKDG

SEQ ID NO: 62461 - protein, 7 aa, Artificial sequence
  Protein classification predicting sequence
RRVLYAM

SEQ ID NO: 62462 - protein, 6 aa, Artificial sequence
  Protein classification predicting sequence
DKDTVD

SEQ ID NO: 62463 - protein, 8 aa, Artificial sequence
  Protein classification predicting sequence
ATKRGVVK

SEQ ID NO: 62464 - protein, 11 aa, Artificial sequence
  Protein classification predicting sequence
KAEARAHILEG

SEQ ID NO: 62465 - protein, 7 aa, Artificial sequence
  Protein classification predicting sequence
RAHILEG

SEQ ID NO: 62466 - protein, 7 aa, Artificial sequence
  Protein classification predicting sequence
TVDFIPN

SEQ ID NO: 62467 - protein, 9 aa, Artificial sequence
  Protein classification predicting sequence
GISDLRDES

SEQ ID NO: 62468 - protein, 8 aa, Artificial sequence
  Protein classification predicting sequence
IALDHIDE

SEQ ID NO: 62469 - protein, 7 aa, Artificial sequence
  Protein classification predicting sequence
RRTIFEL

SEQ ID NO: 62470 - protein, 15 aa, Artificial sequence
  Protein classification predicting sequence
RGARGRPIVNLLPLE

SEQ ID NO: 62471 - protein, 7 aa, Artificial sequence
  Protein classification predicting sequence
IPDVMPT

SEQ ID NO: 62472 - protein, 26 aa, Artificial sequence
  Protein classification predicting sequence
GPDFPTAAIINGRRGIEEAYRTGRGK

SEQ ID NO: 62473 - protein, 6 aa, Artificial sequence
  Protein classification predicting sequence
GQPKIM

SEQ ID NO: 62474 - protein, 21 aa, Artificial sequence
  Protein classification predicting sequence
YYLTEQQAQAILDLRLQKLTG

SEQ ID NO: 62475 - protein, 13 aa, Artificial sequence
  Protein classification predicting sequence
EHEKLLDEYKELL

SEQ ID NO: 62476 - protein, 7 aa, Artificial sequence
  Protein classification predicting sequence
GRTATGV

SEQ ID NO: 62477 - protein, 8 aa, Artificial sequence
  Protein classification predicting sequence
VVGAVQVD

SEQ ID NO: 62478 - protein, 8 aa, Artificial sequence
  Protein classification predicting sequence
LIRTAEDE

SEQ ID NO: 62479 - protein, 42 aa, Artificial sequence
  Protein classification predicting sequence
ITPVNIEEELKSSYLDYAMSVIVGRALPDVRDGLKPVHRRVL

SEQ ID NO: 62480 - protein, 7 aa, Artificial sequence
  Protein classification predicting sequence
AAMRYTE

SEQ ID NO: 62481 - protein, 6 aa, Artificial sequence
  Protein classification predicting sequence
LYSLTQ

SEQ ID NO: 62482 - protein, 9 aa, Artificial sequence
  Protein classification predicting sequence
HRREVVTRR

SEQ ID NO: 62483 - protein, 7 aa, Artificial sequence
  Protein classification predicting sequence
IAIIRNS

SEQ ID NO: 62484 - protein, 21 aa, Artificial sequence
  Protein classification predicting sequence
LLVANTHDTILCFSSRGRLYW

SEQ ID NO: 62485 - protein, 6 aa, Artificial sequence
  Protein classification predicting sequence
KVYQLP

SEQ ID NO: 62486 - protein, 10 aa, Artificial sequence
  Protein classification predicting sequence
LVDGQGNFGS

SEQ ID NO: 62487 - protein, 8 aa, Artificial sequence
  Protein classification predicting sequence
AAAMRYTE

SEQ ID NO: 62488 - protein, 7 aa, Artificial sequence
  Protein classification predicting sequence
DFVPNYD

SEQ ID NO: 62489 - protein, 10 aa, Artificial sequence
  Protein classification predicting sequence
RLTGLERDKI

SEQ ID NO: 62490 - protein, 6 aa, Artificial sequence
  Protein classification predicting sequence
VANTHD

SEQ ID NO: 62491 - protein, 12 aa, Artificial sequence
  Protein classification predicting sequence
DGDSAAAMRYTE

SEQ ID NO: 62492 - protein, 8 aa, Artificial sequence
  Protein classification predicting sequence
PNLLVNGS

SEQ ID NO: 62493 - protein, 7 aa, Artificial sequence
  Protein classification predicting sequence
VVLNNLY

SEQ ID NO: 62494 - protein, 7 aa, Artificial sequence
  Protein classification predicting sequence
YAMSVIV

SEQ ID NO: 62495 - protein, 10 aa, Artificial sequence
  Protein classification predicting sequence
RDGLKPVHRR

SEQ ID NO: 62496 - protein, 6 aa, Artificial sequence
  Protein classification predicting sequence
GKYHPH

SEQ ID NO: 62497 - protein, 9 aa, Artificial sequence
  Protein classification predicting sequence
GNFGSIDGD

SEQ ID NO: 62498 - protein, 8 aa, Artificial sequence
  Protein classification predicting sequence
FPNLLANG

SEQ ID NO: 62499 - protein, 7 aa, Artificial sequence
  Protein classification predicting sequence
GRNTSGV

SEQ ID NO: 62500 - protein, 10 aa, Artificial sequence
  Protein classification predicting sequence
NGSSGIAVGM

SEQ ID NO: 62501 - protein, 6 aa, Artificial sequence
  Protein classification predicting sequence
VVTEIP

SEQ ID NO: 62502 - protein, 7 aa, Artificial sequence
  Protein classification predicting sequence
VIEVKRD

SEQ ID NO: 62503 - protein, 6 aa, Artificial sequence
  Protein classification predicting sequence
TGRGSI

SEQ ID NO: 62504 - protein, 6 aa, Artificial sequence
  Protein classification predicting sequence
FGANML

SEQ ID NO: 62505 - protein, 6 aa, Artificial sequence
  Protein classification predicting sequence
GDDRRT

SEQ ID NO: 62506 - protein, 6 aa, Artificial sequence
  Protein classification predicting sequence
AQRRGG

SEQ ID NO: 62507 - protein, 9 aa, Artificial sequence
  Protein classification predicting sequence
ADLEKETVD

SEQ ID NO: 62508 - protein, 11 aa, Artificial sequence
  Protein classification predicting sequence
LRDESDKDGMR

SEQ ID NO: 62509 - protein, 6 aa, Artificial sequence
  Protein classification predicting sequence
QAQAIL

SEQ ID NO: 62510 - protein, 6 aa, Artificial sequence
  Protein classification predicting sequence
VNLLPL

SEQ ID NO: 62511 - protein, 9 aa, Artificial sequence
  Protein classification predicting sequence
KSARIVGDV

SEQ ID NO: 62512 - protein, 11 aa, Artificial sequence
  Protein classification predicting sequence
PLVDGQGNFGS

SEQ ID NO: 62513 - protein, 12 aa, Artificial sequence
  Protein classification predicting sequence
GDVMGKYHPHGD

SEQ ID NO: 62514 - protein, 8 aa, Artificial sequence
  Protein classification predicting sequence
GKYHPHGD

SEQ ID NO: 62515 - protein, 47 aa, Artificial sequence
  Protein classification predicting sequence
SLQQRFKLSEKQAQAILDMRLRRLTGLERDKIEAEYNELLNYISELE

SEQ ID NO: 62516 - protein, 8 aa, Artificial sequence
  Protein classification predicting sequence
RGGRGVQG

SEQ ID NO: 62517 - protein, 7 aa, Artificial sequence
  Protein classification predicting sequence
NEDEQST

SEQ ID NO: 62518 - protein, 33 aa, Artificial sequence
  Protein classification predicting sequence
STVSEDGTEQQREAVVNDETPGNAIHTEVIDSE

SEQ ID NO: 62519 - protein, 19 aa, Artificial sequence
  Protein classification predicting sequence
RALPDVRDGLKPVHRRILY

SEQ ID NO: 62520 - protein, 30 aa, Artificial sequence
  Protein classification predicting sequence
RALPDVRDGLKPVHRRILYGLNEQGMTPDK

SEQ ID NO: 62521 - protein, 6 aa, Artificial sequence
  Protein classification predicting sequence
YKKSAR

SEQ ID NO: 62522 - protein, 11 aa, Artificial sequence
  Protein classification predicting sequence
GVLSLSKNPDI

SEQ ID NO: 62523 - protein, 23 aa, Artificial sequence
  Protein classification predicting sequence
LGKSGIRRAYETGRGSIQMRSRA

SEQ ID NO: 62524 - protein, 14 aa, Artificial sequence
  Protein classification predicting sequence
HYLEHQKTVVRRRT

SEQ ID NO: 62525 - protein, 20 aa, Artificial sequence
  Protein classification predicting sequence
DRAHILEGLRIALDHIDEII

SEQ ID NO: 62526 - protein, 9 aa, Artificial sequence
  Protein classification predicting sequence
TIRESDTDK

SEQ ID NO: 62527 - protein, 19 aa, Artificial sequence
  Protein classification predicting sequence
ILADEEVLLQLVRDELTEI

SEQ ID NO: 62528 - protein, 9 aa, Artificial sequence
  Protein classification predicting sequence
RRTEIQLGG

SEQ ID NO: 62529 - protein, 33 aa, Artificial sequence
  Protein classification predicting sequence
EDLEDEDLIPEEQIVITLSHNNYIKRLPVSTYR

SEQ ID NO: 62530 - protein, 6 aa, Artificial sequence
  Protein classification predicting sequence
QGMNTL

SEQ ID NO: 62531 - protein, 9 aa, Artificial sequence
  Protein classification predicting sequence
EDFVSQLVT

SEQ ID NO: 62532 - protein, 34 aa, Artificial sequence
  Protein classification predicting sequence
STHDHVLFFTNKGRVYKLKGYEVPELSRQSKGIP

SEQ ID NO: 62533 - protein, 9 aa, Artificial sequence
  Protein classification predicting sequence
NAIELENDE

SEQ ID NO: 62534 - protein, 13 aa, Artificial sequence
  Protein classification predicting sequence
ISTMIAVKDLESE

SEQ ID NO: 62535 - protein, 8 aa, Artificial sequence
  Protein classification predicting sequence
TKQGIVKR

SEQ ID NO: 62536 - protein, 8 aa, Artificial sequence
  Protein classification predicting sequence
LSNFSRIN

SEQ ID NO: 62537 - protein, 11 aa, Artificial sequence
  Protein classification predicting sequence
EDDELIAVRLT

SEQ ID NO: 62538 - protein, 7 aa, Artificial sequence
  Protein classification predicting sequence
HASLIRF

SEQ ID NO: 62539 - protein, 11 aa, Artificial sequence
  Protein classification predicting sequence
ESTLRPLGRTA

SEQ ID NO: 62540 - protein, 7 aa, Artificial sequence
  Protein classification predicting sequence
VVGLDVA

SEQ ID NO: 62541 - protein, 17 aa, Artificial sequence
  Protein classification predicting sequence
DEVLVVTENGYGKRTPV

SEQ ID NO: 62542 - protein, 22 aa, Artificial sequence
  Protein classification predicting sequence
YRLSNRGGKGIKTATITERNGN

SEQ ID NO: 62543 - protein, 13 aa, Artificial sequence
  Protein classification predicting sequence
VCITTVTGEEDLM

SEQ ID NO: 62544 - protein, 12 aa, Artificial sequence
  Protein classification predicting sequence
VTNAGVIIRLDV

SEQ ID NO: 62545 - protein, 14 aa, Artificial sequence
  Protein classification predicting sequence
DISQNGRAAQGVRL

SEQ ID NO: 62546 - protein, 9 aa, Artificial sequence
  Protein classification predicting sequence
QFVSTVAKV

SEQ ID NO: 62547 - protein, 9 aa, Artificial sequence
  Protein classification predicting sequence
TPGNAIHTE

SEQ ID NO: 62548 - protein, 10 aa, Artificial sequence
  Protein classification predicting sequence
VLPARFPNLL

SEQ ID NO: 62549 - protein, 10 aa, Artificial sequence
  Protein classification predicting sequence
LFFTNKGRVY

SEQ ID NO: 62550 - protein, 6 aa, Artificial sequence
  Protein classification predicting sequence
KKSARI

SEQ ID NO: 62551 - protein, 6 aa, Artificial sequence
  Protein classification predicting sequence
VILNNL

SEQ ID NO: 62552 - protein, 17 aa, Artificial sequence
  Protein classification predicting sequence
AAAQRYTEARMSKIALE

SEQ ID NO: 62553 - protein, 6 aa, Artificial sequence
  Protein classification predicting sequence
LRDINK

SEQ ID NO: 62554 - protein, 7 aa, Artificial sequence
  Protein classification predicting sequence
PGPDFPT

SEQ ID NO: 62555 - protein, 13 aa, Artificial sequence
  Protein classification predicting sequence
PGPDFPTGALVMG

SEQ ID NO: 62556 - protein, 17 aa, Artificial sequence
  Protein classification predicting sequence
TGKGSIVLRSRTEIETT

SEQ ID NO: 62557 - protein, 13 aa, Artificial sequence
  Protein classification predicting sequence
TGRERIVVTEFPY

SEQ ID NO: 62558 - protein, 13 aa, Artificial sequence
  Protein classification predicting sequence
VNKTKVHEHIVRL

SEQ ID NO: 62559 - protein, 10 aa, Artificial sequence
  Protein classification predicting sequence
EGITAVRDES

SEQ ID NO: 62560 - protein, 9 aa, Artificial sequence
  Protein classification predicting sequence
REGVRFVIE

SEQ ID NO: 62561 - protein, 9 aa, Artificial sequence
  Protein classification predicting sequence
PKILSLRQI

SEQ ID NO: 62562 - protein, 7 aa, Artificial sequence
  Protein classification predicting sequence
RRTRFDK

SEQ ID NO: 62563 - protein, 12 aa, Artificial sequence
  Protein classification predicting sequence
VLSLEDEDLIEE

SEQ ID NO: 62564 - protein, 8 aa, Artificial sequence
  Protein classification predicting sequence
DVLITLSN

SEQ ID NO: 62565 - protein, 14 aa, Artificial sequence
  Protein classification predicting sequence
AQKRGGRGVQGTGV

SEQ ID NO: 62566 - protein, 7 aa, Artificial sequence
  Protein classification predicting sequence
NIRQNGL

SEQ ID NO: 62567 - protein, 10 aa, Artificial sequence
  Protein classification predicting sequence
YPTKGRGGKG

SEQ ID NO: 62568 - protein, 10 aa, Artificial sequence
  Protein classification predicting sequence
ANISQTGRAT

SEQ ID NO: 62569 - protein, 80 aa, Artificial sequence
  Protein classification predicting sequence
SFIDYAMSVIVARALPDVRDGLKPVHRRILYGMNELGVTPDKPHKKSARITGDVMGKYHPHGDSSIYEAMVRMAQWWSYR

SEQ ID NO: 62570 - protein, 39 aa, Artificial sequence
  Protein classification predicting sequence
LSERQSQAILDMRLRRLTGLERDKIQSEYDDLLALIADL

SEQ ID NO: 62571 - protein, 8 aa, Artificial sequence
  Protein classification predicting sequence
RRTELMVG

SEQ ID NO: 62572 - protein, 7 aa, Artificial sequence
  Protein classification predicting sequence
RRTRYEL

SEQ ID NO: 62573 - protein, 6 aa, Artificial sequence
  Protein classification predicting sequence
MQLRRL

SEQ ID NO: 62574 - protein, 6 aa, Artificial sequence
  Protein classification predicting sequence
LMIVTN

SEQ ID NO: 62575 - protein, 7 aa, Artificial sequence
  Protein classification predicting sequence
RSATGVR

SEQ ID NO: 62576 - protein, 6 aa, Artificial sequence
  Protein classification predicting sequence
YSMSVI

SEQ ID NO: 62577 - protein, 6 aa, Artificial sequence
  Protein classification predicting sequence
RDESDK

SEQ ID NO: 62578 - protein, 6 aa, Artificial sequence
  Protein classification predicting sequence
EPTVLP

SEQ ID NO: 62579 - protein, 6 aa, Artificial sequence
  Protein classification predicting sequence
KPVHRR

SEQ ID NO: 62580 - protein, 15 aa, Artificial sequence
  Protein classification predicting sequence
GIAVGMATNIPPHNL

SEQ ID NO: 62581 - protein, 6 aa, Artificial sequence
  Protein classification predicting sequence
RDESSR

SEQ ID NO: 62582 - protein, 8 aa, Artificial sequence
  Protein classification predicting sequence
KAILEMRL

SEQ ID NO: 62583 - protein, 8 aa, Artificial sequence
  Protein classification predicting sequence
SRQSKGIP

SEQ ID NO: 62584 - protein, 11 aa, Artificial sequence
  Protein classification predicting sequence
AVRKRPGMYIG

SEQ ID NO: 62585 - protein, 6 aa, Artificial sequence
  Protein classification predicting sequence
GLHHLV

SEQ ID NO: 62586 - protein, 8 aa, Artificial sequence
  Protein classification predicting sequence
VDNSVDEA

SEQ ID NO: 62587 - protein, 9 aa, Artificial sequence
  Protein classification predicting sequence
DNGRGIPVG

SEQ ID NO: 62588 - protein, 6 aa, Artificial sequence
  Protein classification predicting sequence
RPAVEV

SEQ ID NO: 62589 - protein, 14 aa, Artificial sequence
  Protein classification predicting sequence
TVLHAGGKFGGGGY

SEQ ID NO: 62590 - protein, 8 aa, Artificial sequence
  Protein classification predicting sequence
THEGGTHE

SEQ ID NO: 62591 - protein, 6 aa, Artificial sequence
  Protein classification predicting sequence
TLLLTF

SEQ ID NO: 62592 - protein, 8 aa, Artificial sequence
  Protein classification predicting sequence
QVTLDDAA

SEQ ID NO: 62593 - protein, 12 aa, Artificial sequence
  Protein classification predicting sequence
LMADADVDGQHI

SEQ ID NO: 62594 - protein, 10 aa, Artificial sequence
  Protein classification predicting sequence
RNAKDVRFLD

SEQ ID NO: 62595 - protein, 10 aa, Artificial sequence
  Protein classification predicting sequence
SVVNALSEWL

SEQ ID NO: 62596 - protein, 10 aa, Artificial sequence
  Protein classification predicting sequence
PNPQFEGQTK

SEQ ID NO: 62597 - protein, 13 aa, Artificial sequence
  Protein classification predicting sequence
PQFEGQTKTKLGN

SEQ ID NO: 62598 - protein, 6 aa, Artificial sequence
  Protein classification predicting sequence
NVEKAR

SEQ ID NO: 62599 - protein, 14 aa, Artificial sequence
  Protein classification predicting sequence
HIRTLLLTFFYRFM

SEQ ID NO: 62600 - protein, 6 aa, Artificial sequence
  Protein classification predicting sequence
GYVYIA

SEQ ID NO: 62601 - protein, 7 aa, Artificial sequence
  Protein classification predicting sequence
QLWETTM

SEQ ID NO: 62602 - protein, 7 aa, Artificial sequence
  Protein classification predicting sequence
LHAGGKF

SEQ ID NO: 62603 - protein, 7 aa, Artificial sequence
  Protein classification predicting sequence
LNRGLKI

SEQ ID NO: 62604 - protein, 8 aa, Artificial sequence
  Protein classification predicting sequence
AREAAKRA

SEQ ID NO: 62605 - protein, 9 aa, Artificial sequence
  Protein classification predicting sequence
GKIINVEKA

SEQ ID NO: 62606 - protein, 6 aa, Artificial sequence
  Protein classification predicting sequence
MRPLIE

SEQ ID NO: 62607 - protein, 8 aa, Artificial sequence
  Protein classification predicting sequence
YIAQPPLY

SEQ ID NO: 62608 - protein, 13 aa, Artificial sequence
  Protein classification predicting sequence
ADELFSILMGEDV

SEQ ID NO: 62609 - protein, 12 aa, Artificial sequence
  Protein classification predicting sequence
QIQVLEGLEAVR

SEQ ID NO: 62610 - protein, 15 aa, Artificial sequence
  Protein classification predicting sequence
PQFEGQTKTKLGNSE

SEQ ID NO: 62611 - protein, 9 aa, Artificial sequence
  Protein classification predicting sequence
VARKIVEKG

SEQ ID NO: 62612 - protein, 6 aa, Artificial sequence
  Protein classification predicting sequence
IGGDFD

SEQ ID NO: 62613 - protein, 10 aa, Artificial sequence
  Protein classification predicting sequence
GYIYIAQPPL

SEQ ID NO: 62614 - protein, 11 aa, Artificial sequence
  Protein classification predicting sequence
EKMGRPAVEVI

SEQ ID NO: 62615 - protein, 6 aa, Artificial sequence
  Protein classification predicting sequence
SFANNI

SEQ ID NO: 62616 - protein, 9 aa, Artificial sequence
  Protein classification predicting sequence
REGLTAIIS

SEQ ID NO: 62617 - protein, 15 aa, Artificial sequence
  Protein classification predicting sequence
LEISNLPGKLADCSS

SEQ ID NO: 62618 - protein, 10 aa, Artificial sequence
  Protein classification predicting sequence
LPGKLADCSS

SEQ ID NO: 62619 - protein, 7 aa, Artificial sequence
  Protein classification predicting sequence
DNGRGIP

SEQ ID NO: 62620 - protein, 6 aa, Artificial sequence
  Protein classification predicting sequence
KGLGEM

SEQ ID NO: 62621 - protein, 8 aa, Artificial sequence
  Protein classification predicting sequence
VDNSIDEA

SEQ ID NO: 62622 - protein, 11 aa, Artificial sequence
  Protein classification predicting sequence
VDNSIDEALAG

SEQ ID NO: 62623 - protein, 9 aa, Artificial sequence
  Protein classification predicting sequence
GRGIPTDIH

SEQ ID NO: 62624 - protein, 11 aa, Artificial sequence
  Protein classification predicting sequence
YKVSGGLHGVG

SEQ ID NO: 62625 - protein, 8 aa, Artificial sequence
  Protein classification predicting sequence
LPGKLADC

SEQ ID NO: 62626 - protein, 14 aa, Artificial sequence
  Protein classification predicting sequence
DADVDGSHIRTLLL

SEQ ID NO: 62627 - protein, 8 aa, Artificial sequence
  Protein classification predicting sequence
EGLTAVIS

SEQ ID NO: 62628 - protein, 19 aa, Artificial sequence
  Protein classification predicting sequence
GLDAVRKRPGMYIGDTDDG

SEQ ID NO: 62629 - protein, 8 aa, Artificial sequence
  Protein classification predicting sequence
GLHHMVFE

SEQ ID NO: 62630 - protein, 6 aa, Artificial sequence
  Protein classification predicting sequence
DNSVSV

SEQ ID NO: 62631 - protein, 6 aa, Artificial sequence
  Protein classification predicting sequence
SAAEVI

SEQ ID NO: 62632 - protein, 8 aa, Artificial sequence
  Protein classification predicting sequence
EVILTVLH

SEQ ID NO: 62633 - protein, 7 aa, Artificial sequence
  Protein classification predicting sequence
GEDTREG

SEQ ID NO: 62634 - protein, 13 aa, Artificial sequence
  Protein classification predicting sequence
QAILPLKGKILNV

SEQ ID NO: 62635 - protein, 7 aa, Artificial sequence
  Protein classification predicting sequence
LKGLDAV

SEQ ID NO: 62636 - protein, 17 aa, Artificial sequence
  Protein classification predicting sequence
TDDGTGLHHMVFEVVDN

SEQ ID NO: 62637 - protein, 8 aa, Artificial sequence
  Protein classification predicting sequence
LHAGGKFD

SEQ ID NO: 62638 - protein, 6 aa, Artificial sequence
  Protein classification predicting sequence
TNNIPQ

SEQ ID NO: 62639 - protein, 9 aa, Artificial sequence
  Protein classification predicting sequence
DPKFSSQTK

SEQ ID NO: 62640 - protein, 12 aa, Artificial sequence
  Protein classification predicting sequence
VEGDSAGGSAKQ

SEQ ID NO: 62641 - protein, 7 aa, Artificial sequence
  Protein classification predicting sequence
IKVLKGL

SEQ ID NO: 62642 - protein, 6 aa, Artificial sequence
  Protein classification predicting sequence
YEVVDN

SEQ ID NO: 62643 - protein, 6 aa, Artificial sequence
  Protein classification predicting sequence
DVREGL

SEQ ID NO: 62644 - protein, 6 aa, Artificial sequence
  Protein classification predicting sequence
MITAFG

SEQ ID NO: 62645 - protein, 6 aa, Artificial sequence
  Protein classification predicting sequence
AQPPLY

SEQ ID NO: 62646 - protein, 6 aa, Artificial sequence
  Protein classification predicting sequence
LWETTM

SEQ ID NO: 62647 - protein, 8 aa, Artificial sequence
  Protein classification predicting sequence
LWETTMDP

SEQ ID NO: 62648 - protein, 8 aa, Artificial sequence
  Protein classification predicting sequence
SIKVLKGL

SEQ ID NO: 62649 - protein, 7 aa, Artificial sequence
  Protein classification predicting sequence
VYEVVDN

SEQ ID NO: 62650 - protein, 7 aa, Artificial sequence
  Protein classification predicting sequence
IDEALAG

SEQ ID NO: 62651 - protein, 22 aa, Artificial sequence
  Protein classification predicting sequence
SVKVPDPKFSSQTKDKLVSSEV

SEQ ID NO: 62652 - protein, 10 aa, Artificial sequence
  Protein classification predicting sequence
AREAARKARE

SEQ ID NO: 62653 - protein, 7 aa, Artificial sequence
  Protein classification predicting sequence
TRRKSAL

SEQ ID NO: 62654 - protein, 7 aa, Artificial sequence
  Protein classification predicting sequence
RPGMYIG

SEQ ID NO: 62655 - protein, 6 aa, Artificial sequence
  Protein classification predicting sequence
SAKQGR

SEQ ID NO: 62656 - protein, 8 aa, Artificial sequence
  Protein classification predicting sequence
PQFEGQTK

SEQ ID NO: 62657 - protein, 10 aa, Artificial sequence
  Protein classification predicting sequence
RGKILNVEKA

SEQ ID NO: 62658 - protein, 14 aa, Artificial sequence
  Protein classification predicting sequence
RYKGLGEMNADQLW

SEQ ID NO: 62659 - protein, 7 aa, Artificial sequence
  Protein classification predicting sequence
SHIKVFI

SEQ ID NO: 62660 - protein, 7 aa, Artificial sequence
  Protein classification predicting sequence
RELAFLN

SEQ ID NO: 62661 - protein, 8 aa, Artificial sequence
  Protein classification predicting sequence
GGTHLAGF

SEQ ID NO: 62662 - protein, 7 aa, Artificial sequence
  Protein classification predicting sequence
AAKKARE

SEQ ID NO: 62663 - protein, 8 aa, Artificial sequence
  Protein classification predicting sequence
LTFFYRYM

SEQ ID NO: 62664 - protein, 6 aa, Artificial sequence
  Protein classification predicting sequence
FIEENA

SEQ ID NO: 62665 - protein, 6 aa, Artificial sequence
  Protein classification predicting sequence
HYEGGI

SEQ ID NO: 62666 - protein, 7 aa, Artificial sequence
  Protein classification predicting sequence
EYLLENP

SEQ ID NO: 62667 - protein, 6 aa, Artificial sequence
  Protein classification predicting sequence
GIPVDI

SEQ ID NO: 62668 - protein, 10 aa, Artificial sequence
  Protein classification predicting sequence
AFVEYLNKNK

SEQ ID NO: 62669 - protein, 16 aa, Artificial sequence
  Protein classification predicting sequence
EKDGIGVEVALQWNDG

SEQ ID NO: 62670 - protein, 8 aa, Artificial sequence
  Protein classification predicting sequence
GDDAREGL

SEQ ID NO: 62671 - protein, 23 aa, Artificial sequence
  Protein classification predicting sequence
TLITALGCGIGRDEYNPDKLRYH

SEQ ID NO: 62672 - protein, 11 aa, Artificial sequence
  Protein classification predicting sequence
IIIMTDADVDG

SEQ ID NO: 62673 - protein, 8 aa, Artificial sequence
  Protein classification predicting sequence
TGTTIRFW

SEQ ID NO: 62674 - protein, 9 aa, Artificial sequence
  Protein classification predicting sequence
RLRELAFLN

SEQ ID NO: 62675 - protein, 6 aa, Artificial sequence
  Protein classification predicting sequence
IEVEIA

SEQ ID NO: 62676 - protein, 9 aa, Artificial sequence
  Protein classification predicting sequence
GFKTALTRV

SEQ ID NO: 62677 - protein, 17 aa, Artificial sequence
  Protein classification predicting sequence
GEDVREGLTAVISVKHP

SEQ ID NO: 62678 - protein, 10 aa, Artificial sequence
  Protein classification predicting sequence
QRFKGLGEMN

SEQ ID NO: 62679 - protein, 11 aa, Artificial sequence
  Protein classification predicting sequence
DQLWDTTMNPE

SEQ ID NO: 62680 - protein, 6 aa, Artificial sequence
  Protein classification predicting sequence
TTMNPE

SEQ ID NO: 62681 - protein, 8 aa, Artificial sequence
  Protein classification predicting sequence
EGLIAVVS

SEQ ID NO: 62682 - protein, 6 aa, Artificial sequence
  Protein classification predicting sequence
FEGQTK

SEQ ID NO: 62683 - protein, 13 aa, Artificial sequence
  Protein classification predicting sequence
EIFLVEGDSAGGS

SEQ ID NO: 62684 - protein, 14 aa, Artificial sequence
  Protein classification predicting sequence
VEGDSAGGSAKQGR

SEQ ID NO: 62685 - protein, 16 aa, Artificial sequence
  Protein classification predicting sequence
VEGDSAGGSAKQGRDR

SEQ ID NO: 62686 - protein, 8 aa, Artificial sequence
  Protein classification predicting sequence
VEPRRAFI

SEQ ID NO: 62687 - protein, 6 aa, Artificial sequence
  Protein classification predicting sequence
RGLHHL

SEQ ID NO: 62688 - protein, 9 aa, Artificial sequence
  Protein classification predicting sequence
RGLHHLIWE

SEQ ID NO: 62689 - protein, 7 aa, Artificial sequence
  Protein classification predicting sequence
SAGGSAK

SEQ ID NO: 62690 - protein, 10 aa, Artificial sequence
  Protein classification predicting sequence
QAILPLRGKI

SEQ ID NO: 62691 - protein, 8 aa, Artificial sequence
  Protein classification predicting sequence
SGGLHGVG

SEQ ID NO: 62692 - protein, 6 aa, Artificial sequence
  Protein classification predicting sequence
DGGTHL

SEQ ID NO: 62693 - protein, 11 aa, Artificial sequence
  Protein classification predicting sequence
VEGDSAGGSAK

SEQ ID NO: 62694 - protein, 8 aa, Artificial sequence
  Protein classification predicting sequence
IIIMTDAD

SEQ ID NO: 62695 - protein, 13 aa, Artificial sequence
  Protein classification predicting sequence
VEDDGRGIPVDIH

SEQ ID NO: 62696 - protein, 9 aa, Artificial sequence
  Protein classification predicting sequence
GRGIPVDIH

SEQ ID NO: 62697 - protein, 8 aa, Artificial sequence
  Protein classification predicting sequence
EGLTAIIS

SEQ ID NO: 62698 - protein, 9 aa, Artificial sequence
  Protein classification predicting sequence
QRYKGLGEM

SEQ ID NO: 62699 - protein, 8 aa, Artificial sequence
  Protein classification predicting sequence
VEGDSAGG

SEQ ID NO: 62700 - protein, 6 aa, Artificial sequence
  Protein classification predicting sequence
YDALVR

SEQ ID NO: 62701 - protein, 5 aa, Artificial sequence
  Protein classification predicting sequence
AMQWN

SEQ ID NO: 62702 - protein, 7 aa, Artificial sequence
  Protein classification predicting sequence
HWFEANP

SEQ ID NO: 62703 - protein, 6 aa, Artificial sequence
  Protein classification predicting sequence
LRYHKI

SEQ ID NO: 62704 - protein, 7 aa, Artificial sequence
  Protein classification predicting sequence
ERDGLLE

SEQ ID NO: 62705 - protein, 7 aa, Artificial sequence
  Protein classification predicting sequence
YDSSSIK

SEQ ID NO: 62706 - protein, 9 aa, Artificial sequence
  Protein classification predicting sequence
FHYPGGLVD

SEQ ID NO: 62707 - protein, 8 aa, Artificial sequence
  Protein classification predicting sequence
ADCRSTDP

SEQ ID NO: 62708 - protein, 7 aa, Artificial sequence
  Protein classification predicting sequence
EVGTTDK

SEQ ID NO: 62709 - protein, 5 aa, Artificial sequence
  Protein classification predicting sequence
THEGG

SEQ ID NO: 62710 - protein, 6 aa, Artificial sequence
  Protein classification predicting sequence
AVISVK

SEQ ID NO: 62711 - protein, 13 aa, Artificial sequence
  Protein classification predicting sequence
YIVEGDSAGGSAK

SEQ ID NO: 62712 - protein, 7 aa, Artificial sequence
  Protein classification predicting sequence
TLITALG

SEQ ID NO: 62713 - protein, 8 aa, Artificial sequence
  Protein classification predicting sequence
HIRTLLLT

SEQ ID NO: 62714 - protein, 10 aa, Artificial sequence
  Protein classification predicting sequence
IQVLEGLEAV

SEQ ID NO: 62715 - protein, 15 aa, Artificial sequence
  Protein classification predicting sequence
PDPKFSSQTKDKLVS

SEQ ID NO: 62716 - protein, 9 aa, Artificial sequence
  Protein classification predicting sequence
GLPGKLADC

SEQ ID NO: 62717 - protein, 15 aa, Artificial sequence
  Protein classification predicting sequence
HIRTLLLTFFYRQMP

SEQ ID NO: 62718 - protein, 7 aa, Artificial sequence
  Protein classification predicting sequence
HGVPQAP

SEQ ID NO: 62719 - protein, 10 aa, Artificial sequence
  Protein classification predicting sequence
GVEVALQWND

SEQ ID NO: 62720 - protein, 7 aa, Artificial sequence
  Protein classification predicting sequence
ENPNEAK

SEQ ID NO: 62721 - protein, 7 aa, Artificial sequence
  Protein classification predicting sequence
DAIAADQ

SEQ ID NO: 62722 - protein, 8 aa, Artificial sequence
  Protein classification predicting sequence
SAAEVIMT

SEQ ID NO: 62723 - protein, 15 aa, Artificial sequence
  Protein classification predicting sequence
GGLHGVGVSVVNALS

SEQ ID NO: 62724 - protein, 8 aa, Artificial sequence
  Protein classification predicting sequence
QRDGGTHL

SEQ ID NO: 62725 - protein, 6 aa, Artificial sequence
  Protein classification predicting sequence
TRVITS

SEQ ID NO: 62726 - protein, 7 aa, Artificial sequence
  Protein classification predicting sequence
ARFDKML

SEQ ID NO: 62727 - protein, 13 aa, Artificial sequence
  Protein classification predicting sequence
YIAQPPLYKVKKG

SEQ ID NO: 62728 - protein, 7 aa, Artificial sequence
  Protein classification predicting sequence
LMGDVVE

SEQ ID NO: 62729 - protein, 8 aa, Artificial sequence
  Protein classification predicting sequence
LLLTFFYR

SEQ ID NO: 62730 - protein, 11 aa, Artificial sequence
  Protein classification predicting sequence
YKISGGLHGVG

SEQ ID NO: 62731 - protein, 8 aa, Artificial sequence
  Protein classification predicting sequence
LPGKLSDC

SEQ ID NO: 62732 - protein, 12 aa, Artificial sequence
  Protein classification predicting sequence
IVEGDSAGGSAK

SEQ ID NO: 62733 - protein, 9 aa, Artificial sequence
  Protein classification predicting sequence
GYVYIAQPP

SEQ ID NO: 62734 - protein, 60 aa, Artificial sequence
  Protein classification predicting sequence
LSDVNNTDNYGAGQIQVLEGLEAVRKRPGMYIGSTSERGLHHLVWEIVDNSIDEALAGYA

SEQ ID NO: 62735 - protein, 79 aa, Artificial sequence
  Protein classification predicting sequence
IEVVIEKDNWIKVTDNGRGIPVDIQEKMGRPAVEVILTVLHAGGKFGGGGYKVSGGLHGVGSSVVNALSQDLEVYVHRN

SEQ ID NO: 62736 - protein, 8 aa, Artificial sequence
  Protein classification predicting sequence
TIYHQAYK

SEQ ID NO: 62737 - protein, 9 aa, Artificial sequence
  Protein classification predicting sequence
GVPQFDLKE

SEQ ID NO: 62738 - protein, 15 aa, Artificial sequence
  Protein classification predicting sequence
EIFTETTVYNYETLQ

SEQ ID NO: 62739 - protein, 16 aa, Artificial sequence
  Protein classification predicting sequence
RIRELAFLNKGIQITL

SEQ ID NO: 62740 - protein, 16 aa, Artificial sequence
  Protein classification predicting sequence
VREDSYHYEGGIKSYV

SEQ ID NO: 62741 - protein, 8 aa, Artificial sequence
  Protein classification predicting sequence
LLNENKEP

SEQ ID NO: 62742 - protein, 19 aa, Artificial sequence
  Protein classification predicting sequence
HDEPIYIHQSKDDIEVEIA

SEQ ID NO: 62743 - protein, 41 aa, Artificial sequence
  Protein classification predicting sequence
QYNSGYATNLLTYANNIHTYEGGTHEDGFKRALTRVLNSYG

SEQ ID NO: 62744 - protein, 27 aa, Artificial sequence
  Protein classification predicting sequence
SIKHGDPQFEGQTKTKLGNSEVRQVVD

SEQ ID NO: 62745 - protein, 14 aa, Artificial sequence
  Protein classification predicting sequence
LFSEHFERFLYENP

SEQ ID NO: 62746 - protein, 7 aa, Artificial sequence
  Protein classification predicting sequence
VEKGIMA

SEQ ID NO: 62747 - protein, 21 aa, Artificial sequence
  Protein classification predicting sequence
RARVAAKKAREVTRRKSALDV

SEQ ID NO: 62748 - protein, 62 aa, Artificial sequence
  Protein classification predicting sequence
EIFLVEGDSAGGSTKSGRDSRTQAILPLRGKILNVEKARLDRILNNNEIRQMITAFGTGIGG

SEQ ID NO: 62749 - protein, 60 aa, Artificial sequence
  Protein classification predicting sequence
KARYHKIVIMTDADVDGAHIRTLLLTFFYRFMRPLIEAGYVYIAQPPLYKLTQGKQKYYV

SEQ ID NO: 62750 - protein, 9 aa, Artificial sequence
  Protein classification predicting sequence
NDRELDKLK

SEQ ID NO: 62751 - protein, 29 aa, Artificial sequence
  Protein classification predicting sequence
PKWSIARYKGLGEMNADQLWETTMNPEHR

SEQ ID NO: 62752 - protein, 9 aa, Artificial sequence
  Protein classification predicting sequence
GRGIPVDIQ

SEQ ID NO: 62753 - protein, 23 aa, Artificial sequence
  Protein classification predicting sequence
KTGRPAVETVFTVLHAGGKFGGG

SEQ ID NO: 62754 - protein, 19 aa, Artificial sequence
  Protein classification predicting sequence
YKVSGGLHGVGSSVVNALS

SEQ ID NO: 62755 - protein, 9 aa, Artificial sequence
  Protein classification predicting sequence
RPGMYIGST

SEQ ID NO: 62756 - protein, 11 aa, Artificial sequence
  Protein classification predicting sequence
TGTTVHFTPDP

SEQ ID NO: 62757 - protein, 6 aa, Artificial sequence
  Protein classification predicting sequence
IFTETT

SEQ ID NO: 62758 - protein, 13 aa, Artificial sequence
  Protein classification predicting sequence
KRIQELAFLNRGL

SEQ ID NO: 62759 - protein, 7 aa, Artificial sequence
  Protein classification predicting sequence
ISITDKR

SEQ ID NO: 62760 - protein, 8 aa, Artificial sequence
  Protein classification predicting sequence
TPIYTDGE

SEQ ID NO: 62761 - protein, 12 aa, Artificial sequence
  Protein classification predicting sequence
FDVSKARYQKLV

SEQ ID NO: 62762 - protein, 17 aa, Artificial sequence
  Protein classification predicting sequence
MTDADVDGAHIRTLLLT

SEQ ID NO: 62763 - protein, 10 aa, Artificial sequence
  Protein classification predicting sequence
QLWETTMDPE

SEQ ID NO: 62764 - protein, 9 aa, Artificial sequence
  Protein classification predicting sequence
VDDAAEADK

SEQ ID NO: 62765 - protein, 26 aa, Artificial sequence
  Protein classification predicting sequence
YDASQIQVLEGLEAVRMRPGMYIGST

SEQ ID NO: 62766 - protein, 27 aa, Artificial sequence
  Protein classification predicting sequence
KEGLHHLVWEIVDNSIDEALAGFASHI

SEQ ID NO: 62767 - protein, 21 aa, Artificial sequence
  Protein classification predicting sequence
VMSFANNIHTHEGGTHEQGFR

SEQ ID NO: 62768 - protein, 52 aa, Artificial sequence
  Protein classification predicting sequence
NEDNLTGEDVREGLTAVISVKHPNPQFEGQTKTKLGNSEVVKITNRLFSEAF

SEQ ID NO: 62769 - protein, 30 aa, Artificial sequence
  Protein classification predicting sequence
AAKRAREVTRKKSGLEISNLPGKLADCSSN

SEQ ID NO: 62770 - protein, 38 aa, Artificial sequence
  Protein classification predicting sequence
ELFIVEGDSAGGSAKSGRNREFQAILPIRGKILNVEKA

SEQ ID NO: 62771 - protein, 23 aa, Artificial sequence
  Protein classification predicting sequence
MDKILANEEIRSLFTAMGTGFGA

SEQ ID NO: 62772 - protein, 21 aa, Artificial sequence
  Protein classification predicting sequence
MTDADVDGAHIRTLLLTLIYR

SEQ ID NO: 62773 - protein, 29 aa, Artificial sequence
  Protein classification predicting sequence
LEAGYVYIAQPPIYGVKVGSEIKEYIQPG

SEQ ID NO: 62774 - protein, 22 aa, Artificial sequence
  Protein classification predicting sequence
QRYKGLGEMDDHQLWETTMDPE

SEQ ID NO: 62775 - protein, 9 aa, Artificial sequence
  Protein classification predicting sequence
TVLHAGGKF

SEQ ID NO: 62776 - protein, 8 aa, Artificial sequence
  Protein classification predicting sequence
GKILNVEK

SEQ ID NO: 62777 - protein, 10 aa, Artificial sequence
  Protein classification predicting sequence
QRYKGLGEMN

SEQ ID NO: 62778 - protein, 9 aa, Artificial sequence
  Protein classification predicting sequence
IFTETTVYN

SEQ ID NO: 62779 - protein, 8 aa, Artificial sequence
  Protein classification predicting sequence
FIEENAVY

SEQ ID NO: 62780 - protein, 8 aa, Artificial sequence
  Protein classification predicting sequence
NAVYANLD

SEQ ID NO: 62781 - protein, 40 aa, Artificial sequence
  Protein classification predicting sequence
VSAAEVIMTVLHAGGKFDDNSYKVSGGLHGVGVSVVNALS

SEQ ID NO: 62782 - protein, 18 aa, Artificial sequence
  Protein classification predicting sequence
ILAKRLRELSFLNSGVSI

SEQ ID NO: 62783 - protein, 21 aa, Artificial sequence
  Protein classification predicting sequence
YIAQPPLYKVKKGKQEQYIKD

SEQ ID NO: 62784 - protein, 8 aa, Artificial sequence
  Protein classification predicting sequence
LFTTLMGD

SEQ ID NO: 62785 - protein, 11 aa, Artificial sequence
  Protein classification predicting sequence
QRYKGLGEMNP

SEQ ID NO: 62786 - protein, 9 aa, Artificial sequence
  Protein classification predicting sequence
VVRLHQGDY

SEQ ID NO: 62787 - protein, 10 aa, Artificial sequence
  Protein classification predicting sequence
ENIVLALDVR

SEQ ID NO: 62788 - protein, 7 aa, Artificial sequence
  Protein classification predicting sequence
VLALDVR

SEQ ID NO: 62789 - protein, 6 aa, Artificial sequence
  Protein classification predicting sequence
GWQENS

SEQ ID NO: 62790 - protein, 9 aa, Artificial sequence
  Protein classification predicting sequence
TDISRDGTL

SEQ ID NO: 62791 - protein, 7 aa, Artificial sequence
  Protein classification predicting sequence
GSNVELY

SEQ ID NO: 62792 - protein, 6 aa, Artificial sequence
  Protein classification predicting sequence
GVEGAI

SEQ ID NO: 62793 - protein, 18 aa, Artificial sequence
  Protein classification predicting sequence
LPIQIGGGIRSLETIEHY

SEQ ID NO: 62794 - protein, 8 aa, Artificial sequence
  Protein classification predicting sequence
PAIDLKDG

SEQ ID NO: 62795 - protein, 14 aa, Artificial sequence
  Protein classification predicting sequence
TKNPVQLGGGIRTL

SEQ ID NO: 62796 - protein, 6 aa, Artificial sequence
  Protein classification predicting sequence
WLSRGL

SEQ ID NO: 62797 - protein, 6 aa, Artificial sequence
  Protein classification predicting sequence
QVGGGI

SEQ ID NO: 62798 - protein, 9 aa, Artificial sequence
  Protein classification predicting sequence
GSALDIFGG

SEQ ID NO: 62799 - protein, 7 aa, Artificial sequence
  Protein classification predicting sequence
QGFEWLH

SEQ ID NO: 62800 - protein, 9 aa, Artificial sequence
  Protein classification predicting sequence
PVQLGGGIR

SEQ ID NO: 62801 - protein, 10 aa, Artificial sequence
  Protein classification predicting sequence
GVAAIIYTDI

SEQ ID NO: 62802 - protein, 29 aa, Artificial sequence
  Protein classification predicting sequence
GRCVRLYQGEFSKETVMNEDPVAQAIIFE

SEQ ID NO: 62803 - protein, 38 aa, Artificial sequence
  Protein classification predicting sequence
LYKEKIIVGIDAKNGFVATRGWLDVSEISYIDLAKQME

SEQ ID NO: 62804 - protein, 7 aa, Artificial sequence
  Protein classification predicting sequence
AGESLNL

SEQ ID NO: 62805 - protein, 19 aa, Artificial sequence
  Protein classification predicting sequence
ICKAVRIPVQVGGGIRSLV

SEQ ID NO: 62806 - protein, 12 aa, Artificial sequence
  Protein classification predicting sequence
KVILGTAALYDK

SEQ ID NO: 62807 - protein, 24 aa, Artificial sequence
  Protein classification predicting sequence
LYKEKIIVGIDAKNGFVATRGWLD

SEQ ID NO: 62808 - protein, 6 aa, Artificial sequence
  Protein classification predicting sequence
LAKQME

SEQ ID NO: 62809 - protein, 20 aa, Artificial sequence
  Protein classification predicting sequence
GVQTIVFTDISKDGTLAGPN

SEQ ID NO: 62810 - protein, 8 aa, Artificial sequence
  Protein classification predicting sequence
DGTLAGPN

SEQ ID NO: 62811 - protein, 5 aa, Artificial sequence
  Protein classification predicting sequence
CTDIS

SEQ ID NO: 62812 - protein, 6 aa, Artificial sequence
  Protein classification predicting sequence
GAEWIH

SEQ ID NO: 62813 - protein, 7 aa, Artificial sequence
  Protein classification predicting sequence
TDISRDG

SEQ ID NO: 62814 - protein, 8 aa, Artificial sequence
  Protein classification predicting sequence
WIHLVDLD

SEQ ID NO: 62815 - protein, 6 aa, Artificial sequence
  Protein classification predicting sequence
GKCVRL

SEQ ID NO: 62816 - protein, 6 aa, Artificial sequence
  Protein classification predicting sequence
GVARVV

SEQ ID NO: 62817 - protein, 6 aa, Artificial sequence
  Protein classification predicting sequence
ASGGVS

SEQ ID NO: 62818 - protein, 6 aa, Artificial sequence
  Protein classification predicting sequence
VRLRQG

SEQ ID NO: 62819 - protein, 10 aa, Artificial sequence
  Protein classification predicting sequence
RVNIGTAALE

SEQ ID NO: 62820 - protein, 8 aa, Artificial sequence
  Protein classification predicting sequence
GTAALENP

SEQ ID NO: 62821 - protein, 6 aa, Artificial sequence
  Protein classification predicting sequence
VRLYQG

SEQ ID NO: 62822 - protein, 6 aa, Artificial sequence
  Protein classification predicting sequence
GRCVRL

SEQ ID NO: 62823 - protein, 7 aa, Artificial sequence
  Protein classification predicting sequence
FPAIDLK

SEQ ID NO: 62824 - protein, 8 aa, Artificial sequence
  Protein classification predicting sequence
VIIGTAAV

SEQ ID NO: 62825 - protein, 7 aa, Artificial sequence
  Protein classification predicting sequence
TDIARDG

SEQ ID NO: 62826 - protein, 6 aa, Artificial sequence
  Protein classification predicting sequence
GDMDQA

SEQ ID NO: 62827 - protein, 11 aa, Artificial sequence
  Protein classification predicting sequence
GGGIRSLETIE

SEQ ID NO: 62828 - protein, 8 aa, Artificial sequence
  Protein classification predicting sequence
PGFLQDAC

SEQ ID NO: 62829 - protein, 8 aa, Artificial sequence
  Protein classification predicting sequence
IIPALDLI

SEQ ID NO: 62830 - protein, 8 aa, Artificial sequence
  Protein classification predicting sequence
GCHVIKLG

SEQ ID NO: 62831 - protein, 6 aa, Artificial sequence
  Protein classification predicting sequence
RVVIGS

SEQ ID NO: 62832 - protein, 6 aa, Artificial sequence
  Protein classification predicting sequence
IIYTDI

SEQ ID NO: 62833 - protein, 6 aa, Artificial sequence
  Protein classification predicting sequence
FSDDPV

SEQ ID NO: 62834 - protein, 21 aa, Artificial sequence
  Protein classification predicting sequence
GARRLHLVDLNGAFAGKPKNL

SEQ ID NO: 62835 - protein, 7 aa, Artificial sequence
  Protein classification predicting sequence
GGGIRDL

SEQ ID NO: 62836 - protein, 11 aa, Artificial sequence
  Protein classification predicting sequence
GGGIRDLDTIE

SEQ ID NO: 62837 - protein, 7 aa, Artificial sequence
  Protein classification predicting sequence
ALCAVED

SEQ ID NO: 62838 - protein, 11 aa, Artificial sequence
  Protein classification predicting sequence
GAITGRAIYEG

SEQ ID NO: 62839 - protein, 6 aa, Artificial sequence
  Protein classification predicting sequence
SKDGTL

SEQ ID NO: 62840 - protein, 8 aa, Artificial sequence
  Protein classification predicting sequence
DGTLTGPN

SEQ ID NO: 62841 - protein, 8 aa, Artificial sequence
  Protein classification predicting sequence
KIVYAGGA

SEQ ID NO: 62842 - protein, 7 aa, Artificial sequence
  Protein classification predicting sequence
AGVARVV

SEQ ID NO: 62843 - protein, 10 aa, Artificial sequence
  Protein classification predicting sequence
LHLVDLTGAK

SEQ ID NO: 62844 - protein, 11 aa, Artificial sequence
  Protein classification predicting sequence
ALVLALDVRID

SEQ ID NO: 62845 - protein, 13 aa, Artificial sequence
  Protein classification predicting sequence
GVIVGRALLEGKF

SEQ ID NO: 62846 - protein, 10 aa, Artificial sequence
  Protein classification predicting sequence
GVSAIVYTDI

SEQ ID NO: 62847 - protein, 6 aa, Artificial sequence
  Protein classification predicting sequence
IPAIDL

SEQ ID NO: 62848 - protein, 5 aa, Artificial sequence
  Protein classification predicting sequence
LCTDI

SEQ ID NO: 62849 - protein, 7 aa, Artificial sequence
  Protein classification predicting sequence
GPNLDLL

SEQ ID NO: 62850 - protein, 7 aa, Artificial sequence
  Protein classification predicting sequence
QVGGGIR

SEQ ID NO: 62851 - protein, 13 aa, Artificial sequence
  Protein classification predicting sequence
HVLCTDISRDGTL

SEQ ID NO: 62852 - protein, 18 aa, Artificial sequence
  Protein classification predicting sequence
HVLCTDISRDGTLAGSNV

SEQ ID NO: 62853 - protein, 9 aa, Artificial sequence
  Protein classification predicting sequence
GVIVGRALL

SEQ ID NO: 62854 - protein, 10 aa, Artificial sequence
  Protein classification predicting sequence
GARRLHLVDL

SEQ ID NO: 62855 - protein, 15 aa, Artificial sequence
  Protein classification predicting sequence
IGAITGRAIYEGTLD

SEQ ID NO: 62856 - protein, 11 aa, Artificial sequence
  Protein classification predicting sequence
GKVVIKGWKEK

SEQ ID NO: 62857 - protein, 5 aa, Artificial sequence
  Protein classification predicting sequence
KCVQL

SEQ ID NO: 62858 - protein, 6 aa, Artificial sequence
  Protein classification predicting sequence
QIGGGI

SEQ ID NO: 62859 - protein, 9 aa, Artificial sequence
  Protein classification predicting sequence
RFTLPQALA

SEQ ID NO: 62860 - protein, 10 aa, Artificial sequence
  Protein classification predicting sequence
LILLPAVDVV

SEQ ID NO: 62861 - protein, 6 aa, Artificial sequence
  Protein classification predicting sequence
DGGDLW

SEQ ID NO: 62862 - protein, 12 aa, Artificial sequence
  Protein classification predicting sequence
DGGDLWEVLERL

SEQ ID NO: 62863 - protein, 6 aa, Artificial sequence
  Protein classification predicting sequence
PAIDLK

SEQ ID NO: 62864 - protein, 8 aa, Artificial sequence
  Protein classification predicting sequence
EFLIHAAD

SEQ ID NO: 62865 - protein, 7 aa, Artificial sequence
  Protein classification predicting sequence
CVRLKQG

SEQ ID NO: 62866 - protein, 6 aa, Artificial sequence
  Protein classification predicting sequence
VRLVQG

SEQ ID NO: 62867 - protein, 8 aa, Artificial sequence
  Protein classification predicting sequence
HLVDLDAA

SEQ ID NO: 62868 - protein, 16 aa, Artificial sequence
  Protein classification predicting sequence
GWVSDGGDLWEVLERL

SEQ ID NO: 62869 - protein, 6 aa, Artificial sequence
  Protein classification predicting sequence
MSGPNF

SEQ ID NO: 62870 - protein, 7 aa, Artificial sequence
  Protein classification predicting sequence
IIGKALY

SEQ ID NO: 62871 - protein, 14 aa, Artificial sequence
  Protein classification predicting sequence
AVSGWQENSGVSLE

SEQ ID NO: 62872 - protein, 18 aa, Artificial sequence
  Protein classification predicting sequence
QGDYGQVTEYKVDPAEQF

SEQ ID NO: 62873 - protein, 16 aa, Artificial sequence
  Protein classification predicting sequence
LLASTPANIQIGGGVR

SEQ ID NO: 62874 - protein, 11 aa, Artificial sequence
  Protein classification predicting sequence
DLLEAGAQRVV

SEQ ID NO: 62875 - protein, 9 aa, Artificial sequence
  Protein classification predicting sequence
VKGWMEKYG

SEQ ID NO: 62876 - protein, 8 aa, Artificial sequence
  Protein classification predicting sequence
VAISGWQE

SEQ ID NO: 62877 - protein, 11 aa, Artificial sequence
  Protein classification predicting sequence
GSNVELYVDLC

SEQ ID NO: 62878 - protein, 14 aa, Artificial sequence
  Protein classification predicting sequence
QYPQVQFQSSGGIG

SEQ ID NO: 62879 - protein, 8 aa, Artificial sequence
  Protein classification predicting sequence
FQSSGGIG

SEQ ID NO: 62880 - protein, 24 aa, Artificial sequence
  Protein classification predicting sequence
ALKGSGVAGVIVGRALLDGKFTAE

SEQ ID NO: 62881 - protein, 6 aa, Artificial sequence
  Protein classification predicting sequence
VGIDAK

SEQ ID NO: 62882 - protein, 7 aa, Artificial sequence
  Protein classification predicting sequence
GRALYDG

SEQ ID NO: 62883 - protein, 8 aa, Artificial sequence
  Protein classification predicting sequence
VRLHQGDY

SEQ ID NO: 62884 - protein, 7 aa, Artificial sequence
  Protein classification predicting sequence
TDISKDG

SEQ ID NO: 62885 - protein, 9 aa, Artificial sequence
  Protein classification predicting sequence
FSEDPAAMA

SEQ ID NO: 62886 - protein, 11 aa, Artificial sequence
  Protein classification predicting sequence
SYVIIGTAAVK

SEQ ID NO: 62887 - protein, 7 aa, Artificial sequence
  Protein classification predicting sequence
IIVGLDA

SEQ ID NO: 62888 - protein, 13 aa, Artificial sequence
  Protein classification predicting sequence
DGKVATDGWSKLT

SEQ ID NO: 62889 - protein, 8 aa, Artificial sequence
  Protein classification predicting sequence
EDYGVESI

SEQ ID NO: 62890 - protein, 7 aa, Artificial sequence
  Protein classification predicting sequence
VDLNGAF

SEQ ID NO: 62891 - protein, 7 aa, Artificial sequence
  Protein classification predicting sequence
ACKAFPG

SEQ ID NO: 62892 - protein, 21 aa, Artificial sequence
  Protein classification predicting sequence
VAVGIDAKGGKVAVEGWAEAS

SEQ ID NO: 62893 - protein, 6 aa, Artificial sequence
  Protein classification predicting sequence
DPAAQA

SEQ ID NO: 62894 - protein, 19 aa, Artificial sequence
  Protein classification predicting sequence
AILKATKNPVQLGGGIRTL

SEQ ID NO: 62895 - protein, 6 aa, Artificial sequence
  Protein classification predicting sequence
GWLETS

SEQ ID NO: 62896 - protein, 8 aa, Artificial sequence
  Protein classification predicting sequence
AVRDPALV

SEQ ID NO: 62897 - protein, 8 aa, Artificial sequence
  Protein classification predicting sequence
VAVEGWAE

SEQ ID NO: 62898 - protein, 11 aa, Artificial sequence
  Protein classification predicting sequence
GAISGRALYDG

SEQ ID NO: 62899 - protein, 8 aa, Artificial sequence
  Protein classification predicting sequence
EEDVAALL

SEQ ID NO: 62900 - protein, 6 aa, Artificial sequence
  Protein classification predicting sequence
CARYPQ

SEQ ID NO: 62901 - protein, 39 aa, Artificial sequence
  Protein classification predicting sequence
VLHLVDLTGAKDPAKRQIPLIKTLVAGVNVPVQVGGGVR

SEQ ID NO: 62902 - protein, 28 aa, Artificial sequence
  Protein classification predicting sequence
AALRGTGVRGVIVGRALLEGKFTVKEAI

SEQ ID NO: 62903 - protein, 13 aa, Artificial sequence
  Protein classification predicting sequence
VDLTGAKDPAKRQ

SEQ ID NO: 62904 - protein, 7 aa, Artificial sequence
  Protein classification predicting sequence
PELVKGW

SEQ ID NO: 62905 - protein, 7 aa, Artificial sequence
  Protein classification predicting sequence
LALDINI

SEQ ID NO: 62906 - protein, 6 aa, Artificial sequence
  Protein classification predicting sequence
IIGKAL

SEQ ID NO: 62907 - protein, 6 aa, Artificial sequence
  Protein classification predicting sequence
EAIQCW

SEQ ID NO: 62908 - protein, 41 aa, Artificial sequence
  Protein classification predicting sequence
WLKEMAHTFPGRIYLSVDAYGEDIKVNGWEEDTELNLFSFV

SEQ ID NO: 62909 - protein, 12 aa, Artificial sequence
  Protein classification predicting sequence
STSVRLTEGKYD

SEQ ID NO: 62910 - protein, 12 aa, Artificial sequence
  Protein classification predicting sequence
RIHIVDLIGAKA

SEQ ID NO: 62911 - protein, 11 aa, Artificial sequence
  Protein classification predicting sequence
YCIVGTKGIQD

SEQ ID NO: 62912 - protein, 11 aa, Artificial sequence
  Protein classification predicting sequence
PVIASGGIRHQ

SEQ ID NO: 62913 - protein, 7 aa, Artificial sequence
  Protein classification predicting sequence
TDIAKDG

SEQ ID NO: 62914 - protein, 15 aa, Artificial sequence
  Protein classification predicting sequence
ASGGVSSLDDLRAIA

SEQ ID NO: 62915 - protein, 7 aa, Artificial sequence
  Protein classification predicting sequence
IVGKALY

SEQ ID NO: 62916 - protein, 8 aa, Artificial sequence
  Protein classification predicting sequence
VRLRQGRM

SEQ ID NO: 62917 - protein, 6 aa, Artificial sequence
  Protein classification predicting sequence
VQLGGG

SEQ ID NO: 62918 - protein, 6 aa, Artificial sequence
  Protein classification predicting sequence
GQCVRL

SEQ ID NO: 62919 - protein, 7 aa, Artificial sequence
  Protein classification predicting sequence
GGIRSLE

SEQ ID NO: 62920 - protein, 6 aa, Artificial sequence
  Protein classification predicting sequence
VAVSGW

SEQ ID NO: 62921 - protein, 9 aa, Artificial sequence
  Protein classification predicting sequence
TDISKDGTL

SEQ ID NO: 62922 - protein, 17 aa, Artificial sequence
  Protein classification predicting sequence
EKYGAEKIVLALDINID

SEQ ID NO: 62923 - protein, 22 aa, Artificial sequence
  Protein classification predicting sequence
GTRKVAISGWQEDSGVTIEALI

SEQ ID NO: 62924 - protein, 18 aa, Artificial sequence
  Protein classification predicting sequence
GVAGVIVGRALLDGKFTA

SEQ ID NO: 62925 - protein, 7 aa, Artificial sequence
  Protein classification predicting sequence
EAFACWQ

SEQ ID NO: 62926 - protein, 6 aa, Artificial sequence
  Protein classification predicting sequence
QRDYGN

SEQ ID NO: 62927 - protein, 8 aa, Artificial sequence
  Protein classification predicting sequence
PLPRLQDY

SEQ ID NO: 62928 - protein, 8 aa, Artificial sequence
  Protein classification predicting sequence
RYPQVAFQ

SEQ ID NO: 62929 - protein, 7 aa, Artificial sequence
  Protein classification predicting sequence
MASVAFH

SEQ ID NO: 62930 - protein, 7 aa, Artificial sequence
  Protein classification predicting sequence
NIVKALN

SEQ ID NO: 62931 - protein, 7 aa, Artificial sequence
  Protein classification predicting sequence
KFKNLVD

SEQ ID NO: 62932 - protein, 7 aa, Artificial sequence
  Protein classification predicting sequence
FHEGACS

SEQ ID NO: 62933 - protein, 6 aa, Artificial sequence
  Protein classification predicting sequence
YMMDNN

SEQ ID NO: 62934 - protein, 11 aa, Artificial sequence
  Protein classification predicting sequence
HKGRMASVAFH

SEQ ID NO: 62935 - protein, 11 aa, Artificial sequence
  Protein classification predicting sequence
SGIFNLGTGRA

SEQ ID NO: 62936 - protein, 15 aa, Artificial sequence
  Protein classification predicting sequence
IVVTGAAGFIGSNLV

SEQ ID NO: 62937 - protein, 9 aa, Artificial sequence
  Protein classification predicting sequence
LNQRGITDI

SEQ ID NO: 62938 - protein, 8 aa, Artificial sequence
  Protein classification predicting sequence
HYLDKHEF

SEQ ID NO: 62939 - protein, 8 aa, Artificial sequence
  Protein classification predicting sequence
HQGACSDT

SEQ ID NO: 62940 - protein, 13 aa, Artificial sequence
  Protein classification predicting sequence
EQHKGRMASVAFH

SEQ ID NO: 62941 - protein, 9 aa, Artificial sequence
  Protein classification predicting sequence
RDFVSVEDV

SEQ ID NO: 62942 - protein, 8 aa, Artificial sequence
  Protein classification predicting sequence
GACSATTE

SEQ ID NO: 62943 - protein, 7 aa, Artificial sequence
  Protein classification predicting sequence
GKYQSFT

SEQ ID NO: 62944 - protein, 7 aa, Artificial sequence
  Protein classification predicting sequence
HKGRMAS

SEQ ID NO: 62945 - protein, 9 aa, Artificial sequence
  Protein classification predicting sequence
DILVVDNLK

SEQ ID NO: 62946 - protein, 10 aa, Artificial sequence
  Protein classification predicting sequence
NLVDLNIADY

SEQ ID NO: 62947 - protein, 9 aa, Artificial sequence
  Protein classification predicting sequence
GACSSTTEW

SEQ ID NO: 62948 - protein, 11 aa, Artificial sequence
  Protein classification predicting sequence
NNYEYSKELLH

SEQ ID NO: 62949 - protein, 13 aa, Artificial sequence
  Protein classification predicting sequence
YGYSKFLFDEYVR

SEQ ID NO: 62950 - protein, 9 aa, Artificial sequence
  Protein classification predicting sequence
YFNVYGPRE

SEQ ID NO: 62951 - protein, 8 aa, Artificial sequence
  Protein classification predicting sequence
VEDVAKVN

SEQ ID NO: 62952 - protein, 7 aa, Artificial sequence
  Protein classification predicting sequence
FKTVAEG

SEQ ID NO: 62953 - protein, 8 aa, Artificial sequence
  Protein classification predicting sequence
TTEWDGKY

SEQ ID NO: 62954 - protein, 13 aa, Artificial sequence
  Protein classification predicting sequence
PLNVYGYSKFLFD

SEQ ID NO: 62955 - protein, 69 aa, Artificial sequence
  Protein classification predicting sequence
PLNVYGYSKFLFDEYVRQILPEANSQIVGFRYFNVYGPREGHKGSMASVAFHLNTQLNNGESPKLFEGS

SEQ ID NO: 62956 - protein, 5 aa, Artificial sequence
  Protein classification predicting sequence
VNLWF

SEQ ID NO: 62957 - protein, 12 aa, Artificial sequence
  Protein classification predicting sequence
VADATLAYHKKG

SEQ ID NO: 62958 - protein, 26 aa, Artificial sequence
  Protein classification predicting sequence
IEYIPFPDKLKGRYQAFTQADLTNLR

SEQ ID NO: 62959 - protein, 5 aa, Artificial sequence
  Protein classification predicting sequence
NNYQY

SEQ ID NO: 62960 - protein, 9 aa, Artificial sequence
  Protein classification predicting sequence
PFLYASSAA

SEQ ID NO: 62961 - protein, 10 aa, Artificial sequence
  Protein classification predicting sequence
IGSNIVKALN

SEQ ID NO: 62962 - protein, 9 aa, Artificial sequence
  Protein classification predicting sequence
MASVAFHLN

SEQ ID NO: 62963 - protein, 10 aa, Artificial sequence
  Protein classification predicting sequence
GYDKPFKTVA

SEQ ID NO: 62964 - protein, 8 aa, Artificial sequence
  Protein classification predicting sequence
IADYMDKE

SEQ ID NO: 62965 - protein, 12 aa, Artificial sequence
  Protein classification predicting sequence
GFRYFNVYGPRE

SEQ ID NO: 62966 - protein, 13 aa, Artificial sequence
  Protein classification predicting sequence
HKGSMASVAFHLN

SEQ ID NO: 62967 - protein, 6 aa, Artificial sequence
  Protein classification predicting sequence
LKGRYQ

SEQ ID NO: 62968 - protein, 21 aa, Artificial sequence
  Protein classification predicting sequence
LRAAGYDKPFKTVAEGVTEYM

SEQ ID NO: 62969 - protein, 8 aa, Artificial sequence
  Protein classification predicting sequence
RYFNVYGP

SEQ ID NO: 62970 - protein, 7 aa, Artificial sequence
  Protein classification predicting sequence
SGIFNLG

SEQ ID NO: 62971 - protein, 9 aa, Artificial sequence
  Protein classification predicting sequence
DKFRNLVDC

SEQ ID NO: 62972 - protein, 16 aa, Artificial sequence
  Protein classification predicting sequence
SQIVGFRYFNVYGPRE

SEQ ID NO: 62973 - protein, 7 aa, Artificial sequence
  Protein classification predicting sequence
VDDLTDG

SEQ ID NO: 62974 - protein, 9 aa, Artificial sequence
  Protein classification predicting sequence
SIADYLDKD

SEQ ID NO: 62975 - protein, 6 aa, Artificial sequence
  Protein classification predicting sequence
HQGACS

SEQ ID NO: 62976 - protein, 10 aa, Artificial sequence
  Protein classification predicting sequence
VGDVADVNLW

SEQ ID NO: 62977 - protein, 9 aa, Artificial sequence
  Protein classification predicting sequence
DYMDRDDFL

SEQ ID NO: 62978 - protein, 23 aa, Artificial sequence
  Protein classification predicting sequence
YEGALNVYGYSKQQFDNYVRRLW

SEQ ID NO: 62979 - protein, 8 aa, Artificial sequence
  Protein classification predicting sequence
LNVYGYSK

SEQ ID NO: 62980 - protein, 7 aa, Artificial sequence
  Protein classification predicting sequence
NLVDLDI

SEQ ID NO: 62981 - protein, 17 aa, Artificial sequence
  Protein classification predicting sequence
LSQITGFRYFNVYGPRE

SEQ ID NO: 62982 - protein, 7 aa, Artificial sequence
  Protein classification predicting sequence
PKLFEGS

SEQ ID NO: 62983 - protein, 8 aa, Artificial sequence
  Protein classification predicting sequence
GTGRAESF

SEQ ID NO: 62984 - protein, 20 aa, Artificial sequence
  Protein classification predicting sequence
DILVVDNLKDGTKFVNLVDL

SEQ ID NO: 62985 - protein, 28 aa, Artificial sequence
  Protein classification predicting sequence
AIFHEGACSSTTEWDGKYMMDNNYQYSK

SEQ ID NO: 62986 - protein, 8 aa, Artificial sequence
  Protein classification predicting sequence
PKLFAGSE

SEQ ID NO: 62987 - protein, 9 aa, Artificial sequence
  Protein classification predicting sequence
GSENFKRDF

SEQ ID NO: 62988 - protein, 8 aa, Artificial sequence
  Protein classification predicting sequence
KLKGRYQA

SEQ ID NO: 62989 - protein, 25 aa, Artificial sequence
  Protein classification predicting sequence
TKVTFPLVWTNTCCSHPLYRESELI

SEQ ID NO: 62990 - protein, 10 aa, Artificial sequence
  Protein classification predicting sequence
DYLLFIVRDV

SEQ ID NO: 62991 - protein, 14 aa, Artificial sequence
  Protein classification predicting sequence
KLSPWFRLVVDNFL

SEQ ID NO: 62992 - protein, 8 aa, Artificial sequence
  Protein classification predicting sequence
DAGMDAVQ

SEQ ID NO: 62993 - protein, 7 aa, Artificial sequence
  Protein classification predicting sequence
PNPDEVA

SEQ ID NO: 62994 - protein, 9 aa, Artificial sequence
  Protein classification predicting sequence
KWWDHVEKG

SEQ ID NO: 62995 - protein, 6 aa, Artificial sequence
  Protein classification predicting sequence
GVGSQR

SEQ ID NO: 62996 - protein, 24 aa, Artificial sequence
  Protein classification predicting sequence
NLLHRAFSVFLFNSKYELLLQQRS

SEQ ID NO: 62997 - protein, 7 aa, Artificial sequence
  Protein classification predicting sequence
INAMTGG

SEQ ID NO: 62998 - protein, 8 aa, Artificial sequence
  Protein classification predicting sequence
SRVSVPVI

SEQ ID NO: 62999 - protein, 7 aa, Artificial sequence
  Protein classification predicting sequence
ISSMTGG

SEQ ID NO: 63000 - protein, 17 aa, Artificial sequence
  Protein classification predicting sequence
DAGEEGLKLSPWFRLVV

SEQ ID NO: 63001 - protein, 13 aa, Artificial sequence
  Protein classification predicting sequence
DAGMDAVQRRLMF

SEQ ID NO: 63002 - protein, 8 aa, Artificial sequence
  Protein classification predicting sequence
DECILVDE

SEQ ID NO: 63003 - protein, 6 aa, Artificial sequence
  Protein classification predicting sequence
DMKTIH

SEQ ID NO: 63004 - protein, 8 aa, Artificial sequence
  Protein classification predicting sequence
PVIIKEVG

SEQ ID NO: 63005 - protein, 8 aa, Artificial sequence
  Protein classification predicting sequence
NCHLNENI

SEQ ID NO: 63006 - protein, 6 aa, Artificial sequence
  Protein classification predicting sequence
TKVTFP

SEQ ID NO: 63007 - protein, 9 aa, Artificial sequence
  Protein classification predicting sequence
YINAMTGGS

SEQ ID NO: 63008 - protein, 6 aa, Artificial sequence
  Protein classification predicting sequence
KEVGFG

SEQ ID NO: 63009 - protein, 10 aa, Artificial sequence
  Protein classification predicting sequence
GGTNFVDIEN

SEQ ID NO: 63010 - protein, 7 aa, Artificial sequence
  Protein classification predicting sequence
EMIDADA

SEQ ID NO: 63011 - protein, 6 aa, Artificial sequence
  Protein classification predicting sequence
PVIVKE

SEQ ID NO: 63012 - protein, 9 aa, Artificial sequence
  Protein classification predicting sequence
MAKALAMGA

SEQ ID NO: 63013 - protein, 26 aa, Artificial sequence
  Protein classification predicting sequence
YINAMTGGSEWTKNINEKLAVVARET

SEQ ID NO: 63014 - protein, 14 aa, Artificial sequence
  Protein classification predicting sequence
QREQRKNEHVEIAM

SEQ ID NO: 63015 - protein, 10 aa, Artificial sequence
  Protein classification predicting sequence
RFVHHSIPSI

SEQ ID NO: 63016 - protein, 14 aa, Artificial sequence
  Protein classification predicting sequence
AMAVGSTHAALRNP

SEQ ID NO: 63017 - protein, 11 aa, Artificial sequence
  Protein classification predicting sequence
IFSNVGADVPV

SEQ ID NO: 63018 - protein, 23 aa, Artificial sequence
  Protein classification predicting sequence
AQALQIHVNSPQELVMPEGNREF

SEQ ID NO: 63019 - protein, 15 aa, Artificial sequence
  Protein classification predicting sequence
VPVIIKEVGFGMSKE

SEQ ID NO: 63020 - protein, 11 aa, Artificial sequence
  Protein classification predicting sequence
WGQSTVESLLE

SEQ ID NO: 63021 - protein, 12 aa, Artificial sequence
  Protein classification predicting sequence
FASGGLRTPLDA

SEQ ID NO: 63022 - protein, 11 aa, Artificial sequence
  Protein classification predicting sequence
GMSRPFLNQVE

SEQ ID NO: 63023 - protein, 11 aa, Artificial sequence
  Protein classification predicting sequence
LASGGVRHPLD

SEQ ID NO: 63024 - protein, 12 aa, Artificial sequence
  Protein classification predicting sequence
FDDIELIHHSLP

SEQ ID NO: 63025 - protein, 29 aa, Artificial sequence
  Protein classification predicting sequence
IDLSTHFAGQDFDFPFYINAMTGGSQKGK

SEQ ID NO: 63026 - protein, 8 aa, Artificial sequence
  Protein classification predicting sequence
QPLFLQVH

SEQ ID NO: 63027 - protein, 11 aa, Artificial sequence
  Protein classification predicting sequence
MQELLMPEGER

SEQ ID NO: 63028 - protein, 11 aa, Artificial sequence
  Protein classification predicting sequence
ILKEVGFGMDV

SEQ ID NO: 63029 - protein, 8 aa, Artificial sequence
  Protein classification predicting sequence
VEILASGG

SEQ ID NO: 63030 - protein, 7 aa, Artificial sequence
  Protein classification predicting sequence
AVGLSRT

SEQ ID NO: 63031 - protein, 10 aa, Artificial sequence
  Protein classification predicting sequence
VIAIVNGWKE

SEQ ID NO: 63032 - protein, 12 aa, Artificial sequence
  Protein classification predicting sequence
VTGSYSAALKNP

SEQ ID NO: 63033 - protein, 18 aa, Artificial sequence
  Protein classification predicting sequence
LQVHVNVMQELLMPEGER

SEQ ID NO: 63034 - protein, 9 aa, Artificial sequence
  Protein classification predicting sequence
LKEVGFGMD

SEQ ID NO: 63035 - protein, 13 aa, Artificial sequence
  Protein classification predicting sequence
SGRGGTSFAYIEN

SEQ ID NO: 63036 - protein, 7 aa, Artificial sequence
  Protein classification predicting sequence
PLDMIKC

SEQ ID NO: 63037 - protein, 13 aa, Artificial sequence
  Protein classification predicting sequence
AVGLSRTVLELVE

SEQ ID NO: 63038 - protein, 7 aa, Artificial sequence
  Protein classification predicting sequence
VDYLLYG

SEQ ID NO: 63039 - protein, 6 aa, Artificial sequence
  Protein classification predicting sequence
EHVEIA

SEQ ID NO: 63040 - protein, 6 aa, Artificial sequence
  Protein classification predicting sequence
WGIPTA

SEQ ID NO: 63041 - protein, 6 aa, Artificial sequence
  Protein classification predicting sequence
LHLAFS

SEQ ID NO: 63042 - protein, 7 aa, Artificial sequence
  Protein classification predicting sequence
PWAFSPW

SEQ ID NO: 63043 - protein, 6 aa, Artificial sequence
  Protein classification predicting sequence
CPVFAA

SEQ ID NO: 63044 - protein, 8 aa, Artificial sequence
  Protein classification predicting sequence
WPGVWTNS

SEQ ID NO: 63045 - protein, 10 aa, Artificial sequence
  Protein classification predicting sequence
GIVENEVCPV

SEQ ID NO: 63046 - protein, 6 aa, Artificial sequence
  Protein classification predicting sequence
FSPWMV

SEQ ID NO: 63047 - protein, 7 aa, Artificial sequence
  Protein classification predicting sequence
LVTRRAL

SEQ ID NO: 63048 - protein, 10 aa, Artificial sequence
  Protein classification predicting sequence
GTLEKYAAHT

SEQ ID NO: 63049 - protein, 7 aa, Artificial sequence
  Protein classification predicting sequence
EVMDYQW

SEQ ID NO: 63050 - protein, 8 aa, Artificial sequence
  Protein classification predicting sequence
VKPKTVKY

SEQ ID NO: 63051 - protein, 10 aa, Artificial sequence
  Protein classification predicting sequence
VPKLGVMLVG

SEQ ID NO: 63052 - protein, 13 aa, Artificial sequence
  Protein classification predicting sequence
RACVGLAPENNMI

SEQ ID NO: 63053 - protein, 8 aa, Artificial sequence
  Protein classification predicting sequence
YQWIVKPK

SEQ ID NO: 63054 - protein, 15 aa, Artificial sequence
  Protein classification predicting sequence
VLDIDLQKQLRPYME

SEQ ID NO: 63055 - protein, 9 aa, Artificial sequence
  Protein classification predicting sequence
VIKGTKKEQ

SEQ ID NO: 63056 - protein, 22 aa, Artificial sequence
  Protein classification predicting sequence
HNTCEDSLLAAPIILDLVLLAE

SEQ ID NO: 63057 - protein, 10 aa, Artificial sequence
  Protein classification predicting sequence
SYNHLGNNDG

SEQ ID NO: 63058 - protein, 8 aa, Artificial sequence
  Protein classification predicting sequence
FRSKEISK

SEQ ID NO: 63059 - protein, 11 aa, Artificial sequence
  Protein classification predicting sequence
FKVESPNVKYT

SEQ ID NO: 63060 - protein, 9 aa, Artificial sequence
  Protein classification predicting sequence
GVIANREGI

SEQ ID NO: 63061 - protein, 11 aa, Artificial sequence
  Protein classification predicting sequence
NGEEIYAPFKS

SEQ ID NO: 63062 - protein, 8 aa, Artificial sequence
  Protein classification predicting sequence
VFGGWDIS

SEQ ID NO: 63063 - protein, 10 aa, Artificial sequence
  Protein classification predicting sequence
REFKEKNKVD

SEQ ID NO: 63064 - protein, 7 aa, Artificial sequence
  Protein classification predicting sequence
IKYVPYV

SEQ ID NO: 63065 - protein, 20 aa, Artificial sequence
  Protein classification predicting sequence
VPKLGVMLVGWGGNNGSTLT

SEQ ID NO: 63066 - protein, 10 aa, Artificial sequence
  Protein classification predicting sequence
GDDFKSGQTK

SEQ ID NO: 63067 - protein, 15 aa, Artificial sequence
  Protein classification predicting sequence
KSVLVDFLVGAGIKP

SEQ ID NO: 63068 - protein, 6 aa, Artificial sequence
  Protein classification predicting sequence
NLSAPQ

SEQ ID NO: 63069 - protein, 19 aa, Artificial sequence
  Protein classification predicting sequence
FRSKEISKSNVVDDMVASN

SEQ ID NO: 63070 - protein, 7 aa, Artificial sequence
  Protein classification predicting sequence
MNLADAM

SEQ ID NO: 63071 - protein, 13 aa, Artificial sequence
  Protein classification predicting sequence
TIVLHNTCEDSLL

SEQ ID NO: 63072 - protein, 9 aa, Artificial sequence
  Protein classification predicting sequence
HNTCEDSLL

SEQ ID NO: 63073 - protein, 9 aa, Artificial sequence
  Protein classification predicting sequence
KQRAMLENI

SEQ ID NO: 63074 - protein, 7 aa, Artificial sequence
  Protein classification predicting sequence
TTELVHE

SEQ ID NO: 63075 - protein, 7 aa, Artificial sequence
  Protein classification predicting sequence
GSLTQAS

SEQ ID NO: 63076 - protein, 50 aa, Artificial sequence
  Protein classification predicting sequence
LIGGDDFKSGQTKMKSVLVDFLVGAGIKPTSIVSYNHLGNNDGMNLSAPQ

SEQ ID NO: 63077 - protein, 16 aa, Artificial sequence
  Protein classification predicting sequence
FRSKEISKSNVVDDMV

SEQ ID NO: 63078 - protein, 10 aa, Artificial sequence
  Protein classification predicting sequence
EGISWATKDK

SEQ ID NO: 63079 - protein, 13 aa, Artificial sequence
  Protein classification predicting sequence
DIDLQKQLRPYME

SEQ ID NO: 63080 - protein, 8 aa, Artificial sequence
  Protein classification predicting sequence
NTERYSNV

SEQ ID NO: 63081 - protein, 6 aa, Artificial sequence
  Protein classification predicting sequence
EISPST

SEQ ID NO: 63082 - protein, 6 aa, Artificial sequence
  Protein classification predicting sequence
NGTYQW

SEQ ID NO: 63083 - protein, 10 aa, Artificial sequence
  Protein classification predicting sequence
IAANQGSRAN

SEQ ID NO: 63084 - protein, 5 aa, Artificial sequence
  Protein classification predicting sequence
NDTME

SEQ ID NO: 63085 - protein, 8 aa, Artificial sequence
  Protein classification predicting sequence
PFINGSPQ

SEQ ID NO: 63086 - protein, 18 aa, Artificial sequence
  Protein classification predicting sequence
LIGGDDFKSGQTKMKSVL

SEQ ID NO: 63087 - protein, 48 aa, Artificial sequence
  Protein classification predicting sequence
DFLVGAGIKPTSIVSYNHLGNNDGMNLSAPQTFRSKEISKSNVVDDMV

SEQ ID NO: 63088 - protein, 6 aa, Artificial sequence
  Protein classification predicting sequence
EIHSVY

SEQ ID NO: 63089 - protein, 20 aa, Artificial sequence
  Protein classification predicting sequence
PFINGSPQNTFVPGLIDLAI

SEQ ID NO: 63090 - protein, 8 aa, Artificial sequence
  Protein classification predicting sequence
EPGEHPDH

SEQ ID NO: 63091 - protein, 8 aa, Artificial sequence
  Protein classification predicting sequence
VESPNVKY

SEQ ID NO: 63092 - protein, 8 aa, Artificial sequence
  Protein classification predicting sequence
FKTDTRVP

SEQ ID NO: 63093 - protein, 7 aa, Artificial sequence
  Protein classification predicting sequence
DIREFKE

SEQ ID NO: 63094 - protein, 7 aa, Artificial sequence
  Protein classification predicting sequence
EAEISPS

SEQ ID NO: 63095 - protein, 11 aa, Artificial sequence
  Protein classification predicting sequence
REFKEKNKVDK

SEQ ID NO: 63096 - protein, 12 aa, Artificial sequence
  Protein classification predicting sequence
VVLWTANTERYS

SEQ ID NO: 63097 - protein, 18 aa, Artificial sequence
  Protein classification predicting sequence
EPGEHPDHVVVIKYVPYV

SEQ ID NO: 63098 - protein, 8 aa, Artificial sequence
  Protein classification predicting sequence
GGNNGSTL

SEQ ID NO: 63099 - protein, 8 aa, Artificial sequence
  Protein classification predicting sequence
PDFIAANQ

SEQ ID NO: 63100 - protein, 18 aa, Artificial sequence
  Protein classification predicting sequence
NGEEIYAPFKSLLPMVNP

SEQ ID NO: 63101 - protein, 17 aa, Artificial sequence
  Protein classification predicting sequence
DSKRAMDEYTSEIFMGG

SEQ ID NO: 63102 - protein, 15 aa, Artificial sequence
  Protein classification predicting sequence
LQPGFDFQQAGKEVL

SEQ ID NO: 63103 - protein, 10 aa, Artificial sequence
  Protein classification predicting sequence
LAELDQYINQ

SEQ ID NO: 63104 - protein, 9 aa, Artificial sequence
  Protein classification predicting sequence
FTLACEKMF

SEQ ID NO: 63105 - protein, 12 aa, Artificial sequence
  Protein classification predicting sequence
DIMHTGDEIPHV

SEQ ID NO: 63106 - protein, 12 aa, Artificial sequence
  Protein classification predicting sequence
TRKNLGMTVICD

SEQ ID NO: 63107 - protein, 10 aa, Artificial sequence
  Protein classification predicting sequence
GIFTDGDLRR

SEQ ID NO: 63108 - protein, 16 aa, Artificial sequence
  Protein classification predicting sequence
VMTPGGIRVRPGILAV

SEQ ID NO: 63109 - protein, 13 aa, Artificial sequence
  Protein classification predicting sequence
ALNLMQSRHITSV

SEQ ID NO: 63110 - protein, 27 aa, Artificial sequence
  Protein classification predicting sequence
GKVVVMGMGKSGHIGRKMAATFASTGT

SEQ ID NO: 63111 - protein, 15 aa, Artificial sequence
  Protein classification predicting sequence
GIFTDGDLRRVFDMG

SEQ ID NO: 63112 - protein, 7 aa, Artificial sequence
  Protein classification predicting sequence
DFQQAGK

SEQ ID NO: 63113 - protein, 6 aa, Artificial sequence
  Protein classification predicting sequence
LDQYIN

SEQ ID NO: 63114 - protein, 15 aa, Artificial sequence
  Protein classification predicting sequence
GKVVVMGMGKSGHIG

SEQ ID NO: 63115 - protein, 6 aa, Artificial sequence
  Protein classification predicting sequence
HGDLGM

SEQ ID NO: 63116 - protein, 8 aa, Artificial sequence
  Protein classification predicting sequence
AISNSGES

SEQ ID NO: 63117 - protein, 7 aa, Artificial sequence
  Protein classification predicting sequence
LIPVLKR

SEQ ID NO: 63118 - protein, 10 aa, Artificial sequence
  Protein classification predicting sequence
EACPLGLAPT

SEQ ID NO: 63119 - protein, 23 aa, Artificial sequence
  Protein classification predicting sequence
STTATLVMGDALAVALLKARGFT

SEQ ID NO: 63120 - protein, 19 aa, Artificial sequence
  Protein classification predicting sequence
EDFALSHPGGALGRKLLLR

SEQ ID NO: 63121 - protein, 6 aa, Artificial sequence
  Protein classification predicting sequence
DIMHTG

SEQ ID NO: 63122 - protein, 6 aa, Artificial sequence
  Protein classification predicting sequence
CQLQMG

SEQ ID NO: 63123 - protein, 5 aa, Artificial sequence
  Protein classification predicting sequence
WSIHS

SEQ ID NO: 63124 - protein, 5 aa, Artificial sequence
  Protein classification predicting sequence
YTFIW

SEQ ID NO: 63125 - protein, 8 aa, Artificial sequence
  Protein classification predicting sequence
EFLVEKVF

SEQ ID NO: 63126 - protein, 5 aa, Artificial sequence
  Protein classification predicting sequence
FHMMG

SEQ ID NO: 63127 - protein, 6 aa, Artificial sequence
  Protein classification predicting sequence
RRMEVY

SEQ ID NO: 63128 - protein, 9 aa, Artificial sequence
  Protein classification predicting sequence
PGSVWNTMP

SEQ ID NO: 63129 - protein, 7 aa, Artificial sequence
  Protein classification predicting sequence
ETRHIVM

SEQ ID NO: 63130 - protein, 6 aa, Artificial sequence
  Protein classification predicting sequence
WSIHSG

SEQ ID NO: 63131 - protein, 6 aa, Artificial sequence
  Protein classification predicting sequence
AKTLDT

SEQ ID NO: 63132 - protein, 6 aa, Artificial sequence
  Protein classification predicting sequence
PQETRH

SEQ ID NO: 63133 - protein, 6 aa, Artificial sequence
  Protein classification predicting sequence
EVYLYF

SEQ ID NO: 63134 - protein, 8 aa, Artificial sequence
  Protein classification predicting sequence
NEQAVISP

SEQ ID NO: 63135 - protein, 6 aa, Artificial sequence
  Protein classification predicting sequence
FLERRE

SEQ ID NO: 63136 - protein, 30 aa, Artificial sequence
  Protein classification predicting sequence
TQGLRNEFLVEKVFVADEYTMVYSHIDRII

SEQ ID NO: 63137 - protein, 7 aa, Artificial sequence
  Protein classification predicting sequence
YSHIDRI

SEQ ID NO: 63138 - protein, 6 aa, Artificial sequence
  Protein classification predicting sequence
FDDMDH

SEQ ID NO: 63139 - protein, 10 aa, Artificial sequence
  Protein classification predicting sequence
TSNRRTINKY

SEQ ID NO: 63140 - protein, 5 aa, Artificial sequence
  Protein classification predicting sequence
WNTMP

SEQ ID NO: 63141 - protein, 8 aa, Artificial sequence
  Protein classification predicting sequence
IGHRDALY

SEQ ID NO: 63142 - protein, 57 aa, Artificial sequence
  Protein classification predicting sequence
PVTLGDNLTSNRRTINKYFVPDVLETCQLSMGLTELAPGNLWNTMPCHTHERRMEVY

SEQ ID NO: 63143 - protein, 17 aa, Artificial sequence
  Protein classification predicting sequence
CVFHMMGQPQETRHIVM

SEQ ID NO: 63144 - protein, 23 aa, Artificial sequence
  Protein classification predicting sequence
NEQAVISPSWSIHSGVGTKAYTF

SEQ ID NO: 63145 - protein, 18 aa, Artificial sequence
  Protein classification predicting sequence
WGMVGENQVFDDMDHVAV

SEQ ID NO: 63146 - protein, 6 aa, Artificial sequence
  Protein classification predicting sequence
EVYFYF

SEQ ID NO: 63147 - protein, 8 aa, Artificial sequence
  Protein classification predicting sequence
APAHTTYP

SEQ ID NO: 63148 - protein, 9 aa, Artificial sequence
  Protein classification predicting sequence
TCQLSMGLT

SEQ ID NO: 63149 - protein, 13 aa, Artificial sequence
  Protein classification predicting sequence
VFHMMGQPQETRH

SEQ ID NO: 63150 - protein, 8 aa, Artificial sequence
  Protein classification predicting sequence
NLGIVIDA

SEQ ID NO: 63151 - protein, 9 aa, Artificial sequence
  Protein classification predicting sequence
AAEVSDERS

SEQ ID NO: 63152 - protein, 8 aa, Artificial sequence
  Protein classification predicting sequence
YMTRGHNN

SEQ ID NO: 63153 - protein, 6 aa, Artificial sequence
  Protein classification predicting sequence
RMITMG

SEQ ID NO: 63154 - protein, 11 aa, Artificial sequence
  Protein classification predicting sequence
EIVGDTLAKNV

SEQ ID NO: 63155 - protein, 13 aa, Artificial sequence
  Protein classification predicting sequence
KGMIAAEVSDERS

SEQ ID NO: 63156 - protein, 8 aa, Artificial sequence
  Protein classification predicting sequence
GCDHIVTD

SEQ ID NO: 63157 - protein, 9 aa, Artificial sequence
  Protein classification predicting sequence
VSEFLKSKG

SEQ ID NO: 63158 - protein, 51 aa, Artificial sequence
  Protein classification predicting sequence
ADLGVCICGTGVGINNAVNKVPGVRSALVRDMTSALYAKEELNANVIGFGG

SEQ ID NO: 63159 - protein, 11 aa, Artificial sequence
  Protein classification predicting sequence
GCDHIVTDTKM

SEQ ID NO: 63160 - protein, 7 aa, Artificial sequence
  Protein classification predicting sequence
NKVPGVR

SEQ ID NO: 63161 - protein, 11 aa, Artificial sequence
  Protein classification predicting sequence
ALVRDMTSALY

SEQ ID NO: 63162 - protein, 8 aa, Artificial sequence
  Protein classification predicting sequence
KEELNANV

SEQ ID NO: 63163 - protein, 14 aa, Artificial sequence
  Protein classification predicting sequence
QADPHFFDEFLEKW

SEQ ID NO: 63164 - protein, 8 aa, Artificial sequence
  Protein classification predicting sequence
DCHAVGNK

SEQ ID NO: 63165 - protein, 8 aa, Artificial sequence
  Protein classification predicting sequence
GVIGSDCH

SEQ ID NO: 63166 - protein, 18 aa, Artificial sequence
  Protein classification predicting sequence
VLGVIGSDCHAVGNKILD

SEQ ID NO: 63167 - protein, 8 aa, Artificial sequence
  Protein classification predicting sequence
AKDPHAYI

SEQ ID NO: 63168 - protein, 15 aa, Artificial sequence
  Protein classification predicting sequence
DPKNYPDDNHKPEMA

SEQ ID NO: 63169 - protein, 7 aa, Artificial sequence
  Protein classification predicting sequence
NHKPEMA

SEQ ID NO: 63170 - protein, 7 aa, Artificial sequence
  Protein classification predicting sequence
LSIQAHP

SEQ ID NO: 63171 - protein, 9 aa, Artificial sequence
  Protein classification predicting sequence
YKDPNHKPE

SEQ ID NO: 63172 - protein, 9 aa, Artificial sequence
  Protein classification predicting sequence
NHKPEMAIA

SEQ ID NO: 63173 - protein, 13 aa, Artificial sequence
  Protein classification predicting sequence
NHKPEMAIALTPF

SEQ ID NO: 63174 - protein, 7 aa, Artificial sequence
  Protein classification predicting sequence
ALTPFLA

SEQ ID NO: 63175 - protein, 8 aa, Artificial sequence
  Protein classification predicting sequence
GDIIECMA

SEQ ID NO: 63176 - protein, 8 aa, Artificial sequence
  Protein classification predicting sequence
SDNVVRAG

SEQ ID NO: 63177 - protein, 7 aa, Artificial sequence
  Protein classification predicting sequence
RAGLTPK

SEQ ID NO: 63178 - protein, 6 aa, Artificial sequence
  Protein classification predicting sequence
NHKPEM

SEQ ID NO: 63179 - protein, 7 aa, Artificial sequence
  Protein classification predicting sequence
GLCGFRP

SEQ ID NO: 63180 - protein, 16 aa, Artificial sequence
  Protein classification predicting sequence
FQGLCGFRPVEEIVTF

SEQ ID NO: 63181 - protein, 7 aa, Artificial sequence
  Protein classification predicting sequence
KKVPEFQ

SEQ ID NO: 63182 - protein, 8 aa, Artificial sequence
  Protein classification predicting sequence
LLLQLHQQ

SEQ ID NO: 63183 - protein, 7 aa, Artificial sequence
  Protein classification predicting sequence
FCGFKPL

SEQ ID NO: 63184 - protein, 9 aa, Artificial sequence
  Protein classification predicting sequence
ECMAASDNV

SEQ ID NO: 63185 - protein, 11 aa, Artificial sequence
  Protein classification predicting sequence
RAGFTPKFKDV

SEQ ID NO: 63186 - protein, 6 aa, Artificial sequence
  Protein classification predicting sequence
AELWMG

SEQ ID NO: 63187 - protein, 9 aa, Artificial sequence
  Protein classification predicting sequence
AELWMGAHP

SEQ ID NO: 63188 - protein, 25 aa, Artificial sequence
  Protein classification predicting sequence
ECMAASDNVVRAGFTPKFKDVKNLV

SEQ ID NO: 63189 - protein, 8 aa, Artificial sequence
  Protein classification predicting sequence
NLTPLKLV

SEQ ID NO: 63190 - protein, 8 aa, Artificial sequence
  Protein classification predicting sequence
KALGAPVE

SEQ ID NO: 63191 - protein, 18 aa, Artificial sequence
  Protein classification predicting sequence
FPNGIPNPLLPECRDDTR

SEQ ID NO: 63192 - protein, 42 aa, Artificial sequence
  Protein classification predicting sequence
HGADMGIAFDGDFDRCFLFDEKGQFIEGYYIVGLLAEAFLEK

SEQ ID NO: 63193 - protein, 35 aa, Artificial sequence
  Protein classification predicting sequence
FGGSSEPCALCSLHSIGKIGGAQNRSYSKLLCGLL

SEQ ID NO: 63194 - protein, 7 aa, Artificial sequence
  Protein classification predicting sequence
ELTQQLA

SEQ ID NO: 63195 - protein, 7 aa, Artificial sequence
  Protein classification predicting sequence
PCALCSL

SEQ ID NO: 63196 - protein, 13 aa, Artificial sequence
  Protein classification predicting sequence
QYIAVHVVPDQLM

SEQ ID NO: 63197 - protein, 19 aa, Artificial sequence
  Protein classification predicting sequence
PCALCSLHSIGKIGGAQNR

SEQ ID NO: 63198 - protein, 8 aa, Artificial sequence
  Protein classification predicting sequence
RLRISPDR

SEQ ID NO: 63199 - protein, 21 aa, Artificial sequence
  Protein classification predicting sequence
ISPDRVYINYYDMNAANVGWN

SEQ ID NO: 63200 - protein, 6 aa, Artificial sequence
  Protein classification predicting sequence
LHYKGS

SEQ ID NO: 63201 - protein, 29 aa, Artificial sequence
  Protein classification predicting sequence
LAYGPRSVGGPIGPNETLIFKIHLISVKK

SEQ ID NO: 63202 - protein, 7 aa, Artificial sequence
  Protein classification predicting sequence
MGLAMST

SEQ ID NO: 63203 - protein, 15 aa, Artificial sequence
  Protein classification predicting sequence
KLSYSIGADLGKNFK

SEQ ID NO: 63204 - protein, 7 aa, Artificial sequence
  Protein classification predicting sequence
LPSGLQY

SEQ ID NO: 63205 - protein, 9 aa, Artificial sequence
  Protein classification predicting sequence
GWTEALQLM

SEQ ID NO: 63206 - protein, 6 aa, Artificial sequence
  Protein classification predicting sequence
VTAQHR

SEQ ID NO: 63207 - protein, 6 aa, Artificial sequence
  Protein classification predicting sequence
MLDQVL

SEQ ID NO: 63208 - protein, 11 aa, Artificial sequence
  Protein classification predicting sequence
VGHVEAGLRTG

SEQ ID NO: 63209 - protein, 7 aa, Artificial sequence
  Protein classification predicting sequence
IFVTGNT

SEQ ID NO: 63210 - protein, 8 aa, Artificial sequence
  Protein classification predicting sequence
VYPVHLNP

SEQ ID NO: 63211 - protein, 13 aa, Artificial sequence
  Protein classification predicting sequence
QEEAPSLGKPVLV

SEQ ID NO: 63212 - protein, 23 aa, Artificial sequence
  Protein classification predicting sequence
PIGVIDSGVGGLTVAKEIMRQLP

SEQ ID NO: 63213 - protein, 13 aa, Artificial sequence
  Protein classification predicting sequence
IKMLVIACNTATA

SEQ ID NO: 63214 - protein, 7 aa, Artificial sequence
  Protein classification predicting sequence
ETAREVS

SEQ ID NO: 63215 - protein, 6 aa, Artificial sequence
  Protein classification predicting sequence
DSGVGG

SEQ ID NO: 63216 - protein, 6 aa, Artificial sequence
  Protein classification predicting sequence
PYGEKS

SEQ ID NO: 63217 - protein, 8 aa, Artificial sequence
  Protein classification predicting sequence
PIGVFDSG

SEQ ID NO: 63218 - protein, 6 aa, Artificial sequence
  Protein classification predicting sequence
LVFDSG

SEQ ID NO: 63219 - protein, 5 aa, Artificial sequence
  Protein classification predicting sequence
CTHYP

SEQ ID NO: 63220 - protein, 6 aa, Artificial sequence
  Protein classification predicting sequence
CTHYPF

SEQ ID NO: 63221 - protein, 6 aa, Artificial sequence
  Protein classification predicting sequence
RQLPNE

SEQ ID NO: 63222 - protein, 7 aa, Artificial sequence
  Protein classification predicting sequence
DSGVGGL

SEQ ID NO: 63223 - protein, 18 aa, Artificial sequence
  Protein classification predicting sequence
PIGVIDSGVGGLTVAKEI

SEQ ID NO: 63224 - protein, 8 aa, Artificial sequence
  Protein classification predicting sequence
LPNETIYY

SEQ ID NO: 63225 - protein, 7 aa, Artificial sequence
  Protein classification predicting sequence
TEGTIKS

SEQ ID NO: 63226 - protein, 7 aa, Artificial sequence
  Protein classification predicting sequence
VESGEYK

SEQ ID NO: 63227 - protein, 5 aa, Artificial sequence
  Protein classification predicting sequence
LGCTH

SEQ ID NO: 63228 - protein, 9 aa, Artificial sequence
  Protein classification predicting sequence
GDTARVPYG

SEQ ID NO: 63229 - protein, 17 aa, Artificial sequence
  Protein classification predicting sequence
KQAIGFIDSGVGGLTVV

SEQ ID NO: 63230 - protein, 7 aa, Artificial sequence
  Protein classification predicting sequence
RCPYGPR

SEQ ID NO: 63231 - protein, 7 aa, Artificial sequence
  Protein classification predicting sequence
IPVIGVI

SEQ ID NO: 63232 - protein, 10 aa, Artificial sequence
  Protein classification predicting sequence
SAIAKKVVAE

SEQ ID NO: 63233 - protein, 15 aa, Artificial sequence
  Protein classification predicting sequence
LGCTHYPLLRPIIQN

SEQ ID NO: 63234 - protein, 7 aa, Artificial sequence
  Protein classification predicting sequence
PCPGLVE

SEQ ID NO: 63235 - protein, 7 aa, Artificial sequence
  Protein classification predicting sequence
NGPYGPL

SEQ ID NO: 63236 - protein, 10 aa, Artificial sequence
  Protein classification predicting sequence
KMIVIACNTA

SEQ ID NO: 63237 - protein, 7 aa, Artificial sequence
  Protein classification predicting sequence
VIACNTA

SEQ ID NO: 63238 - protein, 7 aa, Artificial sequence
  Protein classification predicting sequence
ACNTAST

SEQ ID NO: 63239 - protein, 6 aa, Artificial sequence
  Protein classification predicting sequence
VYDEIR

SEQ ID NO: 63240 - protein, 8 aa, Artificial sequence
  Protein classification predicting sequence
VPAIKPAA

SEQ ID NO: 63241 - protein, 9 aa, Artificial sequence
  Protein classification predicting sequence
DTVILGCTH

SEQ ID NO: 63242 - protein, 6 aa, Artificial sequence
  Protein classification predicting sequence
VIACNT

SEQ ID NO: 63243 - protein, 7 aa, Artificial sequence
  Protein classification predicting sequence
VPAIKPA

SEQ ID NO: 63244 - protein, 9 aa, Artificial sequence
  Protein classification predicting sequence
DTLVLGCTH

SEQ ID NO: 63245 - protein, 6 aa, Artificial sequence
  Protein classification predicting sequence
VLGCTH

SEQ ID NO: 63246 - protein, 6 aa, Artificial sequence
  Protein classification predicting sequence
ARVPYG

SEQ ID NO: 63247 - protein, 7 aa, Artificial sequence
  Protein classification predicting sequence
ACNTATA

SEQ ID NO: 63248 - protein, 7 aa, Artificial sequence
  Protein classification predicting sequence
IVESNEM

SEQ ID NO: 63249 - protein, 7 aa, Artificial sequence
  Protein classification predicting sequence
LIDSGAE

SEQ ID NO: 63250 - protein, 11 aa, Artificial sequence
  Protein classification predicting sequence
VRDISVLLNYF

SEQ ID NO: 63251 - protein, 7 aa, Artificial sequence
  Protein classification predicting sequence
HRFYTTA

SEQ ID NO: 63252 - protein, 8 aa, Artificial sequence
  Protein classification predicting sequence
FDSGVGGL

SEQ ID NO: 63253 - protein, 10 aa, Artificial sequence
  Protein classification predicting sequence
FDSGVGGLTV

SEQ ID NO: 63254 - protein, 8 aa, Artificial sequence
  Protein classification predicting sequence
LRDARERY

SEQ ID NO: 63255 - protein, 11 aa, Artificial sequence
  Protein classification predicting sequence
PAVRRAVAATR

SEQ ID NO: 63256 - protein, 6 aa, Artificial sequence
  Protein classification predicting sequence
ACPRFV

SEQ ID NO: 63257 - protein, 11 aa, Artificial sequence
  Protein classification predicting sequence
DTLVLGCTHYP

SEQ ID NO: 63258 - protein, 7 aa, Artificial sequence
  Protein classification predicting sequence
LGCTHYP

SEQ ID NO: 63259 - protein, 6 aa, Artificial sequence
  Protein classification predicting sequence
PAIKPA

SEQ ID NO: 63260 - protein, 9 aa, Artificial sequence
  Protein classification predicting sequence
DSGVGGLTV

SEQ ID NO: 63261 - protein, 6 aa, Artificial sequence
  Protein classification predicting sequence
GTEGTI

SEQ ID NO: 63262 - protein, 12 aa, Artificial sequence
  Protein classification predicting sequence
DTVVLGCTHFPL

SEQ ID NO: 63263 - protein, 9 aa, Artificial sequence
  Protein classification predicting sequence
VLGCTHFPL

SEQ ID NO: 63264 - protein, 7 aa, Artificial sequence
  Protein classification predicting sequence
GVILPGA

SEQ ID NO: 63265 - protein, 8 aa, Artificial sequence
  Protein classification predicting sequence
GTIKSEAY

SEQ ID NO: 63266 - protein, 9 aa, Artificial sequence
  Protein classification predicting sequence
DTLILGCTH

SEQ ID NO: 63267 - protein, 6 aa, Artificial sequence
  Protein classification predicting sequence
ACNTAT

SEQ ID NO: 63268 - protein, 7 aa, Artificial sequence
  Protein classification predicting sequence
APWPVDW

SEQ ID NO: 63269 - protein, 8 aa, Artificial sequence
  Protein classification predicting sequence
RLMQGFGL

SEQ ID NO: 63270 - protein, 20 aa, Artificial sequence
  Protein classification predicting sequence
FPVVGVVPAIKPAARLTANG

SEQ ID NO: 63271 - protein, 7 aa, Artificial sequence
  Protein classification predicting sequence
VGLLATR

SEQ ID NO: 63272 - protein, 15 aa, Artificial sequence
  Protein classification predicting sequence
YTHELIARFANECQI

SEQ ID NO: 63273 - protein, 10 aa, Artificial sequence
  Protein classification predicting sequence
VELAEAKLHG

SEQ ID NO: 63274 - protein, 9 aa, Artificial sequence
  Protein classification predicting sequence
RILRPWLRM

SEQ ID NO: 63275 - protein, 16 aa, Artificial sequence
  Protein classification predicting sequence
EPPDTVVLGCTHFPLL

SEQ ID NO: 63276 - protein, 36 aa, Artificial sequence
  Protein classification predicting sequence
ELLQVLPEGTRLVDSGAAIARRTAWLLEHEAPDAKS

SEQ ID NO: 63277 - protein, 7 aa, Artificial sequence
  Protein classification predicting sequence
DSGAAIA

SEQ ID NO: 63278 - protein, 8 aa, Artificial sequence
  Protein classification predicting sequence
IVIHQTLK

SEQ ID NO: 63279 - protein, 8 aa, Artificial sequence
  Protein classification predicting sequence
HRFFATGD

SEQ ID NO: 63280 - protein, 22 aa, Artificial sequence
  Protein classification predicting sequence
KLMEFDIKMLVIACNTATAVAL

SEQ ID NO: 63281 - protein, 23 aa, Artificial sequence
  Protein classification predicting sequence
NQNVLVLGTEGTIKSEAYRTHIK

SEQ ID NO: 63282 - protein, 7 aa, Artificial sequence
  Protein classification predicting sequence
RTAIMTT

SEQ ID NO: 63283 - protein, 13 aa, Artificial sequence
  Protein classification predicting sequence
LGTEGTIKSEAYR

SEQ ID NO: 63284 - protein, 12 aa, Artificial sequence
  Protein classification predicting sequence
PGFVPLVEQMRY

SEQ ID NO: 63285 - protein, 6 aa, Artificial sequence
  Protein classification predicting sequence
ILGCTH

SEQ ID NO: 63286 - protein, 10 aa, Artificial sequence
  Protein classification predicting sequence
ILGCTHYPLL

SEQ ID NO: 63287 - protein, 26 aa, Artificial sequence
  Protein classification predicting sequence
VISSGLETAREVSALLTFSNEHASYT

SEQ ID NO: 63288 - protein, 16 aa, Artificial sequence
  Protein classification predicting sequence
RPIGFLDSGVGGLTVV

SEQ ID NO: 63289 - protein, 10 aa, Artificial sequence
  Protein classification predicting sequence
DSGVGGLTVV

SEQ ID NO: 63290 - protein, 7 aa, Artificial sequence
  Protein classification predicting sequence
LSPLVGK

SEQ ID NO: 63291 - protein, 14 aa, Artificial sequence
  Protein classification predicting sequence
YIGDSARAPYGPRP

SEQ ID NO: 63292 - protein, 14 aa, Artificial sequence
  Protein classification predicting sequence
VKMIVFACNTATAV

SEQ ID NO: 63293 - protein, 6 aa, Artificial sequence
  Protein classification predicting sequence
PYGPRP

SEQ ID NO: 63294 - protein, 8 aa, Artificial sequence
  Protein classification predicting sequence
LDIPVLGV

SEQ ID NO: 63295 - protein, 10 aa, Artificial sequence
  Protein classification predicting sequence
LPGASAAIKS

SEQ ID NO: 63296 - protein, 7 aa, Artificial sequence
  Protein classification predicting sequence
IGVFDSG

SEQ ID NO: 63297 - protein, 7 aa, Artificial sequence
  Protein classification predicting sequence
YFGDTAR

SEQ ID NO: 63298 - protein, 10 aa, Artificial sequence
  Protein classification predicting sequence
PVVGVVPAIK

SEQ ID NO: 63299 - protein, 7 aa, Artificial sequence
  Protein classification predicting sequence
AYPYGEL

SEQ ID NO: 63300 - protein, 9 aa, Artificial sequence
  Protein classification predicting sequence
GLIATPATV

SEQ ID NO: 63301 - protein, 10 aa, Artificial sequence
  Protein classification predicting sequence
VELLGSTRLV

SEQ ID NO: 63302 - protein, 7 aa, Artificial sequence
  Protein classification predicting sequence
EIQQVLG

SEQ ID NO: 63303 - protein, 22 aa, Artificial sequence
  Protein classification predicting sequence
LLPDLHYIYAFDNVAFPYGEKS

SEQ ID NO: 63304 - protein, 15 aa, Artificial sequence
  Protein classification predicting sequence
ACNTASTVSLPALRE

SEQ ID NO: 63305 - protein, 12 aa, Artificial sequence
  Protein classification predicting sequence
PVVGVVPAIKPA

SEQ ID NO: 63306 - protein, 8 aa, Artificial sequence
  Protein classification predicting sequence
QVLPEGTR

SEQ ID NO: 63307 - protein, 14 aa, Artificial sequence
  Protein classification predicting sequence
VDSGAAIARRTAWL

SEQ ID NO: 63308 - protein, 18 aa, Artificial sequence
  Protein classification predicting sequence
GTIQNDILKEFMVRNTYI

SEQ ID NO: 63309 - protein, 12 aa, Artificial sequence
  Protein classification predicting sequence
ISISGYHMQEAG

SEQ ID NO: 63310 - protein, 21 aa, Artificial sequence
  Protein classification predicting sequence
NSFDEALGLPTVKSARIARNT

SEQ ID NO: 63311 - protein, 43 aa, Artificial sequence
  Protein classification predicting sequence
EEMGGMAKAVAEGIPKLRIEECAARRQARIDSGSEVIVGVNKY

SEQ ID NO: 63312 - protein, 9 aa, Artificial sequence
  Protein classification predicting sequence
KFMEREGRR

SEQ ID NO: 63313 - protein, 34 aa, Artificial sequence
  Protein classification predicting sequence
DGHDRGAKVIATGFADLGFDVDIGPLFQTPREVA

SEQ ID NO: 63314 - protein, 13 aa, Artificial sequence
  Protein classification predicting sequence
AVDADVHAVGVST

SEQ ID NO: 63315 - protein, 15 aa, Artificial sequence
  Protein classification predicting sequence
AAGHKTLVPELIKEL

SEQ ID NO: 63316 - protein, 22 aa, Artificial sequence
  Protein classification predicting sequence
LGRPDILVMCGGVIPPQDYEFL

SEQ ID NO: 63317 - protein, 15 aa, Artificial sequence
  Protein classification predicting sequence
EVGVSNVFGPGTRIP

SEQ ID NO: 63318 - protein, 7 aa, Artificial sequence
  Protein classification predicting sequence
LFLLSPH

SEQ ID NO: 63319 - protein, 16 aa, Artificial sequence
  Protein classification predicting sequence
LIWHTPEGISIKPLYS

SEQ ID NO: 63320 - protein, 27 aa, Artificial sequence
  Protein classification predicting sequence
IKAGQQGLSVAFDLATHRGYDSDNPRV

SEQ ID NO: 63321 - protein, 14 aa, Artificial sequence
  Protein classification predicting sequence
CAASGDGNILALAV

SEQ ID NO: 63322 - protein, 28 aa, Artificial sequence
  Protein classification predicting sequence
KKVFGEHKANDRMVSGAYRQEFGESKEI

SEQ ID NO: 63323 - protein, 6 aa, Artificial sequence
  Protein classification predicting sequence
RIARNT

SEQ ID NO: 63324 - protein, 9 aa, Artificial sequence
  Protein classification predicting sequence
FAPRLSFFW

SEQ ID NO: 63325 - protein, 8 aa, Artificial sequence
  Protein classification predicting sequence
MEIAKMRA

SEQ ID NO: 63326 - protein, 12 aa, Artificial sequence
  Protein classification predicting sequence
QTSGWSLTEQDP

SEQ ID NO: 63327 - protein, 7 aa, Artificial sequence
  Protein classification predicting sequence
TQSLHTN

SEQ ID NO: 63328 - protein, 9 aa, Artificial sequence
  Protein classification predicting sequence
SARIARNTQ

SEQ ID NO: 63329 - protein, 8 aa, Artificial sequence
  Protein classification predicting sequence
VIVGVNKY

SEQ ID NO: 63330 - protein, 12 aa, Artificial sequence
  Protein classification predicting sequence
THRGYDSDNPRV

SEQ ID NO: 63331 - protein, 11 aa, Artificial sequence
  Protein classification predicting sequence
GDVGMAGVAID

SEQ ID NO: 63332 - protein, 8 aa, Artificial sequence
  Protein classification predicting sequence
QTSGWSLT

SEQ ID NO: 63333 - protein, 8 aa, Artificial sequence
  Protein classification predicting sequence
ADLGFDVD

SEQ ID NO: 63334 - protein, 7 aa, Artificial sequence
  Protein classification predicting sequence
LGRPDIL

SEQ ID NO: 63335 - protein, 7 aa, Artificial sequence
  Protein classification predicting sequence
WHTPEGI

SEQ ID NO: 63336 - protein, 8 aa, Artificial sequence
  Protein classification predicting sequence
RQYAGFST

SEQ ID NO: 63337 - protein, 6 aa, Artificial sequence
  Protein classification predicting sequence
HCQTSG

SEQ ID NO: 63338 - protein, 14 aa, Artificial sequence
  Protein classification predicting sequence
GGTQSLHTNSFDEA

SEQ ID NO: 63339 - protein, 8 aa, Artificial sequence
  Protein classification predicting sequence
RGPYPTMY

SEQ ID NO: 63340 - protein, 12 aa, Artificial sequence
  Protein classification predicting sequence
PWTIRQYAGFST

SEQ ID NO: 63341 - protein, 8 aa, Artificial sequence
  Protein classification predicting sequence
THRGYDSD

SEQ ID NO: 63342 - protein, 9 aa, Artificial sequence
  Protein classification predicting sequence
VSMTMNGAV

SEQ ID NO: 63343 - protein, 9 aa, Artificial sequence
  Protein classification predicting sequence
NSISISGYH

SEQ ID NO: 63344 - protein, 6 aa, Artificial sequence
  Protein classification predicting sequence
GYPTLK

SEQ ID NO: 63345 - protein, 7 aa, Artificial sequence
  Protein classification predicting sequence
VLFKKFD

SEQ ID NO: 63346 - protein, 7 aa, Artificial sequence
  Protein classification predicting sequence
LVGKNFE

SEQ ID NO: 63347 - protein, 18 aa, Artificial sequence
  Protein classification predicting sequence
LKAEGSEIRLAKVDATEE

SEQ ID NO: 63348 - protein, 9 aa, Artificial sequence
  Protein classification predicting sequence
GVRGYPTIK

SEQ ID NO: 63349 - protein, 18 aa, Artificial sequence
  Protein classification predicting sequence
DGVVLFKKFDEGRNNFEG

SEQ ID NO: 63350 - protein, 37 aa, Artificial sequence
  Protein classification predicting sequence
NQLPLVIEFTEQTAPKIFGGEIKTHILLFLPKSVSDY

SEQ ID NO: 63351 - protein, 14 aa, Artificial sequence
  Protein classification predicting sequence
FKGKILFIFIDSDH

SEQ ID NO: 63352 - protein, 13 aa, Artificial sequence
  Protein classification predicting sequence
FLEGKIKPHLMSQ

SEQ ID NO: 63353 - protein, 29 aa, Artificial sequence
  Protein classification predicting sequence
KNVFVEFYAPWCGHCKQLAPIWDKLGETY

SEQ ID NO: 63354 - protein, 21 aa, Artificial sequence
  Protein classification predicting sequence
DHENIVIAKMDSTANEVEAVK

SEQ ID NO: 63355 - protein, 14 aa, Artificial sequence
  Protein classification predicting sequence
GFKKFLESGGQDGA

SEQ ID NO: 63356 - protein, 8 aa, Artificial sequence
  Protein classification predicting sequence
DDDLEDLE

SEQ ID NO: 63357 - protein, 11 aa, Artificial sequence
  Protein classification predicting sequence
DDIPFGITSNS

SEQ ID NO: 63358 - protein, 30 aa, Artificial sequence
  Protein classification predicting sequence
EALAAHKYLLVEFYAPWCGHCKALAPEYAK

SEQ ID NO: 63359 - protein, 28 aa, Artificial sequence
  Protein classification predicting sequence
VFSKYQLDKDGVVLFKKFDEGRNNFEGE

SEQ ID NO: 63360 - protein, 10 aa, Artificial sequence
  Protein classification predicting sequence
EEEDNVLVLK

SEQ ID NO: 63361 - protein, 6 aa, Artificial sequence
  Protein classification predicting sequence
DDIPFG

SEQ ID NO: 63362 - protein, 41 aa, Artificial sequence
  Protein classification predicting sequence
DNQRILEFFGLKKEECPAVRLITLEEEMTKYKPESDELTAE

SEQ ID NO: 63363 - protein, 29 aa, Artificial sequence
  Protein classification predicting sequence
RTVIDYNGERTLDGFKKFLESGGQDGAGD

SEQ ID NO: 63364 - protein, 7 aa, Artificial sequence
  Protein classification predicting sequence
VIGFFKD

SEQ ID NO: 63365 - protein, 12 aa, Artificial sequence
  Protein classification predicting sequence
LVEFYAPWCGHC

SEQ ID NO: 63366 - protein, 11 aa, Artificial sequence
  Protein classification predicting sequence
VVLFKKFDEGR

SEQ ID NO: 63367 - protein, 8 aa, Artificial sequence
  Protein classification predicting sequence
GPREAEGI

SEQ ID NO: 63368 - protein, 6 aa, Artificial sequence
  Protein classification predicting sequence
LAPEYE

SEQ ID NO: 63369 - protein, 27 aa, Artificial sequence
  Protein classification predicting sequence
GAYDGPRTADGIVSHLKKQAGPASVPL

SEQ ID NO: 63370 - protein, 31 aa, Artificial sequence
  Protein classification predicting sequence
IVPLAKVDCTANTNTCNKYGVSGYPTLKIFR

SEQ ID NO: 63371 - protein, 15 aa, Artificial sequence
  Protein classification predicting sequence
KGSNYWRNRVMMVAK

SEQ ID NO: 63372 - protein, 6 aa, Artificial sequence
  Protein classification predicting sequence
VIAKMD

SEQ ID NO: 63373 - protein, 18 aa, Artificial sequence
  Protein classification predicting sequence
SLGGQYGVQGFPTIKIFG

SEQ ID NO: 63374 - protein, 10 aa, Artificial sequence
  Protein classification predicting sequence
GLVSCTFFLA

SEQ ID NO: 63375 - protein, 23 aa, Artificial sequence
  Protein classification predicting sequence
DVWMVEFYAPWCGHCKNLEPEWA

SEQ ID NO: 63376 - protein, 31 aa, Artificial sequence
  Protein classification predicting sequence
INARKMKFALLKGSFSEQGINEFLRELSFGR

SEQ ID NO: 63377 - protein, 6 aa, Artificial sequence
  Protein classification predicting sequence
REPWDG

SEQ ID NO: 63378 - protein, 11 aa, Artificial sequence
  Protein classification predicting sequence
SGGYSSGKQGR

SEQ ID NO: 63379 - protein, 11 aa, Artificial sequence
  Protein classification predicting sequence
ALKDVVKVGAV

SEQ ID NO: 63380 - protein, 12 aa, Artificial sequence
  Protein classification predicting sequence
APWCGHCKALAP

SEQ ID NO: 63381 - protein, 7 aa, Artificial sequence
  Protein classification predicting sequence
QEYKGPR

SEQ ID NO: 63382 - protein, 6 aa, Artificial sequence
  Protein classification predicting sequence
QSGPPS

SEQ ID NO: 63383 - protein, 8 aa, Artificial sequence
  Protein classification predicting sequence
KAMLFLNF

SEQ ID NO: 63384 - protein, 6 aa, Artificial sequence
  Protein classification predicting sequence
DATAND

SEQ ID NO: 63385 - protein, 6 aa, Artificial sequence
  Protein classification predicting sequence
VQGFPT

SEQ ID NO: 63386 - protein, 6 aa, Artificial sequence
  Protein classification predicting sequence
SEPIPE

SEQ ID NO: 63387 - protein, 8 aa, Artificial sequence
  Protein classification predicting sequence
GFPTIKIF

SEQ ID NO: 63388 - protein, 9 aa, Artificial sequence
  Protein classification predicting sequence
NNEPVKVVV

SEQ ID NO: 63389 - protein, 14 aa, Artificial sequence
  Protein classification predicting sequence
VLIEFYAPWCGHCK

SEQ ID NO: 63390 - protein, 7 aa, Artificial sequence
  Protein classification predicting sequence
PEYEKAA

SEQ ID NO: 63391 - protein, 10 aa, Artificial sequence
  Protein classification predicting sequence
IQEYKGPREA

SEQ ID NO: 63392 - protein, 6 aa, Artificial sequence
  Protein classification predicting sequence
KLRSDY

SEQ ID NO: 63393 - protein, 6 aa, Artificial sequence
  Protein classification predicting sequence
VRGYPT

SEQ ID NO: 63394 - protein, 7 aa, Artificial sequence
  Protein classification predicting sequence
RTKDDII

SEQ ID NO: 63395 - protein, 11 aa, Artificial sequence
  Protein classification predicting sequence
EFFAPWCGHCK

SEQ ID NO: 63396 - protein, 7 aa, Artificial sequence
  Protein classification predicting sequence
DPKKDVL

SEQ ID NO: 63397 - protein, 20 aa, Artificial sequence
  Protein classification predicting sequence
LTLYQYKTCPFCSKVRAFLD

SEQ ID NO: 63398 - protein, 7 aa, Artificial sequence
  Protein classification predicting sequence
YRKVPIL

SEQ ID NO: 63399 - protein, 15 aa, Artificial sequence
  Protein classification predicting sequence
QLNDSSVIISALKTY

SEQ ID NO: 63400 - protein, 8 aa, Artificial sequence
  Protein classification predicting sequence
PNLADLAV

SEQ ID NO: 63401 - protein, 9 aa, Artificial sequence
  Protein classification predicting sequence
GVLRVMEGL

SEQ ID NO: 63402 - protein, 11 aa, Artificial sequence
  Protein classification predicting sequence
DQKPGTSGLRK

SEQ ID NO: 63403 - protein, 83 aa, Artificial sequence
  Protein classification predicting sequence
RIAAANGIGRLVIGQNGILSTPAVSCIIRKIKAIGGIILTASHNPGGPNGDFGIKFNISNGGPAPEAITDKIFQISKTIEEYA

SEQ ID NO: 63404 - protein, 139 aa, Artificial sequence
  Protein classification predicting sequence
ALKELLSGPNRLKIRIDAMHGVVGPYVKKILCEELGAPANSAVNCVPLEDFGGHHPDPNLTYAADLVETMKSGEHDFGAAFDGDGDRNMILGKHGFFVNPSDSVAVIAANIFSIPYFQQTGVRGFARSMPTSGALDRVA

SEQ ID NO: 63405 - protein, 6 aa, Artificial sequence
  Protein classification predicting sequence
DPVDGS

SEQ ID NO: 63406 - protein, 8 aa, Artificial sequence
  Protein classification predicting sequence
NQGLRLIF

SEQ ID NO: 63407 - protein, 8 aa, Artificial sequence
  Protein classification predicting sequence
FRLSGTGS

SEQ ID NO: 63408 - protein, 7 aa, Artificial sequence
  Protein classification predicting sequence
RLSGTGS

SEQ ID NO: 63409 - protein, 16 aa, Artificial sequence
  Protein classification predicting sequence
RQEATLVVGGDGRFYM

SEQ ID NO: 63410 - protein, 55 aa, Artificial sequence
  Protein classification predicting sequence
YETPTGWKFFGNLMDASKLSLCGEESFGTGSDHIREKDGLWAVLAWLSILATRKQ

SEQ ID NO: 63411 - protein, 9 aa, Artificial sequence
  Protein classification predicting sequence
HPDPNLTYA

SEQ ID NO: 63412 - protein, 7 aa, Artificial sequence
  Protein classification predicting sequence
DSVAIIA

SEQ ID NO: 63413 - protein, 7 aa, Artificial sequence
  Protein classification predicting sequence
PTGWKFF

SEQ ID NO: 63414 - protein, 10 aa, Artificial sequence
  Protein classification predicting sequence
CGEESFGTGS

SEQ ID NO: 63415 - protein, 7 aa, Artificial sequence
  Protein classification predicting sequence
HIREKDG

SEQ ID NO: 63416 - protein, 7 aa, Artificial sequence
  Protein classification predicting sequence
GATIRLY

SEQ ID NO: 63417 - protein, 7 aa, Artificial sequence
  Protein classification predicting sequence
ENFIQSI

SEQ ID NO: 63418 - protein, 10 aa, Artificial sequence
  Protein classification predicting sequence
YGRTFFTRYD

SEQ ID NO: 63419 - protein, 13 aa, Artificial sequence
  Protein classification predicting sequence
GQKPGTSGLRKKV

SEQ ID NO: 63420 - protein, 6 aa, Artificial sequence
  Protein classification predicting sequence
STPAVS

SEQ ID NO: 63421 - protein, 6 aa, Artificial sequence
  Protein classification predicting sequence
YIEQYE

SEQ ID NO: 63422 - protein, 6 aa, Artificial sequence
  Protein classification predicting sequence
RMGLGK

SEQ ID NO: 63423 - protein, 7 aa, Artificial sequence
  Protein classification predicting sequence
DPVDGSV

SEQ ID NO: 63424 - protein, 7 aa, Artificial sequence
  Protein classification predicting sequence
NFVQSTF

SEQ ID NO: 63425 - protein, 7 aa, Artificial sequence
  Protein classification predicting sequence
ESSLLNC

SEQ ID NO: 63426 - protein, 21 aa, Artificial sequence
  Protein classification predicting sequence
PKEDFGGGHPDPNLTYAKELV

SEQ ID NO: 63427 - protein, 12 aa, Artificial sequence
  Protein classification predicting sequence
CGEESFGTGSDH

SEQ ID NO: 63428 - protein, 9 aa, Artificial sequence
  Protein classification predicting sequence
KLVTVEDIV

SEQ ID NO: 63429 - protein, 7 aa, Artificial sequence
  Protein classification predicting sequence
DGSKATG

SEQ ID NO: 63430 - protein, 21 aa, Artificial sequence
  Protein classification predicting sequence
LGKRFFVTPSDSVAIIAANAV

SEQ ID NO: 63431 - protein, 8 aa, Artificial sequence
  Protein classification predicting sequence
VVSGDGRY

SEQ ID NO: 63432 - protein, 13 aa, Artificial sequence
  Protein classification predicting sequence
VVSGDGRYFSKDA

SEQ ID NO: 63433 - protein, 7 aa, Artificial sequence
  Protein classification predicting sequence
GVTSFSG

SEQ ID NO: 63434 - protein, 14 aa, Artificial sequence
  Protein classification predicting sequence
DGSRLVFRLSGTGS

SEQ ID NO: 63435 - protein, 11 aa, Artificial sequence
  Protein classification predicting sequence
FCYDALHGVAG

SEQ ID NO: 63436 - protein, 8 aa, Artificial sequence
  Protein classification predicting sequence
DGDGDRNM

SEQ ID NO: 63437 - protein, 16 aa, Artificial sequence
  Protein classification predicting sequence
GLKGVARSMPTSAALD

SEQ ID NO: 63438 - protein, 12 aa, Artificial sequence
  Protein classification predicting sequence
GTSGLRKKVKVF

SEQ ID NO: 63439 - protein, 13 aa, Artificial sequence
  Protein classification predicting sequence
FGAASDGDGDRNM

SEQ ID NO: 63440 - protein, 14 aa, Artificial sequence
  Protein classification predicting sequence
ARSMPTSGALDRVA

SEQ ID NO: 63441 - protein, 18 aa, Artificial sequence
  Protein classification predicting sequence
FFEVPTGWKFFGNLMDAG

SEQ ID NO: 63442 - protein, 6 aa, Artificial sequence
  Protein classification predicting sequence
WATYGR

SEQ ID NO: 63443 - protein, 14 aa, Artificial sequence
  Protein classification predicting sequence
KPLIDLALSVSKLK

SEQ ID NO: 63444 - protein, 22 aa, Artificial sequence
  Protein classification predicting sequence
PTKPIEGQKTGTSGLRKKVKVF

SEQ ID NO: 63445 - protein, 15 aa, Artificial sequence
  Protein classification predicting sequence
NYLANWIQALFNSLP

SEQ ID NO: 63446 - protein, 7 aa, Artificial sequence
  Protein classification predicting sequence
FDAMHAV

SEQ ID NO: 63447 - protein, 7 aa, Artificial sequence
  Protein classification predicting sequence
AVSAVIR

SEQ ID NO: 63448 - protein, 14 aa, Artificial sequence
  Protein classification predicting sequence
FFVTPSDSVAIIAA

SEQ ID NO: 63449 - protein, 10 aa, Artificial sequence
  Protein classification predicting sequence
NYAENFIQSI

SEQ ID NO: 63450 - protein, 7 aa, Artificial sequence
  Protein classification predicting sequence
GILSTPA

SEQ ID NO: 63451 - protein, 8 aa, Artificial sequence
  Protein classification predicting sequence
ASHNPGGP

SEQ ID NO: 63452 - protein, 7 aa, Artificial sequence
  Protein classification predicting sequence
NGGPAPE

SEQ ID NO: 63453 - protein, 11 aa, Artificial sequence
  Protein classification predicting sequence
DFGGHHPDPNL

SEQ ID NO: 63454 - protein, 6 aa, Artificial sequence
  Protein classification predicting sequence
HPDPNL

SEQ ID NO: 63455 - protein, 7 aa, Artificial sequence
  Protein classification predicting sequence
AIIAANA

SEQ ID NO: 63456 - protein, 13 aa, Artificial sequence
  Protein classification predicting sequence
PTGWKFFGNLMDA

SEQ ID NO: 63457 - protein, 10 aa, Artificial sequence
  Protein classification predicting sequence
LTASHNPGGP

SEQ ID NO: 63458 - protein, 6 aa, Artificial sequence
  Protein classification predicting sequence
TRYDYE

SEQ ID NO: 63459 - protein, 6 aa, Artificial sequence
  Protein classification predicting sequence
DGSRII

SEQ ID NO: 63460 - protein, 7 aa, Artificial sequence
  Protein classification predicting sequence
VVGGDGR

SEQ ID NO: 63461 - protein, 9 aa, Artificial sequence
  Protein classification predicting sequence
NGVGKILVG

SEQ ID NO: 63462 - protein, 19 aa, Artificial sequence
  Protein classification predicting sequence
IILTASHNPGGPNGDFGIK

SEQ ID NO: 63463 - protein, 7 aa, Artificial sequence
  Protein classification predicting sequence
PAPESIT

SEQ ID NO: 63464 - protein, 7 aa, Artificial sequence
  Protein classification predicting sequence
ARSMPTS

SEQ ID NO: 63465 - protein, 6 aa, Artificial sequence
  Protein classification predicting sequence
RYDYEE

SEQ ID NO: 63466 - protein, 9 aa, Artificial sequence
  Protein classification predicting sequence
DGDGDRNMI

SEQ ID NO: 63467 - protein, 6 aa, Artificial sequence
  Protein classification predicting sequence
ARSMPT

SEQ ID NO: 63468 - protein, 9 aa, Artificial sequence
  Protein classification predicting sequence
RLYIDSYEK

SEQ ID NO: 63469 - protein, 11 aa, Artificial sequence
  Protein classification predicting sequence
DFGGGHPDPNL

SEQ ID NO: 63470 - protein, 12 aa, Artificial sequence
  Protein classification predicting sequence
KGVARSMPTSAA

SEQ ID NO: 63471 - protein, 12 aa, Artificial sequence
  Protein classification predicting sequence
PTGWKFFGNLMD

SEQ ID NO: 63472 - protein, 9 aa, Artificial sequence
  Protein classification predicting sequence
CGEESFGTG

SEQ ID NO: 63473 - protein, 7 aa, Artificial sequence
  Protein classification predicting sequence
ASHILIK

SEQ ID NO: 63474 - protein, 7 aa, Artificial sequence
  Protein classification predicting sequence
SRRPSSW

SEQ ID NO: 63475 - protein, 10 aa, Artificial sequence
  Protein classification predicting sequence
GLLSDGGVHS

SEQ ID NO: 63476 - protein, 18 aa, Artificial sequence
  Protein classification predicting sequence
GLLSDGGVHSRLDQLQLL

SEQ ID NO: 63477 - protein, 7 aa, Artificial sequence
  Protein classification predicting sequence
DRYENDW

SEQ ID NO: 63478 - protein, 15 aa, Artificial sequence
  Protein classification predicting sequence
VVKRGWDAQVLGEAP

SEQ ID NO: 63479 - protein, 9 aa, Artificial sequence
  Protein classification predicting sequence
WRLNERHYG

SEQ ID NO: 63480 - protein, 8 aa, Artificial sequence
  Protein classification predicting sequence
TADHGNAE

SEQ ID NO: 63481 - protein, 8 aa, Artificial sequence
  Protein classification predicting sequence
YLVSPPEI

SEQ ID NO: 63482 - protein, 8 aa, Artificial sequence
  Protein classification predicting sequence
IGVVGGSD

SEQ ID NO: 63483 - protein, 17 aa, Artificial sequence
  Protein classification predicting sequence
LPKKRGTFIEFRNGMLN

SEQ ID NO: 63484 - protein, 7 aa, Artificial sequence
  Protein classification predicting sequence
SPIGRSC

SEQ ID NO: 63485 - protein, 6 aa, Artificial sequence
  Protein classification predicting sequence
EERIEF

SEQ ID NO: 63486 - protein, 7 aa, Artificial sequence
  Protein classification predicting sequence
ISFDVFP

SEQ ID NO: 63487 - protein, 7 aa, Artificial sequence
  Protein classification predicting sequence
NVSPIGR

SEQ ID NO: 63488 - protein, 6 aa, Artificial sequence
  Protein classification predicting sequence
EFRNGM

SEQ ID NO: 63489 - protein, 8 aa, Artificial sequence
  Protein classification predicting sequence
KHTIFGRV

SEQ ID NO: 63490 - protein, 6 aa, Artificial sequence
  Protein classification predicting sequence
FMIQGG

SEQ ID NO: 63491 - protein, 11 aa, Artificial sequence
  Protein classification predicting sequence
TGEKGFGYKGS

SEQ ID NO: 63492 - protein, 7 aa, Artificial sequence
  Protein classification predicting sequence
SIYGEKF

SEQ ID NO: 63493 - protein, 6 aa, Artificial sequence
  Protein classification predicting sequence
FMVQGG

SEQ ID NO: 63494 - protein, 17 aa, Artificial sequence
  Protein classification predicting sequence
VFFDIAVDGEPLGRVSF

SEQ ID NO: 63495 - protein, 10 aa, Artificial sequence
  Protein classification predicting sequence
DSATSQFFIN

SEQ ID NO: 63496 - protein, 12 aa, Artificial sequence
  Protein classification predicting sequence
RDFGYAVFGKVV

SEQ ID NO: 63497 - protein, 8 aa, Artificial sequence
  Protein classification predicting sequence
DGEPLGRV

SEQ ID NO: 63498 - protein, 21 aa, Artificial sequence
  Protein classification predicting sequence
IVEAMERFGSRNGKTSKKITI

SEQ ID NO: 63499 - protein, 27 aa, Artificial sequence
  Protein classification predicting sequence
GLFGKTVPKTVDNFVALATGEKGFGYK

SEQ ID NO: 63500 - protein, 7 aa, Artificial sequence
  Protein classification predicting sequence
SKFHRVI

SEQ ID NO: 63501 - protein, 9 aa, Artificial sequence
  Protein classification predicting sequence
GTGGKSIYG

SEQ ID NO: 63502 - protein, 6 aa, Artificial sequence
  Protein classification predicting sequence
PIKNEA

SEQ ID NO: 63503 - protein, 6 aa, Artificial sequence
  Protein classification predicting sequence
GYAVFG

SEQ ID NO: 63504 - protein, 10 aa, Artificial sequence
  Protein classification predicting sequence
DTNGSQFFIT

SEQ ID NO: 63505 - protein, 9 aa, Artificial sequence
  Protein classification predicting sequence
TNGSQFFIT

SEQ ID NO: 63506 - protein, 6 aa, Artificial sequence
  Protein classification predicting sequence
EGMNIV

SEQ ID NO: 63507 - protein, 7 aa, Artificial sequence
  Protein classification predicting sequence
PKTVENF

SEQ ID NO: 63508 - protein, 7 aa, Artificial sequence
  Protein classification predicting sequence
TNGSQFF

SEQ ID NO: 63509 - protein, 6 aa, Artificial sequence
  Protein classification predicting sequence
KHTIFG

SEQ ID NO: 63510 - protein, 11 aa, Artificial sequence
  Protein classification predicting sequence
NFVALATGEKG

SEQ ID NO: 63511 - protein, 9 aa, Artificial sequence
  Protein classification predicting sequence
GWVSMANAG

SEQ ID NO: 63512 - protein, 12 aa, Artificial sequence
  Protein classification predicting sequence
WLDGKHVVFGKV

SEQ ID NO: 63513 - protein, 16 aa, Artificial sequence
  Protein classification predicting sequence
ALSCVLNIGACKLKMS

SEQ ID NO: 63514 - protein, 8 aa, Artificial sequence
  Protein classification predicting sequence
DSCLEALE

SEQ ID NO: 63515 - protein, 6 aa, Artificial sequence
  Protein classification predicting sequence
KTDWLD

SEQ ID NO: 63516 - protein, 12 aa, Artificial sequence
  Protein classification predicting sequence
DENFILKHTGPG

SEQ ID NO: 63517 - protein, 6 aa, Artificial sequence
  Protein classification predicting sequence
FPDENF

SEQ ID NO: 63518 - protein, 7 aa, Artificial sequence
  Protein classification predicting sequence
LCTGEKG

SEQ ID NO: 63519 - protein, 6 aa, Artificial sequence
  Protein classification predicting sequence
KPLHYK

SEQ ID NO: 63520 - protein, 7 aa, Artificial sequence
  Protein classification predicting sequence
PTPHLDG

SEQ ID NO: 63521 - protein, 7 aa, Artificial sequence
  Protein classification predicting sequence
DKYKNKV

SEQ ID NO: 63522 - protein, 13 aa, Artificial sequence
  Protein classification predicting sequence
VTLHTDVGDIKIE

SEQ ID NO: 63523 - protein, 78 aa, Artificial sequence
  Protein classification predicting sequence
VRGVVSMANNGPNTNGSQFFITYGKQPHLDMKYTVFGKVIDGLETLDELEKLPVNEKTYRPLNDVHIKDITIHANPFA

SEQ ID NO: 63524 - protein, 6 aa, Artificial sequence
  Protein classification predicting sequence
QYGDQF

SEQ ID NO: 63525 - protein, 9 aa, Artificial sequence
  Protein classification predicting sequence
PVKTQYGYH

SEQ ID NO: 63526 - protein, 11 aa, Artificial sequence
  Protein classification predicting sequence
FEKAAYALKNK

SEQ ID NO: 63527 - protein, 12 aa, Artificial sequence
  Protein classification predicting sequence
VSDFYNETKNTE

SEQ ID NO: 63528 - protein, 8 aa, Artificial sequence
  Protein classification predicting sequence
LVISRVFE

SEQ ID NO: 63529 - protein, 7 aa, Artificial sequence
  Protein classification predicting sequence
KAEGADF

SEQ ID NO: 63530 - protein, 20 aa, Artificial sequence
  Protein classification predicting sequence
ALDKANVKIKDKAFANILAQ

SEQ ID NO: 63531 - protein, 40 aa, Artificial sequence
  Protein classification predicting sequence
ETAKSVLEELKAEGADFTAIAKEKTTTPEKKVTYKFDSGA

SEQ ID NO: 63532 - protein, 6 aa, Artificial sequence
  Protein classification predicting sequence
KYKVSD

SEQ ID NO: 63533 - protein, 7 aa, Artificial sequence
  Protein classification predicting sequence
VTQDELY

SEQ ID NO: 63534 - protein, 8 aa, Artificial sequence
  Protein classification predicting sequence
VLAQSGLT

SEQ ID NO: 63535 - protein, 9 aa, Artificial sequence
  Protein classification predicting sequence
DTATKDNGG

SEQ ID NO: 63536 - protein, 8 aa, Artificial sequence
  Protein classification predicting sequence
DKYKVSDE

SEQ ID NO: 63537 - protein, 6 aa, Artificial sequence
  Protein classification predicting sequence
EFEEAA

SEQ ID NO: 63538 - protein, 11 aa, Artificial sequence
  Protein classification predicting sequence
VKSSFGYHIIK

SEQ ID NO: 63539 - protein, 9 aa, Artificial sequence
  Protein classification predicting sequence
DLAKEYSTD

SEQ ID NO: 63540 - protein, 7 aa, Artificial sequence
  Protein classification predicting sequence
ANVKIKD

SEQ ID NO: 63541 - protein, 6 aa, Artificial sequence
  Protein classification predicting sequence
MKGDTI

SEQ ID NO: 63542 - protein, 8 aa, Artificial sequence
  Protein classification predicting sequence
ALQQQGLT

SEQ ID NO: 63543 - protein, 130 aa, Artificial sequence
  Protein classification predicting sequence
KALQQQGLTADKYKENLRTAAYHKELLSDKIKISDSEIKEDSKKASHILIKVKSKKSDKEGLDDKEAKQKAEEIQKEVSKDPSKFGEIAKKESMDTGSAKKDGELGYVLKGQTDKDFEKALFKLKDGEVS

SEQ ID NO: 63544 - protein, 15 aa, Artificial sequence
  Protein classification predicting sequence
IVPVTASALLLGACG

SEQ ID NO: 63545 - protein, 11 aa, Artificial sequence
  Protein classification predicting sequence
NTLISSKAGDV

SEQ ID NO: 63546 - protein, 14 aa, Artificial sequence
  Protein classification predicting sequence
SKKASHILIKVKSK

SEQ ID NO: 63547 - protein, 12 aa, Artificial sequence
  Protein classification predicting sequence
KFGEIAKKESMD

SEQ ID NO: 63548 - protein, 9 aa, Artificial sequence
  Protein classification predicting sequence
FEKALFKLK

SEQ ID NO: 63549 - protein, 7 aa, Artificial sequence
  Protein classification predicting sequence
TDFNSEK

SEQ ID NO: 63550 - protein, 9 aa, Artificial sequence
  Protein classification predicting sequence
PKLLTDAYK

SEQ ID NO: 63551 - protein, 7 aa, Artificial sequence
  Protein classification predicting sequence
QYGDKVS

SEQ ID NO: 63552 - protein, 8 aa, Artificial sequence
  Protein classification predicting sequence
LVEYAVKE

SEQ ID NO: 63553 - protein, 6 aa, Artificial sequence
  Protein classification predicting sequence
FQNKVI

SEQ ID NO: 63554 - protein, 6 aa, Artificial sequence
  Protein classification predicting sequence
EYAVKE

SEQ ID NO: 63555 - protein, 7 aa, Artificial sequence
  Protein classification predicting sequence
AKSVLEE

SEQ ID NO: 63556 - protein, 11 aa, Artificial sequence
  Protein classification predicting sequence
KANVKIKDKAF

SEQ ID NO: 63557 - protein, 10 aa, Artificial sequence
  Protein classification predicting sequence
LLGVLGVLQT

SEQ ID NO: 63558 - protein, 19 aa, Artificial sequence
  Protein classification predicting sequence
DKFLGRWFTSGLASNSSWF

SEQ ID NO: 63559 - protein, 6 aa, Artificial sequence
  Protein classification predicting sequence
QCETRT

SEQ ID NO: 63560 - protein, 7 aa, Artificial sequence
  Protein classification predicting sequence
MATLYSR

SEQ ID NO: 63561 - protein, 10 aa, Artificial sequence
  Protein classification predicting sequence
IVFLPQTDKC

SEQ ID NO: 63562 - protein, 7 aa, Artificial sequence
  Protein classification predicting sequence
HTLWMGL

SEQ ID NO: 63563 - protein, 19 aa, Artificial sequence
  Protein classification predicting sequence
DKFLGRWFSAGLASNSSWL

SEQ ID NO: 63564 - protein, 7 aa, Artificial sequence
  Protein classification predicting sequence
SLGSYSY

SEQ ID NO: 63565 - protein, 18 aa, Artificial sequence
  Protein classification predicting sequence
SPHWGSTYSVSVVETDYD

SEQ ID NO: 63566 - protein, 36 aa, Artificial sequence
  Protein classification predicting sequence
YALLYSQGSKGPGEDFRMATLYSRTQTPRAELKEKF

SEQ ID NO: 63567 - protein, 13 aa, Artificial sequence
  Protein classification predicting sequence
QPNFQQDKFLGRW

SEQ ID NO: 63568 - protein, 13 aa, Artificial sequence
  Protein classification predicting sequence
GLASNSSWFREKK

SEQ ID NO: 63569 - protein, 17 aa, Artificial sequence
  Protein classification predicting sequence
GGLNLTSTFLRKNQCET

SEQ ID NO: 63570 - protein, 10 aa, Artificial sequence
  Protein classification predicting sequence
DFRMATLYSR

SEQ ID NO: 63571 - protein, 10 aa, Artificial sequence
  Protein classification predicting sequence
MATLYSRTQT

SEQ ID NO: 63572 - protein, 6 aa, Artificial sequence
  Protein classification predicting sequence
LSMCKS

SEQ ID NO: 63573 - protein, 7 aa, Artificial sequence
  Protein classification predicting sequence
TSTFLRK

SEQ ID NO: 63574 - protein, 8 aa, Artificial sequence
  Protein classification predicting sequence
RLWKLLSP

SEQ ID NO: 63575 - protein, 16 aa, Artificial sequence
  Protein classification predicting sequence
LRRGDRLLLFPFLSPQ

SEQ ID NO: 63576 - protein, 10 aa, Artificial sequence
  Protein classification predicting sequence
EAMIAFLMGY

SEQ ID NO: 63577 - protein, 10 aa, Artificial sequence
  Protein classification predicting sequence
GTEEIYFATF

SEQ ID NO: 63578 - protein, 27 aa, Artificial sequence
  Protein classification predicting sequence
LGVDGGIEVTASHNPMDYNGMKLVREG

SEQ ID NO: 63579 - protein, 9 aa, Artificial sequence
  Protein classification predicting sequence
PISGDTGLR

SEQ ID NO: 63580 - protein, 12 aa, Artificial sequence
  Protein classification predicting sequence
KLVINSGNGAAG

SEQ ID NO: 63581 - protein, 16 aa, Artificial sequence
  Protein classification predicting sequence
FIEGYYIVGLLAEAFL

SEQ ID NO: 63582 - protein, 14 aa, Artificial sequence
  Protein classification predicting sequence
GAKIIHDPRLSWNT

SEQ ID NO: 63583 - protein, 11 aa, Artificial sequence
  Protein classification predicting sequence
YCDSGMIPWLL

SEQ ID NO: 63584 - protein, 6 aa, Artificial sequence
  Protein classification predicting sequence
WRFNLR

SEQ ID NO: 63585 - protein, 15 aa, Artificial sequence
  Protein classification predicting sequence
VFGTRPEAIKMAPLV

SEQ ID NO: 63586 - protein, 10 aa, Artificial sequence
  Protein classification predicting sequence
QHREMLDQVL

SEQ ID NO: 63587 - protein, 8 aa, Artificial sequence
  Protein classification predicting sequence
VHGDTTTT

SEQ ID NO: 63588 - protein, 7 aa, Artificial sequence
  Protein classification predicting sequence
QEEAPSL

SEQ ID NO: 63589 - protein, 10 aa, Artificial sequence
  Protein classification predicting sequence
LGEELNEDIA

SEQ ID NO: 63590 - protein, 9 aa, Artificial sequence
  Protein classification predicting sequence
GGDVRLTSE

SEQ ID NO: 63591 - protein, 28 aa, Artificial sequence
  Protein classification predicting sequence
SGTEEIYFATFHLGVDGGIEVTASHNPM

SEQ ID NO: 63592 - protein, 9 aa, Artificial sequence
  Protein classification predicting sequence
YNGMKLVRE

SEQ ID NO: 63593 - protein, 8 aa, Artificial sequence
  Protein classification predicting sequence
NSGNGAAG

SEQ ID NO: 63594 - protein, 14 aa, Artificial sequence
  Protein classification predicting sequence
FPNGIPNPLLPECR

SEQ ID NO: 63595 - protein, 18 aa, Artificial sequence
  Protein classification predicting sequence
ADMGIAFDGDFDRCFLFD

SEQ ID NO: 63596 - protein, 16 aa, Artificial sequence
  Protein classification predicting sequence
PVMSKTGHAFIKERMR

SEQ ID NO: 63597 - protein, 10 aa, Artificial sequence
  Protein classification predicting sequence
AAFPASGEIN

SEQ ID NO: 63598 - protein, 14 aa, Artificial sequence
  Protein classification predicting sequence
SNTEPVVRLNVESR

SEQ ID NO: 63599 - protein, 8 aa, Artificial sequence
  Protein classification predicting sequence
GIDVEEAL

SEQ ID NO: 63600 - protein, 6 aa, Artificial sequence
  Protein classification predicting sequence
NLHAIY

SEQ ID NO: 63601 - protein, 7 aa, Artificial sequence
  Protein classification predicting sequence
EYFGKEL

SEQ ID NO: 63602 - protein, 7 aa, Artificial sequence
  Protein classification predicting sequence
NIWIPDG

SEQ ID NO: 63603 - protein, 11 aa, Artificial sequence
  Protein classification predicting sequence
DAVESKLFGIG

SEQ ID NO: 63604 - protein, 11 aa, Artificial sequence
  Protein classification predicting sequence
GIDVEEALRQL

SEQ ID NO: 63605 - protein, 6 aa, Artificial sequence
  Protein classification predicting sequence
TLSHPD

SEQ ID NO: 63606 - protein, 6 aa, Artificial sequence
  Protein classification predicting sequence
ESKLFG

SEQ ID NO: 63607 - protein, 7 aa, Artificial sequence
  Protein classification predicting sequence
GHFHPTE

SEQ ID NO: 63608 - protein, 12 aa, Artificial sequence
  Protein classification predicting sequence
IGLDFFDASINR

SEQ ID NO: 63609 - protein, 6 aa, Artificial sequence
  Protein classification predicting sequence
IGTRNM

SEQ ID NO: 63610 - protein, 6 aa, Artificial sequence
  Protein classification predicting sequence
IRQFWI

SEQ ID NO: 63611 - protein, 18 aa, Artificial sequence
  Protein classification predicting sequence
IGTRNMKKALLRALLEPT

SEQ ID NO: 63612 - protein, 22 aa, Artificial sequence
  Protein classification predicting sequence
RLIPGPKRLNLHAIYLESDTPV

SEQ ID NO: 63613 - protein, 6 aa, Artificial sequence
  Protein classification predicting sequence
TGNYPG

SEQ ID NO: 63614 - protein, 9 aa, Artificial sequence
  Protein classification predicting sequence
QLRQDLEKA

SEQ ID NO: 63615 - protein, 7 aa, Artificial sequence
  Protein classification predicting sequence
LNLHAIY

SEQ ID NO: 63616 - protein, 13 aa, Artificial sequence
  Protein classification predicting sequence
VRDFWIEHGKRSR

SEQ ID NO: 63617 - protein, 8 aa, Artificial sequence
  Protein classification predicting sequence
NNFWVPDG

SEQ ID NO: 63618 - protein, 6 aa, Artificial sequence
  Protein classification predicting sequence
TPRKRL

SEQ ID NO: 63619 - protein, 15 aa, Artificial sequence
  Protein classification predicting sequence
EAYTVGSHEFYMGYG

SEQ ID NO: 63620 - protein, 6 aa, Artificial sequence
  Protein classification predicting sequence
EFYMGY

SEQ ID NO: 63621 - protein, 23 aa, Artificial sequence
  Protein classification predicting sequence
KLICLDAGHFHPTEVISNKLSSL

SEQ ID NO: 63622 - protein, 15 aa, Artificial sequence
  Protein classification predicting sequence
LHVSRPVRWDSDHVV

SEQ ID NO: 63623 - protein, 21 aa, Artificial sequence
  Protein classification predicting sequence
LHVSRPVRWDSDHVVIMDDEL

SEQ ID NO: 63624 - protein, 7 aa, Artificial sequence
  Protein classification predicting sequence
GLDFFDA

SEQ ID NO: 63625 - protein, 9 aa, Artificial sequence
  Protein classification predicting sequence
AAWVIGTRN

SEQ ID NO: 63626 - protein, 7 aa, Artificial sequence
  Protein classification predicting sequence
GTRNTQK

SEQ ID NO: 63627 - protein, 9 aa, Artificial sequence
  Protein classification predicting sequence
TEELKDFPF

SEQ ID NO: 63628 - protein, 12 aa, Artificial sequence
  Protein classification predicting sequence
PVSMHCWQGDDV

SEQ ID NO: 63629 - protein, 17 aa, Artificial sequence
  Protein classification predicting sequence
PVSMHCWQGDDVAGFEN

SEQ ID NO: 63630 - protein, 8 aa, Artificial sequence
  Protein classification predicting sequence
TGNYPGKA

SEQ ID NO: 63631 - protein, 9 aa, Artificial sequence
  Protein classification predicting sequence
ELRADLEQA

SEQ ID NO: 63632 - protein, 17 aa, Artificial sequence
  Protein classification predicting sequence
LIPGPKRLNLHAIYLES

SEQ ID NO: 63633 - protein, 7 aa, Artificial sequence
  Protein classification predicting sequence
LGLDFNP

SEQ ID NO: 63634 - protein, 17 aa, Artificial sequence
  Protein classification predicting sequence
HHIDAVESKLFGIGAES

SEQ ID NO: 63635 - protein, 21 aa, Artificial sequence
  Protein classification predicting sequence
TALCLDAGHFHPTEVISDKIS

SEQ ID NO: 63636 - protein, 6 aa, Artificial sequence
  Protein classification predicting sequence
YCQRHD

SEQ ID NO: 63637 - protein, 8 aa, Artificial sequence
  Protein classification predicting sequence
YQVAKERY

SEQ ID NO: 63638 - protein, 7 aa, Artificial sequence
  Protein classification predicting sequence
HCWQGDD

SEQ ID NO: 63639 - protein, 7 aa, Artificial sequence
  Protein classification predicting sequence
ALSLIPG

SEQ ID NO: 63640 - protein, 9 aa, Artificial sequence
  Protein classification predicting sequence
NPTFFSHPM

SEQ ID NO: 63641 - protein, 7 aa, Artificial sequence
  Protein classification predicting sequence
ESYTVGS

SEQ ID NO: 63642 - protein, 6 aa, Artificial sequence
  Protein classification predicting sequence
LHVSRP

SEQ ID NO: 63643 - protein, 6 aa, Artificial sequence
  Protein classification predicting sequence
WVEWAK

SEQ ID NO: 63644 - protein, 10 aa, Artificial sequence
  Protein classification predicting sequence
SMHCWQGDDV

SEQ ID NO: 63645 - protein, 7 aa, Artificial sequence
  Protein classification predicting sequence
KRLNLHA

SEQ ID NO: 63646 - protein, 6 aa, Artificial sequence
  Protein classification predicting sequence
GLDFNP

SEQ ID NO: 63647 - protein, 9 aa, Artificial sequence
  Protein classification predicting sequence
RDFWIEHGK

SEQ ID NO: 63648 - protein, 27 aa, Artificial sequence
  Protein classification predicting sequence
LLLHVSRPVRWDSDHVVLLDDETQAIA

SEQ ID NO: 63649 - protein, 11 aa, Artificial sequence
  Protein classification predicting sequence
KALLRALLEPT

SEQ ID NO: 63650 - protein, 7 aa, Artificial sequence
  Protein classification predicting sequence
YQAIGVD

SEQ ID NO: 63651 - protein, 7 aa, Artificial sequence
  Protein classification predicting sequence
AYSLIPG

SEQ ID NO: 63652 - protein, 6 aa, Artificial sequence
  Protein classification predicting sequence
RLNLHA

SEQ ID NO: 63653 - protein, 14 aa, Artificial sequence
  Protein classification predicting sequence
GFENPEGSLTGGIQ

SEQ ID NO: 63654 - protein, 18 aa, Artificial sequence
  Protein classification predicting sequence
LFDRVHIGLDFFDASINR

SEQ ID NO: 63655 - protein, 8 aa, Artificial sequence
  Protein classification predicting sequence
GDYTARLA

SEQ ID NO: 63656 - protein, 15 aa, Artificial sequence
  Protein classification predicting sequence
CFSHPLSADGFTLSH

SEQ ID NO: 63657 - protein, 17 aa, Artificial sequence
  Protein classification predicting sequence
GDYTARLALLEEQKSLP

SEQ ID NO: 63658 - protein, 9 aa, Artificial sequence
  Protein classification predicting sequence
QAVWEMYCQ

SEQ ID NO: 63659 - protein, 10 aa, Artificial sequence
  Protein classification predicting sequence
LAKQRFAAVG

SEQ ID NO: 63660 - protein, 11 aa, Artificial sequence
  Protein classification predicting sequence
TGNYPGKARNA

SEQ ID NO: 63661 - protein, 29 aa, Artificial sequence
  Protein classification predicting sequence
ASRRVSAYFGEQLGTPSVMNIWIPDGMKD

SEQ ID NO: 63662 - protein, 10 aa, Artificial sequence
  Protein classification predicting sequence
DRLAPRQRLL

SEQ ID NO: 63663 - protein, 32 aa, Artificial sequence
  Protein classification predicting sequence
PAHHIDAVESKLFGIGAESYTVGSNEFYMGYA

SEQ ID NO: 63664 - protein, 6 aa, Artificial sequence
  Protein classification predicting sequence
AMLYVP

SEQ ID NO: 63665 - protein, 8 aa, Artificial sequence
  Protein classification predicting sequence
MDGHFVPN

SEQ ID NO: 63666 - protein, 7 aa, Artificial sequence
  Protein classification predicting sequence
VPNLTIG

SEQ ID NO: 63667 - protein, 10 aa, Artificial sequence
  Protein classification predicting sequence
DVMDGHFVPN

SEQ ID NO: 63668 - protein, 6 aa, Artificial sequence
  Protein classification predicting sequence
DMMPKV

SEQ ID NO: 63669 - protein, 6 aa, Artificial sequence
  Protein classification predicting sequence
GCKAGL

SEQ ID NO: 63670 - protein, 6 aa, Artificial sequence
  Protein classification predicting sequence
NPATPL

SEQ ID NO: 63671 - protein, 12 aa, Artificial sequence
  Protein classification predicting sequence
PIDVHLMVKPVD

SEQ ID NO: 63672 - protein, 6 aa, Artificial sequence
  Protein classification predicting sequence
ITFHPE

SEQ ID NO: 63673 - protein, 10 aa, Artificial sequence
  Protein classification predicting sequence
MSVNPGFGGQ

SEQ ID NO: 63674 - protein, 6 aa, Artificial sequence
  Protein classification predicting sequence
DVMDGH

SEQ ID NO: 63675 - protein, 7 aa, Artificial sequence
  Protein classification predicting sequence
SILSADF

SEQ ID NO: 63676 - protein, 6 aa, Artificial sequence
  Protein classification predicting sequence
FVPNIT

SEQ ID NO: 63677 - protein, 9 aa, Artificial sequence
  Protein classification predicting sequence
APSLLSADF

SEQ ID NO: 63678 - protein, 6 aa, Artificial sequence
  Protein classification predicting sequence
AFFDCH

SEQ ID NO: 63679 - protein, 6 aa, Artificial sequence
  Protein classification predicting sequence
FHYEAT

SEQ ID NO: 63680 - protein, 10 aa, Artificial sequence
  Protein classification predicting sequence
AGANVIVAGT

SEQ ID NO: 63681 - protein, 13 aa, Artificial sequence
  Protein classification predicting sequence
MSVNPGFGGQSFI

SEQ ID NO: 63682 - protein, 6 aa, Artificial sequence
  Protein classification predicting sequence
DVMDNH

SEQ ID NO: 63683 - protein, 6 aa, Artificial sequence
  Protein classification predicting sequence
LKKAVG

SEQ ID NO: 63684 - protein, 7 aa, Artificial sequence
  Protein classification predicting sequence
TDNGNYI

SEQ ID NO: 63685 - protein, 10 aa, Artificial sequence
  Protein classification predicting sequence
TDNGNYILDC

SEQ ID NO: 63686 - protein, 8 aa, Artificial sequence
  Protein classification predicting sequence
PFAWKQTE

SEQ ID NO: 63687 - protein, 7 aa, Artificial sequence
  Protein classification predicting sequence
GVGTGST

SEQ ID NO: 63688 - protein, 17 aa, Artificial sequence
  Protein classification predicting sequence
FPLPVEVIPMARSAVAR

SEQ ID NO: 63689 - protein, 11 aa, Artificial sequence
  Protein classification predicting sequence
LGGDPVYREGV

SEQ ID NO: 63690 - protein, 6 aa, Artificial sequence
  Protein classification predicting sequence
GPVITD

SEQ ID NO: 63691 - protein, 9 aa, Artificial sequence
  Protein classification predicting sequence
IVGVGTGST

SEQ ID NO: 63692 - protein, 8 aa, Artificial sequence
  Protein classification predicting sequence
GVGTGSTV

SEQ ID NO: 63693 - protein, 6 aa, Artificial sequence
  Protein classification predicting sequence
MIKGGG

SEQ ID NO: 63694 - protein, 7 aa, Artificial sequence
  Protein classification predicting sequence
IVDVHGL

SEQ ID NO: 63695 - protein, 11 aa, Artificial sequence
  Protein classification predicting sequence
IVGVVTNGLFA

SEQ ID NO: 63696 - protein, 7 aa, Artificial sequence
  Protein classification predicting sequence
TIEKLGE

SEQ ID NO: 63697 - protein, 7 aa, Artificial sequence
  Protein classification predicting sequence
RVKEGLS

SEQ ID NO: 63698 - protein, 14 aa, Artificial sequence
  Protein classification predicting sequence
LAQQLNIPLISLND

SEQ ID NO: 63699 - protein, 17 aa, Artificial sequence
  Protein classification predicting sequence
QSLDLTIDGADEIDSNL

SEQ ID NO: 63700 - protein, 6 aa, Artificial sequence
  Protein classification predicting sequence
LIKGGG

SEQ ID NO: 63701 - protein, 16 aa, Artificial sequence
  Protein classification predicting sequence
LIKGGGGALLREKIVA

SEQ ID NO: 63702 - protein, 64 aa, Artificial sequence
  Protein classification predicting sequence
QAVPTSKETEALAQQLNIPLISLNDVQSLDLTIDGADEIDSNLQLIKGGGGALLREKIVASSSK

SEQ ID NO: 63703 - protein, 18 aa, Artificial sequence
  Protein classification predicting sequence
KIQSLGCQTTLRLKNNET

SEQ ID NO: 63704 - protein, 13 aa, Artificial sequence
  Protein classification predicting sequence
LKMITGVVETGLF

SEQ ID NO: 63705 - protein, 8 aa, Artificial sequence
  Protein classification predicting sequence
GVVETGLF

SEQ ID NO: 63706 - protein, 9 aa, Artificial sequence
  Protein classification predicting sequence
AIIGTKNGI

SEQ ID NO: 63707 - protein, 9 aa, Artificial sequence
  Protein classification predicting sequence
REKIVAAAS

SEQ ID NO: 63708 - protein, 10 aa, Artificial sequence
  Protein classification predicting sequence
TVGVVEHGLF

SEQ ID NO: 63709 - protein, 7 aa, Artificial sequence
  Protein classification predicting sequence
MVDKVIV

SEQ ID NO: 63710 - protein, 9 aa, Artificial sequence
  Protein classification predicting sequence
LIKGGGGAL

SEQ ID NO: 63711 - protein, 9 aa, Artificial sequence
  Protein classification predicting sequence
DASFGRIPD

SEQ ID NO: 63712 - protein, 7 aa, Artificial sequence
  Protein classification predicting sequence
QMIKGGG

SEQ ID NO: 63713 - protein, 7 aa, Artificial sequence
  Protein classification predicting sequence
GAVSSSE

SEQ ID NO: 63714 - protein, 7 aa, Artificial sequence
  Protein classification predicting sequence
KGGGGAL

SEQ ID NO: 63715 - protein, 6 aa, Artificial sequence
  Protein classification predicting sequence
FICIVD

SEQ ID NO: 63716 - protein, 8 aa, Artificial sequence
  Protein classification predicting sequence
EVIPMARS

SEQ ID NO: 63717 - protein, 9 aa, Artificial sequence
  Protein classification predicting sequence
TDNGNVILD

SEQ ID NO: 63718 - protein, 6 aa, Artificial sequence
  Protein classification predicting sequence
NNIPGV

SEQ ID NO: 63719 - protein, 8 aa, Artificial sequence
  Protein classification predicting sequence
GWAALKYV

SEQ ID NO: 63720 - protein, 17 aa, Artificial sequence
  Protein classification predicting sequence
TMKGQIEGAVSSSDAST

SEQ ID NO: 63721 - protein, 13 aa, Artificial sequence
  Protein classification predicting sequence
IKGGGAALTREKI

SEQ ID NO: 63722 - protein, 7 aa, Artificial sequence
  Protein classification predicting sequence
ENAINAI

SEQ ID NO: 63723 - protein, 35 aa, Artificial sequence
  Protein classification predicting sequence
LGIYVDGADEINGHMQMIKGGGAALTREKIIASVA

SEQ ID NO: 63724 - protein, 7 aa, Artificial sequence
  Protein classification predicting sequence
KFICIAD

SEQ ID NO: 63725 - protein, 45 aa, Artificial sequence
  Protein classification predicting sequence
FPLPVEVIPMARSAVARQLVKLGGRPEYRQGVVTDNGNVILDVHG

SEQ ID NO: 63726 - protein, 28 aa, Artificial sequence
  Protein classification predicting sequence
ENAINAIPGVVTVGLFANRGADVALIGT

SEQ ID NO: 63727 - protein, 9 aa, Artificial sequence
  Protein classification predicting sequence
YVEDGMIVG

SEQ ID NO: 63728 - protein, 19 aa, Artificial sequence
  Protein classification predicting sequence
TIVGVGTGSTAAHFIDALG

SEQ ID NO: 63729 - protein, 19 aa, Artificial sequence
  Protein classification predicting sequence
PEYRQGVVTDNGNVILDVH

SEQ ID NO: 63730 - protein, 11 aa, Artificial sequence
  Protein classification predicting sequence
TDNGNVILDVH

SEQ ID NO: 63731 - protein, 6 aa, Artificial sequence
  Protein classification predicting sequence
GVVTNG

SEQ ID NO: 63732 - protein, 8 aa, Artificial sequence
  Protein classification predicting sequence
AIDGADEV

SEQ ID NO: 63733 - protein, 6 aa, Artificial sequence
  Protein classification predicting sequence
AALQYV

SEQ ID NO: 63734 - protein, 7 aa, Artificial sequence
  Protein classification predicting sequence
GAVAASK

SEQ ID NO: 63735 - protein, 7 aa, Artificial sequence
  Protein classification predicting sequence
GTPEGAK

SEQ ID NO: 63736 - protein, 6 aa, Artificial sequence
  Protein classification predicting sequence
PVEVLP

SEQ ID NO: 63737 - protein, 7 aa, Artificial sequence
  Protein classification predicting sequence
GLGTGST

SEQ ID NO: 63738 - protein, 12 aa, Artificial sequence
  Protein classification predicting sequence
IDLAIDGADEVD

SEQ ID NO: 63739 - protein, 7 aa, Artificial sequence
  Protein classification predicting sequence
DGADEVD

SEQ ID NO: 63740 - protein, 6 aa, Artificial sequence
  Protein classification predicting sequence
EVIPMA

SEQ ID NO: 63741 - protein, 9 aa, Artificial sequence
  Protein classification predicting sequence
GVGTGSTVN

SEQ ID NO: 63742 - protein, 12 aa, Artificial sequence
  Protein classification predicting sequence
GVGTGSTVNFFI

SEQ ID NO: 63743 - protein, 7 aa, Artificial sequence
  Protein classification predicting sequence
NGIKGGG

SEQ ID NO: 63744 - protein, 10 aa, Artificial sequence
  Protein classification predicting sequence
ALLMEKIVAT

SEQ ID NO: 63745 - protein, 8 aa, Artificial sequence
  Protein classification predicting sequence
GVVEHGLF

SEQ ID NO: 63746 - protein, 7 aa, Artificial sequence
  Protein classification predicting sequence
VKLGGDP

SEQ ID NO: 63747 - protein, 7 aa, Artificial sequence
  Protein classification predicting sequence
LGIPLKS

SEQ ID NO: 63748 - protein, 7 aa, Artificial sequence
  Protein classification predicting sequence
TIDGADE

SEQ ID NO: 63749 - protein, 15 aa, Artificial sequence
  Protein classification predicting sequence
REGVITDNGNVILDV

SEQ ID NO: 63750 - protein, 8 aa, Artificial sequence
  Protein classification predicting sequence
DLAIDGAD

SEQ ID NO: 63751 - protein, 7 aa, Artificial sequence
  Protein classification predicting sequence
IKGGGAA

SEQ ID NO: 63752 - protein, 13 aa, Artificial sequence
  Protein classification predicting sequence
GVGTGSTVNHFID

SEQ ID NO: 63753 - protein, 8 aa, Artificial sequence
  Protein classification predicting sequence
INDIPGVV

SEQ ID NO: 63754 - protein, 9 aa, Artificial sequence
  Protein classification predicting sequence
GRRVKEEGL

SEQ ID NO: 63755 - protein, 8 aa, Artificial sequence
  Protein classification predicting sequence
DGADEVDP

SEQ ID NO: 63756 - protein, 9 aa, Artificial sequence
  Protein classification predicting sequence
ALTREKIVA

SEQ ID NO: 63757 - protein, 11 aa, Artificial sequence
  Protein classification predicting sequence
ASTEKLKSLGI

SEQ ID NO: 63758 - protein, 15 aa, Artificial sequence
  Protein classification predicting sequence
LGKFPLPVEVIPMAR

SEQ ID NO: 63759 - protein, 12 aa, Artificial sequence
  Protein classification predicting sequence
FPLPVEVIPMAR

SEQ ID NO: 63760 - protein, 12 aa, Artificial sequence
  Protein classification predicting sequence
VVTDNGNVILDV

SEQ ID NO: 63761 - protein, 14 aa, Artificial sequence
  Protein classification predicting sequence
GVVTVGLFANRGAD

SEQ ID NO: 63762 - protein, 14 aa, Artificial sequence
  Protein classification predicting sequence
MIKGGGAALTREKI

SEQ ID NO: 63763 - protein, 7 aa, Artificial sequence
  Protein classification predicting sequence
KQVDVLG

SEQ ID NO: 63764 - protein, 7 aa, Artificial sequence
  Protein classification predicting sequence
RFVVVVD

SEQ ID NO: 63765 - protein, 12 aa, Artificial sequence
  Protein classification predicting sequence
FQLIKGGGACHV

SEQ ID NO: 63766 - protein, 7 aa, Artificial sequence
  Protein classification predicting sequence
LADKVLV

SEQ ID NO: 63767 - protein, 7 aa, Artificial sequence
  Protein classification predicting sequence
YVDGADE

SEQ ID NO: 63768 - protein, 10 aa, Artificial sequence
  Protein classification predicting sequence
VARQLVKLGG

SEQ ID NO: 63769 - protein, 6 aa, Artificial sequence
  Protein classification predicting sequence
PIEVIP

SEQ ID NO: 63770 - protein, 6 aa, Artificial sequence
  Protein classification predicting sequence
DLNEVD

SEQ ID NO: 63771 - protein, 10 aa, Artificial sequence
  Protein classification predicting sequence
TAEEFVRLLA

SEQ ID NO: 63772 - protein, 7 aa, Artificial sequence
  Protein classification predicting sequence
LGAFKLP

SEQ ID NO: 63773 - protein, 9 aa, Artificial sequence
  Protein classification predicting sequence
GMEILDPIA

SEQ ID NO: 63774 - protein, 18 aa, Artificial sequence
  Protein classification predicting sequence
SIVGVGTGSTVNHFIDAL

SEQ ID NO: 63775 - protein, 12 aa, Artificial sequence
  Protein classification predicting sequence
YVDGADEINGHM

SEQ ID NO: 63776 - protein, 7 aa, Artificial sequence
  Protein classification predicting sequence
KQVDILG

SEQ ID NO: 63777 - protein, 9 aa, Artificial sequence
  Protein classification predicting sequence
ITGVCTSNK

SEQ ID NO: 63778 - protein, 7 aa, Artificial sequence
  Protein classification predicting sequence
AFLAKEL

SEQ ID NO: 63779 - protein, 8 aa, Artificial sequence
  Protein classification predicting sequence
IKGGGGAL

SEQ ID NO: 63780 - protein, 18 aa, Artificial sequence
  Protein classification predicting sequence
IKGGGGALFREKVIDEMA

SEQ ID NO: 63781 - protein, 11 aa, Artificial sequence
  Protein classification predicting sequence
LPVEVDKFNWY

SEQ ID NO: 63782 - protein, 7 aa, Artificial sequence
  Protein classification predicting sequence
RRVNEDV

SEQ ID NO: 63783 - protein, 7 aa, Artificial sequence
  Protein classification predicting sequence
LIHLTGV

SEQ ID NO: 63784 - protein, 15 aa, Artificial sequence
  Protein classification predicting sequence
ADQVIVGTQEGVKIL

SEQ ID NO: 63785 - protein, 11 aa, Artificial sequence
  Protein classification predicting sequence
EGLQVVGVTTS

SEQ ID NO: 63786 - protein, 6 aa, Artificial sequence
  Protein classification predicting sequence
RLFRVF

SEQ ID NO: 63787 - protein, 14 aa, Artificial sequence
  Protein classification predicting sequence
GLGTGSTAYYFVEE

SEQ ID NO: 63788 - protein, 10 aa, Artificial sequence
  Protein classification predicting sequence
LPVEVVQYGA

SEQ ID NO: 63789 - protein, 7 aa, Artificial sequence
  Protein classification predicting sequence
GYKPSFR

SEQ ID NO: 63790 - protein, 60 aa, Artificial sequence
  Protein classification predicting sequence
ALKKIAGVTAAQYVTDGMTIGLGTGSTAYYFVEEIGRRVKQEGLQVVGVTTSSVTSKQAE

SEQ ID NO: 63791 - protein, 12 aa, Artificial sequence
  Protein classification predicting sequence
VTTSSVTSKQAE

SEQ ID NO: 63792 - protein, 7 aa, Artificial sequence
  Protein classification predicting sequence
IPLKSID

SEQ ID NO: 63793 - protein, 8 aa, Artificial sequence
  Protein classification predicting sequence
FNGIKGGG

SEQ ID NO: 63794 - protein, 7 aa, Artificial sequence
  Protein classification predicting sequence
VTTSSVT

SEQ ID NO: 63795 - protein, 8 aa, Artificial sequence
  Protein classification predicting sequence
FVEEIGRR

SEQ ID NO: 63796 - protein, 13 aa, Artificial sequence
  Protein classification predicting sequence
ALLMEKIVATPTK

SEQ ID NO: 63797 - protein, 18 aa, Artificial sequence
  Protein classification predicting sequence
LGAFKLPVEVVQYGADRL

SEQ ID NO: 63798 - protein, 12 aa, Artificial sequence
  Protein classification predicting sequence
GVVEHGLFNGMV

SEQ ID NO: 63799 - protein, 12 aa, Artificial sequence
  Protein classification predicting sequence
GLGSGSTAALMI

SEQ ID NO: 63800 - protein, 6 aa, Artificial sequence
  Protein classification predicting sequence
EIGRRV

SEQ ID NO: 63801 - protein, 7 aa, Artificial sequence
  Protein classification predicting sequence
LPIEIIP

SEQ ID NO: 63802 - protein, 7 aa, Artificial sequence
  Protein classification predicting sequence
KVVETLG

SEQ ID NO: 63803 - protein, 12 aa, Artificial sequence
  Protein classification predicting sequence
LDIYVDGADEIN

SEQ ID NO: 63804 - protein, 9 aa, Artificial sequence
  Protein classification predicting sequence
GVVTVGLFA

SEQ ID NO: 63805 - protein, 10 aa, Artificial sequence
  Protein classification predicting sequence
TDNGNVILDV

SEQ ID NO: 63806 - protein, 8 aa, Artificial sequence
  Protein classification predicting sequence
IKGAVSSS

SEQ ID NO: 63807 - protein, 13 aa, Artificial sequence
  Protein classification predicting sequence
IKGAVSSSVASTE

SEQ ID NO: 63808 - protein, 8 aa, Artificial sequence
  Protein classification predicting sequence
TKAVDVLG

SEQ ID NO: 63809 - protein, 14 aa, Artificial sequence
  Protein classification predicting sequence
INAIPGVVTVGLFA

SEQ ID NO: 63810 - protein, 11 aa, Artificial sequence
  Protein classification predicting sequence
LYVDGADECDP

SEQ ID NO: 63811 - protein, 8 aa, Artificial sequence
  Protein classification predicting sequence
LTREKIIA

SEQ ID NO: 63812 - protein, 16 aa, Artificial sequence
  Protein classification predicting sequence
LNQIPGVVCVGLFARR

SEQ ID NO: 63813 - protein, 16 aa, Artificial sequence
  Protein classification predicting sequence
GVGTGSTVAYFIDALG

SEQ ID NO: 63814 - protein, 11 aa, Artificial sequence
  Protein classification predicting sequence
AYGQYDENLVQ

SEQ ID NO: 63815 - protein, 9 aa, Artificial sequence
  Protein classification predicting sequence
HDHGHEHGG

SEQ ID NO: 63816 - protein, 9 aa, Artificial sequence
  Protein classification predicting sequence
VQRVPKDVF

SEQ ID NO: 63817 - protein, 12 aa, Artificial sequence
  Protein classification predicting sequence
VVVDGNHMLAGQ

SEQ ID NO: 63818 - protein, 7 aa, Artificial sequence
  Protein classification predicting sequence
KEFEDAA

SEQ ID NO: 63819 - protein, 9 aa, Artificial sequence
  Protein classification predicting sequence
GEGGSVGGP

SEQ ID NO: 63820 - protein, 10 aa, Artificial sequence
  Protein classification predicting sequence
FSLKLCNMGG

SEQ ID NO: 63821 - protein, 8 aa, Artificial sequence
  Protein classification predicting sequence
GYYLGRRM

SEQ ID NO: 63822 - protein, 8 aa, Artificial sequence
  Protein classification predicting sequence
DFLQMVLD

SEQ ID NO: 63823 - protein, 9 aa, Artificial sequence
  Protein classification predicting sequence
AVGALHHDP

SEQ ID NO: 63824 - protein, 17 aa, Artificial sequence
  Protein classification predicting sequence
PFTYLPFGAGPRSCLGV

SEQ ID NO: 63825 - protein, 12 aa, Artificial sequence
  Protein classification predicting sequence
ENFRALCTGEKG

SEQ ID NO: 63826 - protein, 28 aa, Artificial sequence
  Protein classification predicting sequence
HVGPGVLSMANAGPNTNGSQFFICTIKT

SEQ ID NO: 63827 - protein, 6 aa, Artificial sequence
  Protein classification predicting sequence
VQTGDP

SEQ ID NO: 63828 - protein, 6 aa, Artificial sequence
  Protein classification predicting sequence
LEHKGP

SEQ ID NO: 63829 - protein, 7 aa, Artificial sequence
  Protein classification predicting sequence
AEEVATF

SEQ ID NO: 63830 - protein, 6 aa, Artificial sequence
  Protein classification predicting sequence
DWRKEM

SEQ ID NO: 63831 - protein, 14 aa, Artificial sequence
  Protein classification predicting sequence
NFKIEPPGLFRGRG

SEQ ID NO: 63832 - protein, 11 aa, Artificial sequence
  Protein classification predicting sequence
HPKMGMLKRRI

SEQ ID NO: 63833 - protein, 8 aa, Artificial sequence
  Protein classification predicting sequence
DNTVTWLA

SEQ ID NO: 63834 - protein, 7 aa, Artificial sequence
  Protein classification predicting sequence
FDFLGKD

SEQ ID NO: 63835 - protein, 10 aa, Artificial sequence
  Protein classification predicting sequence
KNLQLFMENK

SEQ ID NO: 63836 - protein, 11 aa, Artificial sequence
  Protein classification predicting sequence
AKILSYNRANR

SEQ ID NO: 63837 - protein, 6 aa, Artificial sequence
  Protein classification predicting sequence
TFEKSM

SEQ ID NO: 63838 - protein, 8 aa, Artificial sequence
  Protein classification predicting sequence
ITYMRTDS

SEQ ID NO: 63839 - protein, 9 aa, Artificial sequence
  Protein classification predicting sequence
QEAHEAIRP

SEQ ID NO: 63840 - protein, 7 aa, Artificial sequence
  Protein classification predicting sequence
VGYMVSP

SEQ ID NO: 63841 - protein, 9 aa, Artificial sequence
  Protein classification predicting sequence
TQPPPRYTE

SEQ ID NO: 63842 - protein, 6 aa, Artificial sequence
  Protein classification predicting sequence
FTAQME

SEQ ID NO: 63843 - protein, 10 aa, Artificial sequence
  Protein classification predicting sequence
EPPGLFRGRG

SEQ ID NO: 63844 - protein, 12 aa, Artificial sequence
  Protein classification predicting sequence
IDKLALRAGNEK

SEQ ID NO: 63845 - protein, 7 aa, Artificial sequence
  Protein classification predicting sequence
ADTVGCC

SEQ ID NO: 63846 - protein, 9 aa, Artificial sequence
  Protein classification predicting sequence
LSVGRVQTP

SEQ ID NO: 63847 - protein, 6 aa, Artificial sequence
  Protein classification predicting sequence
ISYPRT

SEQ ID NO: 63848 - protein, 6 aa, Artificial sequence
  Protein classification predicting sequence
ITYPRS

SEQ ID NO: 63849 - protein, 7 aa, Artificial sequence
  Protein classification predicting sequence
SPLLWKK

SEQ ID NO: 63850 - protein, 9 aa, Artificial sequence
  Protein classification predicting sequence
GLSAGRVQS

SEQ ID NO: 63851 - protein, 7 aa, Artificial sequence
  Protein classification predicting sequence
AHEAIRP

SEQ ID NO: 63852 - protein, 11 aa, Artificial sequence
  Protein classification predicting sequence
EELGIGRPSTY

SEQ ID NO: 63853 - protein, 7 aa, Artificial sequence
  Protein classification predicting sequence
SAGRVQS

SEQ ID NO: 63854 - protein, 5 aa, Artificial sequence
  Protein classification predicting sequence
KKTMM

SEQ ID NO: 63855 - protein, 6 aa, Artificial sequence
  Protein classification predicting sequence
AQKLYE

SEQ ID NO: 63856 - protein, 6 aa, Artificial sequence
  Protein classification predicting sequence
GHIRDL

SEQ ID NO: 63857 - protein, 11 aa, Artificial sequence
  Protein classification predicting sequence
DREGEAIAWHL

SEQ ID NO: 63858 - protein, 8 aa, Artificial sequence
  Protein classification predicting sequence
RVVFNEIT

SEQ ID NO: 63859 - protein, 8 aa, Artificial sequence
  Protein classification predicting sequence
RFSEASLV

SEQ ID NO: 63860 - protein, 8 aa, Artificial sequence
  Protein classification predicting sequence
GIGRPSTY

SEQ ID NO: 63861 - protein, 7 aa, Artificial sequence
  Protein classification predicting sequence
IQDRGYV

SEQ ID NO: 63862 - protein, 12 aa, Artificial sequence
  Protein classification predicting sequence
AANTFPKSRETR

SEQ ID NO: 63863 - protein, 7 aa, Artificial sequence
  Protein classification predicting sequence
VKSSVGH

SEQ ID NO: 63864 - protein, 9 aa, Artificial sequence
  Protein classification predicting sequence
QQARRFMDR

SEQ ID NO: 63865 - protein, 7 aa, Artificial sequence
  Protein classification predicting sequence
ITSTLQQ

SEQ ID NO: 63866 - protein, 9 aa, Artificial sequence
  Protein classification predicting sequence
VAILCNHQR

SEQ ID NO: 63867 - protein, 9 aa, Artificial sequence
  Protein classification predicting sequence
KHKDKHKDR

SEQ ID NO: 63868 - protein, 17 aa, Artificial sequence
  Protein classification predicting sequence
ITNLSKCDFTQMSQYFK

SEQ ID NO: 63869 - protein, 10 aa, Artificial sequence
  Protein classification predicting sequence
LEHKGPVFAP

SEQ ID NO: 63870 - protein, 8 aa, Artificial sequence
  Protein classification predicting sequence
KVPSPPPG

SEQ ID NO: 63871 - protein, 6 aa, Artificial sequence
  Protein classification predicting sequence
WKSKEM

SEQ ID NO: 63872 - protein, 13 aa, Artificial sequence
  Protein classification predicting sequence
FDFPGKDSIRYYN

SEQ ID NO: 63873 - protein, 9 aa, Artificial sequence
  Protein classification predicting sequence
VEKRVFKNL

SEQ ID NO: 63874 - protein, 13 aa, Artificial sequence
  Protein classification predicting sequence
GLTAKVFRTYNAS

SEQ ID NO: 63875 - protein, 18 aa, Artificial sequence
  Protein classification predicting sequence
LVIVESPAKAKTINKYLG

SEQ ID NO: 63876 - protein, 28 aa, Artificial sequence
  Protein classification predicting sequence
KADHIYLATDLDREGEAIAWHLREVIGG

SEQ ID NO: 63877 - protein, 12 aa, Artificial sequence
  Protein classification predicting sequence
GRILRFDGWTKV

SEQ ID NO: 63878 - protein, 17 aa, Artificial sequence
  Protein classification predicting sequence
LVKELEKRGIGRPSTYA

SEQ ID NO: 63879 - protein, 9 aa, Artificial sequence
  Protein classification predicting sequence
GIGRPSTYA

SEQ ID NO: 63880 - protein, 18 aa, Artificial sequence
  Protein classification predicting sequence
ENRRFYAEKMGEIVTDRL

SEQ ID NO: 63881 - protein, 7 aa, Artificial sequence
  Protein classification predicting sequence
EGGMRPN

SEQ ID NO: 63882 - protein, 12 aa, Artificial sequence
  Protein classification predicting sequence
IRTASTGVFLGC

SEQ ID NO: 63883 - protein, 9 aa, Artificial sequence
  Protein classification predicting sequence
KCGTAMDSY

SEQ ID NO: 63884 - protein, 7 aa, Artificial sequence
  Protein classification predicting sequence
IKGYDGP

SEQ ID NO: 63885 - protein, 14 aa, Artificial sequence
  Protein classification predicting sequence
CEKSDAYFVLRDGA

SEQ ID NO: 63886 - protein, 8 aa, Artificial sequence
  Protein classification predicting sequence
FPKSRETR

SEQ ID NO: 63887 - protein, 7 aa, Artificial sequence
  Protein classification predicting sequence
YLADAPQ

SEQ ID NO: 63888 - protein, 7 aa, Artificial sequence
  Protein classification predicting sequence
DREGEAI

SEQ ID NO: 63889 - protein, 7 aa, Artificial sequence
  Protein classification predicting sequence
EREIKAF

SEQ ID NO: 63890 - protein, 28 aa, Artificial sequence
  Protein classification predicting sequence
EARKQMSKEEKLKIKEENEKLLKEYGFC

SEQ ID NO: 63891 - protein, 36 aa, Artificial sequence
  Protein classification predicting sequence
PAKILSYNRANRAVAILCNHQRAPPKTFEKSMMNLQ

SEQ ID NO: 63892 - protein, 12 aa, Artificial sequence
  Protein classification predicting sequence
DPDREGEAISWH

SEQ ID NO: 63893 - protein, 6 aa, Artificial sequence
  Protein classification predicting sequence
GRVQTP

SEQ ID NO: 63894 - protein, 6 aa, Artificial sequence
  Protein classification predicting sequence
TKPPAR

SEQ ID NO: 63895 - protein, 5 aa, Artificial sequence
  Protein classification predicting sequence
PPARY

SEQ ID NO: 63896 - protein, 7 aa, Artificial sequence
  Protein classification predicting sequence
LVIVESP

SEQ ID NO: 63897 - protein, 6 aa, Artificial sequence
  Protein classification predicting sequence
LYELIW

SEQ ID NO: 63898 - protein, 6 aa, Artificial sequence
  Protein classification predicting sequence
TSTLQQ

SEQ ID NO: 63899 - protein, 6 aa, Artificial sequence
  Protein classification predicting sequence
AQRLYE

SEQ ID NO: 63900 - protein, 6 aa, Artificial sequence
  Protein classification predicting sequence
MVRGYI

SEQ ID NO: 63901 - protein, 11 aa, Artificial sequence
  Protein classification predicting sequence
LIWRQFVACQM

SEQ ID NO: 63902 - protein, 11 aa, Artificial sequence
  Protein classification predicting sequence
FTKPPARFSEA

SEQ ID NO: 63903 - protein, 24 aa, Artificial sequence
  Protein classification predicting sequence
RGYVRVENRRFYAEKMGEIVTDRL

SEQ ID NO: 63904 - protein, 16 aa, Artificial sequence
  Protein classification predicting sequence
RDRLPEKLRYLADAPQ

SEQ ID NO: 63905 - protein, 11 aa, Artificial sequence
  Protein classification predicting sequence
GHIRDLPTSGS

SEQ ID NO: 63906 - protein, 14 aa, Artificial sequence
  Protein classification predicting sequence
ARGLSAGRVQSVAV

SEQ ID NO: 63907 - protein, 9 aa, Artificial sequence
  Protein classification predicting sequence
QHFTKPPAR

SEQ ID NO: 63908 - protein, 10 aa, Artificial sequence
  Protein classification predicting sequence
NRRFYAEKMG

SEQ ID NO: 63909 - protein, 7 aa, Artificial sequence
  Protein classification predicting sequence
GYEIEEG

SEQ ID NO: 63910 - protein, 6 aa, Artificial sequence
  Protein classification predicting sequence
KCGSEM

SEQ ID NO: 63911 - protein, 6 aa, Artificial sequence
  Protein classification predicting sequence
CKNTRK

SEQ ID NO: 63912 - protein, 7 aa, Artificial sequence
  Protein classification predicting sequence
RFSRKTK

SEQ ID NO: 63913 - protein, 33 aa, Artificial sequence
  Protein classification predicting sequence
KDREKSKHSNSEHKDSEKKHKEKEKTKHKDGSS

SEQ ID NO: 63914 - protein, 7 aa, Artificial sequence
  Protein classification predicting sequence
ITYMRTD

SEQ ID NO: 63915 - protein, 8 aa, Artificial sequence
  Protein classification predicting sequence
SKCDFTQM

SEQ ID NO: 63916 - protein, 8 aa, Artificial sequence
  Protein classification predicting sequence
ALRAGNEK

SEQ ID NO: 63917 - protein, 9 aa, Artificial sequence
  Protein classification predicting sequence
GKDSIRYYN

SEQ ID NO: 63918 - protein, 10 aa, Artificial sequence
  Protein classification predicting sequence
AKVFRTYNAS

SEQ ID NO: 63919 - protein, 16 aa, Artificial sequence
  Protein classification predicting sequence
DSKGRRQYFYGKMHVQ

SEQ ID NO: 63920 - protein, 7 aa, Artificial sequence
  Protein classification predicting sequence
VFMLMET

SEQ ID NO: 63921 - protein, 10 aa, Artificial sequence
  Protein classification predicting sequence
TVGLLTLKNK

SEQ ID NO: 63922 - protein, 9 aa, Artificial sequence
  Protein classification predicting sequence
SNRLYKPLL

SEQ ID NO: 63923 - protein, 22 aa, Artificial sequence
  Protein classification predicting sequence
KDLRTYGVNYTFLYNFWTNVKS

SEQ ID NO: 63924 - protein, 12 aa, Artificial sequence
  Protein classification predicting sequence
VGHTPSISKRAY

SEQ ID NO: 63925 - protein, 27 aa, Artificial sequence
  Protein classification predicting sequence
LVDAQETRRILDRLYGYEVSPVLWKKV

SEQ ID NO: 63926 - protein, 18 aa, Artificial sequence
  Protein classification predicting sequence
LYENGYITYMRTDSTTLS

SEQ ID NO: 63927 - protein, 7 aa, Artificial sequence
  Protein classification predicting sequence
RTVASQM

SEQ ID NO: 63928 - protein, 6 aa, Artificial sequence
  Protein classification predicting sequence
EASLVK

SEQ ID NO: 63929 - protein, 12 aa, Artificial sequence
  Protein classification predicting sequence
HFGRLVDYDFTA

SEQ ID NO: 63930 - protein, 14 aa, Artificial sequence
  Protein classification predicting sequence
EITAQNGRYGPYLK

SEQ ID NO: 63931 - protein, 16 aa, Artificial sequence
  Protein classification predicting sequence
KDGRFGPYVTDGETNA

SEQ ID NO: 63932 - protein, 7 aa, Artificial sequence
  Protein classification predicting sequence
GRFGPYV

SEQ ID NO: 63933 - protein, 10 aa, Artificial sequence
  Protein classification predicting sequence
AQEAHEAIRP

SEQ ID NO: 63934 - protein, 10 aa, Artificial sequence
  Protein classification predicting sequence
VESPAKAKTI

SEQ ID NO: 63935 - protein, 6 aa, Artificial sequence
  Protein classification predicting sequence
FTARME

SEQ ID NO: 63936 - protein, 22 aa, Artificial sequence
  Protein classification predicting sequence
NPAYEVLQHVKIPTHLTDVVVY

SEQ ID NO: 63937 - protein, 111 aa, Artificial sequence
  Protein classification predicting sequence
QTWEEALTRLIFVGSDSKGRRQYFYGKMHVQNRNAKRDRIFVRVYNVMKRINCFINKNIKKSSTDSNYQLAVFMLMETMFFIRFGKMKYLKENETVGLLTLKNKHIEISPD

SEQ ID NO: 63938 - protein, 15 aa, Artificial sequence
  Protein classification predicting sequence
VNAQQARRFMDRVVG

SEQ ID NO: 63939 - protein, 10 aa, Artificial sequence
  Protein classification predicting sequence
APFITSTLQQ

SEQ ID NO: 63940 - protein, 21 aa, Artificial sequence
  Protein classification predicting sequence
AQRLYEAGYITYMRTDSTNLS

SEQ ID NO: 63941 - protein, 29 aa, Artificial sequence
  Protein classification predicting sequence
LVKELEKRGIGRPSTYASIISTIQDRGYV

SEQ ID NO: 63942 - protein, 8 aa, Artificial sequence
  Protein classification predicting sequence
LMNYDFTA

SEQ ID NO: 63943 - protein, 11 aa, Artificial sequence
  Protein classification predicting sequence
KRKLHVCGNNP

SEQ ID NO: 63944 - protein, 15 aa, Artificial sequence
  Protein classification predicting sequence
FPKSRETRAPLVEEL

SEQ ID NO: 63945 - protein, 7 aa, Artificial sequence
  Protein classification predicting sequence
NDSQIEA

SEQ ID NO: 63946 - protein, 7 aa, Artificial sequence
  Protein classification predicting sequence
NDSHKHK

SEQ ID NO: 63947 - protein, 7 aa, Artificial sequence
  Protein classification predicting sequence
KHKDKHK

SEQ ID NO: 63948 - protein, 8 aa, Artificial sequence
  Protein classification predicting sequence
KENGFSSP

SEQ ID NO: 63949 - protein, 9 aa, Artificial sequence
  Protein classification predicting sequence
KWKWWEEER

SEQ ID NO: 63950 - protein, 20 aa, Artificial sequence
  Protein classification predicting sequence
GIKWKFLEHKGPVFAPPYEP

SEQ ID NO: 63951 - protein, 7 aa, Artificial sequence
  Protein classification predicting sequence
VKFYYDG

SEQ ID NO: 63952 - protein, 24 aa, Artificial sequence
  Protein classification predicting sequence
KLSPKAEEVATFFAKMLDHEYTTK

SEQ ID NO: 63953 - protein, 10 aa, Artificial sequence
  Protein classification predicting sequence
IFRKNFFKDW

SEQ ID NO: 63954 - protein, 9 aa, Artificial sequence
  Protein classification predicting sequence
ITNLSKCDF

SEQ ID NO: 63955 - protein, 8 aa, Artificial sequence
  Protein classification predicting sequence
KEEKLKIK

SEQ ID NO: 63956 - protein, 14 aa, Artificial sequence
  Protein classification predicting sequence
RIMPEDIIINCSKD

SEQ ID NO: 63957 - protein, 43 aa, Artificial sequence
  Protein classification predicting sequence
KVTWLVSWTENIQGSIKYIMLNPSSRIKGEKDWQKYETARRLK

SEQ ID NO: 63958 - protein, 31 aa, Artificial sequence
  Protein classification predicting sequence
ILNKHLQDLMEGLTAKVFRTYNASITLQQQL

SEQ ID NO: 63959 - protein, 10 aa, Artificial sequence
  Protein classification predicting sequence
VESKKKAVQR

SEQ ID NO: 63960 - protein, 34 aa, Artificial sequence
  Protein classification predicting sequence
EEQLMKLEVQATDREENKQIALGTSKLNYLDPRI

SEQ ID NO: 63961 - protein, 13 aa, Artificial sequence
  Protein classification predicting sequence
GVPIEKIYNKTQR

SEQ ID NO: 63962 - protein, 11 aa, Artificial sequence
  Protein classification predicting sequence
IVESPAKAKTI

SEQ ID NO: 63963 - protein, 16 aa, Artificial sequence
  Protein classification predicting sequence
IVESPAKAKTINKYLG

SEQ ID NO: 63964 - protein, 8 aa, Artificial sequence
  Protein classification predicting sequence
LSAGRVQS

SEQ ID NO: 63965 - protein, 9 aa, Artificial sequence
  Protein classification predicting sequence
PFITSTLQQ

SEQ ID NO: 63966 - protein, 7 aa, Artificial sequence
  Protein classification predicting sequence
VDYDFTA

SEQ ID NO: 63967 - protein, 6 aa, Artificial sequence
  Protein classification predicting sequence
KPKKIK

SEQ ID NO: 63968 - protein, 6 aa, Artificial sequence
  Protein classification predicting sequence
LFRGRG

SEQ ID NO: 63969 - protein, 7 aa, Artificial sequence
  Protein classification predicting sequence
ELDLRIG

SEQ ID NO: 63970 - protein, 7 aa, Artificial sequence
  Protein classification predicting sequence
SLSALQI

SEQ ID NO: 63971 - protein, 6 aa, Artificial sequence
  Protein classification predicting sequence
PEKWQL

SEQ ID NO: 63972 - protein, 15 aa, Artificial sequence
  Protein classification predicting sequence
AGDPDREGQLLVDEV

SEQ ID NO: 63973 - protein, 15 aa, Artificial sequence
  Protein classification predicting sequence
GVLSVGRVQTPVLGL

SEQ ID NO: 63974 - protein, 20 aa, Artificial sequence
  Protein classification predicting sequence
FTDATLLSAMTGIARFVQDK

SEQ ID NO: 63975 - protein, 21 aa, Artificial sequence
  Protein classification predicting sequence
SALARARADWLYGINMTRAYT

SEQ ID NO: 63976 - protein, 19 aa, Artificial sequence
  Protein classification predicting sequence
AGYQGVLSVGRVQTPVLGL

SEQ ID NO: 63977 - protein, 17 aa, Artificial sequence
  Protein classification predicting sequence
LITYPRSDCRYLPEEHF

SEQ ID NO: 63978 - protein, 16 aa, Artificial sequence
  Protein classification predicting sequence
RLFIAEKPSLARAIAD

SEQ ID NO: 63979 - protein, 11 aa, Artificial sequence
  Protein classification predicting sequence
VTWCIGHLLEQ

SEQ ID NO: 63980 - protein, 28 aa, Artificial sequence
  Protein classification predicting sequence
AGYQGVLSVGRVQTPVLGLVVRRDEEIE

SEQ ID NO: 63981 - protein, 10 aa, Artificial sequence
  Protein classification predicting sequence
LIARQYLMQF

SEQ ID NO: 63982 - protein, 8 aa, Artificial sequence
  Protein classification predicting sequence
PDMTAHWE

SEQ ID NO: 63983 - protein, 7 aa, Artificial sequence
  Protein classification predicting sequence
FVPEEFW

SEQ ID NO: 63984 - protein, 7 aa, Artificial sequence
  Protein classification predicting sequence
VFTDGDP

SEQ ID NO: 63985 - protein, 12 aa, Artificial sequence
  Protein classification predicting sequence
VFTDGDPWSYRI

SEQ ID NO: 63986 - protein, 6 aa, Artificial sequence
  Protein classification predicting sequence
GGYQIP

SEQ ID NO: 63987 - protein, 8 aa, Artificial sequence
  Protein classification predicting sequence
IKSAHLSE

SEQ ID NO: 63988 - protein, 12 aa, Artificial sequence
  Protein classification predicting sequence
TLRELYYISEGW

SEQ ID NO: 63989 - protein, 8 aa, Artificial sequence
  Protein classification predicting sequence
LATPDAKF

SEQ ID NO: 63990 - protein, 7 aa, Artificial sequence
  Protein classification predicting sequence
RLIRLGD

SEQ ID NO: 63991 - protein, 9 aa, Artificial sequence
  Protein classification predicting sequence
PKEKFSYDP

SEQ ID NO: 63992 - protein, 9 aa, Artificial sequence
  Protein classification predicting sequence
DGEDEFNAS

SEQ ID NO: 63993 - protein, 16 aa, Artificial sequence
  Protein classification predicting sequence
LVVETAAMADRLIEEK

SEQ ID NO: 63994 - protein, 11 aa, Artificial sequence
  Protein classification predicting sequence
KFVGMTMDDIK

SEQ ID NO: 63995 - protein, 11 aa, Artificial sequence
  Protein classification predicting sequence
KKGGPTGDYKR

SEQ ID NO: 63996 - protein, 31 aa, Artificial sequence
  Protein classification predicting sequence
LALKWGVRIEQQALANKSLEFVAKEYLPEKI

SEQ ID NO: 63997 - protein, 7 aa, Artificial sequence
  Protein classification predicting sequence
DPYGWYI

SEQ ID NO: 63998 - protein, 6 aa, Artificial sequence
  Protein classification predicting sequence
RALYQT

SEQ ID NO: 63999 - protein, 14 aa, Artificial sequence
  Protein classification predicting sequence
RQTRGMYGLGVKAA

SEQ ID NO: 64000 - protein, 7 aa, Artificial sequence
  Protein classification predicting sequence
EFQSIGD

SEQ ID NO: 64001 - protein, 7 aa, Artificial sequence
  Protein classification predicting sequence
GHPFIVE

SEQ ID NO: 64002 - protein, 11 aa, Artificial sequence
  Protein classification predicting sequence
QSRGQQGIGIS

SEQ ID NO: 64003 - protein, 9 aa, Artificial sequence
  Protein classification predicting sequence
VEVGLAYGG

SEQ ID NO: 64004 - protein, 6 aa, Artificial sequence
  Protein classification predicting sequence
ANRVPL

SEQ ID NO: 64005 - protein, 6 aa, Artificial sequence
  Protein classification predicting sequence
EMKPHP

SEQ ID NO: 64006 - protein, 16 aa, Artificial sequence
  Protein classification predicting sequence
HEAVTNSLDACEEAGI

SEQ ID NO: 64007 - protein, 8 aa, Artificial sequence
  Protein classification predicting sequence
EAWVKIDV

SEQ ID NO: 64008 - protein, 9 aa, Artificial sequence
  Protein classification predicting sequence
KNEGKIVKK

SEQ ID NO: 64009 - protein, 16 aa, Artificial sequence
  Protein classification predicting sequence
RYANRVPLLFDAGSCV

SEQ ID NO: 64010 - protein, 6 aa, Artificial sequence
  Protein classification predicting sequence
IMTDAD

SEQ ID NO: 64011 - protein, 6 aa, Artificial sequence
  Protein classification predicting sequence
CVGETL

SEQ ID NO: 64012 - protein, 7 aa, Artificial sequence
  Protein classification predicting sequence
RIIYGGS

SEQ ID NO: 64013 - protein, 6 aa, Artificial sequence
  Protein classification predicting sequence
VVVSPP

SEQ ID NO: 64014 - protein, 6 aa, Artificial sequence
  Protein classification predicting sequence
GAFTGE

SEQ ID NO: 64015 - protein, 8 aa, Artificial sequence
  Protein classification predicting sequence
GAFTGEIS

SEQ ID NO: 64016 - protein, 9 aa, Artificial sequence
  Protein classification predicting sequence
VILGHSERR

SEQ ID NO: 64017 - protein, 13 aa, Artificial sequence
  Protein classification predicting sequence
LEEREAGKTFDVC

SEQ ID NO: 64018 - protein, 6 aa, Artificial sequence
  Protein classification predicting sequence
DWTNVV

SEQ ID NO: 64019 - protein, 7 aa, Artificial sequence
  Protein classification predicting sequence
VIACIGE

SEQ ID NO: 64020 - protein, 6 aa, Artificial sequence
  Protein classification predicting sequence
WAIGTG

SEQ ID NO: 64021 - protein, 7 aa, Artificial sequence
  Protein classification predicting sequence
YGGSVKP

SEQ ID NO: 64022 - protein, 7 aa, Artificial sequence
  Protein classification predicting sequence
PIICCGE

SEQ ID NO: 64023 - protein, 8 aa, Artificial sequence
  Protein classification predicting sequence
CVPATLLS

SEQ ID NO: 64024 - protein, 8 aa, Artificial sequence
  Protein classification predicting sequence
TGEVSAEM

SEQ ID NO: 64025 - protein, 7 aa, Artificial sequence
  Protein classification predicting sequence
IVCVGET

SEQ ID NO: 64026 - protein, 5 aa, Artificial sequence
  Protein classification predicting sequence
CVGET

SEQ ID NO: 64027 - protein, 6 aa, Artificial sequence
  Protein classification predicting sequence
AHAFMR

SEQ ID NO: 64028 - protein, 13 aa, Artificial sequence
  Protein classification predicting sequence
GTSWKMNKTLAEA

SEQ ID NO: 64029 - protein, 15 aa, Artificial sequence
  Protein classification predicting sequence
VELGHSERREHFGET

SEQ ID NO: 64030 - protein, 10 aa, Artificial sequence
  Protein classification predicting sequence
GIPASADYAD

SEQ ID NO: 64031 - protein, 11 aa, Artificial sequence
  Protein classification predicting sequence
IDGLFIGRSAW

SEQ ID NO: 64032 - protein, 11 aa, Artificial sequence
  Protein classification predicting sequence
IQRFVIPPFTA

SEQ ID NO: 64033 - protein, 6 aa, Artificial sequence
  Protein classification predicting sequence
NCEELI

SEQ ID NO: 64034 - protein, 7 aa, Artificial sequence
  Protein classification predicting sequence
GGASLKA

SEQ ID NO: 64035 - protein, 9 aa, Artificial sequence
  Protein classification predicting sequence
IQYGGSVKP

SEQ ID NO: 64036 - protein, 6 aa, Artificial sequence
  Protein classification predicting sequence
VAAQNC

SEQ ID NO: 64037 - protein, 26 aa, Artificial sequence
  Protein classification predicting sequence
VAAQNCWVKKGGAFTGEVSAEMLVNL

SEQ ID NO: 64038 - protein, 14 aa, Artificial sequence
  Protein classification predicting sequence
QGLKVIACVGETLE

SEQ ID NO: 64039 - protein, 7 aa, Artificial sequence
  Protein classification predicting sequence
CVGETLE

SEQ ID NO: 64040 - protein, 9 aa, Artificial sequence
  Protein classification predicting sequence
TRIIYGGSV

SEQ ID NO: 64041 - protein, 7 aa, Artificial sequence
  Protein classification predicting sequence
IINFKAY

SEQ ID NO: 64042 - protein, 6 aa, Artificial sequence
  Protein classification predicting sequence
FFVGGN

SEQ ID NO: 64043 - protein, 8 aa, Artificial sequence
  Protein classification predicting sequence
AATAEDAQ

SEQ ID NO: 64044 - protein, 8 aa, Artificial sequence
  Protein classification predicting sequence
IIGHSERR

SEQ ID NO: 64045 - protein, 8 aa, Artificial sequence
  Protein classification predicting sequence
GETLEERE

SEQ ID NO: 64046 - protein, 10 aa, Artificial sequence
  Protein classification predicting sequence
ALAGLTEEQV

SEQ ID NO: 64047 - protein, 13 aa, Artificial sequence
  Protein classification predicting sequence
SDIDGALVGGASL

SEQ ID NO: 64048 - protein, 11 aa, Artificial sequence
  Protein classification predicting sequence
RKPIIAGNWKM

SEQ ID NO: 64049 - protein, 7 aa, Artificial sequence
  Protein classification predicting sequence
LEEREAG

SEQ ID NO: 64050 - protein, 6 aa, Artificial sequence
  Protein classification predicting sequence
VIAYEP

SEQ ID NO: 64051 - protein, 15 aa, Artificial sequence
  Protein classification predicting sequence
VIAYEPIWAIGTGKS

SEQ ID NO: 64052 - protein, 17 aa, Artificial sequence
  Protein classification predicting sequence
VIAYEPIWAIGTGKSST

SEQ ID NO: 64053 - protein, 13 aa, Artificial sequence
  Protein classification predicting sequence
LVGGASLEPASFL

SEQ ID NO: 64054 - protein, 6 aa, Artificial sequence
  Protein classification predicting sequence
NKKAHA

SEQ ID NO: 64055 - protein, 8 aa, Artificial sequence
  Protein classification predicting sequence
DGGLIGGA

SEQ ID NO: 64056 - protein, 7 aa, Artificial sequence
  Protein classification predicting sequence
AGNWKMN

SEQ ID NO: 64057 - protein, 11 aa, Artificial sequence
  Protein classification predicting sequence
ICVPATLLSRA

SEQ ID NO: 64058 - protein, 7 aa, Artificial sequence
  Protein classification predicting sequence
GETLEER

SEQ ID NO: 64059 - protein, 7 aa, Artificial sequence
  Protein classification predicting sequence
PILCVGE

SEQ ID NO: 64060 - protein, 6 aa, Artificial sequence
  Protein classification predicting sequence
NWKLNG

SEQ ID NO: 64061 - protein, 6 aa, Artificial sequence
  Protein classification predicting sequence
IQYGGS

SEQ ID NO: 64062 - protein, 8 aa, Artificial sequence
  Protein classification predicting sequence
MPDIDGGL

SEQ ID NO: 64063 - protein, 7 aa, Artificial sequence
  Protein classification predicting sequence
VILGHSE

SEQ ID NO: 64064 - protein, 6 aa, Artificial sequence
  Protein classification predicting sequence
ILCVGE

SEQ ID NO: 64065 - protein, 8 aa, Artificial sequence
  Protein classification predicting sequence
IAGNWKMN

SEQ ID NO: 64066 - protein, 11 aa, Artificial sequence
  Protein classification predicting sequence
GALVGGASLKA

SEQ ID NO: 64067 - protein, 6 aa, Artificial sequence
  Protein classification predicting sequence
QPDIDG

SEQ ID NO: 64068 - protein, 6 aa, Artificial sequence
  Protein classification predicting sequence
VGGNWK

SEQ ID NO: 64069 - protein, 9 aa, Artificial sequence
  Protein classification predicting sequence
VGGNWKMNG

SEQ ID NO: 64070 - protein, 9 aa, Artificial sequence
  Protein classification predicting sequence
VAAQNCYKV

SEQ ID NO: 64071 - protein, 11 aa, Artificial sequence
  Protein classification predicting sequence
FGESDALIAEK

SEQ ID NO: 64072 - protein, 6 aa, Artificial sequence
  Protein classification predicting sequence
QAQEVH

SEQ ID NO: 64073 - protein, 9 aa, Artificial sequence
  Protein classification predicting sequence
VEVVICPPA

SEQ ID NO: 64074 - protein, 13 aa, Artificial sequence
  Protein classification predicting sequence
VVAYEPVWAIGTG

SEQ ID NO: 64075 - protein, 7 aa, Artificial sequence
  Protein classification predicting sequence
EPPELIG

SEQ ID NO: 64076 - protein, 6 aa, Artificial sequence
  Protein classification predicting sequence
LCGAGI

SEQ ID NO: 64077 - protein, 8 aa, Artificial sequence
  Protein classification predicting sequence
DFARQKLD

SEQ ID NO: 64078 - protein, 10 aa, Artificial sequence
  Protein classification predicting sequence
WVILGHSERR

SEQ ID NO: 64079 - protein, 7 aa, Artificial sequence
  Protein classification predicting sequence
LGHSERR

SEQ ID NO: 64080 - protein, 19 aa, Artificial sequence
  Protein classification predicting sequence
VSDAVAQSTRIIYGGSVTG

SEQ ID NO: 64081 - protein, 6 aa, Artificial sequence
  Protein classification predicting sequence
GNWKMH

SEQ ID NO: 64082 - protein, 8 aa, Artificial sequence
  Protein classification predicting sequence
TGEVSAAM

SEQ ID NO: 64083 - protein, 6 aa, Artificial sequence
  Protein classification predicting sequence
LYGGSV

SEQ ID NO: 64084 - protein, 9 aa, Artificial sequence
  Protein classification predicting sequence
PIIAGNWKM

SEQ ID NO: 64085 - protein, 12 aa, Artificial sequence
  Protein classification predicting sequence
PFTDLRSVQTLV

SEQ ID NO: 64086 - protein, 11 aa, Artificial sequence
  Protein classification predicting sequence
GHSERREYHNE

SEQ ID NO: 64087 - protein, 7 aa, Artificial sequence
  Protein classification predicting sequence
SQPDVDG

SEQ ID NO: 64088 - protein, 6 aa, Artificial sequence
  Protein classification predicting sequence
QPDVDG

SEQ ID NO: 64089 - protein, 7 aa, Artificial sequence
  Protein classification predicting sequence
VAGNWKM

SEQ ID NO: 64090 - protein, 10 aa, Artificial sequence
  Protein classification predicting sequence
DGALVGGASL

SEQ ID NO: 64091 - protein, 17 aa, Artificial sequence
  Protein classification predicting sequence
WVILGHSERRAIFGESD

SEQ ID NO: 64092 - protein, 9 aa, Artificial sequence
  Protein classification predicting sequence
YGGSVTAAN

SEQ ID NO: 64093 - protein, 20 aa, Artificial sequence
  Protein classification predicting sequence
DVDGFLVGGASLKPEFVDII

SEQ ID NO: 64094 - protein, 7 aa, Artificial sequence
  Protein classification predicting sequence
PIVCVGE

SEQ ID NO: 64095 - protein, 9 aa, Artificial sequence
  Protein classification predicting sequence
GALVGGASL

SEQ ID NO: 64096 - protein, 8 aa, Artificial sequence
  Protein classification predicting sequence
VEVVVSPP

SEQ ID NO: 64097 - protein, 8 aa, Artificial sequence
  Protein classification predicting sequence
ILGHSERR

SEQ ID NO: 64098 - protein, 7 aa, Artificial sequence
  Protein classification predicting sequence
EQAQEVH

SEQ ID NO: 64099 - protein, 9 aa, Artificial sequence
  Protein classification predicting sequence
GCAVAIAPP

SEQ ID NO: 64100 - protein, 7 aa, Artificial sequence
  Protein classification predicting sequence
MLKDIGA

SEQ ID NO: 64101 - protein, 13 aa, Artificial sequence
  Protein classification predicting sequence
IAKKFAVLKEQGL

SEQ ID NO: 64102 - protein, 21 aa, Artificial sequence
  Protein classification predicting sequence
AEQVIIQYGGSVNASNAAELF

SEQ ID NO: 64103 - protein, 11 aa, Artificial sequence
  Protein classification predicting sequence
VDGALVGGASL

SEQ ID NO: 64104 - protein, 7 aa, Artificial sequence
  Protein classification predicting sequence
SFLALLD

SEQ ID NO: 64105 - protein, 7 aa, Artificial sequence
  Protein classification predicting sequence
IQYGGSV

SEQ ID NO: 64106 - protein, 8 aa, Artificial sequence
  Protein classification predicting sequence
GHSERREY

SEQ ID NO: 64107 - protein, 10 aa, Artificial sequence
  Protein classification predicting sequence
VMGNWKLNGS

SEQ ID NO: 64108 - protein, 7 aa, Artificial sequence
  Protein classification predicting sequence
LGAQNVD

SEQ ID NO: 64109 - protein, 13 aa, Artificial sequence
  Protein classification predicting sequence
YIIIGHSERRTYH

SEQ ID NO: 64110 - protein, 7 aa, Artificial sequence
  Protein classification predicting sequence
AVIAYEP

SEQ ID NO: 64111 - protein, 18 aa, Artificial sequence
  Protein classification predicting sequence
WAIGTGKSATPAQAQAVH

SEQ ID NO: 64112 - protein, 8 aa, Artificial sequence
  Protein classification predicting sequence
IIQYGGSV

SEQ ID NO: 64113 - protein, 10 aa, Artificial sequence
  Protein classification predicting sequence
ESDEFVAKKF

SEQ ID NO: 64114 - protein, 7 aa, Artificial sequence
  Protein classification predicting sequence
PVLCIGE

SEQ ID NO: 64115 - protein, 16 aa, Artificial sequence
  Protein classification predicting sequence
QPDIDGALVGGASLKA

SEQ ID NO: 64116 - protein, 9 aa, Artificial sequence
  Protein classification predicting sequence
AFAVIVKAA

SEQ ID NO: 64117 - protein, 10 aa, Artificial sequence
  Protein classification predicting sequence
GAGITTGEDV

SEQ ID NO: 64118 - protein, 6 aa, Artificial sequence
  Protein classification predicting sequence
YGGSVN

SEQ ID NO: 64119 - protein, 6 aa, Artificial sequence
  Protein classification predicting sequence
QTKAIA

SEQ ID NO: 64120 - protein, 13 aa, Artificial sequence
  Protein classification predicting sequence
VIAYEPVWAIGTG

SEQ ID NO: 64121 - protein, 7 aa, Artificial sequence
  Protein classification predicting sequence
YGGSVNA

SEQ ID NO: 64122 - protein, 7 aa, Artificial sequence
  Protein classification predicting sequence
QIKDVGA

SEQ ID NO: 64123 - protein, 11 aa, Artificial sequence
  Protein classification predicting sequence
AYEPVWAIGTG

SEQ ID NO: 64124 - protein, 10 aa, Artificial sequence
  Protein classification predicting sequence
SIKEIVERLN

SEQ ID NO: 64125 - protein, 8 aa, Artificial sequence
  Protein classification predicting sequence
PIIAGNWK

SEQ ID NO: 64126 - protein, 7 aa, Artificial sequence
  Protein classification predicting sequence
IGHSERR

SEQ ID NO: 64127 - protein, 7 aa, Artificial sequence
  Protein classification predicting sequence
CCGESLE

SEQ ID NO: 64128 - protein, 13 aa, Artificial sequence
  Protein classification predicting sequence
RKPIIAGNWKMNK

SEQ ID NO: 64129 - protein, 11 aa, Artificial sequence
  Protein classification predicting sequence
PIIAGNWKMNK

SEQ ID NO: 64130 - protein, 10 aa, Artificial sequence
  Protein classification predicting sequence
YIIIGHSERR

SEQ ID NO: 64131 - protein, 14 aa, Artificial sequence
  Protein classification predicting sequence
VESVVAAPALFLQE

SEQ ID NO: 64132 - protein, 13 aa, Artificial sequence
  Protein classification predicting sequence
YFHETDEDINKKA

SEQ ID NO: 64133 - protein, 10 aa, Artificial sequence
  Protein classification predicting sequence
INKKAHAIFK

SEQ ID NO: 64134 - protein, 7 aa, Artificial sequence
  Protein classification predicting sequence
LEQREAG

SEQ ID NO: 64135 - protein, 8 aa, Artificial sequence
  Protein classification predicting sequence
QEVADKVR

SEQ ID NO: 64136 - protein, 16 aa, Artificial sequence
  Protein classification predicting sequence
ACIGEKLDEREAGITE

SEQ ID NO: 64137 - protein, 23 aa, Artificial sequence
  Protein classification predicting sequence
VKDWSKVVLAYEPVWAIGTGKTA

SEQ ID NO: 64138 - protein, 14 aa, Artificial sequence
  Protein classification predicting sequence
AYEPVWAIGTGKTA

SEQ ID NO: 64139 - protein, 8 aa, Artificial sequence
  Protein classification predicting sequence
RIIYGGSV

SEQ ID NO: 64140 - protein, 18 aa, Artificial sequence
  Protein classification predicting sequence
RIIYGGSVTGATCKELAS

SEQ ID NO: 64141 - protein, 12 aa, Artificial sequence
  Protein classification predicting sequence
AYEPVWAIGTGK

SEQ ID NO: 64142 - protein, 7 aa, Artificial sequence
  Protein classification predicting sequence
WAIGTGK

SEQ ID NO: 64143 - protein, 13 aa, Artificial sequence
  Protein classification predicting sequence
GFLVGGASLKPEF

SEQ ID NO: 64144 - protein, 10 aa, Artificial sequence
  Protein classification predicting sequence
YVIIGHSERR

SEQ ID NO: 64145 - protein, 5 aa, Artificial sequence
  Protein classification predicting sequence
AQNCY

SEQ ID NO: 64146 - protein, 11 aa, Artificial sequence
  Protein classification predicting sequence
STRIIYGGSVT

SEQ ID NO: 64147 - protein, 9 aa, Artificial sequence
  Protein classification predicting sequence
RIIYGGSVT

SEQ ID NO: 64148 - protein, 6 aa, Artificial sequence
  Protein classification predicting sequence
YGGSVT

SEQ ID NO: 64149 - protein, 7 aa, Artificial sequence
  Protein classification predicting sequence
GVLLASG

SEQ ID NO: 64150 - protein, 7 aa, Artificial sequence
  Protein classification predicting sequence
GEDVKKA

SEQ ID NO: 64151 - protein, 7 aa, Artificial sequence
  Protein classification predicting sequence
PGSHTGH

SEQ ID NO: 64152 - protein, 10 aa, Artificial sequence
  Protein classification predicting sequence
RKFFVGGNWK

SEQ ID NO: 64153 - protein, 13 aa, Artificial sequence
  Protein classification predicting sequence
RKFFVGGNWKMNG

SEQ ID NO: 64154 - protein, 6 aa, Artificial sequence
  Protein classification predicting sequence
VLCIGE

SEQ ID NO: 64155 - protein, 7 aa, Artificial sequence
  Protein classification predicting sequence
ILYGGSV

SEQ ID NO: 64156 - protein, 6 aa, Artificial sequence
  Protein classification predicting sequence
GAYTGE

SEQ ID NO: 64157 - protein, 7 aa, Artificial sequence
  Protein classification predicting sequence
PVVCVGE

SEQ ID NO: 64158 - protein, 9 aa, Artificial sequence
  Protein classification predicting sequence
VLVGHSERR

SEQ ID NO: 64159 - protein, 9 aa, Artificial sequence
  Protein classification predicting sequence
GHSERRTYH

SEQ ID NO: 64160 - protein, 6 aa, Artificial sequence
  Protein classification predicting sequence
LTPIVC

SEQ ID NO: 64161 - protein, 9 aa, Artificial sequence
  Protein classification predicting sequence
WAIGTGKVA

SEQ ID NO: 64162 - protein, 8 aa, Artificial sequence
  Protein classification predicting sequence
EVVIAPPA

SEQ ID NO: 64163 - protein, 7 aa, Artificial sequence
  Protein classification predicting sequence
ESDEFIA

SEQ ID NO: 64164 - protein, 5 aa, Artificial sequence
  Protein classification predicting sequence
CCGES

SEQ ID NO: 64165 - protein, 6 aa, Artificial sequence
  Protein classification predicting sequence
VHKFIR

SEQ ID NO: 64166 - protein, 7 aa, Artificial sequence
  Protein classification predicting sequence
AQNMHFE

SEQ ID NO: 64167 - protein, 9 aa, Artificial sequence
  Protein classification predicting sequence
GHSERRELF

SEQ ID NO: 64168 - protein, 12 aa, Artificial sequence
  Protein classification predicting sequence
KGAFTGEISPAM

SEQ ID NO: 64169 - protein, 11 aa, Artificial sequence
  Protein classification predicting sequence
WAIGTGKTATP

SEQ ID NO: 64170 - protein, 16 aa, Artificial sequence
  Protein classification predicting sequence
DVDGFLVGGASLKPEF

SEQ ID NO: 64171 - protein, 16 aa, Artificial sequence
  Protein classification predicting sequence
AYEPVWAIGTGKVATP

SEQ ID NO: 64172 - protein, 12 aa, Artificial sequence
  Protein classification predicting sequence
NLSGAFTGETSA

SEQ ID NO: 64173 - protein, 12 aa, Artificial sequence
  Protein classification predicting sequence
VIAGNWKMHMTC

SEQ ID NO: 64174 - protein, 13 aa, Artificial sequence
  Protein classification predicting sequence
AYEPIWAIGTGKT

SEQ ID NO: 64175 - protein, 8 aa, Artificial sequence
  Protein classification predicting sequence
EQRERGEA

SEQ ID NO: 64176 - protein, 7 aa, Artificial sequence
  Protein classification predicting sequence
EREAGKT

SEQ ID NO: 64177 - protein, 7 aa, Artificial sequence
  Protein classification predicting sequence
LYGGSVK

SEQ ID NO: 64178 - protein, 18 aa, Artificial sequence
  Protein classification predicting sequence
GGASLNADEFGAICRAAG

SEQ ID NO: 64179 - protein, 7 aa, Artificial sequence
  Protein classification predicting sequence
LLYGGSV

SEQ ID NO: 64180 - protein, 6 aa, Artificial sequence
  Protein classification predicting sequence
NAAELF

SEQ ID NO: 64181 - protein, 7 aa, Artificial sequence
  Protein classification predicting sequence
GLTPVLC

SEQ ID NO: 64182 - protein, 17 aa, Artificial sequence
  Protein classification predicting sequence
TMVCSNNPAVSAAVAAL

SEQ ID NO: 64183 - protein, 8 aa, Artificial sequence
  Protein classification predicting sequence
IAKAAERV

SEQ ID NO: 64184 - protein, 8 aa, Artificial sequence
  Protein classification predicting sequence
TIVVAPQL

SEQ ID NO: 64185 - protein, 25 aa, Artificial sequence
  Protein classification predicting sequence
PDYVAVEPPELIGTGIPVSKAKPEV

SEQ ID NO: 64186 - protein, 16 aa, Artificial sequence
  Protein classification predicting sequence
VGVLLASGVTKAKDPE

SEQ ID NO: 64187 - protein, 14 aa, Artificial sequence
  Protein classification predicting sequence
GATWVVLGHSERRH

SEQ ID NO: 64188 - protein, 7 aa, Artificial sequence
  Protein classification predicting sequence
GHSERRH

SEQ ID NO: 64189 - protein, 8 aa, Artificial sequence
  Protein classification predicting sequence
FGESDELI

SEQ ID NO: 64190 - protein, 26 aa, Artificial sequence
  Protein classification predicting sequence
VIACIGEKLDEREAGITEKVVFEQTK

SEQ ID NO: 64191 - protein, 8 aa, Artificial sequence
  Protein classification predicting sequence
IADNVKDW

SEQ ID NO: 64192 - protein, 35 aa, Artificial sequence
  Protein classification predicting sequence
KVVLAYEPVWAIGTGKTATPQQAQEVHEKLRGWLK

SEQ ID NO: 64193 - protein, 9 aa, Artificial sequence
  Protein classification predicting sequence
GCDVAIAPP

SEQ ID NO: 64194 - protein, 25 aa, Artificial sequence
  Protein classification predicting sequence
GSHIMLGAQNVDLNLSGAFTGETSA

SEQ ID NO: 64195 - protein, 67 aa, Artificial sequence
  Protein classification predicting sequence
MLKDIGAQYIIIGHSERRTYHKESDELIAKKFAVLKEQGLTPVLCIGETEAENEAGKTEEVCARQID

SEQ ID NO: 64196 - protein, 47 aa, Artificial sequence
  Protein classification predicting sequence
VLKTQGAAAFEGAVIAYEPVWAIGTGKSATPAQAQAVHKFIRDHIAK

SEQ ID NO: 64197 - protein, 7 aa, Artificial sequence
  Protein classification predicting sequence
GNWKMNG

SEQ ID NO: 64198 - protein, 20 aa, Artificial sequence
  Protein classification predicting sequence
VAAQNCYKVPKGAFTGEISP

SEQ ID NO: 64199 - protein, 9 aa, Artificial sequence
  Protein classification predicting sequence
GAFTGEISP

SEQ ID NO: 64200 - protein, 6 aa, Artificial sequence
  Protein classification predicting sequence
KTEEVC

SEQ ID NO: 64201 - protein, 7 aa, Artificial sequence
  Protein classification predicting sequence
ESDEFVA

SEQ ID NO: 64202 - protein, 6 aa, Artificial sequence
  Protein classification predicting sequence
KTKFAL

SEQ ID NO: 64203 - protein, 11 aa, Artificial sequence
  Protein classification predicting sequence
RRPMVAGNWKM

SEQ ID NO: 64204 - protein, 8 aa, Artificial sequence
  Protein classification predicting sequence
NKKAHAIF

SEQ ID NO: 64205 - protein, 7 aa, Artificial sequence
  Protein classification predicting sequence
VVIAYEP

SEQ ID NO: 64206 - protein, 12 aa, Artificial sequence
  Protein classification predicting sequence
DIDGALVGGASL

SEQ ID NO: 64207 - protein, 27 aa, Artificial sequence
  Protein classification predicting sequence
VVIAYEPIWAIGTGKSSTSEDANEMCA

SEQ ID NO: 64208 - protein, 21 aa, Artificial sequence
  Protein classification predicting sequence
ATRIQYGGSVKPNNIKEYMAQ

SEQ ID NO: 64209 - protein, 20 aa, Artificial sequence
  Protein classification predicting sequence
VAAQNCWVKKGGAFTGEVSA

SEQ ID NO: 64210 - protein, 11 aa, Artificial sequence
  Protein classification predicting sequence
DGFLVGGASLK

SEQ ID NO: 64211 - protein, 18 aa, Artificial sequence
  Protein classification predicting sequence
DGFLVGGASLKGPEFATI

SEQ ID NO: 64212 - protein, 8 aa, Artificial sequence
  Protein classification predicting sequence
LVGGASLK

SEQ ID NO: 64213 - protein, 14 aa, Artificial sequence
  Protein classification predicting sequence
CCGESLETYEAGKA

SEQ ID NO: 64214 - protein, 36 aa, Artificial sequence
  Protein classification predicting sequence
AYEPIWAIGTGKSATQDDAQNMCKAVRDVVAADFGQ

SEQ ID NO: 64215 - protein, 18 aa, Artificial sequence
  Protein classification predicting sequence
VADKVRVQYGGSVKPENV

SEQ ID NO: 64216 - protein, 15 aa, Artificial sequence
  Protein classification predicting sequence
TDLRSVQTLVDGDKL

SEQ ID NO: 64217 - protein, 8 aa, Artificial sequence
  Protein classification predicting sequence
VREAGNHV

SEQ ID NO: 64218 - protein, 9 aa, Artificial sequence
  Protein classification predicting sequence
IAGNWKMNK

SEQ ID NO: 64219 - protein, 11 aa, Artificial sequence
  Protein classification predicting sequence
IAGNWKMNKNP

SEQ ID NO: 64220 - protein, 19 aa, Artificial sequence
  Protein classification predicting sequence
YMACPDVDGALVGGASLEA

SEQ ID NO: 64221 - protein, 8 aa, Artificial sequence
  Protein classification predicting sequence
SFLALLDF

SEQ ID NO: 64222 - protein, 12 aa, Artificial sequence
  Protein classification predicting sequence
LKVAAQNCYFEN

SEQ ID NO: 64223 - protein, 14 aa, Artificial sequence
  Protein classification predicting sequence
EFVGAQVSAALAGL

SEQ ID NO: 64224 - protein, 7 aa, Artificial sequence
  Protein classification predicting sequence
AQNTYFE

SEQ ID NO: 64225 - protein, 9 aa, Artificial sequence
  Protein classification predicting sequence
YGGSVKPEN

SEQ ID NO: 64226 - protein, 18 aa, Artificial sequence
  Protein classification predicting sequence
YMACPDVDGALVGGASLE

SEQ ID NO: 64227 - protein, 11 aa, Artificial sequence
  Protein classification predicting sequence
DGALVGGASLE

SEQ ID NO: 64228 - protein, 6 aa, Artificial sequence
  Protein classification predicting sequence
LLNHSE

SEQ ID NO: 64229 - protein, 5 aa, Artificial sequence
  Protein classification predicting sequence
QNVHW

SEQ ID NO: 64230 - protein, 6 aa, Artificial sequence
  Protein classification predicting sequence
IVGHSE

SEQ ID NO: 64231 - protein, 19 aa, Artificial sequence
  Protein classification predicting sequence
IVGHSEPRKYFSESDEQIN

SEQ ID NO: 64232 - protein, 10 aa, Artificial sequence
  Protein classification predicting sequence
YVVIGHSERR

SEQ ID NO: 64233 - protein, 6 aa, Artificial sequence
  Protein classification predicting sequence
MIKDCG

SEQ ID NO: 64234 - protein, 7 aa, Artificial sequence
  Protein classification predicting sequence
IAGNWKM

SEQ ID NO: 64235 - protein, 6 aa, Artificial sequence
  Protein classification predicting sequence
GAQDVS

SEQ ID NO: 64236 - protein, 14 aa, Artificial sequence
  Protein classification predicting sequence
AYEPVWAIGTGKVA

SEQ ID NO: 64237 - protein, 17 aa, Artificial sequence
  Protein classification predicting sequence
GFLVGGASLKPEFVDII

SEQ ID NO: 64238 - protein, 11 aa, Artificial sequence
  Protein classification predicting sequence
VMGNWKLNGSK

SEQ ID NO: 64239 - protein, 7 aa, Artificial sequence
  Protein classification predicting sequence
DLAERLI

SEQ ID NO: 64240 - protein, 6 aa, Artificial sequence
  Protein classification predicting sequence
VCARQI

SEQ ID NO: 64241 - protein, 11 aa, Artificial sequence
  Protein classification predicting sequence
GVDVAVAPPAL

SEQ ID NO: 64242 - protein, 6 aa, Artificial sequence
  Protein classification predicting sequence
SPAMLK

SEQ ID NO: 64243 - protein, 14 aa, Artificial sequence
  Protein classification predicting sequence
FAQPDIDGALVGGA

SEQ ID NO: 64244 - protein, 14 aa, Artificial sequence
  Protein classification predicting sequence
LDAKSFAAIAKAAA

SEQ ID NO: 64245 - protein, 17 aa, Artificial sequence
  Protein classification predicting sequence
FGATHIIIGHSERREYH

SEQ ID NO: 64246 - protein, 9 aa, Artificial sequence
  Protein classification predicting sequence
GHSERREYH

SEQ ID NO: 64247 - protein, 22 aa, Artificial sequence
  Protein classification predicting sequence
EAQNEAGETEAVCARQINAVID

SEQ ID NO: 64248 - protein, 14 aa, Artificial sequence
  Protein classification predicting sequence
QPDIDGALVGGASL

SEQ ID NO: 64249 - protein, 6 aa, Artificial sequence
  Protein classification predicting sequence
VVIAPP

SEQ ID NO: 64250 - protein, 8 aa, Artificial sequence
  Protein classification predicting sequence
ASLKVEDF

SEQ ID NO: 64251 - protein, 6 aa, Artificial sequence
  Protein classification predicting sequence
QAQAVH

SEQ ID NO: 64252 - protein, 8 aa, Artificial sequence
  Protein classification predicting sequence
DFLAIARA

SEQ ID NO: 64253 - protein, 8 aa, Artificial sequence
  Protein classification predicting sequence
FFVGGNFK

SEQ ID NO: 64254 - protein, 7 aa, Artificial sequence
  Protein classification predicting sequence
RILYGGS

SEQ ID NO: 64255 - protein, 6 aa, Artificial sequence
  Protein classification predicting sequence
VAIAPP

SEQ ID NO: 64256 - protein, 7 aa, Artificial sequence
  Protein classification predicting sequence
EAENEAG

SEQ ID NO: 64257 - protein, 11 aa, Artificial sequence
  Protein classification predicting sequence
AFEGAVIAYEP

SEQ ID NO: 64258 - protein, 15 aa, Artificial sequence
  Protein classification predicting sequence
AYEPVWAIGTGLAAT

SEQ ID NO: 64259 - protein, 21 aa, Artificial sequence
  Protein classification predicting sequence
DVDGFLVGGASLKPEFVDIIN

SEQ ID NO: 64260 - protein, 8 aa, Artificial sequence
  Protein classification predicting sequence
GADAIGLV

SEQ ID NO: 64261 - protein, 7 aa, Artificial sequence
  Protein classification predicting sequence
GIDISSG

SEQ ID NO: 64262 - protein, 7 aa, Artificial sequence
  Protein classification predicting sequence
DLASGIE

SEQ ID NO: 64263 - protein, 9 aa, Artificial sequence
  Protein classification predicting sequence
GGNGISFDW

SEQ ID NO: 64264 - protein, 7 aa, Artificial sequence
  Protein classification predicting sequence
DVSGGVE

SEQ ID NO: 64265 - protein, 7 aa, Artificial sequence
  Protein classification predicting sequence
DVSSGVE

SEQ ID NO: 64266 - protein, 11 aa, Artificial sequence
  Protein classification predicting sequence
GFVFAKSKRQV

SEQ ID NO: 64267 - protein, 7 aa, Artificial sequence
  Protein classification predicting sequence
KKVGVFV

SEQ ID NO: 64268 - protein, 6 aa, Artificial sequence
  Protein classification predicting sequence
QFHGDE

SEQ ID NO: 64269 - protein, 8 aa, Artificial sequence
  Protein classification predicting sequence
VDVSGGVE

SEQ ID NO: 64270 - protein, 9 aa, Artificial sequence
  Protein classification predicting sequence
ADMIGFVFA

SEQ ID NO: 64271 - protein, 6 aa, Artificial sequence
  Protein classification predicting sequence
KVGVFV

SEQ ID NO: 64272 - protein, 9 aa, Artificial sequence
  Protein classification predicting sequence
LAGGITPEN

SEQ ID NO: 64273 - protein, 7 aa, Artificial sequence
  Protein classification predicting sequence
DVASGVE

SEQ ID NO: 64274 - protein, 9 aa, Artificial sequence
  Protein classification predicting sequence
SSGVESAPG

SEQ ID NO: 64275 - protein, 7 aa, Artificial sequence
  Protein classification predicting sequence
DAKPPKG

SEQ ID NO: 64276 - protein, 6 aa, Artificial sequence
  Protein classification predicting sequence
LPGGNG

SEQ ID NO: 64277 - protein, 7 aa, Artificial sequence
  Protein classification predicting sequence
HIDKVCV

SEQ ID NO: 64278 - protein, 15 aa, Artificial sequence
  Protein classification predicting sequence
VNPDLTTIEHVLSNT

SEQ ID NO: 64279 - protein, 73 aa, Artificial sequence
  Protein classification predicting sequence
INTIQLHGTESIDFIQEIKKKYSSIKITKALAADENIIQNINKYKGFVDLFIIDTPSVSYGGTGQTYDWTILK

SEQ ID NO: 64280 - protein, 13 aa, Artificial sequence
  Protein classification predicting sequence
IKDIPYLIAGGIN

SEQ ID NO: 64281 - protein, 8 aa, Artificial sequence
  Protein classification predicting sequence
ENIQTVNQ

SEQ ID NO: 64282 - protein, 28 aa, Artificial sequence
  Protein classification predicting sequence
DLASGIEVNGRKDIEKMTAIVNIVKGDR

SEQ ID NO: 64283 - protein, 8 aa, Artificial sequence
  Protein classification predicting sequence
INTIQLHG

SEQ ID NO: 64284 - protein, 7 aa, Artificial sequence
  Protein classification predicting sequence
FIIDTPS

SEQ ID NO: 64285 - protein, 8 aa, Artificial sequence
  Protein classification predicting sequence
NGRKDIEK

SEQ ID NO: 64286 - protein, 7 aa, Artificial sequence
  Protein classification predicting sequence
DIVQLHG

SEQ ID NO: 64287 - protein, 9 aa, Artificial sequence
  Protein classification predicting sequence
PLFDSEAGG

SEQ ID NO: 64288 - protein, 39 aa, Artificial sequence
  Protein classification predicting sequence
NALNTMLPDDIVITQVEKKTEEFHARYGVERKEYRYRVL

SEQ ID NO: 64289 - protein, 20 aa, Artificial sequence
  Protein classification predicting sequence
SKTADVFRRNYVYQYPYPLE

SEQ ID NO: 64290 - protein, 16 aa, Artificial sequence
  Protein classification predicting sequence
QVEKKTEEFHARYGVE

SEQ ID NO: 64291 - protein, 44 aa, Artificial sequence
  Protein classification predicting sequence
NSIRKAIPYFIGTHDFTSFCSAKTDKKDKVRTIYEIELIEQDDE

SEQ ID NO: 64292 - protein, 22 aa, Artificial sequence
  Protein classification predicting sequence
IFRFVGNGFLYNMVRIIVGTLL

SEQ ID NO: 64293 - protein, 35 aa, Artificial sequence
  Protein classification predicting sequence
VGQGKLDPDSIPEILAKQNRQFAGKMAPGHGLYLW

SEQ ID NO: 64294 - protein, 5 aa, Artificial sequence
  Protein classification predicting sequence
FHARF

SEQ ID NO: 64295 - protein, 6 aa, Artificial sequence
  Protein classification predicting sequence
APPEGL

SEQ ID NO: 64296 - protein, 29 aa, Artificial sequence
  Protein classification predicting sequence
AAKHLVGSHDFTAFSNAKSKKKSMVREVY

SEQ ID NO: 64297 - protein, 8 aa, Artificial sequence
  Protein classification predicting sequence
GFLYNMVR

SEQ ID NO: 64298 - protein, 9 aa, Artificial sequence
  Protein classification predicting sequence
RTDAGVHAL

SEQ ID NO: 64299 - protein, 10 aa, Artificial sequence
  Protein classification predicting sequence
GFLYNMVRII

SEQ ID NO: 64300 - protein, 12 aa, Artificial sequence
  Protein classification predicting sequence
FDARFSALRRHY

SEQ ID NO: 64301 - protein, 6 aa, Artificial sequence
  Protein classification predicting sequence
MHEAAQ

SEQ ID NO: 64302 - protein, 8 aa, Artificial sequence
  Protein classification predicting sequence
RTVQEEIE

SEQ ID NO: 64303 - protein, 6 aa, Artificial sequence
  Protein classification predicting sequence
QVAHFD

SEQ ID NO: 64304 - protein, 7 aa, Artificial sequence
  Protein classification predicting sequence
YLYKIWN

SEQ ID NO: 64305 - protein, 7 aa, Artificial sequence
  Protein classification predicting sequence
QVVHFDT

SEQ ID NO: 64306 - protein, 6 aa, Artificial sequence
  Protein classification predicting sequence
WVRGVN

SEQ ID NO: 64307 - protein, 11 aa, Artificial sequence
  Protein classification predicting sequence
ANAFLHHMVRN

SEQ ID NO: 64308 - protein, 8 aa, Artificial sequence
  Protein classification predicting sequence
RTVQGELE

SEQ ID NO: 64309 - protein, 8 aa, Artificial sequence
  Protein classification predicting sequence
ADVFRRNY

SEQ ID NO: 64310 - protein, 7 aa, Artificial sequence
  Protein classification predicting sequence
TAPAHGL

SEQ ID NO: 64311 - protein, 11 aa, Artificial sequence
  Protein classification predicting sequence
GQVIHFDTPLS

SEQ ID NO: 64312 - protein, 6 aa, Artificial sequence
  Protein classification predicting sequence
LEAKDR

SEQ ID NO: 64313 - protein, 8 aa, Artificial sequence
  Protein classification predicting sequence
KGWQRLGN

SEQ ID NO: 64314 - protein, 8 aa, Artificial sequence
  Protein classification predicting sequence
NTIQGKIE

SEQ ID NO: 64315 - protein, 10 aa, Artificial sequence
  Protein classification predicting sequence
KTYLYKIWNE

SEQ ID NO: 64316 - protein, 14 aa, Artificial sequence
  Protein classification predicting sequence
HDFTAFSNAKSKKK

SEQ ID NO: 64317 - protein, 6 aa, Artificial sequence
  Protein classification predicting sequence
CQAKSP

SEQ ID NO: 64318 - protein, 12 aa, Artificial sequence
  Protein classification predicting sequence
RTDAGVHALNQV

SEQ ID NO: 64319 - protein, 6 aa, Artificial sequence
  Protein classification predicting sequence
PDDFHA

SEQ ID NO: 64320 - protein, 7 aa, Artificial sequence
  Protein classification predicting sequence
TVAGRTD

SEQ ID NO: 64321 - protein, 7 aa, Artificial sequence
  Protein classification predicting sequence
AWTLGVN

SEQ ID NO: 64322 - protein, 6 aa, Artificial sequence
  Protein classification predicting sequence
HDFTTF

SEQ ID NO: 64323 - protein, 7 aa, Artificial sequence
  Protein classification predicting sequence
GQVAHVD

SEQ ID NO: 64324 - protein, 7 aa, Artificial sequence
  Protein classification predicting sequence
FDARFSA

SEQ ID NO: 64325 - protein, 6 aa, Artificial sequence
  Protein classification predicting sequence
QYLLGE

SEQ ID NO: 64326 - protein, 6 aa, Artificial sequence
  Protein classification predicting sequence
LAGRDR

SEQ ID NO: 64327 - protein, 6 aa, Artificial sequence
  Protein classification predicting sequence
ARSFLH

SEQ ID NO: 64328 - protein, 7 aa, Artificial sequence
  Protein classification predicting sequence
FHARFSA

SEQ ID NO: 64329 - protein, 8 aa, Artificial sequence
  Protein classification predicting sequence
GVHAAMQV

SEQ ID NO: 64330 - protein, 8 aa, Artificial sequence
  Protein classification predicting sequence
LLAARDRT

SEQ ID NO: 64331 - protein, 15 aa, Artificial sequence
  Protein classification predicting sequence
APPTFMPDGLYLTGV

SEQ ID NO: 64332 - protein, 7 aa, Artificial sequence
  Protein classification predicting sequence
IGCSRTD

SEQ ID NO: 64333 - protein, 7 aa, Artificial sequence
  Protein classification predicting sequence
RNYVYQY

SEQ ID NO: 64334 - protein, 7 aa, Artificial sequence
  Protein classification predicting sequence
RRHYVYR

SEQ ID NO: 64335 - protein, 6 aa, Artificial sequence
  Protein classification predicting sequence
FHARFS

SEQ ID NO: 64336 - protein, 6 aa, Artificial sequence
  Protein classification predicting sequence
LWAGRA

SEQ ID NO: 64337 - protein, 24 aa, Artificial sequence
  Protein classification predicting sequence
VFCAGRTDAGVHGTGQVVHFETTA

SEQ ID NO: 64338 - protein, 30 aa, Artificial sequence
  Protein classification predicting sequence
VPDDFHARFSATARRYRYIIYNHRLRPAVL

SEQ ID NO: 64339 - protein, 6 aa, Artificial sequence
  Protein classification predicting sequence
KSPVKT

SEQ ID NO: 64340 - protein, 8 aa, Artificial sequence
  Protein classification predicting sequence
TAPSYGLY

SEQ ID NO: 64341 - protein, 6 aa, Artificial sequence
  Protein classification predicting sequence
CAGRTD

SEQ ID NO: 64342 - protein, 7 aa, Artificial sequence
  Protein classification predicting sequence
RKDAAWT

SEQ ID NO: 64343 - protein, 5 aa, Artificial sequence
  Protein classification predicting sequence
AWTMG

SEQ ID NO: 64344 - protein, 7 aa, Artificial sequence
  Protein classification predicting sequence
GVNANLP

SEQ ID NO: 64345 - protein, 8 aa, Artificial sequence
  Protein classification predicting sequence
DFHARFSA

SEQ ID NO: 64346 - protein, 7 aa, Artificial sequence
  Protein classification predicting sequence
PLDVERM

SEQ ID NO: 64347 - protein, 13 aa, Artificial sequence
  Protein classification predicting sequence
QCLLGENDFTSFR

SEQ ID NO: 64348 - protein, 26 aa, Artificial sequence
  Protein classification predicting sequence
QCLLGENDFTSFRAVQCQSRTPWRNV

SEQ ID NO: 64349 - protein, 17 aa, Artificial sequence
  Protein classification predicting sequence
PESWIAELLAAKDRTLA

SEQ ID NO: 64350 - protein, 5 aa, Artificial sequence
  Protein classification predicting sequence
YIIYN

SEQ ID NO: 64351 - protein, 6 aa, Artificial sequence
  Protein classification predicting sequence
DFSSFR

SEQ ID NO: 64352 - protein, 11 aa, Artificial sequence
  Protein classification predicting sequence
DFSSFRSSQCQ

SEQ ID NO: 64353 - protein, 6 aa, Artificial sequence
  Protein classification predicting sequence
GYQIQP

SEQ ID NO: 64354 - protein, 7 aa, Artificial sequence
  Protein classification predicting sequence
GQVIHFD

SEQ ID NO: 64355 - protein, 8 aa, Artificial sequence
  Protein classification predicting sequence
GTHDFTSF

SEQ ID NO: 64356 - protein, 13 aa, Artificial sequence
  Protein classification predicting sequence
GTHDFTSFCSAKT

SEQ ID NO: 64357 - protein, 7 aa, Artificial sequence
  Protein classification predicting sequence
LLAAKDR

SEQ ID NO: 64358 - protein, 6 aa, Artificial sequence
  Protein classification predicting sequence
AEGLYL

SEQ ID NO: 64359 - protein, 6 aa, Artificial sequence
  Protein classification predicting sequence
ARHPVR

SEQ ID NO: 64360 - protein, 11 aa, Artificial sequence
  Protein classification predicting sequence
GVHGTGQVVHF

SEQ ID NO: 64361 - protein, 16 aa, Artificial sequence
  Protein classification predicting sequence
ANAFVHHMVRNIVGSL

SEQ ID NO: 64362 - protein, 20 aa, Artificial sequence
  Protein classification predicting sequence
ANAFVHHMVRNIVGSLLEVG

SEQ ID NO: 64363 - protein, 8 aa, Artificial sequence
  Protein classification predicting sequence
EWIKWLLE

SEQ ID NO: 64364 - protein, 6 aa, Artificial sequence
  Protein classification predicting sequence
PDGLYL

SEQ ID NO: 64365 - protein, 8 aa, Artificial sequence
  Protein classification predicting sequence
GVHATGQV

SEQ ID NO: 64366 - protein, 11 aa, Artificial sequence
  Protein classification predicting sequence
GNGFLYNMVRI

SEQ ID NO: 64367 - protein, 9 aa, Artificial sequence
  Protein classification predicting sequence
GFLYNMVRI

SEQ ID NO: 64368 - protein, 6 aa, Artificial sequence
  Protein classification predicting sequence
RYKATI

SEQ ID NO: 64369 - protein, 8 aa, Artificial sequence
  Protein classification predicting sequence
LRFGLDTQ

SEQ ID NO: 64370 - protein, 6 aa, Artificial sequence
  Protein classification predicting sequence
HDFTGF

SEQ ID NO: 64371 - protein, 6 aa, Artificial sequence
  Protein classification predicting sequence
QVIHFD

SEQ ID NO: 64372 - protein, 8 aa, Artificial sequence
  Protein classification predicting sequence
GTDFAGWA

SEQ ID NO: 64373 - protein, 9 aa, Artificial sequence
  Protein classification predicting sequence
VPDDFHARF

SEQ ID NO: 64374 - protein, 6 aa, Artificial sequence
  Protein classification predicting sequence
DIAVRW

SEQ ID NO: 64375 - protein, 7 aa, Artificial sequence
  Protein classification predicting sequence
LLGENDF

SEQ ID NO: 64376 - protein, 20 aa, Artificial sequence
  Protein classification predicting sequence
VDIKANAFVHHMVRNIVGSL

SEQ ID NO: 64377 - protein, 7 aa, Artificial sequence
  Protein classification predicting sequence
GSLMEVG

SEQ ID NO: 64378 - protein, 10 aa, Artificial sequence
  Protein classification predicting sequence
GLYLVQVTYP

SEQ ID NO: 64379 - protein, 7 aa, Artificial sequence
  Protein classification predicting sequence
GPLFLAD

SEQ ID NO: 64380 - protein, 7 aa, Artificial sequence
  Protein classification predicting sequence
RTDAGVH

SEQ ID NO: 64381 - protein, 12 aa, Artificial sequence
  Protein classification predicting sequence
ANAFVHHMVRNI

SEQ ID NO: 64382 - protein, 7 aa, Artificial sequence
  Protein classification predicting sequence
HHMVRNI

SEQ ID NO: 64383 - protein, 9 aa, Artificial sequence
  Protein classification predicting sequence
FLWEMVRRI

SEQ ID NO: 64384 - protein, 6 aa, Artificial sequence
  Protein classification predicting sequence
GATTIR

SEQ ID NO: 64385 - protein, 12 aa, Artificial sequence
  Protein classification predicting sequence
ADAFCWSMVRSL

SEQ ID NO: 64386 - protein, 7 aa, Artificial sequence
  Protein classification predicting sequence
PLDVEAM

SEQ ID NO: 64387 - protein, 6 aa, Artificial sequence
  Protein classification predicting sequence
HDFSAF

SEQ ID NO: 64388 - protein, 12 aa, Artificial sequence
  Protein classification predicting sequence
VEKKTEEFHARY

SEQ ID NO: 64389 - protein, 7 aa, Artificial sequence
  Protein classification predicting sequence
SKVRTLY

SEQ ID NO: 64390 - protein, 16 aa, Artificial sequence
  Protein classification predicting sequence
LGENDFTSFRAVQCQS

SEQ ID NO: 64391 - protein, 11 aa, Artificial sequence
  Protein classification predicting sequence
TPWRNVMHINV

SEQ ID NO: 64392 - protein, 15 aa, Artificial sequence
  Protein classification predicting sequence
DIKANAFVHHMVRNI

SEQ ID NO: 64393 - protein, 7 aa, Artificial sequence
  Protein classification predicting sequence
GVNAHLP

SEQ ID NO: 64394 - protein, 9 aa, Artificial sequence
  Protein classification predicting sequence
LDEKKMHEA

SEQ ID NO: 64395 - protein, 7 aa, Artificial sequence
  Protein classification predicting sequence
VDYPEEF

SEQ ID NO: 64396 - protein, 9 aa, Artificial sequence
  Protein classification predicting sequence
GRTDAGVHA

SEQ ID NO: 64397 - protein, 11 aa, Artificial sequence
  Protein classification predicting sequence
DFTSFRAVQCQ

SEQ ID NO: 64398 - protein, 8 aa, Artificial sequence
  Protein classification predicting sequence
DFHPRFWA

SEQ ID NO: 64399 - protein, 13 aa, Artificial sequence
  Protein classification predicting sequence
RIALGIQYDGAAF

SEQ ID NO: 64400 - protein, 17 aa, Artificial sequence
  Protein classification predicting sequence
FSWVRGTNAFLPPTVAV

SEQ ID NO: 64401 - protein, 7 aa, Artificial sequence
  Protein classification predicting sequence
RTYYYAL

SEQ ID NO: 64402 - protein, 7 aa, Artificial sequence
  Protein classification predicting sequence
RHYLYRI

SEQ ID NO: 64403 - protein, 6 aa, Artificial sequence
  Protein classification predicting sequence
APPDGL

SEQ ID NO: 64404 - protein, 6 aa, Artificial sequence
  Protein classification predicting sequence
AGPTAP

SEQ ID NO: 64405 - protein, 18 aa, Artificial sequence
  Protein classification predicting sequence
EVGAHNQPESWIAELLAA

SEQ ID NO: 64406 - protein, 43 aa, Artificial sequence
  Protein classification predicting sequence
VYKIALGIEYDGSKYYGWQRQNEVRSVQEKLEKALSQVANEPI

SEQ ID NO: 64407 - protein, 24 aa, Artificial sequence
  Protein classification predicting sequence
DRTLAAATAKAEGLYLVAVDYPDR

SEQ ID NO: 64408 - protein, 24 aa, Artificial sequence
  Protein classification predicting sequence
RKDAAWTLGVNANLPGDIAVRWVK

SEQ ID NO: 64409 - protein, 8 aa, Artificial sequence
  Protein classification predicting sequence
GVHGLGQV

SEQ ID NO: 64410 - protein, 6 aa, Artificial sequence
  Protein classification predicting sequence
HARFSA

SEQ ID NO: 64411 - protein, 28 aa, Artificial sequence
  Protein classification predicting sequence
HKRHVRIHPSSRTDRGVHAIQQYFHFDT

SEQ ID NO: 64412 - protein, 51 aa, Artificial sequence
  Protein classification predicting sequence
LNIPMSQWQYAMNRTLPDDIYVNNVVTVDDDFHCRYDCVGKRYRYKVYQAQ

SEQ ID NO: 64413 - protein, 14 aa, Artificial sequence
  Protein classification predicting sequence
RDPFQSGLKTFIPE

SEQ ID NO: 64414 - protein, 8 aa, Artificial sequence
  Protein classification predicting sequence
FLGFQIQQ

SEQ ID NO: 64415 - protein, 10 aa, Artificial sequence
  Protein classification predicting sequence
GRTVQQQFEK

SEQ ID NO: 64416 - protein, 16 aa, Artificial sequence
  Protein classification predicting sequence
HVRIHPSSRTDRGVHA

SEQ ID NO: 64417 - protein, 9 aa, Artificial sequence
  Protein classification predicting sequence
FHFDTELNI

SEQ ID NO: 64418 - protein, 8 aa, Artificial sequence
  Protein classification predicting sequence
QWQYAMNR

SEQ ID NO: 64419 - protein, 18 aa, Artificial sequence
  Protein classification predicting sequence
FHCRYDCVGKRYRYKVYQ

SEQ ID NO: 64420 - protein, 7 aa, Artificial sequence
  Protein classification predicting sequence
DVPKLLE

SEQ ID NO: 64421 - protein, 30 aa, Artificial sequence
  Protein classification predicting sequence
FIGTHDFTGFCSQKTEVESKVRTLYQSEIV

SEQ ID NO: 64422 - protein, 24 aa, Artificial sequence
  Protein classification predicting sequence
VTGSGFLYNMVRVLVAFLIEVGKG

SEQ ID NO: 64423 - protein, 10 aa, Artificial sequence
  Protein classification predicting sequence
RYKAIISYDG

SEQ ID NO: 64424 - protein, 8 aa, Artificial sequence
  Protein classification predicting sequence
KTYEFLVD

SEQ ID NO: 64425 - protein, 8 aa, Artificial sequence
  Protein classification predicting sequence
GTHDFTGF

SEQ ID NO: 64426 - protein, 20 aa, Artificial sequence
  Protein classification predicting sequence
GFLYKQVRNMVGTLLKIGNG

SEQ ID NO: 64427 - protein, 8 aa, Artificial sequence
  Protein classification predicting sequence
NGLYLKEI

SEQ ID NO: 64428 - protein, 10 aa, Artificial sequence
  Protein classification predicting sequence
RYKATISYDG

SEQ ID NO: 64429 - protein, 10 aa, Artificial sequence
  Protein classification predicting sequence
EKLRFALDTQ

SEQ ID NO: 64430 - protein, 7 aa, Artificial sequence
  Protein classification predicting sequence
DDFHCRY

SEQ ID NO: 64431 - protein, 16 aa, Artificial sequence
  Protein classification predicting sequence
GTHDFTGFTASGTSVE

SEQ ID NO: 64432 - protein, 12 aa, Artificial sequence
  Protein classification predicting sequence
RNMVGTLLKIGN

SEQ ID NO: 64433 - protein, 7 aa, Artificial sequence
  Protein classification predicting sequence
FSGFQRQ

SEQ ID NO: 64434 - protein, 8 aa, Artificial sequence
  Protein classification predicting sequence
QEEIEKTL

SEQ ID NO: 64435 - protein, 12 aa, Artificial sequence
  Protein classification predicting sequence
HGAGRTDAGVHA

SEQ ID NO: 64436 - protein, 6 aa, Artificial sequence
  Protein classification predicting sequence
APGHGL

SEQ ID NO: 64437 - protein, 10 aa, Artificial sequence
  Protein classification predicting sequence
AGRTDAGVHA

SEQ ID NO: 64438 - protein, 7 aa, Artificial sequence
  Protein classification predicting sequence
FIGTHDF

SEQ ID NO: 64439 - protein, 28 aa, Artificial sequence
  Protein classification predicting sequence
ANHPVEVQCAGRTDAGVHGTGQVVHFDT

SEQ ID NO: 64440 - protein, 14 aa, Artificial sequence
  Protein classification predicting sequence
FHARFSATARRYRY

SEQ ID NO: 64441 - protein, 10 aa, Artificial sequence
  Protein classification predicting sequence
SVQEELEKAL

SEQ ID NO: 64442 - protein, 22 aa, Artificial sequence
  Protein classification predicting sequence
VIDIKANAFVHHMVRNITGSLI

SEQ ID NO: 64443 - protein, 7 aa, Artificial sequence
  Protein classification predicting sequence
IALGIEY

SEQ ID NO: 64444 - protein, 16 aa, Artificial sequence
  Protein classification predicting sequence
FHARFSATARRYRYII

SEQ ID NO: 64445 - protein, 11 aa, Artificial sequence
  Protein classification predicting sequence
SVQEKLEKALS

SEQ ID NO: 64446 - protein, 6 aa, Artificial sequence
  Protein classification predicting sequence
LLGKHD

SEQ ID NO: 64447 - protein, 6 aa, Artificial sequence
  Protein classification predicting sequence
APPYGL

SEQ ID NO: 64448 - protein, 5 aa, Artificial sequence
  Protein classification predicting sequence
IAVRW

SEQ ID NO: 64449 - protein, 14 aa, Artificial sequence
  Protein classification predicting sequence
MRYALGVEYDGSEF

SEQ ID NO: 64450 - protein, 12 aa, Artificial sequence
  Protein classification predicting sequence
ARRYRYRLLNRQ

SEQ ID NO: 64451 - protein, 9 aa, Artificial sequence
  Protein classification predicting sequence
QCQALHARR

SEQ ID NO: 64452 - protein, 11 aa, Artificial sequence
  Protein classification predicting sequence
HHMVRNIVGSL

SEQ ID NO: 64453 - protein, 8 aa, Artificial sequence
  Protein classification predicting sequence
LLAGRDRT

SEQ ID NO: 64454 - protein, 7 aa, Artificial sequence
  Protein classification predicting sequence
QVRSMVG

SEQ ID NO: 64455 - protein, 12 aa, Artificial sequence
  Protein classification predicting sequence
YSSIASEFGVRG

SEQ ID NO: 64456 - protein, 8 aa, Artificial sequence
  Protein classification predicting sequence
PAVLVFKD

SEQ ID NO: 64457 - protein, 16 aa, Artificial sequence
  Protein classification predicting sequence
TYFVYDEYEDGDLSSW

SEQ ID NO: 64458 - protein, 12 aa, Artificial sequence
  Protein classification predicting sequence
LYELGDTGKLVA

SEQ ID NO: 64459 - protein, 17 aa, Artificial sequence
  Protein classification predicting sequence
FHRDFQFGHMDGNDYIN

SEQ ID NO: 64460 - protein, 12 aa, Artificial sequence
  Protein classification predicting sequence
VVLNTSNQQYFL

SEQ ID NO: 64461 - protein, 19 aa, Artificial sequence
  Protein classification predicting sequence
GCFLFGLPLGVISIMCYGI

SEQ ID NO: 64462 - protein, 7 aa, Artificial sequence
  Protein classification predicting sequence
TGKETSD

SEQ ID NO: 64463 - protein, 7 aa, Artificial sequence
  Protein classification predicting sequence
GAIRNNN

SEQ ID NO: 64464 - protein, 7 aa, Artificial sequence
  Protein classification predicting sequence
TMIGNFQ

SEQ ID NO: 64465 - protein, 8 aa, Artificial sequence
  Protein classification predicting sequence
QFGSGWWF

SEQ ID NO: 64466 - protein, 6 aa, Artificial sequence
  Protein classification predicting sequence
DQKDGM

SEQ ID NO: 64467 - protein, 7 aa, Artificial sequence
  Protein classification predicting sequence
RHEYFRR

SEQ ID NO: 64468 - protein, 6 aa, Artificial sequence
  Protein classification predicting sequence
LCNLLG

SEQ ID NO: 64469 - protein, 7 aa, Artificial sequence
  Protein classification predicting sequence
AWAKTVP

SEQ ID NO: 64470 - protein, 7 aa, Artificial sequence
  Protein classification predicting sequence
GKVQFGS

SEQ ID NO: 64471 - protein, 12 aa, Artificial sequence
  Protein classification predicting sequence
GMLTDSRSFLSY

SEQ ID NO: 64472 - protein, 15 aa, Artificial sequence
  Protein classification predicting sequence
GMLTDSRSFLSYPRH

SEQ ID NO: 64473 - protein, 6 aa, Artificial sequence
  Protein classification predicting sequence
DSLEYH

SEQ ID NO: 64474 - protein, 6 aa, Artificial sequence
  Protein classification predicting sequence
LGPDTG

SEQ ID NO: 64475 - protein, 6 aa, Artificial sequence
  Protein classification predicting sequence
LNPRDN

SEQ ID NO: 64476 - protein, 5 aa, Artificial sequence
  Protein classification predicting sequence
DYHCH

SEQ ID NO: 64477 - protein, 10 aa, Artificial sequence
  Protein classification predicting sequence
TNELPKTILY

SEQ ID NO: 64478 - protein, 11 aa, Artificial sequence
  Protein classification predicting sequence
FVGMLTDSRSF

SEQ ID NO: 64479 - protein, 6 aa, Artificial sequence
  Protein classification predicting sequence
LYHEHA

SEQ ID NO: 64480 - protein, 7 aa, Artificial sequence
  Protein classification predicting sequence
GDHYKWR

SEQ ID NO: 64481 - protein, 10 aa, Artificial sequence
  Protein classification predicting sequence
GDHYKWRAMR

SEQ ID NO: 64482 - protein, 14 aa, Artificial sequence
  Protein classification predicting sequence
GDHYKWRAMRTNGV

SEQ ID NO: 64483 - protein, 10 aa, Artificial sequence
  Protein classification predicting sequence
FRAQMLTEMA

SEQ ID NO: 64484 - protein, 6 aa, Artificial sequence
  Protein classification predicting sequence
WLNHVF

SEQ ID NO: 64485 - protein, 12 aa, Artificial sequence
  Protein classification predicting sequence
GATSSDHGHPTA

SEQ ID NO: 64486 - protein, 7 aa, Artificial sequence
  Protein classification predicting sequence
AELFRAQ

SEQ ID NO: 64487 - protein, 12 aa, Artificial sequence
  Protein classification predicting sequence
GRDKGADIPMRT

SEQ ID NO: 64488 - protein, 35 aa, Artificial sequence
  Protein classification predicting sequence
AGFYNTVGFNDDTRAFLSIPARHDVARRVDSAFLA

SEQ ID NO: 64489 - protein, 7 aa, Artificial sequence
  Protein classification predicting sequence
FNVKVLP

SEQ ID NO: 64490 - protein, 5 aa, Artificial sequence
  Protein classification predicting sequence
NNTRM

SEQ ID NO: 64491 - protein, 9 aa, Artificial sequence
  Protein classification predicting sequence
LGPDTGFDS

SEQ ID NO: 64492 - protein, 8 aa, Artificial sequence
  Protein classification predicting sequence
ENGEVPND

SEQ ID NO: 64493 - protein, 6 aa, Artificial sequence
  Protein classification predicting sequence
DYHCHL

SEQ ID NO: 64494 - protein, 9 aa, Artificial sequence
  Protein classification predicting sequence
DHYKWRAMR

SEQ ID NO: 64495 - protein, 8 aa, Artificial sequence
  Protein classification predicting sequence
GTTDDPID

SEQ ID NO: 64496 - protein, 8 aa, Artificial sequence
  Protein classification predicting sequence
RNNNTRMF

SEQ ID NO: 64497 - protein, 8 aa, Artificial sequence
  Protein classification predicting sequence
TMIGNFQG

SEQ ID NO: 64498 - protein, 15 aa, Artificial sequence
  Protein classification predicting sequence
QFGSGWWFNDQKDGM

SEQ ID NO: 64499 - protein, 6 aa, Artificial sequence
  Protein classification predicting sequence
SQFVGM

SEQ ID NO: 64500 - protein, 20 aa, Artificial sequence
  Protein classification predicting sequence
TDSRSFLSYTRHEYFRRILC

SEQ ID NO: 64501 - protein, 6 aa, Artificial sequence
  Protein classification predicting sequence
DDGLVM

SEQ ID NO: 64502 - protein, 6 aa, Artificial sequence
  Protein classification predicting sequence
SIPARH

SEQ ID NO: 64503 - protein, 15 aa, Artificial sequence
  Protein classification predicting sequence
EDFLLDTEFARRLYH

SEQ ID NO: 64504 - protein, 6 aa, Artificial sequence
  Protein classification predicting sequence
ARRLYH

SEQ ID NO: 64505 - protein, 13 aa, Artificial sequence
  Protein classification predicting sequence
DQPIFDYHCHLPP

SEQ ID NO: 64506 - protein, 26 aa, Artificial sequence
  Protein classification predicting sequence
YRFKNLYDIWLKGDHYKWRAMRTNGV

SEQ ID NO: 64507 - protein, 27 aa, Artificial sequence
  Protein classification predicting sequence
AWAATVPHTIGNPLYHWTHLELRRPFG

SEQ ID NO: 64508 - protein, 16 aa, Artificial sequence
  Protein classification predicting sequence
IKVLPSWRPDKAFNIE

SEQ ID NO: 64509 - protein, 21 aa, Artificial sequence
  Protein classification predicting sequence
ATFNDYMAKLGEVSDTDIRRF

SEQ ID NO: 64510 - protein, 33 aa, Artificial sequence
  Protein classification predicting sequence
DLQTALTKRLDHFAAHGCKVSDHALDVVMFAEA

SEQ ID NO: 64511 - protein, 21 aa, Artificial sequence
  Protein classification predicting sequence
ILARRLAGETLSEHEVAQFKT

SEQ ID NO: 64512 - protein, 43 aa, Artificial sequence
  Protein classification predicting sequence
LGAEYARRGWVQQYHIGALRNNNLRQFKLLGPDVGFDSINDRP

SEQ ID NO: 64513 - protein, 9 aa, Artificial sequence
  Protein classification predicting sequence
LLGEMVKNI

SEQ ID NO: 64514 - protein, 6 aa, Artificial sequence
  Protein classification predicting sequence
PKTILY

SEQ ID NO: 64515 - protein, 7 aa, Artificial sequence
  Protein classification predicting sequence
FSARGIM

SEQ ID NO: 64516 - protein, 7 aa, Artificial sequence
  Protein classification predicting sequence
PSWRPDK

SEQ ID NO: 64517 - protein, 25 aa, Artificial sequence
  Protein classification predicting sequence
FVGMLTDSRSFLSYTRHEYFRRILC

SEQ ID NO: 64518 - protein, 6 aa, Artificial sequence
  Protein classification predicting sequence
MIGRWV

SEQ ID NO: 64519 - protein, 7 aa, Artificial sequence
  Protein classification predicting sequence
MVKNICF

SEQ ID NO: 64520 - protein, 6 aa, Artificial sequence
  Protein classification predicting sequence
DGLVMQ

SEQ ID NO: 64521 - protein, 7 aa, Artificial sequence
  Protein classification predicting sequence
DKGADIP

SEQ ID NO: 64522 - protein, 8 aa, Artificial sequence
  Protein classification predicting sequence
APLAGHYP

SEQ ID NO: 64523 - protein, 7 aa, Artificial sequence
  Protein classification predicting sequence
TTDDPID

SEQ ID NO: 64524 - protein, 5 aa, Artificial sequence
  Protein classification predicting sequence
GWVMQ

SEQ ID NO: 64525 - protein, 7 aa, Artificial sequence
  Protein classification predicting sequence
LPKTILY

SEQ ID NO: 64526 - protein, 20 aa, Artificial sequence
  Protein classification predicting sequence
RRFDNLGQIWLEGDHYKWRA

SEQ ID NO: 64527 - protein, 8 aa, Artificial sequence
  Protein classification predicting sequence
DESLITGK

SEQ ID NO: 64528 - protein, 18 aa, Artificial sequence
  Protein classification predicting sequence
GNPLYHWTHLELRRPFGI

SEQ ID NO: 64529 - protein, 7 aa, Artificial sequence
  Protein classification predicting sequence
IWHQCNE

SEQ ID NO: 64530 - protein, 23 aa, Artificial sequence
  Protein classification predicting sequence
PAFSARGIMQQMNVRMVGTTDDP

SEQ ID NO: 64531 - protein, 8 aa, Artificial sequence
  Protein classification predicting sequence
MVGTTDDP

SEQ ID NO: 64532 - protein, 8 aa, Artificial sequence
  Protein classification predicting sequence
LSELEIAQ

SEQ ID NO: 64533 - protein, 16 aa, Artificial sequence
  Protein classification predicting sequence
LVWLGRQYAARGWVMQ

SEQ ID NO: 64534 - protein, 7 aa, Artificial sequence
  Protein classification predicting sequence
RMFRLLG

SEQ ID NO: 64535 - protein, 11 aa, Artificial sequence
  Protein classification predicting sequence
LSRLLDSMDVT

SEQ ID NO: 64536 - protein, 16 aa, Artificial sequence
  Protein classification predicting sequence
LPKTILYCLNPRDNEV

SEQ ID NO: 64537 - protein, 21 aa, Artificial sequence
  Protein classification predicting sequence
GIAGKVQFGSGWWFNDQKDGM

SEQ ID NO: 64538 - protein, 30 aa, Artificial sequence
  Protein classification predicting sequence
GIAGKVQFGSGWWFNDQKDGMLRQLEQLSQ

SEQ ID NO: 64539 - protein, 9 aa, Artificial sequence
  Protein classification predicting sequence
LPIISPHGH

SEQ ID NO: 64540 - protein, 7 aa, Artificial sequence
  Protein classification predicting sequence
GYLDAHR

SEQ ID NO: 64541 - protein, 9 aa, Artificial sequence
  Protein classification predicting sequence
AHRQRRAFF

SEQ ID NO: 64542 - protein, 8 aa, Artificial sequence
  Protein classification predicting sequence
RELAPLAG

SEQ ID NO: 64543 - protein, 10 aa, Artificial sequence
  Protein classification predicting sequence
VPDHYVFRML

SEQ ID NO: 64544 - protein, 8 aa, Artificial sequence
  Protein classification predicting sequence
ERFNIEVI

SEQ ID NO: 64545 - protein, 9 aa, Artificial sequence
  Protein classification predicting sequence
GATSTDHGH

SEQ ID NO: 64546 - protein, 8 aa, Artificial sequence
  Protein classification predicting sequence
FTLDETSY

SEQ ID NO: 64547 - protein, 8 aa, Artificial sequence
  Protein classification predicting sequence
FMTEDFLL

SEQ ID NO: 64548 - protein, 6 aa, Artificial sequence
  Protein classification predicting sequence
ICFNNA

SEQ ID NO: 64549 - protein, 10 aa, Artificial sequence
  Protein classification predicting sequence
QPIFDYHCHL

SEQ ID NO: 64550 - protein, 7 aa, Artificial sequence
  Protein classification predicting sequence
YFRRILC

SEQ ID NO: 64551 - protein, 6 aa, Artificial sequence
  Protein classification predicting sequence
QLHIGA

SEQ ID NO: 64552 - protein, 5 aa, Artificial sequence
  Protein classification predicting sequence
WWFND

SEQ ID NO: 64553 - protein, 6 aa, Artificial sequence
  Protein classification predicting sequence
HCHLSP

SEQ ID NO: 64554 - protein, 6 aa, Artificial sequence
  Protein classification predicting sequence
GKMQFG

SEQ ID NO: 64555 - protein, 9 aa, Artificial sequence
  Protein classification predicting sequence
TDSRSFLSY

SEQ ID NO: 64556 - protein, 17 aa, Artificial sequence
  Protein classification predicting sequence
FDNLGQIWLEGDHYKWR

SEQ ID NO: 64557 - protein, 10 aa, Artificial sequence
  Protein classification predicting sequence
ARGIMQQMNV

SEQ ID NO: 64558 - protein, 13 aa, Artificial sequence
  Protein classification predicting sequence
GTTDDPIDSLEHH

SEQ ID NO: 64559 - protein, 12 aa, Artificial sequence
  Protein classification predicting sequence
KVLPSWRPDKAF

SEQ ID NO: 64560 - protein, 12 aa, Artificial sequence
  Protein classification predicting sequence
TILYCLNPRDNE

SEQ ID NO: 64561 - protein, 8 aa, Artificial sequence
  Protein classification predicting sequence
DRLLPADP

SEQ ID NO: 64562 - protein, 7 aa, Artificial sequence
  Protein classification predicting sequence
NELLAQD

SEQ ID NO: 64563 - protein, 18 aa, Artificial sequence
  Protein classification predicting sequence
DHFAAHGCKVSDHALDVV

SEQ ID NO: 64564 - protein, 8 aa, Artificial sequence
  Protein classification predicting sequence
ILARRLAG

SEQ ID NO: 64565 - protein, 8 aa, Artificial sequence
  Protein classification predicting sequence
AQFKTAVL

SEQ ID NO: 64566 - protein, 14 aa, Artificial sequence
  Protein classification predicting sequence
WVQQYHIGALRNNN

SEQ ID NO: 64567 - protein, 33 aa, Artificial sequence
  Protein classification predicting sequence
TEDFLLDTEFARRLYHDYAKDQPIFDYHCHLPP

SEQ ID NO: 64568 - protein, 15 aa, Artificial sequence
  Protein classification predicting sequence
KKMILVTGHRRESFG

SEQ ID NO: 64569 - protein, 15 aa, Artificial sequence
  Protein classification predicting sequence
VCVTAQHREMLDQVL

SEQ ID NO: 64570 - protein, 26 aa, Artificial sequence
  Protein classification predicting sequence
RIPVGHVEAGLRTGDLYSPWPEEANR

SEQ ID NO: 64571 - protein, 7 aa, Artificial sequence
  Protein classification predicting sequence
LGGENYV

SEQ ID NO: 64572 - protein, 9 aa, Artificial sequence
  Protein classification predicting sequence
NIEANHATL

SEQ ID NO: 64573 - protein, 28 aa, Artificial sequence
  Protein classification predicting sequence
GNFLIEPKPMEPMKHQYDFDSATVIGFL

SEQ ID NO: 64574 - protein, 8 aa, Artificial sequence
  Protein classification predicting sequence
LADLAKYA

SEQ ID NO: 64575 - protein, 7 aa, Artificial sequence
  Protein classification predicting sequence
TFHDDDL

SEQ ID NO: 64576 - protein, 6 aa, Artificial sequence
  Protein classification predicting sequence
WGGREG

SEQ ID NO: 64577 - protein, 7 aa, Artificial sequence
  Protein classification predicting sequence
AATVKTC

SEQ ID NO: 64578 - protein, 6 aa, Artificial sequence
  Protein classification predicting sequence
LIEPKP

SEQ ID NO: 64579 - protein, 23 aa, Artificial sequence
  Protein classification predicting sequence
EVKVNIEQGHAILAGHSFEHELA

SEQ ID NO: 64580 - protein, 6 aa, Artificial sequence
  Protein classification predicting sequence
LAGHSF

SEQ ID NO: 64581 - protein, 18 aa, Artificial sequence
  Protein classification predicting sequence
FAIEPKPNEPRGDILLPT

SEQ ID NO: 64582 - protein, 9 aa, Artificial sequence
  Protein classification predicting sequence
RTEDFDGVW

SEQ ID NO: 64583 - protein, 15 aa, Artificial sequence
  Protein classification predicting sequence
LIEPKPQEPTKHQYD

SEQ ID NO: 64584 - protein, 6 aa, Artificial sequence
  Protein classification predicting sequence
NLFSHP

SEQ ID NO: 64585 - protein, 11 aa, Artificial sequence
  Protein classification predicting sequence
EPKPNEPRGDI

SEQ ID NO: 64586 - protein, 6 aa, Artificial sequence
  Protein classification predicting sequence
LPTVGH

SEQ ID NO: 64587 - protein, 10 aa, Artificial sequence
  Protein classification predicting sequence
GHEQMAGLNF

SEQ ID NO: 64588 - protein, 9 aa, Artificial sequence
  Protein classification predicting sequence
HGIAQALWA

SEQ ID NO: 64589 - protein, 9 aa, Artificial sequence
  Protein classification predicting sequence
LGSVDANQG

SEQ ID NO: 64590 - protein, 11 aa, Artificial sequence
  Protein classification predicting sequence
GGLNFDAKVRR

SEQ ID NO: 64591 - protein, 6 aa, Artificial sequence
  Protein classification predicting sequence
CFHDVD

SEQ ID NO: 64592 - protein, 6 aa, Artificial sequence
  Protein classification predicting sequence
HGAATS

SEQ ID NO: 64593 - protein, 13 aa, Artificial sequence
  Protein classification predicting sequence
WGGREGYETLLNT

SEQ ID NO: 64594 - protein, 7 aa, Artificial sequence
  Protein classification predicting sequence
LLGWDTD

SEQ ID NO: 64595 - protein, 8 aa, Artificial sequence
  Protein classification predicting sequence
NFDAKVRR

SEQ ID NO: 64596 - protein, 7 aa, Artificial sequence
  Protein classification predicting sequence
FTADGTD

SEQ ID NO: 64597 - protein, 8 aa, Artificial sequence
  Protein classification predicting sequence
YAAAQVKK

SEQ ID NO: 64598 - protein, 12 aa, Artificial sequence
  Protein classification predicting sequence
EANHATLAGHTF

SEQ ID NO: 64599 - protein, 9 aa, Artificial sequence
  Protein classification predicting sequence
TTLAMYEIL

SEQ ID NO: 64600 - protein, 8 aa, Artificial sequence
  Protein classification predicting sequence
SFEPEDLF

SEQ ID NO: 64601 - protein, 6 aa, Artificial sequence
  Protein classification predicting sequence
TMQRPW

SEQ ID NO: 64602 - protein, 6 aa, Artificial sequence
  Protein classification predicting sequence
YYCFHD

SEQ ID NO: 64603 - protein, 6 aa, Artificial sequence
  Protein classification predicting sequence
KQAETG

SEQ ID NO: 64604 - protein, 8 aa, Artificial sequence
  Protein classification predicting sequence
VVARAAVQ

SEQ ID NO: 64605 - protein, 7 aa, Artificial sequence
  Protein classification predicting sequence
FLIEPKP

SEQ ID NO: 64606 - protein, 8 aa, Artificial sequence
  Protein classification predicting sequence
EPTKHQYD

SEQ ID NO: 64607 - protein, 8 aa, Artificial sequence
  Protein classification predicting sequence
NHATLAGH

SEQ ID NO: 64608 - protein, 8 aa, Artificial sequence
  Protein classification predicting sequence
GWDTDQFP

SEQ ID NO: 64609 - protein, 9 aa, Artificial sequence
  Protein classification predicting sequence
TGGTNFDAK

SEQ ID NO: 64610 - protein, 6 aa, Artificial sequence
  Protein classification predicting sequence
HQYDFD

SEQ ID NO: 64611 - protein, 8 aa, Artificial sequence
  Protein classification predicting sequence
GGLNFDAK

SEQ ID NO: 64612 - protein, 7 aa, Artificial sequence
  Protein classification predicting sequence
KADVAFE

SEQ ID NO: 64613 - protein, 19 aa, Artificial sequence
  Protein classification predicting sequence
NYVLWGGREGYETLLNTDL

SEQ ID NO: 64614 - protein, 9 aa, Artificial sequence
  Protein classification predicting sequence
LAGHSFHHE

SEQ ID NO: 64615 - protein, 10 aa, Artificial sequence
  Protein classification predicting sequence
HLRFAVAYWH

SEQ ID NO: 64616 - protein, 10 aa, Artificial sequence
  Protein classification predicting sequence
NIEANHATLA

SEQ ID NO: 64617 - protein, 12 aa, Artificial sequence
  Protein classification predicting sequence
ENYVFWGGREGY

SEQ ID NO: 64618 - protein, 11 aa, Artificial sequence
  Protein classification predicting sequence
QFLIEPKPKEP

SEQ ID NO: 64619 - protein, 9 aa, Artificial sequence
  Protein classification predicting sequence
HIAGMDTFA

SEQ ID NO: 64620 - protein, 5 aa, Artificial sequence
  Protein classification predicting sequence
FHDRD

SEQ ID NO: 64621 - protein, 7 aa, Artificial sequence
  Protein classification predicting sequence
WGGREGY

SEQ ID NO: 64622 - protein, 5 aa, Artificial sequence
  Protein classification predicting sequence
IEPKP

SEQ ID NO: 64623 - protein, 10 aa, Artificial sequence
  Protein classification predicting sequence
GVKLLWGTAN

SEQ ID NO: 64624 - protein, 17 aa, Artificial sequence
  Protein classification predicting sequence
GVKLLWGTANCFTNPRY

SEQ ID NO: 64625 - protein, 6 aa, Artificial sequence
  Protein classification predicting sequence
GAATNP

SEQ ID NO: 64626 - protein, 20 aa, Artificial sequence
  Protein classification predicting sequence
GTLLIEPKPQEPTKHQYDYD

SEQ ID NO: 64627 - protein, 12 aa, Artificial sequence
  Protein classification predicting sequence
NIEANHATLAGH

SEQ ID NO: 64628 - protein, 16 aa, Artificial sequence
  Protein classification predicting sequence
QLGWDTDQFPNSVEEN

SEQ ID NO: 64629 - protein, 7 aa, Artificial sequence
  Protein classification predicting sequence
GGFTTGG

SEQ ID NO: 64630 - protein, 6 aa, Artificial sequence
  Protein classification predicting sequence
LENLVN

SEQ ID NO: 64631 - protein, 7 aa, Artificial sequence
  Protein classification predicting sequence
GWDTDEF

SEQ ID NO: 64632 - protein, 7 aa, Artificial sequence
  Protein classification predicting sequence
RPWQQPG

SEQ ID NO: 64633 - protein, 8 aa, Artificial sequence
  Protein classification predicting sequence
VPYYCFHD

SEQ ID NO: 64634 - protein, 5 aa, Artificial sequence
  Protein classification predicting sequence
YCFHD

SEQ ID NO: 64635 - protein, 16 aa, Artificial sequence
  Protein classification predicting sequence
TVYGFLKQFGLEKEIK

SEQ ID NO: 64636 - protein, 53 aa, Artificial sequence
  Protein classification predicting sequence
TVYGFLKQFGLEKEIKLNIEANHATLAGHSFHHEIATAIALGLFGSVDANRGD

SEQ ID NO: 64637 - protein, 6 aa, Artificial sequence
  Protein classification predicting sequence
DANRGD

SEQ ID NO: 64638 - protein, 11 aa, Artificial sequence
  Protein classification predicting sequence
QLGWDTDQFPN

SEQ ID NO: 64639 - protein, 9 aa, Artificial sequence
  Protein classification predicting sequence
GWDTDQFPN

SEQ ID NO: 64640 - protein, 38 aa, Artificial sequence
  Protein classification predicting sequence
KAGGFTTGGLNFDAKVRRQSTDKYDLFYGHIGAMDTMA

SEQ ID NO: 64641 - protein, 7 aa, Artificial sequence
  Protein classification predicting sequence
ELGQQIL

SEQ ID NO: 64642 - protein, 9 aa, Artificial sequence
  Protein classification predicting sequence
PEDLFLGHI

SEQ ID NO: 64643 - protein, 8 aa, Artificial sequence
  Protein classification predicting sequence
GHTFEHEL

SEQ ID NO: 64644 - protein, 7 aa, Artificial sequence
  Protein classification predicting sequence
DLFYGHI

SEQ ID NO: 64645 - protein, 5 aa, Artificial sequence
  Protein classification predicting sequence
VAYWH

SEQ ID NO: 64646 - protein, 9 aa, Artificial sequence
  Protein classification predicting sequence
SKTKLLWNT

SEQ ID NO: 64647 - protein, 6 aa, Artificial sequence
  Protein classification predicting sequence
KLLWNT

SEQ ID NO: 64648 - protein, 10 aa, Artificial sequence
  Protein classification predicting sequence
LLGWDTDEFP

SEQ ID NO: 64649 - protein, 7 aa, Artificial sequence
  Protein classification predicting sequence
GASTNPD

SEQ ID NO: 64650 - protein, 8 aa, Artificial sequence
  Protein classification predicting sequence
WGGREGYE

SEQ ID NO: 64651 - protein, 12 aa, Artificial sequence
  Protein classification predicting sequence
LLNTDLRQEREQ

SEQ ID NO: 64652 - protein, 23 aa, Artificial sequence
  Protein classification predicting sequence
GFQGTLLIEPKPQEPTKHQYDYD

SEQ ID NO: 64653 - protein, 12 aa, Artificial sequence
  Protein classification predicting sequence
AQRYSGWNSELG

SEQ ID NO: 64654 - protein, 6 aa, Artificial sequence
  Protein classification predicting sequence
DIAPEG

SEQ ID NO: 64655 - protein, 23 aa, Artificial sequence
  Protein classification predicting sequence
LGGENYVLWGGREGYETLLNTDL

SEQ ID NO: 64656 - protein, 17 aa, Artificial sequence
  Protein classification predicting sequence
LIEPKPQEPTKHQYDYD

SEQ ID NO: 64657 - protein, 6 aa, Artificial sequence
  Protein classification predicting sequence
RYAGWN

SEQ ID NO: 64658 - protein, 8 aa, Artificial sequence
  Protein classification predicting sequence
GADMFGVG

SEQ ID NO: 64659 - protein, 8 aa, Artificial sequence
  Protein classification predicting sequence
NNFAQMVD

SEQ ID NO: 64660 - protein, 8 aa, Artificial sequence
  Protein classification predicting sequence
KLLWGTAN

SEQ ID NO: 64661 - protein, 7 aa, Artificial sequence
  Protein classification predicting sequence
NPDPEVF

SEQ ID NO: 64662 - protein, 9 aa, Artificial sequence
  Protein classification predicting sequence
EREQLGRFM

SEQ ID NO: 64663 - protein, 13 aa, Artificial sequence
  Protein classification predicting sequence
GWDTDQFPNSVEE

SEQ ID NO: 64664 - protein, 6 aa, Artificial sequence
  Protein classification predicting sequence
KVRRQS

SEQ ID NO: 64665 - protein, 6 aa, Artificial sequence
  Protein classification predicting sequence
RRQSLD

SEQ ID NO: 64666 - protein, 8 aa, Artificial sequence
  Protein classification predicting sequence
SGRQELLE

SEQ ID NO: 64667 - protein, 10 aa, Artificial sequence
  Protein classification predicting sequence
AKLKADVAFE

SEQ ID NO: 64668 - protein, 11 aa, Artificial sequence
  Protein classification predicting sequence
CFHDADVRPEG

SEQ ID NO: 64669 - protein, 12 aa, Artificial sequence
  Protein classification predicting sequence
GAATNPDPDVFA

SEQ ID NO: 64670 - protein, 6 aa, Artificial sequence
  Protein classification predicting sequence
HIGGMD

SEQ ID NO: 64671 - protein, 9 aa, Artificial sequence
  Protein classification predicting sequence
KADVAFEFF

SEQ ID NO: 64672 - protein, 5 aa, Artificial sequence
  Protein classification predicting sequence
YWHTF

SEQ ID NO: 64673 - protein, 8 aa, Artificial sequence
  Protein classification predicting sequence
AQVKKALE

SEQ ID NO: 64674 - protein, 7 aa, Artificial sequence
  Protein classification predicting sequence
DLFHAHI

SEQ ID NO: 64675 - protein, 6 aa, Artificial sequence
  Protein classification predicting sequence
GSIDAN

SEQ ID NO: 64676 - protein, 6 aa, Artificial sequence
  Protein classification predicting sequence
KAGGFT

SEQ ID NO: 64677 - protein, 8 aa, Artificial sequence
  Protein classification predicting sequence
SLEKYALE

SEQ ID NO: 64678 - protein, 6 aa, Artificial sequence
  Protein classification predicting sequence
PVHQSG

SEQ ID NO: 64679 - protein, 36 aa, Artificial sequence
  Protein classification predicting sequence
HLRFAACYWHTFCWNGADMFGVGAFNRPWQQPGEAL

SEQ ID NO: 64680 - protein, 8 aa, Artificial sequence
  Protein classification predicting sequence
YEGPKSNN

SEQ ID NO: 64681 - protein, 6 aa, Artificial sequence
  Protein classification predicting sequence
NLDIIV

SEQ ID NO: 64682 - protein, 9 aa, Artificial sequence
  Protein classification predicting sequence
RFVHGAATS

SEQ ID NO: 64683 - protein, 6 aa, Artificial sequence
  Protein classification predicting sequence
HIAGMD

SEQ ID NO: 64684 - protein, 8 aa, Artificial sequence
  Protein classification predicting sequence
KRFRQALD

SEQ ID NO: 64685 - protein, 14 aa, Artificial sequence
  Protein classification predicting sequence
TYVAWGGREGAESG

SEQ ID NO: 64686 - protein, 17 aa, Artificial sequence
  Protein classification predicting sequence
ALDRMKEAFDLLGEYVT

SEQ ID NO: 64687 - protein, 15 aa, Artificial sequence
  Protein classification predicting sequence
AAFRADPEVQEALRA

SEQ ID NO: 64688 - protein, 19 aa, Artificial sequence
  Protein classification predicting sequence
AAFRADPEVQEALRAARLD

SEQ ID NO: 64689 - protein, 21 aa, Artificial sequence
  Protein classification predicting sequence
TGMKVPMATTNLFTHPVFKDG

SEQ ID NO: 64690 - protein, 17 aa, Artificial sequence
  Protein classification predicting sequence
VPMATTNLFTHPVFKDG

SEQ ID NO: 64691 - protein, 13 aa, Artificial sequence
  Protein classification predicting sequence
YVAWGGREGAESG

SEQ ID NO: 64692 - protein, 12 aa, Artificial sequence
  Protein classification predicting sequence
FTANDRDVRRYA

SEQ ID NO: 64693 - protein, 7 aa, Artificial sequence
  Protein classification predicting sequence
GHALAFI

SEQ ID NO: 64694 - protein, 14 aa, Artificial sequence
  Protein classification predicting sequence
GPRHFDFKPPRTED

SEQ ID NO: 64695 - protein, 6 aa, Artificial sequence
  Protein classification predicting sequence
AFEDFD

SEQ ID NO: 64696 - protein, 7 aa, Artificial sequence
  Protein classification predicting sequence
IRNIDLA

SEQ ID NO: 64697 - protein, 11 aa, Artificial sequence
  Protein classification predicting sequence
AWGGREGAESG

SEQ ID NO: 64698 - protein, 17 aa, Artificial sequence
  Protein classification predicting sequence
FTANDRDVRRYALRKTI

SEQ ID NO: 64699 - protein, 9 aa, Artificial sequence
  Protein classification predicting sequence
GVTFHDDDL

SEQ ID NO: 64700 - protein, 16 aa, Artificial sequence
  Protein classification predicting sequence
VPMATTNLFTHPVFKD

SEQ ID NO: 64701 - protein, 9 aa, Artificial sequence
  Protein classification predicting sequence
FTANDRDVR

SEQ ID NO: 64702 - protein, 10 aa, Artificial sequence
  Protein classification predicting sequence
RKTIRNIDLA

SEQ ID NO: 64703 - protein, 7 aa, Artificial sequence
  Protein classification predicting sequence
DGVWASA

SEQ ID NO: 64704 - protein, 10 aa, Artificial sequence
  Protein classification predicting sequence
GCMRNYLILK

SEQ ID NO: 64705 - protein, 23 aa, Artificial sequence
  Protein classification predicting sequence
FTANDRDVRRYALRKTIRNIDLA

SEQ ID NO: 64706 - protein, 21 aa, Artificial sequence
  Protein classification predicting sequence
FTFGLWTVGWQGRDPFGDATR

SEQ ID NO: 64707 - protein, 8 aa, Artificial sequence
  Protein classification predicting sequence
ELDNLARF

SEQ ID NO: 64708 - protein, 10 aa, Artificial sequence
  Protein classification predicting sequence
LGSLDANQGD

SEQ ID NO: 64709 - protein, 7 aa, Artificial sequence
  Protein classification predicting sequence
FKDGGFT

SEQ ID NO: 64710 - protein, 7 aa, Artificial sequence
  Protein classification predicting sequence
HIDLNGQ

SEQ ID NO: 64711 - protein, 7 aa, Artificial sequence
  Protein classification predicting sequence
DQDLRFG

SEQ ID NO: 64712 - protein, 6 aa, Artificial sequence
  Protein classification predicting sequence
GPRHFD

SEQ ID NO: 64713 - protein, 7 aa, Artificial sequence
  Protein classification predicting sequence
GTDPFGA

SEQ ID NO: 64714 - protein, 10 aa, Artificial sequence
  Protein classification predicting sequence
AKARVEAAFE

SEQ ID NO: 64715 - protein, 20 aa, Artificial sequence
  Protein classification predicting sequence
PTDIRMTTLAMYEVIKMGGF

SEQ ID NO: 64716 - protein, 7 aa, Artificial sequence
  Protein classification predicting sequence
GRDPFGD

SEQ ID NO: 64717 - protein, 10 aa, Artificial sequence
  Protein classification predicting sequence
TTLAMYEVIK

SEQ ID NO: 64718 - protein, 15 aa, Artificial sequence
  Protein classification predicting sequence
AAQVKKALEITKELG

SEQ ID NO: 64719 - protein, 7 aa, Artificial sequence
  Protein classification predicting sequence
FKDGAFT

SEQ ID NO: 64720 - protein, 5 aa, Artificial sequence
  Protein classification predicting sequence
FCFHD

SEQ ID NO: 64721 - protein, 8 aa, Artificial sequence
  Protein classification predicting sequence
LRETNKNL

SEQ ID NO: 64722 - protein, 9 aa, Artificial sequence
  Protein classification predicting sequence
LWGTANLFS

SEQ ID NO: 64723 - protein, 13 aa, Artificial sequence
  Protein classification predicting sequence
LWGTANLFSHPRY

SEQ ID NO: 64724 - protein, 53 aa, Artificial sequence
  Protein classification predicting sequence
DMLLGWDTDQFPTDIRMTTLAMYEVIKMGGFDKGGLNFDAKVRRASFEPEDLF

SEQ ID NO: 64725 - protein, 6 aa, Artificial sequence
  Protein classification predicting sequence
FIEERY

SEQ ID NO: 64726 - protein, 6 aa, Artificial sequence
  Protein classification predicting sequence
VAFEFF

SEQ ID NO: 64727 - protein, 23 aa, Artificial sequence
  Protein classification predicting sequence
PRYGAGAATNPDPEVFSWAATQV

SEQ ID NO: 64728 - protein, 19 aa, Artificial sequence
  Protein classification predicting sequence
NIEANHATLAGHSFHHEIA

SEQ ID NO: 64729 - protein, 7 aa, Artificial sequence
  Protein classification predicting sequence
FDGDADR

SEQ ID NO: 64730 - protein, 7 aa, Artificial sequence
  Protein classification predicting sequence
LILTADH

SEQ ID NO: 64731 - protein, 7 aa, Artificial sequence
  Protein classification predicting sequence
VYLPMSY

SEQ ID NO: 64732 - protein, 7 aa, Artificial sequence
  Protein classification predicting sequence
DGMKMQG

SEQ ID NO: 64733 - protein, 10 aa, Artificial sequence
  Protein classification predicting sequence
VCFTYGTWFG

SEQ ID NO: 64734 - protein, 11 aa, Artificial sequence
  Protein classification predicting sequence
YRNIFPIWALG

SEQ ID NO: 64735 - protein, 7 aa, Artificial sequence
  Protein classification predicting sequence
ELVEQPV

SEQ ID NO: 64736 - protein, 8 aa, Artificial sequence
  Protein classification predicting sequence
WTLASGDT

SEQ ID NO: 64737 - protein, 9 aa, Artificial sequence
  Protein classification predicting sequence
AWTLASGDT

SEQ ID NO: 64738 - protein, 13 aa, Artificial sequence
  Protein classification predicting sequence
AWTLASGDTARDI

SEQ ID NO: 64739 - protein, 7 aa, Artificial sequence
  Protein classification predicting sequence
ITADHGN

SEQ ID NO: 64740 - protein, 6 aa, Artificial sequence
  Protein classification predicting sequence
GAWPFS

SEQ ID NO: 64741 - protein, 5 aa, Artificial sequence
  Protein classification predicting sequence
RYFNV

SEQ ID NO: 64742 - protein, 7 aa, Artificial sequence
  Protein classification predicting sequence
TPMLYFA

SEQ ID NO: 64743 - protein, 13 aa, Artificial sequence
  Protein classification predicting sequence
MITGSHNPPDYNG

SEQ ID NO: 64744 - protein, 6 aa, Artificial sequence
  Protein classification predicting sequence
DGNFPN

SEQ ID NO: 64745 - protein, 6 aa, Artificial sequence
  Protein classification predicting sequence
DLRAAF

SEQ ID NO: 64746 - protein, 6 aa, Artificial sequence
  Protein classification predicting sequence
INNAVN

SEQ ID NO: 64747 - protein, 7 aa, Artificial sequence
  Protein classification predicting sequence
HAADVEG

SEQ ID NO: 64748 - protein, 6 aa, Artificial sequence
  Protein classification predicting sequence
EKNAPV

SEQ ID NO: 64749 - protein, 7 aa, Artificial sequence
  Protein classification predicting sequence
SSAATYG

SEQ ID NO: 64750 - protein, 6 aa, Artificial sequence
  Protein classification predicting sequence
YNLGTG

SEQ ID NO: 64751 - protein, 8 aa, Artificial sequence
  Protein classification predicting sequence
ASSAAVYG

SEQ ID NO: 64752 - protein, 6 aa, Artificial sequence
  Protein classification predicting sequence
LVTGHR

SEQ ID NO: 64753 - protein, 7 aa, Artificial sequence
  Protein classification predicting sequence
FDGDGDR

SEQ ID NO: 64754 - protein, 6 aa, Artificial sequence
  Protein classification predicting sequence
DGDGDR

SEQ ID NO: 64755 - protein, 6 aa, Artificial sequence
  Protein classification predicting sequence
MTGKSL

SEQ ID NO: 64756 - protein, 6 aa, Artificial sequence
  Protein classification predicting sequence
TADHGN

SEQ ID NO: 64757 - protein, 7 aa, Artificial sequence
  Protein classification predicting sequence
KELKKIL

SEQ ID NO: 64758 - protein, 6 aa, Artificial sequence
  Protein classification predicting sequence
RYTEAR

SEQ ID NO: 64759 - protein, 5 aa, Artificial sequence
  Protein classification predicting sequence
TYNAS

SEQ ID NO: 64760 - protein, 7 aa, Artificial sequence
  Protein classification predicting sequence
GGINSEN

SEQ ID NO: 64761 - protein, 6 aa, Artificial sequence
  Protein classification predicting sequence
GHEVID

SEQ ID NO: 64762 - protein, 6 aa, Artificial sequence
  Protein classification predicting sequence
ALYEHK

SEQ ID NO: 64763 - protein, 5 aa, Artificial sequence
  Protein classification predicting sequence
AKMWI

SEQ ID NO: 64764 - protein, 6 aa, Artificial sequence
  Protein classification predicting sequence
TGVRDY

SEQ ID NO: 64765 - protein, 5 aa, Artificial sequence
  Protein classification predicting sequence
GPFMV

SEQ ID NO: 64766 - protein, 6 aa, Artificial sequence
  Protein classification predicting sequence
DPDADR

SEQ ID NO: 64767 - protein, 6 aa, Artificial sequence
  Protein classification predicting sequence
GTSGLR

SEQ ID NO: 64768 - protein, 6 aa, Artificial sequence
  Protein classification predicting sequence
MITGSH

SEQ ID NO: 64769 - protein, 6 aa, Artificial sequence
  Protein classification predicting sequence
DGDADR

SEQ ID NO: 64770 - protein, 6 aa, Artificial sequence
  Protein classification predicting sequence
TASHNP

SEQ ID NO: 64771 - protein, 8 aa, Artificial sequence
  Protein classification predicting sequence
FKAYDIRG

SEQ ID NO: 64772 - protein, 6 aa, Artificial sequence
  Protein classification predicting sequence
IYDGEG

SEQ ID NO: 64773 - protein, 6 aa, Artificial sequence
  Protein classification predicting sequence
EFEEMD

SEQ ID NO: 64774 - protein, 6 aa, Artificial sequence
  Protein classification predicting sequence
ELFIVE

SEQ ID NO: 64775 - protein, 6 aa, Artificial sequence
  Protein classification predicting sequence
AIELEN

SEQ ID NO: 64776 - protein, 6 aa, Artificial sequence
  Protein classification predicting sequence
ERDEEN

SEQ ID NO: 64777 - protein, 7 aa, Artificial sequence
  Protein classification predicting sequence
LFNKLSE

SEQ ID NO: 64778 - protein, 6 aa, Artificial sequence
  Protein classification predicting sequence
ANFSTD

SEQ ID NO: 64779 - protein, 6 aa, Artificial sequence
  Protein classification predicting sequence
KENVSE

SEQ ID NO: 64780 - protein, 6 aa, Artificial sequence
  Protein classification predicting sequence
SWVGAT

SEQ ID NO: 64781 - protein, 7 aa, Artificial sequence
  Protein classification predicting sequence
LRKLEAA

SEQ ID NO: 64782 - protein, 5 aa, Artificial sequence
  Protein classification predicting sequence
TANMF

SEQ ID NO: 64783 - protein, 6 aa, Artificial sequence
  Protein classification predicting sequence
ERTRSG

SEQ ID NO: 64784 - protein, 7 aa, Artificial sequence
  Protein classification predicting sequence
ANEVEAV

SEQ ID NO: 64785 - protein, 8 aa, Artificial sequence
  Protein classification predicting sequence
SSALNERM

SEQ ID NO: 64786 - protein, 6 aa, Artificial sequence
  Protein classification predicting sequence
AWLSIL

SEQ ID NO: 64787 - protein, 5 aa, Artificial sequence
  Protein classification predicting sequence
YINYY

SEQ ID NO: 64788 - protein, 6 aa, Artificial sequence
  Protein classification predicting sequence
MVTEAL

SEQ ID NO: 64789 - protein, 6 aa, Artificial sequence
  Protein classification predicting sequence
KNINEK

SEQ ID NO: 64790 - protein, 6 aa, Artificial sequence
  Protein classification predicting sequence
SWFLEK

SEQ ID NO: 64791 - protein, 6 aa, Artificial sequence
  Protein classification predicting sequence
NTLLMD

SEQ ID NO: 64792 - protein, 8 aa, Artificial sequence
  Protein classification predicting sequence
GEHELDYL

SEQ ID NO: 64793 - protein, 7 aa, Artificial sequence
  Protein classification predicting sequence
GLSLVGV

SEQ ID NO: 64794 - protein, 6 aa, Artificial sequence
  Protein classification predicting sequence
CLGKVI

SEQ ID NO: 64795 - protein, 5 aa, Artificial sequence
  Protein classification predicting sequence
PLFQT

SEQ ID NO: 64796 - protein, 9 aa, Artificial sequence
  Protein classification predicting sequence
SIPVIASGG

SEQ ID NO: 64797 - protein, 8 aa, Artificial sequence
  Protein classification predicting sequence
IPVIASGG

SEQ ID NO: 64798 - protein, 7 aa, Artificial sequence
  Protein classification predicting sequence
INIGGAG

SEQ ID NO: 64799 - protein, 7 aa, Artificial sequence
  Protein classification predicting sequence
VASAADA

SEQ ID NO: 64800 - protein, 6 aa, Artificial sequence
  Protein classification predicting sequence
LAKVDA

SEQ ID NO: 64801 - protein, 6 aa, Artificial sequence
  Protein classification predicting sequence
GLGGQD

SEQ ID NO: 64802 - protein, 6 aa, Artificial sequence
  Protein classification predicting sequence
TNIGLD

SEQ ID NO: 64803 - protein, 5 aa, Artificial sequence
  Protein classification predicting sequence
NVRQP

SEQ ID NO: 64804 - protein, 7 aa, Artificial sequence
  Protein classification predicting sequence
LDLGSIP

SEQ ID NO: 64805 - protein, 6 aa, Artificial sequence
  Protein classification predicting sequence
EVITNT

SEQ ID NO: 64806 - protein, 6 aa, Artificial sequence
  Protein classification predicting sequence
HAFLDG

SEQ ID NO: 64807 - protein, 6 aa, Artificial sequence
  Protein classification predicting sequence
IGESFL

SEQ ID NO: 64808 - protein, 6 aa, Artificial sequence
  Protein classification predicting sequence
RILVRP

SEQ ID NO: 64809 - protein, 7 aa, Artificial sequence
  Protein classification predicting sequence
ALEAVEL

SEQ ID NO: 64810 - protein, 6 aa, Artificial sequence
  Protein classification predicting sequence
SAGGSA

SEQ ID NO: 64811 - protein, 6 aa, Artificial sequence
  Protein classification predicting sequence
GIALYG

SEQ ID NO: 64812 - protein, 6 aa, Artificial sequence
  Protein classification predicting sequence
KDVIAV

SEQ ID NO: 64813 - protein, 7 aa, Artificial sequence
  Protein classification predicting sequence
VWLGKRY

SEQ ID NO: 64814 - protein, 6 aa, Artificial sequence
  Protein classification predicting sequence
VATYDL

SEQ ID NO: 64815 - protein, 7 aa, Artificial sequence
  Protein classification predicting sequence
ASTLLEN

SEQ ID NO: 64816 - protein, 6 aa, Artificial sequence
  Protein classification predicting sequence
ATKRGV

SEQ ID NO: 64817 - protein, 5 aa, Artificial sequence
  Protein classification predicting sequence
TDQYP

SEQ ID NO: 64818 - protein, 7 aa, Artificial sequence
  Protein classification predicting sequence
GPETLRQ

SEQ ID NO: 64819 - protein, 6 aa, Artificial sequence
  Protein classification predicting sequence
DVKPAP

SEQ ID NO: 64820 - protein, 6 aa, Artificial sequence
  Protein classification predicting sequence
EHRIAV

SEQ ID NO: 64821 - protein, 6 aa, Artificial sequence
  Protein classification predicting sequence
EHRVAV

SEQ ID NO: 64822 - protein, 6 aa, Artificial sequence
  Protein classification predicting sequence
GISLYG

SEQ ID NO: 64823 - protein, 6 aa, Artificial sequence
  Protein classification predicting sequence
VYLEGN

SEQ ID NO: 64824 - protein, 6 aa, Artificial sequence
  Protein classification predicting sequence
KEKKRK

SEQ ID NO: 64825 - protein, 6 aa, Artificial sequence
  Protein classification predicting sequence
GMKLVR

SEQ ID NO: 64826 - protein, 5 aa, Artificial sequence
  Protein classification predicting sequence
GQVVH

SEQ ID NO: 64827 - protein, 6 aa, Artificial sequence
  Protein classification predicting sequence
DHPKLP

SEQ ID NO: 64828 - protein, 6 aa, Artificial sequence
  Protein classification predicting sequence
RYVVEE

SEQ ID NO: 64829 - protein, 6 aa, Artificial sequence
  Protein classification predicting sequence
GLGNDF

SEQ ID NO: 64830 - protein, 7 aa, Artificial sequence
  Protein classification predicting sequence
GDKLVTV

SEQ ID NO: 64831 - protein, 6 aa, Artificial sequence
  Protein classification predicting sequence
AADVEG

SEQ ID NO: 64832 - protein, 6 aa, Artificial sequence
  Protein classification predicting sequence
VLGRMR

SEQ ID NO: 64833 - protein, 6 aa, Artificial sequence
  Protein classification predicting sequence
GAGNDF

SEQ ID NO: 64834 - protein, 6 aa, Artificial sequence
  Protein classification predicting sequence
VDSLGI

SEQ ID NO: 64835 - protein, 6 aa, Artificial sequence
  Protein classification predicting sequence
AEENPS

SEQ ID NO: 64836 - protein, 7 aa, Artificial sequence
  Protein classification predicting sequence
IHEKTGA

SEQ ID NO: 64837 - protein, 5 aa, Artificial sequence
  Protein classification predicting sequence
GCETH

SEQ ID NO: 64838 - protein, 6 aa, Artificial sequence
  Protein classification predicting sequence
CHVRLV

SEQ ID NO: 64839 - protein, 5 aa, Artificial sequence
  Protein classification predicting sequence
SPHWG

SEQ ID NO: 64840 - protein, 6 aa, Artificial sequence
  Protein classification predicting sequence
LPYFTD

SEQ ID NO: 64841 - protein, 6 aa, Artificial sequence
  Protein classification predicting sequence
DIAKDG

SEQ ID NO: 64842 - protein, 7 aa, Artificial sequence
  Protein classification predicting sequence
QSLDLTI

SEQ ID NO: 64843 - protein, 6 aa, Artificial sequence
  Protein classification predicting sequence
KPKKEE

SEQ ID NO: 64844 - protein, 6 aa, Artificial sequence
  Protein classification predicting sequence
NNGESP

SEQ ID NO: 64845 - protein, 5 aa, Artificial sequence
  Protein classification predicting sequence
IPCDF

SEQ ID NO: 64846 - protein, 6 aa, Artificial sequence
  Protein classification predicting sequence
RGYTGR

SEQ ID NO: 64847 - protein, 6 aa, Artificial sequence
  Protein classification predicting sequence
GALIVY

SEQ ID NO: 64848 - protein, 6 aa, Artificial sequence
  Protein classification predicting sequence
SPVFMD

SEQ ID NO: 64849 - protein, 6 aa, Artificial sequence
  Protein classification predicting sequence
LDKMNR

SEQ ID NO: 64850 - protein, 6 aa, Artificial sequence
  Protein classification predicting sequence
ERFKRF

SEQ ID NO: 64851 - protein, 6 aa, Artificial sequence
  Protein classification predicting sequence
PNFPPL

SEQ ID NO: 64852 - protein, 5 aa, Artificial sequence
  Protein classification predicting sequence
FIGTH

SEQ ID NO: 64853 - protein, 6 aa, Artificial sequence
  Protein classification predicting sequence
LTGTIQ

SEQ ID NO: 64854 - protein, 6 aa, Artificial sequence
  Protein classification predicting sequence
TFHAEA

SEQ ID NO: 64855 - protein, 5 aa, Artificial sequence
  Protein classification predicting sequence
WRLNE

SEQ ID NO: 64856 - protein, 7 aa, Artificial sequence
  Protein classification predicting sequence
SEQGINE

SEQ ID NO: 64857 - protein, 7 aa, Artificial sequence
  Protein classification predicting sequence
GITLREG

SEQ ID NO: 64858 - protein, 6 aa, Artificial sequence
  Protein classification predicting sequence
FGESDE

SEQ ID NO: 64859 - protein, 6 aa, Artificial sequence
  Protein classification predicting sequence
RIDQKI

SEQ ID NO: 64860 - protein, 5 aa, Artificial sequence
  Protein classification predicting sequence
KVYVH

SEQ ID NO: 64861 - protein, 6 aa, Artificial sequence
  Protein classification predicting sequence
VIAEHG

SEQ ID NO: 64862 - protein, 6 aa, Artificial sequence
  Protein classification predicting sequence
KTFEKS

SEQ ID NO: 64863 - protein, 6 aa, Artificial sequence
  Protein classification predicting sequence
NLFSFV

SEQ ID NO: 64864 - protein, 7 aa, Artificial sequence
  Protein classification predicting sequence
LFAEALK

SEQ ID NO: 64865 - protein, 6 aa, Artificial sequence
  Protein classification predicting sequence
RFDQVT

SEQ ID NO: 64866 - protein, 5 aa, Artificial sequence
  Protein classification predicting sequence
LMEHI

SEQ ID NO: 64867 - protein, 7 aa, Artificial sequence
  Protein classification predicting sequence
IIGTKNG

SEQ ID NO: 64868 - protein, 6 aa, Artificial sequence
  Protein classification predicting sequence
SIKITK

SEQ ID NO: 64869 - protein, 6 aa, Artificial sequence
  Protein classification predicting sequence
LTIQYD

SEQ ID NO: 64870 - protein, 6 aa, Artificial sequence
  Protein classification predicting sequence
KNLITE

SEQ ID NO: 64871 - protein, 7 aa, Artificial sequence
  Protein classification predicting sequence
EDDLLLI

SEQ ID NO: 64872 - protein, 6 aa, Artificial sequence
  Protein classification predicting sequence
GLLETA

SEQ ID NO: 64873 - protein, 6 aa, Artificial sequence
  Protein classification predicting sequence
DPALSE

SEQ ID NO: 64874 - protein, 6 aa, Artificial sequence
  Protein classification predicting sequence
NVILDV

SEQ ID NO: 64875 - protein, 6 aa, Artificial sequence
  Protein classification predicting sequence
GKVASP

SEQ ID NO: 64876 - protein, 6 aa, Artificial sequence
  Protein classification predicting sequence
IGETEA

SEQ ID NO: 64877 - protein, 6 aa, Artificial sequence
  Protein classification predicting sequence
DYAKDQ

SEQ ID NO: 64878 - protein, 6 aa, Artificial sequence
  Protein classification predicting sequence
AKDRKL

SEQ ID NO: 64879 - protein, 7 aa, Artificial sequence
  Protein classification predicting sequence
AKQFLLA

SEQ ID NO: 64880 - protein, 7 aa, Artificial sequence
  Protein classification predicting sequence
QNAYKVA

SEQ ID NO: 64881 - protein, 6 aa, Artificial sequence
  Protein classification predicting sequence
EIVGDT

SEQ ID NO: 64882 - protein, 5 aa, Artificial sequence
  Protein classification predicting sequence
YMDKE

SEQ ID NO: 64883 - protein, 6 aa, Artificial sequence
  Protein classification predicting sequence
NIAQLE

SEQ ID NO: 64884 - protein, 6 aa, Artificial sequence
  Protein classification predicting sequence
HTTVPV

SEQ ID NO: 64885 - protein, 6 aa, Artificial sequence
  Protein classification predicting sequence
IIGRAL

SEQ ID NO: 64886 - protein, 6 aa, Artificial sequence
  Protein classification predicting sequence
EWNKAN

SEQ ID NO: 64887 - protein, 6 aa, Artificial sequence
  Protein classification predicting sequence
QNAKMI

SEQ ID NO: 64888 - protein, 6 aa, Artificial sequence
  Protein classification predicting sequence
GAEWLH

SEQ ID NO: 64889 - protein, 7 aa, Artificial sequence
  Protein classification predicting sequence
QFDNYVR

SEQ ID NO: 64890 - protein, 7 aa, Artificial sequence
  Protein classification predicting sequence
LEVIDKY

SEQ ID NO: 64891 - protein, 6 aa, Artificial sequence
  Protein classification predicting sequence
LRSRTE

SEQ ID NO: 64892 - protein, 7 aa, Artificial sequence
  Protein classification predicting sequence
TIVFTNF

SEQ ID NO: 64893 - protein, 7 aa, Artificial sequence
  Protein classification predicting sequence
LQEALSL

SEQ ID NO: 64894 - protein, 5 aa, Artificial sequence
  Protein classification predicting sequence
GGHPD

SEQ ID NO: 64895 - protein, 6 aa, Artificial sequence
  Protein classification predicting sequence
PRLSFF

SEQ ID NO: 64896 - protein, 6 aa, Artificial sequence
  Protein classification predicting sequence
GRGGTS

SEQ ID NO: 64897 - protein, 6 aa, Artificial sequence
  Protein classification predicting sequence
QPEGEP

SEQ ID NO: 64898 - protein, 6 aa, Artificial sequence
  Protein classification predicting sequence
TPTVQD

SEQ ID NO: 64899 - protein, 5 aa, Artificial sequence
  Protein classification predicting sequence
NYFGS

SEQ ID NO: 64900 - protein, 6 aa, Artificial sequence
  Protein classification predicting sequence
LVIDRV

SEQ ID NO: 64901 - protein, 6 aa, Artificial sequence
  Protein classification predicting sequence
PNPLLP

SEQ ID NO: 64902 - protein, 6 aa, Artificial sequence
  Protein classification predicting sequence
RQLRFL

SEQ ID NO: 64903 - protein, 5 aa, Artificial sequence
  Protein classification predicting sequence
EEQCI

SEQ ID NO: 64904 - protein, 7 aa, Artificial sequence
  Protein classification predicting sequence
VINSGNG

SEQ ID NO: 64905 - protein, 6 aa, Artificial sequence
  Protein classification predicting sequence
KQFGLE

SEQ ID NO: 64906 - protein, 7 aa, Artificial sequence
  Protein classification predicting sequence
YSQALEK

SEQ ID NO: 64907 - protein, 7 aa, Artificial sequence
  Protein classification predicting sequence
VLILGTE

SEQ ID NO: 64908 - protein, 6 aa, Artificial sequence
  Protein classification predicting sequence
LKKVNP

SEQ ID NO: 64909 - protein, 7 aa, Artificial sequence
  Protein classification predicting sequence
LAEAVSI

SEQ ID NO: 64910 - protein, 7 aa, Artificial sequence
  Protein classification predicting sequence
AKAAGKL

SEQ ID NO: 64911 - protein, 6 aa, Artificial sequence
  Protein classification predicting sequence
QLLPVL

SEQ ID NO: 64912 - protein, 6 aa, Artificial sequence
  Protein classification predicting sequence
KDRLSG

SEQ ID NO: 64913 - protein, 6 aa, Artificial sequence
  Protein classification predicting sequence
KILRNG

SEQ ID NO: 64914 - protein, 6 aa, Artificial sequence
  Protein classification predicting sequence
LISEDL

SEQ ID NO: 64915 - protein, 7 aa, Artificial sequence
  Protein classification predicting sequence
QELTGRS

SEQ ID NO: 64916 - protein, 6 aa, Artificial sequence
  Protein classification predicting sequence
NDYMAK

SEQ ID NO: 64917 - protein, 6 aa, Artificial sequence
  Protein classification predicting sequence
NREVIQ

SEQ ID NO: 64918 - protein, 7 aa, Artificial sequence
  Protein classification predicting sequence
QSLRQEL

SEQ ID NO: 64919 - protein, 6 aa, Artificial sequence
  Protein classification predicting sequence
KELASQ

SEQ ID NO: 64920 - protein, 5 aa, Artificial sequence
  Protein classification predicting sequence
SQFFI

SEQ ID NO: 64921 - protein, 6 aa, Artificial sequence
  Protein classification predicting sequence
GNEREP

SEQ ID NO: 64922 - protein, 6 aa, Artificial sequence
  Protein classification predicting sequence
VQLIQG

SEQ ID NO: 64923 - protein, 6 aa, Artificial sequence
  Protein classification predicting sequence
ESEAEN

SEQ ID NO: 64924 - protein, 6 aa, Artificial sequence
  Protein classification predicting sequence
LNNGES

SEQ ID NO: 64925 - protein, 6 aa, Artificial sequence
  Protein classification predicting sequence
SMKAGI

SEQ ID NO: 64926 - protein, 8 aa, Artificial sequence
  Protein classification predicting sequence
LDAAKAGG

SEQ ID NO: 64927 - protein, 6 aa, Artificial sequence
  Protein classification predicting sequence
TISGNG

SEQ ID NO: 64928 - protein, 6 aa, Artificial sequence
  Protein classification predicting sequence
DIQRLA

SEQ ID NO: 64929 - protein, 6 aa, Artificial sequence
  Protein classification predicting sequence
ENDFTS

SEQ ID NO: 64930 - protein, 8 aa, Artificial sequence
  Protein classification predicting sequence
AEEAGIPL

SEQ ID NO: 64931 - protein, 6 aa, Artificial sequence
  Protein classification predicting sequence
VDVLDI

SEQ ID NO: 64932 - protein, 7 aa, Artificial sequence
  Protein classification predicting sequence
IEKVADD

SEQ ID NO: 64933 - protein, 6 aa, Artificial sequence
  Protein classification predicting sequence
DKDFNG

SEQ ID NO: 64934 - protein, 7 aa, Artificial sequence
  Protein classification predicting sequence
GPVPVEI

SEQ ID NO: 64935 - protein, 6 aa, Artificial sequence
  Protein classification predicting sequence
PVGAYG

SEQ ID NO: 64936 - protein, 5 aa, Artificial sequence
  Protein classification predicting sequence
RDKRW

SEQ ID NO: 64937 - protein, 7 aa, Artificial sequence
  Protein classification predicting sequence
VREGKFG

SEQ ID NO: 64938 - protein, 6 aa, Artificial sequence
  Protein classification predicting sequence
VLDICQ

SEQ ID NO: 64939 - protein, 7 aa, Artificial sequence
  Protein classification predicting sequence
AASLLQP

SEQ ID NO: 64940 - protein, 6 aa, Artificial sequence
  Protein classification predicting sequence
DINKKA

SEQ ID NO: 64941 - protein, 6 aa, Artificial sequence
  Protein classification predicting sequence
VPVIIK

SEQ ID NO: 64942 - protein, 7 aa, Artificial sequence
  Protein classification predicting sequence
ENIEKGL

SEQ ID NO: 64943 - protein, 8 aa, Artificial sequence
  Protein classification predicting sequence
AKEAGAKG

SEQ ID NO: 64944 - protein, 7 aa, Artificial sequence
  Protein classification predicting sequence
LVGAGIK

SEQ ID NO: 64945 - protein, 6 aa, Artificial sequence
  Protein classification predicting sequence
GHPLLG

SEQ ID NO: 64946 - protein, 6 aa, Artificial sequence
  Protein classification predicting sequence
PVSTYR

SEQ ID NO: 64947 - protein, 7 aa, Artificial sequence
  Protein classification predicting sequence
FQAVADA

SEQ ID NO: 64948 - protein, 5 aa, Artificial sequence
  Protein classification predicting sequence
MILEY

SEQ ID NO: 64949 - protein, 5 aa, Artificial sequence
  Protein classification predicting sequence
GWQTQ

SEQ ID NO: 64950 - protein, 6 aa, Artificial sequence
  Protein classification predicting sequence
ILNVEK

SEQ ID NO: 64951 - protein, 6 aa, Artificial sequence
  Protein classification predicting sequence
LEKKDR

SEQ ID NO: 64952 - protein, 7 aa, Artificial sequence
  Protein classification predicting sequence
LYVGKGA

SEQ ID NO: 64953 - protein, 5 aa, Artificial sequence
  Protein classification predicting sequence
RHYRY

SEQ ID NO: 64954 - protein, 6 aa, Artificial sequence
  Protein classification predicting sequence
LGIVSY

SEQ ID NO: 64955 - protein, 6 aa, Artificial sequence
  Protein classification predicting sequence
WTHLEL

SEQ ID NO: 64956 - protein, 5 aa, Artificial sequence
  Protein classification predicting sequence
FHCRY

SEQ ID NO: 64957 - protein, 6 aa, Artificial sequence
  Protein classification predicting sequence
FSGEKI

SEQ ID NO: 64958 - protein, 7 aa, Artificial sequence
  Protein classification predicting sequence
IEAISTT

SEQ ID NO: 64959 - protein, 5 aa, Artificial sequence
  Protein classification predicting sequence
LRYHK

SEQ ID NO: 64960 - protein, 5 aa, Artificial sequence
  Protein classification predicting sequence
KRFFH

SEQ ID NO: 64961 - protein, 6 aa, Artificial sequence
  Protein classification predicting sequence
GFDIPT

SEQ ID NO: 64962 - protein, 5 aa, Artificial sequence
  Protein classification predicting sequence
HGNDP

SEQ ID NO: 64963 - protein, 11 aa, Artificial sequence
  Protein classification predicting sequence
VPPIVLAIAKS

SEQ ID NO: 64964 - protein, 19 aa, Artificial sequence
  Protein classification predicting sequence
KSGACGTVVRNAEMKIVDP

SEQ ID NO: 64965 - protein, 7 aa, Artificial sequence
  Protein classification predicting sequence
FHIYSLN

SEQ ID NO: 64966 - protein, 9 aa, Artificial sequence
  Protein classification predicting sequence
CGTVVRNAE

SEQ ID NO: 64967 - protein, 8 aa, Artificial sequence
  Protein classification predicting sequence
FIVDRLKE

SEQ ID NO: 64968 - protein, 12 aa, Artificial sequence
  Protein classification predicting sequence
IPKAPSGKILRK

SEQ ID NO: 64969 - protein, 20 aa, Artificial sequence
  Protein classification predicting sequence
DLIFRSKLPDIYIPKHLPLH

SEQ ID NO: 64970 - protein, 9 aa, Artificial sequence
  Protein classification predicting sequence
GLNKLGIQQ

SEQ ID NO: 64971 - protein, 7 aa, Artificial sequence
  Protein classification predicting sequence
LLPNSPE

SEQ ID NO: 64972 - protein, 7 aa, Artificial sequence
  Protein classification predicting sequence
GEICIRG

SEQ ID NO: 64973 - protein, 13 aa, Artificial sequence
  Protein classification predicting sequence
CVLPLFHIYSLNS

SEQ ID NO: 64974 - protein, 9 aa, Artificial sequence
  Protein classification predicting sequence
ISDAAVVPM

SEQ ID NO: 64975 - protein, 19 aa, Artificial sequence
  Protein classification predicting sequence
ITEDEVKDFISKQVIFYKR

SEQ ID NO: 64976 - protein, 7 aa, Artificial sequence
  Protein classification predicting sequence
LPDIYIP

SEQ ID NO: 64977 - protein, 6 aa, Artificial sequence
  Protein classification predicting sequence
KQAKAS

SEQ ID NO: 64978 - protein, 11 aa, Artificial sequence
  Protein classification predicting sequence
SSGTTGLPKGV

SEQ ID NO: 64979 - protein, 13 aa, Artificial sequence
  Protein classification predicting sequence
GQGYGMTEAGPVL

SEQ ID NO: 64980 - protein, 8 aa, Artificial sequence
  Protein classification predicting sequence
KQVVFYKR

SEQ ID NO: 64981 - protein, 22 aa, Artificial sequence
  Protein classification predicting sequence
YDLSSVRTVMSGAAPLGKELED

SEQ ID NO: 64982 - protein, 10 aa, Artificial sequence
  Protein classification predicting sequence
SGAAPLGKEL

SEQ ID NO: 64983 - protein, 10 aa, Artificial sequence
  Protein classification predicting sequence
SIADAAVVPQ

SEQ ID NO: 64984 - protein, 8 aa, Artificial sequence
  Protein classification predicting sequence
KELEDAVR

SEQ ID NO: 64985 - protein, 5 aa, Artificial sequence
  Protein classification predicting sequence
KFPNA

SEQ ID NO: 64986 - protein, 8 aa, Artificial sequence
  Protein classification predicting sequence
GQGYGMTE

SEQ ID NO: 64987 - protein, 6 aa, Artificial sequence
  Protein classification predicting sequence
RNAEMK

SEQ ID NO: 64988 - protein, 11 aa, Artificial sequence
  Protein classification predicting sequence
FIVDRLKELIK

SEQ ID NO: 64989 - protein, 11 aa, Artificial sequence
  Protein classification predicting sequence
QVAPAELEALL

SEQ ID NO: 64990 - protein, 7 aa, Artificial sequence
  Protein classification predicting sequence
EVPVAFV

SEQ ID NO: 64991 - protein, 8 aa, Artificial sequence
  Protein classification predicting sequence
CGTVVRNA

SEQ ID NO: 64992 - protein, 7 aa, Artificial sequence
  Protein classification predicting sequence
KQVIFYK

SEQ ID NO: 64993 - protein, 7 aa, Artificial sequence
  Protein classification predicting sequence
ISTMANP

SEQ ID NO: 64994 - protein, 8 aa, Artificial sequence
  Protein classification predicting sequence
TFIDTPGA

SEQ ID NO: 64995 - protein, 10 aa, Artificial sequence
  Protein classification predicting sequence
IGEGGSGGAL

SEQ ID NO: 64996 - protein, 6 aa, Artificial sequence
  Protein classification predicting sequence
RNFGMP

SEQ ID NO: 64997 - protein, 8 aa, Artificial sequence
  Protein classification predicting sequence
WIELHGDR

SEQ ID NO: 64998 - protein, 7 aa, Artificial sequence
  Protein classification predicting sequence
GYRKALR

SEQ ID NO: 64999 - protein, 9 aa, Artificial sequence
  Protein classification predicting sequence
YTVATPEAC

SEQ ID NO: 65000 - protein, 9 aa, Artificial sequence
  Protein classification predicting sequence
PIAELEAKI

SEQ ID NO: 65001 - protein, 7 aa, Artificial sequence
  Protein classification predicting sequence
RPYTLDY

SEQ ID NO: 65002 - protein, 9 aa, Artificial sequence
  Protein classification predicting sequence
ADDKAIVGG

SEQ ID NO: 65003 - protein, 9 aa, Artificial sequence
  Protein classification predicting sequence
ARLDGRPVM

SEQ ID NO: 65004 - protein, 10 aa, Artificial sequence
  Protein classification predicting sequence
EAIARNLREM

SEQ ID NO: 65005 - protein, 7 aa, Artificial sequence
  Protein classification predicting sequence
RLMSYGY

SEQ ID NO: 65006 - protein, 6 aa, Artificial sequence
  Protein classification predicting sequence
GYRKAL

SEQ ID NO: 65007 - protein, 8 aa, Artificial sequence
  Protein classification predicting sequence
RPTTLDYI

SEQ ID NO: 65008 - protein, 10 aa, Artificial sequence
  Protein classification predicting sequence
DLADLDVLST

SEQ ID NO: 65009 - protein, 45 aa, Artificial sequence
  Protein classification predicting sequence
AQLARHPQRPYTLDYVRLAFDEFDELAGDRAYADDKAIVGGIARL

SEQ ID NO: 65010 - protein, 38 aa, Artificial sequence
  Protein classification predicting sequence
GRPVMIIGHQKGRETKEKIRRNFGMPAPEGYRKALRLM

SEQ ID NO: 65011 - protein, 37 aa, Artificial sequence
  Protein classification predicting sequence
MPIITFIDTPGAYPGVGAEERGQSEAIARNLREMSRL

SEQ ID NO: 65012 - protein, 95 aa, Artificial sequence
  Protein classification predicting sequence
CTVIGEGGSGGALAIGVGDKVNMLQYSTYSVISPEGCASILWKSADKAPLAAEAMGIIAPRLKELKLIDSIIPEPLGGAHRNPEAMAASLKAQLL

SEQ ID NO: 65013 - protein, 13 aa, Artificial sequence
  Protein classification predicting sequence
CTVIGEGGSGGAL

SEQ ID NO: 65014 - protein, 6 aa, Artificial sequence
  Protein classification predicting sequence
QLARHP

SEQ ID NO: 65015 - protein, 7 aa, Artificial sequence
  Protein classification predicting sequence
FSDEDSY

SEQ ID NO: 65016 - protein, 7 aa, Artificial sequence
  Protein classification predicting sequence
ALGVMDF

SEQ ID NO: 65017 - protein, 13 aa, Artificial sequence
  Protein classification predicting sequence
IVPRNLLKGVLSE

SEQ ID NO: 65018 - protein, 15 aa, Artificial sequence
  Protein classification predicting sequence
PTTGGVTASFGMLGD

SEQ ID NO: 65019 - protein, 28 aa, Artificial sequence
  Protein classification predicting sequence
IIAEPKAYIAFAGKRVIEQTLRQKIPDG

SEQ ID NO: 65020 - protein, 12 aa, Artificial sequence
  Protein classification predicting sequence
VCSSGGARMQEG

SEQ ID NO: 65021 - protein, 9 aa, Artificial sequence
  Protein classification predicting sequence
PTTGGVTAS

SEQ ID NO: 65022 - protein, 11 aa, Artificial sequence
  Protein classification predicting sequence
GMLGDIIIAEP

SEQ ID NO: 65023 - protein, 7 aa, Artificial sequence
  Protein classification predicting sequence
GLWTRCD

SEQ ID NO: 65024 - protein, 11 aa, Artificial sequence
  Protein classification predicting sequence
AEPKALIGFAG

SEQ ID NO: 65025 - protein, 9 aa, Artificial sequence
  Protein classification predicting sequence
NCYGLNYKK

SEQ ID NO: 65026 - protein, 9 aa, Artificial sequence
  Protein classification predicting sequence
ASGGARMQE

SEQ ID NO: 65027 - protein, 7 aa, Artificial sequence
  Protein classification predicting sequence
SLMQMAK

SEQ ID NO: 65028 - protein, 7 aa, Artificial sequence
  Protein classification predicting sequence
CEQCGYH

SEQ ID NO: 65029 - protein, 6 aa, Artificial sequence
  Protein classification predicting sequence
PMDEDM

SEQ ID NO: 65030 - protein, 20 aa, Artificial sequence
  Protein classification predicting sequence
AEPNAYIAFAGKRVIEQTLN

SEQ ID NO: 65031 - protein, 6 aa, Artificial sequence
  Protein classification predicting sequence
VPEGSQ

SEQ ID NO: 65032 - protein, 7 aa, Artificial sequence
  Protein classification predicting sequence
GQLNGIP

SEQ ID NO: 65033 - protein, 21 aa, Artificial sequence
  Protein classification predicting sequence
PTTGGVTASFGMLGDIIIAEP

SEQ ID NO: 65034 - protein, 6 aa, Artificial sequence
  Protein classification predicting sequence
RVIEQT

SEQ ID NO: 65035 - protein, 12 aa, Artificial sequence
  Protein classification predicting sequence
MDFQFMGGSMGS

SEQ ID NO: 65036 - protein, 8 aa, Artificial sequence
  Protein classification predicting sequence
VGEKITRL

SEQ ID NO: 65037 - protein, 13 aa, Artificial sequence
  Protein classification predicting sequence
QMAKISSALYDYQ

SEQ ID NO: 65038 - protein, 9 aa, Artificial sequence
  Protein classification predicting sequence
YKDRIDSYQ

SEQ ID NO: 65039 - protein, 6 aa, Artificial sequence
  Protein classification predicting sequence
YMPMIP

SEQ ID NO: 65040 - protein, 10 aa, Artificial sequence
  Protein classification predicting sequence
VGEPIAAEVW

SEQ ID NO: 65041 - protein, 9 aa, Artificial sequence
  Protein classification predicting sequence
HLVTPLAGG

SEQ ID NO: 65042 - protein, 6 aa, Artificial sequence
  Protein classification predicting sequence
GRVDDV

SEQ ID NO: 65043 - protein, 18 aa, Artificial sequence
  Protein classification predicting sequence
GRVDDVVNVSGHRLSTAE

SEQ ID NO: 65044 - protein, 6 aa, Artificial sequence
  Protein classification predicting sequence
GVKKGD

SEQ ID NO: 65045 - protein, 9 aa, Artificial sequence
  Protein classification predicting sequence
HSVVFAGFS

SEQ ID NO: 65046 - protein, 8 aa, Artificial sequence
  Protein classification predicting sequence
LYTSGSTG

SEQ ID NO: 65047 - protein, 16 aa, Artificial sequence
  Protein classification predicting sequence
QFYVAPTALRLLKRAG

SEQ ID NO: 65048 - protein, 6 aa, Artificial sequence
  Protein classification predicting sequence
AWFLNG

SEQ ID NO: 65049 - protein, 6 aa, Artificial sequence
  Protein classification predicting sequence
PMIPEA

SEQ ID NO: 65050 - protein, 7 aa, Artificial sequence
  Protein classification predicting sequence
YFTGDGA

SEQ ID NO: 65051 - protein, 6 aa, Artificial sequence
  Protein classification predicting sequence
LNASYN

SEQ ID NO: 65052 - protein, 10 aa, Artificial sequence
  Protein classification predicting sequence
DVGWITGHTY

SEQ ID NO: 65053 - protein, 8 aa, Artificial sequence
  Protein classification predicting sequence
WQTESGSH

SEQ ID NO: 65054 - protein, 7 aa, Artificial sequence
  Protein classification predicting sequence
NDVEGVL

SEQ ID NO: 65055 - protein, 14 aa, Artificial sequence
  Protein classification predicting sequence
RIGAIHSVVFAGFS

SEQ ID NO: 65056 - protein, 6 aa, Artificial sequence
  Protein classification predicting sequence
VAIYMP

SEQ ID NO: 65057 - protein, 6 aa, Artificial sequence
  Protein classification predicting sequence
PHDIKG

SEQ ID NO: 65058 - protein, 5 aa, Artificial sequence
  Protein classification predicting sequence
MYQQS

SEQ ID NO: 65059 - protein, 10 aa, Artificial sequence
  Protein classification predicting sequence
FLLYTSGSTG

SEQ ID NO: 65060 - protein, 7 aa, Artificial sequence
  Protein classification predicting sequence
FYVAPTA

SEQ ID NO: 65061 - protein, 7 aa, Artificial sequence
  Protein classification predicting sequence
AIIYEAD

SEQ ID NO: 65062 - protein, 9 aa, Artificial sequence
  Protein classification predicting sequence
GYLLGAAMT

SEQ ID NO: 65063 - protein, 20 aa, Artificial sequence
  Protein classification predicting sequence
FTAGDVGWITGHTYALYGPL

SEQ ID NO: 65064 - protein, 16 aa, Artificial sequence
  Protein classification predicting sequence
FESTPAYPDYGRYWRI

SEQ ID NO: 65065 - protein, 13 aa, Artificial sequence
  Protein classification predicting sequence
SSLRVLGSVGEPI

SEQ ID NO: 65066 - protein, 6 aa, Artificial sequence
  Protein classification predicting sequence
PTKPGS

SEQ ID NO: 65067 - protein, 7 aa, Artificial sequence
  Protein classification predicting sequence
ACIIDPV

SEQ ID NO: 65068 - protein, 21 aa, Artificial sequence
  Protein classification predicting sequence
GRVDDVVNVSGHRLSTAEIEA

SEQ ID NO: 65069 - protein, 8 aa, Artificial sequence
  Protein classification predicting sequence
DELTGQAV

SEQ ID NO: 65070 - protein, 8 aa, Artificial sequence
  Protein classification predicting sequence
GQLNACYN

SEQ ID NO: 65071 - protein, 6 aa, Artificial sequence
  Protein classification predicting sequence
YLPMIP

SEQ ID NO: 65072 - protein, 10 aa, Artificial sequence
  Protein classification predicting sequence
FAGFSAGSLK

SEQ ID NO: 65073 - protein, 30 aa, Artificial sequence
  Protein classification predicting sequence
VFDIHPEDVLFTAGDVGWITGHTYALYGPL

SEQ ID NO: 65074 - protein, 10 aa, Artificial sequence
  Protein classification predicting sequence
FYVAPTALRL

SEQ ID NO: 65075 - protein, 16 aa, Artificial sequence
  Protein classification predicting sequence
GRVDDVVNVSGHRLST

SEQ ID NO: 65076 - protein, 6 aa, Artificial sequence
  Protein classification predicting sequence
DELTGQ

SEQ ID NO: 65077 - protein, 7 aa, Artificial sequence
  Protein classification predicting sequence
YNCVDRH

SEQ ID NO: 65078 - protein, 12 aa, Artificial sequence
  Protein classification predicting sequence
PMIPEAVVAMLA

SEQ ID NO: 65079 - protein, 7 aa, Artificial sequence
  Protein classification predicting sequence
AIIWEGD

SEQ ID NO: 65080 - protein, 12 aa, Artificial sequence
  Protein classification predicting sequence
WCTADIGWVTGH

SEQ ID NO: 65081 - protein, 9 aa, Artificial sequence
  Protein classification predicting sequence
YTAPTAIRA

SEQ ID NO: 65082 - protein, 12 aa, Artificial sequence
  Protein classification predicting sequence
PIVDTWWQTETG

SEQ ID NO: 65083 - protein, 14 aa, Artificial sequence
  Protein classification predicting sequence
DSWPGQARTLFGDH

SEQ ID NO: 65084 - protein, 11 aa, Artificial sequence
  Protein classification predicting sequence
NVSGHRMGTAE

SEQ ID NO: 65085 - protein, 21 aa, Artificial sequence
  Protein classification predicting sequence
APGLPKTRSGKIMRRILRKIA

SEQ ID NO: 65086 - protein, 7 aa, Artificial sequence
  Protein classification predicting sequence
NCLDRHL

SEQ ID NO: 65087 - protein, 6 aa, Artificial sequence
  Protein classification predicting sequence
YWCTAD

SEQ ID NO: 65088 - protein, 15 aa, Artificial sequence
  Protein classification predicting sequence
YWCTADVGWVTGHSY

SEQ ID NO: 65089 - protein, 8 aa, Artificial sequence
  Protein classification predicting sequence
WVRKEIGP

SEQ ID NO: 65090 - protein, 8 aa, Artificial sequence
  Protein classification predicting sequence
YTAPTAIR

SEQ ID NO: 65091 - protein, 10 aa, Artificial sequence
  Protein classification predicting sequence
ILITPLPGAT

SEQ ID NO: 65092 - protein, 12 aa, Artificial sequence
  Protein classification predicting sequence
GSATRPFFGVQP

SEQ ID NO: 65093 - protein, 13 aa, Artificial sequence
  Protein classification predicting sequence
DGYYWITGRVDDV

SEQ ID NO: 65094 - protein, 6 aa, Artificial sequence
  Protein classification predicting sequence
NVSGHR

SEQ ID NO: 65095 - protein, 7 aa, Artificial sequence
  Protein classification predicting sequence
KGQAIYA

SEQ ID NO: 65096 - protein, 18 aa, Artificial sequence
  Protein classification predicting sequence
LPKTRSGKIMRRILRKIA

SEQ ID NO: 65097 - protein, 9 aa, Artificial sequence
  Protein classification predicting sequence
STLADPGVV

SEQ ID NO: 65098 - protein, 6 aa, Artificial sequence
  Protein classification predicting sequence
WEGDDP

SEQ ID NO: 65099 - protein, 5 aa, Artificial sequence
  Protein classification predicting sequence
SWPGQ

SEQ ID NO: 65100 - protein, 6 aa, Artificial sequence
  Protein classification predicting sequence
YWITGR

SEQ ID NO: 65101 - protein, 10 aa, Artificial sequence
  Protein classification predicting sequence
DDVINVSGHR

SEQ ID NO: 65102 - protein, 8 aa, Artificial sequence
  Protein classification predicting sequence
GVKKGDRV

SEQ ID NO: 65103 - protein, 11 aa, Artificial sequence
  Protein classification predicting sequence
GVKKGDRVTIY

SEQ ID NO: 65104 - protein, 7 aa, Artificial sequence
  Protein classification predicting sequence
DEGVRGG

SEQ ID NO: 65105 - protein, 7 aa, Artificial sequence
  Protein classification predicting sequence
DKHKVNI

SEQ ID NO: 65106 - protein, 7 aa, Artificial sequence
  Protein classification predicting sequence
SSLRLLG

SEQ ID NO: 65107 - protein, 13 aa, Artificial sequence
  Protein classification predicting sequence
VGEPINPEAWEWY

SEQ ID NO: 65108 - protein, 10 aa, Artificial sequence
  Protein classification predicting sequence
YFTGDGCRRD

SEQ ID NO: 65109 - protein, 8 aa, Artificial sequence
  Protein classification predicting sequence
ATTLMFEG

SEQ ID NO: 65110 - protein, 9 aa, Artificial sequence
  Protein classification predicting sequence
GSATRPFFG

SEQ ID NO: 65111 - protein, 7 aa, Artificial sequence
  Protein classification predicting sequence
IKGQGIY

SEQ ID NO: 65112 - protein, 9 aa, Artificial sequence
  Protein classification predicting sequence
RFWEVIDKH

SEQ ID NO: 65113 - protein, 16 aa, Artificial sequence
  Protein classification predicting sequence
PIVDTWWQTETGGILI

SEQ ID NO: 65114 - protein, 6 aa, Artificial sequence
  Protein classification predicting sequence
DSWPGQ

SEQ ID NO: 65115 - protein, 7 aa, Artificial sequence
  Protein classification predicting sequence
RFVDTYF

SEQ ID NO: 65116 - protein, 11 aa, Artificial sequence
  Protein classification predicting sequence
SFAPGNVSIKW

SEQ ID NO: 65117 - protein, 5 aa, Artificial sequence
  Protein classification predicting sequence
VSIKW

SEQ ID NO: 65118 - protein, 7 aa, Artificial sequence
  Protein classification predicting sequence
NCIDRHL

SEQ ID NO: 65119 - protein, 7 aa, Artificial sequence
  Protein classification predicting sequence
PVKKTSR

SEQ ID NO: 65120 - protein, 8 aa, Artificial sequence
  Protein classification predicting sequence
MRTVYGDH

SEQ ID NO: 65121 - protein, 9 aa, Artificial sequence
  Protein classification predicting sequence
RFEQTYFST

SEQ ID NO: 65122 - protein, 7 aa, Artificial sequence
  Protein classification predicting sequence
ESALVAH

SEQ ID NO: 65123 - protein, 6 aa, Artificial sequence
  Protein classification predicting sequence
NRQNKK

SEQ ID NO: 65124 - protein, 7 aa, Artificial sequence
  Protein classification predicting sequence
KPFTKVK

SEQ ID NO: 65125 - protein, 7 aa, Artificial sequence
  Protein classification predicting sequence
IKWYEDG

SEQ ID NO: 65126 - protein, 11 aa, Artificial sequence
  Protein classification predicting sequence
GFSPEALAGRI

SEQ ID NO: 65127 - protein, 10 aa, Artificial sequence
  Protein classification predicting sequence
PIVDTWWQTE

SEQ ID NO: 65128 - protein, 7 aa, Artificial sequence
  Protein classification predicting sequence
ESALVSH

SEQ ID NO: 65129 - protein, 7 aa, Artificial sequence
  Protein classification predicting sequence
VGEPINP

SEQ ID NO: 65130 - protein, 13 aa, Artificial sequence
  Protein classification predicting sequence
PIVDTWWQTETGG

SEQ ID NO: 65131 - protein, 11 aa, Artificial sequence
  Protein classification predicting sequence
VDTWWQTETGG

SEQ ID NO: 65132 - protein, 7 aa, Artificial sequence
  Protein classification predicting sequence
WQTETGG

SEQ ID NO: 65133 - protein, 7 aa, Artificial sequence
  Protein classification predicting sequence
TLPLPGI

SEQ ID NO: 65134 - protein, 7 aa, Artificial sequence
  Protein classification predicting sequence
DEGRRGG

SEQ ID NO: 65135 - protein, 7 aa, Artificial sequence
  Protein classification predicting sequence
YVVYGPL

SEQ ID NO: 65136 - protein, 8 aa, Artificial sequence
  Protein classification predicting sequence
IFYTAPTA

SEQ ID NO: 65137 - protein, 7 aa, Artificial sequence
  Protein classification predicting sequence
RALMREG

SEQ ID NO: 65138 - protein, 8 aa, Artificial sequence
  Protein classification predicting sequence
GATEGNLV

SEQ ID NO: 65139 - protein, 6 aa, Artificial sequence
  Protein classification predicting sequence
AIIWEG

SEQ ID NO: 65140 - protein, 17 aa, Artificial sequence
  Protein classification predicting sequence
VDSEHPLFLLYTSGSTG

SEQ ID NO: 65141 - protein, 6 aa, Artificial sequence
  Protein classification predicting sequence
FKYVFD

SEQ ID NO: 65142 - protein, 9 aa, Artificial sequence
  Protein classification predicting sequence
DLSSLRLLG

SEQ ID NO: 65143 - protein, 10 aa, Artificial sequence
  Protein classification predicting sequence
VGEPINPEAW

SEQ ID NO: 65144 - protein, 7 aa, Artificial sequence
  Protein classification predicting sequence
NVSGHRL

SEQ ID NO: 65145 - protein, 7 aa, Artificial sequence
  Protein classification predicting sequence
VAEAAVV

SEQ ID NO: 65146 - protein, 6 aa, Artificial sequence
  Protein classification predicting sequence
ITSDEG

SEQ ID NO: 65147 - protein, 6 aa, Artificial sequence
  Protein classification predicting sequence
RDVWWH

SEQ ID NO: 65148 - protein, 11 aa, Artificial sequence
  Protein classification predicting sequence
IVDTFWQTETG

SEQ ID NO: 65149 - protein, 6 aa, Artificial sequence
  Protein classification predicting sequence
WQTETG

SEQ ID NO: 65150 - protein, 6 aa, Artificial sequence
  Protein classification predicting sequence
YGDHQR

SEQ ID NO: 65151 - protein, 6 aa, Artificial sequence
  Protein classification predicting sequence
KPYPGY

SEQ ID NO: 65152 - protein, 6 aa, Artificial sequence
  Protein classification predicting sequence
VVFAGF

SEQ ID NO: 65153 - protein, 8 aa, Artificial sequence
  Protein classification predicting sequence
DIGWITGH

SEQ ID NO: 65154 - protein, 6 aa, Artificial sequence
  Protein classification predicting sequence
DRSSLR

SEQ ID NO: 65155 - protein, 6 aa, Artificial sequence
  Protein classification predicting sequence
VFGGFS

SEQ ID NO: 65156 - protein, 7 aa, Artificial sequence
  Protein classification predicting sequence
DSEHPLF

SEQ ID NO: 65157 - protein, 6 aa, Artificial sequence
  Protein classification predicting sequence
HTTGGY

SEQ ID NO: 65158 - protein, 10 aa, Artificial sequence
  Protein classification predicting sequence
VDTWWQTETG

SEQ ID NO: 65159 - protein, 6 aa, Artificial sequence
  Protein classification predicting sequence
VCRFAN

SEQ ID NO: 65160 - protein, 6 aa, Artificial sequence
  Protein classification predicting sequence
VFAGFS

SEQ ID NO: 65161 - protein, 17 aa, Artificial sequence
  Protein classification predicting sequence
LYTSGSTGKPKGVLHTT

SEQ ID NO: 65162 - protein, 8 aa, Artificial sequence
  Protein classification predicting sequence
WCTADVGW

SEQ ID NO: 65163 - protein, 7 aa, Artificial sequence
  Protein classification predicting sequence
PFFGVKP

SEQ ID NO: 65164 - protein, 15 aa, Artificial sequence
  Protein classification predicting sequence
PDTFWGEQGKILDWI

SEQ ID NO: 65165 - protein, 18 aa, Artificial sequence
  Protein classification predicting sequence
YYWITGRVDDVLNVSGHR

SEQ ID NO: 65166 - protein, 15 aa, Artificial sequence
  Protein classification predicting sequence
GDTSNLGDTSTLADP

SEQ ID NO: 65167 - protein, 10 aa, Artificial sequence
  Protein classification predicting sequence
LGDTSTLADP

SEQ ID NO: 65168 - protein, 7 aa, Artificial sequence
  Protein classification predicting sequence
PKGVQHS

SEQ ID NO: 65169 - protein, 7 aa, Artificial sequence
  Protein classification predicting sequence
TFKYVFD

SEQ ID NO: 65170 - protein, 6 aa, Artificial sequence
  Protein classification predicting sequence
MRTVYG

SEQ ID NO: 65171 - protein, 8 aa, Artificial sequence
  Protein classification predicting sequence
IGPIATPD

SEQ ID NO: 65172 - protein, 6 aa, Artificial sequence
  Protein classification predicting sequence
NVSYNC

SEQ ID NO: 65173 - protein, 8 aa, Artificial sequence
  Protein classification predicting sequence
LACTRIGA

SEQ ID NO: 65174 - protein, 7 aa, Artificial sequence
  Protein classification predicting sequence
PFFGVQP

SEQ ID NO: 65175 - protein, 5 aa, Artificial sequence
  Protein classification predicting sequence
PWPSM

SEQ ID NO: 65176 - protein, 8 aa, Artificial sequence
  Protein classification predicting sequence
VAEAAVVG

SEQ ID NO: 65177 - protein, 20 aa, Artificial sequence
  Protein classification predicting sequence
APGLPKTRSGKIMRRILRKI

SEQ ID NO: 65178 - protein, 6 aa, Artificial sequence
  Protein classification predicting sequence
AMLACA

SEQ ID NO: 65179 - protein, 6 aa, Artificial sequence
  Protein classification predicting sequence
YTAPTA

SEQ ID NO: 65180 - protein, 8 aa, Artificial sequence
  Protein classification predicting sequence
RSGKIMRR

SEQ ID NO: 65181 - protein, 7 aa, Artificial sequence
  Protein classification predicting sequence
AMLACAR

SEQ ID NO: 65182 - protein, 8 aa, Artificial sequence
  Protein classification predicting sequence
VLVVRRTG

SEQ ID NO: 65183 - protein, 7 aa, Artificial sequence
  Protein classification predicting sequence
AEAAVVG

SEQ ID NO: 65184 - protein, 6 aa, Artificial sequence
  Protein classification predicting sequence
PFYKWF

SEQ ID NO: 65185 - protein, 6 aa, Artificial sequence
  Protein classification predicting sequence
GRDLWW

SEQ ID NO: 65186 - protein, 21 aa, Artificial sequence
  Protein classification predicting sequence
MNAEDPLFILYTSGSTGKPKG

SEQ ID NO: 65187 - protein, 12 aa, Artificial sequence
  Protein classification predicting sequence
LYTSGSTGKPKG

SEQ ID NO: 65188 - protein, 6 aa, Artificial sequence
  Protein classification predicting sequence
GWITGH

SEQ ID NO: 65189 - protein, 10 aa, Artificial sequence
  Protein classification predicting sequence
PKVAEAAVVG

SEQ ID NO: 65190 - protein, 8 aa, Artificial sequence
  Protein classification predicting sequence
LGSVGEPI

SEQ ID NO: 65191 - protein, 9 aa, Artificial sequence
  Protein classification predicting sequence
GYYFTGDGA

SEQ ID NO: 65192 - protein, 6 aa, Artificial sequence
  Protein classification predicting sequence
AEDPLF

SEQ ID NO: 65193 - protein, 7 aa, Artificial sequence
  Protein classification predicting sequence
PSMARSV

SEQ ID NO: 65194 - protein, 7 aa, Artificial sequence
  Protein classification predicting sequence
IGPFAAP

SEQ ID NO: 65195 - protein, 11 aa, Artificial sequence
  Protein classification predicting sequence
PKTRSGKIMRR

SEQ ID NO: 65196 - protein, 11 aa, Artificial sequence
  Protein classification predicting sequence
YTAPTAIRALM

SEQ ID NO: 65197 - protein, 8 aa, Artificial sequence
  Protein classification predicting sequence
TLADPSVV

SEQ ID NO: 65198 - protein, 6 aa, Artificial sequence
  Protein classification predicting sequence
ITADEG

SEQ ID NO: 65199 - protein, 6 aa, Artificial sequence
  Protein classification predicting sequence
KGQGIY

SEQ ID NO: 65200 - protein, 11 aa, Artificial sequence
  Protein classification predicting sequence
SVGEPINPEAW

SEQ ID NO: 65201 - protein, 12 aa, Artificial sequence
  Protein classification predicting sequence
LPKTRSGKIMRR

SEQ ID NO: 65202 - protein, 10 aa, Artificial sequence
  Protein classification predicting sequence
DDVLNVSGHR

SEQ ID NO: 65203 - protein, 7 aa, Artificial sequence
  Protein classification predicting sequence
EIESALV

SEQ ID NO: 65204 - protein, 6 aa, Artificial sequence
  Protein classification predicting sequence
DNDTYL

SEQ ID NO: 65205 - protein, 12 aa, Artificial sequence
  Protein classification predicting sequence
SLRVLGSVGEPI

SEQ ID NO: 65206 - protein, 13 aa, Artificial sequence
  Protein classification predicting sequence
LGSVGEPINPEAW

SEQ ID NO: 65207 - protein, 16 aa, Artificial sequence
  Protein classification predicting sequence
LGSVGEPINPEAWEWY

SEQ ID NO: 65208 - protein, 10 aa, Artificial sequence
  Protein classification predicting sequence
GSATRPFFGV

SEQ ID NO: 65209 - protein, 6 aa, Artificial sequence
  Protein classification predicting sequence
QTYFST

SEQ ID NO: 65210 - protein, 9 aa, Artificial sequence
  Protein classification predicting sequence
INPEAWMWY

SEQ ID NO: 65211 - protein, 7 aa, Artificial sequence
  Protein classification predicting sequence
LNASVNC

SEQ ID NO: 65212 - protein, 6 aa, Artificial sequence
  Protein classification predicting sequence
KPGSAT

SEQ ID NO: 65213 - protein, 13 aa, Artificial sequence
  Protein classification predicting sequence
IPANIADRCLINP

SEQ ID NO: 65214 - protein, 14 aa, Artificial sequence
  Protein classification predicting sequence
ELHRDVCRFANTLL

SEQ ID NO: 65215 - protein, 8 aa, Artificial sequence
  Protein classification predicting sequence
FGGFSPEA

SEQ ID NO: 65216 - protein, 11 aa, Artificial sequence
  Protein classification predicting sequence
IDWQEGRDLWW

SEQ ID NO: 65217 - protein, 7 aa, Artificial sequence
  Protein classification predicting sequence
ITPLPGA

SEQ ID NO: 65218 - protein, 8 aa, Artificial sequence
  Protein classification predicting sequence
AIIWEGDD

SEQ ID NO: 65219 - protein, 8 aa, Artificial sequence
  Protein classification predicting sequence
SQSKHISY

SEQ ID NO: 65220 - protein, 31 aa, Artificial sequence
  Protein classification predicting sequence
DEGVRAGRSIPLKKNVDDALKNPNVTSVEHV

SEQ ID NO: 65221 - protein, 55 aa, Artificial sequence
  Protein classification predicting sequence
TFKYVFDYHPGDIYWCTADVGWVTGHSYLLYGPLACGATTLMFEGVPNWPTPARM

SEQ ID NO: 65222 - protein, 25 aa, Artificial sequence
  Protein classification predicting sequence
EKCPVVDTWWQTETGGFMITPLPGA

SEQ ID NO: 65223 - protein, 11 aa, Artificial sequence
  Protein classification predicting sequence
VLKRTGGKIDW

SEQ ID NO: 65224 - protein, 7 aa, Artificial sequence
  Protein classification predicting sequence
VYASMTH

SEQ ID NO: 65225 - protein, 8 aa, Artificial sequence
  Protein classification predicting sequence
IRALMAEG

SEQ ID NO: 65226 - protein, 12 aa, Artificial sequence
  Protein classification predicting sequence
GSVGEPINPEAW

SEQ ID NO: 65227 - protein, 17 aa, Artificial sequence
  Protein classification predicting sequence
GSATRPFFGVQPALVDN

SEQ ID NO: 65228 - protein, 6 aa, Artificial sequence
  Protein classification predicting sequence
STLADP

SEQ ID NO: 65229 - protein, 7 aa, Artificial sequence
  Protein classification predicting sequence
YFAGDGA

SEQ ID NO: 65230 - protein, 22 aa, Artificial sequence
  Protein classification predicting sequence
ELPKTRSGKIMRRLLRDVAENR

SEQ ID NO: 65231 - protein, 15 aa, Artificial sequence
  Protein classification predicting sequence
LNVAYNCVDRHVEAG

SEQ ID NO: 65232 - protein, 9 aa, Artificial sequence
  Protein classification predicting sequence
NVSGHRLGT

SEQ ID NO: 65233 - protein, 22 aa, Artificial sequence
  Protein classification predicting sequence
DIRWFEDGTLNVSANCIDRHLA

SEQ ID NO: 65234 - protein, 5 aa, Artificial sequence
  Protein classification predicting sequence
IYMPM

SEQ ID NO: 65235 - protein, 11 aa, Artificial sequence
  Protein classification predicting sequence
VITADEGVRGG

SEQ ID NO: 65236 - protein, 24 aa, Artificial sequence
  Protein classification predicting sequence
VITADEGVRGGRAVPLKKNVDEAL

SEQ ID NO: 65237 - protein, 8 aa, Artificial sequence
  Protein classification predicting sequence
WWHEATAK

SEQ ID NO: 65238 - protein, 8 aa, Artificial sequence
  Protein classification predicting sequence
FEGVPNYP

SEQ ID NO: 65239 - protein, 9 aa, Artificial sequence
  Protein classification predicting sequence
RMSEVVDKH

SEQ ID NO: 65240 - protein, 13 aa, Artificial sequence
  Protein classification predicting sequence
VNILYTAPTAIRA

SEQ ID NO: 65241 - protein, 16 aa, Artificial sequence
  Protein classification predicting sequence
VNILYTAPTAIRALMA

SEQ ID NO: 65242 - protein, 11 aa, Artificial sequence
  Protein classification predicting sequence
RFEQTYFSTFK

SEQ ID NO: 65243 - protein, 9 aa, Artificial sequence
  Protein classification predicting sequence
KIAEAAVVG

SEQ ID NO: 65244 - protein, 9 aa, Artificial sequence
  Protein classification predicting sequence
IKGQAIYAY

SEQ ID NO: 65245 - protein, 10 aa, Artificial sequence
  Protein classification predicting sequence
ATPDVLHWTD

SEQ ID NO: 65246 - protein, 16 aa, Artificial sequence
  Protein classification predicting sequence
EHGKIVDWIKPFTKVK

SEQ ID NO: 65247 - protein, 31 aa, Artificial sequence
  Protein classification predicting sequence
AEDPLFILYTSGSTGKPKGVLHTTGGYLVYA

SEQ ID NO: 65248 - protein, 8 aa, Artificial sequence
  Protein classification predicting sequence
YGPLANGA

SEQ ID NO: 65249 - protein, 27 aa, Artificial sequence
  Protein classification predicting sequence
DGARRDEDGYYWITGRVDDVLNVSGHR

SEQ ID NO: 65250 - protein, 7 aa, Artificial sequence
  Protein classification predicting sequence
AGRIIDS

SEQ ID NO: 65251 - protein, 12 aa, Artificial sequence
  Protein classification predicting sequence
AIEGTDRSSLRI

SEQ ID NO: 65252 - protein, 13 aa, Artificial sequence
  Protein classification predicting sequence
IKGQAIYAYVTLN

SEQ ID NO: 65253 - protein, 17 aa, Artificial sequence
  Protein classification predicting sequence
SLRLLGSVGEPINPEAW

SEQ ID NO: 65254 - protein, 11 aa, Artificial sequence
  Protein classification predicting sequence
PFFGVQPALVD

SEQ ID NO: 65255 - protein, 8 aa, Artificial sequence
  Protein classification predicting sequence
DSWPGQMR

SEQ ID NO: 65256 - protein, 7 aa, Artificial sequence
  Protein classification predicting sequence
IRWFEDG

SEQ ID NO: 65257 - protein, 9 aa, Artificial sequence
  Protein classification predicting sequence
FYTAPTAIR

SEQ ID NO: 65258 - protein, 8 aa, Artificial sequence
  Protein classification predicting sequence
FWGEQGKI

SEQ ID NO: 65259 - protein, 6 aa, Artificial sequence
  Protein classification predicting sequence
VKNTSF

SEQ ID NO: 65260 - protein, 16 aa, Artificial sequence
  Protein classification predicting sequence
EDGTLNLAANCLDRHL

SEQ ID NO: 65261 - protein, 39 aa, Artificial sequence
  Protein classification predicting sequence
KKGDVVAIYMPMVPEAAVAMLACARIGAVHSVIFGGFSP

SEQ ID NO: 65262 - protein, 7 aa, Artificial sequence
  Protein classification predicting sequence
PLKKNVD

SEQ ID NO: 65263 - protein, 25 aa, Artificial sequence
  Protein classification predicting sequence
VNILYTAPTAIRALMAEGDKAIEGT

SEQ ID NO: 65264 - protein, 6 aa, Artificial sequence
  Protein classification predicting sequence
PALVDN

SEQ ID NO: 65265 - protein, 15 aa, Artificial sequence
  Protein classification predicting sequence
GDHERFEQTYFSTFK

SEQ ID NO: 65266 - protein, 8 aa, Artificial sequence
  Protein classification predicting sequence
TLNHGEEP

SEQ ID NO: 65267 - protein, 17 aa, Artificial sequence
  Protein classification predicting sequence
EVRNWVRKEIGPLATPD

SEQ ID NO: 65268 - protein, 37 aa, Artificial sequence
  Protein classification predicting sequence
LPKTRSGKIMRRILRKIATGDTSNLGDTSTLADPSVV

SEQ ID NO: 65269 - protein, 13 aa, Artificial sequence
  Protein classification predicting sequence
LGDTSTLADPSVV

SEQ ID NO: 65270 - protein, 10 aa, Artificial sequence
  Protein classification predicting sequence
VVEKLLEEKQ

SEQ ID NO: 65271 - protein, 13 aa, Artificial sequence
  Protein classification predicting sequence
YSMVVVPLYDTLG

SEQ ID NO: 65272 - protein, 6 aa, Artificial sequence
  Protein classification predicting sequence
LPLAHM

SEQ ID NO: 65273 - protein, 25 aa, Artificial sequence
  Protein classification predicting sequence
CVMLCHGAKIGFFQGDIRLLMDDLK

SEQ ID NO: 65274 - protein, 16 aa, Artificial sequence
  Protein classification predicting sequence
PGDWTAGHVGAPMPCN

SEQ ID NO: 65275 - protein, 31 aa, Artificial sequence
  Protein classification predicting sequence
RQYVRTLPTNTLMGFGAFAALTTFWYATRPK

SEQ ID NO: 65276 - protein, 8 aa, Artificial sequence
  Protein classification predicting sequence
VPLYDTLG

SEQ ID NO: 65277 - protein, 12 aa, Artificial sequence
  Protein classification predicting sequence
AITYIVNKAELS

SEQ ID NO: 65278 - protein, 7 aa, Artificial sequence
  Protein classification predicting sequence
RKPNQPY

SEQ ID NO: 65279 - protein, 8 aa, Artificial sequence
  Protein classification predicting sequence
LPLAHMFE

SEQ ID NO: 65280 - protein, 8 aa, Artificial sequence
  Protein classification predicting sequence
KAILEDMV

SEQ ID NO: 65281 - protein, 8 aa, Artificial sequence
  Protein classification predicting sequence
PLIDNICA

SEQ ID NO: 65282 - protein, 6 aa, Artificial sequence
  Protein classification predicting sequence
SMQSVE

SEQ ID NO: 65283 - protein, 7 aa, Artificial sequence
  Protein classification predicting sequence
DIERMYG

SEQ ID NO: 65284 - protein, 8 aa, Artificial sequence
  Protein classification predicting sequence
FAQNRPEW

SEQ ID NO: 65285 - protein, 10 aa, Artificial sequence
  Protein classification predicting sequence
GFFQGDIRLL

SEQ ID NO: 65286 - protein, 6 aa, Artificial sequence
  Protein classification predicting sequence
WDKLIF

SEQ ID NO: 65287 - protein, 6 aa, Artificial sequence
  Protein classification predicting sequence
GCQVYE

SEQ ID NO: 65288 - protein, 7 aa, Artificial sequence
  Protein classification predicting sequence
YGQTECT

SEQ ID NO: 65289 - protein, 10 aa, Artificial sequence
  Protein classification predicting sequence
PGDWTSGHVG

SEQ ID NO: 65290 - protein, 7 aa, Artificial sequence
  Protein classification predicting sequence
FVHGESL

SEQ ID NO: 65291 - protein, 7 aa, Artificial sequence
  Protein classification predicting sequence
GSFEELC

SEQ ID NO: 65292 - protein, 12 aa, Artificial sequence
  Protein classification predicting sequence
NGLLTPTLKAKR

SEQ ID NO: 65293 - protein, 7 aa, Artificial sequence
  Protein classification predicting sequence
KGAMLTH

SEQ ID NO: 65294 - protein, 10 aa, Artificial sequence
  Protein classification predicting sequence
PGDWTAGHVG

SEQ ID NO: 65295 - protein, 10 aa, Artificial sequence
  Protein classification predicting sequence
YGQTECTAGC

SEQ ID NO: 65296 - protein, 14 aa, Artificial sequence
  Protein classification predicting sequence
CFTSGTTGNPKGAM

SEQ ID NO: 65297 - protein, 14 aa, Artificial sequence
  Protein classification predicting sequence
DGWLHTGDIGKWLP

SEQ ID NO: 65298 - protein, 11 aa, Artificial sequence
  Protein classification predicting sequence
HIGEVQSSVWP

SEQ ID NO: 65299 - protein, 8 aa, Artificial sequence
  Protein classification predicting sequence
YTDMNAIR

SEQ ID NO: 65300 - protein, 8 aa, Artificial sequence
  Protein classification predicting sequence
YVDQWDWE

SEQ ID NO: 65301 - protein, 7 aa, Artificial sequence
  Protein classification predicting sequence
RAPDYDD

SEQ ID NO: 65302 - protein, 7 aa, Artificial sequence
  Protein classification predicting sequence
KEFGAVF

SEQ ID NO: 65303 - protein, 7 aa, Artificial sequence
  Protein classification predicting sequence
IAIKEVK

SEQ ID NO: 65304 - protein, 7 aa, Artificial sequence
  Protein classification predicting sequence
LNGVERP

SEQ ID NO: 65305 - protein, 9 aa, Artificial sequence
  Protein classification predicting sequence
SGEKHDGRA

SEQ ID NO: 65306 - protein, 6 aa, Artificial sequence
  Protein classification predicting sequence
LNGDIL

SEQ ID NO: 65307 - protein, 10 aa, Artificial sequence
  Protein classification predicting sequence
TIGGGIGQSR

SEQ ID NO: 65308 - protein, 13 aa, Artificial sequence
  Protein classification predicting sequence
TIGGGIGQSRMCM

SEQ ID NO: 65309 - protein, 11 aa, Artificial sequence
  Protein classification predicting sequence
EISFVKNTFTQ

SEQ ID NO: 65310 - protein, 11 aa, Artificial sequence
  Protein classification predicting sequence
HSVYVDQWDWE

SEQ ID NO: 65311 - protein, 8 aa, Artificial sequence
  Protein classification predicting sequence
RAPDYDDW

SEQ ID NO: 65312 - protein, 7 aa, Artificial sequence
  Protein classification predicting sequence
SSMGIRV

SEQ ID NO: 65313 - protein, 11 aa, Artificial sequence
  Protein classification predicting sequence
YVDQWDWEKVI

SEQ ID NO: 65314 - protein, 7 aa, Artificial sequence
  Protein classification predicting sequence
SLAKWKR

SEQ ID NO: 65315 - protein, 6 aa, Artificial sequence
  Protein classification predicting sequence
PDYDDW

SEQ ID NO: 65316 - protein, 11 aa, Artificial sequence
  Protein classification predicting sequence
HSIYVDQWDWE

SEQ ID NO: 65317 - protein, 10 aa, Artificial sequence
  Protein classification predicting sequence
ALRPDEDSLD

SEQ ID NO: 65318 - protein, 7 aa, Artificial sequence
  Protein classification predicting sequence
KERENAI

SEQ ID NO: 65319 - protein, 11 aa, Artificial sequence
  Protein classification predicting sequence
HDVRAPDYDDW

SEQ ID NO: 65320 - protein, 8 aa, Artificial sequence
  Protein classification predicting sequence
KKHIGEVQ

SEQ ID NO: 65321 - protein, 8 aa, Artificial sequence
  Protein classification predicting sequence
EVQGPILS

SEQ ID NO: 65322 - protein, 9 aa, Artificial sequence
  Protein classification predicting sequence
EKAVQVKVK

SEQ ID NO: 65323 - protein, 9 aa, Artificial sequence
  Protein classification predicting sequence
VHSLAKWKR

SEQ ID NO: 65324 - protein, 14 aa, Artificial sequence
  Protein classification predicting sequence
PDLDAKGRERAIAK

SEQ ID NO: 65325 - protein, 9 aa, Artificial sequence
  Protein classification predicting sequence
GAVFLIGIG

SEQ ID NO: 65326 - protein, 11 aa, Artificial sequence
  Protein classification predicting sequence
VWNPVLEDAFE

SEQ ID NO: 65327 - protein, 7 aa, Artificial sequence
  Protein classification predicting sequence
HIGQVQC

SEQ ID NO: 65328 - protein, 16 aa, Artificial sequence
  Protein classification predicting sequence
LGAVFLVGIGGKLSDG

SEQ ID NO: 65329 - protein, 13 aa, Artificial sequence
  Protein classification predicting sequence
RHDVRAPDYDDWS

SEQ ID NO: 65330 - protein, 32 aa, Artificial sequence
  Protein classification predicting sequence
AGLNGDILVWNPVLEDAFELSSMGIRVDADTL

SEQ ID NO: 65331 - protein, 8 aa, Artificial sequence
  Protein classification predicting sequence
FVHSQELL

SEQ ID NO: 65332 - protein, 12 aa, Artificial sequence
  Protein classification predicting sequence
FEVVHSLAKWKR

SEQ ID NO: 65333 - protein, 26 aa, Artificial sequence
  Protein classification predicting sequence
FEVVHSLAKWKRHTLARFGFNEGEGL

SEQ ID NO: 65334 - protein, 10 aa, Artificial sequence
  Protein classification predicting sequence
ITFIHTEELV

SEQ ID NO: 65335 - protein, 9 aa, Artificial sequence
  Protein classification predicting sequence
PILSRVGDG

SEQ ID NO: 65336 - protein, 10 aa, Artificial sequence
  Protein classification predicting sequence
GLNGDILVWN

SEQ ID NO: 65337 - protein, 10 aa, Artificial sequence
  Protein classification predicting sequence
GAVFLIGIGG

SEQ ID NO: 65338 - protein, 31 aa, Artificial sequence
  Protein classification predicting sequence
LPDGKPHDGRAPDYDDWTTETENGYHGLNGD

SEQ ID NO: 65339 - protein, 11 aa, Artificial sequence
  Protein classification predicting sequence
EVVHSLAKWKR

SEQ ID NO: 65340 - protein, 11 aa, Artificial sequence
  Protein classification predicting sequence
IRLTELAVEAR

SEQ ID NO: 65341 - protein, 13 aa, Artificial sequence
  Protein classification predicting sequence
YPDLTPKERENAI

SEQ ID NO: 65342 - protein, 7 aa, Artificial sequence
  Protein classification predicting sequence
TGDEDRL

SEQ ID NO: 65343 - protein, 23 aa, Artificial sequence
  Protein classification predicting sequence
WHKSLLNGLFPLTIGGGIGQSRM

SEQ ID NO: 65344 - protein, 16 aa, Artificial sequence
  Protein classification predicting sequence
HIGEVQTSVWPQEVRD

SEQ ID NO: 65345 - protein, 7 aa, Artificial sequence
  Protein classification predicting sequence
ALRPDED

SEQ ID NO: 65346 - protein, 7 aa, Artificial sequence
  Protein classification predicting sequence
VDQWDWE

SEQ ID NO: 65347 - protein, 10 aa, Artificial sequence
  Protein classification predicting sequence
IGGGIGQSRL

SEQ ID NO: 65348 - protein, 6 aa, Artificial sequence
  Protein classification predicting sequence
HIGEVQ

SEQ ID NO: 65349 - protein, 24 aa, Artificial sequence
  Protein classification predicting sequence
LGLIEVQAPILSRVGDGTQDNLSG

SEQ ID NO: 65350 - protein, 19 aa, Artificial sequence
  Protein classification predicting sequence
HSVYVDQWDWERVMGDGER

SEQ ID NO: 65351 - protein, 19 aa, Artificial sequence
  Protein classification predicting sequence
LLRGEMPQTIGGGIGQSRL

SEQ ID NO: 65352 - protein, 6 aa, Artificial sequence
  Protein classification predicting sequence
NGEIYN

SEQ ID NO: 65353 - protein, 7 aa, Artificial sequence
  Protein classification predicting sequence
GSPDLKA

SEQ ID NO: 65354 - protein, 14 aa, Artificial sequence
  Protein classification predicting sequence
ETYDVTTIRASTPM

SEQ ID NO: 65355 - protein, 7 aa, Artificial sequence
  Protein classification predicting sequence
LMSRKIK

SEQ ID NO: 65356 - protein, 7 aa, Artificial sequence
  Protein classification predicting sequence
SGEGSDE

SEQ ID NO: 65357 - protein, 16 aa, Artificial sequence
  Protein classification predicting sequence
RQKEQFSDGVGYSWID

SEQ ID NO: 65358 - protein, 10 aa, Artificial sequence
  Protein classification predicting sequence
VPGGPSVACS

SEQ ID NO: 65359 - protein, 13 aa, Artificial sequence
  Protein classification predicting sequence
QDGIDAIEDVIYH

SEQ ID NO: 65360 - protein, 12 aa, Artificial sequence
  Protein classification predicting sequence
TPMFLMSRKIKS

SEQ ID NO: 65361 - protein, 10 aa, Artificial sequence
  Protein classification predicting sequence
ETCRKIKALH

SEQ ID NO: 65362 - protein, 7 aa, Artificial sequence
  Protein classification predicting sequence
DCLRANK

SEQ ID NO: 65363 - protein, 7 aa, Artificial sequence
  Protein classification predicting sequence
VTVNGEI

SEQ ID NO: 65364 - protein, 14 aa, Artificial sequence
  Protein classification predicting sequence
VARDAIGVTSLYIG

SEQ ID NO: 65365 - protein, 10 aa, Artificial sequence
  Protein classification predicting sequence
LHSFCVGLEG

SEQ ID NO: 65366 - protein, 9 aa, Artificial sequence
  Protein classification predicting sequence
SGEGSDEIF

SEQ ID NO: 65367 - protein, 11 aa, Artificial sequence
  Protein classification predicting sequence
VTVNGEIYNHE

SEQ ID NO: 65368 - protein, 6 aa, Artificial sequence
  Protein classification predicting sequence
ETYDVT

SEQ ID NO: 65369 - protein, 8 aa, Artificial sequence
  Protein classification predicting sequence
VIAHLYEE

SEQ ID NO: 65370 - protein, 7 aa, Artificial sequence
  Protein classification predicting sequence
WYNPPWF

SEQ ID NO: 65371 - protein, 9 aa, Artificial sequence
  Protein classification predicting sequence
IPSAPYDPL

SEQ ID NO: 65372 - protein, 11 aa, Artificial sequence
  Protein classification predicting sequence
RKIKSLGVKMV

SEQ ID NO: 65373 - protein, 9 aa, Artificial sequence
  Protein classification predicting sequence
GRIEKWVLR

SEQ ID NO: 65374 - protein, 8 aa, Artificial sequence
  Protein classification predicting sequence
HAAKHVTD

SEQ ID NO: 65375 - protein, 7 aa, Artificial sequence
  Protein classification predicting sequence
ACSTAKA

SEQ ID NO: 65376 - protein, 8 aa, Artificial sequence
  Protein classification predicting sequence
YDCLRANK

SEQ ID NO: 65377 - protein, 12 aa, Artificial sequence
  Protein classification predicting sequence
YDCLRANKATSA

SEQ ID NO: 65378 - protein, 27 aa, Artificial sequence
  Protein classification predicting sequence
CLSVQCLSAMKIAHRGPDAFRFENVNG

SEQ ID NO: 65379 - protein, 14 aa, Artificial sequence
  Protein classification predicting sequence
TNCCFGFHRLAVVD

SEQ ID NO: 65380 - protein, 13 aa, Artificial sequence
  Protein classification predicting sequence
PYLWLCYNGEIYN

SEQ ID NO: 65381 - protein, 11 aa, Artificial sequence
  Protein classification predicting sequence
RDTYGVRPLFK

SEQ ID NO: 65382 - protein, 8 aa, Artificial sequence
  Protein classification predicting sequence
VCSEAKGL

SEQ ID NO: 65383 - protein, 17 aa, Artificial sequence
  Protein classification predicting sequence
KVEPFLPGHYEVLDLKP

SEQ ID NO: 65384 - protein, 18 aa, Artificial sequence
  Protein classification predicting sequence
RRIGCLLSGGLDSSLVAA

SEQ ID NO: 65385 - protein, 11 aa, Artificial sequence
  Protein classification predicting sequence
YPLQTFAIGME

SEQ ID NO: 65386 - protein, 11 aa, Artificial sequence
  Protein classification predicting sequence
SPDLLAARKVA

SEQ ID NO: 65387 - protein, 8 aa, Artificial sequence
  Protein classification predicting sequence
IGSEHHEV

SEQ ID NO: 65388 - protein, 17 aa, Artificial sequence
  Protein classification predicting sequence
EVIFSLETYDITTVRAS

SEQ ID NO: 65389 - protein, 29 aa, Artificial sequence
  Protein classification predicting sequence
TDSVVIFSGEGSDELTQGYIYFHKAPSPE

SEQ ID NO: 65390 - protein, 7 aa, Artificial sequence
  Protein classification predicting sequence
SYYLSLP

SEQ ID NO: 65391 - protein, 9 aa, Artificial sequence
  Protein classification predicting sequence
ATDPSARTL

SEQ ID NO: 65392 - protein, 7 aa, Artificial sequence
  Protein classification predicting sequence
NGEIYNH

SEQ ID NO: 65393 - protein, 6 aa, Artificial sequence
  Protein classification predicting sequence
KRLMTD

SEQ ID NO: 65394 - protein, 7 aa, Artificial sequence
  Protein classification predicting sequence
FEFEYQT

SEQ ID NO: 65395 - protein, 28 aa, Artificial sequence
  Protein classification predicting sequence
PKEILWRPKEAFSDGITSVKNSWFKILQ

SEQ ID NO: 65396 - protein, 6 aa, Artificial sequence
  Protein classification predicting sequence
SGDQPL

SEQ ID NO: 65397 - protein, 13 aa, Artificial sequence
  Protein classification predicting sequence
VTVNGEIYNHEEL

SEQ ID NO: 65398 - protein, 21 aa, Artificial sequence
  Protein classification predicting sequence
PYLPKHILYRQKEQFSDGVGY

SEQ ID NO: 65399 - protein, 6 aa, Artificial sequence
  Protein classification predicting sequence
WIDGLK

SEQ ID NO: 65400 - protein, 12 aa, Artificial sequence
  Protein classification predicting sequence
LLSGGLDSSLVA

SEQ ID NO: 65401 - protein, 11 aa, Artificial sequence
  Protein classification predicting sequence
ETVKNNLRILF

SEQ ID NO: 65402 - protein, 14 aa, Artificial sequence
  Protein classification predicting sequence
QKFPFNTPKTKEGY

SEQ ID NO: 65403 - protein, 8 aa, Artificial sequence
  Protein classification predicting sequence
FVLLDTRD

SEQ ID NO: 65404 - protein, 40 aa, Artificial sequence
  Protein classification predicting sequence
LQTFAIGMEDSPDLLAARKVANYIGSEHHEVLFNSEEGIQ

SEQ ID NO: 65405 - protein, 8 aa, Artificial sequence
  Protein classification predicting sequence
HRGPDWSG

SEQ ID NO: 65406 - protein, 7 aa, Artificial sequence
  Protein classification predicting sequence
FSFVLLD

SEQ ID NO: 65407 - protein, 8 aa, Artificial sequence
  Protein classification predicting sequence
TKEGYYYR

SEQ ID NO: 65408 - protein, 6 aa, Artificial sequence
  Protein classification predicting sequence
WDASWS

SEQ ID NO: 65409 - protein, 42 aa, Artificial sequence
  Protein classification predicting sequence
EDVREEFVRDFVFPMFRANAVYEGVYLLGTSIARPLISKHLI

SEQ ID NO: 65410 - protein, 7 aa, Artificial sequence
  Protein classification predicting sequence
NGIGRLD

SEQ ID NO: 65411 - protein, 51 aa, Artificial sequence
  Protein classification predicting sequence
NGIGRLDLVENRFVGMKSRGVYETPGGTILLAAHRAIESITLDRGAAHLKD

SEQ ID NO: 65412 - protein, 14 aa, Artificial sequence
  Protein classification predicting sequence
AHGCTGKGNDQVRF

SEQ ID NO: 65413 - protein, 6 aa, Artificial sequence
  Protein classification predicting sequence
SPYSID

SEQ ID NO: 65414 - protein, 10 aa, Artificial sequence
  Protein classification predicting sequence
LAYSGGLDTS

SEQ ID NO: 65415 - protein, 6 aa, Artificial sequence
  Protein classification predicting sequence
ADVGQG

SEQ ID NO: 65416 - protein, 6 aa, Artificial sequence
  Protein classification predicting sequence
APVREW

SEQ ID NO: 65417 - protein, 12 aa, Artificial sequence
  Protein classification predicting sequence
RLVGIKSREIYE

SEQ ID NO: 65418 - protein, 14 aa, Artificial sequence
  Protein classification predicting sequence
RLVGIKSREIYEAP

SEQ ID NO: 65419 - protein, 6 aa, Artificial sequence
  Protein classification predicting sequence
SPNSLY

SEQ ID NO: 65420 - protein, 8 aa, Artificial sequence
  Protein classification predicting sequence
KAKASGAS

SEQ ID NO: 65421 - protein, 6 aa, Artificial sequence
  Protein classification predicting sequence
APWREW

SEQ ID NO: 65422 - protein, 8 aa, Artificial sequence
  Protein classification predicting sequence
ESLTLDRE

SEQ ID NO: 65423 - protein, 6 aa, Artificial sequence
  Protein classification predicting sequence
LKLYKG

SEQ ID NO: 65424 - protein, 6 aa, Artificial sequence
  Protein classification predicting sequence
DAAGFI

SEQ ID NO: 65425 - protein, 11 aa, Artificial sequence
  Protein classification predicting sequence
AHGCTGKGNDQ

SEQ ID NO: 65426 - protein, 27 aa, Artificial sequence
  Protein classification predicting sequence
GVGRTDMIEDRVLGLKARENYEHPAAT

SEQ ID NO: 65427 - protein, 6 aa, Artificial sequence
  Protein classification predicting sequence
AHRDLE

SEQ ID NO: 65428 - protein, 7 aa, Artificial sequence
  Protein classification predicting sequence
AELVYYG

SEQ ID NO: 65429 - protein, 7 aa, Artificial sequence
  Protein classification predicting sequence
KVKLYKG

SEQ ID NO: 65430 - protein, 19 aa, Artificial sequence
  Protein classification predicting sequence
YEGEYLLGTSIARPLIAKR

SEQ ID NO: 65431 - protein, 7 aa, Artificial sequence
  Protein classification predicting sequence
AHRAIES

SEQ ID NO: 65432 - protein, 8 aa, Artificial sequence
  Protein classification predicting sequence
GYWWSPER

SEQ ID NO: 65433 - protein, 9 aa, Artificial sequence
  Protein classification predicting sequence
TFEDDQGAY

SEQ ID NO: 65434 - protein, 6 aa, Artificial sequence
  Protein classification predicting sequence
YNQKDA

SEQ ID NO: 65435 - protein, 12 aa, Artificial sequence
  Protein classification predicting sequence
AFLQETQKNVTG

SEQ ID NO: 65436 - protein, 53 aa, Artificial sequence
  Protein classification predicting sequence
ELIKTLNALAGKHGVGRIDHVENRLVGIKSREVYECPAAMTLITAHKELEDLT

SEQ ID NO: 65437 - protein, 7 aa, Artificial sequence
  Protein classification predicting sequence
FVKEKAL

SEQ ID NO: 65438 - protein, 6 aa, Artificial sequence
  Protein classification predicting sequence
YTIDAK

SEQ ID NO: 65439 - protein, 16 aa, Artificial sequence
  Protein classification predicting sequence
AVAHGCTGKGNDQVRF

SEQ ID NO: 65440 - protein, 10 aa, Artificial sequence
  Protein classification predicting sequence
APVREWAWSR

SEQ ID NO: 65441 - protein, 10 aa, Artificial sequence
  Protein classification predicting sequence
AHKELEDLTL

SEQ ID NO: 65442 - protein, 7 aa, Artificial sequence
  Protein classification predicting sequence
GLWFSPL

SEQ ID NO: 65443 - protein, 22 aa, Artificial sequence
  Protein classification predicting sequence
VRVKLFKGHAIVEGRKSEYSLY

SEQ ID NO: 65444 - protein, 6 aa, Artificial sequence
  Protein classification predicting sequence
GLPTKV

SEQ ID NO: 65445 - protein, 9 aa, Artificial sequence
  Protein classification predicting sequence
GEGKDLAFV

SEQ ID NO: 65446 - protein, 27 aa, Artificial sequence
  Protein classification predicting sequence
QAHTLYEGKYPLVSALSRPLIAKKLVE

SEQ ID NO: 65447 - protein, 14 aa, Artificial sequence
  Protein classification predicting sequence
SALSRPLIAKKLVE

SEQ ID NO: 65448 - protein, 6 aa, Artificial sequence
  Protein classification predicting sequence
LEDPWA

SEQ ID NO: 65449 - protein, 7 aa, Artificial sequence
  Protein classification predicting sequence
HGVGRID

SEQ ID NO: 65450 - protein, 7 aa, Artificial sequence
  Protein classification predicting sequence
EVAHFKP

SEQ ID NO: 65451 - protein, 10 aa, Artificial sequence
  Protein classification predicting sequence
LYDEKLATYT

SEQ ID NO: 65452 - protein, 12 aa, Artificial sequence
  Protein classification predicting sequence
DQNLWGRSNECG

SEQ ID NO: 65453 - protein, 11 aa, Artificial sequence
  Protein classification predicting sequence
AGKHGVGRIDH

SEQ ID NO: 65454 - protein, 21 aa, Artificial sequence
  Protein classification predicting sequence
YPLVSALSRPLIAKKLVEIAE

SEQ ID NO: 65455 - protein, 9 aa, Artificial sequence
  Protein classification predicting sequence
NECGILEDP

SEQ ID NO: 65456 - protein, 7 aa, Artificial sequence
  Protein classification predicting sequence
GAVESYV

SEQ ID NO: 65457 - protein, 6 aa, Artificial sequence
  Protein classification predicting sequence
YPLVSA

SEQ ID NO: 65458 - protein, 10 aa, Artificial sequence
  Protein classification predicting sequence
SIDQNVWGRA

SEQ ID NO: 65459 - protein, 6 aa, Artificial sequence
  Protein classification predicting sequence
GVGRID

SEQ ID NO: 65460 - protein, 9 aa, Artificial sequence
  Protein classification predicting sequence
RLVGIKSRE

SEQ ID NO: 65461 - protein, 36 aa, Artificial sequence
  Protein classification predicting sequence
GIAFSGGLDTSAALLWMRQKGAVPYAYTANLGQPDE

SEQ ID NO: 65462 - protein, 7 aa, Artificial sequence
  Protein classification predicting sequence
SGGLDTS

SEQ ID NO: 65463 - protein, 6 aa, Artificial sequence
  Protein classification predicting sequence
IPRRAM

SEQ ID NO: 65464 - protein, 8 aa, Artificial sequence
  Protein classification predicting sequence
FIDELGGR

SEQ ID NO: 65465 - protein, 20 aa, Artificial sequence
  Protein classification predicting sequence
IAYERLVTGIHNEDTIEQYR

SEQ ID NO: 65466 - protein, 7 aa, Artificial sequence
  Protein classification predicting sequence
DTREKLF

SEQ ID NO: 65467 - protein, 60 aa, Artificial sequence
  Protein classification predicting sequence
KGSVVLAYSGGLDTSCILVWLKEQGYDVIAYLANIGQKEDFEEARKKALKLGAKKVFIED

SEQ ID NO: 65468 - protein, 10 aa, Artificial sequence
  Protein classification predicting sequence
HGATGKGNDQ

SEQ ID NO: 65469 - protein, 15 aa, Artificial sequence
  Protein classification predicting sequence
GRNDLMEYAKQHGIP

SEQ ID NO: 65470 - protein, 20 aa, Artificial sequence
  Protein classification predicting sequence
DATGFININSLRLKEYHRLQ

SEQ ID NO: 65471 - protein, 17 aa, Artificial sequence
  Protein classification predicting sequence
GIAFSGGLDTSAALLWM

SEQ ID NO: 65472 - protein, 12 aa, Artificial sequence
  Protein classification predicting sequence
YAYTANLGQPDE

SEQ ID NO: 65473 - protein, 14 aa, Artificial sequence
  Protein classification predicting sequence
YKMSAEKAYSTDSN

SEQ ID NO: 65474 - protein, 11 aa, Artificial sequence
  Protein classification predicting sequence
LGATHEAKDLE

SEQ ID NO: 65475 - protein, 15 aa, Artificial sequence
  Protein classification predicting sequence
NLTYAPERLSMEKVE

SEQ ID NO: 65476 - protein, 17 aa, Artificial sequence
  Protein classification predicting sequence
FTPADRIGQLTMRNLDI

SEQ ID NO: 65477 - protein, 13 aa, Artificial sequence
  Protein classification predicting sequence
DRIGQLTMRNLDI

SEQ ID NO: 65478 - protein, 13 aa, Artificial sequence
  Protein classification predicting sequence
KVVLAYSGGLDTS

SEQ ID NO: 65479 - protein, 7 aa, Artificial sequence
  Protein classification predicting sequence
LENPWNQ

SEQ ID NO: 65480 - protein, 6 aa, Artificial sequence
  Protein classification predicting sequence
GMKSRG

SEQ ID NO: 65481 - protein, 7 aa, Artificial sequence
  Protein classification predicting sequence
VVAFVAD

SEQ ID NO: 65482 - protein, 6 aa, Artificial sequence
  Protein classification predicting sequence
KIYSRD

SEQ ID NO: 65483 - protein, 9 aa, Artificial sequence
  Protein classification predicting sequence
ATFGEDEVY

SEQ ID NO: 65484 - protein, 6 aa, Artificial sequence
  Protein classification predicting sequence
WSFKSR

SEQ ID NO: 65485 - protein, 6 aa, Artificial sequence
  Protein classification predicting sequence
EGGVLE

SEQ ID NO: 65486 - protein, 14 aa, Artificial sequence
  Protein classification predicting sequence
GIAFSGGLDTSAAL

SEQ ID NO: 65487 - protein, 17 aa, Artificial sequence
  Protein classification predicting sequence
KGAVPYAYTANLGQPDE

SEQ ID NO: 65488 - protein, 15 aa, Artificial sequence
  Protein classification predicting sequence
DCRAQLVAEGIAALQ

SEQ ID NO: 65489 - protein, 7 aa, Artificial sequence
  Protein classification predicting sequence
TYFNTTP

SEQ ID NO: 65490 - protein, 26 aa, Artificial sequence
  Protein classification predicting sequence
GRAVTGTMLVAAMKEDGVNIWGDGST

SEQ ID NO: 65491 - protein, 8 aa, Artificial sequence
  Protein classification predicting sequence
PIMGVAFW

SEQ ID NO: 65492 - protein, 43 aa, Artificial sequence
  Protein classification predicting sequence
VELLLEANRIGGRHGLGMSDQIENRIIEAKSRGIYEAPGLALL

SEQ ID NO: 65493 - protein, 24 aa, Artificial sequence
  Protein classification predicting sequence
IAYERLVTGIHNEDTIEQYRENGR

SEQ ID NO: 65494 - protein, 7 aa, Artificial sequence
  Protein classification predicting sequence
SALPQIK

SEQ ID NO: 65495 - protein, 8 aa, Artificial sequence
  Protein classification predicting sequence
VFPMFRAN

SEQ ID NO: 65496 - protein, 14 aa, Artificial sequence
  Protein classification predicting sequence
YLLGTSIARPLIAK

SEQ ID NO: 65497 - protein, 7 aa, Artificial sequence
  Protein classification predicting sequence
ESITLDR

SEQ ID NO: 65498 - protein, 6 aa, Artificial sequence
  Protein classification predicting sequence
LYKGNV

SEQ ID NO: 65499 - protein, 7 aa, Artificial sequence
  Protein classification predicting sequence
EPARAKA

SEQ ID NO: 65500 - protein, 9 aa, Artificial sequence
  Protein classification predicting sequence
GRLDLVENR

SEQ ID NO: 65501 - protein, 8 aa, Artificial sequence
  Protein classification predicting sequence
IESITLDR

SEQ ID NO: 65502 - protein, 9 aa, Artificial sequence
  Protein classification predicting sequence
YSGGLDTSV

SEQ ID NO: 65503 - protein, 10 aa, Artificial sequence
  Protein classification predicting sequence
VGIKSREIYE

SEQ ID NO: 65504 - protein, 12 aa, Artificial sequence
  Protein classification predicting sequence
VGIKSREIYEAP

SEQ ID NO: 65505 - protein, 18 aa, Artificial sequence
  Protein classification predicting sequence
VKVIAPWREWDLLSREKL

SEQ ID NO: 65506 - protein, 6 aa, Artificial sequence
  Protein classification predicting sequence
GIGRLD

SEQ ID NO: 65507 - protein, 12 aa, Artificial sequence
  Protein classification predicting sequence
LIYTGYWWSPER

SEQ ID NO: 65508 - protein, 10 aa, Artificial sequence
  Protein classification predicting sequence
MLQQMIDASQ

SEQ ID NO: 65509 - protein, 6 aa, Artificial sequence
  Protein classification predicting sequence
SREEEI

SEQ ID NO: 65510 - protein, 8 aa, Artificial sequence
  Protein classification predicting sequence
LGTSLARP

SEQ ID NO: 65511 - protein, 14 aa, Artificial sequence
  Protein classification predicting sequence
HGCTGKGNDQVRFE

SEQ ID NO: 65512 - protein, 17 aa, Artificial sequence
  Protein classification predicting sequence
YPLVSAISRPLIVKHLV

SEQ ID NO: 65513 - protein, 8 aa, Artificial sequence
  Protein classification predicting sequence
AIEELNRR

SEQ ID NO: 65514 - protein, 11 aa, Artificial sequence
  Protein classification predicting sequence
SLYDFNLATYD

SEQ ID NO: 65515 - protein, 11 aa, Artificial sequence
  Protein classification predicting sequence
IVLAYSGGLDT

SEQ ID NO: 65516 - protein, 6 aa, Artificial sequence
  Protein classification predicting sequence
YEAPGA

SEQ ID NO: 65517 - protein, 10 aa, Artificial sequence
  Protein classification predicting sequence
YEAPGAIALI

SEQ ID NO: 65518 - protein, 11 aa, Artificial sequence
  Protein classification predicting sequence
VLAYSGGLDTS

SEQ ID NO: 65519 - protein, 8 aa, Artificial sequence
  Protein classification predicting sequence
FTADLGQG

SEQ ID NO: 65520 - protein, 6 aa, Artificial sequence
  Protein classification predicting sequence
YNGFWF

SEQ ID NO: 65521 - protein, 8 aa, Artificial sequence
  Protein classification predicting sequence
PRYAELIY

SEQ ID NO: 65522 - protein, 6 aa, Artificial sequence
  Protein classification predicting sequence
IGGRHG

SEQ ID NO: 65523 - protein, 7 aa, Artificial sequence
  Protein classification predicting sequence
GRLDMVE

SEQ ID NO: 65524 - protein, 7 aa, Artificial sequence
  Protein classification predicting sequence
VENRFVG

SEQ ID NO: 65525 - protein, 6 aa, Artificial sequence
  Protein classification predicting sequence
VGIKSR

SEQ ID NO: 65526 - protein, 5 aa, Artificial sequence
  Protein classification predicting sequence
ACCLD

SEQ ID NO: 65527 - protein, 7 aa, Artificial sequence
  Protein classification predicting sequence
DVKDEFA

SEQ ID NO: 65528 - protein, 30 aa, Artificial sequence
  Protein classification predicting sequence
LDSPFSIDQNLWGRSNECGILEDPWAAPPE

SEQ ID NO: 65529 - protein, 6 aa, Artificial sequence
  Protein classification predicting sequence
EDLTLV

SEQ ID NO: 65530 - protein, 8 aa, Artificial sequence
  Protein classification predicting sequence
ETQKNVTG

SEQ ID NO: 65531 - protein, 17 aa, Artificial sequence
  Protein classification predicting sequence
VLAYSGGLDTSIILKWL

SEQ ID NO: 65532 - protein, 6 aa, Artificial sequence
  Protein classification predicting sequence
ADLGQG

SEQ ID NO: 65533 - protein, 21 aa, Artificial sequence
  Protein classification predicting sequence
GADAVSHGATGKGNDQVRFEL

SEQ ID NO: 65534 - protein, 15 aa, Artificial sequence
  Protein classification predicting sequence
HGATGKGNDQVRFEL

SEQ ID NO: 65535 - protein, 6 aa, Artificial sequence
  Protein classification predicting sequence
NLLGRS

SEQ ID NO: 65536 - protein, 8 aa, Artificial sequence
  Protein classification predicting sequence
AGENGVGR

SEQ ID NO: 65537 - protein, 7 aa, Artificial sequence
  Protein classification predicting sequence
VENRLVG

SEQ ID NO: 65538 - protein, 15 aa, Artificial sequence
  Protein classification predicting sequence
VENRLVGIKSREIYE

SEQ ID NO: 65539 - protein, 12 aa, Artificial sequence
  Protein classification predicting sequence
YGAENARLIDCR

SEQ ID NO: 65540 - protein, 12 aa, Artificial sequence
  Protein classification predicting sequence
EGIAAIQCGAFH

SEQ ID NO: 65541 - protein, 11 aa, Artificial sequence
  Protein classification predicting sequence
MLRETAQRWVA

SEQ ID NO: 65542 - protein, 11 aa, Artificial sequence
  Protein classification predicting sequence
ILNTESPNLTY

SEQ ID NO: 65543 - protein, 12 aa, Artificial sequence
  Protein classification predicting sequence
DRIGQLTMRNLD

SEQ ID NO: 65544 - protein, 6 aa, Artificial sequence
  Protein classification predicting sequence
SGGLDT

SEQ ID NO: 65545 - protein, 8 aa, Artificial sequence
  Protein classification predicting sequence
ARPVIAKA

SEQ ID NO: 65546 - protein, 7 aa, Artificial sequence
  Protein classification predicting sequence
WSRSIEG

SEQ ID NO: 65547 - protein, 7 aa, Artificial sequence
  Protein classification predicting sequence
AKYHGFQ

SEQ ID NO: 65548 - protein, 19 aa, Artificial sequence
  Protein classification predicting sequence
ALAHGCTGKGNDQLRFEAV

SEQ ID NO: 65549 - protein, 10 aa, Artificial sequence
  Protein classification predicting sequence
RENYEHPAAT

SEQ ID NO: 65550 - protein, 9 aa, Artificial sequence
  Protein classification predicting sequence
CEVVTFTAD

SEQ ID NO: 65551 - protein, 8 aa, Artificial sequence
  Protein classification predicting sequence
YETPGGTI

SEQ ID NO: 65552 - protein, 31 aa, Artificial sequence
  Protein classification predicting sequence
KGQVYILGRESPLSLYNEELVSMNVQGDYEP

SEQ ID NO: 65553 - protein, 9 aa, Artificial sequence
  Protein classification predicting sequence
ARKVGADAL

SEQ ID NO: 65554 - protein, 6 aa, Artificial sequence
  Protein classification predicting sequence
KHGVGR

SEQ ID NO: 65555 - protein, 10 aa, Artificial sequence
  Protein classification predicting sequence
CMDVGEGKDL

SEQ ID NO: 65556 - protein, 8 aa, Artificial sequence
  Protein classification predicting sequence
DVGEGKDL

SEQ ID NO: 65557 - protein, 8 aa, Artificial sequence
  Protein classification predicting sequence
KGNLMYEN

SEQ ID NO: 65558 - protein, 6 aa, Artificial sequence
  Protein classification predicting sequence
APNEAE

SEQ ID NO: 65559 - protein, 7 aa, Artificial sequence
  Protein classification predicting sequence
WSREEEI

SEQ ID NO: 65560 - protein, 10 aa, Artificial sequence
  Protein classification predicting sequence
WSREEEIDYA

SEQ ID NO: 65561 - protein, 7 aa, Artificial sequence
  Protein classification predicting sequence
PINLDSP

SEQ ID NO: 65562 - protein, 8 aa, Artificial sequence
  Protein classification predicting sequence
AHFKPIIE

SEQ ID NO: 65563 - protein, 11 aa, Artificial sequence
  Protein classification predicting sequence
EGRKSPNSLYD

SEQ ID NO: 65564 - protein, 7 aa, Artificial sequence
  Protein classification predicting sequence
RGIYEAP

SEQ ID NO: 65565 - protein, 8 aa, Artificial sequence
  Protein classification predicting sequence
AGKHGVGR

SEQ ID NO: 65566 - protein, 7 aa, Artificial sequence
  Protein classification predicting sequence
YEGKYPL

SEQ ID NO: 65567 - protein, 13 aa, Artificial sequence
  Protein classification predicting sequence
TLITAHKELEDLT

SEQ ID NO: 65568 - protein, 16 aa, Artificial sequence
  Protein classification predicting sequence
RVKLFKGHAIVEGRKS

SEQ ID NO: 65569 - protein, 7 aa, Artificial sequence
  Protein classification predicting sequence
QKDAEGF

SEQ ID NO: 65570 - protein, 11 aa, Artificial sequence
  Protein classification predicting sequence
LAYSGGLDTSV

SEQ ID NO: 65571 - protein, 32 aa, Artificial sequence
  Protein classification predicting sequence
YEGEYLLGTSIARPLIAKRLIEIANETGADAI

SEQ ID NO: 65572 - protein, 8 aa, Artificial sequence
  Protein classification predicting sequence
DVGQPEEE

SEQ ID NO: 65573 - protein, 8 aa, Artificial sequence
  Protein classification predicting sequence
EDRVLGLK

SEQ ID NO: 65574 - protein, 7 aa, Artificial sequence
  Protein classification predicting sequence
ANAVYEG

SEQ ID NO: 65575 - protein, 17 aa, Artificial sequence
  Protein classification predicting sequence
EGASAIAHGCTGKGNDQ

SEQ ID NO: 65576 - protein, 9 aa, Artificial sequence
  Protein classification predicting sequence
PEDAFEWTK

SEQ ID NO: 65577 - protein, 7 aa, Artificial sequence
  Protein classification predicting sequence
KSREIYE

SEQ ID NO: 65578 - protein, 15 aa, Artificial sequence
  Protein classification predicting sequence
KVVVAYSGGLDTSVI

SEQ ID NO: 65579 - protein, 11 aa, Artificial sequence
  Protein classification predicting sequence
AYSGGLDTSVI

SEQ ID NO: 65580 - protein, 7 aa, Artificial sequence
  Protein classification predicting sequence
IAKAQVE

SEQ ID NO: 65581 - protein, 10 aa, Artificial sequence
  Protein classification predicting sequence
HGCTGKGNDQ

SEQ ID NO: 65582 - protein, 12 aa, Artificial sequence
  Protein classification predicting sequence
GFIRLYSLSSRI

SEQ ID NO: 65583 - protein, 7 aa, Artificial sequence
  Protein classification predicting sequence
VYDQSHA

SEQ ID NO: 65584 - protein, 7 aa, Artificial sequence
  Protein classification predicting sequence
DLGQGGE

SEQ ID NO: 65585 - protein, 11 aa, Artificial sequence
  Protein classification predicting sequence
RQRALDCGAVE

SEQ ID NO: 65586 - protein, 53 aa, Artificial sequence
  Protein classification predicting sequence
LAPVRDYAWTREKAIAFAEENAIPINVTKRSPFSIDQNVWGRAVETGFLEHLW

SEQ ID NO: 65587 - protein, 16 aa, Artificial sequence
  Protein classification predicting sequence
RWAELVYDGLWYSPLK

SEQ ID NO: 65588 - protein, 8 aa, Artificial sequence
  Protein classification predicting sequence
GLWYSPLK

SEQ ID NO: 65589 - protein, 7 aa, Artificial sequence
  Protein classification predicting sequence
TQQHVTG

SEQ ID NO: 65590 - protein, 15 aa, Artificial sequence
  Protein classification predicting sequence
VAHGCTGKGNDQVRF

SEQ ID NO: 65591 - protein, 17 aa, Artificial sequence
  Protein classification predicting sequence
VAHGCTGKGNDQVRFEV

SEQ ID NO: 65592 - protein, 9 aa, Artificial sequence
  Protein classification predicting sequence
VNIWGDGST

SEQ ID NO: 65593 - protein, 16 aa, Artificial sequence
  Protein classification predicting sequence
KGNDIERFYRYGLLTN

SEQ ID NO: 65594 - protein, 8 aa, Artificial sequence
  Protein classification predicting sequence
EYADPVEL

SEQ ID NO: 65595 - protein, 21 aa, Artificial sequence
  Protein classification predicting sequence
VENRYVGMKSRGCYETPGGTI

SEQ ID NO: 65596 - protein, 13 aa, Artificial sequence
  Protein classification predicting sequence
LAYSGGLDTSVAI

SEQ ID NO: 65597 - protein, 21 aa, Artificial sequence
  Protein classification predicting sequence
LAYSGGLDTSVAISWIGKETG

SEQ ID NO: 65598 - protein, 20 aa, Artificial sequence
  Protein classification predicting sequence
APVRDYAWTREKAIAFAEEN

SEQ ID NO: 65599 - protein, 7 aa, Artificial sequence
  Protein classification predicting sequence
VTIEREL

SEQ ID NO: 65600 - protein, 7 aa, Artificial sequence
  Protein classification predicting sequence
VGAIKSY

SEQ ID NO: 65601 - protein, 8 aa, Artificial sequence
  Protein classification predicting sequence
SALSRPLI

SEQ ID NO: 65602 - protein, 17 aa, Artificial sequence
  Protein classification predicting sequence
GRIDHVENRLVGIKSRE

SEQ ID NO: 65603 - protein, 6 aa, Artificial sequence
  Protein classification predicting sequence
AHQELE

SEQ ID NO: 65604 - protein, 7 aa, Artificial sequence
  Protein classification predicting sequence
GLWYSPL

SEQ ID NO: 65605 - protein, 11 aa, Artificial sequence
  Protein classification predicting sequence
ELGGRHEMSEF

SEQ ID NO: 65606 - protein, 11 aa, Artificial sequence
  Protein classification predicting sequence
PVALNGKTFSD

SEQ ID NO: 65607 - protein, 11 aa, Artificial sequence
  Protein classification predicting sequence
GIHNEDTIEQY

SEQ ID NO: 65608 - protein, 13 aa, Artificial sequence
  Protein classification predicting sequence
ELRRGNDYSILNT

SEQ ID NO: 65609 - protein, 6 aa, Artificial sequence
  Protein classification predicting sequence
IPWLKE

SEQ ID NO: 65610 - protein, 8 aa, Artificial sequence
  Protein classification predicting sequence
APWREWDL

SEQ ID NO: 65611 - protein, 10 aa, Artificial sequence
  Protein classification predicting sequence
DCWVWTVDPE

SEQ ID NO: 65612 - protein, 9 aa, Artificial sequence
  Protein classification predicting sequence
GRIDIVENR

SEQ ID NO: 65613 - protein, 6 aa, Artificial sequence
  Protein classification predicting sequence
NSLYSE

SEQ ID NO: 65614 - protein, 8 aa, Artificial sequence
  Protein classification predicting sequence
GFIRLYSL

SEQ ID NO: 65615 - protein, 5 aa, Artificial sequence
  Protein classification predicting sequence
CWVWT

SEQ ID NO: 65616 - protein, 13 aa, Artificial sequence
  Protein classification predicting sequence
EALRAVEQLVLDK

SEQ ID NO: 65617 - protein, 12 aa, Artificial sequence
  Protein classification predicting sequence
SHAGGFIRLYSL

SEQ ID NO: 65618 - protein, 11 aa, Artificial sequence
  Protein classification predicting sequence
YPLSTALARPL

SEQ ID NO: 65619 - protein, 7 aa, Artificial sequence
  Protein classification predicting sequence
WGRSIEG

SEQ ID NO: 65620 - protein, 7 aa, Artificial sequence
  Protein classification predicting sequence
VILKAHK

SEQ ID NO: 65621 - protein, 5 aa, Artificial sequence
  Protein classification predicting sequence
YNGLW

SEQ ID NO: 65622 - protein, 6 aa, Artificial sequence
  Protein classification predicting sequence
YNGLWF

SEQ ID NO: 65623 - protein, 9 aa, Artificial sequence
  Protein classification predicting sequence
KVVLAYSGG

SEQ ID NO: 65624 - protein, 13 aa, Artificial sequence
  Protein classification predicting sequence
YPLSTALARPLIA

SEQ ID NO: 65625 - protein, 6 aa, Artificial sequence
  Protein classification predicting sequence
IESITL

SEQ ID NO: 65626 - protein, 6 aa, Artificial sequence
  Protein classification predicting sequence
GFWFSP

SEQ ID NO: 65627 - protein, 9 aa, Artificial sequence
  Protein classification predicting sequence
EWGVEEVIT

SEQ ID NO: 65628 - protein, 7 aa, Artificial sequence
  Protein classification predicting sequence
DMIEDRV

SEQ ID NO: 65629 - protein, 6 aa, Artificial sequence
  Protein classification predicting sequence
WFGPLK

SEQ ID NO: 65630 - protein, 14 aa, Artificial sequence
  Protein classification predicting sequence
KKVVLAYSGGLDTS

SEQ ID NO: 65631 - protein, 7 aa, Artificial sequence
  Protein classification predicting sequence
SPENAPD

SEQ ID NO: 65632 - protein, 7 aa, Artificial sequence
  Protein classification predicting sequence
EEDMWRW

SEQ ID NO: 65633 - protein, 8 aa, Artificial sequence
  Protein classification predicting sequence
KGNDQVRF

SEQ ID NO: 65634 - protein, 9 aa, Artificial sequence
  Protein classification predicting sequence
KGNDQVRFD

SEQ ID NO: 65635 - protein, 9 aa, Artificial sequence
  Protein classification predicting sequence
KIIAPARIW

SEQ ID NO: 65636 - protein, 6 aa, Artificial sequence
  Protein classification predicting sequence
ENRLVG

SEQ ID NO: 65637 - protein, 13 aa, Artificial sequence
  Protein classification predicting sequence
PYAYTANLGQPDE

SEQ ID NO: 65638 - protein, 7 aa, Artificial sequence
  Protein classification predicting sequence
EGIAAIQ

SEQ ID NO: 65639 - protein, 7 aa, Artificial sequence
  Protein classification predicting sequence
GAFHIST

SEQ ID NO: 65640 - protein, 7 aa, Artificial sequence
  Protein classification predicting sequence
IWGDGST

SEQ ID NO: 65641 - protein, 23 aa, Artificial sequence
  Protein classification predicting sequence
LKIYKPWLDQTFIDELGGRAEMS

SEQ ID NO: 65642 - protein, 8 aa, Artificial sequence
  Protein classification predicting sequence
IVNPIMGV

SEQ ID NO: 65643 - protein, 6 aa, Artificial sequence
  Protein classification predicting sequence
RAVTGT

SEQ ID NO: 65644 - protein, 6 aa, Artificial sequence
  Protein classification predicting sequence
KSQERV

SEQ ID NO: 65645 - protein, 41 aa, Artificial sequence
  Protein classification predicting sequence
KDVKKVVLAYSGGLDTSIILKWLQTELGAEVVTFTADLGQG

SEQ ID NO: 65646 - protein, 7 aa, Artificial sequence
  Protein classification predicting sequence
DVREEFV

SEQ ID NO: 65647 - protein, 12 aa, Artificial sequence
  Protein classification predicting sequence
YLLGTSIARPLI

SEQ ID NO: 65648 - protein, 12 aa, Artificial sequence
  Protein classification predicting sequence
AHRAIESITLDR

SEQ ID NO: 65649 - protein, 8 aa, Artificial sequence
  Protein classification predicting sequence
SPERLMLQ

SEQ ID NO: 65650 - protein, 5 aa, Artificial sequence
  Protein classification predicting sequence
IAPWR

SEQ ID NO: 65651 - protein, 10 aa, Artificial sequence
  Protein classification predicting sequence
VGMKSRGVYE

SEQ ID NO: 65652 - protein, 7 aa, Artificial sequence
  Protein classification predicting sequence
YEGKYLL

SEQ ID NO: 65653 - protein, 6 aa, Artificial sequence
  Protein classification predicting sequence
HGRQLG

SEQ ID NO: 65654 - protein, 9 aa, Artificial sequence
  Protein classification predicting sequence
LLYQGRWFD

SEQ ID NO: 65655 - protein, 26 aa, Artificial sequence
  Protein classification predicting sequence
LNSSVKIVNPIMGVKFWDESVKIPAE

SEQ ID NO: 65656 - protein, 30 aa, Artificial sequence
  Protein classification predicting sequence
LQRWVASQITGEVTLELRRGNDYSILNTVS

SEQ ID NO: 65657 - protein, 31 aa, Artificial sequence
  Protein classification predicting sequence
SVFSPDDRIGQLTMRNLDITDTREKLFGYAK

SEQ ID NO: 65658 - protein, 6 aa, Artificial sequence
  Protein classification predicting sequence
ARPIIA

SEQ ID NO: 65659 - protein, 8 aa, Artificial sequence
  Protein classification predicting sequence
SYEAGILE

SEQ ID NO: 65660 - protein, 6 aa, Artificial sequence
  Protein classification predicting sequence
GILEDP

SEQ ID NO: 65661 - protein, 7 aa, Artificial sequence
  Protein classification predicting sequence
YLAERNI

SEQ ID NO: 65662 - protein, 19 aa, Artificial sequence
  Protein classification predicting sequence
ENRLVGMKSRGCYETPGGT

SEQ ID NO: 65663 - protein, 14 aa, Artificial sequence
  Protein classification predicting sequence
NSLYSEAFATFGED

SEQ ID NO: 65664 - protein, 14 aa, Artificial sequence
  Protein classification predicting sequence
EVVTFTADLGQGEE

SEQ ID NO: 65665 - protein, 13 aa, Artificial sequence
  Protein classification predicting sequence
GEAPFSVDANLLH

SEQ ID NO: 65666 - protein, 10 aa, Artificial sequence
  Protein classification predicting sequence
SSEGKVLEDP

SEQ ID NO: 65667 - protein, 21 aa, Artificial sequence
  Protein classification predicting sequence
KALDMGAVECHIIDATKEFSD

SEQ ID NO: 65668 - protein, 8 aa, Artificial sequence
  Protein classification predicting sequence
ADEIILTF

SEQ ID NO: 65669 - protein, 9 aa, Artificial sequence
  Protein classification predicting sequence
GRIDHVENR

SEQ ID NO: 65670 - protein, 17 aa, Artificial sequence
  Protein classification predicting sequence
GDVRIKLFKGNAIVNGR

SEQ ID NO: 65671 - protein, 40 aa, Artificial sequence
  Protein classification predicting sequence
KIVLAYSGGLDTSVAVQWLIDKGYDVVACCLDVGEGKDLD

SEQ ID NO: 65672 - protein, 25 aa, Artificial sequence
  Protein classification predicting sequence
GIAHGCTGKGNDQVRFEVAIKALNP

SEQ ID NO: 65673 - protein, 31 aa, Artificial sequence
  Protein classification predicting sequence
LKAFAPVREWAWSREEEIDYAIKHNIPVSIN

SEQ ID NO: 65674 - protein, 35 aa, Artificial sequence
  Protein classification predicting sequence
DSPYSIDQNLWGRANECGILEDPYAAPPEDAFDLT

SEQ ID NO: 65675 - protein, 25 aa, Artificial sequence
  Protein classification predicting sequence
AEVILKAHKALETITLTKDVAHFKP

SEQ ID NO: 65676 - protein, 24 aa, Artificial sequence
  Protein classification predicting sequence
YNGLWFSPLTDSLKLFIDSTQQYV

SEQ ID NO: 65677 - protein, 21 aa, Artificial sequence
  Protein classification predicting sequence
SPYTLYDEKLATYTKEDAFNQ

SEQ ID NO: 65678 - protein, 10 aa, Artificial sequence
  Protein classification predicting sequence
YPLVSALSRP

SEQ ID NO: 65679 - protein, 14 aa, Artificial sequence
  Protein classification predicting sequence
KGNDIERFYRYGLL

SEQ ID NO: 65680 - protein, 7 aa, Artificial sequence
  Protein classification predicting sequence
IYKPWLD

SEQ ID NO: 65681 - protein, 7 aa, Artificial sequence
  Protein classification predicting sequence
EKAYSTD

SEQ ID NO: 65682 - protein, 6 aa, Artificial sequence
  Protein classification predicting sequence
IHNEDT

SEQ ID NO: 65683 - protein, 7 aa, Artificial sequence
  Protein classification predicting sequence
RLVDCRA

SEQ ID NO: 65684 - protein, 36 aa, Artificial sequence
  Protein classification predicting sequence
IGGRHGLGMSDQIENRIIEAKSRGIYEAPGMALLHI

SEQ ID NO: 65685 - protein, 14 aa, Artificial sequence
  Protein classification predicting sequence
YEQKYPLVSALSRP

SEQ ID NO: 65686 - protein, 7 aa, Artificial sequence
  Protein classification predicting sequence
KKLVEIA

SEQ ID NO: 65687 - protein, 9 aa, Artificial sequence
  Protein classification predicting sequence
WKWSREEEI

SEQ ID NO: 65688 - protein, 23 aa, Artificial sequence
  Protein classification predicting sequence
AGKHGVGRIDHVENRLVGIKSRE

SEQ ID NO: 65689 - protein, 27 aa, Artificial sequence
  Protein classification predicting sequence
TLVREVSHFKPILENELSNLIYNALWF

SEQ ID NO: 65690 - protein, 7 aa, Artificial sequence
  Protein classification predicting sequence
GLPTQVN

SEQ ID NO: 65691 - protein, 21 aa, Artificial sequence
  Protein classification predicting sequence
GATTIAHGCTGKGNDQVRFEV

SEQ ID NO: 65692 - protein, 12 aa, Artificial sequence
  Protein classification predicting sequence
DQNLWGRANECG

SEQ ID NO: 65693 - protein, 16 aa, Artificial sequence
  Protein classification predicting sequence
LENPWNQAPEEAFGIT

SEQ ID NO: 65694 - protein, 7 aa, Artificial sequence
  Protein classification predicting sequence
KSREVYE

SEQ ID NO: 65695 - protein, 7 aa, Artificial sequence
  Protein classification predicting sequence
KHYTIDA

SEQ ID NO: 65696 - protein, 16 aa, Artificial sequence
  Protein classification predicting sequence
LAYSGGVDTSVCIPYL

SEQ ID NO: 65697 - protein, 12 aa, Artificial sequence
  Protein classification predicting sequence
MSREETIAYGER

SEQ ID NO: 65698 - protein, 7 aa, Artificial sequence
  Protein classification predicting sequence
VGQKDDF

SEQ ID NO: 65699 - protein, 8 aa, Artificial sequence
  Protein classification predicting sequence
IARPLIAK

SEQ ID NO: 65700 - protein, 10 aa, Artificial sequence
  Protein classification predicting sequence
KSRGVYETPG

SEQ ID NO: 65701 - protein, 7 aa, Artificial sequence
  Protein classification predicting sequence
GFWFSPE

SEQ ID NO: 65702 - protein, 12 aa, Artificial sequence
  Protein classification predicting sequence
KIVLAYSGGLDT

SEQ ID NO: 65703 - protein, 15 aa, Artificial sequence
  Protein classification predicting sequence
PYSMDANLLHISYEG

SEQ ID NO: 65704 - protein, 7 aa, Artificial sequence
  Protein classification predicting sequence
EGGVLED

SEQ ID NO: 65705 - protein, 7 aa, Artificial sequence
  Protein classification predicting sequence
GTILYHA

SEQ ID NO: 65706 - protein, 6 aa, Artificial sequence
  Protein classification predicting sequence
YDQKDA

SEQ ID NO: 65707 - protein, 9 aa, Artificial sequence
  Protein classification predicting sequence
AYSGGLDTS

SEQ ID NO: 65708 - protein, 9 aa, Artificial sequence
  Protein classification predicting sequence
IIPWLKENY

SEQ ID NO: 65709 - protein, 14 aa, Artificial sequence
  Protein classification predicting sequence
HGATGKGNDQVRFE

SEQ ID NO: 65710 - protein, 11 aa, Artificial sequence
  Protein classification predicting sequence
TGKGNDQVRFE

SEQ ID NO: 65711 - protein, 9 aa, Artificial sequence
  Protein classification predicting sequence
YNGLWFSPL

SEQ ID NO: 65712 - protein, 8 aa, Artificial sequence
  Protein classification predicting sequence
IKALNPSL

SEQ ID NO: 65713 - protein, 33 aa, Artificial sequence
  Protein classification predicting sequence
KGAKHGVGRIDIVENRLVGMKSRGCYETPGGTI

SEQ ID NO: 65714 - protein, 10 aa, Artificial sequence
  Protein classification predicting sequence
EELEGIEAKA

SEQ ID NO: 65715 - protein, 7 aa, Artificial sequence
  Protein classification predicting sequence
PTLKTGA

SEQ ID NO: 65716 - protein, 17 aa, Artificial sequence
  Protein classification predicting sequence
VGADALCHGCTGKGNDQ

SEQ ID NO: 65717 - protein, 11 aa, Artificial sequence
  Protein classification predicting sequence
WTVDPEQAPNE

SEQ ID NO: 65718 - protein, 28 aa, Artificial sequence
  Protein classification predicting sequence
TWNAPNEDCWVWTVDPEQAPNEAEYVTL

SEQ ID NO: 65719 - protein, 18 aa, Artificial sequence
  Protein classification predicting sequence
YEGEYLLGTSIARPLIAK

SEQ ID NO: 65720 - protein, 6 aa, Artificial sequence
  Protein classification predicting sequence
WFSPER

SEQ ID NO: 65721 - protein, 9 aa, Artificial sequence
  Protein classification predicting sequence
GFIKLNALR

SEQ ID NO: 65722 - protein, 7 aa, Artificial sequence
  Protein classification predicting sequence
GNDQVRF

SEQ ID NO: 65723 - protein, 10 aa, Artificial sequence
  Protein classification predicting sequence
GNDQVRFDLA

SEQ ID NO: 65724 - protein, 9 aa, Artificial sequence
  Protein classification predicting sequence
RGFGVRAKQ

SEQ ID NO: 65725 - protein, 7 aa, Artificial sequence
  Protein classification predicting sequence
AMEYGAE

SEQ ID NO: 65726 - protein, 7 aa, Artificial sequence
  Protein classification predicting sequence
ARLIDCR

SEQ ID NO: 65727 - protein, 27 aa, Artificial sequence
  Protein classification predicting sequence
ARLIDCRKQLVAEGIAAIQCGAFHNTT

SEQ ID NO: 65728 - protein, 25 aa, Artificial sequence
  Protein classification predicting sequence
IYKPWLDTDFIDELGGRHEMSEFMI

SEQ ID NO: 65729 - protein, 21 aa, Artificial sequence
  Protein classification predicting sequence
EKAYSTDSNMLGATHEAKDLE

SEQ ID NO: 65730 - protein, 19 aa, Artificial sequence
  Protein classification predicting sequence
LNSSVKIVNPIMGVKFWDE

SEQ ID NO: 65731 - protein, 9 aa, Artificial sequence
  Protein classification predicting sequence
AEEVTVRFE

SEQ ID NO: 65732 - protein, 12 aa, Artificial sequence
  Protein classification predicting sequence
LGRLLYQGRWFD

SEQ ID NO: 65733 - protein, 15 aa, Artificial sequence
  Protein classification predicting sequence
LGRLLYQGRWFDPQA

SEQ ID NO: 65734 - protein, 42 aa, Artificial sequence
  Protein classification predicting sequence
NLTYKPERLTMEKGDSVFSPDDRIGQLTMRNLDITDTREKLF

SEQ ID NO: 65735 - protein, 7 aa, Artificial sequence
  Protein classification predicting sequence
ANALYEG

SEQ ID NO: 65736 - protein, 9 aa, Artificial sequence
  Protein classification predicting sequence
RFELGYYAL

SEQ ID NO: 65737 - protein, 9 aa, Artificial sequence
  Protein classification predicting sequence
GRKSPNSLY

SEQ ID NO: 65738 - protein, 12 aa, Artificial sequence
  Protein classification predicting sequence
VDASGSMALNRM

SEQ ID NO: 65739 - protein, 8 aa, Artificial sequence
  Protein classification predicting sequence
PLGATEDR

SEQ ID NO: 65740 - protein, 6 aa, Artificial sequence
  Protein classification predicting sequence
EREGIS

SEQ ID NO: 65741 - protein, 8 aa, Artificial sequence
  Protein classification predicting sequence
VDASGSMA

SEQ ID NO: 65742 - protein, 6 aa, Artificial sequence
  Protein classification predicting sequence
VDASGS

SEQ ID NO: 65743 - protein, 8 aa, Artificial sequence
  Protein classification predicting sequence
PFTAIVGQ

SEQ ID NO: 65744 - protein, 8 aa, Artificial sequence
  Protein classification predicting sequence
RHPARFVL

SEQ ID NO: 65745 - protein, 19 aa, Artificial sequence
  Protein classification predicting sequence
GSGNPEEGELRPQLLDRFG

SEQ ID NO: 65746 - protein, 6 aa, Artificial sequence
  Protein classification predicting sequence
AIVGQE

SEQ ID NO: 65747 - protein, 10 aa, Artificial sequence
  Protein classification predicting sequence
LRPQLLDRFG

SEQ ID NO: 65748 - protein, 8 aa, Artificial sequence
  Protein classification predicting sequence
PLGVTEDR

SEQ ID NO: 65749 - protein, 8 aa, Artificial sequence
  Protein classification predicting sequence
EGAGGLLV

SEQ ID NO: 65750 - protein, 6 aa, Artificial sequence
  Protein classification predicting sequence
GTINHT

SEQ ID NO: 65751 - protein, 24 aa, Artificial sequence
  Protein classification predicting sequence
RYFVTGTDTEVGKTVASCALLQAA

SEQ ID NO: 65752 - protein, 15 aa, Artificial sequence
  Protein classification predicting sequence
WVLVEGAGGWFTPLS

SEQ ID NO: 65753 - protein, 9 aa, Artificial sequence
  Protein classification predicting sequence
GTDTDVGKT

SEQ ID NO: 65754 - protein, 7 aa, Artificial sequence
  Protein classification predicting sequence
LGTLNHT

SEQ ID NO: 65755 - protein, 6 aa, Artificial sequence
  Protein classification predicting sequence
KPVASG

SEQ ID NO: 65756 - protein, 7 aa, Artificial sequence
  Protein classification predicting sequence
LGCINHA

SEQ ID NO: 65757 - protein, 13 aa, Artificial sequence
  Protein classification predicting sequence
NPYTFAEPTSPHI

SEQ ID NO: 65758 - protein, 6 aa, Artificial sequence
  Protein classification predicting sequence
TFADWV

SEQ ID NO: 65759 - protein, 7 aa, Artificial sequence
  Protein classification predicting sequence
TEVGKTV

SEQ ID NO: 65760 - protein, 6 aa, Artificial sequence
  Protein classification predicting sequence
RNSDAL

SEQ ID NO: 65761 - protein, 9 aa, Artificial sequence
  Protein classification predicting sequence
SPHIAAKHE

SEQ ID NO: 65762 - protein, 8 aa, Artificial sequence
  Protein classification predicting sequence
PKLGEIPY

SEQ ID NO: 65763 - protein, 11 aa, Artificial sequence
  Protein classification predicting sequence
TIGYKPVAAGS

SEQ ID NO: 65764 - protein, 11 aa, Artificial sequence
  Protein classification predicting sequence
NEDALALQAAS

SEQ ID NO: 65765 - protein, 11 aa, Artificial sequence
  Protein classification predicting sequence
EGAGGWFTPLS

SEQ ID NO: 65766 - protein, 7 aa, Artificial sequence
  Protein classification predicting sequence
MYSIKMR

SEQ ID NO: 65767 - protein, 27 aa, Artificial sequence
  Protein classification predicting sequence
AKIGYHRLFDIKPVNTRYGGRIIFVDD

SEQ ID NO: 65768 - protein, 47 aa, Artificial sequence
  Protein classification predicting sequence
HISGAETICEFDKIEQTVQRFYNKGFFHENGQPDFLNIKIQKIMEPI

SEQ ID NO: 65769 - protein, 20 aa, Artificial sequence
  Protein classification predicting sequence
QIKALQIIEDDKANLQHLTQ

SEQ ID NO: 65770 - protein, 39 aa, Artificial sequence
  Protein classification predicting sequence
CGVTEQALNQGMTYIKNETVYTGAIILSAISGKRLDSFG

SEQ ID NO: 65771 - protein, 9 aa, Artificial sequence
  Protein classification predicting sequence
YTGAIILSA

SEQ ID NO: 65772 - protein, 8 aa, Artificial sequence
  Protein classification predicting sequence
ELCVSDDL

SEQ ID NO: 65773 - protein, 6 aa, Artificial sequence
  Protein classification predicting sequence
MTGYQE

SEQ ID NO: 65774 - protein, 10 aa, Artificial sequence
  Protein classification predicting sequence
VTLTYPHIGN

SEQ ID NO: 65775 - protein, 15 aa, Artificial sequence
  Protein classification predicting sequence
GLIIRDLPLLHSNFR

SEQ ID NO: 65776 - protein, 9 aa, Artificial sequence
  Protein classification predicting sequence
SNFRSEQSL

SEQ ID NO: 65777 - protein, 8 aa, Artificial sequence
  Protein classification predicting sequence
IDTRKLTR

SEQ ID NO: 65778 - protein, 6 aa, Artificial sequence
  Protein classification predicting sequence
NILRML

SEQ ID NO: 65779 - protein, 7 aa, Artificial sequence
  Protein classification predicting sequence
NILRMLA

SEQ ID NO: 65780 - protein, 8 aa, Artificial sequence
  Protein classification predicting sequence
LTVVPAQT

SEQ ID NO: 65781 - protein, 13 aa, Artificial sequence
  Protein classification predicting sequence
PDGVFLSNGPGDP

SEQ ID NO: 65782 - protein, 14 aa, Artificial sequence
  Protein classification predicting sequence
VTHRSLFDGTNQGI

SEQ ID NO: 65783 - protein, 8 aa, Artificial sequence
  Protein classification predicting sequence
FNTALTGY

SEQ ID NO: 65784 - protein, 8 aa, Artificial sequence
  Protein classification predicting sequence
EILTDPSY

SEQ ID NO: 65785 - protein, 7 aa, Artificial sequence
  Protein classification predicting sequence
GQIVTFT

SEQ ID NO: 65786 - protein, 8 aa, Artificial sequence
  Protein classification predicting sequence
GVKRNILR

SEQ ID NO: 65787 - protein, 8 aa, Artificial sequence
  Protein classification predicting sequence
FGICLGHQ

SEQ ID NO: 65788 - protein, 11 aa, Artificial sequence
  Protein classification predicting sequence
SLFDGTNCGLR

SEQ ID NO: 65789 - protein, 8 aa, Artificial sequence
  Protein classification predicting sequence
HPEASPGP

SEQ ID NO: 65790 - protein, 6 aa, Artificial sequence
  Protein classification predicting sequence
LTDPSY

SEQ ID NO: 65791 - protein, 10 aa, Artificial sequence
  Protein classification predicting sequence
LTDPSYKGQI

SEQ ID NO: 65792 - protein, 8 aa, Artificial sequence
  Protein classification predicting sequence
GQIVVMTY

SEQ ID NO: 65793 - protein, 7 aa, Artificial sequence
  Protein classification predicting sequence
GIDTRAL

SEQ ID NO: 65794 - protein, 6 aa, Artificial sequence
  Protein classification predicting sequence
TSMTGY

SEQ ID NO: 65795 - protein, 7 aa, Artificial sequence
  Protein classification predicting sequence
SNGPGDP

SEQ ID NO: 65796 - protein, 6 aa, Artificial sequence
  Protein classification predicting sequence
NQPVKD

SEQ ID NO: 65797 - protein, 6 aa, Artificial sequence
  Protein classification predicting sequence
NHPVKN
